United States Patent Application Publication US 2018/0305689 A1 - sequence listing, part 111

SEQ ID NO: 1564085 - DNA, 4001 bp, Homo sapiens
aacaataaattctgtagggctgtgatagggtgcataagtgtggcacagggtttggtcaggaacagattttaaagggccatgaaatcatttggattttattccatgggcttaaagaagttactaaaggttcttaagtatgtagatgactcagtcggattttcatattagaaaaattaaatctgatagcatacaaggagaagagagtcagacagaccacacagaaggctcctgcaatagtccagaaaagatggtgtatatatgtcacaaagttcctgaatatcaacttcttacctttaccttcatggttttgacgtatctaacacgtcttacctttttcttcatggctgtatttggtagcacccacctgcagatataaaccaaaaaacagtttccatgatccaattcccttagaaattgaaattaatgaagtataaataaacatggaggtacaaaagagcatgtttagtacaacggctgagtacagctgtgtgtgtgggacctcagatgaatagaggtcccattttcctaaattataaaactgtgtgtatactctctatctcctaattagaagttcaagagagaactcctaggaagatttatttaggaatacaaatgagccattaaaattcaagattcaatttttcatcatcttaatcaaagcaacacagctgctttaatcaaacaatatcttctatttctaaaaaaacagaatatattgatatcctctacttgaggactgagtattgaatatcttctatgtataaaaaacattcagcctcctaattttaaaatctggaagtatctttttagtccttcagctgtccttccaagccctatttcactcatcacagacacaaagtagatgtaagtctcaaattcaggtacaaattggcacagaaaacaccctcaagctctgacctggaaatgcaaatcttctttctagtctttccatccccaacctggtgacagcaaatctcctttactgataattcaaagcaactcataactgctttaattagaacactcccccagcaccaccaccaggaatatcagccccttcccaagggttgtttctgatcagttagcaccaattcgctttccagtttatcctgtcgtccaaagcataatcccaatcaacattactggtaaatcaaagcaatttatcatggtgcggggtggggagaagtgttctaattcacaatactctcttcaatttgaacacccccacttccaggtttcacaaatacccttcacccacccaagcgatccttccggttcccctagtggtggatccattctcggccccagattttctttctccgtcgttttctcagagtcagattcttccattgcgcaacaagtcctttccagtcccttctaaatcttcagtactcttcagggtttgttgttgttgtttgtttgttttctttttcacccctcaactgcctattctcatcgcctatggccctcaggcctgctctattcttgcctccgcctttgtccactggggggccgctttccccacggttacctttatctctcgaacctggcctcaaggcacggccgagctggctagctttaaggccaagtgattccgtggtacaaagtaagagttggagaatgacaggaaaagagaggtgggttaggggttcgtcccgagtttgggcctcaggcccccaaggtctggaaacccaaaggtaacttcacccgcaaagaggtgaggaccgcgaaggcggaggtggcagaaagagctgacccatgccgtaggcactaagcggagaacgcctcagctggctcgtggcttccgagcccggccgctcggagagtcagccggcgggggcagtagttacgacctaaccacccgcccttcaggaacccaggtatctcaccgcagccacccaactgcaggccaggatcacgtgggcatctgccttaccccggagtctgtcacgtgactgccgctaccaaagggacgggtgggctgggaagaataccatagagacagctccaggaaagccagagtgccgtctgtcatcatcacgtggccttggctcaggctccgcccctcgggcggggtagggcgctgggagccttcagcctctctaatgtgggtgggcctggccccacccatccgctatggagaattaaaggagccggttgcaatttcagtgcctctgagcttctcttttttactgctggttaccggtaatggtttttgactgggaagaccgagcattgtctttgccttcctgctttttattgttaattcttgcaatcgagtttgtaattaaatgattaatacatccaaagcgcttagaactgtgtcttccacatagcaaatactgtataaattatcgttattgctgaaaccagggattcatcaggaattttaacacacacattcatcttcccacttgtttaaaacaggaagtgaaggaagtaccatagtaagaagtcaataaataaagtctagggctgggagtggtgggtcatgcctttaatcccagcactttgggaggctggggagggaggatcacttgaggccaggagttcaagaccaacctggccaacatagcgagaccccatctgtaaataagtgaagtctagaattgagaacagaaagactactggtagggatatgcacaccaggaaaaatgcccagaggggttcaaagatgttccttctggagaatggggtaggggataggacgtgatatgtcaggggactattattttttatctgaagcccttctgtgctatatatatttctataatgtataaatgatatataataataagattaatatgacatttaattatatttaatataatcaactaatacttaaataatatgttataaatatgttattttaaataaatgtgtagtttaattatattatttataattaatatatgatatactacatgtattatttacacgtaagtgtgtacatatattactttgataagaaaaaaagggaaggaaggaagagaaactgcaggaaacagagtactattattgaaactgcctttgcaaaaactgtaactgaggaaattatgacagtgaaagagatcagacctcaccgactccatcttacatctaacctttaaggtgtccttgttcattcctgggcgtaggccgaactaaccttgggaaggaatttagtttatagtttaactctgatacaaaattgataatagccctttctccctcccgctgccccccactaaaaaaaaacaaaaaaacaaaaaaaccttcttacctgggaaccagtcggcctttgcaggactaacaaattagccacaagattacaagattagaaattacaattcaggggccatgcagcctccagctgcaagagtctgaacctccccaaattgctcccaggaataacatcactgttttaaaacctaagatcactgtttgatatgttttgcagaccctgcattcagatgcaccagcttatgatacaggagcggggcaggaaagtgctgggcagagaaaggcgggtccgtggctagggctccaccctggggcctgtgcccatggacctaggtgaggataggcactcctgccttcccacccaaatgttatattcacccctagaggttgccatggggtcggagccccacagcctgcccctctgcatgctccccctagaggttgtgaagcagtgagccactcccgctgtggcatgccctgcaagggggataggggaacttccctcgtttcacttacagcacccagaccagtaatctggcccagccagttctgcgatcccacccaggaacagaagatagcaagaaaaactcacttagagccccctatgattccatatccaacttgaccagtcaacactccccacttcccaagcccctacccaccaaattattgttaaaaatttcaatcccccgaaactgatttgagtaataaaactgcagtctcacccacagctggctctgcatgaattactctttctccattgcaattcccctgtcttg

SEQ ID NO: 1564086 - DNA, 4001 bp, Homo sapiens
taaaatgctttggtaaacatttctaggacttcttcgcatcgcgggggtggggaggtcacagaacagggttgttagactcagcactgtggaagaaacaaggatgccctgcatgtcaagtccttttttttttttttttttttgagactgagtctcgctcagtcacccaggctggagtgcaatggcatgatctcagctcactgcaacctccctctccagcaatcagacgattctcccgcttcagcctcccccgagtagctgggattagaggcacctgccatcatgcccagatactttttgtatttttgtagagacggggtttcaccaggttgggcaggctggtctcaaactcctgacctcaggtgatagacccgcctcagcctcccaaagtgctgggattacagtcatgagccaccgcgccccgccgtcatacacaatgtttgccccctagcagatagtcagggatgagctcttaaaagaagggaccaaggaatgaatgaatgaatctccatgccaatcacaaagaagagaaatccgagagtgagccctgggagtgtctgacaaccaggagtatttagatctaagccttgaaagagtctgcttagattttcttgctgaggaaagaggagggggcaaggagtaaaaggaaaaacaacaaaaccccaaagcatcttaaagtagtcagagttactgggacaagttgcagactattaattgcaaggggaaaaaatcctaacagacaactggtttacatgatccctacttagaaatataccttggggtttgcagaatgaccttggaattatattgtcaccagtctttccaaatactgagaaatgtgactaagtaacaaaagtcatcagcctgggaaacatggtgaaaacccctctctacaagaaatacaataaattagccggatgtggtggtgcgtgcctgtagtcccagctactagggaggctgaggcaggaggatggcttgagcctgggaggttgaggctacagtgagccgtgaaaccaagaattctgattctacttgtgtgagtttcgctgtgtctgtctaccaggtcatttgcagagcacagagacctccttctccctgctttttaatttattttctataacacacaaatacacgatgtccacaaagaagacaggcaaccaatttctaacatctggatgaacctgaggagaaattctgagcagatgggtacttgagaattgagagaggcatgaaagaatattatttcaaagattgagagggaattggaactggatgacattttacagatttgcccttattttttcctaattgaagcatatcacttctgctagggtcatatttagaaattttaaaatgagtgagtgtactgagtctccgaggtttcctgactctcagttggattatgttttttattagattccagtggtactgggtatgttacgttaatccatatttaaactaggttgaccttacaccccaatttgccctggatggtcctgggttacacctgtcgtcccaacagaattattaatagcatcgtcctccaccgtcaatagcattccggtttggaatattaaattctacaatcactcccactttgactcctaaaagttttccagaatatgccatactttctcattaattgttgcaacttatggctattttatagatttctgagacccatcctgttttctgttggattttaagcatcctttgaactttagaaggctcctcacagaactggaaagccatccacacaaagacaactgttgttcattaataacacatgttagttaattaacgtgttgctaattaataatatttatattattcaggctatattcctatttatcaacgatattaattaaattatgtattaagtatgcaatgaatgtcaatggttgaatagcacataccttcatagccaaagagaagtaataacaaaaagccttctatcttgcgtgacatcttcccctcgtcctcggccaaagctctaccttactgaactggagagctggcccaggagcaggggattaagttgagccctggcctcattaagcatcttaatccatttagttcttaggtctttggctgagccccatcaagttaacccacagagttacctgcctcaacaaggaagtctcatggaagatactagcatcaactgagattcagttcgcgaggaagatacttttcgttcttttttttttttttttttttttttttgagatggagtttcgctcttgtcacccaggctggagtgcaatggcgccatctcggctcactgcaacctctgcctcccgggttcaatctagtctcctgcctcagccttccgagtagctgggattataggctcacgccaccacgcccagctaatttttgtatttttagtagagatggggtttcgtcatgtcagtcaggctggtctcggactcctgacctcaggtgatccacccacctcggcctcccaaagtgctgggattacaggcgtcagccactgcgcccggcccatactgttcattctatcttaatgtaagggaagcaatggagggagagaactacaaccagaagtctcaggttttcgtcctttcttcgccatcattttttagggggtgaccttgaacaatttcctgccacataagcactaacattctcgaattgtatgaaaatgtcatggattcccctctttgaaagcaactaggcatcatgtgcacacctattcactcaggaaaatgctaaatttggtggtggtgggaggacagttaacacaaagctgtgcattgctgtgttacttttaacaacaacaaattggaaacaatctaaatggccaaggttagggggctggttaagtaaatcaagagatgagtgcagcctggtaggtttaagagcacagactgccaacccagactgggtgccaaatcgcagcactagcacttgttacattgtgacctcagggcaagttattaatatctctgcgcctaaactttctcatctgtaagatgatgataataatgcctactttcgagagttattttgaggcttacaagagatcatatgtataaaatacttagcacagtgctagacataattagctattatttttacatcaccattcagaataaagttgatgggaggaaaaggggagttgtttaataggtatagagttgagttttgcaagatgaaaaagttcccgagatctgtttcacaacaatgtgaatatacttaacactactgaactgtacacttaaaaatgattatggtgggctggaggtggtggctcacacctgtaatcccagcactttgggaggccaaggcaggcagatcacttgaggtcaggagttcgagaccagcctgggcaacatggcgaaacctcgtctctaccaaaaatacaaaaattagtcgggcgtggtggcgtgcacctataatctcagctactcgggaggctgaggcaggagaatcgcttgaacccaggaggccgaggtttcagtgagccgagattgtaccactgcactccagcctgggtgacagagccagactctgtctcaaaaaaaaaaaaaaatggttaaggtggttttaaaaaaggccgggcacggtggctcaagcctgtaatcctagcactttgggaggccgaggcgggcggatcacgaggtcaggagatcgagaccatcctggctaacacggtgaaaccccgtctcaactaaaaatacaaaaaattagccgggcgaggtggcaggcgcctgtagtcccagctactcgggaggctgaggcaggagaatggtgtgaacccgggaggcagaggttgcagtgagctgagatcacgacactgcactccagcctgggcgacagagtgagactccgcctccaaaaaaaaaaaaaagaataaagttgatgaagtgattgtaataacagggaaagagttacactcaagttagaaaaagacgcaaatttctacactgttaaggatgcataactaggttgaaaatgcagagaaaaatactgagtgc

SEQ ID NO: 1564087 - DNA, 4001 bp, Homo sapiens
cctctctgtccttgtatctgactacccttaatatttgatcacctggcctgccttcagctagaatcctatcaaggcaatttagccagaagctccttatcctggatatttccttggtaattttccatccactggccccccccatcctgctctatggtcataaacccccacttatcctttctggagttgagcccaatctctctccccatggcaagaacacgtttcagtggtccctgtatgggtcgccatggccctcctggagtaagttgccttaccatccttggcaagtgtcctgactcagctttttctttagcaaaaggaaagacagtactgtatattggagtgaggacgatcagctcttctctgtactctgttgccttgaatgcattttgattttgacaactctggggtgattttgatgtgaaactttatggcccaggaaatttagtcctttcttgaaagttgtttagaaatgcacggttgcctcattaacacaaatttaagtgatgaacacaaatgtaaatgcttttgaaatataaatgagtgctgacaaggcaatttgtcagtgggttttcctaacagactgctaagtaagtgttggtcttgttgagggattttacatacacaaatgaagcctgtccaaggccagctaacactattttgcagtcctctttgttttcctaaagcctggcacagaagtactgaatccatgctgaaggccttattgggtttgcttggtgacttgtgggtcttccaggcataacttggcattgcttccatttattatggctagtcctgcagagtcctgtgctgaggctgcaggagggatagaaggcttggcccttgttttctgagagcttgccttctgaaatgtggcctgacttaaggggaagaaaccccacctgcatgtgtcctccctcaagcgacggtccctataaggctctaccggagtcctctcccctccctccctcccctcccaccatcagtcccattaagtgggctctgcggatggccacttactttgagtaaactggggaattcagcctgaatcaatagcttcagttcatcctttgacaactggtctggatcaccttctttggctgcatatttttcaaaaatcctcttcagttcctcaggagactttttagtactcattctggtgtcttataaattgggaagaaaataaacttaccaaaaagctgaagtacagttttgtgctgagggttgtctgcaggattttagtgccattgggccatttccttggcataaatggggaagaataaggaaaagagaatgtcggggtcggaatggcaccagtaactactaacatgtttaaaaaataagcatcttaggccaggcacggtagctcatgcctgtaatcccagcactttgggaggccaaggagggtggatcacttgaagtcaggagttcgagaccatggaagcctggccaacatggtgagaccctgtctctatacaaaaattagccaggcgtggtggtgcgtgcctatagtcccatctacttggaagaccgaggcaggagaatcgcttgaacccgggaggcggaggttgcagtgagtgcgatgccactgcactccagcctgggtgacagagcgagcctccgctgcaaaaaaaaaaaaaaaaaaaaaaagacatcttagatagtatgttaaatgtctgttcttagagtacatctgttaggagatggtccctggagccaaacatttttattagtaattaatgacattctacactttttatgtacctgatctgcactctgcaggctgtggtcttgaagaatacttgaccacagcttctagcttctaagttacagggaatatctccagatggcataaactcaccttctctccagaccattatctttcacaccattctaaaaggaagcagagtattaatgcaaacagaaggagctctaggtagtaccaaaatcacactaacctggttgcccaatagtgaaacagctagaagaatcaaagaggagtttgaagagctgagcagaatcatgacacttttatagtctttacgggcacgccaccctgattatgaaaatttccttttgttggccatttaagggtaattattaatggtttttgaaactcaggcttaagactgcatgaaccccataattaagggcaagatccagtaaaggtccatctcgacagttgcttcatggttcagagtcgtaagcttggatttttttccccctgagattatattttccctccaatgtagaattatatttgctcacagttcacatttcataaagcttagatatagaggattcttttcaatttagttgcatatttaggctttaaaaaataactttcttcatatccagaaaaaataaatgctgccctgtgcggtagctcatgcctgtaatcccagcactttgggaggccgaggcaggaggattgcttgaggtgaggagtttgataccagcctggtcaacacagcaagacatttctactgaaaaatttaaaaaatcagccaggtgtgatggtacatgcctgtagtcccagctactgtagaggctgaggtgggaggattccttaagcctgggaggttgaggcaacagtgagccatgattgtgccactgcactccagcctgggtgacagagtgagatcctgtctgtaaaaaagaaaaaatgctgtcatagaaggacaatattacatagtttaaaaaattacggtatggccattgaagtccttctgatgtctttacatattagcagcttaaatatttgaatacatgaatgaatgaatggaagtattgcttcagaagcaggtttaagaagtggaaagaagatactcagtaatttgtggttttatttggcaaatcaatattgagtaacatggtcattttttcagctctttcattatttgttggtcctgtgtctgctttttatttctcattatccttttccttaccaaatatatttcgtgatcattcgaaaaacttgtgagaacactcgacttactcttgttcagttggaaatacttcaaactttttgtaactgccatgatttaaaattgccaaggagattgatttctactggaaagagttccatgaaataagtaggacatttccaagggacattgatctaatgctgattgtaactcacaggaaggggttccaggtggattttaagagcactttacagctttgaaacacttgtacacttccacacttatagaattttccctgactctgccttatatcacctacaaactgaggactggactattgggactgtatttctccctgatgtttctcagctctaaaattctagggccttatttacattggagaacaaatgggaaatctaatagaattccttaaaagcttcccgccagtcttgagcatttatcattccatgtgtctttgctgtcttgtatatattcttcttgtttttattatggattctttgactttgctatgcaccaatatagaatatgtattaactcactggttggagtaaagacaggcattttatttttagttataagattttacacaaaaatattctgattttggcaatgcattttaatcaagattttagaaaattgccagtgtttttacacatatgttctgttttcctgggaggaagtaggcgtttgtgcttaatcataacaagaactatctttttttaaacatcttttaaaaaatatttcagatctacagaaaagtggcaagaatagtgcaatgaacaccagtctgcctttcgactagattcactaattgcgaacatctccacatttgctttctctttctctggacagatactttcctccacccctgagtcatttgagaatcaattacaaacatccagatgcttcccccctgagcacctcagcatctgtctcctaaggacaaagacattctcctatgtaaccacaatgccattatcatagcccacgtcaaatctctccaattgttgaatagcatcttaaatcatcttttctctcaaattaccactagtgagc

SEQ ID NO: 1564088 - DNA, 4001 bp, Homo sapiens
gtgtgactagaacactctgattaaaaactagaacataaatggcaagtaaattggcactattcttcccactggaagggtgtaggctccatggcattctcttatcatccagggaacactgggtagtgggcctaaccctctttggataatttgattaaatctacagatatttttccctgggaaagtacctttacacacaaacttggtgtacaattttagaagtgtgaccagcctaagatctgtttaatttagtggacagatgaccccacttaaaatcaccaaagtgggggtaaagagggtttgtaaactgttgccaattatcctggatactatcaattttgttatttccatataaacaaggaattctctgctgaactcacagcagtaagcagtgtgatatagtattcgtgtgtgcaatctctggaatctgagagacctaggttctgtcacttttccagctagttatacctgggagagctacttaaatgtacactctaagattctatttccataaaaagggcataaaacagtatctaactcatggtgctcttataaggattaccagagataaagcacaaagaggatagtgtatgtgctggttaatacatactttcctttaagttaaaaaacaaacaaacaaacaaacaaacttgtgggatttagtgaacatgggcattctctatattaaaacattaaaaaaataaactgctcatgcaataaacagcttcccacaaactagacttgatattttcaaaatcagtaaaagcccggcacaaaaaaacacttgtttggtttcagcacaccgaatttccttctggttaactggtcgaaatgactgctacttgcaatatcataagcatttctacatgtctaacatttcaaatcttcctttgcgaaacaaatcttttgttattcctgaagttttaaactgatgtatttaatacaagcaagcagaaggaggggaatgatgaaaattagagtagaagaaaatcaatgaaataagaaacagaaaaatcaatgaaatcaaaagttggttcaccgaaaaggtgaaaaaaaaaatctaacaatcttttagcttgactgaccaagaaaaatagaaaggactacacagattatcaaaatcaaaaatgaaaggggggttattaatactgaccttacagaaattaaaaggaatacattatgaacaactttacgccaacaaactaaacaacttaggtaaaatggaaaaaattcttggaagacaaattaccgactcaagaagaaacaggctgggtgcagtggctcacgcctgtaatcccagcactttgggaggccaaggcgggcggatcacctgaggttgggagtttgagaccagcctgacaaacatggagaaactccgtctctactacaaatacaaaattagctgggcgtggtggcgcatgcctgtaatcccagctatttgggaggctgaggcaggagaatcacttgaacccgggaggcggaggttgggtgagccaagatcatgccattgcactccaccccgggcaacaagagcgaacaacaagagtgaaactccgtctcaaaataaatgaataaataaataaataaataataagtagaaaatcgacttaggactatagcatgaaaagagatttaattagtaatttaaaatctccccagaaatacaagccaagccaagatggcttcgcgtgcaaattctatcaaacatttaaggaagaaataataccagtacttagcaatgtcttccaaaaaataacggaggaacactacttcattctatgcggccaatattaccctgatatcaaagccagagaaatatatcacaagatatatttgcctgtcagctccaaattcacccttttatcccgctgtgtgagaaggttctgtgttcctctgcctctgcccgctgtgcagttgatagtgaaggccacctgtagagagcaccagagtcagctaaggggagagctgcgcttcctggttctcccgctggcgccagcggtcctgctgagcgcaaaacttctcttccggactctggcgccccacacaggttcccagtgttaggctgggggagggcacgcgaaagcggtcagcttcccttccttccatccgccttgagcctttccggattggtgcttctggtgagacgcctccccatgagcatcactcccaagcacgcgagggggcacgtttcccataactcccaaacggcaagtttctacaaagttacaacagtggggaggcgccacaacttcactgccattttgtgaggtgctgccgcccctcctccggcaaggtcaggacttcaggactgtgagtggggcagtttttccctggatgctttaatttcgcccgggaaagtgtcctttttcctcagaaagtgtcttttctgaggtgttctctgtcgggtgtgtggtagggttccctgggaaagtggctccactctgaggacaccgccatgggagcctgtgtcaaccatgggggagcgttttccttgggcaccccatctcggctatgttgtgggtccggggggcttttcttgggggctccctcagtgatgtgaggggcttttcctgctgaaatgacctaagcccagggttggggaccctgccttggttgcctgtgtcagcctcgggtgtggccgtgtttcttccctgctcggtggcagccctgaggggggactctgccttgggagctctgtctatgttcaagggccggggtggtggtggctgtgccctggacacatgatcacagccctatggggtcactctctgtcgcgggctttatctcagcctgtgagggactcttccttgagtgctgttctcggctgtggggcacatttgtccttagatgttgctcgctctcagctaggatgtgttggcttttctttggttctgcttatccctgatggggacgcttaccagacgctttctcttggtgctgggtttttaaaattattatctgtgggtgctgtctcctggtgctgtgggggagtggggtgctgttccttggattctctgagcctgtggtgggactcggggaactcttgtgtcagccacgagggcacccagctgaccttgggaactctgtctcaccccagggttgggtgcttttccttggttggttctcagtcctgagggagctcttccctgggattctatctgacctttcagccatagcctcagatgtctgtgcaggaatcggggtccagaaatgtttgaaggttccagattcgccacatgcacacaactcactgtgcaattattctttcattccagccactctttgggagtgtagtgatctctccttatgtctacacttgcaattttgtgctaattaatgagattgagcaccctttttaaaagtgttaatttatcgatttttgattgttttttgggctcccaggctcgctcgattctcgtgcctcagtagctgggactacaagcgcatgccaccaagcctggctaatctttgtattttttagtagagatggggttttgccaaattgcccaggctggtctcgaactcctggactcaagtgatctgcccaattcggcctcccaaagtgctgggattacaggcgtgagccactgcgcccagctatttattgttttttttttttcggagcactttttcatgtgtttattggtcatttaaccatgtcttttaggaagttccctttgaggtcttttctgccaaattttattgagatgtttgtattttaaaaatggatttgtagtttacatatattctgggtttcagttgtacacacatgcacacaggcatatatgtacatgtattaaaatacatatacaattttaatgtcttctacaaatctgttttgcttttacactatctcaataatgtgttttagatgaacagattctcttaatcttattaatcagtcttgtttatggctagagctctttattattttaagtgaaaatctttgcctcccccaatgccatgacgataatattctaagttttcttctagatctcctattc

SEQ ID NO: 1564089 - DNA, 4001 bp, Homo sapiens
tggaagcttggcttctgggggacatttccatagtctggggctagcagagtgtgtggaggcaagctcatcccagctctggaggctggcaccggctctggcaggggttggggtggggtttgcctggactactctccccgaaaggaccccttctcctgggagagacctggggaaatcccaggggcccacttgcctgccgaacacagaatctgggtaattgaagctgggaaagaaaaaggggacttctggcttctgtgtgcccctaggtacgtcttcctgatgtggcacagggtcccagtgtcaaagtgtcagctctttctcacactttcctccagctcagcgcccctgtggtttgaggcctagcagtgtctatagagcaatctctgtttcccacccccaccagccagagagcaaggggaagtggccctgctctcttaggagtggcagccaatggcagtcctgctgggcctagcaccctgcagggtttggacggggatgacagagcccgtgtgaagattcatgaacctcccccctcccccgcccaccaccactgcaaccttagagaagcagctggggtggggagaatacagccggaagtggcagccaccccaggacctgagagctggggcaggatgcacaccccactgccccgagtctcagtctttcagctgccttggcctccatctctgagctactcccctgacaagggggatccaccatagggcacctgggctgagttccagggaaaattggcgggggatagcctgggcctcttggacctagttcaggcctgctttgggactgtcctagcatcccattggatgtgtaggatatacttgctgattgtctgggagaatccttcaattgaattaaagaattaggtctagaaatcctcaaacccaaccaaagaaatctggaaatcctcaaattcaaccacaaaatcctagatctggcacagccttcaaggattcttccagtccggtctctgccccagggggatgaacacctcagccatccatgacagctgtttttcctcctggcctttaaaatcctccctcctcagccttcactcctactcaccacctcaacttaatttctcattccccacccaggaagaacctgtatgccccctgcatcccactgcacttccggatgccttttcccccaagactggaatggcctcaggcccccatctccaggttggctccatctcgggtagggcctgggagctaccacagagctgagccaagtgggcagggtctgggccatggccaaagtggaggagggggtggcagtcctgtgagcatcatggctccaagctgggcagcccagcagggccctttgagtgagatggctcctgagaggccgtggccggggcagaagtggcagcaggaccagcgtagaggagagatagttaagtacaagcttagggttcagcttaagcattgtattttgttattctcaaattctagtctaagattctggcccctaattttagatcttttttcccattcttctagggttgaattgcatgactctagatttctaaggatctattctgtaactctgttgctccagaattttaaacatctcttctgtacttctgttaacctttgggtccctgtcccgttgccttctaggtgagtggccctcacctacagactcaacatatggcctttggctcttcccacttccaagagtcttggaagggatgggtcgagcaagcagaggaaaggaagatgtgagttcccaaaatgctcctcacctttttcttctgagtgggctccttctcactggcattggagggcttgcggcgcagcatggtcctccaccctgggagactccgtccctgctctcctaggtgtcaagatgcagaggcctcttgcttagcctcaccagaactgcccgggggcacggcatgaaccgagccttcagctgccactctgactgctgcagtggcagcttgggggtgcgggccatggacacccggcagcagcagcatacaggaagccctgccacgtgacctactcttacagcaatcgcagcccctgccggcccctagggaggaaggaagtccaagcttcagtctccagagattctgatgcagacggctcttgggttgaacagtcagagaaagtccctaccttgttgtctcatgtcgatcatcatcagtccttctgctccatcttcctagaggtggacaatcagctcgacattatatggcgtacccaagccctttatctcactgaccagaatccagaaaccagaagttggaccatctggctgcctgttggatcaatgctcccggtcaactcacgtcttcaaggtcgtcactgccatcactaccactaccatcacccctgtgaccatcaccactgctaccatcactcctatcaatagccatcaccatacagccatcacccctacagccatcaggcctgcagccatccccgctgccatcagcacacctatagccattgtcactatggtaatcacctctacagttgacatccttcagccatcacctctacagtcatcaccattgctgctatcacccttccagccatcatccttacagctgtcacccttctggacattacagccaaccgcactcatgaccctctcacccctataaccatcgtccctacagtcatctctcctacaaccatcatcacatccgtgcagccatcagccctgcagccatcactcctacagccatcagtacacctaaagccatcatcactagagcagtcacccctccagtcagtacccctcagccatcatgagtatatttatcaccaccacagctgaaaagcacttacagccaactccacacctctagcaagtatccaacaggcatttatcaaacacctatgcagtatattcaatttgtgggttgtctgtggcagattttaataactttaataacttcttggtattacaaaagcaacttgtatttgtcatacaatttcacaaacacataaacaaaaaaaatttcaaaatttcccatcattgtcctctacactgttttaagcatctatctactctctgtctataaacattttttttctttttacaaaaatcatactgctcagaaaacagataattggtttggggagaaggggaggggagagaagggaagggagacatcacacagggtaacaggaagcttttaggagtgatgaatatgttcactatcttgactgtggtgatgatttcatgggggaatacacatgtcaaaacgtatcaaattgtatacttcaaatatgtgcagtttattgtagctccattatacctcaataaagctgtttaaaattttttaattaaaaaaggtcataattcacactattggtgtctgcttttcacactaaacacagtatcttttttgtttttttttcgagatggagtctctcactctgtctcccaggctggagtgcagtggcgtgatctcggctcactgcaacctccacctcctgagttcaagcaattcttgtgcctctgcctcccaagtagctgggactataggtgcgtaccaccaccctggttaatttttgtattttttgtagagacagggtttcaccatgttgcccaggctggtcttgaactcctggtctcaagtgacctctttgcctcatcctcccaaagtgctgggattacaggcgtgagccactacgtccagctgaacacagtatcaagattgtctcatgctatgaaatagtcttcaactacgtaatttataacggctgtggaacatcccattgtgtggatgtgccgtgcttatttcaccaagcccttgctgatgaacttgggttggcttaaatttttaaattattcattgaacatacttatggtaaatattcacatccatagttttttttctgtaggggaaatatccagaagaggaattgctggggtcaaaggtatgcacatttttaaggctttcaattctgtggtacttgtgaaatactaggcttgtccacccctgttcccaagatgttctcgtg

SEQ ID NO: 1564090 - DNA, 4001 bp, Homo sapiens
gctggatgatctcactgttctgagaacatgtatttgcaaaaagcacacatcagaactcactgaagtcaggctacaactgtggactggccactctgcagtctgctggagctcacactcaggaagcgagaacgctttcattacttgccagagcaaaactgctatggttttaaactcaacacacacattattcacatcctattggtatactggtatgttgacttgggaatacgtcaggtttacacggcagttcagaatagtaaatatttggaagtttacaaactcttgcttccttaaaggtcagaacatcaggccaaagtacaacgtttaatttcagaacttgccttccaatttacgcattttcaatttgctctccccatttgttgagtcagaagaagcagcattgcccagaaacaggtattacgtaacatgcacatactctaaaaagtactcatcccttgttttctgctcatttcttccagcctgaggaacagacgtcagaaaaaaagcaaccacccagacaacttccccttttagctgagctgtcttctgaccaatcaacagggaccagccaaaaaaaaaaaaaaaaaaaaggcatctgacaccctcttaactggtgtctactattccaaatggaggcaaaggtttcaaattaaactttctagccattttatattccttagcaaacagacaggaagcgagtatcatagtgggtttctgatctaccgtgtttgaagtgtgtgataataggaccttacctcatttatcatgatcatctactttattgtgtaaaggatcttttagttacctccccgcccatccatgtacacggaagggccatgtacatggcgaagctagagactgtaacctgaagattgggacaaattaaagaaaaaaatgtgatttaacacaattacaaaaactgttacgttagggtcaaacaagaaccattttatgaaactgaattacaacaaatgacattatatctaactcttccgggtctccacagcacttatacttacttaagcagcttaaacacttccgagtctccacagcactctgatacttacttaaacagctcttttaacctgccctagtattcttaagtgcagcatatctaatttttttttttcctcagtagtttgaacacttgctggctattttttctgtccaagttctcagtaacttcggcctgtgtagtcagtggttctacacagccgacactacttcttacataacacttggtctctctggcttctggaaagggcgaggggttaccttccggagtccagtgctctttcggcacttctgcaaccaggcagtggtaaaaggggtgctctccaaaaccatcttctagcagatctgcaagaagggggagcaggggcggtaatggccttggcgaaggtgacaggcaccgaacgcttgtcccccgtcccgccactgttgaattacctttttcagttaagattacttgttcttccatgtattcatatttagccagctcctggggggatgcacataggagagaaaaaagtagaaaacaaaatgaggctccggcccggccagctcaggggaacggaatggggcgggcgggcggggtggcggccgagccggggatgggcgcagaaaggggaacaggctgggctctcacaccggccgagacctcaagacgtgaatcaccccactctgggaaacggagccacctccaccccacgccccgggaggagctctggctctccgctaccttgatcagccgcagtatgtcactgcagtcggcggcagtggctgggcggatcacgaatttagccattttcgtcttttgcttttcttccctttgcggaccaggcccctgtacttgaacagtaggaggaggtggttcctcattcgtctcccgggagcgtcctcttctcagtcaggctggcaccatgacccaaggaacctcggcgagtgacggataaacaccagtcggcccgcgactaagagctgcgcatttgaacattggcccggctcggcttttaagcgcaaagaagccccgcctcgggccgtgaggtgggacctctcatccaatgaggccgcggccccggggcgcatcgtttcctctcccaggcaccaccctctcttccgggcgcccgtgtgaacccggaggacaaaagtgggggcagcggggcgcgctgtgggattcgctagcggcgccctctagtggcgtttcgcggagccttggcggaaaccctactgggagccggtgtgtcccccagtaacatttgcaaatgaaagaaggtaattccctctgcagccccccgacaagtgaccttgctcttttctccttggccagtgggaagcaaactcaggagctctggccttaggagatgggaggaagactaaagcagcagttctcaaagtgtgatccgggagaccctgcagatcccaagatcctttctagagtttcggtgggagaactagttttagaattatagacgtcatttgccttttaaactcacaatggaattttccagaggcgacctgatgtctaatgatgacactgctcttatgaccaaaggaatgtgagctcgtatattcttttagaatttcctaaggtaggttatttggatttcccaataatcttttttctttatacttgtagtttttagagttgacggcatatttttttcttacttttctaaccttcttataccttcttaaatctctaatcttccttgacacttgatcttgacacttttccttctgcccgaggtacattcttcataatttcctttagtaaagatctgcttttgccaaacgttctcagttttgcttatctgaacgtgtctttaattcatcttataattctttttttagactagtcaagtgcagtagtcagagtaaaataaggagtttgatgtgtaactgattgtgaacaatcaactgagataactcactacctttggaccagcccatcttaaaattcttgaagggtttatttcatagtttatagattttgaggttcagaagttttcctctttcagcacattgatggtatctgtcttctgacttcggttgctgttgaaagttgttgtaatccctacttgattcatcttctgtgcttcatttcctttaacttttttttgaaataattatacatttacagaatatgtgatgatgtcattgctctggtgactaaaagaatatgtgcttgtgtattactgttttttacaattttcgaaggtaaggtctttggattctttgataagtttttttttttttttttttttttttttttttttttttttggtagagatagggcctcaccatcttgcccaggctggtctcgaactcctgggctcaagtgctcctcccacctcggcctcccaaagtgctgggattacaggcgtgagccaccgtgcccggccaaaacaatcactattctattaaactaagcaacccaaacagaagatggctttggttttgctttagctacgcagctgtcactagcgcttagtcatagcggtctaatttactgttaccaggaaatgtataacaagctctcctaagtcctgacattttagacagaagcagaggaggaaaaggccttctggtcatccatgaggtctagccaacactatcaggaaagactagtagctgtaatttggcagttgagaatcagtggtttttaaagatctttgagaaagacctttgagtttcataatctcccagggtgactcaggatccgtggaatccccctagggcaggaagggtaacagagaatctacttctgctttcttttctacatacaggatattgctagcaaaggcagagaatcacttgttgaatgtgaggggtggtcttttggggatagtctgatccctccttctacagaggcaggtggatcacgaggtcaggagttcgagaccaacctggccaacatggtaaaacgccgtgtctactaaaaataatttaaaaaaaaattgggcatggtgacgagtgcctgtaatcccagctactcagga

SEQ ID NO: 1564091 - DNA, 4001 bp, Homo sapiens
atttcttttctctaagacactcttttaaagttaaaatttccccaggaaagagaacacattcagtccctaaaatttccaggaattggttcccctataactttttgagccccttactatatgccaagcaatttatatgtaatcattttatgttattgtttcataacaacaatcttttgagatatatattgttataatcttgattttagatgcagaaaatgaagagtaaagaggttaagtaactaccagaggttatgaacacataactagcagaggcagaattcgaaccccaactatgcctcccttactctttcagccctacaccaatgccatgaggctccatgtaataaaaataggcttactttaatcagtcgcaaaatttctgggcagtctccagcctctgcatgtcttatttgaaagtaatccatgcttgtttgcctcatgcccatttggctcacacttggttggctcctgcctggttgactcaggcctggttggctcagcactaattggttcaggtcttgttggctcaggcctggctgactcggccccggttcccatatgcctggttggcccctgcctggatggctcatgcctgtttggttcttacttgattggctagtgcctggttgtctcatgcctagttggctggggacttgctggctcatgcctggttgccacatgcctcgttgccacatgcctggtggactcttgtttggttgcctcgggactggttggctcaggcctgtttgccatgtgcctggttggctcatgcctatttggcttgtgcctgattggctggtgcctacttgtctcatgcttggttggctcccacctgactgtctcatgtctagttgccacatcactggttggcttatacctgattggtttgtgcctgcttggctcgtgcttgattgtctggggcctgattggcttggggctcgttgcggtggacctggttggcttatgcttgcttcactcaggactagttcgctcaggctttgtggccacatgcctggttggctcctacctaattgccatgtgcctggttgtttcatgccaggttggtttatgtctggtaggtttgtacctgattgcctcatgccagcttggctcatgcttggttgtttcatgtccacttggttcatttcatataggcttgcactccattggttcatgtccatttggttcataccaagtaagcttgggcttggctggattatacctgtttggttggaatctgataaacttgattggtttgcgtctggttggctcatgtctgtttggttcttacatgattggctagtgtctggttgccttatgcctggttggctggggacttgctggctcatgcctggttgactcatgtctgggtggcttgggacttgctggctgatgcctggttgttgcacgcctggttgccacatgcctggtggactcatgtttggttgcctcaggactggttggctcagtcctgtttgccatgtgcctggttggctcatgcctatttggcttgtgcctaattggctggtgcctacttgtctcatgcttggttggctcccacctgactggctgtctagttgctgcatcactggttggctcatacctgattggttcgtgcctatttgcctcatgcgtgattggctggggcctgattggcttgggcctggttgcgatgggtctggttggcttatgcctgctttgctcaggactagttggctcagttcttgttgcagcatgcctggttggctcctacctaattgccatgtgtctggttgtttcatgtcgggttggtttatgtctggtaggtttgtacctgattgcctcatgccagcttggctcatgcttggttgtttcatgtccacttggttcatttcatataggcttgcactcccttggttcatgtccatttggttcataccaagtgagtttgtgcttggctggtttatgcctgcttggttcgagtctgataaacttgattggttcgtgcctgattggttcatgcccagttgattcctgctttgttgactaaggatggggtggcagatgatgggttggcagacaactgattggctgatggctgtcttgatggaacagaatcccttaactgtgctgtggtgggaggttgttggctgttcccagttcttctcaatttgattcgcccactttgagatacccctctatcaaggtgggaattggaaaaagagaggagcacctcaggaagattattaatgcctccggtttgctggagttgacttcaccagcgaccacagctgcaagcttggctgagtttcaggttgtcatctggcctttccctgccaaaaggggggaagtaaagggaagacgaaaatgatcctggaggagtataaccaccagcccgcccctgcatggtcactgcatcataatggcggtcacaatgcaggtatcaaagtgcctacgtgctcccccgtgtggtgagggtggggcaaagcagggctcgcttgaccactttatttcatcctctcttaagagcttaaaatggtgaagcaagaggctataatgagtctcagagcttatgcttggcactcccaagagtccctgctgttttagccaattcaaagaaacttgccgcaactcccctccctttcccttcatcccattattcaaataattcaattcctatttccgtcctcatttttcacttacactggaaactagttgtcccgatgaagtgctcaagtctcgaatgcagatactacgtctttaaaaataataatagctgcgctggacgtggtgactcacgcctgtaatcccagcactttggaaagccgtggcgggtggatggcctggggtcaggagttcgagaccagcctggccaatataatgaaacctcatgtctactaaaaatacaaaaaattagctgggcatggtggtgggcacctgtaatcccagctactcgggaggctgaggcaggagaatcgcttgaacccaggaggtggaggttgcagtgagctgagatcgcactattgcactccagcctgggcaacaagagtgaaactccgtctcaaaaataatagtaattataatagctacagccaacatttactgagttcctttatggcctaggctcagtggaatgtacgtttcattttcttattcaatccacatcaacactattatccccaattctgagaaaactgactcaaaagatttggttacctccccaaggcttcgtaaaagttggtggagagcctgaattcagacccagatctatctttccaggctttttattattattcggtccagcctcttaaacacattccactcgttctccatcctcatatctgtgaggtcaggcattttgtccttttacctctcccctctgcaggattcattctcccatcattttaactgctggcttacttcctcaacaatgtatattatataactggttctaatattgtttcagatggaatattatttattttttaaatataccagagaactttggatgaggctgttctaagtctcacgctgtgataagggctttacatatgtattatctcacttaatcatcaaaataaccctgtgatgcatgtaccgttgttccccattttatcaataaactggaagtcaagttaactcagttccccaagtgtagtaaacggaggaatggggatgggtatccaaggcccatcccatagatagaagctttcaatttaaattagagaccccaatcactattaggcctatgctagctctaaattgtacctagagagcccatcttagcatgacaagcaaatcaagtcacatcgcggaactatgtcaagcctaatacaaattagatgtatgtgtgttgctgctttccatctaccttataataaaaacaagagctaatatttagtgaattatttctgtggtgtcaggcatggttctaaggaacacttgtattaacccaatcctcataacaatccaatgaggtaggagatagtcttatccccatttttcaagtaaagaaacagatt

SEQ ID NO: 1564092 - DNA, 4001 bp, Homo sapiens
acttttaaacctcaaattccacaaaaatgagtttaaaggaaactcatttatatttaccccggaaatctaaactcttgataataccacacattttagtttcttctcacttcttcccacaagataaataatttcagctttacaacattttctcagagcccaaccatgactacactgtgcaaaatgaattaatttcacttttaaatctcaaatcccgtaaaaatgagtttacttaaaatgaaactcacttgcatttaccacagaaatttaaactcttaattacaccatataccttaattccttttcacttctttccataagataaatcacaactttacaacattttctgagcccaaccatgactagattgtgcgaaattaattaatttcacttttaaatctcaaatcccataaaaatgagtttacttaaaatgaaactcacttgtatttaccacagaaatttaaactattcattacaccatacactttagttccttttcacttcgtcccacaagattaattacagctttacaacattttctcagagcccaaggctagattgtgcaaaattaattaatttcactttcaaatctcaaatctcgtaaaatgagtttacttaaaatgaaactcacttatatttaccacagaaatctaaactcttgataacataagaacaagaggccgtctgattttctaaaagactttttttagacattaaagacattttcaaaagtcgtaaatattcgctccggaggcgcaaggctttcacctgccattaattcatcagataaggcacagctcacaatgaggcgccactcccaccgggaccactttgaggaacacacagcaaaacgctctgtttgttttaagaacaatcactttctaaaccttcctgcgggactctcaaaggcagcccttcctttgccgccagaaccgcatcccatcgcccagcacttgccgcaggccggacaagtgaggcccaaaagggcacccagcccacgccccgctttagaaaacaccgcgcggcaaagctgcttggaaaatcgctatcttttagtcaacctgaagccagtttgccgcactcggggagagccggggagaggagggagggacgcgatccgccaccaaccaaatcagggcctttcctgttaacgaccacgcggcaagggggccgggccctcgcacgcctcgacggcctcccccactccaaagggactccgatttcgcaggatctcccgcctcccgcctctgctcccaacaccctacgtttttctcttcctcctcatttacgtatttacaataaaacagcgaagctgcacagtctgtctctaaatcaaacgcggttaccatcaaagcctcagactctatgtctcaaccgcaaaaggtctgacaggaaatcaactcgggagtttgtcaattctttaaactcaaagctctgttaacgaaatctggatccttcctcgctccccacctgcctcccctgacaggagaatgactgtaaaaggatcctgtcgtccccgaaagtcagcaccaagcacttcacaaattgtcaaatctcaaaagcttacacgcgcgggcactccggaaaggctgtggggaccacccaaagcacccccctccacaccgcggctgaaattggaggctgcgaagtcaagactcgctcttccccgcaaagcaaaccctctctcctcaggagagccccggcccctaagccaaatcgtgtattcccgtgacggaaagttcaaggtgaggaaaaagtacgactggacagacctattttagtgacagagcctgtcacgccggcctccggaggtcgcggtaaaactgctcgcagtagtcctgcctctccgatgggcgacagctgtgaccgttaggccactcgacgcttcggaaaggtcctggcaccggaaaccgggcctggtcacgcgcacgcgagaccagtgatgccctgacccctgagtggatcagagagctcccgcgacgccgaattcccacactcgcggttggggggggggggggggggggggggggcgggactacccgctgaccaatcggagtctggccactgacaggcgtcaccgttgatcggccaatccgcgggtgctctcccagtccttgggtgagggcgggaatttgctaaggagatggctgtggggcggggccgagggcgggaatttgctgaggagatagctgtggggcggggccgagggcgggaatttgctgaggagatggctgtggggcggggcctcttacctcaggttttccttcgcaagacccgcaggattgaaaatggacgttaggcctttcagagactcgcgcgctgagtggtttctgcggctgcgcaggaggctggcgcgcatgcgcaacccttctagtggcgttgtagttagggacgtggtgtccccccttcgttgttggggtgtccgaagcttttttttttttttaatgtgatcccgcccctcccccgcgctctgtgacgcaccagagacgtcgtcgtaaactgggtttcctggacgcacgccagtgattgacttggaatgaggagaggggcggggccttagcagttgccctgagccaggtctggtaggaagggcgaggggggccagggtggggggcgggcaagatatttccagtctccagcacccacaagttggactggggaactaacgcagaccttgaaggcagatttactggattggacccccagctccaacacagtcctcctatggccttaggcaagccaagtaaccgctttgtgcttcggtttccccatctgtaaaatgggtataatatggggactacatgagttaatgtatgcaaagcacttagaacagtacctggcatagaattttgctattgtaataaaggctatgtgacatcatctagtggcatatagtcttacatacttatatcgaggctgctcatcttgggaaggagacacagtctgagtaattatcagaagcaaagcaggcagatatttcaaagtaaagctatacatcttttcttggcccagagaggagctacaaagaaagtatactggacgttggaaatgtatcatttttcctctcaaatacgaagctagattaaagcccattatagatatagtatatgttttttttttgtttttgtttttgtttgagacggagttttgctcttgttgcccaggctggagtgtagcggtgtgatctcggctcactgcaacctctgcctcctgggttcaagcgattctcctgcctcagcctccagagtagctgggattacaggcgtctgccaccatgcccagctaatttttgtatttttagtagagacgggtttcaccatgttggacaggctggtctatgttctttttgctcctacttttgccataacagaccctgcccttatgtcctgttgcctgtaaaacactgttgcgaagccccaagaaatcaattacgtaacagtgaagagagaaaccggttgtttaattgcagtcacgtttatttgcagtttctatacacactttctaggtaatcaaacttttctgatacattttttttgagaggggttcacaatgaaactgtcaccatttttactaaaaataaatacaagacttaaagtgttgcacagctctaaaatatacaaaggcttggattgaatgtaaacgttgaaaacatcttacaaaagaaaccatctttgcagcaatttaaaaagttcatatttacaaatattacaaaaatacaaaatggatgcaagtccataaaccattgtcgtttcggccagcatgaactggttctagtaccaaaatagttacactgtaaccttcttcatagttttaaatctttattaccatctagttctctacgtgccaccactgcagcaaatgcactcactcactgacctttggcaagagcaaacagcatgttctgtttgctacaactagtccatgtcctctacttagccaaaaacaaatcaaaacaacaacaaaaccaaagtagaatttttaaaaaatgaaaaaatttcccctac

SEQ ID NO: 1564093 - DNA, 4001 bp, Homo sapiens
gatcaaccacctcatgagaaaaactgatacaccttttttagactgactgtaatgatttttgaacgttatgacactatcaactttaaagcacccgcacatataatgcagtagagttacagtaatcttttttccaactaccaattccaaagcaaatcaggttctctggggtaaacaagtatacatccttaagaagttcatatggctgcatgatgtatatataaagttcattcaaaactttcaaagccagtttaaatggtgttttttctttacattctatcaaactgttttaaaggttatagataaagctaaacacaaggcatcaggtgaatactcataaactcaatcttttctcaaaaatcccactggattcatttccaaaagcttattttcacattcctcccattaaatagaaaaaaaaaaaaaaaacacacaaacagcctgaaagcacattcgtaattggaaatattttatttaatgagtaattaagaaaaataaaagaaaggcaaaatcgtcattattgaaaaacatttccctcgctgttattgaaaagaattaaatatgcgtttatgaaccattgttataaaacaattgctcatcataggcagctgtactccataaatgttgtacatcttaaaatacttttccctcaaaacagaaatatgaatagctctgggggcattaaaatgtagcagcatctgaagctgttttagggaaaaaaacaactatctccaatacttttgtaaatcatatgatcataagcaacttattcactttccctgcctcagtttacccccactaatcgatccattaactttccagagaagacctaaagtaagtcataaacgttaatctcctaatttacaaacaagaagcaaatttcaagttgcaatcacactttgtgatgcttgacaaatgtttaacaacctctttttaaaaaataaatagtctcaaatgggagcctgtaagtaaatacttgtgctgcccaaacatttggggtttgggggagccgaattacaagtcggcccaggaagctatctatgtacaaccttgaggcgcaaaatcgagcaaattcgcctagacccattctccctccggctcttcacacctggatggggcgcaagcacgatacaggtggaaaaagcgagaaaggtaagaaaccatttcgagactgtttctaagtgacggcagcaactttttttcggtcaggccgcgaggccgcctctccgcccctcaggaggcttagagcccctcctcgcctccccgccagccccggacgggacgcgcattccggtcccgctgcaccgctagggtgagccaccggcgcccccagcccccgccaggagcccggcggcgcgcaccttggcaccaggatttgcgcccgcacgccgccacaggcgcatccttccgggccgacgtttccctcccaaactccaaaagttatctcagcccagaccaggcaaagtctacctccttcctccgccccgccacccaccgtgatgccccccaggccccagcccggccctacccacggcagggaggatgcgccggagggcgctgtcggcgctgcaggcgaggggacgggtggaagctatcggccgggcgcccaaaccccgcggcggcgaaaaggccccggggcggcgtgaggggaaacgcgagatcggctgaagggcgtccgcggaaggcgccgggggcgggataccctatcgcgaagccgaactgagatgggacataggcgggatcgtaagggggcgttcctcgcacgggacgcgcgctgatggcttctacccgcccgcccacggacaacggtcggggtccgggacacacctccgcctctccattccttacggggcccggaatcaccacgtacctccagtctcgtcggtgaaaacaacgaaattctgtcccaccgatcgcgcgagccggcaccgagcttcacaccgccgccgccatgtttgagaagccgcgcgcggagccgcgcatgccccgcaaccgccactgccgccccgccccccgcgcggccggcccgcgtgccctgcggttgccgcgagcacgccctttgaccgccgccgcgtgcggggcccgagccggggtcaagccgagcgccaccgcaggcagtggcggaccatgagacactgtgagcccgggaaagcccttggcactttgcctcctaccccccacgcctacgccaaatgaaaaaccagtcgcagcccaagcacccgaggccgtggggagcccctcgatgggaccccgggttccacgtcaagttccatcccgggaactcgctccccttcactgtcgccttcgaatcctggccaccacccaccctggccacgcacccaaaaagcaggcgcttccctcggaactcaagcaagttcgaggagcagggagaagcagctggttacagcagcttgaggaaagccactgcttggcgggttgcagcatagtccttgaaactgctttttttttttttttccatgagtttttgccacgcattcacctcccagcttcactctctggatttcgttcttcctctaaacccggggttgagctaacgggaactagatgaacccgcagggggaaatcacttgcttactgactcaggagcatccccgagagtgcgttttggggtcccttctgcacgctccctttcccaccgggcaaggcccatagcgcaagtggaggtcgcacaaaggagggggcgtaaaaacagctttaaaacgaccagtgaatctctcagcacaaattacagcaaacagaacgccggagaaaaacatctgtccctcgttctcaggttaggtataagctgatttcaaacttttgtttgaaaaataatacaatgtgctatgttagccaaaaacaaaccattgctagggcttctctctctggaactctttccaaagctggatgtaggttttgcatctgtgatcacctaacttagtgcagagggcatgatatactttttaaatcatgatttggaaatcagagcttaaaactgagaacaaaaaactcctgtggaatatatccattgtctacaacgcaggatagaattttccagttgcagcttctgcagtattaagcaaaagtcaaagtgtttattatatctaaacattggcaagtggcacagaatcaaatggatctattatttaatgctttaaaaatgaaaacctaaatgttaatgccaaattcaagtaaactttaaggcgaaaatagaaagactaggttgatgatatgcaaatattaaagtgagatttggtcctatcaattctataatgtatatcacataggagaaaatgttggagtgtcctaagatgaaggttcaagcatgttttttgagacaagagtctcgttttgtcgcccaggctggagagcagtggcacgatctcggctcactgcaacctccgcctcccgggttcaagcgattctcctgcctcagcctcctgagtagctgggactacagtcgcgtgccactaggcccggctaattttttgtatttttagtagagacggggtttcatcgtgttagccaggatggtctcgatctcccgacctcatgatccacccgcctctgcctcccaaagtgctgggattacacgcgtgagccactacgcccggcccaaacatgttttcaaaagccagaaagaggccggacgcggtggctcacgcctgtaatcccagcactttgggaggccgaggcgagtggatcacctgaggtcgggagttggagaccagcctgaccaacatggagaaaccctgtctctactaaaagtacaaaatattagccgggcgtggtggcacgcgcctgtaatcccagctattcgggaggctgaggcaggagaatcgcttgaacctgggaagcagaggttgccgtgagccgagatcgcgccattgcactccagcctgggcaacaagagcgaaattctgtctcaaaaaaaaaaaaaaaaaaaaaaagccagaaggagatctttaacagaaagaaattaaacagaggtttaatctaaacaa

SEQ ID NO: 1564094 - DNA, 4001 bp, Homo sapiens
ccagagattaattcctctacttcagctataccatctctgaaatgcaggtaaccaggagcagaaaagccacagcagaaaagagggagccctcaaaacactaaagcaataaacaacgagagtgccaatcttgggggaagaaaattctctcaaattgcatcatcacagagaatgtcccctgtctactcctggtccttccacaacatgactgcataaagtgctctgtgctagggtgtgcagggggtggaggaggttccgaagaaatgatcctgcccttccaaacagggacaaaagagacattaatacatattctgtagagaaaatattatcagattctggcttcagattttgtaaaatcaatttcaattacaccaaatacctagaggctttttttttgtactgtagttgcattgcatgaactattttcctaaataagtaagctacaaggttgaaaaacatttttatgtggttcagagattttcgtcaagtagtatgtggtgtcatgggatttgacctacctctgtctcccactccttcctcacctcggggtgctggtgggcttattaaagtcccagatacccatggatgaatagaatagctagggtgtcccccccaaatggaattcatcgccctttgcaaccaaacttctggtttaaaaaacaaacatggagcctcaggtcacttcaacatggtttctctgcacatcccaggctggaaaacttcagttctttaaatgaagattttttttttcccagagtcggtcgccaacaaaaaaagagacggcaccgcttttgcgagtctcacacttattttcctgagtctccatagaaagaagccagctccacaggttttggcacacaagcccagttacactgaacatgcacccgagacagatcctcagaggcccgctccaaaacatgccaaaatacgcagccagccacctacaggccagccaactgcaccccacactgacgcacaaatgagacccagaggcacacagcacaagcagacagagaggcgttcggacacacaccacagaggtgagcacactcagagaaacacgcggacttctttgggtcacagacagaaccccggcgccgccgccgcccgcccgggaagacacgagcgcgcgcgcgtgcacacatacgcgcacaccgatacacacacagacgcagtcacatatgtaatgcatatagagaaaccctatcccagccagtcacctccccgcccccctcgccactcaccgccttctgccccaggctaaccccagccccgcgcctctttgcctgtgcggtcccgggtcacaacgggcagccgtgcgcaggggcgcggcaaggccagggtgccagggacccggagggctcggcggctcctacggccattcattcggcaacgccccagccgtggggccgcagctgcagcgagggaggcggtggcgctcactgcggctcttgggcaatgcaagttcagccgccggcccgcaggttttgcctgcccccctgccgccccccgccccccgcgcgccaccaccgttttccgggacaggctgagggactgagctgctgaccccgggagcagaagtcccaccgtgcccttggctcctggatgctgcccactgccctcctcgcgatgtggcggcggcggccaggtctccttgaccctcaccaggccctcggccccggccctggcacccaagctctgcacttaccacctggcgagctatatcggtcgctgccatcgctcctgcgtccgccagggctgccacgggtgccgccgcaacgggagctactgcacaggaaacagaggagctcctccgacaaagagaaagtgttacacttcgggcgcgaccaagtccggtggggggaggtgcaagggaggggccccctcgccgctgctccaaccccaacctcccctctaccgcccaccccttgaaagtagggtatggagagggggcggatttaacgcgccgcttccccctatggccagaccagttccagttcttcctgcaaccccagccataggcttctacgaaggggggcgggggctcccctcggtgaccacgtcctctgccccccccgccacttggctccgtggtacgtcccgacctctgctgaattgtcacacccccctgctctcctttacatccctaagtccccagaccccgaaggctggaagggagcccccgcccctcccccctcccatactctgctcagcggccgagctctgcagttctcctcccggcccccgttaccccccttcctttccaccgagatcccaaggtgcttagatgggtgcgccttggccgctggagtctcgatgccccactgtcgtgtctccctccctccatggcccgggagcgcagctgcggccgaggtaccggggaggcctgcggcacctgccgctccacagtagagcttagaaagggggcccgtggggggagccgcactgcagcccggcaactgagctgagctgtggcatgtggggtccgaggctagaggtcttgagacgctgcttctgccctggggtttccaagccttgggtgctgtgggctgtaatttcgtggagccaagctcaccacctttgggtacctagtacagacggaacccacgcctcctctctccgacccagccctagacgctcagcaagaccacccaccccttctagtaccagaggaagggctggagatgaaggttctcagctctatggagcgaaatggaggggcgggtgacggggagcggcctccagtcactctgtcccgccccctgatttctccttgaccctcattcagcccgggacaaggcggccaatagggcgcagaggagagaacttccgaaggcaggggtgcgcccgcccgccctccttatccccgtggcccacctccgcgggtcctctctcgtgggcacctctccacttctccggccttggcgccctcccctctctcttgggactggcctcttgctagctccctgtcactggagcacgctggcagatttggcatgcccgaggccccagcgggagggacagtacattccactcctcaaaagggcaggttccctggtgtgggagagagacctgggcccgccagagggaccccagatgggggaggggatgacaaggctatggaggaaacccgggcccaagagggggccccaatggagcatggaagatgaccccgtaaaggcccaaggctggagcagctgaggaggaggcaggagagagggaaaaagaaaagaaggaaccagggagagagaggaagaagggactcgatccagaggccctggtctcggagaagtcagggaagacaagaaaatggagtagccaaagaagagcatgcctggcacttggttccacctgctggatggagcttctcacactctctcgggaagccctttatgtatgtaccctgtgcgcctggagaacaaggactcagcaaacgcatcccagggccgagtgcagggcctcgcagtcaggaggcactctattaagctgagggcagagaacttggatgcgtgcgaggggggcggggagaagaaagaagagacacagtgagggaatagcagtaaggacagtcatgaagagccaagtattcagggagcgccactgtgcgccttcattgtgctggagacccaggagcggcctaaagagaagagcctggcaaaatcagggatcagcgcagaggagctccgcgagacagaaggcgcaggccatagggcggatggcggtggcaaggaagaggggcagctggagtctttcagactctctggagctttggggcagggcctgagccctggactgggttggcagtgacacgggggaccagtgctatatctgaggaaccacggtgaggcttgggccccaaccgcatgggggcggggagtcagaggtgactggcggcttccaggctgggtgtctgggacagggctcttccctggcaaaggctagggcgtggtggactgaaaggccccgaggtcactagccccgatctggacttggggtttgggtgg

SEQ ID NO: 1564095 - DNA, 4001 bp, Homo sapiens
catgctggatctctaccattggagtgtctgtgaggttgaaccccaaggtctccacaatctcagtttgggtgctgcagcaggccccaaaggaaagcataaccaaagctgcagaaatgctcacaggggaaaagaagatgttcttatctggggtctccacagtgaacctccggtacagattgaatgcaaagtcagcattaatggatgacatcttgtagagagtggcatttggttgggatgaatggcaggctgttactttgccttcaggtgatgcacagtggattgtagcatgaagcccaagtaccaagagaaccagatacaggaatggtgacattttggaaggaagttaatctataagagatgaagtgagacaaccactgagggagcttagttggatgaaacactccctgagccagagacacataataaccacccacattgattaataaaacaatagtaaatatttgatgatgtgctcatcaggggctgagcaggggtttctctcccttgaaaaacaggagatgcatctaatatggacagggagtaggagaagtggcttgctgcaaccacggaaataatgccatggactgtcattcagatgttatagcaacattatgaaaacgctgtgagtaaattaaatttatggaaattgaatcactttttttctgaactagaggcagccttttggagagaggggatattcttaggttaaactagtactccctctgtatacattattcattgtagattagaattttagattttttttttcatctggcattttcttaagataaaatctatgagatgagagaacactcgcatcttatttggctaaaagacaaaatgaaagtaatttgtacaatatatgattagttggaatggatgggtggtggtttatggagccacgtacaaggtcatgagctgaaattcatgcattttgcaatgcatggaagccatagaggtattttcgaacaaccagaaaatgaaagaataattttctaaattttacatttctttcaccattaatcttagtaacatctaaacagtcatttctaagttgtaagacatcttaacactattattcttacacctatgcatgttacttttaattattataaagaaagccagaaagataaggtgtaaggttctctgatcctgaaagagtgcaaagaaatggagtaaagaagtcaggtgtggaaatccaatgaaagtggacatgtgtgcttagaaggaagaggtctatgaactcagaaaaaggatccttcctccaccctccatcttcttcctgagtgatcttaccctccgcactcaattgctagaaactgtatctctctcagattgctctcctgagctcctagccatttatccagctttcttttggatataaccaccaggatggtccacacagacctcagtctcaataagaaaatctcaaagttgccagatgtaaacatatcatctccctacaccttaagcttgctccctcatcttcattccacatctcagtttatcacatcactgtctatagagacacctaagccagatacctgggaataatcatagcctccttttattctcattccccatatctaatgaagcatgatgtcttatgaatactaactcttaaataactctcaaaacttctcccttctcttcattcctgctgcctctgcctctcagttcatggcctgagctactatatcagctcctaacagatcacaccatctcctatatcctccataccaaccccctttgttcaccactctatccaatctccatatcatcatcagagtcctctttctttaaaagtcactgaggctggtagaaagtcaattattagatgaccacacttagaccttcacccctagagccaggaatttggtttgggactctgacttgccaacttggttatttgggactctgacttgctgatagagatgttcaaagtttccaaagagaaaaaaagtacttacagcaaatgcccaagaatccacctgcatctctcagaaagcaacatctttccatttttatagcatgtcctgtattgcaaaactagagcactcttagttataaattaaccccagcattaaccctgggatggtattttcaaagctgatgtacaaaaccaaggccaagaggaacaaagcaaaaaatgataaggtttgaactttgagtgattgctttggctgccagacccttcatgtaaaacaaaagagaaagaggattgtcagagctggaggggtttaagtccatgctggcaagagtgtcttcagcaggcagaataggggccataggcaaaagcaccaagaggcagcaggaaaaagttctcactattgggccaaacagcagtggaattggcagttttttaagggaaagttgtacaaaagcagaggctgggtgatcctttctaataggttctgtagaaattatacatgcattcgcagaggaaatgatgtcaaaggtagcttccagccctagacttctgatgctgcaaacatatatgtctgctaagggggaaaccagccctgtcttctcgtcattaaaattccctgtaccgtcccctggccacaggactccaaaagaggatgcagaaggagtcaaggagactgaaattaaagattccactgtccagtattaattgtgtactgattatatgcaaagaagcaatgggaacaaaaagaactggactcagtcaggagacttgagttcaacctgcttctgaaagtttccagctctagtagtagtagtagtagcagtagtagcagtagcagtagcagcaacagcaactcctgcttctgagtatttactacaggcatgtgaagcattttactacagacattttgtgaagcatcagattccagaccctgccagcttcagtactacattaagaatctatgtgttaatttgtagtgggaggggaggcagggaatgaggagctagttcgaactaagcctagatgcagtctatggtaggacttataatccaggacaaatagtactgactttaccttgagggcactgggaagccactgggggatagacagagggtgactctgtgtaccattatttcttcttaacaaaacatagactaagctcccactgtgtggaaagaaccacagtcagcactgaggtttcagagctggttggtaaatatcagtcctgaacccaagaggtctttctaactacctgacacccgctgcccatattgaagaaggcacacctcacaaatgtgatggtcactagtacatgtgtcctaaagaaagggagtgacaagctcaagtctctagactgcgaggttagtccatgtaatataacacattgctctctcagctacagcaagtccctgcagagaaaacagcaaaagactgtgtaaaaagaaaacttccaaacctgtgccctctggtggcatagtcagacaatggcacaggttgttttctgctgcttctgattcagctgagctttgctagcagggcttatctccgacataagagaaaggtacccttccctctgcagactcccttgccctgtgctctggcatcacaggcattagacctgtgcccctgccatgtctctatgttgtaactgtgtaatttgggacaagttacctagtatccttgaacctcagttttctcacctctaaagtggaaataataatgattcccatgtcatgtggttattgagagtataaaatgaaatttagaggtggtgtccagaagctcctataatagtgccccgtacaaagtggggatccagaaacagataattctcttccctttcttctgttatcatatattccctcacctcaagtctccatattccctgggctttatctctaccccctactgctgttcatttctgctttctgctaatacattctccttcagatgcaattgattgagaaggtgtaagatcttgcaaacttatatttatcacaataatttcagtcttgtgtaaagctgctagagtagcacattgaataaagactctctaggaagttttaccata

SEQ ID NO: 1564096 - DNA, 4001 bp, Homo sapiens
tctttcaatgagaaaagagcctaagaatcctagctggttttcattgcccttccctaggttccacacgggaacaataattatataagcaaaacataaagattcaagcccaagacattcaatagcttccacgtatttcccttgaagcctttgtgaaaaatgtatttagcatgacctgagagctgccacaaacaaggcttgaccgtttttaaaaaacaatatacagtgaaaaatcttctagcaccagcatcaggataatctttcttcactgacccataaggtatttcaaactcttgtggggtattatcagatgctgaacttactaccaagcatttaacctcatttggtttctgtctagaacctacaatgcagggctgctgttttcatggatttttttttttatcctgctgacaataatgcctgagctaggtccttccttagaaatgcccccatgattcctaaaagaaatcaactgaaaagagaagataaaataataatatatctttggtataataataataccaatagcttacatttattgaacatttactaggtgtcaggccccagtgctaatttttttactgcattatggcacttaatcttacaatcctatgaggtaggcagtaatatgatacctattcaatggataagaaaactggggaactgagaggttaatttgcccaagtcacaaacctaacatctgacgagcacaggacaaagtctcagatctgcctgactccggagccctggagcaaagacgcagatgaatttgattcaaaatgaagccttagaatgagacatgcctaggcaaatggcaaagctgaatcataacaagggtgttttccctccattccctttaagactattgtgagtcctaacgtttatcaagaagggtcctatttctgaaatcccctgcccctccccaccccccactacttttctaaaggatgctacatcagcagatccagagaggtgattttactgacacacatccccctcctctctcagcatctcgacctaactggcattgcattcttaaagtaattgactctgtttcttaatgtgcctcctctctctgaatgtcatgctcttcctttgggatgacacttcaaaagtcgtttaaagagagctagagtaaggctcgcagggcgccacccgataggggtcaaaatggaagtggggagcctgggtctttcccggagcgaaggtaaactgtggaccacatttcaccacccgaaatggcattctctgcagctgccccaaaaggctctggtgagggccttctggagagcaggaggcccagggaatgaaatccccagcgagggattgaggcgaaagtgtgttccaccacggccctgggctggacttgagggtgggccacggaggaggcgtcggcgagctgctaacgccggcgcccctgcctgcctcggcctccaccctggccccagctgctgttgcccaccgcccacaccctcagcaggcccatgtccaccgtatcatactcacagcacacataggcagtacacgcctggcacgctctcgctgtccctcagcaaatagctgccatccagcccagtggcaagcaggagcttctcgccggtttccctgctgattttgccatgatacacagccactgcgtccatggcctggtggactcttgggcaggccgaggaggagaactgtgcaagggagatgccgctgctactgcagccaggcacaagtcaaccacctgactcccagttcagccagatgtgcaaaaaagagagaagcaccccaacaacaggatgttgtctacttgccttaaacctccttctcacacttcagttaaaacgagctcagcaatttagtagcttggttcgatcgagcttgccaagggcttccatcttctgccccccaacacagggttcatacagagaggggaggaacattggaagaaggattttgcaagattggggctgtactgccaacacacacccttgcactcagacggggatgcttagtaatgcttctgttcttgcggtttactcagaggccaccaggaataacttagctcaactagcccataaggagttgatgatagaggcaagttgtacatgtctctgttggtatgtggacccactacgtagggcaaaaacacactgacaaaatgaaaggaccaagagctctgagaacaaaacactgatagttttatcagtactgtcagtatgcaatcattactgaacatggccatgaagactcctacagaatcagacatagtagatgaacagtgaactctgggcaagttcttcttctccctcttccttctacctcacgcagtcatcttgagaagtcttgatcctgagcaaatattgatttctttcctaacaccttgtccaaggtcccaaagtgctagttgagatacaaaagtcacaatgtacatccaaagatgttccagatgtatctatttgatgggctttagatgagactgtgaatcatttaactggtgctttgcctttatgtggatttgtatgtgccctttggtgtacagggcccacctttcagcattttgtccataaaatctgttttgaatcatttgcaagttgttgataattttgttgtaacttttattctctgttgtttctagaaaatgttatttcttcgattgaggctaaactgtctttaatattttaaaacctttcaaccttcattttcttctctgaaataaaacattgcttctatttcaaaatgtgctaggtaatatttccgcaaagcttcctgcattttcactagagtaagactttatttattgctgaagctgaatggtcttgtacatgtacctttagattatgtaaagtacttttaaaatttgaatttaaataactgaagctatgtcgtctattatatgctttctgcaacttcagtgtgtagttctttgagaatatggcaaggctgggaactcaatagcgagaacgacacttaattcctcacatgtcttaccaatggattggatgtacagagctgacttgcaccaaaggcagatatttgctcttcatctactaggattaagaacaatcctctaagatttcagtggtagctggtagcaacttttcttcttgattgaagagtgtccagccttagtatgcaaagtataaacataagtctcctactagtcattttcagcattaagaatttttttttaaagcattcaaggtgacatttggggatggctctggggaatgggaccaatattattttatcatcttccttcctcacatgtttttgaccaactccacctcttaccccttttcatgctttggatcaaggaagaaattaatctgatatatgaatgcatactccaacattaaggatttgaaaggttgtccaccttgggctctccatatattgagcaggcaaatggttagcccagaggaattaatcaaaatggtggaatttcaaatagaaaggagacagggaaagggatccctttatatcagtccatatgagcaacagctgacctgtgaggtgaactgtgagaacattcagtgtcacataagtgaaaacaaaacctaacctttttttgtctcttaacaactctgaacaaatcatccataaacttaggaacagagcaacctggatctgacagcacaagcgtaccatgcactctttttttctttctctgttttgttccatgttgctaaaatagcacacctgtcaaagcagccaggtatgacggggttcagcacaactaaaattgcactaaaaaacagataaattataaggtaatagtacaactttcacatccagtacctcattgtcatcttacaagcaagctgacagctgagccagccgagccagcccactagtgcagtgttgatgaaaaatactgacatcttcactctaatcctacaccagtactaaacctgactttagcaaattcaaaacttcacactgagcttgaagcgtagagaaaagaggaattgaaatgactctcttccttctctccccatacacacgagaggaaatgg

SEQ ID NO: 1564097 - DNA, 4001 bp, Homo sapiens
gaggtgcagttattcttacttgaatagaaattctgaaagcagtttcttgttgaatctacttttaaagaaggggtagaggaaggagaaagcaaagaataaataacagtattgaaactgtatgactcccaaagcaaaactaactgcctgatctgttcagtctcattaggggtttaactaaaggcattaagttggactttacaattattggattgagttgagactctgagcaactcaaattttactttgaaatattagacaacatgtatggaaaataataaagcaagaggctcataaaattaggtccaaaggaaatataaaaggtgttcttttttttaacctaaacttattcaaaaaatgtaagattaaattttctgatattccaaaattgcataaacatatccacacatggtggccagagaagacaaagttcaaatatcaaggttcttgtgatttaacataacctccacttccattccacatcctctcaggtgtaaataaacaagccaaaaaataaaaacacacaacaacctggattagctgctgctctaaagctcaagaagagggaaggggttcctataccctacaatctgaacccacacatctgttcttgccactgtctgcctttctcttgagttgtaaaaagcagaagcactttcatttatcatggatatacactcatcttgcaccccagtttatcatattctcccgacagctgctgaaaatttgttattctaaattaagagtaagtgaatccatgaaagagaaagtcctatcatttgaagcagcagcaactcaggctgccactacacaagaagccactgagctccctatccagttctcaatatacttgaagcagtgagagaaatttaaaagtaaaatattttgaaagaatagaaacagtcaaaataagggacaatatggggggaaaactgaatctcgtgtcatattaagttaaaaaaaaatttacgtcattgttaccaacttcccctcccaatttgtctagttctaacaggccttcaagctcaagttaaccactttcttctacacactctcaaaataactctattaccagggtctcactcacccagaataattacaatgcctcggtaggcctccactcaatccccaccagttacagcatgtgtacccccatcctttacagaagtgcactcctccttgtctcagtacttagggcgtattcatcaaatgtctcactcttgaaactcaccagtgtgcgattttacttgacttcacgtaaccctaaagaccgtatagcaccatctcccatctcccaaaacttggtagctttcgttttccttcaaagcagaaatgtgccccccaacgtcacgaagcaaacaaagctgaactctatgtggaaaaaaaaaaaaatgaaatcgatgcaacaaagggaaaaaagggaagaagaagggtgggatcggggatgcatgagtcttccaaaggagaagctgccagaggaacttctgcattttaatggttctggggcagcagaggactggtgtgtaggaaaacaacaaaggtggactccccactctccttaccgctgtagagccagaggaagatgcaatatatacacggatcaccatcctgggaacagcggctgcggttgtttgggtcctgaaaagggctgtggagcagctgcagcaatggctggaatccagctaggggctgaaacagcggttggcagagaagggtgggggaaggtggaaggagaactcgccagagccccgcctccgcctttagcagcttccaccgagctctctaagcgctgcagttccagcccaaaaccccggaaggaacaggctgtttgcatcaattctatttttttttaatagggaatctcgaatagcaccgcgagatctgttgaaacattgatttttgacgattccttccctgagaagagggcgaggagaagaagaaagaaaaaggagaactgaattgaattagattagcatgaaggaccttttcacgcggagactaaaagtactgcgcataacttcctgctcagaaatatatgcaaataagaagacagatcctgaaagagcaagctgtatgttgaaaacccatgttctcaaagccttgcgcattttaagattcctattacgtagtgatttttctgatcttagctcgttgtaggaattaggcactaaagtactgagcaatgctgcagagttttgaaggaaagtttcaggtttccttaagcccagaaatggcaggattggttttctttttgaattttgtgttttgttaaattagggaaccctgcttccgtgggaatttgcaggaggcctgattggcaagtttaagaatgaaggaataaattacaaagaaaagattgaaaatattgtgtaaaaagatggatgatttttgttttgttttgctttttaactgactgaagtaagggatttgggagaacatattgcagatgttgaaatggtgaagagagagatcagatggttatttgtagctctaaggaaatgagcaaacagttaataatgtccagagacagaccatatacttcaaagtgtagttttaggttcccagattatgttaaatgaacagaaaaaaaggaatttgcaagatgaatgagagtggagaggagtcagtcgcttgtcctacttcttttcctttgctgtttttccactgtctccagtctagtggtttactgtctttgcctaggctcagtgcttacaatagctttgttaactgttccctacccacaggttttcccttctccaatctgtcttaaatactaattccaaattaatctctttacatgttgtccttaaaacaacctcaagaggtgggtactattacattaattttacagatgaagaaactgaaactcagaaaaatagttttcctaaaatcatatggttagtacattccagagttaggaactccagaggccaccttcttatttttttttaattatactttaaattctagggtacatgtgcacaacgtgcaggtttgttacataggtatacatgtgccatgttggtttgctgcacccatcaactcgttgtttacattaggtatttcacctaatgctatcactcctccagccccccaccccccgactggccccggggtgtgatgttccctgtcctgtgtccatgtgttctcattgttcaactcccacatatgagtgagaacatgtggtgtttggttttctgtccttgtgatagtttgcttagaatgatggtttccagcttcatccatgtccctgcaaaggacatgaactcatccttttctatggctgcatagtattccatggtgtacatgtgccacattttcttaatccagtctatcactgggacatttgagttggttccaagtctttgctattatgaatagtgctgcaataaacatacatgtgcatgtgtctttattatagaaagatttataatcctttgggtatatgctcagtaatgagattgctgggtcaaatgacatttctagtctagatccttgggggatcgccacactgtcttccacaatggttgaactaatttacactcccaccaacagtataaaagcattcctatttctccaaaccctctccagcatctgttgtatgattgccattctaactagcatgagatggtatttcattgtggttttgatttgcatttctctcatgaccagtgatgatgagcatttttgcatatgtctgttggctgcataaatgtcttcttttgagaaatgtctgttcatatcctttgcccacattttgatggggttgtttttttcttgtaaatttgtttaagttcttcgtagattctggatattagccctttgtcagatgagtagattgcaaaaattttctcccattctgtaggttgcctgttcactctgatgatagtttcttttgctgtgcagaagctctttagtttaactagatcccatttgtctattttggcttttgttgccattgctttcagtgttttagtcatgaatctttgcccatgcctatgtcc

SEQ ID NO: 1564098 - DNA, 4001 bp, Homo sapiens
aagggaacactatcatcggtaattaactcacagcaaatataaagcacatagtacagttaattaacaaagcaggctctagaaagtgccctaaacacacacacacacacacacacacacacacacacgaaaggcaactggggcttgaccgacgtgcatggtggctgcctaaattcataaacacattaaatgaaacaacacaatggaaaagtaccatgacggtgtcctacatgtacttctgaatcagaattcagatgactgctcggcagttttcaatcaaggtttatttttatttttatttttttgacacagggtctcactcctatcacccaggctggagtgcagtagcgtgatcatggctcactgcagcctcgacctcccaggctcagtcaatcctccagcctcagcctcctgagtagctgggactacaggcgtgtgtcaccattcctggctaatttttttttatttttggtagagacagggtctcaccatgttgcccaggctggtctcgaactcctgggctcaagcgatcctcctgcctcggcctcccaaagtgctggaattacaggcataaaccattgtgcctggccgaggtttaccttttgttttccttctccctccctctggctgaatataggttttaataagttggaaactcaaagctggacgggaaaggggtcttttgaattatcactctccccaaggacctgtaacacagcctcctaacttgggtcctcagttcccatcatctttaacttaaacgttagctatgagacataaccatgactcactcataccctttccccaggaccttgttttgggaggcgggtcacctggccatgactaaaagggcaacctggggctacatacttaagcaaggccaactggccaaccccaagatcaaacctatgacactgaccatgagaacttggtggccacaaaagatggcctgaaacaagccaggacagcaacactggtggcatctcacagagcccagcacactgcttgcatttatggcatagagtgccatggaaaaggagaaggatggcaaccaagcaccaggtgccttcacattcattactttaaacaatccagtagtcctgcgaggtggtaggatgcagattttcagatgagaaaagtaagacttggagagatcttggttagcagcccatggctgcacagttagctgagtggggaactgaacctctcccgacacctcagttggcatctggcaacaggacagtgctcttgacagaccccaagctgactttctctcctgtctcccatctcattcttacccccaccccctttatttcttcacactacaggaaagctaaattccacacctggcttcccccctagattcccagatctgccagctgcatcagaaatgttacctgctcccaacccctgagaggggtacctcactgcagaaatggatgcctgcagggggtttggttgaatgcagctatctgtgtgccgtgtcccctggagaaaactcacctggctgtcgatagtgatcagagagggaaagagccaccaaaccagatgacagagctattcaaaatctttataaatgccactacaaaaggaactcagccaaagaatccacttctatcacagacaagggcttagtgaaagaaatacccttcggctataaaccagaaaactgagacctggggccaagtggaaaacagtgttggtcaccatcttggaaggactggcctgagaccaaattccccatcatgcctccctcctggcctacaaagtagtcgggcaacaggctacaaaagatgcagacatcgcaacaatcaaaacagatgtatggcctacttacaatctcagacaagtctgcggcacttggggctttggctgctgaaacctccattctgtgaagtatgaaatggtaatttctggctgtgtctgaactctgggcaggaataagttccgtgctctccgagaactgcaagtctctctgattcacttggcagcaaaattattctaagcatcctgtcccgtacccaacccgcctgcccctcccactacacactcacactggtggtttttttgtaattctttgcacttatttctgtcgcaaatcaagtgaaaagtaatccaatctctggcacttgagagtgtggaacctgtatgactgaggaggaggaagagccacctaattaggaagaagttataattaacatcagagaggagagagctggagaaccgcagagtctgcagtaacagcaaaatggagattatttgagacagctgaaacactccacccaggcctccagaagaggacatgcacgggaaacaaagggcatatggtgtttgctttcttcaacatccgttctcaccattacgagctgcaccagcaaacgttcattacttacatgtggacaaacctcgccctgaaatgcactctaaaatacagctcctaatcaaataaatgacttcgcaaagcagaggcttaccttgattttttattacatataagtaataaagtaaaatttaataaagtccaaataactggcagaatgtctatttggctcagtgaagcatgaattatacttgaaagtccatttttgttaatttcaggttcatacagtaattcaaatactgacatagtcagagcaggattttattttttccccaaggagagattccaagggactaagttaataactagataggaatgattttctactatttacttctagtcgtatatttagatatttctatcctaaagcaaacaggtttttcgaatgttactcaaatcatttatttcccacatatgttagtgttaccaccatcaccaatattaccctcactataaaactgttcaaaggtaaacttcagcgaacttcttgaccaaattatcagaacctcctgaattagtgagatctgaattgatacttttcagagatgtaaagttagggtcagcttcaaaaatactcacatattattactctcaagcctattgagatcaacgatcaaatccgctgtcactcagccaggatgaactgggattggtctgccttcccccagataacaagttcaaaatcagaggatcaccttgcttgcatttaacataaaaaaggcccccaagtgaaaggaaacaaacaatccaatgcagttggtcaggaaccctcagtgagcactgctggttgcctacccagtagagctggctcccttcctccttccccagcagagcccactcctggtcacaggtgccatccattcccccatggagcccatttccagctctaggaaggacagcctaattaattctaagccaatcattgcttcagggtgggcagggggaacaaagctcacccaatcagactgcaagaaataactcctcctacatacgggctgtgagcaaggaagcaaagggccccactgcagatggacaccattctacaaccatctgatgaccacagggaagccagcccttgggtgaagctactgccagaacaacacggtgggggaagagacagcaagaacacaggtttctgatgtcacactgagcagctgatcacactgcccctggggtccaccctacctctagcctcccaattatgcaaaataacaaatgtctgtgtttaaggcagtcccagacaggtttctgttccatgcaatctcaagtgtgctgggaggaacaggctaagcagtaactaaccgggtagccaagagtaagagtttataatttgggagactccttaaagtaaataatacatttgcagaaaacattctccttaaagaaaaaggagaaattacaaaggtgagtggttgcctagggctgagcgtggaaatggagagtgactgcaaatgggcacaggtttcttttgggggtgatggaaatgttcaagaattagattgtgaagatggtcacacaactctgtaaatatattaaaaagcactgactgggatactcattaggtcaatatcatggcatgtaaattagacctcaaagctgtttctaaaaccttgcctgggccagg

SEQ ID NO: 1564099 - DNA, 4001 bp, Homo sapiens
acccaggctggagtgcagtgacacgatctcagctcactgcagcctcaacctcccgggctcaggcgatcctcccacctcagcctcccgagtagctggggactacaggtgtgcatgccaccacacccagctaatttttgtatttttcgtagagttggggttttgccatgttgccgaggctagtctcaaactcctgacctcaagtgatccaactgcctcagcctcccaaagtgctgggattacaagcattagccactgcactcagctgaggatgatttctatttatttctttgtattcttcaactttgaataataataataataataattattattattattacaaagagctcttgtaatgagagaagtaacagagctacctccattttgagaaacaaacaagcaaagggttcagggagcacttaccagtgcaacaagtagctcagacatcacaggaccaaggcaaaacctgtcaggccccccaggggctaccattcctctcccatctccaggccctagctgctgagactttcccacgtttttcacaccttacaatcaatcatgctttcactcatttccccaaggaagaagattcaccatctttattttgcatataaatacctcattcagatttctactcatcagaactcagaacaaagacatccagcataagatcagcaaacataagctatctttccctaggaaaatcctctcaagccattgccgatgaatatatttttatcctagccaacccctaacggcactctcctcatatatctgcctctgtcctcctttctaggcaagcaacagatgccatttaaaaacctttcaagaagttcccctactcttaaaatgatatgttaaaacaatgtgtttccttttggccacgctatttttttttttttgtaattttgaaaatagtataagttaaagccaacagaaaaagacataaagggacatattttacagacctcatcaattctccccttaaaatttttttttcaatgagagacagggatatggaagacatatgacacactgtaagccttacttatcctgtggtttatttagggaattttgtgtttggaaaatgacagacttctgcttttaggtagacaaatatgaacaactcacagagaaaaacaagaccacttatttctagcaaacttttataaaatcaaaataatttagtgtcttaatttttctccatacatgagtacatacctataaatgccccgcactacaaaactagccaaatatctttaccccatcataaaaaaagcagttcaatagcacccagaagtcactactcacagctgctccactcacaaagaaaactccaaatgtcggtgaccctcaagagtgaaacgccccacagctggcttgctctgcatggacatacccttctctctaagctaacctgaaaagcaagctggatttgtttactgcacaaacatctgtaattgctaaacatctctgtgacatggtgtaacagttaccgcttgtgcaaactgcccatctaaatttctctctgcaatatgagcacatgaaaacccaagacacagagagattggaaacatctgtaaaaattaatggccaaattgaccaaagtgggagggattaaaacggctaaatagctccagagtgacattcagctttagcaaataatccgtatacttgataggttcctcctcagcttatccatagctcccctctgtgggatcctagctggcacacacattgtttcaacccactaatgcaaacccattacccagtcttgctacaaaatgttatatacagataagatacaggttaactggatttattacaactctaaaagcaaaaaaaaaaaaaaagaaatacctcttctcccatgatgcagccagcctcctctcttcagtttgaaaaggtcccagaactcccctggaatcctcccacttccttccaacagcacggagcctgaggacccagcctaaccctgagtcatacttgggaccaaatgaggaatggggagaacaaagctcgcatttgtttatggttcaggaagccagggccaattcatggcttgggtggcttcgagagaagtcctcctccctcgcctatgttgctgctgcaatctgggctccctcctggggcccccaggtgtgaccattcggacaaggaacacactgagggagtgtttatttggcaagacctagtgatcacgtctgtttaaaaatgccagagaagaaataaaaagcccactatctttcaacagatcacatggctagagagtgagggatatctagaatatagtctgtatatgacatatcaatcatgaacatgcctgtattttaaatgcaattagttgcactacacaaaaattactcataaacacacacacacacacacacacacatacacacacacacacacagaagaaggaaaaacagccgtggctttatggaaatactccccctaggaaaaatacagcaacattgctgccatgtcatcaggagcatcctaacaggttgaaatgaaatatttaaatcacaattttgttctttcccccaaaagagataccattttaatcaccacttcaatgaatctagagcgcagtggttaagtgttcaaaactctggagccggagtgtttgagatcaaaatcccagttgagctacttcctggctttgtgatcctgaacaacttattcaacctttgttcatctcagtttccttatctataaaatggggataatggcaccaacctacagggctgtctggaaaattaaataatatatgtaaagtacttacaaaagtgcttggcacacagtaaatatcatattagccacaattacaagttcaggacaatttcacaaatcaggatgccaagtaaacagtatccttatcttaccacatttctcatatgcttagactttgatgacctgtttcagttaactatggttaatatttaaatttttaattaaactaatttaaaaaccatttgcttactatttattaactgcctgcactgtatctaactctgtaaggggctttaaataagatgctgtcccagtcctcaagaaatttacaatctccttgggtaaataagacataaatctgtttacttatcacacacacacacaaatgtaggtgatgtcactaggtagtaaatgacaaatataatacaagtgctacagaattagcatttggaattcagagaacagataaaaaaaattcccttatcaaaacccaactaggacggaggagaataaacaaatctcctgtgtagaaggattccaaatcatttctttagatactcctccctcaaggaggtagaatgaaactccccactctttaagtgggaggggcacagagtaccctttttccaaagagtcaagtatggaaagagggaaaaaaccagaactttcgagcggagaaacctgactaacacctacgtcagccaaggtgactaaggttaacatctatagcgataagtatggaattaatatgatgtaatgagagcacttcacctctgtggccttcctcccaaaaacccacgactccaatctactcatgagaataacttcagacaaatgcttatttaaggacattctacaaaactgaaaattgccatggtcatcaaaaataaagaaagtctgggaaactgttaaagcctaacaagatgagaaaactaaatgtggtattctggatgggatcctgcaacagaaaaaggacactggataaaaactgaggacatctgaataaagcatggatgttagtcaataatgataatatgggccaggcatggtggctcacgcctgtaatcctagcactttgggaggccaaggtgtgcggattacttgaggtcaggagttcaagaccagcctggccaacatggtgaaacctcgtctctactaaaaatacaaaaattagccaggcctggtggcaggtgcctgtaatcccagctactcaggaggctgaggcagaagaattgcttgaatcgggtgggggtggggggcggagg

SEQ ID NO: 1564100 - DNA, 4001 bp, Homo sapiens
catgggagaagacatttggattaacttctttttgtgcataaccctctcggtgacccacccaaaatgaaaggtgatcaaaacagaatttttggttacctcgggagaaattaacccattactaaagtggcctgtaaggtttaaagtatatacttctgccaatgaactaaatcatcttatgggccaaagcaaaacaagagtgagctaagtgttctgtccccagcagaggaggaggatttcatgcccctcattcattcattcaacaaatatttaggtcctgctctgtgccacacaccaaaagtgctgagcaaactatgcaacactgtgctgtccctatggtcacagagcttacagtagaggagataactgttacgcacaaatatgtaatactgctacgaaaaaaaaaggtgttgtatgagaaaatggaacaggaaccaatttagactacaggtgggagagaagggcactgtgaaaaaagtgacatttaagccaaggggacaacagatcaccactacttagaaaaggaaaaccttttttggcaaatgaccacaaatgggattttaactttgcctgtcaacaacggactgggttaaacctcctcttttccaatccttcaggctttctgaacatcctgactagtgtactggaatcctattacctgaacacagaaaggtctcactttattatgatttattattatctgcagccttcctatgcctggcctaggaacatccaaaaataatctgccagaggctgaaaaacagaagctggctgtcagcaagaacattacctgggtagaccaaacatttaatagcccaagtaatcataagtgccttgccaataaagtggcagcttctctgggcagcaaggtggttccaatgctccggggtctaaatcaaatgggacccagggggttcaaaggttagttggctacttcgaactgatgtttactcagtaaatcaaagaccggatcaccatttccaggtcccagaccctgaagacttaaaggacagtatgggaagtggccttttagcatcacggagcagagagctcgccaggctggaggaaggcagcagcgaaagggtcggggccgggaggaaggggggcgcaaggagaggagcgtcaggtgctctggaccccgggactgcgagccagaccaggaactggggcgtttcccgccccaccccccaacccctgtcaacccccagcaaaggcaacccagccccctccaagaccccgaggttccagcttcccccgagacaggaccaggaagacaccagcagccccgcgcagggccggagcccaccaggtccgggtgcccgtgtccgcagcgcagaggagggcgcgctcgggtgcaaaaatggccaagacaaaactctccccgcccacccgaaaaaccaaccacaccccctgcatccctcagcccgagccgcccggggccagcccccgtgatcgtctgctcaggcccccgcgggttcccgtcggcgccgcgcgcgggctcggcgggcacacgggcgcaagtgggagtgaatgggggtgcgcgaggcaggcgagggcgcccaccgcggtgtcccccgtccggaccctgcccccggggcgccctcccgggctccgcggttctgggactggcgcgccgccctcaaggctgaagtggacgcccggacgcgggcggcccccactcacccattggcgtcgagccgggccgggccgccgaggcagcgtgaaagttggcggaggcgggcgtgggggttggggcgccgggatcggggcgctgggatccaggcgcgagggtccggacgcggcggcggctgggccggcttcttcctcagtggcggcggcggcggctcagcgccgcccgctgctgcctctgctgctgctgccgctgctgccccggggcgactcctgctgctgctgttgcatcgcggcccaatgcgcccggctgcgccgggtttcctgctccccgcgagtggaaattgcgaaaaaaaaaaaaaaaaaaaaaaaaaaaaaaaaaaaaaaaaaaaaaaaaacagcgccgcccagcccagcgcccggcagccgcggccgcgccgcccgctctcccctcctcctcagcgctgccgcgaggctcctgcagctccgcctgccggggacgcgcggccgccgggcgggggcggggccggagaggggcggggccggggccggggccgcgtcggggcaggcgccgggggcgtccctgcggctgaggggcttgggcgccctcctcaccgcccgcgccagaggcacccctctccgcgcggctgccacccacccgcagcggctgggctgacgccccgggaagtgccgcgagactcctcgagaccggaggagaggggcttcttgggggaggggcgtgggagtgcaggggcacgtggagaaggaggagaagggggctgagcgggagggggcgacaagaggtggaggacgggctggggatggagaccagggcaggcccggggccaaacgcctgaccagggtgatggcaggtggccctggggcatcgaggcaatctggaatgagttttcccggggggctgttggaggggaaggaaaagggtcccttggaagggagagaaacgcggcgtcccttcggtggggcgtgggaacgcaggcaggccaggtgcgagttccgcacagaggaggcggtggcactgacgtggggaaaaacgggcgaaggacgcagcggggccgaggggacgcatcgcctcgctgggacccgcctaagccccgccccagtgcctgggccaggtgcggttcgggtgttcaggaatgttcccgagctctgacgttcccaggaatccgctgagatgagggctggctccctccctagcaggcattattgtgccttactgactcccagacctggacggccgacccttgagtgggcgctaaaatgttaacagggaatccgtgggcattcgtgggcaattcagaagctccgttttgggtccattcaccaccacacctttcgccatagatactctgcctgccaccacattcctctaccggcccgttatttccttttccctttccaccatctggtggtaggaagcgatagtgaactacatgggagacatttaggcaaagagcacgtaagacaatagagaaattacatcagtggcccctggaaatggaggaggctgagggctagtggactcaaaagggacaaatgaaagccgaccccctacccaagagaggggctgtctccatacctcacctgtgttggcggggcaactcttgtaaattggttaccgtcctgggatttctgtagaaaattgttcttataactgtttcatgagtttttcaaaaaacctcaaagtcagggtcttacaaacaagagatcagtagcatcatctttctaaataccgttcatgtgtgtcaaaccgatcgaaataggagactaatcaagggacaagaggcccatccacacagaggctgcaattgaagtcctagtgtcatcaatatcagactcctaaaaaagggatcagagaacacggagattaagaatgtgaaggccgggcgcggtggctcacgcctgtaatcccagcactttgggaggccgaggcgggcggatcacgaggtcaggagatcgagaccatcctggctaacatggtgaaacccggtctctactaaaaaatacaaaaaattagctgggtgttgtgacgggcgcctgtagtcccagctactccggaggctgaggcaagagaatggtgtgaacccgggaggtggagcttgcagtgagccaagatcgtgccactgcactccagactgggcgacagagcgagactccgtctcagaaaaaaagaaaagaaaagaatgtgaagtgggccaggcacggtggctcacgcctgtaaacccagcaccttgagaggccgaggtgggcggatcacctgaggtcaggagttcaagaccaggctgaccaacatggcgagcccctctctctactaaaaatacaaaaattagccaggcgtggtggtgcatgccttagtc

SEQ ID NO: 1564101 - DNA, 4001 bp, Homo sapiens
cagagatacagacagagacagagaaaaagagaggagagagagagacagaggtagagacacagagagagacagagaaaaagagacagagagagaggagagagagaaagagagacagagatagagatacagagaaagagaaaaagagagagaggaacgaagacagagagaaagagagacagagatagagatacagacagagacagagaaagagagagaggagagagagagacagagatagacagagatacagacagagacagagaaaaagagaggagagagagagacagaggtagagacacagagagagacagagaaaaagagacagagaggagagagagaaagagagacagagatagacagagatacagagaaagagaaaaagagagagaggaacgaagacagagagaaagagagacagagatagagatacagacagagacagagaaagagagagaggagagagagaaagagagacagagatagacagagatacagagacagagaaaaagagaggagagaaagagagacagagacagagacacagagagaggagagaaagagagacagagacagacagagatacagacagagacagagaaaaagagacagagagagaggagagagagagacagagatagaaagagagacagaggaagagagaaaaaaagagagagaggaacgaagacagagagaaagagagacagagatagagatacagacagagacagagaaaaagagagagaggagagagagaaagagagacagagatggacagagatacagagagacagaggagagaaagagagagacagagatacagagatagacagagaaaaatagcgacagacaggggacagagagacagacagagagagacagcgagagagagaagagagcagcacaccaagccgatgagaagagacttttcaccgtgtcttgttagcgtatgtgaccgcctccctgtatgaaatgccttttgccaagcgtcccaaaagaatcaggtttcagagaagttagtggatggacaaaaacaacgactgcgaataaaaacgcaaaggggaaagagacaaatggcagagggaagaggaggaaaaggagtagaaggaggaggaggagggagaaggaggaggaggaggaggagaaggaggaggaggagggacgatgaagggggaggatgggggaaggaagaggaaagaaatgaaagagaaagaaaaaagaaagagaaagaaagaaagaagaaagaaagggaaggagggagggagggagagaaggagggagggagggaggaaggaacagagggaggaaaggaaaggagggagggagagaaggaaggaaggagggaaggaaggaaaaagctttctggaaaagaaaaggaaagctccaaaagcaatcttgccaagtgaaagaaagaaaagaaagaaagaaagaaagaaaggaagagagaaagaaagaaagaaagaaagaaagaaagaaagaaagaaaagaaagaaagaggaagagaggaaggaaggaaggaaagaacgaaggaaggaaagaaggcaaagctttctggaaaagaaaaggaaagctccaaaaccaatcttgccaagtgaaaggaagaaagaaaagaaagaaagaaagaaagaaagaaagaaagaaagaaaagaaagaggaagagaggaaggaaggaaggaaggaacgaagaaaggaaagaaggcaaagctttctggaaaagaaaaggaaagttccaaaaccgagctcaccaagctctgagcgcaggccccgagcgcgccccggaggttcattcgcgtcctggcgtccccagcgcggtcaccacctcccgcaaaccctgtgcggactcgggctgctgcgtcctgggcgtctgatccgctcctacccgcctgtccaccctcccatttctgtttgcagtagaaagagacgcgcggaaacgaaataaaacaaaaccaaaaaaaaaaaaagtgtggggagcccctgttctcaggacccgggcaaaagcaggcggccgcagggtgactcgaagacccctattggctcctgggggccccccagggacctgccctggttgcattgaccccaatgcccagggtgctgacccctcgcgcgcgcgcgccagccccgcagtcgcaaaggaaaagcgaatctccggatccgggacagcgctctccgcggtccgcccgccggggctgggggtcccgcagcagacgagccaggatcccaggggcttctcctcgcctttgcaccccgtcatgcagcccacagcaagccggagcctcttatcccggcctggttccccccttccctgaattcctccccaactccccgcaacaggcccgaagctgcggggagcgcggcagggctgaggctgcagagggtcccggagttcctcgacctgaactcggtcccagcaagatttgcttcttatttcgcccctggagacgcaggcggggctgggaaaagctcagacacgcagctcaggagctgcaggacgcggccagccccggcctccccgccgtgcgtcttgctggctgggagcagttgctggtggtgacgtttctccccttctcttttctctccccaggggcggaaaagaaaccagagaggagactcagtagctgctgtatctgttgtaggaccttggaggctggaggcttgcgcttgggcgtccaggcgtctctcactcccgtccccaagaaatctatggggcagccatgcgtcctgaccagcgctttctagaacgcacctgctggggggaaactcgaggaacgcgcttaggatggctgcgaagaggaaggaactctgagactggcccactttatcaaataatctggctttttctatgtgaattaggtacgttttaaggaataagtcatttgctctctctctctcttctctctgactttctctctctgtctttctctcgctttctgtctctgtcttctctctctcttctctctctttctctctgtcttctctctgtctttttctctctctctgtcttctctgtctgtctttttctctctctctgtcttctctgtctgtctttttctctctctctgtcttctctctctgactttttctctctctctgtcttctctctctctgtgtctttctgtcttctctctctcttctctctctgtcttctctctctttctctctctctctgtctttctctctctcttctcgctctctttctctctctctgtcttctctctctctgtctttctctctctcttctcgctctctttctctctctctgtcttctctctctctgtctttctctctctcttctctctctgtctttctctcgctctctgtctttctctctcttctctctctgtctttctctctctctctttctctctcttctctctctgtctttctctctctctctgtcttctctgtctctctttctatctctgtcctctctctctctgtctttctctttctctctctcttctctctctgtcttctctctctctctttctctctctctctgtcttctctctgtctttctctctctgtcttctctctgtctttctctctcttctctctctctgtctttctctctctctctgtcttctctgtcttctctctctatcttctctctctctgtctttctctctctgtcttctctctgtctttctctctctctctgtcttctctctgtctttctctctcttctctctctctgtctttctctctctctctctgtcttctctctgtcttctctctctctatcttctctttctctgtctttctctctctcctctctctctttctctctgtcttctctctttctctctcttctgtctctgtctttctctctctcctctctctctttctctctgtcctctctcttctctctcttctctctctcttttctctctcttctctgtctgtcttctctctctcctctctctcttctctcctctctctttctctcttctctctctctgtctttctgtcttctttctctctctcttctcttttctttctctctc

SEQ ID NO: 1564102 - DNA, 4001 bp, Homo sapiens
ctacacgcactcccatgaggctttcaaatgataccctcattatcataaagagaaggtgcgctcttaccttaatgcaagctatccccaaatcagagtctgctaaatagcaagtgagttgtacagtattccagggctctaatatgtaactatttaattacaagtggaaaaaaaaaaacgattagaagagctattttttaatgagccccagtgacttttcagtagcttttgggagaggaagattcaaagcttggattaatccacattctgagccaagcgcagtggctcatgcctgtaatgccaggactttgggaggcagaggagttcgagaccagcctgggcaaaatggtgaaactccccgtttctacaaaaaattttaaaaaattaaccaggcatggtggcgcacatctgtggtcccagctactcaggaggctgacagaacaagaccctgtctcaaaaaaaaaaaagaagaaagaaagaaagaaaagaaaagaaataaaagaaaaaaaaaagaggagtgttctggctgggcagagtatacacactttatgactgtccaccatgtttccaaagaagccagtgtgataaaagattacacattggtcaaatttataacaatggcaacctctttcctgagttcaacaaaaatttagtgcaaagctaaacaaggcttctccaaatccctccacaaagttttgtaatcataaaagcgacagaaaatatagaatggaagacgctggtgtctcatttgctatttgaacaacaaagccatcccacttcccaaactgattaccagtgcggcgggttaggaatcacttaatttcttcctgctgtggagaggcaggaaagccgagaaaaccagtaaattatcttcaaacgcttctagtcgccaagaatctttacattttaaaaggaacttcgtccacacgaaaggtccgactcaacccttcccagagaaaatgaccactacacacttttaactagaacacagggtgactggactgttgtttatgtgtttgcttttacaagttcatacaggttcaactggtaagtttccagatggattttgttttgagacaataaaattcaatgttctaaagcaaaccacacacacacacacaacattcctgatgagatacatctggaatttctttattattattagaactcgggtcctgctcttaggaagcaggctttcaggtttctctaagtttgcgcaggtatccagtgcgcagtggatctgggactggaagccgaaagtcagtaaacattgatgggctgaagggaatcgagaagttgcgctggcgacagctgctactctggatttcgtagtgatcacaggcacgggtccaaggggtgccgaaccagggaccccagagaggcaaacataggtggggacggctcggggacacgttccttcgctggcctccaggcagccccgcaggtgcaggccgccactggcgggcccgggagcgccagaggacccggccaggcccctgcccggaggagggagggggaggggaaagggactccgggcaggagccatttaaactctgcgaggcgcggggaaccgccaggatcacacgcccacgccggtcccggcgcccaggcccggcaggtgaccccagcagacgcgcgcgccagacccgggggcgcgagcctaccgcccctcccgcgcccctacctcgacgcgccccgcagggcggccagctcccggctgtcagcgcccgcgccccgcggccgccttaccttggtgatgaccagcggctcgccgtgctcgcggccgcccttcagggtgaagccccacggggcgccgccgctcagctgcacctccaccaggcgcccgccgtccgccgcccgcgtctcggcctcggccaggcgctcgggccgcgcgcggggctcggcgccctccatggcgcgaccgctcagcgtccctggcccgcgcccatgcactccgggcagtcccggccgtgggatcgcaagggaggctccgagcgccgcagaacttgcgccgtaacttggaaagaaagtgccggcccggcggcggagggagcccggagggctggcggggagggggcggggccggggccggggccggggccggggctggcggggagggggcggggccgacggggggcggggcgggcgcgttcgggagctcgtaccgcggggccggtcacggggagcgcgtccagaggtccagcccgcggcccgaagggtgagggacggggtcaggtgcgcgctcaggggcccacgcggccgctcgtaccggggagagctggagaggggcgcgccccggttctctcgcccggtggaggggagcgggccgggaggggcgctcaggcgcgcgcgccgttcagcgggttcggggtcggggtcgaggagcgcgcgccccggggctggcggagccagcgcgggcgaggacgggggcggaggccccggcgccaggtcgggcctttcctcccgcgccagagctctgcagtgcttcgaagctctgggcgcccccgcccgccggttggaggccaggaccgggcaggtgaggcggcaggtgagatgggcgcggggtggcgtggcgggagtctccggcctcctccgtctcggggcgcgcggcccgccggcgcccacactttgttctcgcgcaccgcgggctgccgcgcaggtgagagcggaagcgccgcgggaggccctggtgcccgcgctgtggccgctgccccggggcagagggaccgcccgtcccgcgcggccctgcgcgcactcacactctggacttagagagccgggaagggcgccccccagcagcctgagccgggcgcgggtccggcctctggaggggcttggaaggcgggcgcagaaggaccgtgccccgtttccacgagggccttcccaccttcccgcagaggcctcccacagccaccgcgcagaaagccgttgcgtctagatgctgtccccactcgcctaggattggaccacaaggtcttcaagtttcccaggtttacatccccgaaaaggggaggtggaggtctgggattggtgaaagtttgcggacaacatgtgtgccacctcttcctgctcggtttcagtttccatgaaactctggtctaaagtacctgcatggataggtatttacatgctttgcaaaaaagctgttttcgttgctgtttctatacgtagctgaaggctggtgaacacctcttttctctaagcagctccatccaggcccttttcagaggtgacgatgctggagtacgcatccaggacaggccgggagagcactggacagagagtcaagggtccccgggtctgggttctgccactgtcaagctgggacaagaaatctcagctctggtctgtttcttcagaggtcaagtgagaggggtgcattctgtggaggtgtctcatgcagccgattaaattcagagtcgcagctccactgggcacctgtcatggcgctgggcacgtggtgactgccccataattaacttctaactacagtctctgaatgcctttagttagaagaatgaggcgattttttctttttcaaagattaaacgaaggcttaaggaatgtgcctctcagaatcaagtcgagtgtatcttcactgtggtgatggtcacaggagctgccaagttgattaagctaaattgcacagaactaaatgcacgtgaaacgggaaatctgaaaaggcttggtggattgtatcaatgtccatattccaggttgtgacattgtgctgtagttttgtaacgtgttgccattggaacaggcaggtgaagagtgaagggtgcacaggacttccctgtattattccttaccaagaggcgaagccagttgggtggggactccgagaatttttctgtcttacaagaggattgtaaaatgcaccaatcagcgctctgtggctagctagaggtttgtaaaatggaccaattagcactctgtaaatggaccaatcagcgggatgtgggtggggtcaaataagggaataaaagctggccactgcagct

SEQ ID NO: 1564103 - DNA, 4001 bp, Homo sapiens
ccacagcagcaagcactctctggggtgcttctcaagatgggtcagctctgggcagagctgaaaaatgacctctccaaggcaggttgtctaggcagactgtggaaattctgtgggcggtgtgaggagaaaaagaaagggaggaactgccagatcatggagggctgcatatcccattgtgaccttggtggaaagagtggggagaggaggagcttgattagaagaaattcctgaaggccaggattcccctcaccaaaggagttgagtgtttttgttaaaaaaaaaaaaaaaaaaaaaaagcatataactttctccagagaacactggagggagactgcctcaggaggggttgtgacagtggatgacaaacgcatctcaggctggttaaagtacatgacaagtatgggggaaagggtgctggatgaagatctgggctagtttggggaggctaatgatcagaggggtccctgccagcccctcaaaatgttgcctcagcatacctcagactcctcaatctgattggtacacccatggcaacactccagggttgctaagagtgtgggccccaaggcctgaaggatcccatacactggaagtcaaccacaggctccaatgcaaggcgaatgccgcacaggttattgtgggtgtgtgttgcggtggacgtttgctgaaccctctgctgagatgtgaccaatgttgaaccccacccccccgcaaaaaaaaagtgatatttgctccctgctgaaaagacacatctttctatctccagcctgaacccacatctacaacttcaactgccatttaagcgggttggaagcgggagggcttttcggatttgaggatttaagagaaacaacaaaaaagtggaataaagttcgtaaagtccgttcacttggcaatctggcacctcaaggtgagtcgtcccacaagtcactcttcctggtaacagctccagctgcccctacccctcgccctcacccctacgggggaggctcgctttgggggttctggagcactcaggagagctcctctctcctgtcctcagctgcaacttggcttccagcagatcacagactcctaaaacaaacaaaccctggcggcggcggcggcggcggcagtggcggcggcggcggcggcggcggcggcagcggcagcagcaacagcagtagctccagcacagctgcgctccatggcgcaagtttcctccacacttctcaacgtgcaggaaatctcgccggcgctggggcaggactctggagggagggagaggccgagccgaaccggcggcaacaacgccccaagagctgaatggatgtgtgcgcgtccggccgtgggaagtgtggctggcaaaagccaccaatggcctcatctccgttcccacaccagcccctagccctgcaacctgcctgggagggacggcccgccggtcgatagaggggacaacgctgccaagagagctgccaagccgcgatgactgtcccttcagtccttcactgtcccgcagggacgcagaggcctccaaggagaaatccccaacagcctccacttccttcggcccaaactgagggaagtagccgccccgacgtggggcagcaagggctgccccagcgccctcgcgagtgtgtctgcgcgcaaggttctagccgggggccagttgtgctcccagctcgtgttccagccacccttaggggatgtctgcacctggactggtggcaagacccctccgtgccgctcagagggtctttcgctcccagccctaagtttcaaagttggcctgagggccccgtccagcggcagccttcgcacccgcttgtccattcaaagttaggcgccgttaggacatcagccgccagttcttaccttagacactgtgagcggctcacagtgttccagaccccccttaagggtgaagccccagggtgcccccccttgcagctgcacagggacgtactggaaggacccaggccggttctccatcctcggctgggctcaggcgccgccgggctccttttccgagggggctacgttgcctccgcccccagcagctccgccaccatcgccctccagctctacgccaccccgcaccgccctgctccgcctactctcccggctggagacgctcaggcagcgagcgagcgcaaggaggaaatgacacggagctggagaaagggggagagaggggggaaaaggagaagggaaaaaaagaaaagaaaagaaagaaggagaggcggagggatagcgcgtaatggacaagaaaacggagcaatggggaggggcagtcactgggacctcgcctataggatcgctggggagtgggagcgaggcgaggcctcacatcaattgttacattgtttcattcaagcagggcccctctttggtcctcctctttactgccgggttccccgcccctccagccagcccaggcgaggggaggtgaaagtcgttagtgtggacggcccgcgtggctgagtgggctgaaacgctggtttcctgattagcgcgttcatgtttctctgactgcctttttcttctgaaggtcccgagaacggagacctgggagggttaaaaggctgctaatttgtggaccttgcctagaggggtggaaagcaaagccagcaggccagcggacatagtgaggctgtgtgtgtagactgctctgtgtgtacgcgctaggtgtgtggggtcattatgaaacattgccccagagcatagtttaaataaagaagcactttgaggatgccccctgctcgggctcccccgcaccctggctcagtgttggtgtctatggctagcactgtgcttgtgtatgttccagtcatctggagttcctggcacggccttgcacttgccccaccgagatgagcaagccagcaatcagcaaactttatgactagcagtattgtctctaaacaaacctacaggaaagagcatccattgataagctggccaattaataatgttgtgcctttgggaagaatcagcttttagactgggtccagaacatctctgcacatctgttcaagcttgaccttgtagtttctgagctgggcttttgtaatagaccaaacagccacaataatagtcctgaaaagcgaatttgttactgaatcttgtgctgatttctctgccttcacttggacaggttatcttctctctttgaggtgttttctctggagccacatgcgggcagtgaatttttaaagggcctcgcactagcggagaaagtgttgacaactcagttgtgactcaacaggatgttcccactctgtctcgcctgttcagtttcttcccctgttcttgtgcagcttcttcttcatggccaacaaacacactgcggccccttccttcacagccagctttctgcggtcaaggtttccactctctacttctacttcctcacctgtcactgcctcttcaacgcacagcagcctgcggtgtgctgcagcaggccactgaaatgtctctcaaagtcacccccctccatcaatccttttttcttagcacccccctggactgtctgcatatatgatgctgccctgacttttctttaataaaatggcaatttaggtgtttatagcctgcctttttaaagtccttagagatgatgcacatgggaaaccatcctcgatcttttaggcctacaaacaccgtcttgatcatgtttattgttttatattttccttatttgaaagcagaaaatttgataaaatggcaactcaacttgttgattcttacttgtgttaacctatgttataacattcatttgccctgccccaccttgaaactcagcattttttttctttttcggataatatttctatgattgtaacttggtagaatccagcgtgtttcagtcccagcatatctgtaaagttcagttcacaggatatatagtcatcactcaaggactattagaattatgtgtctagactagaggaaagacgtttggaagcagtagacacacatctgagccctggccttgtcactaactagatgggtgacct

SEQ ID NO: 1564104 - DNA, 4001 bp, Homo sapiens
cctcactgtcctcaggaaactcaaactccatcacagagccatctccaatgctcaagtagcggcccccagtcggtggcacggtgtgacccccagcagtgctgaggctggtgctggctgtcccttgggccccccatggcaggctgatgagcagcagggcagctctgagcatgcttaagggacctgtgccaccaccctcgccccccagaccaggccactgctgagagctgcccttgtcctgcattaacaccatggctcttcctggaggacggatggcgtgcccaggccctctgcggcttaggagaacatccccactggtgctgttgggttgtcctgagaagggttcatgggtgggtcccagtcctgtgctgtcttccttgatggcagggctgtccctgaggaggtaagggacacagagaggcagctggtgagggtcacttaccctggaggccttggtccagccatgtgtcttacctctgaagagggaggcagtcaagaacccaggagcatggggatctggaagcccactgctaagagtaaaactcagcagggacccttgccccacactcaggaatggagaggcaatgcctagtgatggcccttgagtgccattcagctgtggctccctggcccactctacctgcccctacagtgactcgatgaaggtcctgctgggaagcaggtcctccctccccagggaagttgccagaaggggcggcaggagtggatcagacagagccacatgtctactgggggggtttctcctccttttgtcagagctcccactgggctgagactttgacctcccagagccactgcgttacatctgagaggctgtgctcagagtgcagggctccttcccatgcccacatgcgcccctaccagagcctcaaactcagtggaattatgagtgtttctagcggccagcaacacccccttccacttctcaatctgggcagcgaccaccgtagtgtcacatcacctgctagaactggggcaaccaggatggagacacaacagctttacatcacccctgtcagttgcctcatgcactgttgtgtcccagtcctagaagaggactgcctctatagatcctatccgtctttggcattggcctcccgtcatctgagactggggtgaggcagaagtagggagcagaggttaggttaagccaaaggctcatcccggcgagcctcccctatccctagcttaggatgacatggcctctgctggcttgaagttcgggtcacttaccctggaggccttggtccagccatgtgtcttacctctgaagagggaggcaggaaaaccagtggggtgggagaggcaaagtacaggagctaagatgaaggcaccaggactgaagccaccggggtgatacaaaccagctcagaagggaaaggctaggggccatccaccccatgccccatccctccagtagggctggcggctctgagtcactccaagaggggtttggcccagatcccacaccatttctgcttgaggggccgacagagtttgagcagatgcacccacaaggcaggggagggagtcccggcccttccaaaacggccaagtgttcggggtaactggcagtgctaacaggggctcctccctacctgggagtccggaagttgtcggacgggtggctagcagagctcgggcgcgaacctgggagggaggaaaggaagggcacgccgccgtcccacagccggcgacccgctcgggccgtctcggagtctgggggggccccttacgccattcctgggccccgcggccccgccaggcctcgcaaacgcgcggcggcggcggcggcccttccctgccaggcccggccgggcgcccgagtgggcgatcgcggagcagggtcggggccagaggccgcctcccttccggaggctctcacctgccacagccaccgcgcagcttagctgcagcgtctgcctggccggcagtcgcccgcgagctcggcctgtcagggccccgccccaccgaagcccctcccttccccgccccgcgcgtcagggccccgcccccccctcagcgtccagctcaactccggctgctcgctgggctccgaccggttgtgacgtctctgggagtgacgcgccggcgcgggcgcggtgcgggtgagctggtcggcgcttggcgctgcctggaccaatcgcttggcagcgcatctgaagctgttgtgatcgctggggcgacccgctctgggagggagccccaggcattcccgattacgctgcgacctctaaaggcaatgggacagagggttagacgttagcagggctgggtgcccggggttagggttttggccacgttgccgctcaaggtgcccagccctggggccccagggttgagtttgaccgacctggacgccaggctctgtgcggagttcctcctttcgttcaagtattgaccgagcgcctatttctattttatgtatttattttctgagactgagtcttgctctgtcacccagcccggagtgcagtggcgcgatctcggctcactgcaacctccgcctccctgcaacctccgcctcccgggttcaatccattctcctctctaagcctcccgcgtagctaagattacaggcgtccgcccccgcgcccggctaatttttgtatttttagtagagacggggtttcaccatgttggccaggtaggtctcgaactcctgacctcgtgagccacccgcctcggcctcgcaaagttctgggattacaggcgtgagccactgcgcccggcgtaggccagtttctatactgtggaacattaagtggacttgtctgcttttccaaactttggcgccactagcaaggtgcagaggctttgtggtaaaggaagagaaagaaggcagaaagttggggaaaaatatgatgggaatgtgtagaaagaaggtcggaaggcagtacagaagacagtacagagttggggggggggggatcatatgttcccaaagcttattggtgcaactggaatcaatctgcacacttcaacctcttgtcaagactgtgatggagtcggaggtatttgccccgggtaggtgcacaagacgcatggttgcagatgtggaaacagaacagaacaaaaccacccacgtctctaatgtttcaaatgaatgatatacatttgtttttattacttatttatttatttttgagacagggtctcgctctgtcgcctaggctggagtgcagtggcacaagctcggctgactgcaacctccgcctcccggattcaagcgattctcctgcctcagcctcctgagtagctgggattacaggcgtgcgccactaccacccggctaatttttatattttttagtagagacagggtttgccatgttggccaggctggtctcaaattcgtgacctcaaacgatccacccgcctcagcctccctaagtgctgggattacaggtgtgagccaccgtgcccagccaaataatatacttttaataaatttattgacatttaaatttattttaaaactttatttatttatttagagacagggtctcgctctgttacccaggctggaatgcagtagtgccatcataatcactgcagcctcgaacccctgggctcaagcgatcttcccacctcagtatcccaagtagctgggactacaggagcatgccaccatgcccagcttaaaaagtttttttggccgggtgcggtggctaatgcctgtaatcctagcactttgggaggccgaggcgggcggatcacgaggtcaggagattgagaccatcctggctaacacggtgagaccccgtctctactaaaaatacaaacaaattagccgggcgtggtggtgggcgcctgtagtcccagctatttgggaggctgaggcaggacaatctcttgaaccccgggtggggggaggttgcagtgagccgagatcgcgccactctcctccagcctgggcaacagagtgagactcccatctcaaaaaaaaaaaaattgatttttgtgtgtgttttacaaagttca

SEQ ID NO: 1564105 - DNA, 4001 bp, Homo sapiens
agccccttctgccagggaagtccagcaaagctgcaaactaaaaccacaagtcctggagagggcccagggaatccacaggtggacactccagaattcaaggtttctatgttcacttaataattcccaggtcccctcaaatggcagtagaaatatgtgggggttggaggttggcgagaggatggaactcctcagtccgagggcaacactgcgaaaagccacatattctgagttgtgaacttggggctggtggcaagagtcgagctgtcctgaggagccacgagagggagcaagccttgccagagagggcatcccaatcccccgtcttcgtctgaatccctcaccagaactgctgagggatttcgccagcggctttgctgggaaagcgagatggttcctctgacttctcccagctcacaggcggcctcaatgagaagagcgcacacgcctggggtcttgcgtccactggcctggaaagcgagggctatgccccccaactctgtctgagatcaagtcagctccaggggaaagctggaatggcgggtctggcactcaggctgtaggccgaacgaggcaccccaccggtagcagagaggcgcgggttgccggggaaggcagggctgaagttgggggcggtgcggagtgagcagcagggcccagcctgcctgcggcctcacgcctctctggcaggagactgcggagaccgcctccccgcccgctctggggctcggctcatagggcacggagatccattcactcccgcggggcggcagaggactgccgggcccagctgggccgtaacggcggcggccagagacgcactcacaccccgactcgaactccctccctccctttctctcttgcagacacgcacgcctgccatgtgtttgactcttcgctcatagtcatcaggattcctaaagtgtttttaacagaaaacacctccgtttccccaaaggaaccggggggctgctgcggagatcagcggtacagtgcttctctcagagcccgccccgcctctcaattctctcctctcctcatgacttctccccacctccaaaaaaaaaaaaagtcctgcaaatattttcccccagcacacaggggcaaaggtaccttaaacctgaaaggtgcatttagatttgtcccagggcaaaaaaaagtccattgcttgccaaggatcaatgaatgtcccagttcgtacccccgggacgccttgcacctagtctccccagtccaagctgcccaaagccccgcaacccgcaccctaggagagccatggaaaggggcaaggggcaaggggtaaggggtaaggggaggagtcggagaggcgcgttggaggggcgcctcggaccgggaggtatggggtcggtggcagcgggagcggccaaccttgcccaaaatgccaagtggggcgtgcggggccactcacctgcttggaactccacttggcgatttttttccttttcctcctctagcagcatggagtagaggatcccgacagagttatggatgccgaagatggagccgttgcaccaggtggcagcgaacaccaccacccagccgaagccaccttcgggaggctggaagccgcgcgcggtgccgcgggtctctaccgtaggcgtgggctcgggttcgtgcacccgctcggactcgaactccagctccggcaggggtgcggggtccggtaggggctggggctccggctggggctcgggcgggggcactggcacgggctcgggctcgggctcaggctccggctcagactccggctctgggctacccaccggctcctgctgttcctggtctgcctcctgccagggcccctttgcttcctcgctcgcctggctttgcagcgccatcgcggcggggggactgtggctgcttgggccagaggagccgctttgtggctggtacttgtttctgctgctgcagctgctgctgctcggagggctgctgctgccgctgccgctgcctcctcctccaggctccgcgccccagctggccagcccgtcccgcgacagacggtccctcgagccctctcctcctcctcccacgtccaacccccctcctcctctccccatgtcatctctctctcctccccctcctccacaccccccacctcttcctccctcaacaggcagccgctacagcctcgctcttctccccagcccttcctcctccttttactcgcctacctactccagccgccactgcctcccccagctcccttcccaaactactgaaccctgttcttgcccggatgcccgttagaggaaaagttaaaatggaaaaaaggaagcacaaactatcctgttctcctgccctcttttccccgcaggctctagaaccgacactgatcaaccccgagcctcgggaagacccctcctattttttgctcccataccctccttcctcacaagcagcccgcaactgaggtggcaccggggaccctaggacgacagctggcccgcgaggaaccccaccctgccctcaggagctcccatgtccctccttggacttgaggaggacgacctgaggggacagcctgggcctcggacagcgggtggacacaatcttctcgagcccgaggactcggccccccgcggtcctgcgcacccccgggagtctccccctgcccccgctcttcccggcaaatccctggcggcctgggaggggaggaggcggccatgcagcgaggcccgcccctccgggcagtcaatcagggctttgtttgcgccaacctggagcccggaggagcctcagagggccgggtctgggccgggccagggccgggccgggtctgggccgggccagggccgggccagggccgagtgtgggccaggagccgggccaggaagggagggaggtggcaccagtgggggccgggcccaggcccagtcgggagccgaagctcagttcaagctcctcccgacaatctgtcccggacttaggaggaacgagttggagtcgggtccagccgccagtttgggattgggctgccccgcccccgatatctcggctgggctggtccctcaggcctcggccgcggcttttcaggtgctggagactcagcggagctgcaagcggacggatgtcttcccagcacccaccgcccccttccgcccacctcaggcatgcagacatgggagtcccactgtatgtcgcagactgaggccccagccccactgagggtaagggagagtttgttccccaggaagcgcgccgggtcagggagaaggaaaggtgggggatctgtctttctggtggccgggcactcagcaggggtgcgcaggggtgcccagcctcagccctcagggcccgctcggcgataccgggaagctctgcctcccctaagggtctacgcgtctaatgcactaaacgtgaagtcgtggtgtcgttaccaagctactcggcttccacgagcgggcgggcgagtggcaagacctttctaccctgcatctcattaaccctcctgataagtgaaagactgcatagccagaggtgatgcagctccggggctgcgtggctgcgctagatgcctgtaaatacagtcattaagcacctgagggctggcggagctgggtggaaggatatagacgtcctgaggggcttgcgctgccatatgagaggaatcagccaaattcaaaaatcacagggccacgccactcagcagggaaggcattgcccgaacagagcacgtcccttattgccctaaggtttattattacctgcttttttgcacgaaaactgaggctcaacgaggtcaaggcatttattagcctaagatcatgggccaagtcaaggacaagctagaattcaaggcaggtctccatataacgagaagcttcatgctccctgtgtttcaccaaaagagtctaggatttgaggctccctgggaggagacagaggagggaaggcaggatctgactgcactatcacagtgggcttctggaagaggtggtgttcaagatgggcctggaattttttttttctttttgagacag

SEQ ID NO: 1564106 - DNA, 4001 bp, Homo sapiens
tctctgcctgcgaaccctgttcccttgcttttgttccaaggaattacttatgtaaaataccccaagccctctaaaaattattttaacttgtaggggctaaccccaaatatgcgtaaaagtagtcatatctaaggtaaaataaaaatatagtaccctaaatatttttactgtataaagaaaccaatgaaaattgtcttcaaaatgccaacatttattctgaagatctgacttcggagaatttgatagactaatgagtgaaagtaagaatgtcctacaatacaagttacattgccctatactactcccaagatctggtcaggaaactctgggtgcctctcctgctttctcctttaagaaagagtagaaattagagattctcagattcagaaggtaacaatggagagccaagcagatatttattgaaggcatgctaaatgcccaaacctgcaatgcactttgggtataatcatatttgaaaaacacagatattcgttctagcaccaagacaatatttaccactcaacctgtcttttctgaataaccaatgagatgggacagagaaaaaagtacgaaatacagtacttgcctttcaagagcttataatctggtggaagaaatcaaagtagtgcgttagagaaaaattaagtactaaactgtgtagtacaaactttaagagcaagaggagcatagaaaagactacaaccagcatgggattgactaatttgaaaattgccgaggtgagagaacctaaattgaaccttgagagacggtaggtacaacctggttaggtgcaggtaagggagaggggcagggaagagagaatgaacagaaacacaaatgtgggaacaagcacagcatgtagaagcaggcatcagtatggtttgtgccaagaagaaaggaacctaactggaacagagaattcccttgttgactgaaacagtatcagacaagaagtgtgataaggagcatgttatgttgaaaggcttgaaaccaaggggtgggggtagggggtgtaggagggggctgcatgttttgtgtgtgtgtgtttaacaacgaagtgacttgaggaaatccaccacattttagcctattagggctgcagcaaacacagtggattacattacaaacgggagaggcagggagactagcttaggatggtgcaaagtacagcagacaaagatgcttgttggcactgaggttagagatagacttccccaatgaagacacaaagaactcgatgatgtagggaatgaagacgagggaagagttcatgataacgctaggcatctctaggctggggggaaaaacaacaacaacaaggaatcactgacaggaaaccataaatgtccctgctgttatcctgtctgagaaactaattcatgttgataacagctgtcatgccaatcaagtaactgaactgcattttaatagatgccttcaatgccttgacctcaggagtgacagggggtagaaaccgaaggggagcatctttcaacagtatcccttacactaatacaatggaggtgtttgcttactccgcttacaatcacggccgccgttgcaaacttcacccttagaaaaattaggattattccgggaaagatacccattcaccctctgggtagcaggatcttgccagttcctcagctgtcagagcgagctcgtggagagaagggaggcgcctgaagaaggcggcctcccaggggggtcgaggaagcagggttcaatcgaagaagtaaaaccaccgatgccagaagagtgaaagacagggaagggactcagctgaggggagagagagaccagaggaccgttaagcccctcccaggccgggaaccaggccagcccggccccgcgcggcctggcgcggcccagccccgctccccagcctggaagtccaggagctccccctcacctgctcgggctcatcggacgactgggaagctgaggctcccacagtcggaaacgccactgcagcgccaacccggaagcattgaaaccaacggaagtaaccaaagcgttgcttcggcaaccgcggcgcagccatttcaactccgccccttccaaaactaaaaacaaaggcgcgaaataagaggcggaagcggcagagttctaaaggcgagggtcggaaccactgcaggcgcagaagcctagaggggcaaccggacttgcgggaggtggaggcagggcagctaaggcgtgagaatttggtagcttccccagttaacgtgctcgccagaggggaaagaggtgtcgcctcgtcaccgcgaaacccacccacctggcgcgtagaaggactagaaaaggaaggggcctcgccccggtatcagggcttgaggagtgggtcaaggggagtggtgggcgtagtgccctgcgcgctcagtacgaaaaaggcggcaacgtggagggggtggggcaaaggcttcaaaacaaaagtaggaaagtgagacataggggtgagccgaatttagtgaggtgcctgggctcaatgagaaaataaagttcaaggccaggcgcggtggctcacgcctgtaatctcaacactttgagggtccgggcgcatcacttgatgccaggagttttgagaccagcctggccaacatggtgaaatcccgtctctagtaaaaatgcaaaaaaattagctgggtgtggtggcacgcacctgtggtcccagctactcgggaggctgaggcaggagagtcacttgaaccccggaggtggaggttgcagtgagctgagatcacgccactgccctctagcctgggtgacaaagcaagactccatccaagaaaggagagaaagagagagagagagaaagagaaaggaaggagggagggagagagagaaagaaaagagaaagggagagaaaggaagggggggagggaaagaagggagggagggacggagaatgatccagacagcacctactggacgtcagacattaaccagtgaaaaattacggtcagaccccttactcgaagctcttgctttaatcagaaacttcacttaagaaagagcaagttggataccaaaaaggggaccacaaaaagctaaacagatgaggcagaaaaacaccaacgggaaatcccagttaatccaaacctcataatccaccagaagatgccaagagtccgacccccagcttccgactctggcccctctggctgctggaaggggaaaccgcaaagcccctgggtgattccattagccaatgtgctatgacgtccgatttttgagctatgacgtccgatttttgagcctcttaacaacgttccctaatcacgcgagagtacgcaataatagggtttattgcttatgtgttataaggaaaagtcagtgcaagttggccctaaatggttatttgttgaatgaataaatatttggaactatgttcttccaaaaggatatttctcattttagttcaccttgttttattttgttgggttttgtttgtttttttttggacagagtctcactttgtggtccaggctggagtgcagtggtgcgatctcggctcactgcaacctccacctcccaggttcaagcgattctcctgcctcagcctcctgagtagctgggattacaggtgcctgctaccacacccagctaatttttgtatttttagtagagacggggtttcgccatgttggccatgctgatcgccaactcctggcctcaggtgatccacccgccttggcccctcaaagtgctgggattaaaggcgtgagccacctcgtctggcctgtgtttttgtttgtttgttttgttttccacttaaaaatttctccaggcagcacacatgacgataatattagctgacattgtgcagtacctaccatgtaccaagggtgatgccaagagctttttgtgttcctaactaccctataagacaggtactattatttttcccctttgacggttgagaacacaggccataaaaggttaggagagtaatttagaaaatggcagagctgggattgctcttaaccactatgctatgttgc

SEQ ID NO: 1564107 - DNA, 4001 bp, Homo sapiens
gggacttaatgtagcctgactaaattagtgtcaaatggatgcagggaggcagcatgatgtaacagaaagactatgagatttggagtcagaaggccaggtagtggagctcagctcggtcactgacaagaggtgtcatcactctgagcccaattctgcatctgtaaaacaggcacaatgcttcctgtcctatggaccttacagggcaggaggcaggagcttaaaaaatctaatgtgcatatactaggtgcttagcagaagagccacaatacttaaaccagcctttgaagttctgccccccacccctctggacatattttatcccatccaaaggaagatttccacactactttgtagagaagagggtgaagtgggggagaaactgagtcattaagactcagaggagaactgtttacagactgcaggccagatgttgatgagggcaagcagaggtggggaggaaaaagggccttaactaaatgtcatggtcccacccatgagtccctctgcagaggaagagaagggaactctatttccaggcagaggcaaaatgagtactggcctagaggcctaggtaataaggatgattccgttcggcttgtcggctgccaggtgagccttccacctctggcctcccaggtgagtgacagtgtcaaggcaaaatcctttgactattagccgccaagactaaactatgcggtcaagaccgactctcccaaatgtgggctgtttgtctaattcagagccaaggcgatatcaaagatgccactgtgcccactgaatgaggaacacagggaccgtccccccaatacagaaacatctctgcttcctgaaatgccatcactaccaattcattctttcaggcttggtttccagttcaaatgcaggtacctctgagctcggtggaagctttaaggctgcatttacacctttagatcttttcctaaggagcagctgttgatgtgggagaaggtggaaaaggcccaaataaatgaggccagtggggtgaagcggtaggctgagggggccgttctcagcttggggaggggaagctgcagcctctgtcggagcctgaagtcaagcttcatttaagttggggagatgtgtgggcaaaaatctgcggccttttcgtatcgatggatcgggtcctttccccacaccaagcactttcttctcggggcttgggtcacacagacaaaaacacctttaaaagggtctctctcttcctaagccagcctaagcaaaagtttccaaattggaggacggtggaaatggttaggactcatctctctggagagcttttcattcctttcctccaaatcctttgctgcattccacctcctcgcccggtccaatccggaaagcctctcggaccagggctgcggaccacaaaactgcatcttgcagggcggtaaccccaagagaacgtgaaaagcattggggctgcactctgggggccatagaggtggcccaccgccccgaggggtccccaggtgatcgacaagggggccgtccctactccagggccccgagtccaggcagcagggcggcgtcgggccgcggctcccccaccccacccccgtccggtctcccggttccccggccccgcccggctcttacttgcggtaggcggcgagctgcacggcgctgcaggggaagaggcgcaggcacgccaccgcgttccccttccacagggcccggagcccctctgcccgccacacccggtgccctgtggcccacggtccccgggcgtggcctcgcacgacgccaacctgggccagcacggtggcgagctccaggggcgcggtgaggctgaggctgagcgtccccgccagcccagcgcacagcagcctttggccgcctgtcagtcggccgtcccgcctccacgtagccatcgagccccgacccgggcccggaagaccgcgtggctcgggcctggggctctccggccacgggcggaggtggcgggccccaggccccgcccggcatggggcgggcccgcgtgagggacgggaagccccgtctacgccctagcctggcccgaggctggtcgggggtggggcgcgagggcctggagggtccggggtccgaggccgcggatatcatgggcatagtctccccagttggcaaggctcgagtagcgactttcagttgcgaaacagttactgttctctcaaggcccagcctgctagacatcttgcttcctaaatgttcagtgcgcccccgccgcccctccctgcctctcctctggtttgccccttttctccctttcacgtgccacttctctgtcttcctcccctggcgcttccctcctcctcctcttgcctccaacccatttttttttcctgcctaaccaaaaagccttgatggtttcccagtgcagaaggtaaaaaattctaacaaccacagttgctatctctcaggcacttgtcaagtactgggctttacagacgttctcatgtaatcctcaaaacggccctaagtacgtatgtcctcattgacagaggctgtgtgggtgtggggacttgaatctggactcttgaacctgtgtaagattcttggctctgcagcttaccagctgtgggaccttggggaagtcactcaacctctctgtgtgtcagttgctttataaaacagagattataattttttcctcctaggggttgttgtaaggattaatgaacaatgactggtatgggtaagcagtttatatgtgttagttctgattaggtattcatttacaggagaggaaaccaagacacagagaggacttgctcaggctcacacagctacctacaaagcagagaccggtttgaaatctagggcggtttatgtcagtttccactaacggctacactatatgtctactaggactgcagagttaactccagtagggacattttcagtggttctgtaagctaagagaacaatagaggcaaagaatggctaagagaggcttggccagaatccgaggattctttaatcagttcaaaaatttcagaatttcagaatttctttctgtctcttttttttctaaaaaagccatgtcactaataattacaaggaaaggaactgtcagcagtctgttggtgtgagcaagatgttccgggtacatagttgtttttaggcttgtatagttatttacatttactaacacacaatgctataggaacgttttctaaaaggcattgcagggtttctccttttttatttttcactgtcaatctcacttgagtatgacattacaaggttttgactgtgagaacttgttctagttgcagaagccatactctgctctcaacaattggggaatgcttattttcatgttttgtgaattcttctgtcttgttgtaagctaatttgatggctgggggaagcttgagaaagatgtatgactctgaagaccggaggaccccgactttaaaagggcttgaattggaatttggggattacaataaggaaaccttcgggtactggtacttcctaaagccctttgttggataacgggacaagattctaaagctctttcaggaagttcgtgggtctggaacatttcatgtgataaccccattgtatggagattgggtcagccaagttatgttttttttttttttgagacagagtctcgctctgtcgcccagggtgaagtgcagtggcatggtcttggctcactgtaacctctgcctcctaggttcaagcgattctcctgcctcagcctcctaagtagctgggactacaggcatgtgccaccatacccaactaatttttttgtattttcagtagagatggggttcgccatgttggccaggctggtctcgaattcctgacctcagatgatccacctgcctcggcctcccaaagtgccgaaattacaggcatgagccaccgcgcctggcctattttaaccttgaaagtaaaatgtatggccgggcgcggtggctcacgcctataatcccagcactttgggaggctgaggcgggcggatcacgaggtcaggagatcga

SEQ ID NO: 1564108 - DNA, 4001 bp, Homo sapiens
tgagtgttcttgggatccggaagcattcctgggaataggaaagagatgcttttaccaaaaagcagagttttactgacttcctttccccacatcccctaaacacgtcatctgtacacaagggttgcattggatgatcttggcttcctttagcaattaaaaaaacaactctttagctcttggactgttaggttggtacaatgctcttttaaactgtctcctaagaacacaacgttaaagcccacagcaaacttaccctttgcagtgtcatagataccgaagtaggcggctcggtagatgataataccctgcacagacacgttaaagccttggtacaggcccttaatcccatcagatttgtagatcttaaccaggcagtcaccgaggcctcggaattccctttcagctccagctttacccacatcagctgctagacgggtacgggcaaaatcaagagggtacacaaaacacagggatgtggcccctgcggcaccacccgatgccagattccctgcaaagtagagccaaaactgggttctcttgtccacaccacccaggaagatctgcttgtatttatctttgaaggcgaagttaagagcctgggtggggaagtatctgatgacattggccaggttaccgcgccagaaggacagaactccctgctccttgggaatacggaccacgcagtctataatgcctttgtattgcttatctgcagtgatctgcttgctggcatgctgcacctaacagacaggaaggaagccaacagggacagttataaccatggggaagggaaagagaagagcttatgccatctcgatcaatgccctttaaggtaggctcccctctctcaaatctagtcttcgtatatcatactggctggaccctcccaaccctctgaggctgtcacaggggaagaggtgatctgcaccagtagcattaagcctccacccctctgagtggagagggggcatcctccagcggacccgtgaccttcagacctaggagaaaggtcattacctcaaacccaggttcagaggcattagggcgagtcccacatagggcgcggtcaccttggggaccgcagcctacgcctcaagtctcctgagctgcttccgtctcgctccgcccccactccgctcccagaggtgacccgagcgccgccgccgccagccctacacgctagcccaggagcgccctctagagccggcactggagagcgcgcggcgcagggaggcaggcggagacgcggcggcagcggccgcggctgcgcgggggcggacgtaaaaggcacacgcgcttcccggcgccggcttccggcccggcgaggtttgagcgcgtccgcgggctgggaggccgctggacccgggcgcatggcctcccccgggcagttatctccttgccgcgaccttgaggtcttcggtaagaactggcgttcctctttctaacgccggctttcggccttcgcccttgacgcccaggcccggggaggccgtcactcagaaactgctccatccgagtccgccgcctcggagatgccgagagcctggtcctgccctctgcccccggccccttcctagactcactacttcaggtcactaaaggcgcctcccaccagtttgacttctgttctgcctctgcgccccgctctggcctctcctaagccgcttccctggccatgtctttagagttcgctccccgccacccctcgggcgcccgccttctgtgcgacccttccccccacttcctggttgggctcctggatcccaggacgtacctgcagcagcagcttgacccgctcgatgggcgctaccgccgtcttggagatggctgcggccactccacctgccaggaagtccttggcgaaggacacagcggcatctgtcatgttgaaagaggaggcagactgctgcaggacgggactgggccgggaaccggctttgactccggcgctgcggggcggagcgaagcaaatggccgatttatatagggggagccggagctggagcggcaggcgtcggaggcggggccggggcggggtctgggccccggcgcgctgggcggcagagccgctgagtggcccagctcgcaggaggaggagtcgtggagggcgggccgggactgctctccgcgccgcccgtgctcgccctcggcacctgacccggcgagaggaaggggcgggtccagagaacacccgggacttgaacgctggaccctgagagaggcctcggagaggggaggaagggtgaggtcacgatgtgcctggacaaaaacccttggagcaggaccaggactagggtgagacgcatttgctacagggatgccaaaagaacccttcagtcatcgagataaacagtagtcaatgcgatactttaaaaaagtcgtatgggcaaactacatcctactggccggcccccttgttttgtaaataaagtttaattggagtgtcaaggctgggtttagggtgaggcaagcgagacaaggtcatgcaagtgcaggttgggatcctgtctgtatttcaaatgttgatcatttgttcatcatggatttttgcattgcttctgatttttttaaaatagtacatgaaaaatcatttgtcttaattactgagttgtttttcaccaaggtgaatgcctcactcttcccactctagaccgtgtgctgtcctggagccagtgaaaccagacgaaattaagggaacagcagacgaaggaactgccaccgtgccccagaccctggtttgcaaatacagttcgacaaagatcttgccaggaattggcctgggagagtccaaaggactgggctgggggtggggaaatgattttagccagaagacaaatatagaggttgtacccagaaggttaagaggcttaggaaggttaagaactacgttaacatttggctcccaggaccccaggtaaagtgcccttggattgaatagatttctgaactccagaaacatttagaggaatcaatagaattagattggcagccattgtgccaatggacaagtgcttactgagccccttaatcccttcactgggtaagcatttgccacacatgtcctcaaaaacctacttgttagcttaagtggactccctcaagttcagaacaggagcaaatagtgtaatcacaagttccgtgtctgaataatcataacaatgtttataaaaataaggacgactgttgaaaactgcaactgcagctgaaccttatgtgcccagacttcagaattcccataggcaaaatgccagcaggcctttgcacactgaacacatagtgttcatatccttcactttcctttcctgccctctcctatcttctccagatctgcctgtgaaaggacccaattctaggaccccccaggatggttaggcccttcctctgaaagtacactttgcaatttgttagtctcctcaagaaccccagcgatcgaaactgatgcacacaaattgcatgtgttcaaaggagcaattttgaatctagctttgttgatcctgggagaaatctttgacctgtgttagtgaaaggctatggtgtttctcagctgattataatagcgaggtagctgaatgcaaaaaaacagtttcagagaatggtagagtatatcctccaaaggtgatactcgcttctctattctggtgagagaaacaagagctaaagcaaaattctacagagggctttatttggagagaggtggattttatttataatgcatttaaaattcaaaatctttctagtttgaactcttgacattctgattaatgcatttttattcaactgttaattattcctcgatacacctcgccatcacttgtgtatcccttttctacatgtgacctttccctggccacatctgctactctctttgagcatgatgcctctactgtattctattccagagctcattgttttgtcagttttttttctctccacaaaaaaagatgatcaaataattacatagaatttttcccttctcagtctttgggtaactaagtgtggtt

SEQ ID NO: 1564109 - DNA, 4001 bp, Homo sapiens
aattatacaaatataaaaataaaaagattttctaagcagtgtcaaataagtccattttatttcatatctactgtgtctgaattcagacatgcctgacgtttaggagtgtgcctagccttccctaggggagatattctttttttttttttgagacagagtctcactctgttgcccaggctggagtgcagtggcgcaatcttggctcactgcaacctctgcctcccgggttctaagagattccaggagatattctttccaatttattgtcagctccgtttagacctatagttctccaagtatggccccatgtccaggagtatcagcatctcctgggaactagttagaaatgtaaattcgggggtccactcctgaccaactgtaggggcaactctgtggatgggacctagcaatcttggttttaagaaacgctccatctgattctgattcacaggaaagtttgagagccactgacttagactgctatactgttgtttctctggtaaacaaagaggcttcttttcttgttcagagaaatattgcttaggatttctggtgggtgcacaattccctgctgtgaaccgagtttgctggaaaaccaagtaactagcacctccatcgtagtcctacccagagcttgcaggctttgcactcacgtaagactgattcttccagaggcgcctggaagtcccattgtgatgggcaaatgctcttaccagaaataaactagttgtggggaccgggcgcggtggctcatgcctgtaataccagcactttgggaggccgaggcaggcggatcacttgaggtcaggagttcgaggccaacctggccaacatggtaaaaccccgtctctactaaaaatataaaaatataaaaattagccgggagtggtggtgggtgcctctaatcccagcaacccgggaggctgaggcaggagaatcacttgaacccggcagacggaggttgcagtgagcggagatcacgccactgcattccagcctgggcgacagaagtagagagactccttatcaaaaaaaaaaaaaagaaagaaagaaagaaaaaaaaaaagaaatacactaattttgggccttaaatgctactcagttctccagttcacctcaacagggagggaaggtgcttggaggaaaattgcacttcgtttttgccctgcttattttgtcttcaaaatatatgttaaatcaccgcatcaaagagccgtcccagatctcaactcccagatgagttcggtggcacccaatagattttcataacacaggatctatctctgtctccttgtattgtaatagcctgtctccaaatgcagatagcaaccggcaggctgtaaatgtcgaggaaaaagcctaattcctttcctcatccggagcctctagtgcagtacccagcacagagcaggtacttggtattttggtaagggaaatcaatcaacgcatcaatagcagaatctgaaaccagggacctagatctttccaataaaatcatcctgctgagatgtgactcagatgtactggtgcccagcagacaacacgttttcgccctgattttatcctccattcatccgtccgccccctcccccatagaccccgcctgtccccagctaaaaataatgaggggattcacacatctcagtgtcaacacacacaacacagttgacacgccccttaatcctacagctacgccatcaattctcgccgccgggtccgtccgcttgtcagtttcccctactcctcatcccctcgcaacttctgatcccctatcacttccgttcccgtttgcctgctaggctggaagcaggatgtgtctacgccctcagcccataagaagtgctacaaacctccgcctcgctcgctgtcatggcggcgaccgacggcccctttcctgtggcctcagaaagcagcgacagtcgcagtcaccggaccttcgcccatccgccgccctcacttaagcgacgcacaacggagctcccacaatcctctttgcttccgctctctttatttccgcctcccccgcccccgcctcgacattaaccgtttcgcgactacgtcagttggccggtctgtttgggagagccaggcgactaatctggtatagagaccgaaaaacacaggtaaaaagacctaaaagacttagtcatctattggaacatttccccagtttgtttgtaagttggcttgcaagcttatcagtcattctcaaacaggagcttaacttacttaggtgaacagttcatgatgacgcctttaagctgctagaccaacccaaactccgaatttgcagtttctgacctttcaccttgaacctgtgccctttctaccctctattctccatctccttttggttcttgtctgactctttagctgcatatgtaaagagcacagactttgaaacctgagctcccgcgttcgaatccccactgtaccactatctaaacatggcatcttgggcaagtgattcaagcatgctattccttggctttttcatctgtagaattggtataataatagtacttacctccagagttgcagtaaaaatattaaaatttcacatgtgaggagcacctagaacattgcctatcatgaagttaagcagtatattgaaatataaattataatgattgaatttgatctcacctaagacctctggctaataaataataaatgataataatcatttcacctgggatagaggggattgccctgttctctccaggctgaggctgtaatacctgattctagggactgctgatatggaaattactaccactctggctggagtcagaagagtatattaaagagtctctttgtactgtcctaaaataagcaaaatccaacgtttgcagttctatggaccacgcactatgataagtgctttaaacccattttgttgttattgcttcatcctcacaatagccctttgctggttcttaagtgtattaccctttcctgtcctctttgtctgcttaaagcagctaagaaaactcagattagtcagattgcatataaatcaataacttgcccacggtcacagagctaataacaaatagagccaagacttaaactcagatacattcagatgtgtcttggtatttctcaaatatcactgagaaaaaggccaccataaattcttttcaagtgctctctctcccccaactccccaccccaagaattgcctgaatgcccatacagaaagactaggttctcttcagaagcagaagggcagaacccactaaggcaaagatctctcccttgaaggctggcagccaaggaggtgactatagtaggaattggcataaccagctcactcattgccctccactgtgccacacaggccccattacttcctatagtactgaagaccactggggataaaggtacagggccttcacctcatcccaccgttctgtaaagcttggatattagcaaagatcttgcttattttaggacagtacaatgagactctttaatatactcatctgactccacccagagtggtagtagtaatttccatatcagcagtccctagagtcaggaattactgcctcagcctggagagaacaaaccaatcccctctgtcccaggttaaaacaaaacaggaattccctctgttccttcagaatgtacggtacccaggatgttgttattcttgctccacacctacccactctcacttcccaacttatcatcaggcagtccacaatggttttttcaggggaaggattggtgatggtgaagggactgaaggagaaggtaaatcaccaggtttgctgaaggtaaatgaagcactgccttgtccctacctctgtacctcttttgtagctccctgaccttctttctcatttggcatttcagaacccatcactccacacctaggaaaccctcttgggtttgaattgcagacaaatcatcttgtcttttattttttcccccaacacccaacgatagcacacatgtctgggcttggccaaatttaaaaacaaaaataacag

SEQ ID NO: 1564110 - DNA, 4001 bp, Homo sapiens
tctacagatgcacaaccatcaagctccactaagttgaaaaattacttttagagatggagtcttgctacgatgaccaagctgctctcaaactcctgagctcaggtgatcctccctgggcctcttgaagcgctgggacatcccgccctgctaagtttaaaaaaattttttaagccgggcacagtggctcatgcctgtaatctcagcactttgggaggctgaggtgggtggatcacgacgtcaggagatcaagagcatcctaacacggtgaaaccctgtctctactaaaaatacagaacattagcaaggtgtggtggcaggtgcctgctagggaggctgaggcagaatggcgtgaacccaggaggcggaggctacagtgagccgagatcgtgccactgcactccagcctgggcgacagggagagactccatctcaaaaaaaaaaaaaaaggtttttttaagatgtggggtcttgctatgttactctggctggtctcaaacgatcctccctgggcctctccaagtgctgggacaccccgccctgctaagtttaaaaaattttcttagagacggggtcttgctacgttgccctggctggtctcaaactcctgggctcaaacgatcctccctgggcctctccgagtgctgggacaccccgccctgctaagtttaaaactttttcttagagacggggtcttgctatgttgccctggctggtctcaaactcctgagctcaggcgatcctccctgggcctctcaaagtgcggggacaccccgcctgctaagttttaaaaattttcttagagatggggtcttgctatgttgtcctggctggtctcaaactcccgggacacgccaccctgtactaggtttaaaaaattatcttagagatgcggtcttgctctgttgcccaggctggtctcaaactcctgagctcacgcgatcctctccgggcctctcaatgcactgggacgtcctgcttcgttaagttaaaataattttttttgaggtgaggtcttgctgtgtggccccggctgctctcaaactcctggcctcaagcaatactccccgggcctctcaaaagcgctgggatcgcgggcgtgacctgtccttgcagccaagcctattcattcccatcaccgagctgtcactcggagtacaacgttagcaaggacgtcctggcggcaatgttcctaggcatcatgctactttctataagcctctcccaaaagacaaaaaatgcattgctctggatcagaattgcacaaatgagctaagaagggggtaagaaccaccaataaccatatcctggttattccaggacacctgcgggcaggctcgttgccctattggccttagaattacccttcacggtggagggagcaagagcagacacctgccaggcatccaccggaagggttggtcccagccgggggacccgcaggattgagctcaaggtcaaggcccgccagccgcagggtccgtccatgggccctgctcagcgcgcatgcgccctccaatccgtgccgcatttccccccgcccgccgggcccagtgcgcacgcgtggacgtcgccacgccctgcagcagcggtcacgtgacgcggcccccggaagccggcggcgcgtggacaaagcgatcgcggccttccacttccggcgcccgcctgcaaggctctgctgcccacgtccccgcccgacccggccactcggttcccgtcccctagtccccggagcggccgcgcccgcgtccccacctgcagcagcagcttgacccgctcgatcggagccacggccgtcttggagatggcggcggcgatgcctccggccaagaagtctttggcgaaggagatggcctgttccgtcatggtggcagggcgggcagcggaacgggaggacagccggagaacgggcgcggagagtgaatggagggcgtcgctggctcagccctgccgccgcctggaccgaaaggacggagcagccaccgcgcagccgctaagacgccgacgccacgcccactctccgcccccgcgcctcctcgcgccgcgctcattggctgcgccgccaggccccgccccacaccagcctgcgtgcctcgcctctgagggctgccgggaatcccgctgcgtcccgccccgcactccagcgaaccgcgcccattggctgcgctccccggagacgtcccgccccgcacccctaggtatgccgggagccaggccccgcccatgcgccgtaggggccgctgggggttccgcggcagccttgaccttgtgaaggtcaggccgctgccagtacccgagcgggcgggagggcagctgcggagtcagaagcccaccctgatgcccagttcgctccgagtgcgtcgtccgctttctcccggaggccgcggcgaccccgccgggatgtgcgacatgtggtgccccgacccccgacccttgacccttgacctccgggcagctccgaccctttcaacactctccggggtcgtgcgtcgggagaccccggcccctgcccgcgtgcacccggggggccccgcgcgaagcctgcggcggcttccacgtgggcgcggctcagtcccgctgccgatccgtgactccgcgccgccctccgcgcccggcctaggttggtgggggggggatctctctgggcctccgttctttgaccccgcggtgccctccgcgccggggctgggggttccgtgggccgcgcccacccgcccgggctcccctatttccccgtgtctgtgcccgtgtctgcccggcgggggctgcggccggggtcctccttcgcgacctcccactccgcccttcctccctccctccctccctccctcccgcctccctcctccctccctcccgcctccctcctccctcctcccgcctcctctcccttcccggctctctcccgcccgcccttttctccccgtctcttccttccctgcttgcctttgctttttgctgctttcccgcctccctcctttttctccgtctttccgtctctgccttcgtttccctccctccctttttctttcatttctctctccctttctccttcctttcttgctacgtttcttccctctttttcatttttttccttcctttttctgcttttctccctccgcccttcctctgttttttctttgctccctccctcttttttctccctctttccgtctctccttcccttttcctctttccttcccttcctcccttttctgcctttccctccttccctctcttttccttttcctctttatttcctgtctcccttcctctcgtccctttctcccctctctcttttccgttttttttttcttttgagacagagtttcgctcttgttgcccaagctggagtgcaagctccgcctcccgggttcaagcgattctcctgcctcagcctcccaagtagctggaatgacaggcatgcgccaccgcgcccagctaattttatatttttagtagagacggggtttcgccatgttggtcaggctggtctcgaactccggacttcaggggatccgcccacttcggcttcccaaagtgctgggatgacaggtgtgtgagccaccacgcctagctgtctcttttccattttttaatttttttttcatttttcctctctccctttgcctctctttttcttcttccttttattctttcctgtcttgttctttccttcctctctgtttctccctttctccctgttttccttttttttttttgagatggagacttgttctgtcaccgaggctggagtgcagtggcgtgatctcagctcactgcaacctctgcctctcaggttctagagattcttgtgcctcaacttcccaagtagctgggattacaggtgccagccaccccacccggctatttttttttttaaggacagatggcgtttcaccatgttggccaggctggtcttgaactcctgacctcaggtgatccgcccacctcggcctcccaaagtgctggattacagtcgtgcgccactgcgtcccgcctccttt

SEQ ID NO: 1564111 - DNA, 4001 bp, Homo sapiens
cagcacagctagggatatgtacttcaggcgcctgtgagctgtggggaacggaaggggcaagggggaaggacggggtcagaagccgctggggcatagccacaccaccacccaccccctttctttctcacccaggaccctcctagccatggctacttgctccctcagcctgcctgccctcacccaataagggtctgactcctaccggcttactgcctcagccatgagcaggaagagccagaagggagaaatgggccccaccctgtcccagtccatacctggaatccttactgaggtgtcaggtaatggctgaggcaaaccctggccacgcgcctcggcttcctcccaagtgagaagcaactcttccccagaaagaataccgacaactacattctccacgtttattgagtgtttactgtatgcctatcactgggttaagggatttctatggattacctcaatagactcatatcactgtcatctccaaaagaactgcgaggattcccatttatggattagcaaactgagaatttatatgaaatgatgctcctgtttaatgagggactgtctcatgtaaagaataacacatcaatgcagggaatgaggccactgtatgaggtatgttcaccccctaagaacggtctttctcctatctaagaaatgattcgattccctcacactgagaatggcctacatcccatatggaatgatcctcctcatacccagaatggtctctccaacccctcactcctgtgacaactggttcctctcgaaccagaatagtctactaaatacaagaaatgattcccacatgctcccagggactgaatcctgtatcaggaatggttatcccaccaagaaaggtctggctccctcaaccagatgaggaaatacttccctgcactccacatggtctgccctcccaccaccgcacacggaccctctagctaatgaatttttccttgctctacccacactcacaatgagctctctctgctataaggaaggacccggcactctcagaacgttctttctccaccatataacgatgagccctcccacccgaatgtacaatgaactctacctccattaggagggagcccccagaacggtctcctccgcacataatgaaagacacccccatcctcaaaatggaccctctctagtcacataaagaaggactcgccccaccctaactcacaatagtctctgtccctttataaggaaggaaccaccaccctcagaatagtctcccccttcttcagtgaggaactcccacacccgcagaatggtctcttccacacggaaggactccacatattcagaatggtttcggtggccttagccttcccaaaaagaattacccaccacactcacaatggtctctactctccatatgcggaaggatcccacaatcactctcagaatgttctcttccccgcccccaacacactgacaatgtgcacacacacacacacacacacgtcggtccacacgggatgctccctctcactttagtgaggaacattcccgactcccagcgatcccgacctccgcctcccatgcgactgctcgggcagactgtctcacccgcactggcggtccccggctccaatgcacccgcggaaaccgcccctggcccgggcgccgcggtggaaccaccagccccaaccgctgccatgttggcatctgcccggcccgtcccctcggcaacagaaaaaccacttccgcgttcgtcacttccgctgccgggccacctgagtgaaggtggagcgagagccgggatcgtcagggtggtggcttttctcctccgctcctaaaagctcaatgtatgaatagccccgggatttccaaattccgtcggatcgggaggccggggacacggcccgatcggcctacccaccatccctacagagcttcatcggcccattcctgtcactagacccgccttatcctgccgttcgtccgcttcactgatcgcgctttccagatcatcccccgatcttgtctcctagactcattggttcagccacccctttcatctcggctctttattggcagcttctccataaggcgccgccctttccgtatcagaaactaccaggtgcttcatggttggactgaaattccgctttcccgtcttccagagaggcctcgccccctggagagcacacgggaatctggggacgaagaaactttgacctggcggggtcggggtgagggcgtactggcatcaggtgcgagtcaggaatgttaagctagcagataaaagcagagcaggtgaggataaacaagtgaaaatgcaaaggaaagttgacgcacataagggaagacaagtgagtcaccactgaggatggcaaaggggacaggcgaaaggctcacaggttagctagcatttggaagcagggcaagagtccgggccagaggcggtggctcacgcctgtaatcccagcactttgggaggctgagccgggcgatcacctgagctcaggagttccagcctgggcaaaacgacaaaaccccgtctcaaataaaaaaaaaaaattacccgggcttagtggtatgcacctgtacccagctactctggaggctgaggcaggagaaccgctggaacccggaaggcggagtttatactgaaccgagacaaataagcagggcaagagagggaacaactcaggtcggaacaagtgaaaccaacatggaatagggtaggccaggtaagtcaagtgttgaaggagaaattagagggatgggtatgtaagggtaaagatgggggaagaggctaaagataaagagcaaaacaggtgactacaccctggacagattccagtcagcgcccaaccccagccccgccctggccagtaccctgacagggcttttcttctgcaacaggggaaagggcttcttcattcccctggggtgccagggaaggtagtttttctgcttctgagatagccatcttgattggggatgtgccctaaacaccttcaatatgcacagtatctccaacagagaacccttctgcacatactgggcactgcataagatcaggggcaggggaatcaagatttttttgtgtgtgtgtggtgcagcttcaagaatccttaaagctctttaggatggcaacataagactgtggcttcctgaggacaaagcagagggacagtctgtctcagtgcacagtagatgctccataaaagcctcacacctacaaatggccagccgcttctgattctattacttttattaaatagtgggtttccacacatggctttttaaataatccaggcaggagaagagaggagggcacacttggaactcccctccccacaatacgtgattatttacattttagtaattggacaatcccggctcaggaggaggttgcaagaatctgcaaaagttggagggagcgccccaggagaacaaacagcaagccttatttcccctagcccatcccccaaaaaaccatccatcccatcctagtgtctggtggtgtccggtggtgtccatcttccattccttcccaaattatggaagtaaggttcttctcaccagaataagagcacttgggataacagagtagggtcccctcacccaaaaaaaaaaaaaaaaaaaagaagccttggggtaacaacagggcattacctcccccagaataaagaatcctgggctgaggcaggtaagcagcttgacccaatatgggaccctaggctaggggaaagggtccctttactaaaataaaagctactggggtattggaaggaaagcacccttgcccaagtaagagcatatgaactaagtttgtgtggtggtagtaggaggtgccaatgtggggtgacacatcatcagaataagagtcccggggctcagaatgggaacaacttcaccaaaataaacttccttagcaaaatgagaagcaagaagttccccctccagaatcagggaccacaggttctgggaggaaggctcctttgtaggattgggaagggaactgggcagac

SEQ ID NO: 1564112 - DNA, 4001 bp, Homo sapiens
cgaccacgtggagaagggatagcctctcctcccagaccccagactcacgctgtctctcttgccatctgtgtctttcattccccggtcccccgcgccaccccctctccttccctccaccctcaccgcgtggccaggcggctcactccttgcagggacacgtgtcggcctggctgccccacccctcctaatgccctcacccccctccttcccgcctgggcccccaagcccgagaccagagctaatgcaacctgttgagtgagctgagggttggggacagactcggagacccctgccccagacgctgcaaactgctctctgccacgactctgaatatcctcactagaagccaaagacaagtgcccgaaccgagccccttcccagggacagaaatgacccagggactcccatttgaccccaattctagggcctagaggtcttttccagggcccctagcaagtcttaaacactcatcttctggcagaagtcaatttggagacactgccagacttgagaaacttcctaggtgtggggtgtggggtgtctcaggaacctggcccgagccctcatttccctccggaggaagagctatttctgagaccttcatcaaagaccccctcccgtggcctaccgagtttcctggggtgggggtgtctctgcaatccccacccgagcctggagcccctgtcttgtaggtacagcgtctctgaagaaaccccagctccctcccgcgcttactccttgggaaggaggtatctcagaaacccccattcaaggtccccattagagctcaaactggctcaggaaatccttttcccaagtcctgaatcccgttcctgggacagggagggtctcaaggagtcccatcccccaccaccagcaccctccggagcctcccacccacacctgaattcacttcctgggatcagggtacaaaaaggacctccccatacacgccattccattccccactagtgctaaaatgtctccaaggaaccccgagccccctcccaggacccctactcatatctcaggcccccaggaacaccatccccgcagcccacgctccctcctcacctacctgctcctctcagctcctgaagtggccgcaactcagactcaggttcgggcaccctctcggctgcctaggctcctgctctggagcggtacttttttttttttcctgagaagaaatgttaattttaatttcgtttccctccttctggccctgggcgggggaagaggtggagaaggggcgccccctatctggacccacttggagggagacagcggtttgtttgtgtgttgatggtgggggaaatggcctgaaagattgagggtgtagacccacagctagagagagtgacaggcagacagaggggatggactcacagagcagacggacagcaggatgggatggatggcagaaaaaggtgcagagaggagacagagagagagtaggagaactgaagttacaaagaaagcaggcatgagaaacagcacaggaacagacagaccacagaagggacagaaagacagatgggcgggaggaggggatgctaggggagcttggaagacaggcagagacagggagaaagggacacacaggcagactcagaaacaaacaggtgggtagggataggctcgtggaaacacctgcagaaaggcaacaggcaattgggctcagtcatagacaggagacacaggctggccaagaggtgggggacagagccagacagctccccaaacagagggtaggaccagacacaccagctcagagagatgaaggggcagagagagtggttgaggcagagagactcctggagggacaggagaaaagaggcagagagaggcagattcaggcagagaggcctggggacagcaggggaacaggtgcaggggtagtagccaggctattccaggcagacctcaggcagacagcctaggcacgagaggaccctagatcttgggggcccccagagggaggcagggagggcatttgtggctgggtggggaatgtggactgtgaactcacactgtccgcaaactgggcgggcactgtagtcctggaccccaccccaagcgtggggtggggcttgtccaagccctgagaagtcccactatctgtctgtccgtctgtcttctatgggagtccgtctgttcactcccctccaggcatatgacaggcatgcctgtcccaggcaagccacgtgtccgctacaggatgtcaggcagggtggacttggggtctgggaccacctcgactgggctgcttgaagcccaggtggacaagaggcctctgtctgggcccctcgcccgcctgcccacccccgacagggaacacagaattcccggaaaggccaggagctggctggggcttcaaagctggcctagatgccctcaccccacccacagttggaggaggacaagggatggggcgtttacttccccacagcgggagagagactcctgcacactcaggaatcgcagctacacaacaggacccatcacagccccatcaaggggctcagatacgggggccaactcgccatcactcacagaggtgcacaaagactcacagccacacaagagaataaagactgacagacatgaacacacacagactcaccactgcacgttaagagcaatggctcatgggacagtcacacacgtggccacacagagtgacgatagtcttacagctatcaataccgacaggctcagagccgctcacagagagcacagactaacacagggataggcttgtgccgatttccagacactcgagactcctgaacctcaccgcccgtggacccacagccatgccaaagacaatcaacaggcaaatcacacacacagattcacagccacacacagagcacacaattacacacagctgatgacattgtgtgtgggtcctgggtctttcccacacacacgatccaggttcagatggccctggatctgaacctgaatccaggttcagatgaccctggaggcaaacttccaggttcaagccctaaaatgatatctctgtgtatgtgaacttgaatgtgcacttgtgaccacatgtaaccacatacagctccagtcacagagagaggcactcataggctgacatgatttttgtacaaacagaaaagccatagtctccttctctctctctctcctctctctctctctctcacacacacacacacacacaactgcatttcagcaaatggctgcacacagccgtgtacacacacagctagtcacaaatcaagtcagaaaagaaacatatagggaaagcatatacctgcacacaaacacaaagcacaggaatgcagagtacgcttactatcgttgcaaagaaaaaatccagaaaccacactgaaagctacacaaggaaaaaacaagagaaccagatagtactcataccatggcaccagaagaaacaccccgagggcacacatacctgcagccactcgctaagaagagacacaaatacagcagcagacacacaaagaaagatacgtgcgcatagatacacatataggagggacaagtactctgacacacttgtcacccacgaccattacaaaggagacaaacacccaagcaacacacacacacaacaacatatagatgaactgcaccgacagacagtaccaatgcacacggttgccaaaaaaaaaaaaaaaaaaaaggtatgagttgggccgggtgcagtggttcatgcctgtaatcccagcactttgggaggccaaggtgagtgaatcatgaggtcagtagttcgagaccagcctggccaacgtggcgaaaccccgtctctactaaaaatacaaaaaaaattagctgggcgtggtggcgggttcctgtaatcccagctactcgggaggctgaggcaagagaattgcttgaacctggaaggcggaggttgcagtgagccaagatcgcgccactgcactccggcccaagcgacagagtgagactccatctcaaaaaaaaaaaaaaaaaaaagc

SEQ ID NO: 1564113 - DNA, 4001 bp, Homo sapiens
aaacagtgtttttttgcaggaataaaacaacaatccttgaactaaattatttcattttagaaggatcttctacatagtcagtccaatttggaatacatgtaactcaatattgcaacttaaaatactaaacctttaattactttttaatcatctctttcaacacttaagtcaccaaaatgtaatgcattattttagttaagcaaataatttatttgagcttcttaatagaacttatttttctgtttatttctgattcagctataaattaagcaaagcacaacttgagtttgaacagattatcacagaaacatgcataaattaggaaaagtatgtcatagttgaagattatgtgagatctcaaatcagaagcttagaagtgctaaaaataaagctttttatcaagtttatacctgaggattttgtgaaactaggtttctaacttgagctggtaacccagactaataataaattcaatatgcttgtttctcattctcccactaacccaaactgtcaactgtcatatgccttccttcaactcgtaaaatattctcagaagccatacagaaccacacttaaaactggagggaaaagcgggggtgggagggtgggggtgaaatagaatacctccaccattgctgtaggtcagatatggaaatctccacacatttcctaatcccactgcgtatccaatcatagatagaagataatccgattttttggaccagttaccacggtcctgattctcatcattttcaccaacatggaaattctctgatgaagccgacactttctggggaagaaaaaatatcaacagcttgcctttctaccattacaaattccacagaagcataatttcacaaatccatagagcaacagaaaatggggggaagaaaccctgaaaaccatagctgaggggaatgctttagaaagttggggagatttctgctgatagctgcttttactttacaacatttacctcttaaaatgagcaaagttctgtaggtagatatgtttattactccatcagctaagattattcaaattttggtaaaaacgttaaatgtgacagcagtgtgagacacaaatgaaagcagacaaattaggtttgaaatacaaaggtctttgtcacactggtgtgagggaaaaatgaaagtagacaaatcaggtttcaaatacaaaagtcttaaagatgaattagataaagtcatcaatattgatattgtagcagatctttgagcaggatcaaatgtagtgtctgctggaaaaaaaaacgagaatctataaacttttcttatggcttgatagtattggatgtatcaagttaagggtagtttaacttttctttgtcttacagattaaaatcaatgcctttctaaaagccgtagaataatatgcagagacaaattctcctgtctcaccagatgaagtagctctctctccacttgggagggagagaagggacaggggttctctcccaacctgctcacttctctggggtatggagggttctttgggtcaattaagaacagtgtacttttgtactttcctctagcatgtggacacagttaggagagggatagagaacaggattttgtgggtactcccaaggcagaggatgaggtggccctaagtcttctagctatgagagtaagagcttttctttcttctctactctataggtatatctcagtcacacctaatagttgaacagaaatgtggagcacaaggaacagccacagaaagcaaaaactgagactagcaaccccccttaagttttccactctcaggtcctccacacctcccgcagctcccagacccctacctccttctccctgcacttgaagaaactcgggcatttcaacttgtccatggttcactccctcggctggctccgcctcgcctcctcttgcagtctggctgagcttgactggtagcaggtgcactctcccctgttcctacctgccagagtgagccaccttgcccaggggtgggaacatttatgaagagaagctctctcctccccctcctgggtgtccagtagtgtcaattaccggaagggactaaagtgaggctctggtttttccccagataagcctacatgtagcaatctcctgccccagccctgggaaagggctgggctgctggagagcagagcagtctgagccgagatgactgacagcctttgactcagagctgtgtaggtacgtttgcaatctagccgcctttcctgggtcccctgtttcctcctaacctcgcctctcagtctggtctctgttctggggccaagtgctgatctgtacaagtgctggagggagaagggggccattctgttccccaaaattctcctgaacagaccataccaccctgggtcctcagatttcccaaagttttgcccctgactagaaagcacttgattccctggggcaaatgctgctcccagaggaaaagcccctgaattgggcaccttgaaaagcagccatctgagataagattacccagctggctctgcctgaaaagagcaacttggagcctatgtctcaggctcctttctcagccttcaggacagctttgccttttacagggattgctttgtgtagtatttcaaagaagccaaacacaaacaaattattgagcaggtttatgggaaattctaaccttaacaaaggagcacactctgtaagaaagatgaggcctagaaagtaaactatgaggaaacatcccagcttgaccagggaggaaataattattataatgctgtttaccaatggaatgccttttcatcaggaaactcaaaggatttaaactcagtctgcccaggtaacagatagtgatggtggttctatgaagcaaagcacaaattcatgcacacagaggaatgagcaaataggcaaattctgtaccctatgtacagctcctttgttctccactgactgcaagaattttccatttgcaatagaaatatgccctggggaatcttggcaggtaaggtagagaaaagtccatgaaagatgtaggatggtagtaaggaaagtatcaataagttttatttaactttgtcttgaacataacaaaggctgatgtgcatgtgtgtgtgtgtgcacatgtgcatgtatcaatggggaattgggggatggagagtgctaatgcatgagtgtgtgcctattagtactgtacactactggtatgacctaaaggctaagattaaacatagaagggagaggagcaagaagggcttataaacctccttataaaaggatgagctaaaaagcaaatccaatagcatttactaaacgatcaaagtcccatataaatgaaagaagccaaccttggggcacgtcaaacaattggtaaccaaggaaatagaaagaagacaggaatcctaaggatagagagattatgggaatcacaaggtgtattagttcgttctcatgctgctatgaagaattgctcgagactaggtaatttataaaggaaagaggtttaattgattaacagttccacgtggctggggaggccttgggaaacttacaatcatggtggaagggaaagcaaacacgtccttattcacatggcagcaggagaaagaagtgccaagcaaagggagaaaagtcccttatataaccatcagatcttgtgagaatttactcactatcacgagaacagcatgggggtaaccaccccatgtttcaatgacataccactgggtcccttccatcacacgtggggatcatgggaactacaatttaagataaaatttgggtgggggcacaaagcccaaacatatcacaaggcaagggtatctgttatacaggggggccaattttccctgcctgttatgcagtaaagtttctatcacctttgagagttggagcatttaacacataaaatgtgagatcgattttagataatatacttctgtttcggggtgggtgggggtaggattattcccattaccatgctttgcttttcatgacctggctcctgcctgcctttttagtatc

SEQ ID NO: 1564114 - DNA, 4001 bp, Homo sapiens
caaaggccccatcacaacttccgactgggtgagtcagtgtaggggtggccactgactcaggccccaggtggagtcttgagggggtgggttgagtgtgttgaagaggggctacagtagcccctgagccattggagccctattccctgggtggcagaggggccctaggcccccagggcttccacccccacggtcacttggggcgatggccatggaggacacacacgctcagacacgcgggctgtccctagtgctgcaattccctgtttcaggcagcacagtgagggcacgtgcatgtgtgcatgtgtgccaaggctgggtgatcaggcctggggggctcatccaaaggcagggagcgcgactgtcctgcccttggacgcttgcctgcaagtgtgaggtctaaggcagagggtgggtgggtcacagtcccctgctggtgggatggcgatgtgcaaggacagagggatacaggtgcggaagaggggccaggccggccttagcaaggccagggagtcaggctctgcaggagataggcagggcgtgacacaggcctatctcctgaggccagcaggctggggtgggggtggcagaagggcagggagagctgggtgccactacccccttctcctctctgggcctcctacccttgccctggctgggctcgctccactactcagaggctgagcttggctgcaacttgcctgactccaggtcccagcatccttctcctgaccttgggcaaaggcctttgctctggacctctgtttcccacccatcaccgggtcacttcggcttccagcaaccccagtgctgttttgtagtcacaggacacacgcgtgcccatcgctgttgctaagctgggcccgggcgggcgggcgggcgggcgggcatgggacgtgcatgcagtgtgtccagtggcggcgccaggcgggccaggccgcaggcttcccaagcctggctcgggcacccagtgttccaggcccgggccagaggggaggggcgggagggccgcgaggggaggggagggcagggggagggacagagtggcccattgtgtgtgtgtgtgttcgtgtgtgtgcacacgtggggggcccacacaatgtgccgcttgtgtgcccgacccgtgggggcagccagggctccttacctcgcggagaccccaaggcgcaggcctgctttcccacctcggcggccaatcgctcctcccagcccgggagtctggggggcagcctcgcgggcatcgccggccccctccccccaccatgccaggcacatgactgcgaggggggtggaggcgcccggcccggccaccgagcggcagcggcggacgaggggcggccccgacccccgcgtgcccgggggccacccgttgcccggacttcacccctccgcggcggctccgggggtcgggcgggggccggcggcctgctgggggaggaggccgcggcgggcgggggaactcacctccgccgttcttgtagcacaggtaggggaagcgccacacgttgcccaagcccacggcgaagcccacgcacgacatgatgaagtccatctggcgcgtccaggtctcgcgcggcggcacggccaggcggccgccgggtgtccccaggcccacggggccgtcgcccttggccggggccccgtcgggcccgggcgcgatgagggggcccttcttctcgtcgccggacacgctatagatgccgttctcggcgctcttcttcgccatggcctcggcgggccgcacggccgggccggggtcgcggcgcctcacggggggcggcggtcaggcggggggcaccggcggcaccggggagggccccgagggcgcgggccggccgggggccggggggcggccgggccgggggacggggcggcgggcgggcggcggggtgcggggcgcgggcggcgcagtcagaagcagtccacgaagcacttgaaagtgagcctgaagaatctcatgtgtgtcgggggcccgggggcgcgcgggcggcggcggggcccggccgggcggcggcggcggcggcggcggctcccgaggctcctgcccgcggctcgggcggcggcggctgcggcggctcctcgcccgacccgaggctcagcctagcggggcgcgggcgacatcggcgcccgcggtctgcaagcggcggccggagcaggggcctgtggcccgcgccccccgccccggccggggcccgcggaggctgcccggctggcccgcgactccggtggcggtggtggcggcggcggcggtggcggcggcggcggcggctcgggcgcgcctcgccctctccttcccggcggcggcggctgcagccgctctcggggccgcggcgggctcagcgactcgccacctcgctccgactatccctctcttccccgtccccggccggccgccgcttaaaaaccgactccggggtgatgtcactatcgccccacccccacggccggccggcccccctccccctccccctcccgcatccctccctcccgccctcctcgtcacactccgcccacctcctccctgccctcctcccggggaggagacgccgctccagcgggaggcaggatggttgctacctggggcggccgccagctcctcccgcagggctccgggccgcccctcgccccagggtcgccggctcctagtgcagcccaggcttcccggccggcccctcccagccctgggaagacgtcccccgggccccctcagccctccgcctccccttctctccctttctccccgctcctggcaggctgcagccgtctcctcccggtgctccctccttccttgagctctctccaccgctgcccactgggggctacagcttcccggctaccctggaagctggaggccgggaccagctcttcaggtgacaggcctctgtgtctccacagtgggcagaggggagcctgcctggctgatgagcaagcctcgactttgtcatcaaggcagagaaggggcccgggtaaatgaccccggcggcccccacccctgcctggcgtgagagtgggtaggggcttcggacttgaggggactggagcgggaacaaggcaaggctgccccctggtgcctggcaggtgcacagacccttccccaaaggcctcaggcctgaggtcctggctgcccgccccccacccaccccgtgttcctctccccaggaccccccaggcctccctagcaagagccagcttgttgggctgcctctccgccgccagctgagcagcttgtttagaattttctagggctaagagtagcctgggggtggggtggggaaggaagtggtcattgtcctggcctgggaggtaaagtgtgcccccctcagcttcaagctccctgatctgatcgtggacactgcagtccccagatggctcatcccgttaagctaagcccgcggccatccgtccagctttaggaagaaaagcagttccggcccaagccagattgagcttgctgggtgagggagggacagtgtccccacccaggcttggaggaggagcctcaaggggtgtgtgtggttgggggagacaggcggtgtcacctgtgcttagaccaggggtggtgggtgggtacccctgaggtggcaaggtcacactgctcatcagaagtttctcactagggtcttctctggcccagcctttgactgaagctggtctggagacaggggcattagagaagtgactcatagatggcctaaagaagcggggccactcaaggacccaggacagagggaagagggccaacccagctggaccacaggcaaaccccattgcctttgagagaaagaagaggacccggtgaagtaggctcggagggcctcagcccagcaggagtgcggggtgggcgcgtgatgtcatcgaagggaggacggtgacctgggggagggccgctttgagggagagtgcaggccacggccagacagctctgggagccgcgggcaggggagactttcagatgttgcttgtcaaaggggtgggggtggaagggagagaaagcagaggctcga

SEQ ID NO: 1564115 - DNA, 4001 bp, Homo sapiens
tcacaggtgaggttggccaggctggcattggcacagtcttcatggcggaagatctccacgcagtcgggagtgttccaggtgtggccacatgtggcccagggcagcgtggtggtaaaggacttgaccaggtaatagaagccccaggccagcaccatgatgtagtaggtgttgcagtagaagacgatcaccatggaggcgtagcccaggcctggggccgggaagtccttgccatgtagattcttccctggccacctccccctgccacccctttatgtccccacccaggctggccgtgctcccaccatctgtcctcctggagccttgtttgtggtgctcctgactcccctgggctcccccttgtgtgagccccaacactgcgctgactccccagcctgtctcctctcctccagccgccccctagacccaaggcagagcgagcccctctcctcctgtccccatctgaccaagtgctgtggagtctccagcctcatacacctggccccttctgtgggtcccactgccaccatggcggttccaggaggtccaagcctctgcctggccacccagtagcctccagtcctcagcagctggtgttgatggtggtggtggggggggggggtttctagtcgcctgaggtagtgttggagacagtcgcccctgcagtgggcaacctcagtacgtcgctccacctgtctgtgccccagcgtccttggggatagtaacagtaggacctacctagagagccaagggtgctgctgggcaggtcccgtccccagcccggctatgcctggcctgtccttgccttgtggagctgcctatgccccctctagtccccgcttccccaagttcgctgtgcggcctgaacatctcctccaggctcccccctcgagactgggacgccatcacgtggccccaggcctggtgctcacgacaggaaaagatttctcaagtgggagccagctgggagaagggggcagtccctgaggctggccaagggctgctcacctttgaacaggggacagatgttccagacattgatgctgccggccttcatgaactggcccagcgagatctctaagaagaaaatggggattcctccaaccagggcgatcaggacgtagggaataaggaacacacctgggggtggaggcacagcgtggactcagggtggcccccagccaggctgcccaggcccagcgggccagcccagactccaaaggccccatcacaacttccgactgggtgagtcagtgtaggggtggccactgactcaggccccaggtggagtcttgagggggtgggttgagtgtgttgaagaggggctacagtagcccctgagccattggagccctattccctgggtggcagaggggccctaggcccccagggcttccacccccacggtcacttggggcgatggccatggaggacacacacgctcagacacgcgggctgtccctagtgctgcaattccctgtttcaggcagcacagtgagggcacgtgcatgtgtgcatgtgtgccaaggctgggtgatcaggcctggggggctcatccaaaggcagggagcgcgactgtcctgcccttggacgcttgcctgcaagtgtgaggtctaaggcagagggtgggtgggtcacagtcccctgctggtgggatggcgatgtgcaaggacagagggatacaggtgcggaagaggggccaggccggccttagcaaggccagggagtcaggctctgcaggagataggcagggcgtgacacaggcctatctcctgaggccagcaggctggggtgggggtggcagaagggcagggagagctgggtgccactacccccttctcctctctgggcctcctacccttgccctggctgggctcgctccactactcagaggctgagcttggctgcaacttgcctgactccaggtcccagcatccttctcctgaccttgggcaaaggcctttgctctggacctctgtttcccacccatcaccgggtcacttcggcttccagcaaccccagtgctgttttgtagtcacaggacacacgcgtgcccatcgctgttgctaagctgggcccgggcgggcgggcgggcgggcgggcatgggacgtgcatgcagtgtgtccagtggcggcgccaggcgggccaggccgcaggcttcccaagcctggctcgggcacccagtgttccaggcccgggccagaggggaggggcgggagggccgcgaggggaggggagggcagggggagggacagagtggcccattgtgtgtgtgtgtgttcgtgtgtgtgcacacgtggggggcccacacaatgtgccgcttgtgtgcccgacccgtgggggcagccagggctccttacctcgcggagaccccaaggcgcaggcctgctttcccacctcggcggccaatcgctcctcccagcccgggagtctggggggcagcctcgcgggcatcgccggccccctccccccaccatgccaggcacatgactgcgaggggggtggaggcgcccggcccggccaccgagcggcagcggcggacgaggggcggccccgacccccgcgtgcccgggggccacccgttgcccggacttcacccctccgcggcggctccgggggtcgggcgggggccggcggcctgctgggggaggaggccgcggcgggcgggggaactcacctccgccgttcttgtagcacaggtaggggaagcgccacacgttgcccaagcccacggcgaagcccacgcacgacatgatgaagtccatctggcgcgtccaggtctcgcgcggcggcacggccaggcggccgccgggtgtccccaggcccacggggccgtcgcccttggccggggccccgtcgggcccgggcgcgatgagggggcccttcttctcgtcgccggacacgctatagatgccgttctcggcgctcttcttcgccatggcctcggcgggccgcacggccgggccggggtcgcggcgcctcacggggggcggcggtcaggcggggggcaccggcggcaccggggagggccccgagggcgcgggccggccgggggccggggggcggccgggccgggggacggggcggcgggcgggcggcggggtgcggggcgcgggcggcgcagtcagaagcagtccacgaagcacttgaaagtgagcctgaagaatctcatgtgtgtcgggggcccgggggcgcgcgggcggcggcggggcccggccgggcggcggcggcggcggcggcggctcccgaggctcctgcccgcggctcgggcggcggcggctgcggcggctcctcgcccgacccgaggctcagcctagcggggcgcgggcgacatcggcgcccgcggtctgcaagcggcggccggagcaggggcctgtggcccgcgccccccgccccggccggggcccgcggaggctgcccggctggcccgcgactccggtggcggtggtggcggcggcggcggtggcggcggcggcggcggctcgggcgcgcctcgccctctccttcccggcggcggcggctgcagccgctctcggggccgcggcgggctcagcgactcgccacctcgctccgactatccctctcttccccgtccccggccggccgccgcttaaaaaccgactccggggtgatgtcactatcgccccacccccacggccggccggcccccctccccctccccctcccgcatccctccctcccgccctcctcgtcacactccgcccacctcctccctgccctcctcccggggaggagacgccgctccagcgggaggcaggatggttgctacctggggcggccgccagctcctcccgcagggctccgggccgcccctcgccccagggtcgccggctcctagtgcagcccaggcttcccggccggcccctcccagccctgggaagacgtcccccgggccccctcagccctccgcctccccttctctccctttctccccgctcctggcaggctgcagccgtctcctcccggtgctccctccttcctt

SEQ ID NO: 1564116 - DNA, 4001 bp, Homo sapiens
tgtcacccaggatggagtgcagtggcacaatctcctctccctgcaacctctgcctcctaggttcaagagattctcctgcctcaacctcctgagtagttgggactacaggtgtaagccaccctgcgcggctaacttttgtatttttagtagagacagggtttcaccaggttggccaggctggtcttgaactcctgacctcaggtgatctgtctgcctcggcttcccaaagtgttgggattataggcgtgagccactgcacctggcctattattactttttaagaaccaaaaccattcacttaattaaggaaaccaggacggagatggatagaatgagcaatttctccacaccttcaacacccccccccagacccccagcaaacccgcacatttagggagattgaggtcctgtgaataatataaagaatacttccacccagatttcctgaccaaaaacccctttgctggctgtgcagttccctccctcccccaccatatctcaccaatgacataggagaggatgaggttccagccagtggtgaaggcccagagttcacccacagtgacatagctgtagagatatgccgaaccagaacggggaacccgggcaccaaactccgcatagcacagcccagccaacacagaagacagggcagccaccaaaaagcagatcacaatggatggccctgctttatctttggccacctcgccagctaggacatacacgcctgcacccaatgtgctgcccacacccagggccactaaatccagggtgcttaggcatctggcaaggcgagtctcagccatgcctgactccagtgtacgtctgcgtaccagcttttgaccaaatctgcgaaatgcttgccacggcatcctagcaggaattgaagaagatgatctggtgaaaaacaagacaaaaacccctcgacagggctcattatccctaaactctgaaagcgaattacaagaccccctccaccaagcaaaggagctattgggaaatgaggacggggatatggaagggacaaaggcaagtcactttacctctaacctcagtttcttcataaacaagtaggaattacaataccttacaaggtttttggaagggctaatttcagaaatggcacgtgaaagccccctgaagtagagtggctggcgcctagtaagtgctcaatcaatattaggtctctttctcttgccagaaactgatagggtttatcctaatctcaacccaggaatcttgaaacctaatgtgtcagttccttggcctgtggctatttgggaattaaacagagctccacccaggggcttcccccggggcttcaaacagacacagcccccagaccccccagagggagaggggaccaacctcgctgcagattaaaagtgagcaccgactcaattccatccctcctcaccaagcccacactgctcaactagcgcagctgtcgcccaggggagtaagcaaatgttcccctacttcctcccaagccctgctaggctgacctgcaagcatcaacagcgaggcggggcttcgacatctaaagatttggagatgcgcccccagaggggccccagggcagcccgagattgctcgcactctcctctcagcagagaggaagggttccacccgatgccccccgactcaggtcccagattttcctgcccccatctagaaatggtttggagctggggtggagacgggagccctaactcccggggcgggggtctcgccagcaacaggtcacggccccgttgatgcaactgcatgccatggttgccagagaatcctaggtacgcccggaccctcgccgtcccccctccgacacacgtgtgggtccccaacgcttaccagagagctgttgcaaacctagggagcacagagtcttggactgggctcggtgaggcggagttaagccgagttgggttggagctgccgagttcggccgctcaggcttcaaagctgcggcttggggtcgttgcgcgccaagcgccccttatatacaccaggaggcggagccggtaacgtcatgggatcccacccccaatcctcctcgctacacacaatacacacacacacacacacacacacacacacacacacacacaacacacacacttcttggctttgcaaaaggattgcgtggggcctgagactgcgtcccatcctcactagcaagcctggcgtgccggggagcgagaaaagggggagggcagtcttttcccatttgtctcgctggtcgtcagaacaggacaataagaggcttcctggccaaagaacccatgagattttccacctctgtgccctgttaggaccagtgattctgggcaggaatggggaaggtaggtggggtgtgatgggggggagttgggtgcgtgtgtgtgtgtgtgtgtgtgtgtgtgtgtgtgtgtgtgtcaggagtgaagcggaacacagcaggggagtctccacctcactctcagtctttcttccttagctttcttgtctacacatctgaccctgacccttcagctctcacgctcagctgtgggtgtttctaatgcaggcagcaggagaatggaagatgatttcaagccacctgtatacagataattaatccagtctaaattgatttataggccccaatctctctataatgtgtctccagctgcctataaatattaaactattaaatgtgaaattctgacaataccaacatcttggaggaggaagcttgtttagttccattttattgatgtgtaagctgaggctcagaggcatgacttgtttgacaccacaccataattattgttgaccacctttgataaaacctggcctgttggacttcaatgcctgcctcccgtaggcaccatatcttattcaaatgaacaagaagagggatgtggccacaaggaaagacaaacagggagaggcatcagcagcagggtaggtccgtttaggctaggagatactaggaaacagaaaaggacccgaagaatctacgaatgatcacattgggtcagatccataatccatctgacccaatcaattcttactcataagaaagcaccaaaggttgtgaaagtgtggtccctgctccaccaagacatcttggggactaaggatggactcaaatatccttgcttcttttaatgatccatgatgaatatattacccatgaatctaaaatctaaatccgttctgaaagaattggtattttcaaccagctgcagctccatttggcattcattaagtatttattgagcatttattgagcactatgtgtagtagctggtacagcaatgaagagactatgaaggaaacataaaataaaatccttgccctcctagtcctaatctaactagggaaagaaaacacacactatacaactgaaaccttattacatagacgttaggagtgctgtgtttggaattgcacctaggttaaactcacagctcagccactgtggattacctaacatccctgagcctcagtttctggacataatatacatatttcacaaggttgttgtgatgcttagatgagattatgaagtcaagtcttcctgcctggcacatggaaagtactcaagaaaaacttgatacatatttggaacgatatattagtgtatatgatctggttgcttagattaggtgattgattggattatgagattgattatttatcacagagataaaatccaaatgccatgaaatccagtcttttaaagagtacaattcaataggatttagtatacagtcacagagttgtgtatccatcactacaatcagttttagaacatttcatcattccaaaaagaaaccctgtacccattcccagacactccccattttctcccaatcccctcaccgtatccctaggcaaccacaaatcaatttttttgcctctgtaaatttgcctagatgttggtcaaaggatgtagagtttcagttatgcaagatgactaagttctggggatctaacgtgcagcatggtcattatagttataacactgtattatg

SEQ ID NO: 1564117 - DNA, 4001 bp, Homo sapiens
attattttctttatatgacctgcctataagtgacttgaaggcaaagatcttatacctctttgtattttctgagcataatacatagaaggtttatcaacaaatgtttgttgaggatagtaaataaatcacacactgttatgcagaaaattatatagaaatatatagcttatctggccaatttggcttaaggtgcactgcaaatgaaatgcaaaacatattaaatataaaaaccatctaatatgtctaaaaactaggaatcttagtgagcagagatattttacacgcaggctcagaactgtattctcttaaaaatgaaaaataagcctgagttcatgcatcttcctgaggcacacaactacctttccttgctatccttgagagatgcacattacagaagtctggatttactagggggcgggggtttgcatggagcaatgtcttttgtgccaaagcttcatctacctatctgcaagtctgagagacaaacctcaacaagctcatcggtttaactgctccaaatgaagataatcttcacacatgtactgcacagaaagaattgtttgtccgccctcatctctttagcaatacccgcacagattaatacagtcggcaatatgtatcttttctcctcttgaggccccagcacagctcaaaatgcctctgagcccacactttgatttaccccttctcgccttgtcaccaaaataataataataataataataataaacctcagaaagcagactgagacacaagaatcgaagccatttattctacaatcggtcaataacctcatgccaacagcaagtcacccatactgcatatgcatggtgtttgtaattactgtttgtctgaactgtcctgatcatcgtatagtacactatacttctggaaggaccttaactcttcctcgtcctcacttttgtatgcctgaattggaagggtcaaccacaggtatccatatcagatattagaggcatagtacaataaatgggatgtcattaaaaatgccctaagccttctgtagcctatttcacgttcgggttttttttttcggactccacaagaataagattttcctttgcaacctcgaaaggacagggcgtagcaggagctaggtgttgagtaaaggtcgactctggctccaaaagaacgccagattctgggcagtagagatactactgcagtttcaatgaaccttaaacaaactgacaccccagagaaatggatcgcaatggtgtctcccctcccccagcccccagcccaattccagacaccgcgcccactcgttttccatcctcagccccgggtcccgagcttggtaggcagggaaagggtggggggctgggggtgcggaggaaaaagggggtggggtcggaagcgaaaaaggtgtggagaggcagataaaatggggcgcgaggctgaagaggaaagggggtgaggcagagaaacgcggggtagggggaaggcgaggcagaaaatggaaggaattagaaggggagccgaacgtaggccgagcagggccagcagaggaggcgaagcagccggcgggcagagaaaggggcagcgccaaggggctgacaagggttgaggaacttgccataaatcatagccaggccggtttcgtgcaggaagcgggcccggcggtgcttgaagagccagattgtgagaatggtgagggtgagcagcaggatgaagatgagcaggttggcgctgtcctgccggtggctctcctcggcttgcttctcggacacgatctcctcgtccatggctctagcctctccgccgccgccgtccgaagcccctgcccagtcaaagacgcccactgcgaggagcaaccaaaggggccgcatgagcctgcgggctcggggactgctgccgacgccacggcggaggggtgcccgccgccagccgcgccgagccatgtctccccccgcctcccgcccctacctcaccggcggccgcccgcggtcggaccactccccgagggctcacgggaaaggggcggggcccgggggtagccgtcggagcgcgcgccgccgccgccgctcttaaaggggccgcggcatcccaagctcgctctgccaggttcctttgcccctctgtcccaggtcacacgcacccacaggcgctgccgggaatgaaaggccgtctaaactagcccactgcctttggctaaagaaacatcggctcagtgtaaccaagcagaggcagactgcgctttctactttgatcctattctcagagctctcaggggaattgatctttcataggaattgatctttcataacccatctcaatatcgtcccccagtgtctcttaacaggataagttgtccccttgggaggagcctcaatctccatctctgtaatttaaatttaaatcggattctccttgtattgtcctcatcgggaaagaaaaaaaaaaaaacacaaaaaaacaccacacacacacagagcactgtagcagttcataaaacaatcgactcaaaggtatggattatgtgtgtgtctgtgtagtcggttttctttacatgtaaacatctgatataagtcatctctcacgctaggaatctgtacacagaaactcatcaaccttacagcaaagattggatcggtttgtgcttagatttcccaatgctcgtaaacacttccctcccgaagaaaaaatcttgggtggtgtggtggatttctccttctcctcttgctcctttttactgctgttttaaagcaaatgtccccagctccgaagtcacccttgacccctatctctcatctctcctctttagtattcctcaggacagtattttttttctgttctcagcctgtccaacctctctcaccagaattttcacagttctcacctccatactggagctttgtcttttgagaacagtgacttcctattttttctgtatttctccgatcgctccttagtttgtgtgggctctttgttttctcaagactttgatttcaacatgaatgatctacaagtctcaagccctggcctgctgccccaacttcaggcctctacctgttggattctgagcataccctgttgaggctcctaccaccctcaaaactaaaaatattttgaaatgagctcatttgaaatgagttccccctgcaagtacaaattccttctcaaattcttcataccatcagtggtaccactgtcagttcaattcctatcattctgcctggaactcatgattctcaaatggttctttccatctcatggccatataacctccttgctaaaacaagtaatactcaggcaactccaagctgcccctgtgtgtattcaccctcactaaccagctctctaagctctcaggatgatgagctaaacaaaaaaagcactcaaacgatgtccaattccactttctgtccctgtcaggtcaggaactgtcccaaatcagagccagtgactgtgtgcccattctctgctattagtacttgggtctgtgtcttcccaagaaacctcatggctgcctgttcccctataccctgactccacttgaaccacactgtcctgttcacacagagctgggctttgtggaagcaagaaacctaggtgaggatccttcccattctccccatcatcctctccccagaagacctagtaaatgagcttacctgctaactgctcattccaaggctgttttgtcccagcataaacccacttttcactgagtgttgggaacttgaaaaaaaaaaaaaaaaacccgaagccacagattgcttccctgaccagagtcaggaaatgtcttcaagcaccagactccacctctgtttatgtggccccagcaacttagtatgcccctcagcaatctctttgtactcgagttctaggaggaatcttgaaatggtagtaacttctaccaggcagccaatccccctgaggcttctgctcccccgagaatgtacttctctctccatccagcactgctctatacttctgacgcctacacccgggtttctcctcttgctacttccctc

SEQ ID NO: 1564118 - DNA, 4001 bp, Homo sapiens
attttctttatatgacctgcctataagtgacttgaaggcaaagatcttatacctctttgtattttctgagcataatacatagaaggtttatcaacaaatgtttgttgaggatagtaaataaatcacacactgttatgcagaaaattatatagaaatatatagcttatctggccaatttggcttaaggtgcactgcaaatgaaatgcaaaacatattaaatataaaaaccatctaatatgtctaaaaactaggaatcttagtgagcagagatattttacacgcaggctcagaactgtattctcttaaaaatgaaaaataagcctgagttcatgcatcttcctgaggcacacaactacctttccttgctatccttgagagatgcacattacagaagtctggatttactagggggcgggggtttgcatggagcaatgtcttttgtgccaaagcttcatctacctatctgcaagtctgagagacaaacctcaacaagctcatcggtttaactgctccaaatgaagataatcttcacacatgtactgcacagaaagaattgtttgtccgccctcatctctttagcaatacccgcacagattaatacagtcggcaatatgtatcttttctcctcttgaggccccagcacagctcaaaatgcctctgagcccacactttgatttaccccttctcgccttgtcaccaaaataataataataataataataataaacctcagaaagcagactgagacacaagaatcgaagccatttattctacaatcggtcaataacctcatgccaacagcaagtcacccatactgcatatgcatggtgtttgtaattactgtttgtctgaactgtcctgatcatcgtatagtacactatacttctggaaggaccttaactcttcctcgtcctcacttttgtatgcctgaattggaagggtcaaccacaggtatccatatcagatattagaggcatagtacaataaatgggatgtcattaaaaatgccctaagccttctgtagcctatttcacgttcgggttttttttttcggactccacaagaataagattttcctttgcaacctcgaaaggacagggcgtagcaggagctaggtgttgagtaaaggtcgactctggctccaaaagaacgccagattctgggcagtagagatactactgcagtttcaatgaaccttaaacaaactgacaccccagagaaatggatcgcaatggtgtctcccctcccccagcccccagcccaattccagacaccgcgcccactcgttttccatcctcagccccgggtcccgagcttggtaggcagggaaagggtggggggctgggggtgcggaggaaaaagggggtggggtcggaagcgaaaaaggtgtggagaggcagataaaatggggcgcgaggctgaagaggaaagggggtgaggcagagaaacgcggggtagggggaaggcgaggcagaaaatggaaggaattagaaggggagccgaacgtaggccgagcagggccagcagaggaggcgaagcagccggcgggcagagaaaggggcagcgccaaggggctgacaagggttgaggaacttgccataaatcatagccaggccggtttcgtgcaggaagcgggcccggcggtgcttgaagagccagattgtgagaatggtgagggtgagcagcaggatgaagatgagcaggttggcgctgtcctgccggtggctctcctcggcttgcttctcggacacgatctcctcgtccatggctctagcctctccgccgccgccgtccgaagcccctgcccagtcaaagacgcccactgcgaggagcaaccaaaggggccgcatgagcctgcgggctcggggactgctgccgacgccacggcggaggggtgcccgccgccagccgcgccgagccatgtctccccccgcctcccgcccctacctcaccggcggccgcccgcggtcggaccactccccgagggctcacgggaaaggggcggggcccgggggtagccgtcggagcgcgcgccgccgccgccgctcttaaaggggccgcggcatcccaagctcgctctgccaggttcctttgcccctctgtcccaggtcacacgcacccacaggcgctgccgggaatgaaaggccgtctaaactagcccactgcctttggctaaagaaacatcggctcagtgtaaccaagcagaggcagactgcgctttctactttgatcctattctcagagctctcaggggaattgatctttcataggaattgatctttcataacccatctcaatatcgtcccccagtgtctcttaacaggataagttgtccccttgggaggagcctcaatctccatctctgtaatttaaatttaaatcggattctccttgtattgtcctcatcgggaaagaaaaaaaaaaaaacacaaaaaaacaccacacacacacagagcactgtagcagttcataaaacaatcgactcaaaggtatggattatgtgtgtgtctgtgtagtcggttttctttacatgtaaacatctgatataagtcatctctcacgctaggaatctgtacacagaaactcatcaaccttacagcaaagattggatcggtttgtgcttagatttcccaatgctcgtaaacacttccctcccgaagaaaaaatcttgggtggtgtggtggatttctccttctcctcttgctcctttttactgctgttttaaagcaaatgtccccagctccgaagtcacccttgacccctatctctcatctctcctctttagtattcctcaggacagtattttttttctgttctcagcctgtccaacctctctcaccagaattttcacagttctcacctccatactggagctttgtcttttgagaacagtgacttcctattttttctgtatttctccgatcgctccttagtttgtgtgggctctttgttttctcaagactttgatttcaacatgaatgatctacaagtctcaagccctggcctgctgccccaacttcaggcctctacctgttggattctgagcataccctgttgaggctcctaccaccctcaaaactaaaaatattttgaaatgagctcatttgaaatgagttccccctgcaagtacaaattccttctcaaattcttcataccatcagtggtaccactgtcagttcaattcctatcattctgcctggaactcatgattctcaaatggttctttccatctcatggccatataacctccttgctaaaacaagtaatactcaggcaactccaagctgcccctgtgtgtattcaccctcactaaccagctctctaagctctcaggatgatgagctaaacaaaaaaagcactcaaacgatgtccaattccactttctgtccctgtcaggtcaggaactgtcccaaatcagagccagtgactgtgtgcccattctctgctattagtacttgggtctgtgtcttcccaagaaacctcatggctgcctgttcccctataccctgactccacttgaaccacactgtcctgttcacacagagctgggctttgtggaagcaagaaacctaggtgaggatccttcccattctccccatcatcctctccccagaagacctagtaaatgagcttacctgctaactgctcattccaaggctgttttgtcccagcataaacccacttttcactgagtgttgggaacttgaaaaaaaaaaaaaaaaacccgaagccacagattgcttccctgaccagagtcaggaaatgtcttcaagcaccagactccacctctgtttatgtggccccagcaacttagtatgcccctcagcaatctctttgtactcgagttctaggaggaatcttgaaatggtagtaacttctaccaggcagccaatccccctgaggcttctgctcccccgagaatgtacttctctctccatccagcactgctctatacttctgacgcctacacccgggtttctcctcttgctacttccctccct

SEQ ID NO: 1564119 - DNA, 4001 bp, Homo sapiens
ttcaattcccccctgtctgtcttctcaggaaacctcccagcttacctgcaggcctggcatcagtcatttatcaccaactgacacaaaccacagagctcaacaacggtcagggatggaggccaaagtctgtgttgagacctataattcgcaatcaccaaactcggttttagacctggtcctgtttcaagatctgtgtaggtcactacttcatcaaaactggagggctcttaacagcgcttgccccttacacggtttggctgcgagggcctggtggccatgagccccggctgtcaacaactaatcaagaaacatgagaagcaaggcccagaaccaagggtaattttcacattaaaggttaaggtttctgctttccattctctatcagggcacctggatggaaactgaataaagaaatccctcagtatatgtgataaaataaaattttccccgttgggaacaatcatgaagtggctcgtctatttcgtgtgaggatgccaattcaggggctttaacaccactgaattacattcaaaaagagaatacctgactccactttggagtcatgggcagggcgaggggggaggcagggggcacagaagaggaagagggatgactcagattatggctgacatccatgtaataaagggagatttgtactgaccactgtgcatgtaacacactgtgtaccattaaatctagaaaaggatggtagcatcagcccacccctaacaacaaaagatggctgactccggaattaaaaccacgacttttccccttcatacattcggaaatgtatctcaaactcactccctgttaccgtcttaggaatacaaaagctcctcttcgtttgagaaagcaagtaactgggtataactttccactcgggacataagagcaggaggcgtgcctgtctcctcgtccaggcctgacatggtggtgccacccactctgggtcctggaccactgctcacctttcaccacacttcatgctctgactttatcattaagagacctgggaatgtggacctcaggagtgggtacccacccaggctgaccatggatgtggcgtccaagaggccccactaacccatacccaagcaaagacactttcagacttcgtccccactccctactgtggcctgtcccctgaggtgatgcagtcacctgggaagccacccacctccagccaccacgcaggcacacacaccctatcgagctcaactggagcgggaggtggtgggtaagaggtttgcaacagagaccgaacggggcagacggaaccggaccacctctgtccctttcattttcctgggttcccaatgcagaaacgtggaataggggtggaattgtttttaacggtagcagagagccagaaaatgcagacagttgaccttgggaaccaacaccgtcgcagcgggaaacgtaaaagaaacggaacacgttggcaagtgaagggggagcaccgcgcggcgccaggaggagcgcggcggccgaggggtgtggagggcggggggtgtaacaggggtgctcaccatagatcatggccagcccggtctcgtgcagaaagcgcacccggcggtgcttgaagagccagatggtgaggatggtgagcgtgagcagcaggatgaaggtgagcaggctcacgctgtcttgccggtggctctcctccgcctccttctcagtagcgagctcctccatggcgctgctgtcctccgccgccgccccagaggaggaggccgaggccgcggccgcgactcgcagcccccaacccagcagcagcggcagcagcagcagccgcggcggcggcgccccggtagcccgacccgagccagggcgcgccgcgtcaccaggctccatggtcccggggccccccgcgcctcctccgagcggggaccagcagcccgcgccgtcggcgggttctggcagcaccgcggacctgccggagtggccgtggccgctgcagctcctcctcctactcgcgccgggccggggctgcgcccggggccgcgcgggggaggggcgcgcgcagtgcgcaggatccccaagcaccgccccccgcccgcgcacctgttcgtcccccggccgcgccacgccgcaccgccccgcgggccaaccgagccacccaggcggggccgggtgttgccctcgggtctgcgggccggccgccggctgcttgcctctctgcgcttctcaccccgtcctggcgcacctgcccaggcagtctggggtcgtggggccagttcatgggcagccgccgccgcacttccgaaaggggacgccagaggtcgccggcgcctagcgggagcatcggcttggagtgactagccttgcggtctcgagtcccgtctctggcgccacggcgaagtgtttaatctcaggccagtgtgcagccgccctgggcccagtaaagtgggggctgtcagtgaaccgagcagccccgaagccacgttagcccctacacctctctttcctcatctctcaggttgcccttccagccccagaatctgctaggtttcattcaaacctctgttctcatcagactcaaatgtgaggactgataaggagttggaatcgggggagggcattgaagtatctccttcctcacttgagggaatagacttcgtctgcgctgtgctactaatccccttggggaatagggttgaaccagaaggaactgaacgcttgccattcctggtagatgagcagtagctggtcctaaggtggtggtggggggtgggggttaccctgatgaccctttcttttatgttgctcacctggtagctcagagagtcttttaatgactcttaagaccaaacccagctctgaacaaaattatggcgtggactctgaaggatgaagcctcttggaacaaattctcaggaaaactagaatcttcaatccaccttgctcctctggtcaaggaagaaacaagatcagattaatcactgagttcccagtgcttagcactgtactcatgtgtttattgaaccactctgaaatctctaccaaaactgcccatgttttcgctcccaggggagtttgcatttttaagaggattcattgaagaaggtgatgcttaaccaaatgaaataatagggtagaggtagcattaggtaagaaaactctttggagtactgcagccttcctggttcccctgtaggtgagcactctgccaaagctgtttagtggtttctttaaagcagggaaatctcttcatctacattttagctagcccctttcccaactcctctaggcagtcactcagcccctgcaaacatccgtataccttgaagttccacacaggtttccaataaaattgcaaatacttaaaacctggatgggcactgtgttggtcataatattatgcccctttgggtgcccagtactcaaggacagaatttctctctttagaaaagggcaactcaggagctaccttaaaagtacagacttcttagtatttgtggcggattgtattttttaaaaagatggccacaatcatatttccaatcccagaaccttaccatcccccatcaagaaggggcatctatgttccctccccttgaacctcagtggacctttgtgactccctcaaagaatataatgtggtaatggagattatgtgatttgtgaggctaggtcataaaaggtaatctagctcctgcctgtttcattctgtcactttccactctagctaggctgggcacggtggctcacgcctgtaatcccagcactttgggaggccaaggcgggcggatcacctgaggtcaggagttcaagaccagcctgaccaacatggcaaaaccctgtctccactaaaaatacaaaaattagccgggtgtggtggtgtgtgcctgtaatcccagctacttgggaggtggtggcacgagaatcacttgaacctgggaggcagaggttgcagtgagccaagattgcaccactgcactccagcctgagtgacagagtgagaccctgcctccaaaaacaaaaaaacaaacaaacag

SEQ ID NO: 1564120 - DNA, 4001 bp, Homo sapiens
cttggcgtttagcaaaatactttccttctggagactcaaattttccttctccatagagaagggcaaacttgagatgagctctgaggcagagggacagccctgtggatggcctcccaccctgtattgcaattgcatcattagatggaagcagtctgatgcagtgggagcacaattaagctccctttcctagcaaaggaggcatttgtttctatgtatttccaaaggttaaaagcacatagttcctagagcaataagatttattcattcagtcattcattcaacaaacatgtattatgtcaatatttaactgaagtaaagacgtgagagccgaacaagaccttagaagtcaggttcattttacagatgaggtcatttcttaaccagggaaagtgctgacttactcaagaaactacaaatagaaacaaaacccagggattatgagtcccagtccatcatctttccaaaaagcacactactgcttaatatgaattaaaaatctacttaaacgtaaatagcagtggtagtgttttacttaaaggtatcctttttattaaaaaaaaatgtatttgaaagtgaaacatcaaatactagtttcggttctcagatacagtaatttccttcaagacattgatgacgctttcaatattccttgaggacagattatttttgcgaagaatttcagagacaggagagagattcagagagaaaggtggaggtggttgggggctcatgagattcttgagacctacagaatcaaggaaattcatgggtaatctaactgtgggaagcgacactcggaccctaaggaggtcttcgttcctgcctgtccttgagagtccacagctgctttccaaaacgtagttactaggaacaaatcagcctgaaacgcgataaccactttaagtaagtttcatttggccccgtgtcttctgaagaactgccgcagcactccgctagggagagcgggcttttaaggctgtggaaaggttcagggtgaactgggaccccaagggagggaaaggcggtcattaaaataaggaaaacgctccctctccttgctgaggcaagggaggcttaaagacgaactccgtcgcctgtctcactcgcatctaaccgagtagagcctggctcaggtctccaagccttccacaggacacggtgggtgccggcgggcttacagcccacctccgtcccggccgcccatcaggccacgagggggctaagaggagtccggggaaccagagagggggcactgcttgcccgcagcctcttcttctaaacacccgccgcccgcaagccgggtcgaatcccatttccgaagggcgcttccgggagaccaggtgtctccgagcgtccccgatcgccggtaactgggcaccggccgccagcgcagccctaccttccctgcccctacctgctagacgcctggtgcggtgcccggcatgcggacctacagccgcgacggccactcgggctgccctcgccatgggacttgggcactgcaggccgaccggaggcttctagctcgcgccgggtgcgtgggccctccctggccgcctgtgccaccccgctgcgcgaggcgcggagcccgaccacgcccgcgcggacggtcccggggtgaggaatctccagtggggattgagggtagagggcggccgccagcgagctgccctccgcggatggcgcccagcctccccacgctggtgcccctcgcaaggagaggtggccgggaaaggcaacggactgaggaaagccggctcactggccgcgtcgccaccgcgtccctgagtgctcagaacttaccgagcgagcgcgccgcccagatcttttcccggaggcgcccgcagcatctgcgactcggggaggcaaaggagccggcaccgcctcggactggcgcagcccaggagcgagagcaccgcggggagcgcgggcggcgcccccagggcaggcagatccccaccgagcagctagccaacgggcaacgcttcttgcaggaaggagggagggaggcgagagggaggagggaagtaaagcgggagggaggagaggggaagaagggagggaggagggaggagggagggaggagggaggagggagtgaggagggaggagggagggaggagggagggagggatcgcgtcccccctctccctcacttatcaatcaccccacagatcaaatatccgggctgtgcacccaggacggggatgtaagagcccacaaaggagccgctgctccatttctctgacaagcgctgcggagcactgctcacgcctctcggtccctcttgcctggaactctgcccagcccttgcggcttccaccctgggctgcagctcgggctcggtcaagtgaaataagaatggcacacggtcggtaccatgtccaaggggagactaagactactgggtggaagttaacgacaagtgaaagagcagtcagccatccgagctggacaccctccgggacagctgcctcccctaactagtaagcgcccagtctttgggagttcgcaggcagatatttaagaacctcctacgaggatcgtaaacaaggactttcaacataagatagagctgaacttgagttgtgcaagtgtgttaacaaagcaagcccttagcagcgttccagtgcccattttgattccctttattcttcacgacgacgttgcctggatcttctagagcgtgatttttgccatcctcccttcccttttctcctttcttcttcctcttattagtagtccaggtggttgtgattctattaaaggaaggcgctctgtgaaaagagtcagtgtagttcaagagggaggtgcggtttttgccaagagcattgcgtttcccctcaagacttgctttctctagggcctctcctctactcttccagagtattcgagataaagttgcagtttgataaatttatgccaggagtagggagttcatttgatgacactaagtcattttcccctccatcctgtaggagaacgtcattaattcaagtcgttgccaccccctatccttttcatgcccgctagagtctgcaaaaccccaaatccttcttactgtcgaaaagcgtgatggtggagagcagacggggaggcgaggagagaggtgcaaaattagacgcaaaattacctctccagctagtggatctgcattggaatttgtctgtttccatatttcccatgcctttcaactcgttctcacagcactgacaaccacctttttcttgtccttcccgtgggaatcttttgtgcttctcctgtcctctcttcttggctttctttcataatggttttctaaggagattatgctgggctttttaaaaagaaaactactggcaatcttatattatgaagatgtacagagtttgctttaataatagtcggaagaattataatcgtatcttcggagttgtaagggtcattactgttccttttatttcattcttgagaaagcctttttgaaatcttcctaccattcagataagcaacttcggaataacatagttctcacataagcacgtgggcagtgtatgtacggttatatatccagaagcattgctcttctttttacaatatctgtattagtgtaaacatccaatgtgctgtttgctacagactaaaagcagtgcactgagcacatcatattattaactaaatgaggtcagttaatactgttacttctgtctttaccgtatttctgactgtgtcatcttttcatgtcgcttttagtagatgttataaacaactgcaaaacacagagctaagaggccattccaatacagaaataatgagacagtcatgctgaaaaactcagacagtttactaagaagggtgatgtgtctgtagccaaagggaacatacaaaataagcaaaaacttctatacagagtagagaaggaacatggcattaatgatgaaaagtgatactttatttagatccagtagtaacatgtaatagatggcatgcatcaattttaattagccttgtaagcaagtctaa

SEQ ID NO: 1564121 - DNA, 4001 bp, Homo sapiens
ctcattttgggcggccggctggctttcggagccctggttgggttgagagcaggattcattgtaggtgacagcctttggacgtgggtgtcagcatggctgcccctctgactggaatcactggcactttttctgggacagaggtcttgcctggtcagctgggtcacgtctttcccatgcaacctaaagggagtctcacagacaatctctcccacaaaaacagttatggtgtctagccaggccttgagaggaagtaagtcacaagtgcaattccatggattttcctccagctgaatctccatgatccctccaatatgttcaaggacgccagcaaaaggcattacttttagcctattccccctgaggtctaagtgggtcagcaggacaaagcggaacacattgctgggcagtgaaagcagaaggttgtcattcaggatgagcactttgagcttgttaagtttgctgaatgccccagcctcgatggcactgatgtaattgtagtcggcctggagatactccaggctctccaggcctaggaaggtgtcctccctcaatatctcaagcttgttgttgttgagatgcagtcttttgagagttttcaggccactgaatgcccccgttcggatctcctgtaacccgttgttacctaggtgaagagtcaccgcgttggagtaattgacaaattcgtttggatacagtcttgtcaagaggtttccattgagaaaaagctgatagattcgatactgggggggctggagcaggctaactgttgtaaatcctttgttctcacagttgatattcagtacgttttccttttcttcgcacagacagcggatcttgcaaatgtctttggcagttttgcgactctctgtctgtaagatcccggccacggttaacacactgaggaaccaaacgccgctcagcatctttaggcaccttcggtgtcaactcaggtacctacaggcaaaccttaggtgggggcagggggaagaagcgggtgcagggaagaaagaaacaaggaagcccgattaaaaatggtaaagcaaggaggcggagtgggagcgagggagaatgagggggttagcaacacggcagaatgaaatcattgcattttccaaagcggtttcttttctccgctccctattcccccatcccgaggccacccacacacgcgccccgggaacacacatgcttgcacctgatttcccggggggtcgcagccagccgccaagtcattagtaaccgagttgtcctactaaatcctgcccatctcctcctcccctggggtatctcgaagagatctcgggcagctcgcccgtcttgagctcccagcagaaatcgcaatcgctttaggaaaaaaaaaaaaagcgcaaaaagggggtgggaaaatcaggaatcagggggctggcggcaggtgtagaggagagatagagatgggaaagacagtgcgaggtgggggttactcacacatcaggagaagactgaatccctctcctctgcagtccaccaggagtttagcatcttcaggaagtgggagaacaaggtaaaataagacgctgcttccaggggggatgccctgctttttgttggttgatttaatttgactgggggtgcgcagaaattaaaaatccgacaggaggcaggagcggaagagaagagttggagctgagggaagccgagctgccagggagggactggggtgcgattctgtagggaggtcggagagccggctggcccggtcggcgggcgaaggcgacgacggagcctgggcgcgcgtttccaattcggtggcggtggcagcagtgcgtctagcagtttgaatctgagaggctttgcaggctccccgggacaggactagggtgacgtcacgggggagggggcaggcagaggatccagggcgcgcggtgggggagggttgggcagatgcttcccttccttgcaagtggctttgcaaagctcaattcccggctgcgtcagttgattctgaactactccacctccaacctggctggcggcaggagaagctcctgcagaggggtttctcaaggaggggccctgctaatggcctggcacctccttgggcccctctgtgtgttctctctcactcctccctctttctctcacctacacaatgcctatggagggcaggggtgggggtggggggttcttctcccagattcccaagcaagggagaagcgtgtgtgtgtgtgtgtgtgtgtgtgtgtgagtgagagagagagagagagagagtgtgtgtgtgtgtgtgtgtgtgtgtgtgtggtgtgcctctttgctacaggactggtgccccacttgccagctcctagctcagatgctctctgtgcagagagtggggtgtgtgtgcatgcaccaatgtgtctgtgtaggagggtgaggagttctcttaggggatttatactttacatacagagccctgattcagtgctaagagaattcctttctgggtggtgacccaccaaacatatttgcctggactctgaaagtcagctcaatgttagcttatagactgagaaaaacaaaaacaaaccccttttctccctgaggtttatacttagccagataatgaggtttaaacgtgcacttcttgcctggaggaaggagaaaagaagtgggtgtcagaaaagcactgccaggctgagcctcagctgggagtgggagccaaaggaagggtggttgagccctccaggctgcaggggcaggggagctaggagaaaagaggaagctggtgcaggaagactggctcctgagaaagagaggagatggaaaaggaatcctggcctgagaccgagcttacctgggttctgatctggctctgttgctagatgtgccactagcttctggatcttcctgtgtccatctgcaaaaggcaggtaggtagactgtatgggccctcccagctctgatatccaatgcgggtttaaatagcctttccagagcattgctaatggccaggtgttggatttttgccttcattatctgttttctccttaattatcttacagctccttggacccaagagtcttccattgtggaatcaattcgcaaggggtaaataatgtctgctgttgcctggaaaggccttggttgcctctggtaggaagggggagatgggtcaggaaaaggagggaatcaaccagggaaaaggagttgaccaaatgatgtgcctgtcccacaaaacacttcagcttgctttcccggagtcccactgcctggccaaatgtggaatagataaacacacagatacaacaaaccacttgagaacagaatgacccttgcttctccccttctccttccttgttaagcctaggttctaggattgttccctttatacaagctcctttctctccgggaagggcgggggtagtttataaacttaggcactagggccacctgtagctggtgatctgtgcattattttcttgagctttctccctttctccttcttcttcttctaagagccttggaccaggcatcagaagcccccttaccctctaattcttgcttggcgtttagcaaaatactttccttctggagactcaaattttccttctccatagagaagggcaaacttgagatgagctctgaggcagagggacagccctgtggatggcctcccaccctgtattgcaattgcatcattagatggaagcagtctgatgcagtgggagcacaattaagctccctttcctagcaaaggaggcatttgtttctatgtatttccaaaggttaaaagcacatagttcctagagcaataagatttattcattcagtcattcattcaacaaacatgtattatgtcaatatttaactgaagtaaagacgtgagagccgaacaagaccttagaagtcaggttcattttacagatgaggtcatttcttaaccagggaaagtgctgacttactcaagaaactacaaatagaaacaaaacccagggattatgagtcccagtccatcatctttccaaaaagcacactactgctta

SEQ ID NO: 1564122 - DNA, 4001 bp, Homo sapiens
ggcactagggagtcactgacctgcttgccacgggcagagtgaccctgtggttttgtggctgcgagcggcggcccaggctcccccttgcctgttctccctccctggccagctacaaaaatcctgctctcaccatgccagaaatcagctcaacatttaggccccttgcaaagtcgcgctggcagcgctcgcctggctttgcagagcttttagagttacccaccggctcttcctctggtattcctagtcttgccgagcgctagcaatctccgaccaacccgcgggccactgccccgagcctcagatccacgtctgcggaaagtggctgcgagtggggtgcaaaaataaagcccaacccagcccagcggcccgacagccggagccacccgagacctgtacaacttgccccgccgccctggccgcttggggtatggtgggggggggggcgggcagcgatgccaaggacacccggatcctttccggtcctcagcggcatgagaccgcgtcgtaggcaggcaagtgggaggtggagggcaggattagccacctcggccactttggccactcaaccggccccaaaccaacaggacccaaactaaaaataataagctacctgccccctcggctcgcgtgcgcgcgcgcgagatctctctctctctctctgtctctctctcacacacacacacgcacgcacacgcgctactgagctgagcggggaagaggcagcacgcgtgtcggtgcagcttgtgcagcccccgctgaaaattcacccacctctagagcccagcgtctggtgcagggcccgcggcgccgtgacctgcgctgctgtttccacgatggtatctatgtgattccggacagagctcctccgcgcccgctcgcccgtcaaacccacggagcagccccagcaggcgagcaggcgggccggcgggcaggcgggcagcggcgcgcgcgcgcacccgagcagacaccgcgcgcgcacccagcgcctagcacacgggctgcacctttacatacacgcgctgaatccccgcccccgctctccaccacccccccccaccccgcacacaagcagtccttcctcccgacactcgaccactttgaccccctcacattcctgagctcctacccccgtcccccatccagacatgcccatttgattcctcttctacccacacacccagaaagacagcgcgctttcctcccggcatccgccccctctttttgcctaaaacattccctagggaggagcgacccctttcctcaggcgtggagaccccagtcctctaacaagggcgcactcgcctccatcccccccaccacatacacacacactcgagcccttttcttctcttccagtcccctaataacgaaggaacacacacacacacacacacacacacacacacacacacacacacacacggggcattcctttgagagagcaaccaagaagccaggaaaagccaaagaaacactggagagcctgggggaggggggccgagggagatcgatagggtcgtcgagtctacgcggaattgaataattacaggatggaggggaatgagtcaacaacaatgacattcaaatgcaacaatcatacttggattttgtatcacgggtacggtacctttggctaattgtcaccccgcagaacggagggctcctggaatacttctccgtggcggtcgatcctggaaggagccttcttgggaaccaatttcctaggatccagtagtattcgcactccccctacctgtctgcgcgtaaggggccaggggctttaaggcgaaagtgtgaggctttagcctaaagtgagactatttagccgggttagaaggagacgggttaattatccgcaccttagaactccgtgggcctttggtgcagaatgggttaagccggatgatcttggagctgggggtggggataggggataggggataggggttgaggaaagagaggcgtgggactgggagagatgccgcacttgcgaccaaaagaaaaaaaaaaaaaaaaactactttggctactgagcatgcccagttcccagctcaagccctataagggaggcattgtgtgcattccacttctccgggctttggtggtgaccgggaggggagtttgactggggaagggggtggtagttgggagacattagggaaagggggttggagaacaaggtttgaagctttgggactgctcaggagggactgtgaagagagaaagggaagggacccacggagtaccttcgggagacggggagaaggagaggaaatggactaagaaaagtcacttcagtcgcccctcattgtgtataccaaagaggctttagcagctgaatctgaaatatccagtggctgcaaatccaacgtgtggattgtctaggccccttcttctaccctttttgttagtgcttccacaagagataagaaatattctgaggaagggccaatgttcaaaccagtttcatgcaaattgataatttcgttaataagcttgttaagaaaataaataaacctgggggaggggagcagagaggagttggctatcatgtatgtatttcagatacctggctttcctaaacaaaaggcataaacattggatgtgctcccatcccccaaccttgctgttttttgtaggagcttggctaagaaaaacaactctctctctcttcgtgtctgtgggaataaactagctttaggtaagtagagctaagttataaatgggaagtatttccctaggactcttggtagcctattatttgccacattcaggtaatactgccaggcccatttcttcaggaccagtgtgttgcccaatttacttattcaaatcccagcggctctagccacaatagagcacaaccggtatccagaaatgttcttgcttaaaaatgaaaaaaaaaatctttaagctaaaactagcaacagctttgaaaccagaatttggctgtctgcctgaactcctacagttaaacatttaccataattggttgatgtttaaaggccccaaatctaggtagaaacatctgatgggcaaaggatttattacattatttgtgaataatggtctaccttctgtatcatctatagtagtcattcatatacatgtttcattgtttttcattttttgtcattttatgggacttccgtcaggttatattcacacaaatgttcaccgggcacaacatgtatacagagatgcacgtacaatatgtaaatgaatacttaaatagatatgcgtgtatgggcatatttctttatgaccttgctaaatattgtgtcgttcatgaagaactctttctctaccttcactccacattgccttgaaaactgtaatcatcctctcttttacaaacaacctagagacagaaattgggcagcattggtaaaatttatcttattcaatgtgaaatccattatgaaatagcattaaggaaacactaaaatatttgtctataacagcgtatgtaattgtgcagctccttttagcaaagtgaatgatgtttccttcataggtaacagctgcagaatgttgaaaaatccctctactcttgcacacttggacaaaacagatcctgctaattaataactcacatttgcattttattgtgtaatgcagtttgaaagtagtaatgggtatcaaaacaagttggcatttattctaaatgctaacaattcaggaagctgaatatattttatccagataggtgaaatgtttgtcttttactacaaatgttaacaagagtcaatagaatgagcaaaaaaagtttacctgaaaattctaagtaatgtgataactgaaaaggccagatttggacagtaaatatcagatgatttaaatgcctatctttattcaactttagaaactgttctgagacttggctatatttaactgcaataactgtgaaatgttatttttcatatggatatggagacaaatctgaaagccactgtagctagatcatcgataaattacaattcataatattcctaagaact

SEQ ID NO: 1564123 - DNA, 4001 bp, Homo sapiens
ttatctccaaatattaattaaatacataaaatacccaggaacacacaacaaggaaatgatgcaaagaaagaagtgtcgcacagaaactcctttgtttattttacccacgaggaatcagctagtggtaaaaccgaacatgtctcaaggtagacaacccattagccatgacccaggaggatttgcattttaagtagtttggttcagaatacagccagcactgctgagatgctatttggctgccatatagacgtgcatttcccctattcaccatgagagcatgattggcattgcaaaaagaagtcataattcttaactatgacatcacctaaagcaactttcattgtaaaatcaaaatttcacttgatattttttgccttgttatgaatgtggttttcaacagctattttggttcagttgagtcatttcttgttactaaaccaccaccccacccacctcaaaacaaagaaacccaaaagcaaccaaactaaaaaccaaacgcagaaaaaaaaaaatccttataatccgaattcagtacaaaaacaagaaccaggaatctcaacacatctgaaaatgcataaggagctgccctcctcctggtgattgctactttaagtagcaagggggggaaaaggcactagtaagagccaggaagttcccaaatgcagctcttgtgaaacagaggaagccacaagcagctggaggggcaggcaagagagagaaagagtccagttggtccaccaaggagagaggaaaagaggtactgaaagggcaagagaccatggaaatgtggagaaaggaagaaaaagaactcggagaagggagctacaaagagggtaaagggagcactgaatgtatgcgaataaagcctcacactccggtggtaccactgaaacatgcacatttaaacatcaagggaaaaacgcaaaaaagaaaagaaaaagcccacaaagtaccagctgggtaccaagagccttctctgtggctgctgggagctgtccgtcttcctctcggtgccctgaaagacccttggctctcacgaccagccaggactgaacaaacctagcccgaccaaaaacaaatcctgcatccaccggagtgcagcgcctggcactccgcgactgggaggagagaagcggcctgaggggggcagaacactgatgggcttcagggcggtgggccgaggtggctccccgagagctccctcgggaaaccccgctggcccgcctaaggctcggatggaggtggaagaggttcgcggagagacccggccattgccgcccgggtgcgctacctcgggcgggcggcgaggaggctggaggggctgctagcgcgtaccgcaatgttttgccgcatccctgttcccggagccggccgctcagccccctccgcgtcaggggcccaagcagcagcctggcggtccgtgtagcggaggcggggtaccgcgcgggatgtcgcgggggccttcagtcccgccgctcacacatttctccgcgcgctcccgtcccacaaggggcagctgccggagtttcagtggacctctctagacccaggcgtgcggtgggtgaggaggaagagaggccagatcaggccgcctcgaagacgttggcactagggagtcactgacctgcttgccacgggcagagtgaccctgtggttttgtggctgcgagcggcggcccaggctcccccttgcctgttctccctccctggccagctacaaaaatcctgctctcaccatgccagaaatcagctcaacatttaggccccttgcaaagtcgcgctggcagcgctcgcctggctttgcagagcttttagagttacccaccggctcttcctctggtattcctagtcttgccgagcgctagcaatctccgaccaacccgcgggccactgccccgagcctcagatccacgtctgcggaaagtggctgcgagtggggtgcaaaaataaagcccaacccagcccagcggcccgacagccggagccacccgagacctgtacaacttgccccgccgccctggccgcttggggtatggtgggggggggggcgggcagcgatgccaaggacacccggatcctttccggtcctcagcggcatgagaccgcgtcgtaggcaggcaagtgggaggtggagggcaggattagccacctcggccactttggccactcaaccggccccaaaccaacaggacccaaactaaaaataataagctacctgccccctcggctcgcgtgcgcgcgcgcgagatctctctctctctctctgtctctctctcacacacacacacgcacgcacacgcgctactgagctgagcggggaagaggcagcacgcgtgtcggtgcagcttgtgcagcccccgctgaaaattcacccacctctagagcccagcgtctggtgcagggcccgcggcgccgtgacctgcgctgctgtttccacgatggtatctatgtgattccggacagagctcctccgcgcccgctcgcccgtcaaacccacggagcagccccagcaggcgagcaggcgggccggcgggcaggcgggcagcggcgcgcgcgcgcacccgagcagacaccgcgcgcgcacccagcgcctagcacacgggctgcacctttacatacacgcgctgaatccccgcccccgctctccaccacccccccccaccccgcacacaagcagtccttcctcccgacactcgaccactttgaccccctcacattcctgagctcctacccccgtcccccatccagacatgcccatttgattcctcttctacccacacacccagaaagacagcgcgctttcctcccggcatccgccccctctttttgcctaaaacattccctagggaggagcgacccctttcctcaggcgtggagaccccagtcctctaacaagggcgcactcgcctccatcccccccaccacatacacacacactcgagcccttttcttctcttccagtcccctaataacgaaggaacacacacacacacacacacacacacacacacacacacacacacacacggggcattcctttgagagagcaaccaagaagccaggaaaagccaaagaaacactggagagcctgggggaggggggccgagggagatcgatagggtcgtcgagtctacgcggaattgaataattacaggatggaggggaatgagtcaacaacaatgacattcaaatgcaacaatcatacttggattttgtatcacgggtacggtacctttggctaattgtcaccccgcagaacggagggctcctggaatacttctccgtggcggtcgatcctggaaggagccttcttgggaaccaatttcctaggatccagtagtattcgcactccccctacctgtctgcgcgtaaggggccaggggctttaaggcgaaagtgtgaggctttagcctaaagtgagactatttagccgggttagaaggagacgggttaattatccgcaccttagaactccgtgggcctttggtgcagaatgggttaagccggatgatcttggagctgggggtggggataggggataggggataggggttgaggaaagagaggcgtgggactgggagagatgccgcacttgcgaccaaaagaaaaaaaaaaaaaaaaactactttggctactgagcatgcccagttcccagctcaagccctataagggaggcattgtgtgcattccacttctccgggctttggtggtgaccgggaggggagtttgactggggaagggggtggtagttgggagacattagggaaagggggttggagaacaaggtttgaagctttgggactgctcaggagggactgtgaagagagaaagggaagggacccacggagtaccttcgggagacggggagaaggagaggaaatggactaagaaaagtcacttcagtcgcccctcattgtgtataccaaagaggctttagcagctgaatctgaaatatccagtggctgcaaatccaacgtgtggattgtctaggccccttcttct

SEQ ID NO: 1564124 - DNA, 4001 bp, Homo sapiens
gggcaggcaagagagagaaagagtccagttggtccaccaaggagagaggaaaagaggtactgaaagggcaagagaccatggaaatgtggagaaaggaagaaaaagaactcggagaagggagctacaaagagggtaaagggagcactgaatgtatgcgaataaagcctcacactccggtggtaccactgaaacatgcacatttaaacatcaagggaaaaacgcaaaaaagaaaagaaaaagcccacaaagtaccagctgggtaccaagagccttctctgtggctgctgggagctgtccgtcttcctctcggtgccctgaaagacccttggctctcacgaccagccaggactgaacaaacctagcccgaccaaaaacaaatcctgcatccaccggagtgcagcgcctggcactccgcgactgggaggagagaagcggcctgaggggggcagaacactgatgggcttcagggcggtgggccgaggtggctccccgagagctccctcgggaaaccccgctggcccgcctaaggctcggatggaggtggaagaggttcgcggagagacccggccattgccgcccgggtgcgctacctcgggcgggcggcgaggaggctggaggggctgctagcgcgtaccgcaatgttttgccgcatccctgttcccggagccggccgctcagccccctccgcgtcaggggcccaagcagcagcctggcggtccgtgtagcggaggcggggtaccgcgcgggatgtcgcgggggccttcagtcccgccgctcacacatttctccgcgcgctcccgtcccacaaggggcagctgccggagtttcagtggacctctctagacccaggcgtgcggtgggtgaggaggaagagaggccagatcaggccgcctcgaagacgttggcactagggagtcactgacctgcttgccacgggcagagtgaccctgtggttttgtggctgcgagcggcggcccaggctcccccttgcctgttctccctccctggccagctacaaaaatcctgctctcaccatgccagaaatcagctcaacatttaggccccttgcaaagtcgcgctggcagcgctcgcctggctttgcagagcttttagagttacccaccggctcttcctctggtattcctagtcttgccgagcgctagcaatctccgaccaacccgcgggccactgccccgagcctcagatccacgtctgcggaaagtggctgcgagtggggtgcaaaaataaagcccaacccagcccagcggcccgacagccggagccacccgagacctgtacaacttgccccgccgccctggccgcttggggtatggtgggggggggggcgggcagcgatgccaaggacacccggatcctttccggtcctcagcggcatgagaccgcgtcgtaggcaggcaagtgggaggtggagggcaggattagccacctcggccactttggccactcaaccggccccaaaccaacaggacccaaactaaaaataataagctacctgccccctcggctcgcgtgcgcgcgcgcgagatctctctctctctctctgtctctctctcacacacacacacgcacgcacacgcgctactgagctgagcggggaagaggcagcacgcgtgtcggtgcagcttgtgcagcccccgctgaaaattcacccacctctagagcccagcgtctggtgcagggcccgcggcgccgtgacctgcgctgctgtttccacgatggtatctatgtgattccggacagagctcctccgcgcccgctcgcccgtcaaacccacggagcagccccagcaggcgagcaggcgggccggcgggcaggcgggcagcggcgcgcgcgcgcacccgagcagacaccgcgcgcgcacccagcgcctagcacacgggctgcacctttacatacacgcgctgaatccccgcccccgctctccaccacccccccccaccccgcacacaagcagtccttcctcccgacactcgaccactttgaccccctcacattcctgagctcctacccccgtcccccatccagacatgcccatttgattcctcttctacccacacacccagaaagacagcgcgctttcctcccggcatccgccccctctttttgcctaaaacattccctagggaggagcgacccctttcctcaggcgtggagaccccagtcctctaacaagggcgcactcgcctccatcccccccaccacatacacacacactcgagcccttttcttctcttccagtcccctaataacgaaggaacacacacacacacacacacacacacacacacacacacacacacacacggggcattcctttgagagagcaaccaagaagccaggaaaagccaaagaaacactggagagcctgggggaggggggccgagggagatcgatagggtcgtcgagtctacgcggaattgaataattacaggatggaggggaatgagtcaacaacaatgacattcaaatgcaacaatcatacttggattttgtatcacgggtacggtacctttggctaattgtcaccccgcagaacggagggctcctggaatacttctccgtggcggtcgatcctggaaggagccttcttgggaaccaatttcctaggatccagtagtattcgcactccccctacctgtctgcgcgtaaggggccaggggctttaaggcgaaagtgtgaggctttagcctaaagtgagactatttagccgggttagaaggagacgggttaattatccgcaccttagaactccgtgggcctttggtgcagaatgggttaagccggatgatcttggagctgggggtggggataggggataggggataggggttgaggaaagagaggcgtgggactgggagagatgccgcacttgcgaccaaaagaaaaaaaaaaaaaaaaactactttggctactgagcatgcccagttcccagctcaagccctataagggaggcattgtgtgcattccacttctccgggctttggtggtgaccgggaggggagtttgactggggaagggggtggtagttgggagacattagggaaagggggttggagaacaaggtttgaagctttgggactgctcaggagggactgtgaagagagaaagggaagggacccacggagtaccttcgggagacggggagaaggagaggaaatggactaagaaaagtcacttcagtcgcccctcattgtgtataccaaagaggctttagcagctgaatctgaaatatccagtggctgcaaatccaacgtgtggattgtctaggccccttcttctaccctttttgttagtgcttccacaagagataagaaatattctgaggaagggccaatgttcaaaccagtttcatgcaaattgataatttcgttaataagcttgttaagaaaataaataaacctgggggaggggagcagagaggagttggctatcatgtatgtatttcagatacctggctttcctaaacaaaaggcataaacattggatgtgctcccatcccccaaccttgctgttttttgtaggagcttggctaagaaaaacaactctctctctcttcgtgtctgtgggaataaactagctttaggtaagtagagctaagttataaatgggaagtatttccctaggactcttggtagcctattatttgccacattcaggtaatactgccaggcccatttcttcaggaccagtgtgttgcccaatttacttattcaaatcccagcggctctagccacaatagagcacaaccggtatccagaaatgttcttgcttaaaaatgaaaaaaaaaatctttaagctaaaactagcaacagctttgaaaccagaatttggctgtctgcctgaactcctacagttaaacatttaccataattggttgatgtttaaaggccccaaatctaggtagaaacatctgatgggcaaaggatttattacattatttgtgaataatggtctaccttctgtatcatctatagtagtca

SEQ ID NO: 1564125 - DNA, 4001 bp, Homo sapiens
gagttgacaaatatgtaggcatcaactcagtgtttatattatatagcttttttattggtctcccgttttttcacaatacaaaattttatacaaaattcaaaaatttatacaatctggaaattcgacaacctctcctgccatacaaaaggcagtttggcactcacatttgcccagtccagggaataaaaggcacacagacatttccgaatttcacaacatttgatttatattgatgcttggtattacacccacttttaaccaacaatattgtcttactaatccaagtaccgcgtagatcttacaatgtgtatgttttctacggttttcatttagcactacaattgtccttctgtttagtcaaccttgtaatagtaaaatatgtcacagaagcaactgctaaatttaaaattactcttctcatttaaggcgaaaggtgttcattttcctcaaaagcttttcatttggtcgtatagtatcatataatgattcagacaaagccacttgagatctctaaagcataattacccacctttttaaaattgcgatatgactactcgtaaataggaaaaaatccacacataaaccattagttatgcaattttatcatacatcaaaaatgcttatgccccatcctatttttatgtcaatttttcaacgttttatagttttatttgcatgtctcgggccacacgaaatgtgccttatggagataatacatattttctggattggctttaatatgtgtcagagcagttcccttacgttagaagcagctcatcttggcgacgctgagttttttaaaaattaaaggagaaaaaaaaaaaaaacctgtgtgtgtccaggagccagcagcgcccactaggagagggaggcggaagcctggaaagcttggggccggattgagggaccattggggtggccctggagtgaaaccctataccgtcgggggcggggcagaagagggtgagggtgcagatgttggaaattttcctaagccagcgtccacggttcctcagtttgggggggcgggggggtacgacgcagagagctcctttcctcggggtgacacccccacctcggcaggcggggttcaaacgaacaagggatggtttttttcctgccatccaaaagaccgacattgccaatgaaagaaagaaatgtcttccctgtcaccctccacccagcaaccaccagcaccttgaaattcaaattacaaaaaaagccccagcaaaacccctttagcgcgagtgtgggattgaagggcccagatttcccaggcagaggccgacgggaaggcggggggagagggagcgagcgagaggagagggagaggcggaggctttttcctgcacagccccatcccccaccccgttacccgagttccgggaaggtggagggggtcgggggctgtcgaggggctcccgagcccccaggccccgggagagcgggcacccctccaccccgcgccgctcccgcccgcgcccagccccgcccccgtcctccaggcggcgagaaggaaagggggaggggagcgaacgccaggcggttccgccgccgacccccgcacccgccgcccctagccccgcaaagctccgcgggtacctgtcggcgccgaaaggtcagggtttgggcccctcagaggggccaggcacaggatttgtccaccacacacacacccccttcctatttacctccttcttcttctcgcccttctccgtggccgcggtggcttcggtggccgcggcggccgctccctcctcctgagaggtggacggcccgggctgctcgtcctctatgaccacgatagtggcggtcgcatccgcggctgccacggtggctgccactgcggcagtgtcctgctccatgccgtgggagcgggaacgagtagggggacaaggcaggggacgagggctcctgggcggcggcagtggctgcactggaaagagctagatggagcaggggtggggaatcactccgcttccaaccccttcgctcaggcccccccttctttaaataaccctcaaccctgccccacttccgtccacccaccctacgtcatggcctccccccgtcactctccccccttcctccaccccccccccctcaacgatcgcgagactccccttccccacccagagcccgggccggccccgcacgaccaactgttgcctgagtgtggggcgcggacaggggtggaggcgggaacccacaactcgcggccccctgaaaatctcctttcccacacgcccccaacagtgagcctgagctcccctcgcagatgcgtgcagaacgaatcctctttcccttaaatctgctctttgtacctcggggcgctctccccttcttgcacaaagaacttttcctctgctcctaactgtactgtagaaggtctttttcaccatttgcaaagcgcggaacccctctgggactgccctttcccggatccctaaagaggtaggattagcggtgctgtttccaccttcctaaattctgcacaaagagaagcactccttgaatctcttgattgcagctgcaaacacattcacttacaaggcaaagtctgactctcaagttttacgtatatttgctctattttcacctctggtacctctcaggtagccaatgtgcaggaacacttctcttaccttcaccactgcatttttaaattcctaggggacaaggttacccaccgaacctggggcaacatgtggtaggcactcaatattagcaattgaaatgaattactgtgattttttggcacaggttctatttgcacctccattattatttggtaataatacaacacataatatgaatgatcatggatataaaatcatttcgtgatacagaatcaatcagtgtccatcagcaggtgaatggttaaggaaaatgtggtctgtatacacaatggaatactatgtagccataaaaaagaatgaaatgtcatttgcagcaacataaatgaaactgatgtttattatgttgcacaaaataagccaggcacagaaagacaaataacacatgttctcactcatatgtgggagctaaaaagttgatctcatggaggtagagagtagaatgataggtaccagaagtctgggaagggtgtgtggggttgaggcggatcaatgaagagaggtcagttaatgagtacaaatatacagttagatggaaggaataagttataatgttcaaagtagagtagggtgactctactgaacaaacaatgcaatgtatatttcgaaatagctagaagagaggacatgaaatgttcccaacacatagaaatgataaatacttgaggcaatggacaccctaaataccctgtcttgagaaggacccttaaggacagcaacagtggaggatttatttttcaccatgttgcagctattgaaagatagaattcctctttccttgcatggggctgcaaaggagaaaagctcaagaaatatttgttgtgtattggtgtgtccctgctttcaagtcagttttgttccactgtatttctcattgtcagtgtacattatttcagttacatcgtgggttaaatgcacttttgtgaggaaatctgggaaacacatccctttataacaccttttttttgtggggacatgtgttccatgttccaaaaaaagaatttaaaaatttatttgggggcagaacatatttgtacgttggcaattttccatgcatgtataatgcaatccttccttttcaagatgacgcggctgaaagtgctaccaagtatatgaatttggctggaaaggtcgatgcttggtcaacagaccttgccacaggattcatgtaaatattgccctttggcttgtggcaacagctgctatttacagagcatgtgctatccttatttgtaaatctgcctaaaattcatgatctgtagactttgttcaacaagagtcatctcatttctgagcctactcaacaccttgctctatctgctactactttccccaattatgtcttttcatttgaaatggtcttgg

SEQ ID NO: 1564126 - DNA, 4001 bp, Homo sapiens
tcatttccagggaggacaacatcatctcacaaccccaagcctctctaatcacaatcaatatggtaaacatttttgtaatatatattatggactgaacaccagtaaaacgtttcaaggaatgtctgctttagggtactcacaggccaatgaagatacaaaaacatgcaccatcaatataggacttaataaacattaacgtgtaccaagtgtctacggtatgccacagaggaagactcactcaccaaagggactaaaggaatggcttgtagaggtgggccttgaagaacgggggcaagtgggggagtgccatagcccttttcagaacagctgggaatacaaatctactaatgctgaggggactgaatgccaagaggtacatcctagctcttccaacaggggccactacactaaaacccgaggaaactgggtggacaccaagcattagccctccaggccagtggttctcaaacaagttggggggttgggggaatcacacacaccctctgtgacatctagcaatgtctagagacagttttgattgtcatgcctggggagcaggggtgctactgttatctagcaggtagatgccagagatgctgttaaacatcctacaatgcacagagcacatcccacagcaaaggattatctcgctggaaatgtcaatagtgccactgttgagacactcagtctccaggaaaggtactcagtatgtgctacttcagcaagggcagcctcttaggctaggatatcattcagctagaacatctctggggtggaagaatacagcaggattccaaatggacatctgaggtgagaggaatccacggtgtatcgtttagagttgggaagacacaaaatagaggctttacctgaccaccctttctaaagacaccacctaagtcactttatcacatccacctgtctcatttcctgtatagcacttatgacagcctaaaaccatcttattttctccttatcttctttcccctctggaatataagttccctgtgagcatggagttggtttattctattctccgctgtttccacaacttgcaactgaataactcctgataaacaataagcattcaacaaatttggtaaattagttaatttcggcttttgacggtttcggtggtaggaaaagggcgagttcgaggcaactacctctgacatagcggtggggggtggggatcgacacctcaagcattctaaagactggagcgctgggtctgaaattcaaaagtgccgcctccagagaagagtagaaaggagttggagtgtaccaatgcgaggcgagagaggacgctgggctgaaacagaagtgcaccgtttgggaccgaaggccacgggagagctaccagcgtccccacattctccggagggggtcaagtaaggctgggaagccggctccggccggtccggcggggagccgcgcggcggaggactgagctggcgggaagctggttccagacgcgactcctttggcgggagggggaagtaggcggggtaactggcagctcggcctgtaccactgggccggggcgggggccgcgcaggaagcggcaagtgacacctggaaggggttcgagttagagcacccgcgcggggagagtgggttcgagcagaaccccctctggacgggcaaggaacccgtaagggtccgcgacgtttcaggttacatgggctgggttgtactactccggcaccggataaggggtccaggccgggacgtgcgcagggccgcggccaggtttatctcaccagagccattgggtccaatgatggcggtgaacctctgaaatggtccgataatctgtcgacccttgtacgacttaaagttctcaatctcaatcagtttcaggaaccccatgacggccgcggcgccggcggcagtaggacaggccgcgccgtacgcccgagaactgaggtagcccgcgcgggaaacgccgcagtgcaagccgggcgaccggcaaatgtcgcgagaatacgtccaggcctaacgggattttcgccttccggcaggagtgggaccaggggcggggactgatgttgcgtatacgaggagcgagctgacgactggcgtggtgcctccgcccccctttcttgttgcatggcaacaacaaacacttgctcctgcggaccagatccccggaggagttgttgctgggcggagtcagagcagttcttgaggttcaaggaggcgggggagacctgagctcacgcttgctgagacagaagtcacagcaggattatgcccctcagggcaagaggaaggtgggagctcggctgtggctttagcctggccagctttcaaggctaggacaaggacagggtcgggaattggaaggacccggggggagcggagagctggacgggaaggaggggccaacgggaggattcagtgttaggtgagctcagactttgctaatggtggggtgggattggtggcgggacgggttgcgaaggcggacgggttgtgaatgggactggggctactcccaggcaacagggatacaggctggggaaggctacggcctgagatactacccctatcccctgcctccctcctgttgtaccaagcagagttcagaaactgccgccgtaacccaagaacaaagttgcatgcagagccaacctaagagcttcaaaatcgggattccttactgagaaaggtattttgtgtgaacccccaggagtcagggtccctaagccagcgctctccacctccacctacctctgcctccatgcctctcccccatcccattcccacagctctataccacaatgccaccttacctctcttccctctctgctctctatcattaataaggcaggggccttagcaatccaagaagcttaaaatgtcagctgaatcttccccttcagtgaccttatactgtaatggcaggtgaaaccagtaggtaagttggtgccattctcagacttaaacatggaaaggatctggtggttgccataattattcctttaactatttattaaattatgtccgaaggctagaaagagtcctaaagacttaggacaagtccaggaaagtgaggaagtggctgggcatggtggctgacaactgtaatcccatcgtgagggaggcaggccaaggcaggaggatcacttgagaccagcagttcaagaccagcctgggcaacatagtgagaccctatctctactaaaaattaaaaaattagctgggtgtggcagctctcacctctggtctacccaggatgccgaagcaggaggatcacttgagcctgggaggttgaggctgtagtgagtggtgtccgcaccacttcactccagcctaggtgacagagcaataccctgtctcaaaaataaataaagggaggaagcttggtagatggaatctagtaggggagccataaatgaagttcagctgggagaaacaatcaggctgaggggataaaatggctaaaagacagcaatctcatgtaatccatggggaaatactgttcccttttaaaagatgagatggtgagcctgggtaacatagcaaaacccaatctctacaaaaaaattttaaaaattaggcaggcatggtggcacacacctgtagtcccagctactcaggaggctggggcaggaagatcctttgagcccaggagtttgaggctgcagtgagccatgattgcaccactacactccatcctgggcaacagagagagaccccatctaaaacaaattaaaaataaaataaattttattctctgcctcagccttccaagtagctaggattacaggtgcccactgccacgcctggctaatttttttgtatttttagtaaagacagggtttcactatgttggccaggctggtcttgaactcctgacctcctgatccacctgcctcggcctcccaaagtgctgggattacaggcgtgagccaccgcgcccggccaaaaataaaataaaattttaaatttaaaaaagatgagatggcacttggggggaaaattaaattggatcc

SEQ ID NO: 1564127 - DNA, 4001 bp, Homo sapiens
gcaatggcatgatcttggctcactgcaacctctgcctcctgggttcacgcgattctcctgcctcagcctcccgagtagctgtgattacaggtgcccgcaaccatgcccggctaatattttgtgtttttagtagagacagggtttccccatgttggccaggctggtctctaactcttgaccttaggggatccacctgccttggcctcccaaagtgctggggattacaggtgtgagccaccccgcccggcccatttttagttttaaagcatttccatatggcctgtggtctgtttggaaacaagacatttacaaagtcaaggaaatcatagtttgtgtgatcacccaggaaccttgtaggatatacagatactactgaagaaagataggaaggcacttattttaactcagagtccacctgacactcttagcaaccccccccccaaatttcattctaaatgcaataaattcattttaatgtcttgatttttaatcgaagcaaaagcaatacatgtgtatagtttttaaaaatcaaacagtagaaaaaggacatataatgaaaagtaatagaactgtccctccttctcaactcttgcttccccaaatcagaaacacaaacttctacacgtgcttgtttagagattacaccccctttttcaataacatgcctttattactatttcttgacttaatgacatgaggcattttctgctgacttcctgccgcccccctcagctctccttccccctgaatatagtcatatcactaatttttaactcttctgttggctacctggttcaatgaatagcaaagtggaatgctctgattggattttctcatcaccgactccagagtcttgatccatgtgccaatattcaaacagattccctttctcacactttcggcaactgttcaaaaccatgccacatctgaggttgcttcatatgtgaaacataagtttcttgcacagtttttaatgttcttccctgtagtttctttctgtcattttttttcctttgggttgaagaaatgtatgccttccagaacatgttattaatgtcctccagcttattattcaatccatctattgcttagaattcatctcattcaattgggtctattcacttcgtttctaattggggagatttgcctgctgtctgagccattcttgttcagtttatctttccttaagtttttagttacctttccccgttttttttttttattgcattctgtgcccattgtcatttcctaaagttcgtgctgttttctgttttacggatgcaaaaacttctcagatatttttaaggattttcaaatttttaagctgtattctgttccttcaaatatttccttgagagtcaatttttcattctatcttagacgatttgggttatatttcaggctttccacaaatgctgtttttttctttttttgccacccatttatactaaaagatgaggcaatggaaagaatgagtggcaagtctgcatgcaggagcggagttggtcgctttgctctagggtgggtgagcaggtgggtggaagtcagccatcctgacgaggagcccccaaatgccacaaagttagtggctctaaatatatacctgcaggtggacgttgagaatcaccgaggccagaatatagaagtaaaagaagttcttgcgcagccgccaggccaggtcgaagaaggtgagcagcgtgcgcgtgagcgtcttgcagaaggcgccgtaagagccgcgggtcccctgcgggcgcgacagccgcaccgccaggccagacagggccgccgccgccatggacctgatgctgcctcccacatagtgcccagagcccaaggcctccatcaggctccgctgactcaccgaccgtgggacagagggatggacgcgggaaagtacgggcgggaggcctcctgggctgctgctgatccgagctgcgctgcaaggcggaagccctcctttcccggcagggctctggccccagcggtcactggcgccctgccaggttccgccccgccccacggggtccgcgtggcctagagtcagtttagcctaactgtcctggcccaggccccagaaccccaggaagggcagggcacgtgctgacgtgggagacctagcttcctaacccgggctgtcttttctttaaaattatgtttaatttttaagtttttttcagttttttaagttttaacaaaaggaacacaaaacttgctcaaaacgatataaaatgtccttcataagcatgatcttgagcaactcagaagcacaaacccatttcctgttgtctcatccctttaggaacgtttttcaatcctcaactcttgagctagtacaaatatacaaaacccgcaacttttctggacattaaaatgtgtgcattctgcttgaataattcaagcaatacttctgtttttgtgttagatctttcgtattcttctgattggaaaagtcattcaatcaagtttttagaaattttcaaagcagaaatatgtaaaacaatagaaagcaaattccctgcatagcttcactttcccctcctacccttgccatgaactactattacgtttgctgtatctacttcccgactttatgtattgatatattgctcttaccttttcaagaatgtacatctacttcactctctttgatgactgaatagtgatctatgtacatgttgactaatagtggtcaataatttatttaaccagatccctattgatggacattctgaatgtttctagtttttcatatgtcaaaaattgtttcagtgaacatcactgtacatatgaatttacaagtggcagaacagtaggaataatatgaccccatctttgtttatgaaaacaattacatatacatatacatttagtgttcaaagccaaaacgttttactaatacatgcgattgatcaaaaaagtttagagatcagggctctatgttaccttgagtgttaacaatcttaatttttttattaccaatatgataggcagtacatttcattattcttctaatttgcattcatttaattgtcagtgcagttgagcaacttttctaaatttctgaagttttcaatattgtttttctgatggcttgtaaaacattaaacatcatatttattatgagaaaagtaaaattcctaggctcataaccccctagagagaaagactactaatttgtatatgtttttatcaattgtttgcgtatatttataagcacaaacatgtatacgcacatagatatatttacaaatcgtaaaacaaaaatggaatcagataaacatatgcagtccgggcgctcacgcctgtaatcctagcactttgggaggttgaggcaggcggatcacctgaggtcaggagttcaaggccagcctggccagcatggtgaaaccctgtctctactaaaaatacaaaaattagctgggtgtggtggcactcgcctgtggtcccatctactcaggaggctgatgcaggagaatcgcttgaacccaggggtggaggttgcagtgaaccgagatcgtgccactgcactccagcctgggtgacagagctagactcggtctcaaaaacaaacaaacaaaaaccaaataaaaccaaacaaacaaaacaacatatgtccccacctttgcttttaaacataatgatatgtcttgcatatgttcccatgttgatactttattggctgtgtgttattccttatggatggccaataattaactgatctcctgttgatggatttttggatggtttcaaatttttcgcaatcataagcaatgctgagattaatattttgcatgcacatcattgtacacctttctgatattttccagggatacattcatagaagtggaattcttagctcaaagggttttcatgtaaggattttgatacgtattgtcaaactgccttccactagcttgtactaatatacacatgaacataccgtcagcagttcctaacaattggcattcacattcttttaatcagttgacattctgataggt

SEQ ID NO: 1564128 - DNA, 4001 bp, Homo sapiens
gtcagtcttctccttaggtctctgaagttccaaacagaattccaccactccttatgatatcactgattacatttaaccctcccccagtctccttatttgacagctaagcacacagacatcattttctctctatgtataaacatctgtgttgataccaaaacccatccttgcagtagttctatcctcttaggcttgaataattctaagatattttattcaccacatggtatctaactatgcattataataacatatatatgtggcatttcatatcagggaaaaagaccttatttaatatgatgttgggtgtgagccctttgccatgctatgcaaaatagaaattctagatggatccaggactaaacaaaaaataaaattatatacaaaatatgacattttctgtcatacttttatgatagaaaattctatgtgtggatatttttataatcttggtgcagaaaaagctactctaagcatgtcataaaacccaaagccataaatgaaaatgctgataaatttataacataaaaatgtaaagctttcatatagcaaaacattgtttaaaaaagataaaaggttaatgacaaattaagtaatttcacagcatatacgacagacattcaattaagattgttaacgtacaaagaactcttacaaactaattaaaaagaaatagtactggctaggcacagtggcagacgcctgtcatcccagcactttgggaggctgagacaggaggatagcttgagcccaggagttcgagaccagcctgagcaacatagcgagatcctgtctctacaaaaaatttaaaaattagctgggtgtggtggtgcatgcctgtagtcccagctactcgggaggctgaggcagtagcctggcttgagcctgggagattgaggctgcagtgagctatgatcatgccactgcactccagcctgggggacatgaggggcttaaaacctagatgatgggttgatgggtgcacccaaccaccgtggcacatgtatacctacgtaacaaacatgcatgttctgcacatgtatcccagaacttaaagtaaaaaaaaaaaatgcaaatcaagtcgaggcaacatagcaggatactgtctctacaaaaaataaaatattaaaaaaattaaaaaaataatacttatccatagaagaactggcaaaaatggtatctcagttaggttctatcagaaaacagagctaccaggaaatacataaaatgaaagtttttgtagagtcctccagtctcccccagtttcttgctgtgtcatgctagaaaatcatggagtggcttgatcattctgtgacccagccaacaggcctgaatgaaaattaggaccttgaacattcccaggcgctgataaaggtgtatctaggttgtgacccgaaacactggaggaagctggccctggcccttgagccaaattcctctaaaccctcatatgagctccataccctgacctttctgtggaaggaaaggtgaggtgaagtggagaaagcaagtatacactggaagcctgaaaagagaagagcccatgaaatggactaaaacctgcatcagtctcatgttatctccaagcttctaacttcgatggtggagtaacatgcatgagaaggtcaggtgttttctgaaagagctaaacacacaacttttctaggatttggagaagctaaaagatccagcaggagctggaggacctgcaaacttggtcactgtcctgtgcccaccaggtaaccccacaaaatagtgacaatgtgaataagctgaaaatgagcattgtatgcctgtctgacttttccattgtaaaaagaatatggctgtcatataagttaactttagctgaatgaaaaatgacctccaacttagcaactgtgaagaaaacatttattaccttatagtttctgtaggttagttttggagtggatgatgagattggagtcatgtatctgctgggactgcagtcatctgaaagcttgactgtactggaggatctacttccaagatggtgcactcacatgactattgctaggatgaccaaaagtcccagcttgcctgggactcaggattggcttcatgggagtttgatctatgcaggtctacagggccccacaccctgaggggccctatgtttcgtttgctctgatgtcactgtctcgaaattcttaataattttatctttgatcttgtgttttgtaagggaagtttaatgagaccgcctatttcatcacactcattttctcctccccactgactttgccaacattcttctccctttgagtctcactgaactctgatgcattgtgggtccactagaatgttatgctcatgggcactgtatacattctttgctattctatttgcacatagtgtttacaatgcatttttgcattgttgtaaaactgtagtaagaacacaacgtggtatctgctctcttaacaaatttttaagtgcccagtatggtatcgttagctatatgcacaatgttgtacattagatctgtagaacttaattcatcttgcataactgaaacttttttttttttgagatggagtctcactctgttgcccaggctgatggaatgcaacggcacgatcttggctcactgcaacctccacccgcctcccgggttcaagcgattcttgtgcctcaacctcccaagtagctgggactacaggcatgtgccaccatgcccaactaatttttatatttttattagcgacgggatttcgccatgttggctaggctggtcttgaactcccgacctcaggtgatccgcccgccttggcctcccaaagtgccaggattacaggcatgagccactgtgcccagcagcatagctgaaactttatgcccattgaacagaaactcccatttctctctcagtctctctctctccatataagctgttctcctggattgaggctccatttctgatttattttattcagactctcatgaattatatcatttttactctgagttcaatttaatctggttttctaactcactaatttggttttctagagtgtccatcttgctattcagtgcccctatttgttttaaaaatcagtgttcacatttttatttccagtgtaaaaacacaattctcaaaggcatttgtttgtatgtgtcaatgttttatttaactcattactgaagaaaccagcaggaaaataaaagagctagttccatgaacatttgagaaatagagatgtatatagtcaatgggaaaagaatgccaaaataagattatcaagttaaacataacaggaaataaaaccatatcacctttggggttaactcctctaccgggctataaaacaaaacaacttattcatttctgtaagttagcctctaaactttaagaacttcacagggctataaaccatttgcacctgcatcatttgtggattgtgactatactgtgacagctatgttatagtttccaaagaggtcagataagggtcaagcaggattattagaaaatactccagcatagaaaaaagtagccattcttttgccttttctcagattgggatccatttttctttcatattaggatctcctgttttccatttgccctgggttgcaatctttggatgcttcctccaactgctctataacttatccttgtctccagccccctttactatcaggagattctgtgtagtcatagtgaaggggtcaggcagatggaaggagcagtaaacccttcacaatcttatgggggtggagggcaagaagggggatcctattgtgtggtgatatggcagactggagtgttttttctgttttcaccagtccaattttcttctgacctccttgatatttcaactatgtaagtaggactctagttttcagtcacggtatataatttcccctgttacatttttgttgtgttattttcagcaggaaattagtagagggagagagtaaactgagtgcattattagaattacaaagtttgtatctcctatctcagataaccatgg

SEQ ID NO: 1564129 - DNA, 4001 bp, Homo sapiens
agtttaatatcacttgggaacttgttaaaaaaattattgtacatcaatttgaaacagggattagaaaatttctttatgttatgacaatagcaagttgaaatgttttttaaaattagtcaatgaatgattgttatactgtatttttttaaaaaccaattttatattttcaatggactgatttaacttactactggattgctgtttttgtgtgaacctctgagcctcaagaatggatgggcctcgtctcctgtatttttggtagattctgatttgcatacaaatctcttaacatgcatgtcaatctttgaaagagagatctatagaaagctggtcagatcccaactctcattcctcacaaacaggctggataacatttgtgtaaatcagttcagcagcggttcctgctgtcctcattattttcagagaaatcagggcaaagcatactgatgaataaaaatagacagtgttccctgtttccctgcccctgcagtcacctctatcagggatgtagagtgcggaacacaccttccttcttcatctgaatgcttcatcccgggaccaagaaaagaaaactacaccttagatacacactccactcccaccagggccactgcttttcgtccaaagaggtactctttacagcactcaattactacgtctcctggttctggctacagttttgaaacatggaaagtttgacaaggcatatattgacttttacaaagcctatagtataatgaaaatgcttgccagctaagcaccgctgagttttcctggcagttctgtaagtcagtggggaccattaatggtctgtatgctgagtcacctatgatatatccctgcttgtctttgattgggcagcacctaatatctgacttctaaatagaactctttgacttactaaaaatttgtcaatagtaatatcactcatttaataagaagggattcagaggaaaatcaatcactattcagagataagagctttgtttgttctttttaaaggtcgaataagtgggtaaagctccatcgcaaagggaattatcttctgtcctgcagctaaaaataattcctgagaagggtgtagaaagatgttcagctgtctgaactgactaactccttattcactctgctttaaatatgctgagaggaaagaggtactcttagcgttctcatacttcagaacctggtgcccacatagaaagggacagtgagtgctgccctctaccctgctgagtatgggaatactgtgaccaaagtgaagatttaaaaagatggttctatcattgatagaacgttatcattgagaccaagcctggtgcttagggagaggagaaaatcattttaaacttgtactgtataaaaactctggcaataatttgcattttggtaaataaaggaactagcattatagcttctctctggcccaaattctgatgatttcttggcttagggcttcaatcaatctgcagctgaccgactgtaatcctggccagcacagcttcaaggtcacagttatcatttctagactgtggacattttattgttgccactatcgatgaaaactgcctttcagtatttgcctagttcaatattctttcagcaccctcacccctcacaatttataaacagaatcagcaataccaccaatgaaaaatgaatttacaaggaagctacacccactggttacaagcctacaaagttaaaagtagtcacttcgagttaggtatcaaggaaatttcctttagaaaacccagtcgccggagctgcgtccttctgcttacctgctttatgtatttgtttactgcctaagggaagtcccaggcagccagatgcaagaatacaaagctccttggaaggtggaaggggcgcccggtgtcctctgagctgcgatctcaattccgatgcttttcatgtggctgaaatagctctgtgcctctcccggtattgagaactgctcctggctcggggctggaggggaacttaaaccgttaaggctaagtgttaaagagaattcctgtcatagctcacagttgttcttcctaaatatagagtttgatacaagccatacgctggctgcctccgaaaggcttgaccgtgcggaaagcaggctcaaatgtcagccgggaggtggctatggtatcttacttgccctcctaatcttccagaagatgctggctgcattttctcatatattctgagtgggtatagcaaagttcgaaaagtaaggaaagtctatctttagctttattacctggatgccagaagatgagtattcaataaaaattggggggtgtcagcatggtaccatgcctctcagcaggggtactgacattaaacagggtttgaatcctagcttggtcacttgggagctgttaaagttacttaataataagtactcaacaaatagtcaccaaatgatgataattatcctagtaagttgaactatatgacattgccctttttgtaggtcaaaaatggtccaagattgacaggctggtgaggttccagggcctacagccctgcccactctgctctactgcctctactggtgacaaagattttgaccttagagtacgtgagacaacagaacaaagaagaaatgtctattttaaatatggcaagggtcaggagcaggtacaaggcaaaacattttttaaacagaaaacttccaaatcctaagatacatgctcactatttttaacaccacttttaatttttttaacctctccactctctgaaattacctttacccagagctgtacttcagtagaagtattaaacagagtggagagacttaaaatccatccactgtggaagtgagctccatgtctgagttcttgacagcatggtcaagccactgaactatattaccagcaaccatcgcttaccagtcttcttgttacatgaggaaaagaagcagctccaatttgtaggagccctagacatcaggcttctgttccctgtagctgaatgcattccagatggaagtagttgggcttttttcagaactgtagaaggaaaaccaactttctgggagtttaggaggtcaacagataattgtggttcattttagattggggttcaccattaacttctgtttaggtgttgttcaaaagaattgtatctttaaaattcagtttagacatcatcctttgagatcacatggtgccaaaagtgagttatttatacactggagaagagaatatagtgagcaccttaatatttctccaggtttttggctacttctgtgtgttcagagctcttcaccagacaaatgatggcatcactccatggaccaacaatgagccatttttggccccttgtcctgaagttagaccacactttctgccacagtccttttgccccggtggcccctcagtagccactgatggtgtatatgttgaggaaactgctcctggcagaaatgccttgtacacagggctggcccaatatgagtgtggctgcctctgtgggaaaaactaaagtgagctgcataaccagggctctgttggtcataagtcacagtaacccaaagggaaccagtttaagccaagaggggtgtggcagacagtcaatgcctttctcagtatcacttctgtccacctgagttctgtagttgtaggcagcttccagtatactgtcagcttcacacctctctctttttctctacactgggactctgcacatcatccaaaagcaggagacataactcataagtgccgggaaacaacacccctagggataagcctcaaccaatgggaatggaagttgagtgatagatgtccccacttcctcatcctgtggtcggaatattctgaggtgtgatctacagtttcccagaggtccccagcaggactgagccccagttgcccaccatggggatttgctcattaatatacccttattggctttctcttttccctcacttcccccactcccttgcattctctgggatcatgccccaagtagatcacctgcaaccaagtccttgtctcagcatt

SEQ ID NO: 1564130 - DNA, 4001 bp, Homo sapiens
cacctaagaaatgtgggaactaaaattaacatgctttgttttctctaagtcacttcagaccacctaaatacactgacattgcttaaaaaccctacagtgtgctccacagctacccccttaagagtaaaagcccgaagaggtgtacacttttttttttctttttaatggacagggaaggctcagaaaggttaacataaacccaaggccacacgcagagcccatcaggaagaagccagactcaaacccaggtgttgctccaaatcctcagtcttcactagatcttgtgccttcggagatcctttaaatttgcgggagaaaatgcaaagtgagtactcagaaattcagaaagaaaggaacagtgttaaaaatggtaagagaaaagcctgctctatccaattcgaggaaaacagtgggaaaagcaaggtatgagcgagacactccaagtggaacctatgggaagtgcagattcaagtctgcggcagtcacaggtttaaaagccaccagaaaaagaaagggcagttctatccttcccgcgactcccaccccccacgacagaggcaccccgagaaaagaagcctgcaaattatccttccccttcaaatttcctgcacacagttccgactttagcaggcctctctcttctggtcgggtttttttttttttttttttttttttttttttttttttttgagacagggtcttgctctgtcgcccaggctggagtgcaatggcgcgatcttggctcactgcaacctccgcctcccaggttcaagcgattgtcctgcctcagcctcccgagtagctgggattacaggcgcgtgccaccacgcccggctaatttttgtatttttagaagagacggggtttcaccatgttggctaggctggtctcgaactcctgacctcgtgatccgcccgcctcggcctcccaaagtgctaggattacaggcgtgagccaccgcgcccggccggctgtcttttgatagctccccgattcggggtgtaaacgattcccgcgcccagacctcatgcctccccacccccaataataataatcgtttccttttcccgtcccccagttcctttccgggggatccgtctcctacgcagtcggctgagaattctgcaagcgctgcgcgtccgcagacctttccccagccccagctccctacgaggggaaacccccgcccccaagagggaaatttacccgcctgcaagaacaggaaaaggtcgcgcgggcagccccgctcggcgcacgcccccagcccgggctcgccgcgcgggtcacgcctcgctccgccgcagtccctgcaaccctcgtcccatggggggtccgcccgcgcccggcagcccggggactccccgagcgggagcgcgaaggcggcgagcccgcgtgggagcgcgggtggacggccagggcccggaagggcggcgcggccggcgggcacccgggactgcccctgcaggccccgagctgcggccgggacggagcgcggagccagcaggagcgcggcctccgcccgaccgccggtgcacgcggccccgcagcgcgctgtgcgtggcagtccgggagagtgcggcgccgcgcgggccgcccgcattgttcggcccgcggcgcacgccacgcccgacccccgccccagcccgccaggcggcgggagcggcggggatggccacgcaggtggcggcgggcgccctcacctttggcgccgagcatgaagtcgagcgtgctgtgccgtgctgctgccatagtgaggcgaggccctgtgccatgcctgggggagcagccgcgggagactggggggccgcgcggcgtgtcaggctgcggccggctgggagtgtgctgcgcccggggaggccaggactaggaggtgggaggggccgccgggagcgacccggggcgcgggggcggggccggtcccgctccgggagggaggaagccgggacgcctccagccccgaacttggagcgccgggtgtgaggcctcgctaatggtggaaacgtgggcgccgtgctccccggcgtgcgtcaccaatggccgcgccctgctccaaggctcgcgcggccgctcccgccatccgttaggtcaccttaggtttaaacagcgcagcaggatttccggggggcccaccccttacgcctccccacacacctctccccaagccaaggcccctcttatttcctggcggagtcgggaaaatcaaatgatgagatccacccctgtagtctaagagtactgcctgccttttcttacaatgctgcagttaaacccattcggattattaccattattagcaagggtctgctttgcatttgaggactgaatagaaagcgcttgggcatttacgttatccacagtttcacgcaaaataaaatgagggagaagccagtaagaggacagcattgttgttaatattgaattaggaaactgcagactccggagttgcttgtctagcaggactcctccatcactggcgcctctattaatggcaatagcctttgcggggggcttatttttgacactggggttatggctgctgttcaacaaaatgatggcaaaggggagacagcatgagcgtctgaactaaaattattctttactgcactgacaatatccctgggcaaatgcctccatcatcgtgtcaggcttttgtgcctctcacggccacaggaattgctgtaatggttagacaaaatttaaatccatgaactcatgtacctccacaaaagcaacgaagaacctggatattaaactcacctcttcccccaggcaacggctgttttgctgagttcttcacctttctacaaaaactgggcagtgtcttcacaagtgttcaacaagggtctgttgaacagacctttctctgttaagaactgaatctttttctagtacctgcattaatttttgtctacccatggccacctgtttgttattctgcatgtcttaccattcttctctgtgtcctagattctcaattttgttagctattgcaattctcatccttcagttagctatgtcagtctgcagctcctctttcttcctgggatgttcttcacttcttgccattcccctggagtcaggtcactgacaatagagttgtctttgtcctgcatgttgcaggagcagtagggctccatgggcctcaggtgtgcctttccccactcagcaccagtgtgggcctcacatcaaaagggccctgcacttggtttaattctctgctgttgccatcttgaaattcttaactctcgaacaaggggccccgtgtttttattttgcccttggcctgcaaactgcgtagctggttatgctctgcagcttgtgtctggcagcacaggtggccctcgggctcgggcttgaaatctcatccccagcacttgtgcctcgccttgtttcctgcaaggtacaaagcagagatgaaaaacctgagatgcttttgcttaacttatcagacagccatagcaaaagtggagtttaacaaatgtttcattggctgggcatggcagctcatgcctgtaatcccaacacttcgggaggccgaggtaggcggattgcttgaggccaggagttggagaccagcctggtcaacatggcaaaatcccgtctctacctaaaatacaaaaattagctgggcttggtggtgcacacctgtaatcccaactactcgggaggctgagctatgagaatcacttgaacctaggaagtggaggttgcagtgagccgcgatcatgccactgcactccagactgggcaacagagcgagacagtctcaaaaaacgaaaaataaaaaaccacaacaaatgcttcatgatgttagcacagcatcagagttaaattggcctcaatatggaacctacattgttgggataacattaggagttattgcaaggatgttcccaatgcacgtcctacttaccagtaacataatcctgctcgaggcctcttttaaacacctccaattgggccgtgagtacctatttggattcaggaacatgttctcatta

SEQ ID NO: 1564131 - DNA, 4001 bp, Homo sapiens
ataattatatataattaaatataaataattatatatttatataattattatagtttatattatatataattattatatttatatattaatttatatatatatttatatttatatatattatatataaatatataatatttatatattatatatataaatatataatatttatatatattatatataaatatataatatttatatatttatatttatatatctatatcattatatataattatttatatataaatatatttatatataaatatataatatatagatatataaatatatatataaatatatatttatatatataaataattatttatatataatttttaaagtctggaaagacatgcaccaaaatgtagcagcggttacctctgtgtggtggggtttcagttggattttatatttttataattttctaaaggatctgattttttaacaataaacttacatttattttttaaccagaaaatgtaaaactatttccatttgggaaaaccattaaagggcaggcacagaaaagaacagcttgtgggccgggcacggtggctcacgcctgtaatcccagtactttgggaggccaaggcgggctgattgcctgagtgcaggagtttgcgaccagcctgggcaacacggtgaaaacctgtctctactaaaatacgaaaaattagacgggcgaggtggcatgtgcctgtagtcccagctacttgggaggccgaggcaggagaattgcttgaacccgggaggcggaggttgcagtgatccgagatcgagccactgcactccagccagggcaacagagcaagactccatcttggggaaaaaaaaaaaaaaaagctcgtgaaggagatcaggaaggagtggtcagagaggtaggaagagagccagaagacaataatgatctgaagacaacgaataaaaatgtttctcaaaggagcaaataggtggttaatagtgtttaatatagtagaaaggtcaaataagataagccctgagaaatgtccactagattaaataattacttaaatgagaacagtttcagtagagtcctgggagtagaatccagatcatagtgaattgagaattgaatcagaggtaaagaagtggaaacatttagtagagaatcttttgagaaacttgcctaagaaagaaatgttgtagctagagagccatgcatagtcaaagaaggatttgttttttaggataggagagatttaaatatgtttagcagctagagggaccaattccatagaaagttaaatatataggtgagtgacaagataaggcttaaaatcaaatggccctaggagaattgtgcaagttaaattcacaatgaggtgtaaataaatgataaatgatctttgagggaaaattttgatagggtgaaaagaagaggacagtagagggtactgggctaattaagtcctttgcattaataaggcaataacagctagctggcttccatacacacacacacacacacacacacacacagagcaccctttttatttttcatggcaggcacagaagttcagagttactaagtgatgttgggtgaaacacagttatcctctgtacctcagttatcacacatacacacacacacacacacacacacacacacacacacacaaagagtagctgagtcaaatctcttgacaaacaggtgacatcagaacttgatgtgcactttcctctctattgcgtttccttgaccacagtgattcttggccaaaaggagtcaagaatgggggcggtgagaaatggagatttaggacctttaaattgtatggaatctcattagttcatcatcctgcccacaggcaatactgtaccttaatcaaacagacacctattcatcttcctgcccgtacatttttctcaaaggacatttcacaatctccgactcgatgttatgcaaccatactgaaaagaacttctttcgattctctcttcaggctgtcccaaggaaatggcaatcaaaagcccctgtaatttggggtgtttgtgttcctgggagcaggaagctggaactgcaaggagggagtaagaggggagggtctggttgtaaaaacaggtagtagactggtgaaaacaagagtagagctcatatccatacaatctgtattccaggggatctggattcagagcttaactgcctttctatggagcaccccattcctttccacacacacccatccagctgcctattaccattagtgatttgttcccttcttgacgttcatttcacctgaggcctccctggggatagtctactttaaactaaatcccttctgaaagttgtcagttgtctccctatgttgatgaagtgcccttttaacactcaacctgcctacttaagttggtgattgtatttatttcacaaaagtatctctaagtcgcctaggggtgagggcaatctgggaaaaagtggcagcagcataagtgtgtgagtgtctatgcatgttaatggggttgctaaagacctaacccatcagctgacaagagtctgacctccagcttccatagaggtgttcattaattacatacttagttatctagaaacaagaagacctggaaagacaataatgttgaattagccagccttcttcccttaataaaagctaacatttattgaacacttactatgtgccaggtactattttaagtgctttatatattttaactcagttaatcctcaaaacaatcctatgacataggtgctatttttatatctgtagtgtactgatgaggcatagatggattaagcaacttgcccaaaatagtgataaaatcaggatttgaacccagtctggtttttgagctcaggcttttaacatgcctctcagaggagaatattttagccctgtatgtcaccataaagaggaggggggggaaatattttaaaaaggaagaaaaagaacaaaaaaaatgtgattatggtgggagggaaatagaatgactctaacaaatgctgatataagctgcaaattcctgcctagatgttgttcttcatctgtttggtctttagtctgacgcttcatgtgttgaattgtatcttaactatgagaacttcaagcctgtttaatttctgcccatccttcaaagcccagtgcaggtcccacctcctccataaagcctccatatccacccagtctacagtaacctgtactttaaaaattgtgtttacacttattgtctgtagtgttcatttggctctggctcacattcttagttagcctcctgtgcatatatgtctcatcttaccaaccacattgtaaactccctaagggagggtctaagacatatttttcttgcatcttgcatccctataatttctagcatggtgttttgtaaataacaggcactcagtaaatattcattggttgagtggttaaaaaagataagagaccgcatcttggttaacctccacatcatttagtgaagaactgtgcactcaatgtgtactcaataaacattaataatattacaatctcattcaaaaagcctttatggagtttctacagtgtgcagagaatggtgctgtgggagtatgaatgaaataaaagacacagcttctacctttgaagagcttggcttggttctcttcttcttaaagtcttctcttactacttcagtgcatgttatcacctttctctgaatttctgctgcattcaaagtcaagaccagttatcactcaattggtttgtctccctcggttcaattgtgagccccttgaaggaaatggacagcactgtgctgggaacataatagaatcacagaattgaaagggactttacagctttccctgtcatcaaacttcctacccaatgcaagaatcccttttacaacacccctaatggagctcttatttaactctatgcttccagtatcaggaattaactgaaataggaaacacagcaggaaaagcgtgttcagaggcaagataatgagttagattttgactacttgcaatttagtgtcat

SEQ ID NO: 1564132 - DNA, 4001 bp, Homo sapiens
gcatggtggcatgtgcctgtaatcccagctactcgggaggatgaggcaggagaattgcttgaacccaggaggcggaggttgcagcgagccgagattgcaccattgcacggcagcctgggcaatagaacgagactccatctcttaaaaaaaaaaaaaaaaaaaaaagaataccctgagtaaagagcgatttcattcagaatccctaagactcttgggtaatgcattgaatgtctccaaaaccccacagcagacagcccttatgctgtactagtcatgcccaagctccctcaggtaactaagttctccagcactgacaatttcctgcttttatcatattctgaaggacctaaattccattctcccccaaagacatgatttcacatagttcttatatagacaagtgtttctcatgttttgctattcacttttctttcttcagtttggactttgccaaacttggaatctggaaatcataatttctcaataagatttcaaagcccaagtaggagaccacaatttctcattcaattcactccttcaacaatgaaagcacatacactcttttagttcttcaatgctgtttgagcaggatgctgtccacagagaatattctggccttttagtctgagaagaaaacataaggaaaactagaaaatgattctcaaactgttttgcctataaccacttcaagtgggcaaaagatcctgcaaaccaagtactctatctgcacattccatccttgcattatgggctaagcactagagagtaaagtcctctatcatgcatgctggaagaagccactcctgggcaattctgaaatgtcatgtattaaagtaactacagaccagggtcagaatccaaaagggtaatctaggacagaaagggcaaaaagccattcatatacaaagtacctaaacgagagtcaataaatactgaaataaacattctggatacttcaaatctaaaggatccacatagaatgaaagcagtgactgacaaggcaccaatcccagggccaggccaggtttcaaggcgagacagcacgtagtatctgcgaaaacttaagcataaaacatttctctccttcagatgctgatccgacacaagttaggaaagcgctcggtctcaaggagactccctttcttatttctgctcccacaagcctactgtctgccttttctggaatctaccttccctttaattcaaggctttgctttactccattatcccagggagacctcattagaaagcagccggccttcctgccctccctcttcagacttctcacaacctagtttagttatggagctcagcgatatatcgccttggctttccatcccccagccctcttccatcctccctcccttccttcagtcgctacagccgtgattcctatctccttgaattcctcactctaatctttttccatccaccccaccctatccagccatgcttcacttcctcatgggtagctttcctgcatccccgtccgatgtctccctcaggagttttctgcatcctccggccacaactgaatcggcagacctcgttccaagcctattatacccctaacccccaaatgacccctaaggcgtcttccccgccgttagttgcccccgcggtagcctccctcccccctcccgctcgcgccgcccggtcctccctcagctgtctccctcaccccgtgactcacccgcatgcgaacctcataggtggtgaagcgcgcgcgtcccacgcccaccgtctgaggattaaagatgtcgatctccaggaagttacttggcggcccgtaagcgtcggtcaggtcctgcggcttcgagttaaggcgccgggtatcagctactgccgtgtccgacatctttccgaaggagagcctgggaccggggaaagggggtgggggacagaggcctgaggcaggagcgcgcacggcccctcccgcttgcaaaataactagccaacccacaggcggcggcggcgcgcacgcgcgcccacgcacgcacgcgcacgccgcacgggcctgggccccgggctctgaatagcggccgtgctgactgctgcgcgccctgtagagtggaggccatattcaggcttccgggtgatgtttgtggccacccgggaacctgcatccccaatacgcagtacccaataccctgcctagcagcacaggctggctccgccaatcgcggctcctcaacccaagaaattgtctcgtaccgtgtatcaatcaacagtgggcactgccccgtgagccaggctcctacagtgataggccgaagcccagtgacctgaataagtcctggttttccgcgaaaatagaagggtggtctatggagggtggggttccaacaatagtactgagaacctataacgtagccgtcccacctgtgccactgatggtttcagttcacgccacacacaatggcgcactcagcactacgtatggcgccaggaaagcagcaagcaactaggatggggtaaagaaagacatttctctcttacttttcaggaaaattgggcatatcttactccttgttgccacactccaggtgtactcaatcttacatttatcagcaaattgagggtacttatttcataccttctatttctactccgcagaactccatacttggcactgctctgaggttgcttgcaacccataatggagatagaataaatgtttacatgagaatatctatagaaatattaatatttatatgactaatttacatatgctccacattaaagggtagactgggtgatgatttcaggtcatcctttctccacctttcccctgccctcctctactcaaaaaatatttcccatatcactgatgcctgaaattctttcaacagagtatgaggccctacaatttcacaattgctgtttaattcaatttaaccaatatccactaagcaaatacgtgccaagcaccatgctaaacactaaaatcctggagttaaataagagtccctgccctcaaggagttaacattctagcaagggagacaagtaaacaaaactaatataatgcgacaaatacaaaataagtaaatgttcaaagcagcacataggaaatgtataactggaaaaattaggggaggttcccctggaggaggaaacatctgagtttaacagacatgaaaagacataaaggacaaataggagtggaaatagggaaaggtaatttctggaataagaaacagcatatgcaggccgggcgcggtggctcacacctgtaatcccagcactttgggaggccgaggcaggcagatcacttgaggtcaagagttcgagatcagcctggccaacatggtgaaaccctgtctctattaaaaatacaaaaattagctgggcatggtggcacacgcctgtaatcccagctactcaggaggctgaggcaggagaatcgcttgaacccgggaggcagaggttgcagtgagctgagatcatgccactgcactccatcctgggcaacagagcaagactccatcaaaaaaagaaagaaagaaaaggaaaagaaaagagagagagagagagagcgaaagaaagaaagaatacacaaagtccttgcgataagaaacagtggagcatttttaggcatttatcgccaattcagactgtgtgatggaagtgtttagaaaggtagactggctagggatgggcagacaaaggatgatccgcttatattaagtaaaggatctctgacttcatgataggtgatacaaagctttctggtaggtgatagggagtccctgaaggatcctaagcaggaaaaatacatgatcagatttatgttttagaagaattgttttgtagacaacatggaaggtatatttaagttgaattatgaaggtattgacaataagactccgaatcaagtggtgatggtgacaatggagaggagggaagagataggaaagagattgaagaaataaaatagatacgacttgtacgtgattagatatggtggtagtatagtgtagggcttaaatgtgtgaccca

SEQ ID NO: 1564133 - DNA, 4001 bp, Homo sapiens
ttggaaaaaaaaaagtgcccgtgggtgtgtctcattagaggccacaaatcaaggtaaattacatgactgaccgtggaaatatcagaaatgtaaatttggaaacttttgccttttacccccaacccaaggcccctatatgacaactcttctaggatgaggctggtgcctgaggccagaccatcaaagagctcaggacagaggtgaactgtatgtttctcctcagatccaagtggaagtagcttcttctgtgcacagctctggccatttgttctgagaaggaggcccagagcctgccccggggggcacaacatcacggccatggttgggtgacctctaccctgcaaacatatgcagtttcttcctttgtggttagtaagggaggtgggggaaaacactgaaaggacagccttgtcatgtgaaaagaacacatattccactttaatatacataagaagtaacctgtgatacatgagaaaaagtaccagtaaggctgggtcgtctcaggaggaggttgtcagaggctgactctacccgcaccccaagacccattaatggccgagcgaggccggcagagttaggcgttttctctgcattggtggtttacaatcttaactcattcttctagcgaatgtttcctaataaacccagcgcgtcggcctgcccagaaatggcccctggaagcttaacttgccctctcccaagcaggaccacgctccctgctcccaactccttagtcctgtagctttggaactcggagccaggccagcttggtccttcactctctcttggtgaggtggtgcccgagtccccgggtcctccaggccggtggttacaggagacctgagacaagtacctgagtcggaccccgacgtgttctgttccttgcaggcccaagcagcgtccaaggcgcctctccttcggtggaacccgggacaacccaggacctagccatcgccacagtgtcacagcccctcctagctctccagtctctgtccctgtcaacggtcctggaatgaggggaacagatggcggaaaaggctatgcatttgcgccacccggctgcccgcggtgtccttcgccttggtccgcgacgctgccactctcctgcttgtctccacagccgtcgcgcccactgcgctcgcggccctccacgcagtggtgccactgctgttgttgttcaggttggtgcacccgctgccgctctccatctcccattcctcggctcccgacagctcccgcaacctccaaggcgcgtcgggccgcaggtagtggcaggcccggtggccgctgtggtcgcggcgcgtagcgtcagcacccagggcgcccaccagcaccttgatgaccatgtcgtggccctgaagggccgccaggtggaggggcgtgaggccgccgctgcctggggcgctcacgtcgagcctcagcccccggcgtagggcgaaatcgtgtaccagaatgagctcctcgtggcgcccgtgcttggccagccagtgcagaaccgagtagccggtgatcgggtcgccccgcagcagcagctccggctcagcctccagcagctcccgcagcacctcatagcggccctcggcggctgccagaatccacgcgtgctcccgcggttccaggcacagcctgctgctgcccggcccactcggcccgcccagctcctcggcgcgctcctccgacagccaccccgcaggagccgcccgctgcagccccagcagttcccgcagcgctccccgccggcgccctgagcccgctgcagagtgcatcagcgtgcctgggaaggggtgctcccgggaggcggcggctgcggctttgccccagtacctgcccaggctaccagtgtccgctctcgaggggcggggctgcggggcgcaccgcaggctctgcgaggtcggcgcgagagaggccgtgggtgcccggttcgcggcccctccgagctgggccatggtcttgaagctgccgccgcggccgtcccagtgtccagcgttagctgcccttcccgggccccaacgggagaggaactggcgctggcgttggggaaggaagctgcttgagcaattgggttcggagggagggagcaaaggagaggaggaggaggaggaggaggaggagggagggagctaggggagggcccccgcgcaggccttggggggcgtggaggggtgtgagctccagccaagtccccagggcaagcccagctccacttccctgggtaccgccgcctctgcagctcccccgggtcgcgggcggtcccaccccaaacggccaggtgagctcggcagccccgcctccagcaccgaagggcgggcgcggggactggctgggagctcgcctgcggccctggaagccgcggttctcagcatcccagccggggctagagtgtagaggcgcgagggcgccccttccgcagcgggccgagctcggcttccagccacggtctcccaaagcgcggtcctggagctccgaggctctggctccccgcccccttccttcgcccttccctcttatctcttcaggagtctccctgcactttgtcccggagttgccattgtcccgcgcctagcattcacgcaggcagctcgactgccccatgtgactggctcgtctgcctgccttgccctttgtgtggccttgaccctcgccgcagcacccggggctgcccaggattccagcagagaagcccaagaccagggtccaggctgacgctcttccagggaactcaggagggatattccccttctgcaccgccctctctgtcctgctctccaccctcttccctcccgtcaattttcccaggttggcttggagaagcagctacaggtgaatctgagccggcgccgcaggagcgccctgttctctttagagatgcatccctgctctctccccagggccccgctttctacaaattcaaagcttaggggctttttaaaaaaggatattttttctttttcactcctaataccagcgtactctttgctcttcccttcccttagtaaatagtggttcttgcctccacacccccagcatcttaaggagctcagtcagtgagcaacggggagccatagaagattgttgagccggggagagacacagccatgatggaggttgtgttaaaaaggtgatttgggaggtgcagaggcaggaagtcggaagactgttccagcagtctaggccaagggggatggaggctcaggccaaatcagcccactccctcggggccacctgtggcagcagtgatagaaggtatcggaagcttttcttccttggccctcacgtatttggaacaagtcctaaatatctagagctttccttcagaacagtttatgcatttgtaatttggttttgaacatttactatgtgccaggcactgtgcttgttgcgttatatatgttaactcttttaatcctcccagtgacctcaagtgctgggaatcattactgtccccagtttgcagagaggttaggctacttgctcaaggtcacccagcaggaagtggcagagcaggtctgtgcgacaccatagcctttgttctggtacacaggaactggcattcaagcctggcttatcaactgcaaatcacatacaagccccaaattccagccaaaaggatagacttgtaacgtgagcgtatctataacttacactcctctgcctggaagagcttctatgtagtgaagttcttttctttcaaggttgcgcttagtttccacctctagcaagcctcctctgattatcccagcccaaagtgatccctctctttccccagccctgtgtttctgctacttctttggccccaagactgccttgtgttacatctctctccccttgctctcatatgccaattaaactataaactcttggacagctatgtcatactatccttgtgcacctagtagttatccaagaaatatttgttaccttgttctggtttggcaggctgggaaaatgtgattgtgtgtgtgtatgttgggggcgggggacatgtatccacaatcagcacc

SEQ ID NO: 1564134 - DNA, 4001 bp, Homo sapiens
cccactacccaaacgaaatctgaacacattagcgcgaagaaatatcaaacagatcacggcagaaatcaccaactcaacatgattggacagaagctgtcccgcggccaggggcggcgaggcgggagacacacgcacacctggctataaattaacattggctttagctgccgcgctgcttggagcggtcagcgccccaaaaaaccacgaggaaaacagacgcgacacgactgggggcgtaggcgttgcagttctccagctggcctcacccgatactatgtttctcccattcactccttggctaactgcaaactaacaagacaacattttcaaatgtaacagaataaccctggaactcaggaggaggagtgggggctgttttttctttgcaaataacacagcgattcccagcctacaaaggtgaaaggagcagcggcgtggggcaagagagctctctagaagtcccattttcgctgctcctgacttatttttgcttttgtacaaaacccgacagctacagcaaaactttcagccctccccatcatcggtacaaggcaacagtcccaggcaagcaaagctaaacaaggcgtcccaacttgggggtgcggggcgggagtgggggtgggggtggggaacaagggtggacgagcgcaggccggtgctcagatgtgggtcagcggcaccgttccgttgactgcagtcccggcgccctggtagtgctggtgcacgccgtgcaggcgaccgccgggcagcggagaggcggcgtcggccgcgtccccgccgggtggcaggtacatgctgatcatgtcgcgcaggtcgccgaggcacgcgcgctgagagtgcgatgcgatggcgggcggcggcgagctgggctcagacttcactaccgagcccatggggcccaggctcatggcggctgcggccgcagctgcggccgcggcggtggcgggctgctgcccgtaggcggcggccgcggctgctgtggctgagggcgccatgcccccgtagcccgaggcggcggcggccgcggcagcgacgttcatgtagctctgagcgccgggcggcatcattgggctgtactgcaggccggccatgtcgtagcggtgcatcggcggcagcgcgggcggcggcggcgggctgctcatgctcgggggctgcgcgtagcccagctgctcctgcaccagcgagtacgcgccgttggcccagccgttcacgtgcgtgtacgtgtccaggcgctggcccacgcccaccggactgctggcggcagcggctgcggccgcggcagcggcggcggcggccgcggcaccgggaggcaggaggccgctgggcagggagtacttatctttcttgagcagcgtcttggtcttgcggcgcggtcggtacttgtagtccggatactccttcatgtgcacggcgcgaagtcgcttggcctcgtcgatgaatggtcgcttctcggcgtcggtcagcagtttccagtcggcgcccaagcgcttgctgatctcagaattgtgcatcttggggttctccagggccattttgcgccgctgcccgcgggaccataccatgaaggcgttcatgggccgtttcacacggtcctggtctgtacccccgccacctccgctcgcaccaccgctgctgccgccgcccgagttcgcgccgccggctgcgttcgcactactcttgcctgcgcctcccggggctgcggggccgccggtgcccgccgcttgtgtgggtgtccctacggggttcttgagttcagtctccagaaggctgtacattgccggggcgggaagaaggtgcgccagcgtggcgggaggagaaggcgctcccggggctggagcggccacggtgaaaaggccctgggactccgtcggagcggagcttgggggcctgtgggccagcgagtccggcgggaagggtaggcttatcaaaatgctccgcgccaaatcagcaggaacccgcgggcttctcgcacctgatgagttctctcgaacaggtcgcattcacagtctgcctgggctctagctgggccccttatatacctgctcggattccccggggttggggcttggtccgcccctcgcaacccggaggacccgtgattgacaggttcgcagtgatgcgccctggccaatcattaccgagcccccgttcggcctggctggaaaaaaaaaagttcggggagccctttcgttcaccccacgcccctctttggcctagtgacgtggtaagagttacttaggaggcgggagtccacgaggcccactcagaggccaccaattagggtttcaaaaagtttgaaagaacgaaacctgaggaggtgacggggggaggggggagggggcacgcaagcagattggggggagggggcagaggggcgccttcggaatttagaaaacaactttgcaaccctgtcaaggcagaccggcgccccatcccccggccagcccgcaaagcttcccgttgtctgcacggaggttttctggccgcttctgctgccagcgctaggaacgcagggcaccaccagctacccaggccggcttagggactccaggctcattggaagtgctcctggctgcgtctccaagaagctctccctggaattggccgctggttgtccagatctttctctaggagggccagtgcgtccaggacgcagcgtgggtcaggggcccgggcatgggagacaggcttcaggactgcggggtgcattcggctgtgaggctcttgggggtttgcaggagggcgggcaagcagtcagtcgcccgtctcctgagcctgtcggaggcgctcgcacaaggtggtgtggaaagtatgtgtgggacgtagggggtgaactggcctccgctctctcgatcctggcccccgcttagcggcccctttttgtctctgctctgtggccatttcggtttttccagtccgatgcccctgagggggagggtcgggccccttggaaaatccgttttcatggcaacacggagcctctcagagtgaaagaaaagtttcttggaggggggaacgttggccggagcggagccgaggccgtcctccgggcgaaccgccgggccccctccactgcccccgcacctgccgggaccgctgagcgctactctgggcgcgcagcctcgccgcctcccccgggagcaggctctgctaacggattccgtccgtctcttttattgttttagagacttcctgagattcggagcgggacattcacttgcttgttgggttatctgccaaagactagcggcgcgggaactctggctgcggggagaggaaaccccgataatcgccactgccagctgaagcgagtggcacagcgtttgaaactctcggagcagcccgaggtagcgagtgggaatgagaagccatcccggcagatttggcagaaactaaaataaggtgtccatacggtgtggggtctcgcccccccatcatccctagccccgtggaaaggtggggaactaaacggaaagcataatcttaagtgggtggggggcgcatgggggaatcccaggtttctagcgtcttagcgttaatgcaagaccaggcgatcccgggacttctgcatgctgggctcttccccctttctctccacgaattaaaaagtacgcctcttcggcttgttagtggggtcagggggggagtggaggctcagggcaggccagccccctctcggccaggcggacctctggcaaaagaatcccggctcccagtcggcatcatctctcggaagtttggggtctggaaacttgccccttaagtttgtgttccacttgatctgagtattctgcagccaagggctgcagtcaactggatgggtatacggatttagggttttaaatgtaagtaaactctctggaaggcttctgtgtgtagatacagtgtgtgtgtgtgtgtgtgtgtgtgtgtgtgtgtgcgcgcgcgcgcgcgcgcgcgtagcgaacgtgagctgataagtacgtctcagaaaacataatgattaggcaatccctacctgc

SEQ ID NO: 1564135 - DNA, 4001 bp, Homo sapiens
tcatcttgtgcctcataaaaccaccattcattcacactctaatcctcagtactcacataaactccactcacattcacccccttcagttgccccattcattcagagtctgctcccactttcaccttttttccgctgagactgtgcctcatttcccatcatttacttaatctcatcataatctcaaattcattcataattgaatgcatgcatagtcattccctcactttggcccacatccactccactctggtgttcattcacctccattccattgccctttgcctctccttgctctcatttactcccaatttgcccttcagtcaccattattcatgcccctcacccaccagtcccatgtatctcctgttcactgacactcacattggccaacacagaagcatctgatggattgctcaggatttgatctggctgcacgcaccaaccccaccacaaacaccagtggcttcaagaggagggaagcagattcctcttttggaggcaggtaatccagggctagtgtggtagctccaaggtcaccagagacctggctccttctgtgctgttgctctgtcagcctcacctgctgcttctggtccaaaatgaccgctcacaattggcaaggcttttgtggtcttgataaaatgtatcataagagcaattgtaatgatgactcgccagccacgtgggggcttctctcattgtctttgggtgggaatgtcatatcatgcagactctgtggtgggaccagccacctgtcagcttctcactctccttcacctagccacctgctgcttaggttactgtatgaggaggtcacacctgtagggaatgacggtagaggatacccaggacagagagtgggagtcctcgctctgcagcagcaaagttagcctcacatagcttgtgcatgcacactgtgggccctcagatagtttctgaggggctgtatcactggctcctctgccccccaactcccaccaaccctaaaagatttcctcctttgtgtaggtgtgtgtgtacaaggtggttggagatgacgtttaggtgctagaaggggcgacacttgatgggccctaaaggaccagccctttctattttctacctcctaatgcattgagagagtggataaattgtatacccaggaggtgctgatgtgtcagggagcaacagatgtgagttccttttttactttctttctttctttgtcttgtctactgggaagctccattccttttgttgttgttgttgtttgtttgttttttgtttttgagatggagtctcactgtgttgcccaggctggagtgcagtggtgtgatcttggctcactgcaacctctgcctcccgggttcaagcgattctcctgcctcagcctccagagtagctgggatcacaggcgtgctaccaagcccggctaatttttggtgtttttagtagagacggggtttcaccatgttggccaggctggtcttgaactcctgacctcaggtgatccgcctaccttggcgtcccaaagtgctgagattacaggcgcacgccaccgtacccagcccaatatatgtgtatttttaacgttactatataatgctagattgcttcagactggtctttacagatcggatccttcttatggtttcccatatgtccagaatgaaatatgagctccctggccaaggaggccctacagcacctggccccagcctacaccccctacactcccaacacactgacactgtctactcatccagaaaaagcaacctgttagccaccacttaatataccccttcacccccggtgtgtgtgtcccacatcgccgtttatttttcagcttgtttgtctgcataccgacccaccgtccttcaaacgctacaacgtaaactcccagtcctggccactggatgaagccagtggcttttccctacctcctactctttgtgcacgcagagcaatttagccacgcatcccgccttcccgttattttacacctgcaaccctgttgctgccctccaagttcaaagtgcgaaattgccgcctgctagaatcttttccttagttgggcacttcccctccccgccctgccgtaagaaaattggtgtctgaagtcttaggagtgcctgcctctgcataactaagtaaacaaccgctttgcgacgcagccccagcagcaaaaggacacggtgggcacggccatctggcctggagcagtgacgtcaccggcaaggctaccttccctctgcgcctgcgctgcggccccatgttgactattggcggacggggtctcaaaggcgccactgagcgtgcgcagaaccgacccctgcagccctttaggctgcggtgccaaagagtcggtcccgaagcggaagtgcttgttggggccaggctttgtaacggtctcctgagcagcgagcagaaaatctgttatcgagagagagtgaggttgagggggcaagtgctaggggtcgtgggctgagtgatggggagttctgtgggatgagtgaagtgggagttgggggttgagtgatgggggaccgagaggtcagtggacgaggttctaggggctcactggtgaacaaagttatgggggctaagcaggattaaatggggcttattaaactttgacttttacacgttttccagcacagtgacctgcccctaaaggttcatgcgcatccctcagacccctctttagacgcgccccgcttctccctctgccctctccccttgcccaagccccgaggtgggggcctggtgtgaatgctccggccgaagtgaacctgcacccccgcacccgaaggcctctttccggcttctgggcaaggcggccccggtgaggtgagcagaaggaaggagaggcacctgcgaggtctcacctgaccccgggcctcgcccaagttgggggcgtgggaggaggggtaggtgcggggtctgagggagatgggggtaaaatgtaattgggataatagttttagagtgtagttttttttggcatttaataaataacatttgaatatatagattaattctgaaatagagaaaaagaaaatcaacaggaactaattcttcccccacacatttaaatgtccgtttttagacatttttggtgtgtataggggtatgccttttaaacatttaacatataactttaaaatggattcccgcagttttaaaacctactttgtaattcaccttaggatttttttgtacaccttttaaaaacgtttagttgagatacatataccacaaagtgcatagatactgtacagttccatataacgcttttaacagctttgtagcattttatcttttatattttgttattattaatcccttatgggtcatagaggatcgtttaagtttggcattattgaaatcaatgctgagacgtgggtacgtgcagagaaattatgatacattatgataaattatttccttaaggaaaatacctacaaatacactttatgggtcagtacacaatttaatatatgtgtatataaaaccttttgtgttcaatgttcacatgaagagtgaataatacacagattgttaaaatcacatggttgcccagactcttccagagagcagtctgatggccagctgatgtgaggggattgctaggcagctaattctgggcactgaaagtctgatggggtctcctcatctgctgtactcttctccacttgttccagctcggccgtcacacatctctgctttttcccaagaagagcaggaaatggccaaaccccaggtaagtatgttgtctgtttcttcattcctctattttactgtggatgtgacgaaatatgtggaaatccctgccataaaataggaaagtatttgtaaataaggattggatcaggcaaaataagagacaacagatcaaggccaaattagaatgtagaggtgtgcaggactcagggtgtaacagatattgatgttgggctgtcagtttctctttgagccttctggtagccaaagggaaacataaccagtaccttggctcacct

SEQ ID NO: 1564136 - DNA, 4001 bp, Homo sapiens
tcatcttgtgcctcataaaaccaccattcattcacactctaatcctcagtactcacataaactccactcacattcacccccttcagttgccccattcattcagagtctgctcccactttcaccttttttccactgagactgtgcctcatttcccatcatttacttaatctcatcataatctcaaattcattcataattgaatgcatgcatagtcattccctcactttggcccacatccactccactctggtgttcattcacctccattccattgccctttgcctctccttgctctcatttactcccaatttgcccttcagtcaccattattcatgcccctcacccaccagtcccatgtatctcctgttcactgacactcacattggccaacacagaagcatctgatggattgctcaggatttgatttggctgcacgcaccaaccccaccacaaacaccagtggcttcaagaggagggaagcagattcctcttttggaggcaggtaatccagggctagtgtggtagctccaaggtcaccagagacctggctccttctgtgctgttgctctgtcagcctcacctgctgcttctggtccaaaatgaccgctcacaattggcaaggcttttgtggtcttgataaaatgtatcataagagcaattgtaatgatgactcgccagccacgtgggggcttctctcattgtctttgggtgggaatgtcatatcatgcagactctgtggtgggaccagccacctgtcagcttctcactctccttcacctagccacctgctgcttaggttactgtatgaggaggtcacacctgtagggaatgacggtagaggatacccaggacagagagtgggagtcctcgctctgcagcagcaaagttagcctcacatagcttgtgcatgcacactgtgggccctcagatagtttctgaggggctgtatcactggctcctctgccccccaactcccaccaaccctaaaagatttcctcctttgtgtaggtgtgtgtgtacaaggtggttggagatgacgtttaggtgctagaaggggcgacacttgatgggccctaaaggaccagccctttctattttctacctcctaatgcattgagagagtggataaattgtatacccaggaggtgctgatgtgtcagggagcaacagatgtgagttccttttttactttctttctttctttgtcttgtctactgggaagctccattccttttgttgttgttgttgtttgtttgttttttgtttttgagatggagtctcactgtgttgcccaggctggagtgcagtggtgtgatcttggctcactgcaacctctgcctcccgggttcaagcgattctcctgcctcagcctccagagtagctgggatcacaggcgtgctaccaagcccggctaatttttggtgtttttagtagagacggggtttcaccatgttggccaggctggtcttgaactcctgacctcaggtgatccgcctaccttggcgtcccaaagtgctgagattacaggcgcacgccaccgtacccagcccaatatatgtgtatttttaacgttactatataatgctagattgcttcagactggtctttacagatcggatccttcttatggtttcccatatgtccagaatgaaatatgagctccctggccaaggaggccctacagcacctggccccagcctacaccccctacactcccaacacactgacactgtctactcatccagaaaaagcaacctgttagccaccacttaatataccccttcacccccggtgtgtgtgtcccacatcgccgtttatttttcagcttgtttgtctgcataccgacccaccgtccttcaaacgctacaacgtaaactcccagtcctggccactggatgaagccagtggcttttccctacctcctactctttgtgcacgcagagcaatttagccacgcatcccgccttcccgttattttacacctgcaaccctgttgctgccctccaagttcaaagtgcgaaacactttgatgaaagatcttcatcaaaagagggaatgtgaaagctgattgtgcaaatgaaccagcttctccagtgccaatgagcctcatttctaaacaatatgtaacatttttctttctaataaaacttccaacttctgtttgttcattgcacatactgaagaccaccctagtctgtgtgtatgccctgaattgtaattttgtgattcccaaatagagcatttgatttagggatttgtctctataatttattttgactttgacacaattaaccaatatgatgtgtttaaagatcgccccaccccctgacaaggtgattattatactgaatttaaaaattcattctagaccgggcatggtggctcacatctgtaatcctaacactttgggaagcctaggtgggcagatcacctggggtgaggagttgaagtccagcctggctaacatggtgaaaccccatctccacaaaaaaatacaaaattagctgggcctggtggctcatgcctgtaatcccagctacttgggaggctgaggcaggagaatcacttgaactcaggagacagaggttgcagtgagctgacatcgtgccattgcactctagcctgggcaatgagatgaaaactccgtcatgaaaaaaaaatcattctattattatcttgacaattgctttgctttgcatcttactatggacttgttggatatctaggtggctgtaaactaggcagagaaagaaacagcagtggagataattagaatattgcagtgttgctataaaagaataacaaaagggggaaattgtaagggtaactaaacataaaattgagattttcctgttgccaaaagggcaagaagagacttcactttccttagagcatttcctcgaaaaaatttgtacttgtaaattcctcctttgatatgtaagcctctggccaccctataacccaggaatgtcttgaacttgaactccaggcctcaagtgatcctccagcctcagcctccaaaagtgttgggattacaaacgtgagccaccatgcccggtccctataaatgtctttctttagggccttggagccgtctttttgaaatgtgaacatcgaggaagatgatgtcactgtctccctgtcaccaggggagtttagcctagatgccttgctccaagctgtaagcacctgcttgtcacagaaatatgagttttatttttccttcagataaaggcaattaactaacacagatgggtactccaattacttggtgaacttagggcttgcctgggagtatttagttttcacccttggctgctgctgtacaactaggccaattagctacatacctggactttctggtttctgctaccacctttttgattttttgtttgttttgctttattttgtttttgagatggagtcttgctctgtcacccaggctgaagtgtcatggtgcgatctcagctcgctgcaagctctgcctcccagggtcaagtgattctcctgcctcagcctcccaagtagctgagattataggcacgtgcgaccatgcccggctaatttttgtatttttagtggagacggggtttcaccatgctcgccaggctagtcttgaacttctgacctcatgatccgcccgccttggcctctcaaagtgctggggttacaggcatgtgacaccacgcctggcctctgctaccacttttggattgtatgaaacactacacttcaaagtgtgggatctggcttcccagacagctgccaaaggggcagatgatgcaatctagaagtgtgggggagttcgtgcctgtggggtaaattttgaccaataagtaaaagaaccaggagtgagagccaggtatgtaaattccctctcctgtcctctccccatgcaccgttccaagcatggcttctcagtatagtctgtctagaggtgtcctgtatggcccaaagccaatgggaattcacacacttgcagacagtgttaagtgtggtgg

SEQ ID NO: 1564137 - DNA, 4001 bp, Homo sapiens
ggcattgaataaatgaagagagtcagacatcagagcatcttttgcattgtttatagataccatcctttattaaatgcacaagagaaagaaatgaaaggaagataaaatctgtctcttcgaatctgagtcatggatgaatttttggatcaattttcacatgcatatcacaccccttgagccattcagataaatcatggccagaacagtgtagcctccaagaagtcctgggaaatgaaggaaaggagagaggatgaagtggacaggttgatggggtggcagtgacactatccctggctgcccatggcctgggccatccccatgaacttaccaggcagaaagcccattctgtgaggacacaatctgcttggcacacctgatgtcatccagaatatggcgattgagcaggtctgagggggaagagagggacatggtggtctggtgcactggggataggataacagtgaatggagggcccaagggttttgggttccttggggcctgaagaacctcaaccactatgttgactgattcttgatgaccttgattctcttgtcagttggttatgaatgatcttaatcaccatgttagctggttctgtacaaccttaactcatgttgactgatcctggatgatctagattgtcatgttggctagttatgaataaccccaacctccatactgtctggtcctggacaacctcaacctccatttgggctggccccaaataacctcagtctccattttttcctgtcttggacaacctcaaccaccattttggccaacactgaacaactttaacggctattctattttgtcctcaacaccaccagtcttatctggaaagttctgtcatttctgcatggaggttatctgtttctgtttctagaaccagacactctgcttctttcctcggggcctgggtaacctcaaccccaaatcaggacagtttctaactctgttccacatggaggtaagtttcctgtttcctgagtctaagaaaactgcagtgtccattctgggtgaggattgggagctctgagctcttctgtcctaaacaacctctcaggatagtctgggtaggggtagaggatggtgtctttaatagctcaggcaacttttctccttttcccatcatttttctcttgttgcaggagattatggcttaaacaaccttgccctccatgtgtgggagagtagggcccagcagggcttcagtgggtcccccagtgctgacttaccatgacaatccatgtggcagaggttcttggtgggtgtaatgccattgtcacaccaccaggcagaattcagttggaaaatgccatattcactgctgccatcaggattgtggtccacgaaggcggtgtcaaagccactctcataatgagccatgcacagccctggggcagggagaagggaggcagggagtaggtatagagcttgggaatagggaaggataggatggggggaggacagggatggttgtcatctcagttgtgagggtggtgatcttggtttagtggtggtgatgttggtgattctggtgagacatcagtgatggtggtagcgatggtattcatgatggtaacagtggtgatgatattgattgtagtgatggtgttgatggcagagatggaggtgatggttgtgaaggcaataatggtggtggtgttagagttagttaaactactcagcatagtcagtcagggagtgactcaagggatcatgcccaggcctggagaggtgataaaggacaagaaggggcctgggtctgaatgtggcgggtggctcagggtttggatgggatttggggcaactggattctcacagtctccaacgccgtagcccttgtagccgttcagccctgctctctccagtcttgccgccagctcgcagcgttcatagatcttggcatccacagtgacaaccatcagcgtggccaaggtcactaccacagtgccccaggccttcattatggcacctgtaagccctcccaggtgacttgctccagactcaccctgtggtgttcggaattaggggcattctggaactctgggctctatgagcaaaggtctaagtggtagattctggaacgcgcaacacagaagcctcaacatcgcccaacactgttgcattggggattaaaggccccacctcccaacactgttgcattggggattaagtttctgacatctgaattttggaaggcacacattcaaaccatagcactcatccttggtaccttgttcacctctctgcacttaaagtgctgttccatcctaatttactggaatgtgccccacatttcatattacaaatggcatattacatatacattcttatgcttgactgctttttcaacttcattctcattctgccttttgttcctccattcacttacactgcctttcagccacttatattcacccatactgggcctcatattatcgcaattcctcacagtctacttagcattacccaaattctttcatgtcatattccttcttcaccccactcactctcactcagactcatttcctatctttgcctctatttcccgcccctgcatcaaatgactctggcttactcgcacgtggcccagccttcagcttctttcattgacccggggcctcattatttccccccttcactccccctctgcccctccttcacctctattctctcagatgctgtcccaggaacacccccatttcctggagctctgtccctattactcccaaacactagctgaagttacccacatacacttagcctacgctaagtgagccaagatcgcaccactgcactccagtcactgttctttctcagttttctcttcattgtttccatttactcttactctgcctctcactgcctcattcctttaaatctattcccactgtaacccctatcaccctcttcttgctcatattctgctcctgattcatggctgccattctgcctcccagtacccgcattctgtcacgctgtgcctcaaattcgttacttttgctcacatcgggctccccatgtttcctcgctttactcacccgaggccatgaagccttcatccactctctgcctcacaatacccacgttcacccatcctctgctcttcactttcattccctctcactctgcccaacatcacctccattcatgtgcactcttcagctcattcacatttgccgattcccactgggatccctgtgcacccacgttcctgggctactaccctgtataacgcccatgtaatcccagtcatctctagtcatccttctccctcgtagcacccacactcaaactcggcctgcttcacattctaccatgtatccatctccactcttttattctgtccctcccgcaccccattcttccctttccatcccacattacccccattcactcctactgtctccctaaattcccctctcttcattcatcttgtgcctcataaaaccaccattcattcacactctaatcctcagtactcacataaactccactcacattcacccccttcagttgccccattcattcagagtctgctcccactttcaccttttttccgctgagactgtgcctcatttcccatcatttacttaatctcatcataatctcaaattcattcataattgaatgcatgcatagtcattccctcactttggcccacatccactccactctggtgttcattcacctccattccattgccctttgcctctccttgctctcatttactcccaatttgcccttcagtcaccattattcatgcccctcacccaccagtcccatgtatctcctgttcactgacactcacattggccaacacagaagcatctgatggattgctcaggatttgatctggctgcacgcaccaaccccaccacaaacaccagtggcttcaagaggagggaagcagattcctcttttggaggcaggtaatccagggctagtgtggtagctccaaggtcaccagagacctggctccttctgtgctgttg

SEQ ID NO: 1564138 - DNA, 4001 bp, Homo sapiens
aggcattgaataaatgaagagagtcagacatcagagcatcttttgcattgtttatagataccatcctttattaaatgcacaagagaaagaaatgaaaggaagataaaatctgtctcttcgaatctgagtcatggatgaatttttggatcaattttcacatgcatatcacaccccttgagccattcagataaatcatggccagaacagtgtagcctccaagaagtcctgggaaatgaaggaaaggagagaggatgaagtggacaggttgatggggtggcagtgacactatccctggctgcccatggcctgggccatccccatgaacttaccaggcagaaagcccattctgtgaggacacaatctgcttggcacacctgatgtcatccagaatatggcgattgagcaggtctgagggggaagagagggacatggtggtctggtgcactggggataggataacagtgaatggagggcccaagggttttgggttccttggggcctgaagaacctcaaccactatgttgactgattcttgatgaccttgattctcttgtcagttggttatgaatgatcttaatcaccatgttagctggttctgtacaaccttaactcatgttgactgatcctggatgatctagattgtcatgttggctagttatgaataaccccaacctccatactgtctggtcctggacaacctcaacctccatttgggctggccccaaataacctcagtctccattttttcctgtcttggacaacctcaaccaccattttggccaacactgaacaactttaacggctattctattttgtcctcaacaccaccagtcttatctggaaagttctgtcatttctgcatggaggttatctgtttctgtttctagaaccagacactctgcttctttcctcggggcctgggtaacctcaaccccaaatcaggacagtttctaactctgttccacatggaggtaagtttcctgtttcctgagtctaagaaaactgcagtgtccattctgggtgaggattgggagctctgagctcttctgtcctaaacaacctctcaggatagtctgggtaggggtagaggatggtgtctttaatagctcaggcaacttttctccttttcccatcatttttctcttgttgcaggagattatggcttaaacaaccttgccctccatgtgtgggagagtagggcccagcagggcttcagtgggtccccagtgctgacttaccatgacaatccatgtggcagaggttcttggtgggtgtaatgccattgtcacaccaccaggcagaattcagttggaaaatgccatattcactgctgccatcaggattgtggtccacgaaggcggtgtcaaagccactctcataatgagccatgcacagccctggggcagggagaagggaggcagggagtaggtatagagcttgggaatagggaaggataggatggggggaggacagggatggttgtcatctcagttgtgagggtggtgatcttggtttagtggtggtgatgttggtgattctggtgagacatcagtgatggtggtagcgatggtattcatgatggtaacagtggtgatgatattgattgtagtgatggtgttgatggcagagatggaggtgatggttgtgaaggcaataatggtggtggtgttagagttagttaaactactcagcatagtcagtcagggagtgactcaagggatcatgcccaggcctggagaggtgataaaggacaagaaggggcctgggtctgaatgtggcgggtggctcagggtttggatgggatttggggcaactggattctcacagtctccaacgccgtagcccttgtagccgttcagccctgctctctccagtcttgccgccagctcgcagcgttcatagatcttggcatccacagtgacaaccatcagcgtggccaaggtcactaccacagtgccccaggccttcattatggcacctgtaagccctcccaggtgacttgctccagactcaccctgtggtgttcggaattaggggcattctggaactctgggctctatgagcaaaggtctaagtggtagattctggaacgcgcaacacagaagcctcaacatcgcccaacactgttgcattggggattaaaggccccacctcccaacactgttgcattggggattaagtttctgacatctgaattttggaaggcacacattcaaaccatagcactcatccttggtaccttgttcacctctctgcacttaaagtgctgttccatcctaatttactggaatgtgccccacatttcatattacaaatggcatattacatatacattcttatgcttgactgctttttcaacttcattctcattctgccttttgttcctccattcacttacactgcctttcagccacttatattcacccatactgggcctcatattatcgcaattcctcacagtctacttagcattacccaaattctttcatgtcatattccttcttcaccccactcactctcactcagactcatttcctatctttgcctctatttcccgcccctgcatcaaatgactctggcttactcgcacgtggcccagccttcagcttctttcattgacccggggcctcattatttccccccttcactccccctctgcccctccttcacctctattctctcagatgctgtcccaggaacacccccatttcctggagctctgtccctattactcccaaacactagctgaagttacccacatatacttagcctacgctaagtgagccaagatcgcaccactgcactccagtcactgttctttctcagttttctcttcattgtttccatttactcttactctgcctctcactgcctcattcctttaaatctattcccactgtaacccctatcaccctcttcttgctcatattctgctcctgattcatggctgccattctgcctcccagtacccgcattctgtcacgctgtgcctcaaattcgttacttttgctcacatcgggctccccatgtttcctcgctttactcacccgaggccatgaagccttcatccactctctgcctcacaatacccacgttcacccatcctctgctcttcactttcattccctctcactctgcccaacatcacctccattcatgtgcactcttcagctcattcacatttgccgattcccactgggatccctgtgcacccacgttcctgggctactaccctgtataacgcccatgtaatcccagtcatctctagtcatccttctccctcgtagcacccacactcaaactcggcctgcttcacattcaaggggggcttccatctccactcttttattgtgtccctcccgcaccccattcttcctttctttcccacattacccccattcactcctactgtctccctaaattcccctctcttcattcatcttgtgcctcataaaaccaccattcattcacactctaatcctcagtactcacataaactccactcacattcacccccttcagttgccccattcattcagagtctgctcccactttcaccttttttccactgagactgtgcctcatttcccatcatttacttaatctcatcataatctcaaattcattcataattgaatgcatgcatagtcattccctcactttggcccacatccactccactctggtgttcattcacctccattccattgccctttgcctctccttgctctcatttactcccaatttgcccttcagtcaccattattcatgcccctcacccaccagtcccatgtatctcctgttcactgacactcacattggccaacacagaagcatctgatggattgctcaggatttgatttggctgcacgcaccaaccccaccacaaacaccagtggcttcaagaggagggaagcagattcctcttttggaggcaggtaatccagggctagtgtggtagctccaaggtcaccagagacctggctccttctgtgctgttg

SEQ ID NO: 1564139 - DNA, 4001 bp, Homo sapiens
tgtgaaggtcaattcaaagacagaaactaaaaccccatccacgggtgactccatggtgaatccctgtggtgtcttttcccgctaaccgatgtgtatccaccaagcagttttctttttcagtataaatattatactgtttgacattttaagacacatggtaatcaaaatctatagccttaattaaatgatgactttcaggaaattatcatgcaaaatggaagtgttaggaagccgataatagacacactctcctaaaaatgatctcaccacatcacacctaacccttctcaccaccttgcagttcacattccatgggaaaaagctcctcatacttaagagtgttttactttccttttcccaagtcatggcgattttgaatattcaccctttgcggatatcaacacatttctaaagtatacttatcttgattaaagactgctgaggtcattaaaacactaacaaatatttaagatgcattgaacattttgttttagaattggcttttcaatcatttcatcacaagcaatgctttcctgccgtttacttactcctacatctactatcttcttttgtattgtgctttgtgttttacagaacatttgctctttataaagcatctatttctagcctaggaaaatatcaaatggaaaggggatgggaatacctttgatatgtccattcagcagaactatgtgctgccgggtacagttgcgtgaacatatacacatctccacttcctgtgagataaaattttaagaagaaaattttctttaggaatcagtcctcccccaggccttatttacaatgtctggcttactgtcaacctgtgggtctgtccaccaaccctacaggacctcatatccctcccttctcaaatgcctacctcttcccttcccttcccttcccccgccaccatcagaaaacaggcagagatatacacagccatcagcttctcaaactttattttcattgcccaaggttgagagatgtagcttcttgctactttgcaggtatttcaaccattatttccatgaattcctcctcctccatttggagggggttgattctgttctctcgggcgtggtcattcagcagttcctctggagatgttcttttaaagttcctcctgtagcgaaccactagtatggtcgaggactcagatgttttcatttttttaggagcaggttgcgggtctgagtccccagttggggtctccggcatctgttaagaaagcagggagaggccaggaggacattattttgggtgaacaggatagagactggatagcaaggggacttcatgagaagaaggaatgcgggttgaggaaggggtttgatccagagaagaagaaggttgaagcacagagtagggatctatggggaagaagaagaggagcgtgggtagggtcacctgtgagtccaaactgcaccattttgtcagttctttgctattttgcagaccttggtcaaagtgaaacatcccatgggggttcaggccgtgagaaacatcctgcctaaccacctgtccgcaaggcggacaaaggcccaactgaagaaacatccctatcatatcttgcttggcagcgttctaaggaacaccacaatgatattccaccagaaaaagggccaaaccacctgatcataagaacatcttatcaatatcctgccgggcagcaagccatactgcccaggcccctcccacccctacctacaagcaccccagcctgtaagcggcggtgggctctggcattaagcgggccccccacttccacaatggtctgcaatattcctgtgttgttgtttgagccgcccccgctctgtgtgtctttctttcaccctcgccttcacttcagaacctaacagtcttaccatctcgttggcctcgttggaatcacaggggacgctcctcttcaccccgccggcactggattgtttgtccattgtatatattggttcttcaatgtcagtggcaggcttttgtaggttttgaatcttctcagtggcccggagctcttgccctccctatgtataccctcctggtgacaaggcaaagccacacccttgagctttgtttgatcatacaggcagtgtcccagccaatggcagccctagggtggcttcacatcacaaagccccactgctgaccactccctgggcttgcgggcgaggggtgacaggggtgtagagcaaaccaaatgctgctgttgtttcagcatcccctgaagatgcatcccaaaccgatctgccgccgctcctcatttctccatgtttaatgttcacggttcacatggaagtcagaggatgattccttcaagcccttccccacagccattcctattaagtgattcattcttttgtcttccagccctcaccatgacttagtattttcgatgtctcacctcaaatcccccacgctagtgtggctacatttatttattggcggagatgtgaattatcccatttccctcctacagttccttcacatgcacctcgaagaccatttacttttgggctactgctgagatgaatggtaattctaagtttttgactaaaacagttattagaacagagagtattcttggatttttaaggaagaaagtagcttggacacttagaaatgtctttgttaaaaaaaaaaaaaaaagtacactgtaaaaccgtcacttggtgtagcctcatagtaattctccctttttggagacctaggattcagtgtgggctctgcccagagctcagagatccagttaaaagacaggtagtccctatctaaatacaactggtctccttatacaatcctatatttctacaattttgtgtttgatttggcatccatcttcaatctccctctaacatcaccagactctttctctcggtgctttgagatgcaaatttcactatctgattttttttacctaagggttcctttaatatgcacatttagggctatctagctgacaattgcctagggcaataaaataggttatgaagaaattgtaaatctaaaatacgaggaaaaaataaaggccttaggaatttataagatctacttctatctacatgtctaatacatctatgtatttatgtgtcatggatatgacatttcactacttaaaatgtagaaaaaagctctaattaattggcttaacaaaggcacttaaatctaatgcttttcggaaaaatagactttaagccaaatgctttttcaagttcatgtgacttaagcaaatcttcaataaacaagctggttttaaaaattttagtgaaattgaattagaaatggctttggaattctcaacatacattatttatctctgctagatgtcaacatttggcatgagggttctaaagctatgaatgcagctcaaataagaattatctttgtttatgtaagatttagtaagtaaggaatttaatattgtttggttaatgaaaatagctaaatcctgagttattgccaaaaaaacaaaaacaaacaaacgaacaaaaaaacgaccctttatctaaccttaatgttcttactcaggacaacctgaaattcacaggttataaaaatggttaacaaggacataactttaaatggtaactattacagttttcataagtaatctgggtaaactattagaaaattaattaattacacaaatgtaacagaataagttcttgtagattatcttgtcatataatttaaaatccaaagttatattaagctaaataatagatatttattacacgtctgggtcatttccaatttttttaattataggataacatttttctgtaaaaaagaaatgtgatcttaaaggaaaatactttttgtctaattcgaagcttatttaaaagttatttatgaaattaggtaatcagtgaataaaagcaatgtgaaggaagttatgaacaggcatttttggcacaaaaggttaaaaggaaaataattttatctgagcaagaatcttgtatagtaaatttttgttctaaaataaaataactggttatttaagaaaa

SEQ ID NO: 1564140 - DNA, 4001 bp, Homo sapiens
atgtgaaggtcaattcaaagacagaaactaaaaccccatccacgggtgactccatggtgaatccctgtggtgtcttttcccgctaaccgatgtgtatccaccaagcagttttctttttcagtataaatattatactgtttgacattttaagacacatggtaatcaaaatctatagccttaattaaatgatgactttcaggaaattatcatgcaaaatggaagtgttaggaagccgataatagacacactctcctaaaaatgatctcaccacatcacacctaacccttctcaccaccttgcagttcacattccatgggaaaaagctcctcatacttaagagtgttttactttccttttcccaagtcatggcgattttgaatattcaccctttgcggatatcaacacatttctaaagtatacttatcttgattaaagactgctgaggtcattaaaacactaacaaatatttaagatgcattgaacattttgttttagaattggcttttcaatcatttcatcacaagcaatgctttcctgccgtttacttactcctacatctactatcttcttttgtattgtgctttgtgttttacagaacatttgctctttataaagcatctatttctagcctaggaaaatatcaaatggaaaggggatgggaatacctttgatatgtccattcagcagaactatgtgctgccgggtacagttgcgtgaacatatacacatctccacttcctgtgagataaaattttaagaagaaaattttctttaggaatcagtcctcccccaggccttatttacaatgtctggcttactgtcaacctgtgggtctgtccaccaaccctacaggacctcatatccctcccttctcaaatgcctacctcttcccttcccttcccttcccccgccaccatcagaaaacaggcagagatatacacagccatcagcttctcaaactttattttcattgcccaaggttgagagatgtagcttcttgctactttgcaggtatttcaaccattatttccatgaattcctcctcctccatttggagggggttgattctgttctctcgggcgtggtcattcagcagttcctctggagatgttcttttaaagttcctcctgtagcgaaccactagtatggtcgaggactcagatgttttcatttttttaggagcaggttgcgggtctgagtccccagttggggtctccggcatctgttaagaaagcagggagaggccaggaggacattattttgggtgaacaggatagagactggatagcaaggggacttcatgagaagaaggaatgcgggttgaggaaggggtttgatccagagaagaagaaggttgaagcacagagtagggatctatggggaagaagaagaggagcgtgggtagggtcacctgtgagtccaaactgcaccattttgtcagttctttgctattttgcagaccttggtcaaagtgaaacatcccatgggggttcaggccgtgagaaacatcctgcctaaccacctgtccgcaaggcggacaaaggcccaactgaagaaacatccctatcatatcttgcttggcagcgttctaaggaacaccacaatgatattccaccagaaaaagggccaaaccacctgatcataagaacatcttatcaatatcctgccgggcagcaagccatactgcccaggcccctcccacccctacctacaagcaccccagcctgtaagcggcggtgggctctggcattaagcgggccccccacttccacaatggtctgcaatattcctgtgttgttgtttgagccgcccccgctctgtgtgtctttctttcaccctcgccttcacttcagaacctaacagtcttaccatctcgttggcctcgttggaatcacaggggacgctcctcttcaccccgccggcactggattgtttgtccattgtatatattggttcttcaatgtcagtggcaggcttttgtaggttttgaatcttctcagtggcccggagctcttgccctccctatgtataccctcctggtgacaaggcaaagccacacccttgagctttgtttgatcatacaggcagtgtcccagccaatggcagccctagggtggcttcacatcacaaagccccactgctgaccactccctgggcttgcgggcgaggggtgacaggggtgtagagcaaaccaaatgctgctgttgtttcagcatcccctgaagatgcatcccaaaccgatctgccgccgctcctcatttctccatgtttaatgttcacggttcacatggaagtcagaggatgattccttcaagcccttccccacagccattcctattaagtgattcattcttttgtcttccagccctcaccatgacttagtattttcgatgtctcacctcaaatcccccacgctagtgtggctacatttatttattggcggagatgtgaattatcccatttccctcctacagttccttcacatgcacctcgaagaccatttacttttgggctactgccaggcaaatttcaacccatgttcttttacccagtgtccgtgtagttcaagtttcctatttccaatctgaaataatggccttcagtctgtcaaaactttagtgaataaacattctttaccgtgtatcctagtcttgtttcaaatcaggggtgtatatttttttctctttttgaaatggagtttcactcttgttgcccaggctggagtgcaatggcatgatctcagctcactgcaacctctgcctcctgggtttaagtgattctctggctcagcctcctgagtagctgggattacaggcctgtgccaccacgcccggctaatttttgtatttttaggagagacggggtctcaccatcttggccaagctggtcttgaactcctgacctcgtgatccacccgccttggcctccaaagtgctgggattacaggcgtgagccaccacacccagccaggacggccattattaaaaccaccattgacaagtaaattttggttacttctgtagcatacaacaatttaacataaagtttataattaataacatacagaagttatttcagaattataagagtttcccataattttggagcacatatcaatgacatttctataaatacagcccaaagaaagtcaaacagcattttatatttgacgatgcttcttgtatgatttttataccaaataagaccaatatgtctcttttggacttcagaggactcatatcaaaaaattaatgaggaatcaagttagaatttgactttggaaagttcgtcaaagataaaaaatttaaaatgcttgatatcacgaaatagggtcatgggtcattgtaaaataagtcattcatttaaccaaagcagtaactcaaagatttcaaaaaagaaaaaaaaaaaaaggtgaaaatctttattctttgagagaggaggcttaatatcccaaacaataagccctaattaaaaacaggatgggcaaatgaaatttgtttttttgaaattttataataaaagtttaatcatcttgagtataaaatataatttctataaaccttgtaacctttatcattttgcatgaaggagtgagttaatgctccaagaaagccttgttaaactgacacagcaacctagatactggttttgctttagtgtgcctttgatattaatggttaattcctagagaaactgagctacttttctcttaatatcagcccttacaatctcacatgcccacctcttccacgatagtccttgggccttgaggagttgaatagttttaatttctggccctgcatctcatgaacgcagtttactttgattagcatcttctactgggcctgaagatgaggctgtaattgctgtcagtgtttaagatatagcagaacttggtgtcctttttagacccagaagtcaaagccctataactcaatggcacaaggactttaaaagcacatacagaaagttacacagatggaagaaaacacttttttaga

SEQ ID NO: 1564141 - DNA, 4001 bp, Homo sapiens; identical to SEQ ID NO: 1564139

SEQ ID NO: 1564142 - DNA, 4001 bp, Homo sapiens; identical to SEQ ID NO: 1564140

SEQ ID NO: 1564143 - DNA, 4001 bp, Homo sapiens
gaatccctgtggtgtcttttcccgctaaccgatgtgtatccaccaagcagttttctttttcagtataaatattatactgtttgacattttaagacacatggtaatcaaaatctatagccttaattaaatgatgaatttcaggaaattatcatgcaaaatggaagtgttaggaagccgataatagacacactctcctaaaaatgatctcaccacatcacacctaacccttctcaccaccttgcagttcacattccatggaaaaaagctcctcatacttaagagtgttttactttccttttcccaagtcgtggcgattttgactattcacacttgcggatatcaacacatttctaaagcatgcttatcttgattaaacactgctgaggttattaaaacagtaacataaatatttaagatgcagtgtacattttgttttaaaatttggcttttcaatcatttcattacatgcaatgctttcctgccgtttacttactcctacatctactatcttcttttgtattgtgctttgtgttttacagaacatttacgctttataaagcatatatttctaacctaggaaaatatcaaatggaaaggggatgggaatacctttgatatgtccattcagcagaactatgtgctgccgggtacagttgcgtgaacatatacacatctccacttcctgtgagataaaattttaagaagaaaattttctttaggaatcagtcctcccccaggccttatttacaatgtctggcttactgtcaacctgtgggtctgtccaccaaccctacaggacctcatatccctcccttctcaaatgcctacctcttcccttcccttcaccccccaccatcagaaaacaggcagagatatacacagccatcagcttctcaaactttattttcattgccgaagtttgagggatgtagcttcttgctactttttaggtctttcagtcgttatttctatgaattcctcctcctccatttggtcggggttgattctgttctctcgggcgtggtcattcagcagttcctctggagatgttcttttcacgttcctcctgtagcgaaccactagtatggtcgaggactcagatgttttcatttttttaggagcaggttgcgggtctgagtccccagttggggtctccggcatctgttaagaaaacagggagaggccaggaggacattattttgggtgaacaggatagagactggatagcaagggggcttcatgagaagaaggaatgcaggttgaggaaggggtttgatccagagaagaagaaggttgaagcacagagtagggatctatggggaagaagaagaggagcgtgggtagggtcacctgtgagtccaaactgcaccattttgtcagttctttgctattttgcagaccttggtcaaagtgaaacatcccatgggggttcaggccgtgagaaacatcctgcctaaccacctgtccgcaaggcggacaaaggcccaactgaagaaacatccctatcatatcttgcttggcagcgttctaaggaacaccacaatgatattccaccagaaaaagggccaaaccacctgatcataagaacatcttatcaatatcctgccgggcagcaagccatactgcccaggcccctcccacccctacctacaagcaccccaggttgtaagcggcggtgggctctggcattaagcgggccccccacttccacaatggtctgcaatattcctgtgttgttgtttgagccgcccccgctctgtgtgtctttctttcaccctcgccttcacttcagaacctaacaatcttaccgtcttgttggcctcattggcctcgttggcctcgttggattcacaggggacgctcctcttcagcctgcggacactggattgttggcccattgtatatattggttcttcgatgtctacagtaggtttttggagcttttgaatcttcgcagtggcccagagctcttgccctccctatgcataccctcctggtgacaaggcaaagccacacccttgagctttgtttgatcatacaggcagtgtcccagccaatggcagccctagggtggcttcgacgtcacaaagccccactgctgaccactccctgggcttgcgggcgaggggtgacaggggtgtagagcaaaccaaatgctgttgttgtttcagcatcccctgaagatgcatcccaaaccgatctgccgccgctcctcatttctccatgtttaatgttcacggttcacatggaagtcagaggatgattccttcaagcccttccccacagccattcctattaagtgattcattcttttgtcttccagccctcaccatgacttagtattttcgatgtctcacctcaaatcccccacgctagtgtggctacatttatttattggcggagatgtgaattatcccatttccctcctacagttccttcacatgcacctcgaagaccatttacttttgggctactgccaggcaaatttcaacccatgttcttttacccaatgtccatgtagttcttttaagtttcctatctccaatctgaaataatggccttcagtctgtcaaaactttagtgaataaacattctttaccgtgtatcctagtcttgtttcaaatcaggggtgtatatttttttctttttttcaaatggagtttcactgttgttgcccaggctggagtgcagtggcatgatctcagctcactgcaacctctgcctcctgggtttaagtgattctctggctcagcctcctgagtagctgggattacaggcctgtgccaccacgcccggctaatttttgtatttttaggagagacggggtctcaccatcttggccaagctggtcttgaactcctgacctcgtgatccacctgccttggcctccaaagtgctgggattacaggcgtgagccaccacacccagccaggacggccattattaaaaccaccattgacaagtaaattttggttacttctgtagcatacaagaatttaacataaaagttataattaataacatacacaagttatttcagaagtataagagtttcccataattttggagcacatatcaatgacatttctataaatacagcccaaagaaagtcaaacaccattttatatttgatgatgcttcttgtatgatttttataccaaataagaccaatatgtctcttttggacttcagaggactcatatcaaaaaattaatgaggaatgaagttagaatttgactttggaaagttcgtcaaagataaaaagtttaaaatgcttgatatcacgaaatagggtcatgggtcattgtaaaataagtcattcatttaaccaaagcagtaactcaaatgtttcaaaaaaaaaaaaaggtgaaaatctttattctttgagagaggaggcttaatatcccaaacaataagccctaattaaaaacaggatgcggcaaattaagtttgtttttttgaaattgtataataaaagtttaatcatcttgagtataaaatataatttctataaaccttgtaaccttcatcattttgcatgaaggagtgagttaatgctccaagaaagccttgttaaactgacacagcaacctagatactggttttgctttagtgtgcctttgatattaatggttaattcctagagaaactgagctacttttctcttaatatcagcccttacaatctcacatgcccacctcttccacgatagtccttgggccttgaggagttgaatagttttaatttctggccctgcatctcatgaacgcagtttactttgattagcatcttctactgggcctgaaaatgaggctgtaattgctgtcagtgtttaagatatagcagaacttggtgtcctttttagacccagaagtcaaagccctataactcaatggcacaaggactttaaaagcacatacagaaagttacacagatggaagaaaacacttttttagaccttgaagaaaaaatttttggcctgtcatagtggctcatgcctg

SEQ ID NO: 1564144 - DNA, 4001 bp, Homo sapiens
cccatccacgggtgactccatggtgaatccctgtggtgtcttttcccgctaaccgatgtgtatccaccaagcagttttctttttcagtataaatattatattgtttgacattttaagacacatggtaatcaaaatctatagccttaattaaatgatgactttcaggaaattatcatgcaaaatggaagtgttaggaagccgataatagacacactctcctaaaaatgatctcaccacatcacacctaacccttctcaccaccttgcagttcacattccatgggaaaaagctcctcatacttaagagtgttttactttccttttcccaagtcatggcgattttgaatattcacactttgcggatatcaacacatttctaaagcatacttatcttgattaaagactgctgaggtcattaaaacactaacaaatatttaagatgcattgaacattttgttttagaattggcttttcaatcatttcatcacaagcaatgctttcctgccgtttacttactcctacatctactatcttcttttgtattgtgctttgtgttttacagaacatttacgctttataaagcatctatttctagcctaggaaaatatcaaatggaaaggggatgggaatacctttgatatgtacattcagcagaactatgtgctgccgggtacagttgcgtgaacatatacacatctccacttcctgtgagataaaattttaagaagaaaattttctttaggaatcagtcctcccccaggccttatttacaatgtctggcttactgtcaacctgtgggtctgtccaccaaccctacaggacctcatatccctcccttctcaaatgcctacctcttcccttcccttcccttcccccgccaccatcagaaaacaggcagagatatacacagccatcagcttctcaaactttattttcattgcccaaggttgagagatgtagcttcttgctactttgcaggtatttcaaccattatttccatgaattcctcctcctccatttggagggggttgattctgttctctcgggcgtggtcattcaccagttcctctggagatgttcttttcacgttcctcctgtagcgaaccactagtatggtcgaggactcagatgtttttagttttttcggagcaggttgcgggtctgagtacccactcgaggtctccggcatctgttaagaaagcagggagaggccaggaggacattattttgggtgaacaggatagagactggatagcaagggggcttcatgagaagaaggaatgcgggttgaggaaggggtttgatccagagaagaagaaggttgaagcacagagtagggatctatggggaagaagaagaggagcgtgggtagggtcacctgtgagtccaaactgcaccattttgtcagttctttgctattttgcagaccttggtcaaagtgaaacatcccatgggggttcaggccgtgagaaacatcctgcctaaccacctgtccgcaaggcggacaaaggcccaactgaagaaacatccctatcatatcttgcttggcagcgttctaaggaacaccacaatgatattccaccagaaaaagggccaaaccacctgatcataagaacatcttatcaatatcctgccgggcagcaagccatactgcccaggcccctcccacccctacctacaagcaccccagcctgtaagcggcggtgggctctggcattaagcgggccccccacttccacaatggtctgcaatattcctgtgttgttgtttgagccgcccccgctctgtgtgtctttctttcaccctcgccttcaattcaaaacctaacagtcttaccatctcgttggcctcgttggaatcacaggggacgctcctcttcaccccgccggcactggattgtttgtccattgtatatattggttcttcaatgtcagcggcaggcttttgtaggttttgaatcttcgcagtggcccggagctcttgccctccctgtatataccctcctggtgacaaggcaaagccacacccttgagctttgtttgatcatacaggcagtgtcccagccaatggcagccctagggtggcttcacatcacaaagccccactgctgaccactccctgggcttgcgggcgaggggtgacaggggtgtagagcaaaccaaatgctgttgttgtttcagcatcccctgaagatgcatcccaaaccgatctgccgccgctcctcatttctccatgtttaatgttcacggttcacatggaagtcagaggatgattccttcaagcccttccccacagccattcctattaagtgattcattcttttgtcttccagccctcaccatgacttagtattttcgatgtctcacctcaaatcccccaagctagtgtggctacatttatttattggcagagatgtgaattatcccatttccctcctacagttccttcacatgcacctcgaagaccatttacttttgggctactgccaggcaaatttcaacccatgttcttttacccaatgtccatgtagttcttttaagtttcctatctccaatctgaaataatggccttcagtctgtcaaaactttagtgaataaacattctttaccgtgtatcctagtcttgtttcaaatcaggggtgtatatttttttctctttttgaaatggagtttcactgttgttgcccaggctggagtgcaatggcatgatctcagctcactgcaacctctgcctcctgggtttaagtgattctctggctcagcttcctgagtagctgggattacaggcctgtgccaccacgcccggctaatttttgtatttttaggagagacgggggtctcaccatcttggccaagctggtcttgaactcctgacctcgtgatccacccgccttggcctccaaagtgctgggattacaggcgtgagccaccacacccagccaggacagccattattaaaaccaccattgacaagtaaattttggttacttctgtagcatacaagaatttaacataaaagttataattaataacatacacaagttatttcagaagtataagagtttcccataattttggagcacatatcaatgacatttctataaatacagcccaaagaaagtcaaacagcattttatatttgacgatgcttcttgtatgatttttataccaaataagaccaatatgtctcttttggacttcagaggactcatatcaaaaaattaatgaggaatcaagttagaatttgactttggaaagttcgtcaaagataaaaagtttaaaatgcttgatatcacgaaatagggtcatgggtcattgtaaaataagtcattcatttaaccaaagcagtaactcaaagatttcaaaaaagaaaaaaaaaaggtgaaaatctttattctttgagagaggaggcttaatatcccaaacaataagccctaattaaaaacaggatgcggcaaatgaaatttgtttttttgaaattttataataaaagtttaatcatcttgagtataaaatataatttctataaaccttgtaacctttatcattttgcattaaggagtgagttaatgctccaagaaagccttgttaaactgacacagcaacctagatactggttttgctttagtgtgcctttgatattaatggttaattcctagagaaactgagctacttttctcttaatatcagcccttacaatctcacatgcccacctgttccacgatagtccttgggccttgaggagttgaatagttttaatttctgaccctgcatctcatgaacgcagtttactttgattagcatcttctactgggcctgaagatgaggctgtaattgatgtcagtgtttaagatatagcagaacttggtgtcctttttagacccagaagtcaaagccctatagctcaatggcacaaggactttaaaagcacatacagaaagttacacagatggaagaaaacacttttttagaccttgaagaaaaaatttttggcctgtcatag

SEQ ID NO: 1564145 - DNA, 4001 bp, Homo sapiens
catcacacctaacccttctcaccaccttgcagttcacattccatgggaaaaagttcctcatacttaagagtgttttactttccttttcccaagtcatggcgattttgaatattcacacttcgcggatatcaacacatttctaaagtatacttatcttgattaaagactgctgaggtcattaaaacactaacaaatatttcagatgcattgaacattttgttttagaattggcttttcaatcatttcatcacaagcaatgctttcctgccgtttacttactcctacatctactatcttcttttgtattgtgctttgtgttttacagaacatttactctttataaagcatctatttctagcctaggaaaatatcaaatggaaaggggatgggaatacctttgatatgtccattcagcagaactatgtgctgctgggtacagttgcgtgaacatatacacatctccacttcctgtgagataaaattttaagaagaaaattttctttaggaatcagtcctcccccaggccttatttacaatgtctggcttactgtcaacctgtgggtctgtccaccaaccctacaggacctcatatccctcccttctcaaatgcctacctcttcccttcccttcaccccccaccatcagaaaacaggcagagatatacacagccatcagcttctcaaactttattgtcattgcccaaggttgagagatgtagcttcttgctactttgcaggtatttcaaccattatttccatgaattcctcctcctccatttggagggggttgattctgttctttcgggcgtggtcattcaccagttcctctggagatgttcttttaaagttcctcctgtagcgaaccactagtatggtcgaggactcagatgtttttagttttttcggagcaggttgcgggtctgagtacccactcgaggtctccggcatctgttaagaaaacagggagaggccaggaggacattattttgggtgaacaggatagagactggatagcaagggggcttcatgagaagaaggaatgcgggttgaggaaggggtttgatccagagaagaagaaggttgaagcacagagtagggatctatggggaagaagaagaggagcgtgggtagggtcacctgtgagtccaaactgcaccattttgtcagttctttgctattttgcagaccttggtcaaagtgaaacatcccatgggggttcaggccgtgagaaacatcctgcctaaccacctgtccgcaaggcggacaaaggcccaactgaagaaacatccctatcatatcttgcttggcagcgttctaaggaacaccacaatgatattccaccagaaaaagggccaaaccacctgatcataagaacatcttatcaatatcctgccgggcagcaagccatactgcccaggcccctcccacccctacctacaagcaccccagcctgtaagcggcggtgggctctggcattaagcgggccccccacttccacaatggtctgcaatattcctgtgttgttgtttgagccgcccccgctctgtgtgtctttctttcaccctcgccttcacttcagaacctaacagtcttaccatctcgttggcctcgttggaatcacaggggacgctcctcttcaccccgccggcactggattgtttgtccattgtatatattggttcttcaatgtcagcggcaggcttttgtaggttttgaatcttctcagtggcccggagctcttgccctccctatgtataccctcctggtgacaaggcaaagccacacccttgagctttgtttgatcatacaggcagtgtcccagccaatggcagccctagggtggcttcgacgtcacaaagccccactgctgaccactccctgggcttgcgggcgaggggtgacaggggtgtagagcaaaccaaatgctgctgttgtttcagcatcccctgaagatgcatcccaaaccgatctgccgccgctcctcatttctccatgtttaatgttcacggttcacatggaagtcagaggatgattccttcaagcccttccccacagccattcctattaagtgattcattcttttgtcttccagccctcaccatgacttagtattttcgatgtctcacctcaaatcccccaagctagtgtggctacatttatttattggcggagatgtgaattatcccatttccctcctacagttccttcacatgcacctcgaagaccatttacttttgggctactgccaggcaaatttcaacccatgttcttttacccaatgtccgtgtagttcaagtttcctatctccaatctgaaataatggccttcagtctgtcaaaactttagtgaataaacattctttaccgtgtatcctagtcttgtttcaaatcaggggtgtatatttttttctctttttgaaatggagtttcactgttgttgcccaggctggagtgcaatggcatgatctcagctcactgcaacctctgcctcctgggtttaagtgattctctggctcagcctcctgagtagctgggattacaggcctgtgccaccacgcccggctaatttttgtatttttaggagaggcgggggtctcaccatcttggccaagctggtcttgaactcctgacctcgtgatccacccgccttggcctccaaagtgctgggattacaggcgtgagccaccacacccagccaggacggccattattaaaaccaccattgacaagtaaattttggttacttctgtagcatacaacaatttaacataaagtttataattaataacatacagaagttatttcagaattatgagtttcccataattttggagcacatatcaataacatttctataaatacagcccaaagaaagtcaaacaccattttatatttgacgatgcttcttgtatgatttttataccaaataagaccaatatgtctcttttggacttcagaggactcatatcaaaaaattaatgaggaatcaagttagaatttgactttggaaagttcgtcaaagataaaaagtttaaaatgcttgatatcacgaaatagggtcatgggtcattgtaaaataagtcattcatttaaccaaagcagtaactcaaagatttcaaaaaagaaaaaaaaaaaaaggtgaaaatctttattctttgagagaggaggcttaatatcccaaacaataagccctaattaaaaacaggatgggcaaatgaaatttgtttttttgaaattttataataaaagtttaatcatcttgagtataaaatataatttctataaaccttgtaacctttatcattttgcatgaaggagtgagttaatgctccaagaaagccttgttaaactgacacagcaacctagatactggttttgctttagtgtgcctttgatattaatggttaattcctagagaaactgagctacttttctcttaatatcagcccttacaatctcacatgcccacctcttccacgatagtccttgggccttgaggagttgaatagttttaatttctggccctgcatctcatgaacgcagtttactttgattagcatcttctactgggcctgaagatgaggctgtaattgctgtcagtgtttaagatatagcagaacttggtgtcctttttagacccagaagtcaaagccctataactcaatggcacaaggactttaaaagcacatacagaaagttacacagatgtaatgaccttaagtaaaaaattttttatgttttttttctaagcaatccagaagtttataataatgacataggaattatttcaataaaatgtaaaatctcttaggccagttaccaataagcaaaataaaagaccatctgcagtgtacggaatattatgttggaagaaaactcttttttagacctttaagaaaaaattttggccctgtcattgtggctcatgcctgttatcccagcactttgggaggctgaagcaggtggatcacttgaggtcagaagttcgagaccagcctggcca

SEQ ID NO: 1564146 - DNA, 4001 bp, Homo sapiens
ccctcacaggaccagcctcactgtacttaacaagaattccagaatttgccaatccagaacaccctagcccataacactctccgtcgccaatttccaatcttttatctcctactttgtttcagatctttcctggtttcccttccctatgtccctggatagtctatgccaatttctcacactaacgcaggaggtatgactttagggcaccttccaaaatttcactcctactcaaatctcctttttctcctttgtcctctttgtctgtgggatactcttaagtccccacccccaacctctagcagttgagcccccttcatcagcctcacacattgcccattaaatcagtcacactccccttttacttccaactgttaaacttgtttgtccacacaaatccagcagttcacatcccttcctgtcaacctggccacataaacctggtcgaaaataaacctgcatctcacctacttaaccaattcattcccaaatcctgtttataatcttgctcggctaatcacctttccccccaatccattaaatccacccacaccatcacacacagggctgtcaccctccttcacctcatagcctcttaactaaacatgttacaactctgattccataaaatacctcttaccaacgcctcccctcttggctagagccactcttcatgtatccaactcaagggcgctccctggaaaacatgcacaaacaattccctcaactgcaacctgtatccttctgccctgtaaggaccacagtggctattagttacaaaaacccatttccccctctctctccaaaaccaagcagccttcacctcctccaccaccaacatttcctatcaggccttcagtggggctacccttgctggcagctattgaacttggaggaatataaaagttaaaacaaagtgtttgtggagaattcaacccccaccttctcatggcttgccaccataacctacaactttcgttaaccgccataatctacaacttttttgttaatctaaacattaacattttgcctaacaagcagaccatccaggttcctttagtagcttctgtctcatcttcctccacacacactaagcaggctgtacatctcattctagtgttagcagaactaagcatctctgatgcactcagcactgggatagcaggtggtccctttcttagggccgttaatcttcctcctcctgatagtacatttggccgatgtatactcaccttcatatcctgctttatctcccgaaggctaaactcccctgtccaggcagccacccagcaacacattgataccatccttctcctctgccaagtccggtaccagtgcctccaggaaaacaactctgaagtccaacacccactgcttcaaaacccaaaccctgattacagctcccctattcggcaggaagcagccagataatcaacaatgcccctcttccttttatactaaagtagaaggcaagaatgtgagtccaaaccaccatttagtaagcaccctgctatttttcagaccttgatcaaagtgaaacattccacgggggttcaggctgagaaaaatcttgcctaatcatcgtaacacaagacggacaaaggtccaactaaagaaactttcctatggtatcttgctgggcaaagttccaagaaacaccacaatgacatcccactggaaaaaggaccaaacagcctgatcataaaaacatcttatcaatatcctgccgggcagcaagccatactgcccaggcccctcccacccctacctacaagcaccccaggctgtaagcggcggtgggctctggcattaagcgggtctcccacttccacaggtgtctgcaatattcctgtgttgctgtttgagccgtcccttctctgtgtgtctttctttcaccctcaccttcccttcaaaacctaacaatcttacctcatcattttcattgttggattcacaggggctcttcctcttctccccattgatgcttgaagtgggctgttccatgattctggttggttgtagaatgtctatagtaggctcttgtagactccagacttgcacagctgtattgaagcttcccaggaggatgtcccagagctcttgccctccctatatataccctcctggtgacaaggcaaagccacacccttgagctttgtttgatcatacaggcagtgtcccagccaatggcagtcctagggtggctttgacatcacgaagcaccactgctgaccaatccctgggcttgtgggggaggggtgacagggatgtagaggaaaccaaatgctgttgttgtttcagcatcccctgaagatgcatcccaaaccgatctgccgccgctcctcatttctccatgtttaatgttcatggttcacatggaagtcagaggatgattccttcaagcccttccccacagccattcctatgaagtgattcattcttttgtcttccagccctcaccatgacttagtattttagatgtctcacctcaaatcccccaagctagtgtggctacatgtaattattggtggagatgtgaattatcccatttccctcctacagttccttcacatgcacctcgaagaccatttacttttgggctactgccaggcaaatttcaacccatgttcttttacccaatgtccatgtagttcttttaagtttcctatctccaatctgaaataatggccttcagtctgtcaaaactttagtgaataaacattctttaccatgtatcctagtcttgtttcaaatcaggggtgtgtgttcatagtaaatgtagtctcccaacatgaattctgccagtatgtgggtgggggaaggagtggatattcaagtgctggaagttgttctgagtatttacctgcaggatactataatctaagactaacatgagggtacaagcttcaagccttggtggcttcaagcttcggtggcttccacatggtgttaagcctggagatgcactgagggtaagagttgaggcttgggcttgggaggctctgcctagatttcagaagatgtatggaaatgcctggatgttcaggcagaagtatgctgcagggttggatccctcatgaagaacctctactagggcaatgtgaaggggaaatctggggttggagccctgacacagaatctccactggtcactggagctggagagagatgctcacagaatggggagagacgaaggttgcttagaatttcaagaaaaataaacaattgaggatgtatacaataacactgtttggccctgattcctgacaaggtgtttggtagcaggagaagtcagagatcactccaggttttaggaccaggtcacttattgatgatgagaatattttttaaaatacagaatctagacaacaatttggaaggaaaggtgaagggtgtcattttggcatctcagggttgagctgaagctgggctgtgcaaatgtaaatgctgtaggcaagaactgccactcagctggagtttcataccgcgggggtcctgggagggatgatattttatgtaatggcatttttaaaatttttcaaaagtagtaaaaggagaatatcactgggccaggaactgaactttgcacagtgcttagcatgagtagtgggagagaaaatgatgctcaggagaggcgatggagaaccaggaacatgaagtgtcagggcaaaggtcagagcaggaaggagtcctgcgagcataccatcctctcttactcacccacccctgacattacacaagttatctcctctgcctgggatacccttctcccacactgcatcccaatcaccaggataacgtctgttcctccatacatctgcagcgtagatgtcattatttccagacaatcttccctggacctcctccctaccacttactcacaaattaataataatagccatgcccatgctgttcatctattgtgtttgtacaagtgcacacaagactataaattggctttgagataaggatgtatatcaggtctctctccgtggcttggaaatg

SEQ ID NO: 1564147 - DNA, 4001 bp, Homo sapiens
cataacactctctgtctccagtttccaatcttttgtctcctactttatttcagatctttcctggtttcccttccccatgaccctgaatagtccaggccaatttgtcacactaatcaaggagatatgacttcagggcaccttccaaaatttcactcctactcaaatctcctctttctccttttgtcctctctatctgtgggatattctaagtccccaccccgaacgtctaacagatgagcccccttcatcagcctcactgcctcttaaatcagtcacactcccctcttccttccaactgttaaatttgtttgtccacacaaatccagtagttcacagcccttcctgttaacctggccacatgaaccctgtccaaaataaacctgcatttcacctaattgaccaattcattcgcaaaacctgcttataatcttgctcggctaatcacctttccccccccaccaatccatcaaatccacccacaccgtcacacacagggctgtcaccctccttcacctcatagcctcttaactaaacatgttaccagtcggattccagaaaatacctcttatcaacccctcccctttctgccggagccgctctccatgtatccaagtcaagggcgctccctggaaaatatccacaaacaattccctcaactgcaacctgtatccttctgcgctgtcaggaccgcaatggctattagttacaaaaacccatttcctgctctctctccaaaaccaaacagccttcacctcctccactaccaacatttcctatcaggccttcagaggggctacccttgctggcaggtattcaacttggaaaaacataaaagttaaaacaaagggtttgtgcagaattcaacccccaccttctcatgacttgccaccataacctacaacttttgtctgtccacccctagtgtcttcttcctttgcggcacaaactcttatctctgcctactggccaattggtcaggaacatgcacccttgtgtttcaatctaaacattaacactttgcctaacaagcagaccatccaggttcctttagtagcttctgtctcatcttcctccacacacactaagcaggctgtacatctcattctagtgttagcagaactaaacatctctgatgcactcagcactgggatagcaggtggtccctttcttagggccgttaatcttcctcctcctgatagtacatttggccgatgtatactcaccttcatatcctgctttatctcccgaaggctaaactcccctctccaggcagccacccagcaacacattgataccatccttctcctctgccaagtccggtaccagtgcctccaggaaaacaactctgaagtccgtcaccccctgcttcaaaacccaaaccctgattacagctcccctattcggcagcaagcagccagataatcaacaatgcccctcttccttttatactaaagtagaaggcaagaatgtgagtccaaaccaccatttagtaagcaccctgctattttgcagaccttgatcaaagtgaaacattccacgggggttcgggccatgagaaaaatcttgcctaatcgtcgtaacacaaggcggacacaggtccaactaaagaaactttcctatggtatcttgctgggcaaagttccaagaaacaccacaatgacatcccactggaaaaaggaccaaacagcctgatcataaaaacatcttatcaatatcctgccgggcagcaagccatactgccccggcccctcccacccatacctataagcaccccagcctgtaagcggcggtgggttctggcattaagcgggtcccccacttccacaggtgtctgcagtattcctgtgttgctgtttgagccgtcccttctctgtgtgtctttctttcaccctcaccttcccttcaaaacctaacaatcttacctcatcattttttttgttattggattcacaggggctcttcctcttctccccattggtgcttgaagtcggctgttccatgattctgcttggttgtagaatgtctatagtaggctcttgtagactgcagacttccacagctatattgaagcttgccaggaggatgtcccagagctctggccctccctatgtataccttcctggtggcaaggcaaagccacactcttgagctttgtttgatcatacaggcagtgtcccagccaatggcagtcctagggtggcttagacatcacaaagcaccactgctgaccactccctgggcttgtgggggacggatgacaggggtgtagaggaaaccaaatgctgttgttgtttcagcatcccctgaagatgcatcccaaactaatctgctgctgctcatttctccatgtttaatgttcatggttcacatggaagtgagaggatgattccttcaagcccttccccacagtcattcctatgaagtcattcattcttttgtcttccagccctcaccatgacttagtattttagatgtctcacctcaaatccctccaagctagtgtggctacatttaattattggtggagatgtgaattatcccatttccctcctacagttccttcacatgcaccttgaagaccatttacttttaggctactgccaggcaaatttcaacccatgttcttttacccaatgtccatgtagttcttttaagtttcctatctccaatctgaaataatggccttcagtctgtcaaaactttggtgaataaactttctttaccatgtatcctagtcttgtttcaaatcaggggtctatgttcatagtaaatgtagtatcccaacatgaattctgccagtatgtgggtgggggaaggagtggatattcaagtgctggaagttgttctgagtatttacctgcaggatgctacaatctaagacccacatgtgcaccagtatgggcacagttatactttgtactggagattgtgtccagtgtaaaagaaaaaaaaatgcattcagattggaaagggagaagtaaaagtatcttttgtcaaagactacctgagagtatatgtagaaaagtcaatctaaaaaaatggttctacattaattgaggttagcaaaattgcaaagtaagagatcaacacacaaatcaattgtatgtttatatattagcagttacatatgagaagtttctatattagaagagacaatgttttagccaatggtagtcctagggtggactggaagttaatttcaacaactgaaagttgaaactaagaacagtgcaatttaaaatatcactaaaaatattaaaggcttagggataaatctgaccaaagatgtaaatgacttgtacacttaaaactacaaaaatttacaatgataaattaatgacataagaaaaaaattgagatctatactttgattttcggttggaagattcaatattgtaaaatggcagttatttccaatttcatctgtggattcaactaaattctaatcaaaattctaaaaagcctttttaatagaaattgacaagataattataatattcctatggaaatataaagtgcctagaatagtcaaaagaaaagtgttgaatcttaaaaagctctggattgcatcactgtcaatgttctagttttgatagtgtaatgtggtagtgtattgaagattttactattgggagagactggttgaagggtacaaaaggcctccatgtacgtatctttgaaacttcttgtgaatttataattgtttcaaaataaaaatctaaaaatattttaaaagacagtaagaaagaggactgaaaatagagaaggcatggcccaggatttctcccacaggttgactgacacttgtctcattctctataagaagtcacaaaacctgataatgaaaaaaaaaatctaaaaataagacaaacgagaagtagaccctggaattttgttccagtgttcatcaagctcacataactttattttatacaccataaaaacaagaaaggcctagaaagataccccgctgacctccagacacaaggcatttattgcat

SEQ ID NO: 1564148 - DNA, 4001 bp, Homo sapiens
ctgaatagtccatgccaattcgtcatactaatccaggaggtatgactgcagggcaccttccaaaatttcactcctactcaaatctcctctttcttcttttgtcctctttgtctgtgggatactctaagtccccacccccaacctctgacagttgagcccccttcatcagcctcacacctttcctcttaaatcagtcacactcccctcttccttccaactgttaaacttgtttgtccacacaaatccagcaattcacagcccttcctgtcaacctggccacatgaactcggtccaaaataagcctgcatctcacctacttgaccagttcattcccaaacctgtttataatcttgatcagctaaactctttttcccccaatccatcaaatccacccacaccatcacatacagggctgtcaccctccctcgcctcatagcctcttaactgaatatgttacaaacggattccataaaacaccttttagaaacccctcccctcttggctggagccgctcttcatattatccaactcaagggcgctcgctggaaaacatgcacaaacaattccctcaagtgcaacctatatccttctgccctgtcagggctacaatggctattagttacaaaaacccatttccccctctctttccaaaaccaaacagcctccatctcctccaccaccaacatttcctatcaggccgtcagaggggctacccttgctggcagctattcaacttggaaaaatataaaagttaaaacaaagaatttctgcagaattcaacacccaccttctcatggcttgccaccataacctacaacttttgtctgtccacccccagtgtcttcttcttttgtgccacaaactcttatctctgcctactggccaaatggtcaggaacatacaccctggtgtttcagcctaaacattaacattttgcctaacaagcagaccatccaggttcctttagtagcttctgtctcatcttcctccacacacactaagcaggctctacatctcattctagtgttagcagaagtaaacatctctgctgcagtcagcactgagatagcagggggcccctttcttaggacccttaattttcctcctcctaatactacaattggcccatgtatatttaccttcatatcccgctttatctcccgaaggctaaactcccctgtccaggcggccacccagcaacacattgataccatccttctcctctgccaagtccagtaccagtgcctccaggaaaacaactctgaagtccaacacccactgcttcaaaacccaaaccctgattacagctcccctattcggcaggaagcagccagataatcaacaatgcccctcttccttttatactaaagtagaaggcaagaatgtgagtccaaaccaccatttagtaagcaccctgctatttttcagaccttggtcaaagtgaaacattccacgggggttcgggccatgagaaaaatcttgcctaatcgtcgtaacacaagacggacaaaggtccaactaaagaaactttcctatcatatcttgctgggcaaagtttcaagatacaccacaatgacatcccactggaaaaaggaccaaacagcctgatcataaaaacatcttatcaatatcctgccgggcagcaagccatactgcccaggcccctcccacccctacctacaagcaccccagcctgtaagcagcggtgggctctggcattaagcgggtcccccacttccacaggtgtctgcagtattcctgtgttgctgtttgagccaccccctctctgtgtgtctttctttcaccctcaccttcccttcaaaacctgacaatcttacctcatcattttttttgttattggattcacaggggctcttcgtcttctccccattggtgctggaagttggctgttccatgattctggttggttgtagaatgtctatagtaggctcctgtagactgcagacttccacagctatgttgaagcttcccagtgggatgtcccagagctcttgccctccctatatataccctcctggtgacaaggcaaagccacacccttgagctttgtttgatcatacaggcagtgtcccagccaatggcggtcctaaggtggctttgacatcacaaagccccactgctgaccactccttgggcttgtgggggaggggtgacagggatgtagaggaaaccaaatgcggttgttgtttcagcatcccctgaagatgcatcccaaaccgatctgccgccgctcctcatttctccatgtttaatgttcatggttcacatggaagtcagaggatgattccttcaagcccttccccacagccattcctatgaagtgattcattcttttgtcttccagccctcaccatgacttagtattttagatgtctcacctcaaatcccccaagctagtgtggctacatttaattattagttattaattactagttacatttaataattaataattaattatcccatttccctcctacagttccttcatatgcaccttgaagaccatttacttttaggctactgccaggcaaatttcaacccatgttattttactcaatgtccgtgtagttcttttaaatttcctatttccaatctgcaataatggccttcagtctgtcaaaattttagtgaataaacattctttactgtgtatcctagtcttgtttcaaatgaggggtgtattttcatagtaaatgtagtctcccaacatgaattctgccagtatgtgggtgggggaaggagtggatattcaagtgctggaagttgttctcagtgtttacatgcaggatgctacaatctaagacccacatgtgcaccagtatgggcatagttatactttgtactgaagattgtgtccagtgcaaaaagaaaaatgcattcagtttggaaggggagaagtaaaagtgtcttttgtcaaagactacatgaaagtatatgtagaaaagtcaatctataaaaaagcttctacaataattgaggttagcaagattgcagagtaagagatcaatacacaaatcaattgtatgtttatatattagaagaggcagtgtttcagctaatggtagtcctagggtggactggaagttaatttcaacaaatgaaagttgaaactaagaacagtgcaatttaaaatatcactaaaaatattaaagtcttagggataaatctgaccaaaaatgtaaatgacttgtacacttaaaactacaaaaaaattgcaatgataagttaatgacatcaaaaatccagatgtatactttgattttcggttggaagattcaatattgtaaagtggcagttattccaaattcatctgtaagttcaactcaattctaatcaaaattctaaaaaggatttttaatagaaattgacaagataattataatagtcatatggaaatgtaaagtgcctagaacagccaaaagaaaagtgttgaatcttaaaaagctctggattgcatcactgtcaatgttctagttttgatagtgtaatgtggtagtgtactgaagattttaccattgggagaggctggttgaagggtacataaggcctccatgtacatatctttgaaacttcttgtgaacttataattgtttcaaaataaaaagctaaaaatgttttaaaagagaataagagagagggccaaagataaagaaggcatggccctagattcctcccataggttgacacttgtccattctctataggaagtcacaaaacgcaataacggaaaaaaaaaatttaaaaatagaacaaaagtgaagtagaccctggatttttgttccggtgttcgtcaagctcacatatctttacttcatacaccataaaatcaataaaagcctagcaaaatacgctgctgaccctccagaaacaaataatttatagcactcccatgactgccatctaaacactaacaaaccaagcgaaccttgtatacattttttttccttagtgaattccagatgttgtctacagattaacaa

SEQ ID NO: 1564149 - DNA, 4001 bp, Homo sapiens
cagtaatgcaggaggtatgactgcagggcgccttccaaaatttcactcctactcaaatctcctttttctccttttgccctttttgtctgtggaatattctaagtccccacccccaacctctaacagttgagcccccttcatcagcctaacacattgcctcttaaatcagtcacactccctcccgtctttcttccaactgttaaatttgtttgtccacacaaatccagcagttcacagcccttcctttcaaactggccacgtaaacccagtccaaaataaacctgcatctcacctacttggccaattcattctcaaaacctgtttataatcttgctcagctaaacacctttctccccagtctatcagatccacccacactgtcacacacagggctgtcaccctccttcgcctcatagccagcctcttaactgaacacgatacaagctggatcccataaaacacctcttaccaacccctcccctctctgccagagccgctcttcatgtatccaactcaacagcgctccctggaaaaaatgcacaaacaattccctcaactgcaacctatatccttctgccatatcaggaccgcaatgactattagttacaaaaacccatttatctctctctctccaaaaccaaacagccttcaactcctcccccaccagcattttctgtcatgccctcacagggcctacccttgctggcagctattcaacttggaaaagcataaaagttaaaacaaagggtttgtgcagaattcaacccccatcttctcatgacttgccaccataagctacaacttttgtctgtccacccccagtgtcttcttcctttgtggcacaaactcttatctctgcctactggccaattggtcaggaacatgcacccttgtgtttcagtctaaacgttaacattttgcctcacaagcagaccatccggtttcctttagtagcttctgtctcatcttcctccacacacactaagcaggctctacatttcattctagtgttagcagaactaaacatctctgctgcactcagcactgggatagcagggggccgctttcttaggtcccctaatctttctcctccaaatactacaattggcccatgtatactcaccttcatatccctctttatctccctaaagctaaactcccctgtccaggcagccacccagcaacacattgataccatccttctccgctgccaagtccggtaccagtgcctccaggaaaacaactctgaagtccaacacccactgcttcaaaacccaaaccctgaatacagctcccctattcagcagcaagcagccagataatcaaccacgtccctcttccttttatgataaagtagaaggcaagaatatcagtctaaactgcactctcttgtaagctcccttctattttgtagaccttggtcaaagtgaaacattccacgggagttctggccgtgagaaaaatcccgcctaactgcctgaccatgaggtggataaaggcccatctaaaaaaacatccctatcatatcttgttggggaaaaaggtccaagcaacaccatgatgacatcccaccagaaaaagggccaaactgcctgatcataacaacatcttatcaatattccgccgagcagccagccatactgcccaaacctctcccacccatacctataagtacgctggcctgtatgtagcggtgggctctggcatgaagctggccccacatttctgcaggtgtctgcagtatacccgtgttgctgtttgacccgcgccctatctgtgtgtctttctttcaccctcaccttcccttcaaaacctaacaatctgaccttgtcaacttttcttttgttagattcacaggggctcttcattttattctcgttggtgctggaagttggctcttccatgattatggttggttgtagaatttctgtactaggatcttctagggtgcagatttccacagctgtattgaagctttccagtgggctgtcccagagcttttgcccaccctgtatatataccctcctgggagcaagacgaagccacacccttgagctttgtttgatcatacaggcagtgtcccagccaatggtagtcctagggtggctttggcatcacaaagaaccacctctgacaactccctgggtttgtgggggaggggtgaaaggggtgtagaggaaaccaaatgctgttgttgtttcagcatcccctgaagatgcatcccaaactgatctgcctccgctcctcatttctccatgtttaatgttcatggttcacatggaagtgagaggatgattccttcaagcccttccccacagccattcctattaagtgattcattcttttgtcttccaaccctcaccatgacctagtattttagatgtctcacctcaaatccctccaagctagtgtggctacatttaattattggtggagatgtgaattatcccgcttccctcctgcagttccttcatatgcaccttgaagaccattaactttcaggtttctgccaggcaaatttcaatccatgttcttttttccaatgtccatgtagtcctcttaagtttcctatttctagtctgaaatcatggccttcagtctgccagaacttcagtgaataaacatccttactgggtatcctagtcttgtttcaaatcaggggtgtatgttcatagcaaatgtagtctcccacaacatggtttttaccagtgtgtagggttgggggaggagtgggtacacatgtgctggaagttgttctgagtgtttacatgcagaatactatctaacaccaacatgtacaccagtgtgggcattgttacattttgtaatggagattgtgtccagtgcaaaagaaaaacaaaaggcatttagtgtggaaggggagaagtaaaagtatcctttgtcaaagaccacatgagagcctgtgtagaaaagtcgatctaaaaaaaaaaaaaaaaaaaggctttgacaataattgagattagcaagattgcaggatagaagatcaacacacaaatcaattgtatgtttatatgttagaagttatatattagaagtttatatattagaacagtcagtgtttcagccaatggtagtcctagggtcgactggtagttaatttcaacaaccggaatttgaaattaagcacagtgcaatttaaaatatctcaaaaaatattaaggcttagggataaatctgaacaaaaatgtaaatgacttgcacagttaaaactacaaaaaattgcaaagataataacataaggaaaaatcgagatgtatactttgattttcggttagaagattcaatattgaagatgtcagttatttccaaattcatctgtagattcaactcaaacctaatacaaattctaaaaaggtttcttaatagaaattgacaggataattataatattcatatggaaatgtaatgggcctagaacagccaaaagaaaagtgttgaatcttaaaaagctctggattgtattaatgtcagtgttctagttttgatagtgtaatgtggtagcgtactgaagattttaccattgggagaggctggttgaaggatacataaggcctctatgtacatatctttgaaacttcttgtgaacttataattgtttcaaaatagaaaaataaaaatattttaaaagagaggaagagagagtgccaaagatagaggaggcatggccctagatttctctcccaggttgacacctgtccaattctctataggaagtcacaaaaatcaataatggaaaaaataaaataaaatgaaagagcagtagaccctagatttttgttccagtgctcatcgagctcacatatctttatttcataccccataaaatcaagaaatcctagcaaagtaccctgctgacctccaaacacaaccaatttatagcattcccatgagttccatctaaaatctaagaaaccagaagaacattgttattaaggtacacatttttcttagtgaatcccagatgttgtctagagatgaac

SEQ ID NO: 1564150 - DNA, 4001 bp, Homo sapiens
acatatcaaaggaagaatttataaatacaaattttctcaaggaaatgctctaaggaaagtgaaatggggaaggtctcttcttgctcttttggcaacaggaaaatctcaattttatgtttagttacccttacaatttcccccttttgttattcttttatagtaacagtacaattttctagttatctccactgctttgaaatgaggctcattggcactggagaagctggttcattcacacagtcagcttcacattccctcttttgatcaagatctttctttgaaaacctcacaaacctgaggtgatccacccacctcagcctcccaaactgctgggattacaggcgcaagccactgtgcccggccctataaccaatgtttttaattgtatccctctagagagagtgagcagaggtgtctgtgtatgtctgtattgtgctttgtgttttacagaacattaactctttataaagcatatatttctaacctaggaaaatatcaaatggaaaagggatgggaatacctttgatatgtacattcagcagaactatgtgctgccgggtacagttgcatgaacatatacacatctccacttcctgtgggaggaaattttaagaagaaaattttctttaggaatcagtgctcccccaggccttatttacaatgtctggcttactgtcaacctgtgagtctgtccaccaaccctacaggacctcatatccctcccttctcaaatgcctacctcttcccttcccttctcccccaccatcagaaaacaggcatagatatatgcagccatcagcttctcaaacttgattttattgtaatcatcaccgttggtggtgaggatttgtccaatttggtttctccatgtttaattagtcttcctcaccctcctctgacgatccttcagatgagtctgggtcttcttcctccatcaaagatccttcagatgagtctaggtcttcatcctcttgtgaagatccttcagataaccctaggtcttcatcctcctgtgaagatccttcaggtaattgtaggtcttcatcctgctttgaagattctgcagatgagtctaggtcttcgtcctcctgtgaggatccttcgtcctcctcctcttggactggattgatggagttctctcaggactggtcattctcgagttgatttgaatgtattttcttagtcttcctgtagcacaacactaatactgttgaatattctgatgttttcatctttttcaaactcggttcgaggactaagtccctgtttggtgtctcctgcatctgttaagaaaacagggagaggccagaaagacattattttgggtgaataggatagagactggatagcaaggggggctttatgagaaggaatgcaggttgaggaaggggttcgatccagagaagaacaaggttgactcacagggtagggatctatggggaagaagaggagcatgggtagggtcatctgttagtccaaactgcaccattttgtaagttctttgctattttgcagaccttggtcaaagtgaaacatcccatgggggttcaggccgtgagaaacatcctgcctaaccacctgtccacaaggcagacaaaggcccaactaaagaaacatccctatcatatcttgcttggcaaagttctaaggaacaccacaacgatattccaccagaaaaagggccaaaccacctgatcataagaacatcttatcaatatcctgctgggcagcaagccatgctgcccagatccctcccacccatacctgtaagtaccccaggctgtaagcggtggtgggatctggcattaagctggtcccccacttccacaagcgtctgcagtattcctgtgttgctgtttgagctgccccctctctgtgtgtctttctttcaccctcgccttcacttcaaaacctaacaatcttacctcatcatttttgctgttggagtcacaggggctcttcctcttctccccattggtgcttgaagtgggcttttccatgattctggttggttgttgaatgtctacagcaggatcttgtagagtccagacttccacagctatattgaagcttcccagtggcccagagctcttgccctccctatatataccctcctggtgacaaggcaaagccacacccttgagctttgtttgatcatacaggcagtgtcccagccaatggcagtccaagggtggcttagacatcacaaagcaccactgctgaccactccctgggcttgtgggggaggggtgacaggggtgtagaggaaaccaaatgctgctgttgtttcagcatcccctgaagacgcatcccaaactgatctgctgccgctcctcatttctccatgtttaatgttcatggttcacatggaagtgagaggttgattctgtcaagcccttccccacagccattcctattaagtgattcattcttttgtcttccagccctcaccatgacttagtattttagatgtctcacctcaaatcccccaagctagtgtggctacatttaattattggtggagatgtgaattatcccatttccctcttacagttccttcatatgcaccttgaagaccatttactcttgggctactgccaggcaaatttcaacccatgttcttttacccaatgtccatgtagttcttttaagtttcctatttccaatctgaaacaatggcctcagtctgtcaaaactttagtgaattaacattctttaccttgcatcctagtcttgtttcaaatcaggggtgtatgttcatagtaaatgtagtatcccaacatgaattctaccagtatgtggggtgggggaaggagtaaatattcaagtgctggaagttgtcctgagtatttacctgcaggatactgcaatctaagactaatatgtgcaagaatgtgggcatagctaagctttgcactggagattgtgtccagtgacaaaaaaaaatgcattcagattggaagggagaagtaaaagtatcttttgtcaaagactacatgagagtgtatgtagaaaatcaatctaaaaaaaatgcttctacaataattgaggttagcaagattgcagagtaagcgatcaacatataaatcaattgtatgtttatctagtagaagttatatattagaaatttgcatccagttttcacctatagtcatcatgtcaatatgaataatgacacatttttcaccggaaagtattcccatttgtataattaattaaatggtaatataagttttaaggtatcactatcattattggcattaagacgtgaaagagttatacatcataagcagtgaggcaaagaaaaagacatggagagggaaacaaaatcggagagtaacacatctggaaagctaaatatttgcttctaaaagtgactgtttttggctgggcgcagtggctcacgcctgtaatcccagcactttgggaggccgaggcaggcagatcaccaggtcaagagatcaagaccatcctggctaacacgatgaaaccccgtctctactaaaaatacaaaaaattagccaggcgtggtggctggtgcctatagtcccagttgctcgggaggctgaggcaggagaatggcatgaacccgggaggcggggcttgcagtgagccaagattgtgccactgcactgcagcctgggcaacagagagagactccatctcaaaaaaaaaaaaaaggtgactgtgttttgaggtacaactggcaaatttcacgtccttccacagtctttgtgatgttcagatattcaggtatttcagggatatattaaatagtgtaggcattctgagcatatcaaccatatcatccacactctgaaaacattagtgttcaagaatgtattccctttcaattatgccctacattcaatatctgtgtcttgttcatattctgtgttgtgccttttccattttcttcaagattgtttaatctactggatgctcttcctagctatttctcaaaagaacattctattaaatttattaatatcaaattagtt

SEQ ID NO: 1564151 - DNA, 4001 bp, Homo sapiens
gacaaagggcttacagacagcatgtcatgtattcacaaatttgtattttttagagcaaaacaacagttaatgctggcaaagatgtttagttatcagggattccataagctttcagtacactgaaaggcaacattttttgcatgtctacaaattatacatttgtttccacacatgtgccaaattttaccctaacagttaggactttttcaccaaatcgtagacatagatatggaaatcatcatcaaacttgatgaaatacacagagggtttggtttccacttggtgaatgaccatgccgatccttttggagccatcttctttggtatattccacatgcttacctattaggccatctacaactcctcctggctccctctctgttggaggagactcactggattctggcatgatgcggaggtcaccttccttataatcatctagaagctggtacatgtacaagacaggatctttctcataggtaatataaaaccaggctttcatgataggtgcttgagctaagaccatccccctccattcatccttagaaccatgctctccctcaaacatgtgttccactgctttgccaattatggtatttgcaaggttggcatcactaatgtgagatgatgccaccctgtcagaaagaattttaagagacaaaaccctttcatctctgtgaagttccagtccatagacacagtcaattccatcatatttcaccagataaagagagggatttataggcacctgatccagaacggttcctttccactgcgtgatgggctcatctccttccttccatccatgagaaattctgcagcccacgatgttcctgcggggctgggatgaaggtcggcctctctgcttcttttgggagacttttttctttgtcatgtttgcagacccagtggcccgtcctgcagctgccctggtttgttgcccttcggcttcctgtgcgttgggggtcttcatgcctgctgggggaggagagaggatagagagacacacccagtgtgccacaaggcaaacttttccctatagccatgtctggatgtagtctgcgctagtgcctaagtttcccctaggagcctggaagcaatgctggaaatcctggctgcatgcccgcagtgctctccctcttaagttcctttgggctgtggggaagggctggggtggtgcagtagagctgtctggggttaggaactctgcagaagtggctgggccacctcctcctagctcagagcccactgccctccctttaccctttactgccactagcatccactcccaatcccctgcaaagcggccttgaccagcacccactaccctcctgccctgagtgcctctggtgctgtctgtaacccccactgcctatcctaaccacttccctgttacctacctcccttgcttcctggcgctcaccttcaaatccttgtctggctcctattcctaccccctttccctgtcgtccaccgcactcccccaccccacccttgcctggcgcccaactccaccccatgtctcctgctggattccttcccatccccctctccattctggcgcccactaatggccttgccctgcctggcgtccaccgccggggatcgcgggcctcacgtgccgaaatcggatacctcgatgctgcctctgctgtgagcctgtggcgaaggagggtcaacaggcgactcgctgagtgactgcttgcaagagcggggagggtaggatccatagatgaggagcgtgtgtaggagcgcggcgagacaggcaaagagcactgcagcggtgtccccagcgcttcgctcgctggccgtctacctccctgttggtggcggccacccctcagccacgttgggctgccaccagtccctgatgcagtggctgtagtctctgccctttttctgcacaagactacagtgttagtttcctcttagtagtgatgtcttccattctaatcacagagcagatctgcctttcttttcttggggcccctcctgggctcctccttccctttccacaattcacaacagtggaacctgtaggtggccttttctctcttcctgtctctgctggctggatccttcaagctctctagcccctcccctcagctctcttgctccatctgttttccatctttcagacatttctcacattctttggaaacatacaaattaacatagaaataccatgtgtatacatttatggagacatgaatcctttacgaccatatgcaaatgtgtatgtatgtatatatatatatatctccaagcacatgcacatgtataaaactatgaattctgtgtacagttccagaaattcctatccatagattcttaattccaaatacacacctctatccaatcacataactcacagatataattctctgtatatgcatacacactcacgaatacatacattaagtgtttctccaaagcattatgtaggcatattttagatttggagaccttgctttgaagaagtattggcttattttaagcttaaagagttatttttgaatgtgattacaatacttaacaaaccttatctatttcgcataaagtgaagtcatttttaatttttgtgtgtttttttgtgagttacagtttttcacagtatcctataattctgaaaataatcaacaatattagattgctatatcaagtaagatgttttcagttacatgttgtaggacaacaaaccaaatgggtgtacaataaaaacaatatgttggctaacatctgaaaagttaaataagtgttaggttaatcttaatctatggtggaataatattttattatatatatatatatatcacattttttatccatttatttattgatggacagttaagttgattccatatcttgtctattgtgatcagtgctgcaaataaatatgtgagtgcagatagctcgttgatatgctgatttcctttcttttggatatatacccaatagtgagattgctggatcttagggaatttgtagttttagtttttggaggaactaccacgctgtttttcataatggctatgctaatttatatccccacgagcaatttacaaggatacctctttcttcacttccttaccagcagtttttattttctgtctttttgataatagccattttaactggggtaagatgatatctcattgctattttgatatacaattacctgatgattagcgatttagaatactttttatatatctgttgtccatttgtgcgtcttagtttgagaaatgtctactcagctcttttgcccatttttaaatcagattatttgattttttactattgagttgttggaatttcttacatatttttattattaatcccgtcagttgaatactttgtaaatattttctcttgttacctaggttgtctcttcattttatgattgtttcctttgctgtgcagaagctttttagctgatgtgatttcacttgcccatttttcctttgcctgtgctttgaggtcttactcaagaaatcgttgctcagaccaatgtcctgaagctttttcccaaagttttcttctagtagcttcacaatttcaggtcttagatttatgtctttaatccattttgatttgagtgttgtatatggtgagagatagatatgtctagtttcattcttctgtgtatggatacccagttttcccaacaacatttattacagagagtgtcctttctatagtgtgtgttcttggctccttttttgaaaataagttgactataaatgcatagatttatttatgagttctctattttgtggtgtctattcatatgccagtaccatgctgttttggttaccacaggttttttgtttgcttgtttgtttgtttgttttttgagacggagtcttgctcagctggagtgcagtggtgcaatcttggctcactgcgagctccttctcctgggttcacgccattctcctgcctcagcctcccgagtagctggaaccacaggtgcccgccaccacactgggctaatttttt

SEQ ID NO: 1564152 - DNA, 4001 bp, Homo sapiens
ttcctctctactcaatttattctgtgtattttcctctaagccacaagctctctgatagctgttccttcttttcatgccccattcaccaaacacacccgatcttttcaacaagacaaagggcttacacacagcatgtcatgtacacacaagtttgtattttttagagcaaaacaacagttaatgctggcaaagatgtttagttatcagggattccataagctttcaatacactgaaaggcaacattttttgcatgtctacaaattatacatttgtttccacacatgtgccaaattttaccctaacagttaggactttttcaccaaatcgtagacatagatatggaaatcatcatcaaacttgatgaaatacacagagggtttggcttccacttggtgaatgaccatgccgatccttttggagccatcttctttggtatattccacatgcttacctattaggccatctacaactcctcctggctccctctctgttggaggagactcactggattctggcatgatgcggaggtcaccttccttataatcatctagaagctggtacatgtacaagacaggatctttctcataggtaatataaaaccaggctttcatgataggtgcttgagctaagaccatccccctccattcatccttagaaccatgctctccctcaaacatatgttccactgctttgccaattatggtatttgcaaggttggcatcactaatgtgagatgatgccaccctgtcagaaagaattttaagagacaaaaccctttcatctctgtgaagttccagtccatagacacagtcaattccatcatatttcaccagataaagagagggatttataggcacctgatccagaacggttcctttccactgcgtgatgggctcatctccttccttccatccatgagaaattctgcagcccacgatgttcctgcggggctgggatgaaggtcggcctctctgcttcttttgggagacttttttctttgtcatgtttgcagacccagtggcccgtcctgcagctgccctggtttgttgcccttcggcttcctgtgcgttgggggtcttcatgcctgctgggggaggagagaggatagagagacacacccagtgtgccacaaggcaaacttttccctatagccatgtctggatgtagtctgcgctagtgcctaagtttcccctaggagcctggaagcaatgctggaaatcctggctgcatgcccgcagtgctctccctcttaagttcctttgggctgtggggaagggctggggtggtgcagtagagctgtctggggttaggaactctgcagaagtggctgggccacctcctcctagctcagagcccactgccctcccggaaccccttgctaccactggcgtccacttccaatccccttgcaaagaggccttgaccggcacccactgccctccttccctgagcgtcccagctgctgtccacaacaccccctgcctaccctaaccacttctctggtacccaccgcccttgcttcccggcgctcaccttcaaatccttgtctggctcccgttcctacccccttttcatgttgctcaccgcactcccccaccccacccttgcctggcgcccaactccaccccatgtctcctgctggattccttcccatccccctctccattctggcgcccactaatggccttgccctgcctggcgtccaccgccggggatcgcgggcctcacgtgcccaaatcggacacctcgctgctgcctccgctacgagcctgtggcgaaggagggtcagcaggcgaccggccgagtgaatgcttgcaagagcggggagggtaggatccgtagatgaggagcgtgtctaggagggcggcgagacaggcaaagaggaaggcagcggcgtccccaccgcttggctcgctagccctccgcctccctgctggcggtggcggcccctcagccacatcgggattccaccagtccctgctgtcgccgcggcagtctcctccctctttccgtagcgcagcttcctgcccagagagaggcctcctcttcctgtcaaacacccggctctcctctccaccaggctcccacgcccaccacacagcctgtagccccggcggagctatgggctctgactccgcctctttccaaatccggagtagttcgtgccacagtcgtcctcggaaccctgtggccccttcctcacccgtttcagggccacttggttcccacctccaccttcttagtctgcctgccctgctttccatcttcttggaattcgccttgctgccgccccgcgcccacccccgcgcccacccctgcccctgcaccgtcccatgcccttatggatttattctttacacgtaaatatgtctttcctctttttgaaaggatttggagttggaacagagaaattcactatggtaagtctgccattttgacccagtctctacctaatttttgctgactgatatttcctggcatttttgtttttgttttcgagggatttttttttccttttctttattgcaagataattgcatgtacaacgtgaacactatctacattttaggaaattaatattaagaggaaaatcatcaactgcagtcccatctcccatttttgagggcctcacagcaaaatattaatgctcatagttttttttcctttttcctaaacttttgcaaaactgggatttgttttttatctgcaattcatgtctattaatttttccaggaaattagatgttttctaatcgattttttcattcaacaaatatttattgagcacctgttacatatcttgcacttggtccgtaaaactcaattttaaagtgatttataatttggcttttctcccagtactgggcatttgacataatatttccacaataaccagtaatcagatctatgtatcggaatagaaagctttgcaaaaaaataactttataagaaataattaaagttatagttttataaatcagtggagaaacgttgggtattctttaaggaatgttgaaataattatttaaatattttgagaaaggttgtatactaatgttgtaccagtatcaatatttgatttattaaaaggtaaaaagcagcaaaataaaattgaacagaaagcaaatgaaccaaccaaaaactctgtaaacaaaacaatgcttaatggtatctttcttattcagatacttatggtatttgaatgaggggatgagtcggatgttaacagaacaactacacttaataaaataacatctacaaggaaaaatagaagtaataataatctcgattcaacagtcaaagtatgaaagaacattaaaatattacttaatgtcattgatcatgaaaaagcttcatatctagtgctgatgcaagtgaaagtttatacaatttttatggaaagcaatttgcagatatgtcatagtttcagtgagggctttttattttattttcatttttatttttttaaattatattttaagttctagggtacatgtgcacaatgtgcaggttagttacatgtgtatacgtgtgccatgttggtgtgctgcacccattaactcctcatttacattaggtatatctcctaatgctatccctctcccctacccccacctcacaagaggccccattgtgtgatgttccccttcctgtgtccatgtgttctcattgttcaattcccacctatgagtgagaacatgcggtgtttggttttttgtccttgcgatagtttgctgagaatgatggtttccagcttcatccatgtccctacaaaggacacggactcatcattttttatggctgcatagtattccatggtgtatatgtgccacattttcttaatccagtctatcattgttggacatttgggttggttccaagtctttgctattttgaatagtgccgcaataaacgtatgtgtgcatgtgtctttatagcagcatgacttataatcctttgggtatatacccagtaatgggatggctcggtcaaatggtatt

SEQ ID NO: 1564153 - DNA, 4001 bp, Homo sapiens
ctcaatttattctgtgtattttcctctaagccacaagctctctgatagctgttccttcttttcatgccccattcaccaaacacacccgatcttttcaacaagacaaagggcttacacacagcatgtcatgtacacacaagtttgtattttttagagcaaaacaacagttaatgctggcaaagatgtttagttatcagggattccataagctttcaatacactgaaaggcaacattttttgcatgtctacaaattatacatttgtttccacacatgtgccaaattttaccctaacagttaggactttttcaccaaatcgtagacatagatatggaaatcatcatcaaacttgatgaaatacacagagggtttggcttccacttggtgaatgaccatgccgatccttttggagccatcttctttggtatattccacatgcttacctattaggccatctacaactcctcctggctccctctctgttggaggagactcactggattctggcatgatgcggaggtcaccttccttataatcatctagaagctggtacatgtacaagacaggatctttctcataggtaatataaaaccaggctttcatgataggtgcttgagctaagaccatccccctccattcatccttagaaccatgctctccctcaaacatatgttccactgctttgccaattatggtatttgcaaggttggcatcactaatgtgagatgatgccaccctgtcagaaagaattttaagagacaaaaccctttcatctctgtgaagttccagtccatagacacagtcaattccatcatatttcaccagataaagagagggatttataggcacctgatccagaacggttcctttccactgcgtgatgggctcatctccttccttccatccatgagaaattctgcagcccacgatgttcctgcggggctgggatgaaggtcggcctctctgcttcttttgggagacttttttctttgtcatgtttgcagacccagtggcccgtcctgcagctgccctggtttgttgcccttcggcttcctgtgcgttgggggtcttcatgcctgctgggggaggagagaggatagagagacacacccagtgtgccacaaggcaaacttttccctatagccatgtctggatgtagtctgcgctagtgcctaagtttcccctaggagcctggaagcaatgctggaaatcctggctgcatgcccgcagtgctctccctcttaagttcctttgggctgtggggaagggctggggtggtgcagtagagctgtctggggttaggaactctgcagaagtggctgggccacctcctcctagctcagagcccactgccctcccggaaccccttgctaccactggcgtccacttccaatccccttgcaaagaggccttgaccggcacccactgccctccttccctgagcgtcccagctgctgtccacaacaccccctgcctaccctaaccacttctctggtacccaccgcccttgcttcccggcgctcaccttcaaatccttgtctggctcccgttcctacccccttttcatgttgctcaccgcactcccccaccccacccttgcctggcgcccaactccaccccatgtctcctgctggattccttcccatccccctctccattctggcgcccactaatggccttgccctgcctggcgtccaccgccggggatcgcgggcctcacgtgcccaaatcggacacctcgctgctgcctccgctacgagcctgtggcgaaggagggtcagcaggcgaccggccgagtgaatgcttgcaagagcggggagggtaggatccgtagatgaggagcgtgtctaggagggcggcgagacaggcaaagaggaaggcagcggcgtccccaccgcttggctcgctagccctccgcctccctgctggcggtggcggcccctcagccacatcgggattccaccagtccctgctgtcgccgcggcagtctcctccctctttccgtagcgcagcttcctgcccagagagaggcctcctcttcctgtcaaacacccggctctcctctccaccaggctcccacgcccaccacacagcctgtagccccggcggagctatgggctctgactccgcctctttccaaatccggagtagttcgtgccacagtcgtcctcggaaccctgtggccccttcctcacccgtttcagggccacttggttcccacctccaccttcttagtctgcctgccctgctttccatcttcttggaattcgccttgctgccgccccgcgcccacccccgcgcccacccctgcccctgcaccgtcccatgcccttatggatttattctttacacgtaaatatgtctttcctctttttgaaaggatttggagttggaacagagaaattcactatggtaagtctgccattttgacccagtctctacctaatttttgctgactgatatttcctggcatttttgtttttgttttcgagggatttttttttccttttctttattgcaagataattgcatgtacaacgtgaacactatctacattttaggaaattaatattaagaggaaaatcatcaactgcagtcccatctcccatttttgagggcctcacagcaaaatattaatgctcatagttttttttcctttttcctaaacttttgcaaaactgggatttgttttttatctgcaattcatgtctattaatttttccaggaaattagatgttttctaatcgattttttcattcaacaaatatttattgagcacctgttacatatcttgcacttggtccgtaaaactcaattttaaagtgatttataatttggcttttctcccagtactgggcatttgacataatatttccacaataaccagtaatcagatctatgtatcggaatagaaagctttgcaaaaaaataactttataagaaataattaaagttatagttttataaatcagtggagaaacgttgggtattctttaaggaatgttgaaataattatttaaatattttgagaaaggttgtatactaatgttgtaccagtatcaatatttgatttattaaaaggtaaaaagcagcaaaataaaattgaacagaaagcaaatgaaccaaccaaaaactctgtaaacaaaacaatgcttaatggtatctttcttattcagatacttatggtatttgaatgaggggatgagtcggatgttaacagaacaactacacttaataaaataacatctacaaggaaaaatagaagtaataataatctcgattcaacagtcaaagtatgaaagaacattaaaatattacttaatgtcattgatcatgaaaaagcttcatatctagtgctgatgcaagtgaaagtttatacaatttttatggaaagcaatttgcagatatgtcatagtttcagtgagggctttttattttattttcatttttatttttttaaattatattttaagttctagggtacatgtgcacaatgtgcaggttagttacatgtgtatacgtgtgccatgttggtgtgctgcacccattaactcctcatttacattaggtatatctcctaatgctatccctctcccctacccccacctcacaagaggccccattgtgtgatgttccccttcctgtgtccatgtgttctcattgttcaattcccacctatgagtgagaacatgcggtgtttggttttttgtccttgcgatagtttgctgagaatgatggtttccagcttcatccatgtccctacaaaggacacggactcatcattttttatggctgcatagtattccatggtgtatatgtgccacattttcttaatccagtctatcattgttggacatttgggttggttccaagtctttgctattttgaatagtgccgcaataaacgtatgtgtgcatgtgtctttatagcagcatgacttataatcctttgggtatatacccagtaatgggatggctcggtcaaatggtatttctaattcta

SEQ ID NO: 1564154 - DNA, 4001 bp, Homo sapiens
tctcagcctatggttaggtactaaaatgcaaagtaattaccttcttaattctaaaacagttgagcaataggtgaaagaaccggaaagagagcaaaattattagccttacttttagtacagttagaactgagaatgcaacttgaacaagagaccaaaatgggcttcccactctttcccaagttagatttttgaagccacttgggggagatttgagattgcaaagacacttacccagccagtcacatgggatatctcagcaagcttcacacctcaatgagtgtagagtccaagtgccaaaaagagtgaggtgagaggtgttcagctacctttaatctattaacaccacccaagataaaaaaaagtatgagccaatggatgtcagactttacccttctcactaatcagttaaattgcggagaggaaccagtgaaaaggttggacagatgggcaaaaggtttcttccaaaaacgtatgagagggcagaagttccaatttttttgccaagcaaaacgtgcaaaaagggagaagatggttcttacaaactggaaagcaatcaagactttctgtgtctacagatttagagtctcatatatttggcaaatttcaagatgacctctaagatgtttttaccaaatcgtagacatagatatggaaatcatcatcaaatttgatgaagtacacagagggttttgcttctacctgatgaatgaccatgccagttctcttggagccatcgtctttggcgtattccacctgtttgcctaccaggctgtctatgacttctcctggctccctctctgccagaggagaatcattggaatcttgaaggatgcggaggtcaccatctttataatcatctaagagctggtacatatataatacaggatctttctcataggtaatgtaaaaccatgtgttcatgacaggtgcctgagctaagaccatccccctccattcatttttggaaccttcctctgtctcaaaaatatgttccactgctttgccaaccattatttctgccaagtgtgtatcactgattctagatgatgcaactctattaggaaggacttcaagtgatgacactctttcatctctgtgaagttccaatccataaacacagtcaaatccatcatatttgataagatacagagagggatttacaggtacctgatccagaacggttcctttccactgtgttagaggttcatctccatctttccatccgtgctgaattctgcagcccacgatgttcccccgaggctgggaggtgggtcggctcctatgcttcttgtgtgcagccttcctctttatcatggtaacagacacactgccgtggccagcgcccgtcctggaccgctgccctgcagctgcctttccaaacggggtcttcatgcctgcgaagaggagcacagttgccaggtggaccgagaaaggaaattaacaaaatcaatgcataacacggagagctttttctcctaatcagcgcacccagtaaacccacacctgtttttcccgaaagctagatagcaaagctggaaatcaaggcaccctggctgagtgcctgcagtaaccttcctccccagctcagtctggctaagatctgcggttcggtgaaatacgaagcgtttccccattcccctcgccctgcttccaacactacccggccaggaggcgcagattccccaccgtcccggattgcgggcctcaagtgcacaaatcggacacctcgccgttgcctccgcagtgagcctatggaggaggaaaatcagcgggcgagcagcccggtgcttgcaaaagctgggagaggatgatccataggcaatgagtgtctctaagagggcggcggggcaggcgaagatgaccgtggcggcgtcccttgctcttggctcctgcgtcctccgccttcctggtggcggcggcggtggcggtggccgcagcccctctcccacatcggactcccactagtcgctgctgcgccgcagtctcctccttctttttctagcgcagcttccggtcagtagagaggcctccccttcctgccaaacaccgcgtggcgcccctcccccaccaacctgtaccacagccctgggcgtggaaggtgctcctaggctctcggtctcgcagcttcctccaaatcagaagctgtggagcccacaaccacctctctctcactgcattggtttacctcttctggtttagcacgcgcccctcccctcacctaacctcaaccctctgcgcccctgccccttctgctttccacctttcaggaattagccctttcctttcccctccctccccgcgtccccccaccctccattgaaggggatttgtggtaggacaagagaaatgcgctactgctcagtgttcaggctgccatcttgacccaatctacgtaatttttactgacttgtcattcccagacttaacttcttgaggatttcttttcttttcccctgattgcaaaagaattgcatgcacaatattgacactgtaaaattcagaaaattgacatgaagagaaaataattaactaagccggcctcccattttccagggctcacagtgaaatattaacactatttccttttccttttttctaagctcttacaaagcttggataattttgaatatgcactttcatgtcctgctcatttccatgtagaataaacatttgctcaattttttagatattttctgagaacatgttttgtagtagcttcataaaattaagcattaggatttttcataattttgccgttgcctcctatcttcagacgtttaattgttaaatacctataaattgtgcttgcgcatgaattattctgttcacttgaacagaataacctagacactaaacttagaacaattgctataattaaaacaggaatttgtgagatcataaatctgtggagaaagacattttagaagtgattcaatcagttttatcgttacagccatcctagtgggtatgaagtggtacctaattgtggttttaatttgcatttctctaatgactaatgaggatgagcatctttttgtgtgcttgttggacatttgtgtatctttggagaaatgtctatttcaagtgctttgttcattttttaaatgaattgtttgtagcagggctgttaattgttctttttaaattctggatgagagaaccttatcagatatatgatatgaaaatattttatcccgttttgtggggtgtcttcactttcttgatagtatttttgatgcacaaaagcttaaaacttggttgtgcgtttggagtcacacctaaataaacactgccaaatccaagttcatgaaaatgtacccctatattttcttgtaaaattttgtttgtttttagctcttatatttatgtctttgacccattttgagttaattattatgtatggtgtgatgaaggggaccaaattcattgttttgcacatggatatccagttgtctcagcaccttctgttgaagagacaattcttagcctttttaattgtcttggcatacttgttgaaaatcaatttagtacagatgtataggcttatatctggactcttaattctatttcatagaattttatgcaaaaaccacgtttttaatttatctttatgcaagaaccacatttattttttgattactgtaactgtgcagtatgtttgaaatcagtaagtgtgatttctctgaaaatattattaagattgtattggctactcatgctccttttttttttttttttttttttttttttttgagacagagtcttgctctgtcgcccaggctagagtgcagtggcacaatctcggctcactgcaacctccacctcccgggttcaagcgattctcctgtctcaccatcctgagtatctggggttacaggcatgtaccaccatgctcagctaatttcatagttcctttcaatttcatatgaattttaggattgtcttttccttttctgaacaaaaggactgttgggattttgataagggttgcactgactctg

SEQ ID NO: 1564155 - DNA, 4001 bp, Homo sapiens
atccaacctatataaataaaagcaccagtatgtattacagcagtgttattttgaaaaaaaataaaaaaaggaaataaaagacgatcaataacgaaatggttgaatgcctttttggtacatcaacaagtactgtgtattcagctgttagagtaagggagggagggggagagcaagagtgcaagagagtaagagtgagggccagagagagccagagagagcaagaaagactgaagctactgataagaagagatatcatctacatgtcaagtgagaaaagcatgtggcttgccatttttacagaaactactagaacatactttctgcatgaagatggggaaaataggtggaaggatgtacttcgcatcctcaacacttgttttctgggaagaaacaaggtaaggaaaggaaggggtaaggacggggtgtgggtttacaccattaatttttcttaatctatttttgcattgttccaatggttgcaaacactttttaattttctattagcacccaatttaactgttaagttacagaacaaggcaatatcaaaagtagcaaagtacacttgaggcaaaattgtgaaactagtcaaggtaagatttgttggcacaataaaatttatccactttcctgaatttctgacacctaaactcttctctgcgttcacaactacgagaacacaaaataattcacatctaacagatccacaacttctctaaagagcacaaagaatttaaggagttttcaccaaaccatagacataaatgtgaatatcatcatcaaacttaatgaagtaaacagatggcttcgccaccacttgatgtataaaaatgccagttctcttggacccgtcatctttggcatgctccacctgcttgcccacgagactgtcgaccacctctccaggctcctgttctgctgtagggaaatagtagttggaatctggaataatgcgtaagtcaccatctttgtagtcatcaagcagcgtgtacatatagagaacaggatctttctcgtaggtgatgtaaaaccaagtatccatcacaggagctcgcgccaggaccatacccttccattcatccttggtaccatgttcaccttcaaacacatgctccactgccttgccaatcagggaatctgccagtcgtgaatcgatacgaggagttggcactctctcaggaaggatctctagcgctaaaactctcttatcgcggtgcagttctagtccatacacactatctttgccatcatatttaatgatgtaaagagtgggcttcacggaaacctgctcgagcacagtacccttccactgctccactggctcgttgccttccttccagccgtgttgaatgcggcagcccacgatgttcctacgagtgaggaaagtgggcttgcgccgttgcttcctgtgggtgtgccttttcttcatcaggtatgcggacacgccatctacccccatcggaggcacggttggaggagacatagctcagggattaagagggcttggggaaagctgctgccctggtcgattaaactgacaaaaagtcaacactatgcaatatgatatatatattttttgcgatctcaaagacctggtctgtgctcccttctccaagtgcaaggctctcaccaaggttttggcagaaacgctcgaactctaaccgtgagcactgggacagcgtgtgcctctccacagtgctttcctctctcgccctagaagggttactgcagcagtggcggctgacgtagagatggcgggctcgcgagtgctgttcgtgccttgcgtccgccccaaccccgaccccaagtccccgaatcggccacttagctgttgtcgatgctggtgcggctgcggcacggcggcagaggagacgacggggacgaaaggcaaggagtaagagggatggctgcagcggcaaaggcgcaggcggcggcaagtctctggggagtccgcgcggcctgggcttcgcagcgctagctggcttggcttcactctggcgaccgggtctttgcggcgcagggaacccgccccctctgagcccgcctgagccttggccccgcccccagccatcccgccttccgctctgcgggcggcagccgggctggtcagcgcgcgtgcccgtgttcagtttgtattgacacacgcgccctctctttcatttcctcctccgcccctcgaccgtttccctcaaacgccagccagacaggccgactcccctcctcctcctttctggcggtctgctgcccgccagcctcctacacagtggctccatctgctttctgtcttccaggaattcctcacttaaaaaaaaaaaaaatgtaaaacacacgcacacccagaaagagtttgtgcatacaaattattttctttcagtttaagatatttaagatgagaataaaaaccctgtgtacaatttacagaccaccatcttaatccaaaatctgttttatattttctacctgatcatttctagtaattatttttattttttttttttttgtcagaatgtaaaggtcatgtactgacattgtggagatcttctaaaattcagtgaaataaaagacgaaactaccattaattttaccatccagactgcaccaaaatgttaacaatactgttttctctcctattaataaacctgtacttatattttataaaattgggagcatatttcatacttttataacttgtgtttttcatgtatatcatgaacattttccaagattgttaaatactctgaaaacatgatttttaatagtaatattaaatatttgtaatattccttttgatagtccactatttatcctacatgatctataacataagtataaataaaaacattttaccttcataaatggatttattgtctaaaccattttttaaaagaagatttaatgacatggagagctgcacatgagatgagtacaatgaaaaagcaaaatattgaaacaatattgtggtcttaattttgtagagagagaaagaagggattttttgtgtatatatttgctgtttttctgattataaaagtgctgcatgcttatatcgaaaacctgcaagaaaagaaagtgtccataatttcacttaccttaagtcacagagctgctatgaggattaaatgagaatgtctgtaaagcttttaacactatatcccacttacaagatgacattaaaatccagaagagtctagggttctcattttcattcctctactcttcactggtgaaaagagaaagcgtcatataatcatgagtaaaaaaggcaattaattcacctggaaacaaaaccggggcaaaagctgcaaggtgtcaatactggttgcctgaacatttcattaccttccaagtcagtgacagagagacctagtcctcattctgtttaatagctggtcacacagaatgtgtaaggatcctccagttcaccatgtttcccaggcaaaggacttcagagatgggataattctttaatgccatattacaagatagtaattccaaggaagaaggtaaactacatgtatgaacagttatttccaaacacttagaatgacatcgtggtgtatatatattcacacatatacacaacctacacattcatactcaaagtcagaaggtgaacgtatgtaaatgttatgccattatgttccacaaataatgtcttccaaataattccccagaccaagatacaccaagcactttttgctcagaagagcagttgacacatgaaagaagaagatgacccacagggcacacaaatgcagggaaaacagtttcctcaggcctttggttacatccttcaagggaattcttgcttacaaccccacaaagtggcctgaagagacaaaaaaaaattcgaataccctttcttctccaaaattatgattctaatattcagaccattcactaacatatagatttaaaaggccttatcatgctgatataatgttcactttgtatgactcccactggacaataaacttattcaagaagggatttttatcttgcat

SEQ ID NO: 1564156 - DNA, 4001 bp, Homo sapiens
actcttaacttgtcactttgctaccctagtcctattcattactttaatggtttcattaagactcatagcagtttatttcaaaccagggagtcttgcagttttaagaccttgaatgttaaaagatataggtcttttagtgatgaatgatacagggaaaatttgtaataccaaatgaattcacatctaatcctgaggaaaattgtaagaagaagctggttgttcatctaagaagtaggattttttttttaaaaactcaaatccttttatatgacacaagaaatttaaggtctagtcctaatggtagctctactttgctgcgtggctgtaggcaaatgacctccgttctggtcctcagtttcttcatctgcaaaataaaaggagggtttttaaaggcctttcttgtccagatgctctaaattttatgttgggtttgttggttgcatttctctgtttcaaaagtctttaaggaagaattagtgtcctttcctttaggttctttacttcctcactactcaactcctcaactcttaataaatatcttcaaatctaagtcactcagatcactatctagactgtttcacagctagagagacctaaaaacagaacacaaagagacaaatatatagaatgttatagtaatgtctttgtatatgtttgtttagaggcaaggagagcaagaccaatatttcattgtggataaacggctagcctgtgccttatttgtatttatgaatgcagccgactttttgggaacatgatttaacacctggtatatccaaattcatgtgataacacatcatgatacagtgaggttttaatattaccagaaaagcaacaatagtttccatttcaaaatagattttctgcttaagagttcaaggtctgttttctgttcatccaacttggtttgcagcatgcagaggtgaagaatgataattataattagcttcatggaagtgagtgtgcagtaaaccattgccctaggtcttatcaaatgcctattggctaactagacgtgctcacaggttctcacttttgacagaatctccatatgccacacagagacatgtgcacacgtacccaggcacggatacagagatttctaaatcactgctctgactcaatgtaagtggggggttctgccgtgtcagcttgcgccatgtctacccagggcaaggtgatgtgatgaaatctgaacgatgcacagcccagacttgtgagccaatagcagaggctagccccatgctgacaggatgcccgctgggcagccagactggccttagcacgggctctctctctgtcctcagcttgggtggttaggctgcgttttgaggggtttaggcaagtaccaaaatgcatttaaaggttaacaggctagaaattaaattgacattcgcctagaaaaatattattttgaagtcctatttggatttacacatttccaatgtggatagttttctgcgagagccgatttatttaaatataatttaaagggttttcattttattttatccatgcgcttgcgcgcgcgcgcccaagcgcgcggcacacacacgcacacagagacagcacaggatggctggaatgaatggcaatctgtgcattgcatagaaagaattctgggtttttaaagagctaatttctatggcttaccttgaggaaatggtttatccatgctgagaaaagcagaagaactaatgccccatctggctcaaaggatctcttctcctcagtctttaggtttctccacctctcttcggaaagtctgaatgaaaactccttcactggcaggcagtggagccagaaacagagatagttctgtcttgttctttgacacagcagagaaaacacaaaacaaaacaaaacaaaacaaaacaaaacaaaaaaacgggggagggggcgagtcaaacctgtagtggcatatactttgtatagattttacaggcagatctaaatcttgatggacgtatttcccaaagaaagctcagcagggtaagttgttcacctcctcctctttctcctcctcctcctctctctcctcctcctcctctctctcctcctcctcctctttctcctcctcctcttctttctcctcctcctccgcctctttctcctcccccttctcctcctcctcctgtttctcttccccctccccctccagtattttccttcccctcctcttgccctcccctttccctcctccccttcttcctcctttacctcctccccctcctctttcgcctccgcctccgcctccaccttggtctccctctcctccaatctgacagatgaaccgaagcagcagaaactgcagttgtagacacagggtatctcaacggagcaatagataccgccagtgtgtgattatttatatggctcagggtgtgttggtatataatctgcagtgggggcagggagtgagttggcagtgtgttcagcttagctagctggccgttttgtgaatgtagatgatttctggaggtcttgtgaatgggttataggggaggatgggaaagaagggatttattgctcctcgttataatttctttctctcccccctccccccgcgtgtcgttggctttcccggagctgtagctcttaatgcttggcgaagtggcgtcatccagatgaaattgaatcgacccattaaaactccccataggaatctctgtatccggtccctgggtaatgactgaaacaaaatttaaaggaacgtgggggtggggtggagagtaacaattttaaggaggtctcatttaaatatctttgccaatcacatttctaccaatctactcagcctgtgccgagtgattgcagcttcaataagatgaagagaaagagcttctcctttgtttaagggttcctcccacctcttcctcatgtgttcccactttttcagcccatccattgccactgggaaaccattacccaacctactttccctttagcatggcatgcattcaacaacaaatatttattgagtaccttcctttgtgctaggtgttgtggattcctgccttcatgcagcctccctgggactgaaaataaagcagccttggacattttctcttaaagccaaggacaaagctttctgtaaattaccctcagtccactatttaattcaataggaaaggatctttcttctgggcatccagacagaagaacttggatgacagcagctttatatttaaaataaaggagatctgatttcaagtcctatttcaatggacaagtggcaggagcttggccatcagcattcttaggatgctttggttacctcatctataaaattgagatggtaaatggtgacagttcagagtaaaacaaactgtgtgagtcaggaaactgagactcttaatcttattctgactccttgtgtgaccttagcaattttcttcccctctagagtgtcaatttttacattaacatgaggggatctgattaggtaattgctaacgtcctttctacctctgacactctgtcatttaccctctctcagatgtgttaagaagacaaaagaaataatgagatttaaaaaagtacggctgtgtgggtctgcatgctcctgtgtgtatgtatgtgtttaaggtgctccaaacagttgtgatgacatgtatgtaggtatatgtgtgtgtgcatgcgtgcatgcctgtgtatgtgcgtgtgtgtaatttctaaacaaatccagctctcttttcccatttggaatttctagtcaggaaatctcctgtaaattctcttttgtgattcactgtaggttcatctacacttattcaacaaatatttattgcacattaactatgtgtcaagcactgtactaactagattcaggtcaaatagatcagggttcaaatttttgctcctcaacctgggagctacctcccttgaggcaattcaattaacctctctggcatatagcaagcaccccatgaatagtagctatgaatgttaagaaattgttcttgctctaatgtaacccataggagaggcaagagatgatt

SEQ ID NO: 1564157 - DNA, 4001 bp, Homo sapiens
tgtggatgatcttgcacttggtgtggaggtagtccaggccgtgcagcacctgcagagagtcgcacctgacctcctccaactcccgcccaggccaggctgggcagcccagtgggtggcactcacctgcctcacgatgctcttcacgcagggcacgggcaggccctggtagttggacttgatgatccatttgaggagctggtggcccagcacctccagcaccatgcacacatctgggctgggagtgaagggcggccagtggacaccagctgcggcacaggccccacccaccctcagctaggggagcagcaaggcttgggccgtgtggaggtggggaggcagggcctcccctgggcagtcctggtcaccattatgctggtgtcatcatcgatagtgtccctgtcagtctcaacaggtatgccagttgggatggtgcattttgtggtcatcctagaggtggcgctggaggagcaggcacagaggcctctcgggccagcccactcccatgctagttatgccatagggcctcttggcagtcccccaaagggaaggcagtgccacagagacagcacctgccgtttggggataatagcaacgtccatggacaatcaacgctagcttgttactgcctccacgtaaacacagttacctgggggcggggtcgtgccagaggctcccgttactgggagggatgcaagcccattgtgcgggtctgcagacaggctctagcagcgagggcccccccatttgccggcccttggctgccacactgctttgctcttcctgcaaaggatacggactccattgactcctgagatcctgaagtcatcaatgagctggacaatggtctctcttttggggtcactggggtcgctgtcccggacctggagcaaaagccaaggggccacagatggttccaccctgccctgaagcccacagctcccttcagtgtacccttctcctgctccagctgggccctgctggaagaaaggccgccaacccctcctgtccctcgcctgttcctccagatcctcccccttgggcacagccagctggaggctgcccctcagggagccccgccctgccccacagagccccggcaggccttgcacccgcattgccaggccccaggcagctccaggggagctgggagtggggtagggaggtgcctcacacatttcaggagcttgatctcatccacagctgtctccgtgtaatgccccgcactcttcaccactttgagggccacaaagcgcttgcgcctgcaataccgagacccttgtaggctgtggccctggcaggacccacggcggggatcagggtggccccaagcaagcccagggacaggatcccagccagtgctgggccccggaggcgaaggaggcactcactggatgtcccagcagagccagacggtggagaagtggccccagcccagtttgcgcaccacgtggtaccgcccattgaacacgtcgccgatcttcacagggtggtagccgcctgcccaggggagatgtagattggggtggagggggttctcactcccctgggcccccgaacacctcggccccattgaccatctggcccatgtgggcccaggactgccctgggtccctgcagtggccgtgaggccgcatgtccccaaggccaagtctcacccttgcagtagtctttggggtcttcctgttcctcgtcgtcggagcccagaaggccctgcagcatctgaggcaccggtgtggccagggctagttcggagcccgaggactcgggcccgcaggaggcctgtgagctgcgggtggggtgagtggcagtgggcatgagagacgccaggggctccgggtgccccagccgagccctacctgctgctactgccgccgctgccgccgctgtccccaccaccgcccgtgctggcgctcatcccggccacgcagcccgcagctccggtgccccgggcggctgctcctgtggggcccggccgcggcctgcgaatttatagccttggccggccgctgatctcacccgcctttataaatagcctcccagctgctcggctgtgggcaaggtatgcggtgcggggagggggcggcgcgacggcggccccagagagcccggcccccgggcagaggcccccctcctgctccaggcccaccctggaggcagagggggctgctgcttggggaccaggggcaactgggcccccaggctgagcctccgcaccccagctgagggggaggtccacgcgggggtgaagcagcccgtaccccaggtcgggctcccgttctccggtgcggactgtggggatgtgctccacttggcaacctggtccttaggccaagcccccaccacctgtgcccctgtgggcatcctcctggaggtgcccttctcattcccatgggaaccctgtccctggctgctcccagccacttcctgcttcttctatgtttcatcagcccctaggacaactgggagtccagtgccctctgaatgtggcgtcactggggacccctcatttcccctaccagaggcaacaggcctgctgaggggaggcctgggagcttgccagcccagaacctgctcctgcgacgctgcctggcgctctggctcccagcgcctgctcttcctctccaccatttgcaaggtgcctgtcgtgggctgctccatagccagacatgagggaggcagcaggaagctgctcactgctggggacaagcaagcccatagccacttccccatgagtgcggtggtgactgaggggcctgtgacccaggggctgcatcatgagagaccaggagaaattgggtccccagaagcatccagggcagcacagggcacagtggggcaaggcctgcggccaagacgcgttccagcccttcacgtgctggccacggctgccgcatggttcgagggcgaggactagaggcctggtgtctgtaggcttaatgtggagcttgggtgatatggggttggggggtggtcactgagcttctgctcagcaaaagatcactctggccacttcaaggacaagggaatggagaggcgagggtggagccgggaggccagctggggcctgacagaggagtcccaatgaaagggagggggctcggcagagagggtgtttgtcccaagatattggtgcagtgtccctgtaccagggtccgtgaactggtaggggtgggccaggcattgctggaggggccagcgaggtcagagagtgggagggaaagtgaagcccgggtacctgatggcctctctttgtctgtgggtagcaggttataggcatggggctgagggactctcagtcaggagagcactgagtcagctcctgcagggaacagcaggggctggggattgggccctttgtcaaaagacatttctggccaggcgcggtggctcatgcctgtgatcccagcactttgggaggctgaggcgggcagatcacctgaagtcaggagttttgagaccagcctgtccgacatggggaaaccctgtctttactaaaaataccaaaattagtcgggtgtggtggcacacgcctgtagtcccagctactcgggaggctgaggcaggagaattgcttgaactccgggaaaaagaggttgcagtgagccgagattgcgccactgcactccagcctgggagagagagcgagactccgtctcaaaataaaataaaaagacatatttctattttatttccggatgtgattttccagcaggcaaataaatacaatggggagagggggaaggagggggatccttataaattagaaacaatctcaggtggggggaaggtgggtgggctggcaggggaggtggcaggcagggagcccactgctgggcacagtgcctggctttgcaccctgtgcccccaggctctgccagctcccctcagtggctggctcggttccggggtcataaggcgctgcggtgttggtggatccggcttgctgctgtctgagccagagctcacaggtcagtcactttgttttccaccagggcggcgac

SEQ ID NO: 1564158 - DNA, 4001 bp, Homo sapiens
aatcagcttcagctcatttgtggtctgagcagagccggagggcaggttaggagtcagtggaggtggtggcaagcaggaacatggtggctaaaagttgggagcagcttgcaggctggcagagggagccaggaaagccagggataggtcccaaaagacaggtggtagtgaatgcccaaactggcgaactcatgattctgtggctgggccctggtagcaagctgtactatataaaggtggaagatgagagaaaggagaggggagggcaggggaggagaacggagggaggtcggatggaaaaggagaaggggtccccagcttgagaaaggctcaactaaaagttgaggttcccaggcagctcacaggcacctcccaactcagtgcggaaaagctacctctagcttctcaccttatttgcccgctcccagaaagctgcttctgggacgcttaatgacttcctcttcccctacaggttcattttaacctgattcctgctaaagggggtgggagaggaggtattaacacaccatgggaataacagttgcctggcagtaaggataaaatttcctttccactttaccctgaatcagttcctacaaagcagcttaaaacttaagagtcagctcaaaacacaaatgttcctgtttattaatttacaaatttgttctattcattcatttatttaggtgcgtgcagagaatttcccgcagccatccctacatctcccaagcacactgctagaaagatgggcatcctctatccttctaccagaactcagtaggttcatttctcataccctagatttaagctgcccacggtgttgaacgcagagccaaatatttgcacgccctatagccgacgtcacccactttcccattaacactaaattaaaacgcatccatggatttcctctccattccgaggcaacaggagtgcatggcacattgccctactcccctgaagctcttcgctaacctaagactccagggtgaggaagttagctggagctttttaaagtgcatctccaaagagaattttgctcacaccatgagagcccccaagaaacaccagggcccccttagatgccggagaccacgccctccaggaataagccgcaccctctgcccagcagatccttgcgcgagtagccctctttccctggggctaatcaagtgcatgccacatgtcaccactctcagctggcaattcttcctcagaggcgcagactttctcggaatccccagcagggggggttaagagattcaggggaggccccgcccgtgccttccacaaaagtcgctttaccgtggctcgtgtcctgcggccccaagggggtagcctgggacgtgtagtgggagggcatagaggctccttccaggacaagctgccagcctccagtgggcaaccatgtgagaggcaaaattctgggggtgagaaagtagcaaactagtctgcggccaaactttctctgtggagcctcctacaccgaaaagggtttgattggaactctggaagcccggacgcagaaggtgctagggctcccgtcgccgcgagggcgccccgcgcctggagatgggatggtcagttcttcccggcgcgtgcccagacaccagccccgatccgcatcatccccaccctcgggctgcgaaagaggagttctgcgcaaacaaagggcgcccccggcacctccctctatcccgagcgaagggtcccaacggcgactccgggggtctttggtgcccagctgaggaggcagccacgcctccgatcctacctgggaagctgcggctgggcgggacgcgcagcagcagcagcagcagcagaggcggcagcagcagcagcagcgcgggccgatgtgcggggctccccatggcgagcgggcgcttagctcgcctcggcagcgcagcgcgcttcccgggggcggcaggagaccgaagagaccaagggactgcgtgctagcgggcgggcgaaggccgggctggaaaactcctcctctcgcctctttccctccctccttcctgcctggggcctgccctcctttctccgccccccctggaacactgcgcggttcggggctctgacccacccacctcctccttttgtgccagcgctttttctggccagagagcgctggagacaagccccagcagagcgaaatatcctgaagtagctttctttgccccaatttgcgcgccccctcacccggaatacacacacggtattcaatacaaccgcctcgaacatcccagacgtctagaaggataccatctgtgcagaaagctgcgtgagtcacacggaaacagaaggggcaaccgaggggattcagagtggcccactgcggccggatactatggccatgttctctgttttgatcctcacgaccatgccccaagttcgctattaccatgtccactttctccaataagacaccgacgcttagaaacttgcccagattcacccccgttactggcagagcagggactggaacttaggtgtgtagttctgccgacgtcaaagtccatactacagattttttgttagtttgtttctcttttgcaaaggaataaatcaaggactggaccgggtgcgtgcctgctctgctgcggtttaggatggggcttgaggttctccttccaggatcagctgatgggagagcacaaggcacagaaagttctctgtctcacccacagccatggggatccagctgtaggttcctgcagccagatttcctcatttcctgggttgttctcaaccaccccaaagataccacgaccagactggagcctcttccctgtggcttggcatcgctggatcctggcatcaggacagggtttctaggctgcccgcaggacggatctggtttctttgaggcatttgagtaagcctctcatagttttgtttgtttgtttgttgttttggttgtttagttcttgttaaatcagtaaggcaatacgttgcccctttgctgtctcagaaagatcttagctaaggcaaattttagttggagttgctgcattaggttgtgcagtttgggcactgtacaaaggcatccagaggaaggggcaagtgggagccaaaatccaaatgcctttgggttcagggagctttgcgtcttggcaggggccacatccactagaagggcatctttctctctgccacagtagtctggtctgatagctaggctaagagccctgggggcactcacctagaagttctgaatttgtttatccagaaggagtgccatttcccaattctcacaaaagccccagacttgaacgtccatcttaccctctctagcacttggggggacttcgctccatctcctgtgggtttctccactgctgctacctcttcagggaaccaacaacccttaaataaccccctagtcgcaaggaaatgggggaggtcagtctattctgtggcctccatcagaccagactttccagggagtcattctcaaccttgtttatgtgggtcacctggggagcttcatgaaaataccatatccaggctctacctcacactaataaaatcagaatctttaggaatgtgacctggagtttgaccagatgcatatttttgtctctccccaatccgctaagctccacggtataagttttagtataggataaaaattctagaccaggagtttctcaacttgggcactattgatatttggggctagatgattctttcttggggagggggactgccttgcacgttgagagatgcatcgatggcctctatgcaacagataccactagcaatccccctttccccagttatggcagccaaaaaaatgtctccagacattgccaaatgtcccccaggggaaaaatgcccccaatagagaactacttctttaggtctgtaaacaagggttaatgtgcaccccaaattccaggtccaggatagcctggccagcagccttcctttcctatgtcacctctgaagcaatgtgtcttcaccacaaccagtatacattctattactgggctgagaag

SEQ ID NO: 1564159 - DNA, 4001 bp, Homo sapiens
attaatgaatgccttttatattatctccctcataaggatctttcatgttatagaataacaagactctgtttgttatttatggtcccttttcctcccaggaggaggaggatgtaaaacaaccaatcttcatctgactctggtgggatcagatgcaaatgcttcatggtccaagttatagagagggacattgaagtactgagaccaggaaaaggccaacatgaagttacacagaaccaggagggaacctggtgacctaaaggctgccattaggtttcattcattcaactaacatttcctagccactaatctgggaaagcgttagcatatgtggtctaagaatttgaacactgaagttacacaggtctggatgtgaatccaattctgtcacctattagctatagggtcttggacaaattttttaacttctctaagcctcggtttcctcatctataaaatgggaataataatactgtctacctcatgaattgattattgtctgtcatatagggaagtaatttatatattagacaatattattaccaactttgtattggacaggactgaatgtttcccttctctagtgtcccaggcagtaactggactctggctctgttcttagctttgggttttaaggcttggtggtttggtagtggcttctggctttcaagtccagcctaaccctctagttttaccttgctgagccagcaggaagtcagcgaggtagaggaggacctgctgaggtacatgaggagagggtgaacaagctccaattgccctctcacttcctcccctgtcctcaccctaatgggacgagagttttgtggttcccagcgggcaaatactttgtaaatgacagtattaaaacttgctgcccattggtataaattggccactgggcatttcagcaagcacccattcactcacgggctttcaatgaaatgccatgctcaggggaggagtcagtcctagaaatagagaaacaaaaatgtggtagattctggccagagtccctaagggacatgcaaagcccaagaaagggaaaagtgtattttttagttcattgctacttggcttcagattttgtctagaaagtgacagggaagcaggacggagaaaaagtgagagtaaacgaaggaggcaagggaagtagaaagatgtgggaaggaaggaaagaaaatctgacagagctgaaggaaagagatagataaacgcagaaagaggcaacaaaaggagcagaaagaggagattaaagagaggtccaggaagtgaacattagataactaatcactgacccctctcccacatctagcctccatccagttccttcgttctggagcagaggcattcctttttcagatccctgaacctgtgacctcgtacctgcccagcttctccccaatctcaggcttaatacttgactcaccagagtcaaccatcccatccctctgctgtgggctgagaagttgctgggaacatgtgtttgcagtcaggtcacggcacaaatgaaaagcagcatatgatccagcttcataaaagaacttccccccgacctccacccccagccatgttgcccaagttctgggtctccttatccccttcacaattgtgaattggggtagtggagtgtggaggggttagttgcagatcttacctgttttatggtattttgtgccctttttctctctcctcctctttctccttcctctctgctcctctcatcaattggaaaaaaccttctactttaacattcctagaacgagtggctcctggtctgtcccggcctccgggattctgttaacactgcccagatgttacgacgtccacatctgccaaaagtttccttaaagctatattatccctgaagctatagttattcctctctcagagaagggttttagaaagatgggggagaaggaacacagggattagaggaactcagtccgtctgctgcagaagagggggaagtgtgaatggcactggctccaagcctgtgaatatagtgatgactaacacagaggctggcttaagcggcctccagagatgtgttgcactgaagaacacttctttttatgactcagcatgacataagaattgaatgaaaaggaatttcataaacactcacaaacaccaaagagaggggaagactgtagctgactttgacattccctaagatttctcctgtaattccttagactcccaactctgaactgtcttgcaatctatatggtatcacgtcagatacgctttgaaaccctcatgccagtgacctaacttctctggacttcagtttctgttaagattatattgtttacaaaaaaaacacaaaaaacaaaaaacaaaaaacatgtacttcttgcccgaaggatcaagactgatttcccacactaagaatggagggaaagcatgcctggagaggctttactgggaggctgtttgagcaaatctagctgcttcccagtggtctctgatggagggctacatttcactcagcaagattttttcattttagtatctgataatgagactattctgccatagcacagagcagctacttacaatctccctcccctcacggttgacatttccatctcttggaaaatcagtggttatagaaggaagaattttaagctgttgtagaaagggtgtttctcctgtgtatgcaagcaaattggtaaccccttctcagtcataaggggaagaattgtacttatgagaatacaaagttcaaaagcaagcctgagcctgcttcatttccaattcacctgtgacaaatatgtattgagtgtctaccatttgcttaacagtgtaatagctacgtaaagaagatgtggctgggcgcggcgactcacgcctataatcccagtactttgggaggccgaggtgggcagatcacgaggtcaggagttcgagatcggcctggccaacatggtgaaaccccgtttctactaaatacaaaaaaaaattagccgggcgtggtggtgcacgcctgtaatcctagctacccaggaggttgaggcaggagaattgcttgaacccaggaggcagaggttgcagtgagctgagatcacgccactgcactccagcctgggcgagggagtgagactccgtctcagaagaaaaaaaagaagaagaagaagacgtgatcgtcatggccttattcattccataaatttatcaagtatctaccatgtcaagagtggtggatgtagtggtgaacaagacagacaaaatcccaggcattgtaatccataattaattcaacaaatacttgttgagcatccattatgtgccacatatggttctaggtatttgagaaacatcagtgaacaaaatggacaaaaatccctgccctcatggaacagaggagacagacatcaaacaagcatgttcttaattacaattgtgtgtgtttagggaatctttactggtcatctactataagctaagcactgcagatacagtggtgagcaagtaatgtgtgattcttgatcttatggagcttactctccagctcccagagtttatgtttagtaggggagagaagagggacacaatcaattagaaaacaatacaactccctaccgtaatagactgccaaaagctgtgttacagactttaaggacgctaggaggaagtcagaggagggggtcacctgagaagaggtgggccttggtctagcctcaggcaaaggaaatgccatcaacaagagttcacctttaggtcagaggagggagaggctaactgctaagaggtttcagggaaagatagaaaacaaagctgaataaatagggtagggccagaaaatcagatataggagtttattttaaactcgtgtgtgagaaaatagtgaatatattaaatgtgtgtgtctgtgtgtttgagtatgtgagagtgtgtgtgtgtgtgtgtgtgtgtgagagagagagagagagagagagagagagaggaatatgagagagagagggaacaagcaaagtaatacattctaccagagttttttc

SEQ ID NO: 1564160 - DNA, 4001 bp, Homo sapiens
tccaggcaggcctcggctgcggggaagagggagagatgcctgggtaaggccagctcgagtatcccggtctgagggcaggatggcccggccctgcctcatagcacggatcagctggggacccatgcgctcttcctgccccttccaggtgggatatgcgagacagatccaagtgctcggtcacaaatgcaatggcaacgtaggcgggatggctgtgaaggaaggctggggaggggcaaggccggctttctggaggtgtgcaggaagagcgaactggggacaggtgggggctggattcactggacaatacatgccaacacttggacctatgacacggaggcccgggggccacgccagcctcaattcagagccacaaacggcctggacgagttactgaaggcatcctcagcagagacatcgggggtgggggctgcaggcaggcaatgcactggggctttcaagatgagagaaagggtctctgcccccggccagttgacagaaggtgaagactggccccagcgtttcctgaagaagtaaacgggagagactctggttccagaagcacaacttgttagctgtgagagaaaggaccttgccttagccttctccataaccagaggcccaaaggaaaggaaggctgccgcctacatcagagggtgtgaaacaaaggctccccaaagtgggaatgttctcagccacccgctgtccaaatgtggtgccctggcagaacgatggcttcagcagaggacgtcagagaaggctctgggtctggaccacaggaggcagatccctaggaacagcgtggaggcagttctcaggggctagatcccgccagcccttctgtgtcctgcctaagttgggcctgcttcctgtggcgcaggggagcccccgaagggttttatggccaggcttgtcctctggatacgtccctgactatagttcagggaattcctgaggggcagatgaggagtgtgcggaaagggaggccagttaggctgccaaaacgttgcaggcagcaaggctactggcctgaaggacggcagaaaagggaatgtggagaaagccgcccctgtccagtcctggcccccgggcccggggctggctgctgcagccacctcctaaacacactctggagttcagacctcagcccctcacgaatgcaaatcgacgggacccctggtcggctctgccgaaaactctggtaagggtaaggcagggccctccggaaaagccagtcttcggcctggcactcaaggccctgcgcacctttggctccccatctaactcgccccgctcttgctccctctcctcactgaggtcccttcctagcttatgtggctcctccagccccgtttttggccgcgatcgctcagcgctacagagcttcgctccggtccgaccccgcagggagcgggagccgggacatgtgtcacgttccgtgctgcagcttgggggccgggcgcaccatggaggctcggggactcctcttcgtatgggcagacaaggaaaagcctggctgccggtaaacgtgcgcgaggtgctttggtccccccgtcccaaggccgcctgcctctcgggggaaggcccggcccgcagcgacggaccctgaaaggccggacccccgcatccctcctgcccccaacaccacctgccgtgggtcagaggctcgcaagaaagaagccccggctgggccgctacctgagcagcgggagaggctggacagcaggagcagcgccagggcgccgagagatgccatcgccgccatcgcctcttctctgcctagaggaaaagaaaacgagctcccatgaacacgaggggcaaacgaggaagagcgacgcgtaagtggcagcggcagccaatcgcgcaccgaacggctgggccggcattgtgacgtctctggcagcactgacgtggcccctccctgagccaggggcccagctggtcgcggtccccccctcaacatggcggcagcggtgctctaggcgccggaagggggcgtgaatcggtgcgaccgcgcgcgtgcgcagtaccgggtccgcgcctgtccccgaaacttcgcaccccgtcgaactctcgcgagagcggtatctgcgtgtcgggacgtgcggaggctctcactttccgtcatggcgctgaaggtagcgaccgtcgccggcagcgccgcgaaggcggtgctcgggccagcccttctctgccgtccctgggaggtgagcagggaaagagccacgggaccgcggcagcggtcgcaggggagcggtggggtagccgcacccgaagcagtctggagtccgattggctaggggccccaccaggggcggggaaagggcttcgcgccggggttgattggccgcctccgctgtcactgaggggattggccgaagttggccctggaccggctcccccagggggtctgcatcgggtggcggggggccctccggacgggccgggagagtgggccacggcggctgtcacctccttagtgtccttgaaggagcccttctgaggcagtcactcacgtatcccggcccgcctttctcaaaccgcttcgggaatccggttccgggactcaaatttctccacggtttcctctctcgtggaccgctttgccacctatcccggtggcaaagaaccggactttgccagtcatcccccatagtcccccagtcttagagccccagatgccttcccctcgaggcgcctggaatgggaaggagctagggtttctgaggctgcgggggttttgcttctgctcttctccgtgtgcggtcttgcgtattcaggtccgagtcttctttccttacacttatttaagaagaggttaatttaggtcctaggtgggctggaaaccatctgaagcagctgccagccagcacctggccctgatgggtaagaggtttgacctctaggccatgctcccacactgagccactgcgtggccttaggccatttcctcctctctctgggttctagtttcccctttggaacccagaggggaggagacttcatgttctcaaaggatcctgtcaactctgaccttccagaactccgtgactttgcggccactccccagggacatctctacttgccatgttttctccttctgacctctgggggagactgcttgtgcctaatgaaattctcttgacgatgctgacttctcccaccttgctgctgaaaggacggcagtatatagtggctttccagaggctctgatggctccagcaactgggctcctgtaggctcttggtgaagacatgtgtgcctcctccctgacctcccctgtgtgtgtgcctgtgtgtgcgttggggtgggagtaggggacagtgaacggtgggtagctgggcagtgccttgccctgagactgaccgtcctgggtgtgagaacccttacagaggaaccccaggtcttgaatcccactgatttggacgccataggaaaacatgcagccaccattgacacatggtccaacagaaatatgccaaagacagaagcctcagcaggcataagatgtggggtgtggatgttctttctttccatggaaccatgaaagggtgatgggagagcgggaggcgtgtacatattgcatcctgcctcacacttggctcctttgattggtggcttcacagggaagtcagggcacaaggcagagcctttgcgacctcctgaaggaaggtgcctgcatctgtacagtaaggtcagggaagtccatctggagcgctctctgggtcttttgccaaagcccaaaggaacacctggcacagggaccgggtggcagagaggttcagctcagccctggtggtgatgttgccatctgtgagggaggtccatgctctcaggagattggcttgctgccacagctgaagcccaggaggaactactgctgggagctgcaggggtccacccgtgacctcccagggacaccagccttgaactctgacctgaggggccagtggggtgaaggggcaggcgtgctgtgtggcactagctactgtgagcagctcaca

SEQ ID NO: 1564161 - DNA, 4001 bp, Homo sapiens
ggacaggtgggggctggattcactggacaatacatgccaacacttggacctatgacacggaggcccgggggccacgccagcctcaattcagagccacaaacggcctggacgagttactgaaggcatcctcagcagagacatcgggggtgggggctgcaggcaggcaatgcactggggctttcaagatgagagaaagggtctctgcccccggccagttgacagaaggtgaagactggccccagcgtttcctgaagaagtaaacgggagagactctggttccagaagcacaacttgttagctgtgagagaaaggaccttgccttagccttctccataaccagaggcccaaaggaaaggaaggctgccgcctacatcagagggtgtgaaacaaaggctccccaaagtgggaatgttctcagccacccgctgtccaaatgtggtgccctggcagaacgatggcttcagcagaggacgtcagagaaggctctgggtctggaccacaggaggcagatccctaggaacagcgtggaggcagttctcaggggctagatcccgccagcccttctgtgtcctgcctaagttgggcctgcttcctgtggcgcaggggagcccccgaagggttttatggccaggcttgtcctctggatacgtccctgactatagttcagggaattcctgaggggcagatgaggagtgtgcggaaagggaggccagttaggctgccaaaacgttgcaggcagcaaggctactggcctgaaggacggcagaaaagggaatgtggagaaagccgcccctgtccagtcctggcccccgggcccggggctggctgctgcagccacctcctaaacacactctggagttcagacctcagcccctcacgaatgcaaatcgacgggacccctggtcggctctgccgaaaactctggtaagggtaaggcagggccctccggaaaagccagtcttcggcctggcactcaaggccctgcgcacctttggctccccatctaactcgccccgctcttgctccctctcctcactgaggtcccttcctagcttatgtggctcctccagccccgtttttggccgcgatcgctcagcgctacagagcttcgctccggtccgaccccgcagggagcgggagccgggacatgtgtcacgttccgtgctgcagcttgggggccgggcgcaccatggaggctcggggactcctcttcgtatgggcagacaaggaaaagcctggctgccggtaaacgtgcgcgaggtgctttggtccccccgtcccaaggccgcctgcctctcgggggaaggcccggcccgcagcgacggaccctgaaaggccggacccccgcatccctcctgcccccaacaccacctgccgtgggtcagaggctcgcaagaaagaagccccggctgggccgctacctgagcagcgggagaggctggacagcaggagcagcgccagggcgccgagagatgccatcgccgccatcgcctcttctctgcctagaggaaaagaaaacgagctcccatgaacacgaggggcaaacgaggaagagcgacgcgtaagtggcagcggcagccaatcgcgcaccgaacggctgggccggcattgtgacgtctctggcagcactgacgtggcccctccctgagccaggggcccagctggtcgcggtccccccctcaacatggcggcagcggtgctctaggcgccggaagggggcgtgaatcggtgcgaccgcgcgcgtgcgcagtaccgggtccgcgcctgtccccgaaacttcgcaccccgtcgaactctcgcgagagcggtatctgcgtgtcgggacgtgcggaggctctcactttccgtcatggcgctgaaggtagcgaccgtcgccggcagcgccgcgaaggcggtgctcgggccagcccttctctgccgtccctgggaggtgagcagggaaagagccacgggaccgcggcagcggtcgcaggggagcggtggggtagccgcacccgaagcagtctggagtccgattggctaggggccccaccaggggcggggaaagggcttcgcgccggggttgattggccgcctccgctgtcactgaggggattggccgaagttggccctggaccggctcccccagggggtctgcatcgggtggcggggggccctccggacgggccgggagagtgggccacggcggctgtcacctccttagtgtccttgaaggagcccttctgaggcagtcactcacgtatcccggcccgcctttctcaaaccgcttcgggaatccggttccgggactcaaatttctccacggtttcctctctcgtggaccgctttgccacctatcccggtggcaaagaaccggactttgccagtcatcccccatagtcccccagtcttagagccccagatgccttcccctcgaggcgcctggaatgggaaggagctagggtttctgaggctgcgggggttttgcttctgctcttctccgtgtgcggtcttgcgtattcaggtccgagtcttctttccttacacttatttaagaagaggttaatttaggtcctaggtgggctggaaaccatctgaagcagctgccagccagcacctggccctgatgggtaagaggtttgacctctaggccatgctcccacactgagccactgcgtggccttaggccatttcctcctctctctgggttctagtttcccctttggaacccagaggggaggagacttcatgttctcaaaggatcctgtcaactctgaccttccagaactccgtgactttgcggccactccccagggacatctctacttgccatgttttctccttctgacctctgggggagactgcttgtgcctaatgaaattctcttgacgatgctgacttctcccaccttgctgctgaaaggacggcagtatatagtggctttccagaggctctgatggctccagcaactgggctcctgtaggctcttggtgaagacatgtgtgcctcctccctgacctcccctgtgtgtgtgcctgtgtgtgcgttggggtgggagtaggggacagtgaacggtgggtagctgggcagtgccttgccctgagactgaccgtcctgggtgtgagaacccttacagaggaaccccaggtcttgaatcccactgatttggacgccataggaaaacatgcagccaccattgacacatggtccaacagaaatatgccaaagacagaagcctcagcaggcataagatgtggggtgtggatgttctttctttccatggaaccatgaaagggtgatgggagagcgggaggcgtgtacatattgcatcctgcctcacacttggctcctttgattggtggcttcacagggaagtcagggcacaaggcagagcctttgcgacctcctgaaggaaggtgcctgcatctgtacagtaaggtcagggaagtccatctggagcgctctctgggtcttttgccaaagcccaaaggaacacctggcacagggaccgggtggcagagaggttcagctcagccctggtggtgatgttgccatctgtgagggaggtccatgctctcaggagattggcttgctgccacagctgaagcccaggaggaactactgctgggagctgcaggggtccacccgtgacctcccagggacaccagccttgaactctgacctgaggggccagtggggtgaaggggcaggcgtgctgtgtggcactagctactgtgagcagctcacacacctcctgtcccctaatctttccaacagtcacggaaagtaggtacctccgttctgtgaatttcagatgaggccatgaagccatctcaagaagagtggatggtggatttggaccgaggcctccctagtctccagatcttttttcattttctgatgtgcttgttcactcaggaaatgttccttatgtgccagctctgggccaggtactgtgctgggtcctagggtgacagtattggaccacactgacttggcccctcctctcgggctcaggggtt

SEQ ID NO: 1564162 - DNA, 4001 bp, Homo sapiens
ccactgtctcacctggaccctgttcttgcatgtcagggagatctccacaatgaagacggtctcagtggaaatgacagcgtcagaagtggtgtagtaggaaggggtgatctggggctccaggcaggcctcggctgcggggaagagggagagatgcctgggtaaggccagctcgagtatcccggtctgagggcaggatggcccggccctgcctcatagcacggatcagctggggacccatgcgctcttcctgccccttccaggtgggatatgcgagacagatccaagtgctcggtcacaaatgcaatggcaacgtaggcgggatggctgtgaaggaaggctggggaggggcaaggccggctttctggaggtgtgcaggaagagcgaactggggacaggtgggggctggattcactggacaatacatgccaacacttggacctatgacacggaggcccgggggccacgccagcctcaattcagagccacaaacggcctggacgagttactgaaggcatcctcagcagagacatcgggggtgggggctgcaggcaggcaatgcactggggctttcaagatgagagaaagggtctctgcccccggccagttgacagaaggtgaagactggccccagcgtttcctgaagaagtaaacgggagagactctggttccagaagcacaacttgttagctgtgagagaaaggaccttgccttagccttctccataaccagaggcccaaaggaaaggaaggctgccgcctacatcagagggtgtgaaacaaaggctccccaaagtgggaatgttctcagccacccgctgtccaaatgtggtgccctggcagaacgatggcttcagcagaggacgtcagagaaggctctgggtctggaccacaggaggcagatccctaggaacagcgtggaggcagttctcaggggctagatcccgccagcccttctgtgtcctgcctaagttgggcctgcttcctgtggcgcaggggagcccccgaagggttttatggccaggcttgtcctctggatacgtccctgactatagttcagggaattcctgaggggcagatgaggagtgtgcggaaagggaggccagttaggctgccaaaacgttgcaggcagcaaggctactggcctgaaggacggcagaaaagggaatgtggagaaagccgcccctgtccagtcctggcccccgggcccggggctggctgctgcagccacctcctaaacacactctggagttcagacctcagcccctcacgaatgcaaatcgacgggacccctggtcggctctgccgaaaactctggtaagggtaaggcagggccctccggaaaagccagtcttcggcctggcactcaaggccctgcgcacctttggctccccatctaactcgccccgctcttgctccctctcctcactgaggtcccttcctagcttatgtggctcctccagccccgtttttggccgcgatcgctcagcgctacagagcttcgctccggtccgaccccgcagggagcgggagccgggacatgtgtcacgttccgtgctgcagcttgggggccgggcgcaccatggaggctcggggactcctcttcgtatgggcagacaaggaaaagcctggctgccggtaaacgtgcgcgaggtgctttggtccccccgtcccaaggccgcctgcctctcgggggaaggcccggcccgcagcgacggaccctgaaaggccggacccccgcatccctcctgcccccaacaccacctgccgtgggtcagaggctcgcaagaaagaagccccggctgggccgctacctgagcagcgggagaggctggacagcaggagcagcgccagggcgccgagagatgccatcgccgccatcgcctcttctctgcctagaggaaaagaaaacgagctcccatgaacacgaggggcaaacgaggaagagcgacgcgtaagtggcagcggcagccaatcgcgcaccgaacggctgggccggcattgtgacgtctctggcagcactgacgtggcccctccctgagccaggggcccagctggtcgcggtccccccctcaacatggcggcagcggtgctctaggcgccggaagggggcgtgaatcggtgcgaccgcgcgcgtgcgcagtaccgggtccgcgcctgtccccgaaacttcgcaccccgtcgaactctcgcgagagcggtatctgcgtgtcgggacgtgcggaggctctcactttccgtcatggcgctgaaggtagcgaccgtcgccggcagcgccgcgaaggcggtgctcgggccagcccttctctgccgtccctgggaggtgagcagggaaagagccacgggaccgcggcagcggtcgcaggggagcggtggggtagccgcacccgaagcagtctggagtccgattggctaggggccccaccaggggcggggaaagggcttcgcgccggggttgattggccgcctccgctgtcactgaggggattggccgaagttggccctggaccggctcccccagggggtctgcatcgggtggcggggggccctccggacgggccgggagagtgggccacggcggctgtcacctccttagtgtccttgaaggagcccttctgaggcagtcactcacgtatcccggcccgcctttctcaaaccgcttcgggaatccggttccgggactcaaatttctccacggtttcctctctcgtggaccgctttgccacctatcccggtggcaaagaaccggactttgccagtcatcccccatagtcccccagtcttagagccccagatgccttcccctcgaggcgcctggaatgggaaggagctagggtttctgaggctgcgggggttttgcttctgctcttctccgtgtgcggtcttgcgtattcaggtccgagtcttctttccttacacttatttaagaagaggttaatttaggtcctaggtgggctggaaaccatctgaagcagctgccagccagcacctggccctgatgggtaagaggtttgacctctaggccatgctcccacactgagccactgcgtggccttaggccatttcctcctctctctgggttctagtttcccctttggaacccagaggggaggagacttcatgttctcaaaggatcctgtcaactctgaccttccagaactccgtgactttgcggccactccccagggacatctctacttgccatgttttctccttctgacctctgggggagactgcttgtgcctaatgaaattctcttgacgatgctgacttctcccaccttgctgctgaaaggacggcagtatatagtggctttccagaggctctgatggctccagcaactgggctcctgtaggctcttggtgaagacatgtgtgcctcctccctgacctcccctgtgtgtgtgcctgtgtgtgcgttggggtgggagtaggggacagtgaacggtgggtagctgggcagtgccttgccctgagactgaccgtcctgggtgtgagaacccttacagaggaaccccaggtcttgaatcccactgatttggacgccataggaaaacatgcagccaccattgacacatggtccaacagaaatatgccaaagacagaagcctcagcaggcataagatgtggggtgtggatgttctttctttccatggaaccatgaaagggtgatgggagagcgggaggcgtgtacatattgcatcctgcctcacacttggctcctttgattggtggcttcacagggaagtcagggcacaaggcagagcctttgcgacctcctgaaggaaggtgcctgcatctgtacagtaaggtcagggaagtccatctggagcgctctctgggtcttttgccaaagcccaaaggaacacctggcacagggaccgggtggcagagaggttcagctcagccctggtggtgatgttgccatctgtgagggaggtccatgctctcaggagattggcttgctgccacagctgaagcccaggaggaactactgctgggagct

SEQ ID NO: 1564163 - DNA, 4001 bp, Homo sapiens
acgtcaccttgcttctcttctctgatgctttagcatcatccctgggtctctttgcaaaggtgtcgtctccgttcatggcaccaggagcagtctcacctgcaagagaaacagcctgagactttctagctacaggacccttggtcctatggagggagaaatcagtgaagcccggccacactcagtcacctggaattaggggttgcatttctccattcggggcttacctgtccatgggtaaggacatggagagaagtcagatgaaaacagggagcctggagtctctgggagaagtattgcttggggatgacaggtttcctagcagccttgagtctttgggagggggttggctagtgttgttagtagtttccctggggctaggcttaccctgaaagatgtacagacccttgctggggaggcagggacgtgactgtgtaattttattgaatgggggcgttctgacacccccactcaataaataaagggagggaagtgagtcccagacataacgtggtctttctggtgatggatctgatcaggcagagggatgggggggttctgttctgttgaagagaaatgaccttcactaatatgaacagatttagaagctattactgggttatttgtaaattattagaaggaagagagctagaatctctgagattacaagagcctgccatcacttagagaaaatgtggggtgtttcaatttgcagcaatcggccaggcgcagtggctcatgcctgtaatcccagcattttgggaggccgaggcgtgcagatctcttgagcccaggaggttgagaccagcctgggaaacatagcaaacccctcatctctacaaaaaaaaaaaaaaaaaaaaaaaaacaaccacacaaaaaattagctgggggcggtggcacaggcctataacatctcagctctttggccaagggggggcggatcgcttgagcccacgaggttgataccagcctagccaacctagaaaaaccctctactaaaaaaaataaaataaaataaaaagtattagtgggggcggggtggtgctcgcctgtagttccgaggccgaggcaagaggatctcttgagcccaggaggttgaggccagcctggccaacatagcaaaaccccatttctactactaataataacaacaaaaataataacatcagcgaggtggttcttgcctgtagttccgaggccgaggtgggaggatcacttgagccgaggaggtcaagcccagttcggccaacataaggaaaccctgtctctactaaaaagaacaacaacaacaaaactagcaggggcggaatggcacacatctgtagtcctgaggccaaggtgtgaggatcgcttgagcccaggaggttgaggccagcctggccaacatagtgaaacctggtttctactaaaaaaaaaaaaaaaaaaagcatgggcaggatggtgcacttctgtagtcccagggccgaggcggaaggattgcttaagcccaggcggcagaggccagcctggccaacatagcaaaaccgtctgtactaaaaaaataaaaaataaaaaaaattagtgagggtggggtggttcgtgcctgtagtcccgaggccaaggcgggaggattgcttgagcccaggcggttgaggccagcctggtcaacataacaaatccccgtctctactaaaaaaaaaaaaaaaaaaacaggggtgggataatacaggcctgtagacccaaggccgaggcgggaggatcctccatgatgatcgtcctgaaaggcattagttgtctttcagtcctcaagattttcggaaccccaagcacttgacggccctacagaggcttcctccttttctatctgccccgattagcccatctagggtgtcccttaaagagaacctacttcagagacaaagcagtggttgcgaggtcggcagcagtggtggcgagttggcagcagttggtgacaaagtgtggctggaggaggagaaaatattctgcaatgtcattgctccaggatgatggaccaatcagggcagttagtgaactccatctggccaatcagaagtcagaacagtaggcgggacaagccaagctgatgtggggtctatcagtctaggctctagggacagaaccttctcaaaatggaggcagaaactctgactttcccgcctaaagcatcccctgggattggctactccaagttcagagtacgcatgctctgattttctctttggagtcttcccaaatcagagtacgcatgcgctgattttctcttttcatttttcctatccctccccacctcctcggtggtgcattgttatccagttttaataaggagtgtatatgaagcaggtcatcatctcaaatccttcctgtcagtttctatctttttcaggtatgggattttttcctaggaactctgtagtgacgtaagaaatttgggccggtgcggcggctcacggttgtaatcccagcacttagggaggccacagctggaggatcacttgaacctgggaggcagaggttgcagtgagccatgatcatgccactgcaccccaccctgggcaacagagcaataccctgtctcttttctctacaaaaaaaataaataaaattagcgaggtggggtggtgtgcctgtagtccgttactcaggaggctgaggtaggaggatagcttgagcccaggagtacgaggttgcagtgagccatgatctggctactcctgcctacctgggccacagagcgagatcttgtctttaaaaagagagagagagagaaagagaaagaaagaaaaatttcaatgagccagtcccagtggctcatgcctgtaatcccaacactttgagaggctgaggcaggaggtggaaggatcacttgaggccaggagttccagaacaatctgggatacatagtgagacccccatctctataaaaaatttttaaaaaagaaatttaaacaaaaaaaaacacttctacacttccatatatgtttttttctaaaagaccaaagaagcagaaatatattttacccattgatattaataatatttataataatagtattaaaaagagtatgtaattagggcccactgtgttcatcagggagctcataagtcaatttgtctaagaagtttcccctacccccatccctagtacctccaacaagtccccattcctctctgggctttccacctacagccctgatctctctaagatcctcccaggattacagcaagctctcttagggcaggaacagagcaatggcccttgagcccagcacaaagccttttatgtgcatcttcccattaattttcacaaccttctctggagttaaatactattatcatccccagtatgcagatgttgagactgaggctcaagagaattaagcagtctgctcaaagtcacatagtcagtgggtgacagagctgggattcacccccaagatagaattgagtccaaagtctgtgcttttatttatgtatttatttatttttaattaaaataatttttttttagagatggggtcttgctatgttgtccctgctgatctggaaggaactgctggcctcaagcaatcctcctgccttggcttcccaaagcactgggattacaggagtgaaccatcccacgcccggcctcaaagtcggtgcttttaattactcttctatattgcctcgactacttgttgaatgaatgaatgcatcttacaactgcaaaggttctttaacataatttacataactccttacaatcaccccatattccctctgactgctgtaacaaattaccgcaaactttgtggcataaacaacatcaatttattctctcacaattctggagcccagaaatctgaaatcagtttcactgagttgaaatcaagttgtcagcagggctgtagtcctccagaggctctaggagagaacctgttccttgcctcttccagcttcccgtgattgccagcatttcttggcttgtggcttgatatggattggctctgtgtccccacccaaat

SEQ ID NO: 1564164 - DNA, 4001 bp, Homo sapiens
aatatcatcgaaggcctacaaaaaaaaaaaaaaggaattatggcagggactcagctaggcatgtctgccattcagctggagccgcttcctgtgtgctagatctgggaactggggatgataatccttcctggttgatgccatggctaactgacagaacacgagggaccttccctagcttcacccctgccacacagtagggctttaatgctgctggctggctctcttcccaccttccagaatggactgagagtcaccagatgtagtgcaaggtcacagacttgtctccagggatgctaggtgatgacagagcgagggtgggaggctcccaagggtccagatctcccccgagaccctgctccttgtctccagtatctctgtcctcccctcctcagaaaccgggtcaccccacactgtcccctgggccactactctgctccctccaggtcacctcaccttttggatcttctctggtatttgagcaccaaccgtgggtctccttgcaaaggcgtcgtctccgttcatggcaccgggagcagtctgacctgcaagagaaatagcctgagtctttccagccacagcagctttgatcctgtggagggagaagtcagtgaaggccggccaccctcagtcacctggaatcagctgctgcatttctccatccggggcttatctgtccctgagtaaggatatggggagaaatcagatgaaaacagggaaccaggggtctctgggagaagtattgatagggaatgacaggtttcctatgggcaaagcagccttgagtctttgggagggggttggctaatgttgttagtagtttccctggagctaggcttaccctgaaagatgtacggaccctttttggggaggcagggacatgactgtgtaattttattcagtgggggcatgctgacacccccactcaataaataaaggaagggaagttagtcccagagataacatggtctctttggcgatggatctgatcaggcagagggatggggggttctgttctgttgaagagaaatgagcatcgctaatatgaacgtgttcagaggctattactcggtgatttgtaaattattagaaggaagagagctagaatttctgagactacaagagcccgccatcacttagagagaatgtggggcatttcaagatgcagcaatcagccaggcgccgtggctcacgcctgtaatcccagcactttgggaggccgaggcgtgcaggccgcttgagcccaggaggtcgagacccggctgggaaacacagcaaaacccccgtctacaaaatacacaaaaagttagctggggttggtggagcaggcctgtaccatcccagcactttggaaggccaaggtgggcggatcgccttagcccaggagcttgagaccaggctcgcaaacgtagcaaaaccatctctactaaaaaaaacaaacaaaatttagcagaagcggggtggtgcgcgcctgtagccccaaggcctaggcgagaggctcacttgagcccaggaggaaagatttgagtgagcttttttggtttttgttttttcagacagggtctcgctctgttgcccagtcgggagtgcactggcgtgatcatggctcactgcaacctccgcctcttaggttcaggcgatccaccagctgtggcttccaaaagtgcagggattacaagtgtaagccaccacgcccggcccaaatttcttaagttactacagagttcctaggaaaaatcccgtacctgaaaaagttagaaactgacaggaaagattcgagatggcggcctgcctcatatacactccttattaaaactagatagcaaatgcaccgcggaggaggggaggggtaggaagaatggaaaaagaaaatcggcgtatgcttactctgattttggaagaatccaaagagaaaatcagaccgtgcgtactctgagtatggaagaatcgaaagagagagaaagtcagagcatgcgtactctgaacttaaagtagccaatcccaggggatgctttaggcgggaaaattagagtctccacccccactttgagaaggttccgtccctggagccgggactgatagaagccacatccgcttcgcttgttccgcctactgttctgacttctaattggccagatggagttcactaactgccctgattggtccatcatccttgggcagtgacatagcagaataatgtctcctcctccagccacactttgttgccactgcgaaaaagtgggtggtcctcaggcgccgtcagattttgaactctctgaagaccgttcctggatcttgggttaaaaatctggattctagtctgaactgtgggaagaaaaaaatagtcaatctgtgatttttctacttgaaagacacgatgttttccaaactagcacatttgcggaggtttgctatacttagtcgtggctttcattcttcagtggcttctatgtctgttgccactgaaaaaacagtccaaggccccgcaacctctgcttacatttttgaaagggaatcttaagtatggtgcgcacaattaccatcctttacctgtagccctgaagagaggaaaatgtatttacttatgggatgtgattgtggtattggttacatctgccttggccaatcctccagcctccgtcttgggactacaggcgcgaaccaccctacccccactaatattttttattttttgattttttaatagagaaggtttcgctgtgttggccaggctggtcttgacgtcgtgggctcaagcgatcctcccacctcggcctcgggactacaggcattcaccacccagcccacgcttttttttttttttttttttaagtagaaaccaggttttgctatgttggccaggctggtctcatcgtcctgggctcaagggatccttccgccatggcctcgagacgacaggcatgcaccaccctgcccacgcttttttttttttttttttttttagtagaaaccgtgtttccctatgttggccaggccggcatcaagctcctggactcaagggatcctcccatctcaggactacagccatgcaccaccctgcccaagctattttttgttttgttttgtttcgttttagtggaaaccgggtttcgatatgttgcccaggctggcctcaacctctcaggctcagatgatgcttccacctcggcctcagaactataggcgtgtgccattctaccccgctcatttttatttatttatttatttatttattttttaggagaggcaggctttcgctttgttggccaggctggtatcaaactcctgggctcaagcaatgctcccaccttggcctcaaaactacaggagtgagccaccccgcccacgctatttttctgttgttcttgttgttagcagaaatggggtttcgctatgttggccaggctggcctcgacctcctaggctcaagcaatcctcccgcctcggcctcgggactatgggctcacaccaccccgcccccactaatatttttaatttttctattagagacagtttcgctatgttgtccaggctgggctctacctctgggactcaagtgattctcccgcctcggccttgggactacaggcatgcaccaccctgccttttgctatgtttcccaggttggtcttgacctcctgggctcactcaatgatttgaacccgggaagtggaggttgcattgagctgagatcacaccactgcactccagcttgggcgacagagcaagactgaaaaagaaagaaagaaagaaagaaagagcgagagagagaccagctgaatctccgtaagaacagtgagctttgtggtatttttacttgccctcgtcccatctcatgctcccagcttggttctgttcattgttgatgaaatacagataggattggccagaactggtagatggctggctgttgatcatgaaaatgtcagtcctgatatagtcctccttggaaaggccctttctggaggttgatactctgtgtctgcagtgctgtgggacgatgg

SEQ ID NO: 1564165 - DNA, 4001 bp, Homo sapiens
caatatcatcgaaggcctacaaaaaaaaaaaaaaggaattatggcagggactcagctaggcatgtctgccattcagctggagccgcttcctgtgtgctagatctgggaactggggatgataatccttcctggttgatgccatggctaactgacagaacacgagggaccttccctagcttcacccctgccacacagtagggctttaatgctgctggctggctctcttcccaccttccagaatggactgagagtcaccagatgtagtgcaaggtcacagacttgtctccagggatgctaggtgatgacagagcgagggtgggaggctcccaagggtccagatctcccccgagaccctgctccttgtctccagtatctctgtcctcccctcctcagaaaccgggtcaccccacactgtcccctgggccactactctgctccctccaggtcacctcaccttttggatcttctctggtatttgagcaccaaccgtgggtctccttgcaaaggcgtcgtctccgttcatggcaccgggagcagtctgacctgcaagagaaatagcctgagtctttccagccacagcagctttgatcctgtggagggagaagtcagtgaaggccggccaccctcagtcacctggaatcagctgctgcatttctccatccggggcttatctgtccctgagtaaggatatggggagaaatcagatgaaaacagggaaccaggggtctctgggagaagtattgatagggaatgacaggtttcctatgggcaaagcagccttgagtctttgggagggggttggctaatgttgttagtagtttccctggagctaggcttaccctgaaagatgtacggaccctttttggggaggcagggacatgactgtgtaattttattcagtgggggcatgctgacacccccactcaataaataaaggaagggaagttagtcccagagataacatggtctctttggcgatggatctgatcaggcagagggatggggggttctgttctgttgaagagaaatgagcatcgctaatatgaacgtgttcagaggctattactcggtgatttgtaaattattagaaggaagagagctagaatttctgagactacaagagcccgccatcacttagagagaatgtggggcatttcaagatgcagcaatcagccaggcgccgtggctcacgcctgtaatcccagcactttgggaggccgaggcgtgcaggccgcttgagcccaggaggtcgagacccggctgggaaacacagcaaaacccccgtctacaaaatacacaaaaagttagctggggttggtggagcaggcctgtaccatcccagcactttggaaggccaaggtgggcggatcgccttagcccaggagcttgagaccaggctcgcaaacgtagcaaaaccatctctactaaaaaaaacaaacaaaatttagcagaagcggggtggtgcgcgcctgtagccccaaggcctaggcgagaggctcacttgagcccaggaggaaagatttgagtgagcttttttggtttttgttttttcagacagggtctcgctctgttgcccagtcgggagtgcactggcgtgatcatggctcactgcaacctccgcctcttaggttcaggcgatccaccagctgtggcttccaaaagtgcagggattacaagtgtaagccaccacgcccggcccaaatttcttaagttactacagagttcctaggaaaaatcccgtacctgaaaaagttagaaactgacaggaaagattcgagatggcggcctgcctcatatacactccttattaaaactagatagcaaatgcaccgcggaggaggggaggggtaggaagaatggaaaaagaaaatcggcgtatgcttactctgattttggaagaatccaaagagaaaatcagaccgtgcgtactctgagtatggaagaatcgaaagagagagaaagtcagagcatgcgtactctgaacttaaagtagccaatcccaggggatgctttaggcgggaaaattagagtctccacccccactttgagaaggttccgtccctggagccgggactgatagaagccacatccgcttcgcttgttccgcctactgttctgacttctaattggccagatggagttcactaactgccctgattggtccatcatccttgggcagtgacatagcagaataatgtctcctcctccagccacactttgttgccactgcgaaaaagtgggtggtcctcaggcgccgtcagattttgaactctctgaagaccgttcctggatcttgggttaaaaatctggattctagtctgaactgtgggaagaaaaaaatagtcaatctgtgatttttctacttgaaagacacgatgttttccaaactagcacatttgcggaggtttgctatacttagtcgtggctttcattcttcagtggcttctatgtctgttgccactgaaaaaacagtccaaggccccgcaacctctgcttacatttttgaaagggaatcttaagtatggtgcgcacaattaccatcctttacctgtagccctgaagagaggaaaatgtatttacttatgggatgtgattgtggtattggttacatctgccttggccaatcctccagcctccgtcttgggactacaggcgcgaaccaccctacccccactaatattttttattttttgattttttaatagagaaggtttcgctgtgttggccaggctggtcttgacgtcgtgggctcaagcgatcctcccacctcggcctcgggactacaggcattcaccacccagcccacgcttttttttttttttttttttaagtagaaaccaggttttgctatgttggccaggctggtctcatcgtcctgggctcaagggatccttccgccatggcctcgagacgacaggcatgcaccaccctgcccacgcttttttttttttttttttttttagtagaaaccgtgtttccctatgttggccaggccggcatcaagctcctggactcaagggatcctcccatctcaggactacagccatgcaccaccctgcccaagctattttttgttttgttttgtttcgttttagtggaaaccgggtttcgatatgttgcccaggctggcctcaacctctcaggctcagatgatgcttccacctcggcctcagaactataggcgtgtgccattctaccccgctcatttttatttatttatttatttatttattttttaggagaggcaggctttcgctttgttggccaggctggtatcaaactcctgggctcaagcaatgctcccaccttggcctcaaaactacaggagtgagccaccccgcccacgctatttttctgttgttcttgttgttagcagaaatggggtttcgctatgttggccaggctggcctcgacctcctaggctcaagcaatcctcccgcctcggcctcgggactatgggctcacaccaccccgcccccactaatatttttaatttttctattagagacagtttcgctatgttgtccaggctgggctctacctctgggactcaagtgattctcccgcctcggccttgggactacaggcatgcaccaccctgccttttgctatgtttcccaggttggtcttgacctcctgggctcactcaatgatttgaacccgggaagtggaggttgcattgagctgagatcacaccactgcactccagcttgggcgacagagcaagactgaaaaagaaagaaagaaagaaagaaagagcgagagagagaccagctgaatctccgtaagaacagtgagctttgtggtatttttacttgccctcgtcccatctcatgctcccagcttggttctgttcattgttgatgaaatacagataggattggccagaactggtagatggctggctgttgatcatgaaaatgtcagtcctgatatagtcctccttggaaaggccctttctggaggttgatactctgtgtctgcagtgctgtgggacgatg

SEQ ID NO: 1564166 - DNA, 4001 bp, Homo sapiens; identical to SEQ ID NO: 1564165

SEQ ID NO: 1564167 - DNA, 4001 bp, Homo sapiens
gcaatatcatcgaaggcctacaaaaaaaaaaaaaaggaattatggcagggactcagctaggcatgtctgccattcagctggagccgcttcctgtgtgctagatctgggaactggggatgataatccttcctggttgatgccatggctaactgacagaacacgagggaccttccctagcttcacccctgccacacagtagggctttaatgctgctggctggctctcttcccaccttccagaatggactgagagtcaccagatgtagtgcaaggtcacagacttgtctccagggatgctaggtgatgacagagcgagggtgggaggctcccaagggtccagatctcccccgagaccctgctccttgtctccagtatctctgtcctcccctcctcagaaaccgggtcaccccacactgtcccctgggccactactctgctccctccaggtcacctcaccttttggatcttctctggtatttgagcaccaaccgtgggtctccttgcaaaggcgtcgtctccgttcatggcaccgggagcagtctgacctgcaagagaaatagcctgagtctttccagccacagcagctttgatcctgtggagggagaagtcagtgaaggccggccaccctcagtcacctggaatcagctgctgcatttctccatccggggcttatctgtccctgagtaaggatatggggagaaatcagatgaaaacagggaaccaggggtctctgggagaagtattgatagggaatgacaggtttcctatgggcaaagcagccttgagtctttgggagggggttggctaatgttgttagtagtttccctggagctaggcttaccctgaaagatgtacggaccctttttggggaggcagggacatgactgtgtaattttattcagtgggggcatgctgacacccccactcaataaataaaggaagggaagttagtcccagagataacatggtctctttggcgatggatctgatcaggcagagggatggggggttctgttctgttgaagagaaatgagcatcgctaatatgaacgtgttcagaggctattactcggtgatttgtaaattattagaaggaagagagctagaatttctgagactacaagagcccgccatcacttagagagaatgtggggcatttcaagatgcagcaatcagccaggcgccgtggctcacgcctgtaatcccagcactttgggaggccgaggcgtgcaggccgcttgagcccaggaggtcgagacccggctgggaaacacagcaaaacccccgtctacaaaatacacaaaaagttagctggggttggtggagcaggcctgtaccatcccagcactttggaaggccaaggtgggcggatcgccttagcccaggagcttgagaccaggctcgcaaacgtagcaaaaccatctctactaaaaaaaacaaacaaaatttagcagaagcggggtggtgcgcgcctgtagccccaaggcctaggcgagaggctcacttgagcccaggaggaaagatttgagtgagcttttttggtttttgttttttcagacagggtctcgctctgttgcccagtcgggagtgcactggcgtgatcatggctcactgcaacctccgcctcttaggttcaggcgatccaccagctgtggcttccaaaagtgcagggattacaagtgtaagccaccacgcccggcccaaatttcttaagttactacagagttcctaggaaaaatcccgtacctgaaaaagttagaaactgacaggaaagattcgagatggcggcctgcctcatatacactccttattaaaactagatagcaaatgcaccgcggaggaggggaggggtaggaagaatggaaaaagaaaatcggcgtatgcttactctgattttggaagaatccaaagagaaaatcagaccgtgcgtactctgagtatggaagaatcgaaagagagagaaagtcagagcatgcgtactctgaacttaaagtagccaatcccaggggatgctttaggcgggaaaattagagtctccacccccactttgagaaggttccgtccctggagccgggactgatagaagccacatccgcttcgcttgttccgcctactgttctgacttctaattggccagatggagttcactaactgccctgattggtccatcatccttgggcagtgacatagcagaataatgtctcctcctccagccacactttgttgccactgcgaaaaagtgggtggtcctcaggcgccgtcagattttgaactctctgaagaccgttcctggatcttgggttaaaaatctggattctagtctgaactgtgggaagaaaaaaatagtcaatctgtgatttttctacttgaaagacacgatgttttccaaactagcacatttgcggaggtttgctatacttagtcgtggctttcattcttcagtggcttctatgtctgttgccactgaaaaaacagtccaaggccccgcaacctctgcttacatttttgaaagggaatcttaagtatggtgcgcacaattaccatcctttacctgtagccctgaagagaggaaaatgtatttacttatgggatgtgattgtggtattggttacatctgccttggccaatcctccagcctccgtcttgggactacaggcgcgaaccaccctacccccactaatattttttattttttgattttttaatagagaaggtttcgctgtgttggccaggctggtcttgacgtcgtgggctcaagcgatcctcccacctcggcctcgggactacaggcattcaccacccagcccacgcttttttttttttttttttttaagtagaaaccaggttttgctatgttggccaggctggtctcatcgtcctgggctcaagggatccttccgccatggcctcgagacgacaggcatgcaccaccctgcccacgcttttttttttttttttttttttagtagaaaccgtgtttccctatgttggccaggccggcatcaagctcctggactcaagggatcctcccatctcaggactacagccatgcaccaccctgcccaagctattttttgttttgttttgtttcgttttagtggaaaccgggtttcgatatgttgcccaggctggcctcaacctctcaggctcagatgatgcttccacctcggcctcagaactataggcgtgtgccattctaccccgctcatttttatttatttatttatttatttattttttaggagaggcaggctttcgctttgttggccaggctggtatcaaactcctgggctcaagcaatgctcccaccttggcctcaaaactacaggagtgagccaccccgcccacgctatttttctgttgttcttgttgttagcagaaatggggtttcgctatgttggccaggctggcctcgacctcctaggctcaagcaatcctcccgcctcggcctcgggactatgggctcacaccaccccgcccccactaatatttttaatttttctattagagacagtttcgctatgttgtccaggctgggctctacctctgggactcaagtgattctcccgcctcggccttgggactacaggcatgcaccaccctgccttttgctatgtttcccaggttggtcttgacctcctgggctcactcaatgatttgaacccgggaagtggaggttgcattgagctgagatcacaccactgcactccagcttgggcgacagagcaagactgaaaaagaaagaaagaaagaaagaaagagcgagagagagaccagctgaatctccgtaagaacagtgagctttgtggtatttttacttgccctcgtcccatctcatgctcccagcttggttctgttcattgttgatgaaatacagataggattggccagaactggtagatggctggctgttgatcatgaaaatgtcagtcctgatatagtcctccttggaaaggccctttctggaggttgatactctgtgtctgcagtgctgtgggacgat

SEQ ID NO: 1564168 - DNA, 4001 bp, Homo sapiens
aaaaaaaaaaaggaattatggcagggactcagctaggcatgtctgccattcagctggagtcgcttcctgtgtgctggatctgggaagtggggataatccttcctggttgatgccacggctaactgacagaacatgagggaccttcctagcttcacccctgccacactgtcgggctttaatgctgctggctggctctcctcccaccttccagaatggactgagagtcaccaaatgtagtgcaaggtcacagacttgtctccagggatgctaggtgatgacagagtgagggtgggaggctcccaagggtccagatctcccctgagaccctgctccttgtctccagtatctctgtcctcccctcctcagaaaccgggtcaccccacactgtcccctgggtcactactctgctccctctaggtcacctcaccttttgtatcttctctggtatttgagcaccaaccgtgggtctccttgcaaaggtgtcatctccgttcatggcacagggagtagtctgacctgcaagagaaacagattgagactttccagccgcaggacctttggtcttgtggagggagaaatcagtgaaggccggccactcagtcacctggaatcaggtgctgcatttctccatccggggcttatctgtccctgagtaaggatatggggagaaatcagacgaaaaccaggaaccaggggtctctgggagaagtattgataggggatgacaggtttcctatgggcaaagcagccttgagtctttgggagggggttggctaatgttgttagtaatttccctggagctaggcttcccctgaaagatgtatggacccttgttggggaggcagggacatgactgtgtaattttattcagtggggcatgctgacacccccgctcaataaataaaggaagggaagttagtcccagagataacgtggtctctttggtgatggatctgatcaggcagagggatggggggttctgttctgctgaagagaaatgagcatcgctaatatgaatgtgttcagaggctattactgggtgatttgtaagttattagaacgaagagagctagaatttctgagactacaagagcccgccatcacttagagagaatgtggggcatttcaagttgcagcaatcagccaggcgcagtggctcaggcctgtaatcccagcactttgggaggccgaggcgtgcaggtcacttgagcccaggaggtcgagacccggctgggaaacacagcaaaacccccgtctacaaaataaacaaaaagttagctggggttggtggagcaggcctgtaccatcccagcactttggaaggccaaggtgggcggatcgccttagcccaggagcttgagaccaggctcacaaacgtagcaaaaccatctctactaaaaaaaacaaacaaacaaaatttagcagaagcggggtggtgcgcgcctgtagtcccaaggcctaggtgagaagatcacttgagcccagcaggaaagatttgagtgattttttttttcagacagggtctcgctctgttgcccagtcgggagtgcactggcgtgatcatggctcactgcaacctccgcctcttgggttcaggcaatccaccagctgtggcttccaaaagtgcagggattacaagtgtaagccaccaccccaggcccaaatttcttaagttactacagagttcctaggaaaaatcccatacctgaaaaagttagaaactgacaggaaagatttgagatggcggttagaaactgacaggaaagatttaagatggcggcctgcctcatatacactccttattaaaactagatagcaaatgcaccacggaggaggggaggggtaggaagaatggaaaaagaaaatcagtgtattcttactctgattttggaagaatccaaagagaaaatcagaccgtgcgtactcttgagtatggaagaatcgaaagagagagaaaatcagagcatgcgtactctgaacttaaagtagcgaatcccaggggatgctttaggcgggaaaattagagtctccacccccactttgagaaggttgtgtccctggagccgggactgatagaagccacatccgcttcgcttgttccgcctactgttctgacttctaattggccagatggagttcactaactgccctgattggtccatcatccttgggcagcgacattgcagaataatgtctcctcctccagccacaccttgtcgccactgcgaaaaagtgggtggtcctcaggcgccgtcagattttgatctctctgaagactgttcctggatcttgggttaaaaatctggattctagtctgaactgtgggaagaaaaaaatagtcaatctgtgatttttctacttgaaagccacaatgttttccaaactagcacatttgcggaggtttgctataattagtcgtggagttcattcttcagtggcttctatatctgttgccactgaaaaaacagtccaaggccctccaacctctgcttacatttttgaaagggaatctaagtgtggtgtgcagaattaccatcctttacctgtagccctggagagaggaaaatgtatttacttatgggatgtgattgtggtattggttacatctgccttggccaatcctcccgcctctgtctcgggactacaggcgcaaaccaccccacccccactaatattttttattttttgattttttaatagagaaggttttgctgtgttggccaggctggtcttgacgtcctgggctcaagcgatcctcccacctcggcctcgggactacaggcattcaccaccctgcctacgcttttttttttttttttttttttaagtagaaaccaggttttgctatgttggccaggctggtctcattggccaggttggtctcatcgtcctgggctcaaggcattcttccaccatggcctcgagactacaggcatgcactaccctgcctacgattttttttttttttttttttttttttttagtagaaaccatgtttccctatgttggccaggccggcatcaagctcctgggctcaagggatcctcctgcctcaggaccgcagccacgcaccaccctgcccaagctattttttgttttgttttgtttcgttttagtagaaaccaggtttcgatatgttgcccaggctggcctcaatctcttaggctcagatgatgctttcatcttggcctcaggactataggcgtgtgccattctgccctgctcatttttattttcatttatttatttatttatttatttatttattttaggagaggcaggctatcgctttgttggccaggctggtatcaacctcctgggctcaagcaatcctcccaccttggcctcaaaactacaggagtgagccaccccacccacgctatttttttgttgttcttgttgttagtagaaatggggtttcactatgttggccaggctggcctcaacctcctaggctcaagcaatcgtcctgccttggcctcgggactacaggttcacaccaccccgcccccactaatatttttaatttttctactagagacagtttcgctatgttgtccaggctggtctctacctccgggactcaagtgattctcccgcctcggccttgggactacaggcatgcactaccctgccttttgctatgtttcccaggttggtcttgacctcctgggctcactcaatgatttgaacctgggaagccgaggttgcattgagctgagatcacaccactgcactccagcttgagcgacagagcaagactgaaaaaaaaaaaaaaaagaaagaaagagcaagagagagatcagcggaatctccgtaagaacagggagctttgtggtattttaacttacccttgtcccatctcgtgctcccagcttggttctgttcattgctgatgaaatacagataggattggccagaactggtagatggctggctgttgatcatgaaaatgtcagacctgatatagtcctccttggaaaggccctttctggaggttg

SEQ ID NO: 1564169 - DNA, 4001 bp, Homo sapiens
tgaggatctttcccaggtagctgagctgaaaagcaactgggcttgaggagaccctttccagccccttccagtctactcaccctgattcctgtggtttcgatcgttaccaaaatcattcccgtggaagtctgcagcccgtttactacgcatgaaaggtgggagggtgaccttgaaacctagaaaggagcaaaatgtttatttcttaagaggcaagcttgggcctggcacggtggctcatgtctgtagtaccagccctttgggaggctgaggctggaggattgcttgaggtgaggcgctcaacactagcctgggcaacatagagagacccacatatctacaaaatataaaataaaattagttgggcatagtggcacgtgcctgtagcctcagctactccataggctgggcaggaggattgctagagcccaggagttcgaggctgcagtgagctatgcttgcactactgcactcttccctaggtgacagagtgagactctgacttaaaaaaaaaaaaagagagagagagagagagagacaagccaagagaaggaagggagggtgtgcgtgttgggtgtgggggtgccgggatgccacagagacagttgggctcatcagaaaagacgcctatgggagagaaacgtgcaggatccaggtatgagctccactgtggccagtccctgccctcagccctgacaggatacagaagaggagaacacccagaagctgccttgtgatttttccctgcacaaaaggaaaatgtggggtactttctgcagcctaagaagtagccaaaacaggaaaagggatgctcatgtgtccccagacttgtctgcttctagaactttctgttacctagtttagtcatgacctcatagtttagcttcatatacacatagacgattttctccgaggatttcatcttttcccactctttcttagagaagtatttggcaatatcatcgaaggcctggaaaaaaaaaaaaaaggaattatggcagggactcagctaggcatgtctgccattcagctggagccgcttcctgtgtgtgggatctgagaagtggggatgatagtctgtcctggttgatgccatggctaactgacagaacatgagggaacttccctagcttcgcccctgccacacagtagggctttaatgctgctggctggctctcttcccaccttccagaatggagtgggagtcaccaaatgaagtgcaaggtcagagacttgtctccagggatgctaggtgatgacagagcgagggtgggaggctcccaagggtccaaatctcccccgagaccctgctccttgtccctagtacctctgtcctcccctcctcagaaacctggtcaccccacactgtcccctgggccactactctgccccctccaggtcacctcacctttcgtaacttctctgatatttgagcatcatccctgggtctccttgcaaaggcgtcgtctccgttcatggcactgggagcagtctcacctgcgagagaaacagcctgagtctttccagcctcaggacctttggtgctctgggcggggtggtgcacgcctgtagtcccggggccgaggcgagaggatcgcttgagcccaggagtttttttttttttttttttttgagacagggtctcgctctgttgcccaggctgtgttgcagtggcgcgatcgtggctcactgcaacctccgcctcccgggttcaagcgatccaccacctgtgggcctccaaagtgctgggattacaagcgtgagccaccacgcccagcccagattttttaagttactacagagctcctaggaaaaatcccatacctgaaaaagttagaaactgacaggaagaatttgagatggcgacctgcctcacataaatacattattaaaattagataagaagtgcaccacggcggaggggaggggtaggaagaatggaaagagaaaatcagcgcatgcttaccctgattgtggaagaatcaaaagggcaaatcggcgtgtgcgtactctgaatttaaagtagccaatccaaggggacgctttcggcgggaaaatcagagtctcccctcccccccgccttgggaaggttctgtccctagagcctggactgacagacgccacatcagcttcgcttgttccgcctactgttctgacttctaattggccagatggagttcactaactgccctgattggtccatcatccttgggcagtgacattgcagaatgttgtcgcctcctccagccacactttgtgcgacaaagtgggtggtcctcaggcgccatcaggagattttgaactctctgaagaccgtccctggatcttgggttaaacatctggattctagtctgaaccgtgggaagaaaaaatagtcgatctgtgatttttctatttgaaagacacaatgttttccaaactagcacatttgcggaggtttgctgtacttagtcgtggagttcattcttcagtggcttctacatctgttggaactaaaaaaacagtccaaggccctccaacctcttttattcttatttttttttcttttttttttttttttgtagttttcttttttttttcttttattattatactttaagttttagggtacatgtgcacattgtgcaggttagttacatatgtatacatgtgccacgctggtgcgctgcacccactaactcgtcatctagcattgggtatatctcccaatgctatccctcccccctccccccaccccacaacagtccccagagtgtgatgttccccttcctgtgtccatgtgatctcattgttcaattcccacctatgagtgagaatatgcggtgtttggttttttgttcttgcgatagtttactgagaatgatgatttccaatttcatccatgtccctacaaaggacatgaactcatcaatttttatggctgcatagtattccatggtgtatatgtgccacattttcttaatccagtctatcattgttggacatttgggttggttccaagtctttgctattgtgaatagtgccgcatttttggaagggaatgtaagtgtggtgcgcacaattaccatcctttacctgtagccctggagagaggaaaatgtatttacttatgggatgtgattgtggtattggttacatccgccttggtcaatcctcccatctcattctcgggactacaggcatgcaccaccctgcccaggtttgtttttgttattattattattattttttagttgaaactgggtttctctatgtaggccaggctggcctcaacctccagggctcaagggatcctcccacctcctcagcctggggaccacaggcatgcaccaccctgcccacggtattttttttgtttttcagtagaaaccgggttttgctatgttgcacagactggcctcaacctcctgggctcaagcaatgcttccacctcagcctcgggaccataggcgtgtgccattctgccctgataattttttttaggagagacaggctttcgctatgttgaccaggctggtatcgaccttctgggctcaagcaatcctcccacctcagcctgggaactacaggggtgagccaccccgcccatgctatttttggttgttcttcttattagtagaaatggggtttcactatgttggccaggctggccttgacctcctgggctcaagcaatcctcctgcctcggcctcgggaccactggcacacaccacccagcccccactaatatctttaatttttctagtagagacagtttcgctatgttgtccaggctggtctctacctcctgggttcaagtgatcctcctgcctcggcctcgggactgcaggcctgcaccaccctgccttttgctatgtttcccaggctggtctcaacctcctgggttcactcaatgatttgaacccgggaaggggaggttgcattgagctgagatcccaccactgcactccagcctgggtgacagagaaaaactgtcgaaaagaaaaggaagggaagggagaagg

SEQ ID NO: 1564170 - DNA, 4001 bp, Homo sapiens
aggatctttcccaggtagctgagctgaaaagcaactgggcttgaggagaccctttccagccccttccagtctactcaccctgattcctgtggtttcgatcgttaccaaaatcattcccgtggaagtctgcagcccgtttactacgcatgaaaggtgggagggtgaccttgaaacctagaaaggagcaaaatgtttatttcttaagaggcaagcttgggcctggcacggtggctcatgtctgtagtaccagccctttgggaggctgaggctggaggattgcttgaggtgaggcgctcaacactagcctgggcaacatagagagacccacatatctacaaaatataaaataaaattagttgggcatagtggcacgtgcctgtagcctcagctactccataggctgggcaggaggattgctagagcccaggagttcgaggctgcagtgagctatgcttgcactactgcactcttccctaggtgacagagtgagactctgacttaaaaaaaaaaaaagagagagagagagagagagacaagccaagagaaggaagggagggtgtgcgtgttgggtgtgggggtgccgggatgccacagagacagttgggctcatcagaaaagacgcctatgggagagaaacgtgcaggatccaggtatgagctccactgtggccagtccctgccctcagccctgacaggatacagaagaggagaacacccagaagctgccttgtgatttttccctgcacaaaaggaaaatgtggggtactttctgcagcctaagaagtagccaaaacaggaaaagggatgctcatgtgtccccagacttgtctgcttctagaactttctgttacctagtttagtcatgacctcatagtttagcttcatatacacatagacgattttctccgaggatttcatcttttcccactctttcttagagaagtatttggcaatatcatcgaaggcctggaaaaaaaaaaaaaaaggaattatggcagggactcagctaggcatgtctgccattcagctggagccgcttcctgtgtgtgggatctgagaagtggggatgatagtctgtcctggttgatgccatggctaactgacagaacatgagggaacttccctagcttcgcccctgccacacagtagggctttaatgctgctggctggctctcttcccaccttccagaatggagtgggagtcaccaaatgaagtgcaaggtcagagacttgtctccagggatgctaggtgatgacagagcgagggtgggaggctcccaagggtccaaatctcccccgagaccctgctccttgtccctagtacctctgtcctcccctcctcagaaacctggtcaccccacactgtcccctgggccactactctgccccctccaggtcacctcacctttcgtaacttctctgatatttgagcatcatccctgggtctccttgcaaaggcgtcgtctccgttcatggcactgggagcagtctcacctgcgagagaaacagcctgagtctttccagcctcaggacctttggtgctctgggcggggtggtgcacgcctgtagtcccggggccgaggcgagaggatcgcttgagcccaggagtttttttttttttttttttttgagacagggtctcgctctgttgcccaggctgtgttgcagtggcgcgatcgtggctcactgcaacctccgcctcccgggttcaagcgatccaccacctgtgggcctccaaagtgctgggattacaagcgtgagccaccacgcccagcccagattttttaagttactacagagctcctaggaaaaatcccatacctgaaaaagttagaaactgacaggaagaatttgagatggcgacctgcctcacataaatacattattaaaattagataagaagtgcaccacggcggaggggaggggtaggaagaatggaaagagaaaatcagcgcatgcttaccctgattgtggaagaatcaaaagggcaaatcggcgtgtgcgtactctgaatttaaagtagccaatccaaggggacgctttcggcgggaaaatcagagtctcccctcccccccgccttgggaaggttctgtccctagagcctggactgacagacgccacatcagcttcgcttgttccgcctactgttctgacttctaattggccagatggagttcactaactgccctgattggtccatcatccttgggcagtgacattgcagaatgttgtcgcctcctccagccacactttgtgcgacaaagtgggtggtcctcaggcgccatcaggagattttgaactctctgaagaccgtccctggatcttgggttaaacatctggattctagtctgaaccgtgggaagaaaaaatagtcgatctgtgatttttctatttgaaagacacaatgttttccaaactagcacatttgcggaggtttgctgtacttagtcgtggagttcattcttcagtggcttctacatctgttggaactaaaaaaacagtccaaggccctccaacctcttttattcttatttttttttcttttttttttttttttgtagttttcttttttttttcttttattattatactttaagttttagggtacatgtgcacattgtgcaggttagttacatatgtatacatgtgccacgctggtgcgctgcacccactaactcgtcatctagcattgggtatatctcccaatgctatccctcccccctccccccaccccacaacagtccccagagtgtgatgttccccttcctgtgtccatgtgatctcattgttcaattcccacctatgagtgagaatatgcggtgtttggttttttgttcttgcgatagtttactgagaatgatgatttccaatttcatccatgtccctacaaaggacatgaactcatcaatttttatggctgcatagtattccatggtgtatatgtgccacattttcttaatccagtctatcattgttggacatttgggttggttccaagtctttgctattgtgaatagtgccgcatttttggaagggaatgtaagtgtggtgcgcacaattaccatcctttacctgtagccctggagagaggaaaatgtatttacttatgggatgtgattgtggtattggttacatccgccttggtcaatcctcccatctcattctcgggactacaggcatgcaccaccctgcccaggtttgtttttgttattattattattattttttagttgaaactgggtttctctatgtaggccaggctggcctcaacctccagggctcaagggatcctcccacctcctcagcctggggaccacaggcatgcaccaccctgcccacggtattttttttgtttttcagtagaaaccgggttttgctatgttgcacagactggcctcaacctcctgggctcaagcaatgcttccacctcagcctcgggaccataggcgtgtgccattctgccctgataattttttttaggagagacaggctttcgctatgttgaccaggctggtatcgaccttctgggctcaagcaatcctcccacctcagcctgggaactacaggggtgagccaccccgcccatgctatttttggttgttcttcttattagtagaaatggggtttcactatgttggccaggctggccttgacctcctgggctcaagcaatcctcctgcctcggcctcgggaccactggcacacaccacccagcccccactaatatctttaatttttctagtagagacagtttcgctatgttgtccaggctggtctctacctcctgggttcaagtgatcctcctgcctcggcctcgggactgcaggcctgcaccaccctgccttttgctatgtttcccaggctggtctcaacctcctgggttcactcaatgatttgaacccgggaaggggaggttgcattgagctgagatcccaccactgcactccagcctgggtgacagagaaaaactgtcgaaaagaaaaggaagggaagggagaaggg

SEQ ID NO: 1564171 - DNA, 4001 bp, Homo sapiens
cccaggtagctgagctgaaaagcaactgggcttgaggagaccctttccagccccttccagtctactcaccctgattcctgtggtttcgatcgttaccaaaatcattcccgtggaagtctgcagcccgtttactacgcatgaaaggtgggagggtgaccttgaaacctagaaaggagcaaaatgtttatttcttaagaggcaagcttgggcctggcacggtggctcatgtctgtagtaccagccctttgggaggctgaggctggaggattgcttgaggtgaggcgctcaacactagcctgggcaacatagagagacccacatatctacaaaatataaaataaaattagttgggcatagtggcacgtgcctgtagcctcagctactccataggctgggcaggaggattgctagagcccaggagttcgaggctgcagtgagctatgcttgcactactgcactcttccctaggtgacagagtgagactctgacttaaaaaaaaaaaaagagagagagagagagagagacaagccaagagaaggaagggagggtgtgcgtgttgggtgtgggggtgccgggatgccacagagacagttgggctcatcagaaaagacgcctatgggagagaaacgtgcaggatccaggtatgagctccactgtggccagtccctgccctcagccctgacaggatacagaagaggagaacacccagaagctgccttgtgatttttccctgcacaaaaggaaaatgtggggtactttctgcagcctaagaagtagccaaaacaggaaaagggatgctcatgtgtccccagacttgtctgcttctagaactttctgttacctagtttagtcatgacctcatagtttagcttcatatacacatagacgattttctccgaggatttcatcttttcccactctttcttagagaagtatttggcaatatcatcgaaggcctggaaaaaaaaaaaaaaggaattatggcagggactcagctaggcatgtctgccattcagctggagccgcttcctgtgtgtgggatctgagaagtggggatgatagtctgtcctggttgatgccatggctaactgacagaacatgagggaacttccctagcttcgcccctgccacacagtagggctttaatgctgctggctggctctcttcccaccttccagaatggagtgggagtcaccaaatgaagtgcaaggtcagagacttgtctccagggatgctaggtgatgacagagcgagggtgggaggctcccaagggtccaaatctcccccgagaccctgctccttgtccctagtacctctgtcctcccctcctcagaaacctggtcaccccacactgtcccctgggccactactctgccccctccaggtcacctcacctttcgtaacttctctgatatttgagcatcatccctgggtctccttgcaaaggcgtcgtctccgttcatggcactgggagcagtctcacctgcgagagaaacagcctgagtctttccagcctcaggacctttggtgctctgggcggggtggtgcacgcctgtagtcccggggccgaggcgagaggatcgcttgagcccaggagtttttttttttttttttttttgagacagggtctcgctctgttgcccaggctgtgttgcagtggcgcgatcgtggctcactgcaacctccgcctcccgggttcaagcgatccaccacctgtgggcctccaaagtgctgggattacaagcgtgagccaccacgcccagcccagattttttaagttactacagagctcctaggaaaaatcccatacctgaaaaagttagaaactgacaggaagaatttgagatggcgacctgcctcacataaatacattattaaaattagataagaagtgcaccacggcggaggggaggggtaggaagaatggaaagagaaaatcagcgcatgcttaccctgattgtggaagaatcaaaagggcaaatcggcgtgtgcgtactctgaatttaaagtagccaatccaaggggacgctttcggcgggaaaatcagagtctcccctcccccccgccttgggaaggttctgtccctagagcctggactgacagacgccacatcagcttcgcttgttccgcctactgttctgacttctaattggccagatggagttcactaactgccctgattggtccatcatccttgggcagtgacattgcagaatgttgtcgcctcctccagccacactttgtgcgacaaagtgggtggtcctcaggcgccatcaggagattttgaactctctgaagaccgtccctggatcttgggttaaacatctggattctagtctgaaccgtgggaagaaaaaatagtcgatctgtgatttttctatttgaaagacacaatgttttccaaactagcacatttgcggaggtttgctgtacttagtcgtggagttcattcttcagtggcttctacatctgttggaactaaaaaaacagtccaaggccctccaacctcttttattcttatttttttttcttttttttttttttttgtagttttcttttttttttcttttattattatactttaagttttagggtacatgtgcacattgtgcaggttagttacatatgtatacatgtgccacgctggtgcgctgcacccactaactcgtcatctagcattgggtatatctcccaatgctatccctcccccctccccccaccccacaacagtccccagagtgtgatgttccccttcctgtgtccatgtgatctcattgttcaattcccacctatgagtgagaatatgcggtgtttggttttttgttcttgcgatagtttactgagaatgatgatttccaatttcatccatgtccctacaaaggacatgaactcatcaatttttatggctgcatagtattccatggtgtatatgtgccacattttcttaatccagtctatcattgttggacatttgggttggttccaagtctttgctattgtgaatagtgccgcatttttggaagggaatgtaagtgtggtgcgcacaattaccatcctttacctgtagccctggagagaggaaaatgtatttacttatgggatgtgattgtggtattggttacatccgccttggtcaatcctcccatctcattctcgggactacaggcatgcaccaccctgcccaggtttgtttttgttattattattattattttttagttgaaactgggtttctctatgtaggccaggctggcctcaacctccagggctcaagggatcctcccacctcctcagcctggggaccacaggcatgcaccaccctgcccacggtattttttttgtttttcagtagaaaccgggttttgctatgttgcacagactggcctcaacctcctgggctcaagcaatgcttccacctcagcctcgggaccataggcgtgtgccattctgccctgataattttttttaggagagacaggctttcgctatgttgaccaggctggtatcgaccttctgggctcaagcaatcctcccacctcagcctgggaactacaggggtgagccaccccgcccatgctatttttggttgttcttcttattagtagaaatggggtttcactatgttggccaggctggccttgacctcctgggctcaagcaatcctcctgcctcggcctcgggaccactggcacacaccacccagcccccactaatatctttaatttttctagtagagacagtttcgctatgttgtccaggctggtctctacctcctgggttcaagtgatcctcctgcctcggcctcgggactgcaggcctgcaccaccctgccttttgctatgtttcccaggctggtctcaacctcctgggttcactcaatgatttgaacccgggaaggggaggttgcattgagctgagatcccaccactgcactccagcctgggtgacagagaaaaactgtcgaaaagaaaaggaagggaagggagaagggatgggagaag

SEQ ID NO: 1564172 - DNA, 4001 bp, Homo sapiens
caggtagctgagctgaaaagcaactgggcttgaggagaccctttccagccccttccagtctactcaccctgattcctgtggtttcgatcgttaccaaaatcattcccgtggaagtctgcagcccgtttactacgcatgaaaggtgggagggtgaccttgaaacctagaaaggagcaaaatgtttatttcttaagaggcaagcttgggcctggcacggtggctcatgtctgtagtaccagccctttgggaggctgaggctggaggattgcttgaggtgaggcgctcaacactagcctgggcaacatagagagacccacatatctacaaaatataaaataaaattagttgggcatagtggcacgtgcctgtagcctcagctactccataggctgggcaggaggattgctagagcccaggagttcgaggctgcagtgagctatgcttgcactactgcactcttccctaggtgacagagtgagactctgacttaaaaaaaaaaaaagagagagagagagagagagacaagccaagagaaggaagggagggtgtgcgtgttgggtgtgggggtgccgggatgccacagagacagttgggctcatcagaaaagacgcctatgggagagaaacgtgcaggatccaggtatgagctccactgtggccagtccctgccctcagccctgacaggatacagaagaggagaacacccagaagctgccttgtgatttttccctgcacaaaaggaaaatgtggggtactttctgcagcctaagaagtagccaaaacaggaaaagggatgctcatgtgtccccagacttgtctgcttctagaactttctgttacctagtttagtcatgacctcatagtttagcttcatatacacatagacgattttctccgaggatttcatcttttcccactctttcttagagaagtatttggcaatatcatcgaaggcctggaaaaaaaaaaaaaaaggaattatggcagggactcagctaggcatgtctgccattcagctggagccgcttcctgtgtgtgggatctgagaagtggggatgatagtctgtcctggttgatgccatggctaactgacagaacatgagggaacttccctagcttcgcccctgccacacagtagggctttaatgctgctggctggctctcttcccaccttccagaatggagtgggagtcaccaaatgaagtgcaaggtcagagacttgtctccagggatgctaggtgatgacagagcgagggtgggaggctcccaagggtccaaatctcccccgagaccctgctccttgtccctagtacctctgtcctcccctcctcagaaacctggtcaccccacactgtcccctgggccactactctgccccctccaggtcacctcacctttcgtaacttctctgatatttgagcatcatccctgggtctccttgcaaaggcgtcgtctccgttcatggcactgggagcagtctcacctgcgagagaaacagcctgagtctttccagcctcaggacctttggtgctctgggcggggtggtgcacgcctgtagtcccggggccgaggcgagaggatcgcttgagcccaggagtttttttttttttttttttttgagacagggtctcgctctgttgcccaggctgtgttgcagtggcgcgatcgtggctcactgcaacctccgcctcccgggttcaagcgatccaccacctgtgggcctccaaagtgctgggattacaagcgtgagccaccacgcccagcccagattttttaagttactacagagctcctaggaaaaatcccatacctgaaaaagttagaaactgacaggaagaatttgagatggcgacctgcctcacataaatacattattaaaattagataagaagtgcaccacggcggaggggaggggtaggaagaatggaaagagaaaatcagcgcatgcttaccctgattgtggaagaatcaaaagggcaaatcggcgtgtgcgtactctgaatttaaagtagccaatccaaggggacgctttcggcgggaaaatcagagtctcccctcccccccgccttgggaaggttctgtccctagagcctggactgacagacgccacatcagcttcgcttgttccgcctactgttctgacttctaattggccagatggagttcactaactgccctgattggtccatcatccttgggcagtgacattgcagaatgttgtcgcctcctccagccacactttgtgcgacaaagtgggtggtcctcaggcgccatcaggagattttgaactctctgaagaccgtccctggatcttgggttaaacatctggattctagtctgaaccgtgggaagaaaaaatagtcgatctgtgatttttctatttgaaagacacaatgttttccaaactagcacatttgcggaggtttgctgtacttagtcgtggagttcattcttcagtggcttctacatctgttggaactaaaaaaacagtccaaggccctccaacctcttttattcttatttttttttcttttttttttttttttgtagttttcttttttttttcttttattattatactttaagttttagggtacatgtgcacattgtgcaggttagttacatatgtatacatgtgccacgctggtgcgctgcacccactaactcgtcatctagcattgggtatatctcccaatgctatccctcccccctccccccaccccacaacagtccccagagtgtgatgttccccttcctgtgtccatgtgatctcattgttcaattcccacctatgagtgagaatatgcggtgtttggttttttgttcttgcgatagtttactgagaatgatgatttccaatttcatccatgtccctacaaaggacatgaactcatcaatttttatggctgcatagtattccatggtgtatatgtgccacattttcttaatccagtctatcattgttggacatttgggttggttccaagtctttgctattgtgaatagtgccgcatttttggaagggaatgtaagtgtggtgcgcacaattaccatcctttacctgtagccctggagagaggaaaatgtatttacttatgggatgtgattgtggtattggttacatccgccttggtcaatcctcccatctcattctcgggactacaggcatgcaccaccctgcccaggtttgtttttgttattattattattattttttagttgaaactgggtttctctatgtaggccaggctggcctcaacctccagggctcaagggatcctcccacctcctcagcctggggaccacaggcatgcaccaccctgcccacggtattttttttgtttttcagtagaaaccgggttttgctatgttgcacagactggcctcaacctcctgggctcaagcaatgcttccacctcagcctcgggaccataggcgtgtgccattctgccctgataattttttttaggagagacaggctttcgctatgttgaccaggctggtatcgaccttctgggctcaagcaatcctcccacctcagcctgggaactacaggggtgagccaccccgcccatgctatttttggttgttcttcttattagtagaaatggggtttcactatgttggccaggctggccttgacctcctgggctcaagcaatcctcctgcctcggcctcgggaccactggcacacaccacccagcccccactaatatctttaatttttctagtagagacagtttcgctatgttgtccaggctggtctctacctcctgggttcaagtgatcctcctgcctcggcctcgggactgcaggcctgcaccaccctgccttttgctatgtttcccaggctggtctcaacctcctgggttcactcaatgatttgaacccgggaaggggaggttgcattgagctgagatcccaccactgcactccagcctgggtgacagagaaaaactgtcgaaaagaaaaggaagggaagggagaagggatgggagaagg

SEQ ID NO: 1564173 - DNA, 4001 bp, Homo sapiens
ttctcttcatatacacatagatgattttctccgaggctttcatcttttcccactctttctcagagaagtatttggcaatatcatcgaaggcctagaaaaaaaaaaaggatttctgatagtgactcagctaggcatgtctgccattcagctggagccgcttcctgtgtgctggatctgggaagtagggatgataatccgtcctggttgatgccatggctaactgacagaacatggggcacctaccctagcttctcccctgccacacagtagagctttaatgctgctggctggctctcttcccaccttccagaacggactgagattcaccaaatgtattccacggtcacagacttgtctccagggatgctaggtgatgacagagcgagagtgagaggctcccaaggttccagatgtccccggagaccctggtccttgtccccagtacctctgtcctcccctcctcagaaaactgatcaccccacactgtcccctgggccactactatgccccctgcaggtcacctcaccttttgcatcttctctggtatttgagaaccaaccctaggtctccgtacaaaggcatcgtctccgttcatggcaccgggagcactctgtcctacaagagaaacagtctgagtctttccagctgcaggacctttggtcccatggagggagaaatcagtgaagtctggccacactcagtcacctggaatcaggagttgcatttctccatccgtggcttatctgtccctgagtaaggccatggggagaagtcagatgaaaacagggagccaggggtctctgggagaagtattgattggggatgacatgtttcctatgggcaaagcagccttgagtctttggagggggttggctaatgttgttagtagtttccctgaggccaggcttaccctgaaagatgtacagacccttgttgggaaggcagagatgtgactgtgtaattttattcagtgggggcgttctgacaccctcactcaatgaataaaggaagggaagtgagtcccagagataacatggtctctctggtgatggatctgatcaggcagagggatgggggttctgttctgttgaagagaaatgagcatcgctactatgaacggatttagaagctattactgggtgatttgtaaattattagaaggaagagagctagaatttctgagactacaagagcccgggaacacttagagagaatgtggggtgtttcaacatgcacaatcagccaggctcggtggctcactcctgtaatcccagcacattgggaggccaaggcgtgcagatcgcttgagcccaggaggtcaagaccaggctgggaaaaatagcaaaactctcgtgtctacaaaaaatacaaaaagttagctgggggtggtgtagcaggcctgtaccatcccagcactttgggaggccaaggtgggcggatcacttgagcccaggagcttgagaccagcctggtcaacatagcgaaacaatttctactaaaacaaaacaaaataaaaacaccttagcccttagcagaagtgggatggtgtgcacctgtagtcccaaggcctaggcaacaggatcacttgagcccaggaggaaagatttgagtgagtttttttttttttttttggtcagacaaggtcttgctctgttgcccaggctggggtgcactggcgtgatcatggtcactgcaacctccgcctcataggttcaagtgatccaccagctgtggcctccaaaactgctgggattacaagtgtgagccaccgcgccccgcccaaatttcttaagttactgcagagttcccaggaaaaatcccatacttgaaaaagttagaaactgacaggaaagatttgagatggcgacctgcctcatatacactccttattaaaactagataacaaatgcaccacggaggaggggaggggtaggaagaatggaaaaagaaaatcagcaaatgcttactctgattttggaagaatcgaaacaatcagagcgtgcgtactctgtggaaaaatcgagagagagagaaagtcagagcatgcgtactctgaacttaaagtagccaatcccagggtatgctttaggcgggaaaattagagtctccacccccactttgagaaggtgctgtccctggaggttggactgacagacgccacatcagcttcgcttgttccgcctactgttctgacttctgattggccagatggagttcactaactgctctgattggtccatctccttgggcagtgacattgcacaatattgtctcctcctccagccacactttgttgccactgcaacacccaaaaagtgggtggtcctcaggcgccgtcaggagatgttgaactctctgaagactgtccctggatcttgggttaaacatctgtattctagtctgaacagcgagaagaaaaaaatagttgatctgtgatttttccacttgaaagacacaatgttttccaaactagcacatttgcagagctttgctgtacttagtcgtggctttcattcttcagtggcttctatatctgttgcaactgaataaacagtccaaggccctccaacctctgattacagttttgaaagggaatctaagtgtggtgtgcacaattaccatcctttacctgtagccctggagagacgaaaatgtatttacttatgggatgtgattgtggtattggttacatccaccttagccaatccttccgcctcagtctcgggactacaggcaggaaccaccccacccccactcatattttttgttttttgattttttaatagagacggttttgctgtattggccaggctggtctcatcatcctgggctcaagcgatcctcccgccgcagccctgggactacaggcatgcaccaccctgccgacgcttttttaaatttttttttatttttattttttagtggaaaccaggttttgttatgttggccaggccggcgtcaagctgctgggctgaagggatcctcccacctcggcctcgggactacaggcatgcaccaccctgcccacactattttttttcctttttttttttttagtaggaaccaggtgtcgatatgttgcccaggctggcttcaatctcctggactcaagtgatgctttcacctcggcctcaggactacaggcatgtgcctttctgcccggctcatttttattttatttatttatttatttttatttttgtttatttatttttttaggagagacaggctttcgctatgttggccaggctggtatcgacctcctgggctcaaacaatcctcccaccttggcctcggaactacaggggtgagccactctgcccgtgctatttttttgttgttctgtgttgttagtagaaatgggttttcgctatgttggccaggctggcttcgaccacctgggctcaaacaatcctcccgcctcggcctcgggactacaggatcacaccacccagcccccactaatatttttaatttttctagtagaaacagttctgctatgttgtccaggttggtctctacctcctgggctcaagcgattctcctgccttggccttgggactacaggcatgcaccaccctgccttttgctatgttttccaggctggtcttgacatcctgggctcgctcaattatttgaacctgggaagcagaggttgcattgagctgagatcacaccactgcactccagcttgggcgacagagcaagactgtcaaatagataaatacatccatacatgaaagaaagaagaaagaaaagaaagaaagaaaaagaaagaaggaaggaaggaaggaaggaaagaaagaaagaaagaaagaaagaaagaaagaaagaaagaaagaaagaaagaaagaaagaaagaaaccagctgaatctccgtaaaaacagtaagctttgtggtatattaacttaccctcatcccatctcgtgctcccagcttggttctgttcattgctgatgaaatacacataggattggccagaactggtagatggctggct

SEQ ID NO: 1564174 - DNA, 4001 bp, Homo sapiens
catatacacatagctgattttctccaaggatttcatcttttcccactctttcttagagaagtatttggcaatatcatcgaaggactaggaaaagataaaaaaggaattttgtcagtgactcagctagacatgtctgccattcagctggagccccttcctgtgtgctggatctgggaagtggggatgatgccatggctaaccgacaacatgagcgacctttcctagcttcacccctgccacacagtagggctttaatgctgctgactgactctcttcccactttccagaatggactgagattcaccaaatgtagtgcacggtcacagacttgtctccaaggatgctagttgatgacagagcgaggatgggaggctctcaaggatccagatctcccccaagaccctggtccttgtctccagtatctctgtcctcccctcctcagaaacttggccaccccacactgtcccctgggccactactctgctccctccaggtcacctcaccttttggatcttctctggtatttgagcaccagccctaggtctccttgcaaaggcgtcgtctccgttcatggcaccaggagcagtctgacctgcaagagaaatagcctgagtctttccagccacagcagctttggtcttgtggagggagaaatcagtgaaggccggccaccctcagtcacctggaatcaggtgcttcatttctccatctggggcttatctgtccctgagtaatgacatggggcgaagtcagatgaaaatagggaaccaggggtctctgggagaagtattgatttgggatgacaggcttcctgtgggcaaagcagccttgagtctttgggagggggttggctaatgttgttagtagtttccctggggctagccttactctgaaagatgtacagacccttgttgggaaggcagagatgtgactgtgtaattttattcagtgggggcatgctgacaccccgactcaataaataatggaagggaaatgagtcccagagataacatcgtctctctggtgatggatctgatcaggcagagggatagggggttctgttctgttgaagagaaatgagcatggctaatatgaacggatttagaggctattactgggtgatttgtaaattattagaagaagagagctagaatttctgagactacaagagcccgccatcacttagagagaatgtagggagtttcaaggtgcagcaatcagccaggcgcagtggctcacgcctgtaatcccagcactttgggaggccaaggagggcggatcgcttgagcccatgagcttgagaccagcctggccaacataccgaaaccatctctactaaaacaacaacaacaacaaaacacacacacacacacacacattaacagaagcggagtggtgtgcacctctagtcccaaggcctacgcgagaggatcacttgatcccaggaggaaagatttgagtgagtttttttttttttttttttttgagtcatggtctctctctgctgcccaggctgggatgcagtggtgtgatcatggctcactgcaacctccgcctcctgggttcaagtgatccaccagctgtggcctccaaaactgctggaattacaagcgtgagccaccgtacccggcccaaatttgttaagttactagagttcccaggaaaaatcccatacctgaaaaagttagaaactgacaggaaggatttgagatggcgacctgcctcacatacactccttattaaaactagataacaaatgcaccacagaggaggggaggggtagtaagaatggaaaaagaaaatcagcgcatgcttactctgattttggaagaatcaaaagagaaaatcagaccgtgcgtactctgagtatggaagaatcgagagagaaagtcagagcatgcatactctgaacttaaagtagccaatcccaggggatgctttaggcgggaaaatcagagtctccacccccactttgagaaggttctgtccctggagcctggactgatagaagccacatcagcttcgcttatcacgctactgttctgacttctgattggccagatggagttcactaactgccctgattggtccatcatccctgcatagtgacattgcacaatattgtctcctcctccagcaacactttgttgccactgcgacaaagtgggtggtcctcaggcgccgtcaggagattttgaactctctgaagaccgtccctggatcttgggttaaaaatctgttttctagtctgaacagcgagaagaaaaaaatagtcggatctgtgatttttctacttgaaagacacaatgttttccagactagcacatttgcagagctttgctgtacttagtagtggctttcattcttcagtggcttctatatctgttgctactgaaaaaacagtccaaggccctccaacctctgattacatttttgaaagggaatctaagtgtggtgtgcacaattaccatcctttacctgtagccctggagagaggaaaatgtatttacttatgggatgtgattgtggtattggttacatccgccttggccaatcttcccgcctcggtctcgcgactacaggtgggaaccaccccacccccactaatattttttgtttttggattttttaaaagagacggtttcgctatgttggccaggctggcctcaacctcctgggctcaagggatccttccaccacggcctcaggactactgccattctgccctgctcatttttattttattttattttattttattttatttatttatttatttatttatttatttatttatttatttacttataggaaagacaggctttcgctacgttggccaggctggtattgacctcctgggctcaagcagtcctcccaccttggcctcggaactacaggagtgagccatcccacccacgcaatttttttgttgttcttgttgttagtagaaatggggtttcgctatgttggccaggctggcctctacctcccgggctcaaacaatcctcccgcctcagcctggtgactacaggctcacaccaccccaccaccactaatatttttaatttttctagcagagacagttttgctatgttgtcctggctggtccctacctcctgggctcaagcgatcctcctgcttcagccttgggactacaggcatgcaccgccctgccttttgctatttttccccggctgcttttgactttctgggctcgctcaatgatttgaacctgggaagcggacgttgcattgagctgagatcacaccactgcactccagcttgggcgacagagcaagactgtcaaataaataaatacatccatacttgaaagaaagaagaaagaaaagaaaggaaggaaggaaggaaggaaggaaggaaggaaggaaggaaggaaggaaggaacgaacgaaccagctgaaactctgtaaaaacagtaagctttgtggtatattaacttaccctcatcccatctcgtgctcccagcttggttctgttcattgctgctgaaatacagataggattggccagaactggtagatggctggctgttgatcatgaaaatgtcagacctgatatagtcctcctcggaaaggccttttctgggggctgatactctatgtctgcagtgctgtgggacgatgacataatgctgagcattaagccaggcgaccatgggtccacatacggtggcaatccactaggctgccgagtggccatcgcagcccttgaggttttagaagaagaaaaccttgctgaaaatacagaaaacaataggtattctcttgagaaatgaacccatgaagctaccttctgatgctgtaactgctgtaagaggaagagaattattgtgtgtatgtgtgtatgtatgtatgtatttagagtcagaggttcactctggttgcccagtatgcaatggtgcgatcttggctcactgcaacctctgcctgctgagttctagcgaatctccttgcctcggcctcctgagtagctgggattac

SEQ ID NO: 1564175 - DNA, 4001 bp, Homo sapiens
aagagaaagtctcacaaaccggatgaaactactaatacaatattaaaaattaaagccgagcactgaagcacgaaaatcacacgataacccattacagttaaggattaaaaataaaatgacatatgcaccaagggggagcggaaactaaatgtcgaaagtacagcggtttataaaaaactaaaggcaaaacaagacattctcgcgacggggggaaaaaaaggccgaaatcaacaatacgttcacaattctaggccaaaagaaaatgggaacggggctcaaagttttgcggaactacttgatgctgtttcccacaccttctctctcccacggcccatccgacccttttcgtcccaaaatcgccgtccgcagatctccggatccaggggagaagaaaaaagaaagtcgaccccgagcaagaataaaagtgtggagtgaaaacgcacaggctgcctacctggggcaaggatcagctcagttcgtgccttgagaaagacagtgcgggtgggggtgggaatgaaaagcagcactaaaactaaaacaaaagtggcgccaaaaccccccaacaaacagccttccactcccgcccttcccccctccgcccatgccaggcaggcagggcccccttcggggcaaggtctgcgcgcgggggccaacaccgccagaccccagccaatttagaaaattgttgcccgaagaaaactgaccgaagtcgggcctcggaagggatggagagatcgatgccaatcgccttccccagcagttcccccaccacgcgctggagatgatggggcgggggagaagcagaggggcccgtcacatgaatgttgttccctctctaggaagggaggaagagagggagggaggggggagggagggaagggaggaggggaagggagaagggagggggcacgagggaggggtgtgatcagagtagattttccctcgcctccctcggtccgaggcccaaatatacacaactgagcctcctttctcccctcccccctaggttcccagcaccaccattttgctctctgccttcccctcaccgcgacaccgcgctctcccccaccccaaccacagcctcccggctttcctcccccgactacggctcgcaccccaccccacctccagttcgggctctcctaggcttaggagcctgccggagaaaaggaacctaaatctactgctacacagagaagcggagcctccatcttgcgctgctccgcgttctccattttgggccacccatggggggggggggtctccgtagaggccccgagggagagttgggcgagggaaggaagagaaaatcttcagcgagggtagtcgaaaagaagagccctgcggtagaaagccactctaggagtaggaggtagggaggaaggggggctggaagttccttggaagtgttggggtagcgacttggggggagaagggagaaaggagggcggggggcgccgcgggggcgagaaagatcctcccgcctggactctgccccccgttccatggctgccccccatgggggcgaagaaagcagaggggaaattcaatggcaacagagtgcccaacctctttccctcccaactcctctctctcgccctgtttcaatcatacacacctcacggtgggccaagcgccctccgggtgcccctccaaacttctagaagcttcgcctccgccattttataacttacctcccccctcagcgtacacagaggcagcaacgagactgttcgcctcccccactcctccttctttctcaggccgggggcttcttcacccctgggctggtacaagatatttttccccttcctcttctttacaccctcgaattctactcagggacggaagctcccgcggttctagagcggtggggggttttgaaagtggcggtcggatccggcggggttttttttctttttttttttttttttttttttttttttttttttttttttggtggcgcttcgggattgtttggggtgttcgctcttcggcgacttggaggcgaatggaacgcgcaggcgccatctgtcggccacgaacccgcgcccggctcccgttgggagggagcggcatctagcggcagagagttgccactgcaacgcctggctcccagccctcccacccagcgtcctcctcccagtcaccgaccaatcgtggccgactgactcccgggttcagcgtctccgacgccgcccgcaaaccaggcgcccgcaggggcgcgccgccgagtggggtaaacaaggtgccgtgcccgcgcctgacttactcattcgtttggccgcgcttccgccgcggacccgatcgagccgcggttcttctgtctttagtggggtgtcgaggggagggcggtaggaatgtccggcggagccctgggccgtgggaatccagaggctggctgggttcgctccgggactcgttccccgggcccctccgcccctcgcgaggcgctaaggtggcagcccagtcgggcatcacccttcgaagtcccctcttctgacacacccctgtgaggggcctgtggccctagttcccgtaccttcgatgcccccttgtccctaccccttcccaccaaaagaacccaagtcgcttaactctggcacctgatcctaaatggtttaatggagctacttgggctagatcgggggcggaatacgggttggttttgttttgctttttgcttcgggtgtggagagagagcgagctgattctctaccagtaagacctagccctggaaaagaaagaaaaattgttttgctttacagcccactggtcccgtctccgagaaaacgtggtctgtatctccaggttctaggagtcctaaagaactggactactaggctaggccgggcgctcgaccaatttgttcgccactctcggggcgggggaagagataggaccgagcgaagtggagggaaatcgaaatttgggcaaaaggagtggagggggacctaccccgcctcccccgcgcatccactgccttcctgggcgggtgcaaccacgcgaaatggttgggaatttaggttacttcgcatcctgccttcccatccctcccccaagatgtttgaagtgcgaaaagaccctttctgctcctccgacccctgttaactaaaatctttgtcaccctttttttttgtttgtttcgaatccagtgtattggacctttgaccgccaagagctctttactcgggggagaaaaactcgaggagggcctatcccctccaaagcgccgctttttccttggacaggaagaagtgacctattgcagtgtctccattgctgttatagaagttcgtagattcataaaatagtgtttgcttaagaagtcttcgtttctgttccatttttgaaattttggttaaaatatttcttaaatattaaattacatttcaattagaagaaaagaaataaaacgtattaataacaaaacaaattttccaactgagaaatagggtgagccccgtgtaaatcatgaagctttcaccccgatatcacttctgaaacattcctaatgtaatataacgattattttcagtccttaaattatattccttccatatctcttgttagtttctctcccatcctctgtgcttattgttttttctgcaactttacaaaaagagttatagtatatttaatcaactggacaataaaagttaaacagaaacatctgaatatcaataacaagaagtaaaatctgagacatttttacttacctctaaagctctggagagtggaatactattcaaaataaatttccatttcttttatagaccatctttggtagaatgctatacagtttttaatagattcaagttacagaatgatgcagctagaacattaaatagagagtagtggaaaatttacagagttatataagttaatgcaaaattccacttgaagtaatagaaaaattgggccgtgtaccaagtcatttttacattaatttagttcaattgtgccaatttaatctcaattgatattaaatgatttcctgt

SEQ ID NO: 1564176 - DNA, 4001 bp, Homo sapiens
agacaaatagggaaatgtgatgaaaacgaacttaaacatctgcaattaacttacttaacgtggcaccttagttcaaaatgaaaaaaaaaaatcgactatttaacataatgtgtcataaaactgcaattcaaccacttgaaaaactgctgaacacttatataccttaaactggtccttctgatccctaattatagattgatatcaatgtagaaagaaaaccaggcattttaacgttaagtggttgaaaatgttgaaaattaaccccactgttcatcggaaagtatatgagagcaagcctaaactacctgaattatatgtcattaaacaaatgcatccacttcccagagccttttttttaacaaaataagttcagatatacccttaaacgcaacgcgctaggctacagacagaattaggagaccgcctcctgcttttgctcctaaccaatacgcagagagagaaggttggcagaaaagtgctgcgaggacagtaacaaacaccagcagctcccgagcaggccctgctagagccaggaatgacgcacttcggtaacccgactctttctcccctccacccccgcccccagcagcggtgctgacaccgccaacagcccggagtaggaaaaaagacaacagaaaaaaaggcagaggttggaccgcactaggtttcatcaagaaacctcgatgattcctctttcgacactaaccactaggactaaacaggaaaagaagcttcgtgcttaagcaagtcccatcatggtggtttaagagtcactaaattaagctgataatgagtccaatccacagagacaaatacagggtgtggctgctgcgaaatacggcggtccgtgggagaaaaggggtatggaatttacactccagtgtgaagggaagatggggctttatggtgggagaagggggtggcccgcgcattttaaggaaccattgcaaaccaacacaagcgcctcgtttactttaaatctaaccttacagatcaaaagtttccaatagatatatcatgtaaactgtaaattaccatttaatccaacaccatggccctcaatttaaaaactacatccaagagaaagaaggagggagagggaagaggggtggtaggcaacaacataaaaaacattctaggccacggaagagaaagtctcacaaaccggatgaaactactaatacaatattaaaaattaaagccgagcactgaagcacgaaaatcacacgataacccattacagttaaggattaaaaataaaatgacatatgcaccaagggggagcggaaactaaatgtcgaaagtacagcggtttataaaaaactaaaggcaaaacaagacattctcgcgacggggggaaaaaaaggccgaaatcaacaatacgttcacaattctaggccaaaagaaaatgggaacggggctcaaagttttgcggaactacttgatgctgtttcccacaccttctctctcccacggcccatccgacccttttcgtcccaaaatcgccgtccgcagatctccggatccaggggagaagaaaaaagaaagtcgaccccgagcaagaataaaagtgtggagtgaaaacgcacaggctgcctacctggggcaaggatcagctcagttcgtgccttgagaaagacagtgcgggtgggggtgggaatgaaaagcagcactaaaactaaaacaaaagtggcgccaaaaccccccaacaaacagccttccactcccgcccttcccccctccgcccatgccaggcaggcagggcccccttcggggcaaggtctgcgcgcgggggccaacaccgccagaccccagccaatttagaaaattgttgcccgaagaaaactgaccgaagtcgggcctcggaagggatggagagatcgatgccaatcgccttccccagcagttcccccaccacgcgctggagatgatggggcgggggagaagcagaggggcccgtcacatgaatgttgttccctctctaggaagggaggaagagagggagggaggggggagggagggaagggaggaggggaagggagaagggagggggcacgagggaggggtgtgatcagagtagattttccctcgcctccctcggtccgaggcccaaatatacacaactgagcctcctttctcccctcccccctaggttcccagcaccaccattttgctctctgccttcccctcaccgcgacaccgcgctctcccccaccccaaccacagcctcccggctttcctcccccgactacggctcgcaccccaccccacctccagttcgggctctcctaggcttaggagcctgccggagaaaaggaacctaaatctactgctacacagagaagcggagcctccatcttgcgctgctccgcgttctccattttgggccacccatggggggggggggtctccgtagaggccccgagggagagttgggcgagggaaggaagagaaaatcttcagcgagggtagtcgaaaagaagagccctgcggtagaaagccactctaggagtaggaggtagggaggaaggggggctggaagttccttggaagtgttggggtagcgacttggggggagaagggagaaaggagggcggggggcgccgcgggggcgagaaagatcctcccgcctggactctgccccccgttccatggctgccccccatgggggcgaagaaagcagaggggaaattcaatggcaacagagtgcccaacctctttccctcccaactcctctctctcgccctgtttcaatcatacacacctcacggtgggccaagcgccctccgggtgcccctccaaacttctagaagcttcgcctccgccattttataacttacctcccccctcagcgtacacagaggcagcaacgagactgttcgcctcccccactcctccttctttctcaggccgggggcttcttcacccctgggctggtacaagatatttttccccttcctcttctttacaccctcgaattctactcagggacggaagctcccgcggttctagagcggtggggggttttgaaagtggcggtcggatccggcggggttttttttctttttttttttttttttttttttttttttttttttttttttggtggcgcttcgggattgtttggggtgttcgctcttcggcgacttggaggcgaatggaacgcgcaggcgccatctgtcggccacgaacccgcgcccggctcccgttgggagggagcggcatctagcggcagagagttgccactgcaacgcctggctcccagccctcccacccagcgtcctcctcccagtcaccgaccaatcgtggccgactgactcccgggttcagcgtctccgacgccgcccgcaaaccaggcgcccgcaggggcgcgccgccgagtggggtaaacaaggtgccgtgcccgcgcctgacttactcattcgtttggccgcgcttccgccgcggacccgatcgagccgcggttcttctgtctttagtggggtgtcgaggggagggcggtaggaatgtccggcggagccctgggccgtgggaatccagaggctggctgggttcgctccgggactcgttccccgggcccctccgcccctcgcgaggcgctaaggtggcagcccagtcgggcatcacccttcgaagtcccctcttctgacacacccctgtgaggggcctgtggccctagttcccgtaccttcgatgcccccttgtccctaccccttcccaccaaaagaacccaagtcgcttaactctggcacctgatcctaaatggtttaatggagctacttgggctagatcgggggcggaatacgggttggttttgttttgctttttgcttcgggtgtggagagagagcgagctgattctctaccagtaagacctagccctggaaaagaaagaaaaattgttttgctttacagcccactggtcccgtctccgagaaaacgtggtctgtatctccaggttctaggagtcctaaagaactggactactaggctaggccgggc

SEQ ID NO: 1564177 - DNA, 4001 bp, Homo sapiens
gctaggctacagacagaattaggagaccgcctcctgcttttgctcctaaccaatacgcagagagagaaggttggcagaaaagtgctgcgaggacagtaacaaacaccagcagctcccgagcaggccctgctagagccaggaatgacgcacttcggtaacccgactctttctcccctccacccccgcccccagcagcggtgctgacaccgccaacagcccggagtaggaaaaaagacaacagaaaaaaaggcagaggttggaccgcactaggtttcatcaagaaacctcgatgattcctctttcgacactaaccactaggactaaacaggaaaagaagcttcgtgcttaagcaagtcccatcatggtggtttaagagtcactaaattaagctgataatgagtccaatccacagagacaaatacagggtgtggctgctgcgaaatacggcggtccgtgggagaaaaggggtatggaatttacactccagtgtgaagggaagatggggctttatggtgggagaagggggtggcccgcgcattttaaggaaccattgcaaaccaacacaagcgcctcgtttactttaaatctaaccttacagatcaaaagtttccaatagatatatcatgtaaactgtaaattaccatttaatccaacaccatggccctcaatttaaaaactacatccaagagaaagaaggagggagagggaagaggggtggtaggcaacaacataaaaaacattctaggccacggaagagaaagtctcacaaaccggatgaaactactaatacaatattaaaaattaaagccgagcactgaagcacgaaaatcacacgataacccattacagttaaggattaaaaataaaatgacatatgcaccaagggggagcggaaactaaatgtcgaaagtacagcggtttataaaaaactaaaggcaaaacaagacattctcgcgacggggggaaaaaaaggccgaaatcaacaatacgttcacaattctaggccaaaagaaaatgggaacggggctcaaagttttgcggaactacttgatgctgtttcccacaccttctctctcccacggcccatccgacccttttcgtcccaaaatcgccgtccgcagatctccggatccaggggagaagaaaaaagaaagtcgaccccgagcaagaataaaagtgtggagtgaaaacgcacaggctgcctacctggggcaaggatcagctcagttcgtgccttgagaaagacagtgcgggtgggggtgggaatgaaaagcagcactaaaactaaaacaaaagtggcgccaaaaccccccaacaaacagccttccactcccgcccttcccccctccgcccatgccaggcaggcagggcccccttcggggcaaggtctgcgcgcgggggccaacaccgccagaccccagccaatttagaaaattgttgcccgaagaaaactgaccgaagtcgggcctcggaagggatggagagatcgatgccaatcgccttccccagcagttcccccaccacgcgctggagatgatggggcgggggagaagcagaggggcccgtcacatgaatgttgttccctctctaggaagggaggaagagagggagggaggggggagggagggaagggaggaggggaagggagaagggagggggcacgagggaggggtgtgatcagagtagattttccctcgcctccctcggtccgaggcccaaatatacacaactgagcctcctttctcccctcccccctaggttcccagcaccaccattttgctctctgccttcccctcaccgcgacaccgcgctctcccccaccccaaccacagcctcccggctttcctcccccgactacggctcgcaccccaccccacctccagttcgggctctcctaggcttaggagcctgccggagaaaaggaacctaaatctactgctacacagagaagcggagcctccatcttgcgctgctccgcgttctccattttgggccacccatggggggggggggtctccgtagaggccccgagggagagttgggcgagggaaggaagagaaaatcttcagcgagggtagtcgaaaagaagagccctgcggtagaaagccactctaggagtaggaggtagggaggaaggggggctggaagttccttggaagtgttggggtagcgacttggggggagaagggagaaaggagggcggggggcgccgcgggggcgagaaagatcctcccgcctggactctgccccccgttccatggctgccccccatgggggcgaagaaagcagaggggaaattcaatggcaacagagtgcccaacctctttccctcccaactcctctctctcgccctgtttcaatcatacacacctcacggtgggccaagcgccctccgggtgcccctccaaacttctagaagcttcgcctccgccattttataacttacctcccccctcagcgtacacagaggcagcaacgagactgttcgcctcccccactcctccttctttctcaggccgggggcttcttcacccctgggctggtacaagatatttttccccttcctcttctttacaccctcgaattctactcagggacggaagctcccgcggttctagagcggtggggggttttgaaagtggcggtcggatccggcggggttttttttctttttttttttttttttttttttttttttttttttttttttggtggcgcttcgggattgtttggggtgttcgctcttcggcgacttggaggcgaatggaacgcgcaggcgccatctgtcggccacgaacccgcgcccggctcccgttgggagggagcggcatctagcggcagagagttgccactgcaacgcctggctcccagccctcccacccagcgtcctcctcccagtcaccgaccaatcgtggccgactgactcccgggttcagcgtctccgacgccgcccgcaaaccaggcgcccgcaggggcgcgccgccgagtggggtaaacaaggtgccgtgcccgcgcctgacttactcattcgtttggccgcgcttccgccgcggacccgatcgagccgcggttcttctgtctttagtggggtgtcgaggggagggcggtaggaatgtccggcggagccctgggccgtgggaatccagaggctggctgggttcgctccgggactcgttccccgggcccctccgcccctcgcgaggcgctaaggtggcagcccagtcgggcatcacccttcgaagtcccctcttctgacacacccctgtgaggggcctgtggccctagttcccgtaccttcgatgcccccttgtccctaccccttcccaccaaaagaacccaagtcgcttaactctggcacctgatcctaaatggtttaatggagctacttgggctagatcgggggcggaatacgggttggttttgttttgctttttgcttcgggtgtggagagagagcgagctgattctctaccagtaagacctagccctggaaaagaaagaaaaattgttttgctttacagcccactggtcccgtctccgagaaaacgtggtctgtatctccaggttctaggagtcctaaagaactggactactaggctaggccgggcgctcgaccaatttgttcgccactctcggggcgggggaagagataggaccgagcgaagtggagggaaatcgaaatttgggcaaaaggagtggagggggacctaccccgcctcccccgcgcatccactgccttcctgggcgggtgcaaccacgcgaaatggttgggaatttaggttacttcgcatcctgccttcccatccctcccccaagatgtttgaagtgcgaaaagaccctttctgctcctccgacccctgttaactaaaatctttgtcaccctttttttttgtttgtttcgaatccagtgtattggacctttgaccgccaagagctctttactcgggggagaaaaactcgaggagggcctatcccctccaaagcgccgctttttccttggac

SEQ ID NO: 1564178 - DNA, 4001 bp, Homo sapiens
ctttgtaattttgctgagggcagacatttaaaaaatttctcactcatattttgtaggagaaagatcatttgaatccccacccccacaggaaggacacaacagtctccaaataaagaatagtcctttgagttgaattaatttagttttatgaacactgcacgacattatccctacttttctctcattccaccacagatggttgaaaaatctcattcaggacccctactagatgaggaccatgaatccacagattaattccaaaccctttgggaagtagtctctgcttccctttctcaagctcctatcctctctaaccctacatttgagccacatcacgaaagaagcctttcccccagcccactaccatttgactgcctccaaactctagctcacgaagttccctctgccaggcatgcctggaatgcccttcccccacttttggactgacaaactcttctcttcctttaagcctcaggctcagcccaaatgtgacctcctgtgaaacctctccaagtccctcccggtggaatggatctttccttcccaaaggtcccagcattctttcatcctgtcttacagtcaggctagtcgtttgaaagtcttcctactgggttggactgtgggaaaccacacagcgtcaagaaaggcatggacttaggagctcagatcccagctctgccagtcatatctgagcaaccttgtaaatatttcttaactattcacagtgtcttttccctatctataaaagcaggaaaacaatgggttgtgctgaggatcactgccacatgaatgaattaaaagtgcctaggtctggtacatagtggatactaaataaatattagtttcttggttcttgagagtggaatcatgctttacacacacttgtgggttcggctgtgctcatgtatcccccatggccaggatatagtagacactcaacaaatatttactgacaaactgactatttagcacaatgtctggcatatagtaggtgcctggtaaatatttgtcacttttcttatattctctttgaggacaaaagccatgtccttctttgtcttcttttaaaaaatggagatgggggtctccttatgttgcctaagctggtcttgaacccctggcctcaagtgatcctcccacctcggcctcccagaatgctgggattacagacgtgagccactgtgtccagcccttttttgtctttgtgtagctccagtggtgcctagcacagagtatgtgcttttatatatatggatagaaattaataataataataataatagataccattgtttgtgtggatgctccacaccaggcatcctgctaggaagcttacacacattatctcctggatttgcatacatttgctatgtaaacaataacaccaacctcatcaccccgtaaggttggtgttactatggtcctcattctaaagctgagaggaaactgaggttcagagaggttaagtatcttgcctttgtggcaagatccaggaagcaacagaggcgagttttattaaaaagagccaactagcagacttgtttgtatgggaatgcaacagaaggtcacagaactggttaagtgacaaaggtgagacttgaacccaagcctttctaactccgagagcctcaggtagtctcagaagcccgtctggtccgttttcccagctggtgcgcagtggtccacatctgcctccttcccccctgagcagcgggatgggctggggctggccagtcacttaccttcaccttcctgaagcaagaccagaaaacgtccagcagaggcatggtggcgcgtggggagcttctagggccggcggggctgtgccgggcaccggctcctccctctctggggacgaggctaaaagaggcccggggctcggcgagagccagcccggtccctgcgctccatgagccggccccgcgaggggagaggcggagagcagcggttgccggggctcagctgcctcgacagcgggcgcctcccgcctcctggaaggccaccgagggagggaaaaaaggagggagggagagaggccggctaaggaggagggaccaggaggcgggtcactgattcaaactcggcaccgttagccagttggctggaacgggacagcaatgccaattgaaattccctgaacattacagttccccggctccgggtgtccggccctcctgccggctcccctgccagccccgccacctgcatgctggcattgcctgcctgcttgcttcttggctgactgacacgccagctctccttggggacctctcggtagagcccagaccacacagggcctgtggaaagagtgccaaggaaaaggggcaaggaaggagagccccggccccagcaggaccgaacaaggtgtgaatgcagtccacggaaggggaaaagcttgcagccttagaagcccctctcagacaggtgccctggccctgcctcagtagattattctccagccctctgaagtgaggactcttgactcactgtggcatctcggagaggccccttcctcctgggtctcagttttcccagctgtacaatgagatgccgggttagaggtctctaagtatcaaatctgtttggggttaggtacagggcaagtctcaaagaaactccactctggacaatcacagttcctctcagaactcccctgctgctcctgggagtccataggaagtcaggtcttgccccaaagagaatctgagccctcaaatgccatttcatccatccccctgccccagggcataacagcagctctctcccagctcagatagactgggtgtatgcccttttctgaacatcttctgaagagatgatggcttccctcctttatccagtcccatgctcaggaccctctaagcccagaagtttagcctgaaatctaaacttgaaccctctggatgccctgaaaggaaagaaagtcagcagcaggcagttctagaggctttctgggcagaaagccattaagaagcagtgaccctccccctctctcagcccctccccagacatcagaaggcagggtgccatggctggtagccagaaggctcccagggaccccatggcaaaaggccaggcttgggtctctggaggcacatgtcatcatgaggcccagaataactaactctccctggcctcacttctgtttcagagacccaagctagtcaggcaaacagccaggtcctgggaccctggaaggtcctaggttgctttaagcaagcctctacctgccttcggggactttcttcatcagtggctttgtccggaggtttgtccagaggctctgtgagggtccccccagctctgtttacaacttactctgtgaccctcagtttcctcgtttgtaccaaggaggctgcaatcactgacctcaccctctctctagctccgacctcaggggtgtctcagatgtgagttctgttgggctgtgtcgggaagatggtcagcaagagccaaggtaagtggcttccaacccacgtccagctgagcacaggcttataaggggaagccctctgcatgtgggggaggaataacacgaggagtcagagcccagagagagttttctcctttgagcatatgccctcctgccctgcagccagagacctgaggatggagaactgggaagcaactattacaggaaaagctgcctgccctcctaggatggcctcatagtctttcactctctggagttcacctccttctttccattccagcccctgggaggagatgtgtcagccgtgcctttgggcattcattcaggaggcattagtgcgcagcacaccacattaagctaagaaaccaggagacttcagtttcaattctgggtctctcacaccagttttgtcttgaggtggttttaagccatgaactcggaagttgactgcctggattcaatactagttctgttactctttaactggtgaccttgggcctgttactgccttagtgtgcccatccgtaaaatggggaataataatagtacctacttcctttgggaggtt

SEQ ID NO: 1564179 - DNA, 4001 bp, Homo sapiens
aagcaagcacacagcgcacacagcccctttgctttgcacaccttcagttcagcccttcttgctctaaacacctccagatatcatctgtaggcagcttctcctctctaggtgggggaggggagctgtagatgcacagagaggtttagcataattctccaaaaacaggagaggcagtgtccagtgtggtgtttcctagcactaaatatagaggtctagggagcagaaatccaaaatccaaagtccaacacattaacaaaaggccacgtccctaaaatgaaaaccagcccagaatgtccagctagatggcagctgtacctttagagtgaaagagtttcactaccgacccctatgcccttacagcaaaacaccacccttcccatcacactcttcccactgcgaaagccacccagaaatcacctgcagccttcttctccatgcctttgggctgcccaccttcccatcgcatccgcagacaagatttgtccccctttcattccaggaggatgaaaatgagaggaaaactcagagggcaataatacaggtgtggggggcgggggggcggcaaaccctagagtggggagggagcaggtcgcacaggaggagtcagggtttgaaaatagccctgggtgtgattcattaacccctcctccccgcttaggctctgactgggagagaagccaggccctgggacttgggggtaagcataggctccaagccagcccaatctctgaggcccccaacctctggggccccaggctctggaagaaaactcccacctctccctaccttggtctggctgctgtcgcccacccctccacgcacactctagttttccagctggcttagctgcataatcaccacaaagctctccgtgtgcatagctgctgccaccccgagcgtctcagagacaaccttttacctgccagttaggagcctgaccccaggtaccaagtaaacaaatgtcagggtgaaagagaccgggccctttagatactgaaatcaagctgccacctgaggtgtggctgaaaacactatggcccacacagtagtatgactcgcctaaggtcacatggactggctgaaccccagtttcctgagtcgtaattcagcgcgcaactttcacaagtgtcaggaggaacgtggagagaaccccacactacctaatttggaaattccaaaaacttccactaaaagcctttcctctaatccaaacccattttggactttatgggaaaatgaggcctatgaagatgagacgtgtccaaacgttttcgcttggtccccgcagctatcttaataccaagaagtcctgggcatttctcaggagagaaagcaatgaggcagtggccgacgggaaaacccatacagccggacgggggcttcctggaaatgccctcgaaagcagagaaaggagagggcaggagatctggcgcgacccggcaacagagcctgaagctctgccgcccccggccagctgcaacgcccctccaaagccccagagcgacggctgcgagacccacgggcccggcggtaacaggcggacagctgccttccaccgccccactcgcgaggcttcgctggaagacgcgcggctggcgcgctcgggggtcccccaatttcggcgattctgaccccccaatcccaggggcgggggtggctcggctcgcttcctccctgtctcttgcgtacgccgcccggcggaaccgctaggagaagggccgagccggagcgcgccagagaggcaaagcggggagagggagccccaggcgcccccgtttgtctggatctccccctgccgtcgcccagactcctacctggaggccgcgtccacccctttgggttcgggcgctgacacagagcgagcgggcaggaggcgagcccaggagggactgctccgtccgggacacacgcggggcctggggtcgggcaggggtgacggtgccagccagaagagcagctgccgcggctgcttagccgttgtcaacccgagtccactcagctcaagtggggagggagcgtcggcgagtagggctgtagggacgccccgcccacctcccctcggccaatgggggcgcagtctggcccaccggactcgccagaaagtcacccaaatctgggtgggcggggcactgcctgcaggtcctccaaggccctcgccgctgcctttccctccggtcacaccgctgccagggaggaggtgcaagcccaaagactgaggctcaagcagtgacttggccaggcacacaggctaatatttattgagttctgaatgagtccggcactgtttgggggatttaaacacatatgctatgtgcccgggagggttcagtgacttgctcggataatttatgggatgtccagaagacacaacttcagtgaaatctccaattggtaggggaaaaccagataattaggaatttgagcaggaagctgccatccctacgttgctcaggccccagtggctctgcaacttccccaataccccaggcttctgtcccctaccccaagtctgaactctacctccgcagagaaatgcatggaaaatttggggcacgaacattaatcgtggcaggggagggcttccaggagttctgatagtaagcaccaccagaaagtccattcaaattcagtaagaaacaagagccttcggctttgatttctctctggcctttcatcacaagggtccaacacaagttcacaaccttgatttcattgttgaattgaggactcctattagtcaggtctgagagtatccaggacctcatgcagttcaactgctatccctcacatttacaaagacagaaactgagcagactttaagcatgactcacttaaagctacccagcctggaactcctgtggtcaagaaaatctcctgcctcaacttcctgagtagctaggataacaggtgtgtgccaccatgctcagctaatttttacattttttgtagagctgaagtcttgctatgttgcccaggctggtctcacactcctggcctcaaatgatttactcagcaaatccatggcagggtcaatacctgtacactggttattttctccacaccattcctagaaggcaggaactgcatccatctaacttgcttgttagagtatctgatacagatgagagcaaaaatatctgtctctgagggcagcaactttatcaaggtcacccagggaaagacagagccagacctaacccagccccaagtgcccctctcctgtctagctttcagttcactaggccaaactgaaattctcccacattccttccctgctggccctgatgagagtcagaggagcaatgataaagtgacactaccaccactgtgtgtcccatgtatccctcttttcctcttgatggcaggactgcccctcgtatcctctagcaatttgttcaaggtgcgccaagtccctgtgggtctatggatgaggcctgcacaccagaagttactcccagaagcaaaatccttctggtgggtgggaagggatatgacctccttcctgaggctgggctttaacaattgtaagcatccttaaggctctgagttgaagccaaaggcatcttgcctgtgcacagtgctaaaaaggacaaaaagtggggtcctgcaatgattttatcatttccctaagggcaagaaaccttgtcaaagccaattccatccactccaggaaaccaagcacagtgcttacagtactttcctcactattgtttgttaatgaatgaacaaatgttgaaagatattcaaagcacaaccaaaaataaatgacaatcatatgactaatgagcaaagtcaacttatcttttagtagatacatttaactgaatcagatatcatgggttctgagacaccagctgtatttttttaaaagccatcaaaccaggaaacaaaaaaggaggagggtatagtatgaaaactaccaaaaaatggggcactgctataaatacttagaaggagaacttcgcagtgcctggcatagagtagatgttcaataaaaatgc

SEQ ID NO: 1564180 - DNA, 4001 bp, Homo sapiens
actcaaattaggtgggacaaagtaatcacaactcagagggcacagagtgaaaggcagaatttgtaatttaaagtatatgattcacattcgaatccacattaattaagatttaaaaattcaagagataggcaactcagataattaaaagcagggagcaatcagaaatactgaacagcaagcagttcctaaaccatataaattcaataagttcaagacaaataaaataaaaatcagaaaccattttcccctcagcacacagagttccccagaatcacaaacttgatgaactggaggcactcactctgctgacgcacacacgcaggctcgcgcacacaatggagcgagaagcatggagaccctcagagacaaacttcacatgtgcatcgttttactctccacagaatggaaagaagagcacggtgagaaaatgtcactttttcccagatcaaacagcaaaactgtacttagtattgtgaactatgaattcccttgatacaatcaaaggcagaactgaatgaatggggtgtggggcagggtgcgtggggaaaagaaggagggaaggagaggggaggccgcctgagaggaagaaagtttaaggcattttgcaaggcttgagtggattaatctttttttttaagccctactatttcctatttccctttctctctctctctttatttaatatacactaacttcctgagactcaacccagacttgccctaaatgcagctgaaatgtctggtgtttaggacacaccaagagttctaggtgcacaaataaatcccattttgggaaagaatttaaaaatcacttttgtggacattcataaaatgagaacactgaaaaaaaaaaaaaaactccatgtatcaataagtaaattgaggccccagtctacagctctttgatttctactagaaatataagctatttactataaacattttatttttgaacttcaaaaaagtttgttttcacattttagatcatgaaagactgaggcttcagtggttttagcccctaaatgggttgtttaggccatctagcaaaggaaaaaaaaatagaacatgaatgctttaaaaagttagtaaatttggataacacttagcagatagcctaaaatgcaccgatttaaaaacataacagcataaaaagttttctgacatagcttatctttaataaaatgaaaatataatgggagggggttgggctgggtagacttcgagtaacaagttgggtcccatgcagtagtcccttgtccaagacaaaaagcttcctttaaccacatgtaacagtcatcttgtgggaaaggcacggagggggctgagaagtcatcacctcagtgactctgaacagaaccagcatttctcacgccacactatgggctgggctaggtcggggagcaagctacaactttgcccttaagcagcagtaccgaaagggagaaagaggtcacctctctcttagccctacgcacacaggaagagcccaattcaagccgccgccgccgccacccctggtgttgccccgccccaacttgagtgtgtgtttggggtggggggtgtagggcactcactactcgcgttataccccacaaattccaaggcacttccatctctcccaggttaagttccgcccccccatccccaaccgtgccaagctcagcaggcgcaggtgtctgtggctctggcctatttttatacccccaaccgccctcaatctccacctagttgcgcgctccagtcccgcctcgccttcccagcgaagagcactacctagcctacacaccaggaaacacctccagccctactcccaggtcacctggccatagtgaccggccctgccctcaggggagccctggggccgtcccttgtcgccggtgcccagcaccgagggcgcaccgggctcccaagcagtcacgtgggcggcgggggcggcctgcgcttcctcacctgcatcccaggcacttggacagccaccggcgagtgggccatggaggcgaatgctgcctcgctccgcttctgcggcggtggcgccttgggttcggactggctcctccctccgggggtagttcggcggccctcccaggcttttcgatcggggcctgggaggacacacaaaagtggggttactgggctggcggcgcgtagcccggggctaggaggtgggctgttagcggcgcagctccctgggactcagtctacctttctggcgcccgcccgccgctgaagcagccgcctccgctgctgctcctcttcctgaacgccgagcgctgtgagtggtggtggctgggacctgggctcgagtgatgccgctcctctgcgcctcgccgctttaggaagaggaggtggaggcgccccagccacccgcctgctcgcctggcctgggaggcggttgggggcggttccgccgttggccctgcccccgccccgcagccgggcggtgtcgcgggagccaaggctccaggcagcgaagaggtttggctggggttgctggagtctgagaagctggagactctcccggcacgcggagaggagaacccggggacccggagacctgggacatggctgggcctgggaagagaatggaagagtttgggaaaccctgagggtatgagggcgccccagatgcggccacgttgcagggaggcgtgcgaggctggggcacacgcagcctcggagacgacttgagctgaaacttggggagtgttggaagtctttcttggctccccggcctggccaagggtaggattacagatagccgcggagtcggtggacccccgctttttcccgccatctggtctcctcagctgggggtcgcgcctctgggcagatctgtggccacactcttgctttccgagttccctgaccccaaacatgcttcaggtgacttcaacttaaggttccccctacctcctgggctatcccttgcagaacggccaaactagggcttctctctaccacaagttctgcacgtgtaaggcagagggaaattggaaaacagatggtacatcggcagaaaaattaatgaggatagtagaggcttgggaaatgagattggatcgttagcagtacaggttattgaaatcagcatacactgcagtggttttggtaactccctgcctccgccccattttaagttctactccaggagagggagacaggctcttttgagagtactctaacagtagcgacagtaacactggtaataatagtaacaggaatttcattatgaaggcacctttgggaacacgtaaggggttaattactttttaaaaaagtaatagtcgagtgccagtttaaaatgaagatgaagttccttaccttgaaatttgttatgggtctctacgcaccacacggtggggggcctctagtggtaaaagatagtttctcttcttccttttaaatctttttcagagaatagtatataattcttatcaatatcgttattattaatggatattattttcattgtgccagggactgctaagtgctttctatgtgttattaataccttactgaacctgtacaagggccttctggagtcttattgatttcccctcattttacagatgaagaaaaaggctcaaccaggttaaataatttgaccgaaatgtcacgcaattaagaagtggtacagctgggaattcagacgcaggtccctctgactggtgataaacttactactttctctatggtttctgtttgtgtttaatgatgataaaaggtacaattgcattttccttactcctagttccccaagtccagcccttcactatttctaacctaatgttaggctccaatctagtctcgatttcccaccaacccagctcacaacattgccagcctgaccggaaacctgcagtgccacctaaacttttaatgtccatagaaatccgagggttcttttgctccctcaaaagcgcagatttttatctcccatgtctggactgggcccaagattctgcaatgctaacaagctctcacatggtgatgatgtttaga

SEQ ID NO: 1564181 - DNA, 4001 bp, Homo sapiens
ctctccacagaatggaaagaagagcacggtgagaaaatgtcactttttcccagatcaaacagcaaaactgtacttagtattgtgaactatgaattcccttgatacaatcaaaggcagaactgaatgaatggggtgtggggcagggtgcgtggggaaaagaaggagggaaggagaggggaggccgcctgagaggaagaaagtttaaggcattttgcaaggcttgagtggattaatctttttttttaagccctactatttcctatttccctttctctctctctctttatttaatatacactaacttcctgagactcaacccagacttgccctaaatgcagctgaaatgtctggtgtttaggacacaccaagagttctaggtgcacaaataaatcccattttgggaaagaatttaaaaatcacttttgtggacattcataaaatgagaacactgaaaaaaaaaaaaaaactccatgtatcaataagtaaattgaggccccagtctacagctctttgatttctactagaaatataagctatttactataaacattttatttttgaacttcaaaaaagtttgttttcacattttagatcatgaaagactgaggcttcagtggttttagcccctaaatgggttgtttaggccatctagcaaaggaaaaaaaaatagaacatgaatgctttaaaaagttagtaaatttggataacacttagcagatagcctaaaatgcaccgatttaaaaacataacagcataaaaagttttctgacatagcttatctttaataaaatgaaaatataatgggagggggttgggctgggtagacttcgagtaacaagttgggtcccatgcagtagtcccttgtccaagacaaaaagcttcctttaaccacatgtaacagtcatcttgtgggaaaggcacggagggggctgagaagtcatcacctcagtgactctgaacagaaccagcatttctcacgccacactatgggctgggctaggtcggggagcaagctacaactttgcccttaagcagcagtaccgaaagggagaaagaggtcacctctctcttagccctacgcacacaggaagagcccaattcaagccgccgccgccgccacccctggtgttgccccgccccaacttgagtgtgtgtttggggtggggggtgtagggcactcactactcgcgttataccccacaaattccaaggcacttccatctctcccaggttaagttccgcccccccatccccaaccgtgccaagctcagcaggcgcaggtgtctgtggctctggcctatttttatacccccaaccgccctcaatctccacctagttgcgcgctccagtcccgcctcgccttcccagcgaagagcactacctagcctacacaccaggaaacacctccagccctactcccaggtcacctggccatagtgaccggccctgccctcaggggagccctggggccgtcccttgtcgccggtgcccagcaccgagggcgcaccgggctcccaagcagtcacgtgggcggcgggggcggcctgcgcttcctcacctgcatcccaggcacttggacagccaccggcgagtgggccatggaggcgaatgctgcctcgctccgcttctgcggcggtggcgccttgggttcggactggctcctccctccgggggtagttcggcggccctcccaggcttttcgatcggggcctgggaggacacacaaaagtggggttactgggctggcggcgcgtagcccggggctaggaggtgggctgttagcggcgcagctccctgggactcagtctacctttctggcgcccgcccgccgctgaagcagccgcctccgctgctgctcctcttcctgaacgccgagcgctgtgagtggtggtggctgggacctgggctcgagtgatgccgctcctctgcgcctcgccgctttaggaagaggaggtggaggcgccccagccacccgcctgctcgcctggcctgggaggcggttgggggcggttccgccgttggccctgcccccgccccgcagccgggcggtgtcgcgggagccaaggctccaggcagcgaagaggtttggctggggttgctggagtctgagaagctggagactctcccggcacgcggagaggagaacccggggacccggagacctgggacatggctgggcctgggaagagaatggaagagtttgggaaaccctgagggtatgagggcgccccagatgcggccacgttgcagggaggcgtgcgaggctggggcacacgcagcctcggagacgacttgagctgaaacttggggagtgttggaagtctttcttggctccccggcctggccaagggtaggattacagatagccgcggagtcggtggacccccgctttttcccgccatctggtctcctcagctgggggtcgcgcctctgggcagatctgtggccacactcttgctttccgagttccctgaccccaaacatgcttcaggtgacttcaacttaaggttccccctacctcctgggctatcccttgcagaacggccaaactagggcttctctctaccacaagttctgcacgtgtaaggcagagggaaattggaaaacagatggtacatcggcagaaaaattaatgaggatagtagaggcttgggaaatgagattggatcgttagcagtacaggttattgaaatcagcatacactgcagtggttttggtaactccctgcctccgccccattttaagttctactccaggagagggagacaggctcttttgagagtactctaacagtagcgacagtaacactggtaataatagtaacaggaatttcattatgaaggcacctttgggaacacgtaaggggttaattactttttaaaaaagtaatagtcgagtgccagtttaaaatgaagatgaagttccttaccttgaaatttgttatgggtctctacgcaccacacggtggggggcctctagtggtaaaagatagtttctcttcttccttttaaatctttttcagagaatagtatataattcttatcaatatcgttattattaatggatattattttcattgtgccagggactgctaagtgctttctatgtgttattaataccttactgaacctgtacaagggccttctggagtcttattgatttcccctcattttacagatgaagaaaaaggctcaaccaggttaaataatttgaccgaaatgtcacgcaattaagaagtggtacagctgggaattcagacgcaggtccctctgactggtgataaacttactactttctctatggtttctgtttgtgtttaatgatgataaaaggtacaattgcattttccttactcctagttccccaagtccagcccttcactatttctaacctaatgttaggctccaatctagtctcgatttcccaccaacccagctcacaacattgccagcctgaccggaaacctgcagtgccacctaaacttttaatgtccatagaaatccgagggttcttttgctccctcaaaagcgcagatttttatctcccatgtctggactgggcccaagattctgcaatgctaacaagctctcacatggtgatgatgtttagatcacacttttaagtcgcaagggtctgaatcaagctccatcatttaagacctgtctcaaatctcacctccattgacccttcctagttgctccaagccctccttcaaactcctccaatgtgagcagcgctcacactgtagttctttcttcttatttcatatatttcatttgttttgtgtgcccatattaggtccttgagggcagagatccagcctctcttacatgagaatgattcaggtaggatggcaggagtctgagggcaagctttttatacattttgtccattgctgtatccccagagactaggttcatggcatgtagtaggccctcaataaataattgttgaatgaatgaatgaacttcttttgaattctccactgaggttactaggtg

SEQ ID NO: 1564182 - DNA, 4001 bp, Homo sapiens
ctccacaagggtgctgattaaagctttgtaccgaaccagagaggttactgagcctgtgctatacagctctgcactattccataatttacatcaatgatttgtatgaatcgactatcagaatatttatccaacatggggaatggcatgtgcgtcagaagagaacagagattcagaaaagaccttgagaagtggaacaaaagatggaagtcacaaaattaaatgcaatggggaaaacacataatcttcttatttaagaaacgtaatcaatgacacaaagatgccaatattcagacgtgacctacttgcagctcctacgaagaagactttagacaactacaaagcaagttttgtcagttggggaagggaatgactgagaagactgaagttaatactagtttggtgtacgttaagaagaagatgcttttgggacaaggaagatgagttccactcagctgtttacacgaagtcagaccagagtcggaatatttttcagtgcagatccctgcgatttaagagggatggagattcagtggcatatcaagggagagtgatcaggatgcttaagggtataaaaaccatctgatggccaggcgcagtggctcacgcctgtaatcccaacactttgggaggccgaggcgggcggatcacgagatcaggagatcgagaccatcctgactaacacgtgaaaccccgtctctactaaaaatacaaaaaaagtagccgggcgtggtggcgggctcctgtagccccagctactcgggaggctgaggcaggagaatggcgtgaacccgggaggtggagcttgcagtgagccgagatcgcgccactgcactgcagcctgggagacagagcgagactccatctcaaaaaaaaaaaaaaaaaaaaaaatctgacatccaggatttcttaggaatcggtaacatttcacccagagcggaaaatggcattcgagttgcacttaagtgtgctcgaatggtggtctgtaaaagagagaaaggatttagccattgtctcagaagccacagctgggacagtgtccagaacagaaccagggacttacaagtgctgccagaccacgaaatgatcagcctctcaaagtcccttcctcccatgagggaattgggtggagggtgaaaagccgcatctgtcggggatattgcagaagggattcgtttatggaaaattaggaaatttaaacaaagtggctcccaccatctttctcaaccagaagattccgacagcccatagacaaactcgtcatctgagatacatagaagtgggaacaaaaaataaaaacacaccaatggagacagaaacccaacaaaacaagcattctttcccactctgcaacacatatgcatgatgctcttcctcactccaccttttagacagtgaatgacatctcctgatgcaataaacttgataggaagatgataattaacaaataatttggcaacaaaatttaattataggtcatttagatgttttgaaacagccacaaaagcgatttgcatgtcactaattagccgcatttataacctctcctaaaatgttccctcgctaagcctcacagaaaatcattataatcaatggaaattaccaagcaaaaacagatttaagaaacaagaacaagacaacacatgttgggagaatatgcaacacaagcaggtagctgctgtgaacatcccaactagtatgtttcagggttaaaaactcccagcctggccaggggaatagacgcttaccttaaaggcatctccagcttgtgatcctgttgttggggaactgagctgtgatggaggagattgcaacttcacttgttcatcctctgttcatggtttctgcaccagtgggagtttaataagcatattcccatgagaaacctctgctttgaagcaggccaatcctactcaatcactgcaacctcactacagctgggtcccgtcagctgctggaggcttggccaacagcactgtgcttgggcagataatgtgaggcggagacactctttgcctagttgctgcattcttttgggagtttcaggtgatcctggtaaaccggattcttcagaaggggcaacttctccccttcggtatgatttgtgtcaaagataaatgcagacacaatctgatacccaagcggtttatgctagcagcagtgttatgaaacttacagcaggaacaggccagtgacatgggccatagagaatgagatggtcagataagagactgaacgggagtttaagggattttcccccctctcttatacctgtcttcagtctgggtcaatgaccaggcatttctttcctaaagatagtttaagctattcttataagagtaagctttattttaaggtctataaaagctgcacctgtgctgaggtggttttagcttttggaaagcccaggtttgctaactgcagagccaggttgcatcatgctgctaagtgacaagtggtgtcagcctgagagaccctcaagtgagctttttggcaatcgttgatcttataaccacaacatatctcttattatatgctgttccagcctaagtgagcattttcttggtggatcccttgaatattttctccctttcagctcagcaaccatgacaaaacaaaaaaagaggttgctaagttgaaataccaccgacattgtcgcattccacccgaaccctttgatcttggaaaacagcaaaggttaagaaatcccttgacaaagattccttccttgaccaaatataacccagtctcctgaatcttgttctaagattatctgtgcacttctttgtaaaatccagtttttgcaagaagccctcaccctcactatctgatcacacatgatatcagatcattctctatagggttcctcaacctccacctgcccccaggcgatgtctatattcttagcattacatagatgttaaaagttaagcacatagattagtgacgcatacataagcatcattttacaaggtcagcaatcccgcaggaaaagcaaaattgcagtctacatatcaatgtgactaatgattcaaaaaagccaacttttcagatttccttgaagggcatacgatgaagaatggaggataaaacacaaaaacaggaaaagtattggcttctctcaggaatctgattgcatcaagtataaaggttccttagaacatattaatgcaaagttaaaataaaattttccttggcaattaaaaatgctgtgcgctaataccctgctttctaatgtgattcaattcaacaatgtggggaatgtttactacacttccagcttgatgtcaagcaatggggaatacaagttccagttctgcaaagattcatcaactcccttcttagttcaagagagaggctgagaaatgcagagaggaataagacacaaaacagtcccaacctccatgatctgagagtggggaaaggccagattgttacccaacaggcacacactctaaggcctttttaggggctcacaaaatgttttaatttgtgttataatcagaagaaaatgaacattggggattgaagatcatattggtatttgcaccaatatagttgtaaaatacaaatgttaatgttttatgtttttacataatatattttcatattaaaacatatttaatatgttttgccttcatggcccatgaaagtcttactgggccctggggaagggactctagcctggtgaagcagcggctttgctctacaaatacctggggcagaaatttgatttgaaaaatatttttctctcttctctctttcaaccagattccttaggaaaaccaaacaagagtcaaaacaaacctccgaagcagtaagaggttggatgagatgggcatactattgggactagaactggctctcatacgcccgagcaattttaataaaaaggcaaaaagttgccatagagaggctgctggcaagtgcatggccatagggggccgacatgctcaggagggaaggtgttgatcatgtggaggcctctaaaagctaaagccttg

SEQ ID NO: 1564183 - DNA, 4001 bp, Homo sapiens
agaagatgcctgcactgcaccgggccttgcatctggtagtggacctcctgaggactgaaggtcactgccactgattcctgcaggagcgggggcacccgagccaggggcctgcacaggcttgaaactgctccccaaagcctgggctccctggactgggccctccacattgatggcctttaggccagtggagcctgtcctcaactgaatggctggcgctatttttatgaatttggtggggggctgggcagctggacagggcctgctagcttgaatgagaggcacagagggcttctgagaatgacttggtgccgcagaagcagcagcagcaggagcagcagctacagcaggagcagcggcaggagcaggagcaggagcagcagcagcagctagagcaggagcagcagcagcagctagagcaggagcagcagcagcagctagagcaggagcaggagcagcagcagcagcagcagcagcagcagcagcagcagcagcagcagcagcagcaatagcagcagcagcagaaaatggacgcttaagagggctgcctgcctgttgtgggggaaaactgttacctgaggaaatctttcctgagcttgagggaagttgggtgcggggaggtggatgtttctctcccttccccgatactgaagactggacccacacaggatcaggctgttctggtgttttccatgaagagagctgactgacactggctgggccactggagctgtgtgacatcttgcctggacctttgactttgctctgcaccgattcctgggcctgactcactgccctcccagcatcagtctctgacccaggcctgagacaagctgaatggtcatctgggaagggctgccagggagacttctggctcttctgcctggcttttttacgtggccgtattttaccacagagaagcggatcattaaacgactgcatgatgcttggcttggtgtcccaggcctgacagccagcttccaacgcaaatccaaaagggtcttctacctcctgggctggccagactgggagctgtgggtcagcagctgtgacggactgataccctttagcaagtttctccacatccacttctgaaggcacggccaaatcacagggtctgcctttccacgtgtctacacaacttcctgctttagcaatgttcagctcacaaggctgacctacttttctttcttctttttggccagaagtcgacactctcagctcaggaggaggtggacagtcagactgctcctgctgtggctttacagagggccacgaatacctctggaggcaccgtttcatcgggtcggtattcatcttttgcttgttgtacagcagcctgtttgcagtgcaggcaactgctacagaaggatcaagacacagtggttcagctgtcgctaagatcagctggctctcaagctgaagcttgtcttcctggctccatttctggccatctcttgtcatcatcttcacatcatgggctaaagtctgcatcgttggacgtagaagaatatgcctgctttggtaaccaggaggttgcatattactggactgcctgtagtcacgaacttctactatgacacacccactatgaaaaatgttaaccgaagctttatccaggacatcacccaaagcagggggtaattcttctgcatccaagtagtccagcaatgccctttcttcataaggcagccgaatggtctctgcaaaggacccatcttctctctggagcatcacagaatacccctgattgcctgggtatagattgaccagtaaacatggcaaggactctctcctaacaagcttttctaacaagtttacattgcttctcaattcctgaggatcctcaggctcttttccacattcttcaacataaatgtcataaagtttttcctgcagagtttttcccgccctaggtgagtatctccttctaggaggtctctgttgggcaatttcaatgatattctctgcgcgatccagagcctgttctaaatctcgatccattgtaacagaaaacagggcccctaagaggagagaaaacgcatgtgcgttggtgaagcagggtggaatcacggctgtcatattaatctacaggcccgcaagatgccacaagtccacactgagttcaacgtgggcatctgcccagaaacccgcccccagggaagcgctacccaatctgtttgagggtttctgaaaacatgggtacctgaggggtcgtcgtcgtggccggacttcgcgtctctgcggcctggaacggaagtgagcgggagggccggggtcagcttctaggcgcgtctgggcacctgcccagaaacctgcccccagggaagcgctacccaatctgtttgagggtttctgaaaacatcggtacctgaggggtcgtcgtcgtggcccgggcttcacgtctctgcatgctacaccggaagcgaacgggagggccagggtcagctcctgggccccgtctatgcgcatgtgcactcgctgcaccgcaggttctggggctcctgcatctctagcctcctgggcgcaaggctcacccaccgcacttccgggtctgctgcccgcacttgcactcgactacttgccatttcaccttgaaagcatacatgcaaaagcataagccaccaatgacggtatagatgtatctttcgcaccgtgcatagacatcagtttccacaggaatgccgctgtcgggaaatcatgggaagttgtcactgatcttggtggaaacttcaacaattgttggcacttttggaatctcttgccatcagttgcaaggctgctgttggtatctgtcagccactgggctgcggaatgagcccgcggtagcagtgcttccatgcccagagacgccacagatttgtggcaagcatcaggattcttcctgtcgtcgtcgagtgagctcccgcctgggggtgttcatgtagatgcatcagtacctgacgttcatttacataattactcacctttatttctccatgtgttgagttagggcacttacagattaaaaaattacgtggtgggtcattacattgtctatggattgcaggtcaggatggtagagagacatgaaaccattcatttctacaaggtgatttgcacctgataaggacgagaacaattgttccaggtgatggcaataaattttcaatgattagagtaaactgtagaccttagctaagatcctaaagatggatttgcagcaatatcattcagtcttaggtaatttatgggacattgttttccattaactttgttgccttgaaatctcccagtttgtttggttttgtttgttttattggacaagatcaataatgtttttctggggagaactactccatagcctgtttttctgactcatgagtgtgatctaaattctgcccctccctccgctgatatcccagggtgcatctcacttattagagaggtatatctgcccaccctgccatgggatggactcgatcttcagctggcgaattgcccctgtcttcacttgggtttccccaaaagcattcccggaggagaggatttgagtgggagtagtttctttgggtgctaatccttagaagcattggtgacagaaaggggagctgagtcagggataggaaaacagacaatgagagacgtattcctgagcacaagcggctccagacaactggtccatgctggggaccttggaagacagtacagaataagcctcagattgtcccgtcctagatgcaaggaagctggggtatttattcatccacttttctttctcatagactgaggacagtcctgggagcattattccctgacacttctggttgccacatacaggggccacccatgctgatttggctcgaggatgccctcagacaaagtcacaggtgcttgcggtaatactctgtctgtgtgtacagaatggtgagtgccaaggggagatggacagggcaccggcagcatttgctgcatttaggactgaagatgagtgagagaagtcagccattcattcttatcgatgt

SEQ ID NO: 1564184 - DNA, 4001 bp, Homo sapiens
gactgctgctgcgggccggtcagaaccgcccagccctgcggaacctggagtgtcagaggcctgagaccttccggagtatttaggaaaaactgaaggggtgctggagaagatgcctgcactgcaccgggccttgcatctggtagtggacctcctgaggactgaaggccactgccactgattcctgcaggagcgggggcacccgagccaggggcctgcacaggcttgaaactgcaccccaaaacctgggctccccggactgggccctccacgttggtggcctttaggccagtggagcctgtccggacctgaatggctggggctatttttacgaatctggtggggcgcccggcagctggacggcgcctgctagctttaataagaggcacagagggcttctgagaatggcttggtgccgccccaccggccgccgccgccacagcagcagcagctaaagcaggagcagcagcaggagcaggagcaggagcaggagcagcagcagctacagcaggagcagcagcaggaaatggacgcttaagagggctgcctgcctgttgtgggggaaaactgttacctgaggaaatctttcctgagcttgagggaagttgggtgcggggaggtggatgtttctctcccttcccggatactgaagactggacccacacaggatcaggctgttctggtgttttccatgaagagagctgactgacactggctgggccactggagctgtgtgacatcttgcctggacctttgactttgctctgcaccgattcctgggcctgactcactgccctcccagcatcagtctctgacccaggcctgagacaagctgaatggtcatctgggaagggctgccagggagacttctggctcttctgcctggcttttttacgtggccgtattttaccacagagaagcggatcattaaacgactgcatgatgtttggcttggtgtcccaggcctgacagccagcttcccatgcatgtctgaaagggtcttctacctcctgggctggccagactgggagctgtgggtcagcagctgtgacggactgataccctttagcaagtttctccacatccacttctgaaggcacggccaaatcacagggtctgcctttccacgtgtctacacaacttcccgctttagtaatgttcagctcacaaggctgacctacttttctttcttctttttggccagaagtcgacactctcagctcaggaggaggtggacagtcagactgctcctgctgtggctttacagagggccacgaatacctctggaggcactgttccatcgggtcggtattcatcttttgcttgttgtacagcagcctgtttgcagtgcaggcaactgctacagaaggatcaagacacagtggttcagctgtcgctaagatcagttgactctcaagaggaaatttgtcttcctggctccatttctcgccatctcttgtcatcgtcttcacctcaggggctaaagtctgcatggttggacgtagaagaatatgcctgctttggtaaccaggaggttgcatattactggactgcctgtagtcacgaacttctactatgacacacccactatgaaaaatgttaaccgaagctttatccaggacatcacccaaagcagggggtaattcttctgcatccaagtagtccagcaatgccctttcttcataaggcagccgaatggtctctgcaaaggacccatcttctctctggagcatcacagaatacccctgattgcctgggtatagattgaccagtaaacatggcaaggactctctcctaacaagcttttctaacaagtttacattgcttctcaattcctgaggatcctcaggctcttttccacattcttcaacataaatgtcataaagtttttcctgcagagtttttcccgccctaggtgagtatctccttctaggacgtctctgttgggcaatttcagtgatattctctgtgcgatccagagcctgttctaaatctcgatccattgtaacagaaaacagggcccctaagaggagagaaaacgcatgtgcgttggtgaagcagggtggaatcacggctgtcatattaatctacaggcccgcaagacgccgcaagtccacactgagttcaacacgggcacctgcccagaaacccgcccccagggaagcgctacccaatctgtttgagggtttctgaaaacatgggtacctgaggggtcgtcgtcgtggccgggcttcacgtctctgcggcctggaacagaagtgagcgggagggccggggtcagcttctaggcgcgtctgggcacctgcccagaaacctgcccccagggaagcgctacccaatctgtttgagggtttctgaaaacatcggtacctgaggggtcgtcgtcgtggcccgggcttcacgtctctgcggcctggaacagaagtgagcgggagggccgtggtcagcttctaggcgcgtctgggcacctgcccagaaacctgcccccagggaagcgctacccaatctgtttgagggtttctgaaaacatcggtacctgaggggtcgtcgtcgtggtcggacttcgcgtctctgcggcctggaacggaagtgagcgggagggccggggtcagcttctaggcgcgtctgggcacctgcccagaaacctgcccccagggaagcgctacccaatctgtttgagggtttctgaaaacatcggtacctgaggggtgattgtcgtggcctgggcttcgcgtctctgagtgctgcaccggaaatgaacgggagggccggggtcagctactgcgcgccgtctgcgcgtctgcgcgcgtgcgcacttgccgcacaccgcagattccaggcgccccctgcttctctggcttcctgggcgcgaggctcactcgctgcacttccgggtctgctgcccgcgccggcactcgactacttgccatttcaccttgaaagcgtacatgcaaaagcacgagccactaaggacagtataaacacatctttcgtaccgcgcatagacatcagtttccacaggaataccactgtcgggaaatcatgggaagttgtcactggtcttggcggaaacttcaacaattgttggcacttttggaatctcttgccatcagtggcagcactgctgctggtatcagccactgggctgtggaatgagcccgcattagcagtgcttccatgcctggagacgccacaggcttgtggcaagcgtcagggttcttcatgttgtcgtccagtaagctcccgcctgggggtgttcatgtggatgccccagtacatgacgttcatttacataattactcaccttttatttctccatgtgttgagttagggcacctacagattaaaaaattacctggtgggtcattacattgtctatggattgcaggtcaggatggtagagagacatgaaaccattcatttctacaaggtgatttgcacctgataaggacgagaacaattgtccaggtgatggcaataaattttcaatgattagagtaaactgtagaccttagctaagatcctaaagatggatttgcagcaatatcattcagtcttaggtaatttatgggacattgttttccattaactttgttgccttgaaatctcccagtttgtttgtttttgtttgttttattggacaagatcaataatgcttttctggggagatctactccatagcctgtttttctgactcatgagtgtgatctaaattctgcccctccctccgctgatatcccagggtgcatcacacttattagcgaggtatagctgcccgccctgccatgggatggactcgatcttcagctggtgaattgcctgtgtcttcacttgggtttccccaaaagcattcccggaggagaggatttgagtcggagtagtttctttgggtgctaatccttaggagcattggtgacagaaaggggagctgagtcagagatgggaaaacagacaatgaaagatgtattcctgagcacgagcagctccgaacaacgggtccacgc

SEQ ID NO: 1564185 - DNA, 4001 bp, Homo sapiens
tgtcctcgcaaaccccttccttcacttgcatttgaaaccccacttaagtggtcccaattaacaccctccagctgctggctccggaactggccacaggtggactctcctgaacccctcagaggtcctcccacttgtggaacccatcctccctgcggctttcgtcacatagaggggccccccaacataactgagtcacccctctttccctgcacatgggggagtccagctgtcctattaggaaggccccatttctctcttctgggagatcctctattccaaacccttcccccatcacgccgagaggcgatactttcccccagaagagttctcagtccccgcactctgaagggggggtctgtcccccttatcttccctccccttccggcgtctcgcgtggacaccgaatgggtaacggtcaccaggggccgattttcccgcgcgcgggcgcggcctcctcgacaagcccccgcgcgtgcgcgcgccggtccggccgcgatctgcagcgcgcgcccccctcctgcgtccccacttagccccaggcccgctgcgttccgaggcgcgcgccccctcccctgagccccgcccagccccgcgcaccaggcccgcgctccccgagcctcatcctttccgcgccgagcttccggctcccggcgccggggcctcggacgccggggccccgagccggcaacgccacccctccagcccacccggcccggccagcgggcccgcgcctctgcctccactgcttcaccttttaaattttccgccatctttccccacggctaacgacattcgggcctagccggcctcgcgagaagagcgctcgcgcgggcgtggccgggaacgcgcagcctattggccgcggctcccgactcgcagcacccgcgcggaccaaccggagagccgtgaccgaacccctccctgccgcccggctcggtcccggaggcgggtgctcgccgcgctttcccagagtgcgtctgggcggcggcggcagcgggagcgacagcggcggtagctaaagttgccagaggccctgcccgtgcgctggtctgtctgtcacactgctagccaatcacgttatcagccagtcgcagtggttcctcagtcctgtcatactccctgttatcaccgtcagtcagcccgtcatctcattttaaccccaagcaggccggggctcccaggtggactagtgccgtatccaactgctcaggcggtcgccccagacaggtgcctagtcagactcccggcccccatccacactgctgggcagtcaatactggcttccatttgtgccctggccagcggcgactccctggaggcaggcagacagcactgttagccagcctgccttatcattccctaagaccatcctgtcctcacgttgtcagcagatcaatcagtcctcctctccacccaccatagccctgggaccagctgcgattctccctggctaaatcctctcatagactgcagcatccagccatgcccccaggcgggctgtgattaggtcgggacaagctgtcactgtcagcatctaatacagccctgtcgggcactatcagttggtcactgtctttccctcagattacttctcattcacaccacgatcagtcacaacatccagctaggccctcaaagcaaatagtcacagcaactagaggtaggattaagcctccacaccacctgtcagtgggtcagccagtctgtcatttctcaggcgactcatccccaccattggtcaagtcagtctcctctgatgcgttgaagctgagattctatcagggcagacagtccgtaaccacgtacagccatcgagtcagacagctatgccgattttgctcctggccagctggcctgtgactcgttcaatccgcccctcatcacatcgtcagtcattctcagcatccgactgaccgcaccgtctgtcaggtgatcagtcagtcagagcacccagccaggccctccagcatgctgtgattcgagcagcgtggatagttgatcaccagatacagctgcctagcaagcagccacgggtctgttgatcagttagcctgaagtttccccaggtggccctcctttacacggtgccagacagtataacatctagacattcccccgccagctgtgattcctgacaatagtcattcacaacatccggccacccaggcaggcagtagcaccacgggccatcagtcagccagcctgcaaggtcctcaggaggctgcctgtcttttccactgtcaggctaccagccccagccagtcctaggcaggctgtcattcagttagatgttcaggaaactgcgctgtcacgtcctcaagttgcgccttctccctgtcactccatgagttctgtagtcaaccaaacagttatacagttaaccaaacggatattctgtctgcctgccagtccagctgtgagctcattaagaagtgactggctggtctgaggttccgtcagccccagcttgccctgaggggacagacaggagcgaaggtcccaccatgcatccccttccctcccttactccttctcgagcagagtcaggtgctcatcctcatgtacccccagtctcctcgggcagcagggctctcccactcccgggtgtccaggagacctgtccaacccacaagagtgatttaagacaggacctctgcctgtctggatctgagagggagacaaaagggtctgtcgccagtagtgcccccaaacactataaagtagtgggcaaaagtctggattctggagcctgactacctggactcatatccaggctctgccatttactaaattacttgatcttaggcagtttcttaaactggtctgtaaaacctgcagtaagtgaccttggggtgggtgtctcctgctcatctggaaagtgaatcattctggactagcactttttcaggagacctcaaaagttaagaggccatcttattgctaccgtgtcccactcccagccagttgtctgttcattcagcattaatttaatgattactgcgttgcccagtgccggagccaatataaggttttattcacaggtttgacctattgtaatgtaaacctcagattggagtgtaacacaaatacagaagggtacacagaccaggggtgaacactgtaatgagttttcacaagcagacctacatgtggaaccagaatgcaggctgagcaaccattaagccagatctcagaagcatttaattgtttcatataaatttattgggtacaaatataatattttttttttgagacagagtctcactctgtcacccaggctggagtgcagtggcgtgatttcggttcactgcaacctctgcctcccgggttcaagcgattttcctgcctctgcctcctgagtaggtgggattacaggcgtgtgccaccacacctggctaatttttgtatttttagtagagatgatggggtttcaccacgttggccaggcaggtctcaaactcctggcctccagtgatccacctgccttggtctcccaaagtgctcggattacagacatgagccaccatgccaggccacaagtgtaattttgttacacagatacattgtgtagtggtgaagtcaggcattttactgtatccatcatctgaataatgtacattggcctcccaaagtgctaggattacaggcatgagccacagcgccaggccacaagtgtaatttttttacatggatacgttgtgtagtggtgaagtcaggcattttactgtatccatcaactgaataatgtgcattggcctcccaaagtgctgggattgcaggcatgagccacagtgccaggccacaagtgtaattttgttacacggatacattgtgtagtggtgaagtcaggcattttactgtatccatagcctgaataatgcacattgtactcgttaagtaatttcctcatcatctacttccttcccacctccccacccttccaagtttctgttgtttataattccacatgctatgtccatgtgtacacattatttagctcc

SEQ ID NO: 1564186 - DNA, 4001 bp, Homo sapiens
tttgaaccccaatactcactgcccaaagctgcccctggagcagcagacctctaagcggggtttgcaacatgaattgtcctaaaggaatctatttccagagcttcaaactccatgtcattcctaaaactgcctgcaaacctgctttgggttcaggacctgatcacccctctctccactttgcaaaagaaagagaacaaccccccatctcagtaggatgcagtgccccgaggtggggcggatgggaggacaagattaaaacctccagggcaccaaacaaaggcgtaactggaaagactggtctttaatcccttatctcaaactcctgggccagatgtgttttggaattcaaaattttttggattttacaagactagttctaggatatcccatacatcacctaacacccccagcgtggccaggggacatcaagctataatcaaatgcattaaccgtcctgcagcaaaagtatgaatttcccacattaaataggagaaatagagatataaaatagcctcacagaagagttccactttataatctacttttgccataaatggtgccaaatttaagaaaaggatttcagttttcagggctttttagatttcggaattatgagcaagagattgtggaatgatactacattacaggaaggctccttaaatgatcaatctgggtgccttaaatccacaaggtatattttttcacactgcattttgactttctgtctcatccatctttctgtgaagagtaaagctcatccaaagggttatgctctgaatttatacgcaaagcggtacagattagtgacactgattcttttaaatatacctggtatatttctgggactgccaaaattttgtaagacacacggattttaaaaaacagatttctttctgattcaaggcacattcttaatcaaagtactttagaagccattttatcaaatcatgtctcaaaacattccaagggcagtcagtcctcatcctatatcatctttttaaaatgtttaatattttctgcctcccattgcaaaaatcacacctaaactttagatgtcaacctaaaaacgtacaagagcttttcaaaattatttcgtgtgcaagccctaccccccctacttaggcaagaccaagtggagactgagcccgcctgtgcccacgctttcctctccctacagcctgtcctcgcaaaccccttccttcacttgcatttgaaaccccacttaagtggtcccaattaacaccctccagctgctggctccggaactggccacaggtggactctcctgaacccctcagaggtcctcccacttgtggaacccatcctccctgcggctttcgtcacatagaggggccccccaacataactgagtcacccctctttccctgcacatgggggagtccagctgtcctattaggaaggccccatttctctcttctgggagatcctctattccaaacccttcccccatcacgccgagaggcgatactttcccccagaagagttctcagtccccgcactctgaagggggggtctgtcccccttatcttccctccccttccggcgtctcgcgtggacaccgaatgggtaacggtcaccaggggccgattttcccgcgcgcgggcgcggcctcctcgacaagcccccgcgcgtgcgcgcgccggtccggccgcgatctgcagcgcgcgcccccctcctgcgtccccacttagccccaggcccgctgcgttccgaggcgcgcgccccctcccctgagccccgcccagccccgcgcaccaggcccgcgctccccgagcctcatcctttccgcgccgagcttccggctcccggcgccggggcctcggacgccggggccccgagccggcaacgccacccctccagcccacccggcccggccagcgggcccgcgcctctgcctccactgcttcaccttttaaattttccgccatctttccccacggctaacgacattcgggcctagccggcctcgcgagaagagcgctcgcgcgggcgtggccgggaacgcgcagcctattggccgcggctcccgactcgcagcacccgcgcggaccaaccggagagccgtgaccgaacccctccctgccgcccggctcggtcccggaggcgggtgctcgccgcgctttcccagagtgcgtctgggcggcggcggcagcgggagcgacagcggcggtagctaaagttgccagaggccctgcccgtgcgctggtctgtctgtcacactgctagccaatcacgttatcagccagtcgcagtggttcctcagtcctgtcatactccctgttatcaccgtcagtcagcccgtcatctcattttaaccccaagcaggccggggctcccaggtggactagtgccgtatccaactgctcaggcggtcgccccagacaggtgcctagtcagactcccggcccccatccacactgctgggcagtcaatactggcttccatttgtgccctggccagcggcgactccctggaggcaggcagacagcactgttagccagcctgccttatcattccctaagaccatcctgtcctcacgttgtcagcagatcaatcagtcctcctctccacccaccatagccctgggaccagctgcgattctccctggctaaatcctctcatagactgcagcatccagccatgcccccaggcgggctgtgattaggtcgggacaagctgtcactgtcagcatctaatacagccctgtcgggcactatcagttggtcactgtctttccctcagattacttctcattcacaccacgatcagtcacaacatccagctaggccctcaaagcaaatagtcacagcaactagaggtaggattaagcctccacaccacctgtcagtgggtcagccagtctgtcatttctcaggcgactcatccccaccattggtcaagtcagtctcctctgatgcgttgaagctgagattctatcagggcagacagtccgtaaccacgtacagccatcgagtcagacagctatgccgattttgctcctggccagctggcctgtgactcgttcaatccgcccctcatcacatcgtcagtcattctcagcatccgactgaccgcaccgtctgtcaggtgatcagtcagtcagagcacccagccaggccctccagcatgctgtgattcgagcagcgtggatagttgatcaccagatacagctgcctagcaagcagccacgggtctgttgatcagttagcctgaagtttccccaggtggccctcctttacacggtgccagacagtataacatctagacattcccccgccagctgtgattcctgacaatagtcattcacaacatccggccacccaggcaggcagtagcaccacgggccatcagtcagccagcctgcaaggtcctcaggaggctgcctgtcttttccactgtcaggctaccagccccagccagtcctaggcaggctgtcattcagttagatgttcaggaaactgcgctgtcacgtcctcaagttgcgccttctccctgtcactccatgagttctgtagtcaaccaaacagttatacagttaaccaaacggatattctgtctgcctgccagtccagctgtgagctcattaagaagtgactggctggtctgaggttccgtcagccccagcttgccctgaggggacagacaggagcgaaggtcccaccatgcatccccttccctcccttactccttctcgagcagagtcaggtgctcatcctcatgtacccccagtctcctcgggcagcagggctctcccactcccgggtgtccaggagacctgtccaacccacaagagtgatttaagacaggacctctgcctgtctggatctgagagggagacaaaagggtctgtcgccagtagtgcccccaaacactataaagtagtgggcaaaagtctggattctggagcctgactacctggactcatatccaggctctgccatttactaaattacttgatcttaggcagtttcttaaactgg

SEQ ID NO: 1564187 - DNA, 4001 bp, Homo sapiens
ttgcactccagcctgggcgacagagcaagactattctatctgggggccttgggctgagattatacactgtcatggtttgagattatgtctgttttccctgtcctttcatcccacagtaaacttttaaacgttagggcccagcctgcccaacatcgcgaaaccccatctctactaaaaatacaaaaattagctgggcgtggtagggcatgcctgtaatccaagctactggagaggataaggtaggaagatcacttgaaccctggaggtggaggttgcagtgagccaacatcgtgccactgcactccagcctgggcgacagagtgagaccctgtctccagaaaaactgttcggccctttcttactcaaatatgtgtttatctactctcaggctgctctcctcccacatccctgtctccacccccatccccccacccccatcttttagtagattcttcaaatgttgctgaacttagtatctacctttgttgcagttctctcacttgtagtgctgggctgctttagggctcacctcctcaaagatgcttttttgttttgttttgttttgtttttttgagatggagtcttgctctgtcacccaggctggagtgcagtggtgcgatctcagctcactgcaacttccacctccccagttcaagcgattctcctgcctcagcctcctgagtagctgggattacaggtgcccgccaccacgcccggctattttttgtatttttagtagagacggggttacatcgtgttggccaggctggtctcgaactgctgacctcatgatccgcccacctcagcctctcaaagtgctgggattacaggcctgagccaccatatccggcctcaaagatgctttctgtgatcactgaagcccaccatggtctctccagaaatgagaattactacagcatgtgtttactccacgtctattatcacctgtcccccaacccctgtagactgtaaacttggaaagagcacgggctttaaaatgagaaagatcgaagctcaaattccacttctaccactcactatcagtataactttggcccaataactctgggcttgttcccccaactcactgggggtgtttaacagatgaaatgggatatctttcataaaacatctagtactgcaacttgcgtatagcagacagttggcattttctctccctccttaaggaaaaaggtctctgtacctaaaaagcatttgaccggggcagacattgacattcagtaactgtcagtttacttcagacaacacgttctgacctaggggcaaaaaattattttttcaaccaattcaagctcgccaactatccccgatctggggggtgtaaatgaaggttttcgagttgaacaaaaaagattccttgtcaaacctgaagacgtcgggtcacactgcttgactgcatacctgattccaatgtctgcaaactttgtagacttgtcaccaggaacttcagggacaggacctgactgctagatgaagctctggcctcgtccagatcctcaccaatctctcccgacccggagaggactgaccgacagacacatcttcctcccctgcctcccacctcggccccctcatcccccagccagtcgggcccgcgccccagggccgtcccagaggaggaatgcgccccccccttcccggtcccagagccagggtagactcactgccgaagtctttggcctggtggaggagctcctggtctcccgcttgctgcagctcctcctccgcagactcagccaccgtctcggacggctgctcgggtggagcatctccattgggctgcccaccgcctgccaccggctgctgcaagcccaaccaactgctcaagccccggaacatcccgctcgcgggccgccgccgcggtcccgatccccagagaccgcagcgagcactggttgcctttgactccactctgcgcgactcccagggagatgtccggaagtcggaggaacaccgcagccgccgcagccccgcctctatgacgactccgccgcggccgcgcaagcgtcacttccgtccaaaggctccgcccctggtgacgtcagttgtgacaactgttttgtgcgcgtggataggggacaaagagctttcccagcgtagccctgccttccctcttttcctcattcgccagctttgtaggtgactgacctagtaggcatgtggacggtgtctttgtcacagtcctagccagtcccattttaagattgcctctaggcagcttggctggtgacttagtctcgccttttcaggtcccgcagggctgcgttcccgcagaattggatgtctttagcctcctcctgagcccaattcaaaactaacccaaagccgccaagcccaacagggaataagaggacagaataaggtgttaaacaacacaatgggatgctgtcagcagaatctagactatgagaagccacaggacagacaaccttgtttcttcaaataaattgcaaggaagagaggagtgtggtggggaacctatagattaaaaaagacttaagagatgtaacacatggccccttgtgcattttattaggatcctaattcagcaaacacattgaaaaaaatagtatgatacttattataagaactggaaatttggacactgggtagttgataaaattaaggaattgtgaaattacaaaattttaattgtggtaaaatacacaaaatttaccatcttaatatgatttaccatcttaaccgtttctaagtgtacaattcagtactgttaagtacatttacattgttgagcaatcaatcttcagaactcttcatcttgcaattaaaagaatgaaaaatagtccgagtgcggtggctcacgcctgtaatcccagcactttggaaggccgaggcgggaggatcacaaggtcaggagttcgagaccatcctggctaacacggtgaaaccccgtctctactgaaaatagaaaaaaattagccgggcgtggtggcgggcgcctgtagtcccagctactagggaggctgaggcaggagaatggcgtgaactcgggaggcagaggttgcagagtccattctcaaaaaaaaaaaaaaaagaaaaaagaaaaatagaacttcatcttgcaaaactgaaactacctatgaaacaactccccattcctgtccttgtcatccccctcctccccccattctacttcttgtctctatggatctgactagataccttaatataagtggaatcattcagtatttgtctgtaactggcttctttcacttagtataatgtcctcaaggctgtgtcaatttctttttaagagtgaatagtattcccttgtatgtatacaccacgttttgtttatccatctgtttatccaccgcacatattgagattttaccaaagaaatgataccatatctgggccaggcgcagtggctcacgcctgtaatcccagcgctttgggagaccgagatgggtggatcacctgaggttaggagtttgagactagcctgaccaacatggtgaaaccccgtttgtactaaaaatacaaaaaattagctgggtgtgctggcgggcgcctgtaatcccagctactcgagaggccgaggcaggagaatcacttgaactcaggaggcggaggttgcagtgagctgagatcctgccattgccctccagcctggatgacaagagcaaaactccgtctcaaaaaaaaaaaaaagaaaaagaaaaaaagaaatgatgccacgtctggaatttgcttcaaattaatacaggatgggggtggggggaatggggggggatatagatgaaacaagcctggccatgggttgaagctgggtagttaaacatttgtcttttttatatttttaacttttcccacaataacatgtaaaactaacaaaaaactagtgatgtgcataactaccccttcagagcagggagttcatggacacatttcccaagcacagtcttcagtcattaattgtggaaggacatccatgattccttgctccccaactattt

SEQ ID NO: 1564188 - DNA, 4001 bp, Homo sapiens
atgctcactggatccattagaagaaaaggcctttggggagtggggctggggatggacatatagtcacctgatcaaggctcactgcatccctgaaggaaaagtcctatggggaggggaaatgggagtgcagaaagttgatctatgggagctcgattcttcatccataggagaaaaggcttttgtgaagaaggcacacaatcaggtacacagcaggtgctccataaatactccaaggagtgattaaaagaaaaggtctttggaaagagtgactggaatggtacacacagcaagtgccagatatctgagcactgtattaactggaggcacaggcctttatggagaggtctaaggttgggtcatgcagaaagtgctcaatacatgcagactgaagccactggaggaaagggtattgcagaaagggtttgagggtggggtatacagcaggcaccagtcaatgcatgcttgctgaatacactggaggaaagaacttttagagaaggctcacactgcaggcagttgataaatgctagatggatccaccaaaggaaaggtctttgaagaagtagctggagaacgggggatacaagaggcactcaataaatgttttctagatccactgtagggaaaggtctttgaggagacggtctgaagatgagtcacacaaagaaggttcaaaactgctcatggaactcactggaggaaaatgatttgtttgagaaggggtttgggggtgcggcacgtatcaggcacttaacaaatgcttcctagatcctttggagaaaaggccctcagagagagggcttggagttggggcacagagaaggcatccaatcaaaactcacaggatccatgaaaggcaaagcttttggagagaagctggggtgggatacacagcaggtactcaatgtttactaaatagtttaaaagggctttaaggacggagctggggtgggacacatagcatagactggacacatgctcacaagacccattagagaaggcctcagggcaagggttgaggagaacaggacagtatcaggctctcaaagaatgctcacaaacctcattgaaatcaaaggccttggggaagggctcttggatgaggcatactgcaggtactagataagtgctcacaagatccattagaggacaaggcctatggggcaagggttggggagggtaggaaggacacgttcggttttcgaaggctcataggatatattgaagccaaagacttttgggggaggggtagtagggaacaggtacgcagcaggtgcctgataattgctccctggatccatcaaggtttaaggggcggaggggggcgacaagggcggggcacagaggaagcatccagcttaataatttaaaggaaaaagatttaggtgagagggccaggtgtcaggcacacaagcggcgctcgataattgctcattcgcagaagaacgatctggggacccaggcccacgggagacgtccgcggcagtggcttaccagtcggtgtgcggctcgtcgatgaccagcagcaccctggaggcggctcccccgcggcctgcgcccccagagccgccgcccacctgctcgctgaaggtggcagctgccgccgccgtggtctgcttgaccgcgttggacagcgacgagaagaagccaccgccccccgaggacccggggctaggggcggccggagaggccgctggggcgaccccggaggacctctcggcagtggcggtcccgggaccgggcgtggctccggggctgtgggcaccgggcggcggtgggggcggctgcggacgctgcaggtctgtcatgtacccatttggcagattggccataaagttgctgtccgacaggcggcgccgcaggtagttcatggctgcgacttggggcagggggtcctaggggtggtctggccaggagccgcgggggcggactgcgcggtgcccaggagcacagctgcgctctcaggcacgacacgactcctccgctgcccaccgcagactgaggcagcgctgagtcgccggcgccgcagcgcagatggtcgcgcccgtgcccccctatctcgcgcctcgcgtggtgcggtccggctgggccggcggcggcgcggacgcgaccaaggtggccgggaaggggagtttgcgggggaccggcgagtgacgtcagcgcgccttcagtgctgaggcggcggtggcgcgcgccgccaggcgggggcgaaggcactgtccgcggtgctgaagctggcagtgcgcacgcgcctcgccgcatcctgtttcccctccccctctctgataggggatgcgcaatttggggaatgggggttgggtgcttgtccagtgggtcggggtcggtcgtcaggtaggcacccccaccccgcctcatcctggtcctaaaacccacttgcactcatacgcagggccctctgcagatactcggtttgtagtgttgatattcaactcagaaggcattttttggggggaggggggcactggaagcacactcagagacacgaaagtagagaaataaccccctcacagaggggggtgaggtcacacgcagtgcccgcggggagattagtctcccacatccacacaggctcagctaggcagagagcgggggcgtcacagacagcatcagacaagcggaggtggacacttgggtggtgtacacacccttgcccaaggtggcaaggggggcctggaggcacacaagaaatgacacacatataaacacacacaaaagtgaggaaacatacgagggcatgtacagacagaacacacgccaatctaggtatacatacagacatacaagtccagagtaacacacatgggcatgttacatacatgcatgcatacacccatacccccacacacacaggtaacacactgacacacagagacccagggaaactcatatgagcatacacttgcagacaaaacacattcccaccgatgatcatggagaaacctagatctgcaacacagacattctctgcagccctagccctggtgcgtgtccacccccacaccagaacacacttggtatatacgccaccatccctttgctctggacaccgccaaaactcacgataactacctgatgtcatcagtgcccatggctgtctccccctgcacccaagaactttccacagaggcaggcccatcccatggtgcacacacagtaggtaccaaataatgtttgcatatgagcaaatgaggtagtccaagcagaggtgggatatgggaacctgtcaaatctttatgattctgactacaataaaagcactaattcataatcatttgttcactgattgtacccaactcttaactaagctgtttacatgcatcatttcatccaaccctcacaacaatccagtggggtggataatataatgtctattttacagatgagggaatacaagaactccagttaattcccaaagggtcatgttcactttatgatcaacacatttttttaagaatgtgccaggaagaggaaacatccagtgccaatgtggctggaacaagctgaagggggttgtggtagcaggggccagattgggtaggaccttgaccatagtgagcagtgatggtggactaggagaggtggcagaagataggcaagaagtaagtagatatggagtctcttttgcctgcagaattttcaggtgactcatccacttattcatttgttcatcctttattcattaaatcattggctggtttaaacaaggcagtaatagtgtggggtctggagacacagtgcctgggttcaagtggggcctccaccatacacttgggaaagtgacttaatctttctgagatttggtttcctcatctgtaaaaaggatacatctctaacccacctctaaggagaggggtaggaagggggcaacctctgtacctttgcatgtgttgtaacttctgccaggaatgtcctctccttctctctcgagggctgcctttggccactgtctgcaggaacccctcacccccaggtctcagatt

SEQ ID NO: 1564189 - DNA, 4001 bp, Homo sapiens
cctctctgcctctgcctatctgatctgtcgatgtctctttttgtctcttttttctctgtctgtgtaagtgtatgcctgtatgtctgtgtctttctgtttcttggtctgtttgtctctgtctctctgtcctgtctctcactcggtctccggatggttctctctctgtctccctcttgcctctgtgtgttggtttctcttttttctgagtgtctctttctctctgtgtctctctctccctcaccctgttttcctgcctctctccctgcgtctgtttctctttgcatctgttttctgtgtctcctttttctttgtttctgtttgtctcttctctcttatgtctgtatctcttctcatctccatatttcttttttttttctcagtatttccatctctgtctttatcattccctgtccctcattctctctgtcaccttcactgtctctgggtttctctgactttgcatctctcacccagcatctgctacaggctccacctcccccacccctccctcacttcaagagaggaggtaggacgtcacagtctcccacttcacaacgggggtaccctcagccctatgtgacgtcacagctcatctgttttctggcttcagacccctgaaacctcaccctggagcccaattcccccatcccctacaacccccgcactcatccctggctactcgcccctactccacccctgctcttctggaccccatgacctccctctctccctgcactctgccccaacagcccggaccacactcacccattgcagcaccttcacaaagccgaggggctccttgaccacccggaactgacccccagccaccagctgaggagagaaacagtggggaaggggtggggttgttggaggtacagggaggtgagcggcaaggctgcccatcaatgaccccaggggatggagcatgtgacctcggggagagggtgagaaggagaaagtgacaccttggggatggtgtgagccccagggtccaaggactggtgggaaggtctgaagagatggtgagtcagatggcagaggaagtcgggggtgagggagatggggatgaggtcaggactagttaaggagggggagcaggtttgaaacgtaaaggcgagtcggatggggaaggggttcgggtagagaatggggatggagtggggtgcattcgggtgggggggttgtgatggtgaaggtgagtcataacggggcaggagtcggtttggctcaggtgggggaagggtctgcaggggtaaaggtgtgttagacggcggtggcggtagatatttgaggtgatggggatggggaagggttgggactgattgggggtgagtttctgaggtggcaaagacgagagacatggcggagagggtctggactgattaaggtgggggagggctgggacacggcttcagtcgctatgtgttgggggtgaggaggctgggggttttggaaggagtaaaaccggattgtcccctaggtgtgctctgggggaaggggtggtcgcctatgggggtacagtctctgtttgggaggggcgggtgccagccctctcccccatccccgcccccacaccttctgtcgctctatttcctagcttatccgcagcaccccccatcttccttccactctcccctccccttgtcccttgccctcactccagcccccaggcccctattcctcccctcgcggtcgccagtaataaacggggctccgggggcccccgctgcggcagtgaggacggccctcgctgcggcaaagagcgcactccttttctccacctcccccttcctccccttcacctgccgcagacccccatccccagcgccggggaccgggtctccgctgccagaccctggccaccacctcccagagtcggctggcctgagcgacccggcctaggcagccgggcggcggcgggctctgtccacggtgctggagcgcgtacctgattcaccacgtccatgtccgccagcagcagcatcagcaatgcagggggcgggaggctcggctagcaagggcggcgcggggcgcggcgggggcggcgcgcgctcgttggaacagcccaggcggctgcagccccgcccctcgcgccccctccttgcccgccacgcgcctgcgcacagcgggttgtaccacagtctcaccggcagccattccggcccggaggctggagccgtgagagcgtgcgggaatatgcgttgggaaaacacaagtcgagggccggggagaggagacctccctgctcggtcctacagtgtgacaactttgccaggctcttttctgagtttgttaaacatgttcactcatttaatgcttacagaagtcctacgttgtagggactattaggccgtttttacagacgaggaaaataattccccagagagcttaagtgactctcacaaggtcagccagctactagctggcagtgcccagagtccctgcagtttaaacacggttcaaggccttccaggttcctttttcatagtctgcattttaagcacaccctgaaactcctgcccccatctagccatctcccttatttctttcttcctctttgtcaaattaatgcctactcgaactctaccactttacctatttattccttagctctctcttaattggaataaccctccttcctgcgactaaaactaggcccatcaaggtcaacagtgatggctatgatgcaaaatccaaaatacagttggggcttaagatgctcaacttcggccaggcgcagtggctcatgcctgtaatcccagcactttgggaggccgaagtggacagtggatcacttgaagtcaggagtttgagactagcctggccaacatagtgaaaccccatctctattaaaaatacaaaaattagctggctgtggtggcaggcgcctgtaatcccagccacttgggaggctgaggcaggagaattgcttgaacccaggaggcggaggttgcactgaggcgagattgcaccactgcactccagcctgggcaacagagcgagactccatctcaaaaacaaacaagcaaacaaaaatactgagatactgtttttcatctttcagggtggtgagtatcaaaaagtttgataacgttccgtattggtaggttggccagaaacaagcgttctcataaatcgcctgtggaagtttcattggtataacgtgtagaaggcaatcgggcaaaatctaaaaaaaaaaaataacaaattcatttactgtttggttcaccttcatacttctaggaattcatcttacagatagactcatacatgtgctaaaagatatatgtataagataatacatgactgggctgtttattttttatttttttttgagacggagtctcactctgttgcccaggctggagtgcagtggcatgatctccgcttactgcaacctccgcctcccgggttcaagcaattctccctgcctcaccctccctgagtagctgagattacaggcattcaccaccacgcccatctaatttttttttttttttttgtagttttagtagagatggggtttcgccatattggctagggtggtcatgaactcctgacctcatgtgatctgcctgcctcggcctcccaaagtgctgggattacaggtgtgagccactgggccaggccagggctgtttataataggataaagaatggacactcccaaagtgctcattgttggtagcctgtttaaataaactctgatactatgccgctgtcattataataacatggaactatggaatgattgccaagatatttagttaagtaaaaaatgcaagatgtcaaactgtgtggtaattgtgtacaaagagaagagaagggttatatcagacagagaatagctaacatttaaattgtggctgttttctgtcaagtactctttagagaactttgcctgtattactcacttaaattcttactgtaaccctatgtgacaggtacgacaactatctttgttttacagctgaataaactaagaggcggagaggaattttc

SEQ ID NO: 1564190 - DNA, 4001 bp, Homo sapiens
gacaattaccacagagctgaaaacccgggagatttcattcatctaattacactcagggatgtgtacttatagtggtaacgtggcaactggcccatgttggaaatgaagtgggtaagacatcagtaaggtaagtagtccatagtctcggcagtgcatctaaggtggaagcaaggagaaaaacatatacttgggcttggaagacaattttttaatcacttagtcctcatccatgagctattcagtgttcccaacatctaagacaacagaggtggtgtgacaggataggaacacaagctctgcctccgagattttgagggcaaggcacttaacttctcagtctctttttcatcataatatggttataactgtagcacctactgtatagagttattgtgaggattgcatttttatgtaaagaacttatcacagtgtccagctcaatggagcctaacaaccagagcctaacaagctcagagagccagaatgctacatatactcacagatcaattaccccagaacaggcctccagctccatttcactgctctgaccaagagtgagacacctgaaattgtgttaccagaaatgttcatcctctgcccaaaaagggcctcacaagccaagttggtggtgcttttctactagggtgctaaaaaccaaacaaccaaaaacgcagaaaacttcatcaaggccacgtctctgcattaaacattgttcccacagcgacaaaagtcttaagtcattaatacctcaatattaatagatttatgagaggtgggggtggggagcttaaagagcagaaaataagccagttaaatataggaggtccaggatgtacagaagactcatttttgccacaaatatacaaggtctagggtcaaccctgccaagcacagtactctggaattttacgtcctctaatcctgaagaagcagggtactgggggaagaaaagcttgattagaaagtcaccacttttcaagccaccagaattctaaccaaatgatttcaccaccccaaatcccacctcattcaatgttaagggttggaggaacacctttttctgccccattacaaaccaacacaggagacagaagcattctgtgccccttctgagatctcggggaccctcctccagtaccagatctctcacagcctgcttgaagagcggcaatataaagcagctccacagcacacagccaggtccccagccccaagcgcagagggagcccactgaggcaggactccagccaaccagcctccagcctttacctgtggctgactggccaacgccagagaagccgcgatgtcgtaggtccgaagagagtgcgggttagcgaccccgctcgacggccgagcgctgtgagaggaacccacgaaaaggtgactggacgccttggagggcgcagttcccgctaggagctcggccccgcccccgcccccagggccagctctcgggaggggcaccagctcgggctggcgggaaaaagcccgggcactccccgcgaggggagccgaagaggagaggggaggcggctcccagaggggcacagaccgcattagtgctgggtgggtcagggaaggggccagaagaagccctggagaaagaaaagtggccgggagggaccgcccaagcagacgggagtccaagcctggggatgcggtcgggagaggcggacggggagaggggagacgcggtcagctagggagaaggaaaaattgggggaccagagagcgggtagggaagacgcacgaccccgagatgggggtgggggcgcttcagcagcgaaaaggagctgggggtccagaaggagcaccggaccgagggcgaggggccggccgctggctgttgacctacctgtcacttgcaacaggtgcctccagagatcgagaagtcccagtgccggtttcaagggagggtctccggctccgggaagatcgcaacccagctccggcagccggcccttctcaccctcccgggaggcggaaaaagctgcaactttccctggagcggggaggagctggactcttaaaggggccgcacagcgccccgggctccttagcagggggccactcagcccaaaagggagctctgggacccaaagccttgagacacaagaggaatgtccttccaggttaggaatgggagcctggggactgaggataggggtctaacactagacgtgcctcctcacccacttacttccatctgttggtcactctcttagacggtgaaatcacctgtctctttcgttcagctgagtcaaaagttgtcaaattgtctcacacttctaagaagataaaagagtatgaactatctaatttgagtaaataaaatataataccattctgatcctttgacttgtggccttttatggcaaataaatgtctgtctaaaatagaaacgttttgggcaaaagcgtagactaaattcatacatacacactcaaggacacaactggttaaaatatccaactcactagtaatcaaagaaaagcaaattagaacaataatgagattctttggcaaagatattttttattttttaataacacttaatgatgacaaagtagccaccaaacaagctgtcttaattgctgatagcagcatatgttggttaaaaacccttttagaaagcacgtgagcaatatgtatcaatagacttgaaaatgtttatacctacccagtaattgcagattcctctccctgcctctcccatccctctccccctcatttcacatcagcaattaaacatgctcaagtatctaccatcttaaaaaaagaacctccctacacaggaggtccctcttcaggtcctctttatgggcaaatgtattgaaaatgtacttcacaggtgaaattgcaatttttattcccttacttctcattcatttcttagctctcagcagtctggcttccttcccccactgaaacttctcaatgagatacacaaacaatgaccctcagtgtcaataaatccataaataagtaaggtatttttggtccttattttgcttgacttctcccctacatttaacaccgttaaccatttcctcgtccttgaaactttctatggcatctatgacattttactcttttgcttttcctcctactcctttgccctctcctcagtgacctttgtaggccactcttctgctatctgacctctgaaagtcagacattctcagggctaggatacatatactccctcccccaaataatctttttcactcacttggctttaattaccatatatatggtcacaactctaattctataactctacccagactgctttattgagttctgtgttcttgacatctccacttgaatgtcctgcagacacctcaaattcaacacatccaaagttaaacctaccatcttttctcttaaatttgttcctcctccagtatttcttatatcagtaaatgacaacatgccactcaaggcaatggattcaccattctagatgccattaagaacattcatgattcaacggagaagggcaaaatatcaacattaacaggagtttggaagaagttgattccaaccctcatggatgactttgaagggttcaagacttcagtggaggaagtcactacacatgtggtagaaatagcaagagaactagaattagaagttgaacccagaggccaggcacagtggctcacgcctgtaatcctagcactttgggaggccgaggcgggcagatcacgaggtcagaagatcgaaaccatcctggctaacacggtgaaaccccgtctctactaaaaatacaaaaagttagccaggcgtggtggcggccgcctgtagtcccagctactcgggaggctgaggcaggagaatggcgtgaacccaggaggtgaagcttgcagtgagccgagatcctgccactgcaccccaacctgggtgacagagcgagactccatctcaaaaaaaaaaaaagtggaacccagagatgtgactgaattgctgcaatctcatgataaaacttgactgaccaa

SEQ ID NO: 1564191 - DNA, 4001 bp, Homo sapiens
caaccccaccatcactacacctcagccccttgaaggaatggcatggtatgtccggttactggcacaaatatttgccaacatcttatatttaagacaaagggagctccgagatccagaccttgcccttagagaacttacagccttccaggtggaaaaacaactaagcagtgttaagggctttactgaggtgtaaacaaagtgctttaggacacaggataactggcaattctgcttgggggaagaagtatgtgttcagtaaggccgttccaaaggaggtgactttagaactcaatcttgagggatggataggaattaatgtcaggggagggggaatgagggaggaaagttagctttttaggaagaaaaaaaggaacagtttgagcaaagtcccagagatgggaatagggaggacattttcttcctatccttgtctatggtactccatccatcccatgacaaaactagcacacgatcaccctcaggctctctggtatggctgtcaggaaatccatatcacttaccactccctcatttctcccctagccagcaggagaggaagaagttgagtcaggcacacatccctagaatccagggttaccctcccctaacttcaggacaattaccacagagctgaaaacccgggagatttcattcatctaattacactcagggatgtgtacttatagtggtaacgtggcaactggcccatgttggaaatgaagtgggtaagacatcagtaaggtaagtagtccatagtctcggcagtgcatctaaggtggaagcaaggagaaaaacatatacttgggcttggaagacaattttttaatcacttagtcctcatccatgagctattcagtgttcccaacatctaagacaacagaggtggtgtgacaggataggaacacaagctctgcctccgagattttgagggcaaggcacttaacttctcagtctctttttcatcataatatggttataactgtagcacctactgtatagagttattgtgaggattgcatttttatgtaaagaacttatcacagtgtccagctcaatggagcctaacaaccagagcctaacaagctcagagagccagaatgctacatatactcacagatcaattaccccagaacaggcctccagctccatttcactgctctgaccaagagtgagacacctgaaattgtgttaccagaaatgttcatcctctgcccaaaaagggcctcacaagccaagttggtggtgcttttctactagggtgctaaaaaccaaacaaccaaaaacgcagaaaacttcatcaaggccacgtctctgcattaaacattgttcccacagcgacaaaagtcttaagtcattaatacctcaatattaatagatttatgagaggtgggggtggggagcttaaagagcagaaaataagccagttaaatataggaggtccaggatgtacagaagactcatttttgccacaaatatacaaggtctagggtcaaccctgccaagcacagtactctggaattttacgtcctctaatcctgaagaagcagggtactgggggaagaaaagcttgattagaaagtcaccacttttcaagccaccagaattctaaccaaatgatttcaccaccccaaatcccacctcattcaatgttaagggttggaggaacacctttttctgccccattacaaaccaacacaggagacagaagcattctgtgccccttctgagatctcggggaccctcctccagtaccagatctctcacagcctgcttgaagagcggcaatataaagcagctccacagcacacagccaggtccccagccccaagcgcagagggagcccactgaggcaggactccagccaaccagcctccagcctttacctgtggctgactggccaacgccagagaagccgcgatgtcgtaggtccgaagagagtgcgggttagcgaccccgctcgacggccgagcgctgtgagaggaacccacgaaaaggtgactggacgccttggagggcgcagttcccgctaggagctcggccccgcccccgcccccagggccagctctcgggaggggcaccagctcgggctggcgggaaaaagcccgggcactccccgcgaggggagccgaagaggagaggggaggcggctcccagaggggcacagaccgcattagtgctgggtgggtcagggaaggggccagaagaagccctggagaaagaaaagtggccgggagggaccgcccaagcagacgggagtccaagcctggggatgcggtcgggagaggcggacggggagaggggagacgcggtcagctagggagaaggaaaaattgggggaccagagagcgggtagggaagacgcacgaccccgagatgggggtgggggcgcttcagcagcgaaaaggagctgggggtccagaaggagcaccggaccgagggcgaggggccggccgctggctgttgacctacctgtcacttgcaacaggtgcctccagagatcgagaagtcccagtgccggtttcaagggagggtctccggctccgggaagatcgcaacccagctccggcagccggcccttctcaccctcccgggaggcggaaaaagctgcaactttccctggagcggggaggagctggactcttaaaggggccgcacagcgccccgggctccttagcagggggccactcagcccaaaagggagctctgggacccaaagccttgagacacaagaggaatgtccttccaggttaggaatgggagcctggggactgaggataggggtctaacactagacgtgcctcctcacccacttacttccatctgttggtcactctcttagacggtgaaatcacctgtctctttcgttcagctgagtcaaaagttgtcaaattgtctcacacttctaagaagataaaagagtatgaactatctaatttgagtaaataaaatataataccattctgatcctttgacttgtggccttttatggcaaataaatgtctgtctaaaatagaaacgttttgggcaaaagcgtagactaaattcatacatacacactcaaggacacaactggttaaaatatccaactcactagtaatcaaagaaaagcaaattagaacaataatgagattctttggcaaagatattttttattttttaataacacttaatgatgacaaagtagccaccaaacaagctgtcttaattgctgatagcagcatatgttggttaaaaacccttttagaaagcacgtgagcaatatgtatcaatagacttgaaaatgtttatacctacccagtaattgcagattcctctccctgcctctcccatccctctccccctcatttcacatcagcaattaaacatgctcaagtatctaccatcttaaaaaaagaacctccctacacaggaggtccctcttcaggtcctctttatgggcaaatgtattgaaaatgtacttcacaggtgaaattgcaatttttattcccttacttctcattcatttcttagctctcagcagtctggcttccttcccccactgaaacttctcaatgagatacacaaacaatgaccctcagtgtcaataaatccataaataagtaaggtatttttggtccttattttgcttgacttctcccctacatttaacaccgttaaccatttcctcgtccttgaaactttctatggcatctatgacattttactcttttgcttttcctcctactcctttgccctctcctcagtgacctttgtaggccactcttctgctatctgacctctgaaagtcagacattctcagggctaggatacatatactccctcccccaaataatctttttcactcacttggctttaattaccatatatatggtcacaactctaattctataactctacccagactgctttattgagttctgtgttcttgacatctccacttgaatgtcctgcagacacctcaaattcaacacatccaaagttaaacctaccatcttttctct

SEQ ID NO: 1564192 - DNA, 4001 bp, Homo sapiens
actgcaagctccgcctcccgggttcatgccattctcccgcctcagcctcctgagtagctgggactacaggcacccgccaccacgcccggctaattttttgtatttttagtagagatggggtttcaccgtgttagccaggacagaaatgattttaaattccccttggaatgtcatcaattcctagttaatatgtcaccccctataaacaacataattttttttggcagggcattacacaaattagtttacttttcatgacttgactactaatgtcaaaaatattattcatgatttctttgaaattattaactacattttgttgccacctgaattctatgcatagaaaaagtgcaataattttcatcgaaacttttgtttcttcaagattagttgaatatcttggaaaagtggaaatgaagcttctgggctcttaactgtgaaataaacatcaatcaagaatacttaaattatttccatttctaaagatcctagtggctttgggcacattaaagattttttcaacatgtgaatataatcacatgataagttttctcctcaggtaaaataaacataagcttctgattgtagcttggggagccatacaagacacaaaacctacacattgcatagttggcagtgactgaggaaggaacactatttctgctcctttttttctggggtaaggtgtaatgaccaaatatattttaaaacaaagacggtacaggcagcagccaatcacagtggattttgcaaatgatcagaacaatgatgtgaccaattagagcaggcgacgcaaccaatcagaattgatgctggctgaaatattaggtgaagtcatgccggggaaaccagctaaatatgagctctgcctacagtggatatgaaattcaactgtgcccacatcgttcaactttcttcacaagaaacttatttttaaaaattcaagtggtttctggggtatgatgggaaatttttactctccaggtccctttcttctcgcagctgtgctggaggcaaatccccagtaagactgatctgacaatggcattacaaataaataatagctaacatttattgaacacttaggtgacaggcactacatatgtataaacttccttaatctttacaacaaccctataaggtggatactgttattatctttgttttaccgatgaggaaaccaaggcatagggaagttgagtagcttgctcaaagtcacacgactaatacttgccagagctggtactcaaacttaggtagtccttcctcttaactaaaaattatgactttattagcaaattaagtgttctcatcaataccactttattagctaaattccattttcatgtctggctaaatggtgaaatgccaaagttttccgatatttgggctactgatgagaactcatgaagttcctaactgacatctgtccccattgtggttgcacttggcccatttctgatctaaattgcttcaaacaaacagaaagcagtcaaggaggactgaaaaaataaaaagaatactaccttattctcttgtcctccacttttttcaaatattcatctctctttaggacgcccaggatcatttccttctcatgatctaataaaaatgacagattgatgaactctgagttcttagacatggtatttcagcagcagctctgagtagcagtggttgaatcttcaagaaggtgaattgatatctacaactaagattcccccaaccaattcagaatcactcagttgtttggtgtaaagtgtgatttttacaaggtctctgcagaattgcgtatggtagttaagtattctttcaggctatacgtagaacagcctccactgggattacactccaagaaagtcattattgttttaactgaaaaatgtttccaaagcctttgctgtggtatacagtcaggcagcagctgaatttaactaacgatgctcaacttcaattcttcagaacaggaatcagatccgctgggagagaatgcagaaaacactaagacggtggagaaaaaaaagaggagagaaaaatttaattaggctatttttcccatagcacttgtaaaactgcctaatttttgaaattttgttgtatctaactcaaaaaactattttttaaaacagtaaacatgcatttattaaatctttatttagtgtttttttaaccaggaaatgttatttggatttagttgattcctggttctctatgcaaattcagttttctccattataattagcttcctccgccagctgcatcacgtcgccactcttgcagctgactgatgggtgaattgggtcaccactttgggacactaagtgcacaatctggactgcccataacagatcagggcctttaagtggctccctccttctttcttccttcctttccaaaactaggcccacagcataaaaagccctgctgttgagacaaatacgaacctctgctacatgcatcaacctaaatagatctcacaaacactgctgaataaaaaaaattaagttacaggctgggtgtggtggctcacatctgtaatcccaacattttgggaggccagggtgggaggatctcttgaggccaggagtttcagactagcctgggcaacatagtgagacccatgtctctacaaaaaatttaaaaattagctgggcatggtggcagatacctgtagtcccaggtacttggaaggctaaggcaggaggtaatcacttgagcctaggactgtagtgagctttgagatttcaccactgccctatagcctgggcaaaagagtgagaccctgtctcttaaaaaaaaaattacgttacggaagaattcatgaaaaatgatagcatatacatatatacatatatatgtgaagtatataacttgcaaatatatatataatttagaaatgcctacattcatagtataaatataggcaaattaggaaattcaagatcatgattacctctggtggacacaggtattcaattacagaagagaacacagcggcttcaatgcattgggtaatgttttgctctcaaaatgagtgtttatatctcatgatgtacatggttgtttgtgaattattttaggtatgtattgtatattgtaaaatggatgttttaaaactacccctttgtcaacataagaagctcaccaggccctgactctcatcctaactcttgagcacattctttcattggtttgttacctggattctctctctaaagctgcttaagaatgatgacttcttgggtaatctacctgatttttgtgattgggcatcatcccatgatactgtcccttagctttccccaagatctatgaactacaatttacctgcaagttacacttggtatgcttgcctctaggaaggctcccaggaataactacatacatacttaaaggctgctttggggcctcccagtaaccatgaggtcaggctgaccccaaaatctcaggagatctgaaaggagaggatcttgtccagagcttcctcgacttccacaaacccctatgtgtttgttctatacagtgtacaccaaaccagaactttgctgaaatgactcagaaatgaactgcttcctacagacaaagagccagccccctcttaggaagctgttcaggttagtgcatattctctggatttactccaggtcttccctccatcttgaaagctctagaggcaacaaggcccagagtgctccaagtttgaaaagaacaggaaacaataaggttaggataaacagggcttttcagaaaggttaattgttttttgcatcactgtcaactgcagtctccgcagagaaagaacacagttgtttttttcaaccccttgtgtatctcatctggtattgtgatgaaatggaaaaaaaattgaaaactcagtgaatgactatgttatcattacacccagggttcattgaagacatattttgtgtttgaaatgtcagacttagactttactttgtgaatgttttatagaatcatattcagaaattattcaaggggtt

SEQ ID NO: 1564193 - DNA, 4001 bp, Homo sapiens
tattatattttgttcctctaggagctcctccctattttagataatctttcagaacctaaggtaaccacagcggttgctaactctgcaagtaacagaagcaccatctgcttttttgctgtcttcagtaaaatcaaaagtccatgggctaagcaagatggaagatgtagagaaacagaggtcaaaggaaatgatgatactccccacagaaagagataaccaggaatggaacgaggttggagagaagttttgtgaaatcatggaaaatgtgtgaatgtatatagaggggtgagagagaaagaggatgagagaccacagacaagtaagatatgaatgtacaaaagcatatttacaagtagattttaagtagaatgtattaaagatgattagctaagtgcttacgcaggatggcaaaatagtcataagatacatcatcatataatagagcttaagtaaaacgaactgctcattttacatattaaagctacatttccttttccttcccttaacatactaaataataataaggaagtaatttcaacaaaaatactaaatgggcctccaaaagaaaagaggtagaagctcaataattttattcactaaacctatcagaagactttaacaaatctgaataaatagaaggataacatagctaatacccaaacttaaaatagcaaagaatttcaggaaatcataaatacatagaaaaagcatgattcaacaactaaaagagcagtaagacattttctcagttattagttgcccacatgtaaatatgcatgtatatgtgggtatgtacatatatatactgagggatgcaaggaccaatttaaggatttcactagagtccaaacaaatggcttcatgcatttaagacctagggtatgaattgtaacacttttgtgtgtaagctgttgtccaaataacatataaacaacttattacaaaatgaaaaaattatatacttaattcctgtgtttaaaatactttttaaggaggctactactgaagtagtacttctaaatgcattattacatgtaaacaatattttatactattttgaatgctataaatatataactcctgttttctccaggcatatgcttttctccaggcatacacatatacttggagcaaagagaagttatatattaatagttgtaaaattacgtttttcatttaaatgaggaagacagtattggtaattaaaacaatctacattaaggagaaattttttaaaccctgatgcatcttttcagagtatattaatgttcacagttaatatcgcatttctgtaagctgttacagtatcatattcatgttgaaattattccaggtttttcagactttattaatccttctactgaatttatatccatactggatatttgtccatatcaaaaatggaactgaatgtaaaaacaattaaataattccaaatgaaacatctaaattttctaataaatgaaagaaattcagagcaaaaggacaatctatgttatatagagatgtgagaggtttatatagagaggtgtgagagatttatagcaaaatgatgcaacacttctgctgtgaatttgatttttttatgtcactagaatgcatatttgttcctggaggcactcactcttcagtagaacctagtgcaatgcttcacttcatagatagaatcaagtgttaataacaaaaagatacttatatttctctcctcaatccattaaactcatagctaccaatggccaaaatgtcccttctgtacatatttctcccttttttactgtaaaatacaatatcaaatggtggaaggagctgttttcttcctgaccagcaaatcccactactcccctaccacacacaaaatacagaaattaagaaatcagatatcacactggagatccctaaacgcattagtcttaccttaatctgaaggttagaatgtttttatgggcttatttttctctcaaacacacaaactgtagaatgctggactacttgacccttgtgaactacttggagcaggaacttgaaaaaccagcctctcatattcccacaatctatttacacattgaacacacccagtagcacagagtaatgtttatctgttgcagacagctatttcaagaagaaggcagtatctctaaagctgagctttcaaaaaggaatgtctctgttgatcagcaggggaaaggtaacaggtttcatctaaagcacattttaaacattttttgacatgaggtattttttacaccagtgttttaaaggtgattcactcttttaatattcttctacccctgaaaatctctattcttaaaaaacctgggagaaacgtgataacaatgaacacatatgtgccaggcactgttgtaagtgctttacatatatcctctccaataattctccaaatgtgttaggtgtataatattattatccccatattacaaatgaacaaactaagtagtctgcccacagtcacccagttagtaagtactggagtcaaaagttaaatccaggcactccataaccatagtccaggtatctaatcatagcactgtgctatgtatgtatgacttttagaagacaaatgtgtaacagtatgtgattgctcagctgaacattagagaatgagtgaggttttctcagtgcttgtatggtactgaatctttagttgaagtaagtgaaatttttgttaagatcacttctgccaaggtgattacccatttatgttaccatagccaggtcccttttagctacagtggggaaccccaaaggtggtgtcctggagaatcgaaaacgtgagtctagcttgaagtaccaagagagttattactttcttatgttaaaaaactcatacaaaagaagtcaatacaacacctttaaaaagtttagagatacatgttttgttccatttttttcagattggatgattacttttgatctgtcttcaagctcatttgatgctagccatctccaaactaatgtgagcccatctagtgtgttattaatttcagttactataattttttaagctctaaaatttccatgtggttatttttatagtttccatttctctgctgaaattcactatctgtacatttataaagatcatattttcctttcattctttgaacctattttctgtttgttctttgaatacataataattgatttagtctttttctatgaagtttaacaactggacatttttgggtctgtttctactgattttatgacaataggtgatattttcttgtttctttgcatgttgaatttttttattgcatattggacaatggggatcatatagtgtaaagactctgctatctccctctgaggagtattaatatttgttctattaatattggcatttccatagaattggtttggttttgctaatgtagttatgcagaaagtctaaggtcctttccaagcctgatgaatttgggagatcaacctacaaattctgtctcccctgcagatcttgtaagggctgagttttaggattttttatttgtaatttttatggaaaaatagtaggtgtatatatttatgagttacagagatattttgatacaggcttgcaatatataaagatcacatcagggtaaatggggtatccatagcctcaagcaattatcctttgtgttacaaacaatacaatcatactgtcttcattattttaaaatgcacaattaaattattatttttactatagtcaccctgttgtactaagaaatactatgtcttattcattctttctatttttgtacccattaatcctccctacttccccccagcacctcactacccttcccagcctctggtaaccatatttctactctctatctccatgagttcaattattttcattttcagctcccacaagtaagtgagaatatgcaaaattttttttctgtgtctggcttatttgacttaacataatgaccttcagttccatccatgttgttgcaaacgacagaatctcattcttctttatagatggtagc

SEQ ID NO: 1564194 - DNA, 4001 bp, Homo sapiens
agccaaggacactgaaagctttcaagattaccaacagaactgaaaggtttctttgtaacacaaatttccattttcataaaatttgtatcagtcagcacaaaaacttacgcagagtatggtgaaagaacacacactctagaatcagacctacatgagtttgagttctagctctgcaatttaccagctatataatctcctcagcgaagtcgccaaagaatattggaggttagtattgttctgtgcaatcggcataacattatctttagcatagggtagctgtgaggatctccagtgcctgaatataatcgacgttagctctgtttgctccaacaaactgtacacaatgtggtatctataactgaggggaagactccatcaaataaacatatggatgaaaattcagggtgactgaatgcagattatgttctttcagatgtgaagatgaaaatcacatatttaatatttaccttcactgaagtctttcccttgattaagccagttgtaagcaagtgggggcgggggctgtccctacggttgtaaagattcatatcacacactgactaaaaagcatgtatatgtatgtgcctgtattcttccggtgttcataaaacacaccatcacaaaacttaccatgggtgatgaggccctttataatttaacactgtgcaaaattaaactctcatctcaaaaaaccctttcttcttccacgtgttcttgtatactactgcaaatcattactaaagcaaagaaaaaagtaaattctcttatcctttcaaaatgaaaaagtgcgcaaagaaagctcagtttgccaaactgttcccttttctcattcattcttgttcttttagaaaccagaagtaaatatactgtatgccaaaatgactgcctgattgacaaacgtcactgaagaaacacatcgaactgacaagcccggtctggaccaaaggtggcaagttttcttaaataatttaaataagttacatttcagtagaaacagaaggatttacactttaacacattaacaaactttggatctttttatgcagcttactttatgcctcacctgtccctcacccttcaaatcctgcttttacgcactttatgagctggcacacggtagtaaactacagaactccaactgggaataactctaatctgttgttggacctcagaggactgcttgtgcgatctttaaaggaaagcagtgttttctccttactcaacacctaccaacagtcatctggaaacctcctctccaacaattcttactatactgctactaaccttcacatctctcaacaccctcaacggcccccacgctggtgctgctagtcctcatcctcaaacaccttcctgggggcttaaagccggtccacagaggctcactctccgcaatgcctagggtccggcgaggaagggcatcgtcccctccgtttgggggaccaaggccaatcaagtcgacaccccaccccagccactccctctcccctcggcctctcggggcgtctggggcgggcgcggacgcgccaggccctgcgcaaacctccggcagccccgcagttcccgctgtcagccgcagtcccgggccggggtgagtccccgggacgccgcagttgcgcacacgcccaccgtctcaggcacagggtcactgggacgatcccgggggcgcccccgacgtccctgctcgggcaggtgccgggcctccccgcggacactcaccaggcggctgctgctctctggccgccgccgccgccgcctcgccctcacgcccgtcgcctactcccgcggggggtccgggccggcgccgcttccccgcccgaacccccagggtacgcgccgtgcagggccgggatccggtgtgagccgccgccgccgccgccgccccctttcctccctcctccctcagtgcgtccctcccaccgaggcccgcctcgtatttcctagatccggtctgagcgagagcttggcaagcaagctctggcttcagggcttccgtcgggcgccgtcgctcgccaggcacaaagatggcgccgccgggtactgcccagggcgatctcgcgaggcttcccccacaggaacaggagggcgggggcccaaaggaaaggtgataagttagggaagcctgagcaaacgcttcccatatcggaaatgggcagtaccagttaccgaagaagttactgcgcctgcgtgcgcgggtaatgacgcatgcccggaacggcccctaaagtaggacctagttctccaggttttacctgtttccactagtggcgcggggcggggtaatgaaacccagtcaagaaacccagtaaagggcttggcaggaccaggcaccaagtgagaggcgtcccttaaggcttggtcatccctcaggagcccgaatggccaacacactttttgcgtccccgggagtcttctaaccctttgcttgtccttatgggttttgtcaccgagtattctgtgcaaagcctcagctgcaccttcttcatcctgttatgggttcacattattaatcaagagcttcttgctgtgtgcttgcagatggcctcacagttggcagccacagtcctcctgtttcccacatcaccatctaactttctctttcatttttagtgctacatgagccatctgatactaataattctttttcctattttattttttcttgctcattcattcaaacgtgtgttgttcagtttcctatgtgccagctactgaggaaatgctgtgatctcagggagctattggtctgggatggagatgaatgagaaaaaacaatgacgacactttagcacagtaagttctatgatagaaatgagtacagagaggagtgacagatatggggggaggatataaaatacatcaaagaggaaattcctttttttttttttgagaccgagtctcactctgttgcctaggctggagtgcagtggtgtgatctcggctcactccaacctcagcctcccaggttcaagtgattctcgtgcctcagcctcccgagtagctgcgactacaggtgtgtgccaccatgcccggctgattagttttggtagagacagggtttctcctgttgaccaggctggtcttgaactcctgacctcaggtgatctgcccgcctcggcctcccaaagtgctgggattacaggtggtgagccaccgcgcccagccaaagagaaaattcttgagcggtgtctgacaggcataggatttagtccagtgaatcactcagggcgatagcaggaaacaaaccaccccaattatttcaaccaagagaatttaatatcaagaattgattattaggcaactgataaggtcagagagaactcttaatgtatcgcagaggtagcaactgcaggaagcagctactatgcctagagctaggaggaggaagggaagaggttgggattattacaatttagacgtttagaggaattgccttgtggaggtaaaactcagacctctgagaaaggagcagcatctgctggtgctcgtgtctttgagtggggctcaagacgttgtctctgcaagtgtggggaaactgcaaaggatccaactgctgctatgggaaggaagttctcctgtccctctgggagcttccaatctccctctagcctggggatgagaatgtgacacctggactggagctgaacttgacccacatcctgaagtagagcagctccagtgtcaagagccactcattttggaagctggatgtggtcagaaagggggtcattcactcctatcacacaccccacatactggggcccatcgtgctgaaacatttgtagaaaacctgcttcaagttcaggtttcggaccaagcagagcagccccagccaactcacaaacccatgagtgagaaataaatgcttattgtagcatggcactgagacttttccttattacgtggcaaaagtggactaatacggcagctctgttccacaaagtgagccacggtttagtctccctatgtcttcttgctccaccattcctagactgtcgtcc

SEQ ID NO: 1564195 - DNA, 4001 bp, Homo sapiens
agagcccaaactggactatacagcaggataatgcactggaatgttcaagccaatacaccaaagaatcacctgagtggcaaaggggctgcaagctccccatcgtctgctggtatcttcggctttcatcttctgccacctcattgatgtctgaatagtccacagcatcttctgtactcctaacccaccctatgaaaaaagcagggagaatcgcaacaacagtaagcgaccctcactccctcagataattcccatttaaaagtacatgtacaggctggatgcggtggctcacgcctgtaatcccagcactttggaaggccaagccagacggatcacctcaggccaggagttcaagaccagtctgaccaatatgatgaaaccctgtctctactaaaaatacaaaaattagccgggcgtggtggtgcgtgcctgtagtcccagctactcaggaggctgagacaggagaaatgcttgaacccgggtggcggaggctgcagtcagcccagatcgccccactgcactccaacctcggagacagagcgaaactccgtcttacacacacaaaaaagtacatacatagtaggtggctagcctcctcccccgcctactccccacaacccagacttcaccttcatcatttaccaaggcaccgtcagtcccggtcaattcttcatttgccgtgagttcagtgatcaggctgcccagccccaaagcccccaagcctgccaagtgcttcttacattcctgaaaaagggacagcacgagtcgaagataacaactaaacctacgactcccacaccacaggacttatttccctggtccacgacaaagtcacaaatccacatgaaaaatgactgtgcagtgtgccaaaacaagcaacacgttcgagaactgtaatatacatctaccaaactccgcatcgatcagatctttattaaagcaccacagccaactgcatcgcccacactttaaagtatactacaagagaagacgaatcaaataactactgccaagactgaatgaatggaacggtcgttctcggaacgagggccgaggcagggggatcagtgggattggaggcgtcgaggcggggctcgttcggtccctgtttcgcatgcgcctgcggcacaggaggggccacagcggccgacagcttcactcctcaagaaaacgggcctaagtgaaggcagggtagtttcactagggcgcaggacactatttcacgaaagtcagtgaagacgctgggagagccacctaaaaggcgcactgtgaccaggaggcccgctcgggtgctaggaacaccccattgtcctaagcctgaggccggaaccaaacgagcgggaggcaggtcctgtccagtcctctggctctatagagccatctcagggcagcgatgtcagaggggcaggcagtgtcaagaatctccaagcaggttacgggtgggaagccatctcagtaggcgaaaccagcatgtgtcctactgtctggtcggcagagcgctagctccaaagccactattccctgcgcccctggccccgggctcgcctcgcgctctcttctgcccactctcccccagaacgatcactcccacgccacgttgctcccgcacccatgaggacgggatcctcctccccggcgttagctgcgccctgttctcgctgcctgagcaccctctcctttcctccccgcacctccttcctctgcttagccccaccccccgagccctacccccacgcccaccccctcacatcatccaagacgctttccccctccagctgcccggctccattgatgttgccgaaaaggaaacccgctaaagaaaatgggccgcctccagcggaatcttcgtcgctgtccgtgtctgacatgatggcggcagcagtgatggtagctgctgtccgcagcagcaaatcgcagccgggtcccatagaccggaaataaaacaacagtcgcccagaagtgacttactgagctcccttaccctaccagcctctaccggaagctcaaaacagaggggaaagggagggggaagtggggagaggggagggggaagggggggaaaacccggaaagaccggctatcctaagagaaagaagtaactactttactaacggcttttgattcgacgctacgggatcaggaggatggatatgtggaaagcggttggtcaaagaaaatattcagtcccgcccgctcccactgctccgcgcgcgagctttctcacggcaccgaattagagcagtggctcttcctccaatcagaaggagctgctcgagtcacgtggcttacgcgcaggcaacctcgggttcctgtaccacaatacccggaagtaagggtaagagccggtctttgtgctgcgtgcaatttcaccggtccgtcccaaggagagacttgacgtaaattatacaggcattcccgagctatgcaggttacttgttttgagttgacatttttccctagaaattgattttttgaccggacgcggtggcttacgcctgtaattccagcactttgagaggccgaggtgggaggatcgcttgagcccacgagtatgaggccagcctggacaagaaagcgagactccatccatacacaaaatcaaaaaaattagccagatgtggtggccagtgcctgtagtcccagctgttggggggtctgaggtgggagccaggagttggagtctgcagtgacctgtgatcgggccactgcactccagcccgcctcaaaaaaaatacttgttcccccaacgttttatttcggaaaatgtgaaagtttagtaaaatgaacagctgacccctcacctagactcacaatggttaacattttgctaggatttttgtttttctaaaccatttatgggcatcttgttcttcactcctaaaaataagcatcttaactatggaaccaaagtacctttatcacaactttaggaagtaagtcaatattatttaaggaagagtccgcacttaaatttccccagttgtcctagttggaacattttacggggtttcgtcatgttgcacaggctggtctcagactcctgggctcaagcaatctgcccgtttcagcctcccaaagtgctgggattgcagccatgagccaacaccccggctttcaccttgcttttttcacatattatgataatatagactgaaataatttctttaccacatcatagcactcttcctcattctcccttttttccaatactaggatccattcacgtttcatgcattgtatttggtcatcttcctttagtccagaatcacctgccttcttgtttgtttttcatgacactaaatatttggaagaatccaggcaagttgtcttgaaaacattccatgatccgaatttctcttgtttcctttttttttttgagacgtagtctcgctctgttgcccagggtggagtgcagtggtgctatctcggctcattgcaagctccacctcctgggttcacaccattctcctgcttcagcctcccaagtatctgggactacaggcgcccgccaccaagcccggctaatttttgtatttttggtggagacggggtttcactgtgttagccaggatggtcttgatttcctgacctcgtgatccgcccacctcggcctcccaaaatgctgggattacaggcgtgagccaccacacgcccggcctttttttttttttctttttttgagacggagtctcttgctctgtctcccaggataaagtgctgtggtgcgatctcggcgccaccacccctggctaatttttgtatgattagtagagccggggtttcaccatattggccacactgatctcaaactcctgacctcgtgatccgcccgcctcaagtgctggaaattacaggagtgagcctccgcgcccggcccaggttaaatattttatcagccatcagaaggtacactgtcaaatacagtgttgtcctagtattggtgatgctaaatttcatcaccttgataaagtagtcaccaccagattgctccatcacaaaggtac

SEQ ID NO: 1564196 - DNA, 4001 bp, Homo sapiens
tgcagtgaacatgtgtgtgcggatatttctttgacacactgatctcaagtttttaggatatacatctagacgtgggattgctggatcccaagtttttattttattattttttattgttttcattatttgtttttcaattttatgttcttacaatgaaccaagactttatttctaatcttattttccatgtatttgggatgtatttgtagagccctgcattttgggtattagggcccacacttttgttttgttttgttttgagacagagttttgctcttgttgaccccaggctggagtgcaatggcacgcatctcagctcactgcaacctctgctgcccgggttcaagtgattctcccatctcagcctcctgagtagctggcattacaggtacctgccaccacacccggctaaattttttttttgtatatttagtagagacagggtttcaccatgttggccaggctggtctcgagctcctgacctcaggtgatccacccgccttggcctcccaaagtgttgggattgtgggcatgagccactgtgcccagccaggcccacacttctgaggaagatttttctcaaaggtggaaagacagctgggcgctgtggctcacacctgtaatctcagcactttgggaggctgaggcaggtggatcacctgaggtcaggagttccagaccagcctggccaacatagtgaaaccccatctctactaaagatacaaaaattagctgtatctttacagctagttgggaggctgaggcaggagaattgcttgaacccaggagatggaggctgcaatgagccgagatggcgccactgcactccagcttgggtgacagagtgagactccttctcaaaaacaaaacaaaacaaaacaaaacaaaaaaagtcagcagtagaaaagcagacacccaggatgggagagggaaagatgcattatttgtgattgtaatttcttctcttcttgtttcatacagatatatatgtatatatatgcatatataaatacaaaagagaaatgtaaatgcaagaagagagttgatcgaaataaataaaaaatctgggggctgagcacattccctaacagaacatagtaacaattaaggctgggagcaggaacagattatttgaagaactagctgctaagcaagattttatcagatcagtagtaacttttagatttctcagcagaactaaaactggggcattttgttcatttccaagcctttttggtaattcctcttttatggaagaaagaatgtaagaactgaaactatttcaatgtatttgtttgataaacagacctaataaaaagtctggtgggagaaaagttagacaatcctggttgaactgggttttaattattttttaaatttacttgcatttacctaaaagactagttgtacggtattcactttaagaaaaagcatccacttttttccagcaagcactctttgatgcctgattaaattaacaggaccccttactaccattcacctctagttccatctcgctttagcagaattacaattggaattataattggctggagggcgcctggcagcatgctccaggccatgcaagtcagtacacgcctaaatgggtgttttttcaagttcgcagtctccggctgcagtttaagagactgacctccatccttatccccggggcactaagctttcaaagagaaagtttgacccctaggctttgatccactttcccttgaaaacttctcgcgaggcccaacaggtcgcaacgggtcccagccttcgcgcctcgctgtgcaggctggctggggagggctgcggggtgcaccgcggcggggtgcacactggcggggcgctgacccggtcccggccgcccggtcggccgcccgactcacccgctcctccgggaactggcgccgacaccgaaaaggctgggacctgcgtctctggtctgtgggttccggacgaaccgcgcgtgggctcccgcgcggaacgtagaggcgaacgctgggctgccggcgcctggacagtaaaagcggcgcgcgccggcccctccccgcctcgccacgcctccgcggccgcgctgcccagcggactggagcacgacttcgaggcagtggcccgctcaccgcgtgctgggcgggaaggctcgaaaggcgcggagcgccgaggggagcgccgaggggagggctgagggggacgcgactgctcagggacctcgcgaagcaagaccgaggcttcaaaacaagttaccttggccaggcgcggtggctcacgactgtaatcccagtactttgggaggccaaggcgggcagatctcaaggtcaaaagatcgagaccatcctggccaacatgatgaaacccccgtctctactaaaaatacaaaaattagctgggcgtggttgcgcgcgcctgtagtcccagctgctcagtaggctgaggcaggagaatcgcttgaacccgggaggtggagattgcagtgagccgagattgcgccactgcactccagcctggcgacagagtgagactctgtccgaaaaaaaaaaaattacctttacacaggggcaaccttcagggcgccagaagatttttaccaggggacagtgatactcctaagaggcgagttgggccgggcgcggtggctcacgcctgtaatcccagcactttgggaggccgagtcgggtggatcacctgaggtcaggagttcgagatcagcctggccaacatgttgaaaccccgtctctactaaaaatacaaaaaattagccgggcgtagtggcgggcgcctgtagtcccagctactcgggaggctgaggcaggagaatggcgtgaacccgggaggcggagcttgcagtgagccgagatcccgccactgcactccagcctgggcgacagagcgagactccgtctcaaaaaaaaaaaaataaataaaaaaaataaataaaaataataataataataattagccaggcatgatggcaggcgcctgtaatctcagctacttgggcagctgaggcaggagaatctcttgaacccaggaggtggaggttatagtgagccgagatcgtgccactgcactccagcctgggcaacaagagcgaaactccgtcaaaaaaaaaaaaaaaaaaaaaaagcgagttgctcgcttttggttgctcctcgactccattaggtcggacggtttgtccctaggcacggtgacctcgcctagtgacaaacacgccaccgtgcaaacccactgaacaactagaatctgtgcccaaagccctctaacacgatcggttgctcccctctcctcaacagagtcaacattttacatcctctggagagggacacaggttacgtcgcccattgctcctcaagggggccgcaattcaaacaaattttgaatcgaactaaaagcagtttgtttctccgaaagaaggtcctcggctgggggaacaagcttaaaaaaccacctacctttcccttcctggaagttttctggggcctgggcagcagcctgggcgctgctgtccgcatccgtttgagtgtcctcgtcggcaggaatctgggtgccttcgtcgccagcaatgtcggcgctgctttcataggtggtttcagacccacggtcgacaagaatttggggttcttgttggctagttacttccgatgttgaaactgttggtgttgaatcattttctgaagaaatggggagctgtccctcggggcactccatggcccacctcgttggggttgtaaaatggcttcctgtgtagtcatgtgacctggagggttccagaaccttcgtaaatgtaaaaggtttcttttatgtctttaagacgtaatactgttaacgacattgccggtgccggttcaagattgtagcagccacgtctccactgcctaacactcacccaaacttaatcgcagggaataaatattttcggaagactattctacaatcattttcttttgggacatgatattttttcattcaattaaactagattatcagagcttcagaccaag

SEQ ID NO: 1564197 - DNA, 4001 bp, Homo sapiens
ttctcgcgaggcccaacaggtcgcaacgggtcccagccttcgcgcctcgctgtgcaggctggctggggagggctgcggggtgcaccgcggcggggtgcacactggcggggcgctgacccggtcccggccgcccggtcggccgcccgactcacccgctcctccgggaactggcgccgacaccgaaaaggctgggacctgcgtctctggtctgtgggttccggacgaaccgcgcgtgggctcccgcgcggaacgtagaggcgaacgctgggctgccggcgcctggacagtaaaagcggcgcgcgccggcccctccccgcctcgccacgcctccgcggccgcgctgcccagcggactggagcacgacttcgaggcagtggcccgctcaccgcgtgctgggcgggaaggctcgaaaggcgcggagcgccgaggggagcgccgaggggagggctgagggggacgcgactgctcagggacctcgcgaagcaagaccgaggcttcaaaacaagttaccttggccaggcgcggtggctcacgactgtaatcccagtactttgggaggccaaggcgggcagatctcaaggtcaaaagatcgagaccatcctggccaacatgatgaaacccccgtctctactaaaaatacaaaaattagctgggcgtggttgcgcgcgcctgtagtcccagctgctcagtaggctgaggcaggagaatcgcttgaacccgggaggtggagattgcagtgagccgagattgcgccactgcactccagcctggcgacagagtgagactctgtccgaaaaaaaaaaaattacctttacacaggggcaaccttcagggcgccagaagatttttaccaggggacagtgatactcctaagaggcgagttgggccgggcgcggtggctcacgcctgtaatcccagcactttgggaggccgagtcgggtggatcacctgaggtcaggagttcgagatcagcctggccaacatgttgaaaccccgtctctactaaaaatacaaaaaattagccgggcgtagtggcgggcgcctgtagtcccagctactcgggaggctgaggcaggagaatggcgtgaacccgggaggcggagcttgcagtgagccgagatcccgccactgcactccagcctgggcgacagagcgagactccgtctcaaaaaaaaaaaaataaataaaaaaaataaataaaaataataataataataattagccaggcatgatggcaggcgcctgtaatctcagctacttgggcagctgaggcaggagaatctcttgaacccaggaggtggaggttatagtgagccgagatcgtgccactgcactccagcctgggcaacaagagcgaaactccgtcaaaaaaaaaaaaaaaaaaaaaaagcgagttgctcgcttttggttgctcctcgactccattaggtcggacggtttgtccctaggcacggtgacctcgcctagtgacaaacacgccaccgtgcaaacccactgaacaactagaatctgtgcccaaagccctctaacacgatcggttgctcccctctcctcaacagagtcaacattttacatcctctggagagggacacaggttacgtcgcccattgctcctcaagggggccgcaattcaaacaaattttgaatcgaactaaaagcagtttgtttctccgaaagaaggtcctcggctgggggaacaagcttaaaaaaccacctacctttcccttcctggaagttttctggggcctgggcagcagcctgggcgctgctgtccgcatccgtttgagtgtcctcgtcggcaggaatctgggtgccttcgtcgccagcaatgtcggcgctgctttcataggtggtttcagacccacggtcgacaagaatttggggttcttgttggctagttacttccgatgttgaaactgttggtgttgaatcattttctgaagaaatggggagctgtccctcggggcactccatggcccacctcgttggggttgtaaaatggcttcctgtgtagtcatgtgacctggagggttccagaaccttcgtaaatgtaaaaggtttcttttatgtctttaagacgtaatactgttaacgacattgccggtgccggttcaagattgtagcagccacgtctccactgcctaacactcacccaaacttaatcgcagggaataaatattttcggaagactattctacaatcattttcttttgggacatgatattttttcattcaattaaactagattatcagagcttcagaccaagacaaaattgttttgatcccttttagaatctatctgctaaccttcattttggcattgtgccatggggctacatcaggggttatgcaagaaaacaggccaacgagaccagttttacatttactatacaatattcttgaaggcattaattatacaaaaaaatcctttcatgaaaacggaaatgaaaattctgtttttggtaactgaaatagctgagtaattgttttgacttgtaaggacagtgtgaattatataattaagtttatgatggctgctaggaagctcagaaccaaatttgcaaccaacctgtaataactaagccttactgacatatgttgagttttatcttaagtaactatgttctctcccatttccctaattattttttgtctcatgcagtaaataacactaaaagctgctcaaagccttttcataaagaatcagatatatacatgttaggtaaatgaaaatagtactcctggctgggcacagtagctcacgcctgtaatcccagcactttgggaggctgaggcaggtggatcacctcaggtcaggagttccagagcagcctgaccaacacggtgagaatcccccgtctctactaaaaatacaaaaattagccgggcgtggtggcgcgtgcctgtaatcccagctactagggaggttgacgcacgagaatcgcttgaatccgggaggcggacgttgccatgagccaagatcgcgccactgcattccagcctgggtgacagagcgagactccgtcaaaaaaaagaagaacgagggagagggagagggagagggaggagagggaggagagggaggagagggaggagagggaggagagggaggagagggaggagagggagagggagagggagagggagaggaaatagtactcctgacaaaagtgtctcagggagcatctctgtgggtagaggaggggagcacaataactgctcacttataaattcaatcatccaacaaatgttaattgagaatttagtgtgccagatcggatttgaaacatttattaaatgcttaaaatatggttaagtgtttcatgggaaggaggcaaaaattatccttcagaaatttacaatctagttagagcatacacatatgtaactttttcattattgccagagttccagccccttcttaaggaaacggggaaatataaagtggaagaaaggaaaggatatgaattatggtttctctttggtagaggagagttgatccaagaagcaacatgatgtacaaatacagaaaaaactgtcctatacatactatcatattatcaggtacacagagagtgtgtttccgggttctagtctgtcatgctgcagtttctttttaataagttcttttgcatgcctttccctataaagcactcttccccctccctaactatgcttcagtttcatcattatagcaaatatgcagttgcatgtgttccttcaatagaagtttattaggtatcgggaattgtcctaaggtcattaatagctaacattcactgagtgtttatgtgctagactctttgctagtgcttcgtatgttattcatttaaccctcacaattgccctctgagtttggtatgattatgattctgtttattgatttttgttttcagattagcaaacagattttaaaaggttaattagccctatctttcatcatatacaaaaatcaactcaaaatggatccaagacttaaatgtaagacctcgcactatgaa

SEQ ID NO: 1564198 - DNA, 4001 bp, Homo sapiens
cttttcacaaagtcccctatcatattccaccttttaaaaaaagaaaagttgactaaaatttcttacctttttaattaaggacttcagcctatagtttggagctgttaagcagtatctatcaggtggcagtctaggtcctgcatatggcttaatcagtggcaaaggggtttgatttttctgccttgcgatatccagtaaaaacttaaaaaaaaaatccttattagaactacagttttaaaaattgtaagtaaaaataacttcaaatcaaagtttgctcacatctcttgggggaggagaggtaaaagattggtcagcacgacactggattgccagtctcacatcatctgcatcaacattaggtttcttagcatggctcgaataaatttttgcatcatccagaattgtagtcacataacctataagaacaaaacaatcttttcttaaacatatgaagacagcttaatatttatggctacttgtcttaataaaactttccactaatttgtagacggtttataaattttgtgggtttttgtagagacagggtctcgctatgttgcccaggaaactcctggcctccccgcgacagcctcccgaagtgctgagattacaggtgtaagctactgtgctcagcctaaatgctgattttaataagtaattgtcctgtctatatgatcagttttaaacagatatcacagtgtgaatactactgtcccctagcttgagctcctttcgttctttaggctgaattctatgatactgttaacataatttggttgaaaatgttcttacaaggctgggtgcggtggctcacgcctgtaatcccaacactttgggaggccgagatggggggatcacttgagtcagtagttcgaggccagcctgggcaatatggcgaaactccctttctactaataatacaacacttagccgggcgtggtggcaagtgcctgtagtcccagctcgggaggctgaggcacaagaatcgcttgaacccaggaggcggaggccgcagtgagccaagatcgcgccactgccttctagcctgggcaacagcgagtccctgtctcaaaaaagaaaataaaagaaaatgttcttacaataaaaatatcttttcaagttcacaagttaggcaagtttttggtgtttcattaacttacggaaagcaaattccaacatttgatttataacccttggttcatactctgtgattcccatatccttcaggatctgtgccatcacctgtggattcaaataaaaacaccagatgcagaatttggtactggaaatcaaggctgcactgaagggtagtatttatatttatgatacaaggttccccttctttgggctccaaagtcctactcacccttgccctcccaagtgagtcagtgatcacacgaaatcgcatagtacgcttttgcagaaaacttttatttttattttttggcggggttgggggcggggtgtggggcaaagagaagacagaatttggcttctccagcagaggtaagtagctccagctggttgtcatttttggctgtggcggcgggttaaggtagcatcagaaccctggacgcggagtcagggctggcagatagctagagacgagggggaggcaggggcccgaagcccaggacacaaagctgggcagccgttccgcaagctccactggaccgcgaccctctggcaagacttggcccaagcggcgagataggggcccgggggccagggcgcatccccatcaccctctcctcctgacggccctgactagactgaaacgagcgtgcgagccgaccctcaggccctcagcgtggccccgcctcgcaggtccctggctgcacctggcttcgcgatccgcggcttatccttcgcacttaccaaggcatctctcggagcgttcttgggaggcgccatcttgcccgactccatgttatccagccactcgtcatccgcggagacagaggagagaggagagctcgcgggctcctcgctcaggctccacccctgcggggagcgggaggagggaaacggaaggcggggttacgtgccagccgccgggggcgggagtttcagcaagccgctggccaggggaagagacgcgctggggtgcccgagttcagtattggaagaggcaggtaatccttccccatggagcctgctggggcctgaaagaagtagaggggccgagaagctcgacttcccagagttgtttcccggcaaagggcaccaagtgggccaacctcacctttgcgggggtccctcctcacacctccacggctaccacctttgcccctttcggcctcccggaattccagacccagtcggtgttagggctgcttggtccaacacagttggacccgttacgtttgaatgtcacatcaacaaggaatacatttttagtataagtatatcccagatttgcacaggccatacttatgctacgaaataattgttctgatattcatatttaaccgggtgtcctggatttttattagctaaatctgacaatcctacccaatagcttgctctccccacagcaagactttggtcagcccttgtcacactcaaagccctaccgtggctgcccatttcacactgatgaaaaactaaagccttcactcggcccgttagagaccctctagcctctcttggccctggagcagcttcctgtctccccgctgaggccaacacaggacccttccttgcctcccagttacacccttcccagcccctcacccacagaacagcccgaatgacttttcgtgagaacctaccatccagccccagtgactttcaaaaaatgtgcatcagttaactatctctggcttaaaatgtcgcagataactcattcttaccctccacatccaccaacgccctaggattctccctcaggaacaggaaccgtgactcacccaggccagaaacggagcaggcagccatgttggcgctttccctcacaatccacactcaacctagcaacaagtcttgtccgggtgacctcccaaagttctatccatgtctccacatctccatccagtgctactatgctaacgagtccaagccaacatccttaccaagattacagaaatatgctccccaaatagtgtccccccacattccttacacagctagacggacctttcagtcataaatccaatcattattttccttaaaaccctccagtggctctcctcacaaacacttacacaaatacatactaatttcccaggcttagcgggtccttcagttttgtggcgcagctcacctcatcagactcatcagaatcagcagtccacctggccgccatcttgaagtttgggcaggaactccccccaaccaagaaccatgtgttctcaatacattgtttccagtgagagcacgtgctcccacgctgagctagtgcctttctccactcttactgtggccaacctctgtgtaaaactagtaacagtcccttgcttttgaatatttgcaaggtacatttaaaaataggtgggggccaggcacggtggctcacgcctgtaatcccagcacttcgggagccgaggcgggcggatcacttaacgtcaggagtttgagatcagtttggccaatgtggtgaaaccctgtctctactaaaaatacaaaatgtagccgggcatggcagggcacgcctatagtcccagctactcaggaggctgaggcaggacaatcgctggaacccaggaggtggacgttgcagtgagtcgagactgcgccactgcactccagcctgggcgacagagcgagactccatctcagaaaaagaaataaaataaaataaaaatacgtggtatatttgcaaggtacaacatttaagactactttaaaataccctagtaaaagaaagcctctctcacctgttccagccactgatgtcactttcacagatggcaccattgtttatcagtttctattctgtgcaatttacaaatagtatcttgtttatatatttttcctcccactagaatggtactatagtc

SEQ ID NO: 1564199 - DNA, 4001 bp, Homo sapiens
aagctgaagaagtgggagtgtagctccttggtgaagcagatgtctgcagctgcaggggtcctaagcagggacagatgcaattagtcctgccccctgcaccccgctccaccaccctgcccccagcatcagcatgcagaagggaggcacaggggagggcctgcggggccccaccccatgccctgcctggactgctggacgccacctcctgggcagagcaggaggagggcaaatctgggcagaggcaggtggggccggcccggcccacttcgaggggcccattcctcctcaccaacgcatcaacttcaggttccagatgtggcggagtttcaggatccctagaggacaggaaaggcttcatgccccaacttcccatatccccagggagtgcccttccttcaccccatctcagggaatgagggacagcagcactaccatttccctacagcccaaagtggcatctttcagacccttaggccagatcattcagttctccctggctcctccctctcccccaccctccacatcttactaatcactgcacctggactgcctacctccccaacatacttggacaatgcccattcttctatacttctccctgtactgtcactgcaaccagcccagtctaggctagtggatggctccaagtcctccttcctggcctcccaggatccacctgtgacatctataggcctttctccacccagcagccagggtgagctctgaagggctccagtgtggctaggtggctccccatgaactctaggacagttaagctctctgttcaggagtggaagccccaggcacccctccacccggccatctggttaccagagccaagcaacttcctgtgaagtcagcagagcaggaacctctaggtgtggcaaccaggctcccaaatagggctgaacggtacacgcccagccaggggcaaacctgaagccaggacactgggcttccagtccctggcccagaacttcctcacaggatatcctatgtccaacccccaaatttttcccaagactgtggggccctggatggtttagagaacagagggttctggaggcctgacgttaaaggagctgtaagatatgccctgtggccgttccttggtcctgctccatgcccaaggccctctccaaatcatgctccctcagggatgctgcaggagccacaaatccaagtctcagccctggggcagaacgcccggaaaccggagtgccagggctccatgaaaaggcagcgagaaggggtttgttctgacgaggctgggcccgtcccgaatcctcgcctttcctccccctgcccagcacactggcccgggtaccccagagatgagggtcgtccatgcaggactggtgattggacacggtgatgaggggcgtggccgggcctcgcttctcgatgagctcgtacagcacctccctgttgtgcacggtcaggtggttcatgtactctggcggggaaggagaagtcaggcgctccgggctcgcccgctaggtcggggccgcggcgtcccccaccctaagtcccacctccggccgggcatgggtacccgggcgggcctgcctcggcctgggcccactcactggtccagaagcagctgtaggtgcccaccaagcccatgacgacgctgctggccagggtccaggtgagcggcggcaccgcggggaacggccacttcacgtgcagaggcatccccacccggcccgcggccggcgctcccagcgccccgggccggcctgtggggcgcctctaggtctgcgacctcgaccgctcgagacactggcccctgactggcccgcgcacggacggacgggggcgcggcgcaacaggggactggaccgaggtcccttcgcaggtcaggccggagcagcgcccggccccgctctctcgtcactggggagcggtcgccggggtcacaggccgtgggcgcgctgcggaacgggaggaaacgggaaggcgggcgctggcaccccggcccggtgcaaccgccggaaagcgaacctgcgccggtgcccagcccgaccgactgtcgcaaagcgcgcacgggccgcttgacggcagcgaggccagccccggggcggcgggaagtggccgtcaccccgtggggctcccgcttcctggcagcctcctgcgctcgccttttgtctctctagtgtttctgttttttgtttgacacagggtccagccagacccaggctggagtgcagtgatgggatcatggctcactgcagcctcgatctcccagactcaagcgattctcctgcctcagcctcccgagtagctgggaccacaggcgcccgccatcacactctgatccacccgcctcggcctcccaaagtgttgggatgacagccgtgagccaccccgcccagccacatatacaatttgacatagttacagtactacatgatactatgtgtatgtagcaatgtataatctactgtatggcaaaatatacaatatatacagcaatatatacaaacatattgtgtatcatatgtaatacaagaaacagtattttataccatctgatacagtcacaatgtcagctactacctctagttctgaaacatattcatgacccggaaagaaagccccctatgcattaagcagccagttttttatttttattttatatttatttatttattattatttttttaggagtctcgctctgtcgccagactggagtgcagtggcacaatctcggctcactgcaacctccgcctcccgggttcaagctattctcctgcctcagcctcctgagtagctgggactacaggcgcaggtcgccacgcccggctaatttttttttttttttgtattttagtagagatggggtttcaccatgttgcccaggttggtctcgaactcctgagctcaggcagtccacccacctcagcctcccaaagtgctaggattacaggcatgggccaccgcacccggcagttttttatttttatttttatttatttttatttttgagacagagtcttgctctgttgcccaggctggagtgcagtgacgagatctcagctcattgcaacctctgcctcccaggttcaagcgattcttctgtctcagcctcctgagtagctgggattacaggcgcaagccaccacacctggctaatttttgtatttttagtagaggctgggtttcttcatgttggtcaagctggtctcgaactcccggcctcaggtgatctgtctgcctctcctcccaaagtgtgagtcatcctacctggcctgttttttatttttaaaccataatttattgatttttttttttgagatggagtctcgcactgtcgcccgggctggagtgcgagtgcagtggtgtgatctcggctcactgcaagctccgccttccaggctcaagcaattctcctgcctcagcctcctgagtagctgggattacaggcgcccaccaccacgccgggctaattttttgtatttttagtagaaacgggtttcattatgttggccaggctggtcttgaacgcctgacctcgtatccacccgcctcagcctcccaaagtgctgggattacaggcatgagccaccacgcccagcccataatttattgattttttaaaatttgtccagccttctattaccacgtcgaatccattagctacagccatcccatgagaagctgagtggattcagccccacctcctgctcacagaccctgtccgagcacctcatttgtcccaacagcattactgcaggacccccaggacgttggactgccagctccctgggtctcctcctctctggggcagatcctcagtcctcccttgacttcacgactgtggccagatcatgtgtggactgtccctctctttgggtctccagagcgcttgcatcaaacacccctaactcagaagtgtgcagccacactgggactcagaacccaacaacagggacagaagactcacgcccttggggtgcccggtctcgtggcatcaggcatgacttccagctcctgcg

SEQ ID NO: 1564200 - DNA, 4001 bp, Homo sapiens
ctctctcaaaatatcttattgtatgtaatatttgcagactgaggttgaccatgggtaactgaaactgcagaaagcaaaaccacagacaaaagtagactactgtgctccaagacatgcatacgtggctgttcactgtgggattatttgtagtagtaaaataaacaaaaaccctaccaaacaaaggccagatagccactgtagaggtcggtggcccactggccagtccccagcatcttcccactcacccactcaaatcaaaggctcggatgaggatgtgctgcaacacgtcgagcgaggtgatctggggatctacagcaaaagagcggaactctggcggcaagaagctctcacatttctggggagagaagacatggggtaggccaccaggggccccatcaccatgctgaagagtgaggtgcagagtggtagaaggcaaagtcagagaggtgccaggggccagatcaaggcaggtgttctggaccacagggtccagtgaggaggaggctactgcaagagttcaggcccccaatccttcttctatatcccttcaactatggttgccagaatcaccgtgtccagtctggctcctgttaaatcagtcctctatggtgctgtaaccaatctaacacatctacctacaacactcccctgcttcaatctcttcaatggcaaccctagagtcccagcaagcgggcctatggggccccagccagcctctcaccaggttttttgaactttacactctagtagtaccaaactgttagaagttaccttgaaaccatcctgactccaggccattgattgtgctgatcccctgtctggaacatccctcccactttcttcacgtggttcacgcccagctcaggcatcatcttttttctgaatgtcaaacttctaccttagagctctattacactgaagtgatgtgtggaccctcttatcactgccagtgccactggttggtcggagccaccatcattgtttactggaactatggcaacagcgttcttcctcagcatacacaccaaaggcccttggcgatctgtctctgtcttagcgctctgattcacctcctaccactcttcccctcattctctccactccagcaatcaggaacctacgggaacatgccaggctcattcccatcctctagtctttgcccttgctattccttctgcctagaatactcttcccttctaatatgcacatggctgactccttttattcgggtctctgctccttcaatacctcctctggggatttccctgtacaaccttggctaacgtgactccctatttcataacctttttcattattttagtgtccgaagcatctcatttctttagttgtctccacccacgagcctgtcagctcatcaaagtgggaacttgcacataagtgcactctcaacacatgggttgactgactccagagccagcaccttctcattcctcagagccccaccctcaactactgcggcccctcctccagccccatagcccctcccctttgtctataagctccacccattcatcccatagacccccgcctcgtccctctattttcagtcccacgccccaaggtacgtcgctaacgctctcaggctctcaggccctccctacccctcgccatcatcacttggccctcaagcttcgccgctcaggttatgtccgaaatctcaggtcccgccctccatcctatgacagccaccgcctccccctcccctgggatgcctcggcggctgggccgactcaccgccagcctcaccttgactcggacccgcaccacctctcgctcctcctcctcagcggccgccgccgcctgagctcccacaccgggcgggggcgctccggagccagacaagtccgaggccccggaggctgttgccatcccgccgccgcccgtctcagggtgacggctgaccgttgccccccaccccggcgcacactctactgtactgacgcccgccgccccacctcgtgccggggcgcaggcgcagagggcgccgcgcgaccctaccccccaccgtccctcccacctggccctgcctggaggtcgcctctgcgcctgcgcctagagtgctgttgccaggagccccgcccccaaaagtcgggcattttgctctatttcagctagcgtgcagacgcctactgaggccccgcctcccccagccccgtggtttggttgttttgacagcatacttccggattcacggaggtgttaaactgacgcctcgttcgccaagagaagggggcggggaaaggaagaggctgcgtgatgacgtcaggcccacaccccgcctcaagttgcctcacgcctctgctggcagatgatgtcatctatttcaaataccagtggccctcgcttcaaatgaatccactgaacagaaaaaaatcctttttttttttatttttttaggcagggtctcgctctgtcatccaggttggagtgcaatggcgcgatcacagctcactgtagcctcaaagtgagctatgatcaagcgatcctcctgcctcagcctcccaagagctgggactacaggcgcgtgctaccacgcccagccaatttttgtatatcttgtataaacagggtttagctgtgttgcccaggctagtctcgaactcctgacctcaagtgatccacccgtctcggcctctcaaagtgttgggattacaggtgtgagccacagccctcgggtaaagtgtttttaaaaatatactcagcagggtgcagtggctcacgccttataatctcagcactttgggaggccgaggcgggctgatcgcttgagcccaggagttctagaccagcctgggcaacacagcgagaccccgtctctaacaaaaaattaaacaattagctggacgtggtggcgcacacctgcagtcccagctactcgggaggctgaagcggcaggatggctgagcccaggaagtcaaggctgcagtgagcggtgatcacaccactgccctaacctgcaccacagagcaaggccctgtttcaaaaaaaattaataatttataccctgacttagtaaggtcagataaaacaggaaaatggtttacacattgtgaaaattcatggagattttgtacactgatgatttttgtacttcctgtatgaatgttatacttcattaaataatttgcccccaaaaaacactattatgctctctggagttctagctttttagtttgcctttgtctgaaacttgacgagatcatactttcccaagtttacacatctaggaggcaaatttccaggtaattcaactccaggaaggacactaatgcttctaattgaaacccaggaagaagttaacaatcaagccttcagaaggcagaaagcgagacagacccagggagctcagcagcatatctctaaagctctgccattattgaaccagctcaaaggatccccggtctttgtgtcccttttccaagtttcacattctcagatcttggggaatcactgaatcactggaaaagccctctgtccagcttggtctagagatttctttgaaacctgactaaaatgttggtactgactgccagggaccagttgaaagagaagtggccaggctcaactacgaaccaatcaatggggcccaaatgataccatctataaaagatcagctttttggggtcccagagcagggtggataatggatccggaagagcaaatggggaatgcccagcagagcatgcaaaaggctcagcaatgtgctgagcacatagttagtgatcaaaacaatgaatggaagaagccaagaataaatgaagaaaaattttaaaaaataaactgagtcaggcacagtggctcacacttgtaatcccagcactttgggaggccgaagtgggaagatcgcttgagccggggagtttgagaccagcctgggcaacataggaagaccctgtccctacaaaattaaaaaaaaaaaattagctgggtctgatggtgcgcacctgtgctcctagctattcgggaggctgaggtgggag

SEQ ID NO: 1564201 - DNA, 4001 bp, Homo sapiens
ctcaagcaatccacctgcctcggtctcccaaagtgctggaattacaggcataaaccaccgtgcccggcctgaaatctattttaaatatatcctgaactattctcaatggactcaagtggataatttatgtcactgggtaattatgaacatcgattctaaaattttgatctcgaaaatatctgcatctattaaatggaaagactcttctgcaaaatagcatttgtaatttttaaaaattagaaaatgacaaaatgtcacatttaacagggcaatttttgttgccatattttcgagagggcctttttagaagctggataagattaataggtctagcaaaattttaaaaaatgtcctgtagaacctcagaattctttgcaccccgggagtggcttgaaaacgaaataacagcatacgtttatcaccatcttgacgacatacattgatttggtgctattatctttcgttttatcctctcaactctgtgaggtaggcaccattttccaagagagaaaaagcaaggtcatctcctccatgaattataacttgcctagtttactaggtggttttctttttcctttagaccttcccacccttcttatccagattataagcactgcaaagccaagaaactgaatcttgtgaaccttgtggcacacagtaggtgcttaaggttgagtaaatgaaagagtttgaggaatgtcatccaacaagtaagagagtaggatgggactaaaatgcaggttttcgggactcttccctctttccattacatcacgctgcctggtctaccacttcaaggtcacaataccaaattagagattgattagaaaaagagctcttgctttcccaacgtccaaaactttaaatatccctacccaagatgagtggtctcaaaataactttctctggaaactttaaacatttggccaaaaaacactttttaagaattggggtcagggtgggttagacaggaagagttaaactcttaccgtctggcttacaatcacagctttgaatgaaggggcagcaccagtcactcaagagattaatttattacgacgttgttaatagcctttgagaggggatcccaaagattgaaaacttggagacaaagtaaaagatgctaaattgggagagatcagcaattctgagcctacccctccacctctcctgactccagttctccctcctccctaatatttcttttgaagtctatttctcaggatgtgattgggcgcctccctttctcctcaccatccccgcgtacccactccatcccatcccccatacgcttaatctccccagggtgctgatgatcggtatgggttctgtgaaaaaagttaagttcacaactgcgaactggcccctgtcaccagcctaaatgcgacctgtctaggtctaacactcatcatcagcctccctccccccatgggaagcgacaaggtaggtacccgtttcttccttggcctcagaaagaaccgcgctcctcccttcacctgtcccaaccaaagagcaactcgtcgtccagtgagacattctcaggacttggaggtggtggcggaaaggtggtgtcgggagaagaaccccagtccctccgcccacgatttaggatcgggaaactggtagcgacgagtaactgttgtcctcaccaccttttaagtaacagcgaacacagcccagaggcaggtagggtggccacagcttacctgtgagcccccctccgccttcctccccgtagccccgacgccgctgcagcacgaagtagtcgttggacctttccatcagccacagcttcagcgcatttttcagaagcacttcctcaggcttcagccacatcgcgaactttgtgccccccgggagcagtgacctagatgccctcctcacctcactctcaacccgtctcttcccctctgcttctcctcccaccaaatcttcctcaggcgacagcagctcaggttcaggttttccacacttcccccaaccctcccttctctcccacgtaggcagagagattgccaattccctcccacagcgctaccgccagactgggaaatagtcccgcttctttacctcttgggagttgtagtttcctacgcgcttttctgtgctcaagcgactggaacatgggactacccttcccacaatacactggggtgagaatgggtgggggtgctttcaaagcgggtcccagccatcagttaagtgtgttttgcctatctgaagtttaaagcatttttttggttcaaataagtgagtcccaggtgtaaaggtgttgcttctttttatcattttacagccgaaggcattaaactgtagaaaacaaagtttctggaattttggaatatcggttcattccaggaagtagcagtagcaacaactaacatttaatgagctctcactatagactcaggcgatctcacgtaatcctcacagcagtcttgcgaagtggacattcgtccccgctttgcacattaataaaggaaagcactgtcgggtgaggcgacttatccaaggtcacacagtcagtgatacgattccttctctaaatccaaaattcatgcctagattaagctctttttggttatataggaagaatataaaatttccagaagccacgcgttttcttcactccgtgcaccgctcctttccttcactgtcgcccctatctgtttattaaactgctgtaatgaaccacagaaaatctcttgtccagcttcctattttggaatctaaacaatttatgtgcatttttttttttcttaaactcttaaaaaaatccctttggaagcaaacttgatctctttgtatcttggcaatgatgcgcagcggtttgaacactaaggtgaatgaggtcaataatttgcatgatatcgctgtgaggaaatatttgacagatgtttttatttattgcaataactaagtccaccggaattaaagagtgcattaaaagtgaaaaaaagtttagagggaggaaggagttgggaggccatgtataagcaaagggctcttggcaagctgttttgagaatagagcctcaaagtcatgtggattaaaaaaaaatggggtggggcacacgcagatgccaagccaaggaactctgccctggaggagcatctctggggtaaccttccaagatgtgtgccatctcgagtgaggcaggcgtgtgctccaagcagggatttttcttgtgaatgagaaaaggggcaatctgggattctcttctactaaatggcagtaagtagtcccaaggcagctatctggacagtttggaaagagataatcctttcagagtccagactgcaatgtatctttgggaaaagccatcgcaatttgaatgtgtactaagggaggtaatttcttcttctcttcctggagaaagatcagtaaatgtagcaaacgttgagagatatcttcctttctttttacctttccttcccctttttacttccttccccatcaaaccacatccttttccaatacccttaaaggttacagtgtggcaaaagctatccagaactggatggcttttctacctgtttactctgcaatttcttccaggtatacccacatgctccctgttacaggatcagggccacttttggcttacagcagggcgtttagagagctcctgctttagtaaataaacatttcaccaattatgtaaacatttttttctaattaaattacttatgtgatctaaatttttggctcaataataaacgacttaatttcgcacccttgcaaataaaagtattttcctagaagcaccttaaaaaaatagagcgtgccactctattcaatgtcaatataaattgcttggggaaggactgggattgcacactgtctgcattgctggtacagtactggtgctgtactggtactgtatatgtattatgtcatttaattttcattaataagcttgcacatttttacatgcttactttacgaatgaaggaaaggaggctcagagaagtaacttgcttaagatcgtatagctaaat

SEQ ID NO: 1564202 - DNA, 4001 bp, Homo sapiens
gccccgccgccgccgagtcccggagagagcgcgggcgctggaaagtttcggtggcgaatggcggcctgagggcgctgcggcggcggcggggcgggggcgctggcggctcctcgctcccaagcgcggagtgggggcgctgaggcgggcgcggcggcggcggcggcggcagcgggagagggcgggacagcgggagggactggcacggacagtgacctccacggggagctgccgcgagcgcgcggaccccagccaggaggaccgccaggggtccgcccccgccgccggcccctccctcacggccgtgggaggggacccggcgtaccacccggccccgcccctgcgccccgggggagccgcgtcccgaaccagcccctcccctacgagggtagggactccggccctgcccctcccccgcggctcctagtggggacccgcgtcccaacccagcccctgtcccacggtcgggggaccagcgtccctaccaagcccgccccgctcccccacgcctagggtgggtgaggggaacccgggcctctccctagttgctctggtcccggtcccttccccgtggcctccgtgggactgagaggaccccagggctacccccatcacatcccaaacccagcctttccacgactgcctcgaggggacgggaacctcggccaccccctcagtttctagggggcaggggaacctcgatcactgctaaagtgttaccctcccccaccccaaaaaggaagccacccggctgccccaacagaaccccctgccacctgcccgatggtgaatctccctcaaaatcggcgtcttagaagacaccccagtagtctttaccccagctcaaaaagtgggggttccggcggagcctcgacctttgcaaaacacctcccaagaagagccagaaatgcttagggacaaactcagacacacaggcataggcgccaggaactcgggtgtgggggctgaggaggttggggggacctgggcactcgggcctcatcactcccaccccaaccccccaggcatcagccctctggcccttgcaaagtgctttatgttgcaatggcttacacggcctggccccggtgtacctaagtccccagcgctccttcctcccctccacgtaggctactcccaaccactcgcagccttaattcagttaaacagatctccactccccctccccagcacctctggggtcagcctcgttgaatatttttcaaatattcttgccccttcctttactatataatgagcttcgtgctaagagcccggtacactcagcaatctaaactataacctcacttgctcttcctcgaactctagaccatttgttgttctggttgtagggggagggggacctaaggtgaggtttttgtttttttgtttttgtttttgtttttctgaggagtctcgctctgtcgcccaagctggagtgcagtggcgcgctgtcggctcattgcaacctccaccaccctggttcaagcaattcccctgcctcagcctcccgagtagctgggattacaggcgcatgccaccacgcccagctaattttttttgtatttttagtagagacggggtttcaccatattggccagactggtctgaactcctgacctcaggcaatccgccggcctcggcctcccaaagtgctgggattacaggcgtgagccaccgtgcccggccggaggtgagtttttaagaggccggtcctccaccaaaacggcggacctcaaaattaccctgcaaaatattgctgtaaaacgtcaatgatgcaaaacgactgttgctacaccatcattagaggacatcaataaaaaaatacacacttacacagtctccataattgtgaatcagcagaatagattgtgtcttattatgtatcagttgccattcaaggccccccagaaggacatggtggggccttcccttgagcctgcccttcgttgctcctgggctccctgggcttgtgcagactgatgctgaggtattacatgcaatagaaaaacgaagggtgcaatagaaaacccgaacgagctcatgatgcaaccctgccctggctacacgtgcttcccttcccccaccgcctgctggtgggagtgctgcgttttttccgcctgtagggtcacattgtggttgattgattctcctttcgccttgctcagtcattcagatttggaaagtaaataacaagttgacatcattacagctctgggctttacgcggacgcagccctcggctaccgcacactctggagtagctgcgcagccaaccagcctcctagcttgccagacctgcttgtggttagcagttggaaattccaagctaaacttggttaaaaggcctctttgtgtgttttgattacttggcagatgccagtcttttaaagtatgggaaagtggtggaaatcctcactttcaaactggagcccagtgtggccaggatttacagctgagctcctgtaattgacaatgcaaaagagctgagaattcatcttgactgtttgacaatatccccataatcccaccacccttattacccgtaaagagtcaatatcttttatcatagactcacaggaccccaaaggacactgtaagacctaagacaggaagagagaccgcctacatttatcgtgaaatcaccaaaattcctctttttgaaatactagatggactgtaggtgggtgataattagactgtgttatttaatctgtttcaacgatttttcaaatgtgcagtcctataaggtgggagaaaacaaggaaataaagtagagcggcaaggaggtagtgtattctgagaaagctaaaggataacagggcgaggggtccacagtgatttacacagaaacccactgcactagccatgtgcgtgtgtgcgcgtgtgtgtgttgcaaacacttattttcagttattgactggagggaggggaaaacaagaatctgcttgcaacaaatactaccagcattccccataaacagtacccaaaattttaattaaaaggcagtaggaattcacacaaatatacttaactaatctttcacaaaggagcaaaggcaattcatcctttttaacaagtggtgctggaacaactggacacccatatgccaaaaaaaaaaaaaaaactaggctttttatctttcacaaaaattaacttaaaatagaacatacccccaaatgtaaaaggcaaaactataaaaactcttagaagataacatagaaaatctagatgaccttgggtttggtaatgactgtgtagctagaacaccaaaagcatgatgcgtaaaagaaaaaaaaattggtaagttgggcatcactaaaatttgaaaagtctacaaaagacactgttaagagaatgagaagacaagtcacagaatgggaggaaatatttgcaaattccatatctgattaaggattgtatttgaaatatgcaggccagcatagtggctcacacctgttgaggctgctgtgagctgtgatctcaccactgcactccagcctgggcgacagagaagaccttgtctctaatttttttttagagtgtgtgtgtgtgtgtgtgtgtgtgtgtgtgtgtgcgtgtacagatatatgtacatatgtgtatatgtatgtgtatatatatatacatatttcttaaaactccacgatgagaaaataaacaactgaatcaaagagcaaacgatcagaaaaaaactcatcaaagagatatacagatggcaagtaagcatatgaaaagatgctgaacatcatatatcattagggaattgcaagttaaagtaacaatgagatactactacatacattagaatggctaaaatccagaaaactgacaatcccagatgctgacaggatgcagaacaacagcaactctcatttgttgctaatgggaatgcacaattgtacagctacttcagaagacagttcggcaatttcctacaaagccaaacagagtcttaccatacagtcagccgttgtgcccctaggtatttacctaactaagctg

SEQ ID NO: 1564203 - DNA, 4001 bp, Homo sapiens
gtacagaaccagtggtactgatataattgatgggaaaactccagaaattgaaacattcacttctaagtatgtctacaataaagttatttttgcaaactgtttcctctttaaaaccactgacagagagaagttctctgaggtaaaggggcaaaatgcctgagagttggggagcgagggtggcagcactacaccacaaatctccatatttgccctacaggtgtgtgttctactaagggctggaatcgccttaagggccggtgatccagtgatgaacaacttttgttgtttgcattagttacccagcttggtggctttccacaaaaatgtgcagcacatttgagacaggactaccctttaaaataaacgcgtcatactcaacgttcttctgtattttatttttcctaattacatcttttctaggaaggacttgtaaacttttcataaaatcgtcaagtgccacttccaacaccaaagccactgcctggaaccttagcagggaggttgccttccttccccctcgccttccaggttaaaccagggactgggcgatgtttcaggagaggaaaacatccaaaaggcaggtcaaaccacacatgacaatgcaaagcagaaacagttgcaaatacaatagagggtaggtttttgtttctttttaggttttgctccagaacatcactgactcgagaataaacgtcagtccctacctttgtggaacgtccaacgcagctggctgggggaacacgaggccttgcagggagcgagccccggccccggtctgacggaacacaggcgacgcacgtgaagtccaggccctatcccagcgcaggcgggcctccagcgacccacagttgtcacatatccggccagcgccgactcccgaaggcgcactccccatactccactccgagcaccggtcccatcgttagggaaggtccccctggatagcaaggccggggcccaggatctgcgagacccaccccacccgccccgtcagagcccaggagcagcaacaggtctgcgctctccccgggcggcgctctgcagaccctcgacgggccaagggtgcccccagcccagccgtgcgctcaggccggggagatgggcggaggactggggctcccgacttccttgacagtttctgcgcgtcagaaactgagcagacacggggcccgcgccacctcgcccgccgcttgccccactccgcgaggctgcgcttccacccgggtccgggagggccggcccgcgtcccgggtatgaatggggctcttctccccaacagcggggaaatcccgccaccgccctccaccccggtccccggagcccgcggtggcgcaggtttgcccagcaagcccctgaatcggcagacaaaggggcaccggaggaaaagccgagcgcttccctaaacttaccggccacttccccctccccaaaacaaaggagccccccgccgacctccgtctctccccgcaaggcgcgccggcacttcggggagcggccacctcggggtattgttcaggctcctgggagcgcgccgcaccccagtccgagcgccgcggggacagttggcgacctgcacctacaggagttccaggggcgggtggagcgttcgggcgccccgagccgccggccggaccctggagggtcagcgcgggacccgcctccccgcagaagtttgcggaccccgcgcccggcccgccgagccctgcgcactcacctcgtcgcgagcagcgcaacttgtggcggcgccgcgcgcccggccgcgctccgaacctccctccagccggcagcctccgagtcccggccgtgcggcggccgaagagggcccggcgccccggagcagccgcgcgccgcccccgggccgcccccgccccgccgccgccgagtcccggagagagcgcgggcgctggaaagtttcggtggcgaatggcggcctgagggcgctgcggcggcggcggggcgggggcgctggcggctcctcgctcccaagcgcggagtgggggcgctgaggcgggcgcggcggcggcggcggcggcagcgggagagggcgggacagcgggagggactggcacggacagtgacctccacggggagctgccgcgagcgcgcggaccccagccaggaggaccgccaggggtccgcccccgccgccggcccctccctcacggccgtgggaggggacccggcgtaccacccggccccgcccctgcgccccgggggagccgcgtcccgaaccagcccctcccctacgagggtagggactccggccctgcccctcccccgcggctcctagtggggacccgcgtcccaacccagcccctgtcccacggtcgggggaccagcgtccctaccaagcccgccccgctcccccacgcctagggtgggtgaggggaacccgggcctctccctagttgctctggtcccggtcccttccccgtggcctccgtgggactgagaggaccccagggctacccccatcacatcccaaacccagcctttccacgactgcctcgaggggacgggaacctcggccaccccctcagtttctagggggcaggggaacctcgatcactgctaaagtgttaccctcccccaccccaaaaaggaagccacccggctgccccaacagaaccccctgccacctgcccgatggtgaatctccctcaaaatcggcgtcttagaagacaccccagtagtctttaccccagctcaaaaagtgggggttccggcggagcctcgacctttgcaaaacacctcccaagaagagccagaaatgcttagggacaaactcagacacacaggcataggcgccaggaactcgggtgtgggggctgaggaggttggggggacctgggcactcgggcctcatcactcccaccccaaccccccaggcatcagccctctggcccttgcaaagtgctttatgttgcaatggcttacacggcctggccccggtgtacctaagtccccagcgctccttcctcccctccacgtaggctactcccaaccactcgcagccttaattcagttaaacagatctccactccccctccccagcacctctggggtcagcctcgttgaatatttttcaaatattcttgccccttcctttactatataatgagcttcgtgctaagagcccggtacactcagcaatctaaactataacctcacttgctcttcctcgaactctagaccatttgttgttctggttgtagggggagggggacctaaggtgaggtttttgtttttttgtttttgtttttgtttttctgaggagtctcgctctgtcgcccaagctggagtgcagtggcgcgctgtcggctcattgcaacctccaccaccctggttcaagcaattcccctgcctcagcctcccgagtagctgggattacaggcgcatgccaccacgcccagctaattttttttgtatttttagtagagacggggtttcaccatattggccagactggtctgaactcctgacctcaggcaatccgccggcctcggcctcccaaagtgctgggattacaggcgtgagccaccgtgcccggccggaggtgagtttttaagaggccggtcctccaccaaaacggcggacctcaaaattaccctgcaaaatattgctgtaaaacgtcaatgatgcaaaacgactgttgctacaccatcattagaggacatcaataaaaaaatacacacttacacagtctccataattgtgaatcagcagaatagattgtgtcttattatgtatcagttgccattcaaggccccccagaaggacatggtggggccttcccttgagcctgcccttcgttgctcctgggctccctgggcttgtgcagactgatgctgaggtattacatgcaatagaaaaacgaagggtgcaatagaaaacccgaacgagctcatgatgcaaccctgccctggctacacgtgcttcccttcccccaccgcctgctggtgggagtgctgcgttttttccgcctgtagggtcacattgtg

SEQ ID NO: 1564204 - DNA, 4001 bp, Homo sapiens
tgggattacaggcttgagccaccgcacctggcatcatgctgcctttttaaaaatgaggatgagagtcagagttacctccaaatatgctatatgcatcagcctcaaagaaagtgggctaggatttgaaaaatgactgcaggtgccagtttgatattttaaaataaataattcagacatatagcaaaatatcactggctcagatcacttgaacggagatatgccaagttaattgcatcaatgaattattgaaaaaaaatactgtttatgaggaattattttatcttcctaaaactagaaaaatgcttgctttacaccctcttcccctacacacgctttctcaccaaatgactccactcagttctcagatcagtgagtcatcatctggctctgcctaatttgggcagccatgagcccaacagaagcagatccttctgttaagaaagaaatcatcctgaactccattgggcccaccaaatctcgtgctaatcttttcactatttacttactcctggatatttacaatatattttcctcttcttaacttggcaccctacctcatcattcctaggacatgcgaataaggtactaaaggcttctttccatattctcataattatctgtatttaatcagggcttttcaatacctaacaaccacagatgtactgacactcaaaaatatttggtagtaggctgagggattttccctaagtctatcaaaacaccaaatataggcaaacacctatactgcctgtgcttgaagccaatctatgccttctttcatacactgtcttccttcccagggtccccacattaatattactagagaaaaaactgctccttcatgaagtaaatatttgtagttagtaaaccctgatcaatgctccgaggggcaaaagggaaggttttaataattaagaaataaagacaaattttaaaaaatacaaaagagaaatcacagaaaacaataaggtcttcatggagataagtctgctgaactgaaacaaagcaaccatatcaccaccctacagcaaactccttgacatgccttttatggccaggtgctttctgtagtccccttctctagtttgaaggcatgtgtgtgtgtgtggtatgtgtgcttgtgtgtttgtgttacaatgcggtgtatgagctcaagctctggtaagaaaaatcaggaataagtaaaataaaacaatcttttttggcacactttgatgttccctctctcaccccaatgcccatgctttgggacttcagacctcctcctgaaatcaaatgagtgcaaagaagatcaaataatccttctgcctctgtggatctagagctccttggggaagagcctcggtagaaagtaccactacttagagcccttggctagggccacttttcagtgttagacacctgccactcagctcagtgacttccacgttggcttcagtcctcaccttccaggaggcactcccgtcccttccccttgctccctagctccctaaacaagatctgtgagcactaatgcatagtatcctgggcctgggagccttctggctgcattgctgcctaggagagggactattgctggcttctttgggtattacagcatactcttaacagactggacaagtctagccttcattaattttaaagagcactaatattctacttccagtcccccgagaagtagtgattgcaagatctctgtcacaaaacccccagttaatgaaagatgaaactgacagttatcagttggactttcctaatgttagggacttggttagtgatagttaacaggagaggaagaggctgaggagaatccctgtactgatgtcccactaaaacccataacatggtcagtaaggcagaggtatttacctggaaggcaagaagcagtgtgttgctgtgtcaagaggccaggccagcccagtggttctgaagtcaagtctcagtcagagctcattcactctgcaaatgcctgcagcagctcttctcaagagcccagagaagagtggcctagagccagagcacaagagaacgtggtgttctggccctcagctgtgggagaggcacttgctacttccggggttggactccagcaacttctcccacagaagacctgctgttactcaaggttggccatgaagtcacaatgacagtctgtgatttcagctttcagagcctcaaggctgcaggcaccctgcatcctacctcagcctcccggttgcaaccatacctggctgcatcctgctctgagctacaggctaatgcacttgggaaaaaatgcctttgaagcaggagtggattgactttacaagtctagtcagctcatttccatgcccagcaggagcacttgcagttggaaaacacttttcaatcctcaatcaacaacagcagctcagaagctccactcaaggggttcagctctggagtcatccactaagagacccattcagcctcaggcagtgattcccaggcagtgtagagactctcagtggccaggatccccctctcagtctgcaagcgccacataaacaaaactttacacctcctaaaggaaagatccaacacacacacatatacacacacacacacacacaatttaatgcacagcgaatcccagaaatgtcttggctgacacatttttctgctgcaaaatagaacatgtttgatttttacttgttggtttatttctccagggcagctcagagagaatcgaaaagggcttaaggccctaagtcagaagaatttactagcaataagtgatccataggtacttgaaaaatcaatgctcattttatcctctagtgaagaggctctcatagaagagaagacagattctggattagtgcggtttaattggacgaattctatagcttttaaatttattttctccattgcagagagcaccatacctttcaagtaatgcaggaaaccccagctaccccgcattgggctaccacaccgcagtgccatggataactaggaaggacccaggggatttcccaaataaaacccctgaagcagataatgcctgttataaccctgcctgaaaaaccagaggccaaggaggaccacgcatttcttatcaatactgaatgccaaatagtgacggtgatatttctgatgggtttataaatgcattccggtgttcctgagatttgcagctcacagtcaaccacacaaaaactcaagggattattttttaatttttaaatttattttactatctcatgtgaaagttttaaatgtctgaagaggactacagtctctctaaagtatttttcctggcaaatattttcccttctttcaagaaaagtaaaatagtgattgtattttattttattttagactttcccctttactttatcttgattttcaagttaaaaagtgtcacagtaataagtttcagccatttttgaagataactcagagacaggattttccaagaatccttctacacccactgaaagaagaatgtgtttgtgtcttcgcgctcctgtgtgtttgtttagggagagaaggttgcaaataagaacagcatgtgagcccatccatagaactatgtgcattttgaaacacgacaaatctgtttctgttccttgtttaatgtcgggaaatgtgtttcctgtcgtaattggggctgttcacttttggtgatatttaaaacgggcccaacagagacaagttgatgtttggttaaccacgaaggaaatggcttttgatcaagcaggcaattactaaccaaatctggtaacttcacaagcaaaacaaaggaatttgttaactaagttttcttctacagtaatgcgcaaggcaattatttatgaatgaaagagagttttccgtgccggtgagcaatagacagtgaggagtgagccaccaggactagactctcatcacaaaacatcatttccaaactcagggcaggagtgccctttttatgtcgctgggtgtgtatatgcgggaagaaggctaagtgcaagtggcagcataatcctgaggtggca

SEQ ID NO: 1564205 - DNA, 4001 bp, Homo sapiens
gctgtcaggtttcaggtctgaaggtccaaatccctggccctagcctgggcatagagtaccattctatggggcccattacctatagcgtttggaatccaccggcaccacatcgatggccacatggtactgcttccctggatccaaccctttcaccttgacccgaacagaggggaacatccgcctgtaagaaagaaaataaggactgacccaagagcttttagaaatgtttggaagagggagtgtttctggacaaatgctgactccagtaaaaagtgaagggactcacaatacccttcccttttcaaaatagcaaggaatagcatttgctacatgaggaaagattgttggttgcatacttgaccgaacaagtacggaatttctaagtggagcagaatattattaccacaaggctttgttcatgtccctccccaaccataataaaaagctatagaagagaaagtatgagagaaaaagctgtgtcccaacctccttttcaagggtactttctgtgaggcagatttgtggaaggctgaaattagttagactcacaaaataaccagctgcagtgaagtggctgtcccatgccaaaaggtggctatgggaatggctcacctcaaaataacctgggccaggtctagcgggcgcgaggaactgtgacatgggatactgtccatggttatcttagaggccttaactgagaggtctggccacagtctaagaccaaagtctgatttttgtcttatactacacaggcaggagacggggaagtgagttattggagtcacagtgtacaggaaaggaagaatgagccacttacatggggccaggtaagtccgagccctatcaattgaggggctatggctttctactgtatgtcagggagttggggaaaagggacagaggagtaccagagcataaaactggagagtcctcatcttaccagagcggtaaattaagtgcctaatgtgtgtgacccttgtgaacagcttgggcagaaccgaacctgcccgctttagtaatgatcatctcagtcccgatgtcatggaatcttttccacagttcagatccttgaagctccatttgaatatctttctcttccagactttcagagctgttgccgtagccgctgtcgctgccgcagccagaggaagcagatgttgagggctctgtcttaggttgtttttctgctggacacagaaaggcgctcagggtttgagagagcgtcacagttcacatgcccacttctcgctggtgcctatcttggagcagacagggccttgtcccttccccaggaactttggcgacagattccccaagctccgcataacaccctctgtggccgcttaatggagagagaggggcagtgaaaggtgcgacacccgacacctaccccccgcccacaccagctttttttttttttttttttagatttgccaatcctcactctcctggagacgttgataaccgagactggatgccctcgggatttgggaactcgccctgcttcccatcccaggatacagcagccacccgctggcggtgagagctttccgcgaaggtaggaggaggatgtaggagagactcacttcacaattatgtagggaccctcccctttaccgcaaagaaactgctgtactccgggatggattcggaggcgctgaaacttccccttcaccaggtggtcgaggtgtctcgcggctcctaatgtggctgtctggctgcgtcgggacgcgagccaggcggagagatgcggaaccagtaagctcaggcaacgggctcagggcaatggcagtacttaccaagcggctcgctcttccctgcagcgctgctccttctctcctcctcttcctctccgccctttttctcccgcagctcaggctgctccgcctgtattgggtcttggagttttcttttgctgggtctccccaccaaggcttccacggagaaggcacgcgcccgagagctcagagccatccctggagggggtgaagggattctttgcagcaaagtttcaacctgaactgggttagggagggagggggagacacaggcggagggcacagagggtgaaggaaggagggaaagcgggaaaaacaaaacaaaacaaaacaaaaccccaaacccaaaacccaaatctgaaaaacaatttctggatctgtattcaaagaaaataattgtgtgtgtgtgtgtgtgtgtgtgtgtgtgtgtgtgtgtgtaatttttttatatacatatatattttttgtttgaatagacaaaatgaaaggagaggaagatcaaactagtgtatatgtccttcaaagtctagtctcccttcctcccagtgcacatgtgcagaccattagtcctcaaatccctgattccaggacctggcagagcagagattggcaagtgctggccttttagggagcagacctgccgccaatggcggctcaggttgctcggattgggagttactgttgcatccagtgaatacccagccggtcactgcctccactgtttgttttggaaactattggaagcataaaaaacacagtgagtgacacttcagagtctaacagggaggggggttttggagcttgttgaaaaaaagctatagatagggaagtagagagaggagaaaagggagatacaggttacagctttacattaaattataaaactcaaagacatgcgaaataattgcccacgagggaccactttaagcagatccggagagatgtatcagggtcttttgctctccagtgaaggcactgggaaacagaaaggagtacaagcttttggggccagttggctctgcagttggagtctcaaattaggtgagcagcagttgtgccagtttatccgctctcttctgttagtgaggtgagggcaggcaggagtctcccaatgccactgtcaagcatcagagaaaacttggatcttcaagccctgcctctgctggagcccaatattcctatacatagtctttgttttttctcacagtacttaatcagcaaacacagtctaaaaactccaggtccaccagcagggcaacaaaagggcctttgctcccaagaatgtgcacaactcaaaatgttcggattaagtaattgattccagtgtctcctggaatatattcttgggctggattttacttttccttaaaatgaatatacaagtttctttttttttcaggaagagacttgtctacaacatccaaagagcatgtttacgtatgcagatatgagatgtctgcctgtgtgcatatgatttggtctcctacttttcatcagaaataagaaatcaagtgcccctggattcttttgcaggttgcatcttaactaatagcatttgcatttttccagaaaaattatattattctcctctgacacatttgtaaaaagggcatttaaagctgatccaagttcatttaaaataagatgcaacttgaaataacttataatatgccaatactggaatctgagagtaaaagacctgtgtgtccttttaatttcagctacttaggtacaaatgtgccctgccactgtgatggcagtggtagtggtggtggtagggggatattcagccatagggaggagatcttcaggcaactgggtatgactttaaacactctaaaaatctcagtatggcaaagagttacttacagcttgaatgctgctgaagggtttggctcaatcattatttagccactgctcaccatgcagaattgagaaagacactgtccctatcctagacaggcaaagtgaacctcacaggtaaggccaatttcgtgtaaggaacttgggctggaaaacagccacatctgcatgtgatctgagcattcgtttcttttcgcacccattaaagtggggggagagtgtttgttcatttcctcttactcagaagatctatctatctatctgtctatctatctatatgtatcatctatctatctatctatctatctatctaatctatctctatctatctatattttatttattgcatgctcttagcta

SEQ ID NO: 1564206 - DNA, 4001 bp, Homo sapiens
ataggattcactttttttaaagttctgacaagtatttattaagtgccacattgtcgttataagctgattgacagttttcttcaaaattgtgtgattttttcattatatatttttgcaacacaagtaaaacgtttgtcctgaaaaaatgagaaattcagataaaacaaaaatttaaaaaatcacctattatcttaccacacaaccactgttatgcctttgaagtctatacttttagctttttctttgcatattaatatataaatatacattttttttacaaaaatgggatacaatatataccatttgaaaattgcttttttcgtttcacaatatataatgtacatctttcatgcaaatgtgtagggctcatgactgaaagagggaaacttgtagattttagggggaaacctcaactttaagcgagttacatgctaaacatctaaaataaagcctcacaaaaagttaaaattcagaatatgggaaaaggcattaagaaaatgcaaacagaaagtccaggtggcaatggcaatactattagcaggcaaaacagaattaaaggccgaacacattaaataggataaggacggctccgttttgccttccagtgcattatcatcagtttgtttcttactcttttcatctcttctagctcatctgctgcctgtatcatctcctcattgcttaaatttctgccatgtatgtcccctctaaattgcgggcgagaacgagccaacctttctttaaagcttccttcttcaagcttatgttttcctactccacaaggaggctgctccatgggagggcgcccctcaaacaggtccttcctggaaagaccctcctgcggagggcgctcctccgagaggagcatctcaggcaggagctcaggcaagagctcctcaggaaagaactcctcctccgaggactgctcctccgaagactgctcctcgggggactgcttttcgggagagtgctccaccggaggcctctcctcatcggtcttgggcgcgctctgcggctcttcttcattttctttgcgtggtttgtccatgttgggaattttcttcttcaagcacagttattcttaggagacaagaaaggcagaatagagtcagaatactaagcggctggactaacacccaggccgtgggttccaatacctgccttttcctgattcgggggccaggtcctcaaccttgcgctttcccagaggctctccggctctcccgactccgccgcttcccggtcgccccctccttcccgaaagcccaccattttcccagcaggctttgctacaggcctcgcccgcagtgacaggggcgggacagtgcggcctgcagactccatgcctttcggcgtccaccctcgcgccccagtcccggcccactgcgtaccccttccctgacctggacctttccgggccgtgtgctcctagtcgtcctctcctcgaggtgccccgctgtgaccagcagacctgcacacagacgcaagacagggtagggggcggggagtggggaggagggacggactgactgacaccccccaccccccactttctgggcaccagccactgcctgcacgctcccctagctctcgggttctcttttcgtctcagcccctgcgtcaagcttcgtcctccgtgctcccacctccccaccccgcaaagcttgccatttcttttcagatgagaagtggaagcgaagcatttttagaaactatttccaaatgtctgtacccccctcccgggggacgggggaggtactcgcctccccaccccgccccaaagaccaccatattttgcacagaaatgtgggcgcggggggcggggctggagcttagggaaaggcctggactccgccatcccgattctgtcaaccccattccccgggttactaggcagcgccgacactcacaccgatttaagagggtagagggaacttacttcttctgctttccctctcgaccaaagggtaatagggagatggtggacaggcaaaaaaaagaccgggacgagagggacttgggcacatagaggctcctggtcacgtgagggacgcgcgtcactgccgaactcagatccccagttaccactttgatctgcggccctgccgcagccacctgctagtgcctgctagtgttctctgacccgagacacaccaggcattgtcactcacctctctttgtatttgccttttcctggttgccagagacggtccgcatctagtctcgggtagtattgcctcttcctctgtgctacttcccctagtaccacctctttctcccctcctcccttccttagccaccaaggccccttatttcccctgcagttcagatcctgcactgacgtttgactgttcaccttcataaatcagtattatatccttatatcccaacactctcagttttaatccacatccgtatctccatcatgtccatttaggctcattcagcatgtttcatctcttgtcactttcatgggagacaatctttcactttttcttgacatcacattttgtttttttgagcccccagatctaaattggtaatcattcagttcgagacctgtagaaagagttgagtttgtaaagtttgtagatctaaaaagaatgaatactttgattttcataaatcaaatacgtatttgtccatctaagtacaaacagtccagaacacttattatctgaaatgggatagtccttggtggagagcttggcattattctctctatgtgtgtatatatatacacacatatatatgcgtgtatatatatacacgcatatatatgcatgtatacacactgaatagattataaaatatatttatatacatgtgtacatatatataaattattcagtagttattcataatagaataaatagattttactgggactctcaatccttaaccagccacctcttggtgcttctggttgaggaagtttatattaattcactaaatcaacaaatatttgagttctgggactgctggaccccaaaagatagatgcagcagggagggcattccatattaaactatgcaataattctgttgaccacatactgaatagcaggactacaattatgctagcattttcaattgtcattgcaatatgtatttttttttatctaacagtattttatgatctttaaccttatgcctgcctctcatctactcacatcagcctggatgctactttcttatgcagatgctctttcccctacagagcatactacttcccttccctctgtgttttacactttcagggtagatgaccatctgatctgtgaggatcctgggattttgttttaaagccaggctgtttagtaagtttctgaacagaaattcatgtgaaatttccccttttaagaactgtttgttgcttttctctgatatctgattaactttgtgttgagatagcatttagacaaatattagtttaccttcatatcttttttataactgttttactttccaatttctctgtgagatgtgtctttaaaaccaagtttcactatgccttcttattttttcatcaagggttggtttctcatttgtatagtttctttcctagagaagtcccatttcattcatttctatccttattcttcttaaatcctgtgatggagaactcactgccttataagatatctcactgaaatctcagaaagttctaatcattcagagttttaaaattaattaattaattgatttttgcttctgttgagttaaaatctgcctcccagtagtttacacacattggtcctggctctgccctgtggagtggtacagaacaggtataaaataataaaagtacctttcatccttgacagcttaaaattgccacagcttctattctggttctttccccttccattctgtgagacacactaggcaatctactcaatcttctgtgactcagcttcctcatctacaacattggagacaataatagtacctacctcatagaattgtaagaggaataactgagtcaatgagtcaacctat

SEQ ID NO: 1564207 - DNA, 4001 bp, Homo sapiens
tgcatattaatatataaatatacattttttttacaaaaatgggatacaatatataccatttgaaaattgcttttttcgtttcacaatatataatgtacatctttcatgcaaatgtgtagggctcatgactgaaagagggaaacttgtagattttagggggaaacctcaactttaagcgagttacatgctaaacatctaaaataaagcctcacaaaaagttaaaattcagaatatgggaaaaggcattaagaaaatgcaaacagaaagtccaggtggcaatggcaatactattagcaggcaaaacagaattaaaggccgaacacattaaataggataaggacggctccgttttgccttccagtgcattatcatcagtttgtttcttactcttttcatctcttctagctcatctgctgcctgtatcatctcctcattgcttaaatttctgccatgtatgtcccctctaaattgcgggcgagaacgagccaacctttctttaaagcttccttcttcaagcttatgttttcctactccacaaggaggctgctccatgggagggcgcccctcaaacaggtccttcctggaaagaccctcctgcggagggcgctcctccgagaggagcatctcaggcaggagctcaggcaagagctcctcaggaaagaactcctcctccgaggactgctcctccgaagactgctcctcgggggactgcttttcgggagagtgctccaccggaggcctctcctcatcggtcttgggcgcgctctgcggctcttcttcattttctttgcgtggtttgtccatgttgggaattttcttcttcaagcacagttattcttaggagacaagaaaggcagaatagagtcagaatactaagcggctggactaacacccaggccgtgggttccaatacctgccttttcctgattcgggggccaggtcctcaaccttgcgctttcccagaggctctccggctctcccgactccgccgcttcccggtcgccccctccttcccgaaagcccaccattttcccagcaggctttgctacaggcctcgcccgcagtgacaggggcgggacagtgcggcctgcagactccatgcctttcggcgtccaccctcgcgccccagtcccggcccactgcgtaccccttccctgacctggacctttccgggccgtgtgctcctagtcgtcctctcctcgaggtgccccgctgtgaccagcagacctgcacacagacgcaagacagggtagggggcggggagtggggaggagggacggactgactgacaccccccaccccccactttctgggcaccagccactgcctgcacgctcccctagctctcgggttctcttttcgtctcagcccctgcgtcaagcttcgtcctccgtgctcccacctccccaccccgcaaagcttgccatttcttttcagatgagaagtggaagcgaagcatttttagaaactatttccaaatgtctgtacccccctcccgggggacgggggaggtactcgcctccccaccccgccccaaagaccaccatattttgcacagaaatgtgggcgcggggggcggggctggagcttagggaaaggcctggactccgccatcccgattctgtcaaccccattccccgggttactaggcagcgccgacactcacaccgatttaagagggtagagggaacttacttcttctgctttccctctcgaccaaagggtaatagggagatggtggacaggcaaaaaaaagaccgggacgagagggacttgggcacatagaggctcctggtcacgtgagggacgcgcgtcactgccgaactcagatccccagttaccactttgatctgcggccctgccgcagccacctgctagtgcctgctagtgttctctgacccgagacacaccaggcattgtcactcacctctctttgtatttgccttttcctggttgccagagacggtccgcatctagtctcgggtagtattgcctcttcctctgtgctacttcccctagtaccacctctttctcccctcctcccttccttagccaccaaggccccttatttcccctgcagttcagatcctgcactgacgtttgactgttcaccttcataaatcagtattatatccttatatcccaacactctcagttttaatccacatccgtatctccatcatgtccatttaggctcattcagcatgtttcatctcttgtcactttcatgggagacaatctttcactttttcttgacatcacattttgtttttttgagcccccagatctaaattggtaatcattcagttcgagacctgtagaaagagttgagtttgtaaagtttgtagatctaaaaagaatgaatactttgattttcataaatcaaatacgtatttgtccatctaagtacaaacagtccagaacacttattatctgaaatgggatagtccttggtggagagcttggcattattctctctatgtgtgtatatatatacacacatatatatgcgtgtatatatatacacgcatatatatgcatgtatacacactgaatagattataaaatatatttatatacatgtgtacatatatataaattattcagtagttattcataatagaataaatagattttactgggactctcaatccttaaccagccacctcttggtgcttctggttgaggaagtttatattaattcactaaatcaacaaatatttgagttctgggactgctggaccccaaaagatagatgcagcagggagggcattccatattaaactatgcaataattctgttgaccacatactgaatagcaggactacaattatgctagcattttcaattgtcattgcaatatgtatttttttttatctaacagtattttatgatctttaaccttatgcctgcctctcatctactcacatcagcctggatgctactttcttatgcagatgctctttcccctacagagcatactacttcccttccctctgtgttttacactttcagggtagatgaccatctgatctgtgaggatcctgggattttgttttaaagccaggctgtttagtaagtttctgaacagaaattcatgtgaaatttccccttttaagaactgtttgttgcttttctctgatatctgattaactttgtgttgagatagcatttagacaaatattagtttaccttcatatcttttttataactgttttactttccaatttctctgtgagatgtgtctttaaaaccaagtttcactatgccttcttattttttcatcaagggttggtttctcatttgtatagtttctttcctagagaagtcccatttcattcatttctatccttattcttcttaaatcctgtgatggagaactcactgccttataagatatctcactgaaatctcagaaagttctaatcattcagagttttaaaattaattaattaattgatttttgcttctgttgagttaaaatctgcctcccagtagtttacacacattggtcctggctctgccctgtggagtggtacagaacaggtataaaataataaaagtacctttcatccttgacagcttaaaattgccacagcttctattctggttctttccccttccattctgtgagacacactaggcaatctactcaatcttctgtgactcagcttcctcatctacaacattggagacaataatagtacctacctcatagaattgtaagaggaataactgagtcaatgagtcaacctatgtaaaggatctggaatagagcctagcacatagaaagcactctataagcattaactataataatagtaataataatagtatgacacagtgctaacaatactactaattaacatccttttaatattaagattaattgtgtactttatgccaggcattgcactaagtattttcaatatgccatctcacataatccttaaagaattatgttctcaccaagacttttttggggggtttaacctccccag

SEQ ID NO: 1564208 - DNA, 4001 bp, Homo sapiens
tccacgaatcatgacgtctctgcaatgcacatgtgtgaaaatctgctactgaaacatagagcaagcaaacactggcaggtgggtcaaaacgctactggtagcaggaggaacgactaaagcaaagtattaccataaggttaaaacatatggcctgacaaatgcctgccagggacactacacataaggaatgtcttcagtgtcccttcgtggggccctgcagccacccctgaattcccttggacccctaggatagaaggggtcctgtaaatttctttgcatccacaaaaacgcccccaatttctgtttgctttttctccttttatcctccaccctagccatgttgtcaaattctcttatcatgtcctcattgctgaaattcatatcatgtatggcttccttatattgcttgaggtactgagccagccccttgttggtttttcttttggctttcctgggtatatcatcctcagctgggcgctttcctgcagcccttgtttcactttctggctctccctcactctctggctctctttcactgtctggctctccttcaccctctgcccttccccctctctctggctttccctctgtctttgatcctccctgcatctctgactttcccttcctctctgactttccttctccttttgcctttcccgcactctctggcttttctttatcctttaacggttcctcaactctcttgcccgtgttttctgtgtttccctcgttttctaacttcttgtcttccagaatacaagctacttctggctttccctcgtgcggtggctgttcttcattgtctatctttccttgattcgaaggcattccttcattttcattgaagagtttttccatgtcgagatttcccctccttttcctttcctgggggatgggtgtggagggaagaggagacaaagaggagacatgggagactgagggcatggggtggaatgcaggtctggatactacttgcatctcacccctggtgagggttcccctaagctgactgggcctccaagagggccttctgcccaccacgtagcccaccactcctcccacacacgtgagccagctgttccctggcaggccctgccaccttctctgcactggttcagcctggtaaggtgtgtgttcatgtaggtaaggggatgggcaggggccccaattcggccctgactgtgccctccacactctcaacccttgtgggcccctgtccatgcagccccctgctttcacggacctgcggggattctggacaggttgctcttccttttcaggcctctcagagcgctgggaacaacagacgcgcagacctgcggacagacaggagacaggggcaggggctgcgcgcttagcgggctcacagggactcggttccctttcctgagtccaggccctgcttacccaccgttttcctcccctacctcccccgcaccccagccgccatttctttccaggcctcgggcaccaaaccaggatgctttccaaactgcgtttgtctctgtgtcccccttccccggaggcaacctgccccagcgccacctcatttttgcggagatcaagtgtttccatgggtgtagattgtgagaaggggttatttccagaatatgtctacgtttcactgtcgcactgcggggtcgctacccccaccccccatttccagcactaaaatggatggaggactcagtgcaagggggcgtcgagaaggcgagccaggcttgcttcgggggttctccctccactgcccccgcccccgcgactccgcatccccctcctccccaatctaccggatcccttctccgccccctccccaatcctactgccagccccctccacccctgtcccagggtccgccggcagcgcacgccttcacactgacctgcggggacccaggacaggcctgtgcctcctgcggctcgctgaagcccgctcgctgctcccccgccgcctgggcagctcagacagctgattctgcgcgggcgcccggacccgaccgctgggcgggctggcgggcgggcgcgggggctggtgcccacgtaggcgccgggcgggtcacgtgagcaccgcgtcaccggagctctgcccccgctcttgcctgacacacctcaccttggagctgggcccccctctctttcctgacatacctcaccttccatccctgagggaccggaggctggggacggtcggagtctcggtgcgtttgtgtagcaaagtggggtcgcggagaagaggaggagaggtggctttctgaccctaggtgctttacctgacgcagctcacagcatcctcgcaaggcatatctctctgatgcccattatcgccaggtgtgacagctgatcatagaggtaccggactttgccaagagcgctcagccccagaactccacagcccactttcaataccggctctgcctgactccagagcccggggggtagtggtgcctgccaggaagctgagctgccaccttgagtggcggtgttcctggggttctgtcctgggcctcctctctcctcagtcctcaagttgtctctccctgtgtgatctcattcatttccagtaaacaccgatgactcccagatctacagctccaggctgttcccttctccgtgtctcatatcagctttgccaactgtctattggacatcaccgcctgagtgtccctgagggaccccaaagcccgtgtaccccaaattgatttaccaacttccttcttgccatctcccttggtctctctccacacttgaaacttaccttccaacatttgatcagttttcatagagagagaatgtcagacaggtagaaaagaaagcattaaaacattttaaatatgaatttcagatgcacaaattcatcatagtccttggtttacaacacacccttatcatcgatccctgcttgtccctcttccttcccttttctttcccgtcctattatttcctccccttcccatcctttgtcttttttttctttccttttctttcacattcgtgaagccaccacccacaaaaactaagaatcaccaatattttagcttctacagtatagtgacatgtatatgtatatatacacatgtttatttatacacacatatatgtatagatgtatatgtgtgtacatatgtatgtgtatgtcttgtgtatatctgggcaacaactatttttattttgatttgcaaaataccttatcatgattacaggattatgaattatgtgtgttacacaagcaattctgattatatttctgctacacatctttcttcatttagtaaaaccttgatcttcctacagtattttgctctatcaatatgtgtattcgtcattatcaccacatcaccaataattctgtcctcaatgttgaatttttttcctgaattatcgaggctaggtgtttcaatttcatcagtataaacttccataaaattattataattattcaagaatttgatgaaaataatatcaaatcagttgaaaagaactgattttctgttttaatcatctaattatagtgattttaagctgtcttcagtaactatttgctaagttattttgctaatggagccaaagtattaacaactatttctcctcttttaaaacatatacacaaaaatgtgggattcaaaattagtatcattaaatttgaagaaatgtcattttatctaaattaaaagatctgttcacaaaatgagaagtcaacacaacttttgcatttgcatgtaataaattgacacattgttcctcaagtaattactacctttggaagaagatataatgacagttctcttgatgcatagtatatgttgattaaacatattttaagttaaatgtttgtcatccactttcttagaaaagtaacattactgaacataccattcactagagaccttttgtttcttattgcagaataaaagtatcattcccatcagtaaaataaatatagacatatattaacactataaaatcactaagtgataccaacacctggcagagacacacacacaa

SEQ ID NO: 1564209 - DNA, 4001 bp, Homo sapiens
taattttaattttatttttttacaatgtaccatgaacatcttttccatgcacatgggtgaaaatcctctactaaaatatagagcgccgtagttgggtcaaaaggctgctggtaacgagactgacatctaaagcaaagtatcagcttaaggttaaagcattgggcctggcaaatacctaccagggaaagcagggccagcaatattctcatcagagaaatcagaatggaaggccaaaggcattaaaggtatgggatatcgtgtaagcccctctggcccctacctccacccctcactcccctgacaccccgttgtccccttggggcgaatggatcctgtacatctctttgcatccaatgaaaaccacccattttctgttttttccttagctcctcttgagcccttgacacatctccacattctctcatcatctcctcactgctcagatgcctttcctgtaagtcctcctgagagtccttgggggaatcgtccgtccccctgtccgtttttctttttgctttccggggcacataatcttcagccgggcgcttttcggcggcccgcggctggctctctggctttgcctgggaggctggcttgccctcgccttgtggcttgccctcaccttcggacctgccctgcttttcctggcttccctcatcttccagttgtccctcatcacctggctctccctcatcctctctctttccctcgcattctgtcttcccctccacgtctggcttttcttcctcgtctgactttccttcatcatcaggctctacttcatcttctggctttccctcgttttccaggtttccttcatttttattgtagggtttttccatgtcgagatttcccctccttttcctgtcctgggggatgggaatggagggaagaggagacaaataagagacatgggagactgagggcatggggtggaatgcaggtctggatagtacttgcatctcacccctggtgagggttcccctaagctggcagggcccccaagagggccttctgcccaccacgtagcctgccactcctcccacacacgtgagccagccattccctggcagtccctgccaccttctctgcactggttcagcctggtaaggtgtgtgttcatgtgagtgggggatgggcaggggccccagttcggccctggccgggccctccacactctcaacccttatagggccctgtccattgagctcccccacaaccaccttcacagacctgcagggattctggacaggttgctcctcctttttaggcctcgcagagcgctgggaacagacgcgcagacctgcggacagacaggagacaggggtaggggctgcgcagtcagcggtctcacagggactcggttccctttcctgagtccaggccctgcttacccaacgttttcctcccctacatcccccgcaccccagccgccatttctttccaggcctcgggcaccaaaccaggatgctttccaaactgcgtttgtctctgtgtccccttcccctggaggcaacctgtcccagcgccaccccgtttttgcggaggtcagatgtttccatgggagcagattgtgagaggcggttatttccagaatatgtctacgtttcactgttgcactgcggggttgcccccccgtactccatttccagtactaaaatggatggacggctcagtgcagggggtcgtcgagaaggcgggccaggctcccccgcccttgcctccgaccgctccgcttccccctcctcaccagtctcccggatcctttctccgcccctccctactcctactgccagccacctccaccccttccgtggttccgccggcagcgcccaccttcacactgacctgccgggacccgggacaggcctgtgccttctccggctcgcggaagcccgctcgctgctcccccgctgcccgggcagctcagacagctggttctgcgcgggcgccaggaccggaccgcagggcgggcgggcgggcgcgggggctggtgcccacgtaggcgcccggcgggtcacgtgagcgccgcgtcacccgagctcggccccccttgcctgacccacctcaccatccaaccccgaaggaccgggaggctggggacggtcggggtcggggtgtgtttgtgtagcaaaggggggtcacggagaagaggaggagggggtggctttctgaccccaggtgctttacctggcgcatctcacggcatcctcgcagggtatctctctctgatgccattatcgccaggtgtgacagctgatcaaagagggtacccgactttgccaagagcgctcagccccagaactccagagcccgctttcaagactgtctctgcctgactccagagcccagggtggtgctgcctgccaggaagctgagctgccaccttgagtggcagtgttcctagggttctgtcctgggcctcctctctcctcagtcctcaagttctgtctccctgtttgatctcattcatttccagtaaagaccaatgacttccagatttacatctccaggctattccctccccagaatctcagacctatttttgcattcccatcagaaatataggggagtgttttgtttcccaatgcccttcccaacataacctatgacatacttttaaatgttcactgatatgatagttgagaagtaatatctcaatggcattttattttgccttatctgtgtttaaggacaatttaaatatctttctttgtgaattgtcggttcatgtcttttccacatttttctagtgggttgttggtccttctcacctcaattttcaagttttcttaatacattaactgttatatatgttgcaattttctctccagtttgtcagttgctttttggctttgtttatggtgtttttctgccatgcattaaaaaaagtagtcaaatttatttaacttttattgcctctagatttcgattcatagttaagaaatcttttcctacataaggtccaagaagcattcacccatgttttcttctagtattcatatggttttctttacatttagagtttatatttgtgtatggcataaagtattgatggatcttttgttttctttttccaatcggtttctcagttgttctggcatcagaaagtccatctttgctttagggatttgagataccacctttattacatatcaaatatccatatgtacttggaaaaccttctgggctttttattctatttcattggtctgtttgctatccatataccagttgaattatagaggatatataatttcatatatctggtagagctaggtcccctcagtagattctcttttttccaacacattcttgtatgtttgtttttctacatgaacttcagcataaatttgattcagatccgttttaattaacgattagatatatccacctgaatgtccctgaaggacctcaaatgcaatatgtcccaagtgattttaccatccttccttgatcttttccacacacaaaactccctcctcttcatttctcttatcttaatagatggctccagaacccacactgttgcccaagcaagaaatctgggaatcatccctcattccctcttcctccctcccaccaagtaatcttgaccttctcttctaaatatctggattttcccacttttcttccatctccactcttgctacatttttttaggcaaacaactccccactcctggtctatggtggaagatccctttctggttttgctacctcaagtcttgctctccttaatatatatcatattgtcccactgcctttttctgtttcatcttcattacagtacttgaagtaggtaggtcactaattacctcttatatagaaaccactccacaggccaggttaaaaagggccttggtctttagcctgattattttcagatcaacttttagcagttattgaagatctaaagtaaattctgaattttgaaataattgaaaagaaatgtgcctgttggataattagacagttaggatgccagattcctggatggga

SEQ ID NO: 1564210 - DNA, 4001 bp, Homo sapiens
ttttacaatgcaccatcaacattttttccatgtaacagatgaacatttcctactgagaacactgcattgcagataggtcaaaaggctgctagcaacaggagggatgcctaaagtaaagtattaccgtaacgttaaagcacatggcctggtaaatgcctgccagggacactacacataaggaatgtcttcaatgtcccttcgtggggccctgcagccacccctgaattcccttggacctctagggtagaaggggtcctgtaaatttctttgcatccacaaaaacgcccccaatttctgtttgctttttctcttctcatcctgcaccttagccatattgtcaaattctcttatcatgtcctcattgctgaaattcatatcatgtatggcctctttatactccttgaggtaatgagccagccccttattagtttttcttttggctttcctgggtacatcatcctcagctgggcgctttcctgcagcccttgtttcactccctggctctccttcactctctggctttccctctatctctggttttccctctctctctgatcctccctccatctctgactctccctccctctctgactttccttcttttgcctctccctcactctctggctttcctttatcctttaacatttcctcatctcctgttttgcccttgttttctgtctttccctcgttttctaacttcttgtcttccagagtacaagttacttctggctttctctcgtcttgtggctgttcttcattttccatctttccttggtttgaagccattccttcattttcactgtagagtttttccatgtcgagatttcccctccttttcctgtcctgggggatgggggtggaggaaagaggagacaaagaggagacatgggagactgagtgcatggggtggaatgcaggtctggatagtacttgcatctcacccctgatgagggttcccctaagctggccaggcctccaagagggccttctgcccaccacgtagcccgccactcctcccacacacgtgagccagccattgcctgacaggctctgccactttctctgcactggttcagcctggtaaggtgtgtgttcatgtgggtgggggaatgggaaaggccccaattcggccctggccgggccctccacactctcaacccttgtgggcccctgtccatgcagccccgtactttcacggacctgcggggattctggacaggttgctcctccttttcaggcttcgcagagcgctgggaacaacagacgcgcagacctgcagacagacaggagacaggggcagggtctgcgcgctcagcgggctcacacggacgcggttccctttcctgagtccaggcccttctcatccaacgttttcctcccctacctccgccgcaccccagccgccatttctttccaggcctcgggcaccaaatcaggatgctttccaaactaattttgggtctctgtgcccttcttcctcagaggcaactctcctccccagcctcgcggtcaacgtttttctctacgcacgggaacggcagatggggtttacttccactgtctcactactggggcggccccagcccaccatctccggctccaaaatggacggagggcagagaagaggatgtgcctggaaagcgagcatggatacttgggggtgctcgccttcctcaccctctgcccactgcctacgtgctccccctcagccacccctagccgttttcccaccgccatctctgtccacactcgggccagcttccctcgactcgacccgaccccacccccagcctttccccctgccgtacccgttccccttccgccattccagtgttccgctggcagcgtggaaggcccgcacactgacctggaagaagctggaccaagaattaggagcccaggaaccggagcagacgagacccagccgcggggacagagggcaggcactcggaccggtgcctacatctgcgcccgtgcagatcacgtgaatgccgcagcccaggagttccaccgccccacgccccgcctcctagccagccgcttccagccacccaccacctctccagcaggtaccctcttacctccctgggcccttttgtcctttttttcttgttaagaaattaatcaaagaaagaatcttaatgaaaatcacagttttttttttaatgagttgggcggtccagaagaggagtcttgataatgttgctcttaaattccactgaaataacgtagacccacccgataaaatcgtatgaatgtgaacttaagtactgtataaagaatagaatattgccctttagaaaaaacttaagaaaaattttccaaaataaatgaaattgtccctttttcctgacatgtacaaacataaattttcaaatgaataaaaaataaagttatatttgaagcaaaataaaacaacgattaatttatcttaagtgagaaactgaatatacaatgaccagaccacatacgaaaatagaactgtgacccacaacctttgctgcaagcagctcaaaaagccaaagtatagcatctgcagaaatgttcaggactttaatcaatttgctagcctttctggcctttttaatttttttgacctgatgacaaacaagaaaaacccaaatatgaacccatattcaatcacataggatgcttgcctctagttggcctgcctctagcttcctcacgtcaacaacatccaatcagagcgtagctgaagtctttgtgtttttgttttccactataaagctttcccactcccctgcctgtctttgaatctctgccagactcaaatgatggtggcttgacttccttgctataaaaaagctgtgaataagtagcacttgtttgttctcttatgggtagactccgtttatctccacataagcttttggtgtggaaggcctttatagtcacgtgccacttaataacggggatatgttctgagaaatgcatcaggcaatttcgtggtggtgcgaacatcgtagagtgtagttatacaaatctatatggtatagcctactacactcctaggctacatactatagcctatcgtattctatgctgtccgttgtcgttgaccaatcgatacgcagtgtgactgtacaacaaagagacaaatgctgatagattagattacatgaaaatttttaacagatttgttgaaggactggggacacatgcactctcccctgctcttattgaatatgttggtgaaatttttctgaagatcaactttgtaaattatttaaaaataaaaatatcggccaggcacggtggctcacacctgtaatcccagcgctttgggaagctgaggcgggtggatcacctgaggtcaggagttcaagaccagcctgaccaggatggtgaaaccccatctctactaaaaataccaaaactagctgggcgtggtggtgggcgcctgtaatcccagctactcggtaggctgaggcaggagaattgcttgaacccgagaggcagaggttgcagtgagccgagatcacgccattgcactccagtctgggcgacagagtgagacttcgtctcaaaaaaaaaaattaatatttgatcttttgtgccagtaatttcacttctaatagttacccacaatgataattttctttcttcaacttttattttaagctcaggggcacatgtgcaggatgtgaaggtttgttatgtagataaacatgtgccatggtggtttgctgtatagatcatctcatcacccaggtattaagcctggcagccaccagctattcttccttatgctctccctccctgcccccagcaggcccctgtgtgtgttgttccctgacatgtgtccatgtgttctcatcattcagctcccagtgagaacacatggtgtttggttttctgttcctgcattagtttgctgagaataatggcttctagctccatccatgtgcctgcaaaagacatgatctcattcctttttatggctgcatagtattccatggtgtatatgtaccacattttct

SEQ ID NO: 1564211 - DNA, 4001 bp, Homo sapiens
atataaaatatggtatgtctgtacaatggaatattatttggcaaaaaaatggaacaaagtgctgatacatgctaaaacatgaatgaaccttgaaaaccttgtgccaagtgaaataatccagtcacaaattattacatattgtattagtccattaatatgcaacatttagaattggtatatccatagagacagaaggtaaattagtagtagcatagggctaggggtgggaaattgaagggaaaatgttagtgactgctaatgggcatgagatttctttttgaggtgatgaaaatgttctaaggttgattgtgatgatggttgcacaactctgtgagtatattaaaaaaccattggattatgcaccctaaataggcgaattatatggcatgagaattatatctcaataaagctgtgataaaaatctgtcataatattgattatttcaaagtattatatatgcagattttcactataatggattgaattaaagtcacataatttttctctattatgcatgttttaatatttatatgttagtacatttccttgattattttatttggatttattctaagaacttgaattaatggatcaaaagttatgagaattttaagatttattgatatatgtagctaaatgtttactatgttgttaattataaaaactacagaaaatcaaacatacatataatgtagagggtggggttgtatgctatattttactaaatttttctatgcttatttcatatacaatttgtatatttaatgaaattgtactgtatatactgttctgctacttgattctttcacttaaaactatatcttcagaacattcccatgtcagtctacataggactaccttatacattttaatggttgcataatattctactctttagagttaccaaagtttatttaatcaattctccattgattagcattagaaatgttccatacttttactattaacaacattgatctattgaatatctatatgcatattgcatccatttatttacctggggaagagatttaatttccgaagttgttatgtcccgctccacatatgatatgtgacctttccattcttcgcattgacagatgtggactttgtctcttccttttgaatttgggaggccctgcgactattttgatcagtataatacagtgtaaatcactttgtgtgacttttgaggttaggtcaaaacaccccacaaagatctgcctggcatttttggaatattcactcttggagaagcagctgccatgtaacaattcttcctaccctgaaaccaccatgctgaaaaggccatatatttgctctttgattgacagctccagctgtgttgtaatccaaaagccagcaataactgccatccctcttagtgagccctcttggatttccatcctagtccaacttaaagatgattgctgtcctagatgacatattttattgactgattgattgattgagacagtctcgctctgtcacccaggctggagtgcagtggtgcaatatcagctcactgcaacctccacctcctgggttcaaacgattctcctgcttcagcctcctgagtagctgggattataggggcatgccaccacaccaggctaatttttatatttttagcagagacggggtttcaccatgttggccaggctggcctcaaactcctgacctcaggtgatctactcaccctggcctcccaaaacgctgggattacaggcgtgagctgcggcgcctggcctccagctggcatcttgacctcagcatcatgagagtcccaaaataagaacctagcagctgaactcttcttgaatataaatgattaaattttggagtaatttgttatgcagcaatactaaccttaataacctgtataaaagatgaaataatactaggagtaaaataaatcataaatagatatcccacaaagcctgaaatatttactttctggccctttatggaaaaagtttgtcagcccatgtcttagaccaaaggaaacaatttaacctcaaccaccacaacaatcgtcatcattgagatgtgatgttgagtgactactaatatagatgcatatcagggtacaggtatcattctattcatttgtgggggtaactcaaaatgcatgtaatttttttttattttttatttttgagacagagtctcactctgtcacccaggctggagtgcggtggcaccatctcggctcatgcaactctgcgtcctgggttcaagcaattcttgtgcctcagcctcctgagtagctgggatcacaggcatgtgccaccatacctggctaatttttgtattttagtacagatggggtttcctatgttggacaggctggtcttgaacacttgacttcaagtgatccacctgactcgacctcccaaagtgctgggattacaggtatgagccactgcacccggccaaaatacatataattttaaagttacaaaagtgttatcctgtgtaattggaacaaccaatacttgagtactggaaactcataatctaaaagttgaaaacctggcatagtggaaagaatctagaattcagacttggtatttactttagaaaagtaacctcttctaggcccaggggttagcccatctgtgaaatgggcatataatagttgaaatacaaataatgtggagagttggtaaggatacagagtaactagaacccacatatacattctggctggaactacaaattgaaaaagcactttggaaagctgtcagtatttactaaggttaaacattcatgtatgctctgactcagtagttgcactcctggtatatatgcaacagaaatgagtttttatgtccaccaaaagatgtgaacaagattgatcattaagtacaaaacataaagcaatgcaaatgttcatcaacagaagaatagtgttatagtcctataatgcattacaacacagaaatgaaaatgaacaaattacagcttcaaacaacatgggataaaaacacaaatatagcactgctacttccattgtaatccctctgtcaccctcctgtctacaaaaccacatacctatggagttgaaaatgggttcaggtttgaggccacaagaagaaattcaaagacagtgaaaaggagaagcagcccctggaattcagcatgattgctgatatccccagttgttggagtttgttaagagaaaaatgtgcttacacattttaatttgaattaattaaccaagtgaatattgagggagatcaagcaaatcaacatagcatttagattttattttaacgtatttcttggcaagcaggttaatgcagagaggcacagtttctatgagtctctgataggctcaaacactcagtctaatgccatgtctgatagagcagacgctggagtgaaattcaagagatcgtcctgggttctggtgtcagacctaacccaaaacctacccggccatgggtaaggtccttcagttctgtgagaagattccatctgggaaaggactctcagttactagaagggacagaattcactattcacaattattttaacaagtgtaatgactatgcatattatttattcttaaaacaagattccttatagtgcatgacaaaatatctgatcaagcatcaggtccacccaaagccatatggtccctgcctagtttcaacctccaaaggctgatgttgttcacacttacctctgtgtggaaagatcttggaagcagaggtagttaaattatggatgggttttggtattacttagtaatagtagaagccatgaggggcagggctggcctatcacatctctcagatggaccacgggtcagcatgcaaggactggactgatgacccactaaagagaagtctgggtgctctcatgttcccctaatgtcctcctcagggactgggcaaaacctgccgatgaccctagatttgtttttaaagtccctcaagataaggggaaagagtggctactttttcaaactttctcctcctcacaccatcctt

SEQ ID NO: 1564212 - DNA, 4001 bp, Homo sapiens
tatgcctacccataccaattttaactgggtagttccaatttacacggacctgcagaaatcctgggcagttttcttctttttccccttgcatgcagttgtaagacttataaaactgcagacagaacagaaccatagccagttctcagatttcagggctacccttatgtcctcagggggcatcacagatgctacacctccattctcttactttcttattctcccctctatcctcaccagccatagatcaccatatccccttagggtcttgacagcagtcatgtatcccgaaactgcaagagggaggattggaggaggggtggcaggcagtggcctccccaacttctgctctggcttaagttactcctactcccaagggtcctggtgcagtagccctctcccactgacctgcaccgatactgcaggtctttccttttcttgtctgggttagtgcccacaaccacagacttgaagacctgcagaaagacaagaaacaggtgggtgaatgagaaattgagaaagtgaatgactggtaacttggacactggttctttgggaccgtatttgtcaaaactttccgagctcctatcacctcctcgccttttcccttgcattctctgattccccctccgcgcgcagctctttcttaagagcctccattgttctacttgtgggaaataggcgagaaagattatttccaaagcgtttctatgtttctgaatcttcctcccaaatttttatctcacttttctggcacgaaaatgagtagggttagagacaaggatgttctgaagacagagtgttctgatgcactcagatctctacattccaaatccctcaccctagggtagccaaatagcagagcccaccacttctctgaaaatggtgatgacagagatagggggcagggcagaaatgtccaaaacactcctgccacctcctccctccccacatacacagaaagcccacatttttctgcaatgcaagagacaaattatttccaaacccggtaacatttttggtcttgctgctacctcatctcaatcctcctacttcagaagccactcctcctggatagggagctgatccccagatcaaacctctgtctccctttttctacagcacctccttcccctgacccccttagcccaccgtttccggctccaaaatggagggaggttggagaaaagacacagggaactcaggcctggacccgttgcagggtccgccctcagcagcctggggtcactgactgtgcccgcctcccgctgccttgcagggatcaggccgttttctcgccgtttcgtcgctgttctcttccctggtcctcctcctcctccatcagacatcacccggtcgccggcttcctaggagttcccaactggtacccaattctcaacccttgacctctctcgagttccgcccccctcccccctccccgccccgcaccaagccctccatttcttgcaccaaatgagtgagcatcgggaaaggagtggagagaatccagtcctggacccgctctggtctttgccctctgccatcccaaccacagggatccacaggctgtggatgggttcgtagccatctcggggaaatgactctttctcacatttccttctgccagaagcctgcacttctccagggaaataaaagctggtacccatacctcttgcccaacacaaaaaaatttctgcgccaaaatgaatgggggtggaacagggcggtatctagaaagcagatccgatcctctgtagcctatgtgcattaccatccctacctcaggggtccccggcttgtaccgacctgcagggctgtagggcagttgccttctctgtccttcagtctgaagtctgccttcctccacggaaacagggatctggtacctggaggagagggacttctgcacacgtcggcttcagatcacgtgagaaaaacgtcaccagtgggctcgggtccctagttcccctcccacccgcagaaagtgcgtcaggagccagcccacttcttcccttcactagtctgtccgtctgagcgccctcagcacccccaaccccggcttagctctctctctcgccccacagcacggggccctgtcactcattttggtctttgctaatcccacaggtcaaatgtggccctttctctgtgtagtatgtatttattcttccgtggttatcagggagggaccgcaccttcttctagagctattggccattggtacatctcagaggaattttttttctttctctccttttatccgaaggcacctactcgatctaattctacacgcagccactgatgttcattctgcctgtgaaccagaccttctcataatgggtacaaggtggattgtcaagtagggacacaagtagttaaaataggggttttatttttttaaatttttttgatcttatttaattcactctcctcagcatgggttattcttataagcacaaaattaaataaagctatttcatttatgagaaagtgtttaagagagagaaaaacttaaaagatttcaaaattttctactcagaagagagaccaaattaggttcataatattaacttttgccatatacacaaggaattcaattggcaacaagcaaaatatacattagaaatttttcataaatagctggttctctcacgttctatttaacacacacacacacacacacacacacacacacacacacacacacacacatttaatgttcccaaacgattactgagtgctaaatagacttgctggaatctgatggttgaaagaaaattcaaaaatgtctctttaaaaaatttggctcatggctattttcattcaaatgtttagctctaggggaagggaagagctgtgagaccaaggctgcaggagatgtgaaggatgcagaaatggtcctatcctccctgccctgccaagatcaggggaaggtgttcttctccaccccctcatattctagaatttctcatcccctgcatttctcatccccaggcacatgactctgttgctcaagagtcatctgtccaagaatataactggacaggtgaccaaggtggtgatatgagtaaatgcctttggctccttccctcctccctccccctaattcccacagggataacccagccccagcacagagtggagcattgttcatgcctctagaaaactagaacagatctcttctagacccttgcagctgagggtgttcatgaggcctgaagtgattgctggggtagagtcccctgcaacctgcctgctctctgcccttattcacagtgcctgagtggaagcctccctagaccctgtctgttacctcccgcctagcctaaaaagtgcagtctggcgggcctctcacccccaaactctgtatcttcagggaacccagagggagcctaaccttgctgcaggattgctgcctgccagtccatactaacctatgactgtctcagcaaatttaggccagtgtctaaggagttctgccatgctgtccatattgacctagaccaagtattcccaattgatgaagtctgtgggccacctgaaagggcatgtaaaattgcatatgtttaggaagtagtggagtatgcacactcttgtgagaagaagatctgtaccctaggagcctgaatagtgttttgttctatttgcacaccccattctgtttatccatcatatgttgatgaatatttaggcattttcatcttttagctgttataaataatgctgccatatacaatcacgtataagtttttgtgtggatgtatgtttttattttatataagcaagttgacatcatgaaaaagaggaaaccataaaggacagaaagaagaagctacttgacaaagagataagaaggggaagacacaaatagcagctgagccatgttaaagagagctcatctattccttgggttcaggcattattaaactatgaatcccctaaaattatgttcaaacttgtgtgtgtgtgtgtgtgtgtgtgtgtgtgtgtggtcgtggtttcac

SEQ ID NO: 1564213 - DNA, 4001 bp, Homo sapiens
agaaatgcattatacaaacatttacatttttataaatattggctgataaccgtatacgaggttctgcaaactgttctttatttatttattttttacaatgtgtcatgaacatcttttccatgcacatgggtgaaaatcctctactaaaatatagagcgctgtagttgggtcaaaaggctgctggtaacgagattgacatctaaagcaaaaatatcagcttaaggttaaagcattgggcctggcaaatatctaccagggaaagcagggttgacaataatctcatcagagaagtcagaatggaaggccaaaggcattaaaggtatgggatatcgtgtaagcctctttggcccctacctccacccctcactcccctgacaccccgttgtccccttgggcgaatggatcctgtacatctctttgcatccaatgaaaaccacccattttctgttttttccttagctcctcctgagcccttgacacatctccacattctctcatcatctcctcactgctcagatgcctttcctgtaagtcctcctgagagtccttgggggaatcgtccgtccccctgtctgtttttctttttgctttccggggcacataatctccagccgggcgcttttcggcggcccgcggctggccctctggctttgcctgggaggctggcttgccctcgccttgtggcttgccctcaccttcggacttgccctgcttttcctggcttcccttatcttccagttgtccctcatcacctggctctccctcagcctttcgctttccctcgcattctgtcttcccctccgcgtctggcttttcttcctcgtctgactttccttcatcatcaggctctacttcatcttctggctttccctcgttttccaggtttccttcatttttattgtagggtttttccatgtcgagatttctctttttcctgtcctgggggatgacagtggagggaagaggagacaaataagagacatgggagactgagggcatggggtggaatgcaggtctggatactacttgcatctcacccctggtgagggttcccctaagctggccgggcctccaagagggccttctgcccagcacgtagcccaccactcctcccacacacgtgagccagccataccctggcaggccctgccaccttctctgaactgattcagcctggtaaggtgtgtgttcacgtgggtggggttatgtgcaggggtcccaatttggccttggccgggccctccacactctcaacccttgtgggcccctgtccatgcagccccctgctttcacggacctgcggggagtctggacaggttgctcttcctttgcaggcctccaagagcgctgggaacaacagacgcgcagacctgcggacagacaggagacaggggtaggggctgcgcgctcagcgggctcacagggactccgttcccttttctgagtctaggccctgctcacccaatgttttcctcccctacctcccccgcaccccagccgccatttctttccaggcctcgggcaccaaaccaggatgcttccaaactgcgtttgcctctttgtgccccttcccccggaggcaacctgtctcagcgccaccccgtttttgcggaggtcagatgtttccatgggagcggattgtgagagggggttatttccagaataagtctgtgtttcactgtcgcactgcggggtcgctacccccagccccccatttccagcactaaaatggatggagggctcagtgcaaggggcgtcgagaaggcgagccaggttcgcttcggggtgctccctcccctgcccccgccccggcccgctcagcatccccctcctccccaatctaccggatcccttctccgccccctccccaatcctactgccagccccctccacccctgtcccagggtccgccggcagcgcacgccttcacactgacctgcggggacccaggacaggcctgtgcctcctgcggctcgctgaagcccgctcgctgctcccccgccgcctgggcagctcagacagctgattctgcgcgggcgcctggaccggaccgctgggcgggcgggcgggcgcgggggctggtgcccacgtaggcgcctggtcactcacgtgagcaccgcgtcacgggagctaggccaccaccacccccttcccgcccacctcaccatccatccccgagggaccaggaggttgcggaaggtgggagagggtgtgtgtaacaaaggagtgggggtcatcaagaagaagaggaggagggggtggctttctgatctcaggtgctttacctgacgcagctcacagcatcctcgcaaggcatctctctctgatgcccattatcgccaggtgtgacagctgatcagagagggtacccgactttgccaagagcgcttagccccagaactccacagcccactttcaataccggctctgcctgactccagagcccggggggtagtggtgcctgccaggaagctgagctgccaccttgagtggcggtgttcctggggttctgtcctgggcctcctctctcctcagtcctcaagttgtctctccctgtgtgatctcattcatttccagtaaacaccgatgactcccagatctacagctccaggctgttcccttctccgtgtctcatatcagctttgccaactgtttattggacatcaccgcctgagtatccctgagggacacggtatgtaaaaaccctgtaccacaaattgatttcaaaagcccatgtaccccaaattgatttaccaacttccttcttataatctccattggcctttctccacacttgaaagttaccttccaacagttgaccagttttcatagaaagagaatgtcagacagctagaaaggaaagcattcaaacgtttttaatatgaactgcagatccacaaattcatcataacccttggttcacaacatgctcttctcattgactactcttctctcccctgctttcccttcttttcccccactgtttactttcgttccattgtttttctctttcacatttgtgaaaccaccactaaacccaaagaactagaaaattgctaataactgtttactttccttccattgtttttctctttcacatttgtgaaaccaccactgaacccaaagaactagaaaatttttaatattcttgtcactacagtgtagtgtcatatatttgggttttgacaagatacttataacatgtttttgtttggatctctttcagattatcctgtttggagtgtattgaacttcttggatacatcgattagtgtctttcctcaagtttgagtaatttgcagtcatttttcctttgaaaattctttcttctctattctgtttctctccttgttgaacccccatcatgcataggtgtgctctgttcatttttcacattacttttatttttctgctcctcggactgaataatctcaattgacctattttaagttcactgattcttttgcctgcccaaacctactgttgtacccctctagtgacttttagttattgtacttttcaaataaagaatttctatttattttataatttctacatctctttgtatttttacatctttactgatattgtgtatttgctgagacattcttctctttttctttagtcctttgtttacgatttcctttagttcttcgagcatatataagacagttgattaaaaatattttctagatattctaatacacgggctttttcatgatagtatctaattatttctttcctgtgtatgggctatgttttcttatttccttatatgcctcacaaagttttgttgaaatctgtatattttgattctaatatgttgactctggaaattagattttccctcttccttgggttttgttgttactctctcgtgggttattgtttacttagtgactttttaaagtattttagcaaattatgtattctttgtcatgtgtggccactgaagtctgtgttttattagcttattaatcagctggtgtttggatgccgtt

SEQ ID NO: 1564214 - DNA, 4001 bp, Homo sapiens
tactgtctactttagggttttttgtgacacaagtaatatacacacataaacatatattcattttttggcaagtgagaagatgcagataggcaaaaagaaaaaaaaagagatcacacagagattcactgttaacctttggtgtataataaaatcagacactttcctttgcattatgtcacatagaaatgtacaaataaagtgtacatatatacacacatatatgtatacactgttttgcaactcgttattttcactttgcaatatacaatgagcatttttccatgcaaatgaatgagacctcttattaaatgaataagattgggtcaaaagatgagatgttgacaagagtcatatgtaaatctcagcaacatcgaatgactggagtaaaacgatagcaaatatttatcaagaaagtgcagacaaacagaaagcagtggcaacattaataacagaaaataattgaattgtcagagaaattaattaaatgggataaggacggtcccgagaatgcctatggttagaatgcagagccctaaatttctttctcagaccccttatctcttccaaacacctttccatctcatctccctcccttgtcatttcttcatctttaaaatgcctatagtctatgtcctctttaaattcttcgagagactgaagcagcctctgtctaaaattcccttctgtttgctggcgttcaaattctccatacgggcgtttttcctccctctttggcacgctgcactttggctttccttcgttttctttgcagggtttttgcatgatgttgttgttgtttcctgcttaactctagggagaaaatgtaaagacaaattgcttcattacttttgaatcacgattgtcagtttctctctgaggcaagatactttcccatctctgccccacaggtccagacctcataagtctgcggcagttccctccaccctctcatctcccccttttctcccctcccacctcaggaacccaccgtttccccagcagacaaagctaatggcctctccaataggcaggagaggcggagcagaaaaggagatggactgcgaagccgcaaatttcgcctagcttttgccccttcccgactcctatcctcagagatctcagtctaagtgcctctctcatactgacctgtgcggggtagtttcctgctccttttcttcccccagatgtctgtgaacacagatcctgggacctccaaacaaaaaggaaggggcggggaggaaggagctatctgtggatcaaccagctccagagacaagacagacgttattattttgaacctgggattctcatcatcaccgtcatcgccccccggatttctacctcctggcccctccttcctgtctgtatcctttccttcaggatttccgtttccactccccactcctcaccctcaggcctgggccttgcaaggcccgcgtctccctccttcgccccgtcccgcgccccaccccaccaccacaggccggcattgagtgaggtgaactattttcaaatgatctctaaatttctgttgtctccatcccgggatttcagcctttctccacacaccaacacataccccaggcctaaaattttctcttaacaaaattggagaaagatgaggagaaggataaaaagaaagcatgccagggtgagagaagccgattatttcaaagctgtcactaaatctctaggtgtctctcaaaagatttcgacctacccccttgcttccccctgcaaaagatacaattatctccgacgattttgcagcggttttgggaaagcaagtctggacctattccagtcattagattcacccactactgaccccgggggtccagtggttccttcactccaacctgctgggatttaaggaatttacctcttccttcccttggccacaagcacgcacggcacgcttgtctgcagggcagtaaggagctggtacccagaggagaaagaagcccgggaatataaggacttcggttcacgtcagctcctgatcacgtgaggattatgtcatcccccatctctggtccccactttcccctcccaccagcagcgctgcagaagtggaccggcttaccaacctcccaccccacaccacaccaggccctgtcactcatttttgtctttgctaattccagaggtcaaaagtggcgccttctccctgtggtcagaatttgcctttctctgattaccagggaggggctgcattttcccaaagttatattaaccattgttactttttttgtggttgtgctgagagggaggattacttatccttttctaagctacaagaaaagaaaagtggcagtctcctccatccaatcgcctctcagccactaatagccatcatttcccttggagtccaatccttgaaaccagattggagggaatggggtgaattaggaaaggaggtaatgatttggattgtgcttcttacttttgttttgataatttcttattcttttccaatttttccataaacttattatatacttttaataatcagaaatatgataaagatatgtacatttggaaaaagattccagataggaggataaaaaggccagccacctgtttctgctgctgaagtcataatataaatatagaccctttaggcagacatattttttgaagtttaagatgtacaggtcagttggaacctactcttttgaggggctcccgggcatgtgaggtccttccattaggtgagtcactgagaccataatcctacagcaccttgcccttagatttccagatcgcaactgtaagtcacaaattttaactagtttgagctcagtatcatgccctctttcttccagtttataccatacacataacccttttttcttcaatactgtacccctaatatcccaacttttttcaacactctcattcagaaaagaatagtttttcattttccctagacatctccatcctatttatgttttccatgaccttatttagccatactgatgtattgaaagctacttgtagtactaacaaaaattagtcacatttagccacccaacacactaaactttttgttgctaaggatttgggtacttgtctaagtagatttgctcttgatttgttagcttgaaatatatgcaatagaaagggagatgtgtaaacttctcataagttgtttttaggaagattgcagctcattatgaatataaagttaccactaatcagtttgatataaatgactccagaaaaaagttcagtggtcagaaaaaagtcttaaaaacagtagagcatcattgtcacagttattaaggaatgactagttgtgatagaggcaaaaaattcgtttgtggggagaaaaattcctgaatcctctgtgaacagcttttcatgcagatggttagactcagagttataaaatggctgaaggattcgggtgttgaagactttgcatattagtaagaagaatggcattggacaaatcctagtttgaattaattgtacttacttagcttttgtataaacttgaatgtaaaacttggatactgcaacttctctgtgcttcatctataaaatgaggctaatagtttgaagtatctcacagagttttcaggactaaattacatatttaatatgtgtaaaacatttaatacatgactgacaagtaccaaggcagcctgaagcctaaatatgtgggggcaggtctggcaccagggatgggggaggtgggtgaagctgaagcctgcagcccagggggtcagtttggcagtggggcaggcctagacactgagtttttagagcaggcctggagcctggggctgtgggatccagactagtgctaaagcaggcctggaggctcagtctgcaggtactggcctagagtctgggaccatgggggcgggtccagtgctgggtattactgggatgggcctagtgttgggatccaagaaaaagtctggtgttcacttccttctccttcccccaagtggatggtacctccaagctgtgcagcctggggttcagga

SEQ ID NO: 1564215 - DNA, 4001 bp, Homo sapiens
gtacatataagcaaaaagaacaaaaagaagaaaacaaataaaatttcacaccacacagaaataagcttggttaagtttgtgatatatgttatatggatgtatgtatacacacacgcacacacacaaagtttggaattttatcctacatatgtgagctgatattaaatatgctgctttgccataacctgttatgttttactttacaacatggaatgaacatattcccatgcaaatgtgtgaaagtttccaattgaaaaatagacctggaaaatgggtcaaaatccaaaatccaatgagatgctggtaccaaggaaattacctaaaacaaaatttcatcagatgattaaaagtaaaatggaggtcaaagatacatcagaaaatgctaacagaaagaaagctggggccagattttaatattaggcaaaaatgaattcaaggcctaaagcacacaggataaggacggctgcgtgaatgtctttgcttccaatgcatcatcacaaacttgtttcttactcttcttatctcttccctaagcctttcaagctcatctactcctcttatcatttcttcagggtccaaatgcctaacgggtgtgtcctctttaaatccctggccaggctgattcggccctcctctggggtttccttctgcttcctggcttacgccttcttcggaaggttgaggatttccttctgcctcctgtggtacatcctccaaagggcgatcttcctcggcctttggcatgttctgtggttttccctcattttcttcacaagacttttgcatattgagtattttttatttcctttttgaataaattaatcctagaaaacaaggaaacaaaactactagattccaggcaaacagaccagcagtcagagtatggggtcccatagcgactggccttttttgactcagtaccctaattgtcaaaagttttccaactagagaaagctggatcctcaggctcagaactcccctgactccacctcccttcgcgccccctttcgttccagctccatctttctcctcctgctcctgcccaccatcttcccagcaggccctgctacaagcctctcctaatactgaaatgggagcagtacggaagcaattaacccttctcccgcctctggtctccaacactcccgcccttcagactttcccaggccctctcaacctccagcctctcacctgagacggctggtccagtctctggcctcccctcccccttcagcgtctcttaagcctcctcctcccccgcctcatttccgctgcaggctcggcaccggcctctggcacttaatccggatggggaggggctgctgcgaccccaggatgtgctttggtgtcactcacacttccacccccacccgaagagacctgaagcaattgcacctttacaaaaactgacctgcagggattcaggggattttcctctctcttccctcacctcgatttgtgtcgcgcccaaaaaaccaaatatcctgcagacagatgggagtgtttggtgagcagactagtacctggatcacgggtccctttcatgattctaggccatgttggtgtaaagtttcccatgtcctcatcctcgccctccttttatggcaaccccgccctcctccgtgcccaccgtttttctgcaagcagggagtaggaaaagcaagtttcttccaaacagtttctatgtctctctctcaggacccttaattagctacccttctctctctccacccgccatcccccaccaaacagccccaaatttcctgcacaaaatgggagtttggcggaacagaagtggggaaagcagtgccggccccgcttgctttctgctctcggcctcctcgaccccagggtctccaagtcagcgcccacgtttatactaacctgaaaggatcttgggcacttttctccttctccagcaataaggagctgctacagggaaacaggccctggactataaggacttctgcacacgtcgactcctggtcacgtgagagtcgcgtcatcactgagctcgagtccccagttacccctcccattaacactgcagcccgcccgctgcgttccctccacttgatactgtcaatcttttttcgtatttgccaatcggagacaataaactgttatcttcgccctggagtatttattcgcctttctcagattaccaggaggatcagccttttaggggtaatcgaccatttctccttctttgaggaatcatctctttcttctgctcccaatactcccacctcccctcctccaagacccctacagtccaccatttcccctggaatcctatccagcattgaaatgggcaaaggtggtagatcgggaagagggggctggaaaagaatctaaggttgaaagtggaggatttgactaatcctcttgaatagttttctgttgtgttctatgttttcagcaatcagcatacttttaaaaatggtatcagaaaacggatgcctcataagcaatatgtaacacttaatatgaaggacaaattagttatatcaatgtgtaagactttggaaaagttttctaatggctggaaatgaaatgacaatattcacaacatattgatgtgttagaattttttaaaatcttaccaaacagcacttaaaaaattgactcccaaattaatgtgtggaaggaggcctagttttctcttgttagcaattttgtataggtaatctactactctttctatttctggcagaactcaagttatcaagtgttggatgtctgatctttttcattgatgaccactggtggcatccactaaggtttcacttggaggcttcagacagacttcctccccatttcctctataggattcagtatcttgttaatcagataagtccacagaaaagcctgctttccactgagtaaaattcttttggaactcaaagtagtatgtttcttggaaaacatttcgttgttgggaaataactcatacactcatgaaacactcagaaaagagaattctctgtatctcaccatcaggcttgaggcttctttgcatggcattttcattcatggcactcttgagatagtctggtatcatccactgtgtcccattaaaagaactattgacatgcataattgttatgattagaaagcaaagagaacaacattgctgtaaaaaataatattaaacaggaaactgatatccctgcaactcagaatccactggtacttggaaggatggtggtgcctggagtggcattctggccaatggagccagctggagagtcagaagaagacagagggggtcttttgtctagggtggtcacagcaggatgccttagccaacaagaacacccaccagagaagagaaaagaaggtttggaaaaaataaatattttttggacttaatgatttatagttgaagcatgacaaatttcttccacacttgagggataaatgttctattgtttgagagagagcttttaatataaatataactagcaaattataaagatttaatcattgcctatcaccaaatgtttccactcttttaaatgtaaccatttagtgaggaacaactctgatcttttaaaagaaaaatcatcagcagcaaaatggactttgtgtgtgtgtacacttctatgaagtttaaccaatgtatagatttgtttaaccaccactgcaatcagaatacagttcaatcacccccagaaactcctgcatgctgtctcttgtagtcctatttgactgccttccctaaactctggcaaccactaatatattccccattactacacttttgtcttattcagaatattatgtaaatgatttcatttttcaatttttgtgcactggcttcttttgggactggcttctttcactcagcataatgccctggacatccatttgagttgttgcatgtatcaatagtttattctcttttttgctgagtagtattctgttatttagctattccacagtttgcttattcattcacctgctgaaggacatttgagttattcccagctctaagc

SEQ ID NO: 1564216 - DNA, 4001 bp, Homo sapiens
cccagtcagtgcttactattacttaacacatttttgttgttgttaaatgagtaatgagcatccaggatgctctctctcttctctgcttgggagcttcatttcttttcactacacaccagcttgcttgtactcattgcacctaagcccagtgccccttggcttctttcgtaggagaccaagcccatctcgattctagttcaaaaaaatcattcaaaaattctagttcaaataaatcttgttaaaaaaaacaaaacaaacaaacaaacaaacaaaaaaaccatggtgcccactgtgggctaatgaagtgggtttgaggggtcaaaacatttgcataaggaaggtcaagcaggtccagttcccagaagtgaggggtgctgagcaagttggataagtttcttgaccattctgtgcctcaatttcctcatctacaaaatgggagaaatccaacatcctaggattaatgagaattaaatgaaagtcttgataaagtgctttgaactatggctgtcacacagtaagtgtgaataataggatgtgaatctacaattaaaaggcttaaaaatatctaccaaaccaggcattgttctacagcagggggtcagcacactttttctgttaaagatcagaaggtatatattctaggctttgtaggccatacaatctctatggactactcaactctgctgctattgtagcagcaacagcagatacagaaaataacataaatggataggcatgatcttgctctggtaacacttgtttacaaaaacaggcaggctggatttggctgcaggccatagtttgttgacccttttctagagcagggctgtgcaacatatatataacatgtaaaccacaaatatgatttaaaattttccagtagtcatgttaaaaaataaaaattggtgaaattaattatacattttatttaacccagtgtatccagaatagtcatttcaacatgtgattaatataaacaaattgagatattttacattctttttcatgctaattctcgaaaattcactgtgtcttacacttacagcacatctcaattcggactagccacatttcaagtgatcaagccttatgtaactaatggctatcattattgggacgccacggttctagaactgatgctaatatggataatgcttgcttaggtgcatacctataccaaaaagtgtatacagtgccaggaaaagtaggcacgaaatatggtattggatccatataaaaacttataaagattagctaatattatagtaagcaaggtgcacacatctgcacaaaaatggcctaaaccctgagaagaacgagaggaaaggtctggaaacaatgtttccagaagtttgtaacaagtcaaaaataacctagatctgttcagatctttagatctctttaaagcctaaagagaaactgtaactttctagccctaacccacttaacagctccccagcttcacagggagccccgccctctatggagagaaacgatgccaaatgttggcagcggtgtagcggttactgaacagccactcagcactgcactaggaccatttcccttaatggtgacccctagtaaaggtgcagcgagaggaagggaccagcccaactgcccggtctagcccgggttcgagttccggtgggtggggtcgagcaacatgcaaagcctgccgctaatcatcttgggatgacggcccggcacccagcacacaaacagcgacagtcccgagggttcagcccactctggcgacctcgacagtcggagaggaaggggcgggggtgcgagcaccttcggatctacgccgcccagggcgcaccggaaagctgccgcgagccggggtgggcttccgctgggaataagggctcgcctttttgcgggacacaggccctggcaaacctgaagcatgactcaccgaaaagcgcaggcgcagttccggagccttcagccgcccagtgcccacggagaacttccgatcaccgggactgggacaacgtcaaggctcagccaatccaagcccacaggccggcgcacgtggtcctgggacccagtgcatgcgcgctagggaaatggctgccgtgggactgcgctcgcgcggcttcctagaggaggagccatggccccgccccgggcccgagagaaagaaactgcactttcgttttttagcagcaaagtttgttgatgtactttacaacttatcttttctgcttctactcaggacagtcaagacagtgctcagctagatgttcacataactgtagacataaatgtgaatctatttaacgcagtaattaattcaaaaagtgtttttagcatcctagcatgcatcagttgatatgaaagtagtaaatgttaattgagtggtcttgtgcatcctggacttctcatctgtgcatattctcattctttgcctgcaaagggccagtaaaagcacagtgatggttgaacgaatgtgacagcctcctttgctgatgccttaccccaaggtaatttggggaaaggttcagggaaacagagtatccaatccaatactctggactgggtgctggcaggaaggagggcgattgtatgattaagtatcataataaatcttacctaaaaggaggggagacaagaccagtgactcattaactgggataggggatgtttggtcatttttgtggtttggacaatgtttacgttttttcagcattcccacgtgattacgaaggagtcttgtttttgtcttgatccatctggtcaaagagtggccacgtctgatggtgttctgtgaagtatttatgttccacgcagcaccaaggcccagctgtgactgccggggcagctcagagctgtcaggggttacttttttcttgctgtctattatagggctaaaatgtttaaggattatataatacctttttaaagaaaaaattatttggctgggcgtggtggctcatgcctgtaatcccagcactttgggaggtcgaggcaggcggatcatgaggtcaggagatcgagaccatcctggctaacacggtgaaaccccgtctctactaaaaatacaaaaaattagccaggcgtggtggcacgtgcttgtaatcccagctacttgggaggctgaggcaggagaatcgcttgaacccgggaggcggaggttgcagtgagctgagatcgagccattgcactccagcctagcgacagagcaagacttggtctcaaaaaaaaaaaattatttaatgacacttgtcacttgttaaagcatggtaaggaagactttattcaggaccattgagatagacataggtaccactgcaacagggtcttgcagtggggaagagagattgggctcaacttcaattgtagcatggaaaagtgagaatttatagccaaggagcaaggtaggggggtcagtggatggaaaattattaagaggaaacatcaggggtaagggggattctgtctaaaccaacctgacaagattcttgctgaagacgggccagggtgatcagatgtcacctggaggttggtggaggatgaggaaccaaatcagatattaagggtgatcagatattgagggtggttgcttttggctaaactgatttatcaaggctttttgctaaaactggattttacaaggaagtgcacagataggcctagtcaggagactgactaaagtttggttggaaaagaatgcttgataatctttacttttgcctgttaaaataaaaaaaaattgacgtaatttaaatttggcagagtttatgtgagcaaagaatgattcatgaatcggacagcactcagaatcagaataggttcagagagctttgtgggccgtgagtatttatagacagagaatggaagtaaaatacagaaataggctgattggttgcaatcaatgatcagatcatttggatatgatctgagaagttggcagcttgtgattggctgaagcttgtctgcttgtgtttggctgagacttggctgtttattatactcttccttaggttaagctttca

SEQ ID NO: 1564217 - DNA, 4001 bp, Homo sapiens
tttaaaaaacgtttttactgccttccccacaagaccataagagaagatccacatgttttattcacctatacacacctagcaaacacccagtcagtgcttactattacttaacacatttttgttgttgttaaatgagtaatgagcatccaggatgctctctctcttctctgcttgggagcttcatttcttttcactacacaccagcttgcttgtactcattgcacctaagcccagtgccccttggcttctttcgtaggagaccaagcccatctcgattctagttcaaaaaaatcattcaaaaattctagttcaaataaatcttgttaaaaaaaacaaaacaaacaaacaaacaaacaaaaaaaccatggtgcccactgtgggctaatgaagtgggtttgaggggtcaaaacatttgcataaggaaggtcaagcaggtccagttcccagaagtgaggggtgctgagcaagttggataagtttcttgaccattctgtgcctcaatttcctcatctacaaaatgggagaaatccaacatcctaggattaatgagaattaaatgaaagtcttgataaagtgctttgaactatggctgtcacacagtaagtgtgaataataggatgtgaatctacaattaaaaggcttaaaaatatctaccaaaccaggcattgttctacagcagggggtcagcacactttttctgttaaagatcagaaggtatatattctaggctttgtaggccatacaatctctatggactactcaactctgctgctattgtagcagcaacagcagatacagaaaataacataaatggataggcatgatcttgctctggtaacacttgtttacaaaaacaggcaggctggatttggctgcaggccatagtttgttgacccttttctagagcagggctgtgcaacatatatataacatgtaaaccacaaatatgatttaaaattttccagtagtcatgttaaaaaataaaaattggtgaaattaattatacattttatttaacccagtgtatccagaatagtcatttcaacatgtgattaatataaacaaattgagatattttacattctttttcatgctaattctcgaaaattcactgtgtcttacacttacagcacatctcaattcggactagccacatttcaagtgatcaagccttatgtaactaatggctatcattattgggacgccacggttctagaactgatgctaatatggataatgcttgcttaggtgcatacctataccaaaaagtgtatacagtgccaggaaaagtaggcacgaaatatggtattggatccatataaaaacttataaagattagctaatattatagtaagcaaggtgcacacatctgcacaaaaatggcctaaaccctgagaagaacgagaggaaaggtctggaaacaatgtttccagaagtttgtaacaagtcaaaaataacctagatctgttcagatctttagatctctttaaagcctaaagagaaactgtaactttctagccctaacccacttaacagctccccagcttcacagggagccccgccctctatggagagaaacgatgccaaatgttggcagcggtgtagcggttactgaacagccactcagcactgcactaggaccatttcccttaatggtgacccctagtaaaggtgcagcgagaggaagggaccagcccaactgcccggtctagcccgggttcgagttccggtgggtggggtcgagcaacatgcaaagcctgccgctaatcatcttgggatgacggcccggcacccagcacacaaacagcgacagtcccgagggttcagcccactctggcgacctcgacagtcggagaggaaggggcgggggtgcgagcaccttcggatctacgccgcccagggcgcaccggaaagctgccgcgagccggggtgggcttccgctgggaataagggctcgcctttttgcgggacacaggccctggcaaacctgaagcatgactcaccgaaaagcgcaggcgcagttccggagccttcagccgcccagtgcccacggagaacttccgatcaccgggactgggacaacgtcaaggctcagccaatccaagcccacaggccggcgcacgtggtcctgggacccagtgcatgcgcgctagggaaatggctgccgtgggactgcgctcgcgcggcttcctagaggaggagccatggccccgccccgggcccgagagaaagaaactgcactttcgttttttagcagcaaagtttgttgatgtactttacaacttatcttttctgcttctactcaggacagtcaagacagtgctcagctagatgttcacataactgtagacataaatgtgaatctatttaacgcagtaattaattcaaaaagtgtttttagcatcctagcatgcatcagttgatatgaaagtagtaaatgttaattgagtggtcttgtgcatcctggacttctcatctgtgcatattctcattctttgcctgcaaagggccagtaaaagcacagtgatggttgaacgaatgtgacagcctcctttgctgatgccttaccccaaggtaatttggggaaaggttcagggaaacagagtatccaatccaatactctggactgggtgctggcaggaaggagggcgattgtatgattaagtatcataataaatcttacctaaaaggaggggagacaagaccagtgactcattaactgggataggggatgtttggtcatttttgtggtttggacaatgtttacgttttttcagcattcccacgtgattacgaaggagtcttgtttttgtcttgatccatctggtcaaagagtggccacgtctgatggtgttctgtgaagtatttatgttccacgcagcaccaaggcccagctgtgactgccggggcagctcagagctgtcaggggttacttttttcttgctgtctattatagggctaaaatgtttaaggattatataatacctttttaaagaaaaaattatttggctgggcgtggtggctcatgcctgtaatcccagcactttgggaggtcgaggcaggcggatcatgaggtcaggagatcgagaccatcctggctaacacggtgaaaccccgtctctactaaaaatacaaaaaattagccaggcgtggtggcacgtgcttgtaatcccagctacttgggaggctgaggcaggagaatcgcttgaacccgggaggcggaggttgcagtgagctgagatcgagccattgcactccagcctagcgacagagcaagacttggtctcaaaaaaaaaaaattatttaatgacacttgtcacttgttaaagcatggtaaggaagactttattcaggaccattgagatagacataggtaccactgcaacagggtcttgcagtggggaagagagattgggctcaacttcaattgtagcatggaaaagtgagaatttatagccaaggagcaaggtaggggggtcagtggatggaaaattattaagaggaaacatcaggggtaagggggattctgtctaaaccaacctgacaagattcttgctgaagacgggccagggtgatcagatgtcacctggaggttggtggaggatgaggaaccaaatcagatattaagggtgatcagatattgagggtggttgcttttggctaaactgatttatcaaggctttttgctaaaactggattttacaaggaagtgcacagataggcctagtcaggagactgactaaagtttggttggaaaagaatgcttgataatctttacttttgcctgttaaaataaaaaaaaattgacgtaatttaaatttggcagagtttatgtgagcaaagaatgattcatgaatcggacagcactcagaatcagaataggttcagagagctttgtgggccgtgagtatttatagacagagaatggaagtaaaatacagaaataggctgattggttgcaatcaatgatcagatcatttggatatgatctgagaagttgg

SEQ ID NO: 1564218 - DNA, 4001 bp, Homo sapiens
taacacctcagaaagtataaagaaaacacagtcagcattaagagtactcttttaaattgaatcaatttaatattattttaaaaactcattacaacctctttattgttttatttcattcaatattggtaagaactatgtcctagcccagcattcgaatttgggaaccagtgttctaaattcatcatacagagtactttcagtagtaaaacaaagtatatatagtagtcacaattattacttgatatgtaaaataaaatatgcaataaaactattttgtaactcaattttaatgtagtttcataacttggtcagagagaacgatttatccttaagatataataaaactcacatataagaatcctaaagctcactccaagaagatggtccatttatgcccatttatttttcatttaaaaaaccgttgataagacttctgttgaaaagttggtccatcaactggtatttcccttctatactaactaaaaagctacatatgttaaaatataccatctaattaattcattaagacatcatttctttgagagatattatgaagtatgaattgtgccattctgcttactagcagtgaccccaagtggccaccagagaaacacacgtaattcaacttcatattttttccccgtttcagtgttcaagaggttggatcaaattgctacatctggagaggtctgcagattaacctttggttaaattcactggagattattgtaaaagaactgcaatttgagttcctgtgaggttggactagtcaagccaaagcttcaaatgcctaacataaggtgtgaaaaagacttaaagtcccaatgttcacataaaaatgctattattaaagacctaaataattttaccccagagcagtggtaatttttatgtcaacaaagcacccctggaaaaggacagaacacaactgaagcaacagataatttggatcacttcgatctgtcctagatctaccatttgcactttacaaaatcaaaatacaagaatgctatttatttcccaggctttgaactgactaaatcactctcgactgttgtcaaacacaagtaacttgctttgtcggtctctttctctaaaaccaaaatcttttaattttacttaccaattaggggcctaagtcctgcatgtaaaaattagagggggcagaaagacaagagaaagaataatccaaaagaggactaacagaaggattagtaaggaaaaatgcaaggttgcaagagccttctatatcccttaaaggcccttaaatcacaggctgtctattcctttagcctaattgctgtccatagaagtgatgacatgattctagacctaccaggagactggtcatctaaacagaaactcttgcttttctggctctgccctggtgttttaggctcaggggccccattctctgctacactgggatcattctggagcacagtttcctcagtcttcggcatcttgatgttatctggaattggagagaaaagaagaggcaagctgtgtaagacctgactctcgcccagggacaaaaagaaagagcgctcttcaactacaattgtgtgtcctggtgactgaacccgctgccgtcagttgaaaggattaagtaccagggctcaaaggttctcaaaggaacaactagggtcttcaaacaggcctcgaggggaaggggaattagtggcacttcctttactgaaatcaaagaagtctggtcttgggcaagcagaagaggaaaacaaggcccagagatggacaattaactcgccagaagcggggcacactgcacattactgaccaagctaggaaaggaatcttcctcggctctggctacctttcattggtcctggaataccttctaactccttagctactgctccagaccttcctgaaggggctctgccggcctggactcaggcagcagggtatcccccacagccctcgcgaccctggtccctcacctcctcctcgtcctcgactggcggcctcgcctctgcgtctgctagcgaagcccctctgcctccccaacctggtctgggaagtaccattgtagccaggaagagaggggagatcatcagggaggagtaggacggaaccatggagattatgaggtccacctggagcgcacccctacctgtgacacaagataggagagtccaaacatgaaaacaaagggtgatccgtttccagggtagcggggtggtatcacttgcccagggtgccttggaaaccaagacggcaggaaacgcaagcagagcctcaccattgggtgacaaaggcaggaggctgagatagacgtaaggaggcttcatgtccaaaccctcccgcccaggctcggaacccctcaggagcttggaagtcatcttctcaagccctgctcctcgtgaacgaactgttcaaagcttttatccttactgccccagaaacaaaaatagcatttaaataactatttagggggaaaaaataagcgtttgttgtttatttgtttcacttcatgctgttcatacagcccctacaaatgaagaaccaacagggctacaaaattccagaagtctgttttgggttttcttttatcttttgtataagtgaatcctccacacaaagtaaggagagacacatgaactgttaaactctcattttacaaatatgcaaatcaagaatcattttaaagggctagccacagaagctgtgtggtaaaggggcaagaccataagcctgagaggaatcctacattttggtttgggttctttcagctcaattcttggcatgttcttcattgcaatccaattgtgagctttggagctcatctgtaaactgagggcactggaacggacgatcctaaggggcctcatgttgctcactcttcagtcctagtctactttgtcactccactggccagtcaccacagtgatatgaggacccctggattggcctatttccagcatatatacatttccacactatactagttgatccctctcttaccctgacttaatttcttaacacattaacttgtttcttttataaatcaagactatactttgaccagattctcaccacaatcctcgccttgttagtggcaacagtaccgtgtgaatatcttgcacaacatggggattttgaagaagaaagttatggggaagaggtccaagaactttccagcctaggaaaaatccaccttaacttccaggcacaggaggatatgaggggacttggctagtaaagttagcgcttagctaaagagtttattttactaatgaatactaaatctgaattccctcctcatcctctcctagtatttccttcagtaatatcagctgtgaaacaaattgctctcatatcaaccccaggataaatgtttaaatatatttttcttgatttgaacataaaattatacattcataaggcatatgtttcactataccagaagttcatttctcattaaaaaaatcagaattctattgtatttctttctaagaaaaccttccagaatgacaccaattcatcttctcacaaaattgcattgttaaaaaaaaaaaaaactctacgcagtgataacctaaaattctatcagctcttcattcaaatagtgaaatagtcttttgaagtgtcttttaatattgaaatcccctgggagaggtaatgaggggaaatagaagtgtgggaaaaataaagggagagaactagtggaaaacagcaaatcacattttgcctagggatggcccagatactgtatttaataatacgtattatcaagagttgtcaagaaccaactagaggaacagagagagatggtggaatagaaggctataccttgtgtaccccctgcaggaacaccaaattgcaaccactatctgcatacagaaaagcatcatcatgagaaccaaaagtcaggtgagcaatcacagtgcctggttttaaattcatattgttggaacagacattcaagaggtcagacagagacagtcagtcttaaatcgccgatgccacccctcccccgt

SEQ ID NO: 1564219 - DNA, 4001 bp, Homo sapiens
aacacctcagaaagtataaagaaaacacagtcagcattaagagtactcttttaaattgaatcaatttaatattattttaaaaactcattacaacctctttattgttttatttcattcaatattggtaagaactatgtcctagcccagcattcgaatttgggaaccagtgttctaaattcatcatacagagtactttcagtagtaaaacaaagtatatatagtagtcacaattattacttgatatgtaaaataaaatatgcaataaaactattttgtaactcaattttaatgtagtttcataacttggtcagagagaacgatttatccttaagatataataaaactcacatataagaatcctaaagctcactccaagaagatggtccatttatgcccatttatttttcatttaaaaaaccgttgataagacttctgttgaaaagttggtccatcaactggtatttcccttctatactaactaaaaagctacatatgttaaaatataccatctaattaattcattaagacatcatttctttgagagatattatgaagtatgaattgtgccattctgcttactagcagtgaccccaagtggccaccagagaaacacacgtaattcaacttcatattttttccccgtttcagtgttcaagaggttggatcaaattgctacatctggagaggtctgcagattaacctttggttaaattcactggagattattgtaaaagaactgcaatttgagttcctgtgaggttggactagtcaagccaaagcttcaaatgcctaacataaggtgtgaaaaagacttaaagtcccaatgttcacataaaaatgctattattaaagacctaaataattttaccccagagcagtggtaatttttatgtcaacaaagcacccctggaaaaggacagaacacaactgaagcaacagataatttggatcacttcgatctgtcctagatctaccatttgcactttacaaaatcaaaatacaagaatgctatttatttcccaggctttgaactgactaaatcactctcgactgttgtcaaacacaagtaacttgctttgtcggtctctttctctaaaaccaaaatcttttaattttacttaccaattaggggcctaagtcctgcatgtaaaaattagagggggcagaaagacaagagaaagaataatccaaaagaggactaacagaaggattagtaaggaaaaatgcaaggttgcaagagccttctatatcccttaaaggcccttaaatcacaggctgtctattcctttagcctaattgctgtccatagaagtgatgacatgattctagacctaccaggagactggtcatctaaacagaaactcttgcttttctggctctgccctggtgttttaggctcaggggccccattctctgctacactgggatcattctggagcacagtttcctcagtcttcggcatcttgatgttatctggaattggagagaaaagaagaggcaagctgtgtaagacctgactctcgcccagggacaaaaagaaagagcgctcttcaactacaattgtgtgtcctggtgactgaacccgctgccgtcagttgaaaggattaagtaccagggctcaaaggttctcaaaggaacaactagggtcttcaaacaggcctcgaggggaaggggaattagtggcacttcctttactgaaatcaaagaagtctggtcttgggcaagcagaagaggaaaacaaggcccagagatggacaattaactcgccagaagcggggcacactgcacattactgaccaagctaggaaaggaatcttcctcggctctggctacctttcattggtcctggaataccttctaactccttagctactgctccagaccttcctgaaggggctctgccggcctggactcaggcagcagggtatcccccacagccctcgcgaccctggtccctcacctcctcctcgtcctcgactggcggcctcgcctctgcgtctgctagcgaagcccctctgcctccccaacctggtctgggaagtaccattgtagccaggaagagaggggagatcatcagggaggagtaggacggaaccatggagattatgaggtccacctggagcgcacccctacctgtgacacaagataggagagtccaaacatgaaaacaaagggtgatccgtttccagggtagcggggtggtatcacttgcccagggtgccttggaaaccaagacggcaggaaacgcaagcagagcctcaccattgggtgacaaaggcaggaggctgagatagacgtaaggaggcttcatgtccataccctcccgcccaggctcggaacccctcaggagcttggaagtcatcttctcaagccctgctcctcgtgaacgaactgttcaaagcttttatccttactgccccagaaacaaaaatagcatttaaataactatttagggggaaaaaataagcgtttgttgtttatttgtttcacttcatgctgttcatacagcccctacaaatgaagaaccaacagggctacaaaattccagaagtctgttttgggttttcttttatcttttgtataagtgaatcctccacacaaagtaaggagagacacatgaactgttaaactctcattttacaaatatgcaaatcaagaatcattttaaagggctagccacagaagctgtgtggtaaaggggcaagaccataagcctgagaggaatcctacattttggtttgggttctttcagctcaattcttggcatgttcttcattgcaatccaattgtgagctttggagctcatctgtaaactgagggcactggaacggacgatcctaaggggcctcatgttgctcactcttcagtcctagtctactttgtcactccactggccagtcaccacagtgatatgaggacccctggattggcctatttccagcatatatacatttccacactatactagttgatccctctcttaccctgacttaatttcttaacacattaacttgtttcttttataaatcaagactatactttgaccagattctcaccacaatcctcgccttgttagtggcaacagtaccgtgtgaatatcttgcacaacatggggattttgaagaagaaagttatggggaagaggtccaagaactttccagcctaggaaaaatccaccttaacttccaggcacaggaggatatgaggggacttggctagtaaagttagcgcttagctaaagagtttattttactaatgaatactaaatctgaattccctcctcatcctctcctagtatttccttcagtaatatcagctgtgaaacaaattgctctcatatcaaccccaggataaatgtttaaatatatttttcttgatttgaacataaaattatacattcataaggcatatgtttcactataccagaagttcatttctcattaaaaaaatcagaattctattgtatttctttctaagaaaaccttccagaatgacaccaattcatcttctcacaaaattgcattgttaaaaaaaaaaaaaactctacgcagtgataacctaaaattctatcagctcttcattcaaatagtgaaatagtcttttgaagtgtcttttaatattgaaatcccctgggagaggtaatgaggggaaatagaagtgtgggaaaaataaagggagagaactagtggaaaacagcaaatcacattttgcctagggatggcccagatactgtatttaataatacgtattatcaagagttgtcaagaaccaactagaggaacagagagagatggtggaatagaaggctataccttgtgtaccccctgcaggaacaccaaattgcaaccactatctgcatacagaaaagcatcatcatgagaaccaaaagtcaggtgagcaatcacagtgcctggttttaaattcatattgttggaacagacattcaagaggtcagacagagacagtcagtcttaaatcgccgatgccacccctcccccgta

SEQ ID NO: 1564220 - DNA, 4001 bp, Homo sapiens
tgtatcccaagaaagatgtaacagcacagcaaagggattgaaaagagatgaggtgagatcccggtagaccagtaaagaaacaaaaaacagtctaggtgagatataatgagagtaatgatcatgaaaatggaaaggagaaaatggatttgagagatgtagagattaactctgctggatgaggaaactgattagatatagtaagtatgtgtggttgggagaatgggagcatcattaacagatgtaggtgatacaaggaagatgagtgggattaggagtgttaagatgattgcttccactttaaatagactggtttagaggtgtcagtgtattattcatttggaaatgccggggaggttaactgaaaatttaggactagagtttaggaaggaggttaggtctgaagataaatatttgaaggtcactcaaatagatgtgatcattgaagccatctgagtaaaaatatttcggggttcaagcagtaatcttcaatcttgagcaggaatcagaatcccctggggatttgttaaaccacaaatgggtcccacccccagggtttctgactcaatatgtctagagtggggctggagaatttacactctaaaaaaattctcaggttttgctgttgttgctagtcaagtccacacttggaggacatagaaaattaagtctattactttttatctcagcattaacttattcataaaaaagataacttgtgccatccgggcgcggtggctcatgcctataatcccagcattttcggaggctgaggcgggtggatcacgaggtcaggagtttgagaccagcctgaccaacatggtgaaaccccatctccactaaaaatacaaaacgtagctgagtgtggtgaggcgcacctgtaatcccagctactcaggtggctgaggcaggacaatcgcttgaacctgggaggtggaggttgcagtaagccgagattgcgccactgcactccagactgggcaacagagtgagattctgtctcaaaacaagacaaaacaaaacaaaacaaaacaaaacaaaaaaacaaaaaaccttgtgccaatgtcagtatcttctacgtcattaaaatagtgtctaacacagtttatctatcaattggaacaggaaatcgtatttctactagttttttgttagaaactgtcttgtcaatccataattgagaaactaagactgcccaaagaatatgctccaaaatatggctattgtaggaagggttctaaaaaattcttactttcctttcagactcggctacacaatgtttctacattacggtgatagactttctggaaccctgtttggtggtctccactaacctgctagctttgtcagcagccaaatatttatttgagacttctgtcccatataagcaatggcttgaaaagcacttagctgtttacttttcatcttactataaattatttatccttcagtctataaatggctatttgtaggattacacaaattttgaatgctctgataagaggactgcagcatccaaattcatgcataatccataaaaagcacatgtaacctacaacctcagctgggctgacatatgcaatagattctctgagcatatataagcagtgcgaattattaaccagttaacattagcaaatttatttttgaaacaaagtttatgcacacaagcattctctaatgagaaataatatttgttataaagatccaataaaaacataccttgagtagatttttctacttctttcctctttctactctggctattgtaattcatcctcagctcctggttatactcgtgcagggtctccctggagttgtatgactgtcttggttttcttccatcttcactctcatcagaagaactggtgtaagctagatccatttcatgcttgacttttggtagaggctggtagggtttgcagtcagtttgctccatctctgattaagcaagctcagtttcatgaaaaaaaggatgaggaagtcctttaatgcaagcagtcctggaagagaaagggaaaaacacaagccttcttagatttatctttttgtgaggaaatgcatctggcagattcacaattggtcctgataataccatcaaaggagagaagtaaaagacaaactagatgacatgaagctagccggaggcaataataacactctgtgttacatgcatacattgtcaagcattaaggattaagctggaggttgcagcatcagaaaatactcaaggtaaaagagagacagccttcaaaaatatttgtattggaattcaaatagaggacaacgttgttctatggtgtgtgcgtgtttttaatgttaaaatcagtggttagattaaaaaacgttatcagatttgaaagtggtgaggagtacaaagattaaccctgcacattccacatttgaaatgaaaactggtaagagaactacattcagaaagaacacattcttgcttctggtttaatattacatttaagacaggggctctgagtaagggaaggattctgagtgagagagctcatggaataaagtatccttgagggggactgaactctttgtgctcatattgtggcttttgagcctcaggcctgcagagcattcttaatgagttaggtggtggtaaatttttgttcttcatagtactgagaggatgtaaacacttctggtgagtatactggtacagcaacagcaggatctaaatcagttttggaaatagcaattttaaacttcatgataaatcaccgaaagaaccccctttccccatagaatgctgagctaggagccactgaaggtcttagggccagtagaggcattaactgctctacttagcacggagagtttcgagacgatcaagtgtcatctgagatgtcaaagtcctctgtaaatttaaaagccctgtaaaaatgttcttattttcattctttacattattttgtcatcaccatttcagtccactgttgcaactttgcaacttggtcttttcatacaatgtttaaaaatgtagttagaaaccaattaactttatgattttattttgcagtgaaactgactcttttatttttcttcagctcttcaccatatgtattttcaaagaaatctatagacatccaaatggtggctcctctatcatgtacactatctcatattttggaattcttattgcatttatgccaagcacatagaacacagaaatcattcaaaaaaggcttttagcttttcaaagtatgatgtaggctgatttttattgatcaatttgattgattgattgattgattgatttagagacggagtcttgctcagtcgcccaggctggagttcagtggtgcgatctcggctcactgcaagctccgtctcccgggttcacgccattcttctgcctcagcctcccgagtagctaggactacaggcacccgccaccatgcccggctaattttttttgtatttttagtagagacgggatttcaccaagttagccaggatggtctcgatctcctcacctcgtgatccacccgcctcggcctcccaaagtgctgggattacaggcgtgaggcaccacgcccggcctatgtaggctgattttttaaaaaaggcttacacatttgactgatatatgttttaaatggttcttcttttgtggtatgaacagtttcacaagtcaaggtcttcttttcctaatcaaatgtgaaggtcttgaaggcaggatgtgagtcttaatgtctctttatatcccccacaccgctaagtattactttaggcacacacgtagtagaaactatttaactcctgaacctacaaactgtgtatggagacacctagtttggtttgaactaatatgagagatgagcatgcttaaagagaaagcagcagatatgaacatatacatatatatatatatacacacaccaatgattcaacaacaatctaatctcacgccagtatattggcttcatatactgtctacacacccataacttctcagtttatagcttcagcatgggtcttga

SEQ ID NO: 1564221 - DNA, 4001 bp, Homo sapiens
cagaggttgcagtgagccaagatggcaccactgcactccagcctgggcaacaagagcaaaactgtctcaacaaacaaacaaacaaaacaagcaaacaaaaaaaagtattaacaaaatgttgacctaaactttttaaaatcatagatttgtagccacatttcttaccacatatttcattattatatgaatgtgaaggtaccacaggtctcattattccccaaaaacaaagatagtaccacaaactctcctatatctagcacagttgaggaatctggtgttctggtcagtcaaattgcttttgtttattgagagttcccataaatagcaaacatggattaccaattttcaaaagaattaagacacaataaaatgtacttaagtctaaaactacacaggatataatttatttttcacggatgattatggaaaggaactccaagatcttgcagtaattttttaaacttatttttattgcaatagatttatcttccagattaaacgttttattttgcatgccataaaaatcctgaaaaaaaaacaagttatgaattgtgaattctgtctccctacactagttcataaaaaggttcccaatgtgttaaaaatagacattgtttctggtacataaatgagaaaacctggtgctatggacactgcagaaagacaaaactcagaaacaaaatatttagatttttttttttttttttgagacggagtctcactctgtcgcccaggctggagcgcagtggcgcagtctctgctcactgcaaactctgcctcccaggttcaagcgattctcttgcctcagcctcctgagtagctgggattaccacgcccaactaatttttgtatgtttagtagagacgcggtttcaccatgttggtcaggctggtctcgagcccctgacctcgtgatccgcccgcctcggcctcccaaagtgctgagattacaggcgtgagccaccgcgcccagcaatatttagatcttaaagcagcagtttgacactattttgtactaccacgtagagctacgtacctttaaagtccatggaaaaaaaatcatcattgtccatttttaaatctctggctcaagcctgtgaaataataacatattttaatactctgttttatcctctagtttctcaacaaatttctttccagtgaaatgtttcccgttacttgttatccaaagggagaaaaaaaggctgagtaaagttaaaagcccatgaaagggcttttgtgaggggcagggccaggctgccaagttacataaaagggaccttttcttaccataagtctgcctggcaacgggggaaatggagctgagtggtaccctgttattggtctggctgggtctcgctgcttcttcctaattggctcaaaatccgcttccgctaccaaccgcacattcaaagcatccaatcactcacggtcctttttcccgctctgtgagaacgctagcaccttcagtatcctgcccccaacggtcatgaacagtcctgcttcaacgtaatttaggtccttcagcatctaaacaacaataactactatctccggttttcagtggcccaccacaactccccatactcctccatcctcatcaaaaaacattacattgcccccaacggtcatcaacagtcccgcttcaacgtaatttaggtcctttagcatctaaactacagtaactactatctccggttttcagtggcccaccaccgctccccatactcctcaatcctcgtccaaaaacattacatttgcccatcttcgttcgccttgagagcgacgagcagttctgtagtacaaagtcactgccttagggccgctctaaaaagttttggcctaatggctataatatattcttgctagttataaactacccaactaacttgtgcttgaagcctattctaccccttcctgcccactaaaccactcacctcagccgcagccaccaatgccgccctgctctctccacaacctccgtccacagcgcacgaggacgttcagaaaactccgccccctagcgacgctagcggtgtcacgctaggccactaaagccactcccacttggcctttacgctgtgtcacggagcctaagccttgcgacccagtctagaccttagatcctggggatgcagttcagagagtcagtcacttggtgagttcagggtgagaataactgagagtaagcaaatatgatgtaattctgaaagcataagacaatgaattgagggaaaagtgcagatggccaggattaccaaaaggagagcaggacttcacacacacaaaaaaaagaacagaaaaagaaataaagcaagtagacattgttgatcactggttatgcaagagtggcaaaggtcagaaatagcagaaatattagaagctgaggagactagtcgaggccagcctgatcaacaagccagactgcacctgaaccaaaaaaaaaaaaaaaaaatccaggtgtggtggcacacgcctgtagttccagctacttgggaggctgaggtggaaggatcatttgagcctgagagtttaggtccaataagccatgatcccaccactgcactccagcctgggagacagcgagatcatgtctcttaaaaataaaaaataagtcgggggcagtggctcacgcctgtaatcccaacactttgggaggccaaggcaggcggatcacctgagatcgggtgctccagaccagcctgacaaacatggagaaaccccgtctctactaaaaacacaaaattagctgggcgtggtggtgcatgcctataatgccagctacttgggaggttgaggcaggagggagaatcgcttgaacccgggaggcagaggttgtggtgagccgagacattgcactccagcctgggcaacaagagcaaaactccgtctcaaaaaataaataaataaataggccgagcacggtggctcacgcctgtaatcccaacactttcggaggccgaggcgggtagatcacctgaggtcgggagttggagaccggcctgaccgacatggcaaaaccccgtctctactaaaaaaaaaaatacaaaattggctggatgtgctggcgcatgcctgtaaccagctactcgggaggctgaggcaggagaatcgcttgaacccgggaggcagaggttgcggtgagccgagatcgcgccattgcactccagcctgggcaacaagagcgaaactccgtctcaaaaaataaataaataaacaggcccagcgcggtggctcacgcctgtaatcccagcactttgggaggctgacgcaggcggatcacctgaggtcgggagttggagaccggcctgcccaacatgaagaaactccgtctctactaaaaaattacaaaattagccaggcgtggtgacacatgtctgtaaccagctactcgggaggctgaggcaggagaatctcttgaacctgggaggcggaggttgcggtgagccaagatggcaccattgcacttcagcctgggcaacaagagcgaaactccgtctcaaaaaaaatgaaaataaaataaataaaaataaaaaataaaaataaaaaaagccttttagttccaagacgtttctgttgccctgcctttgtccaatcattaggaaactaggagactcccctgcagtctcacagcaagctcgcatgtcccacccatctccaaaccaaatggcttgaggggtggaatatgtaagtaaaaatttgattccagctaaatctaagcatgatgctaatctccactcagagataacagtgtgaaaacatgatgcctccagatttgtagacaaacacagaatcaaaacattaataagcctcccacttcttcctatatacccctcttttaagccttgtgcacctcaggccagatatggagctggctaacaggataaagaagagagattgtggctccagtttctgggaacattaacagagttccttcctgatcctgaaagtctcagaatcagtcattagatctcgtggacaagatgaggttactaaaagtaa

SEQ ID NO: 1564222 - DNA, 4001 bp, Homo sapiens
tgtctctctctccccaccccaatctatacctcccctggccaccaccccacttctacacctctttcacaacccctactttcctccccctcctccagtcaccacccctatctctgaagttattcgtaaaggtaccattgtctcacctccttcccccactcttcccagccttcttcccctaccaccccggcccccgccaccacaagcctgccctctgaaaattaattcgccatcgagatatacatgcttcggttctattttgcatttctgcactcaatgaggtttttgcagccagattcccttcccacagtcgaagcaagtatccctccgtgaaaaattcacagcgttacaccaagggcagtcccagtcccctggcctgcgatatactggaggtctttgctgatgaggttcggagtatctcctgtctcttgggtgctcctgatggtctattctgtggggccccccatcagaccacaggctagtatcaaaggcctcccagtcggaaggcagctgaggcggaactggtgctgtgactgttgcttgtggaggggatatagtgggtatgtctgagaaggaggaaaaagggcttgagtatgagtatgagtatgaggcagggagctggacaggaagaggttctgatgaggctctggaccaggggttcgtggttccagagaaataagatgtggctgtttcgaccgaccggagatctccctccttctgcccccaataggtgtacttttcctgatcagcatctccaaggagctgcaggaggattctctccagcttctctgtggtctccatggaggcagccctggcctccacgtgggggaactgggtctccatgggggcagccccagcctccacagggggagccatggcctccacaggggcagccacaacctccacatccctctgctcttcttctgctccttttcctccagcagcaccagcagcagccaccgccgcctcttcttcctcctcagctgctccttctgtgcaaacccctccggcagtggccaggcctggccaccctgccccctgctcccactcatggggagacaccagctcctggagagaagtgggcagggctgaggtgtgttctgggggcaaggcgggagcactaagcagggtaggacggagctaccaggtgggaagggcggggcagggcgaagccatggagcagggtggagaggggtgggaatggggcagggcagtggtactgggcagggaccagttgagggatcttactgcatggagcggcttccaactcaccttgtctctctctttctgcacctccacgaggctggtctgggccattcttagccgggaggccgcctccttgcgttccgtctcctgctgctccctgagcttcttcaggtctgatgccaaggcctgtgcggctgatttgtgcagtttggcgaagccgtgcagccaccgcaccctgtgcctttgtagctgtgcctgcctgtgggcaaagcgcactcccaaggccaggctgccccaggtgcaggcctctttgacctcactgggcacctcgctgtcctccagtatggccctcagcttgtcttccaccttctcccaggataaggatatattctcaagatagaactcggggcctttcgtgtgcctggccattttctcgttgatgaaggccaccacgttgctatgccggaacccgctactggggtcctcaggtctcaaggccatgatcgcctaggggtttaacggtttcactagccctgtgtggatggagcagccaataggttcctttcctcccccttagcccctcccctcatccatcttctcccgccctcttgtccccgccctacccgctctgacaagaccgtcctaatgaccccctgaccggcttgtcctaccctaggacacctcccaccaggcctcacctcttcagccagggccagaggaagtacaggccaaccccgctgtcttaacacgcccgaagagagaggaagatctctctccctcctaaggttccagggaaaggaagactcagggccaacgtcggcttttactctgggactgttccaatttccagagataccaggagtggaagggagtgagtgaggaaggcccctgccactccattgggatttaagggaacctgtcacatggttgggagcccttaaaggtcggaagaaacaggagtggtcagaaaagacttagaaccaagaaaattaagcccttataatcaagtcaaaaaagtcccatgtatccctccctcttgacaatggtttgtcccatgccaacggctagtagggacccccctagaggttgaagggggaataatgggtatgttctagaacacgaaaaagcccccaacccatgaaaattctgcagttcattttccagactcctaaatcctagtatacaggttagtgacctttttctgaaacgggcaagatagcaggcatttgaggctttgtgggcaaaagattatcccaactacttgtagcacaaaagcagccataaataatacctgaagaaatgaccatggccatgttctaataaaagttcatttataaaaccaggcagttggcatgatttggcctgtagatgtcaaactcccaatctagattcacatttcatacatgtcctacagacacatacaatcagaatgttcatgatatgactcccccttttccctgttaaaagaaaaacgttagacaacgttaacagtttgtttacacataaacaacaaccaaaaaaaaaaaaaaagaaaaacgagtcatgaatttgtcagtactcagaaccagaagagtttcagagagctattcccagcaacatgagaagtgaatttttataggctgagtttggacacaaaagagaaaaatcacctgattggctacagcaaggcatttgccttatttggacatggtcttgtcacttgactgcctgtaattagctggagcctggctagttgtgtttggctgaaattaggctgtcttttatacagcttatgttaagtttcagtctgtttacatgctaagttagtttgcggtttgttagataggaactcaaagtatggaaacagcttcaaactaatggcctcttgcttattttaatatatgcaggagatgattcccctcctaaattcctatgttgtccaatacagaaacctcaaaatcaaatttttaagttacctacccttcataccgacccttaaaaacaagtcaactaagagacaaaatcttgttgctgtgacctcagaaacttctaagacatccatgcccacttagggaatgtccatgtttcttctcaaataatcttcctgtctttaatttcttcataatccctaatcacttcctaatctttcctatgatcatgtttctcttaagcttaaaatcatttgatggatccttgtggcacactccttgtcctgacattagaatctcaccccaggataccattctaatttaactctctccacaatgttatccaccatcatttatgtacctaagggactaagccatacagggatacactgattttggcgttttaagttattttcccttctgaaaaatcagagcattcattttttattatatgggcattatgttctattctatgaactacatttaaaaagacaatatttcttctctaagggtcctatgtcagataattagagaggaaaaagacaataaatcaagcattaaaatattacctaagaaggtagttaaaccccagaggcataaagtcccaccatttaaatgctgtttttagatgctgttttgtgatttctttccttctcagcttgtatattttatttatcagccatcagtggaaagggttcatgttttggcttattctagagtgacttctacagaaagagcatccagaagataatgtagaaaagagaatggtgaggaaagggggagagactggagtcaggaagacccattagggagatgctaaagcaattcaagaagtaaactaaagcagtggaaatagggatggagagaagagtgtagagagccatttggtag

SEQ ID NO: 1564223 - DNA, 4001 bp, Homo sapiens
tgtgaccctggccccaactccaagtgacccactgcttcattgcccaacactattctgactgtggaatctgcctgtctgttcagattttctaacgtaaaaattcatttggctcaggattggtcaaatatccactcctgctccaattatctaaagcctacatgaagggagagagtgtaggtgttacatactgcccaggtccgacagatacttaagatagggagctagagacacacacacaaataaaaactgcagtagttctggagtgttgactactaatactctgaaatacaaatggagtcattaaaacatgtctctccctgcctgtcatctacatcctcccacccacaaccccgcctccccgcccccctactgtccaatcttcccactcatcccctttcccccactccacccaatccccctcccacctctcccctctccccctgaagattgatttcccattgagatatatttctgttctattttacatttctgaatttactgaggcttttgcagccagattcgcctcccacagaggaagcaattttccctccatgaaaaattcacagctttacaccacgggcagtcccagttccctggcctgcgatatactggaggtcttctctgctgatggagttcggagtctctcctgtctcttgggggctcttgagggtctattccctgggcctccacatctgaccacaggctagcatcagaggccccccagttgaaaggcatctgagttggaacccgttctgtgacctttgctggtgaagggggtatattgggtatggctgagaaggcggacaaagggcatgggtatgagtatgtgaatgaggtagggagctggacaggaagaggctccagtgagactgtggacccaagcccagagaagacagacatggctgtttgtactgacctgagatctttctccctctgccccgcaaaggtgtaatttgcctgctacaatagctccgaggggctgcctgaagcctcctcccagcccctgcaagacctctgcgggggcaggccctgcctctgcatacctctcctctccttttcctccagcagcaccagcagcagccaccgcctccttttcctgctcacctgctccttctgtccaatcccctccggcagtggccaggcctggaaacactgtagcctggccctgtccctggggaggtgccagctcctggagagaagtaggcagagctgaaacacattctggggacagggcagggggtccggacaggttggggcagggcagaggcattggacagggaccattcgggggatcttacggcatggaagagcttccatctcagcatgtcccgctctctctgcacctccgcaaggctggtctcggttagctgcaactggaaggtcgcctcattgcattccatctcctgctgttccttgagttccgtcaggtttgaggccaagaccagcgcagctgatctgtgcagtttggcaaagccttgcagccactgcaccctgcggttttgtaactgcccctgcctgtgggcaaagcgcacacccaaggccaggctgccccaggtgcaggcctctttgacctcgctgggcacctcgctgtcctccaggatggccctgagcttgtcttccacctcctcccaggataaggatatattctcgaagtagaactcggggcctttcgtgtgcctggccattttctcgatgatgaaggccaccacgtttccgtgccggaacccactactggggtcctcaggtctcaaggccatgatcgcctaggggcttaacggtttcactagccctgtgtggatggagcagccaataggtttctttcctcctccttagcccctcccctcatctgtcttctccgccctcccacctctgacaagaccctcctaatgaccctctgaccggcttgtcctaccctaggacatctcccaccaggcctcacctcttcagccagggccagaggaagtacaggccaaccccgctgcttaacacgcctgaagagagggtggcctctttccctcctagggctctgcgggaaaagaagcctcagggccaacccatgaggattttactctgggactgttccaatttccagagactgtaggggtgaaagggagtgagtgaggaaggcctctgccattccactgggacaaaagggaacctgccacatggtcgggagaccttgaaggctgaaagaaacaggagtggtccggaaggacttaggaccaaaaaaagtatttgtgaacaagttgaagacttatccctccccatcataatggtttgtgccatgccaggggagtttcgcccccaactggaatattctagagcaggaaacagccccaacccctcagttgcccttggaggaagagggtggagccaggagcggagcttatcccctgtttgctcaggactaaacatcccagacaccctaacaaatcctggcctgcctttcctcccttagctcctctttccccacactcctcccatcaccccttctcccactcctcccctactgaaacgccttgaatcttgaagcaactgtgggagaaagagagttaggagtagcataaatacacctttttaccaaaacatgaaatatcagagatcttccatcagagggatatgaatatgtctcttaaaaccttcggccgggcgcggtggctcatgcctgtaatcccagtactttgggagaccgagatgggcggatcacgaggtcagaagatcgagaccatcctggctaacagggtgaaaccccgtctctactaaaattacaaaaaattagccagatgtggtggcacgcgcatgtagtcccagctactcgggaggctgaggcaggagaatcgcttgaacccacgaggcggaggttgcagtgagccgagatcgcaccactgcactgtagcctgggtgacagagtgagactctgtctcaaacaaacaaacacaaaaacaagaaaaccttgaatgactttctgagacccacaagataaatcagacaaatctcaggttgagtccagcgttgctacgtattacatgacattgtactgtaactgaatctgtttctacctatggatctatgatgatggccaatgacaaaagggcatgtaaagttgtaggagtaatgttttctatgatcccgtatttgtgtgtatgtgtgtgtttgcatatgtttgtatgtttctataatcttggagaacagaatgagagaggatatatagcagactcaacattaattatctctgggaagtggggttggactggaggttagaaaaaaagtttttaactttaaaatacatttttctctaatttcgcttgttacaaagagcatataactaactatatgtatgcatacatcacaaatctggaaagttatatactaacactttaacagtggttatctttgggtaataggaatacagtactttaaaaaatattcttgacatttttctctattgtaaaattgtttataataaacgtgttatgtttttcaaaattgaaaaaaaatgtttctcccagtaacagctgatcattgtaaataatttttaagtgcttggaaagtacttctataatcctacccttccttcaacctgggtgataatccctcttaatagttatatagtcttttagataggccatagcaagtaatttttagtttttcaaacgaagcatcttctctcttcctctgtggcccttgcacaggctcctctgtgcatgcacggatttctcctcatcccctcctgctctctccactcccattcttttcattcacctaactcctatacagtttctattcccttttcatgacagtgctcaaacatttcttcctcttgtatttcctgattctccagaccccacctcaagctaggctgaattgtgcaacctttttgtgtccccataacaacttgtgcatatgtctgacggtacttttcacactgtattgtaatctgtgattttctcgtcatttttctccatcaactggggattcctggagggtttagtctgtgtctt

SEQ ID NO: 1564224 - DNA, 4001 bp, Homo sapiens
ctgactgacaagagtgagattgtctcaaaaaaaaaaaaaaaagtaatcactagaaaagaagctacatatgtacataacatccaaataaccaagaggagaaaaaaatgggacttgattaatcaaaacaaaaacaaaaaagaaagaaagaaagggggagaaaaaaaaacaagggctgggtgtgctggctcatgcctgtaatcccagcactttggaagccaaggtgggtggatctcttgagctcaggaggtcaagaccagcctgggcaacatggcgaaaccccgtctctattaaaaaaaaaattaatacaacaattatcctggagtggtggtgcacacctgtagtcccagctacccaggacgctgagacgggaggatcgcttgatcccggggatgtcgaggctgccatgatcgcaccactgccctccagccagggtggcagactgagaccccatctcaaaaaataaataaataaaagcaaacaagaaaaaaaaaggcttgaaacatatctgatagataaagggctaatcaacacaatatataaagaactgcaaatcagtaaactaagagcaaataacccaatataaagacattaaagggtagccacggacatctcagacgacgaaaaacaaaagacagtaaacgtataataaaacatgtaattgcaaggtgatccgggaatagtaagcgaaaagcaacaattaaatactattttctcatccaccagaacgccaaaaattaaaaagcctaacaatgtccagggctggcgagaatgtggcagaaggtgatgtcacataccctgcaagtgggaatctaaacagattcagggttttggtttttttttaatcgcaattaggtggcctgttaaattttttttcttgagacagagttttgctcttgttgcccaggctggagtgcaatggctcgatcttggctcaccgcaacctcgacctcccaggtacaagcgattctcctgtctcagcctcccaagtagctgggagtacaggtatgtgccactacacccagctaatttttttgtatttagtagaaacggggtgtctccatgttaggctggtcaggaactcctgacctcaggtgatccacccaccttggcctcccaaagtgctgggattacaggagcgtgtgccactgtgcccagccactttttttttttttttagacggagtcttgctctgtcgcccaggctggagtacagtggcgccatctcagctcactgcaacctccgcttcccggattcaagtgattctcctgcctcagattcccattagctgggattacaggtgcccaccaccgcctggcatggtggctcacacctgtaatcccaacactttgggaggccgaggtgggcagatcacctgaggtcaggagttcgagaccaacctggccaacatggtgaaaacccgtctctactaaaaatacaaaaaattagccaggtgtggtggcggatgcctgtaatcccagctattcaggaggctgaggcaggagaatcgcttgaagccaggaggcagaggttgcaacgagctaagttcgagccactgcactccagcttgggcgacagggcgagactccgtctcaaaaaaaaaaaaaatgtaaacacacattccctttaacccagcagaacatgggaacccaagggcattcagcctgtggcgcgaccaggcggcctgacttgagctcacgtagaaattcggcatttttgaaccaagagacagcacttgggatccggaatgtctggacttgggcacggcgctgtggagctggcgccgttgggagccatgcgagttctgggtcggtaggtcacctcagaggtggggagaaggttctctgagaccgacatgggggctagtgctggcaccaccggacatggggcatttcagacacagggcgagcacattccctagttaccagggttcattcgagtcagtcacgtcacaggctggcaatgggctaactcctcctcaacaatcacacggggcttgcctcatagaatgttttaaaaaaggaaaggaggctggcgcaggcgccaaccgtctcagaaccctgagcactgccccacccccaccctgcccgccatagcctgggctgttgtgggggaggggtgaccatttatcacgaaacaaaaaattgcgccacagcagctccctccctcccccacctttacggttgcagctgcacgtcccacgtgcagcaccaccccctgacacgtgcggcaccaccccctgacacgtgcggcaccaccccctgacacgtgcggcaccaccccctgacacgtgcggcaccaccccctgacacgtgcggcaccacacagctagtgccggaactttttgtgcagagaaagaagaccctgcacccgcgcggagggagcccttttgagattgcaggagagaagatgagaatgggactattttcaataactgtgcacatgcaagtcacaaacattccagatcccttgacttgcttgcggagggagcggccggcggagggagcggcaggtggagggagtggcacgaggcatgcggagggagctgcaccgacatcacataaacgcactgggcagctcgcaggcgccattcgctcttcagacgccggagacgtaggagtgggtcttcagactccaaaggggttggactaatggcggatgctgaggcgagggctgagttcccggaggaggccagacctgacaggggcaccttgcaggtgttgcaagatatggccagccgcttgcgaatccattccatcagggccacatgctccacgagctccgggtaagttctcctcattgaagtctgggtcatgcagggccacgggcccggtggcttcaggcctggtggccatgaggccgtgtggtgaagggagagccttcagaggcacaatgggctgtgtcgtaatgccctgtcttgggctgttggggcccggtcgagcaccctagatggcagcgaggcactattcccgccaacccaagggtcggtcggttggttggtcagccgcgggttctggagcccgcccctcaatttacccacggccaaagttctggaggtcgccaagatctccagttgggagacaaaggatccagactggactgaggtggcgggagaatgtcactgggatcagattgggctagctgtggttttcattttagcggggagcagggcttccctggtaagcagttgtactggatccccgagggtgaatgagcgactctaacccaggatgtgaggataaaaagcaattaaaattccagcctgggcaacatggcgaaaccccgtctcttaccaaaaaataaaaataaaaaatgagtcgggcatgggggcgcacacctgcactcccagctattcgggaggcttgcttgtgctgttgggtttgctggtatgcagttgatggtttttgcatcagtttgagggatattggtctctagttgtattgtagtatttggttttggtatcaaagtgtaatgctggcttcataggatgtttcaaagtgttccatcttaaattttttggagtggctgggtgtagtggctgccacctgtaatcccaagcactttgggaggccgaggcagacggatcgtgtgagcctagaaactagttcgagatcagcctgggcaagatggcgaacctctgtacaaaatgttacaaaaattagctgggcgtggtggcacgtgcctgtagtcccagctacgcgggaggctgagaggctcaggttacagtgaactgagattgcgccaccgcactccagcctgggcaagagcgagaccgtgcctcaaagaaaaaaaagttaaacccagctgagggcggtggctcacgcctgcagtctcagtacgtggggcctgaggagggaggatcgcttgagcccaggagttcgcattcagcttggcaaacagtgagaccctgtctctaaaaaaataaagtaaaagaaaccgggaattgagtacgaattggaacaaaaatgagctgttgaatttgctagtatgcggttgatggtttt

SEQ ID NO: 1564225 - DNA, 4001 bp, Homo sapiens
ggtggcacacacctgtaatcccagctactggggaggctgaggcaggagaattgcttgagccggggagacggaggttgcagtgagccgagactgcgccactgcactccagcctgactgacaagagtgagattgtctcaaaaaaaaaaaaaaaagtaatcactagaaaagaagctacatatgtacataacatccaaataaccaagaggagaaaaaaatgggacttgattaatcaaaacaaaaacaaaaaagaaagaaagaaagggggagaaaaaaaaacaagggctgggtgtgctggctcatgcctgtaatcccagcactttggaagccaaggtgggtggatctcttgagctcaggaggtcaagaccagcctgggcaacatggcgaaaccccgtctctattaaaaaaaaaattaatacaacaattatcctggagtggtggtgcacacctgtagtcccagctacccaggacgctgagacgggaggatcgcttgatcccggggatgtcgaggctgccatgatcgcaccactgccctccagccagggtggcagactgagaccccatctcaaaaaataaataaataaaagcaaacaagaaaaaaaaaggcttgaaacatatctgatagataaagggctaatcaacacaatatataaagaactgcaaatcagtaaactaagagcaaataacccaatataaagacattaaagggtagccacggacatctcagacgacgaaaaacaaaagacagtaaacgtataataaaacatgtaattgcaaggtgatccgggaatagtaagcgaaaagcaacaattaaatactattttctcatccaccagaacgccaaaaattaaaaagcctaacaatgtccagggctggcgagaatgtggcagaaggtgatgtcacataccctgcaagtgggaatctaaacagattcagggttttggtttttttttaatcgcaattaggtggcctgttaaattttttttcttgagacagagttttgctcttgttgcccaggctggagtgcaatggctcgatcttggctcaccgcaacctcgacctcccaggtacaagcgattctcctgtctcagcctcccaagtagctgggagtacaggtatgtgccactacacccagctaatttttttgtatttagtagaaacggggtgtctccatgttaggctggtcaggaactcctgacctcaggtgatccacccaccttggcctcccaaagtgctgggattacaggagcgtgtgccactgtgcccagccactttttttttttttttagacggagtcttgctctgtcgcccaggctggagtacagtggcgccatctcagctcactgcaacctccgcttcccggattcaagtgattctcctgcctcagattcccattagctgggattacaggtgcccaccaccgcctggcatggtggctcacacctgtaatcccaacactttgggaggccgaggtgggcagatcacctgaggtcaggagttcgagaccaacctggccaacatggtgaaaacccgtctctactaaaaatacaaaaaattagccaggtgtggtggcggatgcctgtaatcccagctattcaggaggctgaggcaggagaatcgcttgaagccaggaggcagaggttgcaacgagctaagttcgagccactgcactccagcttgggcgacagggcgagactccgtctcaaaaaaaaaaaaaatgtaaacacacattccctttaacccagcagaacatgggaacccaagggcattcagcctgtggcgcgaccaggcggcctgacttgagctcacgtagaaattcggcatttttgaaccaagagacagcacttgggatccggaatgtctggacttgggcacggcgctgtggagctggcgccgttgggagccatgcgagttctgggtcggtaggtcacctcagaggtggggagaaggttctctgagaccgacatgggggctagtgctggcaccaccggacatggggcatttcagacacagggcgagcacattccctagttaccagggttcattcgagtcagtcacgtcacaggctggcaatgggctaactcctcctcaacaatcacacggggcttgcctcatagaatgttttaaaaaaggaaaggaggctggcgcaggcgccaaccgtctcagaaccctgagcactgccccacccccaccctgcccgccatagcctgggctgttgtgggggaggggtgaccatttatcacgaaacaaaaaattgcgccacagcagctccctccctcccccacctttacggttgcagctgcacgtcccacgtgcagcaccaccccctgacacgtgcggcaccaccccctgacacgtgcggcaccaccccctgacacgtgcggcaccaccccctgacacgtgcggcaccaccccctgacacgtgcggcaccacacagctagtgccggaactttttgtgcagagaaagaagaccctgcacccgcgcggagggagcccttttgagattgcaggagagaagatgagaatgggactattttcaataactgtgcacatgcaagtcacaaacattccagatcccttgacttgcttgcggagggagcggccggcggagggagcggcaggtggagggagtggcacgaggcatgcggagggagctgcaccgacatcacataaacgcactgggcagctcgcaggcgccattcgctcttcagacgccggagacgtaggagtgggtcttcagactccaaaggggttggactaatggcggatgctgaggcgagggctgagttcccggaggaggccagacctgacaggggcaccttgcaggtgttgcaagatatggccagccgcttgcgaatccattccatcagggccacatgctccacgagctccgggtaagttctcctcattgaagtctgggtcatgcagggccacgggcccggtggcttcaggcctggtggccatgaggccgtgtggtgaagggagagccttcagaggcacaatgggctgtgtcgtaatgccctgtcttgggctgttggggcccggtcgagcaccctagatggcagcgaggcactattcccgccaacccaagggtcggtcggttggttggtcagccgcgggttctggagcccgcccctcaatttacccacggccaaagttctggaggtcgccaagatctccagttgggagacaaaggatccagactggactgaggtggcgggagaatgtcactgggatcagattgggctagctgtggttttcattttagcggggagcagggcttccctggtaagcagttgtactggatccccgagggtgaatgagcgactctaacccaggatgtgaggataaaaagcaattaaaattccagcctgggcaacatggcgaaaccccgtctcttaccaaaaaataaaaataaaaaatgagtcgggcatgggggcgcacacctgcactcccagctattcgggaggcttgcttgtgctgttgggtttgctggtatgcagttgatggtttttgcatcagtttgagggatattggtctctagttgtattgtagtatttggttttggtatcaaagtgtaatgctggcttcataggatgtttcaaagtgttccatcttaaattttttggagtggctgggtgtagtggctgccacctgtaatcccaagcactttgggaggccgaggcagacggatcgtgtgagcctagaaactagttcgagatcagcctgggcaagatggcgaacctctgtacaaaatgttacaaaaattagctgggcgtggtggcacgtgcctgtagtcccagctacgcgggaggctgagaggctcaggttacagtgaactgagattgcgccaccgcactccagcctgggcaagagcgagaccgtgcctcaaagaaaaaaaagttaaacccagctgagggcggtggctcacgcctgcagtctcagtacgtggggcctgaggagggaggatcgcttgagcccaggagttcgcattcagcttggc

SEQ ID NO: 1564226 - DNA, 4001 bp, Homo sapiens
acatggcagaatggcaagcaagcattcaagacagaggaacagggttgaaattatccttctatcaagagtctattcctattataacagcattaatccattgatgagggcacagcccttatggcctaatcacctcttaaaggccctacctctttttttttaagattgatggtgtttattgttctgaaaatagaattctgccgtttgcttggggctctggacactgcaaaactgaacaaatggaaaactcaagagtcttgctatgcatcagtgggggtgccatccaaatccaaggcaaataaacggcattcggtactcactgtgcacaaaaggagagcattttattttcatggatgtggatgaagtacaatttcttcagtaaactcaggaaaaactgttaaggggcaacaatgaactctgcatttaaagaaaaatagaaaatgaaaacacaaaatcctaaaaagtaaataaagattctgtgtcagcacactggtatcaaaacacacatcaacagcacgtcttaatcatacgggaaacaatccttgcttatcagaggtgcatatctaaattctatagcttaccaatatcttcttgggagtaggcaaaaaagaaacagaaaacctcacattaaaaaaaaaaaaaaagtttcttttccctaaatgttttcctgaagctgaatcttaaggcgagaggacgtcagtcatcctcgtcattctcactgaggtcgtcatcgttgttgtcctcctcctcttcctcctcgactgctggggtctccaccctggagccactgtactgagatccaccggagcttgtggccagcatcccaatcgcaatgttggtcaggtcactggcagaaagccacgtgccattagacctggaacctgccgtcgtgaacacacctccaaaagttccctgagccatttctgtcacgtacggctccagagcctttgggaccaaatttctggccattttaaggtcttcggcagagcagctcccggactctagcccaaaagtcatgcccatccacatcagcacttctgtgtcatcgtggatttcaaaggagctgttaaacttaaacagatattctgatttgtcgtcggagatgctgcagttgatgacggtcttcttgctactgctgatgatgatgaagggcacgtggatgactgagttgggcagcggccgctggctgacctgctcctccacatactggtttctcagcaccaggttcttgaaagcaatttgctgtagaataagttgttgaagttcagactgtttctgctttattctttcaagtctcttctgtctttccacccgtaagttctgacagttctgagccgagttggtggtcagaccaatccacttgatcttctttttctccctggagatgatattcatggccatcagcacgtttaaggcatcgtaggtgcgccgttttatgtttttcacgtcataagctgactcgtttggtgaggcgtggttgctggcagctctgaacttggcgaccagctcgcccaccacttcctggcaggaagtggtccctttcctctgcaccgtctcccagaccttcatggaaagacggcacaggcccatgccattcttctctcctttcctgttgtgctgcccggcccaaggaggtgaggagtaggaatgctggttctgagaggcaaagtgagtgctgggtgggtttgggcttcctaccacagggatgtttgatgctgctggtctctgaggcataccaattaccacttgctggtcaatgttgacactggactgtccaaaggttttcggcaagagctgcttcccgagcgggttcacggtggaggtgtgaacggccacggggcggctggtctggttctcgtccattaagaccttgagttcttcgttagcttcagtgagactgacatattttgccatgttaacagatttgggaaataaatgctataaatgttcacctttccagagaagaaaaacaattcttccaggccgagtgtagggctgccgtgaggtgcgtggcgtaacgtgcgtggcgtaacgtgcgtggcgtaacgtgcgtggcgtaacgtgcgtggcgtaacgtgcgtggcgtaacgtgcgtggcgtaacgtgcgtggcataatgtgtgtggcgtgtggtacgtggtgtgtggtacgtggcgtgtggtacgtggtgtgcagtacgtggcgtgtggtacctggcgtaacatgcgccacgtgaggtgcgcagcagcaggggggcggtccgtgcagtgcgcctgcgtgccttttcacgccttcagcctttcctcctctggccctacctcttaatactgttacaatggtaattaagtttccaacacatgaacttttggaggacacatttaaaccatagcacatcctaaagggactgatgaaaatcagacgtgtaggcctctgcaggcccgtctatcatttcttctcagccattgtctcacaagaagctggatctgggctcttgcaaggattatttcttcacctgctggtcaagaagcttattgtggaagaatccagtttttgtctctctacccaaacagctacactaagccttcctgagtagatagagatgggaaaaaggagttaacaatatacagtatcatttatttgttgggctgtggtacaatcaatagactaagtccacagcctacacctcactttggaagctacacacattgccaatgagaaagaaatctaaagagagaacaagacaaagcccagcagaagcagaggcctgtggcagtctctttctcccaccgttggtctcaactctgccttactcaccaaaagtcctaataaccatgccacacaggctctgtgtcttcaggcctgcttctctagtccacaccaacttcctctagcacctcgactctggaaataatgcatgtgattgcacacaagcatacacctcagcctcagatacacagaggtgctgtctcactcacctcgggctgccgtaacaaaacaccatagactgggtggctgaaacaatagacatttattttctcacagttctggaggctagaagtccaagatcaagtttccagcagggttggtttctggtgagggctcacttcctggctttcagatgtctgccttctcactgtgtcctcacatggcagcagggcttggagagatctcttttgacaaggacacatcctatcctatttgggacccacccttatgacctcatttaaccttaattacctcctaaagaccctatctccagatacagtcaaattgggggttagggcatcaacatatgagttttagtgggtagggggacaaaattcagtctatagcatttgctaaacagaaccagagctggacagtagtgaaagagtagtgaaattgggggttaggagttcaacatatgaattttattgggtagggggacaaaattcagtctatagcatttgcctaacagaaccagagctggacagtaataaaagaggtaaaacagatattattcaggaactatggcaatggggcaaaaagacctcaggatagaactgggctcaattcttttttaaggcagagtctcactctgtcacccaggttagagtgcagtggcacgatctaggctcactgcaacctccgcaatctccgcctcctgggttcaagtgattctcctgcctcagcctcctgaatagctgggattacaggctcccgccaccacgcccggctgtgagccactgcacctggtctgggctcaattctaaatgcagtaaatgcaagaggatttatagccaaggagcagagcaaagtggtcagtggatgaaaaattactaagaagatacatcaagggtagatgaattcttgttaaaccaacttaacaagattcttgctaaaggtaggctggggtgatcagatatcaagggtggggaagaagagtgtgatcagatattgaaggtgattggatatcaagagcaggggattctcactaaagtgacttaagctaaactcctgctaaaactagacttagcaaggatgagg

SEQ ID NO: 1564227 - DNA, 4001 bp, Homo sapiens
agggagaatttgggtggttgatccactttatacaagcattcttttcttaccggaggagcctgcccagccttctcctgtttttttggatagatcaaaacacacacacacccccaacactaacacccactggcgcacaaaataagaagccatatacacccatccctttaactatgtccactactgcgatgatctaggttgttacagaggaattagaagatggtgaatcgatatacagaaaggctctgctcagccccagagagcaagggacagttaacacacacgtggatgaatatgcatccttcaatttagctaaacatttagaatgctgagagattgctggtgacttcacttgacaagaatcctctcccctccccaaggatctgtcttccttcctctcctcaccctcagatggagccctaaaaccacccaggaagttgggaagaggaagctcgggcgagccactgagctcagcacaatcccaggcacaaaggaggcaaagacccccccccacccagggctcacacacccattgcacagaagttggaagagatgggcactggggtgagcagggagggctggggctccaaagcccattgatgaaagtaaggatgagaagaggccagaggggatccacccaggcagggatggtgcaatctgtactcgttccagctctatggacagattcaagattacccccaggagctcggagatcgaaaagaagataaaaagaaaaggggtgtggggctagggagtgggaagggctgagaggctagagcgagtagcagcatgaacaagagcctcctctgggttcccaaacaaggtctgaggcctctgagctaagaggtaacatcatcgccctctgcctggctgtctatcttccattcaggcccttaacaggtgtgggaagagggcttttccactatccttgggatctgccccagctgggtaggcgggcagaggggaaaggattattctggtcaagtcttgctgaatgttgcttctcttgttcattcacacgcactcacaaggctggtcccaggcagcatatctgagatacctccaaatccctccagattcatgttatccccaaacacagcaaccagtcactgagaggcaccaagctcccaagacagcacttctgtccctcaggaccccttctcccacactgagggaaaaaagattctaggattcccttaaaaccagtgcctcacctgacagtgtcccctcaaattcattcccctcatgtccgactgaaaatccccgaattcagcctctaatcagagaccctgtctaccaagttcagctatctcagaccagtttctggatactccagaataggcccctctagacgcagtcaagggctccccaaacctgacccagaccccgcttaatgcactcccacgactcctttaataaagccacaatccaagcaggccactgccggattccttaggtgcccccccaagacgggcgccccgacgtcctccaaggctaggccgagggcctccaatcccagtccggggcccccactgcccccgagatcaggcccctgggagccccagtcggcactcccagccccaggcggccccgcacctgagcagctgagccgagtcggccggcctgcgctcctccaacagcacgaacacggctcgagggccctccgcgctggcctctacgccatcccgagctggttcggccgcatgagacatgacgcccggccccgggcgagccctgccaggccggtcgggcctcggcccggtccccctaacaaaataagagtcccccctccccccagctcgccaccgccgcctcctccgctaagccatggagctagcactgcgcgggcgggcggcgtcggggagatgggatgggctgtgagtcatcccccgcccagaacggaccgacgccccccctcaacctaaccccggacgaccgccctcctccccctcgtcttcttccccctcctccctcctcccagggatggggaaactccacaggaagtgaccgcactggggatggatggcccgtctggccacgacccattagcgaggcggccaatcgctgaacggcgattcgagggcccaccctaagcgacgcctccgacgcggaggaaaaacgcgattcggcccgccctcattccgagaagcagcacccagaccacgccctcaggggcagcgacaaataggcgagggttgatttggttgaaccacgcctctatgtttgcgtcgctttcggagccacgccctctcttctcaaattatccctctgcaaggtaatattaagccgctccttgggtcctctgcgcctgcgcatcgatggccagtcggcgcacggagggtctcctggccaagcttttagctgcggaaccgcgccctctttcggccaatatttgtaatatctgagccctagaccgcgctccaacctcgatctggctgtgctctctcagccaaagccataactatgaggcagaggcagctacattccctgaaggtgcgggccagaaacccccccctttcgctgtccgcagtccagccgcccagctggtcttccgggagtattccgcctgttccatgccatcgagagcggttgtactatgttcattgcgctgcgcaatatgtgcttaataaattcttgacgggtgaatgaatctggtcccttcggtgaatgacgacttctggaatcacaaagatccaggtttgaatagggaaggggacctcccctctcccagcctcagctttcctggcctgttaaatgggggtcaaaatacctgtctggcagggttgttctgaggattaaagataatgtatgaaaagtgctagcaggttgtttggcatacaagaagcttcccaaaattagttgattcactcatttgttcacttattcaacattcactgagcgcttctgtatgccagacgcatgcaagccggctcgcacaaggcggagggtctcactcatatatcctcaggtgcaaatagctcacaaaacacccagacctacagccttcccttcctctttcctgacatcccaagaccccaccctgagttgcgcctccaggaatttcaccgggctttcatttaccttggaccttcctgtattggcatcattatttcacaggtctgtcagttgctttcgtaaactcatccatactcacacacaaccatctcgtacaagggggaaacctctacataataaagatgacttctggccgggcgcggtggctcatgcctgtaatcccagcactttgggaggccgaggcgggtggatcacctgaggtcaggagtttgagaccagcctggccaacacggtgaaaccccgtctctactaaaaatacaaaaaattagccgggcgtggtggcgggcgcctgtaatcccaactactcgggaggctgaggcaggagaatcccttgaaccgggaagcagaggttgcagtgaaccaagatagtgtcactgcactgcagcctgggtgacagagtgagactcagtctcaaaaaaaaaaaaaaaagaaaaaagaatacattaccaattgtaccaatcaaaactctaaaacggaacttgtagatccaatgttaaaattcctatgatgccttaaacatgtaagaatgggccgggcacggtggctcacacctgtaatccagcagtttgggaggccaaggttggtgggtcgcttgaggccagaagttcgataccagcctggccaacatggcaaaacctcgtctctacaaaaatacaaaaattagccgggcgtggtggtctgcgcctggcctgtagtcccagctactcgggaggctgaggcaggagaatagcttgaacccgacaggcggaggttgcagtgagccgagatcacgccactgcactccagcctggggcgacagagtgagactctgtctcaaaaacaaaaacaatggcccagtgcggtggctcacgcctgtaatcccagcactttgagaggccgaggcaggtggatcacttgaggtcagaagttcaagaccagcctggccaacg

SEQ ID NO: 1564228 - DNA, 4001 bp, Homo sapiens
caggttttagctccctaaaagcagagaagtaaaattacagctctctggggtagtatctttctgttcgtatcctagtgaaaatctgcctgtacttgtgaaaaagctgcctttttaagacaataggattattttcatgcgggaccggtctgaagctttttacattcctaccccactccctaccaaaccaagaaatttaaaaggaaaaatacataaatgtattaaaaagataaaataatagaatacctggatctacttcactttttgctgacatgttatatattgattcattttctttctttttaaattatcttcctttggtttcttccagggaatttttttgtcagtttttttctattttttgttatgtttttacttttataattaaaatcaataaaaagtattctctaaaaccaactatctaaccaacagccaataagagaaaattaacatttggaattttcttacctttatgcagacttttcactgctcagagcaagaagagttcacctttatgcaaaaaaatgttcatgaatttactgtactttggctctcatggtcaactccctgcaaagaataactacttcttcaaaattggccaataaactgtacaaaaaggaatataagaattgaaagcttcacaaaactccaacaataaaatgagggatgttatagccatttttatagaggctttcttttctatcactcatactaatgaacagagaagattaccgagagagagggagaaagaggggtgacttattatatgtagcaaccctgggactaagaaagttggctagaaagccaaaaacatttatctctgaaatctcagcttgatgtttaatctcagatgtattagtctgatggtctaaagagttcaaatccagggggaaggagagttaagaaatctttgctgcagtgttcattatgatggcaccttagtgtctttcacctggaaacactgaaatatctgacagaatttagtcccaataattaagattggttctcataaaaccactagaaagaaagatgcctctataaaagataagcatacaaataagttggggtgaacataaacaggtttaccacagtacataagggactgactacttgggtttttggaacatcatcaatcatggattaggctcttgcttcttctctagctccagctcggcagccctttgtactgctgcatcgactagcagcaggaagctgctgaagtcggcgtgctcctctggagacacaagttctggagaagacggggatgtgacagaaaccttgacctttttcttcggctgggctattccggtgagcttctggctaggggccgactccggatctggttgcttctctcttgacatctggccctttggcaagggccacaggggcaggctttgtacattgtctggaccactgggccctgacttggccggcacagacgcctcggtgctctgcaggtgggtggcatgggcatctttgcccgttttgtggccaatgatggggtcgtttctacgctgttgaagcatatccgggagaatgcgtctgcgagcattgataaaccagttagaaatctgcaacaaagacaaattggtcttctctgacagcatttgcttctcttcttctgaagggtaggccttaaaccgatgcttatacatccagtcgcggaggatcttaacggactcggctggcaagtttcccttgcgcttcttcttgtgctctggtaaggcaagaactctgcctgtatctgcgttatttctcgacatgattgaggtgtcttgggctgggctttgggtcttcgccgggctgtctttttccaccgggctttgggtctcagccgggccgtccgcagcggcctccatattccaagaggcttatcgttactatattgagaatcacagacaactgagttaggacaaaggtaggtttgggagagccactttagaaagcatgggcaggtctgtaaggggaattctcacctgttgtttccgagaaagacaaacagcgttgctaacagagttgctaacagccgagctggttatctcagtgacgtcacatcctttcttctccacgctgcccctcccctacacttcctggagttcttttcccattgttcttgcgtattttctgtaacttccaatgcacttgatttcacgcagtttatagctctccagagttttctctgctgttgtcaccagtttccactaactgacgaactctatttctattagtgtaaatacgcctaccactttcttcctatttgattttactctggtattgttcttcccgttattacttataattgtctcactggctcatctagatatatcaggaacaaattgttgattagctactaacctcaataaaagagtgtaactactgtactttgactcccctcttccattcttccatgttcaaagcagatattaataataattttgaactagacttttgcttttgatgccttgctgcttaaatttttcttctctatggccttaaaatctttgtctttttttttttttttgatatggagtctcgctctgttgcccaggctggagtgcagtggcacaatggcggcatctcggctcactgcaacctccatctcccaggttcaagcaattcccctgcctcagcctcccgagtagctgagattacaggcatctgccaccacgcccggctaattttttgtattttttgtacaggcgggtttcaccatattagccaggatggtctcgatctcctgacctcattatctgcccgccttggcctcggcctcccaaagtgctgggattacaggcgtgagccaccgcacccagccaaaatctttgtcttttgaatgactttgctattgcctgtcagtaccactgaggtctttgtgtctcttccttggactctgatatctagttgtgatgtttctctttaaacttcagtcagaaattcagggatcttttagtaatgtggaataagtggaataagatagaattcaagaaataatggccatcacagacagtttatttaaatatattttttaatttttttaattttttattttttgagatgaagtctcgctctgtcacccaggctggagtgcagtagtggcgcaatctcggctcactgcaacctcaacctcccaggttcaagtgattctcctgcctcagcctcccaagtagctgggattacagacgtgcacccccacacccagctaatttttgtatttttagtagagacagggtttcaccatgtttgccaggtctcggactcctgacctccagtgatccacccacctcagcctcccaaagtgctgggattacaggtgtgagccaccgcagccggccaaatatttcttgatatttccagcatgtggaaatcacccggtaagtcaaatgaaaataatttgtaaatttcaaattttcatttctagtagctgaaaaataaggcttgacttttttcaagaacactatgattcactttgaagacaattaccaccagcatcaactctgactccttaataatactgtatggtattatttatttttaatttcatatatttttcagagtcctagctatcgtctgaagcagcatatattatccacagtttccttttgcccttaagagttcttacttgtcactgggctggatttcagaatgttgtctactgatcctttggctgttggtaatcttccttactggtactgactttcatcacttaaaatttattgtaagggagacctactgaataacacaatcaaatctaatgaacaacttagtaaagctcccaataaccaataattgggtatgttgggtacaattgaaggtctcctttggaatactctagaaaagaatgctactatttccactggacttttgggcttttgaaacacagaagataagattttctatgcatagtaaaaactcagttcctgcaactgtttctcaccaacacatttatgcctcatgctcgctgaaagtatttttgtgtgtcagcatgacttgtagtaacttaccct

SEQ ID NO: 1564229 - DNA, 4001 bp, Homo sapiens
caaaacaatgaactgcttttatcagttttgggggattaccctaatatcgatgaagatgatggtctggctgggtaacttcccatcttgccttccccaaacttgatggctatttgtcaactagctatcaaacttgacagctatttgttaactagcacatacgaggatttgtaaaatgttcattatagttaaaaacgaagatttatcaaatagccttctctgacaattaataaaccaataagcattctaagcataggctgggggggcggggcatgtgttaaaccaaaagaaatatgagacatagtccctatatttcaaaggcctcccaattcattacagtgcaagaataaacacacatgaataagtcagagaccaattaattgctaacctgagtggtacagactttaagtgcatgagctgtcctgagaagtttaaatatctaaaggttggaataatattacttttaatagctatcacttgagcacttactataagccaagtgctttacaggcattatttagtcttcacaacaatcctttgagtagagtacttattattcccaatttactcaaggggaaacagtccaagtggttaaggaacttacccaaggtcactcagctacttaagtggctaagacagccgcttatttagggaattctagagctcacactgttaagacttcatacagcagtgcggggggtgcgggggaggaagccacataggctggcactattacaagcgcgggatccggcaacgcgttcctcgtgtttcgttccaagtaacgaagttacaaagatttgaatctttagcatgagccacggtaaactggctactagaaatggagaggggtgggcaaggacgacaaaaatggctaacgagggttaatttcatccagggttgagctttagcatctaaaagcgacccagagaaggaaatgagatgttattaatatttgttcttatatctgaggtttgctttgctgcttaaacgactccttccaggggaaggggaggagggagcgctctaacgtgggggcgagaagactaggggtatggcaaattactgttttcggtgttacgggggaaagtttcacgactaaaggaaacgcgttatcctaggtactggagaagcttggagagctgccagaattagttgcagtcccaggataaaatggggtttagggaacatttaatgacgaaagttgaatccaacccgaaatagctctaaggtgaaaagacggagcaaagaaatgtcggtggttcttcagggaaagcggcaatccctgccacacttccccacggcgctacgcgaggccgggacagtcgagagaccgctccccgggagggcgagaggtgccaaaccgggttcttcgcggcgccccgggcttcgcggcagcgggcgaagaggaggggaggggaatccgggacggttcgccctccttggacttcaggcagaggaggcgccaagctccaaactgcggagtccaacgggtgcagagtgaagaaatggcacagagagagatggaaagtccgaattgccccggctcagccccataaagataaaggagccaagtgagatcaagcgaagagggggacacaaaaagagaccaagagggagcgcggagacctgcaggggcggaataagagttctactaagaggctaaaggaagccgagctaccgcaggcagtagcgatttctgggaggccagggaaggaaggaggtccgcggcggtaaacagcacctctccccgagttcgaaactcctagacgaccatccacgcccgccgcccgggtgggggagggggtacatctttccccctcaacctcccactacaggtgagagtgcagctgacgccctggcccggcccggcagtgcgcctgcctccggcccgaacactcacaattcgcctctccctgatttctcccagttctttatccactctgcgggaaccaccacagccgcggccgccatcttcctctcactagtagcagaagcccggatgtgtagcacgcgagcgaagggtcaaaggggagcaccgcccacgaggaatgccgggagctgagagttcgtttttcgatttcccgccccactttcctctccacccagcggaaacccgaggcaaggcagccaacgacgtggagactcgcgggcccctttgcgaggttactacacgggttgcgccctccgaagtcttcggccttacttcccattagaacagagaaatgccatccacaggccaacaagtagacttcatcttcttccgtaatatctacccctaaccactaatacaaacacgcatttttcaagcacctaatatgtgctagacactgggaatagagaaataatagtctttgggaaagccataaatataagcaaataaattacattacgccctgctgactgctgagataaaagaaaataatcgggtccctctccttctccctctccctctcccgtctccctctcccgtctccctctccccacggtctccctctccctctctttccacagtctccctctgatgccgagccaaagctggactgtactgccatctcggctcactgcaacctccctgcctgattctcctgcctcagcctgccgagtgcctgcgattgcaggtgcgcgccgccacgcctgactgtttttcgtatttttttggtggagacggggtttcgctgtgttggccgggctggtctccagctcctaaccgcgagtgatccgccagcctcggcctcccgaggtgccgggattgcagacggagtctcgttcactcagtgctcaatggtgcccaggctggggtgcagtggcgtgatctcggctcgctgcaacctccacctcccagccgcctgccttggcctcccaaagtgccgagattgcagcctttgcccggccgccaccccgtctgggaagtgaggagcctctctgcctggccgcccatcgtctgggatgtgaggagcccctctgcctggctgcccagtctggaaagtgaggagcgtctctgcccggccgccatcctgtctaggaagtgaggagcgtctctgcccggctgcccatcgtctgggatgaagtgaggagcgtctctgcctggccgcccatcgtctgagatgtggggagtgcctctgccccgccgccccgtctgggatgtgaggagcgcctctgcccggccgcgaccccgtctgggaggtgaagagcgtctctgcccggccgccccgtctgagaagtgaggagaccctccgcccggcagccgccccgtctgagaggtgaagagcgtctccgcccggccggccgccccgtccgggagggaggtgggggggtcggccccccgcccggccggccgccccgtccgggaggtgacgggcgcctctgcccggccgccgctactgggaagtgaggagcccctctgcccggccaccacccggtctgggaggtgtacccaacagctcattgagaacgggccatgatgacaatggcggttttgtggaatagaaaagggggaaaggtggggaaaagattgagaaatcggatggttgctgtgtctgtgtagaaagaggtagacatgggagacttttcattttgttctgtactaagaaaaattcttctgccttgggatcctgttgatctatgaccttacccccaaccctgcgctctctgaaacatgtgctgtgtccactcagggttaaatggattaagggcggtgcaagatgggctttgttaaacagatgcttgaaggcggcaggctcgttaagagtcattaccactccctagtctcaagtacccagggacacaaacactgcagaaggccgcagggtcctctgcctaggaaaaccagagatctttgttcacttgtttatctgctgaccttccctccactattgtcctatgaccctgccaaatccccctctgcgagaaacacccaagaatgatcaataaaaaaaaaaaaaaaagtcaacagaaaaaaaaaaaaaaaaaaggaaggaaaactttccagaagagagatgtgtcta

SEQ ID NO: 1564230 - DNA, 4001 bp, Homo sapiens
gctgtctcaaaaaaaaaaaaaaaaaaaaaaacatggccaggcacagtggcacacgcctgtaatcccagcactttgggaggccgaggtaggtggatcacctgaggtccagagttcaaggccagcctggccaacatagtgaaaccccatttctactaaaattacaaaaattcgtcaggtctggtggcacatgcctgtagtcccagctacttgggaggctgagacaggagaattgcctgaacccaggaggcagaggttgcagtgagccaagagcgtgccactgcactctagcctgggcaacagagcaagactgtctcaaaaaaaaaaaaaactgtctggctttgcacatacatttaaaatttggtgatgactctttgaacgacacagcatttccacagaggagctccagttgggtggggtggagggtggaagacagaggccatgtttgcaatccctacaaaatcccagatacaggagccaggctcggcacatagtaggtgagtgggcaccagaatgaataagtgcacgtgactggcagctccaagcagttttcagagcagcctcccttgtgggcaagatagctaaccccacaccaacccagggaaggcctggactcacaacaggggcattgcggaaacccttgatggcctggaagactccgccaccgatgacacccatagtgaaggctccaccgcaatcatccacaattcgccatgggctgcaagcaggaagggaaggacggggttaatgtgagccctcccccaggtcctgtcacacgaactcttttctaactgggagaaaccaagtcaccagaatgggaagttcctaagtaggaacaaacacttcagataataatgagctagttctgtcacgctttttccacacacccccccattaaagcgagaaatggggcaaagggggagaaatattagtcttcgccctgtctaccaaccaaggaatcagccaacggttttactgtgatcaaagattaaatgaattggcacacgcagagttgacgtttcaataagcgacataggcgtgttaactagccaagacagactgtcagcaaagcaggaccgcgtcgcaccccttctccgacggtgagcccgtccaaccatgccccgccccttttcaatccggcacaactgggaaaaaccaagagcgaccgcgggaagcatccaccgtccccgccggccctcaacaggttcatccgtgccccgccccccactgacaaaggcgacctgggaaaaaccactggcggcaactctggggatttccggtcaacaccgtaccacccctagccgggatggatcgtccagcgtgtcttttttcgttaacagggctaggagattacgaagtcaggagaaacatggcgtggttcggccttcgccgcaccttctctggttgtggcccctcataacggagcccgaatgacaggaaccgagtgggggtagcgggagatacgttaagagtcccccgagtctggtacatggctctgtgcggccgatgcctcccccgcccgacccccacggctggccttggcgtcgcagcaatattccggatgcctgtgcccattgccgtaccagggctcccgagcgtactcctccatggcgctggcgtctggccgcgcagtcaggccacgcccccagcgtagacgcacaccggcgtcggagctttccgcctattaccgggcagcgattgggtcgctataccgcatgtcacgccaaggacgcactctcattggccaatcgagtttctgccatttgttcattgcctcctgagcgtagtccagttactttcaggctcggggagtgaaggcctcgttgagagaaggtctcattcggtgttttgggaagagagtcgtgtgggcccaggtatcgtagcggcgacacgagagagacgggcggtgtgacagccttccactacctgcacgagtgtattggtaacgttggggtgggtgcactcttttggagctggaggaagtgctgccctctgctcccccatcccagcgctttggtttctcccacccggcagtcatggggacgctggatgagcccatttctgaagtgcggaggggccgggcttcttaggctgtgggcggagcctgggcctgggagaggaacagggccctggagcacctggtttcggggacagtagggttggtgggagttgcgatgatattgccacctacctcttacatcttttagtgcgtatgttctgtccacccagctactggttcatttgagtagatcggagtcagatgagtacatgtttacgggaggcgcttggttacgggatccagataggaatctttatctgagctgcttgtcagtttgttcgtctgtccctaggtctgtctgctatcagctatgccgctgcccgttgcgctgcagacccgcttggccaagagaggcatcctcaaacatctggagcctggtgagacagctaaaagcagatggtcctaacacgtgccagcctcgacaggcacttttgttgttgatactgacgcttgatacctagcatgggccaactgtgcaccaagcaatggggtggcaggcatttttcgttgttaacaatgtggattcctgacatccatccctaccgcgtgtcaagtggagggggttgggggaatagatatttcattctttttttttttttttttttttttttttttttttttttttgaggcagagtcttattgtgcacccaggctggagtgcagtggcgcgatctcggctcactaaaacctccgccttccaggttcaagcgattctcctgccttaacttcccgagtagttgggactacaggcacgccccgccccaccacacctggcaatttttttttttttttttttgagacagagtctcggtctgtcgcccaggctggagtgctgtggcgtgatctcgtctcactgcaacctccgcctcccgggctcaagcgattttcctgtctcagcctcccaagtagctgggattacaggcacgtgataccacacccggctgatttttgcatttttagtagagacgggtttcaccatgttggctaggctggcctctaactcctgacctcaggtgatccaccccccacccttggctttccaaagggttgggattacaggcataagccactgtgcccggcagatatttcattcttaacaatactgactggctgggcgtggcggctcaagctggcattcccagcactttaggaggctgaggcgggtagattgcttgagtttagggattaagagattagcctgagcaacatggcaaaaccccgtctttacaaaaaatacaaaaattaatcgtgtgttgtggtgcatgcctgtagtcccagctacttgggaggctgaggtgagaggatctcttgagcctaggatgtcaagggtgcagtgagccgagattgtgccactgcactccagcctggccgacacatggagaccctgtctgaaaaaaatccaaaaaaaacaacaaaataatactgaccacctaatgcctatttggggcctactgtatgccaagttaaatcccatggattactctatgggggtgatgacatagtatctaataggaagtactgctaacctctactgctgtctcctgtgtgccaagcgtagttgcagtgaggatctatcatttaggcctactgtgctctggctgcaaatcacaccttattatcagtaatactaaaaactggcatctatttggggctatagtgtgccaggcactggaaaatatatcttctccttattgataactgacatctattacaagcctactgtgtgcaaggtatagaccttgtggttaataaaattgtcaatgatcccaggccgggcagggtgcctcatgcctgtaatctcagcgctttgggaggcggaggtggacggatcacgaggtcaggagatcgagaccattctggctaacagggtgaaaccccatctctaataaaaatacaaaaaacttagccgggcgtggtgccagatgcctgtagtcccagctactcg

SEQ ID NO: 1564231 - DNA, 4001 bp, Homo sapiens
caggggtccctttttgttgcttagagaaaaaaaaactttacctaaaaataatatctgatatgttactgatagttcacatttggcagctgaccaagtatatagcaatgttctctagccttacattaaattcttacaacaatactatggaatagatactattataaatcctcattttacaaagaggaaaactgtggcacagagatactttacccaaaatcatagggccagaaaatggcagagctgggatattccagagcaagaaaatggcaaaatataagtgaagtaacctttcaatgaatttggttttaactccacaatgctgtttgaactaaatgcctttaagttaactacagaataaaagggtgaaaggataaatcatttcagcaaggtaccctaaaacctaccaaagaagaaaaaaaatatgacttgagattctataaccttgtctacttaagctagagattcttgaatcctgtcatgatgaatggaaaattgaatgcattttcctaaggggttcatcatagcttacagttttttttcctttcttttcttttcttttttttttttgagacagagtctggctctgtcacccaggctggagtgcagtggcatgatctcactgtaacctccgccaggttcaagccattctcgtgcctcagcttcctgagtagctgggattacaggcgggtgccaccccgcccagctaattttttctatttttagtagagacagggcttcgccgtgttgcccagactggtctcgaactcctgacctcaagtgatccacccgcctcccaaagtgctgggattacaggcatgagccaccgcgccgggcagcttacagattcttgcaatagtacttaaccacacgccctcctagccccaaagtaacgaatcacagatatttttaaaaaagaatcaaagcactctggtccaaggcagaccagagttaagtaagcatctggtaggtgtcatagtccagcaatactgtaagtttatgggaaagggcctatggaaaccaatgactgtatatagttcaagttaagtggttcaaaaatttcgttcattattctctgccatgtacacaagcctcagaccctctaattccaaggaaaattatccttggcctctgaattctgtgaattgtgtacattaagggagatctgtccttggcaagcagaacacgttgttggcaagctgcaaataccttccacccttttgccaaagtcccctcacagggcaggctcaattcctcaaccttcagacccaaaacggcttggtattacacaacaatccaacaagaaagcaaataagtatgtacgttggaagagattacaccacttttatagttactgggctggagccactcatttttcagcggagagggttagaactgggtaatgaaggtaaatcccgaggagtccaggaatagcagattcactgattcactgactctctgggactcgggctgccaaaaataaaatcccagtactgggggctccgatcagtcttggtgaccagcactaggcagcttcaacctcgggtgcctgaaagtgctgggtgtccagtggcataagtcttctttgatacccagtcctctacaccaacaaagccgaggtccggaatgacagtccccagagaagcggagtcacccttctcccatccggctaggccacaggaacctgagaaaatcaagggttgctgccaggtgcccgccccccaccccgaatccccgacgttgtcgcgagtcccgcggtacaaggacagagggaaagtaggtacagtgttcaggtcccagccccaggctcctcacccaacaaagttcagtcatctggtgcaccagctgctggaagcgctgcttttgagtctctacctcgatgaaatgctgcaactgcgggtccactgcacccaaacccgccgcggaggaagaggaggaggaatccatcccagggcgaccaagcttgcagagacgaactccgcaccgaccttcacgtgtctccgcgacggaaccggaaccacagctagctgcctctgggaccgcccccgtgagtgcactgcgtcggcgcgaggcaggcgtccaactccaccccgccgcctcccacaccttggcgccggtgcttcgttcccggagtcggcgggttccactccccggaccccgcaatcccgtaaccccgcaaccctgccgttgcgcccagccttgcgccttgagatcgcagggcttacagcccagagccgaggtgccgttgagatgttactccaaaaagaaaagaaaggagaaaaggaagttacttcagaccacgtgatccattccgtgctggccccacagctccgcccctgtccacttccaaattagcccgcgttttctgagctaccagagttgtgcactgggtcagttagttgactgggtcgattagttggctatcctgggcccctggctttcgttttttgatggagttttcctctcccgacgtagggaaatgaggctatggcagtttgtgcccaactttcagattcattcaaataacattgcatgcgtgctgtgacaggcactgtttttgcttaatgcatctttgattcagaggcaggagttaacaagagggcttaaacctggaggatcctgtcgagttctcagtgtaggaatatgccaaactaatgctacacagcagctttctggaatactgagatagggcgcttcagggaggctgcatgattaatagagataccaaagactttcaagctttctagtaattttattttatcaaaacaccctcccctcccatctttatgacaccatttcattcttgccaaattcggtccacccccacacacacacccccaagctctaccaaatgcctactcaaagagctgttggacccctttgtgcggctatttacatcctccctcctaaaaaatattttcatcgcaaattcagtctgtcttaattctctcgggaaatttcaggcacaataatttcttggcctttgctcagaagccactatcccagggaatcaaagaagaggtgcattcccagatgtagagaggggcctttttgtattgagtgggagcacaaaggctccagggctcctaagcttgggatttcctctgagaaagtgaaattggggcttgtggagaagagaagtagaaccaagaagcttattggcgagctcaggattcttcatccatgacatctagaatattgctcagaagaattttgaaagtgggacgctcatctgctttctaaaaccaaagaaaaagtaaagtgttagagtggctagaatccagaattcaagggaaatgcaatgagtaagcagcaaatgtttattaaatatatgctctatgcccagtagcatgccctgtcgattacaaaaggaaaaaaaaaaaaaaaagaaatagcagctctccataaagtctttgtgcacttttcatctttagtaactcaggttattagtgtgataagaacaatttgcaaattaaactgacaatcacactgatcaaaattgagggcaagttcattatgtaactgtatacaacacattcttattttggatcctcaagtgaaaaatggctaccaaacaagttcaagtggttggcagaacagaaatcccatgtgataatttttagtgattaatatttcaaaaccacaggctgtattactgagcagggattctgagtacctgggacctttttttttttttttttttttttaccactggtaacaaaaagactaaggtttttttttttttttctttttgagacagagtctcaccctgttgtccaggctggagtgcagtggtgtgagctcagctcactgccacctcccaggttcaagcgattttcctgcctcagcctcccaggtagctgggattacaggtgcacgccatcacgcccagctaattttcgtatttttagtatagaccgggtttcaccatgttggtcagactagtctcgaattcctgacctaaggtaattcccccgcctcagcctcccaaagtgctgggatta

SEQ ID NO: 1564232 - DNA, 4001 bp, Homo sapiens
tccagagcaagaaaatggcaaaatataagtgaagtaacctttcaatgaatttggttttaactccacaatgctgtttgaactaaatgcctttaagttaactacagaataaaagggtgaaaggataaatcatttcagcaaggtaccctaaaacctaccaaagaagaaaaaaaatatgacttgagattctataaccttgtctacttaagctagagattcttgaatcctgtcatgatgaatggaaaattgaatgcattttcctaaggggttcatcatagcttacagttttttttcctttcttttcttttcttttttttttttgagacagagtctggctctgtcacccaggctggagtgcagtggcatgatctcactgtaacctccgccaggttcaagccattctcgtgcctcagcttcctgagtagctgggattacaggcgggtgccaccccgcccagctaattttttctatttttagtagagacagggcttcgccgtgttgcccagactggtctcgaactcctgacctcaagtgatccacccgcctcccaaagtgctgggattacaggcatgagccaccgcgccgggcagcttacagattcttgcaatagtacttaaccacacgccctcctagccccaaagtaacgaatcacagatatttttaaaaaagaatcaaagcactctggtccaaggcagaccagagttaagtaagcatctggtaggtgtcatagtccagcaatactgtaagtttatgggaaagggcctatggaaaccaatgactgtatatagttcaagttaagtggttcaaaaatttcgttcattattctctgccatgtacacaagcctcagaccctctaattccaaggaaaattatccttggcctctgaattctgtgaattgtgtacattaagggagatctgtccttggcaagcagaacacgttgttggcaagctgcaaataccttccacccttttgccaaagtcccctcacagggcaggctcaattcctcaaccttcagacccaaaacggcttggtattacacaacaatccaacaagaaagcaaataagtatgtacgttggaagagattacaccacttttatagttactgggctggagccactcatttttcagcggagagggttagaactgggtaatgaaggtaaatcccgaggagtccaggaatagcagattcactgattcactgactctctgggactcgggctgccaaaaataaaatcccagtactgggggctccgatcagtcttggtgaccagcactaggcagcttcaacctcgggtgcctgaaagtgctgggtgtccagtggcataagtcttctttgatacccagtcctctacaccaacaaagccgaggtccggaatgacagtccccagagaagcggagtcacccttctcccatccggctaggccacaggaacctgagaaaatcaagggttgctgccaggtgcccgccccccaccccgaatccccgacgttgtcgcgagtcccgcggtacaaggacagagggaaagtaggtacagtgttcaggtcccagccccaggctcctcacccaacaaagttcagtcatctggtgcaccagctgctggaagcgctgcttttgagtctctacctcgatgaaatgctgcaactgcgggtccactgcacccaaacccgccgcggaggaagaggaggaggaatccatcccagggcgaccaagcttgcagagacgaactccgcaccgaccttcacgtgtctccgcgacggaaccggaaccacagctagctgcctctgggaccgcccccgtgagtgcactgcgtcggcgcgaggcaggcgtccaactccaccccgccgcctcccacaccttggcgccggtgcttcgttcccggagtcggcgggttccactccccggaccccgcaatcccgtaaccccgcaaccctgccgttgcgcccagccttgcgccttgagatcgcagggcttacagcccagagccgaggtgccgttgagatgttactccaaaaagaaaagaaaggagaaaaggaagttacttcagaccacgtgatccattccgtgctggccccacagctccgcccctgtccacttccaaattagcccgcgttttctgagctaccagagttgtgcactgggtcagttagttgactgggtcgattagttggctatcctgggcccctggctttcgttttttgatggagttttcctctcccgacgtagggaaatgaggctatggcagtttgtgcccaactttcagattcattcaaataacattgcatgcgtgctgtgacaggcactgtttttgcttaatgcatctttgattcagaggcaggagttaacaagagggcttaaacctggaggatcctgtcgagttctcagtgtaggaatatgccaaactaatgctacacagcagctttctggaatactgagatagggcgcttcagggaggctgcatgattaatagagataccaaagactttcaagctttctagtaattttattttatcaaaacaccctcccctcccatctttatgacaccatttcattcttgccaaattcggtccacccccacacacacacccccaagctctaccaaatgcctactcaaagagctgttggacccctttgtgcggctatttacatcctccctcctaaaaaatattttcatcgcaaattcagtctgtcttaattctctcgggaaatttcaggcacaataatttcttggcctttgctcagaagccactatcccagggaatcaaagaagaggtgcattcccagatgtagagaggggcctttttgtattgagtgggagcacaaaggctccagggctcctaagcttgggatttcctctgagaaagtgaaattggggcttgtggagaagagaagtagaaccaagaagcttattggcgagctcaggattcttcatccatgacatctagaatattgctcagaagaattttgaaagtgggacgctcatctgctttctaaaaccaaagaaaaagtaaagtgttagagtggctagaatccagaattcaagggaaatgcaatgagtaagcagcaaatgtttattaaatatatgctctatgcccagtagcatgccctgtcgattacaaaaggaaaaaaaaaaaaaaaagaaatagcagctctccataaagtctttgtgcacttttcatctttagtaactcaggttattagtgtgataagaacaatttgcaaattaaactgacaatcacactgatcaaaattgagggcaagttcattatgtaactgtatacaacacattcttattttggatcctcaagtgaaaaatggctaccaaacaagttcaagtggttggcagaacagaaatcccatgtgataatttttagtgattaatatttcaaaaccacaggctgtattactgagcagggattctgagtacctgggacctttttttttttttttttttttttaccactggtaacaaaaagactaaggtttttttttttttttctttttgagacagagtctcaccctgttgtccaggctggagtgcagtggtgtgagctcagctcactgccacctcccaggttcaagcgattttcctgcctcagcctcccaggtagctgggattacaggtgcacgccatcacgcccagctaattttcgtatttttagtatagaccgggtttcaccatgttggtcagactagtctcgaattcctgacctaaggtaattcccccgcctcagcctcccaaagtgctgggattacaggcgtgagccaccgcgcccggcctacgactaaggttctttttgatggccatggcccataagcccccgaggtatttggtatttagtggttcagggaacattcatgccagaatgctctcaatctgttagaaccaatggtcatcaatttcttgattccttgactcagtgattcttaaacttagctgagtatcagaatttcctgggaagtttaaaaagagatttctgggttccacttcaggcatagctaat

SEQ ID NO: 1564233 - DNA, 4001 bp, Homo sapiens
ctgatcatcctcaatctctgatcatcctcaatacctgatcatcctcaatctctgatcatcctcaatctctgatcatcctcaatacctgatcatccttgctatctgactgggttcttcatcttccaccatcccccaggtgatgtctgattccccttggcctgccttcagcaagaatcctgttacgtcggtttagccagaatcccccttacccctgatgtttcttcttagtaatttccacccacagaccctcacactgctccttagctacacattcccactggcccatgctatattcagtgttgagcccaatctctcccaccgactgcaagatcccattgcagtggttcctatacccatcaccatggtcctgaatatggtcttccttactgtgttataacaagtatcactgaatatttttctgtttaacaggagatcaggagtactaaggggcaggggttaaaattttaaacaggatggccagggaaggccatcctgagaaggtgacgtttgaggcagccacccatgtggatacctggggggaaagtgtaccaggcagagggagcagccagcatgcagatcctgtggtgggcttgggcacagagtactcaaggaagtgtgaggatgccagtgtggctaaagcagaggaagtgcaggggcgagtggaatcattctagaggtaagtgccatggtgagccccactggactgaaagggaaaccaaggcagagtgtgtgggctgagtggggtgaggactcaccgaggtcggaattgcagaaggccgtctgtgggtggggtgggacacaggtgcaggccctgctgggggctatcagccacagcaacaacaggatgccagaagccaggggctcaaagggggccatggtgggttctgtggggaagggggatgtcaggcaggccccggcccagctgatctgctgacctgggcaggtcatccaccccatcttgccccggggcagcctatgggggggattagggggctggatttgggcttgaggggttggtaagcttagggattttaaggggattggggagcgcagaggaatttagggtttagagagttgggagagtttaaattattgagggactgagtgagttgcggggttatggggttgtggcacttgggggagaagggggctgaggaagtttgaggaatgaggggattggggaattctggaggttgaggagtttgggggtgaggaatttgggattgggggctggaggagtttggagacggcagagtttaggggttgtgtatattaagagatataagaggctgggggaatttagggaggttgaggaatttggaggaggttgggggtttagggagctgggggagtttggaggttgaaggggttgggggaatttgggggcttaaggcaatggggatacttgaggaatttgagggcaaaagaagtttgggagctggggaactggggattggggagctgggggagtttagggagctgcaggggttagcggtgggtatttagggggcgatgagggaaatttcgggatgaaggaatttgcggggggatttggaaagcatttgtgatattagggggtcatgggtttgggggaattgggggcggatgtcaggggttctagggagtttggagcctcggggttgggaaagcagttccagcctccgaccctcttccccctagactagcccagggtcctggtacccgcaggccaagctgagtagacaggcatctggcacgggagtgcacgggcctggtggccagcacccaagctgcagcccagctccggtccctgctgggccaccccgggccctgcttacctctggtgtctctctgggcgctggatctgcggcgatggcggcagggcctgagcgctagaggataaatgtccacgctaggggcgggggtggcagcgggtgcggaaaccacaggcctccaggcttcctggatgcattactcatccacccaccatcagtgcagaagccaaggggcgggccgacgaaaggagatacaccctcctcctctcccacccgcctcctctccctctccctgggcctcgcccgggccagccacctcccccacctccacgtcagtcactattccttccaagccgcctcagcggagagcttagaggccgcatttcccccggcccagtcccctaaagtctccagaatctatccaatcacccacatcccccaagctccctatgactcaaacccaaattagttcagcccttcaacatttattgtgcatctactgtgtgccaagcacacaaaaatcccttgttttgtatgtctgacatgctggtgaggggtggcagagaggaaacaaattaagtagcagcagtggagggagataaggcaggtgaaaggggaggaatacaaaatggggaaactgaggcacggagtggttaagtgacttacccaggatcacagagtcaatacatggcagaactgagactggaactcaggtggccaggagccaaagccagggtctcaaataacacaggcaaatagccggcatttatacagcacctactgtataccaggcactcagcatagtttatctcactcaaagctcacaacaaatctctgagatgggtaccggttcttattcccgttttacggatgaggaaatatggggcgtagaggaactgtagaattttcctaagatcacagggcatggccgggattcaaacagaggctacctggcaccagggttgtaactcaggagtggcaccgtcctagcaagcagggaatggtgcgggtgaatgaatgagcattgggaagggggtggccatgaatgatggtgaaagaagcaagtgagtgggtcagtagaaaactaatccccaccccatcctgccctgccccctccccatggacctgtacccctggtggggggtggggtggggcaatccttgcccaccagctttctgacaatgcaggaaccttccctggggttctgattaacatccttaattcgaggaggatagatcaataataataattgtagtgatgatggcagccacttattgagcactttctgtgtactatgtgctaaagtgtttgtataaattatctcattcactcaccatactcccttgctaattaagtttgattaactcagggatgatagcccaataacaagaacacaacaaaaactaccagcagcccttatggagtgcttactgcgtatccagcactattctgggtgggaggaatgtgagggatgagaaattgcctaatgggtacaatgtacactatttggttgatggggacactaaaagcccagacttcaccactatgtaatatatccatgtcacaaaactgcagctgtaccctctaaatctattttttttttttgacaagagtcttgctctgtcacctaggctggagtgcagtggcgcgatctcagctcactgcaacctccgcctccggggttcaagagattctcctgtctcagcctcctgagtagctgggattacagccacaccaccaccacccccagctaatttttgtagttttagtagagacgggggtttcaccatattggtcagatctcgaactcctgacttcaggtgatccacctgcctcgacctcccaaagtgttgggattacaggcgtgagccaccacacccggccttctaaatcttttttttttttttagacagagtttcgatcttgtttcccaggctggagtgcaatggcaagatcttggctcactgcaacctccacctcctgggttcaagcaattctcctgcctcagcctcctcagtagctggggttacaggcacacgccaccacgcctggctaatttttgtatttttagtagagacggggtttcaccatgttggccaggctggtctcaaactcctgacctcgggtgatccgcccacctcagcctcccaaagtgctgcgattacatgcgtgagctacggcacccagcctaaatctattttttaagaaagcacttggccgggcatggtggctcacacctgtaatccc

SEQ ID NO: 1564234 - DNA, 4001 bp, Homo sapiens
gagccaccacgcccgacctctccaaaaaatttaaggtggaacactttgaaactcatcctatgaagccagcattacacttttgataccaaaagcaaatactacaacaaaactatagaccaggccaggcgcggtggctcacgcctgtaatcccagcactttgggaggccgaggcgggcggatcacgaggtcaggagatcgagaccatcctggctaacacggggaaaccccgtctccactaaaaaacagaaaaaattagccaggcgtggtggcgggcgcctgcagtcccagctactccggaggctgaggcaggagaatggcgtgaacccaggaggcggagcttgtagtgagccaaaatcgtgccactgcactccagcctgggcgacagtgatacttcgtctcaaaacaaaaaaagaaaaaaaaaacaaaaaaaacctgtagaccaatatcccttatactgatgcaaaaaccatcaaccgcatactagcaaattcaacagctcatttttgttccaattcgtactcaattcccggtttcttttactttatttttttagagacagggtctcactgtttgccaagctgaatgcgaactcctgggctcaagcgatcctccctcctcaggccccacgtactgagactgcaggcgtgagccaccgccctcagctgggtttaacttttttttctttgaggcacggtctcgctcttgcccaggctggagtgcggtggcgcaatctcagttcactgtaacctgagcctctcagcctcccgcgtagctgggactacaggcacgtgccaccacgcccagctaatttttgtaacattttgtacagaggttcgccatcttgcccaggctgatctcgaactagtttctaggctcacacgatccgtctgcctcggcctcccaaagtgcttgggattacaggtggcagccactacacccagccactccaaaaaatttaagatggaacactttgaaacatcctatgaagccagcattacactttgataccaaaaccaaatactacaatacaactagagaccaatatccctcaaactgatgcaaaaaccatcaactgcataccagcaaacccaacagcacaagcaagcctcccgaatagctgggagtgcaggtgtgcgcccccatgcccgactcattttttatttttattttttggtaagagacggggtttcgccatgttgcccaggctggaattttaattgctttttatcctcacatcctgggttagagtcgctcattcaccctcggggatccagtacaactgcttaccagggaagccctgctccccgctaaaatgaaaaccacagctagcccaatctgatcccagtgacattctcccgccacctcagtccagtctggatcctttgtctcccaactggagatcttggcgacctccagaactttggccgtgggtaaattgaggggcgggctccagaacccgcggctgaccaaccaaccgaccgacccttgggttggcgggaatagtgcctcgctgccatctagggtgctcgaccgggccccaacagcccaagacagggcattacgacacagcccattgtgcctctgaaggctctcccttcaccacacggcctcatggccaccaggcctgaagccaccgggcccgtggccctgcatgacccagacttcaatgaggagaacttacccggagctcgtggagcatgtggccctgatggaatggattcgcaagcggctggccatatcttgcaacacctgcaaggtgcccctgtcaggtctggcctcctccgggaactcagccctcgcctcagcatccgccattagtccaacccctttggagtctgaagacccactcctacgtctccggcgtctgaagagcgaatggcgcctgcgagctgcccagtgcgtttatgtgatgtcggtgcagctccctccgcatgcctcgtgccactccctccacctgccgctccctccgccggccgctccctccgcaagcaagtcaagggatctggaatgtttgtgacttgcatgtgcacagttattgaaaatagtcccattctcatcttctctcctgcaatctcaaaagggctccctccgcgcgggtgcagggtcttctttctctgcacaaaaagttccggcactagctgtgtggtgccgcacgtgtcagggggtggtgccgcacgtgtcagggggtggtgccgcacgtgtcagggggtggtgccgcacgtgtcagggggtggtgccgcacgtgtcagggggtggtgctgcacgtgggacgtgcagctgcaaccgtaaaggtgggggagggagggagctgctgtggcgcaattttttgtttcgtgataaatggtcacccctcccccacaacagcccaggctatggcgggcagggtgggggtggggcagtgctcagggttctgagacggttggcgcctgcgccagcctcctttccttttttaaaacattctatgaggcaagccccgtgtgattgttgaggaggagttagcccattgccagcctgtgacgtgactgactcgaatgaaccctggtaactagggaatgtgctcgccctgtgtctgaaatgccccatgtccggtggtgccagcactagcccccatgtcggtctcagagaaccttctccccacctctgaggtgacctaccgacccagaactcgcatggctcccaacggcgccagctccacagcgccgtgcccaagtccagacattccggatcccaagtgctgtctcttggttcaaaaatgccgaatttctacgtgagctcaagtcaggccgcctggtcgcgccacaggctgaatgcccttgggttcccatgttctgctgggttaaagggaatgtgtgtttacattttttttttttttgagacggagtctcgccctgtcgcccaagctggagtgcagtggctcgaacttagctcgttgcaacctctgcctcctggcttcaagcgattctcctgcctcagcctcctgaatagctgggattacaggcatccgccaccacacctggctaattttttgtatttttagtagagacgggttttcaccatgttggccaggttggtctcgaactcctgacctcaggtgatctgcccacctcggcctcccaaagtgttgggattacaggtgtgagccaccatgccaggcggtggtgggcacctgtaatcccagctaatgggaatctgaggcaggagaatcacttgaatccgggaagcggaggttgcagtgagctgagatggcgccactgtactccagcctgggcgacagagcaagactccgtctaaaaaaaaaaaaaaagtggctgggcacagtggcacacgctcctgtaatcccagcactttgggaggccaaggtgggtggatcacctgaggtcaggagttcctgaccagcctaacatggagacaccccgtttctactaaatacaaaaaaattagctgggtgtagtggcacatacctgtactcccagctacttgggaggctgagacaggagaatcgcttgtacctgggaggtcgaggttgcggtgagccaagatcgagccattgcactccagcctgggcaacaagagcaaaactctgtctcaagaaaaaaaatttaacaggccacctaattgcgattaaaaaaaaaccaaaaccctgaatctgtttagattcccacttgcagggtatgtgacatcaccttctgccacattctcgccagccctggacattgttaggctttttaatttttggcgttctggtggatgagaaaatagtatttaattgttgcttttcgcttactattcccggatcaccttgcaattacatgttttattatacgtttactgtcttttgtttttcgtcgtctgagatgtccgtggctaccctttaatgtctttatattgggttatttgctcttagtttactgatttgcagttctttatatattgtgttgattagccctttatctatcagatatgtttcaagcctttttttttcttgtttgcttttatttatt

SEQ ID NO: 1564235 - DNA, 4001 bp, Homo sapiens
tgctggagcccccaaagcactggtgtgagccactgtacccagcctttccttattttaaaccagaaatctaaacacccatattgcgtttatatatctatttttttttcaattttcattgtaaagagggctggaagcggtggcttgttgcctgtaatcccagcactttgggaggcagaggtgggcgcttgggcccaggagtttgaggccagcctgggcaacatagtgagaccatgtctctacaaaaaatacaaaaattagccggtcgtagtggcacatgcctgtaatgccatctactcaagaggctgaaatgggaagatcgcttgaggccaggaggtcaggggtgcattgagctgagaccgagccactgcactcaagcctgggcaagagcgagactctacctccccaaaaaaagaacaaaaaaagatgtaaaaaaagttcaagtttatagacatgtttaaagcctagcacaatgatttccttcctgtatactgcttacctccaataaccaactgaaagcaatggaaggcatttacttcatccctctctccacacatgcgcgtacacatgtaaattctatttattttttgccaaaccatttgatgttatggttcagacaccaagacaagggtcacaattatgacctttaggcacttacttcagctatgcccagtttttgtcttcacttcccactgtgctaatctggcatttctatttggacacagtactctacccagccagatttttcttttgagatggagtcttgctctatcgcccaggctggagtgcagtggcacgatctcggctcactgtaacctctgcctcccagcttcaaacaattcttgtgcctcagcctcccgaaaagctgggattagaggcatgtgctaccatgcctagctaattttttttttttttaagtggagacggagttttgctatgttgaccaggctggtctcggactcctggcctccagtgatccacccacctcagtctcccaaagtgctgggagtacaggcgtgagccactgcacccggcccctagccaggttttaatttgcttcgggacacagtgtactttgagatggcatcaaaccagccacacattctcaaactgaccttgtttttaaggttctttttctttcctatcacccatgatacttcatgaagtggctggtattttgcccaatctcatgagaagtgcccatcagtttcaggtcagatgtgcagaaacatagaagaggaagctaactgacaggggtgggatgtccctcccggttacactcaagttcccccaggctcagtgagtgggattcactgaggctgcctgcctctcctcaggcagcacagagggtgggagcagcataaccctgccatgggggaagcgttcgtgctaagtggggcgaggcagggtgtgaccaaaggaaaggaaggacagtcagctctcccaagccacccttcctaccatgccatcacagggctccaagtggccctcactagaacactcgagctttaagatgcaaagaaagaagaaccaaaataataaacgaggcccatttcaggccttgttcccacacggtggctgttcaaactgggcttaaccagcaggcgccacagcagccctgggctccccaccggcatacctttgcgaggacaaatcggtcgttgtccggattctctggatctgactgcttgtacctcatgatgtagaagaacagcacagacatgatctcagaagaactgctacatgatgtagggtggctgaaagacagacatgacactggtcatttctcacagcaactggcttcctagcacacgacctcggcacatggtctcctcatagaagcggtcatttctcccagcccgggaagaatccaaccaagggtaaggaatgcagggctcacaggttggaagggcgctttaaagcccggtaagctcaccacccctccccctgtgcacagtgaggccagctcctaaccgcagagcaccgtggactcggggcaagtttcctttgtgcctctgacatgagtattctttcacatgcttaaattcatctgtggcctttccacatgccgaggaactttcaggagcattgtgaatcagaaatgccatgaagatcccattctaccttctacaatgaatttcttttaggaagtgaacggtgacagactgagaaatttgtcatggtagagtaactgaggccctttctgaatgctgccaaagtaactgctgctcttagaaagcggcctgcatgtgagtccagccaggccctaattaattaaaaagggggaggggacaagacagcaggggacaaaaccaactccctggagctctgccccaactgcaagtaaaaaaagatgttaggcccagctcatattaataatctctcatttcaaatttcactaagaaagtccccattaagaaaatggggactgtccctcccccattttcttaatggggacccgcgaagggatgggccctcactctgtcacccaggctggagtgcagtggcatgatcatagctcattgcagcctcgacctcctgggctcaagtgattctcccgcctcggcctcccaaggtgctgggattacaggcatgagccacgcacccagcctgataaaaaaaaagcttcaaaggacacaaaaagagggcttttgcacgtgcaattgtcgaaggtgactgatgaatggttttggggtgctgatggcagagcccaccaggctgcagggctggcgtggacattctcctgcagggctggcgtgcacattctccaggacccctcgttcacactcactgtcctggacatcttccctgcattgctgggataccttgttctttattcactaagctctttcctggctcagtgagagaaaactcaagaggccccggcagcagaggagtaacaggcttcagtggagaagggaccgagaaggaagtaattggaaatctcttcttcctctcaggttccatctcctctgctctctccccactgctgagggtcggtagaaaggggggtgacacactcccaccccatccttgtcacactgtgatctcccccaacgcatcagtgtctgcacctttgaggctccaaaaagacgatgtgccctttctactttggaaaatcacaattctcagaagaccaacagaaatgcatgtagaaaatgatggaagttactgggtatcagagaacacgatgacctgaatgagcaagaagatggtggggggcggggggtagggtggaagccagctaggactcggtagtgacaaatgcataactatttgcttattttcagtgccttttgcttcaagtgagaggtttctgctctcccatggtgaagtgtgaggcataaatcctgcttcattatgggggacttccaggggggtggcacgcagcccaggagtccccctggcatgatgagggggaagttgggaaagagaagcagaaaagaaaatggaagggggccaaacgcaggaggtgtgaggaggaaagccaaggaagacgagggaagagggaatgataaaaaggagggagaggccaggcgtgggggctcacacctgtaatcccggctcttctggaggatgatgcaggaggattgcttgagcccaggagtttgagaccagcatgggcaacatggtgaaacctcgtctttccaaaaaaaaaaaaaaaaaaaaaaaaaaaaaaaattagctgggcagggtggcatgcacctgcagttcaagctacttgggaggctgaggtgggagggttgcttaagcccaggaggtcaaggctgtagtgagccatgatcacgccactgcacctctaggctgagcaacagagtgaaaccctgcctcaaaataaataaataaataaataaataaataaataaataaataaataaataaaaattttaaaaaatggggaatgagaggtagggtctaataagtagaaggcaaggtaggaggctggcgcaggaaacgagtcagggtgttattttgtgcgctaatgcaatgggttaacgcattcg

SEQ ID NO: 1564236 - DNA, 4001 bp, Homo sapiens
gccacccaagctccttaacctctcaaagccccagtttcgttatctctaccttatagggctactttgaggccaaaatagaatcatgtctatctagccctcagcatgatagttgagtggtcaagaaatgtgagctctctgtattactatcattcccattatgccacccatcaaggggcaaagacagatgtgggcataggtttgcattaaaatagacatctgggtttctaggaaatgaaaccgtaagcagttgtttcctttgtaacaatagccccatggttaatgcttcattagaactttgacacaaaatgagcctaggagctaacattcggatctagaatgtgtctgatttaagtgacaaaataatttcagaaaaaggcccttgacgtctttttccgactaagttttggcatacctaataactcacacttgcatcataccacttgcaaaggacttgaaaaatagtctattatttgagcctcacagtggccctggaaggcaacaggggagggattctaatgcctatttcatagtcagagaaattgagtttcagaggactttgatgacaggcacaaggcccccccaactagtgactgggagagccagcgctgacaaagactctccttaattcaacttaatcaggctctactacacccctaggcttcggcctttggcttcatgtccatctttgcattgcccagttcaagcaggaatcctgctaagtcattttattgataatccactcctcttggtatgtgatcaccctcaatatctgatcaaattcctcatctcccaccatccacaggtgaggtctgatcaccctggcctgtcttcagcaagaatcctgtcaggtcggtttagccagaatccttttacccttgatgtttcctcttagtaattttccatccactgacccccactctactccttggccagaaatctttactggtctttggctgtatttggaattgagcccctttctatactgaggtctctttctgccgattgcaatagtcctgatagtatctttatctactgtccaaatttagttttctttgacagcactcaagcccggggatttcccgtattttattgctatgagcctgcccacacactttcatccacacagtcattaagacaacaccatatgctggaaaaagcacaaagtaacttcagtaattcagtgatttgttatggctttaaagccaaaattgtaggctgaagaaatgagatacatagaagctatgtccccaattcaaacatctgctcctcctccccacagcacatatttaattcttgtaggaagttgaacagagcaagcgttgattaatctgaaattgtgacatgcccccttcattaatgccaattgtgaaatatcaggaagcactttcccccagcaaataacctaagtacagattcttcaatattgctcttgccagctggtttcagttgtttccacaaagattacagataacactttttaaggttctctgagctgttcttaccatttttagtcttcttccaaaatggaatgtagaggtctggttgaagagagcagagcatgagaggtgccaagatcagcttgagatgggcccaatagcatcaactaagagaaagagaagacatcaaagtttacatttcaaagacagcacaatactgtagcttaaagacatgctaggatcattgctttaaaatgcgtttgaaacatctatttacagtatttacttcctcaaagttaggtagactggagacatattccagaaaaccatttctaacgttactgaaagcctaactttatctttgaagaattgacattttagactaccacattttttatttatattctaaaaaaaatttttgtgcatatgatttcggttccctcttctctcctccccacttccttataacagcacatacatctacctacttaaattatctatatgtgttccaatgtttaaaatacctttcttgatggcatggagtgatcctatatctggagtcttctgagatgaagtgatgggaggcaggaagtgtagtcacaaagactacaggcagccagccctggagtttccaactacaaagatcaggtcgggggatggggaggagcatgattatttaagccaccccagatatgggctttgcaaaagcacggggttcctcttatttctatcaccactattggggcaacgtcttgtctaaatccaaacaactctgtagaccaaatttctttcgtttttatagcagggtttctcaccctcagcactatttacatttttgaccagataattctctgttgcaccataggatatttggtagcacccttgctctatacccactagatgccaatagcactgcccccttccagttatgacaatcacagatgtctccagacattgcaaattatcccctaaggggcaaaaacaccccgggttgagaaccactgttctatagatatattagagacatatctaaatttaccttattctgtcttagacccagctggaaaggatgctggtttttaagcagtggcaaagctaccagttggttcactcactttcctctaaaaaagttcagctgcatttgcttctcaaagtgtgggccccaagagaattgttcctttcttaactgattattggacattttgtagatagagccaaaatatggtagttatgtttaaagttctttaatctacttagtccacctggagagaatttggatgatgtagagtgtggcacggggacttctgcagataatgatcagggttaacatatactgggctgaaaactcaatggtgcaatagagcagctcaaaaaccagatacagtaataagtgacatttattgagggttttttatgagccagacactgttttaatgactttatatgtattatctcattaaatactaaaactatataaaatagagatcttattacccattttttacaaatactggaatttataacagaagaaatattggatttgcctcaagtcacatagcaagtgatacccacacaggcagtaaaaaccaaatgtctccttattaaaccactctgctatgcaacgatatgtaaaaatcaatagttttctcatacataaataattactgatccaaattggtaatagaagaagaggtcccattcaaatcagtgagatctgaaatgctttggaagaaaactgatgggaaatgcacaagaactaaggtggtggggggaggatggggactataatgctttacctggcaggtgcaagctttctctttgccccaccagacccactgtctcagccttttatcctgttctgtgtctctggaggctgagctatatgtgcttcatcagtagccccttgctcgctggcttctggttgggtttggccaataggaggccgtggttggaaactgaagggcaggaagagggagagcagagcctgcctccctctggctccctccgcctggccctgcgttggctgcagtcctctaatgaagctcttgtttggtgatgctctcctccctgaattccagtaatcgttccttctccttcagcctgaggtcggaaagactcccctctgaagtgttgcatcatcctttcttacttccttaaatcctgtccaaatatataaatagtcactttgctgaactcatcagtttctcactttaacatgccgtctgtttcctggcaggaccctgcccagacacaaagatataagtaaatgaagagaaataattgttattggggctagaggccacaatattgtaaaaatagaaatgttgcttaaattgatttgcaaatgctgtgtgatcccaatcaaataccaataggatttcatgtgatacttgccagactgattctaaactggggtgcattttggaaatcagctgggcctttttgtttatcatgaagactggggttacattatccacaaatatctcctttcatataacaaagggtgcattaccaaatatttgttataaaagtgaggtgttgggtctgactggggtaagaccacat

SEQ ID NO: 1564237 - DNA, 4001 bp, Homo sapiens
cttaggaactctaaaagctacaaatgccaagccctgtatccagagattttggtttcattgatctggggttcagtctgggcagcaggagttttgaaagctccccctctgatttgagtccattgcgaaggctaacaacctctgcctttaggcaggaggtcagccaggtccttgacctccattggccaccagtgggagcaaagtggccattttttgcaagtttaatttgattttattattactctatttaccaatctgttgttgttgttgttgttgttgttttgaaacagagtcttactccgttgcccaggctggagtacaatggtgcgatctttgctcactgcaacatccacctcatgggctcaagcgattctcctgcctcagcctcctgagtagctgggactacaggtgcgtaccaccacacctggctaatttttgtatttttagtagagacgaggttttgccgtgttgaccgggctggtctctacctactgacctcaagtgatccgcccacgtcggcttcccaaagtgctgggattataggcgtgagccaccgggccccggctatttaccacattcttacagtacaattatactggctatcacagcagcttacaaatatcaagtaggaattggataatttcaactgcaatcccatatgtgtcattggcccagttgaccgaattccatatgggccacctacagtcattttgtaaagcattgtaaaattttagtgcagaattaatttaccttcaagatccataatgaacattaggtgggtataaaaattaacttcaggccgggcgcggtggctcatgcctgtaatcccagcactttgggaggctgagacaggcggatcacctgaggtcaggagttcgagaccagcctggccaacatggagaaaccccgtctctactaaaaatacaaaaattagccaggcgtggtggcacacacctgtagtcccagctacttgggaggttgaggcaggagaatcgcttgaacccgggaggcggaggttgcagtgagctgagatcacgccactgcactccaacctgggtggcagacccattaacttcaaaagacttaagtgtactttaaattgttgtcaaaattaactccaaggactttggggaaaaatatatagtacattttggatgagactctcttgaaatcagacttttcaattgctcttaaacctcattgaattttctagaaaatgtatcatttaaaaagaagtgtaaagttcatttttagtctgacagttcttgacaataacaaaaacggaccacctgctatgtcttgacagtgtaaaataataattacagaaattgtagcatgttattaggttggtggaaaagtaatcacagttttttgtaccaacctaattatttaaaactctgaccaagaaaagtagcaattaatgtcgaactttaagcctccaacagtaggttaagctcaggcttcactaggatctagcaattgacctatgtatgtgaaggaagagagtttgtccttttctacagaaatagcaaaggaagaatatttccctcaccttctcttccaaccctgttgttctggaagaggatattgtctctggtagggccagtaagtaatatttccagttcaatttctaacttgaaattttcttattttcctgtccaaattagtaagatcatcactgcatttgattttcaaaatttactctctaattcctttatactaacgtgtgcacaaattaaagatcatagcaagccgctttacctgcatttacagttgtttcgatctttaatttttatccttatttgcccatttattactttctaggctcacaccatttgccaccaacccagatttctgggtcagaaaccccatattctgttggaaagctttgctaaagaaatagaagtggcttaccatgtttctgttgttctaatttttcattccgtaacttgcagcagcgcagaatggtaccctctatgcaggaggtggccgagaagagaaactggctaacttcctgaaatggctctatttaccatcagcagaacgtagcgtgtgttttacagaagtttacatgaaaagaagggaacttgtgatttcttagctgttgccaaatcattaattgactgtgctttaaaactttgaaactgaagttatgggaaaaagtcatttatgaaatgatttaaatacaacccaaatcagacacacacgacgtatttttgttagtttttgtgtatttgtgtgtacaggggagaaaaagggaacattattccattcactaagaaaacttcagtgtattcttttttaaaaaagttaccataaatttgtactgaacttcggatttctcaaactcgtcttccttgtgtaattcacagatgtaggcgaataacatgaacattgcttcatctttgttccacaagtttctgagacagcaccggtaggtatgggtctccctcccactgggctgtggccgcaaagcgagcatctttctcctgggcgccccatgcctcctccagcacctggcatgtagtataagctcaatgagtgttcattgtatgaacgagtgagtcaatggctgagcattcgtgaggctggaaaatttaatcttcccgatttagtctgataaatggattccattttatgctcggagagcaagggcctcaaaaggtgtaaccaagagcagaggtcagcaaactgcagcctttgaacgaaatccggcccagaagtgaaaacatttttagatgaacattggcaatggatttgctgatacagaacactaactttaaattccaaccaagcagaatgttagcacctccaaaaatgattccattcttctcattattaaacctatactacaaaaaaactgccttcgattattattattacattttgagtttcatcaattacataattgtggaaatttttattttactatataagtagctacataatatgccaaatttgcttcttggcctgtaaaacctaagatatttgccatctggccctttacagaaaaagtttgctgacccctggccacaagaataaagtttagaacgggatgtgatatgtttcatcttgccttacaccccaggagtgggagaaaaccaaattggcagcagggtgggcagagatgacatccatatataaatggactgtggaacaccttgttatgaaggaaggcctgtcagcagtcaaagaatggcttgggtgggtatacctagatggacctctaaagatcacaccctaagggaattcaagacctggtgcatggtttgagaggtgattcctgtgacatcagagagtgcagcctgggccttcatgggcaaaccaaaaacatttgtgattgtaaacccaaaggcctcggctggccgcatccaagtctcttggtttccctccaaacatttgcttggaaataaagtaaagaaagtaagtaagaatggatcgagtgcagtggctcacacctgtaattccagcactttgtagaggccgaggcaggaggatcacttgtgctcaggggtttgagaccaacccgggcaacatggcaaaaccttgtctctaaaaaaatacaaaaattagccaggcatggtggtgtgcacctgtagtcccagttactcgggtggctgaggtgggaggatcgcttgagcccaggaggtggagattgcagtgagccatgatagtgccactgcactctagcctgggtgacagaatgagactttgtctaaaaaaacaaacaaacaaacaaacaaaaaacagcgaagtaaaaatgacttccagccgttgactgagcaaggatccttggaactggagagtttgtcagctttctagaaaagcgagactcacataccctggcttctaggccaccaagtgtcagccaattgtagaccagtcaattggccttgtaaagcatgcttgtatacgtatatatatatatgtgtgtgtgtgtgtgtgtgtgtgtgtgtgtgtatcatcatgtatatatgatatatatatattttttatgtacatat

SEQ ID NO: 1564238 - DNA, 4001 bp, Homo sapiens
gtatttccccaaagtaccacagtgtagatgagaaagtttatgcgaccacctccaggaaagagtgtcaccaggcccctgggaaattaactaccacagaaggcaagggagctgggtcatggtccactgatgtgattcagaaagggcacctggctggggctggaattcctgcttgtgaaagcccagggcacggcagggttgggctgggctggaagggaggggcagccagggtgagtgccagtcgttcctagggttcaggcacaaggttcctcacctccactgtggggctgacgcactgtgcaaaggtgaaagaaagccaaacctgaaatcggcacaaaggcagccactcgttggaaaatcatttttaaaggtccccctgcccgccgggatgaggtgctgtacactatggagtgtcctgagcacataaatgactcttatcacttaggatgcccaggaaaaagtcaacagactcacatgcatcatggtgaccaggtgacaggggttgagcaggtagatgacggtcttggtggcgaacttaaagcccacctccaccccgaaggtcaggcacagggctactaagagcagattcttgctcaggctctccttgccttcctctggccgctgggtcacctgctctggctggctgccagggctacccctaccgtcctccttcgtctgcctcaggatgtgccgcagggccaccaggatctccaacagagccagggtcaggaccaccacactttccagcagccgctgctgccaagagaggaaggcagcacagtcggggcccccattgcctgcaaaactggggtccacgcccccatagagccagtccaggagactctggtagctataccgggacatgatgcagtggttccccttgaccacagtacaggaagcaagagtgagatggaacacaagcccagagggttgcccgggtggtggaccatgtaaggcgggcacacccccacaacccccctccagacaccagggcaccgagagtaggggaggggaagctacacgcaaggcccggggtaaagtgctggctctaacttgtccccacggctgtctgggggagccccccgcgcttctccagtggccaccaacgaggcagggttgaaaggagccgttggccaatctaaaaggaaggagaggaaaaaaaaaaaaaagaggtctcaaagaggcaattgcaccgggaattaggaagcgggaggggtaactagcgagggaagaaaacgggaacggggcagtggcgaagcaagcaggggtcaggggaagccggaggccgaaagggtcagggcgggggccaaggagacccggcagtgctgcggcagcgaaccgggagccaaaaggggtcagagctaggggacacgcggaggcaaggagaggagctagcggggccgagcaggcggggagggcgacggggatggcagggacgccggactcctcgtctcacgcactcgccacagagggatctcttactcctgcaaccgcgtggccgtctctgcccccagctagcaacttcgccgccgacgggcccctccagccaatttagagccgtccttgtccagcctcccgcccccgggtacacccccgaacccccagctccaccctccggccctagacgcccgccctccgggcagcaccacccccagcccgcggcccgcccgggacctgcccccctcgcgcaggcagcggagggaggaagccagagggaaggcgggaggccgggccagccgggggctggactaaagccggcccctggactaaagccggcccccctccctcctccccggcgccgcaacctcccgcgcctcccgcccagccccggggaccggccgccgcgcccctcggggcttcactcaccggcagctcggcccgcggccccggatcgggctactgctccgctcccgcgctctccgcgccgggcgctcggttcccctggcggccgccgccgcggcgcacggctcctcctccccgtcttcctccccctgcagcagccgcgctcgcttcctccttcttcccctccctctctcctccccctccccgctgccaccgccactgcctccctcctcccgtccagttcagctctcgccccaccacacgccctcgggccacgactactcctcctcgcctccttcccttttctgcctctggcactcccctcacccgtccaccattcacacctcccaccctccgcggcttcggctctccctcctcctcctccctcctcctccctcctccggctcaggctccgcctccttccgcctcctccctggcctgcctcgtcttctgcactcggagcctgcacgcgtgcacagccaccctccttcacaaccgtgtacagaattcgccccctcggtgaagccctgttgactggctccgcctcccgcgacctggttctccagggcacttctttctatactgcacacatagtaggcacttagctggcccgcactaacttcttgtgggggaataagcctttctagtaatgagcagcttggcttcggggtgtgtgctgggtatggccggctcctcttcgcgattcctcctttctgccacgactcatgcaaggccagaaaggcatcttctctcccctttctagccacagccccactccacacttcagtgcctaggacaggagcttcatttccctgctcctccccctcctgctctgatccactattttctctctacctcttgccacacagaccacccctgccacaccctctccctctcccacttctctcctttctcctgacaggccttcaatggtaggccagtgggaggaagggaggcttcccgtgacctctttccctccccctcttccccccttccccctccccagagcagttgcttcctaacctatgcgtggaaaagccagccaggactatatgagtgtggaggagcagcactaagcccaaaacctggataagggcaactgacggaaataaaatcccctcttcctacctgctgctttttaccgatcggctatttgcttttcttgagacaagggtcagtaaaaggaccttctcaggaccttcctcatgtttatttaatatttattgaagactcacgatgagttagaagaatatccagaaaaacacagttaggcaccttgcctaggaaacacttttggatgttggctgcaagccaggctcaaaacataaaatgcaatctactgtattatcaggccatcgccctcccgttttttccaagtctggttttccgaacaagtacagccaggtagccttgtctgactccaagttttgtacaacatctaccataggcctgatgttctccaagtgtcagaggcgttagaaccagagcgactccatcttgaacagggcctggataaaatgacgctgagacctactgagctgcattcccaaaaagttaggcattccaagtcacgggatgagataggaggtcggcacaagattataggtcacaaagaccttgctgataaaacaggatgcagtaaagaagccggccaaaccccactaaaaccaaaaaggtgatgacagttacctctggtcgtccccactgctcattatatgcaaattataacgcattagcatgctaaaagtcactcccaccagcgtccagaagttaccctatatggtctgaaagggggaggaaccctcagttctgagaattgcccacccctttcccagaaaactcatgaataatccaccccttgtttagcatataatcaagaaataaccataagaattatcagttgagcagcccaagctgctactctgcctatggagtagccattctttattcctttactttcttaatagacttgctttgactttactccaaattctttcttgccccgaattcttgctagaggtccaagaaccctctcttggggtctgcatccagaccactttccagtaatacaagtgccaattaataaacaacaacaaacaaggcttgattcagaggctcactagttcattctccttaagtgttttgttaaatcctcagcaaca

SEQ ID NO: 1564239 - DNA, 4001 bp, Homo sapiens
acagcctgaaatctaaaaaagactgattgctctcccagtctcctcttcctcctcctccatgattttatagctttagaacatctctccacacaggctgaatacagacagtctcactcttggtcctcacccagattatttttatgtatctggcaacttgccttttcaatcccatttgttttccttagcaccgctaatgggtggaagtcgatgaggtaaagaaatcagcttcctaagcacccttggactatgaccataggagacagaatgacagtaataggatggagaggtttgcaaaaaaagaaataccctctcaccatagtgatcaccagcccaaagtacacatgtcagcctggggacctgcttcagaactcatttagtaggagcttggtgctgctccaatgcctcaaaatgcaaaggcagacctcactctaagagcatacactcccaaatgaaagagtcattaagagaaacctgtaaaagtatttccccaaagtaccacagtgtagatgagaaagtttatgcgaccacctccaggaaagagtgtcaccaggcccctgggaaattaactaccacagaaggcaagggagctgggtcatggtccactgatgtgattcagaaagggcacctggctggggctggaattcctgcttgtgaaagcccagggcacggcagggttgggctgggctggaagggaggggcagccagggtgagtgccagtcgttcctagggttcaggcacaaggttcctcacctccactgtggggctgacgcactgtgcaaaggtgaaagaaagccaaacctgaaatcggcacaaaggcagccactcgttggaaaatcatttttaaaggtccccctgcccgccgggatgaggtgctgtacactatggagtgtcctgagcacataaatgactcttatcacttaggatgcccaggaaaaagtcaacagactcacatgcatcatggtgaccaggtgacaggggttgagcaggtagatgacggtcttggtggcgaacttaaagcccacctccaccccgaaggtcaggcacagggctactaagagcagattcttgctcaggctctccttgccttcctctggccgctgggtcacctgctctggctggctgccagggctacccctaccgtcctccttcgtctgcctcaggatgtgccgcagggccaccaggatctccaacagagccagggtcaggaccaccacactttccagcagccgctgctgccaagagaggaaggcagcacagtcggggcccccattgcctgcaaaactggggtccacgcccccatagagccagtccaggagactctggtagctataccgggacatgatgcagtggttccccttgaccacagtacaggaagcaagagtgagatggaacacaagcccagagggttgcccgggtggtggaccatgtaaggcgggcacacccccacaacccccctccagacaccagggcaccgagagtaggggaggggaagctacacgcaaggcccggggtaaagtgctggctctaacttgtccccacggctgtctgggggagccccccgcgcttctccagtggccaccaacgaggcagggttgaaaggagccgttggccaatctaaaaggaaggagaggaaaaaaaaaaaaaagaggtctcaaagaggcaattgcaccgggaattaggaagcgggaggggtaactagcgagggaagaaaacgggaacggggcagtggcgaagcaagcaggggtcaggggaagccggaggccgaaagggtcagggcgggggccaaggagacccggcagtgctgcggcagcgaaccgggagccaaaaggggtcagagctaggggacacgcggaggcaaggagaggagctagcggggccgagcaggcggggagggcgacggggatggcagggacgccggactcctcgtctcacgcactcgccacagagggatctcttactcctgcaaccgcgtggccgtctctgcccccagctagcaacttcgccgccgacgggcccctccagccaatttagagccgtccttgtccagcctcccgcccccgggtacacccccgaacccccagctccaccctccggccctagacgcccgccctccgggcagcaccacccccagcccgcggcccgcccgggacctgcccccctcgcgcaggcagcggagggaggaagccagagggaaggcgggaggccgggccagccgggggctggactaaagccggcccctggactaaagccggcccccctccctcctccccggcgccgcaacctcccgcgcctcccgcccagccccggggaccggccgccgcgcccctcggggcttcactcaccggcagctcggcccgcggccccggatcgggctactgctccgctcccgcgctctccgcgccgggcgctcggttcccctggcggccgccgccgcggcgcacggctcctcctccccgtcttcctccccctgcagcagccgcgctcgcttcctccttcttcccctccctctctcctccccctccccgctgccaccgccactgcctccctcctcccgtccagttcagctctcgccccaccacacgccctcgggccacgactactcctcctcgcctccttcccttttctgcctctggcactcccctcacccgtccaccattcacacctcccaccctccgcggcttcggctctccctcctcctcctccctcctcctccctcctccggctcaggctccgcctccttccgcctcctccctggcctgcctcgtcttctgcactcggagcctgcacgcgtgcacagccaccctccttcacaaccgtgtacagaattcgccccctcggtgaagccctgttgactggctccgcctcccgcgacctggttctccagggcacttctttctatactgcacacatagtaggcacttagctggcccgcactaacttcttgtgggggaataagcctttctagtaatgagcagcttggcttcggggtgtgtgctgggtatggccggctcctcttcgcgattcctcctttctgccacgactcatgcaaggccagaaaggcatcttctctcccctttctagccacagccccactccacacttcagtgcctaggacaggagcttcatttccctgctcctccccctcctgctctgatccactattttctctctacctcttgccacacagaccacccctgccacaccctctccctctcccacttctctcctttctcctgacaggccttcaatggtaggccagtgggaggaagggaggcttcccgtgacctctttccctccccctcttccccccttccccctccccagagcagttgcttcctaacctatgcgtggaaaagccagccaggactatatgagtgtggaggagcagcactaagcccaaaacctggataagggcaactgacggaaataaaatcccctcttcctacctgctgctttttaccgatcggctatttgcttttcttgagacaagggtcagtaaaaggaccttctcaggaccttcctcatgtttatttaatatttattgaagactcacgatgagttagaagaatatccagaaaaacacagttaggcaccttgcctaggaaacacttttggatgttggctgcaagccaggctcaaaacataaaatgcaatctactgtattatcaggccatcgccctcccgttttttccaagtctggttttccgaacaagtacagccaggtagccttgtctgactccaagttttgtacaacatctaccataggcctgatgttctccaagtgtcagaggcgttagaaccagagcgactccatcttgaacagggcctggataaaatgacgctgagacctactgagctgcattcccaaaaagttaggcattccaagtcacgggatgagataggaggtcggcacaagattataggtcacaaagaccttgctgataaaacaggatgcagtaaagaagccggccaaaccccactaaaaccaaaaaggtgatgac

SEQ ID NO: 1564240 - DNA, 4001 bp, Homo sapiens
gcctccctaccccactgagagattatactcattctacagataaaacaatagataagtgagttgcccaagggcacaaaacaattcagtttttacttaactttcttatcaccatctccaaatagaagacatacagggcttgtccagccacagcaccaaccctactaccctgcagaccaatcttaaccccctgatgcagcagaggaagggactgcagttagttctgttacctcctctatgccttcgaagccaacaatgataatgtctgcaccgtgttagagacactggcactcctaaccagaacatgaactcaaagtggaataagagcacatacaaagtcacaatgactcacaagttaaaatgtcaccatccctagggagactgcaccctcaacatacaaatactcccctaaaacttcctttcatcctcaacaagcagccaaggcataggtccccagagttggcccccgcagtacagcactgcacagtactgtaaggcatcttaagtgtacaagcccttcttcaccccatgctgagaccgccagcatctaaagcacctaacataggttacagcacacaaatatttactgagcacgtcttcccaactggcaaataagggaaacggatactcctttcggagagtagtgcatttaagagatcagttaggccaactcctcattttacagaagggccaaagaagggcagagaatcacccagttacatatggcctcgtctccaatccaagtctttgggctcagtttagttccacaaacattttatatgtgcctactatgtgccagatacggtgggtgggaggcgctggggacactgagatgagcaggagatggtctcagcttcagggagctcacagcctggggtaaagaacagttacaaaacagtcgggcaagtgcaaggacaggcgcttgagtgcttagccagtgttttctccacactgtccactgggtgttccccatctggaaaagaaggacagcaatatctacttcctgcaaataaacttgtagtgaagactgatgagaaaatgagtatggaaaatgatcaggctcacccagaaatgcattatataaggtattgccataccccgacactgactccaaggattcaacagtgtttcaggtatccgttcaacaaagaagcaaacaagagagggatgggcataaacccaaggaaaaccccaaggactgcgaggaactggaggaaacagctggggtgggggtaggggtgttgggtcgagtgagacggccctgacgcggagaatggagggcccgcagcggcgcagaagaggatggaaccgagacgaagaagttgggacaccaatgagggacagcaagcagaaaagaatggggttcccttggggcaggacggggctcgcggccgggcccttccggccgtggccgggcaggggctgaaagcaccgggcacgggaggaggaagcgggcgggcgccgaggccgactgttttgcctggggaccgcttgcacccgcagggaggctcgggcaggcgcccgggtcctcgggctgcagcatctcgcccgccgtgcctccccggagccgaacaccagcccgcgcccgagcccgcagcgcggactcccgggggcgccaacgacgccgcctcacctcgggttgaagtcctggaagaggcccctcaggttcatggcggagaacttcaccgcggcgtcctcctcctcctcccccgcaccccgtgctgcacagcctgcgccttacagcgggttcatggcgccagcgccagccgcgtccacgctgctgctcccgctactgctgccgtccccgctgccgtcgccgtcgccgtcgccgccgccgccgccgccgccgccgccgccgccgccgccgccgcccggagaaacctgagccaccgccccctgcccctccttccgggcttccgtacgagggccgcgcatgcgtccggagccccgcccagagcgctcctcgctgggaggtccccatccttgtgtccgcacgcgaccggcggaggagatggcagggggatggaggctgggagtgagcagggccccgaggaaggggatgctgacgggctgaaggcctgcagggagggagcgcgccgcccgggagtctggcgggcagatcttggcagacacctgtcaccttggcccgcgctaccttctggagattttccccagtgacgactgagccctgggagtagtgacaatgagtgagacgttgcatttttggcgatgtcatcccaggcttcacctgtcacatctgtcaacgactccaaagtttgggtcccaacttcccttccaattcccaagccagcgtgtccagatatgctggctattccctactcaagttacctagcaccaaagtcacttcccgtgccaaccgccttcccctcctgggttccctttttcccttagcagcaggcctattcgtacgcaggggggtattcaagcaggagacgtggaaatcatcctcatttttctaacccagttcagagcctccttggatcctgtctaaactttgtggtcacttcacacctgacctctgcctccactccaggctgccctacttacaagtaccaggttcatcttccttgggcaagtcaacatctttgagtctcagtttttctcctccgcagaatggaaatgataaaaacctcttttctaagcgtgttaggaagattcagtgagatcgtgtgcataacacactgcctggtacatgctaggtgtacaaagaatgctgttgctatctggtactctttcaggtgtcaacctcctcaaggattttgtttgcttttggaatccaagagcaggacaagctcatagcaggtgacctagtttaccatcttcactttgggcagatttaagttttcatgagcacaacaatgccttaaacattagtctactatcattatggataatagtcatcctttgttgcaatagcagagtttcacaaatgacaattttatactgtttagccccaagggcagcttgagagaatcacaattgcgatagtcatacttagtcttgatgtatcacctttcttctgagaacgtaaaaacatatcataagtggtaattaagcttcccaacacccactgggaaatggatattattatatgagctgattttaaggttgagtaatccaaatcaagttttcatctgctgaagcaccaggaccctgtcccagactttttcacccatcttcctttcccatcctctgggtaaagtccaatgtgtagcccagaggaggttctcaatgaacactcaaatacagacgaggaattaaggcgcagagaagcttgtataacaggccctgagcgagccagcaagtaagggtgaaggagcacagatgaaactcagggtctagctgaacctgcagcccatactgttagaaagaggtgcttgccagtggtcagattggacagcaccatcttcattaccagtgaccgtgccccaagcaggcatgagaagatggtctgccagttcagacacttgaataacaggcatcactgccctttcaagagcttcatagatagagaccaggcaggctcctcagagtccagaatcttgagggcagacgctactttaatgagatcccagggagtctgggagctgaaccactgctctgcaggcccacaagttcaattttagcagttcttccagagttgaccaggccctggaagctatctagcaaaggcaacaggacactgatgcacaaattacttgtcagtgtgttcttttgctctgacaaggtaaattgccaagaggaacatatgaacctgtctgtgaggaaatacaggaagaactggactttcccaaggcttcacatccccagtcttcaagaggtggattacctggactgattctggaagcccaaccctttatgctactggtgctctcatggggaaaaaaaagccagaaaccagatggccatctggtcctctctccagcaagtgcaaaagaccctactgacaacctgctgctcacttcagagccctcactcagtgt

SEQ ID NO: 1564241 - DNA, 4001 bp, Homo sapiens
aaagtcttggccagacttaaagtgccatccccatccagccctgtgagctcctcaggcccagctctgtcctggaagccctttgcccacttcgcctggccattgcccttgactcagctgtcatttcctctcaggcacttccccgttcagctcctgactccagctgagacaccagctgaggccccgcatggcgtctacaggtccttccctgcacccacctagggccccatggcacccatgctagtctgaccctcctgcctgccagcaagcagggcggagagctggaacaagagtcaaacactgtcaacttgatcgaggaagaactccaggaagggcatggaaagcaactcctctttccggctgcaggggttcagtctatctgaccgggggtacgggctgacagtgaccatgtaatcaaagcacctgtccaagacccccaggaaaaccgagctggttaccttatagcctagcttccctgtacctttgaattgccatgatccttattatgtgacactcaaatctcgtcacagcttcccccagcgcctggcatgggaaagccaacacctcaacagcactggcccctgggtctggggtctttcagggaagccctgggaagcctgacaatctcctggctaaaggccccagactctcccgcacgcgtttaaacagcaggcactgtcacctccaggcctttagcatttatggttagttatgtcccccgctccgcatgacctttcttgctgtctttctgtggataaaggaatatcaattaacattaatttagcttctggactgattccaggcaaggcccttggaaaccagcagctgcttttgtgtgtgtgtgtgtgtgtgtgtgtgtttttgagacagggtcttgctctgtcgcccaggctggagcagtggcgcgatctcagctcactgcagccctgaactccctggctcaagccatcctcccacctcagcgttccaagtacctgggaccacaggcgtgtgccaccatgcctccgggtctcgctatgttgccccggctaggctcaagcaatcctcccacctcagccttccaaagtgttgggattacaggcatgagccaacgcatcaggccttagttttcttatttaccatgggtgggggacttggggacatatgtgaggtaactagccaaggtcacaaagagcaggtggtggcacagacaggcaagaattcttctctttgtcccttctcaaatggatacttccaactgcatgaactaaaacacagacgattacaaaatacatgtaatatgttgagaggcgactttaaaaatattgttgaaaatgtgtgagagggtgacgtgtgcttctttactaacgcattaaattacaaggtcttccagcaggacgcataacttcagtaacttcaaagtaataattctgcccgccggtagatctggtagatcttgtaatttaactgaacttctagacgtttacaacaaaagccacaggctctgacaggaccggtctgtccatttctactggcgactgccgctcccgggcagcagcttgggtccccgcgctgcggcctgcgcgtggcagggcggatgccgccgccgccgccgccgccgccgcgcccgggcggcctcctagaggaggcgaaacgtgggggcgaggccgggacccacctcccagggctgcggtgagcacttacagtattggcgcgaaaaggccagctatcaccatacgggtatttcgcctcactcgcctcgctgggggaaattcaaatctccgaaaagggaggatccgagcagcgccggtgcgcctgcgcgcagggcgggactcgaagcctgggaagcgggcggggcgaggtgacgcgagatgacgcggacgcctcccgcggtcgcccgcccggctcgtgcgccaccggcccgactgcgggcctctcggcagtgggggcggccgagcgcgcggcggtctggggcgcgcggcccggctcattttgctgcggcgcgggcggaggcggtggcgcccgagggcgggccccgcagcctgggagcctgggagcgggcggaggctccacccccgggcgccggcgctcggctgcgtcgcctcccactgtcgccccgcccccggctcccccgcggcgcgcctcgggccgcctcctgcggctgctgggtgtgcagggcgcgaaaatgctcgcttcccggccgcaggcgcggctgcagtggctgttcgccaaccccggccacctgcgtgccgctgtccccagtgctggttaaaggcagttcttcgggcgtgcgtcccttatcaacccgagagaccgttcccaagggggcggggccgagcgcgtcggaggggttagcagtctcatccgggcatttccgagatgccgccgccgccatctttgttttgtgctgaaagtcgctattgacgcccgcggacggccgggcgaggggaagtggcaagatggcggctcccagggcggaggcgtggaggctcgcccggtgggggggccgtggggcggggcgcgcctgcgcctgcacctgatctgagcgcgactcgagctttagcccagcgcgcggcagcgccgacccccacccccgccgcgaggcagcgcaggggtcctttaagaggcttgggcccaggggcgaagcggtgcgagggcgagtggggggaagcggtgacgtcacccggctccgcctcctcgcccgaccgccggcgccgctgccgccatgtttagttgttacttcttcacacaagatggcggctcccagggaggaggcatgagcgccctgccgttaccgcttcttctgccgtacagttgccgcttcggggcctaactctagctctttgaagcggctcctgtgggaaggagtcataaggcgggaagtgaggatcggacaccgccttgagtttggtgtgcagtggaagaactgacctaggaggaagagaataggggggaacggggagctagtctcaagatggcggctcccacggcggcaggcgcagcctgagcagcagaggcggactaaggggagaggcgcgagacttcacaagccgtacggcgcgagcccccaaacggccctcgagagctcgagctggttccaccggcctccggcccgcctccattcgttaggtgtgtcgaggctgtttcgggagcggcggctgcactaaggcgctgggcggggaagcgggacggtctcaagatggcggctcccacaattgtggtctgagcgccggcggggctgcgacgaccgcggcgcttgtggctcctttccacccgccccggaagccggccagtgctggggacttgggggtgtgggaaccgggccggggctccgccatttccggcgggggagggctacgactgaggaagggaggagagagaggcggctcaagatggcggctcccagggcctcccgcccgagcttgtaagcgggagcgcccggacaagtagtcggggcgacgggactcagcggcctccagcttcttgagcctaggcgctcgacagtttcgggcggctcttgcggagacggggtgagcgagaagaaagggaagagccaaagggaaggagggcagttaagatggcggcctccatggagtcgtctaccgctgtgtgagaaaccgcttctccgtgagagctgccttagacgaaagggggtgtgtgaaaggaattgaggggctcccttcccgcttgttgacttctccccaccgcaccctttcccggaactatggcttcggccgtgtcgcccgccaacttgccagcggtgcttctgcagccccgctggaagcgagtggtgggctggtcgggtccggtgccacggccccgccacggccaccgcgccgtggccatcaaggagctcatcgtggtgtttggcggcggcaacgagggaatagtggacgaactgcacgtgtacaacacgggtgagtgcaaagcccgctgggtcttcggctctttccctccctccatctcctccctctccctcctctttcctccctccctccatctgctccctccctctcctccctccc

SEQ ID NO: 1564242 - DNA, 4001 bp, Homo sapiens
cgggaatggacgctgcggaaccccagcactcttccactctgccctccctcgcgaagcgcaacagcttggcgtcggggagccagggctgcgttgttggcgccacagctggccaaggtaagcagtgcattcccacctctctgtctctctctctctcgctctcgctgtcgctctctctcgctctcgcgctctctctctctccctctccctctgtatgtgtgtgcgcgtggtgtgtgtgttggagaaagagtgcgcgcgcgcgagctgggagtaagggggagtctggtactgctgggctcgggattcggaccaagtccttggcctcatttgtaccccgttgtaaataactacgcccttaaaaatgaaaaagcaaattcttatactgaatatgcaaaaccattgaggatacggatctttccaccatccaggagataacactttctggggcccctccggtgaacgagttttgttgacactgagtcttctgcgggcagtagggagattatatagggggttcgatcttctccctgccccctccactcgagatgttcccgcaaattcatcggagaagacctgagcagactgatggcaggaactgcgggacagagggattttgcagaatgtaaagtatgttggaaagagagaattcgatttgattgaagtgtatccgaggcgaattttaaaagattaggtgggatcatgattttacaatcccctcccgctctccagggctccaaattaatttctccgcccagtgaaatcacagggcttgggaaggtgcctaacagctgagggggactgggtttgtttttttttgtaactaccaaaaagcagcttcgaggggcagccaagttggtgcccgaaggtagctgtcccccagtttctataaggaaaggagtcgaagggtgcccctccccctccattccgccctgcgaggaaaagcgcgacttcagaagatgcgcgggctcgcgctggatgtttctttctcgcgctctcactcctgcccctgactcccttttcacactcatgcacattccgtgcatttggagcagagtaacaatcaaattcaaagaatgttgatcccgccgctgcagagggcagggctgggctgtcttgagtgattcctcaggaattcccctcccctcatccccccctttcttctcacccccgcccatcccccagagttgcgcaacccgccccccccccccaatcagcgaggtgcaagtcaggcccccacccaactgcatctctaaatttcagggcagcttcaagagagttgggagggggcgaggaccctgcttctaattgtcgttagtcgtgagctcttagaagtgaccaggactttgcaaagagggagtgtcgaatggaaagcgaaggcgcaggttgcagggaagtgttttgatcctcagattgctgggatttaccaccgactgcaagtctgtagacacacgcacacaaacaggcacacacccgcactccggggcagagatactccgacgcaagcttggcgctccgatctccgcacgtcgctcccgctgcagccaggccgctcccctgggactctggtccaccacccagacgctggggcgcgaagaccaccccatccatgccccgtttcccgctctccggcttttggggcagctggggcgttcacagtccagaggccagggcactcaacccctgctgccgccgcccgaaggaagggccgctagacttacccatggaatcgggcagggacatgtcgctggaccgctgctgagtcagggactgatgcatggtgaaaactgcccggttgccccagtccccgaagctgcttcaagcgcccccggctctgggcgccccgcagagcatcctactccgcggttgcctctctcggtccttccgagagctgagagacactgcctctggttgcgagctgcagcccaagtgccgcctccccctcccttccactcttctccctccctcctcttctgcctccctctgctctgggaggcagcagcattggcggtccgtgcagccgcgtgcgcttgcgcaagaccccccccctcctccctccccctcagtctccccatcctagttatccacctcccagccttccaagccagacagggagcagttttagccccttggggccagggctgcgcagagaaagagggggaggcttcagtatgaagccaaccaaccttctctatagttggacagggtcttgggtaattatcctgttctaggatttataactggggagggggtcagagtcagaggttcagagctgaggaacacacacacacacacacacacacacacacacacttgagcaggtctggtcttagtgcttccagaatgacataatggagctggagatgatccagagaagggccactctataatcaaagggatggtgtgtgtggggcggggggagggtggtggctgacatatgaagatagattaaacaaacgcagactctttagtctagaacgatgaaggctgggaagtgatgtgaccagagtgtataaaattatgcagagacggagagaaggagcacagccttattcaccagacctgagaattctagaaccaacagcccccaatctttagctagaaaattcagctaaagtataactctgcaccagaaccccagtttgtactgttcaagtgcttttataacaaggatctcattttatcatcatagcagccatgcaagggaggaagaggagttatcaataaccccattatgcagaggaggaaactgaatctcagagaagggaagaaaatatcctgtgcccactcagctagtaagtggcagaagtgagagctagaacctagatctgttggactccaaggtgagtgttcttgctatggcgactgaaaagaactattattctctatagcaaatggaaaacctaaggaattcattagctccaaaagatgcagcaagatgaaaatgcaagtagctttggaaagagtgaaagtaaagtcatggctgacagatccactgtggattactaagggaaactggggatgaggtgggaatgtcattgatcttggaagacagccaaatccttctcgaacctatccttttggaccccattaggatattgggcttgaagcaccttgtggttggaccaaaaggtggtttgaatgttctcaaaacaactgcagatcaggatgaggcctccttggagtgcccccaagacatctatctggtggccaggggaggtggagggtgaggaagcgggtaacagtggactccacctccctctgggaacagccctggaagcctaacatagctaagagaatatacctatttggaggtgcccatactgtcccattgaggagctcccaggctctgcttgccaggtctccttccaaccacctccttctgatggttgctgcaatcctttctccatgttccccgaaaaacccaaaccaaatcaagtataaaactattctaagagtcaatgggatgaagaagagtacttggctctttccagatctgccttgctaatctactgtaaagctttgtttttcttatccaggaaatgggactgaaggcccttgccctttcccatcttctgaaggaagaaaatatgtttcttgaagattaaaaaggaagccctttgtaaagaacttgggcaccccaggggccacgttgaatgctgtgtcaggtattattagcaaccctacactatacatgtggtttagaaatctgtgatatatgtcctagatagagacaagatgcctactattgtagatgtgtgtgtcttaagcctgcttagcttgtgtcagggtctctataagctccacaaaggcagagagaaatcctgtatttatacttctgcaatgattgtctttgagtcctgtttacttatctctttctcctctcattctaaatatctcatacttaatgtggaggactcctgcaaccagcactgatttctcaggagtgcttgctaattaacatatttcgtttctgtgaaagtagcctgaaagaaaagaggttttta

SEQ ID NO: 1564243 - DNA, 4001 bp, Homo sapiens
gtagcacaagcagccttggcaaaacacagttactatgcaggtgggctctgttttaagcaaagtcgatattgaaaatccaaacatacaaaagagataaatcagagaatggttatttgtattataaaatggttttctgctttatgaaagaattcacaagtttcctctaaatggcagctcccctaatgcatttaaaatacaatttgatttacaaaagttcaatttacacgtgactttttgcacaatcattgtgagaagcaaagtacacctatatacagtacttaattttctctctcaggattaaggtgtcttatcattgtattgataaaagacacttaagccaaaacgttataatttaagccactgaaatagaaagtaaatattacctctgaaacatggatattccagaaaatttaagtacctttttaaattttgtatttacaatcttgggtagtcatctttacaaagtagtgctttagatagcacaagtatatagctttcattaggccataacattgggccttattttgcaaaaacaaatgttttattatatcttattttggtgtttaaatttgttttattttatcttattttggtgttttttttcctttttagctgtgtaattctaaagagatgttagactaagctaggctatttattatatatctgttttataccttactgcacagaatcacctttaaaaacttaacttcctgcattgcattactgtctccactgttaatctgggcgattgccattcaggtaagactctctcttattagcacgaagctccttgctagggtgagagtgagtagtagggggtggcgtggagggtgaagagggtgttgtgaggagggtagagaccctgtccactgtatgtctcaggacatagcctagagccaggcacccaggaaataagcactcaataactactgaatgaacaaatgaatgaagaaatgaatggactgggagaattgtctggacggctttcttcactctagcatccaacccagtatatttctggaatatgtagaatcaaaatgaattttcagagtctgaaaaatcacagaacctctttcttattccttaaatgctttttgtaaaattcataaattattaagcccttgatgacttggagacattaagaaaaattaagtcacagaggtcagaggaaaaagaagaggaaattgaagggtcatttccttactcaccagctgctggagagaactaacaaggcacacaggttgaccatagtccagaaccaaattaggctcttagcaattgtgttcatactgagaagtggtatttttgagtgtttcaataaaaacttagccacaggtatattcggaaatagtgaaagcaactaattaagagctaaaatagaagggaattaccatttgtcatttgtagggccagacatacagatatgttcttggcagggccctgggagactgcattctgtaggctggaaccattttgctgtgctgatgctcatacgtcttaaagctgcatgtgaaataaaagtgaaatagcaatatccagctgtggaagataaaaataaaaatcctaaaataaaatatggtcgaaagtgcttgagcagataaagcaaaacagaatatagtcagtggggatgctagtgagttaataaaacttaaaatgtttatgattgcattagaaaataaaggttcaaagtatatgatgtatgatgattttaaataaaatagtctggaatacattcaaataatttcatttaaaaatctactgcaaattaagtataactgtaacaagcaagaggatatagaattaaaccataattattaggcaacagagtttataaatttgagttctctcagtaggcgtctttaaaatcgtgtaagtaagttaatattaaggtatcatctgtctttaaacttaatgagttaatattttttctatggacaatggcattttacaggagtatctttactttcagaaaaataaaaatgaacactgaagtggaatcactgcatcaagagcctctagtcatataatttaagcctgaaaatgatcttaacagaatatatatgcaaatttgccttcacaatcacttcccaaaatacctacctctgtattctgtatttatcattgcatcaaatgagagcagtcagaaaaggatttttgaaactcttttatatataaatacttcactcaaagatgaagtggtttccaggagtcttctccacattcaactagcataatattctagttcctcttctgtgaaatgtaaaatatctgtacattaactttcttgaagatcatttcagcccaccattttcaactttcttctaatggatcgaaataggaattatcacctctaatcaaagaatgagcatgttagcttgccactgtagatattcagagattttatgttgttaaagatatgtttctcttcaatgccctttacgttattatatacacacaattaccttctattgtttttacaaacaactattttacaccagtaatcattaatccaaataatttggatttaaggaatttctaattgaaagcctatcacatgaattgtttatagtgacagacaatatactattggtaattttaaagctttaaaagtaagttatcagtatccacttcaatctccacatgacgataaaggattattatgtgcagtaacctatttatgaaaaggaaacagtgtgcttctttcagacgccatcgcttgctttaataaggaattgaaaagctgaactactttatatgcagatcaccatcccagttgcataaggatttacaatagacaaaacaaaactattttttgttgtaaagaagggctgtttgtttaaatcacacaatcacgtttgcatctaaaattatttacagtctaataaggcttcataaatgttatatagacttggctaattaaaatcattttaatgctaacaccaaaatgaaagtcttgctcaagctgacaaggaaaacttcaagtaacacaagcctaaagaaggcagaaggaaaaagatgcttaatgtcttggtttaggtaactattaatcgatttggagacgcaaatagtacttgatttgatagcaccccattaatgcttcaattaaactcaagaggaaaatgctgttttgtcagaaagtgttaaacttgagaaggattatgagtctaacccgtgatctaaaataaatagagtaatggatacatttttatctctgctaccttgaattttgcagagaacttacttgggaagttttaatctcacccatgaagtcttccttcgaggtctttaatggctcatatgtctttgttaaatgaggtgtgtggcggcctctactggtgtgtgtttatagaaaatgtttcaataggcagaaaaaatattaatttcaattaaaaagttagaaatacagactttttcatttaaatatataaaaatatctaattcaatgcagaaaaatatattactagctgtgtcacgttcttttaattaggaaaataatctaaaacactcaccatgttagtgtaaaataatgatttatggaagggcattaattgctcaattcactctgatattgggttaaatatattttattaatgaattattaatcctgactgaggtggcttattacctctagtccactgttaaatccccttagttgacttaaataaaatcacttaaacccagaggaaaggaaatattttatagttaagcctacaaagtcctagaactagaatcatttgatgacaggctggtttctataactcaagcaaactgtacgttgacttaatatagctgacacatcaatctattttacagtgttttcaatttcaaaaatacaacacattaaaatattttcaatttatcaaagctaaaagcaacatttaagtaatgtacttaaagtgcgaaggcactttaacacaaagtagtgatacccagtggctatactcggtaactgacgatggaaataccatatatcattatttacaaaagaagttgtagtcaca

SEQ ID NO: 1564244 - DNA, 4001 bp, Homo sapiens
ttccttctttcatttcctgtaacacttcaactcatgcttcagacatcacagtaagtgccaggtattgtgggccttgacaaagccgaagtgcccttgtacttcttcccgtaatacttgtcaagattgcacatttgcatttggtttactgaatatttaatagatgaccaattctactactactataagctccacaagggtaaggacaagccttaatcaccattacatcccagcattcagcatcgtacctgctattagaggatactgggatggccaaccctgcacactagtagagacagtgtattctgcactcagactgcctgggctcaaatcttacttctgccacttgctgacttgaaatattgagcatgttacttaatttctttgaacctcagttttctcatccattcagtgggaatactaatacctgtactactatcttcctcaaagcattgttgtgagggctaaatgatttgataggagtaaggtgcttagaagagccccagctagaaagtaagataagttctcaataaatgctggctgttataacaatcattactcattgagtcaataataaaataccaaattgatgaactggcctgcaaacagaatacctctaagtttctttagcactcttttttctgtttctatgcctaaggcatcttaacgtcaccttctattggggaaaaaattttgcagaccacactaggaaactgaaactagaattagacaatactgtctttttaattcaatgatctttaccattcctatagccacatgggccctatgactattttttaaacttctatttcataagcatatatttcatatgttactttgataattgagaataattgaagaaacttcaggttcaaattggaaattttttgtgctatgaaagactttatgtgggtagaactatcccttattttcaatggtagaaaatcgaggctaacaaaattcaaatgaccacaacggtgaggagtagacccagtccagacctgaacgactgactcaggccacttggcttcactatcccgagttgagatgctggttttttaagttgttttgtgtggcacaaaacttcacatgttgcctagcatacactactgattaaatactttaggcaaacctactttattaaaaattcatattattctataatctatctttaagaaatcagatttgaggtctttagaaataatttattcaagattaaggtaactatgcagacaggcccattattagagaaagcacagtgttattagcaaacaaaatttaaaaagaacactcaggtgctccacttactgctttatctcccagagctgttctgatactaagtctcactttaaaagcattttctgcacctgccagaaaagaaaaaagaaagagcagtatatgatgattaggatctgccaaaacagagtctgaaaaatcctaatatgtaatgcaactcaaactaatggaacaaagaactacaattaaacagccccaaatactcctggaagtttaacctaaatcatcttagatggtttaatattttctttcaaactcattaaacactcactgccccaactttcaagccacaacatgtctgcagatttagaaaaataaagagttctttcagtcgatgacttgtcaaacatgtagaaaactgttcatctatttttaaatttcaaggctacatacctggttgacagagttcagcatgaatggcagtcaccagaaaaaagagcagccacaacattctttcagggtggaaaacacaaggcaaagtgagaaaaaaaaaatccacgctgcacttaaatctgccttagccattctgtgacccggattagaatatcagagaaacaagcgagccaccaccaaaaaggtttaatgattaacacccatcatttgggttaatacttccataaaaacagcccatctcctgtcagttatttatgaaaacctgtttggaaaacagattagttgttttccctactctgactctacctcaaaagaatgtcttctttgctgactcaaagttggaatcctccccgaccccttctgcgattctctggttacgtgtatgatgggaagaattgagtcctgtctagaggtttccttgacatgcacttcccaccttttcgaggctgagatacctggttcttagataggctatcttcattcaggaaacaaacgtgactcccttctctctggtaaacaaagggtgccctccgtgaagggcctcacctgactctcaccacagcgggtgaacatcccaggagagcttcggagcttcctcttacctacttaaggttagagggtgggaggagagagaggatcgaaaaactacctatcgaatactatgcttattatctgggtgacaaaataatctgtacaccaaactccagtgacacacaatttacctatacaacaaaactgcacaggtgcctgcacattcacacatagggaatgattgtgttcagccctgaggtctggcacttgaattaaatcaaagttaatgatacagagcagcactgtccaagggacattctgtggcgatgggaatgttctgtgtctgtactatccaatatggcagctactacaggtaggaggccattgagcactggaaatggagctagtgtagctgagaaatggaatttttgtttaatttaatttaagtaggcacatgtggctactgactacattggtcagtacagcaatacaacagtaattaaaagttacccactctgaagtaccttcactgggttatttctctgatcctcagacacttcacaattgttatcatcatctcatacgggagggaactgaggctccagcgttgaagtcattggcagcaatgggatgagtgggatgggtgtcactttaccagctaggttgacttacacttgaaccctgtctccaccacacccaactgctctgtgtctctggtcaccattggtcaaaattggaattgatcaaataccacagtctcactgataagtgggagctaaacattgagtacacatggacacaaagaagggaacaacagacacaggtacctacttgaggatagtgggtgggaggagggagaggatcgaaaaactacctatcgaatactatgcttattatctgggtgacaaaataatctgtacaccaaactccagtgacatacaatttacttatataacaaacctgcacatccacccctaaacctaaaataaaagttttaaaaaaccctgaagttgcaacaaagcctcagagatgctctgagaattaagataatgcgtgtaaaagaatctttccccggtgggcattccacagatgccaatcaacgccccgcccagaggttgatgtcaggactttcctctctaccatgctgcctcttcataaattcagtccccaaattccaccccattcctcaaaagtcatgaatggcagaattagattgggtgactctggtgttaaatagaaacattggattttcaaagcaacaacgaggaaaatatcaacaatgagacttctgcagcactttgagaaacacatcatttctccctccttgcgagggtggtattttattgtaaaggacccacatccatcagctaaatccaactgagaaagctttttctcatctccttcaccttggttgcaaggacacggagtcaggaaaagctgtactaaaaggagagggagccacaacttagtccagccatcctagcaatgtcactgtattaggtgcagtggaaatttccagaaggaagagctcacctagctaacatctgaaaaaaataaagccagactagatgaagtcatcttgggaaatgttaaactagataaagtcatcatgggaaggaaaagtcaatacacatagagattgtaacaaagcattttacttacatcaaggaagaaagctatgctaagaacatagaaatctgcttcagcggctgggcacagtgcctcacacctgtaatcccagcactttcggaggccgaggcaggtggatcatgaggtcaggagtt

SEQ ID NO: 1564245 - DNA, 4001 bp, Homo sapiens
cactgcttgacatagaataagcactgaagatatgttagctagtagtagaaccttaccaagttagctaataagagattgctttgccaggcacgggggctcacgcctgtaatcccagcactttgggaggccaaggcgggtggatcacaaggttaggagttcgagaccagcctgaccaacatggtgaaaccctgtctctactaaaaatacaaaaattagccggtgtggtggtgggcacctgtaatcccagctactcaggaggctgaggcaggagaatcacttgaagctggcagtgagctgagatcacaccactgcactccagcctgggcaacagagtgagactccatctcaaaaaataagtaaataaataaataaataaaaagagattgctttgagtagtaattgctcccccacaaccgggaggaaggtagcccaggttgtcatacactaattggtggttaagaattcaacaatcaggcattggtgtctttctaggggagcattataagaggacccccataactaagttggaattgagaaaccaccacttgcctgttctgactgttggatttcttcttcttgatcttcattgggtgcattagagttgttgggcttgagttgttgttctccctcactcttttctgttaacctcatttcttctacagtaaagtgatcacctggggaaatataaaagaaatcttgtcgtcatgacaacagaggcagtttacccccaattgcccagacaataggtgctaggtaagttgtcatgacaacagaggtgcctgggccagcctcacagaagcaagtgtccaattatgagcaaagctgaaaggcttaactgagctacatactggttgcttaaccattagagacacagagttctggtctgtcttcagctctgactccatgttttctgtctaatctggaggctctaaagccagagaggcaagagcataatgacctctgggggatgggaaacaatgctgtgaacccactcttaaaatcctgactctagcttgtctgggccacactagcacaaggaatgttctctcctcaacacaccacctcccacctcagctgctccaggggcacccctaccgtatgtccgcactaaaaatatctcacaaactacctccttggtttcatgtcccttgctaaggttcctttctgctgagggcagggctcctgtctcatctagtggtttgaatttatcagtccctaccctttagtcctttagttggtccctgggcagtacgccctctagtggactaatccacaactacatgtcctcgagtaggactcattcttcaagaaacctaaaagcatttcctaacccataccaagggttagaaaaatatgtgtatacacctagcagaagggcaagaaaaaaggacactccattttcttttttctttttttttttttttttgagacggagtctcgctctgtcgcccaggctgtagtgcagtggcgtgatctgggctcactgcaagctccgcctcccgggttcacgccattctcctgcgtcagcctcctgagtagctgggactacaggcgcccgccaccacgcccggctaattttctgtatttttagtagagacagggtttcaccgtgttagccaggatggtctcgatatcctgacctcgtgatccgcccgcctcggcctcgcaaagtgctgagattacaggcgtgagcccccgcgcccggccaggacactccattttctaagctaactgtccccaccccctctttagctgtgtcgaacaaatctgcctgcaggtaccaagatcttatctttataggagttttgatcttggtgccttctcaatgcctaccttggaaaaaaaaaagcagactgccaaccaatccagagtcctttcaccagctaagttgcctgtatggatgtcccagcaacaaaaaggctgccattgttactgtagagctattccaggttgactctagtcccacctcctttcctgaactcctgcaacccgcaactgcctgcagcctgtcccctcctgctcatatatataggctgatcctgagctcataatggagtctgtcatgaccagtgctcaattattacaaagttacaacagcagcctgggccttgcttaggactctggggcctgcctaaaagtgggctgaggctttttttaacgtgaattattattattattaacgtgaataaaactgaaaatcaaacccgtgccattcgtcatgtccttttttgagtcttctaaagtcactgttatcccaggacctgtagcaggtattttggaggcaccaagcaggctgaaaaaattgttggagagttcatccatttctagaacctctgtccgggccctactgctccagctagggaaaaagaattcttcagtctgagagggcagggagaaaatccatgtgatctccagggaacccttagccaagagtcagttaggagtgttctaggaaccagccagccattcacatcttttcttctcaactctctcctcaaccaacaactccatagcatggtggccccctttcatgtcactgcctaaagtggtttactttttacccatgcaatcctacactgtcttcccggctagtccataagcttccccaggaaagggaagctctttttcatctcctcagcaggccttagcaccaggctctggacacagcagtcatgtaacccagctcaccaacttttacaggctgattggagaggactgtctttcaaactggacagagcaaaagctttgccatgatcaatagaataacttgataactggaagaaatttcaaaatactgcccagtcctctcaagggcttggtcccagaaccctgcccacctctcttcatcctccagcaccctcttcattccccattctctaatccctttttttctagcccctctcacttcaatacaaatcactctttcccatctccacactttacctcctacactgtgcattccctccttagcgtggttttgagatatcttccctctctagcttctcagtccttctcccctatagatagccaggggaaaaaaagttctattttaataggcatgtaagccacaaagtggtatttaaggctccaatgttcctttccagcacacacacacacacacacacaccccacacacaaacacccctcagaatttggcctaaatagagaatacccaaatgcaggatgccccacccctggatttcaagccattcatctttgctcctccagctacaacaggtgcagtatgttaaagtcacaaaaagccaagaccagcttactctgttggccatattttctctcctgtgtgaaatggctttttccagcctgggaaatgtgtccaaataactccctttagatttattatgattggagaaaagggaaaataattagatctatagaaacagaaatagcagttggatccaactttccccctcagagcttttttgccaacatcctttgcttacatcctctagccagggtagggctcaggggatcagggtgagtactgggcaacagggtcatctgagggaccctgaactggaaatcaaaggagaaaaccattttacttactcccctcattttaaaattattgcaaaatattttgtttgcctctggttcttcacctcgaaaatgggtccagcacaacctcctttgtcagaatagtgtaaaaatgaattacagagtacatgtgaggtgaaccaaggcctgtctttatgatgacaggtcagtttctagtcatgtcattatcaagggttactaggacctacaacaccaacatctcatacacaaagccacttttctttttttttttctttttctttttttttttttgagatggagtctcgctctgtcacccaggctagagtgcaatagcgcaatctctgctcactgcaacctccgcctcgtgggttcaagcgattctcctgcctcagcctactgagtagctgggattacaggtgcccgccaccacgcctgactaatttttgtatttttagtagaga

SEQ ID NO: 1564246 - DNA, 4001 bp, Homo sapiens
gggagtatactgaagaaaggtagtgtgtccctaaggctagggaaagcttacacatacctatgatgcacacacacaaatatataaatatatgtacatatgaaaagtaaagcaagagcatgttcatttattcataatctaacaccaaactgctaccaccaagacagaaatataatggcatttcccctccaccctgtccctctgtcccaacctcttcaagccatttggtggcttctgctaccccaccctgtccctcttctcccagtgcaggctgcctcgggtactcattttgacctgatttcaattccatctggtcaaacatgctgggaggaggggaagggagaaggagaagcatgtaaggatttgccactggggctagacctaagcccttgtcaccctccccaaccctagggtgatcctgcggtgaggaagaaatggaaagctccagcttaaaccctgagacagaagccagagctgcctgcaaacattttctgagcatctattaatataatttgccagtctccatccatttgcagctcacgttaaggggccctggaaagctctgcagtgggttcaggagagctatgaattcctcgcaatgtgtgaggctgttcctccctgcctcagccctaaaagggcttgcctcttttctctttccccttctgttcctcccctaagctcctttctctcttgaccttgagagcccaatgatgtgctccttcccattattggaagtctggcaaaggcgacgagaagcagctggggtggggaaaagaagaggcaaagtgacaggggaagaagggacagacccgaaagtgctggaaacattccctgccatctcctagtactccacagcataagagcaagtcctcatcacgcccaactggggaaagcagcccagcccccaggttgcagaggagatgttttggccagtcaccttccgtgattgattccaactctgcagaggggaaaacctgcagagggcctggctctggtcatccacagaaggcaaggtggggattacggactgtttgcgggagagaaaaagcagactttgcagattttgtagattaccccacacacaaaacaaaataaaacaaaacatctagctctcccttgagagaaggggaagaaacaagagcttagtgacctttatttgggccaagaatgctttgtctcaaggatccagatacatacccaggtggctggaggaatactatcagctgtctgcctgggatgaggaataccagtcagcccctaaaaattgcttgttttagtagcccatttttcccagctcttttcctctttcccttttgttctgctctaaaataaataaactctccgcttgctaaactcttagctcacagggagggaatcagacttgtatactggttgcccggactttgggtgtgtgctggaaggagggaagggctcctgccaatgacaggtgctacgcaggtctcagccttctggtttacttgggatggggggtattcgctgcgcaacccctcccccaactggcattcagtggctccagaacagcatagcccacaaaagaaatcgctcttgcccagctgctccttccgagctgcaaagttgttgagaacggagggtccaggtggggataggggctaagggggtgggaccagaaactgagaaggaaaaaaggggagaggtcctcgcaatcccatgggagtgcgctcctcatcacccgtttgcttcacttaccatctcactgtaggcatccttgctgagcctgggggtcagcttgatagtccccatgaaaacaaagaagagtcccagggccactgagagggccacaatagttacggttctgggggatgccatggggtcgccaaggcaggtcccaactaatccttctgatttgcgcacccgctctgtccaaggtgcaggcagttagcacagggagagctggggggacgctgcggaggcagcaggcagctagaatgacaaagggagaggagggagctcgagagaaaaattgagagatcgagattcaaccactctcactacaacaaacgctgggtcctaatgccctacgtgtgctcacaggccaaaaggacagtctcgaagttaaatgaagccctaaaggaaagacggaaacttcaaatcttaaatggggagaagggaggttatgtatgagttcagtcaccaagtgaccccaggaatgaggaattagggaagacaggctttgctgccaccttcccaccgggctcacttttcatctccccctcccacttatcatccttcagttattcactccctttttccatctcttcctttgtgtccccctttccttttcctaaatcaaaatattagccctcagagagttgtttctgaagttcgtaacactcaaggataaaactgcaaatttgtcagccttcaatgctgccaaagaaggcttcctctttctcttgctcagaaatctttaatgactctcatagccagtggttaactccagttttaaatttggaattcaaggccctccacattttgacccctgtctctctttggagatttagttttcaatggctcccactgccacacgccaccactcatctatctactcacggcctcacacaacctacgccttaccacctcctctacctttaactccctatcttttgaccccgccccccaccatcactcttcattagcattaaaccttttctttaatgtcacctcctctataaagcctttcctgatccattgtcagttagatatgatttctccctcctccaattttctataacaataaccaataattgtcaactgtttactagatgctagacgctgccctctacttgtattaactaatttaatctttacagcaacactatggactaggtatgagtccccatgctatgaatgggcacattgaggggctgggaaggtaggtaacttgcccaggagtatacagctagtaagtggagagccaggcctcaaacctaggcagtcatttctagggcccaggctcttaacaattgctctgctgcctctcctgtaatatttttcactattagtgtggtacttaaagttgtttagcactgtaaatgctcacgcacacacacacagagttttgttttgtttagagacaaagtctcactcaagtgatcctccatctcagcctccggagtagctgggatcacaggcacatgccgccatgcctggctaatttttttattttttgtggagtcagagccttgtgatgttgtccaggctgatttctaactcctggattcaagggatccttccgcctcggcctcccagagtgttgcgattacaggcatgagccacggagcccagccctacacgattttttttttttttgagaccctgcagagggtctccctctgcaacctcaacctcgtgggctcaagtgagaggctctctcttgtagctgggactacaagtctctcaagtagctgggactacaggcacgtgtcaccacacccgggtaatttattttttattttctgtagacatggggctaccttatgtcaaccaggctggtcttgaactcctgggctccagcgatcctcctgccttggcctgccaaagcattgggattacaggcatgagccaccatgctcagccctaaacaatcatttttaatgattgtataaaactttagcatcacttgaatgtactatagttctcattcattttgcatcctattgctagatattgatgttgtttccatggtttttacttttacaaataaaaatgtgatgcatggccaggcgtggtggctcacgcctataatctcagcaatttgggaggccgaggcaggcagatcacctgaagtcaggagttcaagaccagcctgaccagcatggtgaaactgtaacctcccaaggggttcaccttgcccgctgcctagacagagcccattcatcaagacaggggaattgcaacagagaaagagtaattcacgcagagcccacatgcgggagaccagagttttattactcaaatcagtc

SEQ ID NO: 1564247 - DNA, 4001 bp, Homo sapiens
aattttattattgaagaggggaaaggagatattttcgccaaagtttatttggatcccctggttaccgaagaaagaaattctgccgatttattttatctttagttgtaaactgccaaccctgaaagaattgaaggacctaaatgttgacctcctgctgccaaccagttccctccacagtgaattaaccaacaaagaggaaacccttcaatgggaattttgaggtagtatcaaagaaaaagccttttttaaacacaaaattaaatttacagaagaaacttggtcaaattttcctgtgttataacaggaaaccaaagacaaaagaaaatcagatttttgtggctttttgtgctatttcaactttgttacaacttgaaacgtttccaggaaagctttataaatagtcccagagaagacatgaaactggaaggaatgtaatgagtttctcaggtgtctatgtgtgtgtgtgtgagtctgtgtatgtgtgtgtgagagagagagagagaaagagagagaaagaaagaaaatcgccggcaggtcctctctctttatttccctttctcttcgctgacaccagcagttgaagaatcaaaattagaaaggaaggggtttgtagcgagaaatcataagttgactgatttttgctaagggcataactggggcgccggggaaggcaactggagggtcagggagggcggaaagcagtaaagccccctgggactggtagcctcagtagctaccttattctccactccccacccccatcttatccatttgcagctttcagcgctggcggaataaagcacaactttctaggcatctgtgagtagctcatggagaaaagaaaggtctggaggagagaagagttacttagagtggcagagaaagaaaggcaactcacaatcaacggcggcgtcaccaaaaaaggaaaggaaaacaagcctgtccctctctcaactcttcatatccatcaaaaacgtaaggaaataaaatccaaaccgaaatacattggtgaaaacgcagataaggtggagtggaaccggcagaaatgtgaacactaggcaaattcgtcctcgagagaggaaggaaaaagagtggggaagaccgaacagcgaacccccgcagcatctcggtggagttggggcgtttttgcctgcttcttttttaacgggggtgtggaaggcgtcgcatttttttacacagccacatggctctcgcctcaaatgataacaaatacccaaaatagcgtacgtgttactccagaacaggaggaatggccacggggaagggagagggcgtgggctgtcgctttaggtttggcgaccagggatggggagggaagaggggtggatgccagggaggtggcgggagccccaggatccgagaagggcctggacggggtgggacgggccagggcagaggatgcggggacgtggggacaggcggtgactgtcctggcagtggggcgcggggcagtccggggcgggaggcaggggtcgcggcgcgccaggccctcaccgctgctgagcgtggactcgcagtgccagatgtccaagctggcgggtttccggcaggactcccacaacgacaggtagtactggtggtcagctgtgacccaggccgggctcagcaccgcccccaggtccagacacagcgccaggaagatgcacaccagcccgaccagcttcaagggggtcagcaccgacacgcgcacctcctccatgccgctgcccgccgaagccattcctgggcgccgctgtcgtccgccccgccgcaggcgaggacgccaggcgggtccggagagccgggagccggacctcccgaagggagaagccgccgagctgccacgcgcggggactcgctccctcggggctctgcgcgccccctgccgcgcggccaaggtgggtctgcggaggcggccggccgggtgtgggtcgtcggcagccgcagcgacgtcgattccaccccggaccttcgccgccggccccgcgccgcgctctgccagcgcccgcgcccgctcctcccggctcggccgggctcgctccgccccggcccctccccgggctgcgggaggcggtgccgtacggggaggggcggagggccagcacttggtggcttcggctccagttcccagtgccggaggctcgcgcctgtcccgcccctaccccgcctctggcccgcgggcggagcccagtgccagcccgcgcccccgattcgcagcgcgcggcagttccttgaagcagccccgcgcccagcccggccctcgccgggcccccagcctcgctggctccaggtcgccgggctctcccctttcgcccagtcacgtgggtttccttttcttagggagcaggagtgggcggttttctagaaggcgccagaggtggattcctaggtttcctaagctgtgcctcttggagcaaggacaggtcctctgtctctcagtgatgtaacacgcccctccccggacaatttcacatcctgagagatttgcgggacggaggagaaaagtgactaaatgcattttgccctcttttcaaaaccagacgggcccaggagtcccccggttttccctgttttctcacttctccgctagcctgctgccgcttctgttctctgggctcacctgcttttgcgcccccctatgaagggcatttgctctgaaaacgcaggcgctaaaaaggaaatgagagctcctgcgaaatatgaagtaagtcttatttccatctccactgctctgccctttgggtgttggctaaaacctttattaattccgctttgcattatgccaagctggatctaattcccctcctgggtattaggatgtccttgtccttagcaagatctagcccaggacctgcaataggaaaagtgatgtgtatatttcctgaatggtaaactaagcagtctacaaatatttgttgagcatctaagggctaaggattcaacacaataggacatcgtcctgttcttaagtagatgcaccatattttctcccttatgtgaggactaaacacctcttgaaattgaaattgaaattttgtaattgcctggttcagcatgtgattggtgggttatctgtctcttgtagctctttgactcatctccatcttttctataaaataaataatttattgaatacattaatgaggaggggcgatgtttctagatctttagtcatcccaaaaacttggtgagactcccaaaacagtggttaagagctgaagaatgcaagaaacatgttctctcttctatgaaacacaatcctcaatgttgcaagatttcatacttttggttgataaaaattatttttccccaaccacatctttccataggttgaacacatgttgactgcagcaacattttgggctaagaaacaatcgagttagtgtcaaatgagaacaaacctaatgtaaaataaacgcccgggcttttcttatatttacaatttcgggaacttttctcccacctctcaatcattaccgtgctaattattgcaggacccttaacaaagaatgcctagagcatccagagctcactaacctccaaatcccaaagggcttcttggcttctcaactagaaagaagcctaagtgcatattctccttaaaaaattagggaacactgaaaaatttacaaaccgggacaattaagaggtgaccaggattgtgtgactgttcttttatctagatttataatgtgtattcaaaagtaataagaaaatgtcttgagtgtgctctcaaagatataaagaaatctttattttgcctccaacttctatcatcttctctttaataagtttattttccaattagccaatagttttctttattctcttcaatgcaggctttctttcccctctacccctaccccaacccccacctccacccacatttttgcttaatttttttctggcttgttctcaactgcttgcttgagttactccatccttctttatactatctaaaaaaattgtctctatactgtctccaaaactagaaaagtaaa

SEQ ID NO: 1564248 - DNA, 4001 bp, Homo sapiens
gagtatgatgaatagagtgaaaatatagctaaacaaggcagacaccaggtcctgccaaatagccaatgcaaaactcacccttcaggttggctcagcagatatccagcataatttttttctcacctttcaaaccatttgggaaatcatgaggtattttcctcatccagaagaacactcacctacatatcagccactccttccctagaacctacaggtatggagcaggctgggttttttcaagagcctcttatcctgtaaatctttacacagggcaatggcaggtgcatgtacagcccatatgagcccaggggatgcttggtattatagaaaggggatcacagtggtgcccaactgatggatccgtgttcagtttgcaggaagagactcttcccaccaaagaggtttgttaatcctggggtccccctcccagcccctggaggcatcagatacagctgtcagaaacattgtaaacacccagtgatccacttggctggttttactgttgttcccagggttgacaagcagaaatacagaacaaatggtggttcctgaaacagaggccaaaacaaggaagtgatctgttccagtccaagcttccaagaaataaagaactaggtggggcacactaaacaagcccccagactcaaccaccccagtaaacattcccttcatcacactggttatgagataaagtataagttttttaagccttattataaataaccttacttaacgtcttctggttgttgtgaaaattatagtattttgcaaaatatatgttcaccattatcattaccaccagttccttaatgaggagaaaccagaagttgacaccaaaatgttgatccataatgtttatagtccttctttgtctttatagttaatgtaaaataaactgtatgtaatttttactacagtgtgtcctgaaagggcaaaccaagctacaagcaactctaaaagactactactgtatgggagtggattatgaaagtgtttcttaaatatgagagctcaagtttttctttcagcgactgagttaaagcacgcaactcatttatcatgagacttttgctaggcagtgtactatgtccactcaacacacatcattttaggcaatcatctggttaaaacgtttaatagtatggcattcacaaacccattcttcagagttgacattcaattaatggtttgaatgtcgtttccagggcagtcaggagtatttaaaggcttttccattgttttcggaagagaaagaaaacttcctagcctaacttacttacccagagccttgctccagagggggcagacaaagggtaaaatctgggcagagaacattagtggatatgagaacgaaagaaagtgctgcaagatcttgcagacagctgagttccaccttccactctactgccgaacaaagtgaggcaggaagagggtagggactcgctgaaagctaaacaccaagtcagtgacagatccagggctgtaaagtccgaccgagattgaaacaatgtacactgggcgtcagtcccaacgcgagcttgctccagctcttccagctcttcctgagcgctaggcccatccggcctcacgctgatctccgggcagactctgtcgcgcaactggcacagatcgtgacgacaaccctgcggcaaggcaggagtggccttcctctccgccagggttaaggtgagtaccaccgcccttgggcccagcagcccgggtgagagcctccgccgcccactgcgacaggcctgaaagcgagcgcctgggtaaacccacccgtagcacccatggggacaccccttccctgacccacgggacggaacccacctgtgctggaggtcgtgactgctaactccgcagagtgggcagaattccaagcaaggagagtctcgggaggcagcctttcacccgccttttgccttttcacccccaaaactgtcggccccacgctcccctcccccagcccgctcgggcccagcggagagcctgtaggccccgccccactccttccggccgtgcagggtgggtgcctctggcgcccgggacttcgcccggtgctagggcgtcagtctcccattcggaaggactgggccggggcactctattcaatcgcctttagtgaacatacttgaagctataggtgcagggatgagaaaaaacaggcccataaagctataaaacctgggtcccctgcctgccatttcagtgctcctcccgagtcctcccactacgcttctatttatggtagtttatccaggtttactagaagtaaaattctactacctttccaccattttcttgagtttatggaagtcatataccgctcattactcccatcgattcagctgagcatcttgaacccagggtccagatacagtgctacatacagtgagcactagaagggaatacccattaggaatgaacaccttatgcaggtaaaaatttaagaacgatacatattacaaagaaggaccaaaaagtatactgaaatagtatatgcaatggaaatccaaggcagatttaaaaaatgagagtaagaacaacaaaaaaaatcaaatgcatatatactgaaaatgggaaattgtgcagtattatatttattcgagattaaaagtgttaatctaatgtcaaaaaagcaataaaggaattggtttgtagaagtcaggatcaacaaaagaagaaaaagcctccacatctttgccctggaattccttctgccatgaatgctcttacccggcacttgtttatttggaaaacggctactcgttatttttgactcaatttagatagcacctcctctgtgaagccttccctgtctttcccagataagtttgtatattttttttccctaggtccagtatgcccaatggatctcgtacaggcctcaagagtaccacttactctagattataatttctctttctgcatgtctttgtcctctaatgaataagtagcttcttgagagcagaaaacttgtgtttttcatatttgttctccaagcacagagtctaaaatgtctatatatttaataaatatttgttaaaaaatttctagaaccagtgtgtaaacaaaaggacatatccagagtgtgaatgtaacataaagaggaaaaactaagtacaatgagaatctagatttagtctggctggtattcattcatgcaataaacattaatgagtgcctactgtatgccaggcactgtactaagatctgggtgtaaaatgataaacaaagcccagatatagtccatgcccttatgcccttatgtttaaagaacaaattggagttggccaggcaaatgggaaaacaaaaaaagttttgggcagaaagaacagcatgatccaatgtcctgtaacaggaagatcataactgtagcaattagagtgaatgagctcacttaaagctaagctgaaatcaacacaaagtactcagaaaaggcaacaggttgatagacaatacctgtttgtttgagtcagtaaaagaagcaagtttccttaataatagtaaccaacatttataaaatgtgcactatatgctaaacactgggctaagtgtttgttttatatcaaacacttaaggtagatgatattatttctactttaaggataaggcaactgaggcacagataggttaagcaattttcaccaggatcacatggcagataaatttcagagctgagattcaaacctaggtaatttggctccagactctagggagcctggatattttacttttaataaaatataaattttacttgtaataaaataaaagtcagatattttactgtttcctctctctgtgtgtgtgtgtgtagcaggtcacatggtgtatggcacagagtggaacttcttaatatttttggaatgaatgaatagctgaataaaagcaataggtacaaatgtgctagaaaacaaaatagaaaaaaacaatagtatctgggtctttttatgttcccgccacaccagctgttcctagaacacaccaaacttgttcttgtt

SEQ ID NO: 1564249 - DNA, 4001 bp, Homo sapiens
atttttctagtgctaaatccaatattccaagattgatttttaaggtggtttttagtaattttccaacaagaaactagttttcccccccattcctattaagacttatgtgagaactacttatataacccaagtaggaagatgactatttgatgtttttaactgttacattaaacaccatggtactctaattattgcttactttgtggcaaaaatttactagaagataggtttatttactgaacctattaactttctctactgtgtgtttccactagaaccccccatgacttactttcctttgagggaagagtatttttttcttcagtattagttttcttcagttttgacctgtcaaacttctccacttccgacaagtctggcttatcactcatcttgactagaagatagcctgaaaagaataaacatttttaagaaaacttacctggcagaactgtcttcggactaaggggtcacaagcaaaaattttcatatttcatatcaatgtatattctacccgctcattttcaacagaaaaacagcaacagatcttagaaaagttatatttttgttagaataattttaactccacatcattagcccattttgatatgcagtaaatgccgttggatcagaacgcaccagaaaccaagattctccagaaacccagagccaatatgtctgactcttaaaatcacagcaagggtaaaatggaggtgatagaagcacaagagcagacagggacagaataaaaaataaagactggctttaaccagttaatgattttgtaacaggagatagcactattcgagcatcttcactttctattaaattacttttgttttttggcatttttttttaggagacggggagcagcacaaaaaaaaaaagagtggcataagttgtactaatttctttctattttaaatgcccaaagatgacagtacattaaggcattacaatacacgtctcataatagctccttgtggcattggtgtataaacgttgtaagaagggacagctaactaggatcaaacccaggacttcagcagaatgggataaaccaaataaaagcgagtcttgtttcaccatgttttctctgcaaagagagaggtaaagagatgaggcttagaggtgcatggctgtggacctgacgaaatgcctggtgccctgtaagcgtcccgagtttgtccagaagagacaataggatatcccagaaatcggagggcagagttctcattcgcaagcccagccccaccctcgtgcagtaagatactatgtctagtgcttggggtagaatggagaggcccccaagcagccagaagtgccgaacatgcctccattccgtcgagtttaccctaagaccctcctctgccaagccattagacgccaagctcagagctggaaaactggaactaacaaataaataatagcagggccgggtgcgtaggccagtctgtcaagagcagtttgcatacttttaaaaataactattagctttttctggcgcccagcctaacggccacgggaggagaaggaatgaggaccaagccccagggggcccattccgggcggcctccaaactcctcatcctctaagcctccgacctgcagctactgcggacaggtccctttaagggtccgcgctccccgcctcccaaccccggggccttgtttccagggaccggcccccaggagggctcggcatcgagcgcagaaggcggccccctggaagacaaaggcgcggactcgctcgcccgggcggcggtgcagacgcgaagcgccagccccaacctcggctcctctggctcccgaaggcgcggcatcccccgcctcgcaaccctgacgccttcccatccccatggtcctctggctcctgcgaggccgcaggtcctcacctgaaagcttgaagactcgtgaaaggctgttcgcggggctgagacccagactcgctccggaccaggttagcgttcccgcgcagagccctgcagtgctaagccacccagcaggccccgccccagccctctctgattggccaaaggtttccgggctcgccacccccccccccccaccccgcccttcccctcctccgcttgagtgtacagagcccgcgtccaccctctcctctaggatcggggcttggtgaagtcagagccgaccccgcctccccaggccccacctcccaggcctcttccactgctttagtcctgagggtccacatacccttcatcctgactacactcactctttcacaataacagaggcctctgcaataagcagacacatctcgcccagtgagcttagaacatctggaactccgaggtccaagctgaatgaccggtatttaggctctttcggctttttatagccattggggcccaaggatgctgtgataacctaacagtaggttggaagtggggctcggtgttgtctgctctaatccttggccaggtcgtggagtaggggtgctcatagtgagggtgggtggttcagggccattcacccctacaactggacatttctgtgacagtagtgctctcctatgaaatgtaaaagtcacattcgcagctttctcggccactgaacacgatagcagtttataataatcacagaacaactgaggctattcacctttatatccctaatccctagcactttggcccacaagacacattggttgtggagatgtctatagattgaagtaataaatacgtgatgggtggaagttttggacaatagcaccacccagtgtctgttggaagagaaaattgaggattcggtatttacttgaaaggactaaacgttcaagatcattttctggatactcacccagaaccttagagcattaaggtaagatggaggtagaactatgtctttagcttgcaccccatgtgtggtggtatagatctatatagatcgaaagtcactctttccacaaggatttctcaaggcttccccagcttacttcattcccttttctttgcttttgtagcacgttgtgttaatttgagaattgtgtatgtttgttggagaaacttttaaaacagaaagatatgctcattcaacaagtaatattcattgagtacctacagtgttcctggcattaaatataataaacaccagtgttttcactacacagatttcaatgttgttaacatttaggtatacttactttgtctttcttttaaggactaaaagcgttacagaaaaaattgaggtttccttgaccttcacttcatttccattccccctcccacttgcccaggggtagtcctatcctgaatgtgatgtgtagctttcagcgtatttttctgtcattacagattaatgtgatttctgtttccaggagcaaaatgaagcattgtttgaacaagtgatccaaggctaagaccacaccccttacttcacttggggttgacaggaagctccagacaaccacccctccatagcccaaacctcaaaatcctgccaccctggtctgccttgaatcattagaacttatctaatgatgacatttatctccatttgtgcgagtcaccccaagacacccttcaactcctatattctaactgccataaggttgtgtccacatccgctctttagttcacttttctcaccgctcctctactaataaaacacaatacaccctcggtaattcctccatattttaagcctcttctctgaatttccccttccatgaggattccagatcccctgaagcccactcatgaggagcagatgatttttcactcctaccaccactgtaccacagatcctaaagcttatgtaagggactttgctgcttctcattgctgtctttagatagcaattcccctcctacccccctaaaaacttccagcttttgacaacttatgtcattgactagcctttgttgttgacatataacaaatttcaactattcccggccgggcgcggtggctcacgcctgtaatcccagcactgtgggaggccgaggggggcggatcacaaggtcaggagatcgag

SEQ ID NO: 1564250 - DNA, 4001 bp, Homo sapiens
cttactttcctttgagggaagagtatttttttcttcagtattagttttcttcagttttgacctgtcaaacttctccacttccgacaagtctggtttatcactcatcttgactagaagaaagcctgaaaagaaaaaacttttttctttttttgaaacagcgtcttgctctgtcgcccaggctggagtgcagtggcgcaatcccggctcactgcaacctccgcctcctgggttcaagcaattcctctgcctcagcatctcaagaaactgggattacaggcacacgccactatgcccggctaatttttgtattttcagtagagacgggggtcttaccatgttggccaggctggtctggaactcctggcctcaagtgatctgcccgcctcggcctcccaaagtgctgggattgcaggcgtgagccaccgcgccaggacagaaaaaaacatttttaagaaaacttacctggcagaactatcttcggactaagggatcacaagcaaaaattttcacatttcctatcaatgtatattctacctgctcattttcaacagaaaaacagcaacagatattagaaaagttatatttttgttagaataatttcaactccacatcatttgccgtttctgataggcagtaaatgtcattggatcataacgcaccagaaaccaagatgctctagaaacacagagccatttgtctgactcttaaaatcacagcaaggataaaatggaggtgatagaagcacaagaccagacagggatagaagaaaaaataaagactggttttaaccaggtaattattttgaaacagaacatagcaccatttgagcatcttcactttctatttacttttggttttgccatttttcttgggagatggggagcagcacacaaaaaaagaatgagataagttgtattaatttctatctattttaaatccccaaagacgacagtacattaaggcactacaatacacgtctcataatagctccttgtggcactggtttgtaaacgctgtaagaagggacagctaactaggatcagacccaggacttcagcagaacggaataaaccaaatagaagtgggtcttctttcacgttttcactgcagagagggaggagatgaggctcagacgtgcgtagctgtggacctgacgaaatgcctggtgccctgtgaaagtctcgagtttgttcagaagagacaataggatataccaggtagagctttcatgagcaagcccggccccaccctggtggagtaagacacttcgtctagtccctggcgtagaatgcagaggcccccaagcagtcagaagtgtcgaacatgcctccattctgtcgaggttaccctaagaccctcctctgccaagcgatcagacgccaagctcggagctgggaaattggaactaaccaataaataatagcagggccgggcgcataggccagtctgtcaggagcagtttgcatactttttcaaataactattagcgttgttagacgcccagtctaacggccacgggagggaaaggaaccagggcccagccccacaaggcccattccgggcggcccccaaactcttcatcctcgaagcctctgacctgcagctaccgcggactggccgctttaagggtcccctacccctccaaccaccgcctcccaccccgactccccggggccttctttccagggaccggcccccgggagggctcggcatcgctcgcagaaggcggcgccccagaaagacaaaggctcggactcgccgggcctggcggcggcgcagacaccaagcaccagccccaaccccagcccctctggctcccgaaggcgcggcatcccccgcctcgcgacccccacgccttcccgtccccatggtcctctggctcctgcgaggccgcaggtactcacctgaaggcttgaagactcgtgaaaggccgtacgcggggctgagacccaggctggctccgcaccaggttagccttcccgcccagagccctgcagtgctaagccttctagcaggcgccgccccagccctctctgattggccgagggtttccggactcgcctccttcccctcctccgcttgagcctccagagcctgcgcccaccatctcttctaagatcaggagcttggtgacttcagagcagacctcgccctccccaggccccacctcccaggcctctcccactgctttagtcctgagggtccacattcccttcatccgaagtacactcactcttgctctttccgggctaccttgtagcaatttgaggctccgtcatcagtttctgctacgtttcaaagatccaggagaagcttagtgttgtgtcaagacgccgatggacccatcacagaagtttaatccaacctacatcccagagtctccacaaatgctcaccgaagaaaattcccgggacgattcaggggcctctcaaatctgctccgagacgttgataaagaaccttagtaacttgactatcaacactagtagcgaatctgtttcccctctatcggaagctttactccgtcgagagtctgtaggagcagaagtcctcagggaaatcgaagatgagtggctttacagcaggagaggagtaagaacattgctgtctgtgcagagagaaaagatggcaagatcgagatacatgttactcggcagagttcgtatgcatgaaagaagaccaacaaacgaggagcctaagggagttaagaaggaatcaagaccattcaaatgtccctgcagtttctgcgtgtctaacggatgggatccttctgagaatgctagaatagagaatcaagacaccaagccacttcagccataaatcttattcttgcacctttttttcttgctggtaattttatatagcaggttgagaaagctaatctatgctagaacagactatacaccaataattttgataatgagttctaggatgtatttttcttcttgtatctttttcttcctactatgatactagtaattcataagggatctgtgtaatctgaatgtatttgaataactttagctctactgtttgatttgacccaaagaatccaagacgatataagtattcccatgtgtcttagaagcccaaagtcagtgagatgaaacccaacatcaagaaattgaagcaaagttacttgtggataaagaaagcattaggtagtttggctatagcataattagattttctggctttcaaaaatttgaactgcaatcacagcaaactttgttatttttacagttttcagtacaaaaaggtgtttatatagaaacaataaagttgacatttgagtacctttaaaaaaaaaaaacaaagtacactcactctttcacaataacagaagcctctgcaataagcagacacattttgcccagtgagcttagaacatctgtaacacagaggtccaagctgaatgaccggtatataggctctctaggctttttatagccattggggcctaaggacaacctaacagtaggttggaagtggggctcggtgttgtctgctctaatccttggccacgtcgtggagtacgagtgctcatggtgagggtgggtagttcagggccattcacccctacaactggacatttctgtgacagtagtgctctcctgtgaaatgtaaaagtcacatttgcagctttctcggccacagaacacgatagcagtcagtttataatcacagaacaactgaggctattgctattcacctttatatccccaatccctagcactttggcccacaagacacattggttgtggagatgtatgtggattgaagtaataaatccgtgatagggaggaatttttggacactagcaccacccagtgtctgttggaagagaaaattgaggatccggtagttacttaaaaggactaaacgttcaagatcattttctggatactcacccagaaccttagcgctttaaggtaagatggaggtagaactatgtcttttacttgcaccccatgtatggtggtatagatctatatagatcag

SEQ ID NO: 1564251 - DNA, 4001 bp, Homo sapiens
ttactttcctttgagggaagagtatttttttcttcagtattagttttcttcagttttgacctgtcaaacttctccacttccgacaagtctggtttatcactcatcttgactagaagaaagcctgaaaagaaaaaacttttttctttttttgaaacagcgtcttgctctgtcgcccaggctggagtgcagtggcgcaatcccggctcactgcaacctccgcctcctgggttcaagcaattcctctgcctcagcatctcaagaaactgggattacaggcacacgccactatgcccggctaatttttgtattttcagtagagacgggggtcttaccatgttggccaggctggtctggaactcctggcctcaagtgatctgcccgcctcggcctcccaaagtgctgggattgcaggcgtgagccaccgcgccaggacagaaaaaaacatttttaagaaaacttacctggcagaactatcttcggactaagggatcacaagcaaaaattttcacatttcctatcaatgtatattctacctgctcattttcaacagaaaaacagcaacagatattagaaaagttatatttttgttagaataatttcaactccacatcatttgccgtttctgataggcagtaaatgtcattggatcataacgcaccagaaaccaagatgctctagaaacacagagccatttgtctgactcttaaaatcacagcaaggataaaatggaggtgatagaagcacaagaccagacagggatagaagaaaaaataaagactggttttaaccaggtaattattttgaaacagaacatagcaccatttgagcatcttcactttctatttacttttggttttgccatttttcttgggagatggggagcagcacacaaaaaaagaatgagataagttgtattaatttctatctattttaaatccccaaagacgacagtacattaaggcactacaatacacgtctcataatagctccttgtggcactggtttgtaaacgctgtaagaagggacagctaactaggatcagacccaggacttcagcagaacggaataaaccaaatagaagtgggtcttctttcacgttttcactgcagagagggaggagatgaggctcagacgtgcgtagctgtggacctgacgaaatgcctggtgccctgtgaaagtctcgagtttgttcagaagagacaataggatataccaggtagagctttcatgagcaagcccggccccaccctggtggagtaagacacttcgtctagtccctggcgtagaatgcagaggcccccaagcagtcagaagtgtcgaacatgcctccattctgtcgaggttaccctaagaccctcctctgccaagcgatcagacgccaagctcggagctgggaaattggaactaaccaataaataatagcagggccgggcgcataggccagtctgtcaggagcagtttgcatactttttcaaataactattagcgttgttagacgcccagtctaacggccacgggagggaaaggaaccagggcccagccccacaaggcccattccgggcggcccccaaactcttcatcctcgaagcctctgacctgcagctaccgcggactggccgctttaagggtcccctacccctccaaccaccgcctcccaccccgactccccggggccttctttccagggaccggcccccgggagggctcggcatcgctcgcagaaggcggcgccccagaaagacaaaggctcggactcgccgggcctggcggcggcgcagacaccaagcaccagccccaaccccagcccctctggctcccgaaggcgcggcatcccccgcctcgcgacccccacgccttcccgtccccatggtcctctggctcctgcgaggccgcaggtactcacctgaaggcttgaagactcgtgaaaggccgtacgcggggctgagacccaggctggctccgcaccaggttagccttcccgcccagagccctgcagtgctaagccttctagcaggcgccgccccagccctctctgattggccgagggtttccggactcgcctccttcccctcctccgcttgagcctccagagcctgcgcccaccatctcttctaagatcaggagcttggtgacttcagagcagacctcgccctccccaggccccacctcccaggcctctcccactgctttagtcctgagggtccacattcccttcatccgaagtacactcactcttgctctttccgggctaccttgtagcaatttgaggctccgtcatcagtttctgctacgtttcaaagatccaggagaagcttagtgttgtgtcaagacgccgatggacccatcacagaagtttaatccaacctacatcccagagtctccacaaatgctcaccgaagaaaattcccgggacgattcaggggcctctcaaatctgctccgagacgttgataaagaaccttagtaacttgactatcaacactagtagcgaatctgtttcccctctatcggaagctttactccgtcgagagtctgtaggagcagaagtcctcagggaaatcgaagatgagtggctttacagcaggagaggagtaagaacattgctgtctgtgcagagagaaaagatggcaagatcgagatacatgttactcggcagagttcgtatgcatgaaagaagaccaacaaacgaggagcctaagggagttaagaaggaatcaagaccattcaaatgtccctgcagtttctgcgtgtctaacggatgggatccttctgagaatgctagaatagagaatcaagacaccaagccacttcagccataaatcttattcttgcacctttttttcttgctggtaattttatatagcaggttgagaaagctaatctatgctagaacagactatacaccaataattttgataatgagttctaggatgtatttttcttcttgtatctttttcttcctactatgatactagtaattcataagggatctgtgtaatctgaatgtatttgaataactttagctctactgtttgatttgacccaaagaatccaagacgatataagtattcccatgtgtcttagaagcccaaagtcagtgagatgaaacccaacatcaagaaattgaagcaaagttacttgtggataaagaaagcattaggtagtttggctatagcataattagattttctggctttcaaaaatttgaactgcaatcacagcaaactttgttatttttacagttttcagtacaaaaaggtgtttatatagaaacaataaagttgacatttgagtacctttaaaaaaaaaaaacaaagtacactcactctttcacaataacagaagcctctgcaataagcagacacattttgcccagtgagcttagaacatctgtaacacagaggtccaagctgaatgaccggtatataggctctctaggctttttatagccattggggcctaaggacaacctaacagtaggttggaagtggggctcggtgttgtctgctctaatccttggccacgtcgtggagtacgagtgctcatggtgagggtgggtagttcagggccattcacccctacaactggacatttctgtgacagtagtgctctcctgtgaaatgtaaaagtcacatttgcagctttctcggccacagaacacgatagcagtcagtttataatcacagaacaactgaggctattgctattcacctttatatccccaatccctagcactttggcccacaagacacattggttgtggagatgtatgtggattgaagtaataaatccgtgatagggaggaatttttggacactagcaccacccagtgtctgttggaagagaaaattgaggatccggtagttacttaaaaggactaaacgttcaagatcattttctggatactcacccagaaccttagcgctttaaggtaagatggaggtagaactatgtcttttacttgcaccccatgtatggtggtatagatctatatagatcaga

SEQ ID NO: 1564252 - DNA, 4001 bp, Homo sapiens
tgggccagcttggttttactctagatttcactgtcgtcccaccccacttcttccaccccacttcttccttcaccaacatgcaagttctttccttccctgccagccagatagatagacagatgggaaaggcaggcgcggccttcgttgtcagtagttctttgatgtgaaaggggcagcacagtcatttaaacttgatccaacctctttgcatcttacaaagttaaacagctaaaagaagtaaaataagaaggcaatgcttgtggaatgtacagtgcatattggcggcgcacgcctcattacgattcgcctgcttgcttctcctgttcaatcgctgtgaccagaaaaaaaaaaaaaaaaaagatggagggagatgattaaaggattcagtacagactaaagggctttcatttaaagcatcttttcaaatcataaacattctacacggtattccacaatggaataaaatatgtatattgaatatactaaatagaaatacattttaatggataaatgtttgtatattaatatggcatattaaatattccattactaaattactaaagccccgtgtttgttggctgcaaaaccatttttaattaacctttgcaagccacattcatcaactgtcggctcttcccccgcactcccccctcccgaattcttcccgcggccgctcccagcctcccgccctcccaccggccgctcccacccagcctttctaaagatgggggtgggtcggagctcactttctttggaaggcagtggatttttctcttgcgtctctgtcttcttcagtttcgacttatcgaatttctcgatctcagccatatcgggtttgtcagacatggttgcggaggaaaagctgcagggagcaagccaagagcgagcgtgaggaagagccacccgccccgctgtctctgggctgggaactgcacttctgccctccgacccgcagcctgaaaaaaacccttctcgctctcctactgctgccgttccgcgctcacgagcttcctctttctacagaaaaagaggcgacaccccccgcgcccctcctccccatatttcaaaacgctgtggaccaaagagggcggatgcctctcaaagccgaatcttgcagaataaaggaaattgaccactgcgaattgttaattacagcgtttaaaattaaaggctggctaggacaaggaaagaagaggaaagccacttccaaattcaagtgggaaaaatcggcaagaattcctaaaatggagcccaggtaggaaaagcgtttccatttcctagccgcggcctctccgcaaggatgcgggccggatccggctttctagtcctctcacaaaggcggcggccgcggctggagcttccgaccaccgccctaccggcttcatcgcccgcgtcacaatgcagccccgcacacaaagcggccgccgcgcgccccgaagccggtcttgcctgctctcccggcaattcggcatccctggcacacatgtctctgcaagaaggactgtaaagatgtcatagcacagccccgccgccgccaggctgcacagatgcagcccgcgcagccgtccgaggctgggaggaggctcggggctcggaagatgaacctcagaacaaaggacttgtctattcccccatatctcagcctccaaggcaacgcacaatacctttgcgggcaaacactaagaaattttttaatgtcccctccgagcggcacggcaaaacgccagtttttcggttttgttcttaaatcatcgatttccccaccccattatccagtatctagggtgtttcgcatccccccagctccccaaagtagccttcccggggagaaccactcgggctcggatttagggaatgccttcacagggacgcggatgatgaaagggcggggacggaggcaggacggcaggaggaaggaggcaggggccctggggctcaccgaagcgaggcgcacgagtacgagcgaagtctggtctgcgcagtggccaccaccgagttgtcgggcggggtgcggcgggcgcagctttatgggcgctcctatgtaaatgaggtgatgtcacccgccggcccgcttaactccttcgcgccgcgtctcggaacggcatccggaggcctgccgggcttttggggaggggagccccacccccacccggggtccactagtgcatgcaccctaaccacaacgatggcgaaaaaaatgagcaaagcaccctccaacacttcataacacattttccccttttacgtttatttcattacgatgaatttttgcaacagcagcgcagaaattgctcttggggaccagtgcataataactaagggtcggggtggcacctggggtgacaggcattcttttatttcgaaactgcctttgtctactgtggacatctccacacaagggcgcggtgtccctccctggagggcctggcccgctgcaggggtacgattcctgtgactcagctttcagtccagtggcgggcatgcgccccaccccgggcctctttgtcttcctcgctggcgttcctcttgccttgggtgggacgtaaagcacccttaagtgattttaaaagagaaagtttcatcactgaaacatccatattgtttcatcagcataatttttgtgagcactcaacagtagtatttgctgggtgtaaggtaatttggagtttatagggtaaaacacctccctcttagcaaaataagtcaagctcaagctctgccattgactttactgccggacaatgaggaagttctttaccttcctcttccttattttcataaattttaaaagtgatggctaaggaggccagcgttgaattccaaagactacagttacattatctctaatgtcttaagatgaaattcaaaaatcaaattatattttcaagggagcgtttccagcactaggacatcgctgaagtgcatctgcatctggaaatataagagattcgggtagagggaagcagttttcaaaatggcacctgactctgtgaataccagtgacccacttgctactgaaaattagttacaaataccatgccacgcgcctgcaaatggcgtgtgaaaggaaaaagactcgccggttataaagaggcctagctgtgattatttctaagagacaaggcagtgtgcaaaatattccttctccttttccgtggcctggggaaatgtttttagaaaccccttgctaatcatttttatggcacaggcttttgtctcgctggggattagagtcaaccttatatatagacccttgaatgccactgccagcagcttggacttccccgtttctccatctacttgacttcctttttcctggggaggaaggaggtgggggtgagcaggggcaggtgaccgtctggtcccctagttaatgctctgctgggtggctgccttcctggcctccgaatggggcactggacctgttcgtgcatgcaccaaatgtcacctgtctggtaacagcccccccgcccctgttccatgttgggagtctacttcatcgttgaaacacagaaaagatcttgcagggtgccttttcgcccgtttagctggcagctgccgttgtaccgacaccgtttccgcaggttctgtgattctgtttcccctcacccagctgctgtcgaaaatcatttctttcctcccaatgtctcctgatgacaaaggagtgccactaccttctcctggcttcttctcccaagggcctttcctcagaaagggttaggcctcactgaagcaattctccaaaggagatggacgaatgcaaacttggaaatgtctggagaagttttccagtgcggtagcaagcagccttccactgtgctgagacactgatggagggcaggtggaaacagagaggaagagaaagagagacgactgcttaaaggaaaagagttcccatgattgggactgacctgccaaccggtcaggagacctagagagacaggaaagggaagggtggtgcagatacaaggaaatgcaaaccaaaggaatattcttaaaag

SEQ ID NO: 1564253 - DNA, 4001 bp, Homo sapiens
agcctgaacacaggtggcttctctagaaggacatttgaacggtaagtagttcagaagcaaggagcagtaaggggaggaggagtaggggatagggctaactataggcattgggtgatgcctgaaatcttttctggaacaaagtataaataaaaaggcaaacaaagtaggctggcttgctctccctcctacttaaacctgataagatatcctttgggactaaatgaaagtgggtatgacagcagaggtggagaacccaagggtggttatgctttatacctctgttatctttcagacacttagccagcttattttctgcttttcctgctctgcctctctctccccactgacccatatttttttctctctgctcctattgctcctttggctcctaacggtccatgccaacccattttcttgtatcatcctccttcctggatttgtgcttttttctccctacatctgttaccaaatagaaatgagcatcttatgacaaccaattaacaacagtaataacaataacttcagcagcaatccacacaccaacagaaaaacatggcaaagccagaaaactatcttcacaacttgtagtttgtatatttgttgattatctttcaaatggaaattgtgagcatgaagggactatggttttatttgggactatggttttatttatttattttatatctaaacttgcccattgcctatgagcccaggaataacaataacactaaggtacagaaatataaactacagtggctagccaagcttcaccaaatgaccccagtatcagaagctttctgagttatctgtgattaatgacttggtgtcgcatgcttctaccttgtggcattgctatctcagtgggacagtgatgattgcagctggcaaggagctgaaaagctctagtttctttttaaagtcataaataaatgtgaagtcaggtatgagaattgctcctcctgaaaagcagcttgctgcctgttctcactgcagatgcattaagtcagaaacataatccctgaaaatcctttgctgccactttgggtggtttctccttatgtggtggtctaattacttttccatcagtttctgcccagataattgaaagaaagattaaaagtattttttcttaaggtaaaaactttgctcctaggaggagtcttaactccttaaatataagcattatagaagaatgggtaattctacaccctatcattactaaccaaaatatagaagataaatttttttcccttaccaaaataattaggcaaatgaaggagagaaaaatcttgattcagtttttcataccaccagaaaataaacacaaaagagacttaatgattttcattttcagaataatttatatgcctactaattaaattcaatcaaactcagaacagaagcatcagattatgatgtgtatttacttacttttttgggtacctccggccagaagtgcttgctcccccaaaacaggacaattagagttagggccaggataccaaacaccagtccacaaatcttaagtgatttacatattttcttggatttaaaagcttctgcctaaccaaagaacagagagaataaaacaatacacaataaatctcaataagcaagccataattcaaagtcacctttgattccactttctaatgttcactttgcaatatgataaatctgtgaaaccatgcttctgctcaaaagggaaaaaatatgaatcaacttacatttagaatgtgacagtcttcacaattctctggaggattctttgccatggtctctcagcacacagtactctttccttgctttgagaggactgagagaccactgctgaggtggagttgcaagtgagtcggctaacagatgccagaggagaagctgaatttatatggctcaaatatgtcataccagagcctgagggagcccaggggactcctgtgctgcgatttgttacatagatatacccatatatgtatataacttctgtgcacagaattccatccagaatggcaaagacagaaggttataatgaaaactattgtcctgggggttgggttggaaggggaccaagcctagaacacattgaaatgatttttcactatgaacttaaaatatcagtggcaatacatgctgcacactccagaaataagcaaacaaaacaaagaagggaatgaagtcctaatttcgattccatttggttcaacaaatatttattgcagggatattaaatgtcaggcactgtgcttggtgtttgagattcagaaatgaataagatattgcctccttcactaagttaaagctctttaaatggtgctatcaatatgtacttaactaattataatgaaaacaggataaaataaagactaattctaagctctctctcttcatcttctgtctctgatttttctcctttcttgggtcctcttcctcagtctgctttttaatgttcacatgccttatggttctcttcttgatgatcattctcactttacacagacttcgtagatgatatcattcattcctacagttgaaaatatcacctacatatcagtgatttccacatctgtacctgtaacccagttatatcttttaatttcaaggccatttgaacatctccacctggatatacctcaggaatctcaaactcaacatgttctatatcaaagtcttctttcaacaccttctcctaacctactttttcccctcatattcccaaccttagttggtggctatattagtttgctagggctgccataacaaaataccacagactgagtagcttaaatggcagaaatttatattcttactgctctggaggctagaagtccaagatcaaggtgttatcagggttggcttcttctgagtcctctctccttggcttgtagatgaccatctccatattcacatgacattctccctctatgtatgcctgtatcctaatctcctttcattataagaacatcagttatattggataaggtcccattcatatgacttcacttaaccttaattacctctttaaaaaccctatcaccaaatacagtcaaatatagaaatactgggggctagggcatcaacatatgaattttgagggaacataacttagcttataatagtggaattgtcacgcacccagtctttcaaaccaaaatctgaggtttgtctttcaaaccaaaaatgtgaggtttgtctttcaaaccaaaaatctgaggttttgtctctttttcacattccctttatccaatcaatcactagatcctatctattccaatcaatcactagatcctatctattctaaatttttatatctttgaaagctgttctttcctattgtgctcactgctaacaccccagtttagtttgtcatcctttttgagaactttcacatccatatattttacccaggctgttctcttggagctccacatccatatgtccatctaacctgctagacatctacaatacccaacagacacctcaaattccatatatcccgaactgaattagttatctctcctttcaaacatgcactttttttttggtattacctctctcactaaatgacacaataatcagtctctagaatagaaacttccagatgatccttgatttcttcctgtcttgttcatccccatggctaatcaattattaagtccagttaattctgcctctgaattagctctgcaatcctattctctccattgtcaatcaccactgtttaagttgaggttctcagtcacttttactattgcaatagaattctgttttccttgtctctcatacattgtcttcaaggtgatctttctaagactcaaatttgaggataatctctcccttgcttaaaatcctttagtatctattcattgtctataaaatccaagccacttattgtgacatagtaggcatttaatgatctcgactttgtccaactctctagtcttgattttggacaatttttttctacagcgatggagccaactgggaggtcgcagctgggcagg

SEQ ID NO: 1564254 - DNA, 4001 bp, Homo sapiens
accgttccataggccaagcccagggctgctcatttgaagtcactgggaaactagaaactaaggggtgggtggaacaccaacagtgccagagtgggaggatgctcagtgaacttggaagtctcttaagttgtagacaaatgcaagataaaactcatggactccagttccaaagacatccatttttgtagcatgcctctttacaacctctatagaagagcttctagaaaaactgccctgtgctcgcgagagcagtgatttcagttgttccataaacctggggtcatgagactaaactggtatggcatgggacatgtctattacaatgaggaggggcagtaggaatactactgataggtctttaatgtgacatttttctattaatattataagcaattctccctcccctagaagttatgctagtttttggagaacattttatctaattatattcatgtattcaactgtgggaccaaaggtggaggtgggagtaagggggtcttcaggaacattttttttttttaaacagtggacaagtgattctacttaacaacatttacaacatatcaacatctttttagaacactgttttcatcattccactcaaaagcctttgatgcatctcagctacaggatcatgtactagtattcaagattcccacattgctccacgtgtcttttctcagccctattgttccacctctgctagcgttgactcgtttacttattttttctcccaaattcactttgactatatcgagttcagagctactatcatttctctcttcatgcctggaatgttctcctttattctgtctgcaaccactacccatcctttaaaatccaactaagcctctcctccttttccattgtttccaacaaaaacttacaggttctccacctcctatgaagtcctgtcactcttactgcctcttaaatactttaagtttttcacagccagagatcaaaactcatcgtactcatcttcaatgctgtacacaaagctgacatccaattctgtcctcacaggacttagataccatataaggcttatattcccagcacacaactctggagtcaggctagattcctcactgctcccaagaaggtcgtggcttttttttttcttttaatgattcctttgctcatttttccccttcctgtgatgttctcctttttgctcaccacccgaatcctacccatcaaggccccgataaagacacactttttccacagagatgatctggatcacttccatcttcaaccacctcccctttaaactctttatccagtctacaatgtatcttagttcttgttcaattctctggctgtaacattttcattatcgcttctgagaggtttggttcctttcctttctaattacatttaagcatcatgaggactggctcacctttacctcacagcacacaatggttggtactctaaaacgtttagctctgtggatctcaacccggagcgatcttgcttccaagaggacatctggcaatatctggagacatctttggttgtcacacttgggggagaaggtgatactgacaaaatagagagcaaggatacagctaaacctacaatgcacaggacagcctcccaaaacaaagaatcttccggctccaaaaggcaacagtgcagccgttaagaaaccctgggttagctgaatgacccagtgaaccgcgaaaccacagcccccgagagggcggacgtctgcaggtggaagggctgcgcggatgagccagcggagggctggcaggtccggcccggccaccccggggaggggtggaggtacaggaccaacatccgcgtcacgcaggggctacgaagtcctccagggactcaaaacacccgccccccgccgcacttgctccattccctacctgcagtgggaggccgacaacggaaacgcaatgtcagtttccgcggaagagacccgcgccccgaacctgtagccagaacgccgaagcagttctcgcgataccctgggatgtgctctcgcgatacgtaggcggagcttccggccggtgctgggcaaccaagctcatgcgccgtagctcttcagctcgggaaggctatatttagcaggtttccggaagttgccggactggctgtgaggcggtcctgcctcgctgccttcagtccctagtgtctgggtccccgccctccagccgcctttgagtcgtgcctgggtcctcgcccttgcctcagaaccgcgaagaaaggaagctcgcgtgtttgctagaaaacctagttgggagtgcgaggcagagaacgttcagcacctttgttcctcccgaaccctcgggacagaggcagggttctgagggcagggattccccctcgtcttggccccaccgcccgggctgggcactaaactcgggccgcggcggggcgagcgaggcgggctccggagggagctgacgcctgatgatggcgcaggtagacacacctgccccttctcgggcggaaataaagtcttgttttgtgttcgttaaactttcgccgctaggcctcttatggcttccccggaggccactggtctgttttcagacgttcacgttccctctgccccgcaggtaacctataaccattttgtcttttagtccaacatgtttaccgtggctgatgtgttgagtcaagatgaactgcgcaaaaagctataccagacgtttaaggatcggggtatactggatacactcaaggtatcggatttaggcgtatctgtgtcagcttttacaagtgtaacctgtaacaggtagttcaaattcaatcaaggtttaggttttaataatcgtatgatacatagattgtattggtgaattacatttttatattcccgaataactctgtatcctgaaacattacagtctcttgaaaatgtttgagaaaatgttgagtttgagtcgtcttaaaggagcatattcaaataattaattgaactgacaataagataggagaaggaaatatttgtataatgaacacagtaagattaggcttgttttataaatatggcttataggttcctaaattaataagtgggtttgtaatacatttggatgaaggacattgacaccatatagaaaatactagtgtactgcttaataatagtttgggaaatgaaaaattttatctttaaactatattgaaatgtatgaatgtttagtttgggcagaaaatacctattagtatgctttatatttggattaacagccaggagtaggattagctcaacgtgttttcattgaaatatgcatttcaaaagcatattttacgtttaaaatatgtagctatatcctgtgtatgtatccttttttaatttaaattatatggtgagcatttccctgtttccttaaaagttttttgaaatcttcattttcagtggcaacaggcttatctttggatatttttgtaatgtatatagcagtcccctgttgttgaatattttggttatattctccaacagtccacagaggtgtgatgaagtggcagaattttttcctatacttaatatcccaatcgtaagctgctgaaatgggcttctagggaagtgaagttatgagtctgcaagtggatctggctaaccacccgtttcatttggaagctggggaaagaaagctttttctagaacccactggactgcttgtctcacggggtaagacaaagtgtgcaggggaaggtttctaacttctggccatggatctagaaccattatggaaatagaaggaaggtttccaatgaatgtagctcatctgtgtatatctctaatgaaacagtcctgctgaaatttctttcccttgtgtttcttttttatttttgtttttattttatgctagacacaacttcgaaaccagctaattcatgagttgatgcaccctgtattgagtggagaactgcagcctcggtccatttcagtagaagggagctccctcttaataggcgcctctaactctttagtggcagatcacttacaaagatgtggctatgaatattca

SEQ ID NO: 1564255 - DNA, 4001 bp, Homo sapiens
gtttattgggaaacagcaaactctgctgggcacccaggccagccgggagagcacggccctggaagcggggcctggagaggaatccagggccgtatggctggtcaggcagccagggaaggcctggcaggtgcacggacctgaggctgcccagataggaggagccgggggtggtagaggccagctgaacggtggaggctggcactgtccatggcacaggaggtggccctggtgctcaggcctccaggctggggtcatcaggcggcaagtacatgggctcgatgtgggcccacccacgggcctgctcatcggcccaggcgagcagctctgcggcgcggtgcaggaagatcaggagcagggtgtgcacgtcgccctcggctgagtgggctgcgcttggctctgcccggaagtagcggtggaagaggctgccgaggctgtaaccctggcggccccgggcccgggtgccgtggctgtgggcgcggtccaggccccgcagggccggcagcgtgtccaggcagacagtgtcccggggcaggcgggcacccaggcgccgcagctcggcacacagcagggggaaatcataatcaaagccattgtgggccacaaggcagatgggccctgcctggcggctcaggaaggcctgcagcgtccgcaccacggcgccatcaaagccagccttccggcatcgcgccaggccctcactgctcaggccggtgatctcgctggccttggcagtgaaggggcgctccgggcacatgcacagcgtgagcttgtccaggacccggggcaatactagggcaccagactcgtcgtgctccgggttctccagggaggagcggtggacagcaaagagggacagctcggcaatctcgggctccacactggggagcccagtggcttccaggtccaggaagacaaaggtctcggcccggggtgcctcggacatggtgatgttcccacggggatagcaagtcctcaaactgtccgagcgagaggcacaaaccctgaggactggagagaggggttcgcccgggccctgctgtgtaccatcctccccctagccaaagctctgacccttctggggctcacttcctgccacccccgaccacagcacctgtgacctttggctctgggagcgtcagccccactcctgtcacctactgaacagaaaaggcaggcctcagagcgctctactgcctgcctccagccacagtccccagcagggattgggagaggcagaggcagctcagggaccgcaccttggcggggtccagccccttcaccggaatgccttggctgggaacctggggcatagcacactgggtctccagccctggaaccagctgccgggaagcaggcaagcagccacccgaaagagcccatgcagtgcacccagctcccgctgggctcgacctccccacccttgtccctggcacacaggtgctggtcccgagctggcctctgcctgcttgcccccaggctcccggggagactgtccttgccaaccccaccacaccagcttacctggggcgggcactgaccggcttcctgggcttctgggcacctgtcgccacacaggctgctctaggcggcctttaatcagcggccgcagcccgcccccagctgcctgttggccaacaatgaggcctggggcctcaggacctgcgcagccggctcgctcgccaccccctcgctagctcacagccactgagacacacgccccgtgtttacaaattaggaagcaggccccgagctcttcacaggcacggggaggaagccagagtggtgcggaaggcagtaacctccacctagccaggctgtggctgccaggcctggcaggcctggggtcaatgcctcccccatgctggggccaatgcctcccccatgctggggccagttacacaaaggcaacaggtcctctttgccaggcctcagtctccccgtcactggagatcaggtgccgctcgtggggatgaagcgagctctggagtgtgaccaaggtgcccacacatgccgtgctcagcctccaaaggggaaggggtgctcccccaaaacctagggatggggcagcctcgggagatgctatctgctttaaggacgtcgcttcatcatgtctaccgtgcacctaacagtggctgctggggaaggaagggaggtgggcctggcccgggagctgtgcaggccgcagctgagctaatgcttcctccaccacagataagcaacgttagggggtgggccaggagcgccgggactacaggaggagtgaagcccagcccctcggaccccaggctcagggacctgccctgtctatcccgctccaggcaaagggcaccaggtccttcccggtcctgcgagcagtggcgccctgaagacctcattctggagcaagagacaacagcccttgatggtgggtgcactgcagggccagccccatgctgggggcacagagaggtgaccaagaggagtcccttggcctataaatcaggtggtgcacctgcaccatggtgaccacaggcctgcccggcctcccacctctcacagtggtggctgggggatgcctcaggcgactgggatggaggggggtctggcacctggctcctcctggcctccttgccttgtgtgcccacagggaccttggggaagcaaaggagatggtgccaggagggagcagggtggggcgggcagcagcaggtacaatggccccaaggaggcagaggccctaccagtcacgcctgttccggtactcacagggagggaggcagctgtgacaggcacactgctcagggagatactgggtcaccctgggaagcccagacagcatcttcctggacaaccagtcaggctgaattccccagcccagagctgagcgcccagccagggaggagcaggaaactggtaccccgcgggggatccaggggcactcaaggagggcggctgaggggtgcgtctcgcacaggaccctaaggccagccgggggaggcgacagtgggttctctgctttcaagtggctggcagcagcagggaggagtggagccacaggaagaggacgcagcccaggcccgccaagatgacaggagggccgccgccagcctgcccagacctgggccacctgagcagctcaggacaaggggaaggagagagacatagagctgaggaagcagaaagcaggctggaggcaactgcttagaaaccaaggctttctttgtgtccaagtcaaaccgcccgtctgtctctccctccccaaaggggccaaaggtccctgcctagagcacaacgtggggctgcaacggcttctgctgccacaatcatccatcctcggccaactcgatcttgggagagggcttcctgcccgccccatcctgtgctttggcgtaggccatcactgaagactttctatttctccattagttcattcatcttggtagctgcagaggaaagaaaagaaaccaaaaggatggtgggagtgtaaactagttccaccattgtggaagtcagtgtggcgattcctcagggatctagaactagaaataccatttgacccagccatcccattactgggtatatacccaaaggactataaatcatgctgctatacagacacatgcacacgtatgtttattgcagcactattcacaatagcaaagacttggaaccaacccaaatgtccaacactgatagactggattaagaaaatatggcacatatacaccatggaatactacgcggcccataaaaaaagatgagttcatgtcctttgtagggacatggatgaagctggaaaccatcattctcagcaaactatcgcaaggacaaaaaaccaaacaccgcatgttctcactcataggtgggaactgaacaatgagaacacttggacacaggaaggggaacatcacacactggggcctgttgtggggtggggggagggaggagggatagcattaggagatatacctaatgtaaatgacgagttaatgggtgcagcacaccaacgtggcacatgtata

SEQ ID NO: 1564256 - DNA, 4001 bp, Homo sapiens
gggtcctctcactggtgactctgccatgactgtagttcatttgccctataccccagcaggagggtccttgtccatctaggtctcttccaaattatcaagtatggtttaaaacaggaccttattatttcaaggtgccaaccagccatcattctaggtaaagagcctgtcatatttagtaacttctgtggtgaaatttctttttcaaggcagcacactcatactagtcaaggtgagttctgtttctttcttaatgtcaggggagacatttgttcacagaagagactattttctttttatattttgtcctgttttaaataagtgcttggggccaggtgcggtggctcacgcctgcaatcccagcactttgggaggccgaggctgacaggtcacctgagctcaggagtttgagaccaacctgaccaacatggagaaaccctgtctatactaaaagtacaaaattagccgggtgtggtggcgcacgcctgtaatcccagctactcgggaggctgaggcaggagaatcgcttgaacctgggaggcagaggttgcggtgaggcgagatcacaccattgcactccagcctgggcaacaagagtgaaactctgtctcaaaaataaaaataaaaaataaaaaataaatgcttgggggccaggctcggtggctctcgcttgtaatcccagcactttgggaggccgaggcagccggatcacaaggtcaggagttcgagagcagcctgaccaacagagtgaaacccagtctctactaaaaatacaaaaattagctgggcgtggtggcaggcgcctgtaatcctagctactccagaggctgaggcaggagaatcacttgaacccgggaggcggaggttgcagtgagccgagatcgcaccactgcactccagcctgggtgacaaagctagactccgtctcaaacaaataaaaaataaaaatgcttgggagttttttcctcagcaaaaaaaaaaaaaagcgtgtgagcagtcgtgctcgactgttctatacctgcctcaggaattgatcaggaagagtcctggagtccagagtagcccaaataggaaggcaggctaactctcctgtgctcagagaggttcaaatcaaagagactatgtggtaggtctcacctgcgcagggccaaggatcccttttggagcaaaatgttcacccaccgacaagggtcctgcttgcactctctgctcacccttccttcagctggaccggctccagacactattccttgctaaaccaaacaagcaaatgggttgactgctgtgtcgtgtcccgaatgcagcccacaggcagtcaggtccttgtctccccaacaagactccactagcccttccattcccttcttctttaggcaagttctgcccactgtgtctgtaggaagggttaacaaagaggagacactaggaaaggctaccactaaacttggccggtctgcagggcccgggaaggacagaaagtaagggagtgggaggagttagggcacaggcccacgctgggccgtacacgaccttgcgcagtcaccgtcgggtcccgtctccagccccgcctgcctcctccattccccgccccgcggacagtttggcatagtagggagttttctgtaaagcaagggttaaatcaggttttccgggctatttatccaccttaccttccttcgtaaccaataaatcctcttacaaacctgaggcggcaaactaaaaggccagcggatggcctggtttgctgcggcggggaaacagtcacttcctggtgcgcaaggcgcctctactcccgccgcacgcgcagccaacccttggcaagcgcggcgggacacggggctcctcccagcgtcggcgaggcagcaggctccggcacctcgactcctctcggggagtacccctccctactttgctgggggaaccttctatggagaccttccttaaaagcactcatagccctgacacccgccgccttccttctctaagttctcctctcctcccctccccggggccccgcccaccacctgctctttcctcaccgtcccattggtggatctacataagagactcacgaagacgttcacactgcagtgttaactgcgttagccatcccaggggtgcttgcagtttaagtcttccaactcaaggaatagttttctcatgatagaattgcagacatcagatccctaacgggttggaagattgggagatgagaaacagggtggttccgtgaaatggcatcctttggtaaaagccagatctattctgggccgtggggtttctcaagcattcattctcttttaacactgcatcagaaaaatactttatagtttcttcactggatcccactcaagactattaaatcctaaaccctcagaaataatctttttcttcaactacagaactcaaaaagaggacagatgtctctttttggttgattcactacctcctggactacattcagtaatacctctaatttttagaggagtcattagcccagccacgagtaagaaaacttgaagtatacacacatctgtgtgctgtaaaatattgttgctttaatagagtaaaatttacagcaaagtgaacctaccgaggtgggtgcagtggctcacgcctgtaatcccagcagtttgggaggccgaggcggaaggatcacctgaggtcaggggttcgagaccagcctgaccaacatggtgaaaccccatctctactaaaaatacaaaaattagctaggcgtggtggcgcacgcctgtaatcccagctgctcaggaggctgaggcaggagagtcactcgaacccaggtggtggaggttgcagtgagctgagatcatgccattgcattccagcctgggcaaaaagagtgaaactccgtttcaaaaaaaaaaaatagtgaacgtacatttaatgatatttaatttttatgcttaatagtaattgtgctcaagtggaaaacactttgtagtcaacatttcatgtattaatatttattcaaagcataacatgcctattatgtgcaaggcaatgtgttagccttagtgagtacagtagtaaattaaacaaggcccaatacttcaaatagcagcaaacattgagtcagtcagaataggattcaaagcccagatctgccacttattttctatttttctgttttttgagacagagttttgctcttgttgcccaggctagagtgcaatggtgtgatctcggctcaccgcaacctccgcctcccaggttcaagcgattctcctgcctcagcctcccgagtagctgggattacaggagtgcaccatcacgcccagctaatttttgtatttttagtagagatggagtttcaccacgtcggtcaggctggtctcgatctcctgacctcaggtgatccgcctgcctcggcctcccaaagtgctgggattacaggcataagccaccacccccagcagatctgccactgataagctgtgtccactgagcaagttatttaattactcagtgcttcagtttcatcatctgaaaaaaaatgtccacaataattttacctacctcatacggttgtgacaacgattaaatgagttaatacacacaaagtgcttagaatacagtaagtacacaaagttagctattatcattcaaaataagttgatatactgtgtgttcatacattctgaagaaaataaaaatattttaccccaaaataaatgtatttgccatatgtttgaaatggctgcctcaggaccagaggactgagatgggggaaatttgcatctgtagagaacctccttgaatacagccaagcttcccatttctatgccttacctggatccaggagagattgagagtctgacatctttaaaagtttgaaaagaagcatttaccagctattctttcggaaggaggcttcctctacatgacaaggccaccttcacaaaccaagtctcttcctttcttccataacctatcttgccactaaaacctgtttttgtatatactctgagttcgtccacatt

SEQ ID NO: 1564257 - DNA, 4001 bp, Homo sapiens
ttaccatcctctgggccatttggcctcgctaaagcccatccctttccacaaaggccttcccttcctctgagcagtggttaattaaaatggggtagggagcaaggaaggaatagagtcaggcaggttttcctctcctctccttcaccatgtaagggaggactgagacgagttaggcagggaattatgaaactacacggtggaaggggtctgaagagcagtaagtgaactcaggatggggcagatggcctagagagaatgcagagaggcctcacctgaaatagaggcaccctatatccgtagtcatttctcctatccatctttctgggaggccgagtaacaggtgagcctgaggggaatgggcctgagttagagaatgagagggagggggagattcatcagacatctcacctatcctgacttaggggagtctcatgtaaccttgggccctaatcccttcaactcctgggttttcatacctaaaaaacccaggccatctggtttccaaggcccagctccttttgcctccgagagagtcagttctacgaccccacccctttacacgccccctccgcaactcgatagtgcgcatgcgcaccgactagaggcgcccccaccccccatcttaggcccacctctatcccaaaagaaccattcttcaatgccctccgcgcgcatgcgccttggtaaaccggacagtttctaaccagctcaatcccacatctgccccctgctctcagagcaacagaacatcttggcgccaccccgacccactctttctaactgcatcacatctcgatccaacccttcccccaacactagccccctccctccgctctgcagtaccactccgcaccgcccctaccccaacaccgcccatctctcctctgcggtactgccacgcaccgccccttcccaatacacccccctccctccgctctgcagcatttctcttcatcttcccttcctttaataagccccctccctccgctctgcggtacgtctctgcaccaccccttccccaaccaacaccactcccccctctttccacgtctgcaagtgtgcagctccgccctttctgcaacatgaatacctcacccccaaatccaactgtatgaaccttctgtgtattcctgttctcaaaccctaccaggtcctgtctcttccctttcaaaccggaaccaaccgggtcatatcccctcctttctcctgtctgagtctggtcctttccgttgctcaaaagggatgctgcccactcttatctctgggtcccgatccctccattctgtggcccaaacggggtactgccccctttctccagcctaaacggagtcctgccgtctcctatctccctcccgaactgtgtgtatcctcctcccctcttgctaccgtctgaaggatttctcgatccttcctttctgcggtcccaactaggtctgcatccctccctttcacggcccgaaccgagtccagatcgttactttctgtggcccaaaggggattctgcctcctacttcctcccgtgcgaactgggtccaggcaccgctaaaggcgactttgatgcggttaggtcccaaacctccagcaggttttcttcaaaccttaggggcgtgtggagtcaggcacgtcgaagccgcagccaggaagcccccacagggtcttcactaaagccaggtacctcagctcacctcgtcttcttgaatccagaaggcgtctgctctctccaagcctctccttgtgtctgagcctatccccctccctggccggaagtggtcctgcctctttccgcctccagaggggggtctccgttcctgcctgtcagtctcctcccctccatacctactttcaactttccattctcctcaatgtagctccctttttcttcttactacccctattcagttatcactccctcttattctccatttgacttctctattccccactctgtatctccgttcctatttgattctcctgtttcccctaggaggaatgtagttctctgaactcccacaccaacccttcctacagaccctctatcccaacactatttacatagtgttgttataccttgtgtctatgtctctcttccctagagctgctctggagcaggggactaggtcatattcatttctgtttttcaagtgttaccacattaaaacatttagaggttctaaacactaaaagatagggtgcccgtccatcttatgcaattcagaataaaaacagtaatgtataaaaatctatgaaaagtttttattgatcccacaatgactatattgatgttttaacaatatcagtttgtacttagactgtctcttgtgacatggtgcactgtgcccccatgcagaaaacaattcatgacatttatctattccatcaatcattcaaaagagagcaaggataactacacatatgtcaaataaaatagacttaaagtcaaaaaccataaaagatcttaaaggtcattatataatgataatgagataaattcatcgtgaatatcgaataattataaacatatttaatatatgcacccaacatagaagcacctaaatatataaaacaaatattaatagatctgaagggagaagtagactgcaatacaataatggtaggagacttcaagaccccatcttcaacaattcacagatcatccagacagaaaatcgatagggaaacattgaacttgaaatacactttagacaaaaaggacctacggaatattttatccaatagaatatataatattctcaagcacacatagaaaattctccaggatagatcataagttaggccaaaaacaagtcttttttattttattttattattattctactttaagttttagggtacatgtgcacaatgtgcaggttagttacatatgtatacatgtgccatgctggggtgctgcacccattaactcgtcatttagcattaggtatatctcctaatgctatccctcccccctccccccaccccacaacagtccccagagtgtgatgttccccttcctgtgtccatgtgttctcattgttcaattcccacctatgagtgagaatatgcggtgtttggttttttgtccttgcagtagtttactgagaatgatgatttccaatttcatccatgaccctacaaaggacatgaactcatcatttttatggctgcatagtattccatggtgtatatgtgccacattttcttaatccagtctatcgttgttggacattcgggttggttccaagtctctgctattgtgaataatgccgcaataaacatatgtgtgcgtgtgtctttatagcagcatgatttatagtcctttgggtgtatacccagtaataggatgcctgggtcaaatggtatttctagttctagatccctgaggaatcaccacactgacttccacaatggttgaactagtttccagtcccaccaacagtgtaaaagtgttcctatttctccacatcctctccagcacctgttgtttcctgactttttaatgattgccactctaactggtgtgagatggtatctcattgtggttttgatttgcctttctctgacggccagtgatggtgagcattttttcatgtgttttttggctgcataaatgtcttcttttgagaagtgtctattcatgtccttcacctactttttgatggggttgtttgtttttttcttgtcaatttgtttgagttcattgtagattctggatgttagccctttgtctgatgagtaggttgcaaaaattttctcccagtctgtaagttgcctgttcactctgatggtagtttcttttgctgtgcagaagctcttgagttaaattagatcccacttgtcaattttggcttttgttgccattgcttttggtgttttagacatgaagtccttgcccatgcctatgtcctgaatggtaatgcctaggttttcttctagggtttttatggttttaggtctaacgtttaagtctttcatccatcttgaattaatttttgtataaggtg

SEQ ID NO: 1564258 - DNA, 4001 bp, Homo sapiens
tggtggcaatctcattggcagctgggactggaggggcagcaggtgcagccttagtaatagtctttataggggccttcttggtcttgcttttcttaggccggttgacaactggtgggtccatggccagggagtccttggttgccgccaacagggtatgcatcagcaggacactgtcctcttctgtggtctcagtctgtatatctggagggaagggaagccccaggctccccgggggaggcagagggccctacacacttaggattaccatcctctgggccatttggcctcgctaaagcccatccctttccacaaaggccttcccttcctctgagcagtggttaattaaaatggggtagggagcaaggaaggaatagagtcaggcaggttttcctctcctctccttcaccatgtaagggaggactgagacgagttaggcagggaattatgaaactacacggtggaaggggtctgaagagcagtaagtgaactcaggatggggcagatggcctagagagaatgcagagaggcctcacctgaaatagaggcaccctatatccgtagtcatttctcctatccatctttctgggaggccgagtaacaggtgagcctgaggggaatgggcctgagttagagaatgagagggagggggagattcatcagacatctcacctatcctgacttaggggagtctcatgtaaccttgggccctaatcccttcaactcctgggttttcatacctaaaaaacccaggccatctggtttccaaggcccagctccttttgcctccgagagagtcagttctacgaccccacccctttacacgccccctccgcaactcgatagtgcgcatgcgcaccgactagaggcgcccccaccccccatcttaggcccacctctatcccaaaagaaccattcttcaatgccctccgcgcgcatgcgccttggtaaaccggacagtttctaaccagctcaatcccacatctgccccctgctctcagagcaacagaacatcttggcgccaccccgacccactctttctaactgcatcacatctcgatccaacccttcccccaacactagccccctccctccgctctgcagtaccactccgcaccgcccctaccccaacaccgcccatctctcctctgcggtactgccacgcaccgccccttcccaatacacccccctccctccgctctgcagcatttctcttcatcttcccttcctttaataagccccctccctccgctctgcggtacgtctctgcaccaccccttccccaaccaacaccactcccccctctttccacgtctgcaagtgtgcagctccgccctttctgcaacatgaatacctcacccccaaatccaactgtatgaaccttctgtgtattcctgttctcaaaccctaccaggtcctgtctcttccctttcaaaccggaaccaaccgggtcatatcccctcctttctcctgtctgagtctggtcctttccgttgctcaaaagggatgctgcccactcttatctctgggtcccgatccctccattctgtggcccaaacggggtactgccccctttctccagcctaaacggagtcctgccgtctcctatctccctcccgaactgtgtgtatcctcctcccctcttgctaccgtctgaaggatttctcgatccttcctttctgcggtcccaactaggtctgcatccctccctttcacggcccgaaccgagtccagatcgttactttctgtggcccaaaggggattctgcctcctacttcctcccgtgcgaactgggtccaggcaccgctaaaggcgactttgatgcggttaggtcccaaacctccagcaggttttcttcaaaccttaggggcgtgtggagtcaggcacgtcgaagccgcagccaggaagcccccacagggtcttcactaaagccaggtacctcagctcacctcgtcttcttgaatccagaaggcgtctgctctctccaagcctctccttgtgtctgagcctatccccctccctggccggaagtggtcctgcctctttccgcctccagaggggggtctccgttcctgcctgtcagtctcctcccctccatacctactttcaactttccattctcctcaatgtagctccctttttcttcttactacccctattcagttatcactccctcttattctccatttgacttctctattccccactctgtatctccgttcctatttgattctcctgtttcccctaggaggaatgtagttctctgaactcccacaccaacccttcctacagaccctctatcccaacactatttacatagtgttgttataccttgtgtctatgtctctcttccctagagctgctctggagcaggggactaggtcatattcatttctgtttttcaagtgttaccacattaaaacatttagaggttctaaacactaaaagatagggtgcccgtccatcttatgcaattcagaataaaaacagtaatgtataaaaatctatgaaaagtttttattgatcccacaatgactatattgatgttttaacaatatcagtttgtacttagactgtctcttgtgacatggtgcactgtgcccccatgcagaaaacaattcatgacatttatctattccatcaatcattcaaaagagagcaaggataactacacatatgtcaaataaaatagacttaaagtcaaaaaccataaaagatcttaaaggtcattatataatgataatgagataaattcatcgtgaatatcgaataattataaacatatttaatatatgcacccaacatagaagcacctaaatatataaaacaaatattaatagatctgaagggagaagtagactgcaatacaataatggtaggagacttcaagaccccatcttcaacaattcacagatcatccagacagaaaatcgatagggaaacattgaacttgaaatacactttagacaaaaaggacctacggaatattttatccaatagaatatataatattctcaagcacacatagaaaattctccaggatagatcataagttaggccaaaaacaagtcttttttattttattttattattattctactttaagttttagggtacatgtgcacaatgtgcaggttagttacatatgtatacatgtgccatgctggggtgctgcacccattaactcgtcatttagcattaggtatatctcctaatgctatccctcccccctccccccaccccacaacagtccccagagtgtgatgttccccttcctgtgtccatgtgttctcattgttcaattcccacctatgagtgagaatatgcggtgtttggttttttgtccttgcagtagtttactgagaatgatgatttccaatttcatccatgaccctacaaaggacatgaactcatcatttttatggctgcatagtattccatggtgtatatgtgccacattttcttaatccagtctatcgttgttggacattcgggttggttccaagtctctgctattgtgaataatgccgcaataaacatatgtgtgcgtgtgtctttatagcagcatgatttatagtcctttgggtgtatacccagtaataggatgcctgggtcaaatggtatttctagttctagatccctgaggaatcaccacactgacttccacaatggttgaactagtttccagtcccaccaacagtgtaaaagtgttcctatttctccacatcctctccagcacctgttgtttcctgactttttaatgattgccactctaactggtgtgagatggtatctcattgtggttttgatttgcctttctctgacggccagtgatggtgagcattttttcatgtgttttttggctgcataaatgtcttcttttgagaagtgtctattcatgtccttcacctactttttgatggggttgtttgtttttttcttgtcaatttgtttgagttcattgtagattctggatgttagccctttgtctgatgagtaggttg

SEQ ID NO: 1564259 - DNA, 4001 bp, Homo sapiens
aaacctatgacaccaacaatagacaattatgaatgctgatatataaatctgtcattcttgttaaatgccatgaagataaatatatggcaatagaaaagtgggtctgggtgtgccatgtcaatgttgtaatcatttcacatttgaagccaagggttaacatgcacaatctctaaaaagagcattatcaattagtctatgtctctcctactcttataataaactcgggtaaagttcagaggttctatctttcaggctggtttccccgcttcaggcttttcctgagggagtaataaccttgctaaacacttaaccatcaccaggtacatgactgcgatccaaagagcccaggttgtaatagggaaaaagcccttctagtctcattctaagagaccatggagaaagatcagcatctgtgaattcagctcagtacctgcatatgtgggacatgatcatgaccatttgtccgagtcgatgtgtgtctagggagggagggaggtgtccactttgaagcagagatctgactgatgcccctccatttgcatttcttggttcctttaaggaagacaggcaaacaaatctggccatttcttaagtttgaaggatacaagacaaagaaggtaaatggggaccctggttcctgaaccttcatgatccggctcctggctctctatttctgaaggtggcttttgacgaagggcaggtatccttggtccgagggccacactaatcgattttaaggaggcctgggagcaggttccccacggatcttaaaatctacccaagaatggagcaaatcattgtccagggataggacaaagctgtggttcaggaaaatattcccagtgaaaggatgtttttggtcatcgcaggcagcaccttgtcctatcaaccctggagcttctccccattgcatttcctcttccaaaacaatctgttgctggcctccctctgctccctaccaccctgagcccacagccagccagtcaatgcttctccgcctacagcagcccagcatcttcattcaacccgcacttcgctgccccttgcccctcagcagcactcaggcagtgaaatggaccgcaccggccgcctgtagacttaccctgagccaagtggttttttcggataaaatctgtgtcgtctggatgtccaccggccaggatgcgtggtgcggcgccttgccggactcctcttttgcggcgcgaaacagcagccgactgggacagcccggggcctctaggctgatgggtgggtgggcggatgagcacagggaaaggggcggggtgtaaagacgagcgcaagtactggctcctaccttggcttcccctttggatgctcagttattgccaaacttgcctgtaacagatcggccctcctcacctttcaccttcgccagtgccctgaaactctttgctctaccaatgtccctaccctgttctcccagctctctaacccaacctgagccccttcaagcgcacccactcccttcacgcagccagtcacacacaataagagctagggaagaaactgacacggggaaactgacaggggtagctgacactgtagtgtgaaggagagggagaaggagggaggaaggaagggatggagagagaggggagagagagagaaaaaaagagagagagccgcattcacactcttacacgcacactcaagctccagctgttaggtagcggctggcgggagcgctggctacccctccaaaacccttttctacactagaggtttctgtccccttctgctgccgtttctggaatatgctatacagagaaggggagagaaaagcaaagaggggtggggaggggaaaatcaaggaggcacgctccctttatcctccccacccctgtctccaaaaatgtccaaccctgagctcttccttttcccttctttctgcgcccggcttccctctgctcctgttctttattcctccctttggggtggctgcgagctgcggacaacccgtcgtggttgtgatgtggggtgtgtgtgtgtgtgtgtgtgtgtgagagagagagagagagagagagagagagagagagaaagagagagagagagagagagagagattgagacaaccgtggtaggcaaaagcacccctcacctcccccagcccccgggccgaagccactctcaatctcctggcggcggggcggggcgggggaggcggggaggcgagagggaaagagggaggacggggcaggcggcaggggcagcagctcctgccttctttgcagctccgcggccaggggtggaaggaagccgcagccgcagccccaagtcaacccccgctgccccgtcccaccgtctcatctctcccccctcggtacggaattttctgtctcgtttgtttgcttccccagacctccccctcccctgggtggtggcagagacgggaggggaggtgggaggctaagcgcgggtgcgggtagaggggacaggagtccctcggagcatatggctagcagagtctctctttgccccttggcctgaatatcccctgctttgggcagtgacctttgcccacccccgtcagcctgggctctgggccggtggtggcgaggctgctccggcgaccataggtcattcaggaggaaggggagttgaacctgggggagtaagggcggcgggcggctggtaggacagggagacagcggagcgctgagtcgccagggactgacctggggtcctatggggcaggcttggatccctgatagatctagattaatctagttggagctacctaattctcccatccgtgcccctctcacccatagggtcgatctcccaagatccagcctagattgatacagggagggaaagtgatattgtaggatgggggcggggggctaggttgcttagtggtatctgttgtggagggagaggggcggtgtcaccggacacttgggccactctttgatctttacgccttcctttcacatgaagcacctctccacttctttcaccttatagcctggcgctcagaatgtccaccctcttgagcccaactggaaggggctaaatagccccacccccaccacaagcctgagacttctacctgcaacctgcaggcgcataggtccactagctggcagcatttcatggcctggccgcacagccccaaatattggctttgtcttttatctcccttcctagcgctctcaggaaaggggcatgtgagtctctgcctttctggacgccgggctggtacctgaaaacctttccctacccattctcagaacaatccctagctctgagaaaactccactgtacttcctgttgctctttaaccccctctgcacgccctgggagcctaagtgtaagctcccgaaaatgccagaatcatctcccttgcctaaatggccgagtgttttcattgcggagcctgtgaagctggtagtagctatgtttagtggaagccctaagcactctcctcctagcctaccttggaaaagtcgctcggggcaccaagcaagacaaattttccccttgtcgttagtcctcctagtcccgaggcagtccaatattctggagagtatttagcttttgtatgggagcaaggtattggagaaaagaaaattattaccctgggggatgaagagtttgtgtctggggggaagggagttggggaggaagaagtgagggtggagcttccacctcttaacaacttaaatacttcaggaagtgtttctaaagattggccaagagggtcgctgaaaaaaaaaaatcacttgattctttgcctttcattcaaaggcagttttactgtgaaccagcaaactaatatacagtctcccaaacaagggaggtctatgttgtgattaagccgtcttccctttggcatgagggtgagtagaatatgtgaccgtggataaaactttgggggcatttccctttttttagccaaactgcagtccagctgagacttccactccaagcccagatgcaaccagaagcagtgctcagggagagcaaaagccttattc

SEQ ID NO: 1564260 - DNA, 4001 bp, Homo sapiens
agcttgctgcccatacttctttacttcccactctctatcagtatcttgtattctgatttcaggactccatagaaaattatttttcttaatcaccagaacctatcatctatcctcaaatattaatctacatcaaccctcatcttttaaaaatttcgctctttattgacttctatgacatcatcattgtgttctggtccacttttgacctctcgtggctcagcctcaggtttctttttacagccaacctacataggtaggtgtgccaccacctccagcctgctgcctttttctctctcaccgtttcctcttaattattttattcattcatttatgtcccttctcattccacaaaggatttgcagtagttacaatctcatgctatgcatttttccttaattattataccaactcctatggttttacccatcatctctatataggcaactccccaagctgtgcctctgactctgactctgatgtccttcctacacaccacactacctgcctgatcacctgctgaacaccatccatacatacctcaaatccaacatatcctaaacttgaggtttacccaggacctagttttagcactgaaagttccgtgtcctcggaattccctcaaccccaagcaaaccagaacactaagtcaccacaactaaaatgaactcaacagtgtctgttccaaacccattcttcctcatgagctcctaattcctctccatcattttgtagcagagatatcctccttctgcataaacttcaactcctctttgccttccacctactcatgcaactgattgctagatattgtcaattttatctccaaaatatcttctttaacgtcacttcctttcaacttccactgctctaattcaggtctttattacctctaacctatacaattacagtagactcaatcagtccacctgcctccagccatgctatcaccctactcccatcccttttgccaattcatcttccaaactgcaaagattgatcattctgaaacacaaatgtgatcatccatagatagtatttttctaatcaatattgaagttttacagaatgaactccgagaacagcattaaactcaggctcccaggcatttgagcatgatgactacacaatatgacacctaagaaatgttgttatgaatgactaaaatacacggagtattaatatgagctctaagtgaaagggaaaatcaaaacaaaacaaaaaccaccaccatacccttgagaagccaggaactgagtttgtcggttccagttttgcatcttttcatttcttcagagaagtatatgataaccacagttaaggaaagtaaatattgccagggaattctgggtggtagagactcattaaagccttgatattcatatgaaacagaatcatctggaagtcatattaaacagaaactaaacttgagagagaattcactggttccctcagggcattaggtcttaactgatctgtggccctactccctaattacctctgctgcaagagccataggctttccatctcagactggcaaggaaaaagagaatttacataaacgatgtttatatcagtgacaggaaatatgtatcccacttgaataaggggtacggcgtgcccaatatagattatgaaaaatgaaaaactgccaggagaagaaggcaagtgctttccctagaggagagagagctcatcctttcctctctcaggaaaacttacctatcctctgtcttctctcatagacttgcaagtggtaaattgtttatgaagcaactcaccttaggagtcaggggttgaccttcacagagatattagaaaaagatggctaccagaaacatcagagctgtaatccaaaggcttacctctctaatggtaggaattttcatcacatggtaggtaacctcctcttccgtctacataattaagagatagctcccacctcttcagaaacctcttccaactatggtcctgcagtttttgtttgccacatttgtcttttctagtttttttttttttctccctagcttaataggacattgaaacattgttgtgtttcatttatctcccaaagaccttgcctctgaaattcattatcctttcattttaggtacttcccagtcagaaacacacatgcacacacacacacaccacaaacaaaaacacatcccttctttgtttaatagcactaacaccctccctctccctcaacctgggagatgtgaacagccatggttgctaccctaaaggagttgaggatctaatcagaggcatcaaccaagcccaactaagaacaaagaagtatatctgacagtcattatttttttctacagttgctgcaggaactaggagaatggggaggtcagcataaactgcaatctttaagaaaacatcacattaatcaaagaatggaatcagagtccattgaagtgcaacacaagggaaggattttgaagacaccaaaaaaaaaaaaaaaaaaaaagaaagaaaaaagaaaaacatcacagaactggggactttcttcctgggccctacacatacacacttcattgtggtcatatatggttctggcttaaagcttttaatggcttatactagagtgaatcccctgctgtcagtccccctccaggccaaaaccaccctgttcactgccctgtcctgctaatcctcatacttctacctctggccctaaacttcagtcttttcttcaacaactcaaggcactagaaatgtcatcaagaataagaaacagacaaatacaggtatttggtatttaagtgaacattcactatgtgccaggcacacagccacattctatctgttctcattactactccaagtaatttaactaccatttttaagagtttactatgtgccaggcaaccagaactgtgctaagaacctttcatgaatagtagctcatttaatcctcatagctaccctatcagcagtattattattctcattttacagaggaggatacagaggcacagagaagtaaaagaacttgtccaaaggcatactattaataaatggcaaagccagagtcggacctcatgtctgtcttactccaatgcctacataccagagactatgtagtattatggttacagcagggcccagaactctttctatagagggcccatagcaaatattttagacactgttgaccttatggtctctgttgtaattactcaactctgcataaaagcaaccacaggtaatacataaacaaatgaatgtggctgtattcctataaaacttcatttacaaaagcaggcaatgggctagatttagcccagaggctatagtttgatcacctcaagttagagcactagtggtgtactcagatagacctgggttcaaaacctggctctcaccacttactagacaaaacatttagtctctctgtgtctcagtttcttcagcggtagaacagcaacaataccaccctcatagagtcatcatgaggattaaggattaaaggcatgtctggcacatagtcaacttctcagacagtcattttattaaaagcccaccacatgctggtccctagaaggaaggagaaaggacatggattagaataattacaactctctttaaaatcaagctaccagggcccctacggtcttgatactccacagaaataattactctctcgggattccagctaatttgattctcccttcagctacatgaactgtgttctcttgtgagtttagtttcctgttgcagtcattagcaagaaagtctcttgacttcattatagcttttgtcaggcactgggaaccctatcatggtagaacaggaatctgattttgttattatctgttaggtgttcccttcaggaatgagattctcaccactgaagtcatgcctgtgtcccaagtacttggcatggggcctggcacagagtaggtgctcagtgaatgttgctggcttaattgagctggctacatttggggtggtcttacctggaaacagatggaaaatgacttcttaaa

SEQ ID NO: 1564261 - DNA, 4001 bp, Homo sapiens
gcttaggtcctggccaagtcttaactaagttctgattaggactaaactatatttatgaccttgctaggacttaagtagactaggactacaacataattaggcatagaccctggctagggcttaacctggctctgactagacctaaattaggcttaggccctggctagggctgaactggcttctgactagacctaacctaagtttaggcattggttatgctttaacaatacaccgatgaggtcttaagcaagctagctagcttttaactaggcttagtccttggctatactttatcaaaattcggacaggctcttaactatgtttaggccctggctaggctttaactggcttaactagacctgaattaggcttaggctctagctaggtcttaactgggctaactaggccttaactaggctaaggctttgactcagtcttaactaagttctgactaggactaaactatacttatgatcttgctaggacttaagtagactgggactggaacttaactaggtttagactctggctagggcttaactgggctgactaggcattaactaggcattggccctgaataggtcccagttgggctgactagaacttaactaggctctgactagaccgaaattaggcttaggccttgcctagggctgaattgggttataactggaccaaaactagacttgggcaacaactatgctttaacaatatcctaatgaggtattaaccaagctaactagatttaactgtgcaatctagaccggaagtaggcttaggctgtgactaggtctttttttttttttttttttgagacagagtcttgctctgtttcccaggctggagtgcaatggcatgatcttggctcactgcaacctccgcctcccaggttcaagcgattctcctgcctcagcctcctgagtagctgggattacaggagcatgccatcatgcctggctaatttttttatttttggtagagacggggtttcaccatgctagtcaggctggtcttgaactcctaacctcaggtgactctcctgccttggcctcccaaagtgctgggattacaggcatgagccacagcgcccagccggctctgactaggtcttaactgggccgactaggacttaactagacttagactctgtctccacctaactgatatctgagtaggccttaggtgggcttagcccctggtgagattgtaaccaagctgccttggcattaattgggctgagcaagccttaactaggctttggtcttggccaagttcatggctagagcttaactatgcttaagcctcaggtaagccttatctaagctgaggtgctggctaggccttaaccagaccttggccttggccttgtcttgattaagctgtcatcagaccttggctaaattgcagctactctttcgtaaggatcacctcaataatatactacctctagccctcagctcctccagtttgtatctgccattacctcagttatcctgcagtttcaggccgtactctgggtcataaagaagtcagagacaagacccctaccttaccatactgcaacaggaaacagactgcttgtaggctctttgcagccagaggtacttacagtataaaacaggaagcaacccctgaattgacactcccaagaaaccagggggatactcttttatataacactccacccagaattatatttttatttcagccaatgagaatggtctgtaaaacttcttccaggacactgacattttgtaataagtttgtaacaaacttaaaacataacatagcattcctgagtacagtacagcagcaggtgactttacggcttttgcccataatgtgcaattggcagtttagaagagagatcttcttacctaccttaccacactgcaacaggaaacagactgcttgtaggctctttgcagccagaagtatttataggataaaacgggaagcaacccctgaattgacaccctcaagaaaccagggaacactcttgtatgtaacaccctacccagaagtatatttctatctcggccaatcaaaatggtctgtacaactgcttccaggacaccagcattttgtaacaagtttgtaacaaacttagaacatagcattcctcagtaggggaggagactctactgcttttgcccttaatgagcaattggcagtttacttaccttaaccacactgcgacaggaaacagactgcttatagtccctttgcaaccagatgtatttatagtataaaacagcaagcaaaccctgaattgacacccccaagaaaccaggggatactcatgtatgtaacactccacctgggagtatatttttatttctgccaatcagaatggtctgtgcaacttcttctaggacaccgacatttggtaacaaatttgtaacaaactgaaaacatagcgggccaggcccagtggctcacgcttgtaatcccaacactttgggaggccgaggcaggtggatcatgagatcaagggattgaaaccatccaggccaacatggtgaaaccccatctctactaaaaatacaagaagttagctgggtgtggtggcgcgtgcctgtagtcccagctactcgggaagctgaggcaggagaatcacttgaacccgggaggtggaggttacagtgagcagagattgtgccactacactccagcctggtgacagggtgagattctgtctcaaaaataaaataaaataaaataaaataaaataaaataaaataaaataaacaaaagaaaatcacaaaacaacagcaacaacaaaaaaacatagcattcctaagtacagtacaggaggtgaatctacaggttttgcccacaatgtgcaattggcattttagaagagagatcaccaatgcactagaattgcagtaacgggagtgtaagcttcaccaagctgaactttgagcatttgtagaacctatgaactctccacagttagttatcagttccattgtgaggaagtagccagtctgatatatgctggcttggcctgctataagatactgaaatacttggttaatgacccaacaacaggatgataaatccagaccagagcataggtagtcattcttgtctattagcttcatggattcctagtgatgaaagactggtaattggttccaaccttggctatattatttagtttgggagcatgtatttgtatatacatacacctcctagtaaaatgcatttgattcattgcacattaggagttcactttggcccaactaatcatttttgtcatctgtaccaagttataagttaaacttacataggcctgtacagtcctattaaccttttcaagtacacagtgacttaggtatcagtcctgcatggactaactgaagtttgtaggtactattcagagcaaagcaggtaagcagctctgttcacaggacagtgcccagacagggcctgtggctgtgggatgtaaccagtctttacattaagctatgtatagcagtatgtcaaaagaactgatctgggcaccagaactagaaagttaacacattcattcattcatcccacaaatatttattaatcacctactgtgtgccagatattatcctgagactgggaatatgatggcaagcacatatagacacaacccttaacctaatggagttctcattctacaaacaaaatcaggagaggatctgcacagccatgagttgaagcctagattaaaacaatctgtatgctacagggcaaggacagatgtgataggcaaagcctacaacgacagaatagctgtaggaaaatagccatgtggttaaaaaaaaaaaagcagcaacaaatgaatataatcttcattttaaaaatatgaaaacagagatttttcctaacatcaccaccaccactaccacgtcattctgagaaagtcatttatattttttggtcttcggttcttccttctataaagtggaatcacttacccatttgagaaaaaaaaaaatgaagaggaacttgactagata

SEQ ID NO: 1564262 - DNA, 4001 bp, Homo sapiens
tttgatatatgcttacattatagaagggggagaacagcaggcatatgaagttcaggaaaacttccaagaagagttggatcttgagctgatgtttgaaggaggctactactctttcccttctcctcactgctggcagaaagatgaatctaagcttgctgcccatacttctttacttcccactctctatcagtatcttgtattctgatttcaggactccatagaaaattatttttcttaatcaccagaacctatcatctatcctcaaatattaatctacatcaaccctcatcttttaaaaatttcgctctttattgacttctatgacatcatcattgtgttctggtccacttttgacctctcgtggctcagcctcaggtttctttttacagccaacctacataggtaggtgtgccaccacctccagcctgctgcctttttctctctcaccgtttcctcttaattattttattcattcatttatgtcccttctcattccacaaaggatttgcagtagttacaatctcatgctatgcatttttccttaattattataccaactcctatggttttacccatcatctctatataggcaactccccaagctgtgcctctgactctgactctgatgtccttcctacacaccacactacctgcctgatcacctgctgaacaccatccatacatacctcaaatccaacatatcctaaacttgaggtttacccaggacctagttttagcactgaaagttccgtgtcctcggaattccctcaaccccaagcaaaccagaacactaagtcaccacaactaaaatgaactcaacagtgtctgttccaaacccattcttcctcatgagctcctaattcctctccatcattttgtagcagagatatcctccttctgcataaacttcaactcctctttgccttccacctactcatgcaactgattgctagatattgtcaattttatctccaaaatatcttctttaacgtcacttcctttcaacttccactgctctaattcaggtctttattacctctaacctatacaattacagtagactcaatcagtccacctgcctccagccatgctatcaccctactcccatcccttttgccaattcatcttccaaactgcaaagattgatcattctgaaacacaaatgtgatcatccatagatagtatttttctaatcaatattgaagttttacagaatgaactccgagaacagcattaaactcaggctcccaggcatttgagcatgatgactacacaatatgacacctaagaaatgttgttatgaatgactaaaatacacggagtattaatatgagctctaagtgaaagggaaaatcaaaacaaaacaaaaaccaccaccatacccttgagaagccaggaactgagtttgtcggttccagttttgcatcttttcatttcttcagagaagtatatgataaccacagttaaggaaagtaaatattgccagggaattctgggtggtagagactcattaaagccttgatattcatatgaaacagaatcatctggaagtcatattaaacagaaactaaacttgagagagaattcactggttccctcagggcattaggtcttaactgatctgtggccctactccctaattacctctgctgcaagagccataggctttccatctcagactggcaaggaaaaagagaatttacataaacgatgtttatatcagtgacaggaaatatgtatcccacttgaataaggggtacggcgtgcccaatatagattatgaaaaatgaaaaactgccaggagaagaaggcaagtgctttccctagaggagagagagctcatcctttcctctctcaggaaaacttacctatcctctgtcttctctcatagacttgcaagtggtaaattgtttatgaagcaactcaccttaggagtcaggggttgaccttcacagagatattagaaaaagatggctaccagaaacatcagagctgtaatccaaaggcttacctctctaatggtaggaattttcatcacatggtaggtaacctcctcttccgtctacataattaagagatagctcccacctcttcagaaacctcttccaactatggtcctgcagtttttgtttgccacatttgtcttttctagtttttttttttttctccctagcttaataggacattgaaacattgttgtgtttcatttatctcccaaagaccttgcctctgaaattcattatcctttcattttaggtacttcccagtcagaaacacacatgcacacacacacacaccacaaacaaaaacacatcccttctttgtttaatagcactaacaccctccctctccctcaacctgggagatgtgaacagccatggttgctaccctaaaggagttgaggatctaatcagaggcatcaaccaagcccaactaagaacaaagaagtatatctgacagtcattatttttttctacagttgctgcaggaactaggagaatggggaggtcagcataaactgcaatctttaagaaaacatcacattaatcaaagaatggaatcagagtccattgaagtgcaacacaagggaaggattttgaagacaccaaaaaaaaaaaaaaaaaaaaagaaagaaaaaagaaaaacatcacagaactggggactttcttcctgggccctacacatacacacttcattgtggtcatatatggttctggcttaaagcttttaatggcttatactagagtgaatcccctgctgtcagtccccctccaggccaaaaccaccctgttcactgccctgtcctgctaatcctcatacttctacctctggccctaaacttcagtcttttcttcaacaactcaaggcactagaaatgtcatcaagaataagaaacagacaaatacaggtatttggtatttaagtgaacattcactatgtgccaggcacacagccacattctatctgttctcattactactccaagtaatttaactaccatttttaagagtttactatgtgccaggcaaccagaactgtgctaagaacctttcatgaatagtagctcatttaatcctcatagctaccctatcagcagtattattattctcattttacagaggaggatacagaggcacagagaagtaaaagaacttgtccaaaggcatactattaataaatggcaaagccagagtcggacctcatgtctgtcttactccaatgcctacataccagagactatgtagtattatggttacagcagggcccagaactctttctatagagggcccatagcaaatattttagacactgttgaccttatggtctctgttgtaattactcaactctgcataaaagcaaccacaggtaatacataaacaaatgaatgtggctgtattcctataaaacttcatttacaaaagcaggcaatgggctagatttagcccagaggctatagtttgatcacctcaagttagagcactagtggtgtactcagatagacctgggttcaaaacctggctctcaccacttactagacaaaacatttagtctctctgtgtctcagtttcttcagcggtagaacagcaacaataccaccctcatagagtcatcatgaggattaaggattaaaggcatgtctggcacatagtcaacttctcagacagtcattttattaaaagcccaccacatgctggtccctagaaggaaggagaaaggacatggattagaataattacaactctctttaaaatcaagctaccagggcccctacggtcttgatactccacagaaataattactctctcgggattccagctaatttgattctcccttcagctacatgaactgtgttctcttgtgagtttagtttcctgttgcagtcattagcaagaaagtctcttgacttcattatagcttttgtcaggcactgggaaccctatcatggtagaacaggaatctgattttgttattatctgttaggtgttcccttcaggaatgag

SEQ ID NO: 1564263 - DNA, 4001 bp, Homo sapiens
agtttagtggctctgcccaccctgaggacagagccacttacaccgcagaaccaccaggggcctcgggcacttgtggggattcgggagctggctcttcagggctcagacaggactggaacttctccagctgctctgggcttgccagggtcttcaacagggtgttctcacgctctagctgggagttcttctccaccagctctcggatctgctccttcaggatctccacctcctctctcacagcatacatcagatgattcttcaccagatcctgccaatgagggaatcataacaaagccattccttagccatcgtggcccctctgcagcacctttgctctgtcattggtgtgcctgtgctgtccttaatgccagggccctccagccttccctcagtgaactggtctggcaagtccaattcctcgttcacctttctctgaagcacttaaaccctcattcaggagagctacatgatttggcttatgctggagttgagagcccagctttgaactagataggttctcccctgcaagtttctaatgactttcaaagctggctgctgaggggcctttggggtgacacttctgctgtttgccagtggtttgctatgtccccctttttacataagcccctactgctgccgatccagatctgggggaagggtagacctgcaatgcatcccatactgtttgtctgctgtacaaatcttaaccaagagaataaaattggctattttagagtctcctcccctccatatgacccagcacattgaattgcagctgtcctgcagccggccagttagcacacaggacattggccttggggaaaggtacagaactgccgcatcctctctgaatttgatgactgcactgggggcagggaaggtgtccttaagctccagggcacaattaagtggctcccaaccgctgaagccctaaccctctgcagccattgtggctgctccttggagtatgacctctacctggtaaggagagggacaggggtggggtgcttcgcttcctgtttccacccaactcctgaccccagtccaggctctgcagaggcactgcagtgctgttgcatccaatgagctcagccccttgccagctgcacgatgcacacaaatgcaagagtctgagctccctgcccaacaacaggcccaggagagagtcagagcctgcggcaaagacctgagatggaggagggaggaagaaaggagggagcccaggaagggaagactggaaatgccctaaaaggtgccactctaatcagactccacctccagtgcggataggaggcaggctgtcggcttcctcagggttttggctaagggctttttcacccattccctcaatcctgcccagagttacataagcagcagctaagtcaggggatgagaatgacgcagtgatgccactcaccatggcctgttcgatcttgttgtctatggccaccacgctggctccggaggcactgccaagacaaaaagcaaagcgacccattacccactcggttctactcttgagtacatggcagttgtggccaaagtcctccatctgcctcggctcttcctctctctctccttctcgcctccctggcccagagttccggacagtttgtccccagatccttccttggcccctgcaggaagctgcatctcctcatccaggccggctcagcgctgctgccgccgccccgagttccaaccgatcggagctgcttgcgagtcctggggcgcgcaggccaccgtggcctgctcgggcaatatgcaaacaatggggctgtgcgacccggggagtcccccacagccggcctacaaggtcccaggcaaacctacccggctctgaagctagctaggaattccttctcggctggtaagcttccggccttctcccaagcggcgcacggcgctcggccagccccctgcccagccctgtctggtcctgcccgccgcccctctgcctccggctgcctctgcggctgcagcagctggttttcacggcgcagcggccgcagggacgcttcgatgacggatcccagagcggcggtgaccccccccttcctgcgtcccctcccccccgccccttcccaggatgctgcaccgcggggaacagggaccggcggcacacagctcgctcagagaccgggctcctagcccagctccggccggcgccccggctcgggaggcgccggagctggggccagcggttacctgttgtccagcttaacggaaaccacatcccctccaagcagagaagagaagaaggagatggagaaattgtgcagctggtagaccgccacctccatgggggtctgatacatttcggtgttcatggctcgggctgctaggaagctctggccgggtttcgtgcggggctgggcggctgggcggctgggtggctgctggcaggctgcgctgggctgggctctgcgctggagtccggccctgaggctaggagcggggcgaaggctgcagaacgaacccaaagccaagcaggcgctccagctggagttgaagggaagtgactcgaggggtgtcacctcgtatgtcacaaactccacggccgccagtccaacccagactcggagatattttggctcctgcttctttatataggaggagccggctgcgtcacatggcgtcaggggccatgcaaatgagtcctgtaccgggctttgtggcccagttaaaccacatcccctccctgaaccttaggctgggactgtaaacagttcagcactttcttgtaccaactggcatctccaaagaaggctctggagatcgataaaaaccaaactggagctgatttctagagaaataagaaatacaaatgccctaacaagaggcagagggcattcagtaaagaacagcgctagtttgaaaagctcttcttcaggtggcagccagcatgcccccatggctttgcatgctctcccatgtcatactccctggacacgcgccctcaccatcacggcctcaccctcttcccagtcactgccctctcagtctctcccctgcacacatactttgtcacctgcacattcactctctaatcaactcagctttcccctcaccagccagctggcctgccgacctgccctgaaccccagcactcatccacttgccccttcctctgaatgttcaggtgtgggagtacttgtctgtggaccggcacatgtacagatctgtgacatgcatgtaatgcatgcacaggtccatgctaatctacagatgcatatgtatggaggagagggtgtccgggagctgaggtgagtgggtgaacatgtatgggagagcagctaggtgggtgacagaggaggtgaggaggagacagggtattggagtgagcactggagtgaccacaagatgccagcccttttctctttagtctccacattctactctttgaagaaaatacattcaacattatccaggatcccgtgtctctattttttaaaaacacaactttgttacttttctttaaaacagcgaatgacaataacactccaaaccaaaggtatacatttatataaacgatcccaggaaaacacctgccctgtgatgggcccagccatgcacagcattagaggtacttcaggaaaaacagactccaaaccataaacaagatgaggtgattgttccataataaaagttacacgtttccattaaaatatatcttatttatattcagcctcaagctgagggaaaaaaaataaaggcaccagagacttgaggtccttttcttctgctccttcctaagtgaggccacctggtggacaaaagcagaatttccaccagaaggagcaagaggggcagggacaggtgatgcaaccgggaatattatttacaccaactcaggaccaaaggagaacattgggttccaccacatatacaacagtttggatgaagttaaggccagtacccatgaatcagtgctccacaggctgtggtccaaagaaagatcctaacgcaatcatgctattggaaaagtactggggcctctt

SEQ ID NO: 1564264 - DNA, 4001 bp, Homo sapiens
ctgctgtttgccagtggtttgctatgtccccctttttacataagcccctactgctgccgatccagatctgggggaagggtagacctgcaatgcatcccatactgtttgtctgctgtacaaatcttaaccaagagaataaaattggctattttagagtctcctcccctccatatgacccagcacattgaattgcagctgtcctgcagccggccagttagcacacaggacattggccttggggaaaggtacagaactgccgcatcctctctgaatttgatgactgcactgggggcagggaaggtgtccttaagctccagggcacaattaagtggctcccaaccgctgaagccctaaccctctgcagccattgtggctgctccttggagtatgacctctacctggtaaggagagggacaggggtggggtgcttcgcttcctgtttccacccaactcctgaccccagtccaggctctgcagaggcactgcagtgctgttgcatccaatgagctcagccccttgccagctgcacgatgcacacaaatgcaagagtctgagctccctgcccaacaacaggcccaggagagagtcagagcctgcggcaaagacctgagatggaggagggaggaagaaaggagggagcccaggaagggaagactggaaatgccctaaaaggtgccactctaatcagactccacctccagtgcggataggaggcaggctgtcggcttcctcagggttttggctaagggctttttcacccattccctcaatcctgcccagagttacataagcagcagctaagtcaggggatgagaatgacgcagtgatgccactcaccatggcctgttcgatcttgttgtctatggccaccacgctggctccggaggcactgccaagacaaaaagcaaagcgacccattacccactcggttctactcttgagtacatggcagttgtggccaaagtcctccatctgcctcggctcttcctctctctctccttctcgcctccctggcccagagttccggacagtttgtccccagatccttccttggcccctgcaggaagctgcatctcctcatccaggccggctcagcgctgctgccgccgccccgagttccaaccgatcggagctgcttgcgagtcctggggcgcgcaggccaccgtggcctgctcgggcaatatgcaaacaatggggctgtgcgacccggggagtcccccacagccggcctacaaggtcccaggcaaacctacccggctctgaagctagctaggaattccttctcggctggtaagcttccggccttctcccaagcggcgcacggcgctcggccagccccctgcccagccctgtctggtcctgcccgccgcccctctgcctccggctgcctctgcggctgcagcagctggttttcacggcgcagcggccgcagggacgcttcgatgacggatcccagagcggcggtgaccccccccttcctgcgtcccctcccccccgccccttcccaggatgctgcaccgcggggaacagggaccggcggcacacagctcgctcagagaccgggctcctagcccagctccggccggcgccccggctcgggaggcgccggagctggggccagcggttacctgttgtccagcttaacggaaaccacatcccctccaagcagagaagagaagaaggagatggagaaattgtgcagctggtagaccgccacctccatgggggtctgatacatttcggtgttcatggctcgggctgctaggaagctctggccgggtttcgtgcggggctgggcggctgggcggctgggtggctgctggcaggctgcgctgggctgggctctgcgctggagtccggccctgaggctaggagcggggcgaaggctgcagaacgaacccaaagccaagcaggcgctccagctggagttgaagggaagtgactcgaggggtgtcacctcgtatgtcacaaactccacggccgccagtccaacccagactcggagatattttggctcctgcttctttatataggaggagccggctgcgtcacatggcgtcaggggccatgcaaatgagtcctgtaccgggctttgtggcccagttaaaccacatcccctccctgaaccttaggctgggactgtaaacagttcagcactttcttgtaccaactggcatctccaaagaaggctctggagatcgataaaaaccaaactggagctgatttctagagaaataagaaatacaaatgccctaacaagaggcagagggcattcagtaaagaacagcgctagtttgaaaagctcttcttcaggtggcagccagcatgcccccatggctttgcatgctctcccatgtcatactccctggacacgcgccctcaccatcacggcctcaccctcttcccagtcactgccctctcagtctctcccctgcacacatactttgtcacctgcacattcactctctaatcaactcagctttcccctcaccagccagctggcctgccgacctgccctgaaccccagcactcatccacttgccccttcctctgaatgttcaggtgtgggagtacttgtctgtggaccggcacatgtacagatctgtgacatgcatgtaatgcatgcacaggtccatgctaatctacagatgcatatgtatggaggagagggtgtccgggagctgaggtgagtgggtgaacatgtatgggagagcagctaggtgggtgacagaggaggtgaggaggagacagggtattggagtgagcactggagtgaccacaagatgccagcccttttctctttagtctccacattctactctttgaagaaaatacattcaacattatccaggatcccgtgtctctattttttaaaaacacaactttgttacttttctttaaaacagcgaatgacaataacactccaaaccaaaggtatacatttatataaacgatcccaggaaaacacctgccctgtgatgggcccagccatgcacagcattagaggtacttcaggaaaaacagactccaaaccataaacaagatgaggtgattgttccataataaaagttacacgtttccattaaaatatatcttatttatattcagcctcaagctgagggaaaaaaaataaaggcaccagagacttgaggtccttttcttctgctccttcctaagtgaggccacctggtggacaaaagcagaatttccaccagaaggagcaagaggggcagggacaggtgatgcaaccgggaatattatttacaccaactcaggaccaaaggagaacattgggttccaccacatatacaacagtttggatgaagttaaggccagtacccatgaatcagtgctccacaggctgtggtccaaagaaagatcctaacgcaatcatgctattggaaaagtactggggcctcttatcagcaaagaaggtaattattgtttgcttcaggacatttatcttaaccaggtgcctggcactaacaccctggccaaggccccagccaaatgcagtctgaaggccttgatttcctcccggcttccagggcagttatgccactgaacagccaacatttttggctatggtgtggtgctctattggtggattccagtggtgataatatgtgtacaagagccattatattgcaaagtactgaccaatagaactaagtaaacctgctgcactagcccgggatggtgtttttcttcatctcactttaggtgggagacaataatgatctcaggacattctgttaactttaagacacaacctctctgaacacggtgtttgcactaagacatgtgtagtagacagaacaaagtgcaggctatacttatgggtcatcaagaacattcactaaaaaaaaaaacctcttaaatcaggagcttaactggtatcagaattccctgatatattaatattaatttgccctctgcaccacatagagttttcttggttcagaaagtctccgagctgacctttcattggcttgttaatt

SEQ ID NO: 1564265 - DNA, 4001 bp, Homo sapiens
tggtggatttgtcttggggcaagggaggcaaacctgctcttagcattaagtgagaatagcgcctgcctttctcgattgcttttaaaatttcctatttgagcctgcttgcattctaaatattttgtaggtgctcagaatttcttatcactttgtctgggcacatcgcctgcctacagcctagaatctcagagctaaaaggaaccttggagagactagagaggtcaggcgacttgctcaggctcatacaaacaggtgaagccataacttgtactacaacccaggtctcccacagtggcgatgtctttctcttacataacctgtgttgttgagcaagaataaatcctcgcttatacactcacacacacatgttggtgccctatcctgatggcgctaaggacactaaatccatggctgggtttcctgatgttgtctgccctgcctctaaattgcctcagttgttcccagagactggttcttgccagagtgtctcaaactgaaggacagcagctgccttgggtcttcccattgtgttttttccctcccttgtcctctccttgcctccccagcaggatttctagaaagcttgaccggtacaccaatacacgcctgcaacgacatggattcatccgccctcctgccacacatagttcttgaggcactcaagatgtcctagggtgctctctggggttgcgcttagcttacatttgaaatttaacgctgtgatccatggaggaggcgaatccctcccatccagaggctcaagaaattctcacaagtctctgatttttaaaaattttcccctccccatctccctctcctaccaccagcagtttaatttgtcttgacattttgcttgccctcactgtcagtcaggggcactcagtaattttaaagcccttgtagtttcaatctgattttgcacatttgagatgggcttttgagaagggtagaacttggaactcaagaagaccccatggcagaatctccaaaggggctatggaaatgtatgcatttgaggagcgggtactttcagctacctccaaaccatctggggtctgcccaccttctaggccccagcgtccccatcagaaagcctttgcaggcagctttcagaatagggcttgcacctgccagtcctcccctcagctccgcggtactccaggcaacctcaaggtccagtcactgtagcctgagtcagacctccccagtacccctcctgaacttcctagttgccccttttgccagagatgagggtgcagcagaggctggtgggagcaaggaccgagttgccgccgtgtgccgagccacccacctgtggaagaagagcaggatggagagcatggtctggtcgatgttgcggttgcagatgccctcgttgatcaggtagcaggggtcccgcagcaccggctctagcgaatcctgccgcattatgctgttgagcttgtcggtattgaggttctcaaagaccagcttttcctgcagctgccgaaagttgctcactgtagggctgcccgggttgttgttctccccgctgctgcctcgctggagcccactccgatgggccaggtccaggcagcagttgcagcagtcgaggccgacaggtgagcggcaatcgagcttggactgggccatcttctcaggctcggaggtcgcctggcctgcgaggtcaggggcggctggcaggtgcgcgcccaccgagctggcctgaggggactccagggtgcctggaaaagacaagctgtgaggaaaagagttggaaattagcgcctaaagccagccaccttcggctcggcccccttctggctgtactgctccgggtgcgaatagaaacagctggacaaacagctccgagcggatccttcgggctcacttcctcctcttcctccttctcctccccctcctcttgaggccgggggccgcccccctgaggtgccacacgcggccccagcgcagtcccaagtttcccaagtgtgagcggggattggggcggacctgtggaggcaggaagggcgggcagcagggcagagggagagccagggcgcgcccttgctccctccctcctttgctccctccctccccggtttgcaggctctcaggctctcgggctcccctgggctgtgacggctgagcggtggcaggagctgagagcgagtgagctagttagcggtctgcacgcccgggagtcagcactgggatatgacagcatgtaaattaccctagaggggacggcggagaacggtcctccgccacttctccggctggcgggcgggggccccgagcggctggatcctgtccctccacccctcgccccaccccgcccgcacccttgtgccctggcatccacgctgccgctcgcaccctcgcccgcgctcctgggagccggcccggctctcactctctcggcgagccggacgcttcggttcaggctctttcagcgctcatggcgcatcctccgccagaaatacgcacgcagcccacccgggctgccgtgccccctcagtggcccggtctcgcggggctcgagctcggcgtgagggcaaatgtctctagtctcacctcgaatgggtccccctacagaagagacgacgccctcgagagccccaagtgttgtagccttaaactgccgccctccaaagcccccctttttctggggggggggcgtgcaaggagagcggttgcctctgcagagagtcagagagtgccaggcacacattaggagtacccaataaatgccgtaagcaaaactcagagaagcacgctcaaactctcctcagtttctgtctctttctgcttacttaacgatatcgtcacctcctttccccagctcgctgtgtcctctcttccctgaacccctcagaggcagtctctgtcccggtttccctctgccccttcgccgtctctcctcagtcctccccttccttctctctgctcttctgcttccactcattccactatttcccttattttttctcttttctttacccatttcctctactttctcccccatttccattcttttacctttctttccttatttcttttctccttttctctatttcctcatttcccctttctcccctttcctcttttctctcatttttctctcccctacccccgccatttcccttattttcccctcatttcttacttcagcaccccctctttttcctcacttcacttaccttctcctatttctccaaatttgttgtccttctccttttctgaaccttacctgccaccttagttgatctccgtctgtcgttaccctttcaatagatgtagcgattgcatgttcacaggcctgaggggcgtgccccagctctgtaagatggagggatgttctgggtgggcaagtggtgggtttccagggtttctcaggactcagagacttggaatactttaaatgtgtaggattaaataacgattagtgtctgaaaaaactaaacttttcatgacgttcagttttcacgtaaaactgacttacatttcagtcagtactccccacccccgcatcggctccttcattcacaagtctggcctttgaaatagagcagcatatactgccatctagtgtccaagacgttgaacgttctctgcctgcgtcacagaagctcggagaggcaccagaggtacctcctggtggaatccacagtgcgttggttccaagagtagcagggaagaagtgtaggaggcggagctgctacactaagagagttctgtggccaagctaataggcaggaacacgctcctacactaagagagctccagctaataggcaggaacaccaattagggccagagccgcccttttttctagtggagcttcacttggcctgagtccctgcggattggacttccatagatttgaaacttcctccgggtaccacaagcatcaggcctgtgattaagagcaaagagcggccaactattgtaactcttattcccaaggccctgtgggtcctatatgtgccctgcaacttggggaaaatggaggtggggttg

SEQ ID NO: 1564266 - DNA, 4001 bp, Homo sapiens
tcgtgatccacctgcctcggcctcccaaagtgctgggattacaggcgtgagccaacgcgcccggcccaatattaaacttctgatgatttgcattaagtatatccaatcttttcaaaatgcaaggcataagaaggttatcaattttgtgctttgaatattttcctatcagcaaagttataaattgtactatctccgttttaataggtatttatacacagaaaaacgacagggaatataagtaagtaattttcttctggtgactatcagtctttacaattttctaaattttcttttaaattagaagtggaccagaatttttacaagaaggccattattgtcagctacaggtttaaatacagaggtctgactcttctactttaataaatccatttttatctctcagaggataaatgtaacatgctaagcttccctaattcaggcttacctcatgtctgaaaacaaatcctacgatggcagcgaccagttcgaccaaaaaaacgagagtcagaaacattgcatactgcaggataagaaagaaagtccaagtcagcataaataagatatagcacaactgcaaagggagtcaaagaaaaaataatggtcgtcttctcaattagttcatcatgttttcattgaaaagggcagggaaaataacaacatgtctattttgaaagtggaaactggcagctgaactgttacttgataagtttccataaggaacaggaaaaattgtaaagggccatggccagttccaacaaaggaattctataacatacaaaacttttctaaaaccaagaatcaattctaatgaaaacaaggactcaccagttttagcatccatgcagaagctcggcaggtagcaaaacaaccaaaggtgcccaaaagaataatgacggtaccagtagcaatgagcacgaaggggacattggtggccttctcatttaaaagagaaaagtaattctccaggctcaccttgccccaaatgccaactgcaagaaggataacgccagtgatctatgtgggaattcagagaatacaaacagttacgcactgtgtacagcagcatcttcaaatcacaacgcatgaggtatttaaggcacaataggtgtaatatgctgggatacggcagacaagggggaagagtagaaggggttagggggggatctgcacacaagagcaggctgtggaccaggtatcttatcaaaattcttaaaattcatctttttgtgtgtaaacacaagcccatggcatatttgccctagggatcaaaacttccttaactatcttactccaaccttaggaagaaaaccttgaaggggaaaaaaaaaacgtgattttatgagttccagaaacttcccccgtcctctccaggtagggatgggcacagggtacaaaggactggtacacaaaagcaagcccaaggatagactggcgggagtggaggcataccatacttacctgcgaaacactcctctcttacgaagcagtgaaaagaaagacactattatgcaagtgagccctcaaaggggccgggcaagccttgcttgcctttgcaaaggtccagggtcaccgtctgcgtgctctgggggcttaaggccccacctcgcctcccgtatcgaactcgaacgctggtacgtctgggtcccagctcagcctctcggctgccttcgtcccgcactccgaccccagcgccggcgagatgcctgagctctttgttcggggcccagtcactggtcgccggcgtcggggtcccaggcgcgatggccgcccaaaccccacaccgttcccgacctgagctcccgccgctcagggtcacaccccccacaactaaaagcccgggatcccctgccggccccaggcgccttcgtctctcacccagaaaataaaagtgtagattagcagaacgctcttgaaacaagtaatgactggtttagtctgcagtctccgagacggggacgccatgactagcccgagaccctgcaccaccgcaccgggcgattggaacacagagagcgagacgcggagtccccgagtctccccggaaactgccgaaaacttacgagcgtccacaactgagaagggccggaaacactgtacaattttgtagagggtaaagtatgggaggctgtccggaaagtggcaacaatttcagagcgccccctgccgaaggttaccgaaaactatatacaaaggttctagtgtcggaaatttcataggtcttcaagtggagctttcttcattgttttttttctatcctaaggaatctttcccgccccccacccctcccctctccttataacttcaccatattgtttctatcaccagcagagcccgcagcgctctgagattgggcctccctggcccctggtgccctagagagaaggaaaagaatgaagaggttaaaagcgacctaagaaaatacatgggaaaatacccacaagaaatatatttgcaaaaagaaagcggattgcaaagcaatacatacagtcacgtgtgcttagacaaaaactgaaaggaacagtgaaatttacctctggtggaattaggctgatttttttctcacttgtgtgcttttcaatttgtgaacattgttttatgggttaggaaggggagatgtgaatggaggaaaataatcaccacttgttgaaagaatttctaagctaggtattaaagataataatgactttagaatttacctgcaggactttgcaaaaccccagtattcctctccttttttatcccctaagtaattggaaagttgagggaaagtatttttacataatagtgaaatgtaagttcagctattcgctgtaaacttttaaaaagagagagtgcaatggaaaaatccctggtgagtgtgacctcctcttaaatgttaaaacagaaaggcactgtacattccagccacctggtttttcccatcaaaacccagctgattacagagagattaaaacctaatgttatatattgtgaatatattggtctatgttgttacaacacaggaggtgcgttaaggtctgatttctcaactaaagcgtcagctctttgaaggcagagactgagtgttaagtgagtttgtgttatctctagaggaacggggttagaaggctgtatcagttccctatgcaatccaacccttcatcattgacacaagcttaatatcacaagtggctatttactctattgccattgcaaaaagacctgcatttgtggaggagagatgaatactcaaacttttctgcttgaaacgttgctttaaacatacacctcaggaccagaacacaggaaagttccattgacttggtcacacagagcttccctgtgcttcgaatattgacctaggaccagttcctataacatcttgccagacgtctgaggtgcaaggcagcaactgttggaaaattaattattgcattgccaggctttatactaaaatttttactaaaatttgaaaggcctaatacacaaatacatggagagaatggataaacgatacatctacatacaccttcaaacactttgaggtaaagtcgttaggaaataccaaatattcaacatggtggaggggggtgtctaagtatatgcaaagatttctccctaggctaaatgaccccaactgaagggttcttatactaaaaacaaggatcaagggaagtcttgataacttcttgtcatcttaaagagaagtttctctgaaacttagatatgtactgaaagggatttacagtgtgagcccaagagcaaagaaatatgtctgtagctgaagaaaaaacaaaatagcaaagcaaaagccacatcttatttccaagaatgtgttgactttcctcctctcccttcctctaccactcacaacgctgctttgtttgaataacactcggtgccaaattaaaccaaatgctgacatggaaattcatattcctatggctacaacaccttgcaccattgcctcctactctgctacacccacttccatctccccacccccacaatgccaccaaacc

SEQ ID NO: 1564267 - DNA, 4001 bp, Homo sapiens
ctactttaataaatccatttttatctctcagaggataaatgtaacatgctaagcttccctaattcaggcttacctcatgtctgaaaacaaatcctacgatggcagcgaccagttcgaccaaaaaaacgagagtcagaaacattgcatactgcaggataagaaagaaagtccaagtcagcataaataagatatagcacaactgcaaagggagtcaaagaaaaaataatggtcgtcttctcaattagttcatcatgttttcattgaaaagggcagggaaaataacaacatgtctattttgaaagtggaaactggcagctgaactgttacttgataagtttccataaggaacaggaaaaattgtaaagggccatggccagttccaacaaaggaattctataacatacaaaacttttctaaaaccaagaatcaattctaatgaaaacaaggactcaccagttttagcatccatgcagaagctcggcaggtagcaaaacaaccaaaggtgcccaaaagaataatgacggtaccagtagcaatgagcacgaaggggacattggtggccttctcatttaaaagagaaaagtaattctccaggctcaccttgccccaaatgccaactgcaagaaggataacgccagtgatctatgtgggaattcagagaatacaaacagttacgcactgtgtacagcagcatcttcaaatcacaacgcatgaggtatttaaggcacaataggtgtaatatgctgggatacggcagacaagggggaagagtagaaggggttagggggggatctgcacacaagagcaggctgtggaccaggtatcttatcaaaattcttaaaattcatctttttgtgtgtaaacacaagcccatggcatatttgccctagggatcaaaacttccttaactatcttactccaaccttaggaagaaaaccttgaaggggaaaaaaaaaacgtgattttatgagttccagaaacttcccccgtcctctccaggtagggatgggcacagggtacaaaggactggtacacaaaagcaagcccaaggatagactggcgggagtggaggcataccatacttacctgcgaaacactcctctcttacgaagcagtgaaaagaaagacactattatgcaagtgagccctcaaaggggccgggcaagccttgcttgcctttgcaaaggtccagggtcaccgtctgcgtgctctgggggcttaaggccccacctcgcctcccgtatcgaactcgaacgctggtacgtctgggtcccagctcagcctctcggctgccttcgtcccgcactccgaccccagcgccggcgagatgcctgagctctttgttcggggcccagtcactggtcgccggcgtcggggtcccaggcgcgatggccgcccaaaccccacaccgttcccgacctgagctcccgccgctcagggtcacaccccccacaactaaaagcccgggatcccctgccggccccaggcgccttcgtctctcacccagaaaataaaagtgtagattagcagaacgctcttgaaacaagtaatgactggtttagtctgcagtctccgagacggggacgccatgactagcccgagaccctgcaccaccgcaccgggcgattggaacacagagagcgagacgcggagtccccgagtctccccggaaactgccgaaaacttacgagcgtccacaactgagaagggccggaaacactgtacaattttgtagagggtaaagtatgggaggctgtccggaaagtggcaacaatttcagagcgccccctgccgaaggttaccgaaaactatatacaaaggttctagtgtcggaaatttcataggtcttcaagtggagctttcttcattgttttttttctatcctaaggaatctttcccgccccccacccctcccctctccttataacttcaccatattgtttctatcaccagcagagcccgcagcgctctgagattgggcctccctggcccctggtgccctagagagaaggaaaagaatgaagaggttaaaagcgacctaagaaaatacatgggaaaatacccacaagaaatatatttgcaaaaagaaagcggattgcaaagcaatacatacagtcacgtgtgcttagacaaaaactgaaaggaacagtgaaatttacctctggtggaattaggctgatttttttctcacttgtgtgcttttcaatttgtgaacattgttttatgggttaggaaggggagatgtgaatggaggaaaataatcaccacttgttgaaagaatttctaagctaggtattaaagataataatgactttagaatttacctgcaggactttgcaaaaccccagtattcctctccttttttatcccctaagtaattggaaagttgagggaaagtatttttacataatagtgaaatgtaagttcagctattcgctgtaaacttttaaaaagagagagtgcaatggaaaaatccctggtgagtgtgacctcctcttaaatgttaaaacagaaaggcactgtacattccagccacctggtttttcccatcaaaacccagctgattacagagagattaaaacctaatgttatatattgtgaatatattggtctatgttgttacaacacaggaggtgcgttaaggtctgatttctcaactaaagcgtcagctctttgaaggcagagactgagtgttaagtgagtttgtgttatctctagaggaacggggttagaaggctgtatcagttccctatgcaatccaacccttcatcattgacacaagcttaatatcacaagtggctatttactctattgccattgcaaaaagacctgcatttgtggaggagagatgaatactcaaacttttctgcttgaaacgttgctttaaacatacacctcaggaccagaacacaggaaagttccattgacttggtcacacagagcttccctgtgcttcgaatattgacctaggaccagttcctataacatcttgccagacgtctgaggtgcaaggcagcaactgttggaaaattaattattgcattgccaggctttatactaaaatttttactaaaatttgaaaggcctaatacacaaatacatggagagaatggataaacgatacatctacatacaccttcaaacactttgaggtaaagtcgttaggaaataccaaatattcaacatggtggaggggggtgtctaagtatatgcaaagatttctccctaggctaaatgaccccaactgaagggttcttatactaaaaacaaggatcaagggaagtcttgataacttcttgtcatcttaaagagaagtttctctgaaacttagatatgtactgaaagggatttacagtgtgagcccaagagcaaagaaatatgtctgtagctgaagaaaaaacaaaatagcaaagcaaaagccacatcttatttccaagaatgtgttgactttcctcctctcccttcctctaccactcacaacgctgctttgtttgaataacactcggtgccaaattaaaccaaatgctgacatggaaattcatattcctatggctacaacaccttgcaccattgcctcctactctgctacacccacttccatctccccacccccacaatgccaccaaaccgagaaattcaatttagttcaaacctaggcctgggtttgggtacaaacccagaccaaaggggcatctaatcccgtttaaggcaatttaagaagtatttccctaggccactagataaatgtattctttaaagtattaataatgactgtgataataagtattgactgtataccaaccactattgctaagagcttgatacacattacctcgtatgcacacatcacaagaaccctattatgaggttgacacacctagcaccttcattttacagatgaagaaacaggttgaaagagaccaagtaagctgcctaggactaaacctgggcaacttctgtgtctttcatcagaaatggggcccactttgtgatgaaacata

SEQ ID NO: 1564268 - DNA, 4001 bp, Homo sapiens
ataagaaggttatcaattttgtgctttgaatattttcctatcagcaaagttataaattgtactatctccgttttaataggtatttatacacagaaaaacgacagggaatataagtaagtaattttcttctggtgactatcagtctttacaattttctaaattttcttttaaattagaagtggaccagaatttttacaagaaggccattattgtcagctacaggtttaaatacagaggtctgactcttctactttaataaatccatttttatctctcagaggataaatgtaacatgctaagcttccctaattcaggcttacctcatgtctgaaaacaaatcctacgatggcagcgaccagttcgaccaaaaaaacgagagtcagaaacattgcatactgcaggataagaaagaaagtccaagtcagcataaataagatatagcacaactgcaaagggagtcaaagaaaaaataatggtcgtcttctcaattagttcatcatgttttcattgaaaagggcagggaaaataacaacatgtctattttgaaagtggaaactggcagctgaactgttacttgataagtttccataaggaacaggaaaaattgtaaagggccatggccagttccaacaaaggaattctataacatacaaaacttttctaaaaccaagaatcaattctaatgaaaacaaggactcaccagttttagcatccatgcagaagctcggcaggtagcaaaacaaccaaaggtgcccaaaagaataatgacggtaccagtagcaatgagcacgaaggggacattggtggccttctcatttaaaagagaaaagtaattctccaggctcaccttgccccaaatgccaactgcaagaaggataacgccagtgatctatgtgggaattcagagaatacaaacagttacgcactgtgtacagcagcatcttcaaatcacaacgcatgaggtatttaaggcacaataggtgtaatatgctgggatacggcagacaagggggaagagtagaaggggttagggggggatctgcacacaagagcaggctgtggaccaggtatcttatcaaaattcttaaaattcatctttttgtgtgtaaacacaagcccatggcatatttgccctagggatcaaaacttccttaactatcttactccaaccttaggaagaaaaccttgaaggggaaaaaaaaaacgtgattttatgagttccagaaacttcccccgtcctctccaggtagggatgggcacagggtacaaaggactggtacacaaaagcaagcccaaggatagactggcgggagtggaggcataccatacttacctgcgaaacactcctctcttacgaagcagtgaaaagaaagacactattatgcaagtgagccctcaaaggggccgggcaagccttgcttgcctttgcaaaggtccagggtcaccgtctgcgtgctctgggggcttaaggccccacctcgcctcccgtatcgaactcgaacgctggtacgtctgggtcccagctcagcctctcggctgccttcgtcccgcactccgaccccagcgccggcgagatgcctgagctctttgttcggggcccagtcactggtcgccggcgtcggggtcccaggcgcgatggccgcccaaaccccacaccgttcccgacctgagctcccgccgctcagggtcacaccccccacaactaaaagcccgggatcccctgccggccccaggcgccttcgtctctcacccagaaaataaaagtgtagattagcagaacgctcttgaaacaagtaatgactggtttagtctgcagtctccgagacggggacgccatgactagcccgagaccctgcaccaccgcaccgggcgattggaacacagagagcgagacgcggagtccccgagtctccccggaaactgccgaaaacttacgagcgtccacaactgagaagggccggaaacactgtacaattttgtagagggtaaagtatgggaggctgtccggaaagtggcaacaatttcagagcgccccctgccgaaggttaccgaaaactatatacaaaggttctagtgtcggaaatttcataggtcttcaagtggagctttcttcattgttttttttctatcctaaggaatctttcccgccccccacccctcccctctccttataacttcaccatattgtttctatcaccagcagagcccgcagcgctctgagattgggcctccctggcccctggtgccctagagagaaggaaaagaatgaagaggttaaaagcgacctaagaaaatacatgggaaaatacccacaagaaatatatttgcaaaaagaaagcggattgcaaagcaatacatacagtcacgtgtgcttagacaaaaactgaaaggaacagtgaaatttacctctggtggaattaggctgatttttttctcacttgtgtgcttttcaatttgtgaacattgttttatgggttaggaaggggagatgtgaatggaggaaaataatcaccacttgttgaaagaatttctaagctaggtattaaagataataatgactttagaatttacctgcaggactttgcaaaaccccagtattcctctccttttttatcccctaagtaattggaaagttgagggaaagtatttttacataatagtgaaatgtaagttcagctattcgctgtaaacttttaaaaagagagagtgcaatggaaaaatccctggtgagtgtgacctcctcttaaatgttaaaacagaaaggcactgtacattccagccacctggtttttcccatcaaaacccagctgattacagagagattaaaacctaatgttatatattgtgaatatattggtctatgttgttacaacacaggaggtgcgttaaggtctgatttctcaactaaagcgtcagctctttgaaggcagagactgagtgttaagtgagtttgtgttatctctagaggaacggggttagaaggctgtatcagttccctatgcaatccaacccttcatcattgacacaagcttaatatcacaagtggctatttactctattgccattgcaaaaagacctgcatttgtggaggagagatgaatactcaaacttttctgcttgaaacgttgctttaaacatacacctcaggaccagaacacaggaaagttccattgacttggtcacacagagcttccctgtgcttcgaatattgacctaggaccagttcctataacatcttgccagacgtctgaggtgcaaggcagcaactgttggaaaattaattattgcattgccaggctttatactaaaatttttactaaaatttgaaaggcctaatacacaaatacatggagagaatggataaacgatacatctacatacaccttcaaacactttgaggtaaagtcgttaggaaataccaaatattcaacatggtggaggggggtgtctaagtatatgcaaagatttctccctaggctaaatgaccccaactgaagggttcttatactaaaaacaaggatcaagggaagtcttgataacttcttgtcatcttaaagagaagtttctctgaaacttagatatgtactgaaagggatttacagtgtgagcccaagagcaaagaaatatgtctgtagctgaagaaaaaacaaaatagcaaagcaaaagccacatcttatttccaagaatgtgttgactttcctcctctcccttcctctaccactcacaacgctgctttgtttgaataacactcggtgccaaattaaaccaaatgctgacatggaaattcatattcctatggctacaacaccttgcaccattgcctcctactctgctacacccacttccatctccccacccccacaatgccaccaaaccgagaaattcaatttagttcaaacctaggcctgggtttgggtacaaacccagaccaaaggggcatctaatcccgtttaaggcaatttaagaagtatttccctaggccactagataaatgtattctt

SEQ ID NO: 1564269 - DNA, 4001 bp, Homo sapiens
ctcccaatatgattcactccagtaacaaataggaagtcaagtaaatgataaagggccaaacaaaaagagatttaaggaaacacataaaaagctaaaccagttcccaggaatggctactgggaagtttcagcaatcagcatgtgttactgctttttacaggcagagcataagatgatatgatctgtgcatagctcacaattccactactgagacatttcaacctgtgtcgttgtcagtccaaataaagtccgtttctgtgtttgccttgtgcaatatgccagttaatctatcctagctcattgcagagctcctggtatgtgtggtctggggagtccataccttccctgacttgaagaaccaccaacgccagcgataaggaaatgtccgggtgcattaggaatatttttgatcctcaataaatctctgcttcttccttgaccattgcaaacagtccggtttgccatctagctgattctcggtacctcatacagcactgtgctccagtttcaaagcaaaaatagggctaatatatggtggtgggtgaggggcgggggtgaggggtgcaagaagaaaacaagcaaaggttgaactggcttttcctacagagcctcagatttcaaaatgactgccgtagaagctaaaatgacccagatttgggggacaaggggggaagagggtcgatattcattcccctgcggggtagctgtagcttgattatgggcgtaaggaactagggaagacggggtcaccgacatgaaaagagaaataacagggaatggtctttaagtaccacgcacctctctcagtgaatcactgcagtgtcagccctgcactgattccatgatttgccaaacaggatgaggtaaggcacaagcctggagccccctcctcctcctcctcctccccctcctcctcctcccccctcccccgcgcagaaaggcgcatccctccgcgaggtgcaccacgcagccccccgcggccctggctgaggggtgacgtcacccttctgcattgagcttcaaggaccggcggcagcactggatagatggggagtagagttggggcgctatctctatcaccaagtggaggggaccctctgccagggcgctgcggattgtgctcatgcagtgacagaaccaccagatagggagtgtaaggatgcagggaggtgggaaaggaatccaaagactcatctcttgggtcaccaagaaacctcaaagatgcccccggcttatgtaagaccctctccctttcgtgcgcctccacgcggtgacaacgcctgctccccatcgtgcgcttgggagacttcggtcgcccttgcccagccaggcaggcacggtgcttctggtgcctccctcccgcagccccgtggggtcaggaataactgggaatctgagattaaaccccacgctcccgtgtcctctcctagcccgccacaggttagctccaagaggcgccgcgaaccggctggtaggggaagggagagaaaggtgtacagcgaggaaaacagacgaataaacccgcaactttccccaggagctgaccctatcccgggagattataaaagaaactaatgcattaacattttttttttggaaggtcgacaacctgcagtcaccgacactccgcagccccttgcagcctgcgcggagcgaggtctagggttccagcagccccgacccgcaccctgccatcctgcagccccgacccagcaccccgcgcctgtctccttaaagaggggtcccagatttgatttttggtttgggttttcctccccacttcttttctcagagcatcatcatacggaccgatggacagcgactcggccaccggcccggcgtgggcacttacccagaagacgaaggagtagatgatgaggagggttttgagacaggttatcacaggtttggtctccattctcctcgatgccatactacagagctccggcggcggcggcggcggcggcaggcggcgggcgggcgcgcgggagggggaagaggcggggcggggcggggcggcgcggggcgggggcgcgtgccgcgagaggcctcgtgagcgcgcaggcgaggccgtgcgcgtgcgtgagcgcgcaccgcgcggggctcctactgaaaaagccgggccgggcagtgactgcgcatgcgggaaacgccgcccgcgttcgcaatactgcgcaggcttagacccccagcggaggagggaggcgaggccaggcgaggccaggcgaggcgacacggggcgcggcaggacagtggggagggaatgggagaatttagaggccgggtcagaggtcacgggaacctctcccagtccgccctggcatttagatttctgctttgtacacagttgggcgttacatttgcaggtatgcctgcacctggctatgggaagtttatgggtgccccgctgcccatcagtcacgtttctgcattttgacaccccccagggccttctcacatggaaatggccccgtagtcatgtccttggcaaccagcaggccttgtttgtgccaggaacagacaggtggccagagatacagctggagggatgggcaggaacgccggagctcagacagaccccaaatcctcgccaccacaggtatctgcaggctcctccatttttcagatttgtcttacattttgaaataataaaacgaaatgacaagaaaggtctgtatgaggcgtcattcttgctgcgcatacaatgtttaacagaatacagaaaaatgtttaatatgcctgagaatcatttgcagcgcgctaacaagtacagtccacctccctcctgtaaaggaaagctgcattgaggtcaaaaaataatgttcacaaccaatttggagttcctcaaaaagttgaacagagtttgcatatgatctagcaactccattcctgggtatttacccaagagaaatgaaaatatatgcccacacaaaaccatatacatgaatgtttatagcggcattattcacaatagccaaaaattggaaacaactcaaatatccgtcagctgatgagtggatgaccaaaattcggtgcctccatacaacggaaaattattcggccacaaaaaagaatgaagtactactggtaaatgctgcaacgtggatgaaccttgaaaatatgctaagcgaaagacgccagacacaaaagaccacatattgaatgattcatgtataggaaatatccaaaatagacaaatccatagagacaaaagagattagtggttgcagcgagtgggaggcaggaatgaggtgacttttaatgggtaagcggcttctttttagagtaatgagaatgttctagaattacatagtgatgatggttgcacaatactgtgaattactaaaaaccactgagttgtatactttaagaggatgacttttatgatatattaattatatcacaataaaaacgtacattccacccagatatggtttgtagaggaacacacagattcagtgggagatttagcttgattgctaagagactagtcaaaaacagcaacactatcacaggttaactcaatcgtggatgatgatgttaaggatacatatttgtgaaagagtgaaaaacagagtcaataaggcttgggaaaagcctgctaaggtcagttgttacaggagtaattattacctctatccagttatatgtggtctcaggtcaataaggtaactgtatgaacaggacaaaaatatgaggaagaggagaacctgtttaaggaaattgtcaactataacaaaaaggtatgtgggcatacaagggtggaatataggtgcaggtgaaagaagggacaggttgagcaaggtgtctgttataaaggggtcttggcacactgattctcgatgctgggtgctcatttgcatcacctggtgttttaaaacaattatgaatgcctgtgcccaatcccagctatttggagtcatttggtgtggggtgaaagctccgcgttttagaagctcttcaggtggtctgaatattaagcaagagttgaggggcattgcc

SEQ ID NO: 1564270 - DNA, 4001 bp, Homo sapiens
aggtggccctacagggtgtcgacaatccatgtgcatgtggtatatgtcactgggtgctgaaagcttgtgttcacaaaatgcacgtctgggggcttaagggccatgtccaagtgatgctgtaactgattgctgagggcctgtggtcacgttattgtatgtatgggtgttgaaggtccatgtccacatgatgtgtgaatggctctgatggcttgtggtcaagttatgccatgtgtctacatgctgaggacctgtggtcacataatactgtgtctaggagctgaggtcctatgtctaaatgatattgtatgcctgggtgctaagggcctcttaccatgtgctgtttcatatgagggctaagggtctgtatccacataattctattaggatgttcgactcatgttcctaacatgttacatgtatgtgtatgtgtctactctcccctttccttcatttaactcctttttctctatacctagacactccctctcttgatctttcaggggctccagcccccctccctccaatgcaaggcactccagccaggattggggtctcctagtatcttaagcaaaaatctaggtttacagagccttgtatggctcaagcaccctttctgggcagtttctctgctgtgtgccattcccctccctcttcaaggtctctgagtcagttcatcttctacgtgcccctcccctcctcctttcaccatctctggtccaatttttttgctgtgtgcccctttactaccctccccctttttatcatctgtgatcctttttttaatgctatgttcctcctcttccccctttcccatctgtggtccagtttttatgtccgccccccctccaccacccttcatcatctccagtccagcttctctgctgttttgccctcctccttccatccctcttccacccagtctagtccgtcttccgatagggggatcatgcccacctctggctctcctccacccgctttaccttttctgtccctcccccaccttcccctttcctgtcacgggcttctgacctacggagtatcgattagaaggatactgctttgacccagaagcctgggatatgctggatgatgaggtctctgcgctccaggaagggtcttcgcatctggatgaacttgcgcttgagacgcaggaaggctttgcctgccttgatgttcactgcctccagatccagctgaatatcctccagtgcctgcaggatgctctccatcctctcggcatttctctctctgctttccctcttcaccttcctctgcttcctcctccgccgccgccgccgcctcctgctgctcctcatactctcccgctcatcctcatcctcatcctccactatgatgatcgcctcttccttgctcttcgggtcaactaacctctggggcgcccaccccactgcgctacaggtttctagggccccctctccaccaaaactgctcgactgtacaacctgaaaatcgatttccaggctcccccccgaggcctcaggagtggggagtgcttccaggctctccgtgggcgggggcgcctccccataccccgactcgatggtagaatcccagccgggacactcagcaccgagcgtgaagtatgcgcggatccccccctcctcgagaatgacatagggaggcggcgggggcagcgcggggcccagtcccacccccctcatatcggccagcacctgtgccgcctccgtttcctcctggagcctcgggcgctgctggggtggaggcagcggcagtcggaggagcggcggcggcggcggcggcgggggcgggtcgcgctgtggagactcggagctgctcaggcggcgggtcttggccggaggcccctcatctgggcggtccatggcgaccgcgttcgtacagctcaggggactcgcactcgccccttcgcttttagccgcgtcgctgccgctagtcgcaccggtaagcagagctgaggagactcacgcaaccagctctcctcaccacctcgctctggcgttccctcccacagcgcccgctctactccctccgcgccaatcgccgaagccccgcccactcctgacgcaggggtccgctcggcctggccattggctgccggccgccgcggcggcgatcgcgctcccgcgacccctgcccgctctcacgcaatccgcttgccaacaccacacatcatcagtttccgattggctcccctcgggcccgccaatcaacgggctgactccctcagcgacgggagggaaactgcagggcgattggctgcgaggaaagctggggaagaagcccctctccctcaccctctcagcgttttatccaatgggaaaagtaccagtggttctgaagaccaaaaaacgagacgaaaaacaaacgcaggcgctgagcaggatgtgctcacatgaaattggaagagcctcgttatcgttccccccgcccccctcccctcagcaactacgcacttttaaaatctgccccttcccccatttccttcagctccttcccccacccccgcttctgccccttcccccatcccgggtcctgccccttcccccatcccagctcctgccccttctcccacccccgcttctgccccttctcccatcccccactgctgcccctttttccatccccgcttctgccccttcctccactccccgtttctgtcccttcccccaccccccgtttctgccccttcccccatcccccgcttcggccccttcccccaccccacccccgcttctgccccttcaccccccgcttctgccccttcctcccccgcttctgccccttccctcacccccccttctgccccttcccgcattccctgcttctgacccccatcccccaactgtctcttccctcacccccacttctgccccttcccctatcccccaacttctgccccttccttcaccccccaaccccacttctgccccttccctcaccctcccgccctccgcttctgcccttcccctatcccccaacttctgccccttccctcacacaacccctgccccccgcccccccgcttctgcctcttttcctaccttccacttctgccccttcccccaccccccacgtttgccccctgggtgaactctgctgtagctcctcgggggctcgggctgccctaccgcctgcgcctgcaatttaggcacccagggtgtttggtttgggggccaggttttgacgtggcgttttccatctccgcaaaatggctctacaaataataatcacacacacaaaaaagtaacttcctctgcgtcataaaaatgattgtgattcagctcatctgctagaattttctagcactttctgtctcttcatttctccccctttccatcctttcctctccctttccccagtgtatgctgtattttaagatttttctttttaaaccagagatggatggtcttttgtgaggcatggtggtggagggctggctttggtgctgggattcacatcatgggtgtgcccctcattttgtaaccttaaccaaatcactgcccctctctgagcttcagttttctctcccctaaattaggcatccctcaagagaggtgtaggtaactgcccattgcagccttgtcgcggagcagagaggagacctagggatccatcatcaggggagtggataagaaaaatgtgatatatgttttagatggaccactagaatgaattagatctatatacggcaacatggctggatctctcaaagacagaatgttgagtgaaaaaagaaacaacaagatttatagtacaatactgtttatgtaaattaaaacacacagcaataccatacatttttcacagatacacatatatgtaaataaacacatgaacggtggattggaaggacgtacgttaaatacacgagagtgggtgcctgtgtagggggcggggaggatgggatcaggaatgggtgatgaaggggacaaaactgaagaaaaaaaaataaaagggcctcacatggaccaatgatgatatagtgtgccaagaactgagga

SEQ ID NO: 1564271 - DNA, 4001 bp, Homo sapiens
cctgcttcgcatcctccagggttcctctactccgagaaaagacacctaatccacccatcaactcaaaccaggaacttgcctctttttccctccctgtctacagccaaccaatctccaaggccctattccaccccttcttttccatgcctgttgccactgtcctacttcaggcctcatcagtttctagacaaaaacagcgttctcatcagtctttccctctccaggttatgcttcatactgattatttcctgaactttctagccagcaaatcccatcctatttctcaccctagaacctgcccacgaatttttaccagccactgcagtgtttcacagtttgcctttgagaaatatctgttctgctgggtcttaagggacactatccatagaaagctaatgagaaacaaaagcaaacaggttttttagtggttcttattcttacccaagcctttaatatgttcatgagtgttaagacttttcagtgggagcagaacaagagtttttcttacataaggtaactggagaagcttcttcactgaacatctaacagaactagttagcatgaattttggcaaacactggcctaaatgataaaatcaaaggcacataagggcttccatgtcttatgcttttcaagggggcttcccacaccccagcttcattctctaccactcctccaccccccacgcacacacgcccatactccaatactgagctccctgctactttccaaatataacacattataccctcatgccacagaacttgagtgttgctctctctgcttcccccacctagttaactccttctcactaagacccagcccaattcaccacctccactaagaagctgtctccccatcctgttaccccatgcaccctgagctcctctttatcagaaaatctatcaatgttgtaactatttacgtgtgtggatcctcaatggatagtatactttcttgagagagatgactctgcctaatgtcatctccaaagctagaaattgaatgaagatttttttaaaaaccatactatgcaacaggccctctactgggcctcttgttcttgtatatccctcaagacgagcctacagtgtagatctttgctgtccaaacagccacaggtggttactgagcacttgaaatatggctaggccaaatcgaaatgtgctaaaactgtaaaataccagattttgaaaacttaatactaaaaaatgtaaaatatctcaatgttttatactgactacatgttgaaatatttcatacacaccgagtttactaacattgatttcatctgctttttgctttattaaagtggctactaaaaaattttaaattatatgtgactagcataatatttctactgtacagcgctctggtggatacttttatacgcattttagaaactaggaaactgagtctcagggaggtaaactgccttgtccagagtaatcccacgagtcagtggtacagcccgtaaagcactggaatccaggattctgattctaaaagctgaattcattccacctcacctttaggtaccaatccacaactgctcgagaggaaatgcaggctctgcgggatggggctcctcctctccacacccccacacaggcgggtcgcggcgcctcacattcactcaccattgcgcatgaagtaatcctccactgcaccccccagccacttggccttctcctggctgtgcacacccccgaagccattctccacagcgatctgtaaacacaggtccaagcccaccaagtcagcttgggagcagacctggagtagcctggaggccgcttacgccgcccagccaactcctcttatgccgcctagccaagcctcaggcacctagcccaaccaactcctgttctgccccgggccctaaccttgaccttgccctggccctggccccactgacctgcaaggccggccaggcctccagggccgcgcagaccccagcccggaaaagagctcgcgcatcttctgcagcgcccgccattatccggccccagtccacgtgacgtcccggcggcccaatccctctgtagctcggcccaggcagaacgagacgcaagccgagcctgagaacacaggattctcttttccgcagacctggcagcaagactagagcaaaagaaaaatctgtcagagcgatcgatgacaccaccagagttactcacttaaatcaaaggacaccagacctgaaggacgtgtggggccatggtttccggatccgtgggtactgcggaggaaatatgtggggaacttattacagatacagattccaggccctggggcagaggactcagtgagtatagccttaaaaatctgcatttaaaaaaagcatcctaacatctgtatagaatactgcaaccaacaacagtaaaatacaatcagctctccctatggggggcagtccacgtccgtgaattcaactaacctcagatggaaaatattcaggaaaaaattgcatctgcattgaacatgtgtatactttttttcttgacattattctcctaaacagtacagtataacagctatatacatagcatttacactttattaggcattataagtaacctggaaattatttatttatctatttttttgagaccgagtgtcactctgtggcccaggctggagtgcagtggcgccatctcggctgactgcaacctccgtctcctggtttcaagcaattctcgtgcctcagcctcccgagtacctgagattacaggtgcccaccaccactcccagctaatttttgtgtttttagtagagacagggtttcgccatgttgcccaggctggtctcgaactcctgggtttaatccacttgcctcagcctcccaaattgctgggattataggcgtgagtcacatctggaaatgatttaaagtatacagtagaatattcataggttatacgcaaatactatgccattttatatcagggacttgagcatctatgaattttggtatcctccggaggtcgtggaaccagtctcccacggatacccagggataactgtacatgtttttctgaagtacacaagaacattctccagaacagatcatacactaggccatacagtaggcctccatagatttaacaggattgaacatacaaagtatgttgtctgaccacaatggaaagaagttaaaaatcagtaaaaagaaacttacaaaattcacaaatatatggaaattaacacactcctaagcaataaatgggtcaaagaaaaaaatcacaaagcaaattagaaaacacttttaaatgaatgaaaacaaaaacataaaaaaatgcatgagatgcagctaaagcaaaacttagagggaaatctttagctgtaaacatgcatatctaaaaagaagagccggacatggtggctcatgcctgtaatcatagcactttgggaggttgatgcgggaggatggcttgagctcaggagttcaagaccagcctgggcaacatagtgagaccccatctctaaaaacaattttaaaaattaggccaggtgtggtggctcacgcttgtaatcacagcactttgggaggccaaggcaggcagatcacttgaggtcaggagttcgagaccagcctggccaagatggtgaaaccccgtctctactaaaaatacaaaaattagccaggtctggtggcaagcacctgtaatcccagctacttgggaggctgaggcaggagaatggcttgaacccgggaggcggaggttacagtgagccgagatggtgccattgcactccagcctgggaaacagagtgagactctgtctcaaactaaataaataaataaatttgaaaactaggccaggcatggtggctcacacctataattcccgcactttgggtgggcagatcacctgaggtcaggagtttgagaccagcatggtcaatatgaacaaaccctgtctctactaaaaatgcaaaagttagccaggcatggtgacacacacctgtaatcccagctacttgggaggctgaagcac

SEQ ID NO: 1564272 - DNA, 4001 bp, Homo sapiens
aagatgctcagaagagcataagcaaagaagaatggagtatgaggtacataaacaaaaatgagtagacacacacatgactattcctatccagctgttaaccagagctctgcacctcaaagggtcattacctcctatcttggttattttaaatgctagttgattaaacctcagttcctaattcaacgactttttgtccttatcccagtgtcataaaagggaacttatatcctcaattgcagtggctttttatcagagtcctcctcccctggggaacctacgaaatcaaacactgagattggcactccacccttagggaataagtgaagtgtccaaagtgatggtgttgaatcccttacaggacattggtccacagcttctttttcagtcctgcaagcactggatctttcttttagaatacaaagagagggagagaaagaaagagaggtaattgagaagtagtaacactgtcatgcagaaacatgaaaatacctgaccttagaaacaggccccaaaaagctaattcttaacactctgctcagacgtaaactggacctttgttctcccatttgaagtttatgaattgcattagaaaaatattatttcgtaatttcatacaggagttaagagtgttcaaatacataattaagtaatattaaatagccctcggtgatcaagcaagatatccaacaagtcgaacgtttcagtatgttcacctgcaaggaaaaaaagagatggggttcccaccttcccagtctcagtccccgcaattatccattccagggccccgaaaaccctgtaccccgttcgttgtgcaatctttttcaaactccacccactgagctccagaacaagtggaattgtcccgttctgaaagaggtctcaattttcctgtatctagggagggactgaaaactccttgacgtgagtcaagtaaggcaaggggaacagtccggcctgtttcccagattaagaaagacccaaggccagggtcgggaaggcattcaagtttccactcatcaaattaaaaaaataataaatgaaagaaaaaaaagaggggaaaaaagaggagggtggtaaataggactgggaggaccagctatcatgcgatatcccaactctgcaggaccgaggtcctccagcatcgcctccccatccatccccggccccacgtgcagccaagccctcggagccccggggtctaggtcccgggggccgagcgtcccgctcgcaccggccctgcgacactcacccgctcgcctgcccgcccgcgcagtggcggggagcgcaggggggcgggggaaggggggccaagcacaccccggctcccgcgcggttatcttactgcgcaacagcctagcctgagcagcccgggggcaccccgcagcgcgccctgcgcacctgcccgacgccaggagggcgagcccacgaccccagcgagcccccggacggcggcgctcagcgccgggagcacggtgacggcggtgactgggagaaggaacgcctggcgcccggatccccgcggtgctggccgcacgtggctgtcacacctggcgcacccccgcctcgcaccccttctcccttagaaccgcgtgcgccccctgccctccctcccggcttccccgccgcgcgccgccaaaccccaaccgtcgtcccttcccaccccatccatcgcggtcccacccccccccacctgctcccactgtcgtcacccccgggagggaagaagaccggatgttcgtcccgtggctataggtaaccagggagagagaagaggtggaccctgaaaaagggagcccaaacatcccccgggcccgacaacaacgagggcgtccccctgactgaccttctgccgcgggctgcgtcgccgtccgccccgtccggcctcagtcgcctcttcggcgccgccgcctcttccccgcgctgcctcctctacccgcgtcgccatgaggtgacggcagcagccaaacaagcggcccgacaaggggcacagaatctcgcagggcctttcgccccgcccccgagcccccacgaccaatcgccgcatgtgagacttcccacgtgaccggaggaggttggcccccgaggggacggagcgagatggggatggggagcattgaatactgggctgggcttcagcaagaccgaagggcagatagaggccgtgtgagtctgcgcggatcgggaatgggactcgggagtggactacaagtcccagcagggcgtgcggccacagctcgcaggctcggatcgggattgggacataaggcggcgttctgaaaaggggagagtgctgcacccagtgtgcttcgtgtgcatcctagtgggacttgcggtttctgggggcgatgtctggctataggaaggtactcgttatgatctttcgcggaaagtttagaaatatccccgtgtttgagaaggagcacgatcggcgacacattcttgtgtttttgtttttgttgccgttcttaggaattgggcgcgaatgatttggggataagggaaaatacttcacgactttcaagacggaaggtgtattggctcttagaatttgaagtttcgtgctcgggcacctgccccgagccctgcccctccaccagagttgttaccacggtttacttgtcccgagctcccgcgggataggtgccgcattctattcaccttggttgaaccgccccggcttctgcacacttacttggcacttcattcatgttgaatgtatcctgctttctcccaccccatttactcgtttcattacctaaattttttcaacaaactcggtttgctgaaccgaatttttttttttattgatatgatgttgggggggagaggggagatttcctcaggaatattccctatttccatctgatggaaccagatctccaatggccgagcttctgaaaggcacagaccatcatgaaatcctgatatattgtcttaaataattcattatgaggccgggcgcggtggctcacgcctgtaatgccaacaccttgggggaccgaggcgggtggatcacaaggtcaggagttccagaccagcctggccaacacagtgaaactccgtctctactaaaaatacaaaaattagccgggcatggtggtggtggtgggcttttcttttttctttgtttttgttttcccaagacggagtcttgctgtcacccaaagctggagtgcagtggcacgatctcagctcactgcaacctccgcctcccaggttcaagcaattctcctgcctcagcctcccgagtagctgggattgcaggcacgtgccaccacgctgggctaatttttgtatttttagtagagagaggggtttcaccatgttggccaggctggtcttgaacttctgaccccctgatctgccctcctcggcctcccaaagtgctgggattacaggtgtgagcaaccgcccccagccggtggtgggcttctgtaattccagctatttgggatctgagacaggagaatcgcttgaacccgggcagcagaggttgcagtgagccaagatcgtgccattgaacactccagcctgggtgaggagaaactccatcacacacacacacacaaaagtaagttattcctcaaaaaaaaatttttttttagagatggggcattatgttgcccaggctggtttcaaatttcatgattttctatattgtttaagtatgtatggaatgaaaaaaatcaataaagttatctttattaaggaaagaggccggccacggtggctcacgcctgtaaccccggcactttgggaggccgaggcgggcggatcacctgaggtcagaagttcaagaccagcctgaccaacgtggtgaaacccggtctgtgctaaaaatagaattagccaggcgtggtgacacgtgcctgcaatcccagctactagggaggctgaggcaggagaatcgcttgaacccgggaggcggaggttgcagtaagccgggatcacgccattgcactctagcctgggcaacaagagcgagactccgtctcaaaaaa

SEQ ID NO: 1564273 - DNA, 4001 bp, Homo sapiens
tttctaatggaacacaaaggccctgtgtcaatctctgacaggacatgctaggtatcacagctgctctgagggtgtggaaacgggaagctgggcccagatagtgcaggccttaaaaaggttaataagcaaacactggctaggtccccaaatggggttgggtttctctgaccaattatgtaggaccccatggaggcgctgaaggtagatgctgagaagagggttttctactgcagtagaaaacaagagggccatggccaggcgcggtggctcacgcctgcaatcccagcactttgggaggccgaggcaggtggatcacctgaggtcaggagttcgagaccagcctgggcaatatggtgaaaccccatctctactaaaaatacaaaaaattagccaggcgtggtggtgcatgcctgtaatcccagctactcgggaggctgaggcaggagaatcgcttgaacccaggaggtggaggttgcagtgagctgagatggcgccactgcactccagcctggacgacatagtgaaacaattctgtctcggaaaaaagaaaaagaaaaagaaaacaagaaggcctgtggggggaagggacatctgacaatgatcctggggtccaaggaggctgaaagcagaagctgaaaacccctgactgcagacgttagggaccttgaaacgatctgagggcagattctgaggcctgatgtgaggataagggatctgtgaaaaaagcagctagaacccaggttggtttttgaaggcagaggctgggtctagggtggggttggggaggcgagtctctgatggaaggggctagaagccaacgggatctgcaagagcagatgctcgcaggggctctttgatggaggattatgtatccaaacagttcctccctggtatctggtgcactggaaggctctgggggttcaaggtgcctgatggggaagatgctgaggcctctcagtagtctctgaatactggaagtataaaaagcgagaaattccataaaagtagagaaagtgtcaaaggacagagtctaggaattgaagagtctctcaaggcagatggtaagaggggtctctgagtagaaatactgggcagagtctctgatggaagatgctagggccagggtggggttaggagacctgacgtgtggcgaagaggggcccccgacacaaaggccaggcccaaatggcctttcacagggtctagtacccctggaagctctgagcgcggctagcatgtgtgtgggatgggggtctgaaggaaaatgctaaagaggactctcttacagagataaagggcctatggaccccttcgagatctagcccgtcctggaagccttgaggacaaatactgagaagctaggaagtgtctcaaaggagattctggggcaggtctttaacggcattcaatggtgaggagctctgatcagcaatgctgatccacgtaaatctctattggagactggggaagagttctgatctgagatacaaggttcgggacggagtcaggtcccagactagagatgttgggcgtgagtctctaaaagcacatcctgggggtccgactccaaggtcagattttgcaaccagagggagccggagtggtcctggccggggaaagtcggccccgccccaggatccgctccccctccctactccgctgattcctggctcccgagtcaccgcggcccgccccgacagcagcgtggctcagggccctccagtgcctccccgaaacccctgcccagggcgaggcgcagtgaaaggacgtttttttaccaatgccggttccccgggtcgcgccgccgccaactcctcaaggagccgaagccaagcccggccgccaccctcctccttctcctcctccccgccgcctgggccgcctagaatcgccgctgccgccttctcctcccccggccgttgtggttgtggttgtccctgccacctccttacagccgagccgccgacacaagatggcggacgctgagcctggggccggaacaaaaccttgggccccacccccagaaacccggatgcaagcgggccgcgcctacttatgaatcatgcataaagttccctactcggttgcgattcattcggttagaagtggaacagcaccacctggtggacattgtggcagtaacaacgaaaacaggtaaaacagaggccacgcctcatggaatgcgactaatgaatgaattgttgcagccaggctgtcaaggaagcgaagaaaaaccgttaaggccatgcttcctgattataagttatgcatgaagttgagtggttggtagactaacaaccagcaaccagaaagcagatgttaaaacatggaagccacacacccccattcatgaataatgatgatcttgcaggggcccggaagccaaggagacccaggccacaacttactcatgaataatgcatgaggcccagtgggttggaataaaaggggcacgcccgcctattgctgcatctaatacactgtaagcagggaaatggggctgctgcagggaaaacacactctcccaggtcctgaataatgaattatgctgctgcagtagctcaacctggaaactcagagaggtcaagaaaggttccacccaatttatgaattatgcataaggcgaagaaacacccaagactgccctgcccagcaaatagggattacgatgctatagccaaggcaaagtgagcacgccttcctgttcatgaataatgaaagatgtcactgcagtgccaccagaaaacccaggggacgtgtactccctgcccccacctcccctctccacgcctccctccattctccccgcctcaggaacaagggctgccttggtccaatcaaacccaaactcactacatgtctttggcaggtgcctcagtttccacaactgtaaaatgaggatagtaatgtgttattatgaaaatcagatgacgcctgtaatcccagcactttaggaggccgaggcgggtggatcacctgaggtcaggaattggagaccagcctggccaagatggtgaaaccctgtctctactaaaaatacaaaaattagctgggcatgttggcgggcgcctgtaatcccagctactggggaggctgaggcaggagaatcgcttgaactcgggaagcagaggttgcagtcagccgagatcgcgccattgcactccagcttgggcgacaagagagaaactccgtctcaaacaaaagaaaatcagagaatataaattatgggatgagccttagaacattgctggcacaaggcactgttaaatttttaaaatattatatattaatataaaagtaatatgttaagatatgtaaatatatatttacattaatataaaattagttatgaatactcagccactagagaaacccccaacttgggccactgcttccccatccataaaataggaataacagcaacttaccttgcgatggagtttaaatgaagaaataagtagaaagggcttagaccagtgcctggcacatgctaagtgttatattagtagtagtagtactatcaaatggcggcgcaggggaatggggaggggagacattatggcatctggttaagactacagattgcggaactagaccccaatttgaatcccggcccagccactcactgattgtgtgaccttaggcaaattacttagccttcctgtgtcccagtttccttatctataaagtgggggtaataatgacctacctcctaggattgtcgtgaagattaaatgcgctaagtagctaaacgagtgtaagctaatcttatcgttatcctcatacccattattcaggcttacaaaacgatttgccaaagatcacacaactggaaaggatcgatgggatttgaatccagagccggctgattatctgggattaccaggccataagaaatgaacaatgtaggaggcctcatccctttgctagacgccaggttttaactctggtacctgcaagggaaagctaaccgcggatcacgcagacaaagctgcaaaagc

SEQ ID NO: 1564274 - DNA, 4001 bp, Homo sapiens
tggccaagatggtgaaaccctgtctctactaaaaatacaaaaattagctgggcatgttggcgggcgcctgtaatcccagctactggggaggctgaggcaggagaatcgcttgaactcgggaagcagaggttgcagtcagccgagatcgcgccattgcactccagcttgggcgacaagagagaaactccgtctcaaacaaaagaaaatcagagaatataaattatgggatgagccttagaacattgctggcacaaggcactgttaaatttttaaaatattatatattaatataaaagtaatatgttaagatatgtaaatatatatttacattaatataaaattagttatgaatactcagccactagagaaacccccaacttgggccactgcttccccatccataaaataggaataacagcaacttaccttgcgatggagtttaaatgaagaaataagtagaaagggcttagaccagtgcctggcacatgctaagtgttatattagtagtagtagtactatcaaatggcggcgcaggggaatggggaggggagacattatggcatctggttaagactacagattgcggaactagaccccaatttgaatcccggcccagccactcactgattgtgtgaccttaggcaaattacttagccttcctgtgtcccagtttccttatctataaagtgggggtaataatgacctacctcctaggattgtcgtgaagattaaatgcgctaagtagctaaacgagtgtaagctaatcttatcgttatcctcatacccattattcaggcttacaaaacgatttgccaaagatcacacaactggaaaggatcgatgggatttgaatccagagccggctgattatctgggattaccaggccataagaaatgaacaatgtaggaggcctcatccctttgctagacgccaggttttaactctggtacctgcaagggaaagctaaccgcggatcacgcagacaaagctgcaaaagccacgctcctcatgaattaagcacggaacccctagaaaagccactgaaaactcagggtgctacttaacttttgcgaatcatcaatgaactcgtttgcgcggcagacttcagaacgccccttcagcacgtcccttcggcacgctgatccgcccctcgtgaataattcacaagccgagaaccttcagcggaccaggtgcgaaagaggcaaaaaaactgccgcctaccacagccccaccttattatgaataatgaataaaggccgggtggcgcctcgtcagctcaggaagagctgggctccggtgtcccttccctagcctgagctgggaggctcctctccctagaaacatctgggcccccgacgtgtccagtctcgcagtcctgagcctccaggcgcggggaggacctcatcacaaaaccagaggtcacaaaggcctgacacctccacaatgccacgtcggtcccgattgttctgtcaccaggaccccgtcctgaaacaagccctcccccagtcccgccttgactttagtaacctcaagctttgcttctccccttgaagaataacccaaatcctgctccacggacaagggtgcccatacacggaccctaagaatctccccaaagccccccaaaccctgcctccgaggggtgctccccgaaacagactcccaaatcccaccccgaagtccccaaacggcaccccttaagggtctcaaaagcagacgccccctaaatatcaccccgggcccggaggctccaaatacgcccatgaggggtttccccgaagttgggattagggaagcaccctcctccaaatgctgtccagaggcttgggggcacggtgctccagctcaccccctgtgccgggcggaagcctcgccttcctgccaaagatgagctgaagccacggggcaacggaagagcaaaccacctctgtcgtacaagagaagccagagtttgcgcggagctcggaagcgcggggccttggagagccccgggtctgggatgtaccacagatgctttgctagaggggcgtcagtccctgctcccgcgtcgctggtgcccgtttcagacccagatgaccctacaggttgtggtacggcccaaatgcgcgcggcatgctgggggtggtagttctgtctggccagtgcctggtgcacgtggtgggcaccagcgtccagaatatgggaaaatgtaagcctgagctgtggaattgccggagccgtgctctgtagggtgggaagaggaaacggaacgtgtgggtgcctccacatggaaaggcacacccatcctacagatggggagaccgagactcaggtggccaaaaaagttcatttgacatgggccaggtgctggaaattcttccttgggctcatggagctgacattctagcaagatacacagaccataaacataacaataagtaaaattatagtttcacatacaaacccgtattataatagatatctgtgactatatacagtaatataaattatggatatacaatcatgtgctgcataacattttggtcaacggtcctataacacagaaaaaattttactgttatcttttctatgtttacatgttaccatagtggagacgggatttcgccacgttagccagactggactagagctcctgagctcaggcgataccgcccgctcggcctcccaaagtgctgggactataggcgcgagccgccgcgcctggcaaaattctttagccttttaataaatggagtcttggccgggcgcggcggctcacgcctataatcccatcactttggcaggctgaggcaggatgattgcttgagcccaggagttcaagaccagcctgggcaacaaagtgagacccccccacgccccaacatacacacacacacaccccaccaccaccacctggtctccacaaaaaatcaaagaattagctgggcatagtggggtgcatctgtggtcccacagtgagccctgtggaggcaggaaaatagacaaaggagagggagagggagggtggaagagagggttgtactattttgcattgcctccagcgatgtatgagagtgcctcttccttcgcagcttcagctaacactagcctgttaaaatagacatcttttcttttttctaatatctagaacaactttaataagaaaggaattaactttaataagaaaggaatccttgggagtttggtagaatgctcttataaaaaccatctgggccaggcgaggtggctcatgcctgtaatcacagcactttgggaggccaaggagggtggatcacctgaggtcaggagttcaagaccagctggccaacatagcgaaaccccatctctactaagaatacaaaatattccctgggtgtggtggtgcacacctgtaatcccagctactcaggaggctgaggcaagagaattgcttgaacccagaaggtggaggttgcggtaaactgagatcgcaccactgcactccagcctgggtgacagagtaagactccatctaaaaaaaaaaaaagaaagaaagaaaggaacacacacatacacacatcatctgggccctttttttttttttgtggggaaagggaagatcttgacaaccatttcaatttctatattactaattgctccatttgagtaatcagtttctccatggaacagttttggcatttgatatttctctaggaatatattcatttcatctagattttcagatacattctttatttttaaaagctctgttgcatttgcatcttctatcttcttcaattgaccagtcttgccaaaagtgtttcctcttaatttttgttttcagattctgcttttggtttctattaatctgtcattttttgttctctatatcatcaatttctgttcattatttccttcttatttattgaggtttgctgtggtggtgattttccaacttcttgtataatttacatacaataaaacactcagattttagttatacagcttgttggacttttaaataggtatacacccatgtgac

SEQ ID NO: 1564275 - DNA, 4001 bp, Homo sapiens
aaaataacagaaagatccttttccttttttttaaaacctcaaatattaaagaatttcatgagttcaaatactttaatcatcctttaaatgtattaaactttcaaaaaacaaccacacacacacacaactgagtgtagaactatcagtgtcatttttccggttgtgatagggtctagtcattcaagatgttaccaaatgggagggtttgggtagaggactgggttaagggtataaagggtgtctctattatttcttgcaactgcatatgaatctataattatctaaaatcagaaagtttttaaaaagcaatttacacgtgtttttaaaagttaaacctaaatcaattaaaaattatgtacctactggtacatgtagtactttcaggtaggcaggacactgatcaaaagggtacattaaggctaacttcaattgtgaagctgctttgaaattactcatcataacgtcttgatgaaagcacacactgcaaattcacttaaaaataagaaagaatactgtactcaaatgaggcatttaagaccatcttagagcagtgaggctgacaggcattcaatgtcagattgtagaaaccagacagttgtacgcaagggattctcgcatccactcaacatccaacacacatctaccaagcacctgctgaacacaactcctgcccttggggtagaattctgaaccagatggtctctggggtctctgctgcctatcagcaactggttgggtttatactaattcagtgatggagggctgaatttagcagaattacagcccaagcctcaaaaatccttaataccagtgctatgattgctccttttaaaaagtgactgccttacacagattttttttttaagaaagcaagaagaaaggtgcagttctagtcaagcatacaatatccagaaccaccagccacacactgcattccactcaagcctttagcagacagaggctaggcagaggcaggttcctaagcaggagacacttccaggatgactgggaaccctttccccagatgaccaggctcctgaaaagtgggtaaagaaactctctcttaccatcctcaaacggggtcccttcaggcctgcaacacagagaaaaatggtcagttcccacttaaggggcccccttctccctgcttcatctgagatggctatcccgagctctgccatctccagcaccgctaccggggtcggaagccactacaaatggatgtcccgggctcagagacacagggcaagccgccgcgcctaaccgccaccactccccgccccgcccccctagaaccccaagcggttccccctggcagcgggaactgagctaatcgaggcacaggctccggggaggcgcctaggcccagccagacccaaacattttcccctacccgctcggcctccgcggggggcccgccccggagcgcagaccgaagctgctcgcgtccccagttttctcgccaccgccacgaacgcagactcacccgaaaatgaccgcgttccacaccattatgttgttctcggacggagccccgctgactccggctggaggatcctcctgcaaccttcgggaagacagacaggggtccccctaggccggcactggcgcccgctcccggccgctccccagccctccccgcccggcgcgcctcgggacccgccctgtgccccagctcgcaacccccggcctcggccgtcccctcggtttacctcttgaagtcccgcatgaggcgccgccgagccggggtggacatgtcgcgagcggggtcaggggtggggcatacactggggtctcgggttcccgcggcgggcgaggaggccgaagaggctggagaagcaggagaaggggaggcggaagcacccagaggaaccgcgctgcctctccgaagtcgagggtcggtctggcgccggctaagcaccaccccagtgtagacgggggctgaaccaacctgagagcagagagaggggggtggaacgtcgagcgccggacaggccgtaccaagacggggcggggggtgcgcgaggaaagttgcttatgtcattaaagccccacgggaggcccggggcggggccgcgagcgcagaggcgtagggtacgccggagccccgggcgctggaggagctcgtggtggaacggggtccatccccacctgctaattctaaggcaaaccctgggaagttttcggctttttttctttttctctttttttctttttctattcgtttttgtttgttttgtgaccagatcattcatgaaagcgcgcactatgcccggggaggagaggggagaagtttggaagtcccaaactagaggacgaaggagtgggcggaggtaaaaccggttctcaaaaagcggcaactctagggtgcacaaccccttcggacaccggagactggggtcggaggggtggggagaggagtgattggttaaaatcacggaaaatcaaaagaataaatcggccttgactatgacgggggggcggggcggggctgtgggattgaatgcaggattgggcgctcaacgtttaggccaatgatcaccccagggcagaatgaaatagtgttgtatgtcctgtgggagggaatgggagcttaaggcaggcggagtagggttttgttttgttctgttttgttttgggcactcacaatttggctctggaaccacatttccccttggtagttcaacaagccaagcggctatttatgttcagaagagtccaagatatgagactatccgactgcagggagttgcaaggacagtgggtctgaagtaaaaggaacgtggaaaagctgcaggttgcaggaagagtcacagtccgtggacctgcaaaagcaataacagttttaaaggataatttttaaaggtcaacccaaaataacttagaagataggcataatacacatttaaaaattattgaaaataggagaaaggtagatttgggttaagtcatcaagagttttgaatgccaagctaatggattccttggaagtccattgagcagggaagtgacatcattagagctgtccttatcagagattggtctcaagagagcaggcaggagactcttgcagtatctaggtgcgagatactgaagcaggcagtgacaataaaggcgaggatatgaatgaatggggaggacttggcaacaggctgaatatggggcaagagagaggaaggagtcaacagtggctgaaactctaagccccgagataactggggttttgaaggtgccattaacagaattacagaatagagagagagggacaagtttggaaaaggaaattttgggtgggacttactgagttcatgggactggtgagacatccccgtgaagatgtccagaagatatcagatgtgcaggaatttgtttctaacatgagaagcaggaggcacttgacaatggtagtgattctagctgctgcttaacaacaggtactttcatggtcaaggatttctatctcccattaactccaacatatcagttaaggcaagtctccctaatagcatcacattatggctgtagtaggaagggggtacaaaaattaaaaaaaaaaaactttttttcctctcatctaagaacttgcagtctactaacacacacatacacacatatgaaatcaacaaaagcaagatctacaaaagcaagtatattcgttttcatcactgcttaacaaattacaagttgttggccaagcccagttcattgcagttgtaggactttggtccctatttccttactagctgccacctgggaactactctcagctcctagaggccgcctgcattccttgccaagtggcctactccatcttcaaagtcatcaacagagaatttctctcccaccacatccctctcactctttgaatcttgttttcaggaagagcacagtctactttaaaggcttatcagattatgtcaggcccaccccatggataatttccctatgttaaaaacatctaagttgggacctttattatgtctgctaaattttttcactgc

SEQ ID NO: 1564276 - DNA, 4001 bp, Homo sapiens
aacgatcttgcctcttatgtttattgtctatctcattcccactaaaatataaaacttcatgaggaaagagatctttgtctatttttcgttcagtcttctaatacctaggctaatatatgtcatatactagcaactcaataaataattacttgatcaactttattagctattgtaaaataaaatataaaaaaatctattgctgggctttgggattctaatgtattaaaatgcatggctacataaatagattaattatacagattttagtgttgagagaggcattatcctgtaaaatggttaatttacagcgagtgcagaagtacaggaagaatcaggctcagttataatattaataaattaacaaatgttgacttatagtacaatagagaggagctcttaactcaggcagatgaggatttggatacctagactaccactaactttctgagaaatctaaggtatgttcatgagctctaaagtggctcagtttcttatctgtacaatgacaataataatataaggatgttgtaaagcaatataacacatgtattcttggagaatttgtattactgacaagaactctttcttattaataagagctctttatatagtaagtatattttaccttctatatttgttgcatataattttttccctgcctgtcattgcttttagctttttctaacagatatttttattacattcaggcttttcaacctcaaacaattttctccatttacccaattcatttatcattaaatcatttttattcctatatgtgcttcacatttcttataattacctagtactttaaactttttttacaataacaaaaaatattttagtaaaacataagatttacagaagtttccagacaagccatacaaaatggtcacaagcttattttgaaggggggactctacacttgacagcaaagtcacaatgttattagtgagggcagtgatgcttgttaaatgttcccattttggttcaaacaatcaagcttgtccatctacagtgtctaaataaagttagacttggatagagagcatatttctaaagaactggttagctgcttttaaccaatccaattagagcaccaaaaaggcggggaaaggagcccataaaattaaaataaaactacttacccccctcaaaaaaataaagaaaaacacccacacccttgcagctaacctgacaactaccttcattcacagtgctttatacttaaaccaggatgggggaaatgaataaaagcagggagggaccactgcttttaaacgtttcacaacaatccggatgatacgtctagcctctgctcatgctttatgacagtgaatcaggacaagacatagatttgctaatgtacatttaatcaccaaataactgaagatgtctgggtttttttattctgtaatgtttctaagactatgtccattaaatgcaagcaaaaaggaagaagtcttggcagaacaggagaagtgatgcacacttaatgattggatcaatttaaatactattcatggcatatagcctagtccatgctctagctgtttcaatggcttgggcttcgttggtcttccactgctccactacatcatttgctaatggatcatctggattgggagcatttaacaaggcctggatcgatagcagaactgtgcggatctgcagggctggggaccacttatctttcaaaatatctcaacttattctttccaacttgtctacatttggatgataaattttggtcatgaaacgtactttaggggctgccattgggtattcttctgcaagtaatagttcacgtttaaaagtccctccctcaaagggggaatcctttgattccccagcaatgaccacatgaaaataacgggcgttgctttcatctggttctgctttgatgccaggaactggctctgccagcaaacgctgggtttccttgatgatcctgtggggcagctcggccatcagaacctgagttcggcctctggtctcatccagtactttatacttttatttctacttaaaatgtaatatcatttaatcatgtattaaacagctatatacgaaatatatgtgcatgggattttaaaacaatttttaatctcaccatgttaatgaaccatcttgtagtttgaaactaaggtcaagttatttttcggccaggcgcggtggctcaagcctgtaatcccaacactttgggaagccgaggcgggtggatcacgaggtcaggagatcgagaccatcctggctaacatggtgaaaccccgtctctactaaaaatacaaaaaaatagccgggcgtggtggcgggcgcctgtagtcccagctactcgggaggctgaggcaggagaatggcgtgaacccgggaggtggagcttgcagtgagccgagatcgcaccacagcactccagcctgggccacagagcgagactccgtctcaaaaagaaaggcatttttcttaaattttccagattgaacatcatattatttgagtacatttttgtcttttttgagaatttttatttttctctataataaatataacttacaaagttaaattttagagatgataggaactatattcttgtttctctagaatttaataagaacattttatattctatctttaagttgtatttgcttcataagtaaattttagatagatatgattcatcatatgaatctaagaatatttatgtttttcattaactatattatatgagggatagacacaaattctttttacatatgcctcactggactctaccaagatgatcatatggttttgcttccttttctcttgatgtgatgaactacataagtagaagtttcaagaataaaaaaacaccctactagttcacaatggattgctctttaattatagctctgtgttagaattagtagtattttattcagtgcaagtatttctgtgtgtagaaataagattaaaacaatgaataatattttgcattttgcttcaaggagatgttatgtttacaaaatgagttaagttcaaaaagagctcatagctttttgagtcctataacaccataaatgggtgataattagttactccataatacgttcaaataaatcacctcctataaaacctctggagtgggtaccatttttaaatgtggccctttttctcttattttaatttaaatcaattaataataatttaatttttctatttcttgaaaacatttgcatgaattacctttttcctagaaacatcatcaatttcaagacttttaactttattagtataaagtttgatatagctagttatcataattttacattatttgtggttatattaacatttataagtttgtatgtatgtgctttatctcttttgtccacttatcaggtttcctagaaattgttattctaattgaaattttaacaaatagttacatagtattaaaaattaattctatgattttatattttttatcaattttatgttttatcttttaaaattcatactttaatatttttctcattgctattttataattattacctttaatgtttacatattatagctccattttttgttttactttgtagtgaagtcaaatgaagctaattatattttactgaacactgtgactatttatggcttggccagttacattttagcaaacaccacttcaaccccatgatgaagatctgacacctaattttctccttggatttctttttagaattatctataactacagttataatttcttctttgacctaaaaaataattttgtaaaacattttctcttttatctatttgggtatttcattttaattcacatcattatttttaaatataagcacattatggtcccaatgtgtggcctttcttaaacctgaattttagaatttattgaaatttctatatagcgcaattcacagaaactcacaaaattgatatctgtatgccagaaaggaattttgcaattagatggataaatggaaaaacagatttacacataa

SEQ ID NO: 1564277 - DNA, 4001 bp, Homo sapiens
tggggatgaggacaaaggcctacgcccagtcccagctctgacactgccttgctgagtcacccatcagccctaacgcttcctggacgagacaagcagatagggtgccccagagaggagctgtgtcactaagggccaggacaccccatctctgggtcacacttggccacggcttcatttttggcttcagtttgtttactgaacagaagggagaggggccctgtgagacagaggacactgactcaggtcggtgagtggccctcactgtatagagtccatggctggggaccaagtggcactgagactcgcccaaagtcacatcacagagctggggtgccttgctgactccctggccccaatctgcttttccatttgtcgaacgcacactggcacactggctgcagcagctgcgggggtcggggggttccagggctggctgtcacttggcctcctgcagaggtaagctgagggctatgttggacccgccagaagtcaggtgacagctgctttccctttcaggatcgggagggagtcacctgagggtatattctcagtgggctaaacatgacatgcgagagcccagctctccaagcggccccttcctccttctcacaccaaggcactttcagaagccgctggattccgactggggctgtgccacttcatcgccggtgcctctgctgtgccggctctcctcttctgagggtgtggaagcaaacccaggtcaagctgtgaggagtgcctagcacctggccagagccaggtacatgccagctatgatgatgatgagcccaactgcaacaggagaacacacttagtgcgacatgcagcggtagcctggcgttgggcacctccccatgctccgagaattctatttggagaagcccttctccattgtctcagtcacttcagggtgcaggaagcggctggccaaccgttcgatgtcgtccagcgtcaggcgactcagggacctctcgtaatcctggggagagaagggcaggaagattcaggggctgccagtggtgggggggcatacactgcaacagaggtaggggctgggagcaactgggcctgaagaggatgcccagggttacccttctcaccctctgtagctgttccaggaccctgctggcatctgccgcactgaagtggcgggccaagactttggagatcagctgccagacctgcgggggtggggagtcggccagcctctgggcctcgccttcttctagtagcaccttctccaggggtttgaccactaggttgagcttggagttgggcccgatgctataatccgagagtcgtttcccatctgccaaagacagatcgatgggttcctcctcctccaccgccgtgggggtggcccggggcgcgaggccgcctcgggcggcgggagcggagcgctgcggcatccggctgtgaggcatgcggccgcctcccttggggtcatgtggcgcttggcgcccgcaccccgacccgacacacggctgctggcctcggcccgcgcaccccggtcccgcttcctgcggggctccccgggcgtctcctctccctgggtacctgccagggccttgcccttgaacagcagccgctgctggcgcactgggacgttcagcttctcggagaccagctgcttcagcgtggacaccagctcgtcctctggcacctggccgcgcggagggtgggaggcaagggttgagcccgcggcccccagacggcgaagcccacgcgtccgcccccgagggcagctctcccggctcccggccctcggcccggccgccccgtgcccgccctcggccctgccggtccccctgccaggagcgggcgagagagcgcgccggacccggcggcccggcccggggaccctacctgcaggctgcactcgcggccctgcagcgccttcaccgtcagctgcatggcggtcgcgacggcgtccactcgggccggcgcgcaccccaaccaccccccgccgcgcgccgccgccccgggcgcgcgctggaaccgcccgccgccgccggaagcagcgagaggggcgcgcccgccgcccgcgcttcccggccccgccctcctgccccgtccgcgccccggccccgccccccggcccaattgcgccccgggaggagtccccccggggtcccgcctagcatgcgcgcatcgaccgccctggccggcggacccctcccaaagcaacgacgcgggggagttgggagcaggaaccagtcgggccaggttggcgtcatctgggagctgggacatggagaagggagggccagaaggtacgctcgcccccgcggactgcctggcccacctcacgcgccaggactgctggcggcgcctggccctgcatacccacagacggcccgcccccgctccctgtctggtggcttcctacctcctcctttctggtctggctgcgaaacgctccactgagcttgagagggggcaggggggctacgcctctgccctcatcctcccacctctcccagagtggggacacccccggggagggctgatagggaaagcctatgcaggggtcaccgtgtcacccaagctggccctccaccctggtccacacttacccagcacactctttctacccccacgcccaggccccaaagggcaaagagtagaagggacccaagcttgcttctctcttttattgaaatatattttctgggcagcgcccacctacctaactcagcatggcctctttggcactgaaagctggagaataaaaaatcagtaaaaaaaataagcctggatttttctgagtgcatagtgcatgagaactttggtggagtgtgggggctggggctgatgaaagcttgacccagaggcctcagggaactgggaacaggctgctgtagatgaagtggccaatgaccaaggccagcatctcggaggtgccgctcagcgccacaatgaagggggcctgggaggcatagtcagcttgaaggcggcggagggatagctgcagcatggccaaggccagcaggctgttctgcacccctacctcaatgctgaccgtccgccgctgggccactggcagcttcagacacgtggctaggcagtagcccaccaacaggccaaccaggggcaccgtgatacccaccagtacgatgggtagccggatgcctgccaggatgaagacccccatgcgataggccaggaagaggccgcccaggaggagcacaaagctgaagggcttgacgacctgcagcagcagctgggagaacttggggagcttggacttgatcagcacgcccacggctatggggatggcaatgaacagcagggtccccaggatcttggagatgggcacgtggagcgtctcatggatgctgagcaggcggctgtagatggccgaagacagaggcaagaagccagtggcagccaccgtagagaggaaagtcatggagatggccagggtgacgtcccctccaagaaggaggctgaagaggtagctccccccgccgccaggcgacgagcaggtgatgatgaggcccagagccagggccttgggcagcatgaagaccttggccatgaggaaagcgtacaagggcatgaccagaaactggcccaggaggcccagcagcatgggctgggggctctgcatgagccccttcagaacctcgagttccactttgcacccaaacgaacacttgttgacaaagataagaggcaggagcaggtagaggattgggttttccgagaagtgggccaggtcggcgctgagggtggcaggcgtgtcttcagcaggtgagaccttgatgcagaagtctctccgctcctcaatcagtgtgggcggggcctcatgggcgtccacgagctggatgtggagtggggccagcccagccaggcctgagtggatgctcaccacaaagccacccccgcctccccaggttatagcactcacgttcttgatggtcagcacctctgtgtccagggaggtgaccctgagcatggggccaggcgccgtcctgttggcctggcctgggtactgg

SEQ ID NO: 1564278 - DNA, 4001 bp, Homo sapiens
gtggagcatttgctccagccagggcctgcaccatttgctgaatgaactgctggttgggtccagattctgatgtaggactcgtggtttcactaggtgcagcgctggacacagtaggccccgtggggccaccagagccggtggagccagggggggctgcagggccagtgggtcctatgggcccaatggggcctatgggggtaaaagggactatagggcctatggggcctatgggggtgactgggcctacagggcctatagcggttcccagcacccccacccccacacctggagtgaagctcggaatcaggccaggtgcttcagtggctaatgtctgtagcccctgctggatctgcattaaagcctgcattgctcttgggtttgacatggctgatagtgtgtctggattctgcatctgctgcaggaaggctgggagctgtggccgcatctgctcctgcagctgaggatttgcagtaaacagcgggctattcagcatcatctgtgcagccaaatctggattctggctcagcgactgcatcatgcttctcatgtagggcgccgacagcatattctgaatcagctgggggttttcagttatctgttgcagcaggctctgcatgcctggggtactaaagatgctggcgacataattagcggcagcaacggtgttcccagtagcattgctggaactattgccagacccactaccagtgcttgtggtcgtgctggtagttgcagaactctgggtagctggcggtggtgcccatggattgggtagtggatcgcgattttctgtgcgggaaggctgcgtaccttccccagaggaggaactactccccacggaggcaaatggattacccccaaactgctcttgtgcggcattcagcatcggctcttgaatgtcagtgtacatgcgccgtaaagcattatagccacctgggatgctttctagattgctaagagccaggtcttgatttctcatcatctcttgcatcatggctggattcctggcaatttcgagtgtctgcctcattatgtctgggttgttgagcaggtgactgatttctgggtttctctgaatcaattgctgcatctgtggattagccataatgagctgcctcatcagatcgggattcgaaagcatgctctgaacaaagggattttccattatttggatcatcatctcagggctggccataagctgctgctgcatctggctctggagctcagagaagttggtcgagctcaagcccaggctgctaaggcctgcaagtcctcccaggctccccaacccaaacgggttgctatttgtggaaataggtgtggagttactcctgggagtcgacgccgaggtagtgttagttcccgcggcattgctaggctgcgtggactggccctgaggtcggttctggcttttgatgacaaggtgaacagtcagcccatcatggatgccatgctggatcaaggtatcttgatcttttaagatttttccggcaaaaatcagcactagctgatcggtttgggatttgaagcgtttcgaaatcgcttccttaaactgctgaaccgagctgttctcgggcaccgcgaactcctctttctctttgggagtcttcaccgtgactttgatgattttaggctcagccggggcagcagccgagccttgggccgcagcagggccgcgggaggggcgcggggggccgctgctctcgccattctcagccatggcggccgcggtgacgcaggcgggcagggaaggcgcgggcgggcgaaagagagagcgcgagggaaggaggaaggaaggaggcaccgccgcagcgggctgggccgggtcaggcggggagcgcggagcacggtacctctgtgatgaagactgcggttccctggtcctccggtggagaaaggcctgggcgtaggccgctggctgaggtctccgcgctccggtctctgggcctcctccgccgccgccttgtgatccgaccgcgcgcactcccagcaactctggcagccgctccgcctgctgatccccgccccttcccctcccccagttccgcgctcgcctccccgccccctctgctgacgcggcgccaggcctagattgatagatttggctcggtcaaaattaaaaacttctgcactgaaaagaaaaaagggagagagagaaacaaagggagagagagaagagaacagaacagtacagagcaggcgaggcagagagggtgagacggagagaaggaggcggtagagagtcagcttctgtaaacgacattaaaagaccaatggagaatgtatattagcaatctgtaaggcagtaaaagggtgaaagcctgaatcgaacagatcccacgtataagacgaaaaatgaataataaagaactctgacaaagcaaaaagaaaagaggaacacctccagtaggggaagggaagaagacagagcaggagcgtgcattttacaaaaggagtgcaaatggccaatagacattaaaaaaggatgattaatttcactactaataaaaagaaatcaagttaaaacaataaaattctacttttggcttatcatattggcagggaaaaaaataatggtaaaccttcttgttgacagggaccctaaaaaatgccctctcaggctagctgaagtgtgaattgttacaaccatagggcaatttgaaaatatatatcagcattttgaatgtttccacctttatttagaaatgcctaacctagacacttcgcctaataatcggatgaggatgcaaaaatatttatgtataaaatgtatatacattgtagcattttaaaatgttatttaaatatattaactatctgtttacatgagattagttgagcacattatcatattaccatacaagaaaatatagagtgtctttaaaggtatacatgaaataaactgtagttatagggaaatcacagagtattttcaattatgcctttgtatatttctgtacagttacaaactatataagaatatatgttccaatatcaaaaatacaataaatatatttttattttaaaagcaatttttgaacagtttgttgtatatgtaaaccgtatgtgtaaaaaaatctggaaggctatgcacaaataagttaatggctgttagtactgtttgctgaaattatgaataattcttattttctattttcataagattttgaattttctgatgatttttgtaagtatgcactacagaaaggtattttggggaagagtatgggtagaaattgacaggcacataatagtagtggcaaacattgacatatttacctaatttaattacagattaagtaagagcaataaagatgtagcaatgctgagaaagagaacttgaaaaatagaagaaataatttcaaatttatctatatatttctaactctaggttaaaccacacagaaaattcttccccaacccccaccctctaccaagcatccaccaaagcaccactgctttcaacatttaacagcatttcaaagtcattaggtcacaaatactttaataaatctgaagataagaaaaatatatatatacaggtatgttatatccatcgatggagaaatggaagaattaatattattttacctctctattttattaatataattaataaaatacagaggtaaaaagatgactagctttaaatatgttaatatgtatagatctaaaaagccaaattaattagtattaggttgatgcaaaagtaattgcggtttttgccattgaaagtaacgaattgttactattatacaatggtttttgccattgaaagtaatagcaaaaaccgcaattacttttgcaccaacctaatacatgccaaacagcactctaatacattcttatgtatatttgaaatattcttttagaaatataccaaacttgcacccatgaggaagaggaaatggaataggatacaggatagtgagtaaagggaacttaaatatgtaaaaatgctttttatctttaaaatgaaagcaaatatgataaaatatcag

SEQ ID NO: 1564279 - DNA, 4001 bp, Homo sapiens
cacaccaggccgagatgtatcaagtttcatgttttaattatatacaactttgtgagaatgttaaacagtatcccaattgggaactgttggcttaatggatttgaattaaataaatgtttgtcctcgaagcaaaataagaagtaaatatttaaaacttatcaaacaagtttaagagtcacttatcagtactgcggctgaaattctacagtcaaaacagcaggtttaagccagggcaaaaaatgtgtcacacgaggagaaaacagttgcaatttcactcagttgatcaaactaaaaaaatagtaggttaataaaaataaccaaggactgtgaaaagtcacgtctatttataagactgcaataagcttattaaatgtgtaaaactctaggaagcaacgcaatgcacgagttgtcttaaacatacaaatgacaaagaaattccctttttacttcagttaccaggactcacctttattgtcaaggaatacataaccatcaaagcgatccctgaacaaaataatgtcctcttggtttttaaagttgatgtatgctctggcatacatatgaggatacaaactgcagagaggaaagcaattatgtaaatgtactcgcaggtgtctggcccaattacaagtatgcatatattaaagacaagctcaaaaatcaaatgaaaaacagtaggataaaaagaatgaaagaaacctttttcatttacccctttccttttttttttttttttacctcgtatcattagaaaaaaactcaaaataatcatgctcaggcataggttgaagatgttcctgaagctgctccttggtcaaagtgggaggtaatcttcgaattaccaccttaagaaatgcataaggaaaataaaattagtacaaatcagttttctgtcatacctgaaagaatcacagttcctgaagaaggctgggctttaaaatatgagatcacttgtaaaaacccaggagaaaatattcttctgcagcccaatgctcagaattagtcaaacataatagtaacgcggtttaaaaaaacccttggaaatgagaaccacctggagcaaggaaaaatcgcaggttttgctctttacagcagccctgcagtttaccaggtttgtgcatcattttcgatcacccattttttaacagatctagtggcaataacttagtaagccaacgctggtctttgtgggtgccacgaaatcttgatttagcaacaagtttctcccacgtccaacacatcttaaaacaaaatccttgcccattgaacttaagaattcaaaactctaacgaatacaaaaaatctacccattgctctcaaaataggatgctctcgatctaccctcctgtaccattaatcaccctgcactctcccccaactcgcctccatgaataatattcccatccctcatgtctccttcactatttaatatttctccccaattacacctttagttcctcattctttataccgtcgctcttccctcccattatcatctcacagctctgacctaaacccttcccgtttggggagtcccctcttttcctcacccccacccaggatttggccgggaggggctctccccatttcgggtgaatggatgaaccaggatgatgcgacttccattcaggcgaagagatagaaggagaacctgagaaagaaagggggcagccccattcccagccatcctccccgcgctgcggactcgtcccgccctctcccgggccagcggccgaccgggcaccttgctcagcgcttctttcttctccttgttgcgatcctgcttatcttcccccttggagctgtcccccgaggtcccaccaccgctgcctgtggccccggcgggggttaacagggttactcgcttctccttaggcctgtgctccttctcttccttcatggctacgtcccccgctgaagcggcttggccggaacggggttaccccgggcacaaacggctcccgggaagctcccgtcaaagctccgcccccaacaaatgccccttgtgataagtcgggccccacgttccattgggtcctgccaagctctcgcgagacttgggcctttcccagtgcaaaggttttaacacctggtttttacttcccgcccgccaagttcctgcgccacccaatcccctcgcggcccagactccctcggggcccgccccttcgcgcgtcattagcaattccgccatcttgaagtgactctgtcggggactacaaatcccggcatacaaagcagctacccgcttttgttgggcgttcaggggccagagctatctcagggtccctgtttgtgagtaaatcgaatcctttcatcttcagagttttccaggtcgaaagataggttcttcacgcttagtttccatcagataaactcaatgccgtccaaattttgcctcactaggggagcgacttgtattttttatcattgaattcagaggctttagcatttattttcctacaactaaaagaaaaagcctaacatttaaaaaactttattttccttatattgattaggatttacagatacttagtaaatactacaatattagccgagttcagtggcgcacgcctgtagtcccagctgctcgggaaggttgagaagagaggatcttgagcccaggaattcgaggctgcagtgagccatgatcgcgccgctgcactccagcttgggcgacagagcgagaccctgtatataaaaaagaaggataataataaataaacacaagatactgatatttaaaggagtaatatgactaaaatatacaagatttgttttcatcaccttattttagcaaaaggatccttctccccaggtactgatgtcccacagggaggggaataaaaataaaacccaacttgatttagttgcgatcaccatcttcacttaaaaagggccaattttacattatttataataactccaaactggaaacaatccaaatgtgaatctaacagtgattatgttgagtgacagaatctagacacagagtacatgttgtacaattccatttatatgaaattttagaaaaataaaaccacagtgatagaaagcagatcagtcggccaggcgtggtggctcacgcctgtaatcccagcactttaggaggccaaggtgggtggatcacctgaggtcaggagttcgagaccagcctggctaacttggcgaaaccctgtctctactaaaaacaaaaaaaattagcagggcgtggtggcacattcctgtaatcccagcactttgagaggccgaggccggcggatcacctgagatcaggagttcgacaccagcctggccaacttggtgaaaccctgtctctactaaaatacaaaaattatctgggcatggtggcaggcgcctgtagtcccagctatttgggaggctgaggcaggagagtcacttgaacctgggaggcggaggttgcagtgagccgaggttgtgccaccgcactccaacctgggtgacagagtgagactccatctcaaaaagagagagagacacagacacccatagaggacagaaaccaaattaaagatgcaataggagcccaaggcagaaagctgcctaagggccaactcccatttttgccgacctctagaatatattcccctgactctgcacttaaattttctcactccaattgtccagcctattcttggattcctattcctgtggctaaaacggtttccctgtatttgacatctgttactcttgctttcagtacctggccgttcttatgagccttgtttatgcatctgcctctgacctactgcttagctctgcacttgcatgttggtagtgtatgcctctgttttggtgtcctcactagctttaaaccaccagctgtttgtcagttgccagaataaagtgtcccagggctcagtccttagacctcttttctatgtacactcactcctttattaatctcattcattcttttggcttttctgtctttgctgacaactctactctagaatttacatgtccaggccgggcgtggt

SEQ ID NO: 1564280 - DNA, 4001 bp, Homo sapiens
aattgttcctaggaactatgaagaagggccttcatcccaagctaagggggccaggcatggtggctcacacctgtaatcccaacattttaggaggccgaggcacgaggattgcttgaggccaggagttcaagaccatcgtggacaatatagcaagacctccatctctacaaaaaaataaaaaattagccggggggcagtgccatgtccctgtagtcccagctactcaggaggctaaggcaggaggattacttgagcccagaagtatgagggtacagtaagctgtgatctcaccactgcactccagcctgggtgacagagaaagatcctgtctcaaaaatatcaatcaagctaaggatcctggactttatttggtaggctctgagaagccaaagaaggttgctgagtagggcaattactgaatcaaagatgtatgttatgaagattgattgtacagtaatgtatgggtgcatgtggaagagaggaaaaactgcaagcagagaaacagtattattacaatagtgtaagacaaggtttctagagtctggtttagggagtggcatctgtcattcagtagccatttttaaaagatcaaggcatgtccccccaacccctgccactaaaaaaggggtgttttgatatgctgctcatttaaagtgctgccaataaagaaaatagctgtagttcatcatggtacatatttccctggagaaaacccatttacaacgtaggtttagaaatttcaaaattacattttaacatgaagttctggctacattggtttgtgggattaggaagggccaaaggctcctttaggctccctttgatccattaactatgttctgtgagtttacagtgaaaaatgataagagttggacgataagctttcatgtgatcaagtaaacctgaactccaagactaaaagaccttgtttgcagtagcaaatactaaagggtcagggcctgaatagaatttccttgaaattgctttatttctatttatgaacctgaggtgattggtggtagtgcataaccttggatagtaaccatttctgggttataggtttaccatgtggacaagcactgcccacatagtataggggagtttacctgcctggaatggccaaggagttgtctttcctgggagagacaaagagcccagaggctacctaaagtcttcctccccacccaaagtgatgttagacaccggaacttggaaagagaaggttggcgttcgagttacacgacacacacacacacacacacacacacacacacacacacacaccaaataaaaggtcttaccccaatctccaaagtttgccaaggccaagaacactgtctcttagcccttttacttccaatccccgcccacagcctgcaagaccctccacttccctttccccttccgctcttggcttacttgtcacggatgatggtctgtagctcccgtatctgatcattcataggcagcagcttaagctgcgccccgatctgccgggagagttcgcagtcctctaggaaggagttgccagctggtgcgtcatagctgctactgtcaccactaccactgttgccctctgagttgaggctggagccgccgcaggccccagagtccagctcggccggcaggctagaatgggcgtaccccgtgaggagaatcaccttggccctggaggctctgtttccccctgcgtggtccaggatcagatcgccaggtcgcagctgctcgggacttggggttgaggcagagtttacttgctggttgtgacagggcatggagtccggacactgtaactccgtggccatacaccgggccccgggctatccccgctgctactgaacactaaagataaagaggaacgggtagaaaggacagatgctcacgtgctctctcggttgctcccgcctcctcagaacatctaaccctggctgtcctttcacccctaggccgctgttggtttcctttagcacactttggctcactcccgcccacaccagacgtactgcctgcctagacaccctattggctgcactccccgccactctgcggcgccactgcttgttaaccctttgagtcacccttgctacgtgggttcccacaggtagctaagcccccgcagcgaggccaaggatgccagcttgaaggatcttccgggggcccctggggcttctgcattcagaactttgggtgattagtagagccaggaaaaactgggggtggcaggtgatgatacacagttacacacgtaaggcccatgttttcagactttgtgacctagcagagaaattatatctcagtaaccgcatcttcagttagcttgtctgcataacagaaggaagaagtaaaaaaatgcctagcaggctgctgaagaggctgtcctctactagactgttctagaaactgcagcttcccaagtatgcttgaccgccaaagcttttcttatctttattggttgggccccacagtgtacacgttgtcatggggactcaggcggcatttcagatccactatcattttgaatctttaaagtacttggaaagacgcttatttttaagtgtatggactcactataacggcctgaggtaagagtgtctagggcagtacttttcaaacatcagtatgtaccacaataattgtagagcttgttaaaatgcaggttcttacggctcatttttgagattgtgattctgtagatccgagatgggatacaagaatctttttttttttttaacttttaagttcagggatatatgtgcaggtttgttacataggttaacttctgtcatgggggcttgttgtaaagattatttcatcgcccaggtattaagcctagtacccactagttgtctttcctgatcctctcccttctcacaccatgcactctgcagtaggctccagtgtgtgttgttccccactatgtgtccatgtgttctcatcatttagctcccacttataagtgagaacatgcagcatttggttttctgttcttgtgttagtttgctaaggataataggctccagctccatccatgtccctgcaaaggacatgatctcattattttttatggttgcatagtattccatggtgtatatgtaccacattttctttatccattctatcattaatgggtagttaggttgattccatgtctttgttattgtaaatagtgctggagttaacatatgtgtgcatgtgtctttaataaaacaataatttatgttcctttgggtatatacccagtaatgggattgctgagttgaatggtatttctgtccttcctttttttaacatgcctatacagatttttttataattttttttttatttccataggttattggggaacaggtgctgtttggttagatgagtaagttctttagtggtgatttgagagattttggtgcatccatcactcgagcagtatacactgtaccctatttgtagtcttttatctctcaagcccttcccacccttttcctccaagaccccaaagttcattgtatcattcatatgcctttgtatccatcatagctaagctcccacttatgagtgagaacatacaatgtttggttttccattcctgagttacttcacttagaatattagtctccaatctcatccaggtcgctgcaaaagccattaattcattcctttttatggctgagtagtattccatatatatatacatatatatatatacacatatatatatgtgtatatatatatatacatatatatgtatatatacacatatatatacacatatatatgtgtatatatatatatatctcacagcttctttatccactcattgattgatggacatttgggttggttccacgtttttgcaattgcgaattatgctgctataaacatgcgtgtgcaactatcttttctgtataatgacttcttttcctctgggtagatacccagtaatgggattgctggatgaaatggtagttctacttttagttctttaaggaatctccacactgtttcca

SEQ ID NO: 1564281 - DNA, 4001 bp, Homo sapiens
gtttctttacatgcattttttggtatttttatttattttaaaatggacaaaaattgcatatatttagagtgtacagcatgaagttttgacttatgtatacattgtggaatgactaagtcaaggcaattaacacatccattacgtcacatacttattttttggggggtggtagaacatgtaaaatcttctctcagtaattttcaagtatacaatgaatttattaactatagttgtacaatagatctgaacttatttttcttgtctaactgaaatgttgtatcctttgaccaacatctccccaattttatttcccctcgccatatataaatttatatatgctaatttttcaggcatttgagaataaactgcttacacgatgcgttcttatccctaaatttttcagtatttcctataaacaaggatattatttttcacagccacaatgatcacaattattagtagtactagtatctacccactttaataaaatttcaccgacgtttccattgccttttacagtaaaagagacaaaaataatcttatgataaaaaattgatttttaaaataatttttttttctgttccaggatccaatcgaggatcacatgttgcatttagttatcatgactcgttaaattgcattaattccttcaatttggaacagttcttcagcctttgtctttcatgatcctgacatttttgaagagtgtaggccgtttattttaacaggatgtccgtcaatctgggctgcgtaaatgttttatataatctttttaagtcttacgtatttcacaattaaaaaacgagatgcaactcggcgagaaataaaatgaactcagaagcagtaaatttcaagaaggactgtttagcaagaaatcagtaaaacaagccgatttatcaaaattctattttttaaaaaaacgactttttcttgattctaaaaacaaaacagtaccaacacagaaaaccaattaaacatggaaggcccctccggtgctaatcacctgcacgttctctcgactcgggaaggcttccgccagaatcaaaaaccacggcgcgtcataaactttgcttattcgcaggcgccattttctgcctcataggcaccacctcccctccactgtcgtccctcggcctcagagcacgcccctcagctcacgtcaccaacctaacctcgttcccaggctccaggctcctcccccctcccccacggaggtccccgctccctccctcggaccgttcggctccatcccgctcttctgctgacgtcacaaagctcgcctcgttcccagccgccccggagcaatcggaaaccgctcctcgcccccaaaagttgcattacgcagcgcaggccgcgcccccgccttatgtagcagaacccaccttcttcccaggttcctacgcagtttcactacgcaggcccggccccacctccaggaccgaaactggtctcatcacaacaaaccccattttgttctcaggcgtcagactgcaccacacaggccccgccccttttccagacgttgcgattcattcaaaggcacttccccgcccctttagcccgctgtcccgccggccactcccccgcccccgcaccccgcagcagctttcccgcggccctcggccgccgaatccccagcggttgtcaatgcccccaccgttccctctgccgaggctccaccgcagcccagcctcaccagctttcgccggcccgcagtggacgttctcgcccactctcgccgttttctatctggcgccactggctgtccaggcctggcagctcctcgtgctgtggctctctatcctcagtcaccgccgctgccgccgccacagccgccgcagcagcagctggatttgctgcgaccgtcgccatcgccgtccgttctcttctacagccaacgcagctgtgcgagattggaagacgcccctcaacagccacttccggattctggtcccggaaacggaagcagagccccccaaacagtcgcggggctactgccatattggaaatggccccgtgcacagacgcgtcgaagggctaggtggggtaaaatcttcagtgggaaccaagaaagacaaaagtgccttgtggggtcctaacgccctgtagacttagggcacaggtggcatggaaagtggaggctgaggttcccgaggtgggctaggactcctaccctgggagcagtgtttttgttagcctgatcagaatgcccttcattgtaccatcaaaacccaatgcaaaagaggtttccacctccagagacccaccgaggcctgcgggctgttgtttctcttcctgaactagatttattcactagacaaggtgttgaagacaagttagccccaggccctatgtttgttggagtcatagcaatcataactaaactagctgtccgcccagtttaagtgctttattggactaaaatagtagcctcaggcagcaggtactgtccttgtcacccatgggtaacaatggggacgctgagtaccagaaacgtccctcagctaattagtggtggagctgcagtttagacttgagaaatctggtttcagagctgtgaccttaaacaccaggccaaacattctccaaccgtgtggtcccagtggtcccagcctgtctaccggtccaaaaatcctcttggggtttcacaaaatgaaaactattttcacaatactttttcactctcattctctcaggggtgtacagtgtgattatccagaggcttctgaatccagaggctatatgacataagcaaaaactcttttgaatatcttaaacttttaagaacataaaggaatcccgagacccaaagtttgagaacccttggactaggccagggtctctcaacctcagcactgtcatttctttgttgtgggcattgcaggatatgtagcagcatccctggcctctacctactagataccaagtagtacccctcaggacaaccaagtatctccagacattaccaaatgtcctttgggggaaaaatgtctctggttgagaaccactgctctaggctatgctattctttcctctgctggggctgccagccccgttgatgatgactttaatttcgaacctcccttccccctcacaatttcataatttacctattttcagttaatctctgcggggcagggattgtgtctttattactgtgattccagcccccagcccagacctggcatagatgaggggtcacaaactcagttgtgtaagctctgggtgaggaaagggagcaggcctttcacttaagggtccccaaagaaagtggcatttgagttgagtcagacacatggcagatagctgctcttcaagcccagttgaatcttgtcagattctctgaattgattctccccattgcccctctgcagactccccctccccatttatctgggcagccaggtaaatccaagagacctcctttcccagccctagaccgtttttttttttccaccttccagaggccaacctctgcccacaccagtgaccctaccacttcccagagcagttgggtgagttctagaccttttaaatccagcctggcaatcctgtccccctttgcaaggccctccttttcccatcctcccttgctgccagaagtggccatgtcatctgattctagccaagaaatggcacaggaagtctgctgaggagcttgtggaagttccagccgttaaaagaacacagacaggtaaggaaggtgttctgtcttccctgcttgcttttccatctctggggacatggcagtcatcatggcaccatgaggctgcaagctgaaacatcactaaagtgcttagaaagacacggtagaggctgggcttggtggctcacacctgtaatcacagcactttgggaagccgaggtgggtggatcacttgaggtcaggagttcgagactaacctggtcaatatggtgaaaccccatctttactaaaaataaaaaattaggtgggcgtggttgtgcacgcctgtaatcccagctactcaggaggctgaggc

SEQ ID NO: 1564282 - DNA, 4001 bp, Homo sapiens
caatgaatgctcgatctcctgagtatacagattctagctcatttggtttagaattttttccaaggtacttttgctgctgtcttctgcttgcccctttaaagactgtctggccttttttttgttcagactccttatctgatccaatgtgtggagccaggatatctttggattcctttgttgcaggccatgatacactgatgtttccagaagtcatctttcgaataacttttaataattggaaatctgtaatttctccatcctcactcaagggaagaggtggtctggtgccttcattgcaatgagaagacacctttaaatatttggaaatgatgacttcctggtcattcttctttaatgcacaaaactcattcaagctatagcgtttgaggtgaacaataaggattctaggtagcctactgaatgagtgcactccaacggaagtcttgtgctcacattttgcacatttatactcaagctcttctgctccaaaaaaaagatcaaaagtagactgaatagatgaaggatgtgcttttattctttggggaaggttgatggagaggtaattattcagttctgtcttgagaataacctgaccacaagctttacaagcaatggagtgcaacaactctaactcaaaattagtaatgacagggcaagaaaacccactggtgtcaggatcatcagcaaaaacctgtttaggaaaattatcttccccaaattcacttttaggcttccaaattgtgttgagtttttccatgttatctttcagttgatctaaacagtgagctaaaaactcatgagcatcgttctgtgcattgccatggaatatctctgcagctgctgaaatggcctttttaagattcaagagtaacatctccttgatttctatattataggtatctttaaaaaaaagtagccgtgccaagcacatggtaagagcattaaggggaattttaccccatgggaaactctgattaagtaaatcatcagcaaacgatgggattgaaagtagagactgtaacactgcattcatataacaggtgtttcccaaattggggaggccgtggcatattttctctggaaataattcaaaaaatagttttaatttatcccactttgtgtaaccgtcactatacccttgttgtaacagaaataccaaaaccattttctcagtgagagcttggagaagaccaatgtcatctaggtaaggatttccagtggcgttcatgatgcatgaagattcacattccaatttcttattctcttctaactcttttaacttcaattgtttctctcgattatagcttacacacctcgaacaatctgccttggatttcttgtattctacagaattattttctttcaagaattcctcattcatctctgagctagatgagagcattcttttcctcttcttgtgctgattttctgataactctccgcaagtaagtgtcaattttgatgtaagcaaaggcatcctctgaaggacacctgtcccacttccttttgctatctcaaaagatttgctacttgatttctcatcaactttgtggaatgaagttttgttgatttccttctgtgttgtgctagaaaagacactcccacccttaccaggtctcacaggtggctgaacctcgttttgatgaactctgtccaagaatatcttcaattgttcagcatctgtggaggataatccttcaataaacaagccattattattttgtaaagttaaatgcaggtgattttggtttcctctataggatttaaggactacattttgaatattatcacttagccgaaaagtgctatattttccacttttgaaatacagcaccagtctatctttcttctttctttccactgcttcaatgaatgcttcttttgacttagatatcccagtcttgcagttccctatttggacaaaaccacgtaggaatagggcagccatgttttctttacaaataaaatatacgtatctccgattattgataatcttgaagttccaatctgttttgcaagttcagctgtgaagacaacaccaaagaaatagttcattagttctctacacagaatgatcctatttctagtattggttttatactagagtctagttcaggttctagatatccagctcttcagtaacgagaccaatgccttttgagagccttccatggctgcatgaaggcagagtcttgattcccaagacaagcacactatggcaaaaatcaggaaacattctttaaactattacagaaatgctttgcttcaacaaaactcaaactctacactcatacactacatgtagtttccaccaaaatactggactccattctgattaatttcccaacttcaattgaaatcatgaaacacttggaagactttcagtacataactgaaagtatactcaatagagtctcaagtgcatgcatacaatatgctaatcttcctgtcacagaatgaccccatggggcaactacaataagtgaatgagaaagtgaaggcactatgtggccctcaactcagtaacagatgaattgttccttgatttctagaggatctcatatatgggccactcaaagtaaaccagtctacctccctccaaatctagctatgttcctatatttcacttggcactggggaacatcattacattgtacttgctcattcaacaaaagtttaagaataacaacttcttacccattagatatataggctagtgaggctcctgcaggcaactctggctataaggcccacttaaccggagctagctccctgtattcaaaaccagtgaggaagaattagatgtacttaattattgaaaatcagaatctctgaacaactctggagccaatgtgaattactgaataagttagcagacagcactacaaatgtttgcatcagaaagtatacatccaagaattagttggaagctgtttcctcctcagtagttaaatattcttcctgaatcttctctatgctattaacttgcttaagcaaaccccatctttatgaataatactgaaggaaacttctgctcagtccctgtccaaattatcaaaatcttaaaattggtgaaacataaattaatgagatttttgttttataaagtatttcatctatcaacctatgttcagcgaaatagagatggcatccatccatatacgaaagtgcatatgcatccaagtaagagaatggttatatttttcatggtagaaatggggccataaaaacattcaagcacagcacaaatttaagttctctggattatttctatttcactgtcctactatagatgctaagtaaggatttaaacaattttctctccacagaaaaggcagtcttaattgttcctttttatttcaacaacttgagagaacctgcaaccatagaaccacttgcagcttattttaaaattttgcacccagctcatctgtatttatcaaaaattattatcttctttctattggtagatgaaataatctaagaccctcttgatatttcttctctctgccctcaaaaatacagttaagagacattcctttctcacagtccatcctgactacatttcattccagatgaaaggaggcttatttgagcccactgagcatggaaagtaaaggttaagaaccatcttgctgatgtacaagttgagtggtctaaccactgcctacatccctaagacatctcaagcttaaatcctgttcttcattctgccttgattgcttgctttgagagtattttaaactaaaatgtattgtttctccaagactccattgaagagcactatgtgactattccatacagcctaaaataaacttcagcattcctcctcctttctcacccccacaccagattcaaaacgtatagatgacagctgcattcaaaagttatgaaagccaacaggcttttctctcattttacctacaaattcaatccattcaatttgattgatcaaccactagtgcaacacttcagactcaaaggatagccagacactcaca

SEQ ID NO: 1564283 - DNA, 4001 bp, Homo sapiens
tcctgccttcctcacccagagtgtttctaccatttaatttccctttcatcaactgcttagactagagcctcttctccctccccttctatttctcttccaatcaggaccttttggacactgggtactgttcaattcttactctgtcaggcccatgggccatggtcaagtaggtcctttagatctcgatgccagttgtagtattggtgtcgtcatcttccattgcaggtaggtctgtgtgtcacttcagtaggcttgtgtgttcatttctttcactttttctgactcatgttctagcacctgtttgtgatagaacagtaaatacccttcactgtccagtacgtccttaatactggccttagtgatgacggcatcatcacacttgaaccactggtccttgtggtgccggatgaagctggtatagtggccactctccaaggttccttggtgattaaccacagcaaacaaggaatacttattttcgttgtttccactattggttggcagctgcaattgtccattcattctgctctctttacttgaggccataaacggcgtcatatccagctccagaggaaaggaaatgtatgtagtgatcttgcgcctctgtttcgctgaatgttcaaaccgtttgaaatgaaaacaggcaacgacaggtaatttattcattgtgagctgtttggtagattcctggtagctttggcaactaccacatttgattttggcactgcttcctaagtgctctggcctcgtaaacctccgcaagcagtccgtgagggtggtgattcctggtatgtggctttccccgttcacactgctctccctccctgggctcatgggccagaaggaggtgcaagagccaggcaagtccaaactaatgtcccagcatgggtctatcgtggtggagacgccatggcaggcttgacaggtgacatcagactgcaggccacctgtgaagatttggtctatgatgcagttacagtggttgggattgttggccgccttcccgacatcatcacctttgcagtgcctgtgcaggacatctaacgctgcaatgaggaactcgtgggcatcctgttgcctgtaccctgctaaatggcgggcatgtatccacaccaggtgcagtaacttatagggcacatgaggagacgggtttccagaatacaactcccgaaacagcgacgacatctcacagaccagacacaactcgggactcggcatctcacatcggtgcctgtcagagagaaagaaatctctcagtatcggcgtgtgggtgagggcctggacaatgcagttcataaagcacgtgttgccaagattgatgagtcctcttaaaccgatcgtaaagctggaggtgattcttcttctcctcgggttgtgccccagcagttctaattctggtttggttgtttcccaggttgggaatttctcaccaaggcctggcactgaacactgctggtgagaaacctctgttgaggtggaggcttgtaatttcaaagcttctccttgctcttctttggcaatttgctcaatgtctttgtcatatacatagtccttacacataaagcagtatatacctccgtaatacaggtctactgctaagttgtgttgtttcgtctctgcgtgctcgtgaatgtgtttctccgtgaagcagccaaagaagacacaggaaaggcaagagtggagtctgttcagatgggtgccacacacatggcagatgcaggactttgccttgcttttcctggtctctggggttccacaccacacgaagcactggtagataacccgcagttcctgcctccagttctctcccaccttaaagctgttcacgtgagaacagcctggtggccccacggcaaaatccacatccaggcatccgcccccagggccgcgccggggccggggccggggcgggggccggggcctaggctgcggcggggtacggagccgggtctggggccggggccggggtcggcggcgcggcgcacgactgcgacgcggagagggatcggggggccgcggtggatcggagggaagggtggggggaggaacctcgtcgctgttgccgccaccgccgctccgcgctgggttctcatcctccagctcctgcttcggctcctgctccgcctcccggaccggctcgggttcgggctccagcttgagctcagcccggcggcccggaccctccgccgtctccaccttcccagcggcgtccaccttccccgccgtctccaccttctcggtggcgtccaccttccccgccgcctccgccttccccgccgcctccgccttcccctccaccttcgcctccgcctccaccttcctctccgccttctccgccgtctccgcctcctctacctcctccgcctccactggcggcggctcctccccctgctcgcagggctcgggcggccactgggcgtggcggcgcgggggccacgcagacctggggtgtcccccgcccggcctgagggagcgcggtggctgtggcagctggacccaaaagggactttcactgaaggaggcggcggcggaagcaggcgacgcccccgggaatcctcccgccgaagccccctagtggaggctgcttctgcagccaggccccgtttcctttaattcagtattttccaaacttgcttgttcacgagaatcacgtggggagcgtgttaaaattacagattccttggctccacccgcaggcctactgaatcagaatctcgaagggaggtactccggaacctgtatctctaactagggccccagaggctgcttatgatcaggcaagtttgggaaacacagctctaattcattgaggctggcgggaaggggggcggggaccgcgcagtctctttaaggcgcttccagctctcggctccaatcgctgctctgacccccttcatcgtctcctcccctctcctcgtccttcccctcgtctatgcaggcttccctcggccactgcggggctgggggccgagcgggtgccaagtccagaaatgtttctgaggctgtgaaatgtcccctctgaggggggtcctagggagcgcaggcagaagccgtgacaggccatcatttcggcggccgagcctgcctctagcctcgtccctgtctcccttcccacgccaggtcctgcgcttcccgaaaaggatgaagctccagctgcagttctggggaggcctggaccccagctccgggggggccgggctaccaaggccgctgggcctggagaggcgcgtccctggcccatcttatcagcgctctgcagggtctgggcctgctgctcgcgtcctcctgggctcccaaggccacgggtgggttaatggcttgacagccggcctcctggcccagcagacgctgagcagcccgatggcacaatccacctcttctctccaaggccagctggagggacgaggcacgacaaggccatccctacagctggcacttcccctacagctgagagggggcctaaactacaggacacactcccaagacccttaagccctggcagcatcccgggggaggggggcagcaggtggaagtggaaagaagcctgtggagctgccagcagggagagggagtcggacatgaggctgagaggcctctgggaacccctgtgccaaggggctgctggcactgggcagcagcaccccagagcccacgaggagtgtgcccagagcaagtggctcagacctgggtcatggctcgagggtgtcgggctgtagctgctggtcccagagagtgcagcccagggcaggcatcaggacaggagtaggaggagaaagagtgttctaggaagagtctagtcccctaatcctggtggtggctggctgtagcctagtgcacgctgtctggcttgtgtggctgtgctgcctgagtatacataccctagcaacattctccttgctcagcactggacatcagctctccacctggccccttcctctagggaggggatggggaggcctcctagggttagcagcaggagttgggcctcaggaatcaggagc

SEQ ID NO: 1564284 - DNA, 4001 bp, Homo sapiens
tagtagactcctggtagctttggcaactattgcatttgattttggcactgcttcctaggtgctctggccttgtaaaccactgtagacagtctgtaagtgaggggattcctggtatgtggtcatccctgctcactgtgctgtcagccctctctgggttctgggaatcgaatgtggcacaagagccaggcaagtccaaactgatgtcccagcatgggtctatggtggtagaaacactatggcaggcttgacatgtgacatctgattgcaggccacctgtaaagatttggtctatgatgcagttacagcagttggggttattggcctcctgcccaccactatcatctttgctgtgtctatgtagcacgtctaatattgcaataaggaactcatgggcatcctgctgcctgtaccctgctaaatgttctgcatggatccatatcagatgcagtaacttatagggaatgtgaggagttcggctcccagagtacatagcatgaaaaagcgaagacatttcacagaccagacacaagctggggcttgtcattatacatttgtgcttgtcagagaggaagaaatctttcagtagaggaatatgggtaagtgcctggacaatacaattcataaaacaagtgttcccaagattgattagccctctcaggcctacagtatagactgacttttttcttctctttttcttgggtttcaccaattttggctcctgttcctttgtctcacaggttgattgcttgtcttcaaaccctgatgtcataaactgttgatgagaaacatctgttgaggtggaagttaataatctcaaaattttttcttttgtttctttggcaatctgttctatgtctttgtcatatacataatccttacacatgaagcaatatatgaccccatgataaaggtctacagctaaatggtgctgctttgtttctgcatgtttgtgaatatgtttctcagtgaagcagccaaaaaagacacaggagagacaagagtggagtctgttcatatgggtactacatacgtgacagatgcatgactttgctttacgtttcctagtctctggggtcccactccaaacgaaacgctggtagatcaacctcaggttcttctgccagttcttacctactttaaagctctccacatgagagcagcctgtgggaccctgaccaaactcgacctccagcaaccagtcccctaagccgccaggatcccccgacccgtctaggtcaccagagcagcttctccgtgtctgaggcctggacccaggccgggatctgcgccgggatccacgccaggccctgggccgcggtgcgggtgggggcgggggtggcggcgggggcgggggccgggctggaggcgggggtggggccgagagcccaggctggctgcgggagcgggcccggggctggggccgagggcggggcttgcggcgcgggcaaacgggcgaggagctgctgtgacagcgaagggggattgaagggagcaccttctcgtcgccgccgctgctgctccacgtcaagttctcctccggcgcgggctcacgctcttgtaatggctccagcttcatctcctcggcttcacgtctcgaagacgccttcgtagcccccgccgccgcctcctccattttccccgccttctcaaccgcctcctcaggagaggctcctcccccacctccggagatccagcggaccccagagccggagggcaaagaagtttctcgaacctgggccatcagatcactccccgacctgaggagcaaggcgtctggaaaacagctgcgactgtagatgaaaggagacagagacttctgtgaatgatctgcccagcgtcatggccgcggtgcgcagttagcgcccccaggacccctcccatcggcccttgagctcagcccgcggcttctgtcggctccacccactcaactgagaggcccctggagctgatggggagaccgaggcggttacctgcttcaaaggcgatcagatcatgccaggggactgggaacagaaggctagcgagcggtgggggtggggaacggcctgagctttaggacagaaaggatggaaacttctttaaaaaaggcgccaccctctgactgcttttttgcgccctgcgcagcctcgctttggtgcagcttcctctgacgttctttccctgtatcctaaaaaacacttgggtcaacattttctctccaaaatggctgaaaggacgcacttttggaaaatgaactcacaggaagaaagtgtccctctgtttctacctaacctatacttctgtgacccggtgtgttccactctaagccgttgcccctcagcgcactttcggtccacccagctcttgcgccctctcacgctttttcgcgcttgtgctctcacaccccttttcttgcttctgcgacttcaattcctatgatttctcctagaattcggattactactccctcccttcacgcatttgccacctctatggccaccactatcctcgcgcgacccccgaagtctccgctcccttttccctctcctgcccccgcaacacccccagcccggcagtttgtttaaaggtctgggttaccttgggccccaggcgcgtgatatagaacgtcagcaactgctgctgtccaggcgctcctcagccagccttctctcctgacctctcctcagggctggtcacaagggggccgccccctggcccctcccctctcgacgtgcggcccccaaccccggattctgccctcctgcagtgatgaatggcaccgctgtcccgcgcaggcaggcaaacctcttcctgaaacagactctgctggaggcaacagcagcaacagattctacagaaagcccctgaaatggaggctcaggcctcacctagctccaggcccgcactccacagaaaaaaagattcacccggcgtgggggtgggggcttccagagatggcaaccctctggcaggaatccctcaggatcctgtcagagcctggtctctgggagttgacggagggagggagggagagagagagagagaaagagagagagattatcccagaatgtgcaggggaggaagcataagcaagggctcaggctcagagagacctgagcccaggcacatgcttgctgtgtgacctcggataaaacacttaacttctctgagccttagttgtgtcaatttttaaagagaaattgaaataataaccctagcccaatgtgaacactgagtcatagtatatatcaagtaaaagacctttttggcgagctttatctgtcacacctcttttttcagtccgctcctgaaaatcagcatagagaacaactcctgatgcagagtagaggagaagagaatgcctttctctttcaaagctctctcaaagttatggctcagttcacccgatcatccatcctaggcagtccatatacaggagcatgtattcaacaaagatgccataggtgcattatagcgctagattgtgctgggagaagcacaagatacaactgtttgtgtcctgaagtccatacgccaggagacttttccttttctttgacagatccggcatccaaggcgacaacccggaggaaagctatctccagggcttgttgcccttccggtccaatcccaagaaaattacggtttattacagcggatgtttaatgctacatttaatctctctgagaaagtcacacacctcccctcaaaacctcacgattaggattcagctctcttaacttggcagtggcatctagtggatacctccgcacaatggatatcactgattttgtgacttggtttagattcgaccatatctcagtcacatactagcacccggagggaaagtgctttggaattatagactggcttgtgcaggaaaacgtgctttttctcccctagggaagggcattttctcagccacagctaagcaaagagttgctccactctgggttagcagccctagaaggaaatgctgagtcagtcatttgctagctgtgccacctgtggcttggatccca

SEQ ID NO: 1564285 - DNA, 4001 bp, Homo sapiens
ctttcactccacccaaaagctggaacgataaagtttaaagggttaaagttagatgtatgacacagcacatgagtttaaaaattgagaaaacgaatgttgacacttttttatatttaatacataattcttcaagaatttgaaggtatttgctgaaaccaaaatggcagcccagcgaattagaagacgagcgagatctaaaggagagtttatagtctctatttttgagttcaagtgtactaaccagccaagctagtcatggttaaggagtccttacctaagggtaatcagctccgagagggttaagtacctgctggaaagtttcctaatcaatgcaccccaaatcattcttcctcaaaagtgaaagtatacaaacgttaagtagatttagggactcatgggtttccaggtaaaagaacagtacacatacttctctccccgaaaaataaagcatgaatatttaatctatacctacaacttgcttatttaaactaaaagacaatctgaagcaattatatacacctgtaaactgcaccgtgtaaattcaattaacgttgtaactatggaacttccaaaaaataacatgcttaatttaagcaggttctactagaaattttgcaaattctcgtgtaagttctagtcgctacagaaatccacacaaataatttaagaagccatctacacacctgctgtataactctttaacttatttcacaatgaatgaaaaatcagccatttatccaaccctaagcctcacgtcacaagaatctgaagacctgatcactaccaaactcgcacatgctaatatttgcagaaacagttaaaaatagaaaggtaataggtccaagctagcttggaagcgatttctgcattcaaaaacccctttcacggctttggccctctgcaaataaagcggggcgaaggaggtgtaggaggccgataacccagctcccactccaggagcccagggccggggagaaactgcgggttatcgcgggagggtggggggaggcggacaagtcgtcaggcctgatagccaggcgtagccgaggcctagctccccagctccaaatcactccacctcagtaatggcgtttggtgtcaagtggaaccagaccgggtaggaaagcggccgccgggcggggggcggccagcccccaaaccgacccggcccccgggtgcggacggcgggggggctgcccgccacgcccggagactccatcctcctactcggccccagacaggacgggaagggggaggagggggagggacggagccgtcagccattttcccttacagtccaaaacacacagacacgctctcgggacaccggctccacacacaacacgggcccgcgcgcccgcccagcccgggccggaggagggggaacggggaagccccagcctggccggcagccgccgagggaagaggctcgcacacacgcacacccccctcgccctcctcccctcacccacatccagctgttggccccgggaaagagcgtcgccccagtgcagctggccactcaccgcacgacacagacgtcttctcacaaccagggcacacggaggcgggaggcaccaggcgacggtggggctcggtcccgggacgagacctaccctgggtgcatcccaggcccgggggtgaccggcaacaaagtgtatcgaaaggctgcggcggccgggctcggggctgcgggcgtctcaaccaaaaggctgcacaccggcgccggaactcgctcctcgccgcgcccgcctcctcctcctccttggccggcgacggccctcttccccttctcccctcaggctggggctctcgctgagctcagacgggctccgggcggtgcgtttctcctgcgtcacctcctcctgctcctcctcctgcagcgacggcttcaccttcccctagtcgccgcctctgtccccgctccaggcctggtggctttgaagtagctcgctcctcgctcccggcgccgacccaagcaccgggcgctaaggcggccgcctcccgtgagagagaggcggcggcggcgggctcccgcgaggcccgggagctgtgtaaggcggggaggggctaggcgcgacagaggccctgacggggccgggtgcggagaggttgcggctccggcggcggcggagactagcgtccgcagccgcggatgcccgtcctcgtcaatatggcggatccggcaaaccaaaaaaaaaaaaaccgctcggccagtggcggcggcggtagcggcgacggcggcagcagcggtggcggcggcggcggcggcgcagactcccactagccccagagccgcccaagacccgaagttctccgcccccgtcagggcccgcccctttcaggcccctcctttcggccctccccctgctcctgcccagccccctcccgctcagctgccccctcttctctccctccaccccgggccgtcaaggctgggagagcagcgcgagccgctgagggggccgggcttcggcgcgagccgccgggaacccggagagctagggtgggggaggggaagacaatgcggtaaagattgttcgcgcagtactgtttcttccggctggccccttcagggtcgtgctacggccagaaatcctgttccatgcccctcggctcaggagcgggacgagggcagaggtggctctaggaccgaagttggggaagggaggcccgaaaagatctggcacaccactcgggaggggctgggcggcagggactggcggggtgtgtggccacgacagggttaatcgcgtgagccgcagccgcgtcgctcatagtttgactcgggccgcttgtttttgttccattgtgaaccgtagccccgccgacaagaacccggatgatgacgtcaccggcctcccccttttccgggaccgtggggggaggggcgcggaaagatgagatctcgagaccacgcgctgggcggtcgccgccgcggtgcctggaggtcccggcggtgcagctgacccgcgtcacgtgacgcacgagctggccgggccactggctgcgggggcgcgaggtcccgagggcctggccacctgcttggcgccgatagggggaaggtgtggctatctcccgcagcggaaggagggggcgtggggagtgaggtccttttccccaccccgcgagggaggtgctctgagaaactctttcacacgatcatgcatcatcactacctcaaagcgtttaggcgtcctcaaagcgtttaggcgtcctcacagcctagctgacgggactgaccacctttttggccataggagcccttcaaacagaccagcaaagaaaaaaattataaagtgccccagacggcttagcgaataggccgtacttgatgtggcaagattagcctccattgccagatcatcagcacaattcggtgttaggacccggaagaaacttatgaacccatccgctgtgtcatggactattttctacatgtttatattccaaagtgcgggcataggaaaaacttaggctaatctcaaattaatggggtgcttggaacaaatctgtacagtctacctaggatgcccaaatgaagaggaaattaacagttcctaatttacagatttccttttgacttaaaaaatacctgtggacatcaaatggcatgcaaaatcatagtaaaaccctacaaaccgagatctattttatagagaagagggttgaatttagttatgctatgattatatcagtttgtaataaaagactgttaaaaatggaaccaaactaatgtaggtgacagtgaaagcaagttattggtatcttaaatttttaaaccatttctctatttagcacaagattgtttacaaatttttcaccacaaattatctaatagggtatccaagatgtatcattcatagccctaataactcttagcatatgttaccttgtttttataattatttccatgaatcatttgcttccccactagctcatgggcttctaaaaagcagacacgaccacccgcgtacactataggctgttattttctattt

SEQ ID NO: 1564286 - DNA, 4001 bp, Homo sapiens
ccatcaagggaactgattgcttccagaagcttttgatgctttctctctccatcattgtccccctaagacacagaaaaggaaaaacaatcaggatgagggggagggaaaagacaacatggaaattgagtctcatgtaaaatctcttgttatttatttatttatttttgagacggcgtctcgctctgttgcccaggatggagtgcagtggtgttatcttggctcactgcaagctccgcctcccaggttcatgccattctcctgcctcagcctcccaagtagctgggactacaggcgcctgccaccacgcctggctaattttttgtatttttagtagagacggggtttcactgtgttagccaggatggtctcaatctcctgaccttgtgatctgcccgccttggcctcccaaagtgctgggattacaggcatgagccatcacccgggcctgttttggttggtcttataaattatacttatgcaacttgagggtagtgattgtaacttagtttccaaatcctcatagcacttaatatgatacagtatcttatatatgaaacactaaccatttgcaatttatttgagagacctgaacaaatacatagaacattgtcacacccttccattccaggaatgtgctctctaccctaattttgaaggcagtttagcaattgtcacccacctcatcttcactctcactcaagaggtagtcttttggcaaatccgctagttcttcctgttggctcaaagccagaaggctgttaaaagaggcaacagagaaatgtgaatgcaatatacccatgtaacaaacctgcatatgtatcccttaattataataaaagtcgaaattaaaaaaagaaatattattatttgaagcaatgtctaatctattaaaacaatctcgaaaacattgtaatttcagcacagaatagccctatccctcagaagatatataaagcagcgtgaatgcctttggaaacttgtcaagatgtgaaatttagactgaagtcaggcatcacctccaagagtgatgcctgacttcaaaactgcatgtaaaagagctatcacttttcagggattggcacaacatttcctatgacctatgggaagctgtaaaaatgtcagaccctagaataatatggccaaagacgctgttgctagctagccctggaggcaaggcagtttcacgattaatatttctaagcatcctccatatatttgactcattgataggcagcctaatcaaaagtgttatcttgatccttgttcccaggaatggagaaacaggtcgaaagcagctgggtaagccactttccctggggcttgcttagtaaagtaggtgcttaactaaggagattggtacccacaaacaaattataaaatgtaccattacctaacagcatatattattagtatttgcaaagccaacattactaaacggactacatttagttccgggggcggggtggggggggcacaaaacatcacaggagccaaaacgtggtggatgactccaatcagcaaagctttccaagattcggggagtttataacgcctgcactgcctgcgcagaggattaaatcgggccgcgacagaggcagaaaaaggggccacgtgacgaaaaatgtgaaacacagtaaatgagctggggaggcagaaacagcatcaggaccaacagggatgcggctatacagctgaggagcggagtaagcgaatgaaattaaattaaaagggctttaaaggctggatcgcggaaaataggaacgaatggccagctcttcaggggaaccactgccatctgttaaagggggggctcccatttcccaaaagctggggaacccggcccccaacgagacccagaatcccccctcccctcgttgcccttcacctctctgcaagccggttcgcagtcatttcagcagccagcttctctcacatggaccaagaacggaagccgaaggaaagcaatttccgtgcgggccgcaaagcaatttctgtttccgtcaatcgctcgcgacgtacacgtcacttccgttccgtacgaggcgtgagagaagcaggagccgtgtagggaggggcctgcagaaaactgggaggcctgagatgaaacggctgtcagcgggtggggcattcctttctccacccaccccgtatttctctggcgcgcgggtgtctgtcctcctggcccctggtttccacgtggcccaaggtgggttagcttagggcgacggtgctgcgctctcaggggctgagcccgcgccttcattcgtcactgcagaatccagaaggaaagactacagcgcccgtccttgtgcgacggcgtcctgcaagccgaccacaagccagctcgggggtttattgaatgcctattaagtggccagattgtgccgggccccggagatccgatggtgaacataacaagtttccttccatttaaggaaaaatcgcctttgatcccttgtaattgcagctttgttcttcatttcctgagtcaaaagattttttttatccaagaaggggccatcagtaactacgcttcctcacctcccatcaacttaaaaaaatttttttaaacaactttttttctcccatcaacttttaagaattttatttatttatttttgagacagagccttgctgtgtcgttcaggctggagtgcaatggcgtgatctcagctcactgcaacctccacctcccgggttcaagcgattctcctgcctcagcctcccgagtcgctaggattacaggcacccgccaccatgctcggctaatatttgcatttttagtagagacggggttttgccacgttggccaggctggtctagaattcctggcctcaagtgatctgcccgcctcggcctcccaaagtgctgagattacaggtgtgagccaccgggcccggcctaatatatatatatattaattaatgattgtagaaaaataatagacaagaacattcttttcattttttttttttgagacggagtctcactccgtcgcccacgctggaatgcagtggtgcgatctcagctcactgcaagctccgcctcccgggttcacaccattcacctgcctcagcttcctgagtagctgggactacaggcgcctgccaccacacccggctaattttttttttttttttaagtagagacggggtttcaccgtgttagccaggatggtctcgatctcgtgacctcatgatccacccgtctcggcctcccaaagtgctaggattacaggcgtgagccacggcgcccggcccgttcttttcattcttgtaatccattcccattttgcttttgccccattattccacagaaattgctctggacaagatcagcgacacccaaagttgctaaataaaacggatacctctcagtctttggcttcccagaactttgtgtggcatttagtaactgttgatttcttttcttttcttttcttttcttttcttttcttttttttgagacggagtttcgctcttgttgccaaggctggagtgcagtggcgcgatcttggctcactgtaacctccgcctcctgggttcaagtgattctcctgcctcagcctcccgtgtagctgggattacaggcatgcgccaccacgcctggctaatttttgttttttttttttttttgagacggagtctcgctctgtcacccaggctggagtgcagtggcacaatctcagctcactgcaacctctgcctccctgtttcaagtgattctcctgcctcagcctcccgagtagctggactacaggcacatgccaccatgcccggctaattttttgtatttttagtagagatggggtttcaccgtgttagccaggatggtctcgatctcctgacctcgtgatccgccctcctcggcctcccaaagtgctgggattacaggcgtgagccaccgcgcccagcctaatttttgtatttttagcagagatggagtttcgccatgttggccaggctggtctcgaactcctggcctcaggtgatcctcccacc

SEQ ID NO: 1564287 - DNA, 4001 bp, Homo sapiens
actctgtgaggagagagctcttacgatcaatgaacttgagagcttctgccagtgtcaactccaggaaaaaaccatatcccagggccacatagatgcgtgaagtatctgggctgaggaaagagaggttagaggaagtggggagaagtccttatcactgtttagcatagtttatgttttgctccccacccttccccaaattgaggctctgggaaggcagggattttgtcctattttattcactgtcacatccccagcacctagcttatatcctactgggatataaaacctcgcatagtgcctggtacatagaagatactcaaaaaaatataagttgcatgagggaaggggtaagctgaaccctgtgggctcagaggggcgggtagacactcacaccactgtgtcaacgaagaagttacagcccaaatccacctgcatatataactccgagtgcttagcttcctgtggggccagggaaaaagaggtaggggtcagtggtgaactcttaggtcaggtgacagggttgggtctggagtctctcttcccatttccctcccttgcccacacataccaaaaaaatggtacccaatcccatagtctttacctggagtcgctcaatgacatttctcagttgaaggtatttggccagctgctcatataccttgtctcgatggtccagcacctttctgatgggacgaaagtacaatggtgaccaataggcagccccattcctcctagtatacctcatatcatgaccctctgagactctcatgtcaccatacactgaaaaggctttttagtgcataagttaattttcggctctgggtcagactgcctgggtttggatctgggctctatcctttatagatgtgtgactttggcaagtaaataacctgtttgggactcagtttccccatttataaaatacagatgacagtattaccttgtagagtcattaggattaaatgagcgtttactacaaagcatctagaataatgcttatcaaatggtaaactctctatatacatgttagttataattactattattatactcccaatactgaactccaatcataatgtcccatcctcaccctagaaaaatcctccatcccttttaggatgctcataggcctagttctgaacaccttatttcctgcttagattaacaaagattgcaataatatttcttcatactcattgaacctctactatgtttcaggcatccatgctaaattcttgacaaagatgggacacatcaaaaactcaaaaccactgcatggggaaggttccagaaaactccccatttcacagaagagtaaagtttatagggcacagaaaggcgaggtaggacgtattcacaaggatgaagaatggccgagccaggattcgaacccgagaactgtggctccagaaaacaagccttaatctgttaaacatcggaggccgcgcatgcgctgacacgcccctgctatgaacgccacgtcccagccaaactgcaccccggatgtcgtccccacttctcgctccaaggagcgcggggccggactctgaacgcctcgcccgccaattcaaagggttggccctaactttgaacgccccacccaccacgtggaatgttccaaacgccccgccccccgcactgtcactcaccgcaagtcccgctgcagcacgtcactgatgaaggtctcgtagcgcagcactttctcccccgtggcctccaccgcccgccgcttagggggcgtcgccatgatgggctcctggggagtggggagggggaagaccatgttgaccgatccagtttggcctcacacacagttcatctctaccctctcaacgctgggaatcggcttgtccggctcaagctggaggttcagccttccgcccctcccaactcggggacccgaccacccagggacacccaagcgcggcctttacctcaggccgccagcaataagaacggttggtaggaaccgcggcttccgggtggcgcgggtgaatgacgtaagtggcaagcgcgctggccaaccaaatagccagttggggaggggcgggcctgagtggaagaagacgggccaaaggggagaagagaagggcagggcttcacggaatccgaggagatcaaagaagactagggcgtgcgagcaggggccgtctggcaataaaccggccaatgggggactgcaaaagcggcgcctggagcctatggagaccgtgtgtggctggtgggggtgggatttaatgggatttggcgggttctaaggtaggcgcgacgcacaggtggaggtagaggaagtgaagagtttaatatttaaaaggacctaaaaattgactatggttctggtctataaggaagatcccgtgtgatctgtcggcctggatattgatttttcacacgggaggtttggatttcactcctggcaatgggactgagtataagcatttaaaaggttttaaacagagacaggttttctaaaattcatctttgataactccagctctgcactcgcaacccataagtgaggctcaagtggaaattgacaacactctctgtctaatcacctcgtttgatagtcaaatggagagggtggctgaagtcctctgccgaagattggccatcttgtagttaggcatagttcccatgtttttatttaaatggtaaggtttttgtgaatttattcttatgcactagagtgactgagtgaatttatttttcaggttagattttcaaacaagaacttataacccagcaagaatgggcctttgcctggagaagaatccagaccatgggatgaatccccaaatgctatttccatctgtagagcctagagcacccacccctaccaaggaagtcttcccagataatttgtgtttcatatgtaaaagcaagttttttttttcaaatgctcaaaacccaagcaagttaagcccttccttccttccttccttcctttcttttctctctctctctctttctttctctctctctctctttctttcttttttttcttttttagacagggtctgtgtcccctaggctggagtgcagtggtatgatcatgactcattgcagcctcaacctcccaggctcaagtgatcctcccgcttcagcctctggagtacctgggactactggcatacaccaccacgcccatctaatttttaaaaaagtttttgtagagacagagtctcactatgttgcccaggctggtctcaaactcctaggcttaagtgatttgcccacctcggcctcccaaaatgccgagattataggcatgagccagcacacctggccaagttaagcttttctttgcccttagaacgagataattgtaaaatgaaaacattgagattagtttttttggtctgtaaatctcatgttacatatagtttaaattacattgagtgtgattggaatagatactaggtagaaaaatattatctagttaatctataccactttcctgtgaaaagagagaaaagaagacacatatttatttaacagagaacacaattctgatgggctggagatgagtctgtgtaagtctattaacttatatttcacaaaaaagaattttttacttaaaaatgtatttccaactttatttttacatttcaaacctacagaaaagttgacagtgaacactcatataccctgcacttaagttcgccagttgttttattttgaatttttaaaatttttttagaggcagggtcttgctctcttgcctaggctagaatgcagtggtgtgatctcggttcactgcaacctctgccaccgggctcaagcaatcctcccgcctaagcctcctgcatagctgggactacaggcatgagccaccatgcccagctaattttttgtagaaatggggtttcaccatgttgcccaggctggtctcgaatgcctgagctcaatcagttcgcctaactcggcctcccagggtgctgggattacaggcgtgagccaccatgcccggcctggattcactcgttgttaatatttga

SEQ ID NO: 1564288 - DNA, 4001 bp, Homo sapiens
acctttggtgaatgagaaggttgaggaatacggctgatggccttacataaagaaggccttgtataaatcatgtcatttaaatttgatcaaatagggagtctatttcagttcaacacgtatatactggtgggttactatatgacagtcaaagtagacactagaggtataaagttaaggaagaagggactcctatacttgagggagccatagaacaatggggaagacagatataaataaatgcaataaagtataataagtgaataatctaagaatgtccgcaattgctcaggaaatgtcttaatgttttgtgatgatctcacctcggatgaagaacaggaatgcaggtgtcagcctatgccttagaaatttcctcagtatactgttaggattatttctccttggaagagaggtcaaagtgtctattttaccctattttcccagtgctcagcacagtgcctaccatctaatattccctcaaatatctgttgaataaatgagtgaacattgagcatattttggttttaaaatatactataaatggtagataactttatattcagaaggacctggtaagaataatattttcacaaccaaactatctttctaagtaagataaagcagttgagctaatagtaatccaatcccccactcttctctctgggtcttagaaggaataaaccaactacagataaaccatgaattctgatgcaataaccttggaggagatagaagaatgaagaataaacactgcttagacaggggaaaagaagaggtgtttacgaaaagtcatgttacagatcaagattattcctgttggtattacaactattctttctggacgatgccctgacctctgactttcttaggataggatcccatcctttcaagtcaaccacctgttttattttgcattaaccaatatataacataatcctgattattcctgttttcccctctagacacaaacatgtaagttcctgagagtagcaacctcctaagtcttgtttacagctgtatcccctgcacttaaaagagtgtcaagcatataccagccgttcaataaatatttgttaaatgtatgaatggatctgctctcagccacaggtattcaaagggaattaatatcctaaacatgactgtatcctctgggatcaagggagggataatggagatacaggtagttgaaagcaattaatgaggccaaatgaagacagttggttggttgtgagagttatgggagacggagatgtaaagcatttaccaaagtacgcagtcagaatttgataaacattggccattaataaaaacaccaaacaggtctgaagctgaggaaacgggtctaggcagaaatacagtccctgaacagaggaagaaggggactgtcaatactgagcagtggaggaagggcgaataaggggctaggaacccacgaaggagcataaacagccagaagtagaaggtgaagcagaaagtgacgtcatcgaacaaggacgtagagagtttttagaagactctggcgatctcaagagatttaaatgctacagaaaggtcttgtagaatacaaactgagagaaagttaacattttttccctcctgtaatgacagcttaagtgacgcattctgacactctttaactcgaggcctttccagtggcataagacgcacctcgccaaaactggtcctgcccgacaactggaactgtcgacaccagagaagcccaagtcacccctgcactgcctcctcgctccaccccagcacctttccatcgacacctccgccctccctccgcagttctctccccgcctcccgcaggcgcaccccactccatttacctgtccgggcaccctctgagggcgcgcgggctcgggacggagggacgcgggtcagtgcagggtcgccaactgcccgctcccagaggaggctgggaccggacgccgctgacttccgcatgaagcgccccgtctacgcgtggcctcttgggagtgggagcgctcctccaatggcagcaggcgacacggctaggcctgctgcgttcccagccccccgcacttcccaggagccgtactgcattctgggagtagtagttccggttggagtatcactgagtgtttcacgttcgttcgacagctcttgtggtaaacagcgtcaaatgccgtatagggatccaggaaaatgagaggatgcaggctagataaagaatctaccagcaatgagtaggcggcataaatgaagagccaagcttgccccgtctctcctgcttagtctcagtaggcagcgtcgcccgtttcctcacagacaaaatagaattcatctgacaggaactgcctctactttcgccatgaaattttctaattttcttgtacccctcaccaatcctttctcctattctttttgcaataataataataataaacgactactctcctttgatctaagccagccctcttccatctctattccctgttgccgactcagagtcaagctcctctgatgaacccttccgttgcatgactcctcaacggctctctgctaactcgctctttactatcaggacttaaaggctgtcaaaatttctctcatctaaaacattccaaagtcacctttcttaaccccataccccaagccccctcatcaaacacagaccaaacacagataagctagtggtctttctctcacctctcctttacagacagaattctcaacagtgttgctaaaacaaatagatacttttaagccattaccgtatttcaactctgcaggactttagtttcattattccttttttttttttttttttttttgagatggaatctcactctgttgcccaggctggagtgcagtgccgcgatctcggctcactgccagctccgtctcccgggttcaagcgattctcctgcctcagtctcccaagcagttgggactacaggcgtgcgccaccacaggcagctaattttttatatttttagtagagacggggtttcaccatattggccaggctggtctcgaactcctgacctcataatcgacccgcctcagtcttccaaagtattgggattacaggcatgagccaccacacacggcccttattccctcctttttgaacccctttattctgttagctctttccaagaactacaccctgctggttctcctcccacctctgtggcagctcttcattttctttagaaatgttcacattccatagggttctgccctatgccatcttctcttcttactcttcacactcttcctggtgatcttaatcattccccttgctttatctcccctttgcaaaggttcgcatttggtattaatatcaacttaattatattgtattcaatatctattctttaagaggcagcatagtatcctagaaaaagaatgagttttagagtcagagagatctgagttactaagctgtgtgaactctaaatatcgcctctctttagagctttcaggactctagcaaagccccctcttactccatattctctcctaaagtaatcttatttataccctaaaatttgtagtgtaattatctggccatgtaagatgtgcctgcttcccgtttgccttccaccatgattgtaagtttcctgaggcctccctgtcagaggtatgtgaaccagaacaactttgtcttgaataggagctgggtaaaataaggctgagacctactgggctgcattcccagacagttaaggcattctaagtcgcaggatgagataggaggtcagcacaagatacaggtcataaagatcttgctgataaaacagactgcagtaaagaagccagccaaaacccaccaaaaccaagatgatgacgagagtgaatgtacacaggctaatttccttaatatggttattttcagcatctagggttaccatagtgaatggtggggcactgataaacatggctatctagacatttagaaatagctcctgtataagtgttcatcctagggctggcaaatgcagaccctagaagggcaggccaggaaa

SEQ ID NO: 1564289 - DNA, 4001 bp, Homo sapiens
gcaagcatgttctctgtttcccataacaactctctaagtattgtcatccctatttcagttaaagaaactcaagctcaaagtggtaaaataatatgcttaaggttaagcagcaactgggaagcagagccaggattcagaccctggtctatttagaggccaataatctttctacaataccatgtcacttcaattattaatagtttggaaacataaacagttatataaaatttgggttgcttattacattatgttggtagaaattttaaggtctagaaaaaaataaccacgacattgtagggaaaaagcatttcaagacattataaagccctcagataaagtgtctcctcccgagttagatttctgacgccatctctagctgagcaccatgaatgtaacatttaaggccctatggaaattcaattagacacttagtttgagcttatactatgtgtgaggcactatgctatgaccaggagaagtagggcgattcatgagaactacctcacctcctcccagtagcagagcatgaggggtaagctgccagtctggacctccacggattgtccaagttcaaaccctggatacctcacttacatcctgtgtggcctggggcaagttactcaagtgccccgtacctcagttttatcatctaaaaaacgggcataacagtagtagctaccacctcgagttttgtaaaatcattaagaaagtgcctggcactcaacaaattttattccttgttatggttagataatagatcaatgtagagaaataaatgacacagctcataaaaacacaaaataataaccaattacgaaattcaatcagcaaatgcgaatatacaatatcaagtgtggtataaataaatgagtctttagaaggatataagacgtagttagtaaaaaaaaggcagaggtaaggtaaggtacaaaccaaaagattgagaaacttccatgaagattttatagtagctaagtggggacagacagatgacctggcctggagggccagtcagatgttttctctcattagtcaaatagttttcaactactatttctaaattaaataaataaaataaaatttttaaaaagccacccagcacaggcagcgccctccagaacggcctgtggagcaacccgatcccctctaggacactagcgaacctgggacctagcgccatcaggagggttcagcctcctctctcaacaattcattctccactaagttgttagaatgatgtagttaaaacgaaaggccttctgatgacagcccgttgcctactggaaaacctcaattccttagcaagacacagaaggactttacactcccaacctatcatcctattttcccatcggtctcttcttccatttcccgaggcaacattcccgagaccactgcattccttcaacagacaaagtgatattcccggttttcacatcttagcactggctgttctgcctattcattgtactgtgtctccagcatccatgctgagtcgagagctcctcaccacctccccttttccaaccagcagggggacgaaaaccggcggcagcccggaggtccctcaggccgccctgccctgccacccgccgcccctcgcccctcgcccctcgtcccggccccgcaccccgttctcttctacggccttctcgagctacgtttcttccgggcgggcccccagcagagctcaatctgtccaggtgcgaggggtgagagcagaccgagcgccccctccctgaacacttggctcagctccttccaacagtcgaggcctgggtgggagccgggaagaaaggggcagtccaaggcctcaagccaagatgccagggaacagcgtgcctcttaccacaaacacggcctcaggaatccccaggtggagccgccgcccattccctgtggccatttctcctttgccacaactgtccttaacggccgccatcttggggatgcgagcgcgcgactgcctcccgggccgccggccgccgggattccgtgattggcttgttcgcacttgcaggcccgcctctccatctccatgcacattcattggtgcgcagggagcgtcccccacaagtccccgttctcctttggccgaaagtagcccaacctctaggtgctgattggctgcgctcaggtaagtgacaagcgtggaagggccgcgaaagagaagctggagcgacaggaaaaacccatacgtcctcctgggaaaaggggtcttgtgagtgagcggtgctaaagccctaggaatagggacctagcctgaccccaccccgaccctagaactggcagcagccttcgcaatggcctctggagcgacccaatcccctctctcggatgctagcgaacctgggacctagcgccatcacgagggttcagcctctgtgcctttctggtctcaccatcccagggagcttcctgccccttgaagggaacttactttgtgtctgtttcagagtggtcactggcctcattctaataaataccctgcctgtcgcaccagcctttcctgaaagccacctttgatcagaatgtcttctctccagctcaaacgtttccaaaacttcatagtctacatacaaaatcctaagaactccacctaggcttctaggcccatggacttacccaatgtcatcctacactacaaccctttaaaagcacatgtgtcatacagaaccaagtaattattcttcgggctcttttctgtgctttatttcactggagtgtttcccagtgaggcagtgcttcatccacttgcacaaattctaccatgagcctaagaattacgcaatggaaagtaagtctctcttctcagaggcaatcactgttaccggtttatctccgcacataatgtacgatcaagcatatagacatagatatgtctttagatataatatgaggaagaaattggtatcgtcatattgtgaatgaggaaactaaagctcagtgaacctgtacagctcctccaaaatcctacaactacatagtagtgaagccggaattccaaactagttctccagtggcttctatgcgatttggcttgggaggatgaagacatgttagctaaccatgactctgaccttttctggtcagcagttttgtaagataatgtctctgttcctggagagaaaagtatatgggaattctattcttcaccactctcccccacctcagtgccttccaaaaaaaaattttgtttttgaaaagtaggtaacgtttctacagaaaaacattgagatatcagatacacatgcaaattttgttcaacttcactgatccctatctatattaatcattgttagaaccaatcaaggacttacttcaaactttaggaaatatttctccaaattatcactaattttaatttggaataaatccctctaagagatatagtatttgacacttcgggccaggtttttcttttggagccaaaagccttatcagcttatcgctcatgttttactcccttacaggtacaaacagaagattcccttatttatactgctgaatatatttcctttctagtgttctcttaattagaaagttgtataccaattctttccttcctgccatggctgcagcagcttttccaagagtacactaaccttatcaactctataggtggtcattttcttatctcttagcaaaaaaaaaaaggaaaagaaaaaaaaaaaaaccttcctcttgccagatccaaatctagctattacctgactaaatatgattggtctttagcaacccttcagtagcccacaccttttacagcttatctttagattgctttaataaaagcattttttaaaacagactttaaaaggttgtagtttttcaccatggacacttttgaaacaaaacaaaacaaaatgtaaagaaaatacgcatacaacaggaaacagaacaacttaaacaatcatttcacgtagtgttgtgctgataaatgttcaactaattctctttagaaagggggtatatatttattataaattgtattgatgtaaaag

SEQ ID NO: 1564290 - DNA, 4001 bp, Homo sapiens
cctcttcctccctccctccccacacaccacctcttcctccctccctccctccccacacaccacctcttcctccctccctccctccctccccaccatcagagaacacagagtcactcagatcaatttgcaacacattcattttattatcttcagaatggcaagcaccccgctggtgagatctctgaggtctggcggctgggcctgaacttagtcgctgctctcggagataggggagtacttggccgtctacacactcggtagttcttccatctcgctctcctgactcggtggttcctccacctggctctcctgactcagtggttcttccatctcgctctcctgactcagtggttcctccacctggctctcctgactcagtggttcctccacctcgctctcctgactcagtggttcctccacctggctctcctgactcagtggttcttccacctcgctctcctgactcagtggttcctccacctggctctcctgactcagtggttcttccacctcgctctcctgactcagtggttcctccagctcggcctcctgactcagggggtcgtgctgggtcccctcgctcactggctcctccggcggcagctcgtgctgagggagctcctggctgggctggtcgctggggccgggtgccgctggcgcgctctccgcctcaggtgccgtcacggccgccatctttgtcgcagcccctttcttcccgcgtctccctctacgaactgcttttcccttcttggccaccttggtagtctggaaggacaacagggagatcacagaagggctccggtttagggacgaggatggaggaggctgggaacagggacgtgtcctcagaagcggtgggggccgggttggggggttgtgccaagtgaggacaggagaggcttcttgtgaggaaggaggcgaggggaagacgaggaggagcttgggagggtcactcaccttcttcttcgggtcactggggctcggctgagaggaggacttcctctttcctgcctccgtggccttggccggaggtcccgaggctctcggctttggactcatcttccgcagctcaacgtctcgcaacggtcggctaactccaggctgcctggcctccctgtatatacccctctcgcgatcccaggacgagacaatcacgcccctgagctgtgattggtcaacactccactacccagccaatggtcgccctgggcgggaaggaaggccttatacgtcacaaagcaccatcaggacatggcggatgaagtcgggggcgggggggggggtgacatctaatgaggaaggcagggtgctctaattggagaaagggagatttgggttagcacccctaaagatagttcccaaactgacatgtcacccctcctaaactccccgtgttcaattttggcagatcacgtggcacgggaggatatttccgccacatgtttcccccggacctcccattcagtggtacattctgttcctccacacctgccatcattacccggtttctgtatgacctacctaaaatccctccatgctaactgggatagacggagggctatatgaagacgtcagttgaccaggcacagtggctcacgcttgtaatcccagcactttgggagaccaaggtggctggatcacctgaggtcggcagtttgagaccagcctgacctacatggagaaaacccatctctacgaaaaatacaaaattagtcaggcatggtggcgcatgcccataatcccagctactcaggaggctgaggcaggagaatcgctggaacccgggaggcagaggttgcagtgagccaatatagcgccattgcactcaagcctgggcaacaagagcaaaactctgcctcaaaaaaaaaaaaaaaaaaaaaaagccgtcaatcaatcatccctctctcctacaaattcctctgctgcaccttgaggaccattcacttcttggatgcaatcaaagaacttttccatctcacttccttctcccagtgtccacatagtgcccctcaatgtttcattctcatggtttaaagcactggcttcaggcggtgaagatcagcaaagacactcgctcagctgggtatttgtatcaggctgggttcctcagagaaggagaaactaagccaacaggatatttgtgtgagtgtgtgtgtgtgtgtgtgtgtgtgtgtgtgtgtaatatatgtcataaacatctatttactattgtatggtatttatttatgaataatattatatacgatatgctttactctaagcaattggctcacacattcacacattgtgggggtctaggaagctgaaatatgtagggcaagtgagcagcctggaaactaaaagcttctgcacagtcaacaatcaacaaaatgaaaaggcagggtatggtttgggagaaactatttgtgaaccatatatctaataacgagttaatatccaaagtatataaagaactcatacagctcaatagcaaaaaaaaaaaaaaaaatagtctggtttacgaataggtaaaggactttaatagacatttctcgaaagaaaacccacaactggctgacaggtttatgaaaatgtgctcaacatcattaataatcagagaatgcaaatgaaccacaatgaactatcacctcacacctgttaggacgggtattagcaaaaagtcaagagataaaaagtaatgatggcaaaggtgtggagagagtgaaacccttttaggttgtgcagaaaaggggacccttacagggcagaaatgttattggtacattatgaaaaacagtataatggttccttggaaaatcaaaatagaactaccatatgacccaaaatttcatctgttgagtatgtaccaccccccaaaatgaaatccacatctcatagagatagctccagtactaattctaactcattaatcacacaggaaataagagtttctatttgaaaacactggttttttttttttcaccatctggtgtcaaatacttatcctagtctagtcatctcttcctagttcttgatttgtagtaacctaggtactactacacattaacagaactaactcattattccaacaagaaatgagaaatgttgagaagaatgaaattttatacttgtctttaaccagttattctagttttatggaggattctgtatttaactcttacccaggtaactctagttactgtatccatagtacctagtcaacaatccaaaaaaaataagaacacagagttgactagaatggttactaaactttctatgttcaaccagttttcctgctaattgctagttgtttattcaactgtttgcctaagtaccactaaatgtctagttttatgtcactaagacataagaaaaaatatgacaaagaatatgtttattccaggtactggcttcatctagttatctctagcccaggaggaaaacgtgtattttatgggccaggcccagggtccctgtgttgtgtgcagcctagggagttggtgccctgtgtcccagccactccagctctggctgaaaggagccaacgtacagcttgggctgtggcttcagagggcggaagctccaagccttggcagcttccacgtggtgttgtgcctgcaggtgcacggaagtcaagaattgaggttttgaaagcttcactagatttcaaaagatgtatggaaatgcctggatgcccaggtaaatgtttgctgcaggggtgggaccctcatggagaacctctgctagggtagtgtggaagggaaatgtcaggttggagcccccacacagagttcctactagggcactgcctagtggagctgtaagaagagggccatcatcctccagaccccatcatggtagatccactgacagtttgcaccgtgggcctggaaaagctgcagacactcaacgccagcccatgaaagccaggagggaggctgtaccctgcaaagtcacagggacggagccacccaagaccatgggaacccacctcttgcatcagcgtgacctggatgtgagac

SEQ ID NO: 1564291 - DNA, 4001 bp, Homo sapiens
ttcctccctccctccctccccacacaccacctcttcctccctccctccctccccacacaccacctcttcctccctccctccctccccacacaccacctcttcctccctccctccctccccacacaccacctcttcctccctccctccctccccacacaccacctcttcctccctccctccctccccacacaccacctcttcctccctccctccccacacaccacctcttcctccctccctccctccccacacaccacctcttcctccctccctccctccccacacaccacctcttcctccctccctccctccccacacaccacctcttcctccctccctccccacacaccacctcttcctccctccctccctccccacacaccacctcttcctccctccctccccacacaccacctcttcctccctccctccctccccacacaccacctcttcctccctccctccctccctccccacacaccacctcttcctccctccctccctccccacacaccacctcttcctccctccctccctccccacacaccacctcttcctccctccctccctccctccccacacaccacctcttcctccctccctccctcaccacacaccacctcttcccccctccctccctccctccccaccatcagagaacacggagtcactcagatcaatttgcaacacattcattttattatcttcagaatggcaagcaccccgctggtgagatctctgaggtctggcggctgggcctgaacttagtcggtgctctcggagacaggggaaaagctggccatccacacagtcagtggttcttccacctcgctctcctgactcagtggttcttccacctcgctctcctgactcagggggtcgtgctgggtcccctcgctcactggctcctccggcggcagctcgtgctgagggagctcctggctgggctggtcgctggggccgggtgccgctggcgcgctctccgcctcaggtgccgtcacggccgccatctttgtcgcagcccctttcttcccgcgtctccctctacgaactgcttttcccttcttggccaccttggtagtctggaaggacaacagggagatcacagaagggctctggtttagggacgaggatggaggaggctgggaacagggacgtgtcctcagaagcggtgggggccgggttggggggttctgccaagtgacgacaggagaggcttcttgtgaggaaggaggcgaggggaagacgaggaggagcttgggagggtcactcaccttcttcttcgggtcactggggctcggctgagaggaggacttcctctttcctgcctccgtggccttggccggaggtcccgaggctctcggctttggactcatcttccgcagctcaacgtctcgcaacggtcgactaactccaggctgcctggcctccctgtatatacccctctcgcgatcccaggacgagacaatcacgcccctgagctgtgattggtcaacactccactacccagccaatggtagccctgggcgggaaggaaggccttatacgtcacaaagcaccatcaggacatggcggatgaagtcgggggcggggggggggggtgacatctaatgaggaaggcagggtgctctaattggagaaagggagatttgggttagcacccctaaagatagttcccaaactgacatgtcacccctcctaaactccccatgttcaattttggcagatcacgtggcacgggaggatatttccgccacatgtttcccccggacctcccattcagtggtacattctgttcctccacacctgccatcattacccagtttctgtatgacctatctaaaatccctccatgctaactgggatggatggagggctatacgaagacgtcaatcatccctctctcctacaaattcctctgctacaccttgaggatcattcacttcttggatgccatgaaacaacttttccatctcacatacttctcccagcatccacatagtgcctcacaatttttcattctcatggtttaaagcactggcttccagaggtcaagatcagcaaacacactcgctcagctgggtatcggtatcaggctgggtttcggtatcaggctgggttcctcagagaaggagaaactaaaccaacaggatattgtgtgtgtgtgtgtgtgtgtgtaatattatatatcataaatatatatttactatcatgtagtatttatgaattatatatatgatacagtttattctaagtaattggctcacacattgactcaatgtgggggtctaggaagctgaaatatatagggcaagtgagcaggctggaaactaaaagcttctgcacagccaacagtcaacaaaatgaaaaggcaggctatggtttgggagaagctatttgcgaaccatgtatctaataatgagttaatatccaaaatatataaagaactcacacagctcaatagcaaataaataaatagtctggttaacaaataggcaaaggacttgaataggcatttctagaaggaaaacacacaactggccaacaggtatatgaaaatgtgctcaacatcgttaataatcagagaatgcaaatgaaaaccacaatgaactatcacctcactgttacacgctgttgacagacgtgtaattggtacagccgttataaaaaacagtgtaatggttccttggaaaatcaaaatagatctaccatgtgacccagcagttcatctgttaagtatgtaccaccccccaaaaatgaagtccacatctcatatagatatctccagtactaactaattgtaactcattaattacacaggaaattagagtttctatttgaaaagaatgtttttttcaccattctggtatcaaatatttattctagtcatctcttcttatttcttgctttgtaataacctaggtactcactacccattgacagaaccaacttattattccaacaagaaatgagaaatactgaggagaatgcaatgtgatacttctgtcttcaaccagttattccagttttatggaggattctgtatttaactcttactcaggtaactctagttaccaaatccatagtacctagtcaacaatcctaaaaaagtaagaatacagaattgactcgaatggttactaaactttctatgttcaaccagttttcctagtaattgctagttgtttgttcaactagtactgagaagaatttgtttattccaggtactggcttcatgtagttatctctagttaattactcacttggataaagtagatatctactatattaggtaatatttctaacatgaggttggaattttgcattgaggaaaatggttattgaactccctggcataggccagttatcttcagcttcctgcaatcaattacctggtctggctaattctagctatctttaggttgctaattacatgtttaccaccagatgtctgtggtaatttattattccaacaaaaaatagtagaatgattaggaaggattttgctttttccaggcatcacatagatattcaaattatctcctgttatcctttggacctttttttcctgggtagcactcagcacctatccttataagttcttataccaactaaaatgaataattgagacttgcaaagaacacgattttcaggatcaggttcacttagtattgcaatgactgttagctctttctatgtaacgtgttttatgggaaagcccagttaagtagaactcatatattaactcaacaccaacaaaattttatctgacctgactagattccctatgttctacattccactgaactattgttgttgtctctattttactacttacttaggtatatgactcatctgtagtagtaattcattattccaacaataactcagcagtaagtggtgagaagaacgtgattttatttttaaaatttatttttactgaggtaaaatatacacatgtaatgcaccctctttaccacttgtaagtgtgcagttcagtg

SEQ ID NO: 1564292 - DNA, 4001 bp, Homo sapiens
cctcttcctccctccctccctccccacacacctcttcctccctccctccctccccacacacctcctcttcctccctccctccctccccacacaccacctcttcctccctccctccctccccacacacctcttcctccctccctccctccccacacacctcttcctccctccctccctccccacacaccacctcttcctccctccctcctcacacaccacctcttcctccctccctccctccccacacaccacctcttcctccctccctccccacacacctcctcttcctccctccctccctccccacacaccacctcttcctccctccctccctccccacacacctcttcctccctccctccctccccacacaccacctcttcctccctccctccctccccacacaccacctcttcctccctccctccctccccacacaccacctcttcccccctccctccctccctccccaccatcagagaacacagagtcactcagatcaatttgcaacacattcattttattatcttcagaatggcaagcaccccgctggtgagatctctgaggtctggcggctgggcctgaacttagtcgctgctctcggagataggggagtagctggccgtctacacactcggtagttcttccatctcgctctcctgactcagtggttcctccacctggctctcctgactcagtggttcctccacctcgctctcctgactcagtggttcctccacctggctctcctgactcagtggttcttccacctcgctctcctgactcagtggttcctccacctggctctcctgactcagtggttcttccacctcgctctcctgactcagtggttcctccagctcgctctcctgactcagggggtcgtgctgggtcccctcgctcactggctcctccggcggcagctcgtgctgagggagctcctggctgggctggtcgctggggccgggtgccgctggcccgctctccgcctcaggtgccgtcacggccgccatctttgtcgcagcccctttcttcccgcgtctccctctacgaactgcttttcccttcttggccaccttggtagtctggaaggacaacagggagatcacagaagggctctggtttagggacgaggatggaggaggctgggaacagggacgtgtcctcagaagcggtgggggccgggttggggggttctgccaagtgacgacaggagaggcttcttgtgaggaaggaggcgaggggaagacgaggaggagcttgggagggtcactcaccttcttcttcgggtcactggggctcggctgagaggaggacttcctctttcctgcctccgtggccttggccggaggtcccgaggctctcggctttggactcatcttccgcagctcaacgtctcgcaacggtcgactaactccaggctgcctggcctccctgtatatacccctctcgcgatcccaggacgagacaatcacgcccctgagctgtgattggtcaacactccactacccagccaatggtagccctgggtgggaaggaaggccttatacgtcacaacgcaccatcaggacatggcggatgaagtcgggggcgggggggggtgacatctaatgaggaaggcagggtgctctaattggagaaagggagatttgggttagcacccctaaagatagttcccaaactgacatgtcacccctcctaaactccccgtgttcaattttggcagatcacgtggcacgggaggatatttcccccacatgtttcccccggacctcccattcagtggtacattctgttcctccacacctgccatcattacccagtttctgtatgacctacctaaaatccctccatgctaactgggatggatggagggctatacgaagacgtcaatcatccctctctcctacagattcctctgctacaccttgaggatcattcacttcttggatgccatgaaacaacttttccatctcacatacttctcccagcatccacatagtgcctcacaatttttcattctcatggtttaaagcactggcttccagaggtcaagatcagcaaacacactcgctcagctgggtatctgtatcaggctgggttcctcagagaaggagaaactgaaccaacaggatactttttgtgtgtgtgtgtgtgagtgtgtaatatatatgataaatatgtatttactatcatgtagtattgatttatgaataatattatatatatgatacagtttattctaagcaattggctcacacattcacacaatgtgggggggtctaggaagctgaaatatgtagggcaagtgggcagcctggaaactaaaagcttctgcacagtcaacaatcaacaaaatgaaaaggcaggctatggtttgggagaaactatttgcgaaccatatatctaataatgagttaatatccaaaatatataaagaactcacacaactcaatagcaaataaataaatagtctggttaacaaataggcaaaggacttgaataggcatttctcgaaagaaaacacacaactggccaacaggtatatgaaaatgtgctcaacatcgttaataatcagagaatgcaaatgaaaaccacaatgaactatcacctcacacctgttaggacggctattatcaaaaagtcgagagataaaagataatgatggcaaagctgtggagagagtgaaacccttttagggtgtgcagaaaacgggacctttacacgctgttgacagacgtgtaattggtacagccgttaggaaaaacagtgtaatggttccttggaaaatcaaaacagatctaccatgtgacccagcagttcatctgttgagtaggtaccccactcccacaatgaaatccacatcttacacagatatctccagtactaagtgtaactcattaatcacacaggaaattagagtttctatttgaaaagaatgttttttttttttcaccattctggtatcaaatatttattctagccatctcttcttatttcttactttgtaataatctaggtactactacccactgacagaactgactcattattccaaaaagagatgagaaatgttgaggaaaatgcaatgttatgcttcttgtcttcaaccagttattctggttttatggaggattctgtatttaactcttactcagataactctagttaccatatccatcgtacctagtcaacaatcctaaaaaaatgagaacacagagttgactagaatcgttactaaactttctatgttaaccagttttcccagtaattgctagttttttattcaactgtttgcctaggtaccactaaatgtctagttttatgtcactaagacataagaagtagtgttgaaaagaatttgtttatttcaagtactggcttcatctagttatctctagttaattacttacttggataaagtagatatctattgtatgaggtaatatttctaacatgaggttggaattttgcgttgaggaaaatggttattgaactccctggcataggccagttatcttcagcttcctgggatcaattacttggtctggttaattctagctatctttaggttgctaattaaatgtttaccaccagatgtctgtggtaatttattatcccaacaaaacagtagaatgataaggaaggattttgctttttcctggcatcacatagatattcaaattatctcctgttatcctttgtaccttttttcctgggtaacactcagcacctatccttctaagttcttatcccaactaaaatcaataattgagatttgcaaagaacatgagtttcagggtcaggttcacttggtattgtaatgattgttagctgtttctatgtaacgtgtttcatgggaaagcccagttaagtagaatttgtatataactcaacaccaataaaattatatttgacgagactagattccctatgttctacattccactgaactattcttgttgtctctattttactatttacgtaggtacatgccttac

SEQ ID NO: 1564293 - DNA, 4001 bp, Homo sapiens
cttcctccctccctccccacacacctcctcttcctccctccctccccacacacctcctcttcctccctccctccccacacacctcctcttcctccctccctccccacacacctcttcctccctccctccccacacaccacctcttcctccctccctccccacacaccacctcttcctccctccctccctccctccccacacacctcctcttcctccctccctccccacacacctcctcttcctccctccctccccacacaccacctcttcccccctccctccctccctccccaccatcagagaacacagagtcactcagatcaatttgcaacacattcattttattatcatcagaatggcaagcaccccgctggtgagatctctgaggtctggcggctgggcctgaacttagtcgctgctctcggagataggggagtacttggccgtctacacactcggtagttcttccatctcgctctcctgactcagtggttcttccatctcgctctcctgactcagtggttcctccacctggctctcctgactcagtggttcttccatctcgctctcctgactcagtggttcctccacctggctctcctgactcagtggttcttccacctcgctctcctgactcagtggttcctccacctggctctcctgactcagtggttcttccacctcgctctcctgactcagtggttcctccacctcgctctcctgactcagtggttcctccacctggctctcctgactcagtggttcttccacctcgctctcctgactcagtggttcctccacctggctctcctgactcagtggttcttccacctcgctctcctgactcagtggttcctccagctcgctctcctgactcagggggtcgtgctgggtcccctcgctcactggctcctccggcggcagctcgtgctgagggagctcctggctgggctggtcgctggggccgggtgccgctggcccgctctccgcctcaggtgccgtcacggccgccatctttgtcgcagcccctttcttcccgcgtctccctctacgaactgcttttcccttcttggccaccttggtagtctggaaggacaacagggagatcacagaagggctccggtttagggacgaggatggaggaggctgggaacagggacgtgtcctcagaagcggtgggggccgggttggggggttgtgccaagtgacgacaggagaggcttcttgtgaggaaggaggcgaggggaagacgaggaggagcttgggagggtcactcaccttcttcttcgggtcactggggctcggctgagaggaggacttcctctttcctgcctccttggccttggccggaggtcccgaggctctcggctttggactcatcttccgcagctcaacgtctcgcaacggtcgactaactccaggctgcctggcctccctgtatatacacctctcgcgatcccaggacgagacaatcacgcccctgagctgtgattggtcaacactccactacccagccaatggtagccctgggcgggaaggaaggccttatacgtcacaaagcaccatcaggacatggcggatgaagtcgggggcgggggggggtgacatctaatgaggaaggcagggtgctctaattggagaaagggagatttgggttagcacccctaaagatagttcccaaactgacatgtcacccctcctaaactccccatgttcaattttggcagatcacgtggcacgggaggatatttccgccacatgtttcccccggacctcccattcagtggtacattctgttcctccacacctgccatcattacccggtttctgtatgacctacctaaaatccctccatgctaactgggatggatggagggctacacgaagatgtcaatcatccctctctcctacaaattcctctgctacaccttgaggatcattcacttcttggatgccatgaaacaacttttccatctcacatacttctcccagcatccacatagtgcctcacaatttttcattctcatggtttaaagcactggcttccagaggtcaagatcagcaaacacactcgctcagctgggtatccgtatcaggctgggttcctcagagaaggagaaactaaaccaacaggatatttgtgtgtgtgtgtgagacagagagagagtgtctgtaatattatatatcataaacatctgtttactatactatagtatttatttatcaataatattatatatatgatacggtttactctaagtaattggctcacaccttcacacaatgtgggggtctaggaagctgaaatatatagggcaagggagcaggctggaaactaaaagcttctgcacagccaacaatcaacaaaatgaaaaggctacggtttgggagaaactatttgcgaaccatatatctaataatgagttaatatccaaaatatataaagaactcacacagctcaatagcaaataaataaatagtctggttaacaaataggcaaaggacttgaataggcatttctagaaagaaaacacacaactggccaacaggtatatgaaaatgtgctcaacatcgttaataatcagagaatgcaaatgaaaaccacaatgaactatcacctcacacctgttaggatggctattataaaaaagtcaagagataaaagataatgatggcaaaggtgtggagaaagtgaaacccttttacggtgtgcagaaaacgggacctttaaacgctgttgacagacgtgtaattggtacagccgttatgaaaaacagtgtaatggttccttggaaaatcaaaatagatctaccatgtgacccagcagttcatctgttgagtaggtaccccactcccacaatgaaatccacatcttacacagatatctccagtactaactaagtgtaactcattaatcacacaggaaattagagtttctatttgaaaagaatgtttttttttcaccattctggtatcaaatatctattctagccatctcttcttatttcttgctttgtaataatctaggtactactacccactgacagaactgactcattattccaacaagaaatgagaaatgttgagaagaatgcaatgttatgcttcttgtcttcaatcagttattttagttttatggaggattctgtatttaactcttacccaggtaactctagttaccatatccacagtacgtagtaaacaatcgtaaaaatgtaagaacacagaattgactagaatggttactaaactttctatattcaaccagttttcctagtaattgctagttgtttattcagctgtttgcctaggtaccactaaatgtttagttttatgtcacagagacataagaagtagtactgtgaagaatttatttattacaagtactggcttcatgtagctatctctagttaattactcacttggataaagtagatatctattgtatgaggtaatatttctaacatgaggttggaattttgcattgaggaaaatggttattgaactccctggcataggccagttatcttcagcttcctgggatcaattacttggtctggcgaattctagctatctttaggttgctaattacatgtttaccaccagatgtctgtggtaatttattatttcaacaaaaaatagtggaatgataaggaaggattttcctttttcttggcatcacatagatgattcaagttatctccagttattctttgtaactttttttcctgggtaatattcagcacctacccttgtaagttcttatctcaattaaaaccgataattgagagttgcaaagaacatgattttcagaatcaggttcatttggtattgtaatgactgtaggctctttctatgtaacgagtttcatgggaaagcccagttaagtaaaacttatatattaactcaacaccaacaaaattttatctgaccagactagattccctatgttctacattccactgaactattcttgttgtctctattttactacttactta

SEQ ID NO: 1564294 - DNA, 4001 bp, Homo sapiens
tttagagaaaaagctcatgatctattctgatacttgaagggacagaaataaaaaccaaggtgttatgaattataaagcaatgagaagcatggaggcagtacttttttaaagctgcagtttacagaacacctactgtgtgccagaaactacacagctatcttctccaatcttcataatcctcaaattaggtattgttatccccattttacagatgagcaatttgggtcttaaagaaggtgaaatagactgcctaggctacacaactggggagtggcagagctgggatttcaacctaggtctttctggcgttaacttctgtcctacctttaccatcccttattgactacccattgggtctaatagtcccttctcctctatgggcctcagtctctccatctatctcctaatccctagggggcctcaagccagaaccctaaaccagccatctggtttccttcagataacgcaggcagcaactcccaactctgtctgctccctcagggcttctccttgaagcctctgtctgctgctggaagggccagtgaacaactttggaggactcaccctctcattctcagaatttccagtggccactgctcaaggttcaggcttgacacagcttgcaatctctctttgctaactccccttgaagccacaagggaaggagctggtaggaccctgaggacattagggccctgaagcatgtgcctagtgtccttgggtagaatccacagatgccccaggccaactggctacagtcaggaaatattagagatggagaaagtcagaggtggtgtttcagcctcttcaccttggagagctcagtccgtgggcaattgggcatcctgaataataaattcagtattcactgaataagtaccacctatgcccttcttttcctccccaaccacaccgcacacaatcaaaaggaaagccataggccacttctctggatcggctcacaagcaactccctgggctgcacttggaccaaagtggagagaaactgtatttgaggaatattaaaattctgagaactgtcattggcttagtcctatgaagaactgcatctcactctacctctggagaaacatgaggagcttcatcctcaaatgagccctccataagaggtctcttcattcatgaattaattgctggggtgtgtctcgcctaggagaaagagatgctgcaaagctggatagaaggggatgtcagtgaggctaaagaaagggtggctgtctcccagagaagatgtttccatatcagtgcctggcttatagcaaaagcctctcgtagtagacaaaaccccaaggccaagttttaccagtggtaccgccagaacggcataattactaaacaacaggcagtttgcaacttccccatctcacaagatacaaagacagaaagtgctccctcaaatattgcccacacttctgaaaaaaaaaaaagaaagaacaaaaaatgaaagaaagaaagaagaaagaaagaaaaagaaagaaagaaagaaagaaagaaagaaagaaagaaagaaagaaagaaagaaagaaagaaagaaagaaagaaagaaagaaagaaagaaatatttgagcacagaatcccaaaccagcattttggccagaactctaccacaatctgcctgcatggacgcacttaccgcacttctccaaaatggtacctagcagtctggggtagggtgggaagtcagaggggttagtttgtcaaaccaatcacttggaacgaaatccccaaggggaccagattgtatctcattgagcaaagtatttgatgactacccccatttcttcccagttaagtttctttgcttctccccccaaaaaaatccccagattctcttacctcttaattctggaccatcacctgattctgtggctgggaaaagatggccagagctgcctggctcacttcagagcaggttagtgcttgcggaagcaggagctgaggatttgtacccccacctccttgttactttccgcccctctagctgggactgtacaaggcgtttcctgctagctatctattaagaatgcagaaaatgtactccaacaagtcaacctggttgggcacctgcaggaatgaggaacatggtagctctttttttttttttttcatttctttctttttggtttaaaaaaagcattttgtgagattgtctcttaaactgggaggccaattgtttgtccaaaaccatacacagagtcaacaacaaataaaacatcagctttggggtttagatcaagccgatgtcacatcagtctcaggaactgagagtcagtttggtttatctctagtttttccctctctctccataggaagaaaaagagagctcagacccctaggagtctggacttgtcacaggcttccattggccaaagagggagaaaggacttctctcaatctgcaatacgcaaagcaattcagggcaggaggtttggaggaggggatcctaatcctcattttaaaaacccctcaatattacctcagtaagtggcaccattattcaggccccaaatcctggaaccattgtttgctcctctctttgtctacttcatcaatattaattcaacaaatatttattgaatgccaactgtgtgccaggcactgttctggaggttgtgttctatagtgaacaaaacataccaaatccctgtcctcatggaataaatacatacaaatgttatatgtttttgtgtatatatacacatatgtacattatatctacaatgccagatggtgataagtactataaagagatattaagcagggtagaagaacagggagtggtaggctaggtgctaatttatagagggtggccaaaaaaggattttctgataaggtgacacttcagcagaaccctgagggggaaaaaccacatggacacctgctttcctgatacctgagggaacatcaaattcaaaagatgagatagtgcttaatctgttcacagaaaggcaggccagtgtggttagaagagagggagtgaggggaaaagaagatgaggaccaggtaacataggacctcattggccacgctacagcttttggcttttcctgtaagtgagaaggaaacacaccagaggggttggaggaacacatccacatatcctgaaagttctgccttccagatgctttccaatctgtgctttctcactacctctccaacattcactgtagtccaagccctcatcatttttccccaggaccaccaccaccacagcctcctaactggactcctgacctccacctttacccctttctaaaccattcatcccaagacagccatagtgaccattttagaacatggaatgcagtcactccttgtttaaaatattataatgaaaaaagtttgtctcatgggggtagagaatagataccaaacactgggaagggtgtgtgggtgggagcaggaagaagaacagaggctctaaactacagttaaatagaaggtattcttctatattcaaacaaaccttctactgtttggtagcagaatagagtgtctatagttagcaacaatgtattatgtatttcaaaatagctagaagagaagacttgaaatgttcccaacacctaaatactcaaggtggaggctgggtgcagtggctcccgcctataattccagcactttgggaggctgaggtgggaggatcgcatgagcccaggagtttgagacaagcctgggcaacatggcaaaacctcgtttctacaaataataaaaaaaattagctgggtgtggtggcacacgcctgttgtcccagctattggggagggtgaggatcgcttgagttcaggtgatcaaggctgcagtgagcctagatcatgccactgcactccagcctgggtgacagagcaagatcctgtctcaaacacacacacacacacacacacacatacacacacacacacacacacacaaaacaaaacaaagcaaacaaaaatgctcaaagtgattgacatcccaaatatcctgacttgatcattacac

SEQ ID NO: 1564295 - DNA, 4001 bp, Homo sapiens
aaaaatgtgactacttttctgtgttgtgacctcactaatatgggactaagcattaagtcaaagtgtacatacaaacttttgaaaactagcaaacttcctctactgtttataggacattttctccctggattccagccacaagagctgttggttttgctgatgcaagccaccttgggtaaaatcagtggcttatccaagacaaagcaactgatgctattcaattgatttatcctatgtatctttgggtgttactgagcagagatttgttagaagtgaggaatgagaaaggctggaattaaagttgtcctcacacaaaggaaaaagttcaggatgaaccttaatctgcctccatttataacaccacctagttttcccacttcatacaaacttctgcagccaacattgagcagacagagcctaccacattcccttttgtagcaagtaagacaacaggaattctttctcccacagtcaagatttcactgcaaattccattaggaaaccagaatcagtctagaaggactatgctgtaagtgtatctaataaaaatatgttggtattctcataaatgaataattaaaaaaaaacccacattgaggctggataaagaaaatgcggtacatatacaccatggaacactatgcagccataaaaaagaatgagatcatgtcctttgcagcaacatgactggagctggaagccattattctaagcaaattaagacaggaaaagaaaaccaaatactgcacgttctcataagtgggaactaaacaacaagaacagatggacactaggagaggaacaacagacagtgcggtctacttgagggtggaggctgggaggagggagagaatcagaaaaaacgcctatcgggtactatgcttattacctgggtgacaaaattacctgtacgccaagcccccgtgacatgcagtttacctatataacaaacctgcgcatgtactcatgaacctaaaataaaagttaaaaaaaaaaaaaaaaaactcacaatgaccctgtcggaaagagaaggcatcacagagctccaaagatcgtgggctttggagtcagtgagcttggtcaaacgttagcttcaattacatactaactttgtcgcctaattctgtaatcactcaccctcagtttcaagtcacttaccctcaactgcatcctcttcaaaattgggaaatcaagcagttagagaaattaagaattctgacaatgtatgtaaagcacgtgcactgagcctggcatacagtaggtcttaacgaatgatagctaactccctcaccactcccttgcctactggggtgggccagaaccacctgctctctcatacattccttcaactcagtcaccagcctctatcttactgattccccaagtgaagcaatctcacaccaggggactattcccttctactccttcattcatacagcaaacatttattaagccccgactatgcaggccccctagggaacacggagatgaaggagactgcattcctgtcctcagaaggctgaccctgcggtaatgaaagagactgcaatatagacacagcgagagaaagtgctaggataggagcatgagctgaaggcccactgacctattccccatgaccccggatcccttgttcccgagcgaaagttcggggccgggagtttagacgtctcaggctccaacctgctttccccgcccccttccctgaggccaggtccccggggtccagacctcacgcccacccattcagctagggccttccctcaagccctgctccaggctggggccagtccgcctcgcggtccaggccccgctcagggctacctgaactcaggaggctgcagtgcgttcagcgccgccttatccgggcgctccatggtgtagccgtgccggcacaggcgctcggcggcggagctgggctcggcggccgcgctcagtaagctccgcgagggaacggccgaggcggttcgcaccggaagtagcggttcgcgccggaagtgcccgttcgcgccggaagtgcccgttcgcgccgggcggcgggccacagtacgcaggcgcggcgcggcgcggcgcgccgcagcgacgcagggctgttgccggcgcgggggcgggcgctcacatgacttaccggcggtggctccgcggcgtgcgccctgccaggaggggcctgtgctcgaggagcaggcctggcgagtagcccagccactccacgttgagccgggacttgccgcgcaacatggtcctcctgggcgggcggcggctacgccgccccctgaactcgcgtgaacactggtcctcgtctgcgtctcggtcgctgagctgggggccgcaaggagacccgagcatatgagccgcgaagagggactaccagccagagggctgtggtgctaggcaactgagcgtattccgccgacgacaacacaaaaaagcagtgcgcattatttcgccactacttgagcaaataaatgcctcattaattactgcccgcagtggtaggaagtcaagcccttggcagctgggaggagttaaaacactcacccgagtccgtaaaactagagaatgtcagagttcaaagagctcttgctgagaatgactgttccagactcgatgccagtgacccccaacttccacttaaaagttaaaaacatattttgcagctgctcagaaagccgccaatgagacaacagggactcaaatagtaagaacagatgggcctcccgggcctgcgcaacccgagagaggtaaaaacgaaagggtgggtaagtctggagtcaggcttgacaaaattaagttgccactggctgctaataagaggacagcccttaacatggtcagcgcctggaaagggccgctgaccacacagctattttctgcaccacatggatacaaagaccacatctgaaatcatgactaaaccagcagcttagagtggtggaaagggcaatggactgggcagcaggaagtccaggttttagttcaaactgaataatccccctctagggctgactgtgctggctcacgcctgtaatctcaacactttgggaagctgaggcaggaggattgcgtgaggccagtagttccagagcagcttgggcagcatagcaagactccgtctctaaaaaacaaactgtaaaatatttaataaaaataatagtaatctctatctgggcctcatctagacctttaggtgagtaagaaccacctaatgtaagaacttggggtacaaagagaatctagctctggggtaggcaaactgagccagccgacctaatacatggagcctaccacctgtttttctacagccctgaggtaagaatggtttttcctttttaaattgttgaaaacgtcaaaagaataacatgacacgtgaaatttatatgaaattcaaatttcagcgtctattgataaaattttattggagctcagccattctcatttgtttgtattatctacaacagcaatgttgagtagttgtgacagagacggtatgatctgcaacgcccaaaatgatctgcaatgcccaaaattcttaccatctgacccttttacagaagagtttgctgacccctgctctagctaatcagcctgcagtgaggtccttcaatccctagggacccataaatgtagtaatggtggttctgaaggcagtttttaatatttttaaaaacctaatgaatctatttactgttaggcatccaaagctacttaaaatatcaccgttctttgatttttgacacttactatatcatgatgaggttatcctagttatcccataagaaaagactgttcacagattattatgaaaataagccacagtatacttaatagaataaatcttttaaaacatagaatgaacacaagtgggggaacggaattgtgacttattgttccccaatacctagagtagggcctggtatatagtaggaactaataaatatttgttaaataaataaattgggtccacaaaaggaaaaagagcaaaatagttcttgatggtgaaa

SEQ ID NO: 1564296 - DNA, 4001 bp, Homo sapiens
ccacaatttgctgtactgacactactgctttgggccaactagataatatgtgtgtagatatatagtgtacactatataccaacaaaatcagttatatagtaacttaggaaacacactctgaagtatttattggtcttgttctaaaagtcacaataaaataaaatcctgacatgatgctaaacaatttttttaaacaataaaaaagtatacaaggaataaacccaatttttaaaatgtaatatatacacctgcaaataaaagaataataattcacccaaatctgagtggtaaaattgcagatgatttttattttattttaaatttccatatttccaacctttctacaatgaccatgcattacatttataatcagtaaaaattacttgtatgttaggtacagttaaaaaaaaaaaaaactgttcttaacaaccgttccaaaccctgtgcctagtatgggccagggcaaggcttcacatagggaaacaggtatgatcttagagggctgatgcagaaggcccaggggtcgacccaactggctaatgactggaaaccctttaagaagagacaaaacttccatatctaaagttacatttaaatgaatatgcctggggagaagggaaaataggaacatgtgtttccagctctagggcctagttaggtcactggacaaatggagtattgccttctggtgatgtttaactccataaaacatctatgcttaaacatttagtaatgaacatttaaagaactatttctaaacatgagatcactttgaaaagtaacacttttttctaattataaaaatagcataatgttcttcgtagaaaacccaggaagtatgaaaagctgggaaataaaattaaaatcatctataatcccatcacccagaggcaaccaccatgagcacttcggtatataaccttctagtaatttattctaggcatatgtgtgcatcctgctttttcacttaatattttatcgtgggtattttcttatgtcattaatacgcctagtaaacctcattctaaccactgcctaatattactaatggcttgaaaatcctgtttttggataaacaatattattgtatttactatggacctaacttataagaacagatgcaaaatgtatctgatatttgaaaactacccaagggatttttggaattaatgatctctcctggatctaactaacatcagtattttgattccaaaattgattttcttctgttcagatacctaaaatcacccatgttgtgcaccataaatcactcacatattttgcaaaatacagtcttaggattggaaaaccacaactccttaagaaatattagacagtaaagtactcagtaaatttctgttcttcccatatgtaagccagggcaggccctccaacccaggctctgcctgctagagcaagtcaatcactgagcttaaaggaaacactaaagtaagtaaaacagagacaaaattatccctagcacaaagtttggtttctgagtaaattcatttttttcacttttcaaagtaagtaaagtaataaactatatttttttctgagaaaattttcattcagaagctccataaaacaataatattatgggcttacacccctaatatatcagcatggcatatgtttgctaagcaagagttctgaaaattaactcatcatactaatcacaattcatttgaagtacaggagatgaaaattctatgtaaaaatgtggaatttttatttaaaaggaaactctgtttccaattatatttggtggtttggagatcctttccttacctgcaaggcagcttaggatcagaaagaccttccaaaatgcgaacaccattgtgtggaggttagttgagagcagcaggtgccagtagcttgcctggactaggctgagtctcaaattggcttcttcgatcacaccgaggtttgcctggcttatctgctgggcatcgccaagcaaacatgcctctttgggcttacttattgcgtatagacttttttcagtacagatttgtgtttctttgaaacacttttcatggggcgtgtttccttgatatatttgctactgtgttaataataaacccacgcatttaaattattcaagctccttgtacacagattctctaagtctcattgtttaaaatcaatcttactaaaacgttgtacttgggctgggggatatggttggaagagagcctatgcaaataaaagctgacaaggctaattaatttcaaatatttccatgagtcttacagaattgattcactaacctccttttacaaattaagttagtaaattggtactatatcgtttcctggggagatggggctcacgggaagggcacaggggttatgaagctaaaaagcattcatttctgtgtgaacaaactctggatatgttactcttttttgaaacactggcagttgtcactaccctccaccaaaactagcagtaaaatgatttacatgcttttgtctgtcgggttagaaaccttatagcacgtatttgctaacgtaattttgcaaaatcaagttagtgaatacatgcttaaagactttctttggagaagtctgattttttggagaattaagatactcagtaaatgctatagggtttccttagaaatggaggttcaccaggagggcatgggaggctccacaggtaaggaactttcatgggaacatgaacttctaatagtgttcctattatgcttaagttacccggagaaacctaaggactttctctggctcttcccatgtgatttctaagtcctatcatttccatctccacagcgactttcagatgtgttctttctccaatctgctgcttccatcttggtccaggtactcagcttcccactttggcctatcatagcagcttcctaagtggtctccctgacttattccaccttcatcctgtgtgccagccgcaggccaatgttccagccctagtgaaatatttccagtaacaccataaatggactctttcatcaaatccaaagtccttaatatggattcccattcttccaatatctgatcctcacctcatctgaactttagccacattaactcatgcccctgaaaaagtatgtcaagatttattgcctcaaagtgttcagtcacatgaaatgtgtacaaatttcaagtgatatgttttatgttcctgtctttaatttacaggaaatgtttgaccccatcttactttagccattccaatctcccactgcttcttagaaagccattttgcttccatcatgcctgattcctccttgcagcctatcctgtccatgctcatgtctgatgccaaacgttggctccaggtgatttccatcactagagttttcttcttcctcctcttactagccaagtatattcttagcatagatcagtcatactgtcctatgtgagaatttcaatgaaccgacataccaccctagcataaatttccattttacttaaagccaatatcctacagctgaccattgattattctccagtagtttcgcatttattaactggtctaccttaaatctagtcactgtgaatccctccagggtagggaccatgtcttatacaggcagttcccaactttaaaatgagcgtgtcccaagatgtaatggtaaactcgttgactgcacgcaagaactcctgcagaagcaatgttataatatgagtctcactgtcaggcatgtagcacataatctagcactggcttgaattctgcgtactgggccgtataaggcagtggagggtgaggaggaacagcaggtgacagagaaagaacgttcctttcatttcccaagatatgacttgtgcacaaatcaacattttcccccaaataactattgcatgtctctgacatccaccttctcttctgcctcccaccttcacggccccctggctcctgggtccctagtttgccctaagggagagtctcattccccagaatatctcatgctccaaaattactttttccttttcacctctattcctcccaga

SEQ ID NO: 1564297 - DNA, 4001 bp, Homo sapiens
tgaatattagaaattttttaaattttgattatcttgacatatctcttagccccacaggaagaggctagcagcttactctggccgctacagggtttttagcagtgaagctgcagtcccacagagttgtccagctgagaaacccctttaagaccagtcaagtcaacctcctcactgtacagatgggctaggaacaatgaggtccagggagagggaaggtattatttgcagctcagcataacctgagcctgaggtctatagtataagatcctgtgtacaaatggaaggcctgcttccaggtctggaaaagctcataggctggggaaggaacaagacacatgagtgctctctctctctctcacacacacacacacacacacacacatgaatgcacacacacatacacacacacaaacaaaggatttaaatttaacatttctaaaatgctccctcaagccccaggcttaagccctagctcaaaccaacagacttggagaaggtagagagatacattataaaacctgctagagaatggaaatgtggtagttatagaaagaaaaatgttttttcaggagcattaactctgccactaatgctctttggcttgggggcaaattattttttctcttggttgacttaattcagagtcttttctaactctgaggttccagagtgtgatgggtcacagagccccaggatagggtaacctaatcagagtcagctacggaaagctggattctttctgacctaacaagtgacaccaagctaacacctatccagcctttttctctagggatgatagggaagcagcaaaatccccctttaccctatattggatctcacttagctgttacccaggttgagtttcctgaaaatccatctcacttctcaggagtgtagatgaggatagagcttcccaagctccaaggaaataatgccactatggaatagtccatcctcctttgggatttgtatccagcccataaatagcccagacaaattgagccatgtctatagggaagtgagttatcccaggaatgggtaagaaaccaagtcctatgaagaccagttgaaaaagctggggctgttcagcttggaggagagaagagtcaaggagacatagtacttgtcctcagggctttgaagggctatcacagggcaaggaagcatctatgttctgtgtagccccaagaagcaaagctggggtttttggatggaagtcagagggaactggatttagttcaacacaaataagaactttctaacagttggagctgctcctggatggactagatggtctggggaggtagtgaacagtgaaatctcaatcactactggatgtttctgagcacttattcatgacaatgaagggtggtataggttacttctatagtcctatccaactcttagaaaacactccttcttcgggggctgtatattttaacagagaccaaagcttggaagcagagtggttaagtccaattgtagaattttagatgagagacagcagatggaggaaagattcggatgtcattgggaaccttcttgatgcccctgagatacaagccctagaaaataatgcagatgttttccaagagaaaaatcctttttcaatttctgcccaaacttgccttctggcttcttcagcagccttcaactacatccatccgttttgctcaaggctgagagagcctgcagagtttggctgagaagactcacctgcccagtaggaataggctttccatagtagacattaaacaccaaccctctagccttttgcctaagccagcaatggcagccaggcccccctttctgccttaccataagtgtccactgttaggtgccccaggagtagcaggcccagtaagatccccatcacagccagagctacttctgtcctttcttccagcctcctgctaccaaagaggctcaaacttctggtggccgccagcgtctgtgactgcttacttcccttccttccctatatctctcactcaaactcctagtcccatcacacattccccttccttccctatttcagtacaggtcatgtggggtgccccccttcccccacctccttggggttggaggttccaggatgagtgaagcaattcttccccctgctagggtattgacttgactttccttggagccaatggggctttctggtctttgatctcctaggctgtatttattttgagtctcctccacaagattcagaggttgtgggggcgacctttgggatgagtcttcccactccagtatggcggtgttttcctttgtggtgagcccagggagaagagatcaactttgctgacctacccaattttcattagttgtactgttaacccttgcctgtgcagcctatgcaactggacagggtgttgggcccggggtgcttttgggcttaagagtacaagagtttagtgtattaaagggctttctacacatcaaagcttgaataattgacaagccaatggataaggctgttatgggtgaatatgcctcatatctcatattggggaagctctttgaatcactttctacaatggctccacctctctgatggtaagggagaattcattttcattaatgttctccatgctttttcataaggaatttattttttacttcttttaagggaaatttaagcctagcctccagtgcagcagcccattagtggtatgctgtattaggttgaatttttcattgacttccaattggtacaggcccttgacctacaagagagtaatattatgcctcctagcaaagctcaactgctccagaaattgctcctcttcacaggccccagagtgactgtaatttcatcagcagtctaactaggtttggcactgcgctttgtctactaagctttgaaacaataagcactttcaaaagcacaaatacatcccaaaaattcatactgcactgtaagtaacagctaagcttagtttactctttgattggagggataggaaaggacttggtcaggggagggaggagtttgtgcagagatggggagtgggaatataaagaaacatacttgccaaggggtggctgcatgcagatgatttggagctgtgcacgggctaaggagacattccagcatttcaggacacattattacatggaattctatcaatcacctctgcctctagggcccaatcccccttggctggttgttccttgttttttgagtactgcactcattccatctcactggaaatttcagccattttttcccaccgggtcctcactcaggaaaccctgaacttcacagaaccctcctttgatatttttcaaccaacaccctatcaccactacaccaccaccaccgcacagacacacacacacacacacacacacacacgcacacacatacacacacacacacccctccccttccccgctaaaaagcccactggacagatgtaaatttctgcctggccaggtgattgtgtgttttgtgctacctcttgcattttattaggacctcctggatctgaagataaataaatgtcctggggagtatgcacaacattacttcaaggctgggaaagacttccagtcttgcagtaggctcagtagccctcttgattagtaaaagaattggatgagaagtcagaaacctggagataagcctggctctgtgtctacttcattctgagatcttgaacaagtcaaatctctctgaacctcagcttccctaattgtaacatgaacataattatacttgatgcttgtatcttttcagatttataaaaatcaaactatactatacatacaataacaactatataatgatagttgctatttaaaatcttttactcttccagtcactgaattaagcaccttgcatgggttatttcccttggttcttacaacccctcaggtgggtattattgcacatactcttgtatctctccctaccactctatactcccttacactacttttctttttcattgtagagcccacatatttgttgaatgaatgaattcaat

SEQ ID NO: 1564298 - DNA, 4001 bp, Homo sapiens
gcacgagggcccggaaggcctgggcctcgtcctcgtctgcaaagttcagccccgcttggcagtcctgcacataccttggggtcagccgcctcccaggtcccccgcaactttcccatctcctctccacaccccaagtgaggcccgagggctggttgatcacttacatctccagcgaaggtgtggaagaagggggtgggggtggagtagacaagctgtgagtacagctcctgttcccagagcagccgaccagcctggagaggtgtagggtgggaggcacagtggcactgaggcacgccgggggtggcaggcttttgttagctgggcagggagcagggtgtctggatttgggagcctcatagtctggtttggagattttcagctcagcaccagagagttggtgtctaagggtgtggattgtggggtatagtctgggagccatacacttttgtgagaggtttggatttggggtttggggccctagatctgggacttgggggcttgaatttcataatttaggactctagtcttaggaagttgaggctcattcacagattcaatccatgccctcccccaccaccccagccccaattcatgacaggtaggattctagtatttgggggttggagttgagatttgaagttcagacacatagacttgggagtttcgcggggagtccagctaaagtaagtgcaatttggggtttgtggagagagttatggtttaggagtttggtggatatttgatagccttgggatctggaagttatgctgggtccatctttatgggtttaaaaggatgaatttggggcttaaacctagaaagttcaggtcaggggattgtggaaaagactttttgcttaagaactacctcggtatttgagtgttcaggaattttaatatgggaactctggggtctgtgctgtggatttagaaggacagatttggagttcaaggatcaatggaatattcaactttggggtttgttgaacagatttatgacttaggagcttggcaaacatctggggttcaggagttttgatgagagattcctgggatgcaaaatgttgagtttagaatagatttgaggttcaggtacaaatacagtgctcatttattggaatttgtggaaaagattaggcttaggcagcagactaatactgggggctttagagatcttgatacggagactggggccagtcattgcagacttagaaaggcaagtcagagtttgccatctggatgagtctttggttctggggctcagggattcactgatcaggtctgaggtcttgaagctatggacacatatggacacagatctgggtttgcgggttgagaactggcttgcaagtccagtcgggggtgggggggtcacctgaaggccgtaaaggcggatgaagtaggacttctgggggttatccttcacgaagcacacagccccacaatgctccttggtccagtgctcagctccagggggcagcgccaggtacagctgaacaactgcagtggccagcgtctgggagaggaaagcaggggtcagtggagtctggtcaggggtagccacaaggtcttggagccagacctggtccttcctgcctcatgacagtcatgggcccaaaggaagagctgcagccagagggaaggcaagtagacattgagatcttcctgggaagggtggattatgacgggaaattctaggagaggagatgatggagagggaaaggaggagcgggaggaggggaagagagagaaggaggagaggaagaggaagaaacggtggggacggggcgggggcaggagatccccagctcaccaagcattttcgtccaagcatctcaaagagtcgctggttctcgtggtcctggaggagggtggagggtatgttctgctgaaccgctggtgctcctcggcccccgggccttcctcccattgggcccccactcatggtgctttctgcccttgtcttctctggcgaggctctgggtgcagggtaagaagaggaacttccgcaatgagcagcaagggaacaggaaatgcaaaaaaccacaagggacaagggaaacaagtcctccaggggccccttggtgggcctggcctcctcgttaggctgagcttgggccctccgccatcagattggaaccctcctccacttgactgcttagacccaccttttggatcagcttgggtcctcctccccctttcttactctctggggcccatctccttctgactggctcagaccctcctccctctggctggcagcgagagcttagcacatctgtgtgcagggctccctgtggcaaggagtagtcatgggcctgggtggcctcctttctaaagcacctaggtagcctgaggctgaggcccgaggtccctagtccggaagggttactacagtaaaacttttccttttggctggggacaatagctcacacctgtaatcccagcactttgggaggccgagacgagtggatcacttgaggtcaggagttcaagacgagcctgggcaacatggcaaaaccccatttccactaaaaaatacaaaaattagccaggcatggtggcacacacctgtagtcctagctgctcaggaggctgaggcaggagaatcgcttgaacccaggaggcggaggttgcagtgagctgagactgcaccactgcactccagcctggatgatgacagagcaagacccttgtctcaaaaacagcaacaacaacaacacaacaaaaacccttttccttttaattacagagcgagcccctgtgatccacgcctatcgtgagtgcttagacactgccaatgacgcatatgcctctggtccacttccccatcccttacccttgcctccccgcagctcccaaattactttctgcttgtcatacttttttttttctttttttttttgagatggagtctcactctgtcgccaggctggagtgcggtggcacgatctcggctcactgcaacctttgcctcccgggttcaagtgactctcctgcctcagcctcccaagtagctgggactacaggcacacgccaccacgcccagctaatttttttgtatttttagtagagacagggtttcaccatgttggccaggatggtctcgatttctcgacctcgtgatccacctgcctcggcctcccaaagtattagaattacaggcgtgagccaccgtgcccagcccatcccttttttaaagaaaggaactttatatcatatatgaatgcctgaacaacatcttgtttagttttcattgcacttgaagtttgtaaaagcacataatcttcaaaggcttgctttctccccactggacatcctagttttatcttaacactcacatagcacttaacgtgtgtgccagtcactgttctgacccctttgcccggagtgcgagccaggcaggccaggtgtgagtgcatggtctcgtccctccacgccttcactcttggctgttgctgtgattcctgtttgcctatagtggtagctgttcatttatttccactgccatacagcattccatggtgtgcatgtgcagcctgggtgtccatattctcctgtaacagccctttgggctgcttctggttcttgctgttgggagcaacactgcagtgttcactcccgcacacatctcctggtccacataggcatgcagactctcagacgggaatctgagggctgtagggtttgcatgtctctaacttctccagatgatgccagactatttccacaagtgaatgctagctcagtccccggcctccccaggcctcagtttccccatgtatgaggtaggccatttggagacttgaagctctcagatacaggaacagcagtttgggggagctgagcaggtctggggtgtgactgacattcccaggtacctgaaggaggaacggcacatctccagttgggacctgcagtccttcctggaaacttccatggcttcccacacgtgcaggttcaaagcctctctcctgaacctaggttcagaaccccttctgc

SEQ ID NO: 1564299 - DNA, 4001 bp, Homo sapiens
taaaacttttattattctagcaataataatgtgtgttaattttaggaatatagaaaatacaaacaagcaaaaggagaaaaatcattcataatcccaccaccgagaggctgtactttctttcatccttcacaagttatgtccatatatgtaatatacaaatgtactttttacctttcaaaaatatgatattcacatattacttagcctttttccattttatatcttaccaagaacctcttttttacaaatgtgtaaagttcttttattaaaagacagagacttgtagattggttcaaaatacaataaacaatgagatgcagataacaagagatacatctaaaaccattaatagcaacaggttataagtagaaatatggacaaaggaatatcaggaaatgctaataaaaagcaagctatatggtattgttaatatcagataaaaatcaaggtaaactacattaaataggggtaaggatggtttcgattaaccttccaacgcatcactataagtttgtttctgactctccttatctcatctatttcatccacttctctaaacatatcttcattgcttaaatgcctgttgtgtatatcttctttaaactcctggagagattgaatcagcctttctctaaaagttccttttgctttggcctcctcctctagcttctcctcctcttctggcttttcctcaggctttggctcttcctcatgctttggttcactctcattttctggttttccttccattttttgacaggatttcatcttgtatctgtctacctctcttccttccttcttttctttcttgcttattcttctttgaatacaatgacttctagaaagcaaaaagaagacagtaagttaaagacttggtgagtggacaggtgctgtggacagaggccttagcatttaattttttttattcagagctgttataaaatatcttccacctaagaagcccagtcagcaatcagagcttcactatccccactccttttacctccactttccacctcctcacttctctcttgtccttccctctaaccttttccaaggccctcctttccgccgtccagccctccccagacctttttcccccatagggcctaacacagggaccaggccagaaaagagaaaggtggctggcaggcagaggaagaggggaaaggagaagggggagagaaaagaagaggggaaaggggtggggtggaagggagccggcaggaacggtggcgcttacaacctttgtctccaccccaggagactttataatattcctctcacctacctggcactgatcgggtcagtttcttcctcctccttttctagctttgggtcttgctggaaacaacagccctgcagataaactggaaacgggaggggacggtgggggtggggcgagcgcttggtgggccgaccagcgccagagactgacacacgtagctttcctcctttagggtttcggatatggaaagtttcccaccttttgtttcccctagttcaccccctctccacagtgcatgcaagtcagttcgtttttcccatcagacaaagagtgagaaagcagattatttccaaactatctttaagactgaggcggggttcgggaggagggtgggggtccggaaagcagtcttagatagcagaggatgattatttttaaactaccacaggtctccctgttcttctcctaggacccctagtccctttcccaagggtcatcagttcccgtagacctggaggtggagggtggagggacggacctgaccggcactcccacaagtctctgccttaaacccccccacactagaaatccccagtcaacacctacagtgacaccaacctgcaaaattcccgcaagtttgactccttccacgggcctcagggaccaccgcctgcgctgctgaaggaagctggtatccagacgggaacaaggaccagattaccaggacttctgcacacgtcgactcctggtcacatgagatctacgtcaccagtgagctcgggtccctaatttccactcccaccaaaagcgcggcagaagtgggcccaccctctctccctccccgccccccacttatacatttggccctgtcagtcttttctgttgtttcctatcccagcgggaaaaatgttatttgcttgactctgattactagggaggggctacctctttttctggagctactgaacttttctacttctttcgagaattgtctcttccattcttccactcccaggataactcctccatcagtcgtccctcctctagcctccatttcctctgcaatctggttcttagctgttgtagagcagggtggccttggcagcagttgtgaaacaacaacaaaaaaagaccctggaacaagagtgagatttctgaatgcaatttttactttttatttttcgtacttctatatcctttttaaaaaggtaactttaatctctctctctctctctctctctcttcttttttctgtctttctttctcttttttttttttgagacagggtctcactctgttgcccaggctgggttgcagtggtgcgatcacagctcactgcagcctcaaactcctcgaaacgagtgatcctcttgcctcagactcccaagtatctgggactacaggtgtgtgccaccatgtccagctagtcttttaatttttttgtagagacagggtctatgttccccaagctggtctcgaactcctgggctcaagtgatcctcctgcctcaacctcccaaagggctggaattacaggcctgagccactgcactgggcaacttttatctttttatagtcagaaaagacaaagaaaaaattactttaatgacatgagttaatacatgtacagtgcttattgtacatgtggcatatagtaagtgcttttaaagtgaaagctgttgtgatattagaagttttgtgaggaaaatgatacagaattttttaaaaaagagtaatgtttcattccagagtcctcatggtggtgttaccaggaagctgtgctgcctgaagaatcatcaattaatcgtcaggtacacattgtgaacctgagtttcctcatctgaaagaagggaataatagcatatgctcatagaattgagatctattgaaaataaaaataagagttaatttttcatctgtacaattagaaaagacaaatattgattatattcagagttgatgagcatatggtaaaacaaatattcacatgtactgtgagactattaagtagtacaacatttttggaagtcattttggcaatatcaaactttagaagatatgtgcttttggacacatcaattcctcttctagagatttatcatacattaatactcctatgccaaatatggtcattgtagtagttgtggcaatagtgttttttttaaagagccaaaaacttatatgtttctaaaaggaaattggtttaagaaaagtttgatcattcatatagagccacattatacagtgatgaaaaaatgatgtggagttacatttactcacatgaaaaaaattgttcaatgtatattgttaaacaaaaaaaggcaaattgaaagttaattttatatgtggtattacatttttgtaacagtatacatatttgtgtatttaaaatatgagtatacaattaaattacatgataacatgataagtgaagtccagaaattcattctataaaattccaggttatgttactgagagatggatggatggaatgactgatgtgagtctatttggctagctggctacacaacccaaattcatcaaggactcagctgtgatttgttgccacaaacaattcttcactgagcacttggacttaaatatcatccatccattttactctctccccacctgctatcaccaatcatgttatatccaaactcaagttgtttcagggtcttactgtatttttatatcattagaaatgcagatgaatatatcctgaacatcataggatatacttgagaatgtgtatttcatataaagagaacttt

SEQ ID NO: 1564300 - DNA, 4001 bp, Homo sapiens
ggatggtcattcctcctttggagtgtgccaggggccttggattcagaaaaggatgccttggttggttgtcacagtttgggcaaacgcttggtgatggaacccgctacccactggctcacctgcctcatccacgtgctggtcaaaaacatgatacatgcccgcaaaggcatagttctcgctcagtgacgtgtccccggccatggcccgacttgcctctgctgctgacgtgggcaccacgctgccagggggcctgggccccaataggaagtgaggggtgacaggaggtagatgcgagagtgttcagtctgccattgccccagggcccctctcctcctcgcaacccgccccccgccttggctgcctctggtgcatacctgtcctcatagacggcacggttcatctgcgcctgcagctggtaggagcctctgctgacagaacgacggtgcccacgggcccccagggcccgaggatcatcctcaaagtcctgcaaatggagagggtcagggtgggtgcatcttgcaaaaagcccgagaacctttgaggtgtggagccctgaaaatctacctagagtcagatcacttctcactgtgtcccctgccaccaccaccgctgcccacttgtactactgcagtggcttcctcacgagttctgctgttcctgccctccccctgctcagcagatactaaagacagggcttgctatatgtttactgacctgtttacaaagtttgtgtgtttactggtttacttggcatattatctttttgtcctctgctgatgcagaacagtgcccagcaaagagcaggtgcttgatgaaagtcagtggagtgaatgtgtgcaggcagggtatgcccgggggtgaatgtggccagaagctcacctccatgcggtcaagagtagtgcggctactgcggacgatgctgttgctataggcacgagcactgcctggctcggagaggggcccgtagcgctggcccagcagctgcccccgaagcctcaggtactgccgacgcagcgctggggggtgcccagccttggcattctcccgcagcagctggctgcgccggcggatatactgcgtccgaaactgtggaaacgttggtgtgcggtacgcgttgtacctgcagggtcaggatgcagggcaggcagcaggcacaggacagagggaatcaatcagctcgggggggggggtacggcaggagagtgaggtgtgtggcagtgactggggcctaggtggtaagaatgactagcagtggtgatgagggacctcttggtcctgtggtgggagtgagtctgcagtaataatgagcatggtcatgaggtcagtttgcagacaacagagtcagtctgctgccgtgctggggtccctacggggtgactgggtcagcgcagacaataattagggtcagtataccagggcgacagaaatcagactgacattatgggggtcagcgttgggaggtgatggggtcagaatggggaagtgatgatgtaaaaaaaaaaaagtctaggggacacccataggggataggatgtcacctgcctgagccccacctccctctcacaggtagccgctttgcgcatgcccacatctgaccacattttcccagcttgctgtttagaatcctctccggcgcagccaactcaccgcgggcgtgcccgcccccgctactgcgcatgctcacctccggcatgcccacgcagccgcataaggcaagttctccgcccagcctcacttatcgccattgcgcatgcaccacagtaagttctgctcccatgggctttgaccccacgcctcacctcgcgtccactgctaagacttgctgccacaccgcggccattccccggcctcctcctctggcgtgtccgcccgcggcagcctgcaggacaagggcctggaatgtgagcgtcccgagcgaagggatctagttccgtcccttccaccaggcgaccattgccatagacatcgagtccctccgcgccggagatgtcacgaactcccccccgggtgttaccatggtcatcaccccagccctgcccttcctgggcagcgcccgggtgacacacagcgattcagaacagacaccgcccctccccagtcgccatagcaacgcccctcccccgcctagcattccttgcttgacattctccacccatcttgtccccgccgccctccgccttcccttctcagatccaagagcatagcccgggatcggggaccacctccggggctgcctccggttcttgaggccccccggagcggccctgagaccactgtcgccggttccttctgtctctcctccctttctcaggctccaggcaagatggctgcctgctatcagaaagaactgccgagcccagagcgaatcgataggcatccttcccagggcgtgggagtctcgcaggcgcattgagggacattggcttcaagcccaaggacggaggctccaccccttgacttctacccactcgttaattgcactttttgtgtatacaaggataatgtccaagggacatagcgtcaggggtgagtttgctaatcattccctagaaatcagaagtacaacattataaaaaagagaagaaacacgacttttaaaaagtggtgtagggccgggcgcggtggctcacgcctgtaatcccagcacttagggaggccgaggcaggtggatcacttgaggccaggagttcaagaccagcctggccaacatggtgaaaccccgtctctactaaaaatacaaaaattagccgggtatggtggcgggcgcttgtagtcccagctactcgggaggttgtggcaggaggattgcttgagcccaggacgcggaggttgtagtgagctgagatcgcgccactgcactctagcctgggcgacgggagtgaaaccctgtctcaaaaacaaaaacaaaaaaagtggtgtaggccactttttagcagcacaatcttgtccaagcaaaacttgaataatagaataaaaaatcatcatatatgcaaagacgccttgaaagttcaccagttcttgcagtgggcctctgcacacccctgggatgagtaaggtcggttgtgtgtgtgtgactgggatggttggacttggatgcccccagacagcttgaggcttgagtttctttcttttttttttttttttttctttttgagacgggagtctcgctctgtcgcccaggctggagtccagtggcgcgatctcggctcattgcaagctccgcctcctgggttcacgccattctcctgcctcagcctcccaagtagctgggactacaggcgtccgacaccacgcctggctaaatttttgtgtttttagtagagagggggtttcaccgtgttaaccaagatggtctcaatctcctgacctcatgatccgcccgcctcggcctcccaaagtgctgggattacaggcgtgagccaccgagcccagtcgaggcttgagtttctaaagacagaagatagaattaggcaaaagaagctttggggtttggatccaaagaggctatctgaatcatctctatttcaacttccagcaggaagctgctttcaaactgttcatcttaacgttatcagggtaaacttcctgttggatcttaacatcaactgacataaaattcaaagctgttattttccacattatttttataacaaatacaatcaattcaacaatgttttaaagtcaccgaaagatcacactgtattgtgttgactcagcatctcccttgtccctgtaacaagcttatcagtgtcttttcatattaaatactcttttgtaacatgattgataaagagtaaactctatttcactgcacaaacatgtaaccttaacaagaacaactaatatttatgagacaatgtgctgggtactgttcaaggtattttatacatatattaatctatttaatcttttttttttttttgagatggggtttcactctgtcacccaggctggagtgcagtgacacgatcttggctcactgcaatctctgccacctgggc

SEQ ID NO: 1564301 - DNA, 4001 bp, Homo sapiens
ccccccgccttggctgcctctggtgcatacctgtcctcatagacggcacggttcatctgcgcctgcagctggtaggagcctctgctgacagaacgacggtgcccacgggcccccagggcccgaggatcatcctcaaagtcctgcaaatggagagggtcagggtgggtgcatcttgcaaaaagcccgagaacctttgaggtgtggagccctgaaaatctacctagagtcagatcacttctcactgtgtcccctgccaccaccaccgctgcccacttgtactactgcagtggcttcctcacgagttctgctgttcctgccctccccctgctcagcagatactaaagacagggcttgctatatgtttactgacctgtttacaaagtttgtgtgtttactggtttacttggcatattatctttttgtcctctgctgatgcagaacagtgcccagcaaagagcaggtgcttgatgaaagtcagtggagtgaatgtgtgcaggcagggtatgcccgggggtgaatgtggccagaagctcacctccatgcggtcaagagtagtgcggctactgcggacgatgctgttgctataggcacgagcactgcctggctcggagaggggcccgtagcgctggcccagcagctgcccccgaagcctcaggtactgccgacgcagcgctggggggtgcccagccttggcattctcccgcagcagctggctgcgccggcggatatactgcgtccgaaactgtggaaacgttggtgtgcggtacgcgttgtacctgcagggtcaggatgcagggcaggcagcaggcacaggacagagggaatcaatcagctcgggggggggggtacggcaggagagtgaggtgtgtggcagtgactggggcctaggtggtaagaatgactagcagtggtgatgagggacctcttggtcctgtggtgggagtgagtctgcagtaataatgagcatggtcatgaggtcagtttgcagacaacagagtcagtctgctgccgtgctggggtccctacggggtgactgggtcagcgcagacaataattagggtcagtataccagggcgacagaaatcagactgacattatgggggtcagcgttgggaggtgatggggtcagaatggggaagtgatgatgtaaaaaaaaaaaagtctaggggacacccataggggataggatgtcacctgcctgagccccacctccctctcacaggtagccgctttgcgcatgcccacatctgaccacattttcccagcttgctgtttagaatcctctccggcgcagccaactcaccgcgggcgtgcccgcccccgctactgcgcatgctcacctccggcatgcccacgcagccgcataaggcaagttctccgcccagcctcacttatcgccattgcgcatgcaccacagtaagttctgctcccatgggctttgaccccacgcctcacctcgcgtccactgctaagacttgctgccacaccgcggccattccccggcctcctcctctggcgtgtccgcccgcggcagcctgcaggacaagggcctggaatgtgagcgtcccgagcgaagggatctagttccgtcccttccaccaggcgaccattgccatagacatcgagtccctccgcgccggagatgtcacgaactcccccccgggtgttaccatggtcatcaccccagccctgcccttcctgggcagcgcccgggtgacacacagcgattcagaacagacaccgcccctccccagtcgccatagcaacgcccctcccccgcctagcattccttgcttgacattctccacccatcttgtccccgccgccctccgccttcccttctcagatccaagagcatagcccgggatcggggaccacctccggggctgcctccggttcttgaggccccccggagcggccctgagaccactgtcgccggttccttctgtctctcctccctttctcaggctccaggcaagatggctgcctgctatcagaaagaactgccgagcccagagcgaatcgataggcatccttcccagggcgtgggagtctcgcaggcgcattgagggacattggcttcaagcccaaggacggaggctccaccccttgacttctacccactcgttaattgcactttttgtgtatacaaggataatgtccaagggacatagcgtcaggggtgagtttgctaatcattccctagaaatcagaagtacaacattataaaaaagagaagaaacacgacttttaaaaagtggtgtagggccgggcgcggtggctcacgcctgtaatcccagcacttagggaggccgaggcaggtggatcacttgaggccaggagttcaagaccagcctggccaacatggtgaaaccccgtctctactaaaaatacaaaaattagccgggtatggtggcgggcgcttgtagtcccagctactcgggaggttgtggcaggaggattgcttgagcccaggacgcggaggttgtagtgagctgagatcgcgccactgcactctagcctgggcgacgggagtgaaaccctgtctcaaaaacaaaaacaaaaaaagtggtgtaggccactttttagcagcacaatcttgtccaagcaaaacttgaataatagaataaaaaatcatcatatatgcaaagacgccttgaaagttcaccagttcttgcagtgggcctctgcacacccctgggatgagtaaggtcggttgtgtgtgtgtgactgggatggttggacttggatgcccccagacagcttgaggcttgagtttctttcttttttttttttttttttctttttgagacgggagtctcgctctgtcgcccaggctggagtccagtggcgcgatctcggctcattgcaagctccgcctcctgggttcacgccattctcctgcctcagcctcccaagtagctgggactacaggcgtccgacaccacgcctggctaaatttttgtgtttttagtagagagggggtttcaccgtgttaaccaagatggtctcaatctcctgacctcatgatccgcccgcctcggcctcccaaagtgctgggattacaggcgtgagccaccgagcccagtcgaggcttgagtttctaaagacagaagatagaattaggcaaaagaagctttggggtttggatccaaagaggctatctgaatcatctctatttcaacttccagcaggaagctgctttcaaactgttcatcttaacgttatcagggtaaacttcctgttggatcttaacatcaactgacataaaattcaaagctgttattttccacattatttttataacaaatacaatcaattcaacaatgttttaaagtcaccgaaagatcacactgtattgtgttgactcagcatctcccttgtccctgtaacaagcttatcagtgtcttttcatattaaatactcttttgtaacatgattgataaagagtaaactctatttcactgcacaaacatgtaaccttaacaagaacaactaatatttatgagacaatgtgctgggtactgttcaaggtattttatacatatattaatctatttaatcttttttttttttttgagatggggtttcactctgtcacccaggctggagtgcagtgacacgatcttggctcactgcaatctctgccacctgggctcaagcagtcctcctacctcagcctcccgggagctgggaccacagacatttgccaccacgcccggataatttttctatttttggtagagacggggtttcaccatgttggccaggctggtctcaaactcctgagctcaagtgattcgcccgcctcggcctccctaagtgctaggattacaggcgtgagccactgtacccagtcaatttaatcataataactgaaggttgtgggtcctgttactatccccattttacagatgaggatatctgaagcccagggaattcaagggtgacattttattgaactggttcccttacgtttttttttttttttttttttttaa

SEQ ID NO: 1564302 - DNA, 4001 bp, Homo sapiens
ttccctcccccaccccaatacacacacacaaaagtaccaaaggacttggtgtctcattcaatctgaattgtcagttcattactttgaagggaaaaccacacacacaaaaattaagtttcacggaagtccaatacatttcaaaacccaaatgtatttcctatgctctacacctagctctaaacttgtctcagatattgaacttgaaggagattcggtgtcatctcaagattggccactgccaccccaaaatcccacaacagtgacatgaaggttggtggaaagacaaacatctgaaatctaccaacgtacattgctttctgattttattactgtaactttttggtgcatattgtgtataaacatacattagtttttagaatgacttctagcatgcatggctaactatacttgcatcacagcgggttattactcccacggagtaagtgtgagaattgaaggcagtgaacttctcgaaccatattagtcctttatactaacatctacattttaccaatcctcaagttcttacagcatgaaaatatatttcactgcctctatttccacgtacattcgtaggggagttcggcgaaatcgctttaaagcactaccccaactttgaaaagtggagaagtgggtaagtaaatacaagtcctagtcaagcgagcattccaactactgtacttcctattcagaatcacccatattaatcaccactaaaacatcttgcagaattagataaagaacacaaagctggggctctccttccaatcaccagattactcagcacttgtttgtccctctgcagtcagttgtgcacatttcttctgtctggccatccttttagaccgcattctgcctaatagggaccgtgtattcgatttcctttacctcacgataaggtgttattttaataaaacactgttgatctagagtacattcgctagaggactttcttaagcaaatacccaaccttccccccgctccttttcgctgtgtgcaagaaaaagaggacggcaaataggggagagttacagccacctctgaagtgaataggtaagttagcggtaaacgggagaataaaaaactacaagttacatttctcctgttactgctcctttaatctacggtccccgaggccaaaacggatgtttgaaaggtaagctcagaaccccacagatacaaatctccgactcaggcacgtaagctgttccccctcacagaaggctggatcagaagagaaacgggctccgagaccgaccctgggaccgttcagtagggaaacggccgggaggctgcccgaggtggctgactcccccttctccgagtcaccccgccctaagaagccccaggtctgggttctgaagtcctccagtgagacggggaggaacagcggtggcggacacagcgggacctgggaggggtgtagggggaagacacaggagatgcggggggcttgggatgcccggcttcctgtcatagctgcagtcacttaccccacggggtagccgccccctaggtgcacatcttcaggggcatcatagaattcctcggtgtcgctttccgacgccatttataggacacacccgcgggtgagggggccggcgccgcctggaggaagggtgactcttgtctcctcctcgtcgacctccacccgggcgagactggggaagtgggtctcgggcgaggctgagggagcagacgatctgtagcgaggagactgttaaggaaagggggccgccctcagttgccgggcttcgggaatgaccggcaaagcggccgcctgaagaggcggcggttggtccagggaatgttgctgccaccgctcccagtgataggtgtataaggagcgcgaaagaggcggtggctcctcgcagtaagggaagaagggcgcgccggctacagcggctccagtttctcccgcagcagcaatttacagcagctggaagagctagttgcccgcaaaataccgacgcgcacctaccctcgcgagatttcggaggggcggtaatacgtgggcggggcgaagaggtggcgggggcggttccagagaggcagcgctccgattacttcggcccgagaagcctatcaaaacggcgcaagcgcgttgagggcgttcggtgagggccggaagtagccgagaagggagggggtgagcctcccgaagggaggagtctaggacctgcgcaggagcagcgtggtgccctggctctgagagcgcgcggccgacgtaggtggggtcaggcagaaagtcttactccctaactctgcagttccaaagagacgcgttttgagaggggtgattttgagtcggtcttttacttgtaaagaaatactctcgggaaacgttggtgtggacattttggcgtatatttacgatgtcttactatccaagcccggaatgtcccaccctagggcgtcggcaggtccaccacctctggcgttacgagaataactcgcccttattcactacgagatctctaattgagatccctagatatgatcctgccggccagagggtggggtccttgagatatacacggggagtgtgccagttccatggtgtaatgatggatttattgctggagctgagccagtattaggcctccggttactttttctccgcacatgtctgtcgctgccaacacagtgtgagagaagttcttacatactgcccaagatgtgcgtcagctaaatggtaaatatttattgagcagatatcattgcaagcctacgagctaatggcttaattctgatcctcaactgcccagcgtccggtgataaaaatagaaaggtactttttaaaaaaccgagatgttccttcttaaaccacgggtcattgaccatcaaggtgataacattgactttcagtatgatcacacagcatatttatttctccaactgacatcatgataggcattttgagctgttcgtgcagcctcaattagtattcaagaaaaggctggattggagccaggggtatggtctcagagaaactggaaaggggctctagactttgtcaagcaatcagggcaaggtctgctgtggtctagtggacttgggtaaaaaccaaatgtcatatactgtatattctataataccccagggagtttagggaaaacactgcgtaatcaaatatattaatatttttgcagcaagatatatgattgttcatacgggataaataaatacaagtaaatagcctcattcagtttgagtcagacgcttctgccaaataagtttaagatagatctatttgactgtcaaataaattactaaaaaaaaaaaaaaacagaaacttggtttccagagcttttgaagtttcagaattggagacaagggatttgtggatccttgtgagggtatgacttttgtcaaacctaaaaattattaggttttatgtgtcttaaacatgttaattaacttcctaggtataaaaatgtaactcaaagtactaacttttaaaaacgttttgctcactaagataggtttttttgttttctttttggattatggaaagataccagatataaggtagggaaatatatatttatggaaagatgttaactacctgaatgtattctcttcctagatatctaatagtgaatttatggcttccaaagaaaaaaaagttagttttctctatatgatagaggtgttagttccaggcgcggtggctcacgcccgtaatccctgcactttgggaggccgaggcaggcggatttcttgagctcaagagtttcagaccagcctgggcaacatggtgaaaccctgtctctacaaaaaattcaaaatttaactgggtgtggtggcatgtgcctatggtctcaactactgtggaggctgaggtgggagaatcgcttgagcccaggaggttgaggctacagtgagctgagatagcaccactacactccagactgggcagcagagccacaccctgtctctcacacacacacacaaaaaacaacagcaacaacaaaaacaaaatgccgtgtgtggaaacc

SEQ ID NO: 1564303 - DNA, 4001 bp, Homo sapiens
agcagcctgggggatggaaggaatccagactgccttaaagaatgcccaggtaggaagctgggggcccatggcccacttctgacccctcttttcctcgcttcctcccacaagggtacaggcccaatcctctctcactttggtcttggttgaaacgcaggctggtcactcctcgaagtggctgttgagtcatggtgcaggattgttcctctgcatacaaatgggataaagatgagaagagtcctggaatctcccctccaagttctgcctcacctgatttcctcctcctactctgctaactactgactctggagtgactgcaaaaaagataaaaacaggccaggcgtggtggcttatgcctgtaatcccagcactttgggaggccaaggcgggtggatcacctgaggtcaggagtttgagatcagcctggctaacatggtgaaatcccgtctctaataaaaatacaaaagttagccgggtgtggtggggggcacctataatcccagctactcaggaggctgaggcaggagaattgcttgaacccgagaggctgagatggcagtgagccgaaatcgagccattgcattccagcctgggtgacagagcgagactccgtctcggggggaagaaaaagataaaaacagagagtcccagggtctctgctctaagctcccaagatcccaaacaacatggccaggaaccctccttctttcaggtttggcaagctccaggcccacactgacgtggaccccacacctcctctttacatgctggccctcactgacttgtcaggaagtaatgtgatagggggtgcccccgtgatatctcctccccaccgccagccaatcttgatcccaatgccagacatggcctggaaccactcccaacccatttctcatcttcaaacctgacctagcaccggactctctcaataaatagacaaaagtgggctaggagatgcacttcttgtacctccctgacttggccctgggactgctatgcttggtctgccatccccaggaactcctctgctcatacccttctaactgtaccccaacctatttgaccaccccagagtcctctcacacctttccccctcaaccggcttccccaaactccttcaggatgcctaccttgggatgaccccttctcatgccttggtaactacccttcagggccagcctagacattcccttagattggcttatgccctggggactctaccctaggattccccctagcactctaaattttccacccctgggacatctccttccttgtgttctgctgtccttgactacaacataacctggcctggacccaaccccaggaaccccccccatcctcctaagattccccctctagacccctatccaagaccccgccccagggcacccttgccttctaagacccttgcccaaaacaaaccacccaaaactcctacctaggagaacctcaacccctaagatgcctgcgcagtcccctactaagattactgccatagagcccccaacttcccttcaaatcctcaactccccaataactctggccagacatactccctcccccatcctccaagagtccaaatctccttcctttctttcagttacaccctccactggaatgcctcatgctctttctttggacagctctgccttagagttattctctggacagctccaactttcaacaccccttttttgcacctccattccaagactctgtccgggatgcctcgcccctctcccaagaccagccgcatgctccttccaacgccagcacccactcaagacctctgccttagacccctactcgaaagacttccagcctcccccagacccaaccaaccctgggatcgtgctccagcttcctgccgccttcaccggcctgacctccgcgtgtccctgacccgggccccagctgtcggtgccgcccgcggcccggttttctgacctcccgggccttggagcccggctcgggtgtttacatcaggccctacttccgggggagggagcctgtcgcaggaaatgactcaccccagctggaaaaaggcggccaccgccttcctcgcctagttcccgggtcttcggagcatcgcgagtgacagtggggttctccggggagggcgcggggagcggaggaaggttggctgggggaccggaggcgaagggggttcctcaaggccgagactgtctgagggaacccggaagggtggggagagagagcgtgccttgcccccagcaaagcgaaaccggccaagccctcagccccttggtcacccacaatgggggagtaaaccttccctgctaacaagacgcggacctccgcggcggccgagagtagccgccccggttcgcaacacacagtcctcccaggcttccagaggggcggcgctgggggttacaggcgggggcggacctggagaccttgaaagtggagaaacctccttggctccgggaagccaaggaacagatttcgctttctttctccccaccctgtccccccaaccccgccagctctgagttttgtcttttgtgttttgtttagttttgttttctgagacagagtctcgctctgtctcccaggctggagtgcagtggcgcgatctcggctcactgcaacctccgcctcccgggttcaaacggttatcctgcctcagcctccggagtagctgggactgcaggcgtgcgccaccacgcccatctaatttttgtatttttagtagagacggggtttcaccatgttggtcaggctggtctcgaactcttgacctcaggttatccacccacctcggcctcccaaagtgctgggattacaggcttaagctaccacgcccggcctctgcttttatttttacaaaatacaaaatagctttttgatagtaaaaggtatgaatgctttgggttaaaaaaaaaaaaaaaaagaggtcctacctatgataaagcttttaaaaaaaggccccaaattatatgcatactggaaggaatttttttttttttttttttttttgattaacagagtttggctctttttgcccaggctggagtgcaattagcgcgatcttggctcaccacaacctccgcctcccgggttcaagggattcttctgcctcagcctccccagcctcccaagtagctgggattacaggcatgtgccaccacgcccagctaattttgtatttttagtagagaccgggtttctccctgttgatcagtctggtcttgaactcctgacctcaggtgatccgcctgcctcggccccccaaagtgttgggattacaggcgtgagccactgcgcccggctggaaggatttttaattaaactttacattaagaaataataaataggctgggcgcggtggctcacgcctgtaatcccagcactttgggaggccgaagcaggcagatcatgaggtcaggagttcgagatcagcctggccagcatggtgaaaccccctctctactaaaaatacaaaaagttagccaggcatggtggtgcgtgcctgtagtcccagctactcgggaggctgaggcaggagaatcacttgaagccaggaggaggaggttgcagtgagcagagatcgcaccactgcactccagcctgggtaatagagtgagactctgtctcgaaaaaaaaaaaaaaagccgggcgtggtgacacgcgcctgtaatcctagctactggggaggctgaggcaggagaaccacttaaacctaggaggcggaggttgcagcaagcccagatcctgccattgcactccagcctgggagacgagcgaaattcccgtctcaaaaaaaaagggctgggcatggtggtgcatgcctgtaatcccagcaatttgggaggccgaggcaggtggattgcctgagctcaggggtttgagaccaccctgggtaacacggtgaaacctcctctctactaaaatacaaaaaattagccgggcgtggtggcgggcacctgtaagtcccctacttgggaggctgaggcaggagaatcattggaacc

SEQ ID NO: 1564304 - DNA, 4001 bp, Homo sapiens
gagaccatcctggccaacatggtgaaaccccatccctactaaaaatacaaaaattagctgggcgtggtggtgcgtgcctgtagtcccagctactcgggaagctgaggcaggagaatcgcttgaacccgggaggcagaggttgcagtgagccgagatcacaccactgcactcctgcatggcaacagagtgagactccatttcaaaaaaaaaaaatccagaggtgactaattgcccggacttcaactgaacctttgaagagtgctacccagtactccagttcccacacactcacagttaaaatagcaacctttttcctcattcctgagaaaagagggataaaataacaatctaagagaaaaggaaagaacaatgtttctggggcgggcgtagtggcttatgcctgtaatcccagcactttgggaggctgaggcaggcggatcacgaggtcaggagatcgagaccatcctggctaacacggtgaaaccctgtctctactaaaaatacaaaaaattaaccgggcgtggtggcgggcgcctgtagtcccagctactcaggaggctgaggcaggagaatggcgtgaacccggaaggtggagcttgcagtgagtcgagatcgcgccactgcactctagcctgggcgacagagcgagactatgtctcaaaaaaaaaaaaacaaaaaaaaacaaaaaaaaacacacagtgtttcttgggaccagacctgatatcaacgttgtttcttgggaccagacctgatatcaacgttgtttcttgggaccagacctgatatcaaggttggctgttttcagcagtggaggcagcactacgctattggagtttctaagctaattaagggaattttttcccacttagtgaaagctggggcctcagggctcaggcttcctaacattttgggcacccagttaaaagatcaacagtcccctgtcccttcagcatgtgactcaccccagggcaatgaactgggcccacggctccatctgcatctatatccctgtaaatcatggatttatacatattggtgcatacgtttataatgcttgcaatatatacttccatttcaacttacatatatataaaatgtaacaatttcttttctttctttttttttttttttgagacgtagtttcgctctgtcgcccaggctggagtgcactggcgcgatctcggctcactgcaagctccgcctcccgggttcacgccatcctcctgcctcagcctcctgagtagctgggactacaggcgcccgtcaccacgcccggctgattttttgtatttttttagtagagacggggtttcactgtgttagccaggatggtctcgatctcctgacctcgtgatccacctgcctcggcctcccaaagtgctgggattacaggcgtgagccaccgcgcccggccaaaatgtaacaatttcaacctgtaaaaagataagtggtcaccttacctatgatgtggattaaataagacgtgtcaacgcagccatcctgccccatccgaccagaccttaatgctccaaaaccatcagtttgcgcctggaaaactggggaaagtgtttattcccttacacaggcttcgccaaaggccctgacacttagggctttttcactgctgcaaacgttggaccggcttgtgagaaggagtacagttaatctaactttggtatactgtatccagagaccacagagggctcgctctgcgatttatggtgcgaggaagaccagacacccgctgtgcccgtcctactcctgcagatcaaactcaaagccacactttccggagtgagaaacgggacagtaaatgaacgcaggaaccacggtgcgcaggcacagaaccccgctgggtttgctacgaaggttgaggtggaagcgcccagcgcaccaggcgccacggcccggtgtgtgacctcactaacctccaccagcgcgcaccctgtcctgccccttcacgggcgaacaaccccacacgaggcagtggtgtgggagccagtacccggaaccgtaaaagcacgactttcccggagcccaggcactgaatggcacccactgcgcatgccccagagcggcgacgaatgggagcccggagcgcaggggcggaggcgcgcccgggcagctaccgagaagcgccaatcaaccatcgaccaatcagatcatcaccgtcaatcgtcatcgaccaatcagagcccaccgcgccccggccttaagccagttgcttgttccgcggcgggagggttgggtcaagactaagccttcgggggagagggcaacgcggtgggcgggagagaggccgagggccgctcgggtctgggagtgccaacaggacgggatgggcacgagcatgccgggccccgcgcgggggaggggctctttccttaccccacacaaaaaggtgtgcccgggttggctgcccctgcccagtgttgtggctccatgtggacgctttcgtgcgcgcgtccctgccccgcgcgcggcaggccattccaggctgtgggctgcgggctctggggtccgagggtcggacacgctggggagtggacacccctagggtcacacagacagggctttggacacccacaggggcacacacattggggagtgggcactcctggggtcacacagaccgaggtgcagggatgtagggggcgcccgtccaggggtagttggtggtggctgagggtgagggcaaggtaaggactgggaggagatttctggttccctgactgggccagggttttcctgtgcaggtgaggggagtaggccggggcctctcgttggtggggagggctccaggagcctgtcccaaccctgcaggcctctggctgagcctcacagaagggagctctgagatgggctgtgcagcaggggaaagaaaaagagaggtcggtcgcctgttctgggttcttgaccatccaccagtggtggtggagcctggaagtctgagggaggagggtgaggaggcgcttgagggacggggggaatctaggcgtcaggaatgatagttcgttgatccaaattacccagtaatggataattttaacacgtgccaacctctcctgattacgtgaataatttcactgcgtcttcacaacaaccttaactactattatcatcgttgcgttctggatgagagacctaaggccctgtaggggttaccagaaggcacacagctgagcagagccagggccagggtcaggctgtgcactctggactctgtgttctgaccatgcgtcactgactctacagatgtctctcctttctgtgctcaccctgtcctcattccgcccccggcaggacagagggcccctgaagcatccatttgcccacagcatcagtgaactgtgtagaactctctgtgcaagggagctggcccctgtgcaccctgagtcgtttttcttctctggctccccacgcaggggcagtgaacagaggacagggaagctttgtaggaagagggcagtaaatcacagcatagttatccagactgcaattatttacttagtgcattcagggtcttgtattaggtggtggggattccgcgctgaaccagacagacaagggtcctgttcctgcctgccctcggggtgtgttttgggaattcctccttgagggtgctttggcactgaatgggcagaggtctggtgctggggggctgtcccacaccagcaagacttgtaatgtacatgaatgtgaatgtcatttcaggatggtaaaaggaggccttttcttttttttttttttttctgagacggagtttcgctcttgttgcccaggctggagtgcaatggcacgatcttggctcactgcaacctctgcctcccaggttcaagtgattctcctgcctcagcctccctagtagctgggattacaggcatgtgccaccacgcccagctaattttgtatttttagtagagacagggtttctccatgttggtcaggctggtctcgaactcccgacctcagttgatccacccaccttggcctcccaaagt

SEQ ID NO: 1564305 - DNA, 4001 bp, Homo sapiens
aagcagaataaaagaaaaacagcatgggaatgttctcaagtttgcaacatttccaagaaaactaaatatatatcagtaaaatgtgtaaaaaataatcacaaaagattaaaatccataaccgttaatcttgacccagaacagaatgagaccaggacaagacatccttatcagaagataagtattcagagaacaaaatgttcacgtaatctgttgtaatttaaactcacaccaaaaagcgagtgccaattttcaaagataaattcgtaatgaccaaaaaaaatgtacaattattttagttcaaagtcagctttagtggattttttaagacagagtctcgctctgtcgcccaggctagagtgcagtggcacaatcttggctagctgcaacctctgcctcccaggttcaagagattcttctgcctcagcctcccaagtagctgggattacaggcacgctccaccacgcccggctaagctttagtgcatttttgctatcctttaatgcaaggtatctttcccttgagctgtcgagtttaaacaatttttaaactcatcaatccaaaggatagagaccgtcttaaaagacacccgctgctctgtcacatactaagacctcttcaaaagttctcttggtattacaacttactatagatgaaaaacagataacggtatctccaaaaattggatacaatcactactatgcagaagattttcacaactcaaaagctgttttattcatataattgtctcaatcaacagtaactcttaagaaaaaatagccatactattcgcatctgttttgagggttcagtctcattttaacagtctctcaacccccaagatacggagatactcacgtgcaggatttccacccccaccccattatataaatgtttcaccacttttaactagtcaaacaaaacctctttcagtacagtgaagccacctcaccactttcatcctcacctatcataccatctcctccccatccccaacctgtcagtcacacaacacacaccaccccttcccaaataacacctcagaatctccttgagcctaacacatttacacaagccagcaatatttctcaccccatcctgtccctcacacatcagctgaacctctgaaataaatctactctttccttcatcctattcccatcaatacaactgaacttcccacacccgaagcgatcttccctttcagtagcttcaatctcacttaagtgatcactcagtcctttgtcaaccgtctcctgtccccctcctgtatcctcctcaccttccccgtcccctggtcttccatcagctcccaaagttgtcacccctcaacaacaaccaaaaaaaaaatcaaaaacaaaaaagaaaacaaaacaaaaaacgcacctcagcctcaaacctgcccttccccactttccccctgttcattttcctctccgcctattcagcagtttcgacagccccttagcccggagcccggcctcgtccggtaccgactggtgaaggcactcaccctgcttcggtcaagccgccccccgctagggcgcttactcctaacagactcttggccgccgctgcctccctccattcatccctggcccattcatctctcagcccgatcccagacacgccccccggcctcctccctctctcctagcgccccggccggcccgggaccctcaccagattagaggctctcgcaaaggaagactctcttactcttttcgcttctccctcgccctctctcgagcctcctctcgccccacgacgagccacaccgtagaatagacacatacacacacaccgcctcctcctcgatcgcctcctccgatgcttcttactcctctcctcgatgtctcgagctccgctccgcgtcgtgtgcgcttgcgcgcgcgagcgtctccccgcgagcccaccgggccagctacggccggtaggtaaagagcgggcggagagaggggagcggggtacgagcccaagctcgcgctcggcccggagctgagcagacgcacgcgtactccagccagggaattcggacgggtaggagagaggggcggagggggggcggggaagggaggggagaacagaagagggggaggggcggagaaagccaacggagcagccccaactcggaaccgcccctatcgcagcgaggtgccgagtggccagccaactagagtgcgcgcacgcctcccgcccccctcggcgccgcgggagagagggatgcgcgtcgaggagaaaggcttctccccattccaaagagaaaatctcttagaggaagcacgcgcgacatctcctgtgtgttccgaagcgctctcgctctctctcagctgctctaccctctcccctcagagaagaagaagaagaagaaaagtccaagcacacactacttcctagccccccactgcccacccttgggtctccgcgagcctctgaatgctgtagcgccgctgttaggaggtggtacccgccggcaccttttcgcccgccacccctgactccctttttccaactcccgggatttctcgcgagacccatacctgccggctttgggattagaagtcgaagcaccgatttacaaatactggcctcccagttacgttgcgggggcaacagccacggcatgtctcccccgccccccaggaccgcagtgcgcgcgcgcgggggctgggaaacgaccaaagcagggatgggaaagggaagctatgaaactgatttttgacggcatgtaaccgctaggcctgggcacgtgccctgcgcctcgcagacgggtgcgatgtaccctgggaattgtagtttttcttcccacctatggtccgactcccaccctcagttttacttaggcctctgaccgggagggggatttccgacgccattttgccgggaacaatggccctcggccctgatggtggcaggtgggggagggagcaatggttttaagggttcggtgaacctcctcggccccttggtgccatagcaaccccttcagagacctggtcccgccccctcgccgccgccaggcttctagagcgcgcgcatgcggaaaggctgcctcccactgagactggctctctgtgtctcccaccggccacctccttgaaaaactcccagatcctctagctggtagtgaatgctgcctccttcgagctttcggtacatgttagcctcggcgcagcggcttcaaactgcttcctgtgctatgccagaagcagtatagaattgtttccgtcattctcccatgaataatcccggcccgacagaggaggaaattgaggctcaggaggggaaatggacatgaattgctcaacttcatactatttgtggagttagaacttgaacccaggtgtgctcactccagagccgaggcatttttcaatctcccgggagtcatctggtggcgcagctaaagggcagggcattcttttcgaatgcccctcaagctaggaggctgtgtgggaaatatctgactaatgctttcagccctccagcctcggccctatcactgagttatcccttctccactacctatttttcttttcctgctgtaggcctcagaaatctcagtctttttcagctctttaaaacagcacaatcaatacatttaactcaggtttccaaagtccaaataaagtgtaatggtttatctttgactttgtaaggggggggtgagtataatgatgggaggccttgtagccctatctcttgcctctgtcccttccttattaatttccatattgccagaatatgtaaggaaaccggaccatgcccttaatacattcaaactcccatctttccgttttgacaacggagggagatgctgaggaaacaatagggctatgaggtccagccactagaatggtggagatcttccttcctggccgatttgaaagagcaaggtgtggtttctccaaatagcttcaccattctaccttaagagtctctgaagtctcaattagctgaaaaatggatggggtctcccacgctcctttcctcactgtccctga

SEQ ID NO: 1564306 - DNA, 4001 bp, Homo sapiens
ggaaatgtgtctgaaatacatggaaaacaagattctccaagctgatttctgtatggtccattcacgtttgtcacaggttacaccattaaaaagaaaatcctcacattgatatctttcagcatgaatctccactccaatataaccacaactgttttatattacccttggaaagtgagccttagccttttctaagcaaaacactattttaattggttcattttccagttgtttgggtttttaacatacatatggtataaaagggcactgcattccaagcagttctaccaattccagaaccatccaagggttgatcaaacagctggggctctagcctttggttaaaattataacatgatctcacctgattttcaaaataactaggcatctttttaacccataaaattgtactaggattgatataggtttctgagcccagaggtttgcaatgttcagcgagaatgttagggaatcacgatctttttgttttgctttcttttgttttcccctgcttgaactcagagaaatcttcaaacaattcagcagcttctctcctcaaaagtttattttcagacgccagtgccatgcaggccgccttccctgtgcaggtaggaggaagcaggcacaatgtcaccacactgggcctttgcaagtcttcaaatcactgggaagcctgtggtgtttcctttttggcactcaggccctggaaggagagttgctctagagaggacaagacatcagataacctgtggaaacacttgatgtccacagaaatcccaattccacacaaaatacatctctgtaaaagcagttgaacaatcgaaacccgtagacaatcgagcaaaaagttaaggaagagcttcgttacatggaattaattaaatgaaatctgatagtgcttttacaagaatcagtttttacttgattgggtttttatacgtgaataagacagctttgtaccccatgcatatctttcacaaaaaggaaacttaaaatacaattcttgtttttcgtttattccaaaagcatatgggactaatcatattgcattctggctgcagtacagaaggctatttcaaacagttttaactcacgagttttaaggcgctaaagagcaactagagtttgggaacagacttctccaactccaaaagggttgggaatccctcaagggcccgtctgacatcaggttttggatggaaaccagcctgaacccgccagacagggaacccgcaccccaaagctggggcgcacgtttgtgatccaaggtgacagctcatctcgccaccgcggggctggggacacctgcagaaccagggccggggcagtgggccgcagacgcccgggaccgggatgggcgaggctgccgcagagaaaggaaaagagggccatctgtcagccccaggagaggaaattccaggagcccagttcccaggcgccggacagcgggtgacgtgagggaaccgaatgagagggtccgcccagcggcgggggacctgtaggcggccggcctcggcgctcagagggctcgaggcctggagaaggggcacctccattcttggtcagagccctgggagtcggggtattgggagggtggatcctctcccggacccccggaaccaaagatcttcacccagccccgagggcctcctggtgtctccgatcctctccctgggcccaagggatgggggcgcctcgatcgtagcctggaccggagcactccagggagtcccctggttccggggatggaggcgctccgagctctgcccgggcccgggggctctcggcggcggccccgcgctgggcggggcgtgtccccagcgcatccgcggtggcgccggccggcggcccgggtcgtagcgcccgcgccgggtctggcgcccccagccggcccgcttaccggtcgcgggggtcgatccacgacgtctggcgcgtgttgtggtcaatgtaaaagacgcgaccgtcgtagtctcgcgcctcctcccagccggcgggcagcggcagctcggcgctctcccgggcccgcggcggcggcgcggaaggagctgggggcgtggggaccgcggcggggggcgccggcggcgcggttcccgctggggctgcgcagaaggcggcggctcccgcggggcctcgcgcggctgtccccgccgtcgccgccggccgccgctcagccaaggcatgacggcgcgggccccgccgccgcccggccgccccgcgcgcgccgcctcctccgccagcactaaggcccggcgcccggggcgcgggggcggccgcggggagccgcccgccgctcctggcgcatcctccgcccggcgcccgtgcaccggcgtccgcccgcccgccctagcaagccgctgcccgcgccgcccactccgttcaggtagcccgggtggccgccgcgcgcgaagtcacagcccgggagccgccgccgccgccgccgccgctgccggccgcccctccgttcccgcggcgcgcccggccatcttcgttcctcggcgcggcccgggcgagcaggggcagggcgttcgcaggccccgcctccggccgtcccgccccgttctcacccaggccccgcggctcctcccacgccggcggctccacccacgccggctgctcctcccgaatctcccacggaggctcccgctcctcccgccgcctctgcttttccacccactcccgctgctccgcctcccccggccccgcgtcctccgcgcctctccgtcgccggctgctccgcccccagtctccctcggggtcctcctcggcgctcggctcctcgaccccacccccacccctccgcttgctcctccccctccgccgtcctccctctccgcgcgctcctcgctctctccctcccgctccgccaccttcctccggcctcgggaaaccgcatggaggccaggatgggcgccgccgcgtcagtccgcccccgggcccccgcgtagaggaaggcgggcggggaggacgacgccctacccggactgcgggcgcggcctgcctggggtgactcctcgggcgcaaacaattcccgagagagcgggcagtgccctcccttcacccgctcccgggctctggctgtctggagaccctctgcgcacttggcgggaggctgcgccctcggtctcccacacaacccgtctggtcccgcgaaggtgggaaaagcccctgaaggcggggccgagggagctgaggagctgggggagcccgcggccggtcctctcgggcggcgcagggaggacgcctctggaagcgggcagctgggcaggtggccactttgcgtccccgccaggacagccctagaagggctaacctgggggcccacactaggcgggagttccttgaccttccctgagcgcttcatccggtttgtggggtctgatcgtttgagcggagacccaagtagaccattgctggggaggaagccgggtcaactcctaaaactttcagcctagacgggaacttctgtttcactggctcccagctggggaagctgaagctccagagttggggctgtgtcttgctctaaatctcccacctacttcgtgccccagacccacagccgcaacacgttatgccaggaaatgcaggacagtatcagggagatttttaaacagttacagtgatacaaaaatatctggtagagcctgattgaaatccagatacacaggggaagagactggaggaaaatgtcctgaaatgctcacaagagtttgcattcctttggcgggatttttaaaaatgatttgccttccaattttttgtaaaatggtaatattacttttatgaggggaaaggttgttttaaaaaagaagaatgggccgggcgcggtggctcacgcttgtaatcctagcactttgggaggcccaggcgggcggatcacgaggtcaggagttcgagacgagcctggccagcatggtgaaatccccgtctctactaaaaatacaaaaattagccgggcatggtggcgcacgcctgtaatcccagctactcgggaggctgaggca

SEQ ID NO: 1564307 - DNA, 4001 bp, Homo sapiens
aaaatccatctcgaagaacaagagaagattcattatatccagggacagcatgaagctgcaaactatactctcccttttccagccaactttgagcaaatgtttggtatcttttcctaatgttctctttgctcctgttactgctcatggcataggccacaatgcacacatagaccttctcccgccccatagacatactttcccttcccagcacctgggatctcagctgtatcctgatcttcttctgtctgctgcccaggtgtaggatcccgactttcagctgctggttcttctttttggggctctccattactgggctcctgggactggctgtgtggttctgtgtttgtgtgtgtctagataaaaagttttgttattaatacatgtcaataatataaatatacagaatacacaggtatgtcttattataagtatgtctagagacatttctccaacactaccccgtatacctaatcttcataacactattcttccctcagagaggttactcaaagacagatatcctcagggactttggaagccgttttaatcaatgttgggatgaatgtgtgtaatctgttctgaataagcatgaggaggaagttatggacaaaatctgggcacacacgatcatccacccacacaaaacccaaatataaccctctggactaatctttccttcatgggatgccatgatcattttttatcagcatgggagaccattatcagtgtatccatactagtccatcaacactatcagaaaaataactttctgctaagagaaaacatcgaatgttaagacattcacaagcagaggcacaatgagctcaggaggttgtgaacttcttggcataggcctatatgttgatcgtcctcatcaacacatacttcactctgcaagcagaatactgcgattgggaaaatgcacttgacaggacaactagatttgaccgctttcatggtcaaatgttaacttggacattttttttttttttaatttagaaatactctgaaagtccccgggcaagtataagtgtatgcaccttttgaatcgaatgcttgcaaagccacttaagtaggtctagctagctgagcgatgtcttaaggctcctggcaaaaaacacagggcatttcccatgaggttggtttcacaactggacactccatcagggagacaagtaggaaattacagctacagaactgaaactgcagtgaccaccaattttgtcacataatgatttgctaggcccacttcccccccaccccaaagtcacatttttaggaactcagggccccgcccattggaatctccacagtggagttgagaatttgctacacagcagtgggcactcctcacaggacccctatgccaggcactctacagacctcggggctgcggtcactagcccgcagcatgccccgtctccaggacccttccataccgctcatgccgtccctctcctggtcccgtctggggagtccagaatcttctgtcggggttccaggtgcttctgggactcggatacccccaacagcaccccagcttcgcctgagcccctccactcctcggccctccttcctccctagttatggccgtgacgagacaagaaggtccatgggcgtggcaccgcatgagagggacgacgacttcgagggccttctcactctgagtcactgaccacacaaccctccggaagcctgctggttcctcttcactctcactcacacttcaactcccagttggatctgcctgtggacctacccgccgtgtctcagtagcggagaaagaatccagacctcagggacccgagtcgccggctcacagctccgccgcgttccccacactggcgaaggggccgatgggaagacgcccagtgaacatgcgcactgaggtgggcaccaaaggagcatgcgcagtgaggttccctcgtgccttaagggctgtggtgcccctccttatcccgccttgccctgtcctatgctccttcccaggtccccattaacgactttggaatccctcctctctgtgtgtgggttcccccccaccaggactcaaatacctcaaataaagtcagccttcaaaactcactccatgaccgggcgcggtggctcacgcctgtaatcccagcactttggggggcggaggcgggtggatcatgtggccaagagatcgagaccatcctcgccaacatggttaaaacccgtctctactgaaaaatacaaaaattagctgggtgtggttgtgcgcgcctgtactcccagctactcgggaggctgaggcaggagaatcacttgaacccgggaggcggaggttacagtgagccgagattgcgccactgcactccagcctggtgacagagcaagactccgtgaaaaaaaaaaaaaaactcactccatgctcacctgaccctcctccccgctatggccctccttcgtcccatgcccgggaccccacaacagcaaggccatggcagtatcgctgagttttagtagaaagatgacgacctcagaggccatggaccaagtggcacaacccacaggaagccccccacgctccccctcacactcactcacacttcactttctgggaggactgatctgcagacctactggctaagtcatagtcagcacgaaagaaggaagtcacgacgtctcctttcacagttgtggagggacagaagttagagagcaaggcgcataggcagcaaggaactttcatagaaagggacatgcacattgagccagggacttttcagggcagggtagggttttccgctgttcccagacccgcatccccatggcgtttgtagtagaaaaagggacttgagagctttcgtctctctttgtccaatctcatgcattcagaaacgttgggaacagacagtcccttactggaggatgtgtctcaggaagaccttttgtggaagaaataaattattttcatatctttatttataaagccgtttttatttatttttttttccagacagagtgtcactctgttgctcaggctggagggcagtggcatgaccatacctcactgaagcctccatctcctgggctcaaacaatcctcccgatgtagcctccccagtccctgctactacaggtgcagacaccacacctgggtaattggtttatttattatttatttattttttagatagtggtctcactgtgttgcccatgctggtctcaatttcctgggctcaagtgatcctcccaccttggccagttttataaatgcttttattaatcactttgttctctggttctgggttttctgccatgcttccaataaacgtaattgaataaattcttctgtagaataaatacattcacacctgtttactcttttctttttaggttgtgttacttcacatttaaatctctggactggtaactgatttccctgaatatacctgtaggtcattcagacagtatatgtttcagaaatagccatagattctgactgtaggctctaggctcagttatgaccagaaaacaagtcctgccagtctcctacctcaaatgtatgtttgtgtattgacctgatccctgggacaagtttcccagactgaaatcatggtatcataaagctggacgctttcttgaggggatagagtaacatccatattttcaatccgtgtgtaaataaattaattaatggatgaaaagatgtatgcaataatgcaaagcagaataacaggtatttgattaatacggcatcaccaaattttgctttaacagatctgatcgtaattatttcagtctttgtgggtcatgtagtttctgtggcgtagtgttgtgttttttagcaataatacttttaaatggaaaaaaatccttatctcaatggctatgcaaaacaagccatgggctgtatttagatctcaagccatagtcagctagcccctggattatcttttacttcacatatttgaatgctgtatttttgtaccagtagtcaaaagattaacaaaggagagttctaccaccaggtaa

SEQ ID NO: 1564308 - DNA, 4001 bp, Homo sapiens
aaatccatctcgaagaacaagagaagattcattatatccagggacagcatgaagctgcaaactatactctcccttttccagccaactttgagcaaatgtttggtatcttttcctaatgttctctttgctcctgttactgctcatggcataggccacaatgcacacatagaccttctcccgccccatagacatactttcccttcccagcacctgggatctcagctgtatcctgatcttcttctgtctgctgcccaggtgtaggatcccgactttcagctgctggttcttctttttggggctctccattactgggctcctgggactggctgtgtggttctgtgtttgtgtgtgtctagataaaaagttttgttattaatacatgtcaataatataaatatacagaatacacaggtatgtcttattataagtatgtctagagacatttctccaacactaccccgtatacctaatcttcataacactattcttccctcagagaggttactcaaagacagatatcctcagggactttggaagccgttttaatcaatgttgggatgaatgtgtgtaatctgttctgaataagcatgaggaggaagttatggacaaaatctgggcacacacgatcatccacccacacaaaacccaaatataaccctctggactaatctttccttcatgggatgccatgatcattttttatcagcatgggagaccattatcagtgtatccatactagtccatcaacactatcagaaaaataactttctgctaagagaaaacatcgaatgttaagacattcacaagcagaggcacaatgagctcaggaggttgtgaacttcttggcataggcctatatgttgatcgtcctcatcaacacatacttcactctgcaagcagaatactgcgattgggaaaatgcacttgacaggacaactagatttgaccgctttcatggtcaaatgttaacttggacattttttttttttttaatttagaaatactctgaaagtccccgggcaagtataagtgtatgcaccttttgaatcgaatgcttgcaaagccacttaagtaggtctagctagctgagcgatgtcttaaggctcctggcaaaaaacacagggcatttcccatgaggttggtttcacaactggacactccatcagggagacaagtaggaaattacagctacagaactgaaactgcagtgaccaccaattttgtcacataatgatttgctaggcccacttcccccccaccccaaagtcacatttttaggaactcagggccccgcccattggaatctccacagtggagttgagaatttgctacacagcagtgggcactcctcacaggacccctatgccaggcactctacagacctcggggctgcggtcactagcccgcagcatgccccgtctccaggacccttccataccgctcatgccgtccctctcctggtcccgtctggggagtccagaatcttctgtcggggttccaggtgcttctgggactcggatacccccaacagcaccccagcttcgcctgagcccctccactcctcggccctccttcctccctagttatggccgtgacgagacaagaaggtccatgggcgtggcaccgcatgagagggacgacgacttcgagggccttctcactctgagtcactgaccacacaaccctccggaagcctgctggttcctcttcactctcactcacacttcaactcccagttggatctgcctgtggacctacccgccgtgtctcagtagcggagaaagaatccagacctcagggacccgagtcgccggctcacagctccgccgcgttccccacactggcgaaggggccgatgggaagacgcccagtgaacatgcgcactgaggtgggcaccaaaggagcatgcgcagtgaggttccctcgtgccttaagggctgtggtgcccctccttatcccgccttgccctgtcctatgctccttcccaggtccccattaacgactttggaatccctcctctctgtgtgtgggttcccccccaccaggactcaaatacctcaaataaagtcagccttcaaaactcactccatgaccgggcgcggtggctcacgcctgtaatcccagcactttggggggcggaggcgggtggatcatgtggccaagagatcgagaccatcctcgccaacatggttaaaacccgtctctactgaaaaatacaaaaattagctgggtgtggttgtgcgcgcctgtactcccagctactcgggaggctgaggcaggagaatcacttgaacccgggaggcggaggttacagtgagccgagattgcgccactgcactccagcctggtgacagagcaagactccgtgaaaaaaaaaaaaaaactcactccatgctcacctgaccctcctccccgctatggccctccttcgtcccatgcccgggaccccacaacagcaaggccatggcagtatcgctgagttttagtagaaagatgacgacctcagaggccatggaccaagtggcacaacccacaggaagccccccacgctccccctcacactcactcacacttcactttctgggaggactgatctgcagacctactggctaagtcatagtcagcacgaaagaaggaagtcacgacgtctcctttcacagttgtggagggacagaagttagagagcaaggcgcataggcagcaaggaactttcatagaaagggacatgcacattgagccagggacttttcagggcagggtagggttttccgctgttcccagacccgcatccccatggcgtttgtagtagaaaaagggacttgagagctttcgtctctctttgtccaatctcatgcattcagaaacgttgggaacagacagtcccttactggaggatgtgtctcaggaagaccttttgtggaagaaataaattattttcatatctttatttataaagccgtttttatttatttttttttccagacagagtgtcactctgttgctcaggctggagggcagtggcatgaccatacctcactgaagcctccatctcctgggctcaaacaatcctcccgatgtagcctccccagtccctgctactacaggtgcagacaccacacctgggtaattggtttatttattatttatttattttttagatagtggtctcactgtgttgcccatgctggtctcaatttcctgggctcaagtgatcctcccaccttggccagttttataaatgcttttattaatcactttgttctctggttctgggttttctgccatgcttccaataaacgtaattgaataaattcttctgtagaataaatacattcacacctgtttactcttttctttttaggttgtgttacttcacatttaaatctctggactggtaactgatttccctgaatatacctgtaggtcattcagacagtatatgtttcagaaatagccatagattctgactgtaggctctaggctcagttatgaccagaaaacaagtcctgccagtctcctacctcaaatgtatgtttgtgtattgacctgatccctgggacaagtttcccagactgaaatcatggtatcataaagctggacgctttcttgaggggatagagtaacatccatattttcaatccgtgtgtaaataaattaattaatggatgaaaagatgtatgcaataatgcaaagcagaataacaggtatttgattaatacggcatcaccaaattttgctttaacagatctgatcgtaattatttcagtctttgtgggtcatgtagtttctgtggcgtagtgttgtgttttttagcaataatacttttaaatggaaaaaaatccttatctcaatggctatgcaaaacaagccatgggctgtatttagatctcaagccatagtcagctagcccctggattatcttttacttcacatatttgaatgctgtatttttgtaccagtagtcaaaagattaacaaaggagagttctaccaccaggtaag

SEQ ID NO: 1564309 - DNA, 4001 bp, Homo sapiens
agagctggaggtggcagtgagccaagatcatgccacaacaatccacactgcgtgacagatgagcctctgccacataataaaaaaatgtacatttctatacaccaaattaaatggtttcaagtgatttagtaaggactgtattttcaagcatacaaaatccatctcgaagaacaagagaagattcattatatccagggacagcatgaagctgcaaactatactctcccttttccagccaactttgagcaaatgtttggtatcttttcctaatgttctctttgctcctgttactgctcatggcataggccacaatgcacacatagaccttctcccgccccatagacatactttcccttcccagcacctgggatctcagctgtatcctgatcttcttctgtctgctgcccaggtgtaggatcccgactttcagctgctggttcttctttttggggctctccattactgggctcctgggactggctgtgtggttctgtgtttgtgtgtgtctagataaaaagttttgttattaatacatgtcaataatataaatatacagaatacacaggtatgtcttattataagtatgtctagagacatttctccaacactaccccgtatacctaatcttcataacactattcttccctcagagaggttactcaaagacagatatcctcagggactttggaagccgttttaatcaatgttgggatgaatgtgtgtaatctgttctgaataagcatgaggaggaagttatggacaaaatctgggcacacacgatcatccacccacacaaaacccaaatataaccctctggactaatctttccttcatgggatgccatgatcattttttatcagcatgggagaccattatcagtgtatccatactagtccatcaacactatcagaaaaataactttctgctaagagaaaacatcgaatgttaagacattcacaagcagaggcacaatgagctcaggaggttgtgaacttcttggcataggcctatatgttgatcgtcctcatcaacacatacttcactctgcaagcagaatactgcgattgggaaaatgcacttgacaggacaactagatttgaccgctttcatggtcaaatgttaacttggacattttttttttttttaatttagaaatactctgaaagtccccgggcaagtataagtgtatgcaccttttgaatcgaatgcttgcaaagccacttaagtaggtctagctagctgagcgatgtcttaaggctcctggcaaaaaacacagggcatttcccatgaggttggtttcacaactggacactccatcagggagacaagtaggaaattacagctacagaactgaaactgcagtgaccaccaattttgtcacataatgatttgctaggcccacttcccccccaccccaaagtcacatttttaggaactcagggccccgcccattggaatctccacagtggagttgagaatttgctacacagcagtgggcactcctcacaggacccctatgccaggcactctacagacctcggggctgcggtcactagcccgcagcatgccccgtctccaggacccttccataccgctcatgccgtccctctcctggtcccgtctggggagtccagaatcttctgtcggggttccaggtgcttctgggactcggatacccccaacagcaccccagcttcgcctgagcccctccactcctcggccctccttcctccctagttatggccgtgacgagacaagaaggtccatgggcgtggcaccgcatgagagggacgacgacttcgagggccttctcactctgagtcactgaccacacaaccctccggaagcctgctggttcctcttcactctcactcacacttcaactcccagttggatctgcctgtggacctacccgccgtgtctcagtagcggagaaagaatccagacctcagggacccgagtcgccggctcacagctccgccgcgttccccacactggcgaaggggccgatgggaagacgcccagtgaacatgcgcactgaggtgggcaccaaaggagcatgcgcagtgaggttccctcgtgccttaagggctgtggtgcccctccttatcccgccttgccctgtcctatgctccttcccaggtccccattaacgactttggaatccctcctctctgtgtgtgggttcccccccaccaggactcaaatacctcaaataaagtcagccttcaaaactcactccatgaccgggcgcggtggctcacgcctgtaatcccagcactttggggggcggaggcgggtggatcatgtggccaagagatcgagaccatcctcgccaacatggttaaaacccgtctctactgaaaaatacaaaaattagctgggtgtggttgtgcgcgcctgtactcccagctactcgggaggctgaggcaggagaatcacttgaacccgggaggcggaggttacagtgagccgagattgcgccactgcactccagcctggtgacagagcaagactccgtgaaaaaaaaaaaaaaactcactccatgctcacctgaccctcctccccgctatggccctccttcgtcccatgcccgggaccccacaacagcaaggccatggcagtatcgctgagttttagtagaaagatgacgacctcagaggccatggaccaagtggcacaacccacaggaagccccccacgctccccctcacactcactcacacttcactttctgggaggactgatctgcagacctactggctaagtcatagtcagcacgaaagaaggaagtcacgacgtctcctttcacagttgtggagggacagaagttagagagcaaggcgcataggcagcaaggaactttcatagaaagggacatgcacattgagccagggacttttcagggcagggtagggttttccgctgttcccagacccgcatccccatggcgtttgtagtagaaaaagggacttgagagctttcgtctctctttgtccaatctcatgcattcagaaacgttgggaacagacagtcccttactggaggatgtgtctcaggaagaccttttgtggaagaaataaattattttcatatctttatttataaagccgtttttatttatttttttttccagacagagtgtcactctgttgctcaggctggagggcagtggcatgaccatacctcactgaagcctccatctcctgggctcaaacaatcctcccgatgtagcctccccagtccctgctactacaggtgcagacaccacacctgggtaattggtttatttattatttatttattttttagatagtggtctcactgtgttgcccatgctggtctcaatttcctgggctcaagtgatcctcccaccttggccagttttataaatgcttttattaatcactttgttctctggttctgggttttctgccatgcttccaataaacgtaattgaataaattcttctgtagaataaatacattcacacctgtttactcttttctttttaggttgtgttacttcacatttaaatctctggactggtaactgatttccctgaatatacctgtaggtcattcagacagtatatgtttcagaaatagccatagattctgactgtaggctctaggctcagttatgaccagaaaacaagtcctgccagtctcctacctcaaatgtatgtttgtgtattgacctgatccctgggacaagtttcccagactgaaatcatggtatcataaagctggacgctttcttgaggggatagagtaacatccatattttcaatccgtgtgtaaataaattaattaatggatgaaaagatgtatgcaataatgcaaagcagaataacaggtatttgattaatacggcatcaccaaattttgctttaacagatctgatcgtaattatttcagtctttgtgggtcatgtagtttctgtggcgtagtgttgtgttttttagcaataatacttttaaatggaaaaaaatccttatc

SEQ ID NO: 1564310 - DNA, 4001 bp, Homo sapiens
gagctggaggtggcagtgagccaagatcatgccacaacaatccacactgcgtgacagatgagcctctgccacataataaaaaaatgtacatttctatacaccaaattaaatggtttcaagtgatttagtaaggactgtattttcaagcatacaaaatccatctcgaagaacaagagaagattcattatatccagggacagcatgaagctgcaaactatactctcccttttccagccaactttgagcaaatgtttggtatcttttcctaatgttctctttgctcctgttactgctcatggcataggccacaatgcacacatagaccttctcccgccccatagacatactttcccttcccagcacctgggatctcagctgtatcctgatcttcttctgtctgctgcccaggtgtaggatcccgactttcagctgctggttcttctttttggggctctccattactgggctcctgggactggctgtgtggttctgtgtttgtgtgtgtctagataaaaagttttgttattaatacatgtcaataatataaatatacagaatacacaggtatgtcttattataagtatgtctagagacatttctccaacactaccccgtatacctaatcttcataacactattcttccctcagagaggttactcaaagacagatatcctcagggactttggaagccgttttaatcaatgttgggatgaatgtgtgtaatctgttctgaataagcatgaggaggaagttatggacaaaatctgggcacacacgatcatccacccacacaaaacccaaatataaccctctggactaatctttccttcatgggatgccatgatcattttttatcagcatgggagaccattatcagtgtatccatactagtccatcaacactatcagaaaaataactttctgctaagagaaaacatcgaatgttaagacattcacaagcagaggcacaatgagctcaggaggttgtgaacttcttggcataggcctatatgttgatcgtcctcatcaacacatacttcactctgcaagcagaatactgcgattgggaaaatgcacttgacaggacaactagatttgaccgctttcatggtcaaatgttaacttggacattttttttttttttaatttagaaatactctgaaagtccccgggcaagtataagtgtatgcaccttttgaatcgaatgcttgcaaagccacttaagtaggtctagctagctgagcgatgtcttaaggctcctggcaaaaaacacagggcatttcccatgaggttggtttcacaactggacactccatcagggagacaagtaggaaattacagctacagaactgaaactgcagtgaccaccaattttgtcacataatgatttgctaggcccacttcccccccaccccaaagtcacatttttaggaactcagggccccgcccattggaatctccacagtggagttgagaatttgctacacagcagtgggcactcctcacaggacccctatgccaggcactctacagacctcggggctgcggtcactagcccgcagcatgccccgtctccaggacccttccataccgctcatgccgtccctctcctggtcccgtctggggagtccagaatcttctgtcggggttccaggtgcttctgggactcggatacccccaacagcaccccagcttcgcctgagcccctccactcctcggccctccttcctccctagttatggccgtgacgagacaagaaggtccatgggcgtggcaccgcatgagagggacgacgacttcgagggccttctcactctgagtcactgaccacacaaccctccggaagcctgctggttcctcttcactctcactcacacttcaactcccagttggatctgcctgtggacctacccgccgtgtctcagtagcggagaaagaatccagacctcagggacccgagtcgccggctcacagctccgccgcgttccccacactggcgaaggggccgatgggaagacgcccagtgaacatgcgcactgaggtgggcaccaaaggagcatgcgcagtgaggttccctcgtgccttaagggctgtggtgcccctccttatcccgccttgccctgtcctatgctccttcccaggtccccattaacgactttggaatccctcctctctgtgtgtgggttcccccccaccaggactcaaatacctcaaataaagtcagccttcaaaactcactccatgaccgggcgcggtggctcacgcctgtaatcccagcactttggggggcggaggcgggtggatcatgtggccaagagatcgagaccatcctcgccaacatggttaaaacccgtctctactgaaaaatacaaaaattagctgggtgtggttgtgcgcgcctgtactcccagctactcgggaggctgaggcaggagaatcacttgaacccgggaggcggaggttacagtgagccgagattgcgccactgcactccagcctggtgacagagcaagactccgtgaaaaaaaaaaaaaaactcactccatgctcacctgaccctcctccccgctatggccctccttcgtcccatgcccgggaccccacaacagcaaggccatggcagtatcgctgagttttagtagaaagatgacgacctcagaggccatggaccaagtggcacaacccacaggaagccccccacgctccccctcacactcactcacacttcactttctgggaggactgatctgcagacctactggctaagtcatagtcagcacgaaagaaggaagtcacgacgtctcctttcacagttgtggagggacagaagttagagagcaaggcgcataggcagcaaggaactttcatagaaagggacatgcacattgagccagggacttttcagggcagggtagggttttccgctgttcccagacccgcatccccatggcgtttgtagtagaaaaagggacttgagagctttcgtctctctttgtccaatctcatgcattcagaaacgttgggaacagacagtcccttactggaggatgtgtctcaggaagaccttttgtggaagaaataaattattttcatatctttatttataaagccgtttttatttatttttttttccagacagagtgtcactctgttgctcaggctggagggcagtggcatgaccatacctcactgaagcctccatctcctgggctcaaacaatcctcccgatgtagcctccccagtccctgctactacaggtgcagacaccacacctgggtaattggtttatttattatttatttattttttagatagtggtctcactgtgttgcccatgctggtctcaatttcctgggctcaagtgatcctcccaccttggccagttttataaatgcttttattaatcactttgttctctggttctgggttttctgccatgcttccaataaacgtaattgaataaattcttctgtagaataaatacattcacacctgtttactcttttctttttaggttgtgttacttcacatttaaatctctggactggtaactgatttccctgaatatacctgtaggtcattcagacagtatatgtttcagaaatagccatagattctgactgtaggctctaggctcagttatgaccagaaaacaagtcctgccagtctcctacctcaaatgtatgtttgtgtattgacctgatccctgggacaagtttcccagactgaaatcatggtatcataaagctggacgctttcttgaggggatagagtaacatccatattttcaatccgtgtgtaaataaattaattaatggatgaaaagatgtatgcaataatgcaaagcagaataacaggtatttgattaatacggcatcaccaaattttgctttaacagatctgatcgtaattatttcagtctttgtgggtcatgtagtttctgtggcgtagtgttgtgttttttagcaataatacttttaaatggaaaaaaatccttatct

SEQ ID NO: 1564311 - DNA, 4001 bp, Homo sapiens; identical to SEQ ID NO: 1564307

SEQ ID NO: 1564312 - DNA, 4001 bp, Homo sapiens; identical to SEQ ID NO: 1564308

SEQ ID NO: 1564313 - DNA, 4001 bp, Homo sapiens; identical to SEQ ID NO: 1564309

SEQ ID NO: 1564314 - DNA, 4001 bp, Homo sapiens; identical to SEQ ID NO: 1564310

SEQ ID NO: 1564315 - DNA, 4001 bp, Homo sapiens
gctgagccaatcatacagcaacattctaagaagatcaaattaatcaagtgaaataatgtacattttgatacatcaaattaaacagtttcatctgatttagcaagggatgtattttcaagcatacaaaataaatcttgaaaaaaagagaagatttattatatccagggactgcatgaagctgcaaactatactcttcacttttccagcctactttgagcaagtgcttgagatcctttcctaatgttttctttcctcctattactggtcatggcataaggcatgatggacacataggcctccttccccctataggcattatttctttcctttcccagcaccttgaatctcagctgcaccctgatcatcttctctcttctgatcaggtgtaggattccgacttttagtgggtggtttctcttctttaggctcttcatcagtgggttcctgggacaaaggggaggcagtatgtgtgcagataaaaagttttgttagtaatacatgtcaataatacaaatatacagaatacacaggtatttctaatcacaagtaagtctaaagacacttctccaacactgttccacatacttattcttcacaaagttactcttcccaaagagaggttactctaagacagttaccctcaaaggctttggaaaccattttaatctatgttgggttggatgtgtgcaatctgttatcagtaagcatgaggaggaagtcatgatggggaacacaagattatccatgaaggcaaaatcagattgtaatactcttggattagtctttccttcatgagatgcatgatcatttttatcaacatggaagacctttatcagtgtatctatactagttcaacaacactatcacaaaagaaatttctgctaataaaaaacatcaaaatattaaagcactcacaagcatagccccaatcagctcaggaggctgtaaacttcttcttggcctaggcctatatgttgatcttcctcgccaactcatatttcactctgcaaacagaatactgtgattgggaaagtgtgtttgagaggatagctgtatttgaccactttcatggccaaatgttaaatttcagtttttaaaaaagtttggaaataatttgaaagtaagtcccagggcaactagaagtgtgtacatcttctgaatcgaatgcttgcatagccacttaagttgggcaatctagcagagcaatgtcttaatgctcctggcaaaagatacaggatatttctgatgagatttggtttcacagttggattctccatagtggagacatttaagtttatacagctagagaattaaaactgcagtgaccacggctttcgtcacacacccatttgtttggacgatttccctccctaaaatcaaggttttgttggaaagcacagtcccgcccattcgaacctccagggtggagttgagaagttgtgacacatcactggacgctcctcgctggacatttctacccggagctctacagacctcggggtcgcggtcaccagctcatagcattcccacttcccaggcccctttcttaccgcttacacagcccattcctgggtccctaccaagaagtctggaatctgtcccattgggagttccaggcactttcgggactcagatacctccaacagcaccccgagcattcaccctatcttcatctggctccccttcactccgcggcccaccttccttatgacctggaagctttttactctctgaggccacagaccacgccgcctgaccctctggaagcccgctcactcctcctcacattcactcacatttcagttcctgggaggactggcctgcggacctataggctgcgtctcagtaggagagaaagagtccagacggctggaacgtgcccctcacactctcacagctccccagcggtcaccacgtgggcaaaggggtcgaagggaagatgcccagtgaacatgcacactgaggcaggtgtccaaggaacatgcacactgaagtcggtgcctgcgttgtgtgctgcagtgccccgcctcgccccaccccatcccgcgtcatgcagtcctccctcccctccctggttcccactgaggactctggaatgcatcgtctgtaagcagtttcatatgcctcgcggactcaaataccacaaatagtttcccccttcaaaactcactgcttgtttacctgaccctcctcccatctatggtccttctccctcccttgtccggcacccccaccacagcaaggccatggctgcatcgctgcgtgttagaaggacggggacctcaaagcccttccacctaggaggccatggatcgtgcccgcaggctcctcctcacactcactcacactcaaacttctaggactactgaactgcagacctactggctgactcctagtcggcaagacagaaggaagtcacgatgtctctttgcacagctctgctgggacagaaggcagacagtaaggcgcatgggcaacaagggacttgggcagtaaggggcgttcacactgagtcaggcacatgcaaggccagccagggttttcccactgtcccaaaaccagaatccccagtatgtttgtagtagaaagaaagggacttaagagatatttttttttctctctctcttgtcctaccattctcatgcatccagaaactttgggaacagagagtcccatgtcacccttagtggttgatgtgtctcagaaagaccttttgtgacagaaataaattattttaatgtttatatttatacatgctttttttttccagacagggtgttactttgtcgccctggatggagggcaatggcatgactttacctcactgcagcctggatctcctgggcataagcaatactcaagacgcagcctccgaagtagttgggactacaggtgtgtgccaccatgcccagctattttatttatttatttacttagagacagaatctcactacattgtccaggctggtctcaatttctgggatcgagtgatcctcccaccttggccaatttttattcatactttgattaatcacttccttctctggtctgaggttttctgccatgctaccaatgaatagaaccacttctgtagactaaataaattcacacctcttccttttttaggtggtattattgcacattttaatctctggactggtaactgatttccctgaatatacctgtaggtcattcagacagtgtatggttcagaaatatccatacatatgatgtggtttgactctgtccccacccaaatctctccttgaattgtagttcccataatccccacatgtcatggaaaggaccctgtgggaggtaatgtaatcatggggtggttaccttcatgctgttcccctgatagtgagtaagttttcacaagatctaatggttttataaggggcttttccccttttgctcactcttctctctcctgctgccatgtgaagaaggatgtgtttgcttccacttcttccatgattgttaagtttccagaggcctccccagccctgcagaactatgagtcaattaaacctctttcctttataaattacccactctcaggtatgtccttatagcagcatgagaacggactaatacaacattggtcctaggatttaaacttagtttattgtgacatgatgtacagcagtggtgactgtgctcatcatatactctactccccaaatagcagccaaataacctgttcataagacagcgctgacattatttaaataaagctataaggtagagcactacctccacagaggcactagtatgtcagatgtggaagggctttgggtatatttgttgtgcttttcatgtccggtataaagtgggtattttaaagtgggggatggtttggttagaattgggtaggaatgacaatgatttaggattggtggatgcaacaagactttttaggcaatgggttcaaagagttttgggattgaaaaatgtcatttgacactttttattgaggagttgatggatctttcagg

SEQ ID NO: 1564316 - DNA, 4001 bp, Homo sapiens
ttttttggttaaaattaaacaaacttaggtccaaaggccctatatgtaactttccataaatgaatcccattcacaaaaaaataccgaatataacagcaaaatcgctgtcttccacaagagtacagaaacttgagtgaaaaaaaaattaatgggcattgttgacagtcatattctggaaaccccttaacagtgaattgctaaagtaacccatgacccaaattctgtcaatgtttaacttcaaaatgctctctgttgaggaaataatttctgtttcatgataatcttatcgtacttcgagttttctaattataaaagtatataaacaactctttaaaagccccttaaaatcatactaatatagctacctgtatgccaatgtcctgaattatccagattttaccaaacatactttcaaaaatacaaagcaaaggaaagagtggctgtcattcattgagctcttttctggcgttgctatcctgcttcactgaactttgttttgtcctgagccaatactgaagtacttacagtacagacacatttgagtattaacatttcaagcaaaatcattcacgttttctaatgtgaatggtagggagaacacaaaccttggaatgaaatatgaattccttctccatgactcaactgttcttggtaagcctccatttcagagcctcagttttcttatttataaaatggggctaacatccttatgcaaatgggctttattcagtgtattcaggtagggtgacttggcattctacatgctattaaagggtgcatacaatactgtggacaccttggctgagaagatcagacaacaacattctaagaagatcaaagtaaactagtgaaataatgtatatttttgtacatcaaattaaacagtttcatctgatttagcaaggactgtattttcaagcatacgaaatatatttcaaaggtaagagaagattcattatatccatgaagctgcaaactatactcttcacttttccagccaactctcagcaaatgtttgagatcctttcctaatgttttctttcctcctgttactggtcatggcataaggcatgatgcacacataggcctcctcccctccccatagacattctttctttcccttcccagcaccttgagtctcagctgcaccctgatcttcttctctctcctgaccaggtgcaggatcccgactttcagttggtggttcctcttgctgaggctcctcatcaccgggctcctggaaccaggggtgtgtgtgtgtgtgtgtgtgtgtgcagataaaaagttttgttatcgatacatttcaataatacaaatatacagaatacatagatatttctgatcataagtctaaagacatttctccaacacgattccacatacttatttttcataaagttactcttcccacagagaggttactctaagacagttgccctcaagggctttggaagctgttttaatctaagctgggatgaatgtgtgtaatcttttgcaaataagcatgagaaggaaatcatgggcaaaatctggggaacacaagatcatccatccagacaacagaagaacttaatcctcttggactagtctttccttcatgagatgccatgattatttttctcagcatgggagacctttattggtatatctatactggttcaacaacaattacaaaacatagttttgcaacaacaacaagttacaaaaataactttctgctaatagaaaacatcaaaggttaaggcactcaccagcataggcccaatcagctcaggaggtggtacacttctcctcggcctaggcctatatgttgatcttcctcgccaaatcatatttcacactgcaaacagaatactgtgaattggtaaatgcacttgaaaagacagctatatttgaccacttccatgaccaaatattaacttgtcattttttaaaagtttgtaaatactttcgaactaagtctcagggcaagtgtaagtatgtgtgccttctgaatgcttgggaagccattaagttggtcaagctagctgagcaatttcttaaggctcctggcaaaagacaggatatttccgatgaggtttggtttcacaactgaactctcctccgtggagacatttgggaaaatacagccagagaattaaaactgcagtgaccacggcttttgtcacacacccatttgctgggcccatttcccccctaaaatcaagttttgttggaatgcagagccccgcccattcaaacctccacagtggagttgagaagttgccacacagctctgggccctcctcactgtacacctctgccaggcgctttacagacctcagggccacagtcaccaacccgcagcgttcccagttcccttccttaatgcccaccctgctccttcccgggtcgacacggaggagtctggaatccgtcctcggtcgagggttccagggactcggatacctgccccagcacccccagcactcgccccattttcacctgacccctctcaactacgcggcccaccttcttccctcattctgacttcaccacaacaaggcccatggcagtgccacctcacgaggagaaggacgatcaccttgagacccttcggcctctgaggccacgggctatgctttcccacgctccggacagccactggctcctcctcacacgcactcacacttcaacccttgggaggactggcctgcggacctaccagctgcgtctcagtgggacagaaaaagtccagacagcaggaacgcgaccctcacaccctcacaactccagggcattcaccacgtgggaaaaggggccgaggggaagacacccagtggacatgcgcagtgaggtcggtgcctgcctagtgggctgtggcgcctctcctagccccaccccatgccgcgccgcgcagttctctaccctctcccaggttcccactgaagacttcggaatgtgtcttctgtgggcggtttcatatgcctccgggactcaaataccacaaatagtttcccccttcaaaactcactccatgttcactaggtcctcctcccctctatggccctccttcctcccctgtctgggacccccacgacagcaaggccatggctgtgtcaccacctgttaggagaaggacaggaacctcaaggacctccccgtcggaggccatagaccgcgccgcgggctcctcctcacagtctctcccacttcaactctgggaagactgatcttcggacttactggctgactcctagtcagcagcacagaaggaagtcatgatgtctccttgcacagctctgcagggacagaaggcggacagcaaggcacatggacaagggacttgggcagcaagggacgtgcacactgagtcaggcacatgcaaggccacccggggttttccctctctccccaggctcgcatccctaaggtgtttgtagtagaaggaaagggactaagaggcttcgttctctctcttgccctaccattctcatgcatccagaaacactggggacagtcccatgtcaccatgagtggaggatgtgtctcagaccttttgtgacagaaataaattattttattatatatattcatacatacttctttctcatttatatatgcatgggtgtctgccatgttgcaggaaatatctgggatgctggaaatgtgaagaccaaggaaccacacgtggtatgtcccatggaggctaccacactgtggtggggcagacagacagttaaacagaagagcagttgaactgcaaaggagaaacacggggaacggacccaggggagtaaagaacaatgaatgtcgtggccaagaagcaagggagaaaacaacacaatttctcaagaagataatatttctccattgcctttgcaccttttttgaaaatgagtttatcatgtctgtgaacctattgctggactccattctgatctgttgatttttccccagtaccacattccctggattactatagaattaacatgactcttgaaattaggtagtgtgatttc

SEQ ID NO: 1564317 - DNA, 4001 bp, Homo sapiens
tgtggacaccttggctgagaagatcagacaacaacattctaagaagatcaaagtaaactagtgaaataatgtatatttttgtacatcaaattaaacagtttcatctgatttagcaaggactgtattttcaagcatacgaaatatatttcaaaggtaagagaagattcattatatccatgaagctgcaaactatactcttcacttttccagccaactctcagcaaatgtttgagatcctttcctaatgttttctttcctcctgttactggtcatggcataaggcatgatgcacacataggcctcctcccctccccatagacattctttctttcccttcccagcaccttgagtctcagctgcaccctgatcttcttctctctcctgaccaggtgcaggatcccgactttcagttggtggttcctcttgctgaggctcctcatcaccgggctcctggaaccaggggtgtgtgtgtgtgtgtgtgtgtgtgcagataaaaagttttgttatcgatacatttcaataatacaaatatacagaatacatagatatttctgatcataagtctaaagacatttctccaacacgattccacatacttatttttcataaagttactcttcccacagagaggttactctaagacagttgccctcaagggctttggaagctgttttaatctaagctgggatgaatgtgtgtaatcttttgcaaataagcatgagaaggaaatcatgggcaaaatctggggaacacaagatcatccatccagacaacagaagaacttaatcctcttggactagtctttccttcatgagatgccatgattatttttctcagcatgggagacctttattggtatatctatactggttcaacaacaattacaaaacatagttttgcaacaacaacaagttacaaaaataactttctgctaatagaaaacatcaaaggttaaggcactcaccagcataggcccaatcagctcaggaggtggtacacttctcctcggcctaggcctatatgttgatcttcctcgccaaatcatatttcacactgcaaacagaatactgtgaattggtaaatgcacttgaaaagacagctatatttgaccacttccatgaccaaatattaacttgtcattttttaaaagtttgtaaatactttcgaactaagtctcagggcaagtgtaagtatgtgtgccttctgaatgcttgggaagccattaagttggtcaagctagctgagcaatttcttaaggctcctggcaaaagacaggatatttccgatgaggtttggtttcacaactgaactctcctccgtggagacatttgggaaaatacagccagagaattaaaactgcagtgaccacggcttttgtcacacacccatttgctgggcccatttcccccctaaaatcaagttttgttggaatgcagagccccgcccattcaaacctccacagtggagttgagaagttgccacacagctctgggccctcctcactgtacacctctgccaggcgctttacagacctcagggccacagtcaccaacccgcagcgttcccagttcccttccttaatgcccaccctgctccttcccgggtcgacacggaggagtctggaatccgtcctcggtcgagggttccagggactcggatacctgccccagcacccccagcactcgccccattttcacctgacccctctcaactacgcggcccaccttcttccctcattctgacttcaccacaacaaggcccatggcagtgccacctcacgaggagaaggacgatcaccttgagacccttcggcctctgaggccacgggctatgctttcccacgctccggacagccactggctcctcctcacacgcactcacacttcaacccttgggaggactggcctgcggacctaccagctgcgtctcagtgggacagaaaaagtccagacagcaggaacgcgaccctcacaccctcacaactccagggcattcaccacgtgggaaaaggggccgaggggaagacacccagtggacatgcgcagtgaggtcggtgcctgcctagtgggctgtggcgcctctcctagccccaccccatgccgcgccgcgcagttctctaccctctcccaggttcccactgaagacttcggaatgtgtcttctgtgggcggtttcatatgcctccgggactcaaataccacaaatagtttcccccttcaaaactcactccatgttcactaggtcctcctcccctctatggccctccttcctcccctgtctgggacccccacgacagcaaggccatggctgtgtcaccacctgttaggagaaggacaggaacctcaaggacctccccgtcggaggccatagaccgcgccgcgggctcctcctcacagtctctcccacttcaactctgggaagactgatcttcggacttactggctgactcctagtcagcagcacagaaggaagtcatgatgtctccttgcacagctctgcagggacagaaggcggacagcaaggcacatggacaagggacttgggcagcaagggacgtgcacactgagtcaggcacatgcaaggccacccggggttttccctctctccccaggctcgcatccctaaggtgtttgtagtagaaggaaagggactaagaggcttcgttctctctcttgccctaccattctcatgcatccagaaacactggggacagtcccatgtcaccatgagtggaggatgtgtctcagaccttttgtgacagaaataaattattttattatatatattcatacatacttctttctcatttatatatgcatgggtgtctgccatgttgcaggaaatatctgggatgctggaaatgtgaagaccaaggaaccacacgtggtatgtcccatggaggctaccacactgtggtggggcagacagacagttaaacagaagagcagttgaactgcaaaggagaaacacggggaacggacccaggggagtaaagaacaatgaatgtcgtggccaagaagcaagggagaaaacaacacaatttctcaagaagataatatttctccattgcctttgcaccttttttgaaaatgagtttatcatgtctgtgaacctattgctggactccattctgatctgttgatttttccccagtaccacattccctggattactatagaattaacatgactcttgaaattaggtagtgtgatttccccaaagttatagttcagaatcgttttggtttttctcgttcattttcctttccatataattttgaaaaaatgactccaatgaagtgggttgtataagttcatgcagtttcgctttgaaaggcagcagataaatgtgttagtagctataggaggacatgggggaagaaggggagttccccccttagcttggagaatgatcccatttagagggaagagttggtggttcaggagagaggaatgatcattgcaggagcaaagctcctgaaaaggtgggaggcatgggatcctgagctgaggtgaggggctggctttagttaggagcattgtatgcagaagggcggcagagaatgccagggcaagcacaggtagactgggttttagaagctctaagagttcccagcagatcgcttctctcctctaaatgaatcattatgggaggtcattcaaatggaggagagtttctagcattgtgtgggtgtttatataactatagagaaagtttctgtcatcttagagaatacatcaatcatcatgaacagaatattcctagaaatatgaatgttgaaggtgagctctcagacaggaatggggaacacggtgttggaaacatgtggacacacaatccctgtaagaaagtagcagagaatttggctagaatgcattctcttagatgcagagtagaacttgtaagtgatgaaattgtatatgtagctaagaacatttctaagcaaagtattgaagttgtggcctggtttctcctcgctgttggttgcaaaatgtaagggag

SEQ ID NO: 1564318 - DNA, 4001 bp, Homo sapiens
gccaatatcgaagtaccttatagtacagacacatttgagtattaagcatttttaagcaaaatcattcacattttctaaaatagatggcaggaagaatgcacaccttggaacaaaatatgaattccttctccatgagtcaagttttcttggtaagcctctatctctgagcctcagttttcttatttatttattttcattttttgagatggagtctcgctgtgtcaccaaggctggagtgcagtggcgcgatcttggctcactgcagcctccgccgcacgggctcaagaaattctcctgcctcagcctacttagtagctgagattacaggtgagtgccaccatgcccaactaattcgtatatttttagtagagacaggatttcaccacattggccacagtggtctcgaattcctgacctcaagtgatccgcccacctcggcctcccaaagtgcagggattacaggggtgaggcaccacgcccggcctcagttttcttatttataaaatgaggttaacatccctttgcaaatgggctttatttgggatgttatatggtagggtgacttggcactccacatgctatcaaagggtgcttacaacactgtgaacaccatggctgagaggatctcactgcaacatcctaagaatatcaagttaaactggtgaaataatgtacattttatacaaccaattaaacggtttcatctgatttaggaaggactatattttcaagcatacaaaatgcatctcaaagaaaaagagaagattcatcatatccagggactgcaggaagctgcaaactatacccatcacatttccagcctcttgcaaaactctcagcaaatgtttgagatcctttcctattgctttctttcctcctgttactggtcatggcataaggcgtgatgcacacacaggcctcctccccccatagacattccttctttcccttcccagcaccttgaatctcagctgcaccctgatcatcttctctcttctgaccaggtgtatgatcctgactttcagttggtggttcttcttgttgaggctctggcacactgggctcctgggacaagggcgggggtggtggtgtgtgtgtgtggagataaaaaatttttcttatcaatgcatgtcaataatatgaatatacagattacacagatacttctgatcatatgcatgtttaaagacatgctcctacactatcccaaaacgattccacatacttattcttcattaagttactgttcccatagagaggttactctgagaccgttaccctcaatggcgttggaagccattttaatttatgttgggttgaatgggtgtaatgtgctatgaataagcatgaagaggaaatcaccagtgaaatcgaggaacacaagttcacacatccaggcaaaaacagtatgtagtcttcttgggttactctttccttcatgagatgccatgatcattttttatcaacatgggagacctttatcagtgtatctatactagttcaacaataactaccacacaaaaaaatttctgctagtagaaaaaaatcgaatgtgaagtcactcacaagcataggcccaaccagctgagcaagtcgtaaacatcgtcttggtctatatcttcttcctcgccaactcatatttcagtctgcaaacagaatagtgtgcactttgggaggctgagggggatggatcacctgaggtcagaagctcgaggccagcttggccaaaatggtgaaaccccgtctctactaaaaatacaaaaacgtagctgggtgtggtagcgagcacctgtaatcccagctactcgggaagttgaggcaggagaaccacttgaaccggggggcgaatgttgcagccagccgagattgcaccattgcactccagcctgggcaacaagagcaaaactctgtctcaaaaaagccaaaccaaaccaaagcaaaaaccagaatattgtgattggaaaaatgcacctgagtgtataccacacttgagcacttccatggccaaatgctaacttgcaatttttaaaaatttggtaagacattgaaaagtaagtcagagggcatgtataagtgtgtatgccttctgaatcgaatacttgtacagccacttatgttcgtcaagctagctgagcaatccttagggcttatggcaagagacacacggtatttccaatgaggtttggtttcgcaattggactctccatcgtgagacatttaggaaaatacagcttgagaattaaaattaaagtgcccatggcttttgtcacacacccatttgctaggcccgtttcccccctaaaatcgagttttgttggaatgcatagccccttccacccattcgaacttccaagatggggttgagaagttgccacatagcactgggcagtcctcaccgggcgggcacctctgcggttcgttatacaaaccttggggtggcggtcaccagtccggagtgttcccactttctaggccccttccttaccgtccacgacattccagccttgatgtcccttgaggagtctggaatttgtcctctgttgggagttccaggcgtttctgggactggaataccaccaacagcaccccagcattgccccagcttcacctaacccccgtcgcactccgaagccctccttcttccttcgtcctgacccctacaagacaagaaggcccatagctgcggggccgcacgagaaggacgacgacatcaaggcccttctcactcggagtcaccaatcacgcgccccgaccctccggaagcccgctggctcctccgcactctcactcacacttcaactcccagttggatcggcctgtggacctactggctgcgtctcagtaggggagaaagaatccagacctcagggacccgaagtgcaggatcacagctcccgggtgggcgaagggccaatggcaaggtgcccaatgaacatgcgcactaaggaggcacccaaggagcatgcgcagtgaggtcgcctcttgccttaagagctgcactgccccttcagtgtccccccgtgccctgttctctgctccttccaaggtcccccactaaggactttggaatccatcctctctgtgtggtttttttatgcctctgagactgaaatactgcaaataatgtcacccttcaactcattccgtgttcatctgaccctcctcccctctatgcccttacttcctcccctgcccaggaccccacaacagcaaggccatggtgatgtcgctgccttttagtagaaggatgacaacctatatgaggccatggaccgagtggtccaaaccacgggaagcctttctgctttccctcacactcagacacttcaacttctgggaggactggtctgctgacctacctgctgtgtcatagttggcaagaaagaagtcatgacgtttccttccacagctctgcagggatagaagacagacagcaaggcacatgggcagccggaacttgcttagcagggagcatgcccattgagtctgccacttgcaggctgaccgtggttttcctgctgttctcgtactcgcatccacagggtgtttgtagtggaaataaagggacttaagagagcatttgttttttttttgcccaaacaatctcatgcattgagaaacgttgggaacacacagtcctatgtcacccttaatggaagatgtgtctcagaaaagcctgttgtgaaagaaataaactatttttatatctttatttataaatttttttttcagacggggtatggctttctcgcccaggctggatggcagtggcatgaccatacctcactgaagtctgggtctcttgggctcaaataatcctcatgctgaagcctctcaagtggatggtactacaggtgcgaacaccacacctgagcaattaatttattttttagaacgttgtttcagtctgatgccatgctggtcttgaattcctgggctcaagctatcatcccaccttgaccaatttttataaatgctttgattagtcactttttccctct

SEQ ID NO: 1564319 - DNA, 4001 bp, Homo sapiens
accctaccaaacgccatagcttagccttacctgccttcagagtgctcagaacacttttcatcagccaacggatggacaaatcatctagcacacagtcaactttataatgaggtgttgcatacctcacataatttattgaacattgtactgaaagtgaaaaacagaatggctgtatggggccgggcatggtggctcacatttataatcccagcactttgggaggccggtggatcaccagaggtcaagattcaagaccagcctggccaacatggtgaaacccagtctctactaaaaatagaaaaattagctgggtgtggtggtgggcacctataatcccagctacttgagatgctgaggcaggagaattgcttgaacgtaggaggtggaggttgcagtgagctcagattgtgtcactgcactccagcctgggcaacagaatgaaacgacacgacatctcaaaaaaaaaaaagaaaagttgtatgggtactcaaagtacagttttcgtttgtactgaatgcataccaattttacaccgttgtaaagttgaaaaatcttaaattgaaccatcatgtcaaaccatggtaagttgggaactgtctgtatccgcactttgtagaagttgatttgcccaaggggatatggttaacctttggctcttactgtgaatgatacaaactcctggaagtacttttctggggaggtgggtttactgttgaacatctccctgtaaacagaagctaatgaatgcatggccacattgtccacttactaggtgagatctgaagacagcacagaataataaaaaattctcactgcagatcctagactatgtccaccaggatctatccatcccgacaccgcctccgcccataaacaaccaactccaatcttaatgacgtccatgtctttaaataggataaacaggaaatgctgccacagggacatctgaatgatgtgttttaactcctaacagaaatacttctctctcttaagatgcgcccaggtgttcccttctctgaaatcgccacatgaaaatgaccaaagaaacttactcaaccgttgttcaaatcctgtactttatgagttcattggagtttcttaaagaggtcctcgtacggaactgaaaaatctaatcttggatctgggacagccagcctgcaagtttatatcgaagtttttgatgtgaacaattcaggtggttttaatttgcaagaatgaatgacagtgtttaggaaaagatttaaaaatctgaataaatgcaacccttccggcaaacgaatctctggtaatctgccccacgggatgaagtagtttcaactctacttttactgtatggaaatggtcagaactaatttttaaaatcagaaagaaatgactgacattccacacacacccagtcatgcttgaatcatggagttaaataggtcattttttaaacgcttgggacacatggatcaaaacaggaaaatatggcgaatatctagatggtatcagctaacatcctgcccttctggatctaattcccagattccaaatgggagcagcccgtcttctccctcccctctcagccacccatcgctcttagtctcctttctaatcccattgggcaaattatccccattcacttcatagcaactcctttggaaagagtttcttaaagcaagaatagaaaaatccatgcccaggcagatctccctcaaagcaaaatgcctcttacctcgggcgtgcattagaaaacacaggaacgcaagacagggaagtccccaccagctctccatggtttgcttcaggatgcaagaacctcagtggactccccagccaagcggattgtgagacccggcctctccaccctcctgttgttgacttctggtctcccagcttggaaggaagggaggcgatgtcttcaagtggaaaatatgagcggaactgccagaaacaaatgggctccaagctcagatcccaaactccacagctgaaaacctgtgggaccagtgtaggcacactcagtcgtgtgtcggagccagcctccccgggctgccccaaccaatctgcagcagcacagacgatggggaaactggggtggttcccaagcaccaatgggcatctcaggcttctggaagccggcacacttgcttggcaactctgctcgctgcgggtgtgggagctgtagcaagttcaaagtcaccaacccagaaaccagagaagacactggccgcctgtaatcttcctcctgcaggacatgattgtacagtgatacccagtgtggggttaatgtacacatcagtgcaaagacctcagttgaagtcttggcttttatacctaacaaactcagtgacttccaagaggcattttttatcctcagccttcagttgtctttgtaggtggcagaactaatatttcagcagagacggttgttcaggaaaaggagatatgtggctttttgtgtctttcatttaaatctgagacattttatgtaactaccaaaatttacatcttctgtttgaaatctccttggagaagaaacatgactggatagctgagttcgatgatgactcctgctttcacaatggttttaattatattcttccctgcagatctgtgagtgtgtctaatttatccatatacaactcgtgggttaacccttacactctacctaccatgaagcagtaggcaagcacttaaaaagttaccatttgcaaacagctttgaagtcctctggtaaatagattaactgcaggagaaaggggaaaatcagtcttagttatgagggcagcttctaaattcccagagaagcaggattcatggcaaacagacccaaaaggagaaataaaccttggacttttctctctgcaaatttgagcatctggagtgttaagtctgttcatgttgttgacctggtgtttgggagttgtcttctatgaaatatcttccttttttttttttgagacagagtctcactctgttgcccaggctggagtgcagtggtgtgatctcaactcactacaacctccgcctctcaggttcaagtgattctcctgcctcagccacccgagtagctaggattacaggcacccgacaccacacccggctaatttctgtatttttagtagatacagggtttcactgcattggccaggctggtcttgaactcttgacctcaagtgatccacctgcctcggcttcccaaagtgctgggattacaggtgtgagccatcgcgcctggactgcaacatctttataaaggtaagttacttggatggattaagttcctgtgcacacaggtgtgtgtgtgtgtgcacgtgtctgtctgtgtgtgtgtgcgtgtgtgcgtgtgcatgtgtgcgtgtgcatgtgtgttcatgtgtgtgtgtgtgtgcatatgggggaaatgctctaaggcagttagcttgtgcagtcctaagctctgagtggcagagtccaggaagcagttgatgcatttagaaagatatttccttcaaagtcccctgaccctaaagaggactgacaccgtgacatctgctacaaagtggatggacgtcaaaaactggatgctgagttagagaaaacagacacagaagaacgcattgtgtaggattccatttctctgaaatgtccagaacaggcaaatctgcagagacagaaagcacattgccggttgccaggggctggaaagacgtgggaatggatatattatgagttgcattttttctcccgcaaacttcatatattgaagcccaacccttcagtacttcagaatgtgactttctttggagataagatctttgcagatgtattactttggtgcaaaagtaattgcagttttcaccattaattttttttttttttttgagacacaggcttgctctgtcacccaggctggaatgcagtggcgtgatgtcagctcactgcaacttctgcctcctgagctcaagtgattcttctgcctcagcctcctgagtagctggaattacaggcatgcaccaccacacctggttaatttt

SEQ ID NO: 1564320 - DNA, 4001 bp, Homo sapiens
aggcggaggctgcagtgagtcaagatagggccactgcactccagcctggatgacagagtaagactccgtctcaaaaaaaaaaattaattaattaattgataaaaaaaaacaccatgctaatcttctttgaattgttcgaattttagtatatgtgctaccactgaagcaagtacccagatttgatattttaaatgtgttaaaagtttgctacattatttgataatcaagaagcttaggacaatttctaaaaatatatgacgactagtaacatattatttttactatcttacattaggagagagcaatacaagaaaacgaaacatgagtatccaataatgaggtctgctttgtcagctgagttgacctgaatcataccggattttacagtacaaaccactgatatgtataaatacatatatgcacataaatgtgtacataccattggtatatacttgcttatgttgatatatatatttgtgtgggaaggtgtgaactttaaaacttttcaattatgaaatcaatacgaatttataacaaattcaaaccgtacattagatcatgtgaagtacaaagtaaaaagtcttctatctctcttctcctccataagtcattactattaacatttttattgtgtatccttcaagaaactatctgagcaaatgcaagtatacacacgtacatgtgaaggtgtgtgtataaatctaaactgttgccacttcttgaatgtgggggtgggggggaatctcaagtactccataagcatgttaaatacattgaaatacatagaaagtggtaccacagtcactggtacaaagtattatactcttcagaaatgtgtgttgaattgaatacatttaattttcatgcttggaggcgatatggagcaattgcgcagtaagagtggtgggcaagaagccagataacatgggttctaatctaactagttggatagcctttagcaagctatgaaatcttcctaagccgtggtttctggttttgtaaaaggacagggtttgactaagatcccttccaactctaaaatgttataattctaagatggccgtctgtaacactgttcattgactataataaatattatggggaaaaaaaagaataagaaagaaacactactgcaacctccagtcttacaaatttctgtgagtcattaaactatcaaagtatagttgtgacagaactagcgacataattatatttgaaagcaaactactagattattaaaatctgataggttggagttttttaacaaaggttggattgacgttgttcctttttcgaaggtggagagggctactgcttagtttgagaataaacactcccctccccgaaaagaaaacaatttaagtgttatggagttaaaataatgaaacaaagtcaaattacattttgttttacagaacatgccggaaaggtgactgggaaagcagattggaaagaatcaccagctaatttcctcttccggaagctctttggcccttattctttcagtttcatatgccctctccagacacactccaccctgctccacacaagccacaggttatcacatggggaggaaatccctttgatcatatttttttaaaaagttctttgcctcaatttaccttaggtgtcacagggtttaggaaggcaatcctgcaggcctgaagtcacccacccacccacgcctgccgtcggcagtccgaggaacccgggcaagcagccggggccgggccacccctgatgggctggcgcggccttcccgccctccccagcagcgccggcccgagggaagtggaggggaaaagaagaggggagggaggagaggggaaggagggaaagcgggggaggggaaagcctacacaagctgtacccaccgcgccaggacagccggcccgaactgccccgcggcgatcggctcggtccaaggggagggtcccggaggaggcgcggcccgagccccaatctggaaatgccaactccgctctgcggcttggccccagcctaggtgaaggaaacggaagtcccttcgtctccctcacgcgcctctaccggccggcccatcccctggagaaacccggagtcgtgaaacccgaagtgtgtccacgtcagggcctcaaagagacaccgggcgcggtccgtcagtctcccagcccgggctgcgccactgggccccggcgtgtccctcccacccccggccgggaggtcagcctcctgccctgcaaagcccctccttcttcccccctccgccatttttcaacttaccacttgggccgggcgtccctcgatgagcgccacgccggctccgggcgccgccaaggtcccgccacctccccgaaccggatgggggcagtaagaaaaaatgaggcccttgcaacccctacccccacccccacccgacccccccgcccggctggaaccgagaagctgacctagcgcgcgcacatgcgcagtgagcacctcgtagtctccgcccccagctccagtgtttcttctttcagccttaaggatggtttttcccacggtttttacctgttgggccctggggttgaggaatagtggaagaaaggcacaaggacagaaaagaggaggagaaggggcgaaaatgttgagttcttactatagatcaggtactgtgttaggcatataacgtgttctttgttgtaatgttgacaaccctgtaagataagcactgtctttgggggtttaataagcccattttacaaaggaaactgaggcccacaggggataactatcccagtatcacgcggctaataaggtaactgaggttagaatcggatctgtttccaagaagggaaggatgaaagggatgacaagaaagggagaccctgggggaatggcgggggttaagattgggaggtgaagggaaaattaatagaggaaaaagaaagcagatggaccggaaacaaaggaagtctgtgtacataaaatgctggtcataccctggatttatttcaaatgcgttgtaggattgtcagatcaacataggaatttttgtttcaggaaaatgggatcttacagggtaatgtggtgagatgatggattctgaatatttcatttcaaatgaaatcaagtgatacaagatatgatcctcccttcacaacaagggaacttggagggaggagaggaaagaattttcttaaaactcgtagttgcatgtttattctccccttgggtgccctaccctatcttctaacaaatcagaactactccttgtgccccgcctatcctcagttttcctgccttccgctaatttgttcaaactactccctctgcctatgtgaaaagactgcccgtggaaggcagcgagactccgtctcaaaaaaaaaaaaaaaaaaaagactgcccgtacacaaagccttctctgattttcttagctgaagttcatctctccatgctctgaactctagtggcacttctctaatatttgtttttgctttttttaagcaccgttgttttcttgtggtaaaatgtacataacataaaatttactgttttggctgggcatggtggctcacgcctgtaatcctaacactttgggaggccgaggcgggtggatcaccagaagtcagtagttcgagaccagcctggccaacatggtgaaaacccgtctctactaaaaatacaaaaattagccgagtgtggtggtgagtgcctgtaatcccagctacttggtaggctgaggctggagaatctctggaacccgggagttggaggctgcagtaagccgagatcgcaccactgcactccaccctgggtgacagagcgagactccgtctcaaaataaataagtaaataaaaataaataggccgggcgccgtggctcacgcctgtaatcccagcactttgggaggctgaggcgggcggatcacgaggtcaggagatcgagaccatcctggctaacacggtgaaaccccagtctctactaaaaatacaaaaaattagccgggcgtggtggcaggcacctgtagtcccagctactc

SEQ ID NO: 1564321 - DNA, 4001 bp, Homo sapiens
tgagttgacctgaatcataccggattttacagtacaaaccactgatatgtataaatacatatatgcacataaatgtgtacataccattggtatatacttgcttatgttgatatatatatttgtgtgggaaggtgtgaactttaaaacttttcaattatgaaatcaatacgaatttataacaaattcaaaccgtacattagatcatgtgaagtacaaagtaaaaagtcttctatctctcttctcctccataagtcattactattaacatttttattgtgtatccttcaagaaactatctgagcaaatgcaagtatacacacgtacatgtgaaggtgtgtgtataaatctaaactgttgccacttcttgaatgtgggggtgggggggaatctcaagtactccataagcatgttaaatacattgaaatacatagaaagtggtaccacagtcactggtacaaagtattatactcttcagaaatgtgtgttgaattgaatacatttaattttcatgcttggaggcgatatggagcaattgcgcagtaagagtggtgggcaagaagccagataacatgggttctaatctaactagttggatagcctttagcaagctatgaaatcttcctaagccgtggtttctggttttgtaaaaggacagggtttgactaagatcccttccaactctaaaatgttataattctaagatggccgtctgtaacactgttcattgactataataaatattatggggaaaaaaaagaataagaaagaaacactactgcaacctccagtcttacaaatttctgtgagtcattaaactatcaaagtatagttgtgacagaactagcgacataattatatttgaaagcaaactactagattattaaaatctgataggttggagttttttaacaaaggttggattgacgttgttcctttttcgaaggtggagagggctactgcttagtttgagaataaacactcccctccccgaaaagaaaacaatttaagtgttatggagttaaaataatgaaacaaagtcaaattacattttgttttacagaacatgccggaaaggtgactgggaaagcagattggaaagaatcaccagctaatttcctcttccggaagctctttggcccttattctttcagtttcatatgccctctccagacacactccaccctgctccacacaagccacaggttatcacatggggaggaaatccctttgatcatatttttttaaaaagttctttgcctcaatttaccttaggtgtcacagggtttaggaaggcaatcctgcaggcctgaagtcacccacccacccacgcctgccgtcggcagtccgaggaacccgggcaagcagccggggccgggccacccctgatgggctggcgcggccttcccgccctccccagcagcgccggcccgagggaagtggaggggaaaagaagaggggagggaggagaggggaaggagggaaagcgggggaggggaaagcctacacaagctgtacccaccgcgccaggacagccggcccgaactgccccgcggcgatcggctcggtccaaggggagggtcccggaggaggcgcggcccgagccccaatctggaaatgccaactccgctctgcggcttggccccagcctaggtgaaggaaacggaagtcccttcgtctccctcacgcgcctctaccggccggcccatcccctggagaaacccggagtcgtgaaacccgaagtgtgtccacgtcagggcctcaaagagacaccgggcgcggtccgtcagtctcccagcccgggctgcgccactgggccccggcgtgtccctcccacccccggccgggaggtcagcctcctgccctgcaaagcccctccttcttcccccctccgccatttttcaacttaccacttgggccgggcgtccctcgatgagcgccacgccggctccgggcgccgccaaggtcccgccacctccccgaaccggatgggggcagtaagaaaaaatgaggcccttgcaacccctacccccacccccacccgacccccccgcccggctggaaccgagaagctgacctagcgcgcgcacatgcgcagtgagcacctcgtagtctccgcccccagctccagtgtttcttctttcagccttaaggatggtttttcccacggtttttacctgttgggccctggggttgaggaatagtggaagaaaggcacaaggacagaaaagaggaggagaaggggcgaaaatgttgagttcttactatagatcaggtactgtgttaggcatataacgtgttctttgttgtaatgttgacaaccctgtaagataagcactgtctttgggggtttaataagcccattttacaaaggaaactgaggcccacaggggataactatcccagtatcacgcggctaataaggtaactgaggttagaatcggatctgtttccaagaagggaaggatgaaagggatgacaagaaagggagaccctgggggaatggcgggggttaagattgggaggtgaagggaaaattaatagaggaaaaagaaagcagatggaccggaaacaaaggaagtctgtgtacataaaatgctggtcataccctggatttatttcaaatgcgttgtaggattgtcagatcaacataggaatttttgtttcaggaaaatgggatcttacagggtaatgtggtgagatgatggattctgaatatttcatttcaaatgaaatcaagtgatacaagatatgatcctcccttcacaacaagggaacttggagggaggagaggaaagaattttcttaaaactcgtagttgcatgtttattctccccttgggtgccctaccctatcttctaacaaatcagaactactccttgtgccccgcctatcctcagttttcctgccttccgctaatttgttcaaactactccctctgcctatgtgaaaagactgcccgtggaaggcagcgagactccgtctcaaaaaaaaaaaaaaaaaaaagactgcccgtacacaaagccttctctgattttcttagctgaagttcatctctccatgctctgaactctagtggcacttctctaatatttgtttttgctttttttaagcaccgttgttttcttgtggtaaaatgtacataacataaaatttactgttttggctgggcatggtggctcacgcctgtaatcctaacactttgggaggccgaggcgggtggatcaccagaagtcagtagttcgagaccagcctggccaacatggtgaaaacccgtctctactaaaaatacaaaaattagccgagtgtggtggtgagtgcctgtaatcccagctacttggtaggctgaggctggagaatctctggaacccgggagttggaggctgcagtaagccgagatcgcaccactgcactccaccctgggtgacagagcgagactccgtctcaaaataaataagtaaataaaaataaataggccgggcgccgtggctcacgcctgtaatcccagcactttgggaggctgaggcgggcggatcacgaggtcaggagatcgagaccatcctggctaacacggtgaaaccccagtctctactaaaaatacaaaaaattagccgggcgtggtggcaggcacctgtagtcccagctactcgggagcctgaggcaggagaatggcgtgaacctgggaggcagaacttgcagtgaaccgagatcctgccactgcactgcagcctgggtgacacagcgagactccgtctcaaaaaaataaaaataaaaataaataaataaataaataaaatttataaattaaaatttataaattaaaaataaataaaaataagtaaataaataaaaatttaccattttaaccatttttcagtggcaataagtacattcacattgttgtgcaaccatctccagaacttttttattgtacttggcactgtattatggagcatagtgctttctgccatgtagtatatatggcacttgcgtacacaccttgt

SEQ ID NO: 1564322 - DNA, 4001 bp, Homo sapiens
ccctttctttttccccagactcttccccagctatcaagaagtcagcagcaacctcccactcctgccagtgtacctgtttattttcctttctaggattctgcagcttctggaggctgagaaatttgttcaccaagtttgctgtgactgtgtgcaaactacaagtcagtagtttgtgtgtcagctggaacagttttctttaatatgaggtgcaaaaattttatggccaggcgtggtagctcatgcctgtaattccagcactttgggaggcctgggcaggaggatcatttcagctcaggagttccagaccatactgggcaacatagagagaactttaggaggcccagacaggaggatcactggaactcaagagctcgagaccagcctgggcaacatagggagactctgtctctacaaaaaatacaaaaaaaaagaaagaaaaaagaaaattagccaggcatgatggcgcttgcctgcagtcctagctactctggagactgaggcaggagtatcacttgtgcccaggaggtggaggatgcaatgagctatgatcttgctactgcactccagcctggctgataaagcaagaccttgtctcaaaaaaaaaaaaattataactttgtaaaatttatcttgctcctcaatgtgtgtgtgtgcgtgtgtgtgtgtgtgtgtgtgtgtgtgtgtgtaagagagagagagaaagagagagagagagagagagatttcctggtagggctagctgaattttctggcagctgaggtgtctctctggcctttccatctcttcaaattcctctgtcgcctatgtctaaaattcagtattataaacttatttctaatccaaatggacggcctttgttttgcttttcctatagtgatgaaaggtactaaaacaacacattttaaactccttagataagccagtctgttttattaccatgtatttctacttgctttgtgttaataaaaattaatttccagaaatgtcaccaacagtttttctttacttaacacacagcaagttttgttttcatggtgcattgtgcaccagctttaatggctacgtttataagtttgccagggccggaagacatttctagaaccccatatgtttccatatcccataatattcgtaacgccaccaagagaaaagaatggtgcatggatttcttgacttccctatgagaattaaatactgttaaagcttttagaacagtgcttggcacacagtaagctccatgtgtttgataaattaaaattaaatcacctgtacatgctgtccccgtaaccacagcttagaacacacttcccaagggtttgtgacaacacaagccaatcctgtcagagcctacttgaccccagagaaaccaatgtctttaatgaggttgaaccacaagaaactgccatttttgttggtcaatttcagttgaatgttggctatttcatttgacggaacctaacaggaattcagtgtgccccaactttataaccattatgccatgattcgtcgcgttcctgactggaataatggggctgaggggcatggcggaccggcttggggctcagccacctgtctccacaggaaaaccgcctccctccactcgagcaggtggggagatcaggctacaggaccgaggctgcggcctggggctggctctgggcttctgcacgcacctgaaaaggggcccaagttgcagcaggtgcagcagcagtacgagcgggcggtcgcggctgaggtcgcggtgtacgaagagaagcgtgagctgcacgagcgcgcaaggcagtagcgagaaaagcaacgtcagcgcctgccacatgcggtccccgcccgagcggtaggtgctgctcaggctgagcgccgccgttgtctcggccacgaacaggaacacggacgccagcaccgaggccgggaatttcatctccgcgcgtcagcggcgctcaccggggacggacgcagtggcggcggctgtgtggctgtggcggcggcggccgttgcccgaggggctcccagcatgcccagccccaaaccgctcccgcgctctgcgcagcccgccgagggcacgcgggcccggccgaccggcctgggctctggaactggacctggtgggggcggccgacctggctggggtggggtggggtggggcgagctgcgcagccccgccgggacacgcccacgcgctccgtgcgccgcctgctcgctcgctcgccagtgccggctgcgtctctgtggtgaccgtcccctggcgggccgcgaacccgcgccctacgacggctcaggccatggagcgggagctcaaaaggatgcagttcgccctgcgggcgtcgcgcgcagcctctgggtcctagagtcccttgggtcctatcttgggaaaccgttcacatccctttgaaaaactgcaaccacccgggcccagaattggagtccgggcgcctttctagcccagtctattttctgggccgaggaaacgcgtgattcttcaaagggccagcatttctggccttttaaaaataaccagaccacacagaggcttttcaaagtgcaagtatattgtcatgcacccaccaccaagtgggaaaagatttcacttttcactgtgccatgtgagcatgtccctttgtcttccaaatacagtggtctgaagcattgcttccagtggtgaaaaggcgtcaaagatcgtctctaggaacctgtccttacctcccagaaaaactgcctacaaaatatattcctctgtaactgtaagtaattcagggcaaagatcagggcctaataaggaagtagttttttttattccaagacagacctctgcttattggtgtgccaataccaagactaacacaactccttttagcccattgaactttccaccatcttcttgatatcaggatgtactcagtccacccccgtccctcagacctcgatcaagtcactaaatctttctgaaactcaggttccataaagggattagacttaaataattataagatctcttcccctgttgaaattgggtgatttcaatcttcaggcatctctggcatttttctatttaggaaaataatgtaaacacaaatagaatataaagattcaaaaggaatcaaaccaaaaaagaggtacagggagagaatgtggtgggctgtttttctgttttttatgtggcatgagaaaatccatttatgagttaaggggcagattcagccagcagctgagaggtagcaggccctttccctaaaaggattactaatgtctatttatagaacccagaaggccaccatgtcctgggccaagatacatacactgccacaaatacagaatcagcagcaacactccacagagtatttgtgtaatgttttacttgacatcatggttagctttaaaggaaaaattggtagcttagaattattaatcaggacactgaatatttagcattagattttattttaaggcaaaggattatcacaggttttacattaagtgtactgtacataaatgtattataaggaggggcaataagccaataaataacatcgctttaaacactataaagtccagtttatagcgaattattttctacagtacaaaacgaatacagaaaacacatttggaaagatcacagtgtttagaacattgtaacagcagttgtaaaaaccataaagtgcatctctaagcttctgactctatcttgcttatagagatttcattataccatgcagtgggctgtgagcaaactcccacatgaaagggaagcaatatcaactgactagtactatcccctgcagaacaaccaataacaaaagctaaattctgatgagcatttgcaagttgatccttcttagtctgcacaccagctaacttgctccagtgatcacgtctttctgtattatcatttgccattttgtccttgaaaataatatatatcttatagcttatgattgctaatttccctgtcagacacctcaatgggttttgactaaagattaatgtcatgtattgcattatactt

SEQ ID NO: 1564323 - DNA, 4001 bp, Homo sapiens
gagaactgaactatattgggttggggtacagattaccacagatggtttaaaatagtttccagatgtcacattactctggaaaatttgaaaatggcagtagcaccagcccaagcagctcagggtaaagaaacttttatccaatttacaaagcatccaaaaggtagagtcaaaattacacactcagaccaggcgcggtggctcactttgggaggctgaggcaggaagatcacttgagcccagtctacataacgagatcccgtctctacaaaaaaaatttttttttttttgagatggagtctcactctatcgcccaggctggagtgcagtggcaccgatcttggctcactgcaacctctaccttccgggttcaagtgattctcctgcctcagccaccagagtagctgggattacagatatgcgccaccacacccagctgatttttagtagagacaggggtttcaccatgttggccagctggtcttgaactcctgacctcaggtgatccacccgcctcagcctcccaaagtgctgggattacaggcatgagccaccacacccggcctataaaaatttttttttaattaaccaggcatggtgacacattcctttggtcccagctacttggaggctgaggtgggaggttcgcttgatcccaggagatcaaggctgcagtgagccatgatcgcaccactgcactgtagcctgggaggcagagcaagaccttgtctcagaaaaaaaaaattttttaaataaaattacacactctgcagctatggccttcatgcacagggtgatcacgtcttgttgttcccattctagtttacacaggccaaatagcatcgttcattgttttggaacacaagtacataccacatgttcatcatggtggcatttaagatttcaggtaagttttctgaatggtagacagggaagccgagagtgggaggaaatgagagaattgattagagccatagtatccatcttgtaaatctttcatctttctctgcccaagtctggggtggggttaggggggtaaggaaaagatttaaaagttgctcacctgataacaggtcccaagaggattagatgcataaataatgatagcggtttatctttggctagatctctgtggacaaaaatgagggtcaactggaccataatggatgaaaacataaagaaagaaaaggtgtatgtcatccagtaagtttcactattctttcgatagattctaaccatgtacaaagcagatgcagcctccccacagtacaaaaaggtggagaaaaggatgctaaatggaaaagtaaatcgggggttggctccacggatgacatcttcctccagagatgaaaccggatccacatttggctcctcaggaatttcataaactctgtccattgtcgaggttctttctgaatgttgtggtcttgtgttcatagcaccctcccacccatccccaagagaaccctatggccgctacagtccaagtataggtgaggagagctctgtcaagtccagtttgggaacagagattcactagttagagcaagaaaccgctctcttctagactcagattcgacttggagtctgggatggaaagcccaggagtaccactttgaacttgactcttgattggccccgattccaatcgtcaacatacttgctgtgaaacttgaacaagacaaaagcaagcatcccagcgccccatccagagtccaactccagggacgtgaagagtcatgagaacagcggcttccgtggcggctcctttcgcagcccctcaggcagggtgtagccgatctgtcgggggcaccgacactcagcagctcctcacaaagagtcctgaccagtgtgtcctctcaagtcagcggagagctgagccagggcagaagagcgggcgcagaagaaggagggcagaagaggggattcagttcagtgcctaggtatcctagctattgctaggctgtagctatcagctggcccgctcacctgcgcgctctcaggacctttgccgagtccagggttctcaggatagctcctcggattcccccaagccccgcccccaagaccgcctggcccgggagtggagtattgtcaccaccctgtctccgaatgcagtgttgagggacagaagcagagcgcgctcgctctacaggatgaagaaaaggctggaggggctgcttctcctcggagaaactttgctagtgagaggcacgatgtgcggggcgccaacctggctggacggaggtcgccaaactcttggacgccgtctgctgccagggtcctgcctggtctgcgattccagctgcgagaggtcggcagcttcaaaaactaaggcaccgggacggcgggggcgggcgagatgggcgggacggctgcggccaaacaaaaccagccggagagttcccgggcaggcggccagccgagggatgctcgttgtggagtggcgggacaaaaaggggcttgggccgctcttcagaagcacttctgaccaccacctccagacccaggcaggagccacagctttactcctccctaggagcagcaggcccccacttctaccccgccctccctaactagttaagtgacttgcttcaacactcactctacccacgctgttaggcaggtgtgtctccctccgccgcagggtggaacctccctaggtcctattgccctccagataatatcatgaagggggaacctgggaggaatagggtcagagttttcggcggagggaagatagaacaggataaaggtcaagactcaaggtcagcccacagacactgaaagctcatattttatgccttgatttctccacttgcaaaatgaggccaggataggagctttagaatgaacttacaggtctttggttgaaaggttatgaagaggtgccaaattctaaacagactggcaaagagccaagagagagctgttagtaaaaactgagaggggtgtcttaaagagctttgaaaattacctgtattcttaagtgtaatcctccccacctcactgagcttttgttttcatatcttcatttgcataattctaaacctcagagaaaaagagaacacatctgcctcctggtaataatatagatgaaggccaggcacagtggttcacgcctgtaatcccagcactttgggaggctgaggcaggcagatcacttgaggtcaggagttcgaaaccagcctggccaacgtggtgaaaccccatctctactaaaaatacaaaaatcagctggtcgtggtggtgcgtgactgtaatcccagctactcaggaggctgaggcaggagaaaaacttgaacccggacggcagaggttgcagtgagctgagatcacgccactgcactccagcctgggcaacagagcaagattacgtcttaataataataataataataataataataataataataatgatgattatgtagcagagcctgtgccaatctccttttgctgcaggaagtcagtaaaacaaatctatgtgaggagtggccaagtagcagccaccaaaataatggcctccaggttgtcctgtcattatgttgttttttgtttttttaaggtttccatgattgctgcctcctttccccagggctgattcagggacagattcaacatctaaaggttgtcaccttctgaagcagactccgcatcttggtctgcacctatgctagcagctgggctaggaggctgctcctttctcctttccatttcatgaaggaggtcaacactattgagaacaacttcagagagtgttctttttcttattagttgggacattccaactgggacaaggttctccaccaccagtatatggtgcagaacctcttggggctgctctaggtaactgttcacaaggtgaatctcaggcaaggtgaccaattaatcccatttcactgggatagggtgagttggtccccctaaacatgagagagtcagccgggcgcggtagctcatgcctgtaatcccagcatttcgggaggccaaggtgggtgaat

SEQ ID NO: 1564324 - DNA, 4001 bp, Homo sapiens
tcccccgccccccctccttttttttttttttgagacagagtctctctgtcacccaggctggagtgcagtggggcgatctcagctcactgcaacctccgcctcccgggttcaagcgattctcctgcctcagcctcccaagtagctgggactacaggcatgcacccaccacacccagctaatttttgtatttttagtagagatgggggtttcactatattggccaggctggtctcgaactcctgacctcaggtgatccacccgccccggcctcccaaagtgttgggatcacaggcgtgagccactgcgcccaacgccccccgcgcccgcattttttttttttttgagatggagtctccttcttttgcccaggctggagtgcagtggcacaatcttggctcactgcaatctctgcctcctgagttcaagcgattctcctgcctcagccccccctgaggaactgggattacaagcgtgcgccaccatgcctggctaatttttgtaattttaatagagacagtgtttcaccatgttggccaggctggtctcgaactcctgacctcaagtgatccgcctgccatggcctcccaaagagctgggattacaggcatgagccaccacgcccagccacactttcgagtgggctgagctacagatgcaaggagggtggctggggttcaacaccatgaacgtcctgtgtgattttatcttggtctcataaactcaaggatcagatgcgacccatactgttcatttaagaaaacaaacacccatttctgtagaaacagatccctggcaaaatgttggcactgatatgctaacataagaatgaggacacagccaacttatgtctctctggacaccagaatatgctgttctctgaggccagggctgtggctcccaagagcaggctctgcagctgaatgactctgtggtccctggcacaaggcctggcactgggtaggtgctcaggaactggacattgagtgactgatcaggccctgctgacagacaacaaagaaaggaaggctagggtgggagcgctgggctgggcacctagttgaggacagagagggtgccgcaggaatgacaaagaggaaagactctcttcctgaccaaagtttagttaggctcccccaaagcctcttctccacttggccttgaccttggccttctgtgtctgtcctgcccttgccaggcttgcatcacccagtcttagcaagaatcttgctaagtcagtttagacacccttgatatctgatcactctggcctgccgtcagcaagaatgctgttcagtcggtttagcaagaatccccctacccttgctatctcctcttaatacttttccatccactgaccccctcactctgctccttggctacagatccctggaagtcttttctgtaatcagagttgagccccatttctctcctctattgcaatgcggtagtcttaaattaagttttccttaccgttttaacgagtgtcagaatattttttttctataacggggggaatggaaaggtgccaaaccagactcgatccaagttatgagggcccccaacactggccctgaggtgtctcttcctcaagtcagagagaggaagcaacagaaaaagagactcgggccccaaccctcactccaaccctttctgagctcagaggggagaggtcagagctgccttccagtggaagctaggatgcacataccacagaggaggaccagccaggggcagcagccccagtgagcccgggccatagggtctccagatgccggcgctgggtggatggagggacaagggagagagggagggctctttccccggcctcttccttcaggcctttcctgggctcgagcagacagagggtgggggctggcgtcaagaaggaggcgtctggctgctgggtggagagtgcttctctggtcttttgttttggagggctctgggagccagggtgggcagaggagctttgggctgcccgaggcggactgtgcaagttcctagtcgtgtaggatagggtgtgaggctatcctgggcagagtccaaagatctcagagacagaggcacaacagctggtctcaatcagcctgcttttcccagccccctctcagcggcagagccccagccattccttaattcggtccccttccctccagcaagctgattcccattagctcccacactctgggctctggctccagcactgcttttgctgtggggatggagatttgcctcctgctgctgctccttttcctccccacctcttcttcctcctcgttttccttctcctcctcctttttcctccttcccctccttttctgggctcctccacttcctcttcttcttcctccttttccctcctcatcctcctcctttttttttttttcctccttgtccatttcctcctcctcctcctttttgctcttcctccccctccttttttcctccctctcttcctccaagctgactggaaaagccagtgtcctctcttcttgtagtgcttggcaagtcccactgtaccccttgggaaagttggttgtgactggagagttactttcttgagctgggatgagtccccccaggagtgcccactctgaagaagtgatgccagctcttcccttgggatctggggagtcccattcccctgcattttctgaacctgcactctggggaaccgaggctgttagagccactcacacctgggaggaaatgaaagcccaaagatgcccctatctggagggtttgggggatgccactgaatagggaagaagacacagaaaggggagtttgggcgctctgagaagactaatttggtgaactggaaatgctgtttctgctgtagcttctagaacagggatttggttaccctgaagtgtgagtcactcgtaaacaacacaactcccaatgagggaaatggagaagctgaggcctgccttgtcttcacgcccagctgaatcagagggcagcttcaaggcagctcctagtaaatgctctacagaacccttgctctttgggttcgaggaaggtgatttcccagagaggaatgctttagagagacaaacagacccaatggggatggatgctcacctagcctggagggccccagaggcaaactgcccattccttttgtttctatttttatttttgaaacagggtcttattctgttgcccagggtggagtgcagtggcatgttctcggttcactgcaacctcagcctcccgggctcaagtgattctccagcctcagccttctgagtagctgagaccacaggtgcgtgtcaccatgcctggccaccattccttttgtttctatttttaatggatttacagtctgcttatgtccacatcaagtgtaaagcaactttcaaccatccattcaagaatgacaaaataggccattttgaagagggaaaacggaccttcatgggagtctctgaaggggcagagtcaaaatgagtgaggtggcccagtgaacttcattctcaggaataaaagcagagggcaggagcccacagcctcagaggacagaccagggacaaggagaacatgagaatgctgtcattcaataactgctgaagctcccgcagccttttccccaggctcctctctcccaccccttccaggactggtaatgaaattattcccagagaccagagcactggaaaatgccccctcaaagactcctgcctcctctgtttgctgcagtagccatcctgaagggcaagcaagcaggtagagctgatgggattttgcaggggaagacccctgaagatagcctttgaggacaaacatggtcctgtctttctgtcagtgaactgagccttgaaacactgacttgggagccaatcagcctgagtttcaatcccagctctggcacccactagctgtgtgatcttgggcaagtgactttatctccctgagtccccagtgtcctcacctgtgagttggcataataatagtactagcttcttagggttgttatgaggattcaatgggctaat

SEQ ID NO: 1564325 - DNA, 4001 bp, Homo sapiens
aaaggagtgcctggaacatagtagcggatgctcaataaatatttgttgagtgagtgaagaggtgaacaaatggagctagtaagcagcagagctaggactagaattaagttcactgatctcccagctcagttcactatgttaagttgctaattcaaaacagaggaaagggggccaggcacggtggctcacacctgtgtcccagcactttgggaggccgaggcgggcagatcacctgacgtcaggagttcgagactagcctggccaacgtggtgaaagcccgtctctacaaaaatacaaaaattagctggacgtagtggcaggcgcctgtaatcccagctactcaggaggctgaggcaggagaatcacttaaaccccagaggtggaggttgcagtgagctgagattgtgccattgtgctccaacctgggtgacaagagcaaaactccgtctcaaaaaaagaaaaagaaaaaaaaagaggaaagggaagaaccatttactgagcaactactatataactaaacacattgagaagagggacaggagcagaatattgacctcattatactcctcagttcatggtactgatagtattagacacgttacataaattatgccatttgatctttctaaaaactgttttgaggcaggtatttttatctccattttacagatgaagaaacaccctccctaaaatgacttgccgaaactcacaaagtgggtggattccatcccaagtaaagtttaactccaaagcctgtgttcttaaaatacttgtccacactttgggcttgcagtggaaattctatcccttgcagagacaggagcaagagagtatagtgaagatggccgggcacagtggctcacgcctgtaatcccaacactttggaaggccgaggcaggaggatagcttgagcccaggaattcgagaccagcctgggcaacatggtaaaaccccgtctctacaaaaaaatactaaaaattagcctggtgtggtgacacgcacctgtggtcctagctactagggaggctgaggtgggaggatcacgtgagcctgggaggcagaggttgcagtgagcagagaccgcgccactgccctccagcctgggtgacagagtgagaccttgtctcgatttttaaaaaagtaaaaaataagaaaggagaacaagtatggtgaagagaatggcaaggagctgcgacaggggttaaacctggcctactggggtcactgaacaagtcaatactaaagttataagcaacaaaacgttaatgtcccacgggaagcaatctctcattattccttcaacaaaggctggtgacaggttttgataaaatgaggggacagcagaagaaaagataacttaagaaatcacctaaagttcgccatttaacacaatgtaggggacgatgacgagacctgggaggatgggaaaggaaagatcggagtttcacaaaaagacctggaaggaaccacgagggcagggggcaaagcggttagcgcaaagaacaggtgcagtgttgggactggttctggcatcgggtacaagaagggcctgccgggcggaaggagctccggctctcaggccacgagcccgtcccccgacttctttagggggcactctgcctcaccctcggtcccttttgtcgcagatcccaagctcaccaggggcctgggcgatgctgtccccgggtctcctggagactcctccgcttccgccatcttggccctccttctcccgggtcgctcccacaggtctttgcggaacctgcgacgtggaggccactgccggtcagcgcgtcatcgcgtgacggccgcgtcacctaatggcgcctggcaatggccggcggccccggcccttcgctgtccctcggtcctcggggtgtcagggacagctccgcgtcgccttgtctcgcttcttcggggccacgggtccagctagacacgcttagcctttaacactcaagccggattctcagaccgctccttcgctctcgcgaccacggctgccctctccaccccaccgactcccgcccatttcccgttctcaggagttggcttggagtgccagaccctcgatcacggcacctctaggaaagagcctgcctctcttccttcccttccccggctaccgagcgacttcaagttttcgtgcgccggaatgacgggctcaagccccaacctcctgctccctccgccgccgcccctgcccctctgactctgcgcctctcctgctgctcgcaagcctcttcccacttccttgacttttataaacctctctactgcctccacgccgaccctccaggattacttttctccagcacctctggcggtgggcagggaagaagcttcattggccaaacttgttaatcccacttcaaaagttgctaaaccatttggagcaagtactgaaaatgttcagggtctaaaagagagtaactattgtgacaataacttaaaagataatcttcatgtcccaacctgttttccttatctcatccttttgggctttcaaggtatttctggtcccagtttacgttggccccaggctaaaatgtagtcagacagggcagccattgttgacagcatcagcatccaggatacctgggtgccctttggtggtgttaagcatttaaccaacaaggcaggggatggctgtgaaataaaagtgttttatatttttggataggcaatccaagtagtaaatttaaggaggaagaatgtggaatgtggagggacaaaattccaaacgaatggaggtgttttttttttttttttttggtgtttgttgttttgttttgtttacgataattccccttcagaccaagcacaattttagtacttgcacaaatactggtggaagtgatattaaaatttaagccagtagacatgaaatctttttgcaattgcaagggaatatcatgtacaaatgtcccaaccccagcctgagcttctcacctcatcctcccaccccatgattaccagatcactacctcccgtcccacttccctgaggccattgataacgtctgctatttccttgccaacctccaaaattagctatttctccctagccacaagcccctcgcttctaccccttctaacctcatctattggccctcttggccacttatttcaaggtagccttggtgataggttaagaggaggacaggccggccgggcgcggtggctcacgcctgtaatcccagcactttgggaggccgaggcgggcggatcaagaggtcaggagatcgagaccatcctggctaacacggtgaaaccccgtctctactaaaaatacaaaaaattagctgggcgtggtggcgggcgcctgtagtcccagctactcggagggtgaggcaggagaatggcatgaacccggaaggcggagcttgcagtgagccgagatcgcgccactgcactccagcctgggcgaaagagcgagactccgtcttaaaaaaaaaaaaaaaagaggacgggccataggacaattgaggcaggcagtgctcaggttagttgggcattatttcagactaccaatgcctgttctccccatttaactaatagggtactggttgggtgtgagacaatatgctttgtagaaagaaaatcaggaaggaaggttgtgaaggaaggggctgcacaggaacaagctcccaaaactaggaattattctatgtttttagttgcaagtgtatctcaaaaaattgccagactaactcagagttctttaatacacctacagtcattactgtttgccagatcatggatatttacaatacagcaggacttgcatgacttgtccaaagttacttagaacctttgtaagtggtagaagtggaattaatatttaagtcaataggtatgaagaactttgttggctaatctgtatttcaggacactataacatacaactctatgaaaataaccaggaaatattaaggaaataatttcccagaaaaatgatcagaattgactcaaaacaaagtggggaatttcattaaaaca

SEQ ID NO: 1564326 - DNA, 4001 bp, Homo sapiens
tttaacaagttttttaaaaacattgtaaacaataaatgaacttcctatttctaagaatgtgaaaagtcccattttaaacagtttgtaagaaccgtctcttgatgtgaagtctacgaatttttctcctgttgggaccaaactttacaaaaatagttacagaacaagctatggcatcttagcactattatcttatgtcaaggtttacctttttaaaaacgtttaaattctatttttactactctaacaaaacacgaaccttaaatgtgcaggattcatttttttttaaaactcttagaaacaacatacaaagctttgagaggcatatttattccctaccgcagtcctggaagataattcccaagtctgagaggggtcttctccttttcacgggttgtttttggtcttcacatgcgttaatatgtgggttttcaggttggttgactgagcgaacttcctgttgcaaacatcgaaggggcacacgaagggcttatcgccggtgtggatgcgcaagtgtgtgcgcaaattgaaatcaagggaaaagcgtttcccgcagccttcgaatgtgcactgaaagggcttctcgccggtgtggaccagctggtgtcgtctcagctttgagctctcaagaaaagctttgccacattctgcacatacgtggactctgggcccgtggatgtggagatgttttctcatggcggcgtaatcccggaacatcttttcgcagccgctataagagcaagggactgttttgggaggttctcctttggaccttttgggcttcactttagtaaattctgccagctgtttaggatctgagagatcaatgcctggtaaccccccaggaggaagtttcttccctttcaagtactcggaataatcaggtgggttttcagcctggccttcacccactgccccttggtcattgttatcgttaggggaccacatagtcacggaaaactcaccctccagcgttttgacctgcatttgcttctgctcccacttcctcgtgcccaggctggagctgctgcctgccgggttggcctcagtgctggtggcactcttgccgctgggctttttgctgggctttttgctgcggctctgggttgatgttgatgttgatgccgccgaggccgacagagaggccagggtcatctggaagtgctcgtcttcaatgctatccgggagggccaactggtcctccaagtcgttgcctagctggttgtctgagtcgcaatagcccaccacttcctcttgtgtctgcaacataagcatttcctggtcgtggtcgccatagcccgtgttcgtgaagagcggctgcaacaccatcaatggcggatggttgtggccaccgtagatccaattgccatccacatcctcgtactggacgctttccgtcggaatgtcctccataggaaggggctccacattgatgtcgtggagctccacaatatctgccgggatctccaggtcttgtgtgatggagaaatcttcgttggaggccatggctgagagttagttaggttagcggcaacgggaagaccgtgggaaaaagaacgctgaggggagtgaggtgggagctgcagaggaaggggcgagctgcagaggaaggggcgagctgcagagaaaggcgcgagctgcagagaaaggcgcgagctgcagagaaaggcgcgagctgcagagaaaggcgcgagctgcagagaaaggcgcgagactgaggaaagcacgagccggaaggcgcaggtgcttctgggatagccagacgcatgcgcctaggcaactggcgcgtctgtcggccccaaaagcacgtgcacgtgcccgcgtacgtttgccaccctgcgaccccgcccagctgttgtttttccactttcgtaagcaggctctttactgattttttatgtatttcattttagttgattttcatgtcttcccctcctgtccatcccatataacagtatctgccaaaaaagcctactccttttatgcttttttctcttatttaattgcactaatacgacatttaatatcagtaatagttgatagtagaatttgtcttgtcctttaataggaatgcaaagtgttgtgctattatgatgtatgcagctattcctacttttactaaggatttttttttttttttgagacggagtctcgctccgtcgcccaggctggagtgcagtggcgcgcgatctcggctcactgcaacctccgcctcctgggttcgagtgattctcctgcttcagcctccagagtagctgggccgggcacagcaatcccacacctgtaatcccagcactttgggaggccgaggcaggagggtcacttgaggtcaggagtttgagaccagcctagccaacatggcaaaaccccttctctactaaaaatacaaaaattagctgggcgtggtggctcgtgcctgtaatcctagctactcgggaggctgaggcaggagaatcgcttcaacctgggaggcagaggttgcagtgagcctagatcatgccgctgcactacagcctgggcaacacagcgagactccatctcaaaagaaaaagggcgttctttatcaactttcttaatttctcccattgtaattatttgcctatttagatttttttgattgcctcttgggttaatttcagctatttttattttcttatatttatacagggttttgaaattttttttgtggagatgagcaaacaacacttataattgtttttattttctctgttatcaattgtcattccccaatctgattgctaattgtctttagatgctttttctcattgttcgacctttgatttttttttaagagctcttggatttagcagatctagttttgttttttctaatttattattttctgcctatatccttactaattacgtcatcatttcttaattattttacagttcttttctcacttaagtttaatactcaactaatctatttccatttgtatttgcatgactgcctaaggcagtgcatttttcttttagcaaaactttaaacattatctcagtaaaatgatttcatcatcataatttttagatctactgaaatcacaggtttgaattaaattgatccaaggtgtgattaagataaatttctaaatttcaggtagtttttacttagtttgctagtcttctcttgggaatttactgtgactttaagtcccatgggcacttgaaaaaatattgtcttctgtgttcacggtatagagtttgacatacctatttttaccttagcctaacttttttatacttatctgccatgtattaaagcgtgagtctttttattacctgtttcttcttatacttttcccatttttgttttgctttgatggtttgttacttgatacagtaagattcacaactgttatattttcattgtggcttatattccttattattgttaaatggcccccaatgtctaatataatgcttttggtcttattttctgttcccatttgcatgttatgttctgctcatcattttactttcattatttttgagtaattatttacacagatttattttgtacatcacatatttgggacatgttttaaatacaaactaagggcatctttctttcagtaggtgagcttatttcatttatgtttattgacaaaataaatgtgttttggtcttaaattcattaccatggtttatcttttgatatagggtctgttttctttggtctgtgtttcatgctttcactgtgataacttgaaaagtttatgtgtgtttttagatcttgtagtatttacatttataatcttaagtgatatactcaagcctctatttcttgatttatcaggttcaggcagatgtcctctccactatgaagttgaggaaattagtatttatatttcccgtttttgtttttcccaccttcaggttttttttgttgttgttgtcgttgttagtttgagaattctaactccacacttgcttagcctcagttattccattaaaagtgatgcagggttgtgatggatttgt

SEQ ID NO: 1564327 - DNA, 4001 bp, Homo sapiens
gtacagattcccttggcagacacgtgacttcaccagaagctcgtcctctttaacaaccttctgttgttgtttaatcagtaaatgggaaaaaaaaaaaaaaaaaagattccagccctttttctaatgcacaaagagcaagtttttcaaaggccagcattttggtgagctgctgcaggaaccccggcctcttctgccagggcccacacaggcccttaaggaggtttaaggggacctttctgtaagcaaaactgcccggataaacataatcttctgcgagactccacacaattgttcagcagctgtaaaccgttcaccttgcaactgattacttacttcaaacaaacatgctctcctgccctccgaaagcctgactacagttccctttactctccttcttctatgcatttgtaattatgctaagtgggtttaaaaaaaaatactgaaggccagtttggcagaaaaagaaaagcttagctcacagaaaactcaaagctctttttctctggctagaggcgggagagagaggctcattttaaaacatccactccaggcacgcttctcaaagggtggcgctgggacccctgggattccttcagtgggtgcagagtggaagtcaaaagtcatttcacaataaggcacccaagcgcttcgcctggctgactcccagtctcccagaggcgtgcagtagtgtcttccagaggcctcctgacatgccatgaaactgtctacagaggcagaaataacagctctcttcttaggctggacatttaagacattcagggcaacgtacacccccacccccaccacactgaccctctgaacgctctgttttggaaaactgttatttttgaaacaaagtatcatttaacctaacatggaattaacattccctttattccagttcacaaataattgtttacaggtttctaggtttaaattgagaatatgggctgggcacagtggcgctctgtctgtaatcccagcagtttgggaggcccagactggaggattgctgcaggccaggggttcaagaccagcctgggcaacatggtgagatgccatctctacaaaaaatttaaaacattagccaggcgtggtggctcacgcctgtaaacccagcactttgggggacccaggtaggaggattgcttcggcccatgagtttcagaccagcctgggcaacgtagcaagaccctattgctacacaaaaaaattaaaacattagacaggtgtggtggctcacacctgtaatcccaacagtttgggaggcaaaggaaggaagatcgcttgagcccaggagttcgagaccagcctgagcaacatagcaagaccccgtctacaaaactttaaaacattagtcggatgcagtagctggtgcctgtaatgccagcactttgggaggctgaggcaggaggactgcttgagcccaggagttcgagagtagcctcggcaacagagcaagacttcatctctacttcctattacaaaaaataataataataataaattctgaacctgcaaatctaggaacagaagttatctgcatacacaaaacacagtggcggtcatcactgatgagttcagacagtgaacgagtcctgcaaagttggagatctgtgactcagagatgtttacaaaggccaaggaaacaaagttgccacttaacgggcctgccctccccaccagacctccgtggctccccagtgcccgagaagccgcctctgggccccctctggagacgtcctccggagaagggcccatcctcacttaccctggggtgggtaggggtcgaggtccctgggacgcccgctcctcccctccggggcctggcgggggcgcgcggtcactggccgaccgcaggcggcaggcagagccgcctgatgtcttgggcgcggggcgtgcgagcccccgggtccccggccatggcccggaggtgtcagggtgcgcgggggggcggctgcacgggggctgcttggttggagcccgacccgggacaggcggggaggccacacgcgcggggagggaagggtcgggccgggtcgggccgggccaggcgcgcagaagagccggcggggacggaaagcgcggggcggggaggtcccagcgcgcacgccgccccccccccacccccggccacacctcgacccccgcccagccccacttccgggagcgccaccgcctcgccaaggtcacgcggagcccccgcgcccccgcccccgagccagcccgcgcccacccgggtccccggagccctgacccctgccccgccccgctgacctggctccaggaagcccccgcggcagcgccgcagcagctgcgccaggatcaccgcggcgcctaccgcgtagacccgcagggccgcccgcgccgcagacaatggcgacatggctgccccggccgcgccgccgccgcttccgcgccgcccgcgggactctgcgcccgcccgcccggacggacggcggaaacgcgcgcgccccggaccgccccctgcccgccccgaaccgccccggcctgcggggaacccccaaccccagaccccgcccgggccctctgggatcccgcaccgcctgcaggactggggaccccgagcggacaaccgaccccagccaggacaccccccccaggaccacagactccagccaggaacccccccctgcaaggaccatagacttcagccaggacccccccccccaggaccacagaccccagccaggacgcccccaggaccactgaccccagtcaggacccccccttcaggaccacagaccccagcagggaccccccacacacacccccagccaggaccacagaccccagccaggaatcccccccaggaccacagaccccagcagggaccctccacacctcctccaggaccacagaccccagcagggacccttccccctcccggcaggactgcagaccccagcagggatccccaccaccacaagaccaacagccccagccaggacgcccccaggactacagaccccagccagcacccaagtcagatccatagactcctcccaagaacaccccccaggaccccagacccctgctgggacccccaagaccacaggcccccccactggggcacgcccagacaccccaccaagaaccccaccaggactacagacctccaccaggactccccagtaccacagatcctcccagggccccccaggaccacagacctccactgggacccccaccaccaggacccctctccaggatcacagacccctactggggcccccttctaggacctccacctccatcacaaccaccccccggaccacaggccccagccagcaccccacaagaccacagacccctgccaggacgccccccaggactacagaccccagctggactgcctctccaagaccccacactccagccaagaccatggaaccccattcaagccccagccaggacccccaccatgggatcacagatcccctacccagaccctgcaggggaccaggaccaccacgggaaccaccctccccatcttagccagaatcatgtaaccccacgcagacctcagcagggaccacaaggacttggaccccatagggaaccccagacaaccacccagagccatgccaggattatggaccaggactcccacagaggactctgaacagctgtaaggaccatggaccccacaccctaattcgtactgacaccacagaacctgccccaagcacggaccccacaccccagttcctgctgacaccacagaacctgccccaagcacggaccccacaccccagttcctactgagaccacagaccccaccccaattcctgccaggccacagacaccacccaccaaacctacccctccacttccctgcccccaacaaccctgcagggatcacagacccccttcccggcccctgcagagaactccagactacttcagggaccacgagccccctccccaccctgatccctactgggacagcagacccctactcagaccttggttgggaa

SEQ ID NO: 1564328 - DNA, 4001 bp, Homo sapiens
aaaaaaaaatactgaaggccagtttggcagaaaaagaaaagcttagctcacagaaaactcaaagctctttttctctggctagaggcgggagagagaggctcattttaaaacatccactccaggcacgcttctcaaagggtggcgctgggacccctgggattccttcagtgggtgcagagtggaagtcaaaagtcatttcacaataaggcacccaagcgcttcgcctggctgactcccagtctcccagaggcgtgcagtagtgtcttccagaggcctcctgacatgccatgaaactgtctacagaggcagaaataacagctctcttcttaggctggacatttaagacattcagggcaacgtacacccccacccccaccacactgaccctctgaacgctctgttttggaaaactgttatttttgaaacaaagtatcatttaacctaacatggaattaacattccctttattccagttcacaaataattgtttacaggtttctaggtttaaattgagaatatgggctgggcacagtggcgctctgtctgtaatcccagcagtttgggaggcccagactggaggattgctgcaggccaggggttcaagaccagcctgggcaacatggtgagatgccatctctacaaaaaatttaaaacattagccaggcgtggtggctcacgcctgtaaacccagcactttgggggacccaggtaggaggattgcttcggcccatgagtttcagaccagcctgggcaacgtagcaagaccctattgctacacaaaaaaattaaaacattagacaggtgtggtggctcacacctgtaatcccaacagtttgggaggcaaaggaaggaagatcgcttgagcccaggagttcgagaccagcctgagcaacatagcaagaccccgtctacaaaactttaaaacattagtcggatgcagtagctggtgcctgtaatgccagcactttgggaggctgaggcaggaggactgcttgagcccaggagttcgagagtagcctcggcaacagagcaagacttcatctctacttcctattacaaaaaataataataataataaattctgaacctgcaaatctaggaacagaagttatctgcatacacaaaacacagtggcggtcatcactgatgagttcagacagtgaacgagtcctgcaaagttggagatctgtgactcagagatgtttacaaaggccaaggaaacaaagttgccacttaacgggcctgccctccccaccagacctccgtggctccccagtgcccgagaagccgcctctgggccccctctggagacgtcctccggagaagggcccatcctcacttaccctggggtgggtaggggtcgaggtccctgggacgcccgctcctcccctccggggcctggcgggggcgcgcggtcactggccgaccgcaggcggcaggcagagccgcctgatgtcttgggcgcggggcgtgcgagcccccgggtccccggccatggcccggaggtgtcagggtgcgcgggggggcggctgcacgggggctgcttggttggagcccgacccgggacaggcggggaggccacacgcgcggggagggaagggtcgggccgggtcgggccgggccaggcgcgcagaagagccggcggggacggaaagcgcggggcggggaggtcccagcgcgcacgccgccccccccccacccccggccacacctcgacccccgcccagccccacttccgggagcgccaccgcctcgccaaggtcacgcggagcccccgcgcccccgcccccgagccagcccgcgcccacccgggtccccggagccctgacccctgccccgccccgctgacctggctccaggaagcccccgcggcagcgccgcagcagctgcgccaggatcaccgcggcgcctaccgcgtagacccgcagggccgcccgcgccgcagacaatggcgacatggctgccccggccgcgccgccgccgcttccgcgccgcccgcgggactctgcgcccgcccgcccggacggacggcggaaacgcgcgcgccccggaccgccccctgcccgccccgaaccgccccggcctgcggggaacccccaaccccagaccccgcccgggccctctgggatcccgcaccgcctgcaggactggggaccccgagcggacaaccgaccccagccaggacaccccccccaggaccacagactccagccaggaacccccccctgcaaggaccatagacttcagccaggacccccccccccaggaccacagaccccagccaggacgcccccaggaccactgaccccagtcaggacccccccttcaggaccacagaccccagcagggaccccccacacacacccccagccaggaccacagaccccagccaggaatcccccccaggaccacagaccccagcagggaccctccacacctcctccaggaccacagaccccagcagggacccttccccctcccggcaggactgcagaccccagcagggatccccaccaccacaagaccaacagccccagccaggacgcccccaggactacagaccccagccagcacccaagtcagatccatagactcctcccaagaacaccccccaggaccccagacccctgctgggacccccaagaccacaggcccccccactggggcacgcccagacaccccaccaagaaccccaccaggactacagacctccaccaggactccccagtaccacagatcctcccagggccccccaggaccacagacctccactgggacccccaccaccaggacccctctccaggatcacagacccctactggggcccccttctaggacctccacctccatcacaaccaccccccggaccacaggccccagccagcaccccacaagaccacagacccctgccaggacgccccccaggactacagaccccagctggactgcctctccaagaccccacactccagccaagaccatggaaccccattcaagccccagccaggacccccaccatgggatcacagatcccctacccagaccctgcaggggaccaggaccaccacgggaaccaccctccccatcttagccagaatcatgtaaccccacgcagacctcagcagggaccacaaggacttggaccccatagggaaccccagacaaccacccagagccatgccaggattatggaccaggactcccacagaggactctgaacagctgtaaggaccatggaccccacaccctaattcgtactgacaccacagaacctgccccaagcacggaccccacaccccagttcctgctgacaccacagaacctgccccaagcacggaccccacaccccagttcctactgagaccacagaccccaccccaattcctgccaggccacagacaccacccaccaaacctacccctccacttccctgcccccaacaaccctgcagggatcacagacccccttcccggcccctgcagagaactccagactacttcagggaccacgagccccctccccaccctgatccctactgggacagcagacccctactcagaccttggttgggaaccccagacaaccacagagttacctgggctccctcagggaaccccagaccagcacagaacccccacccagacccttaccagggccaaggctgaaatcccacatggaccccccagcagactcctactggaattcttcatggaaccccccacccagacactcagaccttcaccccaccacaaccctcccagtcccacacctggtcccccaggggaccccagacctggcatccgggactccacacagatcctaacacccgctgtgtttgggagacaggagcctgggagagctggggtgacaccattttaatcatcaactccatcttaaaaaccaggaagacacattccttgccggtcacggcccatggtcataagatgtttacggctgaagaaatgacttaataatgcctccaaggacaaacacagacgaca

SEQ ID NO: 1564329 - DNA, 4001 bp, Homo sapiens
catccccttgtcccttcccctcatctctccatctttacaatttccagaggtggaatgttaaacagtgccaagtgaagtcaacagacactatcatgaaaaaatatgacaaaggaaaaggaaagtttaccatttctaaatgcccacttccaagaaaacacgaaacattttatttttgttggtaaagaatcatatgcattggtatgagaattttttccacaccaaatgagttagtgaaaatgaaaacattaacttattggaatagactactctagaaaaaggggatgatgtcagtagaatgcattgttgtgtagcactagcaaaacatcattttttgcactttgcagaagatatttccagtaacaaagaggccagagtttaaaaaaacccatatattaaaaatatataatatccatacatattatatatggatatattttaatatatggatattatatattaacaattagttgacaagtacttttagtgaagaaatatttttattaatattctctccctttgaagttaccaaaagggtgtcgatgtcacaatgcttaagttatatacaggtggagggcagttctgtctcaaataccttctaaatttttcaaaatgataccttaagaacaaacagcaggcaaaaagtctaaaaatcaagatttaaaacattattagaaggtgttgcatgttaacagtaccaaggaattccaggttaccataaaggcattcatcatcagaaagggtgacctttggacagtttgccaaaaaccagggcttccgaaatacgggcatttcgacagaagtcgatattaagtggaaagacaggttttctgaaaacggcacgcaatttttgtcatttgctcccgggttcttccaatatgggaatgcgtcaaatgtacgtgtccaggtgacactgggactcggtttcgtttcgtttatgtgtccccctcctcccactcagggtggccccagagacagcacaagtcggtctgaacccactccgaagatatgcgattcgactgtggaaaagccattccacatcactgtgaaacccttgaccgagggccagttcggaggagctggtgacggtggaaagagataaaagccatccgcgagggagtgaaacaaaccgacacgcggctccctgcggcagctgaacctcatctcccttcctccacctccctcttccccatatggaccctgccagctgcaaccgaggtttttaaccccaattcacgtgcaaagcaagcttcttgcaaatacagacggaggtacaaacagcagagtgagggcgggaggaatatggggtaccagggaaagtagaaggtggcgaacggcagggtggggtgttgggggggggatgaagcgaagcaggcggcattgttgtgccccgggaaggggacggaaggggaggatgggcctggcagaaaagctctaaatcaaagtaggggctaggggagtaaaagaggcacaaaaaagcagcgagaggggcgagggaaaagccaagtgggtctctgtgatggattccccaagccccggggcctacccagggcaccggcagcccctcggcccctaacggcgaaggggaccgcgccgcggccctcgcggctcgtcccctccttcgctccccggcccacacaaagaaagagccggaggagctgagcctccgactctgccgcttcctggttcaagtgaggcgaatgcaaacgcaggcgcggcccagggacggagaaggcaagcgcgctccttcgccccctccctgattggggccgggtcctcacctgcttcccggcgccgccgcttctcctcctccggacgcgcggaaggctgggagtcccccaacaagaagaagccgcactccccagcgattctgccccttctttaaacgtcgctccagtctgggtcgacgtcgacgcggccgccgcctcctgccgccaacgctgctacagctgccccacgccgccgacagagggcacagcgcgggggcgaagcgctgaagccaaaggcgccctcctcttccgagcgcaggccggggtggtccggaagggcccgagcttgaggcggctccacttcggcgccgtgctctgccttcggttctttccgcaagggggcggaggaagactgggaagctcttgtgtgttcggctctttccggagggctaacgggtgggaaaaaaggaaagggaaagatcgggtaagacagtcgcaagcaattggatggaagggaagcgagtcgttttcatcgaaattcaatgtgaacttctagggcatacaaacttttagagactatacaggtttcatttattttgcaagtttgaatctgctctattagactgtttgctagatgataaaccatcttgaaatataatcaaaatacatacaatcaaatagaaattcacaacttcttatggtaattcaagttctgggataacaagagagcaactacattacagtaactacttttaagaaagaaatttagtgtttggacaactatcttcttaattgaatactaaatggtgcagtactatgttaattccctcattccaactagcatttactgaccccctgcttgatctgtagcaaaaaccctatgttaggctctcgggaatacaaaaatgaataacccaaaggtctctacctctttagggagctcagtaggtaggtacacaaacatggacaaaaatatttgtacaaggtgtagaagcagagagaagagaatagcaaattgaatgctgtcatttgacctgtatcttgaaagattaataatattaacacttgcatttttaattttttattgttactattttaattttttattattactatttccataacatttcatcttcagagggctttagtgtctgacacatagtatgtgttcagtgattgtttaatgaccgaaaaaatacattgtgagttacataattttttaaaatcctctggtaatacccttccaactgagtaccataataaatgaagcaacaggatgggtgtttggagagcaaaatgtttcccttttaggctggttattgatcgtattcaactaaggaaccaaatagtaactttttttctgccataattaaggccattcactaccttcattatctttttaaaaagatatatataggataatactgcattcatttccaaaatcttaaatttgtacctattaataccttgcagtggaattcctgtgcttctttcctaaaaaatcttgctgaaaatgtccatcaggatattagactgaaaacagatgtaactatatctaattttctctgacaggaaatcagacatggatgtcatcatctcatctacctatccctaatctattcttcatcctcctcaataaagtaaagccacatggtataataaaacatcaaagtggtataatatagctgtatttcacatggaaatatgcaattccttaagctcttctccaagattttgtattgtgggaaaacaaactatgtgggaattattgcattattgatttttgattaggacttagcattatgaaaagtttcattgtttactataaagatatttcatggcaaatagaagtatgctgttgtaaaataaactaaggcagattagtatttttcctggcaactgagtacttaataaccatttttctgagttatcctccccaaaacttagtagtaaaaaaaaaaatcttagtaattagaacaaagtatatcttgaaagtttaggatctatttatctttcagtggcttaattgatgaaaactaaaatgagacatatctttgaaatacagatcacagtggcaatagatgccactctagatatcatgtttgttggtcagctctcagtaaactggaaggcacaatgcaatttattttgtaccagcatttacatcactgaggctggcaacagaattgccatgccattgtcactttcctgaaagtattttaaaagtttggagtaccaactaacatatgatgaaacctgttcattcaaagcacagtaaaccttctcttcccttct

SEQ ID NO: 1564330 - DNA, 4001 bp, Homo sapiens
ccccttgtcccttcccctcatctctccatctttacaatttccagaggtggaatgttaaacagtgccaagtgaagtcaacagacactatcatgaaaaaatatgacaaaggaaaaggaaagtttaccatttctaaatgcccacttccaagaaaacacgaaacattttatttttgttggtaaagaatcatatgcattggtatgagaattttttccacaccaaatgagttagtgaaaatgaaaacattaacttattggaatagactactctagaaaaaggggatgatgtcagtagaatgcattgttgtgtagcactagcaaaacatcattttttgcactttgcagaagatatttccagtaacaaagaggccagagtttaaaaaaacccatatattaaaaatatataatatccatacatattatatatggatatattttaatatatggatattatatattaacaattagttgacaagtacttttagtgaagaaatatttttattaatattctctccctttgaagttaccaaaagggtgtcgatgtcacaatgcttaagttatatacaggtggagggcagttctgtctcaaataccttctaaatttttcaaaatgataccttaagaacaaacagcaggcaaaaagtctaaaaatcaagatttaaaacattattagaaggtgttgcatgttaacagtaccaaggaattccaggttaccataaaggcattcatcatcagaaagggtgacctttggacagtttgccaaaaaccagggcttccgaaatacgggcatttcgacagaagtcgatattaagtggaaagacaggttttctgaaaacggcacgcaatttttgtcatttgctcccgggttcttccaatatgggaatgcgtcaaatgtacgtgtccaggtgacactgggactcggtttcgtttcgtttatgtgtccccctcctcccactcagggtggccccagagacagcacaagtcggtctgaacccactccgaagatatgcgattcgactgtggaaaagccattccacatcactgtgaaacccttgaccgagggccagttcggaggagctggtgacggtggaaagagataaaagccatccgcgagggagtgaaacaaaccgacacgcggctccctgcggcagctgaacctcatctcccttcctccacctccctcttccccatatggaccctgccagctgcaaccgaggtttttaaccccaattcacgtgcaaagcaagcttcttgcaaatacagacggaggtacaaacagcagagtgagggcgggaggaatatggggtaccagggaaagtagaaggtggcgaacggcagggtggggtgttgggggggggatgaagcgaagcaggcggcattgttgtgccccgggaaggggacggaaggggaggatgggcctggcagaaaagctctaaatcaaagtaggggctaggggagtaaaagaggcacaaaaaagcagcgagaggggcgagggaaaagccaagtgggtctctgtgatggattccccaagccccggggcctacccagggcaccggcagcccctcggcccctaacggcgaaggggaccgcgccgcggccctcgcggctcgtcccctccttcgctccccggcccacacaaagaaagagccggaggagctgagcctccgactctgccgcttcctggttcaagtgaggcgaatgcaaacgcaggcgcggcccagggacggagaaggcaagcgcgctccttcgccccctccctgattggggccgggtcctcacctgcttcccggcgccgccgcttctcctcctccggacgcgcggaaggctgggagtcccccaacaagaagaagccgcactccccagcgattctgccccttctttaaacgtcgctccagtctgggtcgacgtcgacgcggccgccgcctcctgccgccaacgctgctacagctgccccacgccgccgacagagggcacagcgcgggggcgaagcgctgaagccaaaggcgccctcctcttccgagcgcaggccggggtggtccggaagggcccgagcttgaggcggctccacttcggcgccgtgctctgccttcggttctttccgcaagggggcggaggaagactgggaagctcttgtgtgttcggctctttccggagggctaacgggtgggaaaaaaggaaagggaaagatcgggtaagacagtcgcaagcaattggatggaagggaagcgagtcgttttcatcgaaattcaatgtgaacttctagggcatacaaacttttagagactatacaggtttcatttattttgcaagtttgaatctgctctattagactgtttgctagatgataaaccatcttgaaatataatcaaaatacatacaatcaaatagaaattcacaacttcttatggtaattcaagttctgggataacaagagagcaactacattacagtaactacttttaagaaagaaatttagtgtttggacaactatcttcttaattgaatactaaatggtgcagtactatgttaattccctcattccaactagcatttactgaccccctgcttgatctgtagcaaaaaccctatgttaggctctcgggaatacaaaaatgaataacccaaaggtctctacctctttagggagctcagtaggtaggtacacaaacatggacaaaaatatttgtacaaggtgtagaagcagagagaagagaatagcaaattgaatgctgtcatttgacctgtatcttgaaagattaataatattaacacttgcatttttaattttttattgttactattttaattttttattattactatttccataacatttcatcttcagagggctttagtgtctgacacatagtatgtgttcagtgattgtttaatgaccgaaaaaatacattgtgagttacataattttttaaaatcctctggtaatacccttccaactgagtaccataataaatgaagcaacaggatgggtgtttggagagcaaaatgtttcccttttaggctggttattgatcgtattcaactaaggaaccaaatagtaactttttttctgccataattaaggccattcactaccttcattatctttttaaaaagatatatataggataatactgcattcatttccaaaatcttaaatttgtacctattaataccttgcagtggaattcctgtgcttctttcctaaaaaatcttgctgaaaatgtccatcaggatattagactgaaaacagatgtaactatatctaattttctctgacaggaaatcagacatggatgtcatcatctcatctacctatccctaatctattcttcatcctcctcaataaagtaaagccacatggtataataaaacatcaaagtggtataatatagctgtatttcacatggaaatatgcaattccttaagctcttctccaagattttgtattgtgggaaaacaaactatgtgggaattattgcattattgatttttgattaggacttagcattatgaaaagtttcattgtttactataaagatatttcatggcaaatagaagtatgctgttgtaaaataaactaaggcagattagtatttttcctggcaactgagtacttaataaccatttttctgagttatcctccccaaaacttagtagtaaaaaaaaaaatcttagtaattagaacaaagtatatcttgaaagtttaggatctatttatctttcagtggcttaattgatgaaaactaaaatgagacatatctttgaaatacagatcacagtggcaatagatgccactctagatatcatgtttgttggtcagctctcagtaaactggaaggcacaatgcaatttattttgtaccagcatttacatcactgaggctggcaacagaattgccatgccattgtcactttcctgaaagtattttaaaagtttggagtaccaactaacatatgatgaaacctgttcattcaaagcacagtaaaccttctcttcccttcttgc

SEQ ID NO: 1564331 - DNA, 4001 bp, Homo sapiens
tactggggttttttaaaccaaggctggattacaattcatttgagaaatagaagaagggattcctatggctctctggcacaaaatttaaaaaatgatatgagagagtatggaataaattatgaaggcactataggtattatgtgagtctcccactgctgctgtaacaaattatcacacatgtagtgacttaaaatagcaccaatttattctcttacaagttcaataggtcagaaatataaaatcaaggtgttggcaaagctgtgttctttctgcaagcttaaagagagaatctgtttccttgcccttttcagctttctagaagccacccacattcttttttttttttttttttttttcctgaaacagtccaatgggtgagaaaggccacccacattctttggctcatagtccctttcttacgtcactccatcttcttgtttctgccattccatctccttctacttattctgatcttgctgcttccctctaataaaggcacttgtgattacattaggcccactttgataatccagggtaatctctcccatctcaagaaccttaatcacatttgcaaagtccattttaccatatgagataatgtattcagagattccagggattaaaatgtggacatctctagggggctatcattcagcctaccacagatattgtagttcagagatcatcattggaatcagaaaaattaggaagttctttgtggaggtggtgcattctgaaggctatgaagatacaaagcaggccacttctaatttgggaaaagacatgaacacaggtaatggggatagaaatcagcataattttcatggagactgttaaagagatagatgtaaatgcagtaagcatgagagatgcaatcaaatgggaggagggacaggcctgatcacaaagagccttaaagccagggaaaaggatcaaaatttggtataataacagttgagagttactgaaagttcctaagtaaaccccaaagtgactttataaaagcagcattttcaggatggttagtctagtaaagtagggataggacagcagaccacaaaaggaacaaagctgaatggctatgtctcctctgaagcatcatcactgatgtcgaagctgcctttagaacacctgaaaacaaattggcagcaacttcagtggaagaagaaaaggcaagggcaggatcattttagtctctggccaccttcagaaacacacgccacagtcaatagccatgctcctcttataatgatttgcaaaggaagaaaatttctatgagctcagggcagttttttaaaatgggagaaaaaaacataccaggcttacctcattgccacattacttccatcaatgacaactggcctcaaattgtcactgttatctatttcatcttcaagagacaattcagggcttgcaatctctctggagctgggcccacgaggcactaacagactcaagttgatctgcccttctgaatcacctttgttcccaagtctgacaagctctgccaatacatcattaataagtgattctgggcccagcttgtttagcactgattgaatctgttcctctgcatagcccagctttagcgcaaactccatcttagcttggtattccttctccaagtcaagtttaccatcctgtaaaatgctgctctgggagaaacttggacgatctaggcagggtgatcgacagagctggcggtgtggcttggagtgcatctcctttttcttcaactgaccatccctaggttggcagctcttgctgttgtcgctactcttaaggcttatctgttcagggtcactctcagagctcatccactcttcagaatcagcattgccctgctctgtgctgtcctgcttaggctgctgcttctcttccttggaggcactcttctccatttttggtgtctctacctcagctgtggccgtcatcccgtttagtgggtcgtctgaggtctaatcagttctttttctttttagcctgcttggaatccacatgcagtggcattcttttgtagtaaaatgtcgtggtagcgatggtgcaagagtttgactgtgtggtttggtatgttcagatgttatcagtccctacaaataaacacacataccacatcatatttagtaaactttaggaaaagcattttagaatacagaggtttcttcttaagaaactacaggatttttggcatttggtttttcttcttacaatgattacactcaacttacattaaagataaagagtccctaattctataataattctagacataaaaatttcagtggtggtaataatgctgtaattcccgccccccacccgctcctgtcgcccccctaccccaccctgcgacatggacacaaaataacagctaaagttatctgcttatcacaacaatttggagaacaagaaacatcacatttcaacaaggtgcaagaatatgtatatatacatacatatatttccatggaaagactctctttcttcctttctgccaggaagtgtttccagatcccacaccatatccttcttgctaaggctaaaatccactcctgaaaagcacatgcgggccgggcacagtggctcatgcctgtaatcccagcactttgggaggccgaggcgggcggatcacaaggtcaggagatcgagaccatcctggctaacatggtgaaaccccgtctctactaaaaatacaaaaatttagctgggcatggtgacggacgcctatagtcccagctactcgggaggctgaggcaggagaatggcgtgaacctgggaggtggagcttgcagtgagccaagatcgcgccactgcactccagcctgggtgacagagtgagactccgtctcaaaaaagaaagaaagaaagaaaagcacatgctctccagcgttactcttactctttacaaaatatcaggaaccccatctactagggagactagaaaaccattaaaattgcttcagacaactgaagcaggctgtaagggttaacagagaggtgtgtttcagataagaaagggtgtgtgtgcactttcctgaatgtgtctgaagccactttttaaattgtaattgataaacaaaaggagaaaaggataaaatcaactcaacttgcaagagaaaccagaacataataaaaagaatattaattacagaagagaattagggacaattttttttgtttttttttggtttgtttttttaagacagagtcttgctctgttgcccaggctggagtgcagtggcatgagctcagctcgctgcaacctccacctcctgggttcaagcaattctcctgcctcagcctcccaagtagctgggattacaggcatgtttcaccatgcccggctaattctgtatttttagtagagatgaggtttcaccatgttggccaggctggtctcgaactccttacctcaggtgatccaccctcctcggcttcccaaagtgctgggattacaggcgtgagccaccacaccctgcctcaattctgtttctacaaacaagaaaaacctctaatggtttgaagaatgctatgcataactgcatgcttactttaggaatcacatttggaaacagagccaaacgtaatcaacatctcagaaacgacattcaggcagcatataatgactcctggaatgattacattaccacttgcgactttaaaaatttcccttagtgaattagtcaacacatagacaccaatttccttataagttccacatttactatctgacttacaatttattttcttcgaaataatttctagtgtacacaggacattgaaatatttcccctggatttattcaaagcttcaaagtcacttaaaaccaactgtttataagattaaatgtatattttcttggcaaatgggaggtacctgtaaaagataagctcgactactcttagctagtggaccatagaatgtttatttcatactatcaaatatttagttctgtccaaattgtcattggtgtgaataatttcaccatgcttatgtagacatgc

SEQ ID NO: 1564332 - DNA, 4001 bp, Homo sapiens
ccttccttccttccttccttccttccttccttccttctttcttttttttgggggacggagtcttgttgtgtcgcctagatggagtgcaatggtgccatctcggctcactgcaacctccacctcctaggttcaagtgattctactgcccccgcctcccaagtagctgggattacaggcaagtgccaccacgcctggctaatttttgtatttttagtagaggagggattttgccatgttggccaggctggtcttgaactcctgacgtcaggtgatctgcccacctcggcctcccaaagtgttgggattacaggggtgagccaccatgcctggccctccactaatgtttcactggcacttattatagggcttcttaaagttcttacacatggcatagctatttttacactttctaaaatgtttaaatattttattaaataaacatccagcagggcacattttgtaaatatgtttatacattgtattaagtttaatacagaacctctaaacctaatttcaaaaagatcaagtaaataagcccctagaatatcacacaagtttgtacgtagccattgcctacatgtcaattctcagtgtcaatattttaaaattaaaaagtgtagttttagaagaatcactggatatttacatgttaattaactggagggtttatgcagatttcttacccaggtgaacctttgggaaatatgtctaagcactttatagatctagatgtgtctcagaaaaggtaaaaactggtctgtggctgggtgcctaagggggtgtggaaggagctagggctagaaaaatagaggcaagatcttagaggactttgaatgttaagctagggaatctgtattttctcctttattatagataatgaatctattgaaaaataactccaatttttactaagcgcttactctgagccacagtaagttatgtatgttaagtgctttacattcacttttccatttaatcctcataactactctataggtattataattatccccattttactgataaggaaacagatttagacaggttaagaatcttagctcaggccgggcacggtggcttacgcctgtaatcccagctcttcgggaggcggaggcgggcggatcacttgaggtcaggagttcaagaccagcctggccaacatggtgaaaccccgtctctactaaaaatacaaaaattagccaggcatggtggcttgcacctgtagtcccagctacttgggaggctgaagcaggagaatttcttgaacccagaagtaagagattgcagttagctgagatggcgccactgcactccagcctgggcgacagagtaagactttgtcaaaaaaaaaaaaaaaaaaaaattcctagttcaaggaaacagagctacttggtggtggagcagaaattcaaacttggctgtaatttcaaagcccattctctaagccagaaggaagtgagattagattttcatttgatcactggtagaagtatgagaacaaattgcagaaagacaagtctaaaggcaaagaaaccagagagtatgctgttgcagtagtcaagaattgttaggccctattaagggaggtgacccttaaccacctgagttatgcagacgagtgacatagtcagagaagttatttagaaaattaccctggcagcccttgtgaaggatgaattggaggagccaagacaaatacgtaggcaaataaaataaaaacaaataaaagacaaataaaaggcagtgagacaagtagtgaggttgttgggactgtcactcttaaccgcagaggtgcctgtcgaggggctgggagacggtcgtatcccaagtcctcgggcctatcgaattgcagagcatcctggacctctcctcacccacgcttaccttcacgtcgctccttctaggccttaggaagtggggttttgagcactttctaggtcgtaggcctgctggtctgagctccgacagcggcgccagcggtggcagcagtcgccgacaggggtggggcgcatgcgcacagttgctaggcaacggcggccgggcgccgcggcgataaccgcgccggggctgtgtgtgtaggcagaggcgccagaggaggaggagcaggaggatgcagctgcgaccgcggccccaagagggagccgccgctgctctgtggccaggggggcccagggactggaatcaggcctgggggtcgcatcgctgaggggactggtaacggcggtccctccagaggctcaggcctagtaccccaggagggtccgggccgctgggcgagcgccttccccccatcgcctcccctcgtccctccacgtcgatggtggtgaagttggcggcgccacggagcgcaaggcaccaagctgtctcccttgcacccagctcctctctggccccggctgttggacacctgcgccgccgccttctctcgcccgccgagcccaccccctgcggcgggcgggggaggggctcccccctgcaggggctgcgtcgagcagggcgacgacggggaccataggagagtaggggtgagtagtggcaccgcactcgctcggttctagtgcgcctttccggcctccgtggccccaggaggcgagcgaatcgctgctttctcctgcagaagcttctgacgcctctcccacatctgctcgcggctctctattcccttcgaggtagttttccttctcatagccaccactttttggtctcaaccctggcgtccaggaatgcggggtgggtgcttaaggcctggctttgcttcttagatgccatagatgctgataattctacgtacagtcacgcagcctgattcctgattcgtggacagactctcccagtgccgtgctcgcccctttcccctcgctctggctctggctctcgctctctcaggaggctcagcctgaccgcgggcttctcaggagcccattccccgggctgctgtcgctccatgcctcaaggtttgaacacatagctggagtggccccttacttttcagtgttgttgctactcgtgtgctaagacctcccgaaagccttgtgcctggcttctgactcctgacatgtacgttaggaagatagtacttatattaaataataaaaataataaaacaaacacacactccatttgacttctaaagtgctatcaaacttgagaagtaggcagaatggctgattcataataggggaaactggttttacaaactacttttcatccagaatggcatacttcttttttattataaatacgatgatgaaacctaaaatatccccaataaaagcgaggatgggttgtgatatatctgttcttcctgaggtagcctgcagttgaagatagtcggttccagaaaacattggcatgaggcaccggaagtgatattctggacaaggtgattagatgaggttctaaagttgtgaggtgcttttttgaaaattagcaacattatctttgatgaatgaggttgttttcttaaaagtaagtggttgaaaaaacttacagtccacagatgacacctatcaaaagcatactgaatttagattagtaattttgattgtaagatagttctgtgagcagacaaaagatgggttcttttccctccctattggtttttaagccatttcaggtttcgtttatctgataagacgtggcgagagagaagcgtaataatggaaaagctaaattttcttttttttgtaaatgcttttgagctaaagatttttaaaaaggatatatagatgccatttatgattaaatttattgggtgaatctgtcaagaccgcaaactttgttagtttggggtaaaatgctttgctttgggagctttcatgttgtttgaggttctttgggggtatagtttaaattaaagcacaatataattctagtaccactgcaaaataacctcagagagtattgtttgttttgtgcattagcaagctgacatgcttctagttgctagattccaaaggtaattttttttttgttttggaaaagcttttgatgaatttaag

SEQ ID NO: 1564333 - DNA, 4001 bp, Homo sapiens
cagtcctctaccactctcttggatggaagagggacagtagaagtccagtttctccactgtctcttgacatccagtttggagaagggctgtttgttactgctgtttagaggtgaaagtttggccttctctctgggcctatgctgattccatcctagctggttgaggtagaaactcctagttaccactggtaagggtagaagtcatggttctccatatggtcttcactgggagaggtctattttcactggggattaaagtccttgctcacaactggtccttctctgggcatggggtggtggttcctttgaagcttggtgagagtggaagtctaggctctccatttgcaagcctaagcttctgactagctgcatcgttatgacagctggcattctactgtactaaggtgtctcactttctagctagcttctgatgcttttgccaaaaaaaaaaaaaaaaaaaaaaaaaattgcaacatattcccttctcctttccagactttacctgggacatagtgggaaaaggaatacctttgcaggcagaccaacaaaatgtggcaatttcaagctgcgtggctgtgggaaaatcactcaaattctctgggcctctatttccccagctgtaaaggaggagtaggaagctcacaggactcttgctgaatgagcaaaagtaggtcaaagggcctggcacacaggggcgggaagggactcaataaatgatagttcccttcctttacctctcctgtagaaagagagatgcaacccctcaagaagaagaagaaaccaaggtgctttacctaccaccactaatcaccatgtgtaggtctcatccagcactctaagggttaaatctcatgatcaaagtcttatttcttaaagaaacacacttgacatcttccaccttgggttctcagaaaacactccagggagagagcttgacccaggccactctcagagtgagagcaaaagccaaagcaggggctcacgctgagaaggcgaggtgaagaaagaccttgtgccagcccacacagcccgcctggcgctattgtgttctgagcaaggacaatatcatcgctttgccaaaagctgctccaggagcaaccgtgtagcggactccacttcggcaactcccactttgccagcccgcctgtcacctccagctcctcagagcagctgtcgcgatcccaccatcagcgcagcgaccgcgtccccagtccccattgctcccatccccctcccaagcgcgggataggaaggaagaaagtggcgagtgagtgaaaggaaaacgagcgcgcgccattctcccagctccgcccgctgagattcctctgcaacccccagttggcagcccctggcagcagccaccagccccgatgcgctagacttggctctcaaaagcctttcccgaactccaggttctgaagttgaacaagagactggaaaaaaatcccgactcctaaagagcaaggagccaaagacaccttggggcacacaagtacttttaaaaaacgtgtccatgaatgcagagccctgacctccacctcgagaagaataaaactgtcttggtaccaaacccgtgtttcttcatctttgctttctcagccacatctggcaagaggtctctctctctctcaactctcctcagcgcccctcccatcctcacctctccggcaagtctgtggtgaatgggcccctttccagctcctctagacaaacagcccaacaatagataattagccctctcccgcaacgaagggttggagaggggcggggagggggacaacgtgccacttacctgatctctttaatgctttccaatttgcacatgatttcttgctcatctgccatacttttcactgtcaatttcacgtcccgagagatgtacaaatacaccagccaagggatacaatagacacaatgtagccacctcctccgggcttggggctatgagcctgtgcggtaggggcttggagaggcctgggagctgtagtccggagcttcagggccagccaggaagcccgggggcctgtaggactacaactcccagaaggccaagcgagacatgcctgtttcccttcctgcagccgcactttaaatcaatttgttatagataattatgtcaaaggttgtgaagagtgcaaaggaatggggatattcgtctggcccgtgtgtgggaaaatggagaaaaaaatattcctgaaggcaattggagagatgagagacatacccattcgctcccttcgggggccctcgcacctacccacccgcaaaagattagcggtagtcgctaattacgccttggggatggaaagaaaccctgcagggaaagtagctttggagacgttgaatgtgctagctgctgcctggggaccagtaactttggcattcaatttagggtggggcgggggtggggaagaggaggatgggaggagggagatgctgcaaaagctgggggaaaggagagtgggtaagtacttccagctacttacccattcaacaaacaattacttaagctcggactttgccagtcaatggaagaagtactgtaggagtcaccgggcaaggcagataaataaaagcaaatccttgcctttgaggaacagaagaggctgaaaatttacctattaattacagtacagtgtggtgtcaaaatacaggaatagataaggtgtaacctgtgcagagaagatgtaaataggtctcaagagtgactaagaatttgtcagaccatagaggagaatgggctctccaggtgaggatacaatagagagagaaaggaaaggatgagtggttcagagtgcctgaaatataggtttcttatatgaggtgtagaggtggaaaaaagaaatgggagatgtagtatttagaaaaggcaggtaggaaccagactatgaaatacgttaaatgtcagactaaagggtttggacttaatcctgtaggcagacatttatctaataaacttttaaattaattaatttatttatttatgagacagtctcactctgtcgcccaagctggcgtgtaatggcacagatctcggcccactgcaacctccttctcctgggttcaagcaattctactgcctcagcctcccgagtaactgggattacaggcgcccacccaccatgcccggctaatttttgtatttcttagtagagatggagtttcatcatgttggccagactggtcttgaactcctgagctcaagcaatccacccgcctcagcctcccaaaagtgctgggattacaggcatgagccactgcgcctggccctaataaacattttttaagtgcttattctgcaccaagtaatgtttaattattttatgtttcaaagcacggtagtgataaggatggaggaatattttagagagggactctggaagcaaagtggagaatgattagaggacatgagaccaggtaagaggcagttactcagcgtgcacaaacaggcctagagagctggacgttgggcaaaaggaagatggtgactcactcccaactaaaagtgagtcagaactctctctgagtttgtgctttcttttattgagcttcagtttcctcatctgaaaaatgtacctagtgagcccacctcagaggcttgttgggaggcctctatgagatcattcccatgatcatgctgaatacagggcttggtattttgtaggagcttgagaagtttgtggaacatgaatctcatgtcattctggatgtccacagtgattttaagcattctccagggaagaaattaaagcccttctcttctttggatccaagatgtaataactttcttaaccataaaattctccctggtgtctacattttcctattgtcttgaaggttgctatcttgtacagccactagttggtatttaaagaacattgagttggttagtcacaaagcctgtggatccagagccaagaactggccccagctctgtcccgtaaggggaggaggtaagcaacaagcctgcgttaagtgcctgacatgtactggctactgtgc

SEQ ID NO: 1564334 - DNA, 4001 bp, Homo sapiens
ccttaagtctgagtcggaggtccctactcagctcaccgcctaaaaggagctgctgcaagcgagtccggtttgcatctttctcagctataatgcctgcctgaatagcgttctggagctgcacctctaaacggatcacataaagggaggctttctccccttgagcttgtagggtgttaaaaaatttaccatgggcagtcacactgctttcagactccccaaacaccaatttcatggctcgcaagaaatctgccacacttaggttagggttggtcgcctgaagcacacgcatgacctcgcgggcagggcccctaagggttttcatcaagcgcttgagcttttcctcctcagacatattccaatctggcaggacgccattgacttgggtcagccagttttcaaaggtttcttccccttgggctggcaccaccctccccgagaacaacttcatgtttctgtctgccatgctggccattataggaccgagacttctccccagggacctcagcatggaatgggcccaaggcggcaagggtgcattcagccgccggctgttaccgacacgtgcaatgatgctagccatgactgacgacgatagggtatctgaatataagaagatgcctaggctttttagaaaagcttaatctgcaggtgggagaggagaggaggtggctctgccttcctatctcagcaggggctgtaaaaaagaaaggggggctggttaataagggagcgggctgcagctgcattctcttcctacctgaatatcctgcagtacattttatatttgcccactaccctaaaaataatcctgtaggagattgacacttacaacctcccagagctacccgatgcctgcgtgctagcaaggtgctttttgcagccacatccatccctcccaccagtcctccaagagggacggtaactgttgcttcaaattctaggtgtagcagtgtctggagctgatattgggctctccaaatagagtacaatgatcgcagatttgtggaaataaaataagatctcattaacctcatggtctctggtctcaaccacacccccttctcaaagtgccccccacgcccgtcccccttgttatttctcagattcttacacgaactctgaaacaagagcgcgtctttatttcacttccagcctctgcaaccagtgccctccgtgagaaagctcctctccggggtacggtcaacctctgtccacagggggtcgcagatccgggtccttgaggtttcaagattgcgccacagcggagaaggccagagaagggaagggttagaagcagcttcacccgtcatcctgctacccaccacctccgctgttgccaggcgaaaaattctctctgccccctcctgactataagccagagaccagccccccaccctccagcattacatttcccccgggaagccgtcggcctaccagctctgcaatcagctgcacagaattcaagttcagatgcggctttgatggcctgccacggagaaagggaataggagttggacacacccacccacatattcctcccagaaagagatgaggagatgcaaaggatgttcgaagcaaacagctcgagattcctccccccgctactcctcgcctctcctcccacccccaaatccaggcaaatcctacctagcccgcagtatccaggtgaaccccacctcctccctcagcgcagccgggccacgagagtactcctacccctgcctcacagtcaccgattctccaagctgggagccgcccagtactggtgggtcttcccccacccctctccccgccgggcaatcacacccccattctttacctgtgctccgctggtggacagcagatgctcccgcgtcgccagctgtggattccgccttctggtctccgccttgcaggcggcaaagaactgaagcctccttggccgctaagcgacccggggctgcccgaaggagctgcttcgcagggccgcccaaccaggggtagcagagacgaggcagcgccgttcctaaggcagccgcggcggcttttatcctctgccagctgagacaaaagagcgtgacgagcgggctagtgcggccaatcagcgaagtgcgggggcggacgccccgcacagccttgggcagaggcgagttttcgcctgagggggcgggggcgcagcaggcccgcggagcgtcaagtgcagcttgattagaccgatggagccaatctgcctgggaatttgcgactctttcttcctcccccaacccgtcccttctccctgggctcaactctgcatcttaggccaggtgcattaaacacgaagtgggtccaaaatcaagtgaataataaaagttcttcaccttggtatagggaaaagacggggaagaggggaaggggcgggaagagcattagcacgtgcattgcggaaacaggctttcacacacatctcctcttttactgtgaaagaagtagcagtatgtccatttaacagagaggagagctggagaacaaggctctcaaccaatacccattcaagtatgggggcaagacatcagagtcatttgggggagcttgttagaaatgcagtcttctggccgggaatggtggctcacgcctgaaatcccagcactttgggaggccgaggcgggcggctcacgaggtcaagagatcgagaccatcctggccaacatgttgaaaccccgtctctactaaaaagacaaaaaaaaaaaaaaaaatcagctgggcatgatggcgcgtgcctgtaatcccagctacttgggaggctgaggctagagaatctctccaacctgggaggcggaggttgcagtgaaccaagatcgcaccgctgcacttcagcctggcaagggaacaagactccctctcaaaaaaaaaaaaaaaaaaaaaaaaaaaaaaaaaaaaaggaaaagaaaagaaatgtaggctctgggccccaactctggtggattcagatttactaggactagcggttgtgatgtggttttgtatttagtatttttaaccggcgctgcggttggttctgagttgtagcaaggtttgtgaataagtaaatgagcctgtctccaatatctgtccacaggtatctgtggtgaaatgcaactccagagcagatgtgcctacctggaatccatgatcttcctgaaattgtatgcaaagatttcggactctgtatgaagctaaataatggccacccaaatgtatcaagtcctaatccctgaaacctgtaaatgttaccttataaagtaaaatggtctttgcaggtgtgattaagttaaggctttttgacttaattttccaggcaggctgaaatctaaaccacaagtgcccttataaaagagggagagttggtgcaccaagaagagaaggcaatgaccagagattagtgatgtggccataagcagaggaatgctagcagccaccagaaactggaagaggcaaggaataaagcacagtcctactgacaccttgaattcagcccagagaaacagatgttaagcttctggcttctagaactgtgagaaattaaacttctcttgttttaagccaagtttgtgataatttgttacagtgctgttttagtctgtttggggtgctatggcaaaataccatagactgggtggtttataaacaacagaaatgtattgctcatagttctgaaggttgggaagtccaacttcaaggtgccagcaaggttggtttctcctgaggcttctctccttggcttgcacatggctgccctcttgcttggccatcctctctgtgcatatgtgcctctgggttctctcagtgtgtccaaatttcctcttcttataaggacacaagtcagattggggcccaccctaagggcctcatttttaccttaataacctctttaaaggccctatctttaaatacagtcacactctaaggtactgagggttaggattacaatgaatttgggggaacataattcagcctgcagcactccattttcccttacttctggttctgggaaagcaagcctt

SEQ ID NO: 1564335 - DNA, 4001 bp, Homo sapiens
gggaggccaaggcaggcagatcacttgaggccaagagttggacaccaggccaatatggcaaaaccctatctctactaaaaatagaaaaattagctaagtgtggtggcaggcacctgtaatcccagctactcaggaggctgaggcaggagaatcacttgaacctgggaggtagagattgcagtgagctgagatcgtgccactgaagtctatcctgggcaacagagtgagactccgtctcaaacgaactatatatgtatatatacgtccaaactttgccatcaatatctatatgtccatgatttgctgttaaggttttttgttttgtgtttttaaagacaaggtatctatcactctgtctcccaggctgtagtgcaatggtgtgattgatcatggctcactgcagccttgacctctcgcgctcaagcaatcatcccgcctaagcctctagagtagctgggactacaggcatgcgccaccacacccggctaattttgtattttttgtagagaaaagctcactgtgttgcccaggctgctctcaaactcctgggctcaagtgatccttctggtctggcctcccaaagtgctgggattacaggtgtaagccactgcgcccggcctgttaagattttttgtttctgtttttttctgattgctctctctctcaaagcagctcatatacattatacattttgtttctggtttattttcattaaactacacactctatgcagggccagacagagatgtctcgttcaatgttgtttaaaacctaatgaggccagataattcaaagccatcaatatgataaaatttaagttactttggcaaggtcatggattttcagaatcagctttatttgccctatggatctctgaggaaatataacctcctcagggtgcccttgtgtatctaaaacagaaccacattctttccctctttcccccacatacacattctctttttatccttttacctcctgttctttctctctatggcaatttaccttcatctgacacactatttttcttgttaatagattctaggcctgtgtttctaaatttgttctaatttgttcaccatttagatccagctcttccaatagtgcctcttaattaaatgtgttaaatcaaaatacaacaaaagaaccccttaagtgattggtgctcagaatgactatttaataactagatttgcccgtggggcagaagcaacacgttaattgtggggcatctaccaatgattaacttttttgaggtttttttttctagctctttcctcctttaacatggtaattaaagctcacttgcctgagagtagcctcaatctatcgacctttcggtgagtgaagttttcggagaaaataatacaattatcaatcagcaaaagggtggggggtgggggggaagatttaagtggtaacctcactgggacattccttggctagatgtcgggatttgccgcagcggtagcagttgacctggcctcgccttgctgcaattgatggccacgtggccaatctcgccgcatcggtaacacttgacctgggcgcagtctttctgaatgtgcccaagtttgccgcaagagtagcatttctgctctttctgacgatcacagtcacgagccagatgtcctagtctgccgcaggtataacagtgttggcgtctctctcgtttaggatccttacagtctttggcgatgtggccgcttctcccacagttgtagcagatgtttccgagaaggacacagttcttagcattacgaccggactcaccacagcagtaacaggtgtaagatagggtggtggaaccacattgagaacctctgccatggcctccacctcttcgccctccagctcctcctctagggcatccccgagcccaatggccagagtgtccacacgcgaagaaatccttactgctcatggctgcgatgcgatcttccaatgagcaggcccacctcggccccggaggccccggcgcaaccccgctttgggcggcttagaaagaattagctgttttccgctaggtgtctcagtgatgtcatacaaggtttgcacacggccccattcacgtgtcacggacattcctgacgcccttcccgcccgactttcctcctactcaagaagccaaaagcacaataatctgttaactgagtagtgttgttttccgtttttgtttgtttcaacacttgaatcattgagtttgaatcctttcctatttagaaaattagacttgtagaagttttcataatttaagacttagtcggccgggtgcggtggctcatgcctgtaatcccagctcttcgggaaggccaaggcgggaggatcacgaggtcaagagattgagaccatcctggccaacatgttgaaaccccgtctctactaaaaatacaaaaattagccgggcatggtggcgggctcctgtaatcccagctgaggcagttgaaccagggaggcagaggttgcagtgagccaagatcgcgccattgcattccaacctgggcgacagagggaaactctgtctcaaaaaaaaaaaaaaaaaaaaaaaatttggtgttccagtggaggtgagggggacaaattgtgtcgacttctatcccatgatcttgctctgtcccctgggtttcttaattcactaaataattggaactcatagtttgaagcatactatttagaggcatatgtgtaaacatatctttatattacgagttatttatttatttattttagacaggaggagtcttgctatgttgcccagacaggtctcaaactcttgggcttgagcaatcagcctcctgagtagctggaaccacaatcatatgctggctactatgactttttgatgtttcaattttagacattatctgtgtctttccattttggaggatgaacatttagtcttcttttaccacccaccctatgcacttgcacagtccaaactcctcattccaactatgcctcccttcacttaatattggttgggacaatattcaatgtttttataattataagtatgtaaatgatactcatgcctgagccatttggagagtactctgatcacttcattacctgcatggtttttatgttctctggagttagttattgtcattctttatttctttagtttctcatatatttacctaaatactatttaatagctatatctgtgtgtttatctttataccagtaccacataatcttgattactgtagctttgcattatactttgaaattgggaggagtaaggcctccaactttgctcttttgatgtgactattctgagttccttgcattttcatatgaattttaggatcagcttgtcaatttctgcaaaaaaaggcaaacgggtgtttgatatggattatggaatctgtagatcattttggagaccattgttatcttaaaaatattgagtctggccgggcgcggtggctcacgcctgtaatcccagcactttgggaggccgaggtgggcagatcatgaggtcaggagttcaagaccagcctgaccaacatggtgaaaccctgccactattaaaaatacaaaaattggccaggcatggtggcgcatgcctgtaatcccagctactcaagagactgaggcaggagaatggcttgaacttgggaggtggaggttgcagtgagccaagatcgcgccactgcactccagcctgggtgacagagaaagactctgtctcaaaaaaaaaaaaaaaaaaaaaattgaataattaaatacatgagcacaagttattgtttcacttatttaggcttttattttcattctctgatattttgtagttttcagtatacaagtcttgcacatcttttgttaaatttttaaagtatttcatcatttttgatgttatcttaaatagaattattttcttatcatttttcaattgtttattgttattgtatagaaatacaattatttctgtatgttgatcttgtatcttgcaaccttgctgaactgatttaatagttccagtagttttttagtgg

SEQ ID NO: 1564336 - DNA, 4001 bp, Homo sapiens
aattcgtatagtaatgcctggcatttgtatggtgcttttaacttttgaaaggatttttctttatatatccttgatctgaagaggttagaaggatagggcagaaacaggatagggcaggagcagagaaagaaattttaaccttatccacagtccactgggaaagctccaaatttcagaagcacacacagtcctcatatgttaaagacaagtgcattggatatagggcctttgaaggaaacagctcacaagaataaggcttttgctctccctgagcactgcttctggttgcatctgggcttggagtggaagtctcagctggactgcagtttggctaaaaaaagggaaatgcccccaaagttttatccacggtcacatattctactcaccctcatgccaaagggaagacggcttaatcacaacatagacctcccttgtttgggagactgtatattagtttgctggttcacagtaaaactgcctttgaatgaaaggcaaagaatcaagtgatttttttttttcagcgaccctcttggccaatctttagaaacacttcctgaagtatttaagttgttaagaggtggaagctccaccctcacttcttcctccccaactcccttccccccagacacaaactcttcatcccccagggtaataattttcttttctccaataccttgctcccatacaaaagctaaatactctccagaatattggactgcctcgggactaggaggactaacgacaaggggaaaatttgtcttgcttggtgccccgagcgacttttccaaggtaggctaggaggagagtgcttagggcttccactaaacatagctactaccagcttcacaggctccgcaatgaaaacactcggccatttaggcaagggagatgattctggcattttcgggagcttacacttaggctcccagggcgtgcagagggggttaaagagcaacaggaagtacagtggagttttctcagagctagggattgttctgagaatgggtagggaaaggttttcaggtaccagcccggcgtccagaaaggcagagactcacatgcccctttcctgagagcgctaggaagggagataaaagacaaagccaatatttggggctgtgcggccaggccatgaaatgctgccagctagtggacctatgcgcctgcaggttgcaggtagaagtctcaggcttgtggtgggggtggggctatttagccccttccagttgggctcaagagggtggacattctgagcgccaggctataaggtgaaagaagtggagaggtgcttcatgtgaaaggaaggcgtaaagatcaaagagtggcccaagtgtccggtgacaccgcccctctccctccacaacagataccactaagcaacctagccccccgcccccatcctacaatatcactttccctccctgtatcaatctaggctggatcttgggagatcgaccctatgggtgagaggggcacggatgggagaattaggtagctccaactagattaatctagatctatcagggatccaagcctgccccataggaccccaggtcagtccctggcgactcagcgctccgctgtctccctgtcctaccagccgcccgccgcccttactcccccaggttcaactccccttcctcctgaatgacctatggtcgccggagcagcctcgccaccaccggcccagagcccaggctgacgggggtgggcaaaggtcactgcccaaagcaggggatattcaggccaaggggcaaagagagactctgctagccatatgctccgagggactcctgtcccctctacccgcacccgcgcttagcctcccacctcccctcccgtctctgccaccacccaggggagggggaggtctggggaagcaaacaaacgagacagaaaattccgtaccgaggggggagagatgagacggtgggacggggcagcgggggttgacttggggctgcggctgcggcttccttccacccctggccgcggagctgcaaagaaggcaggagctgctgcccctgccgcctgccccgtcctccctctttccctctcgcctccccgcctcccccgccccgccccgccgccaggagattgagagtggcttcggcccgggggctgggggaggtgaggggtgcttttgcctaccacggttgtctcaatctctctctctctctctctctctctttctctctctctctctctctctctctctctctctctcacacacacacacacacacacacaccccacatcacaaccacgacgggttgtccgcagctcgcagccaccccaaagggaggaataaagaacaggagcagagggaagccgggcgcagaaagaagggaaaaggaagagctcagggttggacatttttggagacaggggtggggaggataaagggagcgtgcctccttgattttcccctccccacccctctttgcttttctctccccttctctgtatagcatattccagaaacggcagcagaaggggacagaaacctctagtgtagaaaagggttttggaggggtagccagcgctcccgccagccgctacctaacagctggagcttgagtgtgcgtgtaagagtgtgaatgcggctctctctctttttttctctctctctcccctctctctccatcccttccttcctccctccttctccctctccttcacactacagtgtcagctacccctgtcagtttccccgtgtcagtttcttccctagctcttattgtgtgtgactggctgcgtgaagggagtgggtgcgcttgaaggggctcaggttgggttagagagctgggagaacagggtagggacattggtagagcaaagagtttcagggcactggcgaaggtgaaaggtgaggagggccgatctgttacaggcaagtttggcaataactgagcatccaaaggggaagccaaggtaggagccagtacttgcgctcgtctttacaccccgcccctttccctgtgctcatccgcccacccacccatcagcctagaggccccgggctgtcccagtcggctgctgtttcgcgccgcaaaagaggagtccggcaaggcgccgcaccacgcatcctggccggtggacatccagacgacacagattttatccgaaaaaaccacttggctcagggtaagtctacaggcggccggtgcggtccatttcactgcctgagtgctgctgaggggcaaggggcagcgaagtgcgggttgaatgaagatgctgggctgctgtaggcggagaagcattgactggctggctgtgggctcagggtggtagggagcagagggaggccagcaacagattgttttggaagaggaaatgcaatggggagaagctccagggttgataggacaaggtgctgcctgcgatgaccaaaaacatcctttcactgggaatattttcctgaaccacagctttgtcctatccctggacaatgatttgctccattcttgggtagattttaagatccgtggggaacctgctcccaggcctccttaaaatcgattagtgtggccctcggaccaaggatacctgcccttcgtcaaaagccaccttcagaaatagagagccaggagccggatcatgaaggttcaggaaccagggtccccatttaccttctttgtcttgtatccttcaaacttaagaaatggccagatttgtttgcctgtcttccttaaaggaaccaagaaatgcaaatggaggggcatcagtcagatctctgcttcaaagtggacacctccctccctccctagacacacatcgactcggacaaatggtcatgatcatgtcccacatatgcaggtactgagctgaattcacagatgctgatctttctccatggtctcttagaatgagactagaagggctttttccctattacaacctgggctctttggatcgcagtcatgtacctggtgatggttaagtgtttagcaaggttattactccctcaggaaaagcctgaagcggggaaaccagcctga

SEQ ID NO: 1564337 - DNA, 4001 bp, Homo sapiens
gcagggtgttaaaaaatttaccatgggcagtcacactgctttcagactccccaaacaccaatttcattgcccgcaagaaatctgctacacttaggttggggttggccgcctgaagcaaacgcatgacctcccgggcagggcccctaagtgttttcatcaagcgcttgagtttttcctcctcagacatactccaatctggcaggacctcattgacttggatcagccagttttcaaaggtttctttcccctgggctggcaccactcttcctgagaacaacttcatgtttctctctgccattttgaccactaaaggacagagactcctccccagagacctcaacatggaatgggcccaaggcggcaaaggtgcattctgctgcctgctgttacccacacacgcagtgatgctagccatgactgacgacgatagggtatctgaatacaacaagatgctcgcgctttttggaaaagccttatctgcaggattctccaaagcaacgttcctgggctgtgcctgccttatatttcagtagggattctaaggaaagtaaaaaaggttaataagatagtgggctgtggggaagcagtctgcagtagcattctctatcttcctgaatagccttgcagtgcattttatatctgcccagtgccttaacaataccctgcaggagactggcaattacaacattccagagctagcaggtgtccctgggctagtaggtagtttttcagagccacatccatcccctcctgcctgtactccaggaggggcgacaactgttgcttctaattctagatgacatagtgttgggagctgatactgggccctcaaaacggaactcaatggttgtgtgtcacagatttatgataataagaaaccattaacctcatggcctcaggtctcaatcacacccccttgtcaacgtttcccccgttatttctcagattcttacatgagctcggaaactagcgttcgcctttattttacgtgcagcctctgcaacaggtgcctgccgtgagaaaattagcctctggggtacggccgacttttgtccactgggtgtcgcagatcccagtcctcagggcctcaagactgtgccgcgaaggagggaaaggaagggttggaagcagcttcatctgaaaacctgatacctcccctccaccgcctccactgtcgccaggcggaaaattccctctcccatcttctgaacgcaagccaaagtgcctcctgccctcccgcgcatcccccttacatttcctccgggagaccctcgccctaccagctctgcaatccgccgcacagaattcaagttcggattcggctttgatgacctgccagggagaaagagactagaagttggataacctcccaccctcatattccttcccaggaagagatgaggagatgcaaaaggggttcaagacagcttgcgatcgtctcctcccgccccttgccacctccccgaacacaccccgcccccgacacccaacaacacccccgacctacgacaacacccccacccaccttaatccaggcaaatcctaaatcctatccagtcggcagcatccagatgaaccacaactccttcctcagcgcaaccaggccaagggagtgctccatcccctgcctcgcagttactgattctccaagccgggcgccgcccagtcctggcggggcttcccccacccctctccgcgccgggcaatcgcgcgttctttctttacttgtgctccactggtgggcagcatgtgctcccgcgtccacagctctgtttcgccttccggtccccgtagctctgcaggggaacgggatctctgccgcctcctcggccgctaagcgacccggggctgcccgacctagcgagtgcgcacgaccgcccagcgaggggtagccgagtcgaggcagcacggttcccaaggcagccaaggctgcgcccaccctccagttcggccctccgggcagccgcggttgctttcagtctctggcgactgagacaaaagagcgtgacgggccgggcgacgcggccaatcagcggggcgagggggcggcctcgccgcacagcctccggccccgaagctactgctagcaagaagggggagcgggccggctggccggcgggccggcgggcgggggctgcggcagacaggcgcgggaggcggcacggcgtcagcagctcggacgcacggactgggcccatttccctttcatccgtgagtttgctgctaacccatctcttcccttctccctatccccttacacctcggctctcctccgggcttttagaccggataccttaaacacgaggtgggacagaaaccaagtgaacaatgagagttcctcacctttgtatagggggaagcggggaaacagcgtttactgagtgctttctgtgtgcagaggcgcctgcatggacatctcctttcctcttctcagcagccgtgtgaaggaggtagtagtgtgcccatttaacaggaaaggactgaagcacccaggcagtacagttaggaagtgcagagttaagagctcacacccaagtcaccatgtctgacttcaaaggctgccccttgccagcactcctctattctgtcagattaagggatagtggagaaaaaccaaagccagatgggaggaccaacttgggattgcatagaattggtgagcaagaaccattatctccatttcacagatgaagaaactgagccagagagagacaggttactagttttggcctgtatcctgcagcaaataagttacagcatccaacctagcaccgtctgttgctctctagatgctaattcgttgccctgcagcgctgcctggagagtatttttgcacaggtagtctcaaaccatctcaacagcagtctcaatgtgataatagtgctgagggagggggtgaggaggtagtggggagagggctgagggaagatgagggcaacctttatggtgcccattgtacagaagaggaaactcttcttggtacttttctttctttcattttttttattaatctttttttcttttcttctttttttttctttttacacaacaagctgcctgttttataaaagcaacataatttcgacagccctttgtgaccccaaagaggccaggctcagagaggtaaaatgatttgtctgaaaatacaaggtgaagccaaaatttgaactgagtctctgaatccagaactcatgctattaaccaaagtgtgagtacaaggtgagctgcctcagaatcattttggagagcttgttataaatgtagattattgggccttacccctgggggattttgatgtagtaggactaggggtgaagagtgtgatttgtagttttaaccagccctgtagttgattctgaggtgtagagagattcatgaaccacttttctaaacaccaccacgtgatgctgaaggttataagtaaatgggcctgccatcagtgtatctgtccatggcatatctgtcatgaaatgtaactccagagcacaggttcctacccgaggtccttcctggaattgtatgcaaagaatctggactccgtacattcttctgagcccacagctttgcagattttcaaatgggtctgtcataacgtcttccttcttcaagccatgcttgatgaagaagtgtgagaaataaaaccccatttaacctaacccccaaaccacagctctctgttgctgatatggctctttcatttcctggctcaaggacaggttgctaggttgcccttctgtgagctcttcagggtacttctcctttgctggatttggcatcactggccccagagaaggagcaactccatggaaacggcatgcagggctgtccaaagtgaatggccatgaaggcagtggctggaaaacctgctccatttttccctgacttagagagcaggtattacttcctttatgtatagtgtggctaggaggcttctgtggggcttgttcttgactcctgatgtttagaagcaagtaaacagtctgatgcccttccgctgctgt

SEQ ID NO: 1564338 - DNA, 4001 bp, Homo sapiens
accttcttgaaattggatccagagagtgctttcatcccagttcagctcttgagcaatgaggtggaagtgggttgctacatgaccctccccttggcagagttgatggatgcactggttggcatctttcatgttttctggattatcaaaagtatcctggagcacaggtatgaaactttcacattgctccagtaaggggctttggatatccagtaagagctggaaccaccatcctgccctacctgagaagcaattgccaacaaagctcaccagggctgcttcagtgggatacaggtgccctctgactctcatgtaactatacagctgaaccaggaactcaggaagcttctgggaatctccactgaaggttaaagtgtattgcagggggaaatctgtagcctctaacccaataggggcctgtggaaactctgaagctgctgatgtctccacaactattagaccctccagggactcctgggctgctgagagttctaggaattcctgggcatttgaaggctccagaggctcctggggaggtggaagctcaaggaactctagctgtgctgcagtttcctggtattctggtgcctcctggggcttctcaatatttgggggatcctggggttctgaattcttgggctcttgggctattgtggcatcctgggtgtttgcaggcccctggccctccaagactgttgggatctcatgggccattggaggtttctgggactcccgggttgctggaggcgccagggactctggggctgctggggcctcctggagttcccaggctgctgggggttcccagggtagaagatcctgtggctctggtggcttctggggttccttgaactctggggtcttttgggcctcccaggctgctgggggattcatgtgctctgggagcttctggggctccttggcctctgaggactttcggagtagatcatactccttggctgcttgggacttctgaagctctgggatctgggcctggagagcagcattttcttccatcagccactgcacttgagcctgccgaatttcattctccaatttcagaacaatataggaggctgctaagtcctccaccatcttttgaggaaatgggtatgatttgacaatttgctaccaagagagattgggtgggtgtttgtgagatccttcctgaaagctgcttacaggcagatgtcaggctcagtgagttttccaaggggtggtatttgggccccgccaaggctgattatcaagaggtcactgggagcctccggagctcggcaagaaggagcctccggagctcagtaaggggaagtgtcagatacactgcgaagagagtgggagctgaggatcagaaactgtggaaagcacacattcaacataaaacaaaatctgcccaacaatgctgggtttcttttaccataggcttatgttcatgagctggggtatatatgctggatctgactccacgacattttaagaacagcatctgtcccaaactgcacatgtcattttgcatttatcctttgaaacttaacattatatcaaaagcaactttttaatattattttctgttttatatagtctttaatcttgaatatctgcctaatatcccaatgtaacatttggattttaacagctgctttcagtgactaaatcaaatgtttgagcaatgtgggaattttaggctctgcggtgggccagcccaagagatatttttgggtgactagggtggtaggaagtaggagggagctctttctgacacctcagaaatcataccacataagtaaccacacaagaccagcctcaggagaaaacaagcaaaagtcgactaaatatatatatatatatatatatatgccctcagaagacacatgcatattatttataaaatacctcaaaatagttaagaaaataatctttataaatgtacgttaccattcagagacttagtccaggagcttggctgtctgtgtacccattgctgaggagggaaatgtgtaaatggctgtggaggcttgccttttctgcacacactgaactcaagcaaacacacccactcccagaacacattccaactttcctctgtaacatagctttttaaagtgtggaagagttttttgacagtacctcacagttcagagctgcaaggaaagtaggatgctgtgctgatgtgaagcagcttcatgtactcagtccttggttactttaatgaatatttggccaggaaattgtgagtaataccactgcccttgtgaaaagttgcaaacatttttgaatgaccacagtggtttgggatgtgattttttatgtctgtctcatctaacctattcttactctgtccaaattgggccatttgtttacttctcactcagggaacagcctgcaaaccctcagccccttcccttgcttactacctattcagtccctagggtttttccttgcaatgttttcttggaaaatttgccacagacagatctagaaaaggtataaaagggtacaaatgtcagggagaccaattgtgttggtgggtacttatagcagtcttacagagtccctggctctttctgaatgtcctggaccaaagatctcatgcttccctgaactgatcaggtgctccaggtagcactcaggacattcactaaagactggcctcttgggaagtaaccctgctcagaatctcactttctcttctcatgccagatcacagttatgccttgggtatgggctatgtggccattttaggcaaggcttaggggcaactatttttatccaagtaaggagtggggttgaggtttgcatttggccatttcaaatcacacatcatgtcaaccacagtcccatgtctccttcacaaatggtcagttctgcattagtcagcataatgggataaaccctagtgatggaataggcccaaaacatagcaaattgacagactgggctacctgaatccgaatgcagaagctttgaaagtaaaaacaaaatcttttgcaaatcgagtttattctttccttacctttcaaagttttatttttctagaaacaccacacatataaaaataccaccatcatcagggatgatgtgatctatttatgtgaagttttcagataactgaagccttcctgccctccaagaagccaaaacacacagttaacatttattttatccagaaagaaaagagaacttccaacacctgaatttgtaacgggcttagttagggaacaactattaattgaaactctttcctaatgtttagcaatttctgtaacaatgagtttgaaggttcaatactggacatcaagttgaaatttaataaagagtatttcaatttaaaaaaatcagagaaatatttatagcatatgttatacctctttgtccattcttaagaaatgattttgcatataatttaatccagttttaatggtttggattcatacttacacaaaccagctagtttaccctgttgtaacacagtgttgccctctgaaagctactgagaggtataaagtggtctgtcttcaaattaaaaacttccaaattgctatgttttgcgacttcttgtattttcttttcctttatatttttatactcttttgcaatcaagttgtaacatagcccttcatgttatacctatatgcctgtctatacttaccctatacaaatttggcaaattacttcatccttctgatagttagaatctaaactttagtttatgaaactgtaaaatgaagttattaatattatttgactttatagggttgtcaaaaattcagtgaaataatgtgtgaaaaaaggattagcacagtgtctggcagctaataacacccaataaaggttaataataataataataataataataataagctgtagcagcagtaatctcattttaatttattctttttaatcacctgtgaattgggaaactgaataggtaaacatgctagagttgtgtagaggctgagaaaggggtctcataccgagaaatctacagtgcatcgatttta

SEQ ID NO: 1564339 - DNA, 4001 bp, Homo sapiens
agagacttggggtttgtgtcgggaaatattgtagaattctgagtttgaatgcacaagctatactgtgagaaccattttgcaaataaggaggatatagagtgctccttagtgtgacaggacagggtaaaaaaagatcatagaattataaaaggggtagtctaatgagagggaatgagaaatgatatgcccattgggaggagtagaaaatattagaaaccccagtaagaaagaatggggtttccccagtttgagaagatgggacaagtgcaatccaatgagaagtaagaagaaataataataagaaatcccaaaggaagtggatggcagaatgtggggctaaaagtgaaagaacactgtgggaggtggggagtgggtttcctaaaaaagataacgaggaataatgattagaaaagtagcggccctttgatggaataggagataaattacggaaacccttgtgggagggtaaaagaggtgactctagtgggagaaggcactatcatcatgtgacaatagcagggtcaccagtataaggtgtcagaaaataatgtggggctcctaatgggaaggagtcgaatgctcctcaaagcaagaaggcaggagactggagggaactccagtataatataatcagggcctctcatgtgagagaggatgtattatagaataccaatcccattaaagaaaatgattaaatggggggagcccacagggaaagagaatggagggcttaccactgtgtgaaaacggaagatcttaatggagtagaatagggtgcactgtgggatcacaagtggacaaagatatgaagcacttcagccagtgtgagaggatcacgggaaaacgatagattccagtgtgtgaaaaaggagagctagtaagagagtagaggaaatattttggaactctcagtaggaaatccctagtaggaaatcctagtaggattctagtaggagggaaaatggtggggctcctagttggatgcattggtgagattcctagtgtgagcaaacagtttaaagacacagggtatgttgtttcctcaacttggtacagtaggggctcccagaaggagagcacaaggtgcagatggttgccctgtatgagaaaagggagccctcgtgggaagagccaggacattattgtgggtagggcaaagaaataagaaaccctaggtgggagacgatggagacacggcgggaccctggtgggagggcgcaggaaatattgtgggaagccagaggctggggacaaggaactctccagggagagaaaggaaaaccgcagagagaaggcttgagaacacaagggacaccagtgtgaaggtagggcaaacgattatattggagtataatttccccaccttaggtgcccagccccacttacccaggcagagttcaaagacgtaggcatagtaggaccagagcacgacgaggacaataacgagcactggcacccaggacagtacccggcggcagcaccgcagccccccagacagagccatcttccagcctcgccgcatctttggctcgaagatcgaccaagcaggcctgctggcgccgggtcggaaccgctagggtggcggctgcgaggctggaaggcgcgctgtgcggcactccactgtctagcctggcgggaaccctctcgcggagccttcgccacctgtggggctgcgctgctgagtgcgccctgcctggcacaacaggcttgagtcacggcgttgaggaactagccatgttggagcggaagggtgatccgtcaggcagtcggagctagcacgctcagagggagtgcagtccctcccctttctgcctcctccccaccctgtttcaaggctggatgcagggctagacctccgcaaaatcgtgaagccgaagaaatttgggtccgcccatctgctcttactgcactgcgtccgccctctttgtttctgtctcagtctctctgtctcccttcgttctctttctctccccctgctacccccccccacagttacacacacacacacacacacacacacacacacacacacacacacgcagtgtgaaagatgcgagccatagcatctcgtaacatgaaggccatccagctccatcctcccactgctgcttgaacaatatgcttaacacgtagtgccgcagtcgctgcttgggtaagtcctttgacagggcactccctccttcccttttccctccccgcagaatcagcttagtatgtttttagaacaaacacattggtataaaaaaacaaatgagggagactgattctgagaggggtcagggaaagctacaaaggtagcgatatttaagctgagctatattaataaattcaggttttccaggcagatgagaggaggaggaccttttagacagaggaaacagcatttacaaagtcatagagtaatgaaagtccaaaaatgttccaggagcagctagtgtggcttgaagagtgtttgtgaagaagagaggctaagaatgagactgggagtatgaggccatggtgtgaaggctcttatatgtcctagcatggcatggggacataatcatgtaaagcagattatgaagagccatcaaaggtttgggggaaatggagtgacatcagggatatgtttttgtgaaataactggcaggattttggaaaggaagatggccttgaagtaggaagatcaattaggaggtaatttaattcaacaaatgtttttggagtggttgcttcctgttagatcaactttggtacaaaaagaatgacaaaatagtgggcctgaccccaagaagctcatgttctcattggggctgtagttgttcattgacacaagtacaataatagaagtacagcaggctcttggcatttatggatttgacactcactgtttttcccaaaggtcttttacatggagaaatttgtgattttgctgagatgcatgtgtgattcacattctgtgtgactactgtgtgggagcaagtgtctctacgaggttgatctctgttctttatttatggttatatatgcagtaaattacctgaagtgataaaagatttattgtttcttttcagattaagctaattttatggttgatgttactaaattcatgatgcaatgaaatgcagagttcattttagttacaatatttagtagcctagttaattatttgagccctaagtttctgacatgtatacttaaattttccaatattcataattcggggcttgtggaacatgtatattgggattgtcaagggtatactatttaaaccaagtagccttgaggaggcaatgattaagtgtgaaagggaaagtcccagttgggttttgaataatgactaggatttcaccaggaagataagagatgggagcaggatttaagggaggaggggattccaggcaaaaggaaatatgtagtggcaaatgtatgcgaaacagcacaacatacttgggggactgcaagtagcccgcttttgctggaagatattaacagtactctaaccaagagatggtaagagcctaggcctaagccaggctatgaagggaaggagaggaggggaaagatgtaatagtgtttggggaaatcaacagaatttgtcaaccagttggcaggtgaggagtgagataagttaaagctaacagccagatttctaacttcaatgcctgaatgaacaatgttgccaatcactatgataggggctattgtgagaagagcagagttcgtgggggaagttgataactttcacgttttgacatgattaattttgcctaagtcttcctcttctaaggtagcccgatcactaatcaaatagtctggggccggggggcttatgacagggatagctcacacccaaaggagcatggagggccaagaaccagagagacaaaccatgttcaagtgtatacatcaaggattggcaaactatgcctatgggccaaatatggcccactgactttttatgaatgaagttttattggaacacattcatgtcaatttgtagtctatggctgttttgtaca

SEQ ID NO: 1564340 - DNA, 4001 bp, Homo sapiens
ggtattggtctttttaggaagtacatactctgtgatgaccacgaagcaatgaattcagctggcatctctacagacatcgctcaagaggacgttaaagtcatccaaggaccagccccaaactccccagaaagcaggttcttcccctggacccaaagtaaccataatcaggtaactctactcaaccgaaactcactcaaaggcgaagaagagtgtacatgtccccaggatgaggaaaagggtcaggtagaaaatgcccttttgccgggccatcatgacgcggccatcacagcaaaaggtgttcctgcctgggagtttctcccatttccgtgtcaccttctttctcaccaccatcacagacatgattggaattcctgctccaaaatgggttttgcgattacacgagagaagaaacagaggctgagcccagctttgaaatcacgttgcctgctattcctgccgctgggtcaaacatcatcaaaagtccaattgctagccctaagaaaaagcagaaaaagaaaaaaaaatgaggcaataataagaaaatacagttcaaccctcctttcccagagacagaaagttgaaaactgactgaaggggtggggacggggaagtgggaaaagtttatttccaattcgtgtttgttctctaaaagaaggtatgataaaaggttctcaaaaaaggaaaggggctagtatttcttcttaaataagcctctatgcttccaatctaatgctgatgatctgatcatcacagaaccttggaactagagaggattttataggtgatcgtgccaattattaatactttgttttgtaaatgagtaaactgaggaccagagagaggaaataacttatccaggaccacacagcagcaatgctgatactgctaacttccagtcaagggcatgttccactatgccacagtgttctttcaacatcattaaaaggactctaaaaataatagtagagtttctgtccttataaaacctccctcccttcctccacttcaccttctttcttcaattagccactcgaatatgaatcacagcagggaacaagtcaccctctggcagggccaggaggttctggacgctctgtgcacatacgtgcattgtatttacacaaaacagatttcccctcatcaaaccctctgcaacttcctgagtccgggaaatgaaacaatctggctggtctagcctaacatttgtgagaatcttaatgaaaccacatcagagacctgtaggtgaaaggctgacttaagcaggagagattctggaatggttggtgactgctgatggctggttggggggtggggaatggcagcagctaagaaaagtcacaagggcgctttctgggacatgtcctaagtaccatctctactcagcatcctgaattcccaggcccagagtttctcagcctctgctacccttctcctccgctcaggtgtggtgttgtggcctctatttaccgacaccacatgccccacgctggcaggactgaggcggaagcctgcagcccgacggacggagggagaaacagccaactcgcgggctggagagggcaaaggtccaaaaacagcctaggagcggagcagggaaacgagaaggtagaaggttcggggaaggggaggggggcccagaggtgcagagaacccgtcctttgtgtaaaactaacctggaagacaatctcctcccgataaaccggcccagcgggagaagggagaccaggaagggggagccggcctggaagaacaaagatcaaaatccgtcgggaagcagcgaccggctccccagcggggggccggaggccggaggccggagtccggggccgagccgcgggcgcggcctctcgaggcccgccctgactccgccacgccgcggaccaccgccccaggcaggttgggacgcgcgccacatccacacgcacacgcagccacacgctcgtacacactcacacacgccccgccacgtgtagtcaccccgggccaggggctcggcggctgccgagttgagaagggcggtgccgacgtccccgcctccaggcgccgcggaaggggaggcagcccaccctgcagccgagcccaggagacccccgcccccacccctcgttacctgaaccacggagacccaactcggccggcagctgacggcaggaaacggaccgtcccagggaatcacgtcggcagccaaaggtggcagcgacttgtcctccccgggccgggaggctgtctcctcctgacaaggggccccagtggtcggggccctaaaccagctgtggcaaccgcccaccactggccaaatggaacgctcctcacgtcaccaggtcgctccagtagttgctcgccctctattggccgatcggcctcggcgcctccgccccggccgcccctatcccgaactgccattggttttgcctaacgccactcgacgatgcctccgcccactcctccacccatctccctgctgcatgcccacctgccaagccactgccagcctctctttggggtctgagcgccagtatgtgaagtgttgccttctattaatatagttacgcagagacggaggttaagggtagtgccgatgggacagcaaagggtggaaccagcctacacacacgcgcgcgcgcgcgcacacacacacacgcgcgcgcacacacacacacagtgagatgctgaagcaacactagctcacagatccgggtgctcaccccaaactaggtctgccatgggcctctccagccctgcttgcattttaaaatcaaccgcaacttgagattttactctttatcggcataaaaacaagtcatctgcctcccaagtctcattcagtagccagggaccccatatctgtcccagtcaccctagcctgcatctctaagtctttcaaatcaaaacacacaaacaagcataaaaagcatgttgtaaaggataaatgtccccaagaacgtattatcattttgcagcacctaaaacaactaattgacattaatggagttaaagaaactccactgaggacataaattcttccaggtaggtaatgaagtaaagattgccaaaaaggttgtaaatttttattcggtttggaaagcttatgatgattaaggggagaatccaaggcagaattcccacccaccaaccagattgattttttccttctgccacccagctctgcattactgccaccatgagccactgctactgatccgagtgagttgcatgcattaaaagtttgagattgggctgggcgcggtggctcacgcctgtaatcccagcactttgggaggccgaggcaggtggatcacctgaggtcaggagttcaagaccagcctggccaacatggcaaaacccgtctctactagaaagacaaaagttagcggggagcggtgggactcgcctgtagtcccagctaccagggaggctgaggcaggaggatcacttgaacccaggaggtgaaggttgcagtgagccaagatcatgccactgcactccagcctgggcgacagagagagaccctgtcttaaaaaaaaaaaaaaaaaagtttgagattgaaggggggaaacaattgagaaccacagtattatactatagggtgactttaaaagacactaggtctgttttcaccagtatggctcctgccttccaaatataagaggaaatatgagaaaaggttgaaggtggcatctcctttccaagtgtaagaggagataagagaaaaggttgaagattggaggagaatgcctacattaccagcctaggttttcctaagcgtgataaaaatttcaaagttttagagatttggtatttggaattagtacagaagagactgccaaagctcttcctaaggcagttgtatgttagttgaaggaccacatacatggtcaagaactatttttcctttacagtatatgtgtcccacacaatatgaaacaaaaagctacataataattacatttgacactttcatggcacccttcaaaattcttaaaggatttaaaaaacactag

SEQ ID NO: 1564341 - DNA, 4001 bp, Homo sapiens
atcacagacatgattggaattcctgctccaaaatgggttttgcgattacacgagagaagaaacagaggctgagcccagctttgaaatcacgttgcctgctattcctgccgctgggtcaaacatcatcaaaagtccaattgctagccctaagaaaaagcagaaaaagaaaaaaaaatgaggcaataataagaaaatacagttcaaccctcctttcccagagacagaaagttgaaaactgactgaaggggtggggacggggaagtgggaaaagtttatttccaattcgtgtttgttctctaaaagaaggtatgataaaaggttctcaaaaaaggaaaggggctagtatttcttcttaaataagcctctatgcttccaatctaatgctgatgatctgatcatcacagaaccttggaactagagaggattttataggtgatcgtgccaattattaatactttgttttgtaaatgagtaaactgaggaccagagagaggaaataacttatccaggaccacacagcagcaatgctgatactgctaacttccagtcaagggcatgttccactatgccacagtgttctttcaacatcattaaaaggactctaaaaataatagtagagtttctgtccttataaaacctccctcccttcctccacttcaccttctttcttcaattagccactcgaatatgaatcacagcagggaacaagtcaccctctggcagggccaggaggttctggacgctctgtgcacatacgtgcattgtatttacacaaaacagatttcccctcatcaaaccctctgcaacttcctgagtccgggaaatgaaacaatctggctggtctagcctaacatttgtgagaatcttaatgaaaccacatcagagacctgtaggtgaaaggctgacttaagcaggagagattctggaatggttggtgactgctgatggctggttggggggtggggaatggcagcagctaagaaaagtcacaagggcgctttctgggacatgtcctaagtaccatctctactcagcatcctgaattcccaggcccagagtttctcagcctctgctacccttctcctccgctcaggtgtggtgttgtggcctctatttaccgacaccacatgccccacgctggcaggactgaggcggaagcctgcagcccgacggacggagggagaaacagccaactcgcgggctggagagggcaaaggtccaaaaacagcctaggagcggagcagggaaacgagaaggtagaaggttcggggaaggggaggggggcccagaggtgcagagaacccgtcctttgtgtaaaactaacctggaagacaatctcctcccgataaaccggcccagcgggagaagggagaccaggaagggggagccggcctggaagaacaaagatcaaaatccgtcgggaagcagcgaccggctccccagcggggggccggaggccggaggccggagtccggggccgagccgcgggcgcggcctctcgaggcccgccctgactccgccacgccgcggaccaccgccccaggcaggttgggacgcgcgccacatccacacgcacacgcagccacacgctcgtacacactcacacacgccccgccacgtgtagtcaccccgggccaggggctcggcggctgccgagttgagaagggcggtgccgacgtccccgcctccaggcgccgcggaaggggaggcagcccaccctgcagccgagcccaggagacccccgcccccacccctcgttacctgaaccacggagacccaactcggccggcagctgacggcaggaaacggaccgtcccagggaatcacgtcggcagccaaaggtggcagcgacttgtcctccccgggccgggaggctgtctcctcctgacaaggggccccagtggtcggggccctaaaccagctgtggcaaccgcccaccactggccaaatggaacgctcctcacgtcaccaggtcgctccagtagttgctcgccctctattggccgatcggcctcggcgcctccgccccggccgcccctatcccgaactgccattggttttgcctaacgccactcgacgatgcctccgcccactcctccacccatctccctgctgcatgcccacctgccaagccactgccagcctctctttggggtctgagcgccagtatgtgaagtgttgccttctattaatatagttacgcagagacggaggttaagggtagtgccgatgggacagcaaagggtggaaccagcctacacacacgcgcgcgcgcgcgcacacacacacacgcgcgcgcacacacacacacagtgagatgctgaagcaacactagctcacagatccgggtgctcaccccaaactaggtctgccatgggcctctccagccctgcttgcattttaaaatcaaccgcaacttgagattttactctttatcggcataaaaacaagtcatctgcctcccaagtctcattcagtagccagggaccccatatctgtcccagtcaccctagcctgcatctctaagtctttcaaatcaaaacacacaaacaagcataaaaagcatgttgtaaaggataaatgtccccaagaacgtattatcattttgcagcacctaaaacaactaattgacattaatggagttaaagaaactccactgaggacataaattcttccaggtaggtaatgaagtaaagattgccaaaaaggttgtaaatttttattcggtttggaaagcttatgatgattaaggggagaatccaaggcagaattcccacccaccaaccagattgattttttccttctgccacccagctctgcattactgccaccatgagccactgctactgatccgagtgagttgcatgcattaaaagtttgagattgggctgggcgcggtggctcacgcctgtaatcccagcactttgggaggccgaggcaggtggatcacctgaggtcaggagttcaagaccagcctggccaacatggcaaaacccgtctctactagaaagacaaaagttagcggggagcggtgggactcgcctgtagtcccagctaccagggaggctgaggcaggaggatcacttgaacccaggaggtgaaggttgcagtgagccaagatcatgccactgcactccagcctgggcgacagagagagaccctgtcttaaaaaaaaaaaaaaaaaagtttgagattgaaggggggaaacaattgagaaccacagtattatactatagggtgactttaaaagacactaggtctgttttcaccagtatggctcctgccttccaaatataagaggaaatatgagaaaaggttgaaggtggcatctcctttccaagtgtaagaggagataagagaaaaggttgaagattggaggagaatgcctacattaccagcctaggttttcctaagcgtgataaaaatttcaaagttttagagatttggtatttggaattagtacagaagagactgccaaagctcttcctaaggcagttgtatgttagttgaaggaccacatacatggtcaagaactatttttcctttacagtatatgtgtcccacacaatatgaaacaaaaagctacataataattacatttgacactttcatggcacccttcaaaattcttaaaggatttaaaaaacactaggtaattctgagatgtgttgtaattaacttgcaaaggaaggtttgtctttataaagcttccattgttccttagcactcatgctgattatgatcaacagtttattcctcatgaagtgtacgatcagtatcattgcctccaattctcccgctttgaattctggagggtgctggtattgcacacacttggtatgggagggagaagaacttccctaaacctcatcagccctgtggatttccaagcctatgtatatcagatgcccttaggaatagtatggtcaccccagctgccatccttctgactatggagcagtgaaaaataagcctctgtagcactcaaacatattttgtcc

SEQ ID NO: 1564342 - DNA, 4001 bp, Homo sapiens
atcctgcggtggcccaggttctggggatgtctgctacccagggtccttcccctcgttccaattgggagatcaggtgaggcttggagaaggaaaatcctgggcgtggaatatgaagcaggtcaagaccactatggctgagggcagggtcgctcctgaactcaggcaattctcaatatcttcaggtaacagagaataaagaactctctaaaaagcactactgggaaggctcagagaaagggccaagtccctctacgagggcaagggctcctgcgcgtccagggccaggtgggcacggagatcttcagtagctggcgatttgggccatgaggacaactgtgtttgtcacctggcctgcagggaggctgagaagctcatgagaaatcggggatgtgtgtgggcaccctgagggacagaagaagggcttgcaagccccagggactattgggaggccgacagccataggccccgaaagctgaattgccctgtttcatcatccaactccactgaggatcccagacccctccctggaaccccaggtctgcctggtgagtgtcagaaggaatccaggggatgaagctgctttccctctatggggctagattacagaggcaaaatctgtggagtcagactcccacaaccccaaaggcagtagagtgcaatgttgaagaccctctggatttcccctccagcggcaaggggaagtggagtgtttccatttccactgggaagtggagtgtctgagcttagctgcagcagccagccttgctgggcacactgggggaaaagccagaggcccagtcccactctgtttcacgcatgcatctctcatcagctgcgtgaggtgggggcaagtcactggcaccctcagacgttctttaccccacctgaaaaccttcctgagtgctccggcccccatccgtctagcctgtgactcctgcttttgccctttaattggcaaaattgctgccccttccggcagtgggtgtgcactggcatggaagggggagagcagtgtgctccaagctgccccagctcctcccgggacttctcaaggcttgaaatccaagtctacactttgtccttatgtgggacctccctggtcaatggaaggaaaagatgttgctaaattttacaaagtggaacggatgcaaaatgcagccgtcatagaaacgaattaagtctaaaagagtgcacataaatattccagtagaatttgcatctctcttttgagtagaaagacctttagtcgatccacgattttatacacaagataagactggtactgaaacttacaggccaacgcatttacctaaaacatttacaggtccagaccacttagctaaaaaccatcctactgagatggcggctggcctgcaatggattactggcattactggtctgatggagaaatgcatttattcttgggctcatagcaaccgacaaacaggaatctcggaaataaactgagcccagagacagagtaggtgggactgggtgtgtgtatgtcgtggagggatcacttacccagtgacaccaaatggctatagttctccagcatcacccgcttgtagaggaccttttgtctgaggtccagaagcttccattctgtctttgtgaagtacacggacacatcctcaaaagatactggcacctaaaataaggcattcttgtggccacaggggaattcaaccccctgggcccctggaggagctgacagaaacaaaatgtggggggcggggggagccctggaaggctcagcaggtggaaagactcgggttgcacgagttgtaagacagaaaaacaggcagcacagccgacagaggcaggaagcccagattgtgcgcctcaggaaaggaaaacgatgctaagggcagcctaagctcagcccagctggagaggcctgggcatgaggaggcagcagacgggggctgccagggggagaggccagggagaggggccaccactcaccttgggtctcgtggtcaggagaatggctgccatcaccagggcgcagaggagctaagggaaatgcaaagagccccctgtgagcccagggcagcctggagcagccaatctgcgacctgcttgaagaccctgcttagtttttcttgtgaaataagcacagcggccacctgtggtgttctcactcctgcagcttcaccaagggcccctcaccatcagaccttctgtatggcttcctggggcggccataataagtactacaaatcggggccttcaagcaagacacatttttctctcccggttctggaggccagaagtccgagatccaggtgctggcaggcccccgctccactgaagcccctttctcgccattttcggcttctggtggtttccagcaatccttcttggcctctgtcttcgtgtggccatcctctctctgtgtgtgtctgtgtcccaatttccctggtctgttgtgaatgccaatcactggattagggcccaccctgctcctacagtatgacctcatcttaccttgattacagctgcaaagtctccctttccaaatgaggtcacagtcacagataccaggagttgagacttcaatatgtctttttggggggcaccattcaaacccaggacactctctgcaattgaggtgccatgcccacttccatactggcgctcgcctgaccaggctttcgagggagcccgttccttctttcctttcttttcttcttttgctgcttttcttagctctctccccatgtggccagcgtcccctgaccccaactttccagccattcctggaagctccactgccaatccccttccctcaggtcgggattcttaaggaaactccaaatgcacatgtacgacctccctttgcaaaatgaagagaagagaggtgagggcagtgcagaatcaagggggacctacagtagtgggggtgctctctgaaggggtgacattcaggcagagagctggaggctgcaagtggcaaagagagtagccagccaacagcacagcacataccctggccctcagatggtcctgcatttggcattcgtggtgctgaaaattagggaacaggcgcagaggatgacaccacgtgggaccctggagggacagcaggaagttgagtttcaggctaagagtagggaacatgaaattgacaaagtggacaaaattcacctcggcctcaggacttctccacagcagttctcaatgccagatggcagtcagtgctgtgggttggatatctgagtctccacacgtcacgttgcaatttgatccccagtgttggaggtggggcctcatgggagttgtttgggtcgtgggggtgagtccctcatgaacagattaatgccctccctcaggggtgagtgagtccttgctctgtgagagctgattgttaaaaagagcctggctcctcccctcatcttgcgtcccctctggccacgtgatctctgcacatgccgtgcgccaccagctccccttagactcccaccctgaatggaagcagcttgaggctctcactagatgcagacgcccagtcttgaactttccagccagcaaaatcctgagctaaagcaaccttttctctttataaattacccagcctctggtattcctgtacagcaacacaggaggactaggacaggggggtaaaagattgttcctttctcagcacacgcccccaccagctacttcctggtttctctgcttctctgcctgggatttccattttgttggtctccaagcttttattgatgttccaatgggtgactacagtttgtttgtgccaacaacgccacaggagagagggagagggcacaggatcccaggagcatagagaaggacagccacagtatttgcctggcatttaaattgctccaaagtcccttatcatccatgatgacctgccagccaacattggtccaagatacataagctgatgttctgaatccctgaaggtggaatggatgctaaaccattaggttaaagacttgagagagaaaggggtatcacatatcaaaatg

SEQ ID NO: 1564343 - DNA, 4001 bp, Homo sapiens
gttcgagaccagcctggggcaatatagcaagaacctgtctcaaaataaaaaataagtaaataacaaggtgcagctcaggtgtgccatcactcttctagttgagggcacccccgctgcctaccccattgagtataagcccctccacctggcaagcaagcccttctgcaatctaacttttctagcctgaattcccaccactcccctacctataccatccacttttgccaaactgtaaatacttactgtttactgaagaagcttcacccttgaaacgtcctttctccacctccacctctacctaacaaagtcctacccatccctcggtaaccttctcaaaatgccacctattaatacttcaggaacccgtccctccctgatcctccaatggcaaccttgcttccctcggaaatcccagtaattagttgtacctctcactttactgcatttcaccttgccccacctacctctaaacatgagacttcttgcagccaccgtctgcattacaagaacctttttaatgtttcttagcatctagcacggtgcatcgctaacagtaggctccgagtttatcaagaaagttgcacagtgtgcaatcaaaaaagtacgttaggggatgaaactccgccttaaaacttcacaaatgaaaaatcgaaataccatgacaggcaaatgcacaataaatatgcaccacactaagttgtcctccaataagaaaataaaaaagtctgcccttattcctcgatttaaaaaaataccaccaacagatcactacttaaatcgtttttcaagaaagttgtttccacataaatgagtacgaatgattcaaaattttattcctccgctctcgtgttgtgcaatttttttccctataggacaaaagaatggcaaaaactttcccatcaatctttatttttcttcctttattcagatactcggggcggcaaagattgttggaaaaacaactgcatcgaaagcaccttagcagccacatatgatttgacttaagcaaaaataacatttcctggggtcccgtatgccctggtaagcccaggtgtccggaatgccacctgccccgactgccctcgggtggctacaggcgcgggggaaggcgcagggccaggggcgctgagggtgaaacggtcccggcgtccgggcggcggcggtggccgcctgcggcagctcagctgaaacgcagcggaaactgcagccagtcacggggctgcgggaggcaaggcaggaaggtggcgctgccgccgagcgcctggagcccgagcgctcatcatggcggcaagggcaatggccgccacggggagcgagcacgcccctccgcgcgcacacgccgccgcgccgggcctccggggcccgtcaccggcgccgctgccgccgccgcccgctctcccaccccccctcacgggctgtagcggaattttctctccagacaccgcctccaagatggcggctccccctcccggcaaccccctctatcgtcccctgcagcaggcgccgagccgccgccatcttgtcccccgtccctccccccccctcaccgatatttacatagcgaaaatcggcccggccggcctgcggccttcacctcacgcctgcagccttcgcctcctcgccaggcctcaccccggcgcggtgccccaggtcggccgcggagccgacccggggcccctcgaccgcctccggcacaaccgggcgaccctcccccaacccccgcccgcttacggagcgcgcctccgccgccgctcggggcagccgggctcctccccgggcctaactgcggcctcctcggggcctgctcggcgccgcgcgccacgccgcccggcctagcgcgggagggcgccttgcgggccgccgaccaggccgagaccaggccgctgtgcgcgcactaggccccgcggccgcggcggcacccgggactcaccggacggacgtgcgggcggccggcgacggtggcgggtgctgcaggccggcctttctctggagcactgggccgggctccggctggtggggcgggcggagggagggaggaggggccgagctcggagctgacaaaaagcggcccagctccccggcacgggcccgccgtcagcacgtcacgtcaccgcccgggagagagacccaggaaaatgcggaagggtagacaggccccctcctccgcccggtgggtcctcctggcaccccgtgtcggcgccgctcccgccccgcgaccggggagcccagtggcctcgctgcggcggggtctccggcggccggagtctccgtgacagcgccccccttctttccacctcctccgcgctcccgcccgccgccgccacacacgcgccgctgccgccgccgcctcggccgtaaagcccgcgcggggccgcggtcggccgaccccgcggagaggcaggcggcccggccgccccccaccatgtcccgtgggccgcggccgccccccgggggcctccctggagacctaccgcctctcgcgccggtcctggccgaggctccagctcgagttgtttgcaggccctcagacccccgcccgcagtaaatgtgttttcttcatccccgtggctggggaggaagataaatttagcaacccccgccgtcccctgccttcgcttaaaaaaaaaaaatctttgaaataaaatgaaaacgggcttgccagtctaaatgggtgtgcgggaaggggggtggagtggggggagaagggttatccctagagcacctaccaggccgtctactttttaaaaataagcagtcagagccaaactgattttattagtttgtacgggggagggagatgagcaaagttgcattttgaaacgtttcgcacgttgcaaagaacaggaattttctgtgtattttcctatgtacccgtgtttcagagcttgggagcctgtgaaatgtaagactggtgtcatcgtttcataaatcatgaattttccacattccttaatagagaggagcccaattgggtatggatttttttttttttaaacacactgcttaaacaagccttttgaagtttcaaaagacttgggagagaaggggaaaatgattaaacagcacttaccaacttcaaaaatgtgtatttcgcactttacttagtttaaatgtttatgctatctttccatgctgaacttggaacccaaactctgttttaaagttactagggaaaagttaaatagtggagtctttacattaatctggaatctggcatgctatcctttaacacagcactaaatgttaaaggcatttttaaacaataagaaacacaaaaattataaagcaaatagtatactggtgtgaaatctctttaaatacagaggccacgtattttagttgcctgacataactctttaaaactcccagaatgcaatttgtcccttccctcagacatctctcaatcacaaatgctttcaaaaaggaaaaacaaaagtagagtaagaagaaatctctgagcatgcactggatgataattttcctctcggggctttagtctgaatttttccaagcgattaaatttcctttcaaaaatagtaacagcatgtattcattgtttataaaaattacatcaggctgtgatagactttcacagaaagacatttcacagaaaggtaaatgaaactaagcaatgttgtttcaataaaaaaaaatgagaaatagcttgtgtgcccacattaatatttcttgcactcccagactggagtgcaatggcgtgatcttggctcactgaacctctgccttcggggttcaagcgattctcctgcctcagcctcccgagtagctgggattacaggcacttgccaccacgcctggctaatttttctatttttttagtagagatggggtttcaccatgttggccaggctggtctccaactcctgacctcaggtaatccacccgcctcggcctcccaaagtgctgggattacaggcgtgagccaccgtgcccggccgcccacattaatatttcaaaacattgataatcagcgtttaagtact

SEQ ID NO: 1564344 - DNA, 4001 bp, Homo sapiens
caggagttcgagaccagcctggggcaatatagcaagaacctgtctcaaaataaaaaataagtaaataacaaggtgcagctcaggtgtgccatcactcttctagttgagggcacccccgctgcctaccccattgagtataagcccctccacctggcaagcaagcccttctgcaatctaacttttctagcctgaattcccaccactcccctacctataccatccacttttgccaaactgtaaatacttactgtttactgaagaagcttcacccttgaaacgtcctttctccacctccacctctacctaacaaagtcctacccatccctcggtaaccttctcaaaatgccacctattaatacttcaggaacccgtccctccctgatcctccaatggcaaccttgcttccctcggaaatcccagtaattagttgtacctctcactttactgcatttcaccttgccccacctacctctaaacatgagacttcttgcagccaccgtctgcattacaagaacctttttaatgtttcttagcatctagcacggtgcatcgctaacagtaggctccgagtttatcaagaaagttgcacagtgtgcaatcaaaaaagtacgttaggggatgaaactccgccttaaaacttcacaaatgaaaaatcgaaataccatgacaggcaaatgcacaataaatatgcaccacactaagttgtcctccaataagaaaataaaaaagtctgcccttattcctcgatttaaaaaaataccaccaacagatcactacttaaatcgtttttcaagaaagttgtttccacataaatgagtacgaatgattcaaaattttattcctccgctctcgtgttgtgcaatttttttccctataggacaaaagaatggcaaaaactttcccatcaatctttatttttcttcctttattcagatactcggggcggcaaagattgttggaaaaacaactgcatcgaaagcaccttagcagccacatatgatttgacttaagcaaaaataacatttcctggggtcccgtatgccctggtaagcccaggtgtccggaatgccacctgccccgactgccctcgggtggctacaggcgcgggggaaggcgcagggccaggggcgctgagggtgaaacggtcccggcgtccgggcggcggcggtggccgcctgcggcagctcagctgaaacgcagcggaaactgcagccagtcacggggctgcgggaggcaaggcaggaaggtggcgctgccgccgagcgcctggagcccgagcgctcatcatggcggcaagggcaatggccgccacggggagcgagcacgcccctccgcgcgcacacgccgccgcgccgggcctccggggcccgtcaccggcgccgctgccgccgccgcccgctctcccaccccccctcacgggctgtagcggaattttctctccagacaccgcctccaagatggcggctccccctcccggcaaccccctctatcgtcccctgcagcaggcgccgagccgccgccatcttgtcccccgtccctccccccccctcaccgatatttacatagcgaaaatcggcccggccggcctgcggccttcacctcacgcctgcagccttcgcctcctcgccaggcctcaccccggcgcggtgccccaggtcggccgcggagccgacccggggcccctcgaccgcctccggcacaaccgggcgaccctcccccaacccccgcccgcttacggagcgcgcctccgccgccgctcggggcagccgggctcctccccgggcctaactgcggcctcctcggggcctgctcggcgccgcgcgccacgccgcccggcctagcgcgggagggcgccttgcgggccgccgaccaggccgagaccaggccgctgtgcgcgcactaggccccgcggccgcggcggcacccgggactcaccggacggacgtgcgggcggccggcgacggtggcgggtgctgcaggccggcctttctctggagcactgggccgggctccggctggtggggcgggcggagggagggaggaggggccgagctcggagctgacaaaaagcggcccagctccccggcacgggcccgccgtcagcacgtcacgtcaccgcccgggagagagacccaggaaaatgcggaagggtagacaggccccctcctccgcccggtgggtcctcctggcaccccgtgtcggcgccgctcccgccccgcgaccggggagcccagtggcctcgctgcggcggggtctccggcggccggagtctccgtgacagcgccccccttctttccacctcctccgcgctcccgcccgccgccgccacacacgcgccgctgccgccgccgcctcggccgtaaagcccgcgcggggccgcggtcggccgaccccgcggagaggcaggcggcccggccgccccccaccatgtcccgtgggccgcggccgccccccgggggcctccctggagacctaccgcctctcgcgccggtcctggccgaggctccagctcgagttgtttgcaggccctcagacccccgcccgcagtaaatgtgttttcttcatccccgtggctggggaggaagataaatttagcaacccccgccgtcccctgccttcgcttaaaaaaaaaaaatctttgaaataaaatgaaaacgggcttgccagtctaaatgggtgtgcgggaaggggggtggagtggggggagaagggttatccctagagcacctaccaggccgtctactttttaaaaataagcagtcagagccaaactgattttattagtttgtacgggggagggagatgagcaaagttgcattttgaaacgtttcgcacgttgcaaagaacaggaattttctgtgtattttcctatgtacccgtgtttcagagcttgggagcctgtgaaatgtaagactggtgtcatcgtttcataaatcatgaattttccacattccttaatagagaggagcccaattgggtatggatttttttttttttaaacacactgcttaaacaagccttttgaagtttcaaaagacttgggagagaaggggaaaatgattaaacagcacttaccaacttcaaaaatgtgtatttcgcactttacttagtttaaatgtttatgctatctttccatgctgaacttggaacccaaactctgttttaaagttactagggaaaagttaaatagtggagtctttacattaatctggaatctggcatgctatcctttaacacagcactaaatgttaaaggcatttttaaacaataagaaacacaaaaattataaagcaaatagtatactggtgtgaaatctctttaaatacagaggccacgtattttagttgcctgacataactctttaaaactcccagaatgcaatttgtcccttccctcagacatctctcaatcacaaatgctttcaaaaaggaaaaacaaaagtagagtaagaagaaatctctgagcatgcactggatgataattttcctctcggggctttagtctgaatttttccaagcgattaaatttcctttcaaaaatagtaacagcatgtattcattgtttataaaaattacatcaggctgtgatagactttcacagaaagacatttcacagaaaggtaaatgaaactaagcaatgttgtttcaataaaaaaaaatgagaaatagcttgtgtgcccacattaatatttcttgcactcccagactggagtgcaatggcgtgatcttggctcactgaacctctgccttcggggttcaagcgattctcctgcctcagcctcccgagtagctgggattacaggcacttgccaccacgcctggctaatttttctatttttttagtagagatggggtttcaccatgttggccaggctggtctccaactcctgacctcaggtaatccacccgcctcggcctcccaaagtgctgggattacaggcgtgagccaccgtgcccggccgcccacattaatatttcaaaacattgataatcagcgtttaa

SEQ ID NO: 1564345 - DNA, 4001 bp, Homo sapiens
tgtgccatcactcttctagttgagggcacccccgctgcctaccccattgagtataagcccctccacctggcaagcaagcccttctgcaatctaacttttctagcctgaattcccaccactcccctacctataccatccacttttgccaaactgtaaatacttactgtttactgaagaagcttcacccttgaaacgtcctttctccacctccacctctacctaacaaagtcctacccatccctcggtaaccttctcaaaatgccacctattaatacttcaggaacccgtccctccctgatcctccaatggcaaccttgcttccctcggaaatcccagtaattagttgtacctctcactttactgcatttcaccttgccccacctacctctaaacatgagacttcttgcagccaccgtctgcattacaagaacctttttaatgtttcttagcatctagcacggtgcatcgctaacagtaggctccgagtttatcaagaaagttgcacagtgtgcaatcaaaaaagtacgttaggggatgaaactccgccttaaaacttcacaaatgaaaaatcgaaataccatgacaggcaaatgcacaataaatatgcaccacactaagttgtcctccaataagaaaataaaaaagtctgcccttattcctcgatttaaaaaaataccaccaacagatcactacttaaatcgtttttcaagaaagttgtttccacataaatgagtacgaatgattcaaaattttattcctccgctctcgtgttgtgcaatttttttccctataggacaaaagaatggcaaaaactttcccatcaatctttatttttcttcctttattcagatactcggggcggcaaagattgttggaaaaacaactgcatcgaaagcaccttagcagccacatatgatttgacttaagcaaaaataacatttcctggggtcccgtatgccctggtaagcccaggtgtccggaatgccacctgccccgactgccctcgggtggctacaggcgcgggggaaggcgcagggccaggggcgctgagggtgaaacggtcccggcgtccgggcggcggcggtggccgcctgcggcagctcagctgaaacgcagcggaaactgcagccagtcacggggctgcgggaggcaaggcaggaaggtggcgctgccgccgagcgcctggagcccgagcgctcatcatggcggcaagggcaatggccgccacggggagcgagcacgcccctccgcgcgcacacgccgccgcgccgggcctccggggcccgtcaccggcgccgctgccgccgccgcccgctctcccaccccccctcacgggctgtagcggaattttctctccagacaccgcctccaagatggcggctccccctcccggcaaccccctctatcgtcccctgcagcaggcgccgagccgccgccatcttgtcccccgtccctccccccccctcaccgatatttacatagcgaaaatcggcccggccggcctgcggccttcacctcacgcctgcagccttcgcctcctcgccaggcctcaccccggcgcggtgccccaggtcggccgcggagccgacccggggcccctcgaccgcctccggcacaaccgggcgaccctcccccaacccccgcccgcttacggagcgcgcctccgccgccgctcggggcagccgggctcctccccgggcctaactgcggcctcctcggggcctgctcggcgccgcgcgccacgccgcccggcctagcgcgggagggcgccttgcgggccgccgaccaggccgagaccaggccgctgtgcgcgcactaggccccgcggccgcggcggcacccgggactcaccggacggacgtgcgggcggccggcgacggtggcgggtgctgcaggccggcctttctctggagcactgggccgggctccggctggtggggcgggcggagggagggaggaggggccgagctcggagctgacaaaaagcggcccagctccccggcacgggcccgccgtcagcacgtcacgtcaccgcccgggagagagacccaggaaaatgcggaagggtagacaggccccctcctccgcccggtgggtcctcctggcaccccgtgtcggcgccgctcccgccccgcgaccggggagcccagtggcctcgctgcggcggggtctccggcggccggagtctccgtgacagcgccccccttctttccacctcctccgcgctcccgcccgccgccgccacacacgcgccgctgccgccgccgcctcggccgtaaagcccgcgcggggccgcggtcggccgaccccgcggagaggcaggcggcccggccgccccccaccatgtcccgtgggccgcggccgccccccgggggcctccctggagacctaccgcctctcgcgccggtcctggccgaggctccagctcgagttgtttgcaggccctcagacccccgcccgcagtaaatgtgttttcttcatccccgtggctggggaggaagataaatttagcaacccccgccgtcccctgccttcgcttaaaaaaaaaaaatctttgaaataaaatgaaaacgggcttgccagtctaaatgggtgtgcgggaaggggggtggagtggggggagaagggttatccctagagcacctaccaggccgtctactttttaaaaataagcagtcagagccaaactgattttattagtttgtacgggggagggagatgagcaaagttgcattttgaaacgtttcgcacgttgcaaagaacaggaattttctgtgtattttcctatgtacccgtgtttcagagcttgggagcctgtgaaatgtaagactggtgtcatcgtttcataaatcatgaattttccacattccttaatagagaggagcccaattgggtatggatttttttttttttaaacacactgcttaaacaagccttttgaagtttcaaaagacttgggagagaaggggaaaatgattaaacagcacttaccaacttcaaaaatgtgtatttcgcactttacttagtttaaatgtttatgctatctttccatgctgaacttggaacccaaactctgttttaaagttactagggaaaagttaaatagtggagtctttacattaatctggaatctggcatgctatcctttaacacagcactaaatgttaaaggcatttttaaacaataagaaacacaaaaattataaagcaaatagtatactggtgtgaaatctctttaaatacagaggccacgtattttagttgcctgacataactctttaaaactcccagaatgcaatttgtcccttccctcagacatctctcaatcacaaatgctttcaaaaaggaaaaacaaaagtagagtaagaagaaatctctgagcatgcactggatgataattttcctctcggggctttagtctgaatttttccaagcgattaaatttcctttcaaaaatagtaacagcatgtattcattgtttataaaaattacatcaggctgtgatagactttcacagaaagacatttcacagaaaggtaaatgaaactaagcaatgttgtttcaataaaaaaaaatgagaaatagcttgtgtgcccacattaatatttcttgcactcccagactggagtgcaatggcgtgatcttggctcactgaacctctgccttcggggttcaagcgattctcctgcctcagcctcccgagtagctgggattacaggcacttgccaccacgcctggctaatttttctatttttttagtagagatggggtttcaccatgttggccaggctggtctccaactcctgacctcaggtaatccacccgcctcggcctcccaaagtgctgggattacaggcgtgagccaccgtgcccggccgcccacattaatatttcaaaacattgataatcagcgtttaagtactttccaagggcctcagtgtgatgctacggtatggcaagaatggaggccaggttccctggttcagtcctgtaatcacagca

SEQ ID NO: 1564346 - DNA, 4001 bp, Homo sapiens
cttgagcccaggagttcgagaccagcctggggcaatatagcaagaacctgtctcaaaataaaaaataagtaaataacaaggtgcagctcaggtgtgccatcactcttctagttgagggcacccccgctgcctaccccattgagtataagcccctccacctggcaagcaagcccttctgcaatctaacttttctagcctgaattcccaccactcccctacctataccatccacttttgccaaactgtaaatacttactgtttactgaagaagcttcacccttgaaacgtcctttctccacctccacctctacctaacaaagtcctacccatccctcggtaaccttctcaaaatgccacctattaatacttcaggaacccgtccctccctgatcctccaatggcaaccttgcttccctcggaaatcccagtaattagttgtacctctcactttactgcatttcaccttgccccacctacctctaaacatgagacttcttgcagccaccgtctgcattacaagaacctttttaatgtttcttagcatctagcacggtgcatcgctaacagtaggctccgagtttatcaagaaagttgcacagtgtgcaatcaaaaaagtacgttaggggatgaaactccgccttaaaacttcacaaatgaaaaatcgaaataccatgacaggcaaatgcacaataaatatgcaccacactaagttgtcctccaataagaaaataaaaaagtctgcccttattcctcgatttaaaaaaataccaccaacagatcactacttaaatcgtttttcaagaaagttgtttccacataaatgagtacgaatgattcaaaattttattcctccgctctcgtgttgtgcaatttttttccctataggacaaaagaatggcaaaaactttcccatcaatctttatttttcttcctttattcagatactcggggcggcaaagattgttggaaaaacaactgcatcgaaagcaccttagcagccacatatgatttgacttaagcaaaaataacatttcctggggtcccgtatgccctggtaagcccaggtgtccggaatgccacctgccccgactgccctcgggtggctacaggcgcgggggaaggcgcagggccaggggcgctgagggtgaaacggtcccggcgtccgggcggcggcggtggccgcctgcggcagctcagctgaaacgcagcggaaactgcagccagtcacggggctgcgggaggcaaggcaggaaggtggcgctgccgccgagcgcctggagcccgagcgctcatcatggcggcaagggcaatggccgccacggggagcgagcacgcccctccgcgcgcacacgccgccgcgccgggcctccggggcccgtcaccggcgccgctgccgccgccgcccgctctcccaccccccctcacgggctgtagcggaattttctctccagacaccgcctccaagatggcggctccccctcccggcaaccccctctatcgtcccctgcagcaggcgccgagccgccgccatcttgtcccccgtccctccccccccctcaccgatatttacatagcgaaaatcggcccggccggcctgcggccttcacctcacgcctgcagccttcgcctcctcgccaggcctcaccccggcgcggtgccccaggtcggccgcggagccgacccggggcccctcgaccgcctccggcacaaccgggcgaccctcccccaacccccgcccgcttacggagcgcgcctccgccgccgctcggggcagccgggctcctccccgggcctaactgcggcctcctcggggcctgctcggcgccgcgcgccacgccgcccggcctagcgcgggagggcgccttgcgggccgccgaccaggccgagaccaggccgctgtgcgcgcactaggccccgcggccgcggcggcacccgggactcaccggacggacgtgcgggcggccggcgacggtggcgggtgctgcaggccggcctttctctggagcactgggccgggctccggctggtggggcgggcggagggagggaggaggggccgagctcggagctgacaaaaagcggcccagctccccggcacgggcccgccgtcagcacgtcacgtcaccgcccgggagagagacccaggaaaatgcggaagggtagacaggccccctcctccgcccggtgggtcctcctggcaccccgtgtcggcgccgctcccgccccgcgaccggggagcccagtggcctcgctgcggcggggtctccggcggccggagtctccgtgacagcgccccccttctttccacctcctccgcgctcccgcccgccgccgccacacacgcgccgctgccgccgccgcctcggccgtaaagcccgcgcggggccgcggtcggccgaccccgcggagaggcaggcggcccggccgccccccaccatgtcccgtgggccgcggccgccccccgggggcctccctggagacctaccgcctctcgcgccggtcctggccgaggctccagctcgagttgtttgcaggccctcagacccccgcccgcagtaaatgtgttttcttcatccccgtggctggggaggaagataaatttagcaacccccgccgtcccctgccttcgcttaaaaaaaaaaaatctttgaaataaaatgaaaacgggcttgccagtctaaatgggtgtgcgggaaggggggtggagtggggggagaagggttatccctagagcacctaccaggccgtctactttttaaaaataagcagtcagagccaaactgattttattagtttgtacgggggagggagatgagcaaagttgcattttgaaacgtttcgcacgttgcaaagaacaggaattttctgtgtattttcctatgtacccgtgtttcagagcttgggagcctgtgaaatgtaagactggtgtcatcgtttcataaatcatgaattttccacattccttaatagagaggagcccaattgggtatggatttttttttttttaaacacactgcttaaacaagccttttgaagtttcaaaagacttgggagagaaggggaaaatgattaaacagcacttaccaacttcaaaaatgtgtatttcgcactttacttagtttaaatgtttatgctatctttccatgctgaacttggaacccaaactctgttttaaagttactagggaaaagttaaatagtggagtctttacattaatctggaatctggcatgctatcctttaacacagcactaaatgttaaaggcatttttaaacaataagaaacacaaaaattataaagcaaatagtatactggtgtgaaatctctttaaatacagaggccacgtattttagttgcctgacataactctttaaaactcccagaatgcaatttgtcccttccctcagacatctctcaatcacaaatgctttcaaaaaggaaaaacaaaagtagagtaagaagaaatctctgagcatgcactggatgataattttcctctcggggctttagtctgaatttttccaagcgattaaatttcctttcaaaaatagtaacagcatgtattcattgtttataaaaattacatcaggctgtgatagactttcacagaaagacatttcacagaaaggtaaatgaaactaagcaatgttgtttcaataaaaaaaaatgagaaatagcttgtgtgcccacattaatatttcttgcactcccagactggagtgcaatggcgtgatcttggctcactgaacctctgccttcggggttcaagcgattctcctgcctcagcctcccgagtagctgggattacaggcacttgccaccacgcctggctaatttttctatttttttagtagagatggggtttcaccatgttggccaggctggtctccaactcctgacctcaggtaatccacccgcctcggcctcccaaagtgctgggattacaggcgtgagccaccgtgcccggccgcccacattaatatttcaaaacattgataatca

SEQ ID NO: 1564347 - DNA, 4001 bp, Homo sapiens
ccaatcaagtgtaaaaaaaagcggaagtaaccgaaagttagttttcattagcatttgtatggttgccttccacgaatgtgtgccgagagctaagtcgcttgtaagcaatatgctctcaacacattcggagtcccttcacggtaacccagaaagggagacaaaaagaggcggcgccagtttgttcctgggcgcgagaaggtcccaattagttcctgagaccgcagagcagtctgcccgggaagttagaactcggcaaaggcgccacgggacggggagggctaggggtggatggtcactgacagcgcttctttttcgagcggccgttgcggggcgtcgcccctttccctggccgccacctctctccctcgcgctctaagtccgctgcgtgacggggtatcgccagtggaacccacgcccgcctgcttttttcccttacctgtgtgggtcctcttgtggatcttgaggttctcagaacgggcaaagatcttcccgcagcccgggaaggggcatgggaagggcttctcgcccgtgtgcactcggatgtggttgaccagtttgtacttcgccttgaaagacttgccctcccgggggcactcctcccagtagcagacgtggttgttctgctccgggccccccacatgctccatggtgacatgtgtcaccagctcatgcatggtgctgaaggtccggtcgcagctcttcttgggccggctcagctgagcctcgtcgatccacttgcacgacagctcctgcttgataggctgccgcatataacggaagaaggcgccgggcccgtggtgggccgccacgttcactcccatgttcatgttcatggggctgtagttaggaaactgagcgccggccgcgtaggggtccgtgcgcgggctggccactgggcggtatgggtcagcacggccgaacagctccccacgcagccccaggtggacctggttgttgtccacgtgccctgtgggcgacgggtgcccagcgccctgctcatgcagcccgggaaacagcaagtagctagggggctcggggatgccagctggagcatgcaggctgctcgccgagccggcgaagagcccgtgctgcccgccacccgaggccgcctcactgagcccggagctgcgctggcggaacagaaactcgcgcgttgagttgaaggcggcagaggcagcgccaccgtagctgggcacctggctggtgtggtgatgatggtgatggtggtggtgatggtggcccagggcgttggcgtagcccgaaccctgcggcgtgaaagccgagctctggcctgaagatagatcgtgcgccgcggcagggctcagcttgaaggcagcggcggcggcggcggcggcggcggcgtgggttgagtccccgaagggattcagccccatgcctgccggctcacggttgggcatctcgtggtggcgcggcgcgccgaagctgcccactcccagcccagggaactgcgggcctccgtccaggagcatcgtcatgggtgggacgttctgggcacaggcgatccggccgaagtgagagagggtaccggcgaaggaggagatctccgaagtgccgtagtcggaaaggggtggcggcggttggacactgcggggagacccccaaggcgctaccaggggctgcaactttccgtcactgcaagagtctcctgcagagggataggagggaggaggggaagaaagagcagggagggggtgttggcggggggaggaggagggaggagaagggaggagaaaagactcggactagatctggtttaacaaactaacaggcgcgcacaaagaaaaataagcaaaatagtaagtggagggcggagtttgccaatcctgtcccgggcacccctcctctccccgagtgcacagaaccgcggggccaggaggctccctgggtaccggcctccgggctgggctgcgccaagtggcggagccggctagcggccgggcaggcgggcagcgggcagtaggcaggctcgttactcgccgcttgccgctcgccgcgcgagtcccagcctcttcgcctccagagtaatgtccttggactgataaagtcaatcactcactcctcgcacataaaccgagcgggaggccgcgaggcgcgcgccaatggggagccagctggcccgcggtcacctgacctccggccggactgcccattggccgccgcgaggctgattggcagcgcggagcggagaacatggcagccgcggccgagcgacccccgctgattgggcagccgccgggtgcctggcaggtgaggcggcggctgccgggcggccgcgagtgggctccaccgggcttgagtggctgcggggaactggggccaggctccagccggcaaacggcgggacgccgccgggactctcgcgggctttcccccacccctcgcgggctctttgccccgcgaggatcggtcccactgctgcgccgatggaggagacgcggcgctcaacgtccagtcctgcttgggcccccgctgcctcaccaccttgagaacatgtcccctctgtagctgcagggcgcagatcctggggagagcgcagcagtttcgcgctcccggtccagccgctgcgtccacctccaatcactgcgagttctgatggcctcgaggccgggacccaggccgggatagttcgccgtttgtgcccccaacctgtcggcagctgtccgagacccaaaggagaagaaacgattacaattagagctgatctccgttacttccgtctgcgccaagcgttgaccctttagtttgtgagcagcggccgtactcgccgctgcccacttcccgaattacacaccgggcacgacacagcaaacatatacaacgcagtaaacccaagcacacagtaggaaacaagcacacaacacagtaaacacaagcgcaccacaggaaacaaacacgacatatgaaatacgcacacaacacaacaaagtaagcacatacaacacagtaacataaactacgcacaacacagcaaacacagaaacacaactaaacacaacagagcaaatacacataacagcgagcatacccacaaatacaaaacatgcaaagaacacttttagccagtgtacgcaaaacatgcacacaacacactaaacacataataaacacactagacacacacagtatcagggtggtttccaaatcactaggctaatcagctttgaattctcaacattttcaaatgcaaaagtcgtgttgggggttgctgatgctgaatggggactgtgacatggaattttctttcctctgaacagccaaggctttactctcttctactcctacccggagaaggtaaagcatgtagtgacctcagggactgcttaccccttaaggatttacttccaggggtgtgtgtgaaagtcctctcgccttctgtctgttgcaaggtctttctgacataatgaccaggttcagacaaggctataaattcactcatttttgtgtcctgcaaggcatttgcaaagaatgcagaagagagtggaaagaaaaggcagagagaaagatggctgtgattgtcacatccctagctgggccaagccccaaagtctgcgccttgaggcagcctcacagcctggccgccatctctctgtaggaaatagaacatctgatcaagttcagaggcgccaggagagaccgccttaagcagcgctttataactgcagcctttcacttcctgctccccagtctgcctggcccagccaacacttcaccttctttcttagccagtttgctgggagaacaccctaccggtagcacatcttaccgtattcaccccctcccatcaaactcgccccaattctctctccacatccagagctctctccccaggttggaaggtgagttcactgctgacttaaattattgcgtctgccgaacataggctctccaagaatggtttcagtgcctctcagcagagggtttctttgggggggtaggggggcgctggtgtgttcagagaacaaatatgcttaaatcatgca

SEQ ID NO: 1564348 - DNA, 4001 bp, Homo sapiens
tttatgaaattagctctctgaaagcctttaatatttgcatatattaaaagatactgcaaacaaaccagttgcatctccaggcaaaaagccatatttttttttccacgagatactggtcttaaaccttactgtgaacagacgatgagagccaaattgaattgtgatcttgatgcctataaaactgctcttgcctactagctggttatggacataaaggttgatataaatttttaaaatccagatttcatgtttccatccattaaggctgattgaagacactaaatggagtctttcaaaggttgactttagtaagagagttgataaataaaacattacagtgtacttctaacttccatatttaataagtggcatttatgtaatgtgcctatacaaatattgtaagggattttttttctactttgccattcctccaaagtgaaaggtgtgaaaggttatggaatagcacacagggatatatcatttaagaatgtgaagaagagattatttttatgcgataattttaatggagtatcttcctaagaaaaaggaacttactttcctctattttggtgtccacaatctttcactttggaggcaagttagcaacataaggtaacacagcaaattctggaaattaattacgaaatttacatggcaaaatgctttactgggatgctctgcagtggaatggtctccaccagctaagaacatttcccaaactgctttaaaacacatttcaatggcaaattttacagtttgctattagtaggctgtttacaagtatacagaactttgtgtgaataccgcttatattgatacagtcaagaaatatctttttatgttaggagtaatatgtgttggtaggtacaacagaacttattaaagccaaaccaccttaaagatggacctgtaaatcttgctttactaggtcacatcctcaaatagccaaagaaaactctccaaagtgattcctgaaatctgtacttctgccacactctcttcctctctttccctagtagagtcccctccaccagaccttaccttcctaaaatccgacagatcctactttaaagctcaagtatacacttgtaacctgcccaaatttctaacgccatctctctgtaaatattctacttctagtttctacactgcaggacgttgaacaccaaagggggtttactcccccttatttcttcggtatttcctcttttatctccgcccctttctccatcggtccccgttcccttatccttgaccctcttggcccacagcacttctatcttgcctcctctctcttccaaatcacacctcagcttcctacagcacactaaggtgtcctggctgggagagaaattatgtggtatttttttttcccttcaaactcctgcctcatgagtacctgcaattcttttgcctgggggcccccatcctttacaggtgggagaggtagggaaggccctctctgcttcagtccatcttgcacactcggggctaatacggcggggcggggcggggcgagcttggcctttactgcgccacggcaggtgggggtggggcagtggcgaaccgcgcccagcccaatctcggacgggctgaagagaggcagcgaaggagatggggccgcccccgcaccccgggacgggaactcaccttctctgaggcaagggcgggtgtctactttaaaactactgccccccctccccgccgccgccatagtggagccgccaaagccgccgccgccgccgtcgccacagccaccggcaggcgggcaggcaggggcggaggtggcggaggaggcaggaacaattactgccgccgccgccgccgccgccgccgctgccgcgcaggcggtgtaggaggaggaggaggcggcagagacggtagcttcctgaggggaagactccgccgccagcggggtgactgtgctcggcgccgccgccatcgcagcgaggcgcgcggacaattgcacttgcgtctcgattccgttaagctcctttagccccgccttccgttagccccaccccctttgttcctctttttaacgcttcagctcgagcctcgttctcgctcctcagtccaccaatcggagagctttaagcccgccggccgtttccccctcccccactgccttgcgtcaccccacctccctttggaggggaagcaacgacggccaagggcaaagggcaaaaagcgcgggatgtgaaagcacgtgggcctcgcacagtgaggcttctttggagatctaatctaaaaccaatttaagaggaaaaaatgtctggaaactattgatctcacctccaaaatatctctgaaatatatcttcacctggctttttttttctctttctttttttttttttttttttttttttttgagggagagtctcgccctgtagcccaggctggagtgcagtggtgcgatctcactcactgctacctctgcctcccgggtcctggttcaagcaattttgcctcagtgtcccgagtagctgggattacaggcatgtgccaccatgcccagctaatttttgtatttttagtagagatggggtttcactatgttagccaggctagtcttgaattcctgacctcatgatccacctgtctcggcctcccaaagtgctgggattacaggcgtgagccaccacgcccggcccctggctttcttaaagcacttagtacagagaatagaacagaagctttcattctgacacattgtttccgtggcctcttaaaggactgcctatctatcgatctgcccatcttaattacaataacttcctgtgaattcagcacccaatagaagtactagaatattactgatcacttaaatctcatcttgtccccccaacctctcctctcaaagagaccaatatcctgatttatatttattatttctttgcattttaacatatattcttatcacatagatatgtgcctaaatagtgttgtttagttttgattgttttcaattttcacaaatatttatatctttttctaggtagcattctgggacttgtttctgcttttttttccctcaagcaatactcttacctcagcctctggagtagctgggattacaggaaggagccaccatgcttggcctgggacttgtttctttcacgtaacattctaagattcatctatgttgttgcttgtagctgtagttatgcactgtcgatgctgtaggatatctcacccttttccttattgatgggcacacctcctggtgcctttgtgcaagtctcccttaagtattctctcctttccagtcttagatccgttgctgtatttcaagtcctcatgatatatggtcagacgtatggcatccaccccactggtcttctttcctctgatctcaatccctccaatctattaccaagttgttgccagtcgtcactggctgtccagtgcttattggacaaagtcaaaagacacagttttgccctgttagtctccccattcacctctttgacctcatctctttccactgtccccatctctcccctctgcttttactttgatttagcaatccctaaatcttcttagattcctgtgaagaccgccaggcgcggtggttcacgcctgtaatcccagcactttgggaggccgaggcgggtggatcacgaggtcaggagatcgagaccatcctggctaacacaatgaaaccctgtctctactaaaaatacaaaaaaattagctgggcatggtggggggcgcctgtagtcccagctactcaggaggctgaggcaggagaatggcttgaacctgggaggcagagcttgcagtaagtcgagattgtgccactgcactccagcctgggcgacaaagcgagactccatctcaaaaaaaaaaaaagattcctgtgaagaccatgttatttcatgatgtaatgttactatatatgttcttctctcttcctgaaacaccttttcccccacattaggcacttgcctaatgaaatcctatacacccttagaaacccagacaacacatcacctc

SEQ ID NO: 1564349 - DNA, 4001 bp, Homo sapiens
ggggcttctctggcagggtcaatgggtcaaatggactggggaaatcactggggtccatgagtatggctggatatgtactgcagattaggagtagaagagggggcagtagaggtggtcttagcctgaattccttcttatataggctctgagacacaccccatcatccacttggatttctcatgagcagcccccaccaccacaatctacaagcatttccgaaggctttagtcctaatgaccactccccccaatacagcgcccccagtggggagaggcgttccccgccctggccccgtgcccacactggccaggcagtcggtcgttctacccgcccacccccctactcgactgcaactcccattcccttccccccttaccttttaccccccgcaactcaggctgaacgcccccttagagtctcctaaggccgtcgccaccaggagcctttcccgcccccgcgatctcagtttctattccctccccactctgcaggagccccccagctccccagtctttacccaccctgtctggccccaccccccctccccgcgttgctaggtcctccctcggcccttcccccgcccccacaaactgcccttcgcaaccccttccccccagttacctttcaggtcgcccacttcctcagccccgtccccctttcccattgctcctccagtcctcccttctcctgttgcccacccccaacctcaggcatttacaggaagacattttggagctacgatctctccttagacccccccaccaccgcctcccggctactgcaagatcccgcttgcaggttcggttcggcttgagcaggcccgacccctacctgcggcagggttagtgcaaaggctacaagcctagaactgcagacagcgacggccccgcgctccttctctacctccctccctagcagccgggacaggggtcgcggcccctttaaatggcagcgccgctcgcagcgcccagcgctctgcaccaggcgggcgggcggtgccagcaaccaaccccattggctggctcgaggagggggctcgcgagacagcgccggcccccggcgcgagactcccagtccagtggccgcctggaaattgcggagtggaatgcagccactagagacggcgcctgagcccccgcccggggccccgttagttgagaaggaaaagatagcctctggagctttgaagccggccccccgggaaaggcggcgtcccctttccacccaagggccgagtgcgctcacccacaaaaaacacagatctacgcacctgctccccttacctggctcaagagtctggcccccgtcacaccctgctcgccctacctcctggagcccactctacccgtgatcccctcctctcattcaaatggttcccggtcccctccccctccccgtgtctctcttagcttcccactcgtgttcaccccctcggcgtccgcccccctcaatagtccctacctacgccatgcagcaggcgcctgccaagattaccctcccccatccccacctctccgggtcccgccccctgggcgactgttggggtagtgagtgacagcggaggacggggggaggcagggacccagccctcacgtgcccctccttcccttgtctgcagccacggggcccccaaaacagtctgagagtcagagttatggggtatctgaagcttgatccccagccacacaggtcgggttaaatggctctggctcagtggcaacgcctgtgcagtaaccgttactgcttgatgacccccaaaccaggtcctgcaaagctaccccctactctctcaacagtcttagggtaagttctgggatcttctccctgagtcttcctgcaggagctccctgtattatctatggagttttcctccctcaccagggctgatctctctctctctctctctctctctctctctctctctctctctctctctctctctctctctctctgtatctctctctctctttctcctccagccccctttctgtccttgtctgtctctctcttctcgctctctctctctctctccccctatctctttttgtctccttctctgcctctctgcttctcgtgcgcacgagcacgcaggcgcgctacacgctcccccctcctggatggtccttagcatgtgggtgtggctgaggttaggctagagaagtggagtaggggtaggtggcactagcgttaagcctactgcctttaaaaaattgtgccagcatccattctcagtccgcattatattaatagttagagcactttacaatccccgctccccacttcccaccacagcccctaagggctgagagcatttagtagccgaactactagaggaggctcaggctggaaggaagtctccttaggaacaggaaggtttggtatccagtgcctattctagcctgcctcgttgacttctggcctctcctcctggccacacaaagcctctcctgctcttgtagtcctcgggagtttaccctcccttttctcattccttttcccagaaaccttatccttgctagctccccacatggccttgaggttatctttgctccctcctacatacagagataaaagccagagtttcttacttttagatttcccaaatccagctttctctttgtcttaaccagcattctgtgtacccatctcctacctcctgtttatttctattcctggacctcccctttgcattttctgcttgttccatctcagttgagccacctagttttttctgtattgcctgccttcctcaacatatacttgaatccttggctgctctgcttgtggaggtgcctggtcactatctttcaagttgaggggagctgatctaacggggttaagtggtgtgttattaattctagacgcagtgtggtggcctaagaatgggttctggagtcagaccagatttctaatatcagttctgcctactttttagccaggtgactttggacaagtgacttgtcaagtgaagggccttagttttctcctctttaaaacagataaggaaacaatctaaatgcccaataataggggattttggttatgcaacagacgtagtcattaacaaccacattttaagtctggcgcagtgactcacgcctgtaatcctggcactttgggatgccaagacggttggatcctttgagcccgggagttccaaaccagcctgagcaacatggtgaaaccccttctctacaaaaaatacaaaaaattagcaaggtgtgctggtgtgcacctgtagtcccagctactcaggaggcggaggtgtgaggatcacttgagctgggaggcagaaattgcagcgagctcagatggcgccactgcactccagcccggggcgacagacgagggctctgtctcaaaccaaacaaaacaaaaccccacattaaaaaaacaaaaacaaaaaacaactaatggcagacagcacagaggatttttacggtagcgaaaatactctcatgatactgtaatagtggatacttgtaagtatacatttgttcaaagatacagaatgtaaacaccaagggtgaactaactctaatgtaaaccgcaggctttggttagtaatgatgtgttaatgtaggttcatcgattttaacaaatttaccactctgatagggatgttggtagtcaggggagccgtgactgcatgggggaaggaggtatatgggactctccggacctacctgtcagttttgctgtgaaactaaaattgctcttaaaaaataaaatctttatttaaaaaaattaaaacccatagaatgtacaacaccaaaaggaagcccttatgtaaactatggcctttggttgataatgtgtcactgtatattcatcactgcaagaaatttaccactctggacaggatgttgatagggaggctgtgtctgtgtgtggagaggggtacaaaggactcttgatactttcagctcaattttgcagtgatgccaaaactgctctaaaaaataaagtgggcctggtgcagtaactcctgtaatcccagc

SEQ ID NO: 1564350 - DNA, 4001 bp, Homo sapiens
tccatcccccagagtctctcccactgaagggctaggcggggcatttgggctctgtggctgcccttggggaagctcctcctcctgcccaggggagccccttcttgcagtagctatggaggtggtctcctcctcttcaatatgtggggactgcagtgttattggagaatctggagccaaaggctctagtagcccctcaggtgaacaggaatttgccccagcccctggatcaggtggtaccacctcaggggtctggccccctggtccaggctctagggtctgatctcctgcatcccatgccagggttccctcaggaccgtggtccacctccgggggagagggggctttatagagcagcccccccagccccagcaactcagtggctccatccaggactccagggtctttttccaggccagcaggggtatcaagcaggtccagggctcccgaggatggagaagggccagggggggcccatcctcgagttggggcagtctgggattccagtagatcctctccaaattccatgtctactggtaggtctccagccaggggcttctctggcagggtcaatgggtcaaatggactggggaaatcactggggtccatgagtatggctggatatgtactgcagattaggagtagaagagggggcagtagaggtggtcttagcctgaattccttcttatataggctctgagacacaccccatcatccacttggatttctcatgagcagcccccaccaccacaatctacaagcatttccgaaggctttagtcctaatgaccactccccccaatacagcgcccccagtggggagaggcgttccccgccctggccccgtgcccacactggccaggcagtcggtcgttctacccgcccacccccctactcgactgcaactcccattcccttccccccttaccttttaccccccgcaactcaggctgaacgcccccttagagtctcctaaggccgtcgccaccaggagcctttcccgcccccgcgatctcagtttctattccctccccactctgcaggagccccccagctccccagtctttacccaccctgtctggccccaccccccctccccgcgttgctaggtcctccctcggcccttcccccgcccccacaaactgcccttcgcaaccccttccccccagttacctttcaggtcgcccacttcctcagccccgtccccctttcccattgctcctccagtcctcccttctcctgttgcccacccccaacctcaggcatttacaggaagacattttggagctacgatctctccttagacccccccaccaccgcctcccggctactgcaagatcccgcttgcaggttcggttcggcttgagcaggcccgacccctacctgcggcagggttagtgcaaaggctacaagcctagaactgcagacagcgacggccccgcgctccttctctacctccctccctagcagccgggacaggggtcgcggcccctttaaatggcagcgccgctcgcagcgcccagcgctctgcaccaggcgggcgggcggtgccagcaaccaaccccattggctggctcgaggagggggctcgcgagacagcgccggcccccggcgcgagactcccagtccagtggccgcctggaaattgcggagtggaatgcagccactagagacggcgcctgagcccccgcccggggccccgttagttgagaaggaaaagatagcctctggagctttgaagccggccccccgggaaaggcggcgtcccctttccacccaagggccgagtgcgctcacccacaaaaaacacagatctacgcacctgctccccttacctggctcaagagtctggcccccgtcacaccctgctcgccctacctcctggagcccactctacccgtgatcccctcctctcattcaaatggttcccggtcccctccccctccccgtgtctctcttagcttcccactcgtgttcaccccctcggcgtccgcccccctcaatagtccctacctacgccatgcagcaggcgcctgccaagattaccctcccccatccccacctctccgggtcccgccccctgggcgactgttggggtagtgagtgacagcggaggacggggggaggcagggacccagccctcacgtgcccctccttcccttgtctgcagccacggggcccccaaaacagtctgagagtcagagttatggggtatctgaagcttgatccccagccacacaggtcgggttaaatggctctggctcagtggcaacgcctgtgcagtaaccgttactgcttgatgacccccaaaccaggtcctgcaaagctaccccctactctctcaacagtcttagggtaagttctgggatcttctccctgagtcttcctgcaggagctccctgtattatctatggagttttcctccctcaccagggctgatctctctctctctctctctctctctctctctctctctctctctctctctctctctctctctctctgtatctctctctctctttctcctccagccccctttctgtccttgtctgtctctctcttctcgctctctctctctctctccccctatctctttttgtctccttctctgcctctctgcttctcgtgcgcacgagcacgcaggcgcgctacacgctcccccctcctggatggtccttagcatgtgggtgtggctgaggttaggctagagaagtggagtaggggtaggtggcactagcgttaagcctactgcctttaaaaaattgtgccagcatccattctcagtccgcattatattaatagttagagcactttacaatccccgctccccacttcccaccacagcccctaagggctgagagcatttagtagccgaactactagaggaggctcaggctggaaggaagtctccttaggaacaggaaggtttggtatccagtgcctattctagcctgcctcgttgacttctggcctctcctcctggccacacaaagcctctcctgctcttgtagtcctcgggagtttaccctcccttttctcattccttttcccagaaaccttatccttgctagctccccacatggccttgaggttatctttgctccctcctacatacagagataaaagccagagtttcttacttttagatttcccaaatccagctttctctttgtcttaaccagcattctgtgtacccatctcctacctcctgtttatttctattcctggacctcccctttgcattttctgcttgttccatctcagttgagccacctagttttttctgtattgcctgccttcctcaacatatacttgaatccttggctgctctgcttgtggaggtgcctggtcactatctttcaagttgaggggagctgatctaacggggttaagtggtgtgttattaattctagacgcagtgtggtggcctaagaatgggttctggagtcagaccagatttctaatatcagttctgcctactttttagccaggtgactttggacaagtgacttgtcaagtgaagggccttagttttctcctctttaaaacagataaggaaacaatctaaatgcccaataataggggattttggttatgcaacagacgtagtcattaacaaccacattttaagtctggcgcagtgactcacgcctgtaatcctggcactttgggatgccaagacggttggatcctttgagcccgggagttccaaaccagcctgagcaacatggtgaaaccccttctctacaaaaaatacaaaaaattagcaaggtgtgctggtgtgcacctgtagtcccagctactcaggaggcggaggtgtgaggatcacttgagctgggaggcagaaattgcagcgagctcagatggcgccactgcactccagcccggggcgacagacgagggctctgtctcaaaccaaacaaaacaaaaccccacattaaaaaaacaaaaacaaaaaacaactaatggcagacagcacagaggatttttacggtagcgaaaata

SEQ ID NO: 1564351 - DNA, 4001 bp, Homo sapiens
ccagaaatcccactcccatctagaaccaaaaagctgtaaaggtcttagaaccaagaagcctggtgtactcccccaaatcctgaaggaaggactctggcaccaaaagcccactggggtaggaaaaagggaacccttcccaccaaattcactcctcccaacctacgctccctgaaaccttaccccattcctcccccacagcctgtgcccacccctactttccttaatcttcctctacacaccaccccactcctccctcgtaaaccccaagtccttccccacacacatccctacacttatctctccaccctcctcctccccactacttcccaaagcacatagccacccctccttaccaccaccctctcccagccctgattctccagataattaggcaacctacctggcaaggaaggatgtgcaggggggctagagcccccaggtttggtctgagaactgttgattccatcccccagagtctctcccactgaagggctaggcggggcatttgggctctgtggctgcccttggggaagctcctcctcctgcccaggggagccccttcttgcagtagctatggaggtggtctcctcctcttcaatatgtggggactgcagtgttattggagaatctggagccaaaggctctagtagcccctcaggtgaacaggaatttgccccagcccctggatcaggtggtaccacctcaggggtctggccccctggtccaggctctagggtctgatctcctgcatcccatgccagggttccctcaggaccgtggtccacctccgggggagagggggctttatagagcagcccccccagccccagcaactcagtggctccatccaggactccagggtctttttccaggccagcaggggtatcaagcaggtccagggctcccgaggatggagaagggccagggggggcccatcctcgagttggggcagtctgggattccagtagatcctctccaaattccatgtctactggtaggtctccagccaggggcttctctggcagggtcaatgggtcaaatggactggggaaatcactggggtccatgagtatggctggatatgtactgcagattaggagtagaagagggggcagtagaggtggtcttagcctgaattccttcttatataggctctgagacacaccccatcatccacttggatttctcatgagcagcccccaccaccacaatctacaagcatttccgaaggctttagtcctaatgaccactccccccaatacagcgcccccagtggggagaggcgttccccgccctggccccgtgcccacactggccaggcagtcggtcgttctacccgcccacccccctactcgactgcaactcccattcccttccccccttaccttttaccccccgcaactcaggctgaacgcccccttagagtctcctaaggccgtcgccaccaggagcctttcccgcccccgcgatctcagtttctattccctccccactctgcaggagccccccagctccccagtctttacccaccctgtctggccccaccccccctccccgcgttgctaggtcctccctcggcccttcccccgcccccacaaactgcccttcgcaaccccttccccccagttacctttcaggtcgcccacttcctcagccccgtccccctttcccattgctcctccagtcctcccttctcctgttgcccacccccaacctcaggcatttacaggaagacattttggagctacgatctctccttagacccccccaccaccgcctcccggctactgcaagatcccgcttgcaggttcggttcggcttgagcaggcccgacccctacctgcggcagggttagtgcaaaggctacaagcctagaactgcagacagcgacggccccgcgctccttctctacctccctccctagcagccgggacaggggtcgcggcccctttaaatggcagcgccgctcgcagcgcccagcgctctgcaccaggcgggcgggcggtgccagcaaccaaccccattggctggctcgaggagggggctcgcgagacagcgccggcccccggcgcgagactcccagtccagtggccgcctggaaattgcggagtggaatgcagccactagagacggcgcctgagcccccgcccggggccccgttagttgagaaggaaaagatagcctctggagctttgaagccggccccccgggaaaggcggcgtcccctttccacccaagggccgagtgcgctcacccacaaaaaacacagatctacgcacctgctccccttacctggctcaagagtctggcccccgtcacaccctgctcgccctacctcctggagcccactctacccgtgatcccctcctctcattcaaatggttcccggtcccctccccctccccgtgtctctcttagcttcccactcgtgttcaccccctcggcgtccgcccccctcaatagtccctacctacgccatgcagcaggcgcctgccaagattaccctcccccatccccacctctccgggtcccgccccctgggcgactgttggggtagtgagtgacagcggaggacggggggaggcagggacccagccctcacgtgcccctccttcccttgtctgcagccacggggcccccaaaacagtctgagagtcagagttatggggtatctgaagcttgatccccagccacacaggtcgggttaaatggctctggctcagtggcaacgcctgtgcagtaaccgttactgcttgatgacccccaaaccaggtcctgcaaagctaccccctactctctcaacagtcttagggtaagttctgggatcttctccctgagtcttcctgcaggagctccctgtattatctatggagttttcctccctcaccagggctgatctctctctctctctctctctctctctctctctctctctctctctctctctctctctctctctctgtatctctctctctctttctcctccagccccctttctgtccttgtctgtctctctcttctcgctctctctctctctctccccctatctctttttgtctccttctctgcctctctgcttctcgtgcgcacgagcacgcaggcgcgctacacgctcccccctcctggatggtccttagcatgtgggtgtggctgaggttaggctagagaagtggagtaggggtaggtggcactagcgttaagcctactgcctttaaaaaattgtgccagcatccattctcagtccgcattatattaatagttagagcactttacaatccccgctccccacttcccaccacagcccctaagggctgagagcatttagtagccgaactactagaggaggctcaggctggaaggaagtctccttaggaacaggaaggtttggtatccagtgcctattctagcctgcctcgttgacttctggcctctcctcctggccacacaaagcctctcctgctcttgtagtcctcgggagtttaccctcccttttctcattccttttcccagaaaccttatccttgctagctccccacatggccttgaggttatctttgctccctcctacatacagagataaaagccagagtttcttacttttagatttcccaaatccagctttctctttgtcttaaccagcattctgtgtacccatctcctacctcctgtttatttctattcctggacctcccctttgcattttctgcttgttccatctcagttgagccacctagttttttctgtattgcctgccttcctcaacatatacttgaatccttggctgctctgcttgtggaggtgcctggtcactatctttcaagttgaggggagctgatctaacggggttaagtggtgtgttattaattctagacgcagtgtggtggcctaagaatgggttctggagtcagaccagatttctaatatcagttctgcctactttttagccaggtgactttggacaagtgacttgtcaagtgaagggccttagttttctcctcttt

SEQ ID NO: 1564352 - DNA, 4001 bp, Homo sapiens
atcacttgaatccaggaggtggagtttgcagtgagccaagatcacgccattgcactccagcctgtgcaacaagagcgaaactccatctcaaaaaaaaaaaaaaaaagaatacaaataaatcacagccaaataaagagatacatagggcaaggcatgtgggaaggggcctggagtcttcatgcgctctctgggtgcaccaccctccaggaacccccatgtgttcggctacccagaagctctccagactttatccttttggggctttaggggggcttcattatgtaggcatgattgattaaatcatttgcccttgtggatcgacttgactctcagcaccctctcccctcccaggtggttggagggtcccaaccctctaaacctaccttagtctttctggtgaccagccccattcggaagctgcctagggactgccaggcatcagtcaactcattagcatacaaaaagacactttagtactttagagattccgaggatattaggagttgtttgccaggaaagaccaattatatatttcacagtatcacacccctacaaaaaccttacacaaactattataggatctttattcataatatccaacaactagaaacaaccaagatgtctttcaaccagtgaatggttatactgtttggtacatccatgcgatggaaaagtatcagcaataaaaggaatgggcagggcacggtggcttacgcctgtaatcccagcactttgggaggctgaggcaggtggatcacgaggtcaggagttcaagaccagcctggccaacatggtgaaaccccgtctctactaaagatacaaaaaattagccaggtgtggtggcacgcacttgtaataccagctactcgggaggctgaggcaggagaatagcttgaacccgggaagcagaggttgcagtgagccaagatcacgccattgcagtccagcctgggtgacagggcaagactctgtctcaaaaaaaatgaatgaactattgatatactgttagctattgatatctccacagaattttgctgaatgacgaaagccagtcccaaaaggtacatactgtacaatctgattaatataacagtctctcttttttgtcctttttttcctttttgtggagaacagggtctcactatattgcccaggcaggtctcaaactcctaggctcaaactatcctcctgcttctgcctccctaagagctgggattacaggcatgagctgccatgcccggcaaataaaacttttttttttttttgagacagggtctcactctgtcacccaggcagagtgcagtggcacgatcttggcttactgcaacctccgcctccaggttcaagcgattttccggtctcaacctcccgagtagctgggagtacaggtgcgtgccacaacacctggttaatttttgtatttttagtacaaacagggtttcactatgttggccaggctggtctcaaactcctggccgcaagtgatccacccgcctcggcctcccaaagtgctgggattacaggtgacaggcgtgagccaccacgtccagccacaacattcttgaaatgaaaaaattatagtattggagaacagattggtggtgccccagggttaagaggggagtgatggaggaagtgaagtggttgtgtctatttaatgacaacatgggggatccttgtggggatggaaatgctctgcatgtcaatatcctgggtattacgagatgttactactggggacaaaaactaggtaaatggtacattgcatttgaatctacaattatctcaaaatataaatttaactaaaaataaataaaaaaataaagaacatatagaaaaaaataggatcctcctccttacctcaaaagatctgccaggttctcctggaatcagggcagggaatctctggggtgatgtcccattagctggcatgttcaccctgggcctcagcccaccttccgtgctggacagctgtctgtgtgtagagggtcctgcagcctccagtaaggggtaaggctcaatggctccacagagacaccaagaaatcctaaaaggacagtatccatatcatcagtgtcatcccacattcacgccacaatgttcagcatccccagagcatgagtcaaggtggattacaaaatgatcaaatttggggccaaattaatgagcttggggtcccttcttgagtggctctaccaggtgcttcactcgctactcagccagcctacacctcagttcaagttcaaggcagatctgggtttaggagaagtagaactggggcagtgcttaagggtgcttaaggcccatggggtgggcaggttcaaggggacctggtgggtgactgtgagggcaggaaacctggaaagctgataatctaaatgaaaggaaatcggctggtcctttcttctgccgtcttttgtttttttccactcttagatgaaatatccctcttaaattcttttactgggaagcttttagcctcttctttccagaaaaaaatggttcaatcttaataatgttatgtattttttcttttttttttttttttttttgagatggagtttcactcttgtcacccaggctgcagtggaatggtgcgatctcagctcacagcaacctccgcctcccaggttcaagggattctcctgcctcagcctccctagtggctgggattacaggcgcccgccaccacgcccagctaatgtttgtatttttagtagagacgggttttcactatgttggtcaggctggtctcgaactcctgacctcaagtgatcctcccgccttggcctcccaaagtgctgggattacaggtgtgagccactgcaccaggcctaatgttatgtattacatcaacaaattacagagggaaacactctgctgttaacttacaccaaaaaagcatccaacgcaattcagcagccattactaatataagctcaaactaaaatcatggaaaaagtaaataacttaagtgccacaaaaatcaattatgaaacataactctgaaacaccatgctaaaaagtaaaatgatgaagctattgccacaaaattagtactgtctgctataacccaaaattgttttgtgggctctagctcacacaagagaagatgaaatagagtgggctgggcacagtggctcatgcctgtaatctcagaactttgggaggccaagacaggagggttgcttgagtccaggagttcgaaaccagccttggcaacaaagtgagacgctgtctttacaagaaataaaataatccgagtgtggtggtccacacctgtagtgccagctactaaggaagctgaagcagaaggatagcttaagaagcctgagaggttgaggctgcagtgacctctgatggcgccactgcactccagcctgggtgacagagcaagactttgtctctaaaagagaaagaaaaagaaagagagaaagagagaaagaaagaaagaaagaaagaaagaaagaaagaaagaaagaaagaaagaaagaaagaaagagaggaaggaaggatggaaggaaggaaggaaggaaggagggaagaaaggagaaaagaagagaaaagaaataaataatcaggccaggtgcagtggctcacggctttaatcccaacactttgggaggccaaagcaagaggatcccttgagcccaggtgttcaaaactaacctggacaacatggcaaaacccagtatccttaaaaaacaaacaaacaaacaaaaacacacacacagagttgcagtgcattgagatcactccactacactccagcctggatgacagagtgacactttgtttctattaaagaaaaaaaaaagaggccagaggaggcggctcacgcctgtaatcccagcactttggtaggccaaggcaggctgatcacctgaggtcagcaggtcaggagttcaagacgatggtgaaaccccgtgtctactaaaaacacaaaaattagctggacatggtggcacacacctgtaatcccagctactcaggaggctgag

SEQ ID NO: 1564353 - DNA, 4001 bp, Homo sapiens
aaaaataaaaatgtttaaagtgaaagaaaaaatatggtgggctgcaggtatctgaaaaaattttgtctcttggacaaaagataattcaaagtccgactaagaaattgcttcaggaaaatcattggaaagacaagcaggttccctaagagatttcattcccaagttacattttgacatgatgtctccagctcactgaggaaagctgtagcacatatctgcaggaaagcatttgtcaccaggctgtggttgagggcaactgcactatccacatgaagacccagcaaagaaatacctttaaacacaattccaggcaaccttgacttcccatgaaggctgtgtgctctctcctgatgagtaaggtgagccaaggtactggttatgtttccctttggctaccagaaggctcaaagagaaactgacagcccaacatcaatatctgttacaccctgagtcctgcacacctctacattctaatttggccttgatctgttgtctcttattttgcctgatccaatccttatttacaaatactttcctattttatggcagggatttccacatatttcgtcacatccacagtaaaatagaggaatgaagaaacagacaacatacttacctggggtttggccatttcctgctcttcttgggaaaaagcagagatgtgtgacggccgagctggaacaagtggagaagagtacagcagatgaggagaccccatcagactttcagtgcccagaattagctgcctagcaatcccctcacatcagctggccatcagactgctctctggaagagtctgggcaaccatgtgattttaacaatctgtgtattattcactcttcatgtgaacattgaacacaaaaggttttatatacacatatattaaattgtgtactgacccataaagtgtatttgtaggtattttccttaaggaaataatttatcataatgtatcataatttctctgcacgtacccacgtctcagcattgatttcaataatgccaaacttaaacgatcctctatgacccataagggattaataataacaaaatataaaagataaaatgctacaaagctgttaaaagcgttatatggaactgtacagtatctatgcactttgtggtatatgtatctcaactaaacgtttttaaaaggtgtacaaaaaaatcctaaggtgaattacaaagtaggttttaaaactgcgggaatccattttaaagttatatgttaaatgtttaaaaggcatacccctatacacaccaaaaatgtctaaaaacggacatttaaatgtgtgggggaagaattagttcctgttgattttctttttctctatttcagaattaatctatatattcaaatgttatttattaaatgccaaaaaaaactacactctaaaactattatcccaattacattttacccccatctccctcagaccccgcacctacccctcctcccacgcccccaacttgggcgaggcccggggtcaggtgagacctcgcaggtgcctctccttccttctgctcacctcaccggggccgccttgcccagaagccggaaagaggccttcgggtgcgggggtgcaggttcacttcggccggagcattcacaccaggcccccacctcggggcttgggcaaggggagagggcagagggagaagcggggcgcgtctaaagaggggtctgagggatgcgcatgaacctttaggggcaggtcactgtgctggaaaacgtgtaaaagtcaaagtttaataagccccatttaatcctgcttagcccccataactttgttcaccagtgagcccctagaacctcgtccactgacctctcggtcccccatcactcaacccccaactcccacttcactcatcccacagaactccccatcactcagcccacgacccctagcacttgccccctcaacctcactctctctcgataacagattttctgctcgctgctcaggagaccgttacaaagcctggccccaacaagcacttccgcttcgggaccgactctttggcaccgcagcctaaagggctgcaggggtcggttctgcgcacgctcagtggcgcctttgagaccccgtccgccaatagtcaacatggggccgcagcgcaggcgcagagggaaggtagccttgccggtgacgtcactgctccaggccagatggccgtgcccaccgtgtccttttgctgctggggctgcgtcgcaaagcggttgtttacttagttatgcagaggcaggcactcctaagacttcagacaccaattttcttacggcagggcggggaggggaagtgcccaactaaggaaaagattctagcaggcggcaatttcgcactttgaacttggagggcagcaacagggttgcaggtgtaaaataacgggaaggcgggatgcgtggctaaattgctctgcgtgcacaaagagtaggaggtagggaaaagccactggcttcatccagtggccaggactgggagtttacgttgtagcgtttgaaggacggtgggtcggtatgcagacaaacaagctgaaaaataaacggcgatgtgggacacacacaccgggggtgaaggggtatattaagtggtggctaacaggttgctttttctggatgagtagacagtgtcagtgtgttgggagtgtagggggtgtaggctggggccaggtgctgtagggcctccttggccagggagctcatatttcattctggacatatgggaaaccataagaaggatccgatctgtaaagaccagtctgaagcaatctagcattatatagtaacgttaaaaatacacatatattgggctgggtacggtggcgtgcgcctgtaatctcagcactttgggacgccaaggtaggcggatcacctgaggtcaggagttcaagaccagcctggccaacatggtgaaaccccgtctctactaaaaacaccaaaaattagccgggcttggtagcacgcctgtgatcccagctactctggaggctgaggcaggagaatcgcttgaacccgggaggcagaggttgcagtgagccaagatcacaccactgcactccagcctgggcaacacagtgagactccatctcaaaaacaaaaaacaaacaaacaacaacaacaacaaaaggaatggagcttcccagtagacaagacaaagaaagaaagaaagtaaaaaaggaactcacatctgttgctccctgacacatcagcacctcctgggtatacaatttatccactctctcaatgcattaggaggtagaaaatagaaagggctggtcctttagggcccatcaagtgtcgccccttctagcacctaaacgtcatctccaaccaccttgtacacacacacctacacaaaggaggaaatcttttagggttggtgggagttggggggcagaggagccagtgatacagcccctcagaaactatctgagggcccacagtgtgcatgcacaagctatgtgaggctaactttgctgctgcagagcgaggactcccactctctgtcctgggtatcctctaccgtcattccctacaggtgtgacctcctcatacagtaacctaagcagcaggtggctaggtgaaggagagtgagaagctgacaggtggctggtcccaccacagagtctgcatgatatgacattcccacccaaagacaatgagagaagcccccacgtggctggcgagtcatcattacaattgctcttatgatacattttatcaagaccacaaaagccttgccaattgtgagcggtcattttggaccagaagcagcaggtgaggctgacagagcaacagcacagaaggagccaggtctctggtgaccttggagctaccacactagccctggattacctgcctccaaaagaggaatctgcttccctcctcttgaagccactggtgtttgtggtggggttggtgcgtgcagccagatcaaatcctgagcaatccatcagatgcttctgtgttggccaatgtgagtgtcagtgaacaggagata

SEQ ID NO: 1564354 - DNA, 4001 bp, Homo sapiens
aagtgaaagaaaaaatatggtgggctgcaggtatctgaaaaaattttgtctcttggacaaaagataattcaaagtccgactaagaaattgcttcaggaaaatcattggaaagacaagcaggttccctaagagatttcattcccaagttacattttgacatgatgtctccagctcactgaggaaagctgtagcacatatctgcaggaaagcatttgtcaccaggctgtggttgagggcaactgcactatccacatgaagacccagcaaagaaatacctttaaacacaattccaggcaaccttgacttcccatgaaggctgtgtgctctctcctgatgagtaaggtgagccaaggtactggttatgtttccctttggctaccagaaggctcaaagagaaactgacagcccaacatcaatatctgttacaccctgagtcctgcacacctctacattctaatttggccttgatctgttgtctcttattttgcctgatccaatccttatttacaaatactttcctattttatggcagggatttccacatatttcgtcacatccacagtaaaatagaggaatgaagaaacagacaacatacttacctggggtttggccatttcctgctcttcttgggaaaaagcagagatgtgtgacggccgagctggaacaagtggagaagagtacagcagatgaggagaccccatcagactttcagtgcccagaattagctgcctagcaatcccctcacatcagctggccatcagactgctctctggaagagtctgggcaaccatgtgattttaacaatctgtgtattattcactcttcatgtgaacattgaacacaaaaggttttatatacacatatattaaattgtgtactgacccataaagtgtatttgtaggtattttccttaaggaaataatttatcataatgtatcataatttctctgcacgtacccacgtctcagcattgatttcaataatgccaaacttaaacgatcctctatgacccataagggattaataataacaaaatataaaagataaaatgctacaaagctgttaaaagcgttatatggaactgtacagtatctatgcactttgtggtatatgtatctcaactaaacgtttttaaaaggtgtacaaaaaaatcctaaggtgaattacaaagtaggttttaaaactgcgggaatccattttaaagttatatgttaaatgtttaaaaggcatacccctatacacaccaaaaatgtctaaaaacggacatttaaatgtgtgggggaagaattagttcctgttgattttctttttctctatttcagaattaatctatatattcaaatgttatttattaaatgccaaaaaaaactacactctaaaactattatcccaattacattttacccccatctccctcagaccccgcacctacccctcctcccacgcccccaacttgggcgaggcccggggtcaggtgagacctcgcaggtgcctctccttccttctgctcacctcaccggggccgccttgcccagaagccggaaagaggccttcgggtgcgggggtgcaggttcacttcggccggagcattcacaccaggcccccacctcggggcttgggcaaggggagagggcagagggagaagcggggcgcgtctaaagaggggtctgagggatgcgcatgaacctttaggggcaggtcactgtgctggaaaacgtgtaaaagtcaaagtttaataagccccatttaatcctgcttagcccccataactttgttcaccagtgagcccctagaacctcgtccactgacctctcggtcccccatcactcaacccccaactcccacttcactcatcccacagaactccccatcactcagcccacgacccctagcacttgccccctcaacctcactctctctcgataacagattttctgctcgctgctcaggagaccgttacaaagcctggccccaacaagcacttccgcttcgggaccgactctttggcaccgcagcctaaagggctgcaggggtcggttctgcgcacgctcagtggcgcctttgagaccccgtccgccaatagtcaacatggggccgcagcgcaggcgcagagggaaggtagccttgccggtgacgtcactgctccaggccagatggccgtgcccaccgtgtccttttgctgctggggctgcgtcgcaaagcggttgtttacttagttatgcagaggcaggcactcctaagacttcagacaccaattttcttacggcagggcggggaggggaagtgcccaactaaggaaaagattctagcaggcggcaatttcgcactttgaacttggagggcagcaacagggttgcaggtgtaaaataacgggaaggcgggatgcgtggctaaattgctctgcgtgcacaaagagtaggaggtagggaaaagccactggcttcatccagtggccaggactgggagtttacgttgtagcgtttgaaggacggtgggtcggtatgcagacaaacaagctgaaaaataaacggcgatgtgggacacacacaccgggggtgaaggggtatattaagtggtggctaacaggttgctttttctggatgagtagacagtgtcagtgtgttgggagtgtagggggtgtaggctggggccaggtgctgtagggcctccttggccagggagctcatatttcattctggacatatgggaaaccataagaaggatccgatctgtaaagaccagtctgaagcaatctagcattatatagtaacgttaaaaatacacatatattgggctgggtacggtggcgtgcgcctgtaatctcagcactttgggacgccaaggtaggcggatcacctgaggtcaggagttcaagaccagcctggccaacatggtgaaaccccgtctctactaaaaacaccaaaaattagccgggcttggtagcacgcctgtgatcccagctactctggaggctgaggcaggagaatcgcttgaacccgggaggcagaggttgcagtgagccaagatcacaccactgcactccagcctgggcaacacagtgagactccatctcaaaaacaaaaaacaaacaaacaacaacaacaacaaaaggaatggagcttcccagtagacaagacaaagaaagaaagaaagtaaaaaaggaactcacatctgttgctccctgacacatcagcacctcctgggtatacaatttatccactctctcaatgcattaggaggtagaaaatagaaagggctggtcctttagggcccatcaagtgtcgccccttctagcacctaaacgtcatctccaaccaccttgtacacacacacctacacaaaggaggaaatcttttagggttggtgggagttggggggcagaggagccagtgatacagcccctcagaaactatctgagggcccacagtgtgcatgcacaagctatgtgaggctaactttgctgctgcagagcgaggactcccactctctgtcctgggtatcctctaccgtcattccctacaggtgtgacctcctcatacagtaacctaagcagcaggtggctaggtgaaggagagtgagaagctgacaggtggctggtcccaccacagagtctgcatgatatgacattcccacccaaagacaatgagagaagcccccacgtggctggcgagtcatcattacaattgctcttatgatacattttatcaagaccacaaaagccttgccaattgtgagcggtcattttggaccagaagcagcaggtgaggctgacagagcaacagcacagaaggagccaggtctctggtgaccttggagctaccacactagccctggattacctgcctccaaaagaggaatctgcttccctcctcttgaagccactggtgtttgtggtggggttggtgcgtgcagccagatcaaatcctgagcaatccatcagatgcttctgtgttggccaatgtgagtgtcagtgaacaggagatacatgggactggtgggtg

SEQ ID NO: 1564355 - DNA, 4001 bp, Homo sapiens
gataactcagggggcagccaagacgagcgggcagggagctgacagccaggggtggtcagcctggaagttctggcctccgggcaggagttaggggcccctgcaaagagtcctcctcagagttaggggaggagtcaaggggtcagggtagacccttctgtcctgcagtggaggggatgtgggctggagcatcggggtttgggtcaagggcaacacagagcctccggtagtctccaaccccacaatctccatctctaacaggggacagcctcccagaggtggccatgttgcaggcacacttgggggttctcgcttttgtattgaactgtttactagggtcctgcctgagtcccctgctgggacgtcagttgcccaaagacagggcctttgtcttgaccactcctgcatcctctgtgcccagcatgggacctggcaggtagtgggcgctgagtcatcgaggggtgacagagagaccgtagttactaaaggtagccctgtgtgctggctgtaaacttgaggccctcccttccagaggccgccactgcctctaccaccccctgagaagccgcctgccggctgtttggagcaaggagcgagcctgaatttcagttccctttctctgtcaggagcagttcctccagaggccagcagggtgtgcccacgcttcagagcccccctagacactgttatggaaaagcccccaaaagagagagaagccagttctccttggtcagctgacaaaatatgtcacggtaaacttgggagacagtcagagcaaactcgtgcctctctacaggcatgctgagtcccaagtacactcaagcagtcagggtgacctgcaggagtgagtcactgtgactctggaagctgcccaaagcatctcagaggcagtatcactccctgcagggaatgggtgggaggtcgtcttcttcttaaagacaatttcaatcccagttaacagctggagccacggaggcccagcagggaagtcagctgccccacagccacacagccaggccaagggcctggaccaagtgactcctacactccccttcccaaaaggaaggtgcagtggagaagcccctccttcctgcagatttcaaattactcattgcagacccttggctggggctgcatccctgtcccctgtggactgcccacccctccctgttgagggctggccccaagctgcaggagagtccctggggctgacccaccagccacctgagcaccacctcttacctaggcttcggaacctccccagctgatgaaaaggatgtggcgcgactccggcctgagggcagctctctgggggaaagaggcatcctgaaggattggctccgagactccctgtcacctgccatcctgtggcctccatcctagaggctgcccagcaagtcctgccatttctgccacacattctccttcccaggcacccaggggctctcccaccctgtgacattgctggatagcctttcccacgctctgccctccacatggcctggcggagctctgaatggtggaagccccttcgcatccccaggtatggtcggtcccccacggattgcgcgcccccacgttgctgcggtccctccccgcctccttgccttacatggtgcgaccctccgattcatcctgcttggtaatccagctcttgtcccccttcagcgtggttcgcactttcatctgcttgagaacgttattgcgctcctcctcgcctggtggcagaggcttccctgtggtgggaaaagccaaccgcctcagaagaggaatgcagccccaggaccctcgacctcctttccagttctcccagtatgctgctctccctttgctgctgggacagtgcttgtggcctgtaggggcaggcttggaagcaaacagccccaaacagagcctgggaaaccagggagcccaggcctcacctttggtgcggcctccaagagctgagatactcatggtgattgctccgcagctctcctctcacttgattcagcagggcttctggggataaaggtaagcaaatgctgtcacttcatgcatttgtagtgtcttgcaggtgaccatatgggtcctggtacaccaagatcatccagactgccctctgcacatcgggggtggcaagcgttggtggagtgctaagtatgggcagaagccagggggccagcactcactgtacctgctgctgcccagcggcacacccacctgcctgcccagggctgctcacctagagaatgtggagctcaggggctgccagggactgtctgttcaaagcgatcactgataacgggagaacatgagccctcctacagagtgctaacagcctggctcaggctggggggtgtggggaagacagctggcactggtggactcagagggtgggagagagtgcatccaaagccgaacagcttcagggcaggcagatggcctgtggagagggacgggctgggggaccagctgctttggggttggaccttgcttctcaccccttaggagttttctgacagaccttgggcaggtcagctaacctctccgagctgcctcagtttcatcatttgtaaaatgatagttaaaaaaaaaattctacctttcaggactgctgtgaggatggaatgcgccgatgctcctataagtacccggcaccacctgaaaaggagccaagcagcagtagctctcaagtcatctgctaggagaggcgcggtggtcctcaaacagcgccaagaatggtctggggtgtgcagccctgtttccttcgggggttggctccaccttcagtggggaaagcccagggccccactgccaaatcctagtggccctcagggaacaggcgagtgtggcaatgtggtaagttaggcttccttacgccctggcccacagctgccttgagctctgcttcctcttcctctgtgtcttctcgccctgctctacccctgagcccggtgctgctcatgctgcccagacggtgccacactgccttcagcctctctgcccttgagcccagtgctgccctctcgtgcccatgaggggtgagctgtggtggtctcgagggccatttgctccggagaagggcccagggtgatgaagctggctctccaggctgggagcgacccagagctgcagggagccctgagtggccacagccgaacccttgggcctcaaaataggggctgggggctcaggcttgtgggcatgacaggaagcagggccctggttgtgctggcatagtcacaaagcagaagagcctttctctccagggcctttcatcccctgggcccctccagggctagggtctgaccagctcagcactgctgccagctggcagggcctggatgtgtttctgtggaggtcaggggcacactcaaatgggcagggcagggggacgagagcaaaccaaatttgccacatcagcaagagctggctcttccataaactgcactgaacgagcagcccagacagcccgagcctgctgtgtgccaggaatggcacctcatcactgcaaatgggagccccgcgtgcccagccctgcaccaaagctgccacgttagagttctgttgagtggcgctcactccacaggtgttcctagggccatacaggcctaactgtccccatcccagcaacctgtggagtggccccatgggcagggcacatgtgcagagtctctgggtgccactgactgactacagaccttgggacagttcctcacttcatctgggcctcagcttttcacctgcaggaggacctcctagtctttcgtctttaggttccttctaaccttgctaggctgtactagctagtatgacttattttgcgctgggcacctcaaagacgtactcctttctaaggcctcagggactgtagccaccagcttccacatatgagcgtggcaagcaggtgacggtcatccacagtttcgggggtggactccatcccaggcccagtaccaggcacaaggactcatcagttaccccttgtcaaacctgatggccacattgcctagaagtttcct

SEQ ID NO: 1564356 - DNA, 4001 bp, Homo sapiens
tgaggatagccaatctgccagggcctttggcaatggggctttgctgtgattcctgcgccacagatgggtcagcagatatggacctggtggctggctgagcccagggaggggagggctttatttcctcagggcccaactgctgtacaggccccaagccaaaggcatacaaaaggtgcttaacaaacccttcctgtcatagttcaccagcactgggtggtatgtggtcagtccccatggacagaggactgaggaggggcaagggtccatggaactttgctggcctgtgtggacgagggcagcttggcgcagagactagggtagaatttcagcagcatggggcacactcccactgctgtgcatgcctggagctcagtttggggtccggggcattcagaacccccaaggcatgcagatcatgcagatagagggcactgtgcaggtggcttctccctgaatatttttgttcaactgtctcagggccctttctaacaaaccgatttagagccctgaagagcctccacatgaggaggcttttccccggacccacattacctaggttctaccccacagaaggttctcaagggcccctcagctggtccaacactgagtgggtggttctggcactcagagaatgacacctattctcatgctccgtgggctaccgctgatggcctacgtgttgtgcattttgtcaccccaaccagtacaattcattccagcagtcttcgaagactcaggctcctgccctgccccccgggatgcccaaaaggcaccattccattacctccgtttctgttcatctgaggagaatggcaccacctcctcctcctcctcctcctcggtgtcccctgatgtagagctgcgcctgatattgtagggtgccctaagagaggggagaggcgctttcctgtcataggctgccaccctcagcagcttggcttcctggctttcaacaacaatgacgaggcaagtcaatatctctgcctttgggccttaggtcatgccacttgttcctccctgagaccagctctcccctccctccctgttcgagcctctccccttccccagaaaggttacccagcagctccccaaccctggatgatggaggcaagggacaaacaacggaaagatgtggtcccctgggaactagagacacaattcacacctctgtccagagaaccctcctccctgagcatgcagtggggggtggggggctttgaaagggaccccaaggggagcactaagggaaaacccgaaggtttctatccaagaagcagctcagatttaggcacacaatgctcagactgacagcagcaccctgaggatccccaggcccccagcccagtgcagccaggcagagcacctgaggctcggccgggtgcagggccaagcccaggaagcacagccagccagcagcagcctcacgacccatgaccctttccccagatccgtggggcccctcctacaagcttcctgcggtctccgctctgcctcggatcagacgtgcaatgtgcacagccatccagttttctggggcttgttaccctctggtgggctccaggccacagctgcaactggcagggagtgtcaggcaggcgggacttcccgggctgtgctcggtggcaagtagtcagctgccttcagtggacccagagtttggacttgttccttggaggagggaaccacgctgagcctggcgttgcatactcacagcttcttgtaatcctcagtggtcatcttgtagccagaggaggaggggcggggaggaccagcgttagctgttctcaccagactggcagcactagagaggagaaggttccatgtgtctacctgcaggctccctcctgcctccagatttggccacacagcccagtggacacatgagaggtggaccaggagctgcctgggagcctttcctctttgcttttggccctgacagacacccggaactgcgccactcagagcagctgtgtaggcaaaccccaccgagcttcagggaacagcccagcgggctcttgcctgtgtctttgcttcctgtttccgggtccccttggcctttccagtctgacggagtcccaggcaatgcctgatgccaaggtgcttgaattgcatgcaacttcagccttctcaatgccatcagcaagtcaagtcaagggtgcccactgccaggctagggggactctacacccagcccctcccaaactcctgcacctctctgtcccattagccaggcctagtcaggactgaccccaggacaaggacactgttagtggcccaggacctcccagagacccacacatccacttgggactgccagtcccaccccagcccatctcctctggtcaccccaccctgctctccagggtcctgccctacccaggatgaaagctggcacctccaaggccccacagtcctgataggcagagcactgtctctgccaggagcccagaccaggccctcacacctccccactggccgactggccaacaccccatggacatacctttttggagtcccgttggccttggggaactgctgctggggctgggaagagctgtctatgggcttggtgaacactcccctgaaagagagcccaggagatgccggtgagctccctggagggactggaggggtaagaagtcagggcttggcgtgagtgggcacaggaaggccggcagagtcctgcggtcacttaccggatgatgtagccagtgggagcccttgtgctcggaggcctgccgaagagaagaaggggtggagtgaagcgaggcttgctggagggctgaggtcatcctactttatcctgcccttaacgatagcaaataagattggctggcaagtgctccaggtgtcccagtacagcagaaacgaggggtgccagccccctgtgcccctgatcaggtgcccgctatgctctgcctatttccctcatgctcccccaggaaaagtgccccaggtgactcctcatggcaggtgcctaggaaggcagcttgatggcctctccaaagtccagcttctccttggccagccagttcccagtgctgcgccgacggagcactgctctcagctgacagccctcccatcctctgtgcttggggctgaaccagtgcaagctggaggctccccagtcagagccagaggcttcccctcagcccggggtctgacctgatctccctcaacagcctccaccaggaaggtgcatgagggcttgaaggggagagcccaggcagcagccagccgaagccagctgtcccccttcctgtccctcggggccctctttgctccagctccttgcatgcccacaccccaagtcttggtggaagtttgagacgagagggcgcggccaggccttgttcagcggctgggaaacattaggctctgggtgcttgggacctcctgcttggcagcaactgagggggctcagataactcagggggcagccaagacgagcgggcagggagctgacagccaggggtggtcagcctggaagttctggcctccgggcaggagttaggggcccctgcaaagagtcctcctcagagttaggggaggagtcaaggggtcagggtagacccttctgtcctgcagtggaggggatgtgggctggagcatcggggtttgggtcaagggcaacacagagcctccggtagtctccaaccccacaatctccatctctaacaggggacagcctcccagaggtggccatgttgcaggcacacttgggggttctcgcttttgtattgaactgtttactagggtcctgcctgagtcccctgctgggacgtcagttgcccaaagacagggcctttgtcttgaccactcctgcatcctctgtgcccagcatgggacctggcaggtagtgggcgctgagtcatcgaggggtgacagagagaccgtagttactaaaggtagccctgtgtgctggctgtaaacttgaggccctcccttccagaggccgccactgcctctaccaccccctgagaagccgcctgccggctgtt

SEQ ID NO: 1564357 - DNA, 4001 bp, Homo sapiens
aaggcttcttctttcctaggcctgtggcagggccactgtgattttaggacatatgacctatgtgggtcataaaaaggaaatcttaggcaaacactcacaggaagctctgctggacaatgtaacatccaggggaattacttcccagctatcctgtccgagctcctcatgaacttcctggaagtcaagtggttagagataggcaaggtaacataggggatggtgaccaacgggattttggattttggattaatttctctgaagcctttccttctgagtgtaattggaccaaagatccagtagcctaatacagccactgtcaactcctaacacaaccataatctacacacttccattcttttaaaaaacggaaattgtagtcccggcgtagtggttcacgcctgtaatttcagtactttggcaggcagaagtgggtggatcagttgaggtcaggagtttgagaccagcctgcgcaacatggcaaaaactcctctctacaaaaataagccaggtgcagtggtgtgtgcctgtagtcccagctacttgggaggttaaggcaggagaatcacttgagcccaggaggtagaggttgcagtaagccgagatcaccccattgcactccagtctggggcgacagaagtgaaacattgtttcaaaaacatatatatatgagatatacatcatatatatgatatacatatacatatacatatatagatatagataatatttgtagagatgaggtctcactacgttgcccacgctgatctcaatccccggaactcaagtggtcttcccgcctcggcctctcaaagtataggattacaggtgggtatgagccactgcacccagctgacacttccacccttgtactgcctccactggccaacaacggttgccagtggtgaggaaatgtggtgcctaaacttcacctgatcctcatgcagaaaaaatataaacgagaagcccatgcttgcaacataatgaggaaaacagcatgttctagatggaaaatttgatgacaaaagtttagtaggaagaagatgagatatcgtgtcatgtcaaatgaaatcaaaccaataaagctggttaagttagctttccaggtgtccctgaacacctctgagaggaggagatattcctctggtgctgcttcacttagctcgcaggtttaaatgtcctacaggctttacatatacaaaccgatttggccatttcaacaaccctatatggtaggaggtatgattaccactattccgcacgtgaggaacctgaggcacagagaagatgagtaacatgcccaaggtcacggtgcttgtaagtgacagagcttggactggaacccaaagcaccagagtccaggctctcaaccactatactataccgcctctccctgtagtgtgatggagcggcccaagatggaatagggcggagtccccacagtttgggacagttaaaactgtgttgtaacctagggaaagtaaggctccactgccctgcgggatgtcaggatgacgccacccccatggcgctccctcatcaaactcctagggaacgaagcccctcctcactgccccacagaccagccccggtcagcccgagggcccagcgtggttggagggtccagctgccttccctgtctgcacgtccacaccccctccccctgggcagccctgacgacccgtgtccagtgtcccagaggccatggccccagggctccctgcgaaacaagctcaagccgcaggggccccgttcggcccctcgcgggaccgcgcttcctcccgccggcgacggtccacgcgcggtcaccccaaagccactctggccgcggcttcagaccttacgcgggggaaggggcagccagctcctcgggcccattcgtgatcctcgggcgacctctggcggccggcacgggcatggcctcaagagaatccccgccgaggccgagctcgtcccgggcggccatttcactttgtggacggtcgcattttcccggcgggcactgcgaccgagttcggggcttcaagaaatggcggcctacgcaggcgtactcactacgggcgcgtgctcgccgaggtgcacaggcgcgcacgcgtcgcgtacgctggtggcgagcgcgcattcgcgcaggcgcacacgtcctgtgcccgctacccagatttcggggaaggtgaggggtgtggttctgtgccatccctttttcttttccgtccctgctgtcttcccaaatagatcgtcaaggctctacagcaaggtttgtcaaccttagcactattaccattttgaaccccataattctatggtgtgtgttgggggatgtggggcagcatcccagatctctgcatataagaagccagtagtgtctcccactcccagttttgacaaccaaaaatggctccagacattgtatcgtagcaggctggaagctttgggagatgcccctgggtcagaaccactacctgagaacgatggttctcgacctagcctggaaggagaacaaactggggagctttgaaaaagacacatgatggagacccaccccagaaaaataaaatccaaatctctacctgggacttcgggaagtttttgttgtgttgtaaaccaaaaataaaattctaagctccccagctgaatgaatggacacttctctcagccaaggggacacaacgtgaaaaactagttcaggtcatgatgagaaaggggaaggtcagacatgcctcaatatattctcctccctttggaattcatgcccaactgaccagtattaacattgagagagatattcagactgacaaaacagactccttgaagcaataatatgccaaattccaacctgactctagtatagcatcacatgacagacagcaggtaatgaaagaaattgaagtattttacaccaaaatatattttttgacatattttgaaatgacctggcaaagctgtctctcctgggggaaatttacattctgtagagaatctccttccctttccaggactttttctgatctgagagtctagcaccttttaaaggtctgaataagaaacattggccatctattgcttctaagggcggccacttatgagacttcacctatataagaactctggtctccacaaccccttatcttaacccaggcactcctttctattgattccaggtctttagagaataacaactctttcaaccaattgccaatcagaaaatctctgaatccacctatgacctggaaccccacccccacccccacccccaccacactcccagctttgaggtgtccggcctttctggacctaactaatgtatacctaggcctttctggacctaactaatgtatacctcacatgtattgattgatgtcttatgtctccctagaacataaaaaaccaagctgtaagtgaaccaccctgggcacatgctctcaggacctcctgaggctgtgtcacgggtcatagtcctaacatttggctcagaatttcttcaaatattttacagagtatggcctttttcatcaacagtgtatttcagtacttcctaggtgattctcaagtacagccagagttgtgaaacactgtaatcaagaaagtttgtattggccaggcacagtggctcacgcctgtaatcccagcaatttgggaggccaagatgggtggatggcttgatgtcaggagtttgagaccagcctggccaacacagtgaaaccctatccctagtaaaaatataaaaattagctgggcgtggtggcatgtgcctgtaatcccagctacttaggaggctgaggcaggagaatcgtttgaacccaggaggcagaggttgcagtgagtcgagattgcgccactgcaccccagctggggcgacaaagcaaaactctgtctcaaaaaaaaaaaaaaaaaaaaaaaacacctctgattttgcagacgtttaaacatcagaggaaagtagcgtgagcctggctctagagttggctggatctgggctctgttcctaagtgtgttcattacaggag

SEQ ID NO: 1564358 - DNA, 4001 bp, Homo sapiens
tctataaaaagccagaaggtagaccagaaggggattttgtagtgtttgttgtacttaattgaggaaagctttgtgttcccatttctccaagaagattcatggcatcttactaaaaatcgaaataaattttaagtatagcttcctttaggtaacatcgcctggatacaaaggtcgaaattgggggtggggtgggatgctatgcaaattgcaaagagcccagggccatccaaggagcccaggcaggtttgggtaagggctggatcactgggtgagaaagttggtgtggagttcactaagaactcatgtgggagtttcgcaggtttgggagagaccaaggagtctgcatttttcaacaagcaccccaggagattatgatgcagagctgcacctccttaacactgggcctgtctagaatctggaggttcccagattctccaactctcagaatctctgttactgacaggattcctgcccaggaacctgctgaaatgggagcccactatctctgagtctgtgctgatggttagaagagaattcacaagttctggtagatttccaaggggtccctcacagacagaaggctgcaaattactgctcaatagggttctatatataaaactcagtgtctgacccagttcagtacatccccctagtaacattttgtggggatgtactgaactgggccagatactgtgcaagtggcttctacttgaaggtccaatgttgcagggttgggggaaggtgagggtggggaggggctgaggcagcattagtacctaggggaggtgctgttccagcaatcccatctgaaattctcttgtaaaggaaaaatgtcgggctgaggttgaagaggaaatgtttcattgactaaggagactggagggggccgcatgcccagctaggtcaaggctggctggagggcttcagttggaacaaggtggcagggtgggacctctgggaagtgggccaggaatgggggcagggggttgtttgaaagggaccatggactttgggcggcaggcgagtggggggtgtgtgtggaaaagatatataattaatcacccaaatatagactggaggagccagcaaaggagtttaagggggcgggggcactgaagtgggagatggcggcccccagtagggcgacagaaaaagactggttcagacagagggccttgagctcggctcaccgccccctttcccctgcctctccacagctctctctctaggctacctaccggcccccattctccccaccaagctgaggcttaaccgcccccccccactcccacccactcaaaaggaaaggagggactccccagcgggaactgttcccacctggcccaccctcccagctcccagactgcggctcagtccctcccctagaccagggaaaagtcctttaacccccacccctacaatgccccctccagatcgggctcctaggagctaggggcaggggtcctttctctccgcccctgagcggttcccatctcctagcgtcccccaaagagcagagcaggcctctacactttagcgattcccacccgggatcgccgccccccgcccgcctcgggaaggccttcgggcctcttcgtactcgtcatccgggacccgttccctgctctggcccgcccaaggccgagcagctctccaactgcccagagacgccccctccctccaccgtgcactcttctgcggcccgcacactcgctccagccccgcacacagtcctgcaccccctgcacatcctctcgcggccctgcacgctcactcaggtccacacgtcctcctgccgcccccacgatcacctccgccctgcggcccctccagcgccccccgcacatcctcccgcggcccgcacactcacccaggcccggcggcggccgacgcgcggccctcggtggagcggcgctggcgcggcccaggcaggcctggcgtggcaggaagcgccacggagccgcccgtgcccagccgagctaacagccccgcggcgcgtttccggagccgtgagcgccgccgggggttctgagggagcgaggccccgccccggccccagtctcgtccccgattggcccgggaagggggcgtggcgggaagggggcggggtttgggcgggggcggactgggcaggcaagtctgatcagcctgcgggggagcggcgcgcgcgggctggacgcttgggtggaggtggggaggagtggaatgagcgtgcgaatgaatgaatgaacgagcgaacaaatcgaccagcagacgaaggaaggaacgaaggaatggaagggacctctcccccttgggcatcttcaagatggtggtggggggagtgaagggtcgggaactgagggcgaagactggaaagccagtattctgtatgaatggaatcagatcgtatgtactattgtgtgtctggattctttcattcaacgtgatgttttcaagatttatctatgttgttgaatgtgctatcgctgagtagtatgctattgtttggatatatcagagttggtttgttcattcaccaggttatgatctgggctgtttccagtttgggcgattataaataaagctactatgaatattcatgtacacatctttgtgtggacatatgctttcatttttcttgggcaaatacctaagagatgaattgccacatcacaggatagttttatgttttataagaaactgccagaatgtattccaaagtggttgtgcaatttacattcccaccagaaatgtatgcgagctccttttctttcccatcctcatcaacatttgaggttgtcagcctttatttttagccatttgaaagggtgggaagtggcatctcattgttatttcaattatcatctccctgatgactaattatgttgagtatgcttttatgtgctcactggccatttctatatctttctttgtaaagtgtctgttcaagtagtttgcccaatgttatgtgcagtatatatatatgtatatatatgtgtgtgtgtatatatagagagagagacaaaagagaaagctagcccattatgtgcaatgtgtgtgtatatatgtgtgtgtgtatgtatgtatatatatatacacacacatgtagttcctgagaaattttatgttttcaactttcattttagatttagggggtacatgtgcaggtttgttgcctgggtatagtgtgtgatgttgaggtttggggtacgaatgaccctgtcatccaagtactgaacatagtacacaatagttagtttttaaacccttgacccctccttccctgacccctcttgtagttcccattgtttgttgttcccatctttatgcgcacgagtacccgatgtttagctcccacttataaatgagaatgtgtggcatttggttttatgttcctgcattaattcacttaggataacagcctctagctgcatccatgttgctgcaaaggacatgatttcattctttttttatggctgcatagcattctgtggtgaatgcctaccacattttctttatccaatccaccactgatgatcacctaggttgattccacgtctttgctattgtgaatagtgctgtgatgaccatacaggtgcatgtgtcttggtggtagaatgatttattttcctttgagtatatacccagtactgggattgctgggtcaaatggtagctctgttataagttgtttgagaaatctccaaactgctttccacagtggctgaaataatttacattcccatcagcagtgtataagtatccccttttctccacagtctctccagcatctcttattttttgacttttaaataatggccattctcactggagtgagatagtgtcccattgtggttttgatttgcatttctctgatgattagtgatgagagcatttttttcatatgttttttggccacttgtatgtcttcttttgagaagtgtctgttcacgtcttttgcccattttttgatggggttatattctggatattagacctttgtcaggtgattttctccca

SEQ ID NO: 1564359 - DNA, 4001 bp, Homo sapiens
aaattagccgggcgtggtggcaagggcctgtaaccccagctgcttaggaggctgaggtagcagaatcggttgaacccgggaggcagaggttgcagtgagctgagatcgcgccactgcactccagcccgggcgacattgcgagactccgtctcaaaaaaaaaaaaaaaaaattactgaggaaatcaaatctttttgaatcactacttaagacaaactcactgaaaaccaagtagctgagatttggagttattcaacctaagaactttttcaataggatattcttcaactcttcaacatgcttagaaataatattaaagtatgaaaaagtcgaaaaaaaatgaagccttaaaaataaaaatataaaggaaaaaggaattgaataatacttcttaaaacttttaagtgagcctccttgcttattctccgtgaccacctcactctcacaaaaagtgagacataatataccaaattgaacattggatgagggtcagaaagcctaggtttaagaattggttccatcacttcctaggcacatgacctcggtaaagttctgtccttgaggctgtttcctcatcttcaaacagttctaacgacaccctacagcccatctcaaaaggggtgctaccaatgaaatatacaaatgcaagatacgattataatggaatctgtactgctgtagaaacatcaaaggtacacagccctaattttacaagcaaatcagtgcctttgtaggctcagtgaagtttctgcgtaaggagattaagtttgcacagtaacccccaaaccaggacacctcacaaatactaagaggagacttttgcagtttaaaactctacttctaggtttctattttatgtttaggggcactaaaagacattacaactcatagtccaaacctgaaaacaatagtaaaaaaaatttaaggtcgcagatttaaaaaactccacaaaactaacaaatctttccaaacaaagagaatcccctggatgaaggtctcccgtgcttgcagaagctggttcacttgacaatttcctctcgaatttctccttaaaaaagcattaaaacctgagagaagttgaaaggaactccctccatctctagagcaggagtatacctcagcataattttttccatctctttaagtaaaacctgcaaacctcctagttagaatatagtgtatttaactccacgtttctcctcagggctcttatcctctagacaataacggaatagagcacgatttctgtgacagagaagggaagtccctttggccagaacaaggttgtgggcatggaatgaccggtcctgtgtggggggaacctgcgcagaaagaaggggtcacagggtctctgatgcctgaaagttcggaatcccctcaagtctcttttcgtttgattgaagagacttgagggtgggcgggtctccgtcaaacatcagtatcaaccgtacaaaagacgaaagggagttgcctccagaatgaaaagcccaaaccgggttggaaacagaccgacaggactcaggaggtgagaaggctgccgcagctgccgcggcccgcgaaaccactgcccgccgcgggccgccaggctctacctccagaaaaccctcccccttcagggcccggcgcaagatggtggcccaccagctaccacgccgccaagcctgtcccctcccccgcacccccgtcgatccgcaccggcatagagaccctcagccagccgccctcagaaccgccctctggggaaggctgcctcggccgcgcgggagagctgctgcctccttccgcgcggcacaggcgggggcgggggccgcttaccgagagcagagcagatcggtctgactggggttcggataaggaggaggagaaagaggaggaggaaagggaggagcgcgaaaaacctcaggcgacagcctcagcaacagcgactcccccggagacttccagcgcggaaccggcgtctcagccgggggcagaagtatataactgcacgcgctgcctcatgggtagacgccgactccaccccctgaacatccggggccttttaaccgcccacggacggacggctggtacttacatgtgcacatgtgcagctactttacttaccgtcgaaggcagcggaggaagtgtaattgactagcgtggatgcagcttttctaagcaaacgctcgatttaacctggagttgtcatcccaaaaaatacattgtacctgactacagagaaacatgaattctgggtcttccttgtgtgtgagggctaaagacacgagttaaaaatataaatatattgttttctggaaatactgtacttgaaacacgtctcaaaatactagttatttttaccttttgttttaaacatatggttttgcttgtctctctgttacttctaattgccatatggatgcctatagtaggtacaaaaaatgctaaggaaaaatacatttactcttacacacaaggaagacccagaattcatgtttctctgtagtcaggtacaatgtattttgtgggatgacaactccaggttaaatcgagcgtttgcttagaaaagctgcatccacgctagtcaattacacttcctccgctgccttcgacggtaagtaaagtagctgcacttgtgcacatgtaagtaccagccgtccgtccgtgggctggccgcggtggctcacacttctaattccagcactttgggaggctgaggtgggtggatcacctggggtgaggagtttgagaccacttccctttcctcctcgcctttctcctcctccttctctgaaccccagtcagcctgaccaacatagtgaaaccccatctttactaaaaatacaaaattagcagggtgtggtggcacatgcctgtaatcccagctacttgggaggctgaggcgggagaatcactggaacttgtaaatacatttacaagaaaaacacttgccaaaatactgcttacagaaacattttctagacattgtgctttgaactgtaaaagtttcttctcccaaatttctccacaaggtttatagcagtactggttcatctctctttttcttttttgagacggagtttcgctcttgttgcccaggcaggagtccaatggcgtgatcttggctcaccgcaacctccgcttcccgggttcaagtgactctcctgcctcagcctcccgagtagctgggattacaggcatgcgccaccacacccgactaattttgtatttttagtagagacggggtttctccatgttggtcaggctggtctcgaactccccacctcaggtgatctgcctgcctcggcctcccaaagtgctgggattacaagcgtgagccaccacgcctggcccaattcatctcttaagagttgcccagactgaaaatatcgtgtggcttacataacacacacgtaaatcctgtcactgaatcctaccattttttttatttgagctagttttttctttcttatttatacagctatttgcttctgaccctgaaaataagctttacaggaaaagacagagaataatcaaaataaaacagtgaaaagtcccaaaatcttggagcatgcatagttggtccctgcttccggtcagggtgataagaaagtccgggcaccttttcctttgatgccagcaggaaatttaaaactagcaaatctacagccgcatgactctgcttttggctgtagtgggaaatttaaaacttgtgattctccagcctgcctccttctttggcattggtgggaaatttaaaactggcaacaaaaattggtgcagttgagaaatttaaaacttgcaaatctacagcctgtgcggcattttcaccagccccacttcctagatgctataaaggcccatccaacttcctctgcctctgaaaccagcccagacctgtttgcagcacccagccctccctcacttacccccactagtccccagggtaataaaatttctctcaaattctcttgtcatatctagtgtcacgagtgtccacatccaacctaaaattacgaggagg

SEQ ID NO: 1564360 - DNA, 4001 bp, Homo sapiens
gaacttaaaagcatcattcctgcacgtaatgatcactcaggtgacagcctctaaccacaatttagaaatcaataacaaaaatgtcaacgttttgggaaatcaaaatctcatatctaaataacccagtggtaagagtgaacattgcaactgcaattagaaaacattagaaggaaactatagtggagatgctacatatcaaaacttgtgggtcagatgctcacgcctgtagttccagcactttgggaggatgaggtgggaggactacttgaggattgcttgaggccaaggagttcaagaccagcctgggcaacatagcaagaccccaatctctacaaaaaatttaaaaattagctgggcaagcctgcctgtagtcctagcaacttgggaggctgaggtgggagggtcacttgagcctaggaggttgaggctgcaatgagccatgatggtttcactgcactccagcctaggcaacagagagagattcttgtatctttaaaacaaaaatcagcctgggcaacatagtgagaccccgtgtctacacaaaataaaaaattagtgggtgtggcagcacatgcctatagttccagctacttgggaggctaagttgggaggatcgactgagcacaggaggttgaggctgcagtgagccatgatcgtgccactgcactccatctctgggcgacagagtgagaccctgtctcaaaacaaaataaaaccgaacagcagcaaccacaacaaaacatgtgacacggagctaaagtgttcttagagaaaaatttataaactgaatgtttatattataaaataaaatgactggatagtaagataagcattaaattcaggactttaaaaatgagaacaaaattaaaaaacagaaaagaaataacgaagttaagggcagatattaatgacagagaaacaaagatacaggaggaccaacaaagtcaaaagtaggttttgaaataacctcatctcagacctaaagaccacctatcactgaccccaggaagctgcatatctgattccacagccccccatcactagtcccaaagaaacgcatcactcacccagcaggaaccttggtcaatcacccaataaaccccatcccacacctcacagacctccagtagtcaccccgcacagccctttcttacccccacggacttctcatcactcatctcacatataccttatcactcaccctagagaccctgtatcactcaccccacagacccccttattattcactccggtgtccccaacactcatcccacaggctacccatcaactttctctagtgacccatcactcacccacaaaccccaatcactcattctgcacctccctataaatgaccccagagaagcctccttactcatcctactgagcatcttcgagtacaaaatccatgtcataacatccccataattatcttaatgcttgatccatgtcataacatctccatatttatctcaatgcttaagtggccctaagtccgtctgttaaactcactcccagagccttaagtcctgaaaactgcttcgaggaaccccggcgcttctggacttgatctgcacatgcttagtgtcagctccgaagcggccgctcgcccacaattacacctggtgggtgcccttacaccgcgccggtgcgtgcgtgcgcgtgcgcgtgtgcgtcgaaggagaggcgggctttccaatttccttcagtgactctcaggcaaggaacatggctgtctccttgggagtgtctctacgggagccgccatcttggaagggcggtcatttctgccgcggagcccgcggtcccctactcgatatacccctgtgggattttccagtggccgaggcactgggccatggaatgtaccaccaggcttctcccctccgccgcagcctctaggagttagtcacctccgaggccccggcgggcgaggcgctttgcctcttccgccctcagggtgccctcggcctcaggccgtccctaccggggagcctccgcctctttaaatatcgcccagcccccacccccaggagcaggtcgcgagacgcacccgcccccgcccctgccgccgcactgctctgtgggacgcggcgacccctctcccgcggcggccgggaccccgcgcccaccgcgtctggagcccacctggcggccccactggctacatttccgacctggaccccggccggctgcgggaaacactcggcgtctcggctgtcaccgaacctgtgcagttgccgcggggggagtcgtgcgtgtcagatttaggccaggaagcggaagtcgccagcagcgagagtttaacctctgtgggcgcagagggttgcggggattcagcgcccgggaccgtggatctgtgcagggagtcataggtgtgtgtgacatcagtggtggaacattttggctcgttttcacaattcagtcattatcctttctgctttcctcctggaagcattaaggttgaagttttcttctaaagatcaaagttttgatttgttatattagttcggatttgtttgatttttgtttgtgttcggtttcaagtgctgatttgtaacttttctcccccccccacacacgccttttgacccctgaattatttaaaagtccattgttggagtggcaaacatcctccgagactcaaagggcaaggccatgggcgctttattccggctgctgctccaggaacgtgggaaagcagcggagttttattctaggggaaggaaacaaaggcggccgagtgccagctgcacgtttggtgggatttggtcatcaggggtggacatgctgcccaatggagctgtcggcagtttgacccagcttggtccgtcgcgtcctgttctaggaatcgattattcaaagaaggaatttagagggactgcagaaaatgttacaggtcttaacaccattttgcatttccgcaaacgaacaagaagttaatccctgtgttagtgatttctaagcccatttgccttgtggcccaagaacgttgagtttgaaatttgatgaaacttgccttaaggctcaagtacgaggccagctttcaaaaatggttttgtgccttgattgaaaacactgtatcttctagttgttggatttatcgtactctgcggctctattggttcaagcttgtgcgttgggccttttaaaatgtgtgtttcctgataattcccttcagcttgtcaactgggggtgatgtggcagggagaaagagagagaggagagagagagactgtactggcaggttttccttgtgctattcaatttttgcttcctatgttttgaagttttattattaactgcaggtttcattactgaatagatatagccaaattccttcccccaaaagattataaagtttcctagtcctaccagcaaaatcattaagttcattaaggcaaatcccctccagcgctggatgttgatgctgtctttaattttgtatttttctgactactttgtgcaattgaggattgttttggtctattggccatttggcttttctcttttgcaaatgttcatatcctttgtccagttttctttagggtgatttttccttttcgtatcaatttgtaaacagtgtacaaattacattgtacattagggatattaacagtctgtcagttacactgtacattagggatattacattagagatattaacatctttgtccattaaggatattaaccatctgtcagttacattgcagtatttttccctaaactctttttgtcttttgcattttatgtttttttaaatgtgcaattagaaaaattttatatgggctgggcacagtaatcccagcacccatctctactaaaaataaaaaaaaaaatagccaggcgtggtatctcaactaaaaaaaaaaaaaaaaattgccgggcatggtgttgggcgcttgtaatcccagctactcgggaggttgaggcaggagaatcgcttgaacttgggaagtggagattgcagtgagctgagctcgggccactgcactccagcc

SEQ ID NO: 1564361 - DNA, 4001 bp, Homo sapiens
agaattgcgcttgctgtccaatatggtagccaacagccccatgtgacactttaagtttagtcaaaaatttagtttctcagtaatattagctaaatttcaaatgcttaatagacttcactgcaaaaaggtctattggacagttctgctctagaattccatggtcccaggctaaggaccgtgaatttattaataaatgaacccttatagatctctttgcatttaacccattcccagtttaattccaattgtcatgtgtttctgaatatatgtagatctcaaaagaaatggcgaaggaatactaacaatacttccaaaaaactctgaaagtccatctagctttaagtatctcctaatggccttcgaccaaagtgaacttaggtagagccatggtttgcaaaggcagcaaattgtccatctctcattcttgtcctcaccgagtctgcgtaattcccccagtaaccccatgccattccttccccactcccctccaccatagcattccaagaggatctcctatgtgaaaaatacactgcaatagggaggccattaggaatttgctatgcattcacaacaacggatatttattgagttcatgctatgtgccaggtactgttctaagcattctacatatacttgtcagttaaccctcacccaaggttaggagctgggtactagtattatcccctggatacagatgagggaattgaggtttgaggcttagggggattgaacaacatgtctaaggtcacatggtaaatgccagagggaaatggtgattacgtcaaaatctatattctccagcaatcaaaaggtctaaaaacatcaaaatgttcttggtatagtctttgaggtcacagagacagtcacatacatgtttctacaggtctcaagacctgtatctgcccatgtgccttgggtcctctctctctgcatgtgctgagacagctgctgtagttgtcctcttctctggaggggattcaagggaaaaaaagtactcatgactctcttcctccccagtcaacctaaatcagcactctgtccttgtatccccctttaccatgatggtagcccgactttagcagatcggtttaggtataataacctgctagctgtgtgaccctgacacccagtgcctcttttgtaacagaagataatcatagcatctactttataaaatgttctgcatggatccaattgcatgcgaagcgaatagcagcatgcccggcacagaggaagcactcaattaaagtttattgcttgtcaggagtcattcctagggggcctctatttcccagagtctaggcacctaaccgttgctggagggcatccaggaactgtgctgtttttggctctggacccacccgttaatctgcgccagcctcacagctggtcagcccttccctgactgacccaaaaccttccaccacgtctaccagggaattgacccttcgggtttccttcgatggacccttcccagagaaacgttcatttcactgtgggaccagtgatttctctccaaaccttctcgtagggaatccaccctcatggggcctataagaaaagcgatgtgtgtaaagagagcacttgaggaacggcaagagtgacacgtccctaaaaagtgtaaaagctgattcaaattcggatgctagtgtctcgggcgcggcccctgttcgctcttgggcgacgaggccccgacgcctggaggggagctcccagcccagaaggactcccgggaaggcccggtcgggtcgcagggagtggtggcggggaccctggccggataggggcccaccgcccaccactccttccggcgcccgccgcccggggcacagctggaatcacccagttagcatggccccggccacggaaaggagccccgctacccgcgcccgcgccccagggaacggccacgccctctggccgctcggggactcaccgcctcagcgcccacggttctcccaagctcaccggcaactgcccagggcgcaggcgcgggactgcgctacggactacatctcccggcaggccacacgccgcccgccgggctgtgcgcccacagggatgctgacgtgggaggggctgggactcttcctggcttccaaccagcctcaagctgttttggaagggctcccgtttcctgtttaagcgcttcttagtcgcagggtgttgggtggggcgaaccccgggtcgtgatccaaatgagcgcttctccttgagccttggagtaactggagcgggtggggaccacctttaaatctgttacgacccggtcagtgattcttaaacctggctgtgtggggagaatttgtagggagagcttgttaaaaagtcgtatttcggggctccacccgctaccctgacgcattgaatctcacaggaacccggggattcgcattttaataaaccatcctggagattttgactccggtcgtccgcctgcagttcacagtggctttggatttgctttttagtatccccatcttcaagacctaagcttcgatctagcgaacccgcccattaccctctgccttcaacagccacggaggtctctggggttaaggtttgcctgcgggccccgcctcttgtctttcaattggtccctcgctggtcccgtcctggagccaaattttcttttctgattggtcagctgcgaattgtggctagacctgatccaatggccgcttgatacaatggtgtcgttcgggaaacgcagccctaacgttggtcctaagctgacaaattggtctgtggacgccaaacttccgtgctaggactttctgcgtgtggaccgggggcctagtcctgcgtgggtccaacacagacaggagaaagctgcctgcttttgtgcctcccggaggtcctggtagaagcgaaacggggacaggagctgcagcgtcccaagcccagtgaggcgaagctactggagacagctctgccgggtccaaagttgggctcaccggctggaacttgaaaccggagcacgccggactcctgctgaagccatcatctctctctcctggccccgggcgccttggccggcgggcacaactggtttcggggccaaggtggtctggaagcctgactgtggcgtctggcctgggctcccgcgagcggaaaaggttcccctcctgtgagagggaaactatggaagttcctacgcccggagccagaactcctgctgctcccgcccgacccaaggtctagcttggcggcctcccacctgtgcttctgagggttctgcttccaagaggctgctggtgcccgggacaccagcagtttcgccatgggtgtttcgccatgggagtttcgccatgggtgactttggcctgagatgcgctccatggagcagattctggagttgctggtgttggaggagttcctgactatcctgtcccaggacatccacagcagggtgcagaagctgcaacgggcgagctgtgaagaagctgtaactcttttaaagtatatgtatgacttttaaaagagagagcttgtgaaactgagggaataggtgagtgagagagaggttttatctgccatcttcctcaaggaggcccagcctcccctttattcatagggttctgggtctggtgggtccagaggactgagacatctcgctgtcttaattccccattcagattttcttgattgccctgagtagaccttacacgggccagtgattttttgttgttgttgttgttgttgtcttctctggaaccttcatcctccagatttccccccagtgcagtgaagagtgtgctattgcttttggtttccacggggaggcagtgtcgctgtcatagtgtccgctctggaggtagatcaaagggggctttcaactcctggctctgctccctactagctgtgcgactttgggcaagtgacttttgcttggctgggcttcactttctgcactggtcaaatgcagaaagggtaatagacccttctggggttgtttggaggattaaagggagagcagtatgtccgtaataatcgcactg

SEQ ID NO: 1564362 - DNA, 4001 bp, Homo sapiens
gaggcaggagagtcacttgaatccgggaggcggaggttgcaatgtgctgagatcacgccattgcactccagcctgggcaacagaatgagaccctgtcaaagaaaaaaaaaaaggaaaagaaaagaaaacaaaaaaaaaataccatgtagatcacacattctcactggggggtgatactgcccccaaggggacaaaaattagttcttggaggcaaaacaaaacaaaacaaaacaaaaacaaaaaaaagcttcttagatattacaatgggttgtgaccctccaaagcaaccatagctgacaaaaccttattccttggtatttaatttccttcaccagattttggtattacatgagcagcagtaaccttgagttcaaggaagatccatgaaatatatacaaaattagtgctgcaaaactatggcgaataggtaacattcaggtattaactcacttctcatcccaagcctcacagggtaggccctgctattatcctcatttcgcagtgggaaactgatgcctagagaggtttcatgagttgtctaagatcacactgccagtgatttagagcgaggtggtagaggaacaaaaagtaaagaactcctcccaagctgtcctagcactaagattttcaggcaacaccccttgcttctggatgccctaaaaaattagttatcctcctaaattccacaggacattgtctgttttttttttttttgttttttgttttttgtttttgagatggagtctcgctctgtcgcccaggctggagtgcagtggcgcgatctcggctcactgcaagctccgcctccctggttcactccattctcctgcctcagcctccccagtagctgggactacaggagcccgccaccacgcccagctaatttttttgtaattttagtagagacggggtttcaccgtgttagccaggatggtctcgatttcctgacctcgtgatccggccgcctcggcctcccaaagtgctgggattataggtgtgagccaccacgcccagccgatattgtctgctttttaactgaagaatgtgctttacagttcaaaattaactgaaaatcttcatatttaaagccataaaatgaaaagagaagccaaaagctggaaggagatatttgcaaaacacataccactactaaaggagtggtatcagaatatataaaaacaattcctggccgggcacggtggctcacacctgtaatcccagcactttgggaggccgaggtgggtgtatcacctgaggtcaagagttcgggaccagcctggccaacatggcgaaaccctgtctctactacaaatacaaaaaaatcagccaggcgtggtggcaggcgcctgtaattccagctactcgggaggctgaggtaggataattgctagaacccaggaggtggaggttgcagtgaaccatgatttctccactgcactccagcctgggcgacagagtgagacttcgtctaaaaaaaaaaaaaaaaaaaaaaattcctacaaatcattaagaaaagggcagagagtccaacagaaaaatgaacaaaagacaggcccctcacaaaagaagatctccaagtgatgaatccatataagaaaatgtgctcaaacttattggtcatgagggaaatacaaatcaaaccaccaagttggacttctccatcggaatgtggacaccacaggagcagagatttttgttcattcatgcacatatgattgatctgaaaaagccacccatcatggaccccacagaatgtcaacactgaccccacacacactcccattcttgtcctcatagaccctcatccctcaccccagatccccctatccactcaccccacggatcagcatccctcaccctacagaccacccatcactcaccccagactcccttcacccatcccatagaagccccatcactcacccttacagacatcatcaaacaccgcacagatcccccatcaccccacaaactcccatttgcataacccacatactgttacccctggtcccacaggctcccctatcactgttctccacgtcactcaatcccctcctcaggccctccacttgtctccatccgtcactgatcacatagacccgcagcactcagccaggcccctcaccccggctctgctctcaagccgggcttggctccccgcctgcccaaatgcgttcaacatcccccgaaaggccatttcccttccagtcttcccggagagatgtcagggtgacgagggagcttatctttcggtggctccgaaacagccacgaagccgagctctaccagtaacaaaaatggcgtcattccgccagcgccaggacctctgtcgctggccgtggtctcgcactgcttctggaggctcccattccagccagaggagaggtgcgtttgggggcccgggggagtcctcgtgatatctccgagtttgggtattcggaattgatcctacgaaagcagtgtgaggcttggaagggccgcgacttgtccgggtgagtgggcgttcccggccaccagaagaggcacggcctgagcaaaggcgtggcgacatggcagggtgggaaacggggaaagtgggaaggctggacagagcaccccccgggagattcctccgcagaagcgaattcctaaaacgtctggagaaagggaagagacctttgacatcatgcagcctttcagggggctcacacatacccgcccacttctccccacctggcctcggcgccctgccgccttcctattgttcctgcttggcgtcaggacccgcccccatctgtcactcactgcccaccggtcctccattggctcctttgaacacggaagggcccaccttcacctgtcatttacagcctggacttctgcctgccctagttcaagtaggcttatatggccttttgcagcccgtatcaaaactaaaagagttcatagagtcagaggttcgaggtaaaacctaagggacattggttttagacgacttaacaaagggctggattggaagtcagcccggaacaggattgcagagttaacaaaggttcatgttcgatacaaaacgggaactctgatggttacaatagttaagaaagtcctaggattcaagacctctatcagggtgtatggatggagaaaacattaacaaatatcctgcttgaagatcaaatcagaggggcactggtggtgcaatagtaacccaattccaaagttatttcagagaggccttaaatggaaggttaacttagacccaaatctgagccaagaccagagacccattaaagtcacgtgatgtggttaacagagccccggaattcacagcctataccaaaggggtaatgatggtggaagaattaatcaaggtctgacttcaaagtcaaaccaaatggcattcatgataaaaatgttaactgagggctgggcacagtggctaacacttgcaatctcagaactttgggaggccaaggcgggaggatcacttgaggccaggagttagagaccagcctggccaacatggcaaaaccctatctctactaaaaatacaaaatttagccagatgtggtggcacatgcctgtagtctcagctgcttgggaggctgaggcatgagaatcgcttgaacctgggaggtggaggttgcagtgggccaagactgtgacactgcactccaacctgggggagagacaaaactctgtctcaaaaaataaaaataagaaaaaaatgttaactgagggccgggcacagtggctgacacctgtaatcccaggactttgggaggctgaggcgggaggatcatgtgagcccaggagatcaagaccagtctgggcaacatagtgagactccatctctataaaaataaatgttaactgaggattggggttggtggatacaggagaaggggcacaagtagctaaaaagttagtacagccttgattttctgtacataccaaaggatcatagatggagaggactcaactgaggcctgcagtcagtgtaaagatctgagggatgcaga

SEQ ID NO: 1564363 - DNA, 4001 bp, Homo sapiens
tagagaggtttcatgagttgtctaagatcacactgccagtgatttagagcgaggtggtagaggaacaaaaagtaaagaactcctcccaagctgtcctagcactaagattttcaggcaacaccccttgcttctggatgccctaaaaaattagttatcctcctaaattccacaggacattgtctgttttttttttttttgttttttgttttttgtttttgagatggagtctcgctctgtcgcccaggctggagtgcagtggcgcgatctcggctcactgcaagctccgcctccctggttcactccattctcctgcctcagcctccccagtagctgggactacaggagcccgccaccacgcccagctaatttttttgtaattttagtagagacggggtttcaccgtgttagccaggatggtctcgatttcctgacctcgtgatccggccgcctcggcctcccaaagtgctgggattataggtgtgagccaccacgcccagccgatattgtctgctttttaactgaagaatgtgctttacagttcaaaattaactgaaaatcttcatatttaaagccataaaatgaaaagagaagccaaaagctggaaggagatatttgcaaaacacataccactactaaaggagtggtatcagaatatataaaaacaattcctggccgggcacggtggctcacacctgtaatcccagcactttgggaggccgaggtgggtgtatcacctgaggtcaagagttcgggaccagcctggccaacatggcgaaaccctgtctctactacaaatacaaaaaaatcagccaggcgtggtggcaggcgcctgtaattccagctactcgggaggctgaggtaggataattgctagaacccaggaggtggaggttgcagtgaaccatgatttctccactgcactccagcctgggcgacagagtgagacttcgtctaaaaaaaaaaaaaaaaaaaaaaattcctacaaatcattaagaaaagggcagagagtccaacagaaaaatgaacaaaagacaggcccctcacaaaagaagatctccaagtgatgaatccatataagaaaatgtgctcaaacttattggtcatgagggaaatacaaatcaaaccaccaagttggacttctccatcggaatgtggacaccacaggagcagagatttttgttcattcatgcacatatgattgatctgaaaaagccacccatcatggaccccacagaatgtcaacactgaccccacacacactcccattcttgtcctcatagaccctcatccctcaccccagatccccctatccactcaccccacggatcagcatccctcaccctacagaccacccatcactcaccccagactcccttcacccatcccatagaagccccatcactcacccttacagacatcatcaaacaccgcacagatcccccatcaccccacaaactcccatttgcataacccacatactgttacccctggtcccacaggctcccctatcactgttctccacgtcactcaatcccctcctcaggccctccacttgtctccatccgtcactgatcacatagacccgcagcactcagccaggcccctcaccccggctctgctctcaagccgggcttggctccccgcctgcccaaatgcgttcaacatcccccgaaaggccatttcccttccagtcttcccggagagatgtcagggtgacgagggagcttatctttcggtggctccgaaacagccacgaagccgagctctaccagtaacaaaaatggcgtcattccgccagcgccaggacctctgtcgctggccgtggtctcgcactgcttctggaggctcccattccagccagaggagaggtgcgtttgggggcccgggggagtcctcgtgatatctccgagtttgggtattcggaattgatcctacgaaagcagtgtgaggcttggaagggccgcgacttgtccgggtgagtgggcgttcccggccaccagaagaggcacggcctgagcaaaggcgtggcgacatggcagggtgggaaacggggaaagtgggaaggctggacagagcaccccccgggagattcctccgcagaagcgaattcctaaaacgtctggagaaagggaagagacctttgacatcatgcagcctttcagggggctcacacatacccgcccacttctccccacctggcctcggcgccctgccgccttcctattgttcctgcttggcgtcaggacccgcccccatctgtcactcactgcccaccggtcctccattggctcctttgaacacggaagggcccaccttcacctgtcatttacagcctggacttctgcctgccctagttcaagtaggcttatatggccttttgcagcccgtatcaaaactaaaagagttcatagagtcagaggttcgaggtaaaacctaagggacattggttttagacgacttaacaaagggctggattggaagtcagcccggaacaggattgcagagttaacaaaggttcatgttcgatacaaaacgggaactctgatggttacaatagttaagaaagtcctaggattcaagacctctatcagggtgtatggatggagaaaacattaacaaatatcctgcttgaagatcaaatcagaggggcactggtggtgcaatagtaacccaattccaaagttatttcagagaggccttaaatggaaggttaacttagacccaaatctgagccaagaccagagacccattaaagtcacgtgatgtggttaacagagccccggaattcacagcctataccaaaggggtaatgatggtggaagaattaatcaaggtctgacttcaaagtcaaaccaaatggcattcatgataaaaatgttaactgagggctgggcacagtggctaacacttgcaatctcagaactttgggaggccaaggcgggaggatcacttgaggccaggagttagagaccagcctggccaacatggcaaaaccctatctctactaaaaatacaaaatttagccagatgtggtggcacatgcctgtagtctcagctgcttgggaggctgaggcatgagaatcgcttgaacctgggaggtggaggttgcagtgggccaagactgtgacactgcactccaacctgggggagagacaaaactctgtctcaaaaaataaaaataagaaaaaaatgttaactgagggccgggcacagtggctgacacctgtaatcccaggactttgggaggctgaggcgggaggatcatgtgagcccaggagatcaagaccagtctgggcaacatagtgagactccatctctataaaaataaatgttaactgaggattggggttggtggatacaggagaaggggcacaagtagctaaaaagttagtacagccttgattttctgtacataccaaaggatcatagatggagaggactcaactgaggcctgcagtcagtgtaaagatctgagggatgcagagcgtagtggctcactcctataatcccagcattttgggaggtggaggcaggcagatcacttgaagccaggactcagcatagccaacttggcgaaaacctgtctctactaaaaatacgaaaattacccagacgtggtggtgcatgcctgtaattccagctgcttgggtggccgaagcatgagaatcactagaacctgggaggtggaggttgcagtgagcaagaactgaggggcagtaatggggaaagagttaacagacatgcaaaaagattcacatgtaaattgccctggtgatggaaaagtgaacagaaactcaagcttaacacatagacccaggattattaattttccaccctcaaagccctgaattctctctctagatccaaacccattaatagtggaatggataacagattccccagttcaaggtaaaattaagggttgatttaggttggaagagttaatagaagcccaggttggagagcacagataagagactttgatggtggaattgctaaca

SEQ ID NO: 1564364 - DNA, 4001 bp, Homo sapiens
taacattgtccccactagcttggagcctacagatacaattactttggccatatctttccaaatgatttagtaatgctttttaacattgcaaacttaaatctatcatagtactggaattctgatatattttggtgcttctgcggctgcctaaaaatgaaaaggcatccaaacgaaatgcactatacacttattgtaccttaaaatttcagttcctaaaatgtgaaataattatctaccatttagctgtctgctttaactgtacattgtagtagatttttacctctaggatttgtattgtactttgggaaatcagtggtaaaatatgtttaagaaacagcatgtgactatgcttgagttcacataaaatagcatttttacagctgtattgaaatttaacccttttacacaggttaacatatcaccaaaaaataaaaaaataaaaaccacaatacttttgaaaatgtaacattgcatatttatttcaggaaatcgtcagaggtcacctttaggtcaatttaccacaccagaggaacaaagttgttcaactccagctctgctgaactgagccgcttatccacagtacagtatagaacttgaaggtttttttcccatcaggtcttcagttccaaatactgttatcatccttaataccgtctatgtcttctctggtgtgaatgatgtgatcgaccatgtagggttgaaggaggtggactccgcgttggtggacaaggtgacagtcgtttccatgcaggccaccttctatgatccattgcatctgtttgtgtaaactgagggctcaaggtttcttgattttcggtgaactgaggtaaaatgttaaggttataatggtgagaagcaaattcacttgcagatggattaccattttgagactggggagcacgtagtggaggagaattcatatcaggtggcacctttacaataatatatccagatgatggatcgtaggtcgtggttagagctggcacttggctacgaaccgagttaggagtaactacatcctgaggaggatatggcatttgatggtttactggtgatgatggagatggaggtggcgcataatgctgtttctgaggtataatatgatgaggggacgataccgctggttgactttgacactcaggataatagtcgggaggtgttggcttcttagcaccagaatctgagttattctgaatatgatcaactgttaaattgccatgttttctcgtaaaaatactaacggtttcccactggatgggaaaaggcagacttagagatagttctgggggaggagcctggatatccttatgtggctgattatgttgctcttgtagcatatgttgcacagacggtagtgacaccatggtgtgctgttctggtggaatatagcttagatggtccctgtcttgcagtcttttagggatgtcagagatttcagtttgtggcggagcaatatgaggacgaactttttcaagcgaagcgctggtaacttgttttcgagctctcttatggcggcgtttgatatgagcctgtaagcttttctgagacaagtatgttctcttgcactgctgaacaatactacacatgaagacagaacctcgtttatgcgcctcaattctcagcacaggataacgacagcgcggacatactttatatccgactttgtcatataaattagcacagtgatagcaaaaagcatgcttgcacggaattattcgcccatagattttaataggcaaatcacatttgtcacagaaatgaattggtaaatcatccttttcacctatgatgtttatcttaatgtccccccaacggtaaccaggaatttttttcttttttctcaccagtttaactcctttagagtagtacttcccttctttgttatattcacattcttgttcaccagcaggcatcttgttcatattccttggagttcagacacatatttaggtttgtctacttcctcaaaaatgacgtttaaaggaattcttctgctaacgtgaaggccacccaacgatccagaactatgagtgcctagtaacccattatcaacgtcattaggatccaagtttcggctcacaagggaccgggagtcatgtgccagtaacacgtgcgcattacaacgcatgtgcaccatcttccccagcctaggaggcgaaagtgcgatccgatgcctccccaaccctccactgctttgacgtttaagggcttccttctctcctcacctaccctgtcccaccactctagtgagggaatttgggcagagaaagaaaaagcttcagtgttgaggttgctgatgctgctcttcagtactcaaagagaaaggggtcttcatggaaacagaaactgatgggcgtggggaataaattcccagcaggccctgcagagctttgccttctaggactgacttatttttatcctattgcatttttgtgaactaccttaaatcactcattggaataagataggatgatatgtctgtgtgtgtgcatgtatatatacatacacacaaaatacacataccttttaagattttgtgatttcacgatacagtaagtttaaaatcacctttgtctggaagaagggagcattacatttatctcgtcaaggaaaaatcatgtaaaaggcagtgaatagtgtcaggcgccttggctcactcctgtaatcccagcactttggaaggccgaggcaggcagatcgtttgaggccaggagttccagaccagcctggccaacatggtgaaaacccatctccactaaaaatacaagaattagctaggcatggtggcacgcgcctgtaatctcagctactcaggaggcaggagaatcgcttgagcgtgggaggcagaggttgcagtgagctgagatcgcgtcactgcactccagcctgggcgacagagtgagactctgtctcaaaaaaaaaaaaaaaaaaaaaaaaaaaaaaaaaaaaaaaacaggagtgaatagatggtaacttcactgggctagacattttttagacatttgctgttcttgcttaattttaaaaagggttatgggtatttagcccacatttcctcacatcttaccttgcctctaagtacaaactggatcgtaaaaacagcaacacaccatatttttctgcctccactccacccataattgtggcacctctattctcctgaatgtgcagacattcacccttttagcttcgttggctgtcaacccctactccgtgccctcccctaaaatactagaaaaacatcactgatccatcaaagtgaagtatcttatgagacttactgcagtatgagagaactctgccttaatggtgtctaggcagtgtctcagaggggaaatgacaggataggttattagggactaagttgggtggtttcagggcgggtcttgcaaggcaggcctctaattgggattgggtagattttgtgacgtaatagctgtagattggtgggcatagcaggaggagaatattgaagcaagttttgatggggaaggtggtattcttgttaagtaaactcttttagttggtttacaattttaattttcaggaaaaagtatttcctggagcaagtagctaagtttgcttattctcaacatggattaatatgggaacagaaaactattcccacgtctgttattgttttacacagcgacagagaattatgttggtttcagtactcagttaccacatagcagtgatcattttccttttccctggctctggcttgttgggttgttgactcttttttttttttttttttttttttttttccttccaagtagatgggactataggcatgtgccaccacacctggctaatttttgtatttttagtagagacggggtttcaccacgttggccgggctggtctcaaactcctgacttcaggtgatccacccacctcggccttccaaagtggtgagattacaggcgtgagccaccgcgcctggccaagttgttgactcttgacttcactaatggtgaaaacgcaacaatgcccca

SEQ ID NO: 1564365 - DNA, 4001 bp, Homo sapiens
tttggaggaaggagcccaaccagggctcaaagggccgcagggaaggagaggtgtggggctgggtgggtaacagccaagcactgtcagttctgtgaggggctgaaaaccactgtgcctgcttccctgcatccacctctctaactggccacctaccctgctcccaccccaccacttcctcctttcccatgatttgcattttgattgccatgctcctccttctttggcagattttcaaaagaaagttccagcaaggagattctgtgcagagtaaccatttcatactgcagcaatcactgtgataccatcaggacaacagggttcagctccgtgtagcttagcaggtcatgtcccctggcccactttcattaagcattgaaataaggcagcagagctggatgacagcatacctagagactactctgaaattctataaactaaaaatatattttctgcactttggtcaggatgaacggacactcagcatttcccctggaagcaggtgcctggttgatggtgtggggctgactcaaattcagaaatagccaatggcaagagaaggaagcatgggggtgcacaaataggtgtgctaggagaggccaatcctctgtggctggctgtgatccttcccagcctcatcccgcctttgcaggtactacagcagggcacctgcccccatgggggacatccatgcctccatccacctgtgactttcacctgtccctcctccagcaggaatcaaactgcactgtcacatggtcctccatggcacctggaagtagagccagctttgctctgtctcagctgaagtgagggacaaaggccactacgggtccagctcttctaggacctgctgtcccgtgagcctcctttgctctgaggatctgggtctgggctcttgctgaggcttctcctccaactcgcctcagctcagcgtacctctcttgtgtccaaggcggcaggaccaagggattcagagacaaacacaccccagttggggccatcactatagcactagatctctgcctgtgacccagggaactcacctcttcctggggcctcagcctaagtcttctgcgactaagtggggaagccgaggcacagataaactggagtctgaaatcggtgagcagtggtctcaggtctgcactctgaccctggaaacacaatgaccacaggagattcaattagcaacacctatgctcccttccatgcagtgaagttgagtgaaacccaaaggtttttacccaacagaagagggacaacccctcattctagttttaagagttaacattcatgcacagctcaattatcctcagtgagcgaaaccctgccttcctgagtccgggctttggaatcaactgactggctgctgtgccacttttattcactgaagaaatgattgccttccatgagccggttctccgtgttgcaaatccatcagtgaacaaaatctcaaattcccagctccagatttctagtctggaggaagagacacactggaaacaataaacatgataaacaaagtacaggaaaagaaaaagaaaaaggattcctcgggtttgctacctacgggactttggacaggttgccaagccacactgtaccgttttctctctataacatgaaaataatcatcgtaacacctcacagggctcctgctaatgtgaaacatttgcaagagtgtctggcagttaccaccgggtgaggatacaagcgctgagtgactcaatcaattagtcactcgctggccccgaacctcgcccccaacactcacgcccaccgcctgtgtcactcaatccccacaaggacgctcacccgtggccccatgaccccacggccccgtaaactcccgtcattcctcccgtccccccttcccccgatcaaaaccatcaccacctcaccctcccgcttacttcactgccgacagcctgaaacctcaggggcggatgacaacagccagtgtgaacgaagcgccaccctccgggtcagccgagcatttccgcttcccacagccccctgggaacgtgaagtcaaagcaatgcgcacgcgcagtggctttgaaggcggggcaacaaagcctgtggccgatgtggcgctcctcggcccgcgcttcagtggttatgacagtgttcgctctaaggggagaaggaatgtgtgaccatttccaacggtaagtcgtacaaaaggtccggggaggcgtacctgggcggcgagaggcgagagaactccgcgcgggctttccagtgcccaggcccctgccggctccgaagccgaaatcccttcttccacttcgttctcttgcagtggacgtggggtgttcccacccctctgtccccaaggccactgtttctgtcttccgctcctaggaataggaaaaagagtcgcgcctctggcatctgtggcagctccagagcgcggccctctagggtccaggcaggccacatggagcggggccctaggcctggctcagagcgtcctaagagcaacaggtctggctcagtcggggaagtggcctggaagaggggctttggagccgggcttcagagccagcaacctcccgaagtgagggaagaaagcctcattctgattgttctctacccagtggtggggctccggttcctaggatcttagacaccctgggagaatctggattttactttttagcggagaggtgttttctctgagaatgccagccagtggcaacatggcccgctaaaaaggcctgtagtaaacttgaggaaagttttctgtttcctgtctgggtctgggagaaagagaacaagtgttgttctccatgcttactatgcctgcctggtcaccaagcgggcctctttgggtcaagtatgacagagtctccctcaggtacacagcaaacccttctgtgctagagccagctggtgccagacactgttcatagatgtgtccaagacatttgtgtaatctatcagacacgtatttaatttccatttgaacatgagtgtttttcctctttctctttctcctctcaggttaacttgcattccccagatagtttggatgagttacaacctaaatctgcaaactcaatacagccagaccctgggaagtgactctctccaagcctcctgtacaagtcccaggaaaagagcctgttttcccttggacatgtgagcagtgaattactgctcattcagaatttcatgtgtatgtgttactgatggccaggtttagagataccaacctatttatttctagaggagaggtgatttgataaccttttcagatatcactatcagtaggcagaaaagggttaatagtatgatagggttaatatgtcctgaggagagtaaagaaattgcaaactgcagaagcacctgatctgtggccctggccagcatctctccatatcctgattctgtaagatcaagtgtttatgcagaaagagaagggactgatgatttgaatgtgaccagatgcagggcatgcccttattgccatgccagcatttgctattcatgatgttagtattcaaaaatcaagaaacacccttcctgggccattggtgtctactaatccattggaagaaaagactggaatccaccacttactagcttcttgggcctcagtcccctcttttctgccatagctaaggaccacctaacctagatggctgttgttattgttcaaagggacatctttagagcctcaagcccaggaatagcccgtggcaggcacctggtaaatgttagttttcattgtcctatcccaacactatgaaacatgcagcactctctgcaactgcccctgtggatttccataggcaggagagtatccagtgttgagtggagctggtattctcagaaacgaagcccctttcctcattttgcgccaatctcttcagtcatttttaccctagtagtataatgctttgtcaaagtcactgtcatctgatgttaacagttgttttcgccagatgacttttcaaaaggtaacttcaccataataccggttaatgtgataaa

SEQ ID NO: 1564366 - DNA, 4001 bp, Homo sapiens
ttttctcacataaagtaaaatctgcagcaatttctttttatttttccttctgtgctatgttattttctttgggaaaacgctctctttacctattataaaaatacattcaaaatcagatactttaaaatattttaaactaagtttcttacacaacttaatatttttctttacacctgaacttgcatagtgaggctgggaagggttcatatgctcaaatctgtagtaatgttaaaagcaacccaacggattccaacaaaaacaactactcactacattagcaacgttattatacttagaatgctaccacttgattaaaccaaaatcttctctaaagcacatcttaaaaatcacaaacaacaccttattttagaaagtgaaagagaatcaagggcaagctttatccttgccaaatccatactgaaaagtctgcactagcactcaatgaagtgtaaaaattacaacacatagtgcaactattataaaagtattacactgtgtgaataccaaataaataaaccggagtatctttccccacataggaagtttcaataaaatcaataataaatgaggtatgaaaacagcagtgtgttaagtatttaataaccattagagatagctaggcttcttggtcttctctaagtgtatctcacatccttattgaatggagataacccaccaagtacgtctcaagtaaacatctttccattaatgcatggggagtagaaatcacaaaaagaaaatctgtctcttctaacatagctcattcaggacctagcttcttagtgatgtcaatagggtgacggatagatgagaaatggtaaggcggcagaacaagagaatgcgaaagtagtatttgcagagatgggagacaaaggagccctggcaagtagcagtattgcagctttggacgcagccctcttcccgcataagtctccttttcccacgaccatgccaagtttcaatcatttcgagcagaatgcacacacgtgccctctgaggtattacccatctgactagatcttaaacctaacaagagaaccttcgcagcagaaaggaagagaccgatgagacaagaataccctttcccctcctccctcctctcacttggtgcagcggtcgccaccgctgctacccacgccgtgctgcccagcccctcagcctcctccagcttcctctgccccgctacgtgggagacggttgggaaccaaaatggtggtgttttagtgtaggcgacagttgtcgcacacgccccccccctccccccaactcccaggctctgacggctcccaatcccctaaaatgccgattcggtgccacttcctcgcacacgccgccatccctcgcgcattccaaaggttactattagctcggtcagggggcgggggcgaggcgactggggcgccagtgaaaagaatatggggtggagggagagctgagagaaactgccagggggacgctgcattcttcacttcaccgttttgttttccgccattttaccgtcaccctaaaccaccgacggtctcaacgacggctctagctccctggggctctggcctagggaaagaggaggttggctaagggggaaaacccttacttccctcaattcctccagcccccggctgcggctgaagaggaaaactccgcccgaggcgggaggaaagctcagggactggacgccacttccattgttcccttcgccctacgctacacgctgggtgtgagcctctcctcccctcagacaagaaacactgaacgcggtggatccacgtccctctagtttctcgtcaggagtctccttacctgctgctgcagctacagctgccgccgccgctgccgccgccgctgccgccgccgccgccgccgccgcctccgtgccgccagtcggactgtgaccgcgctctggatggctgcggggggcggcagctgtggatcccttaaggtcctcacattcgggtttccgaggttccgcagcccgagccaatcacaatctactctgcgtctgggaggcgcgccgcctcattctcctttatattgctgctgacatgctgaggttgcattacgtcacgctacccttgctgcagggtagggggccaaaggggggtctcgcgcacgcgcgcgcgcgggagatcgaggcgcccgcgctaggttagtgcgagaccccgccggcttgaggcgggggctgagcgccggccaagtccaagtgcgcaagcccagatctcggcgcgcccctgaggagtttctgtgggaagattttctgttttccaggtttcccaagggaaacgaagaaagggaggaggataatcaatgactgaacctctaatagatgttggacgacgttaaaaaaaaaatgtatcggccctaccctcgaggatttgacaaattagactgaccagagtaataagaggtatgcctcaccccaataaaacctgtgtgtgttgcagtttcccttcctccctcccttcatttcttttctattttgtaatggtagacaattcgatgaagaaagtgaaggagagtgaagaaaggtatagaaaggaaaaggtgaacaagggacctcaatgaagtggacactaaatatctcatgaatgtgtcactttcagcttctgtctgcaaaaagtgggaggacagtgagaaattcattgggtgagggatggggaaaagagtgatgagatgtgatgaaaggtaggtggggactagattgcgtaagcaaagagtcttatgttttgcctattttagctttaattctataagcatttggaatcaataacagtgtttaagcagggaaaggataggatcctaaagaaagtaactctttatctttgcaaatcatttgaatatttacaaataaagcatgttattattctagattctagatacattcttcaggtctctataacctaatataccactaaagtttttgatagaattatagaagatgtgaaagtcctagcacagtacctggctcatagtagaccaggagtcggcaaactttccctatgaagggccggatagtaaatattttatttttgtaaataaatagtagtaagcaaaatattttttgagggctatagcgtctctgtcacaactactctgctctgccattgtagccccaaagtggccatagacacgttcagcagaatgaggagatataatttccaagcttgaaaagggtgaaattcagttattactaaaacgtgaagtatgataaatagatagataagagattggtaaattaccttccattgtgaggttcaaagtttctctgcaagaaatgcaatttctgcaaagcccgtacacagtgggcacagagaaggagcatgctcgtgtgcgcgcatgtgatgtgtgtgtgtatgtgcatgtgtaatgatggtaaaatatttgttttccttacttttgagttccagggagagataagtgagcatggctgtgttccagtagaactttatttatgaacgctgacatttgaattttatttcatcttaatgcgcagtgaaaaattattcttctttgaattttttcaacaattaaaaatgtaaaaatcactcttagtcataggccatagaataacaggcagcagtccagatttggcttgtgggccatagtttgcccacctctgtaggtttcatttacttaagcttttattttccattctagaagaagaaagatatttttatgagtgtgtcctcatacatgacatttttctatgttggatagtctggcaaatactacttatggtcttgtcccatggcaattccaacaggacactcaaagaagaaagctgagaaagatgtggggtttttacatcaatcacctttgtgaatggtacactgtgggagataatttttaaaacctgaaggccatcctgctcttccctctttctccaaacatctagtcaatgaaaatatcctgagaattcttcctctttaatatccgtggaattaatcccccttttacctaacatcattaccttgttcaggttcacatgccttcttaactggatt

SEQ ID NO: 1564367 - DNA, 4001 bp, Homo sapiens
ttactctgactggagttctctttcacagacccactagtctcccacatagcccccatctgggggcttgagcatgaatccgcgttcagctctctcatcgccatttgctctaggaacagttttactcttgtatgtgacactgacacccacctggtaccacctttgacaaatcagggtgcatcaggttggtaccaaatcaatgaattgttcttcccaagagcactgagggagagcagaagaaaagtacatgtcaagaagaaaatcacatgacacatatttacttgctatttattgttagaggaaaatgaagagaaaagttcctgtctggcttcttctttaaaatcaactgccaagaattagaacattcatgattagattactcaggaggtaagtttctctccttttctttgtttttcaactttgaaacaaagcacagctaagagaagacaaatgtcaatcaatgtatttcctgtttttttttttaacagttgaggaaagattggtgggtgagaaaactggcaccaattggccaaaaggagctttgagattatccaatacttaatctgtgggtttcctgtcctatattggcaaatagggcctatttgagtttctcgaaactttaacagatcatcccaatcatttttctttagtcagaggaaaaacagtttctatatcccttcatctcatttagattgaagccttttactaaatggaactcttaatattcccttttatactgtatcaatgctggtaggagaactgagacagcaagatcagagtagaagtaaagtaattagagaaaaagtaagcaaatgccctcccgctaagcaagcagatcatcaacatttgatgtggcagggtgtagtacttcttcgaaagacttataaagggcactgcacaggtttgtacttgcgtattaaattttttgtttactttaactggaaaaatttacagatggtcttcctttacatatatacaaatgtcaggtggttaaaaacaaaaaagaaagagagatggtgatgattaaggttctttatagatgggaagggtcttagtaatggtaacctttctcctgacttaacatgtcctcaaaactgattttccctgaggtgatccagcagaaacagtaacaaaattctttcaaggatgccacaggtattcaaaaaaatggttggctccttgctgaccattcaggctcaggaggtacaggaacacttcttacatttttttgtcagcagaagccattgtctttaatgttgaaatgaccctttctttggtgttatgttcataagccatcaaaaatcaggaagtttcgctgagtgtggtggtagacattactgccccaaatccccatccctgattcactacaacttatagatcaaccacagggatgcccacaagaactctgaacgtgggcaacctttgagtgtgcttcactagtatccctgggttatatttgtacatccggtagaaagaagttgcttccataggtaagaagtggctgtaggagcctgcggccaggcggcctcgctgtggacaactcccaccagctctccaggcgacctgccgcctgtcagtggcgccactgcccactgaaaaatactgtatcacatcccccaccctcattccctgctacgcagcagccccaaaggctgcaactggcaggagcggccggtatttctcaggggatcgctaaaacgaatctaaagagaaaatcagcttctcggttaccttcagtcagctctggcttccccggaggccactttcctcttcctcggctcgactacgcctctgcctctgtggccacgcctccctgctgctctgggtagcaaagctctccgctgctgcaccactaggggaagcgacgtcaggaaagcgcgggatgcctggcgagtgaagctccaagatgtggggagtcttggaatatcagttccctcattcgatccctccacctcccgaagacctgaccccgactctctcttccagggtcgagttctgtggacctgaaccggaatcaaccagaaaatgaaagatgcatttccggtggctttgtgacagctacgcccagctatccccctccctctacctgcgaagtctcagcctagccaagttaggaactgtcccgggggtcctttccatcccagaagaaccagcctcctgctccagttaggtcctggatgcaagaaagagttaatgctaccgagtctctagccctgctggaagcctagaggagcccctcaaatggctcttccctgggagccatgtagcttacagactcctggtgccaaggtctcctatccctgatttgccacgtattgtgcatccagattgttcctgctggcttcctggcggctggcagcccattctaccaggagcctcacccagtaagagatgccacctcaaaggtctaggggccacggaagagtggctcacaaagtcagaaccagttcagcactcttgtgggcagagctgtgttctgggccttcctgagtcccagccagagagagctccagctgtagtcactagacttatcaaaagcctccttgagtaaaaggcaatttgatcctggtcaagcctctcgctagatcagaaacaacagtcccttacattttcaaaaccatattctagttatcagacatgtgctccccaaccattatcttgttttattcttgttaggtagattttaaccttttgagataggtcccatttatacttctctttgacatataaataatttgaaatggtatgacatgacatgacttcacctactacttcatgttcagggtcacatagattaccagtggcagattttagccaggaatttaggtatcctgttgtcatatcctgtcctttttctactacattatgctttccctggaggacagaaatcttgcttccatctttatctcctgcagtgcttagcatagttctctgggcaaggtatttcatatttacagaatcatctttctaagaagctgaatatcttgggttgtcagtattctccaagttttcagtatttaccaagtgttgagccatttggacaaaaattgccaatgtgaatctaaacaggagaaactgggtgtagcttagttttacaatggggatgaaactgacatattttggaagccagtgtgaaaaaccactcagacaagccaaagagatgtctgcatgtccaggaggaaagtaaaaagcacctgtttgattctatatataaatgcagatgacactaagttaaagtcaatcatcattcaaaatcgaagctccccaaaggtgtgtaaaaggacacagtgcattatctatgatatataaacttagtaaaaatgtttggttcatcagagcatcgtcttcagaatggttctttcaaaactatattcttcaagtcaggcattttcaacataacattttataactcaatgaagaggaagtcagggcactgtgacttctgtataatccccaggcttacatttcaatgaatcactaaccagtgaggatggtcagataaaagtcattttctttcccctaaacacttcaaccttgattcacccaataaatcaaggtgtgatcttgagctgcaaacaactttataggtggaagcaacttaaagagaatattgtaattttgaataaggtcatgatgagcaagataaagaaggaaaaagagtttccaaagtcaaacccacaaaccaagaatgcgtaatttttaagtgagcaaagttgagatggagtaaaacaaacaactatagcaaatacctaagacgtctttacagaaaggaatctgaaaatgatgaaggcttaaccagtaaacatttctcatggtctggaaactggaagtctgacatcagggtgccagcattgttgttgggtttatggtaagggtcttcttcctagtcatgtcttcacaaggccttttcattgtgtgtatatgcaaagagacagactgagatctgatgtctttttttctttttttccataagggcattaatcccatcatgggggctccatact

SEQ ID NO: 1564368 - DNA, 4001 bp, Homo sapiens
atcacctttctctttcacaagacaacacactagtctgttacactgatgacatgctaattagacctagtgaacaagaagtagcaactactctacacttcagggctcctctaagtatccattggctccagtttgaaatctcagtatccattggctcaatgactttcatgctgttttgtaaggaaaaggctcttctgaaaacacttctgtgctaggtccatggtgtatgatctaggaaccaacctgctatcacttatcatcatgacagggctcgatagaaaagaaaaattatgacaggaatctgcgtgtaaatcttcaatagaaaaccagagtctgtccatttggacccaacaagagaaagggatggtttaaactcaaggtttttatgatgccatgacccagagtgaatgtgtgtatgtgcttgtgtggagggtgtggggagaaagcccatttcagtacacacatgtcccccataggtcttcggttcctcccccacattctccagctgctcctgttcctctcaattagacaagcttacttgggtggccctggggcaatgaccccaaagcctcagtgccaaactgtttaagttcacaattaactgagacccatctctgcagaggagaccagactgctgcccctaacctaacagcagctcacagtttcaagcactagctgtgtgccagcagtgcgattattacggacatactgctctccctttaatcctccaaacaaccccagaagggtctattaccctttctgcatttgaccagtgcagaaagtgaagcccagccaagcaaaagtcacttgcccaaagtcgcacagctagtagggagcagagccaggagttgaaagccccctttgatctacctccagagcggacactatgacagcgacactgcctccccgtggaaaccaaaagcaatagcacactcttcactgcactggggggaaatctggaggatgaaggttccagagaagacaacaacaacaacaacaacaaaaaatcactggcccgtgtaaggtctactcagggcaatcaagaaaatctgaatggggaattaagacagcgagatgtctcagtcctctggacccaccagacccagaaccctatgaataaaggggaggctgggcctccttgaggaagatggcagataaaacctctctctcactcacctattccctcagtttcacaagctctctcttttaaaagtcatacatatactttaaaagagttacagcttcttcacagctcgcccgttgcagcttctgcaccctgctgtggatgtcctgggacaggatagtcaggaactcctccaacaccagcaactccagaatctgctccatggagcgcatctcaggccaaagtcacccatggcgaaactcccatggcgaaacacccatggcgaaactgctggtgtcccgggcaccagcagcctcttggaagcagaaccctcagaagcacaggtgggaggccgccaagctagaccttgggtcgggcgggagcagcaggagttctggctccgggcgtaggaacttccatagtttccctctcacaggaggggaaccttttccgctcgcgggagcccaggccagacgccacagtcaggcttccagaccaccttggccccgaaaccagttgtgcccgccggccaaggcgcccggggccaggagagagagatgatggcttcagcaggagtccggcgtgctccggtttcaagttccagccggtgagcccaactttggacccggcagagctgtctccagtagcttcgcctcactgggcttgggacgctgcagctcctgtccccgtttcgcttctaccaggacctccgggaggcacaaaagcaggcagctttctcctgtctgtgttggacccacgcaggactaggcccccggtccacacgcagaaagtcctagcacggaagtttggcgtccacagaccaatttgtcagcttaggaccaacgttagggctgcgtttcccgaacgacaccattgtatcaagcggccattggatcaggtctagccacaattcgcagctgaccaatcagaaaagaaaatttggctccaggacgggaccagcgagggaccaattgaaagacaagaggcggggcccgcaggcaaaccttaaccccagagacctccgtggctgttgaaggcagagggtaatgggcgggttcgctagatcgaagcttaggtcttgaagatggggatactaaaaagcaaatccaaagccactgtgaactgcaggcggacgaccggagtcaaaatctccaggatggtttattaaaatgcgaatccccgggttcctgtgagattcaatgcgtcagggtagcgggtggagccccgaaatacgactttttaacaagctctccctacaaattctccccacacagccaggtttaagaatcactgaccgggtcgtaacagatttaaaggtggtccccacccgctccagttactccaaggctcaaggagaagcgctcatttggatcacgacccggggttcgccccacccaacaccctgcgactaagaagcgcttaaacaggaaacgggagcccttccaaaacagcttgaggctggttggaagccaggaagagtcccagcccctcccacgtcagcatccctgtgggcgcacagcccggcgggcggcgtgtggcctgccgggagatgtagtccgtagcgcagtcccgcgcctgcgccctgggcagttgccggtgagcttgggagaaccgtgggcgctgaggcggtgagtccccgagcggccagagggcgtggccgttccctggggcgcgggcgcgggtagcggggctcctttccgtggccggggccatgctaactgggtgattccagctgtgccccgggcggcgggcgccggaaggagtggtgggcggtgggcccctatccggccagggtccccgccaccactccctgcgacccgaccgggccttcccgggagtccttctgggctgggagctcccctccaggcgtcggggcctcgtcgcccaagagcgaacaggggccgcgcccgagacactagcatccgaatttgaatcagcttttacactttttagggacgtgtcactcttgccgttcctcaagtgctctctttacacacatcgcttttcttataggccccatgagggtggattccctacgagaaggtttggagagaaatcactggtcccacagtgaaatgaacgtttctctgggaagggtccatcgaaggaaacccgaagggtcaattccctggtagacgtggtggaaggttttgggtcagtcagggaagggctgaccagctgtgaggctggcgcagattaacgggtgggtccagagccaaaaacagcacagttcctggatgccctccagcaacggttaggtgcctagactctgggaaatagaggccccctaggaatgactcctgacaagcaataaactttaattgagtgcttcctctgtgccgggcatgctgctattcgcttcgcatgcaattggatccatgcagaacattttataaagtagatgctatgattatcttctgttacaaaagaggcactgggtgtcagggtcacacagctagcaggttattatacctaaaccgatctgctaaagtcgggctaccatcatggtaaagggggatacaaggacagagtgctgatttaggttgactggggaggaagagagtcatgagtactttttttcccttgaatcccctccagagaagaggacaactacagcagctgtctcagcacatgcagagagagaggacccaaggcacatgggcagatacaggtcttgagacctgtagaaacatgtatgtgactgtctctgtgacctcaaagactataccaagaacattttgatgtttttagaccttttgattgctggagaatatagattttgacgtaatcaccatttccctctggcatttaccatgtgaccttagacatgttgttcaatccccctaagcctcaaacctcaattccctcatctgtatccagg

SEQ ID NO: 1564369 - DNA, 4001 bp, Homo sapiens
aggtggaagaatcacttgaggctgggaggtcaaggctgcagtaagccatggtcacaccactgcattccagcctgaggaacagagtgagagcctgtctcaaaaataaaaaataaaaccagacaaagatagtataaaaaagaaaactatagacaaatatttcccatgaacttagatgcaaaaatcctcaaaaaagcattagctaatcaattccttcaatatatccaaagaattatacatcacaaccaagtagggtttattccaggaatgtaagactagttcaatattcaaaaatcaatcagcataaccctccatactgacaagctaaaaaagaaaaaaaatcacaagatcatcaaaattcagagtgttgatgaaattcaacacccattcacgataaaaactacttttgaaattaaaaatagaggggaacttcctcaaccaaaaaagagggtccaaaaaaagaaagccctacagctaaaatcatacttaatggtaaaaggttgaatattttccccctaagactgaaaacaatgcaaagatgtccactctcttattcaacatagtactggaacttcttgccagtgtaataagggaagaaaagcagaggtataaagattggaaagaaagaaataaaactatccctgtttgtatatgacatgattgctcatgcagaaaatccaaggaatctgccaaaaaaggtgtaaaacctaataattgagctcagcaagattgcaggatacaagaccaacagacaaaactcaattgtattcctatatataagcaacaatttaaaagataacaccatttatgaccactccaaaacaattaaatacttaggtataaattgaataagacatgtacagaacttgggtgatgaaaattaaaatacaccatttatagaaattttaaaagatctaaataaatagagagacatactatgtatatggattggaagacttggcacagttaagacttaacttcttcccgagttggtatacaggtttaatgcaattcctatcaaaatccaagcaagatgctttgtagatagagacaagattttctaaaatgcatataggaaaggcaagggaaccagaggcattaaaacaattttgaaaaagaataaagtgagaggaatcactctatccaattcaagacagcaaggtagtactggcagagggatagacacatagacaatgaactgaatagcaaacccagaaagagcccacacacaagtatggccaacttatttttgacaatggtgaaagacaagtcaatggaggaaagatagtcttttcaacaaatggtgcttcagtctggacatccataagcaaattaatgcacctcgacctaagtctcatactttatacaaaaagtaactcacagaggatcacagacagcagtaaggagacacagacaaatcaccatcacagtggagaatttctctctcctcgaagtaatagaagaagcagacaaaaaaggatagattttctatgacacaattgacgactaaataattaaatattattttcaagttatatatagaacgtttctaaaaattcaccacggactaggccataagtctccttatatttcaaggaatgagcttcacgtagatatttttctaacacagaaaactaaggttagagatccattacagagataaacttttgcacactgaaaccccacttttgaataactcccgggtaaaagacaaatgaatacaagttaacactcttaaaaaacataatgctccaaacccaatggggcttagaatgaactttaagaccttaacggtgatgttagaaaagagaaaagcctgcaaaatgatgagtgaatcatccaactcaagttagataaacgattccatcactggccacacagaatcgcccagcactcaccctccccggccccccatcacctccacatccctgggcactgaacgtcgaatcctcctgacaactatcaaaccccggctgagaaccggcgagaaccgcagccgcttccggtcactacccctagcaccgccctttttcggggtttgggacttcacatgaatgagggaagcggaggttccgcgcgtgcgcaaaaccacctttgaagctgctgttagccaggagtcaacatggagaagttacggaagtgggtgctttgggacgttcggtacccctcggcggcgtggtcaggtggggaacatggccgcgcccacgtcgcgcttccccatgggatacaccatgttggaggagtgtccatccgtattgaggatgaggacacctctgaactcacagagcaggctgtgagtttagagctgtctgctctaaactcaggtggagctgtcccgctggtggcagggagcacgggtggggacgtttctctgggcgggctaactggaggagggggtctttggacctgtagtctatggatctgtgtgataccgctccgagaaactgaagggcctcttggaaagaatcaggggcggccgcggctatctcctggcagataccacaggatgagaagcggggagatgtcaggctggttacaggcttctcctaggacataccacaaggggaggaggaggaggagaaatcatggttatgcaagccctcctaggatatgccatgaggtgggaaaaagggagaactcagagtgctgggttcccctcctgctgtgcctgtggggcttggatgcgaggtttgaatgctgcagcaatttaccttatctcccactccatctaccccagctaaaaagggactacgtagtaccaatactaataatttttaatgtgtccttagtccaatgcaatatgtcaataaaaatctttaggaaactttattatttttatttcctcatgaagtaaaatatatgtggtcatggtgcccttactttggaaatgtagctttaatacaaggctctgcttctacccttcaaccagtttgctgctccatatcacctccaatgtgtaaattctggagatgcccctgccctctgggagatgtcactggagcagaaggggaagaagtcgtgcagtccttcacctaagaatgcctattcatccttcaaaatcaagttcaaatatctcctcctccagagaatcctgacagagctagaagcctgtgtgccctcctgaaagcctttctgaatcctcaggtgaaaaaaatattttgagaggacctggtgtaggctgaagtgtggacttgctgggggctctcaatccagtcttatcccctctggccctcggtttaacaatctcgaaggttagaggtgtcctagtccaattagcctcaaactaatttttagtctgacagatccagcaatcaataagggagactgcacaccaggggcaccatgggcagctcactaagcaaaggaaaagatagagttcttataggattttgaggaatagtggagttcagatgaaattaaatgaagcagtgttttagtgggctcaaaggaaagcagggctgtatgtaaagggtaattgtcaggtctggactgtgaagtgaacccagagtgctgtttccttggaaacaatttagatgtagaattttgtgtccccagataactcttgcctaaagctttgcacctgggttgaaaattgaatcttgcttctctgtctggaagtgacttagaatctcccatgagaatcagatgtttccctcttactgatatcatttcaaacagcaaagtttctgatagtctatgattgtagagaacaaagtttctcattgaccaagaaagcaataggcacttaaagtaggggttctttatggcattacaactgcagcctgtccttagaagaaataatgtttcctgtgaattttgcatttggctttatatgtgtctgttcttccatcctgatgaatagcaaggcagatttttatagtccgattttcattttaatttttttagagagttggtatctttgtccattttctgctactgtaacagaatatcacagattgggtaatttataaagaaaataagcttatttggctcatagttctgga

SEQ ID NO: 1564370 - DNA, 4001 bp, Homo sapiens
aatgtatttttatttgtttgtttgttttttgagacagaatctcactctgttgcccaaactgaagtgcagtggcaggatctcggctcactgcaacctctgcctcccaggttcaactgatcctcttgcctcagcctcctgagtagctgggattacaggcacctgccaccaagcccagctaatcttgtatttttagtagaggcagggtttcatcatgttggccaggcaggtctcgaacccctgacctcaggtgatccatctgcctcggctttccaaagtgctgggatttcaggcatgagccaccacgcgcccagcccatatattgttttatagtcaaacaatggcttcaggtcaggtgtggtggctcatgcctataatcccagcactttgggaggccgaggtggaaggattgcttgaggccaggagttcgagaccagcccaggcaacacagtgaaatcccgtctctacgaaaattttaaaaattagccaggtgggccaggggcggtagctcacgcctttaatcccagcactttgggaggctgaggtgggtggatcacctgaggtcagaagttcgaaaccagcctggccaacatgatggggtttcaccccatctctactaaaaatacaaaaattagccgggtgtggttgcgcacgcctgtaatcccagctactcgggaggctgcagcaggagaactgcttgaacccagggggcggaggctgcagtgagccaagatcgtgccactgcactccagcctgggcaacagagcgagactccgtctcaaaaaaaaaaaaaaaaaaaaagaaaagaaaagaaaaaattagccaggtgtggtggtgaatgcctgtagtcccagctactagggaggctgaggtgggaggactgcttgagcctgggaggtggaggctgctgtgagccgtggttgtgcacatccctcctgggcaacagaacaagaccctgtctcaaaaataaataaatgagcttcataactagtattatgttgatatatatttgaataacataataatttgggtaaaccaagggtctcatattagtcaagtttgagaaaaacttgcaaaacgtctaattaataccttcaactcctgctggttttacgaagaaaaacattcaccgaatacttactacgtgtgcaaggactgtgctagctgctgtaattcatgaagcttgcaactgtaatattagatactttataagttacacagaatcagtgggcgatcattcaccaagacttcctcttcctgcctttagtatgttaacattgtttctgacatgtgtttctaaataactacttgggggcagaagtcacagctatttttcctccgacacaatatttgacttccttctgacactggggcttcaagttagggctggagtggacagagcaatttcacaacacagaaaacagaataaagagtccatcacctgagtctctcagtcgagcaagttcctgccgacgtttctttcgtttctccttcttcagggcggccctgtactttttgtggctggaagattaagacatatacacgacgatcagcggctacaatgcagcgctgcccgagctccccgctcctctgtgcccaatgaaaggaaatagttcgggtgctgaggagagaaaccttgcttcctgtattttaattacagaacagccatctatcatcgcctcatcctcccactcccagacagttcttctccatccgccaacctgatcctctcctcgcttgcctgagccacagccgcccgtgcaagtccggggagggcaccagagcgcgcaccaggaaggaatggagctgccgcggtggctcacttagcttggcccagcttctcttttcttcctgccaccacatcctccatgcccacgatcggcccgctcgcctgctcatctccccgtacggcgcttaccttggtttctcgggaaacgtcatcttctcgggcgcagccatcttgccggcaccgccccgcccctccaggtctggcaggaaagggcgggcctaagagtcgagacgggcacgcgcaggcgcgggtaccgagcaacctccaccagcgtgggacttgaaacggaaagccggaggtacccttcggcggctcgtcttccagaaccctgctcaaataaatacctccttccagcaaaaatactctggggcttttaccccgccctagaagtaattgtcgcttcagcacttgcccagtgctgtatcactgtctccctcctcgccctagcaggacgtgttgtggctaggcggttaaagtcgtactctgccgcttttctcagcatccactcatgaagtcacatcgcgcacagagctgctcgcccggctttatttccgacctgtccaggttccgcgtccttccgccgatccacctatcagcgcctcagacaaagctccagacttcgctccctgccagtcacacctgttctggtcccttaagcaaacctaactcccagggctgcaaagctgttacctctgcccctgaggagtttacaatcgagggggcagagaagaaccaatacataatatgatgcaggcaaagatgaagtttacctaacatagtccaccaagggattcagggagagctctcttttttttccttttttctttttttttcagtatcacatgcgactcaactgcagtatcagggacagctttctgatgctaagagttgagtttggaaagaagatgccctttacccagaaggagaagggtgggaatgcagttacagtcagatcagcataagcaaaggcgctgaaaggtgaaagtggaatatgctgggaacagcaagaattttggcaatcgaatttatttatttattcatttcttatatattagagacagggtcttgtctttcacccaggttggagtgcagtggcgcaatcacgactcgctgcagcttcgacctcctggggtcaagcaatccttccacctcagcctcccgagtagctgggaatacaggcgcgagccaccacgcccgcccagctatccaatttaaagtgcagttcgaggctgggtgcagcggctcacgcctgtaatcccagcactttgggaggcctaggcgggtggatcacctgaggtcaggagttcgtcagcctggccaacatggtgaaaccccgtctctactaaaaatacaaaattagccgggtgtggtggcacatgcctgtagtcccagctactctggaggctgaaacaggagaactgcttgaacccaggaggtggcggccgcagtgagccgagatggcaccactgccctccagcctgggcaacagagcaaggctccgtctcaaaaaaacaaaacaaaataaagtgcaattcgagaatatcaaggaatatagttgttgtgatgggctgggagggctaggttaaggagggcctggtgtgccatgttaagacgctctgtttacattctgtagagacaacagtgaaccgttgaaagctttttaaatagaggcttattgtggttgtgtttgtgttttaggtaaatcactctgctttgcaatataaaggatttaaaagataaaactagagtatcacaataatctaggtgagaggtgttgaggaattaaactggggcaatgagagtagggattgagaaactaaaaatcatcccaactaataatcagactgtaatgtacacatacaaggccagggacaaggccaagcaaaaaatgttcctcacaaggatgcattacagctgtaaaatgactaataacctctatcttttgagtgattgaatagcttccttggcctacctttgttccgttctcctccaaattaaagtttctgagatactcaattactaaactgccttccttcccctaatccctccttagaattactcagctgaagcccaaactctgcataaaacctcaccctaatctctcttatactgacacacttggagcaacacatatgcccttcacccccaagttgaccttgtccagctcagtgcattggttggctgtgatcttgagtaaattccttaatgtctactc

SEQ ID NO: 1564371 - DNA, 4001 bp, Homo sapiens
ttctgtctctggctggtaagttcactgctgggtgtaagagaatttgctgcttctagctgagctaagagatcctggcccaccttatgccttttaaccatgtgcgtcttcatgctgtgcttggatgtgaagagtttattacaagaggagatcgggcaacggcttttccaagtgtccacatcctgcaggtgtttcttggagtgaatgtagaggctactgcgagcagagaacctggcacagcagcctgccacaggacacacgaaaggctttgtgcccaggtgggtaatgctgtggcctttcagatgttcggccctcgtgaaagatttcccacagccttccacagggcacatgaacctccggtcatcgtcgtgcttccttttgtgccttaagagtttggacatgctggtgaagttccagccacagccatcaaagtcacaaaggaaaggtctctcgccggtgtgactccgcaggtgaattttcagcctacaagccttgtcatattgcttgctgcagccagggaaagagcaggaaaacagttcctgttccctgaaatgggcgcggttatgggaaaacagagcactcactgtgataaatgtcttcttgcagccagaaaacgcgcactggtaaggcctctcgggttcgaagtggctgcgctggtgggcgccgagtttggcctgcgtggggaagctctcctcgcacacctcacatttgaacgagttctcctgctcatggcccttcatgtgcgccttgaggttgtacacggtggtgaagctcttgccacagccctccgcagggcagccgaagggccgcagtttatcgtgcgactgcaggtgcctcttgagcttgtaagaggtggtgaaggtccagccgcagccacccagggggcatttgaagggcctctggccctggctgctgctgtgcgtcagcaggtgcatcttcagctggtgcttcttggcgaaggtttgcccgcacagcgcctcggggcacaggtacagcaccacgcctggaccagagcccagcagtccgcgggggcccagggcggcggccaggccctccgcctcctcctggggcgccggagcaggcgcgggttctgcgggctcggctagcaggaggtcggaccgcagctctgggcagtcacccgggtgcgcggcttgcgggaacccagcttggggggcgatcagacacctgggctgctgggcaggagcggcccctggctcccaggcgtgtggtgggggcgtggccagggtgaggacgccgttctcaaagcgcaacagcaggtcctggttgtggatagtgactgtgcccgcgaaggccgcggcggggccgggggcggagatcggggccggagtgggaaccgcggacaggcagtgggggccctgcgcagagcagcccgcggggttcgcgccgctctcgtccccctggagccccgggcccgccttggcctcctccctcaacacaggccctgcggcctgaccggagcccgcggtctccacgtcgccacccaccgggtcaagcagcaccaggaagaagtcgtcgccgccgccgctaggttgatggggcctcggcgcgaacaggcttgggccagggccccgtgatgccgtgctggcctcctcgcgccgccgcccgggcccgccatcttgggggccccggggcagcaggaggcggcgcgtggggacctggccagccggcgagtcagggcctcggtggactcggccgccacccgcggggataccgccgccgccgccgccctgtagtgtcccgcgagccgggagcagcttcgggatttccatctctgcgtccgagaggctcggctggaaccagagccgaggaggaggcgcgatcccgccccctgccgcgggcctgaacacgttcctgaaaggggaaaaaaaaatgtgcaatgcgcagaaactggccctatcagatattaaaatgtattcaacgccacagtgatttaaatattctggtactgggtctctggaacggaatagaaagcccagaggtagagcctggtatgcataaatatattctacaattaatataagtaattaaggaggtcttctgaagtaatggggaaatgacgacatcttgttcaataatgctgtggaacacctaggtatctatctggtaaaagcaattttaatccgtgactcattgtatatacccaaataaacacacgccagcccctcccagtgttagacatgttgcttcatactttttgtgtgttaaaatttgtttattggctggctacctggctggattgatggatgaaagacaattcctgagagaaaaaactgtctctgtgtcagcattaaaccaccatagtgctggcatttctgcggaaattgcccttccccttcccacctctgcgcgggacaacttccatactcacaattgtcttgagcaaagtgctcggtacaatttgccacatagttcaatttttgtctgctgataacagagattagaatgagtgagagatgcggccaaaacagattagcactcttcagcctacaaatgcaaagtctggaggatgaaacaatttatactgaaatctggaaaaaaacccaacccgcccctggcttctccctatacagtgcacaacctaaaccaactctttgcccttcgacgatcggttgtaccatgataaacttcatgtccactctcatagcacaatgagggcattgctcagtttattctgcattctccagcacattctctgggcaggagttccagttaaatgtgttaaggttaaaccctcagtcactcaatggactctgccaagtaatgtgcacagacgatcttgtccactcgccccggtgtacctgctcacatttaagtgtggtggcccagtcttgctgggcctttggtgcctaatgtccttattaatgatgacgacaatcctccaatttgtctgtcacgaatgagtttggaattgacacaaatatagggtgaaatatctgagatgagaaggcttagagtgatgaacagattggtggtggtgggggtgggggggtgtaacctgttgtttaaatactcccagctctctcgccctcttttaataacagtggacacttggtctcttgaaaatcaagtttttcaaccataactattcgaacctcatcaaaatttctactccacatacttttctttctattactttttctggaggaagcacttttcaaatctgaaattagaagagtgcatataacgtatctgtatagtttagattattttacaaaagcagacacctacttaaccaggaccaaggtcaagcaatagaccactgccaacctcccagaatacagctgctgtactccttccagtcacaaaccacactctcctatatagatatagtaattgctccgactttgtaataatcatttcactgctttcctttatagctttatcacttttgtacgcatccctaaacaatagagttgatatgaagttgtataagtggaatcatacggcatgcttccttttatagcttgcttttttcactctgtattatacttgagagactcgtccatgttgttcataatagctataagtaagtagatcctttgtctccatcgactgtctttccagcatatgcttatagcaaagtgattattgtatgattattccactccattctacagcagatggagattaggattgcttctacttttcaatgattattgtgaacattcttgcacatttctaatgggacacgtgtaaaaatctctctagggtatatatccaagaatagaatcacagggccatagggaatggatatcctcagctttactagatgatgccaaattgttctctgtagtgattgggagagttgtcaatcccaccagcagcatagagagtccttactgatccacatgttcacctacaccaagtattgcccgaatttaaattttgccggtctactggtgggcaatatccaaattactattaagctttagcacatttttgtgttaatgagccttttggagtttctattttgaggaaggcct

SEQ ID NO: 1564372 - DNA, 4001 bp, Homo sapiens
gctggtaagttcactgctgggtgtgagagaatttgctgcttctagctgagctaagagatcctggcccaccttatgccttttaaccatgtgcgtcttcatgctgtgcttggatgtgaagagtttattacaagaggagatcgggcaacggcttttccaagtgtccacatcctgcaggtgtttcttggagtgaatgtagaggctactgcgagcagagaacctggcacagcagcctgccacaggacacacgaaaggctttgtgcccaggtgggttatgctgtggcctttcagatgttccgccctcgtgaaagatttcccacagccttccacagggcacatgaacctccggtcatcgtcgtgctttcttttgtgccttaagagtttggacatgctagtgaagttccagccacagccatcaaagtcacaaaggaaaggtctctcgccggtgtgactccgcaggtgaattttcagcctacaagccttgtcatattgtttgctgcagccaggaaaagagcaggaaaacagttcctgttccctgaaatgggcgcggttatgggaaaacagagcactcactgtgataaatgtcttcttgcagccagaaaacgcgcactggtaaggcctctccggttcgaagtggctgcgctggtgggcgctgagtttggcctgcgtggggaagctctcctcgcacacctcgcatttgaatgagttctcctgctcatggcccttcatgtgcgccttgaggttgtacactgtggtgaagctcttgccacagccctctgccgggcagccaaagggccgcagtttgtcgtgcgactgcaggtgcctcttgagcttgtaagaggtggtgaaggtccagccgcagccacccagggggcatttgaagggcctctggccctggctgctgctgtgcgtcagcaggtgcaccttcagctggtgcttcttggcgaaggtttgcccgcactgcgcctcggggcacaagtacagcaccacgcctgggccggagcccagcggtccgcgggggcccagggcggcggccgggccctccgcctcctcctcaggcgccggagctggcgcgggttcggccggctcagctagcaggaggtctggcggcagctctgggcagtcacccgggtgcgcggcatgcgggaacccagcttgcggggcgatcagacacccgggctgctgggcaggagcggcccctggctcccaggcgtgtggtgggggcgtggccagggtgaggacgccgttctcaaagcgcaacagcaggtcctggttgtggatagtgactgtgcccgcgaaggccgcggcggggccgggggcggagatcggggccggagtgggaaccgcggacaggcagcgggggcctagcgcagtgggccccgcgggattcgcgccgctctcgcccccctggagccccgggccctcctcggcctcctccctcaacacaggccctgcggcctgaccggagcccgcggtctccacgtcgccacccaccgggtcaagcagcaccaggaagaagtcgtcgccgccgccgccgccgccgccgctaggttgatcggtcctcggcgccaacaggcttgggccagggccccgtgatgccgtgctggcctcctcgcgccgccgcccgggcccgccatcttgggggccccggagcagcaggaggcggcgcgtggggacctggccagccggcgagtcagggcctcggtggactcggccgccacccgcggggataccgccgccgccgccgccctgtagtgtcccgcgagccgggagcagcttcgggatttccatctctgcgtccgagaggctcggctggaaccagagccgaggaggaggcgcgatcccgccccctgccgcgggcctgaacacgttcctgaaaggggaaaaaaaaatgtgcaatgcgcagaaactggccctatcagatattaaaacgtatttaacgccacagtgatttaaatattctggtactgggtctctggaacagaatagaaagcccagaggtagagcctggtatgcataaatacgttctacagttaatataagtaagtaattaagggggtcttctgaggtaatggggaaatgacgacagcttgttcagtaatgctgtggaacacctaggtatctatccgctggaagcaattttaatccatgactcattgtatatacccaaataaacacaccccagcccctcccagtgttagatatgttgcttcgtactttctgtgtgttaaaatttgctggctggctggctggctggactgatggatgaaagacaattcctgagagaaaaaactgtctctgtgtcagcattaaaccaccatagcgctggcagttctgctgaaaatgtccttccccttcccacctccccgcgggacaacttccatattcacaattatcttgagcaaagtcttcggtacaatttgccgcatagttcaaattttgtcttgctgatacagacattagaatgagtgagagatgcggccaaaacaggttagcactcttcagcctagaaattcaaagtctggaggatgaaacaatttacactgaaatctggaaaaaacccaaccttctcctggcttctccctatacagtgcacaacctaaaccaacttttgcccttccaccatcggttgtactgtgataaatttcatgtctgctctcacagcacaatgagggcattcattcctcagtttactctgccttctccagcacgtggaggtctctgggcaggagtttcagttaaatgtgtttaggttaaatcctgagtcactgcaatggattctgccaagtaaaaggcacagacgatcttgtccaatcaacctggtgtacctgttcacatttaagtgtggtggcccaggcttgctgggcctgtggtgcctaatgatcttattaatgatgatgacaatccttcattttgtccgttacgactgagttgggaattgacacaaatatagggtgaaatatctgagataagaaagcttagagtaatgactagattggtggtggtgggggagcggggtgtaacctgttgtttaaatactcccagctctctcgccctcttttaatgacagtggacacttggtctcttgaaaatcaagctattcatccataactatttgaacctcatcaaaatgtctactccacatacttttctttctattactttttctggtggaagcatttttcaaatctgaggtatagaagagtgcataaaacatatttgtatcgtttagattattttacaaaagcagacacctgtgtaaccaggaccaaggtcaagcaatagaccactgccagccttccagaatacagccgctgtactcctcccaatcacaacccacactctcctatatgaatatagtcattgccctgactttgtaataatcatttcactgctttcctttatagctttatcacttttgtacgcatccgtaaacaatagagttgatacgaagttgtataaatggaatcatacggcaagtttccttttataacttgtttctttcactctgtattatacttgagactcatccatgttgttcataatagttataagtaagtagatcctttgtctccatcgactgtcgttccagcatatgcttatagcaaagtgattatggtatgattataccactccattctacagcagatgaacattaggattgcttctatttttcagcgattattatgaacattcttgcacatttctcatgggacacatgtgtaaaaatctctctagggtatatatccaagaatagaatcacagggccatagggtatggatatcctgagctttactagatgatgccaaattgttctctgtagtgattgggcaagctgtcaatcccaccagcagcacagagagcccctactgctccacatcttcacccacaccaagtattgccagaatttaaattttgccagtctactggtgggcaatacccaaattactagtaagctttagcacattttcgtgtttatgagccttttggagtgtctactccga

SEQ ID NO: 1564373 - DNA, 4001 bp, Homo sapiens; identical to SEQ ID NO: 1563134

SEQ ID NO: 1564374 - DNA, 4001 bp, Homo sapiens
gtagaaatgggtggtgatatttccaggctaatggtatcaactgaatctcctggggtgcttgtgaaaatagagtcctgggcccaaccccagctgtaccaaatcagaacctctagtggaggcatctcagaagctattttatttatttaattaatagatttatttttaaatttttgtgggtgcataatagttatatatattcatggtgtacaatatgatgttttgatatatatttacagggtggaaagattaaatgaggctaatcaatggaacactattcagccttaaaaaggaataaaatcttgacatttacaaagatgcgaatgagcatgaaagacattatactaagcaaaataagctaggaagagataatctattttttcattccccaaagtgtttcttcagcacagatgttttggggcctcttagctcaaactgttttaaaccttaaagtttcccagctgggggacaaattcttatttccacgtttgtaaattggacacaacttatgcaaagaatgttttactcacaggcatggcaaaagctgctcccacaaggcaggcaaacaaaatccaggtccccatttcttgatggttctgaaatgaaaatcagcaagtgcttttctcatctcttctcaaacatgtgcaccataaagtgccttaaaaaacataatctgcatttgtctgtgggtagcaagtaggatattctttgcaaggttaatttttcttatttgatttcaagttctcagtccattttattgttttggagtcacagtagttagcataaaatcatttttcatttaggttggaaactgaacaagttgaggaaaataaatcatgttgttatgtaatttggaatgccatattcctgtctgtctgcatggtcctgtaaagccatataagctaagtataatttttaattaataatcaaaggaacaaatttggctcttaaggttcaagagcccgtcaaggtaggtatttacccattactacatagcattttattattttaaaatgaggagctgagaaatatttcttatattatccatctaggtattgatattgttaaaaacaaagactgatgatttgagggaaaaaaatctaagttatttgccaaaacagattaagaaatgacagggatttctagccttatagagcttcaggcaggtaaaatgtctgagctcagggggtctgcatagcaaaagatgaggttaaacagaaaggcaaagaaaacaataatctgtgaatttattgattcttcagtaagttttggattatttatatctcaaagattctattttatttcatggtatcttccctttgatatatgttctaatttaattactctacaaattagagatgtgagatatgaattaaaacttgttcacttaaacacatgcacaatgcttcatggctcaaattattgactaactttaaaaatctttaagtaaaaagacattaattttggtaaagacagtgaatataatatgtagtaatgctgatatgagtactacattgatgttgtatcctaaatgtgtgttattaaacttgaaataatttttaaaaagagataaagttttagatgatggttttagtatgaaataaggtattatttgatgtatttaacaaaaaaagtgttaaaagtaataaagatagccttaaagtattatttcaatttagtttacaagtgagtttggcttccaggaactccttttggtttctaaaattaaaatttaaatacacatatagacaaatgctttgaagcattataaagtaaaaaaaaaaattacataatgagagtcaaatttaattataatccaacagaagtaactgattcttaacagcataaagtattagaaacatggaatttatttgcatctattaaatatgaattacagaaaagaagcagaataaaaaggacacaaaataatatgtaaaatccacatacctttaaatatattcagagaaactttctttgtgctacacagggaggcttggtcctctagattttctttaactatgagctcaatttatatccttcaaggtatctacaacaaccaatcagatttgtgaagaaaaaatgtgttgaatatgactaaaaattcctgtatcatcataatttttttgcaaccatggctaaatataaggtagtatattgtgattagtccatatagttcttcattatagtcaataatatgtttaacaggcaaaaggaacttcattgcactgtttttaagtcagcaaatttgtagcttgcacatgccaaaacattcagacttatgtttaagaggatcttatgtcattgcctgtgatcgattaaaattttaaaatcactacaactgtattttttgctttccttaaaggtatgtcctttgttccctgttgctactcatttgtcaccactctggtgttcagaaaagcgccaaaagtctctctggtgtgatctgcaactatttattatctaaacaaattcaaggttatcatagtagcaaaacttttatgcatgatctaaaaggcaagacaagagggattttacacattggtcagcacacatcaaaatatatttaaatacttaggaacacctatcataaggcatattgccctggctacttcatcctacatagcgtatcaacctttctaagtatgatggccttctttgcccgtgtacttctagcccatttctgctttctttcatgcatgaaacagattttctttttctttagtgtctctttagttgcattgttttcatatttttaataagctctactttgcctaagcaaaaacaagaaaagtctgtccgtctctgaggactgtgatctattaaacgcatgcttttttataacactttcatcttagtgaaccacaaacatttatgattttattttatatctgatcaattaaaaatctagcatcgagagataatgaatgatgtctatcaatattaaattaataaaggaaatagtaatacccagatacaactaatattatagctgaatctctttgaatacttagctaatatttataaactttttgcatatgaatattataccatatacatgagccaaatttgaagaattaaattcaaggacaaaatatgtatgaaaatcatgtgtataatagttaatgctatgatataaatgcatgtgggttcaccttacccaagtttcaccaagggacaaccttcaagttatttagcctgtctgagccacagtttcttcatatataaactgggaacagtaataaaacccttttaatagaattagcatgaaaattagagagagacatccttagtaaatggaaagttattacctgtcctaattcaccacatggcacttagaaattttttaaagatgaaaataagattctaggatgatgtggggatattagcaagaaatgaataatttttatgaagaaaggtaaatctttcaagctaaaaggaagaaaggtaaacctatcaccttctacttcttgctatacagaaagatgtagaagattataaagggcaacacagatgagttaaagtgaacgtagaatatagttctaaatgccagctgtacccaagatagaatatagttctaaatgccagcagtacccagggtgtatttgtatttatgaatatatttattggtgaattgtatattgaaggcaagaatacgctttgaaggaaattgtaacactaagttttaagaaaacaggctttagcgtatttgtagagaagaggtgagagagtgagggagtaaaaggagagagaagggaagtataatacatattctccttcaatttattttattttattttatttttatttcattttatttatgtttattgaagttcctaaaaggattaagaaatttttctacaaaattatgggtgagctctactaaagaaatgattgaaaacaaaaagtagaggtctttggctttaacaatgtatttttttatgttgtctcatatttttgaatgataagaaattatatatttgttcaatgtaaacaacagaattctt

SEQ ID NO: 1564375 - DNA, 4001 bp, Homo sapiens; identical to SEQ ID NO: 1563187

SEQ ID NO: 1564376 - DNA, 4001 bp, Homo sapiens; identical to SEQ ID NO: 1563188

SEQ ID NO: 1564377 - DNA, 4001 bp, Homo sapiens; identical to SEQ ID NO: 1563189

SEQ ID NO: 1564378 - DNA, 4001 bp, Homo sapiens; identical to SEQ ID NO: 1563190

SEQ ID NO: 1564379 - DNA, 4001 bp, Homo sapiens; identical to SEQ ID NO: 1563191

SEQ ID NO: 1564380 - DNA, 4001 bp, Homo sapiens
gtcaataaatctgagtgctgggctcagcaatatgtcacaatgccgtcactgcaaagaccagactgaagaagagagtcacttcacttaggtcttgggctcagagatagatcccactctcccagtagggcagggcatgggctgaaaaggagagtcatatacctaggtgctttcctagttgtatgtcacaatctaacatgtgagcagaaatcaggctgaagagccacatcacctgggtagaccctcaggtaatatgtcaccatgcccaatgtagacagatttgatgaaaaataaaagtaaaaaaagaatcacaacacctgggtgctgggctcagcaatatgtagaaattccctgtcttggcagagtccaggacaaataggagagtcatgtcacctaggttttgcactcagttgtatgtcacaatttatttggtggacaggttccaggcaggagtattacctagatgctgtatctagtgatatatcacaatgtcccctgtgggcaatgcactagcaggagagacatatcacctggccaataggcttgggggtgtgtgaaaatatcccctgttttcaaggccattatcattattctgacccagtgatatgtgacaatgcccttttggaaaggaatttaaacaaaaatgtctcaacactggggtatgacgccaagtgatatgacacaatctcttcacctttaacggtgacacaattaatggttagctagttgtttatatgacagtcacaatctcatgtgtgtgctgacccttgtatgacattctctgcaatatctgagaacactatacaacatgcctgagagttgaaaacctctctgaggcccacatgcttatatgaactcatgatcttacatattgccctaaaccaaggtatgactctcaacatctcttctctaggctggcttcagagatgagactgtttttaagcctgtgacctgggaccagatatgtatgagtcaccatcccacccgtgacaagattagcttttgaaaatcacaactccaacttggtcctgtattcacttgttagactcaggaccttaacaatgagatttgtaaatgtgagaagataacaacttttacttgcatttgaatgtgtagtggagattcacaatctcaattttttgttgggatccgtcataaatatctctgtaccacccaggaaggttttatgatatgaatcagtgttgtaagtttctctgagctctgtataaatatgcaatgaagggactaacttattgatgtaaacctagcaatgcaaggcaaaatatctcctgttggctgaatcccgatataagcttgatcatcatgtttttgaactgaatcaaggtatctgtcataaccccatttgtgggcaaaatctaggcagaaggttaacatcacttaggtgctgttccaagcaatatgtcacaatactctacctaggcagggcctaggaaagagggtcacattaactgggggctggaaccagcaatatgctacaacaacacgtggaagaataccagcaaagttatgagagccaaaacacgtacagaaagggaacaagatatatcaaaataccttctgtggctctggcacaagcaggagagtcatatcattacgggactgggccaagcaatatgccctaattccctctttacgcatgacctaggcagaagagtaacatcatccaggtgttgggccctgaaatacagcaaaagtcttgtttgtgggggttgttcagcaaccagacaagacttacgttacctaagtgctgggctcattaacatttcacagtcttcttattgtcaaagcgcagacagaataagagagtcacatcatataggttatgtgctcagagatatggccgaatgtcaccagtaggcagggatcaggcagaaaaagagaatcatatcacctaggtgcttctttaggtatatgtcacactttaatatgtgggaaaaaacaaggctgaataccatatcacatggtcctgggtcctgagatattcacaagccccccttagaaaaggacccagtcaagagagttacatcacctaagtgcaggttccacacatatgtcacaatgctccatgtgggcagggtcaagcaggaagtcacatcacctaggtgataggcatagagatatgtcacaaagcttttcttttctttcttccttttttcttttttttttgagatggagcctcgctctgttgcccagactggagtgcagtggcacgatctcggctcactgcaagctccgactcctgggttcacgccattctcccacctcagcctcccaagtagctgggacttcaggcacctgccatggcacctgccttatttttttgtatttttagtagaaatggggtttcaccgtgttagccaggatggtctcgatctcctcacctcgtgatccacccgcctcggcctcccaaagtgctgggattacaggtgtgagccaccatgcccagccataaaacttttcttaaagcctgtccctggctgaacagtaccatcacctttgtgtctggcctagcaatgtgtcactatgcaggtgggcagatcccaagcagaagagtcatattacctgcatgataggccctttgatatgtcaaaatgccttcttttgggcatggccctggcaaaaaaaaaaagtatcatcacctgtgtgcctggcctatgaatatgtgactatcctatcctatgtgcagtgcccattccagagaggagagttacatcttttaagtgacggacacagtaatatgtcacaatgatgtctgtgtcatggtgcagtcaagaatataacattacctggttactgcatccagtgatgtcaaaattcttactgagagcagggcccagggagaagagtcaaaccacttcaaggttggccctgggagatctcaaaattttatatgtaggcttcaaccagtcttaagaatgaaatcacaatggtgcatgacaaagatttgtatcagagtcatgatggaataaaattctagaaattagatttacaataccacacatgccctattttcatgtagaagagttgccttcatccgtctatgatggtgaaagttcttgctgtcagctgggtttgcatatgagactgacaattttctcggtgtgctaggccctgttatggcattctttatacaacacaagggtgtaacaaaacatgtgtgagtgttatagtcttctgtgacatttttaccgggaagagatcattgacatcacttatgttcctaaacctagttataaaagtcaaaatttctcctattggctgggttcacatatgacagtcactatcatggccgttagttgcgcctaggtatatgctaccatgctctctgtggttattaaatgggcagaaaaaccacatcacctaaaccatgagccaaaaatgttccaatattttatttgcaggaagggccataacagaaaagccacaaaatttggtcataggcccaggtcgttggcataatgtccttgctggagagtgtccacacaggagaggagagtcatataacctaaatgatgggcccagagaaatgtaacaatgcctcctattgaaagggcccaggcaagagggtcatgtcatttaaatgcagtgcttagaaatgctacactcttcactggaagcagggttcatgcaggagagaaaagtcaaataccctagatgatgggtccagagatttgttacgatcccttctgaggacactgctaagacagggaagtcaaatcaccaaggtttttggccaatgtatatatcaaactgttatctctgggctataaataggcaggattattaaatcactcaggagcttggcaaaggtgtatgtcacaacaacacctgtggaaaggttcagggatgagagtcaccatcctgcaaatgttctggctctaggtacaggagttgttgttataatttttttatcttctctcaagtatatggcacaatatcacctgtgggcagggagaagaaaggaaagtcacatcatcagagtc

SEQ ID NO: 1564381 - DNA, 4001 bp, Homo sapiens
gtcaataaatctgagtgctgggctcagcaatatgtcacaatgccgtcactgcaaagaccagactgaagaagagagtcacttcacttaggtcttgggctcagagatagatcccactgtcccagtagggcagggcatgggctgaaaaggagagtcatatacctaggtgctttcctagttgtatgtcacaatctaacatgtgagcagaaatcaggctgaagagccacatcacctgggtagaccctcaggtaatatgtcaccatgcccaatgtagacagatttgatgaaaaataaaagtaaaaaaagaatcacaacacctgggtgctgggctcagcaatatgtagaaattccctgtcttggcagagtccaggacaaataggagagtcatgtcacctaggttttgcactcagttgtatgtcacaatttatttggtggacaggttccaggcaggagtattacctagatgctgtatctagtgatatatcacaatgtcccctgtgggcaatgcactagcaggagagacatatcacctggccaataggcttgggggtgtgtgaaaatatcccctgttttcaaggccattatcattattctgacccagtgatatgtgacaatgcccttttggaaaggaatttaaacaaaaatgtctcaacactggggtatgacgccaagtgatatgacacaatctcttcacctttaacggtgacacaattaatggttagctagttgtttatatgacagtcacaatctcatgtgtgtgctgacccttgtatgacattctctgcaatatctgagaacactatacaacatgcctgagagttgaaaacctctctgaggcccacatgcttatatgaactcatgatcttacatattgccctaaaccaaggtatgactctcaacatctcttctctaggctggcttcagagatgagactgtttttaagcctgtgacctgggaccagatatgtatgagtcaccatcccacccgtgacaagattagcttttgaaaatcacaactccaacttggtcctgtattcacttgttagactcaggaccttaacaatgagatttgtaaatgtgagaagataacaacttttacttgcatttgaatgtgtagtggagattcacaatctcaattttttgttgggatccgtcataaatatctctgtaccacccaggaaggttttatgatatgaatcagtgttgtaagtttctctgagctctgtataaatatgcaatgaagggactaacttattgatgtaaacctagcaatgcaaggcaaaatatctcctgttggctgaatcccgatataagcttgatcatcatgtttttgaactgaatcaaggtatctgtcataaccccatttgtgggcaaaatctaggcagaaggttaacatcacttaggtgctgttccaagcaatatgtcacaatactctacctaggcagggcctaggaaagagggtcacattaactgggggctggaaccagcaatatgctacaacaacacgtggaagaataccagcaaagttatgagagccaaaacacgtacagaaagggaacaagatatatcaaaataccttctgtggctctggcacaagcaggagagtcatatcattacgggactgggccaagcaatatgccctaattccctctttacgcatgacctaggcagaagagtaacatcatccaggtgttgggccctgaaatacagcaaaagtcttgtttgtgggggttgttcagcaaccagacaagacttacgttacctaagtgctgggctcattaacatttcacagtcttcttattgtcaaagcgcagacagaataagagagtcacatcatataggttatgtgctcagagatatggccgaatgtcaccagtaggcagggatcaggcagaaaaagagaatcatatcacctaggtgcttctttaggtatatgtcacactttaatatgtgggaaaaaacaaggctgaataccatatcacatggtcctgggtcctgagatattcacaagccccccttagaaaaggacccagtcaagagagttacatcacctaagtgcaggttccacacatatgtcacaatgctccatgtgggcagggtcaagcaggaagtcacatcacctaggtgataggcatagagatatgtcacaaagcttttcttttctttcttccttttttcttttttttttgagatggagcctcgctctgttgcccagactggagtgcagtggcacgatctcggctcactgcaagctccgactcctgggttcacgccattctcccacctcagcctcccaagtagctgggacttcaggcacctgccatggcacctgccttatttttttgtatttttagtagaaatggggtttcaccgtgttagccaggatggtctcgatctcctcacctcgtgatccacccgcctcggcctcccaaagtgctgggattacaggtgtgagccaccatgcccagccataaaacttttcttaaagcctgtccctggctgaacagtaccatcacctttgtgtctggcctagcaatgtgtcactatgcaggtgggcagatcccaagcagaagagtcatattacctgcatgataggccctttgatatgtcaaaatgccttcttttgggcatggccctggcaaaaaaaaaaagtatcatcacctgtgtgcctggcctatgaatatgtgactatcctatcctatgtgcagtgcccattccagagaggagagttacatcttttaagtgacggacacagtaatatgtcacaatgatgtctgtgtcatggtgcagtcaagaatataacattacctggttactgcatccagtgatgtcaaaattcttactgagagcagggcccagggagaagagtcaaaccacttcaaggttggccctgggagatctcaaaattttatatgtaggcttcaaccagtcttaagaatgaaatcacaatggtgcatgacaaagatttgtatcagagtcatgatggaataaaattctagaaattagatttacaataccacacatgccctattttcatgtagaagagttgccttcatccgtctatgatggtgaaagttcttgctgtcagctgggtttgcatatgagactgacaattttctcggtgtgctaggccctgttatggcattctttatacaacacaagggtgtaacaaaacatgtgtgagtgttatagtcttctgtgacatttttaccgggaagagatcattgacatcacttatgttcctaaacctagttataaaagtcaaaatttctcctattggctgggttcacatatgacagtcactatcatggccgttagttgcgcctaggtatatgctaccatgctctctgtggttattaaatgggcagaaaaaccacatcacctaaaccatgagccaaaaatgttccaatattttatttgcaggaagggccataacagaaaagccacaaaatttggtcataggcccaggtcgttggcataatgtccttgctggagagtgtccacacaggagaggagagtcatataacctaaatgatgggcccagagaaatgtaacaatgcctcctattgaaagggcccaggcaagagggtcatgtcatttaaatgcagtgcttagaaatgctacactcttcactggaagcagggttcatgcaggagagaaaagtcaaataccctagatgatgggtccagagatttgttacgatcccttctgaggacactgctaagacagggaagtcaaatcaccaaggtttttggccaatgtatatatcaaactgttatctctgggctataaataggcaggattattaaatcactcaggagcttggcaaaggtgtatgtcacaacaacacctgtggaaaggttcagggatgagagtcaccatcctgcaaatgttctggctctaggtacaggagttgttgttataatttttttatcttctctcaagtatatggcacaatatcacctgtgggcagggagaagaaaggaaagtcacatcatcagagtc

SEQ ID NO: 1564382 - DNA, 4001 bp, Homo sapiens
tcaataaatctgagtgctgggctcagcaatatgtcacaatgccgtcactgcaaagaccagactgaagaagagagtcacttcacttaggtcttgggctcagagatagatcccactgtcccagtagggcagggcatgggctgaaaaggagagtcatatacctaggtgctttcctagttgtatgtcacaatctaacatgtgagcagaaatcaggctgaagagccacatcacctgggtagaccctcaggtaatatgtcaccatgcccaatgtagacagatttgatgaaaaataaaagtaaaaaaagaatcacaacacctgggtgctgggctcagcaatatgtagaaattccctgtcttggcagagtccaggacaaataggagagtcatgtcacctaggttttgcactcagttgtatgtcacaatttatttggtggacaggttccaggcaggagtattacctagatgctgtatctagtgatatatcacaatgtcccctgtgggcaatgcactagcaggagagacatatcacctggccaataggcttgggggtgtgtgaaaatatcccctgttttcaaggccattatcattattctgacccagtgatatgtgacaatgcccttttggaaaggaatttaaacaaaaatgtctcaacactggggtatgacgccaagtgatatgacacaatctcttcacctttaacggtgacacaattaatggttagctagttgtttatatgacagtcacaatctcatgtgtgtgctgacccttgtatgacattctctgcaatatctgagaacactatacaacatgcctgagagttgaaaacctctctgaggcccacatgcttatatgaactcatgatcttacatattgccctaaaccaaggtatgactctcaacatctcttctctaggctggcttcagagatgagactgtttttaagcctgtgacctgggaccagatatgtatgagtcaccatcccacccgtgacaagattagcttttgaaaatcacaactccaacttggtcctgtattcacttgttagactcaggaccttaacaatgagatttgtaaatgtgagaagataacaacttttacttgcatttgaatgtgtagtggagattcacaatctcaattttttgttgggatccgtcataaatatctctgtaccacccaggaaggttttatgatatgaatcagtgttgtaagtttctctgagctctgtataaatatgcaatgaagggactaacttattgatgtaaacctagcaatgcaaggcaaaatatctcctgttggctgaatcccgatataagcttgatcatcatgtttttgaactgaatcaaggtatctgtcataaccccatttgtgggcaaaatctaggcagaaggttaacatcacttaggtgctgttccaagcaatatgtcacaatactctacctaggcagggcctaggaaagagggtcacattaactgggggctggaaccagcaatatgctacaacaacacgtggaagaataccagcaaagttatgagagccaaaacacgtacagaaagggaacaagatatatcaaaataccttctgtggctctggcacaagcaggagagtcatatcattacgggactgggccaagcaatatgccctaattccctctttacgcatgacctaggcagaagagtaacatcatccaggtgttgggccctgaaatacagcaaaagtcttgtttgtgggggttgttcagcaaccagacaagacttacgttacctaagtgctgggctcattaacatttcacagtcttcttattgtcaaagcgcagacagaataagagagtcacatcatataggttatgtgctcagagatatggccgaatgtcaccagtaggcagggatcaggcagaaaaagagaatcatatcacctaggtgcttctttaggtatatgtcacactttaatatgtgggaaaaaacaaggctgaataccatatcacatggtcctgggtcctgagatattcacaagccccccttagaaaaggacccagtcaagagagttacatcacctaagtgcaggttccacacatatgtcacaatgctccatgtgggcagggtcaagcaggaagtcacatcacctaggtgataggcatagagatatgtcacaaagcttttcttttctttcttccttttttcttttttttttgagatggagcctcgctctgttgcccagactggagtgcagtggcacgatctcggctcactgcaagctccgactcctgggttcacgccattctcccacctcagcctcccaagtagctgggacttcaggcacctgccatggcacctgccttatttttttgtatttttagtagaaatggggtttcaccgtgttagccaggatggtctcgatctcctcacctcgtgatccacccgcctcggcctcccaaagtgctgggattacaggtgtgagccaccatgcccagccataaaacttttcttaaagcctgtccctggctgaacagtaccatcacctttgtgtctggcctagcaatgtgtcactatgcaggtgggcagatcccaagcagaagagtcatattacctgcatgataggccctttgatatgtcaaaatgccttcttttgggcatggccctggcaaaaaaaaaaagtatcatcacctgtgtgcctggcctatgaatatgtgactatcctatcctatgtgcagtgcccattccagagaggagagttacatcttttaagtgacggacacagtaatatgtcacaatgatgtctgtgtcatggtgcagtcaagaatataacattacctggttactgcatccagtgatgtcaaaattcttactgagagcagggcccagggagaagagtcaaaccacttcaaggttggccctgggagatctcaaaattttatatgtaggcttcaaccagtcttaagaatgaaatcacaatggtgcatgacaaagatttgtatcagagtcatgatggaataaaattctagaaattagatttacaataccacacatgccctattttcatgtagaagagttgccttcatccgtctatgatggtgaaagttcttgctgtcagctgggtttgcatatgagactgacaattttctcggtgtgctaggccctgttatggcattctttatacaacacaagggtgtaacaaaacatgtgtgagtgttatagtcttctgtgacatttttaccgggaagagatcattgacatcacttatgttcctaaacctagttataaaagtcaaaatttctcctattggctgggttcacatatgacagtcactatcatggccgttagttgcgcctaggtatatgctaccatgctctctgtggttattaaatgggcagaaaaaccacatcacctaaaccatgagccaaaaatgttccaatattttatttgcaggaagggccataacagaaaagccacaaaatttggtcataggcccaggtcgttggcataatgtccttgctggagagtgtccacacaggagaggagagtcatataacctaaatgatgggcccagagaaatgtaacaatgcctcctattgaaagggcccaggcaagagggtcatgtcatttaaatgcagtgcttagaaatgctacactcttcactggaagcagggttcatgcaggagagaaaagtcaaataccctagatgatgggtccagagatttgttacgatcccttctgaggacactgctaagacagggaagtcaaatcaccaaggtttttggccaatgtatatatcaaactgttatctctgggctataaataggcaggattattaaatcactcaggagcttggcaaaggtgtatgtcacaacaacacctgtggaaaggttcagggatgagagtcaccatcctgcaaatgttctggctctaggtacaggagttgttgttataatttttttatcttctctcaagtatatggcacaatatcacctgtgggcagggagaagaaaggaaagtcacatcatcagagtcg

SEQ ID NO: 1564383 - DNA, 4001 bp, Homo sapiens; identical to SEQ ID NO: 1564380

SEQ ID NO: 1564384 - DNA, 4001 bp, Homo sapiens; identical to SEQ ID NO: 1564381

SEQ ID NO: 1564385 - DNA, 4001 bp, Homo sapiens; identical to SEQ ID NO: 1564382

SEQ ID NO: 1564386 - DNA, 4001 bp, Homo sapiens; identical to SEQ ID NO: 1564380

SEQ ID NO: 1564387 - DNA, 4001 bp, Homo sapiens; identical to SEQ ID NO: 1564381

SEQ ID NO: 1564388 - DNA, 4001 bp, Homo sapiens; identical to SEQ ID NO: 1564382

SEQ ID NO: 1564389 - DNA, 4001 bp, Homo sapiens; identical to SEQ ID NO: 1563241

SEQ ID NO: 1564390 - DNA, 4001 bp, Homo sapiens
gatgcatttgttgccccttagttcttgtgtcctgagcagacagactgacaattaaaactcatcaattttattttcaacatactttaacatggattctatcccttgggctgagctccagatcttcctcagcacctcacactctctctcattggcctgttccaactccaacttaatattacagcgaacgagggccttacattcttccagtacaattggattgtatgaggcaagctccttaatttgaatcataacctcttgggtgaaagttccagtcaaaaatacctgagagaccaggcctttggcgcatgcctcccttgctgtcagctttcgcccagcaattaacatttcattggcagatgctttacccatcattttggggaatgtaatagaagaacagccatctggactctgtccaaaggtcgtataaggggtttggaaccaagccttttcattagcccacacgagatcacaaagaggcaggatggatgcacctagtccaatcgcagggccattgactgatacaacaataggctttttaaattgaataaaagtattcacaaagttcttgatggtgtccaccatttcaaggcttgctgtgtttctgttattccttaagtgcttcacaaagtacccaaaatcaagaccgcagcaaaagacacttccagctgcactgaacagcacgagcttgctgtcatctgcagcagcgctattcagagcattaactatttctttaattacttctgtattcagtgcatttttttctgtcgatctagttgatagcactatctgggtgaatccatcctctttcttcactacaatgtctctgtatgtgctggcactttctgttagccttatggtgaagtgcatcttcttgataaaaggctggtctctgctgtcatcagtaatatttctttgcccacctttcactcttggaactgaggtatgcatgtctgttgtcccattggctgctaatgggtctattaataccactataccctttcgggtagctgaacctgtggccatagaagcagtaactgagccagacatctgcgacattagtgggtgtatctgagtcttgttctgtattccagtctgttctgcaccaggacgtgacaaagggtcccggaggagtttcccttctgtcaccttgaagaccaccgtgtcctgctgatctgctgcaatagggtccagtttctcaagtttctgaaagccactcacagttttgtggtcaaaggggctgtcaggtgcaagggtctcaatagttgaatttattatctccatattctttgtgtcggagagaattgaagctgcctttctcctaacgttcttgctggcagcaaataacttgcggtttttggacctgtggtgtttatcagtcactggcgttttaggagagttcttagaatagtttgcttttgtagatctggaagttcttcttctggcattgtttgaaaaaattctactggttgtagtccatgtcagttttttctgtttttcagtctgtcgtctattaaaatcatgtacacatttttcacagttcatgaggtgctgctctggttcccaagtgtcatcctgtttgtcataacctttccaccgaaccaaatactgtgtattcccatttttatcctgtcttttgtcaacaatagcttcaacctcaaactcctgggaagccatgaggaaagacacgggattggaacagttgctgtgccacctttgtttcagttgcgtctccacatagacacttctttctgcctccagctcttcaccaggttctgtgtatggatgaacctcttctattttgtcaccactggtgtagtgaaaattgtgcgaaatagcagctatgccatgtgcctgaacctctccatacttactgcctggtgggacagcttgggctttgtctcatggtgcatgacaacttgctcagtagcctcaggtgagagtagctaaatccacagccccaaccctctggtgtagtacagaaagctttcttcctgcctgttactcttttgtgtttctttgtttaattgtggttgctatgacgattatatggaacattctaatgttataacatttttaaagttacactagcttaccttcagtaacatacaaagcctttactcctgtataatgtacctccattatttcacttactgagttctcaaaattatacctttattgattttatgtcaaaaacacaaattagtggtagtttttttattaaatatatttgtgttttaagttatgtggagaacaaattgtggaggtgcacattgttaattgttcgttttgttttgttttgttttgttttgttttgagatggagtctcgccctgtcaatgaggctggagtgcagtagtgagatcttggctcactacaagctccacctcccggattcatgccattctcctgtctcagcctcccgagtagctgagactacaggcacctgccacctggccctacgaatttgttgtatttttagtagagacggggtttcaccatgttagccaggattgtctcgatctcctgacctcgtgatccaagcacctcagcctcccaaaatgctgggattacaggtgtgagccactgagcccagccaaattttttatcttacatatttgttcatgtatttatctttaccttaatctttgtttgttcatactgcttttgagtatctgtccattctaccctgaagtactccataagacatttcttaaagggtagtctacttgtaaaaggtgccagtttttatatgggaatgtcataatttgtccctcacctttgatggacagtttggtggatcataatgtttaggcttgacagttttttctgacatcacttggaatatatgaggctactgctttctatctcagttttcagataagaaatctactgcttttcggtggttattcagataagtgatccactggttatttttagggtcccttttacatgactagctacttcccctgcttcccttgaaaatcctcaaggttctctttgtatttattttagacagtttaattatcaggtaagtttgagtttgtttctttgagtttttgttacttggagtctgttgagctccttgggtgcttacttattgtcttaaattgttgcattctttatgactatgttgttaaatagtatccatgagtttttgtctcttccttggaacttccaaaatgcatatgtatggctgcttgatggtgtccctcaggtttctaggctgtataaatctgccttgccccttttcagactccattggtgaccactatatggttgactgacccgaagggtgtgtatcacagtgtggggacagtgtgtcagttggtctcgcaaggctgatgcatcccagagctcaattcccagacttcaatcattgcagtctcattagtgcactacgacctagaaaactctaattgtgagatatcacacagagttctttgtctcatggccaagaaaattaaggaggatggatgcaaaaaggttgaatcaaaacttttataagtgaaagtaaaaaactcttcacagtgggggtggaatgtgagtggtttacctactatgaggctgtgctttacagtttctaaggacagagaagtaaagaaatgtggttagtgttcttggagtaggtgtcatttggcttggccctgaaacttggccttggattcatctggagctgaagtgatgatttgtagaagctacaaggctcagccttggaacttggccctggaccaagaaggagctgaagtgacagcttggcctgagaccttggcctgggatcaatcaagggatgaagtaatgtctcatggccacaataattaaggaggctggatgatgcaaagttcaagtaggaactaaagtaacacaacagccatctggactctgtccagatgtcatataaggggtttgaaaccaaggcttttcattagctcagaagaaatcacaaagaggcagtgtggatgcacctattccgaaggatgggccactgactgatacaaaaacagg

SEQ ID NO: 1564391 - DNA, 4001 bp, Homo sapiens
tgatgcatttgttgccccttagttcttgtgtcctgagcagacagactgacaattaaaactcatcaattttattttcaacatactttaacatggattctatcccttgggctgagctccagatcttcctcagcacctcacactctctctcattggcctgttccaactccaacttaatattacagcgaacgagggccttacattcttccagtacaattggattgtatgaggcaagctccttaatttgaatcataacctcttgggtgaaagttccagtcaaaaatacctgagagaccaggcctttggcgcatgcctcccttgctgtcagctttcgcccagcaattaacatttcattggcagatgctttacccatcattttggggaatgtaatagaagaacagccatctggactctgtccaaaggtcgtataaggggtttggaaccaagccttttcattagcccacacgagatcacaaagaggcaggatggatgcacctagtccaatcgcagggccattgactgatacaacaataggctttttaaattgaataaaagtattcacaaagttcttgatggtgtccaccatttcaaggcttgctgtgtttctgttattccttaagtgcttcacaaagtacccaaaatcaagaccgcagcaaaagacacttccagctgcactgaacagcacgagcttgctgtcatctgcagcagcgctattcagagcattaactatttctttaattacttctgtattcagtgcatttttttctgtcgatctagttgatagcactatctgggtgaatccatcctctttcttcactacaatgtctctgtatgtgctggcactttctgttagccttatggtgaagtgcatcttcttgataaaaggctggtctctgctgtcatcagtaatatttctttgcccacctttcactcttggaactgaggtatgcatgtctgttgtcccattggctgctaatgggtctattaataccactataccctttcgggtagctgaacctgtggccatagaagcagtaactgagccagacatctgcgacattagtgggtgtatctgagtcttgttctgtattccagtctgttctgcaccaggacgtgacaaagggtcccggaggagtttcccttctgtcaccttgaagaccaccgtgtcctgctgatctgctgcaatagggtccagtttctcaagtttctgaaagccactcacagttttgtggtcaaaggggctgtcaggtgcaagggtctcaatagttgaatttattatctccatattctttgtgtcggagagaattgaagctgcctttctcctaacgttcttgctggcagcaaataacttgcggtttttggacctgtggtgtttatcagtcactggcgttttaggagagttcttagaatagtttgcttttgtagatctggaagttcttcttctggcattgtttgaaaaaattctactggttgtagtccatgtcagttttttctgtttttcagtctgtcgtctattaaaatcatgtacacatttttcacagttcatgaggtgctgctctggttcccaagtgtcatcctgtttgtcataacctttccaccgaaccaaatactgtgtattcccatttttatcctgtcttttgtcaacaatagcttcaacctcaaactcctgggaagccatgaggaaagacacgggattggaacagttgctgtgccacctttgtttcagttgcgtctccacatagacacttctttctgcctccagctcttcaccaggttctgtgtatggatgaacctcttctattttgtcaccactggtgtagtgaaaattgtgcgaaatagcagctatgccatgtgcctgaacctctccatacttactgcctggtgggacagcttgggctttgtctcatggtgcatgacaacttgctcagtagcctcaggtgagagtagctaaatccacagccccaaccctctggtgtagtacagaaagctttcttcctgcctgttactcttttgtgtttctttgtttaattgtggttgctatgacgattatatggaacattctaatgttataacatttttaaagttacactagcttaccttcagtaacatacaaagcctttactcctgtataatgtacctccattatttcacttactgagttctcaaaattatacctttattgattttatgtcaaaaacacaaattagtggtagtttttttattaaatatatttgtgttttaagttatgtggagaacaaattgtggaggtgcacattgttaattgttcgttttgttttgttttgttttgttttgttttgagatggagtctcgccctgtcaatgaggctggagtgcagtagtgagatcttggctcactacaagctccacctcccggattcatgccattctcctgtctcagcctcccgagtagctgagactacaggcacctgccacctggccctacgaatttgttgtatttttagtagagacggggtttcaccatgttagccaggattgtctcgatctcctgacctcgtgatccaagcacctcagcctcccaaaatgctgggattacaggtgtgagccactgagcccagccaaattttttatcttacatatttgttcatgtatttatctttaccttaatctttgtttgttcatactgcttttgagtatctgtccattctaccctgaagtactccataagacatttcttaaagggtagtctacttgtaaaaggtgccagtttttatatgggaatgtcataatttgtccctcacctttgatggacagtttggtggatcataatgtttaggcttgacagttttttctgacatcacttggaatatatgaggctactgctttctatctcagttttcagataagaaatctactgcttttcggtggttattcagataagtgatccactggttatttttagggtcccttttacatgactagctacttcccctgcttcccttgaaaatcctcaaggttctctttgtatttattttagacagtttaattatcaggtaagtttgagtttgtttctttgagtttttgttacttggagtctgttgagctccttgggtgcttacttattgtcttaaattgttgcattctttatgactatgttgttaaatagtatccatgagtttttgtctcttccttggaacttccaaaatgcatatgtatggctgcttgatggtgtccctcaggtttctaggctgtataaatctgccttgccccttttcagactccattggtgaccactatatggttgactgacccgaagggtgtgtatcacagtgtggggacagtgtgtcagttggtctcgcaaggctgatgcatcccagagctcaattcccagacttcaatcattgcagtctcattagtgcactacgacctagaaaactctaattgtgagatatcacacagagttctttgtctcatggccaagaaaattaaggaggatggatgcaaaaaggttgaatcaaaacttttataagtgaaagtaaaaaactcttcacagtgggggtggaatgtgagtggtttacctactatgaggctgtgctttacagtttctaaggacagagaagtaaagaaatgtggttagtgttcttggagtaggtgtcatttggcttggccctgaaacttggccttggattcatctggagctgaagtgatgatttgtagaagctacaaggctcagccttggaacttggccctggaccaagaaggagctgaagtgacagcttggcctgagaccttggcctgggatcaatcaagggatgaagtaatgtctcatggccacaataattaaggaggctggatgatgcaaagttcaagtaggaactaaagtaacacaacagccatctggactctgtccagatgtcatataaggggtttgaaaccaaggcttttcattagctcagaagaaatcacaaagaggcagtgtggatgcacctattccgaaggatgggccactgactgatacaaaaacag

SEQ ID NO: 1564392 - DNA, 4001 bp, Homo sapiens; identical to SEQ ID NO: 1564390

SEQ ID NO: 1564393 - DNA, 4001 bp, Homo sapiens; identical to SEQ ID NO: 1564391

SEQ ID NO: 1564394 - DNA, 4001 bp, Homo sapiens
atttgttgccccttagttcttgtgtcctgagcagacagactgacaattaaaactcatcaattttattttcaacatactttaacatggattctatcccttgggctgagctccagatcttcctcagcacctcacactctctctcattggcctgttccaactccaacttaatattacagcgaacgagggccttacattcttccagtacaattgcattgtatgaggcaagctccttaatttgaatcataacctcttgggtgaaagttccagtcaaaaatacctgagagaccaggcctttggcgcatgcctcccgtgctgtcagctttcgcccagcaattaacatttcattggcagatgctttacccatcattttggggaatgtaatagaagaacagccatctggactctgtccaaaggtcgtataaggggtttggaaccaagccttttcattagcccacacgagatcacaaagaggcaggatggatgcacctagtccaatggcagggccattgactgatacaacaataggctttttaaattgaataaaagtattcacaaagttcttgatggtgtccaccatttcaaggcttgctgtgtttctgtcattccttaagtgcctcacaaagtacccaaaatcaagaccgcagcaaaagacacttccagctgcactgaacagcacgagcttgctgtcatctgcagcagcgctattcagagcattaaccatttctttaattacttctgtattcagtgcatttttttctgtcgatctagttgatagcactatctgggtgaatccatcctctttcttcactacaatgtctctgtatgtgatggcactttctgttagccttatggtgaagtgcatcttcttgataaaaggctggcctctgctgtcatcagtaatatttctttgcccacctttcactcttggaactgaggtatgcatgtctgttgtcccattggctgctaatgggtctattaataccactataccctttcgggtagctgaacctgtggccatagaagcagtaactgagccagacatctgcgacattagtgggtgcatctgagtcttgttctgtattccagtctgttctgcaccaggatgtgacaaagggtcccggaggagtttcccttctgtcaccttgaagaccaccgtgtcctgctgatctgctgcaatagggtccagtttctcaagtttctgaaagccactcacagttttcttgtggtcaaaggggctgtcaggtgcaagggtctcaatagttgaatttattatctccatattctttgtgtcggagagagttgaagctgcctttctcctaacgttcttgctggcagcaaataacttgcagtttttggacctgtggtgtttatcagtcactggagttttaggagagttcttagaatagtttgcttttgtagatctggaagttcttcttctggcattgtttgaaaaaattctactggttgtagtccatgtcagttttttctgtttttcagtctgtcgtctattaaaatcatgtacacatttttcacagttcatgaggtgctgctctggttcccaagtgtcatcctgtttgtcataacctttccaccgaaccaaatactgtgtattcccatttttatcctgtcttttgtcaacaatagcttcaacctcaaactcctgggaagccatgaggaaagacacgggattggaacagttgctgtgccacctttgtttcagttgcgtctccacatagacacttctttctgcctccagctcttcaccaggttctgtgtatggatgaacctcttctatttggtcaccactggtgtagtgaaaattgtgcgaaatagcagctatgccatgtgcctgaacctctccacacttactgcctggtgggacagcttgggctttgtctcgtggtgcatgacagcttgctcagtagcctcaggtgagagtagctaaatccacagccccaaccctctggtgtagtacagaaagctttcttcctgcctgttactcttttgtgtttctttgtttaattgtggttgctatgacgattatatggaacattctaatgttataacatttttaaagttacactagcttaccttcagtaacatacaaagcctttactcctgtataatgtacctccattatttcacttactgagttctcaaaattatacctttattgattttatgtcaaaaacacaaattagtggtagtttttttattaaatatatttgtgttttaagttgtgtggagaacaaattgtggaggtgcacattgttaattgttcgttttgttttgttttgttttgttctgttttgttttgttttgagatggagtctcgccctgtcaacgagggtggagtgcagtggtgcgatcttggctcactacaagctccgcctcccggattcacgccattctcctgtctcagcctcccgagtagctgagactacaggcacctgccacctggcccggcgaatttttttttgtatttttagtagagacggggtttcaccgtgttagccaggagtgtctcgatctcctgacctcgtgatccacgcacctcagcctcccaaaatgctgggattacaggcgtgagccactgcgcccggccaaattttttatcttacatatttgttcatgtatttatctttaccttaatctttgcttgttcatactgcttttgagtgtctgtccattctaccctgaagtactccataagacatttcttaaagggtagtctacttgtaaaaggtgccagtttgtatatgggaatgtcataatttgtccctcacctttgatggacagtttggtggatcataatgtttaggcttgacagttttttctgacatcacttgcaatatattaggctactgctttccatcgttttagttttcagataagaaatctactgcttttcagtggttattcagataagcgatccactggttatttttagggtcccttttacatgactagctacttcccctgcttcccttgaaaatcctcaagattctctttgtatttattttagacagtttaattatcaggtaagtttgagtttgtttctttgagtttttgttacttggagtctgttgagctccttgggtgcttacttattgtcttaaattgttgcattctttatgactatgttgttaaatagtatccatgattttttgtctcttccttggaacttccaaaatgcgtatgtatggctgcttgatggtgtccctcaggtttctaggctgtataaatctgccttgccccttttcagactccattggtgaccactatatggttgactgaccccaagggtgtgtatcacagtgtggggacagtgtgtcagttggtctcgcaaggctgatgcgtcccagagctcaattcccagacttcaatcattgcagtctcattagtgcactacgatctagaaatctctaattgtgaggtatcacacagagttctttgtctcatggccaagaaaattcaggaggatggatgcaaaaaggttgaatcaaaacttttataagtgaaagtaaaaaactcttcacagtgaggggtgaaatgtgagtggtttacctactatgaggctgtgctttacggtttctaagggcagagaagtaaagaaatgtgcttagtgttcttggagtaggcgttatttggcttggccctgaaacttggccttggattcatctggagctgaagtgatgatttgtagaagctacaaggctcagccttggaacttggccctggaccaagaaggagctgaagtgacagcttggcctgagaccttggcctgggatcaatcaagggatgaagtaatgtctcatggccacaataattaaggaggctggatgatgcaaagttcaagtaggaactaaagtaacacaacagccatctggactctgtccagatgtcatataaggggtttgaaaccaaggcttttcattagctcagaagaaatcacaaagaggcagtgtggatgcacctattccaaaggatgggccactgac

SEQ ID NO: 1564395 - DNA, 4001 bp, Homo sapiens
catttgttgccccttagttcttgtgtcctgagcagacagactgacaattaaaactcatcaattttattttcaacatactttaacatggattctatcccttgggctgagctccagatcttcctcagcacctcacactctctctcattggcctgttccaactccaacttaatattacagcgaacgagggccttacattcttccagtacaattgcattgtatgaggcaagctccttaatttgaatcataacctcttgggtgaaagttccagtcaaaaatacctgagagaccaggcctttggcgcatgcctcccgtgctgtcagctttcgcccagcaattaacatttcattggcagatgctttacccatcattttggggaatgtaatagaagaacagccatctggactctgtccaaaggtcgtataaggggtttggaaccaagccttttcattagcccacacgagatcacaaagaggcaggatggatgcacctagtccaatggcagggccattgactgatacaacaataggctttttaaattgaataaaagtattcacaaagttcttgatggtgtccaccatttcaaggcttgctgtgtttctgtcattccttaagtgcctcacaaagtacccaaaatcaagaccgcagcaaaagacacttccagctgcactgaacagcacgagcttgctgtcatctgcagcagcgctattcagagcattaaccatttctttaattacttctgtattcagtgcatttttttctgtcgatctagttgatagcactatctgggtgaatccatcctctttcttcactacaatgtctctgtatgtgatggcactttctgttagccttatggtgaagtgcatcttcttgataaaaggctggcctctgctgtcatcagtaatatttctttgcccacctttcactcttggaactgaggtatgcatgtctgttgtcccattggctgctaatgggtctattaataccactataccctttcgggtagctgaacctgtggccatagaagcagtaactgagccagacatctgcgacattagtgggtgcatctgagtcttgttctgtattccagtctgttctgcaccaggatgtgacaaagggtcccggaggagtttcccttctgtcaccttgaagaccaccgtgtcctgctgatctgctgcaatagggtccagtttctcaagtttctgaaagccactcacagttttcttgtggtcaaaggggctgtcaggtgcaagggtctcaatagttgaatttattatctccatattctttgtgtcggagagagttgaagctgcctttctcctaacgttcttgctggcagcaaataacttgcagtttttggacctgtggtgtttatcagtcactggagttttaggagagttcttagaatagtttgcttttgtagatctggaagttcttcttctggcattgtttgaaaaaattctactggttgtagtccatgtcagttttttctgtttttcagtctgtcgtctattaaaatcatgtacacatttttcacagttcatgaggtgctgctctggttcccaagtgtcatcctgtttgtcataacctttccaccgaaccaaatactgtgtattcccatttttatcctgtcttttgtcaacaatagcttcaacctcaaactcctgggaagccatgaggaaagacacgggattggaacagttgctgtgccacctttgtttcagttgcgtctccacatagacacttctttctgcctccagctcttcaccaggttctgtgtatggatgaacctcttctatttggtcaccactggtgtagtgaaaattgtgcgaaatagcagctatgccatgtgcctgaacctctccacacttactgcctggtgggacagcttgggctttgtctcatggtgcatgacagcttgctcagtagcctcaggtgagagtagctaaatccacagccccaaccctctggtgtagtacagaaagctttcttcctgcctgttactcttttgtgtttctttgtttaattgtggttgctatgacgattatatggaacattctaatgttataacatttttaaagttacactagcttaccttcagtaacatacaaagcctttactcctgtataatgtacctccattatttcacttactgagttctcaaaattatacctttattgattttatgtcaaaaacacaaattagtggtagtttttttattaaatatatttgtgttttaagttgtgtggagaacaaattgtggaggtgcacattgttaattgttcgttttgttttgttttgttttgttctgttttgttttgttttgagatggagtctcgccctgtcaacgaggctggagtgcagtggtgcgatcttggctcactacaagctccgcctcccggattcacgccattctcctgtctcagcctcccgagtagctgagactacaggcacctgccacctggcccggcgaatttttttttgtatttttagtagagacggggtttcaccgtgttagccaggagtgtctcgatctcctgacctcgtgatccacgcacctcagcctcccaaaatgctgggattacaggcgtgagccactgcgcccggccaaattttttatcttacatatttgttcatgtatttatctttaccttaatctttgcttgttcatactgcttttgagtgtctgtccattctaccctgaagtactccataagacatttcttaaagggtagtctacttgtaaaaggtgccagtttgtatatgggaatgtcataatttgtccctcacctttgatggacagtttggtggatcataatgtttaggcttgacagttttttctgacatcacttgcaatatattaggctactgctttccatcgttttagttttcagataagaaatctactgcttttcagtggttattcagataagcgatccactggttatttttagggtcccttttacatgactagctacttcccctgcttcccttgaaaatcctcaagattctctttgtatttattttagacagtttaattatcaggtaagtttgagtttgtttctttgagtttttgttacttggagtctgttgagctccttgggtgcttacttattgtcttaaattgttgcattctttatgactatgttgttaaatagtatccatgattttttgtctcttccttggaacttccaaaatgcgtatgtatggctgcttgatggtgtccctcaggtttctaggctgtataaatctgccttgccccttttcagactccattggtgaccactatatggttgactgaccccaagggtgtgtatcacagtgtggggacagtgtgtcagttggtctcgcaaggctgatgcgtcccagagctcaattcccagacttcaatcattgcagtctcattagtgcactacgatctagaaatctctaattgtgaggtatcacacagagttctttgtctcatggccaagaaaattcaggaggatggatgcaaaaaggttgaatcaaaacttttataagtgaaagtaaaaaactcttcacagtgaggggtgaaatgtgagtggtttacctactatgaggctgtgctttacggtttctaagggcagagaagtaaagaaatgtgcttagtgttcttggagtaggcgttatttggcttggccctgaaacttggccttggattcatctggagctgaagtgatgatttgtagaagctacaaggctcagccttggaacttggccctggaccaagaaggagctgaagtgacagcttggcctgagaccttggcctgggatcaatcaagggatgaagtaatgtctcatggccacaataattaaggaggctggatgatgcaaagttcaagtaggaactaaagtaacacaacagccatctggactctgtccagatgtcatataaggggtttgaaaccaaggcttttcattagctcagaagaaatcacaaagaggcagtgtggatgcacctattccaaaggatgggccactga

SEQ ID NO: 1564396 - DNA, 4001 bp, Homo sapiens
catttgttgccccttagttcttgtgtcctgagcagacagactgacaattaaaactcatcaattttattttcaacatactttaacatggattctatcccttgggctgagctccagatcttcctcagcacctcacactctctctcattggcctgttccaactccaacttaatattacagcgaacgagggccttacattcttccagtacaattgcattgtatgaggcaagctccttaatttgaatcataacctcttgggtgaaagttccagtcaaaaatacctgagagaccaggcctttggcgcatgcctcccgtgctgtcagctttcgcccagcaattaacatttcattggcagatgctttacccatcattttggggaatgtaatagaagaacagccatctggactctgtccaaaggtcgtataaggggtttggaaccaagccttttcattagcccacacgagatcacaaagaggcaggatggatgcacctagtccaatggcagggccattgactgatacaacaataggctttttaaattgaataaaagtattcacaaagttcttgatggtgtccaccatttcaaggcttgctgtgtttctgtcattccttaagtgcctcacaaagtacccaaaatcaagaccgcagcaaaagacacttccagctgcactgaacagcacgagcttgctgtcatctgcagcagcgctattcagagcattaaccatttctttaattacttctgtattcagtgcatttttttctgtcgatctagttgatagcactatctgggtgaatccatcctctttcttcactacaatgtctctgtatgtgatggcactttctgttagccttatggtgaagtgcatcttcttgataaaaggctggcctctgctgtcatcagtaatatttctttgcccacctttcactcttggaactgaggtatgcatgtctgttgtcccattggctgctaatgggtctattaataccactataccctttcgggtagctgaacctgtggccatagaagcagtaactgagccagacatctgcgacattagtgggtgcatctgagtcttgttctgtattccagtctgttctgcaccaggatgtgacaaagggtcccggaggagtttcccttctgtcaccttgaagaccaccgtgtcctgctgatctgctgcaatagggtccagtttctcaagtttctgaaagccactcacagttttcttgtggtcaaaggggctgtcaggtgcaagggtctcaatagttgaatttattatctccatattctttgtgtcggagagagttgaagctgcctttctcctaacgttcttgctggcagcaaataacttgcagtttttggacctgtggtgtttatcagtcactggagttttaggagagttcttagaatagtttgcttttgtagatctggaagttcttcttctggcattgtttgaaaaaattctactggttgtagtccatgtcagttttttctgtttttcagtctgtcgtctattaaaatcatgtacacatttttcacagttcatgaggtgctgctctggttcccaagtgtcatcctgtttgtcataacctttccaccgaaccaaatactgtgtattcccatttttatcctgtcttttgtcaacaatagcttcaacctcaaactcctgggaagccatgaggaaagacacgggattggaacagttgctgtgccacctttgtttcagttgcgtctccacatagacacttctttctgcctccagctcttcaccaggttctgtgtatggatgaacctcttctatttggtcaccactggtgtagtgaaaattgtgcgaaatagcagctatgccatgtgcctgaacctctccacacttactgcctggtgggacagcttgggctttgtctcgtggtgcatgacagcttgctcagtagcctcaggtgagagtagctaaatccacagccccaaccctctggtgtagtacagaaagctttcttcctgcctgttactcttttgtgtttctttgtttaattgtggttgctatgacgattatatggaacattctaatgttataacatttttaaagttacactagcttaccttcagtaacatacaaagcctttactcctgtataatgtacctccattatttcacttactgagttctcaaaattatacctttattgattttatgtcaaaaacacaaattagtggtagtttttttattaaatatatttgtgttttaagttgtgtggagaacaaattgtggaggtgcacattgttaattgttcgttttgttttgttttgttttgttctgttttgttttgttttgagatggagtctcgccctgtcaacgagggtggagtgcagtggtgcgatcttggctcactacaagctccgcctcccggattcacgccattctcctgtctcagcctcccgagtagctgagactacaggcacctgccacctggcccggcgaatttttttttgtatttttagtagagacggggtttcaccgtgttagccaggagtgtctcgatctcctgacctcgtgatccacgcacctcagcctcccaaaatgctgggattacaggcgtgagccactgcgcccggccaaattttttatcttacatatttgttcatgtatttatctttaccttaatctttgcttgttcatactgcttttgagtgtctgtccattctaccctgaagtactccataagacatttcttaaagggtagtctacttgtaaaaggtgccagtttgtatatgggaatgtcataatttgtccctcacctttgatggacagtttggtggatcataatgtttaggcttgacagttttttctgacatcacttgcaatatattaggctactgctttccatcgttttagttttcagataagaaatctactgcttttcagtggttattcagataagcgatccactggttatttttagggtcccttttacatgactagctacttcccctgcttcccttgaaaatcctcaagattctctttgtatttattttagacagtttaattatcaggtaagtttgagtttgtttctttgagtttttgttacttggagtctgttgagctccttgggtgcttacttattgtcttaaattgttgcattctttatgactatgttgttaaatagtatccatgattttttgtctcttccttggaacttccaaaatgcgtatgtatggctgcttgatggtgtccctcaggtttctaggctgtataaatctgccttgccccttttcagactccattggtgaccactatatggttgactgaccccaagggtgtgtatcacagtgtggggacagtgtgtcagttggtctcgcaaggctgatgcgtcccagagctcaattcccagacttcaatcattgcagtctcattagtgcactacgatctagaaatctctaattgtgaggtatcacacagagttctttgtctcatggccaagaaaattcaggaggatggatgcaaaaaggttgaatcaaaacttttataagtgaaagtaaaaaactcttcacagtgaggggtgaaatgtgagtggtttacctactatgaggctgtgctttacggtttctaagggcagagaagtaaagaaatgtgcttagtgttcttggagtaggcgttatttggcttggccctgaaacttggccttggattcatctggagctgaagtgatgatttgtagaagctacaaggctcagccttggaacttggccctggaccaagaaggagctgaagtgacagcttggcctgagaccttggcctgggatcaatcaagggatgaagtaatgtctcatggccacaataattaaggaggctggatgatgcaaagttcaagtaggaactaaagtaacacaacagccatctggactctgtccagatgtcatataaggggtttgaaaccaaggcttttcattagctcagaagaaatcacaaagaggcagtgtggatgcacctattccaaaggatgggccactga

SEQ ID NO: 1564397 - DNA, 4001 bp, Homo sapiens
gcatttgttgccccttagttcttgtgtcctgagcagacagactgacaattaaaactcatcaattttattttcaacatactttaacatggattctatcccttgggctgagctccagatcttcctcagcacctcacactctctctcattggcctgttccaactccaacttaatattacagcgaacgagggccttacattcttccagtacaattgcattgtatgaggcaagctccttaatttgaatcataacctcttgggtgaaagttccagtcaaaaatacctgagagaccaggcctttggcgcatgcctcccgtgctgtcagctttcgcccagcaattaacatttcattggcagatgctttacccatcattttggggaatgtaatagaagaacagccatctggactctgtccaaaggtcgtataaggggtttggaaccaagccttttcattagcccacacgagatcacaaagaggcaggatggatgcacctagtccaatggcagggccattgactgatacaacaataggctttttaaattgaataaaagtattcacaaagttcttgatggtgtccaccatttcaaggcttgctgtgtttctgtcattccttaagtgcctcacaaagtacccaaaatcaagaccgcagcaaaagacacttccagctgcactgaacagcacgagcttgctgtcatctgcagcagcgctattcagagcattaaccatttctttaattacttctgtattcagtgcatttttttctgtcgatctagttgatagcactatctgggtgaatccatcctctttcttcactacaatgtctctgtatgtgatggcactttctgttagccttatggtgaagtgcatcttcttgataaaaggctggcctctgctgtcatcagtaatatttctttgcccacctttcactcttggaactgaggtatgcatgtctgttgtcccattggctgctaatgggtctattaataccactataccctttcgggtagctgaacctgtggccatagaagcagtaactgagccagacatctgcgacattagtgggtgcatctgagtcttgttctgtattccagtctgttctgcaccaggatgtgacaaagggtcccggaggagtttcccttctgtcaccttgaagaccaccgtgtcctgctgatctgctgcaatagggtccagtttctcaagtttctgaaagccactcacagttttcttgtggtcaaaggggctgtcaggtgcaagggtctcaatagttgaatttattatctccatattctttgtgtcggagagagttgaagctgcctttctcctaacgttcttgctggcagcaaataacttgcagtttttggacctgtggtgtttatcagtcactggagttttaggagagttcttagaatagtttgcttttgtagatctggaagttcttcttctggcattgtttgaaaaaattctactggttgtagtccatgtcagttttttctgtttttcagtctgtcgtctattaaaatcatgtacacatttttcacagttcatgaggtgctgctctggttcccaagtgtcatcctgtttgtcataacctttccaccgaaccaaatactgtgtattcccatttttatcctgtcttttgtcaacaatagcttcaacctcaaactcctgggaagccatgaggaaagacacgggattggaacagttgctgtgccacctttgtttcagttgcgtctccacatagacacttctttctgcctccagctcttcaccaggttctgtgtatggatgaacctcttctatttggtcaccactggtgtagtgaaaattgtgcgaaatagcagctatgccatgtgcctgaacctctccacacttactgcctggtgggacagcttgggctttgtctcatggtgcatgacagcttgctcagtagcctcaggtgagagtagctaaatccacagccccaaccctctggtgtagtacagaaagctttcttcctgcctgttactcttttgtgtttctttgtttaattgtggttgctatgacgattatatggaacattctaatgttataacatttttaaagttacactagcttaccttcagtaacatacaaagcctttactcctgtataatgtacctccattatttcacttactgagttctcaaaattatacctttattgattttatgtcaaaaacacaaattagtggtagtttttttattaaatatatttgtgttttaagttgtgtggagaacaaattgtggaggtgcacattgttaattgttcgttttgttttgttttgttttgttctgttttgttttgttttgagatggagtctcgccctgtcaacgaggctggagtgcagtggtgcgatcttggctcactacaagctccgcctcccggattcacgccattctcctgtctcagcctcccgagtagctgagactacaggcacctgccacctggcccggcgaatttttttttgtatttttagtagagacggggtttcaccgtgttagccaggagtgtctcgatctcctgacctcgtgatccacgcacctcagcctcccaaaatgctgggattacaggcgtgagccactgcgcccggccaaattttttatcttacatatttgttcatgtatttatctttaccttaatctttgcttgttcatactgcttttgagtgtctgtccattctaccctgaagtactccataagacatttcttaaagggtagtctacttgtaaaaggtgccagtttgtatatgggaatgtcataatttgtccctcacctttgatggacagtttggtggatcataatgtttaggcttgacagttttttctgacatcacttgcaatatattaggctactgctttccatcgttttagttttcagataagaaatctactgcttttcagtggttattcagataagcgatccactggttatttttagggtcccttttacatgactagctacttcccctgcttcccttgaaaatcctcaagattctctttgtatttattttagacagtttaattatcaggtaagtttgagtttgtttctttgagtttttgttacttggagtctgttgagctccttgggtgcttacttattgtcttaaattgttgcattctttatgactatgttgttaaatagtatccatgattttttgtctcttccttggaacttccaaaatgcgtatgtatggctgcttgatggtgtccctcaggtttctaggctgtataaatctgccttgccccttttcagactccattggtgaccactatatggttgactgaccccaagggtgtgtatcacagtgtggggacagtgtgtcagttggtctcgcaaggctgatgcgtcccagagctcaattcccagacttcaatcattgcagtctcattagtgcactacgatctagaaatctctaattgtgaggtatcacacagagttctttgtctcatggccaagaaaattcaggaggatggatgcaaaaaggttgaatcaaaacttttataagtgaaagtaaaaaactcttcacagtgaggggtgaaatgtgagtggtttacctactatgaggctgtgctttacggtttctaagggcagagaagtaaagaaatgtgcttagtgttcttggagtaggcgttatttggcttggccctgaaacttggccttggattcatctggagctgaagtgatgatttgtagaagctacaaggctcagccttggaacttggccctggaccaagaaggagctgaagtgacagcttggcctgagaccttggcctgggatcaatcaagggatgaagtaatgtctcatggccacaataattaaggaggctggatgatgcaaagttcaagtaggaactaaagtaacacaacagccatctggactctgtccagatgtcatataaggggtttgaaaccaaggcttttcattagctcagaagaaatcacaaagaggcagtgtggatgcacctattccaaaggatgggccactg

SEQ ID NO: 1564398 - DNA, 4001 bp, Homo sapiens; identical to SEQ ID NO: 1563279

SEQ ID NO: 1564399 - DNA, 4001 bp, Homo sapiens; identical to SEQ ID NO: 1563285

SEQ ID NO: 1564400 - DNA, 4001 bp, Homo sapiens; identical to SEQ ID NO: 1563286

SEQ ID NO: 1564401 - DNA, 4001 bp, Homo sapiens
tttttagtagagatggggtttcaccatgttaatcgggctgctctcgaaatcctgacctcaagtgatccgcccgcctcagtctcccaaagtgttgggattacaggcgtgagccaccgcgcccagcccatgatagttttaatactgaaaaagtattcatcataagggaattcagtaaaacaacagtacaatttttaacatgatatactgaaaattaaagttatcttcagaataatacccacattaattgaaagctgccagttgtaaaatagtattaagcagcactatgtaacttttgtaaaagctggcctatctatatgcaattgcaatacatgcataaaaataagttggaaaggcattcatgtatcaaaacttaactgtggttttatgtgttggtattaacatggactgctattttcttagtgtgattgttttcaaatgagtaaatatactacactacttttataatcaggaaaaaaacctaatgaaacgataagcatttcttccctctacctctaaaaatgaaaagtattattgtaaataattataacttataactcaaggtgattttttcattagcatgggtaacatgttgcacacttattacacattatagttgcttatgtatttttaatgtttatacatggtaatataaaccgtgtataaaactcctccttttatttccaaaaacgaaaagacaaaattatcaatgcagatacgcacacagcatgtaacacgcgtgtttgtgactcagtgtttggtcagcgtattcagagccacatctgtgatggcgctcaatgaacgctgggcatttaccaaactcacagaaatgcacacccaacattatctaccaattggacatttagtcaaagtttcctggtttatctacgggggaaagattgtgcctggagtttaaaaattctaaaattctcaatggtaactgccgaagccaacctcttgccacaaagatggcgtcgagtgagcttttgtgcctgtcgccgccgcagtagggagccgccatcagccagccgccatcagccaagcccccagcagctgctagccgcgaaaggatcagaggcacttcccacccagccccctcagctagtgggccgcgccttcaggccgccccacccgccacactcaggcccccacaaaccccaccaacccaccccacccagtagtacaaggaccaggagggaaccacttcctgaagaagttccggccctcccaatccaaggaggcaagtctctcagcaggcccgccgccatcttgcggagccaccaggagagcgtcagaagtgaagttggcggggtgggggcgcgtgggagtgggggaagggggaaagggcgcctaggagtgggggtggggacgcgtgggggtggggaacccgcaccccaaaccgctgccaggagagaacccggggcaggaaatgggttccgcaaggaggccgtggcccttgtaagtgaactgtgaggcagggcgtcctggggacccacgccatgcttgctgtcccgccacttctgtgcctgcctctctgtataggccgcgctgctgccaggccgcctcaccccaccctgcgggccacggctcctaatgcattcagcggggtggccccgaaacaggaaaaccgaggataaggcggagcctggtttcacccaccggtgaagaccccacaggccttgcccctcaggtctttccttcaactcaccatggtggtggcaggcagcagctcccgacaggctcaaggaggaacagaggcagtgtttcacccaccacttctgggtctgctggtgaagtccgctggaacacgctgtggggcttcgagtggtcaaaggagccaaaggctaaggtgtaaggaaaaccaagggcgggcgaaccctcggaggtagaaccgccaggctgaggagcgcaggccgactgaggcatggactgcggggctctgggaggtggctcctgtgccgggtatcggggcgcgtggtatcggcctgagccaatgggtggcagcacacccgccccctggagggtggaggcctgcgggggatgacggccgtcccccacgctgtgggtgcgtagagtacgcagggtatgccgtgcgtgtgtgctggccagtgcctgggttccaggcaggcaccgcctccaaaacacccttgaaataagtatgcatactgaaatatatggtatagttttaaaaaatgataatgtgtctgggctgtagtttcaaaatggcttccggaatgcacaggtttagcacaatcactgttagcgtcacacccaccccaaaatcttttaaagtacctgcagaaataaatagtagcaagtctgtggaaaacggagggagacatcaacaggccagaaacttggactcctttctgtcaagtttgagatataaggggttggatgggagggaacgccagttttgacattcaggatgttccttctttcaagagatagttactgagtgcctgtgattaccaggtactgcagatgcaggagtgaacagaataaaataatatctctttgctcagggattttacattttaatggaagacttcaccttctaggacttacagaaagacgctaggcctgcctagagacttacagaacattctcaagatcagagcaagggcctagagcgggagcaagctgtggggcaggtggtggagccaatcacataactttggggaccactccagcacctggttatgcacacagggctacgtggctatgacctttatcctcaaacttcacttctgtactgacggaaagaattaaaatgtgactttttgaactggcaaaatgctggactgctataacgtgagacgtgtctcactactgacatctagtaatgcgggataaaaaaaaataacgttttgtttccaataggcagataagcccataaaaaaagaagggaaattccaagaaccaaaaatcaactgaaaaccagagcaatgaattgttcaaatgattgttctcctgccctggatatgggggctgggttgtagggcagccagtcatactcgtttgcccaggacttactggttttagcactgagaaattcctgcatccctaaggaaaccagaaggattggtcctcctaggtgtgggcaaaatgttactctctctaacttgaggtctggatgtttaggggcaggaggtaagggctcaaggtgggagctggaactgagtactctgcaaaaagccattgtccctaaaatccttaggaaaaggatggagtggggaaaatataaatcacccatgaacgagcagatgaggaagcttgccccatctctggatgaagaaaatacgtatttaactctcattatattttaaaaccctagacctgcatttcatcaaagtttggggtttaaatctgtgacatattattggaatctgcaagccaagaaatgggtcctcctacaccatcaccctctctcctgcctaaagagatcctagacatggggcatctagaatgcctggcagaagcaaacataaagccgacttggatgaatccttctacaacctaggctgaaagaaaatgatcctttaaggacacgctcacagtaaaaatttatacaacactacttatcttgaataagaatggcatacaaacaagaaagttaaaacttacagaagaagcttctcagtagcaatagaaactagaagataacagtaatatgctcacgtgtgtatgtgttttgttttgtgttttttctttttgtcacgttattttattcctcaacttatttggagtaatgcagtctatatttttaagtgactgttttactatttgaaaatgtaaacttaaaatataaagctaatacatagctttactctcctcttgaataatacaaaggcctttaggatgttttagctttggacaccctcccctctctcagtttatatgttattcactattttagctctatcctggtttcaccatataaattagacatcgtttttttagacccatccacatatgtagtaacattttgcttaccatttctt

SEQ ID NO: 1564402 - DNA, 4001 bp, Homo sapiens
tttttcgtatttttagtagagatggggtttcaccatgttaatcgggctgctctcgaaatcctgacctcaagtgatccgcccgcctcagtctcccaaagtgttgggattacaggcgtgagccaccgcgcccagcccatgatagttttaatactgaaaaagtattcatcataagggaattcagtaaaacaacagtacaatttttaacatgatatactgaaaattaaagttatcttcagaataatacccacattaattgaaagctgccagttgtaaaatagtattaagcagcactatgtaacttttgtaaaagctggcctatctatatgcaattgcaatacatgcataaaaataagttggaaaggcattcatgtatcaaaacttaactgtggttttatgtgttggtattaacatggactgctattttcttagtgtgattgttttcaaatgagtaaatatactacactacttttataatcaggaaaaaaacctaatgaaacgataagcatttcttccctctacctctaaaaatgaaaagtattattgtaaataattataacttataactcaaggtgattttttcattagcatgggtaacatgttgcacacttattacacattatagttgcttatgtatttttaatgtttatacatggtaatataaaccgtgtataaaactcctccttttatttccaaaaacgaaaagacaaaattatcaatgcagatacgcacacagcatgtaacacgcgtgtttgtgactcagtgtttggtcagcgtattcagagccacatctgtgatggcgctcaatgaacgctgggcatttaccaaactcacagaaatgcacacccaacattatctaccaattggacatttagtcaaagtttcctggtttatctacgggggaaagattgtgcctggagtttaaaaattctaaaattctcaatggtaactgccgaagccaacctcttgccacaaagatggcgtcgagtgagcttttgtgcctgtcgccgccgcagtagggagccgccatcagccagccgccatcagccaagcccccagcagctgctagccgcgaaaggatcagaggcacttcccacccagccccctcagctagtgggccgcgccttcaggccgccccacccgccacactcaggcccccacaaaccccaccaacccaccccacccagtagtacaaggaccaggagggaaccacttcctgaagaagttccggccctcccaatccaaggaggcaagtctctcagcaggcccgccgccatcttgcggagccaccaggagagcgtcagaagtgaagttggcggggtgggggcgcgtgggagtgggggaagggggaaagggcgcctaggagtgggggtggggacgcgtgggggtggggaacccgcaccccaaaccgctgccaggagagaacccggggcaggaaatgggttccgcaaggaggccgtggcccttgtaagtgaactgtgaggcagggcgtcctggggacccacgccatgcttgctgtcccgccacttctgtgcctgcctctctgtataggccgcgctgctgccaggccgcctcaccccaccctgcgggccacggctcctaatgcattcagcggggtggccccgaaacaggaaaaccgaggataaggcggagcctggtttcacccaccggtgaagaccccacaggccttgcccctcaggtctttccttcaactcaccatggtggtggcaggcagcagctcccgacaggctcaaggaggaacagaggcagtgtttcacccaccacttctgggtctgctggtgaagtccgctggaacacgctgtggggcttcgagtggtcaaaggagccaaaggctaaggtgtaaggaaaaccaagggcgggcgaaccctcggaggtagaaccgccaggctgaggagcgcaggccgactgaggcatggactgcggggctctgggaggtggctcctgtgccgggtatcggggcgcgtggtatcggcctgagccaatgggtggcagcacacccgccccctggagggtggaggcctgcgggggatgacggccgtcccccacgctgtgggtgcgtagagtacgcagggtatgccgtgcgtgtgtgctggccagtgcctgggttccaggcaggcaccgcctccaaaacacccttgaaataagtatgcatactgaaatatatggtatagttttaaaaaatgataatgtgtctgggctgtagtttcaaaatggcttccggaatgcacaggtttagcacaatcactgttagcgtcacacccaccccaaaatcttttaaagtacctgcagaaataaatagtagcaagtctgtggaaaacggagggagacatcaacaggccagaaacttggactcctttctgtcaagtttgagatataaggggttggatgggagggaacgccagttttgacattcaggatgttccttctttcaagagatagttactgagtgcctgtgattaccaggtactgcagatgcaggagtgaacagaataaaataatatctctttgctcagggattttacattttaatggaagacttcaccttctaggacttacagaaagacgctaggcctgcctagagacttacagaacattctcaagatcagagcaagggcctagagcgggagcaagctgtggggcaggtggtggagccaatcacataactttggggaccactccagcacctggttatgcacacagggctacgtggctatgacctttatcctcaaacttcacttctgtactgacggaaagaattaaaatgtgactttttgaactggcaaaatgctggactgctataacgtgagacgtgtctcactactgacatctagtaatgcgggataaaaaaaaataacgttttgtttccaataggcagataagcccataaaaaaagaagggaaattccaagaaccaaaaatcaactgaaaaccagagcaatgaattgttcaaatgattgttctcctgccctggatatgggggctgggttgtagggcagccagtcatactcgtttgcccaggacttactggttttagcactgagaaattcctgcatccctaaggaaaccagaaggattggtcctcctaggtgtgggcaaaatgttactctctctaacttgaggtctggatgtttaggggcaggaggtaagggctcaaggtgggagctggaactgagtactctgcaaaaagccattgtccctaaaatccttaggaaaaggatggagtggggaaaatataaatcacccatgaacgagcagatgaggaagcttgccccatctctggatgaagaaaatacgtatttaactctcattatattttaaaaccctagacctgcatttcatcaaagtttggggtttaaatctgtgacatattattggaatctgcaagccaagaaatgggtcctcctacaccatcaccctctctcctgcctaaagagatcctagacatggggcatctagaatgcctggcagaagcaaacataaagccgacttggatgaatccttctacaacctaggctgaaagaaaatgatcctttaaggacacgctcacagtaaaaatttatacaacactacttatcttgaataagaatggcatacaaacaagaaagttaaaacttacagaagaagcttctcagtagcaatagaaactagaagataacagtaatatgctcacgtgtgtatgtgttttgttttgtgttttttctttttgtcacgttatttttttcctcaacttatttggagtaatgcagtctatatttttaagtgactgttttactatttgaaaatgtaaacttaaaatataaagctaatacatagctttactctcctcttgaataatacaaaggcctttaggatgttttagctttggacaccctcccctctctcagtttatatgttattcactattttagctctatcctggtttcaccatataaattagacatcgtttttttagacccatccacatatgtagtaacattttgctta

SEQ ID NO: 1564403 - DNA, 4001 bp, Homo sapiens
tttttcgtatttttagtagagatggggtttcactatgttaatcgggctgctctcgaaatcctgacctcaagtgatccgcccgcctcagtctcccaaagtgttgggattacaggcgtgagccaccgcgcccagcccatgatagttttaatactgaaaaagtattcatcataagggaattcagtaaaacaacagtacaatttttaacatgatatactgaaaattaaagttatcttcagaataatacccacattaattgaaagctgccagttgtaaaatagtattaagcagcactatgtaacttttgtaaaagctggcctatctatatgcaattgcaatacatgcataaaaataagttggaaaggcattcatgtatcaaaacttaactgtggttttatgtgttggtattaacatggactgctattttcttagtgtgattgttttcaaatgagtaaatatactacactacttttataatcaggaaaaaaacctaatgaaacgataagcatttcttccctctacctctaaaaatgaaaagtattattgtaaataattataacttataactcaaggtgattttttcattagcatgggtaacatgttgcacacttattacacattatagttgcttatgtatttttaatgtttatacatggtaatataaaccgtgtataaaactcctccttttatttccaaaaacgaaaagacaaaattatcaatgcagatacgcacacagcatgtaacacgcgtgtttgtgactcagtgtttggtcagcgtattcagagccacatctgtgatggcgctcaatgaacgctgggcatttaccaaactcacagaaatgcacacccaacattatctaccaattggacatttagtcaaagtttcctggtttatctacgggggaaagattgtgcctggagtttaaaaattctaaaattctcaatggtaactgccgaagccaacctcttgccacaaagatggcgtcgagtgagcttttgtgcctgtcgccgccgcagtagggagccgccatcagccagccgccatcagccaagcccccagcagctgctagccgcgaaaggatcagaggcacttcccacccagccccctcagctagtgggccgcgccttcaggccgccccacccgccacactcaggcccccacaaaccccaccaacccaccccacccagtagtacaaggaccaggagggaaccacttcctgaagaagttccggccctcccaatccaaggaggcaagtctctcagcaggcccgccgccatcttgcggagccaccaggagagcgtcagaagtgaagttggcggggtgggggcgcgtgggagtgggggaagggggaaagggcgcctaggagtgggggtggggacgcgtgggggtggggaacccgcaccccaaaccgctgccaggagagaacccggggcaggaaatgggttccgcaaggaggccgtggcccttgtaagtgaactgtgaggcagggcgtcctggggacccacgccatgcttgctgtcccgccacttctgtgcctgcctctctgtataggccgcgctgctgccaggccgcctcaccccaccctgcgggccacggctcctaatgcattcagcggggtggccccgaaacaggaaaaccgaggataaggcggagcctggtttcacccaccggtgaagaccccacaggccttgcccctcaggtctttccttcaactcaccatggtggtggcaggcagcagctcccgacaggctcaaggaggaacagaggcagtgtttcacccaccacttctgggtctgctggtgaagtccgctggaacacgctgtggggcttcgagtggtcaaaggagccaaaggctaaggtgtaaggaaaaccaagggcgggcgaaccctcggaggtagaaccgccaggctgaggagcgcaggccgactgaggcatggactgcggggctctgggaggtggctcctgtgccgggtatcggggcgcgtggtatcggcctgagccaatgggtggcagcacacccgccccctggagggtggaggcctgcgggggatgacggccgtcccccacgctgtgggtgcgcagagtacgcagggtatgccgtgcgtgtgtgctggccagtgcctgggttccaggcaggcaccgcctccaaaacacccttgaaataagtatgcatactgaaatatatggtatagttttaaaaaatgataatgtgtctgggctgtagtttcaaaatggcttccggaatgcacaggtttagcacaatcactgttagcgtcacacccaccccaaaatcttttaaagtacctgcagaaataaatagtagcaagtctgtggaaaacggagggagacatcaacaggccagaaacttggactcctttctgtcaagtttgagatataaggggttggatgggagggaacgccagttttgacattcaggatgttccttctttcaagagatagttactgagtgcctgtgattaccaggtactgcagatgcaggagtgaacagaataaaataatatctctttgctcagggattttacattttaatggaagacttcaccttctaggacttacagaaagacgctaggcctgcctagagacttacagaacattctcaagatcagagcaagggcctagagcgggagcaagctgtggggcaggtggtggagccaatcacataactttggggaccactccagcacctggttatgcacacagggctacgtggctatgacctttatcctcaaacttcacttctgtactgacggaaagaattaaaatgtgactttttgaactggcaaaatgctggactgctataacgtgagacgtgtctcactactgacatctagtaatgcgggataaaaaaaaataacgttttgtttccaataggcagataagcccataaaaaaagaagggaaattccaagaaccaaaaatcaactgaaaaccagagcaatgaattgttcaaatgattgttctcctgccctggatatgggggctgggttgtagggcagccagtcatactcgtttgcccaggacttactggttttagcactgagaaattcctgcatccctaaggaaaccagaaggattggtcctcctaggtgtgggcaaaatgttactctctctaacttgaggtctggatgtttaggggcaggaggtaagggctcaaggtgggagctggaactgagtactctgcaaaaagccattgtccctaaaatccttaggaaaaggatggagtggggaaaatataaatcacccatgaacgagcagatgaggaagcttgccccatctctggatgaagaaaatacgtatttaactctcattatattttaaaaccctagacctgcatttcatcaaagtttggggtttaaatctgtgacatattattggaatctgcaagccaagaaatgggtcctcctacaccatcaccctctctcctgcctaaagagatcctagacatggggcatctagaatgcctggcagaagcaaacataaagccgacttggatgaatccttctacaacctaggctgaaagaaaatgatcctttaaggacacgctcacagtaaaaatttatacaacactacttatcttgaataagaatggcatacaaacaagaaagttaaaacttacagaagaagcttctcagtagcaatagaaactagaagataacagtaatatgctcacgtgtgtatgtgttttgttttgtgttttttctttttgtcacgttatttttttcctcaacttatttggagtaatgcagtctatatttttaagtgactgttttactatttgaaaatgtaaacttaaaatataaagctaatacatagctttactctcctcttgaataatacaaaggcctttaggatgttttagctttggacaccctcccctctctcagtttatatgttattcactattttagctctatcctggtttcaccatataaattagacatcgtttttttagacccatccacatatgtagtaacattttgctta

SEQ ID NO: 1564404 - DNA, 4001 bp, Homo sapiens
ggggtttcaccatgttaatcgggctgctctcgaaatcctgacctcaagtgatccgcccgcctcagtctcccaaagtgttgggattacaggcgtgagccaccgcgcccagcccatgatagttttaatactgaaaaagtattcatcataagggaattcagtaaaacaacagtacaatttttaacatgatatactgaaaattaaagttatcttcagaataatacccacattaattgaaagctgccagttgtaaaatagtattaagcagcactatgtaacttttgtaaaagctggcctatctatatgcaattgcaatacatgcataaaaataagttggaaaggcattcatgtatcaaaacttaactgtggttttatgtgttggtattaacatggactgctattttcttagtgtgattgttttcaaatgagtaaatatactacactacttttataatcaggaaaaaaacctaatgaaacgataagcatttcttccctctacctctaaaaatgaaaagtattattgtaaataattataacttataactcaaggtgattttttcattagcatgggtaacatgttgcacacttattacacattatagttgcttatgtatttttaatgtttatacatggtaatataaaccgtgtataaaactcctccttttatttccaaaaacgaaaagacaaaattatcaatgcagatacgcacacagcatgtaacacgcgtgtttgtgactcagtgtttggtcagcgtattcagagccacatctgtgatggcgctcaatgaacgctgggcatttaccaaactcacagaaatgcacacccaacattatctaccaattggacatttagtcaaagtttcctggtttatctacgggggaaagattgtgcctggagtttaaaaattctaaaattctcaatggtaactgccgaagccaacctcttgccacaaagatggcgtcgagtgagcttttgtgcctgtcgccgccgcagtagggagccgccatcagccagccgccatcagccaagcccccagcagctgctagccgcgaaaggatcagaggcacttcccacccagccccctcagctagtgggccgcgccttcaggccgccccacccgccacactcaggcccccacaaaccccaccaacccaccccacccagtagtacaaggaccaggagggaaccacttcctgaagaagttccggccctcccaatccaaggaggcaagtctctcagcaggcccgccgccatcttgcggagccaccaggagagcgtcagaagtgaagttggcggggtgggggcgcgtgggagtgggggaagggggaaagggcgcctaggagtgggggtggggacgcgtgggggtggggaacccgcaccccaaaccgctgccaggagagaacccggggcaggaaatgggttccgcaaggaggccgtggcccttgtaagtgaactgtgaggcagggcgtcctggggacccacgccatgcttgctgtcccgccacttctgtgcctgcctctctgtataggccgcgctgctgccaggccgcctcaccccaccctgcgggccacggctcctaatgcattcagcggggtggccccgaaacaggaaaaccgaggataaggcggagcctggtttcacccaccggtgaagaccccacaggccttgcccctcaggtctttccttcaactcaccatggtggtggcaggcagcagctcccgacaggctcaaggaggaacagaggcagtgtttcacccaccacttctgggtctgctggtgaagtccgctggaacacgctgtggggcttcgagtggtcaaaggagccaaaggctaaggtgtaaggaaaaccaagggcgggcgaaccctcggaggtagaaccgccaggctgaggagcgcaggccgactgaggcatggactgcggggctctgggaggtggctcctgtgccgggtatcggggcgcgtggtatcggcctgagccaatgggtggcagcacacccgccccctggagggtggaggcctgcgggggatgacggccgtcccccacgctgtgggtgcgtagagtacgcagggtatgccgtgcgtgtgtgctggccagtgcctgggttccaggcaggcaccgcctccaaaacacccttgaaataagtatgcatactgaaatatatggtatagttttaaaaaatgataatgtgtctgggctgtagtttcaaaatggcttccggaatgcacaggtttagcacaatcactgttagcgtcacacccaccccaaaatcttttaaagtacctgcagaaataaatagtagcaagtctgtggaaaacggagggagacatcaacaggccagaaacttggactcctttctgtcaagtttgagatataaggggttggatgggagggaacgccagttttgacattcaggatgttccttctttcaagagatagttactgagtgcctgtgattaccaggtactgcagatgcaggagtgaacagaataaaataatatctctttgctcagggattttacattttaatggaagacttcaccttctaggacttacagaaagacgctaggcctgcctagagacttacagaacattctcaagatcagagcaagggcctagagcgggagcaagctgtggggcaggtggtggagccaatcacataactttggggaccactccagcacctggttatgcacacagggctacgtggctatgacctttatcctcaaacttcacttctgtactgacggaaagaattaaaatgtgactttttgaactggcaaaatgctggactgctataacgtgagacgtgtctcactactgacatctagtaatgcgggataaaaaaaaataacgttttgtttccaataggcagataagcccataaaaaaagaagggaaattccaagaaccaaaaatcaactgaaaaccagagcaatgaattgttcaaatgattgttctcctgccctggatatgggggctgggttgtagggcagccagtcatactcgtttgcccaggacttactggttttagcactgagaaattcctgcatccctaaggaaaccagaaggattggtcctcctaggtgtgggcaaaatgttactctctctaacttgaggtctggatgtttaggggcaggaggtaagggctcaaggtgggagctggaactgagtactctgcaaaaagccattgtccctaaaatccttaggaaaaggatggagtggggaaaatataaatcacccatgaacgagcagatgaggaagcttgccccatctctggatgaagaaaatacgtatttaactctcattatattttaaaaccctagacctgcatttcatcaaagtttggggtttaaatctgtgacatattattggaatctgcaagccaagaaatgggtcctcctacaccatcaccctctctcctgcctaaagagatcctagacatggggcatctagaatgcctggcagaagcaaacataaagccgacttggatgaatccttctacaacctaggctgaaagaaaatgatcctttaaggacacgctcacagtaaaaatttatacaacactacttatcttgaataagaatggcatacaaacaagaaagttaaaacttacagaagaagcttctcagtagcaatagaaactagaagataacagtaatatgctcacgtgtgtatgtgttttgttttgtgttttttctttttgtcacgttatttttttcctcaacttatttggagtaatgcagtctatatttttaagtgactgttttactatttgaaaatgtaaacttaaaatataaagctaatacatagctttactctcctcttgaataatacaaaggcctttaggatgttttagctttggacaccctcccctctctcagtttatatgttattcactattttagctctatcctggtttcaccatataaattagacatcgtttttttagacccatccacatatgtagtaacattttgcttaccatttctttgcatatctcagat

SEQ ID NO: 1564405 - DNA, 4001 bp, Homo sapiens
gggtttcaccatgttaatcgggctgctctcgaaatcctgacctcaagtgatccgcccgcctcagtctcccaaagtgttgggattacaggcgtgagccaccgcgcccagcccatgatagttttaatactgaaaaagtattcatcataagggaattcagtaaaacaacagtacaatttttaacatgatatactgaaaattaaagttatcttcagaataatacccacattaattgaaagctgccagttgtaaaatagtattaagcagcactatgtaacttttgtaaaagctggcctatctatatgcaattgcaatacatgcataaaaataagttggaaaggcattcatgtatcaaaacttaactgtggttttatgtgttggtattaacatggactgctattttcttagtgtgattgttttcaaatgagtaaatatactacactacttttataatcaggaaaaaaacctaatgaaacgataagcatttcttccctctacctctaaaaatgaaaagtattattgtaaataattataacttataactcaaggtgattttttcattagcatgggtaacatgttgcacacttattacacattatagttgcttatgtatttttaatgtttatacatggtaatataaaccgtgtataaaactcctccttttatttccaaaaacgaaaagacaaaattatcaatgcagatacgcacacagcatgtaacacgcgtgtttgtgactcagtgtttggtcagcgtattcagagccacatctgtgatggcgctcaatgaacgctgggcatttaccaaactcacagaaatgcacacccaacattatctaccaattggacatttagtcaaagtttcctggtttatctacgggggaaagattgtgcctggagtttaaaaattctaaaattctcaatggtaactgccgaagccaacctcttgccacaaagatggcgtcgagtgagcttttgtgcctgtcgccgccgcagtagggagccgccatcagccagccgccatcagccaagcccccagcagctgctagccgcgaaaggatcagaggcacttcccacccagccccctcagctagtgggccgcgccttcaggccgccccacccgccacactcaggcccccacaaaccccaccaacccaccccacccagtagtacaaggaccaggagggaaccacttcctgaagaagttccggccctcccaatccaaggaggcaagtctctcagcaggcccgccgccatcttgcggagccaccaggagagcgtcagaagtgaagttggcggggtgggggcgcgtgggagtgggggaagggggaaagggcgcctaggagtgggggtggggacgcgtgggggtggggaacccgcaccccaaaccgctgccaggagagaacccggggcaggaaatgggttccgcaaggaggccgtggcccttgtaagtgaactgtgaggcagggcgtcctggggacccacgccatgcttgctgtcccgccacttctgtgcctgcctctctgtataggccgcgctgctgccaggccgcctcaccccaccctgcgggccacggctcctaatgcattcagcggggtggccccgaaacaggaaaaccgaggataaggcggagcctggtttcacccaccggtgaagaccccacaggccttgcccctcaggtctttccttcaactcaccatggtggtggcaggcagcagctcccgacaggctcaaggaggaacagaggcagtgtttcacccaccacttctgggtctgctggtgaagtccgctggaacacgctgtggggcttcgagtggtcaaaggagccaaaggctaaggtgtaaggaaaaccaagggcgggcgaaccctcggaggtagaaccgccaggctgaggagcgcaggccgactgaggcatggactgcggggctctgggaggtggctcctgtgccgggtatcggggcgcgtggtatcggcctgagccaatgggtggcagcacacccgccccctggagggtggaggcctgcgggggatgacggccgtcccccacgctgtgggtgcgtagagtacgcagggtatgccgtgcgtgtgtgctggccagtgcctgggttccaggcaggcaccgcctccaaaacacccttgaaataagtatgcatactgaaatatatggtatagttttaaaaaatgataatgtgtctgggctgtagtttcaaaatggcttccggaatgcacaggtttagcacaatcactgttagcgtcacacccaccccaaaatcttttaaagtacctgcagaaataaatagtagcaagtctgtggaaaacggagggagacatcaacaggccagaaacttggactcctttctgtcaagtttgagatataaggggttggatgggagggaacgccagttttgacattcaggatgttccttctttcaagagatagttactgagtgcctgtgattaccaggtactgcagatgcaggagtgaacagaataaaataatatctctttgctcagggattttacattttaatggaagacttcaccttctaggacttacagaaagacgctaggcctgcctagagacttacagaacattctcaagatcagagcaagggcctagagcgggagcaagctgtggggcaggtggtggagccaatcacataactttggggaccactccagcacctggttatgcacacagggctacgtggctatgacctttatcctcaaacttcacttctgtactgacggaaagaattaaaatgtgactttttgaactggcaaaatgctggactgctataacgtgagacgtgtctcactactgacatctagtaatgcgggataaaaaaaaataacgttttgtttccaataggcagataagcccataaaaaaagaagggaaattccaagaaccaaaaatcaactgaaaaccagagcaatgaattgttcaaatgattgttctcctgccctggatatgggggctgggttgtagggcagccagtcatactcgtttgcccaggacttactggttttagcactgagaaattcctgcatccctaaggaaaccagaaggattggtcctcctaggtgtgggcaaaatgttactctctctaacttgaggtctggatgtttaggggcaggaggtaagggctcaaggtgggagctggaactgagtactctgcaaaaagccattgtccctaaaatccttaggaaaaggatggagtggggaaaatataaatcacccatgaacgagcagatgaggaagcttgccccatctctggatgaagaaaatacgtatttaactctcattatattttaaaaccctagacctgcatttcatcaaagtttggggtttaaatctgtgacatattattggaatctgcaagccaagaaatgggtcctcctacaccatcaccctctctcctgcctaaagagatcctagacatggggcatctagaatgcctggcagaagcaaacataaagccgacttggatgaatccttctacaacctaggctgaaagaaaatgatcctttaaggacacgctcacagtaaaaatttatacaacactacttatcttgaataagaatggcatacaaacaagaaagttaaaacttacagaagaagcttctcagtagcaatagaaactagaagataacagtaatatgctcacgtgtgtatgtgttttgttttgtgttttttctttttgtcacgttatttttttcctcaacttatttggagtaatgcagtctatatttttaagtgactgttttactatttgaaaatgtaaacttaaaatataaagctaatacatagctttactctcctcttgaataatacaaaggcctttaggatgttttagctttggacaccctcccctctctcagtttatatgttattcactattttagctctatcctggtttcaccatataaattagacatcgtttttttagacccatccacatatgtagtaacattttgcttaccatttctttgcatatctcagatc

SEQ ID NO: 1564406 - DNA, 4001 bp, Homo sapiens
ggggtttcactatgttaatcgggctgctctcgaaatcctgacctcaagtgatccgcccgcctcagtctcccaaagtgttgggattacaggcgtgagccaccgcgcccagcccatgatagttttaatactgaaaaagtattcatcataagggaattcagtaaaacaacagtacaatttttaacatgatatactgaaaattaaagttatcttcagaataatacccacattaattgaaagctgccagttgtaaaatagtattaagcagcactatgtaacttttgtaaaagctggcctatctatatgcaattgcaatacatgcataaaaataagttggaaaggcattcatgtatcaaaacttaactgtggttttatgtgttggtattaacatggactgctattttcttagtgtgattgttttcaaatgagtaaatatactacactacttttataatcaggaaaaaaacctaatgaaacgataagcatttcttccctctacctctaaaaatgaaaagtattattgtaaataattataacttataactcaaggtgattttttcattagcatgggtaacatgttgcacacttattacacattatagttgcttatgtatttttaatgtttatacatggtaatataaaccgtgtataaaactcctccttttatttccaaaaacgaaaagacaaaattatcaatgcagatacgcacacagcatgtaacacgcgtgtttgtgactcagtgtttggtcagcgtattcagagccacatctgtgatggcgctcaatgaacgctgggcatttaccaaactcacagaaatgcacacccaacattatctaccaattggacatttagtcaaagtttcctggtttatctacgggggaaagattgtgcctggagtttaaaaattctaaaattctcaatggtaactgccgaagccaacctcttgccacaaagatggcgtcgagtgagcttttgtgcctgtcgccgccgcagtagggagccgccatcagccagccgccatcagccaagcccccagcagctgctagccgcgaaaggatcagaggcacttcccacccagccccctcagctagtgggccgcgccttcaggccgccccacccgccacactcaggcccccacaaaccccaccaacccaccccacccagtagtacaaggaccaggagggaaccacttcctgaagaagttccggccctcccaatccaaggaggcaagtctctcagcaggcccgccgccatcttgcggagccaccaggagagcgtcagaagtgaagttggcggggtgggggcgcgtgggagtgggggaagggggaaagggcgcctaggagtgggggtggggacgcgtgggggtggggaacccgcaccccaaaccgctgccaggagagaacccggggcaggaaatgggttccgcaaggaggccgtggcccttgtaagtgaactgtgaggcagggcgtcctggggacccacgccatgcttgctgtcccgccacttctgtgcctgcctctctgtataggccgcgctgctgccaggccgcctcaccccaccctgcgggccacggctcctaatgcattcagcggggtggccccgaaacaggaaaaccgaggataaggcggagcctggtttcacccaccggtgaagaccccacaggccttgcccctcaggtctttccttcaactcaccatggtggtggcaggcagcagctcccgacaggctcaaggaggaacagaggcagtgtttcacccaccacttctgggtctgctggtgaagtccgctggaacacgctgtggggcttcgagtggtcaaaggagccaaaggctaaggtgtaaggaaaaccaagggcgggcgaaccctcggaggtagaaccgccaggctgaggagcgcaggccgactgaggcatggactgcggggctctgggaggtggctcctgtgccgggtatcggggcgcgtggtatcggcctgagccaatgggtggcagcacacccgccccctggagggtggaggcctgcgggggatgacggccgtcccccacgctgtgggtgcgcagagtacgcagggtatgccgtgcgtgtgtgctggccagtgcctgggttccaggcaggcaccgcctccaaaacacccttgaaataagtatgcatactgaaatatatggtatagttttaaaaaatgataatgtgtctgggctgtagtttcaaaatggcttccggaatgcacaggtttagcacaatcactgttagcgtcacacccaccccaaaatcttttaaagtacctgcagaaataaatagtagcaagtctgtggaaaacggagggagacatcaacaggccagaaacttggactcctttctgtcaagtttgagatataaggggttggatgggagggaacgccagttttgacattcaggatgttccttctttcaagagatagttactgagtgcctgtgattaccaggtactgcagatgcaggagtgaacagaataaaataatatctctttgctcagggattttacattttaatggaagacttcaccttctaggacttacagaaagacgctaggcctgcctagagacttacagaacattctcaagatcagagcaagggcctagagcgggagcaagctgtggggcaggtggtggagccaatcacataactttggggaccactccagcacctggttatgcacacagggctacgtggctatgacctttatcctcaaacttcacttctgtactgacggaaagaattaaaatgtgactttttgaactggcaaaatgctggactgctataacgtgagacgtgtctcactactgacatctagtaatgcgggataaaaaaaaataacgttttgtttccaataggcagataagcccataaaaaaagaagggaaattccaagaaccaaaaatcaactgaaaaccagagcaatgaattgttcaaatgattgttctcctgccctggatatgggggctgggttgtagggcagccagtcatactcgtttgcccaggacttactggttttagcactgagaaattcctgcatccctaaggaaaccagaaggattggtcctcctaggtgtgggcaaaatgttactctctctaacttgaggtctggatgtttaggggcaggaggtaagggctcaaggtgggagctggaactgagtactctgcaaaaagccattgtccctaaaatccttaggaaaaggatggagtggggaaaatataaatcacccatgaacgagcagatgaggaagcttgccccatctctggatgaagaaaatacgtatttaactctcattatattttaaaaccctagacctgcatttcatcaaagtttggggtttaaatctgtgacatattattggaatctgcaagccaagaaatgggtcctcctacaccatcaccctctctcctgcctaaagagatcctagacatggggcatctagaatgcctggcagaagcaaacataaagccgacttggatgaatccttctacaacctaggctgaaagaaaatgatcctttaaggacacgctcacagtaaaaatttatacaacactacttatcttgaataagaatggcatacaaacaagaaagttaaaacttacagaagaagcttctcagtagcaatagaaactagaagataacagtaatatgctcacgtgtgtatgtgttttgttttgtgttttttctttttgtcacgttatttttttcctcaacttatttggagtaatgcagtctatatttttaagtgactgttttactatttgaaaatgtaaacttaaaatataaagctaatacatagctttactctcctcttgaataatacaaaggcctttaggatgttttagctttggacaccctcccctctctcagtttatatgttattcactattttagctctatcctggtttcaccatataaattagacatcgtttttttagacccatccacatatgtagtaacattttgcttaccatttctttgcatatctcagat

SEQ ID NO: 1564407 - DNA, 4001 bp, Homo sapiens
gggtttcaccatgttaatcgggctgctctcgaaatcctgacctcaagtgatccgcccgcctcagtctcccaaagtgttgggattacaggcgtgagccaccgcgcccagcccatgatagttttaatactgaaaaagtattcatcataagggaattcagtaaaacaacagtacaatttttaacatgatatactgaaaattaaagttatcttcagaataatacccacattaattgaaagctgccagttgtaaaatagtattaagcagcactatgtaacttttgtaaaagctggcctatctatatgcaattgcaatacatgcataaaaataagttggaaaggcattcatgtatcaaaacttaactgtggttttatgtgttggtattaacatggactgctattttcttagtgtgattgttttcaaatgagtaaatatactacactacttttataatcaggaaaaaaacctaatgaaacgataagcatttcttccctctacctctaaaaatgaaaagtattattgtaaataattataacttataactcaaggtgattttttcattagcatgggtaacatgttgcacacttattacacattatagttgcttatgtatttttaatgtttatacatggtaatataaaccgtgtataaaactcctccttttatttccaaaaacgaaaagacaaaattatcaatgcagatacgcacacagcatgtaacacgcgtgtttgtgactcagtgtttggtcagcgtattcagagccacatctgtgatggcgctcaatgaacgctgggcatttaccaaactcacagaaatgcacacccaacattatctaccaattggacatttagtcaaagtttcctggtttatctacgggggaaagattgtgcctggagtttaaaaattctaaaattctcaatggtaactgccgaagccaacctcttgccacaaagatggcgtcgagtgagcttttgtgcctgtcgccgccgcagtagggagccgccatcagccagccgccatcagccaagcccccagcagctgctagccgcgaaaggatcagaggcacttcccacccagccccctcagctagtgggccgcgccttcaggccgccccacccgccacactcaggcccccacaaaccccaccaacccaccccacccagtagtacaaggaccaggagggaaccacttcctgaagaagttccggccctcccaatccaaggaggcaagtctctcagcaggcccgccgccatcttgcggagccaccaggagagcgtcagaagtgaagttggcggggtgggggcgcgtgggagtgggggaagggggaaagggcgcctaggagtgggggtggggacgcgtgggggtggggaacccgcaccccaaaccgctgccaggagagaacccggggcaggaaatgggttccgcaaggaggccgtggcccttgtaagtgaactgtgaggcagggcgtcctggggacccacgccatgcttgctgtcccgccacttctgtgcctgcctctctgtataggccgcgctgctgccaggccgcctcaccccaccctgcgggccacggctcctaatgcattcagcggggtggccccgaaacaggaaaaccgaggataaggcggagcctggtttcacccaccggtgaagaccccacaggccttgcccctcaggtctttccttcaactcaccatggtggtggcaggcagcagctcccgacaggctcaaggaggaacagaggcagtgtttcacccaccacttctgggtctgctggtgaagtccgctggaacacgctgtggggcttcgagtggtcaaaggagccaaaggctaaggtgtaaggaaaaccaagggcgggcgaaccctcggaggtagaaccgccaggctgaggagcgcaggccgactgaggcatggactgcggggctctgggaggtggctcctgtgccgggtatcggggcgcgtggtatcggcctgagccaatgggtggcagcacacccgccccctggagggtggaggcctgcgggggatgacggccgtcccccacgctgtgggtgcgtagagtacgcagggtatgccgtgcgtgtgtgctggccagtgcctgggttccaggcaggcaccgcctccaaaacacccttgaaataagtatgcatactgaaatatatggtatagttttaaaaaatgataatgtgtctgggctgtagtttcaaaatggcttccggaatgcacaggtttagcacaatcactgttagcgtcacacccaccccaaaatcttttaaagtacctgcagaaataaatagtagcaagtctgtggaaaacggagggagacatcaacaggccagaaacttggactcctttctgtcaagtttgagatataaggggttggatgggagggaacgccagttttgacattcaggatgttccttctttcaagagatagttactgagtgcctgtgattaccaggtactgcagatgcaggagtgaacagaataaaataatatctctttgctcagggattttacattttaatggaagacttcaccttctaggacttacagaaagacgctaggcctgcctagagacttacagaacattctcaagatcagagcaagggcctagagcgggagcaagctgtggggcaggtggtggagccaatcacataactttggggaccactccagcacctggttatgcacacagggctacgtggctatgacctttatcctcaaacttcacttctgtactgacggaaagaattaaaatgtgactttttgaactggcaaaatgctggactgctataacgtgagacgtgtctcactactgacatctagtaatgcgggataaaaaaaaataacgttttgtttccaataggcagataagcccataaaaaaagaagggaaattccaagaaccaaaaatcaactgaaaaccagagcaatgaattgttcaaatgattgttctcctgccctggatatgggggctgggttgtagggcagccagtcatactcgtttgcccaggacttactggttttagcactgagaaattcctgcatccctaaggaaaccagaaggattggtcctcctaggtgtgggcaaaatgttactctctctaacttgaggtctggatgtttaggggcaggaggtaagggctcaaggtgggagctggaactgagtactctgcaaaaagccattgtccctaaaatccttaggaaaaggatggagtggggaaaatataaatcacccatgaacgagcagatgaggaagcttgccccatctctggatgaagaaaatacgtatttaactctcattatattttaaaaccctagacctgcatttcatcaaagtttggggtttaaatctgtgacatattattggaatctgcaagccaagaaatgggtcctcctacaccatcaccctctctcctgcctaaagagatcctagacatggggcatctagaatgcctggcagaagcaaacataaagccgacttggatgaatccttctacaacctaggctgaaagaaaatgatcctttaaggacacgctcacagtaaaaatttatacaacactacttatcttgaataagaatggcatacaaacaagaaagttaaaacttacagaagaagcttctcagtagcaatagaaactagaagataacagtaatatgctcacgtgtgtatgtgttttgttttgtgttttttctttttgtcacgttattttattcctcaacttatttggagtaatgcagtctatatttttaagtgactgttttactatttgaaaatgtaaacttaaaatataaagctaatacatagctttactctcctcttgaataatacaaaggcctttaggatgttttagctttggacaccctcccctctctcagtttatatgttattcactattttagctctatcctggtttcaccatataaattagacatcgtttttttagacccatccacatatgtagtaacattttgcttaccatttctttgcatatctcagatc

SEQ ID NO: 1564408 - DNA, 4001 bp, Homo sapiens; identical to SEQ ID NO: 1564406

SEQ ID NO: 1564409 - DNA, 4001 bp, Homo sapiens; identical to SEQ ID NO: 1564404

SEQ ID NO: 1564410 - DNA, 4001 bp, Homo sapiens; identical to SEQ ID NO: 1564405

SEQ ID NO: 1564411 - DNA, 4001 bp, Homo sapiens
taacacgtagaccacctatcttctgcctcatcgcccaaacttccaaaggatctgcccttaatggaaacacagttaaacctatatcaacaatccttcggcgataacaagaaagtaaaccacaaataacctgtcccgctaatcaacattcgaggttagttttctaccggacgacttctgcatgtatcgcctaaagtaaagatacaataccatataaaaaccgcacagctctcggctaggcggctgtccagtgactgaattaacaaaggggtgtagcgcaatgctggatctctaaccttccaggtgtctttccgcgggcgtccaatttccattatttctacagggtcaagagaagcacgcggcagccatccttccctaccctccccaccatccctttccggtccttctgcgtcacaaaactttccataccggaagcccagtttcggcacgctcagcacccgggcaacggttgctccgtggctacgggaccccaccagaaacaagatacaggatacttgttacgttgtgctatattatagtcactcgtcttcaagaattccacaggcctggcccctctgctcaaggaacacagcgctgccaagtcacacaattgtatacacaaagactctggccatttgcccgagcaaagaccatactactctttcttctcgctacacaaactgggtggcctgaatacactttcttcttaacaatgacactactgcgaatacgtcaggggcgccagataagagcctcaccctggacataaaaacggtccgcttttgcgaaccgcctccctcccccgccccctcacaaacgggttcgtggtcgcacatgcgcgtctccacgggacaagcaaacacaaaagccgccattgcgtgaggcccagtactataccagaataccagcgtaaccactaccattaacgttactgccatcgcacgatcccttccgtacgtggtcttgtcatggtctcatgcagtttctctccccatttccctagagtcccagtcacataacacacgaacccaccagaagtgaaactgaaaaaccaattaacagtgcgccacaaaccgtcaggccaagtaaagggtcccgtagaaagcctcggtaggcttactttgactcacctgctggtccagttcagggtcatttttcaccaccacatgactcatccctgaagagaagcgaaaaatcgggtagtccactgtaggtgtgagaccgaatagcggaactcttacactggacctacagctattaagcgcactggttagcctacgcggtaatatggcccctcccacagctatacgacagcacgcacaacgtgcgtaatcgttggctccacccctccaccaccaccacccaatccctttatcgctaccgttacttctccctaaatcgcgttcgtttagtcataagatcgcgggattacgtagtcccagcgcctctcaaaattcgcgcgatgtttgctatccccgccctctcctaatgccttcgaattctagggatctagcaagatatctttcgcctttttcgccttggggaaatcttaaacacagtgacaatctaccactaactcccgctccctccttacccaccctcaacttcccttcttccttaagcactctctcttcccttttacttctgagaataggaagtttcgtaaaatttttccgttccaactagccgtcacctacctttgacaagcttcagcaaagttggaactagtcaaaaaactctctgaagccaagatagataagggttacgggatcccaggtgttaggcgcagtgaccattttacgtgagcgatccacggtggtttgaatacaatcttcaggttagggaggtgaaagaacaggtccgcagaaggtccctctgcaggatggacctgactgcacctgaggaaagctgagtggattccgcagcacgtgtgaccagccagaggctcgacagacttgacagggttaggctgctggggttcacctaggaactccagacccctctagtttttctaccggtgtgcctgcgctttatgagcatacggctttagcatcacaggatgaagaaacaatgaaacaattacatactgaatgacgttgatgataacacacctaccaggggacctaggcctaggcccttaacgcaccctggcatagtgatgaagaaacaatgaaacaattacatactgaatgacgttgatgataacacacctaccaggggacctaggcctaggcccttaacgcaccctggcatagtgatgaagaaacaatgaaacaattacatactgaatgacgttgattataacacacctacaaggggacctaggcctaggcccttaacgcaccctggcataggtcccttgttttcacgaaacaatgaaacaattatatactgaatgaccctggtgataacacacctaccgggggacctaggcccttaacgcacactggcataggtcccttgtttttctgggcaccctgcaacctaggttaaccagtgctatactacgtccccaaagccagcctagccatgggattgtgaaagactcttttggttgcccaaaagaatgagggttgagggggatcggcctactgaaggaaccactacaccaaagttgtcctacgttcgtaacaacttacaggcgctgcagtgggtgggaaatagtcttttgccctagaaggagttactttttttggccaaattctcagtcctccctctagtccagattcagcagacaggcaggaaaaaaaaaaaaaaaaaaaaaaaaagcttagtactagattcctggctttaactaatagccatatacgtggttttacaaacacttcttccctctgaactctcagcgaaaccagattaaatatccagattttacaccgtccttcaaagggtttcctagtgctaaaattcaaatacctccattctcaaaacattatcacaaatatttctgcttttccgaatttaaaattaaaacattcaaagtgattggaacatacactttctattcagtgttcccagagtgaagttggtttactgctttggcaagttaaagttgtcaactagatttccttttttataacatattttgtgtcgacacctttaccattctcaagttaaattcacacgtgatataaaataaatttattggccttctccatttttgaccttcctttcctctctctttgcctcccaaagaaataaactcaaatgatgcacaatgacacccctctggcccctaacaaacctaattattatataattaaaagaatatttataataaaatatgtattttggcatgtaaatgaccgccactgctacactgacaaatacacaagtggttgcctaatttagctgcaaatacaaacagaatgtattcacaactcactgtattatgaacagggttgcaaacggtagtatttctaaaatggtaaaaacaatataaatttatacagtcgttgccttctcggggggaaaaaaaacactccctgtatgtttaaagtattcaaaaatccttttggtttgtttgtttgtttgtttttgtttttgtgacaggatctcacttcctcatccaggctggagtgcagtggtgggatcttggctcactgcagcatccacctcccaggttcaggtaattcaccttagcctcccggtagctgggaccgcagttgcacaccacccaccatgccaggctaattttttttttttaactgagaaggggttttgtcattttgcccaagctgggctcaaactcctgagctcaagggatctgcctgctttggcctcccaaagtgctgggattgcagacacaagccactgcaaccagcctaagaatacttttgagtttatgtttaaagcaattttgtaggtttaaatcctaaccaaagtattttctactgtgaatgtccctgaattacaggacatctaacaccctgagccctgcctgctaaaatgtcagcagcccatgccaatcattgtgatattcaaaactgctagcacaagtttac

SEQ ID NO: 1564412 - DNA, 4001 bp, Homo sapiens
catatagtcaagttgtaaagaaaaaaatgtaaatttaaaattaacaagtccagtaagacattaacattaagctctgataaacactccatttttaaaaaaagttttacttactgctcgctgtacttgctcctccactctgtttttcagagttcaggtccagattagcaagctagaagagatatcaatagctcacatgctgatacacaagaacagataacatcacaaaagacaaatgagacctagattccaatcttatcctgtaccacaaacttagctgccatgtcggcctggtattacctgccaaattttaaagatgtccaggtctaccaaccatgacaaatgcaaatggcatcagctgaataccagcagtttcacagtaatgagttcaaattcattaattcaaaacaaattttccttaacaattttccgaagtgaaaactttcctaactaaaaaaatttaccatcaatttctcagtaacttcaacatccaatttagctacagtcatgatagtgaaatgttcccaatgacagtggttttcttgatattctaaccctaaaaataaatggacattaaaatcatttgaagattccttaatttatctttgccctgaagacggtacaactatttttaatgcagataaattcctaaacatcaaaagctcaaaaaaaaaaaaaaacttcactatgttttgagtactacgcggctttacacagctgtcacttaatgttcgatactttatggagatggtagcatttatttctcccattctaaacatcaaattcggaggtctttggttgcgaagttaaaaagcaacacatctcgtatttaatgtttctaaaatgacatatccaatctcaattcatgcctccttatactgatggattttaaaactagaaaaaaggttatttcgctttaagggctttcagcataataccttacctagaacaactctgaagcggtggcgggggtgggggaaaaaaccatgtacgttaaaatagatttttttcaaaaaacacgttaagaccaatgccaagagcaccttggtcacctttttgcacaaactttctatgccgtagaaagcttacatatataagttcaagatactatcacattacatgaatcatcaattaagatactactgtacttaaaaatcttgccatctgaatttactacttaattctagtgaactagacagcacggtttatcaagagttaaagggatgccaattacatagaaaacataaatgcgtattgcccaggctcttaattttctatttctgtggtctatttaacacgtcaagtctcagtaaactgcaggcgttaatacgtcgtcagtggaaaaataaccttcaaaggcagaccattaaatccctcaaacgacacctaacagcaaaatttaaaatcatttagcatcactaagctttaattacaactaagaagttccgacggtattttttggttaaaaaaaaaatgtatgctctttattcattctctcccctagacttgggaggcagaaatgcagggataagcttgcaaacgactggtgtgccaaatgcaaaagcgcggtaggttcctgacacagaaaacgagcctgatctaacacgtagaccacctatcttctgcctcatcgcccaaacttccaaaggatctgcccttaatggaaacacagttaaacctatatcaacaatccttcggcgataacaagaaagtaaaccacaaataacctgtcccgctaatcaacattcgaggttagttttctaccggacgacttctgcatgtatcgcctaaagtaaagatacaataccatataaaaaccgcacagctctcggctaggcggctgtccagtgactgaattaacaaaggggtgtagcgcaatgctggatctctaaccttccaggtgtctttccgcgggcgtccaatttccattatttctacagggtcaagagaagcacgcggcagccatccttccctaccctccccaccatccctttccggtccttctgcgtcacaaaactttccataccggaagcccagtttcggcacgctcagcacccgggcaacggttgctccgtggctacgggaccccaccagaaacaagatacaggatacttgttacgttgtgctatattatagtcactcgtcttcaagaattccacaggcctggcccctctgctcaaggaacacagcgctgccaagtcacacaattgtatacacaaagactctggccatttgcccgagcaaagaccatactactctttcttctcgctacacaaactgggtggcctgaatacactttcttcttaacaatgacactactgcgaatacgtcaggggcgccagataagagcctcaccctggacataaaaacggtccgcttttgcgaaccgcctccctcccccgccccctcacaaacgggttcgtggtcgcacatgcgcgtctccacgggacaagcaaacacaaaagccgccattgcgtgaggcccagtactataccagaataccagcgtaaccactaccattaacgttactgccatcgcacgatcccttccgtacgtggtcttgtcatggtctcatgcagtttctctccccatttccctagagtcccagtcacataacacacgaacccaccagaagtgaaactgaaaaaccaattaacagtgcgccacaaaccgtcaggccaagtaaagggtcccgtagaaagcctcggtaggcttactttgactcacctgctggtccagttcagggtcatttttcaccaccacatgactcatccctgaagagaagcgaaaaatcgggtagtccactgtaggtgtgagaccgaatagcggaactcttacactggacctacagctattaagcgcactggttagcctacgcggtaatatggcccctcccacagctatacgacagcacgcacaacgtgcgtaatcgttggctccacccctccaccaccaccacccaatccctttatcgctaccgttacttctccctaaatcgcgttcgtttagtcataagatcgcgggattacgtagtcccagcgcctctcaaaattcgcgcgatgtttgctatccccgccctctcctaatgccttcgaattctagggatctagcaagatatctttcgcctttttcgccttggggaaatcttaaacacagtgacaatctaccactaactcccgctccctccttacccaccctcaacttcccttcttccttaagcactctctcttcccttttacttctgagaataggaagtttcgtaaaatttttccgttccaactagccgtcacctacctttgacaagcttcagcaaagttggaactagtcaaaaaactctctgaagccaagatagataagggttacgggatcccaggtgttaggcgcagtgaccattttacgtgagcgatccacggtggtttgaatacaatcttcaggttagggaggtgaaagaacaggtccgcagaaggtccctctgcaggatggacctgactgcacctgaggaaagctgagtggattccgcagcacgtgtgaccagccagaggctcgacagacttgacagggttaggctgctggggttcacctaggaactccagacccctctagtttttctaccggtgtgcctgcgctttatgagcatacggctttagcatcacaggatgaagaaacaatgaaacaattacatactgaatgacgttgatgataacacacctaccaggggacctaggcctaggcccttaacgcaccctggcatagtgatgaagaaacaatgaaacaattacatactgaatgacgttgatgataacacacctaccaggggacctaggcctaggcccttaacgcaccctggcatagtgatgaagaaacaatgaaacaattacatactgaatgacgttgattataacacacctacaaggggacctaggcctaggcccttaacgcaccctggcataggtcccttgttttcacgaaacaatgaaacaattatatactgaatgaccctggtg

SEQ ID NO: 1564413 - DNA, 4001 bp, Homo sapiens
gctttcagcataataccttacctagaacaactctgaagcggtggcgggggtgggggaaaaaaccatgtacgttaaaatagatttttttcaaaaaacacgttaagaccaatgccaagagcaccttggtcacctttttgcacaaactttctatgccgtagaaagcttacatatataagttcaagatactatcacattacatgaatcatcaattaagatactactgtacttaaaaatcttgccatctgaatttactacttaattctagtgaactagacagcacggtttatcaagagttaaagggatgccaattacatagaaaacataaatgcgtattgcccaggctcttaattttctatttctgtggtctatttaacacgtcaagtctcagtaaactgcaggcgttaatacgtcgtcagtggaaaaataaccttcaaaggcagaccattaaatccctcaaacgacacctaacagcaaaatttaaaatcatttagcatcactaagctttaattacaactaagaagttccgacggtattttttggttaaaaaaaaaatgtatgctctttattcattctctcccctagacttgggaggcagaaatgcagggataagcttgcaaacgactggtgtgccaaatgcaaaagcgcggtaggttcctgacacagaaaacgagcctgatctaacacgtagaccacctatcttctgcctcatcgcccaaacttccaaaggatctgcccttaatggaaacacagttaaacctatatcaacaatccttcggcgataacaagaaagtaaaccacaaataacctgtcccgctaatcaacattcgaggttagttttctaccggacgacttctgcatgtatcgcctaaagtaaagatacaataccatataaaaaccgcacagctctcggctaggcggctgtccagtgactgaattaacaaaggggtgtagcgcaatgctggatctctaaccttccaggtgtctttccgcgggcgtccaatttccattatttctacagggtcaagagaagcacgcggcagccatccttccctaccctccccaccatccctttccggtccttctgcgtcacaaaactttccataccggaagcccagtttcggcacgctcagcacccgggcaacggttgctccgtggctacgggaccccaccagaaacaagatacaggatacttgttacgttgtgctatattatagtcactcgtcttcaagaattccacaggcctggcccctctgctcaaggaacacagcgctgccaagtcacacaattgtatacacaaagactctggccatttgcccgagcaaagaccatactactctttcttctcgctacacaaactgggtggcctgaatacactttcttcttaacaatgacactactgcgaatacgtcaggggcgccagataagagcctcaccctggacataaaaacggtccgcttttgcgaaccgcctccctcccccgccccctcacaaacgggttcgtggtcgcacatgcgcgtctccacgggacaagcaaacacaaaagccgccattgcgtgaggcccagtactataccagaataccagcgtaaccactaccattaacgttactgccatcgcacgatcccttccgtacgtggtcttgtcatggtctcatgcagtttctctccccatttccctagagtcccagtcacataacacacgaacccaccagaagtgaaactgaaaaaccaattaacagtgcgccacaaaccgtcaggccaagtaaagggtcccgtagaaagcctcggtaggcttactttgactcacctgctggtccagttcagggtcatttttcaccaccacatgactcatccctgaagagaagcgaaaaatcgggtagtccactgtaggtgtgagaccgaatagcggaactcttacactggacctacagctattaagcgcactggttagcctacgcggtaatatggcccctcccacagctatacgacagcacgcacaacgtgcgtaatcgttggctccacccctccaccaccaccacccaatccctttatcgctaccgttacttctccctaaatcgcgttcgtttagtcataagatcgcgggattacgtagtcccagcgcctctcaaaattcgcgcgatgtttgctatccccgccctctcctaatgccttcgaattctagggatctagcaagatatctttcgcctttttcgccttggggaaatcttaaacacagtgacaatctaccactaactcccgctccctccttacccaccctcaacttcccttcttccttaagcactctctcttcccttttacttctgagaataggaagtttcgtaaaatttttccgttccaactagccgtcacctacctttgacaagcttcagcaaagttggaactagtcaaaaaactctctgaagccaagatagataagggttacgggatcccaggtgttaggcgcagtgaccattttacgtgagcgatccacggtggtttgaatacaatcttcaggttagggaggtgaaagaacaggtccgcagaaggtccctctgcaggatggacctgactgcacctgaggaaagctgagtggattccgcagcacgtgtgaccagccagaggctcgacagacttgacagggttaggctgctggggttcacctaggaactccagacccctctagtttttctaccggtgtgcctgcgctttatgagcatacggctttagcatcacaggatgaagaaacaatgaaacaattacatactgaatgacgttgatgataacacacctaccaggggacctaggcctaggcccttaacgcaccctggcatagtgatgaagaaacaatgaaacaattacatactgaatgacgttgatgataacacacctaccaggggacctaggcctaggcccttaacgcaccctggcatagtgatgaagaaacaatgaaacaattacatactgaatgacgttgattataacacacctacaaggggacctaggcctaggcccttaacgcaccctggcataggtcccttgttttcacgaaacaatgaaacaattatatactgaatgaccctggtgataacacacctaccgggggacctaggcccttaacgcacactggcataggtcccttgtttttctgggcaccctgcaacctaggttaaccagtgctatactacgtccccaaagccagcctagccatgggattgtgaaagactcttttggttgcccaaaagaatgagggttgagggggatcggcctactgaaggaaccactacaccaaagttgtcctacgttcgtaacaacttacaggcgctgcagtgggtgggaaatagtcttttgccctagaaggagttactttttttggccaaattctcagtcctccctctagtccagattcagcagacaggcaggaaaaaaaaaaaaaaaaaaaaaaaaagcttagtactagattcctggctttaactaatagccatatacgtggttttacaaacacttcttccctctgaactctcagcgaaaccagattaaatatccagattttacaccgtccttcaaagggtttcctagtgctaaaattcaaatacctccattctcaaaacattatcacaaatatttctgcttttccgaatttaaaattaaaacattcaaagtgattggaacatacactttctattcagtgttcccagagtgaagttggtttactgctttggcaagttaaagttgtcaactagatttccttttttataacatattttgtgtcgacacctttaccattctcaagttaaattcacacgtgatataaaataaatttattggccttctccatttttgaccttcctttcctctctctttgcctcccaaagaaataaactcaaatgatgcacaatgacacccctctggcccctaacaaacctaattattatataattaaaagaatatttataataaaatatgtattttggcatgtaaatgaccgccactgctacactgacaa

SEQ ID NO: 1564414 - DNA, 4001 bp, Homo sapiens; identical to SEQ ID NO: 1563478

SEQ ID NO: 1564415 - DNA, 4001 bp, Homo sapiens
tcctgcctcagcctccccacggccggctaattttttttgtatttttagtagagagggggtttcaccatgttagcctggatggtcacgatctcctgaccccgtgatccacccgccttggcctccaaggtgctgggattacacgcgtgagccaccgcgcccggccactatacttcttttgtgtgccttctgaggcacatatgataaaaaaaaaattgttttcaatttaccaggattaaccaaaccctgatcattccccttctattgtgataccatgtaacagaatccactttaaattatattttagaggaatgaggctaggcatgatcatacaaaaattaaagtcgtttaatattttatctcgtttcctttctaagatcaaaaaatccacacttcctctttaaacaaatccgacgtgttttggagatactctctttattgagaacatttttaggcatcactcagtttaaaagttctaccctacaagaataaaggaagccttactatttaaggatagagtcaggtacagggataataacatcagcaaagatttaatggacattttgcaaagggagatactctgatctttagagctgatggcttagagaactgggaatctcatcactagaaataaaggtgagaacaagatacctactgaagttgttcagtaccatctgagaaaatgttagtgaaaaagcataagcctttgctaactctttctaattagacttctcccagaatacactttatcctccaataattttgcagtaaaaaataaaataaaataaaataaaaccttattatacacacaacccgttagtgggttttcgggagagcaaagagtaatgcccaggaaagactgcactgtactgtcaccaagtacctcaagagctgtgtgtcgtgacagctaaaaagagaaaatgaaacagattccatgctgccaacaggcaagtaaaaagaagacaaattggtctgggtcccaggaaggaataatctaaacagagtttttgtggactataaaacatggtcccctcctgtggaaaataatattttgtttccacctacagttttcttcaagcaattacaagggcactaaaagtgagagattacctcaggtgtataaaaacgagaatttctttcagaaatgactgagaaagggttctaccgaggttagacctcctactttagaagctgtgagtaaacttattttcaagtctaagtttcgtgtgaaagtttagcctcagaatgaagggaacgttgatatctttactcccacaatatttatcggatacggaagttgaaaacctgcctaaataggtaacaaatcttctgcaaaagaatgttacactctataaagggatggggtagagtaaaacgccagaaatgaacctaaacatgcttcaaggcttccccactgtttaacaaggaaaagggagtatccttagcaatacttttaactgtccagataggtaagtcttcaaagttaagaaccgcttccaggaaagtagcagggaagtgtttgcatgtgcctattctggaaagccaggccgtccggttaaggtccctcaaccgtccctacctatacgttttccgtctggcgtgaaatcagcagcaaaagcccgctatcttccgaaggaggccccacaaaaatggcgtctgtcccaccccaatgtgaccaaatagggcattcccagctcctttcccgaacacagtgctggggtcgcagtggccagtaccgccgttagaacagtcactgcggcctggaacaggcgtcggggttactggcagagcaagccgaggtatagtcccagaggcttacagcagtacctttattcttgggcatggcggtgatgacagcctcgtgagacctcttccgactcctttctggcggttactactctaagagccgactgaactaagatgcagcaggtgggtgcgcagaagaggctggctacagagctctctaataaactgctgacgcgcactctctggcgtcaccaaaaggcgacgcagctgattacgatgcttttccccgcctctcttcggctgaggcacggccaaatgactgacacctagtagactccatcaggataccggagagtttgctgcaggatgaataaacaggaagcggggcgggactcagcatggagaaggtggagtcaaggatgaaatgggcggggccctggagtattctcctttgctaaaaaacggtcttccagtttcagaagttcgtgggtcatttaactgtaaacgcctaaattttaagagagcccttactcttatacagtgaatttggaggactggcttaggacaaggccctctatgttcagaatgtttatcacttttctctcttttttttttttttttttgacaacgaagtttcgctcttgttgcccatgctggagtgcaggggcgcgatctgcccgtctaatttttgtatttttagtagagatggggtttcaccatgttggccaggctctcaaacccctgacctagtgatcctcccgcctctgccgcccaaattcctgggattgcagtagtgagccaccgcgcccggcctatttttttcagtcttatcttctctacctcaccacctcacagtaaagcatgtaagtacagaggccgcatctgttgcttacaattgctagcacccagcggaatactgacaaaaagtagacagtaaatatatacaggaaatggaaagtaaatatacataggaaggagtgagactaagcatctgaatcttataataaatcatggcttaaccgaatgtctcaaatggactggctgtggaggtcaaattatttcaagacaaattccatttgattatggtatacaatcatttaatttactggatttgttgtgtgtgtactattatgtttagaatcttagcatctgtgttaagatatattggcttgtatcgtgtgatgactttgactttaggatcaatataatcccggcttcacagaatgaactgtgtagtgtccctttttcttctgtgtttttggacacattcgaggattgatgtaaattttttaaatggtcctaggccttagtttggattatgaattcgtgctgtatttattcccaagtcagttctggtagtttgtatgtaccagaaatttgttcatttattctaaattataaaacttgttgggcgtataattggccatcatatacaaagtatagtatcttcctaatccttttttttccctttctgcaaggtaaatagtatgtatgtatcaggactttgttcatttattctaaattatcttacttgttgggcatataattggccatcatatacatagtgtagtatcctcctaatcctttttttttctttctttttttctgcaaggtaagtggtagtaccctgatcatcactactggttttaaggaatttaagtcttcatggttttgtttttaaaagcctagtgatgaagccataacattaaaaataaaattttctctgaacccagaagtcctctccacaaagacagtagagaatgaaatcagttttactgttaaaaatatgaaatatgaatttaatgtacattgtagaaaatcaaccaagagattacaaagtcaaaaacaaatctcgccttttatatagctaagcatcaaggtagtcttcaagatagacaaattttcttaaaagaaattactggttgatcagtagtctttaataaagaaaatttaacggcaccatttgtcacatacccttagtttacaatggtaacaggggaccacatgttatatagctaattgtctttaatcagaagagaaactgacttctcatatttttaatctcaagaggttgttttgcagttcagagaaaagcacctactgaggttaagttcttaccttttactgaaactggaaacagaggggcaccttctctctttatgtttacgtttcaaagagatagttcctaggtccattagataaatactgctgtgttgttgatatgctttggctttgtgtctccatccaaatctcatctg

SEQ ID NO: 1564416 - DNA, 4001 bp, Homo sapiens; identical to SEQ ID NO: 1563702

SEQ ID NO: 1564417 - DNA, 4001 bp, Homo sapiens
tatatttttgctaaaaagtagtacaatagcctcccactgaaacaaaatgtcatttttttcttaaccatacttttagaaataaaggaaaagcaaacatagaagtaaacatgcaattttattgttcaataagataattgcagaaatttttagggttttttgtcaatgtaaatgttagtctctgttgtcattcataatctggtcctcttttaatggcagatcagttgtaattagggtgatatttgtccagtggtgatggttgaagagctagcctggaatgaggggcagctgatctatcagcgatcgtaggcatttgcaaccacgggttgcctgctggtagcatgttacgatatggagcctcattgactgataccagaggatatcgtgtgggaacagcagatggttccactgtcagcccaaaataaccattttgtaagggagatatgatgtggtattgagaagttgtggttgtaataaaattcacaatgtggccccttgcttgcatgtaggtactatgagagtgcatatgaatagtggtcaactgatttaaaatagcatgttgatctgttgcaatttgttctgatggtccaactgaggttgaaggtgaaggaggagggaaaccacttctaatggggacagatgaatttgcaattatctgtctgacagaagattcccttgttagaggcatatttaaatttttagaggctgaaaataaactttcttcactagcttcagcagctaaggcagaattatgattctccatgttagcccctgctctaaaatgcttcttgttgaaatcttcgttgaataaagtagatataggtgaagcatttttaacaccaattcttctcttcactcttactaaaagttggggatagccacgcttgaaatttggattataatagaactttaactaaaaccaaagaaaaacataattcagtgccattttaagccaagagacaagtgaaaataacaaacataacacatcaaatatcagatttctctttcatcacacaaatttaatgtcatcaaataactcataaacatcgtttactatttttaagaatgtgcttattgtgaaaaaccactcaagttgttaagccctcaagtgaaaacatgttatatattaatagtaatatttcattaagtggctttggtacatttatttggaattcactggtaagattcaaagttgttagcaaaatttcttaaaacactaaaaggttaacgctcaagctgaacacaataatttcaaaacaaaatttctaccttaatattttatataattttcaaaagctggtcttactgcatgtattaacatatttactgatgtacaaagtaaaattacatatatactttacataaagtggtaactcaaatatgtcaaataccttgcttaagacagacgattctttctcttctgacagaaaggtggctagaaaggcagatctttgaaaattctgttgaattttactaaatccataaaggttgagctgtcgaacaaaacttttgatagcatcagtttgaaatattctgtaaggagcctttgtttccaaaatttctttcttgaagagttcttcattaatcactatgcaagttccattctcatcccatgaaatagacttgaattggtcactttccactattttccaaagtttcctgggaaagttcagagaaagaaaatcatcatctttatctggctcagagacacaaactgtgtaacttggactttctaacaaggatccttgtgacaaaacctgaaaagcatgttcttcaatcattgaccgtaagtctgagtccccagggaaggtgtgttcacacaatggagacctagtggaggcttctgaagcagttaattcatctttgggggaaacatcttgagtttctgaagaaacatgtgccatctcaaataaatatttctttatctactcttccggcctgcatggttttcaggactgcagcttcaaatgctgcttcagaaggcctaagcatgtacacttatctagaccatcacaatggttcccaaactgagtaacaatgacatcacaaggggactttggtctcctagcaaccaacaaaattctagcccaaagggtttccttcccaatctgagaaatgtatccagtgaaaataaaatatagactgctcacttacacaatgtaagctgcaaaaatctcttgcctgcatcattatttaaataaataaggaaataatgtcctcaatccctgaaataaatccaatgttcttcctgacacactcattataactagattggtgtgaggagcacaaggcctagtaattgcaaaatgcaaaaaaataaaataaaataaaggaaagaaaaagaaatatgaatgattttaaaactagtttggcatgttggattgaaaactgatgcaatgctaaacctgtgtggtaaaaagacatggccatagagataaaaggtaggttacgggttgtcaggggctggacaataaaaagaactgtataatagatatggagtttctggttgggcaatagaaatatttaggaactattgatagatgatgatcgtatgacattataaacatatttaattccattcaattatacactcaaatgtaattttatgttatttgaaacttaccttcaaaagttaaggtgaagacaaagatgaataaaactaactgattatatttcagaatgaaacgttatatttatgcatatctcttcaaaacatgtttcagtcatatcagaagaatatataatgatttaatttggtatgtctctaaatatctgacaaatgttaaagatgaaagagattttaaaagcgggtgacttacttgtaaggggatcccaaagagtgggagattaaaaaaataataaaaataaaaatattgagaaaatgttttaagaaaagtaaatatgtatgtgtgtctaagcagcatatttttttttaatttggctccaagaaccaaatctctattaaagaatagattttgtaaggaataatctttgtgccatgcaaataatggtatcattataaaacaggacttgaatttgtgaaataattttagtattgagtaaaataaccatggatcatttacagtcagaatttttatatgttcatggttgacagttggtatattaaaattcgaactccttagcattggtaagtgttgaatatgtgtggaagaaagaaatatagtattgatatttctcatactgtaggaggcagttctctcatactggaaagaggagtcattgttagaaaattgccttggtttaatatagtttaggttttgtttttttgtgtgtgtgcctgtttaattcagaattttctgtattaacattatgtaacaaaaatgttcaaatcagtaaactctgtgaagatgaaacaggtgcccctaccagatgcatgtggtttctcaattttgacagttttttaaaattaaaaaagtgcaaaattaaaattttttttttttttgttcttctcaggaattttcatgttgctctagctgaagggagtacagacttcttttgtgatgcgagaggatgaatgattactgagagcagcaaaagataggacatgggtgtggaggaaagagggagttaataggagaatcagaagacaaaatcacattaaatgtaggataatctaagacaaattgtggctgagcattttggggagctaagataggtgacagtttagggaggaagaatgccttggtgtgttcagggggagatggctcagctaaaggtgtcccctgactccaaactggaagcctacttttagtcataaaaaagcaagaaaataagaaattttatatgaaaaacataaatgttcagtaggctgtatccacttagctataaaaaagaataagatgtctgtctgatcttcttagtgacagcctgtgctacccatgttcttgccgcttcagcctcccaattagctggttctgcaggaaacgcctagtaggctcagataattattcaatttaatgaattattttaatttttttagagac

SEQ ID NO: 1564418 - DNA, 4001 bp, Homo sapiens
atatttttgctaaaaagtagtacaatagcctcccactgaaacaaaatgtcatttttttcttaaccatacttttagaaataaaggaaaagcaaacatagaagtaaacatgcaattttattgttcaataagataattgcagaaatttttagggttttttgtcaatgtaaatgttagtctctgttgtcattcataatctggtcctcttttaatggcagatcagttgtaattagggtgatatttgtccagtggtgatggttgaagagctagcctggaatgaggggcagctgatctatcagcgatcgtaggcatttgcaaccacgggttgcctgctggtagcatgttacgatatggagcctcattgactgataccagaggatatcgtgtgggaacagcagatggttccactgtcagcccaaaataaccattttgtaagggagatatgatgtggtattgagaagttgtggttgtaataaaattcacaatgtggccccttgcttgcatgtaggtactatgagagtgcatatgaatagtggtcaactgatttaaaatagcatgttgatctgttgcaatttgttctgatggtccaactgaggttgaaggtgaaggaggagggaaaccacttctaatggggacagatgaatttgcaattatctgtctgacagaagattcccttgttagaggcatatttaaatttttagaggctgaaaataaactttcttcactagcttcagcagctaaggcagaattatgattctccatgttagcccctgctctaaaatgcttcttgttgaaatcttcgttgaataaagtagatataggtgaagcatttttaacaccaattcttctcttcactcttactaaaagttggggatagccacgcttgaaatttggattataatagaactttaactaaaaccaaagaaaaacataattcagtgccattttaagccaagagacaagtgaaaataacaaacataacacatcaaatatcagatttctctttcatcacacaaatttaatgtcatcaaataactcataaacatcgtttactatttttaagaatgtgcttattgtgaaaaaccactcaagttgttaagccctcaagtgaaaacatgttatatattaatagtaatatttcattaagtggctttggtacatttatttggaattcactggtaagattcaaagttgttagcaaaatttcttaaaacactaaaaggttaacgctcaagctgaacacaataatttcaaaacaaaatttctaccttaatattttatataattttcaaaagctggtcttactgcatgtattaacatatttactgatgtacaaagtaaaattacatatatactttacataaagtggtaactcaaatatgtcaaataccttgcttaagacagacgattctttctcttctgacagaaaggtggctagaaaggcagatctttgaaaattctgttgaattttactaaatccataaaggttgagctgtcgaacaaaacttttgatagcatcagtttgaaatattctgtaaggagcctttgtttccaaaatttctttcttgaagagttcttcattaatcactatgcaagttccattctcatcccatgaaatagacttgaattggtcactttccactattttccaaagtttcctgggaaagttcagagaaagaaaatcatcatctttatctggctcagagacacaaactgtgtaacttggactttctaacaaggatccttgtgacaaaacctgaaaagcatgttcttcaatcattgaccgtaagtctgagtccccagggaaggtgtgttcacacaatggagacctagtggaggcttctgaagcagttaattcatctttgggggaaacatcttgagtttctgaagaaacatgtgccatctcaaataaatatttctttatctactcttccggcctgcatggttttcaggactgcagcttcaaatgctgcttcagaaggcctaagcatgtacacttatctagaccatcacaatggttcccaaactgagtaacaatgacatcacaaggggactttggtctcctagcaaccaacaaaattctagcccaaagggtttccttcccaatctgagaaatgtatccagtgaaaataaaatatagactgctcacttacacaatgtaagctgcaaaaatctcttgcctgcatcattatttaaataaataaggaaataatgtcctcaatccctgaaataaatccaatgttcttcctgacacactcattataactagattggtgtgaggagcacaaggcctagtaattgcaaaatgcaaaaaaataaaataaaataaaggaaagaaaaagaaatatgaatgattttaaaactagtttggcatgttggattgaaaactgatgcaatgctaaacctgtgtggtaaaaagacatggccatagagataaaaggtaggttacgggttgtcaggggctggacaataaaaagaactgtataatagatatggagtttctggttgggcaatagaaatatttaggaactattgatagatgatgatcgtatgacattataaacatatttaattccattcaattatacactcaaatgtaattttatgttatttgaaacttaccttcaaaagttaaggtgaagacaaagatgaataaaactaactgattatatttcagaatgaaacgttatatttatgcatatctcttcaaaacatgtttcagtcatatcagaagaatatataatgatttaatttggtatgtctctaaatatctgacaaatgttaaagatgaaagagattttaaaagcgggtgacttacttgtaaggggatcccaaagagtgggagattaaaaaaataataaaaataaaaatattgagaaaatgttttaagaaaagtaaatatgtatgtgtgtctaagcagcatattttttttttaatttggctccaagaaccaaatctctattaaagaatagattttgtaaggaataatctttgtgccatgcaaataatggtatcattataaaacaggacttgaatttgtgaaataattttagtattgagtaaaataaccatggatcatttacagtcagaatttttatatgttcatggttgacagttggtatattaaaattcgaactccttagcattggtaagtgttgaatatgtgtggaagaaagaaatatagtattgatatttctcatactgtaggaggcagttctctcatactggaaagaggagtcattgttagaaaattgccttggtttaatatagtttaggttttgtttttttgtgtgtgtgcctgtttaattcagaattttctgtattaacattatgtaacaaaaatgttcaaatcagtaaactctgtgaagatgaaacaggtgcccctaccagatgcatgtggtttctcaattttgacagttttttaaaattaaaaaagtgcaaaattaaaattttttttttttttgttcttctcaggaattttcatgttgctctagctgaagggagtacagacttcttttgtgatgcgagaggatgaatgattactgagagcagcaaaagataggacatgggtgtggaggaaagagggagttaataggagaatcagaagacaaaatcacattaaatgtaggataatctaagacaaattgtggctgagcattttggggagctaagataggtgacagtttagggaggaagaatgccttggtgtgttcagggggagatggctcagctaaaggtgtcccctgactccaaactggaagcctacttttagtcataaaaaagcaagaaaataagaaattttatatgaaaaacataaatgttcagtaggctgtatccacttagctataaaaaagaataagatgtctgtctgatcttcttagtgacagcctgtgctacccatgttcttgccgcttcagcctcccaattagctggttctgcaggaaacgcctagtaggctcagataattattcaatttaatgaattattttaatttttttagagac

SEQ ID NO: 1564419 - DNA, 4001 bp, Homo sapiens
atatatatttttgctaaaaagtagtacaatagcctcccactgaaacaaaatgtcatttttttcttaaccatacttttagaaataaaggaaaagcaaacatagaagtaaacatgcaattttattgttcaataagataattgcagaaatttttagggttttttgtcaatgtaaatgttagtctctgttgtcattcataatctggtcctcttttaatggcagatcagttgtaattagggtgatatttgtccagtggtgatggttgaagagctagcctggaatgaggggcagctgatctatcagcgatcgtaggcatttgcaaccacgggttgcctgctggtagcatgttacgatatggagcctcattgactgataccagaggatatcgtgtgggaacagcagatggttccactgtcagcccaaaataaccattttgtaagggagatatgatgtggtattgagaagttgtggttgtaataaaattcacaatgtggccccttgcttgcatgtaggtactatgagagtgcatatgaatagtggtcaactgatttaaaatagcatgttgatctgttgcaatttgttctgatggtccaactgaggttgaaggtgaaggaggagggaaaccacttctaatggggacagatgaatttgcaattatctgtctgacagaagattcccttgttagaggcatatttaaatttttagaggctgaaaataaactttcttcactagcttcagcagctaaggcagaattatgattctccatgttagcccctgctctaaaatgcttcttgttgaaatcttcgttgaataaagtagatataggtgaagcatttttaacaccaattcttctcttcactcttactaaaagttggggatagccacgcttgaaatttggattataatagaactttaactaaaaccaaagaaaaacataattcagtgccattttaagccaagagacaagtgaaaataacaaacataacacatcaaatatcagatttctctttcatcacacaaatttaatgtcatcaaataactcataaacatcgtttactatttttaagaatgtgcttattgtgaaaaaccactcaagttgttaagccctcaagtgaaaacatgttatatattaatagtaatatttcattaagtggctttggtacatttatttggaattcactggtaagattcaaagttgttagcaaaatttcttaaaacactaaaaggttaacgctcaagctgaacacaataatttcaaaacaaaatttctaccttaatattttatataattttcaaaagctggtcttactgcatgtattaacatatttactgatgtacaaagtaaaattacatatatactttacataaagtggtaactcaaatatgtcaaataccttgcttaagacagacgattctttctcttctgacagaaaggtggctagaaaggcagatctttgaaaattctgttgaattttactaaatccataaaggttgagctgtcgaacaaaacttttgatagcatcagtttgaaatattctgtaaggagcctttgtttccaaaatttctttcttgaagagttcttcattaatcactatgcaagttccattctcatcccatgaaatagacttgaattggtcactttccactattttccaaagtttcctgggaaagttcagagaaagaaaatcatcatctttatctggctcagagacacaaactgtgtaacttggactttctaacaaggatccttgtgacaaaacctgaaaagcatgttcttcaatcattgaccgtaagtctgagtccccagggaaggtgtgttcacacaatggagacctagtggaggcttctgaagcagttaattcatctttgggggaaacatcttgagtttctgaagaaacatgtgccatctcaaataaatatttctttatctactcttccggcctgcatggttttcaggactgcagcttcaaatgctgcttcagaaggcctaagcatgtacacttatctagaccatcacaatggttcccaaactgagtaacaatgacatcacaaggggactttggtctcctagcaaccaacaaaattctagcccaaagggtttccttcccaatctgagaaatgtatccagtgaaaataaaatatagactgctcacttacacaatgtaagctgcaaaaatctcttgcctgcatcattatttaaataaataaggaaataatgtcctcaatccctgaaataaatccaatgttcttcctgacacactcattataactagattggtgtgaggagcacaaggcctagtaattgcaaaatgcaaaaaaataaaataaaataaaggaaagaaaaagaaatatgaatgattttaaaactagtttggcatgttggattgaaaactgatgcaatgctaaacctgtgtggtaaaaagacatggccatagagataaaaggtaggttacgggttgtcaggggctggacaataaaaagaactgtataatagatatggagtttctggttgggcaatagaaatatttaggaactattgatagatgatgatcgtatgacattataaacatatttaattccattcaattatacactcaaatgtaattttatgttatttgaaacttaccttcaaaagttaaggtgaagacaaagatgaataaaactaactgattatatttcagaatgaaacgttatatttatgcatatctcttcaaaacatgtttcagtcatatcagaagaatatataatgatttaatttggtatgtctctaaatatctgacaaatgttaaagatgaaagagattttaaaagcgggtgacttacttgtaaggggatcccaaagagtgggagattaaaaaaataataaaaataaaaatattgagaaaatgttttaagaaaagtaaatatgtatgtgtgtctaagcagcatatttttttttaatttggctccaagaaccaaatctctattaaagaatagattttgtaaggaataatctttgtgccatgcaaataatggtatcattataaaacaggacttgaatttgtgaaataattttagtattgagtaaaataaccatggatcatttacagtcagaatttttatatgttcatggttgacagttggtatattaaaattcgaactccttagcattggtaagtgttgaatatgtgtggaagaaagaaatatagtattgatatttctcatactgtaggaggcagttctctcatactggaaagaggagtcattgttagaaaattgccttggtttaatatagtttaggttttgtttttttgtgtgtgtgcctgtttaattcagaattttctgtattaacattatgtaacaaaaatgttcaaatcagtaaactctgtgaagatgaaacaggtgcccctaccagatgcatgtggtttctcaattttgacagttttttaaaattaaaaaagtgcaaaattaaaattttttttttttttgttcttctcaggaattttcatgttgctctagctgaagggagtacagacttcttttgtgatgcgagaggatgaatgattactgagagcagcaaaagataggacatgggtgtggaggaaagagggagttaataggagaatcagaagacaaaatcacattaaatgtaggataatctaagacaaattgtggctgagcattttggggagctaagataggtgacagtttagggaggaagaatgccttggtgtgttcagggggagatggctcagctaaaggtgtcccctgactccaaactggaagcctacttttagtcataaaaaagcaagaaaataagaaattttatatgaaaaacataaatgttcagtaggctgtatccacttagctataaaaaagaataagatgtctgtctgatcttcttagtgacagcctgtgctacccatgttcttgccgcttcagcctcccaattagctggttctgcaggaaacgcctagtaggctcagataattattcaatttaatgaattattttaatttttttaga

SEQ ID NO: 1564420 - DNA, 4001 bp, Homo sapiens
tatatatttttgctaaaaagtagtacaatagcctcccactgaaacaaaatgtcatttttttcttaaccatacttttagaaataaaggaaaagcaaacatagaagtaaacatgcaattttattgttcaataagataattgcagaaatttttagggttttttgtcaatgtaaatgttagtctctgttgtcattcataatctggtcctcttttaatggcagatcagttgtaattagggtgatatttgtccagtggtgatggttgaagagctagcctggaatgaggggcagctgatctatcagcgatcgtaggcatttgcaaccacgggttgcctgctggtagcatgttacgatatggagcctcattgactgataccagaggatatcgtgtgggaacagcagatggttccactgtcagcccaaaataaccattttgtaagggagatatgatgtggtattgagaagttgtggttgtaataaaattcacaatgtggccccttgcttgcatgtaggtactatgagagtgcatatgaatagtggtcaactgatttaaaatagcatgttgatctgttgcaatttgttctgatggtccaactgaggttgaaggtgaaggaggagggaaaccacttctaatggggacagatgaatttgcaattatctgtctgacagaagattcccttgttagaggcatatttaaatttttagaggctgaaaataaactttcttcactagcttcagcagctaaggcagaattatgattctccatgttagcccctgctctaaaatgcttcttgttgaaatcttcgttgaataaagtagatataggtgaagcatttttaacaccaattcttctcttcactcttactaaaagttggggatagccacgcttgaaatttggattataatagaactttaactaaaaccaaagaaaaacataattcagtgccattttaagccaagagacaagtgaaaataacaaacataacacatcaaatatcagatttctctttcatcacacaaatttaatgtcatcaaataactcataaacatcgtttactatttttaagaatgtgcttattgtgaaaaaccactcaagttgttaagccctcaagtgaaaacatgttatatattaatagtaatatttcattaagtggctttggtacatttatttggaattcactggtaagattcaaagttgttagcaaaatttcttaaaacactaaaaggttaacgctcaagctgaacacaataatttcaaaacaaaatttctaccttaatattttatataattttcaaaagctggtcttactgcatgtattaacatatttactgatgtacaaagtaaaattacatatatactttacataaagtggtaactcaaatatgtcaaataccttgcttaagacagacgattctttctcttctgacagaaaggtggctagaaaggcagatctttgaaaattctgttgaattttactaaatccataaaggttgagctgtcgaacaaaacttttgatagcatcagtttgaaatattctgtaaggagcctttgtttccaaaatttctttcttgaagagttcttcattaatcactatgcaagttccattctcatcccatgaaatagacttgaattggtcactttccactattttccaaagtttcctgggaaagttcagagaaagaaaatcatcatctttatctggctcagagacacaaactgtgtaacttggactttctaacaaggatccttgtgacaaaacctgaaaagcatgttcttcaatcattgaccgtaagtctgagtccccagggaaggtgtgttcacacaatggagacctagtggaggcttctgaagcagttaattcatctttgggggaaacatcttgagtttctgaagaaacatgtgccatctcaaataaatatttctttatctactcttccggcctgcatggttttcaggactgcagcttcaaatgctgcttcagaaggcctaagcatgtacacttatctagaccatcacaatggttcccaaactgagtaacaatgacatcacaaggggactttggtctcctagcaaccaacaaaattctagcccaaagggtttccttcccaatctgagaaatgtatccagtgaaaataaaatatagactgctcacttacacaatgtaagctgcaaaaatctcttgcctgcatcattatttaaataaataaggaaataatgtcctcaatccctgaaataaatccaatgttcttcctgacacactcattataactagattggtgtgaggagcacaaggcctagtaattgcaaaatgcaaaaaaataaaataaaataaaggaaagaaaaagaaatatgaatgattttaaaactagtttggcatgttggattgaaaactgatgcaatgctaaacctgtgtggtaaaaagacatggccatagagataaaaggtaggttacgggttgtcaggggctggacaataaaaagaactgtataatagatatggagtttctggttgggcaatagaaatatttaggaactattgatagatgatgatcgtatgacattataaacatatttaattccattcaattatacactcaaatgtaattttatgttatttgaaacttaccttcaaaagttaaggtgaagacaaagatgaataaaactaactgattatatttcagaatgaaacgttatatttatgcatatctcttcaaaacatgtttcagtcatatcagaagaatatataatgatttaatttggtatgtctctaaatatctgacaaatgttaaagatgaaagagattttaaaagcgggtgacttacttgtaaggggatcccaaagagtgggagattaaaaaaataataaaaataaaaatattgagaaaatgttttaagaaaagtaaatatgtatgtgtgtctaagcagcatattttttttttaatttggctccaagaaccaaatctctattaaagaatagattttgtaaggaataatctttgtgccatgcaaataatggtatcattataaaacaggacttgaatttgtgaaataattttagtattgagtaaaataaccatggatcatttacagtcagaatttttatatgttcatggttgacagttggtatattaaaattcgaactccttagcattggtaagtgttgaatatgtgtggaagaaagaaatatagtattgatatttctcatactgtaggaggcagttctctcatactggaaagaggagtcattgttagaaaattgccttggtttaatatagtttaggttttgtttttttgtgtgtgtgcctgtttaattcagaattttctgtattaacattatgtaacaaaaatgttcaaatcagtaaactctgtgaagatgaaacaggtgcccctaccagatgcatgtggtttctcaattttgacagttttttaaaattaaaaaagtgcaaaattaaaattttttttttttttgttcttctcaggaattttcatgttgctctagctgaagggagtacagacttcttttgtgatgcgagaggatgaatgattactgagagcagcaaaagataggacatgggtgtggaggaaagagggagttaataggagaatcagaagacaaaatcacattaaatgtaggataatctaagacaaattgtggctgagcattttggggagctaagataggtgacagtttagggaggaagaatgccttggtgtgttcagggggagatggctcagctaaaggtgtcccctgactccaaactggaagcctacttttagtcataaaaaagcaagaaaataagaaattttatatgaaaaacataaatgttcagtaggctgtatccacttagctataaaaaagaataagatgtctgtctgatcttcttagtgacagcctgtgctacccatgttcttgccgcttcagcctcccaattagctggttctgcaggaaacgcctagtaggctcagataattattcaatttaatgaattattttaatttttttaga

SEQ ID NO: 1564421 - DNA, 4001 bp, Homo sapiens; identical to SEQ ID NO: 1564419

SEQ ID NO: 1564422 - DNA, 4001 bp, Homo sapiens; identical to SEQ ID NO: 1564420

SEQ ID NO: 1564423 - DNA, 4001 bp, Homo sapiens
gtagtacaatagcctcccactgaaacaaaatgtcatttttttcttaaccatacttttagaaataaaggaaaagcaaacatagaagtaaacatgcaattttattgttcaataagataattgcagaaatttttagggttttttgtcaatgtaaatgttagtctctgttgtcattcataatctggtcctcttttaatggcagatcagttgtaattagggtgatatttgtccagtggtgatggttgaagagctagcctggaatgaggggcagctgatctatcagcgatcgtaggcatttgcaaccacgggttgcctgctggtagcatgttacgatatggagcctcattgactgataccagaggatatcgtgtgggaacagcagatggttccactgtcagcccaaaataaccattttgtaagggagatatgatgtggtattgagaagttgtggttgtaataaaattcacaatgtggccccttgcttgcatgtaggtactatgagagtgcatatgaatagtggtcaactgatttaaaatagcatgttgatctgttgcaatttgttctgatggtccaactgaggttgaaggtgaaggaggagggaaaccacttctaatggggacagatgaatttgcaattatctgtctgacagaagattcccttgttagaggcatatttaaatttttagaggctgaaaataaactttcttcactagcttcagcagctaaggcagaattatgattctccatgttagcccctgctctaaaatgcttcttgttgaaatcttcgttgaataaagtagatataggtgaagcatttttaacaccaattcttctcttcactcttactaaaagttggggatagccacgcttgaaatttggattataatagaactttaactaaaaccaaagaaaaacataattcagtgccattttaagccaagagacaagtgaaaataacaaacataacacatcaaatatcagatttctctttcatcacacaaatttaatgtcatcaaataactcataaacatcgtttactatttttaagaatgtgcttattgtgaaaaaccactcaagttgttaagccctcaagtgaaaacatgttatatattaatagtaatatttcattaagtggctttggtacatttatttggaattcactggtaagattcaaagttgttagcaaaatttcttaaaacactaaaaggttaacgctcaagctgaacacaataatttcaaaacaaaatttctaccttaatattttatataattttcaaaagctggtcttactgcatgtattaacatatttactgatgtacaaagtaaaattacatatatactttacataaagtggtaactcaaatatgtcaaataccttgcttaagacagacgattctttctcttctgacagaaaggtggctagaaaggcagatctttgaaaattctgttgaattttactaaatccataaaggttgagctgtcgaacaaaacttttgatagcatcagtttgaaatattctgtaaggagcctttgtttccaaaatttctttcttgaagagttcttcattaatcactatgcaagttccattctcatcccatgaaatagacttgaattggtcactttccactattttccaaagtttcctgggaaagttcagagaaagaaaatcatcatctttatctggctcagagacacaaactgtgtaacttggactttctaacaaggatccttgtgacaaaacctgaaaagcatgttcttcaatcattgaccgtaagtctgagtccccagggaaggtgtgttcacacaatggagacctagtggaggcttctgaagcagttaattcatctttgggggaaacatcttgagtttctgaagaaacatgtgccatctcaaataaatatttctttatctactcttccggcctgcatggttttcaggactgcagcttcaaatgctgcttcagaaggcctaagcatgtacacttatctagaccatcacaatggttcccaaactgagtaacaatgacatcacaaggggactttggtctcctagcaaccaacaaaattctagcccaaagggtttccttcccaatctgagaaatgtatccagtgaaaataaaatatagactgctcacttacacaatgtaagctgcaaaaatctcttgcctgcatcattatttaaataaataaggaaataatgtcctcaatccctgaaataaatccaatgttcttcctgacacactcattataactagattggtgtgaggagcacaaggcctagtaattgcaaaatgcaaaaaaataaaataaaataaaggaaagaaaaagaaatatgaatgattttaaaactagtttggcatgttggattgaaaactgatgcaatgctaaacctgtgtggtaaaaagacatggccatagagataaaaggtaggttacgggttgtcaggggctggacaataaaaagaactgtataatagatatggagtttctggttgggcaatagaaatatttaggaactattgatagatgatgatcgtatgacattataaacatatttaattccattcaattatacactcaaatgtaattttatgttatttgaaacttaccttcaaaagttaaggtgaagacaaagatgaataaaactaactgattatatttcagaatgaaacgttatatttatgcatatctcttcaaaacatgtttcagtcatatcagaagaatatataatgatttaatttggtatgtctctaaatatctgacaaatgttaaagatgaaagagattttaaaagcgggtgacttacttgtaaggggatcccaaagagtgggagattaaaaaaataataaaaataaaaatattgagaaaatgttttaagaaaagtaaatatgtatgtgtgtctaagcagcatatttttttttaatttggctccaagaaccaaatctctattaaagaatagattttgtaaggaataatctttgtgccatgcaaataatggtatcattataaaacaggacttgaatttgtgaaataattttagtattgagtaaaataaccatggatcatttacagtcagaatttttatatgttcatggttgacagttggtatattaaaattcgaactccttagcattggtaagtgttgaatatgtgtggaagaaagaaatatagtattgatatttctcatactgtaggaggcagttctctcatactggaaagaggagtcattgttagaaaattgccttggtttaatatagtttaggttttgtttttttgtgtgtgtgcctgtttaattcagaattttctgtattaacattatgtaacaaaaatgttcaaatcagtaaactctgtgaagatgaaacaggtgcccctaccagatgcatgtggtttctcaattttgacagttttttaaaattaaaaaagtgcaaaattaaaattttttttttttttgttcttctcaggaattttcatgttgctctagctgaagggagtacagacttcttttgtgatgcgagaggatgaatgattactgagagcagcaaaagataggacatgggtgtggaggaaagagggagttaataggagaatcagaagacaaaatcacattaaatgtaggataatctaagacaaattgtggctgagcattttggggagctaagataggtgacagtttagggaggaagaatgccttggtgtgttcagggggagatggctcagctaaaggtgtcccctgactccaaactggaagcctacttttagtcataaaaaagcaagaaaataagaaattttatatgaaaaacataaatgttcagtaggctgtatccacttagctataaaaaagaataagatgtctgtctgatcttcttagtgacagcctgtgctacccatgttcttgccgcttcagcctcccaattagctggttctgcaggaaacgcctagtaggctcagataattattcaatttaatgaattattttaatttttttagagacagaatcttgctatgttg

SEQ ID NO: 1564424 - DNA, 4001 bp, Homo sapiens
tagtacaatagcctcccactgaaacaaaatgtcatttttttcttaaccatacttttagaaataaaggaaaagcaaacatagaagtaaacatgcaattttattgttcaataagataattgcagaaatttttagggttttttgtcaatgtaaatgttagtctctgttgtcattcataatctggtcctcttttaatggcagatcagttgtaattagggtgatatttgtccagtggtgatggttgaagagctagcctggaatgaggggcagctgatctatcagcgatcgtaggcatttgcaaccacgggttgcctgctggtagcatgttacgatatggagcctcattgactgataccagaggatatcgtgtgggaacagcagatggttccactgtcagcccaaaataaccattttgtaagggagatatgatgtggtattgagaagttgtggttgtaataaaattcacaatgtggccccttgcttgcatgtaggtactatgagagtgcatatgaatagtggtcaactgatttaaaatagcatgttgatctgttgcaatttgttctgatggtccaactgaggttgaaggtgaaggaggagggaaaccacttctaatggggacagatgaatttgcaattatctgtctgacagaagattcccttgttagaggcatatttaaatttttagaggctgaaaataaactttcttcactagcttcagcagctaaggcagaattatgattctccatgttagcccctgctctaaaatgcttcttgttgaaatcttcgttgaataaagtagatataggtgaagcatttttaacaccaattcttctcttcactcttactaaaagttggggatagccacgcttgaaatttggattataatagaactttaactaaaaccaaagaaaaacataattcagtgccattttaagccaagagacaagtgaaaataacaaacataacacatcaaatatcagatttctctttcatcacacaaatttaatgtcatcaaataactcataaacatcgtttactatttttaagaatgtgcttattgtgaaaaaccactcaagttgttaagccctcaagtgaaaacatgttatatattaatagtaatatttcattaagtggctttggtacatttatttggaattcactggtaagattcaaagttgttagcaaaatttcttaaaacactaaaaggttaacgctcaagctgaacacaataatttcaaaacaaaatttctaccttaatattttatataattttcaaaagctggtcttactgcatgtattaacatatttactgatgtacaaagtaaaattacatatatactttacataaagtggtaactcaaatatgtcaaataccttgcttaagacagacgattctttctcttctgacagaaaggtggctagaaaggcagatctttgaaaattctgttgaattttactaaatccataaaggttgagctgtcgaacaaaacttttgatagcatcagtttgaaatattctgtaaggagcctttgtttccaaaatttctttcttgaagagttcttcattaatcactatgcaagttccattctcatcccatgaaatagacttgaattggtcactttccactattttccaaagtttcctgggaaagttcagagaaagaaaatcatcatctttatctggctcagagacacaaactgtgtaacttggactttctaacaaggatccttgtgacaaaacctgaaaagcatgttcttcaatcattgaccgtaagtctgagtccccagggaaggtgtgttcacacaatggagacctagtggaggcttctgaagcagttaattcatctttgggggaaacatcttgagtttctgaagaaacatgtgccatctcaaataaatatttctttatctactcttccggcctgcatggttttcaggactgcagcttcaaatgctgcttcagaaggcctaagcatgtacacttatctagaccatcacaatggttcccaaactgagtaacaatgacatcacaaggggactttggtctcctagcaaccaacaaaattctagcccaaagggtttccttcccaatctgagaaatgtatccagtgaaaataaaatatagactgctcacttacacaatgtaagctgcaaaaatctcttgcctgcatcattatttaaataaataaggaaataatgtcctcaatccctgaaataaatccaatgttcttcctgacacactcattataactagattggtgtgaggagcacaaggcctagtaattgcaaaatgcaaaaaaataaaataaaataaaggaaagaaaaagaaatatgaatgattttaaaactagtttggcatgttggattgaaaactgatgcaatgctaaacctgtgtggtaaaaagacatggccatagagataaaaggtaggttacgggttgtcaggggctggacaataaaaagaactgtataatagatatggagtttctggttgggcaatagaaatatttaggaactattgatagatgatgatcgtatgacattataaacatatttaattccattcaattatacactcaaatgtaattttatgttatttgaaacttaccttcaaaagttaaggtgaagacaaagatgaataaaactaactgattatatttcagaatgaaacgttatatttatgcatatctcttcaaaacatgtttcagtcatatcagaagaatatataatgatttaatttggtatgtctctaaatatctgacaaatgttaaagatgaaagagattttaaaagcgggtgacttacttgtaaggggatcccaaagagtgggagattaaaaaaataataaaaataaaaatattgagaaaatgttttaagaaaagtaaatatgtatgtgtgtctaagcagcatattttttttttaatttggctccaagaaccaaatctctattaaagaatagattttgtaaggaataatctttgtgccatgcaaataatggtatcattataaaacaggacttgaatttgtgaaataattttagtattgagtaaaataaccatggatcatttacagtcagaatttttatatgttcatggttgacagttggtatattaaaattcgaactccttagcattggtaagtgttgaatatgtgtggaagaaagaaatatagtattgatatttctcatactgtaggaggcagttctctcatactggaaagaggagtcattgttagaaaattgccttggtttaatatagtttaggttttgtttttttgtgtgtgtgcctgtttaattcagaattttctgtattaacattatgtaacaaaaatgttcaaatcagtaaactctgtgaagatgaaacaggtgcccctaccagatgcatgtggtttctcaattttgacagttttttaaaattaaaaaagtgcaaaattaaaattttttttttttttgttcttctcaggaattttcatgttgctctagctgaagggagtacagacttcttttgtgatgcgagaggatgaatgattactgagagcagcaaaagataggacatgggtgtggaggaaagagggagttaataggagaatcagaagacaaaatcacattaaatgtaggataatctaagacaaattgtggctgagcattttggggagctaagataggtgacagtttagggaggaagaatgccttggtgtgttcagggggagatggctcagctaaaggtgtcccctgactccaaactggaagcctacttttagtcataaaaaagcaagaaaataagaaattttatatgaaaaacataaatgttcagtaggctgtatccacttagctataaaaaagaataagatgtctgtctgatcttcttagtgacagcctgtgctacccatgttcttgccgcttcagcctcccaattagctggttctgcaggaaacgcctagtaggctcagataattattcaatttaatgaattattttaatttttttagagacagaatcttgctatgttg

SEQ ID NO: 1564425 - DNA, 4001 bp, Homo sapiens; identical to SEQ ID NO: 1563755

SEQ ID NO: 1564426 - DNA, 4001 bp, Homo sapiens; identical to SEQ ID NO: 1563756

SEQ ID NO: 1564427 - DNA, 4001 bp, Homo sapiens
ttcctcagatatttaaagcctttgtgttctaccatttttgtggacataaattatgtattttatagaagactttctccaaaatcagtattctggaaaatggtggagttcgggttcaaattcaatacattagatttcaaaacttaagttctacattattatgaaactacaacggcaagattaaagatcagattcctttaaaaaaagtgtgcctcccaatcttacctccagttcatttagcctttggacgcgaggagtaaatctgaaattgtcaacttctactgcaaaaggaggctgccaatcctagaagaaagtgtaaggacctggtaactatggcacagtaaaggatgaagatagtgaaaaccacaatcatttgttcccactcttttaaagtcttctggtaaccatttttgtacacaagggcctcaaatgattccttcttcataatcaagattaactgcaaaaaaaaaaaaaaaaggaaaaaccctgcaaatccaaaactctccttgatatgtgtccttcgtaacagacgaaaaaaaaaaaaaaaacctctataatcccaaggctagaaagcgactcgacttccaaggaatgacgcacatctgaacaaacactatgctatttgggttatgagtccttactaaaatgaagataaatgtaatgcagataaaaaattgtttcactttttaaaacctaagccattatctcttcccactcccagcagtacgaaaaagtttaattgcaaatgctgagaagtgcgaacatccacataaaaataacgttgcagcctggttcaatatatgagaaaaaagctgtatgctctgcgaaaactttttgacttctctgaatattgtgttagttgttcacgacgacagcccaggcttatttcagtttacattcttaattcagtcaaacttctacgaggttcatttagtagttttcagtatagcaacccaaaatggtctacgtttaataataaatttaattgatggcaaaggatgccacatcactcccattatttgctatatttgctacatacatctaaggtcatatcaaagaaagaaaacaccagtccaagtggttaacacacaagcttatataacttgcttctgtcatagatcaagtacttctgagtaagctatttttttgcggttaaatgtaataaaagcttgtgtatgcctaaactatatttaataacagcagaacgtagaaatatttgaatcttatatttttgtccctacagcagtcagatgtttagaaccccgtggaatgtggcgatctgatactaatattctgatgccagcttgttcgggtcagaaaagttaaatgagaaatttggtgctaagggtttctggtcatgagtgtaaataacgcctcgccaagtggtaaactgccccaacgttcaaaccaaaggctacccattcccaaattttgtttcaaagacttaccgcgggtgggcggattttgcagatgccagacttctctgctatgggccttattttcgcaatgtagccaagcgggtcttggaattcagcccagctaggctcaaaaaccgggcactccggtggcggcaggaactcgtcacaccccggttccatgtcgggccttaatgctaagctgtaaaataagaatcacattgtctttaatgacgcgctggttcctcctactaaaaggcctatgaaaatttcattttcttgagaatttcaaggttactttaatcccgtagctgcttaccaatcgtcagggatcctagttttacagccaccatcttgacctccgggccctgcagtgtggtacgagccgtctcactccgcggatcgatttttccggcgctatttccaaacctgtgagaccttccgcacctgagataaacgctgaggacgcaagagcgattttaccagaggaaaacagtcacagagccgtcgctggactcatattaaacagtactgcgacagaacgaaaaagcaagataaaaatagtatggccggatcttttttaaaatgggaccactgcgcaagttacgcctgcgtattgcagggaaggaccgtaaaaggctgtggtgctgatcaacgaaggatttctcggagaaaattcctcctttgcggaaatgtccgtagaaacgcaccttttttttttcctgccaggacaaaccgccggcgatatccgttcatgtgaaagtgtttactaacattctctgaagactcactgggttctcagctcgagaacgttcctgtcacaagacgtttaggaggcaggatgccggtacaatgtatttatgttcttgtaaactgttgcattaacagtgcacttcaagtgggcacatttgtcgttggattttttaccaactcgagcttggactttaggacggggaaaagaagtgctaaatgtttttgaataaaacctttactgcacatgataaacatcccttaaaaattacctaggagcaccctaaattttaaaatgatcacaaagacctggacagattacagtaaaccttcaacatcgctaaacacacgtaccataaatcaaaagaaacacactgctaatgatccgttttttgatgtggaaatatcatgctgtttttaagggaaattatactttattgcgatgttttatttcaaaacaagatgttacactttatttcctataattttatttacaatattttacacccgttaagcaaaaatccccctacattgctattctgtttttttttaatcagttcactactgtagtatctttttgttctccatatatttttgaaaaatacgcaaaaggtaagttttaaaaatcaaatggtagattttatttggaagggcactgccagaagtgccttaaagtttgatagtttgacaattgtttcgtattgtacgattcttggcatttccgtttttttttttaacaatttatccatttcatctagattatcggcttcatgagtttattatactacattacatatatattcctgtttcaaaagttgttacttaattttctgctttctttttcctagttttatctacatactttttctgtttcataaagttagagttatagagttctatttcataaaattagttatagagcctgtattatttcaaatgatgagatcttttttctctgttcaagataattcattataatacagctttatattttatgaattcattagtaaatagatatttcaatttctacttttagctattataatgttgctattagcatttgtgtaccggtttttgtgtgcatgcttagtgtcatttctcgtgtgtatacacctacaagtagaattagtgggttatatgggaactttaggtttaaacttttcttttccaaagcatcttcatcatttaatttccatctaaagtggaataccgttctagtttcttcatgtcctcaccaatactataattacatgacttactgatttgaccattacaatgtgtatgagatctcatagagttttgagttggacttcttgaattactaatgatacagtagtgttgagcatcttttcgtaaggttgttggcttgttcatatgctttatataccttctctggagaaatgtctattcaaaatttttggctcttttcacattggtttgtctttttttgtttagttgtaatcttatctgattcttttatcaaatatttgatttttataaaaaataattctgtaagctggcttttctctttcctaatagtaaactttgaacagaaagatttttaatttgatctttatccagtttgcttttttctattgtcacttgtactttcagtgttgcctctgaggggattttgtctaacccaaaatcacaaggatgtactcttctcctctattctaggacctttatagtattagcttctacattaaagtctttgatacattttgagttaacttgtgtaaacactgtgaagtaatgatccaactcaatatttttgcgtgttgccatctagttgtcccagaatttgttggaaacattattattgcttcattaattgtt

SEQ ID NO: 1564428 - DNA, 4001 bp, Homo sapiens
gggactattaggcacagagacagcacagaacaccccatggaagtacagcatccaaacgtcagtttgactccttcagtcacattcagacctggattttatgagatgattgggagatctgtcaccctaatgacaagggcaatattctagaaaccactaatatgatgaagcagggtcctttacttttttactctgaactgttccttgtaatctcaatggcaatttgtaatctcaatggcacacaaccctggtctagtttttaatgacgctctacttagactaactagcaattacctggagagagagtaatctgacagatgcaatataattttggagatcaatgaattaatgtaattgtttatttaatactttcagccaaattttactgaaaaatattttccaggtattaaagtgtaaagaacaatgagaagaaaaaaattctccataaaagaaatttatcacattctccacgaagagctttatgcaaaagacaagctctagtttctacattagatatgtctattattctcacaaattatttcctttctttccaggtatattttgttctctgttgtcctttctcctcatctaaaaatggcatatggaaatgctaaccgggaaatatgataccactgtggcataactttggttattcttcgaggaaatctgaatttgaaatctatacagacataaaactattcatgttttactaacattaggttaatatattaaatgtttttgtgtttacagactttcattggtgttttatagaaaaaagaggaaatttttaaaaatataaacacatcacgtctaatgtagctagaatcatctgactatattttgtcatttgatcgtagtggatcttggaagaaaacaaagtccaaatttacattaagaaaatggattctaaacaatgaaatcctatcattgtatgaactacctcatgcttgtatattaaaaaaaataaagtttttctttcaaaactcaaaaaaggtgctaatatctcaagtcattatggcagaaagaaccattttctctatctttcagtttgtaaactggagcatggtagtgtacttaattctattattttttctatggattcattcctttacagatgattcaggtataacatgcaacactatatgctcatgttaattttcatctgcaaataaaattataaaacattaattaggtaatatatgaaaataaagtcattatttatagttttgtccatccagtagatgtcccaatatatacaagtggaacatgtggtaagctgctgcaagaattgcatttggaatatgaaaaataaattaaaataaaataaacaggttatagaaaagatcatgcaagagacattataaaaccctcctggtaaatctctccacacactgcacaagaagtattgttttctgttccagtgaggtactcaccatcttccatgggcacatagatgtttaagtaaaggcagtcttcattttgatcttgaacataggtcatcaaagtatccaaactggtggtaaaccagatgggcagcatgtcatgcaataagaatctttcatccaggtgctgggggcacacagcagaaaactgagtagcatttcggatgccagtccaggaggatggggattctggtggctgaaaccgcctctctccagttgggggtgaggcataggggacccctaagtactgctccactggacccaagatctcactgggtaatggtgttcttaggccctggattttaccataatttgtgttgacaactggatactgtgcttggctgtcaatgagggtgaacttgatggcaagagcagttatccacagaagaacattggagtttaacatgacacagacagaggtgaacaacaaagggagccatagcagtccctggggacgcaacatggttcaaatctgcatccacatccgaagctgtctaagtgaggtggctccaaggagacaaagctcagaggcgagcctgcagaaagataagtctttcgaaaactccaatgcaacctaaaggagggagaaagcagacaagaataatgaagccacacaatgatcacctagaacactggctggctcttccatgaaatccacaacatctctctatgaaattcctattcatttgtatatgaatgtgtatagtgccatctccacatagtcgacaatagcaaaaacataacttgtctttattattattatttttttttacagatggtgtcttgccatattgccaaagctgcagggcagtggtgctatcacagctcactgcagcctccaactcctgggctaaagccaacctcccacctcagcctcccgagtagctgggactacaagcatgcaccagtatgtccgggcaattcattggaatttttgtagacataggtgtctctatgttatccaggctggcctaaagagatcctcctcaatcaaactttcaaagtgttgggataacacgcgtcagtcaccatgcctagtgtccatcacttttcttaatcctggctgtatatcctatcaccagaaacaatgcctgacatttagaaaacactcatcacatctatgttgaatgaacaaaccgacgttcaagaattgtacaggttatgcaagtgataataatgacacctaccaatttcactattgtttaccagacgggttatcaaaagaactttttctcaaatgtttaaggcaattttcactctttcctaaggggatatgcatgcagatctaaaagttttccagtaggagcaaaatagaagcatgcatccaggccatcctgtcattgtgatgtggatatttatcaggccacaaggggaaaatcatcaaatgaaaagagtgtagactttggacacgaattttccttgttctactcaagtgcacatatatatttaggctacatacttcactgttctgaatctcagtttcttgtaaaaaaaaaaaaaactgtacaagatggtgcatttcaagtacatgcttcagtgctggtctcttgaagacttctttcataactaaaagtgttgatgcaattatcctgactttgcagtaagctgctgcatgcctgagagggtatcctcttcaccctgtatcccatttaaaaatctaaggctacatttgagttactttcccattaagactggagtcaacttttaaagggtcaccacctcaattggtccctacaaggataatatgactatccctagggaaatcgctgctcctgtgacaataaaagaatgttgtgcagcaatggacagtatgtcaaatgatcctctagggacagaaaacgtttcactaggtgtcacaaggagggtgcatttagagtgttcttcatctcaaagtatgcaaatgtgtttctgaggaatttgtgggttactcagagcatttgcatcagaaaatagttatccatttcatttaagtaatcaattgaacaaaatacatcacatggctttttctttttaataaaacatattggaactggatctatcacagaacaataatacctactggggggaaattccatagtacatgacatcctgggaaaagttcaacagagttggatgaaaatgcactgaaaatctggattgtaactttgaaagtgacaaatagcatctcatcaaatggctgatttaggtgtttgctactaactctgaattgtactgtagacaacattcggatgtctgccatgcagcaatcccatttctgaataattaagagacagacaagaaaaacaaagagtgatgtcgtgtttggttgcttctttttttaaccagaagatttttaactagaggtagctgttacttttggagccttccccaagagaataggtgagaccatcaccttttttataacttttattttggcttcaggggtaggtgtgcaagtttgccatacaggtaaacttatgtcacaggcattagttgtactgattatttcatcacccagatacaaggcctcattcccaataaatatttttcctaatcttctacctcctaccactgcccaccctc

SEQ ID NO: 1564429 - DNA, 4001 bp, Homo sapiens
cggggctgaagttcactctctccctgcttcgtctcacagcccctagctcacccgccaccgtctctgccgcctccgactgtgctcttggctgatcttcgctttcagttccgcctaggggagtgggagggaacggagccgagctgcgcgggaattgggaggtgggaagcgggggagaagagaccagatgaaatcggcccgggtcagcagagagccttgagatgggatggtgcgggaggaaggagcgggtggtggttgccttttctagggctgtggggatggtgtgcctattggaacggattcctcagacccctcccccatccctaccttagggactggcagacccgcaggcttaacactcctccgaacccccgatgggagaaggggtgttcttagtgggcaccgactagggctccggatcacctgatacctagaccagggctccgggcgcctgtcttttcggcttccaacttttccgctcctccggaaaagcgggcagttcagagatggtgccgagggtggcagcggcaaaccgccctgcacccccatctaaggtccaggccacactcaaaggcttccgaagaagcaaaaccaccagctctaccccacttttgcggcttgcctcaccactcccacccacgtcgtaacccacacacacgggaaaggggtgcatggataccgctcccgagtttggaggagcagcacggagctacagtcatttcatcttcacgcggggtttccagcgcgccccgatctttctccagcccaaccaagccatgccaggtctaatcaatcacttggattatttcgtgcatcccccaagccttatcttatccgaggccaggagatgaaggaagggaaaaaaaaatctcataatgcaaccccaaccaagctttatttccccttttctctctggttaatggcaccaacccccaaccccagcctcccaaaagaagcaccccaggcagtggtggttttcttaaagaagacgagggctttggagtggggagaaaagagaagaaaagccttccatgctcacagtttgcagaagtcctcctgctttcgccatctccagccctggccttttccctccttttcccctgtactgcatgtatgtgtgtgtgtgtacatatatatatgtgtgtgtgtatgtgtacactcacaaactcacacatacgcatatatatgtctgtgtgtatatatatatatatttttcccctcctttccccgccacagtcttcctttaatttgtatggaaggcagcgctactttttaaacacaccgcacatggccccagagctgttcaaacagctgattgcagcaaaatgcttccaaacaacattggtggtctgcatttttatttttaagtgaaaataaaaccaaatgttcctgtggagagattgcatgtaaaagccatacatcgatgtccacattcccatccacaccaaagaaatggagcgagacagatgggagagagtccagcccaaattgtccaataataataataataaaaggaaaaaataaataaatattagatgaaatgaagctcaaatatcgccagtgaggctttccctcctttgctggagagccactgcaagtcaaattgtttaaacggctttttaaaataaggataataatatgcgaaagacacgtcttaaaactgcacctaccttagctgtggaagacctgcatcgccgttaagagttctttttacacatccaaatttttctaaggaacctgaaacgcagtatgattcaggaggatgtattgaaagcccaggcgccttccccttcgggaaccccccaactagattcgctcatccagaggaatgcaagagccaccaacattgccgggtttggaggaaattcattgtttctgctgtcaatagtgtgtccccgggcagaacaagcattacaattgaagcaggaaaggccgagctagtggctgaataagagctctgtactaacagacagagatgggagaaagatgtctctgcaagaaaaagagagctaggggagagaggtccttctgcttccggcgctctccttctgccattggaccaaaatgaatgaaatttacaaacccagcagccaatagatctccagagtcgtcccaatcgctacaaaacccacgtccacagctacaacctcatgcaaagagcaactaatcccagtgcaaaccagctgtaacagagagatcctgggaaccctggagatagagcagggtacccagatgcgcacagcaaaccttcttcctctttgcttttttaggaatctctaggtactctccacaccaaacatgatgtcgtatatgcagacatctttaactgtttaaggtcacagtctccagcagtccctatgtctgcgttattgtgagtcaattgggaagcaatgatattaaaaaaaattttaagagcagcgaaaattggaatacagctctgtaaagtacaggagctttttatgccgaggttatggttgaaagaggatgaatgaaggctttttgtttacttctattgttataatttcatgatttggataaaatataggaggtgtgcttaccaagaggcagttgtttctaaatactcctcatttcccaggtccaggaggttatctttcccagggagtttcaagttgcagggggcgaggaggagggtgtgacccctgtatttaaaattgggttggagaaagttggcttgaaattgacaatgcttaaagttcccagtatttaaagttggcttcaagaaagttggatttaaattggcaatgcaaagatcagagtacatcatagaatgttgtggcaatgaacacagattctaaaatgagattgcttgggtttaagttgcatgtgaccttaggaatgaattttaatattcgcctccatttctgcatctgtaaaatggaacagataatctccatgtaatattgtcatattgattagctgagctagtgtgtggggcctgcttatcttcacaatatttcatggtgattacttttattctacctggctataaaagttagcttttcttaaaattatttcattgcccattaattcatttatggaaggaaaaaagataatgtccacaacacataggacattctcctaattgcttctgctttaggaagtaaacctaagcatgaagccttccatgatgatgcgaaggattttggacaacatgagcaataatggggaagatgatggacatgaatctggggacctggtttcatgttaagactctatcctcacaaattttgccttgtcataaagtcagttatgttctgtgactctgttgagctgacattattattacctttcctgtgggttgcttttccttgtggggactaaatgagataatatgcatgaaagcatcctttgccaacaagattggtacatagatatacacttatctattaaaagatatctatagccaataatagaaaaatgtatatacatacatacatatatgtgtgtgtgttcccattagatatttagaaatatacatatacttttttccattattgtgtagatattgaagacccattaacatgatagtattgtttataaatacagcttatcccccaaatcagtgatatacatggatgtagacatatatatgtagatatatggactatatatagatatctatgtcctaaactaaaccagaacctcaacttgaacacactaatttataataggccacaaagtcatggactttgccaagaatgtattaattcattgacttattcataagttcaggtttttttttttttagcactgacacagtcctaagcacagacatgtaactgtgagtgagacttatccatttatttttgagaaagcatacattatagtagacaagataatgaaaagcatgagaaaaaaatgtgattacaggaaggtgtgtacaaggaatacatataaattaatagggacccatagaggttaaaataattaaccaagggtttgcaaaggaagaacattcagagtagggaaggaatggtacatcg

SEQ ID NO: 1564430 - DNA, 4001 bp, Homo sapiens
atgccttcaaaaagcataagattggagtacacagagaaaaaaacatcccccactccccacacacaaaaaaaatgaacaatagaaaaataaaataaaataataaaataaaaataatataagccatactaccaccttgtggattcagctcgcaaggacgtcacctgcttagtttcaaaacccctacccaacccccaccccaaatttcttaatttgggtccaaatggtaaatctggatcctccgtccttgctccgggcagtctcgcccaagccctgggctgaattcgtgacttgggggcccagtgccccagctagctgcaagctcgggcacatcaccaggcccaaaatcccgccgccacctcctagtacccttccacgctgcctcctacaccgccttcccctgcatccccgagatagcagccgcacatacatgaaaagaggcccacacctgcggtaaggtgtggaagaagccagagaaaaggaaaccgggaaaaaaaaagaaaaaaagaaaaagccttctcaagaaggggaggggtatgatgcgtaggacatcctccgggttcacctcgttttccgagcgagacatttgttcccagggtggtcctaggcaggcctctggggtgcaagggttgccctgacgcccccgctcccgctcccgctcctccgggtacaaagggccctgtgtctggcggcgactaggctccagaactgtacgcctgggcccggatttgcgcgcggcacggggcctagataccgggggcgcaaagctcgcgactcggctcactagacccccgccgagggaccccaacctaccggttctccgaggggcgaaagagccaggtcaggctgggaggcaaggggaggaaagggcgtccaggagaccgcctgaaggatgagagtgtccctggggtagatcggcctcctggaaaaccgcaggcagagagcgccaccgcggagtggaaggcgcaggccggaacctgaacctcttgtcccacagcaagcccccaacccactcgtcatctgcagcccagtggcacctacctccctctccccacgccatcccggcccgcgcttccgcaggtcaagccaagccgcttcaggcgcgggttgggttgccccagccgtggcagtggggaggggacggggctgaagttcactctctccctgcttcgtctcacagcccctagctcacccgccaccgtctctgccgcctccgactgtgctcttggctgatcttcgctttcagttccgcctaggggagtgggagggaacggagccgagctgcgcgggaattgggaggtgggaagcgggggagaagagaccagatgaaatcggcccgggtcagcagagagccttgagatgggatggtgcgggaggaaggagcgggtggtggttgccttttctagggctgtggggatggtgtgcctattggaacggattcctcagacccctcccccatccctaccttagggactggcagacccgcaggcttaacactcctccgaacccccgatgggagaaggggtgttcttagtgggcaccgactagggctccggatcacctgatacctagaccagggctccgggcgcctgtcttttcggcttccaacttttccgctcctccggaaaagcgggcagttcagagatggtgccgagggtggcagcggcaaaccgccctgcacccccatctaaggtccaggccacactcaaaggcttccgaagaagcaaaaccaccagctctaccccacttttgcggcttgcctcaccactcccacccacgtcgtaacccacacacacgggaaaggggtgcatggataccgctcccgagtttggaggagcagcacggagctacagtcatttcatcttcacgcggggtttccagcgcgccccgatctttctccagcccaaccaagccatgccaggtctaatcaatcacttggattatttcgtgcatcccccaagccttatcttatccgaggccaggagatgaaggaagggaaaaaaaaatctcataatgcaaccccaaccaagctttatttccccttttctctctggttaatggcaccaacccccaaccccagcctcccaaaagaagcaccccaggcagtggtggttttcttaaagaagacgagggctttggagtggggagaaaagagaagaaaagccttccatgctcacagtttgcagaagtcctcctgctttcgccatctccagccctggccttttccctccttttcccctgtactgcatgtatgtgtgtgtgtgtacatatatatatgtgtgtgtgtatgtgtacactcacaaactcacacatacgcatatatatgtctgtgtgtatatatatatatatttttcccctcctttccccgccacagtcttcctttaatttgtatggaaggcagcgctactttttaaacacaccgcacatggccccagagctgttcaaacagctgattgcagcaaaatgcttccaaacaacattggtggtctgcatttttatttttaagtgaaaataaaaccaaatgttcctgtggagagattgcatgtaaaagccatacatcgatgtccacattcccatccacaccaaagaaatggagcgagacagatgggagagagtccagcccaaattgtccaataataataataataaaaggaaaaaataaataaatattagatgaaatgaagctcaaatatcgccagtgaggctttccctcctttgctggagagccactgcaagtcaaattgtttaaacggctttttaaaataaggataataatatgcgaaagacacgtcttaaaactgcacctaccttagctgtggaagacctgcatcgccgttaagagttctttttacacatccaaatttttctaaggaacctgaaacgcagtatgattcaggaggatgtattgaaagcccaggcgccttccccttcgggaaccccccaactagattcgctcatccagaggaatgcaagagccaccaacattgccgggtttggaggaaattcattgtttctgctgtcaatagtgtgtccccgggcagaacaagcattacaattgaagcaggaaaggccgagctagtggctgaataagagctctgtactaacagacagagatgggagaaagatgtctctgcaagaaaaagagagctaggggagagaggtccttctgcttccggcgctctccttctgccattggaccaaaatgaatgaaatttacaaacccagcagccaatagatctccagagtcgtcccaatcgctacaaaacccacgtccacagctacaacctcatgcaaagagcaactaatcccagtgcaaaccagctgtaacagagagatcctgggaaccctggagatagagcagggtacccagatgcgcacagcaaaccttcttcctctttgcttttttaggaatctctaggtactctccacaccaaacatgatgtcgtatatgcagacatctttaactgtttaaggtcacagtctccagcagtccctatgtctgcgttattgtgagtcaattgggaagcaatgatattaaaaaaaattttaagagcagcgaaaattggaatacagctctgtaaagtacaggagctttttatgccgaggttatggttgaaagaggatgaatgaaggctttttgtttacttctattgttataatttcatgatttggataaaatataggaggtgtgcttaccaagaggcagttgtttctaaatactcctcatttcccaggtccaggaggttatctttcccagggagtttcaagttgcagggggcgaggaggagggtgtgacccctgtatttaaaattgggttggagaaagttggcttgaaattgacaatgcttaaagttcccagtatttaaagttggcttcaagaaagttggatttaaattggcaatgcaaagatcagagtacatcatagaatgttgtggcaatgaacacagattctaaaatgagattgcttgggtttaagttgcatgtgaccttaggaatgaatttta

SEQ ID NO: 1564431 - DNA, 4001 bp, Homo sapiens; identical to SEQ ID NO: 1563957

SEQ ID NO: 1564432 - DNA, 4001 bp, Homo sapiens
tcccccttctacccggattttcaaccagtttcttccacacacttttcttcgtacaaaacagatcctaggctgggtttaaatcccattttgtgatgtttccacacaagaaaaagacactttaaaaatttttattttgtttgttgttgagctttaattctttttcttttgtcctagcccctcttccccacggtttttgctttgtgggtgtaggccgcagtggcgcaaatagcaattcccagcccccagcccatattttgcatcggagaggccagggctcacccgtaagcgcttcacatgagcagcctagcgccccacaccctaagccgcaggcgggtgaagcagaggaacgcggaataaatcattctgaagcaaaagggcccaccttcggttaagctctaaaagtctttccctgggagaggcaaggaagcggctctggctgtacactctgagaaagtgacctctcctcctaaccctcagtccgtttgcgactaagcgctcagatgcgagtcccagccgcaacccgggcggactgccgctccgctcttctaaagtctaaaaaatgcacccgtttgcggctgctcgcttttaaaaagtcacattttccgatgaacctcttttaaaaggtacattactttcctcgaaaaaaaaaagagccgttttatcgctacgcgctttaagaaaaagaattcctttgtgaggacgtgaactgtttctgggttctgtcttagaaaacaccatctatttatgggataggtgggcggtttattgatttatttatttggctaagggattacaagtcatttctttagagaaagaggaacccttttatgtctggcaatactcttagaaaagtcatttttttaaaatgagaaaatgatgccgtttttcggctagattataagttgatttttaaaaaataggcagtatttctcacacctaccatctccacatccagcaggtgctggctgagtacagccccataaatagggcgggaaggaagggcggggaggtgagcgccaagagaaacagcaccgggaaccctgtgcgctcctggccctcctctctgcgccaagggtcgtaccctcaagggttggagccagcctggcagggatccaaacccgagcccccagaggagcgcagcgaggccaggggtagtttctcagctagaggcatcgcccctcagctccaatctctcagccgggcgagtctgggagtccgggacgtgctcttttgtcaacacccgccccaaccttagagtttccctcagcctcgctgaagctggctgtaccctttaaagggagagacctttttgcacagccaatgtcggggaaattcatgcgccgacacatttctgacaaaagtgagagttttcccaaagtaacgaagcgcagcggtggtagtgcaaaaagatattctccctgcgctcacctccggggtttgctctttctcttccctcccgggaagagaagggggaagggagaatagcagaagcgtctttaaaaccaccccgttgtcatagttcagacctcaggggcaggcagcgggcagtgtccgcgcactaagtgtggacctcacgcctccctgacagcaccctgtacaggtacccagtccggttacttacctaataacgatgcctttagagtagaatgaagaggtaaacgaaagggagaaaaaaggcttccgcccgctccacggagactgcgactgctgtagcgggctctaccgccacagctcgcagtccgcagagcagccggagtcgctgaggttgtttctgaggctattcaggcagcccgggctgcctgtgctgcctgtgtcgccgctggcactgccactctgcgcactctgtttggcttgccttcctctttgccgcgcgggcagctgagtgcagctactgctcacggctcctcccgcccagacagttcgccgactgcaaggagccagtgccgagccagcccttttgaatggcgagggggagggacttaacagagggggagaaaggggaaggaaggggggtgaaccaggggaaggcgtggggagagaagtgaaccagtgtccgggccgcctgctgggaagggatggcgcagcaccaactgctgagtacccccctctggtccccactccctgcacctcacatcccccatcgatccgggggcggcccctccccgctgacggagaaccagcaagaagggcgggggagagatggaggtaagcttaggaagttactgctcgcctcctggagaaggaggcagaaagcgtgctggcagcactctcgcgtgcgggacccgctgctgaagaaaacgcgccgctttcgggctgctagctttcctgagcaaaaccctgtgcatacaatgttctcctcggtcctctgctcactcttctcttaggcttccctttaagtttcacccattcacattttctcagagaagtttgatttttcttgtgtgtttttcttgtgataccgctggctgccgactccagctagagaacaagcatcccacagcaccgttttctcatacaaaggatacttaaggcagactaggggtagtaggggcagaagcctggcaaagtcacagtttgagctgagaggctgtccgcatatatcatactcaactgtgagcggggtctggtacttcgatcgcctttccagattaatcctctgacagcagcgaagggctgtgtgtgtgtgtgtgtgtgtgtgtgtgtgtgtgtgtgaaggagggaaggagaagttctagcgacctagcatttggctaccccagacagcaagcaggagtgagtcaggtggcattgctgccagagaccaggcagcgtcgcgggcatggacggcgcttttccaaggtaggaaagggggcaagagagggaggaaaccagcccggagcctcatgcctggtgcttgccagccagctctggctgcctggtgggcgacggctgggtgggcatccgggtgccaggtccccaaggaccactaaaggtaccaggaggaatgtggctggtttatgccttcgaagggtcgtggatataaggaagtaggggccaattctcccgttcctggcatgtgattaaaaaaccagtagtaacaacatcaaaaccaccccagctggtcaactcttattcttgtttcaaggaacaactccttaaatttacccagacgccagaaaattaaccaggtgaattttctaaattcctctctccagaaaggtgtacgattttatggggaaaatccactttctgtgcttatcctgtagaaaaacttatctttctggggctgtgcaattatttgaaagtaggtggctctttttcctgaaataaaaggagaaaaagtagagaatgtttcagagcaccaataacacagtatccattttttattttttgtctactgaatagaagaggagatgacatctgcatagagatagaacatcaagaaggaaaaattttcagaattataataagttgcttttctctaatagctgcttcagggaaagttttttaactgaaaggcaaatccttatgacttatttccccagtatatccttctccatcttcttagctgcctcctttcccattcctgatattttgaaggttaaatccttggttcaaatattcctcacgtcacttttttgcatatttttataccgaaaaccatgctactaggagaaacatcagcaccgcagctcaatgcaggtctgcatgaaagaaaacagagaaatatttacttgcacaggtgtgaggagacacttcactattacattttgctcctcctgtaactgtcccttcattattcacagtatccagcacatgcattgtactcttcttgggagctaggaaatgtctgagaggggaaatcagaagctgctaaatggttacagctctgactcttggggattgcaatactgtatgagactgtgtcatgggagatggcaggaactcaatgcaaataaaatcactgattgatccagggacagtgtggcacaggcatgctatgggagtgctttcaaatacta

SEQ ID NO: 1564433 - DNA, 4001 bp, Homo sapiens
ataattgtaaaaaaagaaaatatttaacattaacagaacattgactaaaatttaatctcaatttgatgattcaggatatgctaaagaccttgccttaccttgaaatcctcatgaaaaatatttatctatatatgttcagaaatgctagtaataaattaaattgttctagtcacctctcaaatagatttatttggcaccatatcaaatggcaagataaaatttgtgtatctaaagtaatcactaggaaaaattgataatcagatttatggattcattcttaatgatttgcttatatcaagtttttggcagaagcatgactggacagattaaaagaatgaagctgggcaaactactgatttgtaagtagcagggctaacctccttgtctgatccctttatagattaatggaaacacaactgtttgaaaatgaatatacataccatgaaaattcataatccacatgtaattgcaaaaactgcattgatgaattttctccactatgctttaaattacataaattttgaaaaattggggtgatggcttactcaaaatttgaaatacattaatatcattttattttactctttaaaaaatgagatgatatctttaacaaagtgattttaaaacgcaccttaattagttcgtagttttgaactccgtttatgcctacgtcaggatcaacagccgctgggagagtatatttagagtttatagccgagttctctggaattgatatgttgataactgttgctgggaacaatggtgcattatcatttatatcttctatcagaaaacgtatcttaaccagtctaaatatttcatccggcaaaatggcaacctccacttcataaaagcaatgctcatcccttgggataccagcacataatttctcacgatcaatgcgagcgccggtagtgaagatctcaccagtatcctcttcaattcgaatcagtggcacatctccggtcttgtacactagcttgaactgcatagtagttgtcaaggacttgtttggaatcagcgacaagttaaggtctttcaacaagttgcctatcaggacgttttctggaatttcttctcggatggtgtagtttttctcctgggcgccagagtggaacaccacgcatactagcaggaccgcgaaaatgtacgtcccggacaacaaacacttgtgacagtttgttgtattaacccgcacaacactgaccaaaagaagaggagagagagaagaggaagaagaaattattaagaagccaaccctaaacatgcatgttaacaaaaactgttttaaattaaaatcagtaaatgagatgttagcataattgacactctgttaattagtgataaatctgttctgaatcaaatattatgaattcgtacattaagaataaagataaatgaaataagatacctacagtatcaaaaatgacacagagtacctataaaagtgtccaccattgataaatatataaaagataatactttaatataccaagatagttaaagagaatacaaataattaaaatatttaattcaatagttaagggaaaataaagggtatttgttacaaatcacaaaatataatcattattctttgttataacatgggtttaaaatgcaattattctcttggcaatgaataatttatacaatagtccatttcttcagctctgggcatcaaagtgaaaaaaaattgatctggataaaaggaggcaaggaatcattataaaggagggactaataaagtttgatttgaagaagagaagtttgggagaggagaggggttgatgtgactaacgcctaaacatggtaacaactatcatgtgaaaaggggattagaggatttttctttggataagaaaaacaagaatagctattaatataaagtacaagtaagcaactttcagattgacataactgcttattaaaggattctgaaaaaaaaaaggtttcaggatatttcaggagtgtattccatatctttggaggtactggaccaccagattagatctactatatttgctttagatacacggatttggtagatgacgtccaaacattcaatgggagagttagactagaagacatcccaaccctgagaatttatgtttatagaacgcagaaggtagttcatataaaaatgggttttcacatctatagactaacaggaattatacaacttcaaggaacagcttgagaagggcttgaaaataagaaaggcatttaaaaacagtaccgagttgaaagtgagtcaaaaatcaatctctcttgctacttctccctattatttttcactcactgaaagctttaaaattatttcagttcttgaactcttctgacaaaattcaatgagggattttgattttcttaaaatctgcaaattttaccttcagtttcctttcataattctcaattcttattctctattttatttattctcaagtttatatattaaatatcttttaatctctagtataattaaacattctaatgtgcttcttctggatagtacttgtagatgatatattatataaacaaaattaaatttgtatcacactgagctaaagcctatcagatgtcatacttttataattaaatgaaggttaatgcaactattaaggtatttagcagttttgaaaactcagtgttcaggtggttatttaaaattccattccagaaatgtattaatgcatataggtaaccaattaaggaatttctcaatatttattggtaatcgataacatcaacaagttttagtaattgttctaaaaacaggaggactacatatgatataaataacttgttatggatattgtgctctggttatgccaagcaatgtgttatatgaaataactgtcccattgcatagctgcacatctgcattttttaaaatatgcatatgccaatgttggaatacacaaaattggaaaaaaagaaatctttctatttacaatcaataatcaaataaatgcatctgttgcaacaatcaagatagtttaggtcagcagtagacttaaaatatctcattaatttttatcacaacattttaaaaatatatattatgaattcaatgactttcctatgttaagcagttggtatcatatataaaatatgttagttatgatagtgagtaatgctagaggtgaagacattatttatcctagtaaacaacataaaaacactgttgcctgtggtatagtatttttagcatcatttgtacaatgatgtgcattgggattacataatataaaaactcgctcaaaattcagtcttgtgaatttttggttttatactctgttatgaaggtgagattaaaaataccccattgatactaccagctaatatgcacacatatatgtgttctatatgctgtgaatctagcatatctaagacgttttggatgcttatgtgattttataaatgtcatgcaaacataagcagaaataaaaatggggcagtgacaattggaattaaaattatcgctctattcttatcttacccttaggtattacacattattacaactggcagaagaatactacagactgtttttaaaaacattgcaggatattctgacttataagtgggagctaaatgatgagaactcatggacatatacaggggaacaacacacactggggcctattggaggttggaagatgggaggagggagaggatcaggaaaaattaatgggtactaggcttaatacctgggtgacgaaataatctgtacaacaaacccccatgacacaggtttacttacataaacctacacttgtacccctgaactcagaataaaagttaaattaaaaaaaaaaaaaagataaaaccaccttgaattcctgggataaccgcccaaaatgaaaaacaaaataaagcaaaataaagaaataaaagcattgcatgcatgtcgcaatatctctacacaacataaataattaatagagtgatctagttccaagaagtcaccctccctcaatccattctaaatctgttctact

SEQ ID NO: 1564434 - DNA, 4001 bp, Homo sapiens; identical to SEQ ID NO: 1564001

SEQ ID NO: 1564435 - DNA, 4001 bp, Homo sapiens; identical to SEQ ID NO: 1564024

SEQ ID NO: 1564436 - DNA, 4001 bp, Homo sapiens
ccttgaggcctgttaacacctggggctcagttaggctcaactaaggccctcttaccctccacgcagaggtgcacaggaggcaaacccaggtctacgtccttctagagtggccagtcctatcatgttctgtttcaatgactccagggtcccctgacatgctttctccctctgccaccctcactcatgcttccccagcactgagacatttcctatgacattaaaaaacagacataaaatttgtaaaataccttaatactatagatgcagataaagtaatttgttatgaaaagtgctcttcctccttacttgtatcagtctttttcatgatgggggaaagaatgcaacatactttggtaaattaaaaaagtataaaagtaaaaataaatcccactgtagatgatcaattaaatggcaaggaaccttctgtgtgtgtccagcgaagcaatgtggctgagcattaaggctcacctgagtattggtgtagacacccagtttccctcataccagtgtgagtgtgggcatgttcccacctgcgtgtctgagctggtgcacgagtgtgcacacctgtgcctgtgtacctttgtgtaccttggtttgttgggggacacactcctgcccacaggtgtgcctcaaactcagctcttgagctgggaaacagggagccgccaggtttcgcaatccaacttcaggacctgagaagcctgcgcgctagggagacgcagagtcctcatggttctccaaacggcagagggaggaggaaaagggtggctggcgtaagctacatagaggagatgtcatggacctgaaatgacattcggagggaaatgaaacctagcagctgtttctatcttcctgtgtgttcagtcggggcattcagggaagaagcaatggaaactgaggggctttgggattcgttgtctgggaatccctgtgcaccagagagtgcccagcccatgagacaggaggacagcatgtgggtccggcagggcctgagtctccagggaggctggcattctccccaagagggcatgggtcggcaggtggaggagaaacccgggctgcggggtcaggtagatgagacacttatcacttagtcaggtggtagctcagaaacaggccggtgacacccagttccagtgcttcatgtgcgcacacaagcttcgccccacgcatcctctccaggatgcctcacctgggtggataggaagcaaggcacaccgcatcctaagcttatggtcatgagtggacccagaggggggtctccagtatcactggtcccaggagaggcaggcatgcatggtctcttcaagacaggggtaaaatgcataagcccaactctccacccagtgggtgtcttgccctgatgatgtcagccatggcagatacagctcttccacctagattgcagatccacaggcttaaaacatcccccggcattctccgggaatggtccctggactctggaccagccagtgccccaggactgttccttcccagccgccaagctcatgggaggctcagtggggactctcctcctagtacatggccatccacaggcactgtcaacaacccagggcccttctacattctggggtcctgccaccttacccagcagcgggataatgggaagggaaagagctggaacagacagagtggaggccacaagcctcacactcctgcatggcaagtgaaggggggggatccttttcagcccagggagctgcttcctgaacatacctggaagcccagcacaagctgagggattcattccactacagctgggcatgggggatttcaatgtgtgtcggagccctggatcctagtcgccctaccaggtgtacttctcctccaggtcacattatgttcacaacctctttaacccagatggactcctcctcatcatcacatggtgttggctgtaagggttacttctggtgccccagctgctgtttcaaggtgcagagatggaccagcagacccctgagtccttgtcctcctgtccaagtaatatccatagaaatagtaaaatagtggcacgttagacctcttgacatttttaaggctgacatgtttacaagcatttcatccagatatttatgagtttttatctcatttattttatttatttatagctgtcatttcaaaatctatttttgcttgagagttatttatacatgtaaccaaatgttcagagctatgacatataggtttcaaggttaaaagtctgtatctgctattgtgttgggtaaaacccatccagcacttacaaaaataattattgattaggcatggccactgtagtggtctaaaacacactttgaaattcttctcaaactcatttgaaaatattcctgatgtaactgaacatagtacttgcttctaatgctttctaatagaaaacagggcaagcattttctagatactgggccacctctggcgtaggctagaaaaggtgacacagctgtgcctaagtctcctgctttcatggggacaaaccccttaggagagccctggaccagtacatcacgaagtctaacaccctgataacactatacagaagggacatgccatggaaagactcatagaaataggagatgcccaaggatctcagcattccagccccagctatttgagtcatgctagccatggaaccagggagacaggaagacaactgacaatgtccccatcctgagccatcactagactgcatcctcctgagtgcccctgaaccacaatcatttggctgagagactacggaagattgcagagactgagagttagtaaattataatgattgttttaagccattacattttagataattttgaaaagctctttagactcctagaaaaactgagttgtctactgatttgaataattgtggagagctttaaaggccaatgtcacgaatgctaataccctggaaaagtcaaactatcaagactcttcaaaacacaacagatctttaatgtccctttgctatggctggagaataatctaacatgtatctgatagaccttttggaaagcctctgttcacatctctcggcctggtatgggtcaactctggtctggtttaattctaggcaactgcagcagctcacctttcattttaggtcgtggcctacactgattttttgatcactgactgtgtctgtgtctgtgcgtgtatgttttgtgtgttaccatactttatccgaaagacctaaataatagtgttatagtttttttgtgaacataaagcattccaggaagacaatattgcttatctactgagctttaaaacagatatgaggcagggcacagaggctcacaggtgcattcccagcagtttggcaggccaaggtgggcagatttcttgatgtcaggagtttgagacgagcctggacaacatggcaagatctcatgtctaatatcatatgaaagctagccagccttggtggcccatgcatattatcccaaaccctggggacagagtttgccctgtattaagattatgccactgtgctccagcctgggcaccagagtgagactctgtctcagaaataaaaacaaataataaaatactaaaatagataggagagatcactgaagagagaaatgaataaaactgggtgggtattgtggcttatgcctgaaatcccagcactttgagagtctgaggtgggtggatcacttgaagacaggagttcgagaccagcctgagcaaatattgtgaaaactggtctctactaaaaatacaaaaaagaaaaaataggtaggattagtgtcatatgcctgcagttgcagctgctcaggagggtgtgactggacaattgcttgaacccaggatggggaggttgtagtgagctgagatcatgccactgcacaccagcctaggcaacagagcagaattctgtcttcaaaaaaaatcaaagagagaaaaagagagagggaggaaggaaggaaggaagaatggaaggaaggaaggttggagggagggagggaataaggaagggagag

SEQ ID NO: 1564437 - DNA, 4001 bp, Homo sapiens
acatgcagatgaagtgaaacagagccaagattagcaggaaaatgcagaacatggctgcctgcctctcatcctacaggaatcatgcaacccttcaataaaagagggataataaaagtttccatatggatggttgtaatgggaatttatgcctttaaaagtctcatattgcctagtcattaaaacgtgacagaattaagaaagaaacaatgatgcaatggattcacataagagtggtcctccatgaactgggaaacttctagtgtggaagatatggaaccagacccagaaaaccctaggccaaagaggaacatggaagtcaggaaaagaagacgcaagtgtgatggctacactcacccagcatcaatccatcacactctcatttggctccggttatgaaagccctcacattgagagttctccagatggccccagtttgttctcaaaatattctcttcatgtccacctgaaaaccaggctatttacttggaagcagattctgtgtcatctatcttcattttttttttgcaagtgatgttgcaaaaccttatacacccctcacgagattttgtccttaaagctatctgactttattcctgctcatactctatgtcccaggatgaaatcaaaagatgatggagagtgcccccccaccacaagatgtgaatcacctgctcagctgggaaccaaattcaaggttaattcaaagtgcccagtggacaggactgctagtgtctatgcctgggttggcctcacgacaatgaaacactaggagatgtctcttttgggcatggtgtgctcctcttctttttagaagagtggctttttttgaacacacaatgccacacacacattcagacatcctacactcactatactcccacagaaatacacagcccagcagctaccgaggctgcacgaagcactacctggagagagtcccacagcccaagcagagaaacacaggccaccaaaatgttggaagactcaaaaacagaaagcactggagtgcataagtaatatgcttttaagcagacttcacttacagtcacacacacacacacacacacaataccacacaaacatgcagacatccaacacttgaaatgctccgccagaaatgttgggagactaaaaaaaaaaagaagggaaaagggctgaagcgggttagccatgtaatttccagcacactctactgtcaggcgcacatgtgcacacccaatgccacacacacacgcagacatccaacactcacaacactcccacaggaaaacagagctcagcactcctgaggctatgtgattctgcaagaatcccaacctgggagacagcaaccacaagaaaccccagttggctatacctagaaatcacagttggacaagtttcaaaagactcatgcctacaatgtctaggctggcctgagaagtcctgcagatgtttttccctgtgtttaagcaagctgacatcctaagcagagaaaaataatacaggcagagtaggcctgttgttgataaaaaaggctgtgtttgaaaaccctctgtgtgaccctaaatgtctcaacctcagggccccttcaggaggaggtatttttagatagtaacctgttcactggaaactgcccttctgtctccatttttgaaacaggctgtgtgcaataatctggtcccataagaattggaatatgatctgttgtgttgttgagggttctttgggtgatacaatcatacctgagtccttagaggtgggtgtcagtgaaagaaggttgggctcttgacctcactgcatcccttcatcctgggtctctcagaagctctctgggaaaggtagaaaccacgacaatggcaagtccgaggtggaggagtgttctcatacctcagactggtctttcactatgcagttgtggttattctcttacctcagactgacctcggactgtgcagataaggttgagacagtgaaacactgcaagatgtctgtttctggtgtggtgtgctcctcttctttctagaagagtggctcttttttgttttatttctttcaggaggagttgattttgacacctgcatgtcttggcccacctcccgattcactgcagattcatgatccacagaaaaataaagaacacggagccccacagcacaaacaaagcaacagagaggccaacaaagattgaaacattcaaaaaaaaaaaaaaaagaggcactgaagtgcattagacacattatttaagcagactccacttacagcaacaaacacattcttaaacacacaatgaaaaacacacacacacacacacacatccaacagttgcaacactcccacagaaaaacatagctcagcagtgcatgaggatgcatggctctgcaggaattcccacctaggagagagcaaccccaaggaacataggcaggctgtacctagaaaccacagtagggcaagtttcaaaaagattcacccgtacaatgtctaggcaggcctaccaaatcttgcagatgtttctggatgcttaaggattttgtggtttattcctgtagctatgcttgtttcttcacgctggctaacgtctaccctctcctaggatcatgagactatccgtggatttcacagagaagacagacgagaagacacagctgacgctcctccacggaggtccccttttccaagatgcagatacttcttgctaggcaacggtgacatttatagcgatgctagacagagctcacaatcggatcaggtaccctgagactagcgcatgcgcatttgtgaggcagactcaagtcaggttgtcagagctgtcagtctgcctcagcaggggataatggaacaggcagagcccgcctggtatcgggaaaaaggctgactataaaaacccactgcaggaccctgaaaatctcgacctcagggaccctgctggccatttccttgttcaggtcccgctggaggaagaggtgtttcgcgactgcgatgtggtcgctggaaactgctcttctaactccattagcgaaagagggtgtgtgcaataattgggtcccaagggggttggaatataatctggtgtgtcgttgagtgttctttgggcgacagaaacatacctgagacaccagaagtggatgtcagcaaaagatgattgggcttttgaactgaatgcctcccttcattctgagccttgcaggggctatctatgaaaggcaagaaccataacaaaggcaagtctaatgtggagcagtgttctcacatctcggaatggcctctcacttgtgcagatgtagttgagacagtgtctcagaggccatctgtggtgatggcaagcttgaaaatggtgtgcagtgctgctgttggggggcactatggattccccaagaaaacaaagaaaaaccaaggttcacctaagaatgagctgcctttgctggagtccaggcaatgttcaagattcctgtcagaaaccaaaagcctcctgcaaagtgcaaacaactgcagcctctacgatgagacaatgatccacaatatggagtgcagccagtttatcaaagtcccttttactctctgaaatccctggcagcaaaataatctgtggcaagtggcagtcctagccagcaacagcccagtgaaagggcccctccacaatgagaagtccatgcagatgagatgaaacaggggctagattatcaggctaaagccagacatggctgcctccttctcatcctagaggaaacatgcaaccctgtgatagaagtgggaaaaaaaacagattccttgttggtgggtgtaacaagaatttaccgttttaaaactatcaaagcttcccagtctttaaaaggtgacaatgtttagaaggaaacactcatgcaatggattcccaggagggtcgttctctgtgaactaggaaacatgtagtgtggaagtcattgagccagaaacaggaaaccctaggttgacgagaaacgtagaagtcaggggaaaagaggcaagtacggaggccacatccaatacagaatcaatcaatt

SEQ ID NO: 1564438 - DNA, 4001 bp, Homo sapiens
acatgcagatgaagtgaaacagagccaagattagcaggaaaatgcagaacatggctgcctgcctctcatcctacaggaatcatgcaacccttcaataaaagagggataataaaagtttccatatggatggttgtaatgggaatttatgcctttaaaagtctcatattgcctagtcattaaaacgtgacagaattaagaaagaaacaatgatgcaatggattcacataagagtggtcctccatgaactgggaaacttctagtgtggaagatatggaaccagacccagaaaaccctaggccaaagaggaacatggaagtcaggaaaagaagacgcaagtgtgatggctacactcacccagcatcaatccatcacactctcatttggctccggttatgaaagccctcacattgagagttctccagatggccccagtttgttctcaaaatattctcttcatgtccacctgaaaaccaggctatttacttggaagcagattctgtgtcatctatcttcattttttttttgcaagtgatgttgcaaaaccttatacacccctcacgagattttgtccttaaagctatctgactttattcctgctcatactctatgtcccaggatgaaatcaaaagatgatggagagtgcccccccaccacaagatgtgaatcacctgctcagctgggaaccaaattcaaggttaattcaaagtgcccagtggacaggactgctagtgtctatgcctgggttggcctcacgacaatgaaacactaggagatgtctcttttgggcatggtgtgctcctcttctttttagaagagtggctttttttgaacacacaatgccacacacacattcagacatcctacactcactatactcccacagaaatacacagcccagcagctaccgaggctgcacgaagcactacctggagagagtcccacagcccaagcagagaaacacaggccaccaaaatgttggaagactcaaaaacagaaagcactggagtgcataagtaatatgcttttaagcagacttcacttacagtcacacacacacacacacacacaataccacacaaacatgcagacatccaacacttgaaatgctccgccagaaatgttgggagactaaaaaaaaaaagaagggaaaagggctgaagcgggttagccatgtaatttccagcacactctactgtcaggcgcacatgtgcacacccaatgccacacacacacgcagacatccaacactcacaacactcccacaggaaaacagagctcagcactcctgaggctatgtgattctgcaagaatcccaacctgggagacagcaaccacaagaaaccccagttggctatacctagaaatcacagttggacaagtttcaaaagactcatgcctacaatgtctaggctggcctgagaagtcctgcagatgtttttccctgtgtttaagcaagctgacatcctaagcagagaaaaataatacaggcagagtaggcctgttgttgataaaaaaggctgtgtttgaaaaccctctgtgtgaccctaaatgtctcaacctcagggccccttcagggaggaggtatttttagatagtaacctgttcactggaaactgcccttctgtctccatttttgaaacaggctgtgtgcaataatctggtcccataagaattggaatatgatctgttgtgttgttgagggttctttgggtgatacaatcatacctgagtccttagaggtgggtgtcagtgaaagaaggttgggctcttgacctcactgcatcccttcatcctgggtctctcagaagctctctgggaaaggtagaaaccacgacaatggcaagtccgaggtggaggagtgttctcatacctcagactggtctttcactatgcagttgtggttattctcttacctcagactgacctcggactgtgcagataaggttgagacagtgaaacactgcaagatgtctgtttctggtgtggtgtgctcctcttctttctagaagagtggctcttttttgttttatttctttcaggaggagttgattttgacacctgcatgtcttggcccacctcccgattcactgcagattcatgatccacagaaaaataaagaacacggagccccacagcacaaacaaagcaacagagaggccaacaaagattgaaacattcaaaaaaaaaaaaaaaaagaggcactgaagtgcattagacacattatttaagcagactccacttacagcaacaaacacattcttaaacacacaatgaaaaacacacacacacacacacatccaacagttgcaacactcccacagaaaaacatagctcagcagtgcatgaggatgcatggctctgcaggaattcccacctaggagagagcaaccccaaggaacataggcaggctgtacctagaaaccacagtagggcaagtttcaaaaagattcacccgtacaatgtctaggcaggcctaccaaatcttgcagatgtttctggatgcttaaggattttgtggtttattcctgtagctatgcttgtttcttcacgctggctaacgtctaccctctcctaggatcatgagactatccgtggatttcacagagaagacagacgagaagacacagctgacgctcctccacggaggtccccttttccaagatgcagatacttcttgctaggcaacggtgacatttatagcgatgctagacagagctcacaatcggatcaggtaccctgagactagcgcatgcgcatttgtgaggcagactcaagtcaggttgtcagagctgtcagtctgcctcagcaggggataatggaacaggcagagcccgcctggtatcgggaaaaaggctgactataaaaacccactgcaggaccctgaaaatctcgacctcagggaccctgctggccatttccttgttcaggtcccgctggaggaagaggtgtttcgcgactgcgatgtggtcgctggaaactgctcttctaactccattagcgaaagagggtgtgtgcaataattgggtcccaagggggttggaatataatctggtgtgtcgttgagtgttctttgggcgacagaaacatacctgagacaccagaagtggatgtcagcaaaagatgattgggcttttgaactgaatgcctcccttcattctgagccttgcaggggctatctatgaaaggcaagaaccataacaaaggcaagtctaatgtggagcagtgttctcacatctcggaatggcctctcacttgtgcagatgtagttgagacagtgtctcagaggccatctgtggtgatggcaagcttgaaaatggtgtgcagtgctgctgttggggggcactatggattccccaagaaaacaaagaaaaaccaaggttcacctaagaatgagctgcctttgctggagtccaggcaatgttcaagattcctgtcagaaaccaaaagcctcctgcaaagtgcaaacaactgcagcctctacgatgagacaatgatccacaatatggagtgcagccagtttatcaaagtcccttttactctctgaaatccctggcagcaaaataatctgtggcaagtggcagtcctagccagcaacagcccagtgaaagggcccctccacaatgagaagtccatgcagatgagatgaaacaggggctagattatcaggctaaagccagacatggctgcctccttctcatcctagaggaaacatgcaaccctgtgatagaagtgggaaaaaaaacagattccttgttggtgggtgtaacaagaatttaccgttttaaaactatcaaagcttcccagtctttaaaaggtgacaatgtttagaaggaaacactcatgcaatggattcccaggagggtcgttctctgtgaactaggaaacatgtagtgtggaagtcattgagccagaaacaggaaaccctaggttgacgagaaacgtagaagtcaggggaaaagaggcaagtacggaggccacatccaatacagaatcaatcaatt

SEQ ID NO: 1564439 - DNA, 4001 bp, Homo sapiens; identical to SEQ ID NO: 1564437

SEQ ID NO: 1564440 - DNA, 4001 bp, Homo sapiens; identical to SEQ ID NO: 1564438

SEQ ID NO: 1564441 - DNA, 4001 bp, Homo sapiens
caggatgatctgcttctaccattgtgctgtaaatggtaaaaaattatctatatttagatataaataagctaaaaagataaaattttattacatactgtgctgaaaacccaagtaaaattcccttcctgaggctgacatctttttagtatttcttactttatatatgtaaaatttgtaacactcagagcaaaggggcactaacttcatggacaaatgctgcattttagtatgtacctgacaaaaatctcatttctaaaaattagataagaaaagctattgtaattttcctcagttgcaatatgaagaatgtccccatttaaataattttatttgaaaagaatctatttatgaggtacagtgtgatgttttgcatattttctttcttgagatgtctgtctcctgtcgccaaagtgaactgctcactgcaggctcttccacccagcctcaactgatcttcctacatctcagcttcccaagtagctagtactacaggcgctttctaccacagctgggcaattttttgtatttttaaaaatagacaagggtttccccatagtgcccaagctagtctccaaatcttcggctcaagtgttctgccggcttgggactaccaaagtgatgggatttcaagggtgactcaccacactcagcatgatatttggataagagattaaatcaagctacttaaaatgttctaggaggagaatattttaaatattttaccatcttttagtgatttgaaatatacaataggtcaaagatccccaaaccctagccttcaacccgtacctatctgtggcctgaatgtgatgccggaggatgacctgcaatacctgtctgtggagaatgtaacgcctgaggatgacctgaggtggtacagttttatccggaaaccatcctccctactccctcgctggccctccctgtccccgtgacagcctcactgccccacctggcctctgtcacattgctcctaccggaagacccgccccaccacgtgcccctcggagacctgccgccagcccccactcccaaacctgtccacctcgccgccttcttcccctgcgcaacctttctctgaggaaaaactgacttccactaaaccagtccctgatgcgaaaatagcaatgaaagagtccagtacgttacccaggctggtctcaaactcctgacttcaagccatcctccgacctccacttcccaaaatgctaggactacaggagtaaggcagtgtgccaggttaacagaataacttaagcgcatctattttgttccagttttcggctatctaactccatttgtctcgattacacccacttattcggtttaaattatttacggtgccaaagacacatgaaacgtttcaaatactgccatacaacgaaggagacgatcacaggctttacagaggcaaactgaaactcacattatttgtggccccatatttctacatacactaaagtaacacaatttatgtcaaaatttgataattcttccaagcaaatcagacacgcgacatgtgctaaccaaaagtgtgactttttaatcgcagtggttaagtgtattgcctgtattctgaattatcaccacattcacagagaaaacccgctttaataaaaagtgcacatgaaaaccaatggcggcttagcaccatctcccacaactagtcggacacattaggcagttaaaggtagaatcctcaggaaaaatcaatgagtttaacgaaagtgagtctcttaatagcactgaggagttctttccccactgactcctcccgtaattcaacacccacacatagaaaacccatccccttttatagacaaaatcccaaaccttcgctttctattcttgccgagagacccagctgtccagagaaacagaaaatacctgcgctttttagtaggacaaagagcctgaggttcgcctggccctcaggccgtacgtaaccggcttcggaacaccacagggccaactgcgggagggacagctggagcttccctgagagggaaggacgccggaagccgtgcccggaaatcccgcctacctccagcggccaatcattgcgaaggcggtgggcgtcagccagttactgcaaaggctgtgggcgtgtcctgaggccgctccgccccagcaggcctgcggctccatcatctcgcggtaactcttccgagaccacgcttgtgccacgtggcgggccgcggtggattaaggcacacgcgaactgtgagccctttgcaattgtgggcatggaagacctacaccctaactggcatcctgagtgtggcaagacattaactaacccacagggaacacatgaaacatctcacttcattaggcaggctaggctgatggtactgaatattgcggatccagaggggagagagagggaccagcgctgctgctggggcgagggcagcagcggtggcttggggggattggggcagggcgggtgcgtgggactaaagtcgactggtacgttgctgaggtggaattcatctgcaccagaagctgaaaccctgcaaggattctgtcaggtctaggcaaatacatactccgagttccatggttcctccctgaggatgctgtactcacaggggcattccaaaggacttctcatcctgtgccctgggcacacgggaggcctaccgccatggtcgccaatgcagtgatccgtgtgcactgctttgctggtgcagaggctctcacaagtgcagtggtggccgtgtgcctgctagcggggctctggaagccagggccttggcatccgactccagggctgccgtgcgcagctaaccctgctgggtatctgagccccagtgtgagtgtgacaggctaagggccctgtggggccccccaggaaccctgttccacataggtgtaggatgtggttctcagcagggcaaggcccgcaggcctctcctggagttgcccccagagttgacgggtgccgggggggtggggtgggaggcacaggctttgctctgttggagcctcaaggagggcaccatgttaaggctggaggctgtgcaggagaggatggtctgtgcacagagcaggaagacaaccctggggggagaggcatgctagtgggggatgacatcattgcagagatggaggtggtggccaaggaggaaggccaatgtggagccacagcaggaggacctgcaggcacagcctggccctggccccagtacgccccggccagcaacagactcgctggacgtccttcacttggagctcggctacgtgaatgtcccaggccacagggcatccccggcttctgggccagagccatatccttgcagctgccaattcgggatggttggcagcaggggatgggcgcggagctcccgggagcggaggtggggggaaacaaggtggtaggcactggcggtcagccaggattcagggcatgggggacaacaaggggaactgagaacaggctcatgcggataggagggcagcttaattgcatgtgccctgagggcatgtggtagggacaggaagccaagcacagcactcaccagggagaatagcagcgccaaggacccatcataacagcagaaagttgaaggatacgattcaccgggaaagtccctggaggaaggggagtctgcatgcccatgccagccacggaacttccctgctccccttgcctgtgtccagcaagcttaccccagaaacacaaggtgctcaagactcggtgtcactgtgcacggggctgctgtcctatgcaaggcaggcactatctccccagacacaatttcttccctctgccagcgctgcacccaaagatgtttaggccctgagtatatataagctcccttgaaaccactcgagctccacggggagagccaggcacagccccgtagctacttctacccacagcggttgcctggggtggacacgtgcacccctcagggagaccaggagaaggagagacggcacacccagacagcagcagagcctgtccagcacccagcacaggagggcctcctgca

SEQ ID NO: 1564442 - DNA, 4001 bp, Homo sapiens
caggatgatctgcttctaccattgtgctgtaaatggtaaaaaattatctatatttagatataaataagctaaaaagataaaattttattacatactgtgctgaaaacccaagtaaaattcccttcctgaggctgacatctttttagtatttcttactttatatatgtaaaatttgtaacactcagagcaaaggggcactaacttcatggacaaatgctgcattttagtatgtacctgacaaaaatctcatttctaaaaattagataagaaaagctattgtaattttcctcagttgcaatatgaagaatgtccccatttaaataattttatttgaaaagaatctatttatgaggtacagtgtgatgttttgcatattttctttcttgagatgtctgtctcctgtcgccaaagtgaactgctcactgcaggctcttccacccagcctcaactgatcttcctacatctcagcttcccaagtagctagtactacaggcgctttctaccacagctgggcaattttttgtatttttaaaaatagacaagggtttccccatagtgcccaagctagtctccaaatcttcggctcaagtgttctgccggcttgggactaccaaagtgatgggatttcaagggtgactcaccacactcagcatgatatttggataagagattaaatcaagctacttaaaatgttctaggaggagaatattttaaatattttaccatcttttagtgatttgaaatatacaataggtcaaagatccccaaaccctagccttcaacccgtacctatctgtggcctgaatgtgatgccggaggatgacctgcaatacctgtctgtggagaatgtaacgcctgaggatgacctgaggtggtacagttttatccggaaaccatcctccctactccctcgctggccctccctgtccccgtgacagcctcactgccccacctggcctctgtcacattgctcctaccggaagacccggcccaccacgtgcccctcggagacctgccgccagcccccactcccaaacctgtccacctcgccgccttcttcccctgcgcaacctttctctgaggaaaaactgacttccactaaaccagtccctgatgcgaaaatagcaatgaaagagtccagtacgttacccaggctggtctcaaactcctgacttcaagccatcctccgacctccacttcccaaaatgctaggactacaggagtaaggcagtgtgccaggttaacagaataacttaagcgcatctattttgttccagttttcggctatctaactccatttgtctcgattacacccacttattcggtttaaattatttacggtgccaaagacacatgaaacgtttcaaatactgccatacaacgaaggagacgatcacaggctttacagaggcaaactgaaactcagattatttgtggccccatatttctacatacactaaagtaacacaatttatgtcaaaatttgataattcttccaagcaaatcagacacgcgacatgtgctaaccaaaagtgtgactttttaatcgcagtggttaagtgtattgcctgtattctgaattatcaccacattcacagagaaaacccgctttaataaaaagtgcacatgaaaaccaatggcggcttagcaccatctcccacaactagtcggacacattaggcagttaaaggtagaatcctcaggaaaaatcaatgagtttaacgaaagtgagtctcttaatagcactgaggagttctttccccactgactcctcccgtaattcaacacccacacatagaaaacccatccccttttatagacaaaatcccaaaccttcgctttctattcttgccgagagacccagctgtccagagaaacagaaaatacctgcgctttttagtaggacaaagagcctgaggttcgcctggccctcaggccgtacgtaaccggcttcggaacaccacagggccaactgcgggagggacagctggagcttccctgagagggaaggacgccggaagccgtgcccggaaatcccgcctacctccagcggccaatcattgcgaaggcggtgggcgtcagccagttactgcaaaggctgtgggcgtgtcctgaggccgctccgccccagcaggcctgcggctccatcatctcgcggtaactcttccgagaccacgcttgtgccacgtggcgggccgcggtggattaaggcacacgcgaactgtgagccctttgcaattgtgggcatggaagacctacaccctaactggcatcctgagtgtggcaagacattaactaacccacagggaacacatgaaacatctcacttcattaggcaggctaggctgatggtactgaatattgcggatccagaggggagagagagggaccagcgctgctgctggggcgagggcagcagcggtggcttggggggattggggcagggcgggtgcgtgggactaaagtcgactggtacgttgctgaggtggaattcatctgcaccagaagctgaaaccctgcaaggattctgtcaggtctaggcaaatacatactccgagttccatggttcctccctgaggatgctgtactcacaggggcattccaaaggacttctcatcctgtgccctgggcacacgggaggcctaccgccatggtcgccaatgcagtgatccgtgtgcactgctttgctggtgcagaggctctcacaagtgcagtggtggccgtgtgcctgctagcggggctctggaagccagggccttggcatccgactccagggctgccgtgcgcagctaaccctgctgggtatctgagccccagtgtgagtgtgacaggctaagggccctgtggggccccccaggaaccctgttccacataggtgtaggatgtggttctcagcagggcaaggcccgcaggcctctcctggagttgcccccagagttgacgggtgccgggggggtggggtgggaggcacaggctttgctctgttggagcctcaaggagggcaccatgttaaggctggaggctgtgcaggagaggatggtctgtgcacagagcaggaagacaaccctgcggggagaggcatgctagtgggggatgacatcattgcagagatggaggtggtggccaaggaggaaggccaatgtggagccacagcaggaggacctgcaggcacagcctggccctggccccagtacgccccggccagcaacagactcgctggacgtccttcacttggagctcggctacgtgaatgtcccaggccacagggcatccccggcttctgggccagagccatatccttgcagctgccaattcgggatggttggcagcaggggatgggcgcggagctcccgggagcggaggtggggggaaacaaggtggtaggcactggcggtcagccaggattcagggcatgggggacaacaaggggaactgagaacaggctcatgcggataggagggcagcttaattgcatgtgccctgagggcatgtggtagggacaggaagccaagcacagcactcaccagggagaatagcagcgccaaggacccatcataacagcagaaagttgaaggatacgattcaccgggaaagtccctggaggaaggggagtctgcatgcccatgccagccacggaacttccctgctccccttgcctgtgtccagcaagcttaccccagaaacacaaggtgctcaagactcggtgtcactgtgcacggggctgctgtcctatgcaaggcaggcactatctccccagacacaatttcttccctctgccagcgctgcacccaaagatgtttaggccctgagtatatataagctcccttgaaaccactcgagctccacggggagagccaggcacagccccgtagctacttctacccacagcggttgcctggggtggacacgtgcacccctcaggggagaccaggagaaggagagacggcacacccagacagcagcagagcctgtccagcacccagcacaggagggcctcctgc

SEQ ID NO: 1564443 - DNA, 4001 bp, Homo sapiens
aggatgatctgcttctaccattgtgctgtaaatggtaaaaaattatctatatttagatataaataagctaaaaagataaaattttattacatactgtgctgaaaacccaagtaaaattcccttcctgaggctgacatctttttagtatttcttactttatatatgtaaaatttgtaacactcagagcaaaggggcactaacttcatggacaaatgctgcattttagtatgtacctgacaaaaatctcatttctaaaaattagataagaaaagctattgtaattttcctcagttgcaatatgaagaatgtccccatttaaataattttatttgaaaagaatctatttatgaggtacagtgtgatgttttgcatattttctttcttgagatgtctgtctcctgtcgccaaagtgaactgctcactgcaggctcttccacccagcctcaactgatcttcctacatctcagcttcccaagtagctagtactacaggcgctttctaccacagctgggcaattttttgtatttttaaaaatagacaagggtttccccatagtgcccaagctagtctccaaatcttcggctcaagtgttctgccggcttgggactaccaaagtgatgggatttcaagggtgactcaccacactcagcatgatatttggataagagattaaatcaagctacttaaaatgttctaggaggagaatattttaaatattttaccatcttttagtgatttgaaatatacaataggtcaaagatccccaaaccctagccttcaacccgtacctatctgtggcctgaatgtgatgccggaggatgacctgcaatacctgtctgtggagaatgtaacgcctgaggatgacctgaggtggtacagttttatccggaaaccatcctccctactccctcgctggccctccctgtccccgtgacagcctcactgccccacctggcctctgtcacattgctcctaccggaagacccgccccaccacgtgcccctcggagacctgccgccagcccccactcccaaacctgtccacctcgccgccttcttcccctgcgcaacctttctctgaggaaaaactgacttccactaaaccagtccctgatgcgaaaatagcaatgaaagagtccagtacgttacccaggctggtctcaaactcctgacttcaagccatcctccgacctccacttcccaaaatgctaggactacaggagtaaggcagtgtgccaggttaacagaataacttaagcgcatctattttgttccagttttcggctatctaactccatttgtctcgattacacccacttattcggtttaaattatttacggtgccaaagacacatgaaacgtttcaaatactgccatacaacgaaggagacaatcacaggctttacagaggcaaactgaaactcagattatttgtggccccatatttctacatacactaaagtaacacaatttatgtcaaaatttgataattcttccaagcaaatcagacacgcgacatgtgctaaccaaaagtgtgactttttaatcgcagtggttaagtgtattgcctgtattctgaattatcaccacattcacagagaaaacccgctttaataaaaagtgcacatgaaaaccaatggcggcttagcaccatctcccacaactagtcggacacattaggcagttaaaggtagaatcctcaggaaaaatcaatgagtttaacgaaagtgagtctcttaatagcactgaggagttctttccccactgactcctcccgtaattcaacacccacacatagaaaacccatccccttttatagacaaaatcccaaaccttcgctttctattcttgccgagagacccagctgtccagagaaacagaaaatacctgcgctttttagtaggacaaagagcctgaggttcgcctggccctcaggccgtacgtaaccggcttcggaacaccacagggccaactgcgggagggacagctggagcttccctgagagggaaggacgccggaagccgtgcccggaaatcccgcctacctccagcggccaatcattgcgaaggcggtgggcgtcagccagttactgcaaaggctgtgggcgtgtcctgaggccgctccgccccagcaggcctgcggctccatcatctcgcggtaactcttccgagaccacgcttgtgccacgtggcgggccgcggtggattaaggcacacgcgaactgtgagccctttgcaattgtgggcatggaagacctacaccctaactggcatcctgagtgtggcaagacattaactaacccacagggaacacatgaaacatctcacttcattaggcaggctaggctgatggtactgaatattgcggatccagaggggagagagagggaccagcgctgctgctggggcgagggcagcagcggtggcttggggggattggggcagggcgggtgcgtgggactaaagtcgactggtacgttgctgaggtggaattcatctgcaccagaagctgaaaccctgcaaggattctgtcaggtctaggcaaatacatactccgagttccatggttcctccctgaggatgctgtactcacaggggcattccaaaggacttctcatcctgtgccctgggcacacgggaggcctaccgccatggtcgccaatgcagtgatccgtgtgcactgctttgctggtgcagaggctctcacaagtgcagtggtggccgtgtgcctgctagcggggctctggaagccagggccttggcatccgactccagggctgccgtgcgcagctaaccctgctgggtagctgagccccagtgtgagtgtgacaggctaagggccctgtggggccccccaggaaccctgttccacataggtgtaggatgtggttctcagcagggcaaggcccgcaggcctctcctggagttgcccccagagttgacgggtgccgggggggtggggtgggaggcacaggctttgctctgttggagcctcaaggagggcaccatgttaaggctggaggctgtgcaggagaggatggtctgtgcacagagcaggaagacaaccctggggggagaggcatgctagtgggggatgacatcattgcagagatggaggtggtggccaaggaggaaggccaatgtggagccacagcaggaggacctgcaggcacagcctggccctggccccagtacgccccggccagcaacagactcgctggacgtccttcacttggagctcggctacgtgaatgtcccaggccacagggcatccccggcttctgggccagagccatatccttgcagctgccaattcgggatggttggcagcaggggatgggcgcggagctcccgggagcggaggtggggggaaacaaggtggtaggcactggcggtcagccaggattcagggcatgggggacaacaaggggaactgagaacaggctcatgcggataggagggcagcttaattgcatgtgccctgagggcatgtggtagggacaggaagccaagcacagcactcaccagggagaatagcagcgccaaggacccatcataacagcagaaagttgaaggatacgattcaccgggaaagtccctggaggaaggggagtctgcatgcccatgccagccacggaacttccctgctccccttgcctgtgtccagcaagcttaccccagaaacacaaggtgctcaagactcggtgtcactgtgcacggggctgctgtcctatgcaaggcaggcactatctccccagacacaatttcttccctctgccagcgctgcacccaaagatgtttaggccctgagtatatataagctcccttgaaaccactcgagctccacggggagagccaggcacagccccgtagctacttctacccacagcggttgcctggggtggacacgtgcacccctcagggagaccaggagaaggagagacggcacacccagacagcagcagagcctgtccagcacccagcacaggagggcctcctgcag

SEQ ID NO: 1564444 - DNA, 4001 bp, Homo sapiens
ggtaaaaaattatctatatttagatataaataagctaaaaagataaaattttattacatactgtgctgaaaacccaagtaaaattcccttcctgaggctgacatctttttagtatttcttactttatatatgtaaaatttgtaacactcagagcaaaggggcactaacttcatggacaaatgctgcattttagtatgtacctgacaaaaatctcatttctaaaaattagataagaaaagctattgtaattttcctcagttgcaatatgaagaatgtccccatttaaataattttatttgaaaagaatctatttatgaggtacagtgtgatgttttgcatattttctttcttgagatgtctgtctcctgtcgccaaagtgaactgctcactgcaggctcttccacccagcctcaactgatcttcctacatctcagcttcccaagtagctagtactacaggcgctttctaccacagctgggcaattttttgtatttttaaaaatagacaagggtttccccatagtgcccaagctagtctccaaatcttcggctcaagtgttctgccggcttgggactaccaaagtgatgggatttcaagggtgactcaccacactcagcatgatatttggataagagattaaatcaagctacttaaaatgttctaggaggagaatattttaaatattttaccatcttttagtgatttgaaatatacaataggtcaaagatccccaaaccctagccttcaacccgtacctatctgtggcctgaatgtgatgccggaggatgacctgcaatacctgtctgtggagaatgtaacgcctgaggatgacctgaggtggtacagttttatccggaaaccatcctccctactccctcgctggccctccctgtccccgtgacagcctcactgccccacctggcctctgtcacattgctcctaccggaagacccgccccaccacgtgcccctcggagacctgccgccagcccccactcccaaacctgtccacctcgccgccttcttcccctgcgcaacctttctctgaggaaaaactgacttccactaaaccagtccctgatgcgaaaatagcaatgaaagagtccagtacgttacccaggctggtctcaaactcctgacttcaagccatcctccgacctccacttcccaaaatgctaggactacaggagtaaggcagtgtgccaggttaacagaataacttaagcgcatctattttgttccagttttcggctatctaactccatttgtctcgattacacccacttattcggtttaaattatttacggtgccaaagacacatgaaacgtttcaaatactgccatacaacgaaggagacgatcacaggctttacagaggcaaactgaaactcacattatttgtggccccatatttctacatacactaaagtaacacaatttatgtcaaaatttgataattcttccaagcaaatcagacacgcgacatgtgctaaccaaaagtgtgactttttaatcgcagtggttaagtgtattgcctgtattctgaattatcaccacattcacagagaaaacccgctttaataaaaagtgcacatgaaaaccaatggcggcttagcaccatctcccacaactagtcggacacattaggcagttaaaggtagaatcctcaggaaaaatcaatgagtttaacgaaagtgagtctcttaatagcactgaggagttctttccccactgactcctcccgtaattcaacacccacacatagaaaacccatccccttttatagacaaaatcccaaaccttcgctttctattcttgccgagagacccagctgtccagagaaacagaaaatacctgcgctttttagtaggacaaagagcctgaggttcgcctggccctcaggccgtacgtaaccggcttcggaacaccacagggccaactgcgggagggacagctggagcttccctgagagggaaggacgccggaagccgtgcccggaaatcccgcctacctccagcggccaatcattgcgaaggcggtgggcgtcagccagttactgcaaaggctgtgggcgtgtcctgaggccgctccgccccagcaggcctgcggctccatcatctcgcggtaactcttccgagaccacgcttgtgccacgtggcgggccgcggtggattaaggcacacgcgaactgtgagccctttgcaattgtgggcatggaagacctacaccctaactggcatcctgagtgtggcaagacattaactaacccacagggaacacatgaaacatctcacttcattaggcaggctaggctgatggtactgaatattgcggatccagaggggagagagagggaccagcgctgctgctggggcgagggcagcagcggtggcttggggggattggggcagggcgggtgcgtgggactaaagtcgactggtacgttgctgaggtggaattcatctgcaccagaagctgaaaccctgcaaggattctgtcaggtctaggcaaatacatactccgagttccatggttcctccctgaggatgctgtactcacaggggcattccaaaggacttctcatcctgtgccctgggcacacgggaggcctaccgccatggtcgccaatgcagtgatccgtgtgcactgctttgctggtgcagaggctctcacaagtgcagtggtggccgtgtgcctgctagcggggctctggaagccagggccttggcatccgactccagggctgccgtgcgcagctaaccctgctgggtatctgagccccagtgtgagtgtgacaggctaagggccctgtggggccccccaggaaccctgttccacataggtgtaggatgtggttctcagcagggcaaggcccgcaggcctctcctggagttgcccccagagttgacgggtgccgggggggtggggtgggaggcacaggctttgctctgttggagcctcaaggagggcaccatgttaaggctggaggctgtgcaggagaggatggtctgtgcacagagcaggaagacaaccctggggggagaggcatgctagtgggggatgacatcattgcagagatggaggtggtggccaaggaggaaggccaatgtggagccacagcaggaggacctgcaggcacagcctggccctggccccagtacgccccggccagcaacagactcgctggacgtccttcacttggagctcggctacgtgaatgtcccaggccacagggcatccccggcttctgggccagagccatatccttgcagctgccaattcgggatggttggcagcaggggatgggcgcggagctcccgggagcggaggtggggggaaacaaggtggtaggcactggcggtcagccaggattcagggcatgggggacaacaaggggaactgagaacaggctcatgcggataggagggcagcttaattgcatgtgccctgagggcatgtggtagggacaggaagccaagcacagcactcaccagggagaatagcagcgccaaggacccatcataacagcagaaagttgaaggatacgattcaccgggaaagtccctggaggaaggggagtctgcatgcccatgccagccacggaacttccctgctccccttgcctgtgtccagcaagcttaccccagaaacacaaggtgctcaagactcggtgtcactgtgcacggggctgctgtcctatgcaaggcaggcactatctccccagacacaatttcttccctctgccagcgctgcacccaaagatgtttaggccctgagtatatataagctcccttgaaaccactcgagctccacggggagagccaggcacagccccgtagctacttctacccacagcggttgcctggggtggacacgtgcacccctcagggagaccaggagaaggagagacggcacacccagacagcagcagagcctgtccagcacccagcacaggagggcctcctgcagctcagaaacgccgagcaagtagtcgcctcacac

SEQ ID NO: 1564445 - DNA, 4001 bp, Homo sapiens
ggtaaaaaattatctatatttagatataaataagctaaaaagataaaattttattacatactgtgctgaaaacccaagtaaaattcccttcctgaggctgacatctttttagtatttcttactttatatatgtaaaatttgtaacactcagagcaaaggggcactaacttcatggacaaatgctgcattttagtatgtacctgacaaaaatctcatttctaaaaattagataagaaaagctattgtaattttcctcagttgcaatatgaagaatgtccccatttaaataattttatttgaaaagaatctatttatgaggtacagtgtgatgttttgcatattttctttcttgagatgtctgtctcctgtcgccaaagtgaactgctcactgcaggctcttccacccagcctcaactgatcttcctacatctcagcttcccaagtagctagtactacaggcgctttctaccacagctgggcaattttttgtatttttaaaaatagacaagggtttccccatagtgcccaagctagtctccaaatcttcggctcaagtgttctgccggcttgggactaccaaagtgatgggatttcaagggtgactcaccacactcagcatgatatttggataagagattaaatcaagctacttaaaatgttctaggaggagaatattttaaatattttaccatcttttagtgatttgaaatatacaataggtcaaagatccccaaaccctagccttcaacccgtacctatctgtggcctgaatgtgatgccggaggatgacctgcaatacctgtctgtggagaatgtaacgcctgaggatgacctgaggtggtacagttttatccggaaaccatcctccctactccctcgctggccctccctgtccccgtgacagcctcactgccccacctggcctctgtcacattgctcctaccggaagacccggcccaccacgtgcccctcggagacctgccgccagcccccactcccaaacctgtccacctcgccgccttcttcccctgcgcaacctttctctgaggaaaaactgacttccactaaaccagtccctgatgcgaaaatagcaatgaaagagtccagtacgttacccaggctggtctcaaactcctgacttcaagccatcctccgacctccacttcccaaaatgctaggactacaggagtaaggcagtgtgccaggttaacagaataacttaagcgcatctattttgttccagttttcggctatctaactccatttgtctcgattacacccacttattcggtttaaattatttacggtgccaaagacacatgaaacgtttcaaatactgccatacaacgaaggagacgatcacaggctttacagaggcaaactgaaactcagattatttgtggccccatatttctacatacactaaagtaacacaatttatgtcaaaatttgataattcttccaagcaaatcagacacgcgacatgtgctaaccaaaagtgtgactttttaatcgcagtggttaagtgtattgcctgtattctgaattatcaccacattcacagagaaaacccgctttaataaaaagtgcacatgaaaaccaatggcggcttagcaccatctcccacaactagtcggacacattaggcagttaaaggtagaatcctcaggaaaaatcaatgagtttaacgaaagtgagtctcttaatagcactgaggagttctttccccactgactcctcccgtaattcaacacccacacatagaaaacccatccccttttatagacaaaatcccaaaccttcgctttctattcttgccgagagacccagctgtccagagaaacagaaaatacctgcgctttttagtaggacaaagagcctgaggttcgcctggccctcaggccgtacgtaaccggcttcggaacaccacagggccaactgcgggagggacagctggagcttccctgagagggaaggacgccggaagccgtgcccggaaatcccgcctacctccagcggccaatcattgcgaaggcggtgggcgtcagccagttactgcaaaggctgtgggcgtgtcctgaggccgctccgccccagcaggcctgcggctccatcatctcgcggtaactcttccgagaccacgcttgtgccacgtggcgggccgcggtggattaaggcacacgcgaactgtgagccctttgcaattgtgggcatggaagacctacaccctaactggcatcctgagtgtggcaagacattaactaacccacagggaacacatgaaacatctcacttcattaggcaggctaggctgatggtactgaatattgcggatccagaggggagagagagggaccagcgctgctgctggggcgagggcagcagcggtggcttggggggattggggcagggcgggtgcgtgggactaaagtcgactggtacgttgctgaggtggaattcatctgcaccagaagctgaaaccctgcaaggattctgtcaggtctaggcaaatacatactccgagttccatggttcctccctgaggatgctgtactcacaggggcattccaaaggacttctcatcctgtgccctgggcacacgggaggcctaccgccatggtcgccaatgcagtgatccgtgtgcactgctttgctggtgcagaggctctcacaagtgcagtggtggccgtgtgcctgctagcggggctctggaagccagggccttggcatccgactccagggctgccgtgcgcagctaaccctgctgggtatctgagccccagtgtgagtgtgacaggctaagggccctgtggggccccccaggaaccctgttccacataggtgtaggatgtggttctcagcagggcaaggcccgcaggcctctcctggagttgcccccagagttgacgggtgccgggggggtggggtgggaggcacaggctttgctctgttggagcctcaaggagggcaccatgttaaggctggaggctgtgcaggagaggatggtctgtgcacagagcaggaagacaaccctgcggggagaggcatgctagtgggggatgacatcattgcagagatggaggtggtggccaaggaggaaggccaatgtggagccacagcaggaggacctgcaggcacagcctggccctggccccagtacgccccggccagcaacagactcgctggacgtccttcacttggagctcggctacgtgaatgtcccaggccacagggcatccccggcttctgggccagagccatatccttgcagctgccaattcgggatggttggcagcaggggatgggcgcggagctcccgggagcggaggtggggggaaacaaggtggtaggcactggcggtcagccaggattcagggcatgggggacaacaaggggaactgagaacaggctcatgcggataggagggcagcttaattgcatgtgccctgagggcatgtggtagggacaggaagccaagcacagcactcaccagggagaatagcagcgccaaggacccatcataacagcagaaagttgaaggatacgattcaccgggaaagtccctggaggaaggggagtctgcatgcccatgccagccacggaacttccctgctccccttgcctgtgtccagcaagcttaccccagaaacacaaggtgctcaagactcggtgtcactgtgcacggggctgctgtcctatgcaaggcaggcactatctccccagacacaatttcttccctctgccagcgctgcacccaaagatgtttaggccctgagtatatataagctcccttgaaaccactcgagctccacggggagagccaggcacagccccgtagctacttctacccacagcggttgcctggggtggacacgtgcacccctcaggggagaccaggagaaggagagacggcacacccagacagcagcagagcctgtccagcacccagcacaggagggcctcctgcagctcagaaacgccgagcaagtagtcgcctcaca

SEQ ID NO: 1564446 - DNA, 4001 bp, Homo sapiens
gtaaaaaattatctatatttagatataaataagctaaaaagataaaattttattacatactgtgctgaaaacccaagtaaaattcccttcctgaggctgacatctttttagtatttcttactttatatatgtaaaatttgtaacactcagagcaaaggggcactaacttcatggacaaatgctgcattttagtatgtacctgacaaaaatctcatttctaaaaattagataagaaaagctattgtaattttcctcagttgcaatatgaagaatgtccccatttaaataattttatttgaaaagaatctatttatgaggtacagtgtgatgttttgcatattttctttcttgagatgtctgtctcctgtcgccaaagtgaactgctcactgcaggctcttccacccagcctcaactgatcttcctacatctcagcttcccaagtagctagtactacaggcgctttctaccacagctgggcaattttttgtatttttaaaaatagacaagggtttccccatagtgcccaagctagtctccaaatcttcggctcaagtgttctgccggcttgggactaccaaagtgatgggatttcaagggtgactcaccacactcagcatgatatttggataagagattaaatcaagctacttaaaatgttctaggaggagaatattttaaatattttaccatcttttagtgatttgaaatatacaataggtcaaagatccccaaaccctagccttcaacccgtacctatctgtggcctgaatgtgatgccggaggatgacctgcaatacctgtctgtggagaatgtaacgcctgaggatgacctgaggtggtacagttttatccggaaaccatcctccctactccctcgctggccctccctgtccccgtgacagcctcactgccccacctggcctctgtcacattgctcctaccggaagacccgccccaccacgtgcccctcggagacctgccgccagcccccactcccaaacctgtccacctcgccgccttcttcccctgcgcaacctttctctgaggaaaaactgacttccactaaaccagtccctgatgcgaaaatagcaatgaaagagtccagtacgttacccaggctggtctcaaactcctgacttcaagccatcctccgacctccacttcccaaaatgctaggactacaggagtaaggcagtgtgccaggttaacagaataacttaagcgcatctattttgttccagttttcggctatctaactccatttgtctcgattacacccacttattcggtttaaattatttacggtgccaaagacacatgaaacgtttcaaatactgccatacaacgaaggagacaatcacaggctttacagaggcaaactgaaactcagattatttgtggccccatatttctacatacactaaagtaacacaatttatgtcaaaatttgataattcttccaagcaaatcagacacgcgacatgtgctaaccaaaagtgtgactttttaatcgcagtggttaagtgtattgcctgtattctgaattatcaccacattcacagagaaaacccgctttaataaaaagtgcacatgaaaaccaatggcggcttagcaccatctcccacaactagtcggacacattaggcagttaaaggtagaatcctcaggaaaaatcaatgagtttaacgaaagtgagtctcttaatagcactgaggagttctttccccactgactcctcccgtaattcaacacccacacatagaaaacccatccccttttatagacaaaatcccaaaccttcgctttctattcttgccgagagacccagctgtccagagaaacagaaaatacctgcgctttttagtaggacaaagagcctgaggttcgcctggccctcaggccgtacgtaaccggcttcggaacaccacagggccaactgcgggagggacagctggagcttccctgagagggaaggacgccggaagccgtgcccggaaatcccgcctacctccagcggccaatcattgcgaaggcggtgggcgtcagccagttactgcaaaggctgtgggcgtgtcctgaggccgctccgccccagcaggcctgcggctccatcatctcgcggtaactcttccgagaccacgcttgtgccacgtggcgggccgcggtggattaaggcacacgcgaactgtgagccctttgcaattgtgggcatggaagacctacaccctaactggcatcctgagtgtggcaagacattaactaacccacagggaacacatgaaacatctcacttcattaggcaggctaggctgatggtactgaatattgcggatccagaggggagagagagggaccagcgctgctgctggggcgagggcagcagcggtggcttggggggattggggcagggcgggtgcgtgggactaaagtcgactggtacgttgctgaggtggaattcatctgcaccagaagctgaaaccctgcaaggattctgtcaggtctaggcaaatacatactccgagttccatggttcctccctgaggatgctgtactcacaggggcattccaaaggacttctcatcctgtgccctgggcacacgggaggcctaccgccatggtcgccaatgcagtgatccgtgtgcactgctttgctggtgcagaggctctcacaagtgcagtggtggccgtgtgcctgctagcggggctctggaagccagggccttggcatccgactccagggctgccgtgcgcagctaaccctgctgggtagctgagccccagtgtgagtgtgacaggctaagggccctgtggggccccccaggaaccctgttccacataggtgtaggatgtggttctcagcagggcaaggcccgcaggcctctcctggagttgcccccagagttgacgggtgccgggggggtggggtgggaggcacaggctttgctctgttggagcctcaaggagggcaccatgttaaggctggaggctgtgcaggagaggatggtctgtgcacagagcaggaagacaaccctggggggagaggcatgctagtgggggatgacatcattgcagagatggaggtggtggccaaggaggaaggccaatgtggagccacagcaggaggacctgcaggcacagcctggccctggccccagtacgccccggccagcaacagactcgctggacgtccttcacttggagctcggctacgtgaatgtcccaggccacagggcatccccggcttctgggccagagccatatccttgcagctgccaattcgggatggttggcagcaggggatgggcgcggagctcccgggagcggaggtggggggaaacaaggtggtaggcactggcggtcagccaggattcagggcatgggggacaacaaggggaactgagaacaggctcatgcggataggagggcagcttaattgcatgtgccctgagggcatgtggtagggacaggaagccaagcacagcactcaccagggagaatagcagcgccaaggacccatcataacagcagaaagttgaaggatacgattcaccgggaaagtccctggaggaaggggagtctgcatgcccatgccagccacggaacttccctgctccccttgcctgtgtccagcaagcttaccccagaaacacaaggtgctcaagactcggtgtcactgtgcacggggctgctgtcctatgcaaggcaggcactatctccccagacacaatttcttccctctgccagcgctgcacccaaagatgtttaggccctgagtatatataagctcccttgaaaccactcgagctccacggggagagccaggcacagccccgtagctacttctacccacagcggttgcctggggtggacacgtgcacccctcagggagaccaggagaaggagagacggcacacccagacagcagcagagcctgtccagcacccagcacaggagggcctcctgcagctcagaaacgccgagcaagtagtcgcctcacaca

SEQ ID NO: 1564447 - DNA, 4001 bp, Homo sapiens
gtaaaaaattatctatatttagatataaataagctaaaaagataaaattttattacatactgtgctgaaaacccaagtaaaattcccttcctgaggctgacatctttttagtatttcttactttatatatgtaaaatttgtaacactcagagcaaaggggcactaacttcatggacaaatgctgcattttagtatgtacctgacaaaaatctcatttctaaaaattagataagaaaagctattgtaattttcctcagttgcaatatgaagaatgtccccatttaaataattttatttgaaaagaatctatttatgaggtacagtgtgatgttttgcatattttctttcttgagatgtctgtctcctgtcgccaaagtgaactgctcactgcaggctcttccacccagcctcaactgatcttcctacatctcagcttcccaagtagctagtactacaggcgctttctaccacagctgggcaattttttgtatttttaaaaatagacaagggtttccccatagtgcccaagctagtctccaaatcttcggctcaagtgttctgccggcttgggactaccaaagtgatgggatttcaagggtgactcaccacactcagcatgatatttggataagagattaaatcaagctacttaaaatgttctaggaggagaatattttaaatattttaccatcttttagtgatttgaaatatacaataggtcaaagatccccaaaccctagccttcaacccgtacctatctgtggcctgaatgtgatgccggaggatgacctgcaatacctgtctgtggagaatgtaacgcctgaggatgacctgaggtggtacagttttatccggaaaccatcctccctactccctcgctggccctccctgtccccgtgacagcctcactgccccacctggcctctgtcacattgctcctaccggaagacccgccccaccacgtgcccctcggagacctgccgccagcccccactcccaaacctgtccacctcgccgccttcttcccctgcgcaacctttctctgaggaaaaactgacttccactaaaccagtccctgatgcgaaaatagcaatgaaagagtccagtacgttacccaggctggtctcaaactcctgacttcaagccatcctccgacctccacttcccaaaatgctaggactacaggagtaaggcagtgtgccaggttaacagaataacttaagcgcatctattttgttccagttttcggctatctaactccatttgtctcgattacacccacttattcggtttaaattatttacggtgccaaagacacatgaaacgtttcaaatactgccatacaacgaaggagacaatcacaggctttacagaggcaaactgaaactcagattatttgtggccccatatttctacatacactaaagtaacacaatttatgtcaaaatttgataattcttccaagcaaatcagacacgcgacatgtgctaaccaaaagtgtgactttttaatcgcagtggttaagtgtattgcctgtattctgaattatcaccacattcacagagaaaacccgctttaataaaaagtgcacatgaaaaccaatggcggcttagcaccatctcccacaactagtcggacacattaggcagttaaaggtagaatcctcaggaaaaatcaatgagtttaacgaaagtgagtctcttaatagcactgaggagttctttccccactgactcctcccgtaattcaacacccacacatagaaaacccatccccttttatagacaaaatcccaaaccttcgctttctattcttgccgagagacccagctgtccagagaaacagaaaatacctgcgctttttagtaggacaaagagcctgaggttcgcctggccctcaggccgtacgtaaccggcttcggaacaccacagggccaactgcgggagggacagctggagcttccctgagagggaaggacgccggaagccgtgcccggaaatcccgcctacctccagcggccaatcattgcgaaggcggtgggcgtcagccagttactgcaaaggctgtgggcgtgtcctgaggccgctccgccccagcaggcctgcggctccatcatctcgcggtaactcttccgagaccacgcttgtgccacgtggcgggccgcggtggattaaggcacacgcgaactgtgagccctttgcaattgtgggcatggaagacctacaccctaactggcatcctgagtgtggcaagacattaactaacccacagggaacacatgaaacatctcacttcattaggcaggctaggctgatggtactgaatattgcggatccagaggggagagagagggaccagcgctgctgctggggcgagggcagcagcggtggcttggggggattggggcagggcgggtgcgtgggactaaagtcgactggtacgttgctgaggtggaattcatctgcaccagaagctgaaaccctgcaaggattctgtcaggtctaggcaaatacatactccgagttccatggttcctccctgaggatgctgtactcacaggggcattccaaaggacttctcatcctgtgccctgggcacacgggaggcctaccgccatggtcgccaatgcagtgatccgtgtgcactgctttgctggtgcagaggctctcacaagtgcagtggtggccgtgtgcctgctagcggggctctggaagccagggccttggcatccgactccagggctgccgtgcgcagctaaccctgctgggtagctgagccccagtgtgagtgtgacaggctaagggccctgtggggccccccaggaaccctgttccacataggtgtaggatgtggttctcagcagggcaaggcccgcaggcctctcctggagttgcccccagagttgacgggtgccgggggggtggggtgggaggcacaggctttgctctgttggagcctcaaggagggcaccatgttaaggctggaggctgtgcaggagaggatggtctgtgcacagagcaggaagacaaccctgcggggagaggcatgctagtgggggatgacatcattgcagagatggaggtggtggccaaggaggaaggccaatgtggagccacagcaggaggacctgcaggcacagcctggccctggccccagtacgccccggccagcaacagactcgctggacgtccttcacttggagctcggctacgtgaatgtcccaggccacagggcatccccggcttctgggccagagccatatccttgcagctgccaattcgggatggttggcagcaggggatgggcgcggagctcccgggagcggaggtggggggaaacaaggtggtaggcactggcggtcagccaggattcagggcatgggggacaacaaggggaactgagaacaggctcatgcggataggagggcagcttaattgcatgtgccctgagggcatgtggtagggacaggaagccaagcacagcactcaccagggagaatagcagcgccaaggacccatcataacagcagaaagttgaaggatacgattcaccgggaaagtccctggaggaaggggagtctgcatgcccatgccagccacggaacttccctgctccccttgcctgtgtccagcaagcttaccccagaaacacaaggtgctcaagactcggtgtcactgtgcacggggctgctgtcctatgcaaggcaggcactatctccccagacacaatttcttccctctgccagcgctgcacccaaagatgtttaggccctgagtatatataagctcccttgaaaccactcgagctccacggggagagccaggcacagccccgtagctacttctacccacagcggttgcctggggtggacacgtgcacccctcagggagaccaggagaaggagagacggcacacccagacagcagcagagcctgtccagcacccagcacaggagggcctcctgcagctcagaaacgccgagcaagtagtcgcctcacaca

SEQ ID NO: 1564448 - DNA, 4001 bp, Homo sapiens
gcttgccaggatgatctgcttctaccattgtgctgtaaatggtaaaaaattatctatatttagatataaataagctaaaaagataaaattttattacatactgtgctgaaaacccaagtaaaattcccttcctgaggctgacatctttttagtatttcttactttatatatgtaaaatttgtaacactcagagcaaaggggcactaacttcatggacaaatgctgcattttagtatgtacctgacaaaaatctcatttctaaaaattagataagaaaagctattgtaattttcctcagttgcaatatgaagaatgtccccatttaaataattttatttgaaaagaatctatttatgaggtacagtgtgatgttttgcatattttctttcttgagatgtctgtctcctgtcgccaaagtgaactgctcactgcaggctcttccacccagcctcaactgatcttcctacatctcagcttcccaagtagctagtactacaggcgctttctaccacagctgggcaattttttgtatttttaaaaatagacaagggtttccccatagtgcccaagctagtctccaaatcttcggctcaagtgttctgccggcttgggactaccaaagtgatgggatttcaagggtgactcaccacactcagcatgatatttggataagagattaaatcaagctacttaaaatgttctaggaggagaatattttaaatattttaccatcttttagtgatttgaaatatacaataggtcaaagatccccaaaccctagccttcaacccgtacctatctgtggcctgaatgtgatgccggaggatgacctgcaatacctgtctgtggagaatgtaacgcctgaggatgacctgaggtggtacagttttatccggaaaccatcctccctactccctcgctggccctccctgtccccgtgacagcctcactgccccacctggcctctgtcacattgctcctaccggaagacccgccccaccacgtgcccctcggagacctgccgccagcccccactcccaaacctgtccacctcgccgccttcttcccctgcgcaacctttctctgaggaaaaactgacttccactaaaccagtccctgatgcgaaaatagcaatgaaagagtccagtacgttacccaggctggtctcaaactcctgacttcaagccatcctccgacctccacttcccaaaatgctaggactacaggagtaaggcagtgtgccaggttaacagaataacttaagcgcatctattttgttccagttttcggctatctaactccatttgtctcgattacacccacttattcggtttaaattatttacggtgccaaagacacatgaaacgtttcaaatactgccatacaacgaaggagacgatcacaggctttacagaggcaaactgaaactcacattatttgtggccccatatttctacatacactaaagtaacacaatttatgtcaaaatttgataattcttccaagcaaatcagacacgcgacatgtgctaaccaaaagtgtgactttttaatcgcagtggttaagtgtattgcctgtattctgaattatcaccacattcacagagaaaacccgctttaataaaaagtgcacatgaaaaccaatggcggcttagcaccatctcccacaactagtcggacacattaggcagttaaaggtagaatcctcaggaaaaatcaatgagtttaacgaaagtgagtctcttaatagcactgaggagttctttccccactgactcctcccgtaattcaacacccacacatagaaaacccatccccttttatagacaaaatcccaaaccttcgctttctattcttgccgagagacccagctgtccagagaaacagaaaatacctgcgctttttagtaggacaaagagcctgaggttcgcctggccctcaggccgtacgtaaccggcttcggaacaccacagggccaactgcgggagggacagctggagcttccctgagagggaaggacgccggaagccgtgcccggaaatcccgcctacctccagcggccaatcattgcgaaggcggtgggcgtcagccagttactgcaaaggctgtgggcgtgtcctgaggccgctccgccccagcaggcctgcggctccatcatctcgcggtaactcttccgagaccacgcttgtgccacgtggcgggccgcggtggattaaggcacacgcgaactgtgagccctttgcaattgtgggcatggaagacctacaccctaactggcatcctgagtgtggcaagacattaactaacccacagggaacacatgaaacatctcacttcattaggcaggctaggctgatggtactgaatattgcggatccagaggggagagagagggaccagcgctgctgctggggcgagggcagcagcggtggcttggggggattggggcagggcgggtgcgtgggactaaagtcgactggtacgttgctgaggtggaattcatctgcaccagaagctgaaaccctgcaaggattctgtcaggtctaggcaaatacatactccgagttccatggttcctccctgaggatgctgtactcacaggggcattccaaaggacttctcatcctgtgccctgggcacacgggaggcctaccgccatggtcgccaatgcagtgatccgtgtgcactgctttgctggtgcagaggctctcacaagtgcagtggtggccgtgtgcctgctagcggggctctggaagccagggccttggcatccgactccagggctgccgtgcgcagctaaccctgctgggtatctgagccccagtgtgagtgtgacaggctaagggccctgtggggccccccaggaaccctgttccacataggtgtaggatgtggttctcagcagggcaaggcccgcaggcctctcctggagttgcccccagagttgacgggtgccgggggggtggggtgggaggcacaggctttgctctgttggagcctcaaggagggcaccatgttaaggctggaggctgtgcaggagaggatggtctgtgcacagagcaggaagacaaccctggggggagaggcatgctagtgggggatgacatcattgcagagatggaggtggtggccaaggaggaaggccaatgtggagccacagcaggaggacctgcaggcacagcctggccctggccccagtacgccccggccagcaacagactcgctggacgtccttcacttggagctcggctacgtgaatgtcccaggccacagggcatccccggcttctgggccagagccatatccttgcagctgccaattcgggatggttggcagcaggggatgggcgcggagctcccgggagcggaggtggggggaaacaaggtggtaggcactggcggtcagccaggattcagggcatgggggacaacaaggggaactgagaacaggctcatgcggataggagggcagcttaattgcatgtgccctgagggcatgtggtagggacaggaagccaagcacagcactcaccagggagaatagcagcgccaaggacccatcataacagcagaaagttgaaggatacgattcaccgggaaagtccctggaggaaggggagtctgcatgcccatgccagccacggaacttccctgctccccttgcctgtgtccagcaagcttaccccagaaacacaaggtgctcaagactcggtgtcactgtgcacggggctgctgtcctatgcaaggcaggcactatctccccagacacaatttcttccctctgccagcgctgcacccaaagatgtttaggccctgagtatatataagctcccttgaaaccactcgagctccacggggagagccaggcacagccccgtagctacttctacccacagcggttgcctggggtggacacgtgcacccctcagggagaccaggagaaggagagacggcacacccagacagcagcagagcctgtccagcacccagcacaggagggcct

SEQ ID NO: 1564449 - DNA, 4001 bp, Homo sapiens
gcttgccaggatgatctgcttctaccattgtgctgtaaatggtaaaaaattatctatatttagatataaataagctaaaaagataaaattttattacatactgtgctgaaaacccaagtaaaattcccttcctgaggctgacatctttttagtatttcttactttatatatgtaaaatttgtaacactcagagcaaaggggcactaacttcatggacaaatgctgcattttagtatgtacctgacaaaaatctcatttctaaaaattagataagaaaagctattgtaattttcctcagttgcaatatgaagaatgtccccatttaaataattttatttgaaaagaatctatttatgaggtacagtgtgatgttttgcatattttctttcttgagatgtctgtctcctgtcgccaaagtgaactgctcactgcaggctcttccacccagcctcaactgatcttcctacatctcagcttcccaagtagctagtactacaggcgctttctaccacagctgggcaattttttgtatttttaaaaatagacaagggtttccccatagtgcccaagctagtctccaaatcttcggctcaagtgttctgccggcttgggactaccaaagtgatgggatttcaagggtgactcaccacactcagcatgatatttggataagagattaaatcaagctacttaaaatgttctaggaggagaatattttaaatattttaccatcttttagtgatttgaaatatacaataggtcaaagatccccaaaccctagccttcaacccgtacctatctgtggcctgaatgtgatgccggaggatgacctgcaatacctgtctgtggagaatgtaacgcctgaggatgacctgaggtggtacagttttatccggaaaccatcctccctactccctcgctggccctccctgtccccgtgacagcctcactgccccacctggcctctgtcacattgctcctaccggaagacccggcccaccacgtgcccctcggagacctgccgccagcccccactcccaaacctgtccacctcgccgccttcttcccctgcgcaacctttctctgaggaaaaactgacttccactaaaccagtccctgatgcgaaaatagcaatgaaagagtccagtacgttacccaggctggtctcaaactcctgacttcaagccatcctccgacctccacttcccaaaatgctaggactacaggagtaaggcagtgtgccaggttaacagaataacttaagcgcatctattttgttccagttttcggctatctaactccatttgtctcgattacacccacttattcggtttaaattatttacggtgccaaagacacatgaaacgtttcaaatactgccatacaacgaaggagacgatcacaggctttacagaggcaaactgaaactcagattatttgtggccccatatttctacatacactaaagtaacacaatttatgtcaaaatttgataattcttccaagcaaatcagacacgcgacatgtgctaaccaaaagtgtgactttttaatcgcagtggttaagtgtattgcctgtattctgaattatcaccacattcacagagaaaacccgctttaataaaaagtgcacatgaaaaccaatggcggcttagcaccatctcccacaactagtcggacacattaggcagttaaaggtagaatcctcaggaaaaatcaatgagtttaacgaaagtgagtctcttaatagcactgaggagttctttccccactgactcctcccgtaattcaacacccacacatagaaaacccatccccttttatagacaaaatcccaaaccttcgctttctattcttgccgagagacccagctgtccagagaaacagaaaatacctgcgctttttagtaggacaaagagcctgaggttcgcctggccctcaggccgtacgtaaccggcttcggaacaccacagggccaactgcgggagggacagctggagcttccctgagagggaaggacgccggaagccgtgcccggaaatcccgcctacctccagcggccaatcattgcgaaggcggtgggcgtcagccagttactgcaaaggctgtgggcgtgtcctgaggccgctccgccccagcaggcctgcggctccatcatctcgcggtaactcttccgagaccacgcttgtgccacgtggcgggccgcggtggattaaggcacacgcgaactgtgagccctttgcaattgtgggcatggaagacctacaccctaactggcatcctgagtgtggcaagacattaactaacccacagggaacacatgaaacatctcacttcattaggcaggctaggctgatggtactgaatattgcggatccagaggggagagagagggaccagcgctgctgctggggcgagggcagcagcggtggcttggggggattggggcagggcgggtgcgtgggactaaagtcgactggtacgttgctgaggtggaattcatctgcaccagaagctgaaaccctgcaaggattctgtcaggtctaggcaaatacatactccgagttccatggttcctccctgaggatgctgtactcacaggggcattccaaaggacttctcatcctgtgccctgggcacacgggaggcctaccgccatggtcgccaatgcagtgatccgtgtgcactgctttgctggtgcagaggctctcacaagtgcagtggtggccgtgtgcctgctagcggggctctggaagccagggccttggcatccgactccagggctgccgtgcgcagctaaccctgctgggtatctgagccccagtgtgagtgtgacaggctaagggccctgtggggccccccaggaaccctgttccacataggtgtaggatgtggttctcagcagggcaaggcccgcaggcctctcctggagttgcccccagagttgacgggtgccgggggggtggggtgggaggcacaggctttgctctgttggagcctcaaggagggcaccatgttaaggctggaggctgtgcaggagaggatggtctgtgcacagagcaggaagacaaccctgcggggagaggcatgctagtgggggatgacatcattgcagagatggaggtggtggccaaggaggaaggccaatgtggagccacagcaggaggacctgcaggcacagcctggccctggccccagtacgccccggccagcaacagactcgctggacgtccttcacttggagctcggctacgtgaatgtcccaggccacagggcatccccggcttctgggccagagccatatccttgcagctgccaattcgggatggttggcagcaggggatgggcgcggagctcccgggagcggaggtggggggaaacaaggtggtaggcactggcggtcagccaggattcagggcatgggggacaacaaggggaactgagaacaggctcatgcggataggagggcagcttaattgcatgtgccctgagggcatgtggtagggacaggaagccaagcacagcactcaccagggagaatagcagcgccaaggacccatcataacagcagaaagttgaaggatacgattcaccgggaaagtccctggaggaaggggagtctgcatgcccatgccagccacggaacttccctgctccccttgcctgtgtccagcaagcttaccccagaaacacaaggtgctcaagactcggtgtcactgtgcacggggctgctgtcctatgcaaggcaggcactatctccccagacacaatttcttccctctgccagcgctgcacccaaagatgtttaggccctgagtatatataagctcccttgaaaccactcgagctccacggggagagccaggcacagccccgtagctacttctacccacagcggttgcctggggtggacacgtgcacccctcaggggagaccaggagaaggagagacggcacacccagacagcagcagagcctgtccagcacccagcacaggagggcc

SEQ ID NO: 1564450 - DNA, 4001 bp, Homo sapiens
cttgccaggatgatctgcttctaccattgtgctgtaaatggtaaaaaattatctatatttagatataaataagctaaaaagataaaattttattacatactgtgctgaaaacccaagtaaaattcccttcctgaggctgacatctttttagtatttcttactttatatatgtaaaatttgtaacactcagagcaaaggggcactaacttcatggacaaatgctgcattttagtatgtacctgacaaaaatctcatttctaaaaattagataagaaaagctattgtaattttcctcagttgcaatatgaagaatgtccccatttaaataattttatttgaaaagaatctatttatgaggtacagtgtgatgttttgcatattttctttcttgagatgtctgtctcctgtcgccaaagtgaactgctcactgcaggctcttccacccagcctcaactgatcttcctacatctcagcttcccaagtagctagtactacaggcgctttctaccacagctgggcaattttttgtatttttaaaaatagacaagggtttccccatagtgcccaagctagtctccaaatcttcggctcaagtgttctgccggcttgggactaccaaagtgatgggatttcaagggtgactcaccacactcagcatgatatttggataagagattaaatcaagctacttaaaatgttctaggaggagaatattttaaatattttaccatcttttagtgatttgaaatatacaataggtcaaagatccccaaaccctagccttcaacccgtacctatctgtggcctgaatgtgatgccggaggatgacctgcaatacctgtctgtggagaatgtaacgcctgaggatgacctgaggtggtacagttttatccggaaaccatcctccctactccctcgctggccctccctgtccccgtgacagcctcactgccccacctggcctctgtcacattgctcctaccggaagacccgccccaccacgtgcccctcggagacctgccgccagcccccactcccaaacctgtccacctcgccgccttcttcccctgcgcaacctttctctgaggaaaaactgacttccactaaaccagtccctgatgcgaaaatagcaatgaaagagtccagtacgttacccaggctggtctcaaactcctgacttcaagccatcctccgacctccacttcccaaaatgctaggactacaggagtaaggcagtgtgccaggttaacagaataacttaagcgcatctattttgttccagttttcggctatctaactccatttgtctcgattacacccacttattcggtttaaattatttacggtgccaaagacacatgaaacgtttcaaatactgccatacaacgaaggagacaatcacaggctttacagaggcaaactgaaactcagattatttgtggccccatatttctacatacactaaagtaacacaatttatgtcaaaatttgataattcttccaagcaaatcagacacgcgacatgtgctaaccaaaagtgtgactttttaatcgcagtggttaagtgtattgcctgtattctgaattatcaccacattcacagagaaaacccgctttaataaaaagtgcacatgaaaaccaatggcggcttagcaccatctcccacaactagtcggacacattaggcagttaaaggtagaatcctcaggaaaaatcaatgagtttaacgaaagtgagtctcttaatagcactgaggagttctttccccactgactcctcccgtaattcaacacccacacatagaaaacccatccccttttatagacaaaatcccaaaccttcgctttctattcttgccgagagacccagctgtccagagaaacagaaaatacctgcgctttttagtaggacaaagagcctgaggttcgcctggccctcaggccgtacgtaaccggcttcggaacaccacagggccaactgcgggagggacagctggagcttccctgagagggaaggacgccggaagccgtgcccggaaatcccgcctacctccagcggccaatcattgcgaaggcggtgggcgtcagccagttactgcaaaggctgtgggcgtgtcctgaggccgctccgccccagcaggcctgcggctccatcatctcgcggtaactcttccgagaccacgcttgtgccacgtggcgggccgcggtggattaaggcacacgcgaactgtgagccctttgcaattgtgggcatggaagacctacaccctaactggcatcctgagtgtggcaagacattaactaacccacagggaacacatgaaacatctcacttcattaggcaggctaggctgatggtactgaatattgcggatccagaggggagagagagggaccagcgctgctgctggggcgagggcagcagcggtggcttggggggattggggcagggcgggtgcgtgggactaaagtcgactggtacgttgctgaggtggaattcatctgcaccagaagctgaaaccctgcaaggattctgtcaggtctaggcaaatacatactccgagttccatggttcctccctgaggatgctgtactcacaggggcattccaaaggacttctcatcctgtgccctgggcacacgggaggcctaccgccatggtcgccaatgcagtgatccgtgtgcactgctttgctggtgcagaggctctcacaagtgcagtggtggccgtgtgcctgctagcggggctctggaagccagggccttggcatccgactccagggctgccgtgcgcagctaaccctgctgggtagctgagccccagtgtgagtgtgacaggctaagggccctgtggggccccccaggaaccctgttccacataggtgtaggatgtggttctcagcagggcaaggcccgcaggcctctcctggagttgcccccagagttgacgggtgccgggggggtggggtgggaggcacaggctttgctctgttggagcctcaaggagggcaccatgttaaggctggaggctgtgcaggagaggatggtctgtgcacagagcaggaagacaaccctggggggagaggcatgctagtgggggatgacatcattgcagagatggaggtggtggccaaggaggaaggccaatgtggagccacagcaggaggacctgcaggcacagcctggccctggccccagtacgccccggccagcaacagactcgctggacgtccttcacttggagctcggctacgtgaatgtcccaggccacagggcatccccggcttctgggccagagccatatccttgcagctgccaattcgggatggttggcagcaggggatgggcgcggagctcccgggagcggaggtggggggaaacaaggtggtaggcactggcggtcagccaggattcagggcatgggggacaacaaggggaactgagaacaggctcatgcggataggagggcagcttaattgcatgtgccctgagggcatgtggtagggacaggaagccaagcacagcactcaccagggagaatagcagcgccaaggacccatcataacagcagaaagttgaaggatacgattcaccgggaaagtccctggaggaaggggagtctgcatgcccatgccagccacggaacttccctgctccccttgcctgtgtccagcaagcttaccccagaaacacaaggtgctcaagactcggtgtcactgtgcacggggctgctgtcctatgcaaggcaggcactatctccccagacacaatttcttccctctgccagcgctgcacccaaagatgtttaggccctgagtatatataagctcccttgaaaccactcgagctccacggggagagccaggcacagccccgtagctacttctacccacagcggttgcctggggtggacacgtgcacccctcagggagaccaggagaaggagagacggcacacccagacagcagcagagcctgtccagcacccagcacaggagggcctc

SEQ ID NO: 1564451 - DNA, 4001 bp, Homo sapiens
cttgccaggatgatctgcttctaccattgtgctgtaaatggtaaaaaattatctatatttagatataaataagctaaaaagataaaattttattacatactgtgctgaaaacccaagtaaaattcccttcctgaggctgacatctttttagtatttcttactttatatatgtaaaatttgtaacactcagagcaaaggggcactaacttcatggacaaatgctgcattttagtatgtacctgacaaaaatctcatttctaaaaattagataagaaaagctattgtaattttcctcagttgcaatatgaagaatgtccccatttaaataattttatttgaaaagaatctatttatgaggtacagtgtgatgttttgcatattttctttcttgagatgtctgtctcctgtcgccaaagtgaactgctcactgcaggctcttccacccagcctcaactgatcttcctacatctcagcttcccaagtagctagtactacaggcgctttctaccacagctgggcaattttttgtatttttaaaaatagacaagggtttccccatagtgcccaagctagtctccaaatcttcggctcaagtgttctgccggcttgggactaccaaagtgatgggatttcaagggtgactcaccacactcagcatgatatttggataagagattaaatcaagctacttaaaatgttctaggaggagaatattttaaatattttaccatcttttagtgatttgaaatatacaataggtcaaagatccccaaaccctagccttcaacccgtacctatctgtggcctgaatgtgatgccggaggatgacctgcaatacctgtctgtggagaatgtaacgcctgaggatgacctgaggtggtacagttttatccggaaaccatcctccctactccctcgctggccctccctgtccccgtgacagcctcactgccccacctggcctctgtcacattgctcctaccggaagacccgccccaccacgtgcccctcggagacctgccgccagcccccactcccaaacctgtccacctcgccgccttcttcccctgcgcaacctttctctgaggaaaaactgacttccactaaaccagtccctgatgcgaaaatagcaatgaaagagtccagtacgttacccaggctggtctcaaactcctgacttcaagccatcctccgacctccacttcccaaaatgctaggactacaggagtaaggcagtgtgccaggttaacagaataacttaagcgcatctattttgttccagttttcggctatctaactccatttgtctcgattacacccacttattcggtttaaattatttacggtgccaaagacacatgaaacgtttcaaatactgccatacaacgaaggagacaatcacaggctttacagaggcaaactgaaactcagattatttgtggccccatatttctacatacactaaagtaacacaatttatgtcaaaatttgataattcttccaagcaaatcagacacgcgacatgtgctaaccaaaagtgtgactttttaatcgcagtggttaagtgtattgcctgtattctgaattatcaccacattcacagagaaaacccgctttaataaaaagtgcacatgaaaaccaatggcggcttagcaccatctcccacaactagtcggacacattaggcagttaaaggtagaatcctcaggaaaaatcaatgagtttaacgaaagtgagtctcttaatagcactgaggagttctttccccactgactcctcccgtaattcaacacccacacatagaaaacccatccccttttatagacaaaatcccaaaccttcgctttctattcttgccgagagacccagctgtccagagaaacagaaaatacctgcgctttttagtaggacaaagagcctgaggttcgcctggccctcaggccgtacgtaaccggcttcggaacaccacagggccaactgcgggagggacagctggagcttccctgagagggaaggacgccggaagccgtgcccggaaatcccgcctacctccagcggccaatcattgcgaaggcggtgggcgtcagccagttactgcaaaggctgtgggcgtgtcctgaggccgctccgccccagcaggcctgcggctccatcatctcgcggtaactcttccgagaccacgcttgtgccacgtggcgggccgcggtggattaaggcacacgcgaactgtgagccctttgcaattgtgggcatggaagacctacaccctaactggcatcctgagtgtggcaagacattaactaacccacagggaacacatgaaacatctcacttcattaggcaggctaggctgatggtactgaatattgcggatccagaggggagagagagggaccagcgctgctgctggggcgagggcagcagcggtggcttggggggattggggcagggcgggtgcgtgggactaaagtcgactggtacgttgctgaggtggaattcatctgcaccagaagctgaaaccctgcaaggattctgtcaggtctaggcaaatacatactccgagttccatggttcctccctgaggatgctgtactcacaggggcattccaaaggacttctcatcctgtgccctgggcacacgggaggcctaccgccatggtcgccaatgcagtgatccgtgtgcactgctttgctggtgcagaggctctcacaagtgcagtggtggccgtgtgcctgctagcggggctctggaagccagggccttggcatccgactccagggctgccgtgcgcagctaaccctgctgggtagctgagccccagtgtgagtgtgacaggctaagggccctgtggggccccccaggaaccctgttccacataggtgtaggatgtggttctcagcagggcaaggcccgcaggcctctcctggagttgcccccagagttgacgggtgccgggggggtggggtgggaggcacaggctttgctctgttggagcctcaaggagggcaccatgttaaggctggaggctgtgcaggagaggatggtctgtgcacagagcaggaagacaaccctgcggggagaggcatgctagtgggggatgacatcattgcagagatggaggtggtggccaaggaggaaggccaatgtggagccacagcaggaggacctgcaggcacagcctggccctggccccagtacgccccggccagcaacagactcgctggacgtccttcacttggagctcggctacgtgaatgtcccaggccacagggcatccccggcttctgggccagagccatatccttgcagctgccaattcgggatggttggcagcaggggatgggcgcggagctcccgggagcggaggtggggggaaacaaggtggtaggcactggcggtcagccaggattcagggcatgggggacaacaaggggaactgagaacaggctcatgcggataggagggcagcttaattgcatgtgccctgagggcatgtggtagggacaggaagccaagcacagcactcaccagggagaatagcagcgccaaggacccatcataacagcagaaagttgaaggatacgattcaccgggaaagtccctggaggaaggggagtctgcatgcccatgccagccacggaacttccctgctccccttgcctgtgtccagcaagcttaccccagaaacacaaggtgctcaagactcggtgtcactgtgcacggggctgctgtcctatgcaaggcaggcactatctccccagacacaatttcttccctctgccagcgctgcacccaaagatgtttaggccctgagtatatataagctcccttgaaaccactcgagctccacggggagagccaggcacagccccgtagctacttctacccacagcggttgcctggggtggacacgtgcacccctcagggagaccaggagaaggagagacggcacacccagacagcagcagagcctgtccagcacccagcacaggagggcctc

SEQ ID NO: 1564452 - DNA, 4001 bp, Homo sapiens; identical to SEQ ID NO: 1564448

SEQ ID NO: 1564453 - DNA, 4001 bp, Homo sapiens; identical to SEQ ID NO: 1564450

SEQ ID NO: 1564454 - DNA, 4001 bp, Homo sapiens; identical to SEQ ID NO: 1564451

SEQ ID NO: 1564455 - DNA, 4001 bp, Homo sapiens
cttgccaggatgatctgcttctaccattgtgctgtaaatggtaaaaaattatctatatttagatataaataagctaaaaagataaaattttattacatactgtgctgaaaacccaagtaaaattcccttcctgaggctgacatctttttagtatttcttactttatatatgtaaaatttgtaacactcagagcaaaggggcactaacttcatggacaaatgctgcattttagtatgtacctgacaaaaatctcatttctaaaaattagataagaaaagctattgtaattttcctcagttgcaatatgaagaatgtccccatttaaataattttatttgaaaagaatctatttatgaggtacggtgtgatgttttgcatattttctttcttgagatgtctgtctcctgtcgccaaagtgaactgctcactgcaggctcttccacccagcctcaactgatcttcctacatctcagcttcccaagtagctagtactacaggcgctttctaccacagctgggcaattttttgtatttttaaaaatagacaagggtttccccatagtgcccaagctagtctccaaatcttcggctcaagtgttctgccggcttgggactaccaaagtgatgggatttcaagggtgactcaccacactcagcatgatatttggataagagattaaatcaagctacttaaaatgttctaggaggagaatattttaaatattttaccatcttttagtgatttgaaatatacaataggtcaaagatccccaaaccctagccttcaacccgtacctatctgtggcctgaatgtgatgccggaggatgacctgcaatacctgtctgtggagaatgtaacgcctgaggatgacctgaggtggtacagttttatccggaaaccatcctccctactccctcgctggccctccctgtccccgtgacagcctcactgccccacctggcctctgtcacattgctcctaccggaagacccgccccaccacgtgcccctcggaggcctgccgccagcccccactcccaaacctgtccacctcgccgccttcttcccctgcgcaacctttgtctgaggaaaaactgacttccactaaaccagtccctgatgcgaaaatagcaatgaaagagtccagtacgttacccaggctggtctcaaactcctgacttcaagccatcctccgacctccacttcccaaaatgctaggactacaggagtaaggcagtgtgccaggttaacagaataacttaagcgcatctattttgttccagttttcggctatctaactccatttgtctcgattacacccacttattcggtttaaactatttacggtgccaaagacacatgaaacgtttcaaatactgtcatacaacgaaggagacaatcacaggctttacagaggcaaactgaaactcagattatttgtggccccatatttctacatacactaaagtaacacaatttatgtcaaaatttgataattcttccaagcaaatcagacacgcgacacgtgctaactaaaagtgtgactttttaatcgcagtgtttaagtgtattgcctgtattctgaattatcaccacattcacagagaaaacccgctttaataaaaagtgcacatgaaaaccaatggcggcttagcaccatctcccacaactagtcggacacattaggcagttaaaggtagaatcctcaggaaaaatcaatgagtttaacgaaagtgagtctcttaatagcactgaggagttctttccccactgactcctcccgtaattcaacacccacacatagaaaacccatccccttttatagacaaaatcccaaaccttcgctttctattcttgccgagagacccagctgtccagagaaacagaaaatacctgcgctttttagtaggacaaagagcctgaggttcgcctggccctcaggccgtacgtaaccggcttcggaacaccacagggccaactgcgggagggacagctggagctaccctgagagggaaggacgccggaagccgtgcccggaaatcccgcctacctccagcggccaatcattgcgaaggcggtgggcgtcagccagttactgcaaaggctgtgggcgtgtcctgaggccgctccgccccagcaggcctgcggctccatcatctcgcggtaactcttccgagaccacgcttgtgccgcgtggcgggccgcggtggattaaggcacacgcgaactgtgagccctttgcaattgtgggcatggaagacctacaccctaactggcatcctgagtgtggcaagacattaactaacccacagggaacacatgaaacatctcacttcattaggcaggctaggctgatggtaccgaatattgcagatccagaggggagagagagggaccagcgctgctgcaggggcgagggcagcagcggtggcttggggggattggggcagggcgggtgcgtgggactaaagtcgactggtacgttgctgaggtggaattcatctgcaccagaagctgaaaccctgcaaggattctgtcaggtctaggcaaatacatactccgagttccatggttcctccctgaggatgctgtactcacaggggcattccaaaggacttctcatcctgtgccctgggcacacgggaggcctaccgccatggtcgccaatgcagtgatccgtgtgcactgctttgctggtgcagaggctctcacaagtgcagtggtggccgtgtgcctgctagcggggctctggaagccagggccttggcatccgactccagggctgccgtgcgcagctaaccctgctgggtagctgagccccagtgtgagtgtgacaggctaagggccctgtggggccccccaggaaccctgttccacataggtgtaggatgtggttctcagcagggcaaggcccgcaggcctctcctggagttgcccccagagttgacgggtgccgggggggtggggtgggaggcacaggctttgctctgttggagcctcaaggagggcaccatgttaaggctggaggctgtgcaggagaggatggtctgtgcacagagcaggaagacaaccctgcggggagaggcatgctagtgggggatgacatcattgcagagatggaggtggtggccaaggaggaaggccaatgtggagccacagcaggaggacctgcaggcacagcctggccctggccccagtacgccccggccagcaacagactcgctggacgtccttcacttggagctcggctacgtgaatgtcccaggccacagggcatccccggcttctgggccagagccatatccttgcagctgccaattcgggatggttggcagcaggggatgggcgcggagctcccgggagcggaggtggggggaaacaaggtggtaggcactggcggtcagccaggattcagggcatgggggacaacaaggggaactgagaacaggctcatgcagataggagggcagcttaattgcatgtgccctgagggcatgtggtagggacaggaagccaagcacagcactcaccagggagaatagcagcgccaaggacccatcataacagcagaaagttgaaggatacgattcaccgggaaagtccctggaggaaggggagtctgcatgcccatgccagccacggaacttccctgctccccttgcctgtgtccagcaagcttaccccagaaacacaaggtgctcaagactcggtgtcactgtgcacggggctgctgtcctatgcaaggcaggcactatctccccagacacaatttcttccctctgccagcgctgcacccaaagatgtttaggccctgagtatatataagctcccttgaaaccactcgagctccacggggagagccaggcacagccccgtagctacttctacccacagcggttgcctggggtggacacgtgcacccctcagggagaccaggagaaggagagaccgcacacccagacagcagcagagcctgtccagcacccagcacaggagggcctc

SEQ ID NO: 1564456 - DNA, 4001 bp, Homo sapiens
tgtgctgcaagtggtcaaagaaaaatctatatttagataaaaataaatatgctaaaaagataaaattttattacatactgtgttgaaaactcaagtaaaattcccttccagaggctgacatcgttttagtatttcttactttaaatatataaaatttgtaacatacagagcaaagggggcactgatttcatggacaaatgctgcattataatccgtacctgacaaaatctcatttctataaataagataagaaaagctattgtaattttactaagttgtaatgtgaaggttgcccccatttaaataattttatttgaaaactatacatttatgaggtacactgtgatgttttgtgtattttctttcttgagatgtgtatctcctgttgccgaagtccgctgctcactgcagcctcctccacccagcctccactgatcttcccacatctcagcttcccaagtagctggtactacaagggctttttaccacagctgtgtaattttgtgtgcgtgtgtgtgtgtgtgtgtgtgtgtgtgtgaatagacacgggtttccccatattgccgaagccggtctccaaatcctgggctcaagtgatctgccggcttaggactaccaaagtgatgggatttcaagggtgaacaaccacggccagcgagatacgcggataaaagattaaatcaagcaaattaaaatgttcttggggtgaacattttaaatattttaccatctttaagtgatttgaaatatacaataggtcaaagatccccaaaccctagccttcaacccttacctatctgtggcctgaatgtgatgccggaggatgacctgtaatacctgtctgtggagaatgtaacgcctgaggatgacctgaggtggtacagttttatccggaaaccatcctgcctactccctcgctggccctccctgtccccgtgacagcctcactgccccacctggcctctgtcacattgctcctaccggaagacccgccccaccacgtgcccctcggagacctgccgccagcccccactcccaaacctgtccacctcgtcgccttcttcccctgcgcaacccttgtctgaggaaaaactgacttccactaaaccagtccctgatgcgaaaatagcaatgaaagagtccattacgttacccaggctggtctcaaactcctgacttcaagccatcctccgacctccacttcccaaaatgctaggattacaggagtaaggcagtgtgcctggttaacagaataatttaagcgcatctattttgttcccattttaggctatccaactccatttatctggattacacccacttattcggtttaaattatttacggtgccaaacatacataaaacatgtttcaaatactgtcatacaaggaaggagacctttacagtctttacagagtcaaagttaaactgagattatttatggccccagacttctacattaactaaggtaacacaatttatgtcaaaagttgataattcccgtcaagcaaatcagagatgtgacatgcgttgactaaaagtatacgtttttaatcgccttggttaagtatattgcctgtattttgaatgatgaccacagtcacagagaaaacccgctttaataaaaagtgcatatgaaaacaatggcgccttagcacaatctcccacaactagtcggacatattaggcagttaaaggtagaaccctcaagaaaaatcaatgagtttaacaaaaatgagtttcttaatagcactaaggagttctctccccactgtcttctcccataattcaacacccacacatagaaaacccatccccttttatagacaaaatcccaaaccttcgctttctattcttgccgagagacccagctgtccagagaaacagaaaatacctgcgctttttagtaggacaaagagcctgaggttcgcctggccctcaggccgtacgtaaccggcttcggaacaccacagggccaactgcgggagggacagctggagctaccctgagagggaaggacgccggaagccgtgcccggaaatcccgcctacctccagcggccaatcattgcgaaggcggtgggcgtcagccagttactgcaaaggctgtgggcgagtcctgaggcccctccgcccctgcgggcctgcagctccattatgtcgcggtaactcttccgagaccacgcttgtgccatgtggcgggcagcggtagattgaggcacaggcgaactgtgagccctttgcaattgtgggcttggaagacctacaccctaactggcatcctgagtgtggcaagacattaattaacccacaaagaacacatgaaacatcttacttcgtaaggcaggctaggctgatggtactaaatactgcagatccagaggggagagagagggaccagcgctgcctgctggggtgagggcggcggcggtggtttgaggggagtggggcagggcggttgcctgtgaggaaagtcgactggtacgttgctggggtggaatttgtctgcaatagaagctgaaaccccacaaggactctctaaggtctagccaaatacagactctgagttccatgcttcctccctgaggatgctgtactcataggggcattccaaaggacttctcatcctgtgccgtgggcacatgggaggccagccaccatggtcgccaatccgatgacccgtgtgcactgccttcctggcgcagaggctcccgcaagggcagcagtggccgtcctgcctgctagcggggctctggaagcccagggcgtcggcctccaactccagggctactgtgtgcagctaaccctgctgggtgtctgggccgcattgcgagtggggcgagctgtgggccctgaggggctccccgggaaccctgcatccacgtaggtgtgggacatgggtctcagcagggcaaggcccgggggcccctccggcagattcccctagggtctaggggtgccagggacgtgagatgggcggtgcaggccttagtcagtggaagcctcaaggagggcatcgtgttaaggtggaggctctgcagaagagggcggcctgtgtggagagcagggagacaaccctgggggaagaggcatgccagtgggggatgacatcatggcagagatggaggtggtggccaaggaggaggccaatgtggagcggcagcaggaggcccagcaggcccagcctggccttggccctagtatgcccccgccggcaacggactcgctggacgtccttcacgtggagctgggctcggtaaatgccccaggccgcgggacatccccggcttctgggccagagccatatccttgcagctgtcaattcgggatggctggcagcagtgggtgggcgccgagctcccgggagcggggttgggggaaacaaggtggtaggcaccggagctcagccaggattcagggtatgggggacaatgagaggaaccaaggacagactcatgcagatagaagggcagcaaaattccgtgtcccctgcgggcacgaggtagggatatgaagccaagcacaatactcacaagggagaatagcagctcaaaggacccgtcataaacagcagaaagtcgaaggacacttttcactgggaaaatccctgaaggaaggggagtctgcgtgcccaggccagccagggaactacccctgctccccgtgcctatgtccagcaggcttacctcagaaacacaaggtcctcaagactcgggttcacagtgcatgggactgctgtcctctgcaaggcaggcaccagctccccagacaggatttcttccctctgccagcgctgcacacaaagatggttaggccctgagcatatataacctccgttgaaaccactcgagtctcacggggagagccaggcacagccctgcagcaacttctacccacagcggttccctcgggtggacaggcccacccctcagtgagaccaggagaagaggacaccgcacacccggacagcagcagaacctgtccagcacccagcacacgaggg

SEQ ID NO: 1564457 - DNA, 4001 bp, Homo sapiens; identical to SEQ ID NO: 1564455

SEQ ID NO: 1564458 - DNA, 4001 bp, Homo sapiens
agcttgccaggatgatctgcttctaccattgtgctgtaaatggtaaaaaattatctatatttagatataaataagctaaaaagataaaattttattacatactgtgctgaaaacccaagtaaaattcccttcctgaggctgacatctttttagtatttcttactttatatatgtaaaatttgtaacactcagagcaaaggggcactaacttcatggacaaatgctgcattttagtatgtacctgacaaaaatctcatttctaaaaattagataagaaaagctattgtaattttcctcagttgcaatatgaagaatgtccccatttaaataattttatttgaaaagaatctatttatgaggtacggtgtgatgttttgcatattttctttcttgagatgtctgtctcctgtcgccaaagtgaactgctcactgcaggctcttccacccagcctcaactgatcttcctacatctcagcttcccaagtagctagtactacaggcgctttctaccacagctgggcaattttttgtatttttaaaaatagacaagggtttccccatagtgcccaagctagtctccaaatcttcggctcaagtgttctgccggcttgggactaccaaagtgatgggatttcaagggtgactcaccacactcagcatgatatttggataagagattaaatcaagctacttaaaatgttctaggaggagaatattttaaatattttaccatcttttagtgatttgaaatatacaataggtcaaagatccccaaaccctagccttcaacccgtacctatctgtggcctgaatgtgatgccggaggatgacctgcaatacctgtctgtggagaatgtaacgcctgaggatgacctgaggtggtacagttttatccggaaaccatcctccctactccctcgctggccctccctgtccccgtgacagcctcactgccccacctggcctctgtcacattgctcctaccggaagacccgccccaccacgtgcccctcggaggcctgccgccagcccccactcccaaacctgtccacctcgccgccttcttcccctgcgcaacctttgtctgaggaaaaactgacttccactaaaccagtccctgatgcgaaaatagcaatgaaagagtccagtacgttacccaggctggtctcaaactcctgacttcaagccatcctccgacctccacttcccaaaatgctaggactacaggagtaaggcagtgtgccaggttaacagaataacttaagcgcatctattttgttccagttttcggctatctaactccatttgtctcgattacacccacttattcggtttaaactatttacggtgccaaagacacatgaaacgtttcaaatactgtcatacaacgaaggagacaatcacaggctttacagaggcaaactgaaactcagattatttgtggccccatatttctacatacactaaagtaacacaatttatgtcaaaatttgataattcttccaagcaaatcagacacgcgacacgtgctaactaaaagtgtgactttttaatcgcagtggttaagtgtattgcctgtattctgaattatcaccacattcacagagaaaacccgctttaataaaaagtgcacatgaaaaccaatggcggcttagcaccatctcccacaactagtcggacacattaggcagttaaaggtagaatcctcaggaaaaatcaatgagtttaacgaaagtgagtctcttaatagcactgaggagttctttccccactgactcctcccgtaattcaacacccacacatagaaaacccatccccttttatagacaaaatcccaaaccttcgctttctattcttgccgagagacccagctgtccagagaaacagaaaatacctgcgctttttagtaggacaaagagcctgaggttcgcctggccctcaggcgtacgtaaccggcttcggaacaccacagggccaactgcgggagggacagctggagctaccctgagagggaaggacgccggaagccgtgcccggaaatcccgcctacctccagcggccaatcattgcgaaggcggtgggcgtcagccagttactgcaaaggctgtgggcgtgtcctgaggccgctccgccccagcaggcctgcggctccatcatctcgcggtaactcttccgagaccacgcttgtgccgcgtggcgggccgcggtggattaaggcacacgcgaactgtgagccctttgcaattgtgggcatggaagacctacaccctaactggcatcctgagtgtggcaagacattaactaacccacagggaacacatgaaacatctcacttcattaggcaggctaggctgatggtaccgaatattgcagatccagaggggagagagagggaccagcgctgctgcaggggcgagggcagcagcggtggcttggggggattggggcagggcgggtgcgtgggactaaagtcgactggtacgttgctgaggtggaattcatctgcaccagaagctgaaaccctgcaaggattctgtcaggtctaggcaaatacatactccgagttccatggttcctccctgaggatgctgtactcacaggggcattccaaaggacttctcatcctgtgccctgggcacacgggaggcctaccgccatggtcgccaatgcagtgatccgtgtgcactgctttgctggtgcagaggctctcacaagtgcagtggtggccgtgtgcctgctagcggggctctggaagccagggccttggcatccgactccagggctgccgtgcgcagctaaccctgctgggtagctgagccccagtgtgagtgtgacaggctaagggccctgtggggccccccaggaaccctgttccacataggtgtaggatgtggttctcagcagggcaaggcccgcaggcctctcctggagttgcccccagagttgacgggtgccgggggggtggggtgggaggcacaggctttgctctgttggagcctcaaggagggcaccatgttaaggctggaggctgtgcaggagaggatggtctgtgcacagagcaggaagacaaccctgcggggagaggcatgctagtgggggatgacatcattgcagagatggaggtggtggccaaggaggaaggccaatgtggagccacagcaggaggacctgcaggcacagcctggccctggccccagtacgccccggccagcaacagactcgctggacgtccttcacttggagctcggctacgtgaatgtcccaggccacagggcatccccggcttctgggccagagccatatccttgcagctgccaattcgggatggttggcagcaggggatgggcgcggagctcccgggagcggaggtggggggaaacaaggtggtaggcactggcggtcagccaggattcagggcatgggggacaacaaggggaactgagaacaggctcatgcagataggagggcagcttaattgcatgtgccctgagggcatgtggtagggacaggaagccaagcacagcactcaccagggagaatagcagcgccaaggacccatcataacagcagaaagttgaaggatacgattcaccgggaaagtccctggaggaaggggagtctgcatgcccatgccagccacggaacttccctgctccccttgcctgtgtccagcaagcttaccccagaaacacaaggtgctcaagactcggtgtcactgtgcacggggctgctgtcctatgcaaggcaggcactatctccccagacacaatttcttccctctgccagcgctgcacccaaagatgtttaggccctgagtatatataagctcccttgaaaccactcgagctccacggggagagccaggcacagccccgtagctacttctacccacagcggttgcctggggtggacacgtgcacccctcagggagaccaggagaaggagagaccgcacacccagacagcagcagagcctgtccagcacccagcacaggagggcct

SEQ ID NO: 1564459 - DNA, 4001 bp, Homo sapiens
agtgtcatcaaattcacaccgcaacaaatcctgtaacctatactctcgcagttttggtgttatactgtccttaggatatctgctaccagtacatataaaagtctcaaggtctgtcttgaacaccactccccaattaccttttaagtttggatcacacaagaatctcttccaatggagaccgttcaagctgcttctacagatccctctctagctttgtctctcttaaaacggactcgcgatcattaaccacacactttcatcaatgtcacagggaaaaggagaggaacccacaagactaagggaccaagttcccagcaagtcttcttaaagagtgccttgctcatccacttaacaatagagaaaacaatggcccatccagggaggtcaaatagtaggtgacagtagcagaggtagcacttggaagcagaaactgacagggacaggttgcaaatccaggtccccagccaacacactgcctatgttctctctgaaaatatcagaacaaggaagacaagtttctactactcagtgttcagagttcaaactgtaccaagaagaggccaaatcaagttagttactaagtgcctcctaaatggagaccctcagagctaaatatagtctcttaccacatttattcctgctcaaaaaacccttggcatcttaagcgcctcgattctgtcttcttcacactggctcctctctgtctcagaagaccaagactttacagttttaaccactctctcctagtgtgaccacaccatcaatgtggaaattgcctagtctccttgtgagatgcttgcctactgtgcctctgagtatactgccctcatcctgccaggtcttcaaggttgggttcaagagcctccagactttctcacacaacttcttgcccttgtttcgtgggctcctgtagcctttactattaaaccagtaactcgggctcaacgtaaaaagcagctactccaccctctaaaacaaggggtaactttaaattaaacgcatttgattattaatgggggactcagcggactgtcactgaactcctttcttatgtggaattggacacattcattaacccacccagctctgggctcaggaagtgccctctgaagtggcgagctaaaagagcaaaggaaaccatcgggacgtgacatcctggccctttgttgcacagaaaagtgcaaggacaagttcagggtgcgggaagtctttaccaacgaaaatcccacataacaaacaagcaaacgccgcccccaagaaataccgagccacaggtatttagcatgcactcttgactaaaaaaaacaaaaaaaaaccacaaaaaacaaagttatactcacaaatacacccgttagtttgtcaagcatccaatgcttcggcgctgcaacacgctttaagtgcttcttggggccccgggcctgaaaaggacacgaaactcagagaaattagtttccgctgacagtgaaatgccctcatcttcagctgtaggaactgctaacgggtaatacctgactcaaggagaaaagatcgcccagcccatactcaagccccgttttgaacaaatattacttcctgccagaccccagaagagaccacgcaaagcacagacctttgaaaacttggcgggtctccctagcatccgtcaagagagcgtccacagtgctctccaagcgaatctgaggctgcttcaacgtgtgaaaataagctaatccgggtaaaaagccactgccgggctgcgtcaaggatggactcacgtgacggcccccagaccgagcacaacgagacacactcttctcagacctcccctctccaaatcgggtttcctgaagcagcaccagcagcattcccacccaccaagtaggggcgaccgaaaagtgaaacatcgccaaggtagaacggccctttttcaaatgatggaggcagatatactaggagttaggaactatcggtcttaccatggcgaaactctgcgacggaagagaatctgttcttttccggtgcaaccaaagtctgttgtcgtaaaccgcaggaagtcagatgagtgagaagtttagttccggtttcttattcttccgctgtagagttcatatcctggaactgaatttcttagcattttcagtttctgatactgatttacaggtgtcagttatgccgcaggactttttgttgtgcctaccccccgtcaagttggctgagctgggaggacgcagtttacactcttaaacttatctttcgccgaccttcaaaatatttagcaaaagtcctgaaacagcacgatttaggagccttaaaaaaaaatgccaatcgtgagaaataacctatatgattccttgtgactgtgacatgctgtgattgcaaaatcatgatttgtttcagagacaaatcattccttgttcaggattggggccaatttcataggtttgggaaagtactaaaatcgtctgtaccgtaaacattgaaaggataggtttcatggcatttgaattttaagtcgaataccttgctttggattagctcgtgatgatggctgcacagctctgtccatgtcgtaaaacctgcaaaacaattcacttttaagagagtgaagtccgctatgtaagttgtactgcgcaggcgtgtgtgtggtcacagcttccattggaatttttcacgcgcgtccgcctgacagaattgatatacaaaaaacaaccagccaggccgggcacggtggctcacttctgtaatcccagctctttgggaggccgaggtgggcggatcacgaggtcaggagatcgagaccatcctggctaacacggtgaaacctcgtctctactaaaaataaaaatacaaaaaattagccgggcgtggtggcgggcgcctgtagtcccagctactcgggaggctgaggcaggagaatggcgtgaacccgggaggcggagcttgcagtgagccgagatcgcgccactgcactccagcctgggtgacagagcaagactccgtctcaaaataaactaaattaaattaaattaaaacaaaaaaacaaccagtcaaatgaagctgcacttccttaatgtgtacaatttgatgagtatggacataggcgtaaatccacgataccaccatcacaatcgaggtaatgaacatctccatcacctccaaaagtttccttgtgttcctttctggttattctctctctctctctctctctctctctctctctctctctctctctcggccagtgcacaggttggtttcatacattttaggaaggcaagatgtaagatgtacatggtgcaggacattggggtggcttggtggggggctggggcagtgggaaggtagagtttgatgtcgtaagagacaaatggttgcattattttgggtctctgatcagcctttcactaaatacacaatttaactgtaacaggaaaggtagaggccgggtgtggcagctcacacctgtaatcccagcacttttggaagctgaggcagatggatcacctgaggttgggagttcaagaccagcctgaccaacatggagaaaccctgtttctactaaaaatgcaaaaattatctgggcgtgttggcacatgcctgtaatcccagctactcaggaggctgaggcaggagaatcgctttggaaactctgtcaaaaaaaaaaaaaaaaaacaggaagggtagaggaatagtcaattactttcatagtctggctcagtgagtctgtatttttacataaacagtgtagcagaggaaacaatgagataggcatttgttgcagatgtgcacatggaggactttctgtcttgcacctgtgaagatgagctaccaatgtaggtcgccagggtgaaattaaacagaactgctttggagtaaagatcttgaggtgcatggctgggcgtagaacctctgcgctttccaatttgagacccttggtgggcagtgcctaaacacagaggcaactgcaggtttctggctgtgggcagtgaatctaggagtttccgtgtggaggcaccaaatcacca

SEQ ID NO: 1564460 - DNA, 4001 bp, Homo sapiens
gtaaacagcagctactccaccctctgaaacaaagggtaacttcaaattaaatacattttattattaatggggactcagtgcactgtcactgaaccctttcttatctggaatttagcacattcattaatcccctcaggtctgggttcaggaagtgccctctaaagtggagagctcaaacagcaaaagagaccaccaggacttgacatcctggtgttttgttgttgctgttggcatttttaatccttgagagcacaagcctcaagaaatgggttcatgatataacacaatttgaataaatcacaacacagcagcctaacagctcttttgaaaatatgaggggcgccatggctaatgcttataatcccagcactgtgggagtggccaccagcgggtggatcagaaggtcaggaaattgagaacatcttggccaacagggtgaaacttggtatctactaaaaatacaaaatttagatcggcgtggtgactaaaagatcccagctactggggaggctgaggcatgagaatcgcttgaacccggaggcagaggttgcagtgagctaagatcatgccacagcactccagcctggtgacaagccaagactcagtttcaaaaaaaaaaaaaaaaaaaaccccaaacatgtccaatagttcactcacttatgtctttctgttcttctgtaagaggcttctttatttcacactctttaaaactgcagtgctcaaaaccccattgatccttccaacagccctacttttttctccccccagccttcagcacctgtgaacatactgtaacttccctctcctcccagcaggatgtaagcttcaacaagaaagagggatagattttgttgtccaaccattttgtacccggacatatccttaagggtgggcccacataacaacacctggcatgtattaggctctcaatagttactaaaagatggcaagcccaggttctcagcgacattatggaccacaatagtgctcaaagttgaggtcagagagctgttcgacccgctgtttccaaacaggatgtcctaacttttttctcagggaccttttcattacagtgcaaggacaagttccgtgtgcagcaagtcttcaccaacgaaaatctcacataaataagcaaacagtgttcccacgaaatagcaagccacaggtacacagcatgcacttttgagtaaaaagcaaatacagttatactcacaaatacaccagttagtttatccagcatccaatgcttcggcgctgcaacacgcttcaagtgcttcttggggccccgggcctgaaaaagacaccaaactttttcagagaaactcgtctcagttaacagtaaaatgtctttatcttcagctgtaacaactgctaacgggtaataccggatcggaggagaaaggacagtccaggctatttcacgcccagttttgagcaaatattacttcctgccagactccagaacaaaccccgcaaaactcccagacctttgacaacctcacgagtctctctggcgtctgtcaagacagcgtccacagtgctctccaagcgaatctgagactgcttcaacgtatggatataagctaacccgcgtaaaaagccagtgctgggctgcggagtcaagggtggacttgtaaggttagccgaggaagcttattcctaacaagactcacgtgccaacagcaccaccggcgcccaggccgagcacaagggccagcccggaacccccagccgcactcttctcagacctccgctctccaaatcgggtttcctgaagcagcaccagcagcattcccacccgccaagcagcggtacccgaaaagtaaaagcttgccaagatggaaggcccttcttcaaaggatggaggcagataaatccggagctaggacgcagacgtcttaccatggcgaaatcccgcgacggaacagaacctctccttttacggtgcaaccgtaatctgcggtgataaacagcgggaagtcaaatgagtgagaatttcagttccagattccgcctcgggtaaccaacctattattcttccgttgtagaggtcacagctcggaactgagtttcttagcatattcagtttctgatactgattcataggtgtcagttatgccacgggactttttgttgtgcttcctcccctcaggtcggctaagctgggaggacgcagtttacactctaaaaattatctttcgccaactttaaaaatatttaacagaagctctgaaggagcaggatttagccgccttaaaaaaaaaaaagccaatcgttaagaaataacctgtatgattccttgtgactgtgacatgttgtattgtaaaatcatgatttaagaaacaattcgtttttctgaattagggccaatttcacaggtttgagaatgtattaaaatcgtctgtattgtcaactttgaaagggtaggttttatgggacgtgaattgtaagttcaataccttgttttgcattaacttgaggtgatggttgcacaactctgtgcatgtccctaaaacctccaaaacaattcacttttaaaaaggtgaactcggctatgtaagttgtaccacgctcgcatgtgtgtgatgtcacagctttattgaggtggaattgctatacaaaacacaaccagccaaatggacttccttaatctgtaccgtttgacgagttcggacataggcgtaaacccacggaaccatcatcacaatcgaggtaataaacatctccatcaccatcaaaaatttccttgtgttattttctaggtatttcttttctttttctttttcttttccttttctttctttcttttattgtgtttttgaatgtggcagggtctggctctgtcgcaccgggtggagggcaggggcgccatctcaggtcccggcagcctcgactttccgggggttgagtgttcctcccacctcagcctcccacagtgctgagacccacaggcacctgccagcactttacggaatttttatttttatttatttatttatttatttattgagacggagtctggcactgtcgccggggctggaatgcaatggcgcgatctcggctcactgcaacctacacctcctggcttaaagccattctcctgcctcagcctcctgagtcgctgggattacaggcgcccgccaccaggcctggctgtttttttgtacttttagtatagacagggtttcactgtgttggccaagcttgtgtcagactcctgacttcatgaaccaccgactctgcctcccaaagtgctgggattacaggcatgagccaccaagcctggcctccagcttttcttttctttttcctttaactgtagagagaacacaacacagtaacatcgaccatttttaccaatttgtaagcgcgtaacagtgcctaaaatgtttttgttgttatgttttgtttgtctttgcattcaattccttgattcaagtctataggcactgtatgtgccagctagcaagacagcaggctggaatagatctgaactccacactgtttgctctgtactagtattcacctcttctattctgagactcctagactccttttgccattacttaggtccctttgctgcttttgtggtaggagttattaagaaattattttaggcaaatagagaggaaaagttttcatttctattaaagctgctctagaaatgtttcttgtctagaagcaaagcctgggctcttagagctttggctcttagggcttggctggcaaactttgatatgcaaatgtaggccattagaaactgggtccacccaaacatggcaattcctgtgccctcctgcccttgccctacatgttcctggcaacatggccacccccacatatccccacgtgtgtagaacatcatggcgtccttcgtttgcatattaaaagactagagtagttgggcccgctttttcgtgggctaagtgaatgacatgccttgtcaaaccaatccactgtgccctgtgcaaatcagacaccgcctcctccagcctctacgt

SEQ ID NO: 1564461 - DNA, 4001 bp, Homo sapiens; identical to SEQ ID NO: 1564101

SEQ ID NO: 1564462 - DNA, 4001 bp, Homo sapiens; identical to SEQ ID NO: 1564110

SEQ ID NO: 1564463 - DNA, 4001 bp, Homo sapiens; identical to SEQ ID NO: 1564156

SEQ ID NO: 1564464 - DNA, 4001 bp, Homo sapiens
agtgaaaagagtggttttaaatattacaaagtagttttgagtcagtgtttaaaaggtaatgggcaatatacagttctcatttggcataaagctcagattaagtaatattgtctctggaataaagctttttttaaaccctgaactttgagaaacatgacatccatctctaatatacactcttttagtgtttgagttttattatttaaggtaatgtctctgaaaagttttgaaatattggaaagctgactttgatacataccattaattttgacttttgatttatttttattgtagaaaaatttatttgtaatttatactttaaactgtggtttacagttatttgtaaacttctagtttcctgctttagcttatgtgcaaattttatgaagtcttggcattacatttttatttaaatcccatcaaattaaaccagttgggtcaccagcccccgcccttccatctccataatctgggtagtcggcgttctcaacattcctgttgagaatgaaaattctgtatttttcattccacaggcttaaaagttaataggccatggaaacaagtagattgccattttaaaagatagttttcagaagaaaggcaaaatgataagtttcatagagatacaaaaatgacaaggaattaaatattttgttttaccagaggcattttataactagttgaaaggaaatgtcaaccgtttggatttatatggagtaaaggaactgaattgcaagtggaggtaaaactggttttttccacagcgtgaaggggagagaaagaaacaagtttgatcctgcttacatatccattccttagttacctgcaatttatagacacgtacaaagtagctgaaagaccaatgaatacacggtctagagaggactgcttaacacgctgcatatagaagtgtgattttttttggtacaattttcaagtgtgtttctcattagagcatttaaagtaagccacagtgtccgtttgtatcaagttagtactctgacggccacaaacataggcaggctcacttctggatgtcttatttctttgcatgttaatcgtgttgacacaacttgtcttgaaattaagtttaaaatgaaataccagtaaaactgaaatgaataaggcctttattagccagagaaaagaaaacaatattgaaactaaacataagaaagtgagggctgtaagttatcgtaaaaaggagcatctaggtaggtctttgtagccaatgttacccgattgtcctacagctttgtccagtggctgtagcggtcccgttgctgcggtgagctggctgcgttgatgggcggtaagtggcctagctggtgctccattcttgagtgtgtggctttcgtacagtcatccctgtacaacctgttgtccagttgcacttcgctgcagagtaccgaagcgggatctgcgggaagcaaactgcaattcttcggcagcatcttcgccttccgacgaggtcgatacttataattcgggtatttctctctgtgcatggcctgtaatttctgtgcctcctggaagaatggccatttttcggcttcagtaagcattttccactggtatcccagctgcttgctgatctctgagtttcgcattctgggattctctagagccatcttgcgcctctgatcgcgagaccacacgatgaatgcgttcatgggtcgcttcactctatcctggacgttgcctttactgttttctcccgtttcacactgatacttagagttacagctttcagtgcaaaggaaggaagagcttctccggagagcgggaatattctcttgcacagctggactgtaatcatcgctgttgaatacgcttaacatagcagaagcatatgattgcattgtcaaaaacaaggagagtgcgacaaaattgaaaggtgccagagttcgaaacttattttactatccaaaactcacttctaccagattctttgttacgttaacttttgtaatgaaacttgcatttctccgccctcaacaccccctcaaccccgcccaaccagcctaccccctagtaccctgacaatgtattcattctcaagcaaaacatggtaattcagtaacgttgactacttgccctgctgatctgcctccctgactgctctactgctgtcctgaaaaatgcgaatttgacttaatcgccaattttttcattgaccttttatgtcacaaaacgagaggacacaaaaagctatatgaattgtttatcattatcaatatatgtgtatgttatctttaaaaaaacaaagcttaatgagaacctaattgtcttaaccacacacatacatacataactgcatattgaatttatagtaattattatcgctttttcttcacttctatttaaaaattgaaaattctatacacatttttcacaggcattaagtatcagaatattagcatatacttacaagtattttatgcccaacttctaggatggctaacatttgacttttagaaaagtaattgtttcgtttagagaaaaaaaaatatgacctaagaactcaaaacagtttcagtgaagtgttaagctacactaaaaaggggacacaattcttttctttgcagattgtatagtgggatattttgaagtcattctcttcactgtcacacaattagcaatttaaaaaacaatcttttacaagtctaaattaaatttccattcacaacaaatagagccatcaatttatcatatttcaccttttagttcaacctccttcaaaatttaaaggtcacagtttaccagactaaacaagtgaataactctcctcaataaatcttaaagtctgaagagaaatgacaagatttctttgctgaaataaaatgggaggaaagtccccccactcaccaatgttttaatgccatatttgcaaaacaggagtaacaactacaggttgcatagtacacagaacctattaataaaaataaactctcagcaaaactgaatgatgccacaattcctaagacaacaaaataaaaatcccgtaaaatatgaaaagagttcatagaaccaaatgtggttggtttgtccagtaaatgttataatgaattaatatcagaaactttaaaaaattatattccatgaaaagaaaaatatgaaaactgtaatttgtatcctagttatctactaaagtttagtatctaagatacaaaatttagtattcattatacaaagtggaaatatagttggctcaagttaaaacatgtatctggatagcaaataaaatggttaaattgcagtcatacacagaaacagattttctacaacaggaaatcccttacaagatgagaaaaaacataccatttcaaaacctgacatgaaaatagcaaaaaatgacacaaggcaccacataggtgaaccttgaaaatgttacactgtgtgaaaaagtcagatacaagaggccagatactgaatgatcccatgtatatgaaatatccaggaaaggcaaatgaatagagactaaaaccagattaatggttgctaaggactggatgaaagaggttgtggggagttactgctggtggatgcacggtttcttttgaggattgataaaatatgctctggaactagagagaggtgatggctgcacaacatggtgaaccaaagagtcagagaaactgaagtccaaataaggagtttgttggcagttttagaactgtaattagagaaacagattccagaagcatctgacattgtgtcgtgaccggctgttttgagagacagtttttaaaggaaataagagaaagttggtactcattaggttacttacaacctattatcttaattggtaatgaagggttatcttaacagttcatgagtttctacgcaaaagtccttgaatcagtggtttgggtaaaaagtcagttttcactatgaagtcttttaataagtggcagcaatttttgtctgcagaatctgcaagtacattttgcagtcaggcagttgcaagatgggtttcaaaaacaaaatgttgttgctat

SEQ ID NO: 1564465 - DNA, 4001 bp, Homo sapiens
gctaacttttgtattttcagtaaagacgcggtttcagcatgttggccatgctggtcttgaactcctgactgcaggtgatccactcgccttggcctgccaaagttctgggattacaggtgtgagccactacgcccggcccagtttcctctttaaaactgctagcagaggactcctcggagcccagtaaaggggccaaatgcctgggagtgagggagccagggtggcagaactacaccataaatttccatttttgccctacaggtgtgtgttctactaggcctgcaatcgccttaaggtccccttttaataaatggatccagtgatgaacaacttttgttgtgtcagttacccagctcggcggctttccacaaaaatctgtagcatatgtgagacatgattactctttaaaataaatgcatcatactcaacattttcctgtattttatttttcctaattgcaccttttctaggaaggacttctaaatttttcataaaattgtcaagagccacttaccacactgaggccactgtctggggagtcctgcccctcgccttccaggctgaaccagggattctggcgtgccagcagaggaaaacacctagaaggcaggtcaagccactcatgaccatgcaaaacagttgcaaataaaacagagggtgggattttgtttcttactaggttttgctccagaacaccaccgattcgaaaataatcacatcggtccctaactttgtggaattttcgacgcacttagcttgctacagcaacatgaggtcggtgcaatgagtgagcccctgcctccggcatgaccacgcacagtcgatgtacgtgaagtccaggccctagcccagcgccggcgggactccaacgacccacagttgtcacatatccggcgatcactgactcccgaaagcggacggccccgccccctccgtgagagaaggtaccactgggaagcaaggccggacccaggatctgccagaccccgacccgccagaacctaggatcaacaggtctgcgctttaccctggcgccgctctgcagaccccaaacagaccgggggcgcggggggggttgcccccagacttgactgcgcgctggggccagagagatgggcgggggaggggagcttccgaattccttgacggttttgcgactcagaaactgagcagacgccgcgggcccgagccgcctagccagccggtcgccccgctctgcgcgactgcgcttccacccaggtcggggcaggccggcccgagtcccgtggatgaaagggactcccctccaccggggcgtgaaaaatcccgccacctgccccttccgcccaccagcagtggcgctgggcccagcagatcccaagagcggcaaacaaaggggcaccaggaagaaaccgagtactttcctaaacttagcagccgcctcccccttccccaaaggagcgtctcccgccaacctccgtacactccccacacggcgcgcacgcactttgggggagcggaaacctcccggtattgttgagtccagggagcgctccgcaccctagtccaagtgctgcggtaacagctggggccctgcgtctccaggagttcgtggcgagcggagcgtctggacggccggagccgccggcaggaccgcagggagtcagcgccgtacgcaaaagtttgcggaccccgcgcccggcccaccaaacacctagcactcacctcgtcgctagcagcgcaactgtggcggcggcgcgtacctggccgtgttctgagcctctctcaggagggcagcctgtgaggcccggccgtgcggcggccgaaaagagcccggcgcaccggagcagccgcgtgccgcccctgggccgcctctgccccgccgccgcggagtcccggaaaggtcgcgggtactggaaagtttaggtaaccaatggcgactagagagcactgcggtggcggcagcagcggagctggggtgttggcggctcctcactcccgagcgcgaattgggggcactggagcgggcgcggcggctgcagcgacagagggcgggactgcacggcggcgcaagggattggcactggcggtgaccaccactgggagcggccgctagcatgcaaacgcggaccgggaggactgagagcgagagggcacccactcgccgcggcccgcccctccccaacagccagctgagggaaacccgcctcccaccagccccagctccagcgccccagtggtttagatccggaaccagcccttcccctaaggagggtggggaactgcgaaccggcccctcccctatgccgagggtgggcgaggggaacctgggccactgctagactgttgccttcccccaaccgaaaaaggaagccgccctctgcccccacggaactcccgtcacctgtccgagggtgtatctccgtcaaaatcgtcttagaagacaccccagttgtcatttcccatctcgaaaaaggggacaggcagaggctcccccctttgcaaaacacctcccagaaaaagagccagaaattcttagggacaaactggcgtaaaagccaggagctggggtgtaggaactgaagaggaggctgggagactcacctccaccgccactcccaggcttcagacctcgggcgtttgtaaggtgctttgcgttgccagtgcttacacggacgggccctggtgtactcaagtccccagcgctccttcctcccttcgcgcgcggccttaattcagttaaacagatttccactccccctccccagcacctctgaggcctgccgtgttgaatatttttaaataagtttgcccctccttttagtatatgatgagctttgtgctaagatcccagtacactcagcaatttataacctcacttgctcctcctcccgcgttagacgctcaggttgtggggggacgggaacccgagatgaatttttaaggggtcgatcctccaacaaaaaagctcaggttgtggggggacgggaacccgagatgaatttttaaggggtcgatcctccaacaaaaaagcagacctgaaaattaccctgcgaaatattgctgtaaaaacatcaatgatatgaaatcacggttgctacaccatcattagagcacatcgataaaaaaatacacatacacagtctccataattgtgaatcagcagaacagattgtgtcttattatgtcttatcagctgccattcaaaggtctccagacagacttgggaccttccactgagcctgcccttcattgctcccggactccctgggcttgtgtaaactgatgctgaggtattgcatgcaatcgaaaaacgaagggtgcaagagaaaacccaagcgagctcatgatgcaaccctaccctggctacacgtgcttcccttcccccaccgccttctggtggaagcgctgtattttttccgcctgtagggtcactttgcggttaattgattcttctatagccttgctcgttcagttttggaaagtaaagagtagaagtctttacagctctggacttaacaaggacgcagccctcggctaccgcaccctctcaagtagctgcacagccaaaccgtcctcctagcctgccacccctgcttagcgcttggaaattccaaactgaacttggttaaaagacctctttgtatgttctaattacttggcagatgtcaatcttttaaagtaggagaaagtgatggaaatcctcactctaaaacgggagcacagggtagccaagttttgcagctgatcttctgtagctaactgcaaaacagctcagaatccatcctgcctgtatcccaccgggtttactgcccttatagtcaatagcttttatcataggcttatagaacaccaaaggacactgtaacactaaggcaggaagacagaactcctctatttatcatgcaatcaccaaaattcctctttctgaaatgttaggtgggcggtagataagtgatagactgtgttatttaatgcttcgaatttttcaaatgtgcagtcctaccaggtgggagaaaaca

SEQ ID NO: 1564466 - DNA, 4001 bp, Homo sapiens
gctccctaaaagcagagaagtaaaattacagctctctggggtagtatctttctgttcgtatcctagtgaaaatctgcctgtacttgtgaaaaagctgcctttataagacaataggattattttcatgcgggaccggtctgaagctttttacattcctaccccactccctaccaaaccaagaattttaaaaggaaaaatacataaatgtattaaaaagataaaataatagaatacctggatctacttcactttttgctgacatgttatatattgattcattttgtttctttctaaattatcttcctttggtttcttccagggaatttttttgtcagtttttttctattttttgttatgtttttacttttataattaaaatcaataaaaagtattctctaaaaccaactatctaaccaacagccaataagagaaaattaacatttggaattttcatacctttatgcagacttttcactgctcaaagcaagaagagttcacctttatgcaaaaaaatgttcatgaatttactgtactttggctctcatggtcaactccctgcaaagaataactacttcttcaaaattggccaaaactgtacaaaaaggaatataagaattgaaagcttcacaaaactccaacaataaaatgagggatgttatagccatttttatagaggctttcttttctatcactcatactaatgaacagagattaccgagagagagggagaaagaggggtgacttattatatgtagcaaccctgggattaagaaagttggctagaaagccaaaaacatttatctctgaaatctcagcttgatgtttaatctcagatgtactagtctgatggtctaaagagttcaaatccaggaggaaggagagttaagaaatctttgctgcagtgttcattatgatggcaccttagtgtctttcacctggaaacactgaaatatctgacagaatttagtcccaataattaagattggtactcataaaaccagtagaaagaaagatgcctctataaaagataagcatacaaataagttggggtgaacataaacaggtttaccacagtacacaagggactgactacttgggtttttggaacatcatcaatcatggattaggctcttgcttcttctctagctccagctcggcagccgtttgtactgctgcatcgactagcagcaggaagctgctgaagtcggcgtactcctctggagacacaagttctggagaagacggggaagtgatagaaatcttgacctttttctttggctgggctattccggtgagcttctggctaggggccgactccggatctggttgcttctctcttgacatctggccctttggcaagggccacaggggcaggctttgtacattgtctggaccactggccctgacttggccggcacagacgcctcggtgctctgcaggtgggtggcatgggcatctttgcccgttttgtggccaatgatggggtcgtttctacgctgttgaagcatatccgggagaatgcgtctgcgagcattgataaaccagttagaaatccgcaacaaagacaaattggtcttctctgacagcatttgcttctcttcttctgaagggtaggccttaaaccgatgcttatacatccagtcgcggaggatcttaacggactcggctggcaagtttcccttgcgcttcttcttgtgctctggtaaggcaagaactctgcctgtatctgcgttatttctcgacatgattgaggtgtcttgggctgggctttgggtcttcgccgggctgtctttttccaccgggctttgggtctcagccgggccgtctgcagcggcctccatattcaaagaggcttatcgttactatattgagaatcacagacaactgagttaggacaaaggtaggtttgggagagccactttagaaagcatgggcaggtctgtaaggggaattctcacctgttgtttccgagaaagacaaacagctttgctaacagagttgctaacagccgagctggttatctcagtgacgtcacatcctttcttctccacgctgcccctcccctacacttcctggagttcttctcccattgttcttgcgtattttctgtaacttccaatgcacttcatttcacgcagtttatagctctccagagttttctctgctgttgtcaccagtttccactaactgacggactctatttctattagtgtaaatacgcctatcactttcttcctatttgattttactctggtattgttcttcccgttattacttataattgtctcactggctcatctagatatatcaggaacaaattgttgattagctactaaactcaataaaagagtgtaactactgtacgttgactcccctcttccattcttccatgttcaaagcagatattaataataattttgaactagacttttgcttttgatgccttgctgcttaaatttttcttctctatggccttaaaatctttgtctttgtctttttttttttttttttttttttttgatatggagtctcgctctgtcgcccaggctggagtgcagtggcacaatggcggcatctcggctcactgcaacctccatctcccaggttcaagcaattcccctgcctcagcctcccgagtagctgagattacaggcatctgccaccacgcccggctaattttttatattttttgtacaggcgggtttcaccatattagccaggatggtctcgatctcctgacctcattatctgccctccttggcctcggcctcccaaagtgctgggattacaggcgtgagccaccacgaccagccaaaatctttgtctttcgaatgactttgctattgcctgtcagtaccactgaggtctttgtgtctcttccttggactctgatatctagttgtgatgtttctctttaaacttcagtcagaaattcagggatcttttagtaatgtggaataagtggaataagatagaattcaagaaataatggccatcacagacagtttatttaaatatattttttaattttttaaattttttattttttgagatgaagtttcgctctgtcacccaggctggagtgcagtagtggcgcaatctcggctcactgcaacctcaacctcccaggttcaagtgattctcctgcctcagcctcccaagtagctgggattacagacgtgcacccccacacccggctaatttttgtatttttagtagagacagggtttcaccatgtttgccaggtctcggactcctgacctccagtgatccacccacctcagcctcccaaagtgctgggattacaggtgtgagctaccgcagccggccaaatatttcttgatatttccagcatgtggaaatcacccgataagtcaaatgaaaataatttgtaaatttcaaattttcatttctagtagctgaaaaataaggcttgacttttttcaagaacactgtgattcactttgaagacaattaccaccagcatcaactctgactccttaataatactgtatggtattatttatttttaatttcatatattttgcagagtcctagctatcgtctgaagcagcatatattatccacagcttccttttgcccttaagagttcttacttgtcactgggctggatttcagaatgttgtctactgatcctttggctgttggtaatcttccttactggtactgactttcatcacttaaaatttattgtaagggagacctactgaataacacaatcaaatctaatgaacaacttagtaaagctcccaataaccaataattgggtatgttgggtacaattgaaggtctcctttggaatactctagaaaagaatgcttctatttccactggacttttgggcttttgaaacacagaagataagattttctatgcatagtaaaaactcagttcctgcaactgtttctcaccaacacatttatgcctcatgctcgctgaaagtatttttgtgcgtcagcatgacttgtagtaacttaccc

SEQ ID NO: 1564467 - DNA, 4001 bp, Homo sapiens
taaacttcattttagattctgcaggacacttggcccaacttggttttactctagatttcactgccctcccactccgctaagtctttcaccaacattcaagctattttccttccctgccagccagacaggcgatgggagaagcaggcgtggcctccattgtcagcaggtctttgatgtcaaaagggcagcatagtcctttcaaactcatccaacgtgtttgcatctaaccaagttaaacaagtaaaagaagtaaaataagaaagcaatgcttgtagaatgtacagtagatattggtggcacatgcctgtttaagattcgcctgcttgcctctcctgttcgatagctgcgaccagaaaaaaacagaaaaggaaaaagatggagtgggatgattaaggggtttcagtacagcctaatatggatgggatgattaaggggtttcagtacagcctaatatggaattaaggggctttcatttgcaacatcttgtcatatcctaaacgttctgcaagtgtacctagctaggcatgtcataatcaaataaaaaatgtatattgagtatattaaatagccgtacattttcagtgataaatgtgtttgtatattattatagcgcattaaatattgcattattaaattaatgaaccctgtgttcatgcaaccttcccccttaaggatcgccctattgttttgtttgtttttgttttggttgagatgaagtctccctctgtcacccatactagagtgcagtggcaggatctgggctcactgcaacttcccctcccaggttcaagcaatgcttctgcctcagcctcccaagtaactgggattacaggcgccctccagcaaaccaagttaattttgtattttttgtagagacgaggtttcctcaggctggtttcgaactcctgacctcaggtgatccccgccttggtcttccgaagtgttgggattactgcactaaaagttatctgatttttaattaacctttgcaagccacattcaccaactatctgctccttgagcgccctcccctgcctcccgaattcttcccgtggcagctcccagtctcccgccctcccaccgcccgctcgcattccagcctttctaaagatgggggaggatcggagcttactttctttggaagacaatggattcttctcttgcgtttctgtcttcttcagtttcgacttatcgaatttctcgatctcagccataccaggtttgtcagacatggctgcggaggaagccgtagggagcaatccaaagtgagcgtgagaaacagccacctgtccgggtctctgtactgggaactgtgcttctgccctccgacccgcaacctgagaaagcccttctcgccctccgtcccctgctgtttcgcgctcatgagcttcctctttccacagaaaaagaggcgacacctttcctcaaatatttgaaaacgcaggggaccaaagaggacagatccctctcaaagtggaatgttccggaataaaggaatttgacccctgtgaactgttaattacagcgtttaaaattaaaggctggcttggaagagaataggaaagccacttccgcgttcaagtggttaaaatcgggcaagaattcctaaaatggagcccaggtcgcaaaagcacttccattttgtagccacggcctctctgcaaacaacgcaggcctggtcctgcgcccgctttctagtcttctcacgtaggcggaggctgcagctggagcttgcgacaaccgccctaccagcttcctcgcccgcgccacactgcagcccagcacacaaagcgcggcccggaagctagtcctgccggcgctctcggcatttcggcatccctagcacacatgcctctgcaagaagggctgtgaaaatgtcacagcgcagcgccgccgctgccaggctgcacagatgcagcccgcagagccgtctgaggctgggagacggctcggggctcgggagatgagtgagcctcagaacaaaggatctgtctgttcccacatctcagcctccaagacaacgcacaatacctttgagagcaaacactaagaaatttttttttttttttttttttttttttttttttttttttttttttttttttttttttgagacggagactcgctctgtcgcccaggctggagtgcagtggcgggatttcggctcactgcaagctccgcctcccgggttcacgccattctcctgcctcagcctcccaagtagctgggactacaggcgcccgccactacgcccggctaattttttgtatttttagtagagacggggtttcaccgttttagccgggatggtcttcatctcctgacctcgtgatccgcccgcctcggcacactaagaaattttaacacgaaccctccgagcggcagtacataaacgccggtttatttgctttgttcttaaatcatcgatttccccaccgcattacccagcatctagggtgtttcgcatccccacctccccaaggcagctttcccggggataatcactcggcttggctttaggggatgtcttcacagggacgcgaataatgaaggggcaagcgcggcatgaaggggagggtagaaggagtaaggatgcaggggccctggggcttacctaagccaggcgcgtaagggagtgaaatctagtctacacagtgtccaccgcggagttgccaggacgggatgggcaggcgctactttatagccctcctatgtaaatgagttgatgtcacccacaggcccgcttaagtctttcgctccacgtctcggaagggcgtctgaaagctgccgggcggttggggagccccaacgccaccctaggtgcaccattgccccctaaccacaacgatggcgaaagataaaatgagcaaagcaccttccaacacttccttcaaaacgcattttccccttttacaacaggagcgtaaaaattgctcttgcggactggtgcatattatttaagggtcggagtaatacctagggtaacaggcattgttttactgagaaactggctttacctactgaggacatacgcacgcaaaggcgcggtgtccctccctggagtgcctggtcagctacagggatatcattcctgtgactcagctttcagaccagtggaggcctatgcgccccaccccggacctcttcctcactggcgttcctcttgcctttggcagaaggtaaagcaaccctcagtgattttaaaagagaaactttcagccttgtaacatccatattgtttcattagcataatttttgtaggcactcaacagtaatattgagtgtagggtaatattgtactctacactctgggtgtagagtaatttgtctggagtttatagctccctcttagcaaaataagtcaatttgaagctctgccattgacttactgcctgacaatgaggaaattcttttccttcttgttttttatattcataaattgtcagagtgattgctaagaaggactgtgttgaattccaaagactatagtcccattacctctaacatcataagataaaattcaaaaatcaaactatatttttaagggagtgcttccagcactaggacatctccgaagtgcaactgcatctggaaatataaaagatttgggtagagggaagcacttttcaaaatgacacctgactgtgaattccagtgacccacttgctaatggaaattagttacaaataccatgtcctgcgcctgcaaatggcgtgtgaaaggaagacccgccggttacaaagaggcctaactgtgattatttctgagacaaggcagtgtgtaaaatatttctttttttctgtaacctgagcaaatgttttttagaaatccgttgctaattattttgatggcacaggtttttgtgtcgctggggattagagtcacagacttccccgtttcttcaattgcttgacttcctttttcctagggaggaagaaggtggggatgagcagaggcaggtgccatctggttccctaggtaatgttctgctgggtggctgc

SEQ ID NO: 1564468 - DNA, 4001 bp, Homo sapiens
cctcagtttctacatttctgaaatgagcacccaggctccctgaataggcaggtgtgtcaacccccttatactgcgcatcaaacagctccagtgccaactaacggctcacctgacgtctctgttccctcttcaggtggcttcatcctcttgtagtattgcaggggattgcgccacaggtccttacataggatctgtcaggggactcaatcgggaaaggcctcatcagggctcagaaaggtgacccaagcagctgggaacacacggggtcattcctcatgtttcccagtgaggactcacctcagcaatcttgttagatcctgcgaagttgtggtcagagaaccagttgaagaagttaaggctgctgttgtggtgtctgcggcgataggcctccacttcataatccggataccactcaattggagtggaatgagaagccctgtattctacagagacaggagtttttgtgggaagggggctggatcccgttggcaatgatccacccaccatcttccttccactacccatcctgggagccacctgtcacctgtgatgttcaccagatattccttggtaatcactttattctggaagtaggggttactccgaaagaacaacatgatcttgcagagatgaacaggatgcttctcttctcccacctgtcaggacaaggtggagaaagcttagataggttttcgggtgaggtgctcactcttgcttacaggaatgaattatttcccttaccctcccccgctaaaccctctagccccagtcttcctggcctcacctccaggctgaccatgtagctcagcatgtcttcatcttcgtcagtgatcagggctgacatctgggggtggtttgcaatctgatttaggtcaaagagactttacacacgatggaagggaaagcgaggagcaacagggaagaaggcctaagagcacccagaggctggggtaggggatttctcagatctgcttccatgtatgatctcctttcgcctccccgtccccgtaaactaaggcctcctgtgttcacagagggtgtatgattctgaggctgactgcactgacatggggaggcgcgatttgcagagacttgctggtgtctgaggagtggcagaatctgcttatagccgaagacgcccagtcccagatcggactagcaaggggcagcaatcacactcccttaaaaatagcttcattcactgaaaaacctcttccgctctgaactcgcttctgctcttcaaaaagatgccccaaacgtctgctgctcggcatcaccaagggtttctctgccgcatgcaggacaatagtacccacgcctgctccggctttccacagccacactggtccgtggcaactcccctttgttccccaaagagtcacatcgacgccgagctgcccatcggtcacttacacttccccgagagcacctctccactagaaaggccgaagaaacactgagaaggatacaacattggcccagaagccagggacgctctggatgacggcgcctctgcggtctaggtggggcttgcgcctccgctccatcttttcccgctgccgagaaaaggccttcctggcttgggcattaaccggctccagctccacctgaacggccagcagctcctccggtgcagactctggggtcatgggcccagggccaggcacagcctgctgtgcccgctgggcctcctcccgccgctccacgaggccctcctcctccgccaccacctccacctccgccattatgtcatccaacagcagcaccgcctcctcccccaaagccgcctgctcactctccaccccggccgccccctcctgcacagcctccatcctgaaggcggtgccctccttggcactcgcacacaccaaggcctgtgctgcccgacccacgccacagaaaccctgccgcagcctctctggcacccggtaggtcagcgagccctcagggcgcatgcgccgggcttccaggcgccccctaagggactgcgcgcgaagggccggggggccgcacccaggccgacttcctcccgtcgtggccaatcaatgggagggcggtgggcgtctccctgggcggcacagccactggcgggcctgcatctccagcccccccacccccctgccttccctgcccaagcctcctccgagaagcccttggagcttgtgccgggtagctaggcatccgggcacacgcgggctgcgtggcctttggaattgtgggcatggcagccctgtgccctgacatcctcagtgtggcaagccatgaacatctctatgtgtcatgaacacaggaaacatctctcttcgttaggcaggccaggtagatggtacggaggtaatacagcagatgcagagaactctctctggttgctggggctagggcggcaggggtgtcctgggggaagtgatcggggcgggcacgtgggaggaaagtcgcctgccggtgctgaggtggaattgatctgctgtagaggccagagccccggcacacactctcacaggtcgaggcaaatagaggctccgagtaccatgcttcctccctgaggatgctgtactccaaggagcattccaaagggcctcttgtcctatgccctgggcacaccagaggccagccgccaggttggccattgtcggcctgcgcgcacgctgttgtgcgctgccttgacgacccagaggctcccgcacccgcagcagcggttgcggtgcctgttggtggggctctgcaagcccagggccggggcctctggctcccgagctcctgtgcgcagttgagcctgctggggaccggagccctttggccagtgcgggatctgcgggtccagcggacgtcctcaggaaacctgggtccacgtaggtgtgggaccaggttcacagcagggcgacgcgtgggtcttgcagggagcgggtctgctggggagcgggcccccagagcctacgggtgcggggcatgggctgggctgggctgggctgcgcaggcccagggtctgtgggagcacccaggagaaaaccgtgttcaggctggaggcaatgctggagaggacggccggggtacagagcaaggaggcggccttggaagaggaggcggtgctgaaggtggaagacatcatggctgaggtggaggtggtggttgaggtggagcccgacgtggggtggcagaaggagggccagcgggcacagcctggccctggaccgagcacaccggggccgtcaatggactcgctggaggtccttcacttggagctgggctccgtgaatgccccaggccacagagcatctccgccttgtgagccagagccatatccttgcggctgccgatttgggatggcgggcagcaggggatagtcatcgggcctcggggggtatgggggctgtttggggggaggagccaggtgggaggcacgtggggtcagccaggaggcaggggatgggggacagcgtgggagccgaggccacgttcccgcagctgtgagggcagctcgcttgtagcagccctgggagcacgtggtagggaaggggagccagggccagcactgacaagggagaatcgcggcgccaaggtccctttgcgcacagcccaaattcgaaggacgcgtttccctgggaacgtccctggaggacggggaatctgtatgccattaccagccattgaaccacccctgctctcggtgcctgtttccagcaggctcaccccagaaacacaaggtgcttaagacgggttcgcggcgcatggggctgccgaccacctgacggcgggcaccagctccgcagatgcgcattcatccaactgcaggcgctgcactcaaaggcgtgtaggccctgagcctgtataacttcctatggacccacgcaattcccttggagagcgccaggcacgaccctgctgtggcttctaactacaaggcttccctcaggtggacaggcccacccctcagggagactaggataagaggacaccacacacccggacatcagcggagcatgtccagcacccagcacacaaag

SEQ ID NO: 1564469 - DNA, 4001 bp, Homo sapiens
gcctcaatttctacatttctgaaatgagcacccaggctccctgaataggcaggtgtgtcaacccccttatactgggcatcaaacagctccagtgccaactaacggctcacctgacgtctctgttccctcttcaggtggcttcatcctcttgtagtattgcaggggattgcgccacaggtccttacataggatctgtcaggggactcaatcgggaaaggcctcatcagggctcagaaaggtgacccaagcagctgggaacacatggggtcattcctcatgtttcccagtgaggactcacctcagcaatcttgttagatcctgcgaagttgtggtcagagaaccagttgaagaagttaaggctgctgttgtggtgtctgcggcgataggcctccacttcataatccggataccactcaattggagtggaatgagaagccctgtattctacagagacaggagtttttgtgggaagggggctggatcccgttggcaatgatccacccaccatcttccttccactacccatcctgggagccacctgtcacctgtgatgttcaccagatattccttggtaatcactttattctggaagtaggggttactccgaaagaacaacatgatcttgcagagatgaacaggatgcttctcttcttccacctgtcaggacaaggtggagaaagcttagataggttttcgggtgaggtgctcactcttgcttacaggaatgaattatttcccttaccctcccccgctaaaccctctagccccagtcttcctggcctcacctccaggctgaccatgtagctcagcatgtcttcatcttcgtcagtgatcagggctgacatctgggggtggtttgcaatctgatttaggtcaaagagactttacacacgatggaagggaaagcgaggagcaacagggaagaaggcctaagagcacccagaggctggggtaggggatttctcagatctgcttccatgtatgatctcctttcgcctccccctccccgtaaactaaggcctcctgtgttcacagagggtgtatgattctgaggctgactgcactgacatggggaggcgcgatttgcagagacttgctggtgtctgaggagtggcagaatctgcttatagccgaagacgcccagtcccagatcggactagcaaggggcagcaatcacactcccttaaaaatagcttcattcactgaaaaacctcttccgctctgaactcgcttctgctcttcaaaaagatgccccaaacgtctgctgctcggcatcaccaagggtttctctgccgcatgcaggacaatagtacccacgcctgctccggctttccacagccacactggtccgtggcaactcccctttgttccccaaagagtcacatcgacgccgagctgcccatcggtcacttacacttccccgagagcacctctccactagaaaggccgaagaaacactgagaaggatacaacattggcccagaagccagggacgctctggatgacggcgcctctgcggtctaggtggggcttgcgcctccgctccatcttttcccgctgccgagaaaaggccttcctggcttgggcattaaccggctccagctccacctgaacggccagcagctcctccagtgcagactctggggtcatgggcccagggccaggcacagcctgctgtgcccgctgggcctcctcccgccgctccacgaggccctcctcctccgccaccacctccacctccgccaccacctccacctccgccattatgtcatccaacagcagcaccgcctcctcccccaaagccgcctgctcactctccaccccggccgccccctcctgtacagcctccatcctgaaggcggtgccctccttggcactcgcacacaccaaggcctgtgctgcccgacccacgccacagaaaccctgccgcagcctctctggcacccggtaggtcagcgagccctcagggcgcatgcgccgggcttccaggcgccccctaagggactgcgcgcgaagggccggggggccgcacccaggccgacttcctcccgtcgtggccagtcaatgggagggcggtgggcgtctccctgggcggcacagccactggcgggcctgcatctccagcccccccaacccccgccttccctgcccaagcctcctccgagaagcccttggagcttgtgccgggtagctaggcatccgggcacacgcgggctgcgtggcctttggaattgtgggcatggcagccctgtgccctgacatcctcagtgtggcaagccatgaacatctctatgtgtcatgaacacaggaaacatctctcttcgttaggcaggccaggtagatggtacggaggtaatacagcagatgcagagaactctctctggttgctggggctagggcggcaggggtgtcctgggggaagtgatcggggcgggcacgtgggaggaaagtcgcctgccggtgctgaggtggaattgatctgctgtagaggccagagccccggcacacactctcacaggtcgaggcaaatagaggctccgagtaccatgcttcctccctgaggatgctgtactccaaggagcattccaaagggcctcttgtcctatgccctgggcacaccagaggccagccgccagggttggccattgtcggcctgcgcgcacgctgttgtgcgctgccttgacgacccagaggctcccgcacccgcagcagcggttgcggtgcctgttggtggggctctgcaagcccagggccggggcctctggctcccgagctcctgtgcgcagttgagcctgctggggaccggagccctttggccagtgcgggatctgcgggtccagcggagctcctcaggaaacctgggtccacgtaggtgtgggaccaggttcacagcagggcgacgcccgtgggtcttgcagggagcgggtctgctggggagcgggcccccagagcctacgggtgcggggcatgggctgggctgggctgggctgcgcaggcccagggtctgtgggagcacccaggagaaaaccgtgttcaggctggaggcaatgctggagaggacggccggggtacagagcaaggaggcggccttggaagaggaggcggtgctgaaggtggaagacatcatggctgaggtggaggtggtggttgaggtggagcccgacgtggggtggcagaaggagggccagcgggcacagcctggccctggaccgagcacaccggggccgtcaatggactcgctggaggtccttcacttggagctgggctccgtgaatgccccaggccacagagcatctccgccttgtgagccagagccatatccttgcggctgccgatttgggatggcgggcagcaggggatagtcatcgggcctcggggggtatgggggctgtttggggggaggagccaggtgggaggcgcgtggggtcagccaggaggcaggggatgggggacagcgtgggagccgaggccacgttcccgcagctgtgagggcagctcgcttgtagcagccctgggagcacgtggtagggaaggggagccagggccagcactgacaagggagaatcgcggcgccaaggtccctttgcgcacagcccaaattcgaaggacacgtttccctgggaacgtccctggaggacggggaatctgtatgccattaccagccattgaaccacccctgctctcggtgcctgtttccagcaggctcaccccagaaacacaaggtgcttaagacgggttcgcggcgcatggggctgccgaccacctgacggcgggcaccagctccgcagatgcgcattcttccaactgcaggcgctgcactcaaaggggtgtaggccctgagcctgtataacttcctctggacccacgcaattcccttggagagcgccaggcacgaccctgctgtggcttctaactacaaggcttccctcaggtggacaggcccacccctcagggagactaggataagaggacaccacacacccggacatcagcggagcatg

SEQ ID NO: 1564470 - DNA, 4001 bp, Homo sapiens
tctacatgtacgaaaggagcctcaatttctacatttctgaaatgagcacccaggctccctgaataggcaggtgtgtcaacccccttatactgggcatcaaacagctccagtgccaactaacggctcacctgacgtctctgttccctcttcaggtggcttcatcctcttgtagtattgcaggggattgcgccacaggtccttacataggatctgtcaggggactcaatcgggaaaggcctcatcagggctcagaaaggtgacccaagcagctgggaacacacggggtcattcctcatgtttcccagtgaggactcacctcagcaatcttgttagatcctgcgaagttgtggtcagagaaccagttgaagaagttaaggctgctgttgtggtgtctgcggcgatacgcctccacttcataatccggataccactcaattggagtggaatgagaagccctgtattctacagagacaggagtttttgtgggaagggggctggatcccgttggcaatgatccacccaccatcttccttccactacccatcctgggagccacctgtcacctgtgatgttcaccagatattccttggtaatcactttattctggaagtaggggttactccgaaagaacaacatgatcttgcagagatgaacaggatgcttctcttcttccacctgtcaggacaaggtggagaaagcttagataggttttcgggtgaggtgctcactcttgcttacaggaatgaattatttcccttaccctcccccgctaaaccctccagccccagtcttcctggcctcacctccaggctgaccatgtagctcagcatgtcttcatcttcgtcagtgatcagggctgacatctgggggtggtttgcaatctgatttaggtcaaagagactttacacacgatggaagggaaagcgaggagcaacagggaagaaggcctaagagcacccagaggctggggtaggggatttctcagatctgcttccatgtatgatctcctttcgcctccccctccccgtaaactaaggcctcctgtgttcacagagggtgtatgattctgaggctgactgcactgacatggggaggcgcgatttgcagagacttgctggtgtctgaggagtggcagaatctgcttatagccgaagacgcccagtcccagatcggactagcaaggggcagcaatcacactcccttaaaaatagcttcattcactgaaaaacctcttccgctctgaactcgcttctgctcttcaaaaagatgccccaaacgtctgctgctcggcatcaccaagggtttctctgccgcatgcaggacaatagtacccacgcctgctccggctttccacagccacattggtccgtggcaactcccctttgttccccaaagagtcacatcgacgccgagctgcccatcggtcacttacacttccccgagagcacctctccactagaaaggccgaagaaacactgagaaggatacaacattggcccagaagccagggacgctctggatgacggcgcctctgcggtctaggtggggcttgcgcctccgctccatcttttcccgctgccgagaaaaggccttcctggcttgggcattaaccggctccagctccacctgaacggccagcagctcctccagtgcagactctggggtcatgggcccagggccaggcacagcctgctgtgcccgctgggcctcctcccgccgctccacgaggccctcctcctccgccaccacctccacctccgccattatgtcatccaacagcagcaccgcctcctcccccaaagccgcctgctcactctccaccccggccgccccctcctgtacagcctccatcctgaaggcggtgccctccttggcactcgcacacaccaaggcctgtgctgcccgacccacgccacagaaaccctgccgcagcctctctggcacccggtaggtcagcgagccctcagggcgcatgcgccgggcttccaggcgccccctaagggactgcgcgcgaagggccggggggccgcacccaggccgacttcctcccgtcgtggccagtcaatgggagggcggtgggcgtctccctgggcggcacagccactggcgggcctgcatctccagcccccccaccccccgccttccctgcccaagcctcctccgagaagcccttggagcttgtgccgggtagctaggcatccgggcacacgcgggctgcgtggcctttggaattgtgggcatggcagccctgtgccctgacatcctcagtgtggcaagccatgaacatctctatgtgtcatgaacacaggaaacatctctcttcgttaggcaggccaggtagatggtacggaggtaatacagcagatgcagagaactctctctggttgctggggctagggcggcaggggtgtcctgggggaagtgatcggggcgggcacgtgggaggaaagtcgcctgccggtgctgaggtggaattgatctgctgtagaggccagagccccggcacacactctcacaggtcgaggcaaatagaggctccgagtaccatgcttcctccctgaggatgctgtactccaaggagcattccaaagggcctcttgtcctatgccctgggcacaccagaggccagccgccagggttggccattgtcggcctgcgcgcacgctgttgtgcgctgccttgacgacccagaggctcccgcacccgcagcagcggttgcggtgcctgttggtggggctctgcaagcccagggccggggcctctggctcccgagctcctgtgcgcagttgagcctgctggggaccggagccctttggccagtgcgggatctgcgggtccagcggagctcctcaggaaacctgggtccacgtaggtgtgggaccaggttcacagcagggcgacgcccgtgggtcttgcagggagcgggtctgctggggagcgggcccccagagcctacgggtgcggggcatgggctgggctgggctgggctgcgcaggcccagggtctgtgggagcacccaggagaaaaccgtgttcaggctggaggcaatgctggagaggacggccggggtacagagcaaggaggcggccttggaagaggaggcggtgctgaaggtggaagacatcatggctgaggtggaggtggtggttgaggtggagcccgacgtggggtggcagaaggagggccagcgggcacagcctggccctggaccgagcacaccggggccgtcaatggactcgctggaggtccttcacttggagctgggctccgtgaatgccccaggccacagagcatctccgccttgtgagccagagccatatccttgcggctgccgatttgggacggcgggcagcaggggatagtcatcgggcctcggggggtatgggggctgtttggggggaggagccaggtgggaggcacgtggggtcagccaggaggcaggggatgggggacagcgtgggagccgaggccacgttcccgcagctgtgagggcagctcgcttgtagcagccctgggagcacgtggtagggaaggggagccagggccagcactgacaagggagaatcgcggcgccaaggtccctttgcgcacagcccaaattcgaaggacgcgtttccctgggaacgtccctggaggacggggaatctgtatgccattaccagccattgaaccacccctgctctcggtgcctgtttccagcaggctcaccccagaaacgcaaggtgcttaagacgggttcgcggcgcatggggctgccgaccacctgacggcgggcaccagctccgcagatgcgcattcatccaactgcaggcgctgcactcaaaggcgtgtaggccctgagcctgtataacttcctctggacccacgcaattcccttggagagcgccaggcacgaccctgctgtggcttctaactacaaggcttccctcaggtggacaggcccacccctcagggagactaggataagaggacaccacacacccggacatcagcggagcatg

SEQ ID NO: 1564471 - DNA, 4001 bp, Homo sapiens
gcctcaatttctacatttctgaaatgagcacccaggctccctgaataggcaggtgtgtcaacccccttatactgggcatcaaacagctccagtgccaactaacggctcacctgacgtctctgttccctcttcaggtggcttcatcctcttgtagtattgcaggggattgcgccacaggtccttacataggatctgtcaggggactcaatcgggaaaggcctcatcagggctcagaaaggtgacccaagcagctgggaacacatggggtcattcctcatgtttcccagtgaggactcacctcagcaatcttgttagatcctgcgaagttgtggtcagagaaccagttgaagaagttaaggctgctgttgtggtgtctgcggcgataggcctccacttcataatccggataccactcaattggagtggaatgagaagccctgtattctacagagacaggagtttttgtgggaagggggctggatcccgttggcaatgatccacccaccatcttccttccactacccatcctgggagccacctgtcacctgtgatgttcaccagatattccttggtaatcactttattctggaagtaggggttactccgaaagaacaacatgatcttgcagagatgaacaggatgcttctcttcttccacctgtcaggacaaggtggagaaagcttagataggttttcgggtgaggtgctcactcttgcttacaggaatgaattatttcccttaccctcccccgctaaaccctctagccccagtcttcctggcctcacctccaggctgaccatgtagctcagcatgtcttcatcttcgtcagtgatcagggctgacatctgggggtggtttgcaatctgatttaggtcaaagagactttacacacgatggaagggaaagcgaggagcaacagggaagaaggcctaagagcacccagaggctggggtaggggatttctcagatctgcttccatgtatgatctcctttcgcctccccctccccttaaactaaggcctcctgtgttcacagagggtgtatgattctgaggctgactgcactgacatggggaggcgcgatttgcagagacttgctggtgtctgaggagtggcagaatctgcttatagccgaagacgcccagtcccagatcggactagcaaggggcagcaatcacactcccttaaaaatagcttcattcactgaaaaacctcttccgctctgaactcgcttctgctcttcaaaaagatgccccaaacgtctgctgctcggcatcaccaagggtttctctgccgcatgcaggacaatagtacccacgcctgctccggctttccacagccacactggtccgtggcaactcccctttgttccccaaagagtcacatcgacgccgagctgcccatcggtcacttacacttccccgagagcacctctccactagaaaggccgaagaaacactgagaaggatacaacattggcccagaagccagggacgctctggatgacggcgcctctgcggtctagctggggcttgcgcctccgctccatcttttcccgctgccgagaaaaggccttcctggcttgggcattaaccggctccagctccacctgaacggccagcagctcctccagtgcagactctggggtcatgggcccagggccaggcacagcctgctgtgcccgctgggcctcctcccgccgctccacgaggccctcctcctccgccaccacctccacctccgccaccacctccacctccgccattatgtcatccaacagcagcaccgcctcctcccccaaagccgcctgctcactctccaccccggccgccccctcctgtacagcctccatcctgaaggcggtgccctccttggcactcgcacacaccaaggcctgtgctgcccgacccacgccacagaaaccctgccgcagcctctctggcacccggtaggtcagcgagccctcagggcgcatgcgccgggcttccaggcgccccctaagggactgcgcgcgaagggccggggggccgcacccaggccgacttcctcccgtcgtggccagtcaatgggagggcggtgggcgtctccctgggcggcacagccactggcgggcctgcatctccagcccccccaccccccgccttccctgcccaagcctcctccgagaagcccttggagcttgtgccgggtagctaggcatccgggcacacgcgggctgcgtggcctttggaattgtgggcatggcagccctgtgccctgacatcctcagtgtggcaagccatgaacatctctatgtgtcatgaacacaggaaacatctctcttcgttaggcaggccaggtagatggtacggaggtaatacagcagatgcagagaactctctctggttgctggggctagggcggcaggggtgtcctgggggaagtgatcggggcgggcacgtgggaggaaagtcgcctgccggtgctgaggtggaattgatctgctgtagaggccagagccccggcacacactctcacaggtcgaggcaaatagaggctccgagtaccatgcttcctccctgaggatgctgtactccaaggagcattccaaagggcctcttgtcctatgccctgggcacaccagaggccagccgccagggttggccattgtcggcctgcgcgcacgctgttgtgcgctgccttgacgacccagaggctcccgcacccgcagcagcggttgcggtgcctgttggtggggctctgcaagcccagggccggggcctctggctcccgagctcctgtgcgcagttgagcctgctggggaccggagccctttggccagtgcgggatctgcgggtccagcggagctcctcaggaaacctgggtccacgtaggtgtgggaccaggttcacagcagggcgacgcccgtgggtcttgcagggagcgggtctgctggggagcgggcccccagagcctacgggtgcggggcatgggctgggctgggctgggctgcgcaggcccagggtctgtgggagcacccaggagaaaaccgtgttcaggctggaggcaatgctggagaggacggccggggtacagagcaaggaggcggccttggaagaggaggcggtgctgaaggtggaagacatcatggctgaggtggaggtggtggttgaggtggagcccgacgtggggtggcagaaggagggccagcgggcacagcctggccctggaccgagcacaccggggccgtcaatggactcgctggaggtccttcacttggagctgggctccgtgaatgccccaggccacagagcatctccgccttgtgagccagagccatatccttgcggctgccgatttgggatggcgggcagcaggggatagtcatcgggcctcggggggtatgggggctgtttgcggggaggagccaggtgggaggcacgtggggtcagccaggaggcaggggatgggggacagcgtgggagccgaggccacgttcccgcagctgtgagggcagctcgcttgtagcagccctgggagcacgtggtagggaaggggagccagggccagcactgacaagggagaatcgcggcgccaaggtccctttgcgcacagcccaaattcgaaggacgcgtttccctgggaacgtccctggaggacggggaatctgtatgccattaccagccattgaaccacccctgctctcggtgcctgtttccagcaggctcaccccagaaacacaaggtgcttaagacgggttcgcggcgcatggggctgccgaccacctgacggcgggcaccagctccgcagatgcgcattcatccaactgcaggcgctgcactcaaaggcgtgtaggccctgagcctgtataacttcctctggacccacgcaattcccttggagagcgccaggcacgaccctgctgtggcttctaactacaaggcttccctcaggtggacaggcccacccctcagggagactaggataagaggacaccacacacccggacatcagcggagcatg

SEQ ID NO: 1564472 - DNA, 4001 bp, Homo sapiens
tctacatgtacgaaaggagcctcaatttctacatttctgaaatgagcacccaggctccctgaataggcaggtgtgtcaacccccttatactgggcatcaaacagctccagtgccaactaacggctcacctgacgtctctgttccctcttcaggtggcttcatcctcttgtagtattgcaggggattgcgccacaggtccttacataggatctgtcaggggactcaatcgggaaaggcctcatcagggctcagaaaggtgacccaagcagctgggaacacacggggtcattcctcatgtttcccagtgaggactcacctcagcaatcttgttagatcctgcgaagttgtggtcagagaaccagttgaagaagttaaggctgctgttgtggtgtctgcggcgataggcctccacttcataatccggataccactcaattggagtggaatgagaagccctgtattctacagagacaggagtttttgtgggaagggggctggatcccgttggcaatgatccacccaccatcttccttccactacccatcctgggagccacctgtcacctgtgatgttcaccagatattccttggtaatcactttattctggaagtaggggttactccgaaagaacaacatgatcttgcagagatgaacaggatgcttctcttcttccacctgtcaggacaaggtggagaaagcttagataggttttcgggtgaggtgctcactcttgcttacaggaatgaattatttcccttaccctcccccgctaaaccctctagccccagtcttcctggcctcacctccaggctgaccatgtagctcagcatgtcttcatcttcgtcagtgatcagggctgacatctgggggtggtttgcaatctgatttaggtcaaagagactttacacacgatggaagggaaagcgaggagcaacagggaagaaggcctaagagcacccagaggctggggtaggggatttctcagatctgcttccacgtatgatctcctttcgcctccccctccccgtaaactaaggcctcctgtgttcacagagggtgtatgattctgaggctgactgcactgacatggggaggcgcgatttgcagagacttgctggtgtctgaggagtggcagaatctgcttatagccgaagacgcccagtcccagatcggactagcaaggggcagcaatcacactcccttaaaaatagcttcattcactgaaaaacctcttccgctctgaactcgcttctgctcttcaaaaagatgccccaaacgtctgctgctcggcatcaccaagggtttctctgccgcatgcaggacaatagtacccacgcctgctccggctttccacagccacactggtccgtggcaactcccctttgttccccaaagagtcacatcgacgccgagctgcccatcggtcacttacacttccccgagagcacctctccactagaaaggccgaagaaacactgagaaggatacaacattggcccagaagccagggacgctctggatgacggcgcctctgcggtctaggtggggcttgcgcctccgctccatcttttcccgctgccgagaaaaggccttcctggcttgggcattaaccggctccagctccacctgaacggccagcagctcctccagtgcagactctggggtcatgggcccagggccaggcacagcctgctgtgcccgctgggcctcctcccgccgctccacgaggccctcctcctccgccaccacctccacctccgccattatgtcatccaacagcagcaccgcctcctcccccaaagccgcctgctcactctccaccccggccgccccctcctgtacagcctccatcctgaaggcggtgccctccttggcactcgcacacaccaaggcctgtgctgcccgacccacgccacagaaaccctgccgcagcctctctggcacccggtaggtcagcgagccctcagggcgcatgcgccgggcttccaggcgccccctaagggactgcgcgcgaagggccggggggccgcacccaggccgacttcctcccgtcgtggccagtcaatgggagggcggtgggcgtctccctgggcggcacagccactggcgggcctgcatctccagcccccccaccccccgccttccctgcccaagcctcctccgagaagcccttggagcttgtgccgggtagctaggcatccgggcacacgcgggctgcgtggcctttggaattgtgggcatggcagccctgtgccctgacatcctcagtgtggcaagccatgaacatctctatgtgtcatgaacacaggaaacatctctcttcgttaggcaggccaggtagatggtacggaggtaatacagcagatgcagagaactctctctggttgctggggcaagggcggcaggggtgtcctgggggaagtgatcggggcgggcacgtgggaggaaagtcgcctgccggtgctgaggtggaattgatctgctgtagaggccagagccccggcacacactctcacaggtcgaggcaaatagaggctccgagtaccatgcttcctccctgaggatgctgtactccaaggagcattccaaagggcctcttgtcctatgccctgggcacaccagaggccagccgccagggttggccattgtcggcctgcgcgcacgctgttgtgcgctgccttgacgacccagaggctcccgcacccgcagcagcggttgcggtgcctgttggtggggctctgcaagcccagggccggggcctctggctcccgagctcctgtgcgcagttgagcctgctggggaccggagccctttggccagtgcgggatctgcgggtccagcggagctcctcaggaaacctgggtccacgtaggtgtgggaccaggttctcagcagggcgacgcccgtgggtcttgcagggagcgggtctgctggggagcgggcccccagagcctacgggtgcggggcatgggctgggctgggctgggctgcgcaggcccagggtctgtgggagcacccaggagaaaaccgtgttcaggctggaggcaatgctggagaggacggccggggtacagagcaaggaggcggccttggaagaggaggcggtgctgaaggtggaagacatcatggctgaggtggaggtggtggttgaggtggagcccgacgtggggtggcagaaggagggccagcgggcacagcctggccctggaccgagcacaccggggccgtcaatggactcgctggaggtccttcacttggagctgggctccgtgaatgccccaggccacagagcatctccgccttgtgagccagagccatatccttgcggctgccgatttgggatggcgggcagcaggggatagtcatcgggcctcggggggtataggggctgtttggggggaggagccaggtgggaggcacgtggggtcagccaggaggcaggggatgggggacagcgtgggagccgaggccacgttcccgcagctgtgagggcagctcgcttgtagcagccctgggagcacgtggtagggaaggggagccagggccagcactgacaagggagaatcgcggcgccaaggtccctttgcgcacagcccaaattcgaaggacgcgtttccctgggaacgtccctggaggacggggaatctgtatgccattaccagccattgaaccacccctgctctcggtgcctgtttccagcaggctcaccccagaaacacaaggtgcttaagacgggttcgcggcgcatggggctgccgaccacctgacggcgggcaccagctccgcagatgcgcattcatccaactgcaggcgctgcactcaaaggcgtgtaggccctgagcctgtataacttcctctggacccacgcaattcccttggagagcgccaggcacgaccctgctgtggcttctaactacaaggcttccctcaggtggacaggcccacccctcagggagactaggataagaggacaccacacacccggacatcagcggagcatg

SEQ ID NO: 1564473 - DNA, 4001 bp, Homo sapiens
aaggagcctcaatttctacatttctgaaatgagcacccaggctccctgaataggcaggtgtgtcaacccccttatactgggcatcaaacagctccagtgccaactaacggctcacctgacgtctctgttccctcttcaggtggcttcatcctcttgtagtattgcaggggattgcgccacaggtccttacataggatctgtcaggggactcaatcgggaaaggcctcatcagggctcagaaaggtgacccaagcagctgggaacacacggggtcattcctcatgtttcccagtgaggactcacctcagcaatcttgttagatcctgcgaagttgtggtcagagaaccagttgaagaagttaaggctgctgttgtggtgtctgcggcgataggcctccacttcataatccggataccactcaattggagtggaatgagaagccctgtattctacagagacaggagtttttgtgggaagggggctggatcccgttggcaatgatccacccaccatcttccttccactacccatcctgggagccacctgtcacctgtgatgttcaccagatattccttggtaatcactttattctggaagtaggggttactccgaaagaacaacatgatcttgcagagatgaacacgatgcttctcttcttccacctgtcaggacaaggtggagaaagcttagataggttttcgggtgaggtgctcactcttgcttacaggaatgaattatttcccttaccctcccccgctaaaccctccagccccagtcttcctggcctcacctccaggctgaccatgtagctcagcatgtcttcatcttcgtcagtgatcagggctgacatctgggggtggtttgcaatctgatttaggtcaaagagactttaatggaagggaaagcgaggagcaacagggaagaaggcctaagagcacccagaggctggggtaggggatttctcagatctgcttccatgtatgatctcctttcgcctccccgtccccgtaaactaaggcctcctgtgttcacagagggtgtatgattctgaggctgactgcactgacatggggaggcgcgatttgcagagacttgctggtgtctgaggagtggcagaatctgcttatagccgaagacgcccagtcccagatcggactagcaaggggcagcaatcacactcccttaaaaatagcttcattcactgaaaaacctcttccgctctgaactcgcttctgctcttcaaaaagatgccccaaacgtctgctgctcggcatcaccaagggtttctctgccgcatgcaggacaatagtacccacgccttctccgcctttccacagccacattggtccgtggcaactcccctttgttccccaaagagtcacatcgacgccgagctgcccatcggtcacttacacttccccgagagcacctctccactagaaaggccgaagaaacactgagaaggatacaacattggcccagaagccagggacgctctggatgacggcgcctctgcggtctaggtggggcttgcgcctccgctccatcttttcccgctgccgagaaaaggccttcctggcttgggcattaaccggctccagctccacctgaacggccagcagctcctccagtgcagactctggggtcatgggcccagggccaggcacagcctgctgtgcccgctgggcctcctcccgccgctccacgaggccctcctcctccgccaccacctccacctccgccattatgtcatccaacagcagcaccgcctcctcccccaaagccgcctgctcactctccaccccggccgccccctcctgcacagcctccatcctgaaggcggtgccctccttggcactcgcacacaccaaggcctgtgctgcccgacccacgccacaggaaccctgccgcagcctctctggcacccggtaggtcagcgagccctcagggcgcatgcgccgggcttccaggcgccccctaagggactgcgcgcgaagagccggggggccgcacccaggccgacttcctcccgtcgtggccaatcaatggaagggcggtgggcgtctccctgggcggcacagccactggcgggcctgcatctccagcccccccaccccccgccttccctgcccaagcctcctccgagaagcccttggaacttgtgccgggtagctaggcgtccgggcacacgcgggctgcgtggcctttggaattgtgggcatggcagccctgtgccctgacatcctcagtgtggcaagccatgaacatctctatgtgtcatgaacacaggaaacatctctcttcattaggcaggccaggtagatggtacataaggaatattgcagatccagaggagaactttctctggttgctggggcgagggcggcgggggtggcctagcagaagtgagtcggggcgggtatgtgggaggaaagtcacctgcttgtgcagaggtggaattcgtctgcactgtaggctagaaccctggcatgtactctcgcaggtcgaggcaaatacaggctccgagtaccatgcttcctccctgaggatgctgtactccaaggagcattccaaagggcctctagtcctgtgccctgggcacaccagaggccagccgccagggttggccattgtcggcctgcgcgcacgctgttgtgcactgccttgacgacccagaggctcccgcacccgcagcagccgctgcggtgcctgctggtggggctctggaagcacagggcctcggcctctggcttctgagctcctatgcgcagttgaccctgctgtggtcctgagccccacggcgagtgcggccatctgcgggcccagcggggctcctcaggaaacctgggtccatgtaggtgtgggactaggttttcagcagggagaggcccgtgggtctttcacggagcgggcctcttggggagcagcccccagagcatagggataccggggatgtgctgggctgtgcaggccagggtctgtgggagcacccaggagggcaccgtgttcaggctggaggctctgctggagaggacggccggggtacagagcaaggaggcagccttggaagaggaggcggtgctgaaggtggaagacataatggctgaggtggaggtggtggttgaggaggagactgacgtggggtggcagaaggagggccagcgggcacagcttggccctggacccagcacacccaggccatcaatggactcgctggaggtccttcacttggaggtagactccgtgaatgcccctgtggcctgggcttctgggacagagccatatccttgcagctgccgattccagatggctggcagcaggggatgggcatcgggcttcgtgggggcatgggggctgttgggggaggagccaggaggaggcacatggggtgagccaggaggcaggggatgggggacaggatgggagccgaggtcacgttcctgcagctgtgagggcagcttgcttgtagcagcactgggagcactgggagcacgtggtagggaaggggagccgagcacagcactcacaagggagaatcgcggcgccagagtcccttcacgcacagcacaatgtcaaagggcatgtttccctgggaatgtcctggaggaaggggagtctgcatgacattgccagccattgaatcacccccgctctcagtgcccgtttccagaaggctcgccccagaaacacaaggtgcttaagactcgggttagcggtacatggggctgccgacctccacaaggcaggtactagctccccagatatgctttcttctgcctgccggcgctgcacccaaagggttatagcccctgagcgtatataacctcctttgcacccacccagtccccatggggagcgccaggaactaccctgcagccccttctaactacagggcttcctcaggcagacaggtccacccctcagggagactaggataagaagacaccacacacccggacatcagcagagcatgtccagcacccagcaagcaaaggcctcct

SEQ ID NO: 1564474 - DNA, 4001 bp, Homo sapiens
tgaaatgagcacccaggctccctgaataggcaggtgtgtcaacccccttatactgggcatcaaacagctccagtgccaactaacggctcacctgacgtctctgttccctcttcaggtggcttcatcctcttgtagtattgcaggggattgcgccacaggtccttacataggatctgtcaggggactcaatcgggaaaggcctcatcagggctcagaaaggtgacccaagcagctgggaacacatggggtcattcctcatgtttcccagtgaggactcacctcagcaatcttgttagatcctgcgaagttgtggtcagagaaccagttgaagaagttaaggctgctgttgtggtgtctgcggcgataggcctccacttcataatccggataccactcaattggagtggaatgagaagccctgtattctacagagacaggagtttttgtgggaagggggctggatcccgttggcaatgatccacccaccatcttccttccactacccatcctgggagccacctgtcacctgtgatgttcaccagatattccttggtaatcactttattctggaagtaggggttactccgaaagaacaacatgatcttgcagagatgaacaggatgcttctcttcttccacctgtcaggacaaggtggagaaagcttagataggttttcgggtgaggtgctcactcttgcttacaggaatgaattatttcccttaccctcccccgctaaaccctctagccccagtcttcctggcctcacctccaggctgaccatgtagctcagcatgtcttcatcttcgtcagtgatcagggctgacatctgggggtggtttgcaatctgatttaggtcaaagagactttacacacgatggaagggaaagcgaggagcaacagggaagaaggcctaagagcacccagaggctggggtaggggatttctcagatctgcttccatgtatgatctcctttcgcctccccctccccgtaaactaaggcctcctgtgttcacagagggtgtatgattctgaggctgactgcactgacatggggaggcgcgatttgcagagacttgctggtgtctgaggagtggcagaatctgcttatagccgaagacgcccagtcccagatcggactagcaaggggcagcaatcacactcccttaaaaatagcttcattcactgaaaaacctcttccgctctgaactcgcttctgctcttcaaaaagatgccccaaacgtctgctgctcggcatcaccaagggtttctctgccgcatgcaggacaatagtacccacgcctgctccggctttccacagccacactggtccgtggcaactcccctttgttccccaaagagtcacatcgacgccgagctgcccatcggtcacttacacttccccgagagcacctctccactagaaaggccgaagaaacactgagaaggatacaacattggcccagaagccagggacgctctggatgacggcgcctctgcggtctaggtggggcttgcgcctccgctccatcttttcccgctgccgagaaaaggccttcctggcttgggcattaaccggctccagctccacctgaacggccagcagctcctccagtgcagactctggggtcatgggcccagggccaggcacagcctgctgtgcccgctgggcctcctcccgccgctccacgaggccctcctcctccgccaccacctccacctccgccaccacctccacctccgccattatgtcatccaacagcagcaccgcctcctcccccaaagccgcctgctcactctccaccccggccgccccctcctgtacagcctccatcctgaaggcggtgccctccttggcactcgcacacaccaaggcctgtgctgcccgacccacgccacagaaaccctgccgcagcctctctggcacccggtaggtcagcgagccctcagggcgcatgcgccgggcttccaggcgccccctaagggactgcgcgcgaagggccggggggccgcacccaggccgacttcctcccgtcgtggccagtcaatgggagggcggtgggcgtctccctgggcggcacagccactggcgggcctgcatctccagcccccccaacccccgccttccctgcccaagcctcctccgagaagcccttggagcttgtgccgggtagctaggcatccgggcacacgcgggctgcgtggcctttggaattgtgggcatggcagccctgtgccctgacatcctcagtgtggcaagccatgaacatctctatgtgtcatgaacacaggaaacatctctcttcgttaggcaggccaggtagatggtacggaggtaatacagcagatgcagagaactctctctggttgctggggctagggcggcaggggtgtcctgggggaagtgatcggggcgggcacgtgggaggaaagtcgcctgccggtgctgaggtggaattgatctgctgtagaggccagagccccggcacacactctcacaggtcgaggcaaatagaggctccgagtaccatgcttcctccctgaggatgctgtactccaaggagcattccaaagggcctcttgtcctatgccctgggcacaccagaggccagccgccagggttggccattgtcggcctgcgcgcacgctgttgtgcgctgccttgacgacccagaggctcccgcacccgcagcagcggttgcggtgcctgttggtggggctctgcaagcccagggccggggcctctggctcccgagctcctgtgcgcagttgagcctgctggggaccggagccctttggccagtgcgggatctgcgggtccagcggagctcctcaggaaacctgggtccacgtaggtgtgggaccaggttcacagcagggcgacgcccgtgggtcttgcagggagcgggtctgctggggagcgggcccccagagcctacgggtgcggggcatgggctgggctgggctgggctgcgcaggcccagggtctgtgggagcacccaggagaaaaccgtgttcaggctggaggcaatgctggagaggacggccggggtacagagcaaggaggcggccttggaagaggaggcggtgctgaaggtggaagacatcatggctgaggtggaggtggtggttgaggtggagcccgacgtggggtggcagaaggagggccagcgggcacagcctggccctggaccgagcacaccggggccgtcaatggactcgctggaggtccttcacttggagctgggctccgtgaatgccccaggccacagagcatctccgccttgtgagccagagccatatccttgcggctgccgatttgggatggcgggcagcaggggatagtcatcgggcctcggggggtatgggggctgtttggggggaggagccaggtgggaggcgcgtggggtcagccaggaggcaggggatgggggacagcgtgggagccgaggccacgttcccgcagctgtgagggcagctcgcttgtagcagccctgggagcacgtggtagggaaggggagccagggccagcactgacaagggagaatcgcggcgccaaggtccctttgcgcacagcccaaattcgaaggacacgtttccctgggaacgtccctggaggacggggaatctgtatgccattaccagccattgaaccacccctgctctcggtgcctgtttccagcaggctcaccccagaaacacaaggtgcttaagacgggttcgcggcgcatggggctgccgaccacctgacggcgggcaccagctccgcagatgcgcattcttccaactgcaggcgctgcactcaaaggggtgtaggccctgagcctgtataacttcctctggacccacgcaattcccttggagagcgccaggcacgaccctgctgtggcttctaactacaaggcttccctcaggtggacaggcccacccctcagggagactaggataagaggacaccacacacccggacatcagcggagcatgtccagcacccagcacacaa

SEQ ID NO: 1564475 - DNA, 4001 bp, Homo sapiens
cctcaatttctacatttctgaaatgagcacccaggctccctgaataggcaggtgtgtcaacccccttatactgggcatcaaacagctccagtgccaactaacggctcacctgacgtctctgttccctcttcaggtggcttcatcctcttgtagtattgcaggggattgcgccacaggtccttacataggatctgtcaggggactcaatcgggaaaggcctcatcagggctcagaaaggtgacccaagcagctgggaacacacggggtcattcctcatgtttcccagtgaggactcacctcagcaatcttgttagatcctgcgaagttgtggtcagagaaccagttgaagaagttaaggctgctgttgtggtgtctgcggcgatacgcctccacttcataatccggataccactcaattggagtggaatgagaagccctgtattctacagagacaggagtttttgtgggaagggggctggatcccgttggcaatgatccacccaccatcttccttccactacccatcctgggagccacctgtcacctgtgatgttcaccagatattccttggtaatcactttattctggaagtaggggttactccgaaagaacaacatgatcttgcagagatgaacaggatgcttctcttcttccacctgtcaggacaaggtggagaaagcttagataggttttcgggtgaggtgctcactcttgcttacaggaatgaattatttcccttaccctcccccgctaaaccctccagccccagtcttcctggcctcacctccaggctgaccatgtagctcagcatgtcttcatcttcgtcagtgatcagggctgacatctgggggtggtttgcaatctgatttaggtcaaagagactttacacacgatggaagggaaagcgaggagcaacagggaagaaggcctaagagcacccagaggctggggtaggggatttctcagatctgcttccatgtatgatctcctttcgcctccccctccccgtaaactaaggcctcctgtgttcacagagggtgtatgattctgaggctgactgcactgacatggggaggcgcgatttgcagagacttgctggtgtctgaggagtggcagaatctgcttatagccgaagacgcccagtcccagatcggactagcaaggggcagcaatcacactcccttaaaaatagcttcattcactgaaaaacctcttccgctctgaactcgcttctgctcttcaaaaagatgccccaaacgtctgctgctcggcatcaccaagggtttctctgccgcatgcaggacaatagtacccacgcctgctccggctttccacagccacattggtccgtggcaactcccctttgttccccaaagagtcacatcgacgccgagctgcccatcggtcacttacacttccccgagagcacctctccactagaaaggccgaagaaacactgagaaggatacaacattggcccagaagccagggacgctctggatgacggcgcctctgcggtctaggtggggcttgcgcctccgctccatcttttcccgctgccgagaaaaggccttcctggcttgggcattaaccggctccagctccacctgaacggccagcagctcctccagtgcagactctggggtcatgggcccagggccaggcacagcctgctgtgcccgctgggcctcctcccgccgctccacgaggccctcctcctccgccaccacctccacctccgccattatgtcatccaacagcagcaccgcctcctcccccaaagccgcctgctcactctccaccccggccgccccctcctgtacagcctccatcctgaaggcggtgccctccttggcactcgcacacaccaaggcctgtgctgcccgacccacgccacagaaaccctgccgcagcctctctggcacccggtaggtcagcgagccctcagggcgcatgcgccgggcttccaggcgccccctaagggactgcgcgcgaagggccggggggccgcacccaggccgacttcctcccgtcgtggccagtcaatgggagggcggtgggcgtctccctgggcggcacagccactggcgggcctgcatctccagcccccccaccccccgccttccctgcccaagcctcctccgagaagcccttggagcttgtgccgggtagctaggcatccgggcacacgcgggctgcgtggcctttggaattgtgggcatggcagccctgtgccctgacatcctcagtgtggcaagccatgaacatctctatgtgtcatgaacacaggaaacatctctcttcgttaggcaggccaggtagatggtacggaggtaatacagcagatgcagagaactctctctggttgctggggctagggcggcaggggtgtcctgggggaagtgatcggggcgggcacgtgggaggaaagtcgcctgccggtgctgaggtggaattgatctgctgtagaggccagagccccggcacacactctcacaggtcgaggcaaatagaggctccgagtaccatgcttcctccctgaggatgctgtactccaaggagcattccaaagggcctcttgtcctatgccctgggcacaccagaggccagccgccagggttggccattgtcggcctgcgcgcacgctgttgtgcgctgccttgacgacccagaggctcccgcacccgcagcagcggttgcggtgcctgttggtggggctctgcaagcccagggccggggcctctggctcccgagctcctgtgcgcagttgagcctgctggggaccggagccctttggccagtgcgggatctgcgggtccagcggagctcctcaggaaacctgggtccacgtaggtgtgggaccaggttcacagcagggcgacgcccgtgggtcttgcagggagcgggtctgctggggagcgggcccccagagcctacgggtgcggggcatgggctgggctgggctgggctgcgcaggcccagggtctgtgggagcacccaggagaaaaccgtgttcaggctggaggcaatgctggagaggacggccggggtacagagcaaggaggcggccttggaagaggaggcggtgctgaaggtggaagacatcatggctgaggtggaggtggtggttgaggtggagcccgacgtggggtggcagaaggagggccagcgggcacagcctggccctggaccgagcacaccggggccgtcaatggactcgctggaggtccttcacttggagctgggctccgtgaatgccccaggccacagagcatctccgccttgtgagccagagccatatccttgcggctgccgatttgggacggcgggcagcaggggatagtcatcgggcctcggggggtatgggggctgtttggggggaggagccaggtgggaggcacgtggggtcagccaggaggcaggggatgggggacagcgtgggagccgaggccacgttcccgcagctgtgagggcagctcgcttgtagcagccctgggagcacgtggtagggaaggggagccagggccagcactgacaagggagaatcgcggcgccaaggtccctttgcgcacagcccaaattcgaaggacgcgtttccctgggaacgtccctggaggacggggaatctgtatgccattaccagccattgaaccacccctgctctcggtgcctgtttccagcaggctcaccccagaaacgcaaggtgcttaagacgggttcgcggcgcatggggctgccgaccacctgacggcgggcaccagctccgcagatgcgcattcatccaactgcaggcgctgcactcaaaggcgtgtaggccctgagcctgtataacttcctctggacccacgcaattcccttggagagcgccaggcacgaccctgctgtggcttctaactacaaggcttccctcaggtggacaggcccacccctcagggagactaggataagaggacaccacacacccggacatcagcggagcatgtccagcacccagcacacaa

SEQ ID NO: 1564476 - DNA, 4001 bp, Homo sapiens
tgaaatgagcacccaggctccctgaataggcaggtgtgtcaacccccttatactgggcatcaaacagctccagtgccaactaacggctcacctgacgtctctgttccctcttcaggtggcttcatcctcttgtagtattgcaggggattgcgccacaggtccttacataggatctgtcaggggactcaatcgggaaaggcctcatcagggctcagaaaggtgacccaagcagctgggaacacatggggtcattcctcatgtttcccagtgaggactcacctcagcaatcttgttagatcctgcgaagttgtggtcagagaaccagttgaagaagttaaggctgctgttgtggtgtctgcggcgataggcctccacttcataatccggataccactcaattggagtggaatgagaagccctgtattctacagagacaggagtttttgtgggaagggggctggatcccgttggcaatgatccacccaccatcttccttccactacccatcctgggagccacctgtcacctgtgatgttcaccagatattccttggtaatcactttattctggaagtaggggttactccgaaagaacaacatgatcttgcagagatgaacaggatgcttctcttcttccacctgtcaggacaaggtggagaaagcttagataggttttcgggtgaggtgctcactcttgcttacaggaatgaattatttcccttaccctcccccgctaaaccctctagccccagtcttcctggcctcacctccaggctgaccatgtagctcagcatgtcttcatcttcgtcagtgatcagggctgacatctgggggtggtttgcaatctgatttaggtcaaagagactttacacacgatggaagggaaagcgaggagcaacagggaagaaggcctaagagcacccagaggctggggtaggggatttctcagatctgcttccatgtatgatctcctttcgcctccccctccccttaaactaaggcctcctgtgttcacagagggtgtatgattctgaggctgactgcactgacatggggaggcgcgatttgcagagacttgctggtgtctgaggagtggcagaatctgcttatagccgaagacgcccagtcccagatcggactagcaaggggcagcaatcacactcccttaaaaatagcttcattcactgaaaaacctcttccgctctgaactcgcttctgctcttcaaaaagatgccccaaacgtctgctgctcggcatcaccaagggtttctctgccgcatgcaggacaatagtacccacgcctgctccggctttccacagccacactggtccgtggcaactcccctttgttccccaaagagtcacatcgacgccgagctgcccatcggtcacttacacttccccgagagcacctctccactagaaaggccgaagaaacactgagaaggatacaacattggcccagaagccagggacgctctggatgacggcgcctctgcggtctagctggggcttgcgcctccgctccatcttttcccgctgccgagaaaaggccttcctggcttgggcattaaccggctccagctccacctgaacggccagcagctcctccagtgcagactctggggtcatgggcccagggccaggcacagcctgctgtgcccgctgggcctcctcccgccgctccacgaggccctcctcctccgccaccacctccacctccgccaccacctccacctccgccattatgtcatccaacagcagcaccgcctcctcccccaaagccgcctgctcactctccaccccggccgccccctcctgtacagcctccatcctgaaggcggtgccctccttggcactcgcacacaccaaggcctgtgctgcccgacccacgccacagaaaccctgccgcagcctctctggcacccggtaggtcagcgagccctcagggcgcatgcgccgggcttccaggcgccccctaagggactgcgcgcgaagggccggggggccgcacccaggccgacttcctcccgtcgtggccagtcaatgggagggcggtgggcgtctccctgggcggcacagccactggcgggcctgcatctccagcccccccaccccccgccttccctgcccaagcctcctccgagaagcccttggagcttgtgccgggtagctaggcatccgggcacacgcgggctgcgtggcctttggaattgtgggcatggcagccctgtgccctgacatcctcagtgtggcaagccatgaacatctctatgtgtcatgaacacaggaaacatctctcttcgttaggcaggccaggtagatggtacggaggtaatacagcagatgcagagaactctctctggttgctggggctagggcggcaggggtgtcctgggggaagtgatcggggcgggcacgtgggaggaaagtcgcctgccggtgctgaggtggaattgatctgctgtagaggccagagccccggcacacactctcacaggtcgaggcaaatagaggctccgagtaccatgcttcctccctgaggatgctgtactccaaggagcattccaaagggcctcttgtcctatgccctgggcacaccagaggccagccgccagggttggccattgtcggcctgcgcgcacgctgttgtgcgctgccttgacgacccagaggctcccgcacccgcagcagcggttgcggtgcctgttggtggggctctgcaagcccagggccggggcctctggctcccgagctcctgtgcgcagttgagcctgctggggaccggagccctttggccagtgcgggatctgcgggtccagcggagctcctcaggaaacctgggtccacgtaggtgtgggaccaggttcacagcagggcgacgcccgtgggtcttgcagggagcgggtctgctggggagcgggcccccagagcctacgggtgcggggcatgggctgggctgggctgggctgcgcaggcccagggtctgtgggagcacccaggagaaaaccgtgttcaggctggaggcaatgctggagaggacggccggggtacagagcaaggaggcggccttggaagaggaggcggtgctgaaggtggaagacatcatggctgaggtggaggtggtggttgaggtggagcccgacgtggggtggcagaaggagggccagcgggcacagcctggccctggaccgagcacaccggggccgtcaatggactcgctggaggtccttcacttggagctgggctccgtgaatgccccaggccacagagcatctccgccttgtgagccagagccatatccttgcggctgccgatttgggatggcgggcagcaggggatagtcatcgggcctcggggggtatgggggctgtttgcggggaggagccaggtgggaggcacgtggggtcagccaggaggcaggggatgggggacagcgtgggagccgaggccacgttcccgcagctgtgagggcagctcgcttgtagcagccctgggagcacgtggtagggaaggggagccagggccagcactgacaagggagaatcgcggcgccaaggtccctttgcgcacagcccaaattcgaaggacgcgtttccctgggaacgtccctggaggacggggaatctgtatgccattaccagccattgaaccacccctgctctcggtgcctgtttccagcaggctcaccccagaaacacaaggtgcttaagacgggttcgcggcgcatggggctgccgaccacctgacggcgggcaccagctccgcagatgcgcattcatccaactgcaggcgctgcactcaaaggcgtgtaggccctgagcctgtataacttcctctggacccacgcaattcccttggagagcgccaggcacgaccctgctgtggcttctaactacaaggcttccctcaggtggacaggcccacccctcagggagactaggataagaggacaccacacacccggacatcagcggagcatgtccagcacccagcacacaa

SEQ ID NO: 1564477 - DNA, 4001 bp, Homo sapiens
cctcaatttctacatttctgaaatgagcacccaggctccctgaataggcaggtgtgtcaacccccttatactgggcatcaaacagctccagtgccaactaacggctcacctgacgtctctgttccctcttcaggtggcttcatcctcttgtagtattgcaggggattgcgccacaggtccttacataggatctgtcaggggactcaatcgggaaaggcctcatcagggctcagaaaggtgacccaagcagctgggaacacacggggtcattcctcatgtttcccagtgaggactcacctcagcaatcttgttagatcctgcgaagttgtggtcagagaaccagttgaagaagttaaggctgctgttgtggtgtctgcggcgataggcctccacttcataatccggataccactcaattggagtggaatgagaagccctgtattctacagagacaggagtttttgtgggaagggggctggatcccgttggcaatgatccacccaccatcttccttccactacccatcctgggagccacctgtcacctgtgatgttcaccagatattccttggtaatcactttattctggaagtaggggttactccgaaagaacaacatgatcttgcagagatgaacaggatgcttctcttcttccacctgtcaggacaaggtggagaaagcttagataggttttcgggtgaggtgctcactcttgcttacaggaatgaattatttcccttaccctcccccgctaaaccctctagccccagtcttcctggcctcacctccaggctgaccatgtagctcagcatgtcttcatcttcgtcagtgatcagggctgacatctgggggtggtttgcaatctgatttaggtcaaagagactttacacacgatggaagggaaagcgaggagcaacagggaagaaggcctaagagcacccagaggctggggtaggggatttctcagatctgcttccacgtatgatctcctttcgcctccccctccccgtaaactaaggcctcctgtgttcacagagggtgtatgattctgaggctgactgcactgacatggggaggcgcgatttgcagagacttgctggtgtctgaggagtggcagaatctgcttatagccgaagacgcccagtcccagatcggactagcaaggggcagcaatcacactcccttaaaaatagcttcattcactgaaaaacctcttccgctctgaactcgcttctgctcttcaaaaagatgccccaaacgtctgctgctcggcatcaccaagggtttctctgccgcatgcaggacaatagtacccacgcctgctccggctttccacagccacactggtccgtggcaactcccctttgttccccaaagagtcacatcgacgccgagctgcccatcggtcacttacacttccccgagagcacctctccactagaaaggccgaagaaacactgagaaggatacaacattggcccagaagccagggacgctctggatgacggcgcctctgcggtctaggtggggcttgcgcctccgctccatcttttcccgctgccgagaaaaggccttcctggcttgggcattaaccggctccagctccacctgaacggccagcagctcctccagtgcagactctggggtcatgggcccagggccaggcacagcctgctgtgcccgctgggcctcctcccgccgctccacgaggccctcctcctccgccaccacctccacctccgccattatgtcatccaacagcagcaccgcctcctcccccaaagccgcctgctcactctccaccccggccgccccctcctgtacagcctccatcctgaaggcggtgccctccttggcactcgcacacaccaaggcctgtgctgcccgacccacgccacagaaaccctgccgcagcctctctggcacccggtaggtcagcgagccctcagggcgcatgcgccgggcttccaggcgccccctaagggactgcgcgcgaagggccggggggccgcacccaggccgacttcctcccgtcgtggccagtcaatgggagggcggtgggcgtctccctgggcggcacagccactggcgggcctgcatctccagcccccccaccccccgccttccctgcccaagcctcctccgagaagcccttggagcttgtgccgggtagctaggcatccgggcacacgcgggctgcgtggcctttggaattgtgggcatggcagccctgtgccctgacatcctcagtgtggcaagccatgaacatctctatgtgtcatgaacacaggaaacatctctcttcgttaggcaggccaggtagatggtacggaggtaatacagcagatgcagagaactctctctggttgctggggcaagggcggcaggggtgtcctgggggaagtgatcggggcgggcacgtgggaggaaagtcgcctgccggtgctgaggtggaattgatctgctgtagaggccagagccccggcacacactctcacaggtcgaggcaaatagaggctccgagtaccatgcttcctccctgaggatgctgtactccaaggagcattccaaagggcctcttgtcctatgccctgggcacaccagaggccagccgccagggttggccattgtcggcctgcgcgcacgctgttgtgcgctgccttgacgacccagaggctcccgcacccgcagcagcggttgcggtgcctgttggtggggctctgcaagcccagggccggggcctctggctcccgagctcctgtgcgcagttgagcctgctggggaccggagccctttggccagtgcgggatctgcgggtccagcggagctcctcaggaaacctgggtccacgtaggtgtgggaccaggttctcagcagggcgacgcccgtgggtcttgcagggagcgggtctgctggggagcgggcccccagagcctacgggtgcggggcatgggctgggctgggctgggctgcgcaggcccagggtctgtgggagcacccaggagaaaaccgtgttcaggctggaggcaatgctggagaggacggccggggtacagagcaaggaggcggccttggaagaggaggcggtgctgaaggtggaagacatcatggctgaggtggaggtggtggttgaggtggagcccgacgtggggtggcagaaggagggccagcgggcacagcctggccctggaccgagcacaccggggccgtcaatggactcgctggaggtccttcacttggagctgggctccgtgaatgccccaggccacagagcatctccgccttgtgagccagagccatatccttgcggctgccgatttgggatggcgggcagcaggggatagtcatcgggcctcggggggtataggggctgtttggggggaggagccaggtgggaggcacgtggggtcagccaggaggcaggggatgggggacagcgtgggagccgaggccacgttcccgcagctgtgagggcagctcgcttgtagcagccctgggagcacgtggtagggaaggggagccagggccagcactgacaagggagaatcgcggcgccaaggtccctttgcgcacagcccaaattcgaaggacgcgtttccctgggaacgtccctggaggacggggaatctgtatgccattaccagccattgaaccacccctgctctcggtgcctgtttccagcaggctcaccccagaaacacaaggtgcttaagacgggttcgcggcgcatggggctgccgaccacctgacggcgggcaccagctccgcagatgcgcattcatccaactgcaggcgctgcactcaaaggcgtgtaggccctgagcctgtataacttcctctggacccacgcaattcccttggagagcgccaggcacgaccctgctgtggcttctaactacaaggcttccctcaggtggacaggcccacccctcagggagactaggataagaggacaccacacacccggacatcagcggagcatgtccagcacccagcacacaa

SEQ ID NO: 1564478 - DNA, 4001 bp, Homo sapiens
caaggaatttctacatgtacgaaaggagcctcaatttctacatttctgaaatgagcacccaggctccctgaataggcaggtgtgtcaacccccttatactgggcatcaaacagctccagtgccaactaacggctcacctgacgtctctgttccctcttcaggtggcttcatcctcttgtagtattgcaggggattgcgccacaggtccttacataggatctgtcaggggactcaatcgggaaaggcctcatcagggctcagaaaggtgacccaagcagctgggaacacatggggtcattcctcatgtttcccagtgaggactcacctcagcaatcttgttagatcctgcgaagttgtggtcagagaaccagttgaagaagttaaggctgctgttgtggtgtctgcggcgataggcctccacttcataatccggataccactcaattggagtggaatgagaagccctgtattctacagagacaggagtttttgtgggaagggggctggatcccgttggcaatgatccacccaccatcttccttccactacccatcctgggagccacctgtcacctgtgatgttcaccagatattccttggtaatcactttattctggaagtaggggttactccgaaagaacaacatgatcttgcagagatgaacaggatgcttctcttcttccacctgtcaggacaaggtggagaaagcttagataggttttcgggtgaggtgctcactcttgcttacaggaatgaattatttcccttaccctcccccgctaaaccctctagccccagtcttcctggcctcacctccaggctgaccatgtagctcagcatgtcttcatcttcgtcagtgatcagggctgacatctgggggtggtttgcaatctgatttaggtcaaagagactttacacacgatggaagggaaagcgaggagcaacagggaagaaggcctaagagcacccagaggctggggtaggggatttctcagatctgcttccatgtatgatctcctttcgcctccccctccccgtaaactaaggcctcctgtgttcacagagggtgtatgattctgaggctgactgcactgacatggggaggcgcgatttgcagagacttgctggtgtctgaggagtggcagaatctgcttatagccgaagacgcccagtcccagatcggactagcaaggggcagcaatcacactcccttaaaaatagcttcattcactgaaaaacctcttccgctctgaactcgcttctgctcttcaaaaagatgccccaaacgtctgctgctcggcatcaccaagggtttctctgccgcatgcaggacaatagtacccacgcctgctccggctttccacagccacactggtccgtggcaactcccctttgttccccaaagagtcacatcgacgccgagctgcccatcggtcacttacacttccccgagagcacctctccactagaaaggccgaagaaacactgagaaggatacaacattggcccagaagccagggacgctctggatgacggcgcctctgcggtctaggtggggcttgcgcctccgctccatcttttcccgctgccgagaaaaggccttcctggcttgggcattaaccggctccagctccacctgaacggccagcagctcctccagtgcagactctggggtcatgggcccagggccaggcacagcctgctgtgcccgctgggcctcctcccgccgctccacgaggccctcctcctccgccaccacctccacctccgccaccacctccacctccgccattatgtcatccaacagcagcaccgcctcctcccccaaagccgcctgctcactctccaccccggccgccccctcctgtacagcctccatcctgaaggcggtgccctccttggcactcgcacacaccaaggcctgtgctgcccgacccacgccacagaaaccctgccgcagcctctctggcacccggtaggtcagcgagccctcagggcgcatgcgccgggcttccaggcgccccctaagggactgcgcgcgaagggccggggggccgcacccaggccgacttcctcccgtcgtggccagtcaatgggagggcggtgggcgtctccctgggcggcacagccactggcgggcctgcatctccagcccccccaacccccgccttccctgcccaagcctcctccgagaagcccttggagcttgtgccgggtagctaggcatccgggcacacgcgggctgcgtggcctttggaattgtgggcatggcagccctgtgccctgacatcctcagtgtggcaagccatgaacatctctatgtgtcatgaacacaggaaacatctctcttcgttaggcaggccaggtagatggtacggaggtaatacagcagatgcagagaactctctctggttgctggggctagggcggcaggggtgtcctgggggaagtgatcggggcgggcacgtgggaggaaagtcgcctgccggtgctgaggtggaattgatctgctgtagaggccagagccccggcacacactctcacaggtcgaggcaaatagaggctccgagtaccatgcttcctccctgaggatgctgtactccaaggagcattccaaagggcctcttgtcctatgccctgggcacaccagaggccagccgccagggttggccattgtcggcctgcgcgcacgctgttgtgcgctgccttgacgacccagaggctcccgcacccgcagcagcggttgcggtgcctgttggtggggctctgcaagcccagggccggggcctctggctcccgagctcctgtgcgcagttgagcctgctggggaccggagccctttggccagtgcgggatctgcgggtccagcggagctcctcaggaaacctgggtccacgtaggtgtgggaccaggttcacagcagggcgacgcccgtgggtcttgcagggagcgggtctgctggggagcgggcccccagagcctacgggtgcggggcatgggctgggctgggctgggctgcgcaggcccagggtctgtgggagcacccaggagaaaaccgtgttcaggctggaggcaatgctggagaggacggccggggtacagagcaaggaggcggccttggaagaggaggcggtgctgaaggtggaagacatcatggctgaggtggaggtggtggttgaggtggagcccgacgtggggtggcagaaggagggccagcgggcacagcctggccctggaccgagcacaccggggccgtcaatggactcgctggaggtccttcacttggagctgggctccgtgaatgccccaggccacagagcatctccgccttgtgagccagagccatatccttgcggctgccgatttgggatggcgggcagcaggggatagtcatcgggcctcggggggtatgggggctgtttggggggaggagccaggtgggaggcgcgtggggtcagccaggaggcaggggatgggggacagcgtgggagccgaggccacgttcccgcagctgtgagggcagctcgcttgtagcagccctgggagcacgtggtagggaaggggagccagggccagcactgacaagggagaatcgcggcgccaaggtccctttgcgcacagcccaaattcgaaggacacgtttccctgggaacgtccctggaggacggggaatctgtatgccattaccagccattgaaccacccctgctctcggtgcctgtttccagcaggctcaccccagaaacacaaggtgcttaagacgggttcgcggcgcatggggctgccgaccacctgacggcgggcaccagctccgcagatgcgcattcttccaactgcaggcgctgcactcaaaggggtgtaggccctgagcctgtataacttcctctggacccacgcaattcccttggagagcgccaggcacgaccctgctgtggcttctaactacaaggcttccctcaggtggacaggcccacccctcagggagactaggataagaggacac

SEQ ID NO: 1564479 - DNA, 4001 bp, Homo sapiens
caaggaatttctacatgtacgaaaggagcctcaatttctacatttctgaaatgagcacccaggctccctgaataggcaggtgtgtcaacccccttatactgggcatcaaacagctccagtgccaactaacggctcacctgacgtctctgttccctcttcaggtggcttcatcctcttgtagtattgcaggggattgcgccacaggtccttacataggatctgtcaggggactcaatcgggaaaggcctcatcagggctcagaaaggtgacccaagcagctgggaacacatggggtcattcctcatgtttcccagtgaggactcacctcagcaatcttgttagatcctgcgaagttgtggtcagagaaccagttgaagaagttaaggctgctgttgtggtgtctgcggcgataggcctccacttcataatccggataccactcaattggagtggaatgagaagccctgtattctacagagacaggagtttttgtgggaagggggctggatcccgttggcaatgatccacccaccatcttccttccactacccatcctgggagccacctgtcacctgtgatgttcaccagatattccttggtaatcactttattctggaagtaggggttactccgaaagaacaacatgatcttgcagagatgaacaggatgcttctcttcttccacctgtcaggacaaggtggagaaagcttagataggttttcgggtgaggtgctcactcttgcttacaggaatgaattatttcccttaccctcccccgctaaaccctctagccccagtcttcctggcctcacctccaggctgaccatgtagctcagcatgtcttcatcttcgtcagtgatcagggctgacatctgggggtggtttgcaatctgatttaggtcaaagagactttacacacgatggaagggaaagcgaggagcaacagggaagaaggcctaagagcacccagaggctggggtaggggatttctcagatctgcttccatgtatgatctcctttcgcctccccctccccttaaactaaggcctcctgtgttcacagagggtgtatgattctgaggctgactgcactgacatggggaggcgcgatttgcagagacttgctggtgtctgaggagtggcagaatctgcttatagccgaagacgcccagtcccagatcggactagcaaggggcagcaatcacactcccttaaaaatagcttcattcactgaaaaacctcttccgctctgaactcgcttctgctcttcaaaaagatgccccaaacgtctgctgctcggcatcaccaagggtttctctgccgcatgcaggacaatagtacccacgcctgctccggctttccacagccacactggtccgtggcaactcccctttgttccccaaagagtcacatcgacgccgagctgcccatcggtcacttacacttccccgagagcacctctccactagaaaggccgaagaaacactgagaaggatacaacattggcccagaagccagggacgctctggatgacggcgcctctgcggtctagctggggcttgcgcctccgctccatcttttcccgctgccgagaaaaggccttcctggcttgggcattaaccggctccagctccacctgaacggccagcagctcctccagtgcagactctggggtcatgggcccagggccaggcacagcctgctgtgcccgctgggcctcctcccgccgctccacgaggccctcctcctccgccaccacctccacctccgccaccacctccacctccgccattatgtcatccaacagcagcaccgcctcctcccccaaagccgcctgctcactctccaccccggccgccccctcctgtacagcctccatcctgaaggcggtgccctccttggcactcgcacacaccaaggcctgtgctgcccgacccacgccacagaaaccctgccgcagcctctctggcacccggtaggtcagcgagccctcagggcgcatgcgccgggcttccaggcgccccctaagggactgcgcgcgaagggccggggggccgcacccaggccgacttcctcccgtcgtggccagtcaatgggagggcggtgggcgtctccctgggcggcacagccactggcgggcctgcatctccagcccccccaccccccgccttccctgcccaagcctcctccgagaagcccttggagcttgtgccgggtagctaggcatccgggcacacgcgggctgcgtggcctttggaattgtgggcatggcagccctgtgccctgacatcctcagtgtggcaagccatgaacatctctatgtgtcatgaacacaggaaacatctctcttcgttaggcaggccaggtagatggtacggaggtaatacagcagatgcagagaactctctctggttgctggggctagggcggcaggggtgtcctgggggaagtgatcggggcgggcacgtgggaggaaagtcgcctgccggtgctgaggtggaattgatctgctgtagaggccagagccccggcacacactctcacaggtcgaggcaaatagaggctccgagtaccatgcttcctccctgaggatgctgtactccaaggagcattccaaagggcctcttgtcctatgccctgggcacaccagaggccagccgccagggttggccattgtcggcctgcgcgcacgctgttgtgcgctgccttgacgacccagaggctcccgcacccgcagcagcggttgcggtgcctgttggtggggctctgcaagcccagggccggggcctctggctcccgagctcctgtgcgcagttgagcctgctggggaccggagccctttggccagtgcgggatctgcgggtccagcggagctcctcaggaaacctgggtccacgtaggtgtgggaccaggttcacagcagggcgacgcccgtgggtcttgcagggagcgggtctgctggggagcgggcccccagagcctacgggtgcggggcatgggctgggctgggctgggctgcgcaggcccagggtctgtgggagcacccaggagaaaaccgtgttcaggctggaggcaatgctggagaggacggccggggtacagagcaaggaggcggccttggaagaggaggcggtgctgaaggtggaagacatcatggctgaggtggaggtggtggttgaggtggagcccgacgtggggtggcagaaggagggccagcgggcacagcctggccctggaccgagcacaccggggccgtcaatggactcgctggaggtccttcacttggagctgggctccgtgaatgccccaggccacagagcatctccgccttgtgagccagagccatatccttgcggctgccgatttgggatggcgggcagcaggggatagtcatcgggcctcggggggtatgggggctgtttgcggggaggagccaggtgggaggcacgtggggtcagccaggaggcaggggatgggggacagcgtgggagccgaggccacgttcccgcagctgtgagggcagctcgcttgtagcagccctgggagcacgtggtagggaaggggagccagggccagcactgacaagggagaatcgcggcgccaaggtccctttgcgcacagcccaaattcgaaggacgcgtttccctgggaacgtccctggaggacggggaatctgtatgccattaccagccattgaaccacccctgctctcggtgcctgtttccagcaggctcaccccagaaacacaaggtgcttaagacgggttcgcggcgcatggggctgccgaccacctgacggcgggcaccagctccgcagatgcgcattcatccaactgcaggcgctgcactcaaaggcgtgtaggccctgagcctgtataacttcctctggacccacgcaattcccttggagagcgccaggcacgaccctgctgtggcttctaactacaaggcttccctcaggtggacaggcccacccctcagggagactaggataagaggacac

SEQ ID NO: 1564480 - DNA, 4001 bp, Homo sapiens; identical to SEQ ID NO: 1564478

SEQ ID NO: 1564481 - DNA, 4001 bp, Homo sapiens
cactctctgtcttcctctcaaggaatttctacatgtacgaaaggagcctcaatttctacatttctgaaatgagcacccaggctccctgaataggcaggtgtgtcaacccccttatactgggcatcaaacagctccagtgccaactaacggctcacctgacgtctctgttccctcttcaggtggcttcatcctcttgtagtattgcaggggattgcgccacaggtccttacataggatctgtcaggggactcaatcgggaaaggcctcatcagggctcagaaaggtgacccaagcagctgggaacacacggggtcattcctcatgtttcccagtgaggactcacctcagcaatcttgttagatcctgcgaagttgtggtcagagaaccagttgaagaagttaaggctgctgttgtggtgtctgcggcgataggcctccacttcataatccagataccactcaattggagtggaatgagaagccctgtattctacagagacaggagtttttgtgggaagggggctggatcccgttggcaatgatccacccaccatcttccttccactacccatcctgggagccacctgtcacctgtgatgttcaccagatattccttggtaatcactttattctggaagtaggggttactccgaaagaacaacatgatcttgcagagatgaacaggatgcttctcttcttccacctgtcaggacaaggtggagaaagcttagataggttttcgggtgaggtgctcactcttgcttacaggaatgaattatttcccttaccctcccccgctaaaccctccagccccagtcttcctggcctcacctccaggctgaccatgtagctcagcatgtcttcatcttcgtcagtgatcagggctgacatctgggggtggtttgcaatctgatttaggtcaaagagactttacacacgatggaagggaaagcgaggagcaacagggaagaaggcctaagagcacccagaggctggggtaggggatttctcagatctgcttccatgtatgatctcctttcgcctccccgtccccgtaaactaaggcctcctgtgttcacagagggtgtatgattctgaggctgactgcactgacatggggaggcgcgatttgcagagacttgctggtgtctgaggagtggcagaatctgcttatagccgaagacgcccagtcccagatcggactagcaaggggcagcaatcacactcccttaaaaatagcttcattcactgaaaaacctcttccgctctgaactcgcttctgctcttcaaaaagatgccccaaacgtctgctgctcggcatcaccaagggtttctctgccgcatgcaggacaatagtacccacgcctgctccggctttccacagccacattggtccgtggcaactcccctttgttccccaaagagtcacatcgacgccgagctgcccatcggtcacttacacttccccgagagcacctctccactagaaaggccgaagaaacactgagaaggatacaacattggcccagaagccagggacgctctggatgacggcgcctctgcggtctaggtggggcttgcgcctccgctccatcttttcccgctgccgagaaaaggccttcctggcttgggcattaaccggctccagctccacctgaacggccagcagctcctccagtgcagactctggggtcatgggcccagggccaggcacagcctgctgtgcccgctgggcctcctcccgccgctccacgaggccctcctcctccgccaccacctccacctccgccattatgtcatccaacagcagcaccgcctcctcccccaaagccgcctgctcactctccaccccggccgccccctcctgtacagcctccatcctgaaggcggtgccctccttggcactcgcacacaccaaggcctgtgctgcccgacccacgccacagaaaccctgccgcagcctctctggcacccagtaggtcagcgagccctcagggcgcatgcgccgggcttccaggcgccccctaagggactgcgcgcgaagggccggggggccgcacccaggccgacttcctcccgtcgtggccagtcaatgggagggcggtgggcgtctccctgggcggcacagccactggcgggcctgcatctccagcccccccaccccccgccttccctgcccaagcctcctccgagaagcccttggagcttgtgccgggtagctaggcatccgggcacacgcgggctgcgtggcctttggaattgtgggcatggcagccctgtgccctgacatcctcagtgtggcaagccatgaacatctctatgtgtcatgaacacaggaaacatctctcttcgttaggcaggccaggtagatggtacggaggtaatacagcagatgcagagaactctctctggttgctggggctagggcggcaggggtgtcctgggggaagtgatcggggcgggcacgtgggaggaaagtcgcctgccggtgctgaggtggaattgatctgctgtagaggccagagccccggcacacactctcacaggtcgaggcaaatagaggctccgagtaccatgcttcctccctgaggatgctgtactccaaggagcattccaaagggcctcttgtcctatgccctgggcacaccagaggccagccgccagggttggccattgtcggcctgcgcgcacgctgttgtgcgctgccttgacgacccagaggctcccgcacccgcagcagcggttgcggtgcctgttggtggggctctgcaagcccagggccggggcctctggctcccgagctcctgtgcgcagttgagcctgctggggaccggagccctttggccagtgcgggatctgcgggtccagcggagctcctcaggaaacctgggtccacgtaggtgtgggaccagtttctcagcagggcgacgcccgtgggtcttgcagggagcgggtctgctggggagcgggcccccagagcctacgggtgcggggcatgggctgggctgggctgggctgcgcaggcccagggtctgtgggagcacccaggagaaaaccgtgttcaggctggaggcaatgctggagaggacggccggggtacagagcaaggaggcggccttggaagaggaggcggtgctgaaggtggaagacatcatggctgaggtggaggtggtggttgaggtggagcccgacgtggggtggcagaaggagggccagcgggcacagcctggccctggaccgagcacaccggggccgtcaatggactcgctggaggtccttcacttggagctgggctccgtgaatgccccaggccacagagcatctccgccttgtgagccagagccatatccttgcggctgccgatttgggatggcgggcagcaggggatagtcatcgggcctcggggggtatgggggctgtttgcggggaggagccaggtgggaggcacgtggggtcagccaggaggcaggggatgggggacagcgtgggagccgaggccacgttcccgcagctgtgagggcagctcgcttgtagcagccctgggagcacgtggtagggaaggggagccagggccagcactgacaagggagaatcgcggcgccaaggtccctttgcgcacagcccaaattcgaaggacgcgtttccctgggaacgtccctggaggacggggaatctgtatgccattaccagccattgaaccacccctgctctcggtgcctgtttccagcaggctcaccccagaaacacaaggtgcttaagacgggttcgcggcgcatggggctgccgaccacctgacggcgggcaccagctccgcagatgcgcattcatccaactgcaggcgctgcactcaaaggcgtgtaggccctgagcctgtataacttcctctggacccacgcaattcccttggagagcgccaggcacgaccctgctgtggcttctaactacaaggcttccctcaggtggacaggcccacccctcagggagactaggataagaggacac

SEQ ID NO: 1564482 - DNA, 4001 bp, Homo sapiens
aaaaattagccaagcatggtggcaggtgcctgtagtcccagctcctcaggaggctgaggcaggataatggcgtgaacctggaaggcagagcttgcagtgggccaagattgcgccactgcactccagcctgggtgacagagcaagactctgtcaaaaaaaaaagtcatataagacaaagaggagtgcaagacctaacttcataccaaatgggaaaaggcgcaaagcctttctctaagatctggaacaagacaaggacccctctaattcaacttagtatggagagtcctagtcagagcaaagaaagaagagatagatataaaatggcatccaaatcagaaagaagggagtaaaactgtgcctattcagagatgacatgatattacatgtagaaaaatctatagaatttaatcaaggagaccaatgacttatactaaaaacaaaaatttattgtggagggaaaaataactaaagacagaaatacaggcaaagacctctaatgtccaggtattacaagacttactactgttatcagtactacccaaagtgatttacagattcaacactatctccacaatattgttttgcagacagaaaaatccatattaaatataccctcaaggaacctcaagtactacacacttctactgttcaaatcagaacaacaaaaatttctcataatatttttcccaagcaggctacaatagataattccctaggcctcaacataggtacccttagcttgatagccaaggcttgccccaaacactgaaacaggcttacagatatatccttacagcaaggacatacctcttgccaactgctagcaaagaaatcagccctgctgtcagcaatcatgtgagtaagccattgtggaagtggacataccagccttcagataaataactgctacccacaaaaacgaaaagatatgtttgttgttttaagctgttaaactgtgagctattttcttatgaagtaaaagacaaatatcctgccccagcttagtaattaactcagtgacaaaaaaagaaaagattgtattagctgcccctctatcagaccatggtaatctcataggtctctgactgttcagttttattccacaaaacatttctgtaaacatctcttacccaaactgctaaaactattgttttaattcttcagctagcaactcacctccaacacatactccacacagccaccagaattatctccaagctctctgcaaaacaaaaagcagatttcatcatgaatcctttcttttaaaaggaaaaaatctgacttcagtgcttaaaaataaaatctcagtgccttaatctggtacttgaaatcacttatgacccagtctcattcaaaccagctcttagtttcaagctcgctaattccctcctaaatatctggtgtgtcttcctcattctattaatagtatcacatatatcctttaaactgtttccctccagtggaagtatctgacctaatttatggaatcaccaaaataccacagtttttaagaccagcaaacagtattctacctcaaactatgattttcttcacctcttctactattccacatttgagacatgtattttaatacagcagttatcatactgtataaataagtacctatttagccactagaactagagccttaaaagtggagactaaccatttttacatcatgagtaaatgaatacaattcataagctgcccagtaatgactaagtccacgtctaccactttacaatttcagtgagttaaacaatctgctaattggtagaaaagctacaatggcaaatctaagtttcttaactaacatcacaactctgttaatcactacactctctcagtcagtcagaaatgctgctgatacacaagggtcagtttcacctctgagcccagaaaagtctttccacaccatctataaaaacattgtttcattaggttttataatggaattaccactgcaaaaatatggagaaataaacaaagttcaattattcaacagtctgatagctacagaagccagccaaatgcctagacaggggcaagtccctggtgaaaccccacctgaaagccaaaaacaggccacaggctgaaagactgactgctagtcctgtatgaaacacaacccagaatgagaacctctgttcctttttgcctgccgtttcatttatgattgattctttctgaatagtatcttttaaccaatcgaatgttgacttttccagtactacctatggcttgcccctcccccattctaggcccataaaaagcccgactcagccatattagagggaccttcctgcctttgggaagggggacaaacccctcgtcccttttcaggtttgcctgactagttcgtgactcaataaaacttcccaccttgctcactttgttagcacatccttattcttcatgggtgcaggacaagagttttagaaccaccaaaaaggggtacaagctataacacaggtgagctggggcatgccagcatggccatgcaaggcccaagcagggcatcaccagccagggttcatcagcttacgaagtgactgagaagaaaaatcctatcattttgggggctcactcaggatacctgaagggtgagtaaatgtggacctaaatttcactttttttctgtgaactcttgtcctcagacatttttctgaaggcagatgaagcaccaaccctctggtaagctagttaagaacagtggtgcaactacagaggacaggatgctggagaggaccctcccccatcactcttggggttagggaatgttggcctcattcaattcccatttttcctgtggcatttgtcttcttgtttttcggggatgttatggtacttatctcttttacaatgttgcaagtgttgttgcaaactacaaacatattactaggtggaaagagcatttggaccagccatcaggtatgtaattcagaacaatgcagtttctgttcctagaggaaaacaggaagcagaggttaaaagtctctctccctgctcgaggaatctatttgcataaagaggctttttccaccccaagcaccttccctgccctgaatgtaagctgtttttttttttttttcttttcttttctctgccacatacagggagcttttctatgcaagaggttttgttttcttttggaaggcatcttactaggccagatccccaattctccctttctctccattgtctgagtacaaacccgttgcacagctatacctgagtattcagcttataagaagatggcaaagaagtagccctcacagctgctggctgcagtctggtgagggcaacctggacttaatgaaaccatgccccttcctaaggaagttgcttgtcccaaactgaactccaagcttcaggctgaagctctagaaaggaaaatggatctgagggatccagcggcagacaatagtcaaggggcacagtgcaggtgagcatgactaattcctgccaattggaatctccacccccactgcccattttatggatacaggtcatgctagcatccatggcatagataagttacagacagcagaaaaaataggcaatggataggtgaatgcggataattcctacctgttacacgtgcgtgaaagcaccctgctgagtcactgggactcagggatataaagacagaagaaataaaggggacgccttttctttctctccctcgtgtaccccaggtattcactggaaacacacaggaactaagggatgccgttttcccctccttccaggtaagtaaccagccaccttcagtctgcacttctcttggatacatcctgaatcactgggactcccttgaaaaaaaaaaaacaaaaccttctttttcctttttcctcctctctcctctttgcagatgagtaattgtgtccccatgctacagaatccctacagattcatcccccagactgggaaaagtcaatttccccaaacctcaaactgtttggcttaaaaataaactgggaaggctgggcatggtggct

SEQ ID NO: 1564483 - DNA, 4001 bp, Homo sapiens
gaatggaaaaagcacacacattcatgaaatcacatttgcagcactgtgcatcctaaaaaagtcaacaaatcactaaacttcaggctaaacatacacgcatcagtttataggtcaaatatctactgcaaactcttcaccgctgtaacttacttgctacttacacttaggacaccagggatattttttttaaaaaggcaaaaaaatgtttaaaattagacaccaagagccaaataccaaaaggcgaggggaagaagcaggaagttatgaattttgaaaactgtacacattcactatttgtgacgctaaaattcaggaacaaaaggccctaaagtaacaggcatgtggtgtagacccggtttagcccggtcccaaagcgtccgattttttttttcctcagagtagaagggagtctggagcaaggggcgaagtattccagagtacggggacagcaaaggcaagaaacacttttccgaccccttggccatggagcagagccaaaataaatactggctgggcggtaaggaacgcggggccttggtagagcaaagtgcggaccaaagactttgcgtctggttgcttttaccttgcctagtagggtcttcgttctggcgccatcttcatgaagcctcacgaacccgaagagacggctgtagagagagagacacagagcttgttaatggtctgagaaagccagtgacttgctccttcccgagtccaagagcgacagcgacagattggtgagtgccaagctgaggatgaccccgtcatcaacgtgggcaagctgcgtccaggccttcccggagagtatcgccagccaaccaggcgggtgatggaggtgcgtacctgtccatgccaccaagcgcctccctttcctcgactgtcaggctaacagactcctcttcactctcgcggctcgcttttccttccgccattttctttgcctcatcaccgaaggcaacagcggcggtagtgagcgacactgcgcaggatttcatggaaacaacaaatttccaagtcccacgacgatacccaaccttaatcgagtagttgaaaagacgccttcaatcgctgcttgagactgtgacgccaattttatcgcctcctcagcggctgcaaggaaaaaagctgaggcaaagacttaagctaccgaagcacgggcagcggaactcggctacctggatcacatctgggaaactacagggaaggcagaagctcgcagtgctggagagcacagcagaatttcttaaaatcacaaactttgccagcaccagcacaaagttgtaattgtgtcacgggcgaaccccacgcagccgccgcgacctccccgctcccaaccacttagttgtagccaatctaggcgactgattcgtctcacgtgatctttgttgacttacgtcaggcattgctccactgtactcctaggctgctgggaccccgcccagccagttcgccaaggacctaggaacatgacagaggctgactgattctgaccgctggttggttgatggtcacgtctatggagaaaagggtagtctctgggatggaacaacctgtaggttgtgctagttaaatgcattaagatagaaaatggagtgtctgtgctgggtgtttttgcagttgcgatacgcttgaaggggaagagagcgatgggaagggcggcatcgggcatcacccacggggcgcaaatgcgaaaagaggacaccatggactttaggagagtccgtaatgaggctcccactgtcacaagccttgcgaatgcgagaccttgcggggcatggcagggaagctgcgcaggccctaaaccttcaccctcaagacttttggccctaaggccttgtcacctccataggctggttctttgcccatttcctctccactgaccaagtctaaagagaaggcataatatcttatgacctcagtcggtaagccaggccctagggaatcaacgtggcaactgcatttatcagttcatgatattatctaaacaacaaacgatgagcaaaaaaaaaaaaaaaaaaaaaagttactccacaaacccaaaatgtttatttctattgtgataatgataattccgtgaggtctcagtaagagtaggagcttctgtggacaggaattataagaacaataattaagaccttcatcacactttcaagatgcagtaacccttagaaaagaaaaaaacaccacttttttcttactttctcaattgtaaccaaaattataaataataggtaaaagaatttatttctgaaccccaaatatctgagagaggtcttagtcaatttaaaaagtttattttgcaagacttacccatgatacatttgcccaaggtggtcagggcacagcttgcttttgtacgttttagggaaacatgattggttcggtcaggtaagagggacagctcgaagcgggggcttccatgttagaaatagataagagacaggtcgggcgctgtggtttacgccagtaatcccagcactttgggaggccgaggcgggcagatgacctaacgttgggagtttcagaccagcgtcaccaacatggaaaaaccccgtctctactaaaaatacaaaattaacagagcatggtggcgcatgcctgtaatctcagctactctgaagactgaggcaggcgaatcgcttgaacccaagaggcggaggttgcggtgagccgagatggcaccattgcattccagcctgggcaacaagagcaaaactccgtctcaaaaaaaaaaaaaaaaaaaaaaatgtagataagagacaagagtttgcatgcttttgagtccttgatcagcctcctactgaatacagaatttagtccggctagtaactctgtatttttacataaataaataataaggcagaggaagcaatcagatatgcagttgtctcttgtgcgcctcacagggataactttgagttgggtctgtcctttgtccacaaggaatttccttgtgggcacgttgtgaggaacgtatgtagcttcttatctttgtacgtatcttatttaggaataaaatgggaggcaagtttagtgacatagttcccagcttgacttttccgttacttagtgattttgggatcccaagattaatttttttttctcatattatatggcatatgtatgttgaggaattgtgtatatttttctatgtaaagaatctataaaaagtctcatatatattaaacgcctctgttgattactgttttcaaaagacaaattgcataatattccatgtatcaaatagtttactggttatacctccagatattagatattacaaaaatgttaattattaatggcattaggggaaatgttcctttataagtgaagaaatggtatctttttttaagtaatagatttgcctcctccaaaaataggtattatatatttaaactttgatgtttaaatgagaggacagtttagaacttccagacaaaaaactataacactagtgagagttttggaaatcccagctgattttgctcagtaacacgtgttttcattgttattttgaaactaacaactaactctgattttatagattatagtctatcatgttctttactcattccatttcagttgaatcgctacaccacagaatattttcagtagctgtactattgaaaatgttatattaattgtcataagtatattagtaagtatattaattgtcatagtggtggccatcacaccaagaggtttttgataatatgcatacatttgcacaagcagacattcaaataatgtagaatatggccttttccaggaataaggcctacctgtctcacttgaggcaggtaattattacaaagtgatagagcaacatagaggtgggacagaaattgcagtaaagaatgaatttgaattctggctctgtacaggctgtaccttggaaaaattagctaatctctaacccaacattatatatcgaatgtaaatacaaagctgcatccatcctcataccttcatgtacatttggcagattataaatcagacag

SEQ ID NO: 1564484 - DNA, 4001 bp, Homo sapiens; identical to SEQ ID NO: 1564288

SEQ ID NO: 1564485 - DNA, 4001 bp, Homo sapiens
ttcttcttaattatattagattgtagggaggggaccctgaaaggaaagagatggaaaccattgtaccatcagtttatattgaggaaaaggtattttaacaatgaaacctaagtaggtagaatccagatcctggtacttggtgcttgtgctggcaggattgcaagaaaaaataaaccctaaatgaagcagagtcatcctgtgagggggaaatttgtctccagtgctcagccatgacgcaaaccttatgctcctgtctggcaaactgtgacctctccctctgccctcaagcccgcaagaccccacttccctccctccccgcacaacacctcttccttccttctttcgtttctcgctccccactcaccacctcttccccccttcctccctccccacaggccacctcttcctctctccctcccaacacaccacctcttcctccctccctccctgcataccacctttttctccctctctccccacacaccacctcttccacccttcctccctccccacaggccacctcttcctccctccctccctacacaccacctctttctccctctctcactccccacccaccttctgttcctccctgcctcccgacccaccacctcttcctacctccccgccacacaccttttcctccctccctccctacacaccacgtattcctgtctccctccccacacaccacgtcttcccccctgtctccctcctgacacacctcttcttcctccctccctccccacacacctcttcttcctccatcccttcccacacacctcttcctccctccctccccacacacctcatcttcctccctccctcccaccccacacaccacctcttcctcactccctccccacccaccacctcttcctccctccccacacaccacctcttcctcactccctccccacccaccccttcctccctccccacaccacttcttccctccctccccacaaacctcctcttcctccctccctgcccacccaccacctctgcctccctccctccctccctacacaccacctcttcccgcctgcctccctcctgacacacttcttccctccctccccacacaccacctcttcctccctccctccccacacaccacctcttccttcctccctccccacccaccacctctgcctccctccctccccacacaccacctcttcctccctccctccccacacacctcttacccccccctccctccctcctcaccatcagagaacacggagtcactcagatcggtttgcaacacattcattttattgtcatcaacatgggaagcaccctgctggtgagatctctgaggtctggcagctgggcctaaacttagttgctgctcagggagataggggagtagatgggcgccccttactcagtggttcctccagctcgctctcctgactcagggggtcgtgctgggtcccctcgctcactggctcctccggcggcagctcgtgctgagggagctcctggctgggctggtcgctggggccgggtgccgctggcccgctctccgcctcaggtgccgtcacggccgccatctttgtcgcagcccctttcttcccgcgtctccctccacgaactgcttctcccttctcggccaccttggtagtctggaaggacaacagggagatcacagaagggctctggtttagggacgaggatggaggaggctgggaacagggacgtgtcctcagaagcggtgggggccgggttggggggttgtgccaagtgaggacaggagaggcttcttgtgaggaaagaggcgaggggaagacgaggaggagcttgggagggtcactcaccttcttcttcgggccactggggctcggctgagaggaggacttcctctttcctgtctccttggccttggccggaggtcccgaggctctcggctttggactcatctgccgcagctcaacgtctcgcaacggtcgactaactccaggctgcctggcctccctgtgtatacccctctcgcgatcccaggacgagacgatcacgcccctgagctgtgattggtcaacactccactacccagccaatggtagccctgggtgggaaggaaggccttatacgtcataaagcaccatcaggacatggcggatgaagtcgggggcggggggggggggcggtgacatctaatgaggaaggcagggtgctctagttggagaaagggagatttgggttagcacccctaaagatagttcccaaactgacatgtcgcccctcctaaactccccatgttcagttttggcagatcatgtggcaagggaggatatttcccccacatgtttcccccggaacccccattcagtggtacattctgttcctccacaactaccatcattacccagtttctgtatgtcctacctaaaatccctccatgctaactgggatggatggagggctgtacgaagacgtcagtcatccctctctcctacaaattcctctgctacaccttgaggatcattcacttcttggctgccatggaacaacttttccatctcacatgcttctcccagcatccacatagtgcctcacaatttttcattctcatggtttaaagcactggcttccagaggtcaagattagcaaacacactagctcagctgggtatctgtatcgggctgggttcctcagagaaggagaaactaaaccaaacaggatactctgtgtgtgtgtgtgtgtgtgtgtgtgtgtgtgtgtgtgtgtgtgtgtaatattatatatcataaatatgtatttactaccatgtagtatttatttatgaataatattatatatgagatacagtttattctaaacaattggctcacacattcacacaatgtgggggtctaggcagctgaaatgtatagggcaagtgagcatcctggaaactaaaagtttctgcacagccaacaatcaacacaatgaaaaggcacgctatggtttgggagaagctatttgcgaaccatatatctaataatgagttaatatccaaagtatataaagaactcacatagctcaatagcaaataaatagtatggttaacaaataggcaaaggacttgaataggcatttctagaaagaaaacacacaactggccaacaggtatatgaaaatgtgctcaacatcgttaataatcagagaatgcaaatgataaccacaatgaactatcacctcactgttacatgctgttgacagacgtgtaattggcacagccgttataaaaaatagtataattgttccttggaaaatcaaaatagatctaccatacgacccagcagctcatctgttgagtatgtaccccacccctgaaatgaagtccacatctcatacagatatctccagtactaattgtaactcactaattacacaggaaattagagtttctatttgaaaagaatggtttttttttcaccattctggtatcaaatatttattctagtcatctcttcttatttcttactttgtaataacctaggtactgctgcccattgacagaaccaccttattattccagcaagaaatgagaaatattgaggagaatgcaatattatacttctgtcttcaaccagtttttcccattttagggaggattctgtatttaactcttactcaggtaactctagttaccatatccgtagtacctagtcaacaatccaaaaaaagtaagaacacagaattgactggagtggttactaaactttctatgttcaaccagtttcctagtaattgctagttgtttattcaactagtactgagaagaatttgtttattccaggtactggcttcatgtagttatctctagttaattacttacttggataaagttgaaagctactgtattaggtaatacttctaacatgaggttggaattttgcattgaggaaaatggttattgaactccctggcataggccagttatcttcagcttcctgggatcaattacctggtctggctaattctagctatctttaggttgctaattacat

SEQ ID NO: 1564486 - DNA, 4001 bp, Homo sapiens
tttcttcttaattatattagattgtagggaggggaccctgaaaggaaagagatggaaaccattgtaccatcagtttatattgaggaaaaggtattttaacaatgaaacctaagtaggtagaatccagatcctggtacttggtgcttgtgctggcaggattgcaagaaaaaataaaccctaaatgaagcagagtcatcctgtgagggggaaatttgtctccagtgctcagccatgacgcaaaccttatgctcctgtctggcaaactgtgacctctccctctgccctcaagcccgcaagaccccacttccctccctccccgcacaacacctcttccttccttctttcgtttctcgctccccactcaccacctcttccccccttcctccctccccacaggccacctcttcctctctccctcccaacacaccacctcttcctccctccctccctgcataccacctttttctccctctctccccacacaccacctcttccacccttcctccctccccacaggccacctcttcctccctccctccctacacaccacctctttctccctctctcactccccacccaccttctgttcctccctgcctcccgacccaccacctcttcctacctccccgccacacaccttttcctccctccctccctacacaccacgtattcctgtctccctccccacacaccacgtcttcccccctgtctccctcctgacacacctcttcttcctccctccctccccacacacctcttcttcctccatcccttcccacacacctcttcctccctccctccccacacacctcatcttcctccctccctcccaccccacacaccacctcttcctcactccctccccacccaccacctcttcctccctccccacacaccacctcttcctcactccctccccacccaccccttcctccctccccacaccacttcttccctccctccccacaaacctcctcttcctccctccctgcccacccaccacctctgcctccctccctccctccctacacaccacctcttcccgcctgcctccctcctgacacacttcttccctccctccccacacaccacctcttcctccctccctccccacacaccacctcttccttcctccctccccacccaccacctctgcctccctccctccccacacaccacctcttcctccctccctccccacacacctcttacccccccctccctccctcctcaccatcagagaacacggagtcactcagatcggtttgcaacacattcattttattgtcatcaacatgggaagcaccctgctggtgagatctctgaggtctggcagctgggcctaaacttagttgctgctcagggagataggggagtagatgggcgccccttactcagtggttcctccagctcgctctcctgactcagggggtcgtgctgggtcccctcgctcactggctcctccggcggcagctcgtgctgagggagctcctggctgggctggtcgctggggccgggtgccgctggcccgctctccgcctcaggtgccgtcacggccgccatctttgtcgcagcccctttcttcccgcgtctccctccacgaactgcttctcccttctcggccaccttggtagtctggaaggacaacagggagatcacagaagggctctggtttagggacgaggatggaggaggctgggaacagggacgtgtcctcagaagcggtgggggccgggttggggggttgtgccaagtgaggacaggagaggcttcttgtgaggaaagaggcgaggggaagacgaggaggagcttgggagggtcactcaccttcttcttcgggccactggggctcggctgagaggaggacttcctctttcctgtctccttggccttggccggaggtcccgaggctctcggctttggactcatctgccgcagctcaacgtctcgcaacggtcgactaactccaggctgcctggcctccctgtgtatacccctctcgcgatcccaggacgagacgatcacgcccctgagctgtgattggtcaacactccactacccagccaatggtagccctgggtgggaaggaaggccttatacgtcataaagcaccatcaggacatggcggatgaagtcgggggcggggggggggggcggtgacatctaatgaggaaggcagggtgctctagttggagaaagggagatttgggttagcacccctaaagatagttcccaaactgacatgtcgcccctcctaaactccccatgttcagttttggcagatcatgtggcaagggaggatatttcccccacatgtttcccccggaacccccattcagtggtacattctgttcctccacaactaccatcattacccagtttctgtatgtcctacctaaaatccctccatgctaactgggatggatggagggctgtacgaagacgtcagtcatccctctctcctacaaattcctctgctacaccttgaggatcattcacttcttggctgccatggaacaacttttccatctcacatgcttctcccagcatccacatagtgcctcacaatttttcattctcatggtttaaagcactggcttccagaggtcaagattagcaaacacactagctcagctgggtatctgtatcgggctgggttcctcagagaaggagaaactaaaccaaacaggatactctgtgtgtgtgtgtgtgtgtgtgtgtgtgtgtgtgtgtgtgtgtgtgtaatattatatatcataaatatgtatttactaccatgtagtatttatttatgaataatattatatatgagatacagtttattctaaacaattggctcacacattcacacaatgtgggggtctaggcagctgaaatgtatagggcaagtgagcatcctggaaactaaaagtttctgcacagccaacaatcaacacaatgaaaaggcacgctatggtttgggagaagctatttgcgaaccatatatctaataatgagttaatatccaaagtatataaagaactcacatagctcaatagcaaataaatagtatggttaacaaataggcaaaggacttgaataggcatttctagaaagaaaacacacaactggccaacaggtatatgaaaatgtgctcaacatcgttaataatcagagaatgcaaatgataaccacaatgaactatcacctcactgttacatgctgttgacagacgtgtaattggcacagccgttataaaaaatagtataattgttccttggaaaatcaaaatagatctaccatacgacccagcagctcatctgttgagtatgtaccccacccctgaaatgaagtccacatctcatacagatatctccagtactaattgtaactcactaattacacaggaaattagagtttctatttgaaaagaatggtttttttttcaccattctggtatcaaatatttattctagtcatctcttcttatttcttactttgtaataacctaggtactgctgcccattgacagaaccaccttattattccagcaagaaatgagaaatattgaggagaatgcaatattatacttctgtcttcaaccagtttttcccattttagggaggattctgtatttaactcttactcaggtaactctagttaccatatccgtagtacctagtcaacaatccaaaaaaagtaagaacacagaattgactggagtggttactaaactttctatgttcaaccagtttcctagtaattgctagttgtttattcaactagtactgagaagaatttgtttattccaggtactggcttcatgtagttatctctagttaattacttacttggataaagttgaaagctactgtattaggtaatacttctaacatgaggttggaattttgcattgaggaaaatggttattgaactccctggcataggccagttatcttcagcttcctgggatcaattacctggtctggctaattctagctatctttaggttgctaattaca

SEQ ID NO: 1564487 - DNA, 4001 bp, Homo sapiens
atttttcttcttaattatattagattgtagggaggggaccctgaaaggaaagagatggaaaccattgtaccatcagtttatattgaggaaaaggtattttaacaatgaaacctaagtaggtagaatccagatcctggtacttggtgcttgtgctggcaggattgcaagaaaaaataaaccctaaatgaagcagagtcatcctgtgagggggaaatttgtctccagtgctcagccatgacgcaaaccttatgctcctgtctggcaaactgtgacctctccctctgccctcaagcccgcaagaccccacttccctccctccccgcacaacacctcttccttccttctttcgtttctcgctccccactcaccacctcttccccccttcctccctccccacaggccacctcttcctctctccctcccaacacaccacctcttcctccctccctccctgcataccacctttttctccctctctccccacacaccacctcttccacccttcctccctccccacaggccacctcttcctccctccctccctacacaccacctctttctccctctctcactccccacccaccttctgttcctccctgcctcccgacccaccacctcttcctacctccccgccacacaccttttcctccctccctccctacacaccacgtattcctgtctccctccccacacaccacgtcttcccccctgtctccctcctgacacacctcttcttcctccctccctccccacacacctcttcttcctccatcccttcccacacacctcttcctccctccctccccacacacctcatcttcctccctccctcccaccccacacaccacctcttcctcactccctccccacccaccacctcttcctccctccccacacaccacctcttcctcactccctccccacccaccccttcctccctccccacaccacttcttccctccctccccacaaacctcctcttcctccctccctgcccacccaccacctctgcctccctccctccctccctacacaccacctcttcccgcctgcctccctcctgacacacttcttccctccctccccacacaccacctcttcctccctccctccccacacaccacctcttccttcctccctccccacccaccacctctgcctccctccctccccacacaccacctcttcctccctccctccccacacacctcttacccccccctccctccctcctcaccatcagagaacacggagtcactcagatcggtttgcaacacattcattttattgtcatcaacatgggaagcaccctgctggtgagatctctgaggtctggcagctgggcctaaacttagttgctgctcagggagataggggagtagatgggcgccccttactcagtggttcctccagctcgctctcctgactcagggggtcgtgctgggtcccctcgctcactggctcctccggcggcagctcgtgctgagggagctcctggctgggctggtcgctggggccgggtgccgctggcccgctctccgcctcaggtgccgtcacggccgccatctttgtcgcagcccctttcttcccgcgtctccctccacgaactgcttctcccttctcggccaccttggtagtctggaaggacaacagggagatcacagaagggctctggtttagggacgaggatggaggaggctgggaacagggacgtgtcctcagaagcggtgggggccgggttggggggttgtgccaagtgaggacaggagaggcttcttgtgaggaaagaggcgaggggaagacgaggaggagcttgggagggtcactcaccttcttcttcgggccactggggctcggctgagaggaggacttcctctttcctgtctccttggccttggccggaggtcccgaggctctcggctttggactcatctgccgcagctcaacgtctcgcaacggtcgactaactccaggctgcctggcctccctgtgtatacccctctcgcgatcccaggacgagacgatcacgcccctgagctgtgattggtcaacactccactacccagccaatggtagccctgggtgggaaggaaggccttatacgtcataaagcaccatcaggacatggcggatgaagtcgggggcggggggggggggcggtgacatctaatgaggaaggcagggtgctctagttggagaaagggagatttgggttagcacccctaaagatagttcccaaactgacatgtcgcccctcctaaactccccatgttcagttttggcagatcatgtggcaagggaggatatttcccccacatgtttcccccggaacccccattcagtggtacattctgttcctccacaactaccatcattacccagtttctgtatgtcctacctaaaatccctccatgctaactgggatggatggagggctgtacgaagacgtcagtcatccctctctcctacaaattcctctgctacaccttgaggatcattcacttcttggctgccatggaacaacttttccatctcacatgcttctcccagcatccacatagtgcctcacaatttttcattctcatggtttaaagcactggcttccagaggtcaagattagcaaacacactagctcagctgggtatctgtatcgggctgggttcctcagagaaggagaaactaaaccaaacaggatactctgtgtgtgtgtgtgtgtgtgtgtgtgtgtgtgtgtgtgtgtgtgtgtaatattatatatcataaatatgtatttactaccatgtagtatttatttatgaataatattatatatgagatacagtttattctaaacaattggctcacacattcacacaatgtgggggtctaggcagctgaaatgtatagggcaagtgagcatcctggaaactaaaagtttctgcacagccaacaatcaacacaatgaaaaggcacgctatggtttgggagaagctatttgcgaaccatatatctaataatgagttaatatccaaagtatataaagaactcacatagctcaatagcaaataaatagtatggttaacaaataggcaaaggacttgaataggcatttctagaaagaaaacacacaactggccaacaggtatatgaaaatgtgctcaacatcgttaataatcagagaatgcaaatgataaccacaatgaactatcacctcactgttacatgctgttgacagacgtgtaattggcacagccgttataaaaaatagtataattgttccttggaaaatcaaaatagatctaccatacgacccagcagctcatctgttgagtatgtaccccacccctgaaatgaagtccacatctcatacagatatctccagtactaattgtaactcactaattacacaggaaattagagtttctatttgaaaagaatggtttttttttcaccattctggtatcaaatatttattctagtcatctcttcttatttcttactttgtaataacctaggtactgctgcccattgacagaaccaccttattattccagcaagaaatgagaaatattgaggagaatgcaatattatacttctgtcttcaaccagtttttcccattttagggaggattctgtatttaactcttactcaggtaactctagttaccatatccgtagtacctagtcaacaatccaaaaaaagtaagaacacagaattgactggagtggttactaaactttctatgttcaaccagtttcctagtaattgctagttgtttattcaactagtactgagaagaatttgtttattccaggtactggcttcatgtagttatctctagttaattacttacttggataaagttgaaagctactgtattaggtaatacttctaacatgaggttggaattttgcattgaggaaaatggttattgaactccctggcataggccagttatcttcagcttcctgggatcaattacctggtctggctaattctagctatctttaggttgctaatt

SEQ ID NO: 1564488 - DNA, 4001 bp, Homo sapiens
aatttttcttcttaattatattagattgtagggaggggaccctgaaaggaaagagatggaaaccattgtaccatcagtttatattgaggaaaaggtattttaacaatgaaacctaagtaggtagaatccagatcctggtacttggtgcttgtgctggcaggattgcaagaaaaaataaaccctaaatgaagcagagtcatcctgtgagggggaaatttgtctccagtgctcagccatgacgcaaaccttatgctcctgtctggcaaactgtgacctctccctctgccctcaagcccgcaagaccccacttccctccctccccgcacaacacctcttccttccttctttcgtttctcgctccccactcaccacctcttccccccttcctccctccccacaggccacctcttcctctctccctcccaacacaccacctcttcctccctccctccctgcataccacctttttctccctctctccccacacaccacctcttccacccttcctccctccccacaggccacctcttcctccctccctccctacacaccacctctttctccctctctcactccccacccaccttctgttcctccctgcctcccgacccaccacctcttcctacctccccgccacacaccttttcctccctccctccctacacaccacgtattcctgtctccctccccacacaccacgtcttcccccctgtctccctcctgacacacctcttcttcctccctccctccccacacacctcttcttcctccatcccttcccacacacctcttcctccctccctccccacacacctcatcttcctccctccctcccaccccacacaccacctcttcctcactccctccccacccaccacctcttcctccctccccacacaccacctcttcctcactccctccccacccaccccttcctccctccccacaccacttcttccctccctccccacaaacctcctcttcctccctccctgcccacccaccacctctgcctccctccctccctccctacacaccacctcttcccgcctgcctccctcctgacacacttcttccctccctccccacacaccacctcttcctccctccctccccacacaccacctcttccttcctccctccccacccaccacctctgcctccctccctccccacacaccacctcttcctccctccctccccacacacctcttacccccccctccctccctcctcaccatcagagaacacggagtcactcagatcggtttgcaacacattcattttattgtcatcaacatgggaagcaccctgctggtgagatctctgaggtctggcagctgggcctaaacttagttgctgctcagggagataggggagtagatgggcgccccttactcagtggttcctccagctcgctctcctgactcagggggtcgtgctgggtcccctcgctcactggctcctccggcggcagctcgtgctgagggagctcctggctgggctggtcgctggggccgggtgccgctggcccgctctccgcctcaggtgccgtcacggccgccatctttgtcgcagcccctttcttcccgcgtctccctccacgaactgcttctcccttctcggccaccttggtagtctggaaggacaacagggagatcacagaagggctctggtttagggacgaggatggaggaggctgggaacagggacgtgtcctcagaagcggtgggggccgggttggggggttgtgccaagtgaggacaggagaggcttcttgtgaggaaagaggcgaggggaagacgaggaggagcttgggagggtcactcaccttcttcttcgggccactggggctcggctgagaggaggacttcctctttcctgtctccttggccttggccggaggtcccgaggctctcggctttggactcatctgccgcagctcaacgtctcgcaacggtcgactaactccaggctgcctggcctccctgtgtatacccctctcgcgatcccaggacgagacgatcacgcccctgagctgtgattggtcaacactccactacccagccaatggtagccctgggtgggaaggaaggccttatacgtcataaagcaccatcaggacatggcggatgaagtcgggggcggggggggggggcggtgacatctaatgaggaaggcagggtgctctagttggagaaagggagatttgggttagcacccctaaagatagttcccaaactgacatgtcgcccctcctaaactccccatgttcagttttggcagatcatgtggcaagggaggatatttcccccacatgtttcccccggaacccccattcagtggtacattctgttcctccacaactaccatcattacccagtttctgtatgtcctacctaaaatccctccatgctaactgggatggatggagggctgtacgaagacgtcagtcatccctctctcctacaaattcctctgctacaccttgaggatcattcacttcttggctgccatggaacaacttttccatctcacatgcttctcccagcatccacatagtgcctcacaatttttcattctcatggtttaaagcactggcttccagaggtcaagattagcaaacacactagctcagctgggtatctgtatcgggctgggttcctcagagaaggagaaactaaaccaaacaggatactctgtgtgtgtgtgtgtgtgtgtgtgtgtgtgtgtgtgtgtgtgtgtgtaatattatatatcataaatatgtatttactaccatgtagtatttatttatgaataatattatatatgagatacagtttattctaaacaattggctcacacattcacacaatgtgggggtctaggcagctgaaatgtatagggcaagtgagcatcctggaaactaaaagtttctgcacagccaacaatcaacacaatgaaaaggcacgctatggtttgggagaagctatttgcgaaccatatatctaataatgagttaatatccaaagtatataaagaactcacatagctcaatagcaaataaatagtatggttaacaaataggcaaaggacttgaataggcatttctagaaagaaaacacacaactggccaacaggtatatgaaaatgtgctcaacatcgttaataatcagagaatgcaaatgataaccacaatgaactatcacctcactgttacatgctgttgacagacgtgtaattggcacagccgttataaaaaatagtataattgttccttggaaaatcaaaatagatctaccatacgacccagcagctcatctgttgagtatgtaccccacccctgaaatgaagtccacatctcatacagatatctccagtactaattgtaactcactaattacacaggaaattagagtttctatttgaaaagaatggtttttttttcaccattctggtatcaaatatttattctagtcatctcttcttatttcttactttgtaataacctaggtactgctgcccattgacagaaccaccttattattccagcaagaaatgagaaatattgaggagaatgcaatattatacttctgtcttcaaccagtttttcccattttagggaggattctgtatttaactcttactcaggtaactctagttaccatatccgtagtacctagtcaacaatccaaaaaaagtaagaacacagaattgactggagtggttactaaactttctatgttcaaccagtttcctagtaattgctagttgtttattcaactagtactgagaagaatttgtttattccaggtactggcttcatgtagttatctctagttaattacttacttggataaagttgaaagctactgtattaggtaatacttctaacatgaggttggaattttgcattgaggaaaatggttattgaactccctggcataggccagttatcttcagcttcctgggatcaattacctggtctggctaattctagctatctttaggttgctaat

SEQ ID NO: 1564489 - DNA, 4001 bp, Homo sapiens
ctcattgccatgctaattttatatcctttgagtacgtatctggaagtagagtagctggattatgtggtaattcttatttttaatttaactgtatttttgaacactcaattctatgaccccaaaagcacagactagaaaagcacaacaaaaaacaattggatcacattacatcaaactaaaatgtttctgtaccacagagggaaaagggtgaaaagcaaatgttcactgatagtgtatatgctatattacaagcacttattaaattaaaggtataggttccaaaatgtactaggtgaaaaatgtattatggttattttttctgcttagtttttgtagccagatggatttttcattttgttttgtttaataagctgtacaattatatttaagaaaacaaaaattattaatgcatagtcacattagaaaaatcaattttattagaaactacttccaaggttttgttgtttatattttttatgagtatctttataaagtcacactcagcctctttactctttgttctgtgaaagtatatatggatattgcatactcacttattgaaaatatcctacccttctccatgagtgatagtaattcctcagctgcttacttttattcttttaactgaattttctccagatgcttacacaatatcacagtgcttctggatgattttcagtatctcctggcaatactttgcccgaccaccttggttgcaaatactgacagaagcggagcttaaagccaaaggctaatatgtaggttttgatgaactacacggcaattattgagtcacaacacttcggtaaaacgttccctccaaagaaactaaatatcaatattattatcacattttctaaaaactgaaatctgtagtgtaggattgtatgtcccacctcgtgtctcttatcaattcctcatttgacagctgcagtttcactgctgacaagcaggagaattgatggcagcatatactagcatgattaagataagcatccatacttacccaccatgctggaattattttttgtgttgctaggaagatgagttccacttttcgaaaactccagccatggtgtcaacaataatacaaaatatatgattaatagaaagtgtaagctcccctgtttcagagatgcagggaagaatgccagagtcactacaggtgagataatcaccaacgaatgccatatcatgagatagatcaattttatcacctgtagcttaatggcagcaaagtcgttgccagtgcggatggccagtatattgcagtgaatggcacctacacaactgataagagggaatatgtcatcagcaatgctattaaagataaacatgaaaatgctagagaataattttcattagtaatggccactttctcttttaaacttgccaagttaagatatatttctcccaacccacctccttcggaaaataatttacatacaaaaaagaaagaaaaaaaaagatttgttatctttccattatcagggatttagtgaatatatgcatgcaaaacatataaaataaagaataagtgaatacacacatacacaaatttataaatgtatatacacattcccttaaaataaaataactggaactcatgaaattggatagagacatttgtatctgacgttacaaggtgtgacagcacctagaaagaagtctcaattaagaacaaataaaattgcgtgaattagatcttgaaaaggtagtttcttttttatataaagttagagtgtaaagtaggaaattacggtgtaaaataggaggtgaatgcaatataaactgtgttttagactctggtgataacaggaaatcggaaataagctgtggagttcaagtaaattctggaagtggagctgccagattttgctgtgtgatggaatacaaggtactagagaagcagaaaaattaaaagttttagaaattaagtgatttgtgtgggcatgtttttgtttgtgtgtacttaggtaattttatcagaagtttttaatacgaaaattaatttaattttgacattgttatcccaataattagactaatatgcacaaggaagaaaaacaaaattatgtagtagctgtataatcagtttaaacaatcttctactacattcagttgaaagagtaaaaattcatttcacatatacagaagggttaaaataatacagtcttcatacacaatgaaatgaagccagaaaacaaaaagaggccaaatagtctttactcatctaaagtaactattcattttctaacaccatttagaaaatgaatatcgagagtccatttattccttcagggatacccaaagagaaactctaaagcaataacattcttaactgcatttatgagaaataagactgaataaaaagaaatgatctaaaagttaaattttagaaagtaaattttagctgggtgtagtgactcatacctgtaaccctagcactttagcaggctgaggtgagtagatcacttgagcccaacaataacaacaagaaaacaccaaaaatgttatccaggcatggtggcacattcctgtagtctcaactattcaggaggtggaggtgggatgctcacttgggcgaaggaggtaggcatagtacattttgccttgggacatttatttgcctgtccccttgccccagcactttgggaggttgatacccaggggtaatcatgtagaccaaccccggcaacagattagaaactatgatctccgcagaatggagctgagttcccgtcaatattcccactgattgactacagtaacctcagacactgaataaagatcagagggcagaccatggaagttacaggccttgagtgcatccagtgctcaactgtgtgatacaggtgcaacctggcactgagtcgactttgtcagtcaaattactccagccatgaaagtctgctcattaatgtttcccctcgtgctaccagggctgaagctatcataggctaaaataccttaatttcctcctccttgccctgaatctccggacagccttactgtggaagaaagcttccaaacaaaggcaaactacaaacactgcattaggcacctacatcactgcacagacattgatgcatagtcacaagcattaggatcaatgagagaaacatgacggcatcaagtggtcaaaataaagtgctggtggtgactgacccaaaagagatgggcatggacacaaggcctgacaaggaattcaaaatacttgtttgaagacaatgcagtggacttcagcaaaacacaaagaattctgaaatttatcagagaagcttacagaagagattaaaatacgggaggaaaaaacaaacagaaatcttgaagaataaaacacaacaaaataaaaaatgcaattgacagcagtgacaatagaagtggtcaagcagcaaaactcaaagggaggtcaattcaaaatatacagttagaggagaaaacataaataagattcatgagattaatgggataacatccaaagagccaatgtgtcagacactggcattcaagagtgtggtagagccgggtgtgatggcccatgcctgtatcttcagcactttgcggggccaaggcgggtggatcatatgttgtcaggagcttgagagtagcccggacaatatggtgaaatggtttatctattataatacaaaaattagccgggtgtattggtggacatctgcgatcccagctactcagaaacctgagtcaggagaatcactggaactcaggagaatcactggaaaccaggaagtggatgctgcagtgagccacaatcacaccattgcactccaacctgcgagacaagagcaaacctccatctcaaaaaaaaaaagtgtaagaaaagagtagaaagcttatttggataaataataacagaagccttttcaaacttaaataaaatataaatattctgctataggaatcttgaaggcttacaatcacattcaatttcaataaacatatccctgtgacttaatataatcaaaccaccaaacatc

SEQ ID NO: 1564490 - DNA, 4001 bp, Homo sapiens
tctcattgccatgctaattttatatcctttgagtacgtatctggaagtagagtagctggattatgtggtaattcttatttttaatttaactgtatttttgaacactcaattctatgaccccaaaagcacagactagaaaagcacaacaaaaaacaattggatcacattacatcaaactaaaatgtttctgtaccacagagggaaaagggtgaaaagcaaatgttcactgatagtgtatatgctatattacaagcacttattaaattaaaggtataggttccaaaatgtactaggtgaaaaatgtattatggttattttttctgcttagtttttgtagccagatggatttttcattttgttttgtttaataagctgtacaattatatttaagaaaacaaaaattattaatgcatagtcacattagaaaaatcaattttattagaaactacttccaaggttttgttgtttatattttttatgagtatctttataaagtcacactcagcctctttactctttgttctgtgaaagtatatatggatattgcatactcacttattgaaaatatcctacccttctccatgagtgatagtaattcctcagctgcttacttttattcttttaactgaattttctccagatgcttacacaatatcacagtgcttctggatgattttcagtatctcctggcaatactttgcccgaccaccttggttgcaaatactgacagaagcggagcttaaagccaaaggctaatatgtaggttttgatgaactacacggcaattattgagtcacaacacttcggtaaaacgttccctccaaagaaactaaatatcaatattattatcacattttctaaaaactgaaatctgtagtgtaggattgtatgtcccacctcgtgtctcttatcaattcctcatttgacagctgcagtttcactgctgacaagcaggagaattgatggcagcatatactagcatgattaagataagcatccatacttacccaccatgctggaattattttttgtgttgctaggaagatgagttccacttttcgaaaactccagccatggtgtcaacaataatacaaaatatatgattaatagaaagtgtaagctcccctgtttcagagatgcagggaagaatgccagagtcactacaggtgagataatcaccaacgaatgccatatcatgagatagatcaattttatcacctgtagcttaatggcagcaaagtcgttgccagtgcggatggccagtatattgcagtgaatggcacctacacaactgataagagggaatatgtcatcagcaatgctattaaagataaacatgaaaatgctagagaataattttcattagtaatggccactttctcttttaaacttgccaagttaagatatatttctcccaacccacctccttcggaaaataatttacatacaaaaaagaaagaaaaaaaaagatttgttatctttccattatcagggatttagtgaatatatgcatgcaaaacatataaaataaagaataagtgaatacacacatacacaaatttataaatgtatatacacattcccttaaaataaaataactggaactcatgaaattggatagagacatttgtatctgacgttacaaggtgtgacagcacctagaaagaagtctcaattaagaacaaataaaattgcgtgaattagatcttgaaaaggtagtttcttttttatataaagttagagtgtaaagtaggaaattacggtgtaaaataggaggtgaatgcaatataaactgtgttttagactctggtgataacaggaaatcggaaataagctgtggagttcaagtaaattctggaagtggagctgccagattttgctgtgtgatggaatacaaggtactagagaagcagaaaaattaaaagttttagaaattaagtgatttgtgtgggcatgtttttgtttgtgtgtacttaggtaattttatcagaagtttttaatacgaaaattaatttaattttgacattgttatcccaataattagactaatatgcacaaggaagaaaaacaaaattatgtagtagctgtataatcagtttaaacaatcttctactacattcagttgaaagagtaaaaattcatttcacatatacagaagggttaaaataatacagtcttcatacacaatgaaatgaagccagaaaacaaaaagaggccaaatagtctttactcatctaaagtaactattcattttctaacaccatttagaaaatgaatatcgagagtccatttattccttcagggatacccaaagagaaactctaaagcaataacattcttaactgcatttatgagaaataagactgaataaaaagaaatgatctaaaagttaaattttagaaagtaaattttagctgggtgtagtgactcatacctgtaaccctagcactttagcaggctgaggtgagtagatcacttgagcccaacaataacaacaagaaaacaccaaaaatgttatccaggcatggtggcacattcctgtagtctcaactattcaggaggtggaggtgggatgctcacttgggcgaaggaggtaggcatagtacattttgccttgggacatttatttgcctgtccccttgccccagcactttgggaggttgatacccaggggtaatcatgtagaccaaccccggcaacagattagaaactatgatctccgcagaatggagctgagttcccgtcaatattcccactgattgactacagtaacctcagacactgaataaagatcagagggcagaccatggaagttacaggccttgagtgcatccagtgctcaactgtgtgatacaggtgcaacctggcactgagtcgactttgtcagtcaaattactccagccatgaaagtctgctcattaatgtttcccctcgtgctaccagggctgaagctatcataggctaaaataccttaatttcctcctccttgccctgaatctccggacagccttactgtggaagaaagcttccaaacaaaggcaaactacaaacactgcattaggcacctacatcactgcacagacattgatgcatagtcacaagcattaggatcaatgagagaaacatgacggcatcaagtggtcaaaataaagtgctggtggtgactgacccaaaagagatgggcatggacacaaggcctgacaaggaattcaaaatacttgtttgaagacaatgcagtggacttcagcaaaacacaaagaattctgaaatttatcagagaagcttacagaagagattaaaatacgggaggaaaaaacaaacagaaatcttgaagaataaaacacaacaaaataaaaaatgcaattgacagcagtgacaatagaagtggtcaagcagcaaaactcaaagggaggtcaattcaaaatatacagttagaggagaaaacataaataagattcatgagattaatgggataacatccaaagagccaatgtgtcagacactggcattcaagagtgtggtagagccgggtgtgatggcccatgcctgtatcttcagcactttgcggggccaaggcgggtggatcatatgttgtcaggagcttgagagtagcccggacaatatggtgaaatggtttatctattataatacaaaaattagccgggtgtattggtggacatctgcgatcccagctactcagaaacctgagtcaggagaatcactggaactcaggagaatcactggaaaccaggaagtggatgctgcagtgagccacaatcacaccattgcactccaacctgcgagacaagagcaaacctccatctcaaaaaaaaaaagtgtaagaaaagagtagaaagcttatttggataaataataacagaagccttttcaaacttaaataaaatataaatattctgctataggaatcttgaaggcttacaatcacattcaatttcaataaacatatccctgtgacttaatataatcaaaccaccaaacat

SEQ ID NO: 1564491 - DNA, 4001 bp, Homo sapiens; identical to SEQ ID NO: 1564489

SEQ ID NO: 1564492 - DNA, 4001 bp, Homo sapiens; identical to SEQ ID NO: 1564490

SEQ ID NO: 1564493 - DNA, 4001 bp, Homo sapiens; identical to SEQ ID NO: 1564327

SEQ ID NO: 1564494 - DNA, 4001 bp, Homo sapiens; identical to SEQ ID NO: 1564328

SEQ ID NO: 1564495 - DNA, 4001 bp, Homo sapiens
tcactcttgttccccaggctggagtgcagtggtacgatatcgactcactgcaacctccgccttcaaagtacctgggattacaggcgcgcgccgtcatgccttgctagtttttttgtatttttagtagagacggggtttcgctatgtcggtctccagctggtctcgagctggattcgaactcctgacctcgggtgatccgcgcacttcggcctcccaaagtggtgggattacaggcgtgagtcaccgcacctggccaaaaaacagctaccttcttgatcatccatccagtaacgaaaacacttatcaatttatactagctctcaatccttctcaacctttaaacttttgtaacagctgcagccagagctcagcataaactgaggtgtgccaccaatgtatttcaaaatctactttttacagcctaaatttgaatccctttcctatctatattatccactccagcaaaaccgtaaatatttgcatcttctacagacatttcattcttgtaatgacctctcctactcccattcctcaccctagctaaaccccatctacttcaggattcccaattttgcaaactgaaacctcgccttcctgtgaaatgcccgcagcaaactttttgcagtcacgttctgcattaagagccttttaaatctttcttagcacctagcactgtccaacgctcacattactgtgctccaattttccagcaaagttgtacaaaatgctaacaaaagtattttgaagatgaaactgtataagaaatttcaaataaaatctcaatgtcatcatgggtatatgaacctacaagtaatgcatgaattgtctttcaaaaagaaaaatacctcttctgcctattttccatctcttactcaaaaaaagtacacggactaaaaaaaagctcgctcgtttaaatacagctcatcaaaaaagtgtttccacataaatgggaaaagtcgccttggggaaattttattcctctgccctcgtgctgtataatttgtactgtactgtctattggacgagtgcctaataactttttcataataaattccagttctattttgcagatcctcgaagaggcaatgatggttgaaaaataagcgcatcgaaggtccccgaacagccacataatgactttaattaggggaaaataaaattttctggaatttatgtgctctcgtgagcctagatgcccgaattgccacctgctgaaacgggtggctgtagactctcggaagggcacagagccgggagcgctgaggggcgaaatgaccccggcgcccgaacggacgcctgcggcatgtcacctaaagcgtagccgacactgcacccagccaaggatgggctgtgaggggaaggccgaaaggtggcgctgccgcaggcgtctggaacgtacgcgcgcatatggcgacaaaggcaagggccgccaagggaacgagcacgccctgttgcgcagacacgccgtcgcgccggaggctgcgctgccgccgccgccgccgtccttttccccatccccgcctcaaggatcataaccgaattttttttccagataccgccttcaagatggcggctccgcctcccgacaacactctcaatactccccagcagcaggcgcctagcagccgccatcttgcccccccgtccctcctccccttcgcggacatttacatagcgaaaataggcccagcaggcctccggccttcacctcacgcctgcagccttcgccttctcgcccccgtgccgtgccctgcgtccgcagtggtgtcgaccccaggtccatcaactgccttccggacaaacgggcgaacttttcccaccctgcccgcttatggagcgcacctccgcagccgctcagggcaactggataatcactaggcctaactgcggcctcctcggggcctgttcggcgccgagcgccacgccggccggcctagcgcgggagggcgccctacgggacgccgaccaggccacaaacaggttactgcgcgcgcactaggccccgcggccgcgggggcacgcgggactcacccgacggatgtgcgggcggtcggcgacagcggcgggtgctgcaggacggcctttctctggagcactgggccgggctccggctggtagggcgggcggagggagggaggaggggccgagttcggagctgacaaaaagcggcccagctccccggcacgggcccgccgtcagcacgtcacgtcaccgcccgggagagagacccaggaaaatgcgggatggtagttgggccccctccgcccggtgggcctctcggcgccccgggtcggcgccggtcacgccccgagtccggggagtccagtgacctcactgcggtggggtctccggcagctggagtttccgtcacaacgttccttttctccgcgcgcccgccgtcaccactacttgcgcaccaccgccttagttggttgcgtgcaggcaagcggccccgcaccgggccaggccaccccctgccatctccggtggacctgggattcctaatctcccacaccctgcgccaggctctcccgagacctatcgcctctcggcgccagtcctagccaaggcgacagatctcattgttgcaggcccttagacccccgccctcagtaaacgtgtttactttattcctagggttgaggaggaaagcagatacagacatatagcattccccactgtctcctttgttggctttaaaaaaaaaaaaaaagaaagtaaatggacttgccacagtgtacaggcaagaggaggggaggattatcctaatcaattactgagccaattgatttttttttttgcgttaacgtaggtattttgaccaagatttgtaatgtctagtgtgtgttctttatggcagtgtttcatcttttggcatccttgaaatgtcagttttgtgtaattgtctcatgaacaatgaattatgcacaccctttaataaatgtaaactaacaattggttttgggattgtcttcttacaaaattatttatcctcttaaagtttaaaaaggctttagagactgagaggaaaatgcatttgattaaacagatagtactgatgaactccaaaaacgtgtattgtgcgttttcattactttacgttttaatgcactctaatttcccattaaactaggtacccaaactgtgtttaaaagttgctactaaaaagttaaacatgcctatcgcggtcgctcacctctgagcgctttgggaggacaaggctggagtatcgcttgaggccagcagatacaggcggacagctgtgatcaagccactgcactgcagcctgtgggccagagccggtaatctctaaatgtagaggccaggtatttcagttttctagcatacctatttttaaaactcagaaatcatcttgtccttaactgagaaacctaaaaatcataaaatgctttacgaaaggaaaaccagtggtacatagttgatataatgagttaagtgctggatagcaattctcttttcaaaccattggtttgaccttgttttctcaagtcgttaccttttgtttcaaaaatgataaatgagaggcggctcacccctgtaattccaaaacactttggaaggctgagataaaatcagcttgtgctcaactgatagttggagacaagcctggaaaatagggcgatccatctgtacaaaaaaattgaaaagtgctgggtgtggtggaacacgcctgtagtcccagctatgggaggcttaagcccatttgtttgggctatgattgtgataccacactccagcctttatgacagagcaagatcttgtatttaaataaataaaatcttgtttgagaaattttcatcaagttaagacaatgtattttgaggaaagaaaagtatttttacattatgtttttcagtaaaaaaaactagcctaatttcatatgtaattaacataatttcaaaatactgataacgttcaagtttttagagatggtacctggctctgccacgcaggctggagtgcagtggcaccttcgtagc

SEQ ID NO: 1564496 - DNA, 4001 bp, Homo sapiens
tctactttttacagcctaaatttgaatccctttcctatctatattatccactccagcaaaaccgtaaatatttgcatcttctacagacatttcattcttgtaatgacctctcctactcccattcctcaccctagctaaaccccatctacttcaggattcccaattttgcaaactgaaacctcgccttcctgtgaaatgcccgcagcaaactttttgcagtcacgttctgcattaagagccttttaaatctttcttagcacctagcactgtccaacgctcacattactgtgctccaattttccagcaaagttgtacaaaatgctaacaaaagtattttgaagatgaaactgtataagaaatttcaaataaaatctcaatgtcatcatgggtatatgaacctacaagtaatgcatgaattgtctttcaaaaagaaaaatacctcttctgcctattttccatctcttactcaaaaaaagtacacggactaaaaaaaagctcgctcgtttaaatacagctcatcaaaaaagtgtttccacataaatgggaaaagtcgccttggggaaattttattcctctgccctcgtgctgtataatttgtactgtactgtctattggacgagtgcctaataactttttcataataaattccagttctattttgcagatcctcgaagaggcaatgatggttgaaaaataagcgcatcgaaggtccccgaacagccacataatgactttaattaggggaaaataaaattttctggaatttatgtgctctcgtgagcctagatgcccgaattgccacctgctgaaacgggtggctgtagactctcggaagggcacagagccgggagcgctgaggggcgaaatgaccccggcgcccgaacggacgcctgcggcatgtcacctaaagcgtagccgacactgcacccagccaaggatgggctgtgaggggaaggccgaaaggtggcgctgccgcaggcgtctggaacgtacgcgcgcatatggcgacaaaggcaagggccgccaagggaacgagcacgccctgttgcgcagacacgccgtcgcgccggaggctgcgctgccgccgccgccgccgtccttttccccatccccgcctcaaggatcataaccgaattttttttccagataccgccttcaagatggcggctccgcctcccgacaacactctcaatactccccagcagcaggcgcctagcagccgccatcttgcccccccgtccctcctccccttcgcggacatttacatagcgaaaataggcccagcaggcctccggccttcacctcacgcctgcagccttcgccttctcgcccccgtgccgtgccctgcgtccgcagtggtgtcgaccccaggtccatcaactgccttccggacaaacgggcgaacttttcccaccctgcccgcttatggagcgcacctccgcagccgctcagggcaactggataatcactaggcctaactgcggcctcctcggggcctgttcggcgccgagcgccacgccggccggcctagcgcgggagggcgccctacgggacgccgaccaggccacaaacaggttactgcgcgcgcactaggccccgcggccgcgggggcacgcgggactcacccgacggatgtgcgggcggtcggcgacagcggcgggtgctgcaggacggcctttctctggagcactgggccgggctccggctggtagggcgggcggagggagggaggaggggccgagttcggagctgacaaaaagcggcccagctccccggcacgggcccgccgtcagcacgtcacgtcaccgcccgggagagagacccaggaaaatgcgggatggtagttgggccccctccgcccggtgggcctctcggcgccccgggtcggcgccggtcacgccccgagtccggggagtccagtgacctcactgcggtggggtctccggcagctggagtttccgtcacaacgttccttttctccgcgcgcccgccgtcaccactacttgcgcaccaccgccttagttggttgcgtgcaggcaagcggccccgcaccgggccaggccaccccctgccatctccggtggacctgggattcctaatctcccacaccctgcgccaggctctcccgagacctatcgcctctcggcgccagtcctagccaaggcgacagatctcattgttgcaggcccttagacccccgccctcagtaaacgtgtttactttattcctagggttgaggaggaaagcagatacagacatatagcattccccactgtctcctttgttggctttaaaaaaaaaaaaaaagaaagtaaatggacttgccacagtgtacaggcaagaggaggggaggattatcctaatcaattactgagccaattgatttttttttttgcgttaacgtaggtattttgaccaagatttgtaatgtctagtgtgtgttctttatggcagtgtttcatcttttggcatccttgaaatgtcagttttgtgtaattgtctcatgaacaatgaattatgcacaccctttaataaatgtaaactaacaattggttttgggattgtcttcttacaaaattatttatcctcttaaagtttaaaaaggctttagagactgagaggaaaatgcatttgattaaacagatagtactgatgaactccaaaaacgtgtattgtgcgttttcattactttacgttttaatgcactctaatttcccattaaactaggtacccaaactgtgtttaaaagttgctactaaaaagttaaacatgcctatcgcggtcgctcacctctgagcgctttgggaggacaaggctggagtatcgcttgaggccagcagatacaggcggacagctgtgatcaagccactgcactgcagcctgtgggccagagccggtaatctctaaatgtagaggccaggtatttcagttttctagcatacctatttttaaaactcagaaatcatcttgtccttaactgagaaacctaaaaatcataaaatgctttacgaaaggaaaaccagtggtacatagttgatataatgagttaagtgctggatagcaattctcttttcaaaccattggtttgaccttgttttctcaagtcgttaccttttgtttcaaaaatgataaatgagaggcggctcacccctgtaattccaaaacactttggaaggctgagataaaatcagcttgtgctcaactgatagttggagacaagcctggaaaatagggcgatccatctgtacaaaaaaattgaaaagtgctgggtgtggtggaacacgcctgtagtcccagctatgggaggcttaagcccatttgtttgggctatgattgtgataccacactccagcctttatgacagagcaagatcttgtatttaaataaataaaatcttgtttgagaaattttcatcaagttaagacaatgtattttgaggaaagaaaagtatttttacattatgtttttcagtaaaaaaaactagcctaatttcatatgtaattaacataatttcaaaatactgataacgttcaagtttttagagatggtacctggctctgccacgcaggctggagtgcagtggcaccttcgtagctcactcagccttgaactctctagttcagtgtaacagccatggcctcccaaagcactgggattacagctgtaaatcaaatattttccaaaggccttcatttaatgtccttatggtatgtcaagaatggggtctcatgtcaactgtaagcaacatggtcagaacacaaaaaacaaagtaaacattattgttaatacttacatgcttatcaaaaatcctagtattattataaaaaattaccaatatataaagcacttcagaaagaacagctaaggaatataaaggaaaaaagatgtttcctaatctgaaagatcagaggtagttcagataaactaaacagcttttgacattacttttcattcataatgttaacttttggtgagagacaaggaaaggatggtctaatttt

SEQ ID NO: 1564497 - RNA, 19 nt, Artificial Sequence
  Description of Artificial Sequence: Synthetic oligonucleotide
  Sense strand starting at position 2032 of SEQ ID NO: 1559932
gaccucuucccguguuugu

SEQ ID NO: 1564498 - RNA, 19 nt, Artificial Sequence
  Description of Artificial Sequence: Synthetic oligonucleotide
  Antisense strand to SEQ ID NO: 1564497
acaaacacgggaagagguc

SEQ ID NO: 1564499 - RNA, 19 nt, Artificial Sequence
  Description of Artificial Sequence: Synthetic oligonucleotide
  Sense strand starting at position 2042 of SEQ ID NO: 1559932
cguguuuguccuucccgga

SEQ ID NO: 1564500 - RNA, 19 nt, Artificial Sequence
  Description of Artificial Sequence: Synthetic oligonucleotide
  Antisense strand to SEQ ID NO: 1564499
uccgggaaggacaaacacg

SEQ ID NO: 1564501 - RNA, 19 nt, Artificial Sequence
  Description of Artificial Sequence: Synthetic oligonucleotide
  Sense strand starting at position 2552 of SEQ ID NO: 1559932
ccgugacaugugcucaguu

SEQ ID NO: 1564502 - RNA, 19 nt, Artificial Sequence
  Description of Artificial Sequence: Synthetic oligonucleotide
  Antisense strand to SEQ ID NO: 1564501
aacugagcacaugucacgg

SEQ ID NO: 1564503 - RNA, 19 nt, Artificial Sequence
  Description of Artificial Sequence: Synthetic oligonucleotide
  Sense strand starting at position 2553 of SEQ ID NO: 1559932
cgugacaugugcucaguua

SEQ ID NO: 1564504 - RNA, 19 nt, Artificial Sequence
  Description of Artificial Sequence: Synthetic oligonucleotide
  Antisense strand to SEQ ID NO: 1564503
uaacugagcacaugucacg

SEQ ID NO: 1564505 - RNA, 19 nt, Artificial Sequence
  Description of Artificial Sequence: Synthetic oligonucleotide
  Sense strand starting at position 2554 of SEQ ID NO: 1559932
gugacaugugcucaguuac

SEQ ID NO: 1564506 - RNA, 19 nt, Artificial Sequence
  Description of Artificial Sequence: Synthetic oligonucleotide
  Antisense strand to SEQ ID NO: 1564505
guaacugagcacaugucac

SEQ ID NO: 1564507 - RNA, 19 nt, Artificial Sequence
  Description of Artificial Sequence: Synthetic oligonucleotide
  Sense strand starting at position 2585 of SEQ ID NO: 1559932
uggucacucauguggcuau

SEQ ID NO: 1564508 - RNA, 19 nt, Artificial Sequence
  Description of Artificial Sequence: Synthetic oligonucleotide
  Antisense strand to SEQ ID NO: 1564507
auagccacaugagugacca

SEQ ID NO: 1564509 - RNA, 19 nt, Artificial Sequence
  Description of Artificial Sequence: Synthetic oligonucleotide
  Sense strand starting at position 2586 of SEQ ID NO: 1559932
ggucacucauguggcuaua

SEQ ID NO: 1564510 - RNA, 19 nt, Artificial Sequence
  Description of Artificial Sequence: Synthetic oligonucleotide
  Antisense strand to SEQ ID NO: 1564509
uauagccacaugagugacc

SEQ ID NO: 1564511 - RNA, 19 nt, Artificial Sequence
  Description of Artificial Sequence: Synthetic oligonucleotide
  Sense strand starting at position 3670 of SEQ ID NO: 1559932
guuucuauuuccugacuug

SEQ ID NO: 1564512 - RNA, 19 nt, Artificial Sequence
  Description of Artificial Sequence: Synthetic oligonucleotide
  Antisense strand to SEQ ID NO: 1564511
caagucaggaaauagaaac

SEQ ID NO: 1564513 - RNA, 19 nt, Artificial Sequence
  Description of Artificial Sequence: Synthetic oligonucleotide
  Sense strand starting at position 3688 of SEQ ID NO: 1559932
gacucugacugguguggua

SEQ ID NO: 1564514 - RNA, 19 nt, Artificial Sequence
  Description of Artificial Sequence: Synthetic oligonucleotide
  Antisense strand to SEQ ID NO: 1564513
uaccacaccagucagaguc

SEQ ID NO: 1564515 - RNA, 19 nt, Artificial Sequence
  Description of Artificial Sequence: Synthetic oligonucleotide
  Sense strand starting at position 3697 of SEQ ID NO: 1559932
uggugugguacuugguaua

SEQ ID NO: 1564516 - RNA, 19 nt, Artificial Sequence
  Description of Artificial Sequence: Synthetic oligonucleotide
  Antisense strand to SEQ ID NO: 1564515
uauaccaaguaccacacca

SEQ ID NO: 1564517 - RNA, 19 nt, Artificial Sequence
  Description of Artificial Sequence: Synthetic oligonucleotide
  Sense strand starting at position 3700 of SEQ ID NO: 1559932
ugugguacuugguauaaag

SEQ ID NO: 1564518 - RNA, 19 nt, Artificial Sequence
  Description of Artificial Sequence: Synthetic oligonucleotide
  Antisense strand to SEQ ID NO: 1564517
cuuuauaccaaguaccaca

SEQ ID NO: 1564519 - RNA, 19 nt, Artificial Sequence
  Description of Artificial Sequence: Synthetic oligonucleotide
  Sense strand starting at position 3831 of SEQ ID NO: 1559932
gugagacacuguccuuaca

SEQ ID NO: 1564520 - RNA, 19 nt, Artificial Sequence
  Description of Artificial Sequence: Synthetic oligonucleotide
  Antisense strand to SEQ ID NO: 1564519
uguaaggacagugucucac

SEQ ID NO: 1564521 - RNA, 19 nt, Artificial Sequence
  Description of Artificial Sequence: Synthetic oligonucleotide
  Sense strand starting at position 3870 of SEQ ID NO: 1559932
gguguagugacgcaagucu

SEQ ID NO: 1564522 - RNA, 19 nt, Artificial Sequence
  Description of Artificial Sequence: Synthetic oligonucleotide
  Antisense strand to SEQ ID NO: 1564521
agacuugcgucacuacacc

SEQ ID NO: 1564523 - RNA, 19 nt, Artificial Sequence
  Description of Artificial Sequence: Synthetic oligonucleotide
  Sense strand starting at position 3936 of SEQ ID NO: 1559932
uaagaagucgcggcugcaa

SEQ ID NO: 1564524 - RNA, 19 nt, Artificial Sequence
  Description of Artificial Sequence: Synthetic oligonucleotide
  Antisense strand to SEQ ID NO: 1564523
uugcagccgcgacuucuua

SEQ ID NO: 1564525 - RNA, 19 nt, Artificial Sequence
  Description of Artificial Sequence: Synthetic oligonucleotide
  Sense strand starting at position 3938 of SEQ ID NO: 1559932
agaagucgcggcugcaaua

SEQ ID NO: 1564526 - RNA, 19 nt, Artificial Sequence
  Description of Artificial Sequence: Synthetic oligonucleotide
  Antisense strand to SEQ ID NO: 1564525
uauugcagccgcgacuucu

SEQ ID NO: 1564527 - RNA, 19 nt, Artificial Sequence
  Description of Artificial Sequence: Synthetic oligonucleotide
  Sense strand starting at position 402 of SEQ ID NO: 1559933
ggugaaggcucccugacau

SEQ ID NO: 1564528 - RNA, 19 nt, Artificial Sequence
  Description of Artificial Sequence: Synthetic oligonucleotide
  Antisense strand to SEQ ID NO: 1564527
augucagggagccuucacc

SEQ ID NO: 1564529 - RNA, 19 nt, Artificial Sequence
  Description of Artificial Sequence: Synthetic oligonucleotide
  Sense strand starting at position 870 of SEQ ID NO: 1559933
ccuggaagcucugauuaga

SEQ ID NO: 1564530 - RNA, 19 nt, Artificial Sequence
  Description of Artificial Sequence: Synthetic oligonucleotide
  Antisense strand to SEQ ID NO: 1564529
ucuaaucagagcuuccagg

SEQ ID NO: 1564531 - RNA, 19 nt, Artificial Sequence
  Description of Artificial Sequence: Synthetic oligonucleotide
  Sense strand starting at position 879 of SEQ ID NO: 1559933
ucugauuagagcgaggcaa

SEQ ID NO: 1564532 - RNA, 19 nt, Artificial Sequence
  Description of Artificial Sequence: Synthetic oligonucleotide
  Antisense strand to SEQ ID NO: 1564531
uugccucgcucuaaucaga

SEQ ID NO: 1564533 - RNA, 19 nt, Artificial Sequence
  Description of Artificial Sequence: Synthetic oligonucleotide
  Sense strand starting at position 901 of SEQ ID NO: 1559933
guagucacucgauaaagag

SEQ ID NO: 1564534 - RNA, 19 nt, Artificial Sequence
  Description of Artificial Sequence: Synthetic oligonucleotide
  Antisense strand to SEQ ID NO: 1564533
cucuuuaucgagugacuac

SEQ ID NO: 1564535 - RNA, 19 nt, Artificial Sequence
  Description of Artificial Sequence: Synthetic oligonucleotide
  Sense strand starting at position 968 of SEQ ID NO: 1559933
gccguccucgcaucugauu

SEQ ID NO: 1564536 - RNA, 19 nt, Artificial Sequence
  Description of Artificial Sequence: Synthetic oligonucleotide
  Antisense strand to SEQ ID NO: 1564535
aaucagaugcgaggacggc

SEQ ID NO: 1564537 - RNA, 19 nt, Artificial Sequence
  Description of Artificial Sequence: Synthetic oligonucleotide
  Sense strand starting at position 1068 of SEQ ID NO: 1559933
gggcuuaacgcuuucguca

SEQ ID NO: 1564538 - RNA, 19 nt, Artificial Sequence
  Description of Artificial Sequence: Synthetic oligonucleotide
  Antisense strand to SEQ ID NO: 1564537
ugacgaaagcguuaagccc

SEQ ID NO: 1564539 - RNA, 19 nt, Artificial Sequence
  Description of Artificial Sequence: Synthetic oligonucleotide
  Sense strand starting at position 1179 of SEQ ID NO: 1559933
ccucacuguucuccgaaga

SEQ ID NO: 1564540 - RNA, 19 nt, Artificial Sequence
  Description of Artificial Sequence: Synthetic oligonucleotide
  Antisense strand to SEQ ID NO: 1564539
ucuucggagaacagugagg

SEQ ID NO: 1564541 - RNA, 19 nt, Artificial Sequence
  Description of Artificial Sequence: Synthetic oligonucleotide
  Sense strand starting at position 1180 of SEQ ID NO: 1559933
cucacuguucuccgaagau

SEQ ID NO: 1564542 - RNA, 19 nt, Artificial Sequence
  Description of Artificial Sequence: Synthetic oligonucleotide
  Antisense strand to SEQ ID NO: 1564541
aucuucggagaacagugag

SEQ ID NO: 1564543 - RNA, 19 nt, Artificial Sequence
  Description of Artificial Sequence: Synthetic oligonucleotide
  Sense strand starting at position 1184 of SEQ ID NO: 1559933
cuguucuccgaagauaaca

SEQ ID NO: 1564544 - RNA, 19 nt, Artificial Sequence
  Description of Artificial Sequence: Synthetic oligonucleotide
  Antisense strand to SEQ ID NO: 1564543
uguuaucuucggagaacag

SEQ ID NO: 1564545 - RNA, 19 nt, Artificial Sequence
  Description of Artificial Sequence: Synthetic oligonucleotide
  Sense strand starting at position 1208 of SEQ ID NO: 1559933
gaauauuggcagugcugga

SEQ ID NO: 1564546 - RNA, 19 nt, Artificial Sequence
  Description of Artificial Sequence: Synthetic oligonucleotide
  Antisense strand to SEQ ID NO: 1564545
uccagcacugccaauauuc

SEQ ID NO: 1564547 - RNA, 19 nt, Artificial Sequence
  Description of Artificial Sequence: Synthetic oligonucleotide
  Sense strand starting at position 1373 of SEQ ID NO: 1559933
uagcauuaaucgcucagag

SEQ ID NO: 1564548 - RNA, 19 nt, Artificial Sequence
  Description of Artificial Sequence: Synthetic oligonucleotide
  Antisense strand to SEQ ID NO: 1564547
cucugagcgauuaaugcua

SEQ ID NO: 1564549 - RNA, 19 nt, Artificial Sequence
  Description of Artificial Sequence: Synthetic oligonucleotide
  Sense strand starting at position 1433 of SEQ ID NO: 1559933
gauagagacuccuggaguc

SEQ ID NO: 1564550 - RNA, 19 nt, Artificial Sequence
  Description of Artificial Sequence: Synthetic oligonucleotide
  Antisense strand to SEQ ID NO: 1564549
gacuccaggagucucuauc

SEQ ID NO: 1564551 - RNA, 19 nt, Artificial Sequence
  Description of Artificial Sequence: Synthetic oligonucleotide
  Sense strand starting at position 1449 of SEQ ID NO: 1559933
gucagcgauuccugaucua

SEQ ID NO: 1564552 - RNA, 19 nt, Artificial Sequence
  Description of Artificial Sequence: Synthetic oligonucleotide
  Antisense strand to SEQ ID NO: 1564551
uagaucaggaaucgcugac

SEQ ID NO: 1564553 - RNA, 19 nt, Artificial Sequence
  Description of Artificial Sequence: Synthetic oligonucleotide
  Sense strand starting at position 1452 of SEQ ID NO: 1559933
agcgauuccugaucuauuu

SEQ ID NO: 1564554 - RNA, 19 nt, Artificial Sequence
  Description of Artificial Sequence: Synthetic oligonucleotide
  Antisense strand to SEQ ID NO: 1564553
aaauagaucaggaaucgcu

SEQ ID NO: 1564555 - RNA, 19 nt, Artificial Sequence
  Description of Artificial Sequence: Synthetic oligonucleotide
  Sense strand starting at position 1503 of SEQ ID NO: 1559933
agaaucugacgcugacaga

SEQ ID NO: 1564556 - RNA, 19 nt, Artificial Sequence
  Description of Artificial Sequence: Synthetic oligonucleotide
  Antisense strand to SEQ ID NO: 1564555
ucugucagcgucagauucu

SEQ ID NO: 1564557 - RNA, 19 nt, Artificial Sequence
  Description of Artificial Sequence: Synthetic oligonucleotide
  Sense strand starting at position 1525 of SEQ ID NO: 1559933
gcaggaaguugcuaaaggu

SEQ ID NO: 1564558 - RNA, 19 nt, Artificial Sequence
  Description of Artificial Sequence: Synthetic oligonucleotide
  Antisense strand to SEQ ID NO: 1564557
accuuuagcaacuuccugc

SEQ ID NO: 1564559 - RNA, 19 nt, Artificial Sequence
  Description of Artificial Sequence: Synthetic oligonucleotide
  Sense strand starting at position 1586 of SEQ ID NO: 1559933
aggguucuuuccuuuacau

SEQ ID NO: 1564560 - RNA, 19 nt, Artificial Sequence
  Description of Artificial Sequence: Synthetic oligonucleotide
  Antisense strand to SEQ ID NO: 1564559
auguaaaggaaagaacccu

SEQ ID NO: 1564561 - RNA, 19 nt, Artificial Sequence
  Description of Artificial Sequence: Synthetic oligonucleotide
  Sense strand starting at position 1588 of SEQ ID NO: 1559933
gguucuuuccuuuacauca

SEQ ID NO: 1564562 - RNA, 19 nt, Artificial Sequence
  Description of Artificial Sequence: Synthetic oligonucleotide
  Antisense strand to SEQ ID NO: 1564561
ugauguaaaggaaagaacc

SEQ ID NO: 1564563 - RNA, 19 nt, Artificial Sequence
  Description of Artificial Sequence: Synthetic oligonucleotide
  Sense strand starting at position 1599 of SEQ ID NO: 1559933
uuacaucaagcgggacuua

SEQ ID NO: 1564564 - RNA, 19 nt, Artificial Sequence
  Description of Artificial Sequence: Synthetic oligonucleotide
  Antisense strand to SEQ ID NO: 1564563
uaagucccgcuugauguaa

SEQ ID NO: 1564565 - RNA, 19 nt, Artificial Sequence
  Description of Artificial Sequence: Synthetic oligonucleotide
  Sense strand starting at position 1699 of SEQ ID NO: 1559933
gcaggugugugaucggcaa

SEQ ID NO: 1564566 - RNA, 19 nt, Artificial Sequence
  Description of Artificial Sequence: Synthetic oligonucleotide
  Antisense strand to SEQ ID NO: 1564565
uugccgaucacacaccugc

SEQ ID NO: 1564567 - RNA, 19 nt, Artificial Sequence
  Description of Artificial Sequence: Synthetic oligonucleotide
  Sense strand starting at position 1701 of SEQ ID NO: 1559933
aggugugugaucggcaaag

SEQ ID NO: 1564568 - RNA, 19 nt, Artificial Sequence
  Description of Artificial Sequence: Synthetic oligonucleotide
  Antisense strand to SEQ ID NO: 1564567
cuuugccgaucacacaccu

SEQ ID NO: 1564569 - RNA, 19 nt, Artificial Sequence
  Description of Artificial Sequence: Synthetic oligonucleotide
  Sense strand starting at position 1757 of SEQ ID NO: 1559933
gagaaucagugaucaauuc

SEQ ID NO: 1564570 - RNA, 19 nt, Artificial Sequence
  Description of Artificial Sequence: Synthetic oligonucleotide
  Antisense strand to SEQ ID NO: 1564569
gaauugaucacugauucuc

SEQ ID NO: 1564571 - RNA, 19 nt, Artificial Sequence
  Description of Artificial Sequence: Synthetic oligonucleotide
  Sense strand starting at position 1819 of SEQ ID NO: 1559933
cccuaauucccagggaacu

SEQ ID NO: 1564572 - RNA, 19 nt, Artificial Sequence
  Description of Artificial Sequence: Synthetic oligonucleotide
  Antisense strand to SEQ ID NO: 1564571
aguucccugggaauuaggg

SEQ ID NO: 1564573 - RNA, 19 nt, Artificial Sequence
  Description of Artificial Sequence: Synthetic oligonucleotide
  Sense strand starting at position 1820 of SEQ ID NO: 1559933
ccuaauucccagggaacuu

SEQ ID NO: 1564574 - RNA, 19 nt, Artificial Sequence
  Description of Artificial Sequence: Synthetic oligonucleotide
  Antisense strand to SEQ ID NO: 1564573
aaguucccugggaauuagg

SEQ ID NO: 1564575 - RNA, 19 nt, Artificial Sequence
  Description of Artificial Sequence: Synthetic oligonucleotide
  Sense strand starting at position 2274 of SEQ ID NO: 1559933
uguauaaccggcugcaaua

SEQ ID NO: 1564576 - RNA, 19 nt, Artificial Sequence
  Description of Artificial Sequence: Synthetic oligonucleotide
  Antisense strand to SEQ ID NO: 1564575
uauugcagccgguuauaca

SEQ ID NO: 1564577 - RNA, 19 nt, Artificial Sequence
  Description of Artificial Sequence: Synthetic oligonucleotide
  Sense strand starting at position 2346 of SEQ ID NO: 1559933
ccaggcucccucuaguuua

SEQ ID NO: 1564578 - RNA, 19 nt, Artificial Sequence
  Description of Artificial Sequence: Synthetic oligonucleotide
  Antisense strand to SEQ ID NO: 1564577
uaaacuagagggagccugg

SEQ ID NO: 1564579 - RNA, 19 nt, Artificial Sequence
  Description of Artificial Sequence: Synthetic oligonucleotide
  Sense strand starting at position 2381 of SEQ ID NO: 1559933
uacacucguccgucuguaa

SEQ ID NO: 1564580 - RNA, 19 nt, Artificial Sequence
  Description of Artificial Sequence: Synthetic oligonucleotide
  Antisense strand to SEQ ID NO: 1564579
uuacagacggacgagugua

SEQ ID NO: 1564581 - RNA, 19 nt, Artificial Sequence
  Description of Artificial Sequence: Synthetic oligonucleotide
  Sense strand starting at position 2384 of SEQ ID NO: 1559933
acucguccgucuguaaagu

SEQ ID NO: 1564582 - RNA, 19 nt, Artificial Sequence
  Description of Artificial Sequence: Synthetic oligonucleotide
  Antisense strand to SEQ ID NO: 1564581
acuuuacagacggacgagu

SEQ ID NO: 1564583 - RNA, 19 nt, Artificial Sequence
  Description of Artificial Sequence: Synthetic oligonucleotide
  Sense strand starting at position 2385 of SEQ ID NO: 1559933
cucguccgucuguaaagua

SEQ ID NO: 1564584 - RNA, 19 nt, Artificial Sequence
  Description of Artificial Sequence: Synthetic oligonucleotide
  Antisense strand to SEQ ID NO: 1564583
uacuuuacagacggacgag

SEQ ID NO: 1564585 - RNA, 19 nt, Artificial Sequence
  Description of Artificial Sequence: Synthetic oligonucleotide
  Sense strand starting at position 2493 of SEQ ID NO: 1559933
auucuagagucuccgauua

SEQ ID NO: 1564586 - RNA, 19 nt, Artificial Sequence
  Description of Artificial Sequence: Synthetic oligonucleotide
  Antisense strand to SEQ ID NO: 1564585
uaaucggagacucuagaau

SEQ ID NO: 1564587 - RNA, 19 nt, Artificial Sequence
  Description of Artificial Sequence: Synthetic oligonucleotide
  Sense strand starting at position 2495 of SEQ ID NO: 1559933
ucuagagucuccgauuaua

SEQ ID NO: 1564588 - RNA, 19 nt, Artificial Sequence
  Description of Artificial Sequence: Synthetic oligonucleotide
  Antisense strand to SEQ ID NO: 1564587
uauaaucggagacucuaga

SEQ ID NO: 1564589 - RNA, 19 nt, Artificial Sequence
  Description of Artificial Sequence: Synthetic oligonucleotide
  Sense strand starting at position 2542 of SEQ ID NO: 1559933
guuucccacucuggaagaa

SEQ ID NO: 1564590 - RNA, 19 nt, Artificial Sequence
  Description of Artificial Sequence: Synthetic oligonucleotide
  Antisense strand to SEQ ID NO: 1564589
uucuuccagagugggaaac

SEQ ID NO: 1564591 - RNA, 19 nt, Artificial Sequence
  Description of Artificial Sequence: Synthetic oligonucleotide
  Sense strand starting at position 2743 of SEQ ID NO: 1559933
ccacgagacuugcgcugua

SEQ ID NO: 1564592 - RNA, 19 nt, Artificial Sequence
  Description of Artificial Sequence: Synthetic oligonucleotide
  Antisense strand to SEQ ID NO: 1564591
uacagcgcaagucucgugg

SEQ ID NO: 1564593 - RNA, 19 nt, Artificial Sequence
  Description of Artificial Sequence: Synthetic oligonucleotide
  Sense strand starting at position 2748 of SEQ ID NO: 1559933
agacuugcgcuguaaggua

SEQ ID NO: 1564594 - RNA, 19 nt, Artificial Sequence
  Description of Artificial Sequence: Synthetic oligonucleotide
  Antisense strand to SEQ ID NO: 1564593
uaccuuacagcgcaagucu

SEQ ID NO: 1564595 - RNA, 19 nt, Artificial Sequence
  Description of Artificial Sequence: Synthetic oligonucleotide
  Sense strand starting at position 2800 of SEQ ID NO: 1559933
ggaacugccucuucuccaa

SEQ ID NO: 1564596 - RNA, 19 nt, Artificial Sequence
  Description of Artificial Sequence: Synthetic oligonucleotide
  Antisense strand to SEQ ID NO: 1564595
uuggagaagaggcaguucc

SEQ ID NO: 1564597 - RNA, 19 nt, Artificial Sequence
  Description of Artificial Sequence: Synthetic oligonucleotide
  Sense strand starting at position 80 of SEQ ID NO: 1559934
agauguuauccuugacacc

SEQ ID NO: 1564598 - RNA, 19 nt, Artificial Sequence
  Description of Artificial Sequence: Synthetic oligonucleotide
  Antisense strand to SEQ ID NO: 1564597
ggugucaaggauaacaucu

SEQ ID NO: 1564599 - RNA, 19 nt, Artificial Sequence
  Description of Artificial Sequence: Synthetic oligonucleotide
  Sense strand starting at position 328 of SEQ ID NO: 1559934
cccauuauucccuggauag

SEQ ID NO: 1564600 - RNA, 19 nt, Artificial Sequence
  Description of Artificial Sequence: Synthetic oligonucleotide
  Antisense strand to SEQ ID NO: 1564599
cuauccagggaauaauggg

SEQ ID NO: 1564601 - RNA, 19 nt, Artificial Sequence
  Description of Artificial Sequence: Synthetic oligonucleotide
  Sense strand starting at position 329 of SEQ ID NO: 1559934
ccauuauucccuggauaga

SEQ ID NO: 1564602 - RNA, 19 nt, Artificial Sequence
  Description of Artificial Sequence: Synthetic oligonucleotide
  Antisense strand to SEQ ID NO: 1564601
ucuauccagggaauaaugg

SEQ ID NO: 1564603 - RNA, 19 nt, Artificial Sequence
  Description of Artificial Sequence: Synthetic oligonucleotide
  Sense strand starting at position 834 of SEQ ID NO: 1559934
ccucccuagugucacuaau

SEQ ID NO: 1564604 - RNA, 19 nt, Artificial Sequence
  Description of Artificial Sequence: Synthetic oligonucleotide
  Antisense strand to SEQ ID NO: 1564603
auuagugacacuagggagg

SEQ ID NO: 1564605 - RNA, 19 nt, Artificial Sequence
  Description of Artificial Sequence: Synthetic oligonucleotide
  Sense strand starting at position 1096 of SEQ ID NO: 1559934
ggccauaucagagggcaga

SEQ ID NO: 1564606 - RNA, 19 nt, Artificial Sequence
  Description of Artificial Sequence: Synthetic oligonucleotide
  Antisense strand to SEQ ID NO: 1564605
ucugcccucugauauggcc

SEQ ID NO: 1564607 - RNA, 19 nt, Artificial Sequence
  Description of Artificial Sequence: Synthetic oligonucleotide
  Sense strand starting at position 1222 of SEQ ID NO: 1559934
gcagaaggguccuaagaga

SEQ ID NO: 1564608 - RNA, 19 nt, Artificial Sequence
  Description of Artificial Sequence: Synthetic oligonucleotide
  Antisense strand to SEQ ID NO: 1564607
ucucuuaggacccuucugc

SEQ ID NO: 1564609 - RNA, 19 nt, Artificial Sequence
  Description of Artificial Sequence: Synthetic oligonucleotide
  Sense strand starting at position 1503 of SEQ ID NO: 1559934
ggccgaagcguuugucgga

SEQ ID NO: 1564610 - RNA, 19 nt, Artificial Sequence
  Description of Artificial Sequence: Synthetic oligonucleotide
  Antisense strand to SEQ ID NO: 1564609
uccgacaaacgcuucggcc

SEQ ID NO: 1564611 - RNA, 19 nt, Artificial Sequence
  Description of Artificial Sequence: Synthetic oligonucleotide
  Sense strand starting at position 2149 of SEQ ID NO: 1559934
auagguugaggccaguaaa

SEQ ID NO: 1564612 - RNA, 19 nt, Artificial Sequence
  Description of Artificial Sequence: Synthetic oligonucleotide
  Antisense strand to SEQ ID NO: 1564611
uuuacuggccucaaccuau

SEQ ID NO: 1564613 - RNA, 19 nt, Artificial Sequence
  Description of Artificial Sequence: Synthetic oligonucleotide
  Sense strand starting at position 2152 of SEQ ID NO: 1559934
gguugaggccaguaaaguu

SEQ ID NO: 1564614 - RNA, 19 nt, Artificial Sequence
  Description of Artificial Sequence: Synthetic oligonucleotide
  Antisense strand to SEQ ID NO: 1564613
aacuuuacuggccucaacc

SEQ ID NO: 1564615 - RNA, 19 nt, Artificial Sequence
  Description of Artificial Sequence: Synthetic oligonucleotide
  Sense strand starting at position 2690 of SEQ ID NO: 1559934
gucuuuauauauugcucau

SEQ ID NO: 1564616 - RNA, 19 nt, Artificial Sequence
  Description of Artificial Sequence: Synthetic oligonucleotide
  Antisense strand to SEQ ID NO: 1564615
augagcaauauauaaagac

SEQ ID NO: 1564617 - RNA, 19 nt, Artificial Sequence
  Description of Artificial Sequence: Synthetic oligonucleotide
  Sense strand starting at position 3017 of SEQ ID NO: 1559934
caagaagacugucucagau

SEQ ID NO: 1564618 - RNA, 19 nt, Artificial Sequence
  Description of Artificial Sequence: Synthetic oligonucleotide
  Antisense strand to SEQ ID NO: 1564617
aucugagacagucuucuug

SEQ ID NO: 1564619 - RNA, 19 nt, Artificial Sequence
  Description of Artificial Sequence: Synthetic oligonucleotide
  Sense strand starting at position 3019 of SEQ ID NO: 1559934
agaagacugucucagauaa

SEQ ID NO: 1564620 - RNA, 19 nt, Artificial Sequence
  Description of Artificial Sequence: Synthetic oligonucleotide
  Antisense strand to SEQ ID NO: 1564619
uuaucugagacagucuucu

SEQ ID NO: 1564621 - RNA, 19 nt, Artificial Sequence
  Description of Artificial Sequence: Synthetic oligonucleotide
  Sense strand starting at position 3755 of SEQ ID NO: 1559934
gaagaagguuacuggagaa

SEQ ID NO: 1564622 - RNA, 19 nt, Artificial Sequence
  Description of Artificial Sequence: Synthetic oligonucleotide
  Antisense strand to SEQ ID NO: 1564621
uucuccaguaaccuucuuc

SEQ ID NO: 1564623 - RNA, 19 nt, Artificial Sequence
  Description of Artificial Sequence: Synthetic oligonucleotide
  Sense strand starting at position 3795 of SEQ ID NO: 1559934
ggccuuucuaaggaaguga

SEQ ID NO: 1564624 - RNA, 19 nt, Artificial Sequence
  Description of Artificial Sequence: Synthetic oligonucleotide
  Antisense strand to SEQ ID NO: 1564623
ucacuuccuuagaaaggcc

SEQ ID NO: 1564625 - RNA, 19 nt, Artificial Sequence
  Description of Artificial Sequence: Synthetic oligonucleotide
  Sense strand starting at position 3859 of SEQ ID NO: 1559934
cuggaagugugagugugaa

SEQ ID NO: 1564626 - RNA, 19 nt, Artificial Sequence
  Description of Artificial Sequence: Synthetic oligonucleotide
  Antisense strand to SEQ ID NO: 1564625
uucacacucacacuuccag

SEQ ID NO: 1564627 - RNA, 19 nt, Artificial Sequence
  Description of Artificial Sequence: Synthetic oligonucleotide
  Sense strand starting at position 3869 of SEQ ID NO: 1559934
gagugugaauuggugggaa

SEQ ID NO: 1564628 - RNA, 19 nt, Artificial Sequence
  Description of Artificial Sequence: Synthetic oligonucleotide
  Antisense strand to SEQ ID NO: 1564627
uucccaccaauucacacuc

SEQ ID NO: 1564629 - RNA, 19 nt, Artificial Sequence
  Description of Artificial Sequence: Synthetic oligonucleotide
  Sense strand starting at position 26 of SEQ ID NO: 1559935
gcuugaccucuacaaaggu

SEQ ID NO: 1564630 - RNA, 19 nt, Artificial Sequence
  Description of Artificial Sequence: Synthetic oligonucleotide
  Antisense strand to SEQ ID NO: 1564629
accuuuguagaggucaagc

SEQ ID NO: 1564631 - RNA, 19 nt, Artificial Sequence
  Description of Artificial Sequence: Synthetic oligonucleotide
  Sense strand starting at position 143 of SEQ ID NO: 1559935
ugguguguccugugaguga

SEQ ID NO: 1564632 - RNA, 19 nt, Artificial Sequence
  Description of Artificial Sequence: Synthetic oligonucleotide
  Antisense strand to SEQ ID NO: 1564631
ucacucacaggacacacca

SEQ ID NO: 1564633 - RNA, 19 nt, Artificial Sequence
  Description of Artificial Sequence: Synthetic oligonucleotide
  Sense strand starting at position 219 of SEQ ID NO: 1559935
cucccugagccuugggaga

SEQ ID NO: 1564634 - RNA, 19 nt, Artificial Sequence
  Description of Artificial Sequence: Synthetic oligonucleotide
  Antisense strand to SEQ ID NO: 1564633
ucucccaaggcucagggag

SEQ ID NO: 1564635 - RNA, 19 nt, Artificial Sequence
  Description of Artificial Sequence: Synthetic oligonucleotide
  Sense strand starting at position 277 of SEQ ID NO: 1559935
gagccacggcacugagauu

SEQ ID NO: 1564636 - RNA, 19 nt, Artificial Sequence
  Description of Artificial Sequence: Synthetic oligonucleotide
  Antisense strand to SEQ ID NO: 1564635
aaucucagugccguggcuc

SEQ ID NO: 1564637 - RNA, 19 nt, Artificial Sequence
  Description of Artificial Sequence: Synthetic oligonucleotide
  Sense strand starting at position 667 of SEQ ID NO: 1559935
acccuagucuauccucaga

SEQ ID NO: 1564638 - RNA, 19 nt, Artificial Sequence
  Description of Artificial Sequence: Synthetic oligonucleotide
  Antisense strand to SEQ ID NO: 1564637
ucugaggauagacuagggu

SEQ ID NO: 1564639 - RNA, 19 nt, Artificial Sequence
  Description of Artificial Sequence: Synthetic oligonucleotide
  Sense strand starting at position 669 of SEQ ID NO: 1559935
ccuagucuauccucagaga

SEQ ID NO: 1564640 - RNA, 19 nt, Artificial Sequence
  Description of Artificial Sequence: Synthetic oligonucleotide
  Antisense strand to SEQ ID NO: 1564639
ucucugaggauagacuagg

SEQ ID NO: 1564641 - RNA, 19 nt, Artificial Sequence
  Description of Artificial Sequence: Synthetic oligonucleotide
  Sense strand starting at position 672 of SEQ ID NO: 1559935
agucuauccucagagagaa

SEQ ID NO: 1564642 - RNA, 19 nt, Artificial Sequence
  Description of Artificial Sequence: Synthetic oligonucleotide
  Antisense strand to SEQ ID NO: 1564641
uucucucugaggauagacu

SEQ ID NO: 1564643 - RNA, 19 nt, Artificial Sequence
  Description of Artificial Sequence: Synthetic oligonucleotide
  Sense strand starting at position 688 of SEQ ID NO: 1559935
gaaagacuuggcuauggcu

SEQ ID NO: 1564644 - RNA, 19 nt, Artificial Sequence
  Description of Artificial Sequence: Synthetic oligonucleotide
  Antisense strand to SEQ ID NO: 1564643
agccauagccaagucuuuc

SEQ ID NO: 1564645 - RNA, 19 nt, Artificial Sequence
  Description of Artificial Sequence: Synthetic oligonucleotide
  Sense strand starting at position 690 of SEQ ID NO: 1559935
aagacuuggcuauggcuua

SEQ ID NO: 1564646 - RNA, 19 nt, Artificial Sequence
  Description of Artificial Sequence: Synthetic oligonucleotide
  Antisense strand to SEQ ID NO: 1564645
uaagccauagccaagucuu

SEQ ID NO: 1564647 - RNA, 19 nt, Artificial Sequence
  Description of Artificial Sequence: Synthetic oligonucleotide
  Sense strand starting at position 1018 of SEQ ID NO: 1559935
ggcuccuggcucugaauuu

SEQ ID NO: 1564648 - RNA, 19 nt, Artificial Sequence
  Description of Artificial Sequence: Synthetic oligonucleotide
  Antisense strand to SEQ ID NO: 1564647
aaauucagagccaggagcc

SEQ ID NO: 1564649 - RNA, 19 nt, Artificial Sequence
  Description of Artificial Sequence: Synthetic oligonucleotide
  Sense strand starting at position 1031 of SEQ ID NO: 1559935
gaauuugacuccugaaagg

SEQ ID NO: 1564650 - RNA, 19 nt, Artificial Sequence
  Description of Artificial Sequence: Synthetic oligonucleotide
  Antisense strand to SEQ ID NO: 1564649
ccuuucaggagucaaauuc

SEQ ID NO: 1564651 - RNA, 19 nt, Artificial Sequence
  Description of Artificial Sequence: Synthetic oligonucleotide
  Sense strand starting at position 1395 of SEQ ID NO: 1559935
gugucuagggccuggagau

SEQ ID NO: 1564652 - RNA, 19 nt, Artificial Sequence
  Description of Artificial Sequence: Synthetic oligonucleotide
  Antisense strand to SEQ ID NO: 1564651
aucuccaggcccuagacac

SEQ ID NO: 1564653 - RNA, 19 nt, Artificial Sequence
  Description of Artificial Sequence: Synthetic oligonucleotide
  Sense strand starting at position 1542 of SEQ ID NO: 1559935
ggcccuaaucccggauugu

SEQ ID NO: 1564654 - RNA, 19 nt, Artificial Sequence
  Description of Artificial Sequence: Synthetic oligonucleotide
  Antisense strand to SEQ ID NO: 1564653
acaauccgggauuagggcc

SEQ ID NO: 1564655 - RNA, 19 nt, Artificial Sequence
  Description of Artificial Sequence: Synthetic oligonucleotide
  Sense strand starting at position 2054 of SEQ ID NO: 1559935
gcggcaauuccguagugga

SEQ ID NO: 1564656 - RNA, 19 nt, Artificial Sequence
  Description of Artificial Sequence: Synthetic oligonucleotide
  Antisense strand to SEQ ID NO: 1564655
uccacuacggaauugccgc

SEQ ID NO: 1564657 - RNA, 19 nt, Artificial Sequence
  Description of Artificial Sequence: Synthetic oligonucleotide
  Sense strand starting at position 2055 of SEQ ID NO: 1559935
cggcaauuccguaguggag

SEQ ID NO: 1564658 - RNA, 19 nt, Artificial Sequence
  Description of Artificial Sequence: Synthetic oligonucleotide
  Antisense strand to SEQ ID NO: 1564657
cuccacuacggaauugccg

SEQ ID NO: 1564659 - RNA, 19 nt, Artificial Sequence
  Description of Artificial Sequence: Synthetic oligonucleotide
  Sense strand starting at position 2296 of SEQ ID NO: 1559935
acucuucucucuguauuga

SEQ ID NO: 1564660 - RNA, 19 nt, Artificial Sequence
  Description of Artificial Sequence: Synthetic oligonucleotide
  Antisense strand to SEQ ID NO: 1564659
ucaauacagagagaagagu

SEQ ID NO: 1564661 - RNA, 19 nt, Artificial Sequence
  Description of Artificial Sequence: Synthetic oligonucleotide
  Sense strand starting at position 2430 of SEQ ID NO: 1559935
aacccaaggcugugugauu

SEQ ID NO: 1564662 - RNA, 19 nt, Artificial Sequence
  Description of Artificial Sequence: Synthetic oligonucleotide
  Antisense strand to SEQ ID NO: 1564661
aaucacacagccuuggguu

SEQ ID NO: 1564663 - RNA, 19 nt, Artificial Sequence
  Description of Artificial Sequence: Synthetic oligonucleotide
  Sense strand starting at position 2435 of SEQ ID NO: 1559935
aaggcugugugauuccaaa

SEQ ID NO: 1564664 - RNA, 19 nt, Artificial Sequence
  Description of Artificial Sequence: Synthetic oligonucleotide
  Antisense strand to SEQ ID NO: 1564663
uuuggaaucacacagccuu

SEQ ID NO: 1564665 - RNA, 19 nt, Artificial Sequence
  Description of Artificial Sequence: Synthetic oligonucleotide
  Sense strand starting at position 2651 of SEQ ID NO: 1559935
cuuggagcuguggguaauu

SEQ ID NO: 1564666 - RNA, 19 nt, Artificial Sequence
  Description of Artificial Sequence: Synthetic oligonucleotide
  Antisense strand to SEQ ID NO: 1564665
aauuacccacagcuccaag

SEQ ID NO: 1564667 - RNA, 19 nt, Artificial Sequence
  Description of Artificial Sequence: Synthetic oligonucleotide
  Sense strand starting at position 2656 of SEQ ID NO: 1559935
agcuguggguaauuagaga

SEQ ID NO: 1564668 - RNA, 19 nt, Artificial Sequence
  Description of Artificial Sequence: Synthetic oligonucleotide
  Antisense strand to SEQ ID NO: 1564667
ucucuaauuacccacagcu

SEQ ID NO: 1564669 - RNA, 19 nt, Artificial Sequence
  Description of Artificial Sequence: Synthetic oligonucleotide
  Sense strand starting at position 2667 of SEQ ID NO: 1559935
auuagagaguuugaauuuc

SEQ ID NO: 1564670 - RNA, 19 nt, Artificial Sequence
  Description of Artificial Sequence: Synthetic oligonucleotide
  Antisense strand to SEQ ID NO: 1564669
gaaauucaaacucucuaau

SEQ ID NO: 1564671 - RNA, 19 nt, Artificial Sequence
  Description of Artificial Sequence: Synthetic oligonucleotide
  Sense strand starting at position 2862 of SEQ ID NO: 1559935
uccugagccuccguuuauu

SEQ ID NO: 1564672 - RNA, 19 nt, Artificial Sequence
  Description of Artificial Sequence: Synthetic oligonucleotide
  Antisense strand to SEQ ID NO: 1564671
aauaaacggaggcucagga

SEQ ID NO: 1564673 - RNA, 19 nt, Artificial Sequence
  Description of Artificial Sequence: Synthetic oligonucleotide
  Sense strand starting at position 2871 of SEQ ID NO: 1559935
uccguuuauuucucuauga

SEQ ID NO: 1564674 - RNA, 19 nt, Artificial Sequence
  Description of Artificial Sequence: Synthetic oligonucleotide
  Antisense strand to SEQ ID NO: 1564673
ucauagagaaauaaacgga

SEQ ID NO: 1564675 - RNA, 19 nt, Artificial Sequence
  Description of Artificial Sequence: Synthetic oligonucleotide
  Sense strand starting at position 2904 of SEQ ID NO: 1559935
uaaguuugcuacgcaggua

SEQ ID NO: 1564676 - RNA, 19 nt, Artificial Sequence
  Description of Artificial Sequence: Synthetic oligonucleotide
  Antisense strand to SEQ ID NO: 1564675
uaccugcguagcaaacuua

SEQ ID NO: 1564677 - RNA, 19 nt, Artificial Sequence
  Description of Artificial Sequence: Synthetic oligonucleotide
  Sense strand starting at position 2933 of SEQ ID NO: 1559935
cauagugucgugcauauaa

SEQ ID NO: 1564678 - RNA, 19 nt, Artificial Sequence
  Description of Artificial Sequence: Synthetic oligonucleotide
  Antisense strand to SEQ ID NO: 1564677
uuauaugcacgacacuaug

SEQ ID NO: 1564679 - RNA, 19 nt, Artificial Sequence
  Description of Artificial Sequence: Synthetic oligonucleotide
  Sense strand starting at position 2935 of SEQ ID NO: 1559935
uagugucgugcauauaaca

SEQ ID NO: 1564680 - RNA, 19 nt, Artificial Sequence
  Description of Artificial Sequence: Synthetic oligonucleotide
  Antisense strand to SEQ ID NO: 1564679
uguuauaugcacgacacua

SEQ ID NO: 1564681 - RNA, 19 nt, Artificial Sequence
  Description of Artificial Sequence: Synthetic oligonucleotide
  Sense strand starting at position 2977 of SEQ ID NO: 1559935
uauuauaguggugauguuu

SEQ ID NO: 1564682 - RNA, 19 nt, Artificial Sequence
  Description of Artificial Sequence: Synthetic oligonucleotide
  Antisense strand to SEQ ID NO: 1564681
aaacaucaccacuauaaua

SEQ ID NO: 1564683 - RNA, 19 nt, Artificial Sequence
  Description of Artificial Sequence: Synthetic oligonucleotide
  Sense strand starting at position 3075 of SEQ ID NO: 1559935
ccuggaauuugcugccaga

SEQ ID NO: 1564684 - RNA, 19 nt, Artificial Sequence
  Description of Artificial Sequence: Synthetic oligonucleotide
  Antisense strand to SEQ ID NO: 1564683
ucuggcagcaaauuccagg

SEQ ID NO: 1564685 - RNA, 19 nt, Artificial Sequence
  Description of Artificial Sequence: Synthetic oligonucleotide
  Sense strand starting at position 3078 of SEQ ID NO: 1559935
ggaauuugcugccagagcu

SEQ ID NO: 1564686 - RNA, 19 nt, Artificial Sequence
  Description of Artificial Sequence: Synthetic oligonucleotide
  Antisense strand to SEQ ID NO: 1564685
agcucuggcagcaaauucc

SEQ ID NO: 1564687 - RNA, 19 nt, Artificial Sequence
  Description of Artificial Sequence: Synthetic oligonucleotide
  Sense strand starting at position 3131 of SEQ ID NO: 1559935
gggcacuucugggagacua

SEQ ID NO: 1564688 - RNA, 19 nt, Artificial Sequence
  Description of Artificial Sequence: Synthetic oligonucleotide
  Antisense strand to SEQ ID NO: 1564687
uagucucccagaagugccc

SEQ ID NO: 1564689 - RNA, 19 nt, Artificial Sequence
  Description of Artificial Sequence: Synthetic oligonucleotide
  Sense strand starting at position 3360 of SEQ ID NO: 1559935
gugcauuggcgcuaucauu

SEQ ID NO: 1564690 - RNA, 19 nt, Artificial Sequence
  Description of Artificial Sequence: Synthetic oligonucleotide
  Antisense strand to SEQ ID NO: 1564689
aaugauagcgccaaugcac

SEQ ID NO: 1564691 - RNA, 19 nt, Artificial Sequence
  Description of Artificial Sequence: Synthetic oligonucleotide
  Sense strand starting at position 3367 of SEQ ID NO: 1559935
ggcgcuaucauugcucacu

SEQ ID NO: 1564692 - RNA, 19 nt, Artificial Sequence
  Description of Artificial Sequence: Synthetic oligonucleotide
  Antisense strand to SEQ ID NO: 1564691
agugagcaaugauagcgcc

SEQ ID NO: 1564693 - RNA, 19 nt, Artificial Sequence
  Description of Artificial Sequence: Synthetic oligonucleotide
  Sense strand starting at position 3430 of SEQ ID NO: 1559935
ucaaguacuugagacuaua

SEQ ID NO: 1564694 - RNA, 19 nt, Artificial Sequence
  Description of Artificial Sequence: Synthetic oligonucleotide
  Antisense strand to SEQ ID NO: 1564693
uauagucucaaguacuuga

SEQ ID NO: 1564695 - RNA, 19 nt, Artificial Sequence
  Description of Artificial Sequence: Synthetic oligonucleotide
  Sense strand starting at position 3614 of SEQ ID NO: 1559935
aggagaguguggcugaaau

SEQ ID NO: 1564696 - RNA, 19 nt, Artificial Sequence
  Description of Artificial Sequence: Synthetic oligonucleotide
  Antisense strand to SEQ ID NO: 1564695
auuucagccacacucuccu

SEQ ID NO: 1564697 - RNA, 19 nt, Artificial Sequence
  Description of Artificial Sequence: Synthetic oligonucleotide
  Sense strand starting at position 3615 of SEQ ID NO: 1559935
ggagaguguggcugaaaug

SEQ ID NO: 1564698 - RNA, 19 nt, Artificial Sequence
  Description of Artificial Sequence: Synthetic oligonucleotide
  Antisense strand to SEQ ID NO: 1564697
cauuucagccacacucucc

SEQ ID NO: 1564699 - RNA, 19 nt, Artificial Sequence
  Description of Artificial Sequence: Synthetic oligonucleotide
  Sense strand starting at position 3616 of SEQ ID NO: 1559935
gagaguguggcugaaaugu

SEQ ID NO: 1564700 - RNA, 19 nt, Artificial Sequence
  Description of Artificial Sequence: Synthetic oligonucleotide
  Antisense strand to SEQ ID NO: 1564699
acauuucagccacacucuc

SEQ ID NO: 1564701 - RNA, 19 nt, Artificial Sequence
  Description of Artificial Sequence: Synthetic oligonucleotide
  Sense strand starting at position 3709 of SEQ ID NO: 1559935
caaggauagugugugagua

SEQ ID NO: 1564702 - RNA, 19 nt, Artificial Sequence
  Description of Artificial Sequence: Synthetic oligonucleotide
  Antisense strand to SEQ ID NO: 1564701
uacucacacacuauccuug

SEQ ID NO: 1564703 - RNA, 19 nt, Artificial Sequence
  Description of Artificial Sequence: Synthetic oligonucleotide
  Sense strand starting at position 3852 of SEQ ID NO: 1559935
gcuugcaaucccugaguuu

SEQ ID NO: 1564704 - RNA, 19 nt, Artificial Sequence
  Description of Artificial Sequence: Synthetic oligonucleotide
  Antisense strand to SEQ ID NO: 1564703
aaacucagggauugcaagc

SEQ ID NO: 1564705 - RNA, 19 nt, Artificial Sequence
  Description of Artificial Sequence: Synthetic oligonucleotide
  Sense strand starting at position 3853 of SEQ ID NO: 1559935
cuugcaaucccugaguuua

SEQ ID NO: 1564706 - RNA, 19 nt, Artificial Sequence
  Description of Artificial Sequence: Synthetic oligonucleotide
  Antisense strand to SEQ ID NO: 1564705
uaaacucagggauugcaag

SEQ ID NO: 1564707 - RNA, 19 nt, Artificial Sequence
  Description of Artificial Sequence: Synthetic oligonucleotide
  Sense strand starting at position 3855 of SEQ ID NO: 1559935
ugcaaucccugaguuuaca

SEQ ID NO: 1564708 - RNA, 19 nt, Artificial Sequence
  Description of Artificial Sequence: Synthetic oligonucleotide
  Antisense strand to SEQ ID NO: 1564707
uguaaacucagggauugca

SEQ ID NO: 1564709 - RNA, 19 nt, Artificial Sequence
  Description of Artificial Sequence: Synthetic oligonucleotide
  Sense strand starting at position 32 of SEQ ID NO: 1559936
gugggaaccuguuauccca

SEQ ID NO: 1564710 - RNA, 19 nt, Artificial Sequence
  Description of Artificial Sequence: Synthetic oligonucleotide
  Antisense strand to SEQ ID NO: 1564709
ugggauaacagguucccac

SEQ ID NO: 1564711 - RNA, 19 nt, Artificial Sequence
  Description of Artificial Sequence: Synthetic oligonucleotide
  Sense strand starting at position 259 of SEQ ID NO: 1559936
ccaguaugggcauggcaua

SEQ ID NO: 1564712 - RNA, 19 nt, Artificial Sequence
  Description of Artificial Sequence: Synthetic oligonucleotide
  Antisense strand to SEQ ID NO: 1564711
uaugccaugcccauacugg

SEQ ID NO: 1564713 - RNA, 19 nt, Artificial Sequence
  Description of Artificial Sequence: Synthetic oligonucleotide
  Sense strand starting at position 293 of SEQ ID NO: 1559936
ggcuuuaagcuuuggcuaa

SEQ ID NO: 1564714 - RNA, 19 nt, Artificial Sequence
  Description of Artificial Sequence: Synthetic oligonucleotide
  Antisense strand to SEQ ID NO: 1564713
uuagccaaagcuuaaagcc

SEQ ID NO: 1564715 - RNA, 19 nt, Artificial Sequence
  Description of Artificial Sequence: Synthetic oligonucleotide
  Sense strand starting at position 294 of SEQ ID NO: 1559936
gcuuuaagcuuuggcuaaa

SEQ ID NO: 1564716 - RNA, 19 nt, Artificial Sequence
  Description of Artificial Sequence: Synthetic oligonucleotide
  Antisense strand to SEQ ID NO: 1564715
uuuagccaaagcuuaaagc

SEQ ID NO: 1564717 - RNA, 19 nt, Artificial Sequence
  Description of Artificial Sequence: Synthetic oligonucleotide
  Sense strand starting at position 295 of SEQ ID NO: 1559936
cuuuaagcuuuggcuaaau

SEQ ID NO: 1564718 - RNA, 19 nt, Artificial Sequence
  Description of Artificial Sequence: Synthetic oligonucleotide
  Antisense strand to SEQ ID NO: 1564717
auuuagccaaagcuuaaag

SEQ ID NO: 1564719 - RNA, 19 nt, Artificial Sequence
  Description of Artificial Sequence: Synthetic oligonucleotide
  Sense strand starting at position 306 of SEQ ID NO: 1559936
ggcuaaaugccgugaucau

SEQ ID NO: 1564720 - RNA, 19 nt, Artificial Sequence
  Description of Artificial Sequence: Synthetic oligonucleotide
  Antisense strand to SEQ ID NO: 1564719
augaucacggcauuuagcc

SEQ ID NO: 1564721 - RNA, 19 nt, Artificial Sequence
  Description of Artificial Sequence: Synthetic oligonucleotide
  Sense strand starting at position 307 of SEQ ID NO: 1559936
gcuaaaugccgugaucauu

SEQ ID NO: 1564722 - RNA, 19 nt, Artificial Sequence
  Description of Artificial Sequence: Synthetic oligonucleotide
  Antisense strand to SEQ ID NO: 1564721
aaugaucacggcauuuagc

SEQ ID NO: 1564723 - RNA, 19 nt, Artificial Sequence
  Description of Artificial Sequence: Synthetic oligonucleotide
  Sense strand starting at position 315 of SEQ ID NO: 1559936
ccgugaucauuugugcauu

SEQ ID NO: 1564724 - RNA, 19 nt, Artificial Sequence
  Description of Artificial Sequence: Synthetic oligonucleotide
  Antisense strand to SEQ ID NO: 1564723
aaugcacaaaugaucacgg

SEQ ID NO: 1564725 - RNA, 19 nt, Artificial Sequence
  Description of Artificial Sequence: Synthetic oligonucleotide
  Sense strand starting at position 316 of SEQ ID NO: 1559936
cgugaucauuugugcauuc

SEQ ID NO: 1564726 - RNA, 19 nt, Artificial Sequence
  Description of Artificial Sequence: Synthetic oligonucleotide
  Antisense strand to SEQ ID NO: 1564725
gaaugcacaaaugaucacg

SEQ ID NO: 1564727 - RNA, 19 nt, Artificial Sequence
  Description of Artificial Sequence: Synthetic oligonucleotide
  Sense strand starting at position 889 of SEQ ID NO: 1559936
cugccucugcguuccaaau

SEQ ID NO: 1564728 - RNA, 19 nt, Artificial Sequence
  Description of Artificial Sequence: Synthetic oligonucleotide
  Antisense strand to SEQ ID NO: 1564727
auuuggaacgcagaggcag

SEQ ID NO: 1564729 - RNA, 19 nt, Artificial Sequence
  Description of Artificial Sequence: Synthetic oligonucleotide
  Sense strand starting at position 890 of SEQ ID NO: 1559936
ugccucugcguuccaaauu

SEQ ID NO: 1564730 - RNA, 19 nt, Artificial Sequence
  Description of Artificial Sequence: Synthetic oligonucleotide
  Antisense strand to SEQ ID NO: 1564729
aauuuggaacgcagaggca

SEQ ID NO: 1564731 - RNA, 19 nt, Artificial Sequence
  Description of Artificial Sequence: Synthetic oligonucleotide
  Sense strand starting at position 1021 of SEQ ID NO: 1559936
aggaguuucucaggaggug

SEQ ID NO: 1564732 - RNA, 19 nt, Artificial Sequence
  Description of Artificial Sequence: Synthetic oligonucleotide
  Antisense strand to SEQ ID NO: 1564731
caccuccugagaaacuccu

SEQ ID NO: 1564733 - RNA, 19 nt, Artificial Sequence
  Description of Artificial Sequence: Synthetic oligonucleotide
  Sense strand starting at position 1393 of SEQ ID NO: 1559936
acaaguuggucagugggua

SEQ ID NO: 1564734 - RNA, 19 nt, Artificial Sequence
  Description of Artificial Sequence: Synthetic oligonucleotide
  Antisense strand to SEQ ID NO: 1564733
uacccacugaccaacuugu

SEQ ID NO: 1564735 - RNA, 19 nt, Artificial Sequence
  Description of Artificial Sequence: Synthetic oligonucleotide
  Sense strand starting at position 1645 of SEQ ID NO: 1559936
agagcuuggcaucaaguaa

SEQ ID NO: 1564736 - RNA, 19 nt, Artificial Sequence
  Description of Artificial Sequence: Synthetic oligonucleotide
  Antisense strand to SEQ ID NO: 1564735
uuacuugaugccaagcucu

SEQ ID NO: 1564737 - RNA, 19 nt, Artificial Sequence
  Description of Artificial Sequence: Synthetic oligonucleotide
  Sense strand starting at position 1684 of SEQ ID NO: 1559936
gcuggcacucuuuggcuaa

SEQ ID NO: 1564738 - RNA, 19 nt, Artificial Sequence
  Description of Artificial Sequence: Synthetic oligonucleotide
  Antisense strand to SEQ ID NO: 1564737
uuagccaaagagugccagc

SEQ ID NO: 1564739 - RNA, 19 nt, Artificial Sequence
  Description of Artificial Sequence: Synthetic oligonucleotide
  Sense strand starting at position 1688 of SEQ ID NO: 1559936
gcacucuuuggcuaacaga

SEQ ID NO: 1564740 - RNA, 19 nt, Artificial Sequence
  Description of Artificial Sequence: Synthetic oligonucleotide
  Antisense strand to SEQ ID NO: 1564739
ucuguuagccaaagagugc

SEQ ID NO: 1564741 - RNA, 19 nt, Artificial Sequence
  Description of Artificial Sequence: Synthetic oligonucleotide
  Sense strand starting at position 1691 of SEQ ID NO: 1559936
cucuuuggcuaacagauga

SEQ ID NO: 1564742 - RNA, 19 nt, Artificial Sequence
  Description of Artificial Sequence: Synthetic oligonucleotide
  Antisense strand to SEQ ID NO: 1564741
ucaucuguuagccaaagag

SEQ ID NO: 1564743 - RNA, 19 nt, Artificial Sequence
  Description of Artificial Sequence: Synthetic oligonucleotide
  Sense strand starting at position 1820 of SEQ ID NO: 1559936
acgcacucaccguguugua

SEQ ID NO: 1564744 - RNA, 19 nt, Artificial Sequence
  Description of Artificial Sequence: Synthetic oligonucleotide
  Antisense strand to SEQ ID NO: 1564743
uacaacacggugagugcgu

SEQ ID NO: 1564745 - RNA, 19 nt, Artificial Sequence
  Description of Artificial Sequence: Synthetic oligonucleotide
  Sense strand starting at position 1823 of SEQ ID NO: 1559936
cacucaccguguuguagaa

SEQ ID NO: 1564746 - RNA, 19 nt, Artificial Sequence
  Description of Artificial Sequence: Synthetic oligonucleotide
  Antisense strand to SEQ ID NO: 1564745
uucuacaacacggugagug

SEQ ID NO: 1564747 - RNA, 19 nt, Artificial Sequence
  Description of Artificial Sequence: Synthetic oligonucleotide
  Sense strand starting at position 1862 of SEQ ID NO: 1559936
acuggaaguugcucucaca

SEQ ID NO: 1564748 - RNA, 19 nt, Artificial Sequence
  Description of Artificial Sequence: Synthetic oligonucleotide
  Antisense strand to SEQ ID NO: 1564747
ugugagagcaacuuccagu

SEQ ID NO: 1564749 - RNA, 19 nt, Artificial Sequence
  Description of Artificial Sequence: Synthetic oligonucleotide
  Sense strand starting at position 1865 of SEQ ID NO: 1559936
ggaaguugcucucacacca

SEQ ID NO: 1564750 - RNA, 19 nt, Artificial Sequence
  Description of Artificial Sequence: Synthetic oligonucleotide
  Antisense strand to SEQ ID NO: 1564749
uggugugagagcaacuucc

SEQ ID NO: 1564751 - RNA, 19 nt, Artificial Sequence
  Description of Artificial Sequence: Synthetic oligonucleotide
  Sense strand starting at position 1895 of SEQ ID NO: 1559936
agcucugauaggcgaagau

SEQ ID NO: 1564752 - RNA, 19 nt, Artificial Sequence
  Description of Artificial Sequence: Synthetic oligonucleotide
  Antisense strand to SEQ ID NO: 1564751
aucuucgccuaucagagcu

SEQ ID NO: 1564753 - RNA, 19 nt, Artificial Sequence
  Description of Artificial Sequence: Synthetic oligonucleotide
  Sense strand starting at position 1907 of SEQ ID NO: 1559936
cgaagaugcuaggcaucuu

SEQ ID NO: 1564754 - RNA, 19 nt, Artificial Sequence
  Description of Artificial Sequence: Synthetic oligonucleotide
  Antisense strand to SEQ ID NO: 1564753
aagaugccuagcaucuucg

SEQ ID NO: 1564755 - RNA, 19 nt, Artificial Sequence
  Description of Artificial Sequence: Synthetic oligonucleotide
  Sense strand starting at position 1915 of SEQ ID NO: 1559936
cuaggcaucuugucucagu

SEQ ID NO: 1564756 - RNA, 19 nt, Artificial Sequence
  Description of Artificial Sequence: Synthetic oligonucleotide
  Antisense strand to SEQ ID NO: 1564755
acugagacaagaugccuag

SEQ ID NO: 1564757 - RNA, 19 nt, Artificial Sequence
  Description of Artificial Sequence: Synthetic oligonucleotide
  Sense strand starting at position 2111 of SEQ ID NO: 1559936
gagcauaagccgugggacu

SEQ ID NO: 1564758 - RNA, 19 nt, Artificial Sequence
  Description of Artificial Sequence: Synthetic oligonucleotide
  Antisense strand to SEQ ID NO: 1564757
agucccacggcuuaugcuc

SEQ ID NO: 1564759 - RNA, 19 nt, Artificial Sequence
  Description of Artificial Sequence: Synthetic oligonucleotide
  Sense strand starting at position 2684 of SEQ ID NO: 1559936
ggauuauaggugugcguga

SEQ ID NO: 1564760 - RNA, 19 nt, Artificial Sequence
  Description of Artificial Sequence: Synthetic oligonucleotide
  Antisense strand to SEQ ID NO: 1564759
ucacgcacaccuauaaucc

SEQ ID NO: 1564761 - RNA, 19 nt, Artificial Sequence
  Description of Artificial Sequence: Synthetic oligonucleotide
  Sense strand starting at position 3030 of SEQ ID NO: 1559936
cuuuaagcugugugaccuu

SEQ ID NO: 1564762 - RNA, 19 nt, Artificial Sequence
  Description of Artificial Sequence: Synthetic oligonucleotide
  Antisense strand to SEQ ID NO: 1564761
aaggucacacagcuuaaag

SEQ ID NO: 1564763 - RNA, 19 nt, Artificial Sequence
  Description of Artificial Sequence: Synthetic oligonucleotide
  Sense strand starting at position 3187 of SEQ ID NO: 1559936
gcacuugauggaugguaau

SEQ ID NO: 1564764 - RNA, 19 nt, Artificial Sequence
  Description of Artificial Sequence: Synthetic oligonucleotide
  Antisense strand to SEQ ID NO: 1564763
auuaccauccaucaagugc

SEQ ID NO: 1564765 - RNA, 19 nt, Artificial Sequence
  Description of Artificial Sequence: Synthetic oligonucleotide
  Sense strand starting at position 3193 of SEQ ID NO: 1559936
gauggaugguaauggguuu

SEQ ID NO: 1564766 - RNA, 19 nt, Artificial Sequence
  Description of Artificial Sequence: Synthetic oligonucleotide
  Antisense strand to SEQ ID NO: 1564765
aaacccauuaccauccauc

SEQ ID NO: 1564767 - RNA, 19 nt, Artificial Sequence
  Description of Artificial Sequence: Synthetic oligonucleotide
  Sense strand starting at position 3295 of SEQ ID NO: 1559936
uuaagucaacuuuguggga

SEQ ID NO: 1564768 - RNA, 19 nt, Artificial Sequence
  Description of Artificial Sequence: Synthetic oligonucleotide
  Antisense strand to SEQ ID NO: 1564767
ucccacaaaguugacuuaa

SEQ ID NO: 1564769 - RNA, 19 nt, Artificial Sequence
  Description of Artificial Sequence: Synthetic oligonucleotide
  Sense strand starting at position 3296 of SEQ ID NO: 1559936
uaagucaacuuugugggaa

SEQ ID NO: 1564770 - RNA, 19 nt, Artificial Sequence
  Description of Artificial Sequence: Synthetic oligonucleotide
  Antisense strand to SEQ ID NO: 1564769
uucccacaaaguugacuua

SEQ ID NO: 1564771 - RNA, 19 nt, Artificial Sequence
  Description of Artificial Sequence: Synthetic oligonucleotide
  Sense strand starting at position 3297 of SEQ ID NO: 1559936
aagucaacuuugugggaau

SEQ ID NO: 1564772 - RNA, 19 nt, Artificial Sequence
  Description of Artificial Sequence: Synthetic oligonucleotide
  Antisense strand to SEQ ID NO: 1564771
auucccacaaaguugacuu

SEQ ID NO: 1564773 - RNA, 19 nt, Artificial Sequence
  Description of Artificial Sequence: Synthetic oligonucleotide
  Sense strand starting at position 3298 of SEQ ID NO: 1559936
agucaacuuugugggaaua

SEQ ID NO: 1564774 - RNA, 19 nt, Artificial Sequence
  Description of Artificial Sequence: Synthetic oligonucleotide
  Antisense strand to SEQ ID NO: 1564773
uauucccacaaaguugacu

SEQ ID NO: 1564775 - RNA, 19 nt, Artificial Sequence
  Description of Artificial Sequence: Synthetic oligonucleotide
  Sense strand starting at position 3299 of SEQ ID NO: 1559936
gucaacuuugugggaauaa

SEQ ID NO: 1564776 - RNA, 19 nt, Artificial Sequence
  Description of Artificial Sequence: Synthetic oligonucleotide
  Antisense strand to SEQ ID NO: 1564775
uuauucccacaaaguugac

SEQ ID NO: 1564777 - RNA, 19 nt, Artificial Sequence
  Description of Artificial Sequence: Synthetic oligonucleotide
  Sense strand starting at position 3300 of SEQ ID NO: 1559936
ucaacuuugugggaauaau

SEQ ID NO: 1564778 - RNA, 19 nt, Artificial Sequence
  Description of Artificial Sequence: Synthetic oligonucleotide
  Antisense strand to SEQ ID NO: 1564777
auuauucccacaaaguuga

SEQ ID NO: 1564779 - RNA, 19 nt, Artificial Sequence
  Description of Artificial Sequence: Synthetic oligonucleotide
  Sense strand starting at position 3362 of SEQ ID NO: 1559936
cgguuagcaagugugcaua

SEQ ID NO: 1564780 - RNA, 19 nt, Artificial Sequence
  Description of Artificial Sequence: Synthetic oligonucleotide
  Antisense strand to SEQ ID NO: 1564779
uaugcacacuugcuaaccg

SEQ ID NO: 1564781 - RNA, 19 nt, Artificial Sequence
  Description of Artificial Sequence: Synthetic oligonucleotide
  Sense strand starting at position 44 of SEQ ID NO: 1559937
gagaauacguccucaaagg

SEQ ID NO: 1564782 - RNA, 19 nt, Artificial Sequence
  Description of Artificial Sequence: Synthetic oligonucleotide
  Antisense strand to SEQ ID NO: 1564781
ccuuugaggacguauucuc

SEQ ID NO: 1564783 - RNA, 19 nt, Artificial Sequence
  Description of Artificial Sequence: Synthetic oligonucleotide
  Sense strand starting at position 45 of SEQ ID NO: 1559937
agaauacguccucaaaggu

SEQ ID NO: 1564784 - RNA, 19 nt, Artificial Sequence
  Description of Artificial Sequence: Synthetic oligonucleotide
  Antisense strand to SEQ ID NO: 1564783
accuuugaggacguauucu

SEQ ID NO: 1564785 - RNA, 19 nt, Artificial Sequence
  Description of Artificial Sequence: Synthetic oligonucleotide
  Sense strand starting at position 58 of SEQ ID NO: 1559937
aaaggucuccuguagcaaa

SEQ ID NO: 1564786 - RNA, 19 nt, Artificial Sequence
  Description of Artificial Sequence: Synthetic oligonucleotide
  Antisense strand to SEQ ID NO: 1564785
uuugcuacaggagaccuuu

SEQ ID NO: 1564787 - RNA, 19 nt, Artificial Sequence
  Description of Artificial Sequence: Synthetic oligonucleotide
  Sense strand starting at position 281 of SEQ ID NO: 1559937
uggaaccucuugucauuga

SEQ ID NO: 1564788 - RNA, 19 nt, Artificial Sequence
  Description of Artificial Sequence: Synthetic oligonucleotide
  Antisense strand to SEQ ID NO: 1564787
ucaaugacaagagguucca

SEQ ID NO: 1564789 - RNA, 19 nt, Artificial Sequence
  Description of Artificial Sequence: Synthetic oligonucleotide
  Sense strand starting at position 303 of SEQ ID NO: 1559937
cuugcacaccagugaagua

SEQ ID NO: 1564790 - RNA, 19 nt, Artificial Sequence
  Description of Artificial Sequence: Synthetic oligonucleotide
  Antisense strand to SEQ ID NO: 1564789
uacuucacuggugugcaag

SEQ ID NO: 1564791 - RNA, 19 nt, Artificial Sequence
  Description of Artificial Sequence: Synthetic oligonucleotide
  Sense strand starting at position 375 of SEQ ID NO: 1559937
gagcgaucuccuuggcauu

SEQ ID NO: 1564792 - RNA, 19 nt, Artificial Sequence
  Description of Artificial Sequence: Synthetic oligonucleotide
  Antisense strand to SEQ ID NO: 1564791
aaugccaaggagaucgcuc

SEQ ID NO: 1564793 - RNA, 19 nt, Artificial Sequence
  Description of Artificial Sequence: Synthetic oligonucleotide
  Sense strand starting at position 533 of SEQ ID NO: 1559937
auguccaucugggagaaga

SEQ ID NO: 1564794 - RNA, 19 nt, Artificial Sequence
  Description of Artificial Sequence: Synthetic oligonucleotide
  Antisense strand to SEQ ID NO: 1564793
ucuucucccagauggacau

SEQ ID NO: 1564795 - RNA, 19 nt, Artificial Sequence
  Description of Artificial Sequence: Synthetic oligonucleotide
  Sense strand starting at position 856 of SEQ ID NO: 1559937
gcuggugggcucuagagua

SEQ ID NO: 1564796 - RNA, 19 nt, Artificial Sequence
  Description of Artificial Sequence: Synthetic oligonucleotide
  Antisense strand to SEQ ID NO: 1564795
uacucuagagcccaccagc

SEQ ID NO: 1564797 - RNA, 19 nt, Artificial Sequence
  Description of Artificial Sequence: Synthetic oligonucleotide
  Sense strand starting at position 891 of SEQ ID NO: 1559937
agccuuuauucccugagga

SEQ ID NO: 1564798 - RNA, 19 nt, Artificial Sequence
  Description of Artificial Sequence: Synthetic oligonucleotide
  Antisense strand to SEQ ID NO: 1564797
uccucagggaauaaaggcu

SEQ ID NO: 1564799 - RNA, 19 nt, Artificial Sequence
  Description of Artificial Sequence: Synthetic oligonucleotide
  Sense strand starting at position 892 of SEQ ID NO: 1559937
gccuuuauucccugaggag

SEQ ID NO: 1564800 - RNA, 19 nt, Artificial Sequence
  Description of Artificial Sequence: Synthetic oligonucleotide
  Antisense strand to SEQ ID NO: 1564799
cuccucagggaauaaaggc

SEQ ID NO: 1564801 - RNA, 19 nt, Artificial Sequence
  Description of Artificial Sequence: Synthetic oligonucleotide
  Sense strand starting at position 910 of SEQ ID NO: 1559937
ggaaguggaucauuaguga

SEQ ID NO: 1564802 - RNA, 19 nt, Artificial Sequence
  Description of Artificial Sequence: Synthetic oligonucleotide
  Antisense strand to SEQ ID NO: 1564801
ucacuaaugauccacuucc

SEQ ID NO: 1564803 - RNA, 19 nt, Artificial Sequence
  Description of Artificial Sequence: Synthetic oligonucleotide
  Sense strand starting at position 913 of SEQ ID NO: 1559937
aguggaucauuagugagga

SEQ ID NO: 1564804 - RNA, 19 nt, Artificial Sequence
  Description of Artificial Sequence: Synthetic oligonucleotide
  Antisense strand to SEQ ID NO: 1564803
uccucacuaaugauccacu

SEQ ID NO: 1564805 - RNA, 19 nt, Artificial Sequence
  Description of Artificial Sequence: Synthetic oligonucleotide
  Sense strand starting at position 977 of SEQ ID NO: 1559937
ucaugugagcccuggacuu

SEQ ID NO: 1564806 - RNA, 19 nt, Artificial Sequence
  Description of Artificial Sequence: Synthetic oligonucleotide
  Antisense strand to SEQ ID NO: 1564805
aaguccagggcucacauga

SEQ ID NO: 1564807 - RNA, 19 nt, Artificial Sequence
  Description of Artificial Sequence: Synthetic oligonucleotide
  Sense strand starting at position 1111 of SEQ ID NO: 1559937
gcuugacacguccagguau

SEQ ID NO: 1564808 - RNA, 19 nt, Artificial Sequence
  Description of Artificial Sequence: Synthetic oligonucleotide
  Antisense strand to SEQ ID NO: 1564807
auaccuggacgugucaagc

SEQ ID NO: 1564809 - RNA, 19 nt, Artificial Sequence
  Description of Artificial Sequence: Synthetic oligonucleotide
  Sense strand starting at position 1123 of SEQ ID NO: 1559937
cagguaucucugugugucu

SEQ ID NO: 1564810 - RNA, 19 nt, Artificial Sequence
  Description of Artificial Sequence: Synthetic oligonucleotide
  Antisense strand to SEQ ID NO: 1564809
agacacacagagauaccug

SEQ ID NO: 1564811 - RNA, 19 nt, Artificial Sequence
  Description of Artificial Sequence: Synthetic oligonucleotide
  Sense strand starting at position 1141 of SEQ ID NO: 1559937
uguguaucucagugugagu

SEQ ID NO: 1564812 - RNA, 19 nt, Artificial Sequence
  Description of Artificial Sequence: Synthetic oligonucleotide
  Antisense strand to SEQ ID NO: 1564811
acucacacugagauacaca

SEQ ID NO: 1564813 - RNA, 19 nt, Artificial Sequence
  Description of Artificial Sequence: Synthetic oligonucleotide
  Sense strand starting at position 1181 of SEQ ID NO: 1559937
agaggcuguggcugugauu

SEQ ID NO: 1564814 - RNA, 19 nt, Artificial Sequence
  Description of Artificial Sequence: Synthetic oligonucleotide
  Antisense strand to SEQ ID NO: 1564813
aaucacagccacagccucu

SEQ ID NO: 1564815 - RNA, 19 nt, Artificial Sequence
  Description of Artificial Sequence: Synthetic oligonucleotide
  Sense strand starting at position 1232 of SEQ ID NO: 1559937
ugaguaagggcuuaccugu

SEQ ID NO: 1564816 - RNA, 19 nt, Artificial Sequence
  Description of Artificial Sequence: Synthetic oligonucleotide
  Antisense strand to SEQ ID NO: 1564815
acagguaagcccuuacuca

SEQ ID NO: 1564817 - RNA, 19 nt, Artificial Sequence
  Description of Artificial Sequence: Synthetic oligonucleotide
  Sense strand starting at position 1323 of SEQ ID NO: 1559937
gguguugcugcagacaugu

SEQ ID NO: 1564818 - RNA, 19 nt, Artificial Sequence
  Description of Artificial Sequence: Synthetic oligonucleotide
  Antisense strand to SEQ ID NO: 1564817
acaugucugcagcaacacc

SEQ ID NO: 1564819 - RNA, 19 nt, Artificial Sequence
  Description of Artificial Sequence: Synthetic oligonucleotide
  Sense strand starting at position 1325 of SEQ ID NO: 1559937
uguugcugcagacauguau

SEQ ID NO: 1564820 - RNA, 19 nt, Artificial Sequence
  Description of Artificial Sequence: Synthetic oligonucleotide
  Antisense strand to SEQ ID NO: 1564819
auacaugucugcagcaaca

SEQ ID NO: 1564821 - RNA, 19 nt, Artificial Sequence
  Description of Artificial Sequence: Synthetic oligonucleotide
  Sense strand starting at position 1457 of SEQ ID NO: 1559937
uggguugcaucucuaggau

SEQ ID NO: 1564822 - RNA, 19 nt, Artificial Sequence
  Description of Artificial Sequence: Synthetic oligonucleotide
  Antisense strand to SEQ ID NO: 1564821
auccuagagaugcaaccca

SEQ ID NO: 1564823 - RNA, 19 nt, Artificial Sequence
  Description of Artificial Sequence: Synthetic oligonucleotide
  Sense strand starting at position 1490 of SEQ ID NO: 1559937
gugugggagcuguguuuga

SEQ ID NO: 1564824 - RNA, 19 nt, Artificial Sequence
  Description of Artificial Sequence: Synthetic oligonucleotide
  Antisense strand to SEQ ID NO: 1564823
ucaaacacagcucccacac

SEQ ID NO: 1564825 - RNA, 19 nt, Artificial Sequence
  Description of Artificial Sequence: Synthetic oligonucleotide
  Sense strand starting at position 1494 of SEQ ID NO: 1559937
gggagcuguguuugacaac

SEQ ID NO: 1564826 - RNA, 19 nt, Artificial Sequence
  Description of Artificial Sequence: Synthetic oligonucleotide
  Antisense strand to SEQ ID NO: 1564825
guugucaaacacagcuccc

SEQ ID NO: 1564827 - RNA, 19 nt, Artificial Sequence
  Description of Artificial Sequence: Synthetic oligonucleotide
  Sense strand starting at position 1638 of SEQ ID NO: 1559937
cccauuccugcaggaggaa

SEQ ID NO: 1564828 - RNA, 19 nt, Artificial Sequence
  Description of Artificial Sequence: Synthetic oligonucleotide
  Antisense strand to SEQ ID NO: 1564827
uuccuccugcaggaauggg

SEQ ID NO: 1564829 - RNA, 19 nt, Artificial Sequence
  Description of Artificial Sequence: Synthetic oligonucleotide
  Sense strand starting at position 2280 of SEQ ID NO: 1559937
guaggcuccgcaucuguaa

SEQ ID NO: 1564830 - RNA, 19 nt, Artificial Sequence
  Description of Artificial Sequence: Synthetic oligonucleotide
  Antisense strand to SEQ ID NO: 1564829
uuacagaugcggagccuac

SEQ ID NO: 1564831 - RNA, 19 nt, Artificial Sequence
  Description of Artificial Sequence: Synthetic oligonucleotide
  Sense strand starting at position 2509 of SEQ ID NO: 1559937
ucuugugaggucugucauc

SEQ ID NO: 1564832 - RNA, 19 nt, Artificial Sequence
  Description of Artificial Sequence: Synthetic oligonucleotide
  Antisense strand to SEQ ID NO: 1564831
gaugacagaccucacaaga

SEQ ID NO: 1564833 - RNA, 19 nt, Artificial Sequence
  Description of Artificial Sequence: Synthetic oligonucleotide
  Sense strand starting at position 2514 of SEQ ID NO: 1559937
ugaggucugucaucaucuu

SEQ ID NO: 1564834 - RNA, 19 nt, Artificial Sequence
  Description of Artificial Sequence: Synthetic oligonucleotide
  Antisense strand to SEQ ID NO: 1564833
aagaugaugacagaccuca

SEQ ID NO: 1564835 - RNA, 19 nt, Artificial Sequence
  Description of Artificial Sequence: Synthetic oligonucleotide
  Sense strand starting at position 2931 of SEQ ID NO: 1559937
gcaaucuuggcucacgcaa

SEQ ID NO: 1564836 - RNA, 19 nt, Artificial Sequence
  Description of Artificial Sequence: Synthetic oligonucleotide
  Antisense strand to SEQ ID NO: 1564835
uugcgugagccaagauugc

SEQ ID NO: 1564837 - RNA, 19 nt, Artificial Sequence
  Description of Artificial Sequence: Synthetic oligonucleotide
  Sense strand starting at position 3200 of SEQ ID NO: 1559937
gccgguguggugucucaca

SEQ ID NO: 1564838 - RNA, 19 nt, Artificial Sequence
  Description of Artificial Sequence: Synthetic oligonucleotide
  Antisense strand to SEQ ID NO: 1564837
ugugagacaccacaccggc

SEQ ID NO: 1564839 - RNA, 19 nt, Artificial Sequence
  Description of Artificial Sequence: Synthetic oligonucleotide
  Sense strand starting at position 3522 of SEQ ID NO: 1559937
ugaagcaauuaugaccaaa

SEQ ID NO: 1564840 - RNA, 19 nt, Artificial Sequence
  Description of Artificial Sequence: Synthetic oligonucleotide
  Antisense strand to SEQ ID NO: 1564839
uuuggucauaauugcuuca

SEQ ID NO: 1564841 - RNA, 19 nt, Artificial Sequence
  Description of Artificial Sequence: Synthetic oligonucleotide
  Sense strand starting at position 3525 of SEQ ID NO: 1559937
agcaauuaugaccaaaugu

SEQ ID NO: 1564842 - RNA, 19 nt, Artificial Sequence
  Description of Artificial Sequence: Synthetic oligonucleotide
  Antisense strand to SEQ ID NO: 1564841
acauuuggucauaauugcu

SEQ ID NO: 1564843 - RNA, 19 nt, Artificial Sequence
  Description of Artificial Sequence: Synthetic oligonucleotide
  Sense strand starting at position 3589 of SEQ ID NO: 1559937
cuucuaugcuuccuguauu

SEQ ID NO: 1564844 - RNA, 19 nt, Artificial Sequence
  Description of Artificial Sequence: Synthetic oligonucleotide
  Antisense strand to SEQ ID NO: 1564843
aauacaggaagcauagaag

SEQ ID NO: 1564845 - RNA, 19 nt, Artificial Sequence
  Description of Artificial Sequence: Synthetic oligonucleotide
  Sense strand starting at position 3633 of SEQ ID NO: 1559937
uuaucuuauugugcuacau

SEQ ID NO: 1564846 - RNA, 19 nt, Artificial Sequence
  Description of Artificial Sequence: Synthetic oligonucleotide
  Antisense strand to SEQ ID NO: 1564845
auguagcacaauaagauaa

SEQ ID NO: 1564847 - RNA, 19 nt, Artificial Sequence
  Description of Artificial Sequence: Synthetic oligonucleotide
  Sense strand starting at position 3645 of SEQ ID NO: 1559937
gcuacaugaucuuuguaga

SEQ ID NO: 1564848 - RNA, 19 nt, Artificial Sequence
  Description of Artificial Sequence: Synthetic oligonucleotide
  Antisense strand to SEQ ID NO: 1564847
ucuacaaagaucauguagc

SEQ ID NO: 1564849 - RNA, 19 nt, Artificial Sequence
  Description of Artificial Sequence: Synthetic oligonucleotide
  Sense strand starting at position 3646 of SEQ ID NO: 1559937
cuacaugaucuuuguagaa

SEQ ID NO: 1564850 - RNA, 19 nt, Artificial Sequence
  Description of Artificial Sequence: Synthetic oligonucleotide
  Antisense strand to SEQ ID NO: 1564849
uucuacaaagaucauguag

SEQ ID NO: 1564851 - RNA, 19 nt, Artificial Sequence
  Description of Artificial Sequence: Synthetic oligonucleotide
  Sense strand starting at position 3669 of SEQ ID NO: 1559937
ugguaaauucuggaaugca

SEQ ID NO: 1564852 - RNA, 19 nt, Artificial Sequence
  Description of Artificial Sequence: Synthetic oligonucleotide
  Antisense strand to SEQ ID NO: 1564851
ugcauuccagaauuuacca

SEQ ID NO: 1564853 - RNA, 19 nt, Artificial Sequence
  Description of Artificial Sequence: Synthetic oligonucleotide
  Sense strand starting at position 3697 of SEQ ID NO: 1559937
agauuauaauagccaguaa

SEQ ID NO: 1564854 - RNA, 19 nt, Artificial Sequence
  Description of Artificial Sequence: Synthetic oligonucleotide
  Antisense strand to SEQ ID NO: 1564853
uuacuggcuauuauaaucu

SEQ ID NO: 1564855 - RNA, 19 nt, Artificial Sequence
  Description of Artificial Sequence: Synthetic oligonucleotide
  Sense strand starting at position 3758 of SEQ ID NO: 1559937
cuauguuugucuucggaaa

SEQ ID NO: 1564856 - RNA, 19 nt, Artificial Sequence
  Description of Artificial Sequence: Synthetic oligonucleotide
  Antisense strand to SEQ ID NO: 1564855
uuuccgaagacaaacauag

SEQ ID NO: 1564857 - RNA, 19 nt, Artificial Sequence
  Description of Artificial Sequence: Synthetic oligonucleotide
  Sense strand starting at position 3779 of SEQ ID NO: 1559937
ugggauacuauuggcacua

SEQ ID NO: 1564858 - RNA, 19 nt, Artificial Sequence
  Description of Artificial Sequence: Synthetic oligonucleotide
  Antisense strand to SEQ ID NO: 1564857
uagugccaauaguauccca

SEQ ID NO: 1564859 - RNA, 19 nt, Artificial Sequence
  Description of Artificial Sequence: Synthetic oligonucleotide
  Sense strand starting at position 3780 of SEQ ID NO: 1559937
gggauacuauuggcacuau

SEQ ID NO: 1564860 - RNA, 19 nt, Artificial Sequence
  Description of Artificial Sequence: Synthetic oligonucleotide
  Antisense strand to SEQ ID NO: 1564859
auagugccaauaguauccc

SEQ ID NO: 1564861 - RNA, 19 nt, Artificial Sequence
  Description of Artificial Sequence: Synthetic oligonucleotide
  Sense strand starting at position 72 of SEQ ID NO: 1559938
uggaaccucuugucauuga

SEQ ID NO: 1564862 - RNA, 19 nt, Artificial Sequence
  Description of Artificial Sequence: Synthetic oligonucleotide
  Antisense strand to SEQ ID NO: 1564861
ucaaugacaagagguucca

SEQ ID NO: 1564863 - RNA, 19 nt, Artificial Sequence
  Description of Artificial Sequence: Synthetic oligonucleotide
  Sense strand starting at position 94 of SEQ ID NO: 1559938
cuugcacaccagugaagua

SEQ ID NO: 1564864 - RNA, 19 nt, Artificial Sequence
  Description of Artificial Sequence: Synthetic oligonucleotide
  Antisense strand to SEQ ID NO: 1564863
uacuucacuggugugcaag

SEQ ID NO: 1564865 - RNA, 19 nt, Artificial Sequence
  Description of Artificial Sequence: Synthetic oligonucleotide
  Sense strand starting at position 166 of SEQ ID NO: 1559938
gagcgaucuccuuggcauu

SEQ ID NO: 1564866 - RNA, 19 nt, Artificial Sequence
  Description of Artificial Sequence: Synthetic oligonucleotide
  Antisense strand to SEQ ID NO: 1564865
aaugccaaggagaucgcuc

SEQ ID NO: 1564867 - RNA, 19 nt, Artificial Sequence
  Description of Artificial Sequence: Synthetic oligonucleotide
  Sense strand starting at position 324 of SEQ ID NO: 1559938
auguccaucugggagaaga

SEQ ID NO: 1564868 - RNA, 19 nt, Artificial Sequence
  Description of Artificial Sequence: Synthetic oligonucleotide
  Antisense strand to SEQ ID NO: 1564867
ucuucucccagauggacau

SEQ ID NO: 1564869 - RNA, 19 nt, Artificial Sequence
  Description of Artificial Sequence: Synthetic oligonucleotide
  Sense strand starting at position 647 of SEQ ID NO: 1559938
gcuggugggcucuagagua

SEQ ID NO: 1564870 - RNA, 19 nt, Artificial Sequence
  Description of Artificial Sequence: Synthetic oligonucleotide
  Antisense strand to SEQ ID NO: 1564869
uacucuagagcccaccagc

SEQ ID NO: 1564871 - RNA, 19 nt, Artificial Sequence
  Description of Artificial Sequence: Synthetic oligonucleotide
  Sense strand starting at position 682 of SEQ ID NO: 1559938
agccuuuauucccugagga

SEQ ID NO: 1564872 - RNA, 19 nt, Artificial Sequence
  Description of Artificial Sequence: Synthetic oligonucleotide
  Antisense strand to SEQ ID NO: 1564871
uccucagggaauaaaggcu

SEQ ID NO: 1564873 - RNA, 19 nt, Artificial Sequence
  Description of Artificial Sequence: Synthetic oligonucleotide
  Sense strand starting at position 683 of SEQ ID NO: 1559938
gccuuuauucccugaggag

SEQ ID NO: 1564874 - RNA, 19 nt, Artificial Sequence
  Description of Artificial Sequence: Synthetic oligonucleotide
  Antisense strand to SEQ ID NO: 1564873
cuccucagggaauaaaggc

SEQ ID NO: 1564875 - RNA, 19 nt, Artificial Sequence
  Description of Artificial Sequence: Synthetic oligonucleotide
  Sense strand starting at position 701 of SEQ ID NO: 1559938
ggaaguggaucauuaguga

SEQ ID NO: 1564876 - RNA, 19 nt, Artificial Sequence
  Description of Artificial Sequence: Synthetic oligonucleotide
  Antisense strand to SEQ ID NO: 1564875
ucacuaaugauccacuucc

SEQ ID NO: 1564877 - RNA, 19 nt, Artificial Sequence
  Description of Artificial Sequence: Synthetic oligonucleotide
  Sense strand starting at position 704 of SEQ ID NO: 1559938
aguggaucauuagugagga

SEQ ID NO: 1564878 - RNA, 19 nt, Artificial Sequence
  Description of Artificial Sequence: Synthetic oligonucleotide
  Antisense strand to SEQ ID NO: 1564877
uccucacuaaugauccacu

SEQ ID NO: 1564879 - RNA, 19 nt, Artificial Sequence
  Description of Artificial Sequence: Synthetic oligonucleotide
  Sense strand starting at position 768 of SEQ ID NO: 1559938
ucaugugagcccuggacuu

SEQ ID NO: 1564880 - RNA, 19 nt, Artificial Sequence
  Description of Artificial Sequence: Synthetic oligonucleotide
  Antisense strand to SEQ ID NO: 1564879
aaguccagggcucacauga

SEQ ID NO: 1564881 - RNA, 19 nt, Artificial Sequence
  Description of Artificial Sequence: Synthetic oligonucleotide
  Sense strand starting at position 902 of SEQ ID NO: 1559938
gcuugacacguccagguau

SEQ ID NO: 1564882 - RNA, 19 nt, Artificial Sequence
  Description of Artificial Sequence: Synthetic oligonucleotide
  Antisense strand to SEQ ID NO: 1564881
auaccuggacgugucaagc

SEQ ID NO: 1564883 - RNA, 19 nt, Artificial Sequence
  Description of Artificial Sequence: Synthetic oligonucleotide
  Sense strand starting at position 914 of SEQ ID NO: 1559938
cagguaucucugugugucu

SEQ ID NO: 1564884 - RNA, 19 nt, Artificial Sequence
  Description of Artificial Sequence: Synthetic oligonucleotide
  Antisense strand to SEQ ID NO: 1564883
agacacacagagauaccug

SEQ ID NO: 1564885 - RNA, 19 nt, Artificial Sequence
  Description of Artificial Sequence: Synthetic oligonucleotide
  Sense strand starting at position 932 of SEQ ID NO: 1559938
uguguaucucagugugagu

SEQ ID NO: 1564886 - RNA, 19 nt, Artificial Sequence
  Description of Artificial Sequence: Synthetic oligonucleotide
  Antisense strand to SEQ ID NO: 1564885
acucacacugagauacaca

SEQ ID NO: 1564887 - RNA, 19 nt, Artificial Sequence
  Description of Artificial Sequence: Synthetic oligonucleotide
  Sense strand starting at position 972 of SEQ ID NO: 1559938
agaggcuguggcugugauu

SEQ ID NO: 1564888 - RNA, 19 nt, Artificial Sequence
  Description of Artificial Sequence: Synthetic oligonucleotide
  Antisense strand to SEQ ID NO: 1564887
aaucacagccacagccucu

SEQ ID NO: 1564889 - RNA, 19 nt, Artificial Sequence
  Description of Artificial Sequence: Synthetic oligonucleotide
  Sense strand starting at position 1023 of SEQ ID NO: 1559938
ugaguaagggcuuaccugu

SEQ ID NO: 1564890 - RNA, 19 nt, Artificial Sequence
  Description of Artificial Sequence: Synthetic oligonucleotide
  Antisense strand to SEQ ID NO: 1564889
acagguaagcccuuacuca

SEQ ID NO: 1564891 - RNA, 19 nt, Artificial Sequence
  Description of Artificial Sequence: Synthetic oligonucleotide
  Sense strand starting at position 1114 of SEQ ID NO: 1559938
gguguugcugcagacaugu

SEQ ID NO: 1564892 - RNA, 19 nt, Artificial Sequence
  Description of Artificial Sequence: Synthetic oligonucleotide
  Antisense strand to SEQ ID NO: 1564891
acaugucugcagcaacacc

SEQ ID NO: 1564893 - RNA, 19 nt, Artificial Sequence
  Description of Artificial Sequence: Synthetic oligonucleotide
  Sense strand starting at position 1116 of SEQ ID NO: 1559938
uguugcugcagacauguau

SEQ ID NO: 1564894 - RNA, 19 nt, Artificial Sequence
  Description of Artificial Sequence: Synthetic oligonucleotide
  Antisense strand to SEQ ID NO: 1564893
auacaugucugcagcaaca

SEQ ID NO: 1564895 - RNA, 19 nt, Artificial Sequence
  Description of Artificial Sequence: Synthetic oligonucleotide
  Sense strand starting at position 1248 of SEQ ID NO: 1559938
uggguugcaucucuaggau

SEQ ID NO: 1564896 - RNA, 19 nt, Artificial Sequence
  Description of Artificial Sequence: Synthetic oligonucleotide
  Antisense strand to SEQ ID NO: 1564895
auccuagagaugcaaccca

SEQ ID NO: 1564897 - RNA, 19 nt, Artificial Sequence
  Description of Artificial Sequence: Synthetic oligonucleotide
  Sense strand starting at position 1281 of SEQ ID NO: 1559938
gugugggagcuguguuuga

SEQ ID NO: 1564898 - RNA, 19 nt, Artificial Sequence
  Description of Artificial Sequence: Synthetic oligonucleotide
  Antisense strand to SEQ ID NO: 1564897
ucaaacacagcucccacac

SEQ ID NO: 1564899 - RNA, 19 nt, Artificial Sequence
  Description of Artificial Sequence: Synthetic oligonucleotide
  Sense strand starting at position 1285 of SEQ ID NO: 1559938
gggagcuguguuugacaac

SEQ ID NO: 1564900 - RNA, 19 nt, Artificial Sequence
  Description of Artificial Sequence: Synthetic oligonucleotide
  Antisense strand to SEQ ID NO: 1564899
guugucaaacacagcuccc

SEQ ID NO: 1564901 - RNA, 19 nt, Artificial Sequence
  Description of Artificial Sequence: Synthetic oligonucleotide
  Sense strand starting at position 1429 of SEQ ID NO: 1559938
cccauuccugcaggaggaa

SEQ ID NO: 1564902 - RNA, 19 nt, Artificial Sequence
  Description of Artificial Sequence: Synthetic oligonucleotide
  Antisense strand to SEQ ID NO: 1564901
uuccuccugcaggaauggg

SEQ ID NO: 1564903 - RNA, 19 nt, Artificial Sequence
  Description of Artificial Sequence: Synthetic oligonucleotide
  Sense strand starting at position 2071 of SEQ ID NO: 1559938
guaggcuccgcaucuguaa

SEQ ID NO: 1564904 - RNA, 19 nt, Artificial Sequence
  Description of Artificial Sequence: Synthetic oligonucleotide
  Antisense strand to SEQ ID NO: 1564903
uuacagaugcggagccuac

SEQ ID NO: 1564905 - RNA, 19 nt, Artificial Sequence
  Description of Artificial Sequence: Synthetic oligonucleotide
  Sense strand starting at position 2300 of SEQ ID NO: 1559938
ucuugugaggucugucauc

SEQ ID NO: 1564906 - RNA, 19 nt, Artificial Sequence
  Description of Artificial Sequence: Synthetic oligonucleotide
  Antisense strand to SEQ ID NO: 1564905
gaugacagaccucacaaga

SEQ ID NO: 1564907 - RNA, 19 nt, Artificial Sequence
  Description of Artificial Sequence: Synthetic oligonucleotide
  Sense strand starting at position 2305 of SEQ ID NO: 1559938
ugaggucugucaucaucuu

SEQ ID NO: 1564908 - RNA, 19 nt, Artificial Sequence
  Description of Artificial Sequence: Synthetic oligonucleotide
  Antisense strand to SEQ ID NO: 1564907
aagaugaugacagaccuca

SEQ ID NO: 1564909 - RNA, 19 nt, Artificial Sequence
  Description of Artificial Sequence: Synthetic oligonucleotide
  Sense strand starting at position 2722 of SEQ ID NO: 1559938
gcaaucuuggcucacgcaa

SEQ ID NO: 1564910 - RNA, 19 nt, Artificial Sequence
  Description of Artificial Sequence: Synthetic oligonucleotide
  Antisense strand to SEQ ID NO: 1564909
uugcgugagccaagauugc

SEQ ID NO: 1564911 - RNA, 19 nt, Artificial Sequence
  Description of Artificial Sequence: Synthetic oligonucleotide
  Sense strand starting at position 2991 of SEQ ID NO: 1559938
gccgguguggugucucaca

SEQ ID NO: 1564912 - RNA, 19 nt, Artificial Sequence
  Description of Artificial Sequence: Synthetic oligonucleotide
  Antisense strand to SEQ ID NO: 1564911
ugugagacaccacaccggc

SEQ ID NO: 1564913 - RNA, 19 nt, Artificial Sequence
  Description of Artificial Sequence: Synthetic oligonucleotide
  Sense strand starting at position 3313 of SEQ ID NO: 1559938
ugaagcaauuaugaccaaa

SEQ ID NO: 1564914 - RNA, 19 nt, Artificial Sequence
  Description of Artificial Sequence: Synthetic oligonucleotide
  Antisense strand to SEQ ID NO: 1564913
uuuggucauaauugcuuca

SEQ ID NO: 1564915 - RNA, 19 nt, Artificial Sequence
  Description of Artificial Sequence: Synthetic oligonucleotide
  Sense strand starting at position 3316 of SEQ ID NO: 1559938
agcaauuaugaccaaaugu

SEQ ID NO: 1564916 - RNA, 19 nt, Artificial Sequence
  Description of Artificial Sequence: Synthetic oligonucleotide
  Antisense strand to SEQ ID NO: 1564915
acauuuggucauaauugcu

SEQ ID NO: 1564917 - RNA, 19 nt, Artificial Sequence
  Description of Artificial Sequence: Synthetic oligonucleotide
  Sense strand starting at position 3380 of SEQ ID NO: 1559938
cuucuaugcuuccuguauu

SEQ ID NO: 1564918 - RNA, 19 nt, Artificial Sequence
  Description of Artificial Sequence: Synthetic oligonucleotide
  Antisense strand to SEQ ID NO: 1564917
aauacaggaagcauagaag

SEQ ID NO: 1564919 - RNA, 19 nt, Artificial Sequence
  Description of Artificial Sequence: Synthetic oligonucleotide
  Sense strand starting at position 3424 of SEQ ID NO: 1559938
uuaucuuauugugcuacau

SEQ ID NO: 1564920 - RNA, 19 nt, Artificial Sequence
  Description of Artificial Sequence: Synthetic oligonucleotide
  Antisense strand to SEQ ID NO: 1564919
auguagcacaauaagauaa

SEQ ID NO: 1564921 - RNA, 19 nt, Artificial Sequence
  Description of Artificial Sequence: Synthetic oligonucleotide
  Sense strand starting at position 3436 of SEQ ID NO: 1559938
gcuacaugaucuuuguaga

SEQ ID NO: 1564922 - RNA, 19 nt, Artificial Sequence
  Description of Artificial Sequence: Synthetic oligonucleotide
  Antisense strand to SEQ ID NO: 1564921
ucuacaaagaucauguagc

SEQ ID NO: 1564923 - RNA, 19 nt, Artificial Sequence
  Description of Artificial Sequence: Synthetic oligonucleotide
  Sense strand starting at position 3437 of SEQ ID NO: 1559938
cuacaugaucuuuguagaa

SEQ ID NO: 1564924 - RNA, 19 nt, Artificial Sequence
  Description of Artificial Sequence: Synthetic oligonucleotide
  Antisense strand to SEQ ID NO: 1564923
uucuacaaagaucauguag

SEQ ID NO: 1564925 - RNA, 19 nt, Artificial Sequence
  Description of Artificial Sequence: Synthetic oligonucleotide
  Sense strand starting at position 3460 of SEQ ID NO: 1559938
ugguaaauucuggaaugca

SEQ ID NO: 1564926 - RNA, 19 nt, Artificial Sequence
  Description of Artificial Sequence: Synthetic oligonucleotide
  Antisense strand to SEQ ID NO: 1564925
ugcauuccagaauuuacca

SEQ ID NO: 1564927 - RNA, 19 nt, Artificial Sequence
  Description of Artificial Sequence: Synthetic oligonucleotide
  Sense strand starting at position 3488 of SEQ ID NO: 1559938
agauuauaauagccaguaa

SEQ ID NO: 1564928 - RNA, 19 nt, Artificial Sequence
  Description of Artificial Sequence: Synthetic oligonucleotide
  Antisense strand to SEQ ID NO: 1564927
uuacuggcuauuauaaucu

SEQ ID NO: 1564929 - RNA, 19 nt, Artificial Sequence
  Description of Artificial Sequence: Synthetic oligonucleotide
  Sense strand starting at position 3549 of SEQ ID NO: 1559938
cuauguuugucuucggaaa

SEQ ID NO: 1564930 - RNA, 19 nt, Artificial Sequence
  Description of Artificial Sequence: Synthetic oligonucleotide
  Antisense strand to SEQ ID NO: 1564929
uuuccgaagacaaacauag

SEQ ID NO: 1564931 - RNA, 19 nt, Artificial Sequence
  Description of Artificial Sequence: Synthetic oligonucleotide
  Sense strand starting at position 3570 of SEQ ID NO: 1559938
ugggauacuauuggcacua

SEQ ID NO: 1564932 - RNA, 19 nt, Artificial Sequence
  Description of Artificial Sequence: Synthetic oligonucleotide
  Antisense strand to SEQ ID NO: 1564931
uagugccaauaguauccca

SEQ ID NO: 1564933 - RNA, 19 nt, Artificial Sequence
  Description of Artificial Sequence: Synthetic oligonucleotide
  Sense strand starting at position 3571 of SEQ ID NO: 1559938
gggauacuauuggcacuau

SEQ ID NO: 1564934 - RNA, 19 nt, Artificial Sequence
  Description of Artificial Sequence: Synthetic oligonucleotide
  Antisense strand to SEQ ID NO: 1564933
auagugccaauaguauccc

SEQ ID NO: 1564935 - RNA, 19 nt, Artificial Sequence
  Description of Artificial Sequence: Synthetic oligonucleotide
  Sense strand starting at position 3807 of SEQ ID NO: 1559938
gguuccaucuacucaggaa

SEQ ID NO: 1564936 - RNA, 19 nt, Artificial Sequence
  Description of Artificial Sequence: Synthetic oligonucleotide
  Antisense strand to SEQ ID NO: 1564935
uuccugaguagauggaacc

SEQ ID NO: 1564937 - RNA, 19 nt, Artificial Sequence
  Description of Artificial Sequence: Synthetic oligonucleotide
  Sense strand starting at position 3915 of SEQ ID NO: 1559938
agacucuugucucagagag

SEQ ID NO: 1564938 - RNA, 19 nt, Artificial Sequence
  Description of Artificial Sequence: Synthetic oligonucleotide
  Antisense strand to SEQ ID NO: 1564937
cucucugagacaagagucu

SEQ ID NO: 1564939 - RNA, 19 nt, Artificial Sequence
  Description of Artificial Sequence: Synthetic oligonucleotide
  Sense strand starting at position 3981 of SEQ ID NO: 1559938
uugcacagagcauguaaua

SEQ ID NO: 1564940 - RNA, 19 nt, Artificial Sequence
  Description of Artificial Sequence: Synthetic oligonucleotide
  Antisense strand to SEQ ID NO: 1564939
uauuacaugcucugugcaa

SEQ ID NO: 1564941 - RNA, 19 nt, Artificial Sequence
  Description of Artificial Sequence: Synthetic oligonucleotide
  Sense strand starting at position 316 of SEQ ID NO: 1559939
uggcaauucgaagauauua

SEQ ID NO: 1564942 - RNA, 19 nt, Artificial Sequence
  Description of Artificial Sequence: Synthetic oligonucleotide
  Antisense strand to SEQ ID NO: 1564941
uaauaucuucgaauugcca

SEQ ID NO: 1564943 - RNA, 19 nt, Artificial Sequence
  Description of Artificial Sequence: Synthetic oligonucleotide
  Sense strand starting at position 324 of SEQ ID NO: 1559939
cgaagauauuauucuggcu

SEQ ID NO: 1564944 - RNA, 19 nt, Artificial Sequence
  Description of Artificial Sequence: Synthetic oligonucleotide
  Antisense strand to SEQ ID NO: 1564943
agccagaauaauaucuucg

SEQ ID NO: 1564945 - RNA, 19 nt, Artificial Sequence
  Description of Artificial Sequence: Synthetic oligonucleotide
  Sense strand starting at position 356 of SEQ ID NO: 1559939
cugguuagacagcaagauu

SEQ ID NO: 1564946 - RNA, 19 nt, Artificial Sequence
  Description of Artificial Sequence: Synthetic oligonucleotide
  Antisense strand to SEQ ID NO: 1564945
aaucuugcugucuaaccag

SEQ ID NO: 1564947 - RNA, 19 nt, Artificial Sequence
  Description of Artificial Sequence: Synthetic oligonucleotide
  Sense strand starting at position 666 of SEQ ID NO: 1559939
gcuguuucuugagccagga

SEQ ID NO: 1564948 - RNA, 19 nt, Artificial Sequence
  Description of Artificial Sequence: Synthetic oligonucleotide
  Antisense strand to SEQ ID NO: 1564947
uccuggcucaagaaacagc

SEQ ID NO: 1564949 - RNA, 19 nt, Artificial Sequence
  Description of Artificial Sequence: Synthetic oligonucleotide
  Sense strand starting at position 668 of SEQ ID NO: 1559939
uguuucuugagccaggaca

SEQ ID NO: 1564950 - RNA, 19 nt, Artificial Sequence
  Description of Artificial Sequence: Synthetic oligonucleotide
  Antisense strand to SEQ ID NO: 1564949
uguccuggcucaagaaaca

SEQ ID NO: 1564951 - RNA, 19 nt, Artificial Sequence
  Description of Artificial Sequence: Synthetic oligonucleotide
  Sense strand starting at position 732 of SEQ ID NO: 1559939
ggcugaggaagucaucuga

SEQ ID NO: 1564952 - RNA, 19 nt, Artificial Sequence
  Description of Artificial Sequence: Synthetic oligonucleotide
  Antisense strand to SEQ ID NO: 1564951
ucagaugacuuccucagcc

SEQ ID NO: 1564953 - RNA, 19 nt, Artificial Sequence
  Description of Artificial Sequence: Synthetic oligonucleotide
  Sense strand starting at position 736 of SEQ ID NO: 1559939
gaggaagucaucugaguug

SEQ ID NO: 1564954 - RNA, 19 nt, Artificial Sequence
  Description of Artificial Sequence: Synthetic oligonucleotide
  Antisense strand to SEQ ID NO: 1564953
caacucagaugacuuccuc

SEQ ID NO: 1564955 - RNA, 19 nt, Artificial Sequence
  Description of Artificial Sequence: Synthetic oligonucleotide
  Sense strand starting at position 739 of SEQ ID NO: 1559939
gaagucaucugaguugcca

SEQ ID NO: 1564956 - RNA, 19 nt, Artificial Sequence
  Description of Artificial Sequence: Synthetic oligonucleotide
  Antisense strand to SEQ ID NO: 1564955
uggcaacucagaugacuuc

SEQ ID NO: 1564957 - RNA, 19 nt, Artificial Sequence
  Description of Artificial Sequence: Synthetic oligonucleotide
  Sense strand starting at position 743 of SEQ ID NO: 1559939
ucaucugaguugccacaua

SEQ ID NO: 1564958 - RNA, 19 nt, Artificial Sequence
  Description of Artificial Sequence: Synthetic oligonucleotide
  Antisense strand to SEQ ID NO: 1564957
uauguggcaacucagauga

SEQ ID NO: 1564959 - RNA, 19 nt, Artificial Sequence
  Description of Artificial Sequence: Synthetic oligonucleotide
  Sense strand starting at position 763 of SEQ ID NO: 1559939
ugucacuguguccagcaua

SEQ ID NO: 1564960 - RNA, 19 nt, Artificial Sequence
  Description of Artificial Sequence: Synthetic oligonucleotide
  Antisense strand to SEQ ID NO: 1564959
uaugcuggacacagugaca

SEQ ID NO: 1564961 - RNA, 19 nt, Artificial Sequence
  Description of Artificial Sequence: Synthetic oligonucleotide
  Sense strand starting at position 794 of SEQ ID NO: 1559939
gacacauuggucuguggga

SEQ ID NO: 1564962 - RNA, 19 nt, Artificial Sequence
  Description of Artificial Sequence: Synthetic oligonucleotide
  Antisense strand to SEQ ID NO: 1564961
ucccacagaccaauguguc

SEQ ID NO: 1564963 - RNA, 19 nt, Artificial Sequence
  Description of Artificial Sequence: Synthetic oligonucleotide
  Sense strand starting at position 796 of SEQ ID NO: 1559939
cacauuggucugugggauc

SEQ ID NO: 1564964 - RNA, 19 nt, Artificial Sequence
  Description of Artificial Sequence: Synthetic oligonucleotide
  Antisense strand to SEQ ID NO: 1564963
gaucccacagaccaaugug

SEQ ID NO: 1564965 - RNA, 19 nt, Artificial Sequence
  Description of Artificial Sequence: Synthetic oligonucleotide
  Sense strand starting at position 879 of SEQ ID NO: 1559939
acaucuugggcgcagaagu

SEQ ID NO: 1564966 - RNA, 19 nt, Artificial Sequence
  Description of Artificial Sequence: Synthetic oligonucleotide
  Antisense strand to SEQ ID NO: 1564965
acuucugcgcccaagaugu

SEQ ID NO: 1564967 - RNA, 19 nt, Artificial Sequence
  Description of Artificial Sequence: Synthetic oligonucleotide
  Sense strand starting at position 930 of SEQ ID NO: 1559939
gucccugcuaugugaggau

SEQ ID NO: 1564968 - RNA, 19 nt, Artificial Sequence
  Description of Artificial Sequence: Synthetic oligonucleotide
  Antisense strand to SEQ ID NO: 1564967
auccucacauagcagggac

SEQ ID NO: 1564969 - RNA, 19 nt, Artificial Sequence
  Description of Artificial Sequence: Synthetic oligonucleotide
  Sense strand starting at position 989 of SEQ ID NO: 1559939
gaucuuagaguaugcaauc

SEQ ID NO: 1564970 - RNA, 19 nt, Artificial Sequence
  Description of Artificial Sequence: Synthetic oligonucleotide
  Antisense strand to SEQ ID NO: 1564969
gauugcauacucuaagauc

SEQ ID NO: 1564971 - RNA, 19 nt, Artificial Sequence
  Description of Artificial Sequence: Synthetic oligonucleotide
  Sense strand starting at position 999 of SEQ ID NO: 1559939
uaugcaaucugggcagaga

SEQ ID NO: 1564972 - RNA, 19 nt, Artificial Sequence
  Description of Artificial Sequence: Synthetic oligonucleotide
  Antisense strand to SEQ ID NO: 1564971
ucucugcccagauugcaua

SEQ ID NO: 1564973 - RNA, 19 nt, Artificial Sequence
  Description of Artificial Sequence: Synthetic oligonucleotide
  Sense strand starting at position 1002 of SEQ ID NO: 1559939
gcaaucugggcagagacau

SEQ ID NO: 1564974 - RNA, 19 nt, Artificial Sequence
  Description of Artificial Sequence: Synthetic oligonucleotide
  Antisense strand to SEQ ID NO: 1564973
augucucugcccagauugc

SEQ ID NO: 1564975 - RNA, 19 nt, Artificial Sequence
  Description of Artificial Sequence: Synthetic oligonucleotide
  Sense strand starting at position 1083 of SEQ ID NO: 1559939
gagaauacguccucaaagg

SEQ ID NO: 1564976 - RNA, 19 nt, Artificial Sequence
  Description of Artificial Sequence: Synthetic oligonucleotide
  Antisense strand to SEQ ID NO: 1564975
ccuuugaggacguauucuc

SEQ ID NO: 1564977 - RNA, 19 nt, Artificial Sequence
  Description of Artificial Sequence: Synthetic oligonucleotide
  Sense strand starting at position 1084 of SEQ ID NO: 1559939
agaauacguccucaaaggu

SEQ ID NO: 1564978 - RNA, 19 nt, Artificial Sequence
  Description of Artificial Sequence: Synthetic oligonucleotide
  Antisense strand to SEQ ID NO: 1564977
accuuugaggacguauucu

SEQ ID NO: 1564979 - RNA, 19 nt, Artificial Sequence
  Description of Artificial Sequence: Synthetic oligonucleotide
  Sense strand starting at position 1097 of SEQ ID NO: 1559939
aaaggucuccuguagcaaa

SEQ ID NO: 1564980 - RNA, 19 nt, Artificial Sequence
  Description of Artificial Sequence: Synthetic oligonucleotide
  Antisense strand to SEQ ID NO: 1564979
uuugcuacaggagaccuuu

SEQ ID NO: 1564981 - RNA, 19 nt, Artificial Sequence
  Description of Artificial Sequence: Synthetic oligonucleotide
  Sense strand starting at position 1320 of SEQ ID NO: 1559939
uggaaccucuugucauuga

SEQ ID NO: 1564982 - RNA, 19 nt, Artificial Sequence
  Description of Artificial Sequence: Synthetic oligonucleotide
  Antisense strand to SEQ ID NO: 1564981
ucaaugacaagagguucca

SEQ ID NO: 1564983 - RNA, 19 nt, Artificial Sequence
  Description of Artificial Sequence: Synthetic oligonucleotide
  Sense strand starting at position 1342 of SEQ ID NO: 1559939
cuugcacaccagugaagua

SEQ ID NO: 1564984 - RNA, 19 nt, Artificial Sequence
  Description of Artificial Sequence: Synthetic oligonucleotide
  Antisense strand to SEQ ID NO: 1564983
uacuucacuggugugcaag

SEQ ID NO: 1564985 - RNA, 19 nt, Artificial Sequence
  Description of Artificial Sequence: Synthetic oligonucleotide
  Sense strand starting at position 1572 of SEQ ID NO: 1559939
auguccaucugggagaaga

SEQ ID NO: 1564986 - RNA, 19 nt, Artificial Sequence
  Description of Artificial Sequence: Synthetic oligonucleotide
  Antisense strand to SEQ ID NO: 1564985
ucuucucccagauggacau

SEQ ID NO: 1564987 - RNA, 19 nt, Artificial Sequence
  Description of Artificial Sequence: Synthetic oligonucleotide
  Sense strand starting at position 1895 of SEQ ID NO: 1559939
gcuggugggcucuagagua

SEQ ID NO: 1564988 - RNA, 19 nt, Artificial Sequence
  Description of Artificial Sequence: Synthetic oligonucleotide
  Antisense strand to SEQ ID NO: 1564987
uacucuagagcccaccagc

SEQ ID NO: 1564989 - RNA, 19 nt, Artificial Sequence
  Description of Artificial Sequence: Synthetic oligonucleotide
  Sense strand starting at position 1930 of SEQ ID NO: 1559939
agccuuuauucccugagga

SEQ ID NO: 1564990 - RNA, 19 nt, Artificial Sequence
  Description of Artificial Sequence: Synthetic oligonucleotide
  Antisense strand to SEQ ID NO: 1564989
uccucagggaauaaaggcu

SEQ ID NO: 1564991 - RNA, 19 nt, Artificial Sequence
  Description of Artificial Sequence: Synthetic oligonucleotide
  Sense strand starting at position 1931 of SEQ ID NO: 1559939
gccuuuauucccugaggag

SEQ ID NO: 1564992 - RNA, 19 nt, Artificial Sequence
  Description of Artificial Sequence: Synthetic oligonucleotide
  Antisense strand to SEQ ID NO: 1564991
cuccucagggaauaaaggc

SEQ ID NO: 1564993 - RNA, 19 nt, Artificial Sequence
  Description of Artificial Sequence: Synthetic oligonucleotide
  Sense strand starting at position 1949 of SEQ ID NO: 1559939
ggaaguggaucauuaguga

SEQ ID NO: 1564994 - RNA, 19 nt, Artificial Sequence
  Description of Artificial Sequence: Synthetic oligonucleotide
  Antisense strand to SEQ ID NO: 1564993
ucacuaaugauccacuucc

SEQ ID NO: 1564995 - RNA, 19 nt, Artificial Sequence
  Description of Artificial Sequence: Synthetic oligonucleotide
  Sense strand starting at position 1952 of SEQ ID NO: 1559939
aguggaucauuagugagga

SEQ ID NO: 1564996 - RNA, 19 nt, Artificial Sequence
  Description of Artificial Sequence: Synthetic oligonucleotide
  Antisense strand to SEQ ID NO: 1564995
uccucacuaaugauccacu

SEQ ID NO: 1564997 - RNA, 19 nt, Artificial Sequence
  Description of Artificial Sequence: Synthetic oligonucleotide
  Sense strand starting at position 2016 of SEQ ID NO: 1559939
ucaugugagcccuggacuu

SEQ ID NO: 1564998 - RNA, 19 nt, Artificial Sequence
  Description of Artificial Sequence: Synthetic oligonucleotide
  Antisense strand to SEQ ID NO: 1564997
aaguccagggcucacauga

SEQ ID NO: 1564999 - RNA, 19 nt, Artificial Sequence
  Description of Artificial Sequence: Synthetic oligonucleotide
  Sense strand starting at position 2150 of SEQ ID NO: 1559939
gcuugacacguccagguau

SEQ ID NO: 1565000 - RNA, 19 nt, Artificial Sequence
  Description of Artificial Sequence: Synthetic oligonucleotide
  Antisense strand to SEQ ID NO: 1564999
auaccuggacgugucaagc

SEQ ID NO: 1565001 - RNA, 19 nt, Artificial Sequence
  Description of Artificial Sequence: Synthetic oligonucleotide
  Sense strand starting at position 2271 of SEQ ID NO: 1559939
ugaguaagggcuuaccugu

SEQ ID NO: 1565002 - RNA, 19 nt, Artificial Sequence
  Description of Artificial Sequence: Synthetic oligonucleotide
  Antisense strand to SEQ ID NO: 1565001
acagguaagcccuuacuca

SEQ ID NO: 1565003 - RNA, 19 nt, Artificial Sequence
  Description of Artificial Sequence: Synthetic oligonucleotide
  Sense strand starting at position 2362 of SEQ ID NO: 1559939
gguguugcugcagacaugu

SEQ ID NO: 1565004 - RNA, 19 nt, Artificial Sequence
  Description of Artificial Sequence: Synthetic oligonucleotide
  Antisense strand to SEQ ID NO: 1565003
acaugucugcagcaacacc

SEQ ID NO: 1565005 - RNA, 19 nt, Artificial Sequence
  Description of Artificial Sequence: Synthetic oligonucleotide
  Sense strand starting at position 2364 of SEQ ID NO: 1559939
uguugcugcagacauguau

SEQ ID NO: 1565006 - RNA, 19 nt, Artificial Sequence
  Description of Artificial Sequence: Synthetic oligonucleotide
  Antisense strand to SEQ ID NO: 1565005
auacaugucugcagcaaca

SEQ ID NO: 1565007 - RNA, 19 nt, Artificial Sequence
  Description of Artificial Sequence: Synthetic oligonucleotide
  Sense strand starting at position 2496 of SEQ ID NO: 1559939
uggguugcaucucuaggau

SEQ ID NO: 1565008 - RNA, 19 nt, Artificial Sequence
  Description of Artificial Sequence: Synthetic oligonucleotide
  Antisense strand to SEQ ID NO: 1565007
auccuagagaugcaaccca

SEQ ID NO: 1565009 - RNA, 19 nt, Artificial Sequence
  Description of Artificial Sequence: Synthetic oligonucleotide
  Sense strand starting at position 2533 of SEQ ID NO: 1559939
gggagcuguguuugacaac

SEQ ID NO: 1565010 - RNA, 19 nt, Artificial Sequence
  Description of Artificial Sequence: Synthetic oligonucleotide
  Antisense strand to SEQ ID NO: 1565009
guugucaaacacagcuccc

SEQ ID NO: 1565011 - RNA, 19 nt, Artificial Sequence
  Description of Artificial Sequence: Synthetic oligonucleotide
  Sense strand starting at position 2677 of SEQ ID NO: 1559939
cccauuccugcaggaggaa

SEQ ID NO: 1565012 - RNA, 19 nt, Artificial Sequence
  Description of Artificial Sequence: Synthetic oligonucleotide
  Antisense strand to SEQ ID NO: 1565011
uuccuccugcaggaauggg

SEQ ID NO: 1565013 - RNA, 19 nt, Artificial Sequence
  Description of Artificial Sequence: Synthetic oligonucleotide
  Sense strand starting at position 3319 of SEQ ID NO: 1559939
guaggcuccgcaucuguaa

SEQ ID NO: 1565014 - RNA, 19 nt, Artificial Sequence
  Description of Artificial Sequence: Synthetic oligonucleotide
  Antisense strand to SEQ ID NO: 1565013
uuacagaugcggagccuac

SEQ ID NO: 1565015 - RNA, 19 nt, Artificial Sequence
  Description of Artificial Sequence: Synthetic oligonucleotide
  Sense strand starting at position 3548 of SEQ ID NO: 1559939
ucuugugaggucugucauc

SEQ ID NO: 1565016 - RNA, 19 nt, Artificial Sequence
  Description of Artificial Sequence: Synthetic oligonucleotide
  Antisense strand to SEQ ID NO: 1565015
gaugacagaccucacaaga

SEQ ID NO: 1565017 - RNA, 19 nt, Artificial Sequence
  Description of Artificial Sequence: Synthetic oligonucleotide
  Sense strand starting at position 3553 of SEQ ID NO: 1559939
ugaggucugucaucaucuu

SEQ ID NO: 1565018 - RNA, 19 nt, Artificial Sequence
  Description of Artificial Sequence: Synthetic oligonucleotide
  Antisense strand to SEQ ID NO: 1565017
aagaugaugacagaccuca

SEQ ID NO: 1565019 - RNA, 19 nt, Artificial Sequence
  Description of Artificial Sequence: Synthetic oligonucleotide
  Sense strand starting at position 3970 of SEQ ID NO: 1559939
gcaaucuuggcucacgcaa

SEQ ID NO: 1565020 - RNA, 19 nt, Artificial Sequence
  Description of Artificial Sequence: Synthetic oligonucleotide
  Antisense strand to SEQ ID NO: 1565019
uugcgugagccaagauugc

SEQ ID NO: 1565021 - RNA, 19 nt, Artificial Sequence
  Description of Artificial Sequence: Synthetic oligonucleotide
  Sense strand starting at position 440 of SEQ ID NO: 1559940
gucgcaguuucucccagau

SEQ ID NO: 1565022 - RNA, 19 nt, Artificial Sequence
  Description of Artificial Sequence: Synthetic oligonucleotide
  Antisense strand to SEQ ID NO: 1565021
aucugggagaaacugcgac

SEQ ID NO: 1565023 - RNA, 19 nt, Artificial Sequence
  Description of Artificial Sequence: Synthetic oligonucleotide
  Sense strand starting at position 812 of SEQ ID NO: 1559940
gucagcugucguggcaaau

SEQ ID NO: 1565024 - RNA, 19 nt, Artificial Sequence
  Description of Artificial Sequence: Synthetic oligonucleotide
  Antisense strand to SEQ ID NO: 1565023
auuugccacgacagcugac

SEQ ID NO: 1565025 - RNA, 19 nt, Artificial Sequence
  Description of Artificial Sequence: Synthetic oligonucleotide
  Sense strand starting at position 813 of SEQ ID NO: 1559940
ucagcugucguggcaaauc

SEQ ID NO: 1565026 - RNA, 19 nt, Artificial Sequence
  Description of Artificial Sequence: Synthetic oligonucleotide
  Antisense strand to SEQ ID NO: 1565025
gauuugccacgacagcuga

SEQ ID NO: 1565027 - RNA, 19 nt, Artificial Sequence
  Description of Artificial Sequence: Synthetic oligonucleotide
  Sense strand starting at position 861 of SEQ ID NO: 1559940
gucagacacugagaaucau

SEQ ID NO: 1565028 - RNA, 19 nt, Artificial Sequence
  Description of Artificial Sequence: Synthetic oligonucleotide
  Antisense strand to SEQ ID NO: 1565027
augauucucagugucugac

SEQ ID NO: 1565029 - RNA, 19 nt, Artificial Sequence
  Description of Artificial Sequence: Synthetic oligonucleotide
  Sense strand starting at position 869 of SEQ ID NO: 1559940
cugagaaucauguggccuu

SEQ ID NO: 1565030 - RNA, 19 nt, Artificial Sequence
  Description of Artificial Sequence: Synthetic oligonucleotide
  Antisense strand to SEQ ID NO: 1565029
aaggccacaugauucucag

SEQ ID NO: 1565031 - RNA, 19 nt, Artificial Sequence
  Description of Artificial Sequence: Synthetic oligonucleotide
  Sense strand starting at position 876 of SEQ ID NO: 1559940
ucauguggccuucgaaguu

SEQ ID NO: 1565032 - RNA, 19 nt, Artificial Sequence
  Description of Artificial Sequence: Synthetic oligonucleotide
  Antisense strand to SEQ ID NO: 1565031
aacuucgaaggccacauga

SEQ ID NO: 1565033 - RNA, 19 nt, Artificial Sequence
  Description of Artificial Sequence: Synthetic oligonucleotide
  Sense strand starting at position 919 of SEQ ID NO: 1559940
ggcuaaugucaggagcagu

SEQ ID NO: 1565034 - RNA, 19 nt, Artificial Sequence
  Description of Artificial Sequence: Synthetic oligonucleotide
  Antisense strand to SEQ ID NO: 1565033
acugcuccugacauuagcc

SEQ ID NO: 1565035 - RNA, 19 nt, Artificial Sequence
  Description of Artificial Sequence: Synthetic oligonucleotide
  Sense strand starting at position 988 of SEQ ID NO: 1559940
ugagucaaugagggucaaa

SEQ ID NO: 1565036 - RNA, 19 nt, Artificial Sequence
  Description of Artificial Sequence: Synthetic oligonucleotide
  Antisense strand to SEQ ID NO: 1565035
uuugacccucauugacuca

SEQ ID NO: 1565037 - RNA, 19 nt, Artificial Sequence
  Description of Artificial Sequence: Synthetic oligonucleotide
  Sense strand starting at position 1034 of SEQ ID NO: 1559940
gagguuagaggucaaguuu

SEQ ID NO: 1565038 - RNA, 19 nt, Artificial Sequence
  Description of Artificial Sequence: Synthetic oligonucleotide
  Antisense strand to SEQ ID NO: 1565037
aaacuugaccucuaaccuc

SEQ ID NO: 1565039 - RNA, 19 nt, Artificial Sequence
  Description of Artificial Sequence: Synthetic oligonucleotide
  Sense strand starting at position 1160 of SEQ ID NO: 1559940
aaagguaggucagaauuga

SEQ ID NO: 1565040 - RNA, 19 nt, Artificial Sequence
  Description of Artificial Sequence: Synthetic oligonucleotide
  Antisense strand to SEQ ID NO: 1565039
ucaauucugaccuaccuuu

SEQ ID NO: 1565041 - RNA, 19 nt, Artificial Sequence
  Description of Artificial Sequence: Synthetic oligonucleotide
  Sense strand starting at position 1164 of SEQ ID NO: 1559940
guaggucagaauugauaaa

SEQ ID NO: 1565042 - RNA, 19 nt, Artificial Sequence
  Description of Artificial Sequence: Synthetic oligonucleotide
  Antisense strand to SEQ ID NO: 1565041
uuuaucaauucugaccuac

SEQ ID NO: 1565043 - RNA, 19 nt, Artificial Sequence
  Description of Artificial Sequence: Synthetic oligonucleotide
  Sense strand starting at position 1176 of SEQ ID NO: 1559940
ugauaaagcguagagguua

SEQ ID NO: 1565044 - RNA, 19 nt, Artificial Sequence
  Description of Artificial Sequence: Synthetic oligonucleotide
  Antisense strand to SEQ ID NO: 1565043
uaaccucuacgcuuuauca

SEQ ID NO: 1565045 - RNA, 19 nt, Artificial Sequence
  Description of Artificial Sequence: Synthetic oligonucleotide
  Sense strand starting at position 1257 of SEQ ID NO: 1559940
ggucaaaugucagaggcca

SEQ ID NO: 1565046 - RNA, 19 nt, Artificial Sequence
  Description of Artificial Sequence: Synthetic oligonucleotide
  Antisense strand to SEQ ID NO: 1565045
uggccucugacauuugacc

SEQ ID NO: 1565047 - RNA, 19 nt, Artificial Sequence
  Description of Artificial Sequence: Synthetic oligonucleotide
  Sense strand starting at position 1329 of SEQ ID NO: 1559940
uaaagucagaguugaugga

SEQ ID NO: 1565048 - RNA, 19 nt, Artificial Sequence
  Description of Artificial Sequence: Synthetic oligonucleotide
  Antisense strand to SEQ ID NO: 1565047
uccaucaacucugacuuua

SEQ ID NO: 1565049 - RNA, 19 nt, Artificial Sequence
  Description of Artificial Sequence: Synthetic oligonucleotide
  Sense strand starting at position 1336 of SEQ ID NO: 1559940
agaguugauggaggucaga

SEQ ID NO: 1565050 - RNA, 19 nt, Artificial Sequence
  Description of Artificial Sequence: Synthetic oligonucleotide
  Antisense strand to SEQ ID NO: 1565049
ucugaccuccaucaacucu

SEQ ID NO: 1565051 - RNA, 19 nt, Artificial Sequence
  Description of Artificial Sequence: Synthetic oligonucleotide
  Sense strand starting at position 1349 of SEQ ID NO: 1559940
gucagaggucgagauguga

SEQ ID NO: 1565052 - RNA, 19 nt, Artificial Sequence
  Description of Artificial Sequence: Synthetic oligonucleotide
  Antisense strand to SEQ ID NO: 1565051
ucacaucucgaccucugac

SEQ ID NO: 1565053 - RNA, 19 nt, Artificial Sequence
  Description of Artificial Sequence: Synthetic oligonucleotide
  Sense strand starting at position 1382 of SEQ ID NO: 1559940
gucagaagucagugugggu

SEQ ID NO: 1565054 - RNA, 19 nt, Artificial Sequence
  Description of Artificial Sequence: Synthetic oligonucleotide
  Antisense strand to SEQ ID NO: 1565053
acccacacugacuucugac

SEQ ID NO: 1565055 - RNA, 19 nt, Artificial Sequence
  Description of Artificial Sequence: Synthetic oligonucleotide
  Sense strand starting at position 1395 of SEQ ID NO: 1559940
guggguuagucaguguauc

SEQ ID NO: 1565056 - RNA, 19 nt, Artificial Sequence
  Description of Artificial Sequence: Synthetic oligonucleotide
  Antisense strand to SEQ ID NO: 1565055
gauacacugacuaacccac

SEQ ID NO: 1565057 - RNA, 19 nt, Artificial Sequence
  Description of Artificial Sequence: Synthetic oligonucleotide
  Sense strand starting at position 1445 of SEQ ID NO: 1559940
cagguugauggaggucaaa

SEQ ID NO: 1565058 - RNA, 19 nt, Artificial Sequence
  Description of Artificial Sequence: Synthetic oligonucleotide
  Antisense strand to SEQ ID NO: 1565057
uuugaccuccaucaaccug

SEQ ID NO: 1565059 - RNA, 19 nt, Artificial Sequence
  Description of Artificial Sequence: Synthetic oligonucleotide
  Sense strand starting at position 1481 of SEQ ID NO: 1559940
caaagagagcguuguaguc

SEQ ID NO: 1565060 - RNA, 19 nt, Artificial Sequence
  Description of Artificial Sequence: Synthetic oligonucleotide
  Antisense strand to SEQ ID NO: 1565059
gacuacaacgcucucuuug

SEQ ID NO: 1565061 - RNA, 19 nt, Artificial Sequence
  Description of Artificial Sequence: Synthetic oligonucleotide
  Sense strand starting at position 1487 of SEQ ID NO: 1559940
gagcguuguagucagugga

SEQ ID NO: 1565062 - RNA, 19 nt, Artificial Sequence
  Description of Artificial Sequence: Synthetic oligonucleotide
  Antisense strand to SEQ ID NO: 1565061
uccacugacuacaacgcuc

SEQ ID NO: 1565063 - RNA, 19 nt, Artificial Sequence
  Description of Artificial Sequence: Synthetic oligonucleotide
  Sense strand starting at position 1490 of SEQ ID NO: 1559940
cguuguagucaguggaggu

SEQ ID NO: 1565064 - RNA, 19 nt, Artificial Sequence
  Description of Artificial Sequence: Synthetic oligonucleotide
  Antisense strand to SEQ ID NO: 1565063
accuccacugacuacaacg

SEQ ID NO: 1565065 - RNA, 19 nt, Artificial Sequence
  Description of Artificial Sequence: Synthetic oligonucleotide
  Sense strand starting at position 2140 of SEQ ID NO: 1559940
ucugccagccuuggauuaa

SEQ ID NO: 1565066 - RNA, 19 nt, Artificial Sequence
  Description of Artificial Sequence: Synthetic oligonucleotide
  Antisense strand to SEQ ID NO: 1565065
uuaauccaaggcuggcaga

SEQ ID NO: 1565067 - RNA, 19 nt, Artificial Sequence
  Description of Artificial Sequence: Synthetic oligonucleotide
  Sense strand starting at position 2251 of SEQ ID NO: 1559940
acagaaggguucccuaacu

SEQ ID NO: 1565068 - RNA, 19 nt, Artificial Sequence
  Description of Artificial Sequence: Synthetic oligonucleotide
  Antisense strand to SEQ ID NO: 1565067
aguuagggaacccuucugu

SEQ ID NO: 1565069 - RNA, 19 nt, Artificial Sequence
  Description of Artificial Sequence: Synthetic oligonucleotide
  Sense strand starting at position 2262 of SEQ ID NO: 1559940
cccuaacuggccugagaaa

SEQ ID NO: 1565070 - RNA, 19 nt, Artificial Sequence
  Description of Artificial Sequence: Synthetic oligonucleotide
  Antisense strand to SEQ ID NO: 1565069
uuucucaggccaguuaggg

SEQ ID NO: 1565071 - RNA, 19 nt, Artificial Sequence
  Description of Artificial Sequence: Synthetic oligonucleotide
  Sense strand starting at position 2283 of SEQ ID NO: 1559940
acagauuucucagacaaag

SEQ ID NO: 1565072 - RNA, 19 nt, Artificial Sequence
  Description of Artificial Sequence: Synthetic oligonucleotide
  Antisense strand to SEQ ID NO: 1565071
cuuugucugagaaaucugu

SEQ ID NO: 1565073 - RNA, 19 nt, Artificial Sequence
  Description of Artificial Sequence: Synthetic oligonucleotide
  Sense strand starting at position 2294 of SEQ ID NO: 1559940
agacaaagcugcgauuuga

SEQ ID NO: 1565074 - RNA, 19 nt, Artificial Sequence
  Description of Artificial Sequence: Synthetic oligonucleotide
  Antisense strand to SEQ ID NO: 1565073
ucaaaucgcagcuuugucu

SEQ ID NO: 1565075 - RNA, 19 nt, Artificial Sequence
  Description of Artificial Sequence: Synthetic oligonucleotide
  Sense strand starting at position 2322 of SEQ ID NO: 1559940
ccuuuaaccugguugcaga

SEQ ID NO: 1565076 - RNA, 19 nt, Artificial Sequence
  Description of Artificial Sequence: Synthetic oligonucleotide
  Antisense strand to SEQ ID NO: 1565075
ucugcaaccagguuaaagg

SEQ ID NO: 1565077 - RNA, 19 nt, Artificial Sequence
  Description of Artificial Sequence: Synthetic oligonucleotide
  Sense strand starting at position 2416 of SEQ ID NO: 1559940
uaguaacuaugugcuugau

SEQ ID NO: 1565078 - RNA, 19 nt, Artificial Sequence
  Description of Artificial Sequence: Synthetic oligonucleotide
  Antisense strand to SEQ ID NO: 1565077
aucaagcacauaguuacua

SEQ ID NO: 1565079 - RNA, 19 nt, Artificial Sequence
  Description of Artificial Sequence: Synthetic oligonucleotide
  Sense strand starting at position 2418 of SEQ ID NO: 1559940
guaacuaugugcuugauuu

SEQ ID NO: 1565080 - RNA, 19 nt, Artificial Sequence
  Description of Artificial Sequence: Synthetic oligonucleotide
  Antisense strand to SEQ ID NO: 1565079
aaaucaagcacauaguuac

SEQ ID NO: 1565081 - RNA, 19 nt, Artificial Sequence
  Description of Artificial Sequence: Synthetic oligonucleotide
  Sense strand starting at position 2440 of SEQ ID NO: 1559940
guacucugaugcuuugaca

SEQ ID NO: 1565082 - RNA, 19 nt, Artificial Sequence
  Description of Artificial Sequence: Synthetic oligonucleotide
  Antisense strand to SEQ ID NO: 1565081
ugucaaagcaucagaguac

SEQ ID NO: 1565083 - RNA, 19 nt, Artificial Sequence
  Description of Artificial Sequence: Synthetic oligonucleotide
  Sense strand starting at position 2463 of SEQ ID NO: 1559940
gggccuugcugaucguaga

SEQ ID NO: 1565084 - RNA, 19 nt, Artificial Sequence
  Description of Artificial Sequence: Synthetic oligonucleotide
  Antisense strand to SEQ ID NO: 1565083
ucuacgaucagcaaggccc

SEQ ID NO: 1565085 - RNA, 19 nt, Artificial Sequence
  Description of Artificial Sequence: Synthetic oligonucleotide
  Sense strand starting at position 2464 of SEQ ID NO: 1559940
ggccuugcugaucguagaa

SEQ ID NO: 1565086 - RNA, 19 nt, Artificial Sequence
  Description of Artificial Sequence: Synthetic oligonucleotide
  Antisense strand to SEQ ID NO: 1565085
uucuacgaucagcaaggcc

SEQ ID NO: 1565087 - RNA, 19 nt, Artificial Sequence
  Description of Artificial Sequence: Synthetic oligonucleotide
  Sense strand starting at position 2501 of SEQ ID NO: 1559940
uuaccaguuccuggagaua

SEQ ID NO: 1565088 - RNA, 19 nt, Artificial Sequence
  Description of Artificial Sequence: Synthetic oligonucleotide
  Antisense strand to SEQ ID NO: 1565087
uaucuccaggaacugguaa

SEQ ID NO: 1565089 - RNA, 19 nt, Artificial Sequence
  Description of Artificial Sequence: Synthetic oligonucleotide
  Sense strand starting at position 2792 of SEQ ID NO: 1559940
ggaagcugugaguauaaca

SEQ ID NO: 1565090 - RNA, 19 nt, Artificial Sequence
  Description of Artificial Sequence: Synthetic oligonucleotide
  Antisense strand to SEQ ID NO: 1565089
uguuauacucacagcuucc

SEQ ID NO: 1565091 - RNA, 19 nt, Artificial Sequence
  Description of Artificial Sequence: Synthetic oligonucleotide
  Sense strand starting at position 3431 of SEQ ID NO: 1559940
cucuccucguacuugaaau

SEQ ID NO: 1565092 - RNA, 19 nt, Artificial Sequence
  Description of Artificial Sequence: Synthetic oligonucleotide
  Antisense strand to SEQ ID NO: 1565091
auuucaaguacgaggagag

SEQ ID NO: 1565093 - RNA, 19 nt, Artificial Sequence
  Description of Artificial Sequence: Synthetic oligonucleotide
  Sense strand starting at position 3756 of SEQ ID NO: 1559940
cuguaauugugccuuugca

SEQ ID NO: 1565094 - RNA, 19 nt, Artificial Sequence
  Description of Artificial Sequence: Synthetic oligonucleotide
  Antisense strand to SEQ ID NO: 1565093
ugcaaaggcacaauuacag

SEQ ID NO: 1565095 - RNA, 19 nt, Artificial Sequence
  Description of Artificial Sequence: Synthetic oligonucleotide
  Sense strand starting at position 3758 of SEQ ID NO: 1559940
guaauugugccuuugcacu

SEQ ID NO: 1565096 - RNA, 19 nt, Artificial Sequence
  Description of Artificial Sequence: Synthetic oligonucleotide
  Antisense strand to SEQ ID NO: 1565095
agugcaaaggcacaauuac

SEQ ID NO: 1565097 - RNA, 19 nt, Artificial Sequence
  Description of Artificial Sequence: Synthetic oligonucleotide
  Sense strand starting at position 3794 of SEQ ID NO: 1559940
ccaagagccugucucuaaa

SEQ ID NO: 1565098 - RNA, 19 nt, Artificial Sequence
  Description of Artificial Sequence: Synthetic oligonucleotide
  Antisense strand to SEQ ID NO: 1565097
uuuagagacaggcucuugg

SEQ ID NO: 1565099 - RNA, 19 nt, Artificial Sequence
  Description of Artificial Sequence: Synthetic oligonucleotide
  Sense strand starting at position 3885 of SEQ ID NO: 1559940
gucagcacuuuccuaucua

SEQ ID NO: 1565100 - RNA, 19 nt, Artificial Sequence
  Description of Artificial Sequence: Synthetic oligonucleotide
  Antisense strand to SEQ ID NO: 1565099
uagauaggaaagugcugac

SEQ ID NO: 1565101 - RNA, 19 nt, Artificial Sequence
  Description of Artificial Sequence: Synthetic oligonucleotide
  Sense strand starting at position 25 of SEQ ID NO: 1559941
aagugaaaugcuggcccaa

SEQ ID NO: 1565102 - RNA, 19 nt, Artificial Sequence
  Description of Artificial Sequence: Synthetic oligonucleotide
  Antisense strand to SEQ ID NO: 1565101
uugggccagcauuucacuu

SEQ ID NO: 1565103 - RNA, 19 nt, Artificial Sequence
  Description of Artificial Sequence: Synthetic oligonucleotide
  Sense strand starting at position 557 of SEQ ID NO: 1559941
uaguauccggaguaugaaa

SEQ ID NO: 1565104 - RNA, 19 nt, Artificial Sequence
  Description of Artificial Sequence: Synthetic oligonucleotide
  Antisense strand to SEQ ID NO: 1565103
uuucauacuccggauacua

SEQ ID NO: 1565105 - RNA, 19 nt, Artificial Sequence
  Description of Artificial Sequence: Synthetic oligonucleotide
  Sense strand starting at position 668 of SEQ ID NO: 1559941
ggcuacaaauccuggacaa

SEQ ID NO: 1565106 - RNA, 19 nt, Artificial Sequence
  Description of Artificial Sequence: Synthetic oligonucleotide
  Antisense strand to SEQ ID NO: 1565105
uuguccaggauuuguagcc

SEQ ID NO: 1565107 - RNA, 19 nt, Artificial Sequence
  Description of Artificial Sequence: Synthetic oligonucleotide
  Sense strand starting at position 696 of SEQ ID NO: 1559941
uagcuuuggucaucaggga

SEQ ID NO: 1565108 - RNA, 19 nt, Artificial Sequence
  Description of Artificial Sequence: Synthetic oligonucleotide
  Antisense strand to SEQ ID NO: 1565107
ucccugaugaccaaagcua

SEQ ID NO: 1565109 - RNA, 19 nt, Artificial Sequence
  Description of Artificial Sequence: Synthetic oligonucleotide
  Sense strand starting at position 697 of SEQ ID NO: 1559941
agcuuuggucaucagggaa

SEQ ID NO: 1565110 - RNA, 19 nt, Artificial Sequence
  Description of Artificial Sequence: Synthetic oligonucleotide
  Antisense strand to SEQ ID NO: 1565109
uucccugaugaccaaagcu

SEQ ID NO: 1565111 - RNA, 19 nt, Artificial Sequence
  Description of Artificial Sequence: Synthetic oligonucleotide
  Sense strand starting at position 709 of SEQ ID NO: 1559941
cagggaacugcacguuaaa

SEQ ID NO: 1565112 - RNA, 19 nt, Artificial Sequence
  Description of Artificial Sequence: Synthetic oligonucleotide
  Antisense strand to SEQ ID NO: 1565111
uuuaacgugcaguucccug

SEQ ID NO: 1565113 - RNA, 19 nt, Artificial Sequence
  Description of Artificial Sequence: Synthetic oligonucleotide
  Sense strand starting at position 826 of SEQ ID NO: 1559941
gaggacuuguaaguuacua

SEQ ID NO: 1565114 - RNA, 19 nt, Artificial Sequence
  Description of Artificial Sequence: Synthetic oligonucleotide
  Antisense strand to SEQ ID NO: 1565113
uaguaacuuacaaguccuc

SEQ ID NO: 1565115 - RNA, 19 nt, Artificial Sequence
  Description of Artificial Sequence: Synthetic oligonucleotide
  Sense strand starting at position 828 of SEQ ID NO: 1559941
ggacuuguaaguuacuagu

SEQ ID NO: 1565116 - RNA, 19 nt, Artificial Sequence
  Description of Artificial Sequence: Synthetic oligonucleotide
  Antisense strand to SEQ ID NO: 1565115
acuaguaacuuacaagucc

SEQ ID NO: 1565117 - RNA, 19 nt, Artificial Sequence
  Description of Artificial Sequence: Synthetic oligonucleotide
  Sense strand starting at position 830 of SEQ ID NO: 1559941
acuuguaaguuacuaguaa

SEQ ID NO: 1565118 - RNA, 19 nt, Artificial Sequence
  Description of Artificial Sequence: Synthetic oligonucleotide
  Antisense strand to SEQ ID NO: 1565117
uuacuaguaacuuacaagu

SEQ ID NO: 1565119 - RNA, 19 nt, Artificial Sequence
  Description of Artificial Sequence: Synthetic oligonucleotide
  Sense strand starting at position 831 of SEQ ID NO: 1559941
cuuguaaguuacuaguaau

SEQ ID NO: 1565120 - RNA, 19 nt, Artificial Sequence
  Description of Artificial Sequence: Synthetic oligonucleotide
  Antisense strand to SEQ ID NO: 1565119
auuacuaguaacuuacaag

SEQ ID NO: 1565121 - RNA, 19 nt, Artificial Sequence
  Description of Artificial Sequence: Synthetic oligonucleotide
  Sense strand starting at position 908 of SEQ ID NO: 1559941
acagauaugcuuuguguua

SEQ ID NO: 1565122 - RNA, 19 nt, Artificial Sequence
  Description of Artificial Sequence: Synthetic oligonucleotide
  Antisense strand to SEQ ID NO: 1565121
uaacacaaagcauaucugu

SEQ ID NO: 1565123 - RNA, 19 nt, Artificial Sequence
  Description of Artificial Sequence: Synthetic oligonucleotide
  Sense strand starting at position 909 of SEQ ID NO: 1559941
cagauaugcuuuguguuau

SEQ ID NO: 1565124 - RNA, 19 nt, Artificial Sequence
  Description of Artificial Sequence: Synthetic oligonucleotide
  Antisense strand to SEQ ID NO: 1565123
auaacacaaagcauaucug

SEQ ID NO: 1565125 - RNA, 19 nt, Artificial Sequence
  Description of Artificial Sequence: Synthetic oligonucleotide
  Sense strand starting at position 963 of SEQ ID NO: 1559941
ccauguaggguucagaugu

SEQ ID NO: 1565126 - RNA, 19 nt, Artificial Sequence
  Description of Artificial Sequence: Synthetic oligonucleotide
  Antisense strand to SEQ ID NO: 1565125
acaucugaacccuacaugg

SEQ ID NO: 1565127 - RNA, 19 nt, Artificial Sequence
  Description of Artificial Sequence: Synthetic oligonucleotide
  Sense strand starting at position 2115 of SEQ ID NO: 1559941
ugcacuucugcguugcauu

SEQ ID NO: 1565128 - RNA, 19 nt, Artificial Sequence
  Description of Artificial Sequence: Synthetic oligonucleotide
  Antisense strand to SEQ ID NO: 1565127
aaugcaacgcagaagugca

SEQ ID NO: 1565129 - RNA, 19 nt, Artificial Sequence
  Description of Artificial Sequence: Synthetic oligonucleotide
  Sense strand starting at position 2125 of SEQ ID NO: 1559941
cguugcauucgugacguuu

SEQ ID NO: 1565130 - RNA, 19 nt, Artificial Sequence
  Description of Artificial Sequence: Synthetic oligonucleotide
  Antisense strand to SEQ ID NO: 1565129
aaacgucacgaaugcaacg

SEQ ID NO: 1565131 - RNA, 19 nt, Artificial Sequence
  Description of Artificial Sequence: Synthetic oligonucleotide
  Sense strand starting at position 2267 of SEQ ID NO: 1559941
aacuuaccauugugaagag

SEQ ID NO: 1565132 - RNA, 19 nt, Artificial Sequence
  Description of Artificial Sequence: Synthetic oligonucleotide
  Antisense strand to SEQ ID NO: 1565131
cucuucacaaugguaaguu

SEQ ID NO: 1565133 - RNA, 19 nt, Artificial Sequence
  Description of Artificial Sequence: Synthetic oligonucleotide
  Sense strand starting at position 2268 of SEQ ID NO: 1559941
acuuaccauugugaagaga

SEQ ID NO: 1565134 - RNA, 19 nt, Artificial Sequence
  Description of Artificial Sequence: Synthetic oligonucleotide
  Antisense strand to SEQ ID NO: 1565133
ucucuucacaaugguaagu

SEQ ID NO: 1565135 - RNA, 19 nt, Artificial Sequence
  Description of Artificial Sequence: Synthetic oligonucleotide
  Sense strand starting at position 2298 of SEQ ID NO: 1559941
uguugagggcuugaucaaa

SEQ ID NO: 1565136 - RNA, 19 nt, Artificial Sequence
  Description of Artificial Sequence: Synthetic oligonucleotide
  Antisense strand to SEQ ID NO: 1565135
uuugaucaagcccucaaca

SEQ ID NO: 1565137 - RNA, 19 nt, Artificial Sequence
  Description of Artificial Sequence: Synthetic oligonucleotide
  Sense strand starting at position 2341 of SEQ ID NO: 1559941
gggagugguuucuuucuuu

SEQ ID NO: 1565138 - RNA, 19 nt, Artificial Sequence
  Description of Artificial Sequence: Synthetic oligonucleotide
  Antisense strand to SEQ ID NO: 1565137
aaagaaagaaaccacuccc

SEQ ID NO: 1565139 - RNA, 19 nt, Artificial Sequence
  Description of Artificial Sequence: Synthetic oligonucleotide
  Sense strand starting at position 2656 of SEQ ID NO: 1559941
gggagugguuucuugagcu

SEQ ID NO: 1565140 - RNA, 19 nt, Artificial Sequence
  Description of Artificial Sequence: Synthetic oligonucleotide
  Antisense strand to SEQ ID NO: 1565139
agcucaagaaaccacuccc

SEQ ID NO: 1565141 - RNA, 19 nt, Artificial Sequence
  Description of Artificial Sequence: Synthetic oligonucleotide
  Sense strand starting at position 2660 of SEQ ID NO: 1559941
gugguuucuugagcuggga

SEQ ID NO: 1565142 - RNA, 19 nt, Artificial Sequence
  Description of Artificial Sequence: Synthetic oligonucleotide
  Antisense strand to SEQ ID NO: 1565141
ucccagcucaagaaaccac

SEQ ID NO: 1565143 - RNA, 19 nt, Artificial Sequence
  Description of Artificial Sequence: Synthetic oligonucleotide
  Sense strand starting at position 2669 of SEQ ID NO: 1559941
ugagcugggaucugaagua

SEQ ID NO: 1565144 - RNA, 19 nt, Artificial Sequence
  Description of Artificial Sequence: Synthetic oligonucleotide
  Antisense strand to SEQ ID NO: 1565143
uacuucagaucccagcuca

SEQ ID NO: 1565145 - RNA, 19 nt, Artificial Sequence
  Description of Artificial Sequence: Synthetic oligonucleotide
  Sense strand starting at position 2681 of SEQ ID NO: 1559941
ugaaguaugccuggauguu

SEQ ID NO: 1565146 - RNA, 19 nt, Artificial Sequence
  Description of Artificial Sequence: Synthetic oligonucleotide
  Antisense strand to SEQ ID NO: 1565145
aacauccaggcauacuuca

SEQ ID NO: 1565147 - RNA, 19 nt, Artificial Sequence
  Description of Artificial Sequence: Synthetic oligonucleotide
  Sense strand starting at position 2682 of SEQ ID NO: 1559941
gaaguaugccuggauguua

SEQ ID NO: 1565148 - RNA, 19 nt, Artificial Sequence
  Description of Artificial Sequence: Synthetic oligonucleotide
  Antisense strand to SEQ ID NO: 1565147
uaacauccaggcauacuuc

SEQ ID NO: 1565149 - RNA, 19 nt, Artificial Sequence
  Description of Artificial Sequence: Synthetic oligonucleotide
  Sense strand starting at position 2764 of SEQ ID NO: 1559941
ucucguucucugcuuuagu

SEQ ID NO: 1565150 - RNA, 19 nt, Artificial Sequence
  Description of Artificial Sequence: Synthetic oligonucleotide
  Antisense strand to SEQ ID NO: 1565149
acuaaagcagagaacgaga

SEQ ID NO: 1565151 - RNA, 19 nt, Artificial Sequence
  Description of Artificial Sequence: Synthetic oligonucleotide
  Sense strand starting at position 2766 of SEQ ID NO: 1559941
ucguucucugcuuuaguca

SEQ ID NO: 1565152 - RNA, 19 nt, Artificial Sequence
  Description of Artificial Sequence: Synthetic oligonucleotide
  Antisense strand to SEQ ID NO: 1565151
ugacuaaagcagagaacga

SEQ ID NO: 1565153 - RNA, 19 nt, Artificial Sequence
  Description of Artificial Sequence: Synthetic oligonucleotide
  Sense strand starting at position 2773 of SEQ ID NO: 1559941
cugcuuuagucacugcuaa

SEQ ID NO: 1565154 - RNA, 19 nt, Artificial Sequence
  Description of Artificial Sequence: Synthetic oligonucleotide
  Antisense strand to SEQ ID NO: 1565153
uuagcagugacuaaagcag

SEQ ID NO: 1565155 - RNA, 19 nt, Artificial Sequence
  Description of Artificial Sequence: Synthetic oligonucleotide
  Sense strand starting at position 2774 of SEQ ID NO: 1559941
ugcuuuagucacugcuaac

SEQ ID NO: 1565156 - RNA, 19 nt, Artificial Sequence
  Description of Artificial Sequence: Synthetic oligonucleotide
  Antisense strand to SEQ ID NO: 1565155
guuagcagugacuaaagca

SEQ ID NO: 1565157 - RNA, 19 nt, Artificial Sequence
  Description of Artificial Sequence: Synthetic oligonucleotide
  Sense strand starting at position 3125 of SEQ ID NO: 1559941
cuagaugcucaguaaauaa

SEQ ID NO: 1565158 - RNA, 19 nt, Artificial Sequence
  Description of Artificial Sequence: Synthetic oligonucleotide
  Antisense strand to SEQ ID NO: 1565157
uuauuuacugagcaucuag

SEQ ID NO: 1565159 - RNA, 19 nt, Artificial Sequence
  Description of Artificial Sequence: Synthetic oligonucleotide
  Sense strand starting at position 3163 of SEQ ID NO: 1559941
ugugcugugccaggagaaa

SEQ ID NO: 1565160 - RNA, 19 nt, Artificial Sequence
  Description of Artificial Sequence: Synthetic oligonucleotide
  Antisense strand to SEQ ID NO: 1565159
uuucuccuggcacagcaca

SEQ ID NO: 1565161 - RNA, 19 nt, Artificial Sequence
  Description of Artificial Sequence: Synthetic oligonucleotide
  Sense strand starting at position 3186 of SEQ ID NO: 1559941
caaggaguguuccuuuguc

SEQ ID NO: 1565162 - RNA, 19 nt, Artificial Sequence
  Description of Artificial Sequence: Synthetic oligonucleotide
  Antisense strand to SEQ ID NO: 1565161
gacaaaggaacacuccuug

SEQ ID NO: 1565163 - RNA, 19 nt, Artificial Sequence
  Description of Artificial Sequence: Synthetic oligonucleotide
  Sense strand starting at position 3190 of SEQ ID NO: 1559941
gaguguuccuuugucucca

SEQ ID NO: 1565164 - RNA, 19 nt, Artificial Sequence
  Description of Artificial Sequence: Synthetic oligonucleotide
  Antisense strand to SEQ ID NO: 1565163
uggagacaaaggaacacuc

SEQ ID NO: 1565165 - RNA, 19 nt, Artificial Sequence
  Description of Artificial Sequence: Synthetic oligonucleotide
  Sense strand starting at position 3709 of SEQ ID NO: 1559941
gugggaugugggcauaagu

SEQ ID NO: 1565166 - RNA, 19 nt, Artificial Sequence
  Description of Artificial Sequence: Synthetic oligonucleotide
  Antisense strand to SEQ ID NO: 1565165
acuuaugcccacaucccac

SEQ ID NO: 1565167 - RNA, 19 nt, Artificial Sequence
  Description of Artificial Sequence: Synthetic oligonucleotide
  Sense strand starting at position 3741 of SEQ ID NO: 1559941
ccuggucaugccuauaaag

SEQ ID NO: 1565168 - RNA, 19 nt, Artificial Sequence
  Description of Artificial Sequence: Synthetic oligonucleotide
  Antisense strand to SEQ ID NO: 1565167
cuuuauaggcaugaccagg

SEQ ID NO: 1565169 - RNA, 19 nt, Artificial Sequence
  Description of Artificial Sequence: Synthetic oligonucleotide
  Sense strand starting at position 3743 of SEQ ID NO: 1559941
uggucaugccuauaaagga

SEQ ID NO: 1565170 - RNA, 19 nt, Artificial Sequence
  Description of Artificial Sequence: Synthetic oligonucleotide
  Antisense strand to SEQ ID NO: 1565169
uccuuuauaggcaugacca

SEQ ID NO: 1565171 - RNA, 19 nt, Artificial Sequence
  Description of Artificial Sequence: Synthetic oligonucleotide
  Sense strand starting at position 3793 of SEQ ID NO: 1559941
ccaguagaauccugggauc

SEQ ID NO: 1565172 - RNA, 19 nt, Artificial Sequence
  Description of Artificial Sequence: Synthetic oligonucleotide
  Antisense strand to SEQ ID NO: 1565171
gaucccaggauucuacugg

SEQ ID NO: 1565173 - RNA, 19 nt, Artificial Sequence
  Description of Artificial Sequence: Synthetic oligonucleotide
  Sense strand starting at position 3796 of SEQ ID NO: 1559941
guagaauccugggaucagg

SEQ ID NO: 1565174 - RNA, 19 nt, Artificial Sequence
  Description of Artificial Sequence: Synthetic oligonucleotide
  Antisense strand to SEQ ID NO: 1565173
ccugaucccaggauucuac

SEQ ID NO: 1565175 - RNA, 19 nt, Artificial Sequence
  Description of Artificial Sequence: Synthetic oligonucleotide
  Sense strand starting at position 3884 of SEQ ID NO: 1559941
agggaccucugucucuaaa

SEQ ID NO: 1565176 - RNA, 19 nt, Artificial Sequence
  Description of Artificial Sequence: Synthetic oligonucleotide
  Antisense strand to SEQ ID NO: 1565175
uuuagagacagaggucccu

SEQ ID NO: 1565177 - RNA, 19 nt, Artificial Sequence
  Description of Artificial Sequence: Synthetic oligonucleotide
  Sense strand starting at position 3886 of SEQ ID NO: 1559941
ggaccucugucucuaaaga

SEQ ID NO: 1565178 - RNA, 19 nt, Artificial Sequence
  Description of Artificial Sequence: Synthetic oligonucleotide
  Antisense strand to SEQ ID NO: 1565177
ucuuuagagacagaggucc

SEQ ID NO: 1565179 - RNA, 19 nt, Artificial Sequence
  Description of Artificial Sequence: Synthetic oligonucleotide
  Sense strand starting at position 3928 of SEQ ID NO: 1559941
cagacagauuuaugcaagu

SEQ ID NO: 1565180 - RNA, 19 nt, Artificial Sequence
  Description of Artificial Sequence: Synthetic oligonucleotide
  Antisense strand to SEQ ID NO: 1565179
acuugcauaaaucugucug

SEQ ID NO: 1565181 - RNA, 19 nt, Artificial Sequence
  Description of Artificial Sequence: Synthetic oligonucleotide
  Sense strand starting at position 8 of SEQ ID NO: 1559942
gagucaguauuugaggaug

SEQ ID NO: 1565182 - RNA, 19 nt, Artificial Sequence
  Description of Artificial Sequence: Synthetic oligonucleotide
  Antisense strand to SEQ ID NO: 1565181
cauccucaaauacugacuc

SEQ ID NO: 1565183 - RNA, 19 nt, Artificial Sequence
  Description of Artificial Sequence: Synthetic oligonucleotide
  Sense strand starting at position 19 of SEQ ID NO: 1559942
ugaggaugucuugggcaca

SEQ ID NO: 1565184 - RNA, 19 nt, Artificial Sequence
  Description of Artificial Sequence: Synthetic oligonucleotide
  Antisense strand to SEQ ID NO: 1565183
ugugcccaagacauccuca

SEQ ID NO: 1565185 - RNA, 19 nt, Artificial Sequence
  Description of Artificial Sequence: Synthetic oligonucleotide
  Sense strand starting at position 32 of SEQ ID NO: 1559942
ggcacauaguggguaauua

SEQ ID NO: 1565186 - RNA, 19 nt, Artificial Sequence
  Description of Artificial Sequence: Synthetic oligonucleotide
  Antisense strand to SEQ ID NO: 1565185
uaauuacccacuaugugcc

SEQ ID NO: 1565187 - RNA, 19 nt, Artificial Sequence
  Description of Artificial Sequence: Synthetic oligonucleotide
  Sense strand starting at position 33 of SEQ ID NO: 1559942
gcacauaguggguaauuaa

SEQ ID NO: 1565188 - RNA, 19 nt, Artificial Sequence
  Description of Artificial Sequence: Synthetic oligonucleotide
  Antisense strand to SEQ ID NO: 1565187
uuaauuacccacuaugugc

SEQ ID NO: 1565189 - RNA, 19 nt, Artificial Sequence
  Description of Artificial Sequence: Synthetic oligonucleotide
  Sense strand starting at position 36 of SEQ ID NO: 1559942
cauaguggguaauuaauga

SEQ ID NO: 1565190 - RNA, 19 nt, Artificial Sequence
  Description of Artificial Sequence: Synthetic oligonucleotide
  Antisense strand to SEQ ID NO: 1565189
ucauuaauuacccacuaug

SEQ ID NO: 1565191 - RNA, 19 nt, Artificial Sequence
  Description of Artificial Sequence: Synthetic oligonucleotide
  Sense strand starting at position 63 of SEQ ID NO: 1559942
gggaucaaugcaugaauca

SEQ ID NO: 1565192 - RNA, 19 nt, Artificial Sequence
  Description of Artificial Sequence: Synthetic oligonucleotide
  Antisense strand to SEQ ID NO: 1565191
ugauucaugcauugauccc

SEQ ID NO: 1565193 - RNA, 19 nt, Artificial Sequence
  Description of Artificial Sequence: Synthetic oligonucleotide
  Sense strand starting at position 106 of SEQ ID NO: 1559942
ggguauguggcuuggguau

SEQ ID NO: 1565194 - RNA, 19 nt, Artificial Sequence
  Description of Artificial Sequence: Synthetic oligonucleotide
  Antisense strand to SEQ ID NO: 1565193
auacccaagccacauaccc

SEQ ID NO: 1565195 - RNA, 19 nt, Artificial Sequence
  Description of Artificial Sequence: Synthetic oligonucleotide
  Sense strand starting at position 213 of SEQ ID NO: 1559942
gguggaggcuuaucuauga

SEQ ID NO: 1565196 - RNA, 19 nt, Artificial Sequence
  Description of Artificial Sequence: Synthetic oligonucleotide
  Antisense strand to SEQ ID NO: 1565195
ucauagauaagccuccacc

SEQ ID NO: 1565197 - RNA, 19 nt, Artificial Sequence
  Description of Artificial Sequence: Synthetic oligonucleotide
  Sense strand starting at position 217 of SEQ ID NO: 1559942
gaggcuuaucuaugacuca

SEQ ID NO: 1565198 - RNA, 19 nt, Artificial Sequence
  Description of Artificial Sequence: Synthetic oligonucleotide
  Antisense strand to SEQ ID NO: 1565197
ugagucauagauaagccuc

SEQ ID NO: 1565199 - RNA, 19 nt, Artificial Sequence
  Description of Artificial Sequence: Synthetic oligonucleotide
  Sense strand starting at position 243 of SEQ ID NO: 1559942
aggugauauuucuaacaau

SEQ ID NO: 1565200 - RNA, 19 nt, Artificial Sequence
  Description of Artificial Sequence: Synthetic oligonucleotide
  Antisense strand to SEQ ID NO: 1565199
auuguuagaaauaucaccu

SEQ ID NO: 1565201 - RNA, 19 nt, Artificial Sequence
  Description of Artificial Sequence: Synthetic oligonucleotide
  Sense strand starting at position 255 of SEQ ID NO: 1559942
uaacaauagccuugaggua

SEQ ID NO: 1565202 - RNA, 19 nt, Artificial Sequence
  Description of Artificial Sequence: Synthetic oligonucleotide
  Antisense strand to SEQ ID NO: 1565201
uaccucaaggcuauuguua

SEQ ID NO: 1565203 - RNA, 19 nt, Artificial Sequence
  Description of Artificial Sequence: Synthetic oligonucleotide
  Sense strand starting at position 260 of SEQ ID NO: 1559942
auagccuugagguagugaa

SEQ ID NO: 1565204 - RNA, 19 nt, Artificial Sequence
  Description of Artificial Sequence: Synthetic oligonucleotide
  Antisense strand to SEQ ID NO: 1565203
uucacuaccucaaggcuau

SEQ ID NO: 1565205 - RNA, 19 nt, Artificial Sequence
  Description of Artificial Sequence: Synthetic oligonucleotide
  Sense strand starting at position 284 of SEQ ID NO: 1559942
caucucugggaguguguaa

SEQ ID NO: 1565206 - RNA, 19 nt, Artificial Sequence
  Description of Artificial Sequence: Synthetic oligonucleotide
  Antisense strand to SEQ ID NO: 1565205
uuacacacucccagagaug

SEQ ID NO: 1565207 - RNA, 19 nt, Artificial Sequence
  Description of Artificial Sequence: Synthetic oligonucleotide
  Sense strand starting at position 311 of SEQ ID NO: 1559942
ggcacuugucagagguggu

SEQ ID NO: 1565208 - RNA, 19 nt, Artificial Sequence
  Description of Artificial Sequence: Synthetic oligonucleotide
  Antisense strand to SEQ ID NO: 1565207
accaccucugacaagugcc

SEQ ID NO: 1565209 - RNA, 19 nt, Artificial Sequence
  Description of Artificial Sequence: Synthetic oligonucleotide
  Sense strand starting at position 493 of SEQ ID NO: 1559942
gugaguuaggucagccugu

SEQ ID NO: 1565210 - RNA, 19 nt, Artificial Sequence
  Description of Artificial Sequence: Synthetic oligonucleotide
  Antisense strand to SEQ ID NO: 1565209
acaggcugaccuaacucac

SEQ ID NO: 1565211 - RNA, 19 nt, Artificial Sequence
  Description of Artificial Sequence: Synthetic oligonucleotide
  Sense strand starting at position 620 of SEQ ID NO: 1559942
gucaguagcauuugcggua

SEQ ID NO: 1565212 - RNA, 19 nt, Artificial Sequence
  Description of Artificial Sequence: Synthetic oligonucleotide
  Antisense strand to SEQ ID NO: 1565211
uaccgcaaaugcuacugac

SEQ ID NO: 1565213 - RNA, 19 nt, Artificial Sequence
  Description of Artificial Sequence: Synthetic oligonucleotide
  Sense strand starting at position 625 of SEQ ID NO: 1559942
uagcauuugcgguacacga

SEQ ID NO: 1565214 - RNA, 19 nt, Artificial Sequence
  Description of Artificial Sequence: Synthetic oligonucleotide
  Antisense strand to SEQ ID NO: 1565213
ucguguaccgcaaaugcua

SEQ ID NO: 1565215 - RNA, 19 nt, Artificial Sequence
  Description of Artificial Sequence: Synthetic oligonucleotide
  Sense strand starting at position 627 of SEQ ID NO: 1559942
gcauuugcgguacacgaua

SEQ ID NO: 1565216 - RNA, 19 nt, Artificial Sequence
  Description of Artificial Sequence: Synthetic oligonucleotide
  Antisense strand to SEQ ID NO: 1565215
uaucguguaccgcaaaugc

SEQ ID NO: 1565217 - RNA, 19 nt, Artificial Sequence
  Description of Artificial Sequence: Synthetic oligonucleotide
  Sense strand starting at position 878 of SEQ ID NO: 1559942
cgcgcaucuccagugacaa

SEQ ID NO: 1565218 - RNA, 19 nt, Artificial Sequence
  Description of Artificial Sequence: Synthetic oligonucleotide
  Antisense strand to SEQ ID NO: 1565217
uugucacuggagaugcgcg

SEQ ID NO: 1565219 - RNA, 19 nt, Artificial Sequence
  Description of Artificial Sequence: Synthetic oligonucleotide
  Sense strand starting at position 1097 of SEQ ID NO: 1559942
aauaguggugcuuaauguu

SEQ ID NO: 1565220 - RNA, 19 nt, Artificial Sequence
  Description of Artificial Sequence: Synthetic oligonucleotide
  Antisense strand to SEQ ID NO: 1565219
aacauuaagcaccacuauu

SEQ ID NO: 1565221 - RNA, 19 nt, Artificial Sequence
  Description of Artificial Sequence: Synthetic oligonucleotide
  Sense strand starting at position 1106 of SEQ ID NO: 1559942
gcuuaauguucuccacuag

SEQ ID NO: 1565222 - RNA, 19 nt, Artificial Sequence
  Description of Artificial Sequence: Synthetic oligonucleotide
  Antisense strand to SEQ ID NO: 1565221
cuaguggagaacauuaagc

SEQ ID NO: 1565223 - RNA, 19 nt, Artificial Sequence
  Description of Artificial Sequence: Synthetic oligonucleotide
  Sense strand starting at position 1836 of SEQ ID NO: 1559942
cugggauuccgaggacuug

SEQ ID NO: 1565224 - RNA, 19 nt, Artificial Sequence
  Description of Artificial Sequence: Synthetic oligonucleotide
  Antisense strand to SEQ ID NO: 1565223
caaguccucggaaucccag

SEQ ID NO: 1565225 - RNA, 19 nt, Artificial Sequence
  Description of Artificial Sequence: Synthetic oligonucleotide
  Sense strand starting at position 1857 of SEQ ID NO: 1559942
gcgacuugcauccaugguu

SEQ ID NO: 1565226 - RNA, 19 nt, Artificial Sequence
  Description of Artificial Sequence: Synthetic oligonucleotide
  Antisense strand to SEQ ID NO: 1565225
aaccauggaugcaagucgc

SEQ ID NO: 1565227 - RNA, 19 nt, Artificial Sequence
  Description of Artificial Sequence: Synthetic oligonucleotide
  Sense strand starting at position 2081 of SEQ ID NO: 1559942
gucaucucuucucugaaga

SEQ ID NO: 1565228 - RNA, 19 nt, Artificial Sequence
  Description of Artificial Sequence: Synthetic oligonucleotide
  Antisense strand to SEQ ID NO: 1565227
ucuucagagaagagaugac

SEQ ID NO: 1565229 - RNA, 19 nt, Artificial Sequence
  Description of Artificial Sequence: Synthetic oligonucleotide
  Sense strand starting at position 2082 of SEQ ID NO: 1559942
ucaucucuucucugaagag

SEQ ID NO: 1565230 - RNA, 19 nt, Artificial Sequence
  Description of Artificial Sequence: Synthetic oligonucleotide
  Antisense strand to SEQ ID NO: 1565229
cucuucagagaagagauga

SEQ ID NO: 1565231 - RNA, 19 nt, Artificial Sequence
  Description of Artificial Sequence: Synthetic oligonucleotide
  Sense strand starting at position 2240 of SEQ ID NO: 1559942
cuaggaauccagcacaagu

SEQ ID NO: 1565232 - RNA, 19 nt, Artificial Sequence
  Description of Artificial Sequence: Synthetic oligonucleotide
  Antisense strand to SEQ ID NO: 1565231
acuugugcuggauuccuag

SEQ ID NO: 1565233 - RNA, 19 nt, Artificial Sequence
  Description of Artificial Sequence: Synthetic oligonucleotide
  Sense strand starting at position 2251 of SEQ ID NO: 1559942
gcacaagucuguuucucag

SEQ ID NO: 1565234 - RNA, 19 nt, Artificial Sequence
  Description of Artificial Sequence: Synthetic oligonucleotide
  Antisense strand to SEQ ID NO: 1565233
cugagaaacagacuugugc

SEQ ID NO: 1565235 - RNA, 19 nt, Artificial Sequence
  Description of Artificial Sequence: Synthetic oligonucleotide
  Sense strand starting at position 2964 of SEQ ID NO: 1559942
cuggguaccucgccaugaa

SEQ ID NO: 1565236 - RNA, 19 nt, Artificial Sequence
  Description of Artificial Sequence: Synthetic oligonucleotide
  Antisense strand to SEQ ID NO: 1565235
uucauggcgagguacccag

SEQ ID NO: 1565237 - RNA, 19 nt, Artificial Sequence
  Description of Artificial Sequence: Synthetic oligonucleotide
  Sense strand starting at position 3019 of SEQ ID NO: 1559942
gccucccuagaauauuaga

SEQ ID NO: 1565238 - RNA, 19 nt, Artificial Sequence
  Description of Artificial Sequence: Synthetic oligonucleotide
  Antisense strand to SEQ ID NO: 1565237
ucuaauauucuagggaggc

SEQ ID NO: 1565239 - RNA, 19 nt, Artificial Sequence
  Description of Artificial Sequence: Synthetic oligonucleotide
  Sense strand starting at position 3082 of SEQ ID NO: 1559942
auggcuuccugguuuccaa

SEQ ID NO: 1565240 - RNA, 19 nt, Artificial Sequence
  Description of Artificial Sequence: Synthetic oligonucleotide
  Antisense strand to SEQ ID NO: 1565239
uuggaaaccaggaagccau

SEQ ID NO: 1565241 - RNA, 19 nt, Artificial Sequence
  Description of Artificial Sequence: Synthetic oligonucleotide
  Sense strand starting at position 3488 of SEQ ID NO: 1559942
uuaggagaguugcuucaag

SEQ ID NO: 1565242 - RNA, 19 nt, Artificial Sequence
  Description of Artificial Sequence: Synthetic oligonucleotide
  Antisense strand to SEQ ID NO: 1565241
cuugaagcaacucuccuaa

SEQ ID NO: 1565243 - RNA, 19 nt, Artificial Sequence
  Description of Artificial Sequence: Synthetic oligonucleotide
  Sense strand starting at position 3583 of SEQ ID NO: 1559942
caugcauguggugguagaa

SEQ ID NO: 1565244 - RNA, 19 nt, Artificial Sequence
  Description of Artificial Sequence: Synthetic oligonucleotide
  Antisense strand to SEQ ID NO: 1565243
uucuaccaccacaugcaug

SEQ ID NO: 1565245 - RNA, 19 nt, Artificial Sequence
  Description of Artificial Sequence: Synthetic oligonucleotide
  Sense strand starting at position 3614 of SEQ ID NO: 1559942
agugcuagugaaugucuua

SEQ ID NO: 1565246 - RNA, 19 nt, Artificial Sequence
  Description of Artificial Sequence: Synthetic oligonucleotide
  Antisense strand to SEQ ID NO: 1565245
uaagacauucacuagcacu

SEQ ID NO: 1565247 - RNA, 19 nt, Artificial Sequence
  Description of Artificial Sequence: Synthetic oligonucleotide
  Sense strand starting at position 3690 of SEQ ID NO: 1559942
gccagagugugguuuauug

SEQ ID NO: 1565248 - RNA, 19 nt, Artificial Sequence
  Description of Artificial Sequence: Synthetic oligonucleotide
  Antisense strand to SEQ ID NO: 1565247
caauaaaccacacucuggc

SEQ ID NO: 1565249 - RNA, 19 nt, Artificial Sequence
  Description of Artificial Sequence: Synthetic oligonucleotide
  Sense strand starting at position 3694 of SEQ ID NO: 1559942
gagugugguuuauugagca

SEQ ID NO: 1565250 - RNA, 19 nt, Artificial Sequence
  Description of Artificial Sequence: Synthetic oligonucleotide
  Antisense strand to SEQ ID NO: 1565249
ugcucaauaaaccacacuc

SEQ ID NO: 1565251 - RNA, 19 nt, Artificial Sequence
  Description of Artificial Sequence: Synthetic oligonucleotide
  Sense strand starting at position 3726 of SEQ ID NO: 1559942
uugauuuacugguaugugu

SEQ ID NO: 1565252 - RNA, 19 nt, Artificial Sequence
  Description of Artificial Sequence: Synthetic oligonucleotide
  Antisense strand to SEQ ID NO: 1565251
acacauaccaguaaaucaa

SEQ ID NO: 1565253 - RNA, 19 nt, Artificial Sequence
  Description of Artificial Sequence: Synthetic oligonucleotide
  Sense strand starting at position 3735 of SEQ ID NO: 1559942
ugguauguguggucuaauc

SEQ ID NO: 1565254 - RNA, 19 nt, Artificial Sequence
  Description of Artificial Sequence: Synthetic oligonucleotide
  Antisense strand to SEQ ID NO: 1565253
gauuagaccacacauacca

SEQ ID NO: 1565255 - RNA, 19 nt, Artificial Sequence
  Description of Artificial Sequence: Synthetic oligonucleotide
  Sense strand starting at position 3737 of SEQ ID NO: 1559942
guauguguggucuaaucca

SEQ ID NO: 1565256 - RNA, 19 nt, Artificial Sequence
  Description of Artificial Sequence: Synthetic oligonucleotide
  Antisense strand to SEQ ID NO: 1565255
uggauuagaccacacauac

SEQ ID NO: 1565257 - RNA, 19 nt, Artificial Sequence
  Description of Artificial Sequence: Synthetic oligonucleotide
  Sense strand starting at position 3775 of SEQ ID NO: 1559942
ucagcaauuuauugagggu

SEQ ID NO: 1565258 - RNA, 19 nt, Artificial Sequence
  Description of Artificial Sequence: Synthetic oligonucleotide
  Antisense strand to SEQ ID NO: 1565257
acccucaauaaauugcuga

SEQ ID NO: 1565259 - RNA, 19 nt, Artificial Sequence
  Description of Artificial Sequence: Synthetic oligonucleotide
  Sense strand starting at position 3834 of SEQ ID NO: 1559942
gugauaacacuuuauuguu

SEQ ID NO: 1565260 - RNA, 19 nt, Artificial Sequence
  Description of Artificial Sequence: Synthetic oligonucleotide
  Antisense strand to SEQ ID NO: 1565259
aacaauaaaguguuaucac

SEQ ID NO: 1565261 - RNA, 19 nt, Artificial Sequence
  Description of Artificial Sequence: Synthetic oligonucleotide
  Sense strand starting at position 74 of SEQ ID NO: 1559943
cucggaucccuuugcauuu

SEQ ID NO: 1565262 - RNA, 19 nt, Artificial Sequence
  Description of Artificial Sequence: Synthetic oligonucleotide
  Antisense strand to SEQ ID NO: 1565261
aaaugcaaagggauccgag

SEQ ID NO: 1565263 - RNA, 19 nt, Artificial Sequence
  Description of Artificial Sequence: Synthetic oligonucleotide
  Sense strand starting at position 112 of SEQ ID NO: 1559943
cggagaguucaagggucuu

SEQ ID NO: 1565264 - RNA, 19 nt, Artificial Sequence
  Description of Artificial Sequence: Synthetic oligonucleotide
  Antisense strand to SEQ ID NO: 1565263
aagacccuugaacucuccg

SEQ ID NO: 1565265 - RNA, 19 nt, Artificial Sequence
  Description of Artificial Sequence: Synthetic oligonucleotide
  Sense strand starting at position 146 of SEQ ID NO: 1559943
gcgaaucaguaacaaaucu

SEQ ID NO: 1565266 - RNA, 19 nt, Artificial Sequence
  Description of Artificial Sequence: Synthetic oligonucleotide
  Antisense strand to SEQ ID NO: 1565265
agauuuguuacugauucgc

SEQ ID NO: 1565267 - RNA, 19 nt, Artificial Sequence
  Description of Artificial Sequence: Synthetic oligonucleotide
  Sense strand starting at position 153 of SEQ ID NO: 1559943
aguaacaaaucuggaaaga

SEQ ID NO: 1565268 - RNA, 19 nt, Artificial Sequence
  Description of Artificial Sequence: Synthetic oligonucleotide
  Antisense strand to SEQ ID NO: 1565267
ucuuuccagauuuguuacu

SEQ ID NO: 1565269 - RNA, 19 nt, Artificial Sequence
  Description of Artificial Sequence: Synthetic oligonucleotide
  Sense strand starting at position 193 of SEQ ID NO: 1559943
acgaaaugcuuccaacuuc

SEQ ID NO: 1565270 - RNA, 19 nt, Artificial Sequence
  Description of Artificial Sequence: Synthetic oligonucleotide
  Antisense strand to SEQ ID NO: 1565269
gaaguuggaagcauuucgu

SEQ ID NO: 1565271 - RNA, 19 nt, Artificial Sequence
  Description of Artificial Sequence: Synthetic oligonucleotide
  Sense strand starting at position 664 of SEQ ID NO: 1559943
cgcauucccuuucuaauga

SEQ ID NO: 1565272 - RNA, 19 nt, Artificial Sequence
  Description of Artificial Sequence: Synthetic oligonucleotide
  Antisense strand to SEQ ID NO: 1565271
ucauuagaaagggaaugcg

SEQ ID NO: 1565273 - RNA, 19 nt, Artificial Sequence
  Description of Artificial Sequence: Synthetic oligonucleotide
  Sense strand starting at position 1409 of SEQ ID NO: 1559943
ccagucaucuccucgguuu

SEQ ID NO: 1565274 - RNA, 19 nt, Artificial Sequence
  Description of Artificial Sequence: Synthetic oligonucleotide
  Antisense strand to SEQ ID NO: 1565273
aaaccgaggagaugacugg

SEQ ID NO: 1565275 - RNA, 19 nt, Artificial Sequence
  Description of Artificial Sequence: Synthetic oligonucleotide
  Sense strand starting at position 1554 of SEQ ID NO: 1559943
ggcgauuccuccucaggac

SEQ ID NO: 1565276 - RNA, 19 nt, Artificial Sequence
  Description of Artificial Sequence: Synthetic oligonucleotide
  Antisense strand to SEQ ID NO: 1565275
guccugaggaggaaucgcc

SEQ ID NO: 1565277 - RNA, 19 nt, Artificial Sequence
  Description of Artificial Sequence: Synthetic oligonucleotide
  Sense strand starting at position 1555 of SEQ ID NO: 1559943
gcgauuccuccucaggacu

SEQ ID NO: 1565278 - RNA, 19 nt, Artificial Sequence
  Description of Artificial Sequence: Synthetic oligonucleotide
  Antisense strand to SEQ ID NO: 1565277
aguccugaggaggaaucgc

SEQ ID NO: 1565279 - RNA, 19 nt, Artificial Sequence
  Description of Artificial Sequence: Synthetic oligonucleotide
  Sense strand starting at position 2327 of SEQ ID NO: 1559943
acaccuauucugugccaga

SEQ ID NO: 1565280 - RNA, 19 nt, Artificial Sequence
  Description of Artificial Sequence: Synthetic oligonucleotide
  Antisense strand to SEQ ID NO: 1565279
ucuggcacagaauaggugu

SEQ ID NO: 1565281 - RNA, 19 nt, Artificial Sequence
  Description of Artificial Sequence: Synthetic oligonucleotide
  Sense strand starting at position 2330 of SEQ ID NO: 1559943
ccuauucugugccagacua

SEQ ID NO: 1565282 - RNA, 19 nt, Artificial Sequence
  Description of Artificial Sequence: Synthetic oligonucleotide
  Antisense strand to SEQ ID NO: 1565281
uagucuggcacagaauagg

SEQ ID NO: 1565283 - RNA, 19 nt, Artificial Sequence
  Description of Artificial Sequence: Synthetic oligonucleotide
  Sense strand starting at position 2397 of SEQ ID NO: 1559943
acuaccuucuaguaaagga

SEQ ID NO: 1565284 - RNA, 19 nt, Artificial Sequence
  Description of Artificial Sequence: Synthetic oligonucleotide
  Antisense strand to SEQ ID NO: 1565283
uccuuuacuagaagguagu

SEQ ID NO: 1565285 - RNA, 19 nt, Artificial Sequence
  Description of Artificial Sequence: Synthetic oligonucleotide
  Sense strand starting at position 3370 of SEQ ID NO: 1559943
gguaguauuguauauucca

SEQ ID NO: 1565286 - RNA, 19 nt, Artificial Sequence
  Description of Artificial Sequence: Synthetic oligonucleotide
  Antisense strand to SEQ ID NO: 1565285
uggaauauacaauacuacc

SEQ ID NO: 1565287 - RNA, 19 nt, Artificial Sequence
  Description of Artificial Sequence: Synthetic oligonucleotide
  Sense strand starting at position 3378 of SEQ ID NO: 1559943
uguauauuccaagguguug

SEQ ID NO: 1565288 - RNA, 19 nt, Artificial Sequence
  Description of Artificial Sequence: Synthetic oligonucleotide
  Antisense strand to SEQ ID NO: 1565287
caacaccuuggaauauaca

SEQ ID NO: 1565289 - RNA, 19 nt, Artificial Sequence
  Description of Artificial Sequence: Synthetic oligonucleotide
  Sense strand starting at position 3383 of SEQ ID NO: 1559943
auuccaagguguugaguau

SEQ ID NO: 1565290 - RNA, 19 nt, Artificial Sequence
  Description of Artificial Sequence: Synthetic oligonucleotide
  Antisense strand to SEQ ID NO: 1565289
auacucaacaccuuggaau

SEQ ID NO: 1565291 - RNA, 19 nt, Artificial Sequence
  Description of Artificial Sequence: Synthetic oligonucleotide
  Sense strand starting at position 3384 of SEQ ID NO: 1559943
uuccaagguguugaguauu

SEQ ID NO: 1565292 - RNA, 19 nt, Artificial Sequence
  Description of Artificial Sequence: Synthetic oligonucleotide
  Antisense strand to SEQ ID NO: 1565291
aauacucaacaccuuggaa

SEQ ID NO: 1565293 - RNA, 19 nt, Artificial Sequence
  Description of Artificial Sequence: Synthetic oligonucleotide
  Sense strand starting at position 3392 of SEQ ID NO: 1559943
uguugaguauuuggagaaa

SEQ ID NO: 1565294 - RNA, 19 nt, Artificial Sequence
  Description of Artificial Sequence: Synthetic oligonucleotide
  Antisense strand to SEQ ID NO: 1565293
uuucuccaaauacucaaca

SEQ ID NO: 1565295 - RNA, 19 nt, Artificial Sequence
  Description of Artificial Sequence: Synthetic oligonucleotide
  Sense strand starting at position 3539 of SEQ ID NO: 1559943
guggcuuacucuugcaauc

SEQ ID NO: 1565296 - RNA, 19 nt, Artificial Sequence
  Description of Artificial Sequence: Synthetic oligonucleotide
  Antisense strand to SEQ ID NO: 1565295
gauugcaagaguaagccac

SEQ ID NO: 1565297 - RNA, 19 nt, Artificial Sequence
  Description of Artificial Sequence: Synthetic oligonucleotide
  Sense strand starting at position 3569 of SEQ ID NO: 1559943
gggagucaaggcuggaaga

SEQ ID NO: 1565298 - RNA, 19 nt, Artificial Sequence
  Description of Artificial Sequence: Synthetic oligonucleotide
  Antisense strand to SEQ ID NO: 1565297
ucuuccagccuugacuccc

SEQ ID NO: 1565299 - RNA, 19 nt, Artificial Sequence
  Description of Artificial Sequence: Synthetic oligonucleotide
  Sense strand starting at position 3571 of SEQ ID NO: 1559943
gagucaaggcuggaagagu

SEQ ID NO: 1565300 - RNA, 19 nt, Artificial Sequence
  Description of Artificial Sequence: Synthetic oligonucleotide
  Antisense strand to SEQ ID NO: 1565299
acucuuccagccuugacuc

SEQ ID NO: 1565301 - RNA, 19 nt, Artificial Sequence
  Description of Artificial Sequence: Synthetic oligonucleotide
  Sense strand starting at position 128 of SEQ ID NO: 1559944
ggguacagugcaugaucuu

SEQ ID NO: 1565302 - RNA, 19 nt, Artificial Sequence
  Description of Artificial Sequence: Synthetic oligonucleotide
  Antisense strand to SEQ ID NO: 1565301
aagaucaugcacuguaccc

SEQ ID NO: 1565303 - RNA, 19 nt, Artificial Sequence
  Description of Artificial Sequence: Synthetic oligonucleotide
  Sense strand starting at position 129 of SEQ ID NO: 1559944
gguacagugcaugaucuua

SEQ ID NO: 1565304 - RNA, 19 nt, Artificial Sequence
  Description of Artificial Sequence: Synthetic oligonucleotide
  Antisense strand to SEQ ID NO: 1565303
uaagaucaugcacuguacc

SEQ ID NO: 1565305 - RNA, 19 nt, Artificial Sequence
  Description of Artificial Sequence: Synthetic oligonucleotide
  Sense strand starting at position 701 of SEQ ID NO: 1559944
cauggagucuuucuugaga

SEQ ID NO: 1565306 - RNA, 19 nt, Artificial Sequence
  Description of Artificial Sequence: Synthetic oligonucleotide
  Antisense strand to SEQ ID NO: 1565305
ucucaagaaagacuccaug

SEQ ID NO: 1565307 - RNA, 19 nt, Artificial Sequence
  Description of Artificial Sequence: Synthetic oligonucleotide
  Sense strand starting at position 1068 of SEQ ID NO: 1559944
gggcuuguagucuaaaugu

SEQ ID NO: 1565308 - RNA, 19 nt, Artificial Sequence
  Description of Artificial Sequence: Synthetic oligonucleotide
  Antisense strand to SEQ ID NO: 1565307
acauuuagacuacaagccc

SEQ ID NO: 1565309 - RNA, 19 nt, Artificial Sequence
  Description of Artificial Sequence: Synthetic oligonucleotide
  Sense strand starting at position 1108 of SEQ ID NO: 1559944
ggagccaggucuuuaagga

SEQ ID NO: 1565310 - RNA, 19 nt, Artificial Sequence
  Description of Artificial Sequence: Synthetic oligonucleotide
  Antisense strand to SEQ ID NO: 1565309
uccuuaaagaccuggcucc

SEQ ID NO: 1565311 - RNA, 19 nt, Artificial Sequence
  Description of Artificial Sequence: Synthetic oligonucleotide
  Sense strand starting at position 1772 of SEQ ID NO: 1559944
cgcagugacggcuagaaga

SEQ ID NO: 1565312 - RNA, 19 nt, Artificial Sequence
  Description of Artificial Sequence: Synthetic oligonucleotide
  Antisense strand to SEQ ID NO: 1565311
ucuucuagccgucacugcg

SEQ ID NO: 1565313 - RNA, 19 nt, Artificial Sequence
  Description of Artificial Sequence: Synthetic oligonucleotide
  Sense strand starting at position 2051 of SEQ ID NO: 1559944
ucagguuacguaggagagu

SEQ ID NO: 1565314 - RNA, 19 nt, Artificial Sequence
  Description of Artificial Sequence: Synthetic oligonucleotide
  Antisense strand to SEQ ID NO: 1565313
acucuccuacguaaccuga

SEQ ID NO: 1565315 - RNA, 19 nt, Artificial Sequence
  Description of Artificial Sequence: Synthetic oligonucleotide
  Sense strand starting at position 2060 of SEQ ID NO: 1559944
guaggagaguggucuggga

SEQ ID NO: 1565316 - RNA, 19 nt, Artificial Sequence
  Description of Artificial Sequence: Synthetic oligonucleotide
  Antisense strand to SEQ ID NO: 1565315
ucccagaccacucuccuac

SEQ ID NO: 1565317 - RNA, 19 nt, Artificial Sequence
  Description of Artificial Sequence: Synthetic oligonucleotide
  Sense strand starting at position 2064 of SEQ ID NO: 1559944
gagaguggucugggagaca

SEQ ID NO: 1565318 - RNA, 19 nt, Artificial Sequence
  Description of Artificial Sequence: Synthetic oligonucleotide
  Antisense strand to SEQ ID NO: 1565317
ugucucccagaccacucuc

SEQ ID NO: 1565319 - RNA, 19 nt, Artificial Sequence
  Description of Artificial Sequence: Synthetic oligonucleotide
  Sense strand starting at position 2286 of SEQ ID NO: 1559944
uggccagagccgugggaau

SEQ ID NO: 1565320 - RNA, 19 nt, Artificial Sequence
  Description of Artificial Sequence: Synthetic oligonucleotide
  Antisense strand to SEQ ID NO: 1565319
auucccacggcucuggcca

SEQ ID NO: 1565321 - RNA, 19 nt, Artificial Sequence
  Description of Artificial Sequence: Synthetic oligonucleotide
  Sense strand starting at position 2293 of SEQ ID NO: 1559944
agccgugggaaucauuaca

SEQ ID NO: 1565322 - RNA, 19 nt, Artificial Sequence
  Description of Artificial Sequence: Synthetic oligonucleotide
  Antisense strand to SEQ ID NO: 1565321
uguaaugauucccacggcu

SEQ ID NO: 1565323 - RNA, 19 nt, Artificial Sequence
  Description of Artificial Sequence: Synthetic oligonucleotide
  Sense strand starting at position 2633 of SEQ ID NO: 1559944
ccgguugcucuugcucaga

SEQ ID NO: 1565324 - RNA, 19 nt, Artificial Sequence
  Description of Artificial Sequence: Synthetic oligonucleotide
  Antisense strand to SEQ ID NO: 1565323
ucugagcaagagcaaccgg

SEQ ID NO: 1565325 - RNA, 19 nt, Artificial Sequence
  Description of Artificial Sequence: Synthetic oligonucleotide
  Sense strand starting at position 2838 of SEQ ID NO: 1559944
gggcauggccugugacuua

SEQ ID NO: 1565326 - RNA, 19 nt, Artificial Sequence
  Description of Artificial Sequence: Synthetic oligonucleotide
  Antisense strand to SEQ ID NO: 1565325
uaagucacaggccaugccc

SEQ ID NO: 1565327 - RNA, 19 nt, Artificial Sequence
  Description of Artificial Sequence: Synthetic oligonucleotide
  Sense strand starting at position 2979 of SEQ ID NO: 1559944
aagggaauagccuggaguu

SEQ ID NO: 1565328 - RNA, 19 nt, Artificial Sequence
  Description of Artificial Sequence: Synthetic oligonucleotide
  Antisense strand to SEQ ID NO: 1565327
aacuccaggcuauucccuu

SEQ ID NO: 1565329 - RNA, 19 nt, Artificial Sequence
  Description of Artificial Sequence: Synthetic oligonucleotide
  Sense strand starting at position 2980 of SEQ ID NO: 1559944
agggaauagccuggaguuu

SEQ ID NO: 1565330 - RNA, 19 nt, Artificial Sequence
  Description of Artificial Sequence: Synthetic oligonucleotide
  Antisense strand to SEQ ID NO: 1565329
aaacuccaggcuauucccu

SEQ ID NO: 1565331 - RNA, 19 nt, Artificial Sequence
  Description of Artificial Sequence: Synthetic oligonucleotide
  Sense strand starting at position 2981 of SEQ ID NO: 1559944
gggaauagccuggaguuua

SEQ ID NO: 1565332 - RNA, 19 nt, Artificial Sequence
  Description of Artificial Sequence: Synthetic oligonucleotide
  Antisense strand to SEQ ID NO: 1565331
uaaacuccaggcuauuccc

SEQ ID NO: 1565333 - RNA, 19 nt, Artificial Sequence
  Description of Artificial Sequence: Synthetic oligonucleotide
  Sense strand starting at position 3018 of SEQ ID NO: 1559944
gagucugugcucuaacgaa

SEQ ID NO: 1565334 - RNA, 19 nt, Artificial Sequence
  Description of Artificial Sequence: Synthetic oligonucleotide
  Antisense strand to SEQ ID NO: 1565333
uucguuagagcacagacuc

SEQ ID NO: 1565335 - RNA, 19 nt, Artificial Sequence
  Description of Artificial Sequence: Synthetic oligonucleotide
  Sense strand starting at position 3168 of SEQ ID NO: 1559944
gagaaaucggccuggauga

SEQ ID NO: 1565336 - RNA, 19 nt, Artificial Sequence
  Description of Artificial Sequence: Synthetic oligonucleotide
  Antisense strand to SEQ ID NO: 1565335
ucauccaggccgauuucuc

SEQ ID NO: 1565337 - RNA, 19 nt, Artificial Sequence
  Description of Artificial Sequence: Synthetic oligonucleotide
  Sense strand starting at position 3169 of SEQ ID NO: 1559944
agaaaucggccuggaugau

SEQ ID NO: 1565338 - RNA, 19 nt, Artificial Sequence
  Description of Artificial Sequence: Synthetic oligonucleotide
  Antisense strand to SEQ ID NO: 1565337
aucauccaggccgauuucu

SEQ ID NO: 1565339 - RNA, 19 nt, Artificial Sequence
  Description of Artificial Sequence: Synthetic oligonucleotide
  Sense strand starting at position 3314 of SEQ ID NO: 1559944
ugccgaguuaggucugugu

SEQ ID NO: 1565340 - RNA, 19 nt, Artificial Sequence
  Description of Artificial Sequence: Synthetic oligonucleotide
  Antisense strand to SEQ ID NO: 1565339
acacagaccuaacucggca

SEQ ID NO: 1565341 - RNA, 19 nt, Artificial Sequence
  Description of Artificial Sequence: Synthetic oligonucleotide
  Sense strand starting at position 3318 of SEQ ID NO: 1559944
gaguuaggucuguguggga

SEQ ID NO: 1565342 - RNA, 19 nt, Artificial Sequence
  Description of Artificial Sequence: Synthetic oligonucleotide
  Antisense strand to SEQ ID NO: 1565341
ucccacacagaccuaacuc

SEQ ID NO: 1565343 - RNA, 19 nt, Artificial Sequence
  Description of Artificial Sequence: Synthetic oligonucleotide
  Sense strand starting at position 3343 of SEQ ID NO: 1559944
ucucuuucuccaggugaaa

SEQ ID NO: 1565344 - RNA, 19 nt, Artificial Sequence
  Description of Artificial Sequence: Synthetic oligonucleotide
  Antisense strand to SEQ ID NO: 1565343
uuucaccuggagaaagaga

SEQ ID NO: 1565345 - RNA, 19 nt, Artificial Sequence
  Description of Artificial Sequence: Synthetic oligonucleotide
  Sense strand starting at position 3428 of SEQ ID NO: 1559944
acucuuaaaguccagguua

SEQ ID NO: 1565346 - RNA, 19 nt, Artificial Sequence
  Description of Artificial Sequence: Synthetic oligonucleotide
  Antisense strand to SEQ ID NO: 1565345
uaaccuggacuuuaagagu

SEQ ID NO: 1565347 - RNA, 19 nt, Artificial Sequence
  Description of Artificial Sequence: Synthetic oligonucleotide
  Sense strand starting at position 3430 of SEQ ID NO: 1559944
ucuuaaaguccagguuaau

SEQ ID NO: 1565348 - RNA, 19 nt, Artificial Sequence
  Description of Artificial Sequence: Synthetic oligonucleotide
  Antisense strand to SEQ ID NO: 1565347
auuaaccuggacuuuaaga

SEQ ID NO: 1565349 - RNA, 19 nt, Artificial Sequence
  Description of Artificial Sequence: Synthetic oligonucleotide
  Sense strand starting at position 3441 of SEQ ID NO: 1559944
agguuaauaucccuggaga

SEQ ID NO: 1565350 - RNA, 19 nt, Artificial Sequence
  Description of Artificial Sequence: Synthetic oligonucleotide
  Antisense strand to SEQ ID NO: 1565349
ucuccagggauauuaaccu

SEQ ID NO: 1565351 - RNA, 19 nt, Artificial Sequence
  Description of Artificial Sequence: Synthetic oligonucleotide
  Sense strand starting at position 3442 of SEQ ID NO: 1559944
gguuaauaucccuggagaa

SEQ ID NO: 1565352 - RNA, 19 nt, Artificial Sequence
  Description of Artificial Sequence: Synthetic oligonucleotide
  Antisense strand to SEQ ID NO: 1565351
uucuccagggauauuaacc

SEQ ID NO: 1565353 - RNA, 19 nt, Artificial Sequence
  Description of Artificial Sequence: Synthetic oligonucleotide
  Sense strand starting at position 3443 of SEQ ID NO: 1559944
guuaauaucccuggagaag

SEQ ID NO: 1565354 - RNA, 19 nt, Artificial Sequence
  Description of Artificial Sequence: Synthetic oligonucleotide
  Antisense strand to SEQ ID NO: 1565353
cuucuccagggauauuaac

SEQ ID NO: 1565355 - RNA, 19 nt, Artificial Sequence
  Description of Artificial Sequence: Synthetic oligonucleotide
  Sense strand starting at position 3467 of SEQ ID NO: 1559944
gugaguucaggugaagcaa

SEQ ID NO: 1565356 - RNA, 19 nt, Artificial Sequence
  Description of Artificial Sequence: Synthetic oligonucleotide
  Antisense strand to SEQ ID NO: 1565355
uugcuucaccugaacucac

SEQ ID NO: 1565357 - RNA, 19 nt, Artificial Sequence
  Description of Artificial Sequence: Synthetic oligonucleotide
  Sense strand starting at position 3593 of SEQ ID NO: 1559944
cagcgucuuuccucuaaga

SEQ ID NO: 1565358 - RNA, 19 nt, Artificial Sequence
  Description of Artificial Sequence: Synthetic oligonucleotide
  Antisense strand to SEQ ID NO: 1565357
ucuuagaggaaagacgcug

SEQ ID NO: 1565359 - RNA, 19 nt, Artificial Sequence
  Description of Artificial Sequence: Synthetic oligonucleotide
  Sense strand starting at position 3595 of SEQ ID NO: 1559944
gcgucuuuccucuaagaag

SEQ ID NO: 1565360 - RNA, 19 nt, Artificial Sequence
  Description of Artificial Sequence: Synthetic oligonucleotide
  Antisense strand to SEQ ID NO: 1565359
cuucuuagaggaaagacgc

SEQ ID NO: 1565361 - RNA, 19 nt, Artificial Sequence
  Description of Artificial Sequence: Synthetic oligonucleotide
  Sense strand starting at position 3616 of SEQ ID NO: 1559944
ggugguccuucuguaauua

SEQ ID NO: 1565362 - RNA, 19 nt, Artificial Sequence
  Description of Artificial Sequence: Synthetic oligonucleotide
  Antisense strand to SEQ ID NO: 1565361
uaauuacagaaggaccacc

SEQ ID NO: 1565363 - RNA, 19 nt, Artificial Sequence
  Description of Artificial Sequence: Synthetic oligonucleotide
  Sense strand starting at position 3617 of SEQ ID NO: 1559944
gugguccuucuguaauuau

SEQ ID NO: 1565364 - RNA, 19 nt, Artificial Sequence
  Description of Artificial Sequence: Synthetic oligonucleotide
  Antisense strand to SEQ ID NO: 1565363
auaauuacagaaggaccac

SEQ ID NO: 1565365 - RNA, 19 nt, Artificial Sequence
  Description of Artificial Sequence: Synthetic oligonucleotide
  Sense strand starting at position 3620 of SEQ ID NO: 1559944
guccuucuguaauuaucaa

SEQ ID NO: 1565366 - RNA, 19 nt, Artificial Sequence
  Description of Artificial Sequence: Synthetic oligonucleotide
  Antisense strand to SEQ ID NO: 1565365
uugauaauuacagaaggac

SEQ ID NO: 1565367 - RNA, 19 nt, Artificial Sequence
  Description of Artificial Sequence: Synthetic oligonucleotide
  Sense strand starting at position 3665 of SEQ ID NO: 1559944
cuuguaagcuuuccagaug

SEQ ID NO: 1565368 - RNA, 19 nt, Artificial Sequence
  Description of Artificial Sequence: Synthetic oligonucleotide
  Antisense strand to SEQ ID NO: 1565367
caucuggaaagcuuacaag

SEQ ID NO: 1565369 - RNA, 19 nt, Artificial Sequence
  Description of Artificial Sequence: Synthetic oligonucleotide
  Sense strand starting at position 3683 of SEQ ID NO: 1559944
gugggacuggaucgaucaa

SEQ ID NO: 1565370 - RNA, 19 nt, Artificial Sequence
  Description of Artificial Sequence: Synthetic oligonucleotide
  Antisense strand to SEQ ID NO: 1565369
uugaucgauccagucccac

SEQ ID NO: 1565371 - RNA, 19 nt, Artificial Sequence
  Description of Artificial Sequence: Synthetic oligonucleotide
  Sense strand starting at position 3740 of SEQ ID NO: 1559944
gagauaccuguacauaugu

SEQ ID NO: 1565372 - RNA, 19 nt, Artificial Sequence
  Description of Artificial Sequence: Synthetic oligonucleotide
  Antisense strand to SEQ ID NO: 1565371
acauauguacagguaucuc

SEQ ID NO: 1565373 - RNA, 19 nt, Artificial Sequence
  Description of Artificial Sequence: Synthetic oligonucleotide
  Sense strand starting at position 3745 of SEQ ID NO: 1559944
accuguacauauguaagaa

SEQ ID NO: 1565374 - RNA, 19 nt, Artificial Sequence
  Description of Artificial Sequence: Synthetic oligonucleotide
  Antisense strand to SEQ ID NO: 1565373
uucuuacauauguacaggu

SEQ ID NO: 1565375 - RNA, 19 nt, Artificial Sequence
  Description of Artificial Sequence: Synthetic oligonucleotide
  Sense strand starting at position 3765 of SEQ ID NO: 1559944
cuggaagaguuguucucaa

SEQ ID NO: 1565376 - RNA, 19 nt, Artificial Sequence
  Description of Artificial Sequence: Synthetic oligonucleotide
  Antisense strand to SEQ ID NO: 1565375
uugagaacaacucuuccag

SEQ ID NO: 1565377 - RNA, 19 nt, Artificial Sequence
  Description of Artificial Sequence: Synthetic oligonucleotide
  Sense strand starting at position 3794 of SEQ ID NO: 1559944
ccucaaagguccucuagaa

SEQ ID NO: 1565378 - RNA, 19 nt, Artificial Sequence
  Description of Artificial Sequence: Synthetic oligonucleotide
  Antisense strand to SEQ ID NO: 1565377
uucuagaggaccuuugagg

SEQ ID NO: 1565379 - RNA, 19 nt, Artificial Sequence
  Description of Artificial Sequence: Synthetic oligonucleotide
  Sense strand starting at position 3817 of SEQ ID NO: 1559944
ugccuucugccuuauagag

SEQ ID NO: 1565380 - RNA, 19 nt, Artificial Sequence
  Description of Artificial Sequence: Synthetic oligonucleotide
  Antisense strand to SEQ ID NO: 1565379
cucuauaaggcagaaggca

SEQ ID NO: 1565381 - RNA, 19 nt, Artificial Sequence
  Description of Artificial Sequence: Synthetic oligonucleotide
  Sense strand starting at position 3 of SEQ ID NO: 1559945
ucaucacuguccucugaag

SEQ ID NO: 1565382 - RNA, 19 nt, Artificial Sequence
  Description of Artificial Sequence: Synthetic oligonucleotide
  Antisense strand to SEQ ID NO: 1565381
cuucagaggacagugauga

SEQ ID NO: 1565383 - RNA, 19 nt, Artificial Sequence
  Description of Artificial Sequence: Synthetic oligonucleotide
  Sense strand starting at position 85 of SEQ ID NO: 1559945
ggacaagguuugggacauu

SEQ ID NO: 1565384 - RNA, 19 nt, Artificial Sequence
  Description of Artificial Sequence: Synthetic oligonucleotide
  Antisense strand to SEQ ID NO: 1565383
aaugucccaaaccuugucc

SEQ ID NO: 1565385 - RNA, 19 nt, Artificial Sequence
  Description of Artificial Sequence: Synthetic oligonucleotide
  Sense strand starting at position 232 of SEQ ID NO: 1559945
ggguggugucgagguguga

SEQ ID NO: 1565386 - RNA, 19 nt, Artificial Sequence
  Description of Artificial Sequence: Synthetic oligonucleotide
  Antisense strand to SEQ ID NO: 1565385
ucacaccucgacaccaccc

SEQ ID NO: 1565387 - RNA, 19 nt, Artificial Sequence
  Description of Artificial Sequence: Synthetic oligonucleotide
  Sense strand starting at position 355 of SEQ ID NO: 1559945
acaggaugucagugaggga

SEQ ID NO: 1565388 - RNA, 19 nt, Artificial Sequence
  Description of Artificial Sequence: Synthetic oligonucleotide
  Antisense strand to SEQ ID NO: 1565387
ucccucacugacauccugu

SEQ ID NO: 1565389 - RNA, 19 nt, Artificial Sequence
  Description of Artificial Sequence: Synthetic oligonucleotide
  Sense strand starting at position 404 of SEQ ID NO: 1559945
uguacauuacagcauguau

SEQ ID NO: 1565390 - RNA, 19 nt, Artificial Sequence
  Description of Artificial Sequence: Synthetic oligonucleotide
  Antisense strand to SEQ ID NO: 1565389
auacaugcuguaauguaca

SEQ ID NO: 1565391 - RNA, 19 nt, Artificial Sequence
  Description of Artificial Sequence: Synthetic oligonucleotide
  Sense strand starting at position 457 of SEQ ID NO: 1559945
gugugacugcaugugcauu

SEQ ID NO: 1565392 - RNA, 19 nt, Artificial Sequence
  Description of Artificial Sequence: Synthetic oligonucleotide
  Antisense strand to SEQ ID NO: 1565391
aaugcacaugcagucacac

SEQ ID NO: 1565393 - RNA, 19 nt, Artificial Sequence
  Description of Artificial Sequence: Synthetic oligonucleotide
  Sense strand starting at position 470 of SEQ ID NO: 1559945
ugcauuauggcuugugagu

SEQ ID NO: 1565394 - RNA, 19 nt, Artificial Sequence
  Description of Artificial Sequence: Synthetic oligonucleotide
  Antisense strand to SEQ ID NO: 1565393
acucacaagccauaaugca

SEQ ID NO: 1565395 - RNA, 19 nt, Artificial Sequence
  Description of Artificial Sequence: Synthetic oligonucleotide
  Sense strand starting at position 472 of SEQ ID NO: 1559945
cauuauggcuugugagugu

SEQ ID NO: 1565396 - RNA, 19 nt, Artificial Sequence
  Description of Artificial Sequence: Synthetic oligonucleotide
  Antisense strand to SEQ ID NO: 1565395
acacucacaagccauaaug

SEQ ID NO: 1565397 - RNA, 19 nt, Artificial Sequence
  Description of Artificial Sequence: Synthetic oligonucleotide
  Sense strand starting at position 611 of SEQ ID NO: 1559945
aggaaaugccuccgggaaa

SEQ ID NO: 1565398 - RNA, 19 nt, Artificial Sequence
  Description of Artificial Sequence: Synthetic oligonucleotide
  Antisense strand to SEQ ID NO: 1565397
uuucccggaggcauuuccu

SEQ ID NO: 1565399 - RNA, 19 nt, Artificial Sequence
  Description of Artificial Sequence: Synthetic oligonucleotide
  Sense strand starting at position 612 of SEQ ID NO: 1559945
ggaaaugccuccgggaaau

SEQ ID NO: 1565400 - RNA, 19 nt, Artificial Sequence
  Description of Artificial Sequence: Synthetic oligonucleotide
  Antisense strand to SEQ ID NO: 1565399
auuucccggaggcauuucc

SEQ ID NO: 1565401 - RNA, 19 nt, Artificial Sequence
  Description of Artificial Sequence: Synthetic oligonucleotide
  Sense strand starting at position 1481 of SEQ ID NO: 1559945
cacacucaucacggucaga

SEQ ID NO: 1565402 - RNA, 19 nt, Artificial Sequence
  Description of Artificial Sequence: Synthetic oligonucleotide
  Antisense strand to SEQ ID NO: 1565401
ucugaccgugaugagugug

SEQ ID NO: 1565403 - RNA, 19 nt, Artificial Sequence
  Description of Artificial Sequence: Synthetic oligonucleotide
  Sense strand starting at position 1558 of SEQ ID NO: 1559945
uccagaucugcgcgcacau

SEQ ID NO: 1565404 - RNA, 19 nt, Artificial Sequence
  Description of Artificial Sequence: Synthetic oligonucleotide
  Antisense strand to SEQ ID NO: 1565403
augugcgcgcagaucugga

SEQ ID NO: 1565405 - RNA, 19 nt, Artificial Sequence
  Description of Artificial Sequence: Synthetic oligonucleotide
  Sense strand starting at position 1559 of SEQ ID NO: 1559945
ccagaucugcgcgcacaua

SEQ ID NO: 1565406 - RNA, 19 nt, Artificial Sequence
  Description of Artificial Sequence: Synthetic oligonucleotide
  Antisense strand to SEQ ID NO: 1565405
uaugugcgcgcagaucugg

SEQ ID NO: 1565407 - RNA, 19 nt, Artificial Sequence
  Description of Artificial Sequence: Synthetic oligonucleotide
  Sense strand starting at position 2038 of SEQ ID NO: 1559945
gccgccugccaggguuaua

SEQ ID NO: 1565408 - RNA, 19 nt, Artificial Sequence
  Description of Artificial Sequence: Synthetic oligonucleotide
  Antisense strand to SEQ ID NO: 1565407
uauaacccuggcaggcggc

SEQ ID NO: 1565409 - RNA, 19 nt, Artificial Sequence
  Description of Artificial Sequence: Synthetic oligonucleotide
  Sense strand starting at position 2965 of SEQ ID NO: 1559945
acuccuuugcggugacgua

SEQ ID NO: 1565410 - RNA, 19 nt, Artificial Sequence
  Description of Artificial Sequence: Synthetic oligonucleotide
  Antisense strand to SEQ ID NO: 1565409
uacgucaccgcaaaggagu

SEQ ID NO: 1565411 - RNA, 19 nt, Artificial Sequence
  Description of Artificial Sequence: Synthetic oligonucleotide
  Sense strand starting at position 3102 of SEQ ID NO: 1559945
aaugaacgaaugcgugaau

SEQ ID NO: 1565412 - RNA, 19 nt, Artificial Sequence
  Description of Artificial Sequence: Synthetic oligonucleotide
  Antisense strand to SEQ ID NO: 1565411
auucacgcauucguucauu

SEQ ID NO: 1565413 - RNA, 19 nt, Artificial Sequence
  Description of Artificial Sequence: Synthetic oligonucleotide
  Sense strand starting at position 3105 of SEQ ID NO: 1559945
gaacgaaugcgugaaugag

SEQ ID NO: 1565414 - RNA, 19 nt, Artificial Sequence
  Description of Artificial Sequence: Synthetic oligonucleotide
  Antisense strand to SEQ ID NO: 1565413
cucauucacgcauucguuc

SEQ ID NO: 1565415 - RNA, 19 nt, Artificial Sequence
  Description of Artificial Sequence: Synthetic oligonucleotide
  Sense strand starting at position 3283 of SEQ ID NO: 1559945
uugucugagucuggguuua

SEQ ID NO: 1565416 - RNA, 19 nt, Artificial Sequence
  Description of Artificial Sequence: Synthetic oligonucleotide
  Antisense strand to SEQ ID NO: 1565415
uaaacccagacucagacaa

SEQ ID NO: 1565417 - RNA, 19 nt, Artificial Sequence
  Description of Artificial Sequence: Synthetic oligonucleotide
  Sense strand starting at position 3285 of SEQ ID NO: 1559945
gucugagucuggguuuacu

SEQ ID NO: 1565418 - RNA, 19 nt, Artificial Sequence
  Description of Artificial Sequence: Synthetic oligonucleotide
  Antisense strand to SEQ ID NO: 1565417
aguaaacccagacucagac

SEQ ID NO: 1565419 - RNA, 19 nt, Artificial Sequence
  Description of Artificial Sequence: Synthetic oligonucleotide
  Sense strand starting at position 3288 of SEQ ID NO: 1559945
ugagucuggguuuacucau

SEQ ID NO: 1565420 - RNA, 19 nt, Artificial Sequence
  Description of Artificial Sequence: Synthetic oligonucleotide
  Antisense strand to SEQ ID NO: 1565419
augaguaaacccagacuca

SEQ ID NO: 1565421 - RNA, 19 nt, Artificial Sequence
  Description of Artificial Sequence: Synthetic oligonucleotide
  Sense strand starting at position 3294 of SEQ ID NO: 1559945
uggguuuacucauccacac

SEQ ID NO: 1565422 - RNA, 19 nt, Artificial Sequence
  Description of Artificial Sequence: Synthetic oligonucleotide
  Antisense strand to SEQ ID NO: 1565421
guguggaugaguaaaccca

SEQ ID NO: 1565423 - RNA, 19 nt, Artificial Sequence
  Description of Artificial Sequence: Synthetic oligonucleotide
  Sense strand starting at position 3374 of SEQ ID NO: 1559945
gcagcaaagauuuguuguu

SEQ ID NO: 1565424 - RNA, 19 nt, Artificial Sequence
  Description of Artificial Sequence: Synthetic oligonucleotide
  Antisense strand to SEQ ID NO: 1565423
aacaacaaaucuuugcugc

SEQ ID NO: 1565425 - RNA, 19 nt, Artificial Sequence
  Description of Artificial Sequence: Synthetic oligonucleotide
  Sense strand starting at position 3476 of SEQ ID NO: 1559945
ugucauuacucacgcauac

SEQ ID NO: 1565426 - RNA, 19 nt, Artificial Sequence
  Description of Artificial Sequence: Synthetic oligonucleotide
  Antisense strand to SEQ ID NO: 1565425
guaugcgugaguaaugaca

SEQ ID NO: 1565427 - RNA, 19 nt, Artificial Sequence
  Description of Artificial Sequence: Synthetic oligonucleotide
  Sense strand starting at position 3511 of SEQ ID NO: 1559945
auaccagacuccuggaguu

SEQ ID NO: 1565428 - RNA, 19 nt, Artificial Sequence
  Description of Artificial Sequence: Synthetic oligonucleotide
  Antisense strand to SEQ ID NO: 1565427
aacuccaggagucugguau

SEQ ID NO: 1565429 - RNA, 19 nt, Artificial Sequence
  Description of Artificial Sequence: Synthetic oligonucleotide
  Sense strand starting at position 3523 of SEQ ID NO: 1559945
uggaguucccaccacacua

SEQ ID NO: 1565430 - RNA, 19 nt, Artificial Sequence
  Description of Artificial Sequence: Synthetic oligonucleotide
  Antisense strand to SEQ ID NO: 1565429
uaguguggugggaacucca

SEQ ID NO: 1565431 - RNA, 19 nt, Artificial Sequence
  Description of Artificial Sequence: Synthetic oligonucleotide
  Sense strand starting at position 3659 of SEQ ID NO: 1559945
gagucuaagucagccauuu

SEQ ID NO: 1565432 - RNA, 19 nt, Artificial Sequence
  Description of Artificial Sequence: Synthetic oligonucleotide
  Antisense strand to SEQ ID NO: 1565431
aaauggcugacuuagacuc

SEQ ID NO: 1565433 - RNA, 19 nt, Artificial Sequence
  Description of Artificial Sequence: Synthetic oligonucleotide
  Sense strand starting at position 3684 of SEQ ID NO: 1559945
ucuguuagcuguucuucua

SEQ ID NO: 1565434 - RNA, 19 nt, Artificial Sequence
  Description of Artificial Sequence: Synthetic oligonucleotide
  Antisense strand to SEQ ID NO: 1565433
uagaagaacagcuaacaga

SEQ ID NO: 1565435 - RNA, 19 nt, Artificial Sequence
  Description of Artificial Sequence: Synthetic oligonucleotide
  Sense strand starting at position 3687 of SEQ ID NO: 1559945
guuagcuguucuucuacua

SEQ ID NO: 1565436 - RNA, 19 nt, Artificial Sequence
  Description of Artificial Sequence: Synthetic oligonucleotide
  Antisense strand to SEQ ID NO: 1565435
uaguagaagaacagcuaac

SEQ ID NO: 1565437 - RNA, 19 nt, Artificial Sequence
  Description of Artificial Sequence: Synthetic oligonucleotide
  Sense strand starting at position 3745 of SEQ ID NO: 1559945
uccuuucuuugcuguagau

SEQ ID NO: 1565438 - RNA, 19 nt, Artificial Sequence
  Description of Artificial Sequence: Synthetic oligonucleotide
  Antisense strand to SEQ ID NO: 1565437
aucuacagcaaagaaagga

SEQ ID NO: 1565439 - RNA, 19 nt, Artificial Sequence
  Description of Artificial Sequence: Synthetic oligonucleotide
  Sense strand starting at position 3749 of SEQ ID NO: 1559945
uucuuugcuguagauacua

SEQ ID NO: 1565440 - RNA, 19 nt, Artificial Sequence
  Description of Artificial Sequence: Synthetic oligonucleotide
  Antisense strand to SEQ ID NO: 1565439
uaguaucuacagcaaagaa

SEQ ID NO: 1565441 - RNA, 19 nt, Artificial Sequence
  Description of Artificial Sequence: Synthetic oligonucleotide
  Sense strand starting at position 99 of SEQ ID NO: 1559946
ucagcaucccgagaagcua

SEQ ID NO: 1565442 - RNA, 19 nt, Artificial Sequence
  Description of Artificial Sequence: Synthetic oligonucleotide
  Antisense strand to SEQ ID NO: 1565441
uagcuucucgggaugcuga

SEQ ID NO: 1565443 - RNA, 19 nt, Artificial Sequence
  Description of Artificial Sequence: Synthetic oligonucleotide
  Sense strand starting at position 295 of SEQ ID NO: 1559946
ugauauguguauugugcua

SEQ ID NO: 1565444 - RNA, 19 nt, Artificial Sequence
  Description of Artificial Sequence: Synthetic oligonucleotide
  Antisense strand to SEQ ID NO: 1565443
uagcacaauacacauauca

SEQ ID NO: 1565445 - RNA, 19 nt, Artificial Sequence
  Description of Artificial Sequence: Synthetic oligonucleotide
  Sense strand starting at position 297 of SEQ ID NO: 1559946
auauguguauugugcuaua

SEQ ID NO: 1565446 - RNA, 19 nt, Artificial Sequence
  Description of Artificial Sequence: Synthetic oligonucleotide
  Antisense strand to SEQ ID NO: 1565445
uauagcacaauacacauau

SEQ ID NO: 1565447 - RNA, 19 nt, Artificial Sequence
  Description of Artificial Sequence: Synthetic oligonucleotide
  Sense strand starting at position 300 of SEQ ID NO: 1559946
uguguauugugcuauaaug

SEQ ID NO: 1565448 - RNA, 19 nt, Artificial Sequence
  Description of Artificial Sequence: Synthetic oligonucleotide
  Antisense strand to SEQ ID NO: 1565447
cauuauagcacaauacaca

SEQ ID NO: 1565449 - RNA, 19 nt, Artificial Sequence
  Description of Artificial Sequence: Synthetic oligonucleotide
  Sense strand starting at position 302 of SEQ ID NO: 1559946
uguauugugcuauaaugca

SEQ ID NO: 1565450 - RNA, 19 nt, Artificial Sequence
  Description of Artificial Sequence: Synthetic oligonucleotide
  Antisense strand to SEQ ID NO: 1565449
ugcauuauagcacaauaca

SEQ ID NO: 1565451 - RNA, 19 nt, Artificial Sequence
  Description of Artificial Sequence: Synthetic oligonucleotide
  Sense strand starting at position 309 of SEQ ID NO: 1559946
ugcuauaaugcagacagua

SEQ ID NO: 1565452 - RNA, 19 nt, Artificial Sequence
  Description of Artificial Sequence: Synthetic oligonucleotide
  Antisense strand to SEQ ID NO: 1565451
uacugucugcauuauagca

SEQ ID NO: 1565453 - RNA, 19 nt, Artificial Sequence
  Description of Artificial Sequence: Synthetic oligonucleotide
  Sense strand starting at position 329 of SEQ ID NO: 1559946
gugcuuaaucgaugcuuga

SEQ ID NO: 1565454 - RNA, 19 nt, Artificial Sequence
  Description of Artificial Sequence: Synthetic oligonucleotide
  Antisense strand to SEQ ID NO: 1565453
ucaagcaucgauuaagcac

SEQ ID NO: 1565455 - RNA, 19 nt, Artificial Sequence
  Description of Artificial Sequence: Synthetic oligonucleotide
  Sense strand starting at position 332 of SEQ ID NO: 1559946
cuuaaucgaugcuugauga

SEQ ID NO: 1565456 - RNA, 19 nt, Artificial Sequence
  Description of Artificial Sequence: Synthetic oligonucleotide
  Antisense strand to SEQ ID NO: 1565455
ucaucaagcaucgauuaag

SEQ ID NO: 1565457 - RNA, 19 nt, Artificial Sequence
  Description of Artificial Sequence: Synthetic oligonucleotide
  Sense strand starting at position 333 of SEQ ID NO: 1559946
uuaaucgaugcuugaugau

SEQ ID NO: 1565458 - RNA, 19 nt, Artificial Sequence
  Description of Artificial Sequence: Synthetic oligonucleotide
  Antisense strand to SEQ ID NO: 1565457
aucaucaagcaucgauuaa

SEQ ID NO: 1565459 - RNA, 19 nt, Artificial Sequence
  Description of Artificial Sequence: Synthetic oligonucleotide
  Sense strand starting at position 342 of SEQ ID NO: 1559946
gcuugaugauuggagggau

SEQ ID NO: 1565460 - RNA, 19 nt, Artificial Sequence
  Description of Artificial Sequence: Synthetic oligonucleotide
  Antisense strand to SEQ ID NO: 1565459
aucccuccaaucaucaagc

SEQ ID NO: 1565461 - RNA, 19 nt, Artificial Sequence
  Description of Artificial Sequence: Synthetic oligonucleotide
  Sense strand starting at position 510 of SEQ ID NO: 1559946
guggacucaguccaugauu

SEQ ID NO: 1565462 - RNA, 19 nt, Artificial Sequence
  Description of Artificial Sequence: Synthetic oligonucleotide
  Antisense strand to SEQ ID NO: 1565461
aaucauggacugaguccac

SEQ ID NO: 1565463 - RNA, 19 nt, Artificial Sequence
  Description of Artificial Sequence: Synthetic oligonucleotide
  Sense strand starting at position 512 of SEQ ID NO: 1559946
ggacucaguccaugauucu

SEQ ID NO: 1565464 - RNA, 19 nt, Artificial Sequence
  Description of Artificial Sequence: Synthetic oligonucleotide
  Antisense strand to SEQ ID NO: 1565463
agaaucauggacugagucc

SEQ ID NO: 1565465 - RNA, 19 nt, Artificial Sequence
  Description of Artificial Sequence: Synthetic oligonucleotide
  Sense strand starting at position 518 of SEQ ID NO: 1559946
aguccaugauucugugaca

SEQ ID NO: 1565466 - RNA, 19 nt, Artificial Sequence
  Description of Artificial Sequence: Synthetic oligonucleotide
  Antisense strand to SEQ ID NO: 1565465
ugucacagaaucauggacu

SEQ ID NO: 1565467 - RNA, 19 nt, Artificial Sequence
  Description of Artificial Sequence: Synthetic oligonucleotide
  Sense strand starting at position 572 of SEQ ID NO: 1559946
ggaguugggucccuagaag

SEQ ID NO: 1565468 - RNA, 19 nt, Artificial Sequence
  Description of Artificial Sequence: Synthetic oligonucleotide
  Antisense strand to SEQ ID NO: 1565467
cuucuagggacccaacucc

SEQ ID NO: 1565469 - RNA, 19 nt, Artificial Sequence
  Description of Artificial Sequence: Synthetic oligonucleotide
  Sense strand starting at position 1070 of SEQ ID NO: 1559946
ggucuaggguccuggguau

SEQ ID NO: 1565470 - RNA, 19 nt, Artificial Sequence
  Description of Artificial Sequence: Synthetic oligonucleotide
  Antisense strand to SEQ ID NO: 1565469
auacccaggacccuagacc

SEQ ID NO: 1565471 - RNA, 19 nt, Artificial Sequence
  Description of Artificial Sequence: Synthetic oligonucleotide
  Sense strand starting at position 1083 of SEQ ID NO: 1559946
ggguaucucuagguacuga

SEQ ID NO: 1565472 - RNA, 19 nt, Artificial Sequence
  Description of Artificial Sequence: Synthetic oligonucleotide
  Antisense strand to SEQ ID NO: 1565471
ucaguaccuagagauaccc

SEQ ID NO: 1565473 - RNA, 19 nt, Artificial Sequence
  Description of Artificial Sequence: Synthetic oligonucleotide
  Sense strand starting at position 1087 of SEQ ID NO: 1559946
aucucuagguacugagaca

SEQ ID NO: 1565474 - RNA, 19 nt, Artificial Sequence
  Description of Artificial Sequence: Synthetic oligonucleotide
  Antisense strand to SEQ ID NO: 1565473
ugucucaguaccuagagau

SEQ ID NO: 1565475 - RNA, 19 nt, Artificial Sequence
  Description of Artificial Sequence: Synthetic oligonucleotide
  Sense strand starting at position 1555 of SEQ ID NO: 1559946
gacucuaagccugguuuga

SEQ ID NO: 1565476 - RNA, 19 nt, Artificial Sequence
  Description of Artificial Sequence: Synthetic oligonucleotide
  Antisense strand to SEQ ID NO: 1565475
ucaaaccaggcuuagaguc

SEQ ID NO: 1565477 - RNA, 19 nt, Artificial Sequence
  Description of Artificial Sequence: Synthetic oligonucleotide
  Sense strand starting at position 3000 of SEQ ID NO: 1559946
caggguguugcugguccaa

SEQ ID NO: 1565478 - RNA, 19 nt, Artificial Sequence
  Description of Artificial Sequence: Synthetic oligonucleotide
  Antisense strand to SEQ ID NO: 1565477
uuggaccagcaacacccug

SEQ ID NO: 1565479 - RNA, 19 nt, Artificial Sequence
  Description of Artificial Sequence: Synthetic oligonucleotide
  Sense strand starting at position 3002 of SEQ ID NO: 1559946
ggguguugcugguccaacu

SEQ ID NO: 1565480 - RNA, 19 nt, Artificial Sequence
  Description of Artificial Sequence: Synthetic oligonucleotide
  Antisense strand to SEQ ID NO: 1565479
aguuggaccagcaacaccc

SEQ ID NO: 1565481 - RNA, 19 nt, Artificial Sequence
  Description of Artificial Sequence: Synthetic oligonucleotide
  Sense strand starting at position 3163 of SEQ ID NO: 1559946
ccuucugaccuggacuauu

SEQ ID NO: 1565482 - RNA, 19 nt, Artificial Sequence
  Description of Artificial Sequence: Synthetic oligonucleotide
  Antisense strand to SEQ ID NO: 1565481
aauaguccaggucagaagg

SEQ ID NO: 1565483 - RNA, 19 nt, Artificial Sequence
  Description of Artificial Sequence: Synthetic oligonucleotide
  Sense strand starting at position 3623 of SEQ ID NO: 1559946
augugucaaugugucauua

SEQ ID NO: 1565484 - RNA, 19 nt, Artificial Sequence
  Description of Artificial Sequence: Synthetic oligonucleotide
  Antisense strand to SEQ ID NO: 1565483
uaaugacacauugacacau

SEQ ID NO: 1565485 - RNA, 19 nt, Artificial Sequence
  Description of Artificial Sequence: Synthetic oligonucleotide
  Sense strand starting at position 3627 of SEQ ID NO: 1559946
gucaaugugucauuaggac

SEQ ID NO: 1565486 - RNA, 19 nt, Artificial Sequence
  Description of Artificial Sequence: Synthetic oligonucleotide
  Antisense strand to SEQ ID NO: 1565485
guccuaaugacacauugac

SEQ ID NO: 1565487 - RNA, 19 nt, Artificial Sequence
  Description of Artificial Sequence: Synthetic oligonucleotide
  Sense strand starting at position 3631 of SEQ ID NO: 1559946
augugucauuaggacaauu

SEQ ID NO: 1565488 - RNA, 19 nt, Artificial Sequence
  Description of Artificial Sequence: Synthetic oligonucleotide
  Antisense strand to SEQ ID NO: 1565487
aauuguccuaaugacacau

SEQ ID NO: 1565489 - RNA, 19 nt, Artificial Sequence
  Description of Artificial Sequence: Synthetic oligonucleotide
  Sense strand starting at position 3633 of SEQ ID NO: 1559946
gugucauuaggacaauugu

SEQ ID NO: 1565490 - RNA, 19 nt, Artificial Sequence
  Description of Artificial Sequence: Synthetic oligonucleotide
  Antisense strand to SEQ ID NO: 1565489
acaauuguccuaaugacac

SEQ ID NO: 1565491 - RNA, 19 nt, Artificial Sequence
  Description of Artificial Sequence: Synthetic oligonucleotide
  Sense strand starting at position 3647 of SEQ ID NO: 1559946
auuguauccuccucagaug

SEQ ID NO: 1565492 - RNA, 19 nt, Artificial Sequence
  Description of Artificial Sequence: Synthetic oligonucleotide
  Antisense strand to SEQ ID NO: 1565491
caucugaggaggauacaau

SEQ ID NO: 1565493 - RNA, 19 nt, Artificial Sequence
  Description of Artificial Sequence: Synthetic oligonucleotide
  Sense strand starting at position 3648 of SEQ ID NO: 1559946
uuguauccuccucagaugu

SEQ ID NO: 1565494 - RNA, 19 nt, Artificial Sequence
  Description of Artificial Sequence: Synthetic oligonucleotide
  Antisense strand to SEQ ID NO: 1565493
acaucugaggaggauacaa

SEQ ID NO: 1565495 - RNA, 19 nt, Artificial Sequence
  Description of Artificial Sequence: Synthetic oligonucleotide
  Sense strand starting at position 3783 of SEQ ID NO: 1559946
ggcauuaugcucugcagga

SEQ ID NO: 1565496 - RNA, 19 nt, Artificial Sequence
  Description of Artificial Sequence: Synthetic oligonucleotide
  Antisense strand to SEQ ID NO: 1565495
uccugcagagcauaaugcc

SEQ ID NO: 1565497 - RNA, 19 nt, Artificial Sequence
  Description of Artificial Sequence: Synthetic oligonucleotide
  Sense strand starting at position 3784 of SEQ ID NO: 1559946
gcauuaugcucugcaggaa

SEQ ID NO: 1565498 - RNA, 19 nt, Artificial Sequence
  Description of Artificial Sequence: Synthetic oligonucleotide
  Antisense strand to SEQ ID NO: 1565497
uuccugcagagcauaaugc

SEQ ID NO: 1565499 - RNA, 19 nt, Artificial Sequence
  Description of Artificial Sequence: Synthetic oligonucleotide
  Sense strand starting at position 3812 of SEQ ID NO: 1559946
gcaggugcugcaucuugua

SEQ ID NO: 1565500 - RNA, 19 nt, Artificial Sequence
  Description of Artificial Sequence: Synthetic oligonucleotide
  Antisense strand to SEQ ID NO: 1565499
uacaagaugcagcaccugc

SEQ ID NO: 1565501 - RNA, 19 nt, Artificial Sequence
  Description of Artificial Sequence: Synthetic oligonucleotide
  Sense strand starting at position 3815 of SEQ ID NO: 1559946
ggugcugcaucuuguagaa

SEQ ID NO: 1565502 - RNA, 19 nt, Artificial Sequence
  Description of Artificial Sequence: Synthetic oligonucleotide
  Antisense strand to SEQ ID NO: 1565501
uucuacaagaugcagcacc

SEQ ID NO: 1565503 - RNA, 19 nt, Artificial Sequence
  Description of Artificial Sequence: Synthetic oligonucleotide
  Sense strand starting at position 3817 of SEQ ID NO: 1559946
ugcugcaucuuguagaaau

SEQ ID NO: 1565504 - RNA, 19 nt, Artificial Sequence
  Description of Artificial Sequence: Synthetic oligonucleotide
  Antisense strand to SEQ ID NO: 1565503
auuucuacaagaugcagca

SEQ ID NO: 1565505 - RNA, 19 nt, Artificial Sequence
  Description of Artificial Sequence: Synthetic oligonucleotide
  Sense strand starting at position 3827 of SEQ ID NO: 1559946
uguagaaaugcauagagua

SEQ ID NO: 1565506 - RNA, 19 nt, Artificial Sequence
  Description of Artificial Sequence: Synthetic oligonucleotide
  Antisense strand to SEQ ID NO: 1565505
uacucuaugcauuucuaca

SEQ ID NO: 1565507 - RNA, 19 nt, Artificial Sequence
  Description of Artificial Sequence: Synthetic oligonucleotide
  Sense strand starting at position 3863 of SEQ ID NO: 1559946
gaguguauacaguagauau

SEQ ID NO: 1565508 - RNA, 19 nt, Artificial Sequence
  Description of Artificial Sequence: Synthetic oligonucleotide
  Antisense strand to SEQ ID NO: 1565507
auaucuacuguauacacuc

SEQ ID NO: 1565509 - RNA, 19 nt, Artificial Sequence
  Description of Artificial Sequence: Synthetic oligonucleotide
  Sense strand starting at position 3913 of SEQ ID NO: 1559946
cugcauccuguagagagua

SEQ ID NO: 1565510 - RNA, 19 nt, Artificial Sequence
  Description of Artificial Sequence: Synthetic oligonucleotide
  Antisense strand to SEQ ID NO: 1565509
uacucucuacaggaugcag

SEQ ID NO: 1565511 - RNA, 19 nt, Artificial Sequence
  Description of Artificial Sequence: Synthetic oligonucleotide
  Sense strand starting at position 3915 of SEQ ID NO: 1559946
gcauccuguagagaguaua

SEQ ID NO: 1565512 - RNA, 19 nt, Artificial Sequence
  Description of Artificial Sequence: Synthetic oligonucleotide
  Antisense strand to SEQ ID NO: 1565511
uauacucucuacaggaugc

SEQ ID NO: 1565513 - RNA, 19 nt, Artificial Sequence
  Description of Artificial Sequence: Synthetic oligonucleotide
  Sense strand starting at position 3943 of SEQ ID NO: 1559946
ugcugcauccugcaaggaa

SEQ ID NO: 1565514 - RNA, 19 nt, Artificial Sequence
  Description of Artificial Sequence: Synthetic oligonucleotide
  Antisense strand to SEQ ID NO: 1565513
uuccuugcaggaugcagca

SEQ ID NO: 1565515 - RNA, 19 nt, Artificial Sequence
  Description of Artificial Sequence: Synthetic oligonucleotide
  Sense strand starting at position 470 of SEQ ID NO: 1559947
gggcuuguuucuuuacaca

SEQ ID NO: 1565516 - RNA, 19 nt, Artificial Sequence
  Description of Artificial Sequence: Synthetic oligonucleotide
  Antisense strand to SEQ ID NO: 1565515
uguguaaagaaacaagccc

SEQ ID NO: 1565517 - RNA, 19 nt, Artificial Sequence
  Description of Artificial Sequence: Synthetic oligonucleotide
  Sense strand starting at position 800 of SEQ ID NO: 1559947
cggcgcuacacguauguau

SEQ ID NO: 1565518 - RNA, 19 nt, Artificial Sequence
  Description of Artificial Sequence: Synthetic oligonucleotide
  Antisense strand to SEQ ID NO: 1565517
auacauacguguagcgccg

SEQ ID NO: 1565519 - RNA, 19 nt, Artificial Sequence
  Description of Artificial Sequence: Synthetic oligonucleotide
  Sense strand starting at position 802 of SEQ ID NO: 1559947
gcgcuacacguauguauuu

SEQ ID NO: 1565520 - RNA, 19 nt, Artificial Sequence
  Description of Artificial Sequence: Synthetic oligonucleotide
  Antisense strand to SEQ ID NO: 1565519
aaauacauacguguagcgc

SEQ ID NO: 1565521 - RNA, 19 nt, Artificial Sequence
  Description of Artificial Sequence: Synthetic oligonucleotide
  Sense strand starting at position 1016 of SEQ ID NO: 1559947
gagugagucuugcuagcuu

SEQ ID NO: 1565522 - RNA, 19 nt, Artificial Sequence
  Description of Artificial Sequence: Synthetic oligonucleotide
  Antisense strand to SEQ ID NO: 1565521
aagcuagcaagacucacuc

SEQ ID NO: 1565523 - RNA, 19 nt, Artificial Sequence
  Description of Artificial Sequence: Synthetic oligonucleotide
  Sense strand starting at position 1031 of SEQ ID NO: 1559947
gcuugcucagccuggagua

SEQ ID NO: 1565524 - RNA, 19 nt, Artificial Sequence
  Description of Artificial Sequence: Synthetic oligonucleotide
  Antisense strand to SEQ ID NO: 1565523
uacuccaggcugagcaagc

SEQ ID NO: 1565525 - RNA, 19 nt, Artificial Sequence
  Description of Artificial Sequence: Synthetic oligonucleotide
  Sense strand starting at position 1308 of SEQ ID NO: 1559947
cggagucgauccucuguuu

SEQ ID NO: 1565526 - RNA, 19 nt, Artificial Sequence
  Description of Artificial Sequence: Synthetic oligonucleotide
  Antisense strand to SEQ ID NO: 1565525
aaacagaggaucgacuccg

SEQ ID NO: 1565527 - RNA, 19 nt, Artificial Sequence
  Description of Artificial Sequence: Synthetic oligonucleotide
  Sense strand starting at position 1342 of SEQ ID NO: 1559947
ggaggccuucucugcaaga

SEQ ID NO: 1565528 - RNA, 19 nt, Artificial Sequence
  Description of Artificial Sequence: Synthetic oligonucleotide
  Antisense strand to SEQ ID NO: 1565527
ucuugcagagaaggccucc

SEQ ID NO: 1565529 - RNA, 19 nt, Artificial Sequence
  Description of Artificial Sequence: Synthetic oligonucleotide
  Sense strand starting at position 1344 of SEQ ID NO: 1559947
aggccuucucugcaagaca

SEQ ID NO: 1565530 - RNA, 19 nt, Artificial Sequence
  Description of Artificial Sequence: Synthetic oligonucleotide
  Antisense strand to SEQ ID NO: 1565529
ugucuugcagagaaggccu

SEQ ID NO: 1565531 - RNA, 19 nt, Artificial Sequence
  Description of Artificial Sequence: Synthetic oligonucleotide
  Sense strand starting at position 1383 of SEQ ID NO: 1559947
ggguagugugugggagaua

SEQ ID NO: 1565532 - RNA, 19 nt, Artificial Sequence
  Description of Artificial Sequence: Synthetic oligonucleotide
  Antisense strand to SEQ ID NO: 1565531
uaucucccacacacuaccc

SEQ ID NO: 1565533 - RNA, 19 nt, Artificial Sequence
  Description of Artificial Sequence: Synthetic oligonucleotide
  Sense strand starting at position 1384 of SEQ ID NO: 1559947
gguagugugugggagauaa

SEQ ID NO: 1565534 - RNA, 19 nt, Artificial Sequence
  Description of Artificial Sequence: Synthetic oligonucleotide
  Antisense strand to SEQ ID NO: 1565533
uuaucucccacacacuacc

SEQ ID NO: 1565535 - RNA, 19 nt, Artificial Sequence
  Description of Artificial Sequence: Synthetic oligonucleotide
  Sense strand starting at position 1386 of SEQ ID NO: 1559947
uagugugugggagauaacu

SEQ ID NO: 1565536 - RNA, 19 nt, Artificial Sequence
  Description of Artificial Sequence: Synthetic oligonucleotide
  Antisense strand to SEQ ID NO: 1565535
aguuaucucccacacacua

SEQ ID NO: 1565537 - RNA, 19 nt, Artificial Sequence
  Description of Artificial Sequence: Synthetic oligonucleotide
  Sense strand starting at position 1888 of SEQ ID NO: 1559947
gaagucugagccuggagaa

SEQ ID NO: 1565538 - RNA, 19 nt, Artificial Sequence
  Description of Artificial Sequence: Synthetic oligonucleotide
  Antisense strand to SEQ ID NO: 1565537
uucuccaggcucagacuuc

SEQ ID NO: 1565539 - RNA, 19 nt, Artificial Sequence
  Description of Artificial Sequence: Synthetic oligonucleotide
  Sense strand starting at position 1924 of SEQ ID NO: 1559947
gcgcgcuuaccugagggau

SEQ ID NO: 1565540 - RNA, 19 nt, Artificial Sequence
  Description of Artificial Sequence: Synthetic oligonucleotide
  Antisense strand to SEQ ID NO: 1565539
aucccucagguaagcgcgc

SEQ ID NO: 1565541 - RNA, 19 nt, Artificial Sequence
  Description of Artificial Sequence: Synthetic oligonucleotide
  Sense strand starting at position 2352 of SEQ ID NO: 1559947
guuccaguucugccuguua

SEQ ID NO: 1565542 - RNA, 19 nt, Artificial Sequence
  Description of Artificial Sequence: Synthetic oligonucleotide
  Antisense strand to SEQ ID NO: 1565541
uaacaggcagaacuggaac

SEQ ID NO: 1565543 - RNA, 19 nt, Artificial Sequence
  Description of Artificial Sequence: Synthetic oligonucleotide
  Sense strand starting at position 2354 of SEQ ID NO: 1559947
uccaguucugccuguuacu

SEQ ID NO: 1565544 - RNA, 19 nt, Artificial Sequence
  Description of Artificial Sequence: Synthetic oligonucleotide
  Antisense strand to SEQ ID NO: 1565543
aguaacaggcagaacugga

SEQ ID NO: 1565545 - RNA, 19 nt, Artificial Sequence
  Description of Artificial Sequence: Synthetic oligonucleotide
  Sense strand starting at position 2413 of SEQ ID NO: 1559947
ccaguaacguaggugaaga

SEQ ID NO: 1565546 - RNA, 19 nt, Artificial Sequence
  Description of Artificial Sequence: Synthetic oligonucleotide
  Antisense strand to SEQ ID NO: 1565545
ucuucaccuacguuacugg

SEQ ID NO: 1565547 - RNA, 19 nt, Artificial Sequence
  Description of Artificial Sequence: Synthetic oligonucleotide
  Sense strand starting at position 2414 of SEQ ID NO: 1559947
caguaacguaggugaagaa

SEQ ID NO: 1565548 - RNA, 19 nt, Artificial Sequence
  Description of Artificial Sequence: Synthetic oligonucleotide
  Antisense strand to SEQ ID NO: 1565547
uucuucaccuacguuacug

SEQ ID NO: 1565549 - RNA, 19 nt, Artificial Sequence
  Description of Artificial Sequence: Synthetic oligonucleotide
  Sense strand starting at position 2558 of SEQ ID NO: 1559947
agcgauuucuggcuaguuu

SEQ ID NO: 1565550 - RNA, 19 nt, Artificial Sequence
  Description of Artificial Sequence: Synthetic oligonucleotide
  Antisense strand to SEQ ID NO: 1565549
aaacuagccagaaaucgcu

SEQ ID NO: 1565551 - RNA, 19 nt, Artificial Sequence
  Description of Artificial Sequence: Synthetic oligonucleotide
  Sense strand starting at position 2624 of SEQ ID NO: 1559947
ugagcaauuuguuacuccu

SEQ ID NO: 1565552 - RNA, 19 nt, Artificial Sequence
  Description of Artificial Sequence: Synthetic oligonucleotide
  Antisense strand to SEQ ID NO: 1565551
aggaguaacaaauugcuca

SEQ ID NO: 1565553 - RNA, 19 nt, Artificial Sequence
  Description of Artificial Sequence: Synthetic oligonucleotide
  Sense strand starting at position 2630 of SEQ ID NO: 1559947
auuuguuacuccuuccagu

SEQ ID NO: 1565554 - RNA, 19 nt, Artificial Sequence
  Description of Artificial Sequence: Synthetic oligonucleotide
  Antisense strand to SEQ ID NO: 1565553
acuggaaggaguaacaaau

SEQ ID NO: 1565555 - RNA, 19 nt, Artificial Sequence
  Description of Artificial Sequence: Synthetic oligonucleotide
  Sense strand starting at position 2643 of SEQ ID NO: 1559947
uccaguuggacagguuuaa

SEQ ID NO: 1565556 - RNA, 19 nt, Artificial Sequence
  Description of Artificial Sequence: Synthetic oligonucleotide
  Antisense strand to SEQ ID NO: 1565555
uuaaaccuguccaacugga

SEQ ID NO: 1565557 - RNA, 19 nt, Artificial Sequence
  Description of Artificial Sequence: Synthetic oligonucleotide
  Sense strand starting at position 2655 of SEQ ID NO: 1559947
gguuuaaccaagugguucu

SEQ ID NO: 1565558 - RNA, 19 nt, Artificial Sequence
  Description of Artificial Sequence: Synthetic oligonucleotide
  Antisense strand to SEQ ID NO: 1565557
agaaccacuugguuaaacc

SEQ ID NO: 1565559 - RNA, 19 nt, Artificial Sequence
  Description of Artificial Sequence: Synthetic oligonucleotide
  Sense strand starting at position 2746 of SEQ ID NO: 1559947
augccagagucuugacaaa

SEQ ID NO: 1565560 - RNA, 19 nt, Artificial Sequence
  Description of Artificial Sequence: Synthetic oligonucleotide
  Antisense strand to SEQ ID NO: 1565559
uuugucaagacucuggcau

SEQ ID NO: 1565561 - RNA, 19 nt, Artificial Sequence
  Description of Artificial Sequence: Synthetic oligonucleotide
  Sense strand starting at position 2835 of SEQ ID NO: 1559947
gguuuaggccuccagaaac

SEQ ID NO: 1565562 - RNA, 19 nt, Artificial Sequence
  Description of Artificial Sequence: Synthetic oligonucleotide
  Antisense strand to SEQ ID NO: 1565561
guuucuggaggccuaaacc

SEQ ID NO: 1565563 - RNA, 19 nt, Artificial Sequence
  Description of Artificial Sequence: Synthetic oligonucleotide
  Sense strand starting at position 2928 of SEQ ID NO: 1559947
gauuauaagcucugugugu

SEQ ID NO: 1565564 - RNA, 19 nt, Artificial Sequence
  Description of Artificial Sequence: Synthetic oligonucleotide
  Antisense strand to SEQ ID NO: 1565563
acacacagagcuuauaauc

SEQ ID NO: 1565565 - RNA, 19 nt, Artificial Sequence
  Description of Artificial Sequence: Synthetic oligonucleotide
  Sense strand starting at position 2929 of SEQ ID NO: 1559947
auuauaagcucuguguguu

SEQ ID NO: 1565566 - RNA, 19 nt, Artificial Sequence
  Description of Artificial Sequence: Synthetic oligonucleotide
  Antisense strand to SEQ ID NO: 1565565
aacacacagagcuuauaau

SEQ ID NO: 1565567 - RNA, 19 nt, Artificial Sequence
  Description of Artificial Sequence: Synthetic oligonucleotide
  Sense strand starting at position 2930 of SEQ ID NO: 1559947
uuauaagcucuguguguuc

SEQ ID NO: 1565568 - RNA, 19 nt, Artificial Sequence
  Description of Artificial Sequence: Synthetic oligonucleotide
  Antisense strand to SEQ ID NO: 1565567
gaacacacagagcuuauaa

SEQ ID NO: 1565569 - RNA, 19 nt, Artificial Sequence
  Description of Artificial Sequence: Synthetic oligonucleotide
  Sense strand starting at position 3017 of SEQ ID NO: 1559947
gaggaaaucucugggauuu

SEQ ID NO: 1565570 - RNA, 19 nt, Artificial Sequence
  Description of Artificial Sequence: Synthetic oligonucleotide
  Antisense strand to SEQ ID NO: 1565569
aaaucccagagauuuccuc

SEQ ID NO: 1565571 - RNA, 19 nt, Artificial Sequence
  Description of Artificial Sequence: Synthetic oligonucleotide
  Sense strand starting at position 3054 of SEQ ID NO: 1559947
cuuggccugucuccagauu

SEQ ID NO: 1565572 - RNA, 19 nt, Artificial Sequence
  Description of Artificial Sequence: Synthetic oligonucleotide
  Antisense strand to SEQ ID NO: 1565571
aaucuggagacaggccaag

SEQ ID NO: 1565573 - RNA, 19 nt, Artificial Sequence
  Description of Artificial Sequence: Synthetic oligonucleotide
  Sense strand starting at position 3055 of SEQ ID NO: 1559947
uuggccugucuccagauua

SEQ ID NO: 1565574 - RNA, 19 nt, Artificial Sequence
  Description of Artificial Sequence: Synthetic oligonucleotide
  Antisense strand to SEQ ID NO: 1565573
uaaucuggagacaggccaa

SEQ ID NO: 1565575 - RNA, 19 nt, Artificial Sequence
  Description of Artificial Sequence: Synthetic oligonucleotide
  Sense strand starting at position 3383 of SEQ ID NO: 1559947
cagccuguuccuggaacuu

SEQ ID NO: 1565576 - RNA, 19 nt, Artificial Sequence
  Description of Artificial Sequence: Synthetic oligonucleotide
  Antisense strand to SEQ ID NO: 1565575
aaguuccaggaacaggcug

SEQ ID NO: 1565577 - RNA, 19 nt, Artificial Sequence
  Description of Artificial Sequence: Synthetic oligonucleotide
  Sense strand starting at position 3445 of SEQ ID NO: 1559947
cagagugugagggaguuua

SEQ ID NO: 1565578 - RNA, 19 nt, Artificial Sequence
  Description of Artificial Sequence: Synthetic oligonucleotide
  Antisense strand to SEQ ID NO: 1565577
uaaacucccucacacucug

SEQ ID NO: 1565579 - RNA, 19 nt, Artificial Sequence
  Description of Artificial Sequence: Synthetic oligonucleotide
  Sense strand starting at position 3453 of SEQ ID NO: 1559947
gagggaguuuauggugaga

SEQ ID NO: 1565580 - RNA, 19 nt, Artificial Sequence
  Description of Artificial Sequence: Synthetic oligonucleotide
  Antisense strand to SEQ ID NO: 1565579
ucucaccauaaacucccuc

SEQ ID NO: 1565581 - RNA, 19 nt, Artificial Sequence
  Description of Artificial Sequence: Synthetic oligonucleotide
  Sense strand starting at position 3455 of SEQ ID NO: 1559947
gggaguuuauggugagaaa

SEQ ID NO: 1565582 - RNA, 19 nt, Artificial Sequence
  Description of Artificial Sequence: Synthetic oligonucleotide
  Antisense strand to SEQ ID NO: 1565581
uuucucaccauaaacuccc

SEQ ID NO: 1565583 - RNA, 19 nt, Artificial Sequence
  Description of Artificial Sequence: Synthetic oligonucleotide
  Sense strand starting at position 3884 of SEQ ID NO: 1559947
aacucagacugcugugagu

SEQ ID NO: 1565584 - RNA, 19 nt, Artificial Sequence
  Description of Artificial Sequence: Synthetic oligonucleotide
  Antisense strand to SEQ ID NO: 1565583
acucacagcagucugaguu

SEQ ID NO: 1565585 - RNA, 19 nt, Artificial Sequence
  Description of Artificial Sequence: Synthetic oligonucleotide
  Sense strand starting at position 3886 of SEQ ID NO: 1559947
cucagacugcugugaguuu

SEQ ID NO: 1565586 - RNA, 19 nt, Artificial Sequence
  Description of Artificial Sequence: Synthetic oligonucleotide
  Antisense strand to SEQ ID NO: 1565585
aaacucacagcagucugag

SEQ ID NO: 1565587 - RNA, 19 nt, Artificial Sequence
  Description of Artificial Sequence: Synthetic oligonucleotide
  Sense strand starting at position 3946 of SEQ ID NO: 1559947
cuggaugccucaugcaaac

SEQ ID NO: 1565588 - RNA, 19 nt, Artificial Sequence
  Description of Artificial Sequence: Synthetic oligonucleotide
  Antisense strand to SEQ ID NO: 1565587
guuugcaugaggcauccag

SEQ ID NO: 1565589 - RNA, 19 nt, Artificial Sequence
  Description of Artificial Sequence: Synthetic oligonucleotide
  Sense strand starting at position 227 of SEQ ID NO: 1559948
gugccaaagcucuaccacu

SEQ ID NO: 1565590 - RNA, 19 nt, Artificial Sequence
  Description of Artificial Sequence: Synthetic oligonucleotide
  Antisense strand to SEQ ID NO: 1565589
agugguagagcuuuggcac

SEQ ID NO: 1565591 - RNA, 19 nt, Artificial Sequence
  Description of Artificial Sequence: Synthetic oligonucleotide
  Sense strand starting at position 305 of SEQ ID NO: 1559948
guggaugcaugccuguaau

SEQ ID NO: 1565592 - RNA, 19 nt, Artificial Sequence
  Description of Artificial Sequence: Synthetic oligonucleotide
  Antisense strand to SEQ ID NO: 1565591
auuacaggcaugcauccac

SEQ ID NO: 1565593 - RNA, 19 nt, Artificial Sequence
  Description of Artificial Sequence: Synthetic oligonucleotide
  Sense strand starting at position 795 of SEQ ID NO: 1559948
uuauguuccucuugauuuc

SEQ ID NO: 1565594 - RNA, 19 nt, Artificial Sequence
  Description of Artificial Sequence: Synthetic oligonucleotide
  Antisense strand to SEQ ID NO: 1565593
gaaaucaagaggaacauaa

SEQ ID NO: 1565595 - RNA, 19 nt, Artificial Sequence
  Description of Artificial Sequence: Synthetic oligonucleotide
  Sense strand starting at position 805 of SEQ ID NO: 1559948
cuugauuucucuuggccuu

SEQ ID NO: 1565596 - RNA, 19 nt, Artificial Sequence
  Description of Artificial Sequence: Synthetic oligonucleotide
  Antisense strand to SEQ ID NO: 1565595
aaggccaagagaaaucaag

SEQ ID NO: 1565597 - RNA, 19 nt, Artificial Sequence
  Description of Artificial Sequence: Synthetic oligonucleotide
  Sense strand starting at position 912 of SEQ ID NO: 1559948
ugcccuuucuaauugaggu

SEQ ID NO: 1565598 - RNA, 19 nt, Artificial Sequence
  Description of Artificial Sequence: Synthetic oligonucleotide
  Antisense strand to SEQ ID NO: 1565597
accucaauuagaaagggca

SEQ ID NO: 1565599 - RNA, 19 nt, Artificial Sequence
  Description of Artificial Sequence: Synthetic oligonucleotide
  Sense strand starting at position 916 of SEQ ID NO: 1559948
cuuucuaauugaggucaca

SEQ ID NO: 1565600 - RNA, 19 nt, Artificial Sequence
  Description of Artificial Sequence: Synthetic oligonucleotide
  Antisense strand to SEQ ID NO: 1565599
ugugaccucaauuagaaag

SEQ ID NO: 1565601 - RNA, 19 nt, Artificial Sequence
  Description of Artificial Sequence: Synthetic oligonucleotide
  Sense strand starting at position 997 of SEQ ID NO: 1559948
gcaccuugcguucucgaga

SEQ ID NO: 1565602 - RNA, 19 nt, Artificial Sequence
  Description of Artificial Sequence: Synthetic oligonucleotide
  Antisense strand to SEQ ID NO: 1565601
ucucgagaacgcaaggugc

SEQ ID NO: 1565603 - RNA, 19 nt, Artificial Sequence
  Description of Artificial Sequence: Synthetic oligonucleotide
  Sense strand starting at position 1017 of SEQ ID NO: 1559948
cggucacucagcugggaaa

SEQ ID NO: 1565604 - RNA, 19 nt, Artificial Sequence
  Description of Artificial Sequence: Synthetic oligonucleotide
  Antisense strand to SEQ ID NO: 1565603
uuucccagcugagugaccg

SEQ ID NO: 1565605 - RNA, 19 nt, Artificial Sequence
  Description of Artificial Sequence: Synthetic oligonucleotide
  Sense strand starting at position 1018 of SEQ ID NO: 1559948
ggucacucagcugggaaau

SEQ ID NO: 1565606 - RNA, 19 nt, Artificial Sequence
  Description of Artificial Sequence: Synthetic oligonucleotide
  Antisense strand to SEQ ID NO: 1565605
auuucccagcugagugacc

SEQ ID NO: 1565607 - RNA, 19 nt, Artificial Sequence
  Description of Artificial Sequence: Synthetic oligonucleotide
  Sense strand starting at position 1281 of SEQ ID NO: 1559948
ccacauggucccugcaaga

SEQ ID NO: 1565608 - RNA, 19 nt, Artificial Sequence
  Description of Artificial Sequence: Synthetic oligonucleotide
  Antisense strand to SEQ ID NO: 1565607
ucuugcagggaccaugugg

SEQ ID NO: 1565609 - RNA, 19 nt, Artificial Sequence
  Description of Artificial Sequence: Synthetic oligonucleotide
  Sense strand starting at position 1298 of SEQ ID NO: 1559948
gagauauacuuugauaagg

SEQ ID NO: 1565610 - RNA, 19 nt, Artificial Sequence
  Description of Artificial Sequence: Synthetic oligonucleotide
  Antisense strand to SEQ ID NO: 1565609
ccuuaucaaaguauaucuc

SEQ ID NO: 1565611 - RNA, 19 nt, Artificial Sequence
  Description of Artificial Sequence: Synthetic oligonucleotide
  Sense strand starting at position 1300 of SEQ ID NO: 1559948
gauauacuuugauaaggag

SEQ ID NO: 1565612 - RNA, 19 nt, Artificial Sequence
  Description of Artificial Sequence: Synthetic oligonucleotide
  Antisense strand to SEQ ID NO: 1565611
cuccuuaucaaaguauauc

SEQ ID NO: 1565613 - RNA, 19 nt, Artificial Sequence
  Description of Artificial Sequence: Synthetic oligonucleotide
  Sense strand starting at position 1545 of SEQ ID NO: 1559948
agggauuauucagguggga

SEQ ID NO: 1565614 - RNA, 19 nt, Artificial Sequence
  Description of Artificial Sequence: Synthetic oligonucleotide
  Antisense strand to SEQ ID NO: 1565613
ucccaccugaauaaucccu

SEQ ID NO: 1565615 - RNA, 19 nt, Artificial Sequence
  Description of Artificial Sequence: Synthetic oligonucleotide
  Sense strand starting at position 1547 of SEQ ID NO: 1559948
ggauuauucaggugggagu

SEQ ID NO: 1565616 - RNA, 19 nt, Artificial Sequence
  Description of Artificial Sequence: Synthetic oligonucleotide
  Antisense strand to SEQ ID NO: 1565615
acucccaccugaauaaucc

SEQ ID NO: 1565617 - RNA, 19 nt, Artificial Sequence
  Description of Artificial Sequence: Synthetic oligonucleotide
  Sense strand starting at position 2117 of SEQ ID NO: 1559948
agcgauggagccuggaauu

SEQ ID NO: 1565618 - RNA, 19 nt, Artificial Sequence
  Description of Artificial Sequence: Synthetic oligonucleotide
  Antisense strand to SEQ ID NO: 1565617
aauuccaggcuccaucgcu

SEQ ID NO: 1565619 - RNA, 19 nt, Artificial Sequence
  Description of Artificial Sequence: Synthetic oligonucleotide
  Sense strand starting at position 2225 of SEQ ID NO: 1559948
gugccuuguacgcgacaga

SEQ ID NO: 1565620 - RNA, 19 nt, Artificial Sequence
  Description of Artificial Sequence: Synthetic oligonucleotide
  Antisense strand to SEQ ID NO: 1565619
ucugucgcguacaaggcac

SEQ ID NO: 1565621 - RNA, 19 nt, Artificial Sequence
  Description of Artificial Sequence: Synthetic oligonucleotide
  Sense strand starting at position 2293 of SEQ ID NO: 1559948
gccucucuucugcacgaau

SEQ ID NO: 1565622 - RNA, 19 nt, Artificial Sequence
  Description of Artificial Sequence: Synthetic oligonucleotide
  Antisense strand to SEQ ID NO: 1565621
auucgugcagaagagaggc

SEQ ID NO: 1565623 - RNA, 19 nt, Artificial Sequence
  Description of Artificial Sequence: Synthetic oligonucleotide
  Sense strand starting at position 2295 of SEQ ID NO: 1559948
cucucuucugcacgaauau

SEQ ID NO: 1565624 - RNA, 19 nt, Artificial Sequence
  Description of Artificial Sequence: Synthetic oligonucleotide
  Antisense strand to SEQ ID NO: 1565623
auauucgugcagaagagag

SEQ ID NO: 1565625 - RNA, 19 nt, Artificial Sequence
  Description of Artificial Sequence: Synthetic oligonucleotide
  Sense strand starting at position 2304 of SEQ ID NO: 1559948
gcacgaauaucuugccaac

SEQ ID NO: 1565626 - RNA, 19 nt, Artificial Sequence
  Description of Artificial Sequence: Synthetic oligonucleotide
  Antisense strand to SEQ ID NO: 1565625
guuggcaagauauucgugc

SEQ ID NO: 1565627 - RNA, 19 nt, Artificial Sequence
  Description of Artificial Sequence: Synthetic oligonucleotide
  Sense strand starting at position 2512 of SEQ ID NO: 1559948
ucaacucucucguguacau

SEQ ID NO: 1565628 - RNA, 19 nt, Artificial Sequence
  Description of Artificial Sequence: Synthetic oligonucleotide
  Antisense strand to SEQ ID NO: 1565627
auguacacgagagaguuga

SEQ ID NO: 1565629 - RNA, 19 nt, Artificial Sequence
  Description of Artificial Sequence: Synthetic oligonucleotide
  Sense strand starting at position 2669 of SEQ ID NO: 1559948
caagauucccagugcugag

SEQ ID NO: 1565630 - RNA, 19 nt, Artificial Sequence
  Description of Artificial Sequence: Synthetic oligonucleotide
  Antisense strand to SEQ ID NO: 1565629
cucagcacugggaaucuug

SEQ ID NO: 1565631 - RNA, 19 nt, Artificial Sequence
  Description of Artificial Sequence: Synthetic oligonucleotide
  Sense strand starting at position 2816 of SEQ ID NO: 1559948
cuucucacagucuggaaua

SEQ ID NO: 1565632 - RNA, 19 nt, Artificial Sequence
  Description of Artificial Sequence: Synthetic oligonucleotide
  Antisense strand to SEQ ID NO: 1565631
uauuccagacugugagaag

SEQ ID NO: 1565633 - RNA, 19 nt, Artificial Sequence
  Description of Artificial Sequence: Synthetic oligonucleotide
  Sense strand starting at position 2957 of SEQ ID NO: 1559948
cguacugugugaccucaga

SEQ ID NO: 1565634 - RNA, 19 nt, Artificial Sequence
  Description of Artificial Sequence: Synthetic oligonucleotide
  Antisense strand to SEQ ID NO: 1565633
ucugaggucacacaguacg

SEQ ID NO: 1565635 - RNA, 19 nt, Artificial Sequence
  Description of Artificial Sequence: Synthetic oligonucleotide
  Sense strand starting at position 3039 of SEQ ID NO: 1559948
gccuucgauuucucucauu

SEQ ID NO: 1565636 - RNA, 19 nt, Artificial Sequence
  Description of Artificial Sequence: Synthetic oligonucleotide
  Antisense strand to SEQ ID NO: 1565635
aaugagagaaaucgaaggc

SEQ ID NO: 1565637 - RNA, 19 nt, Artificial Sequence
  Description of Artificial Sequence: Synthetic oligonucleotide
  Sense strand starting at position 3042 of SEQ ID NO: 1559948
uucgauuucucucauuggu

SEQ ID NO: 1565638 - RNA, 19 nt, Artificial Sequence
  Description of Artificial Sequence: Synthetic oligonucleotide
  Antisense strand to SEQ ID NO: 1565637
accaaugagagaaaucgaa

SEQ ID NO: 1565639 - RNA, 19 nt, Artificial Sequence
  Description of Artificial Sequence: Synthetic oligonucleotide
  Sense strand starting at position 3044 of SEQ ID NO: 1559948
cgauuucucucauuggucu

SEQ ID NO: 1565640 - RNA, 19 nt, Artificial Sequence
  Description of Artificial Sequence: Synthetic oligonucleotide
  Antisense strand to SEQ ID NO: 1565639
agaccaaugagagaaaucg

SEQ ID NO: 1565641 - RNA, 19 nt, Artificial Sequence
  Description of Artificial Sequence: Synthetic oligonucleotide
  Sense strand starting at position 3048 of SEQ ID NO: 1559948
uucucucauuggucuguga

SEQ ID NO: 1565642 - RNA, 19 nt, Artificial Sequence
  Description of Artificial Sequence: Synthetic oligonucleotide
  Antisense strand to SEQ ID NO: 1565641
ucacagaccaaugagagaa

SEQ ID NO: 1565643 - RNA, 19 nt, Artificial Sequence
  Description of Artificial Sequence: Synthetic oligonucleotide
  Sense strand starting at position 3050 of SEQ ID NO: 1559948
cucucauuggucugugaaa

SEQ ID NO: 1565644 - RNA, 19 nt, Artificial Sequence
  Description of Artificial Sequence: Synthetic oligonucleotide
  Antisense strand to SEQ ID NO: 1565643
uuucacagaccaaugagag

SEQ ID NO: 1565645 - RNA, 19 nt, Artificial Sequence
  Description of Artificial Sequence: Synthetic oligonucleotide
  Sense strand starting at position 3295 of SEQ ID NO: 1559948
augagaucaugucagauag

SEQ ID NO: 1565646 - RNA, 19 nt, Artificial Sequence
  Description of Artificial Sequence: Synthetic oligonucleotide
  Antisense strand to SEQ ID NO: 1565645
cuaucugacaugaucucau

SEQ ID NO: 1565647 - RNA, 19 nt, Artificial Sequence
  Description of Artificial Sequence: Synthetic oligonucleotide
  Sense strand starting at position 3399 of SEQ ID NO: 1559948
uguucagccuuggagaaug

SEQ ID NO: 1565648 - RNA, 19 nt, Artificial Sequence
  Description of Artificial Sequence: Synthetic oligonucleotide
  Antisense strand to SEQ ID NO: 1565647
cauucuccaaggcugaaca

SEQ ID NO: 1565649 - RNA, 19 nt, Artificial Sequence
  Description of Artificial Sequence: Synthetic oligonucleotide
  Sense strand starting at position 3427 of SEQ ID NO: 1559948
cgugucagggucugauaca

SEQ ID NO: 1565650 - RNA, 19 nt, Artificial Sequence
  Description of Artificial Sequence: Synthetic oligonucleotide
  Antisense strand to SEQ ID NO: 1565649
uguaucagacccugacacg

SEQ ID NO: 1565651 - RNA, 19 nt, Artificial Sequence
  Description of Artificial Sequence: Synthetic oligonucleotide
  Sense strand starting at position 3455 of SEQ ID NO: 1559948
cucuauacaugacagagau

SEQ ID NO: 1565652 - RNA, 19 nt, Artificial Sequence
  Description of Artificial Sequence: Synthetic oligonucleotide
  Antisense strand to SEQ ID NO: 1565651
aucucugucauguauagag

SEQ ID NO: 1565653 - RNA, 19 nt, Artificial Sequence
  Description of Artificial Sequence: Synthetic oligonucleotide
  Sense strand starting at position 3494 of SEQ ID NO: 1559948
gagcguaagucauuugcuc

SEQ ID NO: 1565654 - RNA, 19 nt, Artificial Sequence
  Description of Artificial Sequence: Synthetic oligonucleotide
  Antisense strand to SEQ ID NO: 1565653
gagcaaaugacuuacgcuc

SEQ ID NO: 1565655 - RNA, 19 nt, Artificial Sequence
  Description of Artificial Sequence: Synthetic oligonucleotide
  Sense strand starting at position 3496 of SEQ ID NO: 1559948
gcguaagucauuugcucag

SEQ ID NO: 1565656 - RNA, 19 nt, Artificial Sequence
  Description of Artificial Sequence: Synthetic oligonucleotide
  Antisense strand to SEQ ID NO: 1565655
cugagcaaaugacuuacgc

SEQ ID NO: 1565657 - RNA, 19 nt, Artificial Sequence
  Description of Artificial Sequence: Synthetic oligonucleotide
  Sense strand starting at position 3568 of SEQ ID NO: 1559948
acuccaagucuuugaaagu

SEQ ID NO: 1565658 - RNA, 19 nt, Artificial Sequence
  Description of Artificial Sequence: Synthetic oligonucleotide
  Antisense strand to SEQ ID NO: 1565657
acuuucaaagacuuggagu

SEQ ID NO: 1565659 - RNA, 19 nt, Artificial Sequence
  Description of Artificial Sequence: Synthetic oligonucleotide
  Sense strand starting at position 3569 of SEQ ID NO: 1559948
cuccaagucuuugaaaguc

SEQ ID NO: 1565660 - RNA, 19 nt, Artificial Sequence
  Description of Artificial Sequence: Synthetic oligonucleotide
  Antisense strand to SEQ ID NO: 1565659
gacuuucaaagacuuggag

SEQ ID NO: 1565661 - RNA, 19 nt, Artificial Sequence
  Description of Artificial Sequence: Synthetic oligonucleotide
  Sense strand starting at position 3881 of SEQ ID NO: 1559948
gggaguaucgguuaacccu

SEQ ID NO: 1565662 - RNA, 19 nt, Artificial Sequence
  Description of Artificial Sequence: Synthetic oligonucleotide
  Antisense strand to SEQ ID NO: 1565661
aggguuaaccgauacuccc

SEQ ID NO: 1565663 - RNA, 19 nt, Artificial Sequence
  Description of Artificial Sequence: Synthetic oligonucleotide
  Sense strand starting at position 338 of SEQ ID NO: 1559949
agcgauggagccuggaauu

SEQ ID NO: 1565664 - RNA, 19 nt, Artificial Sequence
  Description of Artificial Sequence: Synthetic oligonucleotide
  Antisense strand to SEQ ID NO: 1565663
aauuccaggcuccaucgcu

SEQ ID NO: 1565665 - RNA, 19 nt, Artificial Sequence
  Description of Artificial Sequence: Synthetic oligonucleotide
  Sense strand starting at position 446 of SEQ ID NO: 1559949
gugccuuguacgcgacaga

SEQ ID NO: 1565666 - RNA, 19 nt, Artificial Sequence
  Description of Artificial Sequence: Synthetic oligonucleotide
  Antisense strand to SEQ ID NO: 1565665
ucugucgcguacaaggcac

SEQ ID NO: 1565667 - RNA, 19 nt, Artificial Sequence
  Description of Artificial Sequence: Synthetic oligonucleotide
  Sense strand starting at position 514 of SEQ ID NO: 1559949
gccucucuucugcacgaau

SEQ ID NO: 1565668 - RNA, 19 nt, Artificial Sequence
  Description of Artificial Sequence: Synthetic oligonucleotide
  Antisense strand to SEQ ID NO: 1565667
auucgugcagaagagaggc

SEQ ID NO: 1565669 - RNA, 19 nt, Artificial Sequence
  Description of Artificial Sequence: Synthetic oligonucleotide
  Sense strand starting at position 516 of SEQ ID NO: 1559949
cucucuucugcacgaauau

SEQ ID NO: 1565670 - RNA, 19 nt, Artificial Sequence
  Description of Artificial Sequence: Synthetic oligonucleotide
  Antisense strand to SEQ ID NO: 1565669
auauucgugcagaagagag

SEQ ID NO: 1565671 - RNA, 19 nt, Artificial Sequence
  Description of Artificial Sequence: Synthetic oligonucleotide
  Sense strand starting at position 525 of SEQ ID NO: 1559949
gcacgaauaucuugccaac

SEQ ID NO: 1565672 - RNA, 19 nt, Artificial Sequence
  Description of Artificial Sequence: Synthetic oligonucleotide
  Antisense strand to SEQ ID NO: 1565671
guuggcaagauauucgugc

SEQ ID NO: 1565673 - RNA, 19 nt, Artificial Sequence
  Description of Artificial Sequence: Synthetic oligonucleotide
  Sense strand starting at position 733 of SEQ ID NO: 1559949
ucaacucucucguguacau

SEQ ID NO: 1565674 - RNA, 19 nt, Artificial Sequence
  Description of Artificial Sequence: Synthetic oligonucleotide
  Antisense strand to SEQ ID NO: 1565673
auguacacgagagaguuga

SEQ ID NO: 1565675 - RNA, 19 nt, Artificial Sequence
  Description of Artificial Sequence: Synthetic oligonucleotide
  Sense strand starting at position 890 of SEQ ID NO: 1559949
caagauucccagugcugag

SEQ ID NO: 1565676 - RNA, 19 nt, Artificial Sequence
  Description of Artificial Sequence: Synthetic oligonucleotide
  Antisense strand to SEQ ID NO: 1565675
cucagcacugggaaucuug

SEQ ID NO: 1565677 - RNA, 19 nt, Artificial Sequence
  Description of Artificial Sequence: Synthetic oligonucleotide
  Sense strand starting at position 1037 of SEQ ID NO: 1559949
cuucucacagucuggaaua

SEQ ID NO: 1565678 - RNA, 19 nt, Artificial Sequence
  Description of Artificial Sequence: Synthetic oligonucleotide
  Antisense strand to SEQ ID NO: 1565677
uauuccagacugugagaag

SEQ ID NO: 1565679 - RNA, 19 nt, Artificial Sequence
  Description of Artificial Sequence: Synthetic oligonucleotide
  Sense strand starting at position 1178 of SEQ ID NO: 1559949
cguacugugugaccucaga

SEQ ID NO: 1565680 - RNA, 19 nt, Artificial Sequence
  Description of Artificial Sequence: Synthetic oligonucleotide
  Antisense strand to SEQ ID NO: 1565679
ucugaggucacacaguacg

SEQ ID NO: 1565681 - RNA, 19 nt, Artificial Sequence
  Description of Artificial Sequence: Synthetic oligonucleotide
  Sense strand starting at position 1260 of SEQ ID NO: 1559949
gccuucgauuucucucauu

SEQ ID NO: 1565682 - RNA, 19 nt, Artificial Sequence
  Description of Artificial Sequence: Synthetic oligonucleotide
  Antisense strand to SEQ ID NO: 1565681
aaugagagaaaucgaaggc

SEQ ID NO: 1565683 - RNA, 19 nt, Artificial Sequence
  Description of Artificial Sequence: Synthetic oligonucleotide
  Sense strand starting at position 1263 of SEQ ID NO: 1559949
uucgauuucucucauuggu

SEQ ID NO: 1565684 - RNA, 19 nt, Artificial Sequence
  Description of Artificial Sequence: Synthetic oligonucleotide
  Antisense strand to SEQ ID NO: 1565683
accaaugagagaaaucgaa

SEQ ID NO: 1565685 - RNA, 19 nt, Artificial Sequence
  Description of Artificial Sequence: Synthetic oligonucleotide
  Sense strand starting at position 1265 of SEQ ID NO: 1559949
cgauuucucucauuggucu

SEQ ID NO: 1565686 - RNA, 19 nt, Artificial Sequence
  Description of Artificial Sequence: Synthetic oligonucleotide
  Antisense strand to SEQ ID NO: 1565685
agaccaaugagagaaaucg

SEQ ID NO: 1565687 - RNA, 19 nt, Artificial Sequence
  Description of Artificial Sequence: Synthetic oligonucleotide
  Sense strand starting at position 1269 of SEQ ID NO: 1559949
uucucucauuggucuguga

SEQ ID NO: 1565688 - RNA, 19 nt, Artificial Sequence
  Description of Artificial Sequence: Synthetic oligonucleotide
  Antisense strand to SEQ ID NO: 1565687
ucacagaccaaugagagaa

SEQ ID NO: 1565689 - RNA, 19 nt, Artificial Sequence
  Description of Artificial Sequence: Synthetic oligonucleotide
  Sense strand starting at position 1271 of SEQ ID NO: 1559949
cucucauuggucugugaaa

SEQ ID NO: 1565690 - RNA, 19 nt, Artificial Sequence
  Description of Artificial Sequence: Synthetic oligonucleotide
  Antisense strand to SEQ ID NO: 1565689
uuucacagaccaaugagag

SEQ ID NO: 1565691 - RNA, 19 nt, Artificial Sequence
  Description of Artificial Sequence: Synthetic oligonucleotide
  Sense strand starting at position 1516 of SEQ ID NO: 1559949
augagaucaugucagauag

SEQ ID NO: 1565692 - RNA, 19 nt, Artificial Sequence
  Description of Artificial Sequence: Synthetic oligonucleotide
  Antisense strand to SEQ ID NO: 1565691
cuaucugacaugaucucau

SEQ ID NO: 1565693 - RNA, 19 nt, Artificial Sequence
  Description of Artificial Sequence: Synthetic oligonucleotide
  Sense strand starting at position 1620 of SEQ ID NO: 1559949
uguucagccuuggagaaug

SEQ ID NO: 1565694 - RNA, 19 nt, Artificial Sequence
  Description of Artificial Sequence: Synthetic oligonucleotide
  Antisense strand to SEQ ID NO: 1565693
cauucuccaaggcugaaca

SEQ ID NO: 1565695 - RNA, 19 nt, Artificial Sequence
  Description of Artificial Sequence: Synthetic oligonucleotide
  Sense strand starting at position 1648 of SEQ ID NO: 1559949
cgugucagggucugauaca

SEQ ID NO: 1565696 - RNA, 19 nt, Artificial Sequence
  Description of Artificial Sequence: Synthetic oligonucleotide
  Antisense strand to SEQ ID NO: 1565695
uguaucagacccugacacg

SEQ ID NO: 1565697 - RNA, 19 nt, Artificial Sequence
  Description of Artificial Sequence: Synthetic oligonucleotide
  Sense strand starting at position 1676 of SEQ ID NO: 1559949
cucuauacaugacagagau

SEQ ID NO: 1565698 - RNA, 19 nt, Artificial Sequence
  Description of Artificial Sequence: Synthetic oligonucleotide
  Antisense strand to SEQ ID NO: 1565697
aucucugucauguauagag

SEQ ID NO: 1565699 - RNA, 19 nt, Artificial Sequence
  Description of Artificial Sequence: Synthetic oligonucleotide
  Sense strand starting at position 1715 of SEQ ID NO: 1559949
gagcguaagucauuugcuc

SEQ ID NO: 1565700 - RNA, 19 nt, Artificial Sequence
  Description of Artificial Sequence: Synthetic oligonucleotide
  Antisense strand to SEQ ID NO: 1565699
gagcaaaugacuuacgcuc

SEQ ID NO: 1565701 - RNA, 19 nt, Artificial Sequence
  Description of Artificial Sequence: Synthetic oligonucleotide
  Sense strand starting at position 1717 of SEQ ID NO: 1559949
gcguaagucauuugcucag

SEQ ID NO: 1565702 - RNA, 19 nt, Artificial Sequence
  Description of Artificial Sequence: Synthetic oligonucleotide
  Antisense strand to SEQ ID NO: 1565701
cugagcaaaugacuuacgc

SEQ ID NO: 1565703 - RNA, 19 nt, Artificial Sequence
  Description of Artificial Sequence: Synthetic oligonucleotide
  Sense strand starting at position 1789 of SEQ ID NO: 1559949
acuccaagucuuugaaagu

SEQ ID NO: 1565704 - RNA, 19 nt, Artificial Sequence
  Description of Artificial Sequence: Synthetic oligonucleotide
  Antisense strand to SEQ ID NO: 1565703
acuuucaaagacuuggagu

SEQ ID NO: 1565705 - RNA, 19 nt, Artificial Sequence
  Description of Artificial Sequence: Synthetic oligonucleotide
  Sense strand starting at position 1790 of SEQ ID NO: 1559949
cuccaagucuuugaaaguc

SEQ ID NO: 1565706 - RNA, 19 nt, Artificial Sequence
  Description of Artificial Sequence: Synthetic oligonucleotide
  Antisense strand to SEQ ID NO: 1565705
gacuuucaaagacuuggag

SEQ ID NO: 1565707 - RNA, 19 nt, Artificial Sequence
  Description of Artificial Sequence: Synthetic oligonucleotide
  Sense strand starting at position 2102 of SEQ ID NO: 1559949
gggaguaucgguuaacccu

SEQ ID NO: 1565708 - RNA, 19 nt, Artificial Sequence
  Description of Artificial Sequence: Synthetic oligonucleotide
  Antisense strand to SEQ ID NO: 1565707
aggguuaaccgauacuccc

SEQ ID NO: 1565709 - RNA, 19 nt, Artificial Sequence
  Description of Artificial Sequence: Synthetic oligonucleotide
  Sense strand starting at position 3461 of SEQ ID NO: 1559949
cgccuuugcuuaggaaguu

SEQ ID NO: 1565710 - RNA, 19 nt, Artificial Sequence
  Description of Artificial Sequence: Synthetic oligonucleotide
  Antisense strand to SEQ ID NO: 1565709
aacuuccuaagcaaaggcg

SEQ ID NO: 1565711 - RNA, 19 nt, Artificial Sequence
  Description of Artificial Sequence: Synthetic oligonucleotide
  Sense strand starting at position 3470 of SEQ ID NO: 1559949
uuaggaaguucucuaccca

SEQ ID NO: 1565712 - RNA, 19 nt, Artificial Sequence
  Description of Artificial Sequence: Synthetic oligonucleotide
  Antisense strand to SEQ ID NO: 1565711
uggguagagaacuuccuaa

SEQ ID NO: 1565713 - RNA, 19 nt, Artificial Sequence
  Description of Artificial Sequence: Synthetic oligonucleotide
  Sense strand starting at position 3686 of SEQ ID NO: 1559949
ccugaaauuguaggacuaa

SEQ ID NO: 1565714 - RNA, 19 nt, Artificial Sequence
  Description of Artificial Sequence: Synthetic oligonucleotide
  Antisense strand to SEQ ID NO: 1565713
uuaguccuacaauuucagg

SEQ ID NO: 1565715 - RNA, 19 nt, Artificial Sequence
  Description of Artificial Sequence: Synthetic oligonucleotide
  Sense strand starting at position 3687 of SEQ ID NO: 1559949
cugaaauuguaggacuaag

SEQ ID NO: 1565716 - RNA, 19 nt, Artificial Sequence
  Description of Artificial Sequence: Synthetic oligonucleotide
  Antisense strand to SEQ ID NO: 1565715
cuuaguccuacaauuucag

SEQ ID NO: 1565717 - RNA, 19 nt, Artificial Sequence
  Description of Artificial Sequence: Synthetic oligonucleotide
  Sense strand starting at position 3711 of SEQ ID NO: 1559949
ugccgugcguguucacaua

SEQ ID NO: 1565718 - RNA, 19 nt, Artificial Sequence
  Description of Artificial Sequence: Synthetic oligonucleotide
  Antisense strand to SEQ ID NO: 1565717
uaugugaacacgcacggca

SEQ ID NO: 1565719 - RNA, 19 nt, Artificial Sequence
  Description of Artificial Sequence: Synthetic oligonucleotide
  Sense strand starting at position 3744 of SEQ ID NO: 1559949
cggucugacaucugucuaa

SEQ ID NO: 1565720 - RNA, 19 nt, Artificial Sequence
  Description of Artificial Sequence: Synthetic oligonucleotide
  Antisense strand to SEQ ID NO: 1565719
uuagacagaugucagaccg

SEQ ID NO: 1565721 - RNA, 19 nt, Artificial Sequence
  Description of Artificial Sequence: Synthetic oligonucleotide
  Sense strand starting at position 3754 of SEQ ID NO: 1559949
ucugucuaauccucuggaa

SEQ ID NO: 1565722 - RNA, 19 nt, Artificial Sequence
  Description of Artificial Sequence: Synthetic oligonucleotide
  Antisense strand to SEQ ID NO: 1565721
uuccagaggauuagacaga

SEQ ID NO: 1565723 - RNA, 19 nt, Artificial Sequence
  Description of Artificial Sequence: Synthetic oligonucleotide
  Sense strand starting at position 3756 of SEQ ID NO: 1559949
ugucuaauccucuggaauc

SEQ ID NO: 1565724 - RNA, 19 nt, Artificial Sequence
  Description of Artificial Sequence: Synthetic oligonucleotide
  Antisense strand to SEQ ID NO: 1565723
gauuccagaggauuagaca

SEQ ID NO: 1565725 - RNA, 19 nt, Artificial Sequence
  Description of Artificial Sequence: Synthetic oligonucleotide
  Sense strand starting at position 3757 of SEQ ID NO: 1559949
gucuaauccucuggaaucu

SEQ ID NO: 1565726 - RNA, 19 nt, Artificial Sequence
  Description of Artificial Sequence: Synthetic oligonucleotide
  Antisense strand to SEQ ID NO: 1565725
agauuccagaggauuagac

SEQ ID NO: 1565727 - RNA, 19 nt, Artificial Sequence
  Description of Artificial Sequence: Synthetic oligonucleotide
  Sense strand starting at position 3839 of SEQ ID NO: 1559949
gccuguggcugucuuaaag

SEQ ID NO: 1565728 - RNA, 19 nt, Artificial Sequence
  Description of Artificial Sequence: Synthetic oligonucleotide
  Antisense strand to SEQ ID NO: 1565727
cuuuaagacagccacaggc

SEQ ID NO: 1565729 - RNA, 19 nt, Artificial Sequence
  Description of Artificial Sequence: Synthetic oligonucleotide
  Sense strand starting at position 3846 of SEQ ID NO: 1559949
gcugucuuaaagggucaca

SEQ ID NO: 1565730 - RNA, 19 nt, Artificial Sequence
  Description of Artificial Sequence: Synthetic oligonucleotide
  Antisense strand to SEQ ID NO: 1565729
ugugacccuuuaagacagc

SEQ ID NO: 1565731 - RNA, 19 nt, Artificial Sequence
  Description of Artificial Sequence: Synthetic oligonucleotide
  Sense strand starting at position 3882 of SEQ ID NO: 1559949
agccuauuuguauguacau

SEQ ID NO: 1565732 - RNA, 19 nt, Artificial Sequence
  Description of Artificial Sequence: Synthetic oligonucleotide
  Antisense strand to SEQ ID NO: 1565731
auguacauacaaauaggcu

SEQ ID NO: 1565733 - RNA, 19 nt, Artificial Sequence
  Description of Artificial Sequence: Synthetic oligonucleotide
  Sense strand starting at position 3883 of SEQ ID NO: 1559949
gccuauuuguauguacauu

SEQ ID NO: 1565734 - RNA, 19 nt, Artificial Sequence
  Description of Artificial Sequence: Synthetic oligonucleotide
  Antisense strand to SEQ ID NO: 1565733
aauguacauacaaauaggc

SEQ ID NO: 1565735 - RNA, 19 nt, Artificial Sequence
  Description of Artificial Sequence: Synthetic oligonucleotide
  Sense strand starting at position 2771 of SEQ ID NO: 1559950
auuucuccaucaggaugau

SEQ ID NO: 1565736 - RNA, 19 nt, Artificial Sequence
  Description of Artificial Sequence: Synthetic oligonucleotide
  Antisense strand to SEQ ID NO: 1565735
aucauccugauggagaaau

SEQ ID NO: 1565737 - RNA, 19 nt, Artificial Sequence
  Description of Artificial Sequence: Synthetic oligonucleotide
  Sense strand starting at position 2859 of SEQ ID NO: 1559950
aggcaaacguuccagugaa

SEQ ID NO: 1565738 - RNA, 19 nt, Artificial Sequence
  Description of Artificial Sequence: Synthetic oligonucleotide
  Antisense strand to SEQ ID NO: 1565737
uucacuggaacguuugccu

SEQ ID NO: 1565739 - RNA, 19 nt, Artificial Sequence
  Description of Artificial Sequence: Synthetic oligonucleotide
  Sense strand starting at position 3206 of SEQ ID NO: 1559950
gacaacugcugcugucaca

SEQ ID NO: 1565740 - RNA, 19 nt, Artificial Sequence
  Description of Artificial Sequence: Synthetic oligonucleotide
  Antisense strand to SEQ ID NO: 1565739
ugugacagcagcaguuguc

SEQ ID NO: 1565741 - RNA, 19 nt, Artificial Sequence
  Description of Artificial Sequence: Synthetic oligonucleotide
  Sense strand starting at position 3722 of SEQ ID NO: 1559950
gcccauaacuuccggugaa

SEQ ID NO: 1565742 - RNA, 19 nt, Artificial Sequence
  Description of Artificial Sequence: Synthetic oligonucleotide
  Antisense strand to SEQ ID NO: 1565741
uucaccggaaguuaugggc

SEQ ID NO: 1565743 - RNA, 19 nt, Artificial Sequence
  Description of Artificial Sequence: Synthetic oligonucleotide
  Sense strand starting at position 3723 of SEQ ID NO: 1559950
cccauaacuuccggugaau

SEQ ID NO: 1565744 - RNA, 19 nt, Artificial Sequence
  Description of Artificial Sequence: Synthetic oligonucleotide
  Antisense strand to SEQ ID NO: 1565743
auucaccggaaguuauggg

SEQ ID NO: 1565745 - RNA, 19 nt, Artificial Sequence
  Description of Artificial Sequence: Synthetic oligonucleotide
  Sense strand starting at position 3732 of SEQ ID NO: 1559950
uccggugaaugcucaagca

SEQ ID NO: 1565746 - RNA, 19 nt, Artificial Sequence
  Description of Artificial Sequence: Synthetic oligonucleotide
  Antisense strand to SEQ ID NO: 1565745
ugcuugagcauucaccgga

SEQ ID NO: 1565747 - RNA, 19 nt, Artificial Sequence
  Description of Artificial Sequence: Synthetic oligonucleotide
  Sense strand starting at position 3746 of SEQ ID NO: 1559950
aagcaauccugcuguguag

SEQ ID NO: 1565748 - RNA, 19 nt, Artificial Sequence
  Description of Artificial Sequence: Synthetic oligonucleotide
  Antisense strand to SEQ ID NO: 1565747
cuacacagcaggauugcuu

SEQ ID NO: 1565749 - RNA, 19 nt, Artificial Sequence
  Description of Artificial Sequence: Synthetic oligonucleotide
  Sense strand starting at position 3749 of SEQ ID NO: 1559950
caauccugcuguguagaca

SEQ ID NO: 1565750 - RNA, 19 nt, Artificial Sequence
  Description of Artificial Sequence: Synthetic oligonucleotide
  Antisense strand to SEQ ID NO: 1565749
ugucuacacagcaggauug

SEQ ID NO: 1565751 - RNA, 19 nt, Artificial Sequence
  Description of Artificial Sequence: Synthetic oligonucleotide
  Sense strand starting at position 260 of SEQ ID NO: 1559951
gggcuuaaguuucuuuaag

SEQ ID NO: 1565752 - RNA, 19 nt, Artificial Sequence
  Description of Artificial Sequence: Synthetic oligonucleotide
  Antisense strand to SEQ ID NO: 1565751
cuuaaagaaacuuaagccc

SEQ ID NO: 1565753 - RNA, 19 nt, Artificial Sequence
  Description of Artificial Sequence: Synthetic oligonucleotide
  Sense strand starting at position 261 of SEQ ID NO: 1559951
ggcuuaaguuucuuuaagu

SEQ ID NO: 1565754 - RNA, 19 nt, Artificial Sequence
  Description of Artificial Sequence: Synthetic oligonucleotide
  Antisense strand to SEQ ID NO: 1565753
acuuaaagaaacuuaagcc

SEQ ID NO: 1565755 - RNA, 19 nt, Artificial Sequence
  Description of Artificial Sequence: Synthetic oligonucleotide
  Sense strand starting at position 262 of SEQ ID NO: 1559951
gcuuaaguuucuuuaagug

SEQ ID NO: 1565756 - RNA, 19 nt, Artificial Sequence
  Description of Artificial Sequence: Synthetic oligonucleotide
  Antisense strand to SEQ ID NO: 1565755
cacuuaaagaaacuuaagc

SEQ ID NO: 1565757 - RNA, 19 nt, Artificial Sequence
  Description of Artificial Sequence: Synthetic oligonucleotide
  Sense strand starting at position 274 of SEQ ID NO: 1559951
uuaaguguaagaggacuaa

SEQ ID NO: 1565758 - RNA, 19 nt, Artificial Sequence
  Description of Artificial Sequence: Synthetic oligonucleotide
  Antisense strand to SEQ ID NO: 1565757
uuaguccucuuacacuuaa

SEQ ID NO: 1565759 - RNA, 19 nt, Artificial Sequence
  Description of Artificial Sequence: Synthetic oligonucleotide
  Sense strand starting at position 339 of SEQ ID NO: 1559951
acgccagauuucugaaaga

SEQ ID NO: 1565760 - RNA, 19 nt, Artificial Sequence
  Description of Artificial Sequence: Synthetic oligonucleotide
  Antisense strand to SEQ ID NO: 1565759
ucuuucagaaaucuggcgu

SEQ ID NO: 1565761 - RNA, 19 nt, Artificial Sequence
  Description of Artificial Sequence: Synthetic oligonucleotide
  Sense strand starting at position 387 of SEQ ID NO: 1559951
ugggaacccuuucuccaaa

SEQ ID NO: 1565762 - RNA, 19 nt, Artificial Sequence
  Description of Artificial Sequence: Synthetic oligonucleotide
  Antisense strand to SEQ ID NO: 1565761
uuuggagaaaggguuccca

SEQ ID NO: 1565763 - RNA, 19 nt, Artificial Sequence
  Description of Artificial Sequence: Synthetic oligonucleotide
  Sense strand starting at position 431 of SEQ ID NO: 1559951
gcugcagaauguuucuguu

SEQ ID NO: 1565764 - RNA, 19 nt, Artificial Sequence
  Description of Artificial Sequence: Synthetic oligonucleotide
  Antisense strand to SEQ ID NO: 1565763
aacagaaacauucugcagc

SEQ ID NO: 1565765 - RNA, 19 nt, Artificial Sequence
  Description of Artificial Sequence: Synthetic oligonucleotide
  Sense strand starting at position 562 of SEQ ID NO: 1559951
agcugaaucuuugggcaaa

SEQ ID NO: 1565766 - RNA, 19 nt, Artificial Sequence
  Description of Artificial Sequence: Synthetic oligonucleotide
  Antisense strand to SEQ ID NO: 1565765
uuugcccaaagauucagcu

SEQ ID NO: 1565767 - RNA, 19 nt, Artificial Sequence
  Description of Artificial Sequence: Synthetic oligonucleotide
  Sense strand starting at position 564 of SEQ ID NO: 1559951
cugaaucuuugggcaaauu

SEQ ID NO: 1565768 - RNA, 19 nt, Artificial Sequence
  Description of Artificial Sequence: Synthetic oligonucleotide
  Antisense strand to SEQ ID NO: 1565767
aauuugcccaaagauucag

SEQ ID NO: 1565769 - RNA, 19 nt, Artificial Sequence
  Description of Artificial Sequence: Synthetic oligonucleotide
  Sense strand starting at position 654 of SEQ ID NO: 1559951
uugucaagugauuagguca

SEQ ID NO: 1565770 - RNA, 19 nt, Artificial Sequence
  Description of Artificial Sequence: Synthetic oligonucleotide
  Antisense strand to SEQ ID NO: 1565769
ugaccuaaucacuugacaa

SEQ ID NO: 1565771 - RNA, 19 nt, Artificial Sequence
  Description of Artificial Sequence: Synthetic oligonucleotide
  Sense strand starting at position 659 of SEQ ID NO: 1559951
aagugauuaggucagaguc

SEQ ID NO: 1565772 - RNA, 19 nt, Artificial Sequence
  Description of Artificial Sequence: Synthetic oligonucleotide
  Antisense strand to SEQ ID NO: 1565771
gacucugaccuaaucacuu

SEQ ID NO: 1565773 - RNA, 19 nt, Artificial Sequence
  Description of Artificial Sequence: Synthetic oligonucleotide
  Sense strand starting at position 661 of SEQ ID NO: 1559951
gugauuaggucagagucua

SEQ ID NO: 1565774 - RNA, 19 nt, Artificial Sequence
  Description of Artificial Sequence: Synthetic oligonucleotide
  Antisense strand to SEQ ID NO: 1565773
uagacucugaccuaaucac

SEQ ID NO: 1565775 - RNA, 19 nt, Artificial Sequence
  Description of Artificial Sequence: Synthetic oligonucleotide
  Sense strand starting at position 666 of SEQ ID NO: 1559951
uaggucagagucuagcaua

SEQ ID NO: 1565776 - RNA, 19 nt, Artificial Sequence
  Description of Artificial Sequence: Synthetic oligonucleotide
  Antisense strand to SEQ ID NO: 1565775
uaugcuagacucugaccua

SEQ ID NO: 1565777 - RNA, 19 nt, Artificial Sequence
  Description of Artificial Sequence: Synthetic oligonucleotide
  Sense strand starting at position 669 of SEQ ID NO: 1559951
gucagagucuagcauauau

SEQ ID NO: 1565778 - RNA, 19 nt, Artificial Sequence
  Description of Artificial Sequence: Synthetic oligonucleotide
  Antisense strand to SEQ ID NO: 1565777
auauaugcuagacucugac

SEQ ID NO: 1565779 - RNA, 19 nt, Artificial Sequence
  Description of Artificial Sequence: Synthetic oligonucleotide
  Sense strand starting at position 715 of SEQ ID NO: 1559951
uugccaucugcgcagaaga

SEQ ID NO: 1565780 - RNA, 19 nt, Artificial Sequence
  Description of Artificial Sequence: Synthetic oligonucleotide
  Antisense strand to SEQ ID NO: 1565779
ucuucugcgcagauggcaa

SEQ ID NO: 1565781 - RNA, 19 nt, Artificial Sequence
  Description of Artificial Sequence: Synthetic oligonucleotide
  Sense strand starting at position 717 of SEQ ID NO: 1559951
gccaucugcgcagaagaaa

SEQ ID NO: 1565782 - RNA, 19 nt, Artificial Sequence
  Description of Artificial Sequence: Synthetic oligonucleotide
  Antisense strand to SEQ ID NO: 1565781
uuucuucugcgcagauggc

SEQ ID NO: 1565783 - RNA, 19 nt, Artificial Sequence
  Description of Artificial Sequence: Synthetic oligonucleotide
  Sense strand starting at position 799 of SEQ ID NO: 1559951
gcuugcaguagcugaaauu

SEQ ID NO: 1565784 - RNA, 19 nt, Artificial Sequence
  Description of Artificial Sequence: Synthetic oligonucleotide
  Antisense strand to SEQ ID NO: 1565783
aauuucagcuacugcaagc

SEQ ID NO: 1565785 - RNA, 19 nt, Artificial Sequence
  Description of Artificial Sequence: Synthetic oligonucleotide
  Sense strand starting at position 806 of SEQ ID NO: 1559951
guagcugaaauucgucuuu

SEQ ID NO: 1565786 - RNA, 19 nt, Artificial Sequence
  Description of Artificial Sequence: Synthetic oligonucleotide
  Antisense strand to SEQ ID NO: 1565785
aaagacgaauuucagcuac

SEQ ID NO: 1565787 - RNA, 19 nt, Artificial Sequence
  Description of Artificial Sequence: Synthetic oligonucleotide
  Sense strand starting at position 808 of SEQ ID NO: 1559951
agcugaaauucgucuuuga

SEQ ID NO: 1565788 - RNA, 19 nt, Artificial Sequence
  Description of Artificial Sequence: Synthetic oligonucleotide
  Antisense strand to SEQ ID NO: 1565787
ucaaagacgaauuucagcu

SEQ ID NO: 1565789 - RNA, 19 nt, Artificial Sequence
  Description of Artificial Sequence: Synthetic oligonucleotide
  Sense strand starting at position 876 of SEQ ID NO: 1559951
cgaggagcccuguagggau

SEQ ID NO: 1565790 - RNA, 19 nt, Artificial Sequence
  Description of Artificial Sequence: Synthetic oligonucleotide
  Antisense strand to SEQ ID NO: 1565789
aucccuacagggcuccucg

SEQ ID NO: 1565791 - RNA, 19 nt, Artificial Sequence
  Description of Artificial Sequence: Synthetic oligonucleotide
  Sense strand starting at position 1259 of SEQ ID NO: 1559951
agcgauuccucccugcaaa

SEQ ID NO: 1565792 - RNA, 19 nt, Artificial Sequence
  Description of Artificial Sequence: Synthetic oligonucleotide
  Antisense strand to SEQ ID NO: 1565791
uuugcagggaggaaucgcu

SEQ ID NO: 1565793 - RNA, 19 nt, Artificial Sequence
  Description of Artificial Sequence: Synthetic oligonucleotide
  Sense strand starting at position 1260 of SEQ ID NO: 1559951
gcgauuccucccugcaaag

SEQ ID NO: 1565794 - RNA, 19 nt, Artificial Sequence
  Description of Artificial Sequence: Synthetic oligonucleotide
  Antisense strand to SEQ ID NO: 1565793
cuuugcagggaggaaucgc

SEQ ID NO: 1565795 - RNA, 19 nt, Artificial Sequence
  Description of Artificial Sequence: Synthetic oligonucleotide
  Sense strand starting at position 1299 of SEQ ID NO: 1559951
cucucucggugcucgaaau

SEQ ID NO: 1565796 - RNA, 19 nt, Artificial Sequence
  Description of Artificial Sequence: Synthetic oligonucleotide
  Antisense strand to SEQ ID NO: 1565795
auuucgagcaccgagagag

SEQ ID NO: 1565797 - RNA, 19 nt, Artificial Sequence
  Description of Artificial Sequence: Synthetic oligonucleotide
  Sense strand starting at position 1802 of SEQ ID NO: 1559951
gaaugccugcuuuguggaa

SEQ ID NO: 1565798 - RNA, 19 nt, Artificial Sequence
  Description of Artificial Sequence: Synthetic oligonucleotide
  Antisense strand to SEQ ID NO: 1565797
uuccacaaagcaggcauuc

SEQ ID NO: 1565799 - RNA, 19 nt, Artificial Sequence
  Description of Artificial Sequence: Synthetic oligonucleotide
  Sense strand starting at position 1806 of SEQ ID NO: 1559951
gccugcuuuguggaaacau

SEQ ID NO: 1565800 - RNA, 19 nt, Artificial Sequence
  Description of Artificial Sequence: Synthetic oligonucleotide
  Antisense strand to SEQ ID NO: 1565799
auguuuccacaaagcaggc

SEQ ID NO: 1565801 - RNA, 19 nt, Artificial Sequence
  Description of Artificial Sequence: Synthetic oligonucleotide
  Sense strand starting at position 1815 of SEQ ID NO: 1559951
guggaaacaucaugucaau

SEQ ID NO: 1565802 - RNA, 19 nt, Artificial Sequence
  Description of Artificial Sequence: Synthetic oligonucleotide
  Antisense strand to SEQ ID NO: 1565801
auugacaugauguuuccac

SEQ ID NO: 1565803 - RNA, 19 nt, Artificial Sequence
  Description of Artificial Sequence: Synthetic oligonucleotide
  Sense strand starting at position 2434 of SEQ ID NO: 1559951
ggacgugcucugugaccuu

SEQ ID NO: 1565804 - RNA, 19 nt, Artificial Sequence
  Description of Artificial Sequence: Synthetic oligonucleotide
  Antisense strand to SEQ ID NO: 1565803
aaggucacagagcacgucc

SEQ ID NO: 1565805 - RNA, 19 nt, Artificial Sequence
  Description of Artificial Sequence: Synthetic oligonucleotide
  Sense strand starting at position 2500 of SEQ ID NO: 1559951
gcagaaaggcagcgguaau

SEQ ID NO: 1565806 - RNA, 19 nt, Artificial Sequence
  Description of Artificial Sequence: Synthetic oligonucleotide
  Antisense strand to SEQ ID NO: 1565805
auuaccgcugccuuucugc

SEQ ID NO: 1565807 - RNA, 19 nt, Artificial Sequence
  Description of Artificial Sequence: Synthetic oligonucleotide
  Sense strand starting at position 2533 of SEQ ID NO: 1559951
ggaagccauucuugugaca

SEQ ID NO: 1565808 - RNA, 19 nt, Artificial Sequence
  Description of Artificial Sequence: Synthetic oligonucleotide
  Antisense strand to SEQ ID NO: 1565807
ugucacaagaauggcuucc

SEQ ID NO: 1565809 - RNA, 19 nt, Artificial Sequence
  Description of Artificial Sequence: Synthetic oligonucleotide
  Sense strand starting at position 2536 of SEQ ID NO: 1559951
agccauucuugugacacau

SEQ ID NO: 1565810 - RNA, 19 nt, Artificial Sequence
  Description of Artificial Sequence: Synthetic oligonucleotide
  Antisense strand to SEQ ID NO: 1565809
augugucacaagaauggcu

SEQ ID NO: 1565811 - RNA, 19 nt, Artificial Sequence
  Description of Artificial Sequence: Synthetic oligonucleotide
  Sense strand starting at position 2538 of SEQ ID NO: 1559951
ccauucuugugacacauuu

SEQ ID NO: 1565812 - RNA, 19 nt, Artificial Sequence
  Description of Artificial Sequence: Synthetic oligonucleotide
  Antisense strand to SEQ ID NO: 1565811
aaaugugucacaagaaugg

SEQ ID NO: 1565813 - RNA, 19 nt, Artificial Sequence
  Description of Artificial Sequence: Synthetic oligonucleotide
  Sense strand starting at position 2673 of SEQ ID NO: 1559951
agcugaauuccuggcaggu

SEQ ID NO: 1565814 - RNA, 19 nt, Artificial Sequence
  Description of Artificial Sequence: Synthetic oligonucleotide
  Antisense strand to SEQ ID NO: 1565813
accugccaggaauucagcu

SEQ ID NO: 1565815 - RNA, 19 nt, Artificial Sequence
  Description of Artificial Sequence: Synthetic oligonucleotide
  Sense strand starting at position 2675 of SEQ ID NO: 1559951
cugaauuccuggcagguca

SEQ ID NO: 1565816 - RNA, 19 nt, Artificial Sequence
  Description of Artificial Sequence: Synthetic oligonucleotide
  Antisense strand to SEQ ID NO: 1565815
ugaccugccaggaauucag

SEQ ID NO: 1565817 - RNA, 19 nt, Artificial Sequence
  Description of Artificial Sequence: Synthetic oligonucleotide
  Sense strand starting at position 2994 of SEQ ID NO: 1559951
agggcuugugcuuggguua

SEQ ID NO: 1565818 - RNA, 19 nt, Artificial Sequence
  Description of Artificial Sequence: Synthetic oligonucleotide
  Antisense strand to SEQ ID NO: 1565817
uaacccaagcacaagcccu

SEQ ID NO: 1565819 - RNA, 19 nt, Artificial Sequence
  Description of Artificial Sequence: Synthetic oligonucleotide
  Sense strand starting at position 2995 of SEQ ID NO: 1559951
gggcuugugcuuggguuaa

SEQ ID NO: 1565820 - RNA, 19 nt, Artificial Sequence
  Description of Artificial Sequence: Synthetic oligonucleotide
  Antisense strand to SEQ ID NO: 1565819
uuaacccaagcacaagccc

SEQ ID NO: 1565821 - RNA, 19 nt, Artificial Sequence
  Description of Artificial Sequence: Synthetic oligonucleotide
  Sense strand starting at position 3009 of SEQ ID NO: 1559951
guuaauauuuacugcugca

SEQ ID NO: 1565822 - RNA, 19 nt, Artificial Sequence
  Description of Artificial Sequence: Synthetic oligonucleotide
  Antisense strand to SEQ ID NO: 1565821
ugcagcaguaaauauuaac

SEQ ID NO: 1565823 - RNA, 19 nt, Artificial Sequence
  Description of Artificial Sequence: Synthetic oligonucleotide
  Sense strand starting at position 3498 of SEQ ID NO: 1559951
ccgugaucagcuguuuguu

SEQ ID NO: 1565824 - RNA, 19 nt, Artificial Sequence
  Description of Artificial Sequence: Synthetic oligonucleotide
  Antisense strand to SEQ ID NO: 1565823
aacaaacagcugaucacgg

SEQ ID NO: 1565825 - RNA, 19 nt, Artificial Sequence
  Description of Artificial Sequence: Synthetic oligonucleotide
  Sense strand starting at position 3499 of SEQ ID NO: 1559951
cgugaucagcuguuuguuu

SEQ ID NO: 1565826 - RNA, 19 nt, Artificial Sequence
  Description of Artificial Sequence: Synthetic oligonucleotide
  Antisense strand to SEQ ID NO: 1565825
aaacaaacagcugaucacg

SEQ ID NO: 1565827 - RNA, 19 nt, Artificial Sequence
  Description of Artificial Sequence: Synthetic oligonucleotide
  Sense strand starting at position 3822 of SEQ ID NO: 1559951
cucugagugaggugggaau

SEQ ID NO: 1565828 - RNA, 19 nt, Artificial Sequence
  Description of Artificial Sequence: Synthetic oligonucleotide
  Antisense strand to SEQ ID NO: 1565827
auucccaccucacucagag

SEQ ID NO: 1565829 - RNA, 19 nt, Artificial Sequence
  Description of Artificial Sequence: Synthetic oligonucleotide
  Sense strand starting at position 3873 of SEQ ID NO: 1559951
ccugguggcgguuauuaaa

SEQ ID NO: 1565830 - RNA, 19 nt, Artificial Sequence
  Description of Artificial Sequence: Synthetic oligonucleotide
  Antisense strand to SEQ ID NO: 1565829
uuuaauaaccgccaccagg

SEQ ID NO: 1565831 - RNA, 19 nt, Artificial Sequence
  Description of Artificial Sequence: Synthetic oligonucleotide
  Sense strand starting at position 61 of SEQ ID NO: 1559952
uugucaagugauuagguca

SEQ ID NO: 1565832 - RNA, 19 nt, Artificial Sequence
  Description of Artificial Sequence: Synthetic oligonucleotide
  Antisense strand to SEQ ID NO: 1565831
ugaccuaaucacuugacaa

SEQ ID NO: 1565833 - RNA, 19 nt, Artificial Sequence
  Description of Artificial Sequence: Synthetic oligonucleotide
  Sense strand starting at position 66 of SEQ ID NO: 1559952
aagugauuaggucagaguc

SEQ ID NO: 1565834 - RNA, 19 nt, Artificial Sequence
  Description of Artificial Sequence: Synthetic oligonucleotide
  Antisense strand to SEQ ID NO: 1565833
gacucugaccuaaucacuu

SEQ ID NO: 1565835 - RNA, 19 nt, Artificial Sequence
  Description of Artificial Sequence: Synthetic oligonucleotide
  Sense strand starting at position 68 of SEQ ID NO: 1559952
gugauuaggucagagucua

SEQ ID NO: 1565836 - RNA, 19 nt, Artificial Sequence
  Description of Artificial Sequence: Synthetic oligonucleotide
  Antisense strand to SEQ ID NO: 1565835
uagacucugaccuaaucac

SEQ ID NO: 1565837 - RNA, 19 nt, Artificial Sequence
  Description of Artificial Sequence: Synthetic oligonucleotide
  Sense strand starting at position 73 of SEQ ID NO: 1559952
uaggucagagucuagcaua

SEQ ID NO: 1565838 - RNA, 19 nt, Artificial Sequence
  Description of Artificial Sequence: Synthetic oligonucleotide
  Antisense strand to SEQ ID NO: 1565837
uaugcuagacucugaccua

SEQ ID NO: 1565839 - RNA, 19 nt, Artificial Sequence
  Description of Artificial Sequence: Synthetic oligonucleotide
  Sense strand starting at position 76 of SEQ ID NO: 1559952
gucagagucuagcauauau

SEQ ID NO: 1565840 - RNA, 19 nt, Artificial Sequence
  Description of Artificial Sequence: Synthetic oligonucleotide
  Antisense strand to SEQ ID NO: 1565839
auauaugcuagacucugac

SEQ ID NO: 1565841 - RNA, 19 nt, Artificial Sequence
  Description of Artificial Sequence: Synthetic oligonucleotide
  Sense strand starting at position 122 of SEQ ID NO: 1559952
uugccaucugcgcagaaga

SEQ ID NO: 1565842 - RNA, 19 nt, Artificial Sequence
  Description of Artificial Sequence: Synthetic oligonucleotide
  Antisense strand to SEQ ID NO: 1565841
ucuucugcgcagauggcaa

SEQ ID NO: 1565843 - RNA, 19 nt, Artificial Sequence
  Description of Artificial Sequence: Synthetic oligonucleotide
  Sense strand starting at position 124 of SEQ ID NO: 1559952
gccaucugcgcagaagaaa

SEQ ID NO: 1565844 - RNA, 19 nt, Artificial Sequence
  Description of Artificial Sequence: Synthetic oligonucleotide
  Antisense strand to SEQ ID NO: 1565843
uuucuucugcgcagauggc

SEQ ID NO: 1565845 - RNA, 19 nt, Artificial Sequence
  Description of Artificial Sequence: Synthetic oligonucleotide
  Sense strand starting at position 206 of SEQ ID NO: 1559952
gcuugcaguagcugaaauu

SEQ ID NO: 1565846 - RNA, 19 nt, Artificial Sequence
  Description of Artificial Sequence: Synthetic oligonucleotide
  Antisense strand to SEQ ID NO: 1565845
aauuucagcuacugcaagc

SEQ ID NO: 1565847 - RNA, 19 nt, Artificial Sequence
  Description of Artificial Sequence: Synthetic oligonucleotide
  Sense strand starting at position 213 of SEQ ID NO: 1559952
guagcugaaauucgucuuu

SEQ ID NO: 1565848 - RNA, 19 nt, Artificial Sequence
  Description of Artificial Sequence: Synthetic oligonucleotide
  Antisense strand to SEQ ID NO: 1565847
aaagacgaauuucagcuac

SEQ ID NO: 1565849 - RNA, 19 nt, Artificial Sequence
  Description of Artificial Sequence: Synthetic oligonucleotide
  Sense strand starting at position 215 of SEQ ID NO: 1559952
agcugaaauucgucuuuga

SEQ ID NO: 1565850 - RNA, 19 nt, Artificial Sequence
  Description of Artificial Sequence: Synthetic oligonucleotide
  Antisense strand to SEQ ID NO: 1565849
ucaaagacgaauuucagcu

SEQ ID NO: 1565851 - RNA, 19 nt, Artificial Sequence
  Description of Artificial Sequence: Synthetic oligonucleotide
  Sense strand starting at position 283 of SEQ ID NO: 1559952
cgaggagcccuguagggau

SEQ ID NO: 1565852 - RNA, 19 nt, Artificial Sequence
  Description of Artificial Sequence: Synthetic oligonucleotide
  Antisense strand to SEQ ID NO: 1565851
aucccuacagggcuccucg

SEQ ID NO: 1565853 - RNA, 19 nt, Artificial Sequence
  Description of Artificial Sequence: Synthetic oligonucleotide
  Sense strand starting at position 666 of SEQ ID NO: 1559952
agcgauuccucccugcaaa

SEQ ID NO: 1565854 - RNA, 19 nt, Artificial Sequence
  Description of Artificial Sequence: Synthetic oligonucleotide
  Antisense strand to SEQ ID NO: 1565853
uuugcagggaggaaucgcu

SEQ ID NO: 1565855 - RNA, 19 nt, Artificial Sequence
  Description of Artificial Sequence: Synthetic oligonucleotide
  Sense strand starting at position 667 of SEQ ID NO: 1559952
gcgauuccucccugcaaag

SEQ ID NO: 1565856 - RNA, 19 nt, Artificial Sequence
  Description of Artificial Sequence: Synthetic oligonucleotide
  Antisense strand to SEQ ID NO: 1565855
cuuugcagggaggaaucgc

SEQ ID NO: 1565857 - RNA, 19 nt, Artificial Sequence
  Description of Artificial Sequence: Synthetic oligonucleotide
  Sense strand starting at position 706 of SEQ ID NO: 1559952
cucucucggugcucgaaau

SEQ ID NO: 1565858 - RNA, 19 nt, Artificial Sequence
  Description of Artificial Sequence: Synthetic oligonucleotide
  Antisense strand to SEQ ID NO: 1565857
auuucgagcaccgagagag

SEQ ID NO: 1565859 - RNA, 19 nt, Artificial Sequence
  Description of Artificial Sequence: Synthetic oligonucleotide
  Sense strand starting at position 1209 of SEQ ID NO: 1559952
gaaugccugcuuuguggaa

SEQ ID NO: 1565860 - RNA, 19 nt, Artificial Sequence
  Description of Artificial Sequence: Synthetic oligonucleotide
  Antisense strand to SEQ ID NO: 1565859
uuccacaaagcaggcauuc

SEQ ID NO: 1565861 - RNA, 19 nt, Artificial Sequence
  Description of Artificial Sequence: Synthetic oligonucleotide
  Sense strand starting at position 1213 of SEQ ID NO: 1559952
gccugcuuuguggaaacau

SEQ ID NO: 1565862 - RNA, 19 nt, Artificial Sequence
  Description of Artificial Sequence: Synthetic oligonucleotide
  Antisense strand to SEQ ID NO: 1565861
auguuuccacaaagcaggc

SEQ ID NO: 1565863 - RNA, 19 nt, Artificial Sequence
  Description of Artificial Sequence: Synthetic oligonucleotide
  Sense strand starting at position 1222 of SEQ ID NO: 1559952
guggaaacaucaugucaau

SEQ ID NO: 1565864 - RNA, 19 nt, Artificial Sequence
  Description of Artificial Sequence: Synthetic oligonucleotide
  Antisense strand to SEQ ID NO: 1565863
auugacaugauguuuccac

SEQ ID NO: 1565865 - RNA, 19 nt, Artificial Sequence
  Description of Artificial Sequence: Synthetic oligonucleotide
  Sense strand starting at position 1841 of SEQ ID NO: 1559952
ggacgugcucugugaccuu

SEQ ID NO: 1565866 - RNA, 19 nt, Artificial Sequence
  Description of Artificial Sequence: Synthetic oligonucleotide
  Antisense strand to SEQ ID NO: 1565865
aaggucacagagcacgucc

SEQ ID NO: 1565867 - RNA, 19 nt, Artificial Sequence
  Description of Artificial Sequence: Synthetic oligonucleotide
  Sense strand starting at position 1907 of SEQ ID NO: 1559952
gcagaaaggcagcgguaau

SEQ ID NO: 1565868 - RNA, 19 nt, Artificial Sequence
  Description of Artificial Sequence: Synthetic oligonucleotide
  Antisense strand to SEQ ID NO: 1565867
auuaccgcugccuuucugc

SEQ ID NO: 1565869 - RNA, 19 nt, Artificial Sequence
  Description of Artificial Sequence: Synthetic oligonucleotide
  Sense strand starting at position 1940 of SEQ ID NO: 1559952
ggaagccauucuugugaca

SEQ ID NO: 1565870 - RNA, 19 nt, Artificial Sequence
  Description of Artificial Sequence: Synthetic oligonucleotide
  Antisense strand to SEQ ID NO: 1565869
ugucacaagaauggcuucc

SEQ ID NO: 1565871 - RNA, 19 nt, Artificial Sequence
  Description of Artificial Sequence: Synthetic oligonucleotide
  Sense strand starting at position 1943 of SEQ ID NO: 1559952
agccauucuugugacacau

SEQ ID NO: 1565872 - RNA, 19 nt, Artificial Sequence
  Description of Artificial Sequence: Synthetic oligonucleotide
  Antisense strand to SEQ ID NO: 1565871
augugucacaagaauggcu

SEQ ID NO: 1565873 - RNA, 19 nt, Artificial Sequence
  Description of Artificial Sequence: Synthetic oligonucleotide
  Sense strand starting at position 1945 of SEQ ID NO: 1559952
ccauucuugugacacauuu

SEQ ID NO: 1565874 - RNA, 19 nt, Artificial Sequence
  Description of Artificial Sequence: Synthetic oligonucleotide
  Antisense strand to SEQ ID NO: 1565873
aaaugugucacaagaaugg

SEQ ID NO: 1565875 - RNA, 19 nt, Artificial Sequence
  Description of Artificial Sequence: Synthetic oligonucleotide
  Sense strand starting at position 2080 of SEQ ID NO: 1559952
agcugaauuccuggcaggu

SEQ ID NO: 1565876 - RNA, 19 nt, Artificial Sequence
  Description of Artificial Sequence: Synthetic oligonucleotide
  Antisense strand to SEQ ID NO: 1565875
accugccaggaauucagcu

SEQ ID NO: 1565877 - RNA, 19 nt, Artificial Sequence
  Description of Artificial Sequence: Synthetic oligonucleotide
  Sense strand starting at position 2082 of SEQ ID NO: 1559952
cugaauuccuggcagguca

SEQ ID NO: 1565878 - RNA, 19 nt, Artificial Sequence
  Description of Artificial Sequence: Synthetic oligonucleotide
  Antisense strand to SEQ ID NO: 1565877
ugaccugccaggaauucag

SEQ ID NO: 1565879 - RNA, 19 nt, Artificial Sequence
  Description of Artificial Sequence: Synthetic oligonucleotide
  Sense strand starting at position 2401 of SEQ ID NO: 1559952
agggcuugugcuuggguua

SEQ ID NO: 1565880 - RNA, 19 nt, Artificial Sequence
  Description of Artificial Sequence: Synthetic oligonucleotide
  Antisense strand to SEQ ID NO: 1565879
uaacccaagcacaagcccu

SEQ ID NO: 1565881 - RNA, 19 nt, Artificial Sequence
  Description of Artificial Sequence: Synthetic oligonucleotide
  Sense strand starting at position 2402 of SEQ ID NO: 1559952
gggcuugugcuuggguuaa

SEQ ID NO: 1565882 - RNA, 19 nt, Artificial Sequence
  Description of Artificial Sequence: Synthetic oligonucleotide
  Antisense strand to SEQ ID NO: 1565881
uuaacccaagcacaagccc

SEQ ID NO: 1565883 - RNA, 19 nt, Artificial Sequence
  Description of Artificial Sequence: Synthetic oligonucleotide
  Sense strand starting at position 2416 of SEQ ID NO: 1559952
guuaauauuuacugcugca

SEQ ID NO: 1565884 - RNA, 19 nt, Artificial Sequence
  Description of Artificial Sequence: Synthetic oligonucleotide
  Antisense strand to SEQ ID NO: 1565883
ugcagcaguaaauauuaac

SEQ ID NO: 1565885 - RNA, 19 nt, Artificial Sequence
  Description of Artificial Sequence: Synthetic oligonucleotide
  Sense strand starting at position 2905 of SEQ ID NO: 1559952
ccgugaucagcuguuuguu

SEQ ID NO: 1565886 - RNA, 19 nt, Artificial Sequence
  Description of Artificial Sequence: Synthetic oligonucleotide
  Antisense strand to SEQ ID NO: 1565885
aacaaacagcugaucacgg

SEQ ID NO: 1565887 - RNA, 19 nt, Artificial Sequence
  Description of Artificial Sequence: Synthetic oligonucleotide
  Sense strand starting at position 2906 of SEQ ID NO: 1559952
cgugaucagcuguuuguuu

SEQ ID NO: 1565888 - RNA, 19 nt, Artificial Sequence
  Description of Artificial Sequence: Synthetic oligonucleotide
  Antisense strand to SEQ ID NO: 1565887
aaacaaacagcugaucacg

SEQ ID NO: 1565889 - RNA, 19 nt, Artificial Sequence
  Description of Artificial Sequence: Synthetic oligonucleotide
  Sense strand starting at position 3229 of SEQ ID NO: 1559952
cucugagugaggugggaau

SEQ ID NO: 1565890 - RNA, 19 nt, Artificial Sequence
  Description of Artificial Sequence: Synthetic oligonucleotide
  Antisense strand to SEQ ID NO: 1565889
auucccaccucacucagag

SEQ ID NO: 1565891 - RNA, 19 nt, Artificial Sequence
  Description of Artificial Sequence: Synthetic oligonucleotide
  Sense strand starting at position 3280 of SEQ ID NO: 1559952
ccugguggcgguuauuaaa

SEQ ID NO: 1565892 - RNA, 19 nt, Artificial Sequence
  Description of Artificial Sequence: Synthetic oligonucleotide
  Antisense strand to SEQ ID NO: 1565891
uuuaauaaccgccaccagg

SEQ ID NO: 1565893 - RNA, 19 nt, Artificial Sequence
  Description of Artificial Sequence: Synthetic oligonucleotide
  Sense strand starting at position 3401 of SEQ ID NO: 1559952
ucaucaucgucauccacua

SEQ ID NO: 1565894 - RNA, 19 nt, Artificial Sequence
  Description of Artificial Sequence: Synthetic oligonucleotide
  Antisense strand to SEQ ID NO: 1565893
uaguggaugacgaugauga

SEQ ID NO: 1565895 - RNA, 19 nt, Artificial Sequence
  Description of Artificial Sequence: Synthetic oligonucleotide
  Sense strand starting at position 3421 of SEQ ID NO: 1559952
gcagccugcucccuugaau

SEQ ID NO: 1565896 - RNA, 19 nt, Artificial Sequence
  Description of Artificial Sequence: Synthetic oligonucleotide
  Antisense strand to SEQ ID NO: 1565895
auucaagggagcaggcugc

SEQ ID NO: 1565897 - RNA, 19 nt, Artificial Sequence
  Description of Artificial Sequence: Synthetic oligonucleotide
  Sense strand starting at position 3424 of SEQ ID NO: 1559952
gccugcucccuugaaugaa

SEQ ID NO: 1565898 - RNA, 19 nt, Artificial Sequence
  Description of Artificial Sequence: Synthetic oligonucleotide
  Antisense strand to SEQ ID NO: 1565897
uucauucaagggagcaggc

SEQ ID NO: 1565899 - RNA, 19 nt, Artificial Sequence
  Description of Artificial Sequence: Synthetic oligonucleotide
  Sense strand starting at position 3521 of SEQ ID NO: 1559952
ggugauagccuucagugau

SEQ ID NO: 1565900 - RNA, 19 nt, Artificial Sequence
  Description of Artificial Sequence: Synthetic oligonucleotide
  Antisense strand to SEQ ID NO: 1565899
aucacugaaggcuaucacc

SEQ ID NO: 1565901 - RNA, 19 nt, Artificial Sequence
  Description of Artificial Sequence: Synthetic oligonucleotide
  Sense strand starting at position 3898 of SEQ ID NO: 1559952
gacacaguccucuguugca

SEQ ID NO: 1565902 - RNA, 19 nt, Artificial Sequence
  Description of Artificial Sequence: Synthetic oligonucleotide
  Antisense strand to SEQ ID NO: 1565901
ugcaacagaggacuguguc

SEQ ID NO: 1565903 - RNA, 19 nt, Artificial Sequence
  Description of Artificial Sequence: Synthetic oligonucleotide
  Sense strand starting at position 6 of SEQ ID NO: 1559953
cuuuaagucccagagccuu

SEQ ID NO: 1565904 - RNA, 19 nt, Artificial Sequence
  Description of Artificial Sequence: Synthetic oligonucleotide
  Antisense strand to SEQ ID NO: 1565903
aaggcucugggacuuaaag

SEQ ID NO: 1565905 - RNA, 19 nt, Artificial Sequence
  Description of Artificial Sequence: Synthetic oligonucleotide
  Sense strand starting at position 115 of SEQ ID NO: 1559953
ugggaacuguguucucuuu

SEQ ID NO: 1565906 - RNA, 19 nt, Artificial Sequence
  Description of Artificial Sequence: Synthetic oligonucleotide
  Antisense strand to SEQ ID NO: 1565905
aaagagaacacaguuccca

SEQ ID NO: 1565907 - RNA, 19 nt, Artificial Sequence
  Description of Artificial Sequence: Synthetic oligonucleotide
  Sense strand starting at position 117 of SEQ ID NO: 1559953
ggaacuguguucucuuuau

SEQ ID NO: 1565908 - RNA, 19 nt, Artificial Sequence
  Description of Artificial Sequence: Synthetic oligonucleotide
  Antisense strand to SEQ ID NO: 1565907
auaaagagaacacaguucc

SEQ ID NO: 1565909 - RNA, 19 nt, Artificial Sequence
  Description of Artificial Sequence: Synthetic oligonucleotide
  Sense strand starting at position 176 of SEQ ID NO: 1559953
ggccaccaugccuguuaaa

SEQ ID NO: 1565910 - RNA, 19 nt, Artificial Sequence
  Description of Artificial Sequence: Synthetic oligonucleotide
  Antisense strand to SEQ ID NO: 1565909
uuuaacaggcaugguggcc

SEQ ID NO: 1565911 - RNA, 19 nt, Artificial Sequence
  Description of Artificial Sequence: Synthetic oligonucleotide
  Sense strand starting at position 225 of SEQ ID NO: 1559953
ccaugucucccucaccaga

SEQ ID NO: 1565912 - RNA, 19 nt, Artificial Sequence
  Description of Artificial Sequence: Synthetic oligonucleotide
  Antisense strand to SEQ ID NO: 1565911
ucuggugagggagacaugg

SEQ ID NO: 1565913 - RNA, 19 nt, Artificial Sequence
  Description of Artificial Sequence: Synthetic oligonucleotide
  Sense strand starting at position 359 of SEQ ID NO: 1559953
cgagacuugacccagucau

SEQ ID NO: 1565914 - RNA, 19 nt, Artificial Sequence
  Description of Artificial Sequence: Synthetic oligonucleotide
  Antisense strand to SEQ ID NO: 1565913
augacugggucaagucucg

SEQ ID NO: 1565915 - RNA, 19 nt, Artificial Sequence
  Description of Artificial Sequence: Synthetic oligonucleotide
  Sense strand starting at position 502 of SEQ ID NO: 1559953
agagacugcuucucuguga

SEQ ID NO: 1565916 - RNA, 19 nt, Artificial Sequence
  Description of Artificial Sequence: Synthetic oligonucleotide
  Antisense strand to SEQ ID NO: 1565915
ucacagagaagcagucucu

SEQ ID NO: 1565917 - RNA, 19 nt, Artificial Sequence
  Description of Artificial Sequence: Synthetic oligonucleotide
  Sense strand starting at position 503 of SEQ ID NO: 1559953
gagacugcuucucugugaa

SEQ ID NO: 1565918 - RNA, 19 nt, Artificial Sequence
  Description of Artificial Sequence: Synthetic oligonucleotide
  Antisense strand to SEQ ID NO: 1565917
uucacagagaagcagucuc

SEQ ID NO: 1565919 - RNA, 19 nt, Artificial Sequence
  Description of Artificial Sequence: Synthetic oligonucleotide
  Sense strand starting at position 696 of SEQ ID NO: 1559953
aagaucugaugggaaagaa

SEQ ID NO: 1565920 - RNA, 19 nt, Artificial Sequence
  Description of Artificial Sequence: Synthetic oligonucleotide
  Antisense strand to SEQ ID NO: 1565919
uucuuucccaucagaucuu

SEQ ID NO: 1565921 - RNA, 19 nt, Artificial Sequence
  Description of Artificial Sequence: Synthetic oligonucleotide
  Sense strand starting at position 725 of SEQ ID NO: 1559953
ggugaaaucuacccaggcu

SEQ ID NO: 1565922 - RNA, 19 nt, Artificial Sequence
  Description of Artificial Sequence: Synthetic oligonucleotide
  Antisense strand to SEQ ID NO: 1565921
agccuggguagauuucacc

SEQ ID NO: 1565923 - RNA, 19 nt, Artificial Sequence
  Description of Artificial Sequence: Synthetic oligonucleotide
  Sense strand starting at position 982 of SEQ ID NO: 1559953
ggcaaacuuugcucccaaa

SEQ ID NO: 1565924 - RNA, 19 nt, Artificial Sequence
  Description of Artificial Sequence: Synthetic oligonucleotide
  Antisense strand to SEQ ID NO: 1565923
uuugggagcaaaguuugcc

SEQ ID NO: 1565925 - RNA, 19 nt, Artificial Sequence
  Description of Artificial Sequence: Synthetic oligonucleotide
  Sense strand starting at position 1184 of SEQ ID NO: 1559953
gguuuccagcuuuauacga

SEQ ID NO: 1565926 - RNA, 19 nt, Artificial Sequence
  Description of Artificial Sequence: Synthetic oligonucleotide
  Antisense strand to SEQ ID NO: 1565925
ucguauaaagcuggaaacc

SEQ ID NO: 1565927 - RNA, 19 nt, Artificial Sequence
  Description of Artificial Sequence: Synthetic oligonucleotide
  Sense strand starting at position 2744 of SEQ ID NO: 1559953
augagcuuguuguugagaa

SEQ ID NO: 1565928 - RNA, 19 nt, Artificial Sequence
  Description of Artificial Sequence: Synthetic oligonucleotide
  Antisense strand to SEQ ID NO: 1565927
uucucaacaacaagcucau

SEQ ID NO: 1565929 - RNA, 19 nt, Artificial Sequence
  Description of Artificial Sequence: Synthetic oligonucleotide
  Sense strand starting at position 2746 of SEQ ID NO: 1559953
gagcuuguuguugagaaua

SEQ ID NO: 1565930 - RNA, 19 nt, Artificial Sequence
  Description of Artificial Sequence: Synthetic oligonucleotide
  Antisense strand to SEQ ID NO: 1565929
uauucucaacaacaagcuc

SEQ ID NO: 1565931 - RNA, 19 nt, Artificial Sequence
  Description of Artificial Sequence: Synthetic oligonucleotide
  Sense strand starting at position 2834 of SEQ ID NO: 1559953
uggagaggcugcucugagu

SEQ ID NO: 1565932 - RNA, 19 nt, Artificial Sequence
  Description of Artificial Sequence: Synthetic oligonucleotide
  Antisense strand to SEQ ID NO: 1565931
acucagagcagccucucca

SEQ ID NO: 1565933 - RNA, 19 nt, Artificial Sequence
  Description of Artificial Sequence: Synthetic oligonucleotide
  Sense strand starting at position 2845 of SEQ ID NO: 1559953
cucugagugcccuacaagu

SEQ ID NO: 1565934 - RNA, 19 nt, Artificial Sequence
  Description of Artificial Sequence: Synthetic oligonucleotide
  Antisense strand to SEQ ID NO: 1565933
acuuguagggcacucagag

SEQ ID NO: 1565935 - RNA, 19 nt, Artificial Sequence
  Description of Artificial Sequence: Synthetic oligonucleotide
  Sense strand starting at position 3006 of SEQ ID NO: 1559953
ccacacuuacuguagguaa

SEQ ID NO: 1565936 - RNA, 19 nt, Artificial Sequence
  Description of Artificial Sequence: Synthetic oligonucleotide
  Antisense strand to SEQ ID NO: 1565935
uuaccuacaguaagugugg

SEQ ID NO: 1565937 - RNA, 19 nt, Artificial Sequence
  Description of Artificial Sequence: Synthetic oligonucleotide
  Sense strand starting at position 3008 of SEQ ID NO: 1559953
acacuuacuguagguaaau

SEQ ID NO: 1565938 - RNA, 19 nt, Artificial Sequence
  Description of Artificial Sequence: Synthetic oligonucleotide
  Antisense strand to SEQ ID NO: 1565937
auuuaccuacaguaagugu

SEQ ID NO: 1565939 - RNA, 19 nt, Artificial Sequence
  Description of Artificial Sequence: Synthetic oligonucleotide
  Sense strand starting at position 3050 of SEQ ID NO: 1559953
uaacuuuacggcuguauua

SEQ ID NO: 1565940 - RNA, 19 nt, Artificial Sequence
  Description of Artificial Sequence: Synthetic oligonucleotide
  Antisense strand to SEQ ID NO: 1565939
uaauacagccguaaaguua

SEQ ID NO: 1565941 - RNA, 19 nt, Artificial Sequence
  Description of Artificial Sequence: Synthetic oligonucleotide
  Sense strand starting at position 3052 of SEQ ID NO: 1559953
acuuuacggcuguauuaca

SEQ ID NO: 1565942 - RNA, 19 nt, Artificial Sequence
  Description of Artificial Sequence: Synthetic oligonucleotide
  Antisense strand to SEQ ID NO: 1565941
uguaauacagccguaaagu

SEQ ID NO: 1565943 - RNA, 19 nt, Artificial Sequence
  Description of Artificial Sequence: Synthetic oligonucleotide
  Sense strand starting at position 3094 of SEQ ID NO: 1559953
agcuauaagcagugaacaa

SEQ ID NO: 1565944 - RNA, 19 nt, Artificial Sequence
  Description of Artificial Sequence: Synthetic oligonucleotide
  Antisense strand to SEQ ID NO: 1565943
uuguucacugcuuauagcu

SEQ ID NO: 1565945 - RNA, 19 nt, Artificial Sequence
  Description of Artificial Sequence: Synthetic oligonucleotide
  Sense strand starting at position 3105 of SEQ ID NO: 1559953
gugaacaauuaagaaacua

SEQ ID NO: 1565946 - RNA, 19 nt, Artificial Sequence
  Description of Artificial Sequence: Synthetic oligonucleotide
  Antisense strand to SEQ ID NO: 1565945
uaguuucuuaauuguucac

SEQ ID NO: 1565947 - RNA, 19 nt, Artificial Sequence
  Description of Artificial Sequence: Synthetic oligonucleotide
  Sense strand starting at position 3134 of SEQ ID NO: 1559953
gugggugcaaccuguaaca

SEQ ID NO: 1565948 - RNA, 19 nt, Artificial Sequence
  Description of Artificial Sequence: Synthetic oligonucleotide
  Antisense strand to SEQ ID NO: 1565947
uguuacagguugcacccac

SEQ ID NO: 1565949 - RNA, 19 nt, Artificial Sequence
  Description of Artificial Sequence: Synthetic oligonucleotide
  Sense strand starting at position 3278 of SEQ ID NO: 1559953
ccagucaugcaagggugaa

SEQ ID NO: 1565950 - RNA, 19 nt, Artificial Sequence
  Description of Artificial Sequence: Synthetic oligonucleotide
  Antisense strand to SEQ ID NO: 1565949
uucacccuugcaugacugg

SEQ ID NO: 1565951 - RNA, 19 nt, Artificial Sequence
  Description of Artificial Sequence: Synthetic oligonucleotide
  Sense strand starting at position 3319 of SEQ ID NO: 1559953
aggaucaacuguuuccgua

SEQ ID NO: 1565952 - RNA, 19 nt, Artificial Sequence
  Description of Artificial Sequence: Synthetic oligonucleotide
  Antisense strand to SEQ ID NO: 1565951
uacggaaacaguugauccu

SEQ ID NO: 1565953 - RNA, 19 nt, Artificial Sequence
  Description of Artificial Sequence: Synthetic oligonucleotide
  Sense strand starting at position 3321 of SEQ ID NO: 1559953
gaucaacuguuuccguauu

SEQ ID NO: 1565954 - RNA, 19 nt, Artificial Sequence
  Description of Artificial Sequence: Synthetic oligonucleotide
  Antisense strand to SEQ ID NO: 1565953
aauacggaaacaguugauc

SEQ ID NO: 1565955 - RNA, 19 nt, Artificial Sequence
  Description of Artificial Sequence: Synthetic oligonucleotide
  Sense strand starting at position 3399 of SEQ ID NO: 1559953
cccagaacguauccuaaau

SEQ ID NO: 1565956 - RNA, 19 nt, Artificial Sequence
  Description of Artificial Sequence: Synthetic oligonucleotide
  Antisense strand to SEQ ID NO: 1565955
auuuaggauacguucuggg

SEQ ID NO: 1565957 - RNA, 19 nt, Artificial Sequence
  Description of Artificial Sequence: Synthetic oligonucleotide
  Sense strand starting at position 3443 of SEQ ID NO: 1559953
acugauuguaguggugaaa

SEQ ID NO: 1565958 - RNA, 19 nt, Artificial Sequence
  Description of Artificial Sequence: Synthetic oligonucleotide
  Antisense strand to SEQ ID NO: 1565957
uuucaccacuacaaucagu

SEQ ID NO: 1565959 - RNA, 19 nt, Artificial Sequence
  Description of Artificial Sequence: Synthetic oligonucleotide
  Sense strand starting at position 3477 of SEQ ID NO: 1559953
aaacguuccucagugcaga

SEQ ID NO: 1565960 - RNA, 19 nt, Artificial Sequence
  Description of Artificial Sequence: Synthetic oligonucleotide
  Antisense strand to SEQ ID NO: 1565959
ucugcacugaggaacguuu

SEQ ID NO: 1565961 - RNA, 19 nt, Artificial Sequence
  Description of Artificial Sequence: Synthetic oligonucleotide
  Sense strand starting at position 3552 of SEQ ID NO: 1559953
ucaucucugcacuggcaua

SEQ ID NO: 1565962 - RNA, 19 nt, Artificial Sequence
  Description of Artificial Sequence: Synthetic oligonucleotide
  Antisense strand to SEQ ID NO: 1565961
uaugccagugcagagauga

SEQ ID NO: 1565963 - RNA, 19 nt, Artificial Sequence
  Description of Artificial Sequence: Synthetic oligonucleotide
  Sense strand starting at position 3557 of SEQ ID NO: 1559953
ucugcacuggcauaagaaa

SEQ ID NO: 1565964 - RNA, 19 nt, Artificial Sequence
  Description of Artificial Sequence: Synthetic oligonucleotide
  Antisense strand to SEQ ID NO: 1565963
uuucuuaugccagugcaga

SEQ ID NO: 1565965 - RNA, 19 nt, Artificial Sequence
  Description of Artificial Sequence: Synthetic oligonucleotide
  Sense strand starting at position 3564 of SEQ ID NO: 1559953
uggcauaagaaagguguau

SEQ ID NO: 1565966 - RNA, 19 nt, Artificial Sequence
  Description of Artificial Sequence: Synthetic oligonucleotide
  Antisense strand to SEQ ID NO: 1565965
auacaccuuucuuaugcca

SEQ ID NO: 1565967 - RNA, 19 nt, Artificial Sequence
  Description of Artificial Sequence: Synthetic oligonucleotide
  Sense strand starting at position 3566 of SEQ ID NO: 1559953
gcauaagaaagguguauaa

SEQ ID NO: 1565968 - RNA, 19 nt, Artificial Sequence
  Description of Artificial Sequence: Synthetic oligonucleotide
  Antisense strand to SEQ ID NO: 1565967
uuauacaccuuucuuaugc

SEQ ID NO: 1565969 - RNA, 19 nt, Artificial Sequence
  Description of Artificial Sequence: Synthetic oligonucleotide
  Sense strand starting at position 3648 of SEQ ID NO: 1559953
gggccaucucaugguggga

SEQ ID NO: 1565970 - RNA, 19 nt, Artificial Sequence
  Description of Artificial Sequence: Synthetic oligonucleotide
  Antisense strand to SEQ ID NO: 1565969
ucccaccaugagauggccc

SEQ ID NO: 1565971 - RNA, 19 nt, Artificial Sequence
  Description of Artificial Sequence: Synthetic oligonucleotide
  Sense strand starting at position 3651 of SEQ ID NO: 1559953
ccaucucauggugggagua

SEQ ID NO: 1565972 - RNA, 19 nt, Artificial Sequence
  Description of Artificial Sequence: Synthetic oligonucleotide
  Antisense strand to SEQ ID NO: 1565971
uacucccaccaugagaugg

SEQ ID NO: 1565973 - RNA, 19 nt, Artificial Sequence
  Description of Artificial Sequence: Synthetic oligonucleotide
  Sense strand starting at position 3671 of SEQ ID NO: 1559953
aggcaaaucucacuuugau

SEQ ID NO: 1565974 - RNA, 19 nt, Artificial Sequence
  Description of Artificial Sequence: Synthetic oligonucleotide
  Antisense strand to SEQ ID NO: 1565973
aucaaagugagauuugccu

SEQ ID NO: 1565975 - RNA, 19 nt, Artificial Sequence
  Description of Artificial Sequence: Synthetic oligonucleotide
  Sense strand starting at position 3909 of SEQ ID NO: 1559953
uuaggauacuacuauagac

SEQ ID NO: 1565976 - RNA, 19 nt, Artificial Sequence
  Description of Artificial Sequence: Synthetic oligonucleotide
  Antisense strand to SEQ ID NO: 1565975
gucuauaguaguauccuaa

SEQ ID NO: 1565977 - RNA, 19 nt, Artificial Sequence
  Description of Artificial Sequence: Synthetic oligonucleotide
  Sense strand starting at position 3960 of SEQ ID NO: 1559953
uuauccuccugguucuaga

SEQ ID NO: 1565978 - RNA, 19 nt, Artificial Sequence
  Description of Artificial Sequence: Synthetic oligonucleotide
  Antisense strand to SEQ ID NO: 1565977
ucuagaaccaggaggauaa

SEQ ID NO: 1565979 - RNA, 19 nt, Artificial Sequence
  Description of Artificial Sequence: Synthetic oligonucleotide
  Sense strand starting at position 3970 of SEQ ID NO: 1559953
gguucuagaugcccagaua

SEQ ID NO: 1565980 - RNA, 19 nt, Artificial Sequence
  Description of Artificial Sequence: Synthetic oligonucleotide
  Antisense strand to SEQ ID NO: 1565979
uaucugggcaucuagaacc

SEQ ID NO: 1565981 - RNA, 19 nt, Artificial Sequence
  Description of Artificial Sequence: Synthetic oligonucleotide
  Sense strand starting at position 3971 of SEQ ID NO: 1559953
guucuagaugcccagauaa

SEQ ID NO: 1565982 - RNA, 19 nt, Artificial Sequence
  Description of Artificial Sequence: Synthetic oligonucleotide
  Antisense strand to SEQ ID NO: 1565981
uuaucugggcaucuagaac

SEQ ID NO: 1565983 - RNA, 19 nt, Artificial Sequence
  Description of Artificial Sequence: Synthetic oligonucleotide
  Sense strand starting at position 1 of SEQ ID NO: 1559954
agguuuggucauuagugac

SEQ ID NO: 1565984 - RNA, 19 nt, Artificial Sequence
  Description of Artificial Sequence: Synthetic oligonucleotide
  Antisense strand to SEQ ID NO: 1565983
gucacuaaugaccaaaccu

SEQ ID NO: 1565985 - RNA, 19 nt, Artificial Sequence
  Description of Artificial Sequence: Synthetic oligonucleotide
  Sense strand starting at position 130 of SEQ ID NO: 1559954
ccaugaaacugucuuccag

SEQ ID NO: 1565986 - RNA, 19 nt, Artificial Sequence
  Description of Artificial Sequence: Synthetic oligonucleotide
  Antisense strand to SEQ ID NO: 1565985
cuggaagacaguuucaugg

SEQ ID NO: 1565987 - RNA, 19 nt, Artificial Sequence
  Description of Artificial Sequence: Synthetic oligonucleotide
  Sense strand starting at position 132 of SEQ ID NO: 1559954
augaaacugucuuccaguu

SEQ ID NO: 1565988 - RNA, 19 nt, Artificial Sequence
  Description of Artificial Sequence: Synthetic oligonucleotide
  Antisense strand to SEQ ID NO: 1565987
aacuggaagacaguuucau

SEQ ID NO: 1565989 - RNA, 19 nt, Artificial Sequence
  Description of Artificial Sequence: Synthetic oligonucleotide
  Sense strand starting at position 152 of SEQ ID NO: 1559954
uugguaagacuuggugaga

SEQ ID NO: 1565990 - RNA, 19 nt, Artificial Sequence
  Description of Artificial Sequence: Synthetic oligonucleotide
  Antisense strand to SEQ ID NO: 1565989
ucucaccaagucuuaccaa

SEQ ID NO: 1565991 - RNA, 19 nt, Artificial Sequence
  Description of Artificial Sequence: Synthetic oligonucleotide
  Sense strand starting at position 153 of SEQ ID NO: 1559954
ugguaagacuuggugagaa

SEQ ID NO: 1565992 - RNA, 19 nt, Artificial Sequence
  Description of Artificial Sequence: Synthetic oligonucleotide
  Antisense strand to SEQ ID NO: 1565991
uucucaccaagucuuacca

SEQ ID NO: 1565993 - RNA, 19 nt, Artificial Sequence
  Description of Artificial Sequence: Synthetic oligonucleotide
  Sense strand starting at position 176 of SEQ ID NO: 1559954
auuccaaucccagggaugu

SEQ ID NO: 1565994 - RNA, 19 nt, Artificial Sequence
  Description of Artificial Sequence: Synthetic oligonucleotide
  Antisense strand to SEQ ID NO: 1565993
acaucccugggauuggaau

SEQ ID NO: 1565995 - RNA, 19 nt, Artificial Sequence
  Description of Artificial Sequence: Synthetic oligonucleotide
  Sense strand starting at position 237 of SEQ ID NO: 1559954
acagaaaggcucuggcaga

SEQ ID NO: 1565996 - RNA, 19 nt, Artificial Sequence
  Description of Artificial Sequence: Synthetic oligonucleotide
  Antisense strand to SEQ ID NO: 1565995
ucugccagagccuuucugu

SEQ ID NO: 1565997 - RNA, 19 nt, Artificial Sequence
  Description of Artificial Sequence: Synthetic oligonucleotide
  Sense strand starting at position 278 of SEQ ID NO: 1559954
gauguuugacgccagauac

SEQ ID NO: 1565998 - RNA, 19 nt, Artificial Sequence
  Description of Artificial Sequence: Synthetic oligonucleotide
  Antisense strand to SEQ ID NO: 1565997
guaucuggcgucaaacauc

SEQ ID NO: 1565999 - RNA, 19 nt, Artificial Sequence
  Description of Artificial Sequence: Synthetic oligonucleotide
  Sense strand starting at position 875 of SEQ ID NO: 1559954
ccuggcugaucuucuaaca

SEQ ID NO: 1566000 - RNA, 19 nt, Artificial Sequence
  Description of Artificial Sequence: Synthetic oligonucleotide
  Antisense strand to SEQ ID NO: 1565999
uguuagaagaucagccagg

SEQ ID NO: 1566001 - RNA, 19 nt, Artificial Sequence
  Description of Artificial Sequence: Synthetic oligonucleotide
  Sense strand starting at position 939 of SEQ ID NO: 1559954
ugggccagauaucuuuauu

SEQ ID NO: 1566002 - RNA, 19 nt, Artificial Sequence
  Description of Artificial Sequence: Synthetic oligonucleotide
  Antisense strand to SEQ ID NO: 1566001
aauaaagauaucuggccca

SEQ ID NO: 1566003 - RNA, 19 nt, Artificial Sequence
  Description of Artificial Sequence: Synthetic oligonucleotide
  Sense strand starting at position 1073 of SEQ ID NO: 1559954
cucgcuuauuugccuauua

SEQ ID NO: 1566004 - RNA, 19 nt, Artificial Sequence
  Description of Artificial Sequence: Synthetic oligonucleotide
  Antisense strand to SEQ ID NO: 1566003
uaauaggcaaauaagcgag

SEQ ID NO: 1566005 - RNA, 19 nt, Artificial Sequence
  Description of Artificial Sequence: Synthetic oligonucleotide
  Sense strand starting at position 1074 of SEQ ID NO: 1559954
ucgcuuauuugccuauuaa

SEQ ID NO: 1566006 - RNA, 19 nt, Artificial Sequence
  Description of Artificial Sequence: Synthetic oligonucleotide
  Antisense strand to SEQ ID NO: 1566005
uuaauaggcaaauaagcga

SEQ ID NO: 1566007 - RNA, 19 nt, Artificial Sequence
  Description of Artificial Sequence: Synthetic oligonucleotide
  Sense strand starting at position 1075 of SEQ ID NO: 1559954
cgcuuauuugccuauuaag

SEQ ID NO: 1566008 - RNA, 19 nt, Artificial Sequence
  Description of Artificial Sequence: Synthetic oligonucleotide
  Antisense strand to SEQ ID NO: 1566007
cuuaauaggcaaauaagcg

SEQ ID NO: 1566009 - RNA, 19 nt, Artificial Sequence
  Description of Artificial Sequence: Synthetic oligonucleotide
  Sense strand starting at position 1115 of SEQ ID NO: 1559954
gaggaauucuugucuguau

SEQ ID NO: 1566010 - RNA, 19 nt, Artificial Sequence
  Description of Artificial Sequence: Synthetic oligonucleotide
  Antisense strand to SEQ ID NO: 1566009
auacagacaagaauuccuc

SEQ ID NO: 1566011 - RNA, 19 nt, Artificial Sequence
  Description of Artificial Sequence: Synthetic oligonucleotide
  Sense strand starting at position 1116 of SEQ ID NO: 1559954
aggaauucuugucuguauu

SEQ ID NO: 1566012 - RNA, 19 nt, Artificial Sequence
  Description of Artificial Sequence: Synthetic oligonucleotide
  Antisense strand to SEQ ID NO: 1566011
aauacagacaagaauuccu

SEQ ID NO: 1566013 - RNA, 19 nt, Artificial Sequence
  Description of Artificial Sequence: Synthetic oligonucleotide
  Sense strand starting at position 1290 of SEQ ID NO: 1559954
gcgccuuucccaguucuga

SEQ ID NO: 1566014 - RNA, 19 nt, Artificial Sequence
  Description of Artificial Sequence: Synthetic oligonucleotide
  Antisense strand to SEQ ID NO: 1566013
ucagaacugggaaaggcgc

SEQ ID NO: 1566015 - RNA, 19 nt, Artificial Sequence
  Description of Artificial Sequence: Synthetic oligonucleotide
  Sense strand starting at position 1861 of SEQ ID NO: 1559954
cugcgauagcugcugcuaa

SEQ ID NO: 1566016 - RNA, 19 nt, Artificial Sequence
  Description of Artificial Sequence: Synthetic oligonucleotide
  Antisense strand to SEQ ID NO: 1566015
uuagcagcagcuaucgcag

SEQ ID NO: 1566017 - RNA, 19 nt, Artificial Sequence
  Description of Artificial Sequence: Synthetic oligonucleotide
  Sense strand starting at position 2056 of SEQ ID NO: 1559954
auucuaaggccucagugau

SEQ ID NO: 1566018 - RNA, 19 nt, Artificial Sequence
  Description of Artificial Sequence: Synthetic oligonucleotide
  Antisense strand to SEQ ID NO: 1566017
aucacugaggccuuagaau

SEQ ID NO: 1566019 - RNA, 19 nt, Artificial Sequence
  Description of Artificial Sequence: Synthetic oligonucleotide
  Sense strand starting at position 2068 of SEQ ID NO: 1559954
cagugauuggccuacagaa

SEQ ID NO: 1566020 - RNA, 19 nt, Artificial Sequence
  Description of Artificial Sequence: Synthetic oligonucleotide
  Antisense strand to SEQ ID NO: 1566019
uucuguaggccaaucacug

SEQ ID NO: 1566021 - RNA, 19 nt, Artificial Sequence
  Description of Artificial Sequence: Synthetic oligonucleotide
  Sense strand starting at position 2098 of SEQ ID NO: 1559954
ggcggaguccuauagaauu

SEQ ID NO: 1566022 - RNA, 19 nt, Artificial Sequence
  Description of Artificial Sequence: Synthetic oligonucleotide
  Antisense strand to SEQ ID NO: 1566021
aauucuauaggacuccgcc

SEQ ID NO: 1566023 - RNA, 19 nt, Artificial Sequence
  Description of Artificial Sequence: Synthetic oligonucleotide
  Sense strand starting at position 2126 of SEQ ID NO: 1559954
ggagcugugcacuacggaa

SEQ ID NO: 1566024 - RNA, 19 nt, Artificial Sequence
  Description of Artificial Sequence: Synthetic oligonucleotide
  Antisense strand to SEQ ID NO: 1566023
uuccguagugcacagcucc

SEQ ID NO: 1566025 - RNA, 19 nt, Artificial Sequence
  Description of Artificial Sequence: Synthetic oligonucleotide
  Sense strand starting at position 2440 of SEQ ID NO: 1559954
gaauaaaugugauuaaucg

SEQ ID NO: 1566026 - RNA, 19 nt, Artificial Sequence
  Description of Artificial Sequence: Synthetic oligonucleotide
  Antisense strand to SEQ ID NO: 1566025
cgauuaaucacauuuauuc

SEQ ID NO: 1566027 - RNA, 19 nt, Artificial Sequence
  Description of Artificial Sequence: Synthetic oligonucleotide
  Sense strand starting at position 2444 of SEQ ID NO: 1559954
aaaugugauuaaucguaac

SEQ ID NO: 1566028 - RNA, 19 nt, Artificial Sequence
  Description of Artificial Sequence: Synthetic oligonucleotide
  Antisense strand to SEQ ID NO: 1566027
guuacgauuaaucacauuu

SEQ ID NO: 1566029 - RNA, 19 nt, Artificial Sequence
  Description of Artificial Sequence: Synthetic oligonucleotide
  Sense strand starting at position 2482 of SEQ ID NO: 1559954
auggcauaugcuuauaugu

SEQ ID NO: 1566030 - RNA, 19 nt, Artificial Sequence
  Description of Artificial Sequence: Synthetic oligonucleotide
  Antisense strand to SEQ ID NO: 1566029
acauauaagcauaugccau

SEQ ID NO: 1566031 - RNA, 19 nt, Artificial Sequence
  Description of Artificial Sequence: Synthetic oligonucleotide
  Sense strand starting at position 2663 of SEQ ID NO: 1559954
cacucugggcucgagagau

SEQ ID NO: 1566032 - RNA, 19 nt, Artificial Sequence
  Description of Artificial Sequence: Synthetic oligonucleotide
  Antisense strand to SEQ ID NO: 1566031
aucucucgagcccagagug

SEQ ID NO: 1566033 - RNA, 19 nt, Artificial Sequence
  Description of Artificial Sequence: Synthetic oligonucleotide
  Sense strand starting at position 2908 of SEQ ID NO: 1559954
uuucuuuagguguaauagu

SEQ ID NO: 1566034 - RNA, 19 nt, Artificial Sequence
  Description of Artificial Sequence: Synthetic oligonucleotide
  Antisense strand to SEQ ID NO: 1566033
acuauuacaccuaaagaaa

SEQ ID NO: 1566035 - RNA, 19 nt, Artificial Sequence
  Description of Artificial Sequence: Synthetic oligonucleotide
  Sense strand starting at position 2915 of SEQ ID NO: 1559954
agguguaauaguggcauuu

SEQ ID NO: 1566036 - RNA, 19 nt, Artificial Sequence
  Description of Artificial Sequence: Synthetic oligonucleotide
  Antisense strand to SEQ ID NO: 1566035
aaaugccacuauuacaccu

SEQ ID NO: 1566037 - RNA, 19 nt, Artificial Sequence
  Description of Artificial Sequence: Synthetic oligonucleotide
  Sense strand starting at position 2962 of SEQ ID NO: 1559954
cuaagaaguuaacugaucu

SEQ ID NO: 1566038 - RNA, 19 nt, Artificial Sequence
  Description of Artificial Sequence: Synthetic oligonucleotide
  Antisense strand to SEQ ID NO: 1566037
agaucaguuaacuucuuag

SEQ ID NO: 1566039 - RNA, 19 nt, Artificial Sequence
  Description of Artificial Sequence: Synthetic oligonucleotide
  Sense strand starting at position 2966 of SEQ ID NO: 1559954
gaaguuaacugaucuuaug

SEQ ID NO: 1566040 - RNA, 19 nt, Artificial Sequence
  Description of Artificial Sequence: Synthetic oligonucleotide
  Antisense strand to SEQ ID NO: 1566039
cauaagaucaguuaacuuc

SEQ ID NO: 1566041 - RNA, 19 nt, Artificial Sequence
  Description of Artificial Sequence: Synthetic oligonucleotide
  Sense strand starting at position 2974 of SEQ ID NO: 1559954
cugaucuuauggccaggau

SEQ ID NO: 1566042 - RNA, 19 nt, Artificial Sequence
  Description of Artificial Sequence: Synthetic oligonucleotide
  Antisense strand to SEQ ID NO: 1566041
auccuggccauaagaucag

SEQ ID NO: 1566043 - RNA, 19 nt, Artificial Sequence
  Description of Artificial Sequence: Synthetic oligonucleotide
  Sense strand starting at position 3062 of SEQ ID NO: 1559954
agcugaagacauuggucau

SEQ ID NO: 1566044 - RNA, 19 nt, Artificial Sequence
  Description of Artificial Sequence: Synthetic oligonucleotide
  Antisense strand to SEQ ID NO: 1566043
augaccaaugucuucagcu

SEQ ID NO: 1566045 - RNA, 19 nt, Artificial Sequence
  Description of Artificial Sequence: Synthetic oligonucleotide
  Sense strand starting at position 3063 of SEQ ID NO: 1559954
gcugaagacauuggucaug

SEQ ID NO: 1566046 - RNA, 19 nt, Artificial Sequence
  Description of Artificial Sequence: Synthetic oligonucleotide
  Antisense strand to SEQ ID NO: 1566045
caugaccaaugucuucagc

SEQ ID NO: 1566047 - RNA, 19 nt, Artificial Sequence
  Description of Artificial Sequence: Synthetic oligonucleotide
  Sense strand starting at position 3080 of SEQ ID NO: 1559954
uggguuggugauggauaga

SEQ ID NO: 1566048 - RNA, 19 nt, Artificial Sequence
  Description of Artificial Sequence: Synthetic oligonucleotide
  Antisense strand to SEQ ID NO: 1566047
ucuauccaucaccaaccca

SEQ ID NO: 1566049 - RNA, 19 nt, Artificial Sequence
  Description of Artificial Sequence: Synthetic oligonucleotide
  Sense strand starting at position 3242 of SEQ ID NO: 1559954
gugagcaaacuccaaacau

SEQ ID NO: 1566050 - RNA, 19 nt, Artificial Sequence
  Description of Artificial Sequence: Synthetic oligonucleotide
  Antisense strand to SEQ ID NO: 1566049
auguuuggaguuugcucac

SEQ ID NO: 1566051 - RNA, 19 nt, Artificial Sequence
  Description of Artificial Sequence: Synthetic oligonucleotide
  Sense strand starting at position 3261 of SEQ ID NO: 1559954
gaagcagagaucugacgga

SEQ ID NO: 1566052 - RNA, 19 nt, Artificial Sequence
  Description of Artificial Sequence: Synthetic oligonucleotide
  Antisense strand to SEQ ID NO: 1566051
uccgucagaucucugcuuc

SEQ ID NO: 1566053 - RNA, 19 nt, Artificial Sequence
  Description of Artificial Sequence: Synthetic oligonucleotide
  Sense strand starting at position 3404 of SEQ ID NO: 1559954
ugccacagucaucauugua

SEQ ID NO: 1566054 - RNA, 19 nt, Artificial Sequence
  Description of Artificial Sequence: Synthetic oligonucleotide
  Antisense strand to SEQ ID NO: 1566053
uacaaugaugacuguggca

SEQ ID NO: 1566055 - RNA, 19 nt, Artificial Sequence
  Description of Artificial Sequence: Synthetic oligonucleotide
  Sense strand starting at position 3485 of SEQ ID NO: 1559954
cugccugagguguauugaa

SEQ ID NO: 1566056 - RNA, 19 nt, Artificial Sequence
  Description of Artificial Sequence: Synthetic oligonucleotide
  Antisense strand to SEQ ID NO: 1566055
uucaauacaccucaggcag

SEQ ID NO: 1566057 - RNA, 19 nt, Artificial Sequence
  Description of Artificial Sequence: Synthetic oligonucleotide
  Sense strand starting at position 3504 of SEQ ID NO: 1559954
guggcuugagcagagaaga

SEQ ID NO: 1566058 - RNA, 19 nt, Artificial Sequence
  Description of Artificial Sequence: Synthetic oligonucleotide
  Antisense strand to SEQ ID NO: 1566057
ucuucucugcucaagccac

SEQ ID NO: 1566059 - RNA, 19 nt, Artificial Sequence
  Description of Artificial Sequence: Synthetic oligonucleotide
  Sense strand starting at position 3572 of SEQ ID NO: 1559954
ugacucuuccaaggacaca

SEQ ID NO: 1566060 - RNA, 19 nt, Artificial Sequence
  Description of Artificial Sequence: Synthetic oligonucleotide
  Antisense strand to SEQ ID NO: 1566059
uguguccuuggaagaguca

SEQ ID NO: 1566061 - RNA, 19 nt, Artificial Sequence
  Description of Artificial Sequence: Synthetic oligonucleotide
  Sense strand starting at position 3649 of SEQ ID NO: 1559954
gcucuuguaucauuugacu

SEQ ID NO: 1566062 - RNA, 19 nt, Artificial Sequence
  Description of Artificial Sequence: Synthetic oligonucleotide
  Antisense strand to SEQ ID NO: 1566061
agucaaaugauacaagagc

SEQ ID NO: 1566063 - RNA, 19 nt, Artificial Sequence
  Description of Artificial Sequence: Synthetic oligonucleotide
  Sense strand starting at position 154 of SEQ ID NO: 1559955
gcaagaaauggcuggucca

SEQ ID NO: 1566064 - RNA, 19 nt, Artificial Sequence
  Description of Artificial Sequence: Synthetic oligonucleotide
  Antisense strand to SEQ ID NO: 1566063
uggaccagccauuucuugc

SEQ ID NO: 1566065 - RNA, 19 nt, Artificial Sequence
  Description of Artificial Sequence: Synthetic oligonucleotide
  Sense strand starting at position 155 of SEQ ID NO: 1559955
caagaaauggcugguccaa

SEQ ID NO: 1566066 - RNA, 19 nt, Artificial Sequence
  Description of Artificial Sequence: Synthetic oligonucleotide
  Antisense strand to SEQ ID NO: 1566065
uuggaccagccauuucuug

SEQ ID NO: 1566067 - RNA, 19 nt, Artificial Sequence
  Description of Artificial Sequence: Synthetic oligonucleotide
  Sense strand starting at position 157 of SEQ ID NO: 1559955
agaaauggcugguccaaag

SEQ ID NO: 1566068 - RNA, 19 nt, Artificial Sequence
  Description of Artificial Sequence: Synthetic oligonucleotide
  Antisense strand to SEQ ID NO: 1566067
cuuuggaccagccauuucu

SEQ ID NO: 1566069 - RNA, 19 nt, Artificial Sequence
  Description of Artificial Sequence: Synthetic oligonucleotide
  Sense strand starting at position 230 of SEQ ID NO: 1559955
ccuaaugacaugcggagaa

SEQ ID NO: 1566070 - RNA, 19 nt, Artificial Sequence
  Description of Artificial Sequence: Synthetic oligonucleotide
  Antisense strand to SEQ ID NO: 1566069
uucuccgcaugucauuagg

SEQ ID NO: 1566071 - RNA, 19 nt, Artificial Sequence
  Description of Artificial Sequence: Synthetic oligonucleotide
  Sense strand starting at position 282 of SEQ ID NO: 1559955
ggaugaacucuccguguac

SEQ ID NO: 1566072 - RNA, 19 nt, Artificial Sequence
  Description of Artificial Sequence: Synthetic oligonucleotide
  Antisense strand to SEQ ID NO: 1566071
guacacggagaguucaucc

SEQ ID NO: 1566073 - RNA, 19 nt, Artificial Sequence
  Description of Artificial Sequence: Synthetic oligonucleotide
  Sense strand starting at position 283 of SEQ ID NO: 1559955
gaugaacucuccguguacu

SEQ ID NO: 1566074 - RNA, 19 nt, Artificial Sequence
  Description of Artificial Sequence: Synthetic oligonucleotide
  Antisense strand to SEQ ID NO: 1566073
aguacacggagaguucauc

SEQ ID NO: 1566075 - RNA, 19 nt, Artificial Sequence
  Description of Artificial Sequence: Synthetic oligonucleotide
  Sense strand starting at position 286 of SEQ ID NO: 1559955
gaacucuccguguacucaa

SEQ ID NO: 1566076 - RNA, 19 nt, Artificial Sequence
  Description of Artificial Sequence: Synthetic oligonucleotide
  Antisense strand to SEQ ID NO: 1566075
uugaguacacggagaguuc

SEQ ID NO: 1566077 - RNA, 19 nt, Artificial Sequence
  Description of Artificial Sequence: Synthetic oligonucleotide
  Sense strand starting at position 297 of SEQ ID NO: 1559955
guacucaaucuuggaguag

SEQ ID NO: 1566078 - RNA, 19 nt, Artificial Sequence
  Description of Artificial Sequence: Synthetic oligonucleotide
  Antisense strand to SEQ ID NO: 1566077
cuacuccaagauugaguac

SEQ ID NO: 1566079 - RNA, 19 nt, Artificial Sequence
  Description of Artificial Sequence: Synthetic oligonucleotide
  Sense strand starting at position 308 of SEQ ID NO: 1559955
uggaguagccacgggauua

SEQ ID NO: 1566080 - RNA, 19 nt, Artificial Sequence
  Description of Artificial Sequence: Synthetic oligonucleotide
  Antisense strand to SEQ ID NO: 1566079
uaaucccguggcuacucca

SEQ ID NO: 1566081 - RNA, 19 nt, Artificial Sequence
  Description of Artificial Sequence: Synthetic oligonucleotide
  Sense strand starting at position 309 of SEQ ID NO: 1559955
ggaguagccacgggauuaa

SEQ ID NO: 1566082 - RNA, 19 nt, Artificial Sequence
  Description of Artificial Sequence: Synthetic oligonucleotide
  Antisense strand to SEQ ID NO: 1566081
uuaaucccguggcuacucc

SEQ ID NO: 1566083 - RNA, 19 nt, Artificial Sequence
  Description of Artificial Sequence: Synthetic oligonucleotide
  Sense strand starting at position 333 of SEQ ID NO: 1559955
gaaauagggugagugaguu

SEQ ID NO: 1566084 - RNA, 19 nt, Artificial Sequence
  Description of Artificial Sequence: Synthetic oligonucleotide
  Antisense strand to SEQ ID NO: 1566083
aacucacucacccuauuuc

SEQ ID NO: 1566085 - RNA, 19 nt, Artificial Sequence
  Description of Artificial Sequence: Synthetic oligonucleotide
  Sense strand starting at position 558 of SEQ ID NO: 1559955
acgaguuucguguaagauc

SEQ ID NO: 1566086 - RNA, 19 nt, Artificial Sequence
  Description of Artificial Sequence: Synthetic oligonucleotide
  Antisense strand to SEQ ID NO: 1566085
gaucuuacacgaaacucgu

SEQ ID NO: 1566087 - RNA, 19 nt, Artificial Sequence
  Description of Artificial Sequence: Synthetic oligonucleotide
  Sense strand starting at position 834 of SEQ ID NO: 1559955
cccacuggucuaggaagaa

SEQ ID NO: 1566088 - RNA, 19 nt, Artificial Sequence
  Description of Artificial Sequence: Synthetic oligonucleotide
  Antisense strand to SEQ ID NO: 1566087
uucuuccuagaccaguggg

SEQ ID NO: 1566089 - RNA, 19 nt, Artificial Sequence
  Description of Artificial Sequence: Synthetic oligonucleotide
  Sense strand starting at position 1001 of SEQ ID NO: 1559955
aggugagacugucuacgau

SEQ ID NO: 1566090 - RNA, 19 nt, Artificial Sequence
  Description of Artificial Sequence: Synthetic oligonucleotide
  Antisense strand to SEQ ID NO: 1566089
aucguagacagucucaccu

SEQ ID NO: 1566091 - RNA, 19 nt, Artificial Sequence
  Description of Artificial Sequence: Synthetic oligonucleotide
  Sense strand starting at position 1102 of SEQ ID NO: 1559955
cugaucugugcaggccaua

SEQ ID NO: 1566092 - RNA, 19 nt, Artificial Sequence
  Description of Artificial Sequence: Synthetic oligonucleotide
  Antisense strand to SEQ ID NO: 1566091
uauggccugcacagaucag

SEQ ID NO: 1566093 - RNA, 19 nt, Artificial Sequence
  Description of Artificial Sequence: Synthetic oligonucleotide
  Sense strand starting at position 1477 of SEQ ID NO: 1559955
gcucaaucaugaccacagu

SEQ ID NO: 1566094 - RNA, 19 nt, Artificial Sequence
  Description of Artificial Sequence: Synthetic oligonucleotide
  Antisense strand to SEQ ID NO: 1566093
acuguggucaugauugagc

SEQ ID NO: 1566095 - RNA, 19 nt, Artificial Sequence
  Description of Artificial Sequence: Synthetic oligonucleotide
  Sense strand starting at position 1553 of SEQ ID NO: 1559955
agaggaaaucggugcucgu

SEQ ID NO: 1566096 - RNA, 19 nt, Artificial Sequence
  Description of Artificial Sequence: Synthetic oligonucleotide
  Antisense strand to SEQ ID NO: 1566095
acgagcaccgauuuccucu

SEQ ID NO: 1566097 - RNA, 19 nt, Artificial Sequence
  Description of Artificial Sequence: Synthetic oligonucleotide
  Sense strand starting at position 1556 of SEQ ID NO: 1559955
ggaaaucggugcucguuaa

SEQ ID NO: 1566098 - RNA, 19 nt, Artificial Sequence
  Description of Artificial Sequence: Synthetic oligonucleotide
  Antisense strand to SEQ ID NO: 1566097
uuaacgagcaccgauuucc

SEQ ID NO: 1566099 - RNA, 19 nt, Artificial Sequence
  Description of Artificial Sequence: Synthetic oligonucleotide
  Sense strand starting at position 1591 of SEQ ID NO: 1559955
cgggcuuaaucagcccaua

SEQ ID NO: 1566100 - RNA, 19 nt, Artificial Sequence
  Description of Artificial Sequence: Synthetic oligonucleotide
  Antisense strand to SEQ ID NO: 1566099
uaugggcugauuaagcccg

SEQ ID NO: 1566101 - RNA, 19 nt, Artificial Sequence
  Description of Artificial Sequence: Synthetic oligonucleotide
  Sense strand starting at position 1596 of SEQ ID NO: 1559955
uuaaucagcccauagugua

SEQ ID NO: 1566102 - RNA, 19 nt, Artificial Sequence
  Description of Artificial Sequence: Synthetic oligonucleotide
  Antisense strand to SEQ ID NO: 1566101
uacacuaugggcugauuaa

SEQ ID NO: 1566103 - RNA, 19 nt, Artificial Sequence
  Description of Artificial Sequence: Synthetic oligonucleotide
  Sense strand starting at position 1913 of SEQ ID NO: 1559955
ccguauuaacauggccuua

SEQ ID NO: 1566104 - RNA, 19 nt, Artificial Sequence
  Description of Artificial Sequence: Synthetic oligonucleotide
  Antisense strand to SEQ ID NO: 1566103
uaaggccauguuaauacgg

SEQ ID NO: 1566105 - RNA, 19 nt, Artificial Sequence
  Description of Artificial Sequence: Synthetic oligonucleotide
  Sense strand starting at position 1945 of SEQ ID NO: 1559955
ggccaugcccucgagcaaa

SEQ ID NO: 1566106 - RNA, 19 nt, Artificial Sequence
  Description of Artificial Sequence: Synthetic oligonucleotide
  Antisense strand to SEQ ID NO: 1566105
uuugcucgagggcauggcc

SEQ ID NO: 1566107 - RNA, 19 nt, Artificial Sequence
  Description of Artificial Sequence: Synthetic oligonucleotide
  Sense strand starting at position 2412 of SEQ ID NO: 1559955
gugaucagcucuucucuca

SEQ ID NO: 1566108 - RNA, 19 nt, Artificial Sequence
  Description of Artificial Sequence: Synthetic oligonucleotide
  Antisense strand to SEQ ID NO: 1566107
ugagagaagagcugaucac

SEQ ID NO: 1566109 - RNA, 19 nt, Artificial Sequence
  Description of Artificial Sequence: Synthetic oligonucleotide
  Sense strand starting at position 2752 of SEQ ID NO: 1559955
ucaggugguguuugagaag

SEQ ID NO: 1566110 - RNA, 19 nt, Artificial Sequence
  Description of Artificial Sequence: Synthetic oligonucleotide
  Antisense strand to SEQ ID NO: 1566109
cuucucaaacaccaccuga

SEQ ID NO: 1566111 - RNA, 19 nt, Artificial Sequence
  Description of Artificial Sequence: Synthetic oligonucleotide
  Sense strand starting at position 2950 of SEQ ID NO: 1559955
agcagugggaccugaagaa

SEQ ID NO: 1566112 - RNA, 19 nt, Artificial Sequence
  Description of Artificial Sequence: Synthetic oligonucleotide
  Antisense strand to SEQ ID NO: 1566111
uucuucaggucccacugcu

SEQ ID NO: 1566113 - RNA, 19 nt, Artificial Sequence
  Description of Artificial Sequence: Synthetic oligonucleotide
  Sense strand starting at position 3017 of SEQ ID NO: 1559955
gguagaaacugggaaaguu

SEQ ID NO: 1566114 - RNA, 19 nt, Artificial Sequence
  Description of Artificial Sequence: Synthetic oligonucleotide
  Antisense strand to SEQ ID NO: 1566113
aacuuucccaguuucuacc

SEQ ID NO: 1566115 - RNA, 19 nt, Artificial Sequence
  Description of Artificial Sequence: Synthetic oligonucleotide
  Sense strand starting at position 3034 of SEQ ID NO: 1559955
uuuggaaauuugcaacgga

SEQ ID NO: 1566116 - RNA, 19 nt, Artificial Sequence
  Description of Artificial Sequence: Synthetic oligonucleotide
  Antisense strand to SEQ ID NO: 1566115
uccguugcaaauuuccaaa

SEQ ID NO: 1566117 - RNA, 19 nt, Artificial Sequence
  Description of Artificial Sequence: Synthetic oligonucleotide
  Sense strand starting at position 3170 of SEQ ID NO: 1559955
ccucuucuccaagaaggua

SEQ ID NO: 1566118 - RNA, 19 nt, Artificial Sequence
  Description of Artificial Sequence: Synthetic oligonucleotide
  Antisense strand to SEQ ID NO: 1566117
uaccuucuuggagaagagg

SEQ ID NO: 1566119 - RNA, 19 nt, Artificial Sequence
  Description of Artificial Sequence: Synthetic oligonucleotide
  Sense strand starting at position 3237 of SEQ ID NO: 1559955
gcuguuguaagucauuuga

SEQ ID NO: 1566120 - RNA, 19 nt, Artificial Sequence
  Description of Artificial Sequence: Synthetic oligonucleotide
  Antisense strand to SEQ ID NO: 1566119
ucaaaugacuuacaacagc

SEQ ID NO: 1566121 - RNA, 19 nt, Artificial Sequence
  Description of Artificial Sequence: Synthetic oligonucleotide
  Sense strand starting at position 3332 of SEQ ID NO: 1559955
uuugcuccucucugugaaa

SEQ ID NO: 1566122 - RNA, 19 nt, Artificial Sequence
  Description of Artificial Sequence: Synthetic oligonucleotide
  Antisense strand to SEQ ID NO: 1566121
uuucacagagaggagcaaa

SEQ ID NO: 1566123 - RNA, 19 nt, Artificial Sequence
  Description of Artificial Sequence: Synthetic oligonucleotide
  Sense strand starting at position 3333 of SEQ ID NO: 1559955
uugcuccucucugugaaau

SEQ ID NO: 1566124 - RNA, 19 nt, Artificial Sequence
  Description of Artificial Sequence: Synthetic oligonucleotide
  Antisense strand to SEQ ID NO: 1566123
auuucacagagaggagcaa

SEQ ID NO: 1566125 - RNA, 19 nt, Artificial Sequence
  Description of Artificial Sequence: Synthetic oligonucleotide
  Sense strand starting at position 3334 of SEQ ID NO: 1559955
ugcuccucucugugaaaug

SEQ ID NO: 1566126 - RNA, 19 nt, Artificial Sequence
  Description of Artificial Sequence: Synthetic oligonucleotide
  Antisense strand to SEQ ID NO: 1566125
cauuucacagagaggagca

SEQ ID NO: 1566127 - RNA, 19 nt, Artificial Sequence
  Description of Artificial Sequence: Synthetic oligonucleotide
  Sense strand starting at position 3459 of SEQ ID NO: 1559955
gugcaagauguggauucga

SEQ ID NO: 1566128 - RNA, 19 nt, Artificial Sequence
  Description of Artificial Sequence: Synthetic oligonucleotide
  Antisense strand to SEQ ID NO: 1566127
ucgaauccacaucuugcac

SEQ ID NO: 1566129 - RNA, 19 nt, Artificial Sequence
  Description of Artificial Sequence: Synthetic oligonucleotide
  Sense strand starting at position 3468 of SEQ ID NO: 1559955
guggauucgaguugcuuga

SEQ ID NO: 1566130 - RNA, 19 nt, Artificial Sequence
  Description of Artificial Sequence: Synthetic oligonucleotide
  Antisense strand to SEQ ID NO: 1566129
ucaagcaacucgaauccac

SEQ ID NO: 1566131 - RNA, 19 nt, Artificial Sequence
  Description of Artificial Sequence: Synthetic oligonucleotide
  Sense strand starting at position 3557 of SEQ ID NO: 1559955
cccggcuuucccuucguua

SEQ ID NO: 1566132 - RNA, 19 nt, Artificial Sequence
  Description of Artificial Sequence: Synthetic oligonucleotide
  Antisense strand to SEQ ID NO: 1566131
uaacgaagggaaagccggg

SEQ ID NO: 1566133 - RNA, 19 nt, Artificial Sequence
  Description of Artificial Sequence: Synthetic oligonucleotide
  Sense strand starting at position 3558 of SEQ ID NO: 1559955
ccggcuuucccuucguuau

SEQ ID NO: 1566134 - RNA, 19 nt, Artificial Sequence
  Description of Artificial Sequence: Synthetic oligonucleotide
  Antisense strand to SEQ ID NO: 1566133
auaacgaagggaaagccgg

SEQ ID NO: 1566135 - RNA, 19 nt, Artificial Sequence
  Description of Artificial Sequence: Synthetic oligonucleotide
  Sense strand starting at position 3569 of SEQ ID NO: 1559955
uucguuaugucuccuggga

SEQ ID NO: 1566136 - RNA, 19 nt, Artificial Sequence
  Description of Artificial Sequence: Synthetic oligonucleotide
  Antisense strand to SEQ ID NO: 1566135
ucccaggagacauaacgaa

SEQ ID NO: 1566137 - RNA, 19 nt, Artificial Sequence
  Description of Artificial Sequence: Synthetic oligonucleotide
  Sense strand starting at position 3629 of SEQ ID NO: 1559955
agagauaagucagauccag

SEQ ID NO: 1566138 - RNA, 19 nt, Artificial Sequence
  Description of Artificial Sequence: Synthetic oligonucleotide
  Antisense strand to SEQ ID NO: 1566137
cuggaucugacuuaucucu

SEQ ID NO: 1566139 - RNA, 19 nt, Artificial Sequence
  Description of Artificial Sequence: Synthetic oligonucleotide
  Sense strand starting at position 3679 of SEQ ID NO: 1559955
uugagaaacugauagauga

SEQ ID NO: 1566140 - RNA, 19 nt, Artificial Sequence
  Description of Artificial Sequence: Synthetic oligonucleotide
  Antisense strand to SEQ ID NO: 1566139
ucaucuaucaguuucucaa

SEQ ID NO: 1566141 - RNA, 19 nt, Artificial Sequence
  Description of Artificial Sequence: Synthetic oligonucleotide
  Sense strand starting at position 3709 of SEQ ID NO: 1559955
cuaggaaguguuggaacuu

SEQ ID NO: 1566142 - RNA, 19 nt, Artificial Sequence
  Description of Artificial Sequence: Synthetic oligonucleotide
  Antisense strand to SEQ ID NO: 1566141
aaguuccaacacuuccuag

SEQ ID NO: 1566143 - RNA, 19 nt, Artificial Sequence
  Description of Artificial Sequence: Synthetic oligonucleotide
  Sense strand starting at position 94 of SEQ ID NO: 1559956
gcucucugugcugggaaau

SEQ ID NO: 1566144 - RNA, 19 nt, Artificial Sequence
  Description of Artificial Sequence: Synthetic oligonucleotide
  Antisense strand to SEQ ID NO: 1566143
auuucccagcacagagagc

SEQ ID NO: 1566145 - RNA, 19 nt, Artificial Sequence
  Description of Artificial Sequence: Synthetic oligonucleotide
  Sense strand starting at position 95 of SEQ ID NO: 1559956
cucucugugcugggaaauc

SEQ ID NO: 1566146 - RNA, 19 nt, Artificial Sequence
  Description of Artificial Sequence: Synthetic oligonucleotide
  Antisense strand to SEQ ID NO: 1566145
gauuucccagcacagagag

SEQ ID NO: 1566147 - RNA, 19 nt, Artificial Sequence
  Description of Artificial Sequence: Synthetic oligonucleotide
  Sense strand starting at position 106 of SEQ ID NO: 1559956
gggaaauccacacggcuuu

SEQ ID NO: 1566148 - RNA, 19 nt, Artificial Sequence
  Description of Artificial Sequence: Synthetic oligonucleotide
  Antisense strand to SEQ ID NO: 1566147
aaagccguguggauuuccc

SEQ ID NO: 1566149 - RNA, 19 nt, Artificial Sequence
  Description of Artificial Sequence: Synthetic oligonucleotide
  Sense strand starting at position 127 of SEQ ID NO: 1559956
cuacaagacuguucuggca

SEQ ID NO: 1566150 - RNA, 19 nt, Artificial Sequence
  Description of Artificial Sequence: Synthetic oligonucleotide
  Antisense strand to SEQ ID NO: 1566149
ugccagaacagucuuguag

SEQ ID NO: 1566151 - RNA, 19 nt, Artificial Sequence
  Description of Artificial Sequence: Synthetic oligonucleotide
  Sense strand starting at position 211 of SEQ ID NO: 1559956
gggcuuccuccaugagcau

SEQ ID NO: 1566152 - RNA, 19 nt, Artificial Sequence
  Description of Artificial Sequence: Synthetic oligonucleotide
  Antisense strand to SEQ ID NO: 1566151
augcucauggaggaagccc

SEQ ID NO: 1566153 - RNA, 19 nt, Artificial Sequence
  Description of Artificial Sequence: Synthetic oligonucleotide
  Sense strand starting at position 212 of SEQ ID NO: 1559956
ggcuuccuccaugagcauu

SEQ ID NO: 1566154 - RNA, 19 nt, Artificial Sequence
  Description of Artificial Sequence: Synthetic oligonucleotide
  Antisense strand to SEQ ID NO: 1566153
aaugcucauggaggaagcc

SEQ ID NO: 1566155 - RNA, 19 nt, Artificial Sequence
  Description of Artificial Sequence: Synthetic oligonucleotide
  Sense strand starting at position 234 of SEQ ID NO: 1559956
gucaccugagcuugugaca

SEQ ID NO: 1566156 - RNA, 19 nt, Artificial Sequence
  Description of Artificial Sequence: Synthetic oligonucleotide
  Antisense strand to SEQ ID NO: 1566155
ugucacaagcucaggugac

SEQ ID NO: 1566157 - RNA, 19 nt, Artificial Sequence
  Description of Artificial Sequence: Synthetic oligonucleotide
  Sense strand starting at position 271 of SEQ ID NO: 1559956
ccugcaucagacugugaau

SEQ ID NO: 1566158 - RNA, 19 nt, Artificial Sequence
  Description of Artificial Sequence: Synthetic oligonucleotide
  Antisense strand to SEQ ID NO: 1566157
auucacagucugaugcagg

SEQ ID NO: 1566159 - RNA, 19 nt, Artificial Sequence
  Description of Artificial Sequence: Synthetic oligonucleotide
  Sense strand starting at position 304 of SEQ ID NO: 1559956
ggauuuguguuugcaggac

SEQ ID NO: 1566160 - RNA, 19 nt, Artificial Sequence
  Description of Artificial Sequence: Synthetic oligonucleotide
  Antisense strand to SEQ ID NO: 1566159
guccugcaaacacaaaucc

SEQ ID NO: 1566161 - RNA, 19 nt, Artificial Sequence
  Description of Artificial Sequence: Synthetic oligonucleotide
  Sense strand starting at position 308 of SEQ ID NO: 1559956
uuguguuugcaggacaggu

SEQ ID NO: 1566162 - RNA, 19 nt, Artificial Sequence
  Description of Artificial Sequence: Synthetic oligonucleotide
  Antisense strand to SEQ ID NO: 1566161
accuguccugcaaacacaa

SEQ ID NO: 1566163 - RNA, 19 nt, Artificial Sequence
  Description of Artificial Sequence: Synthetic oligonucleotide
  Sense strand starting at position 354 of SEQ ID NO: 1559956
gucuccuuacugggugaga

SEQ ID NO: 1566164 - RNA, 19 nt, Artificial Sequence
  Description of Artificial Sequence: Synthetic oligonucleotide
  Antisense strand to SEQ ID NO: 1566163
ucucacccaguaaggagac

SEQ ID NO: 1566165 - RNA, 19 nt, Artificial Sequence
  Description of Artificial Sequence: Synthetic oligonucleotide
  Sense strand starting at position 355 of SEQ ID NO: 1559956
ucuccuuacugggugagaa

SEQ ID NO: 1566166 - RNA, 19 nt, Artificial Sequence
  Description of Artificial Sequence: Synthetic oligonucleotide
  Antisense strand to SEQ ID NO: 1566165
uucucacccaguaaggaga

SEQ ID NO: 1566167 - RNA, 19 nt, Artificial Sequence
  Description of Artificial Sequence: Synthetic oligonucleotide
  Sense strand starting at position 356 of SEQ ID NO: 1559956
cuccuuacugggugagaag

SEQ ID NO: 1566168 - RNA, 19 nt, Artificial Sequence
  Description of Artificial Sequence: Synthetic oligonucleotide
  Antisense strand to SEQ ID NO: 1566167
cuucucacccaguaaggag

SEQ ID NO: 1566169 - RNA, 19 nt, Artificial Sequence
  Description of Artificial Sequence: Synthetic oligonucleotide
  Sense strand starting at position 606 of SEQ ID NO: 1559956
gagucuggagucugaauga

SEQ ID NO: 1566170 - RNA, 19 nt, Artificial Sequence
  Description of Artificial Sequence: Synthetic oligonucleotide
  Antisense strand to SEQ ID NO: 1566169
ucauucagacuccagacuc

SEQ ID NO: 1566171 - RNA, 19 nt, Artificial Sequence
  Description of Artificial Sequence: Synthetic oligonucleotide
  Sense strand starting at position 754 of SEQ ID NO: 1559956
ggaagagguuuauccacca

SEQ ID NO: 1566172 - RNA, 19 nt, Artificial Sequence
  Description of Artificial Sequence: Synthetic oligonucleotide
  Antisense strand to SEQ ID NO: 1566171
ugguggauaaaccucuucc

SEQ ID NO: 1566173 - RNA, 19 nt, Artificial Sequence
  Description of Artificial Sequence: Synthetic oligonucleotide
  Sense strand starting at position 847 of SEQ ID NO: 1559956
aggagcuuuaguuacaguu

SEQ ID NO: 1566174 - RNA, 19 nt, Artificial Sequence
  Description of Artificial Sequence: Synthetic oligonucleotide
  Antisense strand to SEQ ID NO: 1566173
aacuguaacuaaagcuccu

SEQ ID NO: 1566175 - RNA, 19 nt, Artificial Sequence
  Description of Artificial Sequence: Synthetic oligonucleotide
  Sense strand starting at position 1292 of SEQ ID NO: 1559956
gcaagaaauggcuggucca

SEQ ID NO: 1566176 - RNA, 19 nt, Artificial Sequence
  Description of Artificial Sequence: Synthetic oligonucleotide
  Antisense strand to SEQ ID NO: 1566175
uggaccagccauuucuugc

SEQ ID NO: 1566177 - RNA, 19 nt, Artificial Sequence
  Description of Artificial Sequence: Synthetic oligonucleotide
  Sense strand starting at position 1293 of SEQ ID NO: 1559956
caagaaauggcugguccaa

SEQ ID NO: 1566178 - RNA, 19 nt, Artificial Sequence
  Description of Artificial Sequence: Synthetic oligonucleotide
  Antisense strand to SEQ ID NO: 1566177
uuggaccagccauuucuug

SEQ ID NO: 1566179 - RNA, 19 nt, Artificial Sequence
  Description of Artificial Sequence: Synthetic oligonucleotide
  Sense strand starting at position 1295 of SEQ ID NO: 1559956
agaaauggcugguccaaag

SEQ ID NO: 1566180 - RNA, 19 nt, Artificial Sequence
  Description of Artificial Sequence: Synthetic oligonucleotide
  Antisense strand to SEQ ID NO: 1566179
cuuuggaccagccauuucu

SEQ ID NO: 1566181 - RNA, 19 nt, Artificial Sequence
  Description of Artificial Sequence: Synthetic oligonucleotide
  Sense strand starting at position 1368 of SEQ ID NO: 1559956
ccuaaugacaugcggagaa

SEQ ID NO: 1566182 - RNA, 19 nt, Artificial Sequence
  Description of Artificial Sequence: Synthetic oligonucleotide
  Antisense strand to SEQ ID NO: 1566181
uucuccgcaugucauuagg

SEQ ID NO: 1566183 - RNA, 19 nt, Artificial Sequence
  Description of Artificial Sequence: Synthetic oligonucleotide
  Sense strand starting at position 1420 of SEQ ID NO: 1559956
ggaugaacucuccguguac

SEQ ID NO: 1566184 - RNA, 19 nt, Artificial Sequence
  Description of Artificial Sequence: Synthetic oligonucleotide
  Antisense strand to SEQ ID NO: 1566183
guacacggagaguucaucc

SEQ ID NO: 1566185 - RNA, 19 nt, Artificial Sequence
  Description of Artificial Sequence: Synthetic oligonucleotide
  Sense strand starting at position 1421 of SEQ ID NO: 1559956
gaugaacucuccguguacu

SEQ ID NO: 1566186 - RNA, 19 nt, Artificial Sequence
  Description of Artificial Sequence: Synthetic oligonucleotide
  Antisense strand to SEQ ID NO: 1566185
aguacacggagaguucauc

SEQ ID NO: 1566187 - RNA, 19 nt, Artificial Sequence
  Description of Artificial Sequence: Synthetic oligonucleotide
  Sense strand starting at position 1424 of SEQ ID NO: 1559956
gaacucuccguguacucaa

SEQ ID NO: 1566188 - RNA, 19 nt, Artificial Sequence
  Description of Artificial Sequence: Synthetic oligonucleotide
  Antisense strand to SEQ ID NO: 1566187
uugaguacacggagaguuc

SEQ ID NO: 1566189 - RNA, 19 nt, Artificial Sequence
  Description of Artificial Sequence: Synthetic oligonucleotide
  Sense strand starting at position 1435 of SEQ ID NO: 1559956
guacucaaucuuggaguag

SEQ ID NO: 1566190 - RNA, 19 nt, Artificial Sequence
  Description of Artificial Sequence: Synthetic oligonucleotide
  Antisense strand to SEQ ID NO: 1566189
cuacuccaagauugaguac

SEQ ID NO: 1566191 - RNA, 19 nt, Artificial Sequence
  Description of Artificial Sequence: Synthetic oligonucleotide
  Sense strand starting at position 1446 of SEQ ID NO: 1559956
uggaguagccacgggauua

SEQ ID NO: 1566192 - RNA, 19 nt, Artificial Sequence
  Description of Artificial Sequence: Synthetic oligonucleotide
  Antisense strand to SEQ ID NO: 1566191
uaaucccguggcuacucca

SEQ ID NO: 1566193 - RNA, 19 nt, Artificial Sequence
  Description of Artificial Sequence: Synthetic oligonucleotide
  Sense strand starting at position 1447 of SEQ ID NO: 1559956
ggaguagccacgggauuaa

SEQ ID NO: 1566194 - RNA, 19 nt, Artificial Sequence
  Description of Artificial Sequence: Synthetic oligonucleotide
  Antisense strand to SEQ ID NO: 1566193
uuaaucccguggcuacucc

SEQ ID NO: 1566195 - RNA, 19 nt, Artificial Sequence
  Description of Artificial Sequence: Synthetic oligonucleotide
  Sense strand starting at position 1471 of SEQ ID NO: 1559956
gaaauagggugagugaguu

SEQ ID NO: 1566196 - RNA, 19 nt, Artificial Sequence
  Description of Artificial Sequence: Synthetic oligonucleotide
  Antisense strand to SEQ ID NO: 1566195
aacucacucacccuauuuc

SEQ ID NO: 1566197 - RNA, 19 nt, Artificial Sequence
  Description of Artificial Sequence: Synthetic oligonucleotide
  Sense strand starting at position 1696 of SEQ ID NO: 1559956
acgaguuucguguaagauc

SEQ ID NO: 1566198 - RNA, 19 nt, Artificial Sequence
  Description of Artificial Sequence: Synthetic oligonucleotide
  Antisense strand to SEQ ID NO: 1566197
gaucuuacacgaaacucgu

SEQ ID NO: 1566199 - RNA, 19 nt, Artificial Sequence
  Description of Artificial Sequence: Synthetic oligonucleotide
  Sense strand starting at position 1972 of SEQ ID NO: 1559956
cccacuggucuaggaagaa

SEQ ID NO: 1566200 - RNA, 19 nt, Artificial Sequence
  Description of Artificial Sequence: Synthetic oligonucleotide
  Antisense strand to SEQ ID NO: 1566199
uucuuccuagaccaguggg

SEQ ID NO: 1566201 - RNA, 19 nt, Artificial Sequence
  Description of Artificial Sequence: Synthetic oligonucleotide
  Sense strand starting at position 2139 of SEQ ID NO: 1559956
aggugagacugucuacgau

SEQ ID NO: 1566202 - RNA, 19 nt, Artificial Sequence
  Description of Artificial Sequence: Synthetic oligonucleotide
  Antisense strand to SEQ ID NO: 1566201
aucguagacagucucaccu

SEQ ID NO: 1566203 - RNA, 19 nt, Artificial Sequence
  Description of Artificial Sequence: Synthetic oligonucleotide
  Sense strand starting at position 2240 of SEQ ID NO: 1559956
cugaucugugcaggccaua

SEQ ID NO: 1566204 - RNA, 19 nt, Artificial Sequence
  Description of Artificial Sequence: Synthetic oligonucleotide
  Antisense strand to SEQ ID NO: 1566203
uauggccugcacagaucag

SEQ ID NO: 1566205 - RNA, 19 nt, Artificial Sequence
  Description of Artificial Sequence: Synthetic oligonucleotide
  Sense strand starting at position 2615 of SEQ ID NO: 1559956
gcucaaucaugaccacagu

SEQ ID NO: 1566206 - RNA, 19 nt, Artificial Sequence
  Description of Artificial Sequence: Synthetic oligonucleotide
  Antisense strand to SEQ ID NO: 1566205
acuguggucaugauugagc

SEQ ID NO: 1566207 - RNA, 19 nt, Artificial Sequence
  Description of Artificial Sequence: Synthetic oligonucleotide
  Sense strand starting at position 2691 of SEQ ID NO: 1559956
agaggaaaucggugcucgu

SEQ ID NO: 1566208 - RNA, 19 nt, Artificial Sequence
  Description of Artificial Sequence: Synthetic oligonucleotide
  Antisense strand to SEQ ID NO: 1566207
acgagcaccgauuuccucu

SEQ ID NO: 1566209 - RNA, 19 nt, Artificial Sequence
  Description of Artificial Sequence: Synthetic oligonucleotide
  Sense strand starting at position 2694 of SEQ ID NO: 1559956
ggaaaucggugcucguuaa

SEQ ID NO: 1566210 - RNA, 19 nt, Artificial Sequence
  Description of Artificial Sequence: Synthetic oligonucleotide
  Antisense strand to SEQ ID NO: 1566209
uuaacgagcaccgauuucc

SEQ ID NO: 1566211 - RNA, 19 nt, Artificial Sequence
  Description of Artificial Sequence: Synthetic oligonucleotide
  Sense strand starting at position 2729 of SEQ ID NO: 1559956
cgggcuuaaucagcccaua

SEQ ID NO: 1566212 - RNA, 19 nt, Artificial Sequence
  Description of Artificial Sequence: Synthetic oligonucleotide
  Antisense strand to SEQ ID NO: 1566211
uaugggcugauuaagcccg

SEQ ID NO: 1566213 - RNA, 19 nt, Artificial Sequence
  Description of Artificial Sequence: Synthetic oligonucleotide
  Sense strand starting at position 2734 of SEQ ID NO: 1559956
uuaaucagcccauagugua

SEQ ID NO: 1566214 - RNA, 19 nt, Artificial Sequence
  Description of Artificial Sequence: Synthetic oligonucleotide
  Antisense strand to SEQ ID NO: 1566213
uacacuaugggcugauuaa

SEQ ID NO: 1566215 - RNA, 19 nt, Artificial Sequence
  Description of Artificial Sequence: Synthetic oligonucleotide
  Sense strand starting at position 3051 of SEQ ID NO: 1559956
ccguauuaacauggccuua

SEQ ID NO: 1566216 - RNA, 19 nt, Artificial Sequence
  Description of Artificial Sequence: Synthetic oligonucleotide
  Antisense strand to SEQ ID NO: 1566215
uaaggccauguuaauacgg

SEQ ID NO: 1566217 - RNA, 19 nt, Artificial Sequence
  Description of Artificial Sequence: Synthetic oligonucleotide
  Sense strand starting at position 3083 of SEQ ID NO: 1559956
ggccaugcccucgagcaaa

SEQ ID NO: 1566218 - RNA, 19 nt, Artificial Sequence
  Description of Artificial Sequence: Synthetic oligonucleotide
  Antisense strand to SEQ ID NO: 1566217
uuugcucgagggcauggcc

SEQ ID NO: 1566219 - RNA, 19 nt, Artificial Sequence
  Description of Artificial Sequence: Synthetic oligonucleotide
  Sense strand starting at position 3550 of SEQ ID NO: 1559956
gugaucagcucuucucuca

SEQ ID NO: 1566220 - RNA, 19 nt, Artificial Sequence
  Description of Artificial Sequence: Synthetic oligonucleotide
  Antisense strand to SEQ ID NO: 1566219
ugagagaagagcugaucac

SEQ ID NO: 1566221 - RNA, 19 nt, Artificial Sequence
  Description of Artificial Sequence: Synthetic oligonucleotide
  Sense strand starting at position 3890 of SEQ ID NO: 1559956
ucaggugguguuugagaag

SEQ ID NO: 1566222 - RNA, 19 nt, Artificial Sequence
  Description of Artificial Sequence: Synthetic oligonucleotide
  Antisense strand to SEQ ID NO: 1566221
cuucucaaacaccaccuga

SEQ ID NO: 1566223 - RNA, 19 nt, Artificial Sequence
  Description of Artificial Sequence: Synthetic oligonucleotide
  Sense strand starting at position 32 of SEQ ID NO: 1559957
aggugagacugucuacgau

SEQ ID NO: 1566224 - RNA, 19 nt, Artificial Sequence
  Description of Artificial Sequence: Synthetic oligonucleotide
  Antisense strand to SEQ ID NO: 1566223
aucguagacagucucaccu

SEQ ID NO: 1566225 - RNA, 19 nt, Artificial Sequence
  Description of Artificial Sequence: Synthetic oligonucleotide
  Sense strand starting at position 133 of SEQ ID NO: 1559957
cugaucugugcaggccaua

SEQ ID NO: 1566226 - RNA, 19 nt, Artificial Sequence
  Description of Artificial Sequence: Synthetic oligonucleotide
  Antisense strand to SEQ ID NO: 1566225
uauggccugcacagaucag

SEQ ID NO: 1566227 - RNA, 19 nt, Artificial Sequence
  Description of Artificial Sequence: Synthetic oligonucleotide
  Sense strand starting at position 508 of SEQ ID NO: 1559957
gcucaaucaugaccacagu

SEQ ID NO: 1566228 - RNA, 19 nt, Artificial Sequence
  Description of Artificial Sequence: Synthetic oligonucleotide
  Antisense strand to SEQ ID NO: 1566227
acuguggucaugauugagc

SEQ ID NO: 1566229 - RNA, 19 nt, Artificial Sequence
  Description of Artificial Sequence: Synthetic oligonucleotide
  Sense strand starting at position 584 of SEQ ID NO: 1559957
agaggaaaucggugcucgu

SEQ ID NO: 1566230 - RNA, 19 nt, Artificial Sequence
  Description of Artificial Sequence: Synthetic oligonucleotide
  Antisense strand to SEQ ID NO: 1566229
acgagcaccgauuuccucu

SEQ ID NO: 1566231 - RNA, 19 nt, Artificial Sequence
  Description of Artificial Sequence: Synthetic oligonucleotide
  Sense strand starting at position 587 of SEQ ID NO: 1559957
ggaaaucggugcucguuaa

SEQ ID NO: 1566232 - RNA, 19 nt, Artificial Sequence
  Description of Artificial Sequence: Synthetic oligonucleotide
  Antisense strand to SEQ ID NO: 1566231
uuaacgagcaccgauuucc

SEQ ID NO: 1566233 - RNA, 19 nt, Artificial Sequence
  Description of Artificial Sequence: Synthetic oligonucleotide
  Sense strand starting at position 622 of SEQ ID NO: 1559957
cgggcuuaaucagcccaua

SEQ ID NO: 1566234 - RNA, 19 nt, Artificial Sequence
  Description of Artificial Sequence: Synthetic oligonucleotide
  Antisense strand to SEQ ID NO: 1566233
uaugggcugauuaagcccg

SEQ ID NO: 1566235 - RNA, 19 nt, Artificial Sequence
  Description of Artificial Sequence: Synthetic oligonucleotide
  Sense strand starting at position 627 of SEQ ID NO: 1559957
uuaaucagcccauagugua

SEQ ID NO: 1566236 - RNA, 19 nt, Artificial Sequence
  Description of Artificial Sequence: Synthetic oligonucleotide
  Antisense strand to SEQ ID NO: 1566235
uacacuaugggcugauuaa

SEQ ID NO: 1566237 - RNA, 19 nt, Artificial Sequence
  Description of Artificial Sequence: Synthetic oligonucleotide
  Sense strand starting at position 770 of SEQ ID NO: 1559957
gacggugacucagaaauuc

SEQ ID NO: 1566238 - RNA, 19 nt, Artificial Sequence
  Description of Artificial Sequence: Synthetic oligonucleotide
  Antisense strand to SEQ ID NO: 1566237
gaauuucugagucaccguc

SEQ ID NO: 1566239 - RNA, 19 nt, Artificial Sequence
  Description of Artificial Sequence: Synthetic oligonucleotide
  Sense strand starting at position 944 of SEQ ID NO: 1559957
ccguauuaacauggccuua

SEQ ID NO: 1566240 - RNA, 19 nt, Artificial Sequence
  Description of Artificial Sequence: Synthetic oligonucleotide
  Antisense strand to SEQ ID NO: 1566239
uaaggccauguuaauacgg

SEQ ID NO: 1566241 - RNA, 19 nt, Artificial Sequence
  Description of Artificial Sequence: Synthetic oligonucleotide
  Sense strand starting at position 976 of SEQ ID NO: 1559957
ggccaugcccucgagcaaa

SEQ ID NO: 1566242 - RNA, 19 nt, Artificial Sequence
  Description of Artificial Sequence: Synthetic oligonucleotide
  Antisense strand to SEQ ID NO: 1566241
uuugcucgagggcauggcc

SEQ ID NO: 1566243 - RNA, 19 nt, Artificial Sequence
  Description of Artificial Sequence: Synthetic oligonucleotide
  Sense strand starting at position 1443 of SEQ ID NO: 1559957
gugaucagcucuucucuca

SEQ ID NO: 1566244 - RNA, 19 nt, Artificial Sequence
  Description of Artificial Sequence: Synthetic oligonucleotide
  Antisense strand to SEQ ID NO: 1566243
ugagagaagagcugaucac

SEQ ID NO: 1566245 - RNA, 19 nt, Artificial Sequence
  Description of Artificial Sequence: Synthetic oligonucleotide
  Sense strand starting at position 1783 of SEQ ID NO: 1559957
ucaggugguguuugagaag

SEQ ID NO: 1566246 - RNA, 19 nt, Artificial Sequence
  Description of Artificial Sequence: Synthetic oligonucleotide
  Antisense strand to SEQ ID NO: 1566245
cuucucaaacaccaccuga

SEQ ID NO: 1566247 - RNA, 19 nt, Artificial Sequence
  Description of Artificial Sequence: Synthetic oligonucleotide
  Sense strand starting at position 1981 of SEQ ID NO: 1559957
agcagugggaccugaagaa

SEQ ID NO: 1566248 - RNA, 19 nt, Artificial Sequence
  Description of Artificial Sequence: Synthetic oligonucleotide
  Antisense strand to SEQ ID NO: 1566247
uucuucaggucccacugcu

SEQ ID NO: 1566249 - RNA, 19 nt, Artificial Sequence
  Description of Artificial Sequence: Synthetic oligonucleotide
  Sense strand starting at position 2048 of SEQ ID NO: 1559957
gguagaaacugggaaaguu

SEQ ID NO: 1566250 - RNA, 19 nt, Artificial Sequence
  Description of Artificial Sequence: Synthetic oligonucleotide
  Antisense strand to SEQ ID NO: 1566249
aacuuucccaguuucuacc

SEQ ID NO: 1566251 - RNA, 19 nt, Artificial Sequence
  Description of Artificial Sequence: Synthetic oligonucleotide
  Sense strand starting at position 2056 of SEQ ID NO: 1559957
cugggaaaguuuggaaauu

SEQ ID NO: 1566252 - RNA, 19 nt, Artificial Sequence
  Description of Artificial Sequence: Synthetic oligonucleotide
  Antisense strand to SEQ ID NO: 1566251
aauuuccaaacuuucccag

SEQ ID NO: 1566253 - RNA, 19 nt, Artificial Sequence
  Description of Artificial Sequence: Synthetic oligonucleotide
  Sense strand starting at position 2065 of SEQ ID NO: 1559957
uuuggaaauuugcaacgga

SEQ ID NO: 1566254 - RNA, 19 nt, Artificial Sequence
  Description of Artificial Sequence: Synthetic oligonucleotide
  Antisense strand to SEQ ID NO: 1566253
uccguugcaaauuuccaaa

SEQ ID NO: 1566255 - RNA, 19 nt, Artificial Sequence
  Description of Artificial Sequence: Synthetic oligonucleotide
  Sense strand starting at position 2201 of SEQ ID NO: 1559957
ccucuucuccaagaaggua

SEQ ID NO: 1566256 - RNA, 19 nt, Artificial Sequence
  Description of Artificial Sequence: Synthetic oligonucleotide
  Antisense strand to SEQ ID NO: 1566255
uaccuucuuggagaagagg

SEQ ID NO: 1566257 - RNA, 19 nt, Artificial Sequence
  Description of Artificial Sequence: Synthetic oligonucleotide
  Sense strand starting at position 2268 of SEQ ID NO: 1559957
gcuguuguaagucauuuga

SEQ ID NO: 1566258 - RNA, 19 nt, Artificial Sequence
  Description of Artificial Sequence: Synthetic oligonucleotide
  Antisense strand to SEQ ID NO: 1566257
ucaaaugacuuacaacagc

SEQ ID NO: 1566259 - RNA, 19 nt, Artificial Sequence
  Description of Artificial Sequence: Synthetic oligonucleotide
  Sense strand starting at position 2363 of SEQ ID NO: 1559957
uuugcuccucucugugaaa

SEQ ID NO: 1566260 - RNA, 19 nt, Artificial Sequence
  Description of Artificial Sequence: Synthetic oligonucleotide
  Antisense strand to SEQ ID NO: 1566259
uuucacagagaggagcaaa

SEQ ID NO: 1566261 - RNA, 19 nt, Artificial Sequence
  Description of Artificial Sequence: Synthetic oligonucleotide
  Sense strand starting at position 2364 of SEQ ID NO: 1559957
uugcuccucucugugaaau

SEQ ID NO: 1566262 - RNA, 19 nt, Artificial Sequence
  Description of Artificial Sequence: Synthetic oligonucleotide
  Antisense strand to SEQ ID NO: 1566261
auuucacagagaggagcaa

SEQ ID NO: 1566263 - RNA, 19 nt, Artificial Sequence
  Description of Artificial Sequence: Synthetic oligonucleotide
  Sense strand starting at position 2365 of SEQ ID NO: 1559957
ugcuccucucugugaaaug

SEQ ID NO: 1566264 - RNA, 19 nt, Artificial Sequence
  Description of Artificial Sequence: Synthetic oligonucleotide
  Antisense strand to SEQ ID NO: 1566263
cauuucacagagaggagca

SEQ ID NO: 1566265 - RNA, 19 nt, Artificial Sequence
  Description of Artificial Sequence: Synthetic oligonucleotide
  Sense strand starting at position 2490 of SEQ ID NO: 1559957
gugcaagauguggauucga

SEQ ID NO: 1566266 - RNA, 19 nt, Artificial Sequence
  Description of Artificial Sequence: Synthetic oligonucleotide
  Antisense strand to SEQ ID NO: 1566265
ucgaauccacaucuugcac

SEQ ID NO: 1566267 - RNA, 19 nt, Artificial Sequence
  Description of Artificial Sequence: Synthetic oligonucleotide
  Sense strand starting at position 2499 of SEQ ID NO: 1559957
guggauucgaguugcuuga

SEQ ID NO: 1566268 - RNA, 19 nt, Artificial Sequence
  Description of Artificial Sequence: Synthetic oligonucleotide
  Antisense strand to SEQ ID NO: 1566267
ucaagcaacucgaauccac

SEQ ID NO: 1566269 - RNA, 19 nt, Artificial Sequence
  Description of Artificial Sequence: Synthetic oligonucleotide
  Sense strand starting at position 2588 of SEQ ID NO: 1559957
cccggcuuucccuucguua

SEQ ID NO: 1566270 - RNA, 19 nt, Artificial Sequence
  Description of Artificial Sequence: Synthetic oligonucleotide
  Antisense strand to SEQ ID NO: 1566269
uaacgaagggaaagccggg

SEQ ID NO: 1566271 - RNA, 19 nt, Artificial Sequence
  Description of Artificial Sequence: Synthetic oligonucleotide
  Sense strand starting at position 2589 of SEQ ID NO: 1559957
ccggcuuucccuucguuau

SEQ ID NO: 1566272 - RNA, 19 nt, Artificial Sequence
  Description of Artificial Sequence: Synthetic oligonucleotide
  Antisense strand to SEQ ID NO: 1566271
auaacgaagggaaagccgg

SEQ ID NO: 1566273 - RNA, 19 nt, Artificial Sequence
  Description of Artificial Sequence: Synthetic oligonucleotide
  Sense strand starting at position 2600 of SEQ ID NO: 1559957
uucguuaugucuccuggga

SEQ ID NO: 1566274 - RNA, 19 nt, Artificial Sequence
  Description of Artificial Sequence: Synthetic oligonucleotide
  Antisense strand to SEQ ID NO: 1566273
ucccaggagacauaacgaa

SEQ ID NO: 1566275 - RNA, 19 nt, Artificial Sequence
  Description of Artificial Sequence: Synthetic oligonucleotide
  Sense strand starting at position 2660 of SEQ ID NO: 1559957
agagauaagucagauccag

SEQ ID NO: 1566276 - RNA, 19 nt, Artificial Sequence
  Description of Artificial Sequence: Synthetic oligonucleotide
  Antisense strand to SEQ ID NO: 1566275
cuggaucugacuuaucucu

SEQ ID NO: 1566277 - RNA, 19 nt, Artificial Sequence
  Description of Artificial Sequence: Synthetic oligonucleotide
  Sense strand starting at position 2710 of SEQ ID NO: 1559957
uugagaaacugauagauga

SEQ ID NO: 1566278 - RNA, 19 nt, Artificial Sequence
  Description of Artificial Sequence: Synthetic oligonucleotide
  Antisense strand to SEQ ID NO: 1566277
ucaucuaucaguuucucaa

SEQ ID NO: 1566279 - RNA, 19 nt, Artificial Sequence
  Description of Artificial Sequence: Synthetic oligonucleotide
  Sense strand starting at position 2740 of SEQ ID NO: 1559957
cuaggaaguguuggaacuu

SEQ ID NO: 1566280 - RNA, 19 nt, Artificial Sequence
  Description of Artificial Sequence: Synthetic oligonucleotide
  Antisense strand to SEQ ID NO: 1566279
aaguuccaacacuuccuag

SEQ ID NO: 1566281 - RNA, 19 nt, Artificial Sequence
  Description of Artificial Sequence: Synthetic oligonucleotide
  Sense strand starting at position 3114 of SEQ ID NO: 1559957
ccaggaaguugcguuacau

SEQ ID NO: 1566282 - RNA, 19 nt, Artificial Sequence
  Description of Artificial Sequence: Synthetic oligonucleotide
  Antisense strand to SEQ ID NO: 1566281
auguaacgcaacuuccugg

SEQ ID NO: 1566283 - RNA, 19 nt, Artificial Sequence
  Description of Artificial Sequence: Synthetic oligonucleotide
  Sense strand starting at position 3154 of SEQ ID NO: 1559957
ccugcaucugguugguaga

SEQ ID NO: 1566284 - RNA, 19 nt, Artificial Sequence
  Description of Artificial Sequence: Synthetic oligonucleotide
  Antisense strand to SEQ ID NO: 1566283
ucuaccaaccagaugcagg

SEQ ID NO: 1566285 - RNA, 19 nt, Artificial Sequence
  Description of Artificial Sequence: Synthetic oligonucleotide
  Sense strand starting at position 3155 of SEQ ID NO: 1559957
cugcaucugguugguagaa

SEQ ID NO: 1566286 - RNA, 19 nt, Artificial Sequence
  Description of Artificial Sequence: Synthetic oligonucleotide
  Antisense strand to SEQ ID NO: 1566285
uucuaccaaccagaugcag

SEQ ID NO: 1566287 - RNA, 19 nt, Artificial Sequence
  Description of Artificial Sequence: Synthetic oligonucleotide
  Sense strand starting at position 3156 of SEQ ID NO: 1559957
ugcaucugguugguagaau

SEQ ID NO: 1566288 - RNA, 19 nt, Artificial Sequence
  Description of Artificial Sequence: Synthetic oligonucleotide
  Antisense strand to SEQ ID NO: 1566287
auucuaccaaccagaugca

SEQ ID NO: 1566289 - RNA, 19 nt, Artificial Sequence
  Description of Artificial Sequence: Synthetic oligonucleotide
  Sense strand starting at position 3167 of SEQ ID NO: 1559957
gguagaauuuguccugugu

SEQ ID NO: 1566290 - RNA, 19 nt, Artificial Sequence
  Description of Artificial Sequence: Synthetic oligonucleotide
  Antisense strand to SEQ ID NO: 1566289
acacaggacaaauucuacc

SEQ ID NO: 1566291 - RNA, 19 nt, Artificial Sequence
  Description of Artificial Sequence: Synthetic oligonucleotide
  Sense strand starting at position 3178 of SEQ ID NO: 1559957
uccuguguccuggauucca

SEQ ID NO: 1566292 - RNA, 19 nt, Artificial Sequence
  Description of Artificial Sequence: Synthetic oligonucleotide
  Antisense strand to SEQ ID NO: 1566291
uggaauccaggacacagga

SEQ ID NO: 1566293 - RNA, 19 nt, Artificial Sequence
  Description of Artificial Sequence: Synthetic oligonucleotide
  Sense strand starting at position 3202 of SEQ ID NO: 1559957
aaagaaaccugggaaaugu

SEQ ID NO: 1566294 - RNA, 19 nt, Artificial Sequence
  Description of Artificial Sequence: Synthetic oligonucleotide
  Antisense strand to SEQ ID NO: 1566293
acauuucccagguuucuuu

SEQ ID NO: 1566295 - RNA, 19 nt, Artificial Sequence
  Description of Artificial Sequence: Synthetic oligonucleotide
  Sense strand starting at position 3318 of SEQ ID NO: 1559957
guuuguauuuaccugguga

SEQ ID NO: 1566296 - RNA, 19 nt, Artificial Sequence
  Description of Artificial Sequence: Synthetic oligonucleotide
  Antisense strand to SEQ ID NO: 1566295
ucaccagguaaauacaaac

SEQ ID NO: 1566297 - RNA, 19 nt, Artificial Sequence
  Description of Artificial Sequence: Synthetic oligonucleotide
  Sense strand starting at position 3320 of SEQ ID NO: 1559957
uuguauuuaccuggugagu

SEQ ID NO: 1566298 - RNA, 19 nt, Artificial Sequence
  Description of Artificial Sequence: Synthetic oligonucleotide
  Antisense strand to SEQ ID NO: 1566297
acucaccagguaaauacaa

SEQ ID NO: 1566299 - RNA, 19 nt, Artificial Sequence
  Description of Artificial Sequence: Synthetic oligonucleotide
  Sense strand starting at position 3322 of SEQ ID NO: 1559957
guauuuaccuggugaguac

SEQ ID NO: 1566300 - RNA, 19 nt, Artificial Sequence
  Description of Artificial Sequence: Synthetic oligonucleotide
  Antisense strand to SEQ ID NO: 1566299
guacucaccagguaaauac

SEQ ID NO: 1566301 - RNA, 19 nt, Artificial Sequence
  Description of Artificial Sequence: Synthetic oligonucleotide
  Sense strand starting at position 3869 of SEQ ID NO: 1559957
aggcuaagaucugaaucca

SEQ ID NO: 1566302 - RNA, 19 nt, Artificial Sequence
  Description of Artificial Sequence: Synthetic oligonucleotide
  Antisense strand to SEQ ID NO: 1566301
uggauucagaucuuagccu

SEQ ID NO: 1566303 - RNA, 19 nt, Artificial Sequence
  Description of Artificial Sequence: Synthetic oligonucleotide
  Sense strand starting at position 10 of SEQ ID NO: 1559958
ggagaaagauucuacagag

SEQ ID NO: 1566304 - RNA, 19 nt, Artificial Sequence
  Description of Artificial Sequence: Synthetic oligonucleotide
  Antisense strand to SEQ ID NO: 1566303
cucuguagaaucuuucucc

SEQ ID NO: 1566305 - RNA, 19 nt, Artificial Sequence
  Description of Artificial Sequence: Synthetic oligonucleotide
  Sense strand starting at position 52 of SEQ ID NO: 1559958
ggaccuuucucuccaggaa

SEQ ID NO: 1566306 - RNA, 19 nt, Artificial Sequence
  Description of Artificial Sequence: Synthetic oligonucleotide
  Antisense strand to SEQ ID NO: 1566305
uuccuggagagaaaggucc

SEQ ID NO: 1566307 - RNA, 19 nt, Artificial Sequence
  Description of Artificial Sequence: Synthetic oligonucleotide
  Sense strand starting at position 184 of SEQ ID NO: 1559958
cagccaguccucugggaac

SEQ ID NO: 1566308 - RNA, 19 nt, Artificial Sequence
  Description of Artificial Sequence: Synthetic oligonucleotide
  Antisense strand to SEQ ID NO: 1566307
guucccagaggacuggcug

SEQ ID NO: 1566309 - RNA, 19 nt, Artificial Sequence
  Description of Artificial Sequence: Synthetic oligonucleotide
  Sense strand starting at position 502 of SEQ ID NO: 1559958
gaguguaaacaugaugugu

SEQ ID NO: 1566310 - RNA, 19 nt, Artificial Sequence
  Description of Artificial Sequence: Synthetic oligonucleotide
  Antisense strand to SEQ ID NO: 1566309
acacaucauguuuacacuc

SEQ ID NO: 1566311 - RNA, 19 nt, Artificial Sequence
  Description of Artificial Sequence: Synthetic oligonucleotide
  Sense strand starting at position 508 of SEQ ID NO: 1559958
aaacaugaugugugaccga

SEQ ID NO: 1566312 - RNA, 19 nt, Artificial Sequence
  Description of Artificial Sequence: Synthetic oligonucleotide
  Antisense strand to SEQ ID NO: 1566311
ucggucacacaucauguuu

SEQ ID NO: 1566313 - RNA, 19 nt, Artificial Sequence
  Description of Artificial Sequence: Synthetic oligonucleotide
  Sense strand starting at position 666 of SEQ ID NO: 1559958
gguaggaguggaugaaguu

SEQ ID NO: 1566314 - RNA, 19 nt, Artificial Sequence
  Description of Artificial Sequence: Synthetic oligonucleotide
  Antisense strand to SEQ ID NO: 1566313
aacuucauccacuccuacc

SEQ ID NO: 1566315 - RNA, 19 nt, Artificial Sequence
  Description of Artificial Sequence: Synthetic oligonucleotide
  Sense strand starting at position 985 of SEQ ID NO: 1559958
aacuguuacugccugguaa

SEQ ID NO: 1566316 - RNA, 19 nt, Artificial Sequence
  Description of Artificial Sequence: Synthetic oligonucleotide
  Antisense strand to SEQ ID NO: 1566315
uuaccaggcaguaacaguu

SEQ ID NO: 1566317 - RNA, 19 nt, Artificial Sequence
  Description of Artificial Sequence: Synthetic oligonucleotide
  Sense strand starting at position 986 of SEQ ID NO: 1559958
acuguuacugccugguaaa

SEQ ID NO: 1566318 - RNA, 19 nt, Artificial Sequence
  Description of Artificial Sequence: Synthetic oligonucleotide
  Antisense strand to SEQ ID NO: 1566317
uuuaccaggcaguaacagu

SEQ ID NO: 1566319 - RNA, 19 nt, Artificial Sequence
  Description of Artificial Sequence: Synthetic oligonucleotide
  Sense strand starting at position 996 of SEQ ID NO: 1559958
ccugguaaauaaucugaga

SEQ ID NO: 1566320 - RNA, 19 nt, Artificial Sequence
  Description of Artificial Sequence: Synthetic oligonucleotide
  Antisense strand to SEQ ID NO: 1566319
ucucagauuauuuaccagg

SEQ ID NO: 1566321 - RNA, 19 nt, Artificial Sequence
  Description of Artificial Sequence: Synthetic oligonucleotide
  Sense strand starting at position 1001 of SEQ ID NO: 1559958
uaaauaaucugagagggua

SEQ ID NO: 1566322 - RNA, 19 nt, Artificial Sequence
  Description of Artificial Sequence: Synthetic oligonucleotide
  Antisense strand to SEQ ID NO: 1566321
uacccucucagauuauuua

SEQ ID NO: 1566323 - RNA, 19 nt, Artificial Sequence
  Description of Artificial Sequence: Synthetic oligonucleotide
  Sense strand starting at position 1076 of SEQ ID NO: 1559958
ccuccagagucguuaagaa

SEQ ID NO: 1566324 - RNA, 19 nt, Artificial Sequence
  Description of Artificial Sequence: Synthetic oligonucleotide
  Antisense strand to SEQ ID NO: 1566323
uucuuaacgacucuggagg

SEQ ID NO: 1566325 - RNA, 19 nt, Artificial Sequence
  Description of Artificial Sequence: Synthetic oligonucleotide
  Sense strand starting at position 1105 of SEQ ID NO: 1559958
ggcugagaucaguguaaac

SEQ ID NO: 1566326 - RNA, 19 nt, Artificial Sequence
  Description of Artificial Sequence: Synthetic oligonucleotide
  Antisense strand to SEQ ID NO: 1566325
guuuacacugaucucagcc

SEQ ID NO: 1566327 - RNA, 19 nt, Artificial Sequence
  Description of Artificial Sequence: Synthetic oligonucleotide
  Sense strand starting at position 1234 of SEQ ID NO: 1559958
gucccagucccuuaaagau

SEQ ID NO: 1566328 - RNA, 19 nt, Artificial Sequence
  Description of Artificial Sequence: Synthetic oligonucleotide
  Antisense strand to SEQ ID NO: 1566327
aucuuuaagggacugggac

SEQ ID NO: 1566329 - RNA, 19 nt, Artificial Sequence
  Description of Artificial Sequence: Synthetic oligonucleotide
  Sense strand starting at position 1258 of SEQ ID NO: 1559958
acaucacaguccucugauu

SEQ ID NO: 1566330 - RNA, 19 nt, Artificial Sequence
  Description of Artificial Sequence: Synthetic oligonucleotide
  Antisense strand to SEQ ID NO: 1566329
aaucagaggacugugaugu

SEQ ID NO: 1566331 - RNA, 19 nt, Artificial Sequence
  Description of Artificial Sequence: Synthetic oligonucleotide
  Sense strand starting at position 2154 of SEQ ID NO: 1559958
gccuguguggguuagagau

SEQ ID NO: 1566332 - RNA, 19 nt, Artificial Sequence
  Description of Artificial Sequence: Synthetic oligonucleotide
  Antisense strand to SEQ ID NO: 1566331
aucucuaacccacacaggc

SEQ ID NO: 1566333 - RNA, 19 nt, Artificial Sequence
  Description of Artificial Sequence: Synthetic oligonucleotide
  Sense strand starting at position 2252 of SEQ ID NO: 1559958
gggccuagccguagugauu

SEQ ID NO: 1566334 - RNA, 19 nt, Artificial Sequence
  Description of Artificial Sequence: Synthetic oligonucleotide
  Antisense strand to SEQ ID NO: 1566333
aaucacuacggcuaggccc

SEQ ID NO: 1566335 - RNA, 19 nt, Artificial Sequence
  Description of Artificial Sequence: Synthetic oligonucleotide
  Sense strand starting at position 2263 of SEQ ID NO: 1559958
uagugauuauuucccggca

SEQ ID NO: 1566336 - RNA, 19 nt, Artificial Sequence
  Description of Artificial Sequence: Synthetic oligonucleotide
  Antisense strand to SEQ ID NO: 1566335
ugccgggaaauaaucacua

SEQ ID NO: 1566337 - RNA, 19 nt, Artificial Sequence
  Description of Artificial Sequence: Synthetic oligonucleotide
  Sense strand starting at position 2285 of SEQ ID NO: 1559958
ccuaguccguauuuacaua

SEQ ID NO: 1566338 - RNA, 19 nt, Artificial Sequence
  Description of Artificial Sequence: Synthetic oligonucleotide
  Antisense strand to SEQ ID NO: 1566337
uauguaaauacggacuagg

SEQ ID NO: 1566339 - RNA, 19 nt, Artificial Sequence
  Description of Artificial Sequence: Synthetic oligonucleotide
  Sense strand starting at position 2293 of SEQ ID NO: 1559958
guauuuacauacgcuuuga

SEQ ID NO: 1566340 - RNA, 19 nt, Artificial Sequence
  Description of Artificial Sequence: Synthetic oligonucleotide
  Antisense strand to SEQ ID NO: 1566339
ucaaagcguauguaaauac

SEQ ID NO: 1566341 - RNA, 19 nt, Artificial Sequence
  Description of Artificial Sequence: Synthetic oligonucleotide
  Sense strand starting at position 2297 of SEQ ID NO: 1559958
uuacauacgcuuugaucuu

SEQ ID NO: 1566342 - RNA, 19 nt, Artificial Sequence
  Description of Artificial Sequence: Synthetic oligonucleotide
  Antisense strand to SEQ ID NO: 1566341
aagaucaaagcguauguaa

SEQ ID NO: 1566343 - RNA, 19 nt, Artificial Sequence
  Description of Artificial Sequence: Synthetic oligonucleotide
  Sense strand starting at position 3064 of SEQ ID NO: 1559958
agauccuaauccguauauu

SEQ ID NO: 1566344 - RNA, 19 nt, Artificial Sequence
  Description of Artificial Sequence: Synthetic oligonucleotide
  Antisense strand to SEQ ID NO: 1566343
aauauacggauuaggaucu

SEQ ID NO: 1566345 - RNA, 19 nt, Artificial Sequence
  Description of Artificial Sequence: Synthetic oligonucleotide
  Sense strand starting at position 3158 of SEQ ID NO: 1559958
gaauuuggguuccaguaug

SEQ ID NO: 1566346 - RNA, 19 nt, Artificial Sequence
  Description of Artificial Sequence: Synthetic oligonucleotide
  Antisense strand to SEQ ID NO: 1566345
cauacuggaacccaaauuc

SEQ ID NO: 1566347 - RNA, 19 nt, Artificial Sequence
  Description of Artificial Sequence: Synthetic oligonucleotide
  Sense strand starting at position 3163 of SEQ ID NO: 1559958
uggguuccaguaugccaua

SEQ ID NO: 1566348 - RNA, 19 nt, Artificial Sequence
  Description of Artificial Sequence: Synthetic oligonucleotide
  Antisense strand to SEQ ID NO: 1566347
uauggcauacuggaaccca

SEQ ID NO: 1566349 - RNA, 19 nt, Artificial Sequence
  Description of Artificial Sequence: Synthetic oligonucleotide
  Sense strand starting at position 3176 of SEQ ID NO: 1559958
gccauauaacuuggcaauu

SEQ ID NO: 1566350 - RNA, 19 nt, Artificial Sequence
  Description of Artificial Sequence: Synthetic oligonucleotide
  Antisense strand to SEQ ID NO: 1566349
aauugccaaguuauauggc

SEQ ID NO: 1566351 - RNA, 19 nt, Artificial Sequence
  Description of Artificial Sequence: Synthetic oligonucleotide
  Sense strand starting at position 3191 of SEQ ID NO: 1559958
aauuguaugcauugguaag

SEQ ID NO: 1566352 - RNA, 19 nt, Artificial Sequence
  Description of Artificial Sequence: Synthetic oligonucleotide
  Antisense strand to SEQ ID NO: 1566351
cuuaccaaugcauacaauu

SEQ ID NO: 1566353 - RNA, 19 nt, Artificial Sequence
  Description of Artificial Sequence: Synthetic oligonucleotide
  Sense strand starting at position 3197 of SEQ ID NO: 1559958
augcauugguaagugagaa

SEQ ID NO: 1566354 - RNA, 19 nt, Artificial Sequence
  Description of Artificial Sequence: Synthetic oligonucleotide
  Antisense strand to SEQ ID NO: 1566353
uucucacuuaccaaugcau

SEQ ID NO: 1566355 - RNA, 19 nt, Artificial Sequence
  Description of Artificial Sequence: Synthetic oligonucleotide
  Sense strand starting at position 3198 of SEQ ID NO: 1559958
ugcauugguaagugagaaa

SEQ ID NO: 1566356 - RNA, 19 nt, Artificial Sequence
  Description of Artificial Sequence: Synthetic oligonucleotide
  Antisense strand to SEQ ID NO: 1566355
uuucucacuuaccaaugca

SEQ ID NO: 1566357 - RNA, 19 nt, Artificial Sequence
  Description of Artificial Sequence: Synthetic oligonucleotide
  Sense strand starting at position 3247 of SEQ ID NO: 1559958
caccucagucugugagagu

SEQ ID NO: 1566358 - RNA, 19 nt, Artificial Sequence
  Description of Artificial Sequence: Synthetic oligonucleotide
  Antisense strand to SEQ ID NO: 1566357
acucucacagacugaggug

SEQ ID NO: 1566359 - RNA, 19 nt, Artificial Sequence
  Description of Artificial Sequence: Synthetic oligonucleotide
  Sense strand starting at position 3284 of SEQ ID NO: 1559958
ugaggguucggcuuucguu

SEQ ID NO: 1566360 - RNA, 19 nt, Artificial Sequence
  Description of Artificial Sequence: Synthetic oligonucleotide
  Antisense strand to SEQ ID NO: 1566359
aacgaaagccgaacccuca

SEQ ID NO: 1566361 - RNA, 19 nt, Artificial Sequence
  Description of Artificial Sequence: Synthetic oligonucleotide
  Sense strand starting at position 3285 of SEQ ID NO: 1559958
gaggguucggcuuucguuu

SEQ ID NO: 1566362 - RNA, 19 nt, Artificial Sequence
  Description of Artificial Sequence: Synthetic oligonucleotide
  Antisense strand to SEQ ID NO: 1566361
aaacgaaagccgaacccuc

SEQ ID NO: 1566363 - RNA, 19 nt, Artificial Sequence
  Description of Artificial Sequence: Synthetic oligonucleotide
  Sense strand starting at position 3344 of SEQ ID NO: 1559958
uuugguuucuagcuuggaa

SEQ ID NO: 1566364 - RNA, 19 nt, Artificial Sequence
  Description of Artificial Sequence: Synthetic oligonucleotide
  Antisense strand to SEQ ID NO: 1566363
uuccaagcuagaaaccaaa

SEQ ID NO: 1566365 - RNA, 19 nt, Artificial Sequence
  Description of Artificial Sequence: Synthetic oligonucleotide
  Sense strand starting at position 3346 of SEQ ID NO: 1559958
ugguuucuagcuuggaacu

SEQ ID NO: 1566366 - RNA, 19 nt, Artificial Sequence
  Description of Artificial Sequence: Synthetic oligonucleotide
  Antisense strand to SEQ ID NO: 1566365
aguuccaagcuagaaacca

SEQ ID NO: 1566367 - RNA, 19 nt, Artificial Sequence
  Description of Artificial Sequence: Synthetic oligonucleotide
  Sense strand starting at position 3347 of SEQ ID NO: 1559958
gguuucuagcuuggaacuu

SEQ ID NO: 1566368 - RNA, 19 nt, Artificial Sequence
  Description of Artificial Sequence: Synthetic oligonucleotide
  Antisense strand to SEQ ID NO: 1566367
aaguuccaagcuagaaacc

SEQ ID NO: 1566369 - RNA, 19 nt, Artificial Sequence
  Description of Artificial Sequence: Synthetic oligonucleotide
  Sense strand starting at position 3458 of SEQ ID NO: 1559958
aucuauuacugucugguga

SEQ ID NO: 1566370 - RNA, 19 nt, Artificial Sequence
  Description of Artificial Sequence: Synthetic oligonucleotide
  Antisense strand to SEQ ID NO: 1566369
ucaccagacaguaauagau

SEQ ID NO: 1566371 - RNA, 19 nt, Artificial Sequence
  Description of Artificial Sequence: Synthetic oligonucleotide
  Sense strand starting at position 3533 of SEQ ID NO: 1559958
cucagagaucaguguguau

SEQ ID NO: 1566372 - RNA, 19 nt, Artificial Sequence
  Description of Artificial Sequence: Synthetic oligonucleotide
  Antisense strand to SEQ ID NO: 1566371
auacacacugaucucugag

SEQ ID NO: 1566373 - RNA, 19 nt, Artificial Sequence
  Description of Artificial Sequence: Synthetic oligonucleotide
  Sense strand starting at position 3536 of SEQ ID NO: 1559958
agagaucaguguguaucca

SEQ ID NO: 1566374 - RNA, 19 nt, Artificial Sequence
  Description of Artificial Sequence: Synthetic oligonucleotide
  Antisense strand to SEQ ID NO: 1566373
uggauacacacugaucucu

SEQ ID NO: 1566375 - RNA, 19 nt, Artificial Sequence
  Description of Artificial Sequence: Synthetic oligonucleotide
  Sense strand starting at position 3537 of SEQ ID NO: 1559958
gagaucaguguguauccaa

SEQ ID NO: 1566376 - RNA, 19 nt, Artificial Sequence
  Description of Artificial Sequence: Synthetic oligonucleotide
  Antisense strand to SEQ ID NO: 1566375
uuggauacacacugaucuc

SEQ ID NO: 1566377 - RNA, 19 nt, Artificial Sequence
  Description of Artificial Sequence: Synthetic oligonucleotide
  Sense strand starting at position 3540 of SEQ ID NO: 1559958
aucaguguguauccaacau

SEQ ID NO: 1566378 - RNA, 19 nt, Artificial Sequence
  Description of Artificial Sequence: Synthetic oligonucleotide
  Antisense strand to SEQ ID NO: 1566377
auguuggauacacacugau

SEQ ID NO: 1566379 - RNA, 19 nt, Artificial Sequence
  Description of Artificial Sequence: Synthetic oligonucleotide
  Sense strand starting at position 3568 of SEQ ID NO: 1559958
ugggcucuugcagaauguu

SEQ ID NO: 1566380 - RNA, 19 nt, Artificial Sequence
  Description of Artificial Sequence: Synthetic oligonucleotide
  Antisense strand to SEQ ID NO: 1566379
aacauucugcaagagccca

SEQ ID NO: 1566381 - RNA, 19 nt, Artificial Sequence
  Description of Artificial Sequence: Synthetic oligonucleotide
  Sense strand starting at position 3754 of SEQ ID NO: 1559958
cugagaucucacugaaacc

SEQ ID NO: 1566382 - RNA, 19 nt, Artificial Sequence
  Description of Artificial Sequence: Synthetic oligonucleotide
  Antisense strand to SEQ ID NO: 1566381
gguuucagugagaucucag

SEQ ID NO: 1566383 - RNA, 19 nt, Artificial Sequence
  Description of Artificial Sequence: Synthetic oligonucleotide
  Sense strand starting at position 651 of SEQ ID NO: 1559959
gaaaguuugaggugcccua

SEQ ID NO: 1566384 - RNA, 19 nt, Artificial Sequence
  Description of Artificial Sequence: Synthetic oligonucleotide
  Antisense strand to SEQ ID NO: 1566383
uagggcaccucaaacuuuc

SEQ ID NO: 1566385 - RNA, 19 nt, Artificial Sequence
  Description of Artificial Sequence: Synthetic oligonucleotide
  Sense strand starting at position 786 of SEQ ID NO: 1559959
ccugaacaaucaugggaac

SEQ ID NO: 1566386 - RNA, 19 nt, Artificial Sequence
  Description of Artificial Sequence: Synthetic oligonucleotide
  Antisense strand to SEQ ID NO: 1566385
guucccaugauuguucagg

SEQ ID NO: 1566387 - RNA, 19 nt, Artificial Sequence
  Description of Artificial Sequence: Synthetic oligonucleotide
  Sense strand starting at position 810 of SEQ ID NO: 1559959
gggacauucugagagcuag

SEQ ID NO: 1566388 - RNA, 19 nt, Artificial Sequence
  Description of Artificial Sequence: Synthetic oligonucleotide
  Antisense strand to SEQ ID NO: 1566387
cuagcucucagaauguccc

SEQ ID NO: 1566389 - RNA, 19 nt, Artificial Sequence
  Description of Artificial Sequence: Synthetic oligonucleotide
  Sense strand starting at position 995 of SEQ ID NO: 1559959
gcugaaaccuugucucuag

SEQ ID NO: 1566390 - RNA, 19 nt, Artificial Sequence
  Description of Artificial Sequence: Synthetic oligonucleotide
  Antisense strand to SEQ ID NO: 1566389
cuagagacaagguuucagc

SEQ ID NO: 1566391 - RNA, 19 nt, Artificial Sequence
  Description of Artificial Sequence: Synthetic oligonucleotide
  Sense strand starting at position 996 of SEQ ID NO: 1559959
cugaaaccuugucucuaga

SEQ ID NO: 1566392 - RNA, 19 nt, Artificial Sequence
  Description of Artificial Sequence: Synthetic oligonucleotide
  Antisense strand to SEQ ID NO: 1566391
ucuagagacaagguuucag

SEQ ID NO: 1566393 - RNA, 19 nt, Artificial Sequence
  Description of Artificial Sequence: Synthetic oligonucleotide
  Sense strand starting at position 1019 of SEQ ID NO: 1559959
guacaaauauuagcugaga

SEQ ID NO: 1566394 - RNA, 19 nt, Artificial Sequence
  Description of Artificial Sequence: Synthetic oligonucleotide
  Antisense strand to SEQ ID NO: 1566393
ucucagcuaauauuuguac

SEQ ID NO: 1566395 - RNA, 19 nt, Artificial Sequence
  Description of Artificial Sequence: Synthetic oligonucleotide
  Sense strand starting at position 1048 of SEQ ID NO: 1559959
gcgucucuggucccaguua

SEQ ID NO: 1566396 - RNA, 19 nt, Artificial Sequence
  Description of Artificial Sequence: Synthetic oligonucleotide
  Antisense strand to SEQ ID NO: 1566395
uaacugggaccagagacgc

SEQ ID NO: 1566397 - RNA, 19 nt, Artificial Sequence
  Description of Artificial Sequence: Synthetic oligonucleotide
  Sense strand starting at position 1237 of SEQ ID NO: 1559959
gagaguuccgaugagguca

SEQ ID NO: 1566398 - RNA, 19 nt, Artificial Sequence
  Description of Artificial Sequence: Synthetic oligonucleotide
  Antisense strand to SEQ ID NO: 1566397
ugaccucaucggaacucuc

SEQ ID NO: 1566399 - RNA, 19 nt, Artificial Sequence
  Description of Artificial Sequence: Synthetic oligonucleotide
  Sense strand starting at position 1311 of SEQ ID NO: 1559959
uucugaaggucucugggua

SEQ ID NO: 1566400 - RNA, 19 nt, Artificial Sequence
  Description of Artificial Sequence: Synthetic oligonucleotide
  Antisense strand to SEQ ID NO: 1566399
uacccagagaccuucagaa

SEQ ID NO: 1566401 - RNA, 19 nt, Artificial Sequence
  Description of Artificial Sequence: Synthetic oligonucleotide
  Sense strand starting at position 1312 of SEQ ID NO: 1559959
ucugaaggucucuggguaa

SEQ ID NO: 1566402 - RNA, 19 nt, Artificial Sequence
  Description of Artificial Sequence: Synthetic oligonucleotide
  Antisense strand to SEQ ID NO: 1566401
uuacccagagaccuucaga

SEQ ID NO: 1566403 - RNA, 19 nt, Artificial Sequence
  Description of Artificial Sequence: Synthetic oligonucleotide
  Sense strand starting at position 1315 of SEQ ID NO: 1559959
gaaggucucuggguaauca

SEQ ID NO: 1566404 - RNA, 19 nt, Artificial Sequence
  Description of Artificial Sequence: Synthetic oligonucleotide
  Antisense strand to SEQ ID NO: 1566403
ugauuacccagagaccuuc

SEQ ID NO: 1566405 - RNA, 19 nt, Artificial Sequence
  Description of Artificial Sequence: Synthetic oligonucleotide
  Sense strand starting at position 1438 of SEQ ID NO: 1559959
acuggagccucacaggaau

SEQ ID NO: 1566406 - RNA, 19 nt, Artificial Sequence
  Description of Artificial Sequence: Synthetic oligonucleotide
  Antisense strand to SEQ ID NO: 1566405
auuccugugaggcuccagu

SEQ ID NO: 1566407 - RNA, 19 nt, Artificial Sequence
  Description of Artificial Sequence: Synthetic oligonucleotide
  Sense strand starting at position 2148 of SEQ ID NO: 1559959
guacuuugcgaauaguuag

SEQ ID NO: 1566408 - RNA, 19 nt, Artificial Sequence
  Description of Artificial Sequence: Synthetic oligonucleotide
  Antisense strand to SEQ ID NO: 1566407
cuaacuauucgcaaaguac

SEQ ID NO: 1566409 - RNA, 19 nt, Artificial Sequence
  Description of Artificial Sequence: Synthetic oligonucleotide
  Sense strand starting at position 2206 of SEQ ID NO: 1559959
gauggcucuuggcuguaau

SEQ ID NO: 1566410 - RNA, 19 nt, Artificial Sequence
  Description of Artificial Sequence: Synthetic oligonucleotide
  Antisense strand to SEQ ID NO: 1566409
auuacagccaagagccauc

SEQ ID NO: 1566411 - RNA, 19 nt, Artificial Sequence
  Description of Artificial Sequence: Synthetic oligonucleotide
  Sense strand starting at position 2411 of SEQ ID NO: 1559959
guacguuucagugagccga

SEQ ID NO: 1566412 - RNA, 19 nt, Artificial Sequence
  Description of Artificial Sequence: Synthetic oligonucleotide
  Antisense strand to SEQ ID NO: 1566411
ucggcucacugaaacguac

SEQ ID NO: 1566413 - RNA, 19 nt, Artificial Sequence
  Description of Artificial Sequence: Synthetic oligonucleotide
  Sense strand starting at position 2462 of SEQ ID NO: 1559959
aagggagacugugucuaaa

SEQ ID NO: 1566414 - RNA, 19 nt, Artificial Sequence
  Description of Artificial Sequence: Synthetic oligonucleotide
  Antisense strand to SEQ ID NO: 1566413
uuuagacacagucucccuu

SEQ ID NO: 1566415 - RNA, 19 nt, Artificial Sequence
  Description of Artificial Sequence: Synthetic oligonucleotide
  Sense strand starting at position 2904 of SEQ ID NO: 1559959
ggucuagaucuggacguau

SEQ ID NO: 1566416 - RNA, 19 nt, Artificial Sequence
  Description of Artificial Sequence: Synthetic oligonucleotide
  Antisense strand to SEQ ID NO: 1566415
auacguccagaucuagacc

SEQ ID NO: 1566417 - RNA, 19 nt, Artificial Sequence
  Description of Artificial Sequence: Synthetic oligonucleotide
  Sense strand starting at position 2906 of SEQ ID NO: 1559959
ucuagaucuggacguauua

SEQ ID NO: 1566418 - RNA, 19 nt, Artificial Sequence
  Description of Artificial Sequence: Synthetic oligonucleotide
  Antisense strand to SEQ ID NO: 1566417
uaauacguccagaucuaga

SEQ ID NO: 1566419 - RNA, 19 nt, Artificial Sequence
  Description of Artificial Sequence: Synthetic oligonucleotide
  Sense strand starting at position 2918 of SEQ ID NO: 1559959
cguauuaggaucuagagcu

SEQ ID NO: 1566420 - RNA, 19 nt, Artificial Sequence
  Description of Artificial Sequence: Synthetic oligonucleotide
  Antisense strand to SEQ ID NO: 1566419
agcucuagauccuaauacg

SEQ ID NO: 1566421 - RNA, 19 nt, Artificial Sequence
  Description of Artificial Sequence: Synthetic oligonucleotide
  Sense strand starting at position 2934 of SEQ ID NO: 1559959
gcuggcaggaagugauaau

SEQ ID NO: 1566422 - RNA, 19 nt, Artificial Sequence
  Description of Artificial Sequence: Synthetic oligonucleotide
  Antisense strand to SEQ ID NO: 1566421
auuaucacuuccugccagc

SEQ ID NO: 1566423 - RNA, 19 nt, Artificial Sequence
  Description of Artificial Sequence: Synthetic oligonucleotide
  Sense strand starting at position 2979 of SEQ ID NO: 1559959
gauggacauugagauuaag

SEQ ID NO: 1566424 - RNA, 19 nt, Artificial Sequence
  Description of Artificial Sequence: Synthetic oligonucleotide
  Antisense strand to SEQ ID NO: 1566423
cuuaaucucaauguccauc

SEQ ID NO: 1566425 - RNA, 19 nt, Artificial Sequence
  Description of Artificial Sequence: Synthetic oligonucleotide
  Sense strand starting at position 3102 of SEQ ID NO: 1559959
gacguuaucucauuguauu

SEQ ID NO: 1566426 - RNA, 19 nt, Artificial Sequence
  Description of Artificial Sequence: Synthetic oligonucleotide
  Antisense strand to SEQ ID NO: 1566425
aauacaaugagauaacguc

SEQ ID NO: 1566427 - RNA, 19 nt, Artificial Sequence
  Description of Artificial Sequence: Synthetic oligonucleotide
  Sense strand starting at position 3103 of SEQ ID NO: 1559959
acguuaucucauuguauug

SEQ ID NO: 1566428 - RNA, 19 nt, Artificial Sequence
  Description of Artificial Sequence: Synthetic oligonucleotide
  Antisense strand to SEQ ID NO: 1566427
caauacaaugagauaacgu

SEQ ID NO: 1566429 - RNA, 19 nt, Artificial Sequence
  Description of Artificial Sequence: Synthetic oligonucleotide
  Sense strand starting at position 3214 of SEQ ID NO: 1559959
ccggaaguguggcuuucau

SEQ ID NO: 1566430 - RNA, 19 nt, Artificial Sequence
  Description of Artificial Sequence: Synthetic oligonucleotide
  Antisense strand to SEQ ID NO: 1566429
augaaagccacacuuccgg

SEQ ID NO: 1566431 - RNA, 19 nt, Artificial Sequence
  Description of Artificial Sequence: Synthetic oligonucleotide
  Sense strand starting at position 3313 of SEQ ID NO: 1559959
gcgauaccagcuugugaau

SEQ ID NO: 1566432 - RNA, 19 nt, Artificial Sequence
  Description of Artificial Sequence: Synthetic oligonucleotide
  Antisense strand to SEQ ID NO: 1566431
auucacaagcugguaucgc

SEQ ID NO: 1566433 - RNA, 19 nt, Artificial Sequence
  Description of Artificial Sequence: Synthetic oligonucleotide
  Sense strand starting at position 3348 of SEQ ID NO: 1559959
ggaaguguggcauacucca

SEQ ID NO: 1566434 - RNA, 19 nt, Artificial Sequence
  Description of Artificial Sequence: Synthetic oligonucleotide
  Antisense strand to SEQ ID NO: 1566433
uggaguaugccacacuucc

SEQ ID NO: 1566435 - RNA, 19 nt, Artificial Sequence
  Description of Artificial Sequence: Synthetic oligonucleotide
  Sense strand starting at position 3361 of SEQ ID NO: 1559959
acuccaguccuguguuuac

SEQ ID NO: 1566436 - RNA, 19 nt, Artificial Sequence
  Description of Artificial Sequence: Synthetic oligonucleotide
  Antisense strand to SEQ ID NO: 1566435
guaaacacaggacuggagu

SEQ ID NO: 1566437 - RNA, 19 nt, Artificial Sequence
  Description of Artificial Sequence: Synthetic oligonucleotide
  Sense strand starting at position 3388 of SEQ ID NO: 1559959
cggaaguguggcuucguuu

SEQ ID NO: 1566438 - RNA, 19 nt, Artificial Sequence
  Description of Artificial Sequence: Synthetic oligonucleotide
  Antisense strand to SEQ ID NO: 1566437
aaacgaagccacacuuccg

SEQ ID NO: 1566439 - RNA, 19 nt, Artificial Sequence
  Description of Artificial Sequence: Synthetic oligonucleotide
  Sense strand starting at position 3391 of SEQ ID NO: 1559959
aaguguggcuucguuuaca

SEQ ID NO: 1566440 - RNA, 19 nt, Artificial Sequence
  Description of Artificial Sequence: Synthetic oligonucleotide
  Antisense strand to SEQ ID NO: 1566439
uguaaacgaagccacacuu

SEQ ID NO: 1566441 - RNA, 19 nt, Artificial Sequence
  Description of Artificial Sequence: Synthetic oligonucleotide
  Sense strand starting at position 3394 of SEQ ID NO: 1559959
uguggcuucguuuacaguu

SEQ ID NO: 1566442 - RNA, 19 nt, Artificial Sequence
  Description of Artificial Sequence: Synthetic oligonucleotide
  Antisense strand to SEQ ID NO: 1566441
aacuguaaacgaagccaca

SEQ ID NO: 1566443 - RNA, 19 nt, Artificial Sequence
  Description of Artificial Sequence: Synthetic oligonucleotide
  Sense strand starting at position 3460 of SEQ ID NO: 1559959
cggauuugacgaugguguu

SEQ ID NO: 1566444 - RNA, 19 nt, Artificial Sequence
  Description of Artificial Sequence: Synthetic oligonucleotide
  Antisense strand to SEQ ID NO: 1566443
aacaccaucgucaaauccg

SEQ ID NO: 1566445 - RNA, 19 nt, Artificial Sequence
  Description of Artificial Sequence: Synthetic oligonucleotide
  Sense strand starting at position 3469 of SEQ ID NO: 1559959
cgaugguguucggucuuga

SEQ ID NO: 1566446 - RNA, 19 nt, Artificial Sequence
  Description of Artificial Sequence: Synthetic oligonucleotide
  Antisense strand to SEQ ID NO: 1566445
ucaagaccgaacaccaucg

SEQ ID NO: 1566447 - RNA, 19 nt, Artificial Sequence
  Description of Artificial Sequence: Synthetic oligonucleotide
  Sense strand starting at position 3474 of SEQ ID NO: 1559959
guguucggucuugaaugga

SEQ ID NO: 1566448 - RNA, 19 nt, Artificial Sequence
  Description of Artificial Sequence: Synthetic oligonucleotide
  Antisense strand to SEQ ID NO: 1566447
uccauucaagaccgaacac

SEQ ID NO: 1566449 - RNA, 19 nt, Artificial Sequence
  Description of Artificial Sequence: Synthetic oligonucleotide
  Sense strand starting at position 3477 of SEQ ID NO: 1559959
uucggucuugaauggaaau

SEQ ID NO: 1566450 - RNA, 19 nt, Artificial Sequence
  Description of Artificial Sequence: Synthetic oligonucleotide
  Antisense strand to SEQ ID NO: 1566449
auuuccauucaagaccgaa

SEQ ID NO: 1566451 - RNA, 19 nt, Artificial Sequence
  Description of Artificial Sequence: Synthetic oligonucleotide
  Sense strand starting at position 3479 of SEQ ID NO: 1559959
cggucuugaauggaaaugu

SEQ ID NO: 1566452 - RNA, 19 nt, Artificial Sequence
  Description of Artificial Sequence: Synthetic oligonucleotide
  Antisense strand to SEQ ID NO: 1566451
acauuuccauucaagaccg

SEQ ID NO: 1566453 - RNA, 19 nt, Artificial Sequence
  Description of Artificial Sequence: Synthetic oligonucleotide
  Sense strand starting at position 3529 of SEQ ID NO: 1559959
gauaguagguauccggagu

SEQ ID NO: 1566454 - RNA, 19 nt, Artificial Sequence
  Description of Artificial Sequence: Synthetic oligonucleotide
  Antisense strand to SEQ ID NO: 1566453
acuccggauaccuacuauc

SEQ ID NO: 1566455 - RNA, 19 nt, Artificial Sequence
  Description of Artificial Sequence: Synthetic oligonucleotide
  Sense strand starting at position 3532 of SEQ ID NO: 1559959
aguagguauccggagucga

SEQ ID NO: 1566456 - RNA, 19 nt, Artificial Sequence
  Description of Artificial Sequence: Synthetic oligonucleotide
  Antisense strand to SEQ ID NO: 1566455
ucgacuccggauaccuacu

SEQ ID NO: 1566457 - RNA, 19 nt, Artificial Sequence
  Description of Artificial Sequence: Synthetic oligonucleotide
  Sense strand starting at position 3533 of SEQ ID NO: 1559959
guagguauccggagucgau

SEQ ID NO: 1566458 - RNA, 19 nt, Artificial Sequence
  Description of Artificial Sequence: Synthetic oligonucleotide
  Antisense strand to SEQ ID NO: 1566457
aucgacuccggauaccuac

SEQ ID NO: 1566459 - RNA, 19 nt, Artificial Sequence
  Description of Artificial Sequence: Synthetic oligonucleotide
  Sense strand starting at position 3586 of SEQ ID NO: 1559959
gggcaaaguuucccacguu

SEQ ID NO: 1566460 - RNA, 19 nt, Artificial Sequence
  Description of Artificial Sequence: Synthetic oligonucleotide
  Antisense strand to SEQ ID NO: 1566459
aacgugggaaacuuugccc

SEQ ID NO: 1566461 - RNA, 19 nt, Artificial Sequence
  Description of Artificial Sequence: Synthetic oligonucleotide
  Sense strand starting at position 3698 of SEQ ID NO: 1559959
cugauucggcgcgauuuga

SEQ ID NO: 1566462 - RNA, 19 nt, Artificial Sequence
  Description of Artificial Sequence: Synthetic oligonucleotide
  Antisense strand to SEQ ID NO: 1566461
ucaaaucgcgccgaaucag

SEQ ID NO: 1566463 - RNA, 19 nt, Artificial Sequence
  Description of Artificial Sequence: Synthetic oligonucleotide
  Sense strand starting at position 82 of SEQ ID NO: 1559960
ucuagaaugggcuaucuca

SEQ ID NO: 1566464 - RNA, 19 nt, Artificial Sequence
  Description of Artificial Sequence: Synthetic oligonucleotide
  Antisense strand to SEQ ID NO: 1566463
ugagauagcccauucuaga

SEQ ID NO: 1566465 - RNA, 19 nt, Artificial Sequence
  Description of Artificial Sequence: Synthetic oligonucleotide
  Sense strand starting at position 107 of SEQ ID NO: 1559960
caagucuagcucuaguuga

SEQ ID NO: 1566466 - RNA, 19 nt, Artificial Sequence
  Description of Artificial Sequence: Synthetic oligonucleotide
  Antisense strand to SEQ ID NO: 1566465
ucaacuagagcuagacuug

SEQ ID NO: 1566467 - RNA, 19 nt, Artificial Sequence
  Description of Artificial Sequence: Synthetic oligonucleotide
  Sense strand starting at position 225 of SEQ ID NO: 1559960
ucuggaaugggcuaucuca

SEQ ID NO: 1566468 - RNA, 19 nt, Artificial Sequence
  Description of Artificial Sequence: Synthetic oligonucleotide
  Antisense strand to SEQ ID NO: 1566467
ugagauagcccauuccaga

SEQ ID NO: 1566469 - RNA, 19 nt, Artificial Sequence
  Description of Artificial Sequence: Synthetic oligonucleotide
  Sense strand starting at position 255 of SEQ ID NO: 1559960
uguguucuguagcuaauuu

SEQ ID NO: 1566470 - RNA, 19 nt, Artificial Sequence
  Description of Artificial Sequence: Synthetic oligonucleotide
  Antisense strand to SEQ ID NO: 1566469
aaauuagcuacagaacaca

SEQ ID NO: 1566471 - RNA, 19 nt, Artificial Sequence
  Description of Artificial Sequence: Synthetic oligonucleotide
  Sense strand starting at position 281 of SEQ ID NO: 1559960
gacucaagaucaguggguu

SEQ ID NO: 1566472 - RNA, 19 nt, Artificial Sequence
  Description of Artificial Sequence: Synthetic oligonucleotide
  Antisense strand to SEQ ID NO: 1566471
aacccacugaucuugaguc

SEQ ID NO: 1566473 - RNA, 19 nt, Artificial Sequence
  Description of Artificial Sequence: Synthetic oligonucleotide
  Sense strand starting at position 282 of SEQ ID NO: 1559960
acucaagaucaguggguua

SEQ ID NO: 1566474 - RNA, 19 nt, Artificial Sequence
  Description of Artificial Sequence: Synthetic oligonucleotide
  Antisense strand to SEQ ID NO: 1566473
uaacccacugaucuugagu

SEQ ID NO: 1566475 - RNA, 19 nt, Artificial Sequence
  Description of Artificial Sequence: Synthetic oligonucleotide
  Sense strand starting at position 284 of SEQ ID NO: 1559960
ucaagaucaguggguuacu

SEQ ID NO: 1566476 - RNA, 19 nt, Artificial Sequence
  Description of Artificial Sequence: Synthetic oligonucleotide
  Antisense strand to SEQ ID NO: 1566475
aguaacccacugaucuuga

SEQ ID NO: 1566477 - RNA, 19 nt, Artificial Sequence
  Description of Artificial Sequence: Synthetic oligonucleotide
  Sense strand starting at position 356 of SEQ ID NO: 1559960
caggaacucugagcuuuga

SEQ ID NO: 1566478 - RNA, 19 nt, Artificial Sequence
  Description of Artificial Sequence: Synthetic oligonucleotide
  Antisense strand to SEQ ID NO: 1566477
ucaaagcucagaguuccug

SEQ ID NO: 1566479 - RNA, 19 nt, Artificial Sequence
  Description of Artificial Sequence: Synthetic oligonucleotide
  Sense strand starting at position 428 of SEQ ID NO: 1559960
cguagauggucuguauuug

SEQ ID NO: 1566480 - RNA, 19 nt, Artificial Sequence
  Description of Artificial Sequence: Synthetic oligonucleotide
  Antisense strand to SEQ ID NO: 1566479
caaauacagaccaucuacg

SEQ ID NO: 1566481 - RNA, 19 nt, Artificial Sequence
  Description of Artificial Sequence: Synthetic oligonucleotide
  Sense strand starting at position 466 of SEQ ID NO: 1559960
ggucuaugcugggcuauuu

SEQ ID NO: 1566482 - RNA, 19 nt, Artificial Sequence
  Description of Artificial Sequence: Synthetic oligonucleotide
  Antisense strand to SEQ ID NO: 1566481
aaauagcccagcauagacc

SEQ ID NO: 1566483 - RNA, 19 nt, Artificial Sequence
  Description of Artificial Sequence: Synthetic oligonucleotide
  Sense strand starting at position 495 of SEQ ID NO: 1559960
aagaguuuacugggcuauc

SEQ ID NO: 1566484 - RNA, 19 nt, Artificial Sequence
  Description of Artificial Sequence: Synthetic oligonucleotide
  Antisense strand to SEQ ID NO: 1566483
gauagcccaguaaacucuu

SEQ ID NO: 1566485 - RNA, 19 nt, Artificial Sequence
  Description of Artificial Sequence: Synthetic oligonucleotide
  Sense strand starting at position 506 of SEQ ID NO: 1559960
gggcuaucucagcacagaa

SEQ ID NO: 1566486 - RNA, 19 nt, Artificial Sequence
  Description of Artificial Sequence: Synthetic oligonucleotide
  Antisense strand to SEQ ID NO: 1566485
uucugugcugagauagccc

SEQ ID NO: 1566487 - RNA, 19 nt, Artificial Sequence
  Description of Artificial Sequence: Synthetic oligonucleotide
  Sense strand starting at position 508 of SEQ ID NO: 1559960
gcuaucucagcacagaaau

SEQ ID NO: 1566488 - RNA, 19 nt, Artificial Sequence
  Description of Artificial Sequence: Synthetic oligonucleotide
  Antisense strand to SEQ ID NO: 1566487
auuucugugcugagauagc

SEQ ID NO: 1566489 - RNA, 19 nt, Artificial Sequence
  Description of Artificial Sequence: Synthetic oligonucleotide
  Sense strand starting at position 615 of SEQ ID NO: 1559960
gcaggauugggcuaucuca

SEQ ID NO: 1566490 - RNA, 19 nt, Artificial Sequence
  Description of Artificial Sequence: Synthetic oligonucleotide
  Antisense strand to SEQ ID NO: 1566489
ugagauagcccaauccugc

SEQ ID NO: 1566491 - RNA, 19 nt, Artificial Sequence
  Description of Artificial Sequence: Synthetic oligonucleotide
  Sense strand starting at position 795 of SEQ ID NO: 1559960
ccuccucuucuuuggagau

SEQ ID NO: 1566492 - RNA, 19 nt, Artificial Sequence
  Description of Artificial Sequence: Synthetic oligonucleotide
  Antisense strand to SEQ ID NO: 1566491
aucuccaaagaagaggagg

SEQ ID NO: 1566493 - RNA, 19 nt, Artificial Sequence
  Description of Artificial Sequence: Synthetic oligonucleotide
  Sense strand starting at position 836 of SEQ ID NO: 1559960
acagguggugccuaggaua

SEQ ID NO: 1566494 - RNA, 19 nt, Artificial Sequence
  Description of Artificial Sequence: Synthetic oligonucleotide
  Antisense strand to SEQ ID NO: 1566493
uauccuaggcaccaccugu

SEQ ID NO: 1566495 - RNA, 19 nt, Artificial Sequence
  Description of Artificial Sequence: Synthetic oligonucleotide
  Sense strand starting at position 980 of SEQ ID NO: 1559960
agugccauuccagaaugga

SEQ ID NO: 1566496 - RNA, 19 nt, Artificial Sequence
  Description of Artificial Sequence: Synthetic oligonucleotide
  Antisense strand to SEQ ID NO: 1566495
uccauucuggaauggcacu

SEQ ID NO: 1566497 - RNA, 19 nt, Artificial Sequence
  Description of Artificial Sequence: Synthetic oligonucleotide
  Sense strand starting at position 990 of SEQ ID NO: 1559960
cagaauggacucugacagu

SEQ ID NO: 1566498 - RNA, 19 nt, Artificial Sequence
  Description of Artificial Sequence: Synthetic oligonucleotide
  Antisense strand to SEQ ID NO: 1566497
acugucagaguccauucug

SEQ ID NO: 1566499 - RNA, 19 nt, Artificial Sequence
  Description of Artificial Sequence: Synthetic oligonucleotide
  Sense strand starting at position 1009 of SEQ ID NO: 1559960
aagaaugaauuugguggaa

SEQ ID NO: 1566500 - RNA, 19 nt, Artificial Sequence
  Description of Artificial Sequence: Synthetic oligonucleotide
  Antisense strand to SEQ ID NO: 1566499
uuccaccaaauucauucuu

SEQ ID NO: 1566501 - RNA, 19 nt, Artificial Sequence
  Description of Artificial Sequence: Synthetic oligonucleotide
  Sense strand starting at position 1741 of SEQ ID NO: 1559960
cccugagaucuuuagcucu

SEQ ID NO: 1566502 - RNA, 19 nt, Artificial Sequence
  Description of Artificial Sequence: Synthetic oligonucleotide
  Antisense strand to SEQ ID NO: 1566501
agagcuaaagaucucaggg

SEQ ID NO: 1566503 - RNA, 19 nt, Artificial Sequence
  Description of Artificial Sequence: Synthetic oligonucleotide
  Sense strand starting at position 1743 of SEQ ID NO: 1559960
cugagaucuuuagcucuga

SEQ ID NO: 1566504 - RNA, 19 nt, Artificial Sequence
  Description of Artificial Sequence: Synthetic oligonucleotide
  Antisense strand to SEQ ID NO: 1566503
ucagagcuaaagaucucag

SEQ ID NO: 1566505 - RNA, 19 nt, Artificial Sequence
  Description of Artificial Sequence: Synthetic oligonucleotide
  Sense strand starting at position 2421 of SEQ ID NO: 1559960
auagaaacgucuuuauuga

SEQ ID NO: 1566506 - RNA, 19 nt, Artificial Sequence
  Description of Artificial Sequence: Synthetic oligonucleotide
  Antisense strand to SEQ ID NO: 1566505
ucaauaaagacguuucuau

SEQ ID NO: 1566507 - RNA, 19 nt, Artificial Sequence
  Description of Artificial Sequence: Synthetic oligonucleotide
  Sense strand starting at position 2422 of SEQ ID NO: 1559960
uagaaacgucuuuauugaa

SEQ ID NO: 1566508 - RNA, 19 nt, Artificial Sequence
  Description of Artificial Sequence: Synthetic oligonucleotide
  Antisense strand to SEQ ID NO: 1566507
uucaauaaagacguuucua

SEQ ID NO: 1566509 - RNA, 19 nt, Artificial Sequence
  Description of Artificial Sequence: Synthetic oligonucleotide
  Sense strand starting at position 2674 of SEQ ID NO: 1559960
auuagagauggaggcuuua

SEQ ID NO: 1566510 - RNA, 19 nt, Artificial Sequence
  Description of Artificial Sequence: Synthetic oligonucleotide
  Antisense strand to SEQ ID NO: 1566509
uaaagccuccaucucuaau

SEQ ID NO: 1566511 - RNA, 19 nt, Artificial Sequence
  Description of Artificial Sequence: Synthetic oligonucleotide
  Sense strand starting at position 3322 of SEQ ID NO: 1559960
ggguuucuucuugagggau

SEQ ID NO: 1566512 - RNA, 19 nt, Artificial Sequence
  Description of Artificial Sequence: Synthetic oligonucleotide
  Antisense strand to SEQ ID NO: 1566511
aucccucaagaagaaaccc

SEQ ID NO: 1566513 - RNA, 19 nt, Artificial Sequence
  Description of Artificial Sequence: Synthetic oligonucleotide
  Sense strand starting at position 3325 of SEQ ID NO: 1559960
uuucuucuugagggauaag

SEQ ID NO: 1566514 - RNA, 19 nt, Artificial Sequence
  Description of Artificial Sequence: Synthetic oligonucleotide
  Antisense strand to SEQ ID NO: 1566513
cuuaucccucaagaagaaa

SEQ ID NO: 1566515 - RNA, 19 nt, Artificial Sequence
  Description of Artificial Sequence: Synthetic oligonucleotide
  Sense strand starting at position 3343 of SEQ ID NO: 1559960
gaacaagggucuuuguuaa

SEQ ID NO: 1566516 - RNA, 19 nt, Artificial Sequence
  Description of Artificial Sequence: Synthetic oligonucleotide
  Antisense strand to SEQ ID NO: 1566515
uuaacaaagacccuuguuc

SEQ ID NO: 1566517 - RNA, 19 nt, Artificial Sequence
  Description of Artificial Sequence: Synthetic oligonucleotide
  Sense strand starting at position 3427 of SEQ ID NO: 1559960
ucuugagaggacugauguu

SEQ ID NO: 1566518 - RNA, 19 nt, Artificial Sequence
  Description of Artificial Sequence: Synthetic oligonucleotide
  Antisense strand to SEQ ID NO: 1566517
aacaucaguccucucaaga

SEQ ID NO: 1566519 - RNA, 19 nt, Artificial Sequence
  Description of Artificial Sequence: Synthetic oligonucleotide
  Sense strand starting at position 3547 of SEQ ID NO: 1559960
agguuucugauccaggguu

SEQ ID NO: 1566520 - RNA, 19 nt, Artificial Sequence
  Description of Artificial Sequence: Synthetic oligonucleotide
  Antisense strand to SEQ ID NO: 1566519
aacccuggaucagaaaccu

SEQ ID NO: 1566521 - RNA, 19 nt, Artificial Sequence
  Description of Artificial Sequence: Synthetic oligonucleotide
  Sense strand starting at position 3560 of SEQ ID NO: 1559960
aggguugggugauucaaga

SEQ ID NO: 1566522 - RNA, 19 nt, Artificial Sequence
  Description of Artificial Sequence: Synthetic oligonucleotide
  Antisense strand to SEQ ID NO: 1566521
ucuugaaucacccaacccu

SEQ ID NO: 1566523 - RNA, 19 nt, Artificial Sequence
  Description of Artificial Sequence: Synthetic oligonucleotide
  Sense strand starting at position 3634 of SEQ ID NO: 1559960
gaaaucuguuaaucuggga

SEQ ID NO: 1566524 - RNA, 19 nt, Artificial Sequence
  Description of Artificial Sequence: Synthetic oligonucleotide
  Antisense strand to SEQ ID NO: 1566523
ucccagauuaacagauuuc

SEQ ID NO: 1566525 - RNA, 19 nt, Artificial Sequence
  Description of Artificial Sequence: Synthetic oligonucleotide
  Sense strand starting at position 3638 of SEQ ID NO: 1559960
ucuguuaaucugggaaucu

SEQ ID NO: 1566526 - RNA, 19 nt, Artificial Sequence
  Description of Artificial Sequence: Synthetic oligonucleotide
  Antisense strand to SEQ ID NO: 1566525
agauucccagauuaacaga

SEQ ID NO: 1566527 - RNA, 19 nt, Artificial Sequence
  Description of Artificial Sequence: Synthetic oligonucleotide
  Sense strand starting at position 3705 of SEQ ID NO: 1559960
aaucucuuucugggugaca

SEQ ID NO: 1566528 - RNA, 19 nt, Artificial Sequence
  Description of Artificial Sequence: Synthetic oligonucleotide
  Antisense strand to SEQ ID NO: 1566527
ugucacccagaaagagauu

SEQ ID NO: 1566529 - RNA, 19 nt, Artificial Sequence
  Description of Artificial Sequence: Synthetic oligonucleotide
  Sense strand starting at position 3706 of SEQ ID NO: 1559960
aucucuuucugggugacau

SEQ ID NO: 1566530 - RNA, 19 nt, Artificial Sequence
  Description of Artificial Sequence: Synthetic oligonucleotide
  Antisense strand to SEQ ID NO: 1566529
augucacccagaaagagau

SEQ ID NO: 1566531 - RNA, 19 nt, Artificial Sequence
  Description of Artificial Sequence: Synthetic oligonucleotide
  Sense strand starting at position 3707 of SEQ ID NO: 1559960
ucucuuucugggugacaug

SEQ ID NO: 1566532 - RNA, 19 nt, Artificial Sequence
  Description of Artificial Sequence: Synthetic oligonucleotide
  Antisense strand to SEQ ID NO: 1566531
caugucacccagaaagaga

SEQ ID NO: 1566533 - RNA, 19 nt, Artificial Sequence
  Description of Artificial Sequence: Synthetic oligonucleotide
  Sense strand starting at position 3743 of SEQ ID NO: 1559960
uuauuaugggaguaucugu

SEQ ID NO: 1566534 - RNA, 19 nt, Artificial Sequence
  Description of Artificial Sequence: Synthetic oligonucleotide
  Antisense strand to SEQ ID NO: 1566533
acagauacucccauaauaa

SEQ ID NO: 1566535 - RNA, 19 nt, Artificial Sequence
  Description of Artificial Sequence: Synthetic oligonucleotide
  Sense strand starting at position 3748 of SEQ ID NO: 1559960
augggaguaucuguuaaua

SEQ ID NO: 1566536 - RNA, 19 nt, Artificial Sequence
  Description of Artificial Sequence: Synthetic oligonucleotide
  Antisense strand to SEQ ID NO: 1566535
uauuaacagauacucccau

SEQ ID NO: 1566537 - RNA, 19 nt, Artificial Sequence
  Description of Artificial Sequence: Synthetic oligonucleotide
  Sense strand starting at position 3811 of SEQ ID NO: 1559960
cuggauguguuacugggaa

SEQ ID NO: 1566538 - RNA, 19 nt, Artificial Sequence
  Description of Artificial Sequence: Synthetic oligonucleotide
  Antisense strand to SEQ ID NO: 1566537
uucccaguaacacauccag

SEQ ID NO: 1566539 - RNA, 19 nt, Artificial Sequence
  Description of Artificial Sequence: Synthetic oligonucleotide
  Sense strand starting at position 3813 of SEQ ID NO: 1559960
ggauguguuacugggaauc

SEQ ID NO: 1566540 - RNA, 19 nt, Artificial Sequence
  Description of Artificial Sequence: Synthetic oligonucleotide
  Antisense strand to SEQ ID NO: 1566539
gauucccaguaacacaucc

SEQ ID NO: 1566541 - RNA, 19 nt, Artificial Sequence
  Description of Artificial Sequence: Synthetic oligonucleotide
  Sense strand starting at position 3830 of SEQ ID NO: 1559960
ucucuaucucagggugacu

SEQ ID NO: 1566542 - RNA, 19 nt, Artificial Sequence
  Description of Artificial Sequence: Synthetic oligonucleotide
  Antisense strand to SEQ ID NO: 1566541
agucacccugagauagaga

SEQ ID NO: 1566543 - RNA, 19 nt, Artificial Sequence
  Description of Artificial Sequence: Synthetic oligonucleotide
  Sense strand starting at position 86 of SEQ ID NO: 1559961
ucuagaaugggcuaucuca

SEQ ID NO: 1566544 - RNA, 19 nt, Artificial Sequence
  Description of Artificial Sequence: Synthetic oligonucleotide
  Antisense strand to SEQ ID NO: 1566543
ugagauagcccauucuaga

SEQ ID NO: 1566545 - RNA, 19 nt, Artificial Sequence
  Description of Artificial Sequence: Synthetic oligonucleotide
  Sense strand starting at position 111 of SEQ ID NO: 1559961
caagucuagcucuaguuga

SEQ ID NO: 1566546 - RNA, 19 nt, Artificial Sequence
  Description of Artificial Sequence: Synthetic oligonucleotide
  Antisense strand to SEQ ID NO: 1566545
ucaacuagagcuagacuug

SEQ ID NO: 1566547 - RNA, 19 nt, Artificial Sequence
  Description of Artificial Sequence: Synthetic oligonucleotide
  Sense strand starting at position 229 of SEQ ID NO: 1559961
ucuggaaugggcuaucuca

SEQ ID NO: 1566548 - RNA, 19 nt, Artificial Sequence
  Description of Artificial Sequence: Synthetic oligonucleotide
  Antisense strand to SEQ ID NO: 1566547
ugagauagcccauuccaga

SEQ ID NO: 1566549 - RNA, 19 nt, Artificial Sequence
  Description of Artificial Sequence: Synthetic oligonucleotide
  Sense strand starting at position 259 of SEQ ID NO: 1559961
uguguucuguagcuaauuu

SEQ ID NO: 1566550 - RNA, 19 nt, Artificial Sequence
  Description of Artificial Sequence: Synthetic oligonucleotide
  Antisense strand to SEQ ID NO: 1566549
aaauuagcuacagaacaca

SEQ ID NO: 1566551 - RNA, 19 nt, Artificial Sequence
  Description of Artificial Sequence: Synthetic oligonucleotide
  Sense strand starting at position 285 of SEQ ID NO: 1559961
gacucaagaucaguggguu

SEQ ID NO: 1566552 - RNA, 19 nt, Artificial Sequence
  Description of Artificial Sequence: Synthetic oligonucleotide
  Antisense strand to SEQ ID NO: 1566551
aacccacugaucuugaguc

SEQ ID NO: 1566553 - RNA, 19 nt, Artificial Sequence
  Description of Artificial Sequence: Synthetic oligonucleotide
  Sense strand starting at position 286 of SEQ ID NO: 1559961
acucaagaucaguggguua

SEQ ID NO: 1566554 - RNA, 19 nt, Artificial Sequence
  Description of Artificial Sequence: Synthetic oligonucleotide
  Antisense strand to SEQ ID NO: 1566553
uaacccacugaucuugagu

SEQ ID NO: 1566555 - RNA, 19 nt, Artificial Sequence
  Description of Artificial Sequence: Synthetic oligonucleotide
  Sense strand starting at position 288 of SEQ ID NO: 1559961
ucaagaucaguggguuacu

SEQ ID NO: 1566556 - RNA, 19 nt, Artificial Sequence
  Description of Artificial Sequence: Synthetic oligonucleotide
  Antisense strand to SEQ ID NO: 1566555
aguaacccacugaucuuga

SEQ ID NO: 1566557 - RNA, 19 nt, Artificial Sequence
  Description of Artificial Sequence: Synthetic oligonucleotide
  Sense strand starting at position 360 of SEQ ID NO: 1559961
caggaacucugagcuuuga

SEQ ID NO: 1566558 - RNA, 19 nt, Artificial Sequence
  Description of Artificial Sequence: Synthetic oligonucleotide
  Antisense strand to SEQ ID NO: 1566557
ucaaagcucagaguuccug

SEQ ID NO: 1566559 - RNA, 19 nt, Artificial Sequence
  Description of Artificial Sequence: Synthetic oligonucleotide
  Sense strand starting at position 432 of SEQ ID NO: 1559961
cguagauggucuguauuug

SEQ ID NO: 1566560 - RNA, 19 nt, Artificial Sequence
  Description of Artificial Sequence: Synthetic oligonucleotide
  Antisense strand to SEQ ID NO: 1566559
caaauacagaccaucuacg

SEQ ID NO: 1566561 - RNA, 19 nt, Artificial Sequence
  Description of Artificial Sequence: Synthetic oligonucleotide
  Sense strand starting at position 470 of SEQ ID NO: 1559961
ggucuaugcugggcuauuu

SEQ ID NO: 1566562 - RNA, 19 nt, Artificial Sequence
  Description of Artificial Sequence: Synthetic oligonucleotide
  Antisense strand to SEQ ID NO: 1566561
aaauagcccagcauagacc

SEQ ID NO: 1566563 - RNA, 19 nt, Artificial Sequence
  Description of Artificial Sequence: Synthetic oligonucleotide
  Sense strand starting at position 499 of SEQ ID NO: 1559961
aagaguuuacugggcuauc

SEQ ID NO: 1566564 - RNA, 19 nt, Artificial Sequence
  Description of Artificial Sequence: Synthetic oligonucleotide
  Antisense strand to SEQ ID NO: 1566563
gauagcccaguaaacucuu

SEQ ID NO: 1566565 - RNA, 19 nt, Artificial Sequence
  Description of Artificial Sequence: Synthetic oligonucleotide
  Sense strand starting at position 510 of SEQ ID NO: 1559961
gggcuaucucagcacagaa

SEQ ID NO: 1566566 - RNA, 19 nt, Artificial Sequence
  Description of Artificial Sequence: Synthetic oligonucleotide
  Antisense strand to SEQ ID NO: 1566565
uucugugcugagauagccc

SEQ ID NO: 1566567 - RNA, 19 nt, Artificial Sequence
  Description of Artificial Sequence: Synthetic oligonucleotide
  Sense strand starting at position 512 of SEQ ID NO: 1559961
gcuaucucagcacagaaau

SEQ ID NO: 1566568 - RNA, 19 nt, Artificial Sequence
  Description of Artificial Sequence: Synthetic oligonucleotide
  Antisense strand to SEQ ID NO: 1566567
auuucugugcugagauagc

SEQ ID NO: 1566569 - RNA, 19 nt, Artificial Sequence
  Description of Artificial Sequence: Synthetic oligonucleotide
  Sense strand starting at position 619 of SEQ ID NO: 1559961
gcaggauugggcuaucuca

SEQ ID NO: 1566570 - RNA, 19 nt, Artificial Sequence
  Description of Artificial Sequence: Synthetic oligonucleotide
  Antisense strand to SEQ ID NO: 1566569
ugagauagcccaauccugc

SEQ ID NO: 1566571 - RNA, 19 nt, Artificial Sequence
  Description of Artificial Sequence: Synthetic oligonucleotide
  Sense strand starting at position 799 of SEQ ID NO: 1559961
ccuccucuucuuuggagau

SEQ ID NO: 1566572 - RNA, 19 nt, Artificial Sequence
  Description of Artificial Sequence: Synthetic oligonucleotide
  Antisense strand to SEQ ID NO: 1566571
aucuccaaagaagaggagg

SEQ ID NO: 1566573 - RNA, 19 nt, Artificial Sequence
  Description of Artificial Sequence: Synthetic oligonucleotide
  Sense strand starting at position 840 of SEQ ID NO: 1559961
acagguggugccuaggaua

SEQ ID NO: 1566574 - RNA, 19 nt, Artificial Sequence
  Description of Artificial Sequence: Synthetic oligonucleotide
  Antisense strand to SEQ ID NO: 1566573
uauccuaggcaccaccugu

SEQ ID NO: 1566575 - RNA, 19 nt, Artificial Sequence
  Description of Artificial Sequence: Synthetic oligonucleotide
  Sense strand starting at position 984 of SEQ ID NO: 1559961
agugccauuccagaaugga

SEQ ID NO: 1566576 - RNA, 19 nt, Artificial Sequence
  Description of Artificial Sequence: Synthetic oligonucleotide
  Antisense strand to SEQ ID NO: 1566575
uccauucuggaauggcacu

SEQ ID NO: 1566577 - RNA, 19 nt, Artificial Sequence
  Description of Artificial Sequence: Synthetic oligonucleotide
  Sense strand starting at position 994 of SEQ ID NO: 1559961
cagaauggacucugacagu

SEQ ID NO: 1566578 - RNA, 19 nt, Artificial Sequence
  Description of Artificial Sequence: Synthetic oligonucleotide
  Antisense strand to SEQ ID NO: 1566577
acugucagaguccauucug

SEQ ID NO: 1566579 - RNA, 19 nt, Artificial Sequence
  Description of Artificial Sequence: Synthetic oligonucleotide
  Sense strand starting at position 1013 of SEQ ID NO: 1559961
aagaaugaauuugguggaa

SEQ ID NO: 1566580 - RNA, 19 nt, Artificial Sequence
  Description of Artificial Sequence: Synthetic oligonucleotide
  Antisense strand to SEQ ID NO: 1566579
uuccaccaaauucauucuu

SEQ ID NO: 1566581 - RNA, 19 nt, Artificial Sequence
  Description of Artificial Sequence: Synthetic oligonucleotide
  Sense strand starting at position 1745 of SEQ ID NO: 1559961
cccugagaucuuuagcucu

SEQ ID NO: 1566582 - RNA, 19 nt, Artificial Sequence
  Description of Artificial Sequence: Synthetic oligonucleotide
  Antisense strand to SEQ ID NO: 1566581
agagcuaaagaucucaggg

SEQ ID NO: 1566583 - RNA, 19 nt, Artificial Sequence
  Description of Artificial Sequence: Synthetic oligonucleotide
  Sense strand starting at position 1747 of SEQ ID NO: 1559961
cugagaucuuuagcucuga

SEQ ID NO: 1566584 - RNA, 19 nt, Artificial Sequence
  Description of Artificial Sequence: Synthetic oligonucleotide
  Antisense strand to SEQ ID NO: 1566583
ucagagcuaaagaucucag

SEQ ID NO: 1566585 - RNA, 19 nt, Artificial Sequence
  Description of Artificial Sequence: Synthetic oligonucleotide
  Sense strand starting at position 2425 of SEQ ID NO: 1559961
auagaaacgucuuuauuga

SEQ ID NO: 1566586 - RNA, 19 nt, Artificial Sequence
  Description of Artificial Sequence: Synthetic oligonucleotide
  Antisense strand to SEQ ID NO: 1566585
ucaauaaagacguuucuau

SEQ ID NO: 1566587 - RNA, 19 nt, Artificial Sequence
  Description of Artificial Sequence: Synthetic oligonucleotide
  Sense strand starting at position 2426 of SEQ ID NO: 1559961
uagaaacgucuuuauugaa

SEQ ID NO: 1566588 - RNA, 19 nt, Artificial Sequence
  Description of Artificial Sequence: Synthetic oligonucleotide
  Antisense strand to SEQ ID NO: 1566587
uucaauaaagacguuucua

SEQ ID NO: 1566589 - RNA, 19 nt, Artificial Sequence
  Description of Artificial Sequence: Synthetic oligonucleotide
  Sense strand starting at position 2678 of SEQ ID NO: 1559961
auuagagauggaggcuuua

SEQ ID NO: 1566590 - RNA, 19 nt, Artificial Sequence
  Description of Artificial Sequence: Synthetic oligonucleotide
  Antisense strand to SEQ ID NO: 1566589
uaaagccuccaucucuaau

SEQ ID NO: 1566591 - RNA, 19 nt, Artificial Sequence
  Description of Artificial Sequence: Synthetic oligonucleotide
  Sense strand starting at position 3326 of SEQ ID NO: 1559961
ggguuucuucuugagggau

SEQ ID NO: 1566592 - RNA, 19 nt, Artificial Sequence
  Description of Artificial Sequence: Synthetic oligonucleotide
  Antisense strand to SEQ ID NO: 1566591
aucccucaagaagaaaccc

SEQ ID NO: 1566593 - RNA, 19 nt, Artificial Sequence
  Description of Artificial Sequence: Synthetic oligonucleotide
  Sense strand starting at position 3329 of SEQ ID NO: 1559961
uuucuucuugagggauaag

SEQ ID NO: 1566594 - RNA, 19 nt, Artificial Sequence
  Description of Artificial Sequence: Synthetic oligonucleotide
  Antisense strand to SEQ ID NO: 1566593
cuuaucccucaagaagaaa

SEQ ID NO: 1566595 - RNA, 19 nt, Artificial Sequence
  Description of Artificial Sequence: Synthetic oligonucleotide
  Sense strand starting at position 3347 of SEQ ID NO: 1559961
gaacaagggucuuuguuaa

SEQ ID NO: 1566596 - RNA, 19 nt, Artificial Sequence
  Description of Artificial Sequence: Synthetic oligonucleotide
  Antisense strand to SEQ ID NO: 1566595
uuaacaaagacccuuguuc

SEQ ID NO: 1566597 - RNA, 19 nt, Artificial Sequence
  Description of Artificial Sequence: Synthetic oligonucleotide
  Sense strand starting at position 3431 of SEQ ID NO: 1559961
ucuugagaggacugauguu

SEQ ID NO: 1566598 - RNA, 19 nt, Artificial Sequence
  Description of Artificial Sequence: Synthetic oligonucleotide
  Antisense strand to SEQ ID NO: 1566597
aacaucaguccucucaaga

SEQ ID NO: 1566599 - RNA, 19 nt, Artificial Sequence
  Description of Artificial Sequence: Synthetic oligonucleotide
  Sense strand starting at position 3551 of SEQ ID NO: 1559961
agguuucugauccaggguu

SEQ ID NO: 1566600 - RNA, 19 nt, Artificial Sequence
  Description of Artificial Sequence: Synthetic oligonucleotide
  Antisense strand to SEQ ID NO: 1566599
aacccuggaucagaaaccu

SEQ ID NO: 1566601 - RNA, 19 nt, Artificial Sequence
  Description of Artificial Sequence: Synthetic oligonucleotide
  Sense strand starting at position 3564 of SEQ ID NO: 1559961
aggguugggugauucaaga

SEQ ID NO: 1566602 - RNA, 19 nt, Artificial Sequence
  Description of Artificial Sequence: Synthetic oligonucleotide
  Antisense strand to SEQ ID NO: 1566601
ucuugaaucacccaacccu

SEQ ID NO: 1566603 - RNA, 19 nt, Artificial Sequence
  Description of Artificial Sequence: Synthetic oligonucleotide
  Sense strand starting at position 3638 of SEQ ID NO: 1559961
gaaaucuguuaaucuggga

SEQ ID NO: 1566604 - RNA, 19 nt, Artificial Sequence
  Description of Artificial Sequence: Synthetic oligonucleotide
  Antisense strand to SEQ ID NO: 1566603
ucccagauuaacagauuuc

SEQ ID NO: 1566605 - RNA, 19 nt, Artificial Sequence
  Description of Artificial Sequence: Synthetic oligonucleotide
  Sense strand starting at position 3642 of SEQ ID NO: 1559961
ucuguuaaucugggaaucu

SEQ ID NO: 1566606 - RNA, 19 nt, Artificial Sequence
  Description of Artificial Sequence: Synthetic oligonucleotide
  Antisense strand to SEQ ID NO: 1566605
agauucccagauuaacaga

SEQ ID NO: 1566607 - RNA, 19 nt, Artificial Sequence
  Description of Artificial Sequence: Synthetic oligonucleotide
  Sense strand starting at position 3709 of SEQ ID NO: 1559961
aaucucuuucugggugaca

SEQ ID NO: 1566608 - RNA, 19 nt, Artificial Sequence
  Description of Artificial Sequence: Synthetic oligonucleotide
  Antisense strand to SEQ ID NO: 1566607
ugucacccagaaagagauu

SEQ ID NO: 1566609 - RNA, 19 nt, Artificial Sequence
  Description of Artificial Sequence: Synthetic oligonucleotide
  Sense strand starting at position 3710 of SEQ ID NO: 1559961
aucucuuucugggugacau

SEQ ID NO: 1566610 - RNA, 19 nt, Artificial Sequence
  Description of Artificial Sequence: Synthetic oligonucleotide
  Antisense strand to SEQ ID NO: 1566609
augucacccagaaagagau

SEQ ID NO: 1566611 - RNA, 19 nt, Artificial Sequence
  Description of Artificial Sequence: Synthetic oligonucleotide
  Sense strand starting at position 3711 of SEQ ID NO: 1559961
ucucuuucugggugacaug

SEQ ID NO: 1566612 - RNA, 19 nt, Artificial Sequence
  Description of Artificial Sequence: Synthetic oligonucleotide
  Antisense strand to SEQ ID NO: 1566611
caugucacccagaaagaga

SEQ ID NO: 1566613 - RNA, 19 nt, Artificial Sequence
  Description of Artificial Sequence: Synthetic oligonucleotide
  Sense strand starting at position 3747 of SEQ ID NO: 1559961
uuauuaugggaguaucugu

SEQ ID NO: 1566614 - RNA, 19 nt, Artificial Sequence
  Description of Artificial Sequence: Synthetic oligonucleotide
  Antisense strand to SEQ ID NO: 1566613
acagauacucccauaauaa

SEQ ID NO: 1566615 - RNA, 19 nt, Artificial Sequence
  Description of Artificial Sequence: Synthetic oligonucleotide
  Sense strand starting at position 3752 of SEQ ID NO: 1559961
augggaguaucuguuaaua

SEQ ID NO: 1566616 - RNA, 19 nt, Artificial Sequence
  Description of Artificial Sequence: Synthetic oligonucleotide
  Antisense strand to SEQ ID NO: 1566615
uauuaacagauacucccau

SEQ ID NO: 1566617 - RNA, 19 nt, Artificial Sequence
  Description of Artificial Sequence: Synthetic oligonucleotide
  Sense strand starting at position 3815 of SEQ ID NO: 1559961
cuggauguguuacugggaa

SEQ ID NO: 1566618 - RNA, 19 nt, Artificial Sequence
  Description of Artificial Sequence: Synthetic oligonucleotide
  Antisense strand to SEQ ID NO: 1566617
uucccaguaacacauccag

SEQ ID NO: 1566619 - RNA, 19 nt, Artificial Sequence
  Description of Artificial Sequence: Synthetic oligonucleotide
  Sense strand starting at position 3817 of SEQ ID NO: 1559961
ggauguguuacugggaauc

SEQ ID NO: 1566620 - RNA, 19 nt, Artificial Sequence
  Description of Artificial Sequence: Synthetic oligonucleotide
  Antisense strand to SEQ ID NO: 1566619
gauucccaguaacacaucc

SEQ ID NO: 1566621 - RNA, 19 nt, Artificial Sequence
  Description of Artificial Sequence: Synthetic oligonucleotide
  Sense strand starting at position 3834 of SEQ ID NO: 1559961
ucucuaucucagggugacu

SEQ ID NO: 1566622 - RNA, 19 nt, Artificial Sequence
  Description of Artificial Sequence: Synthetic oligonucleotide
  Antisense strand to SEQ ID NO: 1566621
agucacccugagauagaga

SEQ ID NO: 1566623 - RNA, 19 nt, Artificial Sequence
  Description of Artificial Sequence: Synthetic oligonucleotide
  Sense strand starting at position 235 of SEQ ID NO: 1559962
cacagagagcucgguuaag

SEQ ID NO: 1566624 - RNA, 19 nt, Artificial Sequence
  Description of Artificial Sequence: Synthetic oligonucleotide
  Antisense strand to SEQ ID NO: 1566623
cuuaaccgagcucucugug

SEQ ID NO: 1566625 - RNA, 19 nt, Artificial Sequence
  Description of Artificial Sequence: Synthetic oligonucleotide
  Sense strand starting at position 316 of SEQ ID NO: 1559962
cugguuucccuaugugacu

SEQ ID NO: 1566626 - RNA, 19 nt, Artificial Sequence
  Description of Artificial Sequence: Synthetic oligonucleotide
  Antisense strand to SEQ ID NO: 1566625
agucacauagggaaaccag

SEQ ID NO: 1566627 - RNA, 19 nt, Artificial Sequence
  Description of Artificial Sequence: Synthetic oligonucleotide
  Sense strand starting at position 470 of SEQ ID NO: 1559962
ggcugaaucucccuacaac

SEQ ID NO: 1566628 - RNA, 19 nt, Artificial Sequence
  Description of Artificial Sequence: Synthetic oligonucleotide
  Antisense strand to SEQ ID NO: 1566627
guuguagggagauucagcc

SEQ ID NO: 1566629 - RNA, 19 nt, Artificial Sequence
  Description of Artificial Sequence: Synthetic oligonucleotide
  Sense strand starting at position 2001 of SEQ ID NO: 1559962
cgacuagggcuagagguua

SEQ ID NO: 1566630 - RNA, 19 nt, Artificial Sequence
  Description of Artificial Sequence: Synthetic oligonucleotide
  Antisense strand to SEQ ID NO: 1566629
uaaccucuagcccuagucg

SEQ ID NO: 1566631 - RNA, 19 nt, Artificial Sequence
  Description of Artificial Sequence: Synthetic oligonucleotide
  Sense strand starting at position 2029 of SEQ ID NO: 1559962
uacagucaggccgagauaa

SEQ ID NO: 1566632 - RNA, 19 nt, Artificial Sequence
  Description of Artificial Sequence: Synthetic oligonucleotide
  Antisense strand to SEQ ID NO: 1566631
uuaucucggccugacugua

SEQ ID NO: 1566633 - RNA, 19 nt, Artificial Sequence
  Description of Artificial Sequence: Synthetic oligonucleotide
  Sense strand starting at position 2098 of SEQ ID NO: 1559962
gggccagcuauccagaguu

SEQ ID NO: 1566634 - RNA, 19 nt, Artificial Sequence
  Description of Artificial Sequence: Synthetic oligonucleotide
  Antisense strand to SEQ ID NO: 1566633
aacucuggauagcuggccc

SEQ ID NO: 1566635 - RNA, 19 nt, Artificial Sequence
  Description of Artificial Sequence: Synthetic oligonucleotide
  Sense strand starting at position 2100 of SEQ ID NO: 1559962
gccagcuauccagaguuag

SEQ ID NO: 1566636 - RNA, 19 nt, Artificial Sequence
  Description of Artificial Sequence: Synthetic oligonucleotide
  Antisense strand to SEQ ID NO: 1566635
cuaacucuggauagcuggc

SEQ ID NO: 1566637 - RNA, 19 nt, Artificial Sequence
  Description of Artificial Sequence: Synthetic oligonucleotide
  Sense strand starting at position 2117 of SEQ ID NO: 1559962
agggcuuauggucaaaggu

SEQ ID NO: 1566638 - RNA, 19 nt, Artificial Sequence
  Description of Artificial Sequence: Synthetic oligonucleotide
  Antisense strand to SEQ ID NO: 1566637
accuuugaccauaagcccu

SEQ ID NO: 1566639 - RNA, 19 nt, Artificial Sequence
  Description of Artificial Sequence: Synthetic oligonucleotide
  Sense strand starting at position 2134 of SEQ ID NO: 1559962
gucagagcgagguaucauu

SEQ ID NO: 1566640 - RNA, 19 nt, Artificial Sequence
  Description of Artificial Sequence: Synthetic oligonucleotide
  Antisense strand to SEQ ID NO: 1566639
aaugauaccucgcucugac

SEQ ID NO: 1566641 - RNA, 19 nt, Artificial Sequence
  Description of Artificial Sequence: Synthetic oligonucleotide
  Sense strand starting at position 2174 of SEQ ID NO: 1559962
cuauuacuuuagguuugaa

SEQ ID NO: 1566642 - RNA, 19 nt, Artificial Sequence
  Description of Artificial Sequence: Synthetic oligonucleotide
  Antisense strand to SEQ ID NO: 1566641
uucaaaccuaaaguaauag

SEQ ID NO: 1566643 - RNA, 19 nt, Artificial Sequence
  Description of Artificial Sequence: Synthetic oligonucleotide
  Sense strand starting at position 2583 of SEQ ID NO: 1559962
gggauuugcuuccacauaa

SEQ ID NO: 1566644 - RNA, 19 nt, Artificial Sequence
  Description of Artificial Sequence: Synthetic oligonucleotide
  Antisense strand to SEQ ID NO: 1566643
uuauguggaagcaaauccc

SEQ ID NO: 1566645 - RNA, 19 nt, Artificial Sequence
  Description of Artificial Sequence: Synthetic oligonucleotide
  Sense strand starting at position 2638 of SEQ ID NO: 1559962
aagaaucaucuuugaccgu

SEQ ID NO: 1566646 - RNA, 19 nt, Artificial Sequence
  Description of Artificial Sequence: Synthetic oligonucleotide
  Antisense strand to SEQ ID NO: 1566645
acggucaaagaugauucuu

SEQ ID NO: 1566647 - RNA, 19 nt, Artificial Sequence
  Description of Artificial Sequence: Synthetic oligonucleotide
  Sense strand starting at position 2641 of SEQ ID NO: 1559962
aaucaucuuugaccgugaa

SEQ ID NO: 1566648 - RNA, 19 nt, Artificial Sequence
  Description of Artificial Sequence: Synthetic oligonucleotide
  Antisense strand to SEQ ID NO: 1566647
uucacggucaaagaugauu

SEQ ID NO: 1566649 - RNA, 19 nt, Artificial Sequence
  Description of Artificial Sequence: Synthetic oligonucleotide
  Sense strand starting at position 2642 of SEQ ID NO: 1559962
aucaucuuugaccgugaau

SEQ ID NO: 1566650 - RNA, 19 nt, Artificial Sequence
  Description of Artificial Sequence: Synthetic oligonucleotide
  Antisense strand to SEQ ID NO: 1566649
auucacggucaaagaugau

SEQ ID NO: 1566651 - RNA, 19 nt, Artificial Sequence
  Description of Artificial Sequence: Synthetic oligonucleotide
  Sense strand starting at position 2644 of SEQ ID NO: 1559962
caucuuugaccgugaauua

SEQ ID NO: 1566652 - RNA, 19 nt, Artificial Sequence
  Description of Artificial Sequence: Synthetic oligonucleotide
  Antisense strand to SEQ ID NO: 1566651
uaauucacggucaaagaug

SEQ ID NO: 1566653 - RNA, 19 nt, Artificial Sequence
  Description of Artificial Sequence: Synthetic oligonucleotide
  Sense strand starting at position 2645 of SEQ ID NO: 1559962
aucuuugaccgugaauuaa

SEQ ID NO: 1566654 - RNA, 19 nt, Artificial Sequence
  Description of Artificial Sequence: Synthetic oligonucleotide
  Antisense strand to SEQ ID NO: 1566653
uuaauucacggucaaagau

SEQ ID NO: 1566655 - RNA, 19 nt, Artificial Sequence
  Description of Artificial Sequence: Synthetic oligonucleotide
  Sense strand starting at position 2653 of SEQ ID NO: 1559962
ccgugaauuaauuguugaa

SEQ ID NO: 1566656 - RNA, 19 nt, Artificial Sequence
  Description of Artificial Sequence: Synthetic oligonucleotide
  Antisense strand to SEQ ID NO: 1566655
uucaacaauuaauucacgg

SEQ ID NO: 1566657 - RNA, 19 nt, Artificial Sequence
  Description of Artificial Sequence: Synthetic oligonucleotide
  Sense strand starting at position 2662 of SEQ ID NO: 1559962
aauuguugaauugguguga

SEQ ID NO: 1566658 - RNA, 19 nt, Artificial Sequence
  Description of Artificial Sequence: Synthetic oligonucleotide
  Antisense strand to SEQ ID NO: 1566657
ucacaccaauucaacaauu

SEQ ID NO: 1566659 - RNA, 19 nt, Artificial Sequence
  Description of Artificial Sequence: Synthetic oligonucleotide
  Sense strand starting at position 2663 of SEQ ID NO: 1559962
auuguugaauuggugugau

SEQ ID NO: 1566660 - RNA, 19 nt, Artificial Sequence
  Description of Artificial Sequence: Synthetic oligonucleotide
  Antisense strand to SEQ ID NO: 1566659
aucacaccaauucaacaau

SEQ ID NO: 1566661 - RNA, 19 nt, Artificial Sequence
  Description of Artificial Sequence: Synthetic oligonucleotide
  Sense strand starting at position 2666 of SEQ ID NO: 1559962
guugaauuggugugauaag

SEQ ID NO: 1566662 - RNA, 19 nt, Artificial Sequence
  Description of Artificial Sequence: Synthetic oligonucleotide
  Antisense strand to SEQ ID NO: 1566661
cuuaucacaccaauucaac

SEQ ID NO: 1566663 - RNA, 19 nt, Artificial Sequence
  Description of Artificial Sequence: Synthetic oligonucleotide
  Sense strand starting at position 2796 of SEQ ID NO: 1559962
gaucucaggcccugaagau

SEQ ID NO: 1566664 - RNA, 19 nt, Artificial Sequence
  Description of Artificial Sequence: Synthetic oligonucleotide
  Antisense strand to SEQ ID NO: 1566663
aucuucagggccugagauc

SEQ ID NO: 1566665 - RNA, 19 nt, Artificial Sequence
  Description of Artificial Sequence: Synthetic oligonucleotide
  Sense strand starting at position 2797 of SEQ ID NO: 1559962
aucucaggcccugaagauu

SEQ ID NO: 1566666 - RNA, 19 nt, Artificial Sequence
  Description of Artificial Sequence: Synthetic oligonucleotide
  Antisense strand to SEQ ID NO: 1566665
aaucuucagggccugagau

SEQ ID NO: 1566667 - RNA, 19 nt, Artificial Sequence
  Description of Artificial Sequence: Synthetic oligonucleotide
  Sense strand starting at position 3441 of SEQ ID NO: 1559962
gugcaagggcacgaucaua

SEQ ID NO: 1566668 - RNA, 19 nt, Artificial Sequence
  Description of Artificial Sequence: Synthetic oligonucleotide
  Antisense strand to SEQ ID NO: 1566667
uaugaucgugcccuugcac

SEQ ID NO: 1566669 - RNA, 19 nt, Artificial Sequence
  Description of Artificial Sequence: Synthetic oligonucleotide
  Sense strand starting at position 3512 of SEQ ID NO: 1559962
cucaaagcucuggguacuu

SEQ ID NO: 1566670 - RNA, 19 nt, Artificial Sequence
  Description of Artificial Sequence: Synthetic oligonucleotide
  Antisense strand to SEQ ID NO: 1566669
aaguacccagagcuuugag

SEQ ID NO: 1566671 - RNA, 19 nt, Artificial Sequence
  Description of Artificial Sequence: Synthetic oligonucleotide
  Sense strand starting at position 3541 of SEQ ID NO: 1559962
uuuaaaugugcauaaugca

SEQ ID NO: 1566672 - RNA, 19 nt, Artificial Sequence
  Description of Artificial Sequence: Synthetic oligonucleotide
  Antisense strand to SEQ ID NO: 1566671
ugcauuaugcacauuuaaa

SEQ ID NO: 1566673 - RNA, 19 nt, Artificial Sequence
  Description of Artificial Sequence: Synthetic oligonucleotide
  Sense strand starting at position 3688 of SEQ ID NO: 1559962
uaguguaauuccucgaaag

SEQ ID NO: 1566674 - RNA, 19 nt, Artificial Sequence
  Description of Artificial Sequence: Synthetic oligonucleotide
  Antisense strand to SEQ ID NO: 1566673
cuuucgaggaauuacacua

SEQ ID NO: 1566675 - RNA, 19 nt, Artificial Sequence
  Description of Artificial Sequence: Synthetic oligonucleotide
  Sense strand starting at position 3689 of SEQ ID NO: 1559962
aguguaauuccucgaaaga

SEQ ID NO: 1566676 - RNA, 19 nt, Artificial Sequence
  Description of Artificial Sequence: Synthetic oligonucleotide
  Antisense strand to SEQ ID NO: 1566675
ucuuucgaggaauuacacu

SEQ ID NO: 1566677 - RNA, 19 nt, Artificial Sequence
  Description of Artificial Sequence: Synthetic oligonucleotide
  Sense strand starting at position 3690 of SEQ ID NO: 1559962
guguaauuccucgaaagac

SEQ ID NO: 1566678 - RNA, 19 nt, Artificial Sequence
  Description of Artificial Sequence: Synthetic oligonucleotide
  Antisense strand to SEQ ID NO: 1566677
gucuuucgaggaauuacac

SEQ ID NO: 1566679 - RNA, 19 nt, Artificial Sequence
  Description of Artificial Sequence: Synthetic oligonucleotide
  Sense strand starting at position 3700 of SEQ ID NO: 1559962
ucgaaagacuugucuaugu

SEQ ID NO: 1566680 - RNA, 19 nt, Artificial Sequence
  Description of Artificial Sequence: Synthetic oligonucleotide
  Antisense strand to SEQ ID NO: 1566679
acauagacaagucuuucga

SEQ ID NO: 1566681 - RNA, 19 nt, Artificial Sequence
  Description of Artificial Sequence: Synthetic oligonucleotide
  Sense strand starting at position 3702 of SEQ ID NO: 1559962
gaaagacuugucuaugucu

SEQ ID NO: 1566682 - RNA, 19 nt, Artificial Sequence
  Description of Artificial Sequence: Synthetic oligonucleotide
  Antisense strand to SEQ ID NO: 1566681
agacauagacaagucuuuc

SEQ ID NO: 1566683 - RNA, 19 nt, Artificial Sequence
  Description of Artificial Sequence: Synthetic oligonucleotide
  Sense strand starting at position 3704 of SEQ ID NO: 1559962
aagacuugucuaugucuga

SEQ ID NO: 1566684 - RNA, 19 nt, Artificial Sequence
  Description of Artificial Sequence: Synthetic oligonucleotide
  Antisense strand to SEQ ID NO: 1566683
ucagacauagacaagucuu

SEQ ID NO: 1566685 - RNA, 19 nt, Artificial Sequence
  Description of Artificial Sequence: Synthetic oligonucleotide
  Sense strand starting at position 3705 of SEQ ID NO: 1559962
agacuugucuaugucugau

SEQ ID NO: 1566686 - RNA, 19 nt, Artificial Sequence
  Description of Artificial Sequence: Synthetic oligonucleotide
  Antisense strand to SEQ ID NO: 1566685
aucagacauagacaagucu

SEQ ID NO: 1566687 - RNA, 19 nt, Artificial Sequence
  Description of Artificial Sequence: Synthetic oligonucleotide
  Sense strand starting at position 3707 of SEQ ID NO: 1559962
acuugucuaugucugauau

SEQ ID NO: 1566688 - RNA, 19 nt, Artificial Sequence
  Description of Artificial Sequence: Synthetic oligonucleotide
  Antisense strand to SEQ ID NO: 1566687
auaucagacauagacaagu

SEQ ID NO: 1566689 - RNA, 19 nt, Artificial Sequence
  Description of Artificial Sequence: Synthetic oligonucleotide
  Sense strand starting at position 3708 of SEQ ID NO: 1559962
cuugucuaugucugauaug

SEQ ID NO: 1566690 - RNA, 19 nt, Artificial Sequence
  Description of Artificial Sequence: Synthetic oligonucleotide
  Antisense strand to SEQ ID NO: 1566689
cauaucagacauagacaag

SEQ ID NO: 1566691 - RNA, 19 nt, Artificial Sequence
  Description of Artificial Sequence: Synthetic oligonucleotide
  Sense strand starting at position 3718 of SEQ ID NO: 1559962
ucugauauguuuccuccua

SEQ ID NO: 1566692 - RNA, 19 nt, Artificial Sequence
  Description of Artificial Sequence: Synthetic oligonucleotide
  Antisense strand to SEQ ID NO: 1566691
uaggaggaaacauaucaga

SEQ ID NO: 1566693 - RNA, 19 nt, Artificial Sequence
  Description of Artificial Sequence: Synthetic oligonucleotide
  Sense strand starting at position 3719 of SEQ ID NO: 1559962
cugauauguuuccuccuau

SEQ ID NO: 1566694 - RNA, 19 nt, Artificial Sequence
  Description of Artificial Sequence: Synthetic oligonucleotide
  Antisense strand to SEQ ID NO: 1566693
auaggaggaaacauaucag

SEQ ID NO: 1566695 - RNA, 19 nt, Artificial Sequence
  Description of Artificial Sequence: Synthetic oligonucleotide
  Sense strand starting at position 3720 of SEQ ID NO: 1559962
ugauauguuuccuccuauc

SEQ ID NO: 1566696 - RNA, 19 nt, Artificial Sequence
  Description of Artificial Sequence: Synthetic oligonucleotide
  Antisense strand to SEQ ID NO: 1566695
gauaggaggaaacauauca

SEQ ID NO: 1566697 - RNA, 19 nt, Artificial Sequence
  Description of Artificial Sequence: Synthetic oligonucleotide
  Sense strand starting at position 3841 of SEQ ID NO: 1559962
gucucagucugacuguuaa

SEQ ID NO: 1566698 - RNA, 19 nt, Artificial Sequence
  Description of Artificial Sequence: Synthetic oligonucleotide
  Antisense strand to SEQ ID NO: 1566697
uuaacagucagacugagac

SEQ ID NO: 1566699 - RNA, 19 nt, Artificial Sequence
  Description of Artificial Sequence: Synthetic oligonucleotide
  Sense strand starting at position 3851 of SEQ ID NO: 1559962
gacuguuaaugagccuaca

SEQ ID NO: 1566700 - RNA, 19 nt, Artificial Sequence
  Description of Artificial Sequence: Synthetic oligonucleotide
  Antisense strand to SEQ ID NO: 1566699
uguaggcucauuaacaguc

SEQ ID NO: 1566701 - RNA, 19 nt, Artificial Sequence
  Description of Artificial Sequence: Synthetic oligonucleotide
  Sense strand starting at position 3870 of SEQ ID NO: 1559962
ugcugaugccgccuacauu

SEQ ID NO: 1566702 - RNA, 19 nt, Artificial Sequence
  Description of Artificial Sequence: Synthetic oligonucleotide
  Antisense strand to SEQ ID NO: 1566701
aauguaggcggcaucagca

SEQ ID NO: 1566703 - RNA, 19 nt, Artificial Sequence
  Description of Artificial Sequence: Synthetic oligonucleotide
  Sense strand starting at position 24 of SEQ ID NO: 1559963
ccgcaauuggaggaguuga

SEQ ID NO: 1566704 - RNA, 19 nt, Artificial Sequence
  Description of Artificial Sequence: Synthetic oligonucleotide
  Antisense strand to SEQ ID NO: 1566703
ucaacuccuccaauugcgg

SEQ ID NO: 1566705 - RNA, 19 nt, Artificial Sequence
  Description of Artificial Sequence: Synthetic oligonucleotide
  Sense strand starting at position 552 of SEQ ID NO: 1559963
cgcuguucucaguacugca

SEQ ID NO: 1566706 - RNA, 19 nt, Artificial Sequence
  Description of Artificial Sequence: Synthetic oligonucleotide
  Antisense strand to SEQ ID NO: 1566705
ugcaguacugagaacagcg

SEQ ID NO: 1566707 - RNA, 19 nt, Artificial Sequence
  Description of Artificial Sequence: Synthetic oligonucleotide
  Sense strand starting at position 828 of SEQ ID NO: 1559963
ccgggaaucuuugggaucu

SEQ ID NO: 1566708 - RNA, 19 nt, Artificial Sequence
  Description of Artificial Sequence: Synthetic oligonucleotide
  Antisense strand to SEQ ID NO: 1566707
agaucccaaagauucccgg

SEQ ID NO: 1566709 - RNA, 19 nt, Artificial Sequence
  Description of Artificial Sequence: Synthetic oligonucleotide
  Sense strand starting at position 829 of SEQ ID NO: 1559963
cgggaaucuuugggaucug

SEQ ID NO: 1566710 - RNA, 19 nt, Artificial Sequence
  Description of Artificial Sequence: Synthetic oligonucleotide
  Antisense strand to SEQ ID NO: 1566709
cagaucccaaagauucccg

SEQ ID NO: 1566711 - RNA, 19 nt, Artificial Sequence
  Description of Artificial Sequence: Synthetic oligonucleotide
  Sense strand starting at position 830 of SEQ ID NO: 1559963
gggaaucuuugggaucugu

SEQ ID NO: 1566712 - RNA, 19 nt, Artificial Sequence
  Description of Artificial Sequence: Synthetic oligonucleotide
  Antisense strand to SEQ ID NO: 1566711
acagaucccaaagauuccc

SEQ ID NO: 1566713 - RNA, 19 nt, Artificial Sequence
  Description of Artificial Sequence: Synthetic oligonucleotide
  Sense strand starting at position 2209 of SEQ ID NO: 1559963
caaggauaucguggagucu

SEQ ID NO: 1566714 - RNA, 19 nt, Artificial Sequence
  Description of Artificial Sequence: Synthetic oligonucleotide
  Antisense strand to SEQ ID NO: 1566713
agacuccacgauauccuug

SEQ ID NO: 1566715 - RNA, 19 nt, Artificial Sequence
  Description of Artificial Sequence: Synthetic oligonucleotide
  Sense strand starting at position 3635 of SEQ ID NO: 1559963
ggagaaggcugguaagacu

SEQ ID NO: 1566716 - RNA, 19 nt, Artificial Sequence
  Description of Artificial Sequence: Synthetic oligonucleotide
  Antisense strand to SEQ ID NO: 1566715
agucuuaccagccuucucc

SEQ ID NO: 1566717 - RNA, 19 nt, Artificial Sequence
  Description of Artificial Sequence: Synthetic oligonucleotide
  Sense strand starting at position 3667 of SEQ ID NO: 1559963
ggguucaguucuggaguga

SEQ ID NO: 1566718 - RNA, 19 nt, Artificial Sequence
  Description of Artificial Sequence: Synthetic oligonucleotide
  Antisense strand to SEQ ID NO: 1566717
ucacuccagaacugaaccc

SEQ ID NO: 1566719 - RNA, 19 nt, Artificial Sequence
  Description of Artificial Sequence: Synthetic oligonucleotide
  Sense strand starting at position 3668 of SEQ ID NO: 1559963
gguucaguucuggagugaa

SEQ ID NO: 1566720 - RNA, 19 nt, Artificial Sequence
  Description of Artificial Sequence: Synthetic oligonucleotide
  Antisense strand to SEQ ID NO: 1566719
uucacuccagaacugaacc

SEQ ID NO: 1566721 - RNA, 19 nt, Artificial Sequence
  Description of Artificial Sequence: Synthetic oligonucleotide
  Sense strand starting at position 3671 of SEQ ID NO: 1559963
ucaguucuggagugaaaca

SEQ ID NO: 1566722 - RNA, 19 nt, Artificial Sequence
  Description of Artificial Sequence: Synthetic oligonucleotide
  Antisense strand to SEQ ID NO: 1566721
uguuucacuccagaacuga

SEQ ID NO: 1566723 - RNA, 19 nt, Artificial Sequence
  Description of Artificial Sequence: Synthetic oligonucleotide
  Sense strand starting at position 3731 of SEQ ID NO: 1559963
ggcagucaccguuuguauu

SEQ ID NO: 1566724 - RNA, 19 nt, Artificial Sequence
  Description of Artificial Sequence: Synthetic oligonucleotide
  Antisense strand to SEQ ID NO: 1566723
aauacaaacggugacugcc

SEQ ID NO: 1566725 - RNA, 19 nt, Artificial Sequence
  Description of Artificial Sequence: Synthetic oligonucleotide
  Sense strand starting at position 3732 of SEQ ID NO: 1559963
gcagucaccguuuguauua

SEQ ID NO: 1566726 - RNA, 19 nt, Artificial Sequence
  Description of Artificial Sequence: Synthetic oligonucleotide
  Antisense strand to SEQ ID NO: 1566725
uaauacaaacggugacugc

SEQ ID NO: 1566727 - RNA, 19 nt, Artificial Sequence
  Description of Artificial Sequence: Synthetic oligonucleotide
  Sense strand starting at position 3733 of SEQ ID NO: 1559963
cagucaccguuuguauuau

SEQ ID NO: 1566728 - RNA, 19 nt, Artificial Sequence
  Description of Artificial Sequence: Synthetic oligonucleotide
  Antisense strand to SEQ ID NO: 1566727
auaauacaaacggugacug

SEQ ID NO: 1566729 - RNA, 19 nt, Artificial Sequence
  Description of Artificial Sequence: Synthetic oligonucleotide
  Sense strand starting at position 3734 of SEQ ID NO: 1559963
agucaccguuuguauuauu

SEQ ID NO: 1566730 - RNA, 19 nt, Artificial Sequence
  Description of Artificial Sequence: Synthetic oligonucleotide
  Antisense strand to SEQ ID NO: 1566729
aauaauacaaacggugacu

SEQ ID NO: 1566731 - RNA, 19 nt, Artificial Sequence
  Description of Artificial Sequence: Synthetic oligonucleotide
  Sense strand starting at position 442 of SEQ ID NO: 1559964
cagcucuaugccuggcuua

SEQ ID NO: 1566732 - RNA, 19 nt, Artificial Sequence
  Description of Artificial Sequence: Synthetic oligonucleotide
  Antisense strand to SEQ ID NO: 1566731
uaagccaggcauagagcug

SEQ ID NO: 1566733 - RNA, 19 nt, Artificial Sequence
  Description of Artificial Sequence: Synthetic oligonucleotide
  Sense strand starting at position 443 of SEQ ID NO: 1559964
agcucuaugccuggcuuau

SEQ ID NO: 1566734 - RNA, 19 nt, Artificial Sequence
  Description of Artificial Sequence: Synthetic oligonucleotide
  Antisense strand to SEQ ID NO: 1566733
auaagccaggcauagagcu

SEQ ID NO: 1566735 - RNA, 19 nt, Artificial Sequence
  Description of Artificial Sequence: Synthetic oligonucleotide
  Sense strand starting at position 1291 of SEQ ID NO: 1559964
ugcuuuagguggucuugaa

SEQ ID NO: 1566736 - RNA, 19 nt, Artificial Sequence
  Description of Artificial Sequence: Synthetic oligonucleotide
  Antisense strand to SEQ ID NO: 1566735
uucaagaccaccuaaagca

SEQ ID NO: 1566737 - RNA, 19 nt, Artificial Sequence
  Description of Artificial Sequence: Synthetic oligonucleotide
  Sense strand starting at position 2228 of SEQ ID NO: 1559964
gcccgccucuagugugaaa

SEQ ID NO: 1566738 - RNA, 19 nt, Artificial Sequence
  Description of Artificial Sequence: Synthetic oligonucleotide
  Antisense strand to SEQ ID NO: 1566737
uuucacacuagaggcgggc

SEQ ID NO: 1566739 - RNA, 19 nt, Artificial Sequence
  Description of Artificial Sequence: Synthetic oligonucleotide
  Sense strand starting at position 2230 of SEQ ID NO: 1559964
ccgccucuagugugaaauu

SEQ ID NO: 1566740 - RNA, 19 nt, Artificial Sequence
  Description of Artificial Sequence: Synthetic oligonucleotide
  Antisense strand to SEQ ID NO: 1566739
aauuucacacuagaggcgg

SEQ ID NO: 1566741 - RNA, 19 nt, Artificial Sequence
  Description of Artificial Sequence: Synthetic oligonucleotide
  Sense strand starting at position 2836 of SEQ ID NO: 1559964
gcauguuccuucccgugaa

SEQ ID NO: 1566742 - RNA, 19 nt, Artificial Sequence
  Description of Artificial Sequence: Synthetic oligonucleotide
  Antisense strand to SEQ ID NO: 1566741
uucacgggaaggaacaugc

SEQ ID NO: 1566743 - RNA, 19 nt, Artificial Sequence
  Description of Artificial Sequence: Synthetic oligonucleotide
  Sense strand starting at position 2837 of SEQ ID NO: 1559964
cauguuccuucccgugaaa

SEQ ID NO: 1566744 - RNA, 19 nt, Artificial Sequence
  Description of Artificial Sequence: Synthetic oligonucleotide
  Antisense strand to SEQ ID NO: 1566743
uuucacgggaaggaacaug

SEQ ID NO: 1566745 - RNA, 19 nt, Artificial Sequence
  Description of Artificial Sequence: Synthetic oligonucleotide
  Sense strand starting at position 2849 of SEQ ID NO: 1559964
cgugaaaggguucgucauc

SEQ ID NO: 1566746 - RNA, 19 nt, Artificial Sequence
  Description of Artificial Sequence: Synthetic oligonucleotide
  Antisense strand to SEQ ID NO: 1566745
gaugacgaacccuuucacg

SEQ ID NO: 1566747 - RNA, 19 nt, Artificial Sequence
  Description of Artificial Sequence: Synthetic oligonucleotide
  Sense strand starting at position 2867 of SEQ ID NO: 1559964
cgcagcuguguuuaugaga

SEQ ID NO: 1566748 - RNA, 19 nt, Artificial Sequence
  Description of Artificial Sequence: Synthetic oligonucleotide
  Antisense strand to SEQ ID NO: 1566747
ucucauaaacacagcugcg

SEQ ID NO: 1566749 - RNA, 19 nt, Artificial Sequence
  Description of Artificial Sequence: Synthetic oligonucleotide
  Sense strand starting at position 2870 of SEQ ID NO: 1559964
agcuguguuuaugagauuc

SEQ ID NO: 1566750 - RNA, 19 nt, Artificial Sequence
  Description of Artificial Sequence: Synthetic oligonucleotide
  Antisense strand to SEQ ID NO: 1566749
gaaucucauaaacacagcu

SEQ ID NO: 1566751 - RNA, 19 nt, Artificial Sequence
  Description of Artificial Sequence: Synthetic oligonucleotide
  Sense strand starting at position 2878 of SEQ ID NO: 1559964
uuaugagauucuuugacuu

SEQ ID NO: 1566752 - RNA, 19 nt, Artificial Sequence
  Description of Artificial Sequence: Synthetic oligonucleotide
  Antisense strand to SEQ ID NO: 1566751
aagucaaagaaucucauaa

SEQ ID NO: 1566753 - RNA, 19 nt, Artificial Sequence
  Description of Artificial Sequence: Synthetic oligonucleotide
  Sense strand starting at position 2914 of SEQ ID NO: 1559964
ccgaaauuaugagugccuu

SEQ ID NO: 1566754 - RNA, 19 nt, Artificial Sequence
  Description of Artificial Sequence: Synthetic oligonucleotide
  Antisense strand to SEQ ID NO: 1566753
aaggcacucauaauuucgg

SEQ ID NO: 1566755 - RNA, 19 nt, Artificial Sequence
  Description of Artificial Sequence: Synthetic oligonucleotide
  Sense strand starting at position 2915 of SEQ ID NO: 1559964
cgaaauuaugagugccuua

SEQ ID NO: 1566756 - RNA, 19 nt, Artificial Sequence
  Description of Artificial Sequence: Synthetic oligonucleotide
  Antisense strand to SEQ ID NO: 1566755
uaaggcacucauaauuucg

SEQ ID NO: 1566757 - RNA, 19 nt, Artificial Sequence
  Description of Artificial Sequence: Synthetic oligonucleotide
  Sense strand starting at position 2989 of SEQ ID NO: 1559964
ucuuuaauguccugagcuu

SEQ ID NO: 1566758 - RNA, 19 nt, Artificial Sequence
  Description of Artificial Sequence: Synthetic oligonucleotide
  Antisense strand to SEQ ID NO: 1566757
aagcucaggacauuaaaga

SEQ ID NO: 1566759 - RNA, 19 nt, Artificial Sequence
  Description of Artificial Sequence: Synthetic oligonucleotide
  Sense strand starting at position 2990 of SEQ ID NO: 1559964
cuuuaauguccugagcuuu

SEQ ID NO: 1566760 - RNA, 19 nt, Artificial Sequence
  Description of Artificial Sequence: Synthetic oligonucleotide
  Antisense strand to SEQ ID NO: 1566759
aaagcucaggacauuaaag

SEQ ID NO: 1566761 - RNA, 19 nt, Artificial Sequence
  Description of Artificial Sequence: Synthetic oligonucleotide
  Sense strand starting at position 2996 of SEQ ID NO: 1559964
uguccugagcuuugccuau

SEQ ID NO: 1566762 - RNA, 19 nt, Artificial Sequence
  Description of Artificial Sequence: Synthetic oligonucleotide
  Antisense strand to SEQ ID NO: 1566761
auaggcaaagcucaggaca

SEQ ID NO: 1566763 - RNA, 19 nt, Artificial Sequence
  Description of Artificial Sequence: Synthetic oligonucleotide
  Sense strand starting at position 2998 of SEQ ID NO: 1559964
uccugagcuuugccuauaa

SEQ ID NO: 1566764 - RNA, 19 nt, Artificial Sequence
  Description of Artificial Sequence: Synthetic oligonucleotide
  Antisense strand to SEQ ID NO: 1566763
uuauaggcaaagcucagga

SEQ ID NO: 1566765 - RNA, 19 nt, Artificial Sequence
  Description of Artificial Sequence: Synthetic oligonucleotide
  Sense strand starting at position 3000 of SEQ ID NO: 1559964
cugagcuuugccuauaaua

SEQ ID NO: 1566766 - RNA, 19 nt, Artificial Sequence
  Description of Artificial Sequence: Synthetic oligonucleotide
  Antisense strand to SEQ ID NO: 1566765
uauuauaggcaaagcucag

SEQ ID NO: 1566767 - RNA, 19 nt, Artificial Sequence
  Description of Artificial Sequence: Synthetic oligonucleotide
  Sense strand starting at position 3423 of SEQ ID NO: 1559964
gagacugugucaggagaau

SEQ ID NO: 1566768 - RNA, 19 nt, Artificial Sequence
  Description of Artificial Sequence: Synthetic oligonucleotide
  Antisense strand to SEQ ID NO: 1566767
auucuccugacacagucuc

SEQ ID NO: 1566769 - RNA, 19 nt, Artificial Sequence
  Description of Artificial Sequence: Synthetic oligonucleotide
  Sense strand starting at position 3555 of SEQ ID NO: 1559964
ggaagaccuuccucuuucu

SEQ ID NO: 1566770 - RNA, 19 nt, Artificial Sequence
  Description of Artificial Sequence: Synthetic oligonucleotide
  Antisense strand to SEQ ID NO: 1566769
agaaagaggaaggucuucc

SEQ ID NO: 1566771 - RNA, 19 nt, Artificial Sequence
  Description of Artificial Sequence: Synthetic oligonucleotide
  Sense strand starting at position 3696 of SEQ ID NO: 1559964
gggauagaguugggacaaa

SEQ ID NO: 1566772 - RNA, 19 nt, Artificial Sequence
  Description of Artificial Sequence: Synthetic oligonucleotide
  Antisense strand to SEQ ID NO: 1566771
uuugucccaacucuauccc

SEQ ID NO: 1566773 - RNA, 19 nt, Artificial Sequence
  Description of Artificial Sequence: Synthetic oligonucleotide
  Sense strand starting at position 3716 of SEQ ID NO: 1559964
gaaguacugagugaggcua

SEQ ID NO: 1566774 - RNA, 19 nt, Artificial Sequence
  Description of Artificial Sequence: Synthetic oligonucleotide
  Antisense strand to SEQ ID NO: 1566773
uagccucacucaguacuuc

SEQ ID NO: 1566775 - RNA, 19 nt, Artificial Sequence
  Description of Artificial Sequence: Synthetic oligonucleotide
  Sense strand starting at position 3718 of SEQ ID NO: 1559964
aguacugagugaggcuaaa

SEQ ID NO: 1566776 - RNA, 19 nt, Artificial Sequence
  Description of Artificial Sequence: Synthetic oligonucleotide
  Antisense strand to SEQ ID NO: 1566775
uuuagccucacucaguacu

SEQ ID NO: 1566777 - RNA, 19 nt, Artificial Sequence
  Description of Artificial Sequence: Synthetic oligonucleotide
  Sense strand starting at position 3937 of SEQ ID NO: 1559964
gccagcucauucucuggaa

SEQ ID NO: 1566778 - RNA, 19 nt, Artificial Sequence
  Description of Artificial Sequence: Synthetic oligonucleotide
  Antisense strand to SEQ ID NO: 1566777
uuccagagaaugagcuggc

SEQ ID NO: 1566779 - RNA, 19 nt, Artificial Sequence
  Description of Artificial Sequence: Synthetic oligonucleotide
  Sense strand starting at position 3938 of SEQ ID NO: 1559964
ccagcucauucucuggaau

SEQ ID NO: 1566780 - RNA, 19 nt, Artificial Sequence
  Description of Artificial Sequence: Synthetic oligonucleotide
  Antisense strand to SEQ ID NO: 1566779
auuccagagaaugagcugg

SEQ ID NO: 1566781 - RNA, 19 nt, Artificial Sequence
  Description of Artificial Sequence: Synthetic oligonucleotide
  Sense strand starting at position 3940 of SEQ ID NO: 1559964
agcucauucucuggaaucu

SEQ ID NO: 1566782 - RNA, 19 nt, Artificial Sequence
  Description of Artificial Sequence: Synthetic oligonucleotide
  Antisense strand to SEQ ID NO: 1566781
agauuccagagaaugagcu

SEQ ID NO: 1566783 - RNA, 19 nt, Artificial Sequence
  Description of Artificial Sequence: Synthetic oligonucleotide
  Sense strand starting at position 30 of SEQ ID NO: 1559965
ggguaaucgugcuuaggag

SEQ ID NO: 1566784 - RNA, 19 nt, Artificial Sequence
  Description of Artificial Sequence: Synthetic oligonucleotide
  Antisense strand to SEQ ID NO: 1566783
cuccuaagcacgauuaccc

SEQ ID NO: 1566785 - RNA, 19 nt, Artificial Sequence
  Description of Artificial Sequence: Synthetic oligonucleotide
  Sense strand starting at position 31 of SEQ ID NO: 1559965
gguaaucgugcuuaggaga

SEQ ID NO: 1566786 - RNA, 19 nt, Artificial Sequence
  Description of Artificial Sequence: Synthetic oligonucleotide
  Antisense strand to SEQ ID NO: 1566785
ucuccuaagcacgauuacc

SEQ ID NO: 1566787 - RNA, 19 nt, Artificial Sequence
  Description of Artificial Sequence: Synthetic oligonucleotide
  Sense strand starting at position 189 of SEQ ID NO: 1559965
ggccgaggugccuguaauc

SEQ ID NO: 1566788 - RNA, 19 nt, Artificial Sequence
  Description of Artificial Sequence: Synthetic oligonucleotide
  Antisense strand to SEQ ID NO: 1566787
gauuacaggcaccucggcc

SEQ ID NO: 1566789 - RNA, 19 nt, Artificial Sequence
  Description of Artificial Sequence: Synthetic oligonucleotide
  Sense strand starting at position 505 of SEQ ID NO: 1559965
gugacacuugacuggaaca

SEQ ID NO: 1566790 - RNA, 19 nt, Artificial Sequence
  Description of Artificial Sequence: Synthetic oligonucleotide
  Antisense strand to SEQ ID NO: 1566789
uguuccagucaagugucac

SEQ ID NO: 1566791 - RNA, 19 nt, Artificial Sequence
  Description of Artificial Sequence: Synthetic oligonucleotide
  Sense strand starting at position 735 of SEQ ID NO: 1559965
gugcaaaggcccggagauu

SEQ ID NO: 1566792 - RNA, 19 nt, Artificial Sequence
  Description of Artificial Sequence: Synthetic oligonucleotide
  Antisense strand to SEQ ID NO: 1566791
aaucuccgggccuuugcac

SEQ ID NO: 1566793 - RNA, 19 nt, Artificial Sequence
  Description of Artificial Sequence: Synthetic oligonucleotide
  Sense strand starting at position 1445 of SEQ ID NO: 1559965
uaagaagugucagggcaaa

SEQ ID NO: 1566794 - RNA, 19 nt, Artificial Sequence
  Description of Artificial Sequence: Synthetic oligonucleotide
  Antisense strand to SEQ ID NO: 1566793
uuugcccugacacuucuua

SEQ ID NO: 1566795 - RNA, 19 nt, Artificial Sequence
  Description of Artificial Sequence: Synthetic oligonucleotide
  Sense strand starting at position 1530 of SEQ ID NO: 1559965
aggguucugggcuggagau

SEQ ID NO: 1566796 - RNA, 19 nt, Artificial Sequence
  Description of Artificial Sequence: Synthetic oligonucleotide
  Antisense strand to SEQ ID NO: 1566795
aucuccagcccagaacccu

SEQ ID NO: 1566797 - RNA, 19 nt, Artificial Sequence
  Description of Artificial Sequence: Synthetic oligonucleotide
  Sense strand starting at position 1674 of SEQ ID NO: 1559965
agaacugggacguguguau

SEQ ID NO: 1566798 - RNA, 19 nt, Artificial Sequence
  Description of Artificial Sequence: Synthetic oligonucleotide
  Antisense strand to SEQ ID NO: 1566797
auacacacgucccaguucu

SEQ ID NO: 1566799 - RNA, 19 nt, Artificial Sequence
  Description of Artificial Sequence: Synthetic oligonucleotide
  Sense strand starting at position 1678 of SEQ ID NO: 1559965
cugggacguguguauaaca

SEQ ID NO: 1566800 - RNA, 19 nt, Artificial Sequence
  Description of Artificial Sequence: Synthetic oligonucleotide
  Antisense strand to SEQ ID NO: 1566799
uguuauacacacgucccag

SEQ ID NO: 1566801 - RNA, 19 nt, Artificial Sequence
  Description of Artificial Sequence: Synthetic oligonucleotide
  Sense strand starting at position 2028 of SEQ ID NO: 1559965
uuuagcauuucccgaauga

SEQ ID NO: 1566802 - RNA, 19 nt, Artificial Sequence
  Description of Artificial Sequence: Synthetic oligonucleotide
  Antisense strand to SEQ ID NO: 1566801
ucauucgggaaaugcuaaa

SEQ ID NO: 1566803 - RNA, 19 nt, Artificial Sequence
  Description of Artificial Sequence: Synthetic oligonucleotide
  Sense strand starting at position 2103 of SEQ ID NO: 1559965
aggucaguguccuggacau

SEQ ID NO: 1566804 - RNA, 19 nt, Artificial Sequence
  Description of Artificial Sequence: Synthetic oligonucleotide
  Antisense strand to SEQ ID NO: 1566803
auguccaggacacugaccu

SEQ ID NO: 1566805 - RNA, 19 nt, Artificial Sequence
  Description of Artificial Sequence: Synthetic oligonucleotide
  Sense strand starting at position 2432 of SEQ ID NO: 1559965
aagguagcuugacucagaa

SEQ ID NO: 1566806 - RNA, 19 nt, Artificial Sequence
  Description of Artificial Sequence: Synthetic oligonucleotide
  Antisense strand to SEQ ID NO: 1566805
uucugagucaagcuaccuu

SEQ ID NO: 1566807 - RNA, 19 nt, Artificial Sequence
  Description of Artificial Sequence: Synthetic oligonucleotide
  Sense strand starting at position 2434 of SEQ ID NO: 1559965
gguagcuugacucagaaac

SEQ ID NO: 1566808 - RNA, 19 nt, Artificial Sequence
  Description of Artificial Sequence: Synthetic oligonucleotide
  Antisense strand to SEQ ID NO: 1566807
guuucugagucaagcuacc

SEQ ID NO: 1566809 - RNA, 19 nt, Artificial Sequence
  Description of Artificial Sequence: Synthetic oligonucleotide
  Sense strand starting at position 2554 of SEQ ID NO: 1559965
gcgaaagucugggugcagu

SEQ ID NO: 1566810 - RNA, 19 nt, Artificial Sequence
  Description of Artificial Sequence: Synthetic oligonucleotide
  Antisense strand to SEQ ID NO: 1566809
acugcacccagacuuucgc

SEQ ID NO: 1566811 - RNA, 19 nt, Artificial Sequence
  Description of Artificial Sequence: Synthetic oligonucleotide
  Sense strand starting at position 2999 of SEQ ID NO: 1559965
ucaguuacaugugauuuau

SEQ ID NO: 1566812 - RNA, 19 nt, Artificial Sequence
  Description of Artificial Sequence: Synthetic oligonucleotide
  Antisense strand to SEQ ID NO: 1566811
auaaaucacauguaacuga

SEQ ID NO: 1566813 - RNA, 19 nt, Artificial Sequence
  Description of Artificial Sequence: Synthetic oligonucleotide
  Sense strand starting at position 3512 of SEQ ID NO: 1559965
uauguacagugauagcuau

SEQ ID NO: 1566814 - RNA, 19 nt, Artificial Sequence
  Description of Artificial Sequence: Synthetic oligonucleotide
  Antisense strand to SEQ ID NO: 1566813
auagcuaucacuguacaua

SEQ ID NO: 1566815 - RNA, 19 nt, Artificial Sequence
  Description of Artificial Sequence: Synthetic oligonucleotide
  Sense strand starting at position 3519 of SEQ ID NO: 1559965
agugauagcuaucuuucuu

SEQ ID NO: 1566816 - RNA, 19 nt, Artificial Sequence
  Description of Artificial Sequence: Synthetic oligonucleotide
  Antisense strand to SEQ ID NO: 1566815
aagaaagauagcuaucacu

SEQ ID NO: 1566817 - RNA, 19 nt, Artificial Sequence
  Description of Artificial Sequence: Synthetic oligonucleotide
  Sense strand starting at position 3526 of SEQ ID NO: 1559965
gcuaucuuucuuugguguu

SEQ ID NO: 1566818 - RNA, 19 nt, Artificial Sequence
  Description of Artificial Sequence: Synthetic oligonucleotide
  Antisense strand to SEQ ID NO: 1566817
aacaccaaagaaagauagc

SEQ ID NO: 1566819 - RNA, 19 nt, Artificial Sequence
  Description of Artificial Sequence: Synthetic oligonucleotide
  Sense strand starting at position 3611 of SEQ ID NO: 1559965
cugaguugguggccaguaa

SEQ ID NO: 1566820 - RNA, 19 nt, Artificial Sequence
  Description of Artificial Sequence: Synthetic oligonucleotide
  Antisense strand to SEQ ID NO: 1566819
uuacuggccaccaacucag

SEQ ID NO: 1566821 - RNA, 19 nt, Artificial Sequence
  Description of Artificial Sequence: Synthetic oligonucleotide
  Sense strand starting at position 3626 of SEQ ID NO: 1559965
guaaguuccauguaguguu

SEQ ID NO: 1566822 - RNA, 19 nt, Artificial Sequence
  Description of Artificial Sequence: Synthetic oligonucleotide
  Antisense strand to SEQ ID NO: 1566821
aacacuacauggaacuuac

SEQ ID NO: 1566823 - RNA, 19 nt, Artificial Sequence
  Description of Artificial Sequence: Synthetic oligonucleotide
  Sense strand starting at position 3634 of SEQ ID NO: 1559965
cauguaguguuggcacuua

SEQ ID NO: 1566824 - RNA, 19 nt, Artificial Sequence
  Description of Artificial Sequence: Synthetic oligonucleotide
  Antisense strand to SEQ ID NO: 1566823
uaagugccaacacuacaug

SEQ ID NO: 1566825 - RNA, 19 nt, Artificial Sequence
  Description of Artificial Sequence: Synthetic oligonucleotide
  Sense strand starting at position 3676 of SEQ ID NO: 1559965
guuaauagcuuguuauaga

SEQ ID NO: 1566826 - RNA, 19 nt, Artificial Sequence
  Description of Artificial Sequence: Synthetic oligonucleotide
  Antisense strand to SEQ ID NO: 1566825
ucuauaacaagcuauuaac

SEQ ID NO: 1566827 - RNA, 19 nt, Artificial Sequence
  Description of Artificial Sequence: Synthetic oligonucleotide
  Sense strand starting at position 3734 of SEQ ID NO: 1559965
ccagcuugucauuggagag

SEQ ID NO: 1566828 - RNA, 19 nt, Artificial Sequence
  Description of Artificial Sequence: Synthetic oligonucleotide
  Antisense strand to SEQ ID NO: 1566827
cucuccaaugacaagcugg

SEQ ID NO: 1566829 - RNA, 19 nt, Artificial Sequence
  Description of Artificial Sequence: Synthetic oligonucleotide
  Sense strand starting at position 3748 of SEQ ID NO: 1559965
gagagaauauauuaaguga

SEQ ID NO: 1566830 - RNA, 19 nt, Artificial Sequence
  Description of Artificial Sequence: Synthetic oligonucleotide
  Antisense strand to SEQ ID NO: 1566829
ucacuuaauauauucucuc

SEQ ID NO: 1566831 - RNA, 19 nt, Artificial Sequence
  Description of Artificial Sequence: Synthetic oligonucleotide
  Sense strand starting at position 3788 of SEQ ID NO: 1559965
gcuuuaacauguuaaaguu

SEQ ID NO: 1566832 - RNA, 19 nt, Artificial Sequence
  Description of Artificial Sequence: Synthetic oligonucleotide
  Antisense strand to SEQ ID NO: 1566831
aacuuuaacauguuaaagc

SEQ ID NO: 1566833 - RNA, 19 nt, Artificial Sequence
  Description of Artificial Sequence: Synthetic oligonucleotide
  Sense strand starting at position 3807 of SEQ ID NO: 1559965
agugcuaaacauugucaua

SEQ ID NO: 1566834 - RNA, 19 nt, Artificial Sequence
  Description of Artificial Sequence: Synthetic oligonucleotide
  Antisense strand to SEQ ID NO: 1566833
uaugacaauguuuagcacu

SEQ ID NO: 1566835 - RNA, 19 nt, Artificial Sequence
  Description of Artificial Sequence: Synthetic oligonucleotide
  Sense strand starting at position 3810 of SEQ ID NO: 1559965
gcuaaacauugucauauug

SEQ ID NO: 1566836 - RNA, 19 nt, Artificial Sequence
  Description of Artificial Sequence: Synthetic oligonucleotide
  Antisense strand to SEQ ID NO: 1566835
caauaugacaauguuuagc

SEQ ID NO: 1566837 - RNA, 19 nt, Artificial Sequence
  Description of Artificial Sequence: Synthetic oligonucleotide
  Sense strand starting at position 3861 of SEQ ID NO: 1559965
gcuugacuucugcauugga

SEQ ID NO: 1566838 - RNA, 19 nt, Artificial Sequence
  Description of Artificial Sequence: Synthetic oligonucleotide
  Antisense strand to SEQ ID NO: 1566837
uccaaugcagaagucaagc

SEQ ID NO: 1566839 - RNA, 19 nt, Artificial Sequence
  Description of Artificial Sequence: Synthetic oligonucleotide
  Sense strand starting at position 3864 of SEQ ID NO: 1559965
ugacuucugcauuggaacu

SEQ ID NO: 1566840 - RNA, 19 nt, Artificial Sequence
  Description of Artificial Sequence: Synthetic oligonucleotide
  Antisense strand to SEQ ID NO: 1566839
aguuccaaugcagaaguca

SEQ ID NO: 1566841 - RNA, 19 nt, Artificial Sequence
  Description of Artificial Sequence: Synthetic oligonucleotide
  Sense strand starting at position 3965 of SEQ ID NO: 1559965
acaacuguauguuccaaau

SEQ ID NO: 1566842 - RNA, 19 nt, Artificial Sequence
  Description of Artificial Sequence: Synthetic oligonucleotide
  Antisense strand to SEQ ID NO: 1566841
auuuggaacauacaguugu

SEQ ID NO: 1566843 - RNA, 19 nt, Artificial Sequence
  Description of Artificial Sequence: Synthetic oligonucleotide
  Sense strand starting at position 3971 of SEQ ID NO: 1559965
guauguuccaaauaugguc

SEQ ID NO: 1566844 - RNA, 19 nt, Artificial Sequence
  Description of Artificial Sequence: Synthetic oligonucleotide
  Antisense strand to SEQ ID NO: 1566843
gaccauauuuggaacauac

SEQ ID NO: 1566845 - RNA, 19 nt, Artificial Sequence
  Description of Artificial Sequence: Synthetic oligonucleotide
  Sense strand starting at position 462 of SEQ ID NO: 1559966
augagacagcgaugagaau

SEQ ID NO: 1566846 - RNA, 19 nt, Artificial Sequence
  Description of Artificial Sequence: Synthetic oligonucleotide
  Antisense strand to SEQ ID NO: 1566845
auucucaucgcugucucau

SEQ ID NO: 1566847 - RNA, 19 nt, Artificial Sequence
  Description of Artificial Sequence: Synthetic oligonucleotide
  Sense strand starting at position 471 of SEQ ID NO: 1559966
cgaugagaauaggaucaaa

SEQ ID NO: 1566848 - RNA, 19 nt, Artificial Sequence
  Description of Artificial Sequence: Synthetic oligonucleotide
  Antisense strand to SEQ ID NO: 1566847
uuugauccuauucucaucg

SEQ ID NO: 1566849 - RNA, 19 nt, Artificial Sequence
  Description of Artificial Sequence: Synthetic oligonucleotide
  Sense strand starting at position 497 of SEQ ID NO: 1559966
aggagaucagagugucuga

SEQ ID NO: 1566850 - RNA, 19 nt, Artificial Sequence
  Description of Artificial Sequence: Synthetic oligonucleotide
  Antisense strand to SEQ ID NO: 1566849
ucagacacucugaucuccu

SEQ ID NO: 1566851 - RNA, 19 nt, Artificial Sequence
  Description of Artificial Sequence: Synthetic oligonucleotide
  Sense strand starting at position 1417 of SEQ ID NO: 1559966
ggacccaggcucuaucuua

SEQ ID NO: 1566852 - RNA, 19 nt, Artificial Sequence
  Description of Artificial Sequence: Synthetic oligonucleotide
  Antisense strand to SEQ ID NO: 1566851
uaagauagagccugggucc

SEQ ID NO: 1566853 - RNA, 19 nt, Artificial Sequence
  Description of Artificial Sequence: Synthetic oligonucleotide
  Sense strand starting at position 1425 of SEQ ID NO: 1559966
gcucuaucuuaccgagcgu

SEQ ID NO: 1566854 - RNA, 19 nt, Artificial Sequence
  Description of Artificial Sequence: Synthetic oligonucleotide
  Antisense strand to SEQ ID NO: 1566853
acgcucgguaagauagagc

SEQ ID NO: 1566855 - RNA, 19 nt, Artificial Sequence
  Description of Artificial Sequence: Synthetic oligonucleotide
  Sense strand starting at position 1426 of SEQ ID NO: 1559966
cucuaucuuaccgagcguu

SEQ ID NO: 1566856 - RNA, 19 nt, Artificial Sequence
  Description of Artificial Sequence: Synthetic oligonucleotide
  Antisense strand to SEQ ID NO: 1566855
aacgcucgguaagauagag

SEQ ID NO: 1566857 - RNA, 19 nt, Artificial Sequence
  Description of Artificial Sequence: Synthetic oligonucleotide
  Sense strand starting at position 2083 of SEQ ID NO: 1559966
gucauuaagucucagggaa

SEQ ID NO: 1566858 - RNA, 19 nt, Artificial Sequence
  Description of Artificial Sequence: Synthetic oligonucleotide
  Antisense strand to SEQ ID NO: 1566857
uucccugagacuuaaugac

SEQ ID NO: 1566859 - RNA, 19 nt, Artificial Sequence
  Description of Artificial Sequence: Synthetic oligonucleotide
  Sense strand starting at position 2085 of SEQ ID NO: 1559966
cauuaagucucagggaauc

SEQ ID NO: 1566860 - RNA, 19 nt, Artificial Sequence
  Description of Artificial Sequence: Synthetic oligonucleotide
  Antisense strand to SEQ ID NO: 1566859
gauucccugagacuuaaug

SEQ ID NO: 1566861 - RNA, 19 nt, Artificial Sequence
  Description of Artificial Sequence: Synthetic oligonucleotide
  Sense strand starting at position 2128 of SEQ ID NO: 1559966
ggagcacggccuuaugaga

SEQ ID NO: 1566862 - RNA, 19 nt, Artificial Sequence
  Description of Artificial Sequence: Synthetic oligonucleotide
  Antisense strand to SEQ ID NO: 1566861
ucucauaaggccgugcucc

SEQ ID NO: 1566863 - RNA, 19 nt, Artificial Sequence
  Description of Artificial Sequence: Synthetic oligonucleotide
  Sense strand starting at position 2333 of SEQ ID NO: 1559966
gaggcugaguugguagaau

SEQ ID NO: 1566864 - RNA, 19 nt, Artificial Sequence
  Description of Artificial Sequence: Synthetic oligonucleotide
  Antisense strand to SEQ ID NO: 1566863
auucuaccaacucagccuc

SEQ ID NO: 1566865 - RNA, 19 nt, Artificial Sequence
  Description of Artificial Sequence: Synthetic oligonucleotide
  Sense strand starting at position 2534 of SEQ ID NO: 1559966
aggagagaagaucguuuga

SEQ ID NO: 1566866 - RNA, 19 nt, Artificial Sequence
  Description of Artificial Sequence: Synthetic oligonucleotide
  Antisense strand to SEQ ID NO: 1566865
ucaaacgaucuucucuccu

SEQ ID NO: 1566867 - RNA, 19 nt, Artificial Sequence
  Description of Artificial Sequence: Synthetic oligonucleotide
  Sense strand starting at position 2536 of SEQ ID NO: 1559966
gagagaagaucguuugagc

SEQ ID NO: 1566868 - RNA, 19 nt, Artificial Sequence
  Description of Artificial Sequence: Synthetic oligonucleotide
  Antisense strand to SEQ ID NO: 1566867
gcucaaacgaucuucucuc

SEQ ID NO: 1566869 - RNA, 19 nt, Artificial Sequence
  Description of Artificial Sequence: Synthetic oligonucleotide
  Sense strand starting at position 2539 of SEQ ID NO: 1559966
agaagaucguuugagccua

SEQ ID NO: 1566870 - RNA, 19 nt, Artificial Sequence
  Description of Artificial Sequence: Synthetic oligonucleotide
  Antisense strand to SEQ ID NO: 1566869
uaggcucaaacgaucuucu

SEQ ID NO: 1566871 - RNA, 19 nt, Artificial Sequence
  Description of Artificial Sequence: Synthetic oligonucleotide
  Sense strand starting at position 2544 of SEQ ID NO: 1559966
aucguuugagccuacuagu

SEQ ID NO: 1566872 - RNA, 19 nt, Artificial Sequence
  Description of Artificial Sequence: Synthetic oligonucleotide
  Antisense strand to SEQ ID NO: 1566871
acuaguaggcucaaacgau

SEQ ID NO: 1566873 - RNA, 19 nt, Artificial Sequence
  Description of Artificial Sequence: Synthetic oligonucleotide
  Sense strand starting at position 2712 of SEQ ID NO: 1559966
cugggcucacugcaacauu

SEQ ID NO: 1566874 - RNA, 19 nt, Artificial Sequence
  Description of Artificial Sequence: Synthetic oligonucleotide
  Antisense strand to SEQ ID NO: 1566873
aauguugcagugagcccag

SEQ ID NO: 1566875 - RNA, 19 nt, Artificial Sequence
  Description of Artificial Sequence: Synthetic oligonucleotide
  Sense strand starting at position 2922 of SEQ ID NO: 1559966
cggagaccuugucuuuguu

SEQ ID NO: 1566876 - RNA, 19 nt, Artificial Sequence
  Description of Artificial Sequence: Synthetic oligonucleotide
  Antisense strand to SEQ ID NO: 1566875
aacaaagacaaggucuccg

SEQ ID NO: 1566877 - RNA, 19 nt, Artificial Sequence
  Description of Artificial Sequence: Synthetic oligonucleotide
  Sense strand starting at position 3344 of SEQ ID NO: 1559966
cucugagagucuuaguguc

SEQ ID NO: 1566878 - RNA, 19 nt, Artificial Sequence
  Description of Artificial Sequence: Synthetic oligonucleotide
  Antisense strand to SEQ ID NO: 1566877
gacacuaagacucucagag

SEQ ID NO: 1566879 - RNA, 19 nt, Artificial Sequence
  Description of Artificial Sequence: Synthetic oligonucleotide
  Sense strand starting at position 3350 of SEQ ID NO: 1559966
gagucuuagugucccaucu

SEQ ID NO: 1566880 - RNA, 19 nt, Artificial Sequence
  Description of Artificial Sequence: Synthetic oligonucleotide
  Antisense strand to SEQ ID NO: 1566879
agaugggacacuaagacuc

SEQ ID NO: 1566881 - RNA, 19 nt, Artificial Sequence
  Description of Artificial Sequence: Synthetic oligonucleotide
  Sense strand starting at position 3374 of SEQ ID NO: 1559966
augugagaauccuaacgag

SEQ ID NO: 1566882 - RNA, 19 nt, Artificial Sequence
  Description of Artificial Sequence: Synthetic oligonucleotide
  Antisense strand to SEQ ID NO: 1566881
cucguuaggauucucacau

SEQ ID NO: 1566883 - RNA, 19 nt, Artificial Sequence
  Description of Artificial Sequence: Synthetic oligonucleotide
  Sense strand starting at position 3377 of SEQ ID NO: 1559966
ugagaauccuaacgagguu

SEQ ID NO: 1566884 - RNA, 19 nt, Artificial Sequence
  Description of Artificial Sequence: Synthetic oligonucleotide
  Antisense strand to SEQ ID NO: 1566883
aaccucguuaggauucuca

SEQ ID NO: 1566885 - RNA, 19 nt, Artificial Sequence
  Description of Artificial Sequence: Synthetic oligonucleotide
  Sense strand starting at position 3380 of SEQ ID NO: 1559966
gaauccuaacgagguugau

SEQ ID NO: 1566886 - RNA, 19 nt, Artificial Sequence
  Description of Artificial Sequence: Synthetic oligonucleotide
  Antisense strand to SEQ ID NO: 1566885
aucaaccucguuaggauuc

SEQ ID NO: 1566887 - RNA, 19 nt, Artificial Sequence
  Description of Artificial Sequence: Synthetic oligonucleotide
  Sense strand starting at position 3484 of SEQ ID NO: 1559966
caauaaagcuguuuguguu

SEQ ID NO: 1566888 - RNA, 19 nt, Artificial Sequence
  Description of Artificial Sequence: Synthetic oligonucleotide
  Antisense strand to SEQ ID NO: 1566887
aacacaaacagcuuuauug

SEQ ID NO: 1566889 - RNA, 19 nt, Artificial Sequence
  Description of Artificial Sequence: Synthetic oligonucleotide
  Sense strand starting at position 3485 of SEQ ID NO: 1559966
aauaaagcuguuuguguuu

SEQ ID NO: 1566890 - RNA, 19 nt, Artificial Sequence
  Description of Artificial Sequence: Synthetic oligonucleotide
  Antisense strand to SEQ ID NO: 1566889
aaacacaaacagcuuuauu

SEQ ID NO: 1566891 - RNA, 19 nt, Artificial Sequence
  Description of Artificial Sequence: Synthetic oligonucleotide
  Sense strand starting at position 3487 of SEQ ID NO: 1559966
uaaagcuguuuguguuuau

SEQ ID NO: 1566892 - RNA, 19 nt, Artificial Sequence
  Description of Artificial Sequence: Synthetic oligonucleotide
  Antisense strand to SEQ ID NO: 1566891
auaaacacaaacagcuuua

SEQ ID NO: 1566893 - RNA, 19 nt, Artificial Sequence
  Description of Artificial Sequence: Synthetic oligonucleotide
  Sense strand starting at position 3488 of SEQ ID NO: 1559966
aaagcuguuuguguuuauu

SEQ ID NO: 1566894 - RNA, 19 nt, Artificial Sequence
  Description of Artificial Sequence: Synthetic oligonucleotide
  Antisense strand to SEQ ID NO: 1566893
aauaaacacaaacagcuuu

SEQ ID NO: 1566895 - RNA, 19 nt, Artificial Sequence
  Description of Artificial Sequence: Synthetic oligonucleotide
  Sense strand starting at position 3644 of SEQ ID NO: 1559966
caccgagccuggcuuaauu

SEQ ID NO: 1566896 - RNA, 19 nt, Artificial Sequence
  Description of Artificial Sequence: Synthetic oligonucleotide
  Antisense strand to SEQ ID NO: 1566895
aauuaagccaggcucggug

SEQ ID NO: 1566897 - RNA, 19 nt, Artificial Sequence
  Description of Artificial Sequence: Synthetic oligonucleotide
  Sense strand starting at position 3682 of SEQ ID NO: 1559966
caggaaauguugcuauguu

SEQ ID NO: 1566898 - RNA, 19 nt, Artificial Sequence
  Description of Artificial Sequence: Synthetic oligonucleotide
  Antisense strand to SEQ ID NO: 1566897
aacauagcaacauuuccug

SEQ ID NO: 1566899 - RNA, 19 nt, Artificial Sequence
  Description of Artificial Sequence: Synthetic oligonucleotide
  Sense strand starting at position 3683 of SEQ ID NO: 1559966
aggaaauguugcuauguug

SEQ ID NO: 1566900 - RNA, 19 nt, Artificial Sequence
  Description of Artificial Sequence: Synthetic oligonucleotide
  Antisense strand to SEQ ID NO: 1566899
caacauagcaacauuuccu

SEQ ID NO: 1566901 - RNA, 19 nt, Artificial Sequence
  Description of Artificial Sequence: Synthetic oligonucleotide
  Sense strand starting at position 3741 of SEQ ID NO: 1559966
cuaucauggccucaguacu

SEQ ID NO: 1566902 - RNA, 19 nt, Artificial Sequence
  Description of Artificial Sequence: Synthetic oligonucleotide
  Antisense strand to SEQ ID NO: 1566901
aguacugaggccaugauag

SEQ ID NO: 1566903 - RNA, 19 nt, Artificial Sequence
  Description of Artificial Sequence: Synthetic oligonucleotide
  Sense strand starting at position 3790 of SEQ ID NO: 1559966
ggauguaugauccaggccu

SEQ ID NO: 1566904 - RNA, 19 nt, Artificial Sequence
  Description of Artificial Sequence: Synthetic oligonucleotide
  Antisense strand to SEQ ID NO: 1566903
aggccuggaucauacaucc

SEQ ID NO: 1566905 - RNA, 19 nt, Artificial Sequence
  Description of Artificial Sequence: Synthetic oligonucleotide
  Sense strand starting at position 3836 of SEQ ID NO: 1559966
guacaugacuagcucuuaa

SEQ ID NO: 1566906 - RNA, 19 nt, Artificial Sequence
  Description of Artificial Sequence: Synthetic oligonucleotide
  Antisense strand to SEQ ID NO: 1566905
uuaagagcuagucauguac

SEQ ID NO: 1566907 - RNA, 19 nt, Artificial Sequence
  Description of Artificial Sequence: Synthetic oligonucleotide
  Sense strand starting at position 3840 of SEQ ID NO: 1559966
augacuagcucuuaauuga

SEQ ID NO: 1566908 - RNA, 19 nt, Artificial Sequence
  Description of Artificial Sequence: Synthetic oligonucleotide
  Antisense strand to SEQ ID NO: 1566907
ucaauuaagagcuagucau

SEQ ID NO: 1566909 - RNA, 19 nt, Artificial Sequence
  Description of Artificial Sequence: Synthetic oligonucleotide
  Sense strand starting at position 3851 of SEQ ID NO: 1559966
uuaauugaaggucauguau

SEQ ID NO: 1566910 - RNA, 19 nt, Artificial Sequence
  Description of Artificial Sequence: Synthetic oligonucleotide
  Antisense strand to SEQ ID NO: 1566909
auacaugaccuucaauuaa

SEQ ID NO: 1566911 - RNA, 19 nt, Artificial Sequence
  Description of Artificial Sequence: Synthetic oligonucleotide
  Sense strand starting at position 3882 of SEQ ID NO: 1559966
guccaaucauauccagaug

SEQ ID NO: 1566912 - RNA, 19 nt, Artificial Sequence
  Description of Artificial Sequence: Synthetic oligonucleotide
  Antisense strand to SEQ ID NO: 1566911
caucuggauaugauuggac

SEQ ID NO: 1566913 - RNA, 19 nt, Artificial Sequence
  Description of Artificial Sequence: Synthetic oligonucleotide
  Sense strand starting at position 3893 of SEQ ID NO: 1559966
uccagaugcugagagaacu

SEQ ID NO: 1566914 - RNA, 19 nt, Artificial Sequence
  Description of Artificial Sequence: Synthetic oligonucleotide
  Antisense strand to SEQ ID NO: 1566913
aguucucucagcaucugga

SEQ ID NO: 1566915 - RNA, 19 nt, Artificial Sequence
  Description of Artificial Sequence: Synthetic oligonucleotide
  Sense strand starting at position 722 of SEQ ID NO: 1559967
gaagacaauccgugggcuu

SEQ ID NO: 1566916 - RNA, 19 nt, Artificial Sequence
  Description of Artificial Sequence: Synthetic oligonucleotide
  Antisense strand to SEQ ID NO: 1566915
aagcccacggauugucuuc

SEQ ID NO: 1566917 - RNA, 19 nt, Artificial Sequence
  Description of Artificial Sequence: Synthetic oligonucleotide
  Sense strand starting at position 747 of SEQ ID NO: 1559967
gggagaaacgccugcuaaa

SEQ ID NO: 1566918 - RNA, 19 nt, Artificial Sequence
  Description of Artificial Sequence: Synthetic oligonucleotide
  Antisense strand to SEQ ID NO: 1566917
uuuagcaggcguuucuccc

SEQ ID NO: 1566919 - RNA, 19 nt, Artificial Sequence
  Description of Artificial Sequence: Synthetic oligonucleotide
  Sense strand starting at position 750 of SEQ ID NO: 1559967
agaaacgccugcuaaauuu

SEQ ID NO: 1566920 - RNA, 19 nt, Artificial Sequence
  Description of Artificial Sequence: Synthetic oligonucleotide
  Antisense strand to SEQ ID NO: 1566919
aaauuuagcaggcguuucu

SEQ ID NO: 1566921 - RNA, 19 nt, Artificial Sequence
  Description of Artificial Sequence: Synthetic oligonucleotide
  Sense strand starting at position 771 of SEQ ID NO: 1559967
gaagcugcuugcuggaaga

SEQ ID NO: 1566922 - RNA, 19 nt, Artificial Sequence
  Description of Artificial Sequence: Synthetic oligonucleotide
  Antisense strand to SEQ ID NO: 1566921
ucuuccagcaagcagcuuc

SEQ ID NO: 1566923 - RNA, 19 nt, Artificial Sequence
  Description of Artificial Sequence: Synthetic oligonucleotide
  Sense strand starting at position 956 of SEQ ID NO: 1559967
cggcuucuuucucccacau

SEQ ID NO: 1566924 - RNA, 19 nt, Artificial Sequence
  Description of Artificial Sequence: Synthetic oligonucleotide
  Antisense strand to SEQ ID NO: 1566923
augugggagaaagaagccg

SEQ ID NO: 1566925 - RNA, 19 nt, Artificial Sequence
  Description of Artificial Sequence: Synthetic oligonucleotide
  Sense strand starting at position 1257 of SEQ ID NO: 1559967
ggaagacacccacgaucuu

SEQ ID NO: 1566926 - RNA, 19 nt, Artificial Sequence
  Description of Artificial Sequence: Synthetic oligonucleotide
  Antisense strand to SEQ ID NO: 1566925
aagaucgugggugucuucc

SEQ ID NO: 1566927 - RNA, 19 nt, Artificial Sequence
  Description of Artificial Sequence: Synthetic oligonucleotide
  Sense strand starting at position 1364 of SEQ ID NO: 1559967
ggaacauucuuucuguacu

SEQ ID NO: 1566928 - RNA, 19 nt, Artificial Sequence
  Description of Artificial Sequence: Synthetic oligonucleotide
  Antisense strand to SEQ ID NO: 1566927
aguacagaaagaauguucc

SEQ ID NO: 1566929 - RNA, 19 nt, Artificial Sequence
  Description of Artificial Sequence: Synthetic oligonucleotide
  Sense strand starting at position 1733 of SEQ ID NO: 1559967
uuuagaucuuugcugcaac

SEQ ID NO: 1566930 - RNA, 19 nt, Artificial Sequence
  Description of Artificial Sequence: Synthetic oligonucleotide
  Antisense strand to SEQ ID NO: 1566929
guugcagcaaagaucuaaa

SEQ ID NO: 1566931 - RNA, 19 nt, Artificial Sequence
  Description of Artificial Sequence: Synthetic oligonucleotide
  Sense strand starting at position 1736 of SEQ ID NO: 1559967
agaucuuugcugcaacauc

SEQ ID NO: 1566932 - RNA, 19 nt, Artificial Sequence
  Description of Artificial Sequence: Synthetic oligonucleotide
  Antisense strand to SEQ ID NO: 1566931
gauguugcagcaaagaucu

SEQ ID NO: 1566933 - RNA, 19 nt, Artificial Sequence
  Description of Artificial Sequence: Synthetic oligonucleotide
  Sense strand starting at position 1868 of SEQ ID NO: 1559967
ucaccauuaccuggucaca

SEQ ID NO: 1566934 - RNA, 19 nt, Artificial Sequence
  Description of Artificial Sequence: Synthetic oligonucleotide
  Antisense strand to SEQ ID NO: 1566933
ugugaccagguaaugguga

SEQ ID NO: 1566935 - RNA, 19 nt, Artificial Sequence
  Description of Artificial Sequence: Synthetic oligonucleotide
  Sense strand starting at position 2021 of SEQ ID NO: 1559967
caggaccuguccugcagaa

SEQ ID NO: 1566936 - RNA, 19 nt, Artificial Sequence
  Description of Artificial Sequence: Synthetic oligonucleotide
  Antisense strand to SEQ ID NO: 1566935
uucugcaggacagguccug

SEQ ID NO: 1566937 - RNA, 19 nt, Artificial Sequence
  Description of Artificial Sequence: Synthetic oligonucleotide
  Sense strand starting at position 2047 of SEQ ID NO: 1559967
ccuccaguuggaugauacu

SEQ ID NO: 1566938 - RNA, 19 nt, Artificial Sequence
  Description of Artificial Sequence: Synthetic oligonucleotide
  Antisense strand to SEQ ID NO: 1566937
aguaucauccaacuggagg

SEQ ID NO: 1566939 - RNA, 19 nt, Artificial Sequence
  Description of Artificial Sequence: Synthetic oligonucleotide
  Sense strand starting at position 2053 of SEQ ID NO: 1559967
guuggaugauacucagaua

SEQ ID NO: 1566940 - RNA, 19 nt, Artificial Sequence
  Description of Artificial Sequence: Synthetic oligonucleotide
  Antisense strand to SEQ ID NO: 1566939
uaucugaguaucauccaac

SEQ ID NO: 1566941 - RNA, 19 nt, Artificial Sequence
  Description of Artificial Sequence: Synthetic oligonucleotide
  Sense strand starting at position 2056 of SEQ ID NO: 1559967
ggaugauacucagauaacu

SEQ ID NO: 1566942 - RNA, 19 nt, Artificial Sequence
  Description of Artificial Sequence: Synthetic oligonucleotide
  Antisense strand to SEQ ID NO: 1566941
aguuaucugaguaucaucc

SEQ ID NO: 1566943 - RNA, 19 nt, Artificial Sequence
  Description of Artificial Sequence: Synthetic oligonucleotide
  Sense strand starting at position 2402 of SEQ ID NO: 1559967
agguaacucugcguggcau

SEQ ID NO: 1566944 - RNA, 19 nt, Artificial Sequence
  Description of Artificial Sequence: Synthetic oligonucleotide
  Antisense strand to SEQ ID NO: 1566943
augccacgcagaguuaccu

SEQ ID NO: 1566945 - RNA, 19 nt, Artificial Sequence
  Description of Artificial Sequence: Synthetic oligonucleotide
  Sense strand starting at position 2403 of SEQ ID NO: 1559967
gguaacucugcguggcauu

SEQ ID NO: 1566946 - RNA, 19 nt, Artificial Sequence
  Description of Artificial Sequence: Synthetic oligonucleotide
  Antisense strand to SEQ ID NO: 1566945
aaugccacgcagaguuacc

SEQ ID NO: 1566947 - RNA, 19 nt, Artificial Sequence
  Description of Artificial Sequence: Synthetic oligonucleotide
  Sense strand starting at position 2452 of SEQ ID NO: 1559967
cggcucuguccuuacggaa

SEQ ID NO: 1566948 - RNA, 19 nt, Artificial Sequence
  Description of Artificial Sequence: Synthetic oligonucleotide
  Antisense strand to SEQ ID NO: 1566947
uuccguaaggacagagccg

SEQ ID NO: 1566949 - RNA, 19 nt, Artificial Sequence
  Description of Artificial Sequence: Synthetic oligonucleotide
  Sense strand starting at position 2455 of SEQ ID NO: 1559967
cucuguccuuacggaauuu

SEQ ID NO: 1566950 - RNA, 19 nt, Artificial Sequence
  Description of Artificial Sequence: Synthetic oligonucleotide
  Antisense strand to SEQ ID NO: 1566949
aaauuccguaaggacagag

SEQ ID NO: 1566951 - RNA, 19 nt, Artificial Sequence
  Description of Artificial Sequence: Synthetic oligonucleotide
  Sense strand starting at position 2633 of SEQ ID NO: 1559967
gcuuccuucugacagcaga

SEQ ID NO: 1566952 - RNA, 19 nt, Artificial Sequence
  Description of Artificial Sequence: Synthetic oligonucleotide
  Antisense strand to SEQ ID NO: 1566951
ucugcugucagaaggaagc

SEQ ID NO: 1566953 - RNA, 19 nt, Artificial Sequence
  Description of Artificial Sequence: Synthetic oligonucleotide
  Sense strand starting at position 2809 of SEQ ID NO: 1559967
gucgaggaugucggugaau

SEQ ID NO: 1566954 - RNA, 19 nt, Artificial Sequence
  Description of Artificial Sequence: Synthetic oligonucleotide
  Antisense strand to SEQ ID NO: 1566953
auucaccgacauccucgac

SEQ ID NO: 1566955 - RNA, 19 nt, Artificial Sequence
  Description of Artificial Sequence: Synthetic oligonucleotide
  Sense strand starting at position 2810 of SEQ ID NO: 1559967
ucgaggaugucggugaauu

SEQ ID NO: 1566956 - RNA, 19 nt, Artificial Sequence
  Description of Artificial Sequence: Synthetic oligonucleotide
  Antisense strand to SEQ ID NO: 1566955
aauucaccgacauccucga

SEQ ID NO: 1566957 - RNA, 19 nt, Artificial Sequence
  Description of Artificial Sequence: Synthetic oligonucleotide
  Sense strand starting at position 2811 of SEQ ID NO: 1559967
cgaggaugucggugaauua

SEQ ID NO: 1566958 - RNA, 19 nt, Artificial Sequence
  Description of Artificial Sequence: Synthetic oligonucleotide
  Antisense strand to SEQ ID NO: 1566957
uaauucaccgacauccucg

SEQ ID NO: 1566959 - RNA, 19 nt, Artificial Sequence
  Description of Artificial Sequence: Synthetic oligonucleotide
  Sense strand starting at position 2812 of SEQ ID NO: 1559967
gaggaugucggugaauuac

SEQ ID NO: 1566960 - RNA, 19 nt, Artificial Sequence
  Description of Artificial Sequence: Synthetic oligonucleotide
  Antisense strand to SEQ ID NO: 1566959
guaauucaccgacauccuc

SEQ ID NO: 1566961 - RNA, 19 nt, Artificial Sequence
  Description of Artificial Sequence: Synthetic oligonucleotide
  Sense strand starting at position 2996 of SEQ ID NO: 1559967
gggacuucccagugaggaa

SEQ ID NO: 1566962 - RNA, 19 nt, Artificial Sequence
  Description of Artificial Sequence: Synthetic oligonucleotide
  Antisense strand to SEQ ID NO: 1566961
uuccucacugggaaguccc

SEQ ID NO: 1566963 - RNA, 19 nt, Artificial Sequence
  Description of Artificial Sequence: Synthetic oligonucleotide
  Sense strand starting at position 3104 of SEQ ID NO: 1559967
gauguaguuccaggaagag

SEQ ID NO: 1566964 - RNA, 19 nt, Artificial Sequence
  Description of Artificial Sequence: Synthetic oligonucleotide
  Antisense strand to SEQ ID NO: 1566963
cucuuccuggaacuacauc

SEQ ID NO: 1566965 - RNA, 19 nt, Artificial Sequence
  Description of Artificial Sequence: Synthetic oligonucleotide
  Sense strand starting at position 3169 of SEQ ID NO: 1559967
cgauuaggccugggagguu

SEQ ID NO: 1566966 - RNA, 19 nt, Artificial Sequence
  Description of Artificial Sequence: Synthetic oligonucleotide
  Antisense strand to SEQ ID NO: 1566965
aaccucccaggccuaaucg

SEQ ID NO: 1566967 - RNA, 19 nt, Artificial Sequence
  Description of Artificial Sequence: Synthetic oligonucleotide
  Sense strand starting at position 3234 of SEQ ID NO: 1559967
ggcacuuuauccugagggu

SEQ ID NO: 1566968 - RNA, 19 nt, Artificial Sequence
  Description of Artificial Sequence: Synthetic oligonucleotide
  Antisense strand to SEQ ID NO: 1566967
acccucaggauaaagugcc

SEQ ID NO: 1566969 - RNA, 19 nt, Artificial Sequence
  Description of Artificial Sequence: Synthetic oligonucleotide
  Sense strand starting at position 3237 of SEQ ID NO: 1559967
acuuuauccugagggugau

SEQ ID NO: 1566970 - RNA, 19 nt, Artificial Sequence
  Description of Artificial Sequence: Synthetic oligonucleotide
  Antisense strand to SEQ ID NO: 1566969
aucacccucaggauaaagu

SEQ ID NO: 1566971 - RNA, 19 nt, Artificial Sequence
  Description of Artificial Sequence: Synthetic oligonucleotide
  Sense strand starting at position 3287 of SEQ ID NO: 1559967
gacagaaugugccagaaag

SEQ ID NO: 1566972 - RNA, 19 nt, Artificial Sequence
  Description of Artificial Sequence: Synthetic oligonucleotide
  Antisense strand to SEQ ID NO: 1566971
cuuucuggcacauucuguc

SEQ ID NO: 1566973 - RNA, 19 nt, Artificial Sequence
  Description of Artificial Sequence: Synthetic oligonucleotide
  Sense strand starting at position 3404 of SEQ ID NO: 1559967
ccaaacuuucugcaaacga

SEQ ID NO: 1566974 - RNA, 19 nt, Artificial Sequence
  Description of Artificial Sequence: Synthetic oligonucleotide
  Antisense strand to SEQ ID NO: 1566973
ucguuugcagaaaguuugg

SEQ ID NO: 1566975 - RNA, 19 nt, Artificial Sequence
  Description of Artificial Sequence: Synthetic oligonucleotide
  Sense strand starting at position 3472 of SEQ ID NO: 1559967
gcauuuaaugagcgcugau

SEQ ID NO: 1566976 - RNA, 19 nt, Artificial Sequence
  Description of Artificial Sequence: Synthetic oligonucleotide
  Antisense strand to SEQ ID NO: 1566975
aucagcgcucauuaaaugc

SEQ ID NO: 1566977 - RNA, 19 nt, Artificial Sequence
  Description of Artificial Sequence: Synthetic oligonucleotide
  Sense strand starting at position 3846 of SEQ ID NO: 1559967
cggccuguuagucacuuua

SEQ ID NO: 1566978 - RNA, 19 nt, Artificial Sequence
  Description of Artificial Sequence: Synthetic oligonucleotide
  Antisense strand to SEQ ID NO: 1566977
uaaagugacuaacaggccg

SEQ ID NO: 1566979 - RNA, 19 nt, Artificial Sequence
  Description of Artificial Sequence: Synthetic oligonucleotide
  Sense strand starting at position 3848 of SEQ ID NO: 1559967
gccuguuagucacuuuauu

SEQ ID NO: 1566980 - RNA, 19 nt, Artificial Sequence
  Description of Artificial Sequence: Synthetic oligonucleotide
  Antisense strand to SEQ ID NO: 1566979
aauaaagugacuaacaggc

SEQ ID NO: 1566981 - RNA, 19 nt, Artificial Sequence
  Description of Artificial Sequence: Synthetic oligonucleotide
  Sense strand starting at position 3900 of SEQ ID NO: 1559967
aggcacuuucuagguacua

SEQ ID NO: 1566982 - RNA, 19 nt, Artificial Sequence
  Description of Artificial Sequence: Synthetic oligonucleotide
  Antisense strand to SEQ ID NO: 1566981
uaguaccuagaaagugccu

SEQ ID NO: 1566983 - RNA, 19 nt, Artificial Sequence
  Description of Artificial Sequence: Synthetic oligonucleotide
  Sense strand starting at position 3901 of SEQ ID NO: 1559967
ggcacuuucuagguacuaa

SEQ ID NO: 1566984 - RNA, 19 nt, Artificial Sequence
  Description of Artificial Sequence: Synthetic oligonucleotide
  Antisense strand to SEQ ID NO: 1566983
uuaguaccuagaaagugcc

SEQ ID NO: 1566985 - RNA, 19 nt, Artificial Sequence
  Description of Artificial Sequence: Synthetic oligonucleotide
  Sense strand starting at position 3952 of SEQ ID NO: 1559967
cccuccuucuaguaaggga

SEQ ID NO: 1566986 - RNA, 19 nt, Artificial Sequence
  Description of Artificial Sequence: Synthetic oligonucleotide
  Antisense strand to SEQ ID NO: 1566985
ucccuuacuagaaggaggg

SEQ ID NO: 1566987 - RNA, 19 nt, Artificial Sequence
  Description of Artificial Sequence: Synthetic oligonucleotide
  Sense strand starting at position 23 of SEQ ID NO: 1559968
cuggguguaacuugggaau

SEQ ID NO: 1566988 - RNA, 19 nt, Artificial Sequence
  Description of Artificial Sequence: Synthetic oligonucleotide
  Antisense strand to SEQ ID NO: 1566987
auucccaaguuacacccag

SEQ ID NO: 1566989 - RNA, 19 nt, Artificial Sequence
  Description of Artificial Sequence: Synthetic oligonucleotide
  Sense strand starting at position 25 of SEQ ID NO: 1559968
ggguguaacuugggaaugu

SEQ ID NO: 1566990 - RNA, 19 nt, Artificial Sequence
  Description of Artificial Sequence: Synthetic oligonucleotide
  Antisense strand to SEQ ID NO: 1566989
acauucccaaguuacaccc

SEQ ID NO: 1566991 - RNA, 19 nt, Artificial Sequence
  Description of Artificial Sequence: Synthetic oligonucleotide
  Sense strand starting at position 26 of SEQ ID NO: 1559968
gguguaacuugggaaugua

SEQ ID NO: 1566992 - RNA, 19 nt, Artificial Sequence
  Description of Artificial Sequence: Synthetic oligonucleotide
  Antisense strand to SEQ ID NO: 1566991
uacauucccaaguuacacc

SEQ ID NO: 1566993 - RNA, 19 nt, Artificial Sequence
  Description of Artificial Sequence: Synthetic oligonucleotide
  Sense strand starting at position 29 of SEQ ID NO: 1559968
guaacuugggaauguaagu

SEQ ID NO: 1566994 - RNA, 19 nt, Artificial Sequence
  Description of Artificial Sequence: Synthetic oligonucleotide
  Antisense strand to SEQ ID NO: 1566993
acuuacauucccaaguuac

SEQ ID NO: 1566995 - RNA, 19 nt, Artificial Sequence
  Description of Artificial Sequence: Synthetic oligonucleotide
  Sense strand starting at position 40 of SEQ ID NO: 1559968
auguaagucuauccaaugu

SEQ ID NO: 1566996 - RNA, 19 nt, Artificial Sequence
  Description of Artificial Sequence: Synthetic oligonucleotide
  Antisense strand to SEQ ID NO: 1566995
acauuggauagacuuacau

SEQ ID NO: 1566997 - RNA, 19 nt, Artificial Sequence
  Description of Artificial Sequence: Synthetic oligonucleotide
  Sense strand starting at position 80 of SEQ ID NO: 1559968
gucccuauggcuggucaga

SEQ ID NO: 1566998 - RNA, 19 nt, Artificial Sequence
  Description of Artificial Sequence: Synthetic oligonucleotide
  Antisense strand to SEQ ID NO: 1566997
ucugaccagccauagggac

SEQ ID NO: 1566999 - RNA, 19 nt, Artificial Sequence
  Description of Artificial Sequence: Synthetic oligonucleotide
  Sense strand starting at position 82 of SEQ ID NO: 1559968
cccuauggcuggucagaag

SEQ ID NO: 1567000 - RNA, 19 nt, Artificial Sequence
  Description of Artificial Sequence: Synthetic oligonucleotide
  Antisense strand to SEQ ID NO: 1566999
cuucugaccagccauaggg

SEQ ID NO: 1567001 - RNA, 19 nt, Artificial Sequence
  Description of Artificial Sequence: Synthetic oligonucleotide
  Sense strand starting at position 96 of SEQ ID NO: 1559968
agaagaagucucugcuccu

SEQ ID NO: 1567002 - RNA, 19 nt, Artificial Sequence
  Description of Artificial Sequence: Synthetic oligonucleotide
  Antisense strand to SEQ ID NO: 1567001
aggagcagagacuucuucu

SEQ ID NO: 1567003 - RNA, 19 nt, Artificial Sequence
  Description of Artificial Sequence: Synthetic oligonucleotide
  Sense strand starting at position 228 of SEQ ID NO: 1559968
cgccgagcucugcaggauu

SEQ ID NO: 1567004 - RNA, 19 nt, Artificial Sequence
  Description of Artificial Sequence: Synthetic oligonucleotide
  Antisense strand to SEQ ID NO: 1567003
aauccugcagagcucggcg

SEQ ID NO: 1567005 - RNA, 19 nt, Artificial Sequence
  Description of Artificial Sequence: Synthetic oligonucleotide
  Sense strand starting at position 636 of SEQ ID NO: 1559968
caggcugaucucgaaacgu

SEQ ID NO: 1567006 - RNA, 19 nt, Artificial Sequence
  Description of Artificial Sequence: Synthetic oligonucleotide
  Antisense strand to SEQ ID NO: 1567005
acguuucgagaucagccug

SEQ ID NO: 1567007 - RNA, 19 nt, Artificial Sequence
  Description of Artificial Sequence: Synthetic oligonucleotide
  Sense strand starting at position 640 of SEQ ID NO: 1559968
cugaucucgaaacguaaca

SEQ ID NO: 1567008 - RNA, 19 nt, Artificial Sequence
  Description of Artificial Sequence: Synthetic oligonucleotide
  Antisense strand to SEQ ID NO: 1567007
uguuacguuucgagaucag

SEQ ID NO: 1567009 - RNA, 19 nt, Artificial Sequence
  Description of Artificial Sequence: Synthetic oligonucleotide
  Sense strand starting at position 656 of SEQ ID NO: 1559968
acagcuacugcucagcaaa

SEQ ID NO: 1567010 - RNA, 19 nt, Artificial Sequence
  Description of Artificial Sequence: Synthetic oligonucleotide
  Antisense strand to SEQ ID NO: 1567009
uuugcugagcaguagcugu

SEQ ID NO: 1567011 - RNA, 19 nt, Artificial Sequence
  Description of Artificial Sequence: Synthetic oligonucleotide
  Sense strand starting at position 1149 of SEQ ID NO: 1559968
ugcucuaaauccucagcga

SEQ ID NO: 1567012 - RNA, 19 nt, Artificial Sequence
  Description of Artificial Sequence: Synthetic oligonucleotide
  Antisense strand to SEQ ID NO: 1567011
ucgcugaggauuuagagca

SEQ ID NO: 1567013 - RNA, 19 nt, Artificial Sequence
  Description of Artificial Sequence: Synthetic oligonucleotide
  Sense strand starting at position 1150 of SEQ ID NO: 1559968
gcucuaaauccucagcgaa

SEQ ID NO: 1567014 - RNA, 19 nt, Artificial Sequence
  Description of Artificial Sequence: Synthetic oligonucleotide
  Antisense strand to SEQ ID NO: 1567013
uucgcugaggauuuagagc

SEQ ID NO: 1567015 - RNA, 19 nt, Artificial Sequence
  Description of Artificial Sequence: Synthetic oligonucleotide
  Sense strand starting at position 1152 of SEQ ID NO: 1559968
ucuaaauccucagcgaaga

SEQ ID NO: 1567016 - RNA, 19 nt, Artificial Sequence
  Description of Artificial Sequence: Synthetic oligonucleotide
  Antisense strand to SEQ ID NO: 1567015
ucuucgcugaggauuuaga

SEQ ID NO: 1567017 - RNA, 19 nt, Artificial Sequence
  Description of Artificial Sequence: Synthetic oligonucleotide
  Sense strand starting at position 1302 of SEQ ID NO: 1559968
gacucagaauccggaacau

SEQ ID NO: 1567018 - RNA, 19 nt, Artificial Sequence
  Description of Artificial Sequence: Synthetic oligonucleotide
  Antisense strand to SEQ ID NO: 1567017
auguuccggauucugaguc

SEQ ID NO: 1567019 - RNA, 19 nt, Artificial Sequence
  Description of Artificial Sequence: Synthetic oligonucleotide
  Sense strand starting at position 1314 of SEQ ID NO: 1559968
ggaacaucucucggugcuu

SEQ ID NO: 1567020 - RNA, 19 nt, Artificial Sequence
  Description of Artificial Sequence: Synthetic oligonucleotide
  Antisense strand to SEQ ID NO: 1567019
aagcaccgagagauguucc

SEQ ID NO: 1567021 - RNA, 19 nt, Artificial Sequence
  Description of Artificial Sequence: Synthetic oligonucleotide
  Sense strand starting at position 1315 of SEQ ID NO: 1559968
gaacaucucucggugcuua

SEQ ID NO: 1567022 - RNA, 19 nt, Artificial Sequence
  Description of Artificial Sequence: Synthetic oligonucleotide
  Antisense strand to SEQ ID NO: 1567021
uaagcaccgagagauguuc

SEQ ID NO: 1567023 - RNA, 19 nt, Artificial Sequence
  Description of Artificial Sequence: Synthetic oligonucleotide
  Sense strand starting at position 1316 of SEQ ID NO: 1559968
aacaucucucggugcuuaa

SEQ ID NO: 1567024 - RNA, 19 nt, Artificial Sequence
  Description of Artificial Sequence: Synthetic oligonucleotide
  Antisense strand to SEQ ID NO: 1567023
uuaagcaccgagagauguu

SEQ ID NO: 1567025 - RNA, 19 nt, Artificial Sequence
  Description of Artificial Sequence: Synthetic oligonucleotide
  Sense strand starting at position 1320 of SEQ ID NO: 1559968
ucucucggugcuuaagagu

SEQ ID NO: 1567026 - RNA, 19 nt, Artificial Sequence
  Description of Artificial Sequence: Synthetic oligonucleotide
  Antisense strand to SEQ ID NO: 1567025
acucuuaagcaccgagaga

SEQ ID NO: 1567027 - RNA, 19 nt, Artificial Sequence
  Description of Artificial Sequence: Synthetic oligonucleotide
  Sense strand starting at position 1350 of SEQ ID NO: 1559968
aaucuuuaccugugggaau

SEQ ID NO: 1567028 - RNA, 19 nt, Artificial Sequence
  Description of Artificial Sequence: Synthetic oligonucleotide
  Antisense strand to SEQ ID NO: 1567027
auucccacagguaaagauu

SEQ ID NO: 1567029 - RNA, 19 nt, Artificial Sequence
  Description of Artificial Sequence: Synthetic oligonucleotide
  Sense strand starting at position 1351 of SEQ ID NO: 1559968
aucuuuaccugugggaaug

SEQ ID NO: 1567030 - RNA, 19 nt, Artificial Sequence
  Description of Artificial Sequence: Synthetic oligonucleotide
  Antisense strand to SEQ ID NO: 1567029
cauucccacagguaaagau

SEQ ID NO: 1567031 - RNA, 19 nt, Artificial Sequence
  Description of Artificial Sequence: Synthetic oligonucleotide
  Sense strand starting at position 2039 of SEQ ID NO: 1559968
gagaaaccgucguuuccca

SEQ ID NO: 1567032 - RNA, 19 nt, Artificial Sequence
  Description of Artificial Sequence: Synthetic oligonucleotide
  Antisense strand to SEQ ID NO: 1567031
ugggaaacgacgguuucuc

SEQ ID NO: 1567033 - RNA, 19 nt, Artificial Sequence
  Description of Artificial Sequence: Synthetic oligonucleotide
  Sense strand starting at position 2046 of SEQ ID NO: 1559968
cgucguuucccagagugac

SEQ ID NO: 1567034 - RNA, 19 nt, Artificial Sequence
  Description of Artificial Sequence: Synthetic oligonucleotide
  Antisense strand to SEQ ID NO: 1567033
gucacucugggaaacgacg

SEQ ID NO: 1567035 - RNA, 19 nt, Artificial Sequence
  Description of Artificial Sequence: Synthetic oligonucleotide
  Sense strand starting at position 2061 of SEQ ID NO: 1559968
ugacguguacgcagagcaa

SEQ ID NO: 1567036 - RNA, 19 nt, Artificial Sequence
  Description of Artificial Sequence: Synthetic oligonucleotide
  Antisense strand to SEQ ID NO: 1567035
uugcucugcguacacguca

SEQ ID NO: 1567037 - RNA, 19 nt, Artificial Sequence
  Description of Artificial Sequence: Synthetic oligonucleotide
  Sense strand starting at position 30 of SEQ ID NO: 1559969
ccuauaagcugucuuugaa

SEQ ID NO: 1567038 - RNA, 19 nt, Artificial Sequence
  Description of Artificial Sequence: Synthetic oligonucleotide
  Antisense strand to SEQ ID NO: 1567037
uucaaagacagcuuauagg

SEQ ID NO: 1567039 - RNA, 19 nt, Artificial Sequence
  Description of Artificial Sequence: Synthetic oligonucleotide
  Sense strand starting at position 33 of SEQ ID NO: 1559969
auaagcugucuuugaagag

SEQ ID NO: 1567040 - RNA, 19 nt, Artificial Sequence
  Description of Artificial Sequence: Synthetic oligonucleotide
  Antisense strand to SEQ ID NO: 1567039
cucuucaaagacagcuuau

SEQ ID NO: 1567041 - RNA, 19 nt, Artificial Sequence
  Description of Artificial Sequence: Synthetic oligonucleotide
  Sense strand starting at position 58 of SEQ ID NO: 1559969
ccaacucucugccugugau

SEQ ID NO: 1567042 - RNA, 19 nt, Artificial Sequence
  Description of Artificial Sequence: Synthetic oligonucleotide
  Antisense strand to SEQ ID NO: 1567041
aucacaggcagagaguugg

SEQ ID NO: 1567043 - RNA, 19 nt, Artificial Sequence
  Description of Artificial Sequence: Synthetic oligonucleotide
  Sense strand starting at position 191 of SEQ ID NO: 1559969
ggcguuccugcgaggaaga

SEQ ID NO: 1567044 - RNA, 19 nt, Artificial Sequence
  Description of Artificial Sequence: Synthetic oligonucleotide
  Antisense strand to SEQ ID NO: 1567043
ucuuccucgcaggaacgcc

SEQ ID NO: 1567045 - RNA, 19 nt, Artificial Sequence
  Description of Artificial Sequence: Synthetic oligonucleotide
  Sense strand starting at position 523 of SEQ ID NO: 1559969
augguuggcacuugguaga

SEQ ID NO: 1567046 - RNA, 19 nt, Artificial Sequence
  Description of Artificial Sequence: Synthetic oligonucleotide
  Antisense strand to SEQ ID NO: 1567045
ucuaccaagugccaaccau

SEQ ID NO: 1567047 - RNA, 19 nt, Artificial Sequence
  Description of Artificial Sequence: Synthetic oligonucleotide
  Sense strand starting at position 654 of SEQ ID NO: 1559969
gcacgaugagcucgggaau

SEQ ID NO: 1567048 - RNA, 19 nt, Artificial Sequence
  Description of Artificial Sequence: Synthetic oligonucleotide
  Antisense strand to SEQ ID NO: 1567047
auucccgagcucaucgugc

SEQ ID NO: 1567049 - RNA, 19 nt, Artificial Sequence
  Description of Artificial Sequence: Synthetic oligonucleotide
  Sense strand starting at position 1406 of SEQ ID NO: 1559969
aacccaggaccguaugauu

SEQ ID NO: 1567050 - RNA, 19 nt, Artificial Sequence
  Description of Artificial Sequence: Synthetic oligonucleotide
  Antisense strand to SEQ ID NO: 1567049
aaucauacgguccuggguu

SEQ ID NO: 1567051 - RNA, 19 nt, Artificial Sequence
  Description of Artificial Sequence: Synthetic oligonucleotide
  Sense strand starting at position 1415 of SEQ ID NO: 1559969
ccguaugauucuguauucu

SEQ ID NO: 1567052 - RNA, 19 nt, Artificial Sequence
  Description of Artificial Sequence: Synthetic oligonucleotide
  Antisense strand to SEQ ID NO: 1567051
agaauacagaaucauacgg

SEQ ID NO: 1567053 - RNA, 19 nt, Artificial Sequence
  Description of Artificial Sequence: Synthetic oligonucleotide
  Sense strand starting at position 2067 of SEQ ID NO: 1559969
ugaguucgcccgccuaguu

SEQ ID NO: 1567054 - RNA, 19 nt, Artificial Sequence
  Description of Artificial Sequence: Synthetic oligonucleotide
  Antisense strand to SEQ ID NO: 1567053
aacuaggcgggcgaacuca

SEQ ID NO: 1567055 - RNA, 19 nt, Artificial Sequence
  Description of Artificial Sequence: Synthetic oligonucleotide
  Sense strand starting at position 2279 of SEQ ID NO: 1559969
gaaugugagaugggcguaa

SEQ ID NO: 1567056 - RNA, 19 nt, Artificial Sequence
  Description of Artificial Sequence: Synthetic oligonucleotide
  Antisense strand to SEQ ID NO: 1567055
uuacgcccaucucacauuc

SEQ ID NO: 1567057 - RNA, 19 nt, Artificial Sequence
  Description of Artificial Sequence: Synthetic oligonucleotide
  Sense strand starting at position 2281 of SEQ ID NO: 1559969
augugagaugggcguaagu

SEQ ID NO: 1567058 - RNA, 19 nt, Artificial Sequence
  Description of Artificial Sequence: Synthetic oligonucleotide
  Antisense strand to SEQ ID NO: 1567057
acuuacgcccaucucacau

SEQ ID NO: 1567059 - RNA, 19 nt, Artificial Sequence
  Description of Artificial Sequence: Synthetic oligonucleotide
  Sense strand starting at position 2292 of SEQ ID NO: 1559969
gcguaaguugacuaaggga

SEQ ID NO: 1567060 - RNA, 19 nt, Artificial Sequence
  Description of Artificial Sequence: Synthetic oligonucleotide
  Antisense strand to SEQ ID NO: 1567059
ucccuuagucaacuuacgc

SEQ ID NO: 1567061 - RNA, 19 nt, Artificial Sequence
  Description of Artificial Sequence: Synthetic oligonucleotide
  Sense strand starting at position 2370 of SEQ ID NO: 1559969
ccaguagggcugugauaca

SEQ ID NO: 1567062 - RNA, 19 nt, Artificial Sequence
  Description of Artificial Sequence: Synthetic oligonucleotide
  Antisense strand to SEQ ID NO: 1567061
uguaucacagcccuacugg

SEQ ID NO: 1567063 - RNA, 19 nt, Artificial Sequence
  Description of Artificial Sequence: Synthetic oligonucleotide
  Sense strand starting at position 2375 of SEQ ID NO: 1559969
agggcugugauacauaauu

SEQ ID NO: 1567064 - RNA, 19 nt, Artificial Sequence
  Description of Artificial Sequence: Synthetic oligonucleotide
  Antisense strand to SEQ ID NO: 1567063
aauuauguaucacagcccu

SEQ ID NO: 1567065 - RNA, 19 nt, Artificial Sequence
  Description of Artificial Sequence: Synthetic oligonucleotide
  Sense strand starting at position 2453 of SEQ ID NO: 1559969
ugcacucuucguccgguua

SEQ ID NO: 1567066 - RNA, 19 nt, Artificial Sequence
  Description of Artificial Sequence: Synthetic oligonucleotide
  Antisense strand to SEQ ID NO: 1567065
uaaccggacgaagagugca

SEQ ID NO: 1567067 - RNA, 19 nt, Artificial Sequence
  Description of Artificial Sequence: Synthetic oligonucleotide
  Sense strand starting at position 2509 of SEQ ID NO: 1559969
cccauagaguugucaaguu

SEQ ID NO: 1567068 - RNA, 19 nt, Artificial Sequence
  Description of Artificial Sequence: Synthetic oligonucleotide
  Antisense strand to SEQ ID NO: 1567067
aacuugacaacucuauggg

SEQ ID NO: 1567069 - RNA, 19 nt, Artificial Sequence
  Description of Artificial Sequence: Synthetic oligonucleotide
  Sense strand starting at position 2516 of SEQ ID NO: 1559969
aguugucaaguuuagcaaa

SEQ ID NO: 1567070 - RNA, 19 nt, Artificial Sequence
  Description of Artificial Sequence: Synthetic oligonucleotide
  Antisense strand to SEQ ID NO: 1567069
uuugcuaaacuugacaacu

SEQ ID NO: 1567071 - RNA, 19 nt, Artificial Sequence
  Description of Artificial Sequence: Synthetic oligonucleotide
  Sense strand starting at position 2518 of SEQ ID NO: 1559969
uugucaaguuuagcaaaua

SEQ ID NO: 1567072 - RNA, 19 nt, Artificial Sequence
  Description of Artificial Sequence: Synthetic oligonucleotide
  Antisense strand to SEQ ID NO: 1567071
uauuugcuaaacuugacaa

SEQ ID NO: 1567073 - RNA, 19 nt, Artificial Sequence
  Description of Artificial Sequence: Synthetic oligonucleotide
  Sense strand starting at position 2543 of SEQ ID NO: 1559969
caguccgucuaguuaaaug

SEQ ID NO: 1567074 - RNA, 19 nt, Artificial Sequence
  Description of Artificial Sequence: Synthetic oligonucleotide
  Antisense strand to SEQ ID NO: 1567073
cauuuaacuagacggacug

SEQ ID NO: 1567075 - RNA, 19 nt, Artificial Sequence
  Description of Artificial Sequence: Synthetic oligonucleotide
  Sense strand starting at position 2637 of SEQ ID NO: 1559969
aggagaaucgcuugugcuc

SEQ ID NO: 1567076 - RNA, 19 nt, Artificial Sequence
  Description of Artificial Sequence: Synthetic oligonucleotide
  Antisense strand to SEQ ID NO: 1567075
gagcacaagcgauucuccu

SEQ ID NO: 1567077 - RNA, 19 nt, Artificial Sequence
  Description of Artificial Sequence: Synthetic oligonucleotide
  Sense strand starting at position 2754 of SEQ ID NO: 1559969
acauaaauguuucuauguc

SEQ ID NO: 1567078 - RNA, 19 nt, Artificial Sequence
  Description of Artificial Sequence: Synthetic oligonucleotide
  Antisense strand to SEQ ID NO: 1567077
gacauagaaacauuuaugu

SEQ ID NO: 1567079 - RNA, 19 nt, Artificial Sequence
  Description of Artificial Sequence: Synthetic oligonucleotide
  Sense strand starting at position 2770 of SEQ ID NO: 1559969
guccuaugucuacauggga

SEQ ID NO: 1567080 - RNA, 19 nt, Artificial Sequence
  Description of Artificial Sequence: Synthetic oligonucleotide
  Antisense strand to SEQ ID NO: 1567079
ucccauguagacauaggac

SEQ ID NO: 1567081 - RNA, 19 nt, Artificial Sequence
  Description of Artificial Sequence: Synthetic oligonucleotide
  Sense strand starting at position 2773 of SEQ ID NO: 1559969
cuaugucuacaugggacau

SEQ ID NO: 1567082 - RNA, 19 nt, Artificial Sequence
  Description of Artificial Sequence: Synthetic oligonucleotide
  Antisense strand to SEQ ID NO: 1567081
augucccauguagacauag

SEQ ID NO: 1567083 - RNA, 19 nt, Artificial Sequence
  Description of Artificial Sequence: Synthetic oligonucleotide
  Sense strand starting at position 2785 of SEQ ID NO: 1559969
gggacauacuaguacuaaa

SEQ ID NO: 1567084 - RNA, 19 nt, Artificial Sequence
  Description of Artificial Sequence: Synthetic oligonucleotide
  Antisense strand to SEQ ID NO: 1567083
uuuaguacuaguauguccc

SEQ ID NO: 1567085 - RNA, 19 nt, Artificial Sequence
  Description of Artificial Sequence: Synthetic oligonucleotide
  Sense strand starting at position 2878 of SEQ ID NO: 1559969
ugacuauucugaguagcuc

SEQ ID NO: 1567086 - RNA, 19 nt, Artificial Sequence
  Description of Artificial Sequence: Synthetic oligonucleotide
  Antisense strand to SEQ ID NO: 1567085
gagcuacucagaauaguca

SEQ ID NO: 1567087 - RNA, 19 nt, Artificial Sequence
  Description of Artificial Sequence: Synthetic oligonucleotide
  Sense strand starting at position 2879 of SEQ ID NO: 1559969
gacuauucugaguagcuca

SEQ ID NO: 1567088 - RNA, 19 nt, Artificial Sequence
  Description of Artificial Sequence: Synthetic oligonucleotide
  Antisense strand to SEQ ID NO: 1567087
ugagcuacucagaauaguc

SEQ ID NO: 1567089 - RNA, 19 nt, Artificial Sequence
  Description of Artificial Sequence: Synthetic oligonucleotide
  Sense strand starting at position 2889 of SEQ ID NO: 1559969
aguagcucagucuguuaga

SEQ ID NO: 1567090 - RNA, 19 nt, Artificial Sequence
  Description of Artificial Sequence: Synthetic oligonucleotide
  Antisense strand to SEQ ID NO: 1567089
ucuaacagacugagcuacu

SEQ ID NO: 1567091 - RNA, 19 nt, Artificial Sequence
  Description of Artificial Sequence: Synthetic oligonucleotide
  Sense strand starting at position 2974 of SEQ ID NO: 1559969
gcuugcuguacgcuuguua

SEQ ID NO: 1567092 - RNA, 19 nt, Artificial Sequence
  Description of Artificial Sequence: Synthetic oligonucleotide
  Antisense strand to SEQ ID NO: 1567091
uaacaagcguacagcaagc

SEQ ID NO: 1567093 - RNA, 19 nt, Artificial Sequence
  Description of Artificial Sequence: Synthetic oligonucleotide
  Sense strand starting at position 2983 of SEQ ID NO: 1559969
acgcuuguuacagauguaa

SEQ ID NO: 1567094 - RNA, 19 nt, Artificial Sequence
  Description of Artificial Sequence: Synthetic oligonucleotide
  Antisense strand to SEQ ID NO: 1567093
uuacaucuguaacaagcgu

SEQ ID NO: 1567095 - RNA, 19 nt, Artificial Sequence
  Description of Artificial Sequence: Synthetic oligonucleotide
  Sense strand starting at position 2997 of SEQ ID NO: 1559969
uguaacaacuagcuuguua

SEQ ID NO: 1567096 - RNA, 19 nt, Artificial Sequence
  Description of Artificial Sequence: Synthetic oligonucleotide
  Antisense strand to SEQ ID NO: 1567095
uaacaagcuaguuguuaca

SEQ ID NO: 1567097 - RNA, 19 nt, Artificial Sequence
  Description of Artificial Sequence: Synthetic oligonucleotide
  Sense strand starting at position 3001 of SEQ ID NO: 1559969
acaacuagcuuguuacaga

SEQ ID NO: 1567098 - RNA, 19 nt, Artificial Sequence
  Description of Artificial Sequence: Synthetic oligonucleotide
  Antisense strand to SEQ ID NO: 1567097
ucuguaacaagcuaguugu

SEQ ID NO: 1567099 - RNA, 19 nt, Artificial Sequence
  Description of Artificial Sequence: Synthetic oligonucleotide
  Sense strand starting at position 3020 of SEQ ID NO: 1559969
uguaauaacuagcuuguua

SEQ ID NO: 1567100 - RNA, 19 nt, Artificial Sequence
  Description of Artificial Sequence: Synthetic oligonucleotide
  Antisense strand to SEQ ID NO: 1567099
uaacaagcuaguuauuaca

SEQ ID NO: 1567101 - RNA, 19 nt, Artificial Sequence
  Description of Artificial Sequence: Synthetic oligonucleotide
  Sense strand starting at position 3024 of SEQ ID NO: 1559969
auaacuagcuuguuacaga

SEQ ID NO: 1567102 - RNA, 19 nt, Artificial Sequence
  Description of Artificial Sequence: Synthetic oligonucleotide
  Antisense strand to SEQ ID NO: 1567101
ucuguaacaagcuaguuau

SEQ ID NO: 1567103 - RNA, 19 nt, Artificial Sequence
  Description of Artificial Sequence: Synthetic oligonucleotide
  Sense strand starting at position 3079 of SEQ ID NO: 1559969
ugucaucauuuguuccuau

SEQ ID NO: 1567104 - RNA, 19 nt, Artificial Sequence
  Description of Artificial Sequence: Synthetic oligonucleotide
  Antisense strand to SEQ ID NO: 1567103
auaggaacaaaugaugaca

SEQ ID NO: 1567105 - RNA, 19 nt, Artificial Sequence
  Description of Artificial Sequence: Synthetic oligonucleotide
  Sense strand starting at position 3080 of SEQ ID NO: 1559969
gucaucauuuguuccuauu

SEQ ID NO: 1567106 - RNA, 19 nt, Artificial Sequence
  Description of Artificial Sequence: Synthetic oligonucleotide
  Antisense strand to SEQ ID NO: 1567105
aauaggaacaaaugaugac

SEQ ID NO: 1567107 - RNA, 19 nt, Artificial Sequence
  Description of Artificial Sequence: Synthetic oligonucleotide
  Sense strand starting at position 3736 of SEQ ID NO: 1559969
guauuagaacucuauucug

SEQ ID NO: 1567108 - RNA, 19 nt, Artificial Sequence
  Description of Artificial Sequence: Synthetic oligonucleotide
  Antisense strand to SEQ ID NO: 1567107
cagaauagaguucuaauac

SEQ ID NO: 1567109 - RNA, 19 nt, Artificial Sequence
  Description of Artificial Sequence: Synthetic oligonucleotide
  Sense strand starting at position 3811 of SEQ ID NO: 1559969
cagagaauccgccaugcga

SEQ ID NO: 1567110 - RNA, 19 nt, Artificial Sequence
  Description of Artificial Sequence: Synthetic oligonucleotide
  Antisense strand to SEQ ID NO: 1567109
ucgcauggcggauucucug

SEQ ID NO: 1567111 - RNA, 19 nt, Artificial Sequence
  Description of Artificial Sequence: Synthetic oligonucleotide
  Sense strand starting at position 3897 of SEQ ID NO: 1559969
cagugcuguccuggguuaa

SEQ ID NO: 1567112 - RNA, 19 nt, Artificial Sequence
  Description of Artificial Sequence: Synthetic oligonucleotide
  Antisense strand to SEQ ID NO: 1567111
uuaacccaggacagcacug

SEQ ID NO: 1567113 - RNA, 19 nt, Artificial Sequence
  Description of Artificial Sequence: Synthetic oligonucleotide
  Sense strand starting at position 3898 of SEQ ID NO: 1559969
agugcuguccuggguuaac

SEQ ID NO: 1567114 - RNA, 19 nt, Artificial Sequence
  Description of Artificial Sequence: Synthetic oligonucleotide
  Antisense strand to SEQ ID NO: 1567113
guuaacccaggacagcacu

SEQ ID NO: 1567115 - RNA, 19 nt, Artificial Sequence
  Description of Artificial Sequence: Synthetic oligonucleotide
  Sense strand starting at position 3907 of SEQ ID NO: 1559969
cuggguuaaccugaaagca

SEQ ID NO: 1567116 - RNA, 19 nt, Artificial Sequence
  Description of Artificial Sequence: Synthetic oligonucleotide
  Antisense strand to SEQ ID NO: 1567115
ugcuuucagguuaacccag

SEQ ID NO: 1567117 - RNA, 19 nt, Artificial Sequence
  Description of Artificial Sequence: Synthetic oligonucleotide
  Sense strand starting at position 348 of SEQ ID NO: 1559970
uuguuucucucacugauca

SEQ ID NO: 1567118 - RNA, 19 nt, Artificial Sequence
  Description of Artificial Sequence: Synthetic oligonucleotide
  Antisense strand to SEQ ID NO: 1567117
ugaucagugagagaaacaa

SEQ ID NO: 1567119 - RNA, 19 nt, Artificial Sequence
  Description of Artificial Sequence: Synthetic oligonucleotide
  Sense strand starting at position 526 of SEQ ID NO: 1559970
ggaagaugccuggguucua

SEQ ID NO: 1567120 - RNA, 19 nt, Artificial Sequence
  Description of Artificial Sequence: Synthetic oligonucleotide
  Antisense strand to SEQ ID NO: 1567119
uagaacccaggcaucuucc

SEQ ID NO: 1567121 - RNA, 19 nt, Artificial Sequence
  Description of Artificial Sequence: Synthetic oligonucleotide
  Sense strand starting at position 562 of SEQ ID NO: 1559970
uggugucucugguccauuu

SEQ ID NO: 1567122 - RNA, 19 nt, Artificial Sequence
  Description of Artificial Sequence: Synthetic oligonucleotide
  Antisense strand to SEQ ID NO: 1567121
aaauggaccagagacacca

SEQ ID NO: 1567123 - RNA, 19 nt, Artificial Sequence
  Description of Artificial Sequence: Synthetic oligonucleotide
  Sense strand starting at position 621 of SEQ ID NO: 1559970
gaggcugacugucuguaua

SEQ ID NO: 1567124 - RNA, 19 nt, Artificial Sequence
  Description of Artificial Sequence: Synthetic oligonucleotide
  Antisense strand to SEQ ID NO: 1567123
uauacagacagucagccuc

SEQ ID NO: 1567125 - RNA, 19 nt, Artificial Sequence
  Description of Artificial Sequence: Synthetic oligonucleotide
  Sense strand starting at position 623 of SEQ ID NO: 1559970
ggcugacugucuguauaac

SEQ ID NO: 1567126 - RNA, 19 nt, Artificial Sequence
  Description of Artificial Sequence: Synthetic oligonucleotide
  Antisense strand to SEQ ID NO: 1567125
guuauacagacagucagcc

SEQ ID NO: 1567127 - RNA, 19 nt, Artificial Sequence
  Description of Artificial Sequence: Synthetic oligonucleotide
  Sense strand starting at position 624 of SEQ ID NO: 1559970
gcugacugucuguauaaca

SEQ ID NO: 1567128 - RNA, 19 nt, Artificial Sequence
  Description of Artificial Sequence: Synthetic oligonucleotide
  Antisense strand to SEQ ID NO: 1567127
uguuauacagacagucagc

SEQ ID NO: 1567129 - RNA, 19 nt, Artificial Sequence
  Description of Artificial Sequence: Synthetic oligonucleotide
  Sense strand starting at position 716 of SEQ ID NO: 1559970
gccugugaacaccguaaga

SEQ ID NO: 1567130 - RNA, 19 nt, Artificial Sequence
  Description of Artificial Sequence: Synthetic oligonucleotide
  Antisense strand to SEQ ID NO: 1567129
ucuuacgguguucacaggc

SEQ ID NO: 1567131 - RNA, 19 nt, Artificial Sequence
  Description of Artificial Sequence: Synthetic oligonucleotide
  Sense strand starting at position 877 of SEQ ID NO: 1559970
aaauuuagcucggcguagu

SEQ ID NO: 1567132 - RNA, 19 nt, Artificial Sequence
  Description of Artificial Sequence: Synthetic oligonucleotide
  Antisense strand to SEQ ID NO: 1567131
acuacgccgagcuaaauuu

SEQ ID NO: 1567133 - RNA, 19 nt, Artificial Sequence
  Description of Artificial Sequence: Synthetic oligonucleotide
  Sense strand starting at position 1165 of SEQ ID NO: 1559970
acuugcuacuucucuguga

SEQ ID NO: 1567134 - RNA, 19 nt, Artificial Sequence
  Description of Artificial Sequence: Synthetic oligonucleotide
  Antisense strand to SEQ ID NO: 1567133
ucacagagaaguagcaagu

SEQ ID NO: 1567135 - RNA, 19 nt, Artificial Sequence
  Description of Artificial Sequence: Synthetic oligonucleotide
  Sense strand starting at position 1293 of SEQ ID NO: 1559970
ucacaaugaacguggagaa

SEQ ID NO: 1567136 - RNA, 19 nt, Artificial Sequence
  Description of Artificial Sequence: Synthetic oligonucleotide
  Antisense strand to SEQ ID NO: 1567135
uucuccacguucauuguga

SEQ ID NO: 1567137 - RNA, 19 nt, Artificial Sequence
  Description of Artificial Sequence: Synthetic oligonucleotide
  Sense strand starting at position 1305 of SEQ ID NO: 1559970
uggagaaauuccuacugag

SEQ ID NO: 1567138 - RNA, 19 nt, Artificial Sequence
  Description of Artificial Sequence: Synthetic oligonucleotide
  Antisense strand to SEQ ID NO: 1567137
cucaguaggaauuucucca

SEQ ID NO: 1567139 - RNA, 19 nt, Artificial Sequence
  Description of Artificial Sequence: Synthetic oligonucleotide
  Sense strand starting at position 1322 of SEQ ID NO: 1559970
agagaaagugcacgauaaa

SEQ ID NO: 1567140 - RNA, 19 nt, Artificial Sequence
  Description of Artificial Sequence: Synthetic oligonucleotide
  Antisense strand to SEQ ID NO: 1567139
uuuaucgugcacuuucucu

SEQ ID NO: 1567141 - RNA, 19 nt, Artificial Sequence
  Description of Artificial Sequence: Synthetic oligonucleotide
  Sense strand starting at position 2030 of SEQ ID NO: 1559970
gcgcauuacgucguaugua

SEQ ID NO: 1567142 - RNA, 19 nt, Artificial Sequence
  Description of Artificial Sequence: Synthetic oligonucleotide
  Antisense strand to SEQ ID NO: 1567141
uacauacgacguaaugcgc

SEQ ID NO: 1567143 - RNA, 19 nt, Artificial Sequence
  Description of Artificial Sequence: Synthetic oligonucleotide
  Sense strand starting at position 2070 of SEQ ID NO: 1559970
agaagcaucccggaaguaa

SEQ ID NO: 1567144 - RNA, 19 nt, Artificial Sequence
  Description of Artificial Sequence: Synthetic oligonucleotide
  Antisense strand to SEQ ID NO: 1567143
uuacuuccgggaugcuucu

SEQ ID NO: 1567145 - RNA, 19 nt, Artificial Sequence
  Description of Artificial Sequence: Synthetic oligonucleotide
  Sense strand starting at position 2317 of SEQ ID NO: 1559970
ggucgugguuacuuggaaa

SEQ ID NO: 1567146 - RNA, 19 nt, Artificial Sequence
  Description of Artificial Sequence: Synthetic oligonucleotide
  Antisense strand to SEQ ID NO: 1567145
uuuccaaguaaccacgacc

SEQ ID NO: 1567147 - RNA, 19 nt, Artificial Sequence
  Description of Artificial Sequence: Synthetic oligonucleotide
  Sense strand starting at position 2423 of SEQ ID NO: 1559970
ccuguuuauugccuggaau

SEQ ID NO: 1567148 - RNA, 19 nt, Artificial Sequence
  Description of Artificial Sequence: Synthetic oligonucleotide
  Antisense strand to SEQ ID NO: 1567147
auuccaggcaauaaacagg

SEQ ID NO: 1567149 - RNA, 19 nt, Artificial Sequence
  Description of Artificial Sequence: Synthetic oligonucleotide
  Sense strand starting at position 2424 of SEQ ID NO: 1559970
cuguuuauugccuggaaug

SEQ ID NO: 1567150 - RNA, 19 nt, Artificial Sequence
  Description of Artificial Sequence: Synthetic oligonucleotide
  Antisense strand to SEQ ID NO: 1567149
cauuccaggcaauaaacag

SEQ ID NO: 1567151 - RNA, 19 nt, Artificial Sequence
  Description of Artificial Sequence: Synthetic oligonucleotide
  Sense strand starting at position 2426 of SEQ ID NO: 1559970
guuuauugccuggaauguu

SEQ ID NO: 1567152 - RNA, 19 nt, Artificial Sequence
  Description of Artificial Sequence: Synthetic oligonucleotide
  Antisense strand to SEQ ID NO: 1567151
aacauuccaggcaauaaac

SEQ ID NO: 1567153 - RNA, 19 nt, Artificial Sequence
  Description of Artificial Sequence: Synthetic oligonucleotide
  Sense strand starting at position 2493 of SEQ ID NO: 1559970
ucugcaaaguuaguaauca

SEQ ID NO: 1567154 - RNA, 19 nt, Artificial Sequence
  Description of Artificial Sequence: Synthetic oligonucleotide
  Antisense strand to SEQ ID NO: 1567153
ugauuacuaacuuugcaga

SEQ ID NO: 1567155 - RNA, 19 nt, Artificial Sequence
  Description of Artificial Sequence: Synthetic oligonucleotide
  Sense strand starting at position 2501 of SEQ ID NO: 1559970
guuaguaaucaguaaugca

SEQ ID NO: 1567156 - RNA, 19 nt, Artificial Sequence
  Description of Artificial Sequence: Synthetic oligonucleotide
  Antisense strand to SEQ ID NO: 1567155
ugcauuacugauuacuaac

SEQ ID NO: 1567157 - RNA, 19 nt, Artificial Sequence
  Description of Artificial Sequence: Synthetic oligonucleotide
  Sense strand starting at position 2520 of SEQ ID NO: 1559970
acugguggcccuugauuaa

SEQ ID NO: 1567158 - RNA, 19 nt, Artificial Sequence
  Description of Artificial Sequence: Synthetic oligonucleotide
  Antisense strand to SEQ ID NO: 1567157
uuaaucaagggccaccagu

SEQ ID NO: 1567159 - RNA, 19 nt, Artificial Sequence
  Description of Artificial Sequence: Synthetic oligonucleotide
  Sense strand starting at position 2532 of SEQ ID NO: 1559970
ugauuaauccauugaguca

SEQ ID NO: 1567160 - RNA, 19 nt, Artificial Sequence
  Description of Artificial Sequence: Synthetic oligonucleotide
  Antisense strand to SEQ ID NO: 1567159
ugacucaauggauuaauca

SEQ ID NO: 1567161 - RNA, 19 nt, Artificial Sequence
  Description of Artificial Sequence: Synthetic oligonucleotide
  Sense strand starting at position 2565 of SEQ ID NO: 1559970
uuaugaacucuugggcuuu

SEQ ID NO: 1567162 - RNA, 19 nt, Artificial Sequence
  Description of Artificial Sequence: Synthetic oligonucleotide
  Antisense strand to SEQ ID NO: 1567161
aaagcccaagaguucauaa

SEQ ID NO: 1567163 - RNA, 19 nt, Artificial Sequence
  Description of Artificial Sequence: Synthetic oligonucleotide
  Sense strand starting at position 2583 of SEQ ID NO: 1559970
uggagaaaugccugcauuc

SEQ ID NO: 1567164 - RNA, 19 nt, Artificial Sequence
  Description of Artificial Sequence: Synthetic oligonucleotide
  Antisense strand to SEQ ID NO: 1567163
gaaugcaggcauuucucca

SEQ ID NO: 1567165 - RNA, 19 nt, Artificial Sequence
  Description of Artificial Sequence: Synthetic oligonucleotide
  Sense strand starting at position 2606 of SEQ ID NO: 1559970
ccaguuagccaucauagua

SEQ ID NO: 1567166 - RNA, 19 nt, Artificial Sequence
  Description of Artificial Sequence: Synthetic oligonucleotide
  Antisense strand to SEQ ID NO: 1567165
uacuaugauggcuaacugg

SEQ ID NO: 1567167 - RNA, 19 nt, Artificial Sequence
  Description of Artificial Sequence: Synthetic oligonucleotide
  Sense strand starting at position 2641 of SEQ ID NO: 1559970
ccugcaauaccagagugau

SEQ ID NO: 1567168 - RNA, 19 nt, Artificial Sequence
  Description of Artificial Sequence: Synthetic oligonucleotide
  Antisense strand to SEQ ID NO: 1567167
aucacucugguauugcagg

SEQ ID NO: 1567169 - RNA, 19 nt, Artificial Sequence
  Description of Artificial Sequence: Synthetic oligonucleotide
  Sense strand starting at position 2714 of SEQ ID NO: 1559970
ggcguuuggaaagaugauu

SEQ ID NO: 1567170 - RNA, 19 nt, Artificial Sequence
  Description of Artificial Sequence: Synthetic oligonucleotide
  Antisense strand to SEQ ID NO: 1567169
aaucaucuuuccaaacgcc

SEQ ID NO: 1567171 - RNA, 19 nt, Artificial Sequence
  Description of Artificial Sequence: Synthetic oligonucleotide
  Sense strand starting at position 2733 of SEQ ID NO: 1559970
uuugcaacucgguaauuau

SEQ ID NO: 1567172 - RNA, 19 nt, Artificial Sequence
  Description of Artificial Sequence: Synthetic oligonucleotide
  Antisense strand to SEQ ID NO: 1567171
auaauuaccgaguugcaaa

SEQ ID NO: 1567173 - RNA, 19 nt, Artificial Sequence
  Description of Artificial Sequence: Synthetic oligonucleotide
  Sense strand starting at position 2736 of SEQ ID NO: 1559970
gcaacucgguaauuauaua

SEQ ID NO: 1567174 - RNA, 19 nt, Artificial Sequence
  Description of Artificial Sequence: Synthetic oligonucleotide
  Antisense strand to SEQ ID NO: 1567173
uauauaauuaccgaguugc

SEQ ID NO: 1567175 - RNA, 19 nt, Artificial Sequence
  Description of Artificial Sequence: Synthetic oligonucleotide
  Sense strand starting at position 2741 of SEQ ID NO: 1559970
ucgguaauuauauaguguu

SEQ ID NO: 1567176 - RNA, 19 nt, Artificial Sequence
  Description of Artificial Sequence: Synthetic oligonucleotide
  Antisense strand to SEQ ID NO: 1567175
aacacuauauaauuaccga

SEQ ID NO: 1567177 - RNA, 19 nt, Artificial Sequence
  Description of Artificial Sequence: Synthetic oligonucleotide
  Sense strand starting at position 2770 of SEQ ID NO: 1559970
aagaaaugugaccgaaacu

SEQ ID NO: 1567178 - RNA, 19 nt, Artificial Sequence
  Description of Artificial Sequence: Synthetic oligonucleotide
  Antisense strand to SEQ ID NO: 1567177
aguuucggucacauuucuu

SEQ ID NO: 1567179 - RNA, 19 nt, Artificial Sequence
  Description of Artificial Sequence: Synthetic oligonucleotide
  Sense strand starting at position 2840 of SEQ ID NO: 1559970
gaaggauucuugcucaagg

SEQ ID NO: 1567180 - RNA, 19 nt, Artificial Sequence
  Description of Artificial Sequence: Synthetic oligonucleotide
  Antisense strand to SEQ ID NO: 1567179
ccuugagcaagaauccuuc

SEQ ID NO: 1567181 - RNA, 19 nt, Artificial Sequence
  Description of Artificial Sequence: Synthetic oligonucleotide
  Sense strand starting at position 2842 of SEQ ID NO: 1559970
aggauucuugcucaaggca

SEQ ID NO: 1567182 - RNA, 19 nt, Artificial Sequence
  Description of Artificial Sequence: Synthetic oligonucleotide
  Antisense strand to SEQ ID NO: 1567181
ugccuugagcaagaauccu

SEQ ID NO: 1567183 - RNA, 19 nt, Artificial Sequence
  Description of Artificial Sequence: Synthetic oligonucleotide
  Sense strand starting at position 3556 of SEQ ID NO: 1559970
uuacuuacgucuuuagaug

SEQ ID NO: 1567184 - RNA, 19 nt, Artificial Sequence
  Description of Artificial Sequence: Synthetic oligonucleotide
  Antisense strand to SEQ ID NO: 1567183
caucuaaagacguaaguaa

SEQ ID NO: 1567185 - RNA, 19 nt, Artificial Sequence
  Description of Artificial Sequence: Synthetic oligonucleotide
  Sense strand starting at position 3557 of SEQ ID NO: 1559970
uacuuacgucuuuagauga

SEQ ID NO: 1567186 - RNA, 19 nt, Artificial Sequence
  Description of Artificial Sequence: Synthetic oligonucleotide
  Antisense strand to SEQ ID NO: 1567185
ucaucuaaagacguaagua

SEQ ID NO: 1567187 - RNA, 19 nt, Artificial Sequence
  Description of Artificial Sequence: Synthetic oligonucleotide
  Sense strand starting at position 3610 of SEQ ID NO: 1559970
guauaugagcucuggaaga

SEQ ID NO: 1567188 - RNA, 19 nt, Artificial Sequence
  Description of Artificial Sequence: Synthetic oligonucleotide
  Antisense strand to SEQ ID NO: 1567187
ucuuccagagcucauauac

SEQ ID NO: 1567189 - RNA, 19 nt, Artificial Sequence
  Description of Artificial Sequence: Synthetic oligonucleotide
  Sense strand starting at position 3730 of SEQ ID NO: 1559970
auuauugggcugugagaua

SEQ ID NO: 1567190 - RNA, 19 nt, Artificial Sequence
  Description of Artificial Sequence: Synthetic oligonucleotide
  Antisense strand to SEQ ID NO: 1567189
uaucucacagcccaauaau

SEQ ID NO: 1567191 - RNA, 19 nt, Artificial Sequence
  Description of Artificial Sequence: Synthetic oligonucleotide
  Sense strand starting at position 3768 of SEQ ID NO: 1559970
uuggucugggaauagguua

SEQ ID NO: 1567192 - RNA, 19 nt, Artificial Sequence
  Description of Artificial Sequence: Synthetic oligonucleotide
  Antisense strand to SEQ ID NO: 1567191
uaaccuauucccagaccaa

SEQ ID NO: 1567193 - RNA, 19 nt, Artificial Sequence
  Description of Artificial Sequence: Synthetic oligonucleotide
  Sense strand starting at position 3843 of SEQ ID NO: 1559970
gccugaaagccauguauag

SEQ ID NO: 1567194 - RNA, 19 nt, Artificial Sequence
  Description of Artificial Sequence: Synthetic oligonucleotide
  Antisense strand to SEQ ID NO: 1567193
cuauacauggcuuucaggc

SEQ ID NO: 1567195 - RNA, 19 nt, Artificial Sequence
  Description of Artificial Sequence: Synthetic oligonucleotide
  Sense strand starting at position 3888 of SEQ ID NO: 1559970
aggguuugguuauugggau

SEQ ID NO: 1567196 - RNA, 19 nt, Artificial Sequence
  Description of Artificial Sequence: Synthetic oligonucleotide
  Antisense strand to SEQ ID NO: 1567195
aucccaauaaccaaacccu

SEQ ID NO: 1567197 - RNA, 19 nt, Artificial Sequence
  Description of Artificial Sequence: Synthetic oligonucleotide
  Sense strand starting at position 51 of SEQ ID NO: 1559971
auaugauugugccugguag

SEQ ID NO: 1567198 - RNA, 19 nt, Artificial Sequence
  Description of Artificial Sequence: Synthetic oligonucleotide
  Antisense strand to SEQ ID NO: 1567197
cuaccaggcacaaucauau

SEQ ID NO: 1567199 - RNA, 19 nt, Artificial Sequence
  Description of Artificial Sequence: Synthetic oligonucleotide
  Sense strand starting at position 52 of SEQ ID NO: 1559971
uaugauugugccugguagu

SEQ ID NO: 1567200 - RNA, 19 nt, Artificial Sequence
  Description of Artificial Sequence: Synthetic oligonucleotide
  Antisense strand to SEQ ID NO: 1567199
acuaccaggcacaaucaua

SEQ ID NO: 1567201 - RNA, 19 nt, Artificial Sequence
  Description of Artificial Sequence: Synthetic oligonucleotide
  Sense strand starting at position 440 of SEQ ID NO: 1559971
auggcagguucucaaacau

SEQ ID NO: 1567202 - RNA, 19 nt, Artificial Sequence
  Description of Artificial Sequence: Synthetic oligonucleotide
  Antisense strand to SEQ ID NO: 1567201
auguuugagaaccugccau

SEQ ID NO: 1567203 - RNA, 19 nt, Artificial Sequence
  Description of Artificial Sequence: Synthetic oligonucleotide
  Sense strand starting at position 517 of SEQ ID NO: 1559971
gcuauuaaaugacaagaca

SEQ ID NO: 1567204 - RNA, 19 nt, Artificial Sequence
  Description of Artificial Sequence: Synthetic oligonucleotide
  Antisense strand to SEQ ID NO: 1567203
ugucuugucauuuaauagc

SEQ ID NO: 1567205 - RNA, 19 nt, Artificial Sequence
  Description of Artificial Sequence: Synthetic oligonucleotide
  Sense strand starting at position 951 of SEQ ID NO: 1559971
aggcgagacucugucuuga

SEQ ID NO: 1567206 - RNA, 19 nt, Artificial Sequence
  Description of Artificial Sequence: Synthetic oligonucleotide
  Antisense strand to SEQ ID NO: 1567205
ucaagacagagucucgccu

SEQ ID NO: 1567207 - RNA, 19 nt, Artificial Sequence
  Description of Artificial Sequence: Synthetic oligonucleotide
  Sense strand starting at position 1518 of SEQ ID NO: 1559971
agguauuaacacuguggau

SEQ ID NO: 1567208 - RNA, 19 nt, Artificial Sequence
  Description of Artificial Sequence: Synthetic oligonucleotide
  Antisense strand to SEQ ID NO: 1567207
auccacaguguuaauaccu

SEQ ID NO: 1567209 - RNA, 19 nt, Artificial Sequence
  Description of Artificial Sequence: Synthetic oligonucleotide
  Sense strand starting at position 1530 of SEQ ID NO: 1559971
uguggaugccgacagugau

SEQ ID NO: 1567210 - RNA, 19 nt, Artificial Sequence
  Description of Artificial Sequence: Synthetic oligonucleotide
  Antisense strand to SEQ ID NO: 1567209
aucacugucggcauccaca

SEQ ID NO: 1567211 - RNA, 19 nt, Artificial Sequence
  Description of Artificial Sequence: Synthetic oligonucleotide
  Sense strand starting at position 1536 of SEQ ID NO: 1559971
ugccgacagugauggagau

SEQ ID NO: 1567212 - RNA, 19 nt, Artificial Sequence
  Description of Artificial Sequence: Synthetic oligonucleotide
  Antisense strand to SEQ ID NO: 1567211
aucuccaucacugucggca

SEQ ID NO: 1567213 - RNA, 19 nt, Artificial Sequence
  Description of Artificial Sequence: Synthetic oligonucleotide
  Sense strand starting at position 1537 of SEQ ID NO: 1559971
gccgacagugauggagaua

SEQ ID NO: 1567214 - RNA, 19 nt, Artificial Sequence
  Description of Artificial Sequence: Synthetic oligonucleotide
  Antisense strand to SEQ ID NO: 1567213
uaucuccaucacugucggc

SEQ ID NO: 1567215 - RNA, 19 nt, Artificial Sequence
  Description of Artificial Sequence: Synthetic oligonucleotide
  Sense strand starting at position 1559 of SEQ ID NO: 1559971
ucaauuugcugagucccua

SEQ ID NO: 1567216 - RNA, 19 nt, Artificial Sequence
  Description of Artificial Sequence: Synthetic oligonucleotide
  Antisense strand to SEQ ID NO: 1567215
uagggacucagcaaauuga

SEQ ID NO: 1567217 - RNA, 19 nt, Artificial Sequence
  Description of Artificial Sequence: Synthetic oligonucleotide
  Sense strand starting at position 1563 of SEQ ID NO: 1559971
uuugcugagucccuaauau

SEQ ID NO: 1567218 - RNA, 19 nt, Artificial Sequence
  Description of Artificial Sequence: Synthetic oligonucleotide
  Antisense strand to SEQ ID NO: 1567217
auauuagggacucagcaaa

SEQ ID NO: 1567219 - RNA, 19 nt, Artificial Sequence
  Description of Artificial Sequence: Synthetic oligonucleotide
  Sense strand starting at position 1593 of SEQ ID NO: 1559971
ccacuaugcuaaguaguuu

SEQ ID NO: 1567220 - RNA, 19 nt, Artificial Sequence
  Description of Artificial Sequence: Synthetic oligonucleotide
  Antisense strand to SEQ ID NO: 1567219
aaacuacuuagcauagugg

SEQ ID NO: 1567221 - RNA, 19 nt, Artificial Sequence
  Description of Artificial Sequence: Synthetic oligonucleotide
  Sense strand starting at position 1612 of SEQ ID NO: 1559971
acacgcagcgaguuguauu

SEQ ID NO: 1567222 - RNA, 19 nt, Artificial Sequence
  Description of Artificial Sequence: Synthetic oligonucleotide
  Antisense strand to SEQ ID NO: 1567221
aauacaacucgcugcgugu

SEQ ID NO: 1567223 - RNA, 19 nt, Artificial Sequence
  Description of Artificial Sequence: Synthetic oligonucleotide
  Sense strand starting at position 1613 of SEQ ID NO: 1559971
cacgcagcgaguuguauua

SEQ ID NO: 1567224 - RNA, 19 nt, Artificial Sequence
  Description of Artificial Sequence: Synthetic oligonucleotide
  Antisense strand to SEQ ID NO: 1567223
uaauacaacucgcugcgug

SEQ ID NO: 1567225 - RNA, 19 nt, Artificial Sequence
  Description of Artificial Sequence: Synthetic oligonucleotide
  Sense strand starting at position 1615 of SEQ ID NO: 1559971
cgcagcgaguuguauuaau

SEQ ID NO: 1567226 - RNA, 19 nt, Artificial Sequence
  Description of Artificial Sequence: Synthetic oligonucleotide
  Antisense strand to SEQ ID NO: 1567225
auuaauacaacucgcugcg

SEQ ID NO: 1567227 - RNA, 19 nt, Artificial Sequence
  Description of Artificial Sequence: Synthetic oligonucleotide
  Sense strand starting at position 1627 of SEQ ID NO: 1559971
uauuaauucucauugggug

SEQ ID NO: 1567228 - RNA, 19 nt, Artificial Sequence
  Description of Artificial Sequence: Synthetic oligonucleotide
  Antisense strand to SEQ ID NO: 1567227
cacccaaugagaauuaaua

SEQ ID NO: 1567229 - RNA, 19 nt, Artificial Sequence
  Description of Artificial Sequence: Synthetic oligonucleotide
  Sense strand starting at position 1741 of SEQ ID NO: 1559971
gugggauucccagggauug

SEQ ID NO: 1567230 - RNA, 19 nt, Artificial Sequence
  Description of Artificial Sequence: Synthetic oligonucleotide
  Antisense strand to SEQ ID NO: 1567229
caaucccugggaaucccac

SEQ ID NO: 1567231 - RNA, 19 nt, Artificial Sequence
  Description of Artificial Sequence: Synthetic oligonucleotide
  Sense strand starting at position 1923 of SEQ ID NO: 1559971
ggccgaaggacuuaggagu

SEQ ID NO: 1567232 - RNA, 19 nt, Artificial Sequence
  Description of Artificial Sequence: Synthetic oligonucleotide
  Antisense strand to SEQ ID NO: 1567231
acuccuaaguccuucggcc

SEQ ID NO: 1567233 - RNA, 19 nt, Artificial Sequence
  Description of Artificial Sequence: Synthetic oligonucleotide
  Sense strand starting at position 2018 of SEQ ID NO: 1559971
ccaggugugugcgucuuaa

SEQ ID NO: 1567234 - RNA, 19 nt, Artificial Sequence
  Description of Artificial Sequence: Synthetic oligonucleotide
  Antisense strand to SEQ ID NO: 1567233
uuaagacgcacacaccugg

SEQ ID NO: 1567235 - RNA, 19 nt, Artificial Sequence
  Description of Artificial Sequence: Synthetic oligonucleotide
  Sense strand starting at position 2020 of SEQ ID NO: 1559971
aggugugugcgucuuaaag

SEQ ID NO: 1567236 - RNA, 19 nt, Artificial Sequence
  Description of Artificial Sequence: Synthetic oligonucleotide
  Antisense strand to SEQ ID NO: 1567235
cuuuaagacgcacacaccu

SEQ ID NO: 1567237 - RNA, 19 nt, Artificial Sequence
  Description of Artificial Sequence: Synthetic oligonucleotide
  Sense strand starting at position 2343 of SEQ ID NO: 1559971
uuccauucgucauccauuu

SEQ ID NO: 1567238 - RNA, 19 nt, Artificial Sequence
  Description of Artificial Sequence: Synthetic oligonucleotide
  Antisense strand to SEQ ID NO: 1567237
aaauggaugacgaauggaa

SEQ ID NO: 1567239 - RNA, 19 nt, Artificial Sequence
  Description of Artificial Sequence: Synthetic oligonucleotide
  Sense strand starting at position 2388 of SEQ ID NO: 1559971
uuguucgucuauccauuau

SEQ ID NO: 1567240 - RNA, 19 nt, Artificial Sequence
  Description of Artificial Sequence: Synthetic oligonucleotide
  Antisense strand to SEQ ID NO: 1567239
auaauggauagacgaacaa

SEQ ID NO: 1567241 - RNA, 19 nt, Artificial Sequence
  Description of Artificial Sequence: Synthetic oligonucleotide
  Sense strand starting at position 2392 of SEQ ID NO: 1559971
ucgucuauccauuauccau

SEQ ID NO: 1567242 - RNA, 19 nt, Artificial Sequence
  Description of Artificial Sequence: Synthetic oligonucleotide
  Antisense strand to SEQ ID NO: 1567241
auggauaauggauagacga

SEQ ID NO: 1567243 - RNA, 19 nt, Artificial Sequence
  Description of Artificial Sequence: Synthetic oligonucleotide
  Sense strand starting at position 2763 of SEQ ID NO: 1559971
uguuuaugucccuagugcu

SEQ ID NO: 1567244 - RNA, 19 nt, Artificial Sequence
  Description of Artificial Sequence: Synthetic oligonucleotide
  Antisense strand to SEQ ID NO: 1567243
agcacuagggacauaaaca

SEQ ID NO: 1567245 - RNA, 19 nt, Artificial Sequence
  Description of Artificial Sequence: Synthetic oligonucleotide
  Sense strand starting at position 2857 of SEQ ID NO: 1559971
cugacugaauuugaaauau

SEQ ID NO: 1567246 - RNA, 19 nt, Artificial Sequence
  Description of Artificial Sequence: Synthetic oligonucleotide
  Antisense strand to SEQ ID NO: 1567245
auauuucaaauucagucag

SEQ ID NO: 1567247 - RNA, 19 nt, Artificial Sequence
  Description of Artificial Sequence: Synthetic oligonucleotide
  Sense strand starting at position 2904 of SEQ ID NO: 1559971
uauaauuccgagcaggaca

SEQ ID NO: 1567248 - RNA, 19 nt, Artificial Sequence
  Description of Artificial Sequence: Synthetic oligonucleotide
  Antisense strand to SEQ ID NO: 1567247
uguccugcucggaauuaua

SEQ ID NO: 1567249 - RNA, 19 nt, Artificial Sequence
  Description of Artificial Sequence: Synthetic oligonucleotide
  Sense strand starting at position 2918 of SEQ ID NO: 1559971
ggacaaauguacuugcuuu

SEQ ID NO: 1567250 - RNA, 19 nt, Artificial Sequence
  Description of Artificial Sequence: Synthetic oligonucleotide
  Antisense strand to SEQ ID NO: 1567249
aaagcaaguacauuugucc

SEQ ID NO: 1567251 - RNA, 19 nt, Artificial Sequence
  Description of Artificial Sequence: Synthetic oligonucleotide
  Sense strand starting at position 3614 of SEQ ID NO: 1559971
gcucuaguuuaccaggcua

SEQ ID NO: 1567252 - RNA, 19 nt, Artificial Sequence
  Description of Artificial Sequence: Synthetic oligonucleotide
  Antisense strand to SEQ ID NO: 1567251
uagccugguaaacuagagc

SEQ ID NO: 1567253 - RNA, 19 nt, Artificial Sequence
  Description of Artificial Sequence: Synthetic oligonucleotide
  Sense strand starting at position 3616 of SEQ ID NO: 1559971
ucuaguuuaccaggcuaga

SEQ ID NO: 1567254 - RNA, 19 nt, Artificial Sequence
  Description of Artificial Sequence: Synthetic oligonucleotide
  Antisense strand to SEQ ID NO: 1567253
ucuagccugguaaacuaga

SEQ ID NO: 1567255 - RNA, 19 nt, Artificial Sequence
  Description of Artificial Sequence: Synthetic oligonucleotide
  Sense strand starting at position 3917 of SEQ ID NO: 1559971
uuuggagucucguccuguu

SEQ ID NO: 1567256 - RNA, 19 nt, Artificial Sequence
  Description of Artificial Sequence: Synthetic oligonucleotide
  Antisense strand to SEQ ID NO: 1567255
aacaggacgagacuccaaa

SEQ ID NO: 1567257 - RNA, 19 nt, Artificial Sequence
  Description of Artificial Sequence: Synthetic oligonucleotide
  Sense strand starting at position 71 of SEQ ID NO: 1559972
gaggcaagacacuguuaug

SEQ ID NO: 1567258 - RNA, 19 nt, Artificial Sequence
  Description of Artificial Sequence: Synthetic oligonucleotide
  Antisense strand to SEQ ID NO: 1567257
cauaacagugucuugccuc

SEQ ID NO: 1567259 - RNA, 19 nt, Artificial Sequence
  Description of Artificial Sequence: Synthetic oligonucleotide
  Sense strand starting at position 77 of SEQ ID NO: 1559972
agacacuguuaugaaugaa

SEQ ID NO: 1567260 - RNA, 19 nt, Artificial Sequence
  Description of Artificial Sequence: Synthetic oligonucleotide
  Antisense strand to SEQ ID NO: 1567259
uucauucauaacagugucu

SEQ ID NO: 1567261 - RNA, 19 nt, Artificial Sequence
  Description of Artificial Sequence: Synthetic oligonucleotide
  Sense strand starting at position 80 of SEQ ID NO: 1559972
cacuguuaugaaugaaguu

SEQ ID NO: 1567262 - RNA, 19 nt, Artificial Sequence
  Description of Artificial Sequence: Synthetic oligonucleotide
  Antisense strand to SEQ ID NO: 1567261
aacuucauucauaacagug

SEQ ID NO: 1567263 - RNA, 19 nt, Artificial Sequence
  Description of Artificial Sequence: Synthetic oligonucleotide
  Sense strand starting at position 113 of SEQ ID NO: 1559972
cguccugaaagagguuaaa

SEQ ID NO: 1567264 - RNA, 19 nt, Artificial Sequence
  Description of Artificial Sequence: Synthetic oligonucleotide
  Antisense strand to SEQ ID NO: 1567263
uuuaaccucuuucaggacg

SEQ ID NO: 1567265 - RNA, 19 nt, Artificial Sequence
  Description of Artificial Sequence: Synthetic oligonucleotide
  Sense strand starting at position 480 of SEQ ID NO: 1559972
ucagcagucucucuugaca

SEQ ID NO: 1567266 - RNA, 19 nt, Artificial Sequence
  Description of Artificial Sequence: Synthetic oligonucleotide
  Antisense strand to SEQ ID NO: 1567265
ugucaagagagacugcuga

SEQ ID NO: 1567267 - RNA, 19 nt, Artificial Sequence
  Description of Artificial Sequence: Synthetic oligonucleotide
  Sense strand starting at position 483 of SEQ ID NO: 1559972
gcagucucucuugacagau

SEQ ID NO: 1567268 - RNA, 19 nt, Artificial Sequence
  Description of Artificial Sequence: Synthetic oligonucleotide
  Antisense strand to SEQ ID NO: 1567267
aucugucaagagagacugc

SEQ ID NO: 1567269 - RNA, 19 nt, Artificial Sequence
  Description of Artificial Sequence: Synthetic oligonucleotide
  Sense strand starting at position 644 of SEQ ID NO: 1559972
agccauucccaggaguuga

SEQ ID NO: 1567270 - RNA, 19 nt, Artificial Sequence
  Description of Artificial Sequence: Synthetic oligonucleotide
  Antisense strand to SEQ ID NO: 1567269
ucaacuccugggaauggcu

SEQ ID NO: 1567271 - RNA, 19 nt, Artificial Sequence
  Description of Artificial Sequence: Synthetic oligonucleotide
  Sense strand starting at position 666 of SEQ ID NO: 1559972
cugacuugccgccaggauu

SEQ ID NO: 1567272 - RNA, 19 nt, Artificial Sequence
  Description of Artificial Sequence: Synthetic oligonucleotide
  Antisense strand to SEQ ID NO: 1567271
aauccuggcggcaagucag

SEQ ID NO: 1567273 - RNA, 19 nt, Artificial Sequence
  Description of Artificial Sequence: Synthetic oligonucleotide
  Sense strand starting at position 725 of SEQ ID NO: 1559972
cccauauuacuguggucaa

SEQ ID NO: 1567274 - RNA, 19 nt, Artificial Sequence
  Description of Artificial Sequence: Synthetic oligonucleotide
  Antisense strand to SEQ ID NO: 1567273
uugaccacaguaauauggg

SEQ ID NO: 1567275 - RNA, 19 nt, Artificial Sequence
  Description of Artificial Sequence: Synthetic oligonucleotide
  Sense strand starting at position 728 of SEQ ID NO: 1559972
auauuacuguggucaaaua

SEQ ID NO: 1567276 - RNA, 19 nt, Artificial Sequence
  Description of Artificial Sequence: Synthetic oligonucleotide
  Antisense strand to SEQ ID NO: 1567275
uauuugaccacaguaauau

SEQ ID NO: 1567277 - RNA, 19 nt, Artificial Sequence
  Description of Artificial Sequence: Synthetic oligonucleotide
  Sense strand starting at position 954 of SEQ ID NO: 1559972
gucacagguucucccaaga

SEQ ID NO: 1567278 - RNA, 19 nt, Artificial Sequence
  Description of Artificial Sequence: Synthetic oligonucleotide
  Antisense strand to SEQ ID NO: 1567277
ucuugggagaaccugugac

SEQ ID NO: 1567279 - RNA, 19 nt, Artificial Sequence
  Description of Artificial Sequence: Synthetic oligonucleotide
  Sense strand starting at position 959 of SEQ ID NO: 1559972
agguucucccaagaccuua

SEQ ID NO: 1567280 - RNA, 19 nt, Artificial Sequence
  Description of Artificial Sequence: Synthetic oligonucleotide
  Antisense strand to SEQ ID NO: 1567279
uaaggucuugggagaaccu

SEQ ID NO: 1567281 - RNA, 19 nt, Artificial Sequence
  Description of Artificial Sequence: Synthetic oligonucleotide
  Sense strand starting at position 1059 of SEQ ID NO: 1559972
ccaugucuucuaggcaauc

SEQ ID NO: 1567282 - RNA, 19 nt, Artificial Sequence
  Description of Artificial Sequence: Synthetic oligonucleotide
  Antisense strand to SEQ ID NO: 1567281
gauugccuagaagacaugg

SEQ ID NO: 1567283 - RNA, 19 nt, Artificial Sequence
  Description of Artificial Sequence: Synthetic oligonucleotide
  Sense strand starting at position 1103 of SEQ ID NO: 1559972
ucaccaggguguccuuaua

SEQ ID NO: 1567284 - RNA, 19 nt, Artificial Sequence
  Description of Artificial Sequence: Synthetic oligonucleotide
  Antisense strand to SEQ ID NO: 1567283
uauaaggacacccugguga

SEQ ID NO: 1567285 - RNA, 19 nt, Artificial Sequence
  Description of Artificial Sequence: Synthetic oligonucleotide
  Sense strand starting at position 1369 of SEQ ID NO: 1559972
ucuucucuacauugggaau

SEQ ID NO: 1567286 - RNA, 19 nt, Artificial Sequence
  Description of Artificial Sequence: Synthetic oligonucleotide
  Antisense strand to SEQ ID NO: 1567285
auucccaauguagagaaga

SEQ ID NO: 1567287 - RNA, 19 nt, Artificial Sequence
  Description of Artificial Sequence: Synthetic oligonucleotide
  Sense strand starting at position 2085 of SEQ ID NO: 1559972
cuacgauuggcccaguguu

SEQ ID NO: 1567288 - RNA, 19 nt, Artificial Sequence
  Description of Artificial Sequence: Synthetic oligonucleotide
  Antisense strand to SEQ ID NO: 1567287
aacacugggccaaucguag

SEQ ID NO: 1567289 - RNA, 19 nt, Artificial Sequence
  Description of Artificial Sequence: Synthetic oligonucleotide
  Sense strand starting at position 2209 of SEQ ID NO: 1559972
gucaaacacugauuggauc

SEQ ID NO: 1567290 - RNA, 19 nt, Artificial Sequence
  Description of Artificial Sequence: Synthetic oligonucleotide
  Antisense strand to SEQ ID NO: 1567289
gauccaaucaguguuugac

SEQ ID NO: 1567291 - RNA, 19 nt, Artificial Sequence
  Description of Artificial Sequence: Synthetic oligonucleotide
  Sense strand starting at position 2342 of SEQ ID NO: 1559972
cgcggauuggcgagaucug

SEQ ID NO: 1567292 - RNA, 19 nt, Artificial Sequence
  Description of Artificial Sequence: Synthetic oligonucleotide
  Antisense strand to SEQ ID NO: 1567291
cagaucucgccaauccgcg

SEQ ID NO: 1567293 - RNA, 19 nt, Artificial Sequence
  Description of Artificial Sequence: Synthetic oligonucleotide
  Sense strand starting at position 2343 of SEQ ID NO: 1559972
gcggauuggcgagaucugu

SEQ ID NO: 1567294 - RNA, 19 nt, Artificial Sequence
  Description of Artificial Sequence: Synthetic oligonucleotide
  Antisense strand to SEQ ID NO: 1567293
acagaucucgccaauccgc

SEQ ID NO: 1567295 - RNA, 19 nt, Artificial Sequence
  Description of Artificial Sequence: Synthetic oligonucleotide
  Sense strand starting at position 2347 of SEQ ID NO: 1559972
auuggcgagaucuguccua

SEQ ID NO: 1567296 - RNA, 19 nt, Artificial Sequence
  Description of Artificial Sequence: Synthetic oligonucleotide
  Antisense strand to SEQ ID NO: 1567295
uaggacagaucucgccaau

SEQ ID NO: 1567297 - RNA, 19 nt, Artificial Sequence
  Description of Artificial Sequence: Synthetic oligonucleotide
  Sense strand starting at position 2403 of SEQ ID NO: 1559972
aggcgaagaucaguagaga

SEQ ID NO: 1567298 - RNA, 19 nt, Artificial Sequence
  Description of Artificial Sequence: Synthetic oligonucleotide
  Antisense strand to SEQ ID NO: 1567297
ucucuacugaucuucgccu

SEQ ID NO: 1567299 - RNA, 19 nt, Artificial Sequence
  Description of Artificial Sequence: Synthetic oligonucleotide
  Sense strand starting at position 2584 of SEQ ID NO: 1559972
cugaaauccucuucuagga

SEQ ID NO: 1567300 - RNA, 19 nt, Artificial Sequence
  Description of Artificial Sequence: Synthetic oligonucleotide
  Antisense strand to SEQ ID NO: 1567299
uccuagaagaggauuucag

SEQ ID NO: 1567301 - RNA, 19 nt, Artificial Sequence
  Description of Artificial Sequence: Synthetic oligonucleotide
  Sense strand starting at position 2644 of SEQ ID NO: 1559972
ggacuugaguugucaggag

SEQ ID NO: 1567302 - RNA, 19 nt, Artificial Sequence
  Description of Artificial Sequence: Synthetic oligonucleotide
  Antisense strand to SEQ ID NO: 1567301
cuccugacaacucaagucc

SEQ ID NO: 1567303 - RNA, 19 nt, Artificial Sequence
  Description of Artificial Sequence: Synthetic oligonucleotide
  Sense strand starting at position 2648 of SEQ ID NO: 1559972
uugaguugucaggagaccu

SEQ ID NO: 1567304 - RNA, 19 nt, Artificial Sequence
  Description of Artificial Sequence: Synthetic oligonucleotide
  Antisense strand to SEQ ID NO: 1567303
aggucuccugacaacucaa

SEQ ID NO: 1567305 - RNA, 19 nt, Artificial Sequence
  Description of Artificial Sequence: Synthetic oligonucleotide
  Sense strand starting at position 2664 of SEQ ID NO: 1559972
ccuagaaucucagagugaa

SEQ ID NO: 1567306 - RNA, 19 nt, Artificial Sequence
  Description of Artificial Sequence: Synthetic oligonucleotide
  Antisense strand to SEQ ID NO: 1567305
uucacucugagauucuagg

SEQ ID NO: 1567307 - RNA, 19 nt, Artificial Sequence
  Description of Artificial Sequence: Synthetic oligonucleotide
  Sense strand starting at position 2703 of SEQ ID NO: 1559972
ucccauuaagcagaaguua

SEQ ID NO: 1567308 - RNA, 19 nt, Artificial Sequence
  Description of Artificial Sequence: Synthetic oligonucleotide
  Antisense strand to SEQ ID NO: 1567307
uaacuucugcuuaauggga

SEQ ID NO: 1567309 - RNA, 19 nt, Artificial Sequence
  Description of Artificial Sequence: Synthetic oligonucleotide
  Sense strand starting at position 2871 of SEQ ID NO: 1559972
uccauuguagcagauauca

SEQ ID NO: 1567310 - RNA, 19 nt, Artificial Sequence
  Description of Artificial Sequence: Synthetic oligonucleotide
  Antisense strand to SEQ ID NO: 1567309
ugauaucugcuacaaugga

SEQ ID NO: 1567311 - RNA, 19 nt, Artificial Sequence
  Description of Artificial Sequence: Synthetic oligonucleotide
  Sense strand starting at position 2898 of SEQ ID NO: 1559972
uugauugucuccuccagac

SEQ ID NO: 1567312 - RNA, 19 nt, Artificial Sequence
  Description of Artificial Sequence: Synthetic oligonucleotide
  Antisense strand to SEQ ID NO: 1567311
gucuggaggagacaaucaa

SEQ ID NO: 1567313 - RNA, 19 nt, Artificial Sequence
  Description of Artificial Sequence: Synthetic oligonucleotide
  Sense strand starting at position 2922 of SEQ ID NO: 1559972
acuccuucugggcaagaau

SEQ ID NO: 1567314 - RNA, 19 nt, Artificial Sequence
  Description of Artificial Sequence: Synthetic oligonucleotide
  Antisense strand to SEQ ID NO: 1567313
auucuugcccagaaggagu

SEQ ID NO: 1567315 - RNA, 19 nt, Artificial Sequence
  Description of Artificial Sequence: Synthetic oligonucleotide
  Sense strand starting at position 3040 of SEQ ID NO: 1559972
cccagagacucuuugguaa

SEQ ID NO: 1567316 - RNA, 19 nt, Artificial Sequence
  Description of Artificial Sequence: Synthetic oligonucleotide
  Antisense strand to SEQ ID NO: 1567315
uuaccaaagagucucuggg

SEQ ID NO: 1567317 - RNA, 19 nt, Artificial Sequence
  Description of Artificial Sequence: Synthetic oligonucleotide
  Sense strand starting at position 3043 of SEQ ID NO: 1559972
agagacucuuugguaaacu

SEQ ID NO: 1567318 - RNA, 19 nt, Artificial Sequence
  Description of Artificial Sequence: Synthetic oligonucleotide
  Antisense strand to SEQ ID NO: 1567317
aguuuaccaaagagucucu

SEQ ID NO: 1567319 - RNA, 19 nt, Artificial Sequence
  Description of Artificial Sequence: Synthetic oligonucleotide
  Sense strand starting at position 3201 of SEQ ID NO: 1559972
agccaagaauuccuggaau

SEQ ID NO: 1567320 - RNA, 19 nt, Artificial Sequence
  Description of Artificial Sequence: Synthetic oligonucleotide
  Antisense strand to SEQ ID NO: 1567319
auuccaggaauucuuggcu

SEQ ID NO: 1567321 - RNA, 19 nt, Artificial Sequence
  Description of Artificial Sequence: Synthetic oligonucleotide
  Sense strand starting at position 3229 of SEQ ID NO: 1559972
ggguguguucuggaccuuu

SEQ ID NO: 1567322 - RNA, 19 nt, Artificial Sequence
  Description of Artificial Sequence: Synthetic oligonucleotide
  Antisense strand to SEQ ID NO: 1567321
aaagguccagaacacaccc

SEQ ID NO: 1567323 - RNA, 19 nt, Artificial Sequence
  Description of Artificial Sequence: Synthetic oligonucleotide
  Sense strand starting at position 3377 of SEQ ID NO: 1559972
gacagaaauugcucagcug

SEQ ID NO: 1567324 - RNA, 19 nt, Artificial Sequence
  Description of Artificial Sequence: Synthetic oligonucleotide
  Antisense strand to SEQ ID NO: 1567323
cagcugagcaauuucuguc

SEQ ID NO: 1567325 - RNA, 19 nt, Artificial Sequence
  Description of Artificial Sequence: Synthetic oligonucleotide
  Sense strand starting at position 3378 of SEQ ID NO: 1559972
acagaaauugcucagcugu

SEQ ID NO: 1567326 - RNA, 19 nt, Artificial Sequence
  Description of Artificial Sequence: Synthetic oligonucleotide
  Antisense strand to SEQ ID NO: 1567325
acagcugagcaauuucugu

SEQ ID NO: 1567327 - RNA, 19 nt, Artificial Sequence
  Description of Artificial Sequence: Synthetic oligonucleotide
  Sense strand starting at position 3380 of SEQ ID NO: 1559972
agaaauugcucagcuguuu

SEQ ID NO: 1567328 - RNA, 19 nt, Artificial Sequence
  Description of Artificial Sequence: Synthetic oligonucleotide
  Antisense strand to SEQ ID NO: 1567327
aaacagcugagcaauuucu

SEQ ID NO: 1567329 - RNA, 19 nt, Artificial Sequence
  Description of Artificial Sequence: Synthetic oligonucleotide
  Sense strand starting at position 3410 of SEQ ID NO: 1559972
agaguccauuucuaauaug

SEQ ID NO: 1567330 - RNA, 19 nt, Artificial Sequence
  Description of Artificial Sequence: Synthetic oligonucleotide
  Antisense strand to SEQ ID NO: 1567329
cauauuagaaauggacucu

SEQ ID NO: 1567331 - RNA, 19 nt, Artificial Sequence
  Description of Artificial Sequence: Synthetic oligonucleotide
  Sense strand starting at position 3413 of SEQ ID NO: 1559972
guccauuucuaauauggga

SEQ ID NO: 1567332 - RNA, 19 nt, Artificial Sequence
  Description of Artificial Sequence: Synthetic oligonucleotide
  Antisense strand to SEQ ID NO: 1567331
ucccauauuagaaauggac

SEQ ID NO: 1567333 - RNA, 19 nt, Artificial Sequence
  Description of Artificial Sequence: Synthetic oligonucleotide
  Sense strand starting at position 3489 of SEQ ID NO: 1559972
uuauuaaucccaggacuug

SEQ ID NO: 1567334 - RNA, 19 nt, Artificial Sequence
  Description of Artificial Sequence: Synthetic oligonucleotide
  Antisense strand to SEQ ID NO: 1567333
caaguccugggauuaauaa

SEQ ID NO: 1567335 - RNA, 19 nt, Artificial Sequence
  Description of Artificial Sequence: Synthetic oligonucleotide
  Sense strand starting at position 3894 of SEQ ID NO: 1559972
ccucuuccucccgaguuaa

SEQ ID NO: 1567336 - RNA, 19 nt, Artificial Sequence
  Description of Artificial Sequence: Synthetic oligonucleotide
  Antisense strand to SEQ ID NO: 1567335
uuaacucgggaggaagagg

SEQ ID NO: 1567337 - RNA, 19 nt, Artificial Sequence
  Description of Artificial Sequence: Synthetic oligonucleotide
  Sense strand starting at position 133 of SEQ ID NO: 1559973
gcacguacuaaguguuaca

SEQ ID NO: 1567338 - RNA, 19 nt, Artificial Sequence
  Description of Artificial Sequence: Synthetic oligonucleotide
  Antisense strand to SEQ ID NO: 1567337
uguaacacuuaguacgugc

SEQ ID NO: 1567339 - RNA, 19 nt, Artificial Sequence
  Description of Artificial Sequence: Synthetic oligonucleotide
  Sense strand starting at position 160 of SEQ ID NO: 1559973
agcucuuagcagcauuaua

SEQ ID NO: 1567340 - RNA, 19 nt, Artificial Sequence
  Description of Artificial Sequence: Synthetic oligonucleotide
  Antisense strand to SEQ ID NO: 1567339
uauaaugcugcuaagagcu

SEQ ID NO: 1567341 - RNA, 19 nt, Artificial Sequence
  Description of Artificial Sequence: Synthetic oligonucleotide
  Sense strand starting at position 209 of SEQ ID NO: 1559973
ggccaaagcuuacuccauu

SEQ ID NO: 1567342 - RNA, 19 nt, Artificial Sequence
  Description of Artificial Sequence: Synthetic oligonucleotide
  Antisense strand to SEQ ID NO: 1567341
aauggaguaagcuuuggcc

SEQ ID NO: 1567343 - RNA, 19 nt, Artificial Sequence
  Description of Artificial Sequence: Synthetic oligonucleotide
  Sense strand starting at position 215 of SEQ ID NO: 1559973
agcuuacuccauuagaagu

SEQ ID NO: 1567344 - RNA, 19 nt, Artificial Sequence
  Description of Artificial Sequence: Synthetic oligonucleotide
  Antisense strand to SEQ ID NO: 1567343
acuucuaauggaguaagcu

SEQ ID NO: 1567345 - RNA, 19 nt, Artificial Sequence
  Description of Artificial Sequence: Synthetic oligonucleotide
  Sense strand starting at position 226 of SEQ ID NO: 1559973
uuagaaguucugggcccau

SEQ ID NO: 1567346 - RNA, 19 nt, Artificial Sequence
  Description of Artificial Sequence: Synthetic oligonucleotide
  Antisense strand to SEQ ID NO: 1567345
augggcccagaacuucuaa

SEQ ID NO: 1567347 - RNA, 19 nt, Artificial Sequence
  Description of Artificial Sequence: Synthetic oligonucleotide
  Sense strand starting at position 241 of SEQ ID NO: 1559973
ccauuucugucugagacag

SEQ ID NO: 1567348 - RNA, 19 nt, Artificial Sequence
  Description of Artificial Sequence: Synthetic oligonucleotide
  Antisense strand to SEQ ID NO: 1567347
cugucucagacagaaaugg

SEQ ID NO: 1567349 - RNA, 19 nt, Artificial Sequence
  Description of Artificial Sequence: Synthetic oligonucleotide
  Sense strand starting at position 290 of SEQ ID NO: 1559973
aacugagauuuagggaaag

SEQ ID NO: 1567350 - RNA, 19 nt, Artificial Sequence
  Description of Artificial Sequence: Synthetic oligonucleotide
  Antisense strand to SEQ ID NO: 1567349
cuuucccuaaaucucaguu

SEQ ID NO: 1567351 - RNA, 19 nt, Artificial Sequence
  Description of Artificial Sequence: Synthetic oligonucleotide
  Sense strand starting at position 378 of SEQ ID NO: 1559973
gugggagccuucucucuua

SEQ ID NO: 1567352 - RNA, 19 nt, Artificial Sequence
  Description of Artificial Sequence: Synthetic oligonucleotide
  Antisense strand to SEQ ID NO: 1567351
uaagagagaaggcucccac

SEQ ID NO: 1567353 - RNA, 19 nt, Artificial Sequence
  Description of Artificial Sequence: Synthetic oligonucleotide
  Sense strand starting at position 381 of SEQ ID NO: 1559973
ggagccuucucucuuagga

SEQ ID NO: 1567354 - RNA, 19 nt, Artificial Sequence
  Description of Artificial Sequence: Synthetic oligonucleotide
  Antisense strand to SEQ ID NO: 1567353
uccuaagagagaaggcucc

SEQ ID NO: 1567355 - RNA, 19 nt, Artificial Sequence
  Description of Artificial Sequence: Synthetic oligonucleotide
  Sense strand starting at position 383 of SEQ ID NO: 1559973
agccuucucucuuaggaaa

SEQ ID NO: 1567356 - RNA, 19 nt, Artificial Sequence
  Description of Artificial Sequence: Synthetic oligonucleotide
  Antisense strand to SEQ ID NO: 1567355
uuuccuaagagagaaggcu

SEQ ID NO: 1567357 - RNA, 19 nt, Artificial Sequence
  Description of Artificial Sequence: Synthetic oligonucleotide
  Sense strand starting at position 385 of SEQ ID NO: 1559973
ccuucucucuuaggaaaga

SEQ ID NO: 1567358 - RNA, 19 nt, Artificial Sequence
  Description of Artificial Sequence: Synthetic oligonucleotide
  Antisense strand to SEQ ID NO: 1567357
ucuuuccuaagagagaagg

SEQ ID NO: 1567359 - RNA, 19 nt, Artificial Sequence
  Description of Artificial Sequence: Synthetic oligonucleotide
  Sense strand starting at position 1012 of SEQ ID NO: 1559973
gccugagagucuuuccuaa

SEQ ID NO: 1567360 - RNA, 19 nt, Artificial Sequence
  Description of Artificial Sequence: Synthetic oligonucleotide
  Antisense strand to SEQ ID NO: 1567359
uuaggaaagacucucaggc

SEQ ID NO: 1567361 - RNA, 19 nt, Artificial Sequence
  Description of Artificial Sequence: Synthetic oligonucleotide
  Sense strand starting at position 1014 of SEQ ID NO: 1559973
cugagagucuuuccuaagc

SEQ ID NO: 1567362 - RNA, 19 nt, Artificial Sequence
  Description of Artificial Sequence: Synthetic oligonucleotide
  Antisense strand to SEQ ID NO: 1567361
gcuuaggaaagacucucag

SEQ ID NO: 1567363 - RNA, 19 nt, Artificial Sequence
  Description of Artificial Sequence: Synthetic oligonucleotide
  Sense strand starting at position 1508 of SEQ ID NO: 1559973
ggugacaucccuuguccca

SEQ ID NO: 1567364 - RNA, 19 nt, Artificial Sequence
  Description of Artificial Sequence: Synthetic oligonucleotide
  Antisense strand to SEQ ID NO: 1567363
ugggacaagggaugucacc

SEQ ID NO: 1567365 - RNA, 19 nt, Artificial Sequence
  Description of Artificial Sequence: Synthetic oligonucleotide
  Sense strand starting at position 1783 of SEQ ID NO: 1559973
aucucuccucuuggaaaga

SEQ ID NO: 1567366 - RNA, 19 nt, Artificial Sequence
  Description of Artificial Sequence: Synthetic oligonucleotide
  Antisense strand to SEQ ID NO: 1567365
ucuuuccaagaggagagau

SEQ ID NO: 1567367 - RNA, 19 nt, Artificial Sequence
  Description of Artificial Sequence: Synthetic oligonucleotide
  Sense strand starting at position 1820 of SEQ ID NO: 1559973
auucuuuccgaguguccau

SEQ ID NO: 1567368 - RNA, 19 nt, Artificial Sequence
  Description of Artificial Sequence: Synthetic oligonucleotide
  Antisense strand to SEQ ID NO: 1567367
auggacacucggaaagaau

SEQ ID NO: 1567369 - RNA, 19 nt, Artificial Sequence
  Description of Artificial Sequence: Synthetic oligonucleotide
  Sense strand starting at position 1927 of SEQ ID NO: 1559973
ccaggucucuucuugagau

SEQ ID NO: 1567370 - RNA, 19 nt, Artificial Sequence
  Description of Artificial Sequence: Synthetic oligonucleotide
  Antisense strand to SEQ ID NO: 1567369
aucucaagaagagaccugg

SEQ ID NO: 1567371 - RNA, 19 nt, Artificial Sequence
  Description of Artificial Sequence: Synthetic oligonucleotide
  Sense strand starting at position 1929 of SEQ ID NO: 1559973
aggucucuucuugagauca

SEQ ID NO: 1567372 - RNA, 19 nt, Artificial Sequence
  Description of Artificial Sequence: Synthetic oligonucleotide
  Antisense strand to SEQ ID NO: 1567371
ugaucucaagaagagaccu

SEQ ID NO: 1567373 - RNA, 19 nt, Artificial Sequence
  Description of Artificial Sequence: Synthetic oligonucleotide
  Sense strand starting at position 2005 of SEQ ID NO: 1559973
ucagauccuugucucuaga

SEQ ID NO: 1567374 - RNA, 19 nt, Artificial Sequence
  Description of Artificial Sequence: Synthetic oligonucleotide
  Antisense strand to SEQ ID NO: 1567373
ucuagagacaaggaucuga

SEQ ID NO: 1567375 - RNA, 19 nt, Artificial Sequence
  Description of Artificial Sequence: Synthetic oligonucleotide
  Sense strand starting at position 2007 of SEQ ID NO: 1559973
agauccuugucucuagaga

SEQ ID NO: 1567376 - RNA, 19 nt, Artificial Sequence
  Description of Artificial Sequence: Synthetic oligonucleotide
  Antisense strand to SEQ ID NO: 1567375
ucucuagagacaaggaucu

SEQ ID NO: 1567377 - RNA, 19 nt, Artificial Sequence
  Description of Artificial Sequence: Synthetic oligonucleotide
  Sense strand starting at position 2008 of SEQ ID NO: 1559973
gauccuugucucuagagac

SEQ ID NO: 1567378 - RNA, 19 nt, Artificial Sequence
  Description of Artificial Sequence: Synthetic oligonucleotide
  Antisense strand to SEQ ID NO: 1567377
gucucuagagacaaggauc

SEQ ID NO: 1567379 - RNA, 19 nt, Artificial Sequence
  Description of Artificial Sequence: Synthetic oligonucleotide
  Sense strand starting at position 2172 of SEQ ID NO: 1559973
ucacgaguuuccucucguu

SEQ ID NO: 1567380 - RNA, 19 nt, Artificial Sequence
  Description of Artificial Sequence: Synthetic oligonucleotide
  Antisense strand to SEQ ID NO: 1567379
aacgagaggaaacucguga

SEQ ID NO: 1567381 - RNA, 19 nt, Artificial Sequence
  Description of Artificial Sequence: Synthetic oligonucleotide
  Sense strand starting at position 2174 of SEQ ID NO: 1559973
acgaguuuccucucguuuc

SEQ ID NO: 1567382 - RNA, 19 nt, Artificial Sequence
  Description of Artificial Sequence: Synthetic oligonucleotide
  Antisense strand to SEQ ID NO: 1567381
gaaacgagaggaaacucgu

SEQ ID NO: 1567383 - RNA, 19 nt, Artificial Sequence
  Description of Artificial Sequence: Synthetic oligonucleotide
  Sense strand starting at position 2388 of SEQ ID NO: 1559973
gggacuugucagcgcccga

SEQ ID NO: 1567384 - RNA, 19 nt, Artificial Sequence
  Description of Artificial Sequence: Synthetic oligonucleotide
  Antisense strand to SEQ ID NO: 1567383
ucgggcgcugacaaguccc

SEQ ID NO: 1567385 - RNA, 19 nt, Artificial Sequence
  Description of Artificial Sequence: Synthetic oligonucleotide
  Sense strand starting at position 2389 of SEQ ID NO: 1559973
ggacuugucagcgcccgau

SEQ ID NO: 1567386 - RNA, 19 nt, Artificial Sequence
  Description of Artificial Sequence: Synthetic oligonucleotide
  Antisense strand to SEQ ID NO: 1567385
aucgggcgcugacaagucc

SEQ ID NO: 1567387 - RNA, 19 nt, Artificial Sequence
  Description of Artificial Sequence: Synthetic oligonucleotide
  Sense strand starting at position 2591 of SEQ ID NO: 1559973
cugccuucucgcgcacaga

SEQ ID NO: 1567388 - RNA, 19 nt, Artificial Sequence
  Description of Artificial Sequence: Synthetic oligonucleotide
  Antisense strand to SEQ ID NO: 1567387
ucugugcgcgagaaggcag

SEQ ID NO: 1567389 - RNA, 19 nt, Artificial Sequence
  Description of Artificial Sequence: Synthetic oligonucleotide
  Sense strand starting at position 2745 of SEQ ID NO: 1559973
ggacuacaauucccgagau

SEQ ID NO: 1567390 - RNA, 19 nt, Artificial Sequence
  Description of Artificial Sequence: Synthetic oligonucleotide
  Antisense strand to SEQ ID NO: 1567389
aucucgggaauuguagucc

SEQ ID NO: 1567391 - RNA, 19 nt, Artificial Sequence
  Description of Artificial Sequence: Synthetic oligonucleotide
  Sense strand starting at position 2746 of SEQ ID NO: 1559973
gacuacaauucccgagaug

SEQ ID NO: 1567392 - RNA, 19 nt, Artificial Sequence
  Description of Artificial Sequence: Synthetic oligonucleotide
  Antisense strand to SEQ ID NO: 1567391
caucucgggaauuguaguc

SEQ ID NO: 1567393 - RNA, 19 nt, Artificial Sequence
  Description of Artificial Sequence: Synthetic oligonucleotide
  Sense strand starting at position 2776 of SEQ ID NO: 1559973
gcggugaaggcguugcauu

SEQ ID NO: 1567394 - RNA, 19 nt, Artificial Sequence
  Description of Artificial Sequence: Synthetic oligonucleotide
  Antisense strand to SEQ ID NO: 1567393
aaugcaacgccuucaccgc

SEQ ID NO: 1567395 - RNA, 19 nt, Artificial Sequence
  Description of Artificial Sequence: Synthetic oligonucleotide
  Sense strand starting at position 2786 of SEQ ID NO: 1559973
cguugcauucagggaaaug

SEQ ID NO: 1567396 - RNA, 19 nt, Artificial Sequence
  Description of Artificial Sequence: Synthetic oligonucleotide
  Antisense strand to SEQ ID NO: 1567395
cauuucccugaaugcaacg

SEQ ID NO: 1567397 - RNA, 19 nt, Artificial Sequence
  Description of Artificial Sequence: Synthetic oligonucleotide
  Sense strand starting at position 2796 of SEQ ID NO: 1559973
agggaaauguaguucucuu

SEQ ID NO: 1567398 - RNA, 19 nt, Artificial Sequence
  Description of Artificial Sequence: Synthetic oligonucleotide
  Antisense strand to SEQ ID NO: 1567397
aagagaacuacauuucccu

SEQ ID NO: 1567399 - RNA, 19 nt, Artificial Sequence
  Description of Artificial Sequence: Synthetic oligonucleotide
  Sense strand starting at position 2800 of SEQ ID NO: 1559973
aaauguaguucucuuaggu

SEQ ID NO: 1567400 - RNA, 19 nt, Artificial Sequence
  Description of Artificial Sequence: Synthetic oligonucleotide
  Antisense strand to SEQ ID NO: 1567399
accuaagagaacuacauuu

SEQ ID NO: 1567401 - RNA, 19 nt, Artificial Sequence
  Description of Artificial Sequence: Synthetic oligonucleotide
  Sense strand starting at position 2960 of SEQ ID NO: 1559973
cuagauauauugccuaggu

SEQ ID NO: 1567402 - RNA, 19 nt, Artificial Sequence
  Description of Artificial Sequence: Synthetic oligonucleotide
  Antisense strand to SEQ ID NO: 1567401
accuaggcaauauaucuag

SEQ ID NO: 1567403 - RNA, 19 nt, Artificial Sequence
  Description of Artificial Sequence: Synthetic oligonucleotide
  Sense strand starting at position 2961 of SEQ ID NO: 1559973
uagauauauugccuagguu

SEQ ID NO: 1567404 - RNA, 19 nt, Artificial Sequence
  Description of Artificial Sequence: Synthetic oligonucleotide
  Antisense strand to SEQ ID NO: 1567403
aaccuaggcaauauaucua

SEQ ID NO: 1567405 - RNA, 19 nt, Artificial Sequence
  Description of Artificial Sequence: Synthetic oligonucleotide
  Sense strand starting at position 2962 of SEQ ID NO: 1559973
agauauauugccuagguug

SEQ ID NO: 1567406 - RNA, 19 nt, Artificial Sequence
  Description of Artificial Sequence: Synthetic oligonucleotide
  Antisense strand to SEQ ID NO: 1567405
caaccuaggcaauauaucu

SEQ ID NO: 1567407 - RNA, 19 nt, Artificial Sequence
  Description of Artificial Sequence: Synthetic oligonucleotide
  Sense strand starting at position 2964 of SEQ ID NO: 1559973
auauauugccuagguugau

SEQ ID NO: 1567408 - RNA, 19 nt, Artificial Sequence
  Description of Artificial Sequence: Synthetic oligonucleotide
  Antisense strand to SEQ ID NO: 1567407
aucaaccuaggcaauauau

SEQ ID NO: 1567409 - RNA, 19 nt, Artificial Sequence
  Description of Artificial Sequence: Synthetic oligonucleotide
  Sense strand starting at position 2974 of SEQ ID NO: 1559973
uagguugaucucgaacuca

SEQ ID NO: 1567410 - RNA, 19 nt, Artificial Sequence
  Description of Artificial Sequence: Synthetic oligonucleotide
  Antisense strand to SEQ ID NO: 1567409
ugaguucgagaucaaccua

SEQ ID NO: 1567411 - RNA, 19 nt, Artificial Sequence
  Description of Artificial Sequence: Synthetic oligonucleotide
  Sense strand starting at position 3085 of SEQ ID NO: 1559973
ugugucucucgggagacaa

SEQ ID NO: 1567412 - RNA, 19 nt, Artificial Sequence
  Description of Artificial Sequence: Synthetic oligonucleotide
  Antisense strand to SEQ ID NO: 1567411
uugucucccgagagacaca

SEQ ID NO: 1567413 - RNA, 19 nt, Artificial Sequence
  Description of Artificial Sequence: Synthetic oligonucleotide
  Sense strand starting at position 3184 of SEQ ID NO: 1559973
gcagaucacuugguuagga

SEQ ID NO: 1567414 - RNA, 19 nt, Artificial Sequence
  Description of Artificial Sequence: Synthetic oligonucleotide
  Antisense strand to SEQ ID NO: 1567413
uccuaaccaagugaucugc

SEQ ID NO: 1567415 - RNA, 19 nt, Artificial Sequence
  Description of Artificial Sequence: Synthetic oligonucleotide
  Sense strand starting at position 3186 of SEQ ID NO: 1559973
agaucacuugguuaggagu

SEQ ID NO: 1567416 - RNA, 19 nt, Artificial Sequence
  Description of Artificial Sequence: Synthetic oligonucleotide
  Antisense strand to SEQ ID NO: 1567415
acuccuaaccaagugaucu

SEQ ID NO: 1567417 - RNA, 19 nt, Artificial Sequence
  Description of Artificial Sequence: Synthetic oligonucleotide
  Sense strand starting at position 307 of SEQ ID NO: 1559974
gccugagagucuuuccuaa

SEQ ID NO: 1567418 - RNA, 19 nt, Artificial Sequence
  Description of Artificial Sequence: Synthetic oligonucleotide
  Antisense strand to SEQ ID NO: 1567417
uuaggaaagacucucaggc

SEQ ID NO: 1567419 - RNA, 19 nt, Artificial Sequence
  Description of Artificial Sequence: Synthetic oligonucleotide
  Sense strand starting at position 309 of SEQ ID NO: 1559974
cugagagucuuuccuaagc

SEQ ID NO: 1567420 - RNA, 19 nt, Artificial Sequence
  Description of Artificial Sequence: Synthetic oligonucleotide
  Antisense strand to SEQ ID NO: 1567419
gcuuaggaaagacucucag

SEQ ID NO: 1567421 - RNA, 19 nt, Artificial Sequence
  Description of Artificial Sequence: Synthetic oligonucleotide
  Sense strand starting at position 803 of SEQ ID NO: 1559974
ggugacaucccuuguccca

SEQ ID NO: 1567422 - RNA, 19 nt, Artificial Sequence
  Description of Artificial Sequence: Synthetic oligonucleotide
  Antisense strand to SEQ ID NO: 1567421
ugggacaagggaugucacc

SEQ ID NO: 1567423 - RNA, 19 nt, Artificial Sequence
  Description of Artificial Sequence: Synthetic oligonucleotide
  Sense strand starting at position 1078 of SEQ ID NO: 1559974
aucucuccucuuggaaaga

SEQ ID NO: 1567424 - RNA, 19 nt, Artificial Sequence
  Description of Artificial Sequence: Synthetic oligonucleotide
  Antisense strand to SEQ ID NO: 1567423
ucuuuccaagaggagagau

SEQ ID NO: 1567425 - RNA, 19 nt, Artificial Sequence
  Description of Artificial Sequence: Synthetic oligonucleotide
  Sense strand starting at position 1115 of SEQ ID NO: 1559974
auucuuuccgaguguccau

SEQ ID NO: 1567426 - RNA, 19 nt, Artificial Sequence
  Description of Artificial Sequence: Synthetic oligonucleotide
  Antisense strand to SEQ ID NO: 1567425
auggacacucggaaagaau

SEQ ID NO: 1567427 - RNA, 19 nt, Artificial Sequence
  Description of Artificial Sequence: Synthetic oligonucleotide
  Sense strand starting at position 1222 of SEQ ID NO: 1559974
ccaggucucuucuugagau

SEQ ID NO: 1567428 - RNA, 19 nt, Artificial Sequence
  Description of Artificial Sequence: Synthetic oligonucleotide
  Antisense strand to SEQ ID NO: 1567427
aucucaagaagagaccugg

SEQ ID NO: 1567429 - RNA, 19 nt, Artificial Sequence
  Description of Artificial Sequence: Synthetic oligonucleotide
  Sense strand starting at position 1224 of SEQ ID NO: 1559974
aggucucuucuugagauca

SEQ ID NO: 1567430 - RNA, 19 nt, Artificial Sequence
  Description of Artificial Sequence: Synthetic oligonucleotide
  Antisense strand to SEQ ID NO: 1567429
ugaucucaagaagagaccu

SEQ ID NO: 1567431 - RNA, 19 nt, Artificial Sequence
  Description of Artificial Sequence: Synthetic oligonucleotide
  Sense strand starting at position 1300 of SEQ ID NO: 1559974
ucagauccuugucucuaga

SEQ ID NO: 1567432 - RNA, 19 nt, Artificial Sequence
  Description of Artificial Sequence: Synthetic oligonucleotide
  Antisense strand to SEQ ID NO: 1567431
ucuagagacaaggaucuga

SEQ ID NO: 1567433 - RNA, 19 nt, Artificial Sequence
  Description of Artificial Sequence: Synthetic oligonucleotide
  Sense strand starting at position 1302 of SEQ ID NO: 1559974
agauccuugucucuagaga

SEQ ID NO: 1567434 - RNA, 19 nt, Artificial Sequence
  Description of Artificial Sequence: Synthetic oligonucleotide
  Antisense strand to SEQ ID NO: 1567433
ucucuagagacaaggaucu

SEQ ID NO: 1567435 - RNA, 19 nt, Artificial Sequence
  Description of Artificial Sequence: Synthetic oligonucleotide
  Sense strand starting at position 1303 of SEQ ID NO: 1559974
gauccuugucucuagagac

SEQ ID NO: 1567436 - RNA, 19 nt, Artificial Sequence
  Description of Artificial Sequence: Synthetic oligonucleotide
  Antisense strand to SEQ ID NO: 1567435
gucucuagagacaaggauc

SEQ ID NO: 1567437 - RNA, 19 nt, Artificial Sequence
  Description of Artificial Sequence: Synthetic oligonucleotide
  Sense strand starting at position 1469 of SEQ ID NO: 1559974
acgaguuuccucucguuuc

SEQ ID NO: 1567438 - RNA, 19 nt, Artificial Sequence
  Description of Artificial Sequence: Synthetic oligonucleotide
  Antisense strand to SEQ ID NO: 1567437
gaaacgagaggaaacucgu

SEQ ID NO: 1567439 - RNA, 19 nt, Artificial Sequence
  Description of Artificial Sequence: Synthetic oligonucleotide
  Sense strand starting at position 1684 of SEQ ID NO: 1559974
ggacuugucagcgcccgau

SEQ ID NO: 1567440 - RNA, 19 nt, Artificial Sequence
  Description of Artificial Sequence: Synthetic oligonucleotide
  Antisense strand to SEQ ID NO: 1567439
aucgggcgcugacaagucc

SEQ ID NO: 1567441 - RNA, 19 nt, Artificial Sequence
  Description of Artificial Sequence: Synthetic oligonucleotide
  Sense strand starting at position 1886 of SEQ ID NO: 1559974
cugccuucucgcgcacaga

SEQ ID NO: 1567442 - RNA, 19 nt, Artificial Sequence
  Description of Artificial Sequence: Synthetic oligonucleotide
  Antisense strand to SEQ ID NO: 1567441
ucugugcgcgagaaggcag

SEQ ID NO: 1567443 - RNA, 19 nt, Artificial Sequence
  Description of Artificial Sequence: Synthetic oligonucleotide
  Sense strand starting at position 2040 of SEQ ID NO: 1559974
ggacuacaauucccgagau

SEQ ID NO: 1567444 - RNA, 19 nt, Artificial Sequence
  Description of Artificial Sequence: Synthetic oligonucleotide
  Antisense strand to SEQ ID NO: 1567443
aucucgggaauuguagucc

SEQ ID NO: 1567445 - RNA, 19 nt, Artificial Sequence
  Description of Artificial Sequence: Synthetic oligonucleotide
  Sense strand starting at position 2071 of SEQ ID NO: 1559974
gcggugaaggcguugcauu

SEQ ID NO: 1567446 - RNA, 19 nt, Artificial Sequence
  Description of Artificial Sequence: Synthetic oligonucleotide
  Antisense strand to SEQ ID NO: 1567445
aaugcaacgccuucaccgc

SEQ ID NO: 1567447 - RNA, 19 nt, Artificial Sequence
  Description of Artificial Sequence: Synthetic oligonucleotide
  Sense strand starting at position 2081 of SEQ ID NO: 1559974
cguugcauucagggaaaug

SEQ ID NO: 1567448 - RNA, 19 nt, Artificial Sequence
  Description of Artificial Sequence: Synthetic oligonucleotide
  Antisense strand to SEQ ID NO: 1567447
cauuucccugaaugcaacg

SEQ ID NO: 1567449 - RNA, 19 nt, Artificial Sequence
  Description of Artificial Sequence: Synthetic oligonucleotide
  Sense strand starting at position 2091 of SEQ ID NO: 1559974
agggaaauguaguucucuu

SEQ ID NO: 1567450 - RNA, 19 nt, Artificial Sequence
  Description of Artificial Sequence: Synthetic oligonucleotide
  Antisense strand to SEQ ID NO: 1567449
aagagaacuacauuucccu

SEQ ID NO: 1567451 - RNA, 19 nt, Artificial Sequence
  Description of Artificial Sequence: Synthetic oligonucleotide
  Sense strand starting at position 2095 of SEQ ID NO: 1559974
aaauguaguucucuuaggu

SEQ ID NO: 1567452 - RNA, 19 nt, Artificial Sequence
  Description of Artificial Sequence: Synthetic oligonucleotide
  Antisense strand to SEQ ID NO: 1567451
accuaagagaacuacauuu

SEQ ID NO: 1567453 - RNA, 19 nt, Artificial Sequence
  Description of Artificial Sequence: Synthetic oligonucleotide
  Sense strand starting at position 2255 of SEQ ID NO: 1559974
cuagauauauugccuaggu

SEQ ID NO: 1567454 - RNA, 19 nt, Artificial Sequence
  Description of Artificial Sequence: Synthetic oligonucleotide
  Antisense strand to SEQ ID NO: 1567453
accuaggcaauauaucuag

SEQ ID NO: 1567455 - RNA, 19 nt, Artificial Sequence
  Description of Artificial Sequence: Synthetic oligonucleotide
  Sense strand starting at position 2256 of SEQ ID NO: 1559974
uagauauauugccuagguu

SEQ ID NO: 1567456 - RNA, 19 nt, Artificial Sequence
  Description of Artificial Sequence: Synthetic oligonucleotide
  Antisense strand to SEQ ID NO: 1567455
aaccuaggcaauauaucua

SEQ ID NO: 1567457 - RNA, 19 nt, Artificial Sequence
  Description of Artificial Sequence: Synthetic oligonucleotide
  Sense strand starting at position 2257 of SEQ ID NO: 1559974
agauauauugccuagguug

SEQ ID NO: 1567458 - RNA, 19 nt, Artificial Sequence
  Description of Artificial Sequence: Synthetic oligonucleotide
  Antisense strand to SEQ ID NO: 1567457
caaccuaggcaauauaucu

SEQ ID NO: 1567459 - RNA, 19 nt, Artificial Sequence
  Description of Artificial Sequence: Synthetic oligonucleotide
  Sense strand starting at position 2259 of SEQ ID NO: 1559974
auauauugccuagguugau

SEQ ID NO: 1567460 - RNA, 19 nt, Artificial Sequence
  Description of Artificial Sequence: Synthetic oligonucleotide
  Antisense strand to SEQ ID NO: 1567459
aucaaccuaggcaauauau

SEQ ID NO: 1567461 - RNA, 19 nt, Artificial Sequence
  Description of Artificial Sequence: Synthetic oligonucleotide
  Sense strand starting at position 2269 of SEQ ID NO: 1559974
uagguugaucucgaacuca

SEQ ID NO: 1567462 - RNA, 19 nt, Artificial Sequence
  Description of Artificial Sequence: Synthetic oligonucleotide
  Antisense strand to SEQ ID NO: 1567461
ugaguucgagaucaaccua

SEQ ID NO: 1567463 - RNA, 19 nt, Artificial Sequence
  Description of Artificial Sequence: Synthetic oligonucleotide
  Sense strand starting at position 2380 of SEQ ID NO: 1559974
ugugucucucgggagacaa

SEQ ID NO: 1567464 - RNA, 19 nt, Artificial Sequence
  Description of Artificial Sequence: Synthetic oligonucleotide
  Antisense strand to SEQ ID NO: 1567463
uugucucccgagagacaca

SEQ ID NO: 1567465 - RNA, 19 nt, Artificial Sequence
  Description of Artificial Sequence: Synthetic oligonucleotide
  Sense strand starting at position 2479 of SEQ ID NO: 1559974
gcagaucacuugguuagga

SEQ ID NO: 1567466 - RNA, 19 nt, Artificial Sequence
  Description of Artificial Sequence: Synthetic oligonucleotide
  Antisense strand to SEQ ID NO: 1567465
uccuaaccaagugaucugc

SEQ ID NO: 1567467 - RNA, 19 nt, Artificial Sequence
  Description of Artificial Sequence: Synthetic oligonucleotide
  Sense strand starting at position 2481 of SEQ ID NO: 1559974
agaucacuugguuaggagu

SEQ ID NO: 1567468 - RNA, 19 nt, Artificial Sequence
  Description of Artificial Sequence: Synthetic oligonucleotide
  Antisense strand to SEQ ID NO: 1567467
acuccuaaccaagugaucu

SEQ ID NO: 1567469 - RNA, 19 nt, Artificial Sequence
  Description of Artificial Sequence: Synthetic oligonucleotide
  Sense strand starting at position 3384 of SEQ ID NO: 1559974
uuauuugcccuaugaguau

SEQ ID NO: 1567470 - RNA, 19 nt, Artificial Sequence
  Description of Artificial Sequence: Synthetic oligonucleotide
  Antisense strand to SEQ ID NO: 1567469
auacucauagggcaaauaa

SEQ ID NO: 1567471 - RNA, 19 nt, Artificial Sequence
  Description of Artificial Sequence: Synthetic oligonucleotide
  Sense strand starting at position 3391 of SEQ ID NO: 1559974
cccuaugaguaugugugua

SEQ ID NO: 1567472 - RNA, 19 nt, Artificial Sequence
  Description of Artificial Sequence: Synthetic oligonucleotide
  Antisense strand to SEQ ID NO: 1567471
uacacacauacucauaggg

SEQ ID NO: 1567473 - RNA, 19 nt, Artificial Sequence
  Description of Artificial Sequence: Synthetic oligonucleotide
  Sense strand starting at position 3395 of SEQ ID NO: 1559974
augaguauguguguauguu

SEQ ID NO: 1567474 - RNA, 19 nt, Artificial Sequence
  Description of Artificial Sequence: Synthetic oligonucleotide
  Antisense strand to SEQ ID NO: 1567473
aacauacacacauacucau

SEQ ID NO: 1567475 - RNA, 19 nt, Artificial Sequence
  Description of Artificial Sequence: Synthetic oligonucleotide
  Sense strand starting at position 3396 of SEQ ID NO: 1559974
ugaguauguguguauguuu

SEQ ID NO: 1567476 - RNA, 19 nt, Artificial Sequence
  Description of Artificial Sequence: Synthetic oligonucleotide
  Antisense strand to SEQ ID NO: 1567475
aaacauacacacauacuca

SEQ ID NO: 1567477 - RNA, 19 nt, Artificial Sequence
  Description of Artificial Sequence: Synthetic oligonucleotide
  Sense strand starting at position 3401 of SEQ ID NO: 1559974
auguguguauguuugucua

SEQ ID NO: 1567478 - RNA, 19 nt, Artificial Sequence
  Description of Artificial Sequence: Synthetic oligonucleotide
  Antisense strand to SEQ ID NO: 1567477
uagacaaacauacacacau

SEQ ID NO: 1567479 - RNA, 19 nt, Artificial Sequence
  Description of Artificial Sequence: Synthetic oligonucleotide
  Sense strand starting at position 3404 of SEQ ID NO: 1559974
uguguauguuugucuagau

SEQ ID NO: 1567480 - RNA, 19 nt, Artificial Sequence
  Description of Artificial Sequence: Synthetic oligonucleotide
  Antisense strand to SEQ ID NO: 1567479
aucuagacaaacauacaca

SEQ ID NO: 1567481 - RNA, 19 nt, Artificial Sequence
  Description of Artificial Sequence: Synthetic oligonucleotide
  Sense strand starting at position 3405 of SEQ ID NO: 1559974
guguauguuugucuagauc

SEQ ID NO: 1567482 - RNA, 19 nt, Artificial Sequence
  Description of Artificial Sequence: Synthetic oligonucleotide
  Antisense strand to SEQ ID NO: 1567481
gaucuagacaaacauacac

SEQ ID NO: 1567483 - RNA, 19 nt, Artificial Sequence
  Description of Artificial Sequence: Synthetic oligonucleotide
  Sense strand starting at position 3413 of SEQ ID NO: 1559974
uugucuagaucucucauua

SEQ ID NO: 1567484 - RNA, 19 nt, Artificial Sequence
  Description of Artificial Sequence: Synthetic oligonucleotide
  Antisense strand to SEQ ID NO: 1567483
uaaugagagaucuagacaa

SEQ ID NO: 1567485 - RNA, 19 nt, Artificial Sequence
  Description of Artificial Sequence: Synthetic oligonucleotide
  Sense strand starting at position 3417 of SEQ ID NO: 1559974
cuagaucucucauuaggua

SEQ ID NO: 1567486 - RNA, 19 nt, Artificial Sequence
  Description of Artificial Sequence: Synthetic oligonucleotide
  Antisense strand to SEQ ID NO: 1567485
uaccuaaugagagaucuag

SEQ ID NO: 1567487 - RNA, 19 nt, Artificial Sequence
  Description of Artificial Sequence: Synthetic oligonucleotide
  Sense strand starting at position 3451 of SEQ ID NO: 1559974
cagggacccugucugauaa

SEQ ID NO: 1567488 - RNA, 19 nt, Artificial Sequence
  Description of Artificial Sequence: Synthetic oligonucleotide
  Antisense strand to SEQ ID NO: 1567487
uuaucagacagggucccug

SEQ ID NO: 1567489 - RNA, 19 nt, Artificial Sequence
  Description of Artificial Sequence: Synthetic oligonucleotide
  Sense strand starting at position 3461 of SEQ ID NO: 1559974
gucugauaacuguaucuuc

SEQ ID NO: 1567490 - RNA, 19 nt, Artificial Sequence
  Description of Artificial Sequence: Synthetic oligonucleotide
  Antisense strand to SEQ ID NO: 1567489
gaagauacaguuaucagac

SEQ ID NO: 1567491 - RNA, 19 nt, Artificial Sequence
  Description of Artificial Sequence: Synthetic oligonucleotide
  Sense strand starting at position 3502 of SEQ ID NO: 1559974
guaagcagucaauaaaguu

SEQ ID NO: 1567492 - RNA, 19 nt, Artificial Sequence
  Description of Artificial Sequence: Synthetic oligonucleotide
  Antisense strand to SEQ ID NO: 1567491
aacuuuauugacugcuuac

SEQ ID NO: 1567493 - RNA, 19 nt, Artificial Sequence
  Description of Artificial Sequence: Synthetic oligonucleotide
  Sense strand starting at position 3714 of SEQ ID NO: 1559974
guagcacuugccuguaaua

SEQ ID NO: 1567494 - RNA, 19 nt, Artificial Sequence
  Description of Artificial Sequence: Synthetic oligonucleotide
  Antisense strand to SEQ ID NO: 1567493
uauuacaggcaagugcuac

SEQ ID NO: 1567495 - RNA, 19 nt, Artificial Sequence
  Description of Artificial Sequence: Synthetic oligonucleotide
  Sense strand starting at position 3920 of SEQ ID NO: 1559974
agguauaguacuggcagaa

SEQ ID NO: 1567496 - RNA, 19 nt, Artificial Sequence
  Description of Artificial Sequence: Synthetic oligonucleotide
  Antisense strand to SEQ ID NO: 1567495
uucugccaguacuauaccu

SEQ ID NO: 1567497 - RNA, 19 nt, Artificial Sequence
  Description of Artificial Sequence: Synthetic oligonucleotide
  Sense strand starting at position 533 of SEQ ID NO: 1559975
gccugagagucuuuccuaa

SEQ ID NO: 1567498 - RNA, 19 nt, Artificial Sequence
  Description of Artificial Sequence: Synthetic oligonucleotide
  Antisense strand to SEQ ID NO: 1567497
uuaggaaagacucucaggc

SEQ ID NO: 1567499 - RNA, 19 nt, Artificial Sequence
  Description of Artificial Sequence: Synthetic oligonucleotide
  Sense strand starting at position 535 of SEQ ID NO: 1559975
cugagagucuuuccuaagc

SEQ ID NO: 1567500 - RNA, 19 nt, Artificial Sequence
  Description of Artificial Sequence: Synthetic oligonucleotide
  Antisense strand to SEQ ID NO: 1567499
gcuuaggaaagacucucag

SEQ ID NO: 1567501 - RNA, 19 nt, Artificial Sequence
  Description of Artificial Sequence: Synthetic oligonucleotide
  Sense strand starting at position 1029 of SEQ ID NO: 1559975
ggugacaucccuuguccca

SEQ ID NO: 1567502 - RNA, 19 nt, Artificial Sequence
  Description of Artificial Sequence: Synthetic oligonucleotide
  Antisense strand to SEQ ID NO: 1567501
ugggacaagggaugucacc

SEQ ID NO: 1567503 - RNA, 19 nt, Artificial Sequence
  Description of Artificial Sequence: Synthetic oligonucleotide
  Sense strand starting at position 1304 of SEQ ID NO: 1559975
aucucuccucuuggaaaga

SEQ ID NO: 1567504 - RNA, 19 nt, Artificial Sequence
  Description of Artificial Sequence: Synthetic oligonucleotide
  Antisense strand to SEQ ID NO: 1567503
ucuuuccaagaggagagau

SEQ ID NO: 1567505 - RNA, 19 nt, Artificial Sequence
  Description of Artificial Sequence: Synthetic oligonucleotide
  Sense strand starting at position 1341 of SEQ ID NO: 1559975
auucuuuccgaguguccau

SEQ ID NO: 1567506 - RNA, 19 nt, Artificial Sequence
  Description of Artificial Sequence: Synthetic oligonucleotide
  Antisense strand to SEQ ID NO: 1567505
auggacacucggaaagaau

SEQ ID NO: 1567507 - RNA, 19 nt, Artificial Sequence
  Description of Artificial Sequence: Synthetic oligonucleotide
  Sense strand starting at position 1448 of SEQ ID NO: 1559975
ccaggucucuucuugagau

SEQ ID NO: 1567508 - RNA, 19 nt, Artificial Sequence
  Description of Artificial Sequence: Synthetic oligonucleotide
  Antisense strand to SEQ ID NO: 1567507
aucucaagaagagaccugg

SEQ ID NO: 1567509 - RNA, 19 nt, Artificial Sequence
  Description of Artificial Sequence: Synthetic oligonucleotide
  Sense strand starting at position 1450 of SEQ ID NO: 1559975
aggucucuucuugagauca

SEQ ID NO: 1567510 - RNA, 19 nt, Artificial Sequence
  Description of Artificial Sequence: Synthetic oligonucleotide
  Antisense strand to SEQ ID NO: 1567509
ugaucucaagaagagaccu

SEQ ID NO: 1567511 - RNA, 19 nt, Artificial Sequence
  Description of Artificial Sequence: Synthetic oligonucleotide
  Sense strand starting at position 1526 of SEQ ID NO: 1559975
ucagauccuugucucuaga

SEQ ID NO: 1567512 - RNA, 19 nt, Artificial Sequence
  Description of Artificial Sequence: Synthetic oligonucleotide
  Antisense strand to SEQ ID NO: 1567511
ucuagagacaaggaucuga

SEQ ID NO: 1567513 - RNA, 19 nt, Artificial Sequence
  Description of Artificial Sequence: Synthetic oligonucleotide
  Sense strand starting at position 1528 of SEQ ID NO: 1559975
agauccuugucucuagaga

SEQ ID NO: 1567514 - RNA, 19 nt, Artificial Sequence
  Description of Artificial Sequence: Synthetic oligonucleotide
  Antisense strand to SEQ ID NO: 1567513
ucucuagagacaaggaucu

SEQ ID NO: 1567515 - RNA, 19 nt, Artificial Sequence
  Description of Artificial Sequence: Synthetic oligonucleotide
  Sense strand starting at position 1529 of SEQ ID NO: 1559975
gauccuugucucuagagac

SEQ ID NO: 1567516 - RNA, 19 nt, Artificial Sequence
  Description of Artificial Sequence: Synthetic oligonucleotide
  Antisense strand to SEQ ID NO: 1567515
gucucuagagacaaggauc

SEQ ID NO: 1567517 - RNA, 19 nt, Artificial Sequence
  Description of Artificial Sequence: Synthetic oligonucleotide
  Sense strand starting at position 1695 of SEQ ID NO: 1559975
acgaguuuccucucguuuc

SEQ ID NO: 1567518 - RNA, 19 nt, Artificial Sequence
  Description of Artificial Sequence: Synthetic oligonucleotide
  Antisense strand to SEQ ID NO: 1567517
gaaacgagaggaaacucgu

SEQ ID NO: 1567519 - RNA, 19 nt, Artificial Sequence
  Description of Artificial Sequence: Synthetic oligonucleotide
  Sense strand starting at position 1910 of SEQ ID NO: 1559975
ggacuugucagcgcccgau

SEQ ID NO: 1567520 - RNA, 19 nt, Artificial Sequence
  Description of Artificial Sequence: Synthetic oligonucleotide
  Antisense strand to SEQ ID NO: 1567519
aucgggcgcugacaagucc

SEQ ID NO: 1567521 - RNA, 19 nt, Artificial Sequence
  Description of Artificial Sequence: Synthetic oligonucleotide
  Sense strand starting at position 2112 of SEQ ID NO: 1559975
cugccuucucgcgcacaga

SEQ ID NO: 1567522 - RNA, 19 nt, Artificial Sequence
  Description of Artificial Sequence: Synthetic oligonucleotide
  Antisense strand to SEQ ID NO: 1567521
ucugugcgcgagaaggcag

SEQ ID NO: 1567523 - RNA, 19 nt, Artificial Sequence
  Description of Artificial Sequence: Synthetic oligonucleotide
  Sense strand starting at position 2266 of SEQ ID NO: 1559975
ggacuacaauucccgagau

SEQ ID NO: 1567524 - RNA, 19 nt, Artificial Sequence
  Description of Artificial Sequence: Synthetic oligonucleotide
  Antisense strand to SEQ ID NO: 1567523
aucucgggaauuguagucc

SEQ ID NO: 1567525 - RNA, 19 nt, Artificial Sequence
  Description of Artificial Sequence: Synthetic oligonucleotide
  Sense strand starting at position 2297 of SEQ ID NO: 1559975
gcggugaaggcguugcauu

SEQ ID NO: 1567526 - RNA, 19 nt, Artificial Sequence
  Description of Artificial Sequence: Synthetic oligonucleotide
  Antisense strand to SEQ ID NO: 1567525
aaugcaacgccuucaccgc

SEQ ID NO: 1567527 - RNA, 19 nt, Artificial Sequence
  Description of Artificial Sequence: Synthetic oligonucleotide
  Sense strand starting at position 2307 of SEQ ID NO: 1559975
cguugcauucagggaaaug

SEQ ID NO: 1567528 - RNA, 19 nt, Artificial Sequence
  Description of Artificial Sequence: Synthetic oligonucleotide
  Antisense strand to SEQ ID NO: 1567527
cauuucccugaaugcaacg

SEQ ID NO: 1567529 - RNA, 19 nt, Artificial Sequence
  Description of Artificial Sequence: Synthetic oligonucleotide
  Sense strand starting at position 2317 of SEQ ID NO: 1559975
agggaaauguaguucucuu

SEQ ID NO: 1567530 - RNA, 19 nt, Artificial Sequence
  Description of Artificial Sequence: Synthetic oligonucleotide
  Antisense strand to SEQ ID NO: 1567529
aagagaacuacauuucccu

SEQ ID NO: 1567531 - RNA, 19 nt, Artificial Sequence
  Description of Artificial Sequence: Synthetic oligonucleotide
  Sense strand starting at position 2321 of SEQ ID NO: 1559975
aaauguaguucucuuaggu

SEQ ID NO: 1567532 - RNA, 19 nt, Artificial Sequence
  Description of Artificial Sequence: Synthetic oligonucleotide
  Antisense strand to SEQ ID NO: 1567531
accuaagagaacuacauuu

SEQ ID NO: 1567533 - RNA, 19 nt, Artificial Sequence
  Description of Artificial Sequence: Synthetic oligonucleotide
  Sense strand starting at position 2481 of SEQ ID NO: 1559975
cuagauauauugccuaggu

SEQ ID NO: 1567534 - RNA, 19 nt, Artificial Sequence
  Description of Artificial Sequence: Synthetic oligonucleotide
  Antisense strand to SEQ ID NO: 1567533
accuaggcaauauaucuag

SEQ ID NO: 1567535 - RNA, 19 nt, Artificial Sequence
  Description of Artificial Sequence: Synthetic oligonucleotide
  Sense strand starting at position 2482 of SEQ ID NO: 1559975
uagauauauugccuagguu

SEQ ID NO: 1567536 - RNA, 19 nt, Artificial Sequence
  Description of Artificial Sequence: Synthetic oligonucleotide
  Antisense strand to SEQ ID NO: 1567535
aaccuaggcaauauaucua

SEQ ID NO: 1567537 - RNA, 19 nt, Artificial Sequence
  Description of Artificial Sequence: Synthetic oligonucleotide
  Sense strand starting at position 2483 of SEQ ID NO: 1559975
agauauauugccuagguug

SEQ ID NO: 1567538 - RNA, 19 nt, Artificial Sequence
  Description of Artificial Sequence: Synthetic oligonucleotide
  Antisense strand to SEQ ID NO: 1567537
caaccuaggcaauauaucu

SEQ ID NO: 1567539 - RNA, 19 nt, Artificial Sequence
  Description of Artificial Sequence: Synthetic oligonucleotide
  Sense strand starting at position 2485 of SEQ ID NO: 1559975
auauauugccuagguugau

SEQ ID NO: 1567540 - RNA, 19 nt, Artificial Sequence
  Description of Artificial Sequence: Synthetic oligonucleotide
  Antisense strand to SEQ ID NO: 1567539
aucaaccuaggcaauauau

SEQ ID NO: 1567541 - RNA, 19 nt, Artificial Sequence
  Description of Artificial Sequence: Synthetic oligonucleotide
  Sense strand starting at position 2495 of SEQ ID NO: 1559975
uagguugaucucgaacuca

SEQ ID NO: 1567542 - RNA, 19 nt, Artificial Sequence
  Description of Artificial Sequence: Synthetic oligonucleotide
  Antisense strand to SEQ ID NO: 1567541
ugaguucgagaucaaccua

SEQ ID NO: 1567543 - RNA, 19 nt, Artificial Sequence
  Description of Artificial Sequence: Synthetic oligonucleotide
  Sense strand starting at position 2606 of SEQ ID NO: 1559975
ugugucucucgggagacaa

SEQ ID NO: 1567544 - RNA, 19 nt, Artificial Sequence
  Description of Artificial Sequence: Synthetic oligonucleotide
  Antisense strand to SEQ ID NO: 1567543
uugucucccgagagacaca

SEQ ID NO: 1567545 - RNA, 19 nt, Artificial Sequence
  Description of Artificial Sequence: Synthetic oligonucleotide
  Sense strand starting at position 2705 of SEQ ID NO: 1559975
gcagaucacuugguuagga

SEQ ID NO: 1567546 - RNA, 19 nt, Artificial Sequence
  Description of Artificial Sequence: Synthetic oligonucleotide
  Antisense strand to SEQ ID NO: 1567545
uccuaaccaagugaucugc

SEQ ID NO: 1567547 - RNA, 19 nt, Artificial Sequence
  Description of Artificial Sequence: Synthetic oligonucleotide
  Sense strand starting at position 2707 of SEQ ID NO: 1559975
agaucacuugguuaggagu

SEQ ID NO: 1567548 - RNA, 19 nt, Artificial Sequence
  Description of Artificial Sequence: Synthetic oligonucleotide
  Antisense strand to SEQ ID NO: 1567547
acuccuaaccaagugaucu

SEQ ID NO: 1567549 - RNA, 19 nt, Artificial Sequence
  Description of Artificial Sequence: Synthetic oligonucleotide
  Sense strand starting at position 3610 of SEQ ID NO: 1559975
uuauuugcccuaugaguau

SEQ ID NO: 1567550 - RNA, 19 nt, Artificial Sequence
  Description of Artificial Sequence: Synthetic oligonucleotide
  Antisense strand to SEQ ID NO: 1567549
auacucauagggcaaauaa

SEQ ID NO: 1567551 - RNA, 19 nt, Artificial Sequence
  Description of Artificial Sequence: Synthetic oligonucleotide
  Sense strand starting at position 3617 of SEQ ID NO: 1559975
cccuaugaguaugugugua

SEQ ID NO: 1567552 - RNA, 19 nt, Artificial Sequence
  Description of Artificial Sequence: Synthetic oligonucleotide
  Antisense strand to SEQ ID NO: 1567551
uacacacauacucauaggg

SEQ ID NO: 1567553 - RNA, 19 nt, Artificial Sequence
  Description of Artificial Sequence: Synthetic oligonucleotide
  Sense strand starting at position 3621 of SEQ ID NO: 1559975
augaguauguguguauguu

SEQ ID NO: 1567554 - RNA, 19 nt, Artificial Sequence
  Description of Artificial Sequence: Synthetic oligonucleotide
  Antisense strand to SEQ ID NO: 1567553
aacauacacacauacucau

SEQ ID NO: 1567555 - RNA, 19 nt, Artificial Sequence
  Description of Artificial Sequence: Synthetic oligonucleotide
  Sense strand starting at position 3622 of SEQ ID NO: 1559975
ugaguauguguguauguuu

SEQ ID NO: 1567556 - RNA, 19 nt, Artificial Sequence
  Description of Artificial Sequence: Synthetic oligonucleotide
  Antisense strand to SEQ ID NO: 1567555
aaacauacacacauacuca

SEQ ID NO: 1567557 - RNA, 19 nt, Artificial Sequence
  Description of Artificial Sequence: Synthetic oligonucleotide
  Sense strand starting at position 3627 of SEQ ID NO: 1559975
auguguguauguuugucua

SEQ ID NO: 1567558 - RNA, 19 nt, Artificial Sequence
  Description of Artificial Sequence: Synthetic oligonucleotide
  Antisense strand to SEQ ID NO: 1567557
uagacaaacauacacacau

SEQ ID NO: 1567559 - RNA, 19 nt, Artificial Sequence
  Description of Artificial Sequence: Synthetic oligonucleotide
  Sense strand starting at position 3630 of SEQ ID NO: 1559975
uguguauguuugucuagau

SEQ ID NO: 1567560 - RNA, 19 nt, Artificial Sequence
  Description of Artificial Sequence: Synthetic oligonucleotide
  Antisense strand to SEQ ID NO: 1567559
aucuagacaaacauacaca

SEQ ID NO: 1567561 - RNA, 19 nt, Artificial Sequence
  Description of Artificial Sequence: Synthetic oligonucleotide
  Sense strand starting at position 3631 of SEQ ID NO: 1559975
guguauguuugucuagauc

SEQ ID NO: 1567562 - RNA, 19 nt, Artificial Sequence
  Description of Artificial Sequence: Synthetic oligonucleotide
  Antisense strand to SEQ ID NO: 1567561
gaucuagacaaacauacac

SEQ ID NO: 1567563 - RNA, 19 nt, Artificial Sequence
  Description of Artificial Sequence: Synthetic oligonucleotide
  Sense strand starting at position 3639 of SEQ ID NO: 1559975
uugucuagaucucucauua

SEQ ID NO: 1567564 - RNA, 19 nt, Artificial Sequence
  Description of Artificial Sequence: Synthetic oligonucleotide
  Antisense strand to SEQ ID NO: 1567563
uaaugagagaucuagacaa

SEQ ID NO: 1567565 - RNA, 19 nt, Artificial Sequence
  Description of Artificial Sequence: Synthetic oligonucleotide
  Sense strand starting at position 3643 of SEQ ID NO: 1559975
cuagaucucucauuaggua

SEQ ID NO: 1567566 - RNA, 19 nt, Artificial Sequence
  Description of Artificial Sequence: Synthetic oligonucleotide
  Antisense strand to SEQ ID NO: 1567565
uaccuaaugagagaucuag

SEQ ID NO: 1567567 - RNA, 19 nt, Artificial Sequence
  Description of Artificial Sequence: Synthetic oligonucleotide
  Sense strand starting at position 3677 of SEQ ID NO: 1559975
cagggacccugucugauaa

SEQ ID NO: 1567568 - RNA, 19 nt, Artificial Sequence
  Description of Artificial Sequence: Synthetic oligonucleotide
  Antisense strand to SEQ ID NO: 1567567
uuaucagacagggucccug

SEQ ID NO: 1567569 - RNA, 19 nt, Artificial Sequence
  Description of Artificial Sequence: Synthetic oligonucleotide
  Sense strand starting at position 3679 of SEQ ID NO: 1559975
gggacccugucugauaacu

SEQ ID NO: 1567570 - RNA, 19 nt, Artificial Sequence
  Description of Artificial Sequence: Synthetic oligonucleotide
  Antisense strand to SEQ ID NO: 1567569
aguuaucagacaggguccc

SEQ ID NO: 1567571 - RNA, 19 nt, Artificial Sequence
  Description of Artificial Sequence: Synthetic oligonucleotide
  Sense strand starting at position 3687 of SEQ ID NO: 1559975
gucugauaacuguaucuuc

SEQ ID NO: 1567572 - RNA, 19 nt, Artificial Sequence
  Description of Artificial Sequence: Synthetic oligonucleotide
  Antisense strand to SEQ ID NO: 1567571
gaagauacaguuaucagac

SEQ ID NO: 1567573 - RNA, 19 nt, Artificial Sequence
  Description of Artificial Sequence: Synthetic oligonucleotide
  Sense strand starting at position 3728 of SEQ ID NO: 1559975
guaagcagucaauaaaguu

SEQ ID NO: 1567574 - RNA, 19 nt, Artificial Sequence
  Description of Artificial Sequence: Synthetic oligonucleotide
  Antisense strand to SEQ ID NO: 1567573
aacuuuauugacugcuuac

SEQ ID NO: 1567575 - RNA, 19 nt, Artificial Sequence
  Description of Artificial Sequence: Synthetic oligonucleotide
  Sense strand starting at position 3940 of SEQ ID NO: 1559975
guagcacuugccuguaaua

SEQ ID NO: 1567576 - RNA, 19 nt, Artificial Sequence
  Description of Artificial Sequence: Synthetic oligonucleotide
  Antisense strand to SEQ ID NO: 1567575
uauuacaggcaagugcuac

SEQ ID NO: 1567577 - RNA, 19 nt, Artificial Sequence
  Description of Artificial Sequence: Synthetic oligonucleotide
  Sense strand starting at position 272 of SEQ ID NO: 1559976
aaguccucucgggaaguga

SEQ ID NO: 1567578 - RNA, 19 nt, Artificial Sequence
  Description of Artificial Sequence: Synthetic oligonucleotide
  Antisense strand to SEQ ID NO: 1567577
ucacuucccgagaggacuu

SEQ ID NO: 1567579 - RNA, 19 nt, Artificial Sequence
  Description of Artificial Sequence: Synthetic oligonucleotide
  Sense strand starting at position 376 of SEQ ID NO: 1559976
caguuaguuacacguugua

SEQ ID NO: 1567580 - RNA, 19 nt, Artificial Sequence
  Description of Artificial Sequence: Synthetic oligonucleotide
  Antisense strand to SEQ ID NO: 1567579
uacaacguguaacuaacug

SEQ ID NO: 1567581 - RNA, 19 nt, Artificial Sequence
  Description of Artificial Sequence: Synthetic oligonucleotide
  Sense strand starting at position 408 of SEQ ID NO: 1559976
gggagagcuucugagauga

SEQ ID NO: 1567582 - RNA, 19 nt, Artificial Sequence
  Description of Artificial Sequence: Synthetic oligonucleotide
  Antisense strand to SEQ ID NO: 1567581
ucaucucagaagcucuccc

SEQ ID NO: 1567583 - RNA, 19 nt, Artificial Sequence
  Description of Artificial Sequence: Synthetic oligonucleotide
  Sense strand starting at position 410 of SEQ ID NO: 1559976
gagagcuucugagaugaag

SEQ ID NO: 1567584 - RNA, 19 nt, Artificial Sequence
  Description of Artificial Sequence: Synthetic oligonucleotide
  Antisense strand to SEQ ID NO: 1567583
cuucaucucagaagcucuc

SEQ ID NO: 1567585 - RNA, 19 nt, Artificial Sequence
  Description of Artificial Sequence: Synthetic oligonucleotide
  Sense strand starting at position 505 of SEQ ID NO: 1559976
acaccacuuccaggaaagu

SEQ ID NO: 1567586 - RNA, 19 nt, Artificial Sequence
  Description of Artificial Sequence: Synthetic oligonucleotide
  Antisense strand to SEQ ID NO: 1567585
acuuuccuggaaguggugu

SEQ ID NO: 1567587 - RNA, 19 nt, Artificial Sequence
  Description of Artificial Sequence: Synthetic oligonucleotide
  Sense strand starting at position 521 of SEQ ID NO: 1559976
aguguaaagguguaacaau

SEQ ID NO: 1567588 - RNA, 19 nt, Artificial Sequence
  Description of Artificial Sequence: Synthetic oligonucleotide
  Antisense strand to SEQ ID NO: 1567587
auuguuacaccuuuacacu

SEQ ID NO: 1567589 - RNA, 19 nt, Artificial Sequence
  Description of Artificial Sequence: Synthetic oligonucleotide
  Sense strand starting at position 596 of SEQ ID NO: 1559976
ggaagcaagucccuuaacu

SEQ ID NO: 1567590 - RNA, 19 nt, Artificial Sequence
  Description of Artificial Sequence: Synthetic oligonucleotide
  Antisense strand to SEQ ID NO: 1567589
aguuaagggacuugcuucc

SEQ ID NO: 1567591 - RNA, 19 nt, Artificial Sequence
  Description of Artificial Sequence: Synthetic oligonucleotide
  Sense strand starting at position 662 of SEQ ID NO: 1559976
ggacuggugcgguaucaga

SEQ ID NO: 1567592 - RNA, 19 nt, Artificial Sequence
  Description of Artificial Sequence: Synthetic oligonucleotide
  Antisense strand to SEQ ID NO: 1567591
ucugauaccgcaccagucc

SEQ ID NO: 1567593 - RNA, 19 nt, Artificial Sequence
  Description of Artificial Sequence: Synthetic oligonucleotide
  Sense strand starting at position 728 of SEQ ID NO: 1559976
gcaggcagucgcucaagua

SEQ ID NO: 1567594 - RNA, 19 nt, Artificial Sequence
  Description of Artificial Sequence: Synthetic oligonucleotide
  Antisense strand to SEQ ID NO: 1567593
uacuugagcgacugccugc

SEQ ID NO: 1567595 - RNA, 19 nt, Artificial Sequence
  Description of Artificial Sequence: Synthetic oligonucleotide
  Sense strand starting at position 935 of SEQ ID NO: 1559976
ucagguuccuacuugaagu

SEQ ID NO: 1567596 - RNA, 19 nt, Artificial Sequence
  Description of Artificial Sequence: Synthetic oligonucleotide
  Antisense strand to SEQ ID NO: 1567595
acuucaaguaggaaccuga

SEQ ID NO: 1567597 - RNA, 19 nt, Artificial Sequence
  Description of Artificial Sequence: Synthetic oligonucleotide
  Sense strand starting at position 1234 of SEQ ID NO: 1559976
uuuaaucggugauucggaa

SEQ ID NO: 1567598 - RNA, 19 nt, Artificial Sequence
  Description of Artificial Sequence: Synthetic oligonucleotide
  Antisense strand to SEQ ID NO: 1567597
uuccgaaucaccgauuaaa

SEQ ID NO: 1567599 - RNA, 19 nt, Artificial Sequence
  Description of Artificial Sequence: Synthetic oligonucleotide
  Sense strand starting at position 1250 of SEQ ID NO: 1559976
gaaacacacucagguugaa

SEQ ID NO: 1567600 - RNA, 19 nt, Artificial Sequence
  Description of Artificial Sequence: Synthetic oligonucleotide
  Antisense strand to SEQ ID NO: 1567599
uucaaccugaguguguuuc

SEQ ID NO: 1567601 - RNA, 19 nt, Artificial Sequence
  Description of Artificial Sequence: Synthetic oligonucleotide
  Sense strand starting at position 1265 of SEQ ID NO: 1559976
ugaagaagcucugcccaga

SEQ ID NO: 1567602 - RNA, 19 nt, Artificial Sequence
  Description of Artificial Sequence: Synthetic oligonucleotide
  Antisense strand to SEQ ID NO: 1567601
ucugggcagagcuucuuca

SEQ ID NO: 1567603 - RNA, 19 nt, Artificial Sequence
  Description of Artificial Sequence: Synthetic oligonucleotide
  Sense strand starting at position 1334 of SEQ ID NO: 1559976
cgaaucucccucugagaga

SEQ ID NO: 1567604 - RNA, 19 nt, Artificial Sequence
  Description of Artificial Sequence: Synthetic oligonucleotide
  Antisense strand to SEQ ID NO: 1567603
ucucucagagggagauucg

SEQ ID NO: 1567605 - RNA, 19 nt, Artificial Sequence
  Description of Artificial Sequence: Synthetic oligonucleotide
  Sense strand starting at position 1712 of SEQ ID NO: 1559976
gaccaaguccugcagauuc

SEQ ID NO: 1567606 - RNA, 19 nt, Artificial Sequence
  Description of Artificial Sequence: Synthetic oligonucleotide
  Antisense strand to SEQ ID NO: 1567605
gaaucugcaggacuugguc

SEQ ID NO: 1567607 - RNA, 19 nt, Artificial Sequence
  Description of Artificial Sequence: Synthetic oligonucleotide
  Sense strand starting at position 1720 of SEQ ID NO: 1559976
ccugcagauucuugucgaa

SEQ ID NO: 1567608 - RNA, 19 nt, Artificial Sequence
  Description of Artificial Sequence: Synthetic oligonucleotide
  Antisense strand to SEQ ID NO: 1567607
uucgacaagaaucugcagg

SEQ ID NO: 1567609 - RNA, 19 nt, Artificial Sequence
  Description of Artificial Sequence: Synthetic oligonucleotide
  Sense strand starting at position 1722 of SEQ ID NO: 1559976
ugcagauucuugucgaaca

SEQ ID NO: 1567610 - RNA, 19 nt, Artificial Sequence
  Description of Artificial Sequence: Synthetic oligonucleotide
  Antisense strand to SEQ ID NO: 1567609
uguucgacaagaaucugca

SEQ ID NO: 1567611 - RNA, 19 nt, Artificial Sequence
  Description of Artificial Sequence: Synthetic oligonucleotide
  Sense strand starting at position 1723 of SEQ ID NO: 1559976
gcagauucuugucgaacau

SEQ ID NO: 1567612 - RNA, 19 nt, Artificial Sequence
  Description of Artificial Sequence: Synthetic oligonucleotide
  Antisense strand to SEQ ID NO: 1567611
auguucgacaagaaucugc

SEQ ID NO: 1567613 - RNA, 19 nt, Artificial Sequence
  Description of Artificial Sequence: Synthetic oligonucleotide
  Sense strand starting at position 1724 of SEQ ID NO: 1559976
cagauucuugucgaacaug

SEQ ID NO: 1567614 - RNA, 19 nt, Artificial Sequence
  Description of Artificial Sequence: Synthetic oligonucleotide
  Antisense strand to SEQ ID NO: 1567613
cauguucgacaagaaucug

SEQ ID NO: 1567615 - RNA, 19 nt, Artificial Sequence
  Description of Artificial Sequence: Synthetic oligonucleotide
  Sense strand starting at position 2128 of SEQ ID NO: 1559976
cagguaguccaauggaaau

SEQ ID NO: 1567616 - RNA, 19 nt, Artificial Sequence
  Description of Artificial Sequence: Synthetic oligonucleotide
  Antisense strand to SEQ ID NO: 1567615
auuuccauuggacuaccug

SEQ ID NO: 1567617 - RNA, 19 nt, Artificial Sequence
  Description of Artificial Sequence: Synthetic oligonucleotide
  Sense strand starting at position 2130 of SEQ ID NO: 1559976
gguaguccaauggaaaugu

SEQ ID NO: 1567618 - RNA, 19 nt, Artificial Sequence
  Description of Artificial Sequence: Synthetic oligonucleotide
  Antisense strand to SEQ ID NO: 1567617
acauuuccauuggacuacc

SEQ ID NO: 1567619 - RNA, 19 nt, Artificial Sequence
  Description of Artificial Sequence: Synthetic oligonucleotide
  Sense strand starting at position 2349 of SEQ ID NO: 1559976
ccggcaaguucccgaggaa

SEQ ID NO: 1567620 - RNA, 19 nt, Artificial Sequence
  Description of Artificial Sequence: Synthetic oligonucleotide
  Antisense strand to SEQ ID NO: 1567619
uuccucgggaacuugccgg

SEQ ID NO: 1567621 - RNA, 19 nt, Artificial Sequence
  Description of Artificial Sequence: Synthetic oligonucleotide
  Sense strand starting at position 2352 of SEQ ID NO: 1559976
gcaaguucccgaggaagac

SEQ ID NO: 1567622 - RNA, 19 nt, Artificial Sequence
  Description of Artificial Sequence: Synthetic oligonucleotide
  Antisense strand to SEQ ID NO: 1567621
gucuuccucgggaacuugc

SEQ ID NO: 1567623 - RNA, 19 nt, Artificial Sequence
  Description of Artificial Sequence: Synthetic oligonucleotide
  Sense strand starting at position 2377 of SEQ ID NO: 1559976
uccgccuuuccugaaugua

SEQ ID NO: 1567624 - RNA, 19 nt, Artificial Sequence
  Description of Artificial Sequence: Synthetic oligonucleotide
  Antisense strand to SEQ ID NO: 1567623
uacauucaggaaaggcgga

SEQ ID NO: 1567625 - RNA, 19 nt, Artificial Sequence
  Description of Artificial Sequence: Synthetic oligonucleotide
  Sense strand starting at position 2380 of SEQ ID NO: 1559976
gccuuuccugaauguaaua

SEQ ID NO: 1567626 - RNA, 19 nt, Artificial Sequence
  Description of Artificial Sequence: Synthetic oligonucleotide
  Antisense strand to SEQ ID NO: 1567625
uauuacauucaggaaaggc

SEQ ID NO: 1567627 - RNA, 19 nt, Artificial Sequence
  Description of Artificial Sequence: Synthetic oligonucleotide
  Sense strand starting at position 2385 of SEQ ID NO: 1559976
uccugaauguaauagcuga

SEQ ID NO: 1567628 - RNA, 19 nt, Artificial Sequence
  Description of Artificial Sequence: Synthetic oligonucleotide
  Antisense strand to SEQ ID NO: 1567627
ucagcuauuacauucagga

SEQ ID NO: 1567629 - RNA, 19 nt, Artificial Sequence
  Description of Artificial Sequence: Synthetic oligonucleotide
  Sense strand starting at position 2543 of SEQ ID NO: 1559976
ggacuacgacauugucauu

SEQ ID NO: 1567630 - RNA, 19 nt, Artificial Sequence
  Description of Artificial Sequence: Synthetic oligonucleotide
  Antisense strand to SEQ ID NO: 1567629
aaugacaaugucguagucc

SEQ ID NO: 1567631 - RNA, 19 nt, Artificial Sequence
  Description of Artificial Sequence: Synthetic oligonucleotide
  Sense strand starting at position 2617 of SEQ ID NO: 1559976
ugggcaugcagcgguaaau

SEQ ID NO: 1567632 - RNA, 19 nt, Artificial Sequence
  Description of Artificial Sequence: Synthetic oligonucleotide
  Antisense strand to SEQ ID NO: 1567631
auuuaccgcugcaugccca

SEQ ID NO: 1567633 - RNA, 19 nt, Artificial Sequence
  Description of Artificial Sequence: Synthetic oligonucleotide
  Sense strand starting at position 2648 of SEQ ID NO: 1559976
gucccugccuuccgagaua

SEQ ID NO: 1567634 - RNA, 19 nt, Artificial Sequence
  Description of Artificial Sequence: Synthetic oligonucleotide
  Antisense strand to SEQ ID NO: 1567633
uaucucggaaggcagggac

SEQ ID NO: 1567635 - RNA, 19 nt, Artificial Sequence
  Description of Artificial Sequence: Synthetic oligonucleotide
  Sense strand starting at position 2651 of SEQ ID NO: 1559976
ccugccuuccgagauacau

SEQ ID NO: 1567636 - RNA, 19 nt, Artificial Sequence
  Description of Artificial Sequence: Synthetic oligonucleotide
  Antisense strand to SEQ ID NO: 1567635
auguaucucggaaggcagg

SEQ ID NO: 1567637 - RNA, 19 nt, Artificial Sequence
  Description of Artificial Sequence: Synthetic oligonucleotide
  Sense strand starting at position 2660 of SEQ ID NO: 1559976
cgagauacaucauugagau

SEQ ID NO: 1567638 - RNA, 19 nt, Artificial Sequence
  Description of Artificial Sequence: Synthetic oligonucleotide
  Antisense strand to SEQ ID NO: 1567637
aucucaaugauguaucucg

SEQ ID NO: 1567639 - RNA, 19 nt, Artificial Sequence
  Description of Artificial Sequence: Synthetic oligonucleotide
  Sense strand starting at position 2664 of SEQ ID NO: 1559976
auacaucauugagauugua

SEQ ID NO: 1567640 - RNA, 19 nt, Artificial Sequence
  Description of Artificial Sequence: Synthetic oligonucleotide
  Antisense strand to SEQ ID NO: 1567639
uacaaucucaaugauguau

SEQ ID NO: 1567641 - RNA, 19 nt, Artificial Sequence
  Description of Artificial Sequence: Synthetic oligonucleotide
  Sense strand starting at position 3002 of SEQ ID NO: 1559976
gaaagaaaguaaucgcaau

SEQ ID NO: 1567642 - RNA, 19 nt, Artificial Sequence
  Description of Artificial Sequence: Synthetic oligonucleotide
  Antisense strand to SEQ ID NO: 1567641
auugcgauuacuuucuuuc

SEQ ID NO: 1567643 - RNA, 19 nt, Artificial Sequence
  Description of Artificial Sequence: Synthetic oligonucleotide
  Sense strand starting at position 3426 of SEQ ID NO: 1559976
cccagaguuuaggaagaau

SEQ ID NO: 1567644 - RNA, 19 nt, Artificial Sequence
  Description of Artificial Sequence: Synthetic oligonucleotide
  Antisense strand to SEQ ID NO: 1567643
auucuuccuaaacucuggg

SEQ ID NO: 1567645 - RNA, 19 nt, Artificial Sequence
  Description of Artificial Sequence: Synthetic oligonucleotide
  Sense strand starting at position 3474 of SEQ ID NO: 1559976
agagcaauauagucagaca

SEQ ID NO: 1567646 - RNA, 19 nt, Artificial Sequence
  Description of Artificial Sequence: Synthetic oligonucleotide
  Antisense strand to SEQ ID NO: 1567645
ugucugacuauauugcucu

SEQ ID NO: 1567647 - RNA, 19 nt, Artificial Sequence
  Description of Artificial Sequence: Synthetic oligonucleotide
  Sense strand starting at position 3721 of SEQ ID NO: 1559976
gcaggagaaugacaugagu

SEQ ID NO: 1567648 - RNA, 19 nt, Artificial Sequence
  Description of Artificial Sequence: Synthetic oligonucleotide
  Antisense strand to SEQ ID NO: 1567647
acucaugucauucuccugc

SEQ ID NO: 1567649 - RNA, 19 nt, Artificial Sequence
  Description of Artificial Sequence: Synthetic oligonucleotide
  Sense strand starting at position 138 of SEQ ID NO: 1559977
gagucagaauccucaucug

SEQ ID NO: 1567650 - RNA, 19 nt, Artificial Sequence
  Description of Artificial Sequence: Synthetic oligonucleotide
  Antisense strand to SEQ ID NO: 1567649
cagaugaggauucugacuc

SEQ ID NO: 1567651 - RNA, 19 nt, Artificial Sequence
  Description of Artificial Sequence: Synthetic oligonucleotide
  Sense strand starting at position 141 of SEQ ID NO: 1559977
ucagaauccucaucugggu

SEQ ID NO: 1567652 - RNA, 19 nt, Artificial Sequence
  Description of Artificial Sequence: Synthetic oligonucleotide
  Antisense strand to SEQ ID NO: 1567651
acccagaugaggauucuga

SEQ ID NO: 1567653 - RNA, 19 nt, Artificial Sequence
  Description of Artificial Sequence: Synthetic oligonucleotide
  Sense strand starting at position 228 of SEQ ID NO: 1559977
cauuccucgcagugcaaga

SEQ ID NO: 1567654 - RNA, 19 nt, Artificial Sequence
  Description of Artificial Sequence: Synthetic oligonucleotide
  Antisense strand to SEQ ID NO: 1567653
ucuugcacugcgaggaaug

SEQ ID NO: 1567655 - RNA, 19 nt, Artificial Sequence
  Description of Artificial Sequence: Synthetic oligonucleotide
  Sense strand starting at position 414 of SEQ ID NO: 1559977
uccugaaggcuugacucau

SEQ ID NO: 1567656 - RNA, 19 nt, Artificial Sequence
  Description of Artificial Sequence: Synthetic oligonucleotide
  Antisense strand to SEQ ID NO: 1567655
augagucaagccuucagga

SEQ ID NO: 1567657 - RNA, 19 nt, Artificial Sequence
  Description of Artificial Sequence: Synthetic oligonucleotide
  Sense strand starting at position 420 of SEQ ID NO: 1559977
aggcuugacucaucaaguu

SEQ ID NO: 1567658 - RNA, 19 nt, Artificial Sequence
  Description of Artificial Sequence: Synthetic oligonucleotide
  Antisense strand to SEQ ID NO: 1567657
aacuugaugagucaagccu

SEQ ID NO: 1567659 - RNA, 19 nt, Artificial Sequence
  Description of Artificial Sequence: Synthetic oligonucleotide
  Sense strand starting at position 637 of SEQ ID NO: 1559977
gagagucagcacugagguu

SEQ ID NO: 1567660 - RNA, 19 nt, Artificial Sequence
  Description of Artificial Sequence: Synthetic oligonucleotide
  Antisense strand to SEQ ID NO: 1567659
aaccucagugcugacucuc

SEQ ID NO: 1567661 - RNA, 19 nt, Artificial Sequence
  Description of Artificial Sequence: Synthetic oligonucleotide
  Sense strand starting at position 2166 of SEQ ID NO: 1559977
accuguuuguucuccugca

SEQ ID NO: 1567662 - RNA, 19 nt, Artificial Sequence
  Description of Artificial Sequence: Synthetic oligonucleotide
  Antisense strand to SEQ ID NO: 1567661
ugcaggagaacaaacaggu

SEQ ID NO: 1567663 - RNA, 19 nt, Artificial Sequence
  Description of Artificial Sequence: Synthetic oligonucleotide
  Sense strand starting at position 2167 of SEQ ID NO: 1559977
ccuguuuguucuccugcaa

SEQ ID NO: 1567664 - RNA, 19 nt, Artificial Sequence
  Description of Artificial Sequence: Synthetic oligonucleotide
  Antisense strand to SEQ ID NO: 1567663
uugcaggagaacaaacagg

SEQ ID NO: 1567665 - RNA, 19 nt, Artificial Sequence
  Description of Artificial Sequence: Synthetic oligonucleotide
  Sense strand starting at position 2278 of SEQ ID NO: 1559977
agaagugugagaggugguu

SEQ ID NO: 1567666 - RNA, 19 nt, Artificial Sequence
  Description of Artificial Sequence: Synthetic oligonucleotide
  Antisense strand to SEQ ID NO: 1567665
aaccaccucucacacuucu

SEQ ID NO: 1567667 - RNA, 19 nt, Artificial Sequence
  Description of Artificial Sequence: Synthetic oligonucleotide
  Sense strand starting at position 2352 of SEQ ID NO: 1559977
uucgguuuggcucacagua

SEQ ID NO: 1567668 - RNA, 19 nt, Artificial Sequence
  Description of Artificial Sequence: Synthetic oligonucleotide
  Antisense strand to SEQ ID NO: 1567667
uacugugagccaaaccgaa

SEQ ID NO: 1567669 - RNA, 19 nt, Artificial Sequence
  Description of Artificial Sequence: Synthetic oligonucleotide
  Sense strand starting at position 2486 of SEQ ID NO: 1559977
aggauuaaauuagaucaag

SEQ ID NO: 1567670 - RNA, 19 nt, Artificial Sequence
  Description of Artificial Sequence: Synthetic oligonucleotide
  Antisense strand to SEQ ID NO: 1567669
cuugaucuaauuuaauccu

SEQ ID NO: 1567671 - RNA, 19 nt, Artificial Sequence
  Description of Artificial Sequence: Synthetic oligonucleotide
  Sense strand starting at position 2494 of SEQ ID NO: 1559977
auuagaucaagcggguuaa

SEQ ID NO: 1567672 - RNA, 19 nt, Artificial Sequence
  Description of Artificial Sequence: Synthetic oligonucleotide
  Antisense strand to SEQ ID NO: 1567671
uuaacccgcuugaucuaau

SEQ ID NO: 1567673 - RNA, 19 nt, Artificial Sequence
  Description of Artificial Sequence: Synthetic oligonucleotide
  Sense strand starting at position 2498 of SEQ ID NO: 1559977
gaucaagcggguuaaggau

SEQ ID NO: 1567674 - RNA, 19 nt, Artificial Sequence
  Description of Artificial Sequence: Synthetic oligonucleotide
  Antisense strand to SEQ ID NO: 1567673
auccuuaacccgcuugauc

SEQ ID NO: 1567675 - RNA, 19 nt, Artificial Sequence
  Description of Artificial Sequence: Synthetic oligonucleotide
  Sense strand starting at position 2669 of SEQ ID NO: 1559977
gcccuacuggaguauauua

SEQ ID NO: 1567676 - RNA, 19 nt, Artificial Sequence
  Description of Artificial Sequence: Synthetic oligonucleotide
  Antisense strand to SEQ ID NO: 1567675
uaauauacuccaguagggc

SEQ ID NO: 1567677 - RNA, 19 nt, Artificial Sequence
  Description of Artificial Sequence: Synthetic oligonucleotide
  Sense strand starting at position 2676 of SEQ ID NO: 1559977
uggaguauauuagacucau

SEQ ID NO: 1567678 - RNA, 19 nt, Artificial Sequence
  Description of Artificial Sequence: Synthetic oligonucleotide
  Antisense strand to SEQ ID NO: 1567677
augagucuaauauacucca

SEQ ID NO: 1567679 - RNA, 19 nt, Artificial Sequence
  Description of Artificial Sequence: Synthetic oligonucleotide
  Sense strand starting at position 2804 of SEQ ID NO: 1559977
gcaagaagucaaugaaaua

SEQ ID NO: 1567680 - RNA, 19 nt, Artificial Sequence
  Description of Artificial Sequence: Synthetic oligonucleotide
  Antisense strand to SEQ ID NO: 1567679
uauuucauugacuucuugc

SEQ ID NO: 1567681 - RNA, 19 nt, Artificial Sequence
  Description of Artificial Sequence: Synthetic oligonucleotide
  Sense strand starting at position 2816 of SEQ ID NO: 1559977
ugaaauaucccuugaacgc

SEQ ID NO: 1567682 - RNA, 19 nt, Artificial Sequence
  Description of Artificial Sequence: Synthetic oligonucleotide
  Antisense strand to SEQ ID NO: 1567681
gcguucaagggauauuuca

SEQ ID NO: 1567683 - RNA, 19 nt, Artificial Sequence
  Description of Artificial Sequence: Synthetic oligonucleotide
  Sense strand starting at position 2838 of SEQ ID NO: 1559977
cuccuauaguaacugugua

SEQ ID NO: 1567684 - RNA, 19 nt, Artificial Sequence
  Description of Artificial Sequence: Synthetic oligonucleotide
  Antisense strand to SEQ ID NO: 1567683
uacacaguuacuauaggag

SEQ ID NO: 1567685 - RNA, 19 nt, Artificial Sequence
  Description of Artificial Sequence: Synthetic oligonucleotide
  Sense strand starting at position 2980 of SEQ ID NO: 1559977
ugacgucuuccggaaacgu

SEQ ID NO: 1567686 - RNA, 19 nt, Artificial Sequence
  Description of Artificial Sequence: Synthetic oligonucleotide
  Antisense strand to SEQ ID NO: 1567685
acguuuccggaagacguca

SEQ ID NO: 1567687 - RNA, 19 nt, Artificial Sequence
  Description of Artificial Sequence: Synthetic oligonucleotide
  Sense strand starting at position 3316 of SEQ ID NO: 1559977
ggcgucuggcucggagaua

SEQ ID NO: 1567688 - RNA, 19 nt, Artificial Sequence
  Description of Artificial Sequence: Synthetic oligonucleotide
  Antisense strand to SEQ ID NO: 1567687
uaucuccgagccagacgcc

SEQ ID NO: 1567689 - RNA, 19 nt, Artificial Sequence
  Description of Artificial Sequence: Synthetic oligonucleotide
  Sense strand starting at position 3327 of SEQ ID NO: 1559977
cggagauacuguagcgauu

SEQ ID NO: 1567690 - RNA, 19 nt, Artificial Sequence
  Description of Artificial Sequence: Synthetic oligonucleotide
  Antisense strand to SEQ ID NO: 1567689
aaucgcuacaguaucuccg

SEQ ID NO: 1567691 - RNA, 19 nt, Artificial Sequence
  Description of Artificial Sequence: Synthetic oligonucleotide
  Sense strand starting at position 3506 of SEQ ID NO: 1559977
ccuccaaaucgcuggguaa

SEQ ID NO: 1567692 - RNA, 19 nt, Artificial Sequence
  Description of Artificial Sequence: Synthetic oligonucleotide
  Antisense strand to SEQ ID NO: 1567691
uuacccagcgauuuggagg

SEQ ID NO: 1567693 - RNA, 19 nt, Artificial Sequence
  Description of Artificial Sequence: Synthetic oligonucleotide
  Sense strand starting at position 3518 of SEQ ID NO: 1559977
uggguaaccuuggccaaga

SEQ ID NO: 1567694 - RNA, 19 nt, Artificial Sequence
  Description of Artificial Sequence: Synthetic oligonucleotide
  Antisense strand to SEQ ID NO: 1567693
ucuuggccaagguuaccca

SEQ ID NO: 1567695 - RNA, 19 nt, Artificial Sequence
  Description of Artificial Sequence: Synthetic oligonucleotide
  Sense strand starting at position 3528 of SEQ ID NO: 1559977
uggccaagacguuaccaaa

SEQ ID NO: 1567696 - RNA, 19 nt, Artificial Sequence
  Description of Artificial Sequence: Synthetic oligonucleotide
  Antisense strand to SEQ ID NO: 1567695
uuugguaacgucuuggcca

SEQ ID NO: 1567697 - RNA, 19 nt, Artificial Sequence
  Description of Artificial Sequence: Synthetic oligonucleotide
  Sense strand starting at position 3557 of SEQ ID NO: 1559977
aauuauggagcccguuuaa

SEQ ID NO: 1567698 - RNA, 19 nt, Artificial Sequence
  Description of Artificial Sequence: Synthetic oligonucleotide
  Antisense strand to SEQ ID NO: 1567697
uuaaacgggcuccauaauu

SEQ ID NO: 1567699 - RNA, 19 nt, Artificial Sequence
  Description of Artificial Sequence: Synthetic oligonucleotide
  Sense strand starting at position 3609 of SEQ ID NO: 1559977
uaagguuuagcuggauaca

SEQ ID NO: 1567700 - RNA, 19 nt, Artificial Sequence
  Description of Artificial Sequence: Synthetic oligonucleotide
  Antisense strand to SEQ ID NO: 1567699
uguauccagcuaaaccuua

SEQ ID NO: 1567701 - RNA, 19 nt, Artificial Sequence
  Description of Artificial Sequence: Synthetic oligonucleotide
  Sense strand starting at position 3634 of SEQ ID NO: 1559977
ccugaucuccuuuguugaa

SEQ ID NO: 1567702 - RNA, 19 nt, Artificial Sequence
  Description of Artificial Sequence: Synthetic oligonucleotide
  Antisense strand to SEQ ID NO: 1567701
uucaacaaaggagaucagg

SEQ ID NO: 1567703 - RNA, 19 nt, Artificial Sequence
  Description of Artificial Sequence: Synthetic oligonucleotide
  Sense strand starting at position 3635 of SEQ ID NO: 1559977
cugaucuccuuuguugaaa

SEQ ID NO: 1567704 - RNA, 19 nt, Artificial Sequence
  Description of Artificial Sequence: Synthetic oligonucleotide
  Antisense strand to SEQ ID NO: 1567703
uuucaacaaaggagaucag

SEQ ID NO: 1567705 - RNA, 19 nt, Artificial Sequence
  Description of Artificial Sequence: Synthetic oligonucleotide
  Sense strand starting at position 3636 of SEQ ID NO: 1559977
ugaucuccuuuguugaaag

SEQ ID NO: 1567706 - RNA, 19 nt, Artificial Sequence
  Description of Artificial Sequence: Synthetic oligonucleotide
  Antisense strand to SEQ ID NO: 1567705
cuuucaacaaaggagauca

SEQ ID NO: 1567707 - RNA, 19 nt, Artificial Sequence
  Description of Artificial Sequence: Synthetic oligonucleotide
  Sense strand starting at position 3664 of SEQ ID NO: 1559977
guccaauguucggccuuaa

SEQ ID NO: 1567708 - RNA, 19 nt, Artificial Sequence
  Description of Artificial Sequence: Synthetic oligonucleotide
  Antisense strand to SEQ ID NO: 1567707
uuaaggccgaacauuggac

SEQ ID NO: 1567709 - RNA, 19 nt, Artificial Sequence
  Description of Artificial Sequence: Synthetic oligonucleotide
  Sense strand starting at position 3668 of SEQ ID NO: 1559977
aauguucggccuuaaagac

SEQ ID NO: 1567710 - RNA, 19 nt, Artificial Sequence
  Description of Artificial Sequence: Synthetic oligonucleotide
  Antisense strand to SEQ ID NO: 1567709
gucuuuaaggccgaacauu

SEQ ID NO: 1567711 - RNA, 19 nt, Artificial Sequence
  Description of Artificial Sequence: Synthetic oligonucleotide
  Sense strand starting at position 3711 of SEQ ID NO: 1559977
cuugaaugacuuggucauu

SEQ ID NO: 1567712 - RNA, 19 nt, Artificial Sequence
  Description of Artificial Sequence: Synthetic oligonucleotide
  Antisense strand to SEQ ID NO: 1567711
aaugaccaagucauucaag

SEQ ID NO: 1567713 - RNA, 19 nt, Artificial Sequence
  Description of Artificial Sequence: Synthetic oligonucleotide
  Sense strand starting at position 3727 of SEQ ID NO: 1559977
auuccaagcaucgguguua

SEQ ID NO: 1567714 - RNA, 19 nt, Artificial Sequence
  Description of Artificial Sequence: Synthetic oligonucleotide
  Antisense strand to SEQ ID NO: 1567713
uaacaccgaugcuuggaau

SEQ ID NO: 1567715 - RNA, 19 nt, Artificial Sequence
  Description of Artificial Sequence: Synthetic oligonucleotide
  Sense strand starting at position 3778 of SEQ ID NO: 1559977
acuuaaugcuguguccaaa

SEQ ID NO: 1567716 - RNA, 19 nt, Artificial Sequence
  Description of Artificial Sequence: Synthetic oligonucleotide
  Antisense strand to SEQ ID NO: 1567715
uuuggacacagcauuaagu

SEQ ID NO: 1567717 - RNA, 19 nt, Artificial Sequence
  Description of Artificial Sequence: Synthetic oligonucleotide
  Sense strand starting at position 3804 of SEQ ID NO: 1559977
uaaagugauuucgaggcca

SEQ ID NO: 1567718 - RNA, 19 nt, Artificial Sequence
  Description of Artificial Sequence: Synthetic oligonucleotide
  Antisense strand to SEQ ID NO: 1567717
uggccucgaaaucacuuua

SEQ ID NO: 1567719 - RNA, 19 nt, Artificial Sequence
  Description of Artificial Sequence: Synthetic oligonucleotide
  Sense strand starting at position 3838 of SEQ ID NO: 1559977
accuuuauucccggcacuu

SEQ ID NO: 1567720 - RNA, 19 nt, Artificial Sequence
  Description of Artificial Sequence: Synthetic oligonucleotide
  Antisense strand to SEQ ID NO: 1567719
aagugccgggaauaaaggu

SEQ ID NO: 1567721 - RNA, 19 nt, Artificial Sequence
  Description of Artificial Sequence: Synthetic oligonucleotide
  Sense strand starting at position 3876 of SEQ ID NO: 1559977
gaucgauugcuugaaccca

SEQ ID NO: 1567722 - RNA, 19 nt, Artificial Sequence
  Description of Artificial Sequence: Synthetic oligonucleotide
  Antisense strand to SEQ ID NO: 1567721
uggguucaagcaaucgauc

SEQ ID NO: 1567723 - RNA, 19 nt, Artificial Sequence
  Description of Artificial Sequence: Synthetic oligonucleotide
  Sense strand starting at position 3923 of SEQ ID NO: 1559977
gcaggacccuguuuguaua

SEQ ID NO: 1567724 - RNA, 19 nt, Artificial Sequence
  Description of Artificial Sequence: Synthetic oligonucleotide
  Antisense strand to SEQ ID NO: 1567723
uauacaaacaggguccugc

SEQ ID NO: 1567725 - RNA, 19 nt, Artificial Sequence
  Description of Artificial Sequence: Synthetic oligonucleotide
  Sense strand starting at position 3924 of SEQ ID NO: 1559977
caggacccuguuuguauaa

SEQ ID NO: 1567726 - RNA, 19 nt, Artificial Sequence
  Description of Artificial Sequence: Synthetic oligonucleotide
  Antisense strand to SEQ ID NO: 1567725
uuauacaaacaggguccug

SEQ ID NO: 1567727 - RNA, 19 nt, Artificial Sequence
  Description of Artificial Sequence: Synthetic oligonucleotide
  Sense strand starting at position 3925 of SEQ ID NO: 1559977
aggacccuguuuguauaaa

SEQ ID NO: 1567728 - RNA, 19 nt, Artificial Sequence
  Description of Artificial Sequence: Synthetic oligonucleotide
  Antisense strand to SEQ ID NO: 1567727
uuuauacaaacaggguccu

SEQ ID NO: 1567729 - RNA, 19 nt, Artificial Sequence
  Description of Artificial Sequence: Synthetic oligonucleotide
  Sense strand starting at position 225 of SEQ ID NO: 1559978
cccgucauuuguucucuga

SEQ ID NO: 1567730 - RNA, 19 nt, Artificial Sequence
  Description of Artificial Sequence: Synthetic oligonucleotide
  Antisense strand to SEQ ID NO: 1567729
ucagagaacaaaugacggg

SEQ ID NO: 1567731 - RNA, 19 nt, Artificial Sequence
  Description of Artificial Sequence: Synthetic oligonucleotide
  Sense strand starting at position 439 of SEQ ID NO: 1559978
ccauuuggcuguucccaga

SEQ ID NO: 1567732 - RNA, 19 nt, Artificial Sequence
  Description of Artificial Sequence: Synthetic oligonucleotide
  Antisense strand to SEQ ID NO: 1567731
ucugggaacagccaaaugg

SEQ ID NO: 1567733 - RNA, 19 nt, Artificial Sequence
  Description of Artificial Sequence: Synthetic oligonucleotide
  Sense strand starting at position 874 of SEQ ID NO: 1559978
cgugguucuucucagcuga

SEQ ID NO: 1567734 - RNA, 19 nt, Artificial Sequence
  Description of Artificial Sequence: Synthetic oligonucleotide
  Antisense strand to SEQ ID NO: 1567733
ucagcugagaagaaccacg

SEQ ID NO: 1567735 - RNA, 19 nt, Artificial Sequence
  Description of Artificial Sequence: Synthetic oligonucleotide
  Sense strand starting at position 924 of SEQ ID NO: 1559978
cccacauucgguggucauu

SEQ ID NO: 1567736 - RNA, 19 nt, Artificial Sequence
  Description of Artificial Sequence: Synthetic oligonucleotide
  Antisense strand to SEQ ID NO: 1567735
aaugaccaccgaauguggg

SEQ ID NO: 1567737 - RNA, 19 nt, Artificial Sequence
  Description of Artificial Sequence: Synthetic oligonucleotide
  Sense strand starting at position 1084 of SEQ ID NO: 1559978
gggagcuuuaaacgucaca

SEQ ID NO: 1567738 - RNA, 19 nt, Artificial Sequence
  Description of Artificial Sequence: Synthetic oligonucleotide
  Antisense strand to SEQ ID NO: 1567737
ugugacguuuaaagcuccc

SEQ ID NO: 1567739 - RNA, 19 nt, Artificial Sequence
  Description of Artificial Sequence: Synthetic oligonucleotide
  Sense strand starting at position 1087 of SEQ ID NO: 1559978
agcuuuaaacgucacaagu

SEQ ID NO: 1567740 - RNA, 19 nt, Artificial Sequence
  Description of Artificial Sequence: Synthetic oligonucleotide
  Antisense strand to SEQ ID NO: 1567739
acuugugacguuuaaagcu

SEQ ID NO: 1567741 - RNA, 19 nt, Artificial Sequence
  Description of Artificial Sequence: Synthetic oligonucleotide
  Sense strand starting at position 1089 of SEQ ID NO: 1559978
cuuuaaacgucacaaguga

SEQ ID NO: 1567742 - RNA, 19 nt, Artificial Sequence
  Description of Artificial Sequence: Synthetic oligonucleotide
  Antisense strand to SEQ ID NO: 1567741
ucacuugugacguuuaaag

SEQ ID NO: 1567743 - RNA, 19 nt, Artificial Sequence
  Description of Artificial Sequence: Synthetic oligonucleotide
  Sense strand starting at position 1354 of SEQ ID NO: 1559978
gggccuuccugagcgauca

SEQ ID NO: 1567744 - RNA, 19 nt, Artificial Sequence
  Description of Artificial Sequence: Synthetic oligonucleotide
  Antisense strand to SEQ ID NO: 1567743
ugaucgcucaggaaggccc

SEQ ID NO: 1567745 - RNA, 19 nt, Artificial Sequence
  Description of Artificial Sequence: Synthetic oligonucleotide
  Sense strand starting at position 2051 of SEQ ID NO: 1559978
gagggaugcgggugagaca

SEQ ID NO: 1567746 - RNA, 19 nt, Artificial Sequence
  Description of Artificial Sequence: Synthetic oligonucleotide
  Antisense strand to SEQ ID NO: 1567745
ugucucacccgcaucccuc

SEQ ID NO: 1567747 - RNA, 19 nt, Artificial Sequence
  Description of Artificial Sequence: Synthetic oligonucleotide
  Sense strand starting at position 2252 of SEQ ID NO: 1559978
acuuuauugcagggugcaa

SEQ ID NO: 1567748 - RNA, 19 nt, Artificial Sequence
  Description of Artificial Sequence: Synthetic oligonucleotide
  Antisense strand to SEQ ID NO: 1567747
uugcacccugcaauaaagu

SEQ ID NO: 1567749 - RNA, 19 nt, Artificial Sequence
  Description of Artificial Sequence: Synthetic oligonucleotide
  Sense strand starting at position 2320 of SEQ ID NO: 1559978
acaucaaauccuggauguu

SEQ ID NO: 1567750 - RNA, 19 nt, Artificial Sequence
  Description of Artificial Sequence: Synthetic oligonucleotide
  Antisense strand to SEQ ID NO: 1567749
aacauccaggauuugaugu

SEQ ID NO: 1567751 - RNA, 19 nt, Artificial Sequence
  Description of Artificial Sequence: Synthetic oligonucleotide
  Sense strand starting at position 2323 of SEQ ID NO: 1559978
ucaaauccuggauguuaca

SEQ ID NO: 1567752 - RNA, 19 nt, Artificial Sequence
  Description of Artificial Sequence: Synthetic oligonucleotide
  Antisense strand to SEQ ID NO: 1567751
uguaacauccaggauuuga

SEQ ID NO: 1567753 - RNA, 19 nt, Artificial Sequence
  Description of Artificial Sequence: Synthetic oligonucleotide
  Sense strand starting at position 2584 of SEQ ID NO: 1559978
agcgucagauccuccugua

SEQ ID NO: 1567754 - RNA, 19 nt, Artificial Sequence
  Description of Artificial Sequence: Synthetic oligonucleotide
  Antisense strand to SEQ ID NO: 1567753
uacaggaggaucugacgcu

SEQ ID NO: 1567755 - RNA, 19 nt, Artificial Sequence
  Description of Artificial Sequence: Synthetic oligonucleotide
  Sense strand starting at position 2587 of SEQ ID NO: 1559978
gucagauccuccuguaacu

SEQ ID NO: 1567756 - RNA, 19 nt, Artificial Sequence
  Description of Artificial Sequence: Synthetic oligonucleotide
  Antisense strand to SEQ ID NO: 1567755
aguuacaggaggaucugac

SEQ ID NO: 1567757 - RNA, 19 nt, Artificial Sequence
  Description of Artificial Sequence: Synthetic oligonucleotide
  Sense strand starting at position 2645 of SEQ ID NO: 1559978
ucuguucucugucucucaa

SEQ ID NO: 1567758 - RNA, 19 nt, Artificial Sequence
  Description of Artificial Sequence: Synthetic oligonucleotide
  Antisense strand to SEQ ID NO: 1567757
uugagagacagagaacaga

SEQ ID NO: 1567759 - RNA, 19 nt, Artificial Sequence
  Description of Artificial Sequence: Synthetic oligonucleotide
  Sense strand starting at position 3041 of SEQ ID NO: 1559978
gugggaagguccgaguauu

SEQ ID NO: 1567760 - RNA, 19 nt, Artificial Sequence
  Description of Artificial Sequence: Synthetic oligonucleotide
  Antisense strand to SEQ ID NO: 1567759
aauacucggaccuucccac

SEQ ID NO: 1567761 - RNA, 19 nt, Artificial Sequence
  Description of Artificial Sequence: Synthetic oligonucleotide
  Sense strand starting at position 3699 of SEQ ID NO: 1559978
gccucagacuccucaguaa

SEQ ID NO: 1567762 - RNA, 19 nt, Artificial Sequence
  Description of Artificial Sequence: Synthetic oligonucleotide
  Antisense strand to SEQ ID NO: 1567761
uuacugaggagucugaggc

SEQ ID NO: 1567763 - RNA, 19 nt, Artificial Sequence
  Description of Artificial Sequence: Synthetic oligonucleotide
  Sense strand starting at position 162 of SEQ ID NO: 1559979
cugugcuguuucuuucuga

SEQ ID NO: 1567764 - RNA, 19 nt, Artificial Sequence
  Description of Artificial Sequence: Synthetic oligonucleotide
  Antisense strand to SEQ ID NO: 1567763
ucagaaagaaacagcacag

SEQ ID NO: 1567765 - RNA, 19 nt, Artificial Sequence
  Description of Artificial Sequence: Synthetic oligonucleotide
  Sense strand starting at position 163 of SEQ ID NO: 1559979
ugugcuguuucuuucugaa

SEQ ID NO: 1567766 - RNA, 19 nt, Artificial Sequence
  Description of Artificial Sequence: Synthetic oligonucleotide
  Antisense strand to SEQ ID NO: 1567765
uucagaaagaaacagcaca

SEQ ID NO: 1567767 - RNA, 19 nt, Artificial Sequence
  Description of Artificial Sequence: Synthetic oligonucleotide
  Sense strand starting at position 166 of SEQ ID NO: 1559979
gcuguuucuuucugaaggu

SEQ ID NO: 1567768 - RNA, 19 nt, Artificial Sequence
  Description of Artificial Sequence: Synthetic oligonucleotide
  Antisense strand to SEQ ID NO: 1567767
accuucagaaagaaacagc

SEQ ID NO: 1567769 - RNA, 19 nt, Artificial Sequence
  Description of Artificial Sequence: Synthetic oligonucleotide
  Sense strand starting at position 293 of SEQ ID NO: 1559979
acucucccuucccguuaua

SEQ ID NO: 1567770 - RNA, 19 nt, Artificial Sequence
  Description of Artificial Sequence: Synthetic oligonucleotide
  Antisense strand to SEQ ID NO: 1567769
uauaacgggaagggagagu

SEQ ID NO: 1567771 - RNA, 19 nt, Artificial Sequence
  Description of Artificial Sequence: Synthetic oligonucleotide
  Sense strand starting at position 377 of SEQ ID NO: 1559979
ccaucuugcugguccuuaa

SEQ ID NO: 1567772 - RNA, 19 nt, Artificial Sequence
  Description of Artificial Sequence: Synthetic oligonucleotide
  Antisense strand to SEQ ID NO: 1567771
uuaaggaccagcaagaugg

SEQ ID NO: 1567773 - RNA, 19 nt, Artificial Sequence
  Description of Artificial Sequence: Synthetic oligonucleotide
  Sense strand starting at position 559 of SEQ ID NO: 1559979
cauaguugcgccucuuuau

SEQ ID NO: 1567774 - RNA, 19 nt, Artificial Sequence
  Description of Artificial Sequence: Synthetic oligonucleotide
  Antisense strand to SEQ ID NO: 1567773
auaaagaggcgcaacuaug

SEQ ID NO: 1567775 - RNA, 19 nt, Artificial Sequence
  Description of Artificial Sequence: Synthetic oligonucleotide
  Sense strand starting at position 560 of SEQ ID NO: 1559979
auaguugcgccucuuuauu

SEQ ID NO: 1567776 - RNA, 19 nt, Artificial Sequence
  Description of Artificial Sequence: Synthetic oligonucleotide
  Antisense strand to SEQ ID NO: 1567775
aauaaagaggcgcaacuau

SEQ ID NO: 1567777 - RNA, 19 nt, Artificial Sequence
  Description of Artificial Sequence: Synthetic oligonucleotide
  Sense strand starting at position 966 of SEQ ID NO: 1559979
ggcaccguucccugggaaa

SEQ ID NO: 1567778 - RNA, 19 nt, Artificial Sequence
  Description of Artificial Sequence: Synthetic oligonucleotide
  Antisense strand to SEQ ID NO: 1567777
uuucccagggaacggugcc

SEQ ID NO: 1567779 - RNA, 19 nt, Artificial Sequence
  Description of Artificial Sequence: Synthetic oligonucleotide
  Sense strand starting at position 968 of SEQ ID NO: 1559979
caccguucccugggaaaca

SEQ ID NO: 1567780 - RNA, 19 nt, Artificial Sequence
  Description of Artificial Sequence: Synthetic oligonucleotide
  Antisense strand to SEQ ID NO: 1567779
uguuucccagggaacggug

SEQ ID NO: 1567781 - RNA, 19 nt, Artificial Sequence
  Description of Artificial Sequence: Synthetic oligonucleotide
  Sense strand starting at position 1043 of SEQ ID NO: 1559979
ccgggauucuuucugccuu

SEQ ID NO: 1567782 - RNA, 19 nt, Artificial Sequence
  Description of Artificial Sequence: Synthetic oligonucleotide
  Antisense strand to SEQ ID NO: 1567781
aaggcagaaagaaucccgg

SEQ ID NO: 1567783 - RNA, 19 nt, Artificial Sequence
  Description of Artificial Sequence: Synthetic oligonucleotide
  Sense strand starting at position 1058 of SEQ ID NO: 1559979
ccuuguugccgcggagaca

SEQ ID NO: 1567784 - RNA, 19 nt, Artificial Sequence
  Description of Artificial Sequence: Synthetic oligonucleotide
  Antisense strand to SEQ ID NO: 1567783
ugucuccgcggcaacaagg

SEQ ID NO: 1567785 - RNA, 19 nt, Artificial Sequence
  Description of Artificial Sequence: Synthetic oligonucleotide
  Sense strand starting at position 1375 of SEQ ID NO: 1559979
ucuggauuauuggaucuaa

SEQ ID NO: 1567786 - RNA, 19 nt, Artificial Sequence
  Description of Artificial Sequence: Synthetic oligonucleotide
  Antisense strand to SEQ ID NO: 1567785
uuagauccaauaauccaga

SEQ ID NO: 1567787 - RNA, 19 nt, Artificial Sequence
  Description of Artificial Sequence: Synthetic oligonucleotide
  Sense strand starting at position 1503 of SEQ ID NO: 1559979
caguuccuaugcucgagau

SEQ ID NO: 1567788 - RNA, 19 nt, Artificial Sequence
  Description of Artificial Sequence: Synthetic oligonucleotide
  Antisense strand to SEQ ID NO: 1567787
aucucgagcauaggaacug

SEQ ID NO: 1567789 - RNA, 19 nt, Artificial Sequence
  Description of Artificial Sequence: Synthetic oligonucleotide
  Sense strand starting at position 1507 of SEQ ID NO: 1559979
uccuaugcucgagauggga

SEQ ID NO: 1567790 - RNA, 19 nt, Artificial Sequence
  Description of Artificial Sequence: Synthetic oligonucleotide
  Antisense strand to SEQ ID NO: 1567789
ucccaucucgagcauagga

SEQ ID NO: 1567791 - RNA, 19 nt, Artificial Sequence
  Description of Artificial Sequence: Synthetic oligonucleotide
  Sense strand starting at position 1628 of SEQ ID NO: 1559979
gcgcuuucugcccuggaca

SEQ ID NO: 1567792 - RNA, 19 nt, Artificial Sequence
  Description of Artificial Sequence: Synthetic oligonucleotide
  Antisense strand to SEQ ID NO: 1567791
uguccagggcagaaagcgc

SEQ ID NO: 1567793 - RNA, 19 nt, Artificial Sequence
  Description of Artificial Sequence: Synthetic oligonucleotide
  Sense strand starting at position 1629 of SEQ ID NO: 1559979
cgcuuucugcccuggacau

SEQ ID NO: 1567794 - RNA, 19 nt, Artificial Sequence
  Description of Artificial Sequence: Synthetic oligonucleotide
  Antisense strand to SEQ ID NO: 1567793
auguccagggcagaaagcg

SEQ ID NO: 1567795 - RNA, 19 nt, Artificial Sequence
  Description of Artificial Sequence: Synthetic oligonucleotide
  Sense strand starting at position 2014 of SEQ ID NO: 1559979
ccuuccuggucaggacaau

SEQ ID NO: 1567796 - RNA, 19 nt, Artificial Sequence
  Description of Artificial Sequence: Synthetic oligonucleotide
  Antisense strand to SEQ ID NO: 1567795
auuguccugaccaggaagg

SEQ ID NO: 1567797 - RNA, 19 nt, Artificial Sequence
  Description of Artificial Sequence: Synthetic oligonucleotide
  Sense strand starting at position 2275 of SEQ ID NO: 1559979
aguacauuccucuguugag

SEQ ID NO: 1567798 - RNA, 19 nt, Artificial Sequence
  Description of Artificial Sequence: Synthetic oligonucleotide
  Antisense strand to SEQ ID NO: 1567797
cucaacagaggaauguacu

SEQ ID NO: 1567799 - RNA, 19 nt, Artificial Sequence
  Description of Artificial Sequence: Synthetic oligonucleotide
  Sense strand starting at position 2372 of SEQ ID NO: 1559979
ccagaagucugggcaccuu

SEQ ID NO: 1567800 - RNA, 19 nt, Artificial Sequence
  Description of Artificial Sequence: Synthetic oligonucleotide
  Antisense strand to SEQ ID NO: 1567799
aaggugcccagacuucugg

SEQ ID NO: 1567801 - RNA, 19 nt, Artificial Sequence
  Description of Artificial Sequence: Synthetic oligonucleotide
  Sense strand starting at position 2692 of SEQ ID NO: 1559979
acuuguuugucuccucuaa

SEQ ID NO: 1567802 - RNA, 19 nt, Artificial Sequence
  Description of Artificial Sequence: Synthetic oligonucleotide
  Antisense strand to SEQ ID NO: 1567801
uuagaggagacaaacaagu

SEQ ID NO: 1567803 - RNA, 19 nt, Artificial Sequence
  Description of Artificial Sequence: Synthetic oligonucleotide
  Sense strand starting at position 2694 of SEQ ID NO: 1559979
uuguuugucuccucuaaug

SEQ ID NO: 1567804 - RNA, 19 nt, Artificial Sequence
  Description of Artificial Sequence: Synthetic oligonucleotide
  Antisense strand to SEQ ID NO: 1567803
cauuagaggagacaaacaa

SEQ ID NO: 1567805 - RNA, 19 nt, Artificial Sequence
  Description of Artificial Sequence: Synthetic oligonucleotide
  Sense strand starting at position 2696 of SEQ ID NO: 1559979
guuugucuccucuaaugag

SEQ ID NO: 1567806 - RNA, 19 nt, Artificial Sequence
  Description of Artificial Sequence: Synthetic oligonucleotide
  Antisense strand to SEQ ID NO: 1567805
cucauuagaggagacaaac

SEQ ID NO: 1567807 - RNA, 19 nt, Artificial Sequence
  Description of Artificial Sequence: Synthetic oligonucleotide
  Sense strand starting at position 2699 of SEQ ID NO: 1559979
ugucuccucuaaugagagu

SEQ ID NO: 1567808 - RNA, 19 nt, Artificial Sequence
  Description of Artificial Sequence: Synthetic oligonucleotide
  Antisense strand to SEQ ID NO: 1567807
acucucauuagaggagaca

SEQ ID NO: 1567809 - RNA, 19 nt, Artificial Sequence
  Description of Artificial Sequence: Synthetic oligonucleotide
  Sense strand starting at position 2752 of SEQ ID NO: 1559979
cccugucacuugugugcaa

SEQ ID NO: 1567810 - RNA, 19 nt, Artificial Sequence
  Description of Artificial Sequence: Synthetic oligonucleotide
  Antisense strand to SEQ ID NO: 1567809
uugcacacaagugacaggg

SEQ ID NO: 1567811 - RNA, 19 nt, Artificial Sequence
  Description of Artificial Sequence: Synthetic oligonucleotide
  Sense strand starting at position 2754 of SEQ ID NO: 1559979
cugucacuugugugcaacu

SEQ ID NO: 1567812 - RNA, 19 nt, Artificial Sequence
  Description of Artificial Sequence: Synthetic oligonucleotide
  Antisense strand to SEQ ID NO: 1567811
aguugcacacaagugacag

SEQ ID NO: 1567813 - RNA, 19 nt, Artificial Sequence
  Description of Artificial Sequence: Synthetic oligonucleotide
  Sense strand starting at position 2778 of SEQ ID NO: 1559979
gacaucuaugcgugugucu

SEQ ID NO: 1567814 - RNA, 19 nt, Artificial Sequence
  Description of Artificial Sequence: Synthetic oligonucleotide
  Antisense strand to SEQ ID NO: 1567813
agacacacgcauagauguc

SEQ ID NO: 1567815 - RNA, 19 nt, Artificial Sequence
  Description of Artificial Sequence: Synthetic oligonucleotide
  Sense strand starting at position 2785 of SEQ ID NO: 1559979
augcgugugucugugcaua

SEQ ID NO: 1567816 - RNA, 19 nt, Artificial Sequence
  Description of Artificial Sequence: Synthetic oligonucleotide
  Antisense strand to SEQ ID NO: 1567815
uaugcacagacacacgcau

SEQ ID NO: 1567817 - RNA, 19 nt, Artificial Sequence
  Description of Artificial Sequence: Synthetic oligonucleotide
  Sense strand starting at position 2787 of SEQ ID NO: 1559979
gcgugugucugugcauaca

SEQ ID NO: 1567818 - RNA, 19 nt, Artificial Sequence
  Description of Artificial Sequence: Synthetic oligonucleotide
  Antisense strand to SEQ ID NO: 1567817
uguaugcacagacacacgc

SEQ ID NO: 1567819 - RNA, 19 nt, Artificial Sequence
  Description of Artificial Sequence: Synthetic oligonucleotide
  Sense strand starting at position 2828 of SEQ ID NO: 1559979
guuugcaacucaugugugu

SEQ ID NO: 1567820 - RNA, 19 nt, Artificial Sequence
  Description of Artificial Sequence: Synthetic oligonucleotide
  Antisense strand to SEQ ID NO: 1567819
acacacaugaguugcaaac

SEQ ID NO: 1567821 - RNA, 19 nt, Artificial Sequence
  Description of Artificial Sequence: Synthetic oligonucleotide
  Sense strand starting at position 3170 of SEQ ID NO: 1559979
gccagaucuugucucaaga

SEQ ID NO: 1567822 - RNA, 19 nt, Artificial Sequence
  Description of Artificial Sequence: Synthetic oligonucleotide
  Antisense strand to SEQ ID NO: 1567821
ucuugagacaagaucuggc

SEQ ID NO: 1567823 - RNA, 19 nt, Artificial Sequence
  Description of Artificial Sequence: Synthetic oligonucleotide
  Sense strand starting at position 3204 of SEQ ID NO: 1559979
ccuagagugcuuugcaggu

SEQ ID NO: 1567824 - RNA, 19 nt, Artificial Sequence
  Description of Artificial Sequence: Synthetic oligonucleotide
  Antisense strand to SEQ ID NO: 1567823
accugcaaagcacucuagg

SEQ ID NO: 1567825 - RNA, 19 nt, Artificial Sequence
  Description of Artificial Sequence: Synthetic oligonucleotide
  Sense strand starting at position 3208 of SEQ ID NO: 1559979
gagugcuuugcagguagca

SEQ ID NO: 1567826 - RNA, 19 nt, Artificial Sequence
  Description of Artificial Sequence: Synthetic oligonucleotide
  Antisense strand to SEQ ID NO: 1567825
ugcuaccugcaaagcacuc

SEQ ID NO: 1567827 - RNA, 19 nt, Artificial Sequence
  Description of Artificial Sequence: Synthetic oligonucleotide
  Sense strand starting at position 3321 of SEQ ID NO: 1559979
cuugguggagagugauaau

SEQ ID NO: 1567828 - RNA, 19 nt, Artificial Sequence
  Description of Artificial Sequence: Synthetic oligonucleotide
  Antisense strand to SEQ ID NO: 1567827
auuaucacucuccaccaag

SEQ ID NO: 1567829 - RNA, 19 nt, Artificial Sequence
  Description of Artificial Sequence: Synthetic oligonucleotide
  Sense strand starting at position 3330 of SEQ ID NO: 1559979
gagugauaaugccaguaga

SEQ ID NO: 1567830 - RNA, 19 nt, Artificial Sequence
  Description of Artificial Sequence: Synthetic oligonucleotide
  Antisense strand to SEQ ID NO: 1567829
ucuacuggcauuaucacuc

SEQ ID NO: 1567831 - RNA, 19 nt, Artificial Sequence
  Description of Artificial Sequence: Synthetic oligonucleotide
  Sense strand starting at position 3333 of SEQ ID NO: 1559979
ugauaaugccaguagacuc

SEQ ID NO: 1567832 - RNA, 19 nt, Artificial Sequence
  Description of Artificial Sequence: Synthetic oligonucleotide
  Antisense strand to SEQ ID NO: 1567831
gagucuacuggcauuauca

SEQ ID NO: 1567833 - RNA, 19 nt, Artificial Sequence
  Description of Artificial Sequence: Synthetic oligonucleotide
  Sense strand starting at position 166 of SEQ ID NO: 1559980
cagggaaacuguccuugaa

SEQ ID NO: 1567834 - RNA, 19 nt, Artificial Sequence
  Description of Artificial Sequence: Synthetic oligonucleotide
  Antisense strand to SEQ ID NO: 1567833
uucaaggacaguuucccug

SEQ ID NO: 1567835 - RNA, 19 nt, Artificial Sequence
  Description of Artificial Sequence: Synthetic oligonucleotide
  Sense strand starting at position 168 of SEQ ID NO: 1559980
gggaaacuguccuugaagu

SEQ ID NO: 1567836 - RNA, 19 nt, Artificial Sequence
  Description of Artificial Sequence: Synthetic oligonucleotide
  Antisense strand to SEQ ID NO: 1567835
acuucaaggacaguuuccc

SEQ ID NO: 1567837 - RNA, 19 nt, Artificial Sequence
  Description of Artificial Sequence: Synthetic oligonucleotide
  Sense strand starting at position 169 of SEQ ID NO: 1559980
ggaaacuguccuugaaguc

SEQ ID NO: 1567838 - RNA, 19 nt, Artificial Sequence
  Description of Artificial Sequence: Synthetic oligonucleotide
  Antisense strand to SEQ ID NO: 1567837
gacuucaaggacaguuucc

SEQ ID NO: 1567839 - RNA, 19 nt, Artificial Sequence
  Description of Artificial Sequence: Synthetic oligonucleotide
  Sense strand starting at position 170 of SEQ ID NO: 1559980
gaaacuguccuugaagucu

SEQ ID NO: 1567840 - RNA, 19 nt, Artificial Sequence
  Description of Artificial Sequence: Synthetic oligonucleotide
  Antisense strand to SEQ ID NO: 1567839
agacuucaaggacaguuuc

SEQ ID NO: 1567841 - RNA, 19 nt, Artificial Sequence
  Description of Artificial Sequence: Synthetic oligonucleotide
  Sense strand starting at position 185 of SEQ ID NO: 1559980
gucugagcaccuugagauc

SEQ ID NO: 1567842 - RNA, 19 nt, Artificial Sequence
  Description of Artificial Sequence: Synthetic oligonucleotide
  Antisense strand to SEQ ID NO: 1567841
gaucucaaggugcucagac

SEQ ID NO: 1567843 - RNA, 19 nt, Artificial Sequence
  Description of Artificial Sequence: Synthetic oligonucleotide
  Sense strand starting at position 337 of SEQ ID NO: 1559980
aaccgcaucuuggcagaaa

SEQ ID NO: 1567844 - RNA, 19 nt, Artificial Sequence
  Description of Artificial Sequence: Synthetic oligonucleotide
  Antisense strand to SEQ ID NO: 1567843
uuucugccaagaugcgguu

SEQ ID NO: 1567845 - RNA, 19 nt, Artificial Sequence
  Description of Artificial Sequence: Synthetic oligonucleotide
  Sense strand starting at position 1382 of SEQ ID NO: 1559980
ggcucaagcugcugggaau

SEQ ID NO: 1567846 - RNA, 19 nt, Artificial Sequence
  Description of Artificial Sequence: Synthetic oligonucleotide
  Antisense strand to SEQ ID NO: 1567845
auucccagcagcuugagcc

SEQ ID NO: 1567847 - RNA, 19 nt, Artificial Sequence
  Description of Artificial Sequence: Synthetic oligonucleotide
  Sense strand starting at position 1383 of SEQ ID NO: 1559980
gcucaagcugcugggaauu

SEQ ID NO: 1567848 - RNA, 19 nt, Artificial Sequence
  Description of Artificial Sequence: Synthetic oligonucleotide
  Antisense strand to SEQ ID NO: 1567847
aauucccagcagcuugagc

SEQ ID NO: 1567849 - RNA, 19 nt, Artificial Sequence
  Description of Artificial Sequence: Synthetic oligonucleotide
  Sense strand starting at position 1517 of SEQ ID NO: 1559980
uagugcucuccugcgcaga

SEQ ID NO: 1567850 - RNA, 19 nt, Artificial Sequence
  Description of Artificial Sequence: Synthetic oligonucleotide
  Antisense strand to SEQ ID NO: 1567849
ucugcgcaggagagcacua

SEQ ID NO: 1567851 - RNA, 19 nt, Artificial Sequence
  Description of Artificial Sequence: Synthetic oligonucleotide
  Sense strand starting at position 1518 of SEQ ID NO: 1559980
agugcucuccugcgcagau

SEQ ID NO: 1567852 - RNA, 19 nt, Artificial Sequence
  Description of Artificial Sequence: Synthetic oligonucleotide
  Antisense strand to SEQ ID NO: 1567851
aucugcgcaggagagcacu

SEQ ID NO: 1567853 - RNA, 19 nt, Artificial Sequence
  Description of Artificial Sequence: Synthetic oligonucleotide
  Sense strand starting at position 1519 of SEQ ID NO: 1559980
gugcucuccugcgcagauu

SEQ ID NO: 1567854 - RNA, 19 nt, Artificial Sequence
  Description of Artificial Sequence: Synthetic oligonucleotide
  Antisense strand to SEQ ID NO: 1567853
aaucugcgcaggagagcac

SEQ ID NO: 1567855 - RNA, 19 nt, Artificial Sequence
  Description of Artificial Sequence: Synthetic oligonucleotide
  Sense strand starting at position 1878 of SEQ ID NO: 1559980
uugaguuucuugcagagug

SEQ ID NO: 1567856 - RNA, 19 nt, Artificial Sequence
  Description of Artificial Sequence: Synthetic oligonucleotide
  Antisense strand to SEQ ID NO: 1567855
cacucugcaagaaacucaa

SEQ ID NO: 1567857 - RNA, 19 nt, Artificial Sequence
  Description of Artificial Sequence: Synthetic oligonucleotide
  Sense strand starting at position 1880 of SEQ ID NO: 1559980
gaguuucuugcagagugua

SEQ ID NO: 1567858 - RNA, 19 nt, Artificial Sequence
  Description of Artificial Sequence: Synthetic oligonucleotide
  Antisense strand to SEQ ID NO: 1567857
uacacucugcaagaaacuc

SEQ ID NO: 1567859 - RNA, 19 nt, Artificial Sequence
  Description of Artificial Sequence: Synthetic oligonucleotide
  Sense strand starting at position 2264 of SEQ ID NO: 1559980
uuccucagacgcugaguua

SEQ ID NO: 1567860 - RNA, 19 nt, Artificial Sequence
  Description of Artificial Sequence: Synthetic oligonucleotide
  Antisense strand to SEQ ID NO: 1567859
uaacucagcgucugaggaa

SEQ ID NO: 1567861 - RNA, 19 nt, Artificial Sequence
  Description of Artificial Sequence: Synthetic oligonucleotide
  Sense strand starting at position 2265 of SEQ ID NO: 1559980
uccucagacgcugaguuaa

SEQ ID NO: 1567862 - RNA, 19 nt, Artificial Sequence
  Description of Artificial Sequence: Synthetic oligonucleotide
  Antisense strand to SEQ ID NO: 1567861
uuaacucagcgucugagga

SEQ ID NO: 1567863 - RNA, 19 nt, Artificial Sequence
  Description of Artificial Sequence: Synthetic oligonucleotide
  Sense strand starting at position 2310 of SEQ ID NO: 1559980
gggcaagauuccugucuca

SEQ ID NO: 1567864 - RNA, 19 nt, Artificial Sequence
  Description of Artificial Sequence: Synthetic oligonucleotide
  Antisense strand to SEQ ID NO: 1567863
ugagacaggaaucuugccc

SEQ ID NO: 1567865 - RNA, 19 nt, Artificial Sequence
  Description of Artificial Sequence: Synthetic oligonucleotide
  Sense strand starting at position 2346 of SEQ ID NO: 1559980
gugagcaaucccuguuccu

SEQ ID NO: 1567866 - RNA, 19 nt, Artificial Sequence
  Description of Artificial Sequence: Synthetic oligonucleotide
  Antisense strand to SEQ ID NO: 1567865
aggaacagggauugcucac

SEQ ID NO: 1567867 - RNA, 19 nt, Artificial Sequence
  Description of Artificial Sequence: Synthetic oligonucleotide
  Sense strand starting at position 2899 of SEQ ID NO: 1559980
gcgugccaccuccaauuua

SEQ ID NO: 1567868 - RNA, 19 nt, Artificial Sequence
  Description of Artificial Sequence: Synthetic oligonucleotide
  Antisense strand to SEQ ID NO: 1567867
uaaauuggagguggcacgc

SEQ ID NO: 1567869 - RNA, 19 nt, Artificial Sequence
  Description of Artificial Sequence: Synthetic oligonucleotide
  Sense strand starting at position 2941 of SEQ ID NO: 1559980
cccagaccaccgugauauu

SEQ ID NO: 1567870 - RNA, 19 nt, Artificial Sequence
  Description of Artificial Sequence: Synthetic oligonucleotide
  Antisense strand to SEQ ID NO: 1567869
aauaucacgguggucuggg

SEQ ID NO: 1567871 - RNA, 19 nt, Artificial Sequence
  Description of Artificial Sequence: Synthetic oligonucleotide
  Sense strand starting at position 2950 of SEQ ID NO: 1559980
ccgugauauucucugggcu

SEQ ID NO: 1567872 - RNA, 19 nt, Artificial Sequence
  Description of Artificial Sequence: Synthetic oligonucleotide
  Antisense strand to SEQ ID NO: 1567871
agcccagagaauaucacgg

SEQ ID NO: 1567873 - RNA, 19 nt, Artificial Sequence
  Description of Artificial Sequence: Synthetic oligonucleotide
  Sense strand starting at position 2952 of SEQ ID NO: 1559980
gugauauucucugggcucu

SEQ ID NO: 1567874 - RNA, 19 nt, Artificial Sequence
  Description of Artificial Sequence: Synthetic oligonucleotide
  Antisense strand to SEQ ID NO: 1567873
agagcccagagaauaucac

SEQ ID NO: 1567875 - RNA, 19 nt, Artificial Sequence
  Description of Artificial Sequence: Synthetic oligonucleotide
  Sense strand starting at position 3015 of SEQ ID NO: 1559980
ucgccuuagcuggaugaca

SEQ ID NO: 1567876 - RNA, 19 nt, Artificial Sequence
  Description of Artificial Sequence: Synthetic oligonucleotide
  Antisense strand to SEQ ID NO: 1567875
ugucauccagcuaaggcga

SEQ ID NO: 1567877 - RNA, 19 nt, Artificial Sequence
  Description of Artificial Sequence: Synthetic oligonucleotide
  Sense strand starting at position 3355 of SEQ ID NO: 1559980
cugcaaagcucugcgugua

SEQ ID NO: 1567878 - RNA, 19 nt, Artificial Sequence
  Description of Artificial Sequence: Synthetic oligonucleotide
  Antisense strand to SEQ ID NO: 1567877
uacacgcagagcuuugcag

SEQ ID NO: 1567879 - RNA, 19 nt, Artificial Sequence
  Description of Artificial Sequence: Synthetic oligonucleotide
  Sense strand starting at position 3356 of SEQ ID NO: 1559980
ugcaaagcucugcguguau

SEQ ID NO: 1567880 - RNA, 19 nt, Artificial Sequence
  Description of Artificial Sequence: Synthetic oligonucleotide
  Antisense strand to SEQ ID NO: 1567879
auacacgcagagcuuugca

SEQ ID NO: 1567881 - RNA, 19 nt, Artificial Sequence
  Description of Artificial Sequence: Synthetic oligonucleotide
  Sense strand starting at position 3358 of SEQ ID NO: 1559980
caaagcucugcguguaugu

SEQ ID NO: 1567882 - RNA, 19 nt, Artificial Sequence
  Description of Artificial Sequence: Synthetic oligonucleotide
  Antisense strand to SEQ ID NO: 1567881
acauacacgcagagcuuug

SEQ ID NO: 1567883 - RNA, 19 nt, Artificial Sequence
  Description of Artificial Sequence: Synthetic oligonucleotide
  Sense strand starting at position 3637 of SEQ ID NO: 1559980
acgugucagccuggcagua

SEQ ID NO: 1567884 - RNA, 19 nt, Artificial Sequence
  Description of Artificial Sequence: Synthetic oligonucleotide
  Antisense strand to SEQ ID NO: 1567883
uacugccaggcugacacgu

SEQ ID NO: 1567885 - RNA, 19 nt, Artificial Sequence
  Description of Artificial Sequence: Synthetic oligonucleotide
  Sense strand starting at position 475 of SEQ ID NO: 1559981
aggcuuucuugagcaccua

SEQ ID NO: 1567886 - RNA, 19 nt, Artificial Sequence
  Description of Artificial Sequence: Synthetic oligonucleotide
  Antisense strand to SEQ ID NO: 1567885
uaggugcucaagaaagccu

SEQ ID NO: 1567887 - RNA, 19 nt, Artificial Sequence
  Description of Artificial Sequence: Synthetic oligonucleotide
  Sense strand starting at position 476 of SEQ ID NO: 1559981
ggcuuucuugagcaccuaa

SEQ ID NO: 1567888 - RNA, 19 nt, Artificial Sequence
  Description of Artificial Sequence: Synthetic oligonucleotide
  Antisense strand to SEQ ID NO: 1567887
uuaggugcucaagaaagcc

SEQ ID NO: 1567889 - RNA, 19 nt, Artificial Sequence
  Description of Artificial Sequence: Synthetic oligonucleotide
  Sense strand starting at position 648 of SEQ ID NO: 1559981
ugcaucuccucacugaguu

SEQ ID NO: 1567890 - RNA, 19 nt, Artificial Sequence
  Description of Artificial Sequence: Synthetic oligonucleotide
  Antisense strand to SEQ ID NO: 1567889
aacucagugaggagaugca

SEQ ID NO: 1567891 - RNA, 19 nt, Artificial Sequence
  Description of Artificial Sequence: Synthetic oligonucleotide
  Sense strand starting at position 664 of SEQ ID NO: 1559981
guucucaccugcucuauga

SEQ ID NO: 1567892 - RNA, 19 nt, Artificial Sequence
  Description of Artificial Sequence: Synthetic oligonucleotide
  Antisense strand to SEQ ID NO: 1567891
ucauagagcaggugagaac

SEQ ID NO: 1567893 - RNA, 19 nt, Artificial Sequence
  Description of Artificial Sequence: Synthetic oligonucleotide
  Sense strand starting at position 666 of SEQ ID NO: 1559981
ucucaccugcucuaugaga

SEQ ID NO: 1567894 - RNA, 19 nt, Artificial Sequence
  Description of Artificial Sequence: Synthetic oligonucleotide
  Antisense strand to SEQ ID NO: 1567893
ucucauagagcaggugaga

SEQ ID NO: 1567895 - RNA, 19 nt, Artificial Sequence
  Description of Artificial Sequence: Synthetic oligonucleotide
  Sense strand starting at position 668 of SEQ ID NO: 1559981
ucaccugcucuaugagaga

SEQ ID NO: 1567896 - RNA, 19 nt, Artificial Sequence
  Description of Artificial Sequence: Synthetic oligonucleotide
  Antisense strand to SEQ ID NO: 1567895
ucucucauagagcagguga

SEQ ID NO: 1567897 - RNA, 19 nt, Artificial Sequence
  Description of Artificial Sequence: Synthetic oligonucleotide
  Sense strand starting at position 801 of SEQ ID NO: 1559981
gcaaauggucuacaauucu

SEQ ID NO: 1567898 - RNA, 19 nt, Artificial Sequence
  Description of Artificial Sequence: Synthetic oligonucleotide
  Antisense strand to SEQ ID NO: 1567897
agaauuguagaccauuugc

SEQ ID NO: 1567899 - RNA, 19 nt, Artificial Sequence
  Description of Artificial Sequence: Synthetic oligonucleotide
  Sense strand starting at position 1042 of SEQ ID NO: 1559981
gacaucaagugauccguuu

SEQ ID NO: 1567900 - RNA, 19 nt, Artificial Sequence
  Description of Artificial Sequence: Synthetic oligonucleotide
  Antisense strand to SEQ ID NO: 1567899
aaacggaucacuugauguc

SEQ ID NO: 1567901 - RNA, 19 nt, Artificial Sequence
  Description of Artificial Sequence: Synthetic oligonucleotide
  Sense strand starting at position 1075 of SEQ ID NO: 1559981
aagcguuuggauuacaagu

SEQ ID NO: 1567902 - RNA, 19 nt, Artificial Sequence
  Description of Artificial Sequence: Synthetic oligonucleotide
  Antisense strand to SEQ ID NO: 1567901
acuuguaauccaaacgcuu

SEQ ID NO: 1567903 - RNA, 19 nt, Artificial Sequence
  Description of Artificial Sequence: Synthetic oligonucleotide
  Sense strand starting at position 1585 of SEQ ID NO: 1559981
gcucaaauagucuacaguu

SEQ ID NO: 1567904 - RNA, 19 nt, Artificial Sequence
  Description of Artificial Sequence: Synthetic oligonucleotide
  Antisense strand to SEQ ID NO: 1567903
aacuguagacuauuugagc

SEQ ID NO: 1567905 - RNA, 19 nt, Artificial Sequence
  Description of Artificial Sequence: Synthetic oligonucleotide
  Sense strand starting at position 1593 of SEQ ID NO: 1559981
agucuacaguucuaaauuc

SEQ ID NO: 1567906 - RNA, 19 nt, Artificial Sequence
  Description of Artificial Sequence: Synthetic oligonucleotide
  Antisense strand to SEQ ID NO: 1567905
gaauuuagaacuguagacu

SEQ ID NO: 1567907 - RNA, 19 nt, Artificial Sequence
  Description of Artificial Sequence: Synthetic oligonucleotide
  Sense strand starting at position 1600 of SEQ ID NO: 1559981
aguucuaaauucugugauu

SEQ ID NO: 1567908 - RNA, 19 nt, Artificial Sequence
  Description of Artificial Sequence: Synthetic oligonucleotide
  Antisense strand to SEQ ID NO: 1567907
aaucacagaauuuagaacu

SEQ ID NO: 1567909 - RNA, 19 nt, Artificial Sequence
  Description of Artificial Sequence: Synthetic oligonucleotide
  Sense strand starting at position 1603 of SEQ ID NO: 1559981
ucuaaauucugugauuugu

SEQ ID NO: 1567910 - RNA, 19 nt, Artificial Sequence
  Description of Artificial Sequence: Synthetic oligonucleotide
  Antisense strand to SEQ ID NO: 1567909
acaaaucacagaauuuaga

SEQ ID NO: 1567911 - RNA, 19 nt, Artificial Sequence
  Description of Artificial Sequence: Synthetic oligonucleotide
  Sense strand starting at position 1895 of SEQ ID NO: 1559981
gucccuuucuuaccagacu

SEQ ID NO: 1567912 - RNA, 19 nt, Artificial Sequence
  Description of Artificial Sequence: Synthetic oligonucleotide
  Antisense strand to SEQ ID NO: 1567911
agucugguaagaaagggac

SEQ ID NO: 1567913 - RNA, 19 nt, Artificial Sequence
  Description of Artificial Sequence: Synthetic oligonucleotide
  Sense strand starting at position 2915 of SEQ ID NO: 1559981
cucucugugaccuaggagu

SEQ ID NO: 1567914 - RNA, 19 nt, Artificial Sequence
  Description of Artificial Sequence: Synthetic oligonucleotide
  Antisense strand to SEQ ID NO: 1567913
acuccuaggucacagagag

SEQ ID NO: 1567915 - RNA, 19 nt, Artificial Sequence
  Description of Artificial Sequence: Synthetic oligonucleotide
  Sense strand starting at position 3363 of SEQ ID NO: 1559981
ugccuuuacccuuaugugu

SEQ ID NO: 1567916 - RNA, 19 nt, Artificial Sequence
  Description of Artificial Sequence: Synthetic oligonucleotide
  Antisense strand to SEQ ID NO: 1567915
acacauaaggguaaaggca

SEQ ID NO: 1567917 - RNA, 19 nt, Artificial Sequence
  Description of Artificial Sequence: Synthetic oligonucleotide
  Sense strand starting at position 3451 of SEQ ID NO: 1559981
gagacagagucagucucuu

SEQ ID NO: 1567918 - RNA, 19 nt, Artificial Sequence
  Description of Artificial Sequence: Synthetic oligonucleotide
  Antisense strand to SEQ ID NO: 1567917
aagagacugacucugucuc

SEQ ID NO: 1567919 - RNA, 19 nt, Artificial Sequence
  Description of Artificial Sequence: Synthetic oligonucleotide
  Sense strand starting at position 3904 of SEQ ID NO: 1559981
ugagcuaccucuguggaca

SEQ ID NO: 1567920 - RNA, 19 nt, Artificial Sequence
  Description of Artificial Sequence: Synthetic oligonucleotide
  Antisense strand to SEQ ID NO: 1567919
uguccacagagguagcuca

SEQ ID NO: 1567921 - RNA, 19 nt, Artificial Sequence
  Description of Artificial Sequence: Synthetic oligonucleotide
  Sense strand starting at position 160 of SEQ ID NO: 1559982
ugagcuaccucuguggaca

SEQ ID NO: 1567922 - RNA, 19 nt, Artificial Sequence
  Description of Artificial Sequence: Synthetic oligonucleotide
  Antisense strand to SEQ ID NO: 1567921
uguccacagagguagcuca

SEQ ID NO: 1567923 - RNA, 19 nt, Artificial Sequence
  Description of Artificial Sequence: Synthetic oligonucleotide
  Sense strand starting at position 342 of SEQ ID NO: 1559982
ugccuuggccggugacuua

SEQ ID NO: 1567924 - RNA, 19 nt, Artificial Sequence
  Description of Artificial Sequence: Synthetic oligonucleotide
  Antisense strand to SEQ ID NO: 1567923
uaagucaccggccaaggca

SEQ ID NO: 1567925 - RNA, 19 nt, Artificial Sequence
  Description of Artificial Sequence: Synthetic oligonucleotide
  Sense strand starting at position 407 of SEQ ID NO: 1559982
auaucuaccucaggguuau

SEQ ID NO: 1567926 - RNA, 19 nt, Artificial Sequence
  Description of Artificial Sequence: Synthetic oligonucleotide
  Antisense strand to SEQ ID NO: 1567925
auaacccugagguagauau

SEQ ID NO: 1567927 - RNA, 19 nt, Artificial Sequence
  Description of Artificial Sequence: Synthetic oligonucleotide
  Sense strand starting at position 417 of SEQ ID NO: 1559982
caggguuaucgugagaauu

SEQ ID NO: 1567928 - RNA, 19 nt, Artificial Sequence
  Description of Artificial Sequence: Synthetic oligonucleotide
  Antisense strand to SEQ ID NO: 1567927
aauucucacgauaacccug

SEQ ID NO: 1567929 - RNA, 19 nt, Artificial Sequence
  Description of Artificial Sequence: Synthetic oligonucleotide
  Sense strand starting at position 471 of SEQ ID NO: 1559982
cuugcacauugucuacaua

SEQ ID NO: 1567930 - RNA, 19 nt, Artificial Sequence
  Description of Artificial Sequence: Synthetic oligonucleotide
  Antisense strand to SEQ ID NO: 1567929
uauguagacaaugugcaag

SEQ ID NO: 1567931 - RNA, 19 nt, Artificial Sequence
  Description of Artificial Sequence: Synthetic oligonucleotide
  Sense strand starting at position 474 of SEQ ID NO: 1559982
gcacauugucuacauacgu

SEQ ID NO: 1567932 - RNA, 19 nt, Artificial Sequence
  Description of Artificial Sequence: Synthetic oligonucleotide
  Antisense strand to SEQ ID NO: 1567931
acguauguagacaaugugc

SEQ ID NO: 1567933 - RNA, 19 nt, Artificial Sequence
  Description of Artificial Sequence: Synthetic oligonucleotide
  Sense strand starting at position 478 of SEQ ID NO: 1559982
auugucuacauacguguua

SEQ ID NO: 1567934 - RNA, 19 nt, Artificial Sequence
  Description of Artificial Sequence: Synthetic oligonucleotide
  Antisense strand to SEQ ID NO: 1567933
uaacacguauguagacaau

SEQ ID NO: 1567935 - RNA, 19 nt, Artificial Sequence
  Description of Artificial Sequence: Synthetic oligonucleotide
  Sense strand starting at position 479 of SEQ ID NO: 1559982
uugucuacauacguguuaa

SEQ ID NO: 1567936 - RNA, 19 nt, Artificial Sequence
  Description of Artificial Sequence: Synthetic oligonucleotide
  Antisense strand to SEQ ID NO: 1567935
uuaacacguauguagacaa

SEQ ID NO: 1567937 - RNA, 19 nt, Artificial Sequence
  Description of Artificial Sequence: Synthetic oligonucleotide
  Sense strand starting at position 480 of SEQ ID NO: 1559982
ugucuacauacguguuaaa

SEQ ID NO: 1567938 - RNA, 19 nt, Artificial Sequence
  Description of Artificial Sequence: Synthetic oligonucleotide
  Antisense strand to SEQ ID NO: 1567937
uuuaacacguauguagaca

SEQ ID NO: 1567939 - RNA, 19 nt, Artificial Sequence
  Description of Artificial Sequence: Synthetic oligonucleotide
  Sense strand starting at position 483 of SEQ ID NO: 1559982
cuacauacguguuaaauuu

SEQ ID NO: 1567940 - RNA, 19 nt, Artificial Sequence
  Description of Artificial Sequence: Synthetic oligonucleotide
  Antisense strand to SEQ ID NO: 1567939
aaauuuaacacguauguag

SEQ ID NO: 1567941 - RNA, 19 nt, Artificial Sequence
  Description of Artificial Sequence: Synthetic oligonucleotide
  Sense strand starting at position 697 of SEQ ID NO: 1559982
aucuguuagccaggaugau

SEQ ID NO: 1567942 - RNA, 19 nt, Artificial Sequence
  Description of Artificial Sequence: Synthetic oligonucleotide
  Antisense strand to SEQ ID NO: 1567941
aucauccuggcuaacagau

SEQ ID NO: 1567943 - RNA, 19 nt, Artificial Sequence
  Description of Artificial Sequence: Synthetic oligonucleotide
  Sense strand starting at position 787 of SEQ ID NO: 1559982
cgugccuggcccuguauua

SEQ ID NO: 1567944 - RNA, 19 nt, Artificial Sequence
  Description of Artificial Sequence: Synthetic oligonucleotide
  Antisense strand to SEQ ID NO: 1567943
uaauacagggccaggcacg

SEQ ID NO: 1567945 - RNA, 19 nt, Artificial Sequence
  Description of Artificial Sequence: Synthetic oligonucleotide
  Sense strand starting at position 821 of SEQ ID NO: 1559982
acuggauaaugcugaucua

SEQ ID NO: 1567946 - RNA, 19 nt, Artificial Sequence
  Description of Artificial Sequence: Synthetic oligonucleotide
  Antisense strand to SEQ ID NO: 1567945
uagaucagcauuauccagu

SEQ ID NO: 1567947 - RNA, 19 nt, Artificial Sequence
  Description of Artificial Sequence: Synthetic oligonucleotide
  Sense strand starting at position 2097 of SEQ ID NO: 1559982
guggcaaucagaggucaug

SEQ ID NO: 1567948 - RNA, 19 nt, Artificial Sequence
  Description of Artificial Sequence: Synthetic oligonucleotide
  Antisense strand to SEQ ID NO: 1567947
caugaccucugauugccac

SEQ ID NO: 1567949 - RNA, 19 nt, Artificial Sequence
  Description of Artificial Sequence: Synthetic oligonucleotide
  Sense strand starting at position 2620 of SEQ ID NO: 1559982
gaagaaagcucuuaccgug

SEQ ID NO: 1567950 - RNA, 19 nt, Artificial Sequence
  Description of Artificial Sequence: Synthetic oligonucleotide
  Antisense strand to SEQ ID NO: 1567949
cacgguaagagcuuucuuc

SEQ ID NO: 1567951 - RNA, 19 nt, Artificial Sequence
  Description of Artificial Sequence: Synthetic oligonucleotide
  Sense strand starting at position 2626 of SEQ ID NO: 1559982
agcucuuaccguggagacu

SEQ ID NO: 1567952 - RNA, 19 nt, Artificial Sequence
  Description of Artificial Sequence: Synthetic oligonucleotide
  Antisense strand to SEQ ID NO: 1567951
agucuccacgguaagagcu

SEQ ID NO: 1567953 - RNA, 19 nt, Artificial Sequence
  Description of Artificial Sequence: Synthetic oligonucleotide
  Sense strand starting at position 2644 of SEQ ID NO: 1559982
uggcaauauaggugcucaa

SEQ ID NO: 1567954 - RNA, 19 nt, Artificial Sequence
  Description of Artificial Sequence: Synthetic oligonucleotide
  Antisense strand to SEQ ID NO: 1567953
uugagcaccuauauugcca

SEQ ID NO: 1567955 - RNA, 19 nt, Artificial Sequence
  Description of Artificial Sequence: Synthetic oligonucleotide
  Sense strand starting at position 2647 of SEQ ID NO: 1559982
caauauaggugcucaaaga

SEQ ID NO: 1567956 - RNA, 19 nt, Artificial Sequence
  Description of Artificial Sequence: Synthetic oligonucleotide
  Antisense strand to SEQ ID NO: 1567955
ucuuugagcaccuauauug

SEQ ID NO: 1567957 - RNA, 19 nt, Artificial Sequence
  Description of Artificial Sequence: Synthetic oligonucleotide
  Sense strand starting at position 2657 of SEQ ID NO: 1559982
gcucaaagaucauugcugu

SEQ ID NO: 1567958 - RNA, 19 nt, Artificial Sequence
  Description of Artificial Sequence: Synthetic oligonucleotide
  Antisense strand to SEQ ID NO: 1567957
acagcaaugaucuuugagc

SEQ ID NO: 1567959 - RNA, 19 nt, Artificial Sequence
  Description of Artificial Sequence: Synthetic oligonucleotide
  Sense strand starting at position 2658 of SEQ ID NO: 1559982
cucaaagaucauugcuguu

SEQ ID NO: 1567960 - RNA, 19 nt, Artificial Sequence
  Description of Artificial Sequence: Synthetic oligonucleotide
  Antisense strand to SEQ ID NO: 1567959
aacagcaaugaucuuugag

SEQ ID NO: 1567961 - RNA, 19 nt, Artificial Sequence
  Description of Artificial Sequence: Synthetic oligonucleotide
  Sense strand starting at position 2996 of SEQ ID NO: 1559982
gugucuaauuucuccuagu

SEQ ID NO: 1567962 - RNA, 19 nt, Artificial Sequence
  Description of Artificial Sequence: Synthetic oligonucleotide
  Antisense strand to SEQ ID NO: 1567961
acuaggagaaauuagacac

SEQ ID NO: 1567963 - RNA, 19 nt, Artificial Sequence
  Description of Artificial Sequence: Synthetic oligonucleotide
  Sense strand starting at position 2997 of SEQ ID NO: 1559982
ugucuaauuucuccuaguc

SEQ ID NO: 1567964 - RNA, 19 nt, Artificial Sequence
  Description of Artificial Sequence: Synthetic oligonucleotide
  Antisense strand to SEQ ID NO: 1567963
gacuaggagaaauuagaca

SEQ ID NO: 1567965 - RNA, 19 nt, Artificial Sequence
  Description of Artificial Sequence: Synthetic oligonucleotide
  Sense strand starting at position 3061 of SEQ ID NO: 1559982
aaggguugaugagaggaaa

SEQ ID NO: 1567966 - RNA, 19 nt, Artificial Sequence
  Description of Artificial Sequence: Synthetic oligonucleotide
  Antisense strand to SEQ ID NO: 1567965
uuuccucucaucaacccuu

SEQ ID NO: 1567967 - RNA, 19 nt, Artificial Sequence
  Description of Artificial Sequence: Synthetic oligonucleotide
  Sense strand starting at position 3144 of SEQ ID NO: 1559982
ccaagcauuccuugaguuc

SEQ ID NO: 1567968 - RNA, 19 nt, Artificial Sequence
  Description of Artificial Sequence: Synthetic oligonucleotide
  Antisense strand to SEQ ID NO: 1567967
gaacucaaggaaugcuugg

SEQ ID NO: 1567969 - RNA, 19 nt, Artificial Sequence
  Description of Artificial Sequence: Synthetic oligonucleotide
  Sense strand starting at position 3147 of SEQ ID NO: 1559982
agcauuccuugaguucuca

SEQ ID NO: 1567970 - RNA, 19 nt, Artificial Sequence
  Description of Artificial Sequence: Synthetic oligonucleotide
  Antisense strand to SEQ ID NO: 1567969
ugagaacucaaggaaugcu

SEQ ID NO: 1567971 - RNA, 19 nt, Artificial Sequence
  Description of Artificial Sequence: Synthetic oligonucleotide
  Sense strand starting at position 3186 of SEQ ID NO: 1559982
gggugacucuggcuucaga

SEQ ID NO: 1567972 - RNA, 19 nt, Artificial Sequence
  Description of Artificial Sequence: Synthetic oligonucleotide
  Antisense strand to SEQ ID NO: 1567971
ucugaagccagagucaccc

SEQ ID NO: 1567973 - RNA, 19 nt, Artificial Sequence
  Description of Artificial Sequence: Synthetic oligonucleotide
  Sense strand starting at position 3620 of SEQ ID NO: 1559982
gucccagugccagaaauag

SEQ ID NO: 1567974 - RNA, 19 nt, Artificial Sequence
  Description of Artificial Sequence: Synthetic oligonucleotide
  Antisense strand to SEQ ID NO: 1567973
cuauuucuggcacugggac

SEQ ID NO: 1567975 - RNA, 19 nt, Artificial Sequence
  Description of Artificial Sequence: Synthetic oligonucleotide
  Sense strand starting at position 3626 of SEQ ID NO: 1559982
gugccagaaauagagcauu

SEQ ID NO: 1567976 - RNA, 19 nt, Artificial Sequence
  Description of Artificial Sequence: Synthetic oligonucleotide
  Antisense strand to SEQ ID NO: 1567975
aaugcucuauuucuggcac

SEQ ID NO: 1567977 - RNA, 19 nt, Artificial Sequence
  Description of Artificial Sequence: Synthetic oligonucleotide
  Sense strand starting at position 120 of SEQ ID NO: 1559983
ucgguuuaaucacuuggaa

SEQ ID NO: 1567978 - RNA, 19 nt, Artificial Sequence
  Description of Artificial Sequence: Synthetic oligonucleotide
  Antisense strand to SEQ ID NO: 1567977
uuccaagugauuaaaccga

SEQ ID NO: 1567979 - RNA, 19 nt, Artificial Sequence
  Description of Artificial Sequence: Synthetic oligonucleotide
  Sense strand starting at position 122 of SEQ ID NO: 1559983
gguuuaaucacuuggaaag

SEQ ID NO: 1567980 - RNA, 19 nt, Artificial Sequence
  Description of Artificial Sequence: Synthetic oligonucleotide
  Antisense strand to SEQ ID NO: 1567979
cuuuccaagugauuaaacc

SEQ ID NO: 1567981 - RNA, 19 nt, Artificial Sequence
  Description of Artificial Sequence: Synthetic oligonucleotide
  Sense strand starting at position 123 of SEQ ID NO: 1559983
guuuaaucacuuggaaagc

SEQ ID NO: 1567982 - RNA, 19 nt, Artificial Sequence
  Description of Artificial Sequence: Synthetic oligonucleotide
  Antisense strand to SEQ ID NO: 1567981
gcuuuccaagugauuaaac

SEQ ID NO: 1567983 - RNA, 19 nt, Artificial Sequence
  Description of Artificial Sequence: Synthetic oligonucleotide
  Sense strand starting at position 132 of SEQ ID NO: 1559983
cuuggaaagcauuauguau

SEQ ID NO: 1567984 - RNA, 19 nt, Artificial Sequence
  Description of Artificial Sequence: Synthetic oligonucleotide
  Antisense strand to SEQ ID NO: 1567983
auacauaaugcuuuccaag

SEQ ID NO: 1567985 - RNA, 19 nt, Artificial Sequence
  Description of Artificial Sequence: Synthetic oligonucleotide
  Sense strand starting at position 528 of SEQ ID NO: 1559983
ucacuaucugccugcaaug

SEQ ID NO: 1567986 - RNA, 19 nt, Artificial Sequence
  Description of Artificial Sequence: Synthetic oligonucleotide
  Antisense strand to SEQ ID NO: 1567985
cauugcaggcagauaguga

SEQ ID NO: 1567987 - RNA, 19 nt, Artificial Sequence
  Description of Artificial Sequence: Synthetic oligonucleotide
  Sense strand starting at position 538 of SEQ ID NO: 1559983
ccugcaaugcauuagaaac

SEQ ID NO: 1567988 - RNA, 19 nt, Artificial Sequence
  Description of Artificial Sequence: Synthetic oligonucleotide
  Antisense strand to SEQ ID NO: 1567987
guuucuaaugcauugcagg

SEQ ID NO: 1567989 - RNA, 19 nt, Artificial Sequence
  Description of Artificial Sequence: Synthetic oligonucleotide
  Sense strand starting at position 1249 of SEQ ID NO: 1559983
guugcauuaucugcaacag

SEQ ID NO: 1567990 - RNA, 19 nt, Artificial Sequence
  Description of Artificial Sequence: Synthetic oligonucleotide
  Antisense strand to SEQ ID NO: 1567989
cuguugcagauaaugcaac

SEQ ID NO: 1567991 - RNA, 19 nt, Artificial Sequence
  Description of Artificial Sequence: Synthetic oligonucleotide
  Sense strand starting at position 1505 of SEQ ID NO: 1559983
uguuccauuuaugagcuaa

SEQ ID NO: 1567992 - RNA, 19 nt, Artificial Sequence
  Description of Artificial Sequence: Synthetic oligonucleotide
  Antisense strand to SEQ ID NO: 1567991
uuagcucauaaauggaaca

SEQ ID NO: 1567993 - RNA, 19 nt, Artificial Sequence
  Description of Artificial Sequence: Synthetic oligonucleotide
  Sense strand starting at position 1536 of SEQ ID NO: 1559983
uuuaaaguucuccaaucga

SEQ ID NO: 1567994 - RNA, 19 nt, Artificial Sequence
  Description of Artificial Sequence: Synthetic oligonucleotide
  Antisense strand to SEQ ID NO: 1567993
ucgauuggagaacuuuaaa

SEQ ID NO: 1567995 - RNA, 19 nt, Artificial Sequence
  Description of Artificial Sequence: Synthetic oligonucleotide
  Sense strand starting at position 1619 of SEQ ID NO: 1559983
cccaguaggugcucgauaa

SEQ ID NO: 1567996 - RNA, 19 nt, Artificial Sequence
  Description of Artificial Sequence: Synthetic oligonucleotide
  Antisense strand to SEQ ID NO: 1567995
uuaucgagcaccuacuggg

SEQ ID NO: 1567997 - RNA, 19 nt, Artificial Sequence
  Description of Artificial Sequence: Synthetic oligonucleotide
  Sense strand starting at position 1620 of SEQ ID NO: 1559983
ccaguaggugcucgauaaa

SEQ ID NO: 1567998 - RNA, 19 nt, Artificial Sequence
  Description of Artificial Sequence: Synthetic oligonucleotide
  Antisense strand to SEQ ID NO: 1567997
uuuaucgagcaccuacugg

SEQ ID NO: 1567999 - RNA, 19 nt, Artificial Sequence
  Description of Artificial Sequence: Synthetic oligonucleotide
  Sense strand starting at position 1627 of SEQ ID NO: 1559983
gugcucgauaaaugauagu

SEQ ID NO: 1568000 - RNA, 19 nt, Artificial Sequence
  Description of Artificial Sequence: Synthetic oligonucleotide
  Antisense strand to SEQ ID NO: 1567999
acuaucauuuaucgagcac

SEQ ID NO: 1568001 - RNA, 19 nt, Artificial Sequence
  Description of Artificial Sequence: Synthetic oligonucleotide
  Sense strand starting at position 1633 of SEQ ID NO: 1559983
gauaaaugauagugacaac

SEQ ID NO: 1568002 - RNA, 19 nt, Artificial Sequence
  Description of Artificial Sequence: Synthetic oligonucleotide
  Antisense strand to SEQ ID NO: 1568001
guugucacuaucauuuauc

SEQ ID NO: 1568003 - RNA, 19 nt, Artificial Sequence
  Description of Artificial Sequence: Synthetic oligonucleotide
  Sense strand starting at position 1656 of SEQ ID NO: 1559983
ggaguccugcuauggcuua

SEQ ID NO: 1568004 - RNA, 19 nt, Artificial Sequence
  Description of Artificial Sequence: Synthetic oligonucleotide
  Antisense strand to SEQ ID NO: 1568003
uaagccauagcaggacucc

SEQ ID NO: 1568005 - RNA, 19 nt, Artificial Sequence
  Description of Artificial Sequence: Synthetic oligonucleotide
  Sense strand starting at position 1804 of SEQ ID NO: 1559983
ccgaguagcucuccugaga

SEQ ID NO: 1568006 - RNA, 19 nt, Artificial Sequence
  Description of Artificial Sequence: Synthetic oligonucleotide
  Antisense strand to SEQ ID NO: 1568005
ucucaggagagcuacucgg

SEQ ID NO: 1568007 - RNA, 19 nt, Artificial Sequence
  Description of Artificial Sequence: Synthetic oligonucleotide
  Sense strand starting at position 1807 of SEQ ID NO: 1559983
aguagcucuccugagacua

SEQ ID NO: 1568008 - RNA, 19 nt, Artificial Sequence
  Description of Artificial Sequence: Synthetic oligonucleotide
  Antisense strand to SEQ ID NO: 1568007
uagucucaggagagcuacu

SEQ ID NO: 1568009 - RNA, 19 nt, Artificial Sequence
  Description of Artificial Sequence: Synthetic oligonucleotide
  Sense strand starting at position 1848 of SEQ ID NO: 1559983
ggucccagcucuuucuaga

SEQ ID NO: 1568010 - RNA, 19 nt, Artificial Sequence
  Description of Artificial Sequence: Synthetic oligonucleotide
  Antisense strand to SEQ ID NO: 1568009
ucuagaaagagcugggacc

SEQ ID NO: 1568011 - RNA, 19 nt, Artificial Sequence
  Description of Artificial Sequence: Synthetic oligonucleotide
  Sense strand starting at position 2152 of SEQ ID NO: 1559983
ggacaccucgcccaguaau

SEQ ID NO: 1568012 - RNA, 19 nt, Artificial Sequence
  Description of Artificial Sequence: Synthetic oligonucleotide
  Antisense strand to SEQ ID NO: 1568011
auuacugggcgaggugucc

SEQ ID NO: 1568013 - RNA, 19 nt, Artificial Sequence
  Description of Artificial Sequence: Synthetic oligonucleotide
  Sense strand starting at position 2258 of SEQ ID NO: 1559983
uuuccugugccuggaugaa

SEQ ID NO: 1568014 - RNA, 19 nt, Artificial Sequence
  Description of Artificial Sequence: Synthetic oligonucleotide
  Antisense strand to SEQ ID NO: 1568013
uucauccaggcacaggaaa

SEQ ID NO: 1568015 - RNA, 19 nt, Artificial Sequence
  Description of Artificial Sequence: Synthetic oligonucleotide
  Sense strand starting at position 2780 of SEQ ID NO: 1559983
gguugugaccuugagcaca

SEQ ID NO: 1568016 - RNA, 19 nt, Artificial Sequence
  Description of Artificial Sequence: Synthetic oligonucleotide
  Antisense strand to SEQ ID NO: 1568015
ugugcucaaggucacaacc

SEQ ID NO: 1568017 - RNA, 19 nt, Artificial Sequence
  Description of Artificial Sequence: Synthetic oligonucleotide
  Sense strand starting at position 2885 of SEQ ID NO: 1559983
cgugcuucuggguuaaggu

SEQ ID NO: 1568018 - RNA, 19 nt, Artificial Sequence
  Description of Artificial Sequence: Synthetic oligonucleotide
  Antisense strand to SEQ ID NO: 1568017
accuuaacccagaagcacg

SEQ ID NO: 1568019 - RNA, 19 nt, Artificial Sequence
  Description of Artificial Sequence: Synthetic oligonucleotide
  Sense strand starting at position 2886 of SEQ ID NO: 1559983
gugcuucuggguuaagguu

SEQ ID NO: 1568020 - RNA, 19 nt, Artificial Sequence
  Description of Artificial Sequence: Synthetic oligonucleotide
  Antisense strand to SEQ ID NO: 1568019
aaccuuaacccagaagcac

SEQ ID NO: 1568021 - RNA, 19 nt, Artificial Sequence
  Description of Artificial Sequence: Synthetic oligonucleotide
  Sense strand starting at position 2892 of SEQ ID NO: 1559983
cuggguuaagguuaggauu

SEQ ID NO: 1568022 - RNA, 19 nt, Artificial Sequence
  Description of Artificial Sequence: Synthetic oligonucleotide
  Antisense strand to SEQ ID NO: 1568021
aauccuaaccuuaacccag

SEQ ID NO: 1568023 - RNA, 19 nt, Artificial Sequence
  Description of Artificial Sequence: Synthetic oligonucleotide
  Sense strand starting at position 2980 of SEQ ID NO: 1559983
acuuguccucucugagcau

SEQ ID NO: 1568024 - RNA, 19 nt, Artificial Sequence
  Description of Artificial Sequence: Synthetic oligonucleotide
  Antisense strand to SEQ ID NO: 1568023
augcucagagaggacaagu

SEQ ID NO: 1568025 - RNA, 19 nt, Artificial Sequence
  Description of Artificial Sequence: Synthetic oligonucleotide
  Sense strand starting at position 2983 of SEQ ID NO: 1559983
uguccucucugagcaucaa

SEQ ID NO: 1568026 - RNA, 19 nt, Artificial Sequence
  Description of Artificial Sequence: Synthetic oligonucleotide
  Antisense strand to SEQ ID NO: 1568025
uugaugcucagagaggaca

SEQ ID NO: 1568027 - RNA, 19 nt, Artificial Sequence
  Description of Artificial Sequence: Synthetic oligonucleotide
  Sense strand starting at position 3001 of SEQ ID NO: 1559983
aguuccuuugcucaucaga

SEQ ID NO: 1568028 - RNA, 19 nt, Artificial Sequence
  Description of Artificial Sequence: Synthetic oligonucleotide
  Antisense strand to SEQ ID NO: 1568027
ucugaugagcaaaggaacu

SEQ ID NO: 1568029 - RNA, 19 nt, Artificial Sequence
  Description of Artificial Sequence: Synthetic oligonucleotide
  Sense strand starting at position 3009 of SEQ ID NO: 1559983
ugcucaucagacugggaaa

SEQ ID NO: 1568030 - RNA, 19 nt, Artificial Sequence
  Description of Artificial Sequence: Synthetic oligonucleotide
  Antisense strand to SEQ ID NO: 1568029
uuucccagucugaugagca

SEQ ID NO: 1568031 - RNA, 19 nt, Artificial Sequence
  Description of Artificial Sequence: Synthetic oligonucleotide
  Sense strand starting at position 3037 of SEQ ID NO: 1559983
cggguauguuuggugacaa

SEQ ID NO: 1568032 - RNA, 19 nt, Artificial Sequence
  Description of Artificial Sequence: Synthetic oligonucleotide
  Antisense strand to SEQ ID NO: 1568031
uugucaccaaacauacccg

SEQ ID NO: 1568033 - RNA, 19 nt, Artificial Sequence
  Description of Artificial Sequence: Synthetic oligonucleotide
  Sense strand starting at position 3102 of SEQ ID NO: 1559983
cuauguuagggcuagcaau

SEQ ID NO: 1568034 - RNA, 19 nt, Artificial Sequence
  Description of Artificial Sequence: Synthetic oligonucleotide
  Antisense strand to SEQ ID NO: 1568033
auugcuagcccuaacauag

SEQ ID NO: 1568035 - RNA, 19 nt, Artificial Sequence
  Description of Artificial Sequence: Synthetic oligonucleotide
  Sense strand starting at position 3178 of SEQ ID NO: 1559983
ccagauguuucagaggaga

SEQ ID NO: 1568036 - RNA, 19 nt, Artificial Sequence
  Description of Artificial Sequence: Synthetic oligonucleotide
  Antisense strand to SEQ ID NO: 1568035
ucuccucugaaacaucugg

SEQ ID NO: 1568037 - RNA, 19 nt, Artificial Sequence
  Description of Artificial Sequence: Synthetic oligonucleotide
  Sense strand starting at position 3191 of SEQ ID NO: 1559983
aggagaaacccgugguuca

SEQ ID NO: 1568038 - RNA, 19 nt, Artificial Sequence
  Description of Artificial Sequence: Synthetic oligonucleotide
  Antisense strand to SEQ ID NO: 1568037
ugaaccacggguuucuccu

SEQ ID NO: 1568039 - RNA, 19 nt, Artificial Sequence
  Description of Artificial Sequence: Synthetic oligonucleotide
  Sense strand starting at position 3192 of SEQ ID NO: 1559983
ggagaaacccgugguucag

SEQ ID NO: 1568040 - RNA, 19 nt, Artificial Sequence
  Description of Artificial Sequence: Synthetic oligonucleotide
  Antisense strand to SEQ ID NO: 1568039
cugaaccacggguuucucc

SEQ ID NO: 1568041 - RNA, 19 nt, Artificial Sequence
  Description of Artificial Sequence: Synthetic oligonucleotide
  Sense strand starting at position 3315 of SEQ ID NO: 1559983
ggcugaacuccugguucga

SEQ ID NO: 1568042 - RNA, 19 nt, Artificial Sequence
  Description of Artificial Sequence: Synthetic oligonucleotide
  Antisense strand to SEQ ID NO: 1568041
ucgaaccaggaguucagcc

SEQ ID NO: 1568043 - RNA, 19 nt, Artificial Sequence
  Description of Artificial Sequence: Synthetic oligonucleotide
  Sense strand starting at position 3317 of SEQ ID NO: 1559983
cugaacuccugguucgaga

SEQ ID NO: 1568044 - RNA, 19 nt, Artificial Sequence
  Description of Artificial Sequence: Synthetic oligonucleotide
  Antisense strand to SEQ ID NO: 1568043
ucucgaaccaggaguucag

SEQ ID NO: 1568045 - RNA, 19 nt, Artificial Sequence
  Description of Artificial Sequence: Synthetic oligonucleotide
  Sense strand starting at position 3643 of SEQ ID NO: 1559983
guacccuaguuguucugaa

SEQ ID NO: 1568046 - RNA, 19 nt, Artificial Sequence
  Description of Artificial Sequence: Synthetic oligonucleotide
  Antisense strand to SEQ ID NO: 1568045
uucagaacaacuaggguac

SEQ ID NO: 1568047 - RNA, 19 nt, Artificial Sequence
  Description of Artificial Sequence: Synthetic oligonucleotide
  Sense strand starting at position 3655 of SEQ ID NO: 1559983
uucugaagcuguuccagua

SEQ ID NO: 1568048 - RNA, 19 nt, Artificial Sequence
  Description of Artificial Sequence: Synthetic oligonucleotide
  Antisense strand to SEQ ID NO: 1568047
uacuggaacagcuucagaa

SEQ ID NO: 1568049 - RNA, 19 nt, Artificial Sequence
  Description of Artificial Sequence: Synthetic oligonucleotide
  Sense strand starting at position 3750 of SEQ ID NO: 1559983
gggacaaaguccucuauag

SEQ ID NO: 1568050 - RNA, 19 nt, Artificial Sequence
  Description of Artificial Sequence: Synthetic oligonucleotide
  Antisense strand to SEQ ID NO: 1568049
cuauagaggacuuuguccc

SEQ ID NO: 1568051 - RNA, 19 nt, Artificial Sequence
  Description of Artificial Sequence: Synthetic oligonucleotide
  Sense strand starting at position 3854 of SEQ ID NO: 1559983
gcagauguuccggauggga

SEQ ID NO: 1568052 - RNA, 19 nt, Artificial Sequence
  Description of Artificial Sequence: Synthetic oligonucleotide
  Antisense strand to SEQ ID NO: 1568051
ucccauccggaacaucugc

SEQ ID NO: 1568053 - RNA, 19 nt, Artificial Sequence
  Description of Artificial Sequence: Synthetic oligonucleotide
  Sense strand starting at position 3856 of SEQ ID NO: 1559983
agauguuccggaugggaag

SEQ ID NO: 1568054 - RNA, 19 nt, Artificial Sequence
  Description of Artificial Sequence: Synthetic oligonucleotide
  Antisense strand to SEQ ID NO: 1568053
cuucccauccggaacaucu

SEQ ID NO: 1568055 - RNA, 19 nt, Artificial Sequence
  Description of Artificial Sequence: Synthetic oligonucleotide
  Sense strand starting at position 3900 of SEQ ID NO: 1559983
cccucugagccggacuuaa

SEQ ID NO: 1568056 - RNA, 19 nt, Artificial Sequence
  Description of Artificial Sequence: Synthetic oligonucleotide
  Antisense strand to SEQ ID NO: 1568055
uuaaguccggcucagaggg

SEQ ID NO: 1568057 - RNA, 19 nt, Artificial Sequence
  Description of Artificial Sequence: Synthetic oligonucleotide
  Sense strand starting at position 254 of SEQ ID NO: 1559984
ccuggcauccuguguggaa

SEQ ID NO: 1568058 - RNA, 19 nt, Artificial Sequence
  Description of Artificial Sequence: Synthetic oligonucleotide
  Antisense strand to SEQ ID NO: 1568057
uuccacacaggaugccagg

SEQ ID NO: 1568059 - RNA, 19 nt, Artificial Sequence
  Description of Artificial Sequence: Synthetic oligonucleotide
  Sense strand starting at position 256 of SEQ ID NO: 1559984
uggcauccuguguggaaca

SEQ ID NO: 1568060 - RNA, 19 nt, Artificial Sequence
  Description of Artificial Sequence: Synthetic oligonucleotide
  Antisense strand to SEQ ID NO: 1568059
uguuccacacaggaugcca

SEQ ID NO: 1568061 - RNA, 19 nt, Artificial Sequence
  Description of Artificial Sequence: Synthetic oligonucleotide
  Sense strand starting at position 392 of SEQ ID NO: 1559984
ucgguuuaaucacuuggaa

SEQ ID NO: 1568062 - RNA, 19 nt, Artificial Sequence
  Description of Artificial Sequence: Synthetic oligonucleotide
  Antisense strand to SEQ ID NO: 1568061
uuccaagugauuaaaccga

SEQ ID NO: 1568063 - RNA, 19 nt, Artificial Sequence
  Description of Artificial Sequence: Synthetic oligonucleotide
  Sense strand starting at position 394 of SEQ ID NO: 1559984
gguuuaaucacuuggaaag

SEQ ID NO: 1568064 - RNA, 19 nt, Artificial Sequence
  Description of Artificial Sequence: Synthetic oligonucleotide
  Antisense strand to SEQ ID NO: 1568063
cuuuccaagugauuaaacc

SEQ ID NO: 1568065 - RNA, 19 nt, Artificial Sequence
  Description of Artificial Sequence: Synthetic oligonucleotide
  Sense strand starting at position 395 of SEQ ID NO: 1559984
guuuaaucacuuggaaagc

SEQ ID NO: 1568066 - RNA, 19 nt, Artificial Sequence
  Description of Artificial Sequence: Synthetic oligonucleotide
  Antisense strand to SEQ ID NO: 1568065
gcuuuccaagugauuaaac

SEQ ID NO: 1568067 - RNA, 19 nt, Artificial Sequence
  Description of Artificial Sequence: Synthetic oligonucleotide
  Sense strand starting at position 404 of SEQ ID NO: 1559984
cuuggaaagcauuauguau

SEQ ID NO: 1568068 - RNA, 19 nt, Artificial Sequence
  Description of Artificial Sequence: Synthetic oligonucleotide
  Antisense strand to SEQ ID NO: 1568067
auacauaaugcuuuccaag

SEQ ID NO: 1568069 - RNA, 19 nt, Artificial Sequence
  Description of Artificial Sequence: Synthetic oligonucleotide
  Sense strand starting at position 713 of SEQ ID NO: 1559984
gcauguauugaguguccuu

SEQ ID NO: 1568070 - RNA, 19 nt, Artificial Sequence
  Description of Artificial Sequence: Synthetic oligonucleotide
  Antisense strand to SEQ ID NO: 1568069
aaggacacucaauacaugc

SEQ ID NO: 1568071 - RNA, 19 nt, Artificial Sequence
  Description of Artificial Sequence: Synthetic oligonucleotide
  Sense strand starting at position 788 of SEQ ID NO: 1559984
cgugucugguauucacuau

SEQ ID NO: 1568072 - RNA, 19 nt, Artificial Sequence
  Description of Artificial Sequence: Synthetic oligonucleotide
  Antisense strand to SEQ ID NO: 1568071
auagugaauaccagacacg

SEQ ID NO: 1568073 - RNA, 19 nt, Artificial Sequence
  Description of Artificial Sequence: Synthetic oligonucleotide
  Sense strand starting at position 800 of SEQ ID NO: 1559984
ucacuaucugccugcaaug

SEQ ID NO: 1568074 - RNA, 19 nt, Artificial Sequence
  Description of Artificial Sequence: Synthetic oligonucleotide
  Antisense strand to SEQ ID NO: 1568073
cauugcaggcagauaguga

SEQ ID NO: 1568075 - RNA, 19 nt, Artificial Sequence
  Description of Artificial Sequence: Synthetic oligonucleotide
  Sense strand starting at position 810 of SEQ ID NO: 1559984
ccugcaaugcauuagaaac

SEQ ID NO: 1568076 - RNA, 19 nt, Artificial Sequence
  Description of Artificial Sequence: Synthetic oligonucleotide
  Antisense strand to SEQ ID NO: 1568075
guuucuaaugcauugcagg

SEQ ID NO: 1568077 - RNA, 19 nt, Artificial Sequence
  Description of Artificial Sequence: Synthetic oligonucleotide
  Sense strand starting at position 1521 of SEQ ID NO: 1559984
guugcauuaucugcaacag

SEQ ID NO: 1568078 - RNA, 19 nt, Artificial Sequence
  Description of Artificial Sequence: Synthetic oligonucleotide
  Antisense strand to SEQ ID NO: 1568077
cuguugcagauaaugcaac

SEQ ID NO: 1568079 - RNA, 19 nt, Artificial Sequence
  Description of Artificial Sequence: Synthetic oligonucleotide
  Sense strand starting at position 1777 of SEQ ID NO: 1559984
uguuccauuuaugagcuaa

SEQ ID NO: 1568080 - RNA, 19 nt, Artificial Sequence
  Description of Artificial Sequence: Synthetic oligonucleotide
  Antisense strand to SEQ ID NO: 1568079
uuagcucauaaauggaaca

SEQ ID NO: 1568081 - RNA, 19 nt, Artificial Sequence
  Description of Artificial Sequence: Synthetic oligonucleotide
  Sense strand starting at position 1808 of SEQ ID NO: 1559984
uuuaaaguucuccaaucga

SEQ ID NO: 1568082 - RNA, 19 nt, Artificial Sequence
  Description of Artificial Sequence: Synthetic oligonucleotide
  Antisense strand to SEQ ID NO: 1568081
ucgauuggagaacuuuaaa

SEQ ID NO: 1568083 - RNA, 19 nt, Artificial Sequence
  Description of Artificial Sequence: Synthetic oligonucleotide
  Sense strand starting at position 1891 of SEQ ID NO: 1559984
cccaguaggugcucgauaa

SEQ ID NO: 1568084 - RNA, 19 nt, Artificial Sequence
  Description of Artificial Sequence: Synthetic oligonucleotide
  Antisense strand to SEQ ID NO: 1568083
uuaucgagcaccuacuggg

SEQ ID NO: 1568085 - RNA, 19 nt, Artificial Sequence
  Description of Artificial Sequence: Synthetic oligonucleotide
  Sense strand starting at position 1892 of SEQ ID NO: 1559984
ccaguaggugcucgauaaa

SEQ ID NO: 1568086 - RNA, 19 nt, Artificial Sequence
  Description of Artificial Sequence: Synthetic oligonucleotide
  Antisense strand to SEQ ID NO: 1568085
uuuaucgagcaccuacugg

SEQ ID NO: 1568087 - RNA, 19 nt, Artificial Sequence
  Description of Artificial Sequence: Synthetic oligonucleotide
  Sense strand starting at position 1899 of SEQ ID NO: 1559984
gugcucgauaaaugauagu

SEQ ID NO: 1568088 - RNA, 19 nt, Artificial Sequence
  Description of Artificial Sequence: Synthetic oligonucleotide
  Antisense strand to SEQ ID NO: 1568087
acuaucauuuaucgagcac

SEQ ID NO: 1568089 - RNA, 19 nt, Artificial Sequence
  Description of Artificial Sequence: Synthetic oligonucleotide
  Sense strand starting at position 1905 of SEQ ID NO: 1559984
gauaaaugauagugacaac

SEQ ID NO: 1568090 - RNA, 19 nt, Artificial Sequence
  Description of Artificial Sequence: Synthetic oligonucleotide
  Antisense strand to SEQ ID NO: 1568089
guugucacuaucauuuauc

SEQ ID NO: 1568091 - RNA, 19 nt, Artificial Sequence
  Description of Artificial Sequence: Synthetic oligonucleotide
  Sense strand starting at position 1928 of SEQ ID NO: 1559984
ggaguccugcuauggcuua

SEQ ID NO: 1568092 - RNA, 19 nt, Artificial Sequence
  Description of Artificial Sequence: Synthetic oligonucleotide
  Antisense strand to SEQ ID NO: 1568091
uaagccauagcaggacucc

SEQ ID NO: 1568093 - RNA, 19 nt, Artificial Sequence
  Description of Artificial Sequence: Synthetic oligonucleotide
  Sense strand starting at position 2076 of SEQ ID NO: 1559984
ccgaguagcucuccugaga

SEQ ID NO: 1568094 - RNA, 19 nt, Artificial Sequence
  Description of Artificial Sequence: Synthetic oligonucleotide
  Antisense strand to SEQ ID NO: 1568093
ucucaggagagcuacucgg

SEQ ID NO: 1568095 - RNA, 19 nt, Artificial Sequence
  Description of Artificial Sequence: Synthetic oligonucleotide
  Sense strand starting at position 2079 of SEQ ID NO: 1559984
aguagcucuccugagacua

SEQ ID NO: 1568096 - RNA, 19 nt, Artificial Sequence
  Description of Artificial Sequence: Synthetic oligonucleotide
  Antisense strand to SEQ ID NO: 1568095
uagucucaggagagcuacu

SEQ ID NO: 1568097 - RNA, 19 nt, Artificial Sequence
  Description of Artificial Sequence: Synthetic oligonucleotide
  Sense strand starting at position 2120 of SEQ ID NO: 1559984
ggucccagcucuuucuaga

SEQ ID NO: 1568098 - RNA, 19 nt, Artificial Sequence
  Description of Artificial Sequence: Synthetic oligonucleotide
  Antisense strand to SEQ ID NO: 1568097
ucuagaaagagcugggacc

SEQ ID NO: 1568099 - RNA, 19 nt, Artificial Sequence
  Description of Artificial Sequence: Synthetic oligonucleotide
  Sense strand starting at position 2424 of SEQ ID NO: 1559984
ggacaccucgcccaguaau

SEQ ID NO: 1568100 - RNA, 19 nt, Artificial Sequence
  Description of Artificial Sequence: Synthetic oligonucleotide
  Antisense strand to SEQ ID NO: 1568099
auuacugggcgaggugucc

SEQ ID NO: 1568101 - RNA, 19 nt, Artificial Sequence
  Description of Artificial Sequence: Synthetic oligonucleotide
  Sense strand starting at position 2530 of SEQ ID NO: 1559984
uuuccugugccuggaugaa

SEQ ID NO: 1568102 - RNA, 19 nt, Artificial Sequence
  Description of Artificial Sequence: Synthetic oligonucleotide
  Antisense strand to SEQ ID NO: 1568101
uucauccaggcacaggaaa

SEQ ID NO: 1568103 - RNA, 19 nt, Artificial Sequence
  Description of Artificial Sequence: Synthetic oligonucleotide
  Sense strand starting at position 3052 of SEQ ID NO: 1559984
gguugugaccuugagcaca

SEQ ID NO: 1568104 - RNA, 19 nt, Artificial Sequence
  Description of Artificial Sequence: Synthetic oligonucleotide
  Antisense strand to SEQ ID NO: 1568103
ugugcucaaggucacaacc

SEQ ID NO: 1568105 - RNA, 19 nt, Artificial Sequence
  Description of Artificial Sequence: Synthetic oligonucleotide
  Sense strand starting at position 3157 of SEQ ID NO: 1559984
cgugcuucuggguuaaggu

SEQ ID NO: 1568106 - RNA, 19 nt, Artificial Sequence
  Description of Artificial Sequence: Synthetic oligonucleotide
  Antisense strand to SEQ ID NO: 1568105
accuuaacccagaagcacg

SEQ ID NO: 1568107 - RNA, 19 nt, Artificial Sequence
  Description of Artificial Sequence: Synthetic oligonucleotide
  Sense strand starting at position 3158 of SEQ ID NO: 1559984
gugcuucuggguuaagguu

SEQ ID NO: 1568108 - RNA, 19 nt, Artificial Sequence
  Description of Artificial Sequence: Synthetic oligonucleotide
  Antisense strand to SEQ ID NO: 1568107
aaccuuaacccagaagcac

SEQ ID NO: 1568109 - RNA, 19 nt, Artificial Sequence
  Description of Artificial Sequence: Synthetic oligonucleotide
  Sense strand starting at position 3164 of SEQ ID NO: 1559984
cuggguuaagguuaggauu

SEQ ID NO: 1568110 - RNA, 19 nt, Artificial Sequence
  Description of Artificial Sequence: Synthetic oligonucleotide
  Antisense strand to SEQ ID NO: 1568109
aauccuaaccuuaacccag

SEQ ID NO: 1568111 - RNA, 19 nt, Artificial Sequence
  Description of Artificial Sequence: Synthetic oligonucleotide
  Sense strand starting at position 3252 of SEQ ID NO: 1559984
acuuguccucucugagcau

SEQ ID NO: 1568112 - RNA, 19 nt, Artificial Sequence
  Description of Artificial Sequence: Synthetic oligonucleotide
  Antisense strand to SEQ ID NO: 1568111
augcucagagaggacaagu

SEQ ID NO: 1568113 - RNA, 19 nt, Artificial Sequence
  Description of Artificial Sequence: Synthetic oligonucleotide
  Sense strand starting at position 3255 of SEQ ID NO: 1559984
uguccucucugagcaucaa

SEQ ID NO: 1568114 - RNA, 19 nt, Artificial Sequence
  Description of Artificial Sequence: Synthetic oligonucleotide
  Antisense strand to SEQ ID NO: 1568113
uugaugcucagagaggaca

SEQ ID NO: 1568115 - RNA, 19 nt, Artificial Sequence
  Description of Artificial Sequence: Synthetic oligonucleotide
  Sense strand starting at position 3273 of SEQ ID NO: 1559984
aguuccuuugcucaucaga

SEQ ID NO: 1568116 - RNA, 19 nt, Artificial Sequence
  Description of Artificial Sequence: Synthetic oligonucleotide
  Antisense strand to SEQ ID NO: 1568115
ucugaugagcaaaggaacu

SEQ ID NO: 1568117 - RNA, 19 nt, Artificial Sequence
  Description of Artificial Sequence: Synthetic oligonucleotide
  Sense strand starting at position 3281 of SEQ ID NO: 1559984
ugcucaucagacugggaaa

SEQ ID NO: 1568118 - RNA, 19 nt, Artificial Sequence
  Description of Artificial Sequence: Synthetic oligonucleotide
  Antisense strand to SEQ ID NO: 1568117
uuucccagucugaugagca

SEQ ID NO: 1568119 - RNA, 19 nt, Artificial Sequence
  Description of Artificial Sequence: Synthetic oligonucleotide
  Sense strand starting at position 3309 of SEQ ID NO: 1559984
cggguauguuuggugacaa

SEQ ID NO: 1568120 - RNA, 19 nt, Artificial Sequence
  Description of Artificial Sequence: Synthetic oligonucleotide
  Antisense strand to SEQ ID NO: 1568119
uugucaccaaacauacccg

SEQ ID NO: 1568121 - RNA, 19 nt, Artificial Sequence
  Description of Artificial Sequence: Synthetic oligonucleotide
  Sense strand starting at position 3374 of SEQ ID NO: 1559984
cuauguuagggcuagcaau

SEQ ID NO: 1568122 - RNA, 19 nt, Artificial Sequence
  Description of Artificial Sequence: Synthetic oligonucleotide
  Antisense strand to SEQ ID NO: 1568121
auugcuagcccuaacauag

SEQ ID NO: 1568123 - RNA, 19 nt, Artificial Sequence
  Description of Artificial Sequence: Synthetic oligonucleotide
  Sense strand starting at position 3450 of SEQ ID NO: 1559984
ccagauguuucagaggaga

SEQ ID NO: 1568124 - RNA, 19 nt, Artificial Sequence
  Description of Artificial Sequence: Synthetic oligonucleotide
  Antisense strand to SEQ ID NO: 1568123
ucuccucugaaacaucugg

SEQ ID NO: 1568125 - RNA, 19 nt, Artificial Sequence
  Description of Artificial Sequence: Synthetic oligonucleotide
  Sense strand starting at position 3463 of SEQ ID NO: 1559984
aggagaaacccgugguuca

SEQ ID NO: 1568126 - RNA, 19 nt, Artificial Sequence
  Description of Artificial Sequence: Synthetic oligonucleotide
  Antisense strand to SEQ ID NO: 1568125
ugaaccacggguuucuccu

SEQ ID NO: 1568127 - RNA, 19 nt, Artificial Sequence
  Description of Artificial Sequence: Synthetic oligonucleotide
  Sense strand starting at position 3464 of SEQ ID NO: 1559984
ggagaaacccgugguucag

SEQ ID NO: 1568128 - RNA, 19 nt, Artificial Sequence
  Description of Artificial Sequence: Synthetic oligonucleotide
  Antisense strand to SEQ ID NO: 1568127
cugaaccacggguuucucc

SEQ ID NO: 1568129 - RNA, 19 nt, Artificial Sequence
  Description of Artificial Sequence: Synthetic oligonucleotide
  Sense strand starting at position 3587 of SEQ ID NO: 1559984
ggcugaacuccugguucga

SEQ ID NO: 1568130 - RNA, 19 nt, Artificial Sequence
  Description of Artificial Sequence: Synthetic oligonucleotide
  Antisense strand to SEQ ID NO: 1568129
ucgaaccaggaguucagcc

SEQ ID NO: 1568131 - RNA, 19 nt, Artificial Sequence
  Description of Artificial Sequence: Synthetic oligonucleotide
  Sense strand starting at position 3589 of SEQ ID NO: 1559984
cugaacuccugguucgaga

SEQ ID NO: 1568132 - RNA, 19 nt, Artificial Sequence
  Description of Artificial Sequence: Synthetic oligonucleotide
  Antisense strand to SEQ ID NO: 1568131
ucucgaaccaggaguucag

SEQ ID NO: 1568133 - RNA, 19 nt, Artificial Sequence
  Description of Artificial Sequence: Synthetic oligonucleotide
  Sense strand starting at position 3915 of SEQ ID NO: 1559984
guacccuaguuguucugaa

SEQ ID NO: 1568134 - RNA, 19 nt, Artificial Sequence
  Description of Artificial Sequence: Synthetic oligonucleotide
  Antisense strand to SEQ ID NO: 1568133
uucagaacaacuaggguac

SEQ ID NO: 1568135 - RNA, 19 nt, Artificial Sequence
  Description of Artificial Sequence: Synthetic oligonucleotide
  Sense strand starting at position 3927 of SEQ ID NO: 1559984
uucugaagcuguuccagua

SEQ ID NO: 1568136 - RNA, 19 nt, Artificial Sequence
  Description of Artificial Sequence: Synthetic oligonucleotide
  Antisense strand to SEQ ID NO: 1568135
uacuggaacagcuucagaa

SEQ ID NO: 1568137 - RNA, 19 nt, Artificial Sequence
  Description of Artificial Sequence: Synthetic oligonucleotide
  Sense strand starting at position 634 of SEQ ID NO: 1559985
ccuggcauccuguguggaa

SEQ ID NO: 1568138 - RNA, 19 nt, Artificial Sequence
  Description of Artificial Sequence: Synthetic oligonucleotide
  Antisense strand to SEQ ID NO: 1568137
uuccacacaggaugccagg

SEQ ID NO: 1568139 - RNA, 19 nt, Artificial Sequence
  Description of Artificial Sequence: Synthetic oligonucleotide
  Sense strand starting at position 636 of SEQ ID NO: 1559985
uggcauccuguguggaaca

SEQ ID NO: 1568140 - RNA, 19 nt, Artificial Sequence
  Description of Artificial Sequence: Synthetic oligonucleotide
  Antisense strand to SEQ ID NO: 1568139
uguuccacacaggaugcca

SEQ ID NO: 1568141 - RNA, 19 nt, Artificial Sequence
  Description of Artificial Sequence: Synthetic oligonucleotide
  Sense strand starting at position 772 of SEQ ID NO: 1559985
ucgguuuaaucacuuggaa

SEQ ID NO: 1568142 - RNA, 19 nt, Artificial Sequence
  Description of Artificial Sequence: Synthetic oligonucleotide
  Antisense strand to SEQ ID NO: 1568141
uuccaagugauuaaaccga

SEQ ID NO: 1568143 - RNA, 19 nt, Artificial Sequence
  Description of Artificial Sequence: Synthetic oligonucleotide
  Sense strand starting at position 774 of SEQ ID NO: 1559985
gguuuaaucacuuggaaag

SEQ ID NO: 1568144 - RNA, 19 nt, Artificial Sequence
  Description of Artificial Sequence: Synthetic oligonucleotide
  Antisense strand to SEQ ID NO: 1568143
cuuuccaagugauuaaacc

SEQ ID NO: 1568145 - RNA, 19 nt, Artificial Sequence
  Description of Artificial Sequence: Synthetic oligonucleotide
  Sense strand starting at position 775 of SEQ ID NO: 1559985
guuuaaucacuuggaaagc

SEQ ID NO: 1568146 - RNA, 19 nt, Artificial Sequence
  Description of Artificial Sequence: Synthetic oligonucleotide
  Antisense strand to SEQ ID NO: 1568145
gcuuuccaagugauuaaac

SEQ ID NO: 1568147 - RNA, 19 nt, Artificial Sequence
  Description of Artificial Sequence: Synthetic oligonucleotide
  Sense strand starting at position 776 of SEQ ID NO: 1559985
uuuaaucacuuggaaagca

SEQ ID NO: 1568148 - RNA, 19 nt, Artificial Sequence
  Description of Artificial Sequence: Synthetic oligonucleotide
  Antisense strand to SEQ ID NO: 1568147
ugcuuuccaagugauuaaa

SEQ ID NO: 1568149 - RNA, 19 nt, Artificial Sequence
  Description of Artificial Sequence: Synthetic oligonucleotide
  Sense strand starting at position 784 of SEQ ID NO: 1559985
cuuggaaagcauuauguau

SEQ ID NO: 1568150 - RNA, 19 nt, Artificial Sequence
  Description of Artificial Sequence: Synthetic oligonucleotide
  Antisense strand to SEQ ID NO: 1568149
auacauaaugcuuuccaag

SEQ ID NO: 1568151 - RNA, 19 nt, Artificial Sequence
  Description of Artificial Sequence: Synthetic oligonucleotide
  Sense strand starting at position 1093 of SEQ ID NO: 1559985
gcauguauugaguguccuu

SEQ ID NO: 1568152 - RNA, 19 nt, Artificial Sequence
  Description of Artificial Sequence: Synthetic oligonucleotide
  Antisense strand to SEQ ID NO: 1568151
aaggacacucaauacaugc

SEQ ID NO: 1568153 - RNA, 19 nt, Artificial Sequence
  Description of Artificial Sequence: Synthetic oligonucleotide
  Sense strand starting at position 1168 of SEQ ID NO: 1559985
cgugucugguauucacuau

SEQ ID NO: 1568154 - RNA, 19 nt, Artificial Sequence
  Description of Artificial Sequence: Synthetic oligonucleotide
  Antisense strand to SEQ ID NO: 1568153
auagugaauaccagacacg

SEQ ID NO: 1568155 - RNA, 19 nt, Artificial Sequence
  Description of Artificial Sequence: Synthetic oligonucleotide
  Sense strand starting at position 1180 of SEQ ID NO: 1559985
ucacuaucugccugcaaug

SEQ ID NO: 1568156 - RNA, 19 nt, Artificial Sequence
  Description of Artificial Sequence: Synthetic oligonucleotide
  Antisense strand to SEQ ID NO: 1568155
cauugcaggcagauaguga

SEQ ID NO: 1568157 - RNA, 19 nt, Artificial Sequence
  Description of Artificial Sequence: Synthetic oligonucleotide
  Sense strand starting at position 1190 of SEQ ID NO: 1559985
ccugcaaugcauuagaaac

SEQ ID NO: 1568158 - RNA, 19 nt, Artificial Sequence
  Description of Artificial Sequence: Synthetic oligonucleotide
  Antisense strand to SEQ ID NO: 1568157
guuucuaaugcauugcagg

SEQ ID NO: 1568159 - RNA, 19 nt, Artificial Sequence
  Description of Artificial Sequence: Synthetic oligonucleotide
  Sense strand starting at position 1901 of SEQ ID NO: 1559985
guugcauuaucugcaacag

SEQ ID NO: 1568160 - RNA, 19 nt, Artificial Sequence
  Description of Artificial Sequence: Synthetic oligonucleotide
  Antisense strand to SEQ ID NO: 1568159
cuguugcagauaaugcaac

SEQ ID NO: 1568161 - RNA, 19 nt, Artificial Sequence
  Description of Artificial Sequence: Synthetic oligonucleotide
  Sense strand starting at position 2157 of SEQ ID NO: 1559985
uguuccauuuaugagcuaa

SEQ ID NO: 1568162 - RNA, 19 nt, Artificial Sequence
  Description of Artificial Sequence: Synthetic oligonucleotide
  Antisense strand to SEQ ID NO: 1568161
uuagcucauaaauggaaca

SEQ ID NO: 1568163 - RNA, 19 nt, Artificial Sequence
  Description of Artificial Sequence: Synthetic oligonucleotide
  Sense strand starting at position 2188 of SEQ ID NO: 1559985
uuuaaaguucuccaaucga

SEQ ID NO: 1568164 - RNA, 19 nt, Artificial Sequence
  Description of Artificial Sequence: Synthetic oligonucleotide
  Antisense strand to SEQ ID NO: 1568163
ucgauuggagaacuuuaaa

SEQ ID NO: 1568165 - RNA, 19 nt, Artificial Sequence
  Description of Artificial Sequence: Synthetic oligonucleotide
  Sense strand starting at position 2271 of SEQ ID NO: 1559985
cccaguaggugcucgauaa

SEQ ID NO: 1568166 - RNA, 19 nt, Artificial Sequence
  Description of Artificial Sequence: Synthetic oligonucleotide
  Antisense strand to SEQ ID NO: 1568165
uuaucgagcaccuacuggg

SEQ ID NO: 1568167 - RNA, 19 nt, Artificial Sequence
  Description of Artificial Sequence: Synthetic oligonucleotide
  Sense strand starting at position 2272 of SEQ ID NO: 1559985
ccaguaggugcucgauaaa

SEQ ID NO: 1568168 - RNA, 19 nt, Artificial Sequence
  Description of Artificial Sequence: Synthetic oligonucleotide
  Antisense strand to SEQ ID NO: 1568167
uuuaucgagcaccuacugg

SEQ ID NO: 1568169 - RNA, 19 nt, Artificial Sequence
  Description of Artificial Sequence: Synthetic oligonucleotide
  Sense strand starting at position 2279 of SEQ ID NO: 1559985
gugcucgauaaaugauagu

SEQ ID NO: 1568170 - RNA, 19 nt, Artificial Sequence
  Description of Artificial Sequence: Synthetic oligonucleotide
  Antisense strand to SEQ ID NO: 1568169
acuaucauuuaucgagcac

SEQ ID NO: 1568171 - RNA, 19 nt, Artificial Sequence
  Description of Artificial Sequence: Synthetic oligonucleotide
  Sense strand starting at position 2285 of SEQ ID NO: 1559985
gauaaaugauagugacaac

SEQ ID NO: 1568172 - RNA, 19 nt, Artificial Sequence
  Description of Artificial Sequence: Synthetic oligonucleotide
  Antisense strand to SEQ ID NO: 1568171
guugucacuaucauuuauc

SEQ ID NO: 1568173 - RNA, 19 nt, Artificial Sequence
  Description of Artificial Sequence: Synthetic oligonucleotide
  Sense strand starting at position 2308 of SEQ ID NO: 1559985
ggaguccugcuauggcuua

SEQ ID NO: 1568174 - RNA, 19 nt, Artificial Sequence
  Description of Artificial Sequence: Synthetic oligonucleotide
  Antisense strand to SEQ ID NO: 1568173
uaagccauagcaggacucc

SEQ ID NO: 1568175 - RNA, 19 nt, Artificial Sequence
  Description of Artificial Sequence: Synthetic oligonucleotide
  Sense strand starting at position 2456 of SEQ ID NO: 1559985
ccgaguagcucuccugaga

SEQ ID NO: 1568176 - RNA, 19 nt, Artificial Sequence
  Description of Artificial Sequence: Synthetic oligonucleotide
  Antisense strand to SEQ ID NO: 1568175
ucucaggagagcuacucgg

SEQ ID NO: 1568177 - RNA, 19 nt, Artificial Sequence
  Description of Artificial Sequence: Synthetic oligonucleotide
  Sense strand starting at position 2459 of SEQ ID NO: 1559985
aguagcucuccugagacua

SEQ ID NO: 1568178 - RNA, 19 nt, Artificial Sequence
  Description of Artificial Sequence: Synthetic oligonucleotide
  Antisense strand to SEQ ID NO: 1568177
uagucucaggagagcuacu

SEQ ID NO: 1568179 - RNA, 19 nt, Artificial Sequence
  Description of Artificial Sequence: Synthetic oligonucleotide
  Sense strand starting at position 2500 of SEQ ID NO: 1559985
ggucccagcucuuucuaga

SEQ ID NO: 1568180 - RNA, 19 nt, Artificial Sequence
  Description of Artificial Sequence: Synthetic oligonucleotide
  Antisense strand to SEQ ID NO: 1568179
ucuagaaagagcugggacc

SEQ ID NO: 1568181 - RNA, 19 nt, Artificial Sequence
  Description of Artificial Sequence: Synthetic oligonucleotide
  Sense strand starting at position 2804 of SEQ ID NO: 1559985
ggacaccucgcccaguaau

SEQ ID NO: 1568182 - RNA, 19 nt, Artificial Sequence
  Description of Artificial Sequence: Synthetic oligonucleotide
  Antisense strand to SEQ ID NO: 1568181
auuacugggcgaggugucc

SEQ ID NO: 1568183 - RNA, 19 nt, Artificial Sequence
  Description of Artificial Sequence: Synthetic oligonucleotide
  Sense strand starting at position 2910 of SEQ ID NO: 1559985
uuuccugugccuggaugaa

SEQ ID NO: 1568184 - RNA, 19 nt, Artificial Sequence
  Description of Artificial Sequence: Synthetic oligonucleotide
  Antisense strand to SEQ ID NO: 1568183
uucauccaggcacaggaaa

SEQ ID NO: 1568185 - RNA, 19 nt, Artificial Sequence
  Description of Artificial Sequence: Synthetic oligonucleotide
  Sense strand starting at position 3432 of SEQ ID NO: 1559985
gguugugaccuugagcaca

SEQ ID NO: 1568186 - RNA, 19 nt, Artificial Sequence
  Description of Artificial Sequence: Synthetic oligonucleotide
  Antisense strand to SEQ ID NO: 1568185
ugugcucaaggucacaacc

SEQ ID NO: 1568187 - RNA, 19 nt, Artificial Sequence
  Description of Artificial Sequence: Synthetic oligonucleotide
  Sense strand starting at position 3537 of SEQ ID NO: 1559985
cgugcuucuggguuaaggu

SEQ ID NO: 1568188 - RNA, 19 nt, Artificial Sequence
  Description of Artificial Sequence: Synthetic oligonucleotide
  Antisense strand to SEQ ID NO: 1568187
accuuaacccagaagcacg

SEQ ID NO: 1568189 - RNA, 19 nt, Artificial Sequence
  Description of Artificial Sequence: Synthetic oligonucleotide
  Sense strand starting at position 3538 of SEQ ID NO: 1559985
gugcuucuggguuaagguu

SEQ ID NO: 1568190 - RNA, 19 nt, Artificial Sequence
  Description of Artificial Sequence: Synthetic oligonucleotide
  Antisense strand to SEQ ID NO: 1568189
aaccuuaacccagaagcac

SEQ ID NO: 1568191 - RNA, 19 nt, Artificial Sequence
  Description of Artificial Sequence: Synthetic oligonucleotide
  Sense strand starting at position 3544 of SEQ ID NO: 1559985
cuggguuaagguuaggauu

SEQ ID NO: 1568192 - RNA, 19 nt, Artificial Sequence
  Description of Artificial Sequence: Synthetic oligonucleotide
  Antisense strand to SEQ ID NO: 1568191
aauccuaaccuuaacccag

SEQ ID NO: 1568193 - RNA, 19 nt, Artificial Sequence
  Description of Artificial Sequence: Synthetic oligonucleotide
  Sense strand starting at position 3632 of SEQ ID NO: 1559985
acuuguccucucugagcau

SEQ ID NO: 1568194 - RNA, 19 nt, Artificial Sequence
  Description of Artificial Sequence: Synthetic oligonucleotide
  Antisense strand to SEQ ID NO: 1568193
augcucagagaggacaagu

SEQ ID NO: 1568195 - RNA, 19 nt, Artificial Sequence
  Description of Artificial Sequence: Synthetic oligonucleotide
  Sense strand starting at position 3635 of SEQ ID NO: 1559985
uguccucucugagcaucaa

SEQ ID NO: 1568196 - RNA, 19 nt, Artificial Sequence
  Description of Artificial Sequence: Synthetic oligonucleotide
  Antisense strand to SEQ ID NO: 1568195
uugaugcucagagaggaca

SEQ ID NO: 1568197 - RNA, 19 nt, Artificial Sequence
  Description of Artificial Sequence: Synthetic oligonucleotide
  Sense strand starting at position 3653 of SEQ ID NO: 1559985
aguuccuuugcucaucaga

SEQ ID NO: 1568198 - RNA, 19 nt, Artificial Sequence
  Description of Artificial Sequence: Synthetic oligonucleotide
  Antisense strand to SEQ ID NO: 1568197
ucugaugagcaaaggaacu

SEQ ID NO: 1568199 - RNA, 19 nt, Artificial Sequence
  Description of Artificial Sequence: Synthetic oligonucleotide
  Sense strand starting at position 3661 of SEQ ID NO: 1559985
ugcucaucagacugggaaa

SEQ ID NO: 1568200 - RNA, 19 nt, Artificial Sequence
  Description of Artificial Sequence: Synthetic oligonucleotide
  Antisense strand to SEQ ID NO: 1568199
uuucccagucugaugagca

SEQ ID NO: 1568201 - RNA, 19 nt, Artificial Sequence
  Description of Artificial Sequence: Synthetic oligonucleotide
  Sense strand starting at position 3689 of SEQ ID NO: 1559985
cggguauguuuggugacaa

SEQ ID NO: 1568202 - RNA, 19 nt, Artificial Sequence
  Description of Artificial Sequence: Synthetic oligonucleotide
  Antisense strand to SEQ ID NO: 1568201
uugucaccaaacauacccg

SEQ ID NO: 1568203 - RNA, 19 nt, Artificial Sequence
  Description of Artificial Sequence: Synthetic oligonucleotide
  Sense strand starting at position 3754 of SEQ ID NO: 1559985
cuauguuagggcuagcaau

SEQ ID NO: 1568204 - RNA, 19 nt, Artificial Sequence
  Description of Artificial Sequence: Synthetic oligonucleotide
  Antisense strand to SEQ ID NO: 1568203
auugcuagcccuaacauag

SEQ ID NO: 1568205 - RNA, 19 nt, Artificial Sequence
  Description of Artificial Sequence: Synthetic oligonucleotide
  Sense strand starting at position 3819 of SEQ ID NO: 1559985
uguuauaaaucccagaugu

SEQ ID NO: 1568206 - RNA, 19 nt, Artificial Sequence
  Description of Artificial Sequence: Synthetic oligonucleotide
  Antisense strand to SEQ ID NO: 1568205
acaucugggauuuauaaca

SEQ ID NO: 1568207 - RNA, 19 nt, Artificial Sequence
  Description of Artificial Sequence: Synthetic oligonucleotide
  Sense strand starting at position 3830 of SEQ ID NO: 1559985
ccagauguuucagaggaga

SEQ ID NO: 1568208 - RNA, 19 nt, Artificial Sequence
  Description of Artificial Sequence: Synthetic oligonucleotide
  Antisense strand to SEQ ID NO: 1568207
ucuccucugaaacaucugg

SEQ ID NO: 1568209 - RNA, 19 nt, Artificial Sequence
  Description of Artificial Sequence: Synthetic oligonucleotide
  Sense strand starting at position 3843 of SEQ ID NO: 1559985
aggagaaacccgugguuca

SEQ ID NO: 1568210 - RNA, 19 nt, Artificial Sequence
  Description of Artificial Sequence: Synthetic oligonucleotide
  Antisense strand to SEQ ID NO: 1568209
ugaaccacggguuucuccu

SEQ ID NO: 1568211 - RNA, 19 nt, Artificial Sequence
  Description of Artificial Sequence: Synthetic oligonucleotide
  Sense strand starting at position 3844 of SEQ ID NO: 1559985
ggagaaacccgugguucag

SEQ ID NO: 1568212 - RNA, 19 nt, Artificial Sequence
  Description of Artificial Sequence: Synthetic oligonucleotide
  Antisense strand to SEQ ID NO: 1568211
cugaaccacggguuucucc

SEQ ID NO: 1568213 - RNA, 19 nt, Artificial Sequence
  Description of Artificial Sequence: Synthetic oligonucleotide
  Sense strand starting at position 3967 of SEQ ID NO: 1559985
ggcugaacuccugguucga

SEQ ID NO: 1568214 - RNA, 19 nt, Artificial Sequence
  Description of Artificial Sequence: Synthetic oligonucleotide
  Antisense strand to SEQ ID NO: 1568213
ucgaaccaggaguucagcc

SEQ ID NO: 1568215 - RNA, 19 nt, Artificial Sequence
  Description of Artificial Sequence: Synthetic oligonucleotide
  Sense strand starting at position 3969 of SEQ ID NO: 1559985
cugaacuccugguucgaga

SEQ ID NO: 1568216 - RNA, 19 nt, Artificial Sequence
  Description of Artificial Sequence: Synthetic oligonucleotide
  Antisense strand to SEQ ID NO: 1568215
ucucgaaccaggaguucag

SEQ ID NO: 1568217 - RNA, 19 nt, Artificial Sequence
  Description of Artificial Sequence: Synthetic oligonucleotide
  Sense strand starting at position 165 of SEQ ID NO: 1559986
agaguacagugaucuccua

SEQ ID NO: 1568218 - RNA, 19 nt, Artificial Sequence
  Description of Artificial Sequence: Synthetic oligonucleotide
  Antisense strand to SEQ ID NO: 1568217
uaggagaucacuguacucu

SEQ ID NO: 1568219 - RNA, 19 nt, Artificial Sequence
  Description of Artificial Sequence: Synthetic oligonucleotide
  Sense strand starting at position 355 of SEQ ID NO: 1559986
gucugaauucucuggucug

SEQ ID NO: 1568220 - RNA, 19 nt, Artificial Sequence
  Description of Artificial Sequence: Synthetic oligonucleotide
  Antisense strand to SEQ ID NO: 1568219
cagaccagagaauucagac

SEQ ID NO: 1568221 - RNA, 19 nt, Artificial Sequence
  Description of Artificial Sequence: Synthetic oligonucleotide
  Sense strand starting at position 358 of SEQ ID NO: 1559986
ugaauucucuggucugaua

SEQ ID NO: 1568222 - RNA, 19 nt, Artificial Sequence
  Description of Artificial Sequence: Synthetic oligonucleotide
  Antisense strand to SEQ ID NO: 1568221
uaucagaccagagaauuca

SEQ ID NO: 1568223 - RNA, 19 nt, Artificial Sequence
  Description of Artificial Sequence: Synthetic oligonucleotide
  Sense strand starting at position 367 of SEQ ID NO: 1559986
uggucugauaaucgagacu

SEQ ID NO: 1568224 - RNA, 19 nt, Artificial Sequence
  Description of Artificial Sequence: Synthetic oligonucleotide
  Antisense strand to SEQ ID NO: 1568223
agucucgauuaucagacca

SEQ ID NO: 1568225 - RNA, 19 nt, Artificial Sequence
  Description of Artificial Sequence: Synthetic oligonucleotide
  Sense strand starting at position 378 of SEQ ID NO: 1559986
ucgagacuucccugagcug

SEQ ID NO: 1568226 - RNA, 19 nt, Artificial Sequence
  Description of Artificial Sequence: Synthetic oligonucleotide
  Antisense strand to SEQ ID NO: 1568225
cagcucagggaagucucga

SEQ ID NO: 1568227 - RNA, 19 nt, Artificial Sequence
  Description of Artificial Sequence: Synthetic oligonucleotide
  Sense strand starting at position 379 of SEQ ID NO: 1559986
cgagacuucccugagcuga

SEQ ID NO: 1568228 - RNA, 19 nt, Artificial Sequence
  Description of Artificial Sequence: Synthetic oligonucleotide
  Antisense strand to SEQ ID NO: 1568227
ucagcucagggaagucucg

SEQ ID NO: 1568229 - RNA, 19 nt, Artificial Sequence
  Description of Artificial Sequence: Synthetic oligonucleotide
  Sense strand starting at position 381 of SEQ ID NO: 1559986
agacuucccugagcugauu

SEQ ID NO: 1568230 - RNA, 19 nt, Artificial Sequence
  Description of Artificial Sequence: Synthetic oligonucleotide
  Antisense strand to SEQ ID NO: 1568229
aaucagcucagggaagucu

SEQ ID NO: 1568231 - RNA, 19 nt, Artificial Sequence
  Description of Artificial Sequence: Synthetic oligonucleotide
  Sense strand starting at position 389 of SEQ ID NO: 1559986
cugagcugauuucuguuua

SEQ ID NO: 1568232 - RNA, 19 nt, Artificial Sequence
  Description of Artificial Sequence: Synthetic oligonucleotide
  Antisense strand to SEQ ID NO: 1568231
uaaacagaaaucagcucag

SEQ ID NO: 1568233 - RNA, 19 nt, Artificial Sequence
  Description of Artificial Sequence: Synthetic oligonucleotide
  Sense strand starting at position 390 of SEQ ID NO: 1559986
ugagcugauuucuguuuac

SEQ ID NO: 1568234 - RNA, 19 nt, Artificial Sequence
  Description of Artificial Sequence: Synthetic oligonucleotide
  Antisense strand to SEQ ID NO: 1568233
guaaacagaaaucagcuca

SEQ ID NO: 1568235 - RNA, 19 nt, Artificial Sequence
  Description of Artificial Sequence: Synthetic oligonucleotide
  Sense strand starting at position 393 of SEQ ID NO: 1559986
gcugauuucuguuuaccuc

SEQ ID NO: 1568236 - RNA, 19 nt, Artificial Sequence
  Description of Artificial Sequence: Synthetic oligonucleotide
  Antisense strand to SEQ ID NO: 1568235
gagguaaacagaaaucagc

SEQ ID NO: 1568237 - RNA, 19 nt, Artificial Sequence
  Description of Artificial Sequence: Synthetic oligonucleotide
  Sense strand starting at position 613 of SEQ ID NO: 1559986
ggaaguucucccugacccu

SEQ ID NO: 1568238 - RNA, 19 nt, Artificial Sequence
  Description of Artificial Sequence: Synthetic oligonucleotide
  Antisense strand to SEQ ID NO: 1568237
agggucagggagaacuucc

SEQ ID NO: 1568239 - RNA, 19 nt, Artificial Sequence
  Description of Artificial Sequence: Synthetic oligonucleotide
  Sense strand starting at position 693 of SEQ ID NO: 1559986
guuccaugccuugaccaga

SEQ ID NO: 1568240 - RNA, 19 nt, Artificial Sequence
  Description of Artificial Sequence: Synthetic oligonucleotide
  Antisense strand to SEQ ID NO: 1568239
ucuggucaaggcauggaac

SEQ ID NO: 1568241 - RNA, 19 nt, Artificial Sequence
  Description of Artificial Sequence: Synthetic oligonucleotide
  Sense strand starting at position 728 of SEQ ID NO: 1559986
cucugaucacucugagaug

SEQ ID NO: 1568242 - RNA, 19 nt, Artificial Sequence
  Description of Artificial Sequence: Synthetic oligonucleotide
  Antisense strand to SEQ ID NO: 1568241
caucucagagugaucagag

SEQ ID NO: 1568243 - RNA, 19 nt, Artificial Sequence
  Description of Artificial Sequence: Synthetic oligonucleotide
  Sense strand starting at position 731 of SEQ ID NO: 1559986
ugaucacucugagauggca

SEQ ID NO: 1568244 - RNA, 19 nt, Artificial Sequence
  Description of Artificial Sequence: Synthetic oligonucleotide
  Antisense strand to SEQ ID NO: 1568243
ugccaucucagagugauca

SEQ ID NO: 1568245 - RNA, 19 nt, Artificial Sequence
  Description of Artificial Sequence: Synthetic oligonucleotide
  Sense strand starting at position 836 of SEQ ID NO: 1559986
ugggcauugaguugguguu

SEQ ID NO: 1568246 - RNA, 19 nt, Artificial Sequence
  Description of Artificial Sequence: Synthetic oligonucleotide
  Antisense strand to SEQ ID NO: 1568245
aacaccaacucaaugccca

SEQ ID NO: 1568247 - RNA, 19 nt, Artificial Sequence
  Description of Artificial Sequence: Synthetic oligonucleotide
  Sense strand starting at position 838 of SEQ ID NO: 1559986
ggcauugaguugguguuca

SEQ ID NO: 1568248 - RNA, 19 nt, Artificial Sequence
  Description of Artificial Sequence: Synthetic oligonucleotide
  Antisense strand to SEQ ID NO: 1568247
ugaacaccaacucaaugcc

SEQ ID NO: 1568249 - RNA, 19 nt, Artificial Sequence
  Description of Artificial Sequence: Synthetic oligonucleotide
  Sense strand starting at position 842 of SEQ ID NO: 1559986
uugaguugguguucagaca

SEQ ID NO: 1568250 - RNA, 19 nt, Artificial Sequence
  Description of Artificial Sequence: Synthetic oligonucleotide
  Antisense strand to SEQ ID NO: 1568249
ugucugaacaccaacucaa

SEQ ID NO: 1568251 - RNA, 19 nt, Artificial Sequence
  Description of Artificial Sequence: Synthetic oligonucleotide
  Sense strand starting at position 843 of SEQ ID NO: 1559986
ugaguugguguucagacau

SEQ ID NO: 1568252 - RNA, 19 nt, Artificial Sequence
  Description of Artificial Sequence: Synthetic oligonucleotide
  Antisense strand to SEQ ID NO: 1568251
augucugaacaccaacuca

SEQ ID NO: 1568253 - RNA, 19 nt, Artificial Sequence
  Description of Artificial Sequence: Synthetic oligonucleotide
  Sense strand starting at position 855 of SEQ ID NO: 1559986
cagacaugauuguuccuga

SEQ ID NO: 1568254 - RNA, 19 nt, Artificial Sequence
  Description of Artificial Sequence: Synthetic oligonucleotide
  Antisense strand to SEQ ID NO: 1568253
ucaggaacaaucaugucug

SEQ ID NO: 1568255 - RNA, 19 nt, Artificial Sequence
  Description of Artificial Sequence: Synthetic oligonucleotide
  Sense strand starting at position 856 of SEQ ID NO: 1559986
agacaugauuguuccugau

SEQ ID NO: 1568256 - RNA, 19 nt, Artificial Sequence
  Description of Artificial Sequence: Synthetic oligonucleotide
  Antisense strand to SEQ ID NO: 1568255
aucaggaacaaucaugucu

SEQ ID NO: 1568257 - RNA, 19 nt, Artificial Sequence
  Description of Artificial Sequence: Synthetic oligonucleotide
  Sense strand starting at position 858 of SEQ ID NO: 1559986
acaugauuguuccugauuc

SEQ ID NO: 1568258 - RNA, 19 nt, Artificial Sequence
  Description of Artificial Sequence: Synthetic oligonucleotide
  Antisense strand to SEQ ID NO: 1568257
gaaucaggaacaaucaugu

SEQ ID NO: 1568259 - RNA, 19 nt, Artificial Sequence
  Description of Artificial Sequence: Synthetic oligonucleotide
  Sense strand starting at position 860 of SEQ ID NO: 1559986
augauuguuccugauucuu

SEQ ID NO: 1568260 - RNA, 19 nt, Artificial Sequence
  Description of Artificial Sequence: Synthetic oligonucleotide
  Antisense strand to SEQ ID NO: 1568259
aagaaucaggaacaaucau

SEQ ID NO: 1568261 - RNA, 19 nt, Artificial Sequence
  Description of Artificial Sequence: Synthetic oligonucleotide
  Sense strand starting at position 1127 of SEQ ID NO: 1559986
cucagugaaugucugcuaa

SEQ ID NO: 1568262 - RNA, 19 nt, Artificial Sequence
  Description of Artificial Sequence: Synthetic oligonucleotide
  Antisense strand to SEQ ID NO: 1568261
uuagcagacauucacugag

SEQ ID NO: 1568263 - RNA, 19 nt, Artificial Sequence
  Description of Artificial Sequence: Synthetic oligonucleotide
  Sense strand starting at position 1129 of SEQ ID NO: 1559986
cagugaaugucugcuaagu

SEQ ID NO: 1568264 - RNA, 19 nt, Artificial Sequence
  Description of Artificial Sequence: Synthetic oligonucleotide
  Antisense strand to SEQ ID NO: 1568263
acuuagcagacauucacug

SEQ ID NO: 1568265 - RNA, 19 nt, Artificial Sequence
  Description of Artificial Sequence: Synthetic oligonucleotide
  Sense strand starting at position 2101 of SEQ ID NO: 1559986
ggaggcuucucauugguuu

SEQ ID NO: 1568266 - RNA, 19 nt, Artificial Sequence
  Description of Artificial Sequence: Synthetic oligonucleotide
  Antisense strand to SEQ ID NO: 1568265
aaaccaaugagaagccucc

SEQ ID NO: 1568267 - RNA, 19 nt, Artificial Sequence
  Description of Artificial Sequence: Synthetic oligonucleotide
  Sense strand starting at position 2382 of SEQ ID NO: 1559986
ccugcaaucguggcuuacu

SEQ ID NO: 1568268 - RNA, 19 nt, Artificial Sequence
  Description of Artificial Sequence: Synthetic oligonucleotide
  Antisense strand to SEQ ID NO: 1568267
aguaagccacgauugcagg

SEQ ID NO: 1568269 - RNA, 19 nt, Artificial Sequence
  Description of Artificial Sequence: Synthetic oligonucleotide
  Sense strand starting at position 2772 of SEQ ID NO: 1559986
ucauauaccuugccuagga

SEQ ID NO: 1568270 - RNA, 19 nt, Artificial Sequence
  Description of Artificial Sequence: Synthetic oligonucleotide
  Antisense strand to SEQ ID NO: 1568269
uccuaggcaagguauauga

SEQ ID NO: 1568271 - RNA, 19 nt, Artificial Sequence
  Description of Artificial Sequence: Synthetic oligonucleotide
  Sense strand starting at position 2788 of SEQ ID NO: 1559986
ggacguaacccgaggcuuu

SEQ ID NO: 1568272 - RNA, 19 nt, Artificial Sequence
  Description of Artificial Sequence: Synthetic oligonucleotide
  Antisense strand to SEQ ID NO: 1568271
aaagccucggguuacgucc

SEQ ID NO: 1568273 - RNA, 19 nt, Artificial Sequence
  Description of Artificial Sequence: Synthetic oligonucleotide
  Sense strand starting at position 2858 of SEQ ID NO: 1559986
cugcuuauuacgggccaau

SEQ ID NO: 1568274 - RNA, 19 nt, Artificial Sequence
  Description of Artificial Sequence: Synthetic oligonucleotide
  Antisense strand to SEQ ID NO: 1568273
auuggcccguaauaagcag

SEQ ID NO: 1568275 - RNA, 19 nt, Artificial Sequence
  Description of Artificial Sequence: Synthetic oligonucleotide
  Sense strand starting at position 2957 of SEQ ID NO: 1559986
cccaauggagccugcuaau

SEQ ID NO: 1568276 - RNA, 19 nt, Artificial Sequence
  Description of Artificial Sequence: Synthetic oligonucleotide
  Antisense strand to SEQ ID NO: 1568275
auuagcaggcuccauuggg

SEQ ID NO: 1568277 - RNA, 19 nt, Artificial Sequence
  Description of Artificial Sequence: Synthetic oligonucleotide
  Sense strand starting at position 2978 of SEQ ID NO: 1559986
ugagcaugcccagauaaca

SEQ ID NO: 1568278 - RNA, 19 nt, Artificial Sequence
  Description of Artificial Sequence: Synthetic oligonucleotide
  Antisense strand to SEQ ID NO: 1568277
uguuaucugggcaugcuca

SEQ ID NO: 1568279 - RNA, 19 nt, Artificial Sequence
  Description of Artificial Sequence: Synthetic oligonucleotide
  Sense strand starting at position 3018 of SEQ ID NO: 1559986
gagggucucuccuuaguca

SEQ ID NO: 1568280 - RNA, 19 nt, Artificial Sequence
  Description of Artificial Sequence: Synthetic oligonucleotide
  Antisense strand to SEQ ID NO: 1568279
ugacuaaggagagacccuc

SEQ ID NO: 1568281 - RNA, 19 nt, Artificial Sequence
  Description of Artificial Sequence: Synthetic oligonucleotide
  Sense strand starting at position 3019 of SEQ ID NO: 1559986
agggucucuccuuagucau

SEQ ID NO: 1568282 - RNA, 19 nt, Artificial Sequence
  Description of Artificial Sequence: Synthetic oligonucleotide
  Antisense strand to SEQ ID NO: 1568281
augacuaaggagagacccu

SEQ ID NO: 1568283 - RNA, 19 nt, Artificial Sequence
  Description of Artificial Sequence: Synthetic oligonucleotide
  Sense strand starting at position 3062 of SEQ ID NO: 1559986
agggucuuggucuguucau

SEQ ID NO: 1568284 - RNA, 19 nt, Artificial Sequence
  Description of Artificial Sequence: Synthetic oligonucleotide
  Antisense strand to SEQ ID NO: 1568283
augaacagaccaagacccu

SEQ ID NO: 1568285 - RNA, 19 nt, Artificial Sequence
  Description of Artificial Sequence: Synthetic oligonucleotide
  Sense strand starting at position 3063 of SEQ ID NO: 1559986
gggucuuggucuguucauu

SEQ ID NO: 1568286 - RNA, 19 nt, Artificial Sequence
  Description of Artificial Sequence: Synthetic oligonucleotide
  Antisense strand to SEQ ID NO: 1568285
aaugaacagaccaagaccc

SEQ ID NO: 1568287 - RNA, 19 nt, Artificial Sequence
  Description of Artificial Sequence: Synthetic oligonucleotide
  Sense strand starting at position 3492 of SEQ ID NO: 1559986
agcuuagguguugaaguga

SEQ ID NO: 1568288 - RNA, 19 nt, Artificial Sequence
  Description of Artificial Sequence: Synthetic oligonucleotide
  Antisense strand to SEQ ID NO: 1568287
ucacuucaacaccuaagcu

SEQ ID NO: 1568289 - RNA, 19 nt, Artificial Sequence
  Description of Artificial Sequence: Synthetic oligonucleotide
  Sense strand starting at position 3858 of SEQ ID NO: 1559986
ggugauucauucuauggag

SEQ ID NO: 1568290 - RNA, 19 nt, Artificial Sequence
  Description of Artificial Sequence: Synthetic oligonucleotide
  Antisense strand to SEQ ID NO: 1568289
cuccauagaaugaaucacc

SEQ ID NO: 1568291 - RNA, 19 nt, Artificial Sequence
  Description of Artificial Sequence: Synthetic oligonucleotide
  Sense strand starting at position 3916 of SEQ ID NO: 1559986
agaggugaaugugcaguua

SEQ ID NO: 1568292 - RNA, 19 nt, Artificial Sequence
  Description of Artificial Sequence: Synthetic oligonucleotide
  Antisense strand to SEQ ID NO: 1568291
uaacugcacauucaccucu

SEQ ID NO: 1568293 - RNA, 19 nt, Artificial Sequence
  Description of Artificial Sequence: Synthetic oligonucleotide
  Sense strand starting at position 3924 of SEQ ID NO: 1559986
augugcaguuacuuaugua

SEQ ID NO: 1568294 - RNA, 19 nt, Artificial Sequence
  Description of Artificial Sequence: Synthetic oligonucleotide
  Antisense strand to SEQ ID NO: 1568293
uacauaaguaacugcacau

SEQ ID NO: 1568295 - RNA, 19 nt, Artificial Sequence
  Description of Artificial Sequence: Synthetic oligonucleotide
  Sense strand starting at position 3928 of SEQ ID NO: 1559986
gcaguuacuuauguacuaa

SEQ ID NO: 1568296 - RNA, 19 nt, Artificial Sequence
  Description of Artificial Sequence: Synthetic oligonucleotide
  Antisense strand to SEQ ID NO: 1568295
uuaguacauaaguaacugc

SEQ ID NO: 1568297 - RNA, 19 nt, Artificial Sequence
  Description of Artificial Sequence: Synthetic oligonucleotide
  Sense strand starting at position 2025 of SEQ ID NO: 1559987
agccacuucugagaucaga

SEQ ID NO: 1568298 - RNA, 19 nt, Artificial Sequence
  Description of Artificial Sequence: Synthetic oligonucleotide
  Antisense strand to SEQ ID NO: 1568297
ucugaucucagaaguggcu

SEQ ID NO: 1568299 - RNA, 19 nt, Artificial Sequence
  Description of Artificial Sequence: Synthetic oligonucleotide
  Sense strand starting at position 2033 of SEQ ID NO: 1559987
cugagaucagauuaguguu

SEQ ID NO: 1568300 - RNA, 19 nt, Artificial Sequence
  Description of Artificial Sequence: Synthetic oligonucleotide
  Antisense strand to SEQ ID NO: 1568299
aacacuaaucugaucucag

SEQ ID NO: 1568301 - RNA, 19 nt, Artificial Sequence
  Description of Artificial Sequence: Synthetic oligonucleotide
  Sense strand starting at position 2039 of SEQ ID NO: 1559987
ucagauuaguguuuccaau

SEQ ID NO: 1568302 - RNA, 19 nt, Artificial Sequence
  Description of Artificial Sequence: Synthetic oligonucleotide
  Antisense strand to SEQ ID NO: 1568301
auuggaaacacuaaucuga

SEQ ID NO: 1568303 - RNA, 19 nt, Artificial Sequence
  Description of Artificial Sequence: Synthetic oligonucleotide
  Sense strand starting at position 2045 of SEQ ID NO: 1559987
uaguguuuccaauggacca

SEQ ID NO: 1568304 - RNA, 19 nt, Artificial Sequence
  Description of Artificial Sequence: Synthetic oligonucleotide
  Antisense strand to SEQ ID NO: 1568303
ugguccauuggaaacacua

SEQ ID NO: 1568305 - RNA, 19 nt, Artificial Sequence
  Description of Artificial Sequence: Synthetic oligonucleotide
  Sense strand starting at position 2119 of SEQ ID NO: 1559987
gucccauaguguuguauac

SEQ ID NO: 1568306 - RNA, 19 nt, Artificial Sequence
  Description of Artificial Sequence: Synthetic oligonucleotide
  Antisense strand to SEQ ID NO: 1568305
guauacaacacuaugggac

SEQ ID NO: 1568307 - RNA, 19 nt, Artificial Sequence
  Description of Artificial Sequence: Synthetic oligonucleotide
  Sense strand starting at position 2121 of SEQ ID NO: 1559987
cccauaguguuguauacca

SEQ ID NO: 1568308 - RNA, 19 nt, Artificial Sequence
  Description of Artificial Sequence: Synthetic oligonucleotide
  Antisense strand to SEQ ID NO: 1568307
ugguauacaacacuauggg

SEQ ID NO: 1568309 - RNA, 19 nt, Artificial Sequence
  Description of Artificial Sequence: Synthetic oligonucleotide
  Sense strand starting at position 2123 of SEQ ID NO: 1559987
cauaguguuguauaccagu

SEQ ID NO: 1568310 - RNA, 19 nt, Artificial Sequence
  Description of Artificial Sequence: Synthetic oligonucleotide
  Antisense strand to SEQ ID NO: 1568309
acugguauacaacacuaug

SEQ ID NO: 1568311 - RNA, 19 nt, Artificial Sequence
  Description of Artificial Sequence: Synthetic oligonucleotide
  Sense strand starting at position 2129 of SEQ ID NO: 1559987
guuguauaccaguaugguc

SEQ ID NO: 1568312 - RNA, 19 nt, Artificial Sequence
  Description of Artificial Sequence: Synthetic oligonucleotide
  Antisense strand to SEQ ID NO: 1568311
gaccauacugguauacaac

SEQ ID NO: 1568313 - RNA, 19 nt, Artificial Sequence
  Description of Artificial Sequence: Synthetic oligonucleotide
  Sense strand starting at position 2296 of SEQ ID NO: 1559987
guaaacaucucauguguca

SEQ ID NO: 1568314 - RNA, 19 nt, Artificial Sequence
  Description of Artificial Sequence: Synthetic oligonucleotide
  Antisense strand to SEQ ID NO: 1568313
ugacacaugagauguuuac

SEQ ID NO: 1568315 - RNA, 19 nt, Artificial Sequence
  Description of Artificial Sequence: Synthetic oligonucleotide
  Sense strand starting at position 2314 of SEQ ID NO: 1559987
aggccuugugcugggugaa

SEQ ID NO: 1568316 - RNA, 19 nt, Artificial Sequence
  Description of Artificial Sequence: Synthetic oligonucleotide
  Antisense strand to SEQ ID NO: 1568315
uucacccagcacaaggccu

SEQ ID NO: 1568317 - RNA, 19 nt, Artificial Sequence
  Description of Artificial Sequence: Synthetic oligonucleotide
  Sense strand starting at position 2317 of SEQ ID NO: 1559987
ccuugugcugggugaagau

SEQ ID NO: 1568318 - RNA, 19 nt, Artificial Sequence
  Description of Artificial Sequence: Synthetic oligonucleotide
  Antisense strand to SEQ ID NO: 1568317
aucuucacccagcacaagg

SEQ ID NO: 1568319 - RNA, 19 nt, Artificial Sequence
  Description of Artificial Sequence: Synthetic oligonucleotide
  Sense strand starting at position 2404 of SEQ ID NO: 1559987
auaaguaaacagugugcua

SEQ ID NO: 1568320 - RNA, 19 nt, Artificial Sequence
  Description of Artificial Sequence: Synthetic oligonucleotide
  Antisense strand to SEQ ID NO: 1568319
uagcacacuguuuacuuau

SEQ ID NO: 1568321 - RNA, 19 nt, Artificial Sequence
  Description of Artificial Sequence: Synthetic oligonucleotide
  Sense strand starting at position 2605 of SEQ ID NO: 1559987
gcgccacaauaauuaagua

SEQ ID NO: 1568322 - RNA, 19 nt, Artificial Sequence
  Description of Artificial Sequence: Synthetic oligonucleotide
  Antisense strand to SEQ ID NO: 1568321
uacuuaauuauuguggcgc

SEQ ID NO: 1568323 - RNA, 19 nt, Artificial Sequence
  Description of Artificial Sequence: Synthetic oligonucleotide
  Sense strand starting at position 3387 of SEQ ID NO: 1559987
auggcugaaucuugauugu

SEQ ID NO: 1568324 - RNA, 19 nt, Artificial Sequence
  Description of Artificial Sequence: Synthetic oligonucleotide
  Antisense strand to SEQ ID NO: 1568323
acaaucaagauucagccau

SEQ ID NO: 1568325 - RNA, 19 nt, Artificial Sequence
  Description of Artificial Sequence: Synthetic oligonucleotide
  Sense strand starting at position 3390 of SEQ ID NO: 1559987
gcugaaucuugauugugcu

SEQ ID NO: 1568326 - RNA, 19 nt, Artificial Sequence
  Description of Artificial Sequence: Synthetic oligonucleotide
  Antisense strand to SEQ ID NO: 1568325
agcacaaucaagauucagc

SEQ ID NO: 1568327 - RNA, 19 nt, Artificial Sequence
  Description of Artificial Sequence: Synthetic oligonucleotide
  Sense strand starting at position 3391 of SEQ ID NO: 1559987
cugaaucuugauugugcua

SEQ ID NO: 1568328 - RNA, 19 nt, Artificial Sequence
  Description of Artificial Sequence: Synthetic oligonucleotide
  Antisense strand to SEQ ID NO: 1568327
uagcacaaucaagauucag

SEQ ID NO: 1568329 - RNA, 19 nt, Artificial Sequence
  Description of Artificial Sequence: Synthetic oligonucleotide
  Sense strand starting at position 3393 of SEQ ID NO: 1559987
gaaucuugauugugcuaag

SEQ ID NO: 1568330 - RNA, 19 nt, Artificial Sequence
  Description of Artificial Sequence: Synthetic oligonucleotide
  Antisense strand to SEQ ID NO: 1568329
cuuagcacaaucaagauuc

SEQ ID NO: 1568331 - RNA, 19 nt, Artificial Sequence
  Description of Artificial Sequence: Synthetic oligonucleotide
  Sense strand starting at position 3394 of SEQ ID NO: 1559987
aaucuugauugugcuaagu

SEQ ID NO: 1568332 - RNA, 19 nt, Artificial Sequence
  Description of Artificial Sequence: Synthetic oligonucleotide
  Antisense strand to SEQ ID NO: 1568331
acuuagcacaaucaagauu

SEQ ID NO: 1568333 - RNA, 19 nt, Artificial Sequence
  Description of Artificial Sequence: Synthetic oligonucleotide
  Sense strand starting at position 3396 of SEQ ID NO: 1559987
ucuugauugugcuaaguga

SEQ ID NO: 1568334 - RNA, 19 nt, Artificial Sequence
  Description of Artificial Sequence: Synthetic oligonucleotide
  Antisense strand to SEQ ID NO: 1568333
ucacuuagcacaaucaaga

SEQ ID NO: 1568335 - RNA, 19 nt, Artificial Sequence
  Description of Artificial Sequence: Synthetic oligonucleotide
  Sense strand starting at position 3464 of SEQ ID NO: 1559987
aguacuuaagaguagucaa

SEQ ID NO: 1568336 - RNA, 19 nt, Artificial Sequence
  Description of Artificial Sequence: Synthetic oligonucleotide
  Antisense strand to SEQ ID NO: 1568335
uugacuacucuuaaguacu

SEQ ID NO: 1568337 - RNA, 19 nt, Artificial Sequence
  Description of Artificial Sequence: Synthetic oligonucleotide
  Sense strand starting at position 3467 of SEQ ID NO: 1559987
acuuaagaguagucaaacu

SEQ ID NO: 1568338 - RNA, 19 nt, Artificial Sequence
  Description of Artificial Sequence: Synthetic oligonucleotide
  Antisense strand to SEQ ID NO: 1568337
aguuugacuacucuuaagu

SEQ ID NO: 1568339 - RNA, 19 nt, Artificial Sequence
  Description of Artificial Sequence: Synthetic oligonucleotide
  Sense strand starting at position 3581 of SEQ ID NO: 1559987
gauggaaaguguuacagaa

SEQ ID NO: 1568340 - RNA, 19 nt, Artificial Sequence
  Description of Artificial Sequence: Synthetic oligonucleotide
  Antisense strand to SEQ ID NO: 1568339
uucuguaacacuuuccauc

SEQ ID NO: 1568341 - RNA, 19 nt, Artificial Sequence
  Description of Artificial Sequence: Synthetic oligonucleotide
  Sense strand starting at position 3600 of SEQ ID NO: 1559987
auaguugcauaacaugaaa

SEQ ID NO: 1568342 - RNA, 19 nt, Artificial Sequence
  Description of Artificial Sequence: Synthetic oligonucleotide
  Antisense strand to SEQ ID NO: 1568341
uuucauguuaugcaacuau

SEQ ID NO: 1568343 - RNA, 19 nt, Artificial Sequence
  Description of Artificial Sequence: Synthetic oligonucleotide
  Sense strand starting at position 3603 of SEQ ID NO: 1559987
guugcauaacaugaaagua

SEQ ID NO: 1568344 - RNA, 19 nt, Artificial Sequence
  Description of Artificial Sequence: Synthetic oligonucleotide
  Antisense strand to SEQ ID NO: 1568343
uacuuucauguuaugcaac

SEQ ID NO: 1568345 - RNA, 19 nt, Artificial Sequence
  Description of Artificial Sequence: Synthetic oligonucleotide
  Sense strand starting at position 3615 of SEQ ID NO: 1559987
gaaaguauuuaauaucgcu

SEQ ID NO: 1568346 - RNA, 19 nt, Artificial Sequence
  Description of Artificial Sequence: Synthetic oligonucleotide
  Antisense strand to SEQ ID NO: 1568345
agcgauauuaaauacuuuc

SEQ ID NO: 1568347 - RNA, 19 nt, Artificial Sequence
  Description of Artificial Sequence: Synthetic oligonucleotide
  Sense strand starting at position 3618 of SEQ ID NO: 1559987
aguauuuaauaucgcugaa

SEQ ID NO: 1568348 - RNA, 19 nt, Artificial Sequence
  Description of Artificial Sequence: Synthetic oligonucleotide
  Antisense strand to SEQ ID NO: 1568347
uucagcgauauuaaauacu

SEQ ID NO: 1568349 - RNA, 19 nt, Artificial Sequence
  Description of Artificial Sequence: Synthetic oligonucleotide
  Sense strand starting at position 3628 of SEQ ID NO: 1559987
aucgcugaacuguauaguu

SEQ ID NO: 1568350 - RNA, 19 nt, Artificial Sequence
  Description of Artificial Sequence: Synthetic oligonucleotide
  Antisense strand to SEQ ID NO: 1568349
aacuauacaguucagcgau

SEQ ID NO: 1568351 - RNA, 19 nt, Artificial Sequence
  Description of Artificial Sequence: Synthetic oligonucleotide
  Sense strand starting at position 3630 of SEQ ID NO: 1559987
cgcugaacuguauaguuaa

SEQ ID NO: 1568352 - RNA, 19 nt, Artificial Sequence
  Description of Artificial Sequence: Synthetic oligonucleotide
  Antisense strand to SEQ ID NO: 1568351
uuaacuauacaguucagcg

SEQ ID NO: 1568353 - RNA, 19 nt, Artificial Sequence
  Description of Artificial Sequence: Synthetic oligonucleotide
  Sense strand starting at position 3840 of SEQ ID NO: 1559987
ggccauaauguacguaacu

SEQ ID NO: 1568354 - RNA, 19 nt, Artificial Sequence
  Description of Artificial Sequence: Synthetic oligonucleotide
  Antisense strand to SEQ ID NO: 1568353
aguuacguacauuauggcc

SEQ ID NO: 1568355 - RNA, 19 nt, Artificial Sequence
  Description of Artificial Sequence: Synthetic oligonucleotide
  Sense strand starting at position 3849 of SEQ ID NO: 1559987
guacguaacugaucccacu

SEQ ID NO: 1568356 - RNA, 19 nt, Artificial Sequence
  Description of Artificial Sequence: Synthetic oligonucleotide
  Antisense strand to SEQ ID NO: 1568355
agugggaucaguuacguac

SEQ ID NO: 1568357 - RNA, 19 nt, Artificial Sequence
  Description of Artificial Sequence: Synthetic oligonucleotide
  Sense strand starting at position 3908 of SEQ ID NO: 1559987
ggugguaaauuguuaacaa

SEQ ID NO: 1568358 - RNA, 19 nt, Artificial Sequence
  Description of Artificial Sequence: Synthetic oligonucleotide
  Antisense strand to SEQ ID NO: 1568357
uuguuaacaauuuaccacc

SEQ ID NO: 1568359 - RNA, 19 nt, Artificial Sequence
  Description of Artificial Sequence: Synthetic oligonucleotide
  Sense strand starting at position 3909 of SEQ ID NO: 1559987
gugguaaauuguuaacaac

SEQ ID NO: 1568360 - RNA, 19 nt, Artificial Sequence
  Description of Artificial Sequence: Synthetic oligonucleotide
  Antisense strand to SEQ ID NO: 1568359
guuguuaacaauuuaccac

SEQ ID NO: 1568361 - RNA, 19 nt, Artificial Sequence
  Description of Artificial Sequence: Synthetic oligonucleotide
  Sense strand starting at position 3951 of SEQ ID NO: 1559987
agaugaaucuggguaaagc

SEQ ID NO: 1568362 - RNA, 19 nt, Artificial Sequence
  Description of Artificial Sequence: Synthetic oligonucleotide
  Antisense strand to SEQ ID NO: 1568361
gcuuuacccagauucaucu

SEQ ID NO: 1568363 - RNA, 19 nt, Artificial Sequence
  Description of Artificial Sequence: Synthetic oligonucleotide
  Sense strand starting at position 3974 of SEQ ID NO: 1559987
aggauauuccuuugugcua

SEQ ID NO: 1568364 - RNA, 19 nt, Artificial Sequence
  Description of Artificial Sequence: Synthetic oligonucleotide
  Antisense strand to SEQ ID NO: 1568363
uagcacaaaggaauauccu

SEQ ID NO: 1568365 - RNA, 19 nt, Artificial Sequence
  Description of Artificial Sequence: Synthetic oligonucleotide
  Sense strand starting at position 3975 of SEQ ID NO: 1559987
ggauauuccuuugugcuau

SEQ ID NO: 1568366 - RNA, 19 nt, Artificial Sequence
  Description of Artificial Sequence: Synthetic oligonucleotide
  Antisense strand to SEQ ID NO: 1568365
auagcacaaaggaauaucc

SEQ ID NO: 1568367 - RNA, 19 nt, Artificial Sequence
  Description of Artificial Sequence: Synthetic oligonucleotide
  Sense strand starting at position 7 of SEQ ID NO: 1559988
gcuggagaauuauagguga

SEQ ID NO: 1568368 - RNA, 19 nt, Artificial Sequence
  Description of Artificial Sequence: Synthetic oligonucleotide
  Antisense strand to SEQ ID NO: 1568367
ucaccuauaauucuccagc

SEQ ID NO: 1568369 - RNA, 19 nt, Artificial Sequence
  Description of Artificial Sequence: Synthetic oligonucleotide
  Sense strand starting at position 20 of SEQ ID NO: 1559988
aggugaagcugucagagaa

SEQ ID NO: 1568370 - RNA, 19 nt, Artificial Sequence
  Description of Artificial Sequence: Synthetic oligonucleotide
  Antisense strand to SEQ ID NO: 1568369
uucucugacagcuucaccu

SEQ ID NO: 1568371 - RNA, 19 nt, Artificial Sequence
  Description of Artificial Sequence: Synthetic oligonucleotide
  Sense strand starting at position 158 of SEQ ID NO: 1559988
gguguugaguucuauggag

SEQ ID NO: 1568372 - RNA, 19 nt, Artificial Sequence
  Description of Artificial Sequence: Synthetic oligonucleotide
  Antisense strand to SEQ ID NO: 1568371
cuccauagaacucaacacc

SEQ ID NO: 1568373 - RNA, 19 nt, Artificial Sequence
  Description of Artificial Sequence: Synthetic oligonucleotide
  Sense strand starting at position 160 of SEQ ID NO: 1559988
uguugaguucuauggaggu

SEQ ID NO: 1568374 - RNA, 19 nt, Artificial Sequence
  Description of Artificial Sequence: Synthetic oligonucleotide
  Antisense strand to SEQ ID NO: 1568373
accuccauagaacucaaca

SEQ ID NO: 1568375 - RNA, 19 nt, Artificial Sequence
  Description of Artificial Sequence: Synthetic oligonucleotide
  Sense strand starting at position 162 of SEQ ID NO: 1559988
uugaguucuauggaggucu

SEQ ID NO: 1568376 - RNA, 19 nt, Artificial Sequence
  Description of Artificial Sequence: Synthetic oligonucleotide
  Antisense strand to SEQ ID NO: 1568375
agaccuccauagaacucaa

SEQ ID NO: 1568377 - RNA, 19 nt, Artificial Sequence
  Description of Artificial Sequence: Synthetic oligonucleotide
  Sense strand starting at position 164 of SEQ ID NO: 1559988
gaguucuauggaggucuca

SEQ ID NO: 1568378 - RNA, 19 nt, Artificial Sequence
  Description of Artificial Sequence: Synthetic oligonucleotide
  Antisense strand to SEQ ID NO: 1568377
ugagaccuccauagaacuc

SEQ ID NO: 1568379 - RNA, 19 nt, Artificial Sequence
  Description of Artificial Sequence: Synthetic oligonucleotide
  Sense strand starting at position 183 of SEQ ID NO: 1559988
gggucuauaauguguugag

SEQ ID NO: 1568380 - RNA, 19 nt, Artificial Sequence
  Description of Artificial Sequence: Synthetic oligonucleotide
  Antisense strand to SEQ ID NO: 1568379
cucaacacauuauagaccc

SEQ ID NO: 1568381 - RNA, 19 nt, Artificial Sequence
  Description of Artificial Sequence: Synthetic oligonucleotide
  Sense strand starting at position 207 of SEQ ID NO: 1559988
gacucagggucuccaagaa

SEQ ID NO: 1568382 - RNA, 19 nt, Artificial Sequence
  Description of Artificial Sequence: Synthetic oligonucleotide
  Antisense strand to SEQ ID NO: 1568381
uucuuggagacccugaguc

SEQ ID NO: 1568383 - RNA, 19 nt, Artificial Sequence
  Description of Artificial Sequence: Synthetic oligonucleotide
  Sense strand starting at position 254 of SEQ ID NO: 1559988
gucguuggaauguguaacu

SEQ ID NO: 1568384 - RNA, 19 nt, Artificial Sequence
  Description of Artificial Sequence: Synthetic oligonucleotide
  Antisense strand to SEQ ID NO: 1568383
aguuacacauuccaacgac

SEQ ID NO: 1568385 - RNA, 19 nt, Artificial Sequence
  Description of Artificial Sequence: Synthetic oligonucleotide
  Sense strand starting at position 357 of SEQ ID NO: 1559988
uguggaaccucuggagacu

SEQ ID NO: 1568386 - RNA, 19 nt, Artificial Sequence
  Description of Artificial Sequence: Synthetic oligonucleotide
  Antisense strand to SEQ ID NO: 1568385
agucuccagagguuccaca

SEQ ID NO: 1568387 - RNA, 19 nt, Artificial Sequence
  Description of Artificial Sequence: Synthetic oligonucleotide
  Sense strand starting at position 414 of SEQ ID NO: 1559988
ucccgagacccauggucua

SEQ ID NO: 1568388 - RNA, 19 nt, Artificial Sequence
  Description of Artificial Sequence: Synthetic oligonucleotide
  Antisense strand to SEQ ID NO: 1568387
uagaccaugggucucggga

SEQ ID NO: 1568389 - RNA, 19 nt, Artificial Sequence
  Description of Artificial Sequence: Synthetic oligonucleotide
  Sense strand starting at position 452 of SEQ ID NO: 1559988
ggaugccacuggucuauga

SEQ ID NO: 1568390 - RNA, 19 nt, Artificial Sequence
  Description of Artificial Sequence: Synthetic oligonucleotide
  Antisense strand to SEQ ID NO: 1568389
ucauagaccaguggcaucc

SEQ ID NO: 1568391 - RNA, 19 nt, Artificial Sequence
  Description of Artificial Sequence: Synthetic oligonucleotide
  Sense strand starting at position 524 of SEQ ID NO: 1559988
gagggucuguaagacuuua

SEQ ID NO: 1568392 - RNA, 19 nt, Artificial Sequence
  Description of Artificial Sequence: Synthetic oligonucleotide
  Antisense strand to SEQ ID NO: 1568391
uaaagucuuacagacccuc

SEQ ID NO: 1568393 - RNA, 19 nt, Artificial Sequence
  Description of Artificial Sequence: Synthetic oligonucleotide
  Sense strand starting at position 534 of SEQ ID NO: 1559988
aagacuuuauacggaauga

SEQ ID NO: 1568394 - RNA, 19 nt, Artificial Sequence
  Description of Artificial Sequence: Synthetic oligonucleotide
  Antisense strand to SEQ ID NO: 1568393
ucauuccguauaaagucuu

SEQ ID NO: 1568395 - RNA, 19 nt, Artificial Sequence
  Description of Artificial Sequence: Synthetic oligonucleotide
  Sense strand starting at position 1055 of SEQ ID NO: 1559988
ccgaguucgaucggagauc

SEQ ID NO: 1568396 - RNA, 19 nt, Artificial Sequence
  Description of Artificial Sequence: Synthetic oligonucleotide
  Antisense strand to SEQ ID NO: 1568395
gaucuccgaucgaacucgg

SEQ ID NO: 1568397 - RNA, 19 nt, Artificial Sequence
  Description of Artificial Sequence: Synthetic oligonucleotide
  Sense strand starting at position 1258 of SEQ ID NO: 1559988
ucugacaugcaguguaauc

SEQ ID NO: 1568398 - RNA, 19 nt, Artificial Sequence
  Description of Artificial Sequence: Synthetic oligonucleotide
  Antisense strand to SEQ ID NO: 1568397
gauuacacugcaugucaga

SEQ ID NO: 1568399 - RNA, 19 nt, Artificial Sequence
  Description of Artificial Sequence: Synthetic oligonucleotide
  Sense strand starting at position 1263 of SEQ ID NO: 1559988
caugcaguguaaucugcaa

SEQ ID NO: 1568400 - RNA, 19 nt, Artificial Sequence
  Description of Artificial Sequence: Synthetic oligonucleotide
  Antisense strand to SEQ ID NO: 1568399
uugcagauuacacugcaug

SEQ ID NO: 1568401 - RNA, 19 nt, Artificial Sequence
  Description of Artificial Sequence: Synthetic oligonucleotide
  Sense strand starting at position 1284 of SEQ ID NO: 1559988
aguaaugacuucucuguag

SEQ ID NO: 1568402 - RNA, 19 nt, Artificial Sequence
  Description of Artificial Sequence: Synthetic oligonucleotide
  Antisense strand to SEQ ID NO: 1568401
cuacagagaagucauuacu

SEQ ID NO: 1568403 - RNA, 19 nt, Artificial Sequence
  Description of Artificial Sequence: Synthetic oligonucleotide
  Sense strand starting at position 1288 of SEQ ID NO: 1559988
augacuucucuguagaccu

SEQ ID NO: 1568404 - RNA, 19 nt, Artificial Sequence
  Description of Artificial Sequence: Synthetic oligonucleotide
  Antisense strand to SEQ ID NO: 1568403
aggucuacagagaagucau

SEQ ID NO: 1568405 - RNA, 19 nt, Artificial Sequence
  Description of Artificial Sequence: Synthetic oligonucleotide
  Sense strand starting at position 1359 of SEQ ID NO: 1559988
ugucucucacgguauaauu

SEQ ID NO: 1568406 - RNA, 19 nt, Artificial Sequence
  Description of Artificial Sequence: Synthetic oligonucleotide
  Antisense strand to SEQ ID NO: 1568405
aauuauaccgugagagaca

SEQ ID NO: 1568407 - RNA, 19 nt, Artificial Sequence
  Description of Artificial Sequence: Synthetic oligonucleotide
  Sense strand starting at position 1361 of SEQ ID NO: 1559988
ucucucacgguauaauuaa

SEQ ID NO: 1568408 - RNA, 19 nt, Artificial Sequence
  Description of Artificial Sequence: Synthetic oligonucleotide
  Antisense strand to SEQ ID NO: 1568407
uuaauuauaccgugagaga

SEQ ID NO: 1568409 - RNA, 19 nt, Artificial Sequence
  Description of Artificial Sequence: Synthetic oligonucleotide
  Sense strand starting at position 1631 of SEQ ID NO: 1559988
augguagugaucguccguu

SEQ ID NO: 1568410 - RNA, 19 nt, Artificial Sequence
  Description of Artificial Sequence: Synthetic oligonucleotide
  Antisense strand to SEQ ID NO: 1568409
aacggacgaucacuaccau

SEQ ID NO: 1568411 - RNA, 19 nt, Artificial Sequence
  Description of Artificial Sequence: Synthetic oligonucleotide
  Sense strand starting at position 1633 of SEQ ID NO: 1559988
gguagugaucguccguucu

SEQ ID NO: 1568412 - RNA, 19 nt, Artificial Sequence
  Description of Artificial Sequence: Synthetic oligonucleotide
  Antisense strand to SEQ ID NO: 1568411
agaacggacgaucacuacc

SEQ ID NO: 1568413 - RNA, 19 nt, Artificial Sequence
  Description of Artificial Sequence: Synthetic oligonucleotide
  Sense strand starting at position 1636 of SEQ ID NO: 1559988
agugaucguccguucucca

SEQ ID NO: 1568414 - RNA, 19 nt, Artificial Sequence
  Description of Artificial Sequence: Synthetic oligonucleotide
  Antisense strand to SEQ ID NO: 1568413
uggagaacggacgaucacu

SEQ ID NO: 1568415 - RNA, 19 nt, Artificial Sequence
  Description of Artificial Sequence: Synthetic oligonucleotide
  Sense strand starting at position 1709 of SEQ ID NO: 1559988
gggcacucgucaaguguga

SEQ ID NO: 1568416 - RNA, 19 nt, Artificial Sequence
  Description of Artificial Sequence: Synthetic oligonucleotide
  Antisense strand to SEQ ID NO: 1568415
ucacacuugacgagugccc

SEQ ID NO: 1568417 - RNA, 19 nt, Artificial Sequence
  Description of Artificial Sequence: Synthetic oligonucleotide
  Sense strand starting at position 1711 of SEQ ID NO: 1559988
gcacucgucaagugugagu

SEQ ID NO: 1568418 - RNA, 19 nt, Artificial Sequence
  Description of Artificial Sequence: Synthetic oligonucleotide
  Antisense strand to SEQ ID NO: 1568417
acucacacuugacgagugc

SEQ ID NO: 1568419 - RNA, 19 nt, Artificial Sequence
  Description of Artificial Sequence: Synthetic oligonucleotide
  Sense strand starting at position 1738 of SEQ ID NO: 1559988
cuuugcucccuuugacaga

SEQ ID NO: 1568420 - RNA, 19 nt, Artificial Sequence
  Description of Artificial Sequence: Synthetic oligonucleotide
  Antisense strand to SEQ ID NO: 1568419
ucugucaaagggagcaaag

SEQ ID NO: 1568421 - RNA, 19 nt, Artificial Sequence
  Description of Artificial Sequence: Synthetic oligonucleotide
  Sense strand starting at position 2741 of SEQ ID NO: 1559988
ucaugaucccugggucuca

SEQ ID NO: 1568422 - RNA, 19 nt, Artificial Sequence
  Description of Artificial Sequence: Synthetic oligonucleotide
  Antisense strand to SEQ ID NO: 1568421
ugagacccagggaucauga

SEQ ID NO: 1568423 - RNA, 19 nt, Artificial Sequence
  Description of Artificial Sequence: Synthetic oligonucleotide
  Sense strand starting at position 2780 of SEQ ID NO: 1559988
ucaggaaauccgugucucu

SEQ ID NO: 1568424 - RNA, 19 nt, Artificial Sequence
  Description of Artificial Sequence: Synthetic oligonucleotide
  Antisense strand to SEQ ID NO: 1568423
agagacacggauuuccuga

SEQ ID NO: 1568425 - RNA, 19 nt, Artificial Sequence
  Description of Artificial Sequence: Synthetic oligonucleotide
  Sense strand starting at position 2818 of SEQ ID NO: 1559988
ccgggaucucccugcuauc

SEQ ID NO: 1568426 - RNA, 19 nt, Artificial Sequence
  Description of Artificial Sequence: Synthetic oligonucleotide
  Antisense strand to SEQ ID NO: 1568425
gauagcagggagaucccgg

SEQ ID NO: 1568427 - RNA, 19 nt, Artificial Sequence
  Description of Artificial Sequence: Synthetic oligonucleotide
  Sense strand starting at position 2878 of SEQ ID NO: 1559988
aagucaacgcaucgggaaa

SEQ ID NO: 1568428 - RNA, 19 nt, Artificial Sequence
  Description of Artificial Sequence: Synthetic oligonucleotide
  Antisense strand to SEQ ID NO: 1568427
uuucccgaugcguugacuu

SEQ ID NO: 1568429 - RNA, 19 nt, Artificial Sequence
  Description of Artificial Sequence: Synthetic oligonucleotide
  Sense strand starting at position 2905 of SEQ ID NO: 1559988
gucugaauucuguacuagc

SEQ ID NO: 1568430 - RNA, 19 nt, Artificial Sequence
  Description of Artificial Sequence: Synthetic oligonucleotide
  Antisense strand to SEQ ID NO: 1568429
gcuaguacagaauucagac

SEQ ID NO: 1568431 - RNA, 19 nt, Artificial Sequence
  Description of Artificial Sequence: Synthetic oligonucleotide
  Sense strand starting at position 2932 of SEQ ID NO: 1559988
acaagauagucccuguguu

SEQ ID NO: 1568432 - RNA, 19 nt, Artificial Sequence
  Description of Artificial Sequence: Synthetic oligonucleotide
  Antisense strand to SEQ ID NO: 1568431
aacacagggacuaucuugu

SEQ ID NO: 1568433 - RNA, 19 nt, Artificial Sequence
  Description of Artificial Sequence: Synthetic oligonucleotide
  Sense strand starting at position 2933 of SEQ ID NO: 1559988
caagauagucccuguguuu

SEQ ID NO: 1568434 - RNA, 19 nt, Artificial Sequence
  Description of Artificial Sequence: Synthetic oligonucleotide
  Antisense strand to SEQ ID NO: 1568433
aaacacagggacuaucuug

SEQ ID NO: 1568435 - RNA, 19 nt, Artificial Sequence
  Description of Artificial Sequence: Synthetic oligonucleotide
  Sense strand starting at position 2944 of SEQ ID NO: 1559988
cuguguuuccaaggcuuaa

SEQ ID NO: 1568436 - RNA, 19 nt, Artificial Sequence
  Description of Artificial Sequence: Synthetic oligonucleotide
  Antisense strand to SEQ ID NO: 1568435
uuaagccuuggaaacacag

SEQ ID NO: 1568437 - RNA, 19 nt, Artificial Sequence
  Description of Artificial Sequence: Synthetic oligonucleotide
  Sense strand starting at position 2955 of SEQ ID NO: 1559988
aggcuuaaauacgcauaaa

SEQ ID NO: 1568438 - RNA, 19 nt, Artificial Sequence
  Description of Artificial Sequence: Synthetic oligonucleotide
  Antisense strand to SEQ ID NO: 1568437
uuuaugcguauuuaagccu

SEQ ID NO: 1568439 - RNA, 19 nt, Artificial Sequence
  Description of Artificial Sequence: Synthetic oligonucleotide
  Sense strand starting at position 3149 of SEQ ID NO: 1559988
acaagaaucgcuugaggug

SEQ ID NO: 1568440 - RNA, 19 nt, Artificial Sequence
  Description of Artificial Sequence: Synthetic oligonucleotide
  Antisense strand to SEQ ID NO: 1568439
caccucaagcgauucuugu

SEQ ID NO: 1568441 - RNA, 19 nt, Artificial Sequence
  Description of Artificial Sequence: Synthetic oligonucleotide
  Sense strand starting at position 3171 of SEQ ID NO: 1559988
guugaagugggcugagauu

SEQ ID NO: 1568442 - RNA, 19 nt, Artificial Sequence
  Description of Artificial Sequence: Synthetic oligonucleotide
  Antisense strand to SEQ ID NO: 1568441
aaucucagcccacuucaac

SEQ ID NO: 1568443 - RNA, 19 nt, Artificial Sequence
  Description of Artificial Sequence: Synthetic oligonucleotide
  Sense strand starting at position 3551 of SEQ ID NO: 1559988
guaaguaauuugguagcca

SEQ ID NO: 1568444 - RNA, 19 nt, Artificial Sequence
  Description of Artificial Sequence: Synthetic oligonucleotide
  Antisense strand to SEQ ID NO: 1568443
uggcuaccaaauuacuuac

SEQ ID NO: 1568445 - RNA, 19 nt, Artificial Sequence
  Description of Artificial Sequence: Synthetic oligonucleotide
  Sense strand starting at position 3826 of SEQ ID NO: 1559988
gucugcaguugggaagaau

SEQ ID NO: 1568446 - RNA, 19 nt, Artificial Sequence
  Description of Artificial Sequence: Synthetic oligonucleotide
  Antisense strand to SEQ ID NO: 1568445
auucuucccaacugcagac

SEQ ID NO: 1568447 - RNA, 19 nt, Artificial Sequence
  Description of Artificial Sequence: Synthetic oligonucleotide
  Sense strand starting at position 184 of SEQ ID NO: 1559989
uuuaauccucucggugacu

SEQ ID NO: 1568448 - RNA, 19 nt, Artificial Sequence
  Description of Artificial Sequence: Synthetic oligonucleotide
  Antisense strand to SEQ ID NO: 1568447
agucaccgagaggauuaaa

SEQ ID NO: 1568449 - RNA, 19 nt, Artificial Sequence
  Description of Artificial Sequence: Synthetic oligonucleotide
  Sense strand starting at position 1026 of SEQ ID NO: 1559989
ucuuauggaugccuggaaa

SEQ ID NO: 1568450 - RNA, 19 nt, Artificial Sequence
  Description of Artificial Sequence: Synthetic oligonucleotide
  Antisense strand to SEQ ID NO: 1568449
uuuccaggcauccauaaga

SEQ ID NO: 1568451 - RNA, 19 nt, Artificial Sequence
  Description of Artificial Sequence: Synthetic oligonucleotide
  Sense strand starting at position 1049 of SEQ ID NO: 1559989
acggguauguggucacuau

SEQ ID NO: 1568452 - RNA, 19 nt, Artificial Sequence
  Description of Artificial Sequence: Synthetic oligonucleotide
  Antisense strand to SEQ ID NO: 1568451
auagugaccacauacccgu

SEQ ID NO: 1568453 - RNA, 19 nt, Artificial Sequence
  Description of Artificial Sequence: Synthetic oligonucleotide
  Sense strand starting at position 1050 of SEQ ID NO: 1559989
cggguauguggucacuaug

SEQ ID NO: 1568454 - RNA, 19 nt, Artificial Sequence
  Description of Artificial Sequence: Synthetic oligonucleotide
  Antisense strand to SEQ ID NO: 1568453
cauagugaccacauacccg

SEQ ID NO: 1568455 - RNA, 19 nt, Artificial Sequence
  Description of Artificial Sequence: Synthetic oligonucleotide
  Sense strand starting at position 1136 of SEQ ID NO: 1559989
cgaggagugucgccuguuu

SEQ ID NO: 1568456 - RNA, 19 nt, Artificial Sequence
  Description of Artificial Sequence: Synthetic oligonucleotide
  Antisense strand to SEQ ID NO: 1568455
aaacaggcgacacuccucg

SEQ ID NO: 1568457 - RNA, 19 nt, Artificial Sequence
  Description of Artificial Sequence: Synthetic oligonucleotide
  Sense strand starting at position 1138 of SEQ ID NO: 1559989
aggagugucgccuguuuag

SEQ ID NO: 1568458 - RNA, 19 nt, Artificial Sequence
  Description of Artificial Sequence: Synthetic oligonucleotide
  Antisense strand to SEQ ID NO: 1568457
cuaaacaggcgacacuccu

SEQ ID NO: 1568459 - RNA, 19 nt, Artificial Sequence
  Description of Artificial Sequence: Synthetic oligonucleotide
  Sense strand starting at position 1186 of SEQ ID NO: 1559989
gcuggagaauuauagguga

SEQ ID NO: 1568460 - RNA, 19 nt, Artificial Sequence
  Description of Artificial Sequence: Synthetic oligonucleotide
  Antisense strand to SEQ ID NO: 1568459
ucaccuauaauucuccagc

SEQ ID NO: 1568461 - RNA, 19 nt, Artificial Sequence
  Description of Artificial Sequence: Synthetic oligonucleotide
  Sense strand starting at position 1199 of SEQ ID NO: 1559989
aggugaagcugucagagaa

SEQ ID NO: 1568462 - RNA, 19 nt, Artificial Sequence
  Description of Artificial Sequence: Synthetic oligonucleotide
  Antisense strand to SEQ ID NO: 1568461
uucucugacagcuucaccu

SEQ ID NO: 1568463 - RNA, 19 nt, Artificial Sequence
  Description of Artificial Sequence: Synthetic oligonucleotide
  Sense strand starting at position 1337 of SEQ ID NO: 1559989
gguguugaguucuauggag

SEQ ID NO: 1568464 - RNA, 19 nt, Artificial Sequence
  Description of Artificial Sequence: Synthetic oligonucleotide
  Antisense strand to SEQ ID NO: 1568463
cuccauagaacucaacacc

SEQ ID NO: 1568465 - RNA, 19 nt, Artificial Sequence
  Description of Artificial Sequence: Synthetic oligonucleotide
  Sense strand starting at position 1339 of SEQ ID NO: 1559989
uguugaguucuauggaggu

SEQ ID NO: 1568466 - RNA, 19 nt, Artificial Sequence
  Description of Artificial Sequence: Synthetic oligonucleotide
  Antisense strand to SEQ ID NO: 1568465
accuccauagaacucaaca

SEQ ID NO: 1568467 - RNA, 19 nt, Artificial Sequence
  Description of Artificial Sequence: Synthetic oligonucleotide
  Sense strand starting at position 1341 of SEQ ID NO: 1559989
uugaguucuauggaggucu

SEQ ID NO: 1568468 - RNA, 19 nt, Artificial Sequence
  Description of Artificial Sequence: Synthetic oligonucleotide
  Antisense strand to SEQ ID NO: 1568467
agaccuccauagaacucaa

SEQ ID NO: 1568469 - RNA, 19 nt, Artificial Sequence
  Description of Artificial Sequence: Synthetic oligonucleotide
  Sense strand starting at position 1343 of SEQ ID NO: 1559989
gaguucuauggaggucuca

SEQ ID NO: 1568470 - RNA, 19 nt, Artificial Sequence
  Description of Artificial Sequence: Synthetic oligonucleotide
  Antisense strand to SEQ ID NO: 1568469
ugagaccuccauagaacuc

SEQ ID NO: 1568471 - RNA, 19 nt, Artificial Sequence
  Description of Artificial Sequence: Synthetic oligonucleotide
  Sense strand starting at position 1362 of SEQ ID NO: 1559989
gggucuauaauguguugag

SEQ ID NO: 1568472 - RNA, 19 nt, Artificial Sequence
  Description of Artificial Sequence: Synthetic oligonucleotide
  Antisense strand to SEQ ID NO: 1568471
cucaacacauuauagaccc

SEQ ID NO: 1568473 - RNA, 19 nt, Artificial Sequence
  Description of Artificial Sequence: Synthetic oligonucleotide
  Sense strand starting at position 1386 of SEQ ID NO: 1559989
gacucagggucuccaagaa

SEQ ID NO: 1568474 - RNA, 19 nt, Artificial Sequence
  Description of Artificial Sequence: Synthetic oligonucleotide
  Antisense strand to SEQ ID NO: 1568473
uucuuggagacccugaguc

SEQ ID NO: 1568475 - RNA, 19 nt, Artificial Sequence
  Description of Artificial Sequence: Synthetic oligonucleotide
  Sense strand starting at position 1433 of SEQ ID NO: 1559989
gucguuggaauguguaacu

SEQ ID NO: 1568476 - RNA, 19 nt, Artificial Sequence
  Description of Artificial Sequence: Synthetic oligonucleotide
  Antisense strand to SEQ ID NO: 1568475
aguuacacauuccaacgac

SEQ ID NO: 1568477 - RNA, 19 nt, Artificial Sequence
  Description of Artificial Sequence: Synthetic oligonucleotide
  Sense strand starting at position 1536 of SEQ ID NO: 1559989
uguggaaccucuggagacu

SEQ ID NO: 1568478 - RNA, 19 nt, Artificial Sequence
  Description of Artificial Sequence: Synthetic oligonucleotide
  Antisense strand to SEQ ID NO: 1568477
agucuccagagguuccaca

SEQ ID NO: 1568479 - RNA, 19 nt, Artificial Sequence
  Description of Artificial Sequence: Synthetic oligonucleotide
  Sense strand starting at position 1593 of SEQ ID NO: 1559989
ucccgagacccauggucua

SEQ ID NO: 1568480 - RNA, 19 nt, Artificial Sequence
  Description of Artificial Sequence: Synthetic oligonucleotide
  Antisense strand to SEQ ID NO: 1568479
uagaccaugggucucggga

SEQ ID NO: 1568481 - RNA, 19 nt, Artificial Sequence
  Description of Artificial Sequence: Synthetic oligonucleotide
  Sense strand starting at position 1631 of SEQ ID NO: 1559989
ggaugccacuggucuauga

SEQ ID NO: 1568482 - RNA, 19 nt, Artificial Sequence
  Description of Artificial Sequence: Synthetic oligonucleotide
  Antisense strand to SEQ ID NO: 1568481
ucauagaccaguggcaucc

SEQ ID NO: 1568483 - RNA, 19 nt, Artificial Sequence
  Description of Artificial Sequence: Synthetic oligonucleotide
  Sense strand starting at position 1703 of SEQ ID NO: 1559989
gagggucuguaagacuuua

SEQ ID NO: 1568484 - RNA, 19 nt, Artificial Sequence
  Description of Artificial Sequence: Synthetic oligonucleotide
  Antisense strand to SEQ ID NO: 1568483
uaaagucuuacagacccuc

SEQ ID NO: 1568485 - RNA, 19 nt, Artificial Sequence
  Description of Artificial Sequence: Synthetic oligonucleotide
  Sense strand starting at position 1713 of SEQ ID NO: 1559989
aagacuuuauacggaauga

SEQ ID NO: 1568486 - RNA, 19 nt, Artificial Sequence
  Description of Artificial Sequence: Synthetic oligonucleotide
  Antisense strand to SEQ ID NO: 1568485
ucauuccguauaaagucuu

SEQ ID NO: 1568487 - RNA, 19 nt, Artificial Sequence
  Description of Artificial Sequence: Synthetic oligonucleotide
  Sense strand starting at position 2234 of SEQ ID NO: 1559989
ccgaguucgaucggagauc

SEQ ID NO: 1568488 - RNA, 19 nt, Artificial Sequence
  Description of Artificial Sequence: Synthetic oligonucleotide
  Antisense strand to SEQ ID NO: 1568487
gaucuccgaucgaacucgg

SEQ ID NO: 1568489 - RNA, 19 nt, Artificial Sequence
  Description of Artificial Sequence: Synthetic oligonucleotide
  Sense strand starting at position 2235 of SEQ ID NO: 1559989
cgaguucgaucggagaucu

SEQ ID NO: 1568490 - RNA, 19 nt, Artificial Sequence
  Description of Artificial Sequence: Synthetic oligonucleotide
  Antisense strand to SEQ ID NO: 1568489
agaucuccgaucgaacucg

SEQ ID NO: 1568491 - RNA, 19 nt, Artificial Sequence
  Description of Artificial Sequence: Synthetic oligonucleotide
  Sense strand starting at position 2410 of SEQ ID NO: 1559989
agucuugaguuccagcaca

SEQ ID NO: 1568492 - RNA, 19 nt, Artificial Sequence
  Description of Artificial Sequence: Synthetic oligonucleotide
  Antisense strand to SEQ ID NO: 1568491
ugugcuggaacucaagacu

SEQ ID NO: 1568493 - RNA, 19 nt, Artificial Sequence
  Description of Artificial Sequence: Synthetic oligonucleotide
  Sense strand starting at position 2437 of SEQ ID NO: 1559989
ucugacaugcaguguaauc

SEQ ID NO: 1568494 - RNA, 19 nt, Artificial Sequence
  Description of Artificial Sequence: Synthetic oligonucleotide
  Antisense strand to SEQ ID NO: 1568493
gauuacacugcaugucaga

SEQ ID NO: 1568495 - RNA, 19 nt, Artificial Sequence
  Description of Artificial Sequence: Synthetic oligonucleotide
  Sense strand starting at position 2442 of SEQ ID NO: 1559989
caugcaguguaaucugcaa

SEQ ID NO: 1568496 - RNA, 19 nt, Artificial Sequence
  Description of Artificial Sequence: Synthetic oligonucleotide
  Antisense strand to SEQ ID NO: 1568495
uugcagauuacacugcaug

SEQ ID NO: 1568497 - RNA, 19 nt, Artificial Sequence
  Description of Artificial Sequence: Synthetic oligonucleotide
  Sense strand starting at position 2463 of SEQ ID NO: 1559989
aguaaugacuucucuguag

SEQ ID NO: 1568498 - RNA, 19 nt, Artificial Sequence
  Description of Artificial Sequence: Synthetic oligonucleotide
  Antisense strand to SEQ ID NO: 1568497
cuacagagaagucauuacu

SEQ ID NO: 1568499 - RNA, 19 nt, Artificial Sequence
  Description of Artificial Sequence: Synthetic oligonucleotide
  Sense strand starting at position 2467 of SEQ ID NO: 1559989
augacuucucuguagaccu

SEQ ID NO: 1568500 - RNA, 19 nt, Artificial Sequence
  Description of Artificial Sequence: Synthetic oligonucleotide
  Antisense strand to SEQ ID NO: 1568499
aggucuacagagaagucau

SEQ ID NO: 1568501 - RNA, 19 nt, Artificial Sequence
  Description of Artificial Sequence: Synthetic oligonucleotide
  Sense strand starting at position 2538 of SEQ ID NO: 1559989
ugucucucacgguauaauu

SEQ ID NO: 1568502 - RNA, 19 nt, Artificial Sequence
  Description of Artificial Sequence: Synthetic oligonucleotide
  Antisense strand to SEQ ID NO: 1568501
aauuauaccgugagagaca

SEQ ID NO: 1568503 - RNA, 19 nt, Artificial Sequence
  Description of Artificial Sequence: Synthetic oligonucleotide
  Sense strand starting at position 2540 of SEQ ID NO: 1559989
ucucucacgguauaauuaa

SEQ ID NO: 1568504 - RNA, 19 nt, Artificial Sequence
  Description of Artificial Sequence: Synthetic oligonucleotide
  Antisense strand to SEQ ID NO: 1568503
uuaauuauaccgugagaga

SEQ ID NO: 1568505 - RNA, 19 nt, Artificial Sequence
  Description of Artificial Sequence: Synthetic oligonucleotide
  Sense strand starting at position 2547 of SEQ ID NO: 1559989
cgguauaauuaaugaccua

SEQ ID NO: 1568506 - RNA, 19 nt, Artificial Sequence
  Description of Artificial Sequence: Synthetic oligonucleotide
  Antisense strand to SEQ ID NO: 1568505
uaggucauuaauuauaccg

SEQ ID NO: 1568507 - RNA, 19 nt, Artificial Sequence
  Description of Artificial Sequence: Synthetic oligonucleotide
  Sense strand starting at position 2802 of SEQ ID NO: 1559989
cccguacaaugguagugau

SEQ ID NO: 1568508 - RNA, 19 nt, Artificial Sequence
  Description of Artificial Sequence: Synthetic oligonucleotide
  Antisense strand to SEQ ID NO: 1568507
aucacuaccauuguacggg

SEQ ID NO: 1568509 - RNA, 19 nt, Artificial Sequence
  Description of Artificial Sequence: Synthetic oligonucleotide
  Sense strand starting at position 2810 of SEQ ID NO: 1559989
augguagugaucguccguu

SEQ ID NO: 1568510 - RNA, 19 nt, Artificial Sequence
  Description of Artificial Sequence: Synthetic oligonucleotide
  Antisense strand to SEQ ID NO: 1568509
aacggacgaucacuaccau

SEQ ID NO: 1568511 - RNA, 19 nt, Artificial Sequence
  Description of Artificial Sequence: Synthetic oligonucleotide
  Sense strand starting at position 2812 of SEQ ID NO: 1559989
gguagugaucguccguucu

SEQ ID NO: 1568512 - RNA, 19 nt, Artificial Sequence
  Description of Artificial Sequence: Synthetic oligonucleotide
  Antisense strand to SEQ ID NO: 1568511
agaacggacgaucacuacc

SEQ ID NO: 1568513 - RNA, 19 nt, Artificial Sequence
  Description of Artificial Sequence: Synthetic oligonucleotide
  Sense strand starting at position 2815 of SEQ ID NO: 1559989
agugaucguccguucucca

SEQ ID NO: 1568514 - RNA, 19 nt, Artificial Sequence
  Description of Artificial Sequence: Synthetic oligonucleotide
  Antisense strand to SEQ ID NO: 1568513
uggagaacggacgaucacu

SEQ ID NO: 1568515 - RNA, 19 nt, Artificial Sequence
  Description of Artificial Sequence: Synthetic oligonucleotide
  Sense strand starting at position 2888 of SEQ ID NO: 1559989
gggcacucgucaaguguga

SEQ ID NO: 1568516 - RNA, 19 nt, Artificial Sequence
  Description of Artificial Sequence: Synthetic oligonucleotide
  Antisense strand to SEQ ID NO: 1568515
ucacacuugacgagugccc

SEQ ID NO: 1568517 - RNA, 19 nt, Artificial Sequence
  Description of Artificial Sequence: Synthetic oligonucleotide
  Sense strand starting at position 2890 of SEQ ID NO: 1559989
gcacucgucaagugugagu

SEQ ID NO: 1568518 - RNA, 19 nt, Artificial Sequence
  Description of Artificial Sequence: Synthetic oligonucleotide
  Antisense strand to SEQ ID NO: 1568517
acucacacuugacgagugc

SEQ ID NO: 1568519 - RNA, 19 nt, Artificial Sequence
  Description of Artificial Sequence: Synthetic oligonucleotide
  Sense strand starting at position 2917 of SEQ ID NO: 1559989
cuuugcucccuuugacaga

SEQ ID NO: 1568520 - RNA, 19 nt, Artificial Sequence
  Description of Artificial Sequence: Synthetic oligonucleotide
  Antisense strand to SEQ ID NO: 1568519
ucugucaaagggagcaaag

SEQ ID NO: 1568521 - RNA, 19 nt, Artificial Sequence
  Description of Artificial Sequence: Synthetic oligonucleotide
  Sense strand starting at position 2918 of SEQ ID NO: 1559989
uuugcucccuuugacagau

SEQ ID NO: 1568522 - RNA, 19 nt, Artificial Sequence
  Description of Artificial Sequence: Synthetic oligonucleotide
  Antisense strand to SEQ ID NO: 1568521
aucugucaaagggagcaaa

SEQ ID NO: 1568523 - RNA, 19 nt, Artificial Sequence
  Description of Artificial Sequence: Synthetic oligonucleotide
  Sense strand starting at position 3920 of SEQ ID NO: 1559989
ucaugaucccugggucuca

SEQ ID NO: 1568524 - RNA, 19 nt, Artificial Sequence
  Description of Artificial Sequence: Synthetic oligonucleotide
  Antisense strand to SEQ ID NO: 1568523
ugagacccagggaucauga

SEQ ID NO: 1568525 - RNA, 19 nt, Artificial Sequence
  Description of Artificial Sequence: Synthetic oligonucleotide
  Sense strand starting at position 3959 of SEQ ID NO: 1559989
ucaggaaauccgugucucu

SEQ ID NO: 1568526 - RNA, 19 nt, Artificial Sequence
  Description of Artificial Sequence: Synthetic oligonucleotide
  Antisense strand to SEQ ID NO: 1568525
agagacacggauuuccuga

SEQ ID NO: 1568527 - RNA, 19 nt, Artificial Sequence
  Description of Artificial Sequence: Synthetic oligonucleotide
  Sense strand starting at position 128 of SEQ ID NO: 1559990
auucgauacucucugagaa

SEQ ID NO: 1568528 - RNA, 19 nt, Artificial Sequence
  Description of Artificial Sequence: Synthetic oligonucleotide
  Antisense strand to SEQ ID NO: 1568527
uucucagagaguaucgaau

SEQ ID NO: 1568529 - RNA, 19 nt, Artificial Sequence
  Description of Artificial Sequence: Synthetic oligonucleotide
  Sense strand starting at position 129 of SEQ ID NO: 1559990
uucgauacucucugagaac

SEQ ID NO: 1568530 - RNA, 19 nt, Artificial Sequence
  Description of Artificial Sequence: Synthetic oligonucleotide
  Antisense strand to SEQ ID NO: 1568529
guucucagagaguaucgaa

SEQ ID NO: 1568531 - RNA, 19 nt, Artificial Sequence
  Description of Artificial Sequence: Synthetic oligonucleotide
  Sense strand starting at position 130 of SEQ ID NO: 1559990
ucgauacucucugagaacu

SEQ ID NO: 1568532 - RNA, 19 nt, Artificial Sequence
  Description of Artificial Sequence: Synthetic oligonucleotide
  Antisense strand to SEQ ID NO: 1568531
aguucucagagaguaucga

SEQ ID NO: 1568533 - RNA, 19 nt, Artificial Sequence
  Description of Artificial Sequence: Synthetic oligonucleotide
  Sense strand starting at position 526 of SEQ ID NO: 1559990
ggaagauuaucugucaaug

SEQ ID NO: 1568534 - RNA, 19 nt, Artificial Sequence
  Description of Artificial Sequence: Synthetic oligonucleotide
  Antisense strand to SEQ ID NO: 1568533
cauugacagauaaucuucc

SEQ ID NO: 1568535 - RNA, 19 nt, Artificial Sequence
  Description of Artificial Sequence: Synthetic oligonucleotide
  Sense strand starting at position 531 of SEQ ID NO: 1559990
auuaucugucaaugucaca

SEQ ID NO: 1568536 - RNA, 19 nt, Artificial Sequence
  Description of Artificial Sequence: Synthetic oligonucleotide
  Antisense strand to SEQ ID NO: 1568535
ugugacauugacagauaau

SEQ ID NO: 1568537 - RNA, 19 nt, Artificial Sequence
  Description of Artificial Sequence: Synthetic oligonucleotide
  Sense strand starting at position 579 of SEQ ID NO: 1559990
aauguuuaguuacguucua

SEQ ID NO: 1568538 - RNA, 19 nt, Artificial Sequence
  Description of Artificial Sequence: Synthetic oligonucleotide
  Antisense strand to SEQ ID NO: 1568537
uagaacguaacuaaacauu

SEQ ID NO: 1568539 - RNA, 19 nt, Artificial Sequence
  Description of Artificial Sequence: Synthetic oligonucleotide
  Sense strand starting at position 580 of SEQ ID NO: 1559990
auguuuaguuacguucuaa

SEQ ID NO: 1568540 - RNA, 19 nt, Artificial Sequence
  Description of Artificial Sequence: Synthetic oligonucleotide
  Antisense strand to SEQ ID NO: 1568539
uuagaacguaacuaaacau

SEQ ID NO: 1568541 - RNA, 19 nt, Artificial Sequence
  Description of Artificial Sequence: Synthetic oligonucleotide
  Sense strand starting at position 608 of SEQ ID NO: 1559990
gauugcagcuuccuugaca

SEQ ID NO: 1568542 - RNA, 19 nt, Artificial Sequence
  Description of Artificial Sequence: Synthetic oligonucleotide
  Antisense strand to SEQ ID NO: 1568541
ugucaaggaagcugcaauc

SEQ ID NO: 1568543 - RNA, 19 nt, Artificial Sequence
  Description of Artificial Sequence: Synthetic oligonucleotide
  Sense strand starting at position 658 of SEQ ID NO: 1559990
uccugucuaccaggaguua

SEQ ID NO: 1568544 - RNA, 19 nt, Artificial Sequence
  Description of Artificial Sequence: Synthetic oligonucleotide
  Antisense strand to SEQ ID NO: 1568543
uaacuccugguagacagga

SEQ ID NO: 1568545 - RNA, 19 nt, Artificial Sequence
  Description of Artificial Sequence: Synthetic oligonucleotide
  Sense strand starting at position 659 of SEQ ID NO: 1559990
ccugucuaccaggaguuaa

SEQ ID NO: 1568546 - RNA, 19 nt, Artificial Sequence
  Description of Artificial Sequence: Synthetic oligonucleotide
  Antisense strand to SEQ ID NO: 1568545
uuaacuccugguagacagg

SEQ ID NO: 1568547 - RNA, 19 nt, Artificial Sequence
  Description of Artificial Sequence: Synthetic oligonucleotide
  Sense strand starting at position 667 of SEQ ID NO: 1559990
ccaggaguuaaguggaaau

SEQ ID NO: 1568548 - RNA, 19 nt, Artificial Sequence
  Description of Artificial Sequence: Synthetic oligonucleotide
  Antisense strand to SEQ ID NO: 1568547
auuuccacuuaacuccugg

SEQ ID NO: 1568549 - RNA, 19 nt, Artificial Sequence
  Description of Artificial Sequence: Synthetic oligonucleotide
  Sense strand starting at position 670 of SEQ ID NO: 1559990
ggaguuaaguggaaauggu

SEQ ID NO: 1568550 - RNA, 19 nt, Artificial Sequence
  Description of Artificial Sequence: Synthetic oligonucleotide
  Antisense strand to SEQ ID NO: 1568549
accauuuccacuuaacucc

SEQ ID NO: 1568551 - RNA, 19 nt, Artificial Sequence
  Description of Artificial Sequence: Synthetic oligonucleotide
  Sense strand starting at position 711 of SEQ ID NO: 1559990
aguccuuacucagaggaaa

SEQ ID NO: 1568552 - RNA, 19 nt, Artificial Sequence
  Description of Artificial Sequence: Synthetic oligonucleotide
  Antisense strand to SEQ ID NO: 1568551
uuuccucugaguaaggacu

SEQ ID NO: 1568553 - RNA, 19 nt, Artificial Sequence
  Description of Artificial Sequence: Synthetic oligonucleotide
  Sense strand starting at position 750 of SEQ ID NO: 1559990
ccacgaacucauggaauag

SEQ ID NO: 1568554 - RNA, 19 nt, Artificial Sequence
  Description of Artificial Sequence: Synthetic oligonucleotide
  Antisense strand to SEQ ID NO: 1568553
cuauuccaugaguucgugg

SEQ ID NO: 1568555 - RNA, 19 nt, Artificial Sequence
  Description of Artificial Sequence: Synthetic oligonucleotide
  Sense strand starting at position 911 of SEQ ID NO: 1559990
ugagcaucgccuugaguaa

SEQ ID NO: 1568556 - RNA, 19 nt, Artificial Sequence
  Description of Artificial Sequence: Synthetic oligonucleotide
  Antisense strand to SEQ ID NO: 1568555
uuacucaaggcgaugcuca

SEQ ID NO: 1568557 - RNA, 19 nt, Artificial Sequence
  Description of Artificial Sequence: Synthetic oligonucleotide
  Sense strand starting at position 912 of SEQ ID NO: 1559990
gagcaucgccuugaguaag

SEQ ID NO: 1568558 - RNA, 19 nt, Artificial Sequence
  Description of Artificial Sequence: Synthetic oligonucleotide
  Antisense strand to SEQ ID NO: 1568557
cuuacucaaggcgaugcuc

SEQ ID NO: 1568559 - RNA, 19 nt, Artificial Sequence
  Description of Artificial Sequence: Synthetic oligonucleotide
  Sense strand starting at position 1048 of SEQ ID NO: 1559990
ccuggaagcaagcguuaau

SEQ ID NO: 1568560 - RNA, 19 nt, Artificial Sequence
  Description of Artificial Sequence: Synthetic oligonucleotide
  Antisense strand to SEQ ID NO: 1568559
auuaacgcuugcuuccagg

SEQ ID NO: 1568561 - RNA, 19 nt, Artificial Sequence
  Description of Artificial Sequence: Synthetic oligonucleotide
  Sense strand starting at position 1055 of SEQ ID NO: 1559990
gcaagcguuaaugggaauu

SEQ ID NO: 1568562 - RNA, 19 nt, Artificial Sequence
  Description of Artificial Sequence: Synthetic oligonucleotide
  Antisense strand to SEQ ID NO: 1568561
aauucccauuaacgcuugc

SEQ ID NO: 1568563 - RNA, 19 nt, Artificial Sequence
  Description of Artificial Sequence: Synthetic oligonucleotide
  Sense strand starting at position 1067 of SEQ ID NO: 1559990
gggaauuucucugcuuagc

SEQ ID NO: 1568564 - RNA, 19 nt, Artificial Sequence
  Description of Artificial Sequence: Synthetic oligonucleotide
  Antisense strand to SEQ ID NO: 1568563
gcuaagcagagaaauuccc

SEQ ID NO: 1568565 - RNA, 19 nt, Artificial Sequence
  Description of Artificial Sequence: Synthetic oligonucleotide
  Sense strand starting at position 2017 of SEQ ID NO: 1559990
ucagcacucgaacagaauu

SEQ ID NO: 1568566 - RNA, 19 nt, Artificial Sequence
  Description of Artificial Sequence: Synthetic oligonucleotide
  Antisense strand to SEQ ID NO: 1568565
aauucuguucgagugcuga

SEQ ID NO: 1568567 - RNA, 19 nt, Artificial Sequence
  Description of Artificial Sequence: Synthetic oligonucleotide
  Sense strand starting at position 2025 of SEQ ID NO: 1559990
cgaacagaauucuagcauc

SEQ ID NO: 1568568 - RNA, 19 nt, Artificial Sequence
  Description of Artificial Sequence: Synthetic oligonucleotide
  Antisense strand to SEQ ID NO: 1568567
gaugcuagaauucuguucg

SEQ ID NO: 1568569 - RNA, 19 nt, Artificial Sequence
  Description of Artificial Sequence: Synthetic oligonucleotide
  Sense strand starting at position 2028 of SEQ ID NO: 1559990
acagaauucuagcaucgaa

SEQ ID NO: 1568570 - RNA, 19 nt, Artificial Sequence
  Description of Artificial Sequence: Synthetic oligonucleotide
  Antisense strand to SEQ ID NO: 1568569
uucgaugcuagaauucugu

SEQ ID NO: 1568571 - RNA, 19 nt, Artificial Sequence
  Description of Artificial Sequence: Synthetic oligonucleotide
  Sense strand starting at position 2059 of SEQ ID NO: 1559990
cuccgauucuguuccauau

SEQ ID NO: 1568572 - RNA, 19 nt, Artificial Sequence
  Description of Artificial Sequence: Synthetic oligonucleotide
  Antisense strand to SEQ ID NO: 1568571
auauggaacagaaucggag

SEQ ID NO: 1568573 - RNA, 19 nt, Artificial Sequence
  Description of Artificial Sequence: Synthetic oligonucleotide
  Sense strand starting at position 2063 of SEQ ID NO: 1559990
gauucuguuccauauggug

SEQ ID NO: 1568574 - RNA, 19 nt, Artificial Sequence
  Description of Artificial Sequence: Synthetic oligonucleotide
  Antisense strand to SEQ ID NO: 1568573
caccauauggaacagaauc

SEQ ID NO: 1568575 - RNA, 19 nt, Artificial Sequence
  Description of Artificial Sequence: Synthetic oligonucleotide
  Sense strand starting at position 2066 of SEQ ID NO: 1559990
ucuguuccauauggugauu

SEQ ID NO: 1568576 - RNA, 19 nt, Artificial Sequence
  Description of Artificial Sequence: Synthetic oligonucleotide
  Antisense strand to SEQ ID NO: 1568575
aaucaccauauggaacaga

SEQ ID NO: 1568577 - RNA, 19 nt, Artificial Sequence
  Description of Artificial Sequence: Synthetic oligonucleotide
  Sense strand starting at position 2068 of SEQ ID NO: 1559990
uguuccauauggugauuau

SEQ ID NO: 1568578 - RNA, 19 nt, Artificial Sequence
  Description of Artificial Sequence: Synthetic oligonucleotide
  Antisense strand to SEQ ID NO: 1568577
auaaucaccauauggaaca

SEQ ID NO: 1568579 - RNA, 19 nt, Artificial Sequence
  Description of Artificial Sequence: Synthetic oligonucleotide
  Sense strand starting at position 2069 of SEQ ID NO: 1559990
guuccauauggugauuaua

SEQ ID NO: 1568580 - RNA, 19 nt, Artificial Sequence
  Description of Artificial Sequence: Synthetic oligonucleotide
  Antisense strand to SEQ ID NO: 1568579
uauaaucaccauauggaac

SEQ ID NO: 1568581 - RNA, 19 nt, Artificial Sequence
  Description of Artificial Sequence: Synthetic oligonucleotide
  Sense strand starting at position 2071 of SEQ ID NO: 1559990
uccauauggugauuauaaa

SEQ ID NO: 1568582 - RNA, 19 nt, Artificial Sequence
  Description of Artificial Sequence: Synthetic oligonucleotide
  Antisense strand to SEQ ID NO: 1568581
uuuauaaucaccauaugga

SEQ ID NO: 1568583 - RNA, 19 nt, Artificial Sequence
  Description of Artificial Sequence: Synthetic oligonucleotide
  Sense strand starting at position 2151 of SEQ ID NO: 1559990
ggguucagaucauaggaua

SEQ ID NO: 1568584 - RNA, 19 nt, Artificial Sequence
  Description of Artificial Sequence: Synthetic oligonucleotide
  Antisense strand to SEQ ID NO: 1568583
uauccuaugaucugaaccc

SEQ ID NO: 1568585 - RNA, 19 nt, Artificial Sequence
  Description of Artificial Sequence: Synthetic oligonucleotide
  Sense strand starting at position 2357 of SEQ ID NO: 1559990
acaggugugcuguauaauu

SEQ ID NO: 1568586 - RNA, 19 nt, Artificial Sequence
  Description of Artificial Sequence: Synthetic oligonucleotide
  Antisense strand to SEQ ID NO: 1568585
aauuauacagcacaccugu

SEQ ID NO: 1568587 - RNA, 19 nt, Artificial Sequence
  Description of Artificial Sequence: Synthetic oligonucleotide
  Sense strand starting at position 2864 of SEQ ID NO: 1559990
ugacaagcauaguugagau

SEQ ID NO: 1568588 - RNA, 19 nt, Artificial Sequence
  Description of Artificial Sequence: Synthetic oligonucleotide
  Antisense strand to SEQ ID NO: 1568587
aucucaacuaugcuuguca

SEQ ID NO: 1568589 - RNA, 19 nt, Artificial Sequence
  Description of Artificial Sequence: Synthetic oligonucleotide
  Sense strand starting at position 2883 of SEQ ID NO: 1559990
gggcuacuuggcuaguuua

SEQ ID NO: 1568590 - RNA, 19 nt, Artificial Sequence
  Description of Artificial Sequence: Synthetic oligonucleotide
  Antisense strand to SEQ ID NO: 1568589
uaaacuagccaaguagccc

SEQ ID NO: 1568591 - RNA, 19 nt, Artificial Sequence
  Description of Artificial Sequence: Synthetic oligonucleotide
  Sense strand starting at position 2891 of SEQ ID NO: 1559990
uggcuaguuuacucuuaca

SEQ ID NO: 1568592 - RNA, 19 nt, Artificial Sequence
  Description of Artificial Sequence: Synthetic oligonucleotide
  Antisense strand to SEQ ID NO: 1568591
uguaagaguaaacuagcca

SEQ ID NO: 1568593 - RNA, 19 nt, Artificial Sequence
  Description of Artificial Sequence: Synthetic oligonucleotide
  Sense strand starting at position 2928 of SEQ ID NO: 1559990
uaaagcuuugcccagguaa

SEQ ID NO: 1568594 - RNA, 19 nt, Artificial Sequence
  Description of Artificial Sequence: Synthetic oligonucleotide
  Antisense strand to SEQ ID NO: 1568593
uuaccugggcaaagcuuua

SEQ ID NO: 1568595 - RNA, 19 nt, Artificial Sequence
  Description of Artificial Sequence: Synthetic oligonucleotide
  Sense strand starting at position 3735 of SEQ ID NO: 1559990
ucugauuugucagaucagg

SEQ ID NO: 1568596 - RNA, 19 nt, Artificial Sequence
  Description of Artificial Sequence: Synthetic oligonucleotide
  Antisense strand to SEQ ID NO: 1568595
ccugaucugacaaaucaga

SEQ ID NO: 1568597 - RNA, 19 nt, Artificial Sequence
  Description of Artificial Sequence: Synthetic oligonucleotide
  Sense strand starting at position 27 of SEQ ID NO: 1559991
cuugcugaccuacagaaau

SEQ ID NO: 1568598 - RNA, 19 nt, Artificial Sequence
  Description of Artificial Sequence: Synthetic oligonucleotide
  Antisense strand to SEQ ID NO: 1568597
auuucuguaggucagcaag

SEQ ID NO: 1568599 - RNA, 19 nt, Artificial Sequence
  Description of Artificial Sequence: Synthetic oligonucleotide
  Sense strand starting at position 44 of SEQ ID NO: 1559991
auaggaaacuacugauaaa

SEQ ID NO: 1568600 - RNA, 19 nt, Artificial Sequence
  Description of Artificial Sequence: Synthetic oligonucleotide
  Antisense strand to SEQ ID NO: 1568599
uuuaucaguaguuuccuau

SEQ ID NO: 1568601 - RNA, 19 nt, Artificial Sequence
  Description of Artificial Sequence: Synthetic oligonucleotide
  Sense strand starting at position 127 of SEQ ID NO: 1559991
uuggaauguuaaccuaaac

SEQ ID NO: 1568602 - RNA, 19 nt, Artificial Sequence
  Description of Artificial Sequence: Synthetic oligonucleotide
  Antisense strand to SEQ ID NO: 1568601
guuuagguuaacauuccaa

SEQ ID NO: 1568603 - RNA, 19 nt, Artificial Sequence
  Description of Artificial Sequence: Synthetic oligonucleotide
  Sense strand starting at position 157 of SEQ ID NO: 1559991
ggagcauucgcauaugcaa

SEQ ID NO: 1568604 - RNA, 19 nt, Artificial Sequence
  Description of Artificial Sequence: Synthetic oligonucleotide
  Antisense strand to SEQ ID NO: 1568603
uugcauaugcgaaugcucc

SEQ ID NO: 1568605 - RNA, 19 nt, Artificial Sequence
  Description of Artificial Sequence: Synthetic oligonucleotide
  Sense strand starting at position 170 of SEQ ID NO: 1559991
augcaaaggguguauaaca

SEQ ID NO: 1568606 - RNA, 19 nt, Artificial Sequence
  Description of Artificial Sequence: Synthetic oligonucleotide
  Antisense strand to SEQ ID NO: 1568605
uguuauacacccuuugcau

SEQ ID NO: 1568607 - RNA, 19 nt, Artificial Sequence
  Description of Artificial Sequence: Synthetic oligonucleotide
  Sense strand starting at position 178 of SEQ ID NO: 1559991
gguguauaacacugaugga

SEQ ID NO: 1568608 - RNA, 19 nt, Artificial Sequence
  Description of Artificial Sequence: Synthetic oligonucleotide
  Antisense strand to SEQ ID NO: 1568607
uccaucaguguuauacacc

SEQ ID NO: 1568609 - RNA, 19 nt, Artificial Sequence
  Description of Artificial Sequence: Synthetic oligonucleotide
  Sense strand starting at position 181 of SEQ ID NO: 1559991
guauaacacugauggaaag

SEQ ID NO: 1568610 - RNA, 19 nt, Artificial Sequence
  Description of Artificial Sequence: Synthetic oligonucleotide
  Antisense strand to SEQ ID NO: 1568609
cuuuccaucaguguuauac

SEQ ID NO: 1568611 - RNA, 19 nt, Artificial Sequence
  Description of Artificial Sequence: Synthetic oligonucleotide
  Sense strand starting at position 191 of SEQ ID NO: 1559991
gauggaaaguuugccauau

SEQ ID NO: 1568612 - RNA, 19 nt, Artificial Sequence
  Description of Artificial Sequence: Synthetic oligonucleotide
  Antisense strand to SEQ ID NO: 1568611
auauggcaaacuuuccauc

SEQ ID NO: 1568613 - RNA, 19 nt, Artificial Sequence
  Description of Artificial Sequence: Synthetic oligonucleotide
  Sense strand starting at position 192 of SEQ ID NO: 1559991
auggaaaguuugccauaug

SEQ ID NO: 1568614 - RNA, 19 nt, Artificial Sequence
  Description of Artificial Sequence: Synthetic oligonucleotide
  Antisense strand to SEQ ID NO: 1568613
cauauggcaaacuuuccau

SEQ ID NO: 1568615 - RNA, 19 nt, Artificial Sequence
  Description of Artificial Sequence: Synthetic oligonucleotide
  Sense strand starting at position 195 of SEQ ID NO: 1559991
gaaaguuugccauaugcca

SEQ ID NO: 1568616 - RNA, 19 nt, Artificial Sequence
  Description of Artificial Sequence: Synthetic oligonucleotide
  Antisense strand to SEQ ID NO: 1568615
uggcauauggcaaacuuuc

SEQ ID NO: 1568617 - RNA, 19 nt, Artificial Sequence
  Description of Artificial Sequence: Synthetic oligonucleotide
  Sense strand starting at position 202 of SEQ ID NO: 1559991
ugccauaugccagacacuu

SEQ ID NO: 1568618 - RNA, 19 nt, Artificial Sequence
  Description of Artificial Sequence: Synthetic oligonucleotide
  Antisense strand to SEQ ID NO: 1568617
aagugucuggcauauggca

SEQ ID NO: 1568619 - RNA, 19 nt, Artificial Sequence
  Description of Artificial Sequence: Synthetic oligonucleotide
  Sense strand starting at position 212 of SEQ ID NO: 1559991
cagacacuucugugaugca

SEQ ID NO: 1568620 - RNA, 19 nt, Artificial Sequence
  Description of Artificial Sequence: Synthetic oligonucleotide
  Antisense strand to SEQ ID NO: 1568619
ugcaucacagaagugucug

SEQ ID NO: 1568621 - RNA, 19 nt, Artificial Sequence
  Description of Artificial Sequence: Synthetic oligonucleotide
  Sense strand starting at position 293 of SEQ ID NO: 1559991
gacggaaacuuagugaagu

SEQ ID NO: 1568622 - RNA, 19 nt, Artificial Sequence
  Description of Artificial Sequence: Synthetic oligonucleotide
  Antisense strand to SEQ ID NO: 1568621
acuucacuaaguuuccguc

SEQ ID NO: 1568623 - RNA, 19 nt, Artificial Sequence
  Description of Artificial Sequence: Synthetic oligonucleotide
  Sense strand starting at position 295 of SEQ ID NO: 1559991
cggaaacuuagugaaguua

SEQ ID NO: 1568624 - RNA, 19 nt, Artificial Sequence
  Description of Artificial Sequence: Synthetic oligonucleotide
  Antisense strand to SEQ ID NO: 1568623
uaacuucacuaaguuuccg

SEQ ID NO: 1568625 - RNA, 19 nt, Artificial Sequence
  Description of Artificial Sequence: Synthetic oligonucleotide
  Sense strand starting at position 304 of SEQ ID NO: 1559991
agugaaguuacacggcuaa

SEQ ID NO: 1568626 - RNA, 19 nt, Artificial Sequence
  Description of Artificial Sequence: Synthetic oligonucleotide
  Antisense strand to SEQ ID NO: 1568625
uuagccguguaacuucacu

SEQ ID NO: 1568627 - RNA, 19 nt, Artificial Sequence
  Description of Artificial Sequence: Synthetic oligonucleotide
  Sense strand starting at position 369 of SEQ ID NO: 1559991
gccugugcuccugacacuu

SEQ ID NO: 1568628 - RNA, 19 nt, Artificial Sequence
  Description of Artificial Sequence: Synthetic oligonucleotide
  Antisense strand to SEQ ID NO: 1568627
aagugucaggagcacaggc

SEQ ID NO: 1568629 - RNA, 19 nt, Artificial Sequence
  Description of Artificial Sequence: Synthetic oligonucleotide
  Sense strand starting at position 689 of SEQ ID NO: 1559991
ccucuuacagcuggaggau

SEQ ID NO: 1568630 - RNA, 19 nt, Artificial Sequence
  Description of Artificial Sequence: Synthetic oligonucleotide
  Antisense strand to SEQ ID NO: 1568629
auccuccagcuguaagagg

SEQ ID NO: 1568631 - RNA, 19 nt, Artificial Sequence
  Description of Artificial Sequence: Synthetic oligonucleotide
  Sense strand starting at position 690 of SEQ ID NO: 1559991
cucuuacagcuggaggauu

SEQ ID NO: 1568632 - RNA, 19 nt, Artificial Sequence
  Description of Artificial Sequence: Synthetic oligonucleotide
  Antisense strand to SEQ ID NO: 1568631
aauccuccagcuguaagag

SEQ ID NO: 1568633 - RNA, 19 nt, Artificial Sequence
  Description of Artificial Sequence: Synthetic oligonucleotide
  Sense strand starting at position 756 of SEQ ID NO: 1559991
ugucuauacuguccugaac

SEQ ID NO: 1568634 - RNA, 19 nt, Artificial Sequence
  Description of Artificial Sequence: Synthetic oligonucleotide
  Antisense strand to SEQ ID NO: 1568633
guucaggacaguauagaca

SEQ ID NO: 1568635 - RNA, 19 nt, Artificial Sequence
  Description of Artificial Sequence: Synthetic oligonucleotide
  Sense strand starting at position 825 of SEQ ID NO: 1559991
ggagcuucaucuccgcgaa

SEQ ID NO: 1568636 - RNA, 19 nt, Artificial Sequence
  Description of Artificial Sequence: Synthetic oligonucleotide
  Antisense strand to SEQ ID NO: 1568635
uucgcggagaugaagcucc

SEQ ID NO: 1568637 - RNA, 19 nt, Artificial Sequence
  Description of Artificial Sequence: Synthetic oligonucleotide
  Sense strand starting at position 914 of SEQ ID NO: 1559991
uccugugguccaggcuuua

SEQ ID NO: 1568638 - RNA, 19 nt, Artificial Sequence
  Description of Artificial Sequence: Synthetic oligonucleotide
  Antisense strand to SEQ ID NO: 1568637
uaaagccuggaccacagga

SEQ ID NO: 1568639 - RNA, 19 nt, Artificial Sequence
  Description of Artificial Sequence: Synthetic oligonucleotide
  Sense strand starting at position 957 of SEQ ID NO: 1559991
ggcagauagccacagcaaa

SEQ ID NO: 1568640 - RNA, 19 nt, Artificial Sequence
  Description of Artificial Sequence: Synthetic oligonucleotide
  Antisense strand to SEQ ID NO: 1568639
uuugcuguggcuaucugcc

SEQ ID NO: 1568641 - RNA, 19 nt, Artificial Sequence
  Description of Artificial Sequence: Synthetic oligonucleotide
  Sense strand starting at position 1032 of SEQ ID NO: 1559991
ccacuuguaaguggagcua

SEQ ID NO: 1568642 - RNA, 19 nt, Artificial Sequence
  Description of Artificial Sequence: Synthetic oligonucleotide
  Antisense strand to SEQ ID NO: 1568641
uagcuccacuuacaagugg

SEQ ID NO: 1568643 - RNA, 19 nt, Artificial Sequence
  Description of Artificial Sequence: Synthetic oligonucleotide
  Sense strand starting at position 1121 of SEQ ID NO: 1559991
gaggucaaggguugaaacu

SEQ ID NO: 1568644 - RNA, 19 nt, Artificial Sequence
  Description of Artificial Sequence: Synthetic oligonucleotide
  Antisense strand to SEQ ID NO: 1568643
aguuucaacccuugaccuc

SEQ ID NO: 1568645 - RNA, 19 nt, Artificial Sequence
  Description of Artificial Sequence: Synthetic oligonucleotide
  Sense strand starting at position 1130 of SEQ ID NO: 1559991
gguugaaacuaucuauuga

SEQ ID NO: 1568646 - RNA, 19 nt, Artificial Sequence
  Description of Artificial Sequence: Synthetic oligonucleotide
  Antisense strand to SEQ ID NO: 1568645
ucaauagauaguuucaacc

SEQ ID NO: 1568647 - RNA, 19 nt, Artificial Sequence
  Description of Artificial Sequence: Synthetic oligonucleotide
  Sense strand starting at position 1378 of SEQ ID NO: 1559991
cacagauaguucucacggu

SEQ ID NO: 1568648 - RNA, 19 nt, Artificial Sequence
  Description of Artificial Sequence: Synthetic oligonucleotide
  Antisense strand to SEQ ID NO: 1568647
accgugagaacuaucugug

SEQ ID NO: 1568649 - RNA, 19 nt, Artificial Sequence
  Description of Artificial Sequence: Synthetic oligonucleotide
  Sense strand starting at position 2352 of SEQ ID NO: 1559991
aacggaagccugggugauu

SEQ ID NO: 1568650 - RNA, 19 nt, Artificial Sequence
  Description of Artificial Sequence: Synthetic oligonucleotide
  Antisense strand to SEQ ID NO: 1568649
aaucacccaggcuuccguu

SEQ ID NO: 1568651 - RNA, 19 nt, Artificial Sequence
  Description of Artificial Sequence: Synthetic oligonucleotide
  Sense strand starting at position 2353 of SEQ ID NO: 1559991
acggaagccugggugauua

SEQ ID NO: 1568652 - RNA, 19 nt, Artificial Sequence
  Description of Artificial Sequence: Synthetic oligonucleotide
  Antisense strand to SEQ ID NO: 1568651
uaaucacccaggcuuccgu

SEQ ID NO: 1568653 - RNA, 19 nt, Artificial Sequence
  Description of Artificial Sequence: Synthetic oligonucleotide
  Sense strand starting at position 2647 of SEQ ID NO: 1559991
gcucguuaggauuggaagu

SEQ ID NO: 1568654 - RNA, 19 nt, Artificial Sequence
  Description of Artificial Sequence: Synthetic oligonucleotide
  Antisense strand to SEQ ID NO: 1568653
acuuccaauccuaacgagc

SEQ ID NO: 1568655 - RNA, 19 nt, Artificial Sequence
  Description of Artificial Sequence: Synthetic oligonucleotide
  Sense strand starting at position 2648 of SEQ ID NO: 1559991
cucguuaggauuggaagua

SEQ ID NO: 1568656 - RNA, 19 nt, Artificial Sequence
  Description of Artificial Sequence: Synthetic oligonucleotide
  Antisense strand to SEQ ID NO: 1568655
uacuuccaauccuaacgag

SEQ ID NO: 1568657 - RNA, 19 nt, Artificial Sequence
  Description of Artificial Sequence: Synthetic oligonucleotide
  Sense strand starting at position 2730 of SEQ ID NO: 1559991
cagggucugucaccugaga

SEQ ID NO: 1568658 - RNA, 19 nt, Artificial Sequence
  Description of Artificial Sequence: Synthetic oligonucleotide
  Antisense strand to SEQ ID NO: 1568657
ucucaggugacagacccug

SEQ ID NO: 1568659 - RNA, 19 nt, Artificial Sequence
  Description of Artificial Sequence: Synthetic oligonucleotide
  Sense strand starting at position 2732 of SEQ ID NO: 1559991
gggucugucaccugagaaa

SEQ ID NO: 1568660 - RNA, 19 nt, Artificial Sequence
  Description of Artificial Sequence: Synthetic oligonucleotide
  Antisense strand to SEQ ID NO: 1568659
uuucucaggugacagaccc

SEQ ID NO: 1568661 - RNA, 19 nt, Artificial Sequence
  Description of Artificial Sequence: Synthetic oligonucleotide
  Sense strand starting at position 2956 of SEQ ID NO: 1559991
cuaugaucaugccuccaga

SEQ ID NO: 1568662 - RNA, 19 nt, Artificial Sequence
  Description of Artificial Sequence: Synthetic oligonucleotide
  Antisense strand to SEQ ID NO: 1568661
ucuggaggcaugaucauag

SEQ ID NO: 1568663 - RNA, 19 nt, Artificial Sequence
  Description of Artificial Sequence: Synthetic oligonucleotide
  Sense strand starting at position 3329 of SEQ ID NO: 1559991
gcugucagauacccucaaa

SEQ ID NO: 1568664 - RNA, 19 nt, Artificial Sequence
  Description of Artificial Sequence: Synthetic oligonucleotide
  Antisense strand to SEQ ID NO: 1568663
uuugaggguaucugacagc

SEQ ID NO: 1568665 - RNA, 19 nt, Artificial Sequence
  Description of Artificial Sequence: Synthetic oligonucleotide
  Sense strand starting at position 3490 of SEQ ID NO: 1559991
uugccugucuaauccaagu

SEQ ID NO: 1568666 - RNA, 19 nt, Artificial Sequence
  Description of Artificial Sequence: Synthetic oligonucleotide
  Antisense strand to SEQ ID NO: 1568665
acuuggauuagacaggcaa

SEQ ID NO: 1568667 - RNA, 19 nt, Artificial Sequence
  Description of Artificial Sequence: Synthetic oligonucleotide
  Sense strand starting at position 3668 of SEQ ID NO: 1559991
acuugaguccaggagcuuu

SEQ ID NO: 1568668 - RNA, 19 nt, Artificial Sequence
  Description of Artificial Sequence: Synthetic oligonucleotide
  Antisense strand to SEQ ID NO: 1568667
aaagcuccuggacucaagu

SEQ ID NO: 1568669 - RNA, 19 nt, Artificial Sequence
  Description of Artificial Sequence: Synthetic oligonucleotide
  Sense strand starting at position 3897 of SEQ ID NO: 1559991
ccagaaaugcaagacguaa

SEQ ID NO: 1568670 - RNA, 19 nt, Artificial Sequence
  Description of Artificial Sequence: Synthetic oligonucleotide
  Antisense strand to SEQ ID NO: 1568669
uuacgucuugcauuucugg

SEQ ID NO: 1568671 - RNA, 19 nt, Artificial Sequence
  Description of Artificial Sequence: Synthetic oligonucleotide
  Sense strand starting at position 3899 of SEQ ID NO: 1559991
agaaaugcaagacguaauu

SEQ ID NO: 1568672 - RNA, 19 nt, Artificial Sequence
  Description of Artificial Sequence: Synthetic oligonucleotide
  Antisense strand to SEQ ID NO: 1568671
aauuacgucuugcauuucu

SEQ ID NO: 1568673 - RNA, 19 nt, Artificial Sequence
  Description of Artificial Sequence: Synthetic oligonucleotide
  Sense strand starting at position 3950 of SEQ ID NO: 1559991
acucuaacacgggaguuua

SEQ ID NO: 1568674 - RNA, 19 nt, Artificial Sequence
  Description of Artificial Sequence: Synthetic oligonucleotide
  Antisense strand to SEQ ID NO: 1568673
uaaacucccguguuagagu

SEQ ID NO: 1568675 - RNA, 19 nt, Artificial Sequence
  Description of Artificial Sequence: Synthetic oligonucleotide
  Sense strand starting at position 3961 of SEQ ID NO: 1559991
ggaguuuaugagggcucaa

SEQ ID NO: 1568676 - RNA, 19 nt, Artificial Sequence
  Description of Artificial Sequence: Synthetic oligonucleotide
  Antisense strand to SEQ ID NO: 1568675
uugagcccucauaaacucc

SEQ ID NO: 1568677 - RNA, 19 nt, Artificial Sequence
  Description of Artificial Sequence: Synthetic oligonucleotide
  Sense strand starting at position 8 of SEQ ID NO: 1559992
gucaguguugcacagcaga

SEQ ID NO: 1568678 - RNA, 19 nt, Artificial Sequence
  Description of Artificial Sequence: Synthetic oligonucleotide
  Antisense strand to SEQ ID NO: 1568677
ucugcugugcaacacugac

SEQ ID NO: 1568679 - RNA, 19 nt, Artificial Sequence
  Description of Artificial Sequence: Synthetic oligonucleotide
  Sense strand starting at position 533 of SEQ ID NO: 1559992
gagcccugcuggguuuaau

SEQ ID NO: 1568680 - RNA, 19 nt, Artificial Sequence
  Description of Artificial Sequence: Synthetic oligonucleotide
  Antisense strand to SEQ ID NO: 1568679
auuaaacccagcagggcuc

SEQ ID NO: 1568681 - RNA, 19 nt, Artificial Sequence
  Description of Artificial Sequence: Synthetic oligonucleotide
  Sense strand starting at position 1020 of SEQ ID NO: 1559992
cuaagaaaguccuggguug

SEQ ID NO: 1568682 - RNA, 19 nt, Artificial Sequence
  Description of Artificial Sequence: Synthetic oligonucleotide
  Antisense strand to SEQ ID NO: 1568681
caacccaggacuuucuuag

SEQ ID NO: 1568683 - RNA, 19 nt, Artificial Sequence
  Description of Artificial Sequence: Synthetic oligonucleotide
  Sense strand starting at position 1219 of SEQ ID NO: 1559992
gagcguuggaguugacaaa

SEQ ID NO: 1568684 - RNA, 19 nt, Artificial Sequence
  Description of Artificial Sequence: Synthetic oligonucleotide
  Antisense strand to SEQ ID NO: 1568683
uuugucaacuccaacgcuc

SEQ ID NO: 1568685 - RNA, 19 nt, Artificial Sequence
  Description of Artificial Sequence: Synthetic oligonucleotide
  Sense strand starting at position 1406 of SEQ ID NO: 1559992
gcggacacuuuauaaauaa

SEQ ID NO: 1568686 - RNA, 19 nt, Artificial Sequence
  Description of Artificial Sequence: Synthetic oligonucleotide
  Antisense strand to SEQ ID NO: 1568685
uuauuuauaaaguguccgc

SEQ ID NO: 1568687 - RNA, 19 nt, Artificial Sequence
  Description of Artificial Sequence: Synthetic oligonucleotide
  Sense strand starting at position 2097 of SEQ ID NO: 1559992
gucgcucucggaugcaaau

SEQ ID NO: 1568688 - RNA, 19 nt, Artificial Sequence
  Description of Artificial Sequence: Synthetic oligonucleotide
  Antisense strand to SEQ ID NO: 1568687
auuugcauccgagagcgac

SEQ ID NO: 1568689 - RNA, 19 nt, Artificial Sequence
  Description of Artificial Sequence: Synthetic oligonucleotide
  Sense strand starting at position 2252 of SEQ ID NO: 1559992
ggcagaguggacggaaauu

SEQ ID NO: 1568690 - RNA, 19 nt, Artificial Sequence
  Description of Artificial Sequence: Synthetic oligonucleotide
  Antisense strand to SEQ ID NO: 1568689
aauuuccguccacucugcc

SEQ ID NO: 1568691 - RNA, 19 nt, Artificial Sequence
  Description of Artificial Sequence: Synthetic oligonucleotide
  Sense strand starting at position 2618 of SEQ ID NO: 1559992
cguuuccaagucugagaaa

SEQ ID NO: 1568692 - RNA, 19 nt, Artificial Sequence
  Description of Artificial Sequence: Synthetic oligonucleotide
  Antisense strand to SEQ ID NO: 1568691
uuucucagacuuggaaacg

SEQ ID NO: 1568693 - RNA, 19 nt, Artificial Sequence
  Description of Artificial Sequence: Synthetic oligonucleotide
  Sense strand starting at position 2619 of SEQ ID NO: 1559992
guuuccaagucugagaaau

SEQ ID NO: 1568694 - RNA, 19 nt, Artificial Sequence
  Description of Artificial Sequence: Synthetic oligonucleotide
  Antisense strand to SEQ ID NO: 1568693
auuucucagacuuggaaac

SEQ ID NO: 1568695 - RNA, 19 nt, Artificial Sequence
  Description of Artificial Sequence: Synthetic oligonucleotide
  Sense strand starting at position 2627 of SEQ ID NO: 1559992
gucugagaaaugggcuuga

SEQ ID NO: 1568696 - RNA, 19 nt, Artificial Sequence
  Description of Artificial Sequence: Synthetic oligonucleotide
  Antisense strand to SEQ ID NO: 1568695
ucaagcccauuucucagac

SEQ ID NO: 1568697 - RNA, 19 nt, Artificial Sequence
  Description of Artificial Sequence: Synthetic oligonucleotide
  Sense strand starting at position 3738 of SEQ ID NO: 1559992
cugagaggccuccaccaua

SEQ ID NO: 1568698 - RNA, 19 nt, Artificial Sequence
  Description of Artificial Sequence: Synthetic oligonucleotide
  Antisense strand to SEQ ID NO: 1568697
uaugguggaggccucucag

SEQ ID NO: 1568699 - RNA, 19 nt, Artificial Sequence
  Description of Artificial Sequence: Synthetic oligonucleotide
  Sense strand starting at position 62 of SEQ ID NO: 1559993
aguacagauuuggaacaca

SEQ ID NO: 1568700 - RNA, 19 nt, Artificial Sequence
  Description of Artificial Sequence: Synthetic oligonucleotide
  Antisense strand to SEQ ID NO: 1568699
uguguuccaaaucuguacu

SEQ ID NO: 1568701 - RNA, 19 nt, Artificial Sequence
  Description of Artificial Sequence: Synthetic oligonucleotide
  Sense strand starting at position 80 of SEQ ID NO: 1559993
auaagauggugccuggaga

SEQ ID NO: 1568702 - RNA, 19 nt, Artificial Sequence
  Description of Artificial Sequence: Synthetic oligonucleotide
  Antisense strand to SEQ ID NO: 1568701
ucuccaggcaccaucuuau

SEQ ID NO: 1568703 - RNA, 19 nt, Artificial Sequence
  Description of Artificial Sequence: Synthetic oligonucleotide
  Sense strand starting at position 81 of SEQ ID NO: 1559993
uaagauggugccuggagau

SEQ ID NO: 1568704 - RNA, 19 nt, Artificial Sequence
  Description of Artificial Sequence: Synthetic oligonucleotide
  Antisense strand to SEQ ID NO: 1568703
aucuccaggcaccaucuua

SEQ ID NO: 1568705 - RNA, 19 nt, Artificial Sequence
  Description of Artificial Sequence: Synthetic oligonucleotide
  Sense strand starting at position 162 of SEQ ID NO: 1559993
ccuauuauccaucagggca

SEQ ID NO: 1568706 - RNA, 19 nt, Artificial Sequence
  Description of Artificial Sequence: Synthetic oligonucleotide
  Antisense strand to SEQ ID NO: 1568705
ugcccugauggauaauagg

SEQ ID NO: 1568707 - RNA, 19 nt, Artificial Sequence
  Description of Artificial Sequence: Synthetic oligonucleotide
  Sense strand starting at position 243 of SEQ ID NO: 1559993
ccaggaaucugcucaucaa

SEQ ID NO: 1568708 - RNA, 19 nt, Artificial Sequence
  Description of Artificial Sequence: Synthetic oligonucleotide
  Antisense strand to SEQ ID NO: 1568707
uugaugagcagauuccugg

SEQ ID NO: 1568709 - RNA, 19 nt, Artificial Sequence
  Description of Artificial Sequence: Synthetic oligonucleotide
  Sense strand starting at position 246 of SEQ ID NO: 1559993
ggaaucugcucaucaagaa

SEQ ID NO: 1568710 - RNA, 19 nt, Artificial Sequence
  Description of Artificial Sequence: Synthetic oligonucleotide
  Antisense strand to SEQ ID NO: 1568709
uucuugaugagcagauucc

SEQ ID NO: 1568711 - RNA, 19 nt, Artificial Sequence
  Description of Artificial Sequence: Synthetic oligonucleotide
  Sense strand starting at position 725 of SEQ ID NO: 1559993
gauagugcacaccgguaau

SEQ ID NO: 1568712 - RNA, 19 nt, Artificial Sequence
  Description of Artificial Sequence: Synthetic oligonucleotide
  Antisense strand to SEQ ID NO: 1568711
auuaccggugugcacuauc

SEQ ID NO: 1568713 - RNA, 19 nt, Artificial Sequence
  Description of Artificial Sequence: Synthetic oligonucleotide
  Sense strand starting at position 979 of SEQ ID NO: 1559993
aaauuaaacgugugccaug

SEQ ID NO: 1568714 - RNA, 19 nt, Artificial Sequence
  Description of Artificial Sequence: Synthetic oligonucleotide
  Antisense strand to SEQ ID NO: 1568713
cauggcacacguuuaauuu

SEQ ID NO: 1568715 - RNA, 19 nt, Artificial Sequence
  Description of Artificial Sequence: Synthetic oligonucleotide
  Sense strand starting at position 984 of SEQ ID NO: 1559993
aaacgugugccaugacaug

SEQ ID NO: 1568716 - RNA, 19 nt, Artificial Sequence
  Description of Artificial Sequence: Synthetic oligonucleotide
  Antisense strand to SEQ ID NO: 1568715
caugucauggcacacguuu

SEQ ID NO: 1568717 - RNA, 19 nt, Artificial Sequence
  Description of Artificial Sequence: Synthetic oligonucleotide
  Sense strand starting at position 1306 of SEQ ID NO: 1559993
gucccaucacucuguuauu

SEQ ID NO: 1568718 - RNA, 19 nt, Artificial Sequence
  Description of Artificial Sequence: Synthetic oligonucleotide
  Antisense strand to SEQ ID NO: 1568717
aauaacagagugaugggac

SEQ ID NO: 1568719 - RNA, 19 nt, Artificial Sequence
  Description of Artificial Sequence: Synthetic oligonucleotide
  Sense strand starting at position 1315 of SEQ ID NO: 1559993
cucuguuauuauuugcaca

SEQ ID NO: 1568720 - RNA, 19 nt, Artificial Sequence
  Description of Artificial Sequence: Synthetic oligonucleotide
  Antisense strand to SEQ ID NO: 1568719
ugugcaaauaauaacagag

SEQ ID NO: 1568721 - RNA, 19 nt, Artificial Sequence
  Description of Artificial Sequence: Synthetic oligonucleotide
  Sense strand starting at position 2038 of SEQ ID NO: 1559993
cggagaccguugguucauu

SEQ ID NO: 1568722 - RNA, 19 nt, Artificial Sequence
  Description of Artificial Sequence: Synthetic oligonucleotide
  Antisense strand to SEQ ID NO: 1568721
aaugaaccaacggucuccg

SEQ ID NO: 1568723 - RNA, 19 nt, Artificial Sequence
  Description of Artificial Sequence: Synthetic oligonucleotide
  Sense strand starting at position 2556 of SEQ ID NO: 1559993
cuuagaaucgugugauuug

SEQ ID NO: 1568724 - RNA, 19 nt, Artificial Sequence
  Description of Artificial Sequence: Synthetic oligonucleotide
  Antisense strand to SEQ ID NO: 1568723
caaaucacacgauucuaag

SEQ ID NO: 1568725 - RNA, 19 nt, Artificial Sequence
  Description of Artificial Sequence: Synthetic oligonucleotide
  Sense strand starting at position 2557 of SEQ ID NO: 1559993
uuagaaucgugugauuuga

SEQ ID NO: 1568726 - RNA, 19 nt, Artificial Sequence
  Description of Artificial Sequence: Synthetic oligonucleotide
  Antisense strand to SEQ ID NO: 1568725
ucaaaucacacgauucuaa

SEQ ID NO: 1568727 - RNA, 19 nt, Artificial Sequence
  Description of Artificial Sequence: Synthetic oligonucleotide
  Sense strand starting at position 2603 of SEQ ID NO: 1559993
gcccuuugccagcagagaa

SEQ ID NO: 1568728 - RNA, 19 nt, Artificial Sequence
  Description of Artificial Sequence: Synthetic oligonucleotide
  Antisense strand to SEQ ID NO: 1568727
uucucugcuggcaaagggc

SEQ ID NO: 1568729 - RNA, 19 nt, Artificial Sequence
  Description of Artificial Sequence: Synthetic oligonucleotide
  Sense strand starting at position 2680 of SEQ ID NO: 1559993
ggcggugaucgugauggga

SEQ ID NO: 1568730 - RNA, 19 nt, Artificial Sequence
  Description of Artificial Sequence: Synthetic oligonucleotide
  Antisense strand to SEQ ID NO: 1568729
ucccaucacgaucaccgcc

SEQ ID NO: 1568731 - RNA, 19 nt, Artificial Sequence
  Description of Artificial Sequence: Synthetic oligonucleotide
  Sense strand starting at position 2683 of SEQ ID NO: 1559993
ggugaucgugaugggaaau

SEQ ID NO: 1568732 - RNA, 19 nt, Artificial Sequence
  Description of Artificial Sequence: Synthetic oligonucleotide
  Antisense strand to SEQ ID NO: 1568731
auuucccaucacgaucacc

SEQ ID NO: 1568733 - RNA, 19 nt, Artificial Sequence
  Description of Artificial Sequence: Synthetic oligonucleotide
  Sense strand starting at position 2743 of SEQ ID NO: 1559993
gcgggauaucuugaugguu

SEQ ID NO: 1568734 - RNA, 19 nt, Artificial Sequence
  Description of Artificial Sequence: Synthetic oligonucleotide
  Antisense strand to SEQ ID NO: 1568733
aaccaucaagauaucccgc

SEQ ID NO: 1568735 - RNA, 19 nt, Artificial Sequence
  Description of Artificial Sequence: Synthetic oligonucleotide
  Sense strand starting at position 2746 of SEQ ID NO: 1559993
ggauaucuugaugguuaag

SEQ ID NO: 1568736 - RNA, 19 nt, Artificial Sequence
  Description of Artificial Sequence: Synthetic oligonucleotide
  Antisense strand to SEQ ID NO: 1568735
cuuaaccaucaagauaucc

SEQ ID NO: 1568737 - RNA, 19 nt, Artificial Sequence
  Description of Artificial Sequence: Synthetic oligonucleotide
  Sense strand starting at position 2748 of SEQ ID NO: 1559993
auaucuugaugguuaagga

SEQ ID NO: 1568738 - RNA, 19 nt, Artificial Sequence
  Description of Artificial Sequence: Synthetic oligonucleotide
  Antisense strand to SEQ ID NO: 1568737
uccuuaaccaucaagauau

SEQ ID NO: 1568739 - RNA, 19 nt, Artificial Sequence
  Description of Artificial Sequence: Synthetic oligonucleotide
  Sense strand starting at position 2817 of SEQ ID NO: 1559993
gggcuuuggaugcacgaau

SEQ ID NO: 1568740 - RNA, 19 nt, Artificial Sequence
  Description of Artificial Sequence: Synthetic oligonucleotide
  Antisense strand to SEQ ID NO: 1568739
auucgugcauccaaagccc

SEQ ID NO: 1568741 - RNA, 19 nt, Artificial Sequence
  Description of Artificial Sequence: Synthetic oligonucleotide
  Sense strand starting at position 2859 of SEQ ID NO: 1559993
ugggcugucuggucuugaa

SEQ ID NO: 1568742 - RNA, 19 nt, Artificial Sequence
  Description of Artificial Sequence: Synthetic oligonucleotide
  Antisense strand to SEQ ID NO: 1568741
uucaagaccagacagccca

SEQ ID NO: 1568743 - RNA, 19 nt, Artificial Sequence
  Description of Artificial Sequence: Synthetic oligonucleotide
  Sense strand starting at position 2979 of SEQ ID NO: 1559993
cgcagaaugaacugucacu

SEQ ID NO: 1568744 - RNA, 19 nt, Artificial Sequence
  Description of Artificial Sequence: Synthetic oligonucleotide
  Antisense strand to SEQ ID NO: 1568743
agugacaguucauucugcg

SEQ ID NO: 1568745 - RNA, 19 nt, Artificial Sequence
  Description of Artificial Sequence: Synthetic oligonucleotide
  Sense strand starting at position 3083 of SEQ ID NO: 1559993
cccugcugagucugugaau

SEQ ID NO: 1568746 - RNA, 19 nt, Artificial Sequence
  Description of Artificial Sequence: Synthetic oligonucleotide
  Antisense strand to SEQ ID NO: 1568745
auucacagacucagcaggg

SEQ ID NO: 1568747 - RNA, 19 nt, Artificial Sequence
  Description of Artificial Sequence: Synthetic oligonucleotide
  Sense strand starting at position 3089 of SEQ ID NO: 1559993
ugagucugugaaugggaaa

SEQ ID NO: 1568748 - RNA, 19 nt, Artificial Sequence
  Description of Artificial Sequence: Synthetic oligonucleotide
  Antisense strand to SEQ ID NO: 1568747
uuucccauucacagacuca

SEQ ID NO: 1568749 - RNA, 19 nt, Artificial Sequence
  Description of Artificial Sequence: Synthetic oligonucleotide
  Sense strand starting at position 3480 of SEQ ID NO: 1559993
cucuguuaugcucaguuau

SEQ ID NO: 1568750 - RNA, 19 nt, Artificial Sequence
  Description of Artificial Sequence: Synthetic oligonucleotide
  Antisense strand to SEQ ID NO: 1568749
auaacugagcauaacagag

SEQ ID NO: 1568751 - RNA, 19 nt, Artificial Sequence
  Description of Artificial Sequence: Synthetic oligonucleotide
  Sense strand starting at position 3482 of SEQ ID NO: 1559993
cuguuaugcucaguuaugu

SEQ ID NO: 1568752 - RNA, 19 nt, Artificial Sequence
  Description of Artificial Sequence: Synthetic oligonucleotide
  Antisense strand to SEQ ID NO: 1568751
acauaacugagcauaacag

SEQ ID NO: 1568753 - RNA, 19 nt, Artificial Sequence
  Description of Artificial Sequence: Synthetic oligonucleotide
  Sense strand starting at position 3490 of SEQ ID NO: 1559993
cucaguuauguguguuggu

SEQ ID NO: 1568754 - RNA, 19 nt, Artificial Sequence
  Description of Artificial Sequence: Synthetic oligonucleotide
  Antisense strand to SEQ ID NO: 1568753
accaacacacauaacugag

SEQ ID NO: 1568755 - RNA, 19 nt, Artificial Sequence
  Description of Artificial Sequence: Synthetic oligonucleotide
  Sense strand starting at position 3491 of SEQ ID NO: 1559993
ucaguuauguguguugguu

SEQ ID NO: 1568756 - RNA, 19 nt, Artificial Sequence
  Description of Artificial Sequence: Synthetic oligonucleotide
  Antisense strand to SEQ ID NO: 1568755
aaccaacacacauaacuga

SEQ ID NO: 1568757 - RNA, 19 nt, Artificial Sequence
  Description of Artificial Sequence: Synthetic oligonucleotide
  Sense strand starting at position 3495 of SEQ ID NO: 1559993
uuauguguguugguugaca

SEQ ID NO: 1568758 - RNA, 19 nt, Artificial Sequence
  Description of Artificial Sequence: Synthetic oligonucleotide
  Antisense strand to SEQ ID NO: 1568757
ugucaaccaacacacauaa

SEQ ID NO: 1568759 - RNA, 19 nt, Artificial Sequence
  Description of Artificial Sequence: Synthetic oligonucleotide
  Sense strand starting at position 3580 of SEQ ID NO: 1559993
agagaagguuugucuugcu

SEQ ID NO: 1568760 - RNA, 19 nt, Artificial Sequence
  Description of Artificial Sequence: Synthetic oligonucleotide
  Antisense strand to SEQ ID NO: 1568759
agcaagacaaaccuucucu

SEQ ID NO: 1568761 - RNA, 19 nt, Artificial Sequence
  Description of Artificial Sequence: Synthetic oligonucleotide
  Sense strand starting at position 3610 of SEQ ID NO: 1559993
agcacacaccugugaacuu

SEQ ID NO: 1568762 - RNA, 19 nt, Artificial Sequence
  Description of Artificial Sequence: Synthetic oligonucleotide
  Antisense strand to SEQ ID NO: 1568761
aaguucacaggugugugcu

SEQ ID NO: 1568763 - RNA, 19 nt, Artificial Sequence
  Description of Artificial Sequence: Synthetic oligonucleotide
  Sense strand starting at position 3771 of SEQ ID NO: 1559993
ccagcuugccucugaagua

SEQ ID NO: 1568764 - RNA, 19 nt, Artificial Sequence
  Description of Artificial Sequence: Synthetic oligonucleotide
  Antisense strand to SEQ ID NO: 1568763
uacuucagaggcaagcugg

SEQ ID NO: 1568765 - RNA, 19 nt, Artificial Sequence
  Description of Artificial Sequence: Synthetic oligonucleotide
  Sense strand starting at position 3783 of SEQ ID NO: 1559993
ugaaguaccaugcgaggau

SEQ ID NO: 1568766 - RNA, 19 nt, Artificial Sequence
  Description of Artificial Sequence: Synthetic oligonucleotide
  Antisense strand to SEQ ID NO: 1568765
auccucgcaugguacuuca

SEQ ID NO: 1568767 - RNA, 19 nt, Artificial Sequence
  Description of Artificial Sequence: Synthetic oligonucleotide
  Sense strand starting at position 3786 of SEQ ID NO: 1559993
aguaccaugcgaggauuau

SEQ ID NO: 1568768 - RNA, 19 nt, Artificial Sequence
  Description of Artificial Sequence: Synthetic oligonucleotide
  Antisense strand to SEQ ID NO: 1568767
auaauccucgcaugguacu

SEQ ID NO: 1568769 - RNA, 19 nt, Artificial Sequence
  Description of Artificial Sequence: Synthetic oligonucleotide
  Sense strand starting at position 3787 of SEQ ID NO: 1559993
guaccaugcgaggauuaug

SEQ ID NO: 1568770 - RNA, 19 nt, Artificial Sequence
  Description of Artificial Sequence: Synthetic oligonucleotide
  Antisense strand to SEQ ID NO: 1568769
cauaauccucgcaugguac

SEQ ID NO: 1568771 - RNA, 19 nt, Artificial Sequence
  Description of Artificial Sequence: Synthetic oligonucleotide
  Sense strand starting at position 3790 of SEQ ID NO: 1559993
ccaugcgaggauuauggau

SEQ ID NO: 1568772 - RNA, 19 nt, Artificial Sequence
  Description of Artificial Sequence: Synthetic oligonucleotide
  Antisense strand to SEQ ID NO: 1568771
auccauaauccucgcaugg

SEQ ID NO: 1568773 - RNA, 19 nt, Artificial Sequence
  Description of Artificial Sequence: Synthetic oligonucleotide
  Sense strand starting at position 3803 of SEQ ID NO: 1559993
auggauuacugccuccuua

SEQ ID NO: 1568774 - RNA, 19 nt, Artificial Sequence
  Description of Artificial Sequence: Synthetic oligonucleotide
  Antisense strand to SEQ ID NO: 1568773
uaaggaggcaguaauccau

SEQ ID NO: 1568775 - RNA, 19 nt, Artificial Sequence
  Description of Artificial Sequence: Synthetic oligonucleotide
  Sense strand starting at position 3813 of SEQ ID NO: 1559993
gccuccuuacuucgaggau

SEQ ID NO: 1568776 - RNA, 19 nt, Artificial Sequence
  Description of Artificial Sequence: Synthetic oligonucleotide
  Antisense strand to SEQ ID NO: 1568775
auccucgaaguaaggaggc

SEQ ID NO: 1568777 - RNA, 19 nt, Artificial Sequence
  Description of Artificial Sequence: Synthetic oligonucleotide
  Sense strand starting at position 3816 of SEQ ID NO: 1559993
uccuuacuucgaggauuaa

SEQ ID NO: 1568778 - RNA, 19 nt, Artificial Sequence
  Description of Artificial Sequence: Synthetic oligonucleotide
  Antisense strand to SEQ ID NO: 1568777
uuaauccucgaaguaagga

SEQ ID NO: 1568779 - RNA, 19 nt, Artificial Sequence
  Description of Artificial Sequence: Synthetic oligonucleotide
  Sense strand starting at position 376 of SEQ ID NO: 1559994
ucccaagaguucuccgagu

SEQ ID NO: 1568780 - RNA, 19 nt, Artificial Sequence
  Description of Artificial Sequence: Synthetic oligonucleotide
  Antisense strand to SEQ ID NO: 1568779
acucggagaacucuuggga

SEQ ID NO: 1568781 - RNA, 19 nt, Artificial Sequence
  Description of Artificial Sequence: Synthetic oligonucleotide
  Sense strand starting at position 494 of SEQ ID NO: 1559994
uggcucuugugugcccaaa

SEQ ID NO: 1568782 - RNA, 19 nt, Artificial Sequence
  Description of Artificial Sequence: Synthetic oligonucleotide
  Antisense strand to SEQ ID NO: 1568781
uuugggcacacaagagcca

SEQ ID NO: 1568783 - RNA, 19 nt, Artificial Sequence
  Description of Artificial Sequence: Synthetic oligonucleotide
  Sense strand starting at position 609 of SEQ ID NO: 1559994
uggcuuggcccggaggaau

SEQ ID NO: 1568784 - RNA, 19 nt, Artificial Sequence
  Description of Artificial Sequence: Synthetic oligonucleotide
  Antisense strand to SEQ ID NO: 1568783
auuccuccgggccaagcca

SEQ ID NO: 1568785 - RNA, 19 nt, Artificial Sequence
  Description of Artificial Sequence: Synthetic oligonucleotide
  Sense strand starting at position 861 of SEQ ID NO: 1559994
accuccucaccgggaaaua

SEQ ID NO: 1568786 - RNA, 19 nt, Artificial Sequence
  Description of Artificial Sequence: Synthetic oligonucleotide
  Antisense strand to SEQ ID NO: 1568785
uauuucccggugaggaggu

SEQ ID NO: 1568787 - RNA, 19 nt, Artificial Sequence
  Description of Artificial Sequence: Synthetic oligonucleotide
  Sense strand starting at position 973 of SEQ ID NO: 1559994
ggccuucucugagaaucag

SEQ ID NO: 1568788 - RNA, 19 nt, Artificial Sequence
  Description of Artificial Sequence: Synthetic oligonucleotide
  Antisense strand to SEQ ID NO: 1568787
cugauucucagagaaggcc

SEQ ID NO: 1568789 - RNA, 19 nt, Artificial Sequence
  Description of Artificial Sequence: Synthetic oligonucleotide
  Sense strand starting at position 1058 of SEQ ID NO: 1559994
gcggguuuccuggacucua

SEQ ID NO: 1568790 - RNA, 19 nt, Artificial Sequence
  Description of Artificial Sequence: Synthetic oligonucleotide
  Antisense strand to SEQ ID NO: 1568789
uagaguccaggaaacccgc

SEQ ID NO: 1568791 - RNA, 19 nt, Artificial Sequence
  Description of Artificial Sequence: Synthetic oligonucleotide
  Sense strand starting at position 1133 of SEQ ID NO: 1559994
ggagucuggcuccagagaa

SEQ ID NO: 1568792 - RNA, 19 nt, Artificial Sequence
  Description of Artificial Sequence: Synthetic oligonucleotide
  Antisense strand to SEQ ID NO: 1568791
uucucuggagccagacucc

SEQ ID NO: 1568793 - RNA, 19 nt, Artificial Sequence
  Description of Artificial Sequence: Synthetic oligonucleotide
  Sense strand starting at position 1169 of SEQ ID NO: 1559994
ggguagacguucccgguua

SEQ ID NO: 1568794 - RNA, 19 nt, Artificial Sequence
  Description of Artificial Sequence: Synthetic oligonucleotide
  Antisense strand to SEQ ID NO: 1568793
uaaccgggaacgucuaccc

SEQ ID NO: 1568795 - RNA, 19 nt, Artificial Sequence
  Description of Artificial Sequence: Synthetic oligonucleotide
  Sense strand starting at position 1171 of SEQ ID NO: 1559994
guagacguucccgguuagu

SEQ ID NO: 1568796 - RNA, 19 nt, Artificial Sequence
  Description of Artificial Sequence: Synthetic oligonucleotide
  Antisense strand to SEQ ID NO: 1568795
acuaaccgggaacgucuac

SEQ ID NO: 1568797 - RNA, 19 nt, Artificial Sequence
  Description of Artificial Sequence: Synthetic oligonucleotide
  Sense strand starting at position 1472 of SEQ ID NO: 1559994
guucuaaguugagaggcuu

SEQ ID NO: 1568798 - RNA, 19 nt, Artificial Sequence
  Description of Artificial Sequence: Synthetic oligonucleotide
  Antisense strand to SEQ ID NO: 1568797
aagccucucaacuuagaac

SEQ ID NO: 1568799 - RNA, 19 nt, Artificial Sequence
  Description of Artificial Sequence: Synthetic oligonucleotide
  Sense strand starting at position 2276 of SEQ ID NO: 1559994
auggcugucccucaaacaa

SEQ ID NO: 1568800 - RNA, 19 nt, Artificial Sequence
  Description of Artificial Sequence: Synthetic oligonucleotide
  Antisense strand to SEQ ID NO: 1568799
uuguuugagggacagccau

SEQ ID NO: 1568801 - RNA, 19 nt, Artificial Sequence
  Description of Artificial Sequence: Synthetic oligonucleotide
  Sense strand starting at position 2889 of SEQ ID NO: 1559994
ccaucagaccugggagcua

SEQ ID NO: 1568802 - RNA, 19 nt, Artificial Sequence
  Description of Artificial Sequence: Synthetic oligonucleotide
  Antisense strand to SEQ ID NO: 1568801
uagcucccaggucugaugg

SEQ ID NO: 1568803 - RNA, 19 nt, Artificial Sequence
  Description of Artificial Sequence: Synthetic oligonucleotide
  Sense strand starting at position 2930 of SEQ ID NO: 1559994
cacggauguuccuuaacca

SEQ ID NO: 1568804 - RNA, 19 nt, Artificial Sequence
  Description of Artificial Sequence: Synthetic oligonucleotide
  Antisense strand to SEQ ID NO: 1568803
ugguuaaggaacauccgug

SEQ ID NO: 1568805 - RNA, 19 nt, Artificial Sequence
  Description of Artificial Sequence: Synthetic oligonucleotide
  Sense strand starting at position 2931 of SEQ ID NO: 1559994
acggauguuccuuaaccaa

SEQ ID NO: 1568806 - RNA, 19 nt, Artificial Sequence
  Description of Artificial Sequence: Synthetic oligonucleotide
  Antisense strand to SEQ ID NO: 1568805
uugguuaaggaacauccgu

SEQ ID NO: 1568807 - RNA, 19 nt, Artificial Sequence
  Description of Artificial Sequence: Synthetic oligonucleotide
  Sense strand starting at position 2955 of SEQ ID NO: 1559994
ggguucucacccugaagga

SEQ ID NO: 1568808 - RNA, 19 nt, Artificial Sequence
  Description of Artificial Sequence: Synthetic oligonucleotide
  Antisense strand to SEQ ID NO: 1568807
uccuucagggugagaaccc

SEQ ID NO: 1568809 - RNA, 19 nt, Artificial Sequence
  Description of Artificial Sequence: Synthetic oligonucleotide
  Sense strand starting at position 3026 of SEQ ID NO: 1559994
aaggaugaguccugccaaa

SEQ ID NO: 1568810 - RNA, 19 nt, Artificial Sequence
  Description of Artificial Sequence: Synthetic oligonucleotide
  Antisense strand to SEQ ID NO: 1568809
uuuggcaggacucauccuu

SEQ ID NO: 1568811 - RNA, 19 nt, Artificial Sequence
  Description of Artificial Sequence: Synthetic oligonucleotide
  Sense strand starting at position 3041 of SEQ ID NO: 1559994
caaagacuccagugugauc

SEQ ID NO: 1568812 - RNA, 19 nt, Artificial Sequence
  Description of Artificial Sequence: Synthetic oligonucleotide
  Antisense strand to SEQ ID NO: 1568811
gaucacacuggagucuuug

SEQ ID NO: 1568813 - RNA, 19 nt, Artificial Sequence
  Description of Artificial Sequence: Synthetic oligonucleotide
  Sense strand starting at position 3304 of SEQ ID NO: 1559994
uaguuaucucguugagcca

SEQ ID NO: 1568814 - RNA, 19 nt, Artificial Sequence
  Description of Artificial Sequence: Synthetic oligonucleotide
  Antisense strand to SEQ ID NO: 1568813
uggcucaacgagauaacua

SEQ ID NO: 1568815 - RNA, 19 nt, Artificial Sequence
  Description of Artificial Sequence: Synthetic oligonucleotide
  Sense strand starting at position 3423 of SEQ ID NO: 1559994
cucagcaucugccaaguaa

SEQ ID NO: 1568816 - RNA, 19 nt, Artificial Sequence
  Description of Artificial Sequence: Synthetic oligonucleotide
  Antisense strand to SEQ ID NO: 1568815
uuacuuggcagaugcugag

SEQ ID NO: 1568817 - RNA, 19 nt, Artificial Sequence
  Description of Artificial Sequence: Synthetic oligonucleotide
  Sense strand starting at position 3435 of SEQ ID NO: 1559994
caaguaaaugccuguugcu

SEQ ID NO: 1568818 - RNA, 19 nt, Artificial Sequence
  Description of Artificial Sequence: Synthetic oligonucleotide
  Antisense strand to SEQ ID NO: 1568817
agcaacaggcauuuacuug

SEQ ID NO: 1568819 - RNA, 19 nt, Artificial Sequence
  Description of Artificial Sequence: Synthetic oligonucleotide
  Sense strand starting at position 3478 of SEQ ID NO: 1559994
cagggaccuuucugauucu

SEQ ID NO: 1568820 - RNA, 19 nt, Artificial Sequence
  Description of Artificial Sequence: Synthetic oligonucleotide
  Antisense strand to SEQ ID NO: 1568819
agaaucagaaaggucccug

SEQ ID NO: 1568821 - RNA, 19 nt, Artificial Sequence
  Description of Artificial Sequence: Synthetic oligonucleotide
  Sense strand starting at position 3479 of SEQ ID NO: 1559994
agggaccuuucugauucua

SEQ ID NO: 1568822 - RNA, 19 nt, Artificial Sequence
  Description of Artificial Sequence: Synthetic oligonucleotide
  Antisense strand to SEQ ID NO: 1568821
uagaaucagaaaggucccu

SEQ ID NO: 1568823 - RNA, 19 nt, Artificial Sequence
  Description of Artificial Sequence: Synthetic oligonucleotide
  Sense strand starting at position 3481 of SEQ ID NO: 1559994
ggaccuuucugauucuacu

SEQ ID NO: 1568824 - RNA, 19 nt, Artificial Sequence
  Description of Artificial Sequence: Synthetic oligonucleotide
  Antisense strand to SEQ ID NO: 1568823
aguagaaucagaaaggucc

SEQ ID NO: 1568825 - RNA, 19 nt, Artificial Sequence
  Description of Artificial Sequence: Synthetic oligonucleotide
  Sense strand starting at position 3896 of SEQ ID NO: 1559994
guuugaaugcaccauccuu

SEQ ID NO: 1568826 - RNA, 19 nt, Artificial Sequence
  Description of Artificial Sequence: Synthetic oligonucleotide
  Antisense strand to SEQ ID NO: 1568825
aaggauggugcauucaaac

SEQ ID NO: 1568827 - RNA, 19 nt, Artificial Sequence
  Description of Artificial Sequence: Synthetic oligonucleotide
  Sense strand starting at position 3918 of SEQ ID NO: 1559994
cgcaguguggucccaggua

SEQ ID NO: 1568828 - RNA, 19 nt, Artificial Sequence
  Description of Artificial Sequence: Synthetic oligonucleotide
  Antisense strand to SEQ ID NO: 1568827
uaccugggaccacacugcg

SEQ ID NO: 1568829 - RNA, 19 nt, Artificial Sequence
  Description of Artificial Sequence: Synthetic oligonucleotide
  Sense strand starting at position 588 of SEQ ID NO: 1559995
agaggaaagugacauggau

SEQ ID NO: 1568830 - RNA, 19 nt, Artificial Sequence
  Description of Artificial Sequence: Synthetic oligonucleotide
  Antisense strand to SEQ ID NO: 1568829
auccaugucacuuuccucu

SEQ ID NO: 1568831 - RNA, 19 nt, Artificial Sequence
  Description of Artificial Sequence: Synthetic oligonucleotide
  Sense strand starting at position 594 of SEQ ID NO: 1559995
aagugacauggaugaguca

SEQ ID NO: 1568832 - RNA, 19 nt, Artificial Sequence
  Description of Artificial Sequence: Synthetic oligonucleotide
  Antisense strand to SEQ ID NO: 1568831
ugacucauccaugucacuu

SEQ ID NO: 1568833 - RNA, 19 nt, Artificial Sequence
  Description of Artificial Sequence: Synthetic oligonucleotide
  Sense strand starting at position 605 of SEQ ID NO: 1559995
augagucacuuugugcaaa

SEQ ID NO: 1568834 - RNA, 19 nt, Artificial Sequence
  Description of Artificial Sequence: Synthetic oligonucleotide
  Antisense strand to SEQ ID NO: 1568833
uuugcacaaagugacucau

SEQ ID NO: 1568835 - RNA, 19 nt, Artificial Sequence
  Description of Artificial Sequence: Synthetic oligonucleotide
  Sense strand starting at position 703 of SEQ ID NO: 1559995
caggaacuauccguuaaau

SEQ ID NO: 1568836 - RNA, 19 nt, Artificial Sequence
  Description of Artificial Sequence: Synthetic oligonucleotide
  Antisense strand to SEQ ID NO: 1568835
auuuaacggauaguuccug

SEQ ID NO: 1568837 - RNA, 19 nt, Artificial Sequence
  Description of Artificial Sequence: Synthetic oligonucleotide
  Sense strand starting at position 759 of SEQ ID NO: 1559995
ugaaauguauaagccaagu

SEQ ID NO: 1568838 - RNA, 19 nt, Artificial Sequence
  Description of Artificial Sequence: Synthetic oligonucleotide
  Antisense strand to SEQ ID NO: 1568837
acuuggcuuauacauuuca

SEQ ID NO: 1568839 - RNA, 19 nt, Artificial Sequence
  Description of Artificial Sequence: Synthetic oligonucleotide
  Sense strand starting at position 772 of SEQ ID NO: 1559995
ccaaguguuugguguguaa

SEQ ID NO: 1568840 - RNA, 19 nt, Artificial Sequence
  Description of Artificial Sequence: Synthetic oligonucleotide
  Antisense strand to SEQ ID NO: 1568839
uuacacaccaaacacuugg

SEQ ID NO: 1568841 - RNA, 19 nt, Artificial Sequence
  Description of Artificial Sequence: Synthetic oligonucleotide
  Sense strand starting at position 775 of SEQ ID NO: 1559995
aguguuugguguguaauuc

SEQ ID NO: 1568842 - RNA, 19 nt, Artificial Sequence
  Description of Artificial Sequence: Synthetic oligonucleotide
  Antisense strand to SEQ ID NO: 1568841
gaauuacacaccaaacacu

SEQ ID NO: 1568843 - RNA, 19 nt, Artificial Sequence
  Description of Artificial Sequence: Synthetic oligonucleotide
  Sense strand starting at position 776 of SEQ ID NO: 1559995
guguuugguguguaauuca

SEQ ID NO: 1568844 - RNA, 19 nt, Artificial Sequence
  Description of Artificial Sequence: Synthetic oligonucleotide
  Antisense strand to SEQ ID NO: 1568843
ugaauuacacaccaaacac

SEQ ID NO: 1568845 - RNA, 19 nt, Artificial Sequence
  Description of Artificial Sequence: Synthetic oligonucleotide
  Sense strand starting at position 1304 of SEQ ID NO: 1559995
cucagaggugcccagauau

SEQ ID NO: 1568846 - RNA, 19 nt, Artificial Sequence
  Description of Artificial Sequence: Synthetic oligonucleotide
  Antisense strand to SEQ ID NO: 1568845
auaucugggcaccucugag

SEQ ID NO: 1568847 - RNA, 19 nt, Artificial Sequence
  Description of Artificial Sequence: Synthetic oligonucleotide
  Sense strand starting at position 1322 of SEQ ID NO: 1559995
uccaguauuggagguacca

SEQ ID NO: 1568848 - RNA, 19 nt, Artificial Sequence
  Description of Artificial Sequence: Synthetic oligonucleotide
  Antisense strand to SEQ ID NO: 1568847
ugguaccuccaauacugga

SEQ ID NO: 1568849 - RNA, 19 nt, Artificial Sequence
  Description of Artificial Sequence: Synthetic oligonucleotide
  Sense strand starting at position 2620 of SEQ ID NO: 1559995
gaagguugugcauggauca

SEQ ID NO: 1568850 - RNA, 19 nt, Artificial Sequence
  Description of Artificial Sequence: Synthetic oligonucleotide
  Antisense strand to SEQ ID NO: 1568849
ugauccaugcacaaccuuc

SEQ ID NO: 1568851 - RNA, 19 nt, Artificial Sequence
  Description of Artificial Sequence: Synthetic oligonucleotide
  Sense strand starting at position 2621 of SEQ ID NO: 1559995
aagguugugcauggaucau

SEQ ID NO: 1568852 - RNA, 19 nt, Artificial Sequence
  Description of Artificial Sequence: Synthetic oligonucleotide
  Antisense strand to SEQ ID NO: 1568851
augauccaugcacaaccuu

SEQ ID NO: 1568853 - RNA, 19 nt, Artificial Sequence
  Description of Artificial Sequence: Synthetic oligonucleotide
  Sense strand starting at position 2741 of SEQ ID NO: 1559995
agcgguaccuacgaaauga

SEQ ID NO: 1568854 - RNA, 19 nt, Artificial Sequence
  Description of Artificial Sequence: Synthetic oligonucleotide
  Antisense strand to SEQ ID NO: 1568853
ucauuucguagguaccgcu

SEQ ID NO: 1568855 - RNA, 19 nt, Artificial Sequence
  Description of Artificial Sequence: Synthetic oligonucleotide
  Sense strand starting at position 2745 of SEQ ID NO: 1559995
guaccuacgaaaugauguu

SEQ ID NO: 1568856 - RNA, 19 nt, Artificial Sequence
  Description of Artificial Sequence: Synthetic oligonucleotide
  Antisense strand to SEQ ID NO: 1568855
aacaucauuucguagguac

SEQ ID NO: 1568857 - RNA, 19 nt, Artificial Sequence
  Description of Artificial Sequence: Synthetic oligonucleotide
  Sense strand starting at position 2961 of SEQ ID NO: 1559995
uggaguuucuccagcggga

SEQ ID NO: 1568858 - RNA, 19 nt, Artificial Sequence
  Description of Artificial Sequence: Synthetic oligonucleotide
  Antisense strand to SEQ ID NO: 1568857
ucccgcuggagaaacucca

SEQ ID NO: 1568859 - RNA, 19 nt, Artificial Sequence
  Description of Artificial Sequence: Synthetic oligonucleotide
  Sense strand starting at position 2963 of SEQ ID NO: 1559995
gaguuucuccagcgggagu

SEQ ID NO: 1568860 - RNA, 19 nt, Artificial Sequence
  Description of Artificial Sequence: Synthetic oligonucleotide
  Antisense strand to SEQ ID NO: 1568859
acucccgcuggagaaacuc

SEQ ID NO: 1568861 - RNA, 19 nt, Artificial Sequence
  Description of Artificial Sequence: Synthetic oligonucleotide
  Sense strand starting at position 3227 of SEQ ID NO: 1559995
gaggaugggucuuuggagu

SEQ ID NO: 1568862 - RNA, 19 nt, Artificial Sequence
  Description of Artificial Sequence: Synthetic oligonucleotide
  Antisense strand to SEQ ID NO: 1568861
acuccaaagacccauccuc

SEQ ID NO: 1568863 - RNA, 19 nt, Artificial Sequence
  Description of Artificial Sequence: Synthetic oligonucleotide
  Sense strand starting at position 3234 of SEQ ID NO: 1559995
ggucuuuggaguugaaagg

SEQ ID NO: 1568864 - RNA, 19 nt, Artificial Sequence
  Description of Artificial Sequence: Synthetic oligonucleotide
  Antisense strand to SEQ ID NO: 1568863
ccuuucaacuccaaagacc

SEQ ID NO: 1568865 - RNA, 19 nt, Artificial Sequence
  Description of Artificial Sequence: Synthetic oligonucleotide
  Sense strand starting at position 3306 of SEQ ID NO: 1559995
gccguuaaguccgggagga

SEQ ID NO: 1568866 - RNA, 19 nt, Artificial Sequence
  Description of Artificial Sequence: Synthetic oligonucleotide
  Antisense strand to SEQ ID NO: 1568865
uccucccggacuuaacggc

SEQ ID NO: 1568867 - RNA, 19 nt, Artificial Sequence
  Description of Artificial Sequence: Synthetic oligonucleotide
  Sense strand starting at position 3308 of SEQ ID NO: 1559995
cguuaaguccgggaggaga

SEQ ID NO: 1568868 - RNA, 19 nt, Artificial Sequence
  Description of Artificial Sequence: Synthetic oligonucleotide
  Antisense strand to SEQ ID NO: 1568867
ucuccucccggacuuaacg

SEQ ID NO: 1568869 - RNA, 19 nt, Artificial Sequence
  Description of Artificial Sequence: Synthetic oligonucleotide
  Sense strand starting at position 125 of SEQ ID NO: 1559996
cugggcaacgagugagauu

SEQ ID NO: 1568870 - RNA, 19 nt, Artificial Sequence
  Description of Artificial Sequence: Synthetic oligonucleotide
  Antisense strand to SEQ ID NO: 1568869
aaucucacucguugcccag

SEQ ID NO: 1568871 - RNA, 19 nt, Artificial Sequence
  Description of Artificial Sequence: Synthetic oligonucleotide
  Sense strand starting at position 180 of SEQ ID NO: 1559996
uuaagagacagucguuuga

SEQ ID NO: 1568872 - RNA, 19 nt, Artificial Sequence
  Description of Artificial Sequence: Synthetic oligonucleotide
  Antisense strand to SEQ ID NO: 1568871
ucaaacgacugucucuuaa

SEQ ID NO: 1568873 - RNA, 19 nt, Artificial Sequence
  Description of Artificial Sequence: Synthetic oligonucleotide
  Sense strand starting at position 182 of SEQ ID NO: 1559996
aagagacagucguuugaac

SEQ ID NO: 1568874 - RNA, 19 nt, Artificial Sequence
  Description of Artificial Sequence: Synthetic oligonucleotide
  Antisense strand to SEQ ID NO: 1568873
guucaaacgacugucucuu

SEQ ID NO: 1568875 - RNA, 19 nt, Artificial Sequence
  Description of Artificial Sequence: Synthetic oligonucleotide
  Sense strand starting at position 354 of SEQ ID NO: 1559996
aggugagaggaucgcuuau

SEQ ID NO: 1568876 - RNA, 19 nt, Artificial Sequence
  Description of Artificial Sequence: Synthetic oligonucleotide
  Antisense strand to SEQ ID NO: 1568875
auaagcgauccucucaccu

SEQ ID NO: 1568877 - RNA, 19 nt, Artificial Sequence
  Description of Artificial Sequence: Synthetic oligonucleotide
  Sense strand starting at position 836 of SEQ ID NO: 1559996
ccacguguucugcuugacu

SEQ ID NO: 1568878 - RNA, 19 nt, Artificial Sequence
  Description of Artificial Sequence: Synthetic oligonucleotide
  Antisense strand to SEQ ID NO: 1568877
agucaagcagaacacgugg

SEQ ID NO: 1568879 - RNA, 19 nt, Artificial Sequence
  Description of Artificial Sequence: Synthetic oligonucleotide
  Sense strand starting at position 845 of SEQ ID NO: 1559996
cugcuugacugcuuaauac

SEQ ID NO: 1568880 - RNA, 19 nt, Artificial Sequence
  Description of Artificial Sequence: Synthetic oligonucleotide
  Antisense strand to SEQ ID NO: 1568879
guauuaagcagucaagcag

SEQ ID NO: 1568881 - RNA, 19 nt, Artificial Sequence
  Description of Artificial Sequence: Synthetic oligonucleotide
  Sense strand starting at position 852 of SEQ ID NO: 1559996
acugcuuaauaccugggaa

SEQ ID NO: 1568882 - RNA, 19 nt, Artificial Sequence
  Description of Artificial Sequence: Synthetic oligonucleotide
  Antisense strand to SEQ ID NO: 1568881
uucccagguauuaagcagu

SEQ ID NO: 1568883 - RNA, 19 nt, Artificial Sequence
  Description of Artificial Sequence: Synthetic oligonucleotide
  Sense strand starting at position 854 of SEQ ID NO: 1559996
ugcuuaauaccugggaaua

SEQ ID NO: 1568884 - RNA, 19 nt, Artificial Sequence
  Description of Artificial Sequence: Synthetic oligonucleotide
  Antisense strand to SEQ ID NO: 1568883
uauucccagguauuaagca

SEQ ID NO: 1568885 - RNA, 19 nt, Artificial Sequence
  Description of Artificial Sequence: Synthetic oligonucleotide
  Sense strand starting at position 855 of SEQ ID NO: 1559996
gcuuaauaccugggaauau

SEQ ID NO: 1568886 - RNA, 19 nt, Artificial Sequence
  Description of Artificial Sequence: Synthetic oligonucleotide
  Antisense strand to SEQ ID NO: 1568885
auauucccagguauuaagc

SEQ ID NO: 1568887 - RNA, 19 nt, Artificial Sequence
  Description of Artificial Sequence: Synthetic oligonucleotide
  Sense strand starting at position 919 of SEQ ID NO: 1559996
ucagcagacucucugacau

SEQ ID NO: 1568888 - RNA, 19 nt, Artificial Sequence
  Description of Artificial Sequence: Synthetic oligonucleotide
  Antisense strand to SEQ ID NO: 1568887
augucagagagucugcuga

SEQ ID NO: 1568889 - RNA, 19 nt, Artificial Sequence
  Description of Artificial Sequence: Synthetic oligonucleotide
  Sense strand starting at position 921 of SEQ ID NO: 1559996
agcagacucucugacauuu

SEQ ID NO: 1568890 - RNA, 19 nt, Artificial Sequence
  Description of Artificial Sequence: Synthetic oligonucleotide
  Antisense strand to SEQ ID NO: 1568889
aaaugucagagagucugcu

SEQ ID NO: 1568891 - RNA, 19 nt, Artificial Sequence
  Description of Artificial Sequence: Synthetic oligonucleotide
  Sense strand starting at position 949 of SEQ ID NO: 1559996
ucagaucugaccuggugga

SEQ ID NO: 1568892 - RNA, 19 nt, Artificial Sequence
  Description of Artificial Sequence: Synthetic oligonucleotide
  Antisense strand to SEQ ID NO: 1568891
uccaccaggucagaucuga

SEQ ID NO: 1568893 - RNA, 19 nt, Artificial Sequence
  Description of Artificial Sequence: Synthetic oligonucleotide
  Sense strand starting at position 950 of SEQ ID NO: 1559996
cagaucugaccugguggaa

SEQ ID NO: 1568894 - RNA, 19 nt, Artificial Sequence
  Description of Artificial Sequence: Synthetic oligonucleotide
  Antisense strand to SEQ ID NO: 1568893
uuccaccaggucagaucug

SEQ ID NO: 1568895 - RNA, 19 nt, Artificial Sequence
  Description of Artificial Sequence: Synthetic oligonucleotide
  Sense strand starting at position 978 of SEQ ID NO: 1559996
aguuauuccuucucuggaa

SEQ ID NO: 1568896 - RNA, 19 nt, Artificial Sequence
  Description of Artificial Sequence: Synthetic oligonucleotide
  Antisense strand to SEQ ID NO: 1568895
uuccagagaaggaauaacu

SEQ ID NO: 1568897 - RNA, 19 nt, Artificial Sequence
  Description of Artificial Sequence: Synthetic oligonucleotide
  Sense strand starting at position 1380 of SEQ ID NO: 1559996
ugcugucagagugaaacuu

SEQ ID NO: 1568898 - RNA, 19 nt, Artificial Sequence
  Description of Artificial Sequence: Synthetic oligonucleotide
  Antisense strand to SEQ ID NO: 1568897
aaguuucacucugacagca

SEQ ID NO: 1568899 - RNA, 19 nt, Artificial Sequence
  Description of Artificial Sequence: Synthetic oligonucleotide
  Sense strand starting at position 1388 of SEQ ID NO: 1559996
gagugaaacuuaucuguaa

SEQ ID NO: 1568900 - RNA, 19 nt, Artificial Sequence
  Description of Artificial Sequence: Synthetic oligonucleotide
  Antisense strand to SEQ ID NO: 1568899
uuacagauaaguuucacuc

SEQ ID NO: 1568901 - RNA, 19 nt, Artificial Sequence
  Description of Artificial Sequence: Synthetic oligonucleotide
  Sense strand starting at position 1389 of SEQ ID NO: 1559996
agugaaacuuaucuguaaa

SEQ ID NO: 1568902 - RNA, 19 nt, Artificial Sequence
  Description of Artificial Sequence: Synthetic oligonucleotide
  Antisense strand to SEQ ID NO: 1568901
uuuacagauaaguuucacu

SEQ ID NO: 1568903 - RNA, 19 nt, Artificial Sequence
  Description of Artificial Sequence: Synthetic oligonucleotide
  Sense strand starting at position 1440 of SEQ ID NO: 1559996
aguuguuggauugagcauu

SEQ ID NO: 1568904 - RNA, 19 nt, Artificial Sequence
  Description of Artificial Sequence: Synthetic oligonucleotide
  Antisense strand to SEQ ID NO: 1568903
aaugcucaauccaacaacu

SEQ ID NO: 1568905 - RNA, 19 nt, Artificial Sequence
  Description of Artificial Sequence: Synthetic oligonucleotide
  Sense strand starting at position 1504 of SEQ ID NO: 1559996
cgaucagcuccuuaugucu

SEQ ID NO: 1568906 - RNA, 19 nt, Artificial Sequence
  Description of Artificial Sequence: Synthetic oligonucleotide
  Antisense strand to SEQ ID NO: 1568905
agacauaaggagcugaucg

SEQ ID NO: 1568907 - RNA, 19 nt, Artificial Sequence
  Description of Artificial Sequence: Synthetic oligonucleotide
  Sense strand starting at position 1542 of SEQ ID NO: 1559996
guaucugauggucauuguu

SEQ ID NO: 1568908 - RNA, 19 nt, Artificial Sequence
  Description of Artificial Sequence: Synthetic oligonucleotide
  Antisense strand to SEQ ID NO: 1568907
aacaaugaccaucagauac

SEQ ID NO: 1568909 - RNA, 19 nt, Artificial Sequence
  Description of Artificial Sequence: Synthetic oligonucleotide
  Sense strand starting at position 1604 of SEQ ID NO: 1559996
uucugauagcccuagaguu

SEQ ID NO: 1568910 - RNA, 19 nt, Artificial Sequence
  Description of Artificial Sequence: Synthetic oligonucleotide
  Antisense strand to SEQ ID NO: 1568909
aacucuagggcuaucagaa

SEQ ID NO: 1568911 - RNA, 19 nt, Artificial Sequence
  Description of Artificial Sequence: Synthetic oligonucleotide
  Sense strand starting at position 1712 of SEQ ID NO: 1559996
cugggaaugucuuugucuu

SEQ ID NO: 1568912 - RNA, 19 nt, Artificial Sequence
  Description of Artificial Sequence: Synthetic oligonucleotide
  Antisense strand to SEQ ID NO: 1568911
aagacaaagacauucccag

SEQ ID NO: 1568913 - RNA, 19 nt, Artificial Sequence
  Description of Artificial Sequence: Synthetic oligonucleotide
  Sense strand starting at position 1713 of SEQ ID NO: 1559996
ugggaaugucuuugucuua

SEQ ID NO: 1568914 - RNA, 19 nt, Artificial Sequence
  Description of Artificial Sequence: Synthetic oligonucleotide
  Antisense strand to SEQ ID NO: 1568913
uaagacaaagacauuccca

SEQ ID NO: 1568915 - RNA, 19 nt, Artificial Sequence
  Description of Artificial Sequence: Synthetic oligonucleotide
  Sense strand starting at position 1714 of SEQ ID NO: 1559996
gggaaugucuuugucuuau

SEQ ID NO: 1568916 - RNA, 19 nt, Artificial Sequence
  Description of Artificial Sequence: Synthetic oligonucleotide
  Antisense strand to SEQ ID NO: 1568915
auaagacaaagacauuccc

SEQ ID NO: 1568917 - RNA, 19 nt, Artificial Sequence
  Description of Artificial Sequence: Synthetic oligonucleotide
  Sense strand starting at position 1860 of SEQ ID NO: 1559996
gcuguucaggguuaagauc

SEQ ID NO: 1568918 - RNA, 19 nt, Artificial Sequence
  Description of Artificial Sequence: Synthetic oligonucleotide
  Antisense strand to SEQ ID NO: 1568917
gaucuuaacccugaacagc

SEQ ID NO: 1568919 - RNA, 19 nt, Artificial Sequence
  Description of Artificial Sequence: Synthetic oligonucleotide
  Sense strand starting at position 1975 of SEQ ID NO: 1559996
gagagacauuccucucugu

SEQ ID NO: 1568920 - RNA, 19 nt, Artificial Sequence
  Description of Artificial Sequence: Synthetic oligonucleotide
  Antisense strand to SEQ ID NO: 1568919
acagagaggaaugucucuc

SEQ ID NO: 1568921 - RNA, 19 nt, Artificial Sequence
  Description of Artificial Sequence: Synthetic oligonucleotide
  Sense strand starting at position 2025 of SEQ ID NO: 1559996
gcccuagugagguaaucca

SEQ ID NO: 1568922 - RNA, 19 nt, Artificial Sequence
  Description of Artificial Sequence: Synthetic oligonucleotide
  Antisense strand to SEQ ID NO: 1568921
uggauuaccucacuagggc

SEQ ID NO: 1568923 - RNA, 19 nt, Artificial Sequence
  Description of Artificial Sequence: Synthetic oligonucleotide
  Sense strand starting at position 2048 of SEQ ID NO: 1559996
ugacaucacucagcucaga

SEQ ID NO: 1568924 - RNA, 19 nt, Artificial Sequence
  Description of Artificial Sequence: Synthetic oligonucleotide
  Antisense strand to SEQ ID NO: 1568923
ucugagcugagugauguca

SEQ ID NO: 1568925 - RNA, 19 nt, Artificial Sequence
  Description of Artificial Sequence: Synthetic oligonucleotide
  Sense strand starting at position 2061 of SEQ ID NO: 1559996
cucagaguuccgggaagug

SEQ ID NO: 1568926 - RNA, 19 nt, Artificial Sequence
  Description of Artificial Sequence: Synthetic oligonucleotide
  Antisense strand to SEQ ID NO: 1568925
cacuucccggaacucugag

SEQ ID NO: 1568927 - RNA, 19 nt, Artificial Sequence
  Description of Artificial Sequence: Synthetic oligonucleotide
  Sense strand starting at position 2123 of SEQ ID NO: 1559996
gugggugguugauugggaa

SEQ ID NO: 1568928 - RNA, 19 nt, Artificial Sequence
  Description of Artificial Sequence: Synthetic oligonucleotide
  Antisense strand to SEQ ID NO: 1568927
uucccaaucaaccacccac

SEQ ID NO: 1568929 - RNA, 19 nt, Artificial Sequence
  Description of Artificial Sequence: Synthetic oligonucleotide
  Sense strand starting at position 2124 of SEQ ID NO: 1559996
ugggugguugauugggaaa

SEQ ID NO: 1568930 - RNA, 19 nt, Artificial Sequence
  Description of Artificial Sequence: Synthetic oligonucleotide
  Antisense strand to SEQ ID NO: 1568929
uuucccaaucaaccaccca

SEQ ID NO: 1568931 - RNA, 19 nt, Artificial Sequence
  Description of Artificial Sequence: Synthetic oligonucleotide
  Sense strand starting at position 2180 of SEQ ID NO: 1559996
gauggagucuuacccugua

SEQ ID NO: 1568932 - RNA, 19 nt, Artificial Sequence
  Description of Artificial Sequence: Synthetic oligonucleotide
  Antisense strand to SEQ ID NO: 1568931
uacaggguaagacuccauc

SEQ ID NO: 1568933 - RNA, 19 nt, Artificial Sequence
  Description of Artificial Sequence: Synthetic oligonucleotide
  Sense strand starting at position 3090 of SEQ ID NO: 1559996
agcaacucccugcaugauu

SEQ ID NO: 1568934 - RNA, 19 nt, Artificial Sequence
  Description of Artificial Sequence: Synthetic oligonucleotide
  Antisense strand to SEQ ID NO: 1568933
aaucaugcagggaguugcu

SEQ ID NO: 1568935 - RNA, 19 nt, Artificial Sequence
  Description of Artificial Sequence: Synthetic oligonucleotide
  Sense strand starting at position 3803 of SEQ ID NO: 1559996
gugagaccuugucuaagug

SEQ ID NO: 1568936 - RNA, 19 nt, Artificial Sequence
  Description of Artificial Sequence: Synthetic oligonucleotide
  Antisense strand to SEQ ID NO: 1568935
cacuuagacaaggucucac

SEQ ID NO: 1568937 - RNA, 19 nt, Artificial Sequence
  Description of Artificial Sequence: Synthetic oligonucleotide
  Sense strand starting at position 3804 of SEQ ID NO: 1559996
ugagaccuugucuaaguga

SEQ ID NO: 1568938 - RNA, 19 nt, Artificial Sequence
  Description of Artificial Sequence: Synthetic oligonucleotide
  Antisense strand to SEQ ID NO: 1568937
ucacuuagacaaggucuca

SEQ ID NO: 1568939 - RNA, 19 nt, Artificial Sequence
  Description of Artificial Sequence: Synthetic oligonucleotide
  Sense strand starting at position 3807 of SEQ ID NO: 1559996
gaccuugucuaagugaacu

SEQ ID NO: 1568940 - RNA, 19 nt, Artificial Sequence
  Description of Artificial Sequence: Synthetic oligonucleotide
  Antisense strand to SEQ ID NO: 1568939
aguucacuuagacaagguc

SEQ ID NO: 1568941 - RNA, 19 nt, Artificial Sequence
  Description of Artificial Sequence: Synthetic oligonucleotide
  Sense strand starting at position 3820 of SEQ ID NO: 1559996
ugaacuuugugcccaucaa

SEQ ID NO: 1568942 - RNA, 19 nt, Artificial Sequence
  Description of Artificial Sequence: Synthetic oligonucleotide
  Antisense strand to SEQ ID NO: 1568941
uugaugggcacaaaguuca

SEQ ID NO: 1568943 - RNA, 19 nt, Artificial Sequence
  Description of Artificial Sequence: Synthetic oligonucleotide
  Sense strand starting at position 3903 of SEQ ID NO: 1559996
aaguuuguugaaugacuua

SEQ ID NO: 1568944 - RNA, 19 nt, Artificial Sequence
  Description of Artificial Sequence: Synthetic oligonucleotide
  Antisense strand to SEQ ID NO: 1568943
uaagucauucaacaaacuu

SEQ ID NO: 1568945 - RNA, 19 nt, Artificial Sequence
  Description of Artificial Sequence: Synthetic oligonucleotide
  Sense strand starting at position 3918 of SEQ ID NO: 1559996
cuuaaugaccucugagaau

SEQ ID NO: 1568946 - RNA, 19 nt, Artificial Sequence
  Description of Artificial Sequence: Synthetic oligonucleotide
  Antisense strand to SEQ ID NO: 1568945
auucucagaggucauuaag

SEQ ID NO: 1568947 - RNA, 19 nt, Artificial Sequence
  Description of Artificial Sequence: Synthetic oligonucleotide
  Sense strand starting at position 3924 of SEQ ID NO: 1559996
gaccucugagaauguauca

SEQ ID NO: 1568948 - RNA, 19 nt, Artificial Sequence
  Description of Artificial Sequence: Synthetic oligonucleotide
  Antisense strand to SEQ ID NO: 1568947
ugauacauucucagagguc

SEQ ID NO: 1568949 - RNA, 19 nt, Artificial Sequence
  Description of Artificial Sequence: Synthetic oligonucleotide
  Sense strand starting at position 27 of SEQ ID NO: 1559997
aggccuugacuugaaaggu

SEQ ID NO: 1568950 - RNA, 19 nt, Artificial Sequence
  Description of Artificial Sequence: Synthetic oligonucleotide
  Antisense strand to SEQ ID NO: 1568949
accuuucaagucaaggccu

SEQ ID NO: 1568951 - RNA, 19 nt, Artificial Sequence
  Description of Artificial Sequence: Synthetic oligonucleotide
  Sense strand starting at position 266 of SEQ ID NO: 1559997
ggagcuuggcacugauuau

SEQ ID NO: 1568952 - RNA, 19 nt, Artificial Sequence
  Description of Artificial Sequence: Synthetic oligonucleotide
  Antisense strand to SEQ ID NO: 1568951
auaaucagugccaagcucc

SEQ ID NO: 1568953 - RNA, 19 nt, Artificial Sequence
  Description of Artificial Sequence: Synthetic oligonucleotide
  Sense strand starting at position 273 of SEQ ID NO: 1559997
ggcacugauuauccagcua

SEQ ID NO: 1568954 - RNA, 19 nt, Artificial Sequence
  Description of Artificial Sequence: Synthetic oligonucleotide
  Antisense strand to SEQ ID NO: 1568953
uagcuggauaaucagugcc

SEQ ID NO: 1568955 - RNA, 19 nt, Artificial Sequence
  Description of Artificial Sequence: Synthetic oligonucleotide
  Sense strand starting at position 655 of SEQ ID NO: 1559997
ugcaguaacucagcuggaa

SEQ ID NO: 1568956 - RNA, 19 nt, Artificial Sequence
  Description of Artificial Sequence: Synthetic oligonucleotide
  Antisense strand to SEQ ID NO: 1568955
uuccagcugaguuacugca

SEQ ID NO: 1568957 - RNA, 19 nt, Artificial Sequence
  Description of Artificial Sequence: Synthetic oligonucleotide
  Sense strand starting at position 729 of SEQ ID NO: 1559997
ggaucucaguguguuuauc

SEQ ID NO: 1568958 - RNA, 19 nt, Artificial Sequence
  Description of Artificial Sequence: Synthetic oligonucleotide
  Antisense strand to SEQ ID NO: 1568957
gauaaacacacugagaucc

SEQ ID NO: 1568959 - RNA, 19 nt, Artificial Sequence
  Description of Artificial Sequence: Synthetic oligonucleotide
  Sense strand starting at position 731 of SEQ ID NO: 1559997
aucucaguguguuuaucca

SEQ ID NO: 1568960 - RNA, 19 nt, Artificial Sequence
  Description of Artificial Sequence: Synthetic oligonucleotide
  Antisense strand to SEQ ID NO: 1568959
uggauaaacacacugagau

SEQ ID NO: 1568961 - RNA, 19 nt, Artificial Sequence
  Description of Artificial Sequence: Synthetic oligonucleotide
  Sense strand starting at position 932 of SEQ ID NO: 1559997
auugaaauauuggcagguu

SEQ ID NO: 1568962 - RNA, 19 nt, Artificial Sequence
  Description of Artificial Sequence: Synthetic oligonucleotide
  Antisense strand to SEQ ID NO: 1568961
aaccugccaauauuucaau

SEQ ID NO: 1568963 - RNA, 19 nt, Artificial Sequence
  Description of Artificial Sequence: Synthetic oligonucleotide
  Sense strand starting at position 1105 of SEQ ID NO: 1559997
auaggagauggcugggauu

SEQ ID NO: 1568964 - RNA, 19 nt, Artificial Sequence
  Description of Artificial Sequence: Synthetic oligonucleotide
  Antisense strand to SEQ ID NO: 1568963
aaucccagccaucuccuau

SEQ ID NO: 1568965 - RNA, 19 nt, Artificial Sequence
  Description of Artificial Sequence: Synthetic oligonucleotide
  Sense strand starting at position 1181 of SEQ ID NO: 1559997
aggugugaguaucucacua

SEQ ID NO: 1568966 - RNA, 19 nt, Artificial Sequence
  Description of Artificial Sequence: Synthetic oligonucleotide
  Antisense strand to SEQ ID NO: 1568965
uagugagauacucacaccu

SEQ ID NO: 1568967 - RNA, 19 nt, Artificial Sequence
  Description of Artificial Sequence: Synthetic oligonucleotide
  Sense strand starting at position 1277 of SEQ ID NO: 1559997
ugaagaucuccguggguua

SEQ ID NO: 1568968 - RNA, 19 nt, Artificial Sequence
  Description of Artificial Sequence: Synthetic oligonucleotide
  Antisense strand to SEQ ID NO: 1568967
uaacccacggagaucuuca

SEQ ID NO: 1568969 - RNA, 19 nt, Artificial Sequence
  Description of Artificial Sequence: Synthetic oligonucleotide
  Sense strand starting at position 1278 of SEQ ID NO: 1559997
gaagaucuccguggguuaa

SEQ ID NO: 1568970 - RNA, 19 nt, Artificial Sequence
  Description of Artificial Sequence: Synthetic oligonucleotide
  Antisense strand to SEQ ID NO: 1568969
uuaacccacggagaucuuc

SEQ ID NO: 1568971 - RNA, 19 nt, Artificial Sequence
  Description of Artificial Sequence: Synthetic oligonucleotide
  Sense strand starting at position 1280 of SEQ ID NO: 1559997
agaucuccguggguuaaga

SEQ ID NO: 1568972 - RNA, 19 nt, Artificial Sequence
  Description of Artificial Sequence: Synthetic oligonucleotide
  Antisense strand to SEQ ID NO: 1568971
ucuuaacccacggagaucu

SEQ ID NO: 1568973 - RNA, 19 nt, Artificial Sequence
  Description of Artificial Sequence: Synthetic oligonucleotide
  Sense strand starting at position 1282 of SEQ ID NO: 1559997
aucuccguggguuaagaaa

SEQ ID NO: 1568974 - RNA, 19 nt, Artificial Sequence
  Description of Artificial Sequence: Synthetic oligonucleotide
  Antisense strand to SEQ ID NO: 1568973
uuucuuaacccacggagau

SEQ ID NO: 1568975 - RNA, 19 nt, Artificial Sequence
  Description of Artificial Sequence: Synthetic oligonucleotide
  Sense strand starting at position 1631 of SEQ ID NO: 1559997
gggagaucaaguuggccau

SEQ ID NO: 1568976 - RNA, 19 nt, Artificial Sequence
  Description of Artificial Sequence: Synthetic oligonucleotide
  Antisense strand to SEQ ID NO: 1568975
auggccaacuugaucuccc

SEQ ID NO: 1568977 - RNA, 19 nt, Artificial Sequence
  Description of Artificial Sequence: Synthetic oligonucleotide
  Sense strand starting at position 1741 of SEQ ID NO: 1559997
acucgaagcugaucucgaa

SEQ ID NO: 1568978 - RNA, 19 nt, Artificial Sequence
  Description of Artificial Sequence: Synthetic oligonucleotide
  Antisense strand to SEQ ID NO: 1568977
uucgagaucagcuucgagu

SEQ ID NO: 1568979 - RNA, 19 nt, Artificial Sequence
  Description of Artificial Sequence: Synthetic oligonucleotide
  Sense strand starting at position 1938 of SEQ ID NO: 1559997
ucuucucuccgagaacuga

SEQ ID NO: 1568980 - RNA, 19 nt, Artificial Sequence
  Description of Artificial Sequence: Synthetic oligonucleotide
  Antisense strand to SEQ ID NO: 1568979
ucaguucucggagagaaga

SEQ ID NO: 1568981 - RNA, 19 nt, Artificial Sequence
  Description of Artificial Sequence: Synthetic oligonucleotide
  Sense strand starting at position 2082 of SEQ ID NO: 1559997
cccagacuccucggaccaa

SEQ ID NO: 1568982 - RNA, 19 nt, Artificial Sequence
  Description of Artificial Sequence: Synthetic oligonucleotide
  Antisense strand to SEQ ID NO: 1568981
uugguccgaggagucuggg

SEQ ID NO: 1568983 - RNA, 19 nt, Artificial Sequence
  Description of Artificial Sequence: Synthetic oligonucleotide
  Sense strand starting at position 2136 of SEQ ID NO: 1559997
gcgaaacuaucuccaagcu

SEQ ID NO: 1568984 - RNA, 19 nt, Artificial Sequence
  Description of Artificial Sequence: Synthetic oligonucleotide
  Antisense strand to SEQ ID NO: 1568983
agcuuggagauaguuucgc

SEQ ID NO: 1568985 - RNA, 19 nt, Artificial Sequence
  Description of Artificial Sequence: Synthetic oligonucleotide
  Sense strand starting at position 2137 of SEQ ID NO: 1559997
cgaaacuaucuccaagcuu

SEQ ID NO: 1568986 - RNA, 19 nt, Artificial Sequence
  Description of Artificial Sequence: Synthetic oligonucleotide
  Antisense strand to SEQ ID NO: 1568985
aagcuuggagauaguuucg

SEQ ID NO: 1568987 - RNA, 19 nt, Artificial Sequence
  Description of Artificial Sequence: Synthetic oligonucleotide
  Sense strand starting at position 2397 of SEQ ID NO: 1559997
aagugauuggcaggaggga

SEQ ID NO: 1568988 - RNA, 19 nt, Artificial Sequence
  Description of Artificial Sequence: Synthetic oligonucleotide
  Antisense strand to SEQ ID NO: 1568987
ucccuccugccaaucacuu

SEQ ID NO: 1568989 - RNA, 19 nt, Artificial Sequence
  Description of Artificial Sequence: Synthetic oligonucleotide
  Sense strand starting at position 2443 of SEQ ID NO: 1559997
gagaguuuauuggcuggau

SEQ ID NO: 1568990 - RNA, 19 nt, Artificial Sequence
  Description of Artificial Sequence: Synthetic oligonucleotide
  Antisense strand to SEQ ID NO: 1568989
auccagccaauaaacucuc

SEQ ID NO: 1568991 - RNA, 19 nt, Artificial Sequence
  Description of Artificial Sequence: Synthetic oligonucleotide
  Sense strand starting at position 2444 of SEQ ID NO: 1559997
agaguuuauuggcuggauu

SEQ ID NO: 1568992 - RNA, 19 nt, Artificial Sequence
  Description of Artificial Sequence: Synthetic oligonucleotide
  Antisense strand to SEQ ID NO: 1568991
aauccagccaauaaacucu

SEQ ID NO: 1568993 - RNA, 19 nt, Artificial Sequence
  Description of Artificial Sequence: Synthetic oligonucleotide
  Sense strand starting at position 2445 of SEQ ID NO: 1559997
gaguuuauuggcuggauug

SEQ ID NO: 1568994 - RNA, 19 nt, Artificial Sequence
  Description of Artificial Sequence: Synthetic oligonucleotide
  Antisense strand to SEQ ID NO: 1568993
caauccagccaauaaacuc

SEQ ID NO: 1568995 - RNA, 19 nt, Artificial Sequence
  Description of Artificial Sequence: Synthetic oligonucleotide
  Sense strand starting at position 2498 of SEQ ID NO: 1559997
gggauucgcuggagagaag

SEQ ID NO: 1568996 - RNA, 19 nt, Artificial Sequence
  Description of Artificial Sequence: Synthetic oligonucleotide
  Antisense strand to SEQ ID NO: 1568995
cuucucuccagcgaauccc

SEQ ID NO: 1568997 - RNA, 19 nt, Artificial Sequence
  Description of Artificial Sequence: Synthetic oligonucleotide
  Sense strand starting at position 2650 of SEQ ID NO: 1559997
cgcgggaguccguugugaa

SEQ ID NO: 1568998 - RNA, 19 nt, Artificial Sequence
  Description of Artificial Sequence: Synthetic oligonucleotide
  Antisense strand to SEQ ID NO: 1568997
uucacaacggacucccgcg

SEQ ID NO: 1568999 - RNA, 19 nt, Artificial Sequence
  Description of Artificial Sequence: Synthetic oligonucleotide
  Sense strand starting at position 2924 of SEQ ID NO: 1559997
gcagaccaguguucagagu

SEQ ID NO: 1569000 - RNA, 19 nt, Artificial Sequence
  Description of Artificial Sequence: Synthetic oligonucleotide
  Antisense strand to SEQ ID NO: 1568999
acucugaacacuggucugc

SEQ ID NO: 1569001 - RNA, 19 nt, Artificial Sequence
  Description of Artificial Sequence: Synthetic oligonucleotide
  Sense strand starting at position 2995 of SEQ ID NO: 1559997
cguggcaauucccugacau

SEQ ID NO: 1569002 - RNA, 19 nt, Artificial Sequence
  Description of Artificial Sequence: Synthetic oligonucleotide
  Antisense strand to SEQ ID NO: 1569001
augucagggaauugccacg

SEQ ID NO: 1569003 - RNA, 19 nt, Artificial Sequence
  Description of Artificial Sequence: Synthetic oligonucleotide
  Sense strand starting at position 2996 of SEQ ID NO: 1559997
guggcaauucccugacaug

SEQ ID NO: 1569004 - RNA, 19 nt, Artificial Sequence
  Description of Artificial Sequence: Synthetic oligonucleotide
  Antisense strand to SEQ ID NO: 1569003
caugucagggaauugccac

SEQ ID NO: 1569005 - RNA, 19 nt, Artificial Sequence
  Description of Artificial Sequence: Synthetic oligonucleotide
  Sense strand starting at position 2997 of SEQ ID NO: 1559997
uggcaauucccugacauga

SEQ ID NO: 1569006 - RNA, 19 nt, Artificial Sequence
  Description of Artificial Sequence: Synthetic oligonucleotide
  Antisense strand to SEQ ID NO: 1569005
ucaugucagggaauugcca

SEQ ID NO: 1569007 - RNA, 19 nt, Artificial Sequence
  Description of Artificial Sequence: Synthetic oligonucleotide
  Sense strand starting at position 3620 of SEQ ID NO: 1559997
gaauaagccagguguggua

SEQ ID NO: 1569008 - RNA, 19 nt, Artificial Sequence
  Description of Artificial Sequence: Synthetic oligonucleotide
  Antisense strand to SEQ ID NO: 1569007
uaccacaccuggcuuauuc

SEQ ID NO: 1569009 - RNA, 19 nt, Artificial Sequence
  Description of Artificial Sequence: Synthetic oligonucleotide
  Sense strand starting at position 3651 of SEQ ID NO: 1559997
agugucugcuacuccugaa

SEQ ID NO: 1569010 - RNA, 19 nt, Artificial Sequence
  Description of Artificial Sequence: Synthetic oligonucleotide
  Antisense strand to SEQ ID NO: 1569009
uucaggaguagcagacacu

SEQ ID NO: 1569011 - RNA, 19 nt, Artificial Sequence
  Description of Artificial Sequence: Synthetic oligonucleotide
  Sense strand starting at position 3785 of SEQ ID NO: 1559997
caguuuagcugucuugaua

SEQ ID NO: 1569012 - RNA, 19 nt, Artificial Sequence
  Description of Artificial Sequence: Synthetic oligonucleotide
  Antisense strand to SEQ ID NO: 1569011
uaucaagacagcuaaacug

SEQ ID NO: 1569013 - RNA, 19 nt, Artificial Sequence
  Description of Artificial Sequence: Synthetic oligonucleotide
  Sense strand starting at position 3796 of SEQ ID NO: 1559997
ucuugauagccgcaguuga

SEQ ID NO: 1569014 - RNA, 19 nt, Artificial Sequence
  Description of Artificial Sequence: Synthetic oligonucleotide
  Antisense strand to SEQ ID NO: 1569013
ucaacugcggcuaucaaga

SEQ ID NO: 1569015 - RNA, 19 nt, Artificial Sequence
  Description of Artificial Sequence: Synthetic oligonucleotide
  Sense strand starting at position 3846 of SEQ ID NO: 1559997
uguauuacuggacagcgaa

SEQ ID NO: 1569016 - RNA, 19 nt, Artificial Sequence
  Description of Artificial Sequence: Synthetic oligonucleotide
  Antisense strand to SEQ ID NO: 1569015
uucgcuguccaguaauaca

SEQ ID NO: 1569017 - RNA, 19 nt, Artificial Sequence
  Description of Artificial Sequence: Synthetic oligonucleotide
  Sense strand starting at position 3885 of SEQ ID NO: 1559997
aggucacuucuccggauga

SEQ ID NO: 1569018 - RNA, 19 nt, Artificial Sequence
  Description of Artificial Sequence: Synthetic oligonucleotide
  Antisense strand to SEQ ID NO: 1569017
ucauccggagaagugaccu

SEQ ID NO: 1569019 - RNA, 19 nt, Artificial Sequence
  Description of Artificial Sequence: Synthetic oligonucleotide
  Sense strand starting at position 3887 of SEQ ID NO: 1559997
gucacuucuccggaugaga

SEQ ID NO: 1569020 - RNA, 19 nt, Artificial Sequence
  Description of Artificial Sequence: Synthetic oligonucleotide
  Antisense strand to SEQ ID NO: 1569019
ucucauccggagaagugac

SEQ ID NO: 1569021 - RNA, 19 nt, Artificial Sequence
  Description of Artificial Sequence: Synthetic oligonucleotide
  Sense strand starting at position 3898 of SEQ ID NO: 1559997
ggaugagagcauugucuuu

SEQ ID NO: 1569022 - RNA, 19 nt, Artificial Sequence
  Description of Artificial Sequence: Synthetic oligonucleotide
  Antisense strand to SEQ ID NO: 1569021
aaagacaaugcucucaucc

SEQ ID NO: 1569023 - RNA, 19 nt, Artificial Sequence
  Description of Artificial Sequence: Synthetic oligonucleotide
  Sense strand starting at position 3900 of SEQ ID NO: 1559997
augagagcauugucuuuga

SEQ ID NO: 1569024 - RNA, 19 nt, Artificial Sequence
  Description of Artificial Sequence: Synthetic oligonucleotide
  Antisense strand to SEQ ID NO: 1569023
ucaaagacaaugcucucau

SEQ ID NO: 1569025 - RNA, 19 nt, Artificial Sequence
  Description of Artificial Sequence: Synthetic oligonucleotide
  Sense strand starting at position 3903 of SEQ ID NO: 1559997
agagcauugucuuugaaac

SEQ ID NO: 1569026 - RNA, 19 nt, Artificial Sequence
  Description of Artificial Sequence: Synthetic oligonucleotide
  Antisense strand to SEQ ID NO: 1569025
guuucaaagacaaugcucu

SEQ ID NO: 1569027 - RNA, 19 nt, Artificial Sequence
  Description of Artificial Sequence: Synthetic oligonucleotide
  Sense strand starting at position 3904 of SEQ ID NO: 1559997
gagcauugucuuugaaacu

SEQ ID NO: 1569028 - RNA, 19 nt, Artificial Sequence
  Description of Artificial Sequence: Synthetic oligonucleotide
  Antisense strand to SEQ ID NO: 1569027
aguuucaaagacaaugcuc

SEQ ID NO: 1569029 - RNA, 19 nt, Artificial Sequence
  Description of Artificial Sequence: Synthetic oligonucleotide
  Sense strand starting at position 292 of SEQ ID NO: 1559998
aggagucuugagugucuaa

SEQ ID NO: 1569030 - RNA, 19 nt, Artificial Sequence
  Description of Artificial Sequence: Synthetic oligonucleotide
  Antisense strand to SEQ ID NO: 1569029
uuagacacucaagacuccu

SEQ ID NO: 1569031 - RNA, 19 nt, Artificial Sequence
  Description of Artificial Sequence: Synthetic oligonucleotide
  Sense strand starting at position 404 of SEQ ID NO: 1559998
ccaaucuccuuguuaguuu

SEQ ID NO: 1569032 - RNA, 19 nt, Artificial Sequence
  Description of Artificial Sequence: Synthetic oligonucleotide
  Antisense strand to SEQ ID NO: 1569031
aaacuaacaaggagauugg

SEQ ID NO: 1569033 - RNA, 19 nt, Artificial Sequence
  Description of Artificial Sequence: Synthetic oligonucleotide
  Sense strand starting at position 425 of SEQ ID NO: 1559998
cugcuucuacccugacuga

SEQ ID NO: 1569034 - RNA, 19 nt, Artificial Sequence
  Description of Artificial Sequence: Synthetic oligonucleotide
  Antisense strand to SEQ ID NO: 1569033
ucagucaggguagaagcag

SEQ ID NO: 1569035 - RNA, 19 nt, Artificial Sequence
  Description of Artificial Sequence: Synthetic oligonucleotide
  Sense strand starting at position 498 of SEQ ID NO: 1559998
acgacauugcccugcuuaa

SEQ ID NO: 1569036 - RNA, 19 nt, Artificial Sequence
  Description of Artificial Sequence: Synthetic oligonucleotide
  Antisense strand to SEQ ID NO: 1569035
uuaagcagggcaaugucgu

SEQ ID NO: 1569037 - RNA, 19 nt, Artificial Sequence
  Description of Artificial Sequence: Synthetic oligonucleotide
  Sense strand starting at position 522 of SEQ ID NO: 1559998
acagcuucccguuaauaac

SEQ ID NO: 1569038 - RNA, 19 nt, Artificial Sequence
  Description of Artificial Sequence: Synthetic oligonucleotide
  Antisense strand to SEQ ID NO: 1569037
guuauuaacgggaagcugu

SEQ ID NO: 1569039 - RNA, 19 nt, Artificial Sequence
  Description of Artificial Sequence: Synthetic oligonucleotide
  Sense strand starting at position 531 of SEQ ID NO: 1559998
cguuaauaaccuggaguca

SEQ ID NO: 1569040 - RNA, 19 nt, Artificial Sequence
  Description of Artificial Sequence: Synthetic oligonucleotide
  Antisense strand to SEQ ID NO: 1569039
ugacuccagguuauuaacg

SEQ ID NO: 1569041 - RNA, 19 nt, Artificial Sequence
  Description of Artificial Sequence: Synthetic oligonucleotide
  Sense strand starting at position 542 of SEQ ID NO: 1559998
uggagucaaugccaaacuu

SEQ ID NO: 1569042 - RNA, 19 nt, Artificial Sequence
  Description of Artificial Sequence: Synthetic oligonucleotide
  Antisense strand to SEQ ID NO: 1569041
aaguuuggcauugacucca

SEQ ID NO: 1569043 - RNA, 19 nt, Artificial Sequence
  Description of Artificial Sequence: Synthetic oligonucleotide
  Sense strand starting at position 557 of SEQ ID NO: 1559998
acuucuuaguggcccauaa

SEQ ID NO: 1569044 - RNA, 19 nt, Artificial Sequence
  Description of Artificial Sequence: Synthetic oligonucleotide
  Antisense strand to SEQ ID NO: 1569043
uuaugggccacuaagaagu

SEQ ID NO: 1569045 - RNA, 19 nt, Artificial Sequence
  Description of Artificial Sequence: Synthetic oligonucleotide
  Sense strand starting at position 594 of SEQ ID NO: 1559998
ucugauuggucucuccaac

SEQ ID NO: 1569046 - RNA, 19 nt, Artificial Sequence
  Description of Artificial Sequence: Synthetic oligonucleotide
  Antisense strand to SEQ ID NO: 1569045
guuggagagaccaaucaga

SEQ ID NO: 1569047 - RNA, 19 nt, Artificial Sequence
  Description of Artificial Sequence: Synthetic oligonucleotide
  Sense strand starting at position 658 of SEQ ID NO: 1559998
gugcuuccugcucugcaau

SEQ ID NO: 1569048 - RNA, 19 nt, Artificial Sequence
  Description of Artificial Sequence: Synthetic oligonucleotide
  Antisense strand to SEQ ID NO: 1569047
auugcagagcaggaagcac

SEQ ID NO: 1569049 - RNA, 19 nt, Artificial Sequence
  Description of Artificial Sequence: Synthetic oligonucleotide
  Sense strand starting at position 679 of SEQ ID NO: 1559998
cucauugguucccuuguga

SEQ ID NO: 1569050 - RNA, 19 nt, Artificial Sequence
  Description of Artificial Sequence: Synthetic oligonucleotide
  Antisense strand to SEQ ID NO: 1569049
ucacaagggaaccaaugag

SEQ ID NO: 1569051 - RNA, 19 nt, Artificial Sequence
  Description of Artificial Sequence: Synthetic oligonucleotide
  Sense strand starting at position 686 of SEQ ID NO: 1559998
guucccuugugaguauguu

SEQ ID NO: 1569052 - RNA, 19 nt, Artificial Sequence
  Description of Artificial Sequence: Synthetic oligonucleotide
  Antisense strand to SEQ ID NO: 1569051
aacauacucacaagggaac

SEQ ID NO: 1569053 - RNA, 19 nt, Artificial Sequence
  Description of Artificial Sequence: Synthetic oligonucleotide
  Sense strand starting at position 695 of SEQ ID NO: 1559998
ugaguauguugaggaagga

SEQ ID NO: 1569054 - RNA, 19 nt, Artificial Sequence
  Description of Artificial Sequence: Synthetic oligonucleotide
  Antisense strand to SEQ ID NO: 1569053
uccuuccucaacauacuca

SEQ ID NO: 1569055 - RNA, 19 nt, Artificial Sequence
  Description of Artificial Sequence: Synthetic oligonucleotide
  Sense strand starting at position 973 of SEQ ID NO: 1559998
caggcugcagcugaguaau

SEQ ID NO: 1569056 - RNA, 19 nt, Artificial Sequence
  Description of Artificial Sequence: Synthetic oligonucleotide
  Antisense strand to SEQ ID NO: 1569055
auuacucagcugcagccug

SEQ ID NO: 1569057 - RNA, 19 nt, Artificial Sequence
  Description of Artificial Sequence: Synthetic oligonucleotide
  Sense strand starting at position 1098 of SEQ ID NO: 1559998
agaggagaguauggguuau

SEQ ID NO: 1569058 - RNA, 19 nt, Artificial Sequence
  Description of Artificial Sequence: Synthetic oligonucleotide
  Antisense strand to SEQ ID NO: 1569057
auaacccauacucuccucu

SEQ ID NO: 1569059 - RNA, 19 nt, Artificial Sequence
  Description of Artificial Sequence: Synthetic oligonucleotide
  Sense strand starting at position 1109 of SEQ ID NO: 1559998
uggguuauggugggauuga

SEQ ID NO: 1569060 - RNA, 19 nt, Artificial Sequence
  Description of Artificial Sequence: Synthetic oligonucleotide
  Antisense strand to SEQ ID NO: 1569059
ucaaucccaccauaaccca

SEQ ID NO: 1569061 - RNA, 19 nt, Artificial Sequence
  Description of Artificial Sequence: Synthetic oligonucleotide
  Sense strand starting at position 1110 of SEQ ID NO: 1559998
ggguuauggugggauugag

SEQ ID NO: 1569062 - RNA, 19 nt, Artificial Sequence
  Description of Artificial Sequence: Synthetic oligonucleotide
  Antisense strand to SEQ ID NO: 1569061
cucaaucccaccauaaccc

SEQ ID NO: 1569063 - RNA, 19 nt, Artificial Sequence
  Description of Artificial Sequence: Synthetic oligonucleotide
  Sense strand starting at position 1145 of SEQ ID NO: 1559998
ggaacccucucugauuuau

SEQ ID NO: 1569064 - RNA, 19 nt, Artificial Sequence
  Description of Artificial Sequence: Synthetic oligonucleotide
  Antisense strand to SEQ ID NO: 1569063
auaaaucagagaggguucc

SEQ ID NO: 1569065 - RNA, 19 nt, Artificial Sequence
  Description of Artificial Sequence: Synthetic oligonucleotide
  Sense strand starting at position 1358 of SEQ ID NO: 1559998
cugcuuguccaggauaauc

SEQ ID NO: 1569066 - RNA, 19 nt, Artificial Sequence
  Description of Artificial Sequence: Synthetic oligonucleotide
  Antisense strand to SEQ ID NO: 1569065
gauuauccuggacaagcag

SEQ ID NO: 1569067 - RNA, 19 nt, Artificial Sequence
  Description of Artificial Sequence: Synthetic oligonucleotide
  Sense strand starting at position 1366 of SEQ ID NO: 1559998
ccaggauaaucuguccaac

SEQ ID NO: 1569068 - RNA, 19 nt, Artificial Sequence
  Description of Artificial Sequence: Synthetic oligonucleotide
  Antisense strand to SEQ ID NO: 1569067
guuggacagauuauccugg

SEQ ID NO: 1569069 - RNA, 19 nt, Artificial Sequence
  Description of Artificial Sequence: Synthetic oligonucleotide
  Sense strand starting at position 1592 of SEQ ID NO: 1559998
cgcugaguucacugugguu

SEQ ID NO: 1569070 - RNA, 19 nt, Artificial Sequence
  Description of Artificial Sequence: Synthetic oligonucleotide
  Antisense strand to SEQ ID NO: 1569069
aaccacagugaacucagcg

SEQ ID NO: 1569071 - RNA, 19 nt, Artificial Sequence
  Description of Artificial Sequence: Synthetic oligonucleotide
  Sense strand starting at position 1676 of SEQ ID NO: 1559998
ucauuugcuccagguaacu

SEQ ID NO: 1569072 - RNA, 19 nt, Artificial Sequence
  Description of Artificial Sequence: Synthetic oligonucleotide
  Antisense strand to SEQ ID NO: 1569071
aguuaccuggagcaaauga

SEQ ID NO: 1569073 - RNA, 19 nt, Artificial Sequence
  Description of Artificial Sequence: Synthetic oligonucleotide
  Sense strand starting at position 1770 of SEQ ID NO: 1559998
cccuucgcccagugguaua

SEQ ID NO: 1569074 - RNA, 19 nt, Artificial Sequence
  Description of Artificial Sequence: Synthetic oligonucleotide
  Antisense strand to SEQ ID NO: 1569073
uauaccacugggcgaaggg

SEQ ID NO: 1569075 - RNA, 19 nt, Artificial Sequence
  Description of Artificial Sequence: Synthetic oligonucleotide
  Sense strand starting at position 1775 of SEQ ID NO: 1559998
cgcccagugguauauccua

SEQ ID NO: 1569076 - RNA, 19 nt, Artificial Sequence
  Description of Artificial Sequence: Synthetic oligonucleotide
  Antisense strand to SEQ ID NO: 1569075
uaggauauaccacugggcg

SEQ ID NO: 1569077 - RNA, 19 nt, Artificial Sequence
  Description of Artificial Sequence: Synthetic oligonucleotide
  Sense strand starting at position 2068 of SEQ ID NO: 1559998
aagcuaggagcaugaguua

SEQ ID NO: 1569078 - RNA, 19 nt, Artificial Sequence
  Description of Artificial Sequence: Synthetic oligonucleotide
  Antisense strand to SEQ ID NO: 1569077
uaacucaugcuccuagcuu

SEQ ID NO: 1569079 - RNA, 19 nt, Artificial Sequence
  Description of Artificial Sequence: Synthetic oligonucleotide
  Sense strand starting at position 2071 of SEQ ID NO: 1559998
cuaggagcaugaguuaauu

SEQ ID NO: 1569080 - RNA, 19 nt, Artificial Sequence
  Description of Artificial Sequence: Synthetic oligonucleotide
  Antisense strand to SEQ ID NO: 1569079
aauuaacucaugcuccuag

SEQ ID NO: 1569081 - RNA, 19 nt, Artificial Sequence
  Description of Artificial Sequence: Synthetic oligonucleotide
  Sense strand starting at position 2161 of SEQ ID NO: 1559998
gucaaccucuggucuauaa

SEQ ID NO: 1569082 - RNA, 19 nt, Artificial Sequence
  Description of Artificial Sequence: Synthetic oligonucleotide
  Antisense strand to SEQ ID NO: 1569081
uuauagaccagagguugac

SEQ ID NO: 1569083 - RNA, 19 nt, Artificial Sequence
  Description of Artificial Sequence: Synthetic oligonucleotide
  Sense strand starting at position 2364 of SEQ ID NO: 1559998
augcccuuucggugaaguu

SEQ ID NO: 1569084 - RNA, 19 nt, Artificial Sequence
  Description of Artificial Sequence: Synthetic oligonucleotide
  Antisense strand to SEQ ID NO: 1569083
aacuucaccgaaagggcau

SEQ ID NO: 1569085 - RNA, 19 nt, Artificial Sequence
  Description of Artificial Sequence: Synthetic oligonucleotide
  Sense strand starting at position 2365 of SEQ ID NO: 1559998
ugcccuuucggugaaguua

SEQ ID NO: 1569086 - RNA, 19 nt, Artificial Sequence
  Description of Artificial Sequence: Synthetic oligonucleotide
  Antisense strand to SEQ ID NO: 1569085
uaacuucaccgaaagggca

SEQ ID NO: 1569087 - RNA, 19 nt, Artificial Sequence
  Description of Artificial Sequence: Synthetic oligonucleotide
  Sense strand starting at position 2545 of SEQ ID NO: 1559998
aauugacucgguuggcgau

SEQ ID NO: 1569088 - RNA, 19 nt, Artificial Sequence
  Description of Artificial Sequence: Synthetic oligonucleotide
  Antisense strand to SEQ ID NO: 1569087
aucgccaaccgagucaauu

SEQ ID NO: 1569089 - RNA, 19 nt, Artificial Sequence
  Description of Artificial Sequence: Synthetic oligonucleotide
  Sense strand starting at position 2602 of SEQ ID NO: 1559998
cacagagucuuguccugua

SEQ ID NO: 1569090 - RNA, 19 nt, Artificial Sequence
  Description of Artificial Sequence: Synthetic oligonucleotide
  Antisense strand to SEQ ID NO: 1569089
uacaggacaagacucugug

SEQ ID NO: 1569091 - RNA, 19 nt, Artificial Sequence
  Description of Artificial Sequence: Synthetic oligonucleotide
  Sense strand starting at position 2666 of SEQ ID NO: 1559998
cuccguuucguagaaggaa

SEQ ID NO: 1569092 - RNA, 19 nt, Artificial Sequence
  Description of Artificial Sequence: Synthetic oligonucleotide
  Antisense strand to SEQ ID NO: 1569091
uuccuucuacgaaacggag

SEQ ID NO: 1569093 - RNA, 19 nt, Artificial Sequence
  Description of Artificial Sequence: Synthetic oligonucleotide
  Sense strand starting at position 2739 of SEQ ID NO: 1559998
guuugaaccucugucuuag

SEQ ID NO: 1569094 - RNA, 19 nt, Artificial Sequence
  Description of Artificial Sequence: Synthetic oligonucleotide
  Antisense strand to SEQ ID NO: 1569093
cuaagacagagguucaaac

SEQ ID NO: 1569095 - RNA, 19 nt, Artificial Sequence
  Description of Artificial Sequence: Synthetic oligonucleotide
  Sense strand starting at position 3506 of SEQ ID NO: 1559998
augugagcuuuaucccaga

SEQ ID NO: 1569096 - RNA, 19 nt, Artificial Sequence
  Description of Artificial Sequence: Synthetic oligonucleotide
  Antisense strand to SEQ ID NO: 1569095
ucugggauaaagcucacau

SEQ ID NO: 1569097 - RNA, 19 nt, Artificial Sequence
  Description of Artificial Sequence: Synthetic oligonucleotide
  Sense strand starting at position 3509 of SEQ ID NO: 1559998
ugagcuuuaucccagagau

SEQ ID NO: 1569098 - RNA, 19 nt, Artificial Sequence
  Description of Artificial Sequence: Synthetic oligonucleotide
  Antisense strand to SEQ ID NO: 1569097
aucucugggauaaagcuca

SEQ ID NO: 1569099 - RNA, 19 nt, Artificial Sequence
  Description of Artificial Sequence: Synthetic oligonucleotide
  Sense strand starting at position 3660 of SEQ ID NO: 1559998
cauagagauuauucuuggu

SEQ ID NO: 1569100 - RNA, 19 nt, Artificial Sequence
  Description of Artificial Sequence: Synthetic oligonucleotide
  Antisense strand to SEQ ID NO: 1569099
accaagaauaaucucuaug

SEQ ID NO: 1569101 - RNA, 19 nt, Artificial Sequence
  Description of Artificial Sequence: Synthetic oligonucleotide
  Sense strand starting at position 3662 of SEQ ID NO: 1559998
uagagauuauucuuggugu

SEQ ID NO: 1569102 - RNA, 19 nt, Artificial Sequence
  Description of Artificial Sequence: Synthetic oligonucleotide
  Antisense strand to SEQ ID NO: 1569101
acaccaagaauaaucucua

SEQ ID NO: 1569103 - RNA, 19 nt, Artificial Sequence
  Description of Artificial Sequence: Synthetic oligonucleotide
  Sense strand starting at position 3665 of SEQ ID NO: 1559998
agauuauucuuggugucgu

SEQ ID NO: 1569104 - RNA, 19 nt, Artificial Sequence
  Description of Artificial Sequence: Synthetic oligonucleotide
  Antisense strand to SEQ ID NO: 1569103
acgacaccaagaauaaucu

SEQ ID NO: 1569105 - RNA, 19 nt, Artificial Sequence
  Description of Artificial Sequence: Synthetic oligonucleotide
  Sense strand starting at position 3691 of SEQ ID NO: 1559998
ggauucuagcccuggaaag

SEQ ID NO: 1569106 - RNA, 19 nt, Artificial Sequence
  Description of Artificial Sequence: Synthetic oligonucleotide
  Antisense strand to SEQ ID NO: 1569105
cuuuccagggcuagaaucc

SEQ ID NO: 1569107 - RNA, 19 nt, Artificial Sequence
  Description of Artificial Sequence: Synthetic oligonucleotide
  Sense strand starting at position 3705 of SEQ ID NO: 1559998
gaaagcgaaucuguuccua

SEQ ID NO: 1569108 - RNA, 19 nt, Artificial Sequence
  Description of Artificial Sequence: Synthetic oligonucleotide
  Antisense strand to SEQ ID NO: 1569107
uaggaacagauucgcuuuc

SEQ ID NO: 1569109 - RNA, 19 nt, Artificial Sequence
  Description of Artificial Sequence: Synthetic oligonucleotide
  Sense strand starting at position 204 of SEQ ID NO: 1559999
gggcucugcguaaaugguu

SEQ ID NO: 1569110 - RNA, 19 nt, Artificial Sequence
  Description of Artificial Sequence: Synthetic oligonucleotide
  Antisense strand to SEQ ID NO: 1569109
aaccauuuacgcagagccc

SEQ ID NO: 1569111 - RNA, 19 nt, Artificial Sequence
  Description of Artificial Sequence: Synthetic oligonucleotide
  Sense strand starting at position 346 of SEQ ID NO: 1559999
gggucuuggagagguauua

SEQ ID NO: 1569112 - RNA, 19 nt, Artificial Sequence
  Description of Artificial Sequence: Synthetic oligonucleotide
  Antisense strand to SEQ ID NO: 1569111
uaauaccucuccaagaccc

SEQ ID NO: 1569113 - RNA, 19 nt, Artificial Sequence
  Description of Artificial Sequence: Synthetic oligonucleotide
  Sense strand starting at position 446 of SEQ ID NO: 1559999
auggguucguccuguuuca

SEQ ID NO: 1569114 - RNA, 19 nt, Artificial Sequence
  Description of Artificial Sequence: Synthetic oligonucleotide
  Antisense strand to SEQ ID NO: 1569113
ugaaacaggacgaacccau

SEQ ID NO: 1569115 - RNA, 19 nt, Artificial Sequence
  Description of Artificial Sequence: Synthetic oligonucleotide
  Sense strand starting at position 635 of SEQ ID NO: 1559999
ugccauucguccuggguca

SEQ ID NO: 1569116 - RNA, 19 nt, Artificial Sequence
  Description of Artificial Sequence: Synthetic oligonucleotide
  Antisense strand to SEQ ID NO: 1569115
ugacccaggacgaauggca

SEQ ID NO: 1569117 - RNA, 19 nt, Artificial Sequence
  Description of Artificial Sequence: Synthetic oligonucleotide
  Sense strand starting at position 648 of SEQ ID NO: 1559999
gggucacgauuccagacaa

SEQ ID NO: 1569118 - RNA, 19 nt, Artificial Sequence
  Description of Artificial Sequence: Synthetic oligonucleotide
  Antisense strand to SEQ ID NO: 1569117
uugucuggaaucgugaccc

SEQ ID NO: 1569119 - RNA, 19 nt, Artificial Sequence
  Description of Artificial Sequence: Synthetic oligonucleotide
  Sense strand starting at position 684 of SEQ ID NO: 1559999
aguucuggucccugagcca

SEQ ID NO: 1569120 - RNA, 19 nt, Artificial Sequence
  Description of Artificial Sequence: Synthetic oligonucleotide
  Antisense strand to SEQ ID NO: 1569119
uggcucagggaccagaacu

SEQ ID NO: 1569121 - RNA, 19 nt, Artificial Sequence
  Description of Artificial Sequence: Synthetic oligonucleotide
  Sense strand starting at position 1002 of SEQ ID NO: 1559999
aguguuuguggagggcaga

SEQ ID NO: 1569122 - RNA, 19 nt, Artificial Sequence
  Description of Artificial Sequence: Synthetic oligonucleotide
  Antisense strand to SEQ ID NO: 1569121
ucugcccuccacaaacacu

SEQ ID NO: 1569123 - RNA, 19 nt, Artificial Sequence
  Description of Artificial Sequence: Synthetic oligonucleotide
  Sense strand starting at position 1017 of SEQ ID NO: 1559999
cagagagucuugggagcuu

SEQ ID NO: 1569124 - RNA, 19 nt, Artificial Sequence
  Description of Artificial Sequence: Synthetic oligonucleotide
  Antisense strand to SEQ ID NO: 1569123
aagcucccaagacucucug

SEQ ID NO: 1569125 - RNA, 19 nt, Artificial Sequence
  Description of Artificial Sequence: Synthetic oligonucleotide
  Sense strand starting at position 1421 of SEQ ID NO: 1559999
ccugcugauguggaaaguu

SEQ ID NO: 1569126 - RNA, 19 nt, Artificial Sequence
  Description of Artificial Sequence: Synthetic oligonucleotide
  Antisense strand to SEQ ID NO: 1569125
aacuuuccacaucagcagg

SEQ ID NO: 1569127 - RNA, 19 nt, Artificial Sequence
  Description of Artificial Sequence: Synthetic oligonucleotide
  Sense strand starting at position 1430 of SEQ ID NO: 1559999
guggaaaguuuccucugca

SEQ ID NO: 1569128 - RNA, 19 nt, Artificial Sequence
  Description of Artificial Sequence: Synthetic oligonucleotide
  Antisense strand to SEQ ID NO: 1569127
ugcagaggaaacuuuccac

SEQ ID NO: 1569129 - RNA, 19 nt, Artificial Sequence
  Description of Artificial Sequence: Synthetic oligonucleotide
  Sense strand starting at position 1431 of SEQ ID NO: 1559999
uggaaaguuuccucugcag

SEQ ID NO: 1569130 - RNA, 19 nt, Artificial Sequence
  Description of Artificial Sequence: Synthetic oligonucleotide
  Antisense strand to SEQ ID NO: 1569129
cugcagaggaaacuuucca

SEQ ID NO: 1569131 - RNA, 19 nt, Artificial Sequence
  Description of Artificial Sequence: Synthetic oligonucleotide
  Sense strand starting at position 1433 of SEQ ID NO: 1559999
gaaaguuuccucugcaguc

SEQ ID NO: 1569132 - RNA, 19 nt, Artificial Sequence
  Description of Artificial Sequence: Synthetic oligonucleotide
  Antisense strand to SEQ ID NO: 1569131
gacugcagaggaaacuuuc

SEQ ID NO: 1569133 - RNA, 19 nt, Artificial Sequence
  Description of Artificial Sequence: Synthetic oligonucleotide
  Sense strand starting at position 1470 of SEQ ID NO: 1559999
cggccagguugucauggaa

SEQ ID NO: 1569134 - RNA, 19 nt, Artificial Sequence
  Description of Artificial Sequence: Synthetic oligonucleotide
  Antisense strand to SEQ ID NO: 1569133
uuccaugacaaccuggccg

SEQ ID NO: 1569135 - RNA, 19 nt, Artificial Sequence
  Description of Artificial Sequence: Synthetic oligonucleotide
  Sense strand starting at position 1473 of SEQ ID NO: 1559999
ccagguugucauggaaacu

SEQ ID NO: 1569136 - RNA, 19 nt, Artificial Sequence
  Description of Artificial Sequence: Synthetic oligonucleotide
  Antisense strand to SEQ ID NO: 1569135
aguuuccaugacaaccugg

SEQ ID NO: 1569137 - RNA, 19 nt, Artificial Sequence
  Description of Artificial Sequence: Synthetic oligonucleotide
  Sense strand starting at position 1474 of SEQ ID NO: 1559999
cagguugucauggaaacug

SEQ ID NO: 1569138 - RNA, 19 nt, Artificial Sequence
  Description of Artificial Sequence: Synthetic oligonucleotide
  Antisense strand to SEQ ID NO: 1569137
caguuuccaugacaaccug

SEQ ID NO: 1569139 - RNA, 19 nt, Artificial Sequence
  Description of Artificial Sequence: Synthetic oligonucleotide
  Sense strand starting at position 1496 of SEQ ID NO: 1559999
cuugcuuuggguugggaga

SEQ ID NO: 1569140 - RNA, 19 nt, Artificial Sequence
  Description of Artificial Sequence: Synthetic oligonucleotide
  Antisense strand to SEQ ID NO: 1569139
ucucccaacccaaagcaag

SEQ ID NO: 1569141 - RNA, 19 nt, Artificial Sequence
  Description of Artificial Sequence: Synthetic oligonucleotide
  Sense strand starting at position 1651 of SEQ ID NO: 1559999
gguuguggcuucuccucaa

SEQ ID NO: 1569142 - RNA, 19 nt, Artificial Sequence
  Description of Artificial Sequence: Synthetic oligonucleotide
  Antisense strand to SEQ ID NO: 1569141
uugaggagaagccacaacc

SEQ ID NO: 1569143 - RNA, 19 nt, Artificial Sequence
  Description of Artificial Sequence: Synthetic oligonucleotide
  Sense strand starting at position 1654 of SEQ ID NO: 1559999
uguggcuucuccucaaugu

SEQ ID NO: 1569144 - RNA, 19 nt, Artificial Sequence
  Description of Artificial Sequence: Synthetic oligonucleotide
  Antisense strand to SEQ ID NO: 1569143
acauugaggagaagccaca

SEQ ID NO: 1569145 - RNA, 19 nt, Artificial Sequence
  Description of Artificial Sequence: Synthetic oligonucleotide
  Sense strand starting at position 1964 of SEQ ID NO: 1559999
ggugccuggcaucggaaau

SEQ ID NO: 1569146 - RNA, 19 nt, Artificial Sequence
  Description of Artificial Sequence: Synthetic oligonucleotide
  Antisense strand to SEQ ID NO: 1569145
auuuccgaugccaggcacc

SEQ ID NO: 1569147 - RNA, 19 nt, Artificial Sequence
  Description of Artificial Sequence: Synthetic oligonucleotide
  Sense strand starting at position 2282 of SEQ ID NO: 1559999
agaugagaugccugggugu

SEQ ID NO: 1569148 - RNA, 19 nt, Artificial Sequence
  Description of Artificial Sequence: Synthetic oligonucleotide
  Antisense strand to SEQ ID NO: 1569147
acacccaggcaucucaucu

SEQ ID NO: 1569149 - RNA, 19 nt, Artificial Sequence
  Description of Artificial Sequence: Synthetic oligonucleotide
  Sense strand starting at position 2285 of SEQ ID NO: 1559999
ugagaugccuggguguaga

SEQ ID NO: 1569150 - RNA, 19 nt, Artificial Sequence
  Description of Artificial Sequence: Synthetic oligonucleotide
  Antisense strand to SEQ ID NO: 1569149
ucuacacccaggcaucuca

SEQ ID NO: 1569151 - RNA, 19 nt, Artificial Sequence
  Description of Artificial Sequence: Synthetic oligonucleotide
  Sense strand starting at position 2820 of SEQ ID NO: 1559999
cacugaaccggccagaaau

SEQ ID NO: 1569152 - RNA, 19 nt, Artificial Sequence
  Description of Artificial Sequence: Synthetic oligonucleotide
  Antisense strand to SEQ ID NO: 1569151
auuucuggccgguucagug

SEQ ID NO: 1569153 - RNA, 19 nt, Artificial Sequence
  Description of Artificial Sequence: Synthetic oligonucleotide
  Sense strand starting at position 2973 of SEQ ID NO: 1559999
guugaauugucacccagaa

SEQ ID NO: 1569154 - RNA, 19 nt, Artificial Sequence
  Description of Artificial Sequence: Synthetic oligonucleotide
  Antisense strand to SEQ ID NO: 1569153
uucugggugacaauucaac

SEQ ID NO: 1569155 - RNA, 19 nt, Artificial Sequence
  Description of Artificial Sequence: Synthetic oligonucleotide
  Sense strand starting at position 3031 of SEQ ID NO: 1559999
gggaccuuauuugggaauu

SEQ ID NO: 1569156 - RNA, 19 nt, Artificial Sequence
  Description of Artificial Sequence: Synthetic oligonucleotide
  Antisense strand to SEQ ID NO: 1569155
aauucccaaauaagguccc

SEQ ID NO: 1569157 - RNA, 19 nt, Artificial Sequence
  Description of Artificial Sequence: Synthetic oligonucleotide
  Sense strand starting at position 3032 of SEQ ID NO: 1559999
ggaccuuauuugggaauug

SEQ ID NO: 1569158 - RNA, 19 nt, Artificial Sequence
  Description of Artificial Sequence: Synthetic oligonucleotide
  Antisense strand to SEQ ID NO: 1569157
caauucccaaauaaggucc

SEQ ID NO: 1569159 - RNA, 19 nt, Artificial Sequence
  Description of Artificial Sequence: Synthetic oligonucleotide
  Sense strand starting at position 3074 of SEQ ID NO: 1559999
agguuauacuggaggugga

SEQ ID NO: 1569160 - RNA, 19 nt, Artificial Sequence
  Description of Artificial Sequence: Synthetic oligonucleotide
  Antisense strand to SEQ ID NO: 1569159
uccaccuccaguauaaccu

SEQ ID NO: 1569161 - RNA, 19 nt, Artificial Sequence
  Description of Artificial Sequence: Synthetic oligonucleotide
  Sense strand starting at position 3110 of SEQ ID NO: 1559999
gaccucuguccuuguaaga

SEQ ID NO: 1569162 - RNA, 19 nt, Artificial Sequence
  Description of Artificial Sequence: Synthetic oligonucleotide
  Antisense strand to SEQ ID NO: 1569161
ucuuacaaggacagagguc

SEQ ID NO: 1569163 - RNA, 19 nt, Artificial Sequence
  Description of Artificial Sequence: Synthetic oligonucleotide
  Sense strand starting at position 3159 of SEQ ID NO: 1559999
accuauagucccgacacuu

SEQ ID NO: 1569164 - RNA, 19 nt, Artificial Sequence
  Description of Artificial Sequence: Synthetic oligonucleotide
  Antisense strand to SEQ ID NO: 1569163
aagugucgggacuauaggu

SEQ ID NO: 1569165 - RNA, 19 nt, Artificial Sequence
  Description of Artificial Sequence: Synthetic oligonucleotide
  Sense strand starting at position 3283 of SEQ ID NO: 1559999
uggugguagucgcguguaa

SEQ ID NO: 1569166 - RNA, 19 nt, Artificial Sequence
  Description of Artificial Sequence: Synthetic oligonucleotide
  Antisense strand to SEQ ID NO: 1569165
uuacacgcgacuaccacca

SEQ ID NO: 1569167 - RNA, 19 nt, Artificial Sequence
  Description of Artificial Sequence: Synthetic oligonucleotide
  Sense strand starting at position 3284 of SEQ ID NO: 1559999
ggugguagucgcguguaau

SEQ ID NO: 1569168 - RNA, 19 nt, Artificial Sequence
  Description of Artificial Sequence: Synthetic oligonucleotide
  Antisense strand to SEQ ID NO: 1569167
auuacacgcgacuaccacc

SEQ ID NO: 1569169 - RNA, 19 nt, Artificial Sequence
  Description of Artificial Sequence: Synthetic oligonucleotide
  Sense strand starting at position 3285 of SEQ ID NO: 1559999
gugguagucgcguguaauc

SEQ ID NO: 1569170 - RNA, 19 nt, Artificial Sequence
  Description of Artificial Sequence: Synthetic oligonucleotide
  Antisense strand to SEQ ID NO: 1569169
gauuacacgcgacuaccac

SEQ ID NO: 1569171 - RNA, 19 nt, Artificial Sequence
  Description of Artificial Sequence: Synthetic oligonucleotide
  Sense strand starting at position 3287 of SEQ ID NO: 1559999
gguagucgcguguaauccu

SEQ ID NO: 1569172 - RNA, 19 nt, Artificial Sequence
  Description of Artificial Sequence: Synthetic oligonucleotide
  Antisense strand to SEQ ID NO: 1569171
aggauuacacgcgacuacc

SEQ ID NO: 1569173 - RNA, 19 nt, Artificial Sequence
  Description of Artificial Sequence: Synthetic oligonucleotide
  Sense strand starting at position 3288 of SEQ ID NO: 1559999
guagucgcguguaauccua

SEQ ID NO: 1569174 - RNA, 19 nt, Artificial Sequence
  Description of Artificial Sequence: Synthetic oligonucleotide
  Antisense strand to SEQ ID NO: 1569173
uaggauuacacgcgacuac

SEQ ID NO: 1569175 - RNA, 19 nt, Artificial Sequence
  Description of Artificial Sequence: Synthetic oligonucleotide
  Sense strand starting at position 3292 of SEQ ID NO: 1559999
ucgcguguaauccuagcua

SEQ ID NO: 1569176 - RNA, 19 nt, Artificial Sequence
  Description of Artificial Sequence: Synthetic oligonucleotide
  Antisense strand to SEQ ID NO: 1569175
uagcuaggauuacacgcga

SEQ ID NO: 1569177 - RNA, 19 nt, Artificial Sequence
  Description of Artificial Sequence: Synthetic oligonucleotide
  Sense strand starting at position 3947 of SEQ ID NO: 1559999
uccagaacugugggacgau

SEQ ID NO: 1569178 - RNA, 19 nt, Artificial Sequence
  Description of Artificial Sequence: Synthetic oligonucleotide
  Antisense strand to SEQ ID NO: 1569177
aucgucccacaguucugga

SEQ ID NO: 1569179 - RNA, 19 nt, Artificial Sequence
  Description of Artificial Sequence: Synthetic oligonucleotide
  Sense strand starting at position 3948 of SEQ ID NO: 1559999
ccagaacugugggacgaua

SEQ ID NO: 1569180 - RNA, 19 nt, Artificial Sequence
  Description of Artificial Sequence: Synthetic oligonucleotide
  Antisense strand to SEQ ID NO: 1569179
uaucgucccacaguucugg

SEQ ID NO: 1569181 - RNA, 19 nt, Artificial Sequence
  Description of Artificial Sequence: Synthetic oligonucleotide
  Sense strand starting at position 3950 of SEQ ID NO: 1559999
agaacugugggacgauaga

SEQ ID NO: 1569182 - RNA, 19 nt, Artificial Sequence
  Description of Artificial Sequence: Synthetic oligonucleotide
  Antisense strand to SEQ ID NO: 1569181
ucuaucgucccacaguucu

SEQ ID NO: 1569183 - RNA, 19 nt, Artificial Sequence
  Description of Artificial Sequence: Synthetic oligonucleotide
  Sense strand starting at position 3969 of SEQ ID NO: 1559999
uuuccuuuguuauaagucu

SEQ ID NO: 1569184 - RNA, 19 nt, Artificial Sequence
  Description of Artificial Sequence: Synthetic oligonucleotide
  Antisense strand to SEQ ID NO: 1569183
agacuuauaacaaaggaaa

SEQ ID NO: 1569185 - RNA, 19 nt, Artificial Sequence
  Description of Artificial Sequence: Synthetic oligonucleotide
  Sense strand starting at position 107 of SEQ ID NO: 1560000
gagagagguuaaggaaaua

SEQ ID NO: 1569186 - RNA, 19 nt, Artificial Sequence
  Description of Artificial Sequence: Synthetic oligonucleotide
  Antisense strand to SEQ ID NO: 1569185
uauuuccuuaaccucucuc

SEQ ID NO: 1569187 - RNA, 19 nt, Artificial Sequence
  Description of Artificial Sequence: Synthetic oligonucleotide
  Sense strand starting at position 542 of SEQ ID NO: 1560000
ccgccaugguguuggaauu

SEQ ID NO: 1569188 - RNA, 19 nt, Artificial Sequence
  Description of Artificial Sequence: Synthetic oligonucleotide
  Antisense strand to SEQ ID NO: 1569187
aauuccaacaccauggcgg

SEQ ID NO: 1569189 - RNA, 19 nt, Artificial Sequence
  Description of Artificial Sequence: Synthetic oligonucleotide
  Sense strand starting at position 543 of SEQ ID NO: 1560000
cgccaugguguuggaauuu

SEQ ID NO: 1569190 - RNA, 19 nt, Artificial Sequence
  Description of Artificial Sequence: Synthetic oligonucleotide
  Antisense strand to SEQ ID NO: 1569189
aaauuccaacaccauggcg

SEQ ID NO: 1569191 - RNA, 19 nt, Artificial Sequence
  Description of Artificial Sequence: Synthetic oligonucleotide
  Sense strand starting at position 1009 of SEQ ID NO: 1560000
gggcucugcguaaaugguu

SEQ ID NO: 1569192 - RNA, 19 nt, Artificial Sequence
  Description of Artificial Sequence: Synthetic oligonucleotide
  Antisense strand to SEQ ID NO: 1569191
aaccauuuacgcagagccc

SEQ ID NO: 1569193 - RNA, 19 nt, Artificial Sequence
  Description of Artificial Sequence: Synthetic oligonucleotide
  Sense strand starting at position 1151 of SEQ ID NO: 1560000
gggucuuggagagguauua

SEQ ID NO: 1569194 - RNA, 19 nt, Artificial Sequence
  Description of Artificial Sequence: Synthetic oligonucleotide
  Antisense strand to SEQ ID NO: 1569193
uaauaccucuccaagaccc

SEQ ID NO: 1569195 - RNA, 19 nt, Artificial Sequence
  Description of Artificial Sequence: Synthetic oligonucleotide
  Sense strand starting at position 1251 of SEQ ID NO: 1560000
auggguucguccuguuuca

SEQ ID NO: 1569196 - RNA, 19 nt, Artificial Sequence
  Description of Artificial Sequence: Synthetic oligonucleotide
  Antisense strand to SEQ ID NO: 1569195
ugaaacaggacgaacccau

SEQ ID NO: 1569197 - RNA, 19 nt, Artificial Sequence
  Description of Artificial Sequence: Synthetic oligonucleotide
  Sense strand starting at position 1440 of SEQ ID NO: 1560000
ugccauucguccuggguca

SEQ ID NO: 1569198 - RNA, 19 nt, Artificial Sequence
  Description of Artificial Sequence: Synthetic oligonucleotide
  Antisense strand to SEQ ID NO: 1569197
ugacccaggacgaauggca

SEQ ID NO: 1569199 - RNA, 19 nt, Artificial Sequence
  Description of Artificial Sequence: Synthetic oligonucleotide
  Sense strand starting at position 1453 of SEQ ID NO: 1560000
gggucacgauuccagacaa

SEQ ID NO: 1569200 - RNA, 19 nt, Artificial Sequence
  Description of Artificial Sequence: Synthetic oligonucleotide
  Antisense strand to SEQ ID NO: 1569199
uugucuggaaucgugaccc

SEQ ID NO: 1569201 - RNA, 19 nt, Artificial Sequence
  Description of Artificial Sequence: Synthetic oligonucleotide
  Sense strand starting at position 1489 of SEQ ID NO: 1560000
aguucuggucccugagcca

SEQ ID NO: 1569202 - RNA, 19 nt, Artificial Sequence
  Description of Artificial Sequence: Synthetic oligonucleotide
  Antisense strand to SEQ ID NO: 1569201
uggcucagggaccagaacu

SEQ ID NO: 1569203 - RNA, 19 nt, Artificial Sequence
  Description of Artificial Sequence: Synthetic oligonucleotide
  Sense strand starting at position 1807 of SEQ ID NO: 1560000
aguguuuguggagggcaga

SEQ ID NO: 1569204 - RNA, 19 nt, Artificial Sequence
  Description of Artificial Sequence: Synthetic oligonucleotide
  Antisense strand to SEQ ID NO: 1569203
ucugcccuccacaaacacu

SEQ ID NO: 1569205 - RNA, 19 nt, Artificial Sequence
  Description of Artificial Sequence: Synthetic oligonucleotide
  Sense strand starting at position 1822 of SEQ ID NO: 1560000
cagagagucuugggagcuu

SEQ ID NO: 1569206 - RNA, 19 nt, Artificial Sequence
  Description of Artificial Sequence: Synthetic oligonucleotide
  Antisense strand to SEQ ID NO: 1569205
aagcucccaagacucucug

SEQ ID NO: 1569207 - RNA, 19 nt, Artificial Sequence
  Description of Artificial Sequence: Synthetic oligonucleotide
  Sense strand starting at position 2226 of SEQ ID NO: 1560000
ccugcugauguggaaaguu

SEQ ID NO: 1569208 - RNA, 19 nt, Artificial Sequence
  Description of Artificial Sequence: Synthetic oligonucleotide
  Antisense strand to SEQ ID NO: 1569207
aacuuuccacaucagcagg

SEQ ID NO: 1569209 - RNA, 19 nt, Artificial Sequence
  Description of Artificial Sequence: Synthetic oligonucleotide
  Sense strand starting at position 2235 of SEQ ID NO: 1560000
guggaaaguuuccucugca

SEQ ID NO: 1569210 - RNA, 19 nt, Artificial Sequence
  Description of Artificial Sequence: Synthetic oligonucleotide
  Antisense strand to SEQ ID NO: 1569209
ugcagaggaaacuuuccac

SEQ ID NO: 1569211 - RNA, 19 nt, Artificial Sequence
  Description of Artificial Sequence: Synthetic oligonucleotide
  Sense strand starting at position 2236 of SEQ ID NO: 1560000
uggaaaguuuccucugcag

SEQ ID NO: 1569212 - RNA, 19 nt, Artificial Sequence
  Description of Artificial Sequence: Synthetic oligonucleotide
  Antisense strand to SEQ ID NO: 1569211
cugcagaggaaacuuucca

SEQ ID NO: 1569213 - RNA, 19 nt, Artificial Sequence
  Description of Artificial Sequence: Synthetic oligonucleotide
  Sense strand starting at position 2238 of SEQ ID NO: 1560000
gaaaguuuccucugcaguc

SEQ ID NO: 1569214 - RNA, 19 nt, Artificial Sequence
  Description of Artificial Sequence: Synthetic oligonucleotide
  Antisense strand to SEQ ID NO: 1569213
gacugcagaggaaacuuuc

SEQ ID NO: 1569215 - RNA, 19 nt, Artificial Sequence
  Description of Artificial Sequence: Synthetic oligonucleotide
  Sense strand starting at position 2275 of SEQ ID NO: 1560000
cggccagguugucauggaa

SEQ ID NO: 1569216 - RNA, 19 nt, Artificial Sequence
  Description of Artificial Sequence: Synthetic oligonucleotide
  Antisense strand to SEQ ID NO: 1569215
uuccaugacaaccuggccg

SEQ ID NO: 1569217 - RNA, 19 nt, Artificial Sequence
  Description of Artificial Sequence: Synthetic oligonucleotide
  Sense strand starting at position 2278 of SEQ ID NO: 1560000
ccagguugucauggaaacu

SEQ ID NO: 1569218 - RNA, 19 nt, Artificial Sequence
  Description of Artificial Sequence: Synthetic oligonucleotide
  Antisense strand to SEQ ID NO: 1569217
aguuuccaugacaaccugg

SEQ ID NO: 1569219 - RNA, 19 nt, Artificial Sequence
  Description of Artificial Sequence: Synthetic oligonucleotide
  Sense strand starting at position 2279 of SEQ ID NO: 1560000
cagguugucauggaaacug

SEQ ID NO: 1569220 - RNA, 19 nt, Artificial Sequence
  Description of Artificial Sequence: Synthetic oligonucleotide
  Antisense strand to SEQ ID NO: 1569219
caguuuccaugacaaccug

SEQ ID NO: 1569221 - RNA, 19 nt, Artificial Sequence
  Description of Artificial Sequence: Synthetic oligonucleotide
  Sense strand starting at position 2301 of SEQ ID NO: 1560000
cuugcuuuggguugggaga

SEQ ID NO: 1569222 - RNA, 19 nt, Artificial Sequence
  Description of Artificial Sequence: Synthetic oligonucleotide
  Antisense strand to SEQ ID NO: 1569221
ucucccaacccaaagcaag

SEQ ID NO: 1569223 - RNA, 19 nt, Artificial Sequence
  Description of Artificial Sequence: Synthetic oligonucleotide
  Sense strand starting at position 2456 of SEQ ID NO: 1560000
gguuguggcuucuccucaa

SEQ ID NO: 1569224 - RNA, 19 nt, Artificial Sequence
  Description of Artificial Sequence: Synthetic oligonucleotide
  Antisense strand to SEQ ID NO: 1569223
uugaggagaagccacaacc

SEQ ID NO: 1569225 - RNA, 19 nt, Artificial Sequence
  Description of Artificial Sequence: Synthetic oligonucleotide
  Sense strand starting at position 2459 of SEQ ID NO: 1560000
uguggcuucuccucaaugu

SEQ ID NO: 1569226 - RNA, 19 nt, Artificial Sequence
  Description of Artificial Sequence: Synthetic oligonucleotide
  Antisense strand to SEQ ID NO: 1569225
acauugaggagaagccaca

SEQ ID NO: 1569227 - RNA, 19 nt, Artificial Sequence
  Description of Artificial Sequence: Synthetic oligonucleotide
  Sense strand starting at position 2769 of SEQ ID NO: 1560000
ggugccuggcaucggaaau

SEQ ID NO: 1569228 - RNA, 19 nt, Artificial Sequence
  Description of Artificial Sequence: Synthetic oligonucleotide
  Antisense strand to SEQ ID NO: 1569227
auuuccgaugccaggcacc

SEQ ID NO: 1569229 - RNA, 19 nt, Artificial Sequence
  Description of Artificial Sequence: Synthetic oligonucleotide
  Sense strand starting at position 3087 of SEQ ID NO: 1560000
agaugagaugccugggugu

SEQ ID NO: 1569230 - RNA, 19 nt, Artificial Sequence
  Description of Artificial Sequence: Synthetic oligonucleotide
  Antisense strand to SEQ ID NO: 1569229
acacccaggcaucucaucu

SEQ ID NO: 1569231 - RNA, 19 nt, Artificial Sequence
  Description of Artificial Sequence: Synthetic oligonucleotide
  Sense strand starting at position 3090 of SEQ ID NO: 1560000
ugagaugccuggguguaga

SEQ ID NO: 1569232 - RNA, 19 nt, Artificial Sequence
  Description of Artificial Sequence: Synthetic oligonucleotide
  Antisense strand to SEQ ID NO: 1569231
ucuacacccaggcaucuca

SEQ ID NO: 1569233 - RNA, 19 nt, Artificial Sequence
  Description of Artificial Sequence: Synthetic oligonucleotide
  Sense strand starting at position 3625 of SEQ ID NO: 1560000
cacugaaccggccagaaau

SEQ ID NO: 1569234 - RNA, 19 nt, Artificial Sequence
  Description of Artificial Sequence: Synthetic oligonucleotide
  Antisense strand to SEQ ID NO: 1569233
auuucuggccgguucagug

SEQ ID NO: 1569235 - RNA, 19 nt, Artificial Sequence
  Description of Artificial Sequence: Synthetic oligonucleotide
  Sense strand starting at position 3778 of SEQ ID NO: 1560000
guugaauugucacccagaa

SEQ ID NO: 1569236 - RNA, 19 nt, Artificial Sequence
  Description of Artificial Sequence: Synthetic oligonucleotide
  Antisense strand to SEQ ID NO: 1569235
uucugggugacaauucaac

SEQ ID NO: 1569237 - RNA, 19 nt, Artificial Sequence
  Description of Artificial Sequence: Synthetic oligonucleotide
  Sense strand starting at position 3836 of SEQ ID NO: 1560000
gggaccuuauuugggaauu

SEQ ID NO: 1569238 - RNA, 19 nt, Artificial Sequence
  Description of Artificial Sequence: Synthetic oligonucleotide
  Antisense strand to SEQ ID NO: 1569237
aauucccaaauaagguccc

SEQ ID NO: 1569239 - RNA, 19 nt, Artificial Sequence
  Description of Artificial Sequence: Synthetic oligonucleotide
  Sense strand starting at position 3837 of SEQ ID NO: 1560000
ggaccuuauuugggaauug

SEQ ID NO: 1569240 - RNA, 19 nt, Artificial Sequence
  Description of Artificial Sequence: Synthetic oligonucleotide
  Antisense strand to SEQ ID NO: 1569239
caauucccaaauaaggucc

SEQ ID NO: 1569241 - RNA, 19 nt, Artificial Sequence
  Description of Artificial Sequence: Synthetic oligonucleotide
  Sense strand starting at position 3879 of SEQ ID NO: 1560000
agguuauacuggaggugga

SEQ ID NO: 1569242 - RNA, 19 nt, Artificial Sequence
  Description of Artificial Sequence: Synthetic oligonucleotide
  Antisense strand to SEQ ID NO: 1569241
uccaccuccaguauaaccu

SEQ ID NO: 1569243 - RNA, 19 nt, Artificial Sequence
  Description of Artificial Sequence: Synthetic oligonucleotide
  Sense strand starting at position 3915 of SEQ ID NO: 1560000
gaccucuguccuuguaaga

SEQ ID NO: 1569244 - RNA, 19 nt, Artificial Sequence
  Description of Artificial Sequence: Synthetic oligonucleotide
  Antisense strand to SEQ ID NO: 1569243
ucuuacaaggacagagguc

SEQ ID NO: 1569245 - RNA, 19 nt, Artificial Sequence
  Description of Artificial Sequence: Synthetic oligonucleotide
  Sense strand starting at position 3964 of SEQ ID NO: 1560000
accuauagucccgacacuu

SEQ ID NO: 1569246 - RNA, 19 nt, Artificial Sequence
  Description of Artificial Sequence: Synthetic oligonucleotide
  Antisense strand to SEQ ID NO: 1569245
aagugucgggacuauaggu

SEQ ID NO: 1569247 - RNA, 19 nt, Artificial Sequence
  Description of Artificial Sequence: Synthetic oligonucleotide
  Sense strand starting at position 351 of SEQ ID NO: 1560001
cgaggaucgccugagcaca

SEQ ID NO: 1569248 - RNA, 19 nt, Artificial Sequence
  Description of Artificial Sequence: Synthetic oligonucleotide
  Antisense strand to SEQ ID NO: 1569247
ugugcucaggcgauccucg

SEQ ID NO: 1569249 - RNA, 19 nt, Artificial Sequence
  Description of Artificial Sequence: Synthetic oligonucleotide
  Sense strand starting at position 645 of SEQ ID NO: 1560001
acucgauucucuguccuca

SEQ ID NO: 1569250 - RNA, 19 nt, Artificial Sequence
  Description of Artificial Sequence: Synthetic oligonucleotide
  Antisense strand to SEQ ID NO: 1569249
ugaggacagagaaucgagu

SEQ ID NO: 1569251 - RNA, 19 nt, Artificial Sequence
  Description of Artificial Sequence: Synthetic oligonucleotide
  Sense strand starting at position 647 of SEQ ID NO: 1560001
ucgauucucuguccucaau

SEQ ID NO: 1569252 - RNA, 19 nt, Artificial Sequence
  Description of Artificial Sequence: Synthetic oligonucleotide
  Antisense strand to SEQ ID NO: 1569251
auugaggacagagaaucga

SEQ ID NO: 1569253 - RNA, 19 nt, Artificial Sequence
  Description of Artificial Sequence: Synthetic oligonucleotide
  Sense strand starting at position 669 of SEQ ID NO: 1560001
gucauucaugcuuggagga

SEQ ID NO: 1569254 - RNA, 19 nt, Artificial Sequence
  Description of Artificial Sequence: Synthetic oligonucleotide
  Antisense strand to SEQ ID NO: 1569253
uccuccaagcaugaaugac

SEQ ID NO: 1569255 - RNA, 19 nt, Artificial Sequence
  Description of Artificial Sequence: Synthetic oligonucleotide
  Sense strand starting at position 793 of SEQ ID NO: 1560001
aguucuccucggcaguaga

SEQ ID NO: 1569256 - RNA, 19 nt, Artificial Sequence
  Description of Artificial Sequence: Synthetic oligonucleotide
  Antisense strand to SEQ ID NO: 1569255
ucuacugccgaggagaacu

SEQ ID NO: 1569257 - RNA, 19 nt, Artificial Sequence
  Description of Artificial Sequence: Synthetic oligonucleotide
  Sense strand starting at position 815 of SEQ ID NO: 1560001
gcauuugcucuccggagga

SEQ ID NO: 1569258 - RNA, 19 nt, Artificial Sequence
  Description of Artificial Sequence: Synthetic oligonucleotide
  Antisense strand to SEQ ID NO: 1569257
uccuccggagagcaaaugc

SEQ ID NO: 1569259 - RNA, 19 nt, Artificial Sequence
  Description of Artificial Sequence: Synthetic oligonucleotide
  Sense strand starting at position 1085 of SEQ ID NO: 1560001
ucauuugagcccugauguc

SEQ ID NO: 1569260 - RNA, 19 nt, Artificial Sequence
  Description of Artificial Sequence: Synthetic oligonucleotide
  Antisense strand to SEQ ID NO: 1569259
gacaucagggcucaaauga

SEQ ID NO: 1569261 - RNA, 19 nt, Artificial Sequence
  Description of Artificial Sequence: Synthetic oligonucleotide
  Sense strand starting at position 1091 of SEQ ID NO: 1560001
gagcccugaugucugauua

SEQ ID NO: 1569262 - RNA, 19 nt, Artificial Sequence
  Description of Artificial Sequence: Synthetic oligonucleotide
  Antisense strand to SEQ ID NO: 1569261
uaaucagacaucagggcuc

SEQ ID NO: 1569263 - RNA, 19 nt, Artificial Sequence
  Description of Artificial Sequence: Synthetic oligonucleotide
  Sense strand starting at position 1092 of SEQ ID NO: 1560001
agcccugaugucugauuau

SEQ ID NO: 1569264 - RNA, 19 nt, Artificial Sequence
  Description of Artificial Sequence: Synthetic oligonucleotide
  Antisense strand to SEQ ID NO: 1569263
auaaucagacaucagggcu

SEQ ID NO: 1569265 - RNA, 19 nt, Artificial Sequence
  Description of Artificial Sequence: Synthetic oligonucleotide
  Sense strand starting at position 1095 of SEQ ID NO: 1560001
ccugaugucugauuauuaa

SEQ ID NO: 1569266 - RNA, 19 nt, Artificial Sequence
  Description of Artificial Sequence: Synthetic oligonucleotide
  Antisense strand to SEQ ID NO: 1569265
uuaauaaucagacaucagg

SEQ ID NO: 1569267 - RNA, 19 nt, Artificial Sequence
  Description of Artificial Sequence: Synthetic oligonucleotide
  Sense strand starting at position 1138 of SEQ ID NO: 1560001
ggaggaggcaucugugucu

SEQ ID NO: 1569268 - RNA, 19 nt, Artificial Sequence
  Description of Artificial Sequence: Synthetic oligonucleotide
  Antisense strand to SEQ ID NO: 1569267
agacacagaugccuccucc

SEQ ID NO: 1569269 - RNA, 19 nt, Artificial Sequence
  Description of Artificial Sequence: Synthetic oligonucleotide
  Sense strand starting at position 1141 of SEQ ID NO: 1560001
ggaggcaucugugucuuaa

SEQ ID NO: 1569270 - RNA, 19 nt, Artificial Sequence
  Description of Artificial Sequence: Synthetic oligonucleotide
  Antisense strand to SEQ ID NO: 1569269
uuaagacacagaugccucc

SEQ ID NO: 1569271 - RNA, 19 nt, Artificial Sequence
  Description of Artificial Sequence: Synthetic oligonucleotide
  Sense strand starting at position 1143 of SEQ ID NO: 1560001
aggcaucugugucuuaaac

SEQ ID NO: 1569272 - RNA, 19 nt, Artificial Sequence
  Description of Artificial Sequence: Synthetic oligonucleotide
  Antisense strand to SEQ ID NO: 1569271
guuuaagacacagaugccu

SEQ ID NO: 1569273 - RNA, 19 nt, Artificial Sequence
  Description of Artificial Sequence: Synthetic oligonucleotide
  Sense strand starting at position 1197 of SEQ ID NO: 1560001
agccuuuaucgacacacuu

SEQ ID NO: 1569274 - RNA, 19 nt, Artificial Sequence
  Description of Artificial Sequence: Synthetic oligonucleotide
  Antisense strand to SEQ ID NO: 1569273
aagugugucgauaaaggcu

SEQ ID NO: 1569275 - RNA, 19 nt, Artificial Sequence
  Description of Artificial Sequence: Synthetic oligonucleotide
  Sense strand starting at position 1258 of SEQ ID NO: 1560001
ccuuccuagcguuauaaau

SEQ ID NO: 1569276 - RNA, 19 nt, Artificial Sequence
  Description of Artificial Sequence: Synthetic oligonucleotide
  Antisense strand to SEQ ID NO: 1569275
auuuauaacgcuaggaagg

SEQ ID NO: 1569277 - RNA, 19 nt, Artificial Sequence
  Description of Artificial Sequence: Synthetic oligonucleotide
  Sense strand starting at position 1266 of SEQ ID NO: 1560001
gcguuauaaauaggaaaua

SEQ ID NO: 1569278 - RNA, 19 nt, Artificial Sequence
  Description of Artificial Sequence: Synthetic oligonucleotide
  Antisense strand to SEQ ID NO: 1569277
uauuuccuauuuauaacgc

SEQ ID NO: 1569279 - RNA, 19 nt, Artificial Sequence
  Description of Artificial Sequence: Synthetic oligonucleotide
  Sense strand starting at position 1289 of SEQ ID NO: 1560001
gggcuaggaugggucuauu

SEQ ID NO: 1569280 - RNA, 19 nt, Artificial Sequence
  Description of Artificial Sequence: Synthetic oligonucleotide
  Antisense strand to SEQ ID NO: 1569279
aauagacccauccuagccc

SEQ ID NO: 1569281 - RNA, 19 nt, Artificial Sequence
  Description of Artificial Sequence: Synthetic oligonucleotide
  Sense strand starting at position 1348 of SEQ ID NO: 1560001
gcucucagcguguccugaa

SEQ ID NO: 1569282 - RNA, 19 nt, Artificial Sequence
  Description of Artificial Sequence: Synthetic oligonucleotide
  Antisense strand to SEQ ID NO: 1569281
uucaggacacgcugagagc

SEQ ID NO: 1569283 - RNA, 19 nt, Artificial Sequence
  Description of Artificial Sequence: Synthetic oligonucleotide
  Sense strand starting at position 1399 of SEQ ID NO: 1560001
gaagguaaacuguguugcu

SEQ ID NO: 1569284 - RNA, 19 nt, Artificial Sequence
  Description of Artificial Sequence: Synthetic oligonucleotide
  Antisense strand to SEQ ID NO: 1569283
agcaacacaguuuaccuuc

SEQ ID NO: 1569285 - RNA, 19 nt, Artificial Sequence
  Description of Artificial Sequence: Synthetic oligonucleotide
  Sense strand starting at position 1574 of SEQ ID NO: 1560001
acgguuuauccugggagaa

SEQ ID NO: 1569286 - RNA, 19 nt, Artificial Sequence
  Description of Artificial Sequence: Synthetic oligonucleotide
  Antisense strand to SEQ ID NO: 1569285
uucucccaggauaaaccgu

SEQ ID NO: 1569287 - RNA, 19 nt, Artificial Sequence
  Description of Artificial Sequence: Synthetic oligonucleotide
  Sense strand starting at position 1575 of SEQ ID NO: 1560001
cgguuuauccugggagaag

SEQ ID NO: 1569288 - RNA, 19 nt, Artificial Sequence
  Description of Artificial Sequence: Synthetic oligonucleotide
  Antisense strand to SEQ ID NO: 1569287
cuucucccaggauaaaccg

SEQ ID NO: 1569289 - RNA, 19 nt, Artificial Sequence
  Description of Artificial Sequence: Synthetic oligonucleotide
  Sense strand starting at position 2167 of SEQ ID NO: 1560001
gcaagauggccucauuccu

SEQ ID NO: 1569290 - RNA, 19 nt, Artificial Sequence
  Description of Artificial Sequence: Synthetic oligonucleotide
  Antisense strand to SEQ ID NO: 1569289
aggaaugaggccaucuugc

SEQ ID NO: 1569291 - RNA, 19 nt, Artificial Sequence
  Description of Artificial Sequence: Synthetic oligonucleotide
  Sense strand starting at position 2173 of SEQ ID NO: 1560001
uggccucauuccuuagaga

SEQ ID NO: 1569292 - RNA, 19 nt, Artificial Sequence
  Description of Artificial Sequence: Synthetic oligonucleotide
  Antisense strand to SEQ ID NO: 1569291
ucucuaaggaaugaggcca

SEQ ID NO: 1569293 - RNA, 19 nt, Artificial Sequence
  Description of Artificial Sequence: Synthetic oligonucleotide
  Sense strand starting at position 2174 of SEQ ID NO: 1560001
ggccucauuccuuagagaa

SEQ ID NO: 1569294 - RNA, 19 nt, Artificial Sequence
  Description of Artificial Sequence: Synthetic oligonucleotide
  Antisense strand to SEQ ID NO: 1569293
uucucuaaggaaugaggcc

SEQ ID NO: 1569295 - RNA, 19 nt, Artificial Sequence
  Description of Artificial Sequence: Synthetic oligonucleotide
  Sense strand starting at position 2224 of SEQ ID NO: 1560001
uggcacuucuccuugcaaa

SEQ ID NO: 1569296 - RNA, 19 nt, Artificial Sequence
  Description of Artificial Sequence: Synthetic oligonucleotide
  Antisense strand to SEQ ID NO: 1569295
uuugcaaggagaagugcca

SEQ ID NO: 1569297 - RNA, 19 nt, Artificial Sequence
  Description of Artificial Sequence: Synthetic oligonucleotide
  Sense strand starting at position 2225 of SEQ ID NO: 1560001
ggcacuucuccuugcaaag

SEQ ID NO: 1569298 - RNA, 19 nt, Artificial Sequence
  Description of Artificial Sequence: Synthetic oligonucleotide
  Antisense strand to SEQ ID NO: 1569297
cuuugcaaggagaagugcc

SEQ ID NO: 1569299 - RNA, 19 nt, Artificial Sequence
  Description of Artificial Sequence: Synthetic oligonucleotide
  Sense strand starting at position 2634 of SEQ ID NO: 1560001
ccguguuguggguccauua

SEQ ID NO: 1569300 - RNA, 19 nt, Artificial Sequence
  Description of Artificial Sequence: Synthetic oligonucleotide
  Antisense strand to SEQ ID NO: 1569299
uaauggacccacaacacgg

SEQ ID NO: 1569301 - RNA, 19 nt, Artificial Sequence
  Description of Artificial Sequence: Synthetic oligonucleotide
  Sense strand starting at position 2644 of SEQ ID NO: 1560001
gguccauuagauggucacu

SEQ ID NO: 1569302 - RNA, 19 nt, Artificial Sequence
  Description of Artificial Sequence: Synthetic oligonucleotide
  Antisense strand to SEQ ID NO: 1569301
agugaccaucuaauggacc

SEQ ID NO: 1569303 - RNA, 19 nt, Artificial Sequence
  Description of Artificial Sequence: Synthetic oligonucleotide
  Sense strand starting at position 2646 of SEQ ID NO: 1560001
uccauuagauggucacuua

SEQ ID NO: 1569304 - RNA, 19 nt, Artificial Sequence
  Description of Artificial Sequence: Synthetic oligonucleotide
  Antisense strand to SEQ ID NO: 1569303
uaagugaccaucuaaugga

SEQ ID NO: 1569305 - RNA, 19 nt, Artificial Sequence
  Description of Artificial Sequence: Synthetic oligonucleotide
  Sense strand starting at position 2649 of SEQ ID NO: 1560001
auuagauggucacuuacca

SEQ ID NO: 1569306 - RNA, 19 nt, Artificial Sequence
  Description of Artificial Sequence: Synthetic oligonucleotide
  Antisense strand to SEQ ID NO: 1569305
ugguaagugaccaucuaau

SEQ ID NO: 1569307 - RNA, 19 nt, Artificial Sequence
  Description of Artificial Sequence: Synthetic oligonucleotide
  Sense strand starting at position 2653 of SEQ ID NO: 1560001
gauggucacuuaccauuga

SEQ ID NO: 1569308 - RNA, 19 nt, Artificial Sequence
  Description of Artificial Sequence: Synthetic oligonucleotide
  Antisense strand to SEQ ID NO: 1569307
ucaaugguaagugaccauc

SEQ ID NO: 1569309 - RNA, 19 nt, Artificial Sequence
  Description of Artificial Sequence: Synthetic oligonucleotide
  Sense strand starting at position 2866 of SEQ ID NO: 1560001
ggguuugaacucuagccca

SEQ ID NO: 1569310 - RNA, 19 nt, Artificial Sequence
  Description of Artificial Sequence: Synthetic oligonucleotide
  Antisense strand to SEQ ID NO: 1569309
ugggcuagaguucaaaccc

SEQ ID NO: 1569311 - RNA, 19 nt, Artificial Sequence
  Description of Artificial Sequence: Synthetic oligonucleotide
  Sense strand starting at position 2977 of SEQ ID NO: 1560001
uccacauuaugagauaaug

SEQ ID NO: 1569312 - RNA, 19 nt, Artificial Sequence
  Description of Artificial Sequence: Synthetic oligonucleotide
  Antisense strand to SEQ ID NO: 1569311
cauuaucucauaaugugga

SEQ ID NO: 1569313 - RNA, 19 nt, Artificial Sequence
  Description of Artificial Sequence: Synthetic oligonucleotide
  Sense strand starting at position 3381 of SEQ ID NO: 1560001
ugggauuagaggugcgaau

SEQ ID NO: 1569314 - RNA, 19 nt, Artificial Sequence
  Description of Artificial Sequence: Synthetic oligonucleotide
  Antisense strand to SEQ ID NO: 1569313
auucgcaccucuaauccca

SEQ ID NO: 1569315 - RNA, 19 nt, Artificial Sequence
  Description of Artificial Sequence: Synthetic oligonucleotide
  Sense strand starting at position 3383 of SEQ ID NO: 1560001
ggauuagaggugcgaauca

SEQ ID NO: 1569316 - RNA, 19 nt, Artificial Sequence
  Description of Artificial Sequence: Synthetic oligonucleotide
  Antisense strand to SEQ ID NO: 1569315
ugauucgcaccucuaaucc

SEQ ID NO: 1569317 - RNA, 19 nt, Artificial Sequence
  Description of Artificial Sequence: Synthetic oligonucleotide
  Sense strand starting at position 3400 of SEQ ID NO: 1560001
cacugugcucggccuauau

SEQ ID NO: 1569318 - RNA, 19 nt, Artificial Sequence
  Description of Artificial Sequence: Synthetic oligonucleotide
  Antisense strand to SEQ ID NO: 1569317
auauaggccgagcacagug

SEQ ID NO: 1569319 - RNA, 19 nt, Artificial Sequence
  Description of Artificial Sequence: Synthetic oligonucleotide
  Sense strand starting at position 3413 of SEQ ID NO: 1560001
cuauauguauuucuugcua

SEQ ID NO: 1569320 - RNA, 19 nt, Artificial Sequence
  Description of Artificial Sequence: Synthetic oligonucleotide
  Antisense strand to SEQ ID NO: 1569319
uagcaagaaauacauauag

SEQ ID NO: 1569321 - RNA, 19 nt, Artificial Sequence
  Description of Artificial Sequence: Synthetic oligonucleotide
  Sense strand starting at position 3571 of SEQ ID NO: 1560001
cuuucucuccagugguuga

SEQ ID NO: 1569322 - RNA, 19 nt, Artificial Sequence
  Description of Artificial Sequence: Synthetic oligonucleotide
  Antisense strand to SEQ ID NO: 1569321
ucaaccacuggagagaaag

SEQ ID NO: 1569323 - RNA, 19 nt, Artificial Sequence
  Description of Artificial Sequence: Synthetic oligonucleotide
  Sense strand starting at position 3576 of SEQ ID NO: 1560001
ucuccagugguugagacua

SEQ ID NO: 1569324 - RNA, 19 nt, Artificial Sequence
  Description of Artificial Sequence: Synthetic oligonucleotide
  Antisense strand to SEQ ID NO: 1569323
uagucucaaccacuggaga

SEQ ID NO: 1569325 - RNA, 19 nt, Artificial Sequence
  Description of Artificial Sequence: Synthetic oligonucleotide
  Sense strand starting at position 3615 of SEQ ID NO: 1560001
cugcuaaucuguguaauuu

SEQ ID NO: 1569326 - RNA, 19 nt, Artificial Sequence
  Description of Artificial Sequence: Synthetic oligonucleotide
  Antisense strand to SEQ ID NO: 1569325
aaauuacacagauuagcag

SEQ ID NO: 1569327 - RNA, 19 nt, Artificial Sequence
  Description of Artificial Sequence: Synthetic oligonucleotide
  Sense strand starting at position 450 of SEQ ID NO: 1560002
gcgucauccaccggccaaa

SEQ ID NO: 1569328 - RNA, 19 nt, Artificial Sequence
  Description of Artificial Sequence: Synthetic oligonucleotide
  Antisense strand to SEQ ID NO: 1569327
uuuggccgguggaugacgc

SEQ ID NO: 1569329 - RNA, 19 nt, Artificial Sequence
  Description of Artificial Sequence: Synthetic oligonucleotide
  Sense strand starting at position 551 of SEQ ID NO: 1560002
gccucagccucuccgaauu

SEQ ID NO: 1569330 - RNA, 19 nt, Artificial Sequence
  Description of Artificial Sequence: Synthetic oligonucleotide
  Antisense strand to SEQ ID NO: 1569329
aauucggagaggcugaggc

SEQ ID NO: 1569331 - RNA, 19 nt, Artificial Sequence
  Description of Artificial Sequence: Synthetic oligonucleotide
  Sense strand starting at position 621 of SEQ ID NO: 1560002
ggaauuucuuuagguccua

SEQ ID NO: 1569332 - RNA, 19 nt, Artificial Sequence
  Description of Artificial Sequence: Synthetic oligonucleotide
  Antisense strand to SEQ ID NO: 1569331
uaggaccuaaagaaauucc

SEQ ID NO: 1569333 - RNA, 19 nt, Artificial Sequence
  Description of Artificial Sequence: Synthetic oligonucleotide
  Sense strand starting at position 626 of SEQ ID NO: 1560002
uucuuuagguccuaaagua

SEQ ID NO: 1569334 - RNA, 19 nt, Artificial Sequence
  Description of Artificial Sequence: Synthetic oligonucleotide
  Antisense strand to SEQ ID NO: 1569333
uacuuuaggaccuaaagaa

SEQ ID NO: 1569335 - RNA, 19 nt, Artificial Sequence
  Description of Artificial Sequence: Synthetic oligonucleotide
  Sense strand starting at position 996 of SEQ ID NO: 1560002
gccucuuugucacaucgaa

SEQ ID NO: 1569336 - RNA, 19 nt, Artificial Sequence
  Description of Artificial Sequence: Synthetic oligonucleotide
  Antisense strand to SEQ ID NO: 1569335
uucgaugugacaaagaggc

SEQ ID NO: 1569337 - RNA, 19 nt, Artificial Sequence
  Description of Artificial Sequence: Synthetic oligonucleotide
  Sense strand starting at position 1025 of SEQ ID NO: 1560002
ucaacuaacgguugguuua

SEQ ID NO: 1569338 - RNA, 19 nt, Artificial Sequence
  Description of Artificial Sequence: Synthetic oligonucleotide
  Antisense strand to SEQ ID NO: 1569337
uaaaccaaccguuaguuga

SEQ ID NO: 1569339 - RNA, 19 nt, Artificial Sequence
  Description of Artificial Sequence: Synthetic oligonucleotide
  Sense strand starting at position 1056 of SEQ ID NO: 1560002
cucacaaugugcuuccgaa

SEQ ID NO: 1569340 - RNA, 19 nt, Artificial Sequence
  Description of Artificial Sequence: Synthetic oligonucleotide
  Antisense strand to SEQ ID NO: 1569339
uucggaagcacauugugag

SEQ ID NO: 1569341 - RNA, 19 nt, Artificial Sequence
  Description of Artificial Sequence: Synthetic oligonucleotide
  Sense strand starting at position 1138 of SEQ ID NO: 1560002
cgccuucugcccugucaau

SEQ ID NO: 1569342 - RNA, 19 nt, Artificial Sequence
  Description of Artificial Sequence: Synthetic oligonucleotide
  Antisense strand to SEQ ID NO: 1569341
auugacagggcagaaggcg

SEQ ID NO: 1569343 - RNA, 19 nt, Artificial Sequence
  Description of Artificial Sequence: Synthetic oligonucleotide
  Sense strand starting at position 1463 of SEQ ID NO: 1560002
cacgaagaaucguuuagaa

SEQ ID NO: 1569344 - RNA, 19 nt, Artificial Sequence
  Description of Artificial Sequence: Synthetic oligonucleotide
  Antisense strand to SEQ ID NO: 1569343
uucuaaacgauucuucgug

SEQ ID NO: 1569345 - RNA, 19 nt, Artificial Sequence
  Description of Artificial Sequence: Synthetic oligonucleotide
  Sense strand starting at position 2532 of SEQ ID NO: 1560002
guggguuuaugagacucaa

SEQ ID NO: 1569346 - RNA, 19 nt, Artificial Sequence
  Description of Artificial Sequence: Synthetic oligonucleotide
  Antisense strand to SEQ ID NO: 1569345
uugagucucauaaacccac

SEQ ID NO: 1569347 - RNA, 19 nt, Artificial Sequence
  Description of Artificial Sequence: Synthetic oligonucleotide
  Sense strand starting at position 3033 of SEQ ID NO: 1560002
aagugucuguuuccagcua

SEQ ID NO: 1569348 - RNA, 19 nt, Artificial Sequence
  Description of Artificial Sequence: Synthetic oligonucleotide
  Antisense strand to SEQ ID NO: 1569347
uagcuggaaacagacacuu

SEQ ID NO: 1569349 - RNA, 19 nt, Artificial Sequence
  Description of Artificial Sequence: Synthetic oligonucleotide
  Sense strand starting at position 3034 of SEQ ID NO: 1560002
agugucuguuuccagcuau

SEQ ID NO: 1569350 - RNA, 19 nt, Artificial Sequence
  Description of Artificial Sequence: Synthetic oligonucleotide
  Antisense strand to SEQ ID NO: 1569349
auagcuggaaacagacacu

SEQ ID NO: 1569351 - RNA, 19 nt, Artificial Sequence
  Description of Artificial Sequence: Synthetic oligonucleotide
  Sense strand starting at position 3235 of SEQ ID NO: 1560002
uucguuuagucacagggua

SEQ ID NO: 1569352 - RNA, 19 nt, Artificial Sequence
  Description of Artificial Sequence: Synthetic oligonucleotide
  Antisense strand to SEQ ID NO: 1569351
uacccugugacuaaacgaa

SEQ ID NO: 1569353 - RNA, 19 nt, Artificial Sequence
  Description of Artificial Sequence: Synthetic oligonucleotide
  Sense strand starting at position 3430 of SEQ ID NO: 1560002
gaggaauccugauacugag

SEQ ID NO: 1569354 - RNA, 19 nt, Artificial Sequence
  Description of Artificial Sequence: Synthetic oligonucleotide
  Antisense strand to SEQ ID NO: 1569353
cucaguaucaggauuccuc

SEQ ID NO: 1569355 - RNA, 19 nt, Artificial Sequence
  Description of Artificial Sequence: Synthetic oligonucleotide
  Sense strand starting at position 3496 of SEQ ID NO: 1560002
aguccuucuugggaucuga

SEQ ID NO: 1569356 - RNA, 19 nt, Artificial Sequence
  Description of Artificial Sequence: Synthetic oligonucleotide
  Antisense strand to SEQ ID NO: 1569355
ucagaucccaagaaggacu

SEQ ID NO: 1569357 - RNA, 19 nt, Artificial Sequence
  Description of Artificial Sequence: Synthetic oligonucleotide
  Sense strand starting at position 3556 of SEQ ID NO: 1560002
uugagcacuugcccuauau

SEQ ID NO: 1569358 - RNA, 19 nt, Artificial Sequence
  Description of Artificial Sequence: Synthetic oligonucleotide
  Antisense strand to SEQ ID NO: 1569357
auauagggcaagugcucaa

SEQ ID NO: 1569359 - RNA, 19 nt, Artificial Sequence
  Description of Artificial Sequence: Synthetic oligonucleotide
  Sense strand starting at position 3594 of SEQ ID NO: 1560002
cuguguuaucacugaggca

SEQ ID NO: 1569360 - RNA, 19 nt, Artificial Sequence
  Description of Artificial Sequence: Synthetic oligonucleotide
  Antisense strand to SEQ ID NO: 1569359
ugccucagugauaacacag

SEQ ID NO: 1569361 - RNA, 19 nt, Artificial Sequence
  Description of Artificial Sequence: Synthetic oligonucleotide
  Sense strand starting at position 3595 of SEQ ID NO: 1560002
uguguuaucacugaggcag

SEQ ID NO: 1569362 - RNA, 19 nt, Artificial Sequence
  Description of Artificial Sequence: Synthetic oligonucleotide
  Antisense strand to SEQ ID NO: 1569361
cugccucagugauaacaca

SEQ ID NO: 1569363 - RNA, 19 nt, Artificial Sequence
  Description of Artificial Sequence: Synthetic oligonucleotide
  Sense strand starting at position 3597 of SEQ ID NO: 1560002
uguuaucacugaggcagua

SEQ ID NO: 1569364 - RNA, 19 nt, Artificial Sequence
  Description of Artificial Sequence: Synthetic oligonucleotide
  Antisense strand to SEQ ID NO: 1569363
uacugccucagugauaaca

SEQ ID NO: 1569365 - RNA, 19 nt, Artificial Sequence
  Description of Artificial Sequence: Synthetic oligonucleotide
  Sense strand starting at position 3760 of SEQ ID NO: 1560002
aucagcuaucaauagugua

SEQ ID NO: 1569366 - RNA, 19 nt, Artificial Sequence
  Description of Artificial Sequence: Synthetic oligonucleotide
  Antisense strand to SEQ ID NO: 1569365
uacacuauugauagcugau

SEQ ID NO: 1569367 - RNA, 19 nt, Artificial Sequence
  Description of Artificial Sequence: Synthetic oligonucleotide
  Sense strand starting at position 3763 of SEQ ID NO: 1560002
agcuaucaauaguguaugu

SEQ ID NO: 1569368 - RNA, 19 nt, Artificial Sequence
  Description of Artificial Sequence: Synthetic oligonucleotide
  Antisense strand to SEQ ID NO: 1569367
acauacacuauugauagcu

SEQ ID NO: 1569369 - RNA, 19 nt, Artificial Sequence
  Description of Artificial Sequence: Synthetic oligonucleotide
  Sense strand starting at position 3765 of SEQ ID NO: 1560002
cuaucaauaguguauguua

SEQ ID NO: 1569370 - RNA, 19 nt, Artificial Sequence
  Description of Artificial Sequence: Synthetic oligonucleotide
  Antisense strand to SEQ ID NO: 1569369
uaacauacacuauugauag

SEQ ID NO: 1569371 - RNA, 19 nt, Artificial Sequence
  Description of Artificial Sequence: Synthetic oligonucleotide
  Sense strand starting at position 3768 of SEQ ID NO: 1560002
ucaauaguguauguuaugu

SEQ ID NO: 1569372 - RNA, 19 nt, Artificial Sequence
  Description of Artificial Sequence: Synthetic oligonucleotide
  Antisense strand to SEQ ID NO: 1569371
acauaacauacacuauuga

SEQ ID NO: 1569373 - RNA, 19 nt, Artificial Sequence
  Description of Artificial Sequence: Synthetic oligonucleotide
  Sense strand starting at position 3855 of SEQ ID NO: 1560002
ggagccagauuauaugagu

SEQ ID NO: 1569374 - RNA, 19 nt, Artificial Sequence
  Description of Artificial Sequence: Synthetic oligonucleotide
  Antisense strand to SEQ ID NO: 1569373
acucauauaaucuggcucc

SEQ ID NO: 1569375 - RNA, 19 nt, Artificial Sequence
  Description of Artificial Sequence: Synthetic oligonucleotide
  Sense strand starting at position 3903 of SEQ ID NO: 1560002
cugugugacccuggccauu

SEQ ID NO: 1569376 - RNA, 19 nt, Artificial Sequence
  Description of Artificial Sequence: Synthetic oligonucleotide
  Antisense strand to SEQ ID NO: 1569375
aauggccagggucacacag

SEQ ID NO: 1569377 - RNA, 19 nt, Artificial Sequence
  Description of Artificial Sequence: Synthetic oligonucleotide
  Sense strand starting at position 286 of SEQ ID NO: 1560003
uaccgaguacucuguaucu

SEQ ID NO: 1569378 - RNA, 19 nt, Artificial Sequence
  Description of Artificial Sequence: Synthetic oligonucleotide
  Antisense strand to SEQ ID NO: 1569377
agauacagaguacucggua

SEQ ID NO: 1569379 - RNA, 19 nt, Artificial Sequence
  Description of Artificial Sequence: Synthetic oligonucleotide
  Sense strand starting at position 288 of SEQ ID NO: 1560003
ccgaguacucuguaucugu

SEQ ID NO: 1569380 - RNA, 19 nt, Artificial Sequence
  Description of Artificial Sequence: Synthetic oligonucleotide
  Antisense strand to SEQ ID NO: 1569379
acagauacagaguacucgg

SEQ ID NO: 1569381 - RNA, 19 nt, Artificial Sequence
  Description of Artificial Sequence: Synthetic oligonucleotide
  Sense strand starting at position 433 of SEQ ID NO: 1560003
gggauacaguaaugaauga

SEQ ID NO: 1569382 - RNA, 19 nt, Artificial Sequence
  Description of Artificial Sequence: Synthetic oligonucleotide
  Antisense strand to SEQ ID NO: 1569381
ucauucauuacuguauccc

SEQ ID NO: 1569383 - RNA, 19 nt, Artificial Sequence
  Description of Artificial Sequence: Synthetic oligonucleotide
  Sense strand starting at position 752 of SEQ ID NO: 1560003
uccugaacuccuggacuaa

SEQ ID NO: 1569384 - RNA, 19 nt, Artificial Sequence
  Description of Artificial Sequence: Synthetic oligonucleotide
  Antisense strand to SEQ ID NO: 1569383
uuaguccaggaguucagga

SEQ ID NO: 1569385 - RNA, 19 nt, Artificial Sequence
  Description of Artificial Sequence: Synthetic oligonucleotide
  Sense strand starting at position 846 of SEQ ID NO: 1560003
ugccucagucaacauguua

SEQ ID NO: 1569386 - RNA, 19 nt, Artificial Sequence
  Description of Artificial Sequence: Synthetic oligonucleotide
  Antisense strand to SEQ ID NO: 1569385
uaacauguugacugaggca

SEQ ID NO: 1569387 - RNA, 19 nt, Artificial Sequence
  Description of Artificial Sequence: Synthetic oligonucleotide
  Sense strand starting at position 858 of SEQ ID NO: 1560003
cauguuaccuacuuggaga

SEQ ID NO: 1569388 - RNA, 19 nt, Artificial Sequence
  Description of Artificial Sequence: Synthetic oligonucleotide
  Antisense strand to SEQ ID NO: 1569387
ucuccaaguagguaacaug

SEQ ID NO: 1569389 - RNA, 19 nt, Artificial Sequence
  Description of Artificial Sequence: Synthetic oligonucleotide
  Sense strand starting at position 1042 of SEQ ID NO: 1560003
gccguauccucagcaccua

SEQ ID NO: 1569390 - RNA, 19 nt, Artificial Sequence
  Description of Artificial Sequence: Synthetic oligonucleotide
  Antisense strand to SEQ ID NO: 1569389
uaggugcugaggauacggc

SEQ ID NO: 1569391 - RNA, 19 nt, Artificial Sequence
  Description of Artificial Sequence: Synthetic oligonucleotide
  Sense strand starting at position 1511 of SEQ ID NO: 1560003
gcgucauccaccggccaaa

SEQ ID NO: 1569392 - RNA, 19 nt, Artificial Sequence
  Description of Artificial Sequence: Synthetic oligonucleotide
  Antisense strand to SEQ ID NO: 1569391
uuuggccgguggaugacgc

SEQ ID NO: 1569393 - RNA, 19 nt, Artificial Sequence
  Description of Artificial Sequence: Synthetic oligonucleotide
  Sense strand starting at position 1612 of SEQ ID NO: 1560003
gccucagccucuccgaauu

SEQ ID NO: 1569394 - RNA, 19 nt, Artificial Sequence
  Description of Artificial Sequence: Synthetic oligonucleotide
  Antisense strand to SEQ ID NO: 1569393
aauucggagaggcugaggc

SEQ ID NO: 1569395 - RNA, 19 nt, Artificial Sequence
  Description of Artificial Sequence: Synthetic oligonucleotide
  Sense strand starting at position 1682 of SEQ ID NO: 1560003
ggaauuucuuuagguccua

SEQ ID NO: 1569396 - RNA, 19 nt, Artificial Sequence
  Description of Artificial Sequence: Synthetic oligonucleotide
  Antisense strand to SEQ ID NO: 1569395
uaggaccuaaagaaauucc

SEQ ID NO: 1569397 - RNA, 19 nt, Artificial Sequence
  Description of Artificial Sequence: Synthetic oligonucleotide
  Sense strand starting at position 1687 of SEQ ID NO: 1560003
uucuuuagguccuaaagua

SEQ ID NO: 1569398 - RNA, 19 nt, Artificial Sequence
  Description of Artificial Sequence: Synthetic oligonucleotide
  Antisense strand to SEQ ID NO: 1569397
uacuuuaggaccuaaagaa

SEQ ID NO: 1569399 - RNA, 19 nt, Artificial Sequence
  Description of Artificial Sequence: Synthetic oligonucleotide
  Sense strand starting at position 2057 of SEQ ID NO: 1560003
gccucuuugucacaucgaa

SEQ ID NO: 1569400 - RNA, 19 nt, Artificial Sequence
  Description of Artificial Sequence: Synthetic oligonucleotide
  Antisense strand to SEQ ID NO: 1569399
uucgaugugacaaagaggc

SEQ ID NO: 1569401 - RNA, 19 nt, Artificial Sequence
  Description of Artificial Sequence: Synthetic oligonucleotide
  Sense strand starting at position 2086 of SEQ ID NO: 1560003
ucaacuaacgguugguuua

SEQ ID NO: 1569402 - RNA, 19 nt, Artificial Sequence
  Description of Artificial Sequence: Synthetic oligonucleotide
  Antisense strand to SEQ ID NO: 1569401
uaaaccaaccguuaguuga

SEQ ID NO: 1569403 - RNA, 19 nt, Artificial Sequence
  Description of Artificial Sequence: Synthetic oligonucleotide
  Sense strand starting at position 2117 of SEQ ID NO: 1560003
cucacaaugugcuuccgaa

SEQ ID NO: 1569404 - RNA, 19 nt, Artificial Sequence
  Description of Artificial Sequence: Synthetic oligonucleotide
  Antisense strand to SEQ ID NO: 1569403
uucggaagcacauugugag

SEQ ID NO: 1569405 - RNA, 19 nt, Artificial Sequence
  Description of Artificial Sequence: Synthetic oligonucleotide
  Sense strand starting at position 2199 of SEQ ID NO: 1560003
cgccuucugcccugucaau

SEQ ID NO: 1569406 - RNA, 19 nt, Artificial Sequence
  Description of Artificial Sequence: Synthetic oligonucleotide
  Antisense strand to SEQ ID NO: 1569405
auugacagggcagaaggcg

SEQ ID NO: 1569407 - RNA, 19 nt, Artificial Sequence
  Description of Artificial Sequence: Synthetic oligonucleotide
  Sense strand starting at position 2524 of SEQ ID NO: 1560003
cacgaagaaucguuuagaa

SEQ ID NO: 1569408 - RNA, 19 nt, Artificial Sequence
  Description of Artificial Sequence: Synthetic oligonucleotide
  Antisense strand to SEQ ID NO: 1569407
uucuaaacgauucuucgug

SEQ ID NO: 1569409 - RNA, 19 nt, Artificial Sequence
  Description of Artificial Sequence: Synthetic oligonucleotide
  Sense strand starting at position 3593 of SEQ ID NO: 1560003
guggguuuaugagacucaa

SEQ ID NO: 1569410 - RNA, 19 nt, Artificial Sequence
  Description of Artificial Sequence: Synthetic oligonucleotide
  Antisense strand to SEQ ID NO: 1569409
uugagucucauaaacccac

SEQ ID NO: 1569411 - RNA, 19 nt, Artificial Sequence
  Description of Artificial Sequence: Synthetic oligonucleotide
  Sense strand starting at position 9 of SEQ ID NO: 1560004
gcgucauccaccggccaaa

SEQ ID NO: 1569412 - RNA, 19 nt, Artificial Sequence
  Description of Artificial Sequence: Synthetic oligonucleotide
  Antisense strand to SEQ ID NO: 1569411
uuuggccgguggaugacgc

SEQ ID NO: 1569413 - RNA, 19 nt, Artificial Sequence
  Description of Artificial Sequence: Synthetic oligonucleotide
  Sense strand starting at position 110 of SEQ ID NO: 1560004
gccucagccucuccgaauu

SEQ ID NO: 1569414 - RNA, 19 nt, Artificial Sequence
  Description of Artificial Sequence: Synthetic oligonucleotide
  Antisense strand to SEQ ID NO: 1569413
aauucggagaggcugaggc

SEQ ID NO: 1569415 - RNA, 19 nt, Artificial Sequence
  Description of Artificial Sequence: Synthetic oligonucleotide
  Sense strand starting at position 180 of SEQ ID NO: 1560004
ggaauuucuuuagguccua

SEQ ID NO: 1569416 - RNA, 19 nt, Artificial Sequence
  Description of Artificial Sequence: Synthetic oligonucleotide
  Antisense strand to SEQ ID NO: 1569415
uaggaccuaaagaaauucc

SEQ ID NO: 1569417 - RNA, 19 nt, Artificial Sequence
  Description of Artificial Sequence: Synthetic oligonucleotide
  Sense strand starting at position 185 of SEQ ID NO: 1560004
uucuuuagguccuaaagua

SEQ ID NO: 1569418 - RNA, 19 nt, Artificial Sequence
  Description of Artificial Sequence: Synthetic oligonucleotide
  Antisense strand to SEQ ID NO: 1569417
uacuuuaggaccuaaagaa

SEQ ID NO: 1569419 - RNA, 19 nt, Artificial Sequence
  Description of Artificial Sequence: Synthetic oligonucleotide
  Sense strand starting at position 555 of SEQ ID NO: 1560004
gccucuuugucacaucgaa

SEQ ID NO: 1569420 - RNA, 19 nt, Artificial Sequence
  Description of Artificial Sequence: Synthetic oligonucleotide
  Antisense strand to SEQ ID NO: 1569419
uucgaugugacaaagaggc

SEQ ID NO: 1569421 - RNA, 19 nt, Artificial Sequence
  Description of Artificial Sequence: Synthetic oligonucleotide
  Sense strand starting at position 584 of SEQ ID NO: 1560004
ucaacuaacgguugguuua

SEQ ID NO: 1569422 - RNA, 19 nt, Artificial Sequence
  Description of Artificial Sequence: Synthetic oligonucleotide
  Antisense strand to SEQ ID NO: 1569421
uaaaccaaccguuaguuga

SEQ ID NO: 1569423 - RNA, 19 nt, Artificial Sequence
  Description of Artificial Sequence: Synthetic oligonucleotide
  Sense strand starting at position 615 of SEQ ID NO: 1560004
cucacaaugugcuuccgaa

SEQ ID NO: 1569424 - RNA, 19 nt, Artificial Sequence
  Description of Artificial Sequence: Synthetic oligonucleotide
  Antisense strand to SEQ ID NO: 1569423
uucggaagcacauugugag

SEQ ID NO: 1569425 - RNA, 19 nt, Artificial Sequence
  Description of Artificial Sequence: Synthetic oligonucleotide
  Sense strand starting at position 697 of SEQ ID NO: 1560004
cgccuucugcccugucaau

SEQ ID NO: 1569426 - RNA, 19 nt, Artificial Sequence
  Description of Artificial Sequence: Synthetic oligonucleotide
  Antisense strand to SEQ ID NO: 1569425
auugacagggcagaaggcg

SEQ ID NO: 1569427 - RNA, 19 nt, Artificial Sequence
  Description of Artificial Sequence: Synthetic oligonucleotide
  Sense strand starting at position 1022 of SEQ ID NO: 1560004
cacgaagaaucguuuagaa

SEQ ID NO: 1569428 - RNA, 19 nt, Artificial Sequence
  Description of Artificial Sequence: Synthetic oligonucleotide
  Antisense strand to SEQ ID NO: 1569427
uucuaaacgauucuucgug

SEQ ID NO: 1569429 - RNA, 19 nt, Artificial Sequence
  Description of Artificial Sequence: Synthetic oligonucleotide
  Sense strand starting at position 2091 of SEQ ID NO: 1560004
guggguuuaugagacucaa

SEQ ID NO: 1569430 - RNA, 19 nt, Artificial Sequence
  Description of Artificial Sequence: Synthetic oligonucleotide
  Antisense strand to SEQ ID NO: 1569429
uugagucucauaaacccac

SEQ ID NO: 1569431 - RNA, 19 nt, Artificial Sequence
  Description of Artificial Sequence: Synthetic oligonucleotide
  Sense strand starting at position 2592 of SEQ ID NO: 1560004
aagugucuguuuccagcua

SEQ ID NO: 1569432 - RNA, 19 nt, Artificial Sequence
  Description of Artificial Sequence: Synthetic oligonucleotide
  Antisense strand to SEQ ID NO: 1569431
uagcuggaaacagacacuu

SEQ ID NO: 1569433 - RNA, 19 nt, Artificial Sequence
  Description of Artificial Sequence: Synthetic oligonucleotide
  Sense strand starting at position 2593 of SEQ ID NO: 1560004
agugucuguuuccagcuau

SEQ ID NO: 1569434 - RNA, 19 nt, Artificial Sequence
  Description of Artificial Sequence: Synthetic oligonucleotide
  Antisense strand to SEQ ID NO: 1569433
auagcuggaaacagacacu

SEQ ID NO: 1569435 - RNA, 19 nt, Artificial Sequence
  Description of Artificial Sequence: Synthetic oligonucleotide
  Sense strand starting at position 2794 of SEQ ID NO: 1560004
uucguuuagucacagggua

SEQ ID NO: 1569436 - RNA, 19 nt, Artificial Sequence
  Description of Artificial Sequence: Synthetic oligonucleotide
  Antisense strand to SEQ ID NO: 1569435
uacccugugacuaaacgaa

SEQ ID NO: 1569437 - RNA, 19 nt, Artificial Sequence
  Description of Artificial Sequence: Synthetic oligonucleotide
  Sense strand starting at position 2989 of SEQ ID NO: 1560004
gaggaauccugauacugag

SEQ ID NO: 1569438 - RNA, 19 nt, Artificial Sequence
  Description of Artificial Sequence: Synthetic oligonucleotide
  Antisense strand to SEQ ID NO: 1569437
cucaguaucaggauuccuc

SEQ ID NO: 1569439 - RNA, 19 nt, Artificial Sequence
  Description of Artificial Sequence: Synthetic oligonucleotide
  Sense strand starting at position 3055 of SEQ ID NO: 1560004
aguccuucuugggaucuga

SEQ ID NO: 1569440 - RNA, 19 nt, Artificial Sequence
  Description of Artificial Sequence: Synthetic oligonucleotide
  Antisense strand to SEQ ID NO: 1569439
ucagaucccaagaaggacu

SEQ ID NO: 1569441 - RNA, 19 nt, Artificial Sequence
  Description of Artificial Sequence: Synthetic oligonucleotide
  Sense strand starting at position 3115 of SEQ ID NO: 1560004
uugagcacuugcccuauau

SEQ ID NO: 1569442 - RNA, 19 nt, Artificial Sequence
  Description of Artificial Sequence: Synthetic oligonucleotide
  Antisense strand to SEQ ID NO: 1569441
auauagggcaagugcucaa

SEQ ID NO: 1569443 - RNA, 19 nt, Artificial Sequence
  Description of Artificial Sequence: Synthetic oligonucleotide
  Sense strand starting at position 3153 of SEQ ID NO: 1560004
cuguguuaucacugaggca

SEQ ID NO: 1569444 - RNA, 19 nt, Artificial Sequence
  Description of Artificial Sequence: Synthetic oligonucleotide
  Antisense strand to SEQ ID NO: 1569443
ugccucagugauaacacag

SEQ ID NO: 1569445 - RNA, 19 nt, Artificial Sequence
  Description of Artificial Sequence: Synthetic oligonucleotide
  Sense strand starting at position 3154 of SEQ ID NO: 1560004
uguguuaucacugaggcag

SEQ ID NO: 1569446 - RNA, 19 nt, Artificial Sequence
  Description of Artificial Sequence: Synthetic oligonucleotide
  Antisense strand to SEQ ID NO: 1569445
cugccucagugauaacaca

SEQ ID NO: 1569447 - RNA, 19 nt, Artificial Sequence
  Description of Artificial Sequence: Synthetic oligonucleotide
  Sense strand starting at position 3156 of SEQ ID NO: 1560004
uguuaucacugaggcagua

SEQ ID NO: 1569448 - RNA, 19 nt, Artificial Sequence
  Description of Artificial Sequence: Synthetic oligonucleotide
  Antisense strand to SEQ ID NO: 1569447
uacugccucagugauaaca

SEQ ID NO: 1569449 - RNA, 19 nt, Artificial Sequence
  Description of Artificial Sequence: Synthetic oligonucleotide
  Sense strand starting at position 3319 of SEQ ID NO: 1560004
aucagcuaucaauagugua

SEQ ID NO: 1569450 - RNA, 19 nt, Artificial Sequence
  Description of Artificial Sequence: Synthetic oligonucleotide
  Antisense strand to SEQ ID NO: 1569449
uacacuauugauagcugau

SEQ ID NO: 1569451 - RNA, 19 nt, Artificial Sequence
  Description of Artificial Sequence: Synthetic oligonucleotide
  Sense strand starting at position 3322 of SEQ ID NO: 1560004
agcuaucaauaguguaugu

SEQ ID NO: 1569452 - RNA, 19 nt, Artificial Sequence
  Description of Artificial Sequence: Synthetic oligonucleotide
  Antisense strand to SEQ ID NO: 1569451
acauacacuauugauagcu

SEQ ID NO: 1569453 - RNA, 19 nt, Artificial Sequence
  Description of Artificial Sequence: Synthetic oligonucleotide
  Sense strand starting at position 3324 of SEQ ID NO: 1560004
cuaucaauaguguauguua

SEQ ID NO: 1569454 - RNA, 19 nt, Artificial Sequence
  Description of Artificial Sequence: Synthetic oligonucleotide
  Antisense strand to SEQ ID NO: 1569453
uaacauacacuauugauag

SEQ ID NO: 1569455 - RNA, 19 nt, Artificial Sequence
  Description of Artificial Sequence: Synthetic oligonucleotide
  Sense strand starting at position 3327 of SEQ ID NO: 1560004
ucaauaguguauguuaugu

SEQ ID NO: 1569456 - RNA, 19 nt, Artificial Sequence
  Description of Artificial Sequence: Synthetic oligonucleotide
  Antisense strand to SEQ ID NO: 1569455
acauaacauacacuauuga

SEQ ID NO: 1569457 - RNA, 19 nt, Artificial Sequence
  Description of Artificial Sequence: Synthetic oligonucleotide
  Sense strand starting at position 3414 of SEQ ID NO: 1560004
ggagccagauuauaugagu

SEQ ID NO: 1569458 - RNA, 19 nt, Artificial Sequence
  Description of Artificial Sequence: Synthetic oligonucleotide
  Antisense strand to SEQ ID NO: 1569457
acucauauaaucuggcucc

SEQ ID NO: 1569459 - RNA, 19 nt, Artificial Sequence
  Description of Artificial Sequence: Synthetic oligonucleotide
  Sense strand starting at position 3462 of SEQ ID NO: 1560004
cugugugacccuggccauu

SEQ ID NO: 1569460 - RNA, 19 nt, Artificial Sequence
  Description of Artificial Sequence: Synthetic oligonucleotide
  Antisense strand to SEQ ID NO: 1569459
aauggccagggucacacag

SEQ ID NO: 1569461 - RNA, 19 nt, Artificial Sequence
  Description of Artificial Sequence: Synthetic oligonucleotide
  Sense strand starting at position 3854 of SEQ ID NO: 1560004
acuucuuagggcuguuaca

SEQ ID NO: 1569462 - RNA, 19 nt, Artificial Sequence
  Description of Artificial Sequence: Synthetic oligonucleotide
  Antisense strand to SEQ ID NO: 1569461
uguaacagcccuaagaagu

SEQ ID NO: 1569463 - RNA, 19 nt, Artificial Sequence
  Description of Artificial Sequence: Synthetic oligonucleotide
  Sense strand starting at position 3881 of SEQ ID NO: 1560004
augaguuaauccgugucga

SEQ ID NO: 1569464 - RNA, 19 nt, Artificial Sequence
  Description of Artificial Sequence: Synthetic oligonucleotide
  Antisense strand to SEQ ID NO: 1569463
ucgacacggauuaacucau

SEQ ID NO: 1569465 - RNA, 19 nt, Artificial Sequence
  Description of Artificial Sequence: Synthetic oligonucleotide
  Sense strand starting at position 3882 of SEQ ID NO: 1560004
ugaguuaauccgugucgag

SEQ ID NO: 1569466 - RNA, 19 nt, Artificial Sequence
  Description of Artificial Sequence: Synthetic oligonucleotide
  Antisense strand to SEQ ID NO: 1569465
cucgacacggauuaacuca

SEQ ID NO: 1569467 - RNA, 19 nt, Artificial Sequence
  Description of Artificial Sequence: Synthetic oligonucleotide
  Sense strand starting at position 3883 of SEQ ID NO: 1560004
gaguuaauccgugucgagc

SEQ ID NO: 1569468 - RNA, 19 nt, Artificial Sequence
  Description of Artificial Sequence: Synthetic oligonucleotide
  Antisense strand to SEQ ID NO: 1569467
gcucgacacggauuaacuc

SEQ ID NO: 1569469 - RNA, 19 nt, Artificial Sequence
  Description of Artificial Sequence: Synthetic oligonucleotide
  Sense strand starting at position 3884 of SEQ ID NO: 1560004
aguuaauccgugucgagca

SEQ ID NO: 1569470 - RNA, 19 nt, Artificial Sequence
  Description of Artificial Sequence: Synthetic oligonucleotide
  Antisense strand to SEQ ID NO: 1569469
ugcucgacacggauuaacu

SEQ ID NO: 1569471 - RNA, 19 nt, Artificial Sequence
  Description of Artificial Sequence: Synthetic oligonucleotide
  Sense strand starting at position 3957 of SEQ ID NO: 1560004
ugcuguaauuaagguggau

SEQ ID NO: 1569472 - RNA, 19 nt, Artificial Sequence
  Description of Artificial Sequence: Synthetic oligonucleotide
  Antisense strand to SEQ ID NO: 1569471
auccaccuuaauuacagca

SEQ ID NO: 1569473 - RNA, 19 nt, Artificial Sequence
  Description of Artificial Sequence: Synthetic oligonucleotide
  Sense strand starting at position 3959 of SEQ ID NO: 1560004
cuguaauuaagguggaugu

SEQ ID NO: 1569474 - RNA, 19 nt, Artificial Sequence
  Description of Artificial Sequence: Synthetic oligonucleotide
  Antisense strand to SEQ ID NO: 1569473
acauccaccuuaauuacag

SEQ ID NO: 1569475 - RNA, 19 nt, Artificial Sequence
  Description of Artificial Sequence: Synthetic oligonucleotide
  Sense strand starting at position 3979 of SEQ ID NO: 1560004
uucucauuccauugcugua

SEQ ID NO: 1569476 - RNA, 19 nt, Artificial Sequence
  Description of Artificial Sequence: Synthetic oligonucleotide
  Antisense strand to SEQ ID NO: 1569475
uacagcaauggaaugagaa

SEQ ID NO: 1569477 - RNA, 19 nt, Artificial Sequence
  Description of Artificial Sequence: Synthetic oligonucleotide
  Sense strand starting at position 3981 of SEQ ID NO: 1560004
cucauuccauugcuguaua

SEQ ID NO: 1569478 - RNA, 19 nt, Artificial Sequence
  Description of Artificial Sequence: Synthetic oligonucleotide
  Antisense strand to SEQ ID NO: 1569477
uauacagcaauggaaugag

SEQ ID NO: 1569479 - RNA, 19 nt, Artificial Sequence
  Description of Artificial Sequence: Synthetic oligonucleotide
  Sense strand starting at position 367 of SEQ ID NO: 1560005
gcgaucuuggcuugcugua

SEQ ID NO: 1569480 - RNA, 19 nt, Artificial Sequence
  Description of Artificial Sequence: Synthetic oligonucleotide
  Antisense strand to SEQ ID NO: 1569479
uacagcaagccaagaucgc

SEQ ID NO: 1569481 - RNA, 19 nt, Artificial Sequence
  Description of Artificial Sequence: Synthetic oligonucleotide
  Sense strand starting at position 608 of SEQ ID NO: 1560005
ggcugaaacucuuauaaac

SEQ ID NO: 1569482 - RNA, 19 nt, Artificial Sequence
  Description of Artificial Sequence: Synthetic oligonucleotide
  Antisense strand to SEQ ID NO: 1569481
guuuauaagaguuucagcc

SEQ ID NO: 1569483 - RNA, 19 nt, Artificial Sequence
  Description of Artificial Sequence: Synthetic oligonucleotide
  Sense strand starting at position 656 of SEQ ID NO: 1560005
acacaauucuaacgugacu

SEQ ID NO: 1569484 - RNA, 19 nt, Artificial Sequence
  Description of Artificial Sequence: Synthetic oligonucleotide
  Antisense strand to SEQ ID NO: 1569483
agucacguuagaauugugu

SEQ ID NO: 1569485 - RNA, 19 nt, Artificial Sequence
  Description of Artificial Sequence: Synthetic oligonucleotide
  Sense strand starting at position 661 of SEQ ID NO: 1560005
auucuaacgugacuuugaa

SEQ ID NO: 1569486 - RNA, 19 nt, Artificial Sequence
  Description of Artificial Sequence: Synthetic oligonucleotide
  Antisense strand to SEQ ID NO: 1569485
uucaaagucacguuagaau

SEQ ID NO: 1569487 - RNA, 19 nt, Artificial Sequence
  Description of Artificial Sequence: Synthetic oligonucleotide
  Sense strand starting at position 674 of SEQ ID NO: 1560005
uuugaacucuuaguuggua

SEQ ID NO: 1569488 - RNA, 19 nt, Artificial Sequence
  Description of Artificial Sequence: Synthetic oligonucleotide
  Antisense strand to SEQ ID NO: 1569487
uaccaacuaagaguucaaa

SEQ ID NO: 1569489 - RNA, 19 nt, Artificial Sequence
  Description of Artificial Sequence: Synthetic oligonucleotide
  Sense strand starting at position 675 of SEQ ID NO: 1560005
uugaacucuuaguugguaa

SEQ ID NO: 1569490 - RNA, 19 nt, Artificial Sequence
  Description of Artificial Sequence: Synthetic oligonucleotide
  Antisense strand to SEQ ID NO: 1569489
uuaccaacuaagaguucaa

SEQ ID NO: 1569491 - RNA, 19 nt, Artificial Sequence
  Description of Artificial Sequence: Synthetic oligonucleotide
  Sense strand starting at position 677 of SEQ ID NO: 1560005
gaacucuuaguugguaagu

SEQ ID NO: 1569492 - RNA, 19 nt, Artificial Sequence
  Description of Artificial Sequence: Synthetic oligonucleotide
  Antisense strand to SEQ ID NO: 1569491
acuuaccaacuaagaguuc

SEQ ID NO: 1569493 - RNA, 19 nt, Artificial Sequence
  Description of Artificial Sequence: Synthetic oligonucleotide
  Sense strand starting at position 678 of SEQ ID NO: 1560005
aacucuuaguugguaagua

SEQ ID NO: 1569494 - RNA, 19 nt, Artificial Sequence
  Description of Artificial Sequence: Synthetic oligonucleotide
  Antisense strand to SEQ ID NO: 1569493
uacuuaccaacuaagaguu

SEQ ID NO: 1569495 - RNA, 19 nt, Artificial Sequence
  Description of Artificial Sequence: Synthetic oligonucleotide
  Sense strand starting at position 679 of SEQ ID NO: 1560005
acucuuaguugguaaguaa

SEQ ID NO: 1569496 - RNA, 19 nt, Artificial Sequence
  Description of Artificial Sequence: Synthetic oligonucleotide
  Antisense strand to SEQ ID NO: 1569495
uuacuuaccaacuaagagu

SEQ ID NO: 1569497 - RNA, 19 nt, Artificial Sequence
  Description of Artificial Sequence: Synthetic oligonucleotide
  Sense strand starting at position 686 of SEQ ID NO: 1560005
guugguaaguaauucuaau

SEQ ID NO: 1569498 - RNA, 19 nt, Artificial Sequence
  Description of Artificial Sequence: Synthetic oligonucleotide
  Antisense strand to SEQ ID NO: 1569497
auuagaauuacuuaccaac

SEQ ID NO: 1569499 - RNA, 19 nt, Artificial Sequence
  Description of Artificial Sequence: Synthetic oligonucleotide
  Sense strand starting at position 698 of SEQ ID NO: 1560005
uucuaauacugcugauaug

SEQ ID NO: 1569500 - RNA, 19 nt, Artificial Sequence
  Description of Artificial Sequence: Synthetic oligonucleotide
  Antisense strand to SEQ ID NO: 1569499
cauaucagcaguauuagaa

SEQ ID NO: 1569501 - RNA, 19 nt, Artificial Sequence
  Description of Artificial Sequence: Synthetic oligonucleotide
  Sense strand starting at position 926 of SEQ ID NO: 1560005
cgcuguaugucaccuacaa

SEQ ID NO: 1569502 - RNA, 19 nt, Artificial Sequence
  Description of Artificial Sequence: Synthetic oligonucleotide
  Antisense strand to SEQ ID NO: 1569501
uuguaggugacauacagcg

SEQ ID NO: 1569503 - RNA, 19 nt, Artificial Sequence
  Description of Artificial Sequence: Synthetic oligonucleotide
  Sense strand starting at position 1198 of SEQ ID NO: 1560005
gcacgauccuaguuccuau

SEQ ID NO: 1569504 - RNA, 19 nt, Artificial Sequence
  Description of Artificial Sequence: Synthetic oligonucleotide
  Antisense strand to SEQ ID NO: 1569503
auaggaacuaggaucgugc

SEQ ID NO: 1569505 - RNA, 19 nt, Artificial Sequence
  Description of Artificial Sequence: Synthetic oligonucleotide
  Sense strand starting at position 1271 of SEQ ID NO: 1560005
aggaguguccaccaucaau

SEQ ID NO: 1569506 - RNA, 19 nt, Artificial Sequence
  Description of Artificial Sequence: Synthetic oligonucleotide
  Antisense strand to SEQ ID NO: 1569505
auugaugguggacacuccu

SEQ ID NO: 1569507 - RNA, 19 nt, Artificial Sequence
  Description of Artificial Sequence: Synthetic oligonucleotide
  Sense strand starting at position 1297 of SEQ ID NO: 1560005
gaaggaagguaguucugau

SEQ ID NO: 1569508 - RNA, 19 nt, Artificial Sequence
  Description of Artificial Sequence: Synthetic oligonucleotide
  Antisense strand to SEQ ID NO: 1569507
aucagaacuaccuuccuuc

SEQ ID NO: 1569509 - RNA, 19 nt, Artificial Sequence
  Description of Artificial Sequence: Synthetic oligonucleotide
  Sense strand starting at position 1301 of SEQ ID NO: 1560005
gaagguaguucugauuauu

SEQ ID NO: 1569510 - RNA, 19 nt, Artificial Sequence
  Description of Artificial Sequence: Synthetic oligonucleotide
  Antisense strand to SEQ ID NO: 1569509
aauaaucagaacuaccuuc

SEQ ID NO: 1569511 - RNA, 19 nt, Artificial Sequence
  Description of Artificial Sequence: Synthetic oligonucleotide
  Sense strand starting at position 1304 of SEQ ID NO: 1560005
gguaguucugauuauugua

SEQ ID NO: 1569512 - RNA, 19 nt, Artificial Sequence
  Description of Artificial Sequence: Synthetic oligonucleotide
  Antisense strand to SEQ ID NO: 1569511
uacaauaaucagaacuacc

SEQ ID NO: 1569513 - RNA, 19 nt, Artificial Sequence
  Description of Artificial Sequence: Synthetic oligonucleotide
  Sense strand starting at position 1309 of SEQ ID NO: 1560005
uucugauuauuguacccau

SEQ ID NO: 1569514 - RNA, 19 nt, Artificial Sequence
  Description of Artificial Sequence: Synthetic oligonucleotide
  Antisense strand to SEQ ID NO: 1569513
auggguacaauaaucagaa

SEQ ID NO: 1569515 - RNA, 19 nt, Artificial Sequence
  Description of Artificial Sequence: Synthetic oligonucleotide
  Sense strand starting at position 1362 of SEQ ID NO: 1560005
agcaaaggaucuugcccaa

SEQ ID NO: 1569516 - RNA, 19 nt, Artificial Sequence
  Description of Artificial Sequence: Synthetic oligonucleotide
  Antisense strand to SEQ ID NO: 1569515
uugggcaagauccuuugcu

SEQ ID NO: 1569517 - RNA, 19 nt, Artificial Sequence
  Description of Artificial Sequence: Synthetic oligonucleotide
  Sense strand starting at position 2464 of SEQ ID NO: 1560005
ugagaauuaugcucaggga

SEQ ID NO: 1569518 - RNA, 19 nt, Artificial Sequence
  Description of Artificial Sequence: Synthetic oligonucleotide
  Antisense strand to SEQ ID NO: 1569517
ucccugagcauaauucuca

SEQ ID NO: 1569519 - RNA, 19 nt, Artificial Sequence
  Description of Artificial Sequence: Synthetic oligonucleotide
  Sense strand starting at position 2518 of SEQ ID NO: 1560005
ggaugaaugaagugcucca

SEQ ID NO: 1569520 - RNA, 19 nt, Artificial Sequence
  Description of Artificial Sequence: Synthetic oligonucleotide
  Antisense strand to SEQ ID NO: 1569519
uggagcacuucauucaucc

SEQ ID NO: 1569521 - RNA, 19 nt, Artificial Sequence
  Description of Artificial Sequence: Synthetic oligonucleotide
  Sense strand starting at position 2525 of SEQ ID NO: 1560005
ugaagugcuccaggaaagu

SEQ ID NO: 1569522 - RNA, 19 nt, Artificial Sequence
  Description of Artificial Sequence: Synthetic oligonucleotide
  Antisense strand to SEQ ID NO: 1569521
acuuuccuggagcacuuca

SEQ ID NO: 1569523 - RNA, 19 nt, Artificial Sequence
  Description of Artificial Sequence: Synthetic oligonucleotide
  Sense strand starting at position 2850 of SEQ ID NO: 1560005
uuuggagcuguggauaaau

SEQ ID NO: 1569524 - RNA, 19 nt, Artificial Sequence
  Description of Artificial Sequence: Synthetic oligonucleotide
  Antisense strand to SEQ ID NO: 1569523
auuuauccacagcuccaaa

SEQ ID NO: 1569525 - RNA, 19 nt, Artificial Sequence
  Description of Artificial Sequence: Synthetic oligonucleotide
  Sense strand starting at position 2869 of SEQ ID NO: 1560005
ucaguaucuuaacuguaau

SEQ ID NO: 1569526 - RNA, 19 nt, Artificial Sequence
  Description of Artificial Sequence: Synthetic oligonucleotide
  Antisense strand to SEQ ID NO: 1569525
auuacaguuaagauacuga

SEQ ID NO: 1569527 - RNA, 19 nt, Artificial Sequence
  Description of Artificial Sequence: Synthetic oligonucleotide
  Sense strand starting at position 2872 of SEQ ID NO: 1560005
guaucuuaacuguaauagu

SEQ ID NO: 1569528 - RNA, 19 nt, Artificial Sequence
  Description of Artificial Sequence: Synthetic oligonucleotide
  Antisense strand to SEQ ID NO: 1569527
acuauuacaguuaagauac

SEQ ID NO: 1569529 - RNA, 19 nt, Artificial Sequence
  Description of Artificial Sequence: Synthetic oligonucleotide
  Sense strand starting at position 2913 of SEQ ID NO: 1560005
aucagauuguacgcuuaaa

SEQ ID NO: 1569530 - RNA, 19 nt, Artificial Sequence
  Description of Artificial Sequence: Synthetic oligonucleotide
  Antisense strand to SEQ ID NO: 1569529
uuuaagcguacaaucugau

SEQ ID NO: 1569531 - RNA, 19 nt, Artificial Sequence
  Description of Artificial Sequence: Synthetic oligonucleotide
  Sense strand starting at position 2946 of SEQ ID NO: 1560005
guauaugucuauuauaccu

SEQ ID NO: 1569532 - RNA, 19 nt, Artificial Sequence
  Description of Artificial Sequence: Synthetic oligonucleotide
  Antisense strand to SEQ ID NO: 1569531
agguauaauagacauauac

SEQ ID NO: 1569533 - RNA, 19 nt, Artificial Sequence
  Description of Artificial Sequence: Synthetic oligonucleotide
  Sense strand starting at position 3053 of SEQ ID NO: 1560005
gccugaaacuccuuagcuc

SEQ ID NO: 1569534 - RNA, 19 nt, Artificial Sequence
  Description of Artificial Sequence: Synthetic oligonucleotide
  Antisense strand to SEQ ID NO: 1569533
gagcuaaggaguuucaggc

SEQ ID NO: 1569535 - RNA, 19 nt, Artificial Sequence
  Description of Artificial Sequence: Synthetic oligonucleotide
  Sense strand starting at position 3211 of SEQ ID NO: 1560005
cucugucauccagacuaca

SEQ ID NO: 1569536 - RNA, 19 nt, Artificial Sequence
  Description of Artificial Sequence: Synthetic oligonucleotide
  Antisense strand to SEQ ID NO: 1569535
uguagucuggaugacagag

SEQ ID NO: 1569537 - RNA, 19 nt, Artificial Sequence
  Description of Artificial Sequence: Synthetic oligonucleotide
  Sense strand starting at position 3688 of SEQ ID NO: 1560005
cccaguguugcucaggcua

SEQ ID NO: 1569538 - RNA, 19 nt, Artificial Sequence
  Description of Artificial Sequence: Synthetic oligonucleotide
  Antisense strand to SEQ ID NO: 1569537
uagccugagcaacacuggg

SEQ ID NO: 1569539 - RNA, 19 nt, Artificial Sequence
  Description of Artificial Sequence: Synthetic oligonucleotide
  Sense strand starting at position 3751 of SEQ ID NO: 1560005
guucuaggaugacagacau

SEQ ID NO: 1569540 - RNA, 19 nt, Artificial Sequence
  Description of Artificial Sequence: Synthetic oligonucleotide
  Antisense strand to SEQ ID NO: 1569539
augucugucauccuagaac

SEQ ID NO: 1569541 - RNA, 19 nt, Artificial Sequence
  Description of Artificial Sequence: Synthetic oligonucleotide
  Sense strand starting at position 182 of SEQ ID NO: 1560006
acgugacgucacggaagaa

SEQ ID NO: 1569542 - RNA, 19 nt, Artificial Sequence
  Description of Artificial Sequence: Synthetic oligonucleotide
  Antisense strand to SEQ ID NO: 1569541
uucuuccgugacgucacgu

SEQ ID NO: 1569543 - RNA, 19 nt, Artificial Sequence
  Description of Artificial Sequence: Synthetic oligonucleotide
  Sense strand starting at position 183 of SEQ ID NO: 1560006
cgugacgucacggaagaaa

SEQ ID NO: 1569544 - RNA, 19 nt, Artificial Sequence
  Description of Artificial Sequence: Synthetic oligonucleotide
  Antisense strand to SEQ ID NO: 1569543
uuucuuccgugacgucacg

SEQ ID NO: 1569545 - RNA, 19 nt, Artificial Sequence
  Description of Artificial Sequence: Synthetic oligonucleotide
  Sense strand starting at position 236 of SEQ ID NO: 1560006
gcgggcacucugcagauau

SEQ ID NO: 1569546 - RNA, 19 nt, Artificial Sequence
  Description of Artificial Sequence: Synthetic oligonucleotide
  Antisense strand to SEQ ID NO: 1569545
auaucugcagagugcccgc

SEQ ID NO: 1569547 - RNA, 19 nt, Artificial Sequence
  Description of Artificial Sequence: Synthetic oligonucleotide
  Sense strand starting at position 238 of SEQ ID NO: 1560006
gggcacucugcagauauca

SEQ ID NO: 1569548 - RNA, 19 nt, Artificial Sequence
  Description of Artificial Sequence: Synthetic oligonucleotide
  Antisense strand to SEQ ID NO: 1569547
ugauaucugcagagugccc

SEQ ID NO: 1569549 - RNA, 19 nt, Artificial Sequence
  Description of Artificial Sequence: Synthetic oligonucleotide
  Sense strand starting at position 282 of SEQ ID NO: 1560006
guaguuguuaguuacgguu

SEQ ID NO: 1569550 - RNA, 19 nt, Artificial Sequence
  Description of Artificial Sequence: Synthetic oligonucleotide
  Antisense strand to SEQ ID NO: 1569549
aaccguaacuaacaacuac

SEQ ID NO: 1569551 - RNA, 19 nt, Artificial Sequence
  Description of Artificial Sequence: Synthetic oligonucleotide
  Sense strand starting at position 290 of SEQ ID NO: 1560006
uaguuacgguucucaguuu

SEQ ID NO: 1569552 - RNA, 19 nt, Artificial Sequence
  Description of Artificial Sequence: Synthetic oligonucleotide
  Antisense strand to SEQ ID NO: 1569551
aaacugagaaccguaacua

SEQ ID NO: 1569553 - RNA, 19 nt, Artificial Sequence
  Description of Artificial Sequence: Synthetic oligonucleotide
  Sense strand starting at position 291 of SEQ ID NO: 1560006
aguuacgguucucaguuua

SEQ ID NO: 1569554 - RNA, 19 nt, Artificial Sequence
  Description of Artificial Sequence: Synthetic oligonucleotide
  Antisense strand to SEQ ID NO: 1569553
uaaacugagaaccguaacu

SEQ ID NO: 1569555 - RNA, 19 nt, Artificial Sequence
  Description of Artificial Sequence: Synthetic oligonucleotide
  Sense strand starting at position 296 of SEQ ID NO: 1560006
cgguucucaguuuacagaa

SEQ ID NO: 1569556 - RNA, 19 nt, Artificial Sequence
  Description of Artificial Sequence: Synthetic oligonucleotide
  Antisense strand to SEQ ID NO: 1569555
uucuguaaacugagaaccg

SEQ ID NO: 1569557 - RNA, 19 nt, Artificial Sequence
  Description of Artificial Sequence: Synthetic oligonucleotide
  Sense strand starting at position 345 of SEQ ID NO: 1560006
ggcccuuucugagaucuga

SEQ ID NO: 1569558 - RNA, 19 nt, Artificial Sequence
  Description of Artificial Sequence: Synthetic oligonucleotide
  Antisense strand to SEQ ID NO: 1569557
ucagaucucagaaagggcc

SEQ ID NO: 1569559 - RNA, 19 nt, Artificial Sequence
  Description of Artificial Sequence: Synthetic oligonucleotide
  Sense strand starting at position 478 of SEQ ID NO: 1560006
aaguuugagcggugccaca

SEQ ID NO: 1569560 - RNA, 19 nt, Artificial Sequence
  Description of Artificial Sequence: Synthetic oligonucleotide
  Antisense strand to SEQ ID NO: 1569559
uguggcaccgcucaaacuu

SEQ ID NO: 1569561 - RNA, 19 nt, Artificial Sequence
  Description of Artificial Sequence: Synthetic oligonucleotide
  Sense strand starting at position 605 of SEQ ID NO: 1560006
gacagaacagguugucucu

SEQ ID NO: 1569562 - RNA, 19 nt, Artificial Sequence
  Description of Artificial Sequence: Synthetic oligonucleotide
  Antisense strand to SEQ ID NO: 1569561
agagacaaccuguucuguc

SEQ ID NO: 1569563 - RNA, 19 nt, Artificial Sequence
  Description of Artificial Sequence: Synthetic oligonucleotide
  Sense strand starting at position 612 of SEQ ID NO: 1560006
cagguugucucucaggaga

SEQ ID NO: 1569564 - RNA, 19 nt, Artificial Sequence
  Description of Artificial Sequence: Synthetic oligonucleotide
  Antisense strand to SEQ ID NO: 1569563
ucuccugagagacaaccug

SEQ ID NO: 1569565 - RNA, 19 nt, Artificial Sequence
  Description of Artificial Sequence: Synthetic oligonucleotide
  Sense strand starting at position 615 of SEQ ID NO: 1560006
guugucucucaggagagga

SEQ ID NO: 1569566 - RNA, 19 nt, Artificial Sequence
  Description of Artificial Sequence: Synthetic oligonucleotide
  Antisense strand to SEQ ID NO: 1569565
uccucuccugagagacaac

SEQ ID NO: 1569567 - RNA, 19 nt, Artificial Sequence
  Description of Artificial Sequence: Synthetic oligonucleotide
  Sense strand starting at position 637 of SEQ ID NO: 1560006
ugaggauucuacccacauu

SEQ ID NO: 1569568 - RNA, 19 nt, Artificial Sequence
  Description of Artificial Sequence: Synthetic oligonucleotide
  Antisense strand to SEQ ID NO: 1569567
aauguggguagaauccuca

SEQ ID NO: 1569569 - RNA, 19 nt, Artificial Sequence
  Description of Artificial Sequence: Synthetic oligonucleotide
  Sense strand starting at position 675 of SEQ ID NO: 1560006
gggcuucugucuuucugua

SEQ ID NO: 1569570 - RNA, 19 nt, Artificial Sequence
  Description of Artificial Sequence: Synthetic oligonucleotide
  Antisense strand to SEQ ID NO: 1569569
uacagaaagacagaagccc

SEQ ID NO: 1569571 - RNA, 19 nt, Artificial Sequence
  Description of Artificial Sequence: Synthetic oligonucleotide
  Sense strand starting at position 763 of SEQ ID NO: 1560006
ugauauaccucagugucca

SEQ ID NO: 1569572 - RNA, 19 nt, Artificial Sequence
  Description of Artificial Sequence: Synthetic oligonucleotide
  Antisense strand to SEQ ID NO: 1569571
uggacacugagguauauca

SEQ ID NO: 1569573 - RNA, 19 nt, Artificial Sequence
  Description of Artificial Sequence: Synthetic oligonucleotide
  Sense strand starting at position 795 of SEQ ID NO: 1560006
gcuggugucaccugaggca

SEQ ID NO: 1569574 - RNA, 19 nt, Artificial Sequence
  Description of Artificial Sequence: Synthetic oligonucleotide
  Antisense strand to SEQ ID NO: 1569573
ugccucaggugacaccagc

SEQ ID NO: 1569575 - RNA, 19 nt, Artificial Sequence
  Description of Artificial Sequence: Synthetic oligonucleotide
  Sense strand starting at position 980 of SEQ ID NO: 1560006
gcggaaagacaucauguaa

SEQ ID NO: 1569576 - RNA, 19 nt, Artificial Sequence
  Description of Artificial Sequence: Synthetic oligonucleotide
  Antisense strand to SEQ ID NO: 1569575
uuacaugaugucuuuccgc

SEQ ID NO: 1569577 - RNA, 19 nt, Artificial Sequence
  Description of Artificial Sequence: Synthetic oligonucleotide
  Sense strand starting at position 995 of SEQ ID NO: 1560006
guaaaugacucgcucauaa

SEQ ID NO: 1569578 - RNA, 19 nt, Artificial Sequence
  Description of Artificial Sequence: Synthetic oligonucleotide
  Antisense strand to SEQ ID NO: 1569577
uuaugagcgagucauuuac

SEQ ID NO: 1569579 - RNA, 19 nt, Artificial Sequence
  Description of Artificial Sequence: Synthetic oligonucleotide
  Sense strand starting at position 1057 of SEQ ID NO: 1560006
gcuccuuuccaucacagua

SEQ ID NO: 1569580 - RNA, 19 nt, Artificial Sequence
  Description of Artificial Sequence: Synthetic oligonucleotide
  Antisense strand to SEQ ID NO: 1569579
uacugugauggaaaggagc

SEQ ID NO: 1569581 - RNA, 19 nt, Artificial Sequence
  Description of Artificial Sequence: Synthetic oligonucleotide
  Sense strand starting at position 1146 of SEQ ID NO: 1560006
ggaaaccuaucccagugau

SEQ ID NO: 1569582 - RNA, 19 nt, Artificial Sequence
  Description of Artificial Sequence: Synthetic oligonucleotide
  Antisense strand to SEQ ID NO: 1569581
aucacugggauagguuucc

SEQ ID NO: 1569583 - RNA, 19 nt, Artificial Sequence
  Description of Artificial Sequence: Synthetic oligonucleotide
  Sense strand starting at position 1160 of SEQ ID NO: 1560006
gugaucucgccuuacacuu

SEQ ID NO: 1569584 - RNA, 19 nt, Artificial Sequence
  Description of Artificial Sequence: Synthetic oligonucleotide
  Antisense strand to SEQ ID NO: 1569583
aaguguaaggcgagaucac

SEQ ID NO: 1569585 - RNA, 19 nt, Artificial Sequence
  Description of Artificial Sequence: Synthetic oligonucleotide
  Sense strand starting at position 1228 of SEQ ID NO: 1560006
gaacaagaguagucgcuaa

SEQ ID NO: 1569586 - RNA, 19 nt, Artificial Sequence
  Description of Artificial Sequence: Synthetic oligonucleotide
  Antisense strand to SEQ ID NO: 1569585
uuagcgacuacucuuguuc

SEQ ID NO: 1569587 - RNA, 19 nt, Artificial Sequence
  Description of Artificial Sequence: Synthetic oligonucleotide
  Sense strand starting at position 1232 of SEQ ID NO: 1560006
aagaguagucgcuaauaug

SEQ ID NO: 1569588 - RNA, 19 nt, Artificial Sequence
  Description of Artificial Sequence: Synthetic oligonucleotide
  Antisense strand to SEQ ID NO: 1569587
cauauuagcgacuacucuu

SEQ ID NO: 1569589 - RNA, 19 nt, Artificial Sequence
  Description of Artificial Sequence: Synthetic oligonucleotide
  Sense strand starting at position 1239 of SEQ ID NO: 1560006
gucgcuaauaugggaacua

SEQ ID NO: 1569590 - RNA, 19 nt, Artificial Sequence
  Description of Artificial Sequence: Synthetic oligonucleotide
  Antisense strand to SEQ ID NO: 1569589
uaguucccauauuagcgac

SEQ ID NO: 1569591 - RNA, 19 nt, Artificial Sequence
  Description of Artificial Sequence: Synthetic oligonucleotide
  Sense strand starting at position 1419 of SEQ ID NO: 1560006
ugauuaagccugcgccaaa

SEQ ID NO: 1569592 - RNA, 19 nt, Artificial Sequence
  Description of Artificial Sequence: Synthetic oligonucleotide
  Antisense strand to SEQ ID NO: 1569591
uuuggcgcaggcuuaauca

SEQ ID NO: 1569593 - RNA, 19 nt, Artificial Sequence
  Description of Artificial Sequence: Synthetic oligonucleotide
  Sense strand starting at position 2464 of SEQ ID NO: 1560006
agagccuuaaugugauaga

SEQ ID NO: 1569594 - RNA, 19 nt, Artificial Sequence
  Description of Artificial Sequence: Synthetic oligonucleotide
  Antisense strand to SEQ ID NO: 1569593
ucuaucacauuaaggcucu

SEQ ID NO: 1569595 - RNA, 19 nt, Artificial Sequence
  Description of Artificial Sequence: Synthetic oligonucleotide
  Sense strand starting at position 2465 of SEQ ID NO: 1560006
gagccuuaaugugauagau

SEQ ID NO: 1569596 - RNA, 19 nt, Artificial Sequence
  Description of Artificial Sequence: Synthetic oligonucleotide
  Antisense strand to SEQ ID NO: 1569595
aucuaucacauuaaggcuc

SEQ ID NO: 1569597 - RNA, 19 nt, Artificial Sequence
  Description of Artificial Sequence: Synthetic oligonucleotide
  Sense strand starting at position 2467 of SEQ ID NO: 1560006
gccuuaaugugauagauaa

SEQ ID NO: 1569598 - RNA, 19 nt, Artificial Sequence
  Description of Artificial Sequence: Synthetic oligonucleotide
  Antisense strand to SEQ ID NO: 1569597
uuaucuaucacauuaaggc

SEQ ID NO: 1569599 - RNA, 19 nt, Artificial Sequence
  Description of Artificial Sequence: Synthetic oligonucleotide
  Sense strand starting at position 3139 of SEQ ID NO: 1560006
acugguguuuacuugaaau

SEQ ID NO: 1569600 - RNA, 19 nt, Artificial Sequence
  Description of Artificial Sequence: Synthetic oligonucleotide
  Antisense strand to SEQ ID NO: 1569599
auuucaaguaaacaccagu

SEQ ID NO: 1569601 - RNA, 19 nt, Artificial Sequence
  Description of Artificial Sequence: Synthetic oligonucleotide
  Sense strand starting at position 3141 of SEQ ID NO: 1560006
ugguguuuacuugaaauua

SEQ ID NO: 1569602 - RNA, 19 nt, Artificial Sequence
  Description of Artificial Sequence: Synthetic oligonucleotide
  Antisense strand to SEQ ID NO: 1569601
uaauuucaaguaaacacca

SEQ ID NO: 1569603 - RNA, 19 nt, Artificial Sequence
  Description of Artificial Sequence: Synthetic oligonucleotide
  Sense strand starting at position 3492 of SEQ ID NO: 1560006
acuguacuguugcauaaau

SEQ ID NO: 1569604 - RNA, 19 nt, Artificial Sequence
  Description of Artificial Sequence: Synthetic oligonucleotide
  Antisense strand to SEQ ID NO: 1569603
auuuaugcaacaguacagu

SEQ ID NO: 1569605 - RNA, 19 nt, Artificial Sequence
  Description of Artificial Sequence: Synthetic oligonucleotide
  Sense strand starting at position 3501 of SEQ ID NO: 1560006
uugcauaaaugcuauuuga

SEQ ID NO: 1569606 - RNA, 19 nt, Artificial Sequence
  Description of Artificial Sequence: Synthetic oligonucleotide
  Antisense strand to SEQ ID NO: 1569605
ucaaauagcauuuaugcaa

SEQ ID NO: 1569607 - RNA, 19 nt, Artificial Sequence
  Description of Artificial Sequence: Synthetic oligonucleotide
  Sense strand starting at position 3546 of SEQ ID NO: 1560006
aguaccaauuaguaggauu

SEQ ID NO: 1569608 - RNA, 19 nt, Artificial Sequence
  Description of Artificial Sequence: Synthetic oligonucleotide
  Antisense strand to SEQ ID NO: 1569607
aauccuacuaauugguacu

SEQ ID NO: 1569609 - RNA, 19 nt, Artificial Sequence
  Description of Artificial Sequence: Synthetic oligonucleotide
  Sense strand starting at position 3549 of SEQ ID NO: 1560006
accaauuaguaggauuaaa

SEQ ID NO: 1569610 - RNA, 19 nt, Artificial Sequence
  Description of Artificial Sequence: Synthetic oligonucleotide
  Antisense strand to SEQ ID NO: 1569609
uuuaauccuacuaauuggu

SEQ ID NO: 1569611 - RNA, 19 nt, Artificial Sequence
  Description of Artificial Sequence: Synthetic oligonucleotide
  Sense strand starting at position 3559 of SEQ ID NO: 1560006
aggauuaaacaguaugugu

SEQ ID NO: 1569612 - RNA, 19 nt, Artificial Sequence
  Description of Artificial Sequence: Synthetic oligonucleotide
  Antisense strand to SEQ ID NO: 1569611
acacauacuguuuaauccu

SEQ ID NO: 1569613 - RNA, 19 nt, Artificial Sequence
  Description of Artificial Sequence: Synthetic oligonucleotide
  Sense strand starting at position 3561 of SEQ ID NO: 1560006
gauuaaacaguauguguga

SEQ ID NO: 1569614 - RNA, 19 nt, Artificial Sequence
  Description of Artificial Sequence: Synthetic oligonucleotide
  Antisense strand to SEQ ID NO: 1569613
ucacacauacuguuuaauc

SEQ ID NO: 1569615 - RNA, 19 nt, Artificial Sequence
  Description of Artificial Sequence: Synthetic oligonucleotide
  Sense strand starting at position 3564 of SEQ ID NO: 1560006
uaaacaguaugugugacaa

SEQ ID NO: 1569616 - RNA, 19 nt, Artificial Sequence
  Description of Artificial Sequence: Synthetic oligonucleotide
  Antisense strand to SEQ ID NO: 1569615
uugucacacauacuguuua

SEQ ID NO: 1569617 - RNA, 19 nt, Artificial Sequence
  Description of Artificial Sequence: Synthetic oligonucleotide
  Sense strand starting at position 3667 of SEQ ID NO: 1560006
agcuuauauuguugcauau

SEQ ID NO: 1569618 - RNA, 19 nt, Artificial Sequence
  Description of Artificial Sequence: Synthetic oligonucleotide
  Antisense strand to SEQ ID NO: 1569617
auaugcaacaauauaagcu

SEQ ID NO: 1569619 - RNA, 19 nt, Artificial Sequence
  Description of Artificial Sequence: Synthetic oligonucleotide
  Sense strand starting at position 93 of SEQ ID NO: 1560007
ggucaaguccugugcagga

SEQ ID NO: 1569620 - RNA, 19 nt, Artificial Sequence
  Description of Artificial Sequence: Synthetic oligonucleotide
  Antisense strand to SEQ ID NO: 1569619
uccugcacaggacuugacc

SEQ ID NO: 1569621 - RNA, 19 nt, Artificial Sequence
  Description of Artificial Sequence: Synthetic oligonucleotide
  Sense strand starting at position 172 of SEQ ID NO: 1560007
ccagaaaccuuaguugaag

SEQ ID NO: 1569622 - RNA, 19 nt, Artificial Sequence
  Description of Artificial Sequence: Synthetic oligonucleotide
  Antisense strand to SEQ ID NO: 1569621
cuucaacuaagguuucugg

SEQ ID NO: 1569623 - RNA, 19 nt, Artificial Sequence
  Description of Artificial Sequence: Synthetic oligonucleotide
  Sense strand starting at position 340 of SEQ ID NO: 1560007
ccuggaauccugggucuga

SEQ ID NO: 1569624 - RNA, 19 nt, Artificial Sequence
  Description of Artificial Sequence: Synthetic oligonucleotide
  Antisense strand to SEQ ID NO: 1569623
ucagacccaggauuccagg

SEQ ID NO: 1569625 - RNA, 19 nt, Artificial Sequence
  Description of Artificial Sequence: Synthetic oligonucleotide
  Sense strand starting at position 485 of SEQ ID NO: 1560007
ggauuccuggucugaggga

SEQ ID NO: 1569626 - RNA, 19 nt, Artificial Sequence
  Description of Artificial Sequence: Synthetic oligonucleotide
  Antisense strand to SEQ ID NO: 1569625
ucccucagaccaggaaucc

SEQ ID NO: 1569627 - RNA, 19 nt, Artificial Sequence
  Description of Artificial Sequence: Synthetic oligonucleotide
  Sense strand starting at position 486 of SEQ ID NO: 1560007
gauuccuggucugagggaa

SEQ ID NO: 1569628 - RNA, 19 nt, Artificial Sequence
  Description of Artificial Sequence: Synthetic oligonucleotide
  Antisense strand to SEQ ID NO: 1569627
uucccucagaccaggaauc

SEQ ID NO: 1569629 - RNA, 19 nt, Artificial Sequence
  Description of Artificial Sequence: Synthetic oligonucleotide
  Sense strand starting at position 628 of SEQ ID NO: 1560007
gacuccuggucugagggaa

SEQ ID NO: 1569630 - RNA, 19 nt, Artificial Sequence
  Description of Artificial Sequence: Synthetic oligonucleotide
  Antisense strand to SEQ ID NO: 1569629
uucccucagaccaggaguc

SEQ ID NO: 1569631 - RNA, 19 nt, Artificial Sequence
  Description of Artificial Sequence: Synthetic oligonucleotide
  Sense strand starting at position 769 of SEQ ID NO: 1560007
ccugcuugcccuugacaca

SEQ ID NO: 1569632 - RNA, 19 nt, Artificial Sequence
  Description of Artificial Sequence: Synthetic oligonucleotide
  Antisense strand to SEQ ID NO: 1569631
ugugucaagggcaagcagg

SEQ ID NO: 1569633 - RNA, 19 nt, Artificial Sequence
  Description of Artificial Sequence: Synthetic oligonucleotide
  Sense strand starting at position 1041 of SEQ ID NO: 1560007
ggcccacaucucugaccau

SEQ ID NO: 1569634 - RNA, 19 nt, Artificial Sequence
  Description of Artificial Sequence: Synthetic oligonucleotide
  Antisense strand to SEQ ID NO: 1569633
auggucagagaugugggcc

SEQ ID NO: 1569635 - RNA, 19 nt, Artificial Sequence
  Description of Artificial Sequence: Synthetic oligonucleotide
  Sense strand starting at position 1117 of SEQ ID NO: 1560007
ugugguugccgcuagauag

SEQ ID NO: 1569636 - RNA, 19 nt, Artificial Sequence
  Description of Artificial Sequence: Synthetic oligonucleotide
  Antisense strand to SEQ ID NO: 1569635
cuaucuagcggcaaccaca

SEQ ID NO: 1569637 - RNA, 19 nt, Artificial Sequence
  Description of Artificial Sequence: Synthetic oligonucleotide
  Sense strand starting at position 1123 of SEQ ID NO: 1560007
ugccgcuagauaggaaaua

SEQ ID NO: 1569638 - RNA, 19 nt, Artificial Sequence
  Description of Artificial Sequence: Synthetic oligonucleotide
  Antisense strand to SEQ ID NO: 1569637
uauuuccuaucuagcggca

SEQ ID NO: 1569639 - RNA, 19 nt, Artificial Sequence
  Description of Artificial Sequence: Synthetic oligonucleotide
  Sense strand starting at position 1124 of SEQ ID NO: 1560007
gccgcuagauaggaaauau

SEQ ID NO: 1569640 - RNA, 19 nt, Artificial Sequence
  Description of Artificial Sequence: Synthetic oligonucleotide
  Antisense strand to SEQ ID NO: 1569639
auauuuccuaucuagcggc

SEQ ID NO: 1569641 - RNA, 19 nt, Artificial Sequence
  Description of Artificial Sequence: Synthetic oligonucleotide
  Sense strand starting at position 1133 of SEQ ID NO: 1560007
uaggaaauaucuguccuug

SEQ ID NO: 1569642 - RNA, 19 nt, Artificial Sequence
  Description of Artificial Sequence: Synthetic oligonucleotide
  Antisense strand to SEQ ID NO: 1569641
caaggacagauauuuccua

SEQ ID NO: 1569643 - RNA, 19 nt, Artificial Sequence
  Description of Artificial Sequence: Synthetic oligonucleotide
  Sense strand starting at position 1135 of SEQ ID NO: 1560007
ggaaauaucuguccuugug

SEQ ID NO: 1569644 - RNA, 19 nt, Artificial Sequence
  Description of Artificial Sequence: Synthetic oligonucleotide
  Antisense strand to SEQ ID NO: 1569643
cacaaggacagauauuucc

SEQ ID NO: 1569645 - RNA, 19 nt, Artificial Sequence
  Description of Artificial Sequence: Synthetic oligonucleotide
  Sense strand starting at position 1199 of SEQ ID NO: 1560007
cuccaugugucucagccau

SEQ ID NO: 1569646 - RNA, 19 nt, Artificial Sequence
  Description of Artificial Sequence: Synthetic oligonucleotide
  Antisense strand to SEQ ID NO: 1569645
auggcugagacacauggag

SEQ ID NO: 1569647 - RNA, 19 nt, Artificial Sequence
  Description of Artificial Sequence: Synthetic oligonucleotide
  Sense strand starting at position 1605 of SEQ ID NO: 1560007
gccuuuauccgccaucuuu

SEQ ID NO: 1569648 - RNA, 19 nt, Artificial Sequence
  Description of Artificial Sequence: Synthetic oligonucleotide
  Antisense strand to SEQ ID NO: 1569647
aaagauggcggauaaaggc

SEQ ID NO: 1569649 - RNA, 19 nt, Artificial Sequence
  Description of Artificial Sequence: Synthetic oligonucleotide
  Sense strand starting at position 1793 of SEQ ID NO: 1560007
gcggcaucugcuggagaga

SEQ ID NO: 1569650 - RNA, 19 nt, Artificial Sequence
  Description of Artificial Sequence: Synthetic oligonucleotide
  Antisense strand to SEQ ID NO: 1569649
ucucuccagcagaugccgc

SEQ ID NO: 1569651 - RNA, 19 nt, Artificial Sequence
  Description of Artificial Sequence: Synthetic oligonucleotide
  Sense strand starting at position 2121 of SEQ ID NO: 1560007
gaggucaucugguguccau

SEQ ID NO: 1569652 - RNA, 19 nt, Artificial Sequence
  Description of Artificial Sequence: Synthetic oligonucleotide
  Antisense strand to SEQ ID NO: 1569651
auggacaccagaugaccuc

SEQ ID NO: 1569653 - RNA, 19 nt, Artificial Sequence
  Description of Artificial Sequence: Synthetic oligonucleotide
  Sense strand starting at position 2956 of SEQ ID NO: 1560007
cccagagaccuccgcaaua

SEQ ID NO: 1569654 - RNA, 19 nt, Artificial Sequence
  Description of Artificial Sequence: Synthetic oligonucleotide
  Antisense strand to SEQ ID NO: 1569653
uauugcggaggucucuggg

SEQ ID NO: 1569655 - RNA, 19 nt, Artificial Sequence
  Description of Artificial Sequence: Synthetic oligonucleotide
  Sense strand starting at position 3043 of SEQ ID NO: 1560007
cggaaauccucucauugug

SEQ ID NO: 1569656 - RNA, 19 nt, Artificial Sequence
  Description of Artificial Sequence: Synthetic oligonucleotide
  Antisense strand to SEQ ID NO: 1569655
cacaaugagaggauuuccg

SEQ ID NO: 1569657 - RNA, 19 nt, Artificial Sequence
  Description of Artificial Sequence: Synthetic oligonucleotide
  Sense strand starting at position 3124 of SEQ ID NO: 1560007
ggagggaagcccggugaau

SEQ ID NO: 1569658 - RNA, 19 nt, Artificial Sequence
  Description of Artificial Sequence: Synthetic oligonucleotide
  Antisense strand to SEQ ID NO: 1569657
auucaccgggcuucccucc

SEQ ID NO: 1569659 - RNA, 19 nt, Artificial Sequence
  Description of Artificial Sequence: Synthetic oligonucleotide
  Sense strand starting at position 3288 of SEQ ID NO: 1560007
cugagauucccucacugug

SEQ ID NO: 1569660 - RNA, 19 nt, Artificial Sequence
  Description of Artificial Sequence: Synthetic oligonucleotide
  Antisense strand to SEQ ID NO: 1569659
cacagugagggaaucucag

SEQ ID NO: 1569661 - RNA, 19 nt, Artificial Sequence
  Description of Artificial Sequence: Synthetic oligonucleotide
  Sense strand starting at position 3323 of SEQ ID NO: 1560007
gccugagcuauccaaugag

SEQ ID NO: 1569662 - RNA, 19 nt, Artificial Sequence
  Description of Artificial Sequence: Synthetic oligonucleotide
  Antisense strand to SEQ ID NO: 1569661
cucauuggauagcucaggc

SEQ ID NO: 1569663 - RNA, 19 nt, Artificial Sequence
  Description of Artificial Sequence: Synthetic oligonucleotide
  Sense strand starting at position 3326 of SEQ ID NO: 1560007
ugagcuauccaaugagcca

SEQ ID NO: 1569664 - RNA, 19 nt, Artificial Sequence
  Description of Artificial Sequence: Synthetic oligonucleotide
  Antisense strand to SEQ ID NO: 1569663
uggcucauuggauagcuca

SEQ ID NO: 1569665 - RNA, 19 nt, Artificial Sequence
  Description of Artificial Sequence: Synthetic oligonucleotide
  Sense strand starting at position 3826 of SEQ ID NO: 1560007
uguggacaucguugcauga

SEQ ID NO: 1569666 - RNA, 19 nt, Artificial Sequence
  Description of Artificial Sequence: Synthetic oligonucleotide
  Antisense strand to SEQ ID NO: 1569665
ucaugcaacgauguccaca

SEQ ID NO: 1569667 - RNA, 19 nt, Artificial Sequence
  Description of Artificial Sequence: Synthetic oligonucleotide
  Sense strand starting at position 3887 of SEQ ID NO: 1560007
uguguuugggcaugagcaa

SEQ ID NO: 1569668 - RNA, 19 nt, Artificial Sequence
  Description of Artificial Sequence: Synthetic oligonucleotide
  Antisense strand to SEQ ID NO: 1569667
uugcucaugcccaaacaca

SEQ ID NO: 1569669 - RNA, 19 nt, Artificial Sequence
  Description of Artificial Sequence: Synthetic oligonucleotide
  Sense strand starting at position 3924 of SEQ ID NO: 1560007
ugccaaugcuaacugugaa

SEQ ID NO: 1569670 - RNA, 19 nt, Artificial Sequence
  Description of Artificial Sequence: Synthetic oligonucleotide
  Antisense strand to SEQ ID NO: 1569669
uucacaguuagcauuggca

SEQ ID NO: 1569671 - RNA, 19 nt, Artificial Sequence
  Description of Artificial Sequence: Synthetic oligonucleotide
  Sense strand starting at position 3931 of SEQ ID NO: 1560007
gcuaacugugaaugacaga

SEQ ID NO: 1569672 - RNA, 19 nt, Artificial Sequence
  Description of Artificial Sequence: Synthetic oligonucleotide
  Antisense strand to SEQ ID NO: 1569671
ucugucauucacaguuagc

SEQ ID NO: 1569673 - RNA, 19 nt, Artificial Sequence
  Description of Artificial Sequence: Synthetic oligonucleotide
  Sense strand starting at position 232 of SEQ ID NO: 1560008
ggcccacaucucugaccau

SEQ ID NO: 1569674 - RNA, 19 nt, Artificial Sequence
  Description of Artificial Sequence: Synthetic oligonucleotide
  Antisense strand to SEQ ID NO: 1569673
auggucagagaugugggcc

SEQ ID NO: 1569675 - RNA, 19 nt, Artificial Sequence
  Description of Artificial Sequence: Synthetic oligonucleotide
  Sense strand starting at position 308 of SEQ ID NO: 1560008
ugugguugccgcuagauag

SEQ ID NO: 1569676 - RNA, 19 nt, Artificial Sequence
  Description of Artificial Sequence: Synthetic oligonucleotide
  Antisense strand to SEQ ID NO: 1569675
cuaucuagcggcaaccaca

SEQ ID NO: 1569677 - RNA, 19 nt, Artificial Sequence
  Description of Artificial Sequence: Synthetic oligonucleotide
  Sense strand starting at position 314 of SEQ ID NO: 1560008
ugccgcuagauaggaaaua

SEQ ID NO: 1569678 - RNA, 19 nt, Artificial Sequence
  Description of Artificial Sequence: Synthetic oligonucleotide
  Antisense strand to SEQ ID NO: 1569677
uauuuccuaucuagcggca

SEQ ID NO: 1569679 - RNA, 19 nt, Artificial Sequence
  Description of Artificial Sequence: Synthetic oligonucleotide
  Sense strand starting at position 315 of SEQ ID NO: 1560008
gccgcuagauaggaaauau

SEQ ID NO: 1569680 - RNA, 19 nt, Artificial Sequence
  Description of Artificial Sequence: Synthetic oligonucleotide
  Antisense strand to SEQ ID NO: 1569679
auauuuccuaucuagcggc

SEQ ID NO: 1569681 - RNA, 19 nt, Artificial Sequence
  Description of Artificial Sequence: Synthetic oligonucleotide
  Sense strand starting at position 324 of SEQ ID NO: 1560008
uaggaaauaucuguccuug

SEQ ID NO: 1569682 - RNA, 19 nt, Artificial Sequence
  Description of Artificial Sequence: Synthetic oligonucleotide
  Antisense strand to SEQ ID NO: 1569681
caaggacagauauuuccua

SEQ ID NO: 1569683 - RNA, 19 nt, Artificial Sequence
  Description of Artificial Sequence: Synthetic oligonucleotide
  Sense strand starting at position 326 of SEQ ID NO: 1560008
ggaaauaucuguccuugug

SEQ ID NO: 1569684 - RNA, 19 nt, Artificial Sequence
  Description of Artificial Sequence: Synthetic oligonucleotide
  Antisense strand to SEQ ID NO: 1569683
cacaaggacagauauuucc

SEQ ID NO: 1569685 - RNA, 19 nt, Artificial Sequence
  Description of Artificial Sequence: Synthetic oligonucleotide
  Sense strand starting at position 390 of SEQ ID NO: 1560008
cuccaugugucucagccau

SEQ ID NO: 1569686 - RNA, 19 nt, Artificial Sequence
  Description of Artificial Sequence: Synthetic oligonucleotide
  Antisense strand to SEQ ID NO: 1569685
auggcugagacacauggag

SEQ ID NO: 1569687 - RNA, 19 nt, Artificial Sequence
  Description of Artificial Sequence: Synthetic oligonucleotide
  Sense strand starting at position 796 of SEQ ID NO: 1560008
gccuuuauccgccaucuuu

SEQ ID NO: 1569688 - RNA, 19 nt, Artificial Sequence
  Description of Artificial Sequence: Synthetic oligonucleotide
  Antisense strand to SEQ ID NO: 1569687
aaagauggcggauaaaggc

SEQ ID NO: 1569689 - RNA, 19 nt, Artificial Sequence
  Description of Artificial Sequence: Synthetic oligonucleotide
  Sense strand starting at position 984 of SEQ ID NO: 1560008
gcggcaucugcuggagaga

SEQ ID NO: 1569690 - RNA, 19 nt, Artificial Sequence
  Description of Artificial Sequence: Synthetic oligonucleotide
  Antisense strand to SEQ ID NO: 1569689
ucucuccagcagaugccgc

SEQ ID NO: 1569691 - RNA, 19 nt, Artificial Sequence
  Description of Artificial Sequence: Synthetic oligonucleotide
  Sense strand starting at position 1312 of SEQ ID NO: 1560008
gaggucaucugguguccau

SEQ ID NO: 1569692 - RNA, 19 nt, Artificial Sequence
  Description of Artificial Sequence: Synthetic oligonucleotide
  Antisense strand to SEQ ID NO: 1569691
auggacaccagaugaccuc

SEQ ID NO: 1569693 - RNA, 19 nt, Artificial Sequence
  Description of Artificial Sequence: Synthetic oligonucleotide
  Sense strand starting at position 2147 of SEQ ID NO: 1560008
cccagagaccuccgcaaua

SEQ ID NO: 1569694 - RNA, 19 nt, Artificial Sequence
  Description of Artificial Sequence: Synthetic oligonucleotide
  Antisense strand to SEQ ID NO: 1569693
uauugcggaggucucuggg

SEQ ID NO: 1569695 - RNA, 19 nt, Artificial Sequence
  Description of Artificial Sequence: Synthetic oligonucleotide
  Sense strand starting at position 2234 of SEQ ID NO: 1560008
cggaaauccucucauugug

SEQ ID NO: 1569696 - RNA, 19 nt, Artificial Sequence
  Description of Artificial Sequence: Synthetic oligonucleotide
  Antisense strand to SEQ ID NO: 1569695
cacaaugagaggauuuccg

SEQ ID NO: 1569697 - RNA, 19 nt, Artificial Sequence
  Description of Artificial Sequence: Synthetic oligonucleotide
  Sense strand starting at position 2315 of SEQ ID NO: 1560008
ggagggaagcccggugaau

SEQ ID NO: 1569698 - RNA, 19 nt, Artificial Sequence
  Description of Artificial Sequence: Synthetic oligonucleotide
  Antisense strand to SEQ ID NO: 1569697
auucaccgggcuucccucc

SEQ ID NO: 1569699 - RNA, 19 nt, Artificial Sequence
  Description of Artificial Sequence: Synthetic oligonucleotide
  Sense strand starting at position 2479 of SEQ ID NO: 1560008
cugagauucccucacugug

SEQ ID NO: 1569700 - RNA, 19 nt, Artificial Sequence
  Description of Artificial Sequence: Synthetic oligonucleotide
  Antisense strand to SEQ ID NO: 1569699
cacagugagggaaucucag

SEQ ID NO: 1569701 - RNA, 19 nt, Artificial Sequence
  Description of Artificial Sequence: Synthetic oligonucleotide
  Sense strand starting at position 2514 of SEQ ID NO: 1560008
gccugagcuauccaaugag

SEQ ID NO: 1569702 - RNA, 19 nt, Artificial Sequence
  Description of Artificial Sequence: Synthetic oligonucleotide
  Antisense strand to SEQ ID NO: 1569701
cucauuggauagcucaggc

SEQ ID NO: 1569703 - RNA, 19 nt, Artificial Sequence
  Description of Artificial Sequence: Synthetic oligonucleotide
  Sense strand starting at position 2517 of SEQ ID NO: 1560008
ugagcuauccaaugagcca

SEQ ID NO: 1569704 - RNA, 19 nt, Artificial Sequence
  Description of Artificial Sequence: Synthetic oligonucleotide
  Antisense strand to SEQ ID NO: 1569703
uggcucauuggauagcuca

SEQ ID NO: 1569705 - RNA, 19 nt, Artificial Sequence
  Description of Artificial Sequence: Synthetic oligonucleotide
  Sense strand starting at position 3017 of SEQ ID NO: 1560008
uguggacaucguugcauga

SEQ ID NO: 1569706 - RNA, 19 nt, Artificial Sequence
  Description of Artificial Sequence: Synthetic oligonucleotide
  Antisense strand to SEQ ID NO: 1569705
ucaugcaacgauguccaca

SEQ ID NO: 1569707 - RNA, 19 nt, Artificial Sequence
  Description of Artificial Sequence: Synthetic oligonucleotide
  Sense strand starting at position 3078 of SEQ ID NO: 1560008
uguguuugggcaugagcaa

SEQ ID NO: 1569708 - RNA, 19 nt, Artificial Sequence
  Description of Artificial Sequence: Synthetic oligonucleotide
  Antisense strand to SEQ ID NO: 1569707
uugcucaugcccaaacaca

SEQ ID NO: 1569709 - RNA, 19 nt, Artificial Sequence
  Description of Artificial Sequence: Synthetic oligonucleotide
  Sense strand starting at position 3115 of SEQ ID NO: 1560008
ugccaaugcuaacugugaa

SEQ ID NO: 1569710 - RNA, 19 nt, Artificial Sequence
  Description of Artificial Sequence: Synthetic oligonucleotide
  Antisense strand to SEQ ID NO: 1569709
uucacaguuagcauuggca

SEQ ID NO: 1569711 - RNA, 19 nt, Artificial Sequence
  Description of Artificial Sequence: Synthetic oligonucleotide
  Sense strand starting at position 3122 of SEQ ID NO: 1560008
gcuaacugugaaugacaga

SEQ ID NO: 1569712 - RNA, 19 nt, Artificial Sequence
  Description of Artificial Sequence: Synthetic oligonucleotide
  Antisense strand to SEQ ID NO: 1569711
ucugucauucacaguuagc

SEQ ID NO: 1569713 - RNA, 19 nt, Artificial Sequence
  Description of Artificial Sequence: Synthetic oligonucleotide
  Sense strand starting at position 3235 of SEQ ID NO: 1560008
gcagcacuaucgcagacau

SEQ ID NO: 1569714 - RNA, 19 nt, Artificial Sequence
  Description of Artificial Sequence: Synthetic oligonucleotide
  Antisense strand to SEQ ID NO: 1569713
augucugcgauagugcugc

SEQ ID NO: 1569715 - RNA, 19 nt, Artificial Sequence
  Description of Artificial Sequence: Synthetic oligonucleotide
  Sense strand starting at position 3237 of SEQ ID NO: 1560008
agcacuaucgcagacaucu

SEQ ID NO: 1569716 - RNA, 19 nt, Artificial Sequence
  Description of Artificial Sequence: Synthetic oligonucleotide
  Antisense strand to SEQ ID NO: 1569715
agaugucugcgauagugcu

SEQ ID NO: 1569717 - RNA, 19 nt, Artificial Sequence
  Description of Artificial Sequence: Synthetic oligonucleotide
  Sense strand starting at position 3245 of SEQ ID NO: 1560008
cgcagacaucuuuguugca

SEQ ID NO: 1569718 - RNA, 19 nt, Artificial Sequence
  Description of Artificial Sequence: Synthetic oligonucleotide
  Antisense strand to SEQ ID NO: 1569717
ugcaacaaagaugucugcg

SEQ ID NO: 1569719 - RNA, 19 nt, Artificial Sequence
  Description of Artificial Sequence: Synthetic oligonucleotide
  Sense strand starting at position 3301 of SEQ ID NO: 1560008
cacagagcucgucacagua

SEQ ID NO: 1569720 - RNA, 19 nt, Artificial Sequence
  Description of Artificial Sequence: Synthetic oligonucleotide
  Antisense strand to SEQ ID NO: 1569719
uacugugacgagcucugug

SEQ ID NO: 1569721 - RNA, 19 nt, Artificial Sequence
  Description of Artificial Sequence: Synthetic oligonucleotide
  Sense strand starting at position 3303 of SEQ ID NO: 1560008
cagagcucgucacaguaua

SEQ ID NO: 1569722 - RNA, 19 nt, Artificial Sequence
  Description of Artificial Sequence: Synthetic oligonucleotide
  Antisense strand to SEQ ID NO: 1569721
uauacugugacgagcucug

SEQ ID NO: 1569723 - RNA, 19 nt, Artificial Sequence
  Description of Artificial Sequence: Synthetic oligonucleotide
  Sense strand starting at position 3437 of SEQ ID NO: 1560008
acaccacuuuguucuauga

SEQ ID NO: 1569724 - RNA, 19 nt, Artificial Sequence
  Description of Artificial Sequence: Synthetic oligonucleotide
  Antisense strand to SEQ ID NO: 1569723
ucauagaacaaaguggugu

SEQ ID NO: 1569725 - RNA, 19 nt, Artificial Sequence
  Description of Artificial Sequence: Synthetic oligonucleotide
  Sense strand starting at position 3441 of SEQ ID NO: 1560008
cacuuuguucuaugaggaa

SEQ ID NO: 1569726 - RNA, 19 nt, Artificial Sequence
  Description of Artificial Sequence: Synthetic oligonucleotide
  Antisense strand to SEQ ID NO: 1569725
uuccucauagaacaaagug

SEQ ID NO: 1569727 - RNA, 19 nt, Artificial Sequence
  Description of Artificial Sequence: Synthetic oligonucleotide
  Sense strand starting at position 3517 of SEQ ID NO: 1560008
agcauuugaccuuguaguu

SEQ ID NO: 1569728 - RNA, 19 nt, Artificial Sequence
  Description of Artificial Sequence: Synthetic oligonucleotide
  Antisense strand to SEQ ID NO: 1569727
aacuacaaggucaaaugcu

SEQ ID NO: 1569729 - RNA, 19 nt, Artificial Sequence
  Description of Artificial Sequence: Synthetic oligonucleotide
  Sense strand starting at position 3547 of SEQ ID NO: 1560008
uggguauccucuccaccua

SEQ ID NO: 1569730 - RNA, 19 nt, Artificial Sequence
  Description of Artificial Sequence: Synthetic oligonucleotide
  Antisense strand to SEQ ID NO: 1569729
uagguggagaggauaccca

SEQ ID NO: 1569731 - RNA, 19 nt, Artificial Sequence
  Description of Artificial Sequence: Synthetic oligonucleotide
  Sense strand starting at position 3548 of SEQ ID NO: 1560008
ggguauccucuccaccuau

SEQ ID NO: 1569732 - RNA, 19 nt, Artificial Sequence
  Description of Artificial Sequence: Synthetic oligonucleotide
  Antisense strand to SEQ ID NO: 1569731
auagguggagaggauaccc

SEQ ID NO: 1569733 - RNA, 19 nt, Artificial Sequence
  Description of Artificial Sequence: Synthetic oligonucleotide
  Sense strand starting at position 3554 of SEQ ID NO: 1560008
ccucuccaccuaugggaua

SEQ ID NO: 1569734 - RNA, 19 nt, Artificial Sequence
  Description of Artificial Sequence: Synthetic oligonucleotide
  Antisense strand to SEQ ID NO: 1569733
uaucccauagguggagagg

SEQ ID NO: 1569735 - RNA, 19 nt, Artificial Sequence
  Description of Artificial Sequence: Synthetic oligonucleotide
  Sense strand starting at position 3601 of SEQ ID NO: 1560008
agggagugagcuuggugua

SEQ ID NO: 1569736 - RNA, 19 nt, Artificial Sequence
  Description of Artificial Sequence: Synthetic oligonucleotide
  Antisense strand to SEQ ID NO: 1569735
uacaccaagcucacucccu

SEQ ID NO: 1569737 - RNA, 19 nt, Artificial Sequence
  Description of Artificial Sequence: Synthetic oligonucleotide
  Sense strand starting at position 3602 of SEQ ID NO: 1560008
gggagugagcuugguguau

SEQ ID NO: 1569738 - RNA, 19 nt, Artificial Sequence
  Description of Artificial Sequence: Synthetic oligonucleotide
  Antisense strand to SEQ ID NO: 1569737
auacaccaagcucacuccc

SEQ ID NO: 1569739 - RNA, 19 nt, Artificial Sequence
  Description of Artificial Sequence: Synthetic oligonucleotide
  Sense strand starting at position 3604 of SEQ ID NO: 1560008
gagugagcuugguguauga

SEQ ID NO: 1569740 - RNA, 19 nt, Artificial Sequence
  Description of Artificial Sequence: Synthetic oligonucleotide
  Antisense strand to SEQ ID NO: 1569739
ucauacaccaagcucacuc

SEQ ID NO: 1569741 - RNA, 19 nt, Artificial Sequence
  Description of Artificial Sequence: Synthetic oligonucleotide
  Sense strand starting at position 3821 of SEQ ID NO: 1560008
guccuuuguugccauggua

SEQ ID NO: 1569742 - RNA, 19 nt, Artificial Sequence
  Description of Artificial Sequence: Synthetic oligonucleotide
  Antisense strand to SEQ ID NO: 1569741
uaccauggcaacaaaggac

SEQ ID NO: 1569743 - RNA, 19 nt, Artificial Sequence
  Description of Artificial Sequence: Synthetic oligonucleotide
  Sense strand starting at position 3824 of SEQ ID NO: 1560008
cuuuguugccaugguaaca

SEQ ID NO: 1569744 - RNA, 19 nt, Artificial Sequence
  Description of Artificial Sequence: Synthetic oligonucleotide
  Antisense strand to SEQ ID NO: 1569743
uguuaccauggcaacaaag

SEQ ID NO: 1569745 - RNA, 19 nt, Artificial Sequence
  Description of Artificial Sequence: Synthetic oligonucleotide
  Sense strand starting at position 3885 of SEQ ID NO: 1560008
ggcuguugccauggagacu

SEQ ID NO: 1569746 - RNA, 19 nt, Artificial Sequence
  Description of Artificial Sequence: Synthetic oligonucleotide
  Antisense strand to SEQ ID NO: 1569745
agucuccauggcaacagcc

SEQ ID NO: 1569747 - RNA, 19 nt, Artificial Sequence
  Description of Artificial Sequence: Synthetic oligonucleotide
  Sense strand starting at position 92 of SEQ ID NO: 1560009
ccugguguccuaugucuga

SEQ ID NO: 1569748 - RNA, 19 nt, Artificial Sequence
  Description of Artificial Sequence: Synthetic oligonucleotide
  Antisense strand to SEQ ID NO: 1569747
ucagacauaggacaccagg

SEQ ID NO: 1569749 - RNA, 19 nt, Artificial Sequence
  Description of Artificial Sequence: Synthetic oligonucleotide
  Sense strand starting at position 659 of SEQ ID NO: 1560009
ugccuuucguguucgucua

SEQ ID NO: 1569750 - RNA, 19 nt, Artificial Sequence
  Description of Artificial Sequence: Synthetic oligonucleotide
  Antisense strand to SEQ ID NO: 1569749
uagacgaacacgaaaggca

SEQ ID NO: 1569751 - RNA, 19 nt, Artificial Sequence
  Description of Artificial Sequence: Synthetic oligonucleotide
  Sense strand starting at position 1555 of SEQ ID NO: 1560009
guggcacuggucugguauu

SEQ ID NO: 1569752 - RNA, 19 nt, Artificial Sequence
  Description of Artificial Sequence: Synthetic oligonucleotide
  Antisense strand to SEQ ID NO: 1569751
aauaccagaccagugccac

SEQ ID NO: 1569753 - RNA, 19 nt, Artificial Sequence
  Description of Artificial Sequence: Synthetic oligonucleotide
  Sense strand starting at position 1556 of SEQ ID NO: 1560009
uggcacuggucugguauuu

SEQ ID NO: 1569754 - RNA, 19 nt, Artificial Sequence
  Description of Artificial Sequence: Synthetic oligonucleotide
  Antisense strand to SEQ ID NO: 1569753
aaauaccagaccagugcca

SEQ ID NO: 1569755 - RNA, 19 nt, Artificial Sequence
  Description of Artificial Sequence: Synthetic oligonucleotide
  Sense strand starting at position 1567 of SEQ ID NO: 1560009
ugguauuucuguuccagcu

SEQ ID NO: 1569756 - RNA, 19 nt, Artificial Sequence
  Description of Artificial Sequence: Synthetic oligonucleotide
  Antisense strand to SEQ ID NO: 1569755
agcuggaacagaaauacca

SEQ ID NO: 1569757 - RNA, 19 nt, Artificial Sequence
  Description of Artificial Sequence: Synthetic oligonucleotide
  Sense strand starting at position 1848 of SEQ ID NO: 1560009
ccgaguagagcucauaguu

SEQ ID NO: 1569758 - RNA, 19 nt, Artificial Sequence
  Description of Artificial Sequence: Synthetic oligonucleotide
  Antisense strand to SEQ ID NO: 1569757
aacuaugagcucuacucgg

SEQ ID NO: 1569759 - RNA, 19 nt, Artificial Sequence
  Description of Artificial Sequence: Synthetic oligonucleotide
  Sense strand starting at position 1857 of SEQ ID NO: 1560009
gcucauaguucuccuggga

SEQ ID NO: 1569760 - RNA, 19 nt, Artificial Sequence
  Description of Artificial Sequence: Synthetic oligonucleotide
  Antisense strand to SEQ ID NO: 1569759
ucccaggagaacuaugagc

SEQ ID NO: 1569761 - RNA, 19 nt, Artificial Sequence
  Description of Artificial Sequence: Synthetic oligonucleotide
  Sense strand starting at position 1860 of SEQ ID NO: 1560009
cauaguucuccugggaaug

SEQ ID NO: 1569762 - RNA, 19 nt, Artificial Sequence
  Description of Artificial Sequence: Synthetic oligonucleotide
  Antisense strand to SEQ ID NO: 1569761
cauucccaggagaacuaug

SEQ ID NO: 1569763 - RNA, 19 nt, Artificial Sequence
  Description of Artificial Sequence: Synthetic oligonucleotide
  Sense strand starting at position 1862 of SEQ ID NO: 1560009
uaguucuccugggaaugga

SEQ ID NO: 1569764 - RNA, 19 nt, Artificial Sequence
  Description of Artificial Sequence: Synthetic oligonucleotide
  Antisense strand to SEQ ID NO: 1569763
uccauucccaggagaacua

SEQ ID NO: 1569765 - RNA, 19 nt, Artificial Sequence
  Description of Artificial Sequence: Synthetic oligonucleotide
  Sense strand starting at position 2012 of SEQ ID NO: 1560009
ccggaccaguccugauaua

SEQ ID NO: 1569766 - RNA, 19 nt, Artificial Sequence
  Description of Artificial Sequence: Synthetic oligonucleotide
  Antisense strand to SEQ ID NO: 1569765
uauaucaggacugguccgg

SEQ ID NO: 1569767 - RNA, 19 nt, Artificial Sequence
  Description of Artificial Sequence: Synthetic oligonucleotide
  Sense strand starting at position 2228 of SEQ ID NO: 1560009
acauaaggugcucauuaug

SEQ ID NO: 1569768 - RNA, 19 nt, Artificial Sequence
  Description of Artificial Sequence: Synthetic oligonucleotide
  Antisense strand to SEQ ID NO: 1569767
cauaaugagcaccuuaugu

SEQ ID NO: 1569769 - RNA, 19 nt, Artificial Sequence
  Description of Artificial Sequence: Synthetic oligonucleotide
  Sense strand starting at position 2238 of SEQ ID NO: 1560009
cucauuaugcgcugggcau

SEQ ID NO: 1569770 - RNA, 19 nt, Artificial Sequence
  Description of Artificial Sequence: Synthetic oligonucleotide
  Antisense strand to SEQ ID NO: 1569769
augcccagcgcauaaugag

SEQ ID NO: 1569771 - RNA, 19 nt, Artificial Sequence
  Description of Artificial Sequence: Synthetic oligonucleotide
  Sense strand starting at position 2239 of SEQ ID NO: 1560009
ucauuaugcgcugggcauu

SEQ ID NO: 1569772 - RNA, 19 nt, Artificial Sequence
  Description of Artificial Sequence: Synthetic oligonucleotide
  Antisense strand to SEQ ID NO: 1569771
aaugcccagcgcauaauga

SEQ ID NO: 1569773 - RNA, 19 nt, Artificial Sequence
  Description of Artificial Sequence: Synthetic oligonucleotide
  Sense strand starting at position 2357 of SEQ ID NO: 1560009
gagucauucuccuauggcu

SEQ ID NO: 1569774 - RNA, 19 nt, Artificial Sequence
  Description of Artificial Sequence: Synthetic oligonucleotide
  Antisense strand to SEQ ID NO: 1569773
agccauaggagaaugacuc

SEQ ID NO: 1569775 - RNA, 19 nt, Artificial Sequence
  Description of Artificial Sequence: Synthetic oligonucleotide
  Sense strand starting at position 2447 of SEQ ID NO: 1560009
auagcacgugccugaucaa

SEQ ID NO: 1569776 - RNA, 19 nt, Artificial Sequence
  Description of Artificial Sequence: Synthetic oligonucleotide
  Antisense strand to SEQ ID NO: 1569775
uugaucaggcacgugcuau

SEQ ID NO: 1569777 - RNA, 19 nt, Artificial Sequence
  Description of Artificial Sequence: Synthetic oligonucleotide
  Sense strand starting at position 2819 of SEQ ID NO: 1560009
guggcugaauguuuacuga

SEQ ID NO: 1569778 - RNA, 19 nt, Artificial Sequence
  Description of Artificial Sequence: Synthetic oligonucleotide
  Antisense strand to SEQ ID NO: 1569777
ucaguaaacauucagccac

SEQ ID NO: 1569779 - RNA, 19 nt, Artificial Sequence
  Description of Artificial Sequence: Synthetic oligonucleotide
  Sense strand starting at position 2822 of SEQ ID NO: 1560009
gcugaauguuuacugaacu

SEQ ID NO: 1569780 - RNA, 19 nt, Artificial Sequence
  Description of Artificial Sequence: Synthetic oligonucleotide
  Antisense strand to SEQ ID NO: 1569779
aguucaguaaacauucagc

SEQ ID NO: 1569781 - RNA, 19 nt, Artificial Sequence
  Description of Artificial Sequence: Synthetic oligonucleotide
  Sense strand starting at position 2861 of SEQ ID NO: 1560009
gggugugcucuguguguca

SEQ ID NO: 1569782 - RNA, 19 nt, Artificial Sequence
  Description of Artificial Sequence: Synthetic oligonucleotide
  Antisense strand to SEQ ID NO: 1569781
ugacacacagagcacaccc

SEQ ID NO: 1569783 - RNA, 19 nt, Artificial Sequence
  Description of Artificial Sequence: Synthetic oligonucleotide
  Sense strand starting at position 2863 of SEQ ID NO: 1560009
gugugcucugugugucacu

SEQ ID NO: 1569784 - RNA, 19 nt, Artificial Sequence
  Description of Artificial Sequence: Synthetic oligonucleotide
  Antisense strand to SEQ ID NO: 1569783
agugacacacagagcacac

SEQ ID NO: 1569785 - RNA, 19 nt, Artificial Sequence
  Description of Artificial Sequence: Synthetic oligonucleotide
  Sense strand starting at position 2868 of SEQ ID NO: 1560009
cucugugugucacucaaau

SEQ ID NO: 1569786 - RNA, 19 nt, Artificial Sequence
  Description of Artificial Sequence: Synthetic oligonucleotide
  Antisense strand to SEQ ID NO: 1569785
auuugagugacacacagag

SEQ ID NO: 1569787 - RNA, 19 nt, Artificial Sequence
  Description of Artificial Sequence: Synthetic oligonucleotide
  Sense strand starting at position 2881 of SEQ ID NO: 1560009
ucaaaugguuuccuuagca

SEQ ID NO: 1569788 - RNA, 19 nt, Artificial Sequence
  Description of Artificial Sequence: Synthetic oligonucleotide
  Antisense strand to SEQ ID NO: 1569787
ugcuaaggaaaccauuuga

SEQ ID NO: 1569789 - RNA, 19 nt, Artificial Sequence
  Description of Artificial Sequence: Synthetic oligonucleotide
  Sense strand starting at position 2885 of SEQ ID NO: 1560009
augguuuccuuagcaucua

SEQ ID NO: 1569790 - RNA, 19 nt, Artificial Sequence
  Description of Artificial Sequence: Synthetic oligonucleotide
  Antisense strand to SEQ ID NO: 1569789
uagaugcuaaggaaaccau

SEQ ID NO: 1569791 - RNA, 19 nt, Artificial Sequence
  Description of Artificial Sequence: Synthetic oligonucleotide
  Sense strand starting at position 2886 of SEQ ID NO: 1560009
ugguuuccuuagcaucuaa

SEQ ID NO: 1569792 - RNA, 19 nt, Artificial Sequence
  Description of Artificial Sequence: Synthetic oligonucleotide
  Antisense strand to SEQ ID NO: 1569791
uuagaugcuaaggaaacca

SEQ ID NO: 1569793 - RNA, 19 nt, Artificial Sequence
  Description of Artificial Sequence: Synthetic oligonucleotide
  Sense strand starting at position 3114 of SEQ ID NO: 1560009
ccucacgggucuuugcaaa

SEQ ID NO: 1569794 - RNA, 19 nt, Artificial Sequence
  Description of Artificial Sequence: Synthetic oligonucleotide
  Antisense strand to SEQ ID NO: 1569793
uuugcaaagacccgugagg

SEQ ID NO: 1569795 - RNA, 19 nt, Artificial Sequence
  Description of Artificial Sequence: Synthetic oligonucleotide
  Sense strand starting at position 3146 of SEQ ID NO: 1560009
gcagaacuaucauuccugu

SEQ ID NO: 1569796 - RNA, 19 nt, Artificial Sequence
  Description of Artificial Sequence: Synthetic oligonucleotide
  Antisense strand to SEQ ID NO: 1569795
acaggaaugauaguucugc

SEQ ID NO: 1569797 - RNA, 19 nt, Artificial Sequence
  Description of Artificial Sequence: Synthetic oligonucleotide
  Sense strand starting at position 3281 of SEQ ID NO: 1560009
aaaggauguguccaagggu

SEQ ID NO: 1569798 - RNA, 19 nt, Artificial Sequence
  Description of Artificial Sequence: Synthetic oligonucleotide
  Antisense strand to SEQ ID NO: 1569797
acccuuggacacauccuuu

SEQ ID NO: 1569799 - RNA, 19 nt, Artificial Sequence
  Description of Artificial Sequence: Synthetic oligonucleotide
  Sense strand starting at position 3284 of SEQ ID NO: 1560009
ggauguguccaagggucuu

SEQ ID NO: 1569800 - RNA, 19 nt, Artificial Sequence
  Description of Artificial Sequence: Synthetic oligonucleotide
  Antisense strand to SEQ ID NO: 1569799
aagacccuuggacacaucc

SEQ ID NO: 1569801 - RNA, 19 nt, Artificial Sequence
  Description of Artificial Sequence: Synthetic oligonucleotide
  Sense strand starting at position 3295 of SEQ ID NO: 1560009
agggucuuggcuugaucuu

SEQ ID NO: 1569802 - RNA, 19 nt, Artificial Sequence
  Description of Artificial Sequence: Synthetic oligonucleotide
  Antisense strand to SEQ ID NO: 1569801
aagaucaagccaagacccu

SEQ ID NO: 1569803 - RNA, 19 nt, Artificial Sequence
  Description of Artificial Sequence: Synthetic oligonucleotide
  Sense strand starting at position 3311 of SEQ ID NO: 1560009
cuugguguugggugacaga

SEQ ID NO: 1569804 - RNA, 19 nt, Artificial Sequence
  Description of Artificial Sequence: Synthetic oligonucleotide
  Antisense strand to SEQ ID NO: 1569803
ucugucacccaacaccaag

SEQ ID NO: 1569805 - RNA, 19 nt, Artificial Sequence
  Description of Artificial Sequence: Synthetic oligonucleotide
  Sense strand starting at position 3461 of SEQ ID NO: 1560009
ggugagcgugcgccugaua

SEQ ID NO: 1569806 - RNA, 19 nt, Artificial Sequence
  Description of Artificial Sequence: Synthetic oligonucleotide
  Antisense strand to SEQ ID NO: 1569805
uaucaggcgcacgcucacc

SEQ ID NO: 1569807 - RNA, 19 nt, Artificial Sequence
  Description of Artificial Sequence: Synthetic oligonucleotide
  Sense strand starting at position 3462 of SEQ ID NO: 1560009
gugagcgugcgccugauaa

SEQ ID NO: 1569808 - RNA, 19 nt, Artificial Sequence
  Description of Artificial Sequence: Synthetic oligonucleotide
  Antisense strand to SEQ ID NO: 1569807
uuaucaggcgcacgcucac

SEQ ID NO: 1569809 - RNA, 19 nt, Artificial Sequence
  Description of Artificial Sequence: Synthetic oligonucleotide
  Sense strand starting at position 3464 of SEQ ID NO: 1560009
gagcgugcgccugauaaga

SEQ ID NO: 1569810 - RNA, 19 nt, Artificial Sequence
  Description of Artificial Sequence: Synthetic oligonucleotide
  Antisense strand to SEQ ID NO: 1569809
ucuuaucaggcgcacgcuc

SEQ ID NO: 1569811 - RNA, 19 nt, Artificial Sequence
  Description of Artificial Sequence: Synthetic oligonucleotide
  Sense strand starting at position 3480 of SEQ ID NO: 1560009
agauaacugcccuggcaau

SEQ ID NO: 1569812 - RNA, 19 nt, Artificial Sequence
  Description of Artificial Sequence: Synthetic oligonucleotide
  Antisense strand to SEQ ID NO: 1569811
auugccagggcaguuaucu

SEQ ID NO: 1569813 - RNA, 19 nt, Artificial Sequence
  Description of Artificial Sequence: Synthetic oligonucleotide
  Sense strand starting at position 3491 of SEQ ID NO: 1560009
cuggcaauguccuucucua

SEQ ID NO: 1569814 - RNA, 19 nt, Artificial Sequence
  Description of Artificial Sequence: Synthetic oligonucleotide
  Antisense strand to SEQ ID NO: 1569813
uagagaaggacauugccag

SEQ ID NO: 1569815 - RNA, 19 nt, Artificial Sequence
  Description of Artificial Sequence: Synthetic oligonucleotide
  Sense strand starting at position 3515 of SEQ ID NO: 1560009
gcaggucaccugggaaacu

SEQ ID NO: 1569816 - RNA, 19 nt, Artificial Sequence
  Description of Artificial Sequence: Synthetic oligonucleotide
  Antisense strand to SEQ ID NO: 1569815
aguuucccaggugaccugc

SEQ ID NO: 1569817 - RNA, 19 nt, Artificial Sequence
  Description of Artificial Sequence: Synthetic oligonucleotide
  Sense strand starting at position 3646 of SEQ ID NO: 1560009
uagugaaucuacucgcuca

SEQ ID NO: 1569818 - RNA, 19 nt, Artificial Sequence
  Description of Artificial Sequence: Synthetic oligonucleotide
  Antisense strand to SEQ ID NO: 1569817
ugagcgaguagauucacua

SEQ ID NO: 1569819 - RNA, 19 nt, Artificial Sequence
  Description of Artificial Sequence: Synthetic oligonucleotide
  Sense strand starting at position 3678 of SEQ ID NO: 1560009
agcucugagccauguaugu

SEQ ID NO: 1569820 - RNA, 19 nt, Artificial Sequence
  Description of Artificial Sequence: Synthetic oligonucleotide
  Antisense strand to SEQ ID NO: 1569819
acauacauggcucagagcu

SEQ ID NO: 1569821 - RNA, 19 nt, Artificial Sequence
  Description of Artificial Sequence: Synthetic oligonucleotide
  Sense strand starting at position 3682 of SEQ ID NO: 1560009
cugagccauguaugucaaa

SEQ ID NO: 1569822 - RNA, 19 nt, Artificial Sequence
  Description of Artificial Sequence: Synthetic oligonucleotide
  Antisense strand to SEQ ID NO: 1569821
uuugacauacauggcucag

SEQ ID NO: 1569823 - RNA, 19 nt, Artificial Sequence
  Description of Artificial Sequence: Synthetic oligonucleotide
  Sense strand starting at position 3694 of SEQ ID NO: 1560009
ugucaaacagcuuguguca

SEQ ID NO: 1569824 - RNA, 19 nt, Artificial Sequence
  Description of Artificial Sequence: Synthetic oligonucleotide
  Antisense strand to SEQ ID NO: 1569823
ugacacaagcuguuugaca

SEQ ID NO: 1569825 - RNA, 19 nt, Artificial Sequence
  Description of Artificial Sequence: Synthetic oligonucleotide
  Sense strand starting at position 3867 of SEQ ID NO: 1560009
ggucguuccugcuucagga

SEQ ID NO: 1569826 - RNA, 19 nt, Artificial Sequence
  Description of Artificial Sequence: Synthetic oligonucleotide
  Antisense strand to SEQ ID NO: 1569825
uccugaagcaggaacgacc

SEQ ID NO: 1569827 - RNA, 19 nt, Artificial Sequence
  Description of Artificial Sequence: Synthetic oligonucleotide
  Sense strand starting at position 543 of SEQ ID NO: 1560010
cuacauugguugguccaga

SEQ ID NO: 1569828 - RNA, 19 nt, Artificial Sequence
  Description of Artificial Sequence: Synthetic oligonucleotide
  Antisense strand to SEQ ID NO: 1569827
ucuggaccaaccaauguag

SEQ ID NO: 1569829 - RNA, 19 nt, Artificial Sequence
  Description of Artificial Sequence: Synthetic oligonucleotide
  Sense strand starting at position 1357 of SEQ ID NO: 1560010
cggccuguccugcuaagua

SEQ ID NO: 1569830 - RNA, 19 nt, Artificial Sequence
  Description of Artificial Sequence: Synthetic oligonucleotide
  Antisense strand to SEQ ID NO: 1569829
uacuuagcaggacaggccg

SEQ ID NO: 1569831 - RNA, 19 nt, Artificial Sequence
  Description of Artificial Sequence: Synthetic oligonucleotide
  Sense strand starting at position 1445 of SEQ ID NO: 1560010
agcuuugguccucaacagu

SEQ ID NO: 1569832 - RNA, 19 nt, Artificial Sequence
  Description of Artificial Sequence: Synthetic oligonucleotide
  Antisense strand to SEQ ID NO: 1569831
acuguugaggaccaaagcu

SEQ ID NO: 1569833 - RNA, 19 nt, Artificial Sequence
  Description of Artificial Sequence: Synthetic oligonucleotide
  Sense strand starting at position 1459 of SEQ ID NO: 1560010
acaguugcgccucauucua

SEQ ID NO: 1569834 - RNA, 19 nt, Artificial Sequence
  Description of Artificial Sequence: Synthetic oligonucleotide
  Antisense strand to SEQ ID NO: 1569833
uagaaugaggcgcaacugu

SEQ ID NO: 1569835 - RNA, 19 nt, Artificial Sequence
  Description of Artificial Sequence: Synthetic oligonucleotide
  Sense strand starting at position 1472 of SEQ ID NO: 1560010
auucuacugauccgcgaaa

SEQ ID NO: 1569836 - RNA, 19 nt, Artificial Sequence
  Description of Artificial Sequence: Synthetic oligonucleotide
  Antisense strand to SEQ ID NO: 1569835
uuucgcggaucaguagaau

SEQ ID NO: 1569837 - RNA, 19 nt, Artificial Sequence
  Description of Artificial Sequence: Synthetic oligonucleotide
  Sense strand starting at position 1473 of SEQ ID NO: 1560010
uucuacugauccgcgaaau

SEQ ID NO: 1569838 - RNA, 19 nt, Artificial Sequence
  Description of Artificial Sequence: Synthetic oligonucleotide
  Antisense strand to SEQ ID NO: 1569837
auuucgcggaucaguagaa

SEQ ID NO: 1569839 - RNA, 19 nt, Artificial Sequence
  Description of Artificial Sequence: Synthetic oligonucleotide
  Sense strand starting at position 1474 of SEQ ID NO: 1560010
ucuacugauccgcgaaaug

SEQ ID NO: 1569840 - RNA, 19 nt, Artificial Sequence
  Description of Artificial Sequence: Synthetic oligonucleotide
  Antisense strand to SEQ ID NO: 1569839
cauuucgcggaucaguaga

SEQ ID NO: 1569841 - RNA, 19 nt, Artificial Sequence
  Description of Artificial Sequence: Synthetic oligonucleotide
  Sense strand starting at position 1518 of SEQ ID NO: 1560010
aggcuuuggccagggagau

SEQ ID NO: 1569842 - RNA, 19 nt, Artificial Sequence
  Description of Artificial Sequence: Synthetic oligonucleotide
  Antisense strand to SEQ ID NO: 1569841
aucucccuggccaaagccu

SEQ ID NO: 1569843 - RNA, 19 nt, Artificial Sequence
  Description of Artificial Sequence: Synthetic oligonucleotide
  Sense strand starting at position 2148 of SEQ ID NO: 1560010
ucagauaagggcggugaaa

SEQ ID NO: 1569844 - RNA, 19 nt, Artificial Sequence
  Description of Artificial Sequence: Synthetic oligonucleotide
  Antisense strand to SEQ ID NO: 1569843
uuucaccgcccuuaucuga

SEQ ID NO: 1569845 - RNA, 19 nt, Artificial Sequence
  Description of Artificial Sequence: Synthetic oligonucleotide
  Sense strand starting at position 2728 of SEQ ID NO: 1560010
gcagacauuugagaucauu

SEQ ID NO: 1569846 - RNA, 19 nt, Artificial Sequence
  Description of Artificial Sequence: Synthetic oligonucleotide
  Antisense strand to SEQ ID NO: 1569845
aaugaucucaaaugucugc

SEQ ID NO: 1569847 - RNA, 19 nt, Artificial Sequence
  Description of Artificial Sequence: Synthetic oligonucleotide
  Sense strand starting at position 3511 of SEQ ID NO: 1560010
cuccuuaggcuccgggaaa

SEQ ID NO: 1569848 - RNA, 19 nt, Artificial Sequence
  Description of Artificial Sequence: Synthetic oligonucleotide
  Antisense strand to SEQ ID NO: 1569847
uuucccggagccuaaggag

SEQ ID NO: 1569849 - RNA, 19 nt, Artificial Sequence
  Description of Artificial Sequence: Synthetic oligonucleotide
  Sense strand starting at position 70 of SEQ ID NO: 1560011
cuuagauugcgccacuaca

SEQ ID NO: 1569850 - RNA, 19 nt, Artificial Sequence
  Description of Artificial Sequence: Synthetic oligonucleotide
  Antisense strand to SEQ ID NO: 1569849
uguaguggcgcaaucuaag

SEQ ID NO: 1569851 - RNA, 19 nt, Artificial Sequence
  Description of Artificial Sequence: Synthetic oligonucleotide
  Sense strand starting at position 211 of SEQ ID NO: 1560011
ggcagugagaacuggucaa

SEQ ID NO: 1569852 - RNA, 19 nt, Artificial Sequence
  Description of Artificial Sequence: Synthetic oligonucleotide
  Antisense strand to SEQ ID NO: 1569851
uugaccaguucucacugcc

SEQ ID NO: 1569853 - RNA, 19 nt, Artificial Sequence
  Description of Artificial Sequence: Synthetic oligonucleotide
  Sense strand starting at position 222 of SEQ ID NO: 1560011
cuggucaaaucugagauau

SEQ ID NO: 1569854 - RNA, 19 nt, Artificial Sequence
  Description of Artificial Sequence: Synthetic oligonucleotide
  Antisense strand to SEQ ID NO: 1569853
auaucucagauuugaccag

SEQ ID NO: 1569855 - RNA, 19 nt, Artificial Sequence
  Description of Artificial Sequence: Synthetic oligonucleotide
  Sense strand starting at position 224 of SEQ ID NO: 1560011
ggucaaaucugagauauuc

SEQ ID NO: 1569856 - RNA, 19 nt, Artificial Sequence
  Description of Artificial Sequence: Synthetic oligonucleotide
  Antisense strand to SEQ ID NO: 1569855
gaauaucucagauuugacc

SEQ ID NO: 1569857 - RNA, 19 nt, Artificial Sequence
  Description of Artificial Sequence: Synthetic oligonucleotide
  Sense strand starting at position 417 of SEQ ID NO: 1560011
ccauguuagguuugagaug

SEQ ID NO: 1569858 - RNA, 19 nt, Artificial Sequence
  Description of Artificial Sequence: Synthetic oligonucleotide
  Antisense strand to SEQ ID NO: 1569857
caucucaaaccuaacaugg

SEQ ID NO: 1569859 - RNA, 19 nt, Artificial Sequence
  Description of Artificial Sequence: Synthetic oligonucleotide
  Sense strand starting at position 422 of SEQ ID NO: 1560011
uuagguuugagaugccagu

SEQ ID NO: 1569860 - RNA, 19 nt, Artificial Sequence
  Description of Artificial Sequence: Synthetic oligonucleotide
  Antisense strand to SEQ ID NO: 1569859
acuggcaucucaaaccuaa

SEQ ID NO: 1569861 - RNA, 19 nt, Artificial Sequence
  Description of Artificial Sequence: Synthetic oligonucleotide
  Sense strand starting at position 465 of SEQ ID NO: 1560011
uggcaaacugccuauguga

SEQ ID NO: 1569862 - RNA, 19 nt, Artificial Sequence
  Description of Artificial Sequence: Synthetic oligonucleotide
  Antisense strand to SEQ ID NO: 1569861
ucacauaggcaguuugcca

SEQ ID NO: 1569863 - RNA, 19 nt, Artificial Sequence
  Description of Artificial Sequence: Synthetic oligonucleotide
  Sense strand starting at position 484 of SEQ ID NO: 1560011
gcuggaguccuugagaagg

SEQ ID NO: 1569864 - RNA, 19 nt, Artificial Sequence
  Description of Artificial Sequence: Synthetic oligonucleotide
  Antisense strand to SEQ ID NO: 1569863
ccuucucaaggacuccagc

SEQ ID NO: 1569865 - RNA, 19 nt, Artificial Sequence
  Description of Artificial Sequence: Synthetic oligonucleotide
  Sense strand starting at position 554 of SEQ ID NO: 1560011
cacagugcugccugggaau

SEQ ID NO: 1569866 - RNA, 19 nt, Artificial Sequence
  Description of Artificial Sequence: Synthetic oligonucleotide
  Antisense strand to SEQ ID NO: 1569865
auucccaggcagcacugug

SEQ ID NO: 1569867 - RNA, 19 nt, Artificial Sequence
  Description of Artificial Sequence: Synthetic oligonucleotide
  Sense strand starting at position 708 of SEQ ID NO: 1560011
uagaaauaguuggucagga

SEQ ID NO: 1569868 - RNA, 19 nt, Artificial Sequence
  Description of Artificial Sequence: Synthetic oligonucleotide
  Antisense strand to SEQ ID NO: 1569867
uccugaccaacuauuucua

SEQ ID NO: 1569869 - RNA, 19 nt, Artificial Sequence
  Description of Artificial Sequence: Synthetic oligonucleotide
  Sense strand starting at position 902 of SEQ ID NO: 1560011
cccaguucuugcuccauga

SEQ ID NO: 1569870 - RNA, 19 nt, Artificial Sequence
  Description of Artificial Sequence: Synthetic oligonucleotide
  Antisense strand to SEQ ID NO: 1569869
ucauggagcaagaacuggg

SEQ ID NO: 1569871 - RNA, 19 nt, Artificial Sequence
  Description of Artificial Sequence: Synthetic oligonucleotide
  Sense strand starting at position 1047 of SEQ ID NO: 1560011
uuucucgacuagccauaua

SEQ ID NO: 1569872 - RNA, 19 nt, Artificial Sequence
  Description of Artificial Sequence: Synthetic oligonucleotide
  Antisense strand to SEQ ID NO: 1569871
uauauggcuagucgagaaa

SEQ ID NO: 1569873 - RNA, 19 nt, Artificial Sequence
  Description of Artificial Sequence: Synthetic oligonucleotide
  Sense strand starting at position 1389 of SEQ ID NO: 1560011
uggcucaucaguuaugguu

SEQ ID NO: 1569874 - RNA, 19 nt, Artificial Sequence
  Description of Artificial Sequence: Synthetic oligonucleotide
  Antisense strand to SEQ ID NO: 1569873
aaccauaacugaugagcca

SEQ ID NO: 1569875 - RNA, 19 nt, Artificial Sequence
  Description of Artificial Sequence: Synthetic oligonucleotide
  Sense strand starting at position 1395 of SEQ ID NO: 1560011
aucaguuaugguuagugua

SEQ ID NO: 1569876 - RNA, 19 nt, Artificial Sequence
  Description of Artificial Sequence: Synthetic oligonucleotide
  Antisense strand to SEQ ID NO: 1569875
uacacuaaccauaacugau

SEQ ID NO: 1569877 - RNA, 19 nt, Artificial Sequence
  Description of Artificial Sequence: Synthetic oligonucleotide
  Sense strand starting at position 1397 of SEQ ID NO: 1560011
caguuaugguuaguguauu

SEQ ID NO: 1569878 - RNA, 19 nt, Artificial Sequence
  Description of Artificial Sequence: Synthetic oligonucleotide
  Antisense strand to SEQ ID NO: 1569877
aauacacuaaccauaacug

SEQ ID NO: 1569879 - RNA, 19 nt, Artificial Sequence
  Description of Artificial Sequence: Synthetic oligonucleotide
  Sense strand starting at position 1514 of SEQ ID NO: 1560011
gagcuuugaagaggagagu

SEQ ID NO: 1569880 - RNA, 19 nt, Artificial Sequence
  Description of Artificial Sequence: Synthetic oligonucleotide
  Antisense strand to SEQ ID NO: 1569879
acucuccucuucaaagcuc

SEQ ID NO: 1569881 - RNA, 19 nt, Artificial Sequence
  Description of Artificial Sequence: Synthetic oligonucleotide
  Sense strand starting at position 1791 of SEQ ID NO: 1560011
cccagaucaugcccuuaga

SEQ ID NO: 1569882 - RNA, 19 nt, Artificial Sequence
  Description of Artificial Sequence: Synthetic oligonucleotide
  Antisense strand to SEQ ID NO: 1569881
ucuaagggcaugaucuggg

SEQ ID NO: 1569883 - RNA, 19 nt, Artificial Sequence
  Description of Artificial Sequence: Synthetic oligonucleotide
  Sense strand starting at position 1902 of SEQ ID NO: 1560011
auccuucggucuucuaaga

SEQ ID NO: 1569884 - RNA, 19 nt, Artificial Sequence
  Description of Artificial Sequence: Synthetic oligonucleotide
  Antisense strand to SEQ ID NO: 1569883
ucuuagaagaccgaaggau

SEQ ID NO: 1569885 - RNA, 19 nt, Artificial Sequence
  Description of Artificial Sequence: Synthetic oligonucleotide
  Sense strand starting at position 1988 of SEQ ID NO: 1560011
ccauuagcuccuuguguca

SEQ ID NO: 1569886 - RNA, 19 nt, Artificial Sequence
  Description of Artificial Sequence: Synthetic oligonucleotide
  Antisense strand to SEQ ID NO: 1569885
ugacacaaggagcuaaugg

SEQ ID NO: 1569887 - RNA, 19 nt, Artificial Sequence
  Description of Artificial Sequence: Synthetic oligonucleotide
  Sense strand starting at position 2065 of SEQ ID NO: 1560011
uggauacucucagccaagu

SEQ ID NO: 1569888 - RNA, 19 nt, Artificial Sequence
  Description of Artificial Sequence: Synthetic oligonucleotide
  Antisense strand to SEQ ID NO: 1569887
acuuggcugagaguaucca

SEQ ID NO: 1569889 - RNA, 19 nt, Artificial Sequence
  Description of Artificial Sequence: Synthetic oligonucleotide
  Sense strand starting at position 2371 of SEQ ID NO: 1560011
cugguucagcgcgaacuua

SEQ ID NO: 1569890 - RNA, 19 nt, Artificial Sequence
  Description of Artificial Sequence: Synthetic oligonucleotide
  Antisense strand to SEQ ID NO: 1569889
uaaguucgcgcugaaccag

SEQ ID NO: 1569891 - RNA, 19 nt, Artificial Sequence
  Description of Artificial Sequence: Synthetic oligonucleotide
  Sense strand starting at position 2556 of SEQ ID NO: 1560011
aggcgaaagcaucgcuuga

SEQ ID NO: 1569892 - RNA, 19 nt, Artificial Sequence
  Description of Artificial Sequence: Synthetic oligonucleotide
  Antisense strand to SEQ ID NO: 1569891
ucaagcgaugcuuucgccu

SEQ ID NO: 1569893 - RNA, 19 nt, Artificial Sequence
  Description of Artificial Sequence: Synthetic oligonucleotide
  Sense strand starting at position 2558 of SEQ ID NO: 1560011
gcgaaagcaucgcuugaag

SEQ ID NO: 1569894 - RNA, 19 nt, Artificial Sequence
  Description of Artificial Sequence: Synthetic oligonucleotide
  Antisense strand to SEQ ID NO: 1569893
cuucaagcgaugcuuucgc

SEQ ID NO: 1569895 - RNA, 19 nt, Artificial Sequence
  Description of Artificial Sequence: Synthetic oligonucleotide
  Sense strand starting at position 2861 of SEQ ID NO: 1560011
aucuuucccuaggagaaga

SEQ ID NO: 1569896 - RNA, 19 nt, Artificial Sequence
  Description of Artificial Sequence: Synthetic oligonucleotide
  Antisense strand to SEQ ID NO: 1569895
ucuucuccuagggaaagau

SEQ ID NO: 1569897 - RNA, 19 nt, Artificial Sequence
  Description of Artificial Sequence: Synthetic oligonucleotide
  Sense strand starting at position 2884 of SEQ ID NO: 1560011
guguucuucccggcagagu

SEQ ID NO: 1569898 - RNA, 19 nt, Artificial Sequence
  Description of Artificial Sequence: Synthetic oligonucleotide
  Antisense strand to SEQ ID NO: 1569897
acucugccgggaagaacac

SEQ ID NO: 1569899 - RNA, 19 nt, Artificial Sequence
  Description of Artificial Sequence: Synthetic oligonucleotide
  Sense strand starting at position 2885 of SEQ ID NO: 1560011
uguucuucccggcagagua

SEQ ID NO: 1569900 - RNA, 19 nt, Artificial Sequence
  Description of Artificial Sequence: Synthetic oligonucleotide
  Antisense strand to SEQ ID NO: 1569899
uacucugccgggaagaaca

SEQ ID NO: 1569901 - RNA, 19 nt, Artificial Sequence
  Description of Artificial Sequence: Synthetic oligonucleotide
  Sense strand starting at position 2901 of SEQ ID NO: 1560011
guaccuuucuuuccugacu

SEQ ID NO: 1569902 - RNA, 19 nt, Artificial Sequence
  Description of Artificial Sequence: Synthetic oligonucleotide
  Antisense strand to SEQ ID NO: 1569901
agucaggaaagaaagguac

SEQ ID NO: 1569903 - RNA, 19 nt, Artificial Sequence
  Description of Artificial Sequence: Synthetic oligonucleotide
  Sense strand starting at position 3023 of SEQ ID NO: 1560011
aaauuagggucagguaaga

SEQ ID NO: 1569904 - RNA, 19 nt, Artificial Sequence
  Description of Artificial Sequence: Synthetic oligonucleotide
  Antisense strand to SEQ ID NO: 1569903
ucuuaccugacccuaauuu

SEQ ID NO: 1569905 - RNA, 19 nt, Artificial Sequence
  Description of Artificial Sequence: Synthetic oligonucleotide
  Sense strand starting at position 3046 of SEQ ID NO: 1560011
gggugaagagguuagaugu

SEQ ID NO: 1569906 - RNA, 19 nt, Artificial Sequence
  Description of Artificial Sequence: Synthetic oligonucleotide
  Antisense strand to SEQ ID NO: 1569905
acaucuaaccucuucaccc

SEQ ID NO: 1569907 - RNA, 19 nt, Artificial Sequence
  Description of Artificial Sequence: Synthetic oligonucleotide
  Sense strand starting at position 3056 of SEQ ID NO: 1560011
guuagaugucaagguuaga

SEQ ID NO: 1569908 - RNA, 19 nt, Artificial Sequence
  Description of Artificial Sequence: Synthetic oligonucleotide
  Antisense strand to SEQ ID NO: 1569907
ucuaaccuugacaucuaac

SEQ ID NO: 1569909 - RNA, 19 nt, Artificial Sequence
  Description of Artificial Sequence: Synthetic oligonucleotide
  Sense strand starting at position 3105 of SEQ ID NO: 1560011
aguugaaagcuagaucgca

SEQ ID NO: 1569910 - RNA, 19 nt, Artificial Sequence
  Description of Artificial Sequence: Synthetic oligonucleotide
  Antisense strand to SEQ ID NO: 1569909
ugcgaucuagcuuucaacu

SEQ ID NO: 1569911 - RNA, 19 nt, Artificial Sequence
  Description of Artificial Sequence: Synthetic oligonucleotide
  Sense strand starting at position 3113 of SEQ ID NO: 1560011
gcuagaucgcagcaugaag

SEQ ID NO: 1569912 - RNA, 19 nt, Artificial Sequence
  Description of Artificial Sequence: Synthetic oligonucleotide
  Antisense strand to SEQ ID NO: 1569911
cuucaugcugcgaucuagc

SEQ ID NO: 1569913 - RNA, 19 nt, Artificial Sequence
  Description of Artificial Sequence: Synthetic oligonucleotide
  Sense strand starting at position 3219 of SEQ ID NO: 1560011
guucuagaugccgagguua

SEQ ID NO: 1569914 - RNA, 19 nt, Artificial Sequence
  Description of Artificial Sequence: Synthetic oligonucleotide
  Antisense strand to SEQ ID NO: 1569913
uaaccucggcaucuagaac

SEQ ID NO: 1569915 - RNA, 19 nt, Artificial Sequence
  Description of Artificial Sequence: Synthetic oligonucleotide
  Sense strand starting at position 3313 of SEQ ID NO: 1560011
gaggaugaauaagaaacaa

SEQ ID NO: 1569916 - RNA, 19 nt, Artificial Sequence
  Description of Artificial Sequence: Synthetic oligonucleotide
  Antisense strand to SEQ ID NO: 1569915
uuguuucuuauucauccuc

SEQ ID NO: 1569917 - RNA, 19 nt, Artificial Sequence
  Description of Artificial Sequence: Synthetic oligonucleotide
  Sense strand starting at position 3332 of SEQ ID NO: 1560011
aggaaucagcaaggcaauu

SEQ ID NO: 1569918 - RNA, 19 nt, Artificial Sequence
  Description of Artificial Sequence: Synthetic oligonucleotide
  Antisense strand to SEQ ID NO: 1569917
aauugccuugcugauuccu

SEQ ID NO: 1569919 - RNA, 19 nt, Artificial Sequence
  Description of Artificial Sequence: Synthetic oligonucleotide
  Sense strand starting at position 3417 of SEQ ID NO: 1560011
gugacauugaaguagaagu

SEQ ID NO: 1569920 - RNA, 19 nt, Artificial Sequence
  Description of Artificial Sequence: Synthetic oligonucleotide
  Antisense strand to SEQ ID NO: 1569919
acuucuacuucaaugucac

SEQ ID NO: 1569921 - RNA, 19 nt, Artificial Sequence
  Description of Artificial Sequence: Synthetic oligonucleotide
  Sense strand starting at position 3430 of SEQ ID NO: 1560011
agaagugaaugauaaggaa

SEQ ID NO: 1569922 - RNA, 19 nt, Artificial Sequence
  Description of Artificial Sequence: Synthetic oligonucleotide
  Antisense strand to SEQ ID NO: 1569921
uuccuuaucauucacuucu

SEQ ID NO: 1569923 - RNA, 19 nt, Artificial Sequence
  Description of Artificial Sequence: Synthetic oligonucleotide
  Sense strand starting at position 3433 of SEQ ID NO: 1560011
agugaaugauaaggaaaga

SEQ ID NO: 1569924 - RNA, 19 nt, Artificial Sequence
  Description of Artificial Sequence: Synthetic oligonucleotide
  Antisense strand to SEQ ID NO: 1569923
ucuuuccuuaucauucacu

SEQ ID NO: 1569925 - RNA, 19 nt, Artificial Sequence
  Description of Artificial Sequence: Synthetic oligonucleotide
  Sense strand starting at position 3487 of SEQ ID NO: 1560011
agagguagccucuagagca

SEQ ID NO: 1569926 - RNA, 19 nt, Artificial Sequence
  Description of Artificial Sequence: Synthetic oligonucleotide
  Antisense strand to SEQ ID NO: 1569925
ugcucuagaggcuaccucu

SEQ ID NO: 1569927 - RNA, 19 nt, Artificial Sequence
  Description of Artificial Sequence: Synthetic oligonucleotide
  Sense strand starting at position 3526 of SEQ ID NO: 1560011
ccagcuugcagacagagau

SEQ ID NO: 1569928 - RNA, 19 nt, Artificial Sequence
  Description of Artificial Sequence: Synthetic oligonucleotide
  Antisense strand to SEQ ID NO: 1569927
aucucugucugcaagcugg

SEQ ID NO: 1569929 - RNA, 19 nt, Artificial Sequence
  Description of Artificial Sequence: Synthetic oligonucleotide
  Sense strand starting at position 55 of SEQ ID NO: 1560012
ccauguuagguuugagaug

SEQ ID NO: 1569930 - RNA, 19 nt, Artificial Sequence
  Description of Artificial Sequence: Synthetic oligonucleotide
  Antisense strand to SEQ ID NO: 1569929
caucucaaaccuaacaugg

SEQ ID NO: 1569931 - RNA, 19 nt, Artificial Sequence
  Description of Artificial Sequence: Synthetic oligonucleotide
  Sense strand starting at position 60 of SEQ ID NO: 1560012
uuagguuugagaugccagu

SEQ ID NO: 1569932 - RNA, 19 nt, Artificial Sequence
  Description of Artificial Sequence: Synthetic oligonucleotide
  Antisense strand to SEQ ID NO: 1569931
acuggcaucucaaaccuaa

SEQ ID NO: 1569933 - RNA, 19 nt, Artificial Sequence
  Description of Artificial Sequence: Synthetic oligonucleotide
  Sense strand starting at position 103 of SEQ ID NO: 1560012
uggcaaacugccuauguga

SEQ ID NO: 1569934 - RNA, 19 nt, Artificial Sequence
  Description of Artificial Sequence: Synthetic oligonucleotide
  Antisense strand to SEQ ID NO: 1569933
ucacauaggcaguuugcca

SEQ ID NO: 1569935 - RNA, 19 nt, Artificial Sequence
  Description of Artificial Sequence: Synthetic oligonucleotide
  Sense strand starting at position 122 of SEQ ID NO: 1560012
gcuggaguccuugagaagg

SEQ ID NO: 1569936 - RNA, 19 nt, Artificial Sequence
  Description of Artificial Sequence: Synthetic oligonucleotide
  Antisense strand to SEQ ID NO: 1569935
ccuucucaaggacuccagc

SEQ ID NO: 1569937 - RNA, 19 nt, Artificial Sequence
  Description of Artificial Sequence: Synthetic oligonucleotide
  Sense strand starting at position 192 of SEQ ID NO: 1560012
cacagugcugccugggaau

SEQ ID NO: 1569938 - RNA, 19 nt, Artificial Sequence
  Description of Artificial Sequence: Synthetic oligonucleotide
  Antisense strand to SEQ ID NO: 1569937
auucccaggcagcacugug

SEQ ID NO: 1569939 - RNA, 19 nt, Artificial Sequence
  Description of Artificial Sequence: Synthetic oligonucleotide
  Sense strand starting at position 346 of SEQ ID NO: 1560012
uagaaauaguuggucagga

SEQ ID NO: 1569940 - RNA, 19 nt, Artificial Sequence
  Description of Artificial Sequence: Synthetic oligonucleotide
  Antisense strand to SEQ ID NO: 1569939
uccugaccaacuauuucua

SEQ ID NO: 1569941 - RNA, 19 nt, Artificial Sequence
  Description of Artificial Sequence: Synthetic oligonucleotide
  Sense strand starting at position 540 of SEQ ID NO: 1560012
cccaguucuugcuccauga

SEQ ID NO: 1569942 - RNA, 19 nt, Artificial Sequence
  Description of Artificial Sequence: Synthetic oligonucleotide
  Antisense strand to SEQ ID NO: 1569941
ucauggagcaagaacuggg

SEQ ID NO: 1569943 - RNA, 19 nt, Artificial Sequence
  Description of Artificial Sequence: Synthetic oligonucleotide
  Sense strand starting at position 685 of SEQ ID NO: 1560012
uuucucgacuagccauaua

SEQ ID NO: 1569944 - RNA, 19 nt, Artificial Sequence
  Description of Artificial Sequence: Synthetic oligonucleotide
  Antisense strand to SEQ ID NO: 1569943
uauauggcuagucgagaaa

SEQ ID NO: 1569945 - RNA, 19 nt, Artificial Sequence
  Description of Artificial Sequence: Synthetic oligonucleotide
  Sense strand starting at position 1027 of SEQ ID NO: 1560012
uggcucaucaguuaugguu

SEQ ID NO: 1569946 - RNA, 19 nt, Artificial Sequence
  Description of Artificial Sequence: Synthetic oligonucleotide
  Antisense strand to SEQ ID NO: 1569945
aaccauaacugaugagcca

SEQ ID NO: 1569947 - RNA, 19 nt, Artificial Sequence
  Description of Artificial Sequence: Synthetic oligonucleotide
  Sense strand starting at position 1033 of SEQ ID NO: 1560012
aucaguuaugguuagugua

SEQ ID NO: 1569948 - RNA, 19 nt, Artificial Sequence
  Description of Artificial Sequence: Synthetic oligonucleotide
  Antisense strand to SEQ ID NO: 1569947
uacacuaaccauaacugau

SEQ ID NO: 1569949 - RNA, 19 nt, Artificial Sequence
  Description of Artificial Sequence: Synthetic oligonucleotide
  Sense strand starting at position 1035 of SEQ ID NO: 1560012
caguuaugguuaguguauu

SEQ ID NO: 1569950 - RNA, 19 nt, Artificial Sequence
  Description of Artificial Sequence: Synthetic oligonucleotide
  Antisense strand to SEQ ID NO: 1569949
aauacacuaaccauaacug

SEQ ID NO: 1569951 - RNA, 19 nt, Artificial Sequence
  Description of Artificial Sequence: Synthetic oligonucleotide
  Sense strand starting at position 1152 of SEQ ID NO: 1560012
gagcuuugaagaggagagu

SEQ ID NO: 1569952 - RNA, 19 nt, Artificial Sequence
  Description of Artificial Sequence: Synthetic oligonucleotide
  Antisense strand to SEQ ID NO: 1569951
acucuccucuucaaagcuc

SEQ ID NO: 1569953 - RNA, 19 nt, Artificial Sequence
  Description of Artificial Sequence: Synthetic oligonucleotide
  Sense strand starting at position 1429 of SEQ ID NO: 1560012
cccagaucaugcccuuaga

SEQ ID NO: 1569954 - RNA, 19 nt, Artificial Sequence
  Description of Artificial Sequence: Synthetic oligonucleotide
  Antisense strand to SEQ ID NO: 1569953
ucuaagggcaugaucuggg

SEQ ID NO: 1569955 - RNA, 19 nt, Artificial Sequence
  Description of Artificial Sequence: Synthetic oligonucleotide
  Sense strand starting at position 1540 of SEQ ID NO: 1560012
auccuucggucuucuaaga

SEQ ID NO: 1569956 - RNA, 19 nt, Artificial Sequence
  Description of Artificial Sequence: Synthetic oligonucleotide
  Antisense strand to SEQ ID NO: 1569955
ucuuagaagaccgaaggau

SEQ ID NO: 1569957 - RNA, 19 nt, Artificial Sequence
  Description of Artificial Sequence: Synthetic oligonucleotide
  Sense strand starting at position 1703 of SEQ ID NO: 1560012
uggauacucucagccaagu

SEQ ID NO: 1569958 - RNA, 19 nt, Artificial Sequence
  Description of Artificial Sequence: Synthetic oligonucleotide
  Antisense strand to SEQ ID NO: 1569957
acuuggcugagaguaucca

SEQ ID NO: 1569959 - RNA, 19 nt, Artificial Sequence
  Description of Artificial Sequence: Synthetic oligonucleotide
  Sense strand starting at position 2499 of SEQ ID NO: 1560012
aucuuucccuaggagaaga

SEQ ID NO: 1569960 - RNA, 19 nt, Artificial Sequence
  Description of Artificial Sequence: Synthetic oligonucleotide
  Antisense strand to SEQ ID NO: 1569959
ucuucuccuagggaaagau

SEQ ID NO: 1569961 - RNA, 19 nt, Artificial Sequence
  Description of Artificial Sequence: Synthetic oligonucleotide
  Sense strand starting at position 2522 of SEQ ID NO: 1560012
guguucuucccggcagagu

SEQ ID NO: 1569962 - RNA, 19 nt, Artificial Sequence
  Description of Artificial Sequence: Synthetic oligonucleotide
  Antisense strand to SEQ ID NO: 1569961
acucugccgggaagaacac

SEQ ID NO: 1569963 - RNA, 19 nt, Artificial Sequence
  Description of Artificial Sequence: Synthetic oligonucleotide
  Sense strand starting at position 2523 of SEQ ID NO: 1560012
uguucuucccggcagagua

SEQ ID NO: 1569964 - RNA, 19 nt, Artificial Sequence
  Description of Artificial Sequence: Synthetic oligonucleotide
  Antisense strand to SEQ ID NO: 1569963
uacucugccgggaagaaca

SEQ ID NO: 1569965 - RNA, 19 nt, Artificial Sequence
  Description of Artificial Sequence: Synthetic oligonucleotide
  Sense strand starting at position 2539 of SEQ ID NO: 1560012
guaccuuucuuuccugacu

SEQ ID NO: 1569966 - RNA, 19 nt, Artificial Sequence
  Description of Artificial Sequence: Synthetic oligonucleotide
  Antisense strand to SEQ ID NO: 1569965
agucaggaaagaaagguac

SEQ ID NO: 1569967 - RNA, 19 nt, Artificial Sequence
  Description of Artificial Sequence: Synthetic oligonucleotide
  Sense strand starting at position 2684 of SEQ ID NO: 1560012
gggugaagagguuagaugu

SEQ ID NO: 1569968 - RNA, 19 nt, Artificial Sequence
  Description of Artificial Sequence: Synthetic oligonucleotide
  Antisense strand to SEQ ID NO: 1569967
acaucuaaccucuucaccc

SEQ ID NO: 1569969 - RNA, 19 nt, Artificial Sequence
  Description of Artificial Sequence: Synthetic oligonucleotide
  Sense strand starting at position 2694 of SEQ ID NO: 1560012
guuagaugucaagguuaga

SEQ ID NO: 1569970 - RNA, 19 nt, Artificial Sequence
  Description of Artificial Sequence: Synthetic oligonucleotide
  Antisense strand to SEQ ID NO: 1569969
ucuaaccuugacaucuaac

SEQ ID NO: 1569971 - RNA, 19 nt, Artificial Sequence
  Description of Artificial Sequence: Synthetic oligonucleotide
  Sense strand starting at position 2743 of SEQ ID NO: 1560012
aguugaaagcuagaucgca

SEQ ID NO: 1569972 - RNA, 19 nt, Artificial Sequence
  Description of Artificial Sequence: Synthetic oligonucleotide
  Antisense strand to SEQ ID NO: 1569971
ugcgaucuagcuuucaacu

SEQ ID NO: 1569973 - RNA, 19 nt, Artificial Sequence
  Description of Artificial Sequence: Synthetic oligonucleotide
  Sense strand starting at position 2751 of SEQ ID NO: 1560012
gcuagaucgcagcaugaag

SEQ ID NO: 1569974 - RNA, 19 nt, Artificial Sequence
  Description of Artificial Sequence: Synthetic oligonucleotide
  Antisense strand to SEQ ID NO: 1569973
cuucaugcugcgaucuagc

SEQ ID NO: 1569975 - RNA, 19 nt, Artificial Sequence
  Description of Artificial Sequence: Synthetic oligonucleotide
  Sense strand starting at position 2857 of SEQ ID NO: 1560012
guucuagaugccgagguua

SEQ ID NO: 1569976 - RNA, 19 nt, Artificial Sequence
  Description of Artificial Sequence: Synthetic oligonucleotide
  Antisense strand to SEQ ID NO: 1569975
uaaccucggcaucuagaac

SEQ ID NO: 1569977 - RNA, 19 nt, Artificial Sequence
  Description of Artificial Sequence: Synthetic oligonucleotide
  Sense strand starting at position 2951 of SEQ ID NO: 1560012
gaggaugaauaagaaacaa

SEQ ID NO: 1569978 - RNA, 19 nt, Artificial Sequence
  Description of Artificial Sequence: Synthetic oligonucleotide
  Antisense strand to SEQ ID NO: 1569977
uuguuucuuauucauccuc

SEQ ID NO: 1569979 - RNA, 19 nt, Artificial Sequence
  Description of Artificial Sequence: Synthetic oligonucleotide
  Sense strand starting at position 2970 of SEQ ID NO: 1560012
aggaaucagcaaggcaauu

SEQ ID NO: 1569980 - RNA, 19 nt, Artificial Sequence
  Description of Artificial Sequence: Synthetic oligonucleotide
  Antisense strand to SEQ ID NO: 1569979
aauugccuugcugauuccu

SEQ ID NO: 1569981 - RNA, 19 nt, Artificial Sequence
  Description of Artificial Sequence: Synthetic oligonucleotide
  Sense strand starting at position 3055 of SEQ ID NO: 1560012
gugacauugaaguagaagu

SEQ ID NO: 1569982 - RNA, 19 nt, Artificial Sequence
  Description of Artificial Sequence: Synthetic oligonucleotide
  Antisense strand to SEQ ID NO: 1569981
acuucuacuucaaugucac

SEQ ID NO: 1569983 - RNA, 19 nt, Artificial Sequence
  Description of Artificial Sequence: Synthetic oligonucleotide
  Sense strand starting at position 3068 of SEQ ID NO: 1560012
agaagugaaugauaaggaa

SEQ ID NO: 1569984 - RNA, 19 nt, Artificial Sequence
  Description of Artificial Sequence: Synthetic oligonucleotide
  Antisense strand to SEQ ID NO: 1569983
uuccuuaucauucacuucu

SEQ ID NO: 1569985 - RNA, 19 nt, Artificial Sequence
  Description of Artificial Sequence: Synthetic oligonucleotide
  Sense strand starting at position 3071 of SEQ ID NO: 1560012
agugaaugauaaggaaaga

SEQ ID NO: 1569986 - RNA, 19 nt, Artificial Sequence
  Description of Artificial Sequence: Synthetic oligonucleotide
  Antisense strand to SEQ ID NO: 1569985
ucuuuccuuaucauucacu

SEQ ID NO: 1569987 - RNA, 19 nt, Artificial Sequence
  Description of Artificial Sequence: Synthetic oligonucleotide
  Sense strand starting at position 3125 of SEQ ID NO: 1560012
agagguagccucuagagca

SEQ ID NO: 1569988 - RNA, 19 nt, Artificial Sequence
  Description of Artificial Sequence: Synthetic oligonucleotide
  Antisense strand to SEQ ID NO: 1569987
ugcucuagaggcuaccucu

SEQ ID NO: 1569989 - RNA, 19 nt, Artificial Sequence
  Description of Artificial Sequence: Synthetic oligonucleotide
  Sense strand starting at position 3164 of SEQ ID NO: 1560012
ccagcuugcagacagagau

SEQ ID NO: 1569990 - RNA, 19 nt, Artificial Sequence
  Description of Artificial Sequence: Synthetic oligonucleotide
  Antisense strand to SEQ ID NO: 1569989
aucucugucugcaagcugg

SEQ ID NO: 1569991 - RNA, 19 nt, Artificial Sequence
  Description of Artificial Sequence: Synthetic oligonucleotide
  Sense strand starting at position 3810 of SEQ ID NO: 1560012
ccaacagauugagaaacua

SEQ ID NO: 1569992 - RNA, 19 nt, Artificial Sequence
  Description of Artificial Sequence: Synthetic oligonucleotide
  Antisense strand to SEQ ID NO: 1569991
uaguuucucaaucuguugg

SEQ ID NO: 1569993 - RNA, 19 nt, Artificial Sequence
  Description of Artificial Sequence: Synthetic oligonucleotide
  Sense strand starting at position 3844 of SEQ ID NO: 1560012
ggcugugcacgugaggaaa

SEQ ID NO: 1569994 - RNA, 19 nt, Artificial Sequence
  Description of Artificial Sequence: Synthetic oligonucleotide
  Antisense strand to SEQ ID NO: 1569993
uuuccucacgugcacagcc

SEQ ID NO: 1569995 - RNA, 19 nt, Artificial Sequence
  Description of Artificial Sequence: Synthetic oligonucleotide
  Sense strand starting at position 3890 of SEQ ID NO: 1560012
ggguguggcagcugaauaa

SEQ ID NO: 1569996 - RNA, 19 nt, Artificial Sequence
  Description of Artificial Sequence: Synthetic oligonucleotide
  Antisense strand to SEQ ID NO: 1569995
uuauucagcugccacaccc

SEQ ID NO: 1569997 - RNA, 19 nt, Artificial Sequence
  Description of Artificial Sequence: Synthetic oligonucleotide
  Sense strand starting at position 3927 of SEQ ID NO: 1560012
cugugaaucccugggcacu

SEQ ID NO: 1569998 - RNA, 19 nt, Artificial Sequence
  Description of Artificial Sequence: Synthetic oligonucleotide
  Antisense strand to SEQ ID NO: 1569997
agugcccagggauucacag

SEQ ID NO: 1569999 - RNA, 19 nt, Artificial Sequence
  Description of Artificial Sequence: Synthetic oligonucleotide
  Sense strand starting at position 3939 of SEQ ID NO: 1560012
gggcacugugacuauguua

SEQ ID NO: 1570000 - RNA, 19 nt, Artificial Sequence
  Description of Artificial Sequence: Synthetic oligonucleotide
  Antisense strand to SEQ ID NO: 1569999
uaacauagucacagugccc

SEQ ID NO: 1570001 - RNA, 19 nt, Artificial Sequence
  Description of Artificial Sequence: Synthetic oligonucleotide
  Sense strand starting at position 3946 of SEQ ID NO: 1560012
gugacuauguuacuuucua

SEQ ID NO: 1570002 - RNA, 19 nt, Artificial Sequence
  Description of Artificial Sequence: Synthetic oligonucleotide
  Antisense strand to SEQ ID NO: 1570001
uagaaaguaacauagucac

SEQ ID NO: 1570003 - RNA, 19 nt, Artificial Sequence
  Description of Artificial Sequence: Synthetic oligonucleotide
  Sense strand starting at position 3947 of SEQ ID NO: 1560012
ugacuauguuacuuucuau

SEQ ID NO: 1570004 - RNA, 19 nt, Artificial Sequence
  Description of Artificial Sequence: Synthetic oligonucleotide
  Antisense strand to SEQ ID NO: 1570003
auagaaaguaacauaguca

SEQ ID NO: 1570005 - RNA, 19 nt, Artificial Sequence
  Description of Artificial Sequence: Synthetic oligonucleotide
  Sense strand starting at position 3950 of SEQ ID NO: 1560012
cuauguuacuuucuauggu

SEQ ID NO: 1570006 - RNA, 19 nt, Artificial Sequence
  Description of Artificial Sequence: Synthetic oligonucleotide
  Antisense strand to SEQ ID NO: 1570005
accauagaaaguaacauag

SEQ ID NO: 1570007 - RNA, 19 nt, Artificial Sequence
  Description of Artificial Sequence: Synthetic oligonucleotide
  Sense strand starting at position 3953 of SEQ ID NO: 1560012
uguuacuuucuaugguaaa

SEQ ID NO: 1570008 - RNA, 19 nt, Artificial Sequence
  Description of Artificial Sequence: Synthetic oligonucleotide
  Antisense strand to SEQ ID NO: 1570007
uuuaccauagaaaguaaca

SEQ ID NO: 1570009 - RNA, 19 nt, Artificial Sequence
  Description of Artificial Sequence: Synthetic oligonucleotide
  Sense strand starting at position 189 of SEQ ID NO: 1560013
ccagcuaaucuucguacuu

SEQ ID NO: 1570010 - RNA, 19 nt, Artificial Sequence
  Description of Artificial Sequence: Synthetic oligonucleotide
  Antisense strand to SEQ ID NO: 1570009
aaguacgaagauuagcugg

SEQ ID NO: 1570011 - RNA, 19 nt, Artificial Sequence
  Description of Artificial Sequence: Synthetic oligonucleotide
  Sense strand starting at position 393 of SEQ ID NO: 1560013
cuguccucaucuuggagau

SEQ ID NO: 1570012 - RNA, 19 nt, Artificial Sequence
  Description of Artificial Sequence: Synthetic oligonucleotide
  Antisense strand to SEQ ID NO: 1570011
aucuccaagaugaggacag

SEQ ID NO: 1570013 - RNA, 19 nt, Artificial Sequence
  Description of Artificial Sequence: Synthetic oligonucleotide
  Sense strand starting at position 395 of SEQ ID NO: 1560013
guccucaucuuggagaucu

SEQ ID NO: 1570014 - RNA, 19 nt, Artificial Sequence
  Description of Artificial Sequence: Synthetic oligonucleotide
  Antisense strand to SEQ ID NO: 1570013
agaucuccaagaugaggac

SEQ ID NO: 1570015 - RNA, 19 nt, Artificial Sequence
  Description of Artificial Sequence: Synthetic oligonucleotide
  Sense strand starting at position 608 of SEQ ID NO: 1560013
cugugugucuugccuugga

SEQ ID NO: 1570016 - RNA, 19 nt, Artificial Sequence
  Description of Artificial Sequence: Synthetic oligonucleotide
  Antisense strand to SEQ ID NO: 1570015
uccaaggcaagacacacag

SEQ ID NO: 1570017 - RNA, 19 nt, Artificial Sequence
  Description of Artificial Sequence: Synthetic oligonucleotide
  Sense strand starting at position 611 of SEQ ID NO: 1560013
ugugucuugccuuggacau

SEQ ID NO: 1570018 - RNA, 19 nt, Artificial Sequence
  Description of Artificial Sequence: Synthetic oligonucleotide
  Antisense strand to SEQ ID NO: 1570017
auguccaaggcaagacaca

SEQ ID NO: 1570019 - RNA, 19 nt, Artificial Sequence
  Description of Artificial Sequence: Synthetic oligonucleotide
  Sense strand starting at position 612 of SEQ ID NO: 1560013
gugucuugccuuggacauc

SEQ ID NO: 1570020 - RNA, 19 nt, Artificial Sequence
  Description of Artificial Sequence: Synthetic oligonucleotide
  Antisense strand to SEQ ID NO: 1570019
gauguccaaggcaagacac

SEQ ID NO: 1570021 - RNA, 19 nt, Artificial Sequence
  Description of Artificial Sequence: Synthetic oligonucleotide
  Sense strand starting at position 921 of SEQ ID NO: 1560013
cgggcuauauguuauaucu

SEQ ID NO: 1570022 - RNA, 19 nt, Artificial Sequence
  Description of Artificial Sequence: Synthetic oligonucleotide
  Antisense strand to SEQ ID NO: 1570021
agauauaacauauagcccg

SEQ ID NO: 1570023 - RNA, 19 nt, Artificial Sequence
  Description of Artificial Sequence: Synthetic oligonucleotide
  Sense strand starting at position 923 of SEQ ID NO: 1560013
ggcuauauguuauaucuca

SEQ ID NO: 1570024 - RNA, 19 nt, Artificial Sequence
  Description of Artificial Sequence: Synthetic oligonucleotide
  Antisense strand to SEQ ID NO: 1570023
ugagauauaacauauagcc

SEQ ID NO: 1570025 - RNA, 19 nt, Artificial Sequence
  Description of Artificial Sequence: Synthetic oligonucleotide
  Sense strand starting at position 1028 of SEQ ID NO: 1560013
gacggacaucgucagaaga

SEQ ID NO: 1570026 - RNA, 19 nt, Artificial Sequence
  Description of Artificial Sequence: Synthetic oligonucleotide
  Antisense strand to SEQ ID NO: 1570025
ucuucugacgauguccguc

SEQ ID NO: 1570027 - RNA, 19 nt, Artificial Sequence
  Description of Artificial Sequence: Synthetic oligonucleotide
  Sense strand starting at position 1030 of SEQ ID NO: 1560013
cggacaucgucagaagauc

SEQ ID NO: 1570028 - RNA, 19 nt, Artificial Sequence
  Description of Artificial Sequence: Synthetic oligonucleotide
  Antisense strand to SEQ ID NO: 1570027
gaucuucugacgauguccg

SEQ ID NO: 1570029 - RNA, 19 nt, Artificial Sequence
  Description of Artificial Sequence: Synthetic oligonucleotide
  Sense strand starting at position 1038 of SEQ ID NO: 1560013
gucagaagauccuggaauc

SEQ ID NO: 1570030 - RNA, 19 nt, Artificial Sequence
  Description of Artificial Sequence: Synthetic oligonucleotide
  Antisense strand to SEQ ID NO: 1570029
gauuccaggaucuucugac

SEQ ID NO: 1570031 - RNA, 19 nt, Artificial Sequence
  Description of Artificial Sequence: Synthetic oligonucleotide
  Sense strand starting at position 1049 of SEQ ID NO: 1560013
cuggaaucuucuccacuag

SEQ ID NO: 1570032 - RNA, 19 nt, Artificial Sequence
  Description of Artificial Sequence: Synthetic oligonucleotide
  Antisense strand to SEQ ID NO: 1570031
cuaguggagaagauuccag

SEQ ID NO: 1570033 - RNA, 19 nt, Artificial Sequence
  Description of Artificial Sequence: Synthetic oligonucleotide
  Sense strand starting at position 1395 of SEQ ID NO: 1560013
cugagucacgucugaguca

SEQ ID NO: 1570034 - RNA, 19 nt, Artificial Sequence
  Description of Artificial Sequence: Synthetic oligonucleotide
  Antisense strand to SEQ ID NO: 1570033
ugacucagacgugacucag

SEQ ID NO: 1570035 - RNA, 19 nt, Artificial Sequence
  Description of Artificial Sequence: Synthetic oligonucleotide
  Sense strand starting at position 2454 of SEQ ID NO: 1560013
gcggagcaguguuauggua

SEQ ID NO: 1570036 - RNA, 19 nt, Artificial Sequence
  Description of Artificial Sequence: Synthetic oligonucleotide
  Antisense strand to SEQ ID NO: 1570035
uaccauaacacugcuccgc

SEQ ID NO: 1570037 - RNA, 19 nt, Artificial Sequence
  Description of Artificial Sequence: Synthetic oligonucleotide
  Sense strand starting at position 2823 of SEQ ID NO: 1560013
ggcgguuauguaagucaug

SEQ ID NO: 1570038 - RNA, 19 nt, Artificial Sequence
  Description of Artificial Sequence: Synthetic oligonucleotide
  Antisense strand to SEQ ID NO: 1570037
caugacuuacauaaccgcc

SEQ ID NO: 1570039 - RNA, 19 nt, Artificial Sequence
  Description of Artificial Sequence: Synthetic oligonucleotide
  Sense strand starting at position 2824 of SEQ ID NO: 1560013
gcgguuauguaagucaugu

SEQ ID NO: 1570040 - RNA, 19 nt, Artificial Sequence
  Description of Artificial Sequence: Synthetic oligonucleotide
  Antisense strand to SEQ ID NO: 1570039
acaugacuuacauaaccgc

SEQ ID NO: 1570041 - RNA, 19 nt, Artificial Sequence
  Description of Artificial Sequence: Synthetic oligonucleotide
  Sense strand starting at position 2826 of SEQ ID NO: 1560013
gguuauguaagucaugucu

SEQ ID NO: 1570042 - RNA, 19 nt, Artificial Sequence
  Description of Artificial Sequence: Synthetic oligonucleotide
  Antisense strand to SEQ ID NO: 1570041
agacaugacuuacauaacc

SEQ ID NO: 1570043 - RNA, 19 nt, Artificial Sequence
  Description of Artificial Sequence: Synthetic oligonucleotide
  Sense strand starting at position 2828 of SEQ ID NO: 1560013
uuauguaagucaugucuga

SEQ ID NO: 1570044 - RNA, 19 nt, Artificial Sequence
  Description of Artificial Sequence: Synthetic oligonucleotide
  Antisense strand to SEQ ID NO: 1570043
ucagacaugacuuacauaa

SEQ ID NO: 1570045 - RNA, 19 nt, Artificial Sequence
  Description of Artificial Sequence: Synthetic oligonucleotide
  Sense strand starting at position 2940 of SEQ ID NO: 1560013
gguuauagccauugagacc

SEQ ID NO: 1570046 - RNA, 19 nt, Artificial Sequence
  Description of Artificial Sequence: Synthetic oligonucleotide
  Antisense strand to SEQ ID NO: 1570045
ggucucaauggcuauaacc

SEQ ID NO: 1570047 - RNA, 19 nt, Artificial Sequence
  Description of Artificial Sequence: Synthetic oligonucleotide
  Sense strand starting at position 3014 of SEQ ID NO: 1560013
agggauccuuacugaagaa

SEQ ID NO: 1570048 - RNA, 19 nt, Artificial Sequence
  Description of Artificial Sequence: Synthetic oligonucleotide
  Antisense strand to SEQ ID NO: 1570047
uucuucaguaaggaucccu

SEQ ID NO: 1570049 - RNA, 19 nt, Artificial Sequence
  Description of Artificial Sequence: Synthetic oligonucleotide
  Sense strand starting at position 3246 of SEQ ID NO: 1560013
ggcucucggugaucacaaa

SEQ ID NO: 1570050 - RNA, 19 nt, Artificial Sequence
  Description of Artificial Sequence: Synthetic oligonucleotide
  Antisense strand to SEQ ID NO: 1570049
uuugugaucaccgagagcc

SEQ ID NO: 1570051 - RNA, 19 nt, Artificial Sequence
  Description of Artificial Sequence: Synthetic oligonucleotide
  Sense strand starting at position 3481 of SEQ ID NO: 1560013
guguuugacuucucuccuu

SEQ ID NO: 1570052 - RNA, 19 nt, Artificial Sequence
  Description of Artificial Sequence: Synthetic oligonucleotide
  Antisense strand to SEQ ID NO: 1570051
aaggagagaagucaaacac

SEQ ID NO: 1570053 - RNA, 19 nt, Artificial Sequence
  Description of Artificial Sequence: Synthetic oligonucleotide
  Sense strand starting at position 3529 of SEQ ID NO: 1560013
cuugcuugcucagugguua

SEQ ID NO: 1570054 - RNA, 19 nt, Artificial Sequence
  Description of Artificial Sequence: Synthetic oligonucleotide
  Antisense strand to SEQ ID NO: 1570053
uaaccacugagcaagcaag

SEQ ID NO: 1570055 - RNA, 19 nt, Artificial Sequence
  Description of Artificial Sequence: Synthetic oligonucleotide
  Sense strand starting at position 3533 of SEQ ID NO: 1560013
cuugcucagugguuacgaa

SEQ ID NO: 1570056 - RNA, 19 nt, Artificial Sequence
  Description of Artificial Sequence: Synthetic oligonucleotide
  Antisense strand to SEQ ID NO: 1570055
uucguaaccacugagcaag

SEQ ID NO: 1570057 - RNA, 19 nt, Artificial Sequence
  Description of Artificial Sequence: Synthetic oligonucleotide
  Sense strand starting at position 3534 of SEQ ID NO: 1560013
uugcucagugguuacgaaa

SEQ ID NO: 1570058 - RNA, 19 nt, Artificial Sequence
  Description of Artificial Sequence: Synthetic oligonucleotide
  Antisense strand to SEQ ID NO: 1570057
uuucguaaccacugagcaa

SEQ ID NO: 1570059 - RNA, 19 nt, Artificial Sequence
  Description of Artificial Sequence: Synthetic oligonucleotide
  Sense strand starting at position 3567 of SEQ ID NO: 1560013
ggaguuugaacacacuguu

SEQ ID NO: 1570060 - RNA, 19 nt, Artificial Sequence
  Description of Artificial Sequence: Synthetic oligonucleotide
  Antisense strand to SEQ ID NO: 1570059
aacaguguguucaaacucc

SEQ ID NO: 1570061 - RNA, 19 nt, Artificial Sequence
  Description of Artificial Sequence: Synthetic oligonucleotide
  Sense strand starting at position 3570 of SEQ ID NO: 1560013
guuugaacacacuguucua

SEQ ID NO: 1570062 - RNA, 19 nt, Artificial Sequence
  Description of Artificial Sequence: Synthetic oligonucleotide
  Antisense strand to SEQ ID NO: 1570061
uagaacaguguguucaaac

SEQ ID NO: 1570063 - RNA, 19 nt, Artificial Sequence
  Description of Artificial Sequence: Synthetic oligonucleotide
  Sense strand starting at position 3798 of SEQ ID NO: 1560013
ugggcuauguccugaggca

SEQ ID NO: 1570064 - RNA, 19 nt, Artificial Sequence
  Description of Artificial Sequence: Synthetic oligonucleotide
  Antisense strand to SEQ ID NO: 1570063
ugccucaggacauagccca

SEQ ID NO: 1570065 - RNA, 19 nt, Artificial Sequence
  Description of Artificial Sequence: Synthetic oligonucleotide
  Sense strand starting at position 3842 of SEQ ID NO: 1560013
gcagacaucacaugggaau

SEQ ID NO: 1570066 - RNA, 19 nt, Artificial Sequence
  Description of Artificial Sequence: Synthetic oligonucleotide
  Antisense strand to SEQ ID NO: 1570065
auucccaugugaugucugc

SEQ ID NO: 1570067 - RNA, 19 nt, Artificial Sequence
  Description of Artificial Sequence: Synthetic oligonucleotide
  Sense strand starting at position 150 of SEQ ID NO: 1560014
ccagcuaaucuucguacuu

SEQ ID NO: 1570068 - RNA, 19 nt, Artificial Sequence
  Description of Artificial Sequence: Synthetic oligonucleotide
  Antisense strand to SEQ ID NO: 1570067
aaguacgaagauuagcugg

SEQ ID NO: 1570069 - RNA, 19 nt, Artificial Sequence
  Description of Artificial Sequence: Synthetic oligonucleotide
  Sense strand starting at position 354 of SEQ ID NO: 1560014
cuguccucaucuuggagau

SEQ ID NO: 1570070 - RNA, 19 nt, Artificial Sequence
  Description of Artificial Sequence: Synthetic oligonucleotide
  Antisense strand to SEQ ID NO: 1570069
aucuccaagaugaggacag

SEQ ID NO: 1570071 - RNA, 19 nt, Artificial Sequence
  Description of Artificial Sequence: Synthetic oligonucleotide
  Sense strand starting at position 356 of SEQ ID NO: 1560014
guccucaucuuggagaucu

SEQ ID NO: 1570072 - RNA, 19 nt, Artificial Sequence
  Description of Artificial Sequence: Synthetic oligonucleotide
  Antisense strand to SEQ ID NO: 1570071
agaucuccaagaugaggac

SEQ ID NO: 1570073 - RNA, 19 nt, Artificial Sequence
  Description of Artificial Sequence: Synthetic oligonucleotide
  Sense strand starting at position 569 of SEQ ID NO: 1560014
cugugugucuugccuugga

SEQ ID NO: 1570074 - RNA, 19 nt, Artificial Sequence
  Description of Artificial Sequence: Synthetic oligonucleotide
  Antisense strand to SEQ ID NO: 1570073
uccaaggcaagacacacag

SEQ ID NO: 1570075 - RNA, 19 nt, Artificial Sequence
  Description of Artificial Sequence: Synthetic oligonucleotide
  Sense strand starting at position 572 of SEQ ID NO: 1560014
ugugucuugccuuggacau

SEQ ID NO: 1570076 - RNA, 19 nt, Artificial Sequence
  Description of Artificial Sequence: Synthetic oligonucleotide
  Antisense strand to SEQ ID NO: 1570075
auguccaaggcaagacaca

SEQ ID NO: 1570077 - RNA, 19 nt, Artificial Sequence
  Description of Artificial Sequence: Synthetic oligonucleotide
  Sense strand starting at position 573 of SEQ ID NO: 1560014
gugucuugccuuggacauc

SEQ ID NO: 1570078 - RNA, 19 nt, Artificial Sequence
  Description of Artificial Sequence: Synthetic oligonucleotide
  Antisense strand to SEQ ID NO: 1570077
gauguccaaggcaagacac

SEQ ID NO: 1570079 - RNA, 19 nt, Artificial Sequence
  Description of Artificial Sequence: Synthetic oligonucleotide
  Sense strand starting at position 882 of SEQ ID NO: 1560014
cgggcuauauguuauaucu

SEQ ID NO: 1570080 - RNA, 19 nt, Artificial Sequence
  Description of Artificial Sequence: Synthetic oligonucleotide
  Antisense strand to SEQ ID NO: 1570079
agauauaacauauagcccg

SEQ ID NO: 1570081 - RNA, 19 nt, Artificial Sequence
  Description of Artificial Sequence: Synthetic oligonucleotide
  Sense strand starting at position 884 of SEQ ID NO: 1560014
ggcuauauguuauaucuca

SEQ ID NO: 1570082 - RNA, 19 nt, Artificial Sequence
  Description of Artificial Sequence: Synthetic oligonucleotide
  Antisense strand to SEQ ID NO: 1570081
ugagauauaacauauagcc

SEQ ID NO: 1570083 - RNA, 19 nt, Artificial Sequence
  Description of Artificial Sequence: Synthetic oligonucleotide
  Sense strand starting at position 989 of SEQ ID NO: 1560014
gacggacaucgucagaaga

SEQ ID NO: 1570084 - RNA, 19 nt, Artificial Sequence
  Description of Artificial Sequence: Synthetic oligonucleotide
  Antisense strand to SEQ ID NO: 1570083
ucuucugacgauguccguc

SEQ ID NO: 1570085 - RNA, 19 nt, Artificial Sequence
  Description of Artificial Sequence: Synthetic oligonucleotide
  Sense strand starting at position 991 of SEQ ID NO: 1560014
cggacaucgucagaagauc

SEQ ID NO: 1570086 - RNA, 19 nt, Artificial Sequence
  Description of Artificial Sequence: Synthetic oligonucleotide
  Antisense strand to SEQ ID NO: 1570085
gaucuucugacgauguccg

SEQ ID NO: 1570087 - RNA, 19 nt, Artificial Sequence
  Description of Artificial Sequence: Synthetic oligonucleotide
  Sense strand starting at position 999 of SEQ ID NO: 1560014
gucagaagauccuggaauc

SEQ ID NO: 1570088 - RNA, 19 nt, Artificial Sequence
  Description of Artificial Sequence: Synthetic oligonucleotide
  Antisense strand to SEQ ID NO: 1570087
gauuccaggaucuucugac

SEQ ID NO: 1570089 - RNA, 19 nt, Artificial Sequence
  Description of Artificial Sequence: Synthetic oligonucleotide
  Sense strand starting at position 1010 of SEQ ID NO: 1560014
cuggaaucuucuccacuag

SEQ ID NO: 1570090 - RNA, 19 nt, Artificial Sequence
  Description of Artificial Sequence: Synthetic oligonucleotide
  Antisense strand to SEQ ID NO: 1570089
cuaguggagaagauuccag

SEQ ID NO: 1570091 - RNA, 19 nt, Artificial Sequence
  Description of Artificial Sequence: Synthetic oligonucleotide
  Sense strand starting at position 1356 of SEQ ID NO: 1560014
cugagucacgucugaguca

SEQ ID NO: 1570092 - RNA, 19 nt, Artificial Sequence
  Description of Artificial Sequence: Synthetic oligonucleotide
  Antisense strand to SEQ ID NO: 1570091
ugacucagacgugacucag

SEQ ID NO: 1570093 - RNA, 19 nt, Artificial Sequence
  Description of Artificial Sequence: Synthetic oligonucleotide
  Sense strand starting at position 2415 of SEQ ID NO: 1560014
gcggagcaguguuauggua

SEQ ID NO: 1570094 - RNA, 19 nt, Artificial Sequence
  Description of Artificial Sequence: Synthetic oligonucleotide
  Antisense strand to SEQ ID NO: 1570093
uaccauaacacugcuccgc

SEQ ID NO: 1570095 - RNA, 19 nt, Artificial Sequence
  Description of Artificial Sequence: Synthetic oligonucleotide
  Sense strand starting at position 2784 of SEQ ID NO: 1560014
ggcgguuauguaagucaug

SEQ ID NO: 1570096 - RNA, 19 nt, Artificial Sequence
  Description of Artificial Sequence: Synthetic oligonucleotide
  Antisense strand to SEQ ID NO: 1570095
caugacuuacauaaccgcc

SEQ ID NO: 1570097 - RNA, 19 nt, Artificial Sequence
  Description of Artificial Sequence: Synthetic oligonucleotide
  Sense strand starting at position 2785 of SEQ ID NO: 1560014
gcgguuauguaagucaugu

SEQ ID NO: 1570098 - RNA, 19 nt, Artificial Sequence
  Description of Artificial Sequence: Synthetic oligonucleotide
  Antisense strand to SEQ ID NO: 1570097
acaugacuuacauaaccgc

SEQ ID NO: 1570099 - RNA, 19 nt, Artificial Sequence
  Description of Artificial Sequence: Synthetic oligonucleotide
  Sense strand starting at position 2787 of SEQ ID NO: 1560014
gguuauguaagucaugucu

SEQ ID NO: 1570100 - RNA, 19 nt, Artificial Sequence
  Description of Artificial Sequence: Synthetic oligonucleotide
  Antisense strand to SEQ ID NO: 1570099
agacaugacuuacauaacc

SEQ ID NO: 1570101 - RNA, 19 nt, Artificial Sequence
  Description of Artificial Sequence: Synthetic oligonucleotide
  Sense strand starting at position 2789 of SEQ ID NO: 1560014
uuauguaagucaugucuga

SEQ ID NO: 1570102 - RNA, 19 nt, Artificial Sequence
  Description of Artificial Sequence: Synthetic oligonucleotide
  Antisense strand to SEQ ID NO: 1570101
ucagacaugacuuacauaa

SEQ ID NO: 1570103 - RNA, 19 nt, Artificial Sequence
  Description of Artificial Sequence: Synthetic oligonucleotide
  Sense strand starting at position 2901 of SEQ ID NO: 1560014
gguuauagccauugagacc

SEQ ID NO: 1570104 - RNA, 19 nt, Artificial Sequence
  Description of Artificial Sequence: Synthetic oligonucleotide
  Antisense strand to SEQ ID NO: 1570103
ggucucaauggcuauaacc

SEQ ID NO: 1570105 - RNA, 19 nt, Artificial Sequence
  Description of Artificial Sequence: Synthetic oligonucleotide
  Sense strand starting at position 2975 of SEQ ID NO: 1560014
agggauccuuacugaagaa

SEQ ID NO: 1570106 - RNA, 19 nt, Artificial Sequence
  Description of Artificial Sequence: Synthetic oligonucleotide
  Antisense strand to SEQ ID NO: 1570105
uucuucaguaaggaucccu

SEQ ID NO: 1570107 - RNA, 19 nt, Artificial Sequence
  Description of Artificial Sequence: Synthetic oligonucleotide
  Sense strand starting at position 3207 of SEQ ID NO: 1560014
ggcucucggugaucacaaa

SEQ ID NO: 1570108 - RNA, 19 nt, Artificial Sequence
  Description of Artificial Sequence: Synthetic oligonucleotide
  Antisense strand to SEQ ID NO: 1570107
uuugugaucaccgagagcc

SEQ ID NO: 1570109 - RNA, 19 nt, Artificial Sequence
  Description of Artificial Sequence: Synthetic oligonucleotide
  Sense strand starting at position 3442 of SEQ ID NO: 1560014
guguuugacuucucuccuu

SEQ ID NO: 1570110 - RNA, 19 nt, Artificial Sequence
  Description of Artificial Sequence: Synthetic oligonucleotide
  Antisense strand to SEQ ID NO: 1570109
aaggagagaagucaaacac

SEQ ID NO: 1570111 - RNA, 19 nt, Artificial Sequence
  Description of Artificial Sequence: Synthetic oligonucleotide
  Sense strand starting at position 3490 of SEQ ID NO: 1560014
cuugcuugcucagugguua

SEQ ID NO: 1570112 - RNA, 19 nt, Artificial Sequence
  Description of Artificial Sequence: Synthetic oligonucleotide
  Antisense strand to SEQ ID NO: 1570111
uaaccacugagcaagcaag

SEQ ID NO: 1570113 - RNA, 19 nt, Artificial Sequence
  Description of Artificial Sequence: Synthetic oligonucleotide
  Sense strand starting at position 3494 of SEQ ID NO: 1560014
cuugcucagugguuacgaa

SEQ ID NO: 1570114 - RNA, 19 nt, Artificial Sequence
  Description of Artificial Sequence: Synthetic oligonucleotide
  Antisense strand to SEQ ID NO: 1570113
uucguaaccacugagcaag

SEQ ID NO: 1570115 - RNA, 19 nt, Artificial Sequence
  Description of Artificial Sequence: Synthetic oligonucleotide
  Sense strand starting at position 3495 of SEQ ID NO: 1560014
uugcucagugguuacgaaa

SEQ ID NO: 1570116 - RNA, 19 nt, Artificial Sequence
  Description of Artificial Sequence: Synthetic oligonucleotide
  Antisense strand to SEQ ID NO: 1570115
uuucguaaccacugagcaa

SEQ ID NO: 1570117 - RNA, 19 nt, Artificial Sequence
  Description of Artificial Sequence: Synthetic oligonucleotide
  Sense strand starting at position 3528 of SEQ ID NO: 1560014
ggaguuugaacacacuguu

SEQ ID NO: 1570118 - RNA, 19 nt, Artificial Sequence
  Description of Artificial Sequence: Synthetic oligonucleotide
  Antisense strand to SEQ ID NO: 1570117
aacaguguguucaaacucc

SEQ ID NO: 1570119 - RNA, 19 nt, Artificial Sequence
  Description of Artificial Sequence: Synthetic oligonucleotide
  Sense strand starting at position 3531 of SEQ ID NO: 1560014
guuugaacacacuguucua

SEQ ID NO: 1570120 - RNA, 19 nt, Artificial Sequence
  Description of Artificial Sequence: Synthetic oligonucleotide
  Antisense strand to SEQ ID NO: 1570119
uagaacaguguguucaaac

SEQ ID NO: 1570121 - RNA, 19 nt, Artificial Sequence
  Description of Artificial Sequence: Synthetic oligonucleotide
  Sense strand starting at position 3759 of SEQ ID NO: 1560014
ugggcuauguccugaggca

SEQ ID NO: 1570122 - RNA, 19 nt, Artificial Sequence
  Description of Artificial Sequence: Synthetic oligonucleotide
  Antisense strand to SEQ ID NO: 1570121
ugccucaggacauagccca

SEQ ID NO: 1570123 - RNA, 19 nt, Artificial Sequence
  Description of Artificial Sequence: Synthetic oligonucleotide
  Sense strand starting at position 3803 of SEQ ID NO: 1560014
gcagacaucacaugggaau

SEQ ID NO: 1570124 - RNA, 19 nt, Artificial Sequence
  Description of Artificial Sequence: Synthetic oligonucleotide
  Antisense strand to SEQ ID NO: 1570123
auucccaugugaugucugc

SEQ ID NO: 1570125 - RNA, 19 nt, Artificial Sequence
  Description of Artificial Sequence: Synthetic oligonucleotide
  Sense strand starting at position 120 of SEQ ID NO: 1560015
gaguuagauucuguugcuu

SEQ ID NO: 1570126 - RNA, 19 nt, Artificial Sequence
  Description of Artificial Sequence: Synthetic oligonucleotide
  Antisense strand to SEQ ID NO: 1570125
aagcaacagaaucuaacuc

SEQ ID NO: 1570127 - RNA, 19 nt, Artificial Sequence
  Description of Artificial Sequence: Synthetic oligonucleotide
  Sense strand starting at position 226 of SEQ ID NO: 1560015
guagaacauacgugccauu

SEQ ID NO: 1570128 - RNA, 19 nt, Artificial Sequence
  Description of Artificial Sequence: Synthetic oligonucleotide
  Antisense strand to SEQ ID NO: 1570127
aauggcacguauguucuac

SEQ ID NO: 1570129 - RNA, 19 nt, Artificial Sequence
  Description of Artificial Sequence: Synthetic oligonucleotide
  Sense strand starting at position 551 of SEQ ID NO: 1560015
cucccugaggccuaucaua

SEQ ID NO: 1570130 - RNA, 19 nt, Artificial Sequence
  Description of Artificial Sequence: Synthetic oligonucleotide
  Antisense strand to SEQ ID NO: 1570129
uaugauaggccucagggag

SEQ ID NO: 1570131 - RNA, 19 nt, Artificial Sequence
  Description of Artificial Sequence: Synthetic oligonucleotide
  Sense strand starting at position 567 of SEQ ID NO: 1560015
auaugaugccaccgucacu

SEQ ID NO: 1570132 - RNA, 19 nt, Artificial Sequence
  Description of Artificial Sequence: Synthetic oligonucleotide
  Antisense strand to SEQ ID NO: 1570131
agugacgguggcaucauau

SEQ ID NO: 1570133 - RNA, 19 nt, Artificial Sequence
  Description of Artificial Sequence: Synthetic oligonucleotide
  Sense strand starting at position 603 of SEQ ID NO: 1560015
gcaaauuaugcugggacca

SEQ ID NO: 1570134 - RNA, 19 nt, Artificial Sequence
  Description of Artificial Sequence: Synthetic oligonucleotide
  Antisense strand to SEQ ID NO: 1570133
uggucccagcauaauuugc

SEQ ID NO: 1570135 - RNA, 19 nt, Artificial Sequence
  Description of Artificial Sequence: Synthetic oligonucleotide
  Sense strand starting at position 675 of SEQ ID NO: 1560015
ccaggauucgagugucuga

SEQ ID NO: 1570136 - RNA, 19 nt, Artificial Sequence
  Description of Artificial Sequence: Synthetic oligonucleotide
  Antisense strand to SEQ ID NO: 1570135
ucagacacucgaauccugg

SEQ ID NO: 1570137 - RNA, 19 nt, Artificial Sequence
  Description of Artificial Sequence: Synthetic oligonucleotide
  Sense strand starting at position 684 of SEQ ID NO: 1560015
gagugucugacccagggua

SEQ ID NO: 1570138 - RNA, 19 nt, Artificial Sequence
  Description of Artificial Sequence: Synthetic oligonucleotide
  Antisense strand to SEQ ID NO: 1570137
uacccugggucagacacuc

SEQ ID NO: 1570139 - RNA, 19 nt, Artificial Sequence
  Description of Artificial Sequence: Synthetic oligonucleotide
  Sense strand starting at position 706 of SEQ ID NO: 1560015
gguaguguaaauggaauga

SEQ ID NO: 1570140 - RNA, 19 nt, Artificial Sequence
  Description of Artificial Sequence: Synthetic oligonucleotide
  Antisense strand to SEQ ID NO: 1570139
ucauuccauuuacacuacc

SEQ ID NO: 1570141 - RNA, 19 nt, Artificial Sequence
  Description of Artificial Sequence: Synthetic oligonucleotide
  Sense strand starting at position 791 of SEQ ID NO: 1560015
gggcucagacgucaaagau

SEQ ID NO: 1570142 - RNA, 19 nt, Artificial Sequence
  Description of Artificial Sequence: Synthetic oligonucleotide
  Antisense strand to SEQ ID NO: 1570141
aucuuugacgucugagccc

SEQ ID NO: 1570143 - RNA, 19 nt, Artificial Sequence
  Description of Artificial Sequence: Synthetic oligonucleotide
  Sense strand starting at position 819 of SEQ ID NO: 1560015
agcagagacuguccuuacu

SEQ ID NO: 1570144 - RNA, 19 nt, Artificial Sequence
  Description of Artificial Sequence: Synthetic oligonucleotide
  Antisense strand to SEQ ID NO: 1570143
aguaaggacagucucugcu

SEQ ID NO: 1570145 - RNA, 19 nt, Artificial Sequence
  Description of Artificial Sequence: Synthetic oligonucleotide
  Sense strand starting at position 821 of SEQ ID NO: 1560015
cagagacuguccuuacugu

SEQ ID NO: 1570146 - RNA, 19 nt, Artificial Sequence
  Description of Artificial Sequence: Synthetic oligonucleotide
  Antisense strand to SEQ ID NO: 1570145
acaguaaggacagucucug

SEQ ID NO: 1570147 - RNA, 19 nt, Artificial Sequence
  Description of Artificial Sequence: Synthetic oligonucleotide
  Sense strand starting at position 822 of SEQ ID NO: 1560015
agagacuguccuuacugua

SEQ ID NO: 1570148 - RNA, 19 nt, Artificial Sequence
  Description of Artificial Sequence: Synthetic oligonucleotide
  Antisense strand to SEQ ID NO: 1570147
uacaguaaggacagucucu

SEQ ID NO: 1570149 - RNA, 19 nt, Artificial Sequence
  Description of Artificial Sequence: Synthetic oligonucleotide
  Sense strand starting at position 827 of SEQ ID NO: 1560015
cuguccuuacuguagauga

SEQ ID NO: 1570150 - RNA, 19 nt, Artificial Sequence
  Description of Artificial Sequence: Synthetic oligonucleotide
  Antisense strand to SEQ ID NO: 1570149
ucaucuacaguaaggacag

SEQ ID NO: 1570151 - RNA, 19 nt, Artificial Sequence
  Description of Artificial Sequence: Synthetic oligonucleotide
  Sense strand starting at position 1082 of SEQ ID NO: 1560015
gaaagucagggaugccaau

SEQ ID NO: 1570152 - RNA, 19 nt, Artificial Sequence
  Description of Artificial Sequence: Synthetic oligonucleotide
  Antisense strand to SEQ ID NO: 1570151
auuggcaucccugacuuuc

SEQ ID NO: 1570153 - RNA, 19 nt, Artificial Sequence
  Description of Artificial Sequence: Synthetic oligonucleotide
  Sense strand starting at position 1134 of SEQ ID NO: 1560015
gccgcuuucccuucucaca

SEQ ID NO: 1570154 - RNA, 19 nt, Artificial Sequence
  Description of Artificial Sequence: Synthetic oligonucleotide
  Antisense strand to SEQ ID NO: 1570153
ugugagaagggaaagcggc

SEQ ID NO: 1570155 - RNA, 19 nt, Artificial Sequence
  Description of Artificial Sequence: Synthetic oligonucleotide
  Sense strand starting at position 1309 of SEQ ID NO: 1560015
ugcuguagccacugaaaga

SEQ ID NO: 1570156 - RNA, 19 nt, Artificial Sequence
  Description of Artificial Sequence: Synthetic oligonucleotide
  Antisense strand to SEQ ID NO: 1570155
ucuuucaguggcuacagca

SEQ ID NO: 1570157 - RNA, 19 nt, Artificial Sequence
  Description of Artificial Sequence: Synthetic oligonucleotide
  Sense strand starting at position 2058 of SEQ ID NO: 1560015
ggcuccuauuggcugaaau

SEQ ID NO: 1570158 - RNA, 19 nt, Artificial Sequence
  Description of Artificial Sequence: Synthetic oligonucleotide
  Antisense strand to SEQ ID NO: 1570157
auuucagccaauaggagcc

SEQ ID NO: 1570159 - RNA, 19 nt, Artificial Sequence
  Description of Artificial Sequence: Synthetic oligonucleotide
  Sense strand starting at position 2059 of SEQ ID NO: 1560015
gcuccuauuggcugaaauu

SEQ ID NO: 1570160 - RNA, 19 nt, Artificial Sequence
  Description of Artificial Sequence: Synthetic oligonucleotide
  Antisense strand to SEQ ID NO: 1570159
aauuucagccaauaggagc

SEQ ID NO: 1570161 - RNA, 19 nt, Artificial Sequence
  Description of Artificial Sequence: Synthetic oligonucleotide
  Sense strand starting at position 2060 of SEQ ID NO: 1560015
cuccuauuggcugaaauuc

SEQ ID NO: 1570162 - RNA, 19 nt, Artificial Sequence
  Description of Artificial Sequence: Synthetic oligonucleotide
  Antisense strand to SEQ ID NO: 1570161
gaauuucagccaauaggag

SEQ ID NO: 1570163 - RNA, 19 nt, Artificial Sequence
  Description of Artificial Sequence: Synthetic oligonucleotide
  Sense strand starting at position 2069 of SEQ ID NO: 1560015
gcugaaauuccugacgcca

SEQ ID NO: 1570164 - RNA, 19 nt, Artificial Sequence
  Description of Artificial Sequence: Synthetic oligonucleotide
  Antisense strand to SEQ ID NO: 1570163
uggcgucaggaauuucagc

SEQ ID NO: 1570165 - RNA, 19 nt, Artificial Sequence
  Description of Artificial Sequence: Synthetic oligonucleotide
  Sense strand starting at position 2291 of SEQ ID NO: 1560015
gcaugcgucaacuaggaga

SEQ ID NO: 1570166 - RNA, 19 nt, Artificial Sequence
  Description of Artificial Sequence: Synthetic oligonucleotide
  Antisense strand to SEQ ID NO: 1570165
ucuccuaguugacgcaugc

SEQ ID NO: 1570167 - RNA, 19 nt, Artificial Sequence
  Description of Artificial Sequence: Synthetic oligonucleotide
  Sense strand starting at position 2556 of SEQ ID NO: 1560015
ucgccaaauauuuguugga

SEQ ID NO: 1570168 - RNA, 19 nt, Artificial Sequence
  Description of Artificial Sequence: Synthetic oligonucleotide
  Antisense strand to SEQ ID NO: 1570167
uccaacaaauauuuggcga

SEQ ID NO: 1570169 - RNA, 19 nt, Artificial Sequence
  Description of Artificial Sequence: Synthetic oligonucleotide
  Sense strand starting at position 2566 of SEQ ID NO: 1560015
uuuguuggacccuguaauc

SEQ ID NO: 1570170 - RNA, 19 nt, Artificial Sequence
  Description of Artificial Sequence: Synthetic oligonucleotide
  Antisense strand to SEQ ID NO: 1570169
gauuacaggguccaacaaa

SEQ ID NO: 1570171 - RNA, 19 nt, Artificial Sequence
  Description of Artificial Sequence: Synthetic oligonucleotide
  Sense strand starting at position 2577 of SEQ ID NO: 1560015
cuguaaucaguuuguggau

SEQ ID NO: 1570172 - RNA, 19 nt, Artificial Sequence
  Description of Artificial Sequence: Synthetic oligonucleotide
  Antisense strand to SEQ ID NO: 1570171
auccacaaacugauuacag

SEQ ID NO: 1570173 - RNA, 19 nt, Artificial Sequence
  Description of Artificial Sequence: Synthetic oligonucleotide
  Sense strand starting at position 2578 of SEQ ID NO: 1560015
uguaaucaguuuguggauu

SEQ ID NO: 1570174 - RNA, 19 nt, Artificial Sequence
  Description of Artificial Sequence: Synthetic oligonucleotide
  Antisense strand to SEQ ID NO: 1570173
aauccacaaacugauuaca

SEQ ID NO: 1570175 - RNA, 19 nt, Artificial Sequence
  Description of Artificial Sequence: Synthetic oligonucleotide
  Sense strand starting at position 2622 of SEQ ID NO: 1560015
ccacguauuuguuuagcaa

SEQ ID NO: 1570176 - RNA, 19 nt, Artificial Sequence
  Description of Artificial Sequence: Synthetic oligonucleotide
  Antisense strand to SEQ ID NO: 1570175
uugcuaaacaaauacgugg

SEQ ID NO: 1570177 - RNA, 19 nt, Artificial Sequence
  Description of Artificial Sequence: Synthetic oligonucleotide
  Sense strand starting at position 2625 of SEQ ID NO: 1560015
cguauuuguuuagcaaaca

SEQ ID NO: 1570178 - RNA, 19 nt, Artificial Sequence
  Description of Artificial Sequence: Synthetic oligonucleotide
  Antisense strand to SEQ ID NO: 1570177
uguuugcuaaacaaauacg

SEQ ID NO: 1570179 - RNA, 19 nt, Artificial Sequence
  Description of Artificial Sequence: Synthetic oligonucleotide
  Sense strand starting at position 3060 of SEQ ID NO: 1560015
ggagaccuauuugaguaau

SEQ ID NO: 1570180 - RNA, 19 nt, Artificial Sequence
  Description of Artificial Sequence: Synthetic oligonucleotide
  Antisense strand to SEQ ID NO: 1570179
auuacucaaauaggucucc

SEQ ID NO: 1570181 - RNA, 19 nt, Artificial Sequence
  Description of Artificial Sequence: Synthetic oligonucleotide
  Sense strand starting at position 3089 of SEQ ID NO: 1560015
ucucucauuuagcucgauu

SEQ ID NO: 1570182 - RNA, 19 nt, Artificial Sequence
  Description of Artificial Sequence: Synthetic oligonucleotide
  Antisense strand to SEQ ID NO: 1570181
aaucgagcuaaaugagaga

SEQ ID NO: 1570183 - RNA, 19 nt, Artificial Sequence
  Description of Artificial Sequence: Synthetic oligonucleotide
  Sense strand starting at position 3091 of SEQ ID NO: 1560015
ucucauuuagcucgauuga

SEQ ID NO: 1570184 - RNA, 19 nt, Artificial Sequence
  Description of Artificial Sequence: Synthetic oligonucleotide
  Antisense strand to SEQ ID NO: 1570183
ucaaucgagcuaaaugaga

SEQ ID NO: 1570185 - RNA, 19 nt, Artificial Sequence
  Description of Artificial Sequence: Synthetic oligonucleotide
  Sense strand starting at position 3096 of SEQ ID NO: 1560015
uuuagcucgauugauguga

SEQ ID NO: 1570186 - RNA, 19 nt, Artificial Sequence
  Description of Artificial Sequence: Synthetic oligonucleotide
  Antisense strand to SEQ ID NO: 1570185
ucacaucaaucgagcuaaa

SEQ ID NO: 1570187 - RNA, 19 nt, Artificial Sequence
  Description of Artificial Sequence: Synthetic oligonucleotide
  Sense strand starting at position 3100 of SEQ ID NO: 1560015
gcucgauugaugugaauua

SEQ ID NO: 1570188 - RNA, 19 nt, Artificial Sequence
  Description of Artificial Sequence: Synthetic oligonucleotide
  Antisense strand to SEQ ID NO: 1570187
uaauucacaucaaucgagc

SEQ ID NO: 1570189 - RNA, 19 nt, Artificial Sequence
  Description of Artificial Sequence: Synthetic oligonucleotide
  Sense strand starting at position 3134 of SEQ ID NO: 1560015
uuauccugucuugauaagu

SEQ ID NO: 1570190 - RNA, 19 nt, Artificial Sequence
  Description of Artificial Sequence: Synthetic oligonucleotide
  Antisense strand to SEQ ID NO: 1570189
acuuaucaagacaggauaa

SEQ ID NO: 1570191 - RNA, 19 nt, Artificial Sequence
  Description of Artificial Sequence: Synthetic oligonucleotide
  Sense strand starting at position 3139 of SEQ ID NO: 1560015
cugucuugauaagucgacu

SEQ ID NO: 1570192 - RNA, 19 nt, Artificial Sequence
  Description of Artificial Sequence: Synthetic oligonucleotide
  Antisense strand to SEQ ID NO: 1570191
agucgacuuaucaagacag

SEQ ID NO: 1570193 - RNA, 19 nt, Artificial Sequence
  Description of Artificial Sequence: Synthetic oligonucleotide
  Sense strand starting at position 3142 of SEQ ID NO: 1560015
ucuugauaagucgacucua

SEQ ID NO: 1570194 - RNA, 19 nt, Artificial Sequence
  Description of Artificial Sequence: Synthetic oligonucleotide
  Antisense strand to SEQ ID NO: 1570193
uagagucgacuuaucaaga

SEQ ID NO: 1570195 - RNA, 19 nt, Artificial Sequence
  Description of Artificial Sequence: Synthetic oligonucleotide
  Sense strand starting at position 3186 of SEQ ID NO: 1560015
cccauuaggugguuacaau

SEQ ID NO: 1570196 - RNA, 19 nt, Artificial Sequence
  Description of Artificial Sequence: Synthetic oligonucleotide
  Antisense strand to SEQ ID NO: 1570195
auuguaaccaccuaauggg

SEQ ID NO: 1570197 - RNA, 19 nt, Artificial Sequence
  Description of Artificial Sequence: Synthetic oligonucleotide
  Sense strand starting at position 3187 of SEQ ID NO: 1560015
ccauuaggugguuacaaua

SEQ ID NO: 1570198 - RNA, 19 nt, Artificial Sequence
  Description of Artificial Sequence: Synthetic oligonucleotide
  Antisense strand to SEQ ID NO: 1570197
uauuguaaccaccuaaugg

SEQ ID NO: 1570199 - RNA, 19 nt, Artificial Sequence
  Description of Artificial Sequence: Synthetic oligonucleotide
  Sense strand starting at position 3735 of SEQ ID NO: 1560015
aucagauauguacauagca

SEQ ID NO: 1570200 - RNA, 19 nt, Artificial Sequence
  Description of Artificial Sequence: Synthetic oligonucleotide
  Antisense strand to SEQ ID NO: 1570199
ugcuauguacauaucugau

SEQ ID NO: 1570201 - RNA, 19 nt, Artificial Sequence
  Description of Artificial Sequence: Synthetic oligonucleotide
  Sense strand starting at position 3764 of SEQ ID NO: 1560015
gcauuccuguacuugagga

SEQ ID NO: 1570202 - RNA, 19 nt, Artificial Sequence
  Description of Artificial Sequence: Synthetic oligonucleotide
  Antisense strand to SEQ ID NO: 1570201
uccucaaguacaggaaugc

SEQ ID NO: 1570203 - RNA, 19 nt, Artificial Sequence
  Description of Artificial Sequence: Synthetic oligonucleotide
  Sense strand starting at position 3768 of SEQ ID NO: 1560015
uccuguacuugaggaauuu

SEQ ID NO: 1570204 - RNA, 19 nt, Artificial Sequence
  Description of Artificial Sequence: Synthetic oligonucleotide
  Antisense strand to SEQ ID NO: 1570203
aaauuccucaaguacagga

SEQ ID NO: 1570205 - RNA, 19 nt, Artificial Sequence
  Description of Artificial Sequence: Synthetic oligonucleotide
  Sense strand starting at position 69 of SEQ ID NO: 1560016
gaguuagauucuguugcuu

SEQ ID NO: 1570206 - RNA, 19 nt, Artificial Sequence
  Description of Artificial Sequence: Synthetic oligonucleotide
  Antisense strand to SEQ ID NO: 1570205
aagcaacagaaucuaacuc

SEQ ID NO: 1570207 - RNA, 19 nt, Artificial Sequence
  Description of Artificial Sequence: Synthetic oligonucleotide
  Sense strand starting at position 175 of SEQ ID NO: 1560016
guagaacauacgugccauu

SEQ ID NO: 1570208 - RNA, 19 nt, Artificial Sequence
  Description of Artificial Sequence: Synthetic oligonucleotide
  Antisense strand to SEQ ID NO: 1570207
aauggcacguauguucuac

SEQ ID NO: 1570209 - RNA, 19 nt, Artificial Sequence
  Description of Artificial Sequence: Synthetic oligonucleotide
  Sense strand starting at position 500 of SEQ ID NO: 1560016
cucccugaggccuaucaua

SEQ ID NO: 1570210 - RNA, 19 nt, Artificial Sequence
  Description of Artificial Sequence: Synthetic oligonucleotide
  Antisense strand to SEQ ID NO: 1570209
uaugauaggccucagggag

SEQ ID NO: 1570211 - RNA, 19 nt, Artificial Sequence
  Description of Artificial Sequence: Synthetic oligonucleotide
  Sense strand starting at position 516 of SEQ ID NO: 1560016
auaugaugccaccgucacu

SEQ ID NO: 1570212 - RNA, 19 nt, Artificial Sequence
  Description of Artificial Sequence: Synthetic oligonucleotide
  Antisense strand to SEQ ID NO: 1570211
agugacgguggcaucauau

SEQ ID NO: 1570213 - RNA, 19 nt, Artificial Sequence
  Description of Artificial Sequence: Synthetic oligonucleotide
  Sense strand starting at position 552 of SEQ ID NO: 1560016
gcaaauuaugcugggacca

SEQ ID NO: 1570214 - RNA, 19 nt, Artificial Sequence
  Description of Artificial Sequence: Synthetic oligonucleotide
  Antisense strand to SEQ ID NO: 1570213
uggucccagcauaauuugc

SEQ ID NO: 1570215 - RNA, 19 nt, Artificial Sequence
  Description of Artificial Sequence: Synthetic oligonucleotide
  Sense strand starting at position 624 of SEQ ID NO: 1560016
ccaggauucgagugucuga

SEQ ID NO: 1570216 - RNA, 19 nt, Artificial Sequence
  Description of Artificial Sequence: Synthetic oligonucleotide
  Antisense strand to SEQ ID NO: 1570215
ucagacacucgaauccugg

SEQ ID NO: 1570217 - RNA, 19 nt, Artificial Sequence
  Description of Artificial Sequence: Synthetic oligonucleotide
  Sense strand starting at position 633 of SEQ ID NO: 1560016
gagugucugacccagggua

SEQ ID NO: 1570218 - RNA, 19 nt, Artificial Sequence
  Description of Artificial Sequence: Synthetic oligonucleotide
  Antisense strand to SEQ ID NO: 1570217
uacccugggucagacacuc

SEQ ID NO: 1570219 - RNA, 19 nt, Artificial Sequence
  Description of Artificial Sequence: Synthetic oligonucleotide
  Sense strand starting at position 655 of SEQ ID NO: 1560016
gguaguguaaauggaauga

SEQ ID NO: 1570220 - RNA, 19 nt, Artificial Sequence
  Description of Artificial Sequence: Synthetic oligonucleotide
  Antisense strand to SEQ ID NO: 1570219
ucauuccauuuacacuacc

SEQ ID NO: 1570221 - RNA, 19 nt, Artificial Sequence
  Description of Artificial Sequence: Synthetic oligonucleotide
  Sense strand starting at position 740 of SEQ ID NO: 1560016
gggcucagacgucaaagau

SEQ ID NO: 1570222 - RNA, 19 nt, Artificial Sequence
  Description of Artificial Sequence: Synthetic oligonucleotide
  Antisense strand to SEQ ID NO: 1570221
aucuuugacgucugagccc

SEQ ID NO: 1570223 - RNA, 19 nt, Artificial Sequence
  Description of Artificial Sequence: Synthetic oligonucleotide
  Sense strand starting at position 768 of SEQ ID NO: 1560016
agcagagacuguccuuacu

SEQ ID NO: 1570224 - RNA, 19 nt, Artificial Sequence
  Description of Artificial Sequence: Synthetic oligonucleotide
  Antisense strand to SEQ ID NO: 1570223
aguaaggacagucucugcu

SEQ ID NO: 1570225 - RNA, 19 nt, Artificial Sequence
  Description of Artificial Sequence: Synthetic oligonucleotide
  Sense strand starting at position 770 of SEQ ID NO: 1560016
cagagacuguccuuacugu

SEQ ID NO: 1570226 - RNA, 19 nt, Artificial Sequence
  Description of Artificial Sequence: Synthetic oligonucleotide
  Antisense strand to SEQ ID NO: 1570225
acaguaaggacagucucug

SEQ ID NO: 1570227 - RNA, 19 nt, Artificial Sequence
  Description of Artificial Sequence: Synthetic oligonucleotide
  Sense strand starting at position 771 of SEQ ID NO: 1560016
agagacuguccuuacugua

SEQ ID NO: 1570228 - RNA, 19 nt, Artificial Sequence
  Description of Artificial Sequence: Synthetic oligonucleotide
  Antisense strand to SEQ ID NO: 1570227
uacaguaaggacagucucu

SEQ ID NO: 1570229 - RNA, 19 nt, Artificial Sequence
  Description of Artificial Sequence: Synthetic oligonucleotide
  Sense strand starting at position 776 of SEQ ID NO: 1560016
cuguccuuacuguagauga

SEQ ID NO: 1570230 - RNA, 19 nt, Artificial Sequence
  Description of Artificial Sequence: Synthetic oligonucleotide
  Antisense strand to SEQ ID NO: 1570229
ucaucuacaguaaggacag

SEQ ID NO: 1570231 - RNA, 19 nt, Artificial Sequence
  Description of Artificial Sequence: Synthetic oligonucleotide
  Sense strand starting at position 1031 of SEQ ID NO: 1560016
gaaagucagggaugccaau

SEQ ID NO: 1570232 - RNA, 19 nt, Artificial Sequence
  Description of Artificial Sequence: Synthetic oligonucleotide
  Antisense strand to SEQ ID NO: 1570231
auuggcaucccugacuuuc

SEQ ID NO: 1570233 - RNA, 19 nt, Artificial Sequence
  Description of Artificial Sequence: Synthetic oligonucleotide
  Sense strand starting at position 1083 of SEQ ID NO: 1560016
gccgcuuucccuucucaca

SEQ ID NO: 1570234 - RNA, 19 nt, Artificial Sequence
  Description of Artificial Sequence: Synthetic oligonucleotide
  Antisense strand to SEQ ID NO: 1570233
ugugagaagggaaagcggc

SEQ ID NO: 1570235 - RNA, 19 nt, Artificial Sequence
  Description of Artificial Sequence: Synthetic oligonucleotide
  Sense strand starting at position 1258 of SEQ ID NO: 1560016
ugcuguagccacugaaaga

SEQ ID NO: 1570236 - RNA, 19 nt, Artificial Sequence
  Description of Artificial Sequence: Synthetic oligonucleotide
  Antisense strand to SEQ ID NO: 1570235
ucuuucaguggcuacagca

SEQ ID NO: 1570237 - RNA, 19 nt, Artificial Sequence
  Description of Artificial Sequence: Synthetic oligonucleotide
  Sense strand starting at position 2007 of SEQ ID NO: 1560016
ggcuccuauuggcugaaau

SEQ ID NO: 1570238 - RNA, 19 nt, Artificial Sequence
  Description of Artificial Sequence: Synthetic oligonucleotide
  Antisense strand to SEQ ID NO: 1570237
auuucagccaauaggagcc

SEQ ID NO: 1570239 - RNA, 19 nt, Artificial Sequence
  Description of Artificial Sequence: Synthetic oligonucleotide
  Sense strand starting at position 2008 of SEQ ID NO: 1560016
gcuccuauuggcugaaauu

SEQ ID NO: 1570240 - RNA, 19 nt, Artificial Sequence
  Description of Artificial Sequence: Synthetic oligonucleotide
  Antisense strand to SEQ ID NO: 1570239
aauuucagccaauaggagc

SEQ ID NO: 1570241 - RNA, 19 nt, Artificial Sequence
  Description of Artificial Sequence: Synthetic oligonucleotide
  Sense strand starting at position 2009 of SEQ ID NO: 1560016
cuccuauuggcugaaauuc

SEQ ID NO: 1570242 - RNA, 19 nt, Artificial Sequence
  Description of Artificial Sequence: Synthetic oligonucleotide
  Antisense strand to SEQ ID NO: 1570241
gaauuucagccaauaggag

SEQ ID NO: 1570243 - RNA, 19 nt, Artificial Sequence
  Description of Artificial Sequence: Synthetic oligonucleotide
  Sense strand starting at position 2018 of SEQ ID NO: 1560016
gcugaaauuccugacgcca

SEQ ID NO: 1570244 - RNA, 19 nt, Artificial Sequence
  Description of Artificial Sequence: Synthetic oligonucleotide
  Antisense strand to SEQ ID NO: 1570243
uggcgucaggaauuucagc

SEQ ID NO: 1570245 - RNA, 19 nt, Artificial Sequence
  Description of Artificial Sequence: Synthetic oligonucleotide
  Sense strand starting at position 2240 of SEQ ID NO: 1560016
gcaugcgucaacuaggaga

SEQ ID NO: 1570246 - RNA, 19 nt, Artificial Sequence
  Description of Artificial Sequence: Synthetic oligonucleotide
  Antisense strand to SEQ ID NO: 1570245
ucuccuaguugacgcaugc

SEQ ID NO: 1570247 - RNA, 19 nt, Artificial Sequence
  Description of Artificial Sequence: Synthetic oligonucleotide
  Sense strand starting at position 2505 of SEQ ID NO: 1560016
ucgccaaauauuuguugga

SEQ ID NO: 1570248 - RNA, 19 nt, Artificial Sequence
  Description of Artificial Sequence: Synthetic oligonucleotide
  Antisense strand to SEQ ID NO: 1570247
uccaacaaauauuuggcga

SEQ ID NO: 1570249 - RNA, 19 nt, Artificial Sequence
  Description of Artificial Sequence: Synthetic oligonucleotide
  Sense strand starting at position 2515 of SEQ ID NO: 1560016
uuuguuggacccuguaauc

SEQ ID NO: 1570250 - RNA, 19 nt, Artificial Sequence
  Description of Artificial Sequence: Synthetic oligonucleotide
  Antisense strand to SEQ ID NO: 1570249
gauuacaggguccaacaaa

SEQ ID NO: 1570251 - RNA, 19 nt, Artificial Sequence
  Description of Artificial Sequence: Synthetic oligonucleotide
  Sense strand starting at position 2526 of SEQ ID NO: 1560016
cuguaaucaguuuguggau

SEQ ID NO: 1570252 - RNA, 19 nt, Artificial Sequence
  Description of Artificial Sequence: Synthetic oligonucleotide
  Antisense strand to SEQ ID NO: 1570251
auccacaaacugauuacag

SEQ ID NO: 1570253 - RNA, 19 nt, Artificial Sequence
  Description of Artificial Sequence: Synthetic oligonucleotide
  Sense strand starting at position 2527 of SEQ ID NO: 1560016
uguaaucaguuuguggauu

SEQ ID NO: 1570254 - RNA, 19 nt, Artificial Sequence
  Description of Artificial Sequence: Synthetic oligonucleotide
  Antisense strand to SEQ ID NO: 1570253
aauccacaaacugauuaca

SEQ ID NO: 1570255 - RNA, 19 nt, Artificial Sequence
  Description of Artificial Sequence: Synthetic oligonucleotide
  Sense strand starting at position 2571 of SEQ ID NO: 1560016
ccacguauuuguuuagcaa

SEQ ID NO: 1570256 - RNA, 19 nt, Artificial Sequence
  Description of Artificial Sequence: Synthetic oligonucleotide
  Antisense strand to SEQ ID NO: 1570255
uugcuaaacaaauacgugg

SEQ ID NO: 1570257 - RNA, 19 nt, Artificial Sequence
  Description of Artificial Sequence: Synthetic oligonucleotide
  Sense strand starting at position 2574 of SEQ ID NO: 1560016
cguauuuguuuagcaaaca

SEQ ID NO: 1570258 - RNA, 19 nt, Artificial Sequence
  Description of Artificial Sequence: Synthetic oligonucleotide
  Antisense strand to SEQ ID NO: 1570257
uguuugcuaaacaaauacg

SEQ ID NO: 1570259 - RNA, 19 nt, Artificial Sequence
  Description of Artificial Sequence: Synthetic oligonucleotide
  Sense strand starting at position 3009 of SEQ ID NO: 1560016
ggagaccuauuugaguaau

SEQ ID NO: 1570260 - RNA, 19 nt, Artificial Sequence
  Description of Artificial Sequence: Synthetic oligonucleotide
  Antisense strand to SEQ ID NO: 1570259
auuacucaaauaggucucc

SEQ ID NO: 1570261 - RNA, 19 nt, Artificial Sequence
  Description of Artificial Sequence: Synthetic oligonucleotide
  Sense strand starting at position 3038 of SEQ ID NO: 1560016
ucucucauuuagcucgauu

SEQ ID NO: 1570262 - RNA, 19 nt, Artificial Sequence
  Description of Artificial Sequence: Synthetic oligonucleotide
  Antisense strand to SEQ ID NO: 1570261
aaucgagcuaaaugagaga

SEQ ID NO: 1570263 - RNA, 19 nt, Artificial Sequence
  Description of Artificial Sequence: Synthetic oligonucleotide
  Sense strand starting at position 3040 of SEQ ID NO: 1560016
ucucauuuagcucgauuga

SEQ ID NO: 1570264 - RNA, 19 nt, Artificial Sequence
  Description of Artificial Sequence: Synthetic oligonucleotide
  Antisense strand to SEQ ID NO: 1570263
ucaaucgagcuaaaugaga

SEQ ID NO: 1570265 - RNA, 19 nt, Artificial Sequence
  Description of Artificial Sequence: Synthetic oligonucleotide
  Sense strand starting at position 3045 of SEQ ID NO: 1560016
uuuagcucgauugauguga

SEQ ID NO: 1570266 - RNA, 19 nt, Artificial Sequence
  Description of Artificial Sequence: Synthetic oligonucleotide
  Antisense strand to SEQ ID NO: 1570265
ucacaucaaucgagcuaaa

SEQ ID NO: 1570267 - RNA, 19 nt, Artificial Sequence
  Description of Artificial Sequence: Synthetic oligonucleotide
  Sense strand starting at position 3049 of SEQ ID NO: 1560016
gcucgauugaugugaauua

SEQ ID NO: 1570268 - RNA, 19 nt, Artificial Sequence
  Description of Artificial Sequence: Synthetic oligonucleotide
  Antisense strand to SEQ ID NO: 1570267
uaauucacaucaaucgagc

SEQ ID NO: 1570269 - RNA, 19 nt, Artificial Sequence
  Description of Artificial Sequence: Synthetic oligonucleotide
  Sense strand starting at position 3083 of SEQ ID NO: 1560016
uuauccugucuugauaagu

SEQ ID NO: 1570270 - RNA, 19 nt, Artificial Sequence
  Description of Artificial Sequence: Synthetic oligonucleotide
  Antisense strand to SEQ ID NO: 1570269
acuuaucaagacaggauaa

SEQ ID NO: 1570271 - RNA, 19 nt, Artificial Sequence
  Description of Artificial Sequence: Synthetic oligonucleotide
  Sense strand starting at position 3088 of SEQ ID NO: 1560016
cugucuugauaagucgacu

SEQ ID NO: 1570272 - RNA, 19 nt, Artificial Sequence
  Description of Artificial Sequence: Synthetic oligonucleotide
  Antisense strand to SEQ ID NO: 1570271
agucgacuuaucaagacag

SEQ ID NO: 1570273 - RNA, 19 nt, Artificial Sequence
  Description of Artificial Sequence: Synthetic oligonucleotide
  Sense strand starting at position 3091 of SEQ ID NO: 1560016
ucuugauaagucgacucua

SEQ ID NO: 1570274 - RNA, 19 nt, Artificial Sequence
  Description of Artificial Sequence: Synthetic oligonucleotide
  Antisense strand to SEQ ID NO: 1570273
uagagucgacuuaucaaga

SEQ ID NO: 1570275 - RNA, 19 nt, Artificial Sequence
  Description of Artificial Sequence: Synthetic oligonucleotide
  Sense strand starting at position 3135 of SEQ ID NO: 1560016
cccauuaggugguuacaau

SEQ ID NO: 1570276 - RNA, 19 nt, Artificial Sequence
  Description of Artificial Sequence: Synthetic oligonucleotide
  Antisense strand to SEQ ID NO: 1570275
auuguaaccaccuaauggg

SEQ ID NO: 1570277 - RNA, 19 nt, Artificial Sequence
  Description of Artificial Sequence: Synthetic oligonucleotide
  Sense strand starting at position 3136 of SEQ ID NO: 1560016
ccauuaggugguuacaaua

SEQ ID NO: 1570278 - RNA, 19 nt, Artificial Sequence
  Description of Artificial Sequence: Synthetic oligonucleotide
  Antisense strand to SEQ ID NO: 1570277
uauuguaaccaccuaaugg

SEQ ID NO: 1570279 - RNA, 19 nt, Artificial Sequence
  Description of Artificial Sequence: Synthetic oligonucleotide
  Sense strand starting at position 3684 of SEQ ID NO: 1560016
aucagauauguacauagca

SEQ ID NO: 1570280 - RNA, 19 nt, Artificial Sequence
  Description of Artificial Sequence: Synthetic oligonucleotide
  Antisense strand to SEQ ID NO: 1570279
ugcuauguacauaucugau

SEQ ID NO: 1570281 - RNA, 19 nt, Artificial Sequence
  Description of Artificial Sequence: Synthetic oligonucleotide
  Sense strand starting at position 3713 of SEQ ID NO: 1560016
gcauuccuguacuugagga

SEQ ID NO: 1570282 - RNA, 19 nt, Artificial Sequence
  Description of Artificial Sequence: Synthetic oligonucleotide
  Antisense strand to SEQ ID NO: 1570281
uccucaaguacaggaaugc

SEQ ID NO: 1570283 - RNA, 19 nt, Artificial Sequence
  Description of Artificial Sequence: Synthetic oligonucleotide
  Sense strand starting at position 3717 of SEQ ID NO: 1560016
uccuguacuugaggaauuu

SEQ ID NO: 1570284 - RNA, 19 nt, Artificial Sequence
  Description of Artificial Sequence: Synthetic oligonucleotide
  Antisense strand to SEQ ID NO: 1570283
aaauuccucaaguacagga

SEQ ID NO: 1570285 - RNA, 19 nt, Artificial Sequence
  Description of Artificial Sequence: Synthetic oligonucleotide
  Sense strand starting at position 44 of SEQ ID NO: 1560017
acacaauaggugugccaua

SEQ ID NO: 1570286 - RNA, 19 nt, Artificial Sequence
  Description of Artificial Sequence: Synthetic oligonucleotide
  Antisense strand to SEQ ID NO: 1570285
uauggcacaccuauugugu

SEQ ID NO: 1570287 - RNA, 19 nt, Artificial Sequence
  Description of Artificial Sequence: Synthetic oligonucleotide
  Sense strand starting at position 45 of SEQ ID NO: 1560017
cacaauaggugugccauaa

SEQ ID NO: 1570288 - RNA, 19 nt, Artificial Sequence
  Description of Artificial Sequence: Synthetic oligonucleotide
  Antisense strand to SEQ ID NO: 1570287
uuauggcacaccuauugug

SEQ ID NO: 1570289 - RNA, 19 nt, Artificial Sequence
  Description of Artificial Sequence: Synthetic oligonucleotide
  Sense strand starting at position 56 of SEQ ID NO: 1560017
ugccauaaaugcuuguuga

SEQ ID NO: 1570290 - RNA, 19 nt, Artificial Sequence
  Description of Artificial Sequence: Synthetic oligonucleotide
  Antisense strand to SEQ ID NO: 1570289
ucaacaagcauuuauggca

SEQ ID NO: 1570291 - RNA, 19 nt, Artificial Sequence
  Description of Artificial Sequence: Synthetic oligonucleotide
  Sense strand starting at position 57 of SEQ ID NO: 1560017
gccauaaaugcuuguugaa

SEQ ID NO: 1570292 - RNA, 19 nt, Artificial Sequence
  Description of Artificial Sequence: Synthetic oligonucleotide
  Antisense strand to SEQ ID NO: 1570291
uucaacaagcauuuauggc

SEQ ID NO: 1570293 - RNA, 19 nt, Artificial Sequence
  Description of Artificial Sequence: Synthetic oligonucleotide
  Sense strand starting at position 71 of SEQ ID NO: 1560017
uugaaugagugagugaaau

SEQ ID NO: 1570294 - RNA, 19 nt, Artificial Sequence
  Description of Artificial Sequence: Synthetic oligonucleotide
  Antisense strand to SEQ ID NO: 1570293
auuucacucacucauucaa

SEQ ID NO: 1570295 - RNA, 19 nt, Artificial Sequence
  Description of Artificial Sequence: Synthetic oligonucleotide
  Sense strand starting at position 109 of SEQ ID NO: 1560017
augagcauuccugggcaua

SEQ ID NO: 1570296 - RNA, 19 nt, Artificial Sequence
  Description of Artificial Sequence: Synthetic oligonucleotide
  Antisense strand to SEQ ID NO: 1570295
uaugcccaggaaugcucau

SEQ ID NO: 1570297 - RNA, 19 nt, Artificial Sequence
  Description of Artificial Sequence: Synthetic oligonucleotide
  Sense strand starting at position 110 of SEQ ID NO: 1560017
ugagcauuccugggcauag

SEQ ID NO: 1570298 - RNA, 19 nt, Artificial Sequence
  Description of Artificial Sequence: Synthetic oligonucleotide
  Antisense strand to SEQ ID NO: 1570297
cuaugcccaggaaugcuca

SEQ ID NO: 1570299 - RNA, 19 nt, Artificial Sequence
  Description of Artificial Sequence: Synthetic oligonucleotide
  Sense strand starting at position 120 of SEQ ID NO: 1560017
ugggcauagguguagaaau

SEQ ID NO: 1570300 - RNA, 19 nt, Artificial Sequence
  Description of Artificial Sequence: Synthetic oligonucleotide
  Antisense strand to SEQ ID NO: 1570299
auuucuacaccuaugccca

SEQ ID NO: 1570301 - RNA, 19 nt, Artificial Sequence
  Description of Artificial Sequence: Synthetic oligonucleotide
  Sense strand starting at position 122 of SEQ ID NO: 1560017
ggcauagguguagaaauau

SEQ ID NO: 1570302 - RNA, 19 nt, Artificial Sequence
  Description of Artificial Sequence: Synthetic oligonucleotide
  Antisense strand to SEQ ID NO: 1570301
auauuucuacaccuaugcc

SEQ ID NO: 1570303 - RNA, 19 nt, Artificial Sequence
  Description of Artificial Sequence: Synthetic oligonucleotide
  Sense strand starting at position 128 of SEQ ID NO: 1560017
gguguagaaauaugagcau

SEQ ID NO: 1570304 - RNA, 19 nt, Artificial Sequence
  Description of Artificial Sequence: Synthetic oligonucleotide
  Antisense strand to SEQ ID NO: 1570303
augcucauauuucuacacc

SEQ ID NO: 1570305 - RNA, 19 nt, Artificial Sequence
  Description of Artificial Sequence: Synthetic oligonucleotide
  Sense strand starting at position 132 of SEQ ID NO: 1560017
uagaaauaugagcaugugu

SEQ ID NO: 1570306 - RNA, 19 nt, Artificial Sequence
  Description of Artificial Sequence: Synthetic oligonucleotide
  Antisense strand to SEQ ID NO: 1570305
acacaugcucauauuucua

SEQ ID NO: 1570307 - RNA, 19 nt, Artificial Sequence
  Description of Artificial Sequence: Synthetic oligonucleotide
  Sense strand starting at position 134 of SEQ ID NO: 1560017
gaaauaugagcauguguaa

SEQ ID NO: 1570308 - RNA, 19 nt, Artificial Sequence
  Description of Artificial Sequence: Synthetic oligonucleotide
  Antisense strand to SEQ ID NO: 1570307
uuacacaugcucauauuuc

SEQ ID NO: 1570309 - RNA, 19 nt, Artificial Sequence
  Description of Artificial Sequence: Synthetic oligonucleotide
  Sense strand starting at position 141 of SEQ ID NO: 1560017
gagcauguguaauuccaua

SEQ ID NO: 1570310 - RNA, 19 nt, Artificial Sequence
  Description of Artificial Sequence: Synthetic oligonucleotide
  Antisense strand to SEQ ID NO: 1570309
uauggaauuacacaugcuc

SEQ ID NO: 1570311 - RNA, 19 nt, Artificial Sequence
  Description of Artificial Sequence: Synthetic oligonucleotide
  Sense strand starting at position 168 of SEQ ID NO: 1560017
cacguauugugucuugacu

SEQ ID NO: 1570312 - RNA, 19 nt, Artificial Sequence
  Description of Artificial Sequence: Synthetic oligonucleotide
  Antisense strand to SEQ ID NO: 1570311
agucaagacacaauacgug

SEQ ID NO: 1570313 - RNA, 19 nt, Artificial Sequence
  Description of Artificial Sequence: Synthetic oligonucleotide
  Sense strand starting at position 700 of SEQ ID NO: 1560017
ucaguuacacuuggucuaa

SEQ ID NO: 1570314 - RNA, 19 nt, Artificial Sequence
  Description of Artificial Sequence: Synthetic oligonucleotide
  Antisense strand to SEQ ID NO: 1570313
uuagaccaaguguaacuga

SEQ ID NO: 1570315 - RNA, 19 nt, Artificial Sequence
  Description of Artificial Sequence: Synthetic oligonucleotide
  Sense strand starting at position 849 of SEQ ID NO: 1560017
aucucagugcuguaucuga

SEQ ID NO: 1570316 - RNA, 19 nt, Artificial Sequence
  Description of Artificial Sequence: Synthetic oligonucleotide
  Antisense strand to SEQ ID NO: 1570315
ucagauacagcacugagau

SEQ ID NO: 1570317 - RNA, 19 nt, Artificial Sequence
  Description of Artificial Sequence: Synthetic oligonucleotide
  Sense strand starting at position 860 of SEQ ID NO: 1560017
guaucugauaccugucugu

SEQ ID NO: 1570318 - RNA, 19 nt, Artificial Sequence
  Description of Artificial Sequence: Synthetic oligonucleotide
  Antisense strand to SEQ ID NO: 1570317
acagacagguaucagauac

SEQ ID NO: 1570319 - RNA, 19 nt, Artificial Sequence
  Description of Artificial Sequence: Synthetic oligonucleotide
  Sense strand starting at position 863 of SEQ ID NO: 1560017
ucugauaccugucuguaag

SEQ ID NO: 1570320 - RNA, 19 nt, Artificial Sequence
  Description of Artificial Sequence: Synthetic oligonucleotide
  Antisense strand to SEQ ID NO: 1570319
cuuacagacagguaucaga

SEQ ID NO: 1570321 - RNA, 19 nt, Artificial Sequence
  Description of Artificial Sequence: Synthetic oligonucleotide
  Sense strand starting at position 864 of SEQ ID NO: 1560017
cugauaccugucuguaagu

SEQ ID NO: 1570322 - RNA, 19 nt, Artificial Sequence
  Description of Artificial Sequence: Synthetic oligonucleotide
  Antisense strand to SEQ ID NO: 1570321
acuuacagacagguaucag

SEQ ID NO: 1570323 - RNA, 19 nt, Artificial Sequence
  Description of Artificial Sequence: Synthetic oligonucleotide
  Sense strand starting at position 866 of SEQ ID NO: 1560017
gauaccugucuguaaguca

SEQ ID NO: 1570324 - RNA, 19 nt, Artificial Sequence
  Description of Artificial Sequence: Synthetic oligonucleotide
  Antisense strand to SEQ ID NO: 1570323
ugacuuacagacagguauc

SEQ ID NO: 1570325 - RNA, 19 nt, Artificial Sequence
  Description of Artificial Sequence: Synthetic oligonucleotide
  Sense strand starting at position 877 of SEQ ID NO: 1560017
guaagucacuuagcuauca

SEQ ID NO: 1570326 - RNA, 19 nt, Artificial Sequence
  Description of Artificial Sequence: Synthetic oligonucleotide
  Antisense strand to SEQ ID NO: 1570325
ugauagcuaagugacuuac

SEQ ID NO: 1570327 - RNA, 19 nt, Artificial Sequence
  Description of Artificial Sequence: Synthetic oligonucleotide
  Sense strand starting at position 1283 of SEQ ID NO: 1560017
aauagugauggcugcaauu

SEQ ID NO: 1570328 - RNA, 19 nt, Artificial Sequence
  Description of Artificial Sequence: Synthetic oligonucleotide
  Antisense strand to SEQ ID NO: 1570327
aauugcagccaucacuauu

SEQ ID NO: 1570329 - RNA, 19 nt, Artificial Sequence
  Description of Artificial Sequence: Synthetic oligonucleotide
  Sense strand starting at position 1451 of SEQ ID NO: 1560017
aaagaaaguuauguguagu

SEQ ID NO: 1570330 - RNA, 19 nt, Artificial Sequence
  Description of Artificial Sequence: Synthetic oligonucleotide
  Antisense strand to SEQ ID NO: 1570329
acuacacauaacuuucuuu

SEQ ID NO: 1570331 - RNA, 19 nt, Artificial Sequence
  Description of Artificial Sequence: Synthetic oligonucleotide
  Sense strand starting at position 1454 of SEQ ID NO: 1560017
gaaaguuauguguaguaua

SEQ ID NO: 1570332 - RNA, 19 nt, Artificial Sequence
  Description of Artificial Sequence: Synthetic oligonucleotide
  Antisense strand to SEQ ID NO: 1570331
uauacuacacauaacuuuc

SEQ ID NO: 1570333 - RNA, 19 nt, Artificial Sequence
  Description of Artificial Sequence: Synthetic oligonucleotide
  Sense strand starting at position 1465 of SEQ ID NO: 1560017
guaguauauacaggguuua

SEQ ID NO: 1570334 - RNA, 19 nt, Artificial Sequence
  Description of Artificial Sequence: Synthetic oligonucleotide
  Antisense strand to SEQ ID NO: 1570333
uaaacccuguauauacuac

SEQ ID NO: 1570335 - RNA, 19 nt, Artificial Sequence
  Description of Artificial Sequence: Synthetic oligonucleotide
  Sense strand starting at position 1526 of SEQ ID NO: 1560017
acguauccuggugaauaag

SEQ ID NO: 1570336 - RNA, 19 nt, Artificial Sequence
  Description of Artificial Sequence: Synthetic oligonucleotide
  Antisense strand to SEQ ID NO: 1570335
cuuauucaccaggauacgu

SEQ ID NO: 1570337 - RNA, 19 nt, Artificial Sequence
  Description of Artificial Sequence: Synthetic oligonucleotide
  Sense strand starting at position 1831 of SEQ ID NO: 1560017
aggagagucucaccacguu

SEQ ID NO: 1570338 - RNA, 19 nt, Artificial Sequence
  Description of Artificial Sequence: Synthetic oligonucleotide
  Antisense strand to SEQ ID NO: 1570337
aacguggugagacucuccu

SEQ ID NO: 1570339 - RNA, 19 nt, Artificial Sequence
  Description of Artificial Sequence: Synthetic oligonucleotide
  Sense strand starting at position 2035 of SEQ ID NO: 1560017
guuugugacccugcgugua

SEQ ID NO: 1570340 - RNA, 19 nt, Artificial Sequence
  Description of Artificial Sequence: Synthetic oligonucleotide
  Antisense strand to SEQ ID NO: 1570339
uacacgcagggucacaaac

SEQ ID NO: 1570341 - RNA, 19 nt, Artificial Sequence
  Description of Artificial Sequence: Synthetic oligonucleotide
  Sense strand starting at position 2074 of SEQ ID NO: 1560017
gcauguguugaguaucugu

SEQ ID NO: 1570342 - RNA, 19 nt, Artificial Sequence
  Description of Artificial Sequence: Synthetic oligonucleotide
  Antisense strand to SEQ ID NO: 1570341
acagauacucaacacaugc

SEQ ID NO: 1570343 - RNA, 19 nt, Artificial Sequence
  Description of Artificial Sequence: Synthetic oligonucleotide
  Sense strand starting at position 2698 of SEQ ID NO: 1560017
uccagaagguucuugcuuu

SEQ ID NO: 1570344 - RNA, 19 nt, Artificial Sequence
  Description of Artificial Sequence: Synthetic oligonucleotide
  Antisense strand to SEQ ID NO: 1570343
aaagcaagaaccuucugga

SEQ ID NO: 1570345 - RNA, 19 nt, Artificial Sequence
  Description of Artificial Sequence: Synthetic oligonucleotide
  Sense strand starting at position 2757 of SEQ ID NO: 1560017
uccagauguccugaccauc

SEQ ID NO: 1570346 - RNA, 19 nt, Artificial Sequence
  Description of Artificial Sequence: Synthetic oligonucleotide
  Antisense strand to SEQ ID NO: 1570345
gauggucaggacaucugga

SEQ ID NO: 1570347 - RNA, 19 nt, Artificial Sequence
  Description of Artificial Sequence: Synthetic oligonucleotide
  Sense strand starting at position 2953 of SEQ ID NO: 1560017
cuguuauuagcacagaaga

SEQ ID NO: 1570348 - RNA, 19 nt, Artificial Sequence
  Description of Artificial Sequence: Synthetic oligonucleotide
  Antisense strand to SEQ ID NO: 1570347
ucuucugugcuaauaacag

SEQ ID NO: 1570349 - RNA, 19 nt, Artificial Sequence
  Description of Artificial Sequence: Synthetic oligonucleotide
  Sense strand starting at position 2985 of SEQ ID NO: 1560017
aaguuaacggcacacagau

SEQ ID NO: 1570350 - RNA, 19 nt, Artificial Sequence
  Description of Artificial Sequence: Synthetic oligonucleotide
  Antisense strand to SEQ ID NO: 1570349
aucugugugccguuaacuu

SEQ ID NO: 1570351 - RNA, 19 nt, Artificial Sequence
  Description of Artificial Sequence: Synthetic oligonucleotide
  Sense strand starting at position 3065 of SEQ ID NO: 1560017
gcgggcugacacugaugua

SEQ ID NO: 1570352 - RNA, 19 nt, Artificial Sequence
  Description of Artificial Sequence: Synthetic oligonucleotide
  Antisense strand to SEQ ID NO: 1570351
uacaucagugucagcccgc

SEQ ID NO: 1570353 - RNA, 19 nt, Artificial Sequence
  Description of Artificial Sequence: Synthetic oligonucleotide
  Sense strand starting at position 3093 of SEQ ID NO: 1560017
agagacauguaugcauaca

SEQ ID NO: 1570354 - RNA, 19 nt, Artificial Sequence
  Description of Artificial Sequence: Synthetic oligonucleotide
  Antisense strand to SEQ ID NO: 1570353
uguaugcauacaugucucu

SEQ ID NO: 1570355 - RNA, 19 nt, Artificial Sequence
  Description of Artificial Sequence: Synthetic oligonucleotide
  Sense strand starting at position 3219 of SEQ ID NO: 1560017
cuuaaaugucccuguauau

SEQ ID NO: 1570356 - RNA, 19 nt, Artificial Sequence
  Description of Artificial Sequence: Synthetic oligonucleotide
  Antisense strand to SEQ ID NO: 1570355
auauacagggacauuuaag

SEQ ID NO: 1570357 - RNA, 19 nt, Artificial Sequence
  Description of Artificial Sequence: Synthetic oligonucleotide
  Sense strand starting at position 3370 of SEQ ID NO: 1560017
cuccaucuacgccauaaga

SEQ ID NO: 1570358 - RNA, 19 nt, Artificial Sequence
  Description of Artificial Sequence: Synthetic oligonucleotide
  Antisense strand to SEQ ID NO: 1570357
ucuuauggcguagauggag

SEQ ID NO: 1570359 - RNA, 19 nt, Artificial Sequence
  Description of Artificial Sequence: Synthetic oligonucleotide
  Sense strand starting at position 3372 of SEQ ID NO: 1560017
ccaucuacgccauaagaug

SEQ ID NO: 1570360 - RNA, 19 nt, Artificial Sequence
  Description of Artificial Sequence: Synthetic oligonucleotide
  Antisense strand to SEQ ID NO: 1570359
caucuuauggcguagaugg

SEQ ID NO: 1570361 - RNA, 19 nt, Artificial Sequence
  Description of Artificial Sequence: Synthetic oligonucleotide
  Sense strand starting at position 3551 of SEQ ID NO: 1560017
ugacaaaccugucaugaaa

SEQ ID NO: 1570362 - RNA, 19 nt, Artificial Sequence
  Description of Artificial Sequence: Synthetic oligonucleotide
  Antisense strand to SEQ ID NO: 1570361
uuucaugacagguuuguca

SEQ ID NO: 1570363 - RNA, 19 nt, Artificial Sequence
  Description of Artificial Sequence: Synthetic oligonucleotide
  Sense strand starting at position 3848 of SEQ ID NO: 1560017
ucuauacgcugacugguaa

SEQ ID NO: 1570364 - RNA, 19 nt, Artificial Sequence
  Description of Artificial Sequence: Synthetic oligonucleotide
  Antisense strand to SEQ ID NO: 1570363
uuaccagucagcguauaga

SEQ ID NO: 1570365 - RNA, 19 nt, Artificial Sequence
  Description of Artificial Sequence: Synthetic oligonucleotide
  Sense strand starting at position 47 of SEQ ID NO: 1560018
aggugauucugacagggca

SEQ ID NO: 1570366 - RNA, 19 nt, Artificial Sequence
  Description of Artificial Sequence: Synthetic oligonucleotide
  Antisense strand to SEQ ID NO: 1570365
ugcccugucagaaucaccu

SEQ ID NO: 1570367 - RNA, 19 nt, Artificial Sequence
  Description of Artificial Sequence: Synthetic oligonucleotide
  Sense strand starting at position 114 of SEQ ID NO: 1560018
gucugucagaacggaaaga

SEQ ID NO: 1570368 - RNA, 19 nt, Artificial Sequence
  Description of Artificial Sequence: Synthetic oligonucleotide
  Antisense strand to SEQ ID NO: 1570367
ucuuuccguucugacagac

SEQ ID NO: 1570369 - RNA, 19 nt, Artificial Sequence
  Description of Artificial Sequence: Synthetic oligonucleotide
  Sense strand starting at position 162 of SEQ ID NO: 1560018
cacgaaguauguccuauua

SEQ ID NO: 1570370 - RNA, 19 nt, Artificial Sequence
  Description of Artificial Sequence: Synthetic oligonucleotide
  Antisense strand to SEQ ID NO: 1570369
uaauaggacauacuucgug

SEQ ID NO: 1570371 - RNA, 19 nt, Artificial Sequence
  Description of Artificial Sequence: Synthetic oligonucleotide
  Sense strand starting at position 164 of SEQ ID NO: 1560018
cgaaguauguccuauuauu

SEQ ID NO: 1570372 - RNA, 19 nt, Artificial Sequence
  Description of Artificial Sequence: Synthetic oligonucleotide
  Antisense strand to SEQ ID NO: 1570371
aauaauaggacauacuucg

SEQ ID NO: 1570373 - RNA, 19 nt, Artificial Sequence
  Description of Artificial Sequence: Synthetic oligonucleotide
  Sense strand starting at position 246 of SEQ ID NO: 1560018
gcugacaaguggucaaacu

SEQ ID NO: 1570374 - RNA, 19 nt, Artificial Sequence
  Description of Artificial Sequence: Synthetic oligonucleotide
  Antisense strand to SEQ ID NO: 1570373
aguuugaccacuugucagc

SEQ ID NO: 1570375 - RNA, 19 nt, Artificial Sequence
  Description of Artificial Sequence: Synthetic oligonucleotide
  Sense strand starting at position 670 of SEQ ID NO: 1560018
cccuuaggccgacauaguu

SEQ ID NO: 1570376 - RNA, 19 nt, Artificial Sequence
  Description of Artificial Sequence: Synthetic oligonucleotide
  Antisense strand to SEQ ID NO: 1570375
aacuaugucggccuaaggg

SEQ ID NO: 1570377 - RNA, 19 nt, Artificial Sequence
  Description of Artificial Sequence: Synthetic oligonucleotide
  Sense strand starting at position 857 of SEQ ID NO: 1560018
ucucuuaggucucuagaga

SEQ ID NO: 1570378 - RNA, 19 nt, Artificial Sequence
  Description of Artificial Sequence: Synthetic oligonucleotide
  Antisense strand to SEQ ID NO: 1570377
ucucuagagaccuaagaga

SEQ ID NO: 1570379 - RNA, 19 nt, Artificial Sequence
  Description of Artificial Sequence: Synthetic oligonucleotide
  Sense strand starting at position 858 of SEQ ID NO: 1560018
cucuuaggucucuagagac

SEQ ID NO: 1570380 - RNA, 19 nt, Artificial Sequence
  Description of Artificial Sequence: Synthetic oligonucleotide
  Antisense strand to SEQ ID NO: 1570379
gucucuagagaccuaagag

SEQ ID NO: 1570381 - RNA, 19 nt, Artificial Sequence
  Description of Artificial Sequence: Synthetic oligonucleotide
  Sense strand starting at position 1295 of SEQ ID NO: 1560018
gugguguuggcagggagaa

SEQ ID NO: 1570382 - RNA, 19 nt, Artificial Sequence
  Description of Artificial Sequence: Synthetic oligonucleotide
  Antisense strand to SEQ ID NO: 1570381
uucucccugccaacaccac

SEQ ID NO: 1570383 - RNA, 19 nt, Artificial Sequence
  Description of Artificial Sequence: Synthetic oligonucleotide
  Sense strand starting at position 2113 of SEQ ID NO: 1560018
aggaucagcucuuucuuaa

SEQ ID NO: 1570384 - RNA, 19 nt, Artificial Sequence
  Description of Artificial Sequence: Synthetic oligonucleotide
  Antisense strand to SEQ ID NO: 1570383
uuaagaaagagcugauccu

SEQ ID NO: 1570385 - RNA, 19 nt, Artificial Sequence
  Description of Artificial Sequence: Synthetic oligonucleotide
  Sense strand starting at position 2243 of SEQ ID NO: 1560018
gggcucugugucugguaaa

SEQ ID NO: 1570386 - RNA, 19 nt, Artificial Sequence
  Description of Artificial Sequence: Synthetic oligonucleotide
  Antisense strand to SEQ ID NO: 1570385
uuuaccagacacagagccc

SEQ ID NO: 1570387 - RNA, 19 nt, Artificial Sequence
  Description of Artificial Sequence: Synthetic oligonucleotide
  Sense strand starting at position 2244 of SEQ ID NO: 1560018
ggcucugugucugguaaac

SEQ ID NO: 1570388 - RNA, 19 nt, Artificial Sequence
  Description of Artificial Sequence: Synthetic oligonucleotide
  Antisense strand to SEQ ID NO: 1570387
guuuaccagacacagagcc

SEQ ID NO: 1570389 - RNA, 19 nt, Artificial Sequence
  Description of Artificial Sequence: Synthetic oligonucleotide
  Sense strand starting at position 2246 of SEQ ID NO: 1560018
cucugugucugguaaacau

SEQ ID NO: 1570390 - RNA, 19 nt, Artificial Sequence
  Description of Artificial Sequence: Synthetic oligonucleotide
  Antisense strand to SEQ ID NO: 1570389
auguuuaccagacacagag

SEQ ID NO: 1570391 - RNA, 19 nt, Artificial Sequence
  Description of Artificial Sequence: Synthetic oligonucleotide
  Sense strand starting at position 2255 of SEQ ID NO: 1560018
ugguaaacauuccuccaga

SEQ ID NO: 1570392 - RNA, 19 nt, Artificial Sequence
  Description of Artificial Sequence: Synthetic oligonucleotide
  Antisense strand to SEQ ID NO: 1570391
ucuggaggaauguuuacca

SEQ ID NO: 1570393 - RNA, 19 nt, Artificial Sequence
  Description of Artificial Sequence: Synthetic oligonucleotide
  Sense strand starting at position 2256 of SEQ ID NO: 1560018
gguaaacauuccuccagaa

SEQ ID NO: 1570394 - RNA, 19 nt, Artificial Sequence
  Description of Artificial Sequence: Synthetic oligonucleotide
  Antisense strand to SEQ ID NO: 1570393
uucuggaggaauguuuacc

SEQ ID NO: 1570395 - RNA, 19 nt, Artificial Sequence
  Description of Artificial Sequence: Synthetic oligonucleotide
  Sense strand starting at position 2445 of SEQ ID NO: 1560018
cuuagacgucacugacaca

SEQ ID NO: 1570396 - RNA, 19 nt, Artificial Sequence
  Description of Artificial Sequence: Synthetic oligonucleotide
  Antisense strand to SEQ ID NO: 1570395
ugugucagugacgucuaag

SEQ ID NO: 1570397 - RNA, 19 nt, Artificial Sequence
  Description of Artificial Sequence: Synthetic oligonucleotide
  Sense strand starting at position 2555 of SEQ ID NO: 1560018
ggagcucgauuccuggaga

SEQ ID NO: 1570398 - RNA, 19 nt, Artificial Sequence
  Description of Artificial Sequence: Synthetic oligonucleotide
  Antisense strand to SEQ ID NO: 1570397
ucuccaggaaucgagcucc

SEQ ID NO: 1570399 - RNA, 19 nt, Artificial Sequence
  Description of Artificial Sequence: Synthetic oligonucleotide
  Sense strand starting at position 2556 of SEQ ID NO: 1560018
gagcucgauuccuggagaa

SEQ ID NO: 1570400 - RNA, 19 nt, Artificial Sequence
  Description of Artificial Sequence: Synthetic oligonucleotide
  Antisense strand to SEQ ID NO: 1570399
uucuccaggaaucgagcuc

SEQ ID NO: 1570401 - RNA, 19 nt, Artificial Sequence
  Description of Artificial Sequence: Synthetic oligonucleotide
  Sense strand starting at position 2558 of SEQ ID NO: 1560018
gcucgauuccuggagaaac

SEQ ID NO: 1570402 - RNA, 19 nt, Artificial Sequence
  Description of Artificial Sequence: Synthetic oligonucleotide
  Antisense strand to SEQ ID NO: 1570401
guuucuccaggaaucgagc

SEQ ID NO: 1570403 - RNA, 19 nt, Artificial Sequence
  Description of Artificial Sequence: Synthetic oligonucleotide
  Sense strand starting at position 2569 of SEQ ID NO: 1560018
ggagaaaccucagagacag

SEQ ID NO: 1570404 - RNA, 19 nt, Artificial Sequence
  Description of Artificial Sequence: Synthetic oligonucleotide
  Antisense strand to SEQ ID NO: 1570403
cugucucugagguuucucc

SEQ ID NO: 1570405 - RNA, 19 nt, Artificial Sequence
  Description of Artificial Sequence: Synthetic oligonucleotide
  Sense strand starting at position 3019 of SEQ ID NO: 1560018
aacgcuugaguccaagaga

SEQ ID NO: 1570406 - RNA, 19 nt, Artificial Sequence
  Description of Artificial Sequence: Synthetic oligonucleotide
  Antisense strand to SEQ ID NO: 1570405
ucucuuggacucaagcguu

SEQ ID NO: 1570407 - RNA, 19 nt, Artificial Sequence
  Description of Artificial Sequence: Synthetic oligonucleotide
  Sense strand starting at position 3088 of SEQ ID NO: 1560018
gacuguguguccugguuau

SEQ ID NO: 1570408 - RNA, 19 nt, Artificial Sequence
  Description of Artificial Sequence: Synthetic oligonucleotide
  Antisense strand to SEQ ID NO: 1570407
auaaccaggacacacaguc

SEQ ID NO: 1570409 - RNA, 19 nt, Artificial Sequence
  Description of Artificial Sequence: Synthetic oligonucleotide
  Sense strand starting at position 3094 of SEQ ID NO: 1560018
guguccugguuauugcaga

SEQ ID NO: 1570410 - RNA, 19 nt, Artificial Sequence
  Description of Artificial Sequence: Synthetic oligonucleotide
  Antisense strand to SEQ ID NO: 1570409
ucugcaauaaccaggacac

SEQ ID NO: 1570411 - RNA, 19 nt, Artificial Sequence
  Description of Artificial Sequence: Synthetic oligonucleotide
  Sense strand starting at position 3190 of SEQ ID NO: 1560018
ccuggaugucugugaggag

SEQ ID NO: 1570412 - RNA, 19 nt, Artificial Sequence
  Description of Artificial Sequence: Synthetic oligonucleotide
  Antisense strand to SEQ ID NO: 1570411
cuccucacagacauccagg

SEQ ID NO: 1570413 - RNA, 19 nt, Artificial Sequence
  Description of Artificial Sequence: Synthetic oligonucleotide
  Sense strand starting at position 3245 of SEQ ID NO: 1560018
guguuuggguacugguaua

SEQ ID NO: 1570414 - RNA, 19 nt, Artificial Sequence
  Description of Artificial Sequence: Synthetic oligonucleotide
  Antisense strand to SEQ ID NO: 1570413
uauaccaguacccaaacac

SEQ ID NO: 1570415 - RNA, 19 nt, Artificial Sequence
  Description of Artificial Sequence: Synthetic oligonucleotide
  Sense strand starting at position 3274 of SEQ ID NO: 1560018
aucauaaaguccuaucugu

SEQ ID NO: 1570416 - RNA, 19 nt, Artificial Sequence
  Description of Artificial Sequence: Synthetic oligonucleotide
  Antisense strand to SEQ ID NO: 1570415
acagauaggacuuuaugau

SEQ ID NO: 1570417 - RNA, 19 nt, Artificial Sequence
  Description of Artificial Sequence: Synthetic oligonucleotide
  Sense strand starting at position 3395 of SEQ ID NO: 1560018
gaggacuguuucugaaagu

SEQ ID NO: 1570418 - RNA, 19 nt, Artificial Sequence
  Description of Artificial Sequence: Synthetic oligonucleotide
  Antisense strand to SEQ ID NO: 1570417
acuuucagaaacaguccuc

SEQ ID NO: 1570419 - RNA, 19 nt, Artificial Sequence
  Description of Artificial Sequence: Synthetic oligonucleotide
  Sense strand starting at position 3885 of SEQ ID NO: 1560018
ucagaaggcuucuucccaa

SEQ ID NO: 1570420 - RNA, 19 nt, Artificial Sequence
  Description of Artificial Sequence: Synthetic oligonucleotide
  Antisense strand to SEQ ID NO: 1570419
uugggaagaagccuucuga

SEQ ID NO: 1570421 - RNA, 19 nt, Artificial Sequence
  Description of Artificial Sequence: Synthetic oligonucleotide
  Sense strand starting at position 58 of SEQ ID NO: 1560019
ggacuuguuucccuggcua

SEQ ID NO: 1570422 - RNA, 19 nt, Artificial Sequence
  Description of Artificial Sequence: Synthetic oligonucleotide
  Antisense strand to SEQ ID NO: 1570421
uagccagggaaacaagucc

SEQ ID NO: 1570423 - RNA, 19 nt, Artificial Sequence
  Description of Artificial Sequence: Synthetic oligonucleotide
  Sense strand starting at position 60 of SEQ ID NO: 1560019
acuuguuucccuggcuaac

SEQ ID NO: 1570424 - RNA, 19 nt, Artificial Sequence
  Description of Artificial Sequence: Synthetic oligonucleotide
  Antisense strand to SEQ ID NO: 1570423
guuagccagggaaacaagu

SEQ ID NO: 1570425 - RNA, 19 nt, Artificial Sequence
  Description of Artificial Sequence: Synthetic oligonucleotide
  Sense strand starting at position 1613 of SEQ ID NO: 1560019
gggagacagcucugagauc

SEQ ID NO: 1570426 - RNA, 19 nt, Artificial Sequence
  Description of Artificial Sequence: Synthetic oligonucleotide
  Antisense strand to SEQ ID NO: 1570425
gaucucagagcugucuccc

SEQ ID NO: 1570427 - RNA, 19 nt, Artificial Sequence
  Description of Artificial Sequence: Synthetic oligonucleotide
  Sense strand starting at position 1840 of SEQ ID NO: 1560019
ugccuucucugugcuuuaa

SEQ ID NO: 1570428 - RNA, 19 nt, Artificial Sequence
  Description of Artificial Sequence: Synthetic oligonucleotide
  Antisense strand to SEQ ID NO: 1570427
uuaaagcacagagaaggca

SEQ ID NO: 1570429 - RNA, 19 nt, Artificial Sequence
  Description of Artificial Sequence: Synthetic oligonucleotide
  Sense strand starting at position 1842 of SEQ ID NO: 1560019
ccuucucugugcuuuaagu

SEQ ID NO: 1570430 - RNA, 19 nt, Artificial Sequence
  Description of Artificial Sequence: Synthetic oligonucleotide
  Antisense strand to SEQ ID NO: 1570429
acuuaaagcacagagaagg

SEQ ID NO: 1570431 - RNA, 19 nt, Artificial Sequence
  Description of Artificial Sequence: Synthetic oligonucleotide
  Sense strand starting at position 1850 of SEQ ID NO: 1560019
gugcuuuaagucugaguuc

SEQ ID NO: 1570432 - RNA, 19 nt, Artificial Sequence
  Description of Artificial Sequence: Synthetic oligonucleotide
  Antisense strand to SEQ ID NO: 1570431
gaacucagacuuaaagcac

SEQ ID NO: 1570433 - RNA, 19 nt, Artificial Sequence
  Description of Artificial Sequence: Synthetic oligonucleotide
  Sense strand starting at position 1851 of SEQ ID NO: 1560019
ugcuuuaagucugaguucu

SEQ ID NO: 1570434 - RNA, 19 nt, Artificial Sequence
  Description of Artificial Sequence: Synthetic oligonucleotide
  Antisense strand to SEQ ID NO: 1570433
agaacucagacuuaaagca

SEQ ID NO: 1570435 - RNA, 19 nt, Artificial Sequence
  Description of Artificial Sequence: Synthetic oligonucleotide
  Sense strand starting at position 2157 of SEQ ID NO: 1560019
cugcacugauccucaguuu

SEQ ID NO: 1570436 - RNA, 19 nt, Artificial Sequence
  Description of Artificial Sequence: Synthetic oligonucleotide
  Antisense strand to SEQ ID NO: 1570435
aaacugaggaucagugcag

SEQ ID NO: 1570437 - RNA, 19 nt, Artificial Sequence
  Description of Artificial Sequence: Synthetic oligonucleotide
  Sense strand starting at position 2171 of SEQ ID NO: 1560019
aguuucccucucuagaaga

SEQ ID NO: 1570438 - RNA, 19 nt, Artificial Sequence
  Description of Artificial Sequence: Synthetic oligonucleotide
  Antisense strand to SEQ ID NO: 1570437
ucuucuagagagggaaacu

SEQ ID NO: 1570439 - RNA, 19 nt, Artificial Sequence
  Description of Artificial Sequence: Synthetic oligonucleotide
  Sense strand starting at position 2392 of SEQ ID NO: 1560019
gaguccugcgcgucuguau

SEQ ID NO: 1570440 - RNA, 19 nt, Artificial Sequence
  Description of Artificial Sequence: Synthetic oligonucleotide
  Antisense strand to SEQ ID NO: 1570439
auacagacgcgcaggacuc

SEQ ID NO: 1570441 - RNA, 19 nt, Artificial Sequence
  Description of Artificial Sequence: Synthetic oligonucleotide
  Sense strand starting at position 2400 of SEQ ID NO: 1560019
cgcgucuguaugggugauu

SEQ ID NO: 1570442 - RNA, 19 nt, Artificial Sequence
  Description of Artificial Sequence: Synthetic oligonucleotide
  Antisense strand to SEQ ID NO: 1570441
aaucacccauacagacgcg

SEQ ID NO: 1570443 - RNA, 19 nt, Artificial Sequence
  Description of Artificial Sequence: Synthetic oligonucleotide
  Sense strand starting at position 2401 of SEQ ID NO: 1560019
gcgucuguaugggugauua

SEQ ID NO: 1570444 - RNA, 19 nt, Artificial Sequence
  Description of Artificial Sequence: Synthetic oligonucleotide
  Antisense strand to SEQ ID NO: 1570443
uaaucacccauacagacgc

SEQ ID NO: 1570445 - RNA, 19 nt, Artificial Sequence
  Description of Artificial Sequence: Synthetic oligonucleotide
  Sense strand starting at position 2403 of SEQ ID NO: 1560019
gucuguaugggugauuauu

SEQ ID NO: 1570446 - RNA, 19 nt, Artificial Sequence
  Description of Artificial Sequence: Synthetic oligonucleotide
  Antisense strand to SEQ ID NO: 1570445
aauaaucacccauacagac

SEQ ID NO: 1570447 - RNA, 19 nt, Artificial Sequence
  Description of Artificial Sequence: Synthetic oligonucleotide
  Sense strand starting at position 2405 of SEQ ID NO: 1560019
cuguaugggugauuauuau

SEQ ID NO: 1570448 - RNA, 19 nt, Artificial Sequence
  Description of Artificial Sequence: Synthetic oligonucleotide
  Antisense strand to SEQ ID NO: 1570447
auaauaaucacccauacag

SEQ ID NO: 1570449 - RNA, 19 nt, Artificial Sequence
  Description of Artificial Sequence: Synthetic oligonucleotide
  Sense strand starting at position 3396 of SEQ ID NO: 1560019
gauggaauguucugggacu

SEQ ID NO: 1570450 - RNA, 19 nt, Artificial Sequence
  Description of Artificial Sequence: Synthetic oligonucleotide
  Antisense strand to SEQ ID NO: 1570449
agucccagaacauuccauc

SEQ ID NO: 1570451 - RNA, 19 nt, Artificial Sequence
  Description of Artificial Sequence: Synthetic oligonucleotide
  Sense strand starting at position 3421 of SEQ ID NO: 1560019
cagugaugguugcacaagu

SEQ ID NO: 1570452 - RNA, 19 nt, Artificial Sequence
  Description of Artificial Sequence: Synthetic oligonucleotide
  Antisense strand to SEQ ID NO: 1570451
acuugugcaaccaucacug

SEQ ID NO: 1570453 - RNA, 19 nt, Artificial Sequence
  Description of Artificial Sequence: Synthetic oligonucleotide
  Sense strand starting at position 3429 of SEQ ID NO: 1560019
guugcacaagucggugaau

SEQ ID NO: 1570454 - RNA, 19 nt, Artificial Sequence
  Description of Artificial Sequence: Synthetic oligonucleotide
  Antisense strand to SEQ ID NO: 1570453
auucaccgacuugugcaac

SEQ ID NO: 1570455 - RNA, 19 nt, Artificial Sequence
  Description of Artificial Sequence: Synthetic oligonucleotide
  Sense strand starting at position 3893 of SEQ ID NO: 1560019
guuugaaacuccuaagcuc

SEQ ID NO: 1570456 - RNA, 19 nt, Artificial Sequence
  Description of Artificial Sequence: Synthetic oligonucleotide
  Antisense strand to SEQ ID NO: 1570455
gagcuuaggaguuucaaac

SEQ ID NO: 1570457 - RNA, 19 nt, Artificial Sequence
  Description of Artificial Sequence: Synthetic oligonucleotide
  Sense strand starting at position 3958 of SEQ ID NO: 1560019
gugagcuacugcguccaaa

SEQ ID NO: 1570458 - RNA, 19 nt, Artificial Sequence
  Description of Artificial Sequence: Synthetic oligonucleotide
  Antisense strand to SEQ ID NO: 1570457
uuuggacgcaguagcucac

SEQ ID NO: 1570459 - RNA, 19 nt, Artificial Sequence
  Description of Artificial Sequence: Synthetic oligonucleotide
  Sense strand starting at position 56 of SEQ ID NO: 1560020
ccuaguuccugucuuuaac

SEQ ID NO: 1570460 - RNA, 19 nt, Artificial Sequence
  Description of Artificial Sequence: Synthetic oligonucleotide
  Antisense strand to SEQ ID NO: 1570459
guuaaagacaggaacuagg

SEQ ID NO: 1570461 - RNA, 19 nt, Artificial Sequence
  Description of Artificial Sequence: Synthetic oligonucleotide
  Sense strand starting at position 73 of SEQ ID NO: 1560020
acucccagcugaugagauu

SEQ ID NO: 1570462 - RNA, 19 nt, Artificial Sequence
  Description of Artificial Sequence: Synthetic oligonucleotide
  Antisense strand to SEQ ID NO: 1570461
aaucucaucagcugggagu

SEQ ID NO: 1570463 - RNA, 19 nt, Artificial Sequence
  Description of Artificial Sequence: Synthetic oligonucleotide
  Sense strand starting at position 96 of SEQ ID NO: 1560020
uuaguuugccacguuggua

SEQ ID NO: 1570464 - RNA, 19 nt, Artificial Sequence
  Description of Artificial Sequence: Synthetic oligonucleotide
  Antisense strand to SEQ ID NO: 1570463
uaccaacguggcaaacuaa

SEQ ID NO: 1570465 - RNA, 19 nt, Artificial Sequence
  Description of Artificial Sequence: Synthetic oligonucleotide
  Sense strand starting at position 258 of SEQ ID NO: 1560020
gaggaaaugucacucagug

SEQ ID NO: 1570466 - RNA, 19 nt, Artificial Sequence
  Description of Artificial Sequence: Synthetic oligonucleotide
  Antisense strand to SEQ ID NO: 1570465
cacugagugacauuuccuc

SEQ ID NO: 1570467 - RNA, 19 nt, Artificial Sequence
  Description of Artificial Sequence: Synthetic oligonucleotide
  Sense strand starting at position 321 of SEQ ID NO: 1560020
ccugaacucuggccuggaa

SEQ ID NO: 1570468 - RNA, 19 nt, Artificial Sequence
  Description of Artificial Sequence: Synthetic oligonucleotide
  Antisense strand to SEQ ID NO: 1570467
uuccaggccagaguucagg

SEQ ID NO: 1570469 - RNA, 19 nt, Artificial Sequence
  Description of Artificial Sequence: Synthetic oligonucleotide
  Sense strand starting at position 536 of SEQ ID NO: 1560020
uggugucaccuugagaaca

SEQ ID NO: 1570470 - RNA, 19 nt, Artificial Sequence
  Description of Artificial Sequence: Synthetic oligonucleotide
  Antisense strand to SEQ ID NO: 1570469
uguucucaaggugacacca

SEQ ID NO: 1570471 - RNA, 19 nt, Artificial Sequence
  Description of Artificial Sequence: Synthetic oligonucleotide
  Sense strand starting at position 680 of SEQ ID NO: 1560020
ucaguuuccucuugagaag

SEQ ID NO: 1570472 - RNA, 19 nt, Artificial Sequence
  Description of Artificial Sequence: Synthetic oligonucleotide
  Antisense strand to SEQ ID NO: 1570471
cuucucaagaggaaacuga

SEQ ID NO: 1570473 - RNA, 19 nt, Artificial Sequence
  Description of Artificial Sequence: Synthetic oligonucleotide
  Sense strand starting at position 681 of SEQ ID NO: 1560020
caguuuccucuugagaagu

SEQ ID NO: 1570474 - RNA, 19 nt, Artificial Sequence
  Description of Artificial Sequence: Synthetic oligonucleotide
  Antisense strand to SEQ ID NO: 1570473
acuucucaagaggaaacug

SEQ ID NO: 1570475 - RNA, 19 nt, Artificial Sequence
  Description of Artificial Sequence: Synthetic oligonucleotide
  Sense strand starting at position 1032 of SEQ ID NO: 1560020
guuuaaaucugacccagag

SEQ ID NO: 1570476 - RNA, 19 nt, Artificial Sequence
  Description of Artificial Sequence: Synthetic oligonucleotide
  Antisense strand to SEQ ID NO: 1570475
cucugggucagauuuaaac

SEQ ID NO: 1570477 - RNA, 19 nt, Artificial Sequence
  Description of Artificial Sequence: Synthetic oligonucleotide
  Sense strand starting at position 1053 of SEQ ID NO: 1560020
aaagauggucgggauucuu

SEQ ID NO: 1570478 - RNA, 19 nt, Artificial Sequence
  Description of Artificial Sequence: Synthetic oligonucleotide
  Antisense strand to SEQ ID NO: 1570477
aagaaucccgaccaucuuu

SEQ ID NO: 1570479 - RNA, 19 nt, Artificial Sequence
  Description of Artificial Sequence: Synthetic oligonucleotide
  Sense strand starting at position 1077 of SEQ ID NO: 1560020
aggagugaaucugaacagu

SEQ ID NO: 1570480 - RNA, 19 nt, Artificial Sequence
  Description of Artificial Sequence: Synthetic oligonucleotide
  Antisense strand to SEQ ID NO: 1570479
acuguucagauucacuccu

SEQ ID NO: 1570481 - RNA, 19 nt, Artificial Sequence
  Description of Artificial Sequence: Synthetic oligonucleotide
  Sense strand starting at position 1314 of SEQ ID NO: 1560020
gacuaaacgcuucgggcau

SEQ ID NO: 1570482 - RNA, 19 nt, Artificial Sequence
  Description of Artificial Sequence: Synthetic oligonucleotide
  Antisense strand to SEQ ID NO: 1570481
augcccgaagcguuuaguc

SEQ ID NO: 1570483 - RNA, 19 nt, Artificial Sequence
  Description of Artificial Sequence: Synthetic oligonucleotide
  Sense strand starting at position 1388 of SEQ ID NO: 1560020
cagcaauguguccaugcca

SEQ ID NO: 1570484 - RNA, 19 nt, Artificial Sequence
  Description of Artificial Sequence: Synthetic oligonucleotide
  Antisense strand to SEQ ID NO: 1570483
uggcauggacacauugcug

SEQ ID NO: 1570485 - RNA, 19 nt, Artificial Sequence
  Description of Artificial Sequence: Synthetic oligonucleotide
  Sense strand starting at position 1719 of SEQ ID NO: 1560020
gccggagacaauuacggau

SEQ ID NO: 1570486 - RNA, 19 nt, Artificial Sequence
  Description of Artificial Sequence: Synthetic oligonucleotide
  Antisense strand to SEQ ID NO: 1570485
auccguaauugucuccggc

SEQ ID NO: 1570487 - RNA, 19 nt, Artificial Sequence
  Description of Artificial Sequence: Synthetic oligonucleotide
  Sense strand starting at position 1725 of SEQ ID NO: 1560020
gacaauuacggauggguga

SEQ ID NO: 1570488 - RNA, 19 nt, Artificial Sequence
  Description of Artificial Sequence: Synthetic oligonucleotide
  Antisense strand to SEQ ID NO: 1570487
ucacccauccguaauuguc

SEQ ID NO: 1570489 - RNA, 19 nt, Artificial Sequence
  Description of Artificial Sequence: Synthetic oligonucleotide
  Sense strand starting at position 2329 of SEQ ID NO: 1560020
acguguguuccgugaagaa

SEQ ID NO: 1570490 - RNA, 19 nt, Artificial Sequence
  Description of Artificial Sequence: Synthetic oligonucleotide
  Antisense strand to SEQ ID NO: 1570489
uucuucacggaacacacgu

SEQ ID NO: 1570491 - RNA, 19 nt, Artificial Sequence
  Description of Artificial Sequence: Synthetic oligonucleotide
  Sense strand starting at position 2333 of SEQ ID NO: 1560020
guguuccgugaagaaauga

SEQ ID NO: 1570492 - RNA, 19 nt, Artificial Sequence
  Description of Artificial Sequence: Synthetic oligonucleotide
  Antisense strand to SEQ ID NO: 1570491
ucauuucuucacggaacac

SEQ ID NO: 1570493 - RNA, 19 nt, Artificial Sequence
  Description of Artificial Sequence: Synthetic oligonucleotide
  Sense strand starting at position 2354 of SEQ ID NO: 1560020
ggauaagcccauggcgaua

SEQ ID NO: 1570494 - RNA, 19 nt, Artificial Sequence
  Description of Artificial Sequence: Synthetic oligonucleotide
  Antisense strand to SEQ ID NO: 1570493
uaucgccaugggcuuaucc

SEQ ID NO: 1570495 - RNA, 19 nt, Artificial Sequence
  Description of Artificial Sequence: Synthetic oligonucleotide
  Sense strand starting at position 2626 of SEQ ID NO: 1560020
uuggaaggguucuggaagu

SEQ ID NO: 1570496 - RNA, 19 nt, Artificial Sequence
  Description of Artificial Sequence: Synthetic oligonucleotide
  Antisense strand to SEQ ID NO: 1570495
acuuccagaacccuuccaa

SEQ ID NO: 1570497 - RNA, 19 nt, Artificial Sequence
  Description of Artificial Sequence: Synthetic oligonucleotide
  Sense strand starting at position 2642 of SEQ ID NO: 1560020
agucaacaaucagacagau

SEQ ID NO: 1570498 - RNA, 19 nt, Artificial Sequence
  Description of Artificial Sequence: Synthetic oligonucleotide
  Antisense strand to SEQ ID NO: 1570497
aucugucugauuguugacu

SEQ ID NO: 1570499 - RNA, 19 nt, Artificial Sequence
  Description of Artificial Sequence: Synthetic oligonucleotide
  Sense strand starting at position 2652 of SEQ ID NO: 1560020
cagacagauuuguagucuu

SEQ ID NO: 1570500 - RNA, 19 nt, Artificial Sequence
  Description of Artificial Sequence: Synthetic oligonucleotide
  Antisense strand to SEQ ID NO: 1570499
aagacuacaaaucugucug

SEQ ID NO: 1570501 - RNA, 19 nt, Artificial Sequence
  Description of Artificial Sequence: Synthetic oligonucleotide
  Sense strand starting at position 2742 of SEQ ID NO: 1560020
gaucuccgcucgcuacaau

SEQ ID NO: 1570502 - RNA, 19 nt, Artificial Sequence
  Description of Artificial Sequence: Synthetic oligonucleotide
  Antisense strand to SEQ ID NO: 1570501
auuguagcgagcggagauc

SEQ ID NO: 1570503 - RNA, 19 nt, Artificial Sequence
  Description of Artificial Sequence: Synthetic oligonucleotide
  Sense strand starting at position 2915 of SEQ ID NO: 1560020
ugaccuuccugccucagau

SEQ ID NO: 1570504 - RNA, 19 nt, Artificial Sequence
  Description of Artificial Sequence: Synthetic oligonucleotide
  Antisense strand to SEQ ID NO: 1570503
aucugaggcaggaagguca

SEQ ID NO: 1570505 - RNA, 19 nt, Artificial Sequence
  Description of Artificial Sequence: Synthetic oligonucleotide
  Sense strand starting at position 2974 of SEQ ID NO: 1560020
gccucagauuuguagauuu

SEQ ID NO: 1570506 - RNA, 19 nt, Artificial Sequence
  Description of Artificial Sequence: Synthetic oligonucleotide
  Antisense strand to SEQ ID NO: 1570505
aaaucuacaaaucugaggc

SEQ ID NO: 1570507 - RNA, 19 nt, Artificial Sequence
  Description of Artificial Sequence: Synthetic oligonucleotide
  Sense strand starting at position 2997 of SEQ ID NO: 1560020
gguuggguuggcuaggauu

SEQ ID NO: 1570508 - RNA, 19 nt, Artificial Sequence
  Description of Artificial Sequence: Synthetic oligonucleotide
  Antisense strand to SEQ ID NO: 1570507
aauccuagccaacccaacc

SEQ ID NO: 1570509 - RNA, 19 nt, Artificial Sequence
  Description of Artificial Sequence: Synthetic oligonucleotide
  Sense strand starting at position 3037 of SEQ ID NO: 1560020
ucugaaucucuaggagauu

SEQ ID NO: 1570510 - RNA, 19 nt, Artificial Sequence
  Description of Artificial Sequence: Synthetic oligonucleotide
  Antisense strand to SEQ ID NO: 1570509
aaucuccuagagauucaga

SEQ ID NO: 1570511 - RNA, 19 nt, Artificial Sequence
  Description of Artificial Sequence: Synthetic oligonucleotide
  Sense strand starting at position 3038 of SEQ ID NO: 1560020
cugaaucucuaggagauuc

SEQ ID NO: 1570512 - RNA, 19 nt, Artificial Sequence
  Description of Artificial Sequence: Synthetic oligonucleotide
  Antisense strand to SEQ ID NO: 1570511
gaaucuccuagagauucag

SEQ ID NO: 1570513 - RNA, 19 nt, Artificial Sequence
  Description of Artificial Sequence: Synthetic oligonucleotide
  Sense strand starting at position 3151 of SEQ ID NO: 1560020
cccuguuucuucccgagga

SEQ ID NO: 1570514 - RNA, 19 nt, Artificial Sequence
  Description of Artificial Sequence: Synthetic oligonucleotide
  Antisense strand to SEQ ID NO: 1570513
uccucgggaagaaacaggg

SEQ ID NO: 1570515 - RNA, 19 nt, Artificial Sequence
  Description of Artificial Sequence: Synthetic oligonucleotide
  Sense strand starting at position 3155 of SEQ ID NO: 1560020
guuucuucccgaggaggaa

SEQ ID NO: 1570516 - RNA, 19 nt, Artificial Sequence
  Description of Artificial Sequence: Synthetic oligonucleotide
  Antisense strand to SEQ ID NO: 1570515
uuccuccucgggaagaaac

SEQ ID NO: 1570517 - RNA, 19 nt, Artificial Sequence
  Description of Artificial Sequence: Synthetic oligonucleotide
  Sense strand starting at position 3167 of SEQ ID NO: 1560020
ggaggaagccgagguguau

SEQ ID NO: 1570518 - RNA, 19 nt, Artificial Sequence
  Description of Artificial Sequence: Synthetic oligonucleotide
  Antisense strand to SEQ ID NO: 1570517
auacaccucggcuuccucc

SEQ ID NO: 1570519 - RNA, 19 nt, Artificial Sequence
  Description of Artificial Sequence: Synthetic oligonucleotide
  Sense strand starting at position 3270 of SEQ ID NO: 1560020
agugaacccucagagcaaa

SEQ ID NO: 1570520 - RNA, 19 nt, Artificial Sequence
  Description of Artificial Sequence: Synthetic oligonucleotide
  Antisense strand to SEQ ID NO: 1570519
uuugcucugaggguucacu

SEQ ID NO: 1570521 - RNA, 19 nt, Artificial Sequence
  Description of Artificial Sequence: Synthetic oligonucleotide
  Sense strand starting at position 3281 of SEQ ID NO: 1560020
agagcaaaugcaugauuaa

SEQ ID NO: 1570522 - RNA, 19 nt, Artificial Sequence
  Description of Artificial Sequence: Synthetic oligonucleotide
  Antisense strand to SEQ ID NO: 1570521
uuaaucaugcauuugcucu

SEQ ID NO: 1570523 - RNA, 19 nt, Artificial Sequence
  Description of Artificial Sequence: Synthetic oligonucleotide
  Sense strand starting at position 3309 of SEQ ID NO: 1560020
gagggcaauuaccggaaau

SEQ ID NO: 1570524 - RNA, 19 nt, Artificial Sequence
  Description of Artificial Sequence: Synthetic oligonucleotide
  Antisense strand to SEQ ID NO: 1570523
auuuccgguaauugcccuc

SEQ ID NO: 1570525 - RNA, 19 nt, Artificial Sequence
  Description of Artificial Sequence: Synthetic oligonucleotide
  Sense strand starting at position 3310 of SEQ ID NO: 1560020
agggcaauuaccggaaaug

SEQ ID NO: 1570526 - RNA, 19 nt, Artificial Sequence
  Description of Artificial Sequence: Synthetic oligonucleotide
  Antisense strand to SEQ ID NO: 1570525
cauuuccgguaauugcccu

SEQ ID NO: 1570527 - RNA, 19 nt, Artificial Sequence
  Description of Artificial Sequence: Synthetic oligonucleotide
  Sense strand starting at position 3311 of SEQ ID NO: 1560020
gggcaauuaccggaaaugu

SEQ ID NO: 1570528 - RNA, 19 nt, Artificial Sequence
  Description of Artificial Sequence: Synthetic oligonucleotide
  Antisense strand to SEQ ID NO: 1570527
acauuuccgguaauugccc

SEQ ID NO: 1570529 - RNA, 19 nt, Artificial Sequence
  Description of Artificial Sequence: Synthetic oligonucleotide
  Sense strand starting at position 3376 of SEQ ID NO: 1560020
acuuucuuacugugguaca

SEQ ID NO: 1570530 - RNA, 19 nt, Artificial Sequence
  Description of Artificial Sequence: Synthetic oligonucleotide
  Antisense strand to SEQ ID NO: 1570529
uguaccacaguaagaaagu

SEQ ID NO: 1570531 - RNA, 19 nt, Artificial Sequence
  Description of Artificial Sequence: Synthetic oligonucleotide
  Sense strand starting at position 3387 of SEQ ID NO: 1560020
gugguacauccuuggacuu

SEQ ID NO: 1570532 - RNA, 19 nt, Artificial Sequence
  Description of Artificial Sequence: Synthetic oligonucleotide
  Antisense strand to SEQ ID NO: 1570531
aaguccaaggauguaccac

SEQ ID NO: 1570533 - RNA, 19 nt, Artificial Sequence
  Description of Artificial Sequence: Synthetic oligonucleotide
  Sense strand starting at position 3467 of SEQ ID NO: 1560020
agggauuugucggccggga

SEQ ID NO: 1570534 - RNA, 19 nt, Artificial Sequence
  Description of Artificial Sequence: Synthetic oligonucleotide
  Antisense strand to SEQ ID NO: 1570533
ucccggccgacaaaucccu

SEQ ID NO: 1570535 - RNA, 19 nt, Artificial Sequence
  Description of Artificial Sequence: Synthetic oligonucleotide
  Sense strand starting at position 3469 of SEQ ID NO: 1560020
ggauuugucggccgggaag

SEQ ID NO: 1570536 - RNA, 19 nt, Artificial Sequence
  Description of Artificial Sequence: Synthetic oligonucleotide
  Antisense strand to SEQ ID NO: 1570535
cuucccggccgacaaaucc

SEQ ID NO: 1570537 - RNA, 19 nt, Artificial Sequence
  Description of Artificial Sequence: Synthetic oligonucleotide
  Sense strand starting at position 3568 of SEQ ID NO: 1560020
gcagaucaugccgguaauc

SEQ ID NO: 1570538 - RNA, 19 nt, Artificial Sequence
  Description of Artificial Sequence: Synthetic oligonucleotide
  Antisense strand to SEQ ID NO: 1570537
gauuaccggcaugaucugc

SEQ ID NO: 1570539 - RNA, 19 nt, Artificial Sequence
  Description of Artificial Sequence: Synthetic oligonucleotide
  Sense strand starting at position 258 of SEQ ID NO: 1560021
guugguccuuauuccuaga

SEQ ID NO: 1570540 - RNA, 19 nt, Artificial Sequence
  Description of Artificial Sequence: Synthetic oligonucleotide
  Antisense strand to SEQ ID NO: 1570539
ucuaggaauaaggaccaac

SEQ ID NO: 1570541 - RNA, 19 nt, Artificial Sequence
  Description of Artificial Sequence: Synthetic oligonucleotide
  Sense strand starting at position 261 of SEQ ID NO: 1560021
gguccuuauuccuagaccu

SEQ ID NO: 1570542 - RNA, 19 nt, Artificial Sequence
  Description of Artificial Sequence: Synthetic oligonucleotide
  Antisense strand to SEQ ID NO: 1570541
aggucuaggaauaaggacc

SEQ ID NO: 1570543 - RNA, 19 nt, Artificial Sequence
  Description of Artificial Sequence: Synthetic oligonucleotide
  Sense strand starting at position 446 of SEQ ID NO: 1560021
ggaaaucaggagcgggauu

SEQ ID NO: 1570544 - RNA, 19 nt, Artificial Sequence
  Description of Artificial Sequence: Synthetic oligonucleotide
  Antisense strand to SEQ ID NO: 1570543
aaucccgcuccugauuucc

SEQ ID NO: 1570545 - RNA, 19 nt, Artificial Sequence
  Description of Artificial Sequence: Synthetic oligonucleotide
  Sense strand starting at position 1604 of SEQ ID NO: 1560021
gggaaucuguuccuaccuu

SEQ ID NO: 1570546 - RNA, 19 nt, Artificial Sequence
  Description of Artificial Sequence: Synthetic oligonucleotide
  Antisense strand to SEQ ID NO: 1570545
aagguaggaacagauuccc

SEQ ID NO: 1570547 - RNA, 19 nt, Artificial Sequence
  Description of Artificial Sequence: Synthetic oligonucleotide
  Sense strand starting at position 1605 of SEQ ID NO: 1560021
ggaaucuguuccuaccuua

SEQ ID NO: 1570548 - RNA, 19 nt, Artificial Sequence
  Description of Artificial Sequence: Synthetic oligonucleotide
  Antisense strand to SEQ ID NO: 1570547
uaagguaggaacagauucc

SEQ ID NO: 1570549 - RNA, 19 nt, Artificial Sequence
  Description of Artificial Sequence: Synthetic oligonucleotide
  Sense strand starting at position 1782 of SEQ ID NO: 1560021
ugcaucagcucucugaaga

SEQ ID NO: 1570550 - RNA, 19 nt, Artificial Sequence
  Description of Artificial Sequence: Synthetic oligonucleotide
  Antisense strand to SEQ ID NO: 1570549
ucuucagagagcugaugca

SEQ ID NO: 1570551 - RNA, 19 nt, Artificial Sequence
  Description of Artificial Sequence: Synthetic oligonucleotide
  Sense strand starting at position 1783 of SEQ ID NO: 1560021
gcaucagcucucugaagac

SEQ ID NO: 1570552 - RNA, 19 nt, Artificial Sequence
  Description of Artificial Sequence: Synthetic oligonucleotide
  Antisense strand to SEQ ID NO: 1570551
gucuucagagagcugaugc

SEQ ID NO: 1570553 - RNA, 19 nt, Artificial Sequence
  Description of Artificial Sequence: Synthetic oligonucleotide
  Sense strand starting at position 2013 of SEQ ID NO: 1560021
aguggugaauauuaaugga

SEQ ID NO: 1570554 - RNA, 19 nt, Artificial Sequence
  Description of Artificial Sequence: Synthetic oligonucleotide
  Antisense strand to SEQ ID NO: 1570553
uccauuaauauucaccacu

SEQ ID NO: 1570555 - RNA, 19 nt, Artificial Sequence
  Description of Artificial Sequence: Synthetic oligonucleotide
  Sense strand starting at position 2016 of SEQ ID NO: 1560021
ggugaauauuaauggaaua

SEQ ID NO: 1570556 - RNA, 19 nt, Artificial Sequence
  Description of Artificial Sequence: Synthetic oligonucleotide
  Antisense strand to SEQ ID NO: 1570555
uauuccauuaauauucacc

SEQ ID NO: 1570557 - RNA, 19 nt, Artificial Sequence
  Description of Artificial Sequence: Synthetic oligonucleotide
  Sense strand starting at position 2027 of SEQ ID NO: 1560021
auggaauaauaguuggagu

SEQ ID NO: 1570558 - RNA, 19 nt, Artificial Sequence
  Description of Artificial Sequence: Synthetic oligonucleotide
  Antisense strand to SEQ ID NO: 1570557
acuccaacuauuauuccau

SEQ ID NO: 1570559 - RNA, 19 nt, Artificial Sequence
  Description of Artificial Sequence: Synthetic oligonucleotide
  Sense strand starting at position 2034 of SEQ ID NO: 1560021
aauaguuggagugggaaau

SEQ ID NO: 1570560 - RNA, 19 nt, Artificial Sequence
  Description of Artificial Sequence: Synthetic oligonucleotide
  Antisense strand to SEQ ID NO: 1570559
auuucccacuccaacuauu

SEQ ID NO: 1570561 - RNA, 19 nt, Artificial Sequence
  Description of Artificial Sequence: Synthetic oligonucleotide
  Sense strand starting at position 2315 of SEQ ID NO: 1560021
augauuaacucucauggga

SEQ ID NO: 1570562 - RNA, 19 nt, Artificial Sequence
  Description of Artificial Sequence: Synthetic oligonucleotide
  Antisense strand to SEQ ID NO: 1570561
ucccaugagaguuaaucau

SEQ ID NO: 1570563 - RNA, 19 nt, Artificial Sequence
  Description of Artificial Sequence: Synthetic oligonucleotide
  Sense strand starting at position 2471 of SEQ ID NO: 1560021
uggucucucugccucauua

SEQ ID NO: 1570564 - RNA, 19 nt, Artificial Sequence
  Description of Artificial Sequence: Synthetic oligonucleotide
  Antisense strand to SEQ ID NO: 1570563
uaaugaggcagagagacca

SEQ ID NO: 1570565 - RNA, 19 nt, Artificial Sequence
  Description of Artificial Sequence: Synthetic oligonucleotide
  Sense strand starting at position 2610 of SEQ ID NO: 1560021
guaaauuuggccugagcua

SEQ ID NO: 1570566 - RNA, 19 nt, Artificial Sequence
  Description of Artificial Sequence: Synthetic oligonucleotide
  Antisense strand to SEQ ID NO: 1570565
uagcucaggccaaauuuac

SEQ ID NO: 1570567 - RNA, 19 nt, Artificial Sequence
  Description of Artificial Sequence: Synthetic oligonucleotide
  Sense strand starting at position 2641 of SEQ ID NO: 1560021
cccucauugguguaacauc

SEQ ID NO: 1570568 - RNA, 19 nt, Artificial Sequence
  Description of Artificial Sequence: Synthetic oligonucleotide
  Antisense strand to SEQ ID NO: 1570567
gauguuacaccaaugaggg

SEQ ID NO: 1570569 - RNA, 19 nt, Artificial Sequence
  Description of Artificial Sequence: Synthetic oligonucleotide
  Sense strand starting at position 2687 of SEQ ID NO: 1560021
ccaaguuucugacucugua

SEQ ID NO: 1570570 - RNA, 19 nt, Artificial Sequence
  Description of Artificial Sequence: Synthetic oligonucleotide
  Antisense strand to SEQ ID NO: 1570569
uacagagucagaaacuugg

SEQ ID NO: 1570571 - RNA, 19 nt, Artificial Sequence
  Description of Artificial Sequence: Synthetic oligonucleotide
  Sense strand starting at position 2690 of SEQ ID NO: 1560021
aguuucugacucuguauau

SEQ ID NO: 1570572 - RNA, 19 nt, Artificial Sequence
  Description of Artificial Sequence: Synthetic oligonucleotide
  Antisense strand to SEQ ID NO: 1570571
auauacagagucagaaacu

SEQ ID NO: 1570573 - RNA, 19 nt, Artificial Sequence
  Description of Artificial Sequence: Synthetic oligonucleotide
  Sense strand starting at position 2691 of SEQ ID NO: 1560021
guuucugacucuguauauu

SEQ ID NO: 1570574 - RNA, 19 nt, Artificial Sequence
  Description of Artificial Sequence: Synthetic oligonucleotide
  Antisense strand to SEQ ID NO: 1570573
aauauacagagucagaaac

SEQ ID NO: 1570575 - RNA, 19 nt, Artificial Sequence
  Description of Artificial Sequence: Synthetic oligonucleotide
  Sense strand starting at position 2697 of SEQ ID NO: 1560021
gacucuguauauuugcgaa

SEQ ID NO: 1570576 - RNA, 19 nt, Artificial Sequence
  Description of Artificial Sequence: Synthetic oligonucleotide
  Antisense strand to SEQ ID NO: 1570575
uucgcaaauauacagaguc

SEQ ID NO: 1570577 - RNA, 19 nt, Artificial Sequence
  Description of Artificial Sequence: Synthetic oligonucleotide
  Sense strand starting at position 2701 of SEQ ID NO: 1560021
cuguauauuugcgaagccu

SEQ ID NO: 1570578 - RNA, 19 nt, Artificial Sequence
  Description of Artificial Sequence: Synthetic oligonucleotide
  Antisense strand to SEQ ID NO: 1570577
aggcuucgcaaauauacag

SEQ ID NO: 1570579 - RNA, 19 nt, Artificial Sequence
  Description of Artificial Sequence: Synthetic oligonucleotide
  Sense strand starting at position 2709 of SEQ ID NO: 1560021
uugcgaagccuugucauuc

SEQ ID NO: 1570580 - RNA, 19 nt, Artificial Sequence
  Description of Artificial Sequence: Synthetic oligonucleotide
  Antisense strand to SEQ ID NO: 1570579
gaaugacaaggcuucgcaa

SEQ ID NO: 1570581 - RNA, 19 nt, Artificial Sequence
  Description of Artificial Sequence: Synthetic oligonucleotide
  Sense strand starting at position 2710 of SEQ ID NO: 1560021
ugcgaagccuugucauucu

SEQ ID NO: 1570582 - RNA, 19 nt, Artificial Sequence
  Description of Artificial Sequence: Synthetic oligonucleotide
  Antisense strand to SEQ ID NO: 1570581
agaaugacaaggcuucgca

SEQ ID NO: 1570583 - RNA, 19 nt, Artificial Sequence
  Description of Artificial Sequence: Synthetic oligonucleotide
  Sense strand starting at position 2717 of SEQ ID NO: 1560021
ccuugucauucuuauagug

SEQ ID NO: 1570584 - RNA, 19 nt, Artificial Sequence
  Description of Artificial Sequence: Synthetic oligonucleotide
  Antisense strand to SEQ ID NO: 1570583
cacuauaagaaugacaagg

SEQ ID NO: 1570585 - RNA, 19 nt, Artificial Sequence
  Description of Artificial Sequence: Synthetic oligonucleotide
  Sense strand starting at position 2719 of SEQ ID NO: 1560021
uugucauucuuauagugua

SEQ ID NO: 1570586 - RNA, 19 nt, Artificial Sequence
  Description of Artificial Sequence: Synthetic oligonucleotide
  Antisense strand to SEQ ID NO: 1570585
uacacuauaagaaugacaa

SEQ ID NO: 1570587 - RNA, 19 nt, Artificial Sequence
  Description of Artificial Sequence: Synthetic oligonucleotide
  Sense strand starting at position 2799 of SEQ ID NO: 1560021
cuagguauuuaugggucua

SEQ ID NO: 1570588 - RNA, 19 nt, Artificial Sequence
  Description of Artificial Sequence: Synthetic oligonucleotide
  Antisense strand to SEQ ID NO: 1570587
uagacccauaaauaccuag

SEQ ID NO: 1570589 - RNA, 19 nt, Artificial Sequence
  Description of Artificial Sequence: Synthetic oligonucleotide
  Sense strand starting at position 2830 of SEQ ID NO: 1560021
ggcgcuguggugagucuua

SEQ ID NO: 1570590 - RNA, 19 nt, Artificial Sequence
  Description of Artificial Sequence: Synthetic oligonucleotide
  Antisense strand to SEQ ID NO: 1570589
uaagacucaccacagcgcc

SEQ ID NO: 1570591 - RNA, 19 nt, Artificial Sequence
  Description of Artificial Sequence: Synthetic oligonucleotide
  Sense strand starting at position 2835 of SEQ ID NO: 1560021
uguggugagucuuaagaag

SEQ ID NO: 1570592 - RNA, 19 nt, Artificial Sequence
  Description of Artificial Sequence: Synthetic oligonucleotide
  Antisense strand to SEQ ID NO: 1570591
cuucuuaagacucaccaca

SEQ ID NO: 1570593 - RNA, 19 nt, Artificial Sequence
  Description of Artificial Sequence: Synthetic oligonucleotide
  Sense strand starting at position 2858 of SEQ ID NO: 1560021
ggguguaucuguuauuucu

SEQ ID NO: 1570594 - RNA, 19 nt, Artificial Sequence
  Description of Artificial Sequence: Synthetic oligonucleotide
  Antisense strand to SEQ ID NO: 1570593
agaaauaacagauacaccc

SEQ ID NO: 1570595 - RNA, 19 nt, Artificial Sequence
  Description of Artificial Sequence: Synthetic oligonucleotide
  Sense strand starting at position 2861 of SEQ ID NO: 1560021
uguaucuguuauuucugua

SEQ ID NO: 1570596 - RNA, 19 nt, Artificial Sequence
  Description of Artificial Sequence: Synthetic oligonucleotide
  Antisense strand to SEQ ID NO: 1570595
uacagaaauaacagauaca

SEQ ID NO: 1570597 - RNA, 19 nt, Artificial Sequence
  Description of Artificial Sequence: Synthetic oligonucleotide
  Sense strand starting at position 2967 of SEQ ID NO: 1560021
gaucacuuuccaggaguuc

SEQ ID NO: 1570598 - RNA, 19 nt, Artificial Sequence
  Description of Artificial Sequence: Synthetic oligonucleotide
  Antisense strand to SEQ ID NO: 1570597
gaacuccuggaaagugauc

SEQ ID NO: 1570599 - RNA, 19 nt, Artificial Sequence
  Description of Artificial Sequence: Synthetic oligonucleotide
  Sense strand starting at position 3010 of SEQ ID NO: 1560021
agaucuuaccgcuaaucaa

SEQ ID NO: 1570600 - RNA, 19 nt, Artificial Sequence
  Description of Artificial Sequence: Synthetic oligonucleotide
  Antisense strand to SEQ ID NO: 1570599
uugauuagcgguaagaucu

SEQ ID NO: 1570601 - RNA, 19 nt, Artificial Sequence
  Description of Artificial Sequence: Synthetic oligonucleotide
  Sense strand starting at position 3303 of SEQ ID NO: 1560021
uagaguacuuaggcaggau

SEQ ID NO: 1570602 - RNA, 19 nt, Artificial Sequence
  Description of Artificial Sequence: Synthetic oligonucleotide
  Antisense strand to SEQ ID NO: 1570601
auccugccuaaguacucua

SEQ ID NO: 1570603 - RNA, 19 nt, Artificial Sequence
  Description of Artificial Sequence: Synthetic oligonucleotide
  Sense strand starting at position 3741 of SEQ ID NO: 1560021
gcugguagguuccucagau

SEQ ID NO: 1570604 - RNA, 19 nt, Artificial Sequence
  Description of Artificial Sequence: Synthetic oligonucleotide
  Antisense strand to SEQ ID NO: 1570603
aucugaggaaccuaccagc

SEQ ID NO: 1570605 - RNA, 19 nt, Artificial Sequence
  Description of Artificial Sequence: Synthetic oligonucleotide
  Sense strand starting at position 3742 of SEQ ID NO: 1560021
cugguagguuccucagaug

SEQ ID NO: 1570606 - RNA, 19 nt, Artificial Sequence
  Description of Artificial Sequence: Synthetic oligonucleotide
  Antisense strand to SEQ ID NO: 1570605
caucugaggaaccuaccag

SEQ ID NO: 1570607 - RNA, 19 nt, Artificial Sequence
  Description of Artificial Sequence: Synthetic oligonucleotide
  Sense strand starting at position 3751 of SEQ ID NO: 1560021
uccucagaugcugauaagu

SEQ ID NO: 1570608 - RNA, 19 nt, Artificial Sequence
  Description of Artificial Sequence: Synthetic oligonucleotide
  Antisense strand to SEQ ID NO: 1570607
acuuaucagcaucugagga

SEQ ID NO: 1570609 - RNA, 19 nt, Artificial Sequence
  Description of Artificial Sequence: Synthetic oligonucleotide
  Sense strand starting at position 3753 of SEQ ID NO: 1560021
cucagaugcugauaaguca

SEQ ID NO: 1570610 - RNA, 19 nt, Artificial Sequence
  Description of Artificial Sequence: Synthetic oligonucleotide
  Antisense strand to SEQ ID NO: 1570609
ugacuuaucagcaucugag

SEQ ID NO: 1570611 - RNA, 19 nt, Artificial Sequence
  Description of Artificial Sequence: Synthetic oligonucleotide
  Sense strand starting at position 3760 of SEQ ID NO: 1560021
gcugauaagucacucgcuu

SEQ ID NO: 1570612 - RNA, 19 nt, Artificial Sequence
  Description of Artificial Sequence: Synthetic oligonucleotide
  Antisense strand to SEQ ID NO: 1570611
aagcgagugacuuaucagc

SEQ ID NO: 1570613 - RNA, 19 nt, Artificial Sequence
  Description of Artificial Sequence: Synthetic oligonucleotide
  Sense strand starting at position 3792 of SEQ ID NO: 1560021
gguucaagaucgccuguuu

SEQ ID NO: 1570614 - RNA, 19 nt, Artificial Sequence
  Description of Artificial Sequence: Synthetic oligonucleotide
  Antisense strand to SEQ ID NO: 1570613
aaacaggcgaucuugaacc

SEQ ID NO: 1570615 - RNA, 19 nt, Artificial Sequence
  Description of Artificial Sequence: Synthetic oligonucleotide
  Sense strand starting at position 3805 of SEQ ID NO: 1560021
cuguuuacucuggguccaa

SEQ ID NO: 1570616 - RNA, 19 nt, Artificial Sequence
  Description of Artificial Sequence: Synthetic oligonucleotide
  Antisense strand to SEQ ID NO: 1570615
uuggacccagaguaaacag

SEQ ID NO: 1570617 - RNA, 19 nt, Artificial Sequence
  Description of Artificial Sequence: Synthetic oligonucleotide
  Sense strand starting at position 3806 of SEQ ID NO: 1560021
uguuuacucuggguccaau

SEQ ID NO: 1570618 - RNA, 19 nt, Artificial Sequence
  Description of Artificial Sequence: Synthetic oligonucleotide
  Antisense strand to SEQ ID NO: 1570617
auuggacccagaguaaaca

SEQ ID NO: 1570619 - RNA, 19 nt, Artificial Sequence
  Description of Artificial Sequence: Synthetic oligonucleotide
  Sense strand starting at position 406 of SEQ ID NO: 1560022
ugcuguugauacucguuua

SEQ ID NO: 1570620 - RNA, 19 nt, Artificial Sequence
  Description of Artificial Sequence: Synthetic oligonucleotide
  Antisense strand to SEQ ID NO: 1570619
uaaacgaguaucaacagca

SEQ ID NO: 1570621 - RNA, 19 nt, Artificial Sequence
  Description of Artificial Sequence: Synthetic oligonucleotide
  Sense strand starting at position 407 of SEQ ID NO: 1560022
gcuguugauacucguuuag

SEQ ID NO: 1570622 - RNA, 19 nt, Artificial Sequence
  Description of Artificial Sequence: Synthetic oligonucleotide
  Antisense strand to SEQ ID NO: 1570621
cuaaacgaguaucaacagc

SEQ ID NO: 1570623 - RNA, 19 nt, Artificial Sequence
  Description of Artificial Sequence: Synthetic oligonucleotide
  Sense strand starting at position 409 of SEQ ID NO: 1560022
uguugauacucguuuagua

SEQ ID NO: 1570624 - RNA, 19 nt, Artificial Sequence
  Description of Artificial Sequence: Synthetic oligonucleotide
  Antisense strand to SEQ ID NO: 1570623
uacuaaacgaguaucaaca

SEQ ID NO: 1570625 - RNA, 19 nt, Artificial Sequence
  Description of Artificial Sequence: Synthetic oligonucleotide
  Sense strand starting at position 411 of SEQ ID NO: 1560022
uugauacucguuuaguacu

SEQ ID NO: 1570626 - RNA, 19 nt, Artificial Sequence
  Description of Artificial Sequence: Synthetic oligonucleotide
  Antisense strand to SEQ ID NO: 1570625
aguacuaaacgaguaucaa

SEQ ID NO: 1570627 - RNA, 19 nt, Artificial Sequence
  Description of Artificial Sequence: Synthetic oligonucleotide
  Sense strand starting at position 446 of SEQ ID NO: 1560022
gguaaauauuucuaugacu

SEQ ID NO: 1570628 - RNA, 19 nt, Artificial Sequence
  Description of Artificial Sequence: Synthetic oligonucleotide
  Antisense strand to SEQ ID NO: 1570627
agucauagaaauauuuacc

SEQ ID NO: 1570629 - RNA, 19 nt, Artificial Sequence
  Description of Artificial Sequence: Synthetic oligonucleotide
  Sense strand starting at position 457 of SEQ ID NO: 1560022
cuaugacucucauuguaca

SEQ ID NO: 1570630 - RNA, 19 nt, Artificial Sequence
  Description of Artificial Sequence: Synthetic oligonucleotide
  Antisense strand to SEQ ID NO: 1570629
uguacaaugagagucauag

SEQ ID NO: 1570631 - RNA, 19 nt, Artificial Sequence
  Description of Artificial Sequence: Synthetic oligonucleotide
  Sense strand starting at position 562 of SEQ ID NO: 1560022
caggcagucugugcucuua

SEQ ID NO: 1570632 - RNA, 19 nt, Artificial Sequence
  Description of Artificial Sequence: Synthetic oligonucleotide
  Antisense strand to SEQ ID NO: 1570631
uaagagcacagacugccug

SEQ ID NO: 1570633 - RNA, 19 nt, Artificial Sequence
  Description of Artificial Sequence: Synthetic oligonucleotide
  Sense strand starting at position 564 of SEQ ID NO: 1560022
ggcagucugugcucuuaac

SEQ ID NO: 1570634 - RNA, 19 nt, Artificial Sequence
  Description of Artificial Sequence: Synthetic oligonucleotide
  Antisense strand to SEQ ID NO: 1570633
guuaagagcacagacugcc

SEQ ID NO: 1570635 - RNA, 19 nt, Artificial Sequence
  Description of Artificial Sequence: Synthetic oligonucleotide
  Sense strand starting at position 927 of SEQ ID NO: 1560022
gccagauuugguggugcgu

SEQ ID NO: 1570636 - RNA, 19 nt, Artificial Sequence
  Description of Artificial Sequence: Synthetic oligonucleotide
  Antisense strand to SEQ ID NO: 1570635
acgcaccaccaaaucuggc

SEQ ID NO: 1570637 - RNA, 19 nt, Artificial Sequence
  Description of Artificial Sequence: Synthetic oligonucleotide
  Sense strand starting at position 986 of SEQ ID NO: 1560022
ucacuagagcccgagaguu

SEQ ID NO: 1570638 - RNA, 19 nt, Artificial Sequence
  Description of Artificial Sequence: Synthetic oligonucleotide
  Antisense strand to SEQ ID NO: 1570637
aacucucgggcucuaguga

SEQ ID NO: 1570639 - RNA, 19 nt, Artificial Sequence
  Description of Artificial Sequence: Synthetic oligonucleotide
  Sense strand starting at position 1166 of SEQ ID NO: 1560022
gguuaagagucugcguuaa

SEQ ID NO: 1570640 - RNA, 19 nt, Artificial Sequence
  Description of Artificial Sequence: Synthetic oligonucleotide
  Antisense strand to SEQ ID NO: 1570639
uuaacgcagacucuuaacc

SEQ ID NO: 1570641 - RNA, 19 nt, Artificial Sequence
  Description of Artificial Sequence: Synthetic oligonucleotide
  Sense strand starting at position 1168 of SEQ ID NO: 1560022
uuaagagucugcguuaagg

SEQ ID NO: 1570642 - RNA, 19 nt, Artificial Sequence
  Description of Artificial Sequence: Synthetic oligonucleotide
  Antisense strand to SEQ ID NO: 1570641
ccuuaacgcagacucuuaa

SEQ ID NO: 1570643 - RNA, 19 nt, Artificial Sequence
  Description of Artificial Sequence: Synthetic oligonucleotide
  Sense strand starting at position 1200 of SEQ ID NO: 1560022
gcauguagccucuaggcua

SEQ ID NO: 1570644 - RNA, 19 nt, Artificial Sequence
  Description of Artificial Sequence: Synthetic oligonucleotide
  Antisense strand to SEQ ID NO: 1570643
uagccuagaggcuacaugc

SEQ ID NO: 1570645 - RNA, 19 nt, Artificial Sequence
  Description of Artificial Sequence: Synthetic oligonucleotide
  Sense strand starting at position 1221 of SEQ ID NO: 1560022
ggucuugguguggaaauga

SEQ ID NO: 1570646 - RNA, 19 nt, Artificial Sequence
  Description of Artificial Sequence: Synthetic oligonucleotide
  Antisense strand to SEQ ID NO: 1570645
ucauuuccacaccaagacc

SEQ ID NO: 1570647 - RNA, 19 nt, Artificial Sequence
  Description of Artificial Sequence: Synthetic oligonucleotide
  Sense strand starting at position 1251 of SEQ ID NO: 1560022
gggaauaccugugugaaug

SEQ ID NO: 1570648 - RNA, 19 nt, Artificial Sequence
  Description of Artificial Sequence: Synthetic oligonucleotide
  Antisense strand to SEQ ID NO: 1570647
cauucacacagguauuccc

SEQ ID NO: 1570649 - RNA, 19 nt, Artificial Sequence
  Description of Artificial Sequence: Synthetic oligonucleotide
  Sense strand starting at position 1283 of SEQ ID NO: 1560022
agaggcuacuuuccgagaa

SEQ ID NO: 1570650 - RNA, 19 nt, Artificial Sequence
  Description of Artificial Sequence: Synthetic oligonucleotide
  Antisense strand to SEQ ID NO: 1570649
uucucggaaaguagccucu

SEQ ID NO: 1570651 - RNA, 19 nt, Artificial Sequence
  Description of Artificial Sequence: Synthetic oligonucleotide
  Sense strand starting at position 1313 of SEQ ID NO: 1560022
cuaugaucugcccgaucac

SEQ ID NO: 1570652 - RNA, 19 nt, Artificial Sequence
  Description of Artificial Sequence: Synthetic oligonucleotide
  Antisense strand to SEQ ID NO: 1570651
gugaucgggcagaucauag

SEQ ID NO: 1570653 - RNA, 19 nt, Artificial Sequence
  Description of Artificial Sequence: Synthetic oligonucleotide
  Sense strand starting at position 1370 of SEQ ID NO: 1560022
aucacaacccugugaggua

SEQ ID NO: 1570654 - RNA, 19 nt, Artificial Sequence
  Description of Artificial Sequence: Synthetic oligonucleotide
  Antisense strand to SEQ ID NO: 1570653
uaccucacaggguugugau

SEQ ID NO: 1570655 - RNA, 19 nt, Artificial Sequence
  Description of Artificial Sequence: Synthetic oligonucleotide
  Sense strand starting at position 1386 of SEQ ID NO: 1560022
guaaguguauuaucuccau

SEQ ID NO: 1570656 - RNA, 19 nt, Artificial Sequence
  Description of Artificial Sequence: Synthetic oligonucleotide
  Antisense strand to SEQ ID NO: 1570655
auggagauaauacacuuac

SEQ ID NO: 1570657 - RNA, 19 nt, Artificial Sequence
  Description of Artificial Sequence: Synthetic oligonucleotide
  Sense strand starting at position 1481 of SEQ ID NO: 1560022
ggcugaggucuugaccaca

SEQ ID NO: 1570658 - RNA, 19 nt, Artificial Sequence
  Description of Artificial Sequence: Synthetic oligonucleotide
  Antisense strand to SEQ ID NO: 1570657
uguggucaagaccucagcc

SEQ ID NO: 1570659 - RNA, 19 nt, Artificial Sequence
  Description of Artificial Sequence: Synthetic oligonucleotide
  Sense strand starting at position 1562 of SEQ ID NO: 1560022
gcauuuaacucugggaagu

SEQ ID NO: 1570660 - RNA, 19 nt, Artificial Sequence
  Description of Artificial Sequence: Synthetic oligonucleotide
  Antisense strand to SEQ ID NO: 1570659
acuucccagaguuaaaugc

SEQ ID NO: 1570661 - RNA, 19 nt, Artificial Sequence
  Description of Artificial Sequence: Synthetic oligonucleotide
  Sense strand starting at position 1729 of SEQ ID NO: 1560022
ugaguucagguccgacuua

SEQ ID NO: 1570662 - RNA, 19 nt, Artificial Sequence
  Description of Artificial Sequence: Synthetic oligonucleotide
  Antisense strand to SEQ ID NO: 1570661
uaagucggaccugaacuca

SEQ ID NO: 1570663 - RNA, 19 nt, Artificial Sequence
  Description of Artificial Sequence: Synthetic oligonucleotide
  Sense strand starting at position 1791 of SEQ ID NO: 1560022
gcacuuaacgguuaggaga

SEQ ID NO: 1570664 - RNA, 19 nt, Artificial Sequence
  Description of Artificial Sequence: Synthetic oligonucleotide
  Antisense strand to SEQ ID NO: 1570663
ucuccuaaccguuaagugc

SEQ ID NO: 1570665 - RNA, 19 nt, Artificial Sequence
  Description of Artificial Sequence: Synthetic oligonucleotide
  Sense strand starting at position 1917 of SEQ ID NO: 1560022
agauauguaagccgcgaua

SEQ ID NO: 1570666 - RNA, 19 nt, Artificial Sequence
  Description of Artificial Sequence: Synthetic oligonucleotide
  Antisense strand to SEQ ID NO: 1570665
uaucgcggcuuacauaucu

SEQ ID NO: 1570667 - RNA, 19 nt, Artificial Sequence
  Description of Artificial Sequence: Synthetic oligonucleotide
  Sense strand starting at position 1919 of SEQ ID NO: 1560022
auauguaagccgcgauacu

SEQ ID NO: 1570668 - RNA, 19 nt, Artificial Sequence
  Description of Artificial Sequence: Synthetic oligonucleotide
  Antisense strand to SEQ ID NO: 1570667
aguaucgcggcuuacauau

SEQ ID NO: 1570669 - RNA, 19 nt, Artificial Sequence
  Description of Artificial Sequence: Synthetic oligonucleotide
  Sense strand starting at position 1920 of SEQ ID NO: 1560022
uauguaagccgcgauacuu

SEQ ID NO: 1570670 - RNA, 19 nt, Artificial Sequence
  Description of Artificial Sequence: Synthetic oligonucleotide
  Antisense strand to SEQ ID NO: 1570669
aaguaucgcggcuuacaua

SEQ ID NO: 1570671 - RNA, 19 nt, Artificial Sequence
  Description of Artificial Sequence: Synthetic oligonucleotide
  Sense strand starting at position 2167 of SEQ ID NO: 1560022
guugaguguggcugaggaa

SEQ ID NO: 1570672 - RNA, 19 nt, Artificial Sequence
  Description of Artificial Sequence: Synthetic oligonucleotide
  Antisense strand to SEQ ID NO: 1570671
uuccucagccacacucaac

SEQ ID NO: 1570673 - RNA, 19 nt, Artificial Sequence
  Description of Artificial Sequence: Synthetic oligonucleotide
  Sense strand starting at position 2180 of SEQ ID NO: 1560022
gaggaaguuugagugcagu

SEQ ID NO: 1570674 - RNA, 19 nt, Artificial Sequence
  Description of Artificial Sequence: Synthetic oligonucleotide
  Antisense strand to SEQ ID NO: 1570673
acugcacucaaacuuccuc

SEQ ID NO: 1570675 - RNA, 19 nt, Artificial Sequence
  Description of Artificial Sequence: Synthetic oligonucleotide
  Sense strand starting at position 2190 of SEQ ID NO: 1560022
gagugcaguuucucccaga

SEQ ID NO: 1570676 - RNA, 19 nt, Artificial Sequence
  Description of Artificial Sequence: Synthetic oligonucleotide
  Antisense strand to SEQ ID NO: 1570675
ucugggagaaacugcacuc

SEQ ID NO: 1570677 - RNA, 19 nt, Artificial Sequence
  Description of Artificial Sequence: Synthetic oligonucleotide
  Sense strand starting at position 2191 of SEQ ID NO: 1560022
agugcaguuucucccagau

SEQ ID NO: 1570678 - RNA, 19 nt, Artificial Sequence
  Description of Artificial Sequence: Synthetic oligonucleotide
  Antisense strand to SEQ ID NO: 1570677
aucugggagaaacugcacu

SEQ ID NO: 1570679 - RNA, 19 nt, Artificial Sequence
  Description of Artificial Sequence: Synthetic oligonucleotide
  Sense strand starting at position 2448 of SEQ ID NO: 1560022
uagguuucucaaggacaag

SEQ ID NO: 1570680 - RNA, 19 nt, Artificial Sequence
  Description of Artificial Sequence: Synthetic oligonucleotide
  Antisense strand to SEQ ID NO: 1570679
cuuguccuugagaaaccua

SEQ ID NO: 1570681 - RNA, 19 nt, Artificial Sequence
  Description of Artificial Sequence: Synthetic oligonucleotide
  Sense strand starting at position 2478 of SEQ ID NO: 1560022
guuggauaaguccaacuuc

SEQ ID NO: 1570682 - RNA, 19 nt, Artificial Sequence
  Description of Artificial Sequence: Synthetic oligonucleotide
  Antisense strand to SEQ ID NO: 1570681
gaaguuggacuuauccaac

SEQ ID NO: 1570683 - RNA, 19 nt, Artificial Sequence
  Description of Artificial Sequence: Synthetic oligonucleotide
  Sense strand starting at position 2521 of SEQ ID NO: 1560022
acuguuacugcuugauucu

SEQ ID NO: 1570684 - RNA, 19 nt, Artificial Sequence
  Description of Artificial Sequence: Synthetic oligonucleotide
  Antisense strand to SEQ ID NO: 1570683
agaaucaagcaguaacagu

SEQ ID NO: 1570685 - RNA, 19 nt, Artificial Sequence
  Description of Artificial Sequence: Synthetic oligonucleotide
  Sense strand starting at position 2530 of SEQ ID NO: 1560022
gcuugauucugagcaagga

SEQ ID NO: 1570686 - RNA, 19 nt, Artificial Sequence
  Description of Artificial Sequence: Synthetic oligonucleotide
  Antisense strand to SEQ ID NO: 1570685
uccuugcucagaaucaagc

SEQ ID NO: 1570687 - RNA, 19 nt, Artificial Sequence
  Description of Artificial Sequence: Synthetic oligonucleotide
  Sense strand starting at position 2640 of SEQ ID NO: 1560022
uggagauguugucccugga

SEQ ID NO: 1570688 - RNA, 19 nt, Artificial Sequence
  Description of Artificial Sequence: Synthetic oligonucleotide
  Antisense strand to SEQ ID NO: 1570687
uccagggacaacaucucca

SEQ ID NO: 1570689 - RNA, 19 nt, Artificial Sequence
  Description of Artificial Sequence: Synthetic oligonucleotide
  Sense strand starting at position 2895 of SEQ ID NO: 1560022
gaguccugcuauguugcua

SEQ ID NO: 1570690 - RNA, 19 nt, Artificial Sequence
  Description of Artificial Sequence: Synthetic oligonucleotide
  Antisense strand to SEQ ID NO: 1570689
uagcaacauagcaggacuc

SEQ ID NO: 1570691 - RNA, 19 nt, Artificial Sequence
  Description of Artificial Sequence: Synthetic oligonucleotide
  Sense strand starting at position 3111 of SEQ ID NO: 1560022
aggccagaaguucgaauau

SEQ ID NO: 1570692 - RNA, 19 nt, Artificial Sequence
  Description of Artificial Sequence: Synthetic oligonucleotide
  Antisense strand to SEQ ID NO: 1570691
auauucgaacuucuggccu

SEQ ID NO: 1570693 - RNA, 19 nt, Artificial Sequence
  Description of Artificial Sequence: Synthetic oligonucleotide
  Sense strand starting at position 3166 of SEQ ID NO: 1560022
gaaguauuccauugaauug

SEQ ID NO: 1570694 - RNA, 19 nt, Artificial Sequence
  Description of Artificial Sequence: Synthetic oligonucleotide
  Antisense strand to SEQ ID NO: 1570693
caauucaauggaauacuuc

SEQ ID NO: 1570695 - RNA, 19 nt, Artificial Sequence
  Description of Artificial Sequence: Synthetic oligonucleotide
  Sense strand starting at position 3213 of SEQ ID NO: 1560022
guuguacccucguuauaau

SEQ ID NO: 1570696 - RNA, 19 nt, Artificial Sequence
  Description of Artificial Sequence: Synthetic oligonucleotide
  Antisense strand to SEQ ID NO: 1570695
auuauaacgaggguacaac

SEQ ID NO: 1570697 - RNA, 19 nt, Artificial Sequence
  Description of Artificial Sequence: Synthetic oligonucleotide
  Sense strand starting at position 3214 of SEQ ID NO: 1560022
uuguacccucguuauaauu

SEQ ID NO: 1570698 - RNA, 19 nt, Artificial Sequence
  Description of Artificial Sequence: Synthetic oligonucleotide
  Antisense strand to SEQ ID NO: 1570697
aauuauaacgaggguacaa

SEQ ID NO: 1570699 - RNA, 19 nt, Artificial Sequence
  Description of Artificial Sequence: Synthetic oligonucleotide
  Sense strand starting at position 200 of SEQ ID NO: 1560023
aagggaauguuugcagugu

SEQ ID NO: 1570700 - RNA, 19 nt, Artificial Sequence
  Description of Artificial Sequence: Synthetic oligonucleotide
  Antisense strand to SEQ ID NO: 1570699
acacugcaaacauucccuu

SEQ ID NO: 1570701 - RNA, 19 nt, Artificial Sequence
  Description of Artificial Sequence: Synthetic oligonucleotide
  Sense strand starting at position 204 of SEQ ID NO: 1560023
gaauguuugcaguguuaau

SEQ ID NO: 1570702 - RNA, 19 nt, Artificial Sequence
  Description of Artificial Sequence: Synthetic oligonucleotide
  Antisense strand to SEQ ID NO: 1570701
auuaacacugcaaacauuc

SEQ ID NO: 1570703 - RNA, 19 nt, Artificial Sequence
  Description of Artificial Sequence: Synthetic oligonucleotide
  Sense strand starting at position 236 of SEQ ID NO: 1560023
augcuagguucccuagcau

SEQ ID NO: 1570704 - RNA, 19 nt, Artificial Sequence
  Description of Artificial Sequence: Synthetic oligonucleotide
  Antisense strand to SEQ ID NO: 1570703
augcuagggaaccuagcau

SEQ ID NO: 1570705 - RNA, 19 nt, Artificial Sequence
  Description of Artificial Sequence: Synthetic oligonucleotide
  Sense strand starting at position 948 of SEQ ID NO: 1560023
aagauugguuacuaagaag

SEQ ID NO: 1570706 - RNA, 19 nt, Artificial Sequence
  Description of Artificial Sequence: Synthetic oligonucleotide
  Antisense strand to SEQ ID NO: 1570705
cuucuuaguaaccaaucuu

SEQ ID NO: 1570707 - RNA, 19 nt, Artificial Sequence
  Description of Artificial Sequence: Synthetic oligonucleotide
  Sense strand starting at position 951 of SEQ ID NO: 1560023
auugguuacuaagaaggaa

SEQ ID NO: 1570708 - RNA, 19 nt, Artificial Sequence
  Description of Artificial Sequence: Synthetic oligonucleotide
  Antisense strand to SEQ ID NO: 1570707
uuccuucuuaguaaccaau

SEQ ID NO: 1570709 - RNA, 19 nt, Artificial Sequence
  Description of Artificial Sequence: Synthetic oligonucleotide
  Sense strand starting at position 976 of SEQ ID NO: 1560023
cgaugagccgcuuacugau

SEQ ID NO: 1570710 - RNA, 19 nt, Artificial Sequence
  Description of Artificial Sequence: Synthetic oligonucleotide
  Antisense strand to SEQ ID NO: 1570709
aucaguaagcggcucaucg

SEQ ID NO: 1570711 - RNA, 19 nt, Artificial Sequence
  Description of Artificial Sequence: Synthetic oligonucleotide
  Sense strand starting at position 983 of SEQ ID NO: 1560023
ccgcuuacugaugaugagu

SEQ ID NO: 1570712 - RNA, 19 nt, Artificial Sequence
  Description of Artificial Sequence: Synthetic oligonucleotide
  Antisense strand to SEQ ID NO: 1570711
acucaucaucaguaagcgg

SEQ ID NO: 1570713 - RNA, 19 nt, Artificial Sequence
  Description of Artificial Sequence: Synthetic oligonucleotide
  Sense strand starting at position 1247 of SEQ ID NO: 1560023
cuagcagugucaucaagga

SEQ ID NO: 1570714 - RNA, 19 nt, Artificial Sequence
  Description of Artificial Sequence: Synthetic oligonucleotide
  Antisense strand to SEQ ID NO: 1570713
uccuugaugacacugcuag

SEQ ID NO: 1570715 - RNA, 19 nt, Artificial Sequence
  Description of Artificial Sequence: Synthetic oligonucleotide
  Sense strand starting at position 1267 of SEQ ID NO: 1560023
aagagacucucauuagagu

SEQ ID NO: 1570716 - RNA, 19 nt, Artificial Sequence
  Description of Artificial Sequence: Synthetic oligonucleotide
  Antisense strand to SEQ ID NO: 1570715
acucuaaugagagucucuu

SEQ ID NO: 1570717 - RNA, 19 nt, Artificial Sequence
  Description of Artificial Sequence: Synthetic oligonucleotide
  Sense strand starting at position 1274 of SEQ ID NO: 1560023
ucucauuagaguugcagag

SEQ ID NO: 1570718 - RNA, 19 nt, Artificial Sequence
  Description of Artificial Sequence: Synthetic oligonucleotide
  Antisense strand to SEQ ID NO: 1570717
cucugcaacucuaaugaga

SEQ ID NO: 1570719 - RNA, 19 nt, Artificial Sequence
  Description of Artificial Sequence: Synthetic oligonucleotide
  Sense strand starting at position 1345 of SEQ ID NO: 1560023
gcgaaauggucuccaccga

SEQ ID NO: 1570720 - RNA, 19 nt, Artificial Sequence
  Description of Artificial Sequence: Synthetic oligonucleotide
  Antisense strand to SEQ ID NO: 1570719
ucgguggagaccauuucgc

SEQ ID NO: 1570721 - RNA, 19 nt, Artificial Sequence
  Description of Artificial Sequence: Synthetic oligonucleotide
  Sense strand starting at position 1349 of SEQ ID NO: 1560023
aauggucuccaccgagaaa

SEQ ID NO: 1570722 - RNA, 19 nt, Artificial Sequence
  Description of Artificial Sequence: Synthetic oligonucleotide
  Antisense strand to SEQ ID NO: 1570721
uuucucgguggagaccauu

SEQ ID NO: 1570723 - RNA, 19 nt, Artificial Sequence
  Description of Artificial Sequence: Synthetic oligonucleotide
  Sense strand starting at position 1493 of SEQ ID NO: 1560023
cuuggugaauaagggaaua

SEQ ID NO: 1570724 - RNA, 19 nt, Artificial Sequence
  Description of Artificial Sequence: Synthetic oligonucleotide
  Antisense strand to SEQ ID NO: 1570723
uauucccuuauucaccaag

SEQ ID NO: 1570725 - RNA, 19 nt, Artificial Sequence
  Description of Artificial Sequence: Synthetic oligonucleotide
  Sense strand starting at position 1608 of SEQ ID NO: 1560023
aauggagcaguuugucuau

SEQ ID NO: 1570726 - RNA, 19 nt, Artificial Sequence
  Description of Artificial Sequence: Synthetic oligonucleotide
  Antisense strand to SEQ ID NO: 1570725
auagacaaacugcuccauu

SEQ ID NO: 1570727 - RNA, 19 nt, Artificial Sequence
  Description of Artificial Sequence: Synthetic oligonucleotide
  Sense strand starting at position 1610 of SEQ ID NO: 1560023
uggagcaguuugucuaucu

SEQ ID NO: 1570728 - RNA, 19 nt, Artificial Sequence
  Description of Artificial Sequence: Synthetic oligonucleotide
  Antisense strand to SEQ ID NO: 1570727
agauagacaaacugcucca

SEQ ID NO: 1570729 - RNA, 19 nt, Artificial Sequence
  Description of Artificial Sequence: Synthetic oligonucleotide
  Sense strand starting at position 1615 of SEQ ID NO: 1560023
caguuugucuaucugggaa

SEQ ID NO: 1570730 - RNA, 19 nt, Artificial Sequence
  Description of Artificial Sequence: Synthetic oligonucleotide
  Antisense strand to SEQ ID NO: 1570729
uucccagauagacaaacug

SEQ ID NO: 1570731 - RNA, 19 nt, Artificial Sequence
  Description of Artificial Sequence: Synthetic oligonucleotide
  Sense strand starting at position 1618 of SEQ ID NO: 1560023
uuugucuaucugggaaaua

SEQ ID NO: 1570732 - RNA, 19 nt, Artificial Sequence
  Description of Artificial Sequence: Synthetic oligonucleotide
  Antisense strand to SEQ ID NO: 1570731
uauuucccagauagacaaa

SEQ ID NO: 1570733 - RNA, 19 nt, Artificial Sequence
  Description of Artificial Sequence: Synthetic oligonucleotide
  Sense strand starting at position 1646 of SEQ ID NO: 1560023
uucccaagauggucuuuga

SEQ ID NO: 1570734 - RNA, 19 nt, Artificial Sequence
  Description of Artificial Sequence: Synthetic oligonucleotide
  Antisense strand to SEQ ID NO: 1570733
ucaaagaccaucuugggaa

SEQ ID NO: 1570735 - RNA, 19 nt, Artificial Sequence
  Description of Artificial Sequence: Synthetic oligonucleotide
  Sense strand starting at position 2097 of SEQ ID NO: 1560023
ccuggaaugugauuggcua

SEQ ID NO: 1570736 - RNA, 19 nt, Artificial Sequence
  Description of Artificial Sequence: Synthetic oligonucleotide
  Antisense strand to SEQ ID NO: 1570735
uagccaaucacauuccagg

SEQ ID NO: 1570737 - RNA, 19 nt, Artificial Sequence
  Description of Artificial Sequence: Synthetic oligonucleotide
  Sense strand starting at position 2099 of SEQ ID NO: 1560023
uggaaugugauuggcuaca

SEQ ID NO: 1570738 - RNA, 19 nt, Artificial Sequence
  Description of Artificial Sequence: Synthetic oligonucleotide
  Antisense strand to SEQ ID NO: 1570737
uguagccaaucacauucca

SEQ ID NO: 1570739 - RNA, 19 nt, Artificial Sequence
  Description of Artificial Sequence: Synthetic oligonucleotide
  Sense strand starting at position 2101 of SEQ ID NO: 1560023
gaaugugauuggcuacacu

SEQ ID NO: 1570740 - RNA, 19 nt, Artificial Sequence
  Description of Artificial Sequence: Synthetic oligonucleotide
  Antisense strand to SEQ ID NO: 1570739
aguguagccaaucacauuc

SEQ ID NO: 1570741 - RNA, 19 nt, Artificial Sequence
  Description of Artificial Sequence: Synthetic oligonucleotide
  Sense strand starting at position 2129 of SEQ ID NO: 1560023
uaugaaaugugauuggauu

SEQ ID NO: 1570742 - RNA, 19 nt, Artificial Sequence
  Description of Artificial Sequence: Synthetic oligonucleotide
  Antisense strand to SEQ ID NO: 1570741
aauccaaucacauuucaua

SEQ ID NO: 1570743 - RNA, 19 nt, Artificial Sequence
  Description of Artificial Sequence: Synthetic oligonucleotide
  Sense strand starting at position 2175 of SEQ ID NO: 1560023
gccgaaucagacuacaaua

SEQ ID NO: 1570744 - RNA, 19 nt, Artificial Sequence
  Description of Artificial Sequence: Synthetic oligonucleotide
  Antisense strand to SEQ ID NO: 1570743
uauuguagucugauucggc

SEQ ID NO: 1570745 - RNA, 19 nt, Artificial Sequence
  Description of Artificial Sequence: Synthetic oligonucleotide
  Sense strand starting at position 2198 of SEQ ID NO: 1560023
gugcuucuaccgugauagg

SEQ ID NO: 1570746 - RNA, 19 nt, Artificial Sequence
  Description of Artificial Sequence: Synthetic oligonucleotide
  Antisense strand to SEQ ID NO: 1570745
ccuaucacgguagaagcac

SEQ ID NO: 1570747 - RNA, 19 nt, Artificial Sequence
  Description of Artificial Sequence: Synthetic oligonucleotide
  Sense strand starting at position 2207 of SEQ ID NO: 1560023
ccgugauaggcugaaacgu

SEQ ID NO: 1570748 - RNA, 19 nt, Artificial Sequence
  Description of Artificial Sequence: Synthetic oligonucleotide
  Antisense strand to SEQ ID NO: 1570747
acguuucagccuaucacgg

SEQ ID NO: 1570749 - RNA, 19 nt, Artificial Sequence
  Description of Artificial Sequence: Synthetic oligonucleotide
  Sense strand starting at position 2213 of SEQ ID NO: 1560023
uaggcugaaacguggaaua

SEQ ID NO: 1570750 - RNA, 19 nt, Artificial Sequence
  Description of Artificial Sequence: Synthetic oligonucleotide
  Antisense strand to SEQ ID NO: 1570749
uauuccacguuucagccua

SEQ ID NO: 1570751 - RNA, 19 nt, Artificial Sequence
  Description of Artificial Sequence: Synthetic oligonucleotide
  Sense strand starting at position 2215 of SEQ ID NO: 1560023
ggcugaaacguggaauaga

SEQ ID NO: 1570752 - RNA, 19 nt, Artificial Sequence
  Description of Artificial Sequence: Synthetic oligonucleotide
  Antisense strand to SEQ ID NO: 1570751
ucuauuccacguuucagcc

SEQ ID NO: 1570753 - RNA, 19 nt, Artificial Sequence
  Description of Artificial Sequence: Synthetic oligonucleotide
  Sense strand starting at position 2234 of SEQ ID NO: 1560023
gguggagcuugcaauguga

SEQ ID NO: 1570754 - RNA, 19 nt, Artificial Sequence
  Description of Artificial Sequence: Synthetic oligonucleotide
  Antisense strand to SEQ ID NO: 1570753
ucacauugcaagcuccacc

SEQ ID NO: 1570755 - RNA, 19 nt, Artificial Sequence
  Description of Artificial Sequence: Synthetic oligonucleotide
  Sense strand starting at position 2236 of SEQ ID NO: 1560023
uggagcuugcaaugugaua

SEQ ID NO: 1570756 - RNA, 19 nt, Artificial Sequence
  Description of Artificial Sequence: Synthetic oligonucleotide
  Antisense strand to SEQ ID NO: 1570755
uaucacauugcaagcucca

SEQ ID NO: 1570757 - RNA, 19 nt, Artificial Sequence
  Description of Artificial Sequence: Synthetic oligonucleotide
  Sense strand starting at position 2292 of SEQ ID NO: 1560023
ggaggagcugauuggugau

SEQ ID NO: 1570758 - RNA, 19 nt, Artificial Sequence
  Description of Artificial Sequence: Synthetic oligonucleotide
  Antisense strand to SEQ ID NO: 1570757
aucaccaaucagcuccucc

SEQ ID NO: 1570759 - RNA, 19 nt, Artificial Sequence
  Description of Artificial Sequence: Synthetic oligonucleotide
  Sense strand starting at position 2342 of SEQ ID NO: 1560023
cagguauucccaugugggu

SEQ ID NO: 1570760 - RNA, 19 nt, Artificial Sequence
  Description of Artificial Sequence: Synthetic oligonucleotide
  Antisense strand to SEQ ID NO: 1570759
acccacaugggaauaccug

SEQ ID NO: 1570761 - RNA, 19 nt, Artificial Sequence
  Description of Artificial Sequence: Synthetic oligonucleotide
  Sense strand starting at position 2451 of SEQ ID NO: 1560023
gucuuauugggucacugua

SEQ ID NO: 1570762 - RNA, 19 nt, Artificial Sequence
  Description of Artificial Sequence: Synthetic oligonucleotide
  Antisense strand to SEQ ID NO: 1570761
uacagugacccaauaagac

SEQ ID NO: 1570763 - RNA, 19 nt, Artificial Sequence
  Description of Artificial Sequence: Synthetic oligonucleotide
  Sense strand starting at position 2584 of SEQ ID NO: 1560023
acgcgaucauggcuaguca

SEQ ID NO: 1570764 - RNA, 19 nt, Artificial Sequence
  Description of Artificial Sequence: Synthetic oligonucleotide
  Antisense strand to SEQ ID NO: 1570763
ugacuagccaugaucgcgu

SEQ ID NO: 1570765 - RNA, 19 nt, Artificial Sequence
  Description of Artificial Sequence: Synthetic oligonucleotide
  Sense strand starting at position 2735 of SEQ ID NO: 1560023
guugucuucuuagugcaca

SEQ ID NO: 1570766 - RNA, 19 nt, Artificial Sequence
  Description of Artificial Sequence: Synthetic oligonucleotide
  Antisense strand to SEQ ID NO: 1570765
ugugcacuaagaagacaac

SEQ ID NO: 1570767 - RNA, 19 nt, Artificial Sequence
  Description of Artificial Sequence: Synthetic oligonucleotide
  Sense strand starting at position 3073 of SEQ ID NO: 1560023
agccuuugcccaggaaguu

SEQ ID NO: 1570768 - RNA, 19 nt, Artificial Sequence
  Description of Artificial Sequence: Synthetic oligonucleotide
  Antisense strand to SEQ ID NO: 1570767
aacuuccugggcaaaggcu

SEQ ID NO: 1570769 - RNA, 19 nt, Artificial Sequence
  Description of Artificial Sequence: Synthetic oligonucleotide
  Sense strand starting at position 3128 of SEQ ID NO: 1560023
cuggcaaguucuuuaugcu

SEQ ID NO: 1570770 - RNA, 19 nt, Artificial Sequence
  Description of Artificial Sequence: Synthetic oligonucleotide
  Antisense strand to SEQ ID NO: 1570769
agcauaaagaacuugccag

SEQ ID NO: 1570771 - RNA, 19 nt, Artificial Sequence
  Description of Artificial Sequence: Synthetic oligonucleotide
  Sense strand starting at position 3129 of SEQ ID NO: 1560023
uggcaaguucuuuaugcuu

SEQ ID NO: 1570772 - RNA, 19 nt, Artificial Sequence
  Description of Artificial Sequence: Synthetic oligonucleotide
  Antisense strand to SEQ ID NO: 1570771
aagcauaaagaacuugcca

SEQ ID NO: 1570773 - RNA, 19 nt, Artificial Sequence
  Description of Artificial Sequence: Synthetic oligonucleotide
  Sense strand starting at position 3172 of SEQ ID NO: 1560023
ccggcuauucucgaauuag

SEQ ID NO: 1570774 - RNA, 19 nt, Artificial Sequence
  Description of Artificial Sequence: Synthetic oligonucleotide
  Antisense strand to SEQ ID NO: 1570773
cuaauucgagaauagccgg

SEQ ID NO: 1570775 - RNA, 19 nt, Artificial Sequence
  Description of Artificial Sequence: Synthetic oligonucleotide
  Sense strand starting at position 3183 of SEQ ID NO: 1560023
cgaauuagagccuggccaa

SEQ ID NO: 1570776 - RNA, 19 nt, Artificial Sequence
  Description of Artificial Sequence: Synthetic oligonucleotide
  Antisense strand to SEQ ID NO: 1570775
uuggccaggcucuaauucg

SEQ ID NO: 1570777 - RNA, 19 nt, Artificial Sequence
  Description of Artificial Sequence: Synthetic oligonucleotide
  Sense strand starting at position 3184 of SEQ ID NO: 1560023
gaauuagagccuggccaau

SEQ ID NO: 1570778 - RNA, 19 nt, Artificial Sequence
  Description of Artificial Sequence: Synthetic oligonucleotide
  Antisense strand to SEQ ID NO: 1570777
auuggccaggcucuaauuc

SEQ ID NO: 1570779 - RNA, 19 nt, Artificial Sequence
  Description of Artificial Sequence: Synthetic oligonucleotide
  Sense strand starting at position 276 of SEQ ID NO: 1560024
cccugagagcagggaugua

SEQ ID NO: 1570780 - RNA, 19 nt, Artificial Sequence
  Description of Artificial Sequence: Synthetic oligonucleotide
  Antisense strand to SEQ ID NO: 1570779
uacaucccugcucucaggg

SEQ ID NO: 1570781 - RNA, 19 nt, Artificial Sequence
  Description of Artificial Sequence: Synthetic oligonucleotide
  Sense strand starting at position 353 of SEQ ID NO: 1560024
uccaguaaaugcuuguuga

SEQ ID NO: 1570782 - RNA, 19 nt, Artificial Sequence
  Description of Artificial Sequence: Synthetic oligonucleotide
  Antisense strand to SEQ ID NO: 1570781
ucaacaagcauuuacugga

SEQ ID NO: 1570783 - RNA, 19 nt, Artificial Sequence
  Description of Artificial Sequence: Synthetic oligonucleotide
  Sense strand starting at position 655 of SEQ ID NO: 1560024
gcaaucauccugcaggaga

SEQ ID NO: 1570784 - RNA, 19 nt, Artificial Sequence
  Description of Artificial Sequence: Synthetic oligonucleotide
  Antisense strand to SEQ ID NO: 1570783
ucuccugcaggaugauugc

SEQ ID NO: 1570785 - RNA, 19 nt, Artificial Sequence
  Description of Artificial Sequence: Synthetic oligonucleotide
  Sense strand starting at position 889 of SEQ ID NO: 1560024
gcugggaguccggaauguu

SEQ ID NO: 1570786 - RNA, 19 nt, Artificial Sequence
  Description of Artificial Sequence: Synthetic oligonucleotide
  Antisense strand to SEQ ID NO: 1570785
aacauuccggacucccagc

SEQ ID NO: 1570787 - RNA, 19 nt, Artificial Sequence
  Description of Artificial Sequence: Synthetic oligonucleotide
  Sense strand starting at position 1213 of SEQ ID NO: 1560024
gggugucacuccucaaauc

SEQ ID NO: 1570788 - RNA, 19 nt, Artificial Sequence
  Description of Artificial Sequence: Synthetic oligonucleotide
  Antisense strand to SEQ ID NO: 1570787
gauuugaggagugacaccc

SEQ ID NO: 1570789 - RNA, 19 nt, Artificial Sequence
  Description of Artificial Sequence: Synthetic oligonucleotide
  Sense strand starting at position 1214 of SEQ ID NO: 1560024
ggugucacuccucaaaucu

SEQ ID NO: 1570790 - RNA, 19 nt, Artificial Sequence
  Description of Artificial Sequence: Synthetic oligonucleotide
  Antisense strand to SEQ ID NO: 1570789
agauuugaggagugacacc

SEQ ID NO: 1570791 - RNA, 19 nt, Artificial Sequence
  Description of Artificial Sequence: Synthetic oligonucleotide
  Sense strand starting at position 1774 of SEQ ID NO: 1560024
gcccgauccgggaguuucu

SEQ ID NO: 1570792 - RNA, 19 nt, Artificial Sequence
  Description of Artificial Sequence: Synthetic oligonucleotide
  Antisense strand to SEQ ID NO: 1570791
agaaacucccggaucgggc

SEQ ID NO: 1570793 - RNA, 19 nt, Artificial Sequence
  Description of Artificial Sequence: Synthetic oligonucleotide
  Sense strand starting at position 1795 of SEQ ID NO: 1560024
cccucagugcuuggagauc

SEQ ID NO: 1570794 - RNA, 19 nt, Artificial Sequence
  Description of Artificial Sequence: Synthetic oligonucleotide
  Antisense strand to SEQ ID NO: 1570793
gaucuccaagcacugaggg

SEQ ID NO: 1570795 - RNA, 19 nt, Artificial Sequence
  Description of Artificial Sequence: Synthetic oligonucleotide
  Sense strand starting at position 2118 of SEQ ID NO: 1560024
ucacgugacuguccaauga

SEQ ID NO: 1570796 - RNA, 19 nt, Artificial Sequence
  Description of Artificial Sequence: Synthetic oligonucleotide
  Antisense strand to SEQ ID NO: 1570795
ucauuggacagucacguga

SEQ ID NO: 1570797 - RNA, 19 nt, Artificial Sequence
  Description of Artificial Sequence: Synthetic oligonucleotide
  Sense strand starting at position 2122 of SEQ ID NO: 1560024
gugacuguccaaugagcau

SEQ ID NO: 1570798 - RNA, 19 nt, Artificial Sequence
  Description of Artificial Sequence: Synthetic oligonucleotide
  Antisense strand to SEQ ID NO: 1570797
augcucauuggacagucac

SEQ ID NO: 1570799 - RNA, 19 nt, Artificial Sequence
  Description of Artificial Sequence: Synthetic oligonucleotide
  Sense strand starting at position 2134 of SEQ ID NO: 1560024
ugagcaucucccgauaagu

SEQ ID NO: 1570800 - RNA, 19 nt, Artificial Sequence
  Description of Artificial Sequence: Synthetic oligonucleotide
  Antisense strand to SEQ ID NO: 1570799
acuuaucgggagaugcuca

SEQ ID NO: 1570801 - RNA, 19 nt, Artificial Sequence
  Description of Artificial Sequence: Synthetic oligonucleotide
  Sense strand starting at position 2182 of SEQ ID NO: 1560024
cguccaaucgcagcucuaa

SEQ ID NO: 1570802 - RNA, 19 nt, Artificial Sequence
  Description of Artificial Sequence: Synthetic oligonucleotide
  Antisense strand to SEQ ID NO: 1570801
uuagagcugcgauuggacg

SEQ ID NO: 1570803 - RNA, 19 nt, Artificial Sequence
  Description of Artificial Sequence: Synthetic oligonucleotide
  Sense strand starting at position 2229 of SEQ ID NO: 1560024
agaaguuucgggcaggguu

SEQ ID NO: 1570804 - RNA, 19 nt, Artificial Sequence
  Description of Artificial Sequence: Synthetic oligonucleotide
  Antisense strand to SEQ ID NO: 1570803
aacccugcccgaaacuucu

SEQ ID NO: 1570805 - RNA, 19 nt, Artificial Sequence
  Description of Artificial Sequence: Synthetic oligonucleotide
  Sense strand starting at position 2315 of SEQ ID NO: 1560024
caggcaggacguuauagau

SEQ ID NO: 1570806 - RNA, 19 nt, Artificial Sequence
  Description of Artificial Sequence: Synthetic oligonucleotide
  Antisense strand to SEQ ID NO: 1570805
aucuauaacguccugccug

SEQ ID NO: 1570807 - RNA, 19 nt, Artificial Sequence
  Description of Artificial Sequence: Synthetic oligonucleotide
  Sense strand starting at position 2321 of SEQ ID NO: 1560024
ggacguuauagaugacuaa

SEQ ID NO: 1570808 - RNA, 19 nt, Artificial Sequence
  Description of Artificial Sequence: Synthetic oligonucleotide
  Antisense strand to SEQ ID NO: 1570807
uuagucaucuauaacgucc

SEQ ID NO: 1570809 - RNA, 19 nt, Artificial Sequence
  Description of Artificial Sequence: Synthetic oligonucleotide
  Sense strand starting at position 2395 of SEQ ID NO: 1560024
ccaggcuugucucuaacuu

SEQ ID NO: 1570810 - RNA, 19 nt, Artificial Sequence
  Description of Artificial Sequence: Synthetic oligonucleotide
  Antisense strand to SEQ ID NO: 1570809
aaguuagagacaagccugg

SEQ ID NO: 1570811 - RNA, 19 nt, Artificial Sequence
  Description of Artificial Sequence: Synthetic oligonucleotide
  Sense strand starting at position 2399 of SEQ ID NO: 1560024
gcuugucucuaacuuguga

SEQ ID NO: 1570812 - RNA, 19 nt, Artificial Sequence
  Description of Artificial Sequence: Synthetic oligonucleotide
  Antisense strand to SEQ ID NO: 1570811
ucacaaguuagagacaagc

SEQ ID NO: 1570813 - RNA, 19 nt, Artificial Sequence
  Description of Artificial Sequence: Synthetic oligonucleotide
  Sense strand starting at position 2599 of SEQ ID NO: 1560024
ucuggaauucccgggcuga

SEQ ID NO: 1570814 - RNA, 19 nt, Artificial Sequence
  Description of Artificial Sequence: Synthetic oligonucleotide
  Antisense strand to SEQ ID NO: 1570813
ucagcccgggaauuccaga

SEQ ID NO: 1570815 - RNA, 19 nt, Artificial Sequence
  Description of Artificial Sequence: Synthetic oligonucleotide
  Sense strand starting at position 2600 of SEQ ID NO: 1560024
cuggaauucccgggcugaa

SEQ ID NO: 1570816 - RNA, 19 nt, Artificial Sequence
  Description of Artificial Sequence: Synthetic oligonucleotide
  Antisense strand to SEQ ID NO: 1570815
uucagcccgggaauuccag

SEQ ID NO: 1570817 - RNA, 19 nt, Artificial Sequence
  Description of Artificial Sequence: Synthetic oligonucleotide
  Sense strand starting at position 2801 of SEQ ID NO: 1560024
ccagucaugacucgaaugu

SEQ ID NO: 1570818 - RNA, 19 nt, Artificial Sequence
  Description of Artificial Sequence: Synthetic oligonucleotide
  Antisense strand to SEQ ID NO: 1570817
acauucgagucaugacugg

SEQ ID NO: 1570819 - RNA, 19 nt, Artificial Sequence
  Description of Artificial Sequence: Synthetic oligonucleotide
  Sense strand starting at position 2802 of SEQ ID NO: 1560024
cagucaugacucgaauguu

SEQ ID NO: 1570820 - RNA, 19 nt, Artificial Sequence
  Description of Artificial Sequence: Synthetic oligonucleotide
  Antisense strand to SEQ ID NO: 1570819
aacauucgagucaugacug

SEQ ID NO: 1570821 - RNA, 19 nt, Artificial Sequence
  Description of Artificial Sequence: Synthetic oligonucleotide
  Sense strand starting at position 2805 of SEQ ID NO: 1560024
ucaugacucgaauguuugu

SEQ ID NO: 1570822 - RNA, 19 nt, Artificial Sequence
  Description of Artificial Sequence: Synthetic oligonucleotide
  Antisense strand to SEQ ID NO: 1570821
acaaacauucgagucauga

SEQ ID NO: 1570823 - RNA, 19 nt, Artificial Sequence
  Description of Artificial Sequence: Synthetic oligonucleotide
  Sense strand starting at position 2867 of SEQ ID NO: 1560024
gaaacuaaucugugcugau

SEQ ID NO: 1570824 - RNA, 19 nt, Artificial Sequence
  Description of Artificial Sequence: Synthetic oligonucleotide
  Antisense strand to SEQ ID NO: 1570823
aucagcacagauuaguuuc

SEQ ID NO: 1570825 - RNA, 19 nt, Artificial Sequence
  Description of Artificial Sequence: Synthetic oligonucleotide
  Sense strand starting at position 2871 of SEQ ID NO: 1560024
cuaaucugugcugauagau

SEQ ID NO: 1570826 - RNA, 19 nt, Artificial Sequence
  Description of Artificial Sequence: Synthetic oligonucleotide
  Antisense strand to SEQ ID NO: 1570825
aucuaucagcacagauuag

SEQ ID NO: 1570827 - RNA, 19 nt, Artificial Sequence
  Description of Artificial Sequence: Synthetic oligonucleotide
  Sense strand starting at position 2883 of SEQ ID NO: 1560024
gauagaucagcaggguaug

SEQ ID NO: 1570828 - RNA, 19 nt, Artificial Sequence
  Description of Artificial Sequence: Synthetic oligonucleotide
  Antisense strand to SEQ ID NO: 1570827
cauacccugcugaucuauc

SEQ ID NO: 1570829 - RNA, 19 nt, Artificial Sequence
  Description of Artificial Sequence: Synthetic oligonucleotide
  Sense strand starting at position 2958 of SEQ ID NO: 1560024
ucugaaugguguuuacaug

SEQ ID NO: 1570830 - RNA, 19 nt, Artificial Sequence
  Description of Artificial Sequence: Synthetic oligonucleotide
  Antisense strand to SEQ ID NO: 1570829
cauguaaacaccauucaga

SEQ ID NO: 1570831 - RNA, 19 nt, Artificial Sequence
  Description of Artificial Sequence: Synthetic oligonucleotide
  Sense strand starting at position 2964 of SEQ ID NO: 1560024
ugguguuuacauggguaua

SEQ ID NO: 1570832 - RNA, 19 nt, Artificial Sequence
  Description of Artificial Sequence: Synthetic oligonucleotide
  Antisense strand to SEQ ID NO: 1570831
uauacccauguaaacacca

SEQ ID NO: 1570833 - RNA, 19 nt, Artificial Sequence
  Description of Artificial Sequence: Synthetic oligonucleotide
  Sense strand starting at position 2965 of SEQ ID NO: 1560024
gguguuuacauggguauac

SEQ ID NO: 1570834 - RNA, 19 nt, Artificial Sequence
  Description of Artificial Sequence: Synthetic oligonucleotide
  Antisense strand to SEQ ID NO: 1570833
guauacccauguaaacacc

SEQ ID NO: 1570835 - RNA, 19 nt, Artificial Sequence
  Description of Artificial Sequence: Synthetic oligonucleotide
  Sense strand starting at position 2966 of SEQ ID NO: 1560024
guguuuacauggguauaca

SEQ ID NO: 1570836 - RNA, 19 nt, Artificial Sequence
  Description of Artificial Sequence: Synthetic oligonucleotide
  Antisense strand to SEQ ID NO: 1570835
uguauacccauguaaacac

SEQ ID NO: 1570837 - RNA, 19 nt, Artificial Sequence
  Description of Artificial Sequence: Synthetic oligonucleotide
  Sense strand starting at position 3345 of SEQ ID NO: 1560024
auaagacuugugugcuuua

SEQ ID NO: 1570838 - RNA, 19 nt, Artificial Sequence
  Description of Artificial Sequence: Synthetic oligonucleotide
  Antisense strand to SEQ ID NO: 1570837
uaaagcacacaagucuuau

SEQ ID NO: 1570839 - RNA, 19 nt, Artificial Sequence
  Description of Artificial Sequence: Synthetic oligonucleotide
  Sense strand starting at position 3346 of SEQ ID NO: 1560024
uaagacuugugugcuuuau

SEQ ID NO: 1570840 - RNA, 19 nt, Artificial Sequence
  Description of Artificial Sequence: Synthetic oligonucleotide
  Antisense strand to SEQ ID NO: 1570839
auaaagcacacaagucuua

SEQ ID NO: 1570841 - RNA, 19 nt, Artificial Sequence
  Description of Artificial Sequence: Synthetic oligonucleotide
  Sense strand starting at position 3348 of SEQ ID NO: 1560024
agacuugugugcuuuauga

SEQ ID NO: 1570842 - RNA, 19 nt, Artificial Sequence
  Description of Artificial Sequence: Synthetic oligonucleotide
  Antisense strand to SEQ ID NO: 1570841
ucauaaagcacacaagucu

SEQ ID NO: 1570843 - RNA, 19 nt, Artificial Sequence
  Description of Artificial Sequence: Synthetic oligonucleotide
  Sense strand starting at position 3350 of SEQ ID NO: 1560024
acuugugugcuuuaugaau

SEQ ID NO: 1570844 - RNA, 19 nt, Artificial Sequence
  Description of Artificial Sequence: Synthetic oligonucleotide
  Antisense strand to SEQ ID NO: 1570843
auucauaaagcacacaagu

SEQ ID NO: 1570845 - RNA, 19 nt, Artificial Sequence
  Description of Artificial Sequence: Synthetic oligonucleotide
  Sense strand starting at position 3356 of SEQ ID NO: 1560024
gugcuuuaugaauauuaug

SEQ ID NO: 1570846 - RNA, 19 nt, Artificial Sequence
  Description of Artificial Sequence: Synthetic oligonucleotide
  Antisense strand to SEQ ID NO: 1570845
cauaauauucauaaagcac

SEQ ID NO: 1570847 - RNA, 19 nt, Artificial Sequence
  Description of Artificial Sequence: Synthetic oligonucleotide
  Sense strand starting at position 3364 of SEQ ID NO: 1560024
ugaauauuaugacauguca

SEQ ID NO: 1570848 - RNA, 19 nt, Artificial Sequence
  Description of Artificial Sequence: Synthetic oligonucleotide
  Antisense strand to SEQ ID NO: 1570847
ugacaugucauaauauuca

SEQ ID NO: 1570849 - RNA, 19 nt, Artificial Sequence
  Description of Artificial Sequence: Synthetic oligonucleotide
  Sense strand starting at position 3427 of SEQ ID NO: 1560024
gagcuaggaucagaugaua

SEQ ID NO: 1570850 - RNA, 19 nt, Artificial Sequence
  Description of Artificial Sequence: Synthetic oligonucleotide
  Antisense strand to SEQ ID NO: 1570849
uaucaucugauccuagcuc

SEQ ID NO: 1570851 - RNA, 19 nt, Artificial Sequence
  Description of Artificial Sequence: Synthetic oligonucleotide
  Sense strand starting at position 3447 of SEQ ID NO: 1560024
aggguuugggccugucaga

SEQ ID NO: 1570852 - RNA, 19 nt, Artificial Sequence
  Description of Artificial Sequence: Synthetic oligonucleotide
  Antisense strand to SEQ ID NO: 1570851
ucugacaggcccaaacccu

SEQ ID NO: 1570853 - RNA, 19 nt, Artificial Sequence
  Description of Artificial Sequence: Synthetic oligonucleotide
  Sense strand starting at position 3470 of SEQ ID NO: 1560024
ggacuugaucuauguccag

SEQ ID NO: 1570854 - RNA, 19 nt, Artificial Sequence
  Description of Artificial Sequence: Synthetic oligonucleotide
  Antisense strand to SEQ ID NO: 1570853
cuggacauagaucaagucc

SEQ ID NO: 1570855 - RNA, 19 nt, Artificial Sequence
  Description of Artificial Sequence: Synthetic oligonucleotide
  Sense strand starting at position 3473 of SEQ ID NO: 1560024
cuugaucuauguccagaag

SEQ ID NO: 1570856 - RNA, 19 nt, Artificial Sequence
  Description of Artificial Sequence: Synthetic oligonucleotide
  Antisense strand to SEQ ID NO: 1570855
cuucuggacauagaucaag

SEQ ID NO: 1570857 - RNA, 19 nt, Artificial Sequence
  Description of Artificial Sequence: Synthetic oligonucleotide
  Sense strand starting at position 3553 of SEQ ID NO: 1560024
ggaagaucucuuggacuuc

SEQ ID NO: 1570858 - RNA, 19 nt, Artificial Sequence
  Description of Artificial Sequence: Synthetic oligonucleotide
  Antisense strand to SEQ ID NO: 1570857
gaaguccaagagaucuucc

SEQ ID NO: 1570859 - RNA, 19 nt, Artificial Sequence
  Description of Artificial Sequence: Synthetic oligonucleotide
  Sense strand starting at position 1119 of SEQ ID NO: 1560025
cggagugcuuaucaggaaa

SEQ ID NO: 1570860 - RNA, 19 nt, Artificial Sequence
  Description of Artificial Sequence: Synthetic oligonucleotide
  Antisense strand to SEQ ID NO: 1570859
uuuccugauaagcacuccg

SEQ ID NO: 1570861 - RNA, 19 nt, Artificial Sequence
  Description of Artificial Sequence: Synthetic oligonucleotide
  Sense strand starting at position 1121 of SEQ ID NO: 1560025
gagugcuuaucaggaaaca

SEQ ID NO: 1570862 - RNA, 19 nt, Artificial Sequence
  Description of Artificial Sequence: Synthetic oligonucleotide
  Antisense strand to SEQ ID NO: 1570861
uguuuccugauaagcacuc

SEQ ID NO: 1570863 - RNA, 19 nt, Artificial Sequence
  Description of Artificial Sequence: Synthetic oligonucleotide
  Sense strand starting at position 1122 of SEQ ID NO: 1560025
agugcuuaucaggaaacac

SEQ ID NO: 1570864 - RNA, 19 nt, Artificial Sequence
  Description of Artificial Sequence: Synthetic oligonucleotide
  Antisense strand to SEQ ID NO: 1570863
guguuuccugauaagcacu

SEQ ID NO: 1570865 - RNA, 19 nt, Artificial Sequence
  Description of Artificial Sequence: Synthetic oligonucleotide
  Sense strand starting at position 1294 of SEQ ID NO: 1560025
aagugacauucgcccgaca

SEQ ID NO: 1570866 - RNA, 19 nt, Artificial Sequence
  Description of Artificial Sequence: Synthetic oligonucleotide
  Antisense strand to SEQ ID NO: 1570865
ugucgggcgaaugucacuu

SEQ ID NO: 1570867 - RNA, 19 nt, Artificial Sequence
  Description of Artificial Sequence: Synthetic oligonucleotide
  Sense strand starting at position 1568 of SEQ ID NO: 1560025
agagcaaacuccgucuuaa

SEQ ID NO: 1570868 - RNA, 19 nt, Artificial Sequence
  Description of Artificial Sequence: Synthetic oligonucleotide
  Antisense strand to SEQ ID NO: 1570867
uuaagacggaguuugcucu

SEQ ID NO: 1570869 - RNA, 19 nt, Artificial Sequence
  Description of Artificial Sequence: Synthetic oligonucleotide
  Sense strand starting at position 1682 of SEQ ID NO: 1560025
ugugacagcuucuugcuaa

SEQ ID NO: 1570870 - RNA, 19 nt, Artificial Sequence
  Description of Artificial Sequence: Synthetic oligonucleotide
  Antisense strand to SEQ ID NO: 1570869
uuagcaagaagcugucaca

SEQ ID NO: 1570871 - RNA, 19 nt, Artificial Sequence
  Description of Artificial Sequence: Synthetic oligonucleotide
  Sense strand starting at position 1683 of SEQ ID NO: 1560025
gugacagcuucuugcuaac

SEQ ID NO: 1570872 - RNA, 19 nt, Artificial Sequence
  Description of Artificial Sequence: Synthetic oligonucleotide
  Antisense strand to SEQ ID NO: 1570871
guuagcaagaagcugucac

SEQ ID NO: 1570873 - RNA, 19 nt, Artificial Sequence
  Description of Artificial Sequence: Synthetic oligonucleotide
  Sense strand starting at position 1869 of SEQ ID NO: 1560025
ucaguuucucauuguuacu

SEQ ID NO: 1570874 - RNA, 19 nt, Artificial Sequence
  Description of Artificial Sequence: Synthetic oligonucleotide
  Antisense strand to SEQ ID NO: 1570873
aguaacaaugagaaacuga

SEQ ID NO: 1570875 - RNA, 19 nt, Artificial Sequence
  Description of Artificial Sequence: Synthetic oligonucleotide
  Sense strand starting at position 2043 of SEQ ID NO: 1560025
gaguaaggaugucagacuu

SEQ ID NO: 1570876 - RNA, 19 nt, Artificial Sequence
  Description of Artificial Sequence: Synthetic oligonucleotide
  Antisense strand to SEQ ID NO: 1570875
aagucugacauccuuacuc

SEQ ID NO: 1570877 - RNA, 19 nt, Artificial Sequence
  Description of Artificial Sequence: Synthetic oligonucleotide
  Sense strand starting at position 2102 of SEQ ID NO: 1560025
ccaagagaugcagguaauc

SEQ ID NO: 1570878 - RNA, 19 nt, Artificial Sequence
  Description of Artificial Sequence: Synthetic oligonucleotide
  Antisense strand to SEQ ID NO: 1570877
gauuaccugcaucucuugg

SEQ ID NO: 1570879 - RNA, 19 nt, Artificial Sequence
  Description of Artificial Sequence: Synthetic oligonucleotide
  Sense strand starting at position 2107 of SEQ ID NO: 1560025
agaugcagguaaucuauau

SEQ ID NO: 1570880 - RNA, 19 nt, Artificial Sequence
  Description of Artificial Sequence: Synthetic oligonucleotide
  Antisense strand to SEQ ID NO: 1570879
auauagauuaccugcaucu

SEQ ID NO: 1570881 - RNA, 19 nt, Artificial Sequence
  Description of Artificial Sequence: Synthetic oligonucleotide
  Sense strand starting at position 2111 of SEQ ID NO: 1560025
gcagguaaucuauaucuca

SEQ ID NO: 1570882 - RNA, 19 nt, Artificial Sequence
  Description of Artificial Sequence: Synthetic oligonucleotide
  Antisense strand to SEQ ID NO: 1570881
ugagauauagauuaccugc

SEQ ID NO: 1570883 - RNA, 19 nt, Artificial Sequence
  Description of Artificial Sequence: Synthetic oligonucleotide
  Sense strand starting at position 2118 of SEQ ID NO: 1560025
aucuauaucucacgugaaa

SEQ ID NO: 1570884 - RNA, 19 nt, Artificial Sequence
  Description of Artificial Sequence: Synthetic oligonucleotide
  Antisense strand to SEQ ID NO: 1570883
uuucacgugagauauagau

SEQ ID NO: 1570885 - RNA, 19 nt, Artificial Sequence
  Description of Artificial Sequence: Synthetic oligonucleotide
  Sense strand starting at position 2154 of SEQ ID NO: 1560025
uugggaacuccucagcuuu

SEQ ID NO: 1570886 - RNA, 19 nt, Artificial Sequence
  Description of Artificial Sequence: Synthetic oligonucleotide
  Antisense strand to SEQ ID NO: 1570885
aaagcugaggaguucccaa

SEQ ID NO: 1570887 - RNA, 19 nt, Artificial Sequence
  Description of Artificial Sequence: Synthetic oligonucleotide
  Sense strand starting at position 2248 of SEQ ID NO: 1560025
caaacugugggucaugagu

SEQ ID NO: 1570888 - RNA, 19 nt, Artificial Sequence
  Description of Artificial Sequence: Synthetic oligonucleotide
  Antisense strand to SEQ ID NO: 1570887
acucaugacccacaguuug

SEQ ID NO: 1570889 - RNA, 19 nt, Artificial Sequence
  Description of Artificial Sequence: Synthetic oligonucleotide
  Sense strand starting at position 2250 of SEQ ID NO: 1560025
aacugugggucaugaguaa

SEQ ID NO: 1570890 - RNA, 19 nt, Artificial Sequence
  Description of Artificial Sequence: Synthetic oligonucleotide
  Antisense strand to SEQ ID NO: 1570889
uuacucaugacccacaguu

SEQ ID NO: 1570891 - RNA, 19 nt, Artificial Sequence
  Description of Artificial Sequence: Synthetic oligonucleotide
  Sense strand starting at position 2254 of SEQ ID NO: 1560025
gugggucaugaguaaacca

SEQ ID NO: 1570892 - RNA, 19 nt, Artificial Sequence
  Description of Artificial Sequence: Synthetic oligonucleotide
  Antisense strand to SEQ ID NO: 1570891
ugguuuacucaugacccac

SEQ ID NO: 1570893 - RNA, 19 nt, Artificial Sequence
  Description of Artificial Sequence: Synthetic oligonucleotide
  Sense strand starting at position 2262 of SEQ ID NO: 1560025
ugaguaaaccauggauuau

SEQ ID NO: 1570894 - RNA, 19 nt, Artificial Sequence
  Description of Artificial Sequence: Synthetic oligonucleotide
  Antisense strand to SEQ ID NO: 1570893
auaauccaugguuuacuca

SEQ ID NO: 1570895 - RNA, 19 nt, Artificial Sequence
  Description of Artificial Sequence: Synthetic oligonucleotide
  Sense strand starting at position 2271 of SEQ ID NO: 1560025
cauggauuaugacauauga

SEQ ID NO: 1570896 - RNA, 19 nt, Artificial Sequence
  Description of Artificial Sequence: Synthetic oligonucleotide
  Antisense strand to SEQ ID NO: 1570895
ucauaugucauaauccaug

SEQ ID NO: 1570897 - RNA, 19 nt, Artificial Sequence
  Description of Artificial Sequence: Synthetic oligonucleotide
  Sense strand starting at position 2287 of SEQ ID NO: 1560025
ugacaucacuuacauggau

SEQ ID NO: 1570898 - RNA, 19 nt, Artificial Sequence
  Description of Artificial Sequence: Synthetic oligonucleotide
  Antisense strand to SEQ ID NO: 1570897
auccauguaagugauguca

SEQ ID NO: 1570899 - RNA, 19 nt, Artificial Sequence
  Description of Artificial Sequence: Synthetic oligonucleotide
  Sense strand starting at position 2966 of SEQ ID NO: 1560025
aauggauagccuuguggua

SEQ ID NO: 1570900 - RNA, 19 nt, Artificial Sequence
  Description of Artificial Sequence: Synthetic oligonucleotide
  Antisense strand to SEQ ID NO: 1570899
uaccacaaggcuauccauu

SEQ ID NO: 1570901 - RNA, 19 nt, Artificial Sequence
  Description of Artificial Sequence: Synthetic oligonucleotide
  Sense strand starting at position 2968 of SEQ ID NO: 1560025
uggauagccuugugguaca

SEQ ID NO: 1570902 - RNA, 19 nt, Artificial Sequence
  Description of Artificial Sequence: Synthetic oligonucleotide
  Antisense strand to SEQ ID NO: 1570901
uguaccacaaggcuaucca

SEQ ID NO: 1570903 - RNA, 19 nt, Artificial Sequence
  Description of Artificial Sequence: Synthetic oligonucleotide
  Sense strand starting at position 2971 of SEQ ID NO: 1560025
auagccuugugguacaaua

SEQ ID NO: 1570904 - RNA, 19 nt, Artificial Sequence
  Description of Artificial Sequence: Synthetic oligonucleotide
  Antisense strand to SEQ ID NO: 1570903
uauuguaccacaaggcuau

SEQ ID NO: 1570905 - RNA, 19 nt, Artificial Sequence
  Description of Artificial Sequence: Synthetic oligonucleotide
  Sense strand starting at position 2982 of SEQ ID NO: 1560025
guacaauagccuugcagcu

SEQ ID NO: 1570906 - RNA, 19 nt, Artificial Sequence
  Description of Artificial Sequence: Synthetic oligonucleotide
  Antisense strand to SEQ ID NO: 1570905
agcugcaaggcuauuguac

SEQ ID NO: 1570907 - RNA, 19 nt, Artificial Sequence
  Description of Artificial Sequence: Synthetic oligonucleotide
  Sense strand starting at position 3127 of SEQ ID NO: 1560025
cagucuggucuugaccuua

SEQ ID NO: 1570908 - RNA, 19 nt, Artificial Sequence
  Description of Artificial Sequence: Synthetic oligonucleotide
  Antisense strand to SEQ ID NO: 1570907
uaaggucaagaccagacug

SEQ ID NO: 1570909 - RNA, 19 nt, Artificial Sequence
  Description of Artificial Sequence: Synthetic oligonucleotide
  Sense strand starting at position 3140 of SEQ ID NO: 1560025
accuuaugggcucaagcaa

SEQ ID NO: 1570910 - RNA, 19 nt, Artificial Sequence
  Description of Artificial Sequence: Synthetic oligonucleotide
  Antisense strand to SEQ ID NO: 1570909
uugcuugagcccauaaggu

SEQ ID NO: 1570911 - RNA, 19 nt, Artificial Sequence
  Description of Artificial Sequence: Synthetic oligonucleotide
  Sense strand starting at position 3266 of SEQ ID NO: 1560025
uugcgcuuuacugagaugu

SEQ ID NO: 1570912 - RNA, 19 nt, Artificial Sequence
  Description of Artificial Sequence: Synthetic oligonucleotide
  Antisense strand to SEQ ID NO: 1570911
acaucucaguaaagcgcaa

SEQ ID NO: 1570913 - RNA, 19 nt, Artificial Sequence
  Description of Artificial Sequence: Synthetic oligonucleotide
  Sense strand starting at position 3268 of SEQ ID NO: 1560025
gcgcuuuacugagauguau

SEQ ID NO: 1570914 - RNA, 19 nt, Artificial Sequence
  Description of Artificial Sequence: Synthetic oligonucleotide
  Antisense strand to SEQ ID NO: 1570913
auacaucucaguaaagcgc

SEQ ID NO: 1570915 - RNA, 19 nt, Artificial Sequence
  Description of Artificial Sequence: Synthetic oligonucleotide
  Sense strand starting at position 3312 of SEQ ID NO: 1560025
uuagguguaugguguguaa

SEQ ID NO: 1570916 - RNA, 19 nt, Artificial Sequence
  Description of Artificial Sequence: Synthetic oligonucleotide
  Antisense strand to SEQ ID NO: 1570915
uuacacaccauacaccuaa

SEQ ID NO: 1570917 - RNA, 19 nt, Artificial Sequence
  Description of Artificial Sequence: Synthetic oligonucleotide
  Sense strand starting at position 3314 of SEQ ID NO: 1560025
agguguaugguguguaagu

SEQ ID NO: 1570918 - RNA, 19 nt, Artificial Sequence
  Description of Artificial Sequence: Synthetic oligonucleotide
  Antisense strand to SEQ ID NO: 1570917
acuuacacaccauacaccu

SEQ ID NO: 1570919 - RNA, 19 nt, Artificial Sequence
  Description of Artificial Sequence: Synthetic oligonucleotide
  Sense strand starting at position 3321 of SEQ ID NO: 1560025
ugguguguaaguggugaua

SEQ ID NO: 1570920 - RNA, 19 nt, Artificial Sequence
  Description of Artificial Sequence: Synthetic oligonucleotide
  Antisense strand to SEQ ID NO: 1570919
uaucaccacuuacacacca

SEQ ID NO: 1570921 - RNA, 19 nt, Artificial Sequence
  Description of Artificial Sequence: Synthetic oligonucleotide
  Sense strand starting at position 3323 of SEQ ID NO: 1560025
guguguaaguggugauaaa

SEQ ID NO: 1570922 - RNA, 19 nt, Artificial Sequence
  Description of Artificial Sequence: Synthetic oligonucleotide
  Antisense strand to SEQ ID NO: 1570921
uuuaucaccacuuacacac

SEQ ID NO: 1570923 - RNA, 19 nt, Artificial Sequence
  Description of Artificial Sequence: Synthetic oligonucleotide
  Sense strand starting at position 3423 of SEQ ID NO: 1560025
gacagauucuggcuguguu

SEQ ID NO: 1570924 - RNA, 19 nt, Artificial Sequence
  Description of Artificial Sequence: Synthetic oligonucleotide
  Antisense strand to SEQ ID NO: 1570923
aacacagccagaaucuguc

SEQ ID NO: 1570925 - RNA, 19 nt, Artificial Sequence
  Description of Artificial Sequence: Synthetic oligonucleotide
  Sense strand starting at position 3424 of SEQ ID NO: 1560025
acagauucuggcuguguua

SEQ ID NO: 1570926 - RNA, 19 nt, Artificial Sequence
  Description of Artificial Sequence: Synthetic oligonucleotide
  Antisense strand to SEQ ID NO: 1570925
uaacacagccagaaucugu

SEQ ID NO: 1570927 - RNA, 19 nt, Artificial Sequence
  Description of Artificial Sequence: Synthetic oligonucleotide
  Sense strand starting at position 3506 of SEQ ID NO: 1560025
ggauuauaggugugcauga

SEQ ID NO: 1570928 - RNA, 19 nt, Artificial Sequence
  Description of Artificial Sequence: Synthetic oligonucleotide
  Antisense strand to SEQ ID NO: 1570927
ucaugcacaccuauaaucc

SEQ ID NO: 1570929 - RNA, 19 nt, Artificial Sequence
  Description of Artificial Sequence: Synthetic oligonucleotide
  Sense strand starting at position 3519 of SEQ ID NO: 1560025
gcaugacugcuuugaccag

SEQ ID NO: 1570930 - RNA, 19 nt, Artificial Sequence
  Description of Artificial Sequence: Synthetic oligonucleotide
  Antisense strand to SEQ ID NO: 1570929
cuggucaaagcagucaugc

SEQ ID NO: 1570931 - RNA, 19 nt, Artificial Sequence
  Description of Artificial Sequence: Synthetic oligonucleotide
  Sense strand starting at position 3520 of SEQ ID NO: 1560025
caugacugcuuugaccaga

SEQ ID NO: 1570932 - RNA, 19 nt, Artificial Sequence
  Description of Artificial Sequence: Synthetic oligonucleotide
  Antisense strand to SEQ ID NO: 1570931
ucuggucaaagcagucaug

SEQ ID NO: 1570933 - RNA, 19 nt, Artificial Sequence
  Description of Artificial Sequence: Synthetic oligonucleotide
  Sense strand starting at position 3523 of SEQ ID NO: 1560025
gacugcuuugaccagaguu

SEQ ID NO: 1570934 - RNA, 19 nt, Artificial Sequence
  Description of Artificial Sequence: Synthetic oligonucleotide
  Antisense strand to SEQ ID NO: 1570933
aacucuggucaaagcaguc

SEQ ID NO: 1570935 - RNA, 19 nt, Artificial Sequence
  Description of Artificial Sequence: Synthetic oligonucleotide
  Sense strand starting at position 3525 of SEQ ID NO: 1560025
cugcuuugaccagaguuaa

SEQ ID NO: 1570936 - RNA, 19 nt, Artificial Sequence
  Description of Artificial Sequence: Synthetic oligonucleotide
  Antisense strand to SEQ ID NO: 1570935
uuaacucuggucaaagcag

SEQ ID NO: 1570937 - RNA, 19 nt, Artificial Sequence
  Description of Artificial Sequence: Synthetic oligonucleotide
  Sense strand starting at position 360 of SEQ ID NO: 1560026
acuggucucacgugacuga

SEQ ID NO: 1570938 - RNA, 19 nt, Artificial Sequence
  Description of Artificial Sequence: Synthetic oligonucleotide
  Antisense strand to SEQ ID NO: 1570937
ucagucacgugagaccagu

SEQ ID NO: 1570939 - RNA, 19 nt, Artificial Sequence
  Description of Artificial Sequence: Synthetic oligonucleotide
  Sense strand starting at position 364 of SEQ ID NO: 1560026
gucucacgugacugacaua

SEQ ID NO: 1570940 - RNA, 19 nt, Artificial Sequence
  Description of Artificial Sequence: Synthetic oligonucleotide
  Antisense strand to SEQ ID NO: 1570939
uaugucagucacgugagac

SEQ ID NO: 1570941 - RNA, 19 nt, Artificial Sequence
  Description of Artificial Sequence: Synthetic oligonucleotide
  Sense strand starting at position 367 of SEQ ID NO: 1560026
ucacgugacugacauaaac

SEQ ID NO: 1570942 - RNA, 19 nt, Artificial Sequence
  Description of Artificial Sequence: Synthetic oligonucleotide
  Antisense strand to SEQ ID NO: 1570941
guuuaugucagucacguga

SEQ ID NO: 1570943 - RNA, 19 nt, Artificial Sequence
  Description of Artificial Sequence: Synthetic oligonucleotide
  Sense strand starting at position 540 of SEQ ID NO: 1560026
gauccuggguccucaaauc

SEQ ID NO: 1570944 - RNA, 19 nt, Artificial Sequence
  Description of Artificial Sequence: Synthetic oligonucleotide
  Antisense strand to SEQ ID NO: 1570943
gauuugaggacccaggauc

SEQ ID NO: 1570945 - RNA, 19 nt, Artificial Sequence
  Description of Artificial Sequence: Synthetic oligonucleotide
  Sense strand starting at position 902 of SEQ ID NO: 1560026
ccaguaucaucccggaaca

SEQ ID NO: 1570946 - RNA, 19 nt, Artificial Sequence
  Description of Artificial Sequence: Synthetic oligonucleotide
  Antisense strand to SEQ ID NO: 1570945
uguuccgggaugauacugg

SEQ ID NO: 1570947 - RNA, 19 nt, Artificial Sequence
  Description of Artificial Sequence: Synthetic oligonucleotide
  Sense strand starting at position 929 of SEQ ID NO: 1560026
agacaacucucaccgacaa

SEQ ID NO: 1570948 - RNA, 19 nt, Artificial Sequence
  Description of Artificial Sequence: Synthetic oligonucleotide
  Antisense strand to SEQ ID NO: 1570947
uugucggugagaguugucu

SEQ ID NO: 1570949 - RNA, 19 nt, Artificial Sequence
  Description of Artificial Sequence: Synthetic oligonucleotide
  Sense strand starting at position 2691 of SEQ ID NO: 1560026
cggagugcuuaucaggaaa

SEQ ID NO: 1570950 - RNA, 19 nt, Artificial Sequence
  Description of Artificial Sequence: Synthetic oligonucleotide
  Antisense strand to SEQ ID NO: 1570949
uuuccugauaagcacuccg

SEQ ID NO: 1570951 - RNA, 19 nt, Artificial Sequence
  Description of Artificial Sequence: Synthetic oligonucleotide
  Sense strand starting at position 2693 of SEQ ID NO: 1560026
gagugcuuaucaggaaaca

SEQ ID NO: 1570952 - RNA, 19 nt, Artificial Sequence
  Description of Artificial Sequence: Synthetic oligonucleotide
  Antisense strand to SEQ ID NO: 1570951
uguuuccugauaagcacuc

SEQ ID NO: 1570953 - RNA, 19 nt, Artificial Sequence
  Description of Artificial Sequence: Synthetic oligonucleotide
  Sense strand starting at position 2694 of SEQ ID NO: 1560026
agugcuuaucaggaaacac

SEQ ID NO: 1570954 - RNA, 19 nt, Artificial Sequence
  Description of Artificial Sequence: Synthetic oligonucleotide
  Antisense strand to SEQ ID NO: 1570953
guguuuccugauaagcacu

SEQ ID NO: 1570955 - RNA, 19 nt, Artificial Sequence
  Description of Artificial Sequence: Synthetic oligonucleotide
  Sense strand starting at position 2866 of SEQ ID NO: 1560026
aagugacauucgcccgaca

SEQ ID NO: 1570956 - RNA, 19 nt, Artificial Sequence
  Description of Artificial Sequence: Synthetic oligonucleotide
  Antisense strand to SEQ ID NO: 1570955
ugucgggcgaaugucacuu

SEQ ID NO: 1570957 - RNA, 19 nt, Artificial Sequence
  Description of Artificial Sequence: Synthetic oligonucleotide
  Sense strand starting at position 3140 of SEQ ID NO: 1560026
agagcaaacuccgucuuaa

SEQ ID NO: 1570958 - RNA, 19 nt, Artificial Sequence
  Description of Artificial Sequence: Synthetic oligonucleotide
  Antisense strand to SEQ ID NO: 1570957
uuaagacggaguuugcucu

SEQ ID NO: 1570959 - RNA, 19 nt, Artificial Sequence
  Description of Artificial Sequence: Synthetic oligonucleotide
  Sense strand starting at position 3254 of SEQ ID NO: 1560026
ugugacagcuucuugcuaa

SEQ ID NO: 1570960 - RNA, 19 nt, Artificial Sequence
  Description of Artificial Sequence: Synthetic oligonucleotide
  Antisense strand to SEQ ID NO: 1570959
uuagcaagaagcugucaca

SEQ ID NO: 1570961 - RNA, 19 nt, Artificial Sequence
  Description of Artificial Sequence: Synthetic oligonucleotide
  Sense strand starting at position 3255 of SEQ ID NO: 1560026
gugacagcuucuugcuaac

SEQ ID NO: 1570962 - RNA, 19 nt, Artificial Sequence
  Description of Artificial Sequence: Synthetic oligonucleotide
  Antisense strand to SEQ ID NO: 1570961
guuagcaagaagcugucac

SEQ ID NO: 1570963 - RNA, 19 nt, Artificial Sequence
  Description of Artificial Sequence: Synthetic oligonucleotide
  Sense strand starting at position 3441 of SEQ ID NO: 1560026
ucaguuucucauuguuacu

SEQ ID NO: 1570964 - RNA, 19 nt, Artificial Sequence
  Description of Artificial Sequence: Synthetic oligonucleotide
  Antisense strand to SEQ ID NO: 1570963
aguaacaaugagaaacuga

SEQ ID NO: 1570965 - RNA, 19 nt, Artificial Sequence
  Description of Artificial Sequence: Synthetic oligonucleotide
  Sense strand starting at position 3615 of SEQ ID NO: 1560026
gaguaaggaugucagacuu

SEQ ID NO: 1570966 - RNA, 19 nt, Artificial Sequence
  Description of Artificial Sequence: Synthetic oligonucleotide
  Antisense strand to SEQ ID NO: 1570965
aagucugacauccuuacuc

SEQ ID NO: 1570967 - RNA, 19 nt, Artificial Sequence
  Description of Artificial Sequence: Synthetic oligonucleotide
  Sense strand starting at position 3674 of SEQ ID NO: 1560026
ccaagagaugcagguaauc

SEQ ID NO: 1570968 - RNA, 19 nt, Artificial Sequence
  Description of Artificial Sequence: Synthetic oligonucleotide
  Antisense strand to SEQ ID NO: 1570967
gauuaccugcaucucuugg

SEQ ID NO: 1570969 - RNA, 19 nt, Artificial Sequence
  Description of Artificial Sequence: Synthetic oligonucleotide
  Sense strand starting at position 3679 of SEQ ID NO: 1560026
agaugcagguaaucuauau

SEQ ID NO: 1570970 - RNA, 19 nt, Artificial Sequence
  Description of Artificial Sequence: Synthetic oligonucleotide
  Antisense strand to SEQ ID NO: 1570969
auauagauuaccugcaucu

SEQ ID NO: 1570971 - RNA, 19 nt, Artificial Sequence
  Description of Artificial Sequence: Synthetic oligonucleotide
  Sense strand starting at position 3683 of SEQ ID NO: 1560026
gcagguaaucuauaucuca

SEQ ID NO: 1570972 - RNA, 19 nt, Artificial Sequence
  Description of Artificial Sequence: Synthetic oligonucleotide
  Antisense strand to SEQ ID NO: 1570971
ugagauauagauuaccugc

SEQ ID NO: 1570973 - RNA, 19 nt, Artificial Sequence
  Description of Artificial Sequence: Synthetic oligonucleotide
  Sense strand starting at position 3690 of SEQ ID NO: 1560026
aucuauaucucacgugaaa

SEQ ID NO: 1570974 - RNA, 19 nt, Artificial Sequence
  Description of Artificial Sequence: Synthetic oligonucleotide
  Antisense strand to SEQ ID NO: 1570973
uuucacgugagauauagau

SEQ ID NO: 1570975 - RNA, 19 nt, Artificial Sequence
  Description of Artificial Sequence: Synthetic oligonucleotide
  Sense strand starting at position 3726 of SEQ ID NO: 1560026
uugggaacuccucagcuuu

SEQ ID NO: 1570976 - RNA, 19 nt, Artificial Sequence
  Description of Artificial Sequence: Synthetic oligonucleotide
  Antisense strand to SEQ ID NO: 1570975
aaagcugaggaguucccaa

SEQ ID NO: 1570977 - RNA, 19 nt, Artificial Sequence
  Description of Artificial Sequence: Synthetic oligonucleotide
  Sense strand starting at position 3820 of SEQ ID NO: 1560026
caaacugugggucaugagu

SEQ ID NO: 1570978 - RNA, 19 nt, Artificial Sequence
  Description of Artificial Sequence: Synthetic oligonucleotide
  Antisense strand to SEQ ID NO: 1570977
acucaugacccacaguuug

SEQ ID NO: 1570979 - RNA, 19 nt, Artificial Sequence
  Description of Artificial Sequence: Synthetic oligonucleotide
  Sense strand starting at position 3822 of SEQ ID NO: 1560026
aacugugggucaugaguaa

SEQ ID NO: 1570980 - RNA, 19 nt, Artificial Sequence
  Description of Artificial Sequence: Synthetic oligonucleotide
  Antisense strand to SEQ ID NO: 1570979
uuacucaugacccacaguu

SEQ ID NO: 1570981 - RNA, 19 nt, Artificial Sequence
  Description of Artificial Sequence: Synthetic oligonucleotide
  Sense strand starting at position 3826 of SEQ ID NO: 1560026
gugggucaugaguaaacca

SEQ ID NO: 1570982 - RNA, 19 nt, Artificial Sequence
  Description of Artificial Sequence: Synthetic oligonucleotide
  Antisense strand to SEQ ID NO: 1570981
ugguuuacucaugacccac

SEQ ID NO: 1570983 - RNA, 19 nt, Artificial Sequence
  Description of Artificial Sequence: Synthetic oligonucleotide
  Sense strand starting at position 3834 of SEQ ID NO: 1560026
ugaguaaaccauggauuau

SEQ ID NO: 1570984 - RNA, 19 nt, Artificial Sequence
  Description of Artificial Sequence: Synthetic oligonucleotide
  Antisense strand to SEQ ID NO: 1570983
auaauccaugguuuacuca

SEQ ID NO: 1570985 - RNA, 19 nt, Artificial Sequence
  Description of Artificial Sequence: Synthetic oligonucleotide
  Sense strand starting at position 3843 of SEQ ID NO: 1560026
cauggauuaugacauauga

SEQ ID NO: 1570986 - RNA, 19 nt, Artificial Sequence
  Description of Artificial Sequence: Synthetic oligonucleotide
  Antisense strand to SEQ ID NO: 1570985
ucauaugucauaauccaug

SEQ ID NO: 1570987 - RNA, 19 nt, Artificial Sequence
  Description of Artificial Sequence: Synthetic oligonucleotide
  Sense strand starting at position 3859 of SEQ ID NO: 1560026
ugacaucacuuacauggau

SEQ ID NO: 1570988 - RNA, 19 nt, Artificial Sequence
  Description of Artificial Sequence: Synthetic oligonucleotide
  Antisense strand to SEQ ID NO: 1570987
auccauguaagugauguca

SEQ ID NO: 1570989 - RNA, 19 nt, Artificial Sequence
  Description of Artificial Sequence: Synthetic oligonucleotide
  Sense strand starting at position 396 of SEQ ID NO: 1560027
gggccaccucugugaugau

SEQ ID NO: 1570990 - RNA, 19 nt, Artificial Sequence
  Description of Artificial Sequence: Synthetic oligonucleotide
  Antisense strand to SEQ ID NO: 1570989
aucaucacagagguggccc

SEQ ID NO: 1570991 - RNA, 19 nt, Artificial Sequence
  Description of Artificial Sequence: Synthetic oligonucleotide
  Sense strand starting at position 403 of SEQ ID NO: 1560027
cucugugaugauggauaaa

SEQ ID NO: 1570992 - RNA, 19 nt, Artificial Sequence
  Description of Artificial Sequence: Synthetic oligonucleotide
  Antisense strand to SEQ ID NO: 1570991
uuuauccaucaucacagag

SEQ ID NO: 1570993 - RNA, 19 nt, Artificial Sequence
  Description of Artificial Sequence: Synthetic oligonucleotide
  Sense strand starting at position 415 of SEQ ID NO: 1560027
ggauaaauguuucucucca

SEQ ID NO: 1570994 - RNA, 19 nt, Artificial Sequence
  Description of Artificial Sequence: Synthetic oligonucleotide
  Antisense strand to SEQ ID NO: 1570993
uggagagaaacauuuaucc

SEQ ID NO: 1570995 - RNA, 19 nt, Artificial Sequence
  Description of Artificial Sequence: Synthetic oligonucleotide
  Sense strand starting at position 535 of SEQ ID NO: 1560027
uccgcucucccaugaguga

SEQ ID NO: 1570996 - RNA, 19 nt, Artificial Sequence
  Description of Artificial Sequence: Synthetic oligonucleotide
  Antisense strand to SEQ ID NO: 1570995
ucacucaugggagagcgga

SEQ ID NO: 1570997 - RNA, 19 nt, Artificial Sequence
  Description of Artificial Sequence: Synthetic oligonucleotide
  Sense strand starting at position 585 of SEQ ID NO: 1560027
gagcuuaggcgggauggau

SEQ ID NO: 1570998 - RNA, 19 nt, Artificial Sequence
  Description of Artificial Sequence: Synthetic oligonucleotide
  Antisense strand to SEQ ID NO: 1570997
auccaucccgccuaagcuc

SEQ ID NO: 1570999 - RNA, 19 nt, Artificial Sequence
  Description of Artificial Sequence: Synthetic oligonucleotide
  Sense strand starting at position 740 of SEQ ID NO: 1560027
acgggauaagucgagucau

SEQ ID NO: 1571000 - RNA, 19 nt, Artificial Sequence
  Description of Artificial Sequence: Synthetic oligonucleotide
  Antisense strand to SEQ ID NO: 1570999
augacucgacuuaucccgu

SEQ ID NO: 1571001 - RNA, 19 nt, Artificial Sequence
  Description of Artificial Sequence: Synthetic oligonucleotide
  Sense strand starting at position 741 of SEQ ID NO: 1560027
cgggauaagucgagucauc

SEQ ID NO: 1571002 - RNA, 19 nt, Artificial Sequence
  Description of Artificial Sequence: Synthetic oligonucleotide
  Antisense strand to SEQ ID NO: 1571001
gaugacucgacuuaucccg

SEQ ID NO: 1571003 - RNA, 19 nt, Artificial Sequence
  Description of Artificial Sequence: Synthetic oligonucleotide
  Sense strand starting at position 807 of SEQ ID NO: 1560027
cuggacuccugggaucaga

SEQ ID NO: 1571004 - RNA, 19 nt, Artificial Sequence
  Description of Artificial Sequence: Synthetic oligonucleotide
  Antisense strand to SEQ ID NO: 1571003
ucugaucccaggaguccag

SEQ ID NO: 1571005 - RNA, 19 nt, Artificial Sequence
  Description of Artificial Sequence: Synthetic oligonucleotide
  Sense strand starting at position 983 of SEQ ID NO: 1560027
cacuguugaccaugagugu

SEQ ID NO: 1571006 - RNA, 19 nt, Artificial Sequence
  Description of Artificial Sequence: Synthetic oligonucleotide
  Antisense strand to SEQ ID NO: 1571005
acacucauggucaacagug

SEQ ID NO: 1571007 - RNA, 19 nt, Artificial Sequence
  Description of Artificial Sequence: Synthetic oligonucleotide
  Sense strand starting at position 1089 of SEQ ID NO: 1560027
ugggucugaucugcagaca

SEQ ID NO: 1571008 - RNA, 19 nt, Artificial Sequence
  Description of Artificial Sequence: Synthetic oligonucleotide
  Antisense strand to SEQ ID NO: 1571007
ugucugcagaucagaccca

SEQ ID NO: 1571009 - RNA, 19 nt, Artificial Sequence
  Description of Artificial Sequence: Synthetic oligonucleotide
  Sense strand starting at position 1090 of SEQ ID NO: 1560027
gggucugaucugcagacaa

SEQ ID NO: 1571010 - RNA, 19 nt, Artificial Sequence
  Description of Artificial Sequence: Synthetic oligonucleotide
  Antisense strand to SEQ ID NO: 1571009
uugucugcagaucagaccc

SEQ ID NO: 1571011 - RNA, 19 nt, Artificial Sequence
  Description of Artificial Sequence: Synthetic oligonucleotide
  Sense strand starting at position 1217 of SEQ ID NO: 1560027
uccucaugcagguguguaa

SEQ ID NO: 1571012 - RNA, 19 nt, Artificial Sequence
  Description of Artificial Sequence: Synthetic oligonucleotide
  Antisense strand to SEQ ID NO: 1571011
uuacacaccugcaugagga

SEQ ID NO: 1571013 - RNA, 19 nt, Artificial Sequence
  Description of Artificial Sequence: Synthetic oligonucleotide
  Sense strand starting at position 1259 of SEQ ID NO: 1560027
gggccugucacuuggaaac

SEQ ID NO: 1571014 - RNA, 19 nt, Artificial Sequence
  Description of Artificial Sequence: Synthetic oligonucleotide
  Antisense strand to SEQ ID NO: 1571013
guuuccaagugacaggccc

SEQ ID NO: 1571015 - RNA, 19 nt, Artificial Sequence
  Description of Artificial Sequence: Synthetic oligonucleotide
  Sense strand starting at position 1521 of SEQ ID NO: 1560027
acuccugggucugaggaaa

SEQ ID NO: 1571016 - RNA, 19 nt, Artificial Sequence
  Description of Artificial Sequence: Synthetic oligonucleotide
  Antisense strand to SEQ ID NO: 1571015
uuuccucagacccaggagu

SEQ ID NO: 1571017 - RNA, 19 nt, Artificial Sequence
  Description of Artificial Sequence: Synthetic oligonucleotide
  Sense strand starting at position 1553 of SEQ ID NO: 1560027
cccagauuccagggucuga

SEQ ID NO: 1571018 - RNA, 19 nt, Artificial Sequence
  Description of Artificial Sequence: Synthetic oligonucleotide
  Antisense strand to SEQ ID NO: 1571017
ucagacccuggaaucuggg

SEQ ID NO: 1571019 - RNA, 19 nt, Artificial Sequence
  Description of Artificial Sequence: Synthetic oligonucleotide
  Sense strand starting at position 1620 of SEQ ID NO: 1560027
ggcugacuucucugguugu

SEQ ID NO: 1571020 - RNA, 19 nt, Artificial Sequence
  Description of Artificial Sequence: Synthetic oligonucleotide
  Antisense strand to SEQ ID NO: 1571019
acaaccagagaagucagcc

SEQ ID NO: 1571021 - RNA, 19 nt, Artificial Sequence
  Description of Artificial Sequence: Synthetic oligonucleotide
  Sense strand starting at position 1630 of SEQ ID NO: 1560027
ucugguugucucugaucca

SEQ ID NO: 1571022 - RNA, 19 nt, Artificial Sequence
  Description of Artificial Sequence: Synthetic oligonucleotide
  Antisense strand to SEQ ID NO: 1571021
uggaucagagacaaccaga

SEQ ID NO: 1571023 - RNA, 19 nt, Artificial Sequence
  Description of Artificial Sequence: Synthetic oligonucleotide
  Sense strand starting at position 2243 of SEQ ID NO: 1560027
cggaccuucuccucguuau

SEQ ID NO: 1571024 - RNA, 19 nt, Artificial Sequence
  Description of Artificial Sequence: Synthetic oligonucleotide
  Antisense strand to SEQ ID NO: 1571023
auaacgaggagaagguccg

SEQ ID NO: 1571025 - RNA, 19 nt, Artificial Sequence
  Description of Artificial Sequence: Synthetic oligonucleotide
  Sense strand starting at position 2244 of SEQ ID NO: 1560027
ggaccuucuccucguuauu

SEQ ID NO: 1571026 - RNA, 19 nt, Artificial Sequence
  Description of Artificial Sequence: Synthetic oligonucleotide
  Antisense strand to SEQ ID NO: 1571025
aauaacgaggagaaggucc

SEQ ID NO: 1571027 - RNA, 19 nt, Artificial Sequence
  Description of Artificial Sequence: Synthetic oligonucleotide
  Sense strand starting at position 2365 of SEQ ID NO: 1560027
ggccucucccaguguaacu

SEQ ID NO: 1571028 - RNA, 19 nt, Artificial Sequence
  Description of Artificial Sequence: Synthetic oligonucleotide
  Antisense strand to SEQ ID NO: 1571027
aguuacacugggagaggcc

SEQ ID NO: 1571029 - RNA, 19 nt, Artificial Sequence
  Description of Artificial Sequence: Synthetic oligonucleotide
  Sense strand starting at position 2481 of SEQ ID NO: 1560027
ccaguaugcccggagaugu

SEQ ID NO: 1571030 - RNA, 19 nt, Artificial Sequence
  Description of Artificial Sequence: Synthetic oligonucleotide
  Antisense strand to SEQ ID NO: 1571029
acaucuccgggcauacugg

SEQ ID NO: 1571031 - RNA, 19 nt, Artificial Sequence
  Description of Artificial Sequence: Synthetic oligonucleotide
  Sense strand starting at position 2541 of SEQ ID NO: 1560027
accaguagccuggaaucaa

SEQ ID NO: 1571032 - RNA, 19 nt, Artificial Sequence
  Description of Artificial Sequence: Synthetic oligonucleotide
  Antisense strand to SEQ ID NO: 1571031
uugauuccaggcuacuggu

SEQ ID NO: 1571033 - RNA, 19 nt, Artificial Sequence
  Description of Artificial Sequence: Synthetic oligonucleotide
  Sense strand starting at position 2549 of SEQ ID NO: 1560027
ccuggaaucaaccgguuua

SEQ ID NO: 1571034 - RNA, 19 nt, Artificial Sequence
  Description of Artificial Sequence: Synthetic oligonucleotide
  Antisense strand to SEQ ID NO: 1571033
uaaaccgguugauuccagg

SEQ ID NO: 1571035 - RNA, 19 nt, Artificial Sequence
  Description of Artificial Sequence: Synthetic oligonucleotide
  Sense strand starting at position 2550 of SEQ ID NO: 1560027
cuggaaucaaccgguuuaa

SEQ ID NO: 1571036 - RNA, 19 nt, Artificial Sequence
  Description of Artificial Sequence: Synthetic oligonucleotide
  Antisense strand to SEQ ID NO: 1571035
uuaaaccgguugauuccag

SEQ ID NO: 1571037 - RNA, 19 nt, Artificial Sequence
  Description of Artificial Sequence: Synthetic oligonucleotide
  Sense strand starting at position 2560 of SEQ ID NO: 1560027
ccgguuuaaucucuuauuu

SEQ ID NO: 1571038 - RNA, 19 nt, Artificial Sequence
  Description of Artificial Sequence: Synthetic oligonucleotide
  Antisense strand to SEQ ID NO: 1571037
aaauaagagauuaaaccgg

SEQ ID NO: 1571039 - RNA, 19 nt, Artificial Sequence
  Description of Artificial Sequence: Synthetic oligonucleotide
  Sense strand starting at position 2944 of SEQ ID NO: 1560027
acuaguugcccaggacagu

SEQ ID NO: 1571040 - RNA, 19 nt, Artificial Sequence
  Description of Artificial Sequence: Synthetic oligonucleotide
  Antisense strand to SEQ ID NO: 1571039
acuguccugggcaacuagu

SEQ ID NO: 1571041 - RNA, 19 nt, Artificial Sequence
  Description of Artificial Sequence: Synthetic oligonucleotide
  Sense strand starting at position 3058 of SEQ ID NO: 1560027
ggcuuugccugcucagaca

SEQ ID NO: 1571042 - RNA, 19 nt, Artificial Sequence
  Description of Artificial Sequence: Synthetic oligonucleotide
  Antisense strand to SEQ ID NO: 1571041
ugucugagcaggcaaagcc

SEQ ID NO: 1571043 - RNA, 19 nt, Artificial Sequence
  Description of Artificial Sequence: Synthetic oligonucleotide
  Sense strand starting at position 3079 of SEQ ID NO: 1560027
cagagaaggcuuggauuac

SEQ ID NO: 1571044 - RNA, 19 nt, Artificial Sequence
  Description of Artificial Sequence: Synthetic oligonucleotide
  Antisense strand to SEQ ID NO: 1571043
guaauccaagccuucucug

SEQ ID NO: 1571045 - RNA, 19 nt, Artificial Sequence
  Description of Artificial Sequence: Synthetic oligonucleotide
  Sense strand starting at position 3080 of SEQ ID NO: 1560027
agagaaggcuuggauuaca

SEQ ID NO: 1571046 - RNA, 19 nt, Artificial Sequence
  Description of Artificial Sequence: Synthetic oligonucleotide
  Antisense strand to SEQ ID NO: 1571045
uguaauccaagccuucucu

SEQ ID NO: 1571047 - RNA, 19 nt, Artificial Sequence
  Description of Artificial Sequence: Synthetic oligonucleotide
  Sense strand starting at position 3097 of SEQ ID NO: 1560027
caggucagccugggaguua

SEQ ID NO: 1571048 - RNA, 19 nt, Artificial Sequence
  Description of Artificial Sequence: Synthetic oligonucleotide
  Antisense strand to SEQ ID NO: 1571047
uaacucccaggcugaccug

SEQ ID NO: 1571049 - RNA, 19 nt, Artificial Sequence
  Description of Artificial Sequence: Synthetic oligonucleotide
  Sense strand starting at position 3110 of SEQ ID NO: 1560027
gaguuauuagacuggucaa

SEQ ID NO: 1571050 - RNA, 19 nt, Artificial Sequence
  Description of Artificial Sequence: Synthetic oligonucleotide
  Antisense strand to SEQ ID NO: 1571049
uugaccagucuaauaacuc

SEQ ID NO: 1571051 - RNA, 19 nt, Artificial Sequence
  Description of Artificial Sequence: Synthetic oligonucleotide
  Sense strand starting at position 3111 of SEQ ID NO: 1560027
aguuauuagacuggucaag

SEQ ID NO: 1571052 - RNA, 19 nt, Artificial Sequence
  Description of Artificial Sequence: Synthetic oligonucleotide
  Antisense strand to SEQ ID NO: 1571051
cuugaccagucuaauaacu

SEQ ID NO: 1571053 - RNA, 19 nt, Artificial Sequence
  Description of Artificial Sequence: Synthetic oligonucleotide
  Sense strand starting at position 3113 of SEQ ID NO: 1560027
uuauuagacuggucaaggu

SEQ ID NO: 1571054 - RNA, 19 nt, Artificial Sequence
  Description of Artificial Sequence: Synthetic oligonucleotide
  Antisense strand to SEQ ID NO: 1571053
accuugaccagucuaauaa

SEQ ID NO: 1571055 - RNA, 19 nt, Artificial Sequence
  Description of Artificial Sequence: Synthetic oligonucleotide
  Sense strand starting at position 3135 of SEQ ID NO: 1560027
uuuauccauuggucauaca

SEQ ID NO: 1571056 - RNA, 19 nt, Artificial Sequence
  Description of Artificial Sequence: Synthetic oligonucleotide
  Antisense strand to SEQ ID NO: 1571055
uguaugaccaauggauaaa

SEQ ID NO: 1571057 - RNA, 19 nt, Artificial Sequence
  Description of Artificial Sequence: Synthetic oligonucleotide
  Sense strand starting at position 3138 of SEQ ID NO: 1560027
auccauuggucauacagga

SEQ ID NO: 1571058 - RNA, 19 nt, Artificial Sequence
  Description of Artificial Sequence: Synthetic oligonucleotide
  Antisense strand to SEQ ID NO: 1571057
uccuguaugaccaauggau

SEQ ID NO: 1571059 - RNA, 19 nt, Artificial Sequence
  Description of Artificial Sequence: Synthetic oligonucleotide
  Sense strand starting at position 3320 of SEQ ID NO: 1560027
guguuaccauguccagcua

SEQ ID NO: 1571060 - RNA, 19 nt, Artificial Sequence
  Description of Artificial Sequence: Synthetic oligonucleotide
  Antisense strand to SEQ ID NO: 1571059
uagcuggacaugguaacac

SEQ ID NO: 1571061 - RNA, 19 nt, Artificial Sequence
  Description of Artificial Sequence: Synthetic oligonucleotide
  Sense strand starting at position 3356 of SEQ ID NO: 1560027
guaauagaaacaggguauu

SEQ ID NO: 1571062 - RNA, 19 nt, Artificial Sequence
  Description of Artificial Sequence: Synthetic oligonucleotide
  Antisense strand to SEQ ID NO: 1571061
aauacccuguuucuauuac

SEQ ID NO: 1571063 - RNA, 19 nt, Artificial Sequence
  Description of Artificial Sequence: Synthetic oligonucleotide
  Sense strand starting at position 3481 of SEQ ID NO: 1560027
acuguuacauugggaaaga

SEQ ID NO: 1571064 - RNA, 19 nt, Artificial Sequence
  Description of Artificial Sequence: Synthetic oligonucleotide
  Antisense strand to SEQ ID NO: 1571063
ucuuucccaauguaacagu

SEQ ID NO: 1571065 - RNA, 19 nt, Artificial Sequence
  Description of Artificial Sequence: Synthetic oligonucleotide
  Sense strand starting at position 3759 of SEQ ID NO: 1560027
agggaagguuuguuugcaa

SEQ ID NO: 1571066 - RNA, 19 nt, Artificial Sequence
  Description of Artificial Sequence: Synthetic oligonucleotide
  Antisense strand to SEQ ID NO: 1571065
uugcaaacaaaccuucccu

SEQ ID NO: 1571067 - RNA, 19 nt, Artificial Sequence
  Description of Artificial Sequence: Synthetic oligonucleotide
  Sense strand starting at position 3812 of SEQ ID NO: 1560027
uggagcaucccaggauaua

SEQ ID NO: 1571068 - RNA, 19 nt, Artificial Sequence
  Description of Artificial Sequence: Synthetic oligonucleotide
  Antisense strand to SEQ ID NO: 1571067
uauauccugggaugcucca

SEQ ID NO: 1571069 - RNA, 19 nt, Artificial Sequence
  Description of Artificial Sequence: Synthetic oligonucleotide
  Sense strand starting at position 54 of SEQ ID NO: 1560028
ccuguaaucugaggcaggu

SEQ ID NO: 1571070 - RNA, 19 nt, Artificial Sequence
  Description of Artificial Sequence: Synthetic oligonucleotide
  Antisense strand to SEQ ID NO: 1571069
accugccucagauuacagg

SEQ ID NO: 1571071 - RNA, 19 nt, Artificial Sequence
  Description of Artificial Sequence: Synthetic oligonucleotide
  Sense strand starting at position 247 of SEQ ID NO: 1560028
cagggcaggucucuauaau

SEQ ID NO: 1571072 - RNA, 19 nt, Artificial Sequence
  Description of Artificial Sequence: Synthetic oligonucleotide
  Antisense strand to SEQ ID NO: 1571071
auuauagagaccugcccug

SEQ ID NO: 1571073 - RNA, 19 nt, Artificial Sequence
  Description of Artificial Sequence: Synthetic oligonucleotide
  Sense strand starting at position 248 of SEQ ID NO: 1560028
agggcaggucucuauaaug

SEQ ID NO: 1571074 - RNA, 19 nt, Artificial Sequence
  Description of Artificial Sequence: Synthetic oligonucleotide
  Antisense strand to SEQ ID NO: 1571073
cauuauagagaccugcccu

SEQ ID NO: 1571075 - RNA, 19 nt, Artificial Sequence
  Description of Artificial Sequence: Synthetic oligonucleotide
  Sense strand starting at position 253 of SEQ ID NO: 1560028
aggucucuauaaugugaua

SEQ ID NO: 1571076 - RNA, 19 nt, Artificial Sequence
  Description of Artificial Sequence: Synthetic oligonucleotide
  Antisense strand to SEQ ID NO: 1571075
uaucacauuauagagaccu

SEQ ID NO: 1571077 - RNA, 19 nt, Artificial Sequence
  Description of Artificial Sequence: Synthetic oligonucleotide
  Sense strand starting at position 256 of SEQ ID NO: 1560028
ucucuauaaugugauagaa

SEQ ID NO: 1571078 - RNA, 19 nt, Artificial Sequence
  Description of Artificial Sequence: Synthetic oligonucleotide
  Antisense strand to SEQ ID NO: 1571077
uucuaucacauuauagaga

SEQ ID NO: 1571079 - RNA, 19 nt, Artificial Sequence
  Description of Artificial Sequence: Synthetic oligonucleotide
  Sense strand starting at position 277 of SEQ ID NO: 1560028
uccauuaugucccauacag

SEQ ID NO: 1571080 - RNA, 19 nt, Artificial Sequence
  Description of Artificial Sequence: Synthetic oligonucleotide
  Antisense strand to SEQ ID NO: 1571079
cuguaugggacauaaugga

SEQ ID NO: 1571081 - RNA, 19 nt, Artificial Sequence
  Description of Artificial Sequence: Synthetic oligonucleotide
  Sense strand starting at position 319 of SEQ ID NO: 1560028
ccaggagugucacugucaa

SEQ ID NO: 1571082 - RNA, 19 nt, Artificial Sequence
  Description of Artificial Sequence: Synthetic oligonucleotide
  Antisense strand to SEQ ID NO: 1571081
uugacagugacacuccugg

SEQ ID NO: 1571083 - RNA, 19 nt, Artificial Sequence
  Description of Artificial Sequence: Synthetic oligonucleotide
  Sense strand starting at position 407 of SEQ ID NO: 1560028
gcagucugcccuugucaca

SEQ ID NO: 1571084 - RNA, 19 nt, Artificial Sequence
  Description of Artificial Sequence: Synthetic oligonucleotide
  Antisense strand to SEQ ID NO: 1571083
ugugacaagggcagacugc

SEQ ID NO: 1571085 - RNA, 19 nt, Artificial Sequence
  Description of Artificial Sequence: Synthetic oligonucleotide
  Sense strand starting at position 502 of SEQ ID NO: 1560028
guucuaugauggcccaaga

SEQ ID NO: 1571086 - RNA, 19 nt, Artificial Sequence
  Description of Artificial Sequence: Synthetic oligonucleotide
  Antisense strand to SEQ ID NO: 1571085
ucuugggccaucauagaac

SEQ ID NO: 1571087 - RNA, 19 nt, Artificial Sequence
  Description of Artificial Sequence: Synthetic oligonucleotide
  Sense strand starting at position 537 of SEQ ID NO: 1560028
uccagauugugccuguaac

SEQ ID NO: 1571088 - RNA, 19 nt, Artificial Sequence
  Description of Artificial Sequence: Synthetic oligonucleotide
  Antisense strand to SEQ ID NO: 1571087
guuacaggcacaaucugga

SEQ ID NO: 1571089 - RNA, 19 nt, Artificial Sequence
  Description of Artificial Sequence: Synthetic oligonucleotide
  Sense strand starting at position 538 of SEQ ID NO: 1560028
ccagauugugccuguaacu

SEQ ID NO: 1571090 - RNA, 19 nt, Artificial Sequence
  Description of Artificial Sequence: Synthetic oligonucleotide
  Antisense strand to SEQ ID NO: 1571089
aguuacaggcacaaucugg

SEQ ID NO: 1571091 - RNA, 19 nt, Artificial Sequence
  Description of Artificial Sequence: Synthetic oligonucleotide
  Sense strand starting at position 547 of SEQ ID NO: 1560028
gccuguaacuuaucagaac

SEQ ID NO: 1571092 - RNA, 19 nt, Artificial Sequence
  Description of Artificial Sequence: Synthetic oligonucleotide
  Antisense strand to SEQ ID NO: 1571091
guucugauaaguuacaggc

SEQ ID NO: 1571093 - RNA, 19 nt, Artificial Sequence
  Description of Artificial Sequence: Synthetic oligonucleotide
  Sense strand starting at position 648 of SEQ ID NO: 1560028
ccagcauugucucugccaa

SEQ ID NO: 1571094 - RNA, 19 nt, Artificial Sequence
  Description of Artificial Sequence: Synthetic oligonucleotide
  Antisense strand to SEQ ID NO: 1571093
uuggcagagacaaugcugg

SEQ ID NO: 1571095 - RNA, 19 nt, Artificial Sequence
  Description of Artificial Sequence: Synthetic oligonucleotide
  Sense strand starting at position 650 of SEQ ID NO: 1560028
agcauugucucugccaaau

SEQ ID NO: 1571096 - RNA, 19 nt, Artificial Sequence
  Description of Artificial Sequence: Synthetic oligonucleotide
  Antisense strand to SEQ ID NO: 1571095
auuuggcagagacaaugcu

SEQ ID NO: 1571097 - RNA, 19 nt, Artificial Sequence
  Description of Artificial Sequence: Synthetic oligonucleotide
  Sense strand starting at position 661 of SEQ ID NO: 1560028
ugccaaauaucagggcuua

SEQ ID NO: 1571098 - RNA, 19 nt, Artificial Sequence
  Description of Artificial Sequence: Synthetic oligonucleotide
  Antisense strand to SEQ ID NO: 1571097
uaagcccugauauuuggca

SEQ ID NO: 1571099 - RNA, 19 nt, Artificial Sequence
  Description of Artificial Sequence: Synthetic oligonucleotide
  Sense strand starting at position 662 of SEQ ID NO: 1560028
gccaaauaucagggcuuau

SEQ ID NO: 1571100 - RNA, 19 nt, Artificial Sequence
  Description of Artificial Sequence: Synthetic oligonucleotide
  Antisense strand to SEQ ID NO: 1571099
auaagcccugauauuuggc

SEQ ID NO: 1571101 - RNA, 19 nt, Artificial Sequence
  Description of Artificial Sequence: Synthetic oligonucleotide
  Sense strand starting at position 745 of SEQ ID NO: 1560028
ccaggacuaucccuauguu

SEQ ID NO: 1571102 - RNA, 19 nt, Artificial Sequence
  Description of Artificial Sequence: Synthetic oligonucleotide
  Antisense strand to SEQ ID NO: 1571101
aacauagggauaguccugg

SEQ ID NO: 1571103 - RNA, 19 nt, Artificial Sequence
  Description of Artificial Sequence: Synthetic oligonucleotide
  Sense strand starting at position 748 of SEQ ID NO: 1560028
ggacuaucccuauguugcu

SEQ ID NO: 1571104 - RNA, 19 nt, Artificial Sequence
  Description of Artificial Sequence: Synthetic oligonucleotide
  Antisense strand to SEQ ID NO: 1571103
agcaacauagggauagucc

SEQ ID NO: 1571105 - RNA, 19 nt, Artificial Sequence
  Description of Artificial Sequence: Synthetic oligonucleotide
  Sense strand starting at position 903 of SEQ ID NO: 1560028
cuaggaaugucccaucaug

SEQ ID NO: 1571106 - RNA, 19 nt, Artificial Sequence
  Description of Artificial Sequence: Synthetic oligonucleotide
  Antisense strand to SEQ ID NO: 1571105
caugaugggacauuccuag

SEQ ID NO: 1571107 - RNA, 19 nt, Artificial Sequence
  Description of Artificial Sequence: Synthetic oligonucleotide
  Sense strand starting at position 944 of SEQ ID NO: 1560028
ccagaacugugccaugaug

SEQ ID NO: 1571108 - RNA, 19 nt, Artificial Sequence
  Description of Artificial Sequence: Synthetic oligonucleotide
  Antisense strand to SEQ ID NO: 1571107
caucauggcacaguucugg

SEQ ID NO: 1571109 - RNA, 19 nt, Artificial Sequence
  Description of Artificial Sequence: Synthetic oligonucleotide
  Sense strand starting at position 1022 of SEQ ID NO: 1560028
ccaggagugucaccacuaa

SEQ ID NO: 1571110 - RNA, 19 nt, Artificial Sequence
  Description of Artificial Sequence: Synthetic oligonucleotide
  Antisense strand to SEQ ID NO: 1571109
uuaguggugacacuccugg

SEQ ID NO: 1571111 - RNA, 19 nt, Artificial Sequence
  Description of Artificial Sequence: Synthetic oligonucleotide
  Sense strand starting at position 1062 of SEQ ID NO: 1560028
ccagguaucccaggacuau

SEQ ID NO: 1571112 - RNA, 19 nt, Artificial Sequence
  Description of Artificial Sequence: Synthetic oligonucleotide
  Antisense strand to SEQ ID NO: 1571111
auaguccugggauaccugg

SEQ ID NO: 1571113 - RNA, 19 nt, Artificial Sequence
  Description of Artificial Sequence: Synthetic oligonucleotide
  Sense strand starting at position 1107 of SEQ ID NO: 1560028
aagugaaauucugcccuga

SEQ ID NO: 1571114 - RNA, 19 nt, Artificial Sequence
  Description of Artificial Sequence: Synthetic oligonucleotide
  Antisense strand to SEQ ID NO: 1571113
ucagggcagaauuucacuu

SEQ ID NO: 1571115 - RNA, 19 nt, Artificial Sequence
  Description of Artificial Sequence: Synthetic oligonucleotide
  Sense strand starting at position 1109 of SEQ ID NO: 1560028
gugaaauucugcccugaca

SEQ ID NO: 1571116 - RNA, 19 nt, Artificial Sequence
  Description of Artificial Sequence: Synthetic oligonucleotide
  Antisense strand to SEQ ID NO: 1571115
ugucagggcagaauuucac

SEQ ID NO: 1571117 - RNA, 19 nt, Artificial Sequence
  Description of Artificial Sequence: Synthetic oligonucleotide
  Sense strand starting at position 1151 of SEQ ID NO: 1560028
caaauaaagucagguguaa

SEQ ID NO: 1571118 - RNA, 19 nt, Artificial Sequence
  Description of Artificial Sequence: Synthetic oligonucleotide
  Antisense strand to SEQ ID NO: 1571117
uuacaccugacuuuauuug

SEQ ID NO: 1571119 - RNA, 19 nt, Artificial Sequence
  Description of Artificial Sequence: Synthetic oligonucleotide
  Sense strand starting at position 1155 of SEQ ID NO: 1560028
uaaagucagguguaaaguu

SEQ ID NO: 1571120 - RNA, 19 nt, Artificial Sequence
  Description of Artificial Sequence: Synthetic oligonucleotide
  Antisense strand to SEQ ID NO: 1571119
aacuuuacaccugacuuua

SEQ ID NO: 1571121 - RNA, 19 nt, Artificial Sequence
  Description of Artificial Sequence: Synthetic oligonucleotide
  Sense strand starting at position 1206 of SEQ ID NO: 1560028
ugugaaggcuuguaaugac

SEQ ID NO: 1571122 - RNA, 19 nt, Artificial Sequence
  Description of Artificial Sequence: Synthetic oligonucleotide
  Antisense strand to SEQ ID NO: 1571121
gucauuacaagccuucaca

SEQ ID NO: 1571123 - RNA, 19 nt, Artificial Sequence
  Description of Artificial Sequence: Synthetic oligonucleotide
  Sense strand starting at position 1253 of SEQ ID NO: 1560028
ugagaaaccuuguucucug

SEQ ID NO: 1571124 - RNA, 19 nt, Artificial Sequence
  Description of Artificial Sequence: Synthetic oligonucleotide
  Antisense strand to SEQ ID NO: 1571123
cagagaacaagguuucuca

SEQ ID NO: 1571125 - RNA, 19 nt, Artificial Sequence
  Description of Artificial Sequence: Synthetic oligonucleotide
  Sense strand starting at position 1254 of SEQ ID NO: 1560028
gagaaaccuuguucucuga

SEQ ID NO: 1571126 - RNA, 19 nt, Artificial Sequence
  Description of Artificial Sequence: Synthetic oligonucleotide
  Antisense strand to SEQ ID NO: 1571125
ucagagaacaagguuucuc

SEQ ID NO: 1571127 - RNA, 19 nt, Artificial Sequence
  Description of Artificial Sequence: Synthetic oligonucleotide
  Sense strand starting at position 1274 of SEQ ID NO: 1560028
aucauagacucugggaaac

SEQ ID NO: 1571128 - RNA, 19 nt, Artificial Sequence
  Description of Artificial Sequence: Synthetic oligonucleotide
  Antisense strand to SEQ ID NO: 1571127
guuucccagagucuaugau

SEQ ID NO: 1571129 - RNA, 19 nt, Artificial Sequence
  Description of Artificial Sequence: Synthetic oligonucleotide
  Sense strand starting at position 1317 of SEQ ID NO: 1560028
gucagaagggaucgucuca

SEQ ID NO: 1571130 - RNA, 19 nt, Artificial Sequence
  Description of Artificial Sequence: Synthetic oligonucleotide
  Antisense strand to SEQ ID NO: 1571129
ugagacgaucccuucugac

SEQ ID NO: 1571131 - RNA, 19 nt, Artificial Sequence
  Description of Artificial Sequence: Synthetic oligonucleotide
  Sense strand starting at position 1483 of SEQ ID NO: 1560028
guccaauucccagagcuga

SEQ ID NO: 1571132 - RNA, 19 nt, Artificial Sequence
  Description of Artificial Sequence: Synthetic oligonucleotide
  Antisense strand to SEQ ID NO: 1571131
ucagcucugggaauuggac

SEQ ID NO: 1571133 - RNA, 19 nt, Artificial Sequence
  Description of Artificial Sequence: Synthetic oligonucleotide
  Sense strand starting at position 3532 of SEQ ID NO: 1560028
cccucugauccagaugucu

SEQ ID NO: 1571134 - RNA, 19 nt, Artificial Sequence
  Description of Artificial Sequence: Synthetic oligonucleotide
  Antisense strand to SEQ ID NO: 1571133
agacaucuggaucagaggg

SEQ ID NO: 1571135 - RNA, 19 nt, Artificial Sequence
  Description of Artificial Sequence: Synthetic oligonucleotide
  Sense strand starting at position 3682 of SEQ ID NO: 1560028
ccuccuaauuagcgcuuaa

SEQ ID NO: 1571136 - RNA, 19 nt, Artificial Sequence
  Description of Artificial Sequence: Synthetic oligonucleotide
  Antisense strand to SEQ ID NO: 1571135
uuaagcgcuaauuaggagg

SEQ ID NO: 1571137 - RNA, 19 nt, Artificial Sequence
  Description of Artificial Sequence: Synthetic oligonucleotide
  Sense strand starting at position 3723 of SEQ ID NO: 1560028
uaguuagcgcgcuggugaa

SEQ ID NO: 1571138 - RNA, 19 nt, Artificial Sequence
  Description of Artificial Sequence: Synthetic oligonucleotide
  Antisense strand to SEQ ID NO: 1571137
uucaccagcgcgcuaacua

SEQ ID NO: 1571139 - RNA, 19 nt, Artificial Sequence
  Description of Artificial Sequence: Synthetic oligonucleotide
  Sense strand starting at position 3902 of SEQ ID NO: 1560028
ggcagaaggacucgucuaa

SEQ ID NO: 1571140 - RNA, 19 nt, Artificial Sequence
  Description of Artificial Sequence: Synthetic oligonucleotide
  Antisense strand to SEQ ID NO: 1571139
uuagacgaguccuucugcc

SEQ ID NO: 1571141 - RNA, 19 nt, Artificial Sequence
  Description of Artificial Sequence: Synthetic oligonucleotide
  Sense strand starting at position 3913 of SEQ ID NO: 1560028
ucgucuaaaggaugggaaa

SEQ ID NO: 1571142 - RNA, 19 nt, Artificial Sequence
  Description of Artificial Sequence: Synthetic oligonucleotide
  Antisense strand to SEQ ID NO: 1571141
uuucccauccuuuagacga

SEQ ID NO: 1571143 - RNA, 19 nt, Artificial Sequence
  Description of Artificial Sequence: Synthetic oligonucleotide
  Sense strand starting at position 3914 of SEQ ID NO: 1560028
cgucuaaaggaugggaaau

SEQ ID NO: 1571144 - RNA, 19 nt, Artificial Sequence
  Description of Artificial Sequence: Synthetic oligonucleotide
  Antisense strand to SEQ ID NO: 1571143
auuucccauccuuuagacg

SEQ ID NO: 1571145 - RNA, 19 nt, Artificial Sequence
  Description of Artificial Sequence: Synthetic oligonucleotide
  Sense strand starting at position 3916 of SEQ ID NO: 1560028
ucuaaaggaugggaaauaa

SEQ ID NO: 1571146 - RNA, 19 nt, Artificial Sequence
  Description of Artificial Sequence: Synthetic oligonucleotide
  Antisense strand to SEQ ID NO: 1571145
uuauuucccauccuuuaga

SEQ ID NO: 1571147 - RNA, 19 nt, Artificial Sequence
  Description of Artificial Sequence: Synthetic oligonucleotide
  Sense strand starting at position 3950 of SEQ ID NO: 1560028
ccuccuucuggcugcaaau

SEQ ID NO: 1571148 - RNA, 19 nt, Artificial Sequence
  Description of Artificial Sequence: Synthetic oligonucleotide
  Antisense strand to SEQ ID NO: 1571147
auuugcagccagaaggagg

SEQ ID NO: 1571149 - RNA, 19 nt, Artificial Sequence
  Description of Artificial Sequence: Synthetic oligonucleotide
  Sense strand starting at position 542 of SEQ ID NO: 1560029
gugacuccguuccuagaua

SEQ ID NO: 1571150 - RNA, 19 nt, Artificial Sequence
  Description of Artificial Sequence: Synthetic oligonucleotide
  Antisense strand to SEQ ID NO: 1571149
uaucuaggaacggagucac

SEQ ID NO: 1571151 - RNA, 19 nt, Artificial Sequence
  Description of Artificial Sequence: Synthetic oligonucleotide
  Sense strand starting at position 839 of SEQ ID NO: 1560029
agguccaguccuuagcauu

SEQ ID NO: 1571152 - RNA, 19 nt, Artificial Sequence
  Description of Artificial Sequence: Synthetic oligonucleotide
  Antisense strand to SEQ ID NO: 1571151
aaugcuaaggacuggaccu

SEQ ID NO: 1571153 - RNA, 19 nt, Artificial Sequence
  Description of Artificial Sequence: Synthetic oligonucleotide
  Sense strand starting at position 884 of SEQ ID NO: 1560029
ugagguggccacuguuaau

SEQ ID NO: 1571154 - RNA, 19 nt, Artificial Sequence
  Description of Artificial Sequence: Synthetic oligonucleotide
  Antisense strand to SEQ ID NO: 1571153
auuaacaguggccaccuca

SEQ ID NO: 1571155 - RNA, 19 nt, Artificial Sequence
  Description of Artificial Sequence: Synthetic oligonucleotide
  Sense strand starting at position 1173 of SEQ ID NO: 1560029
ucucaaguguuucuaagaa

SEQ ID NO: 1571156 - RNA, 19 nt, Artificial Sequence
  Description of Artificial Sequence: Synthetic oligonucleotide
  Antisense strand to SEQ ID NO: 1571155
uucuuagaaacacuugaga

SEQ ID NO: 1571157 - RNA, 19 nt, Artificial Sequence
  Description of Artificial Sequence: Synthetic oligonucleotide
  Sense strand starting at position 1186 of SEQ ID NO: 1560029
uaagaaaugugggcaaagu

SEQ ID NO: 1571158 - RNA, 19 nt, Artificial Sequence
  Description of Artificial Sequence: Synthetic oligonucleotide
  Antisense strand to SEQ ID NO: 1571157
acuuugcccacauuucuua

SEQ ID NO: 1571159 - RNA, 19 nt, Artificial Sequence
  Description of Artificial Sequence: Synthetic oligonucleotide
  Sense strand starting at position 1289 of SEQ ID NO: 1560029
acacgaauucucugucuug

SEQ ID NO: 1571160 - RNA, 19 nt, Artificial Sequence
  Description of Artificial Sequence: Synthetic oligonucleotide
  Antisense strand to SEQ ID NO: 1571159
caagacagagaauucgugu

SEQ ID NO: 1571161 - RNA, 19 nt, Artificial Sequence
  Description of Artificial Sequence: Synthetic oligonucleotide
  Sense strand starting at position 1290 of SEQ ID NO: 1560029
cacgaauucucugucuuga

SEQ ID NO: 1571162 - RNA, 19 nt, Artificial Sequence
  Description of Artificial Sequence: Synthetic oligonucleotide
  Antisense strand to SEQ ID NO: 1571161
ucaagacagagaauucgug

SEQ ID NO: 1571163 - RNA, 19 nt, Artificial Sequence
  Description of Artificial Sequence: Synthetic oligonucleotide
  Sense strand starting at position 1292 of SEQ ID NO: 1560029
cgaauucucugucuugaua

SEQ ID NO: 1571164 - RNA, 19 nt, Artificial Sequence
  Description of Artificial Sequence: Synthetic oligonucleotide
  Antisense strand to SEQ ID NO: 1571163
uaucaagacagagaauucg

SEQ ID NO: 1571165 - RNA, 19 nt, Artificial Sequence
  Description of Artificial Sequence: Synthetic oligonucleotide
  Sense strand starting at position 1300 of SEQ ID NO: 1560029
cugucuugauauucgauca

SEQ ID NO: 1571166 - RNA, 19 nt, Artificial Sequence
  Description of Artificial Sequence: Synthetic oligonucleotide
  Antisense strand to SEQ ID NO: 1571165
ugaucgaauaucaagacag

SEQ ID NO: 1571167 - RNA, 19 nt, Artificial Sequence
  Description of Artificial Sequence: Synthetic oligonucleotide
  Sense strand starting at position 1450 of SEQ ID NO: 1560029
gagggaucuuugcccagaa

SEQ ID NO: 1571168 - RNA, 19 nt, Artificial Sequence
  Description of Artificial Sequence: Synthetic oligonucleotide
  Antisense strand to SEQ ID NO: 1571167
uucugggcaaagaucccuc

SEQ ID NO: 1571169 - RNA, 19 nt, Artificial Sequence
  Description of Artificial Sequence: Synthetic oligonucleotide
  Sense strand starting at position 1451 of SEQ ID NO: 1560029
agggaucuuugcccagaag

SEQ ID NO: 1571170 - RNA, 19 nt, Artificial Sequence
  Description of Artificial Sequence: Synthetic oligonucleotide
  Antisense strand to SEQ ID NO: 1571169
cuucugggcaaagaucccu

SEQ ID NO: 1571171 - RNA, 19 nt, Artificial Sequence
  Description of Artificial Sequence: Synthetic oligonucleotide
  Sense strand starting at position 1714 of SEQ ID NO: 1560029
ugucuucuccaaggagucu

SEQ ID NO: 1571172 - RNA, 19 nt, Artificial Sequence
  Description of Artificial Sequence: Synthetic oligonucleotide
  Antisense strand to SEQ ID NO: 1571171
agacuccuuggagaagaca

SEQ ID NO: 1571173 - RNA, 19 nt, Artificial Sequence
  Description of Artificial Sequence: Synthetic oligonucleotide
  Sense strand starting at position 1840 of SEQ ID NO: 1560029
ggcccagguacucacagau

SEQ ID NO: 1571174 - RNA, 19 nt, Artificial Sequence
  Description of Artificial Sequence: Synthetic oligonucleotide
  Antisense strand to SEQ ID NO: 1571173
aucugugaguaccugggcc

SEQ ID NO: 1571175 - RNA, 19 nt, Artificial Sequence
  Description of Artificial Sequence: Synthetic oligonucleotide
  Sense strand starting at position 2077 of SEQ ID NO: 1560029
cguucugugguagauagaa

SEQ ID NO: 1571176 - RNA, 19 nt, Artificial Sequence
  Description of Artificial Sequence: Synthetic oligonucleotide
  Antisense strand to SEQ ID NO: 1571175
uucuaucuaccacagaacg

SEQ ID NO: 1571177 - RNA, 19 nt, Artificial Sequence
  Description of Artificial Sequence: Synthetic oligonucleotide
  Sense strand starting at position 2141 of SEQ ID NO: 1560029
cuccaaucgccucauugua

SEQ ID NO: 1571178 - RNA, 19 nt, Artificial Sequence
  Description of Artificial Sequence: Synthetic oligonucleotide
  Antisense strand to SEQ ID NO: 1571177
uacaaugaggcgauuggag

SEQ ID NO: 1571179 - RNA, 19 nt, Artificial Sequence
  Description of Artificial Sequence: Synthetic oligonucleotide
  Sense strand starting at position 2229 of SEQ ID NO: 1560029
cagaguaaagcggaucaau

SEQ ID NO: 1571180 - RNA, 19 nt, Artificial Sequence
  Description of Artificial Sequence: Synthetic oligonucleotide
  Antisense strand to SEQ ID NO: 1571179
auugauccgcuuuacucug

SEQ ID NO: 1571181 - RNA, 19 nt, Artificial Sequence
  Description of Artificial Sequence: Synthetic oligonucleotide
  Sense strand starting at position 2314 of SEQ ID NO: 1560029
ggagccagauuguugguaa

SEQ ID NO: 1571182 - RNA, 19 nt, Artificial Sequence
  Description of Artificial Sequence: Synthetic oligonucleotide
  Antisense strand to SEQ ID NO: 1571181
uuaccaacaaucuggcucc

SEQ ID NO: 1571183 - RNA, 19 nt, Artificial Sequence
  Description of Artificial Sequence: Synthetic oligonucleotide
  Sense strand starting at position 2683 of SEQ ID NO: 1560029
acgauaccagcugguaaau

SEQ ID NO: 1571184 - RNA, 19 nt, Artificial Sequence
  Description of Artificial Sequence: Synthetic oligonucleotide
  Antisense strand to SEQ ID NO: 1571183
auuuaccagcugguaucgu

SEQ ID NO: 1571185 - RNA, 19 nt, Artificial Sequence
  Description of Artificial Sequence: Synthetic oligonucleotide
  Sense strand starting at position 2720 of SEQ ID NO: 1560029
caugauuucuuguccgauu

SEQ ID NO: 1571186 - RNA, 19 nt, Artificial Sequence
  Description of Artificial Sequence: Synthetic oligonucleotide
  Antisense strand to SEQ ID NO: 1571185
aaucggacaagaaaucaug

SEQ ID NO: 1571187 - RNA, 19 nt, Artificial Sequence
  Description of Artificial Sequence: Synthetic oligonucleotide
  Sense strand starting at position 2744 of SEQ ID NO: 1560029
cuacuaaauacgcagggau

SEQ ID NO: 1571188 - RNA, 19 nt, Artificial Sequence
  Description of Artificial Sequence: Synthetic oligonucleotide
  Antisense strand to SEQ ID NO: 1571187
aucccugcguauuuaguag

SEQ ID NO: 1571189 - RNA, 19 nt, Artificial Sequence
  Description of Artificial Sequence: Synthetic oligonucleotide
  Sense strand starting at position 2747 of SEQ ID NO: 1560029
cuaaauacgcagggauaca

SEQ ID NO: 1571190 - RNA, 19 nt, Artificial Sequence
  Description of Artificial Sequence: Synthetic oligonucleotide
  Antisense strand to SEQ ID NO: 1571189
uguaucccugcguauuuag

SEQ ID NO: 1571191 - RNA, 19 nt, Artificial Sequence
  Description of Artificial Sequence: Synthetic oligonucleotide
  Sense strand starting at position 2798 of SEQ ID NO: 1560029
auaguuccaucuuuguaac

SEQ ID NO: 1571192 - RNA, 19 nt, Artificial Sequence
  Description of Artificial Sequence: Synthetic oligonucleotide
  Antisense strand to SEQ ID NO: 1571191
guuacaaagauggaacuau

SEQ ID NO: 1571193 - RNA, 19 nt, Artificial Sequence
  Description of Artificial Sequence: Synthetic oligonucleotide
  Sense strand starting at position 2800 of SEQ ID NO: 1560029
aguuccaucuuuguaacua

SEQ ID NO: 1571194 - RNA, 19 nt, Artificial Sequence
  Description of Artificial Sequence: Synthetic oligonucleotide
  Antisense strand to SEQ ID NO: 1571193
uaguuacaaagauggaacu

SEQ ID NO: 1571195 - RNA, 19 nt, Artificial Sequence
  Description of Artificial Sequence: Synthetic oligonucleotide
  Sense strand starting at position 2810 of SEQ ID NO: 1560029
uuguaacuaucucugagaa

SEQ ID NO: 1571196 - RNA, 19 nt, Artificial Sequence
  Description of Artificial Sequence: Synthetic oligonucleotide
  Antisense strand to SEQ ID NO: 1571195
uucucagagauaguuacaa

SEQ ID NO: 1571197 - RNA, 19 nt, Artificial Sequence
  Description of Artificial Sequence: Synthetic oligonucleotide
  Sense strand starting at position 2811 of SEQ ID NO: 1560029
uguaacuaucucugagaau

SEQ ID NO: 1571198 - RNA, 19 nt, Artificial Sequence
  Description of Artificial Sequence: Synthetic oligonucleotide
  Antisense strand to SEQ ID NO: 1571197
auucucagagauaguuaca

SEQ ID NO: 1571199 - RNA, 19 nt, Artificial Sequence
  Description of Artificial Sequence: Synthetic oligonucleotide
  Sense strand starting at position 2883 of SEQ ID NO: 1560029
ucaccucgccaggguaaau

SEQ ID NO: 1571200 - RNA, 19 nt, Artificial Sequence
  Description of Artificial Sequence: Synthetic oligonucleotide
  Antisense strand to SEQ ID NO: 1571199
auuuacccuggcgagguga

SEQ ID NO: 1571201 - RNA, 19 nt, Artificial Sequence
  Description of Artificial Sequence: Synthetic oligonucleotide
  Sense strand starting at position 3068 of SEQ ID NO: 1560029
uugcgcuggguugagaaau

SEQ ID NO: 1571202 - RNA, 19 nt, Artificial Sequence
  Description of Artificial Sequence: Synthetic oligonucleotide
  Antisense strand to SEQ ID NO: 1571201
auuucucaacccagcgcaa

SEQ ID NO: 1571203 - RNA, 19 nt, Artificial Sequence
  Description of Artificial Sequence: Synthetic oligonucleotide
  Sense strand starting at position 3178 of SEQ ID NO: 1560029
gggcaagucuuaccuauag

SEQ ID NO: 1571204 - RNA, 19 nt, Artificial Sequence
  Description of Artificial Sequence: Synthetic oligonucleotide
  Antisense strand to SEQ ID NO: 1571203
cuauagguaagacuugccc

SEQ ID NO: 1571205 - RNA, 19 nt, Artificial Sequence
  Description of Artificial Sequence: Synthetic oligonucleotide
  Sense strand starting at position 3647 of SEQ ID NO: 1560029
agugcucauacagguauga

SEQ ID NO: 1571206 - RNA, 19 nt, Artificial Sequence
  Description of Artificial Sequence: Synthetic oligonucleotide
  Antisense strand to SEQ ID NO: 1571205
ucauaccuguaugagcacu

SEQ ID NO: 1571207 - RNA, 19 nt, Artificial Sequence
  Description of Artificial Sequence: Synthetic oligonucleotide
  Sense strand starting at position 3787 of SEQ ID NO: 1560029
ugagauucuggauguaguu

SEQ ID NO: 1571208 - RNA, 19 nt, Artificial Sequence
  Description of Artificial Sequence: Synthetic oligonucleotide
  Antisense strand to SEQ ID NO: 1571207
aacuacauccagaaucuca

SEQ ID NO: 1571209 - RNA, 19 nt, Artificial Sequence
  Description of Artificial Sequence: Synthetic oligonucleotide
  Sense strand starting at position 3794 of SEQ ID NO: 1560029
cuggauguaguuugaaagu

SEQ ID NO: 1571210 - RNA, 19 nt, Artificial Sequence
  Description of Artificial Sequence: Synthetic oligonucleotide
  Antisense strand to SEQ ID NO: 1571209
acuuucaaacuacauccag

SEQ ID NO: 1571211 - RNA, 19 nt, Artificial Sequence
  Description of Artificial Sequence: Synthetic oligonucleotide
  Sense strand starting at position 3874 of SEQ ID NO: 1560029
uaagguuucugcccagauc

SEQ ID NO: 1571212 - RNA, 19 nt, Artificial Sequence
  Description of Artificial Sequence: Synthetic oligonucleotide
  Antisense strand to SEQ ID NO: 1571211
gaucugggcagaaaccuua

SEQ ID NO: 1571213 - RNA, 19 nt, Artificial Sequence
  Description of Artificial Sequence: Synthetic oligonucleotide
  Sense strand starting at position 3875 of SEQ ID NO: 1560029
aagguuucugcccagaucu

SEQ ID NO: 1571214 - RNA, 19 nt, Artificial Sequence
  Description of Artificial Sequence: Synthetic oligonucleotide
  Antisense strand to SEQ ID NO: 1571213
agaucugggcagaaaccuu

SEQ ID NO: 1571215 - RNA, 19 nt, Artificial Sequence
  Description of Artificial Sequence: Synthetic oligonucleotide
  Sense strand starting at position 3883 of SEQ ID NO: 1560029
ugcccagaucuguacaagu

SEQ ID NO: 1571216 - RNA, 19 nt, Artificial Sequence
  Description of Artificial Sequence: Synthetic oligonucleotide
  Antisense strand to SEQ ID NO: 1571215
acuuguacagaucugggca

SEQ ID NO: 1571217 - RNA, 19 nt, Artificial Sequence
  Description of Artificial Sequence: Synthetic oligonucleotide
  Sense strand starting at position 3891 of SEQ ID NO: 1560029
ucuguacaagucuggaaau

SEQ ID NO: 1571218 - RNA, 19 nt, Artificial Sequence
  Description of Artificial Sequence: Synthetic oligonucleotide
  Antisense strand to SEQ ID NO: 1571217
auuuccagacuuguacaga

SEQ ID NO: 1571219 - RNA, 19 nt, Artificial Sequence
  Description of Artificial Sequence: Synthetic oligonucleotide
  Sense strand starting at position 3941 of SEQ ID NO: 1560029
uuuggaacucucuggcuau

SEQ ID NO: 1571220 - RNA, 19 nt, Artificial Sequence
  Description of Artificial Sequence: Synthetic oligonucleotide
  Antisense strand to SEQ ID NO: 1571219
auagccagagaguuccaaa

SEQ ID NO: 1571221 - RNA, 19 nt, Artificial Sequence
  Description of Artificial Sequence: Synthetic oligonucleotide
  Sense strand starting at position 3944 of SEQ ID NO: 1560029
ggaacucucuggcuauaua

SEQ ID NO: 1571222 - RNA, 19 nt, Artificial Sequence
  Description of Artificial Sequence: Synthetic oligonucleotide
  Antisense strand to SEQ ID NO: 1571221
uauauagccagagaguucc

SEQ ID NO: 1571223 - RNA, 19 nt, Artificial Sequence
  Description of Artificial Sequence: Synthetic oligonucleotide
  Sense strand starting at position 3947 of SEQ ID NO: 1560029
acucucuggcuauauagau

SEQ ID NO: 1571224 - RNA, 19 nt, Artificial Sequence
  Description of Artificial Sequence: Synthetic oligonucleotide
  Antisense strand to SEQ ID NO: 1571223
aucuauauagccagagagu

SEQ ID NO: 1571225 - RNA, 19 nt, Artificial Sequence
  Description of Artificial Sequence: Synthetic oligonucleotide
  Sense strand starting at position 3953 of SEQ ID NO: 1560029
uggcuauauagaugguauu

SEQ ID NO: 1571226 - RNA, 19 nt, Artificial Sequence
  Description of Artificial Sequence: Synthetic oligonucleotide
  Antisense strand to SEQ ID NO: 1571225
aauaccaucuauauagcca

SEQ ID NO: 1571227 - RNA, 19 nt, Artificial Sequence
  Description of Artificial Sequence: Synthetic oligonucleotide
  Sense strand starting at position 3974 of SEQ ID NO: 1560029
aggcuauugccugaacgaa

SEQ ID NO: 1571228 - RNA, 19 nt, Artificial Sequence
  Description of Artificial Sequence: Synthetic oligonucleotide
  Antisense strand to SEQ ID NO: 1571227
uucguucaggcaauagccu

SEQ ID NO: 1571229 - RNA, 19 nt, Artificial Sequence
  Description of Artificial Sequence: Synthetic oligonucleotide
  Sense strand starting at position 480 of SEQ ID NO: 1560030
acuggacuccaaggguuua

SEQ ID NO: 1571230 - RNA, 19 nt, Artificial Sequence
  Description of Artificial Sequence: Synthetic oligonucleotide
  Antisense strand to SEQ ID NO: 1571229
uaaacccuuggaguccagu

SEQ ID NO: 1571231 - RNA, 19 nt, Artificial Sequence
  Description of Artificial Sequence: Synthetic oligonucleotide
  Sense strand starting at position 517 of SEQ ID NO: 1560030
gggaccaggacuugugagu

SEQ ID NO: 1571232 - RNA, 19 nt, Artificial Sequence
  Description of Artificial Sequence: Synthetic oligonucleotide
  Antisense strand to SEQ ID NO: 1571231
acucacaaguccugguccc

SEQ ID NO: 1571233 - RNA, 19 nt, Artificial Sequence
  Description of Artificial Sequence: Synthetic oligonucleotide
  Sense strand starting at position 522 of SEQ ID NO: 1560030
caggacuugugagucccaa

SEQ ID NO: 1571234 - RNA, 19 nt, Artificial Sequence
  Description of Artificial Sequence: Synthetic oligonucleotide
  Antisense strand to SEQ ID NO: 1571233
uugggacucacaaguccug

SEQ ID NO: 1571235 - RNA, 19 nt, Artificial Sequence
  Description of Artificial Sequence: Synthetic oligonucleotide
  Sense strand starting at position 526 of SEQ ID NO: 1560030
acuugugagucccaaggaa

SEQ ID NO: 1571236 - RNA, 19 nt, Artificial Sequence
  Description of Artificial Sequence: Synthetic oligonucleotide
  Antisense strand to SEQ ID NO: 1571235
uuccuugggacucacaagu

SEQ ID NO: 1571237 - RNA, 19 nt, Artificial Sequence
  Description of Artificial Sequence: Synthetic oligonucleotide
  Sense strand starting at position 676 of SEQ ID NO: 1560030
cccagauucgugggucuaa

SEQ ID NO: 1571238 - RNA, 19 nt, Artificial Sequence
  Description of Artificial Sequence: Synthetic oligonucleotide
  Antisense strand to SEQ ID NO: 1571237
uuagacccacgaaucuggg

SEQ ID NO: 1571239 - RNA, 19 nt, Artificial Sequence
  Description of Artificial Sequence: Synthetic oligonucleotide
  Sense strand starting at position 677 of SEQ ID NO: 1560030
ccagauucgugggucuaaa

SEQ ID NO: 1571240 - RNA, 19 nt, Artificial Sequence
  Description of Artificial Sequence: Synthetic oligonucleotide
  Antisense strand to SEQ ID NO: 1571239
uuuagacccacgaaucugg

SEQ ID NO: 1571241 - RNA, 19 nt, Artificial Sequence
  Description of Artificial Sequence: Synthetic oligonucleotide
  Sense strand starting at position 719 of SEQ ID NO: 1560030
acuucugagucuuagagaa

SEQ ID NO: 1571242 - RNA, 19 nt, Artificial Sequence
  Description of Artificial Sequence: Synthetic oligonucleotide
  Antisense strand to SEQ ID NO: 1571241
uucucuaagacucagaagu

SEQ ID NO: 1571243 - RNA, 19 nt, Artificial Sequence
  Description of Artificial Sequence: Synthetic oligonucleotide
  Sense strand starting at position 761 of SEQ ID NO: 1560030
uuaggucucccaggaagaa

SEQ ID NO: 1571244 - RNA, 19 nt, Artificial Sequence
  Description of Artificial Sequence: Synthetic oligonucleotide
  Antisense strand to SEQ ID NO: 1571243
uucuuccugggagaccuaa

SEQ ID NO: 1571245 - RNA, 19 nt, Artificial Sequence
  Description of Artificial Sequence: Synthetic oligonucleotide
  Sense strand starting at position 796 of SEQ ID NO: 1560030
acuccuggauucuauaaga

SEQ ID NO: 1571246 - RNA, 19 nt, Artificial Sequence
  Description of Artificial Sequence: Synthetic oligonucleotide
  Antisense strand to SEQ ID NO: 1571245
ucuuauagaauccaggagu

SEQ ID NO: 1571247 - RNA, 19 nt, Artificial Sequence
  Description of Artificial Sequence: Synthetic oligonucleotide
  Sense strand starting at position 801 of SEQ ID NO: 1560030
uggauucuauaagaggcau

SEQ ID NO: 1571248 - RNA, 19 nt, Artificial Sequence
  Description of Artificial Sequence: Synthetic oligonucleotide
  Antisense strand to SEQ ID NO: 1571247
augccucuuauagaaucca

SEQ ID NO: 1571249 - RNA, 19 nt, Artificial Sequence
  Description of Artificial Sequence: Synthetic oligonucleotide
  Sense strand starting at position 839 of SEQ ID NO: 1560030
cuuaaagcaucgggaacua

SEQ ID NO: 1571250 - RNA, 19 nt, Artificial Sequence
  Description of Artificial Sequence: Synthetic oligonucleotide
  Antisense strand to SEQ ID NO: 1571249
uaguucccgaugcuuuaag

SEQ ID NO: 1571251 - RNA, 19 nt, Artificial Sequence
  Description of Artificial Sequence: Synthetic oligonucleotide
  Sense strand starting at position 918 of SEQ ID NO: 1560030
ccugcugugagguguaguu

SEQ ID NO: 1571252 - RNA, 19 nt, Artificial Sequence
  Description of Artificial Sequence: Synthetic oligonucleotide
  Antisense strand to SEQ ID NO: 1571251
aacuacaccucacagcagg

SEQ ID NO: 1571253 - RNA, 19 nt, Artificial Sequence
  Description of Artificial Sequence: Synthetic oligonucleotide
  Sense strand starting at position 976 of SEQ ID NO: 1560030
acccuuggauaucagagaa

SEQ ID NO: 1571254 - RNA, 19 nt, Artificial Sequence
  Description of Artificial Sequence: Synthetic oligonucleotide
  Antisense strand to SEQ ID NO: 1571253
uucucugauauccaagggu

SEQ ID NO: 1571255 - RNA, 19 nt, Artificial Sequence
  Description of Artificial Sequence: Synthetic oligonucleotide
  Sense strand starting at position 1991 of SEQ ID NO: 1560030
gauacuuacuuucgaugau

SEQ ID NO: 1571256 - RNA, 19 nt, Artificial Sequence
  Description of Artificial Sequence: Synthetic oligonucleotide
  Antisense strand to SEQ ID NO: 1571255
aucaucgaaaguaaguauc

SEQ ID NO: 1571257 - RNA, 19 nt, Artificial Sequence
  Description of Artificial Sequence: Synthetic oligonucleotide
  Sense strand starting at position 1992 of SEQ ID NO: 1560030
auacuuacuuucgaugaug

SEQ ID NO: 1571258 - RNA, 19 nt, Artificial Sequence
  Description of Artificial Sequence: Synthetic oligonucleotide
  Antisense strand to SEQ ID NO: 1571257
caucaucgaaaguaaguau

SEQ ID NO: 1571259 - RNA, 19 nt, Artificial Sequence
  Description of Artificial Sequence: Synthetic oligonucleotide
  Sense strand starting at position 2023 of SEQ ID NO: 1560030
gaggucuauacuggcggaa

SEQ ID NO: 1571260 - RNA, 19 nt, Artificial Sequence
  Description of Artificial Sequence: Synthetic oligonucleotide
  Antisense strand to SEQ ID NO: 1571259
uuccgccaguauagaccuc

SEQ ID NO: 1571261 - RNA, 19 nt, Artificial Sequence
  Description of Artificial Sequence: Synthetic oligonucleotide
  Sense strand starting at position 2025 of SEQ ID NO: 1560030
ggucuauacuggcggaauu

SEQ ID NO: 1571262 - RNA, 19 nt, Artificial Sequence
  Description of Artificial Sequence: Synthetic oligonucleotide
  Antisense strand to SEQ ID NO: 1571261
aauuccgccaguauagacc

SEQ ID NO: 1571263 - RNA, 19 nt, Artificial Sequence
  Description of Artificial Sequence: Synthetic oligonucleotide
  Sense strand starting at position 2027 of SEQ ID NO: 1560030
ucuauacuggcggaauuga

SEQ ID NO: 1571264 - RNA, 19 nt, Artificial Sequence
  Description of Artificial Sequence: Synthetic oligonucleotide
  Antisense strand to SEQ ID NO: 1571263
ucaauuccgccaguauaga

SEQ ID NO: 1571265 - RNA, 19 nt, Artificial Sequence
  Description of Artificial Sequence: Synthetic oligonucleotide
  Sense strand starting at position 2079 of SEQ ID NO: 1560030
aaggaugugccauggauau

SEQ ID NO: 1571266 - RNA, 19 nt, Artificial Sequence
  Description of Artificial Sequence: Synthetic oligonucleotide
  Antisense strand to SEQ ID NO: 1571265
auauccauggcacauccuu

SEQ ID NO: 1571267 - RNA, 19 nt, Artificial Sequence
  Description of Artificial Sequence: Synthetic oligonucleotide
  Sense strand starting at position 2624 of SEQ ID NO: 1560030
gccggauccgcugacugau

SEQ ID NO: 1571268 - RNA, 19 nt, Artificial Sequence
  Description of Artificial Sequence: Synthetic oligonucleotide
  Antisense strand to SEQ ID NO: 1571267
aucagucagcggauccggc

SEQ ID NO: 1571269 - RNA, 19 nt, Artificial Sequence
  Description of Artificial Sequence: Synthetic oligonucleotide
  Sense strand starting at position 2698 of SEQ ID NO: 1560030
ccgguuaguacgcaaagga

SEQ ID NO: 1571270 - RNA, 19 nt, Artificial Sequence
  Description of Artificial Sequence: Synthetic oligonucleotide
  Antisense strand to SEQ ID NO: 1571269
uccuuugcguacuaaccgg

SEQ ID NO: 1571271 - RNA, 19 nt, Artificial Sequence
  Description of Artificial Sequence: Synthetic oligonucleotide
  Sense strand starting at position 2754 of SEQ ID NO: 1560030
ggcucuugguuguaggaua

SEQ ID NO: 1571272 - RNA, 19 nt, Artificial Sequence
  Description of Artificial Sequence: Synthetic oligonucleotide
  Antisense strand to SEQ ID NO: 1571271
uauccuacaaccaagagcc

SEQ ID NO: 1571273 - RNA, 19 nt, Artificial Sequence
  Description of Artificial Sequence: Synthetic oligonucleotide
  Sense strand starting at position 2790 of SEQ ID NO: 1560030
cuugaaacaucagagguga

SEQ ID NO: 1571274 - RNA, 19 nt, Artificial Sequence
  Description of Artificial Sequence: Synthetic oligonucleotide
  Antisense strand to SEQ ID NO: 1571273
ucaccucugauguuucaag

SEQ ID NO: 1571275 - RNA, 19 nt, Artificial Sequence
  Description of Artificial Sequence: Synthetic oligonucleotide
  Sense strand starting at position 2831 of SEQ ID NO: 1560030
guuccuaacuaccgaauua

SEQ ID NO: 1571276 - RNA, 19 nt, Artificial Sequence
  Description of Artificial Sequence: Synthetic oligonucleotide
  Antisense strand to SEQ ID NO: 1571275
uaauucgguaguuaggaac

SEQ ID NO: 1571277 - RNA, 19 nt, Artificial Sequence
  Description of Artificial Sequence: Synthetic oligonucleotide
  Sense strand starting at position 2843 of SEQ ID NO: 1560030
cgaauuaguauaugccaga

SEQ ID NO: 1571278 - RNA, 19 nt, Artificial Sequence
  Description of Artificial Sequence: Synthetic oligonucleotide
  Antisense strand to SEQ ID NO: 1571277
ucuggcauauacuaauucg

SEQ ID NO: 1571279 - RNA, 19 nt, Artificial Sequence
  Description of Artificial Sequence: Synthetic oligonucleotide
  Sense strand starting at position 2846 of SEQ ID NO: 1560030
auuaguauaugccagaggu

SEQ ID NO: 1571280 - RNA, 19 nt, Artificial Sequence
  Description of Artificial Sequence: Synthetic oligonucleotide
  Antisense strand to SEQ ID NO: 1571279
accucuggcauauacuaau

SEQ ID NO: 1571281 - RNA, 19 nt, Artificial Sequence
  Description of Artificial Sequence: Synthetic oligonucleotide
  Sense strand starting at position 2850 of SEQ ID NO: 1560030
guauaugccagagguggua

SEQ ID NO: 1571282 - RNA, 19 nt, Artificial Sequence
  Description of Artificial Sequence: Synthetic oligonucleotide
  Antisense strand to SEQ ID NO: 1571281
uaccaccucuggcauauac

SEQ ID NO: 1571283 - RNA, 19 nt, Artificial Sequence
  Description of Artificial Sequence: Synthetic oligonucleotide
  Sense strand starting at position 2945 of SEQ ID NO: 1560030
uuggaagccuggcuuagaa

SEQ ID NO: 1571284 - RNA, 19 nt, Artificial Sequence
  Description of Artificial Sequence: Synthetic oligonucleotide
  Antisense strand to SEQ ID NO: 1571283
uucuaagccaggcuuccaa

SEQ ID NO: 1571285 - RNA, 19 nt, Artificial Sequence
  Description of Artificial Sequence: Synthetic oligonucleotide
  Sense strand starting at position 2949 of SEQ ID NO: 1560030
aagccuggcuuagaaagaa

SEQ ID NO: 1571286 - RNA, 19 nt, Artificial Sequence
  Description of Artificial Sequence: Synthetic oligonucleotide
  Antisense strand to SEQ ID NO: 1571285
uucuuucuaagccaggcuu

SEQ ID NO: 1571287 - RNA, 19 nt, Artificial Sequence
  Description of Artificial Sequence: Synthetic oligonucleotide
  Sense strand starting at position 3514 of SEQ ID NO: 1560030
guuagaacuugccagggaa

SEQ ID NO: 1571288 - RNA, 19 nt, Artificial Sequence
  Description of Artificial Sequence: Synthetic oligonucleotide
  Antisense strand to SEQ ID NO: 1571287
uucccuggcaaguucuaac

SEQ ID NO: 1571289 - RNA, 19 nt, Artificial Sequence
  Description of Artificial Sequence: Synthetic oligonucleotide
  Sense strand starting at position 3540 of SEQ ID NO: 1560030
gguguuaggacucgggaga

SEQ ID NO: 1571290 - RNA, 19 nt, Artificial Sequence
  Description of Artificial Sequence: Synthetic oligonucleotide
  Antisense strand to SEQ ID NO: 1571289
ucucccgaguccuaacacc

SEQ ID NO: 1571291 - RNA, 19 nt, Artificial Sequence
  Description of Artificial Sequence: Synthetic oligonucleotide
  Sense strand starting at position 3652 of SEQ ID NO: 1560030
auauguucccgggagggau

SEQ ID NO: 1571292 - RNA, 19 nt, Artificial Sequence
  Description of Artificial Sequence: Synthetic oligonucleotide
  Antisense strand to SEQ ID NO: 1571291
aucccucccgggaacauau

SEQ ID NO: 1571293 - RNA, 19 nt, Artificial Sequence
  Description of Artificial Sequence: Synthetic oligonucleotide
  Sense strand starting at position 3726 of SEQ ID NO: 1560030
aaggguugcguuuagcaga

SEQ ID NO: 1571294 - RNA, 19 nt, Artificial Sequence
  Description of Artificial Sequence: Synthetic oligonucleotide
  Antisense strand to SEQ ID NO: 1571293
ucugcuaaacgcaacccuu

SEQ ID NO: 1571295 - RNA, 19 nt, Artificial Sequence
  Description of Artificial Sequence: Synthetic oligonucleotide
  Sense strand starting at position 3778 of SEQ ID NO: 1560030
aaucuacgaguuugugaac

SEQ ID NO: 1571296 - RNA, 19 nt, Artificial Sequence
  Description of Artificial Sequence: Synthetic oligonucleotide
  Antisense strand to SEQ ID NO: 1571295
guucacaaacucguagauu

SEQ ID NO: 1571297 - RNA, 19 nt, Artificial Sequence
  Description of Artificial Sequence: Synthetic oligonucleotide
  Sense strand starting at position 3781 of SEQ ID NO: 1560030
cuacgaguuugugaacuca

SEQ ID NO: 1571298 - RNA, 19 nt, Artificial Sequence
  Description of Artificial Sequence: Synthetic oligonucleotide
  Antisense strand to SEQ ID NO: 1571297
ugaguucacaaacucguag

SEQ ID NO: 1571299 - RNA, 19 nt, Artificial Sequence
  Description of Artificial Sequence: Synthetic oligonucleotide
  Sense strand starting at position 3943 of SEQ ID NO: 1560030
uucugauacccaggugaga

SEQ ID NO: 1571300 - RNA, 19 nt, Artificial Sequence
  Description of Artificial Sequence: Synthetic oligonucleotide
  Antisense strand to SEQ ID NO: 1571299
ucucaccuggguaucagaa

SEQ ID NO: 1571301 - RNA, 19 nt, Artificial Sequence
  Description of Artificial Sequence: Synthetic oligonucleotide
  Sense strand starting at position 3945 of SEQ ID NO: 1560030
cugauacccaggugagaau

SEQ ID NO: 1571302 - RNA, 19 nt, Artificial Sequence
  Description of Artificial Sequence: Synthetic oligonucleotide
  Antisense strand to SEQ ID NO: 1571301
auucucaccuggguaucag

SEQ ID NO: 1571303 - RNA, 19 nt, Artificial Sequence
  Description of Artificial Sequence: Synthetic oligonucleotide
  Sense strand starting at position 3956 of SEQ ID NO: 1560030
gugagaaugugcccaacuu

SEQ ID NO: 1571304 - RNA, 19 nt, Artificial Sequence
  Description of Artificial Sequence: Synthetic oligonucleotide
  Antisense strand to SEQ ID NO: 1571303
aaguugggcacauucucac

SEQ ID NO: 1571305 - RNA, 19 nt, Artificial Sequence
  Description of Artificial Sequence: Synthetic oligonucleotide
  Sense strand starting at position 3957 of SEQ ID NO: 1560030
ugagaaugugcccaacuuu

SEQ ID NO: 1571306 - RNA, 19 nt, Artificial Sequence
  Description of Artificial Sequence: Synthetic oligonucleotide
  Antisense strand to SEQ ID NO: 1571305
aaaguugggcacauucuca

SEQ ID NO: 1571307 - RNA, 19 nt, Artificial Sequence
  Description of Artificial Sequence: Synthetic oligonucleotide
  Sense strand starting at position 543 of SEQ ID NO: 1560031
ggcagaacuccugaugcac

SEQ ID NO: 1571308 - RNA, 19 nt, Artificial Sequence
  Description of Artificial Sequence: Synthetic oligonucleotide
  Antisense strand to SEQ ID NO: 1571307
gugcaucaggaguucugcc

SEQ ID NO: 1571309 - RNA, 19 nt, Artificial Sequence
  Description of Artificial Sequence: Synthetic oligonucleotide
  Sense strand starting at position 605 of SEQ ID NO: 1560031
ugcagaaacuaccuaaagu

SEQ ID NO: 1571310 - RNA, 19 nt, Artificial Sequence
  Description of Artificial Sequence: Synthetic oligonucleotide
  Antisense strand to SEQ ID NO: 1571309
acuuuagguaguuucugca

SEQ ID NO: 1571311 - RNA, 19 nt, Artificial Sequence
  Description of Artificial Sequence: Synthetic oligonucleotide
  Sense strand starting at position 746 of SEQ ID NO: 1560031
gaguguguggucuucguca

SEQ ID NO: 1571312 - RNA, 19 nt, Artificial Sequence
  Description of Artificial Sequence: Synthetic oligonucleotide
  Antisense strand to SEQ ID NO: 1571311
ugacgaagaccacacacuc

SEQ ID NO: 1571313 - RNA, 19 nt, Artificial Sequence
  Description of Artificial Sequence: Synthetic oligonucleotide
  Sense strand starting at position 848 of SEQ ID NO: 1560031
gaggcuuucugucuggaga

SEQ ID NO: 1571314 - RNA, 19 nt, Artificial Sequence
  Description of Artificial Sequence: Synthetic oligonucleotide
  Antisense strand to SEQ ID NO: 1571313
ucuccagacagaaagccuc

SEQ ID NO: 1571315 - RNA, 19 nt, Artificial Sequence
  Description of Artificial Sequence: Synthetic oligonucleotide
  Sense strand starting at position 849 of SEQ ID NO: 1560031
aggcuuucugucuggagac

SEQ ID NO: 1571316 - RNA, 19 nt, Artificial Sequence
  Description of Artificial Sequence: Synthetic oligonucleotide
  Antisense strand to SEQ ID NO: 1571315
gucuccagacagaaagccu

SEQ ID NO: 1571317 - RNA, 19 nt, Artificial Sequence
  Description of Artificial Sequence: Synthetic oligonucleotide
  Sense strand starting at position 1088 of SEQ ID NO: 1560031
uuccuuggauccuugugau

SEQ ID NO: 1571318 - RNA, 19 nt, Artificial Sequence
  Description of Artificial Sequence: Synthetic oligonucleotide
  Antisense strand to SEQ ID NO: 1571317
aucacaaggauccaaggaa

SEQ ID NO: 1571319 - RNA, 19 nt, Artificial Sequence
  Description of Artificial Sequence: Synthetic oligonucleotide
  Sense strand starting at position 1094 of SEQ ID NO: 1560031
ggauccuugugaucccaga

SEQ ID NO: 1571320 - RNA, 19 nt, Artificial Sequence
  Description of Artificial Sequence: Synthetic oligonucleotide
  Antisense strand to SEQ ID NO: 1571319
ucugggaucacaaggaucc

SEQ ID NO: 1571321 - RNA, 19 nt, Artificial Sequence
  Description of Artificial Sequence: Synthetic oligonucleotide
  Sense strand starting at position 1149 of SEQ ID NO: 1560031
augcccaugucuccagaua

SEQ ID NO: 1571322 - RNA, 19 nt, Artificial Sequence
  Description of Artificial Sequence: Synthetic oligonucleotide
  Antisense strand to SEQ ID NO: 1571321
uaucuggagacaugggcau

SEQ ID NO: 1571323 - RNA, 19 nt, Artificial Sequence
  Description of Artificial Sequence: Synthetic oligonucleotide
  Sense strand starting at position 1150 of SEQ ID NO: 1560031
ugcccaugucuccagauau

SEQ ID NO: 1571324 - RNA, 19 nt, Artificial Sequence
  Description of Artificial Sequence: Synthetic oligonucleotide
  Antisense strand to SEQ ID NO: 1571323
auaucuggagacaugggca

SEQ ID NO: 1571325 - RNA, 19 nt, Artificial Sequence
  Description of Artificial Sequence: Synthetic oligonucleotide
  Sense strand starting at position 1160 of SEQ ID NO: 1560031
uccagauaucuugguuccu

SEQ ID NO: 1571326 - RNA, 19 nt, Artificial Sequence
  Description of Artificial Sequence: Synthetic oligonucleotide
  Antisense strand to SEQ ID NO: 1571325
aggaaccaagauaucugga

SEQ ID NO: 1571327 - RNA, 19 nt, Artificial Sequence
  Description of Artificial Sequence: Synthetic oligonucleotide
  Sense strand starting at position 1165 of SEQ ID NO: 1560031
auaucuugguuccugagau

SEQ ID NO: 1571328 - RNA, 19 nt, Artificial Sequence
  Description of Artificial Sequence: Synthetic oligonucleotide
  Antisense strand to SEQ ID NO: 1571327
aucucaggaaccaagauau

SEQ ID NO: 1571329 - RNA, 19 nt, Artificial Sequence
  Description of Artificial Sequence: Synthetic oligonucleotide
  Sense strand starting at position 1172 of SEQ ID NO: 1560031
gguuccugagauugugaca

SEQ ID NO: 1571330 - RNA, 19 nt, Artificial Sequence
  Description of Artificial Sequence: Synthetic oligonucleotide
  Antisense strand to SEQ ID NO: 1571329
ugucacaaucucaggaacc

SEQ ID NO: 1571331 - RNA, 19 nt, Artificial Sequence
  Description of Artificial Sequence: Synthetic oligonucleotide
  Sense strand starting at position 1191 of SEQ ID NO: 1560031
uccugagauccucaguauc

SEQ ID NO: 1571332 - RNA, 19 nt, Artificial Sequence
  Description of Artificial Sequence: Synthetic oligonucleotide
  Antisense strand to SEQ ID NO: 1571331
gauacugaggaucucagga

SEQ ID NO: 1571333 - RNA, 19 nt, Artificial Sequence
  Description of Artificial Sequence: Synthetic oligonucleotide
  Sense strand starting at position 1193 of SEQ ID NO: 1560031
cugagauccucaguaucug

SEQ ID NO: 1571334 - RNA, 19 nt, Artificial Sequence
  Description of Artificial Sequence: Synthetic oligonucleotide
  Antisense strand to SEQ ID NO: 1571333
cagauacugaggaucucag

SEQ ID NO: 1571335 - RNA, 19 nt, Artificial Sequence
  Description of Artificial Sequence: Synthetic oligonucleotide
  Sense strand starting at position 1194 of SEQ ID NO: 1560031
ugagauccucaguaucugu

SEQ ID NO: 1571336 - RNA, 19 nt, Artificial Sequence
  Description of Artificial Sequence: Synthetic oligonucleotide
  Antisense strand to SEQ ID NO: 1571335
acagauacugaggaucuca

SEQ ID NO: 1571337 - RNA, 19 nt, Artificial Sequence
  Description of Artificial Sequence: Synthetic oligonucleotide
  Sense strand starting at position 1201 of SEQ ID NO: 1560031
cucaguaucugucuccuua

SEQ ID NO: 1571338 - RNA, 19 nt, Artificial Sequence
  Description of Artificial Sequence: Synthetic oligonucleotide
  Antisense strand to SEQ ID NO: 1571337
uaaggagacagauacugag

SEQ ID NO: 1571339 - RNA, 19 nt, Artificial Sequence
  Description of Artificial Sequence: Synthetic oligonucleotide
  Sense strand starting at position 1205 of SEQ ID NO: 1560031
guaucugucuccuuagaac

SEQ ID NO: 1571340 - RNA, 19 nt, Artificial Sequence
  Description of Artificial Sequence: Synthetic oligonucleotide
  Antisense strand to SEQ ID NO: 1571339
guucuaaggagacagauac

SEQ ID NO: 1571341 - RNA, 19 nt, Artificial Sequence
  Description of Artificial Sequence: Synthetic oligonucleotide
  Sense strand starting at position 1318 of SEQ ID NO: 1560031
cuacacaucuggcuuaaga

SEQ ID NO: 1571342 - RNA, 19 nt, Artificial Sequence
  Description of Artificial Sequence: Synthetic oligonucleotide
  Antisense strand to SEQ ID NO: 1571341
ucuuaagccagauguguag

SEQ ID NO: 1571343 - RNA, 19 nt, Artificial Sequence
  Description of Artificial Sequence: Synthetic oligonucleotide
  Sense strand starting at position 1328 of SEQ ID NO: 1560031
ggcuuaagagcuuguacuu

SEQ ID NO: 1571344 - RNA, 19 nt, Artificial Sequence
  Description of Artificial Sequence: Synthetic oligonucleotide
  Antisense strand to SEQ ID NO: 1571343
aaguacaagcucuuaagcc

SEQ ID NO: 1571345 - RNA, 19 nt, Artificial Sequence
  Description of Artificial Sequence: Synthetic oligonucleotide
  Sense strand starting at position 1535 of SEQ ID NO: 1560031
cuuggaaccugggcuuaua

SEQ ID NO: 1571346 - RNA, 19 nt, Artificial Sequence
  Description of Artificial Sequence: Synthetic oligonucleotide
  Antisense strand to SEQ ID NO: 1571345
uauaagcccagguuccaag

SEQ ID NO: 1571347 - RNA, 19 nt, Artificial Sequence
  Description of Artificial Sequence: Synthetic oligonucleotide
  Sense strand starting at position 1624 of SEQ ID NO: 1560031
cccuaugcucuguguggau

SEQ ID NO: 1571348 - RNA, 19 nt, Artificial Sequence
  Description of Artificial Sequence: Synthetic oligonucleotide
  Antisense strand to SEQ ID NO: 1571347
auccacacagagcauaggg

SEQ ID NO: 1571349 - RNA, 19 nt, Artificial Sequence
  Description of Artificial Sequence: Synthetic oligonucleotide
  Sense strand starting at position 2396 of SEQ ID NO: 1560031
ugguucuccugucugagua

SEQ ID NO: 1571350 - RNA, 19 nt, Artificial Sequence
  Description of Artificial Sequence: Synthetic oligonucleotide
  Antisense strand to SEQ ID NO: 1571349
uacucagacaggagaacca

SEQ ID NO: 1571351 - RNA, 19 nt, Artificial Sequence
  Description of Artificial Sequence: Synthetic oligonucleotide
  Sense strand starting at position 2570 of SEQ ID NO: 1560031
uuuggaaucucgguuccca

SEQ ID NO: 1571352 - RNA, 19 nt, Artificial Sequence
  Description of Artificial Sequence: Synthetic oligonucleotide
  Antisense strand to SEQ ID NO: 1571351
ugggaaccgagauuccaaa

SEQ ID NO: 1571353 - RNA, 19 nt, Artificial Sequence
  Description of Artificial Sequence: Synthetic oligonucleotide
  Sense strand starting at position 2586 of SEQ ID NO: 1560031
ccacuuacucgcuggguga

SEQ ID NO: 1571354 - RNA, 19 nt, Artificial Sequence
  Description of Artificial Sequence: Synthetic oligonucleotide
  Antisense strand to SEQ ID NO: 1571353
ucacccagcgaguaagugg

SEQ ID NO: 1571355 - RNA, 19 nt, Artificial Sequence
  Description of Artificial Sequence: Synthetic oligonucleotide
  Sense strand starting at position 2597 of SEQ ID NO: 1560031
cugggugaccuuggccaaa

SEQ ID NO: 1571356 - RNA, 19 nt, Artificial Sequence
  Description of Artificial Sequence: Synthetic oligonucleotide
  Antisense strand to SEQ ID NO: 1571355
uuuggccaaggucacccag

SEQ ID NO: 1571357 - RNA, 19 nt, Artificial Sequence
  Description of Artificial Sequence: Synthetic oligonucleotide
  Sense strand starting at position 2803 of SEQ ID NO: 1560031
cacugauugugucucugca

SEQ ID NO: 1571358 - RNA, 19 nt, Artificial Sequence
  Description of Artificial Sequence: Synthetic oligonucleotide
  Antisense strand to SEQ ID NO: 1571357
ugcagagacacaaucagug

SEQ ID NO: 1571359 - RNA, 19 nt, Artificial Sequence
  Description of Artificial Sequence: Synthetic oligonucleotide
  Sense strand starting at position 2922 of SEQ ID NO: 1560031
cagagaucuugagagaaag

SEQ ID NO: 1571360 - RNA, 19 nt, Artificial Sequence
  Description of Artificial Sequence: Synthetic oligonucleotide
  Antisense strand to SEQ ID NO: 1571359
cuuucucucaagaucucug

SEQ ID NO: 1571361 - RNA, 19 nt, Artificial Sequence
  Description of Artificial Sequence: Synthetic oligonucleotide
  Sense strand starting at position 3238 of SEQ ID NO: 1560031
ggguugaguccgggucacu

SEQ ID NO: 1571362 - RNA, 19 nt, Artificial Sequence
  Description of Artificial Sequence: Synthetic oligonucleotide
  Antisense strand to SEQ ID NO: 1571361
agugacccggacucaaccc

SEQ ID NO: 1571363 - RNA, 19 nt, Artificial Sequence
  Description of Artificial Sequence: Synthetic oligonucleotide
  Sense strand starting at position 3368 of SEQ ID NO: 1560031
gucuccuucugucuucgaa

SEQ ID NO: 1571364 - RNA, 19 nt, Artificial Sequence
  Description of Artificial Sequence: Synthetic oligonucleotide
  Antisense strand to SEQ ID NO: 1571363
uucgaagacagaaggagac

SEQ ID NO: 1571365 - RNA, 19 nt, Artificial Sequence
  Description of Artificial Sequence: Synthetic oligonucleotide
  Sense strand starting at position 3370 of SEQ ID NO: 1560031
cuccuucugucuucgaaac

SEQ ID NO: 1571366 - RNA, 19 nt, Artificial Sequence
  Description of Artificial Sequence: Synthetic oligonucleotide
  Antisense strand to SEQ ID NO: 1571365
guuucgaagacagaaggag

SEQ ID NO: 1571367 - RNA, 19 nt, Artificial Sequence
  Description of Artificial Sequence: Synthetic oligonucleotide
  Sense strand starting at position 3371 of SEQ ID NO: 1560031
uccuucugucuucgaaacu

SEQ ID NO: 1571368 - RNA, 19 nt, Artificial Sequence
  Description of Artificial Sequence: Synthetic oligonucleotide
  Antisense strand to SEQ ID NO: 1571367
aguuucgaagacagaagga

SEQ ID NO: 1571369 - RNA, 19 nt, Artificial Sequence
  Description of Artificial Sequence: Synthetic oligonucleotide
  Sense strand starting at position 3472 of SEQ ID NO: 1560031
gaccuugaaaguggguauu

SEQ ID NO: 1571370 - RNA, 19 nt, Artificial Sequence
  Description of Artificial Sequence: Synthetic oligonucleotide
  Antisense strand to SEQ ID NO: 1571369
aauacccacuuucaagguc

SEQ ID NO: 1571371 - RNA, 19 nt, Artificial Sequence
  Description of Artificial Sequence: Synthetic oligonucleotide
  Sense strand starting at position 3540 of SEQ ID NO: 1560031
ucguuaacccaggauguga

SEQ ID NO: 1571372 - RNA, 19 nt, Artificial Sequence
  Description of Artificial Sequence: Synthetic oligonucleotide
  Antisense strand to SEQ ID NO: 1571371
ucacauccuggguuaacga

SEQ ID NO: 1571373 - RNA, 19 nt, Artificial Sequence
  Description of Artificial Sequence: Synthetic oligonucleotide
  Sense strand starting at position 3636 of SEQ ID NO: 1560031
gcgaaacaucccgagcaca

SEQ ID NO: 1571374 - RNA, 19 nt, Artificial Sequence
  Description of Artificial Sequence: Synthetic oligonucleotide
  Antisense strand to SEQ ID NO: 1571373
ugugcucgggauguuucgc

SEQ ID NO: 1571375 - RNA, 19 nt, Artificial Sequence
  Description of Artificial Sequence: Synthetic oligonucleotide
  Sense strand starting at position 3647 of SEQ ID NO: 1560031
cgagcacagaccuguguua

SEQ ID NO: 1571376 - RNA, 19 nt, Artificial Sequence
  Description of Artificial Sequence: Synthetic oligonucleotide
  Antisense strand to SEQ ID NO: 1571375
uaacacaggucugugcucg

SEQ ID NO: 1571377 - RNA, 19 nt, Artificial Sequence
  Description of Artificial Sequence: Synthetic oligonucleotide
  Sense strand starting at position 3649 of SEQ ID NO: 1560031
agcacagaccuguguuaau

SEQ ID NO: 1571378 - RNA, 19 nt, Artificial Sequence
  Description of Artificial Sequence: Synthetic oligonucleotide
  Antisense strand to SEQ ID NO: 1571377
auuaacacaggucugugcu

SEQ ID NO: 1571379 - RNA, 19 nt, Artificial Sequence
  Description of Artificial Sequence: Synthetic oligonucleotide
  Sense strand starting at position 3718 of SEQ ID NO: 1560031
ccuugagacucaguuuguu

SEQ ID NO: 1571380 - RNA, 19 nt, Artificial Sequence
  Description of Artificial Sequence: Synthetic oligonucleotide
  Antisense strand to SEQ ID NO: 1571379
aacaaacugagucucaagg

SEQ ID NO: 1571381 - RNA, 19 nt, Artificial Sequence
  Description of Artificial Sequence: Synthetic oligonucleotide
  Sense strand starting at position 3726 of SEQ ID NO: 1560031
cucaguuuguucuucugga

SEQ ID NO: 1571382 - RNA, 19 nt, Artificial Sequence
  Description of Artificial Sequence: Synthetic oligonucleotide
  Antisense strand to SEQ ID NO: 1571381
uccagaagaacaaacugag

SEQ ID NO: 1571383 - RNA, 19 nt, Artificial Sequence
  Description of Artificial Sequence: Synthetic oligonucleotide
  Sense strand starting at position 3727 of SEQ ID NO: 1560031
ucaguuuguucuucuggaa

SEQ ID NO: 1571384 - RNA, 19 nt, Artificial Sequence
  Description of Artificial Sequence: Synthetic oligonucleotide
  Antisense strand to SEQ ID NO: 1571383
uuccagaagaacaaacuga

SEQ ID NO: 1571385 - RNA, 19 nt, Artificial Sequence
  Description of Artificial Sequence: Synthetic oligonucleotide
  Sense strand starting at position 3807 of SEQ ID NO: 1560031
gaggaauucgguuggacag

SEQ ID NO: 1571386 - RNA, 19 nt, Artificial Sequence
  Description of Artificial Sequence: Synthetic oligonucleotide
  Antisense strand to SEQ ID NO: 1571385
cuguccaaccgaauuccuc

SEQ ID NO: 1571387 - RNA, 19 nt, Artificial Sequence
  Description of Artificial Sequence: Synthetic oligonucleotide
  Sense strand starting at position 122 of SEQ ID NO: 1560032
caacguaaggucugcauca

SEQ ID NO: 1571388 - RNA, 19 nt, Artificial Sequence
  Description of Artificial Sequence: Synthetic oligonucleotide
  Antisense strand to SEQ ID NO: 1571387
ugaugcagaccuuacguug

SEQ ID NO: 1571389 - RNA, 19 nt, Artificial Sequence
  Description of Artificial Sequence: Synthetic oligonucleotide
  Sense strand starting at position 565 of SEQ ID NO: 1560032
ggagucaccucagauguga

SEQ ID NO: 1571390 - RNA, 19 nt, Artificial Sequence
  Description of Artificial Sequence: Synthetic oligonucleotide
  Antisense strand to SEQ ID NO: 1571389
ucacaucugaggugacucc

SEQ ID NO: 1571391 - RNA, 19 nt, Artificial Sequence
  Description of Artificial Sequence: Synthetic oligonucleotide
  Sense strand starting at position 642 of SEQ ID NO: 1560032
gacuguugcuugcugugaa

SEQ ID NO: 1571392 - RNA, 19 nt, Artificial Sequence
  Description of Artificial Sequence: Synthetic oligonucleotide
  Antisense strand to SEQ ID NO: 1571391
uucacagcaagcaacaguc

SEQ ID NO: 1571393 - RNA, 19 nt, Artificial Sequence
  Description of Artificial Sequence: Synthetic oligonucleotide
  Sense strand starting at position 704 of SEQ ID NO: 1560032
ggguguacaucagagacau

SEQ ID NO: 1571394 - RNA, 19 nt, Artificial Sequence
  Description of Artificial Sequence: Synthetic oligonucleotide
  Antisense strand to SEQ ID NO: 1571393
augucucugauguacaccc

SEQ ID NO: 1571395 - RNA, 19 nt, Artificial Sequence
  Description of Artificial Sequence: Synthetic oligonucleotide
  Sense strand starting at position 716 of SEQ ID NO: 1560032
gagacaucuggucaggcuu

SEQ ID NO: 1571396 - RNA, 19 nt, Artificial Sequence
  Description of Artificial Sequence: Synthetic oligonucleotide
  Antisense strand to SEQ ID NO: 1571395
aagccugaccagaugucuc

SEQ ID NO: 1571397 - RNA, 19 nt, Artificial Sequence
  Description of Artificial Sequence: Synthetic oligonucleotide
  Sense strand starting at position 722 of SEQ ID NO: 1560032
ucuggucaggcuugucaca

SEQ ID NO: 1571398 - RNA, 19 nt, Artificial Sequence
  Description of Artificial Sequence: Synthetic oligonucleotide
  Antisense strand to SEQ ID NO: 1571397
ugugacaagccugaccaga

SEQ ID NO: 1571399 - RNA, 19 nt, Artificial Sequence
  Description of Artificial Sequence: Synthetic oligonucleotide
  Sense strand starting at position 724 of SEQ ID NO: 1560032
uggucaggcuugucacagu

SEQ ID NO: 1571400 - RNA, 19 nt, Artificial Sequence
  Description of Artificial Sequence: Synthetic oligonucleotide
  Antisense strand to SEQ ID NO: 1571399
acugugacaagccugacca

SEQ ID NO: 1571401 - RNA, 19 nt, Artificial Sequence
  Description of Artificial Sequence: Synthetic oligonucleotide
  Sense strand starting at position 842 of SEQ ID NO: 1560032
ggguccaagacuugucaga

SEQ ID NO: 1571402 - RNA, 19 nt, Artificial Sequence
  Description of Artificial Sequence: Synthetic oligonucleotide
  Antisense strand to SEQ ID NO: 1571401
ucugacaagucuuggaccc

SEQ ID NO: 1571403 - RNA, 19 nt, Artificial Sequence
  Description of Artificial Sequence: Synthetic oligonucleotide
  Sense strand starting at position 844 of SEQ ID NO: 1560032
guccaagacuugucagaga

SEQ ID NO: 1571404 - RNA, 19 nt, Artificial Sequence
  Description of Artificial Sequence: Synthetic oligonucleotide
  Antisense strand to SEQ ID NO: 1571403
ucucugacaagucuuggac

SEQ ID NO: 1571405 - RNA, 19 nt, Artificial Sequence
  Description of Artificial Sequence: Synthetic oligonucleotide
  Sense strand starting at position 847 of SEQ ID NO: 1560032
caagacuugucagagaaau

SEQ ID NO: 1571406 - RNA, 19 nt, Artificial Sequence
  Description of Artificial Sequence: Synthetic oligonucleotide
  Antisense strand to SEQ ID NO: 1571405
auuucucugacaagucuug

SEQ ID NO: 1571407 - RNA, 19 nt, Artificial Sequence
  Description of Artificial Sequence: Synthetic oligonucleotide
  Sense strand starting at position 943 of SEQ ID NO: 1560032
aacagacacuggugagaau

SEQ ID NO: 1571408 - RNA, 19 nt, Artificial Sequence
  Description of Artificial Sequence: Synthetic oligonucleotide
  Antisense strand to SEQ ID NO: 1571407
auucucaccagugucuguu

SEQ ID NO: 1571409 - RNA, 19 nt, Artificial Sequence
  Description of Artificial Sequence: Synthetic oligonucleotide
  Sense strand starting at position 975 of SEQ ID NO: 1560032
aggaauaaguccugugugu

SEQ ID NO: 1571410 - RNA, 19 nt, Artificial Sequence
  Description of Artificial Sequence: Synthetic oligonucleotide
  Antisense strand to SEQ ID NO: 1571409
acacacaggacuuauuccu

SEQ ID NO: 1571411 - RNA, 19 nt, Artificial Sequence
  Description of Artificial Sequence: Synthetic oligonucleotide
  Sense strand starting at position 1191 of SEQ ID NO: 1560032
auggguuucucagggacau

SEQ ID NO: 1571412 - RNA, 19 nt, Artificial Sequence
  Description of Artificial Sequence: Synthetic oligonucleotide
  Antisense strand to SEQ ID NO: 1571411
augucccugagaaacccau

SEQ ID NO: 1571413 - RNA, 19 nt, Artificial Sequence
  Description of Artificial Sequence: Synthetic oligonucleotide
  Sense strand starting at position 1192 of SEQ ID NO: 1560032
uggguuucucagggacaug

SEQ ID NO: 1571414 - RNA, 19 nt, Artificial Sequence
  Description of Artificial Sequence: Synthetic oligonucleotide
  Antisense strand to SEQ ID NO: 1571413
caugucccugagaaaccca

SEQ ID NO: 1571415 - RNA, 19 nt, Artificial Sequence
  Description of Artificial Sequence: Synthetic oligonucleotide
  Sense strand starting at position 1675 of SEQ ID NO: 1560032
agaagauuaugccacugca

SEQ ID NO: 1571416 - RNA, 19 nt, Artificial Sequence
  Description of Artificial Sequence: Synthetic oligonucleotide
  Antisense strand to SEQ ID NO: 1571415
ugcaguggcauaaucuucu

SEQ ID NO: 1571417 - RNA, 19 nt, Artificial Sequence
  Description of Artificial Sequence: Synthetic oligonucleotide
  Sense strand starting at position 2376 of SEQ ID NO: 1560032
gcaccugaguuucuagguu

SEQ ID NO: 1571418 - RNA, 19 nt, Artificial Sequence
  Description of Artificial Sequence: Synthetic oligonucleotide
  Antisense strand to SEQ ID NO: 1571417
aaccuagaaacucaggugc

SEQ ID NO: 1571419 - RNA, 19 nt, Artificial Sequence
  Description of Artificial Sequence: Synthetic oligonucleotide
  Sense strand starting at position 2380 of SEQ ID NO: 1560032
cugaguuucuagguucuca

SEQ ID NO: 1571420 - RNA, 19 nt, Artificial Sequence
  Description of Artificial Sequence: Synthetic oligonucleotide
  Antisense strand to SEQ ID NO: 1571419
ugagaaccuagaaacucag

SEQ ID NO: 1571421 - RNA, 19 nt, Artificial Sequence
  Description of Artificial Sequence: Synthetic oligonucleotide
  Sense strand starting at position 2555 of SEQ ID NO: 1560032
ugugcaccuucugcuuaau

SEQ ID NO: 1571422 - RNA, 19 nt, Artificial Sequence
  Description of Artificial Sequence: Synthetic oligonucleotide
  Antisense strand to SEQ ID NO: 1571421
auuaagcagaaggugcaca

SEQ ID NO: 1571423 - RNA, 19 nt, Artificial Sequence
  Description of Artificial Sequence: Synthetic oligonucleotide
  Sense strand starting at position 2746 of SEQ ID NO: 1560032
ucaucucaccuguguugaa

SEQ ID NO: 1571424 - RNA, 19 nt, Artificial Sequence
  Description of Artificial Sequence: Synthetic oligonucleotide
  Antisense strand to SEQ ID NO: 1571423
uucaacacaggugagauga

SEQ ID NO: 1571425 - RNA, 19 nt, Artificial Sequence
  Description of Artificial Sequence: Synthetic oligonucleotide
  Sense strand starting at position 2900 of SEQ ID NO: 1560032
uuuggagucccacaaguuu

SEQ ID NO: 1571426 - RNA, 19 nt, Artificial Sequence
  Description of Artificial Sequence: Synthetic oligonucleotide
  Antisense strand to SEQ ID NO: 1571425
aaacuugugggacuccaaa

SEQ ID NO: 1571427 - RNA, 19 nt, Artificial Sequence
  Description of Artificial Sequence: Synthetic oligonucleotide
  Sense strand starting at position 2911 of SEQ ID NO: 1560032
acaaguuuguuaccuggua

SEQ ID NO: 1571428 - RNA, 19 nt, Artificial Sequence
  Description of Artificial Sequence: Synthetic oligonucleotide
  Antisense strand to SEQ ID NO: 1571427
uaccagguaacaaacuugu

SEQ ID NO: 1571429 - RNA, 19 nt, Artificial Sequence
  Description of Artificial Sequence: Synthetic oligonucleotide
  Sense strand starting at position 3108 of SEQ ID NO: 1560032
guaaucacacagugucaca

SEQ ID NO: 1571430 - RNA, 19 nt, Artificial Sequence
  Description of Artificial Sequence: Synthetic oligonucleotide
  Antisense strand to SEQ ID NO: 1571429
ugugacacugugugauuac

SEQ ID NO: 1571431 - RNA, 19 nt, Artificial Sequence
  Description of Artificial Sequence: Synthetic oligonucleotide
  Sense strand starting at position 3113 of SEQ ID NO: 1560032
cacacagugucacagagau

SEQ ID NO: 1571432 - RNA, 19 nt, Artificial Sequence
  Description of Artificial Sequence: Synthetic oligonucleotide
  Antisense strand to SEQ ID NO: 1571431
aucucugugacacugugug

SEQ ID NO: 1571433 - RNA, 19 nt, Artificial Sequence
  Description of Artificial Sequence: Synthetic oligonucleotide
  Sense strand starting at position 3148 of SEQ ID NO: 1560032
aucauagucccagaagcaa

SEQ ID NO: 1571434 - RNA, 19 nt, Artificial Sequence
  Description of Artificial Sequence: Synthetic oligonucleotide
  Antisense strand to SEQ ID NO: 1571433
uugcuucugggacuaugau

SEQ ID NO: 1571435 - RNA, 19 nt, Artificial Sequence
  Description of Artificial Sequence: Synthetic oligonucleotide
  Sense strand starting at position 3168 of SEQ ID NO: 1560032
ucuagcugcucuuaagaca

SEQ ID NO: 1571436 - RNA, 19 nt, Artificial Sequence
  Description of Artificial Sequence: Synthetic oligonucleotide
  Antisense strand to SEQ ID NO: 1571435
ugucuuaagagcagcuaga

SEQ ID NO: 1571437 - RNA, 19 nt, Artificial Sequence
  Description of Artificial Sequence: Synthetic oligonucleotide
  Sense strand starting at position 3443 of SEQ ID NO: 1560032
gcagguggacccugacaua

SEQ ID NO: 1571438 - RNA, 19 nt, Artificial Sequence
  Description of Artificial Sequence: Synthetic oligonucleotide
  Antisense strand to SEQ ID NO: 1571437
uaugucaggguccaccugc

SEQ ID NO: 1571439 - RNA, 19 nt, Artificial Sequence
  Description of Artificial Sequence: Synthetic oligonucleotide
  Sense strand starting at position 3446 of SEQ ID NO: 1560032
gguggacccugacauacua

SEQ ID NO: 1571440 - RNA, 19 nt, Artificial Sequence
  Description of Artificial Sequence: Synthetic oligonucleotide
  Antisense strand to SEQ ID NO: 1571439
uaguaugucaggguccacc

SEQ ID NO: 1571441 - RNA, 19 nt, Artificial Sequence
  Description of Artificial Sequence: Synthetic oligonucleotide
  Sense strand starting at position 3501 of SEQ ID NO: 1560032
ucugaauuccgucaugauc

SEQ ID NO: 1571442 - RNA, 19 nt, Artificial Sequence
  Description of Artificial Sequence: Synthetic oligonucleotide
  Antisense strand to SEQ ID NO: 1571441
gaucaugacggaauucaga

SEQ ID NO: 1571443 - RNA, 19 nt, Artificial Sequence
  Description of Artificial Sequence: Synthetic oligonucleotide
  Sense strand starting at position 3503 of SEQ ID NO: 1560032
ugaauuccgucaugaucac

SEQ ID NO: 1571444 - RNA, 19 nt, Artificial Sequence
  Description of Artificial Sequence: Synthetic oligonucleotide
  Antisense strand to SEQ ID NO: 1571443
gugaucaugacggaauuca

SEQ ID NO: 1571445 - RNA, 19 nt, Artificial Sequence
  Description of Artificial Sequence: Synthetic oligonucleotide
  Sense strand starting at position 3512 of SEQ ID NO: 1560032
ucaugaucacgccauguaa

SEQ ID NO: 1571446 - RNA, 19 nt, Artificial Sequence
  Description of Artificial Sequence: Synthetic oligonucleotide
  Antisense strand to SEQ ID NO: 1571445
uuacauggcgugaucauga

SEQ ID NO: 1571447 - RNA, 19 nt, Artificial Sequence
  Description of Artificial Sequence: Synthetic oligonucleotide
  Sense strand starting at position 3514 of SEQ ID NO: 1560032
augaucacgccauguaaca

SEQ ID NO: 1571448 - RNA, 19 nt, Artificial Sequence
  Description of Artificial Sequence: Synthetic oligonucleotide
  Antisense strand to SEQ ID NO: 1571447
uguuacauggcgugaucau

SEQ ID NO: 1571449 - RNA, 19 nt, Artificial Sequence
  Description of Artificial Sequence: Synthetic oligonucleotide
  Sense strand starting at position 3628 of SEQ ID NO: 1560032
cccgaucuucccugugcaa

SEQ ID NO: 1571450 - RNA, 19 nt, Artificial Sequence
  Description of Artificial Sequence: Synthetic oligonucleotide
  Antisense strand to SEQ ID NO: 1571449
uugcacagggaagaucggg

SEQ ID NO: 1571451 - RNA, 19 nt, Artificial Sequence
  Description of Artificial Sequence: Synthetic oligonucleotide
  Sense strand starting at position 3630 of SEQ ID NO: 1560032
cgaucuucccugugcaaag

SEQ ID NO: 1571452 - RNA, 19 nt, Artificial Sequence
  Description of Artificial Sequence: Synthetic oligonucleotide
  Antisense strand to SEQ ID NO: 1571451
cuuugcacagggaagaucg

SEQ ID NO: 1571453 - RNA, 19 nt, Artificial Sequence
  Description of Artificial Sequence: Synthetic oligonucleotide
  Sense strand starting at position 3724 of SEQ ID NO: 1560032
gggccugagguucaccaau

SEQ ID NO: 1571454 - RNA, 19 nt, Artificial Sequence
  Description of Artificial Sequence: Synthetic oligonucleotide
  Antisense strand to SEQ ID NO: 1571453
auuggugaaccucaggccc

SEQ ID NO: 1571455 - RNA, 19 nt, Artificial Sequence
  Description of Artificial Sequence: Synthetic oligonucleotide
  Sense strand starting at position 3789 of SEQ ID NO: 1560032
agcuaucaccgcuggugaa

SEQ ID NO: 1571456 - RNA, 19 nt, Artificial Sequence
  Description of Artificial Sequence: Synthetic oligonucleotide
  Antisense strand to SEQ ID NO: 1571455
uucaccagcggugauagcu

SEQ ID NO: 1571457 - RNA, 19 nt, Artificial Sequence
  Description of Artificial Sequence: Synthetic oligonucleotide
  Sense strand starting at position 3790 of SEQ ID NO: 1560032
gcuaucaccgcuggugaaa

SEQ ID NO: 1571458 - RNA, 19 nt, Artificial Sequence
  Description of Artificial Sequence: Synthetic oligonucleotide
  Antisense strand to SEQ ID NO: 1571457
uuucaccagcggugauagc

SEQ ID NO: 1571459 - RNA, 19 nt, Artificial Sequence
  Description of Artificial Sequence: Synthetic oligonucleotide
  Sense strand starting at position 3792 of SEQ ID NO: 1560032
uaucaccgcuggugaaauu

SEQ ID NO: 1571460 - RNA, 19 nt, Artificial Sequence
  Description of Artificial Sequence: Synthetic oligonucleotide
  Antisense strand to SEQ ID NO: 1571459
aauuucaccagcggugaua

SEQ ID NO: 1571461 - RNA, 19 nt, Artificial Sequence
  Description of Artificial Sequence: Synthetic oligonucleotide
  Sense strand starting at position 3819 of SEQ ID NO: 1560032
uuuguacaccaauauguga

SEQ ID NO: 1571462 - RNA, 19 nt, Artificial Sequence
  Description of Artificial Sequence: Synthetic oligonucleotide
  Antisense strand to SEQ ID NO: 1571461
ucacauauugguguacaaa

SEQ ID NO: 1571463 - RNA, 19 nt, Artificial Sequence
  Description of Artificial Sequence: Synthetic oligonucleotide
  Sense strand starting at position 3964 of SEQ ID NO: 1560032
cauggauucugggcagaug

SEQ ID NO: 1571464 - RNA, 19 nt, Artificial Sequence
  Description of Artificial Sequence: Synthetic oligonucleotide
  Antisense strand to SEQ ID NO: 1571463
caucugcccagaauccaug

SEQ ID NO: 1571465 - RNA, 19 nt, Artificial Sequence
  Description of Artificial Sequence: Synthetic oligonucleotide
  Sense strand starting at position 3965 of SEQ ID NO: 1560032
auggauucugggcagaugu

SEQ ID NO: 1571466 - RNA, 19 nt, Artificial Sequence
  Description of Artificial Sequence: Synthetic oligonucleotide
  Antisense strand to SEQ ID NO: 1571465
acaucugcccagaauccau

SEQ ID NO: 1571467 - RNA, 19 nt, Artificial Sequence
  Description of Artificial Sequence: Synthetic oligonucleotide
  Sense strand starting at position 160 of SEQ ID NO: 1560033
gcgauaugucuguccaugc

SEQ ID NO: 1571468 - RNA, 19 nt, Artificial Sequence
  Description of Artificial Sequence: Synthetic oligonucleotide
  Antisense strand to SEQ ID NO: 1571467
gcauggacagacauaucgc

SEQ ID NO: 1571469 - RNA, 19 nt, Artificial Sequence
  Description of Artificial Sequence: Synthetic oligonucleotide
  Sense strand starting at position 228 of SEQ ID NO: 1560033
gcugauuucucucugcaau

SEQ ID NO: 1571470 - RNA, 19 nt, Artificial Sequence
  Description of Artificial Sequence: Synthetic oligonucleotide
  Antisense strand to SEQ ID NO: 1571469
auugcagagagaaaucagc

SEQ ID NO: 1571471 - RNA, 19 nt, Artificial Sequence
  Description of Artificial Sequence: Synthetic oligonucleotide
  Sense strand starting at position 331 of SEQ ID NO: 1560033
cucccagauguuugaauuc

SEQ ID NO: 1571472 - RNA, 19 nt, Artificial Sequence
  Description of Artificial Sequence: Synthetic oligonucleotide
  Antisense strand to SEQ ID NO: 1571471
gaauucaaacaucugggag

SEQ ID NO: 1571473 - RNA, 19 nt, Artificial Sequence
  Description of Artificial Sequence: Synthetic oligonucleotide
  Sense strand starting at position 364 of SEQ ID NO: 1560033
uucuuaacguccuugaaau

SEQ ID NO: 1571474 - RNA, 19 nt, Artificial Sequence
  Description of Artificial Sequence: Synthetic oligonucleotide
  Antisense strand to SEQ ID NO: 1571473
auuucaaggacguuaagaa

SEQ ID NO: 1571475 - RNA, 19 nt, Artificial Sequence
  Description of Artificial Sequence: Synthetic oligonucleotide
  Sense strand starting at position 365 of SEQ ID NO: 1560033
ucuuaacguccuugaaauc

SEQ ID NO: 1571476 - RNA, 19 nt, Artificial Sequence
  Description of Artificial Sequence: Synthetic oligonucleotide
  Antisense strand to SEQ ID NO: 1571475
gauuucaaggacguuaaga

SEQ ID NO: 1571477 - RNA, 19 nt, Artificial Sequence
  Description of Artificial Sequence: Synthetic oligonucleotide
  Sense strand starting at position 366 of SEQ ID NO: 1560033
cuuaacguccuugaaauca

SEQ ID NO: 1571478 - RNA, 19 nt, Artificial Sequence
  Description of Artificial Sequence: Synthetic oligonucleotide
  Antisense strand to SEQ ID NO: 1571477
ugauuucaaggacguuaag

SEQ ID NO: 1571479 - RNA, 19 nt, Artificial Sequence
  Description of Artificial Sequence: Synthetic oligonucleotide
  Sense strand starting at position 401 of SEQ ID NO: 1560033
cuucuuguagcauaggauu

SEQ ID NO: 1571480 - RNA, 19 nt, Artificial Sequence
  Description of Artificial Sequence: Synthetic oligonucleotide
  Antisense strand to SEQ ID NO: 1571479
aauccuaugcuacaagaag

SEQ ID NO: 1571481 - RNA, 19 nt, Artificial Sequence
  Description of Artificial Sequence: Synthetic oligonucleotide
  Sense strand starting at position 488 of SEQ ID NO: 1560033
ccucaagugaacggguuaa

SEQ ID NO: 1571482 - RNA, 19 nt, Artificial Sequence
  Description of Artificial Sequence: Synthetic oligonucleotide
  Antisense strand to SEQ ID NO: 1571481
uuaacccguucacuugagg

SEQ ID NO: 1571483 - RNA, 19 nt, Artificial Sequence
  Description of Artificial Sequence: Synthetic oligonucleotide
  Sense strand starting at position 500 of SEQ ID NO: 1560033
ggguuaaaugaauguuguu

SEQ ID NO: 1571484 - RNA, 19 nt, Artificial Sequence
  Description of Artificial Sequence: Synthetic oligonucleotide
  Antisense strand to SEQ ID NO: 1571483
aacaacauucauuuaaccc

SEQ ID NO: 1571485 - RNA, 19 nt, Artificial Sequence
  Description of Artificial Sequence: Synthetic oligonucleotide
  Sense strand starting at position 628 of SEQ ID NO: 1560033
cagugaaagcacuguacuu

SEQ ID NO: 1571486 - RNA, 19 nt, Artificial Sequence
  Description of Artificial Sequence: Synthetic oligonucleotide
  Antisense strand to SEQ ID NO: 1571485
aaguacagugcuuucacug

SEQ ID NO: 1571487 - RNA, 19 nt, Artificial Sequence
  Description of Artificial Sequence: Synthetic oligonucleotide
  Sense strand starting at position 630 of SEQ ID NO: 1560033
gugaaagcacuguacuuua

SEQ ID NO: 1571488 - RNA, 19 nt, Artificial Sequence
  Description of Artificial Sequence: Synthetic oligonucleotide
  Antisense strand to SEQ ID NO: 1571487
uaaaguacagugcuuucac

SEQ ID NO: 1571489 - RNA, 19 nt, Artificial Sequence
  Description of Artificial Sequence: Synthetic oligonucleotide
  Sense strand starting at position 702 of SEQ ID NO: 1560033
ggaguacauccauguccca

SEQ ID NO: 1571490 - RNA, 19 nt, Artificial Sequence
  Description of Artificial Sequence: Synthetic oligonucleotide
  Antisense strand to SEQ ID NO: 1571489
ugggacauggauguacucc

SEQ ID NO: 1571491 - RNA, 19 nt, Artificial Sequence
  Description of Artificial Sequence: Synthetic oligonucleotide
  Sense strand starting at position 774 of SEQ ID NO: 1560033
uguugaauuugagaaauuc

SEQ ID NO: 1571492 - RNA, 19 nt, Artificial Sequence
  Description of Artificial Sequence: Synthetic oligonucleotide
  Antisense strand to SEQ ID NO: 1571491
gaauuucucaaauucaaca

SEQ ID NO: 1571493 - RNA, 19 nt, Artificial Sequence
  Description of Artificial Sequence: Synthetic oligonucleotide
  Sense strand starting at position 949 of SEQ ID NO: 1560033
ucaucagugccuguguagu

SEQ ID NO: 1571494 - RNA, 19 nt, Artificial Sequence
  Description of Artificial Sequence: Synthetic oligonucleotide
  Antisense strand to SEQ ID NO: 1571493
acuacacaggcacugauga

SEQ ID NO: 1571495 - RNA, 19 nt, Artificial Sequence
  Description of Artificial Sequence: Synthetic oligonucleotide
  Sense strand starting at position 1021 of SEQ ID NO: 1560033
uugugaaacgacuguuauc

SEQ ID NO: 1571496 - RNA, 19 nt, Artificial Sequence
  Description of Artificial Sequence: Synthetic oligonucleotide
  Antisense strand to SEQ ID NO: 1571495
gauaacagucguuucacaa

SEQ ID NO: 1571497 - RNA, 19 nt, Artificial Sequence
  Description of Artificial Sequence: Synthetic oligonucleotide
  Sense strand starting at position 1074 of SEQ ID NO: 1560033
guguauggagucugaucua

SEQ ID NO: 1571498 - RNA, 19 nt, Artificial Sequence
  Description of Artificial Sequence: Synthetic oligonucleotide
  Antisense strand to SEQ ID NO: 1571497
uagaucagacuccauacac

SEQ ID NO: 1571499 - RNA, 19 nt, Artificial Sequence
  Description of Artificial Sequence: Synthetic oligonucleotide
  Sense strand starting at position 1219 of SEQ ID NO: 1560033
gcagguuucguggcacugu

SEQ ID NO: 1571500 - RNA, 19 nt, Artificial Sequence
  Description of Artificial Sequence: Synthetic oligonucleotide
  Antisense strand to SEQ ID NO: 1571499
acagugccacgaaaccugc

SEQ ID NO: 1571501 - RNA, 19 nt, Artificial Sequence
  Description of Artificial Sequence: Synthetic oligonucleotide
  Sense strand starting at position 1278 of SEQ ID NO: 1560033
ugcuuucuuguguuuguca

SEQ ID NO: 1571502 - RNA, 19 nt, Artificial Sequence
  Description of Artificial Sequence: Synthetic oligonucleotide
  Antisense strand to SEQ ID NO: 1571501
ugacaaacacaagaaagca

SEQ ID NO: 1571503 - RNA, 19 nt, Artificial Sequence
  Description of Artificial Sequence: Synthetic oligonucleotide
  Sense strand starting at position 1452 of SEQ ID NO: 1560033
ccucauugaugucugcaga

SEQ ID NO: 1571504 - RNA, 19 nt, Artificial Sequence
  Description of Artificial Sequence: Synthetic oligonucleotide
  Antisense strand to SEQ ID NO: 1571503
ucugcagacaucaaugagg

SEQ ID NO: 1571505 - RNA, 19 nt, Artificial Sequence
  Description of Artificial Sequence: Synthetic oligonucleotide
  Sense strand starting at position 1453 of SEQ ID NO: 1560033
cucauugaugucugcagac

SEQ ID NO: 1571506 - RNA, 19 nt, Artificial Sequence
  Description of Artificial Sequence: Synthetic oligonucleotide
  Antisense strand to SEQ ID NO: 1571505
gucugcagacaucaaugag

SEQ ID NO: 1571507 - RNA, 19 nt, Artificial Sequence
  Description of Artificial Sequence: Synthetic oligonucleotide
  Sense strand starting at position 1455 of SEQ ID NO: 1560033
cauugaugucugcagacac

SEQ ID NO: 1571508 - RNA, 19 nt, Artificial Sequence
  Description of Artificial Sequence: Synthetic oligonucleotide
  Antisense strand to SEQ ID NO: 1571507
gugucugcagacaucaaug

SEQ ID NO: 1571509 - RNA, 19 nt, Artificial Sequence
  Description of Artificial Sequence: Synthetic oligonucleotide
  Sense strand starting at position 2066 of SEQ ID NO: 1560033
ccauuuaucuguucgggca

SEQ ID NO: 1571510 - RNA, 19 nt, Artificial Sequence
  Description of Artificial Sequence: Synthetic oligonucleotide
  Antisense strand to SEQ ID NO: 1571509
ugcccgaacagauaaaugg

SEQ ID NO: 1571511 - RNA, 19 nt, Artificial Sequence
  Description of Artificial Sequence: Synthetic oligonucleotide
  Sense strand starting at position 2085 of SEQ ID NO: 1560033
cauugagguuauuuccgua

SEQ ID NO: 1571512 - RNA, 19 nt, Artificial Sequence
  Description of Artificial Sequence: Synthetic oligonucleotide
  Antisense strand to SEQ ID NO: 1571511
uacggaaauaaccucaaug

SEQ ID NO: 1571513 - RNA, 19 nt, Artificial Sequence
  Description of Artificial Sequence: Synthetic oligonucleotide
  Sense strand starting at position 2089 of SEQ ID NO: 1560033
gagguuauuuccguaucuu

SEQ ID NO: 1571514 - RNA, 19 nt, Artificial Sequence
  Description of Artificial Sequence: Synthetic oligonucleotide
  Antisense strand to SEQ ID NO: 1571513
aagauacggaaauaaccuc

SEQ ID NO: 1571515 - RNA, 19 nt, Artificial Sequence
  Description of Artificial Sequence: Synthetic oligonucleotide
  Sense strand starting at position 2105 of SEQ ID NO: 1560033
cuugguuauucuguauaau

SEQ ID NO: 1571516 - RNA, 19 nt, Artificial Sequence
  Description of Artificial Sequence: Synthetic oligonucleotide
  Antisense strand to SEQ ID NO: 1571515
auuauacagaauaaccaag

SEQ ID NO: 1571517 - RNA, 19 nt, Artificial Sequence
  Description of Artificial Sequence: Synthetic oligonucleotide
  Sense strand starting at position 2106 of SEQ ID NO: 1560033
uugguuauucuguauaaug

SEQ ID NO: 1571518 - RNA, 19 nt, Artificial Sequence
  Description of Artificial Sequence: Synthetic oligonucleotide
  Antisense strand to SEQ ID NO: 1571517
cauuauacagaauaaccaa

SEQ ID NO: 1571519 - RNA, 19 nt, Artificial Sequence
  Description of Artificial Sequence: Synthetic oligonucleotide
  Sense strand starting at position 2108 of SEQ ID NO: 1560033
gguuauucuguauaaugcu

SEQ ID NO: 1571520 - RNA, 19 nt, Artificial Sequence
  Description of Artificial Sequence: Synthetic oligonucleotide
  Antisense strand to SEQ ID NO: 1571519
agcauuauacagaauaacc

SEQ ID NO: 1571521 - RNA, 19 nt, Artificial Sequence
  Description of Artificial Sequence: Synthetic oligonucleotide
  Sense strand starting at position 2169 of SEQ ID NO: 1560033
uuuaaauuccuuuggagau

SEQ ID NO: 1571522 - RNA, 19 nt, Artificial Sequence
  Description of Artificial Sequence: Synthetic oligonucleotide
  Antisense strand to SEQ ID NO: 1571521
aucuccaaaggaauuuaaa

SEQ ID NO: 1571523 - RNA, 19 nt, Artificial Sequence
  Description of Artificial Sequence: Synthetic oligonucleotide
  Sense strand starting at position 2688 of SEQ ID NO: 1560033
gagauaccuccauaguagu

SEQ ID NO: 1571524 - RNA, 19 nt, Artificial Sequence
  Description of Artificial Sequence: Synthetic oligonucleotide
  Antisense strand to SEQ ID NO: 1571523
acuacuauggagguaucuc

SEQ ID NO: 1571525 - RNA, 19 nt, Artificial Sequence
  Description of Artificial Sequence: Synthetic oligonucleotide
  Sense strand starting at position 2772 of SEQ ID NO: 1560033
ugacacuuaucuuugucuu

SEQ ID NO: 1571526 - RNA, 19 nt, Artificial Sequence
  Description of Artificial Sequence: Synthetic oligonucleotide
  Antisense strand to SEQ ID NO: 1571525
aagacaaagauaaguguca

SEQ ID NO: 1571527 - RNA, 19 nt, Artificial Sequence
  Description of Artificial Sequence: Synthetic oligonucleotide
  Sense strand starting at position 2821 of SEQ ID NO: 1560033
gugguagcucauuacaguu

SEQ ID NO: 1571528 - RNA, 19 nt, Artificial Sequence
  Description of Artificial Sequence: Synthetic oligonucleotide
  Antisense strand to SEQ ID NO: 1571527
aacuguaaugagcuaccac

SEQ ID NO: 1571529 - RNA, 19 nt, Artificial Sequence
  Description of Artificial Sequence: Synthetic oligonucleotide
  Sense strand starting at position 2968 of SEQ ID NO: 1560033
uugguaucaaguuguauga

SEQ ID NO: 1571530 - RNA, 19 nt, Artificial Sequence
  Description of Artificial Sequence: Synthetic oligonucleotide
  Antisense strand to SEQ ID NO: 1571529
ucauacaacuugauaccaa

SEQ ID NO: 1571531 - RNA, 19 nt, Artificial Sequence
  Description of Artificial Sequence: Synthetic oligonucleotide
  Sense strand starting at position 3091 of SEQ ID NO: 1560033
ucuuauugauuugaguaca

SEQ ID NO: 1571532 - RNA, 19 nt, Artificial Sequence
  Description of Artificial Sequence: Synthetic oligonucleotide
  Antisense strand to SEQ ID NO: 1571531
uguacucaaaucaauaaga

SEQ ID NO: 1571533 - RNA, 19 nt, Artificial Sequence
  Description of Artificial Sequence: Synthetic oligonucleotide
  Sense strand starting at position 3109 of SEQ ID NO: 1560033
acuauauaugcuggaaaca

SEQ ID NO: 1571534 - RNA, 19 nt, Artificial Sequence
  Description of Artificial Sequence: Synthetic oligonucleotide
  Antisense strand to SEQ ID NO: 1571533
uguuuccagcauauauagu

SEQ ID NO: 1571535 - RNA, 19 nt, Artificial Sequence
  Description of Artificial Sequence: Synthetic oligonucleotide
  Sense strand starting at position 3125 of SEQ ID NO: 1560033
acaaguaauuccuugguuu

SEQ ID NO: 1571536 - RNA, 19 nt, Artificial Sequence
  Description of Artificial Sequence: Synthetic oligonucleotide
  Antisense strand to SEQ ID NO: 1571535
aaaccaaggaauuacuugu

SEQ ID NO: 1571537 - RNA, 19 nt, Artificial Sequence
  Description of Artificial Sequence: Synthetic oligonucleotide
  Sense strand starting at position 3330 of SEQ ID NO: 1560033
agaauuaaguuguugcauu

SEQ ID NO: 1571538 - RNA, 19 nt, Artificial Sequence
  Description of Artificial Sequence: Synthetic oligonucleotide
  Antisense strand to SEQ ID NO: 1571537
aaugcaacaacuuaauucu

SEQ ID NO: 1571539 - RNA, 19 nt, Artificial Sequence
  Description of Artificial Sequence: Synthetic oligonucleotide
  Sense strand starting at position 3341 of SEQ ID NO: 1560033
guugcauugcacuaacaau

SEQ ID NO: 1571540 - RNA, 19 nt, Artificial Sequence
  Description of Artificial Sequence: Synthetic oligonucleotide
  Antisense strand to SEQ ID NO: 1571539
auuguuagugcaaugcaac

SEQ ID NO: 1571541 - RNA, 19 nt, Artificial Sequence
  Description of Artificial Sequence: Synthetic oligonucleotide
  Sense strand starting at position 3497 of SEQ ID NO: 1560033
cugccuacuggacauguua

SEQ ID NO: 1571542 - RNA, 19 nt, Artificial Sequence
  Description of Artificial Sequence: Synthetic oligonucleotide
  Antisense strand to SEQ ID NO: 1571541
uaacauguccaguaggcag

SEQ ID NO: 1571543 - RNA, 19 nt, Artificial Sequence
  Description of Artificial Sequence: Synthetic oligonucleotide
  Sense strand starting at position 3539 of SEQ ID NO: 1560033
aaagcuuuguguccagaau

SEQ ID NO: 1571544 - RNA, 19 nt, Artificial Sequence
  Description of Artificial Sequence: Synthetic oligonucleotide
  Antisense strand to SEQ ID NO: 1571543
auucuggacacaaagcuuu

SEQ ID NO: 1571545 - RNA, 19 nt, Artificial Sequence
  Description of Artificial Sequence: Synthetic oligonucleotide
  Sense strand starting at position 3540 of SEQ ID NO: 1560033
aagcuuuguguccagaauc

SEQ ID NO: 1571546 - RNA, 19 nt, Artificial Sequence
  Description of Artificial Sequence: Synthetic oligonucleotide
  Antisense strand to SEQ ID NO: 1571545
gauucuggacacaaagcuu

SEQ ID NO: 1571547 - RNA, 19 nt, Artificial Sequence
  Description of Artificial Sequence: Synthetic oligonucleotide
  Sense strand starting at position 1542 of SEQ ID NO: 1560034
cgcugauucucuuaacgac

SEQ ID NO: 1571548 - RNA, 19 nt, Artificial Sequence
  Description of Artificial Sequence: Synthetic oligonucleotide
  Antisense strand to SEQ ID NO: 1571547
gucguuaagagaaucagcg

SEQ ID NO: 1571549 - RNA, 19 nt, Artificial Sequence
  Description of Artificial Sequence: Synthetic oligonucleotide
  Sense strand starting at position 1601 of SEQ ID NO: 1560034
ucuguaaacugggugauga

SEQ ID NO: 1571550 - RNA, 19 nt, Artificial Sequence
  Description of Artificial Sequence: Synthetic oligonucleotide
  Antisense strand to SEQ ID NO: 1571549
ucaucacccaguuuacaga

SEQ ID NO: 1571551 - RNA, 19 nt, Artificial Sequence
  Description of Artificial Sequence: Synthetic oligonucleotide
  Sense strand starting at position 1602 of SEQ ID NO: 1560034
cuguaaacugggugaugau

SEQ ID NO: 1571552 - RNA, 19 nt, Artificial Sequence
  Description of Artificial Sequence: Synthetic oligonucleotide
  Antisense strand to SEQ ID NO: 1571551
aucaucacccaguuuacag

SEQ ID NO: 1571553 - RNA, 19 nt, Artificial Sequence
  Description of Artificial Sequence: Synthetic oligonucleotide
  Sense strand starting at position 1639 of SEQ ID NO: 1560034
ggcucuucagcguacagau

SEQ ID NO: 1571554 - RNA, 19 nt, Artificial Sequence
  Description of Artificial Sequence: Synthetic oligonucleotide
  Antisense strand to SEQ ID NO: 1571553
aucuguacgcugaagagcc

SEQ ID NO: 1571555 - RNA, 19 nt, Artificial Sequence
  Description of Artificial Sequence: Synthetic oligonucleotide
  Sense strand starting at position 1715 of SEQ ID NO: 1560034
agccgaggucuuuacgaau

SEQ ID NO: 1571556 - RNA, 19 nt, Artificial Sequence
  Description of Artificial Sequence: Synthetic oligonucleotide
  Antisense strand to SEQ ID NO: 1571555
auucguaaagaccucggcu

SEQ ID NO: 1571557 - RNA, 19 nt, Artificial Sequence
  Description of Artificial Sequence: Synthetic oligonucleotide
  Sense strand starting at position 1730 of SEQ ID NO: 1560034
gaauuugccuccuaguaga

SEQ ID NO: 1571558 - RNA, 19 nt, Artificial Sequence
  Description of Artificial Sequence: Synthetic oligonucleotide
  Antisense strand to SEQ ID NO: 1571557
ucuacuaggaggcaaauuc

SEQ ID NO: 1571559 - RNA, 19 nt, Artificial Sequence
  Description of Artificial Sequence: Synthetic oligonucleotide
  Sense strand starting at position 1873 of SEQ ID NO: 1560034
gcacucaugggaugggaga

SEQ ID NO: 1571560 - RNA, 19 nt, Artificial Sequence
  Description of Artificial Sequence: Synthetic oligonucleotide
  Antisense strand to SEQ ID NO: 1571559
ucucccaucccaugagugc

SEQ ID NO: 1571561 - RNA, 19 nt, Artificial Sequence
  Description of Artificial Sequence: Synthetic oligonucleotide
  Sense strand starting at position 2036 of SEQ ID NO: 1560034
ggccaagucacguggauuc

SEQ ID NO: 1571562 - RNA, 19 nt, Artificial Sequence
  Description of Artificial Sequence: Synthetic oligonucleotide
  Antisense strand to SEQ ID NO: 1571561
gaauccacgugacuuggcc

SEQ ID NO: 1571563 - RNA, 19 nt, Artificial Sequence
  Description of Artificial Sequence: Synthetic oligonucleotide
  Sense strand starting at position 2071 of SEQ ID NO: 1560034
ggaagcaaguucucagcau

SEQ ID NO: 1571564 - RNA, 19 nt, Artificial Sequence
  Description of Artificial Sequence: Synthetic oligonucleotide
  Antisense strand to SEQ ID NO: 1571563
augcugagaacuugcuucc

SEQ ID NO: 1571565 - RNA, 19 nt, Artificial Sequence
  Description of Artificial Sequence: Synthetic oligonucleotide
  Sense strand starting at position 2072 of SEQ ID NO: 1560034
gaagcaaguucucagcauc

SEQ ID NO: 1571566 - RNA, 19 nt, Artificial Sequence
  Description of Artificial Sequence: Synthetic oligonucleotide
  Antisense strand to SEQ ID NO: 1571565
gaugcugagaacuugcuuc

SEQ ID NO: 1571567 - RNA, 19 nt, Artificial Sequence
  Description of Artificial Sequence: Synthetic oligonucleotide
  Sense strand starting at position 2084 of SEQ ID NO: 1560034
cagcaucagcuuugaguga

SEQ ID NO: 1571568 - RNA, 19 nt, Artificial Sequence
  Description of Artificial Sequence: Synthetic oligonucleotide
  Antisense strand to SEQ ID NO: 1571567
ucacucaaagcugaugcug

SEQ ID NO: 1571569 - RNA, 19 nt, Artificial Sequence
  Description of Artificial Sequence: Synthetic oligonucleotide
  Sense strand starting at position 2107 of SEQ ID NO: 1560034
gcagaagagucacaugaau

SEQ ID NO: 1571570 - RNA, 19 nt, Artificial Sequence
  Description of Artificial Sequence: Synthetic oligonucleotide
  Antisense strand to SEQ ID NO: 1571569
auucaugugacucuucugc

SEQ ID NO: 1571571 - RNA, 19 nt, Artificial Sequence
  Description of Artificial Sequence: Synthetic oligonucleotide
  Sense strand starting at position 2167 of SEQ ID NO: 1560034
agguugugcgacgaggaaa

SEQ ID NO: 1571572 - RNA, 19 nt, Artificial Sequence
  Description of Artificial Sequence: Synthetic oligonucleotide
  Antisense strand to SEQ ID NO: 1571571
uuuccucgucgcacaaccu

SEQ ID NO: 1571573 - RNA, 19 nt, Artificial Sequence
  Description of Artificial Sequence: Synthetic oligonucleotide
  Sense strand starting at position 2219 of SEQ ID NO: 1560034
gaguaugucacguguaacc

SEQ ID NO: 1571574 - RNA, 19 nt, Artificial Sequence
  Description of Artificial Sequence: Synthetic oligonucleotide
  Antisense strand to SEQ ID NO: 1571573
gguuacacgugacauacuc

SEQ ID NO: 1571575 - RNA, 19 nt, Artificial Sequence
  Description of Artificial Sequence: Synthetic oligonucleotide
  Sense strand starting at position 2259 of SEQ ID NO: 1560034
gcucgagaacccggaaaua

SEQ ID NO: 1571576 - RNA, 19 nt, Artificial Sequence
  Description of Artificial Sequence: Synthetic oligonucleotide
  Antisense strand to SEQ ID NO: 1571575
uauuuccggguucucgagc

SEQ ID NO: 1571577 - RNA, 19 nt, Artificial Sequence
  Description of Artificial Sequence: Synthetic oligonucleotide
  Sense strand starting at position 2300 of SEQ ID NO: 1560034
agaagauguugccacaugu

SEQ ID NO: 1571578 - RNA, 19 nt, Artificial Sequence
  Description of Artificial Sequence: Synthetic oligonucleotide
  Antisense strand to SEQ ID NO: 1571577
acauguggcaacaucuucu

SEQ ID NO: 1571579 - RNA, 19 nt, Artificial Sequence
  Description of Artificial Sequence: Synthetic oligonucleotide
  Sense strand starting at position 2310 of SEQ ID NO: 1560034
gccacauguggccagagaa

SEQ ID NO: 1571580 - RNA, 19 nt, Artificial Sequence
  Description of Artificial Sequence: Synthetic oligonucleotide
  Antisense strand to SEQ ID NO: 1571579
uucucuggccacauguggc

SEQ ID NO: 1571581 - RNA, 19 nt, Artificial Sequence
  Description of Artificial Sequence: Synthetic oligonucleotide
  Sense strand starting at position 2530 of SEQ ID NO: 1560034
ggcggauacuguguuguuu

SEQ ID NO: 1571582 - RNA, 19 nt, Artificial Sequence
  Description of Artificial Sequence: Synthetic oligonucleotide
  Antisense strand to SEQ ID NO: 1571581
aaacaacacaguauccgcc

SEQ ID NO: 1571583 - RNA, 19 nt, Artificial Sequence
  Description of Artificial Sequence: Synthetic oligonucleotide
  Sense strand starting at position 2534 of SEQ ID NO: 1560034
gauacuguguuguuugagu

SEQ ID NO: 1571584 - RNA, 19 nt, Artificial Sequence
  Description of Artificial Sequence: Synthetic oligonucleotide
  Antisense strand to SEQ ID NO: 1571583
acucaaacaacacaguauc

SEQ ID NO: 1571585 - RNA, 19 nt, Artificial Sequence
  Description of Artificial Sequence: Synthetic oligonucleotide
  Sense strand starting at position 2536 of SEQ ID NO: 1560034
uacuguguuguuugaguuu

SEQ ID NO: 1571586 - RNA, 19 nt, Artificial Sequence
  Description of Artificial Sequence: Synthetic oligonucleotide
  Antisense strand to SEQ ID NO: 1571585
aaacucaaacaacacagua

SEQ ID NO: 1571587 - RNA, 19 nt, Artificial Sequence
  Description of Artificial Sequence: Synthetic oligonucleotide
  Sense strand starting at position 2551 of SEQ ID NO: 1560034
guuucuucacacggagaug

SEQ ID NO: 1571588 - RNA, 19 nt, Artificial Sequence
  Description of Artificial Sequence: Synthetic oligonucleotide
  Antisense strand to SEQ ID NO: 1571587
caucuccgugugaagaaac

SEQ ID NO: 1571589 - RNA, 19 nt, Artificial Sequence
  Description of Artificial Sequence: Synthetic oligonucleotide
  Sense strand starting at position 2740 of SEQ ID NO: 1560034
cuggcuuccuccuuuggaa

SEQ ID NO: 1571590 - RNA, 19 nt, Artificial Sequence
  Description of Artificial Sequence: Synthetic oligonucleotide
  Antisense strand to SEQ ID NO: 1571589
uuccaaaggaggaagccag

SEQ ID NO: 1571591 - RNA, 19 nt, Artificial Sequence
  Description of Artificial Sequence: Synthetic oligonucleotide
  Sense strand starting at position 2742 of SEQ ID NO: 1560034
ggcuuccuccuuuggaaag

SEQ ID NO: 1571592 - RNA, 19 nt, Artificial Sequence
  Description of Artificial Sequence: Synthetic oligonucleotide
  Antisense strand to SEQ ID NO: 1571591
cuuuccaaaggaggaagcc

SEQ ID NO: 1571593 - RNA, 19 nt, Artificial Sequence
  Description of Artificial Sequence: Synthetic oligonucleotide
  Sense strand starting at position 2795 of SEQ ID NO: 1560034
cuaaauugagcgcgaugau

SEQ ID NO: 1571594 - RNA, 19 nt, Artificial Sequence
  Description of Artificial Sequence: Synthetic oligonucleotide
  Antisense strand to SEQ ID NO: 1571593
aucaucgcgcucaauuuag

SEQ ID NO: 1571595 - RNA, 19 nt, Artificial Sequence
  Description of Artificial Sequence: Synthetic oligonucleotide
  Sense strand starting at position 2796 of SEQ ID NO: 1560034
uaaauugagcgcgaugauu

SEQ ID NO: 1571596 - RNA, 19 nt, Artificial Sequence
  Description of Artificial Sequence: Synthetic oligonucleotide
  Antisense strand to SEQ ID NO: 1571595
aaucaucgcgcucaauuua

SEQ ID NO: 1571597 - RNA, 19 nt, Artificial Sequence
  Description of Artificial Sequence: Synthetic oligonucleotide
  Sense strand starting at position 2805 of SEQ ID NO: 1560034
cgcgaugauucaggguaaa

SEQ ID NO: 1571598 - RNA, 19 nt, Artificial Sequence
  Description of Artificial Sequence: Synthetic oligonucleotide
  Antisense strand to SEQ ID NO: 1571597
uuuacccugaaucaucgcg

SEQ ID NO: 1571599 - RNA, 19 nt, Artificial Sequence
  Description of Artificial Sequence: Synthetic oligonucleotide
  Sense strand starting at position 2817 of SEQ ID NO: 1560034
ggguaaagcacuuagcuca

SEQ ID NO: 1571600 - RNA, 19 nt, Artificial Sequence
  Description of Artificial Sequence: Synthetic oligonucleotide
  Antisense strand to SEQ ID NO: 1571599
ugagcuaagugcuuuaccc

SEQ ID NO: 1571601 - RNA, 19 nt, Artificial Sequence
  Description of Artificial Sequence: Synthetic oligonucleotide
  Sense strand starting at position 2829 of SEQ ID NO: 1560034
uagcucaaggccugaguaa

SEQ ID NO: 1571602 - RNA, 19 nt, Artificial Sequence
  Description of Artificial Sequence: Synthetic oligonucleotide
  Antisense strand to SEQ ID NO: 1571601
uuacucaggccuugagcua

SEQ ID NO: 1571603 - RNA, 19 nt, Artificial Sequence
  Description of Artificial Sequence: Synthetic oligonucleotide
  Sense strand starting at position 2841 of SEQ ID NO: 1560034
ugaguaagcggcuaguaau

SEQ ID NO: 1571604 - RNA, 19 nt, Artificial Sequence
  Description of Artificial Sequence: Synthetic oligonucleotide
  Antisense strand to SEQ ID NO: 1571603
auuacuagccgcuuacuca

SEQ ID NO: 1571605 - RNA, 19 nt, Artificial Sequence
  Description of Artificial Sequence: Synthetic oligonucleotide
  Sense strand starting at position 2847 of SEQ ID NO: 1560034
agcggcuaguaaucauaau

SEQ ID NO: 1571606 - RNA, 19 nt, Artificial Sequence
  Description of Artificial Sequence: Synthetic oligonucleotide
  Antisense strand to SEQ ID NO: 1571605
auuaugauuacuagccgcu

SEQ ID NO: 1571607 - RNA, 19 nt, Artificial Sequence
  Description of Artificial Sequence: Synthetic oligonucleotide
  Sense strand starting at position 2848 of SEQ ID NO: 1560034
gcggcuaguaaucauaaua

SEQ ID NO: 1571608 - RNA, 19 nt, Artificial Sequence
  Description of Artificial Sequence: Synthetic oligonucleotide
  Antisense strand to SEQ ID NO: 1571607
uauuaugauuacuagccgc

SEQ ID NO: 1571609 - RNA, 19 nt, Artificial Sequence
  Description of Artificial Sequence: Synthetic oligonucleotide
  Sense strand starting at position 2917 of SEQ ID NO: 1560034
gugcgacccaaugacuuaa

SEQ ID NO: 1571610 - RNA, 19 nt, Artificial Sequence
  Description of Artificial Sequence: Synthetic oligonucleotide
  Antisense strand to SEQ ID NO: 1571609
uuaagucauugggucgcac

SEQ ID NO: 1571611 - RNA, 19 nt, Artificial Sequence
  Description of Artificial Sequence: Synthetic oligonucleotide
  Sense strand starting at position 2928 of SEQ ID NO: 1560034
ugacuuaaucuuugugugu

SEQ ID NO: 1571612 - RNA, 19 nt, Artificial Sequence
  Description of Artificial Sequence: Synthetic oligonucleotide
  Antisense strand to SEQ ID NO: 1571611
acacacaaagauuaaguca

SEQ ID NO: 1571613 - RNA, 19 nt, Artificial Sequence
  Description of Artificial Sequence: Synthetic oligonucleotide
  Sense strand starting at position 2929 of SEQ ID NO: 1560034
gacuuaaucuuuguguguc

SEQ ID NO: 1571614 - RNA, 19 nt, Artificial Sequence
  Description of Artificial Sequence: Synthetic oligonucleotide
  Antisense strand to SEQ ID NO: 1571613
gacacacaaagauuaaguc

SEQ ID NO: 1571615 - RNA, 19 nt, Artificial Sequence
  Description of Artificial Sequence: Synthetic oligonucleotide
  Sense strand starting at position 2932 of SEQ ID NO: 1560034
uuaaucuuuguguguccua

SEQ ID NO: 1571616 - RNA, 19 nt, Artificial Sequence
  Description of Artificial Sequence: Synthetic oligonucleotide
  Antisense strand to SEQ ID NO: 1571615
uaggacacacaaagauuaa

SEQ ID NO: 1571617 - RNA, 19 nt, Artificial Sequence
  Description of Artificial Sequence: Synthetic oligonucleotide
  Sense strand starting at position 2935 of SEQ ID NO: 1560034
aucuuuguguguccuaguu

SEQ ID NO: 1571618 - RNA, 19 nt, Artificial Sequence
  Description of Artificial Sequence: Synthetic oligonucleotide
  Antisense strand to SEQ ID NO: 1571617
aacuaggacacacaaagau

SEQ ID NO: 1571619 - RNA, 19 nt, Artificial Sequence
  Description of Artificial Sequence: Synthetic oligonucleotide
  Sense strand starting at position 2966 of SEQ ID NO: 1560034
aaaugaguaucauaacgua

SEQ ID NO: 1571620 - RNA, 19 nt, Artificial Sequence
  Description of Artificial Sequence: Synthetic oligonucleotide
  Antisense strand to SEQ ID NO: 1571619
uacguuaugauacucauuu

SEQ ID NO: 1571621 - RNA, 19 nt, Artificial Sequence
  Description of Artificial Sequence: Synthetic oligonucleotide
  Sense strand starting at position 3027 of SEQ ID NO: 1560034
uauugagcgucuguuguau

SEQ ID NO: 1571622 - RNA, 19 nt, Artificial Sequence
  Description of Artificial Sequence: Synthetic oligonucleotide
  Antisense strand to SEQ ID NO: 1571621
auacaacagacgcucaaua

SEQ ID NO: 1571623 - RNA, 19 nt, Artificial Sequence
  Description of Artificial Sequence: Synthetic oligonucleotide
  Sense strand starting at position 3066 of SEQ ID NO: 1560034
agaaucccuuccuugugaa

SEQ ID NO: 1571624 - RNA, 19 nt, Artificial Sequence
  Description of Artificial Sequence: Synthetic oligonucleotide
  Antisense strand to SEQ ID NO: 1571623
uucacaaggaagggauucu

SEQ ID NO: 1571625 - RNA, 19 nt, Artificial Sequence
  Description of Artificial Sequence: Synthetic oligonucleotide
  Sense strand starting at position 3067 of SEQ ID NO: 1560034
gaaucccuuccuugugaag

SEQ ID NO: 1571626 - RNA, 19 nt, Artificial Sequence
  Description of Artificial Sequence: Synthetic oligonucleotide
  Antisense strand to SEQ ID NO: 1571625
cuucacaaggaagggauuc

SEQ ID NO: 1571627 - RNA, 19 nt, Artificial Sequence
  Description of Artificial Sequence: Synthetic oligonucleotide
  Sense strand starting at position 713 of SEQ ID NO: 1560035
aguggaauucgguggaauu

SEQ ID NO: 1571628 - RNA, 19 nt, Artificial Sequence
  Description of Artificial Sequence: Synthetic oligonucleotide
  Antisense strand to SEQ ID NO: 1571627
aauuccaccgaauuccacu

SEQ ID NO: 1571629 - RNA, 19 nt, Artificial Sequence
  Description of Artificial Sequence: Synthetic oligonucleotide
  Sense strand starting at position 714 of SEQ ID NO: 1560035
guggaauucgguggaauua

SEQ ID NO: 1571630 - RNA, 19 nt, Artificial Sequence
  Description of Artificial Sequence: Synthetic oligonucleotide
  Antisense strand to SEQ ID NO: 1571629
uaauuccaccgaauuccac

SEQ ID NO: 1571631 - RNA, 19 nt, Artificial Sequence
  Description of Artificial Sequence: Synthetic oligonucleotide
  Sense strand starting at position 716 of SEQ ID NO: 1560035
ggaauucgguggaauuagu

SEQ ID NO: 1571632 - RNA, 19 nt, Artificial Sequence
  Description of Artificial Sequence: Synthetic oligonucleotide
  Antisense strand to SEQ ID NO: 1571631
acuaauuccaccgaauucc

SEQ ID NO: 1571633 - RNA, 19 nt, Artificial Sequence
  Description of Artificial Sequence: Synthetic oligonucleotide
  Sense strand starting at position 980 of SEQ ID NO: 1560035
gcacgcagauagucaauau

SEQ ID NO: 1571634 - RNA, 19 nt, Artificial Sequence
  Description of Artificial Sequence: Synthetic oligonucleotide
  Antisense strand to SEQ ID NO: 1571633
auauugacuaucugcgugc

SEQ ID NO: 1571635 - RNA, 19 nt, Artificial Sequence
  Description of Artificial Sequence: Synthetic oligonucleotide
  Sense strand starting at position 984 of SEQ ID NO: 1560035
gcagauagucaauaucuuc

SEQ ID NO: 1571636 - RNA, 19 nt, Artificial Sequence
  Description of Artificial Sequence: Synthetic oligonucleotide
  Antisense strand to SEQ ID NO: 1571635
gaagauauugacuaucugc

SEQ ID NO: 1571637 - RNA, 19 nt, Artificial Sequence
  Description of Artificial Sequence: Synthetic oligonucleotide
  Sense strand starting at position 1058 of SEQ ID NO: 1560035
cugggaguuggucaagucu

SEQ ID NO: 1571638 - RNA, 19 nt, Artificial Sequence
  Description of Artificial Sequence: Synthetic oligonucleotide
  Antisense strand to SEQ ID NO: 1571637
agacuugaccaacucccag

SEQ ID NO: 1571639 - RNA, 19 nt, Artificial Sequence
  Description of Artificial Sequence: Synthetic oligonucleotide
  Sense strand starting at position 1206 of SEQ ID NO: 1560035
cucugugacuccuucccau

SEQ ID NO: 1571640 - RNA, 19 nt, Artificial Sequence
  Description of Artificial Sequence: Synthetic oligonucleotide
  Antisense strand to SEQ ID NO: 1571639
augggaaggagucacagag

SEQ ID NO: 1571641 - RNA, 19 nt, Artificial Sequence
  Description of Artificial Sequence: Synthetic oligonucleotide
  Sense strand starting at position 1274 of SEQ ID NO: 1560035
gggacuuguggugguuaag

SEQ ID NO: 1571642 - RNA, 19 nt, Artificial Sequence
  Description of Artificial Sequence: Synthetic oligonucleotide
  Antisense strand to SEQ ID NO: 1571641
cuuaaccaccacaaguccc

SEQ ID NO: 1571643 - RNA, 19 nt, Artificial Sequence
  Description of Artificial Sequence: Synthetic oligonucleotide
  Sense strand starting at position 1314 of SEQ ID NO: 1560035
ccaguccugucaguuaaca

SEQ ID NO: 1571644 - RNA, 19 nt, Artificial Sequence
  Description of Artificial Sequence: Synthetic oligonucleotide
  Antisense strand to SEQ ID NO: 1571643
uguuaacugacaggacugg

SEQ ID NO: 1571645 - RNA, 19 nt, Artificial Sequence
  Description of Artificial Sequence: Synthetic oligonucleotide
  Sense strand starting at position 1325 of SEQ ID NO: 1560035
aguuaacagcugugugaua

SEQ ID NO: 1571646 - RNA, 19 nt, Artificial Sequence
  Description of Artificial Sequence: Synthetic oligonucleotide
  Antisense strand to SEQ ID NO: 1571645
uaucacacagcuguuaacu

SEQ ID NO: 1571647 - RNA, 19 nt, Artificial Sequence
  Description of Artificial Sequence: Synthetic oligonucleotide
  Sense strand starting at position 1326 of SEQ ID NO: 1560035
guuaacagcugugugauau

SEQ ID NO: 1571648 - RNA, 19 nt, Artificial Sequence
  Description of Artificial Sequence: Synthetic oligonucleotide
  Antisense strand to SEQ ID NO: 1571647
auaucacacagcuguuaac

SEQ ID NO: 1571649 - RNA, 19 nt, Artificial Sequence
  Description of Artificial Sequence: Synthetic oligonucleotide
  Sense strand starting at position 1327 of SEQ ID NO: 1560035
uuaacagcugugugauauu

SEQ ID NO: 1571650 - RNA, 19 nt, Artificial Sequence
  Description of Artificial Sequence: Synthetic oligonucleotide
  Antisense strand to SEQ ID NO: 1571649
aauaucacacagcuguuaa

SEQ ID NO: 1571651 - RNA, 19 nt, Artificial Sequence
  Description of Artificial Sequence: Synthetic oligonucleotide
  Sense strand starting at position 1381 of SEQ ID NO: 1560035
ugucaaguagggugauacu

SEQ ID NO: 1571652 - RNA, 19 nt, Artificial Sequence
  Description of Artificial Sequence: Synthetic oligonucleotide
  Antisense strand to SEQ ID NO: 1571651
aguaucacccuacuugaca

SEQ ID NO: 1571653 - RNA, 19 nt, Artificial Sequence
  Description of Artificial Sequence: Synthetic oligonucleotide
  Sense strand starting at position 1390 of SEQ ID NO: 1560035
gggugauacuaguucccac

SEQ ID NO: 1571654 - RNA, 19 nt, Artificial Sequence
  Description of Artificial Sequence: Synthetic oligonucleotide
  Antisense strand to SEQ ID NO: 1571653
gugggaacuaguaucaccc

SEQ ID NO: 1571655 - RNA, 19 nt, Artificial Sequence
  Description of Artificial Sequence: Synthetic oligonucleotide
  Sense strand starting at position 1445 of SEQ ID NO: 1560035
gcaagcuuggcuuaguaaa

SEQ ID NO: 1571656 - RNA, 19 nt, Artificial Sequence
  Description of Artificial Sequence: Synthetic oligonucleotide
  Antisense strand to SEQ ID NO: 1571655
uuuacuaagccaagcuugc

SEQ ID NO: 1571657 - RNA, 19 nt, Artificial Sequence
  Description of Artificial Sequence: Synthetic oligonucleotide
  Sense strand starting at position 1447 of SEQ ID NO: 1560035
aagcuuggcuuaguaaauc

SEQ ID NO: 1571658 - RNA, 19 nt, Artificial Sequence
  Description of Artificial Sequence: Synthetic oligonucleotide
  Antisense strand to SEQ ID NO: 1571657
gauuuacuaagccaagcuu

SEQ ID NO: 1571659 - RNA, 19 nt, Artificial Sequence
  Description of Artificial Sequence: Synthetic oligonucleotide
  Sense strand starting at position 1458 of SEQ ID NO: 1560035
aguaaauccucucugggag

SEQ ID NO: 1571660 - RNA, 19 nt, Artificial Sequence
  Description of Artificial Sequence: Synthetic oligonucleotide
  Antisense strand to SEQ ID NO: 1571659
cucccagagaggauuuacu

SEQ ID NO: 1571661 - RNA, 19 nt, Artificial Sequence
  Description of Artificial Sequence: Synthetic oligonucleotide
  Sense strand starting at position 1459 of SEQ ID NO: 1560035
guaaauccucucugggagu

SEQ ID NO: 1571662 - RNA, 19 nt, Artificial Sequence
  Description of Artificial Sequence: Synthetic oligonucleotide
  Antisense strand to SEQ ID NO: 1571661
acucccagagaggauuuac

SEQ ID NO: 1571663 - RNA, 19 nt, Artificial Sequence
  Description of Artificial Sequence: Synthetic oligonucleotide
  Sense strand starting at position 1520 of SEQ ID NO: 1560035
gcauaagagcccuggacuu

SEQ ID NO: 1571664 - RNA, 19 nt, Artificial Sequence
  Description of Artificial Sequence: Synthetic oligonucleotide
  Antisense strand to SEQ ID NO: 1571663
aaguccagggcucuuaugc

SEQ ID NO: 1571665 - RNA, 19 nt, Artificial Sequence
  Description of Artificial Sequence: Synthetic oligonucleotide
  Sense strand starting at position 1750 of SEQ ID NO: 1560035
cccgucugucccgugacau

SEQ ID NO: 1571666 - RNA, 19 nt, Artificial Sequence
  Description of Artificial Sequence: Synthetic oligonucleotide
  Antisense strand to SEQ ID NO: 1571665
augucacgggacagacggg

SEQ ID NO: 1571667 - RNA, 19 nt, Artificial Sequence
  Description of Artificial Sequence: Synthetic oligonucleotide
  Sense strand starting at position 2058 of SEQ ID NO: 1560035
gcaggcgucagcuugcauu

SEQ ID NO: 1571668 - RNA, 19 nt, Artificial Sequence
  Description of Artificial Sequence: Synthetic oligonucleotide
  Antisense strand to SEQ ID NO: 1571667
aaugcaagcugacgccugc

SEQ ID NO: 1571669 - RNA, 19 nt, Artificial Sequence
  Description of Artificial Sequence: Synthetic oligonucleotide
  Sense strand starting at position 2179 of SEQ ID NO: 1560035
cgagauaacuugucacuca

SEQ ID NO: 1571670 - RNA, 19 nt, Artificial Sequence
  Description of Artificial Sequence: Synthetic oligonucleotide
  Antisense strand to SEQ ID NO: 1571669
ugagugacaaguuaucucg

SEQ ID NO: 1571671 - RNA, 19 nt, Artificial Sequence
  Description of Artificial Sequence: Synthetic oligonucleotide
  Sense strand starting at position 2375 of SEQ ID NO: 1560035
ugugcacuuggauguaaga

SEQ ID NO: 1571672 - RNA, 19 nt, Artificial Sequence
  Description of Artificial Sequence: Synthetic oligonucleotide
  Antisense strand to SEQ ID NO: 1571671
ucuuacauccaagugcaca

SEQ ID NO: 1571673 - RNA, 19 nt, Artificial Sequence
  Description of Artificial Sequence: Synthetic oligonucleotide
  Sense strand starting at position 2377 of SEQ ID NO: 1560035
ugcacuuggauguaagaca

SEQ ID NO: 1571674 - RNA, 19 nt, Artificial Sequence
  Description of Artificial Sequence: Synthetic oligonucleotide
  Antisense strand to SEQ ID NO: 1571673
ugucuuacauccaagugca

SEQ ID NO: 1571675 - RNA, 19 nt, Artificial Sequence
  Description of Artificial Sequence: Synthetic oligonucleotide
  Sense strand starting at position 2385 of SEQ ID NO: 1560035
gauguaagacacuguguca

SEQ ID NO: 1571676 - RNA, 19 nt, Artificial Sequence
  Description of Artificial Sequence: Synthetic oligonucleotide
  Antisense strand to SEQ ID NO: 1571675
ugacacagugucuuacauc

SEQ ID NO: 1571677 - RNA, 19 nt, Artificial Sequence
  Description of Artificial Sequence: Synthetic oligonucleotide
  Sense strand starting at position 2419 of SEQ ID NO: 1560035
cuuauaugacccuguguga

SEQ ID NO: 1571678 - RNA, 19 nt, Artificial Sequence
  Description of Artificial Sequence: Synthetic oligonucleotide
  Antisense strand to SEQ ID NO: 1571677
ucacacagggucauauaag

SEQ ID NO: 1571679 - RNA, 19 nt, Artificial Sequence
  Description of Artificial Sequence: Synthetic oligonucleotide
  Sense strand starting at position 2482 of SEQ ID NO: 1560035
gucauccucugagugugau

SEQ ID NO: 1571680 - RNA, 19 nt, Artificial Sequence
  Description of Artificial Sequence: Synthetic oligonucleotide
  Antisense strand to SEQ ID NO: 1571679
aucacacucagaggaugac

SEQ ID NO: 1571681 - RNA, 19 nt, Artificial Sequence
  Description of Artificial Sequence: Synthetic oligonucleotide
  Sense strand starting at position 2490 of SEQ ID NO: 1560035
cugagugugaucccguguu

SEQ ID NO: 1571682 - RNA, 19 nt, Artificial Sequence
  Description of Artificial Sequence: Synthetic oligonucleotide
  Antisense strand to SEQ ID NO: 1571681
aacacgggaucacacucag

SEQ ID NO: 1571683 - RNA, 19 nt, Artificial Sequence
  Description of Artificial Sequence: Synthetic oligonucleotide
  Sense strand starting at position 2546 of SEQ ID NO: 1560035
ggcauugauucuguucuuu

SEQ ID NO: 1571684 - RNA, 19 nt, Artificial Sequence
  Description of Artificial Sequence: Synthetic oligonucleotide
  Antisense strand to SEQ ID NO: 1571683
aaagaacagaaucaaugcc

SEQ ID NO: 1571685 - RNA, 19 nt, Artificial Sequence
  Description of Artificial Sequence: Synthetic oligonucleotide
  Sense strand starting at position 2629 of SEQ ID NO: 1560035
ugaggugugcuacauggaa

SEQ ID NO: 1571686 - RNA, 19 nt, Artificial Sequence
  Description of Artificial Sequence: Synthetic oligonucleotide
  Antisense strand to SEQ ID NO: 1571685
uuccauguagcacaccuca

SEQ ID NO: 1571687 - RNA, 19 nt, Artificial Sequence
  Description of Artificial Sequence: Synthetic oligonucleotide
  Sense strand starting at position 2648 of SEQ ID NO: 1560035
gcgugagacuaauuagacu

SEQ ID NO: 1571688 - RNA, 19 nt, Artificial Sequence
  Description of Artificial Sequence: Synthetic oligonucleotide
  Antisense strand to SEQ ID NO: 1571687
agucuaauuagucucacgc

SEQ ID NO: 1571689 - RNA, 19 nt, Artificial Sequence
  Description of Artificial Sequence: Synthetic oligonucleotide
  Sense strand starting at position 2654 of SEQ ID NO: 1560035
gacuaauuagacugugaca

SEQ ID NO: 1571690 - RNA, 19 nt, Artificial Sequence
  Description of Artificial Sequence: Synthetic oligonucleotide
  Antisense strand to SEQ ID NO: 1571689
ugucacagucuaauuaguc

SEQ ID NO: 1571691 - RNA, 19 nt, Artificial Sequence
  Description of Artificial Sequence: Synthetic oligonucleotide
  Sense strand starting at position 2656 of SEQ ID NO: 1560035
cuaauuagacugugacagu

SEQ ID NO: 1571692 - RNA, 19 nt, Artificial Sequence
  Description of Artificial Sequence: Synthetic oligonucleotide
  Antisense strand to SEQ ID NO: 1571691
acugucacagucuaauuag

SEQ ID NO: 1571693 - RNA, 19 nt, Artificial Sequence
  Description of Artificial Sequence: Synthetic oligonucleotide
  Sense strand starting at position 2685 of SEQ ID NO: 1560035
acaugucucguguaaggau

SEQ ID NO: 1571694 - RNA, 19 nt, Artificial Sequence
  Description of Artificial Sequence: Synthetic oligonucleotide
  Antisense strand to SEQ ID NO: 1571693
auccuuacacgagacaugu

SEQ ID NO: 1571695 - RNA, 19 nt, Artificial Sequence
  Description of Artificial Sequence: Synthetic oligonucleotide
  Sense strand starting at position 2693 of SEQ ID NO: 1560035
cguguaaggaugugugaca

SEQ ID NO: 1571696 - RNA, 19 nt, Artificial Sequence
  Description of Artificial Sequence: Synthetic oligonucleotide
  Antisense strand to SEQ ID NO: 1571695
ugucacacauccuuacacg

SEQ ID NO: 1571697 - RNA, 19 nt, Artificial Sequence
  Description of Artificial Sequence: Synthetic oligonucleotide
  Sense strand starting at position 2746 of SEQ ID NO: 1560035
cuguguugagcugcucauu

SEQ ID NO: 1571698 - RNA, 19 nt, Artificial Sequence
  Description of Artificial Sequence: Synthetic oligonucleotide
  Antisense strand to SEQ ID NO: 1571697
aaugagcagcucaacacag

SEQ ID NO: 1571699 - RNA, 19 nt, Artificial Sequence
  Description of Artificial Sequence: Synthetic oligonucleotide
  Sense strand starting at position 2776 of SEQ ID NO: 1560035
ugacuaugaugugugaggu

SEQ ID NO: 1571700 - RNA, 19 nt, Artificial Sequence
  Description of Artificial Sequence: Synthetic oligonucleotide
  Antisense strand to SEQ ID NO: 1571699
accucacacaucauaguca

SEQ ID NO: 1571701 - RNA, 19 nt, Artificial Sequence
  Description of Artificial Sequence: Synthetic oligonucleotide
  Sense strand starting at position 2928 of SEQ ID NO: 1560035
gugugugacaggugcauuu

SEQ ID NO: 1571702 - RNA, 19 nt, Artificial Sequence
  Description of Artificial Sequence: Synthetic oligonucleotide
  Antisense strand to SEQ ID NO: 1571701
aaaugcaccugucacacac

SEQ ID NO: 1571703 - RNA, 19 nt, Artificial Sequence
  Description of Artificial Sequence: Synthetic oligonucleotide
  Sense strand starting at position 2979 of SEQ ID NO: 1560035
auuggauuugugugguggu

SEQ ID NO: 1571704 - RNA, 19 nt, Artificial Sequence
  Description of Artificial Sequence: Synthetic oligonucleotide
  Antisense strand to SEQ ID NO: 1571703
accaccacacaaauccaau

SEQ ID NO: 1571705 - RNA, 19 nt, Artificial Sequence
  Description of Artificial Sequence: Synthetic oligonucleotide
  Sense strand starting at position 3963 of SEQ ID NO: 1560035
agugucuuccacugaagaa

SEQ ID NO: 1571706 - RNA, 19 nt, Artificial Sequence
  Description of Artificial Sequence: Synthetic oligonucleotide
  Antisense strand to SEQ ID NO: 1571705
uucuucaguggaagacacu

SEQ ID NO: 1571707 - RNA, 19 nt, Artificial Sequence
  Description of Artificial Sequence: Synthetic oligonucleotide
  Sense strand starting at position 119 of SEQ ID NO: 1560036
aacuaugguuauguaagaa

SEQ ID NO: 1571708 - RNA, 19 nt, Artificial Sequence
  Description of Artificial Sequence: Synthetic oligonucleotide
  Antisense strand to SEQ ID NO: 1571707
uucuuacauaaccauaguu

SEQ ID NO: 1571709 - RNA, 19 nt, Artificial Sequence
  Description of Artificial Sequence: Synthetic oligonucleotide
  Sense strand starting at position 174 of SEQ ID NO: 1560036
uacacaguuguugagacau

SEQ ID NO: 1571710 - RNA, 19 nt, Artificial Sequence
  Description of Artificial Sequence: Synthetic oligonucleotide
  Antisense strand to SEQ ID NO: 1571709
augucucaacaacugugua

SEQ ID NO: 1571711 - RNA, 19 nt, Artificial Sequence
  Description of Artificial Sequence: Synthetic oligonucleotide
  Sense strand starting at position 182 of SEQ ID NO: 1560036
uguugagacauugguacuu

SEQ ID NO: 1571712 - RNA, 19 nt, Artificial Sequence
  Description of Artificial Sequence: Synthetic oligonucleotide
  Antisense strand to SEQ ID NO: 1571711
aaguaccaaugucucaaca

SEQ ID NO: 1571713 - RNA, 19 nt, Artificial Sequence
  Description of Artificial Sequence: Synthetic oligonucleotide
  Sense strand starting at position 232 of SEQ ID NO: 1560036
acaauauuguuggcuacuu

SEQ ID NO: 1571714 - RNA, 19 nt, Artificial Sequence
  Description of Artificial Sequence: Synthetic oligonucleotide
  Antisense strand to SEQ ID NO: 1571713
aaguagccaacaauauugu

SEQ ID NO: 1571715 - RNA, 19 nt, Artificial Sequence
  Description of Artificial Sequence: Synthetic oligonucleotide
  Sense strand starting at position 315 of SEQ ID NO: 1560036
ugggaacuucuggguuaau

SEQ ID NO: 1571716 - RNA, 19 nt, Artificial Sequence
  Description of Artificial Sequence: Synthetic oligonucleotide
  Antisense strand to SEQ ID NO: 1571715
auuaacccagaaguuccca

SEQ ID NO: 1571717 - RNA, 19 nt, Artificial Sequence
  Description of Artificial Sequence: Synthetic oligonucleotide
  Sense strand starting at position 316 of SEQ ID NO: 1560036
gggaacuucuggguuaaug

SEQ ID NO: 1571718 - RNA, 19 nt, Artificial Sequence
  Description of Artificial Sequence: Synthetic oligonucleotide
  Antisense strand to SEQ ID NO: 1571717
cauuaacccagaaguuccc

SEQ ID NO: 1571719 - RNA, 19 nt, Artificial Sequence
  Description of Artificial Sequence: Synthetic oligonucleotide
  Sense strand starting at position 367 of SEQ ID NO: 1560036
auagaccucugauuaagca

SEQ ID NO: 1571720 - RNA, 19 nt, Artificial Sequence
  Description of Artificial Sequence: Synthetic oligonucleotide
  Antisense strand to SEQ ID NO: 1571719
ugcuuaaucagaggucuau

SEQ ID NO: 1571721 - RNA, 19 nt, Artificial Sequence
  Description of Artificial Sequence: Synthetic oligonucleotide
  Sense strand starting at position 929 of SEQ ID NO: 1560036
ugaacacuuucugcaauga

SEQ ID NO: 1571722 - RNA, 19 nt, Artificial Sequence
  Description of Artificial Sequence: Synthetic oligonucleotide
  Antisense strand to SEQ ID NO: 1571721
ucauugcagaaaguguuca

SEQ ID NO: 1571723 - RNA, 19 nt, Artificial Sequence
  Description of Artificial Sequence: Synthetic oligonucleotide
  Sense strand starting at position 948 of SEQ ID NO: 1560036
uggagucccuacuugcaaa

SEQ ID NO: 1571724 - RNA, 19 nt, Artificial Sequence
  Description of Artificial Sequence: Synthetic oligonucleotide
  Antisense strand to SEQ ID NO: 1571723
uuugcaaguagggacucca

SEQ ID NO: 1571725 - RNA, 19 nt, Artificial Sequence
  Description of Artificial Sequence: Synthetic oligonucleotide
  Sense strand starting at position 990 of SEQ ID NO: 1560036
acugguauccuccaucaag

SEQ ID NO: 1571726 - RNA, 19 nt, Artificial Sequence
  Description of Artificial Sequence: Synthetic oligonucleotide
  Antisense strand to SEQ ID NO: 1571725
cuugauggaggauaccagu

SEQ ID NO: 1571727 - RNA, 19 nt, Artificial Sequence
  Description of Artificial Sequence: Synthetic oligonucleotide
  Sense strand starting at position 1263 of SEQ ID NO: 1560036
ugcugauugcuggagauuc

SEQ ID NO: 1571728 - RNA, 19 nt, Artificial Sequence
  Description of Artificial Sequence: Synthetic oligonucleotide
  Antisense strand to SEQ ID NO: 1571727
gaaucuccagcaaucagca

SEQ ID NO: 1571729 - RNA, 19 nt, Artificial Sequence
  Description of Artificial Sequence: Synthetic oligonucleotide
  Sense strand starting at position 1286 of SEQ ID NO: 1560036
cccaguuccguccaucaca

SEQ ID NO: 1571730 - RNA, 19 nt, Artificial Sequence
  Description of Artificial Sequence: Synthetic oligonucleotide
  Antisense strand to SEQ ID NO: 1571729
ugugauggacggaacuggg

SEQ ID NO: 1571731 - RNA, 19 nt, Artificial Sequence
  Description of Artificial Sequence: Synthetic oligonucleotide
  Sense strand starting at position 1333 of SEQ ID NO: 1560036
ccagcuauacuuuguauuu

SEQ ID NO: 1571732 - RNA, 19 nt, Artificial Sequence
  Description of Artificial Sequence: Synthetic oligonucleotide
  Antisense strand to SEQ ID NO: 1571731
aaauacaaaguauagcugg

SEQ ID NO: 1571733 - RNA, 19 nt, Artificial Sequence
  Description of Artificial Sequence: Synthetic oligonucleotide
  Sense strand starting at position 1528 of SEQ ID NO: 1560036
uuagcagagcuuuaugcaa

SEQ ID NO: 1571734 - RNA, 19 nt, Artificial Sequence
  Description of Artificial Sequence: Synthetic oligonucleotide
  Antisense strand to SEQ ID NO: 1571733
uugcauaaagcucugcuaa

SEQ ID NO: 1571735 - RNA, 19 nt, Artificial Sequence
  Description of Artificial Sequence: Synthetic oligonucleotide
  Sense strand starting at position 1619 of SEQ ID NO: 1560036
ugcuguuaucgagcacuuc

SEQ ID NO: 1571736 - RNA, 19 nt, Artificial Sequence
  Description of Artificial Sequence: Synthetic oligonucleotide
  Antisense strand to SEQ ID NO: 1571735
gaagugcucgauaacagca

SEQ ID NO: 1571737 - RNA, 19 nt, Artificial Sequence
  Description of Artificial Sequence: Synthetic oligonucleotide
  Sense strand starting at position 1646 of SEQ ID NO: 1560036
uggcuuaguuauccacaca

SEQ ID NO: 1571738 - RNA, 19 nt, Artificial Sequence
  Description of Artificial Sequence: Synthetic oligonucleotide
  Antisense strand to SEQ ID NO: 1571737
uguguggauaacuaagcca

SEQ ID NO: 1571739 - RNA, 19 nt, Artificial Sequence
  Description of Artificial Sequence: Synthetic oligonucleotide
  Sense strand starting at position 1950 of SEQ ID NO: 1560036
cccauaagcugggucuuaa

SEQ ID NO: 1571740 - RNA, 19 nt, Artificial Sequence
  Description of Artificial Sequence: Synthetic oligonucleotide
  Antisense strand to SEQ ID NO: 1571739
uuaagacccagcuuauggg

SEQ ID NO: 1571741 - RNA, 19 nt, Artificial Sequence
  Description of Artificial Sequence: Synthetic oligonucleotide
  Sense strand starting at position 1959 of SEQ ID NO: 1560036
ugggucuuaagucagacuu

SEQ ID NO: 1571742 - RNA, 19 nt, Artificial Sequence
  Description of Artificial Sequence: Synthetic oligonucleotide
  Antisense strand to SEQ ID NO: 1571741
aagucugacuuaagaccca

SEQ ID NO: 1571743 - RNA, 19 nt, Artificial Sequence
  Description of Artificial Sequence: Synthetic oligonucleotide
  Sense strand starting at position 1973 of SEQ ID NO: 1560036
gacuucuagcaguaguauu

SEQ ID NO: 1571744 - RNA, 19 nt, Artificial Sequence
  Description of Artificial Sequence: Synthetic oligonucleotide
  Antisense strand to SEQ ID NO: 1571743
aauacuacugcuagaaguc

SEQ ID NO: 1571745 - RNA, 19 nt, Artificial Sequence
  Description of Artificial Sequence: Synthetic oligonucleotide
  Sense strand starting at position 2048 of SEQ ID NO: 1560036
uggccaucugcuuacaaug

SEQ ID NO: 1571746 - RNA, 19 nt, Artificial Sequence
  Description of Artificial Sequence: Synthetic oligonucleotide
  Antisense strand to SEQ ID NO: 1571745
cauuguaagcagauggcca

SEQ ID NO: 1571747 - RNA, 19 nt, Artificial Sequence
  Description of Artificial Sequence: Synthetic oligonucleotide
  Sense strand starting at position 2053 of SEQ ID NO: 1560036
aucugcuuacaaugagaua

SEQ ID NO: 1571748 - RNA, 19 nt, Artificial Sequence
  Description of Artificial Sequence: Synthetic oligonucleotide
  Antisense strand to SEQ ID NO: 1571747
uaucucauuguaagcagau

SEQ ID NO: 1571749 - RNA, 19 nt, Artificial Sequence
  Description of Artificial Sequence: Synthetic oligonucleotide
  Sense strand starting at position 2067 of SEQ ID NO: 1560036
agauauaucccgugucaua

SEQ ID NO: 1571750 - RNA, 19 nt, Artificial Sequence
  Description of Artificial Sequence: Synthetic oligonucleotide
  Antisense strand to SEQ ID NO: 1571749
uaugacacgggauauaucu

SEQ ID NO: 1571751 - RNA, 19 nt, Artificial Sequence
  Description of Artificial Sequence: Synthetic oligonucleotide
  Sense strand starting at position 2077 of SEQ ID NO: 1560036
cgugucauaggugaaaucu

SEQ ID NO: 1571752 - RNA, 19 nt, Artificial Sequence
  Description of Artificial Sequence: Synthetic oligonucleotide
  Antisense strand to SEQ ID NO: 1571751
agauuucaccuaugacacg

SEQ ID NO: 1571753 - RNA, 19 nt, Artificial Sequence
  Description of Artificial Sequence: Synthetic oligonucleotide
  Sense strand starting at position 2110 of SEQ ID NO: 1560036
ugcugaagucaugaggugu

SEQ ID NO: 1571754 - RNA, 19 nt, Artificial Sequence
  Description of Artificial Sequence: Synthetic oligonucleotide
  Antisense strand to SEQ ID NO: 1571753
acaccucaugacuucagca

SEQ ID NO: 1571755 - RNA, 19 nt, Artificial Sequence
  Description of Artificial Sequence: Synthetic oligonucleotide
  Sense strand starting at position 2143 of SEQ ID NO: 1560036
gggacaccaaguuguuauu

SEQ ID NO: 1571756 - RNA, 19 nt, Artificial Sequence
  Description of Artificial Sequence: Synthetic oligonucleotide
  Antisense strand to SEQ ID NO: 1571755
aauaacaacuugguguccc

SEQ ID NO: 1571757 - RNA, 19 nt, Artificial Sequence
  Description of Artificial Sequence: Synthetic oligonucleotide
  Sense strand starting at position 2358 of SEQ ID NO: 1560036
gcuagauucugcccaggga

SEQ ID NO: 1571758 - RNA, 19 nt, Artificial Sequence
  Description of Artificial Sequence: Synthetic oligonucleotide
  Antisense strand to SEQ ID NO: 1571757
ucccugggcagaaucuagc

SEQ ID NO: 1571759 - RNA, 19 nt, Artificial Sequence
  Description of Artificial Sequence: Synthetic oligonucleotide
  Sense strand starting at position 2361 of SEQ ID NO: 1560036
agauucugcccagggacaa

SEQ ID NO: 1571760 - RNA, 19 nt, Artificial Sequence
  Description of Artificial Sequence: Synthetic oligonucleotide
  Antisense strand to SEQ ID NO: 1571759
uugucccugggcagaaucu

SEQ ID NO: 1571761 - RNA, 19 nt, Artificial Sequence
  Description of Artificial Sequence: Synthetic oligonucleotide
  Sense strand starting at position 2362 of SEQ ID NO: 1560036
gauucugcccagggacaaa

SEQ ID NO: 1571762 - RNA, 19 nt, Artificial Sequence
  Description of Artificial Sequence: Synthetic oligonucleotide
  Antisense strand to SEQ ID NO: 1571761
uuugucccugggcagaauc

SEQ ID NO: 1571763 - RNA, 19 nt, Artificial Sequence
  Description of Artificial Sequence: Synthetic oligonucleotide
  Sense strand starting at position 2468 of SEQ ID NO: 1560036
cuagaaacaucuuugcuga

SEQ ID NO: 1571764 - RNA, 19 nt, Artificial Sequence
  Description of Artificial Sequence: Synthetic oligonucleotide
  Antisense strand to SEQ ID NO: 1571763
ucagcaaagauguuucuag

SEQ ID NO: 1571765 - RNA, 19 nt, Artificial Sequence
  Description of Artificial Sequence: Synthetic oligonucleotide
  Sense strand starting at position 2470 of SEQ ID NO: 1560036
agaaacaucuuugcugaaa

SEQ ID NO: 1571766 - RNA, 19 nt, Artificial Sequence
  Description of Artificial Sequence: Synthetic oligonucleotide
  Antisense strand to SEQ ID NO: 1571765
uuucagcaaagauguuucu

SEQ ID NO: 1571767 - RNA, 19 nt, Artificial Sequence
  Description of Artificial Sequence: Synthetic oligonucleotide
  Sense strand starting at position 2481 of SEQ ID NO: 1560036
ugcugaaaugcugauuaca

SEQ ID NO: 1571768 - RNA, 19 nt, Artificial Sequence
  Description of Artificial Sequence: Synthetic oligonucleotide
  Antisense strand to SEQ ID NO: 1571767
uguaaucagcauuucagca

SEQ ID NO: 1571769 - RNA, 19 nt, Artificial Sequence
  Description of Artificial Sequence: Synthetic oligonucleotide
  Sense strand starting at position 2483 of SEQ ID NO: 1560036
cugaaaugcugauuacaca

SEQ ID NO: 1571770 - RNA, 19 nt, Artificial Sequence
  Description of Artificial Sequence: Synthetic oligonucleotide
  Antisense strand to SEQ ID NO: 1571769
uguguaaucagcauuucag

SEQ ID NO: 1571771 - RNA, 19 nt, Artificial Sequence
  Description of Artificial Sequence: Synthetic oligonucleotide
  Sense strand starting at position 2844 of SEQ ID NO: 1560036
cuugccuuggauuagacaa

SEQ ID NO: 1571772 - RNA, 19 nt, Artificial Sequence
  Description of Artificial Sequence: Synthetic oligonucleotide
  Antisense strand to SEQ ID NO: 1571771
uugucuaauccaaggcaag

SEQ ID NO: 1571773 - RNA, 19 nt, Artificial Sequence
  Description of Artificial Sequence: Synthetic oligonucleotide
  Sense strand starting at position 2900 of SEQ ID NO: 1560036
gagugugagccacacucaa

SEQ ID NO: 1571774 - RNA, 19 nt, Artificial Sequence
  Description of Artificial Sequence: Synthetic oligonucleotide
  Antisense strand to SEQ ID NO: 1571773
uugaguguggcucacacuc

SEQ ID NO: 1571775 - RNA, 19 nt, Artificial Sequence
  Description of Artificial Sequence: Synthetic oligonucleotide
  Sense strand starting at position 3038 of SEQ ID NO: 1560036
ucaucagcaggcuaauuaa

SEQ ID NO: 1571776 - RNA, 19 nt, Artificial Sequence
  Description of Artificial Sequence: Synthetic oligonucleotide
  Antisense strand to SEQ ID NO: 1571775
uuaauuagccugcugauga

SEQ ID NO: 1571777 - RNA, 19 nt, Artificial Sequence
  Description of Artificial Sequence: Synthetic oligonucleotide
  Sense strand starting at position 3153 of SEQ ID NO: 1560036
uuacauguggguuacauca

SEQ ID NO: 1571778 - RNA, 19 nt, Artificial Sequence
  Description of Artificial Sequence: Synthetic oligonucleotide
  Antisense strand to SEQ ID NO: 1571777
ugauguaacccacauguaa

SEQ ID NO: 1571779 - RNA, 19 nt, Artificial Sequence
  Description of Artificial Sequence: Synthetic oligonucleotide
  Sense strand starting at position 3182 of SEQ ID NO: 1560036
uguuaaaucugggcggaug

SEQ ID NO: 1571780 - RNA, 19 nt, Artificial Sequence
  Description of Artificial Sequence: Synthetic oligonucleotide
  Antisense strand to SEQ ID NO: 1571779
cauccgcccagauuuaaca

SEQ ID NO: 1571781 - RNA, 19 nt, Artificial Sequence
  Description of Artificial Sequence: Synthetic oligonucleotide
  Sense strand starting at position 3226 of SEQ ID NO: 1560036
gugagaagcauguagcaaa

SEQ ID NO: 1571782 - RNA, 19 nt, Artificial Sequence
  Description of Artificial Sequence: Synthetic oligonucleotide
  Antisense strand to SEQ ID NO: 1571781
uuugcuacaugcuucucac

SEQ ID NO: 1571783 - RNA, 19 nt, Artificial Sequence
  Description of Artificial Sequence: Synthetic oligonucleotide
  Sense strand starting at position 3685 of SEQ ID NO: 1560036
ggacaaacagccuguuaaa

SEQ ID NO: 1571784 - RNA, 19 nt, Artificial Sequence
  Description of Artificial Sequence: Synthetic oligonucleotide
  Antisense strand to SEQ ID NO: 1571783
uuuaacaggcuguuugucc

SEQ ID NO: 1571785 - RNA, 19 nt, Artificial Sequence
  Description of Artificial Sequence: Synthetic oligonucleotide
  Sense strand starting at position 3834 of SEQ ID NO: 1560036
agacuuugugaagguaaga

SEQ ID NO: 1571786 - RNA, 19 nt, Artificial Sequence
  Description of Artificial Sequence: Synthetic oligonucleotide
  Antisense strand to SEQ ID NO: 1571785
ucuuaccuucacaaagucu

SEQ ID NO: 1571787 - RNA, 19 nt, Artificial Sequence
  Description of Artificial Sequence: Synthetic oligonucleotide
  Sense strand starting at position 243 of SEQ ID NO: 1560037
uccuguaacucaggaauuc

SEQ ID NO: 1571788 - RNA, 19 nt, Artificial Sequence
  Description of Artificial Sequence: Synthetic oligonucleotide
  Antisense strand to SEQ ID NO: 1571787
gaauuccugaguuacagga

SEQ ID NO: 1571789 - RNA, 19 nt, Artificial Sequence
  Description of Artificial Sequence: Synthetic oligonucleotide
  Sense strand starting at position 677 of SEQ ID NO: 1560037
agagguuucccaggaugga

SEQ ID NO: 1571790 - RNA, 19 nt, Artificial Sequence
  Description of Artificial Sequence: Synthetic oligonucleotide
  Antisense strand to SEQ ID NO: 1571789
uccauccugggaaaccucu

SEQ ID NO: 1571791 - RNA, 19 nt, Artificial Sequence
  Description of Artificial Sequence: Synthetic oligonucleotide
  Sense strand starting at position 2360 of SEQ ID NO: 1560037
agagaugcuggcugacaca

SEQ ID NO: 1571792 - RNA, 19 nt, Artificial Sequence
  Description of Artificial Sequence: Synthetic oligonucleotide
  Antisense strand to SEQ ID NO: 1571791
ugugucagccagcaucucu

SEQ ID NO: 1571793 - RNA, 19 nt, Artificial Sequence
  Description of Artificial Sequence: Synthetic oligonucleotide
  Sense strand starting at position 2557 of SEQ ID NO: 1560037
gucagagauucagagagac

SEQ ID NO: 1571794 - RNA, 19 nt, Artificial Sequence
  Description of Artificial Sequence: Synthetic oligonucleotide
  Antisense strand to SEQ ID NO: 1571793
gucucucugaaucucugac

SEQ ID NO: 1571795 - RNA, 19 nt, Artificial Sequence
  Description of Artificial Sequence: Synthetic oligonucleotide
  Sense strand starting at position 2852 of SEQ ID NO: 1560037
uuuggauucucuuuacaga

SEQ ID NO: 1571796 - RNA, 19 nt, Artificial Sequence
  Description of Artificial Sequence: Synthetic oligonucleotide
  Antisense strand to SEQ ID NO: 1571795
ucuguaaagagaauccaaa

SEQ ID NO: 1571797 - RNA, 19 nt, Artificial Sequence
  Description of Artificial Sequence: Synthetic oligonucleotide
  Sense strand starting at position 2855 of SEQ ID NO: 1560037
ggauucucuuuacagagaa

SEQ ID NO: 1571798 - RNA, 19 nt, Artificial Sequence
  Description of Artificial Sequence: Synthetic oligonucleotide
  Antisense strand to SEQ ID NO: 1571797
uucucuguaaagagaaucc

SEQ ID NO: 1571799 - RNA, 19 nt, Artificial Sequence
  Description of Artificial Sequence: Synthetic oligonucleotide
  Sense strand starting at position 2889 of SEQ ID NO: 1560037
ucaguuucccuguguuaug

SEQ ID NO: 1571800 - RNA, 19 nt, Artificial Sequence
  Description of Artificial Sequence: Synthetic oligonucleotide
  Antisense strand to SEQ ID NO: 1571799
cauaacacagggaaacuga

SEQ ID NO: 1571801 - RNA, 19 nt, Artificial Sequence
  Description of Artificial Sequence: Synthetic oligonucleotide
  Sense strand starting at position 2890 of SEQ ID NO: 1560037
caguuucccuguguuaugu

SEQ ID NO: 1571802 - RNA, 19 nt, Artificial Sequence
  Description of Artificial Sequence: Synthetic oligonucleotide
  Antisense strand to SEQ ID NO: 1571801
acauaacacagggaaacug

SEQ ID NO: 1571803 - RNA, 19 nt, Artificial Sequence
  Description of Artificial Sequence: Synthetic oligonucleotide
  Sense strand starting at position 2892 of SEQ ID NO: 1560037
guuucccuguguuauguuu

SEQ ID NO: 1571804 - RNA, 19 nt, Artificial Sequence
  Description of Artificial Sequence: Synthetic oligonucleotide
  Antisense strand to SEQ ID NO: 1571803
aaacauaacacagggaaac

SEQ ID NO: 1571805 - RNA, 19 nt, Artificial Sequence
  Description of Artificial Sequence: Synthetic oligonucleotide
  Sense strand starting at position 2925 of SEQ ID NO: 1560037
auucucugugcucgucaua

SEQ ID NO: 1571806 - RNA, 19 nt, Artificial Sequence
  Description of Artificial Sequence: Synthetic oligonucleotide
  Antisense strand to SEQ ID NO: 1571805
uaugacgagcacagagaau

SEQ ID NO: 1571807 - RNA, 19 nt, Artificial Sequence
  Description of Artificial Sequence: Synthetic oligonucleotide
  Sense strand starting at position 2938 of SEQ ID NO: 1560037
gucauaggguccuuuauau

SEQ ID NO: 1571808 - RNA, 19 nt, Artificial Sequence
  Description of Artificial Sequence: Synthetic oligonucleotide
  Antisense strand to SEQ ID NO: 1571807
auauaaaggacccuaugac

SEQ ID NO: 1571809 - RNA, 19 nt, Artificial Sequence
  Description of Artificial Sequence: Synthetic oligonucleotide
  Sense strand starting at position 3010 of SEQ ID NO: 1560037
gcaugugcucugccuguga

SEQ ID NO: 1571810 - RNA, 19 nt, Artificial Sequence
  Description of Artificial Sequence: Synthetic oligonucleotide
  Antisense strand to SEQ ID NO: 1571809
ucacaggcagagcacaugc

SEQ ID NO: 1571811 - RNA, 19 nt, Artificial Sequence
  Description of Artificial Sequence: Synthetic oligonucleotide
  Sense strand starting at position 3012 of SEQ ID NO: 1560037
augugcucugccugugagu

SEQ ID NO: 1571812 - RNA, 19 nt, Artificial Sequence
  Description of Artificial Sequence: Synthetic oligonucleotide
  Antisense strand to SEQ ID NO: 1571811
acucacaggcagagcacau

SEQ ID NO: 1571813 - RNA, 19 nt, Artificial Sequence
  Description of Artificial Sequence: Synthetic oligonucleotide
  Sense strand starting at position 3013 of SEQ ID NO: 1560037
ugugcucugccugugagua

SEQ ID NO: 1571814 - RNA, 19 nt, Artificial Sequence
  Description of Artificial Sequence: Synthetic oligonucleotide
  Antisense strand to SEQ ID NO: 1571813
uacucacaggcagagcaca

SEQ ID NO: 1571815 - RNA, 19 nt, Artificial Sequence
  Description of Artificial Sequence: Synthetic oligonucleotide
  Sense strand starting at position 3014 of SEQ ID NO: 1560037
gugcucugccugugaguaa

SEQ ID NO: 1571816 - RNA, 19 nt, Artificial Sequence
  Description of Artificial Sequence: Synthetic oligonucleotide
  Antisense strand to SEQ ID NO: 1571815
uuacucacaggcagagcac

SEQ ID NO: 1571817 - RNA, 19 nt, Artificial Sequence
  Description of Artificial Sequence: Synthetic oligonucleotide
  Sense strand starting at position 3043 of SEQ ID NO: 1560037
cccauuagcuuuccgcaua

SEQ ID NO: 1571818 - RNA, 19 nt, Artificial Sequence
  Description of Artificial Sequence: Synthetic oligonucleotide
  Antisense strand to SEQ ID NO: 1571817
uaugcggaaagcuaauggg

SEQ ID NO: 1571819 - RNA, 19 nt, Artificial Sequence
  Description of Artificial Sequence: Synthetic oligonucleotide
  Sense strand starting at position 3044 of SEQ ID NO: 1560037
ccauuagcuuuccgcauaa

SEQ ID NO: 1571820 - RNA, 19 nt, Artificial Sequence
  Description of Artificial Sequence: Synthetic oligonucleotide
  Antisense strand to SEQ ID NO: 1571819
uuaugcggaaagcuaaugg

SEQ ID NO: 1571821 - RNA, 19 nt, Artificial Sequence
  Description of Artificial Sequence: Synthetic oligonucleotide
  Sense strand starting at position 3046 of SEQ ID NO: 1560037
auuagcuuuccgcauaaac

SEQ ID NO: 1571822 - RNA, 19 nt, Artificial Sequence
  Description of Artificial Sequence: Synthetic oligonucleotide
  Antisense strand to SEQ ID NO: 1571821
guuuaugcggaaagcuaau

SEQ ID NO: 1571823 - RNA, 19 nt, Artificial Sequence
  Description of Artificial Sequence: Synthetic oligonucleotide
  Sense strand starting at position 3078 of SEQ ID NO: 1560037
augucauguacccgcaagu

SEQ ID NO: 1571824 - RNA, 19 nt, Artificial Sequence
  Description of Artificial Sequence: Synthetic oligonucleotide
  Antisense strand to SEQ ID NO: 1571823
acuugcggguacaugacau

SEQ ID NO: 1571825 - RNA, 19 nt, Artificial Sequence
  Description of Artificial Sequence: Synthetic oligonucleotide
  Sense strand starting at position 3197 of SEQ ID NO: 1560037
ggaagaucagccugggcaa

SEQ ID NO: 1571826 - RNA, 19 nt, Artificial Sequence
  Description of Artificial Sequence: Synthetic oligonucleotide
  Antisense strand to SEQ ID NO: 1571825
uugcccaggcugaucuucc

SEQ ID NO: 1571827 - RNA, 19 nt, Artificial Sequence
  Description of Artificial Sequence: Synthetic oligonucleotide
  Sense strand starting at position 3301 of SEQ ID NO: 1560037
ggcugaggcuugagucagu

SEQ ID NO: 1571828 - RNA, 19 nt, Artificial Sequence
  Description of Artificial Sequence: Synthetic oligonucleotide
  Antisense strand to SEQ ID NO: 1571827
acugacucaagccucagcc

SEQ ID NO: 1571829 - RNA, 19 nt, Artificial Sequence
  Description of Artificial Sequence: Synthetic oligonucleotide
  Sense strand starting at position 3306 of SEQ ID NO: 1560037
aggcuugagucagugaguu

SEQ ID NO: 1571830 - RNA, 19 nt, Artificial Sequence
  Description of Artificial Sequence: Synthetic oligonucleotide
  Antisense strand to SEQ ID NO: 1571829
aacucacugacucaagccu

SEQ ID NO: 1571831 - RNA, 19 nt, Artificial Sequence
  Description of Artificial Sequence: Synthetic oligonucleotide
  Sense strand starting at position 3308 of SEQ ID NO: 1560037
gcuugagucagugaguucu

SEQ ID NO: 1571832 - RNA, 19 nt, Artificial Sequence
  Description of Artificial Sequence: Synthetic oligonucleotide
  Antisense strand to SEQ ID NO: 1571831
agaacucacugacucaagc

SEQ ID NO: 1571833 - RNA, 19 nt, Artificial Sequence
  Description of Artificial Sequence: Synthetic oligonucleotide
  Sense strand starting at position 3316 of SEQ ID NO: 1560037
cagugaguucuaggcugca

SEQ ID NO: 1571834 - RNA, 19 nt, Artificial Sequence
  Description of Artificial Sequence: Synthetic oligonucleotide
  Antisense strand to SEQ ID NO: 1571833
ugcagccuagaacucacug

SEQ ID NO: 1571835 - RNA, 19 nt, Artificial Sequence
  Description of Artificial Sequence: Synthetic oligonucleotide
  Sense strand starting at position 3429 of SEQ ID NO: 1560037
ccuauuggcuccugugaga

SEQ ID NO: 1571836 - RNA, 19 nt, Artificial Sequence
  Description of Artificial Sequence: Synthetic oligonucleotide
  Antisense strand to SEQ ID NO: 1571835
ucucacaggagccaauagg

SEQ ID NO: 1571837 - RNA, 19 nt, Artificial Sequence
  Description of Artificial Sequence: Synthetic oligonucleotide
  Sense strand starting at position 3432 of SEQ ID NO: 1560037
auuggcuccugugagauuu

SEQ ID NO: 1571838 - RNA, 19 nt, Artificial Sequence
  Description of Artificial Sequence: Synthetic oligonucleotide
  Antisense strand to SEQ ID NO: 1571837
aaaucucacaggagccaau

SEQ ID NO: 1571839 - RNA, 19 nt, Artificial Sequence
  Description of Artificial Sequence: Synthetic oligonucleotide
  Sense strand starting at position 3484 of SEQ ID NO: 1560037
aucuuuaaugagugccaaa

SEQ ID NO: 1571840 - RNA, 19 nt, Artificial Sequence
  Description of Artificial Sequence: Synthetic oligonucleotide
  Antisense strand to SEQ ID NO: 1571839
uuuggcacucauuaaagau

SEQ ID NO: 1571841 - RNA, 19 nt, Artificial Sequence
  Description of Artificial Sequence: Synthetic oligonucleotide
  Sense strand starting at position 3487 of SEQ ID NO: 1560037
uuuaaugagugccaaaucu

SEQ ID NO: 1571842 - RNA, 19 nt, Artificial Sequence
  Description of Artificial Sequence: Synthetic oligonucleotide
  Antisense strand to SEQ ID NO: 1571841
agauuuggcacucauuaaa

SEQ ID NO: 1571843 - RNA, 19 nt, Artificial Sequence
  Description of Artificial Sequence: Synthetic oligonucleotide
  Sense strand starting at position 3514 of SEQ ID NO: 1560037
cacuguuccuguugguaag

SEQ ID NO: 1571844 - RNA, 19 nt, Artificial Sequence
  Description of Artificial Sequence: Synthetic oligonucleotide
  Antisense strand to SEQ ID NO: 1571843
cuuaccaacaggaacagug

SEQ ID NO: 1571845 - RNA, 19 nt, Artificial Sequence
  Description of Artificial Sequence: Synthetic oligonucleotide
  Sense strand starting at position 3515 of SEQ ID NO: 1560037
acuguuccuguugguaaga

SEQ ID NO: 1571846 - RNA, 19 nt, Artificial Sequence
  Description of Artificial Sequence: Synthetic oligonucleotide
  Antisense strand to SEQ ID NO: 1571845
ucuuaccaacaggaacagu

SEQ ID NO: 1571847 - RNA, 19 nt, Artificial Sequence
  Description of Artificial Sequence: Synthetic oligonucleotide
  Sense strand starting at position 3516 of SEQ ID NO: 1560037
cuguuccuguugguaagaa

SEQ ID NO: 1571848 - RNA, 19 nt, Artificial Sequence
  Description of Artificial Sequence: Synthetic oligonucleotide
  Antisense strand to SEQ ID NO: 1571847
uucuuaccaacaggaacag

SEQ ID NO: 1571849 - RNA, 19 nt, Artificial Sequence
  Description of Artificial Sequence: Synthetic oligonucleotide
  Sense strand starting at position 3601 of SEQ ID NO: 1560037
gaugaucagcaaggucaau

SEQ ID NO: 1571850 - RNA, 19 nt, Artificial Sequence
  Description of Artificial Sequence: Synthetic oligonucleotide
  Antisense strand to SEQ ID NO: 1571849
auugaccuugcugaucauc

SEQ ID NO: 1571851 - RNA, 19 nt, Artificial Sequence
  Description of Artificial Sequence: Synthetic oligonucleotide
  Sense strand starting at position 3625 of SEQ ID NO: 1560037
aaauguaugguguguuaga

SEQ ID NO: 1571852 - RNA, 19 nt, Artificial Sequence
  Description of Artificial Sequence: Synthetic oligonucleotide
  Antisense strand to SEQ ID NO: 1571851
ucuaacacaccauacauuu

SEQ ID NO: 1571853 - RNA, 19 nt, Artificial Sequence
  Description of Artificial Sequence: Synthetic oligonucleotide
  Sense strand starting at position 3626 of SEQ ID NO: 1560037
aauguaugguguguuagau

SEQ ID NO: 1571854 - RNA, 19 nt, Artificial Sequence
  Description of Artificial Sequence: Synthetic oligonucleotide
  Antisense strand to SEQ ID NO: 1571853
aucuaacacaccauacauu

SEQ ID NO: 1571855 - RNA, 19 nt, Artificial Sequence
  Description of Artificial Sequence: Synthetic oligonucleotide
  Sense strand starting at position 3630 of SEQ ID NO: 1560037
uaugguguguuagauaauc

SEQ ID NO: 1571856 - RNA, 19 nt, Artificial Sequence
  Description of Artificial Sequence: Synthetic oligonucleotide
  Antisense strand to SEQ ID NO: 1571855
gauuaucuaacacaccaua

SEQ ID NO: 1571857 - RNA, 19 nt, Artificial Sequence
  Description of Artificial Sequence: Synthetic oligonucleotide
  Sense strand starting at position 3632 of SEQ ID NO: 1560037
ugguguguuagauaaucau

SEQ ID NO: 1571858 - RNA, 19 nt, Artificial Sequence
  Description of Artificial Sequence: Synthetic oligonucleotide
  Antisense strand to SEQ ID NO: 1571857
augauuaucuaacacacca

SEQ ID NO: 1571859 - RNA, 19 nt, Artificial Sequence
  Description of Artificial Sequence: Synthetic oligonucleotide
  Sense strand starting at position 3638 of SEQ ID NO: 1560037
guuagauaaucauguccgu

SEQ ID NO: 1571860 - RNA, 19 nt, Artificial Sequence
  Description of Artificial Sequence: Synthetic oligonucleotide
  Antisense strand to SEQ ID NO: 1571859
acggacaugauuaucuaac

SEQ ID NO: 1571861 - RNA, 19 nt, Artificial Sequence
  Description of Artificial Sequence: Synthetic oligonucleotide
  Sense strand starting at position 3643 of SEQ ID NO: 1560037
auaaucauguccgugcuga

SEQ ID NO: 1571862 - RNA, 19 nt, Artificial Sequence
  Description of Artificial Sequence: Synthetic oligonucleotide
  Antisense strand to SEQ ID NO: 1571861
ucagcacggacaugauuau

SEQ ID NO: 1571863 - RNA, 19 nt, Artificial Sequence
  Description of Artificial Sequence: Synthetic oligonucleotide
  Sense strand starting at position 3644 of SEQ ID NO: 1560037
uaaucauguccgugcugag

SEQ ID NO: 1571864 - RNA, 19 nt, Artificial Sequence
  Description of Artificial Sequence: Synthetic oligonucleotide
  Antisense strand to SEQ ID NO: 1571863
cucagcacggacaugauua

SEQ ID NO: 1571865 - RNA, 19 nt, Artificial Sequence
  Description of Artificial Sequence: Synthetic oligonucleotide
  Sense strand starting at position 549 of SEQ ID NO: 1560038
aagaaaggaugucaugcuu

SEQ ID NO: 1571866 - RNA, 19 nt, Artificial Sequence
  Description of Artificial Sequence: Synthetic oligonucleotide
  Antisense strand to SEQ ID NO: 1571865
aagcaugacauccuuucuu

SEQ ID NO: 1571867 - RNA, 19 nt, Artificial Sequence
  Description of Artificial Sequence: Synthetic oligonucleotide
  Sense strand starting at position 706 of SEQ ID NO: 1560038
acuauuuccugcgcugaau

SEQ ID NO: 1571868 - RNA, 19 nt, Artificial Sequence
  Description of Artificial Sequence: Synthetic oligonucleotide
  Antisense strand to SEQ ID NO: 1571867
auucagcgcaggaaauagu

SEQ ID NO: 1571869 - RNA, 19 nt, Artificial Sequence
  Description of Artificial Sequence: Synthetic oligonucleotide
  Sense strand starting at position 776 of SEQ ID NO: 1560038
ggcuguuuccucgccugua

SEQ ID NO: 1571870 - RNA, 19 nt, Artificial Sequence
  Description of Artificial Sequence: Synthetic oligonucleotide
  Antisense strand to SEQ ID NO: 1571869
uacaggcgaggaaacagcc

SEQ ID NO: 1571871 - RNA, 19 nt, Artificial Sequence
  Description of Artificial Sequence: Synthetic oligonucleotide
  Sense strand starting at position 777 of SEQ ID NO: 1560038
gcuguuuccucgccuguaa

SEQ ID NO: 1571872 - RNA, 19 nt, Artificial Sequence
  Description of Artificial Sequence: Synthetic oligonucleotide
  Antisense strand to SEQ ID NO: 1571871
uuacaggcgaggaaacagc

SEQ ID NO: 1571873 - RNA, 19 nt, Artificial Sequence
  Description of Artificial Sequence: Synthetic oligonucleotide
  Sense strand starting at position 779 of SEQ ID NO: 1560038
uguuuccucgccuguaaag

SEQ ID NO: 1571874 - RNA, 19 nt, Artificial Sequence
  Description of Artificial Sequence: Synthetic oligonucleotide
  Antisense strand to SEQ ID NO: 1571873
cuuuacaggcgaggaaaca

SEQ ID NO: 1571875 - RNA, 19 nt, Artificial Sequence
  Description of Artificial Sequence: Synthetic oligonucleotide
  Sense strand starting at position 820 of SEQ ID NO: 1560038
ccucauucugggugcugaa

SEQ ID NO: 1571876 - RNA, 19 nt, Artificial Sequence
  Description of Artificial Sequence: Synthetic oligonucleotide
  Antisense strand to SEQ ID NO: 1571875
uucagcacccagaaugagg

SEQ ID NO: 1571877 - RNA, 19 nt, Artificial Sequence
  Description of Artificial Sequence: Synthetic oligonucleotide
  Sense strand starting at position 906 of SEQ ID NO: 1560038
gucuuaagagucugggaga

SEQ ID NO: 1571878 - RNA, 19 nt, Artificial Sequence
  Description of Artificial Sequence: Synthetic oligonucleotide
  Antisense strand to SEQ ID NO: 1571877
ucucccagacucuuaagac

SEQ ID NO: 1571879 - RNA, 19 nt, Artificial Sequence
  Description of Artificial Sequence: Synthetic oligonucleotide
  Sense strand starting at position 907 of SEQ ID NO: 1560038
ucuuaagagucugggagaa

SEQ ID NO: 1571880 - RNA, 19 nt, Artificial Sequence
  Description of Artificial Sequence: Synthetic oligonucleotide
  Antisense strand to SEQ ID NO: 1571879
uucucccagacucuuaaga

SEQ ID NO: 1571881 - RNA, 19 nt, Artificial Sequence
  Description of Artificial Sequence: Synthetic oligonucleotide
  Sense strand starting at position 909 of SEQ ID NO: 1560038
uuaagagucugggagaaca

SEQ ID NO: 1571882 - RNA, 19 nt, Artificial Sequence
  Description of Artificial Sequence: Synthetic oligonucleotide
  Antisense strand to SEQ ID NO: 1571881
uguucucccagacucuuaa

SEQ ID NO: 1571883 - RNA, 19 nt, Artificial Sequence
  Description of Artificial Sequence: Synthetic oligonucleotide
  Sense strand starting at position 964 of SEQ ID NO: 1560038
ggcuaaaucccgugaagaa

SEQ ID NO: 1571884 - RNA, 19 nt, Artificial Sequence
  Description of Artificial Sequence: Synthetic oligonucleotide
  Antisense strand to SEQ ID NO: 1571883
uucuucacgggauuuagcc

SEQ ID NO: 1571885 - RNA, 19 nt, Artificial Sequence
  Description of Artificial Sequence: Synthetic oligonucleotide
  Sense strand starting at position 965 of SEQ ID NO: 1560038
gcuaaaucccgugaagaac

SEQ ID NO: 1571886 - RNA, 19 nt, Artificial Sequence
  Description of Artificial Sequence: Synthetic oligonucleotide
  Antisense strand to SEQ ID NO: 1571885
guucuucacgggauuuagc

SEQ ID NO: 1571887 - RNA, 19 nt, Artificial Sequence
  Description of Artificial Sequence: Synthetic oligonucleotide
  Sense strand starting at position 1030 of SEQ ID NO: 1560038
ugugcucuuggaggacaaa

SEQ ID NO: 1571888 - RNA, 19 nt, Artificial Sequence
  Description of Artificial Sequence: Synthetic oligonucleotide
  Antisense strand to SEQ ID NO: 1571887
uuuguccuccaagagcaca

SEQ ID NO: 1571889 - RNA, 19 nt, Artificial Sequence
  Description of Artificial Sequence: Synthetic oligonucleotide
  Sense strand starting at position 1133 of SEQ ID NO: 1560038
ggucucugacccuaacacu

SEQ ID NO: 1571890 - RNA, 19 nt, Artificial Sequence
  Description of Artificial Sequence: Synthetic oligonucleotide
  Antisense strand to SEQ ID NO: 1571889
aguguuagggucagagacc

SEQ ID NO: 1571891 - RNA, 19 nt, Artificial Sequence
  Description of Artificial Sequence: Synthetic oligonucleotide
  Sense strand starting at position 2166 of SEQ ID NO: 1560038
ggguugaagcguugaaagu

SEQ ID NO: 1571892 - RNA, 19 nt, Artificial Sequence
  Description of Artificial Sequence: Synthetic oligonucleotide
  Antisense strand to SEQ ID NO: 1571891
acuuucaacgcuucaaccc

SEQ ID NO: 1571893 - RNA, 19 nt, Artificial Sequence
  Description of Artificial Sequence: Synthetic oligonucleotide
  Sense strand starting at position 2167 of SEQ ID NO: 1560038
gguugaagcguugaaagug

SEQ ID NO: 1571894 - RNA, 19 nt, Artificial Sequence
  Description of Artificial Sequence: Synthetic oligonucleotide
  Antisense strand to SEQ ID NO: 1571893
cacuuucaacgcuucaacc

SEQ ID NO: 1571895 - RNA, 19 nt, Artificial Sequence
  Description of Artificial Sequence: Synthetic oligonucleotide
  Sense strand starting at position 2168 of SEQ ID NO: 1560038
guugaagcguugaaagugu

SEQ ID NO: 1571896 - RNA, 19 nt, Artificial Sequence
  Description of Artificial Sequence: Synthetic oligonucleotide
  Antisense strand to SEQ ID NO: 1571895
acacuuucaacgcuucaac

SEQ ID NO: 1571897 - RNA, 19 nt, Artificial Sequence
  Description of Artificial Sequence: Synthetic oligonucleotide
  Sense strand starting at position 2172 of SEQ ID NO: 1560038
aagcguugaaaguguguua

SEQ ID NO: 1571898 - RNA, 19 nt, Artificial Sequence
  Description of Artificial Sequence: Synthetic oligonucleotide
  Antisense strand to SEQ ID NO: 1571897
uaacacacuuucaacgcuu

SEQ ID NO: 1571899 - RNA, 19 nt, Artificial Sequence
  Description of Artificial Sequence: Synthetic oligonucleotide
  Sense strand starting at position 2179 of SEQ ID NO: 1560038
gaaaguguguuacccagau

SEQ ID NO: 1571900 - RNA, 19 nt, Artificial Sequence
  Description of Artificial Sequence: Synthetic oligonucleotide
  Antisense strand to SEQ ID NO: 1571899
aucuggguaacacacuuuc

SEQ ID NO: 1571901 - RNA, 19 nt, Artificial Sequence
  Description of Artificial Sequence: Synthetic oligonucleotide
  Sense strand starting at position 2472 of SEQ ID NO: 1560038
guauaaacguccugugcac

SEQ ID NO: 1571902 - RNA, 19 nt, Artificial Sequence
  Description of Artificial Sequence: Synthetic oligonucleotide
  Antisense strand to SEQ ID NO: 1571901
gugcacaggacguuuauac

SEQ ID NO: 1571903 - RNA, 19 nt, Artificial Sequence
  Description of Artificial Sequence: Synthetic oligonucleotide
  Sense strand starting at position 2490 of SEQ ID NO: 1560038
ccauuugguugggacaagu

SEQ ID NO: 1571904 - RNA, 19 nt, Artificial Sequence
  Description of Artificial Sequence: Synthetic oligonucleotide
  Antisense strand to SEQ ID NO: 1571903
acuugucccaaccaaaugg

SEQ ID NO: 1571905 - RNA, 19 nt, Artificial Sequence
  Description of Artificial Sequence: Synthetic oligonucleotide
  Sense strand starting at position 2537 of SEQ ID NO: 1560038
ggucuaaaguugucaauca

SEQ ID NO: 1571906 - RNA, 19 nt, Artificial Sequence
  Description of Artificial Sequence: Synthetic oligonucleotide
  Antisense strand to SEQ ID NO: 1571905
ugauugacaacuuuagacc

SEQ ID NO: 1571907 - RNA, 19 nt, Artificial Sequence
  Description of Artificial Sequence: Synthetic oligonucleotide
  Sense strand starting at position 2538 of SEQ ID NO: 1560038
gucuaaaguugucaaucaa

SEQ ID NO: 1571908 - RNA, 19 nt, Artificial Sequence
  Description of Artificial Sequence: Synthetic oligonucleotide
  Antisense strand to SEQ ID NO: 1571907
uugauugacaacuuuagac

SEQ ID NO: 1571909 - RNA, 19 nt, Artificial Sequence
  Description of Artificial Sequence: Synthetic oligonucleotide
  Sense strand starting at position 2640 of SEQ ID NO: 1560038
uuagauugugggcguccaa

SEQ ID NO: 1571910 - RNA, 19 nt, Artificial Sequence
  Description of Artificial Sequence: Synthetic oligonucleotide
  Antisense strand to SEQ ID NO: 1571909
uuggacgcccacaaucuaa

SEQ ID NO: 1571911 - RNA, 19 nt, Artificial Sequence
  Description of Artificial Sequence: Synthetic oligonucleotide
  Sense strand starting at position 2707 of SEQ ID NO: 1560038
ucccgugugcucuggagau

SEQ ID NO: 1571912 - RNA, 19 nt, Artificial Sequence
  Description of Artificial Sequence: Synthetic oligonucleotide
  Antisense strand to SEQ ID NO: 1571911
aucuccagagcacacggga

SEQ ID NO: 1571913 - RNA, 19 nt, Artificial Sequence
  Description of Artificial Sequence: Synthetic oligonucleotide
  Sense strand starting at position 2756 of SEQ ID NO: 1560038
caaguaaaguggucucgcu

SEQ ID NO: 1571914 - RNA, 19 nt, Artificial Sequence
  Description of Artificial Sequence: Synthetic oligonucleotide
  Antisense strand to SEQ ID NO: 1571913
agcgagaccacuuuacuug

SEQ ID NO: 1571915 - RNA, 19 nt, Artificial Sequence
  Description of Artificial Sequence: Synthetic oligonucleotide
  Sense strand starting at position 2763 of SEQ ID NO: 1560038
aguggucucgcugagaaau

SEQ ID NO: 1571916 - RNA, 19 nt, Artificial Sequence
  Description of Artificial Sequence: Synthetic oligonucleotide
  Antisense strand to SEQ ID NO: 1571915
auuucucagcgagaccacu

SEQ ID NO: 1571917 - RNA, 19 nt, Artificial Sequence
  Description of Artificial Sequence: Synthetic oligonucleotide
  Sense strand starting at position 2765 of SEQ ID NO: 1560038
uggucucgcugagaaauuu

SEQ ID NO: 1571918 - RNA, 19 nt, Artificial Sequence
  Description of Artificial Sequence: Synthetic oligonucleotide
  Antisense strand to SEQ ID NO: 1571917
aaauuucucagcgagacca

SEQ ID NO: 1571919 - RNA, 19 nt, Artificial Sequence
  Description of Artificial Sequence: Synthetic oligonucleotide
  Sense strand starting at position 3224 of SEQ ID NO: 1560038
gugccaucucugcagauca

SEQ ID NO: 1571920 - RNA, 19 nt, Artificial Sequence
  Description of Artificial Sequence: Synthetic oligonucleotide
  Antisense strand to SEQ ID NO: 1571919
ugaucugcagagauggcac

SEQ ID NO: 1571921 - RNA, 19 nt, Artificial Sequence
  Description of Artificial Sequence: Synthetic oligonucleotide
  Sense strand starting at position 3249 of SEQ ID NO: 1560038
gcgggaaacuuguuuacug

SEQ ID NO: 1571922 - RNA, 19 nt, Artificial Sequence
  Description of Artificial Sequence: Synthetic oligonucleotide
  Antisense strand to SEQ ID NO: 1571921
caguaaacaaguuucccgc

SEQ ID NO: 1571923 - RNA, 19 nt, Artificial Sequence
  Description of Artificial Sequence: Synthetic oligonucleotide
  Sense strand starting at position 3250 of SEQ ID NO: 1560038
cgggaaacuuguuuacuga

SEQ ID NO: 1571924 - RNA, 19 nt, Artificial Sequence
  Description of Artificial Sequence: Synthetic oligonucleotide
  Antisense strand to SEQ ID NO: 1571923
ucaguaaacaaguuucccg

SEQ ID NO: 1571925 - RNA, 19 nt, Artificial Sequence
  Description of Artificial Sequence: Synthetic oligonucleotide
  Sense strand starting at position 3253 of SEQ ID NO: 1560038
gaaacuuguuuacugagac

SEQ ID NO: 1571926 - RNA, 19 nt, Artificial Sequence
  Description of Artificial Sequence: Synthetic oligonucleotide
  Antisense strand to SEQ ID NO: 1571925
gucucaguaaacaaguuuc

SEQ ID NO: 1571927 - RNA, 19 nt, Artificial Sequence
  Description of Artificial Sequence: Synthetic oligonucleotide
  Sense strand starting at position 3302 of SEQ ID NO: 1560038
ucagguuggccuuggaagu

SEQ ID NO: 1571928 - RNA, 19 nt, Artificial Sequence
  Description of Artificial Sequence: Synthetic oligonucleotide
  Antisense strand to SEQ ID NO: 1571927
acuuccaaggccaaccuga

SEQ ID NO: 1571929 - RNA, 19 nt, Artificial Sequence
  Description of Artificial Sequence: Synthetic oligonucleotide
  Sense strand starting at position 3303 of SEQ ID NO: 1560038
cagguuggccuuggaagua

SEQ ID NO: 1571930 - RNA, 19 nt, Artificial Sequence
  Description of Artificial Sequence: Synthetic oligonucleotide
  Antisense strand to SEQ ID NO: 1571929
uacuuccaaggccaaccug

SEQ ID NO: 1571931 - RNA, 19 nt, Artificial Sequence
  Description of Artificial Sequence: Synthetic oligonucleotide
  Sense strand starting at position 3348 of SEQ ID NO: 1560038
gagccaaaccuuugaagag

SEQ ID NO: 1571932 - RNA, 19 nt, Artificial Sequence
  Description of Artificial Sequence: Synthetic oligonucleotide
  Antisense strand to SEQ ID NO: 1571931
cucuucaaagguuuggcuc

SEQ ID NO: 1571933 - RNA, 19 nt, Artificial Sequence
  Description of Artificial Sequence: Synthetic oligonucleotide
  Sense strand starting at position 3363 of SEQ ID NO: 1560038
agaggaacuugugaaugaa

SEQ ID NO: 1571934 - RNA, 19 nt, Artificial Sequence
  Description of Artificial Sequence: Synthetic oligonucleotide
  Antisense strand to SEQ ID NO: 1571933
uucauucacaaguuccucu

SEQ ID NO: 1571935 - RNA, 19 nt, Artificial Sequence
  Description of Artificial Sequence: Synthetic oligonucleotide
  Sense strand starting at position 3377 of SEQ ID NO: 1560038
augaaugagacgcgccaua

SEQ ID NO: 1571936 - RNA, 19 nt, Artificial Sequence
  Description of Artificial Sequence: Synthetic oligonucleotide
  Antisense strand to SEQ ID NO: 1571935
uauggcgcgucucauucau

SEQ ID NO: 1571937 - RNA, 19 nt, Artificial Sequence
  Description of Artificial Sequence: Synthetic oligonucleotide
  Sense strand starting at position 989 of SEQ ID NO: 1560039
ggguugaagcguugaaagu

SEQ ID NO: 1571938 - RNA, 19 nt, Artificial Sequence
  Description of Artificial Sequence: Synthetic oligonucleotide
  Antisense strand to SEQ ID NO: 1571937
acuuucaacgcuucaaccc

SEQ ID NO: 1571939 - RNA, 19 nt, Artificial Sequence
  Description of Artificial Sequence: Synthetic oligonucleotide
  Sense strand starting at position 990 of SEQ ID NO: 1560039
gguugaagcguugaaagug

SEQ ID NO: 1571940 - RNA, 19 nt, Artificial Sequence
  Description of Artificial Sequence: Synthetic oligonucleotide
  Antisense strand to SEQ ID NO: 1571939
cacuuucaacgcuucaacc

SEQ ID NO: 1571941 - RNA, 19 nt, Artificial Sequence
  Description of Artificial Sequence: Synthetic oligonucleotide
  Sense strand starting at position 991 of SEQ ID NO: 1560039
guugaagcguugaaagugu

SEQ ID NO: 1571942 - RNA, 19 nt, Artificial Sequence
  Description of Artificial Sequence: Synthetic oligonucleotide
  Antisense strand to SEQ ID NO: 1571941
acacuuucaacgcuucaac

SEQ ID NO: 1571943 - RNA, 19 nt, Artificial Sequence
  Description of Artificial Sequence: Synthetic oligonucleotide
  Sense strand starting at position 995 of SEQ ID NO: 1560039
aagcguugaaaguguguua

SEQ ID NO: 1571944 - RNA, 19 nt, Artificial Sequence
  Description of Artificial Sequence: Synthetic oligonucleotide
  Antisense strand to SEQ ID NO: 1571943
uaacacacuuucaacgcuu

SEQ ID NO: 1571945 - RNA, 19 nt, Artificial Sequence
  Description of Artificial Sequence: Synthetic oligonucleotide
  Sense strand starting at position 1002 of SEQ ID NO: 1560039
gaaaguguguuacccagau

SEQ ID NO: 1571946 - RNA, 19 nt, Artificial Sequence
  Description of Artificial Sequence: Synthetic oligonucleotide
  Antisense strand to SEQ ID NO: 1571945
aucuggguaacacacuuuc

SEQ ID NO: 1571947 - RNA, 19 nt, Artificial Sequence
  Description of Artificial Sequence: Synthetic oligonucleotide
  Sense strand starting at position 1295 of SEQ ID NO: 1560039
guauaaacguccugugcac

SEQ ID NO: 1571948 - RNA, 19 nt, Artificial Sequence
  Description of Artificial Sequence: Synthetic oligonucleotide
  Antisense strand to SEQ ID NO: 1571947
gugcacaggacguuuauac

SEQ ID NO: 1571949 - RNA, 19 nt, Artificial Sequence
  Description of Artificial Sequence: Synthetic oligonucleotide
  Sense strand starting at position 1313 of SEQ ID NO: 1560039
ccauuugguugggacaagu

SEQ ID NO: 1571950 - RNA, 19 nt, Artificial Sequence
  Description of Artificial Sequence: Synthetic oligonucleotide
  Antisense strand to SEQ ID NO: 1571949
acuugucccaaccaaaugg

SEQ ID NO: 1571951 - RNA, 19 nt, Artificial Sequence
  Description of Artificial Sequence: Synthetic oligonucleotide
  Sense strand starting at position 1360 of SEQ ID NO: 1560039
ggucuaaaguugucaauca

SEQ ID NO: 1571952 - RNA, 19 nt, Artificial Sequence
  Description of Artificial Sequence: Synthetic oligonucleotide
  Antisense strand to SEQ ID NO: 1571951
ugauugacaacuuuagacc

SEQ ID NO: 1571953 - RNA, 19 nt, Artificial Sequence
  Description of Artificial Sequence: Synthetic oligonucleotide
  Sense strand starting at position 1361 of SEQ ID NO: 1560039
gucuaaaguugucaaucaa

SEQ ID NO: 1571954 - RNA, 19 nt, Artificial Sequence
  Description of Artificial Sequence: Synthetic oligonucleotide
  Antisense strand to SEQ ID NO: 1571953
uugauugacaacuuuagac

SEQ ID NO: 1571955 - RNA, 19 nt, Artificial Sequence
  Description of Artificial Sequence: Synthetic oligonucleotide
  Sense strand starting at position 1463 of SEQ ID NO: 1560039
uuagauugugggcguccaa

SEQ ID NO: 1571956 - RNA, 19 nt, Artificial Sequence
  Description of Artificial Sequence: Synthetic oligonucleotide
  Antisense strand to SEQ ID NO: 1571955
uuggacgcccacaaucuaa

SEQ ID NO: 1571957 - RNA, 19 nt, Artificial Sequence
  Description of Artificial Sequence: Synthetic oligonucleotide
  Sense strand starting at position 1530 of SEQ ID NO: 1560039
ucccgugugcucuggagau

SEQ ID NO: 1571958 - RNA, 19 nt, Artificial Sequence
  Description of Artificial Sequence: Synthetic oligonucleotide
  Antisense strand to SEQ ID NO: 1571957
aucuccagagcacacggga

SEQ ID NO: 1571959 - RNA, 19 nt, Artificial Sequence
  Description of Artificial Sequence: Synthetic oligonucleotide
  Sense strand starting at position 1579 of SEQ ID NO: 1560039
caaguaaaguggucucgcu

SEQ ID NO: 1571960 - RNA, 19 nt, Artificial Sequence
  Description of Artificial Sequence: Synthetic oligonucleotide
  Antisense strand to SEQ ID NO: 1571959
agcgagaccacuuuacuug

SEQ ID NO: 1571961 - RNA, 19 nt, Artificial Sequence
  Description of Artificial Sequence: Synthetic oligonucleotide
  Sense strand starting at position 1586 of SEQ ID NO: 1560039
aguggucucgcugagaaau

SEQ ID NO: 1571962 - RNA, 19 nt, Artificial Sequence
  Description of Artificial Sequence: Synthetic oligonucleotide
  Antisense strand to SEQ ID NO: 1571961
auuucucagcgagaccacu

SEQ ID NO: 1571963 - RNA, 19 nt, Artificial Sequence
  Description of Artificial Sequence: Synthetic oligonucleotide
  Sense strand starting at position 1588 of SEQ ID NO: 1560039
uggucucgcugagaaauuu

SEQ ID NO: 1571964 - RNA, 19 nt, Artificial Sequence
  Description of Artificial Sequence: Synthetic oligonucleotide
  Antisense strand to SEQ ID NO: 1571963
aaauuucucagcgagacca

SEQ ID NO: 1571965 - RNA, 19 nt, Artificial Sequence
  Description of Artificial Sequence: Synthetic oligonucleotide
  Sense strand starting at position 2047 of SEQ ID NO: 1560039
gugccaucucugcagauca

SEQ ID NO: 1571966 - RNA, 19 nt, Artificial Sequence
  Description of Artificial Sequence: Synthetic oligonucleotide
  Antisense strand to SEQ ID NO: 1571965
ugaucugcagagauggcac

SEQ ID NO: 1571967 - RNA, 19 nt, Artificial Sequence
  Description of Artificial Sequence: Synthetic oligonucleotide
  Sense strand starting at position 2072 of SEQ ID NO: 1560039
gcgggaaacuuguuuacug

SEQ ID NO: 1571968 - RNA, 19 nt, Artificial Sequence
  Description of Artificial Sequence: Synthetic oligonucleotide
  Antisense strand to SEQ ID NO: 1571967
caguaaacaaguuucccgc

SEQ ID NO: 1571969 - RNA, 19 nt, Artificial Sequence
  Description of Artificial Sequence: Synthetic oligonucleotide
  Sense strand starting at position 2073 of SEQ ID NO: 1560039
cgggaaacuuguuuacuga

SEQ ID NO: 1571970 - RNA, 19 nt, Artificial Sequence
  Description of Artificial Sequence: Synthetic oligonucleotide
  Antisense strand to SEQ ID NO: 1571969
ucaguaaacaaguuucccg

SEQ ID NO: 1571971 - RNA, 19 nt, Artificial Sequence
  Description of Artificial Sequence: Synthetic oligonucleotide
  Sense strand starting at position 2076 of SEQ ID NO: 1560039
gaaacuuguuuacugagac

SEQ ID NO: 1571972 - RNA, 19 nt, Artificial Sequence
  Description of Artificial Sequence: Synthetic oligonucleotide
  Antisense strand to SEQ ID NO: 1571971
gucucaguaaacaaguuuc

SEQ ID NO: 1571973 - RNA, 19 nt, Artificial Sequence
  Description of Artificial Sequence: Synthetic oligonucleotide
  Sense strand starting at position 2125 of SEQ ID NO: 1560039
ucagguuggccuuggaagu

SEQ ID NO: 1571974 - RNA, 19 nt, Artificial Sequence
  Description of Artificial Sequence: Synthetic oligonucleotide
  Antisense strand to SEQ ID NO: 1571973
acuuccaaggccaaccuga

SEQ ID NO: 1571975 - RNA, 19 nt, Artificial Sequence
  Description of Artificial Sequence: Synthetic oligonucleotide
  Sense strand starting at position 2126 of SEQ ID NO: 1560039
cagguuggccuuggaagua

SEQ ID NO: 1571976 - RNA, 19 nt, Artificial Sequence
  Description of Artificial Sequence: Synthetic oligonucleotide
  Antisense strand to SEQ ID NO: 1571975
uacuuccaaggccaaccug

SEQ ID NO: 1571977 - RNA, 19 nt, Artificial Sequence
  Description of Artificial Sequence: Synthetic oligonucleotide
  Sense strand starting at position 2171 of SEQ ID NO: 1560039
gagccaaaccuuugaagag

SEQ ID NO: 1571978 - RNA, 19 nt, Artificial Sequence
  Description of Artificial Sequence: Synthetic oligonucleotide
  Antisense strand to SEQ ID NO: 1571977
cucuucaaagguuuggcuc

SEQ ID NO: 1571979 - RNA, 19 nt, Artificial Sequence
  Description of Artificial Sequence: Synthetic oligonucleotide
  Sense strand starting at position 2186 of SEQ ID NO: 1560039
agaggaacuugugaaugaa

SEQ ID NO: 1571980 - RNA, 19 nt, Artificial Sequence
  Description of Artificial Sequence: Synthetic oligonucleotide
  Antisense strand to SEQ ID NO: 1571979
uucauucacaaguuccucu

SEQ ID NO: 1571981 - RNA, 19 nt, Artificial Sequence
  Description of Artificial Sequence: Synthetic oligonucleotide
  Sense strand starting at position 2200 of SEQ ID NO: 1560039
augaaugagacgcgccaua

SEQ ID NO: 1571982 - RNA, 19 nt, Artificial Sequence
  Description of Artificial Sequence: Synthetic oligonucleotide
  Antisense strand to SEQ ID NO: 1571981
uauggcgcgucucauucau

SEQ ID NO: 1571983 - RNA, 19 nt, Artificial Sequence
  Description of Artificial Sequence: Synthetic oligonucleotide
  Sense strand starting at position 3216 of SEQ ID NO: 1560039
aagggauauugacuucgua

SEQ ID NO: 1571984 - RNA, 19 nt, Artificial Sequence
  Description of Artificial Sequence: Synthetic oligonucleotide
  Antisense strand to SEQ ID NO: 1571983
uacgaagucaauaucccuu

SEQ ID NO: 1571985 - RNA, 19 nt, Artificial Sequence
  Description of Artificial Sequence: Synthetic oligonucleotide
  Sense strand starting at position 3219 of SEQ ID NO: 1560039
ggauauugacuucguaaau

SEQ ID NO: 1571986 - RNA, 19 nt, Artificial Sequence
  Description of Artificial Sequence: Synthetic oligonucleotide
  Antisense strand to SEQ ID NO: 1571985
auuuacgaagucaauaucc

SEQ ID NO: 1571987 - RNA, 19 nt, Artificial Sequence
  Description of Artificial Sequence: Synthetic oligonucleotide
  Sense strand starting at position 3220 of SEQ ID NO: 1560039
gauauugacuucguaaaug

SEQ ID NO: 1571988 - RNA, 19 nt, Artificial Sequence
  Description of Artificial Sequence: Synthetic oligonucleotide
  Antisense strand to SEQ ID NO: 1571987
cauuuacgaagucaauauc

SEQ ID NO: 1571989 - RNA, 19 nt, Artificial Sequence
  Description of Artificial Sequence: Synthetic oligonucleotide
  Sense strand starting at position 3302 of SEQ ID NO: 1560039
uuuggauucgcggaucaaa

SEQ ID NO: 1571990 - RNA, 19 nt, Artificial Sequence
  Description of Artificial Sequence: Synthetic oligonucleotide
  Antisense strand to SEQ ID NO: 1571989
uuugauccgcgaauccaaa

SEQ ID NO: 1571991 - RNA, 19 nt, Artificial Sequence
  Description of Artificial Sequence: Synthetic oligonucleotide
  Sense strand starting at position 3346 of SEQ ID NO: 1560039
guacgcuugggcugaauua

SEQ ID NO: 1571992 - RNA, 19 nt, Artificial Sequence
  Description of Artificial Sequence: Synthetic oligonucleotide
  Antisense strand to SEQ ID NO: 1571991
uaauucagcccaagcguac

SEQ ID NO: 1571993 - RNA, 19 nt, Artificial Sequence
  Description of Artificial Sequence: Synthetic oligonucleotide
  Sense strand starting at position 3347 of SEQ ID NO: 1560039
uacgcuugggcugaauuaa

SEQ ID NO: 1571994 - RNA, 19 nt, Artificial Sequence
  Description of Artificial Sequence: Synthetic oligonucleotide
  Antisense strand to SEQ ID NO: 1571993
uuaauucagcccaagcgua

SEQ ID NO: 1571995 - RNA, 19 nt, Artificial Sequence
  Description of Artificial Sequence: Synthetic oligonucleotide
  Sense strand starting at position 3361 of SEQ ID NO: 1560039
auuaaugucuacccucagu

SEQ ID NO: 1571996 - RNA, 19 nt, Artificial Sequence
  Description of Artificial Sequence: Synthetic oligonucleotide
  Antisense strand to SEQ ID NO: 1571995
acugaggguagacauuaau

SEQ ID NO: 1571997 - RNA, 19 nt, Artificial Sequence
  Description of Artificial Sequence: Synthetic oligonucleotide
  Sense strand starting at position 3378 of SEQ ID NO: 1560039
guacucucgucucaggaga

SEQ ID NO: 1571998 - RNA, 19 nt, Artificial Sequence
  Description of Artificial Sequence: Synthetic oligonucleotide
  Antisense strand to SEQ ID NO: 1571997
ucuccugagacgagaguac

SEQ ID NO: 1571999 - RNA, 19 nt, Artificial Sequence
  Description of Artificial Sequence: Synthetic oligonucleotide
  Sense strand starting at position 3474 of SEQ ID NO: 1560039
agcguaaauuccuggccca

SEQ ID NO: 1572000 - RNA, 19 nt, Artificial Sequence
  Description of Artificial Sequence: Synthetic oligonucleotide
  Antisense strand to SEQ ID NO: 1571999
ugggccaggaauuuacgcu

SEQ ID NO: 1572001 - RNA, 19 nt, Artificial Sequence
  Description of Artificial Sequence: Synthetic oligonucleotide
  Sense strand starting at position 3475 of SEQ ID NO: 1560039
gcguaaauuccuggcccaa

SEQ ID NO: 1572002 - RNA, 19 nt, Artificial Sequence
  Description of Artificial Sequence: Synthetic oligonucleotide
  Antisense strand to SEQ ID NO: 1572001
uugggccaggaauuuacgc

SEQ ID NO: 1572003 - RNA, 19 nt, Artificial Sequence
  Description of Artificial Sequence: Synthetic oligonucleotide
  Sense strand starting at position 3477 of SEQ ID NO: 1560039
guaaauuccuggcccaaga

SEQ ID NO: 1572004 - RNA, 19 nt, Artificial Sequence
  Description of Artificial Sequence: Synthetic oligonucleotide
  Antisense strand to SEQ ID NO: 1572003
ucuugggccaggaauuuac

SEQ ID NO: 1572005 - RNA, 19 nt, Artificial Sequence
  Description of Artificial Sequence: Synthetic oligonucleotide
  Sense strand starting at position 3490 of SEQ ID NO: 1560039
ccaagauccugggugggau

SEQ ID NO: 1572006 - RNA, 19 nt, Artificial Sequence
  Description of Artificial Sequence: Synthetic oligonucleotide
  Antisense strand to SEQ ID NO: 1572005
aucccacccaggaucuugg

SEQ ID NO: 1572007 - RNA, 19 nt, Artificial Sequence
  Description of Artificial Sequence: Synthetic oligonucleotide
  Sense strand starting at position 3505 of SEQ ID NO: 1560039
ggaugacaaugugaccuaa

SEQ ID NO: 1572008 - RNA, 19 nt, Artificial Sequence
  Description of Artificial Sequence: Synthetic oligonucleotide
  Antisense strand to SEQ ID NO: 1572007
uuaggucacauugucaucc

SEQ ID NO: 1572009 - RNA, 19 nt, Artificial Sequence
  Description of Artificial Sequence: Synthetic oligonucleotide
  Sense strand starting at position 3534 of SEQ ID NO: 1560039
cgaucucggagaugggaua

SEQ ID NO: 1572010 - RNA, 19 nt, Artificial Sequence
  Description of Artificial Sequence: Synthetic oligonucleotide
  Antisense strand to SEQ ID NO: 1572009
uaucccaucuccgagaucg

SEQ ID NO: 1572011 - RNA, 19 nt, Artificial Sequence
  Description of Artificial Sequence: Synthetic oligonucleotide
  Sense strand starting at position 3545 of SEQ ID NO: 1560039
augggauaauuacaaggau

SEQ ID NO: 1572012 - RNA, 19 nt, Artificial Sequence
  Description of Artificial Sequence: Synthetic oligonucleotide
  Antisense strand to SEQ ID NO: 1572011
auccuuguaauuaucccau

SEQ ID NO: 1572013 - RNA, 19 nt, Artificial Sequence
  Description of Artificial Sequence: Synthetic oligonucleotide
  Sense strand starting at position 3597 of SEQ ID NO: 1560039
ccgagcauuuaacguacaa

SEQ ID NO: 1572014 - RNA, 19 nt, Artificial Sequence
  Description of Artificial Sequence: Synthetic oligonucleotide
  Antisense strand to SEQ ID NO: 1572013
uuguacguuaaaugcucgg

SEQ ID NO: 1572015 - RNA, 19 nt, Artificial Sequence
  Description of Artificial Sequence: Synthetic oligonucleotide
  Sense strand starting at position 31 of SEQ ID NO: 1560040
gcaacaguucugcagauca

SEQ ID NO: 1572016 - RNA, 19 nt, Artificial Sequence
  Description of Artificial Sequence: Synthetic oligonucleotide
  Antisense strand to SEQ ID NO: 1572015
ugaucugcagaacuguugc

SEQ ID NO: 1572017 - RNA, 19 nt, Artificial Sequence
  Description of Artificial Sequence: Synthetic oligonucleotide
  Sense strand starting at position 146 of SEQ ID NO: 1560040
ucaguaaggcucugaauag

SEQ ID NO: 1572018 - RNA, 19 nt, Artificial Sequence
  Description of Artificial Sequence: Synthetic oligonucleotide
  Antisense strand to SEQ ID NO: 1572017
cuauucagagccuuacuga

SEQ ID NO: 1572019 - RNA, 19 nt, Artificial Sequence
  Description of Artificial Sequence: Synthetic oligonucleotide
  Sense strand starting at position 155 of SEQ ID NO: 1560040
cucugaauagcacaaguau

SEQ ID NO: 1572020 - RNA, 19 nt, Artificial Sequence
  Description of Artificial Sequence: Synthetic oligonucleotide
  Antisense strand to SEQ ID NO: 1572019
auacuugugcuauucagag

SEQ ID NO: 1572021 - RNA, 19 nt, Artificial Sequence
  Description of Artificial Sequence: Synthetic oligonucleotide
  Sense strand starting at position 228 of SEQ ID NO: 1560040
aagcuuuaggaucgucuua

SEQ ID NO: 1572022 - RNA, 19 nt, Artificial Sequence
  Description of Artificial Sequence: Synthetic oligonucleotide
  Antisense strand to SEQ ID NO: 1572021
uaagacgauccuaaagcuu

SEQ ID NO: 1572023 - RNA, 19 nt, Artificial Sequence
  Description of Artificial Sequence: Synthetic oligonucleotide
  Sense strand starting at position 233 of SEQ ID NO: 1560040
uuaggaucgucuuaauuug

SEQ ID NO: 1572024 - RNA, 19 nt, Artificial Sequence
  Description of Artificial Sequence: Synthetic oligonucleotide
  Antisense strand to SEQ ID NO: 1572023
caaauuaagacgauccuaa

SEQ ID NO: 1572025 - RNA, 19 nt, Artificial Sequence
  Description of Artificial Sequence: Synthetic oligonucleotide
  Sense strand starting at position 372 of SEQ ID NO: 1560040
auaagaaagcaguggucau

SEQ ID NO: 1572026 - RNA, 19 nt, Artificial Sequence
  Description of Artificial Sequence: Synthetic oligonucleotide
  Antisense strand to SEQ ID NO: 1572025
augaccacugcuuucuuau

SEQ ID NO: 1572027 - RNA, 19 nt, Artificial Sequence
  Description of Artificial Sequence: Synthetic oligonucleotide
  Sense strand starting at position 376 of SEQ ID NO: 1560040
gaaagcaguggucauaguu

SEQ ID NO: 1572028 - RNA, 19 nt, Artificial Sequence
  Description of Artificial Sequence: Synthetic oligonucleotide
  Antisense strand to SEQ ID NO: 1572027
aacuaugaccacugcuuuc

SEQ ID NO: 1572029 - RNA, 19 nt, Artificial Sequence
  Description of Artificial Sequence: Synthetic oligonucleotide
  Sense strand starting at position 503 of SEQ ID NO: 1560040
agaucauucuucuugguca

SEQ ID NO: 1572030 - RNA, 19 nt, Artificial Sequence
  Description of Artificial Sequence: Synthetic oligonucleotide
  Antisense strand to SEQ ID NO: 1572029
ugaccaagaagaaugaucu

SEQ ID NO: 1572031 - RNA, 19 nt, Artificial Sequence
  Description of Artificial Sequence: Synthetic oligonucleotide
  Sense strand starting at position 505 of SEQ ID NO: 1560040
aucauucuucuuggucauu

SEQ ID NO: 1572032 - RNA, 19 nt, Artificial Sequence
  Description of Artificial Sequence: Synthetic oligonucleotide
  Antisense strand to SEQ ID NO: 1572031
aaugaccaagaagaaugau

SEQ ID NO: 1572033 - RNA, 19 nt, Artificial Sequence
  Description of Artificial Sequence: Synthetic oligonucleotide
  Sense strand starting at position 510 of SEQ ID NO: 1560040
ucuucuuggucauuccaua

SEQ ID NO: 1572034 - RNA, 19 nt, Artificial Sequence
  Description of Artificial Sequence: Synthetic oligonucleotide
  Antisense strand to SEQ ID NO: 1572033
uauggaaugaccaagaaga

SEQ ID NO: 1572035 - RNA, 19 nt, Artificial Sequence
  Description of Artificial Sequence: Synthetic oligonucleotide
  Sense strand starting at position 558 of SEQ ID NO: 1560040
cucaucaaacguugucaga

SEQ ID NO: 1572036 - RNA, 19 nt, Artificial Sequence
  Description of Artificial Sequence: Synthetic oligonucleotide
  Antisense strand to SEQ ID NO: 1572035
ucugacaacguuugaugag

SEQ ID NO: 1572037 - RNA, 19 nt, Artificial Sequence
  Description of Artificial Sequence: Synthetic oligonucleotide
  Sense strand starting at position 560 of SEQ ID NO: 1560040
caucaaacguugucagaug

SEQ ID NO: 1572038 - RNA, 19 nt, Artificial Sequence
  Description of Artificial Sequence: Synthetic oligonucleotide
  Antisense strand to SEQ ID NO: 1572037
caucugacaacguuugaug

SEQ ID NO: 1572039 - RNA, 19 nt, Artificial Sequence
  Description of Artificial Sequence: Synthetic oligonucleotide
  Sense strand starting at position 567 of SEQ ID NO: 1560040
cguugucagaugcauccau

SEQ ID NO: 1572040 - RNA, 19 nt, Artificial Sequence
  Description of Artificial Sequence: Synthetic oligonucleotide
  Antisense strand to SEQ ID NO: 1572039
auggaugcaucugacaacg

SEQ ID NO: 1572041 - RNA, 19 nt, Artificial Sequence
  Description of Artificial Sequence: Synthetic oligonucleotide
  Sense strand starting at position 571 of SEQ ID NO: 1560040
gucagaugcauccauagug

SEQ ID NO: 1572042 - RNA, 19 nt, Artificial Sequence
  Description of Artificial Sequence: Synthetic oligonucleotide
  Antisense strand to SEQ ID NO: 1572041
cacuauggaugcaucugac

SEQ ID NO: 1572043 - RNA, 19 nt, Artificial Sequence
  Description of Artificial Sequence: Synthetic oligonucleotide
  Sense strand starting at position 752 of SEQ ID NO: 1560040
aguaacaugucacuaggau

SEQ ID NO: 1572044 - RNA, 19 nt, Artificial Sequence
  Description of Artificial Sequence: Synthetic oligonucleotide
  Antisense strand to SEQ ID NO: 1572043
auccuagugacauguuacu

SEQ ID NO: 1572045 - RNA, 19 nt, Artificial Sequence
  Description of Artificial Sequence: Synthetic oligonucleotide
  Sense strand starting at position 753 of SEQ ID NO: 1560040
guaacaugucacuaggauu

SEQ ID NO: 1572046 - RNA, 19 nt, Artificial Sequence
  Description of Artificial Sequence: Synthetic oligonucleotide
  Antisense strand to SEQ ID NO: 1572045
aauccuagugacauguuac

SEQ ID NO: 1572047 - RNA, 19 nt, Artificial Sequence
  Description of Artificial Sequence: Synthetic oligonucleotide
  Sense strand starting at position 838 of SEQ ID NO: 1560040
uuaccuauggauuguguuu

SEQ ID NO: 1572048 - RNA, 19 nt, Artificial Sequence
  Description of Artificial Sequence: Synthetic oligonucleotide
  Antisense strand to SEQ ID NO: 1572047
aaacacaauccauagguaa

SEQ ID NO: 1572049 - RNA, 19 nt, Artificial Sequence
  Description of Artificial Sequence: Synthetic oligonucleotide
  Sense strand starting at position 843 of SEQ ID NO: 1560040
uauggauuguguuucugac

SEQ ID NO: 1572050 - RNA, 19 nt, Artificial Sequence
  Description of Artificial Sequence: Synthetic oligonucleotide
  Antisense strand to SEQ ID NO: 1572049
gucagaaacacaauccaua

SEQ ID NO: 1572051 - RNA, 19 nt, Artificial Sequence
  Description of Artificial Sequence: Synthetic oligonucleotide
  Sense strand starting at position 845 of SEQ ID NO: 1560040
uggauuguguuucugacau

SEQ ID NO: 1572052 - RNA, 19 nt, Artificial Sequence
  Description of Artificial Sequence: Synthetic oligonucleotide
  Antisense strand to SEQ ID NO: 1572051
augucagaaacacaaucca

SEQ ID NO: 1572053 - RNA, 19 nt, Artificial Sequence
  Description of Artificial Sequence: Synthetic oligonucleotide
  Sense strand starting at position 934 of SEQ ID NO: 1560040
gggauuugauuacauacag

SEQ ID NO: 1572054 - RNA, 19 nt, Artificial Sequence
  Description of Artificial Sequence: Synthetic oligonucleotide
  Antisense strand to SEQ ID NO: 1572053
cuguauguaaucaaauccc

SEQ ID NO: 1572055 - RNA, 19 nt, Artificial Sequence
  Description of Artificial Sequence: Synthetic oligonucleotide
  Sense strand starting at position 1002 of SEQ ID NO: 1560040
cuucuuccagaacguuaaa

SEQ ID NO: 1572056 - RNA, 19 nt, Artificial Sequence
  Description of Artificial Sequence: Synthetic oligonucleotide
  Antisense strand to SEQ ID NO: 1572055
uuuaacguucuggaagaag

SEQ ID NO: 1572057 - RNA, 19 nt, Artificial Sequence
  Description of Artificial Sequence: Synthetic oligonucleotide
  Sense strand starting at position 1005 of SEQ ID NO: 1560040
cuuccagaacguuaaauac

SEQ ID NO: 1572058 - RNA, 19 nt, Artificial Sequence
  Description of Artificial Sequence: Synthetic oligonucleotide
  Antisense strand to SEQ ID NO: 1572057
guauuuaacguucuggaag

SEQ ID NO: 1572059 - RNA, 19 nt, Artificial Sequence
  Description of Artificial Sequence: Synthetic oligonucleotide
  Sense strand starting at position 1124 of SEQ ID NO: 1560040
ccagcugauguccaagauu

SEQ ID NO: 1572060 - RNA, 19 nt, Artificial Sequence
  Description of Artificial Sequence: Synthetic oligonucleotide
  Antisense strand to SEQ ID NO: 1572059
aaucuuggacaucagcugg

SEQ ID NO: 1572061 - RNA, 19 nt, Artificial Sequence
  Description of Artificial Sequence: Synthetic oligonucleotide
  Sense strand starting at position 1874 of SEQ ID NO: 1560040
cgcgucguuuccacgaaga

SEQ ID NO: 1572062 - RNA, 19 nt, Artificial Sequence
  Description of Artificial Sequence: Synthetic oligonucleotide
  Antisense strand to SEQ ID NO: 1572061
ucuucguggaaacgacgcg

SEQ ID NO: 1572063 - RNA, 19 nt, Artificial Sequence
  Description of Artificial Sequence: Synthetic oligonucleotide
  Sense strand starting at position 1876 of SEQ ID NO: 1560040
cgucguuuccacgaagaga

SEQ ID NO: 1572064 - RNA, 19 nt, Artificial Sequence
  Description of Artificial Sequence: Synthetic oligonucleotide
  Antisense strand to SEQ ID NO: 1572063
ucucuucguggaaacgacg

SEQ ID NO: 1572065 - RNA, 19 nt, Artificial Sequence
  Description of Artificial Sequence: Synthetic oligonucleotide
  Sense strand starting at position 1921 of SEQ ID NO: 1560040
caggcuucccgguaucuca

SEQ ID NO: 1572066 - RNA, 19 nt, Artificial Sequence
  Description of Artificial Sequence: Synthetic oligonucleotide
  Antisense strand to SEQ ID NO: 1572065
ugagauaccgggaagccug

SEQ ID NO: 1572067 - RNA, 19 nt, Artificial Sequence
  Description of Artificial Sequence: Synthetic oligonucleotide
  Sense strand starting at position 1937 of SEQ ID NO: 1560040
ucagaucuuccuggucuuu

SEQ ID NO: 1572068 - RNA, 19 nt, Artificial Sequence
  Description of Artificial Sequence: Synthetic oligonucleotide
  Antisense strand to SEQ ID NO: 1572067
aaagaccaggaagaucuga

SEQ ID NO: 1572069 - RNA, 19 nt, Artificial Sequence
  Description of Artificial Sequence: Synthetic oligonucleotide
  Sense strand starting at position 1957 of SEQ ID NO: 1560040
ucagccagggcucaagaau

SEQ ID NO: 1572070 - RNA, 19 nt, Artificial Sequence
  Description of Artificial Sequence: Synthetic oligonucleotide
  Antisense strand to SEQ ID NO: 1572069
auucuugagcccuggcuga

SEQ ID NO: 1572071 - RNA, 19 nt, Artificial Sequence
  Description of Artificial Sequence: Synthetic oligonucleotide
  Sense strand starting at position 1990 of SEQ ID NO: 1560040
cagggaggcuucuuggaaa

SEQ ID NO: 1572072 - RNA, 19 nt, Artificial Sequence
  Description of Artificial Sequence: Synthetic oligonucleotide
  Antisense strand to SEQ ID NO: 1572071
uuuccaagaagccucccug

SEQ ID NO: 1572073 - RNA, 19 nt, Artificial Sequence
  Description of Artificial Sequence: Synthetic oligonucleotide
  Sense strand starting at position 2012 of SEQ ID NO: 1560040
agguuugcuucccuaauau

SEQ ID NO: 1572074 - RNA, 19 nt, Artificial Sequence
  Description of Artificial Sequence: Synthetic oligonucleotide
  Antisense strand to SEQ ID NO: 1572073
auauuagggaagcaaaccu

SEQ ID NO: 1572075 - RNA, 19 nt, Artificial Sequence
  Description of Artificial Sequence: Synthetic oligonucleotide
  Sense strand starting at position 2037 of SEQ ID NO: 1560040
cuuuguugaugcuccacaa

SEQ ID NO: 1572076 - RNA, 19 nt, Artificial Sequence
  Description of Artificial Sequence: Synthetic oligonucleotide
  Antisense strand to SEQ ID NO: 1572075
uuguggagcaucaacaaag

SEQ ID NO: 1572077 - RNA, 19 nt, Artificial Sequence
  Description of Artificial Sequence: Synthetic oligonucleotide
  Sense strand starting at position 2086 of SEQ ID NO: 1560040
gcccuuggugauuaaccua

SEQ ID NO: 1572078 - RNA, 19 nt, Artificial Sequence
  Description of Artificial Sequence: Synthetic oligonucleotide
  Antisense strand to SEQ ID NO: 1572077
uagguuaaucaccaagggc

SEQ ID NO: 1572079 - RNA, 19 nt, Artificial Sequence
  Description of Artificial Sequence: Synthetic oligonucleotide
  Sense strand starting at position 2111 of SEQ ID NO: 1560040
ugcagauggcuuugaaguu

SEQ ID NO: 1572080 - RNA, 19 nt, Artificial Sequence
  Description of Artificial Sequence: Synthetic oligonucleotide
  Antisense strand to SEQ ID NO: 1572079
aacuucaaagccaucugca

SEQ ID NO: 1572081 - RNA, 19 nt, Artificial Sequence
  Description of Artificial Sequence: Synthetic oligonucleotide
  Sense strand starting at position 2555 of SEQ ID NO: 1560040
cuuaguuacuauucuuaga

SEQ ID NO: 1572082 - RNA, 19 nt, Artificial Sequence
  Description of Artificial Sequence: Synthetic oligonucleotide
  Antisense strand to SEQ ID NO: 1572081
ucuaagaauaguaacuaag

SEQ ID NO: 1572083 - RNA, 19 nt, Artificial Sequence
  Description of Artificial Sequence: Synthetic oligonucleotide
  Sense strand starting at position 2712 of SEQ ID NO: 1560040
gacgaauuagccgagcaug

SEQ ID NO: 1572084 - RNA, 19 nt, Artificial Sequence
  Description of Artificial Sequence: Synthetic oligonucleotide
  Antisense strand to SEQ ID NO: 1572083
caugcucggcuaauucguc

SEQ ID NO: 1572085 - RNA, 19 nt, Artificial Sequence
  Description of Artificial Sequence: Synthetic oligonucleotide
  Sense strand starting at position 2771 of SEQ ID NO: 1560040
guaggaggaucguuugcaa

SEQ ID NO: 1572086 - RNA, 19 nt, Artificial Sequence
  Description of Artificial Sequence: Synthetic oligonucleotide
  Antisense strand to SEQ ID NO: 1572085
uugcaaacgauccuccuac

SEQ ID NO: 1572087 - RNA, 19 nt, Artificial Sequence
  Description of Artificial Sequence: Synthetic oligonucleotide
  Sense strand starting at position 2774 of SEQ ID NO: 1560040
ggaggaucguuugcaacca

SEQ ID NO: 1572088 - RNA, 19 nt, Artificial Sequence
  Description of Artificial Sequence: Synthetic oligonucleotide
  Antisense strand to SEQ ID NO: 1572087
ugguugcaaacgauccucc

SEQ ID NO: 1572089 - RNA, 19 nt, Artificial Sequence
  Description of Artificial Sequence: Synthetic oligonucleotide
  Sense strand starting at position 3691 of SEQ ID NO: 1560040
auggguggucucuggcaca

SEQ ID NO: 1572090 - RNA, 19 nt, Artificial Sequence
  Description of Artificial Sequence: Synthetic oligonucleotide
  Antisense strand to SEQ ID NO: 1572089
ugugccagagaccacccau

SEQ ID NO: 1572091 - RNA, 19 nt, Artificial Sequence
  Description of Artificial Sequence: Synthetic oligonucleotide
  Sense strand starting at position 3753 of SEQ ID NO: 1560040
gugcuaagacauuguacau

SEQ ID NO: 1572092 - RNA, 19 nt, Artificial Sequence
  Description of Artificial Sequence: Synthetic oligonucleotide
  Antisense strand to SEQ ID NO: 1572091
auguacaaugucuuagcac

SEQ ID NO: 1572093 - RNA, 19 nt, Artificial Sequence
  Description of Artificial Sequence: Synthetic oligonucleotide
  Sense strand starting at position 3883 of SEQ ID NO: 1560040
uauuauuagccauacgaga

SEQ ID NO: 1572094 - RNA, 19 nt, Artificial Sequence
  Description of Artificial Sequence: Synthetic oligonucleotide
  Antisense strand to SEQ ID NO: 1572093
ucucguauggcuaauaaua

SEQ ID NO: 1572095 - RNA, 19 nt, Artificial Sequence
  Description of Artificial Sequence: Synthetic oligonucleotide
  Sense strand starting at position 131 of SEQ ID NO: 1560041
guacuucuuguccgcgauu

SEQ ID NO: 1572096 - RNA, 19 nt, Artificial Sequence
  Description of Artificial Sequence: Synthetic oligonucleotide
  Antisense strand to SEQ ID NO: 1572095
aaucgcggacaagaaguac

SEQ ID NO: 1572097 - RNA, 19 nt, Artificial Sequence
  Description of Artificial Sequence: Synthetic oligonucleotide
  Sense strand starting at position 133 of SEQ ID NO: 1560041
acuucuuguccgcgauucu

SEQ ID NO: 1572098 - RNA, 19 nt, Artificial Sequence
  Description of Artificial Sequence: Synthetic oligonucleotide
  Antisense strand to SEQ ID NO: 1572097
agaaucgcggacaagaagu

SEQ ID NO: 1572099 - RNA, 19 nt, Artificial Sequence
  Description of Artificial Sequence: Synthetic oligonucleotide
  Sense strand starting at position 143 of SEQ ID NO: 1560041
cgcgauucucacgcuuaag

SEQ ID NO: 1572100 - RNA, 19 nt, Artificial Sequence
  Description of Artificial Sequence: Synthetic oligonucleotide
  Antisense strand to SEQ ID NO: 1572099
cuuaagcgugagaaucgcg

SEQ ID NO: 1572101 - RNA, 19 nt, Artificial Sequence
  Description of Artificial Sequence: Synthetic oligonucleotide
  Sense strand starting at position 171 of SEQ ID NO: 1560041
ucucuucugcgguacagau

SEQ ID NO: 1572102 - RNA, 19 nt, Artificial Sequence
  Description of Artificial Sequence: Synthetic oligonucleotide
  Antisense strand to SEQ ID NO: 1572101
aucuguaccgcagaagaga

SEQ ID NO: 1572103 - RNA, 19 nt, Artificial Sequence
  Description of Artificial Sequence: Synthetic oligonucleotide
  Sense strand starting at position 395 of SEQ ID NO: 1560041
aaaggagauccugggucuu

SEQ ID NO: 1572104 - RNA, 19 nt, Artificial Sequence
  Description of Artificial Sequence: Synthetic oligonucleotide
  Antisense strand to SEQ ID NO: 1572103
aagacccaggaucuccuuu

SEQ ID NO: 1572105 - RNA, 19 nt, Artificial Sequence
  Description of Artificial Sequence: Synthetic oligonucleotide
  Sense strand starting at position 468 of SEQ ID NO: 1560041
ggcuaucucugaccucagu

SEQ ID NO: 1572106 - RNA, 19 nt, Artificial Sequence
  Description of Artificial Sequence: Synthetic oligonucleotide
  Antisense strand to SEQ ID NO: 1572105
acugaggucagagauagcc

SEQ ID NO: 1572107 - RNA, 19 nt, Artificial Sequence
  Description of Artificial Sequence: Synthetic oligonucleotide
  Sense strand starting at position 513 of SEQ ID NO: 1560041
aagcuuaugguuuaaugua

SEQ ID NO: 1572108 - RNA, 19 nt, Artificial Sequence
  Description of Artificial Sequence: Synthetic oligonucleotide
  Antisense strand to SEQ ID NO: 1572107
uacauuaaaccauaagcuu

SEQ ID NO: 1572109 - RNA, 19 nt, Artificial Sequence
  Description of Artificial Sequence: Synthetic oligonucleotide
  Sense strand starting at position 522 of SEQ ID NO: 1560041
guuuaauguagugaucucu

SEQ ID NO: 1572110 - RNA, 19 nt, Artificial Sequence
  Description of Artificial Sequence: Synthetic oligonucleotide
  Antisense strand to SEQ ID NO: 1572109
agagaucacuacauuaaac

SEQ ID NO: 1572111 - RNA, 19 nt, Artificial Sequence
  Description of Artificial Sequence: Synthetic oligonucleotide
  Sense strand starting at position 775 of SEQ ID NO: 1560041
agccauuagggccaucuaa

SEQ ID NO: 1572112 - RNA, 19 nt, Artificial Sequence
  Description of Artificial Sequence: Synthetic oligonucleotide
  Antisense strand to SEQ ID NO: 1572111
uuagauggcccuaauggcu

SEQ ID NO: 1572113 - RNA, 19 nt, Artificial Sequence
  Description of Artificial Sequence: Synthetic oligonucleotide
  Sense strand starting at position 1043 of SEQ ID NO: 1560041
ggcuaucgauaaccaaagu

SEQ ID NO: 1572114 - RNA, 19 nt, Artificial Sequence
  Description of Artificial Sequence: Synthetic oligonucleotide
  Antisense strand to SEQ ID NO: 1572113
acuuugguuaucgauagcc

SEQ ID NO: 1572115 - RNA, 19 nt, Artificial Sequence
  Description of Artificial Sequence: Synthetic oligonucleotide
  Sense strand starting at position 1054 of SEQ ID NO: 1560041
accaaaguuuaguggacau

SEQ ID NO: 1572116 - RNA, 19 nt, Artificial Sequence
  Description of Artificial Sequence: Synthetic oligonucleotide
  Antisense strand to SEQ ID NO: 1572115
auguccacuaaacuuuggu

SEQ ID NO: 1572117 - RNA, 19 nt, Artificial Sequence
  Description of Artificial Sequence: Synthetic oligonucleotide
  Sense strand starting at position 1074 of SEQ ID NO: 1560041
uccagauugccugagcaau

SEQ ID NO: 1572118 - RNA, 19 nt, Artificial Sequence
  Description of Artificial Sequence: Synthetic oligonucleotide
  Antisense strand to SEQ ID NO: 1572117
auugcucaggcaaucugga

SEQ ID NO: 1572119 - RNA, 19 nt, Artificial Sequence
  Description of Artificial Sequence: Synthetic oligonucleotide
  Sense strand starting at position 1105 of SEQ ID NO: 1560041
guuagagggcccuaccaaa

SEQ ID NO: 1572120 - RNA, 19 nt, Artificial Sequence
  Description of Artificial Sequence: Synthetic oligonucleotide
  Antisense strand to SEQ ID NO: 1572119
uuugguagggcccucuaac

SEQ ID NO: 1572121 - RNA, 19 nt, Artificial Sequence
  Description of Artificial Sequence: Synthetic oligonucleotide
  Sense strand starting at position 1124 of SEQ ID NO: 1560041
uccagaaugcagugggauu

SEQ ID NO: 1572122 - RNA, 19 nt, Artificial Sequence
  Description of Artificial Sequence: Synthetic oligonucleotide
  Antisense strand to SEQ ID NO: 1572121
aaucccacugcauucugga

SEQ ID NO: 1572123 - RNA, 19 nt, Artificial Sequence
  Description of Artificial Sequence: Synthetic oligonucleotide
  Sense strand starting at position 1190 of SEQ ID NO: 1560041
ucaggacccaggugaauau

SEQ ID NO: 1572124 - RNA, 19 nt, Artificial Sequence
  Description of Artificial Sequence: Synthetic oligonucleotide
  Antisense strand to SEQ ID NO: 1572123
auauucaccuggguccuga

SEQ ID NO: 1572125 - RNA, 19 nt, Artificial Sequence
  Description of Artificial Sequence: Synthetic oligonucleotide
  Sense strand starting at position 1213 of SEQ ID NO: 1560041
guuucuuagggaugaagug

SEQ ID NO: 1572126 - RNA, 19 nt, Artificial Sequence
  Description of Artificial Sequence: Synthetic oligonucleotide
  Antisense strand to SEQ ID NO: 1572125
cacuucaucccuaagaaac

SEQ ID NO: 1572127 - RNA, 19 nt, Artificial Sequence
  Description of Artificial Sequence: Synthetic oligonucleotide
  Sense strand starting at position 1708 of SEQ ID NO: 1560041
gcucuuguugcaggagaug

SEQ ID NO: 1572128 - RNA, 19 nt, Artificial Sequence
  Description of Artificial Sequence: Synthetic oligonucleotide
  Antisense strand to SEQ ID NO: 1572127
caucuccugcaacaagagc

SEQ ID NO: 1572129 - RNA, 19 nt, Artificial Sequence
  Description of Artificial Sequence: Synthetic oligonucleotide
  Sense strand starting at position 1717 of SEQ ID NO: 1560041
gcaggagaugggugacauu

SEQ ID NO: 1572130 - RNA, 19 nt, Artificial Sequence
  Description of Artificial Sequence: Synthetic oligonucleotide
  Antisense strand to SEQ ID NO: 1572129
aaugucacccaucuccugc

SEQ ID NO: 1572131 - RNA, 19 nt, Artificial Sequence
  Description of Artificial Sequence: Synthetic oligonucleotide
  Sense strand starting at position 1893 of SEQ ID NO: 1560041
ggcacucugcaauagucau

SEQ ID NO: 1572132 - RNA, 19 nt, Artificial Sequence
  Description of Artificial Sequence: Synthetic oligonucleotide
  Antisense strand to SEQ ID NO: 1572131
augacuauugcagagugcc

SEQ ID NO: 1572133 - RNA, 19 nt, Artificial Sequence
  Description of Artificial Sequence: Synthetic oligonucleotide
  Sense strand starting at position 1899 of SEQ ID NO: 1560041
cugcaauagucauacgaag

SEQ ID NO: 1572134 - RNA, 19 nt, Artificial Sequence
  Description of Artificial Sequence: Synthetic oligonucleotide
  Antisense strand to SEQ ID NO: 1572133
cuucguaugacuauugcag

SEQ ID NO: 1572135 - RNA, 19 nt, Artificial Sequence
  Description of Artificial Sequence: Synthetic oligonucleotide
  Sense strand starting at position 1901 of SEQ ID NO: 1560041
gcaauagucauacgaagua

SEQ ID NO: 1572136 - RNA, 19 nt, Artificial Sequence
  Description of Artificial Sequence: Synthetic oligonucleotide
  Antisense strand to SEQ ID NO: 1572135
uacuucguaugacuauugc

SEQ ID NO: 1572137 - RNA, 19 nt, Artificial Sequence
  Description of Artificial Sequence: Synthetic oligonucleotide
  Sense strand starting at position 1942 of SEQ ID NO: 1560041
uagagucuggccuggaguu

SEQ ID NO: 1572138 - RNA, 19 nt, Artificial Sequence
  Description of Artificial Sequence: Synthetic oligonucleotide
  Antisense strand to SEQ ID NO: 1572137
aacuccaggccagacucua

SEQ ID NO: 1572139 - RNA, 19 nt, Artificial Sequence
  Description of Artificial Sequence: Synthetic oligonucleotide
  Sense strand starting at position 1943 of SEQ ID NO: 1560041
agagucuggccuggaguua

SEQ ID NO: 1572140 - RNA, 19 nt, Artificial Sequence
  Description of Artificial Sequence: Synthetic oligonucleotide
  Antisense strand to SEQ ID NO: 1572139
uaacuccaggccagacucu

SEQ ID NO: 1572141 - RNA, 19 nt, Artificial Sequence
  Description of Artificial Sequence: Synthetic oligonucleotide
  Sense strand starting at position 2006 of SEQ ID NO: 1560041
uaggaaacguccugaccaa

SEQ ID NO: 1572142 - RNA, 19 nt, Artificial Sequence
  Description of Artificial Sequence: Synthetic oligonucleotide
  Antisense strand to SEQ ID NO: 1572141
uuggucaggacguuuccua

SEQ ID NO: 1572143 - RNA, 19 nt, Artificial Sequence
  Description of Artificial Sequence: Synthetic oligonucleotide
  Sense strand starting at position 2053 of SEQ ID NO: 1560041
gcagcucuugcaugaggca

SEQ ID NO: 1572144 - RNA, 19 nt, Artificial Sequence
  Description of Artificial Sequence: Synthetic oligonucleotide
  Antisense strand to SEQ ID NO: 1572143
ugccucaugcaagagcugc

SEQ ID NO: 1572145 - RNA, 19 nt, Artificial Sequence
  Description of Artificial Sequence: Synthetic oligonucleotide
  Sense strand starting at position 2233 of SEQ ID NO: 1560041
guguguuacugagugccua

SEQ ID NO: 1572146 - RNA, 19 nt, Artificial Sequence
  Description of Artificial Sequence: Synthetic oligonucleotide
  Antisense strand to SEQ ID NO: 1572145
uaggcacucaguaacacac

SEQ ID NO: 1572147 - RNA, 19 nt, Artificial Sequence
  Description of Artificial Sequence: Synthetic oligonucleotide
  Sense strand starting at position 2275 of SEQ ID NO: 1560041
uguacuaugaccugaagag

SEQ ID NO: 1572148 - RNA, 19 nt, Artificial Sequence
  Description of Artificial Sequence: Synthetic oligonucleotide
  Antisense strand to SEQ ID NO: 1572147
cucuucaggucauaguaca

SEQ ID NO: 1572149 - RNA, 19 nt, Artificial Sequence
  Description of Artificial Sequence: Synthetic oligonucleotide
  Sense strand starting at position 2425 of SEQ ID NO: 1560041
ucaggugucucugugguga

SEQ ID NO: 1572150 - RNA, 19 nt, Artificial Sequence
  Description of Artificial Sequence: Synthetic oligonucleotide
  Antisense strand to SEQ ID NO: 1572149
ucaccacagagacaccuga

SEQ ID NO: 1572151 - RNA, 19 nt, Artificial Sequence
  Description of Artificial Sequence: Synthetic oligonucleotide
  Sense strand starting at position 2647 of SEQ ID NO: 1560041
agguaaacucucugagccu

SEQ ID NO: 1572152 - RNA, 19 nt, Artificial Sequence
  Description of Artificial Sequence: Synthetic oligonucleotide
  Antisense strand to SEQ ID NO: 1572151
aggcucagagaguuuaccu

SEQ ID NO: 1572153 - RNA, 19 nt, Artificial Sequence
  Description of Artificial Sequence: Synthetic oligonucleotide
  Sense strand starting at position 2711 of SEQ ID NO: 1560041
uguccauguggccaagaga

SEQ ID NO: 1572154 - RNA, 19 nt, Artificial Sequence
  Description of Artificial Sequence: Synthetic oligonucleotide
  Antisense strand to SEQ ID NO: 1572153
ucucuuggccacauggaca

SEQ ID NO: 1572155 - RNA, 19 nt, Artificial Sequence
  Description of Artificial Sequence: Synthetic oligonucleotide
  Sense strand starting at position 2755 of SEQ ID NO: 1560041
gcccauuaucggcacccaa

SEQ ID NO: 1572156 - RNA, 19 nt, Artificial Sequence
  Description of Artificial Sequence: Synthetic oligonucleotide
  Antisense strand to SEQ ID NO: 1572155
uugggugccgauaaugggc

SEQ ID NO: 1572157 - RNA, 19 nt, Artificial Sequence
  Description of Artificial Sequence: Synthetic oligonucleotide
  Sense strand starting at position 2852 of SEQ ID NO: 1560041
uucuguuaggucugccauu

SEQ ID NO: 1572158 - RNA, 19 nt, Artificial Sequence
  Description of Artificial Sequence: Synthetic oligonucleotide
  Antisense strand to SEQ ID NO: 1572157
aauggcagaccuaacagaa

SEQ ID NO: 1572159 - RNA, 19 nt, Artificial Sequence
  Description of Artificial Sequence: Synthetic oligonucleotide
  Sense strand starting at position 3210 of SEQ ID NO: 1560041
agcugugggagaugaucuu

SEQ ID NO: 1572160 - RNA, 19 nt, Artificial Sequence
  Description of Artificial Sequence: Synthetic oligonucleotide
  Antisense strand to SEQ ID NO: 1572159
aagaucaucucccacagcu

SEQ ID NO: 1572161 - RNA, 19 nt, Artificial Sequence
  Description of Artificial Sequence: Synthetic oligonucleotide
  Sense strand starting at position 3216 of SEQ ID NO: 1560041
gggagaugaucuugcugaa

SEQ ID NO: 1572162 - RNA, 19 nt, Artificial Sequence
  Description of Artificial Sequence: Synthetic oligonucleotide
  Antisense strand to SEQ ID NO: 1572161
uucagcaagaucaucuccc

SEQ ID NO: 1572163 - RNA, 19 nt, Artificial Sequence
  Description of Artificial Sequence: Synthetic oligonucleotide
  Sense strand starting at position 3234 of SEQ ID NO: 1560041
aaauucugagggugaacuu

SEQ ID NO: 1572164 - RNA, 19 nt, Artificial Sequence
  Description of Artificial Sequence: Synthetic oligonucleotide
  Antisense strand to SEQ ID NO: 1572163
aaguucacccucagaauuu

SEQ ID NO: 1572165 - RNA, 19 nt, Artificial Sequence
  Description of Artificial Sequence: Synthetic oligonucleotide
  Sense strand starting at position 3243 of SEQ ID NO: 1560041
gggugaacuugucccagga

SEQ ID NO: 1572166 - RNA, 19 nt, Artificial Sequence
  Description of Artificial Sequence: Synthetic oligonucleotide
  Antisense strand to SEQ ID NO: 1572165
uccugggacaaguucaccc

SEQ ID NO: 1572167 - RNA, 19 nt, Artificial Sequence
  Description of Artificial Sequence: Synthetic oligonucleotide
  Sense strand starting at position 3304 of SEQ ID NO: 1560041
acgaccuuugccugacuua

SEQ ID NO: 1572168 - RNA, 19 nt, Artificial Sequence
  Description of Artificial Sequence: Synthetic oligonucleotide
  Antisense strand to SEQ ID NO: 1572167
uaagucaggcaaaggucgu

SEQ ID NO: 1572169 - RNA, 19 nt, Artificial Sequence
  Description of Artificial Sequence: Synthetic oligonucleotide
  Sense strand starting at position 3305 of SEQ ID NO: 1560041
cgaccuuugccugacuuau

SEQ ID NO: 1572170 - RNA, 19 nt, Artificial Sequence
  Description of Artificial Sequence: Synthetic oligonucleotide
  Antisense strand to SEQ ID NO: 1572169
auaagucaggcaaaggucg

SEQ ID NO: 1572171 - RNA, 19 nt, Artificial Sequence
  Description of Artificial Sequence: Synthetic oligonucleotide
  Sense strand starting at position 3399 of SEQ ID NO: 1560041
aucacaauugcaugaauug

SEQ ID NO: 1572172 - RNA, 19 nt, Artificial Sequence
  Description of Artificial Sequence: Synthetic oligonucleotide
  Antisense strand to SEQ ID NO: 1572171
caauucaugcaauugugau

SEQ ID NO: 1572173 - RNA, 19 nt, Artificial Sequence
  Description of Artificial Sequence: Synthetic oligonucleotide
  Sense strand starting at position 3408 of SEQ ID NO: 1560041
gcaugaauugcacauugga

SEQ ID NO: 1572174 - RNA, 19 nt, Artificial Sequence
  Description of Artificial Sequence: Synthetic oligonucleotide
  Antisense strand to SEQ ID NO: 1572173
uccaaugugcaauucaugc

SEQ ID NO: 1572175 - RNA, 19 nt, Artificial Sequence
  Description of Artificial Sequence: Synthetic oligonucleotide
  Sense strand starting at position 35 of SEQ ID NO: 1560042
uuugaaggucucugaucca

SEQ ID NO: 1572176 - RNA, 19 nt, Artificial Sequence
  Description of Artificial Sequence: Synthetic oligonucleotide
  Antisense strand to SEQ ID NO: 1572175
uggaucagagaccuucaaa

SEQ ID NO: 1572177 - RNA, 19 nt, Artificial Sequence
  Description of Artificial Sequence: Synthetic oligonucleotide
  Sense strand starting at position 38 of SEQ ID NO: 1560042
gaaggucucugauccagau

SEQ ID NO: 1572178 - RNA, 19 nt, Artificial Sequence
  Description of Artificial Sequence: Synthetic oligonucleotide
  Antisense strand to SEQ ID NO: 1572177
aucuggaucagagaccuuc

SEQ ID NO: 1572179 - RNA, 19 nt, Artificial Sequence
  Description of Artificial Sequence: Synthetic oligonucleotide
  Sense strand starting at position 42 of SEQ ID NO: 1560042
gucucugauccagaucaug

SEQ ID NO: 1572180 - RNA, 19 nt, Artificial Sequence
  Description of Artificial Sequence: Synthetic oligonucleotide
  Antisense strand to SEQ ID NO: 1572179
caugaucuggaucagagac

SEQ ID NO: 1572181 - RNA, 19 nt, Artificial Sequence
  Description of Artificial Sequence: Synthetic oligonucleotide
  Sense strand starting at position 259 of SEQ ID NO: 1560042
ccuggaguucaggagucau

SEQ ID NO: 1572182 - RNA, 19 nt, Artificial Sequence
  Description of Artificial Sequence: Synthetic oligonucleotide
  Antisense strand to SEQ ID NO: 1572181
augacuccugaacuccagg

SEQ ID NO: 1572183 - RNA, 19 nt, Artificial Sequence
  Description of Artificial Sequence: Synthetic oligonucleotide
  Sense strand starting at position 338 of SEQ ID NO: 1560042
ggagaagucucuccauccu

SEQ ID NO: 1572184 - RNA, 19 nt, Artificial Sequence
  Description of Artificial Sequence: Synthetic oligonucleotide
  Antisense strand to SEQ ID NO: 1572183
aggauggagagacuucucc

SEQ ID NO: 1572185 - RNA, 19 nt, Artificial Sequence
  Description of Artificial Sequence: Synthetic oligonucleotide
  Sense strand starting at position 465 of SEQ ID NO: 1560042
uggagagucccuggguaca

SEQ ID NO: 1572186 - RNA, 19 nt, Artificial Sequence
  Description of Artificial Sequence: Synthetic oligonucleotide
  Antisense strand to SEQ ID NO: 1572185
uguacccagggacucucca

SEQ ID NO: 1572187 - RNA, 19 nt, Artificial Sequence
  Description of Artificial Sequence: Synthetic oligonucleotide
  Sense strand starting at position 607 of SEQ ID NO: 1560042
ggucauggguccuagaaac

SEQ ID NO: 1572188 - RNA, 19 nt, Artificial Sequence
  Description of Artificial Sequence: Synthetic oligonucleotide
  Antisense strand to SEQ ID NO: 1572187
guuucuaggacccaugacc

SEQ ID NO: 1572189 - RNA, 19 nt, Artificial Sequence
  Description of Artificial Sequence: Synthetic oligonucleotide
  Sense strand starting at position 2950 of SEQ ID NO: 1560042
acauaaugucaagguagac

SEQ ID NO: 1572190 - RNA, 19 nt, Artificial Sequence
  Description of Artificial Sequence: Synthetic oligonucleotide
  Antisense strand to SEQ ID NO: 1572189
gucuaccuugacauuaugu

SEQ ID NO: 1572191 - RNA, 19 nt, Artificial Sequence
  Description of Artificial Sequence: Synthetic oligonucleotide
  Sense strand starting at position 3693 of SEQ ID NO: 1560042
gguugagguaguuacaauu

SEQ ID NO: 1572192 - RNA, 19 nt, Artificial Sequence
  Description of Artificial Sequence: Synthetic oligonucleotide
  Antisense strand to SEQ ID NO: 1572191
aauuguaacuaccucaacc

SEQ ID NO: 1572193 - RNA, 19 nt, Artificial Sequence
  Description of Artificial Sequence: Synthetic oligonucleotide
  Sense strand starting at position 3736 of SEQ ID NO: 1560042
uuuagagucucccucuauu

SEQ ID NO: 1572194 - RNA, 19 nt, Artificial Sequence
  Description of Artificial Sequence: Synthetic oligonucleotide
  Antisense strand to SEQ ID NO: 1572193
aauagagggagacucuaaa

SEQ ID NO: 1572195 - RNA, 19 nt, Artificial Sequence
  Description of Artificial Sequence: Synthetic oligonucleotide
  Sense strand starting at position 15 of SEQ ID NO: 1560043
cagaaucugucgucacugu

SEQ ID NO: 1572196 - RNA, 19 nt, Artificial Sequence
  Description of Artificial Sequence: Synthetic oligonucleotide
  Antisense strand to SEQ ID NO: 1572195
acagugacgacagauucug

SEQ ID NO: 1572197 - RNA, 19 nt, Artificial Sequence
  Description of Artificial Sequence: Synthetic oligonucleotide
  Sense strand starting at position 19 of SEQ ID NO: 1560043
aucugucgucacuguuuaa

SEQ ID NO: 1572198 - RNA, 19 nt, Artificial Sequence
  Description of Artificial Sequence: Synthetic oligonucleotide
  Antisense strand to SEQ ID NO: 1572197
uuaaacagugacgacagau

SEQ ID NO: 1572199 - RNA, 19 nt, Artificial Sequence
  Description of Artificial Sequence: Synthetic oligonucleotide
  Sense strand starting at position 59 of SEQ ID NO: 1560043
uugguuuaggaagagucau

SEQ ID NO: 1572200 - RNA, 19 nt, Artificial Sequence
  Description of Artificial Sequence: Synthetic oligonucleotide
  Antisense strand to SEQ ID NO: 1572199
augacucuuccuaaaccaa

SEQ ID NO: 1572201 - RNA, 19 nt, Artificial Sequence
  Description of Artificial Sequence: Synthetic oligonucleotide
  Sense strand starting at position 81 of SEQ ID NO: 1560043
augaguguaaggugauaua

SEQ ID NO: 1572202 - RNA, 19 nt, Artificial Sequence
  Description of Artificial Sequence: Synthetic oligonucleotide
  Antisense strand to SEQ ID NO: 1572201
uauaucaccuuacacucau

SEQ ID NO: 1572203 - RNA, 19 nt, Artificial Sequence
  Description of Artificial Sequence: Synthetic oligonucleotide
  Sense strand starting at position 88 of SEQ ID NO: 1560043
uaaggugauauaggugaga

SEQ ID NO: 1572204 - RNA, 19 nt, Artificial Sequence
  Description of Artificial Sequence: Synthetic oligonucleotide
  Antisense strand to SEQ ID NO: 1572203
ucucaccuauaucaccuua

SEQ ID NO: 1572205 - RNA, 19 nt, Artificial Sequence
  Description of Artificial Sequence: Synthetic oligonucleotide
  Sense strand starting at position 115 of SEQ ID NO: 1560043
ugcugucugcuacagaaca

SEQ ID NO: 1572206 - RNA, 19 nt, Artificial Sequence
  Description of Artificial Sequence: Synthetic oligonucleotide
  Antisense strand to SEQ ID NO: 1572205
uguucuguagcagacagca

SEQ ID NO: 1572207 - RNA, 19 nt, Artificial Sequence
  Description of Artificial Sequence: Synthetic oligonucleotide
  Sense strand starting at position 205 of SEQ ID NO: 1560043
ccuugagaggcguaaguga

SEQ ID NO: 1572208 - RNA, 19 nt, Artificial Sequence
  Description of Artificial Sequence: Synthetic oligonucleotide
  Antisense strand to SEQ ID NO: 1572207
ucacuuacgccucucaagg

SEQ ID NO: 1572209 - RNA, 19 nt, Artificial Sequence
  Description of Artificial Sequence: Synthetic oligonucleotide
  Sense strand starting at position 210 of SEQ ID NO: 1560043
agaggcguaagugaacaua

SEQ ID NO: 1572210 - RNA, 19 nt, Artificial Sequence
  Description of Artificial Sequence: Synthetic oligonucleotide
  Antisense strand to SEQ ID NO: 1572209
uauguucacuuacgccucu

SEQ ID NO: 1572211 - RNA, 19 nt, Artificial Sequence
  Description of Artificial Sequence: Synthetic oligonucleotide
  Sense strand starting at position 229 of SEQ ID NO: 1560043
cacguauauuuguccuaga

SEQ ID NO: 1572212 - RNA, 19 nt, Artificial Sequence
  Description of Artificial Sequence: Synthetic oligonucleotide
  Antisense strand to SEQ ID NO: 1572211
ucuaggacaaauauacgug

SEQ ID NO: 1572213 - RNA, 19 nt, Artificial Sequence
  Description of Artificial Sequence: Synthetic oligonucleotide
  Sense strand starting at position 232 of SEQ ID NO: 1560043
guauauuuguccuagagaa

SEQ ID NO: 1572214 - RNA, 19 nt, Artificial Sequence
  Description of Artificial Sequence: Synthetic oligonucleotide
  Antisense strand to SEQ ID NO: 1572213
uucucuaggacaaauauac

SEQ ID NO: 1572215 - RNA, 19 nt, Artificial Sequence
  Description of Artificial Sequence: Synthetic oligonucleotide
  Sense strand starting at position 372 of SEQ ID NO: 1560043
agguuugaguaauccucuu

SEQ ID NO: 1572216 - RNA, 19 nt, Artificial Sequence
  Description of Artificial Sequence: Synthetic oligonucleotide
  Antisense strand to SEQ ID NO: 1572215
aagaggauuacucaaaccu

SEQ ID NO: 1572217 - RNA, 19 nt, Artificial Sequence
  Description of Artificial Sequence: Synthetic oligonucleotide
  Sense strand starting at position 402 of SEQ ID NO: 1560043
ucaaguaacugagacaaua

SEQ ID NO: 1572218 - RNA, 19 nt, Artificial Sequence
  Description of Artificial Sequence: Synthetic oligonucleotide
  Antisense strand to SEQ ID NO: 1572217
uauugucucaguuacuuga

SEQ ID NO: 1572219 - RNA, 19 nt, Artificial Sequence
  Description of Artificial Sequence: Synthetic oligonucleotide
  Sense strand starting at position 722 of SEQ ID NO: 1560043
guaacuugggccuaacaua

SEQ ID NO: 1572220 - RNA, 19 nt, Artificial Sequence
  Description of Artificial Sequence: Synthetic oligonucleotide
  Antisense strand to SEQ ID NO: 1572219
uauguuaggcccaaguuac

SEQ ID NO: 1572221 - RNA, 19 nt, Artificial Sequence
  Description of Artificial Sequence: Synthetic oligonucleotide
  Sense strand starting at position 2199 of SEQ ID NO: 1560043
gggucccucaggugguaau

SEQ ID NO: 1572222 - RNA, 19 nt, Artificial Sequence
  Description of Artificial Sequence: Synthetic oligonucleotide
  Antisense strand to SEQ ID NO: 1572221
auuaccaccugagggaccc

SEQ ID NO: 1572223 - RNA, 19 nt, Artificial Sequence
  Description of Artificial Sequence: Synthetic oligonucleotide
  Sense strand starting at position 2689 of SEQ ID NO: 1560043
cucgaucagucuguguauu

SEQ ID NO: 1572224 - RNA, 19 nt, Artificial Sequence
  Description of Artificial Sequence: Synthetic oligonucleotide
  Antisense strand to SEQ ID NO: 1572223
aauacacagacugaucgag

SEQ ID NO: 1572225 - RNA, 19 nt, Artificial Sequence
  Description of Artificial Sequence: Synthetic oligonucleotide
  Sense strand starting at position 2690 of SEQ ID NO: 1560043
ucgaucagucuguguauuu

SEQ ID NO: 1572226 - RNA, 19 nt, Artificial Sequence
  Description of Artificial Sequence: Synthetic oligonucleotide
  Antisense strand to SEQ ID NO: 1572225
aaauacacagacugaucga

SEQ ID NO: 1572227 - RNA, 19 nt, Artificial Sequence
  Description of Artificial Sequence: Synthetic oligonucleotide
  Sense strand starting at position 2691 of SEQ ID NO: 1560043
cgaucagucuguguauuug

SEQ ID NO: 1572228 - RNA, 19 nt, Artificial Sequence
  Description of Artificial Sequence: Synthetic oligonucleotide
  Antisense strand to SEQ ID NO: 1572227
caaauacacagacugaucg

SEQ ID NO: 1572229 - RNA, 19 nt, Artificial Sequence
  Description of Artificial Sequence: Synthetic oligonucleotide
  Sense strand starting at position 2695 of SEQ ID NO: 1560043
cagucuguguauuuguuaa

SEQ ID NO: 1572230 - RNA, 19 nt, Artificial Sequence
  Description of Artificial Sequence: Synthetic oligonucleotide
  Antisense strand to SEQ ID NO: 1572229
uuaacaaauacacagacug

SEQ ID NO: 1572231 - RNA, 19 nt, Artificial Sequence
  Description of Artificial Sequence: Synthetic oligonucleotide
  Sense strand starting at position 2697 of SEQ ID NO: 1560043
gucuguguauuuguuaaua

SEQ ID NO: 1572232 - RNA, 19 nt, Artificial Sequence
  Description of Artificial Sequence: Synthetic oligonucleotide
  Antisense strand to SEQ ID NO: 1572231
uauuaacaaauacacagac

SEQ ID NO: 1572233 - RNA, 19 nt, Artificial Sequence
  Description of Artificial Sequence: Synthetic oligonucleotide
  Sense strand starting at position 2715 of SEQ ID NO: 1560043
aggauuauguggguguuca

SEQ ID NO: 1572234 - RNA, 19 nt, Artificial Sequence
  Description of Artificial Sequence: Synthetic oligonucleotide
  Antisense strand to SEQ ID NO: 1572233
ugaacacccacauaauccu

SEQ ID NO: 1572235 - RNA, 19 nt, Artificial Sequence
  Description of Artificial Sequence: Synthetic oligonucleotide
  Sense strand starting at position 2716 of SEQ ID NO: 1560043
ggauuauguggguguucac

SEQ ID NO: 1572236 - RNA, 19 nt, Artificial Sequence
  Description of Artificial Sequence: Synthetic oligonucleotide
  Antisense strand to SEQ ID NO: 1572235
gugaacacccacauaaucc

SEQ ID NO: 1572237 - RNA, 19 nt, Artificial Sequence
  Description of Artificial Sequence: Synthetic oligonucleotide
  Sense strand starting at position 2742 of SEQ ID NO: 1560043
cuuugauaaccuggcuugu

SEQ ID NO: 1572238 - RNA, 19 nt, Artificial Sequence
  Description of Artificial Sequence: Synthetic oligonucleotide
  Antisense strand to SEQ ID NO: 1572237
acaagccagguuaucaaag

SEQ ID NO: 1572239 - RNA, 19 nt, Artificial Sequence
  Description of Artificial Sequence: Synthetic oligonucleotide
  Sense strand starting at position 2793 of SEQ ID NO: 1560043
ggaguuggaugaagcguau

SEQ ID NO: 1572240 - RNA, 19 nt, Artificial Sequence
  Description of Artificial Sequence: Synthetic oligonucleotide
  Antisense strand to SEQ ID NO: 1572239
auacgcuucauccaacucc

SEQ ID NO: 1572241 - RNA, 19 nt, Artificial Sequence
  Description of Artificial Sequence: Synthetic oligonucleotide
  Sense strand starting at position 2820 of SEQ ID NO: 1560043
ccuacaguuucugcagauu

SEQ ID NO: 1572242 - RNA, 19 nt, Artificial Sequence
  Description of Artificial Sequence: Synthetic oligonucleotide
  Antisense strand to SEQ ID NO: 1572241
aaucugcagaaacuguagg

SEQ ID NO: 1572243 - RNA, 19 nt, Artificial Sequence
  Description of Artificial Sequence: Synthetic oligonucleotide
  Sense strand starting at position 2912 of SEQ ID NO: 1560043
aggaguaagugagggaauu

SEQ ID NO: 1572244 - RNA, 19 nt, Artificial Sequence
  Description of Artificial Sequence: Synthetic oligonucleotide
  Antisense strand to SEQ ID NO: 1572243
aauucccucacuuacuccu

SEQ ID NO: 1572245 - RNA, 19 nt, Artificial Sequence
  Description of Artificial Sequence: Synthetic oligonucleotide
  Sense strand starting at position 3015 of SEQ ID NO: 1560043
ggaagucauucuuugguua

SEQ ID NO: 1572246 - RNA, 19 nt, Artificial Sequence
  Description of Artificial Sequence: Synthetic oligonucleotide
  Antisense strand to SEQ ID NO: 1572245
uaaccaaagaaugacuucc

SEQ ID NO: 1572247 - RNA, 19 nt, Artificial Sequence
  Description of Artificial Sequence: Synthetic oligonucleotide
  Sense strand starting at position 3016 of SEQ ID NO: 1560043
gaagucauucuuugguuac

SEQ ID NO: 1572248 - RNA, 19 nt, Artificial Sequence
  Description of Artificial Sequence: Synthetic oligonucleotide
  Antisense strand to SEQ ID NO: 1572247
guaaccaaagaaugacuuc

SEQ ID NO: 1572249 - RNA, 19 nt, Artificial Sequence
  Description of Artificial Sequence: Synthetic oligonucleotide
  Sense strand starting at position 3018 of SEQ ID NO: 1560043
agucauucuuugguuacaa

SEQ ID NO: 1572250 - RNA, 19 nt, Artificial Sequence
  Description of Artificial Sequence: Synthetic oligonucleotide
  Antisense strand to SEQ ID NO: 1572249
uuguaaccaaagaaugacu

SEQ ID NO: 1572251 - RNA, 19 nt, Artificial Sequence
  Description of Artificial Sequence: Synthetic oligonucleotide
  Sense strand starting at position 3019 of SEQ ID NO: 1560043
gucauucuuugguuacaaa

SEQ ID NO: 1572252 - RNA, 19 nt, Artificial Sequence
  Description of Artificial Sequence: Synthetic oligonucleotide
  Antisense strand to SEQ ID NO: 1572251
uuuguaaccaaagaaugac

SEQ ID NO: 1572253 - RNA, 19 nt, Artificial Sequence
  Description of Artificial Sequence: Synthetic oligonucleotide
  Sense strand starting at position 3029 of SEQ ID NO: 1560043
gguuacaaauggcuuaaca

SEQ ID NO: 1572254 - RNA, 19 nt, Artificial Sequence
  Description of Artificial Sequence: Synthetic oligonucleotide
  Antisense strand to SEQ ID NO: 1572253
uguuaagccauuuguaacc

SEQ ID NO: 1572255 - RNA, 19 nt, Artificial Sequence
  Description of Artificial Sequence: Synthetic oligonucleotide
  Sense strand starting at position 3098 of SEQ ID NO: 1560043
uguuucuaguccuucccaa

SEQ ID NO: 1572256 - RNA, 19 nt, Artificial Sequence
  Description of Artificial Sequence: Synthetic oligonucleotide
  Antisense strand to SEQ ID NO: 1572255
uugggaaggacuagaaaca

SEQ ID NO: 1572257 - RNA, 19 nt, Artificial Sequence
  Description of Artificial Sequence: Synthetic oligonucleotide
  Sense strand starting at position 3146 of SEQ ID NO: 1560043
cgucauagaugacuccuaa

SEQ ID NO: 1572258 - RNA, 19 nt, Artificial Sequence
  Description of Artificial Sequence: Synthetic oligonucleotide
  Antisense strand to SEQ ID NO: 1572257
uuaggagucaucuaugacg

SEQ ID NO: 1572259 - RNA, 19 nt, Artificial Sequence
  Description of Artificial Sequence: Synthetic oligonucleotide
  Sense strand starting at position 3150 of SEQ ID NO: 1560043
auagaugacuccuaagaug

SEQ ID NO: 1572260 - RNA, 19 nt, Artificial Sequence
  Description of Artificial Sequence: Synthetic oligonucleotide
  Antisense strand to SEQ ID NO: 1572259
caucuuaggagucaucuau

SEQ ID NO: 1572261 - RNA, 19 nt, Artificial Sequence
  Description of Artificial Sequence: Synthetic oligonucleotide
  Sense strand starting at position 3155 of SEQ ID NO: 1560043
ugacuccuaagauggguua

SEQ ID NO: 1572262 - RNA, 19 nt, Artificial Sequence
  Description of Artificial Sequence: Synthetic oligonucleotide
  Antisense strand to SEQ ID NO: 1572261
uaacccaucuuaggaguca

SEQ ID NO: 1572263 - RNA, 19 nt, Artificial Sequence
  Description of Artificial Sequence: Synthetic oligonucleotide
  Sense strand starting at position 3158 of SEQ ID NO: 1560043
cuccuaagauggguuauaa

SEQ ID NO: 1572264 - RNA, 19 nt, Artificial Sequence
  Description of Artificial Sequence: Synthetic oligonucleotide
  Antisense strand to SEQ ID NO: 1572263
uuauaacccaucuuaggag

SEQ ID NO: 1572265 - RNA, 19 nt, Artificial Sequence
  Description of Artificial Sequence: Synthetic oligonucleotide
  Sense strand starting at position 3261 of SEQ ID NO: 1560043
ggcugacuccucugccaau

SEQ ID NO: 1572266 - RNA, 19 nt, Artificial Sequence
  Description of Artificial Sequence: Synthetic oligonucleotide
  Antisense strand to SEQ ID NO: 1572265
auuggcagaggagucagcc

SEQ ID NO: 1572267 - RNA, 19 nt, Artificial Sequence
  Description of Artificial Sequence: Synthetic oligonucleotide
  Sense strand starting at position 3311 of SEQ ID NO: 1560043
guggcagccuguucuaaau

SEQ ID NO: 1572268 - RNA, 19 nt, Artificial Sequence
  Description of Artificial Sequence: Synthetic oligonucleotide
  Antisense strand to SEQ ID NO: 1572267
auuuagaacaggcugccac

SEQ ID NO: 1572269 - RNA, 19 nt, Artificial Sequence
  Description of Artificial Sequence: Synthetic oligonucleotide
  Sense strand starting at position 3331 of SEQ ID NO: 1560043
gggauaccugcuugcguua

SEQ ID NO: 1572270 - RNA, 19 nt, Artificial Sequence
  Description of Artificial Sequence: Synthetic oligonucleotide
  Antisense strand to SEQ ID NO: 1572269
uaacgcaagcagguauccc

SEQ ID NO: 1572271 - RNA, 19 nt, Artificial Sequence
  Description of Artificial Sequence: Synthetic oligonucleotide
  Sense strand starting at position 3336 of SEQ ID NO: 1560043
accugcuugcguuaggaaa

SEQ ID NO: 1572272 - RNA, 19 nt, Artificial Sequence
  Description of Artificial Sequence: Synthetic oligonucleotide
  Antisense strand to SEQ ID NO: 1572271
uuuccuaacgcaagcaggu

SEQ ID NO: 1572273 - RNA, 19 nt, Artificial Sequence
  Description of Artificial Sequence: Synthetic oligonucleotide
  Sense strand starting at position 3423 of SEQ ID NO: 1560043
gcuugaccucaggaguucu

SEQ ID NO: 1572274 - RNA, 19 nt, Artificial Sequence
  Description of Artificial Sequence: Synthetic oligonucleotide
  Antisense strand to SEQ ID NO: 1572273
agaacuccugaggucaagc

SEQ ID NO: 1572275 - RNA, 19 nt, Artificial Sequence
  Description of Artificial Sequence: Synthetic oligonucleotide
  Sense strand starting at position 118 of SEQ ID NO: 1560044
ggcugccuuugucuguaaa

SEQ ID NO: 1572276 - RNA, 19 nt, Artificial Sequence
  Description of Artificial Sequence: Synthetic oligonucleotide
  Antisense strand to SEQ ID NO: 1572275
uuuacagacaaaggcagcc

SEQ ID NO: 1572277 - RNA, 19 nt, Artificial Sequence
  Description of Artificial Sequence: Synthetic oligonucleotide
  Sense strand starting at position 120 of SEQ ID NO: 1560044
cugccuuugucuguaaaug

SEQ ID NO: 1572278 - RNA, 19 nt, Artificial Sequence
  Description of Artificial Sequence: Synthetic oligonucleotide
  Antisense strand to SEQ ID NO: 1572277
cauuuacagacaaaggcag

SEQ ID NO: 1572279 - RNA, 19 nt, Artificial Sequence
  Description of Artificial Sequence: Synthetic oligonucleotide
  Sense strand starting at position 121 of SEQ ID NO: 1560044
ugccuuugucuguaaauga

SEQ ID NO: 1572280 - RNA, 19 nt, Artificial Sequence
  Description of Artificial Sequence: Synthetic oligonucleotide
  Antisense strand to SEQ ID NO: 1572279
ucauuuacagacaaaggca

SEQ ID NO: 1572281 - RNA, 19 nt, Artificial Sequence
  Description of Artificial Sequence: Synthetic oligonucleotide
  Sense strand starting at position 128 of SEQ ID NO: 1560044
gucuguaaaugacagggaa

SEQ ID NO: 1572282 - RNA, 19 nt, Artificial Sequence
  Description of Artificial Sequence: Synthetic oligonucleotide
  Antisense strand to SEQ ID NO: 1572281
uucccugucauuuacagac

SEQ ID NO: 1572283 - RNA, 19 nt, Artificial Sequence
  Description of Artificial Sequence: Synthetic oligonucleotide
  Sense strand starting at position 130 of SEQ ID NO: 1560044
cuguaaaugacagggaagu

SEQ ID NO: 1572284 - RNA, 19 nt, Artificial Sequence
  Description of Artificial Sequence: Synthetic oligonucleotide
  Antisense strand to SEQ ID NO: 1572283
acuucccugucauuuacag

SEQ ID NO: 1572285 - RNA, 19 nt, Artificial Sequence
  Description of Artificial Sequence: Synthetic oligonucleotide
  Sense strand starting at position 384 of SEQ ID NO: 1560044
gcggccuagcuuucugagu

SEQ ID NO: 1572286 - RNA, 19 nt, Artificial Sequence
  Description of Artificial Sequence: Synthetic oligonucleotide
  Antisense strand to SEQ ID NO: 1572285
acucagaaagcuaggccgc

SEQ ID NO: 1572287 - RNA, 19 nt, Artificial Sequence
  Description of Artificial Sequence: Synthetic oligonucleotide
  Sense strand starting at position 389 of SEQ ID NO: 1560044
cuagcuuucugaguuugga

SEQ ID NO: 1572288 - RNA, 19 nt, Artificial Sequence
  Description of Artificial Sequence: Synthetic oligonucleotide
  Antisense strand to SEQ ID NO: 1572287
uccaaacucagaaagcuag

SEQ ID NO: 1572289 - RNA, 19 nt, Artificial Sequence
  Description of Artificial Sequence: Synthetic oligonucleotide
  Sense strand starting at position 399 of SEQ ID NO: 1560044
gaguuuggaccagauugua

SEQ ID NO: 1572290 - RNA, 19 nt, Artificial Sequence
  Description of Artificial Sequence: Synthetic oligonucleotide
  Antisense strand to SEQ ID NO: 1572289
uacaaucugguccaaacuc

SEQ ID NO: 1572291 - RNA, 19 nt, Artificial Sequence
  Description of Artificial Sequence: Synthetic oligonucleotide
  Sense strand starting at position 402 of SEQ ID NO: 1560044
uuuggaccagauuguaaga

SEQ ID NO: 1572292 - RNA, 19 nt, Artificial Sequence
  Description of Artificial Sequence: Synthetic oligonucleotide
  Antisense strand to SEQ ID NO: 1572291
ucuuacaaucugguccaaa

SEQ ID NO: 1572293 - RNA, 19 nt, Artificial Sequence
  Description of Artificial Sequence: Synthetic oligonucleotide
  Sense strand starting at position 407 of SEQ ID NO: 1560044
accagauuguaagagauaa

SEQ ID NO: 1572294 - RNA, 19 nt, Artificial Sequence
  Description of Artificial Sequence: Synthetic oligonucleotide
  Antisense strand to SEQ ID NO: 1572293
uuaucucuuacaaucuggu

SEQ ID NO: 1572295 - RNA, 19 nt, Artificial Sequence
  Description of Artificial Sequence: Synthetic oligonucleotide
  Sense strand starting at position 440 of SEQ ID NO: 1560044
ucagauagcuaugaagaga

SEQ ID NO: 1572296 - RNA, 19 nt, Artificial Sequence
  Description of Artificial Sequence: Synthetic oligonucleotide
  Antisense strand to SEQ ID NO: 1572295
ucucuucauagcuaucuga

SEQ ID NO: 1572297 - RNA, 19 nt, Artificial Sequence
  Description of Artificial Sequence: Synthetic oligonucleotide
  Sense strand starting at position 456 of SEQ ID NO: 1560044
agagcuaucugaccuccaa

SEQ ID NO: 1572298 - RNA, 19 nt, Artificial Sequence
  Description of Artificial Sequence: Synthetic oligonucleotide
  Antisense strand to SEQ ID NO: 1572297
uuggaggucagauagcucu

SEQ ID NO: 1572299 - RNA, 19 nt, Artificial Sequence
  Description of Artificial Sequence: Synthetic oligonucleotide
  Sense strand starting at position 560 of SEQ ID NO: 1560044
gguggaucccaccagcaaa

SEQ ID NO: 1572300 - RNA, 19 nt, Artificial Sequence
  Description of Artificial Sequence: Synthetic oligonucleotide
  Antisense strand to SEQ ID NO: 1572299
uuugcuggugggauccacc

SEQ ID NO: 1572301 - RNA, 19 nt, Artificial Sequence
  Description of Artificial Sequence: Synthetic oligonucleotide
  Sense strand starting at position 583 of SEQ ID NO: 1560044
uuuggauuagcucauaguu

SEQ ID NO: 1572302 - RNA, 19 nt, Artificial Sequence
  Description of Artificial Sequence: Synthetic oligonucleotide
  Antisense strand to SEQ ID NO: 1572301
aacuaugagcuaauccaaa

SEQ ID NO: 1572303 - RNA, 19 nt, Artificial Sequence
  Description of Artificial Sequence: Synthetic oligonucleotide
  Sense strand starting at position 713 of SEQ ID NO: 1560044
cugccauucuguguagcaa

SEQ ID NO: 1572304 - RNA, 19 nt, Artificial Sequence
  Description of Artificial Sequence: Synthetic oligonucleotide
  Antisense strand to SEQ ID NO: 1572303
uugcuacacagaauggcag

SEQ ID NO: 1572305 - RNA, 19 nt, Artificial Sequence
  Description of Artificial Sequence: Synthetic oligonucleotide
  Sense strand starting at position 714 of SEQ ID NO: 1560044
ugccauucuguguagcaau

SEQ ID NO: 1572306 - RNA, 19 nt, Artificial Sequence
  Description of Artificial Sequence: Synthetic oligonucleotide
  Antisense strand to SEQ ID NO: 1572305
auugcuacacagaauggca

SEQ ID NO: 1572307 - RNA, 19 nt, Artificial Sequence
  Description of Artificial Sequence: Synthetic oligonucleotide
  Sense strand starting at position 1110 of SEQ ID NO: 1560044
gugcuauuccaagauggug

SEQ ID NO: 1572308 - RNA, 19 nt, Artificial Sequence
  Description of Artificial Sequence: Synthetic oligonucleotide
  Antisense strand to SEQ ID NO: 1572307
caccaucuuggaauagcac

SEQ ID NO: 1572309 - RNA, 19 nt, Artificial Sequence
  Description of Artificial Sequence: Synthetic oligonucleotide
  Sense strand starting at position 1112 of SEQ ID NO: 1560044
gcuauuccaagauggugaa

SEQ ID NO: 1572310 - RNA, 19 nt, Artificial Sequence
  Description of Artificial Sequence: Synthetic oligonucleotide
  Antisense strand to SEQ ID NO: 1572309
uucaccaucuuggaauagc

SEQ ID NO: 1572311 - RNA, 19 nt, Artificial Sequence
  Description of Artificial Sequence: Synthetic oligonucleotide
  Sense strand starting at position 1234 of SEQ ID NO: 1560044
ugagauuagccuggccgau

SEQ ID NO: 1572312 - RNA, 19 nt, Artificial Sequence
  Description of Artificial Sequence: Synthetic oligonucleotide
  Antisense strand to SEQ ID NO: 1572311
aucggccaggcuaaucuca

SEQ ID NO: 1572313 - RNA, 19 nt, Artificial Sequence
  Description of Artificial Sequence: Synthetic oligonucleotide
  Sense strand starting at position 1843 of SEQ ID NO: 1560044
cugcuuacuugugugacuu

SEQ ID NO: 1572314 - RNA, 19 nt, Artificial Sequence
  Description of Artificial Sequence: Synthetic oligonucleotide
  Antisense strand to SEQ ID NO: 1572313
aagucacacaaguaagcag

SEQ ID NO: 1572315 - RNA, 19 nt, Artificial Sequence
  Description of Artificial Sequence: Synthetic oligonucleotide
  Sense strand starting at position 1844 of SEQ ID NO: 1560044
ugcuuacuugugugacuuc

SEQ ID NO: 1572316 - RNA, 19 nt, Artificial Sequence
  Description of Artificial Sequence: Synthetic oligonucleotide
  Antisense strand to SEQ ID NO: 1572315
gaagucacacaaguaagca

SEQ ID NO: 1572317 - RNA, 19 nt, Artificial Sequence
  Description of Artificial Sequence: Synthetic oligonucleotide
  Sense strand starting at position 2411 of SEQ ID NO: 1560044
ggagaagaguccugggaac

SEQ ID NO: 1572318 - RNA, 19 nt, Artificial Sequence
  Description of Artificial Sequence: Synthetic oligonucleotide
  Antisense strand to SEQ ID NO: 1572317
guucccaggacucuucucc

SEQ ID NO: 1572319 - RNA, 19 nt, Artificial Sequence
  Description of Artificial Sequence: Synthetic oligonucleotide
  Sense strand starting at position 2618 of SEQ ID NO: 1560044
aagggugcugcgucaguau

SEQ ID NO: 1572320 - RNA, 19 nt, Artificial Sequence
  Description of Artificial Sequence: Synthetic oligonucleotide
  Antisense strand to SEQ ID NO: 1572319
auacugacgcagcacccuu

SEQ ID NO: 1572321 - RNA, 19 nt, Artificial Sequence
  Description of Artificial Sequence: Synthetic oligonucleotide
  Sense strand starting at position 2620 of SEQ ID NO: 1560044
gggugcugcgucaguauuu

SEQ ID NO: 1572322 - RNA, 19 nt, Artificial Sequence
  Description of Artificial Sequence: Synthetic oligonucleotide
  Antisense strand to SEQ ID NO: 1572321
aaauacugacgcagcaccc

SEQ ID NO: 1572323 - RNA, 19 nt, Artificial Sequence
  Description of Artificial Sequence: Synthetic oligonucleotide
  Sense strand starting at position 2626 of SEQ ID NO: 1560044
ugcgucaguauuuggugaa

SEQ ID NO: 1572324 - RNA, 19 nt, Artificial Sequence
  Description of Artificial Sequence: Synthetic oligonucleotide
  Antisense strand to SEQ ID NO: 1572323
uucaccaaauacugacgca

SEQ ID NO: 1572325 - RNA, 19 nt, Artificial Sequence
  Description of Artificial Sequence: Synthetic oligonucleotide
  Sense strand starting at position 2656 of SEQ ID NO: 1560044
gagccagauuuccucuguu

SEQ ID NO: 1572326 - RNA, 19 nt, Artificial Sequence
  Description of Artificial Sequence: Synthetic oligonucleotide
  Antisense strand to SEQ ID NO: 1572325
aacagaggaaaucuggcuc

SEQ ID NO: 1572327 - RNA, 19 nt, Artificial Sequence
  Description of Artificial Sequence: Synthetic oligonucleotide
  Sense strand starting at position 2861 of SEQ ID NO: 1560044
gagucauaccugugaccua

SEQ ID NO: 1572328 - RNA, 19 nt, Artificial Sequence
  Description of Artificial Sequence: Synthetic oligonucleotide
  Antisense strand to SEQ ID NO: 1572327
uaggucacagguaugacuc

SEQ ID NO: 1572329 - RNA, 19 nt, Artificial Sequence
  Description of Artificial Sequence: Synthetic oligonucleotide
  Sense strand starting at position 2868 of SEQ ID NO: 1560044
accugugaccuacagcauu

SEQ ID NO: 1572330 - RNA, 19 nt, Artificial Sequence
  Description of Artificial Sequence: Synthetic oligonucleotide
  Antisense strand to SEQ ID NO: 1572329
aaugcuguaggucacaggu

SEQ ID NO: 1572331 - RNA, 19 nt, Artificial Sequence
  Description of Artificial Sequence: Synthetic oligonucleotide
  Sense strand starting at position 2981 of SEQ ID NO: 1560044
gugagaccgucucuuaaag

SEQ ID NO: 1572332 - RNA, 19 nt, Artificial Sequence
  Description of Artificial Sequence: Synthetic oligonucleotide
  Antisense strand to SEQ ID NO: 1572331
cuuuaagagacggucucac

SEQ ID NO: 1572333 - RNA, 19 nt, Artificial Sequence
  Description of Artificial Sequence: Synthetic oligonucleotide
  Sense strand starting at position 3109 of SEQ ID NO: 1560044
ugcagaacugccugggaau

SEQ ID NO: 1572334 - RNA, 19 nt, Artificial Sequence
  Description of Artificial Sequence: Synthetic oligonucleotide
  Antisense strand to SEQ ID NO: 1572333
auucccaggcaguucugca

SEQ ID NO: 1572335 - RNA, 19 nt, Artificial Sequence
  Description of Artificial Sequence: Synthetic oligonucleotide
  Sense strand starting at position 3110 of SEQ ID NO: 1560044
gcagaacugccugggaaua

SEQ ID NO: 1572336 - RNA, 19 nt, Artificial Sequence
  Description of Artificial Sequence: Synthetic oligonucleotide
  Antisense strand to SEQ ID NO: 1572335
uauucccaggcaguucugc

SEQ ID NO: 1572337 - RNA, 19 nt, Artificial Sequence
  Description of Artificial Sequence: Synthetic oligonucleotide
  Sense strand starting at position 3112 of SEQ ID NO: 1560044
agaacugccugggaauacu

SEQ ID NO: 1572338 - RNA, 19 nt, Artificial Sequence
  Description of Artificial Sequence: Synthetic oligonucleotide
  Antisense strand to SEQ ID NO: 1572337
aguauucccaggcaguucu

SEQ ID NO: 1572339 - RNA, 19 nt, Artificial Sequence
  Description of Artificial Sequence: Synthetic oligonucleotide
  Sense strand starting at position 3121 of SEQ ID NO: 1560044
ugggaauacuacuuuauug

SEQ ID NO: 1572340 - RNA, 19 nt, Artificial Sequence
  Description of Artificial Sequence: Synthetic oligonucleotide
  Antisense strand to SEQ ID NO: 1572339
caauaaaguaguauuccca

SEQ ID NO: 1572341 - RNA, 19 nt, Artificial Sequence
  Description of Artificial Sequence: Synthetic oligonucleotide
  Sense strand starting at position 3133 of SEQ ID NO: 1560044
uuuauugaggccuguggaa

SEQ ID NO: 1572342 - RNA, 19 nt, Artificial Sequence
  Description of Artificial Sequence: Synthetic oligonucleotide
  Antisense strand to SEQ ID NO: 1572341
uuccacaggccucaauaaa

SEQ ID NO: 1572343 - RNA, 19 nt, Artificial Sequence
  Description of Artificial Sequence: Synthetic oligonucleotide
  Sense strand starting at position 3135 of SEQ ID NO: 1560044
uauugaggccuguggaaag

SEQ ID NO: 1572344 - RNA, 19 nt, Artificial Sequence
  Description of Artificial Sequence: Synthetic oligonucleotide
  Antisense strand to SEQ ID NO: 1572343
cuuuccacaggccucaaua

SEQ ID NO: 1572345 - RNA, 19 nt, Artificial Sequence
  Description of Artificial Sequence: Synthetic oligonucleotide
  Sense strand starting at position 3146 of SEQ ID NO: 1560044
guggaaagcugucccuacu

SEQ ID NO: 1572346 - RNA, 19 nt, Artificial Sequence
  Description of Artificial Sequence: Synthetic oligonucleotide
  Antisense strand to SEQ ID NO: 1572345
aguagggacagcuuuccac

SEQ ID NO: 1572347 - RNA, 19 nt, Artificial Sequence
  Description of Artificial Sequence: Synthetic oligonucleotide
  Sense strand starting at position 3265 of SEQ ID NO: 1560044
caugguugucacugcuaua

SEQ ID NO: 1572348 - RNA, 19 nt, Artificial Sequence
  Description of Artificial Sequence: Synthetic oligonucleotide
  Antisense strand to SEQ ID NO: 1572347
uauagcagugacaaccaug

SEQ ID NO: 1572349 - RNA, 19 nt, Artificial Sequence
  Description of Artificial Sequence: Synthetic oligonucleotide
  Sense strand starting at position 3501 of SEQ ID NO: 1560044
aggccuuggcugggauaaa

SEQ ID NO: 1572350 - RNA, 19 nt, Artificial Sequence
  Description of Artificial Sequence: Synthetic oligonucleotide
  Antisense strand to SEQ ID NO: 1572349
uuuaucccagccaaggccu

SEQ ID NO: 1572351 - RNA, 19 nt, Artificial Sequence
  Description of Artificial Sequence: Synthetic oligonucleotide
  Sense strand starting at position 3552 of SEQ ID NO: 1560044
gcuugaguuugggugacuu

SEQ ID NO: 1572352 - RNA, 19 nt, Artificial Sequence
  Description of Artificial Sequence: Synthetic oligonucleotide
  Antisense strand to SEQ ID NO: 1572351
aagucacccaaacucaagc

SEQ ID NO: 1572353 - RNA, 19 nt, Artificial Sequence
  Description of Artificial Sequence: Synthetic oligonucleotide
  Sense strand starting at position 3737 of SEQ ID NO: 1560044
gaaagaugcugggagugaa

SEQ ID NO: 1572354 - RNA, 19 nt, Artificial Sequence
  Description of Artificial Sequence: Synthetic oligonucleotide
  Antisense strand to SEQ ID NO: 1572353
uucacucccagcaucuuuc

SEQ ID NO: 1572355 - RNA, 19 nt, Artificial Sequence
  Description of Artificial Sequence: Synthetic oligonucleotide
  Sense strand starting at position 71 of SEQ ID NO: 1560045
gguggaucccaccagcaaa

SEQ ID NO: 1572356 - RNA, 19 nt, Artificial Sequence
  Description of Artificial Sequence: Synthetic oligonucleotide
  Antisense strand to SEQ ID NO: 1572355
uuugcuggugggauccacc

SEQ ID NO: 1572357 - RNA, 19 nt, Artificial Sequence
  Description of Artificial Sequence: Synthetic oligonucleotide
  Sense strand starting at position 94 of SEQ ID NO: 1560045
uuuggauuagcucauaguu

SEQ ID NO: 1572358 - RNA, 19 nt, Artificial Sequence
  Description of Artificial Sequence: Synthetic oligonucleotide
  Antisense strand to SEQ ID NO: 1572357
aacuaugagcuaauccaaa

SEQ ID NO: 1572359 - RNA, 19 nt, Artificial Sequence
  Description of Artificial Sequence: Synthetic oligonucleotide
  Sense strand starting at position 224 of SEQ ID NO: 1560045
cugccauucuguguagcaa

SEQ ID NO: 1572360 - RNA, 19 nt, Artificial Sequence
  Description of Artificial Sequence: Synthetic oligonucleotide
  Antisense strand to SEQ ID NO: 1572359
uugcuacacagaauggcag

SEQ ID NO: 1572361 - RNA, 19 nt, Artificial Sequence
  Description of Artificial Sequence: Synthetic oligonucleotide
  Sense strand starting at position 225 of SEQ ID NO: 1560045
ugccauucuguguagcaau

SEQ ID NO: 1572362 - RNA, 19 nt, Artificial Sequence
  Description of Artificial Sequence: Synthetic oligonucleotide
  Antisense strand to SEQ ID NO: 1572361
auugcuacacagaauggca

SEQ ID NO: 1572363 - RNA, 19 nt, Artificial Sequence
  Description of Artificial Sequence: Synthetic oligonucleotide
  Sense strand starting at position 621 of SEQ ID NO: 1560045
gugcuauuccaagauggug

SEQ ID NO: 1572364 - RNA, 19 nt, Artificial Sequence
  Description of Artificial Sequence: Synthetic oligonucleotide
  Antisense strand to SEQ ID NO: 1572363
caccaucuuggaauagcac

SEQ ID NO: 1572365 - RNA, 19 nt, Artificial Sequence
  Description of Artificial Sequence: Synthetic oligonucleotide
  Sense strand starting at position 623 of SEQ ID NO: 1560045
gcuauuccaagauggugaa

SEQ ID NO: 1572366 - RNA, 19 nt, Artificial Sequence
  Description of Artificial Sequence: Synthetic oligonucleotide
  Antisense strand to SEQ ID NO: 1572365
uucaccaucuuggaauagc

SEQ ID NO: 1572367 - RNA, 19 nt, Artificial Sequence
  Description of Artificial Sequence: Synthetic oligonucleotide
  Sense strand starting at position 745 of SEQ ID NO: 1560045
ugagauuagccuggccgau

SEQ ID NO: 1572368 - RNA, 19 nt, Artificial Sequence
  Description of Artificial Sequence: Synthetic oligonucleotide
  Antisense strand to SEQ ID NO: 1572367
aucggccaggcuaaucuca

SEQ ID NO: 1572369 - RNA, 19 nt, Artificial Sequence
  Description of Artificial Sequence: Synthetic oligonucleotide
  Sense strand starting at position 1354 of SEQ ID NO: 1560045
cugcuuacuugugugacuu

SEQ ID NO: 1572370 - RNA, 19 nt, Artificial Sequence
  Description of Artificial Sequence: Synthetic oligonucleotide
  Antisense strand to SEQ ID NO: 1572369
aagucacacaaguaagcag

SEQ ID NO: 1572371 - RNA, 19 nt, Artificial Sequence
  Description of Artificial Sequence: Synthetic oligonucleotide
  Sense strand starting at position 1355 of SEQ ID NO: 1560045
ugcuuacuugugugacuuc

SEQ ID NO: 1572372 - RNA, 19 nt, Artificial Sequence
  Description of Artificial Sequence: Synthetic oligonucleotide
  Antisense strand to SEQ ID NO: 1572371
gaagucacacaaguaagca

SEQ ID NO: 1572373 - RNA, 19 nt, Artificial Sequence
  Description of Artificial Sequence: Synthetic oligonucleotide
  Sense strand starting at position 1391 of SEQ ID NO: 1560045
guuucuccauagggacaau

SEQ ID NO: 1572374 - RNA, 19 nt, Artificial Sequence
  Description of Artificial Sequence: Synthetic oligonucleotide
  Antisense strand to SEQ ID NO: 1572373
auugucccuauggagaaac

SEQ ID NO: 1572375 - RNA, 19 nt, Artificial Sequence
  Description of Artificial Sequence: Synthetic oligonucleotide
  Sense strand starting at position 1922 of SEQ ID NO: 1560045
ggagaagaguccugggaac

SEQ ID NO: 1572376 - RNA, 19 nt, Artificial Sequence
  Description of Artificial Sequence: Synthetic oligonucleotide
  Antisense strand to SEQ ID NO: 1572375
guucccaggacucuucucc

SEQ ID NO: 1572377 - RNA, 19 nt, Artificial Sequence
  Description of Artificial Sequence: Synthetic oligonucleotide
  Sense strand starting at position 2129 of SEQ ID NO: 1560045
aagggugcugcgucaguau

SEQ ID NO: 1572378 - RNA, 19 nt, Artificial Sequence
  Description of Artificial Sequence: Synthetic oligonucleotide
  Antisense strand to SEQ ID NO: 1572377
auacugacgcagcacccuu

SEQ ID NO: 1572379 - RNA, 19 nt, Artificial Sequence
  Description of Artificial Sequence: Synthetic oligonucleotide
  Sense strand starting at position 2131 of SEQ ID NO: 1560045
gggugcugcgucaguauuu

SEQ ID NO: 1572380 - RNA, 19 nt, Artificial Sequence
  Description of Artificial Sequence: Synthetic oligonucleotide
  Antisense strand to SEQ ID NO: 1572379
aaauacugacgcagcaccc

SEQ ID NO: 1572381 - RNA, 19 nt, Artificial Sequence
  Description of Artificial Sequence: Synthetic oligonucleotide
  Sense strand starting at position 2137 of SEQ ID NO: 1560045
ugcgucaguauuuggugaa

SEQ ID NO: 1572382 - RNA, 19 nt, Artificial Sequence
  Description of Artificial Sequence: Synthetic oligonucleotide
  Antisense strand to SEQ ID NO: 1572381
uucaccaaauacugacgca

SEQ ID NO: 1572383 - RNA, 19 nt, Artificial Sequence
  Description of Artificial Sequence: Synthetic oligonucleotide
  Sense strand starting at position 2140 of SEQ ID NO: 1560045
gucaguauuuggugaaugu

SEQ ID NO: 1572384 - RNA, 19 nt, Artificial Sequence
  Description of Artificial Sequence: Synthetic oligonucleotide
  Antisense strand to SEQ ID NO: 1572383
acauucaccaaauacugac

SEQ ID NO: 1572385 - RNA, 19 nt, Artificial Sequence
  Description of Artificial Sequence: Synthetic oligonucleotide
  Sense strand starting at position 2167 of SEQ ID NO: 1560045
gagccagauuuccucuguu

SEQ ID NO: 1572386 - RNA, 19 nt, Artificial Sequence
  Description of Artificial Sequence: Synthetic oligonucleotide
  Antisense strand to SEQ ID NO: 1572385
aacagaggaaaucuggcuc

SEQ ID NO: 1572387 - RNA, 19 nt, Artificial Sequence
  Description of Artificial Sequence: Synthetic oligonucleotide
  Sense strand starting at position 2372 of SEQ ID NO: 1560045
gagucauaccugugaccua

SEQ ID NO: 1572388 - RNA, 19 nt, Artificial Sequence
  Description of Artificial Sequence: Synthetic oligonucleotide
  Antisense strand to SEQ ID NO: 1572387
uaggucacagguaugacuc

SEQ ID NO: 1572389 - RNA, 19 nt, Artificial Sequence
  Description of Artificial Sequence: Synthetic oligonucleotide
  Sense strand starting at position 2379 of SEQ ID NO: 1560045
accugugaccuacagcauu

SEQ ID NO: 1572390 - RNA, 19 nt, Artificial Sequence
  Description of Artificial Sequence: Synthetic oligonucleotide
  Antisense strand to SEQ ID NO: 1572389
aaugcuguaggucacaggu

SEQ ID NO: 1572391 - RNA, 19 nt, Artificial Sequence
  Description of Artificial Sequence: Synthetic oligonucleotide
  Sense strand starting at position 2492 of SEQ ID NO: 1560045
gugagaccgucucuuaaag

SEQ ID NO: 1572392 - RNA, 19 nt, Artificial Sequence
  Description of Artificial Sequence: Synthetic oligonucleotide
  Antisense strand to SEQ ID NO: 1572391
cuuuaagagacggucucac

SEQ ID NO: 1572393 - RNA, 19 nt, Artificial Sequence
  Description of Artificial Sequence: Synthetic oligonucleotide
  Sense strand starting at position 2494 of SEQ ID NO: 1560045
gagaccgucucuuaaagaa

SEQ ID NO: 1572394 - RNA, 19 nt, Artificial Sequence
  Description of Artificial Sequence: Synthetic oligonucleotide
  Antisense strand to SEQ ID NO: 1572393
uucuuuaagagacggucuc

SEQ ID NO: 1572395 - RNA, 19 nt, Artificial Sequence
  Description of Artificial Sequence: Synthetic oligonucleotide
  Sense strand starting at position 2620 of SEQ ID NO: 1560045
ugcagaacugccugggaau

SEQ ID NO: 1572396 - RNA, 19 nt, Artificial Sequence
  Description of Artificial Sequence: Synthetic oligonucleotide
  Antisense strand to SEQ ID NO: 1572395
auucccaggcaguucugca

SEQ ID NO: 1572397 - RNA, 19 nt, Artificial Sequence
  Description of Artificial Sequence: Synthetic oligonucleotide
  Sense strand starting at position 2621 of SEQ ID NO: 1560045
gcagaacugccugggaaua

SEQ ID NO: 1572398 - RNA, 19 nt, Artificial Sequence
  Description of Artificial Sequence: Synthetic oligonucleotide
  Antisense strand to SEQ ID NO: 1572397
uauucccaggcaguucugc

SEQ ID NO: 1572399 - RNA, 19 nt, Artificial Sequence
  Description of Artificial Sequence: Synthetic oligonucleotide
  Sense strand starting at position 2623 of SEQ ID NO: 1560045
agaacugccugggaauacu

SEQ ID NO: 1572400 - RNA, 19 nt, Artificial Sequence
  Description of Artificial Sequence: Synthetic oligonucleotide
  Antisense strand to SEQ ID NO: 1572399
aguauucccaggcaguucu

SEQ ID NO: 1572401 - RNA, 19 nt, Artificial Sequence
  Description of Artificial Sequence: Synthetic oligonucleotide
  Sense strand starting at position 2632 of SEQ ID NO: 1560045
ugggaauacuacuuuauug

SEQ ID NO: 1572402 - RNA, 19 nt, Artificial Sequence
  Description of Artificial Sequence: Synthetic oligonucleotide
  Antisense strand to SEQ ID NO: 1572401
caauaaaguaguauuccca

SEQ ID NO: 1572403 - RNA, 19 nt, Artificial Sequence
  Description of Artificial Sequence: Synthetic oligonucleotide
  Sense strand starting at position 2644 of SEQ ID NO: 1560045
uuuauugaggccuguggaa

SEQ ID NO: 1572404 - RNA, 19 nt, Artificial Sequence
  Description of Artificial Sequence: Synthetic oligonucleotide
  Antisense strand to SEQ ID NO: 1572403
uuccacaggccucaauaaa

SEQ ID NO: 1572405 - RNA, 19 nt, Artificial Sequence
  Description of Artificial Sequence: Synthetic oligonucleotide
  Sense strand starting at position 2646 of SEQ ID NO: 1560045
uauugaggccuguggaaag

SEQ ID NO: 1572406 - RNA, 19 nt, Artificial Sequence
  Description of Artificial Sequence: Synthetic oligonucleotide
  Antisense strand to SEQ ID NO: 1572405
cuuuccacaggccucaaua

SEQ ID NO: 1572407 - RNA, 19 nt, Artificial Sequence
  Description of Artificial Sequence: Synthetic oligonucleotide
  Sense strand starting at position 2657 of SEQ ID NO: 1560045
guggaaagcugucccuacu

SEQ ID NO: 1572408 - RNA, 19 nt, Artificial Sequence
  Description of Artificial Sequence: Synthetic oligonucleotide
  Antisense strand to SEQ ID NO: 1572407
aguagggacagcuuuccac

SEQ ID NO: 1572409 - RNA, 19 nt, Artificial Sequence
  Description of Artificial Sequence: Synthetic oligonucleotide
  Sense strand starting at position 2776 of SEQ ID NO: 1560045
caugguugucacugcuaua

SEQ ID NO: 1572410 - RNA, 19 nt, Artificial Sequence
  Description of Artificial Sequence: Synthetic oligonucleotide
  Antisense strand to SEQ ID NO: 1572409
uauagcagugacaaccaug

SEQ ID NO: 1572411 - RNA, 19 nt, Artificial Sequence
  Description of Artificial Sequence: Synthetic oligonucleotide
  Sense strand starting at position 2837 of SEQ ID NO: 1560045
ccauccugguuagaaaguu

SEQ ID NO: 1572412 - RNA, 19 nt, Artificial Sequence
  Description of Artificial Sequence: Synthetic oligonucleotide
  Antisense strand to SEQ ID NO: 1572411
aacuuucuaaccaggaugg

SEQ ID NO: 1572413 - RNA, 19 nt, Artificial Sequence
  Description of Artificial Sequence: Synthetic oligonucleotide
  Sense strand starting at position 3012 of SEQ ID NO: 1560045
aggccuuggcugggauaaa

SEQ ID NO: 1572414 - RNA, 19 nt, Artificial Sequence
  Description of Artificial Sequence: Synthetic oligonucleotide
  Antisense strand to SEQ ID NO: 1572413
uuuaucccagccaaggccu

SEQ ID NO: 1572415 - RNA, 19 nt, Artificial Sequence
  Description of Artificial Sequence: Synthetic oligonucleotide
  Sense strand starting at position 3063 of SEQ ID NO: 1560045
gcuugaguuugggugacuu

SEQ ID NO: 1572416 - RNA, 19 nt, Artificial Sequence
  Description of Artificial Sequence: Synthetic oligonucleotide
  Antisense strand to SEQ ID NO: 1572415
aagucacccaaacucaagc

SEQ ID NO: 1572417 - RNA, 19 nt, Artificial Sequence
  Description of Artificial Sequence: Synthetic oligonucleotide
  Sense strand starting at position 3248 of SEQ ID NO: 1560045
gaaagaugcugggagugaa

SEQ ID NO: 1572418 - RNA, 19 nt, Artificial Sequence
  Description of Artificial Sequence: Synthetic oligonucleotide
  Antisense strand to SEQ ID NO: 1572417
uucacucccagcaucuuuc

SEQ ID NO: 1572419 - RNA, 19 nt, Artificial Sequence
  Description of Artificial Sequence: Synthetic oligonucleotide
  Sense strand starting at position 3560 of SEQ ID NO: 1560045
gcgccauugcaugcaaauc

SEQ ID NO: 1572420 - RNA, 19 nt, Artificial Sequence
  Description of Artificial Sequence: Synthetic oligonucleotide
  Antisense strand to SEQ ID NO: 1572419
gauuugcaugcaauggcgc

SEQ ID NO: 1572421 - RNA, 19 nt, Artificial Sequence
  Description of Artificial Sequence: Synthetic oligonucleotide
  Sense strand starting at position 3598 of SEQ ID NO: 1560045
gggccucauucugauacga

SEQ ID NO: 1572422 - RNA, 19 nt, Artificial Sequence
  Description of Artificial Sequence: Synthetic oligonucleotide
  Antisense strand to SEQ ID NO: 1572421
ucguaucagaaugaggccc

SEQ ID NO: 1572423 - RNA, 19 nt, Artificial Sequence
  Description of Artificial Sequence: Synthetic oligonucleotide
  Sense strand starting at position 3771 of SEQ ID NO: 1560045
cgaugcuuuaugcugcuua

SEQ ID NO: 1572424 - RNA, 19 nt, Artificial Sequence
  Description of Artificial Sequence: Synthetic oligonucleotide
  Antisense strand to SEQ ID NO: 1572423
uaagcagcauaaagcaucg

SEQ ID NO: 1572425 - RNA, 19 nt, Artificial Sequence
  Description of Artificial Sequence: Synthetic oligonucleotide
  Sense strand starting at position 3775 of SEQ ID NO: 1560045
gcuuuaugcugcuuacagu

SEQ ID NO: 1572426 - RNA, 19 nt, Artificial Sequence
  Description of Artificial Sequence: Synthetic oligonucleotide
  Antisense strand to SEQ ID NO: 1572425
acuguaagcagcauaaagc

SEQ ID NO: 1572427 - RNA, 19 nt, Artificial Sequence
  Description of Artificial Sequence: Synthetic oligonucleotide
  Sense strand starting at position 3799 of SEQ ID NO: 1560045
agggaaaguucuuccacgu

SEQ ID NO: 1572428 - RNA, 19 nt, Artificial Sequence
  Description of Artificial Sequence: Synthetic oligonucleotide
  Antisense strand to SEQ ID NO: 1572427
acguggaagaacuuucccu

SEQ ID NO: 1572429 - RNA, 19 nt, Artificial Sequence
  Description of Artificial Sequence: Synthetic oligonucleotide
  Sense strand starting at position 3862 of SEQ ID NO: 1560045
guacuuauccuauaggguu

SEQ ID NO: 1572430 - RNA, 19 nt, Artificial Sequence
  Description of Artificial Sequence: Synthetic oligonucleotide
  Antisense strand to SEQ ID NO: 1572429
aacccuauaggauaaguac

SEQ ID NO: 1572431 - RNA, 19 nt, Artificial Sequence
  Description of Artificial Sequence: Synthetic oligonucleotide
  Sense strand starting at position 3870 of SEQ ID NO: 1560045
ccuauaggguuguucucaa

SEQ ID NO: 1572432 - RNA, 19 nt, Artificial Sequence
  Description of Artificial Sequence: Synthetic oligonucleotide
  Antisense strand to SEQ ID NO: 1572431
uugagaacaacccuauagg

SEQ ID NO: 1572433 - RNA, 19 nt, Artificial Sequence
  Description of Artificial Sequence: Synthetic oligonucleotide
  Sense strand starting at position 3874 of SEQ ID NO: 1560045
uaggguuguucucaacaua

SEQ ID NO: 1572434 - RNA, 19 nt, Artificial Sequence
  Description of Artificial Sequence: Synthetic oligonucleotide
  Antisense strand to SEQ ID NO: 1572433
uauguugagaacaacccua

SEQ ID NO: 1572435 - RNA, 19 nt, Artificial Sequence
  Description of Artificial Sequence: Synthetic oligonucleotide
  Sense strand starting at position 377 of SEQ ID NO: 1560046
gugcuauuccaagauggug

SEQ ID NO: 1572436 - RNA, 19 nt, Artificial Sequence
  Description of Artificial Sequence: Synthetic oligonucleotide
  Antisense strand to SEQ ID NO: 1572435
caccaucuuggaauagcac

SEQ ID NO: 1572437 - RNA, 19 nt, Artificial Sequence
  Description of Artificial Sequence: Synthetic oligonucleotide
  Sense strand starting at position 379 of SEQ ID NO: 1560046
gcuauuccaagauggugaa

SEQ ID NO: 1572438 - RNA, 19 nt, Artificial Sequence
  Description of Artificial Sequence: Synthetic oligonucleotide
  Antisense strand to SEQ ID NO: 1572437
uucaccaucuuggaauagc

SEQ ID NO: 1572439 - RNA, 19 nt, Artificial Sequence
  Description of Artificial Sequence: Synthetic oligonucleotide
  Sense strand starting at position 501 of SEQ ID NO: 1560046
ugagauuagccuggccgau

SEQ ID NO: 1572440 - RNA, 19 nt, Artificial Sequence
  Description of Artificial Sequence: Synthetic oligonucleotide
  Antisense strand to SEQ ID NO: 1572439
aucggccaggcuaaucuca

SEQ ID NO: 1572441 - RNA, 19 nt, Artificial Sequence
  Description of Artificial Sequence: Synthetic oligonucleotide
  Sense strand starting at position 1110 of SEQ ID NO: 1560046
cugcuuacuugugugacuu

SEQ ID NO: 1572442 - RNA, 19 nt, Artificial Sequence
  Description of Artificial Sequence: Synthetic oligonucleotide
  Antisense strand to SEQ ID NO: 1572441
aagucacacaaguaagcag

SEQ ID NO: 1572443 - RNA, 19 nt, Artificial Sequence
  Description of Artificial Sequence: Synthetic oligonucleotide
  Sense strand starting at position 1111 of SEQ ID NO: 1560046
ugcuuacuugugugacuuc

SEQ ID NO: 1572444 - RNA, 19 nt, Artificial Sequence
  Description of Artificial Sequence: Synthetic oligonucleotide
  Antisense strand to SEQ ID NO: 1572443
gaagucacacaaguaagca

SEQ ID NO: 1572445 - RNA, 19 nt, Artificial Sequence
  Description of Artificial Sequence: Synthetic oligonucleotide
  Sense strand starting at position 1147 of SEQ ID NO: 1560046
guuucuccauagggacaau

SEQ ID NO: 1572446 - RNA, 19 nt, Artificial Sequence
  Description of Artificial Sequence: Synthetic oligonucleotide
  Antisense strand to SEQ ID NO: 1572445
auugucccuauggagaaac

SEQ ID NO: 1572447 - RNA, 19 nt, Artificial Sequence
  Description of Artificial Sequence: Synthetic oligonucleotide
  Sense strand starting at position 1678 of SEQ ID NO: 1560046
ggagaagaguccugggaac

SEQ ID NO: 1572448 - RNA, 19 nt, Artificial Sequence
  Description of Artificial Sequence: Synthetic oligonucleotide
  Antisense strand to SEQ ID NO: 1572447
guucccaggacucuucucc

SEQ ID NO: 1572449 - RNA, 19 nt, Artificial Sequence
  Description of Artificial Sequence: Synthetic oligonucleotide
  Sense strand starting at position 1885 of SEQ ID NO: 1560046
aagggugcugcgucaguau

SEQ ID NO: 1572450 - RNA, 19 nt, Artificial Sequence
  Description of Artificial Sequence: Synthetic oligonucleotide
  Antisense strand to SEQ ID NO: 1572449
auacugacgcagcacccuu

SEQ ID NO: 1572451 - RNA, 19 nt, Artificial Sequence
  Description of Artificial Sequence: Synthetic oligonucleotide
  Sense strand starting at position 1887 of SEQ ID NO: 1560046
gggugcugcgucaguauuu

SEQ ID NO: 1572452 - RNA, 19 nt, Artificial Sequence
  Description of Artificial Sequence: Synthetic oligonucleotide
  Antisense strand to SEQ ID NO: 1572451
aaauacugacgcagcaccc

SEQ ID NO: 1572453 - RNA, 19 nt, Artificial Sequence
  Description of Artificial Sequence: Synthetic oligonucleotide
  Sense strand starting at position 1893 of SEQ ID NO: 1560046
ugcgucaguauuuggugaa

SEQ ID NO: 1572454 - RNA, 19 nt, Artificial Sequence
  Description of Artificial Sequence: Synthetic oligonucleotide
  Antisense strand to SEQ ID NO: 1572453
uucaccaaauacugacgca

SEQ ID NO: 1572455 - RNA, 19 nt, Artificial Sequence
  Description of Artificial Sequence: Synthetic oligonucleotide
  Sense strand starting at position 1896 of SEQ ID NO: 1560046
gucaguauuuggugaaugu

SEQ ID NO: 1572456 - RNA, 19 nt, Artificial Sequence
  Description of Artificial Sequence: Synthetic oligonucleotide
  Antisense strand to SEQ ID NO: 1572455
acauucaccaaauacugac

SEQ ID NO: 1572457 - RNA, 19 nt, Artificial Sequence
  Description of Artificial Sequence: Synthetic oligonucleotide
  Sense strand starting at position 1923 of SEQ ID NO: 1560046
gagccagauuuccucuguu

SEQ ID NO: 1572458 - RNA, 19 nt, Artificial Sequence
  Description of Artificial Sequence: Synthetic oligonucleotide
  Antisense strand to SEQ ID NO: 1572457
aacagaggaaaucuggcuc

SEQ ID NO: 1572459 - RNA, 19 nt, Artificial Sequence
  Description of Artificial Sequence: Synthetic oligonucleotide
  Sense strand starting at position 2128 of SEQ ID NO: 1560046
gagucauaccugugaccua

SEQ ID NO: 1572460 - RNA, 19 nt, Artificial Sequence
  Description of Artificial Sequence: Synthetic oligonucleotide
  Antisense strand to SEQ ID NO: 1572459
uaggucacagguaugacuc

SEQ ID NO: 1572461 - RNA, 19 nt, Artificial Sequence
  Description of Artificial Sequence: Synthetic oligonucleotide
  Sense strand starting at position 2135 of SEQ ID NO: 1560046
accugugaccuacagcauu

SEQ ID NO: 1572462 - RNA, 19 nt, Artificial Sequence
  Description of Artificial Sequence: Synthetic oligonucleotide
  Antisense strand to SEQ ID NO: 1572461
aaugcuguaggucacaggu

SEQ ID NO: 1572463 - RNA, 19 nt, Artificial Sequence
  Description of Artificial Sequence: Synthetic oligonucleotide
  Sense strand starting at position 2248 of SEQ ID NO: 1560046
gugagaccgucucuuaaag

SEQ ID NO: 1572464 - RNA, 19 nt, Artificial Sequence
  Description of Artificial Sequence: Synthetic oligonucleotide
  Antisense strand to SEQ ID NO: 1572463
cuuuaagagacggucucac

SEQ ID NO: 1572465 - RNA, 19 nt, Artificial Sequence
  Description of Artificial Sequence: Synthetic oligonucleotide
  Sense strand starting at position 2250 of SEQ ID NO: 1560046
gagaccgucucuuaaagaa

SEQ ID NO: 1572466 - RNA, 19 nt, Artificial Sequence
  Description of Artificial Sequence: Synthetic oligonucleotide
  Antisense strand to SEQ ID NO: 1572465
uucuuuaagagacggucuc

SEQ ID NO: 1572467 - RNA, 19 nt, Artificial Sequence
  Description of Artificial Sequence: Synthetic oligonucleotide
  Sense strand starting at position 2376 of SEQ ID NO: 1560046
ugcagaacugccugggaau

SEQ ID NO: 1572468 - RNA, 19 nt, Artificial Sequence
  Description of Artificial Sequence: Synthetic oligonucleotide
  Antisense strand to SEQ ID NO: 1572467
auucccaggcaguucugca

SEQ ID NO: 1572469 - RNA, 19 nt, Artificial Sequence
  Description of Artificial Sequence: Synthetic oligonucleotide
  Sense strand starting at position 2377 of SEQ ID NO: 1560046
gcagaacugccugggaaua

SEQ ID NO: 1572470 - RNA, 19 nt, Artificial Sequence
  Description of Artificial Sequence: Synthetic oligonucleotide
  Antisense strand to SEQ ID NO: 1572469
uauucccaggcaguucugc

SEQ ID NO: 1572471 - RNA, 19 nt, Artificial Sequence
  Description of Artificial Sequence: Synthetic oligonucleotide
  Sense strand starting at position 2379 of SEQ ID NO: 1560046
agaacugccugggaauacu

SEQ ID NO: 1572472 - RNA, 19 nt, Artificial Sequence
  Description of Artificial Sequence: Synthetic oligonucleotide
  Antisense strand to SEQ ID NO: 1572471
aguauucccaggcaguucu

SEQ ID NO: 1572473 - RNA, 19 nt, Artificial Sequence
  Description of Artificial Sequence: Synthetic oligonucleotide
  Sense strand starting at position 2388 of SEQ ID NO: 1560046
ugggaauacuacuuuauug

SEQ ID NO: 1572474 - RNA, 19 nt, Artificial Sequence
  Description of Artificial Sequence: Synthetic oligonucleotide
  Antisense strand to SEQ ID NO: 1572473
caauaaaguaguauuccca

SEQ ID NO: 1572475 - RNA, 19 nt, Artificial Sequence
  Description of Artificial Sequence: Synthetic oligonucleotide
  Sense strand starting at position 2400 of SEQ ID NO: 1560046
uuuauugaggccuguggaa

SEQ ID NO: 1572476 - RNA, 19 nt, Artificial Sequence
  Description of Artificial Sequence: Synthetic oligonucleotide
  Antisense strand to SEQ ID NO: 1572475
uuccacaggccucaauaaa

SEQ ID NO: 1572477 - RNA, 19 nt, Artificial Sequence
  Description of Artificial Sequence: Synthetic oligonucleotide
  Sense strand starting at position 2402 of SEQ ID NO: 1560046
uauugaggccuguggaaag

SEQ ID NO: 1572478 - RNA, 19 nt, Artificial Sequence
  Description of Artificial Sequence: Synthetic oligonucleotide
  Antisense strand to SEQ ID NO: 1572477
cuuuccacaggccucaaua

SEQ ID NO: 1572479 - RNA, 19 nt, Artificial Sequence
  Description of Artificial Sequence: Synthetic oligonucleotide
  Sense strand starting at position 2413 of SEQ ID NO: 1560046
guggaaagcugucccuacu

SEQ ID NO: 1572480 - RNA, 19 nt, Artificial Sequence
  Description of Artificial Sequence: Synthetic oligonucleotide
  Antisense strand to SEQ ID NO: 1572479
aguagggacagcuuuccac

SEQ ID NO: 1572481 - RNA, 19 nt, Artificial Sequence
  Description of Artificial Sequence: Synthetic oligonucleotide
  Sense strand starting at position 2532 of SEQ ID NO: 1560046
caugguugucacugcuaua

SEQ ID NO: 1572482 - RNA, 19 nt, Artificial Sequence
  Description of Artificial Sequence: Synthetic oligonucleotide
  Antisense strand to SEQ ID NO: 1572481
uauagcagugacaaccaug

SEQ ID NO: 1572483 - RNA, 19 nt, Artificial Sequence
  Description of Artificial Sequence: Synthetic oligonucleotide
  Sense strand starting at position 2593 of SEQ ID NO: 1560046
ccauccugguuagaaaguu

SEQ ID NO: 1572484 - RNA, 19 nt, Artificial Sequence
  Description of Artificial Sequence: Synthetic oligonucleotide
  Antisense strand to SEQ ID NO: 1572483
aacuuucuaaccaggaugg

SEQ ID NO: 1572485 - RNA, 19 nt, Artificial Sequence
  Description of Artificial Sequence: Synthetic oligonucleotide
  Sense strand starting at position 2768 of SEQ ID NO: 1560046
aggccuuggcugggauaaa

SEQ ID NO: 1572486 - RNA, 19 nt, Artificial Sequence
  Description of Artificial Sequence: Synthetic oligonucleotide
  Antisense strand to SEQ ID NO: 1572485
uuuaucccagccaaggccu

SEQ ID NO: 1572487 - RNA, 19 nt, Artificial Sequence
  Description of Artificial Sequence: Synthetic oligonucleotide
  Sense strand starting at position 2819 of SEQ ID NO: 1560046
gcuugaguuugggugacuu

SEQ ID NO: 1572488 - RNA, 19 nt, Artificial Sequence
  Description of Artificial Sequence: Synthetic oligonucleotide
  Antisense strand to SEQ ID NO: 1572487
aagucacccaaacucaagc

SEQ ID NO: 1572489 - RNA, 19 nt, Artificial Sequence
  Description of Artificial Sequence: Synthetic oligonucleotide
  Sense strand starting at position 3004 of SEQ ID NO: 1560046
gaaagaugcugggagugaa

SEQ ID NO: 1572490 - RNA, 19 nt, Artificial Sequence
  Description of Artificial Sequence: Synthetic oligonucleotide
  Antisense strand to SEQ ID NO: 1572489
uucacucccagcaucuuuc

SEQ ID NO: 1572491 - RNA, 19 nt, Artificial Sequence
  Description of Artificial Sequence: Synthetic oligonucleotide
  Sense strand starting at position 3315 of SEQ ID NO: 1560046
cgcgccauugcaugcaaau

SEQ ID NO: 1572492 - RNA, 19 nt, Artificial Sequence
  Description of Artificial Sequence: Synthetic oligonucleotide
  Antisense strand to SEQ ID NO: 1572491
auuugcaugcaauggcgcg

SEQ ID NO: 1572493 - RNA, 19 nt, Artificial Sequence
  Description of Artificial Sequence: Synthetic oligonucleotide
  Sense strand starting at position 3316 of SEQ ID NO: 1560046
gcgccauugcaugcaaauc

SEQ ID NO: 1572494 - RNA, 19 nt, Artificial Sequence
  Description of Artificial Sequence: Synthetic oligonucleotide
  Antisense strand to SEQ ID NO: 1572493
gauuugcaugcaauggcgc

SEQ ID NO: 1572495 - RNA, 19 nt, Artificial Sequence
  Description of Artificial Sequence: Synthetic oligonucleotide
  Sense strand starting at position 3354 of SEQ ID NO: 1560046
gggccucauucugauacga

SEQ ID NO: 1572496 - RNA, 19 nt, Artificial Sequence
  Description of Artificial Sequence: Synthetic oligonucleotide
  Antisense strand to SEQ ID NO: 1572495
ucguaucagaaugaggccc

SEQ ID NO: 1572497 - RNA, 19 nt, Artificial Sequence
  Description of Artificial Sequence: Synthetic oligonucleotide
  Sense strand starting at position 3356 of SEQ ID NO: 1560046
gccucauucugauacgaau

SEQ ID NO: 1572498 - RNA, 19 nt, Artificial Sequence
  Description of Artificial Sequence: Synthetic oligonucleotide
  Antisense strand to SEQ ID NO: 1572497
auucguaucagaaugaggc

SEQ ID NO: 1572499 - RNA, 19 nt, Artificial Sequence
  Description of Artificial Sequence: Synthetic oligonucleotide
  Sense strand starting at position 3527 of SEQ ID NO: 1560046
cgaugcuuuaugcugcuua

SEQ ID NO: 1572500 - RNA, 19 nt, Artificial Sequence
  Description of Artificial Sequence: Synthetic oligonucleotide
  Antisense strand to SEQ ID NO: 1572499
uaagcagcauaaagcaucg

SEQ ID NO: 1572501 - RNA, 19 nt, Artificial Sequence
  Description of Artificial Sequence: Synthetic oligonucleotide
  Sense strand starting at position 3531 of SEQ ID NO: 1560046
gcuuuaugcugcuuacagu

SEQ ID NO: 1572502 - RNA, 19 nt, Artificial Sequence
  Description of Artificial Sequence: Synthetic oligonucleotide
  Antisense strand to SEQ ID NO: 1572501
acuguaagcagcauaaagc

SEQ ID NO: 1572503 - RNA, 19 nt, Artificial Sequence
  Description of Artificial Sequence: Synthetic oligonucleotide
  Sense strand starting at position 3555 of SEQ ID NO: 1560046
agggaaaguucuuccacgu

SEQ ID NO: 1572504 - RNA, 19 nt, Artificial Sequence
  Description of Artificial Sequence: Synthetic oligonucleotide
  Antisense strand to SEQ ID NO: 1572503
acguggaagaacuuucccu

SEQ ID NO: 1572505 - RNA, 19 nt, Artificial Sequence
  Description of Artificial Sequence: Synthetic oligonucleotide
  Sense strand starting at position 3618 of SEQ ID NO: 1560046
guacuuauccuauaggguu

SEQ ID NO: 1572506 - RNA, 19 nt, Artificial Sequence
  Description of Artificial Sequence: Synthetic oligonucleotide
  Antisense strand to SEQ ID NO: 1572505
aacccuauaggauaaguac

SEQ ID NO: 1572507 - RNA, 19 nt, Artificial Sequence
  Description of Artificial Sequence: Synthetic oligonucleotide
  Sense strand starting at position 3626 of SEQ ID NO: 1560046
ccuauaggguuguucucaa

SEQ ID NO: 1572508 - RNA, 19 nt, Artificial Sequence
  Description of Artificial Sequence: Synthetic oligonucleotide
  Antisense strand to SEQ ID NO: 1572507
uugagaacaacccuauagg

SEQ ID NO: 1572509 - RNA, 19 nt, Artificial Sequence
  Description of Artificial Sequence: Synthetic oligonucleotide
  Sense strand starting at position 3630 of SEQ ID NO: 1560046
uaggguuguucucaacaua

SEQ ID NO: 1572510 - RNA, 19 nt, Artificial Sequence
  Description of Artificial Sequence: Synthetic oligonucleotide
  Antisense strand to SEQ ID NO: 1572509
uauguugagaacaacccua

SEQ ID NO: 1572511 - RNA, 19 nt, Artificial Sequence
  Description of Artificial Sequence: Synthetic oligonucleotide
  Sense strand starting at position 3795 of SEQ ID NO: 1560046
ugcugaugggcccaacaau

SEQ ID NO: 1572512 - RNA, 19 nt, Artificial Sequence
  Description of Artificial Sequence: Synthetic oligonucleotide
  Antisense strand to SEQ ID NO: 1572511
auuguugggcccaucagca

SEQ ID NO: 1572513 - RNA, 19 nt, Artificial Sequence
  Description of Artificial Sequence: Synthetic oligonucleotide
  Sense strand starting at position 3968 of SEQ ID NO: 1560046
gcuggaugauccgcaaugu

SEQ ID NO: 1572514 - RNA, 19 nt, Artificial Sequence
  Description of Artificial Sequence: Synthetic oligonucleotide
  Antisense strand to SEQ ID NO: 1572513
acauugcggaucauccagc

SEQ ID NO: 1572515 - RNA, 19 nt, Artificial Sequence
  Description of Artificial Sequence: Synthetic oligonucleotide
  Sense strand starting at position 3 of SEQ ID NO: 1560047
agacuuuaagaugguuuaa

SEQ ID NO: 1572516 - RNA, 19 nt, Artificial Sequence
  Description of Artificial Sequence: Synthetic oligonucleotide
  Antisense strand to SEQ ID NO: 1572515
uuaaaccaucuuaaagucu

SEQ ID NO: 1572517 - RNA, 19 nt, Artificial Sequence
  Description of Artificial Sequence: Synthetic oligonucleotide
  Sense strand starting at position 5 of SEQ ID NO: 1560047
acuuuaagaugguuuaaga

SEQ ID NO: 1572518 - RNA, 19 nt, Artificial Sequence
  Description of Artificial Sequence: Synthetic oligonucleotide
  Antisense strand to SEQ ID NO: 1572517
ucuuaaaccaucuuaaagu

SEQ ID NO: 1572519 - RNA, 19 nt, Artificial Sequence
  Description of Artificial Sequence: Synthetic oligonucleotide
  Sense strand starting at position 193 of SEQ ID NO: 1560047
gcuuccugucaugaagaau

SEQ ID NO: 1572520 - RNA, 19 nt, Artificial Sequence
  Description of Artificial Sequence: Synthetic oligonucleotide
  Antisense strand to SEQ ID NO: 1572519
auucuucaugacaggaagc

SEQ ID NO: 1572521 - RNA, 19 nt, Artificial Sequence
  Description of Artificial Sequence: Synthetic oligonucleotide
  Sense strand starting at position 256 of SEQ ID NO: 1560047
agucauacaaguugggaaa

SEQ ID NO: 1572522 - RNA, 19 nt, Artificial Sequence
  Description of Artificial Sequence: Synthetic oligonucleotide
  Antisense strand to SEQ ID NO: 1572521
uuucccaacuuguaugacu

SEQ ID NO: 1572523 - RNA, 19 nt, Artificial Sequence
  Description of Artificial Sequence: Synthetic oligonucleotide
  Sense strand starting at position 257 of SEQ ID NO: 1560047
gucauacaaguugggaaau

SEQ ID NO: 1572524 - RNA, 19 nt, Artificial Sequence
  Description of Artificial Sequence: Synthetic oligonucleotide
  Antisense strand to SEQ ID NO: 1572523
auuucccaacuuguaugac

SEQ ID NO: 1572525 - RNA, 19 nt, Artificial Sequence
  Description of Artificial Sequence: Synthetic oligonucleotide
  Sense strand starting at position 267 of SEQ ID NO: 1560047
uugggaaaucucugcccaa

SEQ ID NO: 1572526 - RNA, 19 nt, Artificial Sequence
  Description of Artificial Sequence: Synthetic oligonucleotide
  Antisense strand to SEQ ID NO: 1572525
uugggcagagauuucccaa

SEQ ID NO: 1572527 - RNA, 19 nt, Artificial Sequence
  Description of Artificial Sequence: Synthetic oligonucleotide
  Sense strand starting at position 268 of SEQ ID NO: 1560047
ugggaaaucucugcccaaa

SEQ ID NO: 1572528 - RNA, 19 nt, Artificial Sequence
  Description of Artificial Sequence: Synthetic oligonucleotide
  Antisense strand to SEQ ID NO: 1572527
uuugggcagagauuuccca

SEQ ID NO: 1572529 - RNA, 19 nt, Artificial Sequence
  Description of Artificial Sequence: Synthetic oligonucleotide
  Sense strand starting at position 270 of SEQ ID NO: 1560047
ggaaaucucugcccaaauu

SEQ ID NO: 1572530 - RNA, 19 nt, Artificial Sequence
  Description of Artificial Sequence: Synthetic oligonucleotide
  Antisense strand to SEQ ID NO: 1572529
aauuugggcagagauuucc

SEQ ID NO: 1572531 - RNA, 19 nt, Artificial Sequence
  Description of Artificial Sequence: Synthetic oligonucleotide
  Sense strand starting at position 317 of SEQ ID NO: 1560047
gggcuacgaccucauuaga

SEQ ID NO: 1572532 - RNA, 19 nt, Artificial Sequence
  Description of Artificial Sequence: Synthetic oligonucleotide
  Antisense strand to SEQ ID NO: 1572531
ucuaaugaggucguagccc

SEQ ID NO: 1572533 - RNA, 19 nt, Artificial Sequence
  Description of Artificial Sequence: Synthetic oligonucleotide
  Sense strand starting at position 369 of SEQ ID NO: 1560047
cuguaaucccagcgaggaa

SEQ ID NO: 1572534 - RNA, 19 nt, Artificial Sequence
  Description of Artificial Sequence: Synthetic oligonucleotide
  Antisense strand to SEQ ID NO: 1572533
uuccucgcugggauuacag

SEQ ID NO: 1572535 - RNA, 19 nt, Artificial Sequence
  Description of Artificial Sequence: Synthetic oligonucleotide
  Sense strand starting at position 697 of SEQ ID NO: 1560047
ccuuuccucggacacaaau

SEQ ID NO: 1572536 - RNA, 19 nt, Artificial Sequence
  Description of Artificial Sequence: Synthetic oligonucleotide
  Antisense strand to SEQ ID NO: 1572535
auuuguguccgaggaaagg

SEQ ID NO: 1572537 - RNA, 19 nt, Artificial Sequence
  Description of Artificial Sequence: Synthetic oligonucleotide
  Sense strand starting at position 749 of SEQ ID NO: 1560047
cuugcauggaauggagauu

SEQ ID NO: 1572538 - RNA, 19 nt, Artificial Sequence
  Description of Artificial Sequence: Synthetic oligonucleotide
  Antisense strand to SEQ ID NO: 1572537
aaucuccauuccaugcaag

SEQ ID NO: 1572539 - RNA, 19 nt, Artificial Sequence
  Description of Artificial Sequence: Synthetic oligonucleotide
  Sense strand starting at position 761 of SEQ ID NO: 1560047
ggagauuauuuacaagcau

SEQ ID NO: 1572540 - RNA, 19 nt, Artificial Sequence
  Description of Artificial Sequence: Synthetic oligonucleotide
  Antisense strand to SEQ ID NO: 1572539
augcuuguaaauaaucucc

SEQ ID NO: 1572541 - RNA, 19 nt, Artificial Sequence
  Description of Artificial Sequence: Synthetic oligonucleotide
  Sense strand starting at position 1294 of SEQ ID NO: 1560047
ggcauaccuguguaaucug

SEQ ID NO: 1572542 - RNA, 19 nt, Artificial Sequence
  Description of Artificial Sequence: Synthetic oligonucleotide
  Antisense strand to SEQ ID NO: 1572541
cagauuacacagguaugcc

SEQ ID NO: 1572543 - RNA, 19 nt, Artificial Sequence
  Description of Artificial Sequence: Synthetic oligonucleotide
  Sense strand starting at position 1297 of SEQ ID NO: 1560047
auaccuguguaaucuggau

SEQ ID NO: 1572544 - RNA, 19 nt, Artificial Sequence
  Description of Artificial Sequence: Synthetic oligonucleotide
  Antisense strand to SEQ ID NO: 1572543
auccagauuacacagguau

SEQ ID NO: 1572545 - RNA, 19 nt, Artificial Sequence
  Description of Artificial Sequence: Synthetic oligonucleotide
  Sense strand starting at position 1301 of SEQ ID NO: 1560047
cuguguaaucuggauggga

SEQ ID NO: 1572546 - RNA, 19 nt, Artificial Sequence
  Description of Artificial Sequence: Synthetic oligonucleotide
  Antisense strand to SEQ ID NO: 1572545
ucccauccagauuacacag

SEQ ID NO: 1572547 - RNA, 19 nt, Artificial Sequence
  Description of Artificial Sequence: Synthetic oligonucleotide
  Sense strand starting at position 1303 of SEQ ID NO: 1560047
guguaaucuggaugggauc

SEQ ID NO: 1572548 - RNA, 19 nt, Artificial Sequence
  Description of Artificial Sequence: Synthetic oligonucleotide
  Antisense strand to SEQ ID NO: 1572547
gaucccauccagauuacac

SEQ ID NO: 1572549 - RNA, 19 nt, Artificial Sequence
  Description of Artificial Sequence: Synthetic oligonucleotide
  Sense strand starting at position 1336 of SEQ ID NO: 1560047
cgcuuauuaaagugaaaug

SEQ ID NO: 1572550 - RNA, 19 nt, Artificial Sequence
  Description of Artificial Sequence: Synthetic oligonucleotide
  Antisense strand to SEQ ID NO: 1572549
cauuucacuuuaauaagcg

SEQ ID NO: 1572551 - RNA, 19 nt, Artificial Sequence
  Description of Artificial Sequence: Synthetic oligonucleotide
  Sense strand starting at position 1585 of SEQ ID NO: 1560047
ccuugaaucccaggcaacu

SEQ ID NO: 1572552 - RNA, 19 nt, Artificial Sequence
  Description of Artificial Sequence: Synthetic oligonucleotide
  Antisense strand to SEQ ID NO: 1572551
aguugccugggauucaagg

SEQ ID NO: 1572553 - RNA, 19 nt, Artificial Sequence
  Description of Artificial Sequence: Synthetic oligonucleotide
  Sense strand starting at position 1649 of SEQ ID NO: 1560047
gugguugugaccguuuacu

SEQ ID NO: 1572554 - RNA, 19 nt, Artificial Sequence
  Description of Artificial Sequence: Synthetic oligonucleotide
  Antisense strand to SEQ ID NO: 1572553
aguaaacggucacaaccac

SEQ ID NO: 1572555 - RNA, 19 nt, Artificial Sequence
  Description of Artificial Sequence: Synthetic oligonucleotide
  Sense strand starting at position 1691 of SEQ ID NO: 1560047
ggugaaauguaauuaccuu

SEQ ID NO: 1572556 - RNA, 19 nt, Artificial Sequence
  Description of Artificial Sequence: Synthetic oligonucleotide
  Antisense strand to SEQ ID NO: 1572555
aagguaauuacauuucacc

SEQ ID NO: 1572557 - RNA, 19 nt, Artificial Sequence
  Description of Artificial Sequence: Synthetic oligonucleotide
  Sense strand starting at position 1790 of SEQ ID NO: 1560047
uuauguuuccagugggaug

SEQ ID NO: 1572558 - RNA, 19 nt, Artificial Sequence
  Description of Artificial Sequence: Synthetic oligonucleotide
  Antisense strand to SEQ ID NO: 1572557
caucccacuggaaacauaa

SEQ ID NO: 1572559 - RNA, 19 nt, Artificial Sequence
  Description of Artificial Sequence: Synthetic oligonucleotide
  Sense strand starting at position 1937 of SEQ ID NO: 1560047
ggaaauacuuagcuacagu

SEQ ID NO: 1572560 - RNA, 19 nt, Artificial Sequence
  Description of Artificial Sequence: Synthetic oligonucleotide
  Antisense strand to SEQ ID NO: 1572559
acuguagcuaaguauuucc

SEQ ID NO: 1572561 - RNA, 19 nt, Artificial Sequence
  Description of Artificial Sequence: Synthetic oligonucleotide
  Sense strand starting at position 1968 of SEQ ID NO: 1560047
cucuauuuaucugaggaau

SEQ ID NO: 1572562 - RNA, 19 nt, Artificial Sequence
  Description of Artificial Sequence: Synthetic oligonucleotide
  Antisense strand to SEQ ID NO: 1572561
auuccucagauaaauagag

SEQ ID NO: 1572563 - RNA, 19 nt, Artificial Sequence
  Description of Artificial Sequence: Synthetic oligonucleotide
  Sense strand starting at position 1970 of SEQ ID NO: 1560047
cuauuuaucugaggaauca

SEQ ID NO: 1572564 - RNA, 19 nt, Artificial Sequence
  Description of Artificial Sequence: Synthetic oligonucleotide
  Antisense strand to SEQ ID NO: 1572563
ugauuccucagauaaauag

SEQ ID NO: 1572565 - RNA, 19 nt, Artificial Sequence
  Description of Artificial Sequence: Synthetic oligonucleotide
  Sense strand starting at position 2006 of SEQ ID NO: 1560047
cagaauguuugggcaguga

SEQ ID NO: 1572566 - RNA, 19 nt, Artificial Sequence
  Description of Artificial Sequence: Synthetic oligonucleotide
  Antisense strand to SEQ ID NO: 1572565
ucacugcccaaacauucug

SEQ ID NO: 1572567 - RNA, 19 nt, Artificial Sequence
  Description of Artificial Sequence: Synthetic oligonucleotide
  Sense strand starting at position 2098 of SEQ ID NO: 1560047
gggagacuacaguguaaga

SEQ ID NO: 1572568 - RNA, 19 nt, Artificial Sequence
  Description of Artificial Sequence: Synthetic oligonucleotide
  Antisense strand to SEQ ID NO: 1572567
ucuuacacuguagucuccc

SEQ ID NO: 1572569 - RNA, 19 nt, Artificial Sequence
  Description of Artificial Sequence: Synthetic oligonucleotide
  Sense strand starting at position 2806 of SEQ ID NO: 1560047
acuccugaugacugaaagu

SEQ ID NO: 1572570 - RNA, 19 nt, Artificial Sequence
  Description of Artificial Sequence: Synthetic oligonucleotide
  Antisense strand to SEQ ID NO: 1572569
acuuucagucaucaggagu

SEQ ID NO: 1572571 - RNA, 19 nt, Artificial Sequence
  Description of Artificial Sequence: Synthetic oligonucleotide
  Sense strand starting at position 2873 of SEQ ID NO: 1560047
ggcaaugaacuaugucaug

SEQ ID NO: 1572572 - RNA, 19 nt, Artificial Sequence
  Description of Artificial Sequence: Synthetic oligonucleotide
  Antisense strand to SEQ ID NO: 1572571
caugacauaguucauugcc

SEQ ID NO: 1572573 - RNA, 19 nt, Artificial Sequence
  Description of Artificial Sequence: Synthetic oligonucleotide
  Sense strand starting at position 2882 of SEQ ID NO: 1560047
cuaugucauguaugaggga

SEQ ID NO: 1572574 - RNA, 19 nt, Artificial Sequence
  Description of Artificial Sequence: Synthetic oligonucleotide
  Antisense strand to SEQ ID NO: 1572573
ucccucauacaugacauag

SEQ ID NO: 1572575 - RNA, 19 nt, Artificial Sequence
  Description of Artificial Sequence: Synthetic oligonucleotide
  Sense strand starting at position 2913 of SEQ ID NO: 1560047
cugggagugcuggauguua

SEQ ID NO: 1572576 - RNA, 19 nt, Artificial Sequence
  Description of Artificial Sequence: Synthetic oligonucleotide
  Antisense strand to SEQ ID NO: 1572575
uaacauccagcacucccag

SEQ ID NO: 1572577 - RNA, 19 nt, Artificial Sequence
  Description of Artificial Sequence: Synthetic oligonucleotide
  Sense strand starting at position 2960 of SEQ ID NO: 1560047
cugugcaugauaggugaga

SEQ ID NO: 1572578 - RNA, 19 nt, Artificial Sequence
  Description of Artificial Sequence: Synthetic oligonucleotide
  Antisense strand to SEQ ID NO: 1572577
ucucaccuaucaugcacag

SEQ ID NO: 1572579 - RNA, 19 nt, Artificial Sequence
  Description of Artificial Sequence: Synthetic oligonucleotide
  Sense strand starting at position 3002 of SEQ ID NO: 1560047
agcagaagucugggacuuu

SEQ ID NO: 1572580 - RNA, 19 nt, Artificial Sequence
  Description of Artificial Sequence: Synthetic oligonucleotide
  Antisense strand to SEQ ID NO: 1572579
aaagucccagacuucugcu

SEQ ID NO: 1572581 - RNA, 19 nt, Artificial Sequence
  Description of Artificial Sequence: Synthetic oligonucleotide
  Sense strand starting at position 3030 of SEQ ID NO: 1560047
cgugaugugaccugaccaa

SEQ ID NO: 1572582 - RNA, 19 nt, Artificial Sequence
  Description of Artificial Sequence: Synthetic oligonucleotide
  Antisense strand to SEQ ID NO: 1572581
uuggucaggucacaucacg

SEQ ID NO: 1572583 - RNA, 19 nt, Artificial Sequence
  Description of Artificial Sequence: Synthetic oligonucleotide
  Sense strand starting at position 3186 of SEQ ID NO: 1560047
ucuggaaccgcugggauua

SEQ ID NO: 1572584 - RNA, 19 nt, Artificial Sequence
  Description of Artificial Sequence: Synthetic oligonucleotide
  Antisense strand to SEQ ID NO: 1572583
uaaucccagcgguuccaga

SEQ ID NO: 1572585 - RNA, 19 nt, Artificial Sequence
  Description of Artificial Sequence: Synthetic oligonucleotide
  Sense strand starting at position 3548 of SEQ ID NO: 1560047
gguuauaaguuaccaggau

SEQ ID NO: 1572586 - RNA, 19 nt, Artificial Sequence
  Description of Artificial Sequence: Synthetic oligonucleotide
  Antisense strand to SEQ ID NO: 1572585
auccugguaacuuauaacc

SEQ ID NO: 1572587 - RNA, 19 nt, Artificial Sequence
  Description of Artificial Sequence: Synthetic oligonucleotide
  Sense strand starting at position 3572 of SEQ ID NO: 1560047
ugguauauugcauaugacu

SEQ ID NO: 1572588 - RNA, 19 nt, Artificial Sequence
  Description of Artificial Sequence: Synthetic oligonucleotide
  Antisense strand to SEQ ID NO: 1572587
agucauaugcaauauacca

SEQ ID NO: 1572589 - RNA, 19 nt, Artificial Sequence
  Description of Artificial Sequence: Synthetic oligonucleotide
  Sense strand starting at position 3667 of SEQ ID NO: 1560047
cugguaguaugauucugga

SEQ ID NO: 1572590 - RNA, 19 nt, Artificial Sequence
  Description of Artificial Sequence: Synthetic oligonucleotide
  Antisense strand to SEQ ID NO: 1572589
uccagaaucauacuaccag

SEQ ID NO: 1572591 - RNA, 19 nt, Artificial Sequence
  Description of Artificial Sequence: Synthetic oligonucleotide
  Sense strand starting at position 3693 of SEQ ID NO: 1560047
ugcugcuuucuccaagaug

SEQ ID NO: 1572592 - RNA, 19 nt, Artificial Sequence
  Description of Artificial Sequence: Synthetic oligonucleotide
  Antisense strand to SEQ ID NO: 1572591
caucuuggagaaagcagca

SEQ ID NO: 1572593 - RNA, 19 nt, Artificial Sequence
  Description of Artificial Sequence: Synthetic oligonucleotide
  Sense strand starting at position 3823 of SEQ ID NO: 1560047
gugucaggccuugaaagga

SEQ ID NO: 1572594 - RNA, 19 nt, Artificial Sequence
  Description of Artificial Sequence: Synthetic oligonucleotide
  Antisense strand to SEQ ID NO: 1572593
uccuuucaaggccugacac

SEQ ID NO: 1572595 - RNA, 19 nt, Artificial Sequence
  Description of Artificial Sequence: Synthetic oligonucleotide
  Sense strand starting at position 105 of SEQ ID NO: 1560048
accgcugucagcugugauu

SEQ ID NO: 1572596 - RNA, 19 nt, Artificial Sequence
  Description of Artificial Sequence: Synthetic oligonucleotide
  Antisense strand to SEQ ID NO: 1572595
aaucacagcugacagcggu

SEQ ID NO: 1572597 - RNA, 19 nt, Artificial Sequence
  Description of Artificial Sequence: Synthetic oligonucleotide
  Sense strand starting at position 483 of SEQ ID NO: 1560048
uguccuaaucgccaaguga

SEQ ID NO: 1572598 - RNA, 19 nt, Artificial Sequence
  Description of Artificial Sequence: Synthetic oligonucleotide
  Antisense strand to SEQ ID NO: 1572597
ucacuuggcgauuaggaca

SEQ ID NO: 1572599 - RNA, 19 nt, Artificial Sequence
  Description of Artificial Sequence: Synthetic oligonucleotide
  Sense strand starting at position 491 of SEQ ID NO: 1560048
ucgccaagugauuaccauu

SEQ ID NO: 1572600 - RNA, 19 nt, Artificial Sequence
  Description of Artificial Sequence: Synthetic oligonucleotide
  Antisense strand to SEQ ID NO: 1572599
aaugguaaucacuuggcga

SEQ ID NO: 1572601 - RNA, 19 nt, Artificial Sequence
  Description of Artificial Sequence: Synthetic oligonucleotide
  Sense strand starting at position 604 of SEQ ID NO: 1560048
cucccauugcacugaugaa

SEQ ID NO: 1572602 - RNA, 19 nt, Artificial Sequence
  Description of Artificial Sequence: Synthetic oligonucleotide
  Antisense strand to SEQ ID NO: 1572601
uucaucagugcaaugggag

SEQ ID NO: 1572603 - RNA, 19 nt, Artificial Sequence
  Description of Artificial Sequence: Synthetic oligonucleotide
  Sense strand starting at position 642 of SEQ ID NO: 1560048
gggugagacuuugccaaag

SEQ ID NO: 1572604 - RNA, 19 nt, Artificial Sequence
  Description of Artificial Sequence: Synthetic oligonucleotide
  Antisense strand to SEQ ID NO: 1572603
cuuuggcaaagucucaccc

SEQ ID NO: 1572605 - RNA, 19 nt, Artificial Sequence
  Description of Artificial Sequence: Synthetic oligonucleotide
  Sense strand starting at position 644 of SEQ ID NO: 1560048
gugagacuuugccaaagac

SEQ ID NO: 1572606 - RNA, 19 nt, Artificial Sequence
  Description of Artificial Sequence: Synthetic oligonucleotide
  Antisense strand to SEQ ID NO: 1572605
gucuuuggcaaagucucac

SEQ ID NO: 1572607 - RNA, 19 nt, Artificial Sequence
  Description of Artificial Sequence: Synthetic oligonucleotide
  Sense strand starting at position 1004 of SEQ ID NO: 1560048
gggauaagguccucgcugu

SEQ ID NO: 1572608 - RNA, 19 nt, Artificial Sequence
  Description of Artificial Sequence: Synthetic oligonucleotide
  Antisense strand to SEQ ID NO: 1572607
acagcgaggaccuuauccc

SEQ ID NO: 1572609 - RNA, 19 nt, Artificial Sequence
  Description of Artificial Sequence: Synthetic oligonucleotide
  Sense strand starting at position 2135 of SEQ ID NO: 1560048
cggaacuugcuucgucgaa

SEQ ID NO: 1572610 - RNA, 19 nt, Artificial Sequence
  Description of Artificial Sequence: Synthetic oligonucleotide
  Antisense strand to SEQ ID NO: 1572609
uucgacgaagcaaguuccg

SEQ ID NO: 1572611 - RNA, 19 nt, Artificial Sequence
  Description of Artificial Sequence: Synthetic oligonucleotide
  Sense strand starting at position 2508 of SEQ ID NO: 1560048
agccgagugcgccucagau

SEQ ID NO: 1572612 - RNA, 19 nt, Artificial Sequence
  Description of Artificial Sequence: Synthetic oligonucleotide
  Antisense strand to SEQ ID NO: 1572611
aucugaggcgcacucggcu

SEQ ID NO: 1572613 - RNA, 19 nt, Artificial Sequence
  Description of Artificial Sequence: Synthetic oligonucleotide
  Sense strand starting at position 2579 of SEQ ID NO: 1560048
gcggucacugcucggacaa

SEQ ID NO: 1572614 - RNA, 19 nt, Artificial Sequence
  Description of Artificial Sequence: Synthetic oligonucleotide
  Antisense strand to SEQ ID NO: 1572613
uuguccgagcagugaccgc

SEQ ID NO: 1572615 - RNA, 19 nt, Artificial Sequence
  Description of Artificial Sequence: Synthetic oligonucleotide
  Sense strand starting at position 2580 of SEQ ID NO: 1560048
cggucacugcucggacaau

SEQ ID NO: 1572616 - RNA, 19 nt, Artificial Sequence
  Description of Artificial Sequence: Synthetic oligonucleotide
  Antisense strand to SEQ ID NO: 1572615
auuguccgagcagugaccg

SEQ ID NO: 1572617 - RNA, 19 nt, Artificial Sequence
  Description of Artificial Sequence: Synthetic oligonucleotide
  Sense strand starting at position 2623 of SEQ ID NO: 1560048
guccuacucgugcgcugaa

SEQ ID NO: 1572618 - RNA, 19 nt, Artificial Sequence
  Description of Artificial Sequence: Synthetic oligonucleotide
  Antisense strand to SEQ ID NO: 1572617
uucagcgcacgaguaggac

SEQ ID NO: 1572619 - RNA, 19 nt, Artificial Sequence
  Description of Artificial Sequence: Synthetic oligonucleotide
  Sense strand starting at position 116 of SEQ ID NO: 1560049
ggcagacauucuuguuucu

SEQ ID NO: 1572620 - RNA, 19 nt, Artificial Sequence
  Description of Artificial Sequence: Synthetic oligonucleotide
  Antisense strand to SEQ ID NO: 1572619
agaaacaagaaugucugcc

SEQ ID NO: 1572621 - RNA, 19 nt, Artificial Sequence
  Description of Artificial Sequence: Synthetic oligonucleotide
  Sense strand starting at position 140 of SEQ ID NO: 1560049
ucacuuguccauuagcagu

SEQ ID NO: 1572622 - RNA, 19 nt, Artificial Sequence
  Description of Artificial Sequence: Synthetic oligonucleotide
  Antisense strand to SEQ ID NO: 1572621
acugcuaauggacaaguga

SEQ ID NO: 1572623 - RNA, 19 nt, Artificial Sequence
  Description of Artificial Sequence: Synthetic oligonucleotide
  Sense strand starting at position 146 of SEQ ID NO: 1560049
guccauuagcagugcucua

SEQ ID NO: 1572624 - RNA, 19 nt, Artificial Sequence
  Description of Artificial Sequence: Synthetic oligonucleotide
  Antisense strand to SEQ ID NO: 1572623
uagagcacugcuaauggac

SEQ ID NO: 1572625 - RNA, 19 nt, Artificial Sequence
  Description of Artificial Sequence: Synthetic oligonucleotide
  Sense strand starting at position 260 of SEQ ID NO: 1560049
gcugaauccuuuggucucu

SEQ ID NO: 1572626 - RNA, 19 nt, Artificial Sequence
  Description of Artificial Sequence: Synthetic oligonucleotide
  Antisense strand to SEQ ID NO: 1572625
agagaccaaaggauucagc

SEQ ID NO: 1572627 - RNA, 19 nt, Artificial Sequence
  Description of Artificial Sequence: Synthetic oligonucleotide
  Sense strand starting at position 262 of SEQ ID NO: 1560049
ugaauccuuuggucucuga

SEQ ID NO: 1572628 - RNA, 19 nt, Artificial Sequence
  Description of Artificial Sequence: Synthetic oligonucleotide
  Antisense strand to SEQ ID NO: 1572627
ucagagaccaaaggauuca

SEQ ID NO: 1572629 - RNA, 19 nt, Artificial Sequence
  Description of Artificial Sequence: Synthetic oligonucleotide
  Sense strand starting at position 265 of SEQ ID NO: 1560049
auccuuuggucucugacua

SEQ ID NO: 1572630 - RNA, 19 nt, Artificial Sequence
  Description of Artificial Sequence: Synthetic oligonucleotide
  Antisense strand to SEQ ID NO: 1572629
uagucagagaccaaaggau

SEQ ID NO: 1572631 - RNA, 19 nt, Artificial Sequence
  Description of Artificial Sequence: Synthetic oligonucleotide
  Sense strand starting at position 284 of SEQ ID NO: 1560049
gcuuccaccucguaaauca

SEQ ID NO: 1572632 - RNA, 19 nt, Artificial Sequence
  Description of Artificial Sequence: Synthetic oligonucleotide
  Antisense strand to SEQ ID NO: 1572631
ugauuuacgagguggaagc

SEQ ID NO: 1572633 - RNA, 19 nt, Artificial Sequence
  Description of Artificial Sequence: Synthetic oligonucleotide
  Sense strand starting at position 292 of SEQ ID NO: 1560049
cucguaaaucaggagugga

SEQ ID NO: 1572634 - RNA, 19 nt, Artificial Sequence
  Description of Artificial Sequence: Synthetic oligonucleotide
  Antisense strand to SEQ ID NO: 1572633
uccacuccugauuuacgag

SEQ ID NO: 1572635 - RNA, 19 nt, Artificial Sequence
  Description of Artificial Sequence: Synthetic oligonucleotide
  Sense strand starting at position 308 of SEQ ID NO: 1560049
ggacaagcuuuccugccaa

SEQ ID NO: 1572636 - RNA, 19 nt, Artificial Sequence
  Description of Artificial Sequence: Synthetic oligonucleotide
  Antisense strand to SEQ ID NO: 1572635
uuggcaggaaagcuugucc

SEQ ID NO: 1572637 - RNA, 19 nt, Artificial Sequence
  Description of Artificial Sequence: Synthetic oligonucleotide
  Sense strand starting at position 358 of SEQ ID NO: 1560049
cugcccuucuggugugaga

SEQ ID NO: 1572638 - RNA, 19 nt, Artificial Sequence
  Description of Artificial Sequence: Synthetic oligonucleotide
  Antisense strand to SEQ ID NO: 1572637
ucucacaccagaagggcag

SEQ ID NO: 1572639 - RNA, 19 nt, Artificial Sequence
  Description of Artificial Sequence: Synthetic oligonucleotide
  Sense strand starting at position 381 of SEQ ID NO: 1560049
ccacuaaccguaugugaau

SEQ ID NO: 1572640 - RNA, 19 nt, Artificial Sequence
  Description of Artificial Sequence: Synthetic oligonucleotide
  Antisense strand to SEQ ID NO: 1572639
auucacauacgguuagugg

SEQ ID NO: 1572641 - RNA, 19 nt, Artificial Sequence
  Description of Artificial Sequence: Synthetic oligonucleotide
  Sense strand starting at position 390 of SEQ ID NO: 1560049
guaugugaaucauuuggcu

SEQ ID NO: 1572642 - RNA, 19 nt, Artificial Sequence
  Description of Artificial Sequence: Synthetic oligonucleotide
  Antisense strand to SEQ ID NO: 1572641
agccaaaugauucacauac

SEQ ID NO: 1572643 - RNA, 19 nt, Artificial Sequence
  Description of Artificial Sequence: Synthetic oligonucleotide
  Sense strand starting at position 392 of SEQ ID NO: 1560049
augugaaucauuuggcugu

SEQ ID NO: 1572644 - RNA, 19 nt, Artificial Sequence
  Description of Artificial Sequence: Synthetic oligonucleotide
  Antisense strand to SEQ ID NO: 1572643
acagccaaaugauucacau

SEQ ID NO: 1572645 - RNA, 19 nt, Artificial Sequence
  Description of Artificial Sequence: Synthetic oligonucleotide
  Sense strand starting at position 394 of SEQ ID NO: 1560049
gugaaucauuuggcugugu

SEQ ID NO: 1572646 - RNA, 19 nt, Artificial Sequence
  Description of Artificial Sequence: Synthetic oligonucleotide
  Antisense strand to SEQ ID NO: 1572645
acacagccaaaugauucac

SEQ ID NO: 1572647 - RNA, 19 nt, Artificial Sequence
  Description of Artificial Sequence: Synthetic oligonucleotide
  Sense strand starting at position 405 of SEQ ID NO: 1560049
ggcugugugccguaaaccu

SEQ ID NO: 1572648 - RNA, 19 nt, Artificial Sequence
  Description of Artificial Sequence: Synthetic oligonucleotide
  Antisense strand to SEQ ID NO: 1572647
agguuuacggcacacagcc

SEQ ID NO: 1572649 - RNA, 19 nt, Artificial Sequence
  Description of Artificial Sequence: Synthetic oligonucleotide
  Sense strand starting at position 413 of SEQ ID NO: 1560049
gccguaaaccuuuacuuac

SEQ ID NO: 1572650 - RNA, 19 nt, Artificial Sequence
  Description of Artificial Sequence: Synthetic oligonucleotide
  Antisense strand to SEQ ID NO: 1572649
guaaguaaagguuuacggc

SEQ ID NO: 1572651 - RNA, 19 nt, Artificial Sequence
  Description of Artificial Sequence: Synthetic oligonucleotide
  Sense strand starting at position 951 of SEQ ID NO: 1560049
gcuguauccucccacuuua

SEQ ID NO: 1572652 - RNA, 19 nt, Artificial Sequence
  Description of Artificial Sequence: Synthetic oligonucleotide
  Antisense strand to SEQ ID NO: 1572651
uaaagugggaggauacagc

SEQ ID NO: 1572653 - RNA, 19 nt, Artificial Sequence
  Description of Artificial Sequence: Synthetic oligonucleotide
  Sense strand starting at position 2074 of SEQ ID NO: 1560049
cccgucuuaaagggauagu

SEQ ID NO: 1572654 - RNA, 19 nt, Artificial Sequence
  Description of Artificial Sequence: Synthetic oligonucleotide
  Antisense strand to SEQ ID NO: 1572653
acuaucccuuuaagacggg

SEQ ID NO: 1572655 - RNA, 19 nt, Artificial Sequence
  Description of Artificial Sequence: Synthetic oligonucleotide
  Sense strand starting at position 2095 of SEQ ID NO: 1560049
ccuugagacucggaucuca

SEQ ID NO: 1572656 - RNA, 19 nt, Artificial Sequence
  Description of Artificial Sequence: Synthetic oligonucleotide
  Antisense strand to SEQ ID NO: 1572655
ugagauccgagucucaagg

SEQ ID NO: 1572657 - RNA, 19 nt, Artificial Sequence
  Description of Artificial Sequence: Synthetic oligonucleotide
  Sense strand starting at position 2198 of SEQ ID NO: 1560049
cgaggcucgucuuucugaa

SEQ ID NO: 1572658 - RNA, 19 nt, Artificial Sequence
  Description of Artificial Sequence: Synthetic oligonucleotide
  Antisense strand to SEQ ID NO: 1572657
uucagaaagacgagccucg

SEQ ID NO: 1572659 - RNA, 19 nt, Artificial Sequence
  Description of Artificial Sequence: Synthetic oligonucleotide
  Sense strand starting at position 2470 of SEQ ID NO: 1560049
gggcuuuauugagaugcag

SEQ ID NO: 1572660 - RNA, 19 nt, Artificial Sequence
  Description of Artificial Sequence: Synthetic oligonucleotide
  Antisense strand to SEQ ID NO: 1572659
cugcaucucaauaaagccc

SEQ ID NO: 1572661 - RNA, 19 nt, Artificial Sequence
  Description of Artificial Sequence: Synthetic oligonucleotide
  Sense strand starting at position 2488 of SEQ ID NO: 1560049
guuuacauaccauaaaguu

SEQ ID NO: 1572662 - RNA, 19 nt, Artificial Sequence
  Description of Artificial Sequence: Synthetic oligonucleotide
  Antisense strand to SEQ ID NO: 1572661
aacuuuaugguauguaaac

SEQ ID NO: 1572663 - RNA, 19 nt, Artificial Sequence
  Description of Artificial Sequence: Synthetic oligonucleotide
  Sense strand starting at position 2496 of SEQ ID NO: 1560049
accauaaaguucuccuguu

SEQ ID NO: 1572664 - RNA, 19 nt, Artificial Sequence
  Description of Artificial Sequence: Synthetic oligonucleotide
  Antisense strand to SEQ ID NO: 1572663
aacaggagaacuuuauggu

SEQ ID NO: 1572665 - RNA, 19 nt, Artificial Sequence
  Description of Artificial Sequence: Synthetic oligonucleotide
  Sense strand starting at position 2497 of SEQ ID NO: 1560049
ccauaaaguucuccuguuu

SEQ ID NO: 1572666 - RNA, 19 nt, Artificial Sequence
  Description of Artificial Sequence: Synthetic oligonucleotide
  Antisense strand to SEQ ID NO: 1572665
aaacaggagaacuuuaugg

SEQ ID NO: 1572667 - RNA, 19 nt, Artificial Sequence
  Description of Artificial Sequence: Synthetic oligonucleotide
  Sense strand starting at position 2821 of SEQ ID NO: 1560049
cggccaaauucgccuguuu

SEQ ID NO: 1572668 - RNA, 19 nt, Artificial Sequence
  Description of Artificial Sequence: Synthetic oligonucleotide
  Antisense strand to SEQ ID NO: 1572667
aaacaggcgaauuuggccg

SEQ ID NO: 1572669 - RNA, 19 nt, Artificial Sequence
  Description of Artificial Sequence: Synthetic oligonucleotide
  Sense strand starting at position 2823 of SEQ ID NO: 1560049
gccaaauucgccuguuuaa

SEQ ID NO: 1572670 - RNA, 19 nt, Artificial Sequence
  Description of Artificial Sequence: Synthetic oligonucleotide
  Antisense strand to SEQ ID NO: 1572669
uuaaacaggcgaauuuggc

SEQ ID NO: 1572671 - RNA, 19 nt, Artificial Sequence
  Description of Artificial Sequence: Synthetic oligonucleotide
  Sense strand starting at position 2834 of SEQ ID NO: 1560049
cuguuuaaacuguaaauuc

SEQ ID NO: 1572672 - RNA, 19 nt, Artificial Sequence
  Description of Artificial Sequence: Synthetic oligonucleotide
  Antisense strand to SEQ ID NO: 1572671
gaauuuacaguuuaaacag

SEQ ID NO: 1572673 - RNA, 19 nt, Artificial Sequence
  Description of Artificial Sequence: Synthetic oligonucleotide
  Sense strand starting at position 235 of SEQ ID NO: 1560050
ggcagugacucauggagag

SEQ ID NO: 1572674 - RNA, 19 nt, Artificial Sequence
  Description of Artificial Sequence: Synthetic oligonucleotide
  Antisense strand to SEQ ID NO: 1572673
cucuccaugagucacugcc

SEQ ID NO: 1572675 - RNA, 19 nt, Artificial Sequence
  Description of Artificial Sequence: Synthetic oligonucleotide
  Sense strand starting at position 409 of SEQ ID NO: 1560050
cggccuguccugcaaggua

SEQ ID NO: 1572676 - RNA, 19 nt, Artificial Sequence
  Description of Artificial Sequence: Synthetic oligonucleotide
  Antisense strand to SEQ ID NO: 1572675
uaccuugcaggacaggccg

SEQ ID NO: 1572677 - RNA, 19 nt, Artificial Sequence
  Description of Artificial Sequence: Synthetic oligonucleotide
  Sense strand starting at position 764 of SEQ ID NO: 1560050
cggagaagcugguucccau

SEQ ID NO: 1572678 - RNA, 19 nt, Artificial Sequence
  Description of Artificial Sequence: Synthetic oligonucleotide
  Antisense strand to SEQ ID NO: 1572677
augggaaccagcuucuccg

SEQ ID NO: 1572679 - RNA, 19 nt, Artificial Sequence
  Description of Artificial Sequence: Synthetic oligonucleotide
  Sense strand starting at position 1118 of SEQ ID NO: 1560050
gagaccuuucccggagcga

SEQ ID NO: 1572680 - RNA, 19 nt, Artificial Sequence
  Description of Artificial Sequence: Synthetic oligonucleotide
  Antisense strand to SEQ ID NO: 1572679
ucgcuccgggaaaggucuc

SEQ ID NO: 1572681 - RNA, 19 nt, Artificial Sequence
  Description of Artificial Sequence: Synthetic oligonucleotide
  Sense strand starting at position 1300 of SEQ ID NO: 1560050
gcauauguaggucgggaaa

SEQ ID NO: 1572682 - RNA, 19 nt, Artificial Sequence
  Description of Artificial Sequence: Synthetic oligonucleotide
  Antisense strand to SEQ ID NO: 1572681
uuucccgaccuacauaugc

SEQ ID NO: 1572683 - RNA, 19 nt, Artificial Sequence
  Description of Artificial Sequence: Synthetic oligonucleotide
  Sense strand starting at position 1302 of SEQ ID NO: 1560050
auauguaggucgggaaaug

SEQ ID NO: 1572684 - RNA, 19 nt, Artificial Sequence
  Description of Artificial Sequence: Synthetic oligonucleotide
  Antisense strand to SEQ ID NO: 1572683
cauuucccgaccuacauau

SEQ ID NO: 1572685 - RNA, 19 nt, Artificial Sequence
  Description of Artificial Sequence: Synthetic oligonucleotide
  Sense strand starting at position 1303 of SEQ ID NO: 1560050
uauguaggucgggaaauga

SEQ ID NO: 1572686 - RNA, 19 nt, Artificial Sequence
  Description of Artificial Sequence: Synthetic oligonucleotide
  Antisense strand to SEQ ID NO: 1572685
ucauuucccgaccuacaua

SEQ ID NO: 1572687 - RNA, 19 nt, Artificial Sequence
  Description of Artificial Sequence: Synthetic oligonucleotide
  Sense strand starting at position 1863 of SEQ ID NO: 1560050
cggagaauuuaugaaugga

SEQ ID NO: 1572688 - RNA, 19 nt, Artificial Sequence
  Description of Artificial Sequence: Synthetic oligonucleotide
  Antisense strand to SEQ ID NO: 1572687
uccauucauaaauucuccg

SEQ ID NO: 1572689 - RNA, 19 nt, Artificial Sequence
  Description of Artificial Sequence: Synthetic oligonucleotide
  Sense strand starting at position 2463 of SEQ ID NO: 1560050
cugugugacagcgaucaca

SEQ ID NO: 1572690 - RNA, 19 nt, Artificial Sequence
  Description of Artificial Sequence: Synthetic oligonucleotide
  Antisense strand to SEQ ID NO: 1572689
ugugaucgcugucacacag

SEQ ID NO: 1572691 - RNA, 19 nt, Artificial Sequence
  Description of Artificial Sequence: Synthetic oligonucleotide
  Sense strand starting at position 2727 of SEQ ID NO: 1560050
ucuuucucgucccaaagaa

SEQ ID NO: 1572692 - RNA, 19 nt, Artificial Sequence
  Description of Artificial Sequence: Synthetic oligonucleotide
  Antisense strand to SEQ ID NO: 1572691
uucuuugggacgagaaaga

SEQ ID NO: 1572693 - RNA, 19 nt, Artificial Sequence
  Description of Artificial Sequence: Synthetic oligonucleotide
  Sense strand starting at position 2828 of SEQ ID NO: 1560050
uguccaugcagccagagau

SEQ ID NO: 1572694 - RNA, 19 nt, Artificial Sequence
  Description of Artificial Sequence: Synthetic oligonucleotide
  Antisense strand to SEQ ID NO: 1572693
aucucuggcugcauggaca

SEQ ID NO: 1572695 - RNA, 19 nt, Artificial Sequence
  Description of Artificial Sequence: Synthetic oligonucleotide
  Sense strand starting at position 3001 of SEQ ID NO: 1560050
cuccgauagcugugaacuc

SEQ ID NO: 1572696 - RNA, 19 nt, Artificial Sequence
  Description of Artificial Sequence: Synthetic oligonucleotide
  Antisense strand to SEQ ID NO: 1572695
gaguucacagcuaucggag

SEQ ID NO: 1572697 - RNA, 19 nt, Artificial Sequence
  Description of Artificial Sequence: Synthetic oligonucleotide
  Sense strand starting at position 3054 of SEQ ID NO: 1560050
augggaauugcaugggcaa

SEQ ID NO: 1572698 - RNA, 19 nt, Artificial Sequence
  Description of Artificial Sequence: Synthetic oligonucleotide
  Antisense strand to SEQ ID NO: 1572697
uugcccaugcaauucccau

SEQ ID NO: 1572699 - RNA, 19 nt, Artificial Sequence
  Description of Artificial Sequence: Synthetic oligonucleotide
  Sense strand starting at position 3055 of SEQ ID NO: 1560050
ugggaauugcaugggcaaa

SEQ ID NO: 1572700 - RNA, 19 nt, Artificial Sequence
  Description of Artificial Sequence: Synthetic oligonucleotide
  Antisense strand to SEQ ID NO: 1572699
uuugcccaugcaauuccca

SEQ ID NO: 1572701 - RNA, 19 nt, Artificial Sequence
  Description of Artificial Sequence: Synthetic oligonucleotide
  Sense strand starting at position 3095 of SEQ ID NO: 1560050
gcaagucaaugccugugaa

SEQ ID NO: 1572702 - RNA, 19 nt, Artificial Sequence
  Description of Artificial Sequence: Synthetic oligonucleotide
  Antisense strand to SEQ ID NO: 1572701
uucacaggcauugacuugc

SEQ ID NO: 1572703 - RNA, 19 nt, Artificial Sequence
  Description of Artificial Sequence: Synthetic oligonucleotide
  Sense strand starting at position 3098 of SEQ ID NO: 1560050
agucaaugccugugaagga

SEQ ID NO: 1572704 - RNA, 19 nt, Artificial Sequence
  Description of Artificial Sequence: Synthetic oligonucleotide
  Antisense strand to SEQ ID NO: 1572703
uccuucacaggcauugacu

SEQ ID NO: 1572705 - RNA, 19 nt, Artificial Sequence
  Description of Artificial Sequence: Synthetic oligonucleotide
  Sense strand starting at position 3099 of SEQ ID NO: 1560050
gucaaugccugugaaggaa

SEQ ID NO: 1572706 - RNA, 19 nt, Artificial Sequence
  Description of Artificial Sequence: Synthetic oligonucleotide
  Antisense strand to SEQ ID NO: 1572705
uuccuucacaggcauugac

SEQ ID NO: 1572707 - RNA, 19 nt, Artificial Sequence
  Description of Artificial Sequence: Synthetic oligonucleotide
  Sense strand starting at position 3121 of SEQ ID NO: 1560050
gagaaaucgucuuguuccc

SEQ ID NO: 1572708 - RNA, 19 nt, Artificial Sequence
  Description of Artificial Sequence: Synthetic oligonucleotide
  Antisense strand to SEQ ID NO: 1572707
gggaacaagacgauuucuc

SEQ ID NO: 1572709 - RNA, 19 nt, Artificial Sequence
  Description of Artificial Sequence: Synthetic oligonucleotide
  Sense strand starting at position 3433 of SEQ ID NO: 1560050
cugucucagucuccuaaau

SEQ ID NO: 1572710 - RNA, 19 nt, Artificial Sequence
  Description of Artificial Sequence: Synthetic oligonucleotide
  Antisense strand to SEQ ID NO: 1572709
auuuaggagacugagacag

SEQ ID NO: 1572711 - RNA, 19 nt, Artificial Sequence
  Description of Artificial Sequence: Synthetic oligonucleotide
  Sense strand starting at position 3435 of SEQ ID NO: 1560050
gucucagucuccuaaauug

SEQ ID NO: 1572712 - RNA, 19 nt, Artificial Sequence
  Description of Artificial Sequence: Synthetic oligonucleotide
  Antisense strand to SEQ ID NO: 1572711
caauuuaggagacugagac

SEQ ID NO: 1572713 - RNA, 19 nt, Artificial Sequence
  Description of Artificial Sequence: Synthetic oligonucleotide
  Sense strand starting at position 3513 of SEQ ID NO: 1560050
cccucuggcugugugaaga

SEQ ID NO: 1572714 - RNA, 19 nt, Artificial Sequence
  Description of Artificial Sequence: Synthetic oligonucleotide
  Antisense strand to SEQ ID NO: 1572713
ucuucacacagccagaggg

SEQ ID NO: 1572715 - RNA, 19 nt, Artificial Sequence
  Description of Artificial Sequence: Synthetic oligonucleotide
  Sense strand starting at position 3706 of SEQ ID NO: 1560050
gggaagugguuccacgagu

SEQ ID NO: 1572716 - RNA, 19 nt, Artificial Sequence
  Description of Artificial Sequence: Synthetic oligonucleotide
  Antisense strand to SEQ ID NO: 1572715
acucguggaaccacuuccc

SEQ ID NO: 1572717 - RNA, 19 nt, Artificial Sequence
  Description of Artificial Sequence: Synthetic oligonucleotide
  Sense strand starting at position 3719 of SEQ ID NO: 1560050
acgagugagacugagucua

SEQ ID NO: 1572718 - RNA, 19 nt, Artificial Sequence
  Description of Artificial Sequence: Synthetic oligonucleotide
  Antisense strand to SEQ ID NO: 1572717
uagacucagucucacucgu

SEQ ID NO: 1572719 - RNA, 19 nt, Artificial Sequence
  Description of Artificial Sequence: Synthetic oligonucleotide
  Sense strand starting at position 3721 of SEQ ID NO: 1560050
gagugagacugagucuauu

SEQ ID NO: 1572720 - RNA, 19 nt, Artificial Sequence
  Description of Artificial Sequence: Synthetic oligonucleotide
  Antisense strand to SEQ ID NO: 1572719
aauagacucagucucacuc

SEQ ID NO: 1572721 - RNA, 19 nt, Artificial Sequence
  Description of Artificial Sequence: Synthetic oligonucleotide
  Sense strand starting at position 281 of SEQ ID NO: 1560051
ucuggcgugucuucagaaa

SEQ ID NO: 1572722 - RNA, 19 nt, Artificial Sequence
  Description of Artificial Sequence: Synthetic oligonucleotide
  Antisense strand to SEQ ID NO: 1572721
uuucugaagacacgccaga

SEQ ID NO: 1572723 - RNA, 19 nt, Artificial Sequence
  Description of Artificial Sequence: Synthetic oligonucleotide
  Sense strand starting at position 404 of SEQ ID NO: 1560051
uugccuggcauuugaguau

SEQ ID NO: 1572724 - RNA, 19 nt, Artificial Sequence
  Description of Artificial Sequence: Synthetic oligonucleotide
  Antisense strand to SEQ ID NO: 1572723
auacucaaaugccaggcaa

SEQ ID NO: 1572725 - RNA, 19 nt, Artificial Sequence
  Description of Artificial Sequence: Synthetic oligonucleotide
  Sense strand starting at position 421 of SEQ ID NO: 1560051
auggaaccuucucagauuu

SEQ ID NO: 1572726 - RNA, 19 nt, Artificial Sequence
  Description of Artificial Sequence: Synthetic oligonucleotide
  Antisense strand to SEQ ID NO: 1572725
aaaucugagaagguuccau

SEQ ID NO: 1572727 - RNA, 19 nt, Artificial Sequence
  Description of Artificial Sequence: Synthetic oligonucleotide
  Sense strand starting at position 578 of SEQ ID NO: 1560051
ggaaguauguccgggcucu

SEQ ID NO: 1572728 - RNA, 19 nt, Artificial Sequence
  Description of Artificial Sequence: Synthetic oligonucleotide
  Antisense strand to SEQ ID NO: 1572727
agagcccggacauacuucc

SEQ ID NO: 1572729 - RNA, 19 nt, Artificial Sequence
  Description of Artificial Sequence: Synthetic oligonucleotide
  Sense strand starting at position 617 of SEQ ID NO: 1560051
aaggguaaaucccuugguu

SEQ ID NO: 1572730 - RNA, 19 nt, Artificial Sequence
  Description of Artificial Sequence: Synthetic oligonucleotide
  Antisense strand to SEQ ID NO: 1572729
aaccaagggauuuacccuu

SEQ ID NO: 1572731 - RNA, 19 nt, Artificial Sequence
  Description of Artificial Sequence: Synthetic oligonucleotide
  Sense strand starting at position 620 of SEQ ID NO: 1560051
gguaaaucccuugguuccu

SEQ ID NO: 1572732 - RNA, 19 nt, Artificial Sequence
  Description of Artificial Sequence: Synthetic oligonucleotide
  Antisense strand to SEQ ID NO: 1572731
aggaaccaagggauuuacc

SEQ ID NO: 1572733 - RNA, 19 nt, Artificial Sequence
  Description of Artificial Sequence: Synthetic oligonucleotide
  Sense strand starting at position 671 of SEQ ID NO: 1560051
ggcugaagaucuuggcaga

SEQ ID NO: 1572734 - RNA, 19 nt, Artificial Sequence
  Description of Artificial Sequence: Synthetic oligonucleotide
  Antisense strand to SEQ ID NO: 1572733
ucugccaagaucuucagcc

SEQ ID NO: 1572735 - RNA, 19 nt, Artificial Sequence
  Description of Artificial Sequence: Synthetic oligonucleotide
  Sense strand starting at position 1013 of SEQ ID NO: 1560051
gccgcuguuacagaaacaa

SEQ ID NO: 1572736 - RNA, 19 nt, Artificial Sequence
  Description of Artificial Sequence: Synthetic oligonucleotide
  Antisense strand to SEQ ID NO: 1572735
uuguuucuguaacagcggc

SEQ ID NO: 1572737 - RNA, 19 nt, Artificial Sequence
  Description of Artificial Sequence: Synthetic oligonucleotide
  Sense strand starting at position 2068 of SEQ ID NO: 1560051
gauuuccucugugagaagu

SEQ ID NO: 1572738 - RNA, 19 nt, Artificial Sequence
  Description of Artificial Sequence: Synthetic oligonucleotide
  Antisense strand to SEQ ID NO: 1572737
acuucucacagaggaaauc

SEQ ID NO: 1572739 - RNA, 19 nt, Artificial Sequence
  Description of Artificial Sequence: Synthetic oligonucleotide
  Sense strand starting at position 2196 of SEQ ID NO: 1560051
cucagaugcucguucuuga

SEQ ID NO: 1572740 - RNA, 19 nt, Artificial Sequence
  Description of Artificial Sequence: Synthetic oligonucleotide
  Antisense strand to SEQ ID NO: 1572739
ucaagaacgagcaucugag

SEQ ID NO: 1572741 - RNA, 19 nt, Artificial Sequence
  Description of Artificial Sequence: Synthetic oligonucleotide
  Sense strand starting at position 2199 of SEQ ID NO: 1560051
agaugcucguucuugaaga

SEQ ID NO: 1572742 - RNA, 19 nt, Artificial Sequence
  Description of Artificial Sequence: Synthetic oligonucleotide
  Antisense strand to SEQ ID NO: 1572741
ucuucaagaacgagcaucu

SEQ ID NO: 1572743 - RNA, 19 nt, Artificial Sequence
  Description of Artificial Sequence: Synthetic oligonucleotide
  Sense strand starting at position 2200 of SEQ ID NO: 1560051
gaugcucguucuugaagag

SEQ ID NO: 1572744 - RNA, 19 nt, Artificial Sequence
  Description of Artificial Sequence: Synthetic oligonucleotide
  Antisense strand to SEQ ID NO: 1572743
cucuucaagaacgagcauc

SEQ ID NO: 1572745 - RNA, 19 nt, Artificial Sequence
  Description of Artificial Sequence: Synthetic oligonucleotide
  Sense strand starting at position 2203 of SEQ ID NO: 1560051
gcucguucuugaagaggga

SEQ ID NO: 1572746 - RNA, 19 nt, Artificial Sequence
  Description of Artificial Sequence: Synthetic oligonucleotide
  Antisense strand to SEQ ID NO: 1572745
ucccucuucaagaacgagc

SEQ ID NO: 1572747 - RNA, 19 nt, Artificial Sequence
  Description of Artificial Sequence: Synthetic oligonucleotide
  Sense strand starting at position 2405 of SEQ ID NO: 1560051
ccagcugugucacuuagca

SEQ ID NO: 1572748 - RNA, 19 nt, Artificial Sequence
  Description of Artificial Sequence: Synthetic oligonucleotide
  Antisense strand to SEQ ID NO: 1572747
ugcuaagugacacagcugg

SEQ ID NO: 1572749 - RNA, 19 nt, Artificial Sequence
  Description of Artificial Sequence: Synthetic oligonucleotide
  Sense strand starting at position 2427 of SEQ ID NO: 1560051
aggugaccucagcaaaguu

SEQ ID NO: 1572750 - RNA, 19 nt, Artificial Sequence
  Description of Artificial Sequence: Synthetic oligonucleotide
  Antisense strand to SEQ ID NO: 1572749
aacuuugcugaggucaccu

SEQ ID NO: 1572751 - RNA, 19 nt, Artificial Sequence
  Description of Artificial Sequence: Synthetic oligonucleotide
  Sense strand starting at position 2494 of SEQ ID NO: 1560051
augggauugaugugaaagu

SEQ ID NO: 1572752 - RNA, 19 nt, Artificial Sequence
  Description of Artificial Sequence: Synthetic oligonucleotide
  Antisense strand to SEQ ID NO: 1572751
acuuucacaucaaucccau

SEQ ID NO: 1572753 - RNA, 19 nt, Artificial Sequence
  Description of Artificial Sequence: Synthetic oligonucleotide
  Sense strand starting at position 2495 of SEQ ID NO: 1560051
ugggauugaugugaaaguc

SEQ ID NO: 1572754 - RNA, 19 nt, Artificial Sequence
  Description of Artificial Sequence: Synthetic oligonucleotide
  Antisense strand to SEQ ID NO: 1572753
gacuuucacaucaauccca

SEQ ID NO: 1572755 - RNA, 19 nt, Artificial Sequence
  Description of Artificial Sequence: Synthetic oligonucleotide
  Sense strand starting at position 2503 of SEQ ID NO: 1560051
augugaaagucagaggagu

SEQ ID NO: 1572756 - RNA, 19 nt, Artificial Sequence
  Description of Artificial Sequence: Synthetic oligonucleotide
  Antisense strand to SEQ ID NO: 1572755
acuccucugacuuucacau

SEQ ID NO: 1572757 - RNA, 19 nt, Artificial Sequence
  Description of Artificial Sequence: Synthetic oligonucleotide
  Sense strand starting at position 2505 of SEQ ID NO: 1560051
gugaaagucagaggaguua

SEQ ID NO: 1572758 - RNA, 19 nt, Artificial Sequence
  Description of Artificial Sequence: Synthetic oligonucleotide
  Antisense strand to SEQ ID NO: 1572757
uaacuccucugacuuucac

SEQ ID NO: 1572759 - RNA, 19 nt, Artificial Sequence
  Description of Artificial Sequence: Synthetic oligonucleotide
  Sense strand starting at position 2518 of SEQ ID NO: 1560051
gaguuaauuuccuagaaug

SEQ ID NO: 1572760 - RNA, 19 nt, Artificial Sequence
  Description of Artificial Sequence: Synthetic oligonucleotide
  Antisense strand to SEQ ID NO: 1572759
cauucuaggaaauuaacuc

SEQ ID NO: 1572761 - RNA, 19 nt, Artificial Sequence
  Description of Artificial Sequence: Synthetic oligonucleotide
  Sense strand starting at position 2533 of SEQ ID NO: 1560051
aauggugucuggcaugaag

SEQ ID NO: 1572762 - RNA, 19 nt, Artificial Sequence
  Description of Artificial Sequence: Synthetic oligonucleotide
  Antisense strand to SEQ ID NO: 1572761
cuucaugccagacaccauu

SEQ ID NO: 1572763 - RNA, 19 nt, Artificial Sequence
  Description of Artificial Sequence: Synthetic oligonucleotide
  Sense strand starting at position 2552 of SEQ ID NO: 1560051
uacugauaauguguugguu

SEQ ID NO: 1572764 - RNA, 19 nt, Artificial Sequence
  Description of Artificial Sequence: Synthetic oligonucleotide
  Antisense strand to SEQ ID NO: 1572763
aaccaacacauuaucagua

SEQ ID NO: 1572765 - RNA, 19 nt, Artificial Sequence
  Description of Artificial Sequence: Synthetic oligonucleotide
  Sense strand starting at position 3269 of SEQ ID NO: 1560051
agagcaagaucaucucaug

SEQ ID NO: 1572766 - RNA, 19 nt, Artificial Sequence
  Description of Artificial Sequence: Synthetic oligonucleotide
  Antisense strand to SEQ ID NO: 1572765
caugagaugaucuugcucu

SEQ ID NO: 1572767 - RNA, 19 nt, Artificial Sequence
  Description of Artificial Sequence: Synthetic oligonucleotide
  Sense strand starting at position 3272 of SEQ ID NO: 1560051
gcaagaucaucucauguug

SEQ ID NO: 1572768 - RNA, 19 nt, Artificial Sequence
  Description of Artificial Sequence: Synthetic oligonucleotide
  Antisense strand to SEQ ID NO: 1572767
caacaugagaugaucuugc

SEQ ID NO: 1572769 - RNA, 19 nt, Artificial Sequence
  Description of Artificial Sequence: Synthetic oligonucleotide
  Sense strand starting at position 3284 of SEQ ID NO: 1560051
cauguugugucccuuucua

SEQ ID NO: 1572770 - RNA, 19 nt, Artificial Sequence
  Description of Artificial Sequence: Synthetic oligonucleotide
  Antisense strand to SEQ ID NO: 1572769
uagaaagggacacaacaug

SEQ ID NO: 1572771 - RNA, 19 nt, Artificial Sequence
  Description of Artificial Sequence: Synthetic oligonucleotide
  Sense strand starting at position 3306 of SEQ ID NO: 1560051
gggcacaaaucccauuaau

SEQ ID NO: 1572772 - RNA, 19 nt, Artificial Sequence
  Description of Artificial Sequence: Synthetic oligonucleotide
  Antisense strand to SEQ ID NO: 1572771
auuaaugggauuugugccc

SEQ ID NO: 1572773 - RNA, 19 nt, Artificial Sequence
  Description of Artificial Sequence: Synthetic oligonucleotide
  Sense strand starting at position 3578 of SEQ ID NO: 1560051
ggcccaagaguuugaaauc

SEQ ID NO: 1572774 - RNA, 19 nt, Artificial Sequence
  Description of Artificial Sequence: Synthetic oligonucleotide
  Antisense strand to SEQ ID NO: 1572773
gauuucaaacucuugggcc

SEQ ID NO: 1572775 - RNA, 19 nt, Artificial Sequence
  Description of Artificial Sequence: Synthetic oligonucleotide
  Sense strand starting at position 1359 of SEQ ID NO: 1560052
gugugauccugaguggguu

SEQ ID NO: 1572776 - RNA, 19 nt, Artificial Sequence
  Description of Artificial Sequence: Synthetic oligonucleotide
  Antisense strand to SEQ ID NO: 1572775
aacccacucaggaucacac

SEQ ID NO: 1572777 - RNA, 19 nt, Artificial Sequence
  Description of Artificial Sequence: Synthetic oligonucleotide
  Sense strand starting at position 1531 of SEQ ID NO: 1560052
gugugauucugaguggguu

SEQ ID NO: 1572778 - RNA, 19 nt, Artificial Sequence
  Description of Artificial Sequence: Synthetic oligonucleotide
  Antisense strand to SEQ ID NO: 1572777
aacccacucagaaucacac

SEQ ID NO: 1572779 - RNA, 19 nt, Artificial Sequence
  Description of Artificial Sequence: Synthetic oligonucleotide
  Sense strand starting at position 1532 of SEQ ID NO: 1560052
ugugauucugaguggguuu

SEQ ID NO: 1572780 - RNA, 19 nt, Artificial Sequence
  Description of Artificial Sequence: Synthetic oligonucleotide
  Antisense strand to SEQ ID NO: 1572779
aaacccacucagaaucaca

SEQ ID NO: 1572781 - RNA, 19 nt, Artificial Sequence
  Description of Artificial Sequence: Synthetic oligonucleotide
  Sense strand starting at position 2165 of SEQ ID NO: 1560052
ggaggugggaucugaaagu

SEQ ID NO: 1572782 - RNA, 19 nt, Artificial Sequence
  Description of Artificial Sequence: Synthetic oligonucleotide
  Antisense strand to SEQ ID NO: 1572781
acuuucagaucccaccucc

SEQ ID NO: 1572783 - RNA, 19 nt, Artificial Sequence
  Description of Artificial Sequence: Synthetic oligonucleotide
  Sense strand starting at position 2336 of SEQ ID NO: 1560052
ggcggcugucccuggagaa

SEQ ID NO: 1572784 - RNA, 19 nt, Artificial Sequence
  Description of Artificial Sequence: Synthetic oligonucleotide
  Antisense strand to SEQ ID NO: 1572783
uucuccagggacagccgcc

SEQ ID NO: 1572785 - RNA, 19 nt, Artificial Sequence
  Description of Artificial Sequence: Synthetic oligonucleotide
  Sense strand starting at position 2537 of SEQ ID NO: 1560052
ccgugcuccggcgaagaaa

SEQ ID NO: 1572786 - RNA, 19 nt, Artificial Sequence
  Description of Artificial Sequence: Synthetic oligonucleotide
  Antisense strand to SEQ ID NO: 1572785
uuucuucgccggagcacgg

SEQ ID NO: 1572787 - RNA, 19 nt, Artificial Sequence
  Description of Artificial Sequence: Synthetic oligonucleotide
  Sense strand starting at position 2962 of SEQ ID NO: 1560052
gcugcaaggauugagugua

SEQ ID NO: 1572788 - RNA, 19 nt, Artificial Sequence
  Description of Artificial Sequence: Synthetic oligonucleotide
  Antisense strand to SEQ ID NO: 1572787
uacacucaauccuugcagc

SEQ ID NO: 1572789 - RNA, 19 nt, Artificial Sequence
  Description of Artificial Sequence: Synthetic oligonucleotide
  Sense strand starting at position 3000 of SEQ ID NO: 1560052
ucccguuucccuuagggaa

SEQ ID NO: 1572790 - RNA, 19 nt, Artificial Sequence
  Description of Artificial Sequence: Synthetic oligonucleotide
  Antisense strand to SEQ ID NO: 1572789
uucccuaagggaaacggga

SEQ ID NO: 1572791 - RNA, 19 nt, Artificial Sequence
  Description of Artificial Sequence: Synthetic oligonucleotide
  Sense strand starting at position 3166 of SEQ ID NO: 1560052
uuaugaacuucccuugagu

SEQ ID NO: 1572792 - RNA, 19 nt, Artificial Sequence
  Description of Artificial Sequence: Synthetic oligonucleotide
  Antisense strand to SEQ ID NO: 1572791
acucaagggaaguucauaa

SEQ ID NO: 1572793 - RNA, 19 nt, Artificial Sequence
  Description of Artificial Sequence: Synthetic oligonucleotide
  Sense strand starting at position 3763 of SEQ ID NO: 1560052
ccaggaguuugguaccauc

SEQ ID NO: 1572794 - RNA, 19 nt, Artificial Sequence
  Description of Artificial Sequence: Synthetic oligonucleotide
  Antisense strand to SEQ ID NO: 1572793
gaugguaccaaacuccugg

SEQ ID NO: 1572795 - RNA, 19 nt, Artificial Sequence
  Description of Artificial Sequence: Synthetic oligonucleotide
  Sense strand starting at position 330 of SEQ ID NO: 1560053
ggcucccuguaguugaauu

SEQ ID NO: 1572796 - RNA, 19 nt, Artificial Sequence
  Description of Artificial Sequence: Synthetic oligonucleotide
  Antisense strand to SEQ ID NO: 1572795
aauucaacuacagggagcc

SEQ ID NO: 1572797 - RNA, 19 nt, Artificial Sequence
  Description of Artificial Sequence: Synthetic oligonucleotide
  Sense strand starting at position 984 of SEQ ID NO: 1560053
agcugaguccugaguggug

SEQ ID NO: 1572798 - RNA, 19 nt, Artificial Sequence
  Description of Artificial Sequence: Synthetic oligonucleotide
  Antisense strand to SEQ ID NO: 1572797
caccacucaggacucagcu

SEQ ID NO: 1572799 - RNA, 19 nt, Artificial Sequence
  Description of Artificial Sequence: Synthetic oligonucleotide
  Sense strand starting at position 1092 of SEQ ID NO: 1560053
guguuuaaggaggagcaaa

SEQ ID NO: 1572800 - RNA, 19 nt, Artificial Sequence
  Description of Artificial Sequence: Synthetic oligonucleotide
  Antisense strand to SEQ ID NO: 1572799
uuugcuccuccuuaaacac

SEQ ID NO: 1572801 - RNA, 19 nt, Artificial Sequence
  Description of Artificial Sequence: Synthetic oligonucleotide
  Sense strand starting at position 1380 of SEQ ID NO: 1560053
ccaggcuugggugaagaau

SEQ ID NO: 1572802 - RNA, 19 nt, Artificial Sequence
  Description of Artificial Sequence: Synthetic oligonucleotide
  Antisense strand to SEQ ID NO: 1572801
auucuucacccaagccugg

SEQ ID NO: 1572803 - RNA, 19 nt, Artificial Sequence
  Description of Artificial Sequence: Synthetic oligonucleotide
  Sense strand starting at position 1465 of SEQ ID NO: 1560053
acaggcuucugagcagagu

SEQ ID NO: 1572804 - RNA, 19 nt, Artificial Sequence
  Description of Artificial Sequence: Synthetic oligonucleotide
  Antisense strand to SEQ ID NO: 1572803
acucugcucagaagccugu

SEQ ID NO: 1572805 - RNA, 19 nt, Artificial Sequence
  Description of Artificial Sequence: Synthetic oligonucleotide
  Sense strand starting at position 1657 of SEQ ID NO: 1560053
gggugauauuucugauauu

SEQ ID NO: 1572806 - RNA, 19 nt, Artificial Sequence
  Description of Artificial Sequence: Synthetic oligonucleotide
  Antisense strand to SEQ ID NO: 1572805
aauaucagaaauaucaccc

SEQ ID NO: 1572807 - RNA, 19 nt, Artificial Sequence
  Description of Artificial Sequence: Synthetic oligonucleotide
  Sense strand starting at position 1658 of SEQ ID NO: 1560053
ggugauauuucugauauuc

SEQ ID NO: 1572808 - RNA, 19 nt, Artificial Sequence
  Description of Artificial Sequence: Synthetic oligonucleotide
  Antisense strand to SEQ ID NO: 1572807
gaauaucagaaauaucacc

SEQ ID NO: 1572809 - RNA, 19 nt, Artificial Sequence
  Description of Artificial Sequence: Synthetic oligonucleotide
  Sense strand starting at position 1727 of SEQ ID NO: 1560053
gagaguuuccaaggcucag

SEQ ID NO: 1572810 - RNA, 19 nt, Artificial Sequence
  Description of Artificial Sequence: Synthetic oligonucleotide
  Antisense strand to SEQ ID NO: 1572809
cugagccuuggaaacucuc

SEQ ID NO: 1572811 - RNA, 19 nt, Artificial Sequence
  Description of Artificial Sequence: Synthetic oligonucleotide
  Sense strand starting at position 2026 of SEQ ID NO: 1560053
ugauucucgagcugagagu

SEQ ID NO: 1572812 - RNA, 19 nt, Artificial Sequence
  Description of Artificial Sequence: Synthetic oligonucleotide
  Antisense strand to SEQ ID NO: 1572811
acucucagcucgagaauca

SEQ ID NO: 1572813 - RNA, 19 nt, Artificial Sequence
  Description of Artificial Sequence: Synthetic oligonucleotide
  Sense strand starting at position 2027 of SEQ ID NO: 1560053
gauucucgagcugagaguu

SEQ ID NO: 1572814 - RNA, 19 nt, Artificial Sequence
  Description of Artificial Sequence: Synthetic oligonucleotide
  Antisense strand to SEQ ID NO: 1572813
aacucucagcucgagaauc

SEQ ID NO: 1572815 - RNA, 19 nt, Artificial Sequence
  Description of Artificial Sequence: Synthetic oligonucleotide
  Sense strand starting at position 2035 of SEQ ID NO: 1560053
agcugagaguuuccucacu

SEQ ID NO: 1572816 - RNA, 19 nt, Artificial Sequence
  Description of Artificial Sequence: Synthetic oligonucleotide
  Antisense strand to SEQ ID NO: 1572815
agugaggaaacucucagcu

SEQ ID NO: 1572817 - RNA, 19 nt, Artificial Sequence
  Description of Artificial Sequence: Synthetic oligonucleotide
  Sense strand starting at position 2152 of SEQ ID NO: 1560053
ugcgguucugcagauuaga

SEQ ID NO: 1572818 - RNA, 19 nt, Artificial Sequence
  Description of Artificial Sequence: Synthetic oligonucleotide
  Antisense strand to SEQ ID NO: 1572817
ucuaaucugcagaaccgca

SEQ ID NO: 1572819 - RNA, 19 nt, Artificial Sequence
  Description of Artificial Sequence: Synthetic oligonucleotide
  Sense strand starting at position 2186 of SEQ ID NO: 1560053
ugagauguuuaggugguuu

SEQ ID NO: 1572820 - RNA, 19 nt, Artificial Sequence
  Description of Artificial Sequence: Synthetic oligonucleotide
  Antisense strand to SEQ ID NO: 1572819
aaaccaccuaaacaucuca

SEQ ID NO: 1572821 - RNA, 19 nt, Artificial Sequence
  Description of Artificial Sequence: Synthetic oligonucleotide
  Sense strand starting at position 2720 of SEQ ID NO: 1560053
aguauacugcucugcagaa

SEQ ID NO: 1572822 - RNA, 19 nt, Artificial Sequence
  Description of Artificial Sequence: Synthetic oligonucleotide
  Antisense strand to SEQ ID NO: 1572821
uucugcagagcaguauacu

SEQ ID NO: 1572823 - RNA, 19 nt, Artificial Sequence
  Description of Artificial Sequence: Synthetic oligonucleotide
  Sense strand starting at position 2721 of SEQ ID NO: 1560053
guauacugcucugcagaau

SEQ ID NO: 1572824 - RNA, 19 nt, Artificial Sequence
  Description of Artificial Sequence: Synthetic oligonucleotide
  Antisense strand to SEQ ID NO: 1572823
auucugcagagcaguauac

SEQ ID NO: 1572825 - RNA, 19 nt, Artificial Sequence
  Description of Artificial Sequence: Synthetic oligonucleotide
  Sense strand starting at position 2972 of SEQ ID NO: 1560053
ggagauuguggugaguuga

SEQ ID NO: 1572826 - RNA, 19 nt, Artificial Sequence
  Description of Artificial Sequence: Synthetic oligonucleotide
  Antisense strand to SEQ ID NO: 1572825
ucaacucaccacaaucucc

SEQ ID NO: 1572827 - RNA, 19 nt, Artificial Sequence
  Description of Artificial Sequence: Synthetic oligonucleotide
  Sense strand starting at position 3083 of SEQ ID NO: 1560053
aagaacuuguaguaggaaa

SEQ ID NO: 1572828 - RNA, 19 nt, Artificial Sequence
  Description of Artificial Sequence: Synthetic oligonucleotide
  Antisense strand to SEQ ID NO: 1572827
uuuccuacuacaaguucuu

SEQ ID NO: 1572829 - RNA, 19 nt, Artificial Sequence
  Description of Artificial Sequence: Synthetic oligonucleotide
  Sense strand starting at position 3085 of SEQ ID NO: 1560053
gaacuuguaguaggaaaug

SEQ ID NO: 1572830 - RNA, 19 nt, Artificial Sequence
  Description of Artificial Sequence: Synthetic oligonucleotide
  Antisense strand to SEQ ID NO: 1572829
cauuuccuacuacaaguuc

SEQ ID NO: 1572831 - RNA, 19 nt, Artificial Sequence
  Description of Artificial Sequence: Synthetic oligonucleotide
  Sense strand starting at position 3157 of SEQ ID NO: 1560053
gacucagaaguuugaucag

SEQ ID NO: 1572832 - RNA, 19 nt, Artificial Sequence
  Description of Artificial Sequence: Synthetic oligonucleotide
  Antisense strand to SEQ ID NO: 1572831
cugaucaaacuucugaguc

SEQ ID NO: 1572833 - RNA, 19 nt, Artificial Sequence
  Description of Artificial Sequence: Synthetic oligonucleotide
  Sense strand starting at position 3160 of SEQ ID NO: 1560053
ucagaaguuugaucagcca

SEQ ID NO: 1572834 - RNA, 19 nt, Artificial Sequence
  Description of Artificial Sequence: Synthetic oligonucleotide
  Antisense strand to SEQ ID NO: 1572833
uggcugaucaaacuucuga

SEQ ID NO: 1572835 - RNA, 19 nt, Artificial Sequence
  Description of Artificial Sequence: Synthetic oligonucleotide
  Sense strand starting at position 3163 of SEQ ID NO: 1560053
gaaguuugaucagccacau

SEQ ID NO: 1572836 - RNA, 19 nt, Artificial Sequence
  Description of Artificial Sequence: Synthetic oligonucleotide
  Antisense strand to SEQ ID NO: 1572835
auguggcugaucaaacuuc

SEQ ID NO: 1572837 - RNA, 19 nt, Artificial Sequence
  Description of Artificial Sequence: Synthetic oligonucleotide
  Sense strand starting at position 3210 of SEQ ID NO: 1560053
cuggauauaguuugugaua

SEQ ID NO: 1572838 - RNA, 19 nt, Artificial Sequence
  Description of Artificial Sequence: Synthetic oligonucleotide
  Antisense strand to SEQ ID NO: 1572837
uaucacaaacuauauccag

SEQ ID NO: 1572839 - RNA, 19 nt, Artificial Sequence
  Description of Artificial Sequence: Synthetic oligonucleotide
  Sense strand starting at position 3211 of SEQ ID NO: 1560053
uggauauaguuugugauau

SEQ ID NO: 1572840 - RNA, 19 nt, Artificial Sequence
  Description of Artificial Sequence: Synthetic oligonucleotide
  Antisense strand to SEQ ID NO: 1572839
auaucacaaacuauaucca

SEQ ID NO: 1572841 - RNA, 19 nt, Artificial Sequence
  Description of Artificial Sequence: Synthetic oligonucleotide
  Sense strand starting at position 3254 of SEQ ID NO: 1560053
guuuacagcccagaaacuu

SEQ ID NO: 1572842 - RNA, 19 nt, Artificial Sequence
  Description of Artificial Sequence: Synthetic oligonucleotide
  Antisense strand to SEQ ID NO: 1572841
aaguuucugggcuguaaac

SEQ ID NO: 1572843 - RNA, 19 nt, Artificial Sequence
  Description of Artificial Sequence: Synthetic oligonucleotide
  Sense strand starting at position 3367 of SEQ ID NO: 1560053
uguggcauguggucaucaa

SEQ ID NO: 1572844 - RNA, 19 nt, Artificial Sequence
  Description of Artificial Sequence: Synthetic oligonucleotide
  Antisense strand to SEQ ID NO: 1572843
uugaugaccacaugccaca

SEQ ID NO: 1572845 - RNA, 19 nt, Artificial Sequence
  Description of Artificial Sequence: Synthetic oligonucleotide
  Sense strand starting at position 3368 of SEQ ID NO: 1560053
guggcauguggucaucaaa

SEQ ID NO: 1572846 - RNA, 19 nt, Artificial Sequence
  Description of Artificial Sequence: Synthetic oligonucleotide
  Antisense strand to SEQ ID NO: 1572845
uuugaugaccacaugccac

SEQ ID NO: 1572847 - RNA, 19 nt, Artificial Sequence
  Description of Artificial Sequence: Synthetic oligonucleotide
  Sense strand starting at position 3396 of SEQ ID NO: 1560053
gcgucauuagaguaaacuu

SEQ ID NO: 1572848 - RNA, 19 nt, Artificial Sequence
  Description of Artificial Sequence: Synthetic oligonucleotide
  Antisense strand to SEQ ID NO: 1572847
aaguuuacucuaaugacgc

SEQ ID NO: 1572849 - RNA, 19 nt, Artificial Sequence
  Description of Artificial Sequence: Synthetic oligonucleotide
  Sense strand starting at position 3489 of SEQ ID NO: 1560053
uucugucaaccuggucaaa

SEQ ID NO: 1572850 - RNA, 19 nt, Artificial Sequence
  Description of Artificial Sequence: Synthetic oligonucleotide
  Antisense strand to SEQ ID NO: 1572849
uuugaccagguugacagaa

SEQ ID NO: 1572851 - RNA, 19 nt, Artificial Sequence
  Description of Artificial Sequence: Synthetic oligonucleotide
  Sense strand starting at position 3491 of SEQ ID NO: 1560053
cugucaaccuggucaaauc

SEQ ID NO: 1572852 - RNA, 19 nt, Artificial Sequence
  Description of Artificial Sequence: Synthetic oligonucleotide
  Antisense strand to SEQ ID NO: 1572851
gauuugaccagguugacag

SEQ ID NO: 1572853 - RNA, 19 nt, Artificial Sequence
  Description of Artificial Sequence: Synthetic oligonucleotide
  Sense strand starting at position 3601 of SEQ ID NO: 1560053
cccacagugcccuguaaua

SEQ ID NO: 1572854 - RNA, 19 nt, Artificial Sequence
  Description of Artificial Sequence: Synthetic oligonucleotide
  Antisense strand to SEQ ID NO: 1572853
uauuacagggcacuguggg

SEQ ID NO: 1572855 - RNA, 19 nt, Artificial Sequence
  Description of Artificial Sequence: Synthetic oligonucleotide
  Sense strand starting at position 3669 of SEQ ID NO: 1560053
ucaucagaguugucaaaug

SEQ ID NO: 1572856 - RNA, 19 nt, Artificial Sequence
  Description of Artificial Sequence: Synthetic oligonucleotide
  Antisense strand to SEQ ID NO: 1572855
cauuugacaacucugauga

SEQ ID NO: 1572857 - RNA, 19 nt, Artificial Sequence
  Description of Artificial Sequence: Synthetic oligonucleotide
  Sense strand starting at position 3674 of SEQ ID NO: 1560053
agaguugucaaauguauug

SEQ ID NO: 1572858 - RNA, 19 nt, Artificial Sequence
  Description of Artificial Sequence: Synthetic oligonucleotide
  Antisense strand to SEQ ID NO: 1572857
caauacauuugacaacucu

SEQ ID NO: 1572859 - RNA, 19 nt, Artificial Sequence
  Description of Artificial Sequence: Synthetic oligonucleotide
  Sense strand starting at position 3684 of SEQ ID NO: 1560053
aauguauugguguaaaguu

SEQ ID NO: 1572860 - RNA, 19 nt, Artificial Sequence
  Description of Artificial Sequence: Synthetic oligonucleotide
  Antisense strand to SEQ ID NO: 1572859
aacuuuacaccaauacauu

SEQ ID NO: 1572861 - RNA, 19 nt, Artificial Sequence
  Description of Artificial Sequence: Synthetic oligonucleotide
  Sense strand starting at position 3771 of SEQ ID NO: 1560053
acacauaaauuagugaagu

SEQ ID NO: 1572862 - RNA, 19 nt, Artificial Sequence
  Description of Artificial Sequence: Synthetic oligonucleotide
  Antisense strand to SEQ ID NO: 1572861
acuucacuaauuuaugugu

SEQ ID NO: 1572863 - RNA, 19 nt, Artificial Sequence
  Description of Artificial Sequence: Synthetic oligonucleotide
  Sense strand starting at position 3782 of SEQ ID NO: 1560053
agugaagucuccuugucuc

SEQ ID NO: 1572864 - RNA, 19 nt, Artificial Sequence
  Description of Artificial Sequence: Synthetic oligonucleotide
  Antisense strand to SEQ ID NO: 1572863
gagacaaggagacuucacu

SEQ ID NO: 1572865 - RNA, 19 nt, Artificial Sequence
  Description of Artificial Sequence: Synthetic oligonucleotide
  Sense strand starting at position 3804 of SEQ ID NO: 1560053
ucggucuuccuaggagcua

SEQ ID NO: 1572866 - RNA, 19 nt, Artificial Sequence
  Description of Artificial Sequence: Synthetic oligonucleotide
  Antisense strand to SEQ ID NO: 1572865
uagcuccuaggaagaccga

SEQ ID NO: 1572867 - RNA, 19 nt, Artificial Sequence
  Description of Artificial Sequence: Synthetic oligonucleotide
  Sense strand starting at position 3815 of SEQ ID NO: 1560053
aggagcuaaucauuguuau

SEQ ID NO: 1572868 - RNA, 19 nt, Artificial Sequence
  Description of Artificial Sequence: Synthetic oligonucleotide
  Antisense strand to SEQ ID NO: 1572867
auaacaaugauuagcuccu

SEQ ID NO: 1572869 - RNA, 19 nt, Artificial Sequence
  Description of Artificial Sequence: Synthetic oligonucleotide
  Sense strand starting at position 3816 of SEQ ID NO: 1560053
ggagcuaaucauuguuauu

SEQ ID NO: 1572870 - RNA, 19 nt, Artificial Sequence
  Description of Artificial Sequence: Synthetic oligonucleotide
  Antisense strand to SEQ ID NO: 1572869
aauaacaaugauuagcucc

SEQ ID NO: 1572871 - RNA, 19 nt, Artificial Sequence
  Description of Artificial Sequence: Synthetic oligonucleotide
  Sense strand starting at position 3818 of SEQ ID NO: 1560053
agcuaaucauuguuauuga

SEQ ID NO: 1572872 - RNA, 19 nt, Artificial Sequence
  Description of Artificial Sequence: Synthetic oligonucleotide
  Antisense strand to SEQ ID NO: 1572871
ucaauaacaaugauuagcu

SEQ ID NO: 1572873 - RNA, 19 nt, Artificial Sequence
  Description of Artificial Sequence: Synthetic oligonucleotide
  Sense strand starting at position 3852 of SEQ ID NO: 1560053
acaguuuggauuuguuguu

SEQ ID NO: 1572874 - RNA, 19 nt, Artificial Sequence
  Description of Artificial Sequence: Synthetic oligonucleotide
  Antisense strand to SEQ ID NO: 1572873
aacaacaaauccaaacugu

SEQ ID NO: 1572875 - RNA, 19 nt, Artificial Sequence
  Description of Artificial Sequence: Synthetic oligonucleotide
  Sense strand starting at position 145 of SEQ ID NO: 1560054
uuaagauuauuggacuuga

SEQ ID NO: 1572876 - RNA, 19 nt, Artificial Sequence
  Description of Artificial Sequence: Synthetic oligonucleotide
  Antisense strand to SEQ ID NO: 1572875
ucaaguccaauaaucuuaa

SEQ ID NO: 1572877 - RNA, 19 nt, Artificial Sequence
  Description of Artificial Sequence: Synthetic oligonucleotide
  Sense strand starting at position 232 of SEQ ID NO: 1560054
gccugaccuggccaaugau

SEQ ID NO: 1572878 - RNA, 19 nt, Artificial Sequence
  Description of Artificial Sequence: Synthetic oligonucleotide
  Antisense strand to SEQ ID NO: 1572877
aucauuggccaggucaggc

SEQ ID NO: 1572879 - RNA, 19 nt, Artificial Sequence
  Description of Artificial Sequence: Synthetic oligonucleotide
  Sense strand starting at position 292 of SEQ ID NO: 1560054
gagacaaaucaauguucga

SEQ ID NO: 1572880 - RNA, 19 nt, Artificial Sequence
  Description of Artificial Sequence: Synthetic oligonucleotide
  Antisense strand to SEQ ID NO: 1572879
ucgaacauugauuugucuc

SEQ ID NO: 1572881 - RNA, 19 nt, Artificial Sequence
  Description of Artificial Sequence: Synthetic oligonucleotide
  Sense strand starting at position 295 of SEQ ID NO: 1560054
acaaaucaauguucgaguu

SEQ ID NO: 1572882 - RNA, 19 nt, Artificial Sequence
  Description of Artificial Sequence: Synthetic oligonucleotide
  Antisense strand to SEQ ID NO: 1572881
aacucgaacauugauuugu

SEQ ID NO: 1572883 - RNA, 19 nt, Artificial Sequence
  Description of Artificial Sequence: Synthetic oligonucleotide
  Sense strand starting at position 296 of SEQ ID NO: 1560054
caaaucaauguucgaguuu

SEQ ID NO: 1572884 - RNA, 19 nt, Artificial Sequence
  Description of Artificial Sequence: Synthetic oligonucleotide
  Antisense strand to SEQ ID NO: 1572883
aaacucgaacauugauuug

SEQ ID NO: 1572885 - RNA, 19 nt, Artificial Sequence
  Description of Artificial Sequence: Synthetic oligonucleotide
  Sense strand starting at position 303 of SEQ ID NO: 1560054
auguucgaguuucuuuaau

SEQ ID NO: 1572886 - RNA, 19 nt, Artificial Sequence
  Description of Artificial Sequence: Synthetic oligonucleotide
  Antisense strand to SEQ ID NO: 1572885
auuaaagaaacucgaacau

SEQ ID NO: 1572887 - RNA, 19 nt, Artificial Sequence
  Description of Artificial Sequence: Synthetic oligonucleotide
  Sense strand starting at position 305 of SEQ ID NO: 1560054
guucgaguuucuuuaaucc

SEQ ID NO: 1572888 - RNA, 19 nt, Artificial Sequence
  Description of Artificial Sequence: Synthetic oligonucleotide
  Antisense strand to SEQ ID NO: 1572887
ggauuaaagaaacucgaac

SEQ ID NO: 1572889 - RNA, 19 nt, Artificial Sequence
  Description of Artificial Sequence: Synthetic oligonucleotide
  Sense strand starting at position 818 of SEQ ID NO: 1560054
uuccauaagcuuuggauga

SEQ ID NO: 1572890 - RNA, 19 nt, Artificial Sequence
  Description of Artificial Sequence: Synthetic oligonucleotide
  Antisense strand to SEQ ID NO: 1572889
ucauccaaagcuuauggaa

SEQ ID NO: 1572891 - RNA, 19 nt, Artificial Sequence
  Description of Artificial Sequence: Synthetic oligonucleotide
  Sense strand starting at position 820 of SEQ ID NO: 1560054
ccauaagcuuuggaugaaa

SEQ ID NO: 1572892 - RNA, 19 nt, Artificial Sequence
  Description of Artificial Sequence: Synthetic oligonucleotide
  Antisense strand to SEQ ID NO: 1572891
uuucauccaaagcuuaugg

SEQ ID NO: 1572893 - RNA, 19 nt, Artificial Sequence
  Description of Artificial Sequence: Synthetic oligonucleotide
  Sense strand starting at position 842 of SEQ ID NO: 1560054
uggcaauaauaggcagauu

SEQ ID NO: 1572894 - RNA, 19 nt, Artificial Sequence
  Description of Artificial Sequence: Synthetic oligonucleotide
  Antisense strand to SEQ ID NO: 1572893
aaucugccuauuauugcca

SEQ ID NO: 1572895 - RNA, 19 nt, Artificial Sequence
  Description of Artificial Sequence: Synthetic oligonucleotide
  Sense strand starting at position 1019 of SEQ ID NO: 1560054
cauggauggucuccaccua

SEQ ID NO: 1572896 - RNA, 19 nt, Artificial Sequence
  Description of Artificial Sequence: Synthetic oligonucleotide
  Antisense strand to SEQ ID NO: 1572895
uagguggagaccauccaug

SEQ ID NO: 1572897 - RNA, 19 nt, Artificial Sequence
  Description of Artificial Sequence: Synthetic oligonucleotide
  Sense strand starting at position 1606 of SEQ ID NO: 1560054
gaggcacgaucagauuuaa

SEQ ID NO: 1572898 - RNA, 19 nt, Artificial Sequence
  Description of Artificial Sequence: Synthetic oligonucleotide
  Antisense strand to SEQ ID NO: 1572897
uuaaaucugaucgugccuc

SEQ ID NO: 1572899 - RNA, 19 nt, Artificial Sequence
  Description of Artificial Sequence: Synthetic oligonucleotide
  Sense strand starting at position 1743 of SEQ ID NO: 1560054
gcgagaucccguuugccaa

SEQ ID NO: 1572900 - RNA, 19 nt, Artificial Sequence
  Description of Artificial Sequence: Synthetic oligonucleotide
  Antisense strand to SEQ ID NO: 1572899
uuggcaaacgggaucucgc

SEQ ID NO: 1572901 - RNA, 19 nt, Artificial Sequence
  Description of Artificial Sequence: Synthetic oligonucleotide
  Sense strand starting at position 2038 of SEQ ID NO: 1560054
ggcuguggcgucagaaaug

SEQ ID NO: 1572902 - RNA, 19 nt, Artificial Sequence
  Description of Artificial Sequence: Synthetic oligonucleotide
  Antisense strand to SEQ ID NO: 1572901
cauuucugacgccacagcc

SEQ ID NO: 1572903 - RNA, 19 nt, Artificial Sequence
  Description of Artificial Sequence: Synthetic oligonucleotide
  Sense strand starting at position 2047 of SEQ ID NO: 1560054
gucagaaauggacgucuaa

SEQ ID NO: 1572904 - RNA, 19 nt, Artificial Sequence
  Description of Artificial Sequence: Synthetic oligonucleotide
  Antisense strand to SEQ ID NO: 1572903
uuagacguccauuucugac

SEQ ID NO: 1572905 - RNA, 19 nt, Artificial Sequence
  Description of Artificial Sequence: Synthetic oligonucleotide
  Sense strand starting at position 2056 of SEQ ID NO: 1560054
ggacgucuaaccugaccaa

SEQ ID NO: 1572906 - RNA, 19 nt, Artificial Sequence
  Description of Artificial Sequence: Synthetic oligonucleotide
  Antisense strand to SEQ ID NO: 1572905
uuggucagguuagacgucc

SEQ ID NO: 1572907 - RNA, 19 nt, Artificial Sequence
  Description of Artificial Sequence: Synthetic oligonucleotide
  Sense strand starting at position 2057 of SEQ ID NO: 1560054
gacgucuaaccugaccaau

SEQ ID NO: 1572908 - RNA, 19 nt, Artificial Sequence
  Description of Artificial Sequence: Synthetic oligonucleotide
  Antisense strand to SEQ ID NO: 1572907
auuggucagguuagacguc

SEQ ID NO: 1572909 - RNA, 19 nt, Artificial Sequence
  Description of Artificial Sequence: Synthetic oligonucleotide
  Sense strand starting at position 2059 of SEQ ID NO: 1560054
cgucuaaccugaccaauaa

SEQ ID NO: 1572910 - RNA, 19 nt, Artificial Sequence
  Description of Artificial Sequence: Synthetic oligonucleotide
  Antisense strand to SEQ ID NO: 1572909
uuauuggucagguuagacg

SEQ ID NO: 1572911 - RNA, 19 nt, Artificial Sequence
  Description of Artificial Sequence: Synthetic oligonucleotide
  Sense strand starting at position 2157 of SEQ ID NO: 1560054
gaaguaaccuuagcucuga

SEQ ID NO: 1572912 - RNA, 19 nt, Artificial Sequence
  Description of Artificial Sequence: Synthetic oligonucleotide
  Antisense strand to SEQ ID NO: 1572911
ucagagcuaagguuacuuc

SEQ ID NO: 1572913 - RNA, 19 nt, Artificial Sequence
  Description of Artificial Sequence: Synthetic oligonucleotide
  Sense strand starting at position 2271 of SEQ ID NO: 1560054
gggaguggucccuggcugu

SEQ ID NO: 1572914 - RNA, 19 nt, Artificial Sequence
  Description of Artificial Sequence: Synthetic oligonucleotide
  Antisense strand to SEQ ID NO: 1572913
acagccagggaccacuccc

SEQ ID NO: 1572915 - RNA, 19 nt, Artificial Sequence
  Description of Artificial Sequence: Synthetic oligonucleotide
  Sense strand starting at position 2287 of SEQ ID NO: 1560054
uguggauagaucugcugau

SEQ ID NO: 1572916 - RNA, 19 nt, Artificial Sequence
  Description of Artificial Sequence: Synthetic oligonucleotide
  Antisense strand to SEQ ID NO: 1572915
aucagcagaucuauccaca

SEQ ID NO: 1572917 - RNA, 19 nt, Artificial Sequence
  Description of Artificial Sequence: Synthetic oligonucleotide
  Sense strand starting at position 2288 of SEQ ID NO: 1560054
guggauagaucugcugaug

SEQ ID NO: 1572918 - RNA, 19 nt, Artificial Sequence
  Description of Artificial Sequence: Synthetic oligonucleotide
  Antisense strand to SEQ ID NO: 1572917
caucagcagaucuauccac

SEQ ID NO: 1572919 - RNA, 19 nt, Artificial Sequence
  Description of Artificial Sequence: Synthetic oligonucleotide
  Sense strand starting at position 2291 of SEQ ID NO: 1560054
gauagaucugcugaugagu

SEQ ID NO: 1572920 - RNA, 19 nt, Artificial Sequence
  Description of Artificial Sequence: Synthetic oligonucleotide
  Antisense strand to SEQ ID NO: 1572919
acucaucagcagaucuauc

SEQ ID NO: 1572921 - RNA, 19 nt, Artificial Sequence
  Description of Artificial Sequence: Synthetic oligonucleotide
  Sense strand starting at position 2372 of SEQ ID NO: 1560054
ggagucauuucguaaguag

SEQ ID NO: 1572922 - RNA, 19 nt, Artificial Sequence
  Description of Artificial Sequence: Synthetic oligonucleotide
  Antisense strand to SEQ ID NO: 1572921
cuacuuacgaaaugacucc

SEQ ID NO: 1572923 - RNA, 19 nt, Artificial Sequence
  Description of Artificial Sequence: Synthetic oligonucleotide
  Sense strand starting at position 2375 of SEQ ID NO: 1560054
gucauuucguaaguagaug

SEQ ID NO: 1572924 - RNA, 19 nt, Artificial Sequence
  Description of Artificial Sequence: Synthetic oligonucleotide
  Antisense strand to SEQ ID NO: 1572923
caucuacuuacgaaaugac

SEQ ID NO: 1572925 - RNA, 19 nt, Artificial Sequence
  Description of Artificial Sequence: Synthetic oligonucleotide
  Sense strand starting at position 2463 of SEQ ID NO: 1560054
uggccugagauccagucaa

SEQ ID NO: 1572926 - RNA, 19 nt, Artificial Sequence
  Description of Artificial Sequence: Synthetic oligonucleotide
  Antisense strand to SEQ ID NO: 1572925
uugacuggaucucaggcca

SEQ ID NO: 1572927 - RNA, 19 nt, Artificial Sequence
  Description of Artificial Sequence: Synthetic oligonucleotide
  Sense strand starting at position 2736 of SEQ ID NO: 1560054
ggaucuugcuauguuccua

SEQ ID NO: 1572928 - RNA, 19 nt, Artificial Sequence
  Description of Artificial Sequence: Synthetic oligonucleotide
  Antisense strand to SEQ ID NO: 1572927
uaggaacauagcaagaucc

SEQ ID NO: 1572929 - RNA, 19 nt, Artificial Sequence
  Description of Artificial Sequence: Synthetic oligonucleotide
  Sense strand starting at position 2902 of SEQ ID NO: 1560054
gaguuaacuccuggacgac

SEQ ID NO: 1572930 - RNA, 19 nt, Artificial Sequence
  Description of Artificial Sequence: Synthetic oligonucleotide
  Antisense strand to SEQ ID NO: 1572929
gucguccaggaguuaacuc

SEQ ID NO: 1572931 - RNA, 19 nt, Artificial Sequence
  Description of Artificial Sequence: Synthetic oligonucleotide
  Sense strand starting at position 2928 of SEQ ID NO: 1560054
ugcugcacugcuggauaua

SEQ ID NO: 1572932 - RNA, 19 nt, Artificial Sequence
  Description of Artificial Sequence: Synthetic oligonucleotide
  Antisense strand to SEQ ID NO: 1572931
uauauccagcagugcagca

SEQ ID NO: 1572933 - RNA, 19 nt, Artificial Sequence
  Description of Artificial Sequence: Synthetic oligonucleotide
  Sense strand starting at position 3087 of SEQ ID NO: 1560054
ggcagauccucacugguuu

SEQ ID NO: 1572934 - RNA, 19 nt, Artificial Sequence
  Description of Artificial Sequence: Synthetic oligonucleotide
  Antisense strand to SEQ ID NO: 1572933
aaaccagugaggaucugcc

SEQ ID NO: 1572935 - RNA, 19 nt, Artificial Sequence
  Description of Artificial Sequence: Synthetic oligonucleotide
  Sense strand starting at position 3384 of SEQ ID NO: 1560054
agucucaaugccuggcuaa

SEQ ID NO: 1572936 - RNA, 19 nt, Artificial Sequence
  Description of Artificial Sequence: Synthetic oligonucleotide
  Antisense strand to SEQ ID NO: 1572935
uuagccaggcauugagacu

SEQ ID NO: 1572937 - RNA, 19 nt, Artificial Sequence
  Description of Artificial Sequence: Synthetic oligonucleotide
  Sense strand starting at position 3385 of SEQ ID NO: 1560054
gucucaaugccuggcuaau

SEQ ID NO: 1572938 - RNA, 19 nt, Artificial Sequence
  Description of Artificial Sequence: Synthetic oligonucleotide
  Antisense strand to SEQ ID NO: 1572937
auuagccaggcauugagac

SEQ ID NO: 1572939 - RNA, 19 nt, Artificial Sequence
  Description of Artificial Sequence: Synthetic oligonucleotide
  Sense strand starting at position 3608 of SEQ ID NO: 1560054
gugggauaaucgcuuaaac

SEQ ID NO: 1572940 - RNA, 19 nt, Artificial Sequence
  Description of Artificial Sequence: Synthetic oligonucleotide
  Antisense strand to SEQ ID NO: 1572939
guuuaagcgauuaucccac

SEQ ID NO: 1572941 - RNA, 19 nt, Artificial Sequence
  Description of Artificial Sequence: Synthetic oligonucleotide
  Sense strand starting at position 3610 of SEQ ID NO: 1560054
gggauaaucgcuuaaaccc

SEQ ID NO: 1572942 - RNA, 19 nt, Artificial Sequence
  Description of Artificial Sequence: Synthetic oligonucleotide
  Antisense strand to SEQ ID NO: 1572941
ggguuuaagcgauuauccc

SEQ ID NO: 1572943 - RNA, 19 nt, Artificial Sequence
  Description of Artificial Sequence: Synthetic oligonucleotide
  Sense strand starting at position 3762 of SEQ ID NO: 1560054
ggucuuaaaccuuggcuca

SEQ ID NO: 1572944 - RNA, 19 nt, Artificial Sequence
  Description of Artificial Sequence: Synthetic oligonucleotide
  Antisense strand to SEQ ID NO: 1572943
ugagccaagguuuaagacc

SEQ ID NO: 1572945 - RNA, 19 nt, Artificial Sequence
  Description of Artificial Sequence: Synthetic oligonucleotide
  Sense strand starting at position 3763 of SEQ ID NO: 1560054
gucuuaaaccuuggcucaa

SEQ ID NO: 1572946 - RNA, 19 nt, Artificial Sequence
  Description of Artificial Sequence: Synthetic oligonucleotide
  Antisense strand to SEQ ID NO: 1572945
uugagccaagguuuaagac

SEQ ID NO: 1572947 - RNA, 19 nt, Artificial Sequence
  Description of Artificial Sequence: Synthetic oligonucleotide
  Sense strand starting at position 3890 of SEQ ID NO: 1560054
ugcugauacccacaacuga

SEQ ID NO: 1572948 - RNA, 19 nt, Artificial Sequence
  Description of Artificial Sequence: Synthetic oligonucleotide
  Antisense strand to SEQ ID NO: 1572947
ucaguuguggguaucagca

SEQ ID NO: 1572949 - RNA, 19 nt, Artificial Sequence
  Description of Artificial Sequence: Synthetic oligonucleotide
  Sense strand starting at position 3919 of SEQ ID NO: 1560054
ccacacggucuguaggaua

SEQ ID NO: 1572950 - RNA, 19 nt, Artificial Sequence
  Description of Artificial Sequence: Synthetic oligonucleotide
  Antisense strand to SEQ ID NO: 1572949
uauccuacagaccgugugg

SEQ ID NO: 1572951 - RNA, 19 nt, Artificial Sequence
  Description of Artificial Sequence: Synthetic oligonucleotide
  Sense strand starting at position 3924 of SEQ ID NO: 1560054
cggucuguaggauagacaa

SEQ ID NO: 1572952 - RNA, 19 nt, Artificial Sequence
  Description of Artificial Sequence: Synthetic oligonucleotide
  Antisense strand to SEQ ID NO: 1572951
uugucuauccuacagaccg

SEQ ID NO: 1572953 - RNA, 19 nt, Artificial Sequence
  Description of Artificial Sequence: Synthetic oligonucleotide
  Sense strand starting at position 3955 of SEQ ID NO: 1560054
uucuguacacaaugguaaa

SEQ ID NO: 1572954 - RNA, 19 nt, Artificial Sequence
  Description of Artificial Sequence: Synthetic oligonucleotide
  Antisense strand to SEQ ID NO: 1572953
uuuaccauuguguacagaa

SEQ ID NO: 1572955 - RNA, 19 nt, Artificial Sequence
  Description of Artificial Sequence: Synthetic oligonucleotide
  Sense strand starting at position 523 of SEQ ID NO: 1560055
gaggcuugcagagguuaga

SEQ ID NO: 1572956 - RNA, 19 nt, Artificial Sequence
  Description of Artificial Sequence: Synthetic oligonucleotide
  Antisense strand to SEQ ID NO: 1572955
ucuaaccucugcaagccuc

SEQ ID NO: 1572957 - RNA, 19 nt, Artificial Sequence
  Description of Artificial Sequence: Synthetic oligonucleotide
  Sense strand starting at position 584 of SEQ ID NO: 1560055
ccagucuuguuauucucaa

SEQ ID NO: 1572958 - RNA, 19 nt, Artificial Sequence
  Description of Artificial Sequence: Synthetic oligonucleotide
  Antisense strand to SEQ ID NO: 1572957
uugagaauaacaagacugg

SEQ ID NO: 1572959 - RNA, 19 nt, Artificial Sequence
  Description of Artificial Sequence: Synthetic oligonucleotide
  Sense strand starting at position 732 of SEQ ID NO: 1560055
gcuggauuauucuuuguuu

SEQ ID NO: 1572960 - RNA, 19 nt, Artificial Sequence
  Description of Artificial Sequence: Synthetic oligonucleotide
  Antisense strand to SEQ ID NO: 1572959
aaacaaagaauaauccagc

SEQ ID NO: 1572961 - RNA, 19 nt, Artificial Sequence
  Description of Artificial Sequence: Synthetic oligonucleotide
  Sense strand starting at position 803 of SEQ ID NO: 1560055
ggccucuacccauagaugu

SEQ ID NO: 1572962 - RNA, 19 nt, Artificial Sequence
  Description of Artificial Sequence: Synthetic oligonucleotide
  Antisense strand to SEQ ID NO: 1572961
acaucuauggguagaggcc

SEQ ID NO: 1572963 - RNA, 19 nt, Artificial Sequence
  Description of Artificial Sequence: Synthetic oligonucleotide
  Sense strand starting at position 933 of SEQ ID NO: 1560055
gaagacaggcucugugcua

SEQ ID NO: 1572964 - RNA, 19 nt, Artificial Sequence
  Description of Artificial Sequence: Synthetic oligonucleotide
  Antisense strand to SEQ ID NO: 1572963
uagcacagagccugucuuc

SEQ ID NO: 1572965 - RNA, 19 nt, Artificial Sequence
  Description of Artificial Sequence: Synthetic oligonucleotide
  Sense strand starting at position 1056 of SEQ ID NO: 1560055
ccaggaaagcagcgaucuu

SEQ ID NO: 1572966 - RNA, 19 nt, Artificial Sequence
  Description of Artificial Sequence: Synthetic oligonucleotide
  Antisense strand to SEQ ID NO: 1572965
aagaucgcugcuuuccugg

SEQ ID NO: 1572967 - RNA, 19 nt, Artificial Sequence
  Description of Artificial Sequence: Synthetic oligonucleotide
  Sense strand starting at position 1063 of SEQ ID NO: 1560055
agcagcgaucuugucugua

SEQ ID NO: 1572968 - RNA, 19 nt, Artificial Sequence
  Description of Artificial Sequence: Synthetic oligonucleotide
  Antisense strand to SEQ ID NO: 1572967
uacagacaagaucgcugcu

SEQ ID NO: 1572969 - RNA, 19 nt, Artificial Sequence
  Description of Artificial Sequence: Synthetic oligonucleotide
  Sense strand starting at position 1114 of SEQ ID NO: 1560055
ugccuagcacgagguaaau

SEQ ID NO: 1572970 - RNA, 19 nt, Artificial Sequence
  Description of Artificial Sequence: Synthetic oligonucleotide
  Antisense strand to SEQ ID NO: 1572969
auuuaccucgugcuaggca

SEQ ID NO: 1572971 - RNA, 19 nt, Artificial Sequence
  Description of Artificial Sequence: Synthetic oligonucleotide
  Sense strand starting at position 1123 of SEQ ID NO: 1560055
cgagguaaauugcucaaua

SEQ ID NO: 1572972 - RNA, 19 nt, Artificial Sequence
  Description of Artificial Sequence: Synthetic oligonucleotide
  Antisense strand to SEQ ID NO: 1572971
uauugagcaauuuaccucg

SEQ ID NO: 1572973 - RNA, 19 nt, Artificial Sequence
  Description of Artificial Sequence: Synthetic oligonucleotide
  Sense strand starting at position 1142 of SEQ ID NO: 1560055
aauggagguuggucgaaua

SEQ ID NO: 1572974 - RNA, 19 nt, Artificial Sequence
  Description of Artificial Sequence: Synthetic oligonucleotide
  Antisense strand to SEQ ID NO: 1572973
uauucgaccaaccuccauu

SEQ ID NO: 1572975 - RNA, 19 nt, Artificial Sequence
  Description of Artificial Sequence: Synthetic oligonucleotide
  Sense strand starting at position 1145 of SEQ ID NO: 1560055
ggagguuggucgaauaaga

SEQ ID NO: 1572976 - RNA, 19 nt, Artificial Sequence
  Description of Artificial Sequence: Synthetic oligonucleotide
  Antisense strand to SEQ ID NO: 1572975
ucuuauucgaccaaccucc

SEQ ID NO: 1572977 - RNA, 19 nt, Artificial Sequence
  Description of Artificial Sequence: Synthetic oligonucleotide
  Sense strand starting at position 1174 of SEQ ID NO: 1560055
ucaagcaauuguccuagau

SEQ ID NO: 1572978 - RNA, 19 nt, Artificial Sequence
  Description of Artificial Sequence: Synthetic oligonucleotide
  Antisense strand to SEQ ID NO: 1572977
aucuaggacaauugcuuga

SEQ ID NO: 1572979 - RNA, 19 nt, Artificial Sequence
  Description of Artificial Sequence: Synthetic oligonucleotide
  Sense strand starting at position 1178 of SEQ ID NO: 1560055
gcaauuguccuagauaagu

SEQ ID NO: 1572980 - RNA, 19 nt, Artificial Sequence
  Description of Artificial Sequence: Synthetic oligonucleotide
  Antisense strand to SEQ ID NO: 1572979
acuuaucuaggacaauugc

SEQ ID NO: 1572981 - RNA, 19 nt, Artificial Sequence
  Description of Artificial Sequence: Synthetic oligonucleotide
  Sense strand starting at position 1191 of SEQ ID NO: 1560055
auaaguaauuguccuuaca

SEQ ID NO: 1572982 - RNA, 19 nt, Artificial Sequence
  Description of Artificial Sequence: Synthetic oligonucleotide
  Antisense strand to SEQ ID NO: 1572981
uguaaggacaauuacuuau

SEQ ID NO: 1572983 - RNA, 19 nt, Artificial Sequence
  Description of Artificial Sequence: Synthetic oligonucleotide
  Sense strand starting at position 1194 of SEQ ID NO: 1560055
aguaauuguccuuacauag

SEQ ID NO: 1572984 - RNA, 19 nt, Artificial Sequence
  Description of Artificial Sequence: Synthetic oligonucleotide
  Antisense strand to SEQ ID NO: 1572983
cuauguaaggacaauuacu

SEQ ID NO: 1572985 - RNA, 19 nt, Artificial Sequence
  Description of Artificial Sequence: Synthetic oligonucleotide
  Sense strand starting at position 1212 of SEQ ID NO: 1560055
guacguggucugagucuaa

SEQ ID NO: 1572986 - RNA, 19 nt, Artificial Sequence
  Description of Artificial Sequence: Synthetic oligonucleotide
  Antisense strand to SEQ ID NO: 1572985
uuagacucagaccacguac

SEQ ID NO: 1572987 - RNA, 19 nt, Artificial Sequence
  Description of Artificial Sequence: Synthetic oligonucleotide
  Sense strand starting at position 1216 of SEQ ID NO: 1560055
guggucugagucuaacaca

SEQ ID NO: 1572988 - RNA, 19 nt, Artificial Sequence
  Description of Artificial Sequence: Synthetic oligonucleotide
  Antisense strand to SEQ ID NO: 1572987
uguguuagacucagaccac

SEQ ID NO: 1572989 - RNA, 19 nt, Artificial Sequence
  Description of Artificial Sequence: Synthetic oligonucleotide
  Sense strand starting at position 1359 of SEQ ID NO: 1560055
ugcugauuccuaggcaauu

SEQ ID NO: 1572990 - RNA, 19 nt, Artificial Sequence
  Description of Artificial Sequence: Synthetic oligonucleotide
  Antisense strand to SEQ ID NO: 1572989
aauugccuaggaaucagca

SEQ ID NO: 1572991 - RNA, 19 nt, Artificial Sequence
  Description of Artificial Sequence: Synthetic oligonucleotide
  Sense strand starting at position 1360 of SEQ ID NO: 1560055
gcugauuccuaggcaauuc

SEQ ID NO: 1572992 - RNA, 19 nt, Artificial Sequence
  Description of Artificial Sequence: Synthetic oligonucleotide
  Antisense strand to SEQ ID NO: 1572991
gaauugccuaggaaucagc

SEQ ID NO: 1572993 - RNA, 19 nt, Artificial Sequence
  Description of Artificial Sequence: Synthetic oligonucleotide
  Sense strand starting at position 1435 of SEQ ID NO: 1560055
cccaguugucgggaaucca

SEQ ID NO: 1572994 - RNA, 19 nt, Artificial Sequence
  Description of Artificial Sequence: Synthetic oligonucleotide
  Antisense strand to SEQ ID NO: 1572993
uggauucccgacaacuggg

SEQ ID NO: 1572995 - RNA, 19 nt, Artificial Sequence
  Description of Artificial Sequence: Synthetic oligonucleotide
  Sense strand starting at position 1720 of SEQ ID NO: 1560055
ccuccaucuuccgcuugaa

SEQ ID NO: 1572996 - RNA, 19 nt, Artificial Sequence
  Description of Artificial Sequence: Synthetic oligonucleotide
  Antisense strand to SEQ ID NO: 1572995
uucaagcggaagauggagg

SEQ ID NO: 1572997 - RNA, 19 nt, Artificial Sequence
  Description of Artificial Sequence: Synthetic oligonucleotide
  Sense strand starting at position 2368 of SEQ ID NO: 1560055
ugguaaucucccgaccuca

SEQ ID NO: 1572998 - RNA, 19 nt, Artificial Sequence
  Description of Artificial Sequence: Synthetic oligonucleotide
  Antisense strand to SEQ ID NO: 1572997
ugaggucgggagauuacca

SEQ ID NO: 1572999 - RNA, 19 nt, Artificial Sequence
  Description of Artificial Sequence: Synthetic oligonucleotide
  Sense strand starting at position 2800 of SEQ ID NO: 1560055
uauuuauauuuguggagac

SEQ ID NO: 1573000 - RNA, 19 nt, Artificial Sequence
  Description of Artificial Sequence: Synthetic oligonucleotide
  Antisense strand to SEQ ID NO: 1572999
gucuccacaaauauaaaua

SEQ ID NO: 1573001 - RNA, 19 nt, Artificial Sequence
  Description of Artificial Sequence: Synthetic oligonucleotide
  Sense strand starting at position 2993 of SEQ ID NO: 1560055
augagacugucgucugaga

SEQ ID NO: 1573002 - RNA, 19 nt, Artificial Sequence
  Description of Artificial Sequence: Synthetic oligonucleotide
  Antisense strand to SEQ ID NO: 1573001
ucucagacgacagucucau

SEQ ID NO: 1573003 - RNA, 19 nt, Artificial Sequence
  Description of Artificial Sequence: Synthetic oligonucleotide
  Sense strand starting at position 2995 of SEQ ID NO: 1560055
gagacugucgucugagacu

SEQ ID NO: 1573004 - RNA, 19 nt, Artificial Sequence
  Description of Artificial Sequence: Synthetic oligonucleotide
  Antisense strand to SEQ ID NO: 1573003
agucucagacgacagucuc

SEQ ID NO: 1573005 - RNA, 19 nt, Artificial Sequence
  Description of Artificial Sequence: Synthetic oligonucleotide
  Sense strand starting at position 3057 of SEQ ID NO: 1560055
ggaacagauucgcuuucca

SEQ ID NO: 1573006 - RNA, 19 nt, Artificial Sequence
  Description of Artificial Sequence: Synthetic oligonucleotide
  Antisense strand to SEQ ID NO: 1573005
uggaaagcgaaucuguucc

SEQ ID NO: 1573007 - RNA, 19 nt, Artificial Sequence
  Description of Artificial Sequence: Synthetic oligonucleotide
  Sense strand starting at position 3105 of SEQ ID NO: 1560055
gaauaaucucuaugagugg

SEQ ID NO: 1573008 - RNA, 19 nt, Artificial Sequence
  Description of Artificial Sequence: Synthetic oligonucleotide
  Antisense strand to SEQ ID NO: 1573007
ccacucauagagauuauuc

SEQ ID NO: 1573009 - RNA, 19 nt, Artificial Sequence
  Description of Artificial Sequence: Synthetic oligonucleotide
  Sense strand starting at position 3230 of SEQ ID NO: 1560055
guaucuuuggguuggguaa

SEQ ID NO: 1573010 - RNA, 19 nt, Artificial Sequence
  Description of Artificial Sequence: Synthetic oligonucleotide
  Antisense strand to SEQ ID NO: 1573009
uuacccaacccaaagauac

SEQ ID NO: 1573011 - RNA, 19 nt, Artificial Sequence
  Description of Artificial Sequence: Synthetic oligonucleotide
  Sense strand starting at position 3243 of SEQ ID NO: 1560055
ggguaaccaucucugggau

SEQ ID NO: 1573012 - RNA, 19 nt, Artificial Sequence
  Description of Artificial Sequence: Synthetic oligonucleotide
  Antisense strand to SEQ ID NO: 1573011
aucccagagaugguuaccc

SEQ ID NO: 1573013 - RNA, 19 nt, Artificial Sequence
  Description of Artificial Sequence: Synthetic oligonucleotide
  Sense strand starting at position 3244 of SEQ ID NO: 1560055
gguaaccaucucugggaua

SEQ ID NO: 1573014 - RNA, 19 nt, Artificial Sequence
  Description of Artificial Sequence: Synthetic oligonucleotide
  Antisense strand to SEQ ID NO: 1573013
uaucccagagaugguuacc

SEQ ID NO: 1573015 - RNA, 19 nt, Artificial Sequence
  Description of Artificial Sequence: Synthetic oligonucleotide
  Sense strand starting at position 3249 of SEQ ID NO: 1560055
ccaucucugggauaaagcu

SEQ ID NO: 1573016 - RNA, 19 nt, Artificial Sequence
  Description of Artificial Sequence: Synthetic oligonucleotide
  Antisense strand to SEQ ID NO: 1573015
agcuuuaucccagagaugg

SEQ ID NO: 1573017 - RNA, 19 nt, Artificial Sequence
  Description of Artificial Sequence: Synthetic oligonucleotide
  Sense strand starting at position 3258 of SEQ ID NO: 1560055
ggauaaagcucacauuugu

SEQ ID NO: 1573018 - RNA, 19 nt, Artificial Sequence
  Description of Artificial Sequence: Synthetic oligonucleotide
  Antisense strand to SEQ ID NO: 1573017
acaaaugugagcuuuaucc

SEQ ID NO: 1573019 - RNA, 19 nt, Artificial Sequence
  Description of Artificial Sequence: Synthetic oligonucleotide
  Sense strand starting at position 3311 of SEQ ID NO: 1560055
ccgucugagaaucagcuua

SEQ ID NO: 1573020 - RNA, 19 nt, Artificial Sequence
  Description of Artificial Sequence: Synthetic oligonucleotide
  Antisense strand to SEQ ID NO: 1573019
uaagcugauucucagacgg

SEQ ID NO: 1573021 - RNA, 19 nt, Artificial Sequence
  Description of Artificial Sequence: Synthetic oligonucleotide
  Sense strand starting at position 3313 of SEQ ID NO: 1560055
gucugagaaucagcuuacu

SEQ ID NO: 1573022 - RNA, 19 nt, Artificial Sequence
  Description of Artificial Sequence: Synthetic oligonucleotide
  Antisense strand to SEQ ID NO: 1573021
aguaagcugauucucagac

SEQ ID NO: 1573023 - RNA, 19 nt, Artificial Sequence
  Description of Artificial Sequence: Synthetic oligonucleotide
  Sense strand starting at position 3483 of SEQ ID NO: 1560055
gccucaaccuggucucgau

SEQ ID NO: 1573024 - RNA, 19 nt, Artificial Sequence
  Description of Artificial Sequence: Synthetic oligonucleotide
  Antisense strand to SEQ ID NO: 1573023
aucgagaccagguugaggc

SEQ ID NO: 1573025 - RNA, 19 nt, Artificial Sequence
  Description of Artificial Sequence: Synthetic oligonucleotide
  Sense strand starting at position 3879 of SEQ ID NO: 1560055
gcccgagaaucagcuuauu

SEQ ID NO: 1573026 - RNA, 19 nt, Artificial Sequence
  Description of Artificial Sequence: Synthetic oligonucleotide
  Antisense strand to SEQ ID NO: 1573025
aauaagcugauucucgggc

SEQ ID NO: 1573027 - RNA, 19 nt, Artificial Sequence
  Description of Artificial Sequence: Synthetic oligonucleotide
  Sense strand starting at position 3928 of SEQ ID NO: 1560055
gguuauuucuagucuguag

SEQ ID NO: 1573028 - RNA, 19 nt, Artificial Sequence
  Description of Artificial Sequence: Synthetic oligonucleotide
  Antisense strand to SEQ ID NO: 1573027
cuacagacuagaaauaacc

SEQ ID NO: 1573029 - RNA, 19 nt, Artificial Sequence
  Description of Artificial Sequence: Synthetic oligonucleotide
  Sense strand starting at position 3940 of SEQ ID NO: 1560055
ucuguagucucccucuaaa

SEQ ID NO: 1573030 - RNA, 19 nt, Artificial Sequence
  Description of Artificial Sequence: Synthetic oligonucleotide
  Antisense strand to SEQ ID NO: 1573029
uuuagagggagacuacaga

SEQ ID NO: 1573031 - RNA, 19 nt, Artificial Sequence
  Description of Artificial Sequence: Synthetic oligonucleotide
  Sense strand starting at position 3943 of SEQ ID NO: 1560055
guagucucccucuaaaguu

SEQ ID NO: 1573032 - RNA, 19 nt, Artificial Sequence
  Description of Artificial Sequence: Synthetic oligonucleotide
  Antisense strand to SEQ ID NO: 1573031
aacuuuagagggagacuac

SEQ ID NO: 1573033 - RNA, 19 nt, Artificial Sequence
  Description of Artificial Sequence: Synthetic oligonucleotide
  Sense strand starting at position 3955 of SEQ ID NO: 1560055
uaaaguuaagagugucaug

SEQ ID NO: 1573034 - RNA, 19 nt, Artificial Sequence
  Description of Artificial Sequence: Synthetic oligonucleotide
  Antisense strand to SEQ ID NO: 1573033
caugacacucuuaacuuua

SEQ ID NO: 1573035 - RNA, 19 nt, Artificial Sequence
  Description of Artificial Sequence: Synthetic oligonucleotide
  Sense strand starting at position 122 of SEQ ID NO: 1560056
ccaugugauccagggauuc

SEQ ID NO: 1573036 - RNA, 19 nt, Artificial Sequence
  Description of Artificial Sequence: Synthetic oligonucleotide
  Antisense strand to SEQ ID NO: 1573035
gaaucccuggaucacaugg

SEQ ID NO: 1573037 - RNA, 19 nt, Artificial Sequence
  Description of Artificial Sequence: Synthetic oligonucleotide
  Sense strand starting at position 172 of SEQ ID NO: 1560056
guaugcaaauguucguaau

SEQ ID NO: 1573038 - RNA, 19 nt, Artificial Sequence
  Description of Artificial Sequence: Synthetic oligonucleotide
  Antisense strand to SEQ ID NO: 1573037
auuacgaacauuugcauac

SEQ ID NO: 1573039 - RNA, 19 nt, Artificial Sequence
  Description of Artificial Sequence: Synthetic oligonucleotide
  Sense strand starting at position 173 of SEQ ID NO: 1560056
uaugcaaauguucguaaua

SEQ ID NO: 1573040 - RNA, 19 nt, Artificial Sequence
  Description of Artificial Sequence: Synthetic oligonucleotide
  Antisense strand to SEQ ID NO: 1573039
uauuacgaacauuugcaua

SEQ ID NO: 1573041 - RNA, 19 nt, Artificial Sequence
  Description of Artificial Sequence: Synthetic oligonucleotide
  Sense strand starting at position 174 of SEQ ID NO: 1560056
augcaaauguucguaauag

SEQ ID NO: 1573042 - RNA, 19 nt, Artificial Sequence
  Description of Artificial Sequence: Synthetic oligonucleotide
  Antisense strand to SEQ ID NO: 1573041
cuauuacgaacauuugcau

SEQ ID NO: 1573043 - RNA, 19 nt, Artificial Sequence
  Description of Artificial Sequence: Synthetic oligonucleotide
  Sense strand starting at position 175 of SEQ ID NO: 1560056
ugcaaauguucguaauagu

SEQ ID NO: 1573044 - RNA, 19 nt, Artificial Sequence
  Description of Artificial Sequence: Synthetic oligonucleotide
  Antisense strand to SEQ ID NO: 1573043
acuauuacgaacauuugca

SEQ ID NO: 1573045 - RNA, 19 nt, Artificial Sequence
  Description of Artificial Sequence: Synthetic oligonucleotide
  Sense strand starting at position 487 of SEQ ID NO: 1560056
auuuauuacuccuaguaga

SEQ ID NO: 1573046 - RNA, 19 nt, Artificial Sequence
  Description of Artificial Sequence: Synthetic oligonucleotide
  Antisense strand to SEQ ID NO: 1573045
ucuacuaggaguaauaaau

SEQ ID NO: 1573047 - RNA, 19 nt, Artificial Sequence
  Description of Artificial Sequence: Synthetic oligonucleotide
  Sense strand starting at position 541 of SEQ ID NO: 1560056
gugaauggauuacaaacua

SEQ ID NO: 1573048 - RNA, 19 nt, Artificial Sequence
  Description of Artificial Sequence: Synthetic oligonucleotide
  Antisense strand to SEQ ID NO: 1573047
uaguuuguaauccauucac

SEQ ID NO: 1573049 - RNA, 19 nt, Artificial Sequence
  Description of Artificial Sequence: Synthetic oligonucleotide
  Sense strand starting at position 561 of SEQ ID NO: 1560056
gguccauccauacagugua

SEQ ID NO: 1573050 - RNA, 19 nt, Artificial Sequence
  Description of Artificial Sequence: Synthetic oligonucleotide
  Antisense strand to SEQ ID NO: 1573049
uacacuguauggauggacc

SEQ ID NO: 1573051 - RNA, 19 nt, Artificial Sequence
  Description of Artificial Sequence: Synthetic oligonucleotide
  Sense strand starting at position 564 of SEQ ID NO: 1560056
ccauccauacaguguaaua

SEQ ID NO: 1573052 - RNA, 19 nt, Artificial Sequence
  Description of Artificial Sequence: Synthetic oligonucleotide
  Antisense strand to SEQ ID NO: 1573051
uauuacacuguauggaugg

SEQ ID NO: 1573053 - RNA, 19 nt, Artificial Sequence
  Description of Artificial Sequence: Synthetic oligonucleotide
  Sense strand starting at position 918 of SEQ ID NO: 1560056
uaaguaacagagcgagaau

SEQ ID NO: 1573054 - RNA, 19 nt, Artificial Sequence
  Description of Artificial Sequence: Synthetic oligonucleotide
  Antisense strand to SEQ ID NO: 1573053
auucucgcucuguuacuua

SEQ ID NO: 1573055 - RNA, 19 nt, Artificial Sequence
  Description of Artificial Sequence: Synthetic oligonucleotide
  Sense strand starting at position 1468 of SEQ ID NO: 1560056
gacgcaaaguucuaaagcu

SEQ ID NO: 1573056 - RNA, 19 nt, Artificial Sequence
  Description of Artificial Sequence: Synthetic oligonucleotide
  Antisense strand to SEQ ID NO: 1573055
agcuuuagaacuuugcguc

SEQ ID NO: 1573057 - RNA, 19 nt, Artificial Sequence
  Description of Artificial Sequence: Synthetic oligonucleotide
  Sense strand starting at position 1565 of SEQ ID NO: 1560056
cgaacacuaugguauguaa

SEQ ID NO: 1573058 - RNA, 19 nt, Artificial Sequence
  Description of Artificial Sequence: Synthetic oligonucleotide
  Antisense strand to SEQ ID NO: 1573057
uuacauaccauaguguucg

SEQ ID NO: 1573059 - RNA, 19 nt, Artificial Sequence
  Description of Artificial Sequence: Synthetic oligonucleotide
  Sense strand starting at position 1568 of SEQ ID NO: 1560056
acacuaugguauguaaaug

SEQ ID NO: 1573060 - RNA, 19 nt, Artificial Sequence
  Description of Artificial Sequence: Synthetic oligonucleotide
  Antisense strand to SEQ ID NO: 1573059
cauuuacauaccauagugu

SEQ ID NO: 1573061 - RNA, 19 nt, Artificial Sequence
  Description of Artificial Sequence: Synthetic oligonucleotide
  Sense strand starting at position 1687 of SEQ ID NO: 1560056
gcaggaccaugcuccaaua

SEQ ID NO: 1573062 - RNA, 19 nt, Artificial Sequence
  Description of Artificial Sequence: Synthetic oligonucleotide
  Antisense strand to SEQ ID NO: 1573061
uauuggagcaugguccugc

SEQ ID NO: 1573063 - RNA, 19 nt, Artificial Sequence
  Description of Artificial Sequence: Synthetic oligonucleotide
  Sense strand starting at position 1998 of SEQ ID NO: 1560056
gggugucaugggagcggua

SEQ ID NO: 1573064 - RNA, 19 nt, Artificial Sequence
  Description of Artificial Sequence: Synthetic oligonucleotide
  Antisense strand to SEQ ID NO: 1573063
uaccgcucccaugacaccc

SEQ ID NO: 1573065 - RNA, 19 nt, Artificial Sequence
  Description of Artificial Sequence: Synthetic oligonucleotide
  Sense strand starting at position 2000 of SEQ ID NO: 1560056
gugucaugggagcgguagu

SEQ ID NO: 1573066 - RNA, 19 nt, Artificial Sequence
  Description of Artificial Sequence: Synthetic oligonucleotide
  Antisense strand to SEQ ID NO: 1573065
acuaccgcucccaugacac

SEQ ID NO: 1573067 - RNA, 19 nt, Artificial Sequence
  Description of Artificial Sequence: Synthetic oligonucleotide
  Sense strand starting at position 2058 of SEQ ID NO: 1560056
augggacccucaggucaua

SEQ ID NO: 1573068 - RNA, 19 nt, Artificial Sequence
  Description of Artificial Sequence: Synthetic oligonucleotide
  Antisense strand to SEQ ID NO: 1573067
uaugaccugagggucccau

SEQ ID NO: 1573069 - RNA, 19 nt, Artificial Sequence
  Description of Artificial Sequence: Synthetic oligonucleotide
  Sense strand starting at position 2069 of SEQ ID NO: 1560056
aggucauaaucgcgaguug

SEQ ID NO: 1573070 - RNA, 19 nt, Artificial Sequence
  Description of Artificial Sequence: Synthetic oligonucleotide
  Antisense strand to SEQ ID NO: 1573069
caacucgcgauuaugaccu

SEQ ID NO: 1573071 - RNA, 19 nt, Artificial Sequence
  Description of Artificial Sequence: Synthetic oligonucleotide
  Sense strand starting at position 2070 of SEQ ID NO: 1560056
ggucauaaucgcgaguugu

SEQ ID NO: 1573072 - RNA, 19 nt, Artificial Sequence
  Description of Artificial Sequence: Synthetic oligonucleotide
  Antisense strand to SEQ ID NO: 1573071
acaacucgcgauuaugacc

SEQ ID NO: 1573073 - RNA, 19 nt, Artificial Sequence
  Description of Artificial Sequence: Synthetic oligonucleotide
  Sense strand starting at position 2071 of SEQ ID NO: 1560056
gucauaaucgcgaguugug

SEQ ID NO: 1573074 - RNA, 19 nt, Artificial Sequence
  Description of Artificial Sequence: Synthetic oligonucleotide
  Antisense strand to SEQ ID NO: 1573073
cacaacucgcgauuaugac

SEQ ID NO: 1573075 - RNA, 19 nt, Artificial Sequence
  Description of Artificial Sequence: Synthetic oligonucleotide
  Sense strand starting at position 2080 of SEQ ID NO: 1560056
gcgaguugugacgggaguu

SEQ ID NO: 1573076 - RNA, 19 nt, Artificial Sequence
  Description of Artificial Sequence: Synthetic oligonucleotide
  Antisense strand to SEQ ID NO: 1573075
aacucccgucacaacucgc

SEQ ID NO: 1573077 - RNA, 19 nt, Artificial Sequence
  Description of Artificial Sequence: Synthetic oligonucleotide
  Sense strand starting at position 2083 of SEQ ID NO: 1560056
aguugugacgggaguugua

SEQ ID NO: 1573078 - RNA, 19 nt, Artificial Sequence
  Description of Artificial Sequence: Synthetic oligonucleotide
  Antisense strand to SEQ ID NO: 1573077
uacaacucccgucacaacu

SEQ ID NO: 1573079 - RNA, 19 nt, Artificial Sequence
  Description of Artificial Sequence: Synthetic oligonucleotide
  Sense strand starting at position 2426 of SEQ ID NO: 1560056
accucuaaccgguguuauu

SEQ ID NO: 1573080 - RNA, 19 nt, Artificial Sequence
  Description of Artificial Sequence: Synthetic oligonucleotide
  Antisense strand to SEQ ID NO: 1573079
aauaacaccgguuagaggu

SEQ ID NO: 1573081 - RNA, 19 nt, Artificial Sequence
  Description of Artificial Sequence: Synthetic oligonucleotide
  Sense strand starting at position 2514 of SEQ ID NO: 1560056
uuagacuuucgucgggcaa

SEQ ID NO: 1573082 - RNA, 19 nt, Artificial Sequence
  Description of Artificial Sequence: Synthetic oligonucleotide
  Antisense strand to SEQ ID NO: 1573081
uugcccgacgaaagucuaa

SEQ ID NO: 1573083 - RNA, 19 nt, Artificial Sequence
  Description of Artificial Sequence: Synthetic oligonucleotide
  Sense strand starting at position 2516 of SEQ ID NO: 1560056
agacuuucgucgggcaagu

SEQ ID NO: 1573084 - RNA, 19 nt, Artificial Sequence
  Description of Artificial Sequence: Synthetic oligonucleotide
  Antisense strand to SEQ ID NO: 1573083
acuugcccgacgaaagucu

SEQ ID NO: 1573085 - RNA, 19 nt, Artificial Sequence
  Description of Artificial Sequence: Synthetic oligonucleotide
  Sense strand starting at position 2518 of SEQ ID NO: 1560056
acuuucgucgggcaaguuu

SEQ ID NO: 1573086 - RNA, 19 nt, Artificial Sequence
  Description of Artificial Sequence: Synthetic oligonucleotide
  Antisense strand to SEQ ID NO: 1573085
aaacuugcccgacgaaagu

SEQ ID NO: 1573087 - RNA, 19 nt, Artificial Sequence
  Description of Artificial Sequence: Synthetic oligonucleotide
  Sense strand starting at position 2554 of SEQ ID NO: 1560056
agauaaagguuaguguaga

SEQ ID NO: 1573088 - RNA, 19 nt, Artificial Sequence
  Description of Artificial Sequence: Synthetic oligonucleotide
  Antisense strand to SEQ ID NO: 1573087
ucuacacuaaccuuuaucu

SEQ ID NO: 1573089 - RNA, 19 nt, Artificial Sequence
  Description of Artificial Sequence: Synthetic oligonucleotide
  Sense strand starting at position 2555 of SEQ ID NO: 1560056
gauaaagguuaguguagaa

SEQ ID NO: 1573090 - RNA, 19 nt, Artificial Sequence
  Description of Artificial Sequence: Synthetic oligonucleotide
  Antisense strand to SEQ ID NO: 1573089
uucuacacuaaccuuuauc

SEQ ID NO: 1573091 - RNA, 19 nt, Artificial Sequence
  Description of Artificial Sequence: Synthetic oligonucleotide
  Sense strand starting at position 2565 of SEQ ID NO: 1560056
aguguagaaucaggaccaa

SEQ ID NO: 1573092 - RNA, 19 nt, Artificial Sequence
  Description of Artificial Sequence: Synthetic oligonucleotide
  Antisense strand to SEQ ID NO: 1573091
uugguccugauucuacacu

SEQ ID NO: 1573093 - RNA, 19 nt, Artificial Sequence
  Description of Artificial Sequence: Synthetic oligonucleotide
  Sense strand starting at position 2577 of SEQ ID NO: 1560056
ggaccaaauugagccuaau

SEQ ID NO: 1573094 - RNA, 19 nt, Artificial Sequence
  Description of Artificial Sequence: Synthetic oligonucleotide
  Antisense strand to SEQ ID NO: 1573093
auuaggcucaauuuggucc

SEQ ID NO: 1573095 - RNA, 19 nt, Artificial Sequence
  Description of Artificial Sequence: Synthetic oligonucleotide
  Sense strand starting at position 2580 of SEQ ID NO: 1560056
ccaaauugagccuaauguu

SEQ ID NO: 1573096 - RNA, 19 nt, Artificial Sequence
  Description of Artificial Sequence: Synthetic oligonucleotide
  Antisense strand to SEQ ID NO: 1573095
aacauuaggcucaauuugg

SEQ ID NO: 1573097 - RNA, 19 nt, Artificial Sequence
  Description of Artificial Sequence: Synthetic oligonucleotide
  Sense strand starting at position 2594 of SEQ ID NO: 1560056
auguuacauuuccauagca

SEQ ID NO: 1573098 - RNA, 19 nt, Artificial Sequence
  Description of Artificial Sequence: Synthetic oligonucleotide
  Antisense strand to SEQ ID NO: 1573097
ugcuauggaaauguaacau

SEQ ID NO: 1573099 - RNA, 19 nt, Artificial Sequence
  Description of Artificial Sequence: Synthetic oligonucleotide
  Sense strand starting at position 2607 of SEQ ID NO: 1560056
auagcaaccucucuaggua

SEQ ID NO: 1573100 - RNA, 19 nt, Artificial Sequence
  Description of Artificial Sequence: Synthetic oligonucleotide
  Antisense strand to SEQ ID NO: 1573099
uaccuagagagguugcuau

SEQ ID NO: 1573101 - RNA, 19 nt, Artificial Sequence
  Description of Artificial Sequence: Synthetic oligonucleotide
  Sense strand starting at position 2623 of SEQ ID NO: 1560056
guaguuguggcacagccaa

SEQ ID NO: 1573102 - RNA, 19 nt, Artificial Sequence
  Description of Artificial Sequence: Synthetic oligonucleotide
  Antisense strand to SEQ ID NO: 1573101
uuggcugugccacaacuac

SEQ ID NO: 1573103 - RNA, 19 nt, Artificial Sequence
  Description of Artificial Sequence: Synthetic oligonucleotide
  Sense strand starting at position 3346 of SEQ ID NO: 1560056
cauggugcuuggccuauua

SEQ ID NO: 1573104 - RNA, 19 nt, Artificial Sequence
  Description of Artificial Sequence: Synthetic oligonucleotide
  Antisense strand to SEQ ID NO: 1573103
uaauaggccaagcaccaug

SEQ ID NO: 1573105 - RNA, 19 nt, Artificial Sequence
  Description of Artificial Sequence: Synthetic oligonucleotide
  Sense strand starting at position 3502 of SEQ ID NO: 1560056
augaauguguuauuaguag

SEQ ID NO: 1573106 - RNA, 19 nt, Artificial Sequence
  Description of Artificial Sequence: Synthetic oligonucleotide
  Antisense strand to SEQ ID NO: 1573105
cuacuaauaacacauucau

SEQ ID NO: 1573107 - RNA, 19 nt, Artificial Sequence
  Description of Artificial Sequence: Synthetic oligonucleotide
  Sense strand starting at position 3506 of SEQ ID NO: 1560056
auguguuauuaguaggcau

SEQ ID NO: 1573108 - RNA, 19 nt, Artificial Sequence
  Description of Artificial Sequence: Synthetic oligonucleotide
  Antisense strand to SEQ ID NO: 1573107
augccuacuaauaacacau

SEQ ID NO: 1573109 - RNA, 19 nt, Artificial Sequence
  Description of Artificial Sequence: Synthetic oligonucleotide
  Sense strand starting at position 3508 of SEQ ID NO: 1560056
guguuauuaguaggcauua

SEQ ID NO: 1573110 - RNA, 19 nt, Artificial Sequence
  Description of Artificial Sequence: Synthetic oligonucleotide
  Antisense strand to SEQ ID NO: 1573109
uaaugccuacuaauaacac

SEQ ID NO: 1573111 - RNA, 19 nt, Artificial Sequence
  Description of Artificial Sequence: Synthetic oligonucleotide
  Sense strand starting at position 3513 of SEQ ID NO: 1560056
auuaguaggcauuaccaaa

SEQ ID NO: 1573112 - RNA, 19 nt, Artificial Sequence
  Description of Artificial Sequence: Synthetic oligonucleotide
  Antisense strand to SEQ ID NO: 1573111
uuugguaaugccuacuaau

SEQ ID NO: 1573113 - RNA, 19 nt, Artificial Sequence
  Description of Artificial Sequence: Synthetic oligonucleotide
  Sense strand starting at position 3558 of SEQ ID NO: 1560056
aagugcauuugaggaucaa

SEQ ID NO: 1573114 - RNA, 19 nt, Artificial Sequence
  Description of Artificial Sequence: Synthetic oligonucleotide
  Antisense strand to SEQ ID NO: 1573113
uugauccucaaaugcacuu

SEQ ID NO: 1573115 - RNA, 19 nt, Artificial Sequence
  Description of Artificial Sequence: Synthetic oligonucleotide
  Sense strand starting at position 28 of SEQ ID NO: 1560057
cccucagucaguugucaag

SEQ ID NO: 1573116 - RNA, 19 nt, Artificial Sequence
  Description of Artificial Sequence: Synthetic oligonucleotide
  Antisense strand to SEQ ID NO: 1573115
cuugacaacugacugaggg

SEQ ID NO: 1573117 - RNA, 19 nt, Artificial Sequence
  Description of Artificial Sequence: Synthetic oligonucleotide
  Sense strand starting at position 578 of SEQ ID NO: 1560057
gguccugccuauucucaau

SEQ ID NO: 1573118 - RNA, 19 nt, Artificial Sequence
  Description of Artificial Sequence: Synthetic oligonucleotide
  Antisense strand to SEQ ID NO: 1573117
auugagaauaggcaggacc

SEQ ID NO: 1573119 - RNA, 19 nt, Artificial Sequence
  Description of Artificial Sequence: Synthetic oligonucleotide
  Sense strand starting at position 1196 of SEQ ID NO: 1560057
guaguaugcaccugucauc

SEQ ID NO: 1573120 - RNA, 19 nt, Artificial Sequence
  Description of Artificial Sequence: Synthetic oligonucleotide
  Antisense strand to SEQ ID NO: 1573119
gaugacaggugcauacuac

SEQ ID NO: 1573121 - RNA, 19 nt, Artificial Sequence
  Description of Artificial Sequence: Synthetic oligonucleotide
  Sense strand starting at position 1430 of SEQ ID NO: 1560057
uguguaaguuuguugcuuu

SEQ ID NO: 1573122 - RNA, 19 nt, Artificial Sequence
  Description of Artificial Sequence: Synthetic oligonucleotide
  Antisense strand to SEQ ID NO: 1573121
aaagcaacaaacuuacaca

SEQ ID NO: 1573123 - RNA, 19 nt, Artificial Sequence
  Description of Artificial Sequence: Synthetic oligonucleotide
  Sense strand starting at position 1720 of SEQ ID NO: 1560057
cccugcaauaguugagagu

SEQ ID NO: 1573124 - RNA, 19 nt, Artificial Sequence
  Description of Artificial Sequence: Synthetic oligonucleotide
  Antisense strand to SEQ ID NO: 1573123
acucucaacuauugcaggg

SEQ ID NO: 1573125 - RNA, 19 nt, Artificial Sequence
  Description of Artificial Sequence: Synthetic oligonucleotide
  Sense strand starting at position 1721 of SEQ ID NO: 1560057
ccugcaauaguugagaguu

SEQ ID NO: 1573126 - RNA, 19 nt, Artificial Sequence
  Description of Artificial Sequence: Synthetic oligonucleotide
  Antisense strand to SEQ ID NO: 1573125
aacucucaacuauugcagg

SEQ ID NO: 1573127 - RNA, 19 nt, Artificial Sequence
  Description of Artificial Sequence: Synthetic oligonucleotide
  Sense strand starting at position 1723 of SEQ ID NO: 1560057
ugcaauaguugagaguuga

SEQ ID NO: 1573128 - RNA, 19 nt, Artificial Sequence
  Description of Artificial Sequence: Synthetic oligonucleotide
  Antisense strand to SEQ ID NO: 1573127
ucaacucucaacuauugca

SEQ ID NO: 1573129 - RNA, 19 nt, Artificial Sequence
  Description of Artificial Sequence: Synthetic oligonucleotide
  Sense strand starting at position 1727 of SEQ ID NO: 1560057
auaguugagaguugaauau

SEQ ID NO: 1573130 - RNA, 19 nt, Artificial Sequence
  Description of Artificial Sequence: Synthetic oligonucleotide
  Antisense strand to SEQ ID NO: 1573129
auauucaacucucaacuau

SEQ ID NO: 1573131 - RNA, 19 nt, Artificial Sequence
  Description of Artificial Sequence: Synthetic oligonucleotide
  Sense strand starting at position 1736 of SEQ ID NO: 1560057
aguugaauaugaccuccaa

SEQ ID NO: 1573132 - RNA, 19 nt, Artificial Sequence
  Description of Artificial Sequence: Synthetic oligonucleotide
  Antisense strand to SEQ ID NO: 1573131
uuggaggucauauucaacu

SEQ ID NO: 1573133 - RNA, 19 nt, Artificial Sequence
  Description of Artificial Sequence: Synthetic oligonucleotide
  Sense strand starting at position 1784 of SEQ ID NO: 1560057
gacuacuagccagguaauc

SEQ ID NO: 1573134 - RNA, 19 nt, Artificial Sequence
  Description of Artificial Sequence: Synthetic oligonucleotide
  Antisense strand to SEQ ID NO: 1573133
gauuaccuggcuaguaguc

SEQ ID NO: 1573135 - RNA, 19 nt, Artificial Sequence
  Description of Artificial Sequence: Synthetic oligonucleotide
  Sense strand starting at position 1793 of SEQ ID NO: 1560057
ccagguaaucuuggaauaa

SEQ ID NO: 1573136 - RNA, 19 nt, Artificial Sequence
  Description of Artificial Sequence: Synthetic oligonucleotide
  Antisense strand to SEQ ID NO: 1573135
uuauuccaagauuaccugg

SEQ ID NO: 1573137 - RNA, 19 nt, Artificial Sequence
  Description of Artificial Sequence: Synthetic oligonucleotide
  Sense strand starting at position 1794 of SEQ ID NO: 1560057
cagguaaucuuggaauaag

SEQ ID NO: 1573138 - RNA, 19 nt, Artificial Sequence
  Description of Artificial Sequence: Synthetic oligonucleotide
  Antisense strand to SEQ ID NO: 1573137
cuuauuccaagauuaccug

SEQ ID NO: 1573139 - RNA, 19 nt, Artificial Sequence
  Description of Artificial Sequence: Synthetic oligonucleotide
  Sense strand starting at position 1804 of SEQ ID NO: 1560057
uggaauaagucauuaagcu

SEQ ID NO: 1573140 - RNA, 19 nt, Artificial Sequence
  Description of Artificial Sequence: Synthetic oligonucleotide
  Antisense strand to SEQ ID NO: 1573139
agcuuaaugacuuauucca

SEQ ID NO: 1573141 - RNA, 19 nt, Artificial Sequence
  Description of Artificial Sequence: Synthetic oligonucleotide
  Sense strand starting at position 1805 of SEQ ID NO: 1560057
ggaauaagucauuaagcuc

SEQ ID NO: 1573142 - RNA, 19 nt, Artificial Sequence
  Description of Artificial Sequence: Synthetic oligonucleotide
  Antisense strand to SEQ ID NO: 1573141
gagcuuaaugacuuauucc

SEQ ID NO: 1573143 - RNA, 19 nt, Artificial Sequence
  Description of Artificial Sequence: Synthetic oligonucleotide
  Sense strand starting at position 2032 of SEQ ID NO: 1560057
ccaagagcuuccuuugugu

SEQ ID NO: 1573144 - RNA, 19 nt, Artificial Sequence
  Description of Artificial Sequence: Synthetic oligonucleotide
  Antisense strand to SEQ ID NO: 1573143
acacaaaggaagcucuugg

SEQ ID NO: 1573145 - RNA, 19 nt, Artificial Sequence
  Description of Artificial Sequence: Synthetic oligonucleotide
  Sense strand starting at position 2034 of SEQ ID NO: 1560057
aagagcuuccuuuguguaa

SEQ ID NO: 1573146 - RNA, 19 nt, Artificial Sequence
  Description of Artificial Sequence: Synthetic oligonucleotide
  Antisense strand to SEQ ID NO: 1573145
uuacacaaaggaagcucuu

SEQ ID NO: 1573147 - RNA, 19 nt, Artificial Sequence
  Description of Artificial Sequence: Synthetic oligonucleotide
  Sense strand starting at position 2035 of SEQ ID NO: 1560057
agagcuuccuuuguguaau

SEQ ID NO: 1573148 - RNA, 19 nt, Artificial Sequence
  Description of Artificial Sequence: Synthetic oligonucleotide
  Antisense strand to SEQ ID NO: 1573147
auuacacaaaggaagcucu

SEQ ID NO: 1573149 - RNA, 19 nt, Artificial Sequence
  Description of Artificial Sequence: Synthetic oligonucleotide
  Sense strand starting at position 2037 of SEQ ID NO: 1560057
agcuuccuuuguguaauga

SEQ ID NO: 1573150 - RNA, 19 nt, Artificial Sequence
  Description of Artificial Sequence: Synthetic oligonucleotide
  Antisense strand to SEQ ID NO: 1573149
ucauuacacaaaggaagcu

SEQ ID NO: 1573151 - RNA, 19 nt, Artificial Sequence
  Description of Artificial Sequence: Synthetic oligonucleotide
  Sense strand starting at position 2121 of SEQ ID NO: 1560057
gugcgaauacugccuccuu

SEQ ID NO: 1573152 - RNA, 19 nt, Artificial Sequence
  Description of Artificial Sequence: Synthetic oligonucleotide
  Antisense strand to SEQ ID NO: 1573151
aaggaggcaguauucgcac

SEQ ID NO: 1573153 - RNA, 19 nt, Artificial Sequence
  Description of Artificial Sequence: Synthetic oligonucleotide
  Sense strand starting at position 2122 of SEQ ID NO: 1560057
ugcgaauacugccuccuua

SEQ ID NO: 1573154 - RNA, 19 nt, Artificial Sequence
  Description of Artificial Sequence: Synthetic oligonucleotide
  Antisense strand to SEQ ID NO: 1573153
uaaggaggcaguauucgca

SEQ ID NO: 1573155 - RNA, 19 nt, Artificial Sequence
  Description of Artificial Sequence: Synthetic oligonucleotide
  Sense strand starting at position 2214 of SEQ ID NO: 1560057
agguaagcucucgcuaugu

SEQ ID NO: 1573156 - RNA, 19 nt, Artificial Sequence
  Description of Artificial Sequence: Synthetic oligonucleotide
  Antisense strand to SEQ ID NO: 1573155
acauagcgagagcuuaccu

SEQ ID NO: 1573157 - RNA, 19 nt, Artificial Sequence
  Description of Artificial Sequence: Synthetic oligonucleotide
  Sense strand starting at position 2383 of SEQ ID NO: 1560057
aaagcagugucaguauuga

SEQ ID NO: 1573158 - RNA, 19 nt, Artificial Sequence
  Description of Artificial Sequence: Synthetic oligonucleotide
  Antisense strand to SEQ ID NO: 1573157
ucaauacugacacugcuuu

SEQ ID NO: 1573159 - RNA, 19 nt, Artificial Sequence
  Description of Artificial Sequence: Synthetic oligonucleotide
  Sense strand starting at position 2388 of SEQ ID NO: 1560057
agugucaguauugaggauu

SEQ ID NO: 1573160 - RNA, 19 nt, Artificial Sequence
  Description of Artificial Sequence: Synthetic oligonucleotide
  Antisense strand to SEQ ID NO: 1573159
aauccucaauacugacacu

SEQ ID NO: 1573161 - RNA, 19 nt, Artificial Sequence
  Description of Artificial Sequence: Synthetic oligonucleotide
  Sense strand starting at position 2417 of SEQ ID NO: 1560057
ggcugcugguguccauuau

SEQ ID NO: 1573162 - RNA, 19 nt, Artificial Sequence
  Description of Artificial Sequence: Synthetic oligonucleotide
  Antisense strand to SEQ ID NO: 1573161
auaauggacaccagcagcc

SEQ ID NO: 1573163 - RNA, 19 nt, Artificial Sequence
  Description of Artificial Sequence: Synthetic oligonucleotide
  Sense strand starting at position 2418 of SEQ ID NO: 1560057
gcugcugguguccauuauu

SEQ ID NO: 1573164 - RNA, 19 nt, Artificial Sequence
  Description of Artificial Sequence: Synthetic oligonucleotide
  Antisense strand to SEQ ID NO: 1573163
aauaauggacaccagcagc

SEQ ID NO: 1573165 - RNA, 19 nt, Artificial Sequence
  Description of Artificial Sequence: Synthetic oligonucleotide
  Sense strand starting at position 2421 of SEQ ID NO: 1560057
gcugguguccauuauuauu

SEQ ID NO: 1573166 - RNA, 19 nt, Artificial Sequence
  Description of Artificial Sequence: Synthetic oligonucleotide
  Antisense strand to SEQ ID NO: 1573165
aauaauaauggacaccagc

SEQ ID NO: 1573167 - RNA, 19 nt, Artificial Sequence
  Description of Artificial Sequence: Synthetic oligonucleotide
  Sense strand starting at position 2523 of SEQ ID NO: 1560057
uugauauuauucuagggcu

SEQ ID NO: 1573168 - RNA, 19 nt, Artificial Sequence
  Description of Artificial Sequence: Synthetic oligonucleotide
  Antisense strand to SEQ ID NO: 1573167
agcccuagaauaauaucaa

SEQ ID NO: 1573169 - RNA, 19 nt, Artificial Sequence
  Description of Artificial Sequence: Synthetic oligonucleotide
  Sense strand starting at position 2525 of SEQ ID NO: 1560057
gauauuauucuagggcuca

SEQ ID NO: 1573170 - RNA, 19 nt, Artificial Sequence
  Description of Artificial Sequence: Synthetic oligonucleotide
  Antisense strand to SEQ ID NO: 1573169
ugagcccuagaauaauauc

SEQ ID NO: 1573171 - RNA, 19 nt, Artificial Sequence
  Description of Artificial Sequence: Synthetic oligonucleotide
  Sense strand starting at position 2530 of SEQ ID NO: 1560057
uauucuagggcucacagau

SEQ ID NO: 1573172 - RNA, 19 nt, Artificial Sequence
  Description of Artificial Sequence: Synthetic oligonucleotide
  Antisense strand to SEQ ID NO: 1573171
aucugugagcccuagaaua

SEQ ID NO: 1573173 - RNA, 19 nt, Artificial Sequence
  Description of Artificial Sequence: Synthetic oligonucleotide
  Sense strand starting at position 2600 of SEQ ID NO: 1560057
gaauguaccugugauugaa

SEQ ID NO: 1573174 - RNA, 19 nt, Artificial Sequence
  Description of Artificial Sequence: Synthetic oligonucleotide
  Antisense strand to SEQ ID NO: 1573173
uucaaucacagguacauuc

SEQ ID NO: 1573175 - RNA, 19 nt, Artificial Sequence
  Description of Artificial Sequence: Synthetic oligonucleotide
  Sense strand starting at position 2602 of SEQ ID NO: 1560057
auguaccugugauugaaca

SEQ ID NO: 1573176 - RNA, 19 nt, Artificial Sequence
  Description of Artificial Sequence: Synthetic oligonucleotide
  Antisense strand to SEQ ID NO: 1573175
uguucaaucacagguacau

SEQ ID NO: 1573177 - RNA, 19 nt, Artificial Sequence
  Description of Artificial Sequence: Synthetic oligonucleotide
  Sense strand starting at position 2697 of SEQ ID NO: 1560057
gcacuauggcggucucagu

SEQ ID NO: 1573178 - RNA, 19 nt, Artificial Sequence
  Description of Artificial Sequence: Synthetic oligonucleotide
  Antisense strand to SEQ ID NO: 1573177
acugagaccgccauagugc

SEQ ID NO: 1573179 - RNA, 19 nt, Artificial Sequence
  Description of Artificial Sequence: Synthetic oligonucleotide
  Sense strand starting at position 2711 of SEQ ID NO: 1560057
ucaguagggagguguuaga

SEQ ID NO: 1573180 - RNA, 19 nt, Artificial Sequence
  Description of Artificial Sequence: Synthetic oligonucleotide
  Antisense strand to SEQ ID NO: 1573179
ucuaacaccucccuacuga

SEQ ID NO: 1573181 - RNA, 19 nt, Artificial Sequence
  Description of Artificial Sequence: Synthetic oligonucleotide
  Sense strand starting at position 2957 of SEQ ID NO: 1560057
gcugguuucgaauugccga

SEQ ID NO: 1573182 - RNA, 19 nt, Artificial Sequence
  Description of Artificial Sequence: Synthetic oligonucleotide
  Antisense strand to SEQ ID NO: 1573181
ucggcaauucgaaaccagc

SEQ ID NO: 1573183 - RNA, 19 nt, Artificial Sequence
  Description of Artificial Sequence: Synthetic oligonucleotide
  Sense strand starting at position 2980 of SEQ ID NO: 1560057
gggugauccgcucgcuuca

SEQ ID NO: 1573184 - RNA, 19 nt, Artificial Sequence
  Description of Artificial Sequence: Synthetic oligonucleotide
  Antisense strand to SEQ ID NO: 1573183
ugaagcgagcggaucaccc

SEQ ID NO: 1573185 - RNA, 19 nt, Artificial Sequence
  Description of Artificial Sequence: Synthetic oligonucleotide
  Sense strand starting at position 3047 of SEQ ID NO: 1560057
gaaagcacuuauuauggga

SEQ ID NO: 1573186 - RNA, 19 nt, Artificial Sequence
  Description of Artificial Sequence: Synthetic oligonucleotide
  Antisense strand to SEQ ID NO: 1573185
ucccauaauaagugcuuuc

SEQ ID NO: 1573187 - RNA, 19 nt, Artificial Sequence
  Description of Artificial Sequence: Synthetic oligonucleotide
  Sense strand starting at position 3050 of SEQ ID NO: 1560057
agcacuuauuaugggauuu

SEQ ID NO: 1573188 - RNA, 19 nt, Artificial Sequence
  Description of Artificial Sequence: Synthetic oligonucleotide
  Antisense strand to SEQ ID NO: 1573187
aaaucccauaauaagugcu

SEQ ID NO: 1573189 - RNA, 19 nt, Artificial Sequence
  Description of Artificial Sequence: Synthetic oligonucleotide
  Sense strand starting at position 3067 of SEQ ID NO: 1560057
uugcaauucugcucggugu

SEQ ID NO: 1573190 - RNA, 19 nt, Artificial Sequence
  Description of Artificial Sequence: Synthetic oligonucleotide
  Antisense strand to SEQ ID NO: 1573189
acaccgagcagaauugcaa

SEQ ID NO: 1573191 - RNA, 19 nt, Artificial Sequence
  Description of Artificial Sequence: Synthetic oligonucleotide
  Sense strand starting at position 3069 of SEQ ID NO: 1560057
gcaauucugcucgguguuu

SEQ ID NO: 1573192 - RNA, 19 nt, Artificial Sequence
  Description of Artificial Sequence: Synthetic oligonucleotide
  Antisense strand to SEQ ID NO: 1573191
aaacaccgagcagaauugc

SEQ ID NO: 1573193 - RNA, 19 nt, Artificial Sequence
  Description of Artificial Sequence: Synthetic oligonucleotide
  Sense strand starting at position 3113 of SEQ ID NO: 1560057
ggauuugggugggaugaau

SEQ ID NO: 1573194 - RNA, 19 nt, Artificial Sequence
  Description of Artificial Sequence: Synthetic oligonucleotide
  Antisense strand to SEQ ID NO: 1573193
auucaucccacccaaaucc

SEQ ID NO: 1573195 - RNA, 19 nt, Artificial Sequence
  Description of Artificial Sequence: Synthetic oligonucleotide
  Sense strand starting at position 378 of SEQ ID NO: 1560058
gguuaagugcgauguuaag

SEQ ID NO: 1573196 - RNA, 19 nt, Artificial Sequence
  Description of Artificial Sequence: Synthetic oligonucleotide
  Antisense strand to SEQ ID NO: 1573195
cuuaacaucgcacuuaacc

SEQ ID NO: 1573197 - RNA, 19 nt, Artificial Sequence
  Description of Artificial Sequence: Synthetic oligonucleotide
  Sense strand starting at position 388 of SEQ ID NO: 1560058
gauguuaagugugcaucaa

SEQ ID NO: 1573198 - RNA, 19 nt, Artificial Sequence
  Description of Artificial Sequence: Synthetic oligonucleotide
  Antisense strand to SEQ ID NO: 1573197
uugaugcacacuuaacauc

SEQ ID NO: 1573199 - RNA, 19 nt, Artificial Sequence
  Description of Artificial Sequence: Synthetic oligonucleotide
  Sense strand starting at position 389 of SEQ ID NO: 1560058
auguuaagugugcaucaaa

SEQ ID NO: 1573200 - RNA, 19 nt, Artificial Sequence
  Description of Artificial Sequence: Synthetic oligonucleotide
  Antisense strand to SEQ ID NO: 1573199
uuugaugcacacuuaacau

SEQ ID NO: 1573201 - RNA, 19 nt, Artificial Sequence
  Description of Artificial Sequence: Synthetic oligonucleotide
  Sense strand starting at position 392 of SEQ ID NO: 1560058
uuaagugugcaucaaauaa

SEQ ID NO: 1573202 - RNA, 19 nt, Artificial Sequence
  Description of Artificial Sequence: Synthetic oligonucleotide
  Antisense strand to SEQ ID NO: 1573201
uuauuugaugcacacuuaa

SEQ ID NO: 1573203 - RNA, 19 nt, Artificial Sequence
  Description of Artificial Sequence: Synthetic oligonucleotide
  Sense strand starting at position 440 of SEQ ID NO: 1560058
ugggacagucacugacuua

SEQ ID NO: 1573204 - RNA, 19 nt, Artificial Sequence
  Description of Artificial Sequence: Synthetic oligonucleotide
  Antisense strand to SEQ ID NO: 1573203
uaagucagugacuguccca

SEQ ID NO: 1573205 - RNA, 19 nt, Artificial Sequence
  Description of Artificial Sequence: Synthetic oligonucleotide
  Sense strand starting at position 443 of SEQ ID NO: 1560058
gacagucacugacuuaaug

SEQ ID NO: 1573206 - RNA, 19 nt, Artificial Sequence
  Description of Artificial Sequence: Synthetic oligonucleotide
  Antisense strand to SEQ ID NO: 1573205
cauuaagucagugacuguc

SEQ ID NO: 1573207 - RNA, 19 nt, Artificial Sequence
  Description of Artificial Sequence: Synthetic oligonucleotide
  Sense strand starting at position 475 of SEQ ID NO: 1560058
aagugugagcugggaacaa

SEQ ID NO: 1573208 - RNA, 19 nt, Artificial Sequence
  Description of Artificial Sequence: Synthetic oligonucleotide
  Antisense strand to SEQ ID NO: 1573207
uuguucccagcucacacuu

SEQ ID NO: 1573209 - RNA, 19 nt, Artificial Sequence
  Description of Artificial Sequence: Synthetic oligonucleotide
  Sense strand starting at position 516 of SEQ ID NO: 1560058
guccaugggaucugacaac

SEQ ID NO: 1573210 - RNA, 19 nt, Artificial Sequence
  Description of Artificial Sequence: Synthetic oligonucleotide
  Antisense strand to SEQ ID NO: 1573209
guugucagaucccauggac

SEQ ID NO: 1573211 - RNA, 19 nt, Artificial Sequence
  Description of Artificial Sequence: Synthetic oligonucleotide
  Sense strand starting at position 1022 of SEQ ID NO: 1560058
agaagacagcaaugcaaau

SEQ ID NO: 1573212 - RNA, 19 nt, Artificial Sequence
  Description of Artificial Sequence: Synthetic oligonucleotide
  Antisense strand to SEQ ID NO: 1573211
auuugcauugcugucuucu

SEQ ID NO: 1573213 - RNA, 19 nt, Artificial Sequence
  Description of Artificial Sequence: Synthetic oligonucleotide
  Sense strand starting at position 1075 of SEQ ID NO: 1560058
ugcacuagucauuaucaag

SEQ ID NO: 1573214 - RNA, 19 nt, Artificial Sequence
  Description of Artificial Sequence: Synthetic oligonucleotide
  Antisense strand to SEQ ID NO: 1573213
cuugauaaugacuagugca

SEQ ID NO: 1573215 - RNA, 19 nt, Artificial Sequence
  Description of Artificial Sequence: Synthetic oligonucleotide
  Sense strand starting at position 1358 of SEQ ID NO: 1560058
cuaugauauugggacuauc

SEQ ID NO: 1573216 - RNA, 19 nt, Artificial Sequence
  Description of Artificial Sequence: Synthetic oligonucleotide
  Antisense strand to SEQ ID NO: 1573215
gauagucccaauaucauag

SEQ ID NO: 1573217 - RNA, 19 nt, Artificial Sequence
  Description of Artificial Sequence: Synthetic oligonucleotide
  Sense strand starting at position 1368 of SEQ ID NO: 1560058
gggacuaucugcucucauu

SEQ ID NO: 1573218 - RNA, 19 nt, Artificial Sequence
  Description of Artificial Sequence: Synthetic oligonucleotide
  Antisense strand to SEQ ID NO: 1573217
aaugagagcagauaguccc

SEQ ID NO: 1573219 - RNA, 19 nt, Artificial Sequence
  Description of Artificial Sequence: Synthetic oligonucleotide
  Sense strand starting at position 1378 of SEQ ID NO: 1560058
gcucucauuguacagauga

SEQ ID NO: 1573220 - RNA, 19 nt, Artificial Sequence
  Description of Artificial Sequence: Synthetic oligonucleotide
  Antisense strand to SEQ ID NO: 1573219
ucaucuguacaaugagagc

SEQ ID NO: 1573221 - RNA, 19 nt, Artificial Sequence
  Description of Artificial Sequence: Synthetic oligonucleotide
  Sense strand starting at position 1499 of SEQ ID NO: 1560058
auacuaagcgcucaaacau

SEQ ID NO: 1573222 - RNA, 19 nt, Artificial Sequence
  Description of Artificial Sequence: Synthetic oligonucleotide
  Antisense strand to SEQ ID NO: 1573221
auguuugagcgcuuaguau

SEQ ID NO: 1573223 - RNA, 19 nt, Artificial Sequence
  Description of Artificial Sequence: Synthetic oligonucleotide
  Sense strand starting at position 1533 of SEQ ID NO: 1560058
uaguauaguaacgaaguga

SEQ ID NO: 1573224 - RNA, 19 nt, Artificial Sequence
  Description of Artificial Sequence: Synthetic oligonucleotide
  Antisense strand to SEQ ID NO: 1573223
ucacuucguuacuauacua

SEQ ID NO: 1573225 - RNA, 19 nt, Artificial Sequence
  Description of Artificial Sequence: Synthetic oligonucleotide
  Sense strand starting at position 1614 of SEQ ID NO: 1560058
uuauaaagccggugauaca

SEQ ID NO: 1573226 - RNA, 19 nt, Artificial Sequence
  Description of Artificial Sequence: Synthetic oligonucleotide
  Antisense strand to SEQ ID NO: 1573225
uguaucaccggcuuuauaa

SEQ ID NO: 1573227 - RNA, 19 nt, Artificial Sequence
  Description of Artificial Sequence: Synthetic oligonucleotide
  Sense strand starting at position 1623 of SEQ ID NO: 1560058
cggugauacagucggauuc

SEQ ID NO: 1573228 - RNA, 19 nt, Artificial Sequence
  Description of Artificial Sequence: Synthetic oligonucleotide
  Antisense strand to SEQ ID NO: 1573227
gaauccgacuguaucaccg

SEQ ID NO: 1573229 - RNA, 19 nt, Artificial Sequence
  Description of Artificial Sequence: Synthetic oligonucleotide
  Sense strand starting at position 1624 of SEQ ID NO: 1560058
ggugauacagucggauucu

SEQ ID NO: 1573230 - RNA, 19 nt, Artificial Sequence
  Description of Artificial Sequence: Synthetic oligonucleotide
  Antisense strand to SEQ ID NO: 1573229
agaauccgacuguaucacc

SEQ ID NO: 1573231 - RNA, 19 nt, Artificial Sequence
  Description of Artificial Sequence: Synthetic oligonucleotide
  Sense strand starting at position 2289 of SEQ ID NO: 1560058
ugucuuccacgcuauaaug

SEQ ID NO: 1573232 - RNA, 19 nt, Artificial Sequence
  Description of Artificial Sequence: Synthetic oligonucleotide
  Antisense strand to SEQ ID NO: 1573231
cauuauagcguggaagaca

SEQ ID NO: 1573233 - RNA, 19 nt, Artificial Sequence
  Description of Artificial Sequence: Synthetic oligonucleotide
  Sense strand starting at position 2298 of SEQ ID NO: 1560058
cgcuauaaugcauggaaua

SEQ ID NO: 1573234 - RNA, 19 nt, Artificial Sequence
  Description of Artificial Sequence: Synthetic oligonucleotide
  Antisense strand to SEQ ID NO: 1573233
uauuccaugcauuauagcg

SEQ ID NO: 1573235 - RNA, 19 nt, Artificial Sequence
  Description of Artificial Sequence: Synthetic oligonucleotide
  Sense strand starting at position 2299 of SEQ ID NO: 1560058
gcuauaaugcauggaauau

SEQ ID NO: 1573236 - RNA, 19 nt, Artificial Sequence
  Description of Artificial Sequence: Synthetic oligonucleotide
  Antisense strand to SEQ ID NO: 1573235
auauuccaugcauuauagc

SEQ ID NO: 1573237 - RNA, 19 nt, Artificial Sequence
  Description of Artificial Sequence: Synthetic oligonucleotide
  Sense strand starting at position 2373 of SEQ ID NO: 1560058
ugucuuccacgcuauaauu

SEQ ID NO: 1573238 - RNA, 19 nt, Artificial Sequence
  Description of Artificial Sequence: Synthetic oligonucleotide
  Antisense strand to SEQ ID NO: 1573237
aauuauagcguggaagaca

SEQ ID NO: 1573239 - RNA, 19 nt, Artificial Sequence
  Description of Artificial Sequence: Synthetic oligonucleotide
  Sense strand starting at position 2499 of SEQ ID NO: 1560058
cuccucuuguugucaucaa

SEQ ID NO: 1573240 - RNA, 19 nt, Artificial Sequence
  Description of Artificial Sequence: Synthetic oligonucleotide
  Antisense strand to SEQ ID NO: 1573239
uugaugacaacaagaggag

SEQ ID NO: 1573241 - RNA, 19 nt, Artificial Sequence
  Description of Artificial Sequence: Synthetic oligonucleotide
  Sense strand starting at position 2520 of SEQ ID NO: 1560058
cccuuaacucgcuuucguu

SEQ ID NO: 1573242 - RNA, 19 nt, Artificial Sequence
  Description of Artificial Sequence: Synthetic oligonucleotide
  Antisense strand to SEQ ID NO: 1573241
aacgaaagcgaguuaaggg

SEQ ID NO: 1573243 - RNA, 19 nt, Artificial Sequence
  Description of Artificial Sequence: Synthetic oligonucleotide
  Sense strand starting at position 2565 of SEQ ID NO: 1560058
ggucguaaucgcucccuuu

SEQ ID NO: 1573244 - RNA, 19 nt, Artificial Sequence
  Description of Artificial Sequence: Synthetic oligonucleotide
  Antisense strand to SEQ ID NO: 1573243
aaagggagcgauuacgacc

SEQ ID NO: 1573245 - RNA, 19 nt, Artificial Sequence
  Description of Artificial Sequence: Synthetic oligonucleotide
  Sense strand starting at position 2566 of SEQ ID NO: 1560058
gucguaaucgcucccuuua

SEQ ID NO: 1573246 - RNA, 19 nt, Artificial Sequence
  Description of Artificial Sequence: Synthetic oligonucleotide
  Antisense strand to SEQ ID NO: 1573245
uaaagggagcgauuacgac

SEQ ID NO: 1573247 - RNA, 19 nt, Artificial Sequence
  Description of Artificial Sequence: Synthetic oligonucleotide
  Sense strand starting at position 2583 of SEQ ID NO: 1560058
uaaauucgucaucgccaua

SEQ ID NO: 1573248 - RNA, 19 nt, Artificial Sequence
  Description of Artificial Sequence: Synthetic oligonucleotide
  Antisense strand to SEQ ID NO: 1573247
uauggcgaugacgaauuua

SEQ ID NO: 1573249 - RNA, 19 nt, Artificial Sequence
  Description of Artificial Sequence: Synthetic oligonucleotide
  Sense strand starting at position 2588 of SEQ ID NO: 1560058
ucgucaucgccauauguua

SEQ ID NO: 1573250 - RNA, 19 nt, Artificial Sequence
  Description of Artificial Sequence: Synthetic oligonucleotide
  Antisense strand to SEQ ID NO: 1573249
uaacauauggcgaugacga

SEQ ID NO: 1573251 - RNA, 19 nt, Artificial Sequence
  Description of Artificial Sequence: Synthetic oligonucleotide
  Sense strand starting at position 2596 of SEQ ID NO: 1560058
gccauauguuaccugcauc

SEQ ID NO: 1573252 - RNA, 19 nt, Artificial Sequence
  Description of Artificial Sequence: Synthetic oligonucleotide
  Antisense strand to SEQ ID NO: 1573251
gaugcagguaacauauggc

SEQ ID NO: 1573253 - RNA, 19 nt, Artificial Sequence
  Description of Artificial Sequence: Synthetic oligonucleotide
  Sense strand starting at position 2623 of SEQ ID NO: 1560058
guugccauuucuccuuuau

SEQ ID NO: 1573254 - RNA, 19 nt, Artificial Sequence
  Description of Artificial Sequence: Synthetic oligonucleotide
  Antisense strand to SEQ ID NO: 1573253
auaaaggagaaauggcaac

SEQ ID NO: 1573255 - RNA, 19 nt, Artificial Sequence
  Description of Artificial Sequence: Synthetic oligonucleotide
  Sense strand starting at position 2717 of SEQ ID NO: 1560058
cuuaaaucgcgcuaaugca

SEQ ID NO: 1573256 - RNA, 19 nt, Artificial Sequence
  Description of Artificial Sequence: Synthetic oligonucleotide
  Antisense strand to SEQ ID NO: 1573255
ugcauuagcgcgauuuaag

SEQ ID NO: 1573257 - RNA, 19 nt, Artificial Sequence
  Description of Artificial Sequence: Synthetic oligonucleotide
  Sense strand starting at position 2736 of SEQ ID NO: 1560058
acucuuacgucaucauuac

SEQ ID NO: 1573258 - RNA, 19 nt, Artificial Sequence
  Description of Artificial Sequence: Synthetic oligonucleotide
  Antisense strand to SEQ ID NO: 1573257
guaaugaugacguaagagu

SEQ ID NO: 1573259 - RNA, 19 nt, Artificial Sequence
  Description of Artificial Sequence: Synthetic oligonucleotide
  Sense strand starting at position 2873 of SEQ ID NO: 1560058
cuccgugucuucgucauuu

SEQ ID NO: 1573260 - RNA, 19 nt, Artificial Sequence
  Description of Artificial Sequence: Synthetic oligonucleotide
  Antisense strand to SEQ ID NO: 1573259
aaaugacgaagacacggag

SEQ ID NO: 1573261 - RNA, 19 nt, Artificial Sequence
  Description of Artificial Sequence: Synthetic oligonucleotide
  Sense strand starting at position 3063 of SEQ ID NO: 1560058
ugugacgauucugugaguu

SEQ ID NO: 1573262 - RNA, 19 nt, Artificial Sequence
  Description of Artificial Sequence: Synthetic oligonucleotide
  Antisense strand to SEQ ID NO: 1573261
aacucacagaaucgucaca

SEQ ID NO: 1573263 - RNA, 19 nt, Artificial Sequence
  Description of Artificial Sequence: Synthetic oligonucleotide
  Sense strand starting at position 3067 of SEQ ID NO: 1560058
acgauucugugaguuuauu

SEQ ID NO: 1573264 - RNA, 19 nt, Artificial Sequence
  Description of Artificial Sequence: Synthetic oligonucleotide
  Antisense strand to SEQ ID NO: 1573263
aauaaacucacagaaucgu

SEQ ID NO: 1573265 - RNA, 19 nt, Artificial Sequence
  Description of Artificial Sequence: Synthetic oligonucleotide
  Sense strand starting at position 3075 of SEQ ID NO: 1560058
gugaguuuauucuuguggu

SEQ ID NO: 1573266 - RNA, 19 nt, Artificial Sequence
  Description of Artificial Sequence: Synthetic oligonucleotide
  Antisense strand to SEQ ID NO: 1573265
accacaagaauaaacucac

SEQ ID NO: 1573267 - RNA, 19 nt, Artificial Sequence
  Description of Artificial Sequence: Synthetic oligonucleotide
  Sense strand starting at position 3637 of SEQ ID NO: 1560058
acaggagaaucguucgaau

SEQ ID NO: 1573268 - RNA, 19 nt, Artificial Sequence
  Description of Artificial Sequence: Synthetic oligonucleotide
  Antisense strand to SEQ ID NO: 1573267
auucgaacgauucuccugu

SEQ ID NO: 1573269 - RNA, 19 nt, Artificial Sequence
  Description of Artificial Sequence: Synthetic oligonucleotide
  Sense strand starting at position 3639 of SEQ ID NO: 1560058
aggagaaucguucgaaucu

SEQ ID NO: 1573270 - RNA, 19 nt, Artificial Sequence
  Description of Artificial Sequence: Synthetic oligonucleotide
  Antisense strand to SEQ ID NO: 1573269
agauucgaacgauucuccu

SEQ ID NO: 1573271 - RNA, 19 nt, Artificial Sequence
  Description of Artificial Sequence: Synthetic oligonucleotide
  Sense strand starting at position 3759 of SEQ ID NO: 1560058
gcaugaucuugggcaacua

SEQ ID NO: 1573272 - RNA, 19 nt, Artificial Sequence
  Description of Artificial Sequence: Synthetic oligonucleotide
  Antisense strand to SEQ ID NO: 1573271
uaguugcccaagaucaugc

SEQ ID NO: 1573273 - RNA, 19 nt, Artificial Sequence
  Description of Artificial Sequence: Synthetic oligonucleotide
  Sense strand starting at position 3799 of SEQ ID NO: 1560058
guuacugcaucugcaauau

SEQ ID NO: 1573274 - RNA, 19 nt, Artificial Sequence
  Description of Artificial Sequence: Synthetic oligonucleotide
  Antisense strand to SEQ ID NO: 1573273
auauugcagaugcaguaac

SEQ ID NO: 1573275 - RNA, 19 nt, Artificial Sequence
  Description of Artificial Sequence: Synthetic oligonucleotide
  Sense strand starting at position 496 of SEQ ID NO: 1560059
gguuaagugcgauguuaag

SEQ ID NO: 1573276 - RNA, 19 nt, Artificial Sequence
  Description of Artificial Sequence: Synthetic oligonucleotide
  Antisense strand to SEQ ID NO: 1573275
cuuaacaucgcacuuaacc

SEQ ID NO: 1573277 - RNA, 19 nt, Artificial Sequence
  Description of Artificial Sequence: Synthetic oligonucleotide
  Sense strand starting at position 506 of SEQ ID NO: 1560059
gauguuaagugugcaucaa

SEQ ID NO: 1573278 - RNA, 19 nt, Artificial Sequence
  Description of Artificial Sequence: Synthetic oligonucleotide
  Antisense strand to SEQ ID NO: 1573277
uugaugcacacuuaacauc

SEQ ID NO: 1573279 - RNA, 19 nt, Artificial Sequence
  Description of Artificial Sequence: Synthetic oligonucleotide
  Sense strand starting at position 507 of SEQ ID NO: 1560059
auguuaagugugcaucaaa

SEQ ID NO: 1573280 - RNA, 19 nt, Artificial Sequence
  Description of Artificial Sequence: Synthetic oligonucleotide
  Antisense strand to SEQ ID NO: 1573279
uuugaugcacacuuaacau

SEQ ID NO: 1573281 - RNA, 19 nt, Artificial Sequence
  Description of Artificial Sequence: Synthetic oligonucleotide
  Sense strand starting at position 510 of SEQ ID NO: 1560059
uuaagugugcaucaaauaa

SEQ ID NO: 1573282 - RNA, 19 nt, Artificial Sequence
  Description of Artificial Sequence: Synthetic oligonucleotide
  Antisense strand to SEQ ID NO: 1573281
uuauuugaugcacacuuaa

SEQ ID NO: 1573283 - RNA, 19 nt, Artificial Sequence
  Description of Artificial Sequence: Synthetic oligonucleotide
  Sense strand starting at position 558 of SEQ ID NO: 1560059
ugggacagucacugacuua

SEQ ID NO: 1573284 - RNA, 19 nt, Artificial Sequence
  Description of Artificial Sequence: Synthetic oligonucleotide
  Antisense strand to SEQ ID NO: 1573283
uaagucagugacuguccca

SEQ ID NO: 1573285 - RNA, 19 nt, Artificial Sequence
  Description of Artificial Sequence: Synthetic oligonucleotide
  Sense strand starting at position 561 of SEQ ID NO: 1560059
gacagucacugacuuaaug

SEQ ID NO: 1573286 - RNA, 19 nt, Artificial Sequence
  Description of Artificial Sequence: Synthetic oligonucleotide
  Antisense strand to SEQ ID NO: 1573285
cauuaagucagugacuguc

SEQ ID NO: 1573287 - RNA, 19 nt, Artificial Sequence
  Description of Artificial Sequence: Synthetic oligonucleotide
  Sense strand starting at position 593 of SEQ ID NO: 1560059
aagugugagcugggaacaa

SEQ ID NO: 1573288 - RNA, 19 nt, Artificial Sequence
  Description of Artificial Sequence: Synthetic oligonucleotide
  Antisense strand to SEQ ID NO: 1573287
uuguucccagcucacacuu

SEQ ID NO: 1573289 - RNA, 19 nt, Artificial Sequence
  Description of Artificial Sequence: Synthetic oligonucleotide
  Sense strand starting at position 634 of SEQ ID NO: 1560059
guccaugggaucugacaac

SEQ ID NO: 1573290 - RNA, 19 nt, Artificial Sequence
  Description of Artificial Sequence: Synthetic oligonucleotide
  Antisense strand to SEQ ID NO: 1573289
guugucagaucccauggac

SEQ ID NO: 1573291 - RNA, 19 nt, Artificial Sequence
  Description of Artificial Sequence: Synthetic oligonucleotide
  Sense strand starting at position 1140 of SEQ ID NO: 1560059
agaagacagcaaugcaaau

SEQ ID NO: 1573292 - RNA, 19 nt, Artificial Sequence
  Description of Artificial Sequence: Synthetic oligonucleotide
  Antisense strand to SEQ ID NO: 1573291
auuugcauugcugucuucu

SEQ ID NO: 1573293 - RNA, 19 nt, Artificial Sequence
  Description of Artificial Sequence: Synthetic oligonucleotide
  Sense strand starting at position 1193 of SEQ ID NO: 1560059
ugcacuagucauuaucaag

SEQ ID NO: 1573294 - RNA, 19 nt, Artificial Sequence
  Description of Artificial Sequence: Synthetic oligonucleotide
  Antisense strand to SEQ ID NO: 1573293
cuugauaaugacuagugca

SEQ ID NO: 1573295 - RNA, 19 nt, Artificial Sequence
  Description of Artificial Sequence: Synthetic oligonucleotide
  Sense strand starting at position 1476 of SEQ ID NO: 1560059
cuaugauauugggacuauc

SEQ ID NO: 1573296 - RNA, 19 nt, Artificial Sequence
  Description of Artificial Sequence: Synthetic oligonucleotide
  Antisense strand to SEQ ID NO: 1573295
gauagucccaauaucauag

SEQ ID NO: 1573297 - RNA, 19 nt, Artificial Sequence
  Description of Artificial Sequence: Synthetic oligonucleotide
  Sense strand starting at position 1486 of SEQ ID NO: 1560059
gggacuaucugcucucauu

SEQ ID NO: 1573298 - RNA, 19 nt, Artificial Sequence
  Description of Artificial Sequence: Synthetic oligonucleotide
  Antisense strand to SEQ ID NO: 1573297
aaugagagcagauaguccc

SEQ ID NO: 1573299 - RNA, 19 nt, Artificial Sequence
  Description of Artificial Sequence: Synthetic oligonucleotide
  Sense strand starting at position 1496 of SEQ ID NO: 1560059
gcucucauuguacagauga

SEQ ID NO: 1573300 - RNA, 19 nt, Artificial Sequence
  Description of Artificial Sequence: Synthetic oligonucleotide
  Antisense strand to SEQ ID NO: 1573299
ucaucuguacaaugagagc

SEQ ID NO: 1573301 - RNA, 19 nt, Artificial Sequence
  Description of Artificial Sequence: Synthetic oligonucleotide
  Sense strand starting at position 1617 of SEQ ID NO: 1560059
auacuaagcgcucaaacau

SEQ ID NO: 1573302 - RNA, 19 nt, Artificial Sequence
  Description of Artificial Sequence: Synthetic oligonucleotide
  Antisense strand to SEQ ID NO: 1573301
auguuugagcgcuuaguau

SEQ ID NO: 1573303 - RNA, 19 nt, Artificial Sequence
  Description of Artificial Sequence: Synthetic oligonucleotide
  Sense strand starting at position 1651 of SEQ ID NO: 1560059
uaguauaguaacgaaguga

SEQ ID NO: 1573304 - RNA, 19 nt, Artificial Sequence
  Description of Artificial Sequence: Synthetic oligonucleotide
  Antisense strand to SEQ ID NO: 1573303
ucacuucguuacuauacua

SEQ ID NO: 1573305 - RNA, 19 nt, Artificial Sequence
  Description of Artificial Sequence: Synthetic oligonucleotide
  Sense strand starting at position 1732 of SEQ ID NO: 1560059
uuauaaagccggugauaca

SEQ ID NO: 1573306 - RNA, 19 nt, Artificial Sequence
  Description of Artificial Sequence: Synthetic oligonucleotide
  Antisense strand to SEQ ID NO: 1573305
uguaucaccggcuuuauaa

SEQ ID NO: 1573307 - RNA, 19 nt, Artificial Sequence
  Description of Artificial Sequence: Synthetic oligonucleotide
  Sense strand starting at position 1741 of SEQ ID NO: 1560059
cggugauacagucggauuc

SEQ ID NO: 1573308 - RNA, 19 nt, Artificial Sequence
  Description of Artificial Sequence: Synthetic oligonucleotide
  Antisense strand to SEQ ID NO: 1573307
gaauccgacuguaucaccg

SEQ ID NO: 1573309 - RNA, 19 nt, Artificial Sequence
  Description of Artificial Sequence: Synthetic oligonucleotide
  Sense strand starting at position 1742 of SEQ ID NO: 1560059
ggugauacagucggauucu

SEQ ID NO: 1573310 - RNA, 19 nt, Artificial Sequence
  Description of Artificial Sequence: Synthetic oligonucleotide
  Antisense strand to SEQ ID NO: 1573309
agaauccgacuguaucacc

SEQ ID NO: 1573311 - RNA, 19 nt, Artificial Sequence
  Description of Artificial Sequence: Synthetic oligonucleotide
  Sense strand starting at position 2407 of SEQ ID NO: 1560059
ugucuuccacgcuauaaug

SEQ ID NO: 1573312 - RNA, 19 nt, Artificial Sequence
  Description of Artificial Sequence: Synthetic oligonucleotide
  Antisense strand to SEQ ID NO: 1573311
cauuauagcguggaagaca

SEQ ID NO: 1573313 - RNA, 19 nt, Artificial Sequence
  Description of Artificial Sequence: Synthetic oligonucleotide
  Sense strand starting at position 2416 of SEQ ID NO: 1560059
cgcuauaaugcauggaaua

SEQ ID NO: 1573314 - RNA, 19 nt, Artificial Sequence
  Description of Artificial Sequence: Synthetic oligonucleotide
  Antisense strand to SEQ ID NO: 1573313
uauuccaugcauuauagcg

SEQ ID NO: 1573315 - RNA, 19 nt, Artificial Sequence
  Description of Artificial Sequence: Synthetic oligonucleotide
  Sense strand starting at position 2417 of SEQ ID NO: 1560059
gcuauaaugcauggaauau

SEQ ID NO: 1573316 - RNA, 19 nt, Artificial Sequence
  Description of Artificial Sequence: Synthetic oligonucleotide
  Antisense strand to SEQ ID NO: 1573315
auauuccaugcauuauagc

SEQ ID NO: 1573317 - RNA, 19 nt, Artificial Sequence
  Description of Artificial Sequence: Synthetic oligonucleotide
  Sense strand starting at position 2491 of SEQ ID NO: 1560059
ugucuuccacgcuauaauu

SEQ ID NO: 1573318 - RNA, 19 nt, Artificial Sequence
  Description of Artificial Sequence: Synthetic oligonucleotide
  Antisense strand to SEQ ID NO: 1573317
aauuauagcguggaagaca

SEQ ID NO: 1573319 - RNA, 19 nt, Artificial Sequence
  Description of Artificial Sequence: Synthetic oligonucleotide
  Sense strand starting at position 2617 of SEQ ID NO: 1560059
cuccucuuguugucaucaa

SEQ ID NO: 1573320 - RNA, 19 nt, Artificial Sequence
  Description of Artificial Sequence: Synthetic oligonucleotide
  Antisense strand to SEQ ID NO: 1573319
uugaugacaacaagaggag

SEQ ID NO: 1573321 - RNA, 19 nt, Artificial Sequence
  Description of Artificial Sequence: Synthetic oligonucleotide
  Sense strand starting at position 2638 of SEQ ID NO: 1560059
cccuuaacucgcuuucguu

SEQ ID NO: 1573322 - RNA, 19 nt, Artificial Sequence
  Description of Artificial Sequence: Synthetic oligonucleotide
  Antisense strand to SEQ ID NO: 1573321
aacgaaagcgaguuaaggg

SEQ ID NO: 1573323 - RNA, 19 nt, Artificial Sequence
  Description of Artificial Sequence: Synthetic oligonucleotide
  Sense strand starting at position 2683 of SEQ ID NO: 1560059
ggucguaaucgcucccuuu

SEQ ID NO: 1573324 - RNA, 19 nt, Artificial Sequence
  Description of Artificial Sequence: Synthetic oligonucleotide
  Antisense strand to SEQ ID NO: 1573323
aaagggagcgauuacgacc

SEQ ID NO: 1573325 - RNA, 19 nt, Artificial Sequence
  Description of Artificial Sequence: Synthetic oligonucleotide
  Sense strand starting at position 2684 of SEQ ID NO: 1560059
gucguaaucgcucccuuua

SEQ ID NO: 1573326 - RNA, 19 nt, Artificial Sequence
  Description of Artificial Sequence: Synthetic oligonucleotide
  Antisense strand to SEQ ID NO: 1573325
uaaagggagcgauuacgac

SEQ ID NO: 1573327 - RNA, 19 nt, Artificial Sequence
  Description of Artificial Sequence: Synthetic oligonucleotide
  Sense strand starting at position 2701 of SEQ ID NO: 1560059
uaaauucgucaucgccaua

SEQ ID NO: 1573328 - RNA, 19 nt, Artificial Sequence
  Description of Artificial Sequence: Synthetic oligonucleotide
  Antisense strand to SEQ ID NO: 1573327
uauggcgaugacgaauuua

SEQ ID NO: 1573329 - RNA, 19 nt, Artificial Sequence
  Description of Artificial Sequence: Synthetic oligonucleotide
  Sense strand starting at position 2706 of SEQ ID NO: 1560059
ucgucaucgccauauguua

SEQ ID NO: 1573330 - RNA, 19 nt, Artificial Sequence
  Description of Artificial Sequence: Synthetic oligonucleotide
  Antisense strand to SEQ ID NO: 1573329
uaacauauggcgaugacga

SEQ ID NO: 1573331 - RNA, 19 nt, Artificial Sequence
  Description of Artificial Sequence: Synthetic oligonucleotide
  Sense strand starting at position 2714 of SEQ ID NO: 1560059
gccauauguuaccugcauc

SEQ ID NO: 1573332 - RNA, 19 nt, Artificial Sequence
  Description of Artificial Sequence: Synthetic oligonucleotide
  Antisense strand to SEQ ID NO: 1573331
gaugcagguaacauauggc

SEQ ID NO: 1573333 - RNA, 19 nt, Artificial Sequence
  Description of Artificial Sequence: Synthetic oligonucleotide
  Sense strand starting at position 2741 of SEQ ID NO: 1560059
guugccauuucuccuuuau

SEQ ID NO: 1573334 - RNA, 19 nt, Artificial Sequence
  Description of Artificial Sequence: Synthetic oligonucleotide
  Antisense strand to SEQ ID NO: 1573333
auaaaggagaaauggcaac

SEQ ID NO: 1573335 - RNA, 19 nt, Artificial Sequence
  Description of Artificial Sequence: Synthetic oligonucleotide
  Sense strand starting at position 2835 of SEQ ID NO: 1560059
cuuaaaucgcgcuaaugca

SEQ ID NO: 1573336 - RNA, 19 nt, Artificial Sequence
  Description of Artificial Sequence: Synthetic oligonucleotide
  Antisense strand to SEQ ID NO: 1573335
ugcauuagcgcgauuuaag

SEQ ID NO: 1573337 - RNA, 19 nt, Artificial Sequence
  Description of Artificial Sequence: Synthetic oligonucleotide
  Sense strand starting at position 2854 of SEQ ID NO: 1560059
acucuuacgucaucauuac

SEQ ID NO: 1573338 - RNA, 19 nt, Artificial Sequence
  Description of Artificial Sequence: Synthetic oligonucleotide
  Antisense strand to SEQ ID NO: 1573337
guaaugaugacguaagagu

SEQ ID NO: 1573339 - RNA, 19 nt, Artificial Sequence
  Description of Artificial Sequence: Synthetic oligonucleotide
  Sense strand starting at position 2991 of SEQ ID NO: 1560059
cuccgugucuucgucauuu

SEQ ID NO: 1573340 - RNA, 19 nt, Artificial Sequence
  Description of Artificial Sequence: Synthetic oligonucleotide
  Antisense strand to SEQ ID NO: 1573339
aaaugacgaagacacggag

SEQ ID NO: 1573341 - RNA, 19 nt, Artificial Sequence
  Description of Artificial Sequence: Synthetic oligonucleotide
  Sense strand starting at position 3181 of SEQ ID NO: 1560059
ugugacgauucugugaguu

SEQ ID NO: 1573342 - RNA, 19 nt, Artificial Sequence
  Description of Artificial Sequence: Synthetic oligonucleotide
  Antisense strand to SEQ ID NO: 1573341
aacucacagaaucgucaca

SEQ ID NO: 1573343 - RNA, 19 nt, Artificial Sequence
  Description of Artificial Sequence: Synthetic oligonucleotide
  Sense strand starting at position 3185 of SEQ ID NO: 1560059
acgauucugugaguuuauu

SEQ ID NO: 1573344 - RNA, 19 nt, Artificial Sequence
  Description of Artificial Sequence: Synthetic oligonucleotide
  Antisense strand to SEQ ID NO: 1573343
aauaaacucacagaaucgu

SEQ ID NO: 1573345 - RNA, 19 nt, Artificial Sequence
  Description of Artificial Sequence: Synthetic oligonucleotide
  Sense strand starting at position 3193 of SEQ ID NO: 1560059
gugaguuuauucuuguggu

SEQ ID NO: 1573346 - RNA, 19 nt, Artificial Sequence
  Description of Artificial Sequence: Synthetic oligonucleotide
  Antisense strand to SEQ ID NO: 1573345
accacaagaauaaacucac

SEQ ID NO: 1573347 - RNA, 19 nt, Artificial Sequence
  Description of Artificial Sequence: Synthetic oligonucleotide
  Sense strand starting at position 3755 of SEQ ID NO: 1560059
acaggagaaucguucgaau

SEQ ID NO: 1573348 - RNA, 19 nt, Artificial Sequence
  Description of Artificial Sequence: Synthetic oligonucleotide
  Antisense strand to SEQ ID NO: 1573347
auucgaacgauucuccugu

SEQ ID NO: 1573349 - RNA, 19 nt, Artificial Sequence
  Description of Artificial Sequence: Synthetic oligonucleotide
  Sense strand starting at position 3757 of SEQ ID NO: 1560059
aggagaaucguucgaaucu

SEQ ID NO: 1573350 - RNA, 19 nt, Artificial Sequence
  Description of Artificial Sequence: Synthetic oligonucleotide
  Antisense strand to SEQ ID NO: 1573349
agauucgaacgauucuccu

SEQ ID NO: 1573351 - RNA, 19 nt, Artificial Sequence
  Description of Artificial Sequence: Synthetic oligonucleotide
  Sense strand starting at position 3877 of SEQ ID NO: 1560059
gcaugaucuugggcaacua

SEQ ID NO: 1573352 - RNA, 19 nt, Artificial Sequence
  Description of Artificial Sequence: Synthetic oligonucleotide
  Antisense strand to SEQ ID NO: 1573351
uaguugcccaagaucaugc

SEQ ID NO: 1573353 - RNA, 19 nt, Artificial Sequence
  Description of Artificial Sequence: Synthetic oligonucleotide
  Sense strand starting at position 3917 of SEQ ID NO: 1560059
guuacugcaucugcaauau

SEQ ID NO: 1573354 - RNA, 19 nt, Artificial Sequence
  Description of Artificial Sequence: Synthetic oligonucleotide
  Antisense strand to SEQ ID NO: 1573353
auauugcagaugcaguaac

SEQ ID NO: 1573355 - RNA, 19 nt, Artificial Sequence
  Description of Artificial Sequence: Synthetic oligonucleotide
  Sense strand starting at position 226 of SEQ ID NO: 1560060
aaauaauaaugaggagaga

SEQ ID NO: 1573356 - RNA, 19 nt, Artificial Sequence
  Description of Artificial Sequence: Synthetic oligonucleotide
  Antisense strand to SEQ ID NO: 1573355
ucucuccucauuauuauuu

SEQ ID NO: 1573357 - RNA, 19 nt, Artificial Sequence
  Description of Artificial Sequence: Synthetic oligonucleotide
  Sense strand starting at position 246 of SEQ ID NO: 1560060
ccucgacugagucagguuu

SEQ ID NO: 1573358 - RNA, 19 nt, Artificial Sequence
  Description of Artificial Sequence: Synthetic oligonucleotide
  Antisense strand to SEQ ID NO: 1573357
aaaccugacucagucgagg

SEQ ID NO: 1573359 - RNA, 19 nt, Artificial Sequence
  Description of Artificial Sequence: Synthetic oligonucleotide
  Sense strand starting at position 252 of SEQ ID NO: 1560060
cugagucagguuugaacau

SEQ ID NO: 1573360 - RNA, 19 nt, Artificial Sequence
  Description of Artificial Sequence: Synthetic oligonucleotide
  Antisense strand to SEQ ID NO: 1573359
auguucaaaccugacucag

SEQ ID NO: 1573361 - RNA, 19 nt, Artificial Sequence
  Description of Artificial Sequence: Synthetic oligonucleotide
  Sense strand starting at position 263 of SEQ ID NO: 1560060
uugaacauaucagcuguaa

SEQ ID NO: 1573362 - RNA, 19 nt, Artificial Sequence
  Description of Artificial Sequence: Synthetic oligonucleotide
  Antisense strand to SEQ ID NO: 1573361
uuacagcugauauguucaa

SEQ ID NO: 1573363 - RNA, 19 nt, Artificial Sequence
  Description of Artificial Sequence: Synthetic oligonucleotide
  Sense strand starting at position 328 of SEQ ID NO: 1560060
guuaaauugcaguauuaag

SEQ ID NO: 1573364 - RNA, 19 nt, Artificial Sequence
  Description of Artificial Sequence: Synthetic oligonucleotide
  Antisense strand to SEQ ID NO: 1573363
cuuaauacugcaauuuaac

SEQ ID NO: 1573365 - RNA, 19 nt, Artificial Sequence
  Description of Artificial Sequence: Synthetic oligonucleotide
  Sense strand starting at position 335 of SEQ ID NO: 1560060
ugcaguauuaagggugaca

SEQ ID NO: 1573366 - RNA, 19 nt, Artificial Sequence
  Description of Artificial Sequence: Synthetic oligonucleotide
  Antisense strand to SEQ ID NO: 1573365
ugucacccuuaauacugca

SEQ ID NO: 1573367 - RNA, 19 nt, Artificial Sequence
  Description of Artificial Sequence: Synthetic oligonucleotide
  Sense strand starting at position 337 of SEQ ID NO: 1560060
caguauuaagggugacaau

SEQ ID NO: 1573368 - RNA, 19 nt, Artificial Sequence
  Description of Artificial Sequence: Synthetic oligonucleotide
  Antisense strand to SEQ ID NO: 1573367
auugucacccuuaauacug

SEQ ID NO: 1573369 - RNA, 19 nt, Artificial Sequence
  Description of Artificial Sequence: Synthetic oligonucleotide
  Sense strand starting at position 761 of SEQ ID NO: 1560060
cccauuuguugguagauuu

SEQ ID NO: 1573370 - RNA, 19 nt, Artificial Sequence
  Description of Artificial Sequence: Synthetic oligonucleotide
  Antisense strand to SEQ ID NO: 1573369
aaaucuaccaacaaauggg

SEQ ID NO: 1573371 - RNA, 19 nt, Artificial Sequence
  Description of Artificial Sequence: Synthetic oligonucleotide
  Sense strand starting at position 880 of SEQ ID NO: 1560060
ggagguaagucaaguagag

SEQ ID NO: 1573372 - RNA, 19 nt, Artificial Sequence
  Description of Artificial Sequence: Synthetic oligonucleotide
  Antisense strand to SEQ ID NO: 1573371
cucuacuugacuuaccucc

SEQ ID NO: 1573373 - RNA, 19 nt, Artificial Sequence
  Description of Artificial Sequence: Synthetic oligonucleotide
  Sense strand starting at position 1100 of SEQ ID NO: 1560060
ccucguuugcuuccuucua

SEQ ID NO: 1573374 - RNA, 19 nt, Artificial Sequence
  Description of Artificial Sequence: Synthetic oligonucleotide
  Antisense strand to SEQ ID NO: 1573373
uagaaggaagcaaacgagg

SEQ ID NO: 1573375 - RNA, 19 nt, Artificial Sequence
  Description of Artificial Sequence: Synthetic oligonucleotide
  Sense strand starting at position 1175 of SEQ ID NO: 1560060
cuucuuugguaacucgaua

SEQ ID NO: 1573376 - RNA, 19 nt, Artificial Sequence
  Description of Artificial Sequence: Synthetic oligonucleotide
  Antisense strand to SEQ ID NO: 1573375
uaucgaguuaccaaagaag

SEQ ID NO: 1573377 - RNA, 19 nt, Artificial Sequence
  Description of Artificial Sequence: Synthetic oligonucleotide
  Sense strand starting at position 1180 of SEQ ID NO: 1560060
uugguaacucgauacccua

SEQ ID NO: 1573378 - RNA, 19 nt, Artificial Sequence
  Description of Artificial Sequence: Synthetic oligonucleotide
  Antisense strand to SEQ ID NO: 1573377
uaggguaucgaguuaccaa

SEQ ID NO: 1573379 - RNA, 19 nt, Artificial Sequence
  Description of Artificial Sequence: Synthetic oligonucleotide
  Sense strand starting at position 1893 of SEQ ID NO: 1560060
ccgcuagaaucuuccugaa

SEQ ID NO: 1573380 - RNA, 19 nt, Artificial Sequence
  Description of Artificial Sequence: Synthetic oligonucleotide
  Antisense strand to SEQ ID NO: 1573379
uucaggaagauucuagcgg

SEQ ID NO: 1573381 - RNA, 19 nt, Artificial Sequence
  Description of Artificial Sequence: Synthetic oligonucleotide
  Sense strand starting at position 1895 of SEQ ID NO: 1560060
gcuagaaucuuccugaaca

SEQ ID NO: 1573382 - RNA, 19 nt, Artificial Sequence
  Description of Artificial Sequence: Synthetic oligonucleotide
  Antisense strand to SEQ ID NO: 1573381
uguucaggaagauucuagc

SEQ ID NO: 1573383 - RNA, 19 nt, Artificial Sequence
  Description of Artificial Sequence: Synthetic oligonucleotide
  Sense strand starting at position 1957 of SEQ ID NO: 1560060
auaugauggaaacgauugu

SEQ ID NO: 1573384 - RNA, 19 nt, Artificial Sequence
  Description of Artificial Sequence: Synthetic oligonucleotide
  Antisense strand to SEQ ID NO: 1573383
acaaucguuuccaucauau

SEQ ID NO: 1573385 - RNA, 19 nt, Artificial Sequence
  Description of Artificial Sequence: Synthetic oligonucleotide
  Sense strand starting at position 1961 of SEQ ID NO: 1560060
gauggaaacgauugucuug

SEQ ID NO: 1573386 - RNA, 19 nt, Artificial Sequence
  Description of Artificial Sequence: Synthetic oligonucleotide
  Antisense strand to SEQ ID NO: 1573385
caagacaaucguuuccauc

SEQ ID NO: 1573387 - RNA, 19 nt, Artificial Sequence
  Description of Artificial Sequence: Synthetic oligonucleotide
  Sense strand starting at position 2060 of SEQ ID NO: 1560060
gagagaauccgcugggacu

SEQ ID NO: 1573388 - RNA, 19 nt, Artificial Sequence
  Description of Artificial Sequence: Synthetic oligonucleotide
  Antisense strand to SEQ ID NO: 1573387
agucccagcggauucucuc

SEQ ID NO: 1573389 - RNA, 19 nt, Artificial Sequence
  Description of Artificial Sequence: Synthetic oligonucleotide
  Sense strand starting at position 2061 of SEQ ID NO: 1560060
agagaauccgcugggacua

SEQ ID NO: 1573390 - RNA, 19 nt, Artificial Sequence
  Description of Artificial Sequence: Synthetic oligonucleotide
  Antisense strand to SEQ ID NO: 1573389
uagucccagcggauucucu

SEQ ID NO: 1573391 - RNA, 19 nt, Artificial Sequence
  Description of Artificial Sequence: Synthetic oligonucleotide
  Sense strand starting at position 2062 of SEQ ID NO: 1560060
gagaauccgcugggacuau

SEQ ID NO: 1573392 - RNA, 19 nt, Artificial Sequence
  Description of Artificial Sequence: Synthetic oligonucleotide
  Antisense strand to SEQ ID NO: 1573391
auagucccagcggauucuc

SEQ ID NO: 1573393 - RNA, 19 nt, Artificial Sequence
  Description of Artificial Sequence: Synthetic oligonucleotide
  Sense strand starting at position 2278 of SEQ ID NO: 1560060
ggacccugugucuggagaa

SEQ ID NO: 1573394 - RNA, 19 nt, Artificial Sequence
  Description of Artificial Sequence: Synthetic oligonucleotide
  Antisense strand to SEQ ID NO: 1573393
uucuccagacacagggucc

SEQ ID NO: 1573395 - RNA, 19 nt, Artificial Sequence
  Description of Artificial Sequence: Synthetic oligonucleotide
  Sense strand starting at position 2454 of SEQ ID NO: 1560060
ccuggauucuugguagggu

SEQ ID NO: 1573396 - RNA, 19 nt, Artificial Sequence
  Description of Artificial Sequence: Synthetic oligonucleotide
  Antisense strand to SEQ ID NO: 1573395
acccuaccaagaauccagg

SEQ ID NO: 1573397 - RNA, 19 nt, Artificial Sequence
  Description of Artificial Sequence: Synthetic oligonucleotide
  Sense strand starting at position 2476 of SEQ ID NO: 1560060
agaucucaggagugucuuu

SEQ ID NO: 1573398 - RNA, 19 nt, Artificial Sequence
  Description of Artificial Sequence: Synthetic oligonucleotide
  Antisense strand to SEQ ID NO: 1573397
aaagacacuccugagaucu

SEQ ID NO: 1573399 - RNA, 19 nt, Artificial Sequence
  Description of Artificial Sequence: Synthetic oligonucleotide
  Sense strand starting at position 2481 of SEQ ID NO: 1560060
ucaggagugucuuuccacu

SEQ ID NO: 1573400 - RNA, 19 nt, Artificial Sequence
  Description of Artificial Sequence: Synthetic oligonucleotide
  Antisense strand to SEQ ID NO: 1573399
aguggaaagacacuccuga

SEQ ID NO: 1573401 - RNA, 19 nt, Artificial Sequence
  Description of Artificial Sequence: Synthetic oligonucleotide
  Sense strand starting at position 2483 of SEQ ID NO: 1560060
aggagugucuuuccacuga

SEQ ID NO: 1573402 - RNA, 19 nt, Artificial Sequence
  Description of Artificial Sequence: Synthetic oligonucleotide
  Antisense strand to SEQ ID NO: 1573401
ucaguggaaagacacuccu

SEQ ID NO: 1573403 - RNA, 19 nt, Artificial Sequence
  Description of Artificial Sequence: Synthetic oligonucleotide
  Sense strand starting at position 2487 of SEQ ID NO: 1560060
gugucuuuccacugauagg

SEQ ID NO: 1573404 - RNA, 19 nt, Artificial Sequence
  Description of Artificial Sequence: Synthetic oligonucleotide
  Antisense strand to SEQ ID NO: 1573403
ccuaucaguggaaagacac

SEQ ID NO: 1573405 - RNA, 19 nt, Artificial Sequence
  Description of Artificial Sequence: Synthetic oligonucleotide
  Sense strand starting at position 2571 of SEQ ID NO: 1560060
acucacuuucuaggaguuu

SEQ ID NO: 1573406 - RNA, 19 nt, Artificial Sequence
  Description of Artificial Sequence: Synthetic oligonucleotide
  Antisense strand to SEQ ID NO: 1573405
aaacuccuagaaagugagu

SEQ ID NO: 1573407 - RNA, 19 nt, Artificial Sequence
  Description of Artificial Sequence: Synthetic oligonucleotide
  Sense strand starting at position 2604 of SEQ ID NO: 1560060
ugguguggacuuuauguuu

SEQ ID NO: 1573408 - RNA, 19 nt, Artificial Sequence
  Description of Artificial Sequence: Synthetic oligonucleotide
  Antisense strand to SEQ ID NO: 1573407
aaacauaaaguccacacca

SEQ ID NO: 1573409 - RNA, 19 nt, Artificial Sequence
  Description of Artificial Sequence: Synthetic oligonucleotide
  Sense strand starting at position 3029 of SEQ ID NO: 1560060
ugaguacguacagaauuau

SEQ ID NO: 1573410 - RNA, 19 nt, Artificial Sequence
  Description of Artificial Sequence: Synthetic oligonucleotide
  Antisense strand to SEQ ID NO: 1573409
auaauucuguacguacuca

SEQ ID NO: 1573411 - RNA, 19 nt, Artificial Sequence
  Description of Artificial Sequence: Synthetic oligonucleotide
  Sense strand starting at position 3035 of SEQ ID NO: 1560060
cguacagaauuaucucauu

SEQ ID NO: 1573412 - RNA, 19 nt, Artificial Sequence
  Description of Artificial Sequence: Synthetic oligonucleotide
  Antisense strand to SEQ ID NO: 1573411
aaugagauaauucuguacg

SEQ ID NO: 1573413 - RNA, 19 nt, Artificial Sequence
  Description of Artificial Sequence: Synthetic oligonucleotide
  Sense strand starting at position 3081 of SEQ ID NO: 1560060
gugugaauugaacacgcuu

SEQ ID NO: 1573414 - RNA, 19 nt, Artificial Sequence
  Description of Artificial Sequence: Synthetic oligonucleotide
  Antisense strand to SEQ ID NO: 1573413
aagcguguucaauucacac

SEQ ID NO: 1573415 - RNA, 19 nt, Artificial Sequence
  Description of Artificial Sequence: Synthetic oligonucleotide
  Sense strand starting at position 3164 of SEQ ID NO: 1560060
aaccuuguggucuggagua

SEQ ID NO: 1573416 - RNA, 19 nt, Artificial Sequence
  Description of Artificial Sequence: Synthetic oligonucleotide
  Antisense strand to SEQ ID NO: 1573415
uacuccagaccacaagguu

SEQ ID NO: 1573417 - RNA, 19 nt, Artificial Sequence
  Description of Artificial Sequence: Synthetic oligonucleotide
  Sense strand starting at position 3166 of SEQ ID NO: 1560060
ccuuguggucuggaguaaa

SEQ ID NO: 1573418 - RNA, 19 nt, Artificial Sequence
  Description of Artificial Sequence: Synthetic oligonucleotide
  Antisense strand to SEQ ID NO: 1573417
uuuacuccagaccacaagg

SEQ ID NO: 1573419 - RNA, 19 nt, Artificial Sequence
  Description of Artificial Sequence: Synthetic oligonucleotide
  Sense strand starting at position 3204 of SEQ ID NO: 1560060
cucuuaaggcaaugagaga

SEQ ID NO: 1573420 - RNA, 19 nt, Artificial Sequence
  Description of Artificial Sequence: Synthetic oligonucleotide
  Antisense strand to SEQ ID NO: 1573419
ucucucauugccuuaagag

SEQ ID NO: 1573421 - RNA, 19 nt, Artificial Sequence
  Description of Artificial Sequence: Synthetic oligonucleotide
  Sense strand starting at position 3211 of SEQ ID NO: 1560060
ggcaaugagagacguuuau

SEQ ID NO: 1573422 - RNA, 19 nt, Artificial Sequence
  Description of Artificial Sequence: Synthetic oligonucleotide
  Antisense strand to SEQ ID NO: 1573421
auaaacgucucucauugcc

SEQ ID NO: 1573423 - RNA, 19 nt, Artificial Sequence
  Description of Artificial Sequence: Synthetic oligonucleotide
  Sense strand starting at position 3215 of SEQ ID NO: 1560060
augagagacguuuauguca

SEQ ID NO: 1573424 - RNA, 19 nt, Artificial Sequence
  Description of Artificial Sequence: Synthetic oligonucleotide
  Antisense strand to SEQ ID NO: 1573423
ugacauaaacgucucucau

SEQ ID NO: 1573425 - RNA, 19 nt, Artificial Sequence
  Description of Artificial Sequence: Synthetic oligonucleotide
  Sense strand starting at position 3463 of SEQ ID NO: 1560060
uccuaucucugcucagaug

SEQ ID NO: 1573426 - RNA, 19 nt, Artificial Sequence
  Description of Artificial Sequence: Synthetic oligonucleotide
  Antisense strand to SEQ ID NO: 1573425
caucugagcagagauagga

SEQ ID NO: 1573427 - RNA, 19 nt, Artificial Sequence
  Description of Artificial Sequence: Synthetic oligonucleotide
  Sense strand starting at position 3521 of SEQ ID NO: 1560060
uuuauaugacugugaggcu

SEQ ID NO: 1573428 - RNA, 19 nt, Artificial Sequence
  Description of Artificial Sequence: Synthetic oligonucleotide
  Antisense strand to SEQ ID NO: 1573427
agccucacagucauauaaa

SEQ ID NO: 1573429 - RNA, 19 nt, Artificial Sequence
  Description of Artificial Sequence: Synthetic oligonucleotide
  Sense strand starting at position 3603 of SEQ ID NO: 1560060
ccuauugucugcuuuauuu

SEQ ID NO: 1573430 - RNA, 19 nt, Artificial Sequence
  Description of Artificial Sequence: Synthetic oligonucleotide
  Antisense strand to SEQ ID NO: 1573429
aaauaaagcagacaauagg

SEQ ID NO: 1573431 - RNA, 19 nt, Artificial Sequence
  Description of Artificial Sequence: Synthetic oligonucleotide
  Sense strand starting at position 3916 of SEQ ID NO: 1560060
cuaacuacuuguuuaugga

SEQ ID NO: 1573432 - RNA, 19 nt, Artificial Sequence
  Description of Artificial Sequence: Synthetic oligonucleotide
  Antisense strand to SEQ ID NO: 1573431
uccauaaacaaguaguuag

SEQ ID NO: 1573433 - RNA, 19 nt, Artificial Sequence
  Description of Artificial Sequence: Synthetic oligonucleotide
  Sense strand starting at position 3971 of SEQ ID NO: 1560060
agauaaggauucgugucua

SEQ ID NO: 1573434 - RNA, 19 nt, Artificial Sequence
  Description of Artificial Sequence: Synthetic oligonucleotide
  Antisense strand to SEQ ID NO: 1573433
uagacacgaauccuuaucu

SEQ ID NO: 1573435 - RNA, 19 nt, Artificial Sequence
  Description of Artificial Sequence: Synthetic oligonucleotide
  Sense strand starting at position 93 of SEQ ID NO: 1560061
ggagaaugccuguaaucuc

SEQ ID NO: 1573436 - RNA, 19 nt, Artificial Sequence
  Description of Artificial Sequence: Synthetic oligonucleotide
  Antisense strand to SEQ ID NO: 1573435
gagauuacaggcauucucc

SEQ ID NO: 1573437 - RNA, 19 nt, Artificial Sequence
  Description of Artificial Sequence: Synthetic oligonucleotide
  Sense strand starting at position 525 of SEQ ID NO: 1560061
aaauaauaaugaggagaga

SEQ ID NO: 1573438 - RNA, 19 nt, Artificial Sequence
  Description of Artificial Sequence: Synthetic oligonucleotide
  Antisense strand to SEQ ID NO: 1573437
ucucuccucauuauuauuu

SEQ ID NO: 1573439 - RNA, 19 nt, Artificial Sequence
  Description of Artificial Sequence: Synthetic oligonucleotide
  Sense strand starting at position 545 of SEQ ID NO: 1560061
ccucgacugagucagguuu

SEQ ID NO: 1573440 - RNA, 19 nt, Artificial Sequence
  Description of Artificial Sequence: Synthetic oligonucleotide
  Antisense strand to SEQ ID NO: 1573439
aaaccugacucagucgagg

SEQ ID NO: 1573441 - RNA, 19 nt, Artificial Sequence
  Description of Artificial Sequence: Synthetic oligonucleotide
  Sense strand starting at position 551 of SEQ ID NO: 1560061
cugagucagguuugaacau

SEQ ID NO: 1573442 - RNA, 19 nt, Artificial Sequence
  Description of Artificial Sequence: Synthetic oligonucleotide
  Antisense strand to SEQ ID NO: 1573441
auguucaaaccugacucag

SEQ ID NO: 1573443 - RNA, 19 nt, Artificial Sequence
  Description of Artificial Sequence: Synthetic oligonucleotide
  Sense strand starting at position 562 of SEQ ID NO: 1560061
uugaacauaucagcuguaa

SEQ ID NO: 1573444 - RNA, 19 nt, Artificial Sequence
  Description of Artificial Sequence: Synthetic oligonucleotide
  Antisense strand to SEQ ID NO: 1573443
uuacagcugauauguucaa

SEQ ID NO: 1573445 - RNA, 19 nt, Artificial Sequence
  Description of Artificial Sequence: Synthetic oligonucleotide
  Sense strand starting at position 627 of SEQ ID NO: 1560061
guuaaauugcaguauuaag

SEQ ID NO: 1573446 - RNA, 19 nt, Artificial Sequence
  Description of Artificial Sequence: Synthetic oligonucleotide
  Antisense strand to SEQ ID NO: 1573445
cuuaauacugcaauuuaac

SEQ ID NO: 1573447 - RNA, 19 nt, Artificial Sequence
  Description of Artificial Sequence: Synthetic oligonucleotide
  Sense strand starting at position 634 of SEQ ID NO: 1560061
ugcaguauuaagggugaca

SEQ ID NO: 1573448 - RNA, 19 nt, Artificial Sequence
  Description of Artificial Sequence: Synthetic oligonucleotide
  Antisense strand to SEQ ID NO: 1573447
ugucacccuuaauacugca

SEQ ID NO: 1573449 - RNA, 19 nt, Artificial Sequence
  Description of Artificial Sequence: Synthetic oligonucleotide
  Sense strand starting at position 636 of SEQ ID NO: 1560061
caguauuaagggugacaau

SEQ ID NO: 1573450 - RNA, 19 nt, Artificial Sequence
  Description of Artificial Sequence: Synthetic oligonucleotide
  Antisense strand to SEQ ID NO: 1573449
auugucacccuuaauacug

SEQ ID NO: 1573451 - RNA, 19 nt, Artificial Sequence
  Description of Artificial Sequence: Synthetic oligonucleotide
  Sense strand starting at position 1060 of SEQ ID NO: 1560061
cccauuuguugguagauuu

SEQ ID NO: 1573452 - RNA, 19 nt, Artificial Sequence
  Description of Artificial Sequence: Synthetic oligonucleotide
  Antisense strand to SEQ ID NO: 1573451
aaaucuaccaacaaauggg

SEQ ID NO: 1573453 - RNA, 19 nt, Artificial Sequence
  Description of Artificial Sequence: Synthetic oligonucleotide
  Sense strand starting at position 1179 of SEQ ID NO: 1560061
ggagguaagucaaguagag

SEQ ID NO: 1573454 - RNA, 19 nt, Artificial Sequence
  Description of Artificial Sequence: Synthetic oligonucleotide
  Antisense strand to SEQ ID NO: 1573453
cucuacuugacuuaccucc

SEQ ID NO: 1573455 - RNA, 19 nt, Artificial Sequence
  Description of Artificial Sequence: Synthetic oligonucleotide
  Sense strand starting at position 1399 of SEQ ID NO: 1560061
ccucguuugcuuccuucua

SEQ ID NO: 1573456 - RNA, 19 nt, Artificial Sequence
  Description of Artificial Sequence: Synthetic oligonucleotide
  Antisense strand to SEQ ID NO: 1573455
uagaaggaagcaaacgagg

SEQ ID NO: 1573457 - RNA, 19 nt, Artificial Sequence
  Description of Artificial Sequence: Synthetic oligonucleotide
  Sense strand starting at position 1474 of SEQ ID NO: 1560061
cuucuuugguaacucgaua

SEQ ID NO: 1573458 - RNA, 19 nt, Artificial Sequence
  Description of Artificial Sequence: Synthetic oligonucleotide
  Antisense strand to SEQ ID NO: 1573457
uaucgaguuaccaaagaag

SEQ ID NO: 1573459 - RNA, 19 nt, Artificial Sequence
  Description of Artificial Sequence: Synthetic oligonucleotide
  Sense strand starting at position 1479 of SEQ ID NO: 1560061
uugguaacucgauacccua

SEQ ID NO: 1573460 - RNA, 19 nt, Artificial Sequence
  Description of Artificial Sequence: Synthetic oligonucleotide
  Antisense strand to SEQ ID NO: 1573459
uaggguaucgaguuaccaa

SEQ ID NO: 1573461 - RNA, 19 nt, Artificial Sequence
  Description of Artificial Sequence: Synthetic oligonucleotide
  Sense strand starting at position 1635 of SEQ ID NO: 1560061
uggaaacacucggaaagaa

SEQ ID NO: 1573462 - RNA, 19 nt, Artificial Sequence
  Description of Artificial Sequence: Synthetic oligonucleotide
  Antisense strand to SEQ ID NO: 1573461
uucuuuccgaguguuucca

SEQ ID NO: 1573463 - RNA, 19 nt, Artificial Sequence
  Description of Artificial Sequence: Synthetic oligonucleotide
  Sense strand starting at position 2192 of SEQ ID NO: 1560061
ccgcuagaaucuuccugaa

SEQ ID NO: 1573464 - RNA, 19 nt, Artificial Sequence
  Description of Artificial Sequence: Synthetic oligonucleotide
  Antisense strand to SEQ ID NO: 1573463
uucaggaagauucuagcgg

SEQ ID NO: 1573465 - RNA, 19 nt, Artificial Sequence
  Description of Artificial Sequence: Synthetic oligonucleotide
  Sense strand starting at position 2194 of SEQ ID NO: 1560061
gcuagaaucuuccugaaca

SEQ ID NO: 1573466 - RNA, 19 nt, Artificial Sequence
  Description of Artificial Sequence: Synthetic oligonucleotide
  Antisense strand to SEQ ID NO: 1573465
uguucaggaagauucuagc

SEQ ID NO: 1573467 - RNA, 19 nt, Artificial Sequence
  Description of Artificial Sequence: Synthetic oligonucleotide
  Sense strand starting at position 2256 of SEQ ID NO: 1560061
auaugauggaaacgauugu

SEQ ID NO: 1573468 - RNA, 19 nt, Artificial Sequence
  Description of Artificial Sequence: Synthetic oligonucleotide
  Antisense strand to SEQ ID NO: 1573467
acaaucguuuccaucauau

SEQ ID NO: 1573469 - RNA, 19 nt, Artificial Sequence
  Description of Artificial Sequence: Synthetic oligonucleotide
  Sense strand starting at position 2260 of SEQ ID NO: 1560061
gauggaaacgauugucuug

SEQ ID NO: 1573470 - RNA, 19 nt, Artificial Sequence
  Description of Artificial Sequence: Synthetic oligonucleotide
  Antisense strand to SEQ ID NO: 1573469
caagacaaucguuuccauc

SEQ ID NO: 1573471 - RNA, 19 nt, Artificial Sequence
  Description of Artificial Sequence: Synthetic oligonucleotide
  Sense strand starting at position 2359 of SEQ ID NO: 1560061
gagagaauccgcugggacu

SEQ ID NO: 1573472 - RNA, 19 nt, Artificial Sequence
  Description of Artificial Sequence: Synthetic oligonucleotide
  Antisense strand to SEQ ID NO: 1573471
agucccagcggauucucuc

SEQ ID NO: 1573473 - RNA, 19 nt, Artificial Sequence
  Description of Artificial Sequence: Synthetic oligonucleotide
  Sense strand starting at position 2360 of SEQ ID NO: 1560061
agagaauccgcugggacua

SEQ ID NO: 1573474 - RNA, 19 nt, Artificial Sequence
  Description of Artificial Sequence: Synthetic oligonucleotide
  Antisense strand to SEQ ID NO: 1573473
uagucccagcggauucucu

SEQ ID NO: 1573475 - RNA, 19 nt, Artificial Sequence
  Description of Artificial Sequence: Synthetic oligonucleotide
  Sense strand starting at position 2361 of SEQ ID NO: 1560061
gagaauccgcugggacuau

SEQ ID NO: 1573476 - RNA, 19 nt, Artificial Sequence
  Description of Artificial Sequence: Synthetic oligonucleotide
  Antisense strand to SEQ ID NO: 1573475
auagucccagcggauucuc

SEQ ID NO: 1573477 - RNA, 19 nt, Artificial Sequence
  Description of Artificial Sequence: Synthetic oligonucleotide
  Sense strand starting at position 2577 of SEQ ID NO: 1560061
ggacccugugucuggagaa

SEQ ID NO: 1573478 - RNA, 19 nt, Artificial Sequence
  Description of Artificial Sequence: Synthetic oligonucleotide
  Antisense strand to SEQ ID NO: 1573477
uucuccagacacagggucc

SEQ ID NO: 1573479 - RNA, 19 nt, Artificial Sequence
  Description of Artificial Sequence: Synthetic oligonucleotide
  Sense strand starting at position 2753 of SEQ ID NO: 1560061
ccuggauucuugguagggu

SEQ ID NO: 1573480 - RNA, 19 nt, Artificial Sequence
  Description of Artificial Sequence: Synthetic oligonucleotide
  Antisense strand to SEQ ID NO: 1573479
acccuaccaagaauccagg

SEQ ID NO: 1573481 - RNA, 19 nt, Artificial Sequence
  Description of Artificial Sequence: Synthetic oligonucleotide
  Sense strand starting at position 2775 of SEQ ID NO: 1560061
agaucucaggagugucuuu

SEQ ID NO: 1573482 - RNA, 19 nt, Artificial Sequence
  Description of Artificial Sequence: Synthetic oligonucleotide
  Antisense strand to SEQ ID NO: 1573481
aaagacacuccugagaucu

SEQ ID NO: 1573483 - RNA, 19 nt, Artificial Sequence
  Description of Artificial Sequence: Synthetic oligonucleotide
  Sense strand starting at position 2780 of SEQ ID NO: 1560061
ucaggagugucuuuccacu

SEQ ID NO: 1573484 - RNA, 19 nt, Artificial Sequence
  Description of Artificial Sequence: Synthetic oligonucleotide
  Antisense strand to SEQ ID NO: 1573483
aguggaaagacacuccuga

SEQ ID NO: 1573485 - RNA, 19 nt, Artificial Sequence
  Description of Artificial Sequence: Synthetic oligonucleotide
  Sense strand starting at position 2782 of SEQ ID NO: 1560061
aggagugucuuuccacuga

SEQ ID NO: 1573486 - RNA, 19 nt, Artificial Sequence
  Description of Artificial Sequence: Synthetic oligonucleotide
  Antisense strand to SEQ ID NO: 1573485
ucaguggaaagacacuccu

SEQ ID NO: 1573487 - RNA, 19 nt, Artificial Sequence
  Description of Artificial Sequence: Synthetic oligonucleotide
  Sense strand starting at position 2786 of SEQ ID NO: 1560061
gugucuuuccacugauagg

SEQ ID NO: 1573488 - RNA, 19 nt, Artificial Sequence
  Description of Artificial Sequence: Synthetic oligonucleotide
  Antisense strand to SEQ ID NO: 1573487
ccuaucaguggaaagacac

SEQ ID NO: 1573489 - RNA, 19 nt, Artificial Sequence
  Description of Artificial Sequence: Synthetic oligonucleotide
  Sense strand starting at position 2870 of SEQ ID NO: 1560061
acucacuuucuaggaguuu

SEQ ID NO: 1573490 - RNA, 19 nt, Artificial Sequence
  Description of Artificial Sequence: Synthetic oligonucleotide
  Antisense strand to SEQ ID NO: 1573489
aaacuccuagaaagugagu

SEQ ID NO: 1573491 - RNA, 19 nt, Artificial Sequence
  Description of Artificial Sequence: Synthetic oligonucleotide
  Sense strand starting at position 2903 of SEQ ID NO: 1560061
ugguguggacuuuauguuu

SEQ ID NO: 1573492 - RNA, 19 nt, Artificial Sequence
  Description of Artificial Sequence: Synthetic oligonucleotide
  Antisense strand to SEQ ID NO: 1573491
aaacauaaaguccacacca

SEQ ID NO: 1573493 - RNA, 19 nt, Artificial Sequence
  Description of Artificial Sequence: Synthetic oligonucleotide
  Sense strand starting at position 3328 of SEQ ID NO: 1560061
ugaguacguacagaauuau

SEQ ID NO: 1573494 - RNA, 19 nt, Artificial Sequence
  Description of Artificial Sequence: Synthetic oligonucleotide
  Antisense strand to SEQ ID NO: 1573493
auaauucuguacguacuca

SEQ ID NO: 1573495 - RNA, 19 nt, Artificial Sequence
  Description of Artificial Sequence: Synthetic oligonucleotide
  Sense strand starting at position 3334 of SEQ ID NO: 1560061
cguacagaauuaucucauu

SEQ ID NO: 1573496 - RNA, 19 nt, Artificial Sequence
  Description of Artificial Sequence: Synthetic oligonucleotide
  Antisense strand to SEQ ID NO: 1573495
aaugagauaauucuguacg

SEQ ID NO: 1573497 - RNA, 19 nt, Artificial Sequence
  Description of Artificial Sequence: Synthetic oligonucleotide
  Sense strand starting at position 3380 of SEQ ID NO: 1560061
gugugaauugaacacgcuu

SEQ ID NO: 1573498 - RNA, 19 nt, Artificial Sequence
  Description of Artificial Sequence: Synthetic oligonucleotide
  Antisense strand to SEQ ID NO: 1573497
aagcguguucaauucacac

SEQ ID NO: 1573499 - RNA, 19 nt, Artificial Sequence
  Description of Artificial Sequence: Synthetic oligonucleotide
  Sense strand starting at position 3463 of SEQ ID NO: 1560061
aaccuuguggucuggagua

SEQ ID NO: 1573500 - RNA, 19 nt, Artificial Sequence
  Description of Artificial Sequence: Synthetic oligonucleotide
  Antisense strand to SEQ ID NO: 1573499
uacuccagaccacaagguu

SEQ ID NO: 1573501 - RNA, 19 nt, Artificial Sequence
  Description of Artificial Sequence: Synthetic oligonucleotide
  Sense strand starting at position 3465 of SEQ ID NO: 1560061
ccuuguggucuggaguaaa

SEQ ID NO: 1573502 - RNA, 19 nt, Artificial Sequence
  Description of Artificial Sequence: Synthetic oligonucleotide
  Antisense strand to SEQ ID NO: 1573501
uuuacuccagaccacaagg

SEQ ID NO: 1573503 - RNA, 19 nt, Artificial Sequence
  Description of Artificial Sequence: Synthetic oligonucleotide
  Sense strand starting at position 3503 of SEQ ID NO: 1560061
cucuuaaggcaaugagaga

SEQ ID NO: 1573504 - RNA, 19 nt, Artificial Sequence
  Description of Artificial Sequence: Synthetic oligonucleotide
  Antisense strand to SEQ ID NO: 1573503
ucucucauugccuuaagag

SEQ ID NO: 1573505 - RNA, 19 nt, Artificial Sequence
  Description of Artificial Sequence: Synthetic oligonucleotide
  Sense strand starting at position 3510 of SEQ ID NO: 1560061
ggcaaugagagacguuuau

SEQ ID NO: 1573506 - RNA, 19 nt, Artificial Sequence
  Description of Artificial Sequence: Synthetic oligonucleotide
  Antisense strand to SEQ ID NO: 1573505
auaaacgucucucauugcc

SEQ ID NO: 1573507 - RNA, 19 nt, Artificial Sequence
  Description of Artificial Sequence: Synthetic oligonucleotide
  Sense strand starting at position 3514 of SEQ ID NO: 1560061
augagagacguuuauguca

SEQ ID NO: 1573508 - RNA, 19 nt, Artificial Sequence
  Description of Artificial Sequence: Synthetic oligonucleotide
  Antisense strand to SEQ ID NO: 1573507
ugacauaaacgucucucau

SEQ ID NO: 1573509 - RNA, 19 nt, Artificial Sequence
  Description of Artificial Sequence: Synthetic oligonucleotide
  Sense strand starting at position 3762 of SEQ ID NO: 1560061
uccuaucucugcucagaug

SEQ ID NO: 1573510 - RNA, 19 nt, Artificial Sequence
  Description of Artificial Sequence: Synthetic oligonucleotide
  Antisense strand to SEQ ID NO: 1573509
caucugagcagagauagga

SEQ ID NO: 1573511 - RNA, 19 nt, Artificial Sequence
  Description of Artificial Sequence: Synthetic oligonucleotide
  Sense strand starting at position 3820 of SEQ ID NO: 1560061
uuuauaugacugugaggcu

SEQ ID NO: 1573512 - RNA, 19 nt, Artificial Sequence
  Description of Artificial Sequence: Synthetic oligonucleotide
  Antisense strand to SEQ ID NO: 1573511
agccucacagucauauaaa

SEQ ID NO: 1573513 - RNA, 19 nt, Artificial Sequence
  Description of Artificial Sequence: Synthetic oligonucleotide
  Sense strand starting at position 3902 of SEQ ID NO: 1560061
ccuauugucugcuuuauuu

SEQ ID NO: 1573514 - RNA, 19 nt, Artificial Sequence
  Description of Artificial Sequence: Synthetic oligonucleotide
  Antisense strand to SEQ ID NO: 1573513
aaauaaagcagacaauagg

SEQ ID NO: 1573515 - RNA, 19 nt, Artificial Sequence
  Description of Artificial Sequence: Synthetic oligonucleotide
  Sense strand starting at position 58 of SEQ ID NO: 1560062
ugagaaagcucucacuauu

SEQ ID NO: 1573516 - RNA, 19 nt, Artificial Sequence
  Description of Artificial Sequence: Synthetic oligonucleotide
  Antisense strand to SEQ ID NO: 1573515
aauagugagagcuuucuca

SEQ ID NO: 1573517 - RNA, 19 nt, Artificial Sequence
  Description of Artificial Sequence: Synthetic oligonucleotide
  Sense strand starting at position 483 of SEQ ID NO: 1560062
gagaauaggucauagaaua

SEQ ID NO: 1573518 - RNA, 19 nt, Artificial Sequence
  Description of Artificial Sequence: Synthetic oligonucleotide
  Antisense strand to SEQ ID NO: 1573517
uauucuaugaccuauucuc

SEQ ID NO: 1573519 - RNA, 19 nt, Artificial Sequence
  Description of Artificial Sequence: Synthetic oligonucleotide
  Sense strand starting at position 1990 of SEQ ID NO: 1560062
gggagucucuucugcgcaa

SEQ ID NO: 1573520 - RNA, 19 nt, Artificial Sequence
  Description of Artificial Sequence: Synthetic oligonucleotide
  Antisense strand to SEQ ID NO: 1573519
uugcgcagaagagacuccc

SEQ ID NO: 1573521 - RNA, 19 nt, Artificial Sequence
  Description of Artificial Sequence: Synthetic oligonucleotide
  Sense strand starting at position 2072 of SEQ ID NO: 1560062
guugcugucaggucugagu

SEQ ID NO: 1573522 - RNA, 19 nt, Artificial Sequence
  Description of Artificial Sequence: Synthetic oligonucleotide
  Antisense strand to SEQ ID NO: 1573521
acucagaccugacagcaac

SEQ ID NO: 1573523 - RNA, 19 nt, Artificial Sequence
  Description of Artificial Sequence: Synthetic oligonucleotide
  Sense strand starting at position 2223 of SEQ ID NO: 1560062
ugcaguuggucgccaggua

SEQ ID NO: 1573524 - RNA, 19 nt, Artificial Sequence
  Description of Artificial Sequence: Synthetic oligonucleotide
  Antisense strand to SEQ ID NO: 1573523
uaccuggcgaccaacugca

SEQ ID NO: 1573525 - RNA, 19 nt, Artificial Sequence
  Description of Artificial Sequence: Synthetic oligonucleotide
  Sense strand starting at position 2676 of SEQ ID NO: 1560062
agaucaauggcucagcaga

SEQ ID NO: 1573526 - RNA, 19 nt, Artificial Sequence
  Description of Artificial Sequence: Synthetic oligonucleotide
  Antisense strand to SEQ ID NO: 1573525
ucugcugagccauugaucu

SEQ ID NO: 1573527 - RNA, 19 nt, Artificial Sequence
  Description of Artificial Sequence: Synthetic oligonucleotide
  Sense strand starting at position 2705 of SEQ ID NO: 1560062
ccagaugagcaucgguuua

SEQ ID NO: 1573528 - RNA, 19 nt, Artificial Sequence
  Description of Artificial Sequence: Synthetic oligonucleotide
  Antisense strand to SEQ ID NO: 1573527
uaaaccgaugcucaucugg

SEQ ID NO: 1573529 - RNA, 19 nt, Artificial Sequence
  Description of Artificial Sequence: Synthetic oligonucleotide
  Sense strand starting at position 2760 of SEQ ID NO: 1560062
gugcgugugucccauauac

SEQ ID NO: 1573530 - RNA, 19 nt, Artificial Sequence
  Description of Artificial Sequence: Synthetic oligonucleotide
  Antisense strand to SEQ ID NO: 1573529
guauaugggacacacgcac

SEQ ID NO: 1573531 - RNA, 19 nt, Artificial Sequence
  Description of Artificial Sequence: Synthetic oligonucleotide
  Sense strand starting at position 2762 of SEQ ID NO: 1560062
gcgugugucccauauaccu

SEQ ID NO: 1573532 - RNA, 19 nt, Artificial Sequence
  Description of Artificial Sequence: Synthetic oligonucleotide
  Antisense strand to SEQ ID NO: 1573531
agguauaugggacacacgc

SEQ ID NO: 1573533 - RNA, 19 nt, Artificial Sequence
  Description of Artificial Sequence: Synthetic oligonucleotide
  Sense strand starting at position 2794 of SEQ ID NO: 1560062
cgaggaggccacuaaucuu

SEQ ID NO: 1573534 - RNA, 19 nt, Artificial Sequence
  Description of Artificial Sequence: Synthetic oligonucleotide
  Antisense strand to SEQ ID NO: 1573533
aagauuaguggccuccucg

SEQ ID NO: 1573535 - RNA, 19 nt, Artificial Sequence
  Description of Artificial Sequence: Synthetic oligonucleotide
  Sense strand starting at position 2802 of SEQ ID NO: 1560062
ccacuaaucuucuggcuga

SEQ ID NO: 1573536 - RNA, 19 nt, Artificial Sequence
  Description of Artificial Sequence: Synthetic oligonucleotide
  Antisense strand to SEQ ID NO: 1573535
ucagccagaagauuagugg

SEQ ID NO: 1573537 - RNA, 19 nt, Artificial Sequence
  Description of Artificial Sequence: Synthetic oligonucleotide
  Sense strand starting at position 3088 of SEQ ID NO: 1560062
aucagagcuucuuugacgu

SEQ ID NO: 1573538 - RNA, 19 nt, Artificial Sequence
  Description of Artificial Sequence: Synthetic oligonucleotide
  Antisense strand to SEQ ID NO: 1573537
acgucaaagaagcucugau

SEQ ID NO: 1573539 - RNA, 19 nt, Artificial Sequence
  Description of Artificial Sequence: Synthetic oligonucleotide
  Sense strand starting at position 3151 of SEQ ID NO: 1560062
cagaguuaugcucaggguu

SEQ ID NO: 1573540 - RNA, 19 nt, Artificial Sequence
  Description of Artificial Sequence: Synthetic oligonucleotide
  Antisense strand to SEQ ID NO: 1573539
aacccugagcauaacucug

SEQ ID NO: 1573541 - RNA, 19 nt, Artificial Sequence
  Description of Artificial Sequence: Synthetic oligonucleotide
  Sense strand starting at position 3228 of SEQ ID NO: 1560062
ggugcucucaaaggguuau

SEQ ID NO: 1573542 - RNA, 19 nt, Artificial Sequence
  Description of Artificial Sequence: Synthetic oligonucleotide
  Antisense strand to SEQ ID NO: 1573541
auaacccuuugagagcacc

SEQ ID NO: 1573543 - RNA, 19 nt, Artificial Sequence
  Description of Artificial Sequence: Synthetic oligonucleotide
  Sense strand starting at position 3247 of SEQ ID NO: 1560062
ggugggacugguuauggau

SEQ ID NO: 1573544 - RNA, 19 nt, Artificial Sequence
  Description of Artificial Sequence: Synthetic oligonucleotide
  Antisense strand to SEQ ID NO: 1573543
auccauaaccagucccacc

SEQ ID NO: 1573545 - RNA, 19 nt, Artificial Sequence
  Description of Artificial Sequence: Synthetic oligonucleotide
  Sense strand starting at position 3255 of SEQ ID NO: 1560062
ugguuauggaucgggacua

SEQ ID NO: 1573546 - RNA, 19 nt, Artificial Sequence
  Description of Artificial Sequence: Synthetic oligonucleotide
  Antisense strand to SEQ ID NO: 1573545
uagucccgauccauaacca

SEQ ID NO: 1573547 - RNA, 19 nt, Artificial Sequence
  Description of Artificial Sequence: Synthetic oligonucleotide
  Sense strand starting at position 3256 of SEQ ID NO: 1560062
gguuauggaucgggacuau

SEQ ID NO: 1573548 - RNA, 19 nt, Artificial Sequence
  Description of Artificial Sequence: Synthetic oligonucleotide
  Antisense strand to SEQ ID NO: 1573547
auagucccgauccauaacc

SEQ ID NO: 1573549 - RNA, 19 nt, Artificial Sequence
  Description of Artificial Sequence: Synthetic oligonucleotide
  Sense strand starting at position 3291 of SEQ ID NO: 1560062
cacacaaucugguggguua

SEQ ID NO: 1573550 - RNA, 19 nt, Artificial Sequence
  Description of Artificial Sequence: Synthetic oligonucleotide
  Antisense strand to SEQ ID NO: 1573549
uaacccaccagauugugug

SEQ ID NO: 1573551 - RNA, 19 nt, Artificial Sequence
  Description of Artificial Sequence: Synthetic oligonucleotide
  Sense strand starting at position 3335 of SEQ ID NO: 1560062
ggaauuggcugagaccuaa

SEQ ID NO: 1573552 - RNA, 19 nt, Artificial Sequence
  Description of Artificial Sequence: Synthetic oligonucleotide
  Antisense strand to SEQ ID NO: 1573551
uuaggucucagccaauucc

SEQ ID NO: 1573553 - RNA, 19 nt, Artificial Sequence
  Description of Artificial Sequence: Synthetic oligonucleotide
  Sense strand starting at position 3398 of SEQ ID NO: 1560062
guauauguuccaggcacag

SEQ ID NO: 1573554 - RNA, 19 nt, Artificial Sequence
  Description of Artificial Sequence: Synthetic oligonucleotide
  Antisense strand to SEQ ID NO: 1573553
cugugccuggaacauauac

SEQ ID NO: 1573555 - RNA, 19 nt, Artificial Sequence
  Description of Artificial Sequence: Synthetic oligonucleotide
  Sense strand starting at position 3502 of SEQ ID NO: 1560062
cagauaaccugaggaguuc

SEQ ID NO: 1573556 - RNA, 19 nt, Artificial Sequence
  Description of Artificial Sequence: Synthetic oligonucleotide
  Antisense strand to SEQ ID NO: 1573555
gaacuccucagguuaucug

SEQ ID NO: 1573557 - RNA, 19 nt, Artificial Sequence
  Description of Artificial Sequence: Synthetic oligonucleotide
  Sense strand starting at position 12 of SEQ ID NO: 1560063
cccucuggcuucugugaga

SEQ ID NO: 1573558 - RNA, 19 nt, Artificial Sequence
  Description of Artificial Sequence: Synthetic oligonucleotide
  Antisense strand to SEQ ID NO: 1573557
ucucacagaagccagaggg

SEQ ID NO: 1573559 - RNA, 19 nt, Artificial Sequence
  Description of Artificial Sequence: Synthetic oligonucleotide
  Sense strand starting at position 15 of SEQ ID NO: 1560063
ucuggcuucugugagagga

SEQ ID NO: 1573560 - RNA, 19 nt, Artificial Sequence
  Description of Artificial Sequence: Synthetic oligonucleotide
  Antisense strand to SEQ ID NO: 1573559
uccucucacagaagccaga

SEQ ID NO: 1573561 - RNA, 19 nt, Artificial Sequence
  Description of Artificial Sequence: Synthetic oligonucleotide
  Sense strand starting at position 72 of SEQ ID NO: 1560063
acuggucccggugggaaau

SEQ ID NO: 1573562 - RNA, 19 nt, Artificial Sequence
  Description of Artificial Sequence: Synthetic oligonucleotide
  Antisense strand to SEQ ID NO: 1573561
auuucccaccgggaccagu

SEQ ID NO: 1573563 - RNA, 19 nt, Artificial Sequence
  Description of Artificial Sequence: Synthetic oligonucleotide
  Sense strand starting at position 135 of SEQ ID NO: 1560063
uggauucuggauugauucu

SEQ ID NO: 1573564 - RNA, 19 nt, Artificial Sequence
  Description of Artificial Sequence: Synthetic oligonucleotide
  Antisense strand to SEQ ID NO: 1573563
agaaucaauccagaaucca

SEQ ID NO: 1573565 - RNA, 19 nt, Artificial Sequence
  Description of Artificial Sequence: Synthetic oligonucleotide
  Sense strand starting at position 144 of SEQ ID NO: 1560063
gauugauucuaagggcaaa

SEQ ID NO: 1573566 - RNA, 19 nt, Artificial Sequence
  Description of Artificial Sequence: Synthetic oligonucleotide
  Antisense strand to SEQ ID NO: 1573565
uuugcccuuagaaucaauc

SEQ ID NO: 1573567 - RNA, 19 nt, Artificial Sequence
  Description of Artificial Sequence: Synthetic oligonucleotide
  Sense strand starting at position 586 of SEQ ID NO: 1560063
aagggaggaucaggaauuu

SEQ ID NO: 1573568 - RNA, 19 nt, Artificial Sequence
  Description of Artificial Sequence: Synthetic oligonucleotide
  Antisense strand to SEQ ID NO: 1573567
aaauuccugauccucccuu

SEQ ID NO: 1573569 - RNA, 19 nt, Artificial Sequence
  Description of Artificial Sequence: Synthetic oligonucleotide
  Sense strand starting at position 673 of SEQ ID NO: 1560063
gguacccaguucugagaaa

SEQ ID NO: 1573570 - RNA, 19 nt, Artificial Sequence
  Description of Artificial Sequence: Synthetic oligonucleotide
  Antisense strand to SEQ ID NO: 1573569
uuucucagaacuggguacc

SEQ ID NO: 1573571 - RNA, 19 nt, Artificial Sequence
  Description of Artificial Sequence: Synthetic oligonucleotide
  Sense strand starting at position 735 of SEQ ID NO: 1560063
ggcuguuuacuguggagua

SEQ ID NO: 1573572 - RNA, 19 nt, Artificial Sequence
  Description of Artificial Sequence: Synthetic oligonucleotide
  Antisense strand to SEQ ID NO: 1573571
uacuccacaguaaacagcc

SEQ ID NO: 1573573 - RNA, 19 nt, Artificial Sequence
  Description of Artificial Sequence: Synthetic oligonucleotide
  Sense strand starting at position 737 of SEQ ID NO: 1560063
cuguuuacuguggaguaca

SEQ ID NO: 1573574 - RNA, 19 nt, Artificial Sequence
  Description of Artificial Sequence: Synthetic oligonucleotide
  Antisense strand to SEQ ID NO: 1573573
uguacuccacaguaaacag

SEQ ID NO: 1573575 - RNA, 19 nt, Artificial Sequence
  Description of Artificial Sequence: Synthetic oligonucleotide
  Sense strand starting at position 740 of SEQ ID NO: 1560063
uuuacuguggaguacaauu

SEQ ID NO: 1573576 - RNA, 19 nt, Artificial Sequence
  Description of Artificial Sequence: Synthetic oligonucleotide
  Antisense strand to SEQ ID NO: 1573575
aauuguacuccacaguaaa

SEQ ID NO: 1573577 - RNA, 19 nt, Artificial Sequence
  Description of Artificial Sequence: Synthetic oligonucleotide
  Sense strand starting at position 766 of SEQ ID NO: 1560063
agguuugacucccaccaaa

SEQ ID NO: 1573578 - RNA, 19 nt, Artificial Sequence
  Description of Artificial Sequence: Synthetic oligonucleotide
  Antisense strand to SEQ ID NO: 1573577
uuuggugggagucaaaccu

SEQ ID NO: 1573579 - RNA, 19 nt, Artificial Sequence
  Description of Artificial Sequence: Synthetic oligonucleotide
  Sense strand starting at position 1051 of SEQ ID NO: 1560063
acggaaagauugccuaagu

SEQ ID NO: 1573580 - RNA, 19 nt, Artificial Sequence
  Description of Artificial Sequence: Synthetic oligonucleotide
  Antisense strand to SEQ ID NO: 1573579
acuuaggcaaucuuuccgu

SEQ ID NO: 1573581 - RNA, 19 nt, Artificial Sequence
  Description of Artificial Sequence: Synthetic oligonucleotide
  Sense strand starting at position 1052 of SEQ ID NO: 1560063
cggaaagauugccuaaguc

SEQ ID NO: 1573582 - RNA, 19 nt, Artificial Sequence
  Description of Artificial Sequence: Synthetic oligonucleotide
  Antisense strand to SEQ ID NO: 1573581
gacuuaggcaaucuuuccg

SEQ ID NO: 1573583 - RNA, 19 nt, Artificial Sequence
  Description of Artificial Sequence: Synthetic oligonucleotide
  Sense strand starting at position 1244 of SEQ ID NO: 1560063
cucgcugucuuccugaguu

SEQ ID NO: 1573584 - RNA, 19 nt, Artificial Sequence
  Description of Artificial Sequence: Synthetic oligonucleotide
  Antisense strand to SEQ ID NO: 1573583
aacucaggaagacagcgag

SEQ ID NO: 1573585 - RNA, 19 nt, Artificial Sequence
  Description of Artificial Sequence: Synthetic oligonucleotide
  Sense strand starting at position 1284 of SEQ ID NO: 1560063
gcaagaggcugacguuauu

SEQ ID NO: 1573586 - RNA, 19 nt, Artificial Sequence
  Description of Artificial Sequence: Synthetic oligonucleotide
  Antisense strand to SEQ ID NO: 1573585
aauaacgucagccucuugc

SEQ ID NO: 1573587 - RNA, 19 nt, Artificial Sequence
  Description of Artificial Sequence: Synthetic oligonucleotide
  Sense strand starting at position 1798 of SEQ ID NO: 1560063
gaaagaugugcucacguga

SEQ ID NO: 1573588 - RNA, 19 nt, Artificial Sequence
  Description of Artificial Sequence: Synthetic oligonucleotide
  Antisense strand to SEQ ID NO: 1573587
ucacgugagcacaucuuuc

SEQ ID NO: 1573589 - RNA, 19 nt, Artificial Sequence
  Description of Artificial Sequence: Synthetic oligonucleotide
  Sense strand starting at position 2055 of SEQ ID NO: 1560063
gcaagaacucacgggauac

SEQ ID NO: 1573590 - RNA, 19 nt, Artificial Sequence
  Description of Artificial Sequence: Synthetic oligonucleotide
  Antisense strand to SEQ ID NO: 1573589
guaucccgugaguucuugc

SEQ ID NO: 1573591 - RNA, 19 nt, Artificial Sequence
  Description of Artificial Sequence: Synthetic oligonucleotide
  Sense strand starting at position 2111 of SEQ ID NO: 1560063
gguaguguaguggaucaca

SEQ ID NO: 1573592 - RNA, 19 nt, Artificial Sequence
  Description of Artificial Sequence: Synthetic oligonucleotide
  Antisense strand to SEQ ID NO: 1573591
ugugauccacuacacuacc

SEQ ID NO: 1573593 - RNA, 19 nt, Artificial Sequence
  Description of Artificial Sequence: Synthetic oligonucleotide
  Sense strand starting at position 2114 of SEQ ID NO: 1560063
aguguaguggaucacaguu

SEQ ID NO: 1573594 - RNA, 19 nt, Artificial Sequence
  Description of Artificial Sequence: Synthetic oligonucleotide
  Antisense strand to SEQ ID NO: 1573593
aacugugauccacuacacu

SEQ ID NO: 1573595 - RNA, 19 nt, Artificial Sequence
  Description of Artificial Sequence: Synthetic oligonucleotide
  Sense strand starting at position 2120 of SEQ ID NO: 1560063
guggaucacaguuggaguu

SEQ ID NO: 1573596 - RNA, 19 nt, Artificial Sequence
  Description of Artificial Sequence: Synthetic oligonucleotide
  Antisense strand to SEQ ID NO: 1573595
aacuccaacugugauccac

SEQ ID NO: 1573597 - RNA, 19 nt, Artificial Sequence
  Description of Artificial Sequence: Synthetic oligonucleotide
  Sense strand starting at position 2159 of SEQ ID NO: 1560063
cggugacaaugauaagcua

SEQ ID NO: 1573598 - RNA, 19 nt, Artificial Sequence
  Description of Artificial Sequence: Synthetic oligonucleotide
  Antisense strand to SEQ ID NO: 1573597
uagcuuaucauugucaccg

SEQ ID NO: 1573599 - RNA, 19 nt, Artificial Sequence
  Description of Artificial Sequence: Synthetic oligonucleotide
  Sense strand starting at position 187 of SEQ ID NO: 1560064
guggcuguaauuugcauua

SEQ ID NO: 1573600 - RNA, 19 nt, Artificial Sequence
  Description of Artificial Sequence: Synthetic oligonucleotide
  Antisense strand to SEQ ID NO: 1573599
uaaugcaaauuacagccac

SEQ ID NO: 1573601 - RNA, 19 nt, Artificial Sequence
  Description of Artificial Sequence: Synthetic oligonucleotide
  Sense strand starting at position 468 of SEQ ID NO: 1560064
ucuggaaagcuuggaguuu

SEQ ID NO: 1573602 - RNA, 19 nt, Artificial Sequence
  Description of Artificial Sequence: Synthetic oligonucleotide
  Antisense strand to SEQ ID NO: 1573601
aaacuccaagcuuuccaga

SEQ ID NO: 1573603 - RNA, 19 nt, Artificial Sequence
  Description of Artificial Sequence: Synthetic oligonucleotide
  Sense strand starting at position 700 of SEQ ID NO: 1560064
aggaaagucucagucccuu

SEQ ID NO: 1573604 - RNA, 19 nt, Artificial Sequence
  Description of Artificial Sequence: Synthetic oligonucleotide
  Antisense strand to SEQ ID NO: 1573603
aagggacugagacuuuccu

SEQ ID NO: 1573605 - RNA, 19 nt, Artificial Sequence
  Description of Artificial Sequence: Synthetic oligonucleotide
  Sense strand starting at position 788 of SEQ ID NO: 1560064
cggcaaguuaaggacauau

SEQ ID NO: 1573606 - RNA, 19 nt, Artificial Sequence
  Description of Artificial Sequence: Synthetic oligonucleotide
  Antisense strand to SEQ ID NO: 1573605
auauguccuuaacuugccg

SEQ ID NO: 1573607 - RNA, 19 nt, Artificial Sequence
  Description of Artificial Sequence: Synthetic oligonucleotide
  Sense strand starting at position 806 of SEQ ID NO: 1560064
uuugcaguuccuugaauag

SEQ ID NO: 1573608 - RNA, 19 nt, Artificial Sequence
  Description of Artificial Sequence: Synthetic oligonucleotide
  Antisense strand to SEQ ID NO: 1573607
cuauucaaggaacugcaaa

SEQ ID NO: 1573609 - RNA, 19 nt, Artificial Sequence
  Description of Artificial Sequence: Synthetic oligonucleotide
  Sense strand starting at position 1004 of SEQ ID NO: 1560064
ugucacugucuggaaaggu

SEQ ID NO: 1573610 - RNA, 19 nt, Artificial Sequence
  Description of Artificial Sequence: Synthetic oligonucleotide
  Antisense strand to SEQ ID NO: 1573609
accuuuccagacagugaca

SEQ ID NO: 1573611 - RNA, 19 nt, Artificial Sequence
  Description of Artificial Sequence: Synthetic oligonucleotide
  Sense strand starting at position 1495 of SEQ ID NO: 1560064
ccaagagaucugugaagug

SEQ ID NO: 1573612 - RNA, 19 nt, Artificial Sequence
  Description of Artificial Sequence: Synthetic oligonucleotide
  Antisense strand to SEQ ID NO: 1573611
cacuucacagaucucuugg

SEQ ID NO: 1573613 - RNA, 19 nt, Artificial Sequence
  Description of Artificial Sequence: Synthetic oligonucleotide
  Sense strand starting at position 1504 of SEQ ID NO: 1560064
cugugaagugucuagggca

SEQ ID NO: 1573614 - RNA, 19 nt, Artificial Sequence
  Description of Artificial Sequence: Synthetic oligonucleotide
  Antisense strand to SEQ ID NO: 1573613
ugcccuagacacuucacag

SEQ ID NO: 1573615 - RNA, 19 nt, Artificial Sequence
  Description of Artificial Sequence: Synthetic oligonucleotide
  Sense strand starting at position 1834 of SEQ ID NO: 1560064
ggaggagaaauuggugguu

SEQ ID NO: 1573616 - RNA, 19 nt, Artificial Sequence
  Description of Artificial Sequence: Synthetic oligonucleotide
  Antisense strand to SEQ ID NO: 1573615
aaccaccaauuucuccucc

SEQ ID NO: 1573617 - RNA, 19 nt, Artificial Sequence
  Description of Artificial Sequence: Synthetic oligonucleotide
  Sense strand starting at position 1947 of SEQ ID NO: 1560064
cggucucagggauggagau

SEQ ID NO: 1573618 - RNA, 19 nt, Artificial Sequence
  Description of Artificial Sequence: Synthetic oligonucleotide
  Antisense strand to SEQ ID NO: 1573617
aucuccaucccugagaccg

SEQ ID NO: 1573619 - RNA, 19 nt, Artificial Sequence
  Description of Artificial Sequence: Synthetic oligonucleotide
  Sense strand starting at position 1948 of SEQ ID NO: 1560064
ggucucagggauggagauu

SEQ ID NO: 1573620 - RNA, 19 nt, Artificial Sequence
  Description of Artificial Sequence: Synthetic oligonucleotide
  Antisense strand to SEQ ID NO: 1573619
aaucuccaucccugagacc

SEQ ID NO: 1573621 - RNA, 19 nt, Artificial Sequence
  Description of Artificial Sequence: Synthetic oligonucleotide
  Sense strand starting at position 1971 of SEQ ID NO: 1560064
agguuuaagagcugaguuc

SEQ ID NO: 1573622 - RNA, 19 nt, Artificial Sequence
  Description of Artificial Sequence: Synthetic oligonucleotide
  Antisense strand to SEQ ID NO: 1573621
gaacucagcucuuaaaccu

SEQ ID NO: 1573623 - RNA, 19 nt, Artificial Sequence
  Description of Artificial Sequence: Synthetic oligonucleotide
  Sense strand starting at position 1980 of SEQ ID NO: 1560064
agcugaguuccagaaucug

SEQ ID NO: 1573624 - RNA, 19 nt, Artificial Sequence
  Description of Artificial Sequence: Synthetic oligonucleotide
  Antisense strand to SEQ ID NO: 1573623
cagauucuggaacucagcu

SEQ ID NO: 1573625 - RNA, 19 nt, Artificial Sequence
  Description of Artificial Sequence: Synthetic oligonucleotide
  Sense strand starting at position 2028 of SEQ ID NO: 1560064
gggcuaauauuugaaacca

SEQ ID NO: 1573626 - RNA, 19 nt, Artificial Sequence
  Description of Artificial Sequence: Synthetic oligonucleotide
  Antisense strand to SEQ ID NO: 1573625
ugguuucaaauauuagccc

SEQ ID NO: 1573627 - RNA, 19 nt, Artificial Sequence
  Description of Artificial Sequence: Synthetic oligonucleotide
  Sense strand starting at position 2144 of SEQ ID NO: 1560064
ggguuaccucgggagucuu

SEQ ID NO: 1573628 - RNA, 19 nt, Artificial Sequence
  Description of Artificial Sequence: Synthetic oligonucleotide
  Antisense strand to SEQ ID NO: 1573627
aagacucccgagguaaccc

SEQ ID NO: 1573629 - RNA, 19 nt, Artificial Sequence
  Description of Artificial Sequence: Synthetic oligonucleotide
  Sense strand starting at position 2153 of SEQ ID NO: 1560064
cgggagucuuagguggaga

SEQ ID NO: 1573630 - RNA, 19 nt, Artificial Sequence
  Description of Artificial Sequence: Synthetic oligonucleotide
  Antisense strand to SEQ ID NO: 1573629
ucuccaccuaagacucccg

SEQ ID NO: 1573631 - RNA, 19 nt, Artificial Sequence
  Description of Artificial Sequence: Synthetic oligonucleotide
  Sense strand starting at position 2154 of SEQ ID NO: 1560064
gggagucuuagguggagag

SEQ ID NO: 1573632 - RNA, 19 nt, Artificial Sequence
  Description of Artificial Sequence: Synthetic oligonucleotide
  Antisense strand to SEQ ID NO: 1573631
cucuccaccuaagacuccc

SEQ ID NO: 1573633 - RNA, 19 nt, Artificial Sequence
  Description of Artificial Sequence: Synthetic oligonucleotide
  Sense strand starting at position 2155 of SEQ ID NO: 1560064
ggagucuuagguggagagu

SEQ ID NO: 1573634 - RNA, 19 nt, Artificial Sequence
  Description of Artificial Sequence: Synthetic oligonucleotide
  Antisense strand to SEQ ID NO: 1573633
acucuccaccuaagacucc

SEQ ID NO: 1573635 - RNA, 19 nt, Artificial Sequence
  Description of Artificial Sequence: Synthetic oligonucleotide
  Sense strand starting at position 2156 of SEQ ID NO: 1560064
gagucuuagguggagaguu

SEQ ID NO: 1573636 - RNA, 19 nt, Artificial Sequence
  Description of Artificial Sequence: Synthetic oligonucleotide
  Antisense strand to SEQ ID NO: 1573635
aacucuccaccuaagacuc

SEQ ID NO: 1573637 - RNA, 19 nt, Artificial Sequence
  Description of Artificial Sequence: Synthetic oligonucleotide
  Sense strand starting at position 2172 of SEQ ID NO: 1560064
guuaguaggaguuaacuca

SEQ ID NO: 1573638 - RNA, 19 nt, Artificial Sequence
  Description of Artificial Sequence: Synthetic oligonucleotide
  Antisense strand to SEQ ID NO: 1573637
ugaguuaacuccuacuaac

SEQ ID NO: 1573639 - RNA, 19 nt, Artificial Sequence
  Description of Artificial Sequence: Synthetic oligonucleotide
  Sense strand starting at position 2179 of SEQ ID NO: 1560064
ggaguuaacucauucuuug

SEQ ID NO: 1573640 - RNA, 19 nt, Artificial Sequence
  Description of Artificial Sequence: Synthetic oligonucleotide
  Antisense strand to SEQ ID NO: 1573639
caaagaaugaguuaacucc

SEQ ID NO: 1573641 - RNA, 19 nt, Artificial Sequence
  Description of Artificial Sequence: Synthetic oligonucleotide
  Sense strand starting at position 2209 of SEQ ID NO: 1560064
ggaaacucaugagugaguu

SEQ ID NO: 1573642 - RNA, 19 nt, Artificial Sequence
  Description of Artificial Sequence: Synthetic oligonucleotide
  Antisense strand to SEQ ID NO: 1573641
aacucacucaugaguuucc

SEQ ID NO: 1573643 - RNA, 19 nt, Artificial Sequence
  Description of Artificial Sequence: Synthetic oligonucleotide
  Sense strand starting at position 2210 of SEQ ID NO: 1560064
gaaacucaugagugaguuu

SEQ ID NO: 1573644 - RNA, 19 nt, Artificial Sequence
  Description of Artificial Sequence: Synthetic oligonucleotide
  Antisense strand to SEQ ID NO: 1573643
aaacucacucaugaguuuc

SEQ ID NO: 1573645 - RNA, 19 nt, Artificial Sequence
  Description of Artificial Sequence: Synthetic oligonucleotide
  Sense strand starting at position 2287 of SEQ ID NO: 1560064
gggcuaaagauucggagaa

SEQ ID NO: 1573646 - RNA, 19 nt, Artificial Sequence
  Description of Artificial Sequence: Synthetic oligonucleotide
  Antisense strand to SEQ ID NO: 1573645
uucuccgaaucuuuagccc

SEQ ID NO: 1573647 - RNA, 19 nt, Artificial Sequence
  Description of Artificial Sequence: Synthetic oligonucleotide
  Sense strand starting at position 2299 of SEQ ID NO: 1560064
cggagaacuuagguucagu

SEQ ID NO: 1573648 - RNA, 19 nt, Artificial Sequence
  Description of Artificial Sequence: Synthetic oligonucleotide
  Antisense strand to SEQ ID NO: 1573647
acugaaccuaaguucuccg

SEQ ID NO: 1573649 - RNA, 19 nt, Artificial Sequence
  Description of Artificial Sequence: Synthetic oligonucleotide
  Sense strand starting at position 2353 of SEQ ID NO: 1560064
ugagcugaccuuugaguca

SEQ ID NO: 1573650 - RNA, 19 nt, Artificial Sequence
  Description of Artificial Sequence: Synthetic oligonucleotide
  Antisense strand to SEQ ID NO: 1573649
ugacucaaaggucagcuca

SEQ ID NO: 1573651 - RNA, 19 nt, Artificial Sequence
  Description of Artificial Sequence: Synthetic oligonucleotide
  Sense strand starting at position 2358 of SEQ ID NO: 1560064
ugaccuuugagucagaggu

SEQ ID NO: 1573652 - RNA, 19 nt, Artificial Sequence
  Description of Artificial Sequence: Synthetic oligonucleotide
  Antisense strand to SEQ ID NO: 1573651
accucugacucaaagguca

SEQ ID NO: 1573653 - RNA, 19 nt, Artificial Sequence
  Description of Artificial Sequence: Synthetic oligonucleotide
  Sense strand starting at position 2362 of SEQ ID NO: 1560064
cuuugagucagaggucaag

SEQ ID NO: 1573654 - RNA, 19 nt, Artificial Sequence
  Description of Artificial Sequence: Synthetic oligonucleotide
  Antisense strand to SEQ ID NO: 1573653
cuugaccucugacucaaag

SEQ ID NO: 1573655 - RNA, 19 nt, Artificial Sequence
  Description of Artificial Sequence: Synthetic oligonucleotide
  Sense strand starting at position 2466 of SEQ ID NO: 1560064
ggagaagacucagagauca

SEQ ID NO: 1573656 - RNA, 19 nt, Artificial Sequence
  Description of Artificial Sequence: Synthetic oligonucleotide
  Antisense strand to SEQ ID NO: 1573655
ugaucucugagucuucucc

SEQ ID NO: 1573657 - RNA, 19 nt, Artificial Sequence
  Description of Artificial Sequence: Synthetic oligonucleotide
  Sense strand starting at position 2599 of SEQ ID NO: 1560064
ugguauuacacgcaacagu

SEQ ID NO: 1573658 - RNA, 19 nt, Artificial Sequence
  Description of Artificial Sequence: Synthetic oligonucleotide
  Antisense strand to SEQ ID NO: 1573657
acuguugcguguaauacca

SEQ ID NO: 1573659 - RNA, 19 nt, Artificial Sequence
  Description of Artificial Sequence: Synthetic oligonucleotide
  Sense strand starting at position 2629 of SEQ ID NO: 1560064
uugcgaucacgugacagaa

SEQ ID NO: 1573660 - RNA, 19 nt, Artificial Sequence
  Description of Artificial Sequence: Synthetic oligonucleotide
  Antisense strand to SEQ ID NO: 1573659
uucugucacgugaucgcaa

SEQ ID NO: 1573661 - RNA, 19 nt, Artificial Sequence
  Description of Artificial Sequence: Synthetic oligonucleotide
  Sense strand starting at position 2686 of SEQ ID NO: 1560064
aaggauugccuccggaaga

SEQ ID NO: 1573662 - RNA, 19 nt, Artificial Sequence
  Description of Artificial Sequence: Synthetic oligonucleotide
  Antisense strand to SEQ ID NO: 1573661
ucuuccggaggcaauccuu

SEQ ID NO: 1573663 - RNA, 19 nt, Artificial Sequence
  Description of Artificial Sequence: Synthetic oligonucleotide
  Sense strand starting at position 2862 of SEQ ID NO: 1560064
aaacgagacuugcucugau

SEQ ID NO: 1573664 - RNA, 19 nt, Artificial Sequence
  Description of Artificial Sequence: Synthetic oligonucleotide
  Antisense strand to SEQ ID NO: 1573663
aucagagcaagucucguuu

SEQ ID NO: 1573665 - RNA, 19 nt, Artificial Sequence
  Description of Artificial Sequence: Synthetic oligonucleotide
  Sense strand starting at position 2869 of SEQ ID NO: 1560064
acuugcucugauuggucaa

SEQ ID NO: 1573666 - RNA, 19 nt, Artificial Sequence
  Description of Artificial Sequence: Synthetic oligonucleotide
  Antisense strand to SEQ ID NO: 1573665
uugaccaaucagagcaagu

SEQ ID NO: 1573667 - RNA, 19 nt, Artificial Sequence
  Description of Artificial Sequence: Synthetic oligonucleotide
  Sense strand starting at position 3555 of SEQ ID NO: 1560064
gauggugaguucucgggau

SEQ ID NO: 1573668 - RNA, 19 nt, Artificial Sequence
  Description of Artificial Sequence: Synthetic oligonucleotide
  Antisense strand to SEQ ID NO: 1573667
aucccgagaacucaccauc

SEQ ID NO: 1573669 - RNA, 19 nt, Artificial Sequence
  Description of Artificial Sequence: Synthetic oligonucleotide
  Sense strand starting at position 3557 of SEQ ID NO: 1560064
uggugaguucucgggauag

SEQ ID NO: 1573670 - RNA, 19 nt, Artificial Sequence
  Description of Artificial Sequence: Synthetic oligonucleotide
  Antisense strand to SEQ ID NO: 1573669
cuaucccgagaacucacca

SEQ ID NO: 1573671 - RNA, 19 nt, Artificial Sequence
  Description of Artificial Sequence: Synthetic oligonucleotide
  Sense strand starting at position 3559 of SEQ ID NO: 1560064
gugaguucucgggauaguc

SEQ ID NO: 1573672 - RNA, 19 nt, Artificial Sequence
  Description of Artificial Sequence: Synthetic oligonucleotide
  Antisense strand to SEQ ID NO: 1573671
gacuaucccgagaacucac

SEQ ID NO: 1573673 - RNA, 19 nt, Artificial Sequence
  Description of Artificial Sequence: Synthetic oligonucleotide
  Sense strand starting at position 3868 of SEQ ID NO: 1560064
cccugauuccucugagcug

SEQ ID NO: 1573674 - RNA, 19 nt, Artificial Sequence
  Description of Artificial Sequence: Synthetic oligonucleotide
  Antisense strand to SEQ ID NO: 1573673
cagcucagaggaaucaggg

SEQ ID NO: 1573675 - RNA, 19 nt, Artificial Sequence
  Description of Artificial Sequence: Synthetic oligonucleotide
  Sense strand starting at position 3967 of SEQ ID NO: 1560064
cagugaucagcccacaaug

SEQ ID NO: 1573676 - RNA, 19 nt, Artificial Sequence
  Description of Artificial Sequence: Synthetic oligonucleotide
  Antisense strand to SEQ ID NO: 1573675
cauugugggcugaucacug

SEQ ID NO: 1573677 - RNA, 19 nt, Artificial Sequence
  Description of Artificial Sequence: Synthetic oligonucleotide
  Sense strand starting at position 3969 of SEQ ID NO: 1560064
gugaucagcccacaaugaa

SEQ ID NO: 1573678 - RNA, 19 nt, Artificial Sequence
  Description of Artificial Sequence: Synthetic oligonucleotide
  Antisense strand to SEQ ID NO: 1573677
uucauugugggcugaucac

SEQ ID NO: 1573679 - RNA, 19 nt, Artificial Sequence
  Description of Artificial Sequence: Synthetic oligonucleotide
  Sense strand starting at position 665 of SEQ ID NO: 1560065
agguuaaggcagucguguu

SEQ ID NO: 1573680 - RNA, 19 nt, Artificial Sequence
  Description of Artificial Sequence: Synthetic oligonucleotide
  Antisense strand to SEQ ID NO: 1573679
aacacgacugccuuaaccu

SEQ ID NO: 1573681 - RNA, 19 nt, Artificial Sequence
  Description of Artificial Sequence: Synthetic oligonucleotide
  Sense strand starting at position 672 of SEQ ID NO: 1560065
ggcagucguguuagccaga

SEQ ID NO: 1573682 - RNA, 19 nt, Artificial Sequence
  Description of Artificial Sequence: Synthetic oligonucleotide
  Antisense strand to SEQ ID NO: 1573681
ucuggcuaacacgacugcc

SEQ ID NO: 1573683 - RNA, 19 nt, Artificial Sequence
  Description of Artificial Sequence: Synthetic oligonucleotide
  Sense strand starting at position 675 of SEQ ID NO: 1560065
agucguguuagccagaucu

SEQ ID NO: 1573684 - RNA, 19 nt, Artificial Sequence
  Description of Artificial Sequence: Synthetic oligonucleotide
  Antisense strand to SEQ ID NO: 1573683
agaucuggcuaacacgacu

SEQ ID NO: 1573685 - RNA, 19 nt, Artificial Sequence
  Description of Artificial Sequence: Synthetic oligonucleotide
  Sense strand starting at position 682 of SEQ ID NO: 1560065
uuagccagaucugcaauaa

SEQ ID NO: 1573686 - RNA, 19 nt, Artificial Sequence
  Description of Artificial Sequence: Synthetic oligonucleotide
  Antisense strand to SEQ ID NO: 1573685
uuauugcagaucuggcuaa

SEQ ID NO: 1573687 - RNA, 19 nt, Artificial Sequence
  Description of Artificial Sequence: Synthetic oligonucleotide
  Sense strand starting at position 729 of SEQ ID NO: 1560065
agcagaaaucaacaagugu

SEQ ID NO: 1573688 - RNA, 19 nt, Artificial Sequence
  Description of Artificial Sequence: Synthetic oligonucleotide
  Antisense strand to SEQ ID NO: 1573687
acacuuguugauuucugcu

SEQ ID NO: 1573689 - RNA, 19 nt, Artificial Sequence
  Description of Artificial Sequence: Synthetic oligonucleotide
  Sense strand starting at position 742 of SEQ ID NO: 1560065
aaguguccauuugaaugaa

SEQ ID NO: 1573690 - RNA, 19 nt, Artificial Sequence
  Description of Artificial Sequence: Synthetic oligonucleotide
  Antisense strand to SEQ ID NO: 1573689
uucauucaaauggacacuu

SEQ ID NO: 1573691 - RNA, 19 nt, Artificial Sequence
  Description of Artificial Sequence: Synthetic oligonucleotide
  Sense strand starting at position 876 of SEQ ID NO: 1560065
guggcuuuggcugagagca

SEQ ID NO: 1573692 - RNA, 19 nt, Artificial Sequence
  Description of Artificial Sequence: Synthetic oligonucleotide
  Antisense strand to SEQ ID NO: 1573691
ugcucucagccaaagccac

SEQ ID NO: 1573693 - RNA, 19 nt, Artificial Sequence
  Description of Artificial Sequence: Synthetic oligonucleotide
  Sense strand starting at position 1103 of SEQ ID NO: 1560065
agacucuggucccuaggau

SEQ ID NO: 1573694 - RNA, 19 nt, Artificial Sequence
  Description of Artificial Sequence: Synthetic oligonucleotide
  Antisense strand to SEQ ID NO: 1573693
auccuagggaccagagucu

SEQ ID NO: 1573695 - RNA, 19 nt, Artificial Sequence
  Description of Artificial Sequence: Synthetic oligonucleotide
  Sense strand starting at position 1119 of SEQ ID NO: 1560065
gaugaaacagccuguguga

SEQ ID NO: 1573696 - RNA, 19 nt, Artificial Sequence
  Description of Artificial Sequence: Synthetic oligonucleotide
  Antisense strand to SEQ ID NO: 1573695
ucacacaggcuguuucauc

SEQ ID NO: 1573697 - RNA, 19 nt, Artificial Sequence
  Description of Artificial Sequence: Synthetic oligonucleotide
  Sense strand starting at position 1316 of SEQ ID NO: 1560065
acaguagaauuccuugaac

SEQ ID NO: 1573698 - RNA, 19 nt, Artificial Sequence
  Description of Artificial Sequence: Synthetic oligonucleotide
  Antisense strand to SEQ ID NO: 1573697
guucaaggaauucuacugu

SEQ ID NO: 1573699 - RNA, 19 nt, Artificial Sequence
  Description of Artificial Sequence: Synthetic oligonucleotide
  Sense strand starting at position 1625 of SEQ ID NO: 1560065
cacagaagucguugaggac

SEQ ID NO: 1573700 - RNA, 19 nt, Artificial Sequence
  Description of Artificial Sequence: Synthetic oligonucleotide
  Antisense strand to SEQ ID NO: 1573699
guccucaacgacuucugug

SEQ ID NO: 1573701 - RNA, 19 nt, Artificial Sequence
  Description of Artificial Sequence: Synthetic oligonucleotide
  Sense strand starting at position 1642 of SEQ ID NO: 1560065
acccucuguccuuaucaga

SEQ ID NO: 1573702 - RNA, 19 nt, Artificial Sequence
  Description of Artificial Sequence: Synthetic oligonucleotide
  Antisense strand to SEQ ID NO: 1573701
ucugauaaggacagagggu

SEQ ID NO: 1573703 - RNA, 19 nt, Artificial Sequence
  Description of Artificial Sequence: Synthetic oligonucleotide
  Sense strand starting at position 1662 of SEQ ID NO: 1560065
acgagcucugccuggauca

SEQ ID NO: 1573704 - RNA, 19 nt, Artificial Sequence
  Description of Artificial Sequence: Synthetic oligonucleotide
  Antisense strand to SEQ ID NO: 1573703
ugauccaggcagagcucgu

SEQ ID NO: 1573705 - RNA, 19 nt, Artificial Sequence
  Description of Artificial Sequence: Synthetic oligonucleotide
  Sense strand starting at position 1664 of SEQ ID NO: 1560065
gagcucugccuggaucagu

SEQ ID NO: 1573706 - RNA, 19 nt, Artificial Sequence
  Description of Artificial Sequence: Synthetic oligonucleotide
  Antisense strand to SEQ ID NO: 1573705
acugauccaggcagagcuc

SEQ ID NO: 1573707 - RNA, 19 nt, Artificial Sequence
  Description of Artificial Sequence: Synthetic oligonucleotide
  Sense strand starting at position 1672 of SEQ ID NO: 1560065
ccuggaucaguugggaaua

SEQ ID NO: 1573708 - RNA, 19 nt, Artificial Sequence
  Description of Artificial Sequence: Synthetic oligonucleotide
  Antisense strand to SEQ ID NO: 1573707
uauucccaacugauccagg

SEQ ID NO: 1573709 - RNA, 19 nt, Artificial Sequence
  Description of Artificial Sequence: Synthetic oligonucleotide
  Sense strand starting at position 1682 of SEQ ID NO: 1560065
uugggaauaagucgcuuga

SEQ ID NO: 1573710 - RNA, 19 nt, Artificial Sequence
  Description of Artificial Sequence: Synthetic oligonucleotide
  Antisense strand to SEQ ID NO: 1573709
ucaagcgacuuauucccaa

SEQ ID NO: 1573711 - RNA, 19 nt, Artificial Sequence
  Description of Artificial Sequence: Synthetic oligonucleotide
  Sense strand starting at position 1684 of SEQ ID NO: 1560065
gggaauaagucgcuugaau

SEQ ID NO: 1573712 - RNA, 19 nt, Artificial Sequence
  Description of Artificial Sequence: Synthetic oligonucleotide
  Antisense strand to SEQ ID NO: 1573711
auucaagcgacuuauuccc

SEQ ID NO: 1573713 - RNA, 19 nt, Artificial Sequence
  Description of Artificial Sequence: Synthetic oligonucleotide
  Sense strand starting at position 1686 of SEQ ID NO: 1560065
gaauaagucgcuugaauua

SEQ ID NO: 1573714 - RNA, 19 nt, Artificial Sequence
  Description of Artificial Sequence: Synthetic oligonucleotide
  Antisense strand to SEQ ID NO: 1573713
uaauucaagcgacuuauuc

SEQ ID NO: 1573715 - RNA, 19 nt, Artificial Sequence
  Description of Artificial Sequence: Synthetic oligonucleotide
  Sense strand starting at position 1767 of SEQ ID NO: 1560065
cucgaguccggaggugaaa

SEQ ID NO: 1573716 - RNA, 19 nt, Artificial Sequence
  Description of Artificial Sequence: Synthetic oligonucleotide
  Antisense strand to SEQ ID NO: 1573715
uuucaccuccggacucgag

SEQ ID NO: 1573717 - RNA, 19 nt, Artificial Sequence
  Description of Artificial Sequence: Synthetic oligonucleotide
  Sense strand starting at position 2749 of SEQ ID NO: 1560065
cgugaagacaucugcccaa

SEQ ID NO: 1573718 - RNA, 19 nt, Artificial Sequence
  Description of Artificial Sequence: Synthetic oligonucleotide
  Antisense strand to SEQ ID NO: 1573717
uugggcagaugucuucacg

SEQ ID NO: 1573719 - RNA, 19 nt, Artificial Sequence
  Description of Artificial Sequence: Synthetic oligonucleotide
  Sense strand starting at position 2752 of SEQ ID NO: 1560065
gaagacaucugcccaaggu

SEQ ID NO: 1573720 - RNA, 19 nt, Artificial Sequence
  Description of Artificial Sequence: Synthetic oligonucleotide
  Antisense strand to SEQ ID NO: 1573719
accuugggcagaugucuuc

SEQ ID NO: 1573721 - RNA, 19 nt, Artificial Sequence
  Description of Artificial Sequence: Synthetic oligonucleotide
  Sense strand starting at position 2756 of SEQ ID NO: 1560065
acaucugcccaaggucaua

SEQ ID NO: 1573722 - RNA, 19 nt, Artificial Sequence
  Description of Artificial Sequence: Synthetic oligonucleotide
  Antisense strand to SEQ ID NO: 1573721
uaugaccuugggcagaugu

SEQ ID NO: 1573723 - RNA, 19 nt, Artificial Sequence
  Description of Artificial Sequence: Synthetic oligonucleotide
  Sense strand starting at position 2880 of SEQ ID NO: 1560065
ggcaccagauaguuugauu

SEQ ID NO: 1573724 - RNA, 19 nt, Artificial Sequence
  Description of Artificial Sequence: Synthetic oligonucleotide
  Antisense strand to SEQ ID NO: 1573723
aaucaaacuaucuggugcc

SEQ ID NO: 1573725 - RNA, 19 nt, Artificial Sequence
  Description of Artificial Sequence: Synthetic oligonucleotide
  Sense strand starting at position 2926 of SEQ ID NO: 1560065
ggacauagcuugguguuca

SEQ ID NO: 1573726 - RNA, 19 nt, Artificial Sequence
  Description of Artificial Sequence: Synthetic oligonucleotide
  Antisense strand to SEQ ID NO: 1573725
ugaacaccaagcuaugucc

SEQ ID NO: 1573727 - RNA, 19 nt, Artificial Sequence
  Description of Artificial Sequence: Synthetic oligonucleotide
  Sense strand starting at position 2945 of SEQ ID NO: 1560065
gauauuagagucuggcuga

SEQ ID NO: 1573728 - RNA, 19 nt, Artificial Sequence
  Description of Artificial Sequence: Synthetic oligonucleotide
  Antisense strand to SEQ ID NO: 1573727
ucagccagacucuaauauc

SEQ ID NO: 1573729 - RNA, 19 nt, Artificial Sequence
  Description of Artificial Sequence: Synthetic oligonucleotide
  Sense strand starting at position 3097 of SEQ ID NO: 1560065
agagucauuugaggccaga

SEQ ID NO: 1573730 - RNA, 19 nt, Artificial Sequence
  Description of Artificial Sequence: Synthetic oligonucleotide
  Antisense strand to SEQ ID NO: 1573729
ucuggccucaaaugacucu

SEQ ID NO: 1573731 - RNA, 19 nt, Artificial Sequence
  Description of Artificial Sequence: Synthetic oligonucleotide
  Sense strand starting at position 3262 of SEQ ID NO: 1560065
cuaugauugcgcuacuucu

SEQ ID NO: 1573732 - RNA, 19 nt, Artificial Sequence
  Description of Artificial Sequence: Synthetic oligonucleotide
  Antisense strand to SEQ ID NO: 1573731
agaaguagcgcaaucauag

SEQ ID NO: 1573733 - RNA, 19 nt, Artificial Sequence
  Description of Artificial Sequence: Synthetic oligonucleotide
  Sense strand starting at position 3661 of SEQ ID NO: 1560065
gacaguuguagagagucau

SEQ ID NO: 1573734 - RNA, 19 nt, Artificial Sequence
  Description of Artificial Sequence: Synthetic oligonucleotide
  Antisense strand to SEQ ID NO: 1573733
augacucucuacaacuguc

SEQ ID NO: 1573735 - RNA, 19 nt, Artificial Sequence
  Description of Artificial Sequence: Synthetic oligonucleotide
  Sense strand starting at position 3665 of SEQ ID NO: 1560065
guuguagagagucauugag

SEQ ID NO: 1573736 - RNA, 19 nt, Artificial Sequence
  Description of Artificial Sequence: Synthetic oligonucleotide
  Antisense strand to SEQ ID NO: 1573735
cucaaugacucucuacaac

SEQ ID NO: 1573737 - RNA, 19 nt, Artificial Sequence
  Description of Artificial Sequence: Synthetic oligonucleotide
  Sense strand starting at position 3667 of SEQ ID NO: 1560065
uguagagagucauugagau

SEQ ID NO: 1573738 - RNA, 19 nt, Artificial Sequence
  Description of Artificial Sequence: Synthetic oligonucleotide
  Antisense strand to SEQ ID NO: 1573737
aucucaaugacucucuaca

SEQ ID NO: 1573739 - RNA, 19 nt, Artificial Sequence
  Description of Artificial Sequence: Synthetic oligonucleotide
  Sense strand starting at position 3687 of SEQ ID NO: 1560065
guuuauggaaagugcuaga

SEQ ID NO: 1573740 - RNA, 19 nt, Artificial Sequence
  Description of Artificial Sequence: Synthetic oligonucleotide
  Antisense strand to SEQ ID NO: 1573739
ucuagcacuuuccauaaac

SEQ ID NO: 1573741 - RNA, 19 nt, Artificial Sequence
  Description of Artificial Sequence: Synthetic oligonucleotide
  Sense strand starting at position 3737 of SEQ ID NO: 1560065
uuauuacuaguugguggaa

SEQ ID NO: 1573742 - RNA, 19 nt, Artificial Sequence
  Description of Artificial Sequence: Synthetic oligonucleotide
  Antisense strand to SEQ ID NO: 1573741
uuccaccaacuaguaauaa

SEQ ID NO: 1573743 - RNA, 19 nt, Artificial Sequence
  Description of Artificial Sequence: Synthetic oligonucleotide
  Sense strand starting at position 3812 of SEQ ID NO: 1560065
augguuaaacacgauguua

SEQ ID NO: 1573744 - RNA, 19 nt, Artificial Sequence
  Description of Artificial Sequence: Synthetic oligonucleotide
  Antisense strand to SEQ ID NO: 1573743
uaacaucguguuuaaccau

SEQ ID NO: 1573745 - RNA, 19 nt, Artificial Sequence
  Description of Artificial Sequence: Synthetic oligonucleotide
  Sense strand starting at position 3814 of SEQ ID NO: 1560065
gguuaaacacgauguuauc

SEQ ID NO: 1573746 - RNA, 19 nt, Artificial Sequence
  Description of Artificial Sequence: Synthetic oligonucleotide
  Antisense strand to SEQ ID NO: 1573745
gauaacaucguguuuaacc

SEQ ID NO: 1573747 - RNA, 19 nt, Artificial Sequence
  Description of Artificial Sequence: Synthetic oligonucleotide
  Sense strand starting at position 3831 of SEQ ID NO: 1560065
ucacaucaugauuggucau

SEQ ID NO: 1573748 - RNA, 19 nt, Artificial Sequence
  Description of Artificial Sequence: Synthetic oligonucleotide
  Antisense strand to SEQ ID NO: 1573747
augaccaaucaugauguga

SEQ ID NO: 1573749 - RNA, 19 nt, Artificial Sequence
  Description of Artificial Sequence: Synthetic oligonucleotide
  Sense strand starting at position 3833 of SEQ ID NO: 1560065
acaucaugauuggucauua

SEQ ID NO: 1573750 - RNA, 19 nt, Artificial Sequence
  Description of Artificial Sequence: Synthetic oligonucleotide
  Antisense strand to SEQ ID NO: 1573749
uaaugaccaaucaugaugu

SEQ ID NO: 1573751 - RNA, 19 nt, Artificial Sequence
  Description of Artificial Sequence: Synthetic oligonucleotide
  Sense strand starting at position 3834 of SEQ ID NO: 1560065
caucaugauuggucauuag

SEQ ID NO: 1573752 - RNA, 19 nt, Artificial Sequence
  Description of Artificial Sequence: Synthetic oligonucleotide
  Antisense strand to SEQ ID NO: 1573751
cuaaugaccaaucaugaug

SEQ ID NO: 1573753 - RNA, 19 nt, Artificial Sequence
  Description of Artificial Sequence: Synthetic oligonucleotide
  Sense strand starting at position 3837 of SEQ ID NO: 1560065
caugauuggucauuagcca

SEQ ID NO: 1573754 - RNA, 19 nt, Artificial Sequence
  Description of Artificial Sequence: Synthetic oligonucleotide
  Antisense strand to SEQ ID NO: 1573753
uggcuaaugaccaaucaug

SEQ ID NO: 1573755 - RNA, 19 nt, Artificial Sequence
  Description of Artificial Sequence: Synthetic oligonucleotide
  Sense strand starting at position 3838 of SEQ ID NO: 1560065
augauuggucauuagccaa

SEQ ID NO: 1573756 - RNA, 19 nt, Artificial Sequence
  Description of Artificial Sequence: Synthetic oligonucleotide
  Antisense strand to SEQ ID NO: 1573755
uuggcuaaugaccaaucau

SEQ ID NO: 1573757 - RNA, 19 nt, Artificial Sequence
  Description of Artificial Sequence: Synthetic oligonucleotide
  Sense strand starting at position 3841 of SEQ ID NO: 1560065
auuggucauuagccaagau

SEQ ID NO: 1573758 - RNA, 19 nt, Artificial Sequence
  Description of Artificial Sequence: Synthetic oligonucleotide
  Antisense strand to SEQ ID NO: 1573757
aucuuggcuaaugaccaau

SEQ ID NO: 1573759 - RNA, 19 nt, Artificial Sequence
  Description of Artificial Sequence: Synthetic oligonucleotide
  Sense strand starting at position 74 of SEQ ID NO: 1560066
ugacgucuuagccaggcau

SEQ ID NO: 1573760 - RNA, 19 nt, Artificial Sequence
  Description of Artificial Sequence: Synthetic oligonucleotide
  Antisense strand to SEQ ID NO: 1573759
augccuggcuaagacguca

SEQ ID NO: 1573761 - RNA, 19 nt, Artificial Sequence
  Description of Artificial Sequence: Synthetic oligonucleotide
  Sense strand starting at position 568 of SEQ ID NO: 1560066
ggcggaucgcaagagagaa

SEQ ID NO: 1573762 - RNA, 19 nt, Artificial Sequence
  Description of Artificial Sequence: Synthetic oligonucleotide
  Antisense strand to SEQ ID NO: 1573761
uucucucuugcgauccgcc

SEQ ID NO: 1573763 - RNA, 19 nt, Artificial Sequence
  Description of Artificial Sequence: Synthetic oligonucleotide
  Sense strand starting at position 596 of SEQ ID NO: 1560066
gaacuaaagcugugaugga

SEQ ID NO: 1573764 - RNA, 19 nt, Artificial Sequence
  Description of Artificial Sequence: Synthetic oligonucleotide
  Antisense strand to SEQ ID NO: 1573763
uccaucacagcuuuaguuc

SEQ ID NO: 1573765 - RNA, 19 nt, Artificial Sequence
  Description of Artificial Sequence: Synthetic oligonucleotide
  Sense strand starting at position 600 of SEQ ID NO: 1560066
uaaagcugugauggaggaa

SEQ ID NO: 1573766 - RNA, 19 nt, Artificial Sequence
  Description of Artificial Sequence: Synthetic oligonucleotide
  Antisense strand to SEQ ID NO: 1573765
uuccuccaucacagcuuua

SEQ ID NO: 1573767 - RNA, 19 nt, Artificial Sequence
  Description of Artificial Sequence: Synthetic oligonucleotide
  Sense strand starting at position 603 of SEQ ID NO: 1560066
agcugugauggaggaauaa

SEQ ID NO: 1573768 - RNA, 19 nt, Artificial Sequence
  Description of Artificial Sequence: Synthetic oligonucleotide
  Antisense strand to SEQ ID NO: 1573767
uuauuccuccaucacagcu

SEQ ID NO: 1573769 - RNA, 19 nt, Artificial Sequence
  Description of Artificial Sequence: Synthetic oligonucleotide
  Sense strand starting at position 654 of SEQ ID NO: 1560066
ccuguaucuacgggagguu

SEQ ID NO: 1573770 - RNA, 19 nt, Artificial Sequence
  Description of Artificial Sequence: Synthetic oligonucleotide
  Antisense strand to SEQ ID NO: 1573769
aaccucccguagauacagg

SEQ ID NO: 1573771 - RNA, 19 nt, Artificial Sequence
  Description of Artificial Sequence: Synthetic oligonucleotide
  Sense strand starting at position 735 of SEQ ID NO: 1560066
ggcaucuuggaauagcauu

SEQ ID NO: 1573772 - RNA, 19 nt, Artificial Sequence
  Description of Artificial Sequence: Synthetic oligonucleotide
  Antisense strand to SEQ ID NO: 1573771
aaugcuauuccaagaugcc

SEQ ID NO: 1573773 - RNA, 19 nt, Artificial Sequence
  Description of Artificial Sequence: Synthetic oligonucleotide
  Sense strand starting at position 773 of SEQ ID NO: 1560066
gcgggagugcucugggaau

SEQ ID NO: 1573774 - RNA, 19 nt, Artificial Sequence
  Description of Artificial Sequence: Synthetic oligonucleotide
  Antisense strand to SEQ ID NO: 1573773
auucccagagcacucccgc

SEQ ID NO: 1573775 - RNA, 19 nt, Artificial Sequence
  Description of Artificial Sequence: Synthetic oligonucleotide
  Sense strand starting at position 775 of SEQ ID NO: 1560066
gggagugcucugggaauaa

SEQ ID NO: 1573776 - RNA, 19 nt, Artificial Sequence
  Description of Artificial Sequence: Synthetic oligonucleotide
  Antisense strand to SEQ ID NO: 1573775
uuauucccagagcacuccc

SEQ ID NO: 1573777 - RNA, 19 nt, Artificial Sequence
  Description of Artificial Sequence: Synthetic oligonucleotide
  Sense strand starting at position 895 of SEQ ID NO: 1560066
gugaggucuguguauggga

SEQ ID NO: 1573778 - RNA, 19 nt, Artificial Sequence
  Description of Artificial Sequence: Synthetic oligonucleotide
  Antisense strand to SEQ ID NO: 1573777
ucccauacacagaccucac

SEQ ID NO: 1573779 - RNA, 19 nt, Artificial Sequence
  Description of Artificial Sequence: Synthetic oligonucleotide
  Sense strand starting at position 897 of SEQ ID NO: 1560066
gaggucuguguaugggaua

SEQ ID NO: 1573780 - RNA, 19 nt, Artificial Sequence
  Description of Artificial Sequence: Synthetic oligonucleotide
  Antisense strand to SEQ ID NO: 1573779
uaucccauacacagaccuc

SEQ ID NO: 1573781 - RNA, 19 nt, Artificial Sequence
  Description of Artificial Sequence: Synthetic oligonucleotide
  Sense strand starting at position 1406 of SEQ ID NO: 1560066
aagagugagucgucgggua

SEQ ID NO: 1573782 - RNA, 19 nt, Artificial Sequence
  Description of Artificial Sequence: Synthetic oligonucleotide
  Antisense strand to SEQ ID NO: 1573781
uacccgacgacucacucuu

SEQ ID NO: 1573783 - RNA, 19 nt, Artificial Sequence
  Description of Artificial Sequence: Synthetic oligonucleotide
  Sense strand starting at position 2110 of SEQ ID NO: 1560066
agcuguuagccuugaguuc

SEQ ID NO: 1573784 - RNA, 19 nt, Artificial Sequence
  Description of Artificial Sequence: Synthetic oligonucleotide
  Antisense strand to SEQ ID NO: 1573783
gaacucaaggcuaacagcu

SEQ ID NO: 1573785 - RNA, 19 nt, Artificial Sequence
  Description of Artificial Sequence: Synthetic oligonucleotide
  Sense strand starting at position 2117 of SEQ ID NO: 1560066
agccuugaguucguuccua

SEQ ID NO: 1573786 - RNA, 19 nt, Artificial Sequence
  Description of Artificial Sequence: Synthetic oligonucleotide
  Antisense strand to SEQ ID NO: 1573785
uaggaacgaacucaaggcu

SEQ ID NO: 1573787 - RNA, 19 nt, Artificial Sequence
  Description of Artificial Sequence: Synthetic oligonucleotide
  Sense strand starting at position 2190 of SEQ ID NO: 1560066
gacguucaagaguguuaag

SEQ ID NO: 1573788 - RNA, 19 nt, Artificial Sequence
  Description of Artificial Sequence: Synthetic oligonucleotide
  Antisense strand to SEQ ID NO: 1573787
cuuaacacucuugaacguc

SEQ ID NO: 1573789 - RNA, 19 nt, Artificial Sequence
  Description of Artificial Sequence: Synthetic oligonucleotide
  Sense strand starting at position 2229 of SEQ ID NO: 1560066
aggcccgaucucuacagaa

SEQ ID NO: 1573790 - RNA, 19 nt, Artificial Sequence
  Description of Artificial Sequence: Synthetic oligonucleotide
  Antisense strand to SEQ ID NO: 1573789
uucuguagagaucgggccu

SEQ ID NO: 1573791 - RNA, 19 nt, Artificial Sequence
  Description of Artificial Sequence: Synthetic oligonucleotide
  Sense strand starting at position 2342 of SEQ ID NO: 1560066
ugccaugagcuaugaccau

SEQ ID NO: 1573792 - RNA, 19 nt, Artificial Sequence
  Description of Artificial Sequence: Synthetic oligonucleotide
  Antisense strand to SEQ ID NO: 1573791
auggucauagcucauggca

SEQ ID NO: 1573793 - RNA, 19 nt, Artificial Sequence
  Description of Artificial Sequence: Synthetic oligonucleotide
  Sense strand starting at position 2534 of SEQ ID NO: 1560066
guguaauagcccugagccu

SEQ ID NO: 1573794 - RNA, 19 nt, Artificial Sequence
  Description of Artificial Sequence: Synthetic oligonucleotide
  Antisense strand to SEQ ID NO: 1573793
aggcucagggcuauuacac

SEQ ID NO: 1573795 - RNA, 19 nt, Artificial Sequence
  Description of Artificial Sequence: Synthetic oligonucleotide
  Sense strand starting at position 2690 of SEQ ID NO: 1560066
gguagccugacuuagugaa

SEQ ID NO: 1573796 - RNA, 19 nt, Artificial Sequence
  Description of Artificial Sequence: Synthetic oligonucleotide
  Antisense strand to SEQ ID NO: 1573795
uucacuaagucaggcuacc

SEQ ID NO: 1573797 - RNA, 19 nt, Artificial Sequence
  Description of Artificial Sequence: Synthetic oligonucleotide
  Sense strand starting at position 2692 of SEQ ID NO: 1560066
uagccugacuuagugaaga

SEQ ID NO: 1573798 - RNA, 19 nt, Artificial Sequence
  Description of Artificial Sequence: Synthetic oligonucleotide
  Antisense strand to SEQ ID NO: 1573797
ucuucacuaagucaggcua

SEQ ID NO: 1573799 - RNA, 19 nt, Artificial Sequence
  Description of Artificial Sequence: Synthetic oligonucleotide
  Sense strand starting at position 2766 of SEQ ID NO: 1560066
ggcuguuagugaguuggga

SEQ ID NO: 1573800 - RNA, 19 nt, Artificial Sequence
  Description of Artificial Sequence: Synthetic oligonucleotide
  Antisense strand to SEQ ID NO: 1573799
ucccaacucacuaacagcc

SEQ ID NO: 1573801 - RNA, 19 nt, Artificial Sequence
  Description of Artificial Sequence: Synthetic oligonucleotide
  Sense strand starting at position 2768 of SEQ ID NO: 1560066
cuguuagugaguugggagu

SEQ ID NO: 1573802 - RNA, 19 nt, Artificial Sequence
  Description of Artificial Sequence: Synthetic oligonucleotide
  Antisense strand to SEQ ID NO: 1573801
acucccaacucacuaacag

SEQ ID NO: 1573803 - RNA, 19 nt, Artificial Sequence
  Description of Artificial Sequence: Synthetic oligonucleotide
  Sense strand starting at position 2986 of SEQ ID NO: 1560066
gggcucauaucccuauguu

SEQ ID NO: 1573804 - RNA, 19 nt, Artificial Sequence
  Description of Artificial Sequence: Synthetic oligonucleotide
  Antisense strand to SEQ ID NO: 1573803
aacauagggauaugagccc

SEQ ID NO: 1573805 - RNA, 19 nt, Artificial Sequence
  Description of Artificial Sequence: Synthetic oligonucleotide
  Sense strand starting at position 2987 of SEQ ID NO: 1560066
ggcucauaucccuauguua

SEQ ID NO: 1573806 - RNA, 19 nt, Artificial Sequence
  Description of Artificial Sequence: Synthetic oligonucleotide
  Antisense strand to SEQ ID NO: 1573805
uaacauagggauaugagcc

SEQ ID NO: 1573807 - RNA, 19 nt, Artificial Sequence
  Description of Artificial Sequence: Synthetic oligonucleotide
  Sense strand starting at position 3378 of SEQ ID NO: 1560066
ccggccuggagugguuaau

SEQ ID NO: 1573808 - RNA, 19 nt, Artificial Sequence
  Description of Artificial Sequence: Synthetic oligonucleotide
  Antisense strand to SEQ ID NO: 1573807
auuaaccacuccaggccgg

SEQ ID NO: 1573809 - RNA, 19 nt, Artificial Sequence
  Description of Artificial Sequence: Synthetic oligonucleotide
  Sense strand starting at position 3407 of SEQ ID NO: 1560066
ucacucgauugguuaagaa

SEQ ID NO: 1573810 - RNA, 19 nt, Artificial Sequence
  Description of Artificial Sequence: Synthetic oligonucleotide
  Antisense strand to SEQ ID NO: 1573809
uucuuaaccaaucgaguga

SEQ ID NO: 1573811 - RNA, 19 nt, Artificial Sequence
  Description of Artificial Sequence: Synthetic oligonucleotide
  Sense strand starting at position 3594 of SEQ ID NO: 1560066
ggguucuguagcugagguu

SEQ ID NO: 1573812 - RNA, 19 nt, Artificial Sequence
  Description of Artificial Sequence: Synthetic oligonucleotide
  Antisense strand to SEQ ID NO: 1573811
aaccucagcuacagaaccc

SEQ ID NO: 1573813 - RNA, 19 nt, Artificial Sequence
  Description of Artificial Sequence: Synthetic oligonucleotide
  Sense strand starting at position 3603 of SEQ ID NO: 1560066
agcugagguuuccucguga

SEQ ID NO: 1573814 - RNA, 19 nt, Artificial Sequence
  Description of Artificial Sequence: Synthetic oligonucleotide
  Antisense strand to SEQ ID NO: 1573813
ucacgaggaaaccucagcu

SEQ ID NO: 1573815 - RNA, 19 nt, Artificial Sequence
  Description of Artificial Sequence: Synthetic oligonucleotide
  Sense strand starting at position 3608 of SEQ ID NO: 1560066
agguuuccucgugagaggu

SEQ ID NO: 1573816 - RNA, 19 nt, Artificial Sequence
  Description of Artificial Sequence: Synthetic oligonucleotide
  Antisense strand to SEQ ID NO: 1573815
accucucacgaggaaaccu

SEQ ID NO: 1573817 - RNA, 19 nt, Artificial Sequence
  Description of Artificial Sequence: Synthetic oligonucleotide
  Sense strand starting at position 3609 of SEQ ID NO: 1560066
gguuuccucgugagaggug

SEQ ID NO: 1573818 - RNA, 19 nt, Artificial Sequence
  Description of Artificial Sequence: Synthetic oligonucleotide
  Antisense strand to SEQ ID NO: 1573817
caccucucacgaggaaacc

SEQ ID NO: 1573819 - RNA, 19 nt, Artificial Sequence
  Description of Artificial Sequence: Synthetic oligonucleotide
  Sense strand starting at position 3681 of SEQ ID NO: 1560066
auaauaggugcugguugaa

SEQ ID NO: 1573820 - RNA, 19 nt, Artificial Sequence
  Description of Artificial Sequence: Synthetic oligonucleotide
  Antisense strand to SEQ ID NO: 1573819
uucaaccagcaccuauuau

SEQ ID NO: 1573821 - RNA, 19 nt, Artificial Sequence
  Description of Artificial Sequence: Synthetic oligonucleotide
  Sense strand starting at position 3690 of SEQ ID NO: 1560066
gcugguugaagucaucuga

SEQ ID NO: 1573822 - RNA, 19 nt, Artificial Sequence
  Description of Artificial Sequence: Synthetic oligonucleotide
  Antisense strand to SEQ ID NO: 1573821
ucagaugacuucaaccagc

SEQ ID NO: 1573823 - RNA, 19 nt, Artificial Sequence
  Description of Artificial Sequence: Synthetic oligonucleotide
  Sense strand starting at position 3694 of SEQ ID NO: 1560066
guugaagucaucugagguu

SEQ ID NO: 1573824 - RNA, 19 nt, Artificial Sequence
  Description of Artificial Sequence: Synthetic oligonucleotide
  Antisense strand to SEQ ID NO: 1573823
aaccucagaugacuucaac

SEQ ID NO: 1573825 - RNA, 19 nt, Artificial Sequence
  Description of Artificial Sequence: Synthetic oligonucleotide
  Sense strand starting at position 3706 of SEQ ID NO: 1560066
ugagguuccaucugcagua

SEQ ID NO: 1573826 - RNA, 19 nt, Artificial Sequence
  Description of Artificial Sequence: Synthetic oligonucleotide
  Antisense strand to SEQ ID NO: 1573825
uacugcagauggaaccuca

SEQ ID NO: 1573827 - RNA, 19 nt, Artificial Sequence
  Description of Artificial Sequence: Synthetic oligonucleotide
  Sense strand starting at position 3707 of SEQ ID NO: 1560066
gagguuccaucugcaguaa

SEQ ID NO: 1573828 - RNA, 19 nt, Artificial Sequence
  Description of Artificial Sequence: Synthetic oligonucleotide
  Antisense strand to SEQ ID NO: 1573827
uuacugcagauggaaccuc

SEQ ID NO: 1573829 - RNA, 19 nt, Artificial Sequence
  Description of Artificial Sequence: Synthetic oligonucleotide
  Sense strand starting at position 3719 of SEQ ID NO: 1560066
gcaguaacauuucuaguuu

SEQ ID NO: 1573830 - RNA, 19 nt, Artificial Sequence
  Description of Artificial Sequence: Synthetic oligonucleotide
  Antisense strand to SEQ ID NO: 1573829
aaacuagaaauguuacugc

SEQ ID NO: 1573831 - RNA, 19 nt, Artificial Sequence
  Description of Artificial Sequence: Synthetic oligonucleotide
  Sense strand starting at position 3791 of SEQ ID NO: 1560066
gccaaagguuacuccuaga

SEQ ID NO: 1573832 - RNA, 19 nt, Artificial Sequence
  Description of Artificial Sequence: Synthetic oligonucleotide
  Antisense strand to SEQ ID NO: 1573831
ucuaggaguaaccuuuggc

SEQ ID NO: 1573833 - RNA, 19 nt, Artificial Sequence
  Description of Artificial Sequence: Synthetic oligonucleotide
  Sense strand starting at position 3805 of SEQ ID NO: 1560066
cuagaauaaucauaaggaa

SEQ ID NO: 1573834 - RNA, 19 nt, Artificial Sequence
  Description of Artificial Sequence: Synthetic oligonucleotide
  Antisense strand to SEQ ID NO: 1573833
uuccuuaugauuauucuag

SEQ ID NO: 1573835 - RNA, 19 nt, Artificial Sequence
  Description of Artificial Sequence: Synthetic oligonucleotide
  Sense strand starting at position 3860 of SEQ ID NO: 1560066
cugugagaacccugaggua

SEQ ID NO: 1573836 - RNA, 19 nt, Artificial Sequence
  Description of Artificial Sequence: Synthetic oligonucleotide
  Antisense strand to SEQ ID NO: 1573835
uaccucaggguucucacag

SEQ ID NO: 1573837 - RNA, 19 nt, Artificial Sequence
  Description of Artificial Sequence: Synthetic oligonucleotide
  Sense strand starting at position 3897 of SEQ ID NO: 1560066
uguagucugcuagcucuau

SEQ ID NO: 1573838 - RNA, 19 nt, Artificial Sequence
  Description of Artificial Sequence: Synthetic oligonucleotide
  Antisense strand to SEQ ID NO: 1573837
auagagcuagcagacuaca

SEQ ID NO: 1573839 - RNA, 19 nt, Artificial Sequence
  Description of Artificial Sequence: Synthetic oligonucleotide
  Sense strand starting at position 143 of SEQ ID NO: 1560067
gcgccuggccuauuauacu

SEQ ID NO: 1573840 - RNA, 19 nt, Artificial Sequence
  Description of Artificial Sequence: Synthetic oligonucleotide
  Antisense strand to SEQ ID NO: 1573839
aguauaauaggccaggcgc

SEQ ID NO: 1573841 - RNA, 19 nt, Artificial Sequence
  Description of Artificial Sequence: Synthetic oligonucleotide
  Sense strand starting at position 193 of SEQ ID NO: 1560067
aggcuaaauccacagcguu

SEQ ID NO: 1573842 - RNA, 19 nt, Artificial Sequence
  Description of Artificial Sequence: Synthetic oligonucleotide
  Antisense strand to SEQ ID NO: 1573841
aacgcuguggauuuagccu

SEQ ID NO: 1573843 - RNA, 19 nt, Artificial Sequence
  Description of Artificial Sequence: Synthetic oligonucleotide
  Sense strand starting at position 362 of SEQ ID NO: 1560067
auccuagccuuucuagaga

SEQ ID NO: 1573844 - RNA, 19 nt, Artificial Sequence
  Description of Artificial Sequence: Synthetic oligonucleotide
  Antisense strand to SEQ ID NO: 1573843
ucucuagaaaggcuaggau

SEQ ID NO: 1573845 - RNA, 19 nt, Artificial Sequence
  Description of Artificial Sequence: Synthetic oligonucleotide
  Sense strand starting at position 552 of SEQ ID NO: 1560067
cuaugauggcaauaauccu

SEQ ID NO: 1573846 - RNA, 19 nt, Artificial Sequence
  Description of Artificial Sequence: Synthetic oligonucleotide
  Antisense strand to SEQ ID NO: 1573845
aggauuauugccaucauag

SEQ ID NO: 1573847 - RNA, 19 nt, Artificial Sequence
  Description of Artificial Sequence: Synthetic oligonucleotide
  Sense strand starting at position 651 of SEQ ID NO: 1560067
gcucccuggccggacaaau

SEQ ID NO: 1573848 - RNA, 19 nt, Artificial Sequence
  Description of Artificial Sequence: Synthetic oligonucleotide
  Antisense strand to SEQ ID NO: 1573847
auuuguccggccagggagc

SEQ ID NO: 1573849 - RNA, 19 nt, Artificial Sequence
  Description of Artificial Sequence: Synthetic oligonucleotide
  Sense strand starting at position 685 of SEQ ID NO: 1560067
aagugagauugggugauga

SEQ ID NO: 1573850 - RNA, 19 nt, Artificial Sequence
  Description of Artificial Sequence: Synthetic oligonucleotide
  Antisense strand to SEQ ID NO: 1573849
ucaucacccaaucucacuu

SEQ ID NO: 1573851 - RNA, 19 nt, Artificial Sequence
  Description of Artificial Sequence: Synthetic oligonucleotide
  Sense strand starting at position 687 of SEQ ID NO: 1560067
gugagauugggugaugagu

SEQ ID NO: 1573852 - RNA, 19 nt, Artificial Sequence
  Description of Artificial Sequence: Synthetic oligonucleotide
  Antisense strand to SEQ ID NO: 1573851
acucaucacccaaucucac

SEQ ID NO: 1573853 - RNA, 19 nt, Artificial Sequence
  Description of Artificial Sequence: Synthetic oligonucleotide
  Sense strand starting at position 701 of SEQ ID NO: 1560067
ugaguuauggaccgacaau

SEQ ID NO: 1573854 - RNA, 19 nt, Artificial Sequence
  Description of Artificial Sequence: Synthetic oligonucleotide
  Antisense strand to SEQ ID NO: 1573853
auugucgguccauaacuca

SEQ ID NO: 1573855 - RNA, 19 nt, Artificial Sequence
  Description of Artificial Sequence: Synthetic oligonucleotide
  Sense strand starting at position 912 of SEQ ID NO: 1560067
ccuugaagggucuguggga

SEQ ID NO: 1573856 - RNA, 19 nt, Artificial Sequence
  Description of Artificial Sequence: Synthetic oligonucleotide
  Antisense strand to SEQ ID NO: 1573855
ucccacagacccuucaagg

SEQ ID NO: 1573857 - RNA, 19 nt, Artificial Sequence
  Description of Artificial Sequence: Synthetic oligonucleotide
  Sense strand starting at position 1440 of SEQ ID NO: 1560067
gguuaucucuggccucuga

SEQ ID NO: 1573858 - RNA, 19 nt, Artificial Sequence
  Description of Artificial Sequence: Synthetic oligonucleotide
  Antisense strand to SEQ ID NO: 1573857
ucagaggccagagauaacc

SEQ ID NO: 1573859 - RNA, 19 nt, Artificial Sequence
  Description of Artificial Sequence: Synthetic oligonucleotide
  Sense strand starting at position 2317 of SEQ ID NO: 1560067
gcguaauagcgccuggcuu

SEQ ID NO: 1573860 - RNA, 19 nt, Artificial Sequence
  Description of Artificial Sequence: Synthetic oligonucleotide
  Antisense strand to SEQ ID NO: 1573859
aagccaggcgcuauuacgc

SEQ ID NO: 1573861 - RNA, 19 nt, Artificial Sequence
  Description of Artificial Sequence: Synthetic oligonucleotide
  Sense strand starting at position 2413 of SEQ ID NO: 1560067
gggagcggugcuugagaaa

SEQ ID NO: 1573862 - RNA, 19 nt, Artificial Sequence
  Description of Artificial Sequence: Synthetic oligonucleotide
  Antisense strand to SEQ ID NO: 1573861
uuucucaagcaccgcuccc

SEQ ID NO: 1573863 - RNA, 19 nt, Artificial Sequence
  Description of Artificial Sequence: Synthetic oligonucleotide
  Sense strand starting at position 2438 of SEQ ID NO: 1560067
gauucuuggucucuaguag

SEQ ID NO: 1573864 - RNA, 19 nt, Artificial Sequence
  Description of Artificial Sequence: Synthetic oligonucleotide
  Antisense strand to SEQ ID NO: 1573863
cuacuagagaccaagaauc

SEQ ID NO: 1573865 - RNA, 19 nt, Artificial Sequence
  Description of Artificial Sequence: Synthetic oligonucleotide
  Sense strand starting at position 2450 of SEQ ID NO: 1560067
cuaguagcccgguagaauc

SEQ ID NO: 1573866 - RNA, 19 nt, Artificial Sequence
  Description of Artificial Sequence: Synthetic oligonucleotide
  Antisense strand to SEQ ID NO: 1573865
gauucuaccgggcuacuag

SEQ ID NO: 1573867 - RNA, 19 nt, Artificial Sequence
  Description of Artificial Sequence: Synthetic oligonucleotide
  Sense strand starting at position 2461 of SEQ ID NO: 1560067
guagaauccggcugucuca

SEQ ID NO: 1573868 - RNA, 19 nt, Artificial Sequence
  Description of Artificial Sequence: Synthetic oligonucleotide
  Antisense strand to SEQ ID NO: 1573867
ugagacagccggauucuac

SEQ ID NO: 1573869 - RNA, 19 nt, Artificial Sequence
  Description of Artificial Sequence: Synthetic oligonucleotide
  Sense strand starting at position 2488 of SEQ ID NO: 1560067
gggaaucugcaaugguuaa

SEQ ID NO: 1573870 - RNA, 19 nt, Artificial Sequence
  Description of Artificial Sequence: Synthetic oligonucleotide
  Antisense strand to SEQ ID NO: 1573869
uuaaccauugcagauuccc

SEQ ID NO: 1573871 - RNA, 19 nt, Artificial Sequence
  Description of Artificial Sequence: Synthetic oligonucleotide
  Sense strand starting at position 2521 of SEQ ID NO: 1560067
ggacaauucuaacccagua

SEQ ID NO: 1573872 - RNA, 19 nt, Artificial Sequence
  Description of Artificial Sequence: Synthetic oligonucleotide
  Antisense strand to SEQ ID NO: 1573871
uacuggguuagaauugucc

SEQ ID NO: 1573873 - RNA, 19 nt, Artificial Sequence
  Description of Artificial Sequence: Synthetic oligonucleotide
  Sense strand starting at position 2627 of SEQ ID NO: 1560067
uuuguagagucacugaaau

SEQ ID NO: 1573874 - RNA, 19 nt, Artificial Sequence
  Description of Artificial Sequence: Synthetic oligonucleotide
  Antisense strand to SEQ ID NO: 1573873
auuucagugacucuacaaa

SEQ ID NO: 1573875 - RNA, 19 nt, Artificial Sequence
  Description of Artificial Sequence: Synthetic oligonucleotide
  Sense strand starting at position 2638 of SEQ ID NO: 1560067
acugaaauuggaggucuua

SEQ ID NO: 1573876 - RNA, 19 nt, Artificial Sequence
  Description of Artificial Sequence: Synthetic oligonucleotide
  Antisense strand to SEQ ID NO: 1573875
uaagaccuccaauuucagu

SEQ ID NO: 1573877 - RNA, 19 nt, Artificial Sequence
  Description of Artificial Sequence: Synthetic oligonucleotide
  Sense strand starting at position 2871 of SEQ ID NO: 1560067
cccuguugugacuaccaaa

SEQ ID NO: 1573878 - RNA, 19 nt, Artificial Sequence
  Description of Artificial Sequence: Synthetic oligonucleotide
  Antisense strand to SEQ ID NO: 1573877
uuugguagucacaacaggg

SEQ ID NO: 1573879 - RNA, 19 nt, Artificial Sequence
  Description of Artificial Sequence: Synthetic oligonucleotide
  Sense strand starting at position 2906 of SEQ ID NO: 1560067
gccggauacucucugagga

SEQ ID NO: 1573880 - RNA, 19 nt, Artificial Sequence
  Description of Artificial Sequence: Synthetic oligonucleotide
  Antisense strand to SEQ ID NO: 1573879
uccucagagaguauccggc

SEQ ID NO: 1573881 - RNA, 19 nt, Artificial Sequence
  Description of Artificial Sequence: Synthetic oligonucleotide
  Sense strand starting at position 2910 of SEQ ID NO: 1560067
gauacucucugaggagcaa

SEQ ID NO: 1573882 - RNA, 19 nt, Artificial Sequence
  Description of Artificial Sequence: Synthetic oligonucleotide
  Antisense strand to SEQ ID NO: 1573881
uugcuccucagagaguauc

SEQ ID NO: 1573883 - RNA, 19 nt, Artificial Sequence
  Description of Artificial Sequence: Synthetic oligonucleotide
  Sense strand starting at position 3250 of SEQ ID NO: 1560067
uggccucaaagauggauau

SEQ ID NO: 1573884 - RNA, 19 nt, Artificial Sequence
  Description of Artificial Sequence: Synthetic oligonucleotide
  Antisense strand to SEQ ID NO: 1573883
auauccaucuuugaggcca

SEQ ID NO: 1573885 - RNA, 19 nt, Artificial Sequence
  Description of Artificial Sequence: Synthetic oligonucleotide
  Sense strand starting at position 3338 of SEQ ID NO: 1560067
gauaaauggagcugggcau

SEQ ID NO: 1573886 - RNA, 19 nt, Artificial Sequence
  Description of Artificial Sequence: Synthetic oligonucleotide
  Antisense strand to SEQ ID NO: 1573885
augcccagcuccauuuauc

SEQ ID NO: 1573887 - RNA, 19 nt, Artificial Sequence
  Description of Artificial Sequence: Synthetic oligonucleotide
  Sense strand starting at position 3565 of SEQ ID NO: 1560067
cccaaagcuuuguuuauag

SEQ ID NO: 1573888 - RNA, 19 nt, Artificial Sequence
  Description of Artificial Sequence: Synthetic oligonucleotide
  Antisense strand to SEQ ID NO: 1573887
cuauaaacaaagcuuuggg

SEQ ID NO: 1573889 - RNA, 19 nt, Artificial Sequence
  Description of Artificial Sequence: Synthetic oligonucleotide
  Sense strand starting at position 3600 of SEQ ID NO: 1560067
ucuggagacuacuguauuu

SEQ ID NO: 1573890 - RNA, 19 nt, Artificial Sequence
  Description of Artificial Sequence: Synthetic oligonucleotide
  Antisense strand to SEQ ID NO: 1573889
aaauacaguagucuccaga

SEQ ID NO: 1573891 - RNA, 19 nt, Artificial Sequence
  Description of Artificial Sequence: Synthetic oligonucleotide
  Sense strand starting at position 3657 of SEQ ID NO: 1560067
gguggaauccuaggcagga

SEQ ID NO: 1573892 - RNA, 19 nt, Artificial Sequence
  Description of Artificial Sequence: Synthetic oligonucleotide
  Antisense strand to SEQ ID NO: 1573891
uccugccuaggauuccacc

SEQ ID NO: 1573893 - RNA, 19 nt, Artificial Sequence
  Description of Artificial Sequence: Synthetic oligonucleotide
  Sense strand starting at position 3658 of SEQ ID NO: 1560067
guggaauccuaggcaggau

SEQ ID NO: 1573894 - RNA, 19 nt, Artificial Sequence
  Description of Artificial Sequence: Synthetic oligonucleotide
  Antisense strand to SEQ ID NO: 1573893
auccugccuaggauuccac

SEQ ID NO: 1573895 - RNA, 19 nt, Artificial Sequence
  Description of Artificial Sequence: Synthetic oligonucleotide
  Sense strand starting at position 3748 of SEQ ID NO: 1560067
cugucauaguugccaguua

SEQ ID NO: 1573896 - RNA, 19 nt, Artificial Sequence
  Description of Artificial Sequence: Synthetic oligonucleotide
  Antisense strand to SEQ ID NO: 1573895
uaacuggcaacuaugacag

SEQ ID NO: 1573897 - RNA, 19 nt, Artificial Sequence
  Description of Artificial Sequence: Synthetic oligonucleotide
  Sense strand starting at position 3793 of SEQ ID NO: 1560067
aggucauagcuauguccca

SEQ ID NO: 1573898 - RNA, 19 nt, Artificial Sequence
  Description of Artificial Sequence: Synthetic oligonucleotide
  Antisense strand to SEQ ID NO: 1573897
ugggacauagcuaugaccu

SEQ ID NO: 1573899 - RNA, 19 nt, Artificial Sequence
  Description of Artificial Sequence: Synthetic oligonucleotide
  Sense strand starting at position 3794 of SEQ ID NO: 1560067
ggucauagcuaugucccau

SEQ ID NO: 1573900 - RNA, 19 nt, Artificial Sequence
  Description of Artificial Sequence: Synthetic oligonucleotide
  Antisense strand to SEQ ID NO: 1573899
augggacauagcuaugacc

SEQ ID NO: 1573901 - RNA, 19 nt, Artificial Sequence
  Description of Artificial Sequence: Synthetic oligonucleotide
  Sense strand starting at position 3848 of SEQ ID NO: 1560067
cagguaagagucugagcua

SEQ ID NO: 1573902 - RNA, 19 nt, Artificial Sequence
  Description of Artificial Sequence: Synthetic oligonucleotide
  Antisense strand to SEQ ID NO: 1573901
uagcucagacucuuaccug

SEQ ID NO: 1573903 - RNA, 19 nt, Artificial Sequence
  Description of Artificial Sequence: Synthetic oligonucleotide
  Sense strand starting at position 3859 of SEQ ID NO: 1560067
cugagcuagcccugacaua

SEQ ID NO: 1573904 - RNA, 19 nt, Artificial Sequence
  Description of Artificial Sequence: Synthetic oligonucleotide
  Antisense strand to SEQ ID NO: 1573903
uaugucagggcuagcucag

SEQ ID NO: 1573905 - RNA, 19 nt, Artificial Sequence
  Description of Artificial Sequence: Synthetic oligonucleotide
  Sense strand starting at position 3860 of SEQ ID NO: 1560067
ugagcuagcccugacauaa

SEQ ID NO: 1573906 - RNA, 19 nt, Artificial Sequence
  Description of Artificial Sequence: Synthetic oligonucleotide
  Antisense strand to SEQ ID NO: 1573905
uuaugucagggcuagcuca

SEQ ID NO: 1573907 - RNA, 19 nt, Artificial Sequence
  Description of Artificial Sequence: Synthetic oligonucleotide
  Sense strand starting at position 3935 of SEQ ID NO: 1560067
gaccaaaggucuguuaggu

SEQ ID NO: 1573908 - RNA, 19 nt, Artificial Sequence
  Description of Artificial Sequence: Synthetic oligonucleotide
  Antisense strand to SEQ ID NO: 1573907
accuaacagaccuuugguc

SEQ ID NO: 1573909 - RNA, 19 nt, Artificial Sequence
  Description of Artificial Sequence: Synthetic oligonucleotide
  Sense strand starting at position 3940 of SEQ ID NO: 1560067
aaggucuguuagguuauaa

SEQ ID NO: 1573910 - RNA, 19 nt, Artificial Sequence
  Description of Artificial Sequence: Synthetic oligonucleotide
  Antisense strand to SEQ ID NO: 1573909
uuauaaccuaacagaccuu

SEQ ID NO: 1573911 - RNA, 19 nt, Artificial Sequence
  Description of Artificial Sequence: Synthetic oligonucleotide
  Sense strand starting at position 3951 of SEQ ID NO: 1560067
gguuauaaucaccguggca

SEQ ID NO: 1573912 - RNA, 19 nt, Artificial Sequence
  Description of Artificial Sequence: Synthetic oligonucleotide
  Antisense strand to SEQ ID NO: 1573911
ugccacggugauuauaacc

SEQ ID NO: 1573913 - RNA, 19 nt, Artificial Sequence
  Description of Artificial Sequence: Synthetic oligonucleotide
  Sense strand starting at position 3953 of SEQ ID NO: 1560067
uuauaaucaccguggcaac

SEQ ID NO: 1573914 - RNA, 19 nt, Artificial Sequence
  Description of Artificial Sequence: Synthetic oligonucleotide
  Antisense strand to SEQ ID NO: 1573913
guugccacggugauuauaa

SEQ ID NO: 1573915 - RNA, 19 nt, Artificial Sequence
  Description of Artificial Sequence: Synthetic oligonucleotide
  Sense strand starting at position 3980 of SEQ ID NO: 1560067
gcguguacucuguucccaa

SEQ ID NO: 1573916 - RNA, 19 nt, Artificial Sequence
  Description of Artificial Sequence: Synthetic oligonucleotide
  Antisense strand to SEQ ID NO: 1573915
uugggaacagaguacacgc

SEQ ID NO: 1573917 - RNA, 19 nt, Artificial Sequence
  Description of Artificial Sequence: Synthetic oligonucleotide
  Sense strand starting at position 3981 of SEQ ID NO: 1560067
cguguacucuguucccaau

SEQ ID NO: 1573918 - RNA, 19 nt, Artificial Sequence
  Description of Artificial Sequence: Synthetic oligonucleotide
  Antisense strand to SEQ ID NO: 1573917
auugggaacagaguacacg

SEQ ID NO: 1573919 - RNA, 19 nt, Artificial Sequence
  Description of Artificial Sequence: Synthetic oligonucleotide
  Sense strand starting at position 18 of SEQ ID NO: 1560068
gcucacacaucuguaagaa

SEQ ID NO: 1573920 - RNA, 19 nt, Artificial Sequence
  Description of Artificial Sequence: Synthetic oligonucleotide
  Antisense strand to SEQ ID NO: 1573919
uucuuacagaugugugagc

SEQ ID NO: 1573921 - RNA, 19 nt, Artificial Sequence
  Description of Artificial Sequence: Synthetic oligonucleotide
  Sense strand starting at position 69 of SEQ ID NO: 1560068
guacuuggucucugcugaa

SEQ ID NO: 1573922 - RNA, 19 nt, Artificial Sequence
  Description of Artificial Sequence: Synthetic oligonucleotide
  Antisense strand to SEQ ID NO: 1573921
uucagcagagaccaaguac

SEQ ID NO: 1573923 - RNA, 19 nt, Artificial Sequence
  Description of Artificial Sequence: Synthetic oligonucleotide
  Sense strand starting at position 73 of SEQ ID NO: 1560068
uuggucucugcugaaggaa

SEQ ID NO: 1573924 - RNA, 19 nt, Artificial Sequence
  Description of Artificial Sequence: Synthetic oligonucleotide
  Antisense strand to SEQ ID NO: 1573923
uuccuucagcagagaccaa

SEQ ID NO: 1573925 - RNA, 19 nt, Artificial Sequence
  Description of Artificial Sequence: Synthetic oligonucleotide
  Sense strand starting at position 230 of SEQ ID NO: 1560068
cugguuuaccugcaucaaa

SEQ ID NO: 1573926 - RNA, 19 nt, Artificial Sequence
  Description of Artificial Sequence: Synthetic oligonucleotide
  Antisense strand to SEQ ID NO: 1573925
uuugaugcagguaaaccag

SEQ ID NO: 1573927 - RNA, 19 nt, Artificial Sequence
  Description of Artificial Sequence: Synthetic oligonucleotide
  Sense strand starting at position 254 of SEQ ID NO: 1560068
uuggaacacuuguuaaagu

SEQ ID NO: 1573928 - RNA, 19 nt, Artificial Sequence
  Description of Artificial Sequence: Synthetic oligonucleotide
  Antisense strand to SEQ ID NO: 1573927
acuuuaacaaguguuccaa

SEQ ID NO: 1573929 - RNA, 19 nt, Artificial Sequence
  Description of Artificial Sequence: Synthetic oligonucleotide
  Sense strand starting at position 616 of SEQ ID NO: 1560068
ucaugagaaucccucgaac

SEQ ID NO: 1573930 - RNA, 19 nt, Artificial Sequence
  Description of Artificial Sequence: Synthetic oligonucleotide
  Antisense strand to SEQ ID NO: 1573929
guucgagggauucucauga

SEQ ID NO: 1573931 - RNA, 19 nt, Artificial Sequence
  Description of Artificial Sequence: Synthetic oligonucleotide
  Sense strand starting at position 1069 of SEQ ID NO: 1560068
cccagccuccuaggaaauu

SEQ ID NO: 1573932 - RNA, 19 nt, Artificial Sequence
  Description of Artificial Sequence: Synthetic oligonucleotide
  Antisense strand to SEQ ID NO: 1573931
aauuuccuaggaggcuggg

SEQ ID NO: 1573933 - RNA, 19 nt, Artificial Sequence
  Description of Artificial Sequence: Synthetic oligonucleotide
  Sense strand starting at position 1102 of SEQ ID NO: 1560068
aauugagagucacagggaa

SEQ ID NO: 1573934 - RNA, 19 nt, Artificial Sequence
  Description of Artificial Sequence: Synthetic oligonucleotide
  Antisense strand to SEQ ID NO: 1573933
uucccugugacucucaauu

SEQ ID NO: 1573935 - RNA, 19 nt, Artificial Sequence
  Description of Artificial Sequence: Synthetic oligonucleotide
  Sense strand starting at position 1117 of SEQ ID NO: 1560068
ggaaaccuggucugggaau

SEQ ID NO: 1573936 - RNA, 19 nt, Artificial Sequence
  Description of Artificial Sequence: Synthetic oligonucleotide
  Antisense strand to SEQ ID NO: 1573935
auucccagaccagguuucc

SEQ ID NO: 1573937 - RNA, 19 nt, Artificial Sequence
  Description of Artificial Sequence: Synthetic oligonucleotide
  Sense strand starting at position 1119 of SEQ ID NO: 1560068
aaaccuggucugggaauca

SEQ ID NO: 1573938 - RNA, 19 nt, Artificial Sequence
  Description of Artificial Sequence: Synthetic oligonucleotide
  Antisense strand to SEQ ID NO: 1573937
ugauucccagaccagguuu

SEQ ID NO: 1573939 - RNA, 19 nt, Artificial Sequence
  Description of Artificial Sequence: Synthetic oligonucleotide
  Sense strand starting at position 1350 of SEQ ID NO: 1560068
acuggauucuaauaugcua

SEQ ID NO: 1573940 - RNA, 19 nt, Artificial Sequence
  Description of Artificial Sequence: Synthetic oligonucleotide
  Antisense strand to SEQ ID NO: 1573939
uagcauauuagaauccagu

SEQ ID NO: 1573941 - RNA, 19 nt, Artificial Sequence
  Description of Artificial Sequence: Synthetic oligonucleotide
  Sense strand starting at position 1391 of SEQ ID NO: 1560068
ggcuccuagcgcuuguaau

SEQ ID NO: 1573942 - RNA, 19 nt, Artificial Sequence
  Description of Artificial Sequence: Synthetic oligonucleotide
  Antisense strand to SEQ ID NO: 1573941
auuacaagcgcuaggagcc

SEQ ID NO: 1573943 - RNA, 19 nt, Artificial Sequence
  Description of Artificial Sequence: Synthetic oligonucleotide
  Sense strand starting at position 1506 of SEQ ID NO: 1560068
caaguagcucuggaaauca

SEQ ID NO: 1573944 - RNA, 19 nt, Artificial Sequence
  Description of Artificial Sequence: Synthetic oligonucleotide
  Antisense strand to SEQ ID NO: 1573943
ugauuuccagagcuacuug

SEQ ID NO: 1573945 - RNA, 19 nt, Artificial Sequence
  Description of Artificial Sequence: Synthetic oligonucleotide
  Sense strand starting at position 1847 of SEQ ID NO: 1560068
gcgggaaccugagcucuuu

SEQ ID NO: 1573946 - RNA, 19 nt, Artificial Sequence
  Description of Artificial Sequence: Synthetic oligonucleotide
  Antisense strand to SEQ ID NO: 1573945
aaagagcucagguucccgc

SEQ ID NO: 1573947 - RNA, 19 nt, Artificial Sequence
  Description of Artificial Sequence: Synthetic oligonucleotide
  Sense strand starting at position 1853 of SEQ ID NO: 1560068
accugagcucuuuaagcuu

SEQ ID NO: 1573948 - RNA, 19 nt, Artificial Sequence
  Description of Artificial Sequence: Synthetic oligonucleotide
  Antisense strand to SEQ ID NO: 1573947
aagcuuaaagagcucaggu

SEQ ID NO: 1573949 - RNA, 19 nt, Artificial Sequence
  Description of Artificial Sequence: Synthetic oligonucleotide
  Sense strand starting at position 2153 of SEQ ID NO: 1560068
uuuaucucucgagguggau

SEQ ID NO: 1573950 - RNA, 19 nt, Artificial Sequence
  Description of Artificial Sequence: Synthetic oligonucleotide
  Antisense strand to SEQ ID NO: 1573949
auccaccucgagagauaaa

SEQ ID NO: 1573951 - RNA, 19 nt, Artificial Sequence
  Description of Artificial Sequence: Synthetic oligonucleotide
  Sense strand starting at position 2162 of SEQ ID NO: 1560068
cgagguggauuccuagagu

SEQ ID NO: 1573952 - RNA, 19 nt, Artificial Sequence
  Description of Artificial Sequence: Synthetic oligonucleotide
  Antisense strand to SEQ ID NO: 1573951
acucuaggaauccaccucg

SEQ ID NO: 1573953 - RNA, 19 nt, Artificial Sequence
  Description of Artificial Sequence: Synthetic oligonucleotide
  Sense strand starting at position 2166 of SEQ ID NO: 1560068
guggauuccuagaguggag

SEQ ID NO: 1573954 - RNA, 19 nt, Artificial Sequence
  Description of Artificial Sequence: Synthetic oligonucleotide
  Antisense strand to SEQ ID NO: 1573953
cuccacucuaggaauccac

SEQ ID NO: 1573955 - RNA, 19 nt, Artificial Sequence
  Description of Artificial Sequence: Synthetic oligonucleotide
  Sense strand starting at position 2424 of SEQ ID NO: 1560068
caacucuaaugaguugaga

SEQ ID NO: 1573956 - RNA, 19 nt, Artificial Sequence
  Description of Artificial Sequence: Synthetic oligonucleotide
  Antisense strand to SEQ ID NO: 1573955
ucucaacucauuagaguug

SEQ ID NO: 1573957 - RNA, 19 nt, Artificial Sequence
  Description of Artificial Sequence: Synthetic oligonucleotide
  Sense strand starting at position 2437 of SEQ ID NO: 1560068
uugagaaacugccuuagaa

SEQ ID NO: 1573958 - RNA, 19 nt, Artificial Sequence
  Description of Artificial Sequence: Synthetic oligonucleotide
  Antisense strand to SEQ ID NO: 1573957
uucuaaggcaguuucucaa

SEQ ID NO: 1573959 - RNA, 19 nt, Artificial Sequence
  Description of Artificial Sequence: Synthetic oligonucleotide
  Sense strand starting at position 2462 of SEQ ID NO: 1560068
agggacuacuuagaacuua

SEQ ID NO: 1573960 - RNA, 19 nt, Artificial Sequence
  Description of Artificial Sequence: Synthetic oligonucleotide
  Antisense strand to SEQ ID NO: 1573959
uaaguucuaaguagucccu

SEQ ID NO: 1573961 - RNA, 19 nt, Artificial Sequence
  Description of Artificial Sequence: Synthetic oligonucleotide
  Sense strand starting at position 2483 of SEQ ID NO: 1560068
agggacuuuggauguagua

SEQ ID NO: 1573962 - RNA, 19 nt, Artificial Sequence
  Description of Artificial Sequence: Synthetic oligonucleotide
  Antisense strand to SEQ ID NO: 1573961
uacuacauccaaagucccu

SEQ ID NO: 1573963 - RNA, 19 nt, Artificial Sequence
  Description of Artificial Sequence: Synthetic oligonucleotide
  Sense strand starting at position 2485 of SEQ ID NO: 1560068
ggacuuuggauguaguaac

SEQ ID NO: 1573964 - RNA, 19 nt, Artificial Sequence
  Description of Artificial Sequence: Synthetic oligonucleotide
  Antisense strand to SEQ ID NO: 1573963
guuacuacauccaaagucc

SEQ ID NO: 1573965 - RNA, 19 nt, Artificial Sequence
  Description of Artificial Sequence: Synthetic oligonucleotide
  Sense strand starting at position 2507 of SEQ ID NO: 1560068
ggcgacuacuacuaacaau

SEQ ID NO: 1573966 - RNA, 19 nt, Artificial Sequence
  Description of Artificial Sequence: Synthetic oligonucleotide
  Antisense strand to SEQ ID NO: 1573965
auuguuaguaguagucgcc

SEQ ID NO: 1573967 - RNA, 19 nt, Artificial Sequence
  Description of Artificial Sequence: Synthetic oligonucleotide
  Sense strand starting at position 2680 of SEQ ID NO: 1560068
uuggguguugucugaggca

SEQ ID NO: 1573968 - RNA, 19 nt, Artificial Sequence
  Description of Artificial Sequence: Synthetic oligonucleotide
  Antisense strand to SEQ ID NO: 1573967
ugccucagacaacacccaa

SEQ ID NO: 1573969 - RNA, 19 nt, Artificial Sequence
  Description of Artificial Sequence: Synthetic oligonucleotide
  Sense strand starting at position 2685 of SEQ ID NO: 1560068
uguugucugaggcaugaga

SEQ ID NO: 1573970 - RNA, 19 nt, Artificial Sequence
  Description of Artificial Sequence: Synthetic oligonucleotide
  Antisense strand to SEQ ID NO: 1573969
ucucaugccucagacaaca

SEQ ID NO: 1573971 - RNA, 19 nt, Artificial Sequence
  Description of Artificial Sequence: Synthetic oligonucleotide
  Sense strand starting at position 2687 of SEQ ID NO: 1560068
uugucugaggcaugagaau

SEQ ID NO: 1573972 - RNA, 19 nt, Artificial Sequence
  Description of Artificial Sequence: Synthetic oligonucleotide
  Antisense strand to SEQ ID NO: 1573971
auucucaugccucagacaa

SEQ ID NO: 1573973 - RNA, 19 nt, Artificial Sequence
  Description of Artificial Sequence: Synthetic oligonucleotide
  Sense strand starting at position 2741 of SEQ ID NO: 1560068
uuaugauugcaccaguaca

SEQ ID NO: 1573974 - RNA, 19 nt, Artificial Sequence
  Description of Artificial Sequence: Synthetic oligonucleotide
  Antisense strand to SEQ ID NO: 1573973
uguacuggugcaaucauaa

SEQ ID NO: 1573975 - RNA, 19 nt, Artificial Sequence
  Description of Artificial Sequence: Synthetic oligonucleotide
  Sense strand starting at position 2896 of SEQ ID NO: 1560068
acacuacuaugguccaaga

SEQ ID NO: 1573976 - RNA, 19 nt, Artificial Sequence
  Description of Artificial Sequence: Synthetic oligonucleotide
  Antisense strand to SEQ ID NO: 1573975
ucuuggaccauaguagugu

SEQ ID NO: 1573977 - RNA, 19 nt, Artificial Sequence
  Description of Artificial Sequence: Synthetic oligonucleotide
  Sense strand starting at position 2929 of SEQ ID NO: 1560068
caauauuuguaguggauuc

SEQ ID NO: 1573978 - RNA, 19 nt, Artificial Sequence
  Description of Artificial Sequence: Synthetic oligonucleotide
  Antisense strand to SEQ ID NO: 1573977
gaauccacuacaaauauug

SEQ ID NO: 1573979 - RNA, 19 nt, Artificial Sequence
  Description of Artificial Sequence: Synthetic oligonucleotide
  Sense strand starting at position 2939 of SEQ ID NO: 1560068
aguggauucuuugcaguag

SEQ ID NO: 1573980 - RNA, 19 nt, Artificial Sequence
  Description of Artificial Sequence: Synthetic oligonucleotide
  Antisense strand to SEQ ID NO: 1573979
cuacugcaaagaauccacu

SEQ ID NO: 1573981 - RNA, 19 nt, Artificial Sequence
  Description of Artificial Sequence: Synthetic oligonucleotide
  Sense strand starting at position 2943 of SEQ ID NO: 1560068
gauucuuugcaguagacaa

SEQ ID NO: 1573982 - RNA, 19 nt, Artificial Sequence
  Description of Artificial Sequence: Synthetic oligonucleotide
  Antisense strand to SEQ ID NO: 1573981
uugucuacugcaaagaauc

SEQ ID NO: 1573983 - RNA, 19 nt, Artificial Sequence
  Description of Artificial Sequence: Synthetic oligonucleotide
  Sense strand starting at position 2963 of SEQ ID NO: 1560068
ggcugacagguuuauaguu

SEQ ID NO: 1573984 - RNA, 19 nt, Artificial Sequence
  Description of Artificial Sequence: Synthetic oligonucleotide
  Antisense strand to SEQ ID NO: 1573983
aacuauaaaccugucagcc

SEQ ID NO: 1573985 - RNA, 19 nt, Artificial Sequence
  Description of Artificial Sequence: Synthetic oligonucleotide
  Sense strand starting at position 2987 of SEQ ID NO: 1560068
uguacauuaugucaaauac

SEQ ID NO: 1573986 - RNA, 19 nt, Artificial Sequence
  Description of Artificial Sequence: Synthetic oligonucleotide
  Antisense strand to SEQ ID NO: 1573985
guauuugacauaauguaca

SEQ ID NO: 1573987 - RNA, 19 nt, Artificial Sequence
  Description of Artificial Sequence: Synthetic oligonucleotide
  Sense strand starting at position 2996 of SEQ ID NO: 1560068
ugucaaauacgcuaauuau

SEQ ID NO: 1573988 - RNA, 19 nt, Artificial Sequence
  Description of Artificial Sequence: Synthetic oligonucleotide
  Antisense strand to SEQ ID NO: 1573987
auaauuagcguauuugaca

SEQ ID NO: 1573989 - RNA, 19 nt, Artificial Sequence
  Description of Artificial Sequence: Synthetic oligonucleotide
  Sense strand starting at position 3016 of SEQ ID NO: 1560068
uuuaaagacucugagugaa

SEQ ID NO: 1573990 - RNA, 19 nt, Artificial Sequence
  Description of Artificial Sequence: Synthetic oligonucleotide
  Antisense strand to SEQ ID NO: 1573989
uucacucagagucuuuaaa

SEQ ID NO: 1573991 - RNA, 19 nt, Artificial Sequence
  Description of Artificial Sequence: Synthetic oligonucleotide
  Sense strand starting at position 3156 of SEQ ID NO: 1560068
ggaggacaguugaggaaau

SEQ ID NO: 1573992 - RNA, 19 nt, Artificial Sequence
  Description of Artificial Sequence: Synthetic oligonucleotide
  Antisense strand to SEQ ID NO: 1573991
auuuccucaacuguccucc

SEQ ID NO: 1573993 - RNA, 19 nt, Artificial Sequence
  Description of Artificial Sequence: Synthetic oligonucleotide
  Sense strand starting at position 3257 of SEQ ID NO: 1560068
cagaauugcuuggcuggga

SEQ ID NO: 1573994 - RNA, 19 nt, Artificial Sequence
  Description of Artificial Sequence: Synthetic oligonucleotide
  Antisense strand to SEQ ID NO: 1573993
ucccagccaagcaauucug

SEQ ID NO: 1573995 - RNA, 19 nt, Artificial Sequence
  Description of Artificial Sequence: Synthetic oligonucleotide
  Sense strand starting at position 3881 of SEQ ID NO: 1560068
cccaccuuccuggagcaau

SEQ ID NO: 1573996 - RNA, 19 nt, Artificial Sequence
  Description of Artificial Sequence: Synthetic oligonucleotide
  Antisense strand to SEQ ID NO: 1573995
auugcuccaggaagguggg

SEQ ID NO: 1573997 - RNA, 19 nt, Artificial Sequence
  Description of Artificial Sequence: Synthetic oligonucleotide
  Sense strand starting at position 3915 of SEQ ID NO: 1560068
cugugaggcagcuauaauu

SEQ ID NO: 1573998 - RNA, 19 nt, Artificial Sequence
  Description of Artificial Sequence: Synthetic oligonucleotide
  Antisense strand to SEQ ID NO: 1573997
aauuauagcugccucacag

SEQ ID NO: 1573999 - RNA, 19 nt, Artificial Sequence
  Description of Artificial Sequence: Synthetic oligonucleotide
  Sense strand starting at position 396 of SEQ ID NO: 1560069
aucucuugcuccgugagua

SEQ ID NO: 1574000 - RNA, 19 nt, Artificial Sequence
  Description of Artificial Sequence: Synthetic oligonucleotide
  Antisense strand to SEQ ID NO: 1573999
uacucacggagcaagagau

SEQ ID NO: 1574001 - RNA, 19 nt, Artificial Sequence
  Description of Artificial Sequence: Synthetic oligonucleotide
  Sense strand starting at position 406 of SEQ ID NO: 1560069
ccgugaguaucuuugucuc

SEQ ID NO: 1574002 - RNA, 19 nt, Artificial Sequence
  Description of Artificial Sequence: Synthetic oligonucleotide
  Antisense strand to SEQ ID NO: 1574001
gagacaaagauacucacgg

SEQ ID NO: 1574003 - RNA, 19 nt, Artificial Sequence
  Description of Artificial Sequence: Synthetic oligonucleotide
  Sense strand starting at position 482 of SEQ ID NO: 1560069
gguguauuuggcugccuca

SEQ ID NO: 1574004 - RNA, 19 nt, Artificial Sequence
  Description of Artificial Sequence: Synthetic oligonucleotide
  Antisense strand to SEQ ID NO: 1574003
ugaggcagccaaauacacc

SEQ ID NO: 1574005 - RNA, 19 nt, Artificial Sequence
  Description of Artificial Sequence: Synthetic oligonucleotide
  Sense strand starting at position 1111 of SEQ ID NO: 1560069
uggagccugucaucuugau

SEQ ID NO: 1574006 - RNA, 19 nt, Artificial Sequence
  Description of Artificial Sequence: Synthetic oligonucleotide
  Antisense strand to SEQ ID NO: 1574005
aucaagaugacaggcucca

SEQ ID NO: 1574007 - RNA, 19 nt, Artificial Sequence
  Description of Artificial Sequence: Synthetic oligonucleotide
  Sense strand starting at position 1159 of SEQ ID NO: 1560069
agaugugacccuuagguac

SEQ ID NO: 1574008 - RNA, 19 nt, Artificial Sequence
  Description of Artificial Sequence: Synthetic oligonucleotide
  Antisense strand to SEQ ID NO: 1574007
guaccuaagggucacaucu

SEQ ID NO: 1574009 - RNA, 19 nt, Artificial Sequence
  Description of Artificial Sequence: Synthetic oligonucleotide
  Sense strand starting at position 1179 of SEQ ID NO: 1560069
guuggaaucucuccuccca

SEQ ID NO: 1574010 - RNA, 19 nt, Artificial Sequence
  Description of Artificial Sequence: Synthetic oligonucleotide
  Antisense strand to SEQ ID NO: 1574009
ugggaggagagauuccaac

SEQ ID NO: 1574011 - RNA, 19 nt, Artificial Sequence
  Description of Artificial Sequence: Synthetic oligonucleotide
  Sense strand starting at position 1238 of SEQ ID NO: 1560069
ccucaaauguguucucaaa

SEQ ID NO: 1574012 - RNA, 19 nt, Artificial Sequence
  Description of Artificial Sequence: Synthetic oligonucleotide
  Antisense strand to SEQ ID NO: 1574011
uuugagaacacauuugagg

SEQ ID NO: 1574013 - RNA, 19 nt, Artificial Sequence
  Description of Artificial Sequence: Synthetic oligonucleotide
  Sense strand starting at position 1240 of SEQ ID NO: 1560069
ucaaauguguucucaaauu

SEQ ID NO: 1574014 - RNA, 19 nt, Artificial Sequence
  Description of Artificial Sequence: Synthetic oligonucleotide
  Antisense strand to SEQ ID NO: 1574013
aauuugagaacacauuuga

SEQ ID NO: 1574015 - RNA, 19 nt, Artificial Sequence
  Description of Artificial Sequence: Synthetic oligonucleotide
  Sense strand starting at position 1285 of SEQ ID NO: 1560069
cugugucucucacccaaga

SEQ ID NO: 1574016 - RNA, 19 nt, Artificial Sequence
  Description of Artificial Sequence: Synthetic oligonucleotide
  Antisense strand to SEQ ID NO: 1574015
ucuugggugagagacacag

SEQ ID NO: 1574017 - RNA, 19 nt, Artificial Sequence
  Description of Artificial Sequence: Synthetic oligonucleotide
  Sense strand starting at position 1287 of SEQ ID NO: 1560069
gugucucucacccaagagu

SEQ ID NO: 1574018 - RNA, 19 nt, Artificial Sequence
  Description of Artificial Sequence: Synthetic oligonucleotide
  Antisense strand to SEQ ID NO: 1574017
acucuugggugagagacac

SEQ ID NO: 1574019 - RNA, 19 nt, Artificial Sequence
  Description of Artificial Sequence: Synthetic oligonucleotide
  Sense strand starting at position 1504 of SEQ ID NO: 1560069
cgauuaugacccuauggcu

SEQ ID NO: 1574020 - RNA, 19 nt, Artificial Sequence
  Description of Artificial Sequence: Synthetic oligonucleotide
  Antisense strand to SEQ ID NO: 1574019
agccauagggucauaaucg

SEQ ID NO: 1574021 - RNA, 19 nt, Artificial Sequence
  Description of Artificial Sequence: Synthetic oligonucleotide
  Sense strand starting at position 1560 of SEQ ID NO: 1560069
cucucaucuccagauguac

SEQ ID NO: 1574022 - RNA, 19 nt, Artificial Sequence
  Description of Artificial Sequence: Synthetic oligonucleotide
  Antisense strand to SEQ ID NO: 1574021
guacaucuggagaugagag

SEQ ID NO: 1574023 - RNA, 19 nt, Artificial Sequence
  Description of Artificial Sequence: Synthetic oligonucleotide
  Sense strand starting at position 1628 of SEQ ID NO: 1560069
guggcuaguucuccucgga

SEQ ID NO: 1574024 - RNA, 19 nt, Artificial Sequence
  Description of Artificial Sequence: Synthetic oligonucleotide
  Antisense strand to SEQ ID NO: 1574023
uccgaggagaacuagccac

SEQ ID NO: 1574025 - RNA, 19 nt, Artificial Sequence
  Description of Artificial Sequence: Synthetic oligonucleotide
  Sense strand starting at position 1631 of SEQ ID NO: 1560069
gcuaguucuccucggaagu

SEQ ID NO: 1574026 - RNA, 19 nt, Artificial Sequence
  Description of Artificial Sequence: Synthetic oligonucleotide
  Antisense strand to SEQ ID NO: 1574025
acuuccgaggagaacuagc

SEQ ID NO: 1574027 - RNA, 19 nt, Artificial Sequence
  Description of Artificial Sequence: Synthetic oligonucleotide
  Sense strand starting at position 1632 of SEQ ID NO: 1560069
cuaguucuccucggaagug

SEQ ID NO: 1574028 - RNA, 19 nt, Artificial Sequence
  Description of Artificial Sequence: Synthetic oligonucleotide
  Antisense strand to SEQ ID NO: 1574027
cacuuccgaggagaacuag

SEQ ID NO: 1574029 - RNA, 19 nt, Artificial Sequence
  Description of Artificial Sequence: Synthetic oligonucleotide
  Sense strand starting at position 1642 of SEQ ID NO: 1560069
ucggaagugucaccaguau

SEQ ID NO: 1574030 - RNA, 19 nt, Artificial Sequence
  Description of Artificial Sequence: Synthetic oligonucleotide
  Antisense strand to SEQ ID NO: 1574029
auacuggugacacuuccga

SEQ ID NO: 1574031 - RNA, 19 nt, Artificial Sequence
  Description of Artificial Sequence: Synthetic oligonucleotide
  Sense strand starting at position 1741 of SEQ ID NO: 1560069
cgcaauaugcaucuucguu

SEQ ID NO: 1574032 - RNA, 19 nt, Artificial Sequence
  Description of Artificial Sequence: Synthetic oligonucleotide
  Antisense strand to SEQ ID NO: 1574031
aacgaagaugcauauugcg

SEQ ID NO: 1574033 - RNA, 19 nt, Artificial Sequence
  Description of Artificial Sequence: Synthetic oligonucleotide
  Sense strand starting at position 1746 of SEQ ID NO: 1560069
uaugcaucuucguucuaga

SEQ ID NO: 1574034 - RNA, 19 nt, Artificial Sequence
  Description of Artificial Sequence: Synthetic oligonucleotide
  Antisense strand to SEQ ID NO: 1574033
ucuagaacgaagaugcaua

SEQ ID NO: 1574035 - RNA, 19 nt, Artificial Sequence
  Description of Artificial Sequence: Synthetic oligonucleotide
  Sense strand starting at position 2689 of SEQ ID NO: 1560069
uuggacagguccucugaga

SEQ ID NO: 1574036 - RNA, 19 nt, Artificial Sequence
  Description of Artificial Sequence: Synthetic oligonucleotide
  Antisense strand to SEQ ID NO: 1574035
ucucagaggaccuguccaa

SEQ ID NO: 1574037 - RNA, 19 nt, Artificial Sequence
  Description of Artificial Sequence: Synthetic oligonucleotide
  Sense strand starting at position 2722 of SEQ ID NO: 1560069
gcgaguucaccuggaaagg

SEQ ID NO: 1574038 - RNA, 19 nt, Artificial Sequence
  Description of Artificial Sequence: Synthetic oligonucleotide
  Antisense strand to SEQ ID NO: 1574037
ccuuuccaggugaacucgc

SEQ ID NO: 1574039 - RNA, 19 nt, Artificial Sequence
  Description of Artificial Sequence: Synthetic oligonucleotide
  Sense strand starting at position 3077 of SEQ ID NO: 1560069
agggagaggucagugguaa

SEQ ID NO: 1574040 - RNA, 19 nt, Artificial Sequence
  Description of Artificial Sequence: Synthetic oligonucleotide
  Antisense strand to SEQ ID NO: 1574039
uuaccacugaccucucccu

SEQ ID NO: 1574041 - RNA, 19 nt, Artificial Sequence
  Description of Artificial Sequence: Synthetic oligonucleotide
  Sense strand starting at position 3078 of SEQ ID NO: 1560069
gggagaggucagugguaag

SEQ ID NO: 1574042 - RNA, 19 nt, Artificial Sequence
  Description of Artificial Sequence: Synthetic oligonucleotide
  Antisense strand to SEQ ID NO: 1574041
cuuaccacugaccucuccc

SEQ ID NO: 1574043 - RNA, 19 nt, Artificial Sequence
  Description of Artificial Sequence: Synthetic oligonucleotide
  Sense strand starting at position 3089 of SEQ ID NO: 1560069
gugguaagguccaggucua

SEQ ID NO: 1574044 - RNA, 19 nt, Artificial Sequence
  Description of Artificial Sequence: Synthetic oligonucleotide
  Antisense strand to SEQ ID NO: 1574043
uagaccuggaccuuaccac

SEQ ID NO: 1574045 - RNA, 19 nt, Artificial Sequence
  Description of Artificial Sequence: Synthetic oligonucleotide
  Sense strand starting at position 3147 of SEQ ID NO: 1560069
ggagacgucuggccuaaug

SEQ ID NO: 1574046 - RNA, 19 nt, Artificial Sequence
  Description of Artificial Sequence: Synthetic oligonucleotide
  Antisense strand to SEQ ID NO: 1574045
cauuaggccagacgucucc

SEQ ID NO: 1574047 - RNA, 19 nt, Artificial Sequence
  Description of Artificial Sequence: Synthetic oligonucleotide
  Sense strand starting at position 3149 of SEQ ID NO: 1560069
agacgucuggccuaaugua

SEQ ID NO: 1574048 - RNA, 19 nt, Artificial Sequence
  Description of Artificial Sequence: Synthetic oligonucleotide
  Antisense strand to SEQ ID NO: 1574047
uacauuaggccagacgucu

SEQ ID NO: 1574049 - RNA, 19 nt, Artificial Sequence
  Description of Artificial Sequence: Synthetic oligonucleotide
  Sense strand starting at position 3156 of SEQ ID NO: 1560069
uggccuaauguaugcuuga

SEQ ID NO: 1574050 - RNA, 19 nt, Artificial Sequence
  Description of Artificial Sequence: Synthetic oligonucleotide
  Antisense strand to SEQ ID NO: 1574049
ucaagcauacauuaggcca

SEQ ID NO: 1574051 - RNA, 19 nt, Artificial Sequence
  Description of Artificial Sequence: Synthetic oligonucleotide
  Sense strand starting at position 3157 of SEQ ID NO: 1560069
ggccuaauguaugcuugau

SEQ ID NO: 1574052 - RNA, 19 nt, Artificial Sequence
  Description of Artificial Sequence: Synthetic oligonucleotide
  Antisense strand to SEQ ID NO: 1574051
aucaagcauacauuaggcc

SEQ ID NO: 1574053 - RNA, 19 nt, Artificial Sequence
  Description of Artificial Sequence: Synthetic oligonucleotide
  Sense strand starting at position 3159 of SEQ ID NO: 1560069
ccuaauguaugcuugauaa

SEQ ID NO: 1574054 - RNA, 19 nt, Artificial Sequence
  Description of Artificial Sequence: Synthetic oligonucleotide
  Antisense strand to SEQ ID NO: 1574053
uuaucaagcauacauuagg

SEQ ID NO: 1574055 - RNA, 19 nt, Artificial Sequence
  Description of Artificial Sequence: Synthetic oligonucleotide
  Sense strand starting at position 3161 of SEQ ID NO: 1560069
uaauguaugcuugauaaag

SEQ ID NO: 1574056 - RNA, 19 nt, Artificial Sequence
  Description of Artificial Sequence: Synthetic oligonucleotide
  Antisense strand to SEQ ID NO: 1574055
cuuuaucaagcauacauua

SEQ ID NO: 1574057 - RNA, 19 nt, Artificial Sequence
  Description of Artificial Sequence: Synthetic oligonucleotide
  Sense strand starting at position 3303 of SEQ ID NO: 1560069
ccaggaaauugacaucaau

SEQ ID NO: 1574058 - RNA, 19 nt, Artificial Sequence
  Description of Artificial Sequence: Synthetic oligonucleotide
  Antisense strand to SEQ ID NO: 1574057
auugaugucaauuuccugg

SEQ ID NO: 1574059 - RNA, 19 nt, Artificial Sequence
  Description of Artificial Sequence: Synthetic oligonucleotide
  Sense strand starting at position 3381 of SEQ ID NO: 1560069
gugugauugugcaucugug

SEQ ID NO: 1574060 - RNA, 19 nt, Artificial Sequence
  Description of Artificial Sequence: Synthetic oligonucleotide
  Antisense strand to SEQ ID NO: 1574059
cacagaugcacaaucacac

SEQ ID NO: 1574061 - RNA, 19 nt, Artificial Sequence
  Description of Artificial Sequence: Synthetic oligonucleotide
  Sense strand starting at position 3382 of SEQ ID NO: 1560069
ugugauugugcaucugugu

SEQ ID NO: 1574062 - RNA, 19 nt, Artificial Sequence
  Description of Artificial Sequence: Synthetic oligonucleotide
  Antisense strand to SEQ ID NO: 1574061
acacagaugcacaaucaca

SEQ ID NO: 1574063 - RNA, 19 nt, Artificial Sequence
  Description of Artificial Sequence: Synthetic oligonucleotide
  Sense strand starting at position 3407 of SEQ ID NO: 1560069
gcagcuugauuccuuguau

SEQ ID NO: 1574064 - RNA, 19 nt, Artificial Sequence
  Description of Artificial Sequence: Synthetic oligonucleotide
  Antisense strand to SEQ ID NO: 1574063
auacaaggaaucaagcugc

SEQ ID NO: 1574065 - RNA, 19 nt, Artificial Sequence
  Description of Artificial Sequence: Synthetic oligonucleotide
  Sense strand starting at position 3534 of SEQ ID NO: 1560069
uugucauucggagauuguu

SEQ ID NO: 1574066 - RNA, 19 nt, Artificial Sequence
  Description of Artificial Sequence: Synthetic oligonucleotide
  Antisense strand to SEQ ID NO: 1574065
aacaaucuccgaaugacaa

SEQ ID NO: 1574067 - RNA, 19 nt, Artificial Sequence
  Description of Artificial Sequence: Synthetic oligonucleotide
  Sense strand starting at position 3543 of SEQ ID NO: 1560069
ggagauuguuauguaaaug

SEQ ID NO: 1574068 - RNA, 19 nt, Artificial Sequence
  Description of Artificial Sequence: Synthetic oligonucleotide
  Antisense strand to SEQ ID NO: 1574067
cauuuacauaacaaucucc

SEQ ID NO: 1574069 - RNA, 19 nt, Artificial Sequence
  Description of Artificial Sequence: Synthetic oligonucleotide
  Sense strand starting at position 3633 of SEQ ID NO: 1560069
gcuuguaucagugcuucgu

SEQ ID NO: 1574070 - RNA, 19 nt, Artificial Sequence
  Description of Artificial Sequence: Synthetic oligonucleotide
  Antisense strand to SEQ ID NO: 1574069
acgaagcacugauacaagc

SEQ ID NO: 1574071 - RNA, 19 nt, Artificial Sequence
  Description of Artificial Sequence: Synthetic oligonucleotide
  Sense strand starting at position 3634 of SEQ ID NO: 1560069
cuuguaucagugcuucguu

SEQ ID NO: 1574072 - RNA, 19 nt, Artificial Sequence
  Description of Artificial Sequence: Synthetic oligonucleotide
  Antisense strand to SEQ ID NO: 1574071
aacgaagcacugauacaag

SEQ ID NO: 1574073 - RNA, 19 nt, Artificial Sequence
  Description of Artificial Sequence: Synthetic oligonucleotide
  Sense strand starting at position 3657 of SEQ ID NO: 1560069
uuuauuacugaguacuguu

SEQ ID NO: 1574074 - RNA, 19 nt, Artificial Sequence
  Description of Artificial Sequence: Synthetic oligonucleotide
  Antisense strand to SEQ ID NO: 1574073
aacaguacucaguaauaaa

SEQ ID NO: 1574075 - RNA, 19 nt, Artificial Sequence
  Description of Artificial Sequence: Synthetic oligonucleotide
  Sense strand starting at position 3720 of SEQ ID NO: 1560069
guaaccgcuuuauugagau

SEQ ID NO: 1574076 - RNA, 19 nt, Artificial Sequence
  Description of Artificial Sequence: Synthetic oligonucleotide
  Antisense strand to SEQ ID NO: 1574075
aucucaauaaagcgguuac

SEQ ID NO: 1574077 - RNA, 19 nt, Artificial Sequence
  Description of Artificial Sequence: Synthetic oligonucleotide
  Sense strand starting at position 3838 of SEQ ID NO: 1560069
guguauuuaaagugcccau

SEQ ID NO: 1574078 - RNA, 19 nt, Artificial Sequence
  Description of Artificial Sequence: Synthetic oligonucleotide
  Antisense strand to SEQ ID NO: 1574077
augggcacuuuaaauacac

SEQ ID NO: 1574079 - RNA, 19 nt, Artificial Sequence
  Description of Artificial Sequence: Synthetic oligonucleotide
  Sense strand starting at position 408 of SEQ ID NO: 1560070
ggugucucccuccaagcaa

SEQ ID NO: 1574080 - RNA, 19 nt, Artificial Sequence
  Description of Artificial Sequence: Synthetic oligonucleotide
  Antisense strand to SEQ ID NO: 1574079
uugcuuggagggagacacc

SEQ ID NO: 1574081 - RNA, 19 nt, Artificial Sequence
  Description of Artificial Sequence: Synthetic oligonucleotide
  Sense strand starting at position 443 of SEQ ID NO: 1560070
accugcauuccaggaguca

SEQ ID NO: 1574082 - RNA, 19 nt, Artificial Sequence
  Description of Artificial Sequence: Synthetic oligonucleotide
  Antisense strand to SEQ ID NO: 1574081
ugacuccuggaaugcaggu

SEQ ID NO: 1574083 - RNA, 19 nt, Artificial Sequence
  Description of Artificial Sequence: Synthetic oligonucleotide
  Sense strand starting at position 581 of SEQ ID NO: 1560070
gaaucaggucagcaucaau

SEQ ID NO: 1574084 - RNA, 19 nt, Artificial Sequence
  Description of Artificial Sequence: Synthetic oligonucleotide
  Antisense strand to SEQ ID NO: 1574083
auugaugcugaccugauuc

SEQ ID NO: 1574085 - RNA, 19 nt, Artificial Sequence
  Description of Artificial Sequence: Synthetic oligonucleotide
  Sense strand starting at position 699 of SEQ ID NO: 1560070
aggccugucugcugacaca

SEQ ID NO: 1574086 - RNA, 19 nt, Artificial Sequence
  Description of Artificial Sequence: Synthetic oligonucleotide
  Antisense strand to SEQ ID NO: 1574085
ugugucagcagacaggccu

SEQ ID NO: 1574087 - RNA, 19 nt, Artificial Sequence
  Description of Artificial Sequence: Synthetic oligonucleotide
  Sense strand starting at position 1095 of SEQ ID NO: 1560070
gagagugggucacucaaag

SEQ ID NO: 1574088 - RNA, 19 nt, Artificial Sequence
  Description of Artificial Sequence: Synthetic oligonucleotide
  Antisense strand to SEQ ID NO: 1574087
cuuugagugacccacucuc

SEQ ID NO: 1574089 - RNA, 19 nt, Artificial Sequence
  Description of Artificial Sequence: Synthetic oligonucleotide
  Sense strand starting at position 1139 of SEQ ID NO: 1560070
gacguaagaucuugaccuu

SEQ ID NO: 1574090 - RNA, 19 nt, Artificial Sequence
  Description of Artificial Sequence: Synthetic oligonucleotide
  Antisense strand to SEQ ID NO: 1574089
aaggucaagaucuuacguc

SEQ ID NO: 1574091 - RNA, 19 nt, Artificial Sequence
  Description of Artificial Sequence: Synthetic oligonucleotide
  Sense strand starting at position 1142 of SEQ ID NO: 1560070
guaagaucuugaccuucua

SEQ ID NO: 1574092 - RNA, 19 nt, Artificial Sequence
  Description of Artificial Sequence: Synthetic oligonucleotide
  Antisense strand to SEQ ID NO: 1574091
uagaaggucaagaucuuac

SEQ ID NO: 1574093 - RNA, 19 nt, Artificial Sequence
  Description of Artificial Sequence: Synthetic oligonucleotide
  Sense strand starting at position 1665 of SEQ ID NO: 1560070
uguagucuuucuugcccga

SEQ ID NO: 1574094 - RNA, 19 nt, Artificial Sequence
  Description of Artificial Sequence: Synthetic oligonucleotide
  Antisense strand to SEQ ID NO: 1574093
ucgggcaagaaagacuaca

SEQ ID NO: 1574095 - RNA, 19 nt, Artificial Sequence
  Description of Artificial Sequence: Synthetic oligonucleotide
  Sense strand starting at position 1707 of SEQ ID NO: 1560070
gugucuugcggcucugaga

SEQ ID NO: 1574096 - RNA, 19 nt, Artificial Sequence
  Description of Artificial Sequence: Synthetic oligonucleotide
  Antisense strand to SEQ ID NO: 1574095
ucucagagccgcaagacac

SEQ ID NO: 1574097 - RNA, 19 nt, Artificial Sequence
  Description of Artificial Sequence: Synthetic oligonucleotide
  Sense strand starting at position 1763 of SEQ ID NO: 1560070
cugggaaauggacgcuuua

SEQ ID NO: 1574098 - RNA, 19 nt, Artificial Sequence
  Description of Artificial Sequence: Synthetic oligonucleotide
  Antisense strand to SEQ ID NO: 1574097
uaaagcguccauuucccag

SEQ ID NO: 1574099 - RNA, 19 nt, Artificial Sequence
  Description of Artificial Sequence: Synthetic oligonucleotide
  Sense strand starting at position 1797 of SEQ ID NO: 1560070
caaggcugucugggaaaug

SEQ ID NO: 1574100 - RNA, 19 nt, Artificial Sequence
  Description of Artificial Sequence: Synthetic oligonucleotide
  Antisense strand to SEQ ID NO: 1574099
cauuucccagacagccuug

SEQ ID NO: 1574101 - RNA, 19 nt, Artificial Sequence
  Description of Artificial Sequence: Synthetic oligonucleotide
  Sense strand starting at position 1798 of SEQ ID NO: 1560070
aaggcugucugggaaaugu

SEQ ID NO: 1574102 - RNA, 19 nt, Artificial Sequence
  Description of Artificial Sequence: Synthetic oligonucleotide
  Antisense strand to SEQ ID NO: 1574101
acauuucccagacagccuu

SEQ ID NO: 1574103 - RNA, 19 nt, Artificial Sequence
  Description of Artificial Sequence: Synthetic oligonucleotide
  Sense strand starting at position 1845 of SEQ ID NO: 1560070
cgcggagccuccugggaaa

SEQ ID NO: 1574104 - RNA, 19 nt, Artificial Sequence
  Description of Artificial Sequence: Synthetic oligonucleotide
  Antisense strand to SEQ ID NO: 1574103
uuucccaggaggcuccgcg

SEQ ID NO: 1574105 - RNA, 19 nt, Artificial Sequence
  Description of Artificial Sequence: Synthetic oligonucleotide
  Sense strand starting at position 1848 of SEQ ID NO: 1560070
ggagccuccugggaaaugu

SEQ ID NO: 1574106 - RNA, 19 nt, Artificial Sequence
  Description of Artificial Sequence: Synthetic oligonucleotide
  Antisense strand to SEQ ID NO: 1574105
acauuucccaggaggcucc

SEQ ID NO: 1574107 - RNA, 19 nt, Artificial Sequence
  Description of Artificial Sequence: Synthetic oligonucleotide
  Sense strand starting at position 2790 of SEQ ID NO: 1560070
ccauuuauguguucccauu

SEQ ID NO: 1574108 - RNA, 19 nt, Artificial Sequence
  Description of Artificial Sequence: Synthetic oligonucleotide
  Antisense strand to SEQ ID NO: 1574107
aaugggaacacauaaaugg

SEQ ID NO: 1574109 - RNA, 19 nt, Artificial Sequence
  Description of Artificial Sequence: Synthetic oligonucleotide
  Sense strand starting at position 2939 of SEQ ID NO: 1560070
acaugcaucuguccaucua

SEQ ID NO: 1574110 - RNA, 19 nt, Artificial Sequence
  Description of Artificial Sequence: Synthetic oligonucleotide
  Antisense strand to SEQ ID NO: 1574109
uagauggacagaugcaugu

SEQ ID NO: 1574111 - RNA, 19 nt, Artificial Sequence
  Description of Artificial Sequence: Synthetic oligonucleotide
  Sense strand starting at position 3103 of SEQ ID NO: 1560070
gguggaagcucguuucuug

SEQ ID NO: 1574112 - RNA, 19 nt, Artificial Sequence
  Description of Artificial Sequence: Synthetic oligonucleotide
  Antisense strand to SEQ ID NO: 1574111
caagaaacgagcuuccacc

SEQ ID NO: 1574113 - RNA, 19 nt, Artificial Sequence
  Description of Artificial Sequence: Synthetic oligonucleotide
  Sense strand starting at position 3133 of SEQ ID NO: 1560070
ccuggugugucugggaaag

SEQ ID NO: 1574114 - RNA, 19 nt, Artificial Sequence
  Description of Artificial Sequence: Synthetic oligonucleotide
  Antisense strand to SEQ ID NO: 1574113
cuuucccagacacaccagg

SEQ ID NO: 1574115 - RNA, 19 nt, Artificial Sequence
  Description of Artificial Sequence: Synthetic oligonucleotide
  Sense strand starting at position 3135 of SEQ ID NO: 1560070
uggugugucugggaaaggu

SEQ ID NO: 1574116 - RNA, 19 nt, Artificial Sequence
  Description of Artificial Sequence: Synthetic oligonucleotide
  Antisense strand to SEQ ID NO: 1574115
accuuucccagacacacca

SEQ ID NO: 1574117 - RNA, 19 nt, Artificial Sequence
  Description of Artificial Sequence: Synthetic oligonucleotide
  Sense strand starting at position 3150 of SEQ ID NO: 1560070
aggugaggaguucauuauu

SEQ ID NO: 1574118 - RNA, 19 nt, Artificial Sequence
  Description of Artificial Sequence: Synthetic oligonucleotide
  Antisense strand to SEQ ID NO: 1574117
aauaaugaacuccucaccu

SEQ ID NO: 1574119 - RNA, 19 nt, Artificial Sequence
  Description of Artificial Sequence: Synthetic oligonucleotide
  Sense strand starting at position 3264 of SEQ ID NO: 1560070
gagccugguuuccaucagu

SEQ ID NO: 1574120 - RNA, 19 nt, Artificial Sequence
  Description of Artificial Sequence: Synthetic oligonucleotide
  Antisense strand to SEQ ID NO: 1574119
acugauggaaaccaggcuc

SEQ ID NO: 1574121 - RNA, 19 nt, Artificial Sequence
  Description of Artificial Sequence: Synthetic oligonucleotide
  Sense strand starting at position 3562 of SEQ ID NO: 1560070
gagaacugauaagaucuga

SEQ ID NO: 1574122 - RNA, 19 nt, Artificial Sequence
  Description of Artificial Sequence: Synthetic oligonucleotide
  Antisense strand to SEQ ID NO: 1574121
ucagaucuuaucaguucuc

SEQ ID NO: 1574123 - RNA, 19 nt, Artificial Sequence
  Description of Artificial Sequence: Synthetic oligonucleotide
  Sense strand starting at position 3663 of SEQ ID NO: 1560070
gggcuauuucugugauggu

SEQ ID NO: 1574124 - RNA, 19 nt, Artificial Sequence
  Description of Artificial Sequence: Synthetic oligonucleotide
  Antisense strand to SEQ ID NO: 1574123
accaucacagaaauagccc

SEQ ID NO: 1574125 - RNA, 19 nt, Artificial Sequence
  Description of Artificial Sequence: Synthetic oligonucleotide
  Sense strand starting at position 3664 of SEQ ID NO: 1560070
ggcuauuucugugauggug

SEQ ID NO: 1574126 - RNA, 19 nt, Artificial Sequence
  Description of Artificial Sequence: Synthetic oligonucleotide
  Antisense strand to SEQ ID NO: 1574125
caccaucacagaaauagcc

SEQ ID NO: 1574127 - RNA, 19 nt, Artificial Sequence
  Description of Artificial Sequence: Synthetic oligonucleotide
  Sense strand starting at position 3837 of SEQ ID NO: 1560070
ccucaaugauccgcuccau

SEQ ID NO: 1574128 - RNA, 19 nt, Artificial Sequence
  Description of Artificial Sequence: Synthetic oligonucleotide
  Antisense strand to SEQ ID NO: 1574127
auggagcggaucauugagg

SEQ ID NO: 1574129 - RNA, 19 nt, Artificial Sequence
  Description of Artificial Sequence: Synthetic oligonucleotide
  Sense strand starting at position 846 of SEQ ID NO: 1560071
gcguuccagucuugcgaca

SEQ ID NO: 1574130 - RNA, 19 nt, Artificial Sequence
  Description of Artificial Sequence: Synthetic oligonucleotide
  Antisense strand to SEQ ID NO: 1574129
ugucgcaagacuggaacgc

SEQ ID NO: 1574131 - RNA, 19 nt, Artificial Sequence
  Description of Artificial Sequence: Synthetic oligonucleotide
  Sense strand starting at position 847 of SEQ ID NO: 1560071
cguuccagucuugcgacaa

SEQ ID NO: 1574132 - RNA, 19 nt, Artificial Sequence
  Description of Artificial Sequence: Synthetic oligonucleotide
  Antisense strand to SEQ ID NO: 1574131
uugucgcaagacuggaacg

SEQ ID NO: 1574133 - RNA, 19 nt, Artificial Sequence
  Description of Artificial Sequence: Synthetic oligonucleotide
  Sense strand starting at position 848 of SEQ ID NO: 1560071
guuccagucuugcgacaag

SEQ ID NO: 1574134 - RNA, 19 nt, Artificial Sequence
  Description of Artificial Sequence: Synthetic oligonucleotide
  Antisense strand to SEQ ID NO: 1574133
cuugucgcaagacuggaac

SEQ ID NO: 1574135 - RNA, 19 nt, Artificial Sequence
  Description of Artificial Sequence: Synthetic oligonucleotide
  Sense strand starting at position 851 of SEQ ID NO: 1560071
ccagucuugcgacaagagu

SEQ ID NO: 1574136 - RNA, 19 nt, Artificial Sequence
  Description of Artificial Sequence: Synthetic oligonucleotide
  Antisense strand to SEQ ID NO: 1574135
acucuugucgcaagacugg

SEQ ID NO: 1574137 - RNA, 19 nt, Artificial Sequence
  Description of Artificial Sequence: Synthetic oligonucleotide
  Sense strand starting at position 1186 of SEQ ID NO: 1560071
gccaccaucuugguuuaau

SEQ ID NO: 1574138 - RNA, 19 nt, Artificial Sequence
  Description of Artificial Sequence: Synthetic oligonucleotide
  Antisense strand to SEQ ID NO: 1574137
auuaaaccaagaugguggc

SEQ ID NO: 1574139 - RNA, 19 nt, Artificial Sequence
  Description of Artificial Sequence: Synthetic oligonucleotide
  Sense strand starting at position 1619 of SEQ ID NO: 1560071
cgaacauuucuguggccga

SEQ ID NO: 1574140 - RNA, 19 nt, Artificial Sequence
  Description of Artificial Sequence: Synthetic oligonucleotide
  Antisense strand to SEQ ID NO: 1574139
ucggccacagaaauguucg

SEQ ID NO: 1574141 - RNA, 19 nt, Artificial Sequence
  Description of Artificial Sequence: Synthetic oligonucleotide
  Sense strand starting at position 1793 of SEQ ID NO: 1560071
acgagugacacgugcaaga

SEQ ID NO: 1574142 - RNA, 19 nt, Artificial Sequence
  Description of Artificial Sequence: Synthetic oligonucleotide
  Antisense strand to SEQ ID NO: 1574141
ucuugcacgugucacucgu

SEQ ID NO: 1574143 - RNA, 19 nt, Artificial Sequence
  Description of Artificial Sequence: Synthetic oligonucleotide
  Sense strand starting at position 2119 of SEQ ID NO: 1560071
gcuggagagucguucugag

SEQ ID NO: 1574144 - RNA, 19 nt, Artificial Sequence
  Description of Artificial Sequence: Synthetic oligonucleotide
  Antisense strand to SEQ ID NO: 1574143
cucagaacgacucuccagc

SEQ ID NO: 1574145 - RNA, 19 nt, Artificial Sequence
  Description of Artificial Sequence: Synthetic oligonucleotide
  Sense strand starting at position 2123 of SEQ ID NO: 1560071
gagagucguucugaguauu

SEQ ID NO: 1574146 - RNA, 19 nt, Artificial Sequence
  Description of Artificial Sequence: Synthetic oligonucleotide
  Antisense strand to SEQ ID NO: 1574145
aauacucagaacgacucuc

SEQ ID NO: 1574147 - RNA, 19 nt, Artificial Sequence
  Description of Artificial Sequence: Synthetic oligonucleotide
  Sense strand starting at position 2565 of SEQ ID NO: 1560071
gcggaugcaccuugaggau

SEQ ID NO: 1574148 - RNA, 19 nt, Artificial Sequence
  Description of Artificial Sequence: Synthetic oligonucleotide
  Antisense strand to SEQ ID NO: 1574147
auccucaaggugcauccgc

SEQ ID NO: 1574149 - RNA, 19 nt, Artificial Sequence
  Description of Artificial Sequence: Synthetic oligonucleotide
  Sense strand starting at position 2719 of SEQ ID NO: 1560071
gugacuaggugacauaaug

SEQ ID NO: 1574150 - RNA, 19 nt, Artificial Sequence
  Description of Artificial Sequence: Synthetic oligonucleotide
  Antisense strand to SEQ ID NO: 1574149
cauuaugucaccuagucac

SEQ ID NO: 1574151 - RNA, 19 nt, Artificial Sequence
  Description of Artificial Sequence: Synthetic oligonucleotide
  Sense strand starting at position 2746 of SEQ ID NO: 1560071
gcugccuucugggugauga

SEQ ID NO: 1574152 - RNA, 19 nt, Artificial Sequence
  Description of Artificial Sequence: Synthetic oligonucleotide
  Antisense strand to SEQ ID NO: 1574151
ucaucacccagaaggcagc

SEQ ID NO: 1574153 - RNA, 19 nt, Artificial Sequence
  Description of Artificial Sequence: Synthetic oligonucleotide
  Sense strand starting at position 2748 of SEQ ID NO: 1560071
ugccuucugggugaugaga

SEQ ID NO: 1574154 - RNA, 19 nt, Artificial Sequence
  Description of Artificial Sequence: Synthetic oligonucleotide
  Antisense strand to SEQ ID NO: 1574153
ucucaucacccagaaggca

SEQ ID NO: 1574155 - RNA, 19 nt, Artificial Sequence
  Description of Artificial Sequence: Synthetic oligonucleotide
  Sense strand starting at position 2750 of SEQ ID NO: 1560071
ccuucugggugaugagaau

SEQ ID NO: 1574156 - RNA, 19 nt, Artificial Sequence
  Description of Artificial Sequence: Synthetic oligonucleotide
  Antisense strand to SEQ ID NO: 1574155
auucucaucacccagaagg

SEQ ID NO: 1574157 - RNA, 19 nt, Artificial Sequence
  Description of Artificial Sequence: Synthetic oligonucleotide
  Sense strand starting at position 2761 of SEQ ID NO: 1560071
augagaauguucuggaauc

SEQ ID NO: 1574158 - RNA, 19 nt, Artificial Sequence
  Description of Artificial Sequence: Synthetic oligonucleotide
  Antisense strand to SEQ ID NO: 1574157
gauuccagaacauucucau

SEQ ID NO: 1574159 - RNA, 19 nt, Artificial Sequence
  Description of Artificial Sequence: Synthetic oligonucleotide
  Sense strand starting at position 2762 of SEQ ID NO: 1560071
ugagaauguucuggaauca

SEQ ID NO: 1574160 - RNA, 19 nt, Artificial Sequence
  Description of Artificial Sequence: Synthetic oligonucleotide
  Antisense strand to SEQ ID NO: 1574159
ugauuccagaacauucuca

SEQ ID NO: 1574161 - RNA, 19 nt, Artificial Sequence
  Description of Artificial Sequence: Synthetic oligonucleotide
  Sense strand starting at position 3229 of SEQ ID NO: 1560071
gcugaaaugccaggcuugu

SEQ ID NO: 1574162 - RNA, 19 nt, Artificial Sequence
  Description of Artificial Sequence: Synthetic oligonucleotide
  Antisense strand to SEQ ID NO: 1574161
acaagccuggcauuucagc

SEQ ID NO: 1574163 - RNA, 19 nt, Artificial Sequence
  Description of Artificial Sequence: Synthetic oligonucleotide
  Sense strand starting at position 3247 of SEQ ID NO: 1560071
uggugagccucugauccaa

SEQ ID NO: 1574164 - RNA, 19 nt, Artificial Sequence
  Description of Artificial Sequence: Synthetic oligonucleotide
  Antisense strand to SEQ ID NO: 1574163
uuggaucagaggcucacca

SEQ ID NO: 1574165 - RNA, 19 nt, Artificial Sequence
  Description of Artificial Sequence: Synthetic oligonucleotide
  Sense strand starting at position 3701 of SEQ ID NO: 1560071
agcuacauuccaggaucaa

SEQ ID NO: 1574166 - RNA, 19 nt, Artificial Sequence
  Description of Artificial Sequence: Synthetic oligonucleotide
  Antisense strand to SEQ ID NO: 1574165
uugauccuggaauguagcu

SEQ ID NO: 1574167 - RNA, 19 nt, Artificial Sequence
  Description of Artificial Sequence: Synthetic oligonucleotide
  Sense strand starting at position 3702 of SEQ ID NO: 1560071
gcuacauuccaggaucaac

SEQ ID NO: 1574168 - RNA, 19 nt, Artificial Sequence
  Description of Artificial Sequence: Synthetic oligonucleotide
  Antisense strand to SEQ ID NO: 1574167
guugauccuggaauguagc

SEQ ID NO: 1574169 - RNA, 19 nt, Artificial Sequence
  Description of Artificial Sequence: Synthetic oligonucleotide
  Sense strand starting at position 127 of SEQ ID NO: 1560072
aacucacugugguuagagu

SEQ ID NO: 1574170 - RNA, 19 nt, Artificial Sequence
  Description of Artificial Sequence: Synthetic oligonucleotide
  Antisense strand to SEQ ID NO: 1574169
acucuaaccacagugaguu

SEQ ID NO: 1574171 - RNA, 19 nt, Artificial Sequence
  Description of Artificial Sequence: Synthetic oligonucleotide
  Sense strand starting at position 128 of SEQ ID NO: 1560072
acucacugugguuagaguu

SEQ ID NO: 1574172 - RNA, 19 nt, Artificial Sequence
  Description of Artificial Sequence: Synthetic oligonucleotide
  Antisense strand to SEQ ID NO: 1574171
aacucuaaccacagugagu

SEQ ID NO: 1574173 - RNA, 19 nt, Artificial Sequence
  Description of Artificial Sequence: Synthetic oligonucleotide
  Sense strand starting at position 134 of SEQ ID NO: 1560072
ugugguuagaguugaggga

SEQ ID NO: 1574174 - RNA, 19 nt, Artificial Sequence
  Description of Artificial Sequence: Synthetic oligonucleotide
  Antisense strand to SEQ ID NO: 1574173
ucccucaacucuaaccaca

SEQ ID NO: 1574175 - RNA, 19 nt, Artificial Sequence
  Description of Artificial Sequence: Synthetic oligonucleotide
  Sense strand starting at position 135 of SEQ ID NO: 1560072
gugguuagaguugagggaa

SEQ ID NO: 1574176 - RNA, 19 nt, Artificial Sequence
  Description of Artificial Sequence: Synthetic oligonucleotide
  Antisense strand to SEQ ID NO: 1574175
uucccucaacucuaaccac

SEQ ID NO: 1574177 - RNA, 19 nt, Artificial Sequence
  Description of Artificial Sequence: Synthetic oligonucleotide
  Sense strand starting at position 215 of SEQ ID NO: 1560072
gggacuuugucccaugggu

SEQ ID NO: 1574178 - RNA, 19 nt, Artificial Sequence
  Description of Artificial Sequence: Synthetic oligonucleotide
  Antisense strand to SEQ ID NO: 1574177
acccaugggacaaaguccc

SEQ ID NO: 1574179 - RNA, 19 nt, Artificial Sequence
  Description of Artificial Sequence: Synthetic oligonucleotide
  Sense strand starting at position 262 of SEQ ID NO: 1560072
gggauaaacucagcuugca

SEQ ID NO: 1574180 - RNA, 19 nt, Artificial Sequence
  Description of Artificial Sequence: Synthetic oligonucleotide
  Antisense strand to SEQ ID NO: 1574179
ugcaagcugaguuuauccc

SEQ ID NO: 1574181 - RNA, 19 nt, Artificial Sequence
  Description of Artificial Sequence: Synthetic oligonucleotide
  Sense strand starting at position 298 of SEQ ID NO: 1560072
cugggacucuaugggagau

SEQ ID NO: 1574182 - RNA, 19 nt, Artificial Sequence
  Description of Artificial Sequence: Synthetic oligonucleotide
  Antisense strand to SEQ ID NO: 1574181
aucucccauagagucccag

SEQ ID NO: 1574183 - RNA, 19 nt, Artificial Sequence
  Description of Artificial Sequence: Synthetic oligonucleotide
  Sense strand starting at position 300 of SEQ ID NO: 1560072
gggacucuaugggagauga

SEQ ID NO: 1574184 - RNA, 19 nt, Artificial Sequence
  Description of Artificial Sequence: Synthetic oligonucleotide
  Antisense strand to SEQ ID NO: 1574183
ucaucucccauagaguccc

SEQ ID NO: 1574185 - RNA, 19 nt, Artificial Sequence
  Description of Artificial Sequence: Synthetic oligonucleotide
  Sense strand starting at position 529 of SEQ ID NO: 1560072
augggaauccugggagguu

SEQ ID NO: 1574186 - RNA, 19 nt, Artificial Sequence
  Description of Artificial Sequence: Synthetic oligonucleotide
  Antisense strand to SEQ ID NO: 1574185
aaccucccaggauucccau

SEQ ID NO: 1574187 - RNA, 19 nt, Artificial Sequence
  Description of Artificial Sequence: Synthetic oligonucleotide
  Sense strand starting at position 530 of SEQ ID NO: 1560072
ugggaauccugggagguuu

SEQ ID NO: 1574188 - RNA, 19 nt, Artificial Sequence
  Description of Artificial Sequence: Synthetic oligonucleotide
  Antisense strand to SEQ ID NO: 1574187
aaaccucccaggauuccca

SEQ ID NO: 1574189 - RNA, 19 nt, Artificial Sequence
  Description of Artificial Sequence: Synthetic oligonucleotide
  Sense strand starting at position 1027 of SEQ ID NO: 1560072
caggcuaguuuggccaaau

SEQ ID NO: 1574190 - RNA, 19 nt, Artificial Sequence
  Description of Artificial Sequence: Synthetic oligonucleotide
  Antisense strand to SEQ ID NO: 1574189
auuuggccaaacuagccug

SEQ ID NO: 1574191 - RNA, 19 nt, Artificial Sequence
  Description of Artificial Sequence: Synthetic oligonucleotide
  Sense strand starting at position 1028 of SEQ ID NO: 1560072
aggcuaguuuggccaaauc

SEQ ID NO: 1574192 - RNA, 19 nt, Artificial Sequence
  Description of Artificial Sequence: Synthetic oligonucleotide
  Antisense strand to SEQ ID NO: 1574191
gauuuggccaaacuagccu

SEQ ID NO: 1574193 - RNA, 19 nt, Artificial Sequence
  Description of Artificial Sequence: Synthetic oligonucleotide
  Sense strand starting at position 1350 of SEQ ID NO: 1560072
cuggguuggugucuugaga

SEQ ID NO: 1574194 - RNA, 19 nt, Artificial Sequence
  Description of Artificial Sequence: Synthetic oligonucleotide
  Antisense strand to SEQ ID NO: 1574193
ucucaagacaccaacccag

SEQ ID NO: 1574195 - RNA, 19 nt, Artificial Sequence
  Description of Artificial Sequence: Synthetic oligonucleotide
  Sense strand starting at position 1352 of SEQ ID NO: 1560072
ggguuggugucuugagaug

SEQ ID NO: 1574196 - RNA, 19 nt, Artificial Sequence
  Description of Artificial Sequence: Synthetic oligonucleotide
  Antisense strand to SEQ ID NO: 1574195
caucucaagacaccaaccc

SEQ ID NO: 1574197 - RNA, 19 nt, Artificial Sequence
  Description of Artificial Sequence: Synthetic oligonucleotide
  Sense strand starting at position 1354 of SEQ ID NO: 1560072
guuggugucuugagaugug

SEQ ID NO: 1574198 - RNA, 19 nt, Artificial Sequence
  Description of Artificial Sequence: Synthetic oligonucleotide
  Antisense strand to SEQ ID NO: 1574197
cacaucucaagacaccaac

SEQ ID NO: 1574199 - RNA, 19 nt, Artificial Sequence
  Description of Artificial Sequence: Synthetic oligonucleotide
  Sense strand starting at position 1357 of SEQ ID NO: 1560072
ggugucuugagauguggag

SEQ ID NO: 1574200 - RNA, 19 nt, Artificial Sequence
  Description of Artificial Sequence: Synthetic oligonucleotide
  Antisense strand to SEQ ID NO: 1574199
cuccacaucucaagacacc

SEQ ID NO: 1574201 - RNA, 19 nt, Artificial Sequence
  Description of Artificial Sequence: Synthetic oligonucleotide
  Sense strand starting at position 1419 of SEQ ID NO: 1560072
uuuccagagucugagaaca

SEQ ID NO: 1574202 - RNA, 19 nt, Artificial Sequence
  Description of Artificial Sequence: Synthetic oligonucleotide
  Antisense strand to SEQ ID NO: 1574201
uguucucagacucuggaaa

SEQ ID NO: 1574203 - RNA, 19 nt, Artificial Sequence
  Description of Artificial Sequence: Synthetic oligonucleotide
  Sense strand starting at position 1421 of SEQ ID NO: 1560072
uccagagucugagaacaga

SEQ ID NO: 1574204 - RNA, 19 nt, Artificial Sequence
  Description of Artificial Sequence: Synthetic oligonucleotide
  Antisense strand to SEQ ID NO: 1574203
ucuguucucagacucugga

SEQ ID NO: 1574205 - RNA, 19 nt, Artificial Sequence
  Description of Artificial Sequence: Synthetic oligonucleotide
  Sense strand starting at position 1477 of SEQ ID NO: 1560072
gccggcuuccaagagacua

SEQ ID NO: 1574206 - RNA, 19 nt, Artificial Sequence
  Description of Artificial Sequence: Synthetic oligonucleotide
  Antisense strand to SEQ ID NO: 1574205
uagucucuuggaagccggc

SEQ ID NO: 1574207 - RNA, 19 nt, Artificial Sequence
  Description of Artificial Sequence: Synthetic oligonucleotide
  Sense strand starting at position 1831 of SEQ ID NO: 1560072
gcgcgucuuuccggaagca

SEQ ID NO: 1574208 - RNA, 19 nt, Artificial Sequence
  Description of Artificial Sequence: Synthetic oligonucleotide
  Antisense strand to SEQ ID NO: 1574207
ugcuuccggaaagacgcgc

SEQ ID NO: 1574209 - RNA, 19 nt, Artificial Sequence
  Description of Artificial Sequence: Synthetic oligonucleotide
  Sense strand starting at position 2178 of SEQ ID NO: 1560072
gucugucagucuccuguua

SEQ ID NO: 1574210 - RNA, 19 nt, Artificial Sequence
  Description of Artificial Sequence: Synthetic oligonucleotide
  Antisense strand to SEQ ID NO: 1574209
uaacaggagacugacagac

SEQ ID NO: 1574211 - RNA, 19 nt, Artificial Sequence
  Description of Artificial Sequence: Synthetic oligonucleotide
  Sense strand starting at position 2180 of SEQ ID NO: 1560072
cugucagucuccuguuaaa

SEQ ID NO: 1574212 - RNA, 19 nt, Artificial Sequence
  Description of Artificial Sequence: Synthetic oligonucleotide
  Antisense strand to SEQ ID NO: 1574211
uuuaacaggagacugacag

SEQ ID NO: 1574213 - RNA, 19 nt, Artificial Sequence
  Description of Artificial Sequence: Synthetic oligonucleotide
  Sense strand starting at position 3149 of SEQ ID NO: 1560072
gcgccuuugacccgggaau

SEQ ID NO: 1574214 - RNA, 19 nt, Artificial Sequence
  Description of Artificial Sequence: Synthetic oligonucleotide
  Antisense strand to SEQ ID NO: 1574213
auucccgggucaaaggcgc

SEQ ID NO: 1574215 - RNA, 19 nt, Artificial Sequence
  Description of Artificial Sequence: Synthetic oligonucleotide
  Sense strand starting at position 3150 of SEQ ID NO: 1560072
cgccuuugacccgggaaua

SEQ ID NO: 1574216 - RNA, 19 nt, Artificial Sequence
  Description of Artificial Sequence: Synthetic oligonucleotide
  Antisense strand to SEQ ID NO: 1574215
uauucccgggucaaaggcg

SEQ ID NO: 1574217 - RNA, 19 nt, Artificial Sequence
  Description of Artificial Sequence: Synthetic oligonucleotide
  Sense strand starting at position 3151 of SEQ ID NO: 1560072
gccuuugacccgggaauac

SEQ ID NO: 1574218 - RNA, 19 nt, Artificial Sequence
  Description of Artificial Sequence: Synthetic oligonucleotide
  Antisense strand to SEQ ID NO: 1574217
guauucccgggucaaaggc

SEQ ID NO: 1574219 - RNA, 19 nt, Artificial Sequence
  Description of Artificial Sequence: Synthetic oligonucleotide
  Sense strand starting at position 3260 of SEQ ID NO: 1560072
ccagcugcucccugaggau

SEQ ID NO: 1574220 - RNA, 19 nt, Artificial Sequence
  Description of Artificial Sequence: Synthetic oligonucleotide
  Antisense strand to SEQ ID NO: 1574219
auccucagggagcagcugg

SEQ ID NO: 1574221 - RNA, 19 nt, Artificial Sequence
  Description of Artificial Sequence: Synthetic oligonucleotide
  Sense strand starting at position 3435 of SEQ ID NO: 1560072
agcguuugcucugcuuaga

SEQ ID NO: 1574222 - RNA, 19 nt, Artificial Sequence
  Description of Artificial Sequence: Synthetic oligonucleotide
  Antisense strand to SEQ ID NO: 1574221
ucuaagcagagcaaacgcu

SEQ ID NO: 1574223 - RNA, 19 nt, Artificial Sequence
  Description of Artificial Sequence: Synthetic oligonucleotide
  Sense strand starting at position 3436 of SEQ ID NO: 1560072
gcguuugcucugcuuagaa

SEQ ID NO: 1574224 - RNA, 19 nt, Artificial Sequence
  Description of Artificial Sequence: Synthetic oligonucleotide
  Antisense strand to SEQ ID NO: 1574223
uucuaagcagagcaaacgc

SEQ ID NO: 1574225 - RNA, 19 nt, Artificial Sequence
  Description of Artificial Sequence: Synthetic oligonucleotide
  Sense strand starting at position 3552 of SEQ ID NO: 1560072
cccggaaugugauucucaa

SEQ ID NO: 1574226 - RNA, 19 nt, Artificial Sequence
  Description of Artificial Sequence: Synthetic oligonucleotide
  Antisense strand to SEQ ID NO: 1574225
uugagaaucacauuccggg

SEQ ID NO: 1574227 - RNA, 19 nt, Artificial Sequence
  Description of Artificial Sequence: Synthetic oligonucleotide
  Sense strand starting at position 3556 of SEQ ID NO: 1560072
gaaugugauucucaaugca

SEQ ID NO: 1574228 - RNA, 19 nt, Artificial Sequence
  Description of Artificial Sequence: Synthetic oligonucleotide
  Antisense strand to SEQ ID NO: 1574227
ugcauugagaaucacauuc

SEQ ID NO: 1574229 - RNA, 19 nt, Artificial Sequence
  Description of Artificial Sequence: Synthetic oligonucleotide
  Sense strand starting at position 3559 of SEQ ID NO: 1560072
ugugauucucaaugcaguu

SEQ ID NO: 1574230 - RNA, 19 nt, Artificial Sequence
  Description of Artificial Sequence: Synthetic oligonucleotide
  Antisense strand to SEQ ID NO: 1574229
aacugcauugagaaucaca

SEQ ID NO: 1574231 - RNA, 19 nt, Artificial Sequence
  Description of Artificial Sequence: Synthetic oligonucleotide
  Sense strand starting at position 3610 of SEQ ID NO: 1560072
ccuaaaugucuugguccca

SEQ ID NO: 1574232 - RNA, 19 nt, Artificial Sequence
  Description of Artificial Sequence: Synthetic oligonucleotide
  Antisense strand to SEQ ID NO: 1574231
ugggaccaagacauuuagg

SEQ ID NO: 1574233 - RNA, 19 nt, Artificial Sequence
  Description of Artificial Sequence: Synthetic oligonucleotide
  Sense strand starting at position 3820 of SEQ ID NO: 1560072
gcagguaucuaguuucuca

SEQ ID NO: 1574234 - RNA, 19 nt, Artificial Sequence
  Description of Artificial Sequence: Synthetic oligonucleotide
  Antisense strand to SEQ ID NO: 1574233
ugagaaacuagauaccugc

SEQ ID NO: 1574235 - RNA, 19 nt, Artificial Sequence
  Description of Artificial Sequence: Synthetic oligonucleotide
  Sense strand starting at position 3827 of SEQ ID NO: 1560072
ucuaguuucucaggucuca

SEQ ID NO: 1574236 - RNA, 19 nt, Artificial Sequence
  Description of Artificial Sequence: Synthetic oligonucleotide
  Antisense strand to SEQ ID NO: 1574235
ugagaccugagaaacuaga

SEQ ID NO: 1574237 - RNA, 19 nt, Artificial Sequence
  Description of Artificial Sequence: Synthetic oligonucleotide
  Sense strand starting at position 3922 of SEQ ID NO: 1560072
cugucucauccucauguca

SEQ ID NO: 1574238 - RNA, 19 nt, Artificial Sequence
  Description of Artificial Sequence: Synthetic oligonucleotide
  Antisense strand to SEQ ID NO: 1574237
ugacaugaggaugagacag

SEQ ID NO: 1574239 - RNA, 19 nt, Artificial Sequence
  Description of Artificial Sequence: Synthetic oligonucleotide
  Sense strand starting at position 3982 of SEQ ID NO: 1560072
agaugcagcuuguugagau

SEQ ID NO: 1574240 - RNA, 19 nt, Artificial Sequence
  Description of Artificial Sequence: Synthetic oligonucleotide
  Antisense strand to SEQ ID NO: 1574239
aucucaacaagcugcaucu

SEQ ID NO: 1574241 - RNA, 19 nt, Artificial Sequence
  Description of Artificial Sequence: Synthetic oligonucleotide
  Sense strand starting at position 3983 of SEQ ID NO: 1560072
gaugcagcuuguugagaug

SEQ ID NO: 1574242 - RNA, 19 nt, Artificial Sequence
  Description of Artificial Sequence: Synthetic oligonucleotide
  Antisense strand to SEQ ID NO: 1574241
caucucaacaagcugcauc

SEQ ID NO: 1574243 - RNA, 19 nt, Artificial Sequence
  Description of Artificial Sequence: Synthetic oligonucleotide
  Sense strand starting at position 248 of SEQ ID NO: 1560073
ccucauuguaucuguguga

SEQ ID NO: 1574244 - RNA, 19 nt, Artificial Sequence
  Description of Artificial Sequence: Synthetic oligonucleotide
  Antisense strand to SEQ ID NO: 1574243
ucacacagauacaaugagg

SEQ ID NO: 1574245 - RNA, 19 nt, Artificial Sequence
  Description of Artificial Sequence: Synthetic oligonucleotide
  Sense strand starting at position 252 of SEQ ID NO: 1560073
auuguaucugugugaccca

SEQ ID NO: 1574246 - RNA, 19 nt, Artificial Sequence
  Description of Artificial Sequence: Synthetic oligonucleotide
  Antisense strand to SEQ ID NO: 1574245
ugggucacacagauacaau

SEQ ID NO: 1574247 - RNA, 19 nt, Artificial Sequence
  Description of Artificial Sequence: Synthetic oligonucleotide
  Sense strand starting at position 349 of SEQ ID NO: 1560073
ugaugaacauccuauggau

SEQ ID NO: 1574248 - RNA, 19 nt, Artificial Sequence
  Description of Artificial Sequence: Synthetic oligonucleotide
  Antisense strand to SEQ ID NO: 1574247
auccauaggauguucauca

SEQ ID NO: 1574249 - RNA, 19 nt, Artificial Sequence
  Description of Artificial Sequence: Synthetic oligonucleotide
  Sense strand starting at position 652 of SEQ ID NO: 1560073
ccggccaucauauggauua

SEQ ID NO: 1574250 - RNA, 19 nt, Artificial Sequence
  Description of Artificial Sequence: Synthetic oligonucleotide
  Antisense strand to SEQ ID NO: 1574249
uaauccauaugauggccgg

SEQ ID NO: 1574251 - RNA, 19 nt, Artificial Sequence
  Description of Artificial Sequence: Synthetic oligonucleotide
  Sense strand starting at position 664 of SEQ ID NO: 1560073
uggauuauuaaagggcaua

SEQ ID NO: 1574252 - RNA, 19 nt, Artificial Sequence
  Description of Artificial Sequence: Synthetic oligonucleotide
  Antisense strand to SEQ ID NO: 1574251
uaugcccuuuaauaaucca

SEQ ID NO: 1574253 - RNA, 19 nt, Artificial Sequence
  Description of Artificial Sequence: Synthetic oligonucleotide
  Sense strand starting at position 698 of SEQ ID NO: 1560073
cuuacugggugcucacaaa

SEQ ID NO: 1574254 - RNA, 19 nt, Artificial Sequence
  Description of Artificial Sequence: Synthetic oligonucleotide
  Antisense strand to SEQ ID NO: 1574253
uuugugagcacccaguaag

SEQ ID NO: 1574255 - RNA, 19 nt, Artificial Sequence
  Description of Artificial Sequence: Synthetic oligonucleotide
  Sense strand starting at position 719 of SEQ ID NO: 1560073
guuaccaguuucucuagua

SEQ ID NO: 1574256 - RNA, 19 nt, Artificial Sequence
  Description of Artificial Sequence: Synthetic oligonucleotide
  Antisense strand to SEQ ID NO: 1574255
uacuagagaaacugguaac

SEQ ID NO: 1574257 - RNA, 19 nt, Artificial Sequence
  Description of Artificial Sequence: Synthetic oligonucleotide
  Sense strand starting at position 1100 of SEQ ID NO: 1560073
cuggcccuacugugagaua

SEQ ID NO: 1574258 - RNA, 19 nt, Artificial Sequence
  Description of Artificial Sequence: Synthetic oligonucleotide
  Antisense strand to SEQ ID NO: 1574257
uaucucacaguagggccag

SEQ ID NO: 1574259 - RNA, 19 nt, Artificial Sequence
  Description of Artificial Sequence: Synthetic oligonucleotide
  Sense strand starting at position 1236 of SEQ ID NO: 1560073
cugggaggucuuugggacu

SEQ ID NO: 1574260 - RNA, 19 nt, Artificial Sequence
  Description of Artificial Sequence: Synthetic oligonucleotide
  Antisense strand to SEQ ID NO: 1574259
agucccaaagaccucccag

SEQ ID NO: 1574261 - RNA, 19 nt, Artificial Sequence
  Description of Artificial Sequence: Synthetic oligonucleotide
  Sense strand starting at position 1268 of SEQ ID NO: 1560073
cgaguucuggccggaaauc

SEQ ID NO: 1574262 - RNA, 19 nt, Artificial Sequence
  Description of Artificial Sequence: Synthetic oligonucleotide
  Antisense strand to SEQ ID NO: 1574261
gauuuccggccagaacucg

SEQ ID NO: 1574263 - RNA, 19 nt, Artificial Sequence
  Description of Artificial Sequence: Synthetic oligonucleotide
  Sense strand starting at position 1269 of SEQ ID NO: 1560073
gaguucuggccggaaauca

SEQ ID NO: 1574264 - RNA, 19 nt, Artificial Sequence
  Description of Artificial Sequence: Synthetic oligonucleotide
  Antisense strand to SEQ ID NO: 1574263
ugauuuccggccagaacuc

SEQ ID NO: 1574265 - RNA, 19 nt, Artificial Sequence
  Description of Artificial Sequence: Synthetic oligonucleotide
  Sense strand starting at position 1277 of SEQ ID NO: 1560073
gccggaaaucagggucuca

SEQ ID NO: 1574266 - RNA, 19 nt, Artificial Sequence
  Description of Artificial Sequence: Synthetic oligonucleotide
  Antisense strand to SEQ ID NO: 1574265
ugagacccugauuuccggc

SEQ ID NO: 1574267 - RNA, 19 nt, Artificial Sequence
  Description of Artificial Sequence: Synthetic oligonucleotide
  Sense strand starting at position 1311 of SEQ ID NO: 1560073
gggagcuccuuaccuuuaa

SEQ ID NO: 1574268 - RNA, 19 nt, Artificial Sequence
  Description of Artificial Sequence: Synthetic oligonucleotide
  Antisense strand to SEQ ID NO: 1574267
uuaaagguaaggagcuccc

SEQ ID NO: 1574269 - RNA, 19 nt, Artificial Sequence
  Description of Artificial Sequence: Synthetic oligonucleotide
  Sense strand starting at position 1505 of SEQ ID NO: 1560073
ucacuaguaggauguccaa

SEQ ID NO: 1574270 - RNA, 19 nt, Artificial Sequence
  Description of Artificial Sequence: Synthetic oligonucleotide
  Antisense strand to SEQ ID NO: 1574269
uuggacauccuacuaguga

SEQ ID NO: 1574271 - RNA, 19 nt, Artificial Sequence
  Description of Artificial Sequence: Synthetic oligonucleotide
  Sense strand starting at position 1519 of SEQ ID NO: 1560073
uccaacucaucuuugugua

SEQ ID NO: 1574272 - RNA, 19 nt, Artificial Sequence
  Description of Artificial Sequence: Synthetic oligonucleotide
  Antisense strand to SEQ ID NO: 1574271
uacacaaagaugaguugga

SEQ ID NO: 1574273 - RNA, 19 nt, Artificial Sequence
  Description of Artificial Sequence: Synthetic oligonucleotide
  Sense strand starting at position 1523 of SEQ ID NO: 1560073
acucaucuuuguguaccua

SEQ ID NO: 1574274 - RNA, 19 nt, Artificial Sequence
  Description of Artificial Sequence: Synthetic oligonucleotide
  Antisense strand to SEQ ID NO: 1574273
uagguacacaaagaugagu

SEQ ID NO: 1574275 - RNA, 19 nt, Artificial Sequence
  Description of Artificial Sequence: Synthetic oligonucleotide
  Sense strand starting at position 1524 of SEQ ID NO: 1560073
cucaucuuuguguaccuaa

SEQ ID NO: 1574276 - RNA, 19 nt, Artificial Sequence
  Description of Artificial Sequence: Synthetic oligonucleotide
  Antisense strand to SEQ ID NO: 1574275
uuagguacacaaagaugag

SEQ ID NO: 1574277 - RNA, 19 nt, Artificial Sequence
  Description of Artificial Sequence: Synthetic oligonucleotide
  Sense strand starting at position 1527 of SEQ ID NO: 1560073
aucuuuguguaccuaagga

SEQ ID NO: 1574278 - RNA, 19 nt, Artificial Sequence
  Description of Artificial Sequence: Synthetic oligonucleotide
  Antisense strand to SEQ ID NO: 1574277
uccuuagguacacaaagau

SEQ ID NO: 1574279 - RNA, 19 nt, Artificial Sequence
  Description of Artificial Sequence: Synthetic oligonucleotide
  Sense strand starting at position 1540 of SEQ ID NO: 1560073
uaaggacuugccugaguuu

SEQ ID NO: 1574280 - RNA, 19 nt, Artificial Sequence
  Description of Artificial Sequence: Synthetic oligonucleotide
  Antisense strand to SEQ ID NO: 1574279
aaacucaggcaaguccuua

SEQ ID NO: 1574281 - RNA, 19 nt, Artificial Sequence
  Description of Artificial Sequence: Synthetic oligonucleotide
  Sense strand starting at position 1541 of SEQ ID NO: 1560073
aaggacuugccugaguuua

SEQ ID NO: 1574282 - RNA, 19 nt, Artificial Sequence
  Description of Artificial Sequence: Synthetic oligonucleotide
  Antisense strand to SEQ ID NO: 1574281
uaaacucaggcaaguccuu

SEQ ID NO: 1574283 - RNA, 19 nt, Artificial Sequence
  Description of Artificial Sequence: Synthetic oligonucleotide
  Sense strand starting at position 1543 of SEQ ID NO: 1560073
ggacuugccugaguuuauc

SEQ ID NO: 1574284 - RNA, 19 nt, Artificial Sequence
  Description of Artificial Sequence: Synthetic oligonucleotide
  Antisense strand to SEQ ID NO: 1574283
gauaaacucaggcaagucc

SEQ ID NO: 1574285 - RNA, 19 nt, Artificial Sequence
  Description of Artificial Sequence: Synthetic oligonucleotide
  Sense strand starting at position 2276 of SEQ ID NO: 1560073
uaggcaucgcaaugaugau

SEQ ID NO: 1574286 - RNA, 19 nt, Artificial Sequence
  Description of Artificial Sequence: Synthetic oligonucleotide
  Antisense strand to SEQ ID NO: 1574285
aucaucauugcgaugccua

SEQ ID NO: 1574287 - RNA, 19 nt, Artificial Sequence
  Description of Artificial Sequence: Synthetic oligonucleotide
  Sense strand starting at position 2283 of SEQ ID NO: 1560073
cgcaaugaugaugguaaua

SEQ ID NO: 1574288 - RNA, 19 nt, Artificial Sequence
  Description of Artificial Sequence: Synthetic oligonucleotide
  Antisense strand to SEQ ID NO: 1574287
uauuaccaucaucauugcg

SEQ ID NO: 1574289 - RNA, 19 nt, Artificial Sequence
  Description of Artificial Sequence: Synthetic oligonucleotide
  Sense strand starting at position 2325 of SEQ ID NO: 1560073
gaugguuugcccugagcug

SEQ ID NO: 1574290 - RNA, 19 nt, Artificial Sequence
  Description of Artificial Sequence: Synthetic oligonucleotide
  Antisense strand to SEQ ID NO: 1574289
cagcucagggcaaaccauc

SEQ ID NO: 1574291 - RNA, 19 nt, Artificial Sequence
  Description of Artificial Sequence: Synthetic oligonucleotide
  Sense strand starting at position 2528 of SEQ ID NO: 1560073
gugggugauugugcaagua

SEQ ID NO: 1574292 - RNA, 19 nt, Artificial Sequence
  Description of Artificial Sequence: Synthetic oligonucleotide
  Antisense strand to SEQ ID NO: 1574291
uacuugcacaaucacccac

SEQ ID NO: 1574293 - RNA, 19 nt, Artificial Sequence
  Description of Artificial Sequence: Synthetic oligonucleotide
  Sense strand starting at position 2592 of SEQ ID NO: 1560073
ucaugagcuacuugugaga

SEQ ID NO: 1574294 - RNA, 19 nt, Artificial Sequence
  Description of Artificial Sequence: Synthetic oligonucleotide
  Antisense strand to SEQ ID NO: 1574293
ucucacaaguagcucauga

SEQ ID NO: 1574295 - RNA, 19 nt, Artificial Sequence
  Description of Artificial Sequence: Synthetic oligonucleotide
  Sense strand starting at position 2627 of SEQ ID NO: 1560073
cauguugagugcuuagaac

SEQ ID NO: 1574296 - RNA, 19 nt, Artificial Sequence
  Description of Artificial Sequence: Synthetic oligonucleotide
  Antisense strand to SEQ ID NO: 1574295
guucuaagcacucaacaug

SEQ ID NO: 1574297 - RNA, 19 nt, Artificial Sequence
  Description of Artificial Sequence: Synthetic oligonucleotide
  Sense strand starting at position 2657 of SEQ ID NO: 1560073
cacaguaggcgcgauuauu

SEQ ID NO: 1574298 - RNA, 19 nt, Artificial Sequence
  Description of Artificial Sequence: Synthetic oligonucleotide
  Antisense strand to SEQ ID NO: 1574297
aauaaucgcgccuacugug

SEQ ID NO: 1574299 - RNA, 19 nt, Artificial Sequence
  Description of Artificial Sequence: Synthetic oligonucleotide
  Sense strand starting at position 2686 of SEQ ID NO: 1560073
aguaauaguguuuggugca

SEQ ID NO: 1574300 - RNA, 19 nt, Artificial Sequence
  Description of Artificial Sequence: Synthetic oligonucleotide
  Antisense strand to SEQ ID NO: 1574299
ugcaccaaacacuauuacu

SEQ ID NO: 1574301 - RNA, 19 nt, Artificial Sequence
  Description of Artificial Sequence: Synthetic oligonucleotide
  Sense strand starting at position 2691 of SEQ ID NO: 1560073
uaguguuuggugcaauuau

SEQ ID NO: 1574302 - RNA, 19 nt, Artificial Sequence
  Description of Artificial Sequence: Synthetic oligonucleotide
  Antisense strand to SEQ ID NO: 1574301
auaauugcaccaaacacua

SEQ ID NO: 1574303 - RNA, 19 nt, Artificial Sequence
  Description of Artificial Sequence: Synthetic oligonucleotide
  Sense strand starting at position 2700 of SEQ ID NO: 1560073
gugcaauuauugucauugu

SEQ ID NO: 1574304 - RNA, 19 nt, Artificial Sequence
  Description of Artificial Sequence: Synthetic oligonucleotide
  Antisense strand to SEQ ID NO: 1574303
acaaugacaauaauugcac

SEQ ID NO: 1574305 - RNA, 19 nt, Artificial Sequence
  Description of Artificial Sequence: Synthetic oligonucleotide
  Sense strand starting at position 2717 of SEQ ID NO: 1560073
guuguuauuuaucaucauc

SEQ ID NO: 1574306 - RNA, 19 nt, Artificial Sequence
  Description of Artificial Sequence: Synthetic oligonucleotide
  Antisense strand to SEQ ID NO: 1574305
gaugaugauaaauaacaac

SEQ ID NO: 1574307 - RNA, 19 nt, Artificial Sequence
  Description of Artificial Sequence: Synthetic oligonucleotide
  Sense strand starting at position 2764 of SEQ ID NO: 1560073
gccugaagugcccauuaua

SEQ ID NO: 1574308 - RNA, 19 nt, Artificial Sequence
  Description of Artificial Sequence: Synthetic oligonucleotide
  Antisense strand to SEQ ID NO: 1574307
uauaaugggcacuucaggc

SEQ ID NO: 1574309 - RNA, 19 nt, Artificial Sequence
  Description of Artificial Sequence: Synthetic oligonucleotide
  Sense strand starting at position 3046 of SEQ ID NO: 1560073
ccuccaauguccuucugua

SEQ ID NO: 1574310 - RNA, 19 nt, Artificial Sequence
  Description of Artificial Sequence: Synthetic oligonucleotide
  Antisense strand to SEQ ID NO: 1574309
uacagaaggacauuggagg

SEQ ID NO: 1574311 - RNA, 19 nt, Artificial Sequence
  Description of Artificial Sequence: Synthetic oligonucleotide
  Sense strand starting at position 3138 of SEQ ID NO: 1560073
guccuaucuccugacugau

SEQ ID NO: 1574312 - RNA, 19 nt, Artificial Sequence
  Description of Artificial Sequence: Synthetic oligonucleotide
  Antisense strand to SEQ ID NO: 1574311
aucagucaggagauaggac

SEQ ID NO: 1574313 - RNA, 19 nt, Artificial Sequence
  Description of Artificial Sequence: Synthetic oligonucleotide
  Sense strand starting at position 3147 of SEQ ID NO: 1560073
ccugacugauaccuguauu

SEQ ID NO: 1574314 - RNA, 19 nt, Artificial Sequence
  Description of Artificial Sequence: Synthetic oligonucleotide
  Antisense strand to SEQ ID NO: 1574313
aauacagguaucagucagg

SEQ ID NO: 1574315 - RNA, 19 nt, Artificial Sequence
  Description of Artificial Sequence: Synthetic oligonucleotide
  Sense strand starting at position 3619 of SEQ ID NO: 1560073
guaggaggaugucccuuau

SEQ ID NO: 1574316 - RNA, 19 nt, Artificial Sequence
  Description of Artificial Sequence: Synthetic oligonucleotide
  Antisense strand to SEQ ID NO: 1574315
auaagggacauccuccuac

SEQ ID NO: 1574317 - RNA, 19 nt, Artificial Sequence
  Description of Artificial Sequence: Synthetic oligonucleotide
  Sense strand starting at position 3651 of SEQ ID NO: 1560073
gcagcaucgaugggaagau

SEQ ID NO: 1574318 - RNA, 19 nt, Artificial Sequence
  Description of Artificial Sequence: Synthetic oligonucleotide
  Antisense strand to SEQ ID NO: 1574317
aucuucccaucgaugcugc

SEQ ID NO: 1574319 - RNA, 19 nt, Artificial Sequence
  Description of Artificial Sequence: Synthetic oligonucleotide
  Sense strand starting at position 3847 of SEQ ID NO: 1560073
cgaguucuacgaggaguuc

SEQ ID NO: 1574320 - RNA, 19 nt, Artificial Sequence
  Description of Artificial Sequence: Synthetic oligonucleotide
  Antisense strand to SEQ ID NO: 1574319
gaacuccucguagaacucg

SEQ ID NO: 1574321 - RNA, 19 nt, Artificial Sequence
  Description of Artificial Sequence: Synthetic oligonucleotide
  Sense strand starting at position 3848 of SEQ ID NO: 1560073
gaguucuacgaggaguuca

SEQ ID NO: 1574322 - RNA, 19 nt, Artificial Sequence
  Description of Artificial Sequence: Synthetic oligonucleotide
  Antisense strand to SEQ ID NO: 1574321
ugaacuccucguagaacuc

SEQ ID NO: 1574323 - RNA, 19 nt, Artificial Sequence
  Description of Artificial Sequence: Synthetic oligonucleotide
  Sense strand starting at position 119 of SEQ ID NO: 1560074
agagaaggauguuucccau

SEQ ID NO: 1574324 - RNA, 19 nt, Artificial Sequence
  Description of Artificial Sequence: Synthetic oligonucleotide
  Antisense strand to SEQ ID NO: 1574323
augggaaacauccuucucu

SEQ ID NO: 1574325 - RNA, 19 nt, Artificial Sequence
  Description of Artificial Sequence: Synthetic oligonucleotide
  Sense strand starting at position 122 of SEQ ID NO: 1560074
gaaggauguuucccaugaa

SEQ ID NO: 1574326 - RNA, 19 nt, Artificial Sequence
  Description of Artificial Sequence: Synthetic oligonucleotide
  Antisense strand to SEQ ID NO: 1574325
uucaugggaaacauccuuc

SEQ ID NO: 1574327 - RNA, 19 nt, Artificial Sequence
  Description of Artificial Sequence: Synthetic oligonucleotide
  Sense strand starting at position 125 of SEQ ID NO: 1560074
ggauguuucccaugaaggg

SEQ ID NO: 1574328 - RNA, 19 nt, Artificial Sequence
  Description of Artificial Sequence: Synthetic oligonucleotide
  Antisense strand to SEQ ID NO: 1574327
cccuucaugggaaacaucc

SEQ ID NO: 1574329 - RNA, 19 nt, Artificial Sequence
  Description of Artificial Sequence: Synthetic oligonucleotide
  Sense strand starting at position 241 of SEQ ID NO: 1560074
gccauuggaggcuaugaau

SEQ ID NO: 1574330 - RNA, 19 nt, Artificial Sequence
  Description of Artificial Sequence: Synthetic oligonucleotide
  Antisense strand to SEQ ID NO: 1574329
auucauagccuccaauggc

SEQ ID NO: 1574331 - RNA, 19 nt, Artificial Sequence
  Description of Artificial Sequence: Synthetic oligonucleotide
  Sense strand starting at position 250 of SEQ ID NO: 1560074
ggcuaugaaugaucuguga

SEQ ID NO: 1574332 - RNA, 19 nt, Artificial Sequence
  Description of Artificial Sequence: Synthetic oligonucleotide
  Antisense strand to SEQ ID NO: 1574331
ucacagaucauucauagcc

SEQ ID NO: 1574333 - RNA, 19 nt, Artificial Sequence
  Description of Artificial Sequence: Synthetic oligonucleotide
  Sense strand starting at position 252 of SEQ ID NO: 1560074
cuaugaaugaucugugaga

SEQ ID NO: 1574334 - RNA, 19 nt, Artificial Sequence
  Description of Artificial Sequence: Synthetic oligonucleotide
  Antisense strand to SEQ ID NO: 1574333
ucucacagaucauucauag

SEQ ID NO: 1574335 - RNA, 19 nt, Artificial Sequence
  Description of Artificial Sequence: Synthetic oligonucleotide
  Sense strand starting at position 253 of SEQ ID NO: 1560074
uaugaaugaucugugagau

SEQ ID NO: 1574336 - RNA, 19 nt, Artificial Sequence
  Description of Artificial Sequence: Synthetic oligonucleotide
  Antisense strand to SEQ ID NO: 1574335
aucucacagaucauucaua

SEQ ID NO: 1574337 - RNA, 19 nt, Artificial Sequence
  Description of Artificial Sequence: Synthetic oligonucleotide
  Sense strand starting at position 407 of SEQ ID NO: 1560074
aaaugugauugguuccaca

SEQ ID NO: 1574338 - RNA, 19 nt, Artificial Sequence
  Description of Artificial Sequence: Synthetic oligonucleotide
  Antisense strand to SEQ ID NO: 1574337
uguggaaccaaucacauuu

SEQ ID NO: 1574339 - RNA, 19 nt, Artificial Sequence
  Description of Artificial Sequence: Synthetic oligonucleotide
  Sense strand starting at position 550 of SEQ ID NO: 1560074
cucagucuaggcuagagau

SEQ ID NO: 1574340 - RNA, 19 nt, Artificial Sequence
  Description of Artificial Sequence: Synthetic oligonucleotide
  Antisense strand to SEQ ID NO: 1574339
aucucuagccuagacugag

SEQ ID NO: 1574341 - RNA, 19 nt, Artificial Sequence
  Description of Artificial Sequence: Synthetic oligonucleotide
  Sense strand starting at position 659 of SEQ ID NO: 1560074
ggcauuuguucggccucga

SEQ ID NO: 1574342 - RNA, 19 nt, Artificial Sequence
  Description of Artificial Sequence: Synthetic oligonucleotide
  Antisense strand to SEQ ID NO: 1574341
ucgaggccgaacaaaugcc

SEQ ID NO: 1574343 - RNA, 19 nt, Artificial Sequence
  Description of Artificial Sequence: Synthetic oligonucleotide
  Sense strand starting at position 1089 of SEQ ID NO: 1560074
augcauccucacugagaua

SEQ ID NO: 1574344 - RNA, 19 nt, Artificial Sequence
  Description of Artificial Sequence: Synthetic oligonucleotide
  Antisense strand to SEQ ID NO: 1574343
uaucucagugaggaugcau

SEQ ID NO: 1574345 - RNA, 19 nt, Artificial Sequence
  Description of Artificial Sequence: Synthetic oligonucleotide
  Sense strand starting at position 1115 of SEQ ID NO: 1560074
auaaauguugaaugagugu

SEQ ID NO: 1574346 - RNA, 19 nt, Artificial Sequence
  Description of Artificial Sequence: Synthetic oligonucleotide
  Antisense strand to SEQ ID NO: 1574345
acacucauucaacauuuau

SEQ ID NO: 1574347 - RNA, 19 nt, Artificial Sequence
  Description of Artificial Sequence: Synthetic oligonucleotide
  Sense strand starting at position 1180 of SEQ ID NO: 1560074
gggcuaggagccugaaguu

SEQ ID NO: 1574348 - RNA, 19 nt, Artificial Sequence
  Description of Artificial Sequence: Synthetic oligonucleotide
  Antisense strand to SEQ ID NO: 1574347
aacuucaggcuccuagccc

SEQ ID NO: 1574349 - RNA, 19 nt, Artificial Sequence
  Description of Artificial Sequence: Synthetic oligonucleotide
  Sense strand starting at position 1251 of SEQ ID NO: 1560074
gucucuguccuagagguga

SEQ ID NO: 1574350 - RNA, 19 nt, Artificial Sequence
  Description of Artificial Sequence: Synthetic oligonucleotide
  Antisense strand to SEQ ID NO: 1574349
ucaccucuaggacagagac

SEQ ID NO: 1574351 - RNA, 19 nt, Artificial Sequence
  Description of Artificial Sequence: Synthetic oligonucleotide
  Sense strand starting at position 1253 of SEQ ID NO: 1560074
cucuguccuagaggugaca

SEQ ID NO: 1574352 - RNA, 19 nt, Artificial Sequence
  Description of Artificial Sequence: Synthetic oligonucleotide
  Antisense strand to SEQ ID NO: 1574351
ugucaccucuaggacagag

SEQ ID NO: 1574353 - RNA, 19 nt, Artificial Sequence
  Description of Artificial Sequence: Synthetic oligonucleotide
  Sense strand starting at position 1511 of SEQ ID NO: 1560074
ggaauugugggagguggaa

SEQ ID NO: 1574354 - RNA, 19 nt, Artificial Sequence
  Description of Artificial Sequence: Synthetic oligonucleotide
  Antisense strand to SEQ ID NO: 1574353
uuccaccucccacaauucc

SEQ ID NO: 1574355 - RNA, 19 nt, Artificial Sequence
  Description of Artificial Sequence: Synthetic oligonucleotide
  Sense strand starting at position 1641 of SEQ ID NO: 1560074
gagguuaccuaggagaaga

SEQ ID NO: 1574356 - RNA, 19 nt, Artificial Sequence
  Description of Artificial Sequence: Synthetic oligonucleotide
  Antisense strand to SEQ ID NO: 1574355
ucuucuccuagguaaccuc

SEQ ID NO: 1574357 - RNA, 19 nt, Artificial Sequence
  Description of Artificial Sequence: Synthetic oligonucleotide
  Sense strand starting at position 1697 of SEQ ID NO: 1560074
ugggaaauguaguucugag

SEQ ID NO: 1574358 - RNA, 19 nt, Artificial Sequence
  Description of Artificial Sequence: Synthetic oligonucleotide
  Antisense strand to SEQ ID NO: 1574357
cucagaacuacauuuccca

SEQ ID NO: 1574359 - RNA, 19 nt, Artificial Sequence
  Description of Artificial Sequence: Synthetic oligonucleotide
  Sense strand starting at position 1752 of SEQ ID NO: 1560074
ggaaauguaguuugagguc

SEQ ID NO: 1574360 - RNA, 19 nt, Artificial Sequence
  Description of Artificial Sequence: Synthetic oligonucleotide
  Antisense strand to SEQ ID NO: 1574359
gaccucaaacuacauuucc

SEQ ID NO: 1574361 - RNA, 19 nt, Artificial Sequence
  Description of Artificial Sequence: Synthetic oligonucleotide
  Sense strand starting at position 1795 of SEQ ID NO: 1560074
uggugaauccaggaaugcu

SEQ ID NO: 1574362 - RNA, 19 nt, Artificial Sequence
  Description of Artificial Sequence: Synthetic oligonucleotide
  Antisense strand to SEQ ID NO: 1574361
agcauuccuggauucacca

SEQ ID NO: 1574363 - RNA, 19 nt, Artificial Sequence
  Description of Artificial Sequence: Synthetic oligonucleotide
  Sense strand starting at position 2362 of SEQ ID NO: 1560074
gcuugauuucucugcccuc

SEQ ID NO: 1574364 - RNA, 19 nt, Artificial Sequence
  Description of Artificial Sequence: Synthetic oligonucleotide
  Antisense strand to SEQ ID NO: 1574363
gagggcagagaaaucaagc

SEQ ID NO: 1574365 - RNA, 19 nt, Artificial Sequence
  Description of Artificial Sequence: Synthetic oligonucleotide
  Sense strand starting at position 2654 of SEQ ID NO: 1560074
guuagaaacaggcgagauu

SEQ ID NO: 1574366 - RNA, 19 nt, Artificial Sequence
  Description of Artificial Sequence: Synthetic oligonucleotide
  Antisense strand to SEQ ID NO: 1574365
aaucucgccuguuucuaac

SEQ ID NO: 1574367 - RNA, 19 nt, Artificial Sequence
  Description of Artificial Sequence: Synthetic oligonucleotide
  Sense strand starting at position 2665 of SEQ ID NO: 1560074
gcgagauuccaacgaaagu

SEQ ID NO: 1574368 - RNA, 19 nt, Artificial Sequence
  Description of Artificial Sequence: Synthetic oligonucleotide
  Antisense strand to SEQ ID NO: 1574367
acuuucguuggaaucucgc

SEQ ID NO: 1574369 - RNA, 19 nt, Artificial Sequence
  Description of Artificial Sequence: Synthetic oligonucleotide
  Sense strand starting at position 2666 of SEQ ID NO: 1560074
cgagauuccaacgaaagug

SEQ ID NO: 1574370 - RNA, 19 nt, Artificial Sequence
  Description of Artificial Sequence: Synthetic oligonucleotide
  Antisense strand to SEQ ID NO: 1574369
cacuuucguuggaaucucg

SEQ ID NO: 1574371 - RNA, 19 nt, Artificial Sequence
  Description of Artificial Sequence: Synthetic oligonucleotide
  Sense strand starting at position 2678 of SEQ ID NO: 1560074
gaaaguggguucucuagug

SEQ ID NO: 1574372 - RNA, 19 nt, Artificial Sequence
  Description of Artificial Sequence: Synthetic oligonucleotide
  Antisense strand to SEQ ID NO: 1574371
cacuagagaacccacuuuc

SEQ ID NO: 1574373 - RNA, 19 nt, Artificial Sequence
  Description of Artificial Sequence: Synthetic oligonucleotide
  Sense strand starting at position 2868 of SEQ ID NO: 1560074
ccucucgugcuagagagaa

SEQ ID NO: 1574374 - RNA, 19 nt, Artificial Sequence
  Description of Artificial Sequence: Synthetic oligonucleotide
  Antisense strand to SEQ ID NO: 1574373
uucucucuagcacgagagg

SEQ ID NO: 1574375 - RNA, 19 nt, Artificial Sequence
  Description of Artificial Sequence: Synthetic oligonucleotide
  Sense strand starting at position 2936 of SEQ ID NO: 1560074
cagagcucucugcaggaau

SEQ ID NO: 1574376 - RNA, 19 nt, Artificial Sequence
  Description of Artificial Sequence: Synthetic oligonucleotide
  Antisense strand to SEQ ID NO: 1574375
auuccugcagagagcucug

SEQ ID NO: 1574377 - RNA, 19 nt, Artificial Sequence
  Description of Artificial Sequence: Synthetic oligonucleotide
  Sense strand starting at position 2948 of SEQ ID NO: 1560074
caggaauugugggagagga

SEQ ID NO: 1574378 - RNA, 19 nt, Artificial Sequence
  Description of Artificial Sequence: Synthetic oligonucleotide
  Antisense strand to SEQ ID NO: 1574377
uccucucccacaauuccug

SEQ ID NO: 1574379 - RNA, 19 nt, Artificial Sequence
  Description of Artificial Sequence: Synthetic oligonucleotide
  Sense strand starting at position 2968 of SEQ ID NO: 1560074
gcuggaccuucgcuuauuu

SEQ ID NO: 1574380 - RNA, 19 nt, Artificial Sequence
  Description of Artificial Sequence: Synthetic oligonucleotide
  Antisense strand to SEQ ID NO: 1574379
aaauaagcgaagguccagc

SEQ ID NO: 1574381 - RNA, 19 nt, Artificial Sequence
  Description of Artificial Sequence: Synthetic oligonucleotide
  Sense strand starting at position 3053 of SEQ ID NO: 1560074
uccagauggucucuggacu

SEQ ID NO: 1574382 - RNA, 19 nt, Artificial Sequence
  Description of Artificial Sequence: Synthetic oligonucleotide
  Antisense strand to SEQ ID NO: 1574381
aguccagagaccaucugga

SEQ ID NO: 1574383 - RNA, 19 nt, Artificial Sequence
  Description of Artificial Sequence: Synthetic oligonucleotide
  Sense strand starting at position 3130 of SEQ ID NO: 1560074
gugauuuguucaguggcga

SEQ ID NO: 1574384 - RNA, 19 nt, Artificial Sequence
  Description of Artificial Sequence: Synthetic oligonucleotide
  Antisense strand to SEQ ID NO: 1574383
ucgccacugaacaaaucac

SEQ ID NO: 1574385 - RNA, 19 nt, Artificial Sequence
  Description of Artificial Sequence: Synthetic oligonucleotide
  Sense strand starting at position 3154 of SEQ ID NO: 1560074
agaaucaaucuaggcuaca

SEQ ID NO: 1574386 - RNA, 19 nt, Artificial Sequence
  Description of Artificial Sequence: Synthetic oligonucleotide
  Antisense strand to SEQ ID NO: 1574385
uguagccuagauugauucu

SEQ ID NO: 1574387 - RNA, 19 nt, Artificial Sequence
  Description of Artificial Sequence: Synthetic oligonucleotide
  Sense strand starting at position 3288 of SEQ ID NO: 1560074
ggagauaacuugccugaga

SEQ ID NO: 1574388 - RNA, 19 nt, Artificial Sequence
  Description of Artificial Sequence: Synthetic oligonucleotide
  Antisense strand to SEQ ID NO: 1574387
ucucaggcaaguuaucucc

SEQ ID NO: 1574389 - RNA, 19 nt, Artificial Sequence
  Description of Artificial Sequence: Synthetic oligonucleotide
  Sense strand starting at position 3289 of SEQ ID NO: 1560074
gagauaacuugccugagag

SEQ ID NO: 1574390 - RNA, 19 nt, Artificial Sequence
  Description of Artificial Sequence: Synthetic oligonucleotide
  Antisense strand to SEQ ID NO: 1574389
cucucaggcaaguuaucuc

SEQ ID NO: 1574391 - RNA, 19 nt, Artificial Sequence
  Description of Artificial Sequence: Synthetic oligonucleotide
  Sense strand starting at position 3290 of SEQ ID NO: 1560074
agauaacuugccugagagc

SEQ ID NO: 1574392 - RNA, 19 nt, Artificial Sequence
  Description of Artificial Sequence: Synthetic oligonucleotide
  Antisense strand to SEQ ID NO: 1574391
gcucucaggcaaguuaucu

SEQ ID NO: 1574393 - RNA, 19 nt, Artificial Sequence
  Description of Artificial Sequence: Synthetic oligonucleotide
  Sense strand starting at position 3291 of SEQ ID NO: 1560074
gauaacuugccugagagca

SEQ ID NO: 1574394 - RNA, 19 nt, Artificial Sequence
  Description of Artificial Sequence: Synthetic oligonucleotide
  Antisense strand to SEQ ID NO: 1574393
ugcucucaggcaaguuauc

SEQ ID NO: 1574395 - RNA, 19 nt, Artificial Sequence
  Description of Artificial Sequence: Synthetic oligonucleotide
  Sense strand starting at position 3346 of SEQ ID NO: 1560074
acaguuggauuccuggaga

SEQ ID NO: 1574396 - RNA, 19 nt, Artificial Sequence
  Description of Artificial Sequence: Synthetic oligonucleotide
  Antisense strand to SEQ ID NO: 1574395
ucuccaggaauccaacugu

SEQ ID NO: 1574397 - RNA, 19 nt, Artificial Sequence
  Description of Artificial Sequence: Synthetic oligonucleotide
  Sense strand starting at position 3442 of SEQ ID NO: 1560074
ugauuugcguuuccguuau

SEQ ID NO: 1574398 - RNA, 19 nt, Artificial Sequence
  Description of Artificial Sequence: Synthetic oligonucleotide
  Antisense strand to SEQ ID NO: 1574397
auaacggaaacgcaaauca

SEQ ID NO: 1574399 - RNA, 19 nt, Artificial Sequence
  Description of Artificial Sequence: Synthetic oligonucleotide
  Sense strand starting at position 3444 of SEQ ID NO: 1560074
auuugcguuuccguuauua

SEQ ID NO: 1574400 - RNA, 19 nt, Artificial Sequence
  Description of Artificial Sequence: Synthetic oligonucleotide
  Antisense strand to SEQ ID NO: 1574399
uaauaacggaaacgcaaau

SEQ ID NO: 1574401 - RNA, 19 nt, Artificial Sequence
  Description of Artificial Sequence: Synthetic oligonucleotide
  Sense strand starting at position 3603 of SEQ ID NO: 1560074
acaugauugccuugaccac

SEQ ID NO: 1574402 - RNA, 19 nt, Artificial Sequence
  Description of Artificial Sequence: Synthetic oligonucleotide
  Antisense strand to SEQ ID NO: 1574401
guggucaaggcaaucaugu

SEQ ID NO: 1574403 - RNA, 19 nt, Artificial Sequence
  Description of Artificial Sequence: Synthetic oligonucleotide
  Sense strand starting at position 43 of SEQ ID NO: 1560075
cuugguuguggucagcaau

SEQ ID NO: 1574404 - RNA, 19 nt, Artificial Sequence
  Description of Artificial Sequence: Synthetic oligonucleotide
  Antisense strand to SEQ ID NO: 1574403
auugcugaccacaaccaag

SEQ ID NO: 1574405 - RNA, 19 nt, Artificial Sequence
  Description of Artificial Sequence: Synthetic oligonucleotide
  Sense strand starting at position 55 of SEQ ID NO: 1560075
cagcaaugagucuggguau

SEQ ID NO: 1574406 - RNA, 19 nt, Artificial Sequence
  Description of Artificial Sequence: Synthetic oligonucleotide
  Antisense strand to SEQ ID NO: 1574405
auacccagacucauugcug

SEQ ID NO: 1574407 - RNA, 19 nt, Artificial Sequence
  Description of Artificial Sequence: Synthetic oligonucleotide
  Sense strand starting at position 58 of SEQ ID NO: 1560075
caaugagucuggguaugag

SEQ ID NO: 1574408 - RNA, 19 nt, Artificial Sequence
  Description of Artificial Sequence: Synthetic oligonucleotide
  Antisense strand to SEQ ID NO: 1574407
cucauacccagacucauug

SEQ ID NO: 1574409 - RNA, 19 nt, Artificial Sequence
  Description of Artificial Sequence: Synthetic oligonucleotide
  Sense strand starting at position 61 of SEQ ID NO: 1560075
ugagucuggguaugaguau

SEQ ID NO: 1574410 - RNA, 19 nt, Artificial Sequence
  Description of Artificial Sequence: Synthetic oligonucleotide
  Antisense strand to SEQ ID NO: 1574409
auacucauacccagacuca

SEQ ID NO: 1574411 - RNA, 19 nt, Artificial Sequence
  Description of Artificial Sequence: Synthetic oligonucleotide
  Sense strand starting at position 72 of SEQ ID NO: 1560075
augaguauucugcgggaaa

SEQ ID NO: 1574412 - RNA, 19 nt, Artificial Sequence
  Description of Artificial Sequence: Synthetic oligonucleotide
  Antisense strand to SEQ ID NO: 1574411
uuucccgcagaauacucau

SEQ ID NO: 1574413 - RNA, 19 nt, Artificial Sequence
  Description of Artificial Sequence: Synthetic oligonucleotide
  Sense strand starting at position 267 of SEQ ID NO: 1560075
ggaagaguuugguugucaa

SEQ ID NO: 1574414 - RNA, 19 nt, Artificial Sequence
  Description of Artificial Sequence: Synthetic oligonucleotide
  Antisense strand to SEQ ID NO: 1574413
uugacaaccaaacucuucc

SEQ ID NO: 1574415 - RNA, 19 nt, Artificial Sequence
  Description of Artificial Sequence: Synthetic oligonucleotide
  Sense strand starting at position 452 of SEQ ID NO: 1560075
cuuggaaagucuuagaaac

SEQ ID NO: 1574416 - RNA, 19 nt, Artificial Sequence
  Description of Artificial Sequence: Synthetic oligonucleotide
  Antisense strand to SEQ ID NO: 1574415
guuucuaagacuuuccaag

SEQ ID NO: 1574417 - RNA, 19 nt, Artificial Sequence
  Description of Artificial Sequence: Synthetic oligonucleotide
  Sense strand starting at position 454 of SEQ ID NO: 1560075
uggaaagucuuagaaacag

SEQ ID NO: 1574418 - RNA, 19 nt, Artificial Sequence
  Description of Artificial Sequence: Synthetic oligonucleotide
  Antisense strand to SEQ ID NO: 1574417
cuguuucuaagacuuucca

SEQ ID NO: 1574419 - RNA, 19 nt, Artificial Sequence
  Description of Artificial Sequence: Synthetic oligonucleotide
  Sense strand starting at position 473 of SEQ ID NO: 1560075
ugaagagacguugguauuc

SEQ ID NO: 1574420 - RNA, 19 nt, Artificial Sequence
  Description of Artificial Sequence: Synthetic oligonucleotide
  Antisense strand to SEQ ID NO: 1574419
gaauaccaacgucucuuca

SEQ ID NO: 1574421 - RNA, 19 nt, Artificial Sequence
  Description of Artificial Sequence: Synthetic oligonucleotide
  Sense strand starting at position 496 of SEQ ID NO: 1560075
cagaaucuucgucggagga

SEQ ID NO: 1574422 - RNA, 19 nt, Artificial Sequence
  Description of Artificial Sequence: Synthetic oligonucleotide
  Antisense strand to SEQ ID NO: 1574421
uccuccgacgaagauucug

SEQ ID NO: 1574423 - RNA, 19 nt, Artificial Sequence
  Description of Artificial Sequence: Synthetic oligonucleotide
  Sense strand starting at position 497 of SEQ ID NO: 1560075
agaaucuucgucggaggau

SEQ ID NO: 1574424 - RNA, 19 nt, Artificial Sequence
  Description of Artificial Sequence: Synthetic oligonucleotide
  Antisense strand to SEQ ID NO: 1574423
auccuccgacgaagauucu

SEQ ID NO: 1574425 - RNA, 19 nt, Artificial Sequence
  Description of Artificial Sequence: Synthetic oligonucleotide
  Sense strand starting at position 529 of SEQ ID NO: 1560075
ucuagaacuuuagugucau

SEQ ID NO: 1574426 - RNA, 19 nt, Artificial Sequence
  Description of Artificial Sequence: Synthetic oligonucleotide
  Antisense strand to SEQ ID NO: 1574425
augacacuaaaguucuaga

SEQ ID NO: 1574427 - RNA, 19 nt, Artificial Sequence
  Description of Artificial Sequence: Synthetic oligonucleotide
  Sense strand starting at position 535 of SEQ ID NO: 1560075
acuuuagugucauuaggag

SEQ ID NO: 1574428 - RNA, 19 nt, Artificial Sequence
  Description of Artificial Sequence: Synthetic oligonucleotide
  Antisense strand to SEQ ID NO: 1574427
cuccuaaugacacuaaagu

SEQ ID NO: 1574429 - RNA, 19 nt, Artificial Sequence
  Description of Artificial Sequence: Synthetic oligonucleotide
  Sense strand starting at position 549 of SEQ ID NO: 1560075
aggaguagguuggugucau

SEQ ID NO: 1574430 - RNA, 19 nt, Artificial Sequence
  Description of Artificial Sequence: Synthetic oligonucleotide
  Antisense strand to SEQ ID NO: 1574429
augacaccaaccuacuccu

SEQ ID NO: 1574431 - RNA, 19 nt, Artificial Sequence
  Description of Artificial Sequence: Synthetic oligonucleotide
  Sense strand starting at position 597 of SEQ ID NO: 1560075
cuuaacgucuuagucauaa

SEQ ID NO: 1574432 - RNA, 19 nt, Artificial Sequence
  Description of Artificial Sequence: Synthetic oligonucleotide
  Antisense strand to SEQ ID NO: 1574431
uuaugacuaagacguuaag

SEQ ID NO: 1574433 - RNA, 19 nt, Artificial Sequence
  Description of Artificial Sequence: Synthetic oligonucleotide
  Sense strand starting at position 1824 of SEQ ID NO: 1560075
gggagaaucucgcuugcuc

SEQ ID NO: 1574434 - RNA, 19 nt, Artificial Sequence
  Description of Artificial Sequence: Synthetic oligonucleotide
  Antisense strand to SEQ ID NO: 1574433
gagcaagcgagauucuccc

SEQ ID NO: 1574435 - RNA, 19 nt, Artificial Sequence
  Description of Artificial Sequence: Synthetic oligonucleotide
  Sense strand starting at position 2056 of SEQ ID NO: 1560075
ggucgagaaauguagucau

SEQ ID NO: 1574436 - RNA, 19 nt, Artificial Sequence
  Description of Artificial Sequence: Synthetic oligonucleotide
  Antisense strand to SEQ ID NO: 1574435
augacuacauuucucgacc

SEQ ID NO: 1574437 - RNA, 19 nt, Artificial Sequence
  Description of Artificial Sequence: Synthetic oligonucleotide
  Sense strand starting at position 2246 of SEQ ID NO: 1560075
aggucuacugggugaggaa

SEQ ID NO: 1574438 - RNA, 19 nt, Artificial Sequence
  Description of Artificial Sequence: Synthetic oligonucleotide
  Antisense strand to SEQ ID NO: 1574437
uuccucacccaguagaccu

SEQ ID NO: 1574439 - RNA, 19 nt, Artificial Sequence
  Description of Artificial Sequence: Synthetic oligonucleotide
  Sense strand starting at position 2279 of SEQ ID NO: 1560075
uggcuuaugggcgugguua

SEQ ID NO: 1574440 - RNA, 19 nt, Artificial Sequence
  Description of Artificial Sequence: Synthetic oligonucleotide
  Antisense strand to SEQ ID NO: 1574439
uaaccacgcccauaagcca

SEQ ID NO: 1574441 - RNA, 19 nt, Artificial Sequence
  Description of Artificial Sequence: Synthetic oligonucleotide
  Sense strand starting at position 2280 of SEQ ID NO: 1560075
ggcuuaugggcgugguuau

SEQ ID NO: 1574442 - RNA, 19 nt, Artificial Sequence
  Description of Artificial Sequence: Synthetic oligonucleotide
  Antisense strand to SEQ ID NO: 1574441
auaaccacgcccauaagcc

SEQ ID NO: 1574443 - RNA, 19 nt, Artificial Sequence
  Description of Artificial Sequence: Synthetic oligonucleotide
  Sense strand starting at position 2350 of SEQ ID NO: 1560075
gccacagaguuucuacaag

SEQ ID NO: 1574444 - RNA, 19 nt, Artificial Sequence
  Description of Artificial Sequence: Synthetic oligonucleotide
  Antisense strand to SEQ ID NO: 1574443
cuuguagaaacucuguggc

SEQ ID NO: 1574445 - RNA, 19 nt, Artificial Sequence
  Description of Artificial Sequence: Synthetic oligonucleotide
  Sense strand starting at position 2373 of SEQ ID NO: 1560075
gagggagucugaggaauuu

SEQ ID NO: 1574446 - RNA, 19 nt, Artificial Sequence
  Description of Artificial Sequence: Synthetic oligonucleotide
  Antisense strand to SEQ ID NO: 1574445
aaauuccucagacucccuc

SEQ ID NO: 1574447 - RNA, 19 nt, Artificial Sequence
  Description of Artificial Sequence: Synthetic oligonucleotide
  Sense strand starting at position 2406 of SEQ ID NO: 1560075
aguguucgccugggcgaaa

SEQ ID NO: 1574448 - RNA, 19 nt, Artificial Sequence
  Description of Artificial Sequence: Synthetic oligonucleotide
  Antisense strand to SEQ ID NO: 1574447
uuucgcccaggcgaacacu

SEQ ID NO: 1574449 - RNA, 19 nt, Artificial Sequence
  Description of Artificial Sequence: Synthetic oligonucleotide
  Sense strand starting at position 2409 of SEQ ID NO: 1560075
guucgccugggcgaaauua

SEQ ID NO: 1574450 - RNA, 19 nt, Artificial Sequence
  Description of Artificial Sequence: Synthetic oligonucleotide
  Antisense strand to SEQ ID NO: 1574449
uaauuucgcccaggcgaac

SEQ ID NO: 1574451 - RNA, 19 nt, Artificial Sequence
  Description of Artificial Sequence: Synthetic oligonucleotide
  Sense strand starting at position 2680 of SEQ ID NO: 1560075
ggagguagcagucaauucu

SEQ ID NO: 1574452 - RNA, 19 nt, Artificial Sequence
  Description of Artificial Sequence: Synthetic oligonucleotide
  Antisense strand to SEQ ID NO: 1574451
agaauugacugcuaccucc

SEQ ID NO: 1574453 - RNA, 19 nt, Artificial Sequence
  Description of Artificial Sequence: Synthetic oligonucleotide
  Sense strand starting at position 2744 of SEQ ID NO: 1560075
gaaugacaggcguggucaa

SEQ ID NO: 1574454 - RNA, 19 nt, Artificial Sequence
  Description of Artificial Sequence: Synthetic oligonucleotide
  Antisense strand to SEQ ID NO: 1574453
uugaccacgccugucauuc

SEQ ID NO: 1574455 - RNA, 19 nt, Artificial Sequence
  Description of Artificial Sequence: Synthetic oligonucleotide
  Sense strand starting at position 2780 of SEQ ID NO: 1560075
uacugaagaucuggacaga

SEQ ID NO: 1574456 - RNA, 19 nt, Artificial Sequence
  Description of Artificial Sequence: Synthetic oligonucleotide
  Antisense strand to SEQ ID NO: 1574455
ucuguccagaucuucagua

SEQ ID NO: 1574457 - RNA, 19 nt, Artificial Sequence
  Description of Artificial Sequence: Synthetic oligonucleotide
  Sense strand starting at position 2847 of SEQ ID NO: 1560075
ggaaucaucgcuugagcuc

SEQ ID NO: 1574458 - RNA, 19 nt, Artificial Sequence
  Description of Artificial Sequence: Synthetic oligonucleotide
  Antisense strand to SEQ ID NO: 1574457
gagcucaagcgaugauucc

SEQ ID NO: 1574459 - RNA, 19 nt, Artificial Sequence
  Description of Artificial Sequence: Synthetic oligonucleotide
  Sense strand starting at position 2848 of SEQ ID NO: 1560075
gaaucaucgcuugagcuca

SEQ ID NO: 1574460 - RNA, 19 nt, Artificial Sequence
  Description of Artificial Sequence: Synthetic oligonucleotide
  Antisense strand to SEQ ID NO: 1574459
ugagcucaagcgaugauuc

SEQ ID NO: 1574461 - RNA, 19 nt, Artificial Sequence
  Description of Artificial Sequence: Synthetic oligonucleotide
  Sense strand starting at position 2893 of SEQ ID NO: 1560075
uagcgagcccucgucuuua

SEQ ID NO: 1574462 - RNA, 19 nt, Artificial Sequence
  Description of Artificial Sequence: Synthetic oligonucleotide
  Antisense strand to SEQ ID NO: 1574461
uaaagacgagggcucgcua

SEQ ID NO: 1574463 - RNA, 19 nt, Artificial Sequence
  Description of Artificial Sequence: Synthetic oligonucleotide
  Sense strand starting at position 2897 of SEQ ID NO: 1560075
gagcccucgucuuuacuaa

SEQ ID NO: 1574464 - RNA, 19 nt, Artificial Sequence
  Description of Artificial Sequence: Synthetic oligonucleotide
  Antisense strand to SEQ ID NO: 1574463
uuaguaaagacgagggcuc

SEQ ID NO: 1574465 - RNA, 19 nt, Artificial Sequence
  Description of Artificial Sequence: Synthetic oligonucleotide
  Sense strand starting at position 2898 of SEQ ID NO: 1560075
agcccucgucuuuacuaaa

SEQ ID NO: 1574466 - RNA, 19 nt, Artificial Sequence
  Description of Artificial Sequence: Synthetic oligonucleotide
  Antisense strand to SEQ ID NO: 1574465
uuuaguaaagacgagggcu

SEQ ID NO: 1574467 - RNA, 19 nt, Artificial Sequence
  Description of Artificial Sequence: Synthetic oligonucleotide
  Sense strand starting at position 3189 of SEQ ID NO: 1560075
gagcaagacuccguuaaac

SEQ ID NO: 1574468 - RNA, 19 nt, Artificial Sequence
  Description of Artificial Sequence: Synthetic oligonucleotide
  Antisense strand to SEQ ID NO: 1574467
guuuaacggagucuugcuc

SEQ ID NO: 1574469 - RNA, 19 nt, Artificial Sequence
  Description of Artificial Sequence: Synthetic oligonucleotide
  Sense strand starting at position 3191 of SEQ ID NO: 1560075
gcaagacuccguuaaacaa

SEQ ID NO: 1574470 - RNA, 19 nt, Artificial Sequence
  Description of Artificial Sequence: Synthetic oligonucleotide
  Antisense strand to SEQ ID NO: 1574469
uuguuuaacggagucuugc

SEQ ID NO: 1574471 - RNA, 19 nt, Artificial Sequence
  Description of Artificial Sequence: Synthetic oligonucleotide
  Sense strand starting at position 3434 of SEQ ID NO: 1560075
cacccuaaggcuggaguua

SEQ ID NO: 1574472 - RNA, 19 nt, Artificial Sequence
  Description of Artificial Sequence: Synthetic oligonucleotide
  Antisense strand to SEQ ID NO: 1574471
uaacuccagccuuagggug

SEQ ID NO: 1574473 - RNA, 19 nt, Artificial Sequence
  Description of Artificial Sequence: Synthetic oligonucleotide
  Sense strand starting at position 3435 of SEQ ID NO: 1560075
acccuaaggcuggaguuau

SEQ ID NO: 1574474 - RNA, 19 nt, Artificial Sequence
  Description of Artificial Sequence: Synthetic oligonucleotide
  Antisense strand to SEQ ID NO: 1574473
auaacuccagccuuagggu

SEQ ID NO: 1574475 - RNA, 19 nt, Artificial Sequence
  Description of Artificial Sequence: Synthetic oligonucleotide
  Sense strand starting at position 3548 of SEQ ID NO: 1560075
caaauacagcguuguguau

SEQ ID NO: 1574476 - RNA, 19 nt, Artificial Sequence
  Description of Artificial Sequence: Synthetic oligonucleotide
  Antisense strand to SEQ ID NO: 1574475
auacacaacgcuguauuug

SEQ ID NO: 1574477 - RNA, 19 nt, Artificial Sequence
  Description of Artificial Sequence: Synthetic oligonucleotide
  Sense strand starting at position 3561 of SEQ ID NO: 1560075
guguauacuccaggcacuu

SEQ ID NO: 1574478 - RNA, 19 nt, Artificial Sequence
  Description of Artificial Sequence: Synthetic oligonucleotide
  Antisense strand to SEQ ID NO: 1574477
aagugccuggaguauacac

SEQ ID NO: 1574479 - RNA, 19 nt, Artificial Sequence
  Description of Artificial Sequence: Synthetic oligonucleotide
  Sense strand starting at position 3621 of SEQ ID NO: 1560075
aggugugaguacucuuauu

SEQ ID NO: 1574480 - RNA, 19 nt, Artificial Sequence
  Description of Artificial Sequence: Synthetic oligonucleotide
  Antisense strand to SEQ ID NO: 1574479
aauaagaguacucacaccu

SEQ ID NO: 1574481 - RNA, 19 nt, Artificial Sequence
  Description of Artificial Sequence: Synthetic oligonucleotide
  Sense strand starting at position 3656 of SEQ ID NO: 1560075
gacggagucuuguucucgu

SEQ ID NO: 1574482 - RNA, 19 nt, Artificial Sequence
  Description of Artificial Sequence: Synthetic oligonucleotide
  Antisense strand to SEQ ID NO: 1574481
acgagaacaagacuccguc

SEQ ID NO: 1574483 - RNA, 19 nt, Artificial Sequence
  Description of Artificial Sequence: Synthetic oligonucleotide
  Sense strand starting at position 119 of SEQ ID NO: 1560076
ugagguaaggauugugguu

SEQ ID NO: 1574484 - RNA, 19 nt, Artificial Sequence
  Description of Artificial Sequence: Synthetic oligonucleotide
  Antisense strand to SEQ ID NO: 1574483
aaccacaauccuuaccuca

SEQ ID NO: 1574485 - RNA, 19 nt, Artificial Sequence
  Description of Artificial Sequence: Synthetic oligonucleotide
  Sense strand starting at position 124 of SEQ ID NO: 1560076
uaaggauugugguuguggu

SEQ ID NO: 1574486 - RNA, 19 nt, Artificial Sequence
  Description of Artificial Sequence: Synthetic oligonucleotide
  Antisense strand to SEQ ID NO: 1574485
accacaaccacaauccuua

SEQ ID NO: 1574487 - RNA, 19 nt, Artificial Sequence
  Description of Artificial Sequence: Synthetic oligonucleotide
  Sense strand starting at position 191 of SEQ ID NO: 1560076
ggguacgagguuuaggauu

SEQ ID NO: 1574488 - RNA, 19 nt, Artificial Sequence
  Description of Artificial Sequence: Synthetic oligonucleotide
  Antisense strand to SEQ ID NO: 1574487
aauccuaaaccucguaccc

SEQ ID NO: 1574489 - RNA, 19 nt, Artificial Sequence
  Description of Artificial Sequence: Synthetic oligonucleotide
  Sense strand starting at position 265 of SEQ ID NO: 1560076
gagcuacuccugggauugu

SEQ ID NO: 1574490 - RNA, 19 nt, Artificial Sequence
  Description of Artificial Sequence: Synthetic oligonucleotide
  Antisense strand to SEQ ID NO: 1574489
acaaucccaggaguagcuc

SEQ ID NO: 1574491 - RNA, 19 nt, Artificial Sequence
  Description of Artificial Sequence: Synthetic oligonucleotide
  Sense strand starting at position 509 of SEQ ID NO: 1560076
uggugauggcagugucauu

SEQ ID NO: 1574492 - RNA, 19 nt, Artificial Sequence
  Description of Artificial Sequence: Synthetic oligonucleotide
  Antisense strand to SEQ ID NO: 1574491
aaugacacugccaucacca

SEQ ID NO: 1574493 - RNA, 19 nt, Artificial Sequence
  Description of Artificial Sequence: Synthetic oligonucleotide
  Sense strand starting at position 922 of SEQ ID NO: 1560076
gggacagguuguuccuaga

SEQ ID NO: 1574494 - RNA, 19 nt, Artificial Sequence
  Description of Artificial Sequence: Synthetic oligonucleotide
  Antisense strand to SEQ ID NO: 1574493
ucuaggaacaaccuguccc

SEQ ID NO: 1574495 - RNA, 19 nt, Artificial Sequence
  Description of Artificial Sequence: Synthetic oligonucleotide
  Sense strand starting at position 1118 of SEQ ID NO: 1560076
acagcucugccaugaacuu

SEQ ID NO: 1574496 - RNA, 19 nt, Artificial Sequence
  Description of Artificial Sequence: Synthetic oligonucleotide
  Antisense strand to SEQ ID NO: 1574495
aaguucauggcagagcugu

SEQ ID NO: 1574497 - RNA, 19 nt, Artificial Sequence
  Description of Artificial Sequence: Synthetic oligonucleotide
  Sense strand starting at position 1183 of SEQ ID NO: 1560076
ggugguguaucuuuggaca

SEQ ID NO: 1574498 - RNA, 19 nt, Artificial Sequence
  Description of Artificial Sequence: Synthetic oligonucleotide
  Antisense strand to SEQ ID NO: 1574497
uguccaaagauacaccacc

SEQ ID NO: 1574499 - RNA, 19 nt, Artificial Sequence
  Description of Artificial Sequence: Synthetic oligonucleotide
  Sense strand starting at position 1250 of SEQ ID NO: 1560076
uuuggaugguaucaaaggu

SEQ ID NO: 1574500 - RNA, 19 nt, Artificial Sequence
  Description of Artificial Sequence: Synthetic oligonucleotide
  Antisense strand to SEQ ID NO: 1574499
accuuugauaccauccaaa

SEQ ID NO: 1574501 - RNA, 19 nt, Artificial Sequence
  Description of Artificial Sequence: Synthetic oligonucleotide
  Sense strand starting at position 1258 of SEQ ID NO: 1560076
guaucaaaggugcguauga

SEQ ID NO: 1574502 - RNA, 19 nt, Artificial Sequence
  Description of Artificial Sequence: Synthetic oligonucleotide
  Antisense strand to SEQ ID NO: 1574501
ucauacgcaccuuugauac

SEQ ID NO: 1574503 - RNA, 19 nt, Artificial Sequence
  Description of Artificial Sequence: Synthetic oligonucleotide
  Sense strand starting at position 1260 of SEQ ID NO: 1560076
aucaaaggugcguaugaca

SEQ ID NO: 1574504 - RNA, 19 nt, Artificial Sequence
  Description of Artificial Sequence: Synthetic oligonucleotide
  Antisense strand to SEQ ID NO: 1574503
ugucauacgcaccuuugau

SEQ ID NO: 1574505 - RNA, 19 nt, Artificial Sequence
  Description of Artificial Sequence: Synthetic oligonucleotide
  Sense strand starting at position 1284 of SEQ ID NO: 1560076
gggucugguaagugcuaaa

SEQ ID NO: 1574506 - RNA, 19 nt, Artificial Sequence
  Description of Artificial Sequence: Synthetic oligonucleotide
  Antisense strand to SEQ ID NO: 1574505
uuuagcacuuaccagaccc

SEQ ID NO: 1574507 - RNA, 19 nt, Artificial Sequence
  Description of Artificial Sequence: Synthetic oligonucleotide
  Sense strand starting at position 1360 of SEQ ID NO: 1560076
cuugguuuauucuuggaaa

SEQ ID NO: 1574508 - RNA, 19 nt, Artificial Sequence
  Description of Artificial Sequence: Synthetic oligonucleotide
  Antisense strand to SEQ ID NO: 1574507
uuuccaagaauaaaccaag

SEQ ID NO: 1574509 - RNA, 19 nt, Artificial Sequence
  Description of Artificial Sequence: Synthetic oligonucleotide
  Sense strand starting at position 1362 of SEQ ID NO: 1560076
ugguuuauucuuggaaauu

SEQ ID NO: 1574510 - RNA, 19 nt, Artificial Sequence
  Description of Artificial Sequence: Synthetic oligonucleotide
  Antisense strand to SEQ ID NO: 1574509
aauuuccaagaauaaacca

SEQ ID NO: 1574511 - RNA, 19 nt, Artificial Sequence
  Description of Artificial Sequence: Synthetic oligonucleotide
  Sense strand starting at position 1363 of SEQ ID NO: 1560076
gguuuauucuuggaaauuu

SEQ ID NO: 1574512 - RNA, 19 nt, Artificial Sequence
  Description of Artificial Sequence: Synthetic oligonucleotide
  Antisense strand to SEQ ID NO: 1574511
aaauuuccaagaauaaacc

SEQ ID NO: 1574513 - RNA, 19 nt, Artificial Sequence
  Description of Artificial Sequence: Synthetic oligonucleotide
  Sense strand starting at position 1376 of SEQ ID NO: 1560076
aaauuucuguucgaugagu

SEQ ID NO: 1574514 - RNA, 19 nt, Artificial Sequence
  Description of Artificial Sequence: Synthetic oligonucleotide
  Antisense strand to SEQ ID NO: 1574513
acucaucgaacagaaauuu

SEQ ID NO: 1574515 - RNA, 19 nt, Artificial Sequence
  Description of Artificial Sequence: Synthetic oligonucleotide
  Sense strand starting at position 1378 of SEQ ID NO: 1560076
auuucuguucgaugaguau

SEQ ID NO: 1574516 - RNA, 19 nt, Artificial Sequence
  Description of Artificial Sequence: Synthetic oligonucleotide
  Antisense strand to SEQ ID NO: 1574515
auacucaucgaacagaaau

SEQ ID NO: 1574517 - RNA, 19 nt, Artificial Sequence
  Description of Artificial Sequence: Synthetic oligonucleotide
  Sense strand starting at position 1387 of SEQ ID NO: 1560076
cgaugaguaucuguuucua

SEQ ID NO: 1574518 - RNA, 19 nt, Artificial Sequence
  Description of Artificial Sequence: Synthetic oligonucleotide
  Antisense strand to SEQ ID NO: 1574517
uagaaacagauacucaucg

SEQ ID NO: 1574519 - RNA, 19 nt, Artificial Sequence
  Description of Artificial Sequence: Synthetic oligonucleotide
  Sense strand starting at position 1714 of SEQ ID NO: 1560076
cuaaguaucucgcucaacu

SEQ ID NO: 1574520 - RNA, 19 nt, Artificial Sequence
  Description of Artificial Sequence: Synthetic oligonucleotide
  Antisense strand to SEQ ID NO: 1574519
aguugagcgagauacuuag

SEQ ID NO: 1574521 - RNA, 19 nt, Artificial Sequence
  Description of Artificial Sequence: Synthetic oligonucleotide
  Sense strand starting at position 1753 of SEQ ID NO: 1560076
uucuguaccuaugugauga

SEQ ID NO: 1574522 - RNA, 19 nt, Artificial Sequence
  Description of Artificial Sequence: Synthetic oligonucleotide
  Antisense strand to SEQ ID NO: 1574521
ucaucacauagguacagaa

SEQ ID NO: 1574523 - RNA, 19 nt, Artificial Sequence
  Description of Artificial Sequence: Synthetic oligonucleotide
  Sense strand starting at position 1880 of SEQ ID NO: 1560076
ucaggaggucuuuguuugu

SEQ ID NO: 1574524 - RNA, 19 nt, Artificial Sequence
  Description of Artificial Sequence: Synthetic oligonucleotide
  Antisense strand to SEQ ID NO: 1574523
acaaacaaagaccuccuga

SEQ ID NO: 1574525 - RNA, 19 nt, Artificial Sequence
  Description of Artificial Sequence: Synthetic oligonucleotide
  Sense strand starting at position 1884 of SEQ ID NO: 1560076
gaggucuuuguuugucuca

SEQ ID NO: 1574526 - RNA, 19 nt, Artificial Sequence
  Description of Artificial Sequence: Synthetic oligonucleotide
  Antisense strand to SEQ ID NO: 1574525
ugagacaaacaaagaccuc

SEQ ID NO: 1574527 - RNA, 19 nt, Artificial Sequence
  Description of Artificial Sequence: Synthetic oligonucleotide
  Sense strand starting at position 2069 of SEQ ID NO: 1560076
cgcggaguuauccgggauc

SEQ ID NO: 1574528 - RNA, 19 nt, Artificial Sequence
  Description of Artificial Sequence: Synthetic oligonucleotide
  Antisense strand to SEQ ID NO: 1574527
gaucccggauaacuccgcg

SEQ ID NO: 1574529 - RNA, 19 nt, Artificial Sequence
  Description of Artificial Sequence: Synthetic oligonucleotide
  Sense strand starting at position 2072 of SEQ ID NO: 1560076
ggaguuauccgggauccca

SEQ ID NO: 1574530 - RNA, 19 nt, Artificial Sequence
  Description of Artificial Sequence: Synthetic oligonucleotide
  Antisense strand to SEQ ID NO: 1574529
ugggaucccggauaacucc

SEQ ID NO: 1574531 - RNA, 19 nt, Artificial Sequence
  Description of Artificial Sequence: Synthetic oligonucleotide
  Sense strand starting at position 2667 of SEQ ID NO: 1560076
acagauucuuuaggacuca

SEQ ID NO: 1574532 - RNA, 19 nt, Artificial Sequence
  Description of Artificial Sequence: Synthetic oligonucleotide
  Antisense strand to SEQ ID NO: 1574531
ugaguccuaaagaaucugu

SEQ ID NO: 1574533 - RNA, 19 nt, Artificial Sequence
  Description of Artificial Sequence: Synthetic oligonucleotide
  Sense strand starting at position 2748 of SEQ ID NO: 1560076
ggaggucuuagccauucua

SEQ ID NO: 1574534 - RNA, 19 nt, Artificial Sequence
  Description of Artificial Sequence: Synthetic oligonucleotide
  Antisense strand to SEQ ID NO: 1574533
uagaauggcuaagaccucc

SEQ ID NO: 1574535 - RNA, 19 nt, Artificial Sequence
  Description of Artificial Sequence: Synthetic oligonucleotide
  Sense strand starting at position 2781 of SEQ ID NO: 1560076
cuaggugccgugucucuaa

SEQ ID NO: 1574536 - RNA, 19 nt, Artificial Sequence
  Description of Artificial Sequence: Synthetic oligonucleotide
  Antisense strand to SEQ ID NO: 1574535
uuagagacacggcaccuag

SEQ ID NO: 1574537 - RNA, 19 nt, Artificial Sequence
  Description of Artificial Sequence: Synthetic oligonucleotide
  Sense strand starting at position 2886 of SEQ ID NO: 1560076
ugugauauuacuuguguau

SEQ ID NO: 1574538 - RNA, 19 nt, Artificial Sequence
  Description of Artificial Sequence: Synthetic oligonucleotide
  Antisense strand to SEQ ID NO: 1574537
auacacaaguaauaucaca

SEQ ID NO: 1574539 - RNA, 19 nt, Artificial Sequence
  Description of Artificial Sequence: Synthetic oligonucleotide
  Sense strand starting at position 2889 of SEQ ID NO: 1560076
gauauuacuuguguauuag

SEQ ID NO: 1574540 - RNA, 19 nt, Artificial Sequence
  Description of Artificial Sequence: Synthetic oligonucleotide
  Antisense strand to SEQ ID NO: 1574539
cuaauacacaaguaauauc

SEQ ID NO: 1574541 - RNA, 19 nt, Artificial Sequence
  Description of Artificial Sequence: Synthetic oligonucleotide
  Sense strand starting at position 2895 of SEQ ID NO: 1560076
acuuguguauuaguagaca

SEQ ID NO: 1574542 - RNA, 19 nt, Artificial Sequence
  Description of Artificial Sequence: Synthetic oligonucleotide
  Antisense strand to SEQ ID NO: 1574541
ugucuacuaauacacaagu

SEQ ID NO: 1574543 - RNA, 19 nt, Artificial Sequence
  Description of Artificial Sequence: Synthetic oligonucleotide
  Sense strand starting at position 2969 of SEQ ID NO: 1560076
ggugguugugacaguguuu

SEQ ID NO: 1574544 - RNA, 19 nt, Artificial Sequence
  Description of Artificial Sequence: Synthetic oligonucleotide
  Antisense strand to SEQ ID NO: 1574543
aaacacugucacaaccacc

SEQ ID NO: 1574545 - RNA, 19 nt, Artificial Sequence
  Description of Artificial Sequence: Synthetic oligonucleotide
  Sense strand starting at position 2990 of SEQ ID NO: 1560076
cugagaagcaaucgucauu

SEQ ID NO: 1574546 - RNA, 19 nt, Artificial Sequence
  Description of Artificial Sequence: Synthetic oligonucleotide
  Antisense strand to SEQ ID NO: 1574545
aaugacgauugcuucucag

SEQ ID NO: 1574547 - RNA, 19 nt, Artificial Sequence
  Description of Artificial Sequence: Synthetic oligonucleotide
  Sense strand starting at position 2993 of SEQ ID NO: 1560076
agaagcaaucgucauuauu

SEQ ID NO: 1574548 - RNA, 19 nt, Artificial Sequence
  Description of Artificial Sequence: Synthetic oligonucleotide
  Antisense strand to SEQ ID NO: 1574547
aauaaugacgauugcuucu

SEQ ID NO: 1574549 - RNA, 19 nt, Artificial Sequence
  Description of Artificial Sequence: Synthetic oligonucleotide
  Sense strand starting at position 2996 of SEQ ID NO: 1560076
agcaaucgucauuauuaca

SEQ ID NO: 1574550 - RNA, 19 nt, Artificial Sequence
  Description of Artificial Sequence: Synthetic oligonucleotide
  Antisense strand to SEQ ID NO: 1574549
uguaauaaugacgauugcu

SEQ ID NO: 1574551 - RNA, 19 nt, Artificial Sequence
  Description of Artificial Sequence: Synthetic oligonucleotide
  Sense strand starting at position 3144 of SEQ ID NO: 1560076
agcauauauucuguaagaa

SEQ ID NO: 1574552 - RNA, 19 nt, Artificial Sequence
  Description of Artificial Sequence: Synthetic oligonucleotide
  Antisense strand to SEQ ID NO: 1574551
uucuuacagaauauaugcu

SEQ ID NO: 1574553 - RNA, 19 nt, Artificial Sequence
  Description of Artificial Sequence: Synthetic oligonucleotide
  Sense strand starting at position 3145 of SEQ ID NO: 1560076
gcauauauucuguaagaau

SEQ ID NO: 1574554 - RNA, 19 nt, Artificial Sequence
  Description of Artificial Sequence: Synthetic oligonucleotide
  Antisense strand to SEQ ID NO: 1574553
auucuuacagaauauaugc

SEQ ID NO: 1574555 - RNA, 19 nt, Artificial Sequence
  Description of Artificial Sequence: Synthetic oligonucleotide
  Sense strand starting at position 3168 of SEQ ID NO: 1560076
accugaagaugucaaauca

SEQ ID NO: 1574556 - RNA, 19 nt, Artificial Sequence
  Description of Artificial Sequence: Synthetic oligonucleotide
  Antisense strand to SEQ ID NO: 1574555
ugauuugacaucuucaggu

SEQ ID NO: 1574557 - RNA, 19 nt, Artificial Sequence
  Description of Artificial Sequence: Synthetic oligonucleotide
  Sense strand starting at position 3176 of SEQ ID NO: 1560076
augucaaaucagggcaaga

SEQ ID NO: 1574558 - RNA, 19 nt, Artificial Sequence
  Description of Artificial Sequence: Synthetic oligonucleotide
  Antisense strand to SEQ ID NO: 1574557
ucuugcccugauuugacau

SEQ ID NO: 1574559 - RNA, 19 nt, Artificial Sequence
  Description of Artificial Sequence: Synthetic oligonucleotide
  Sense strand starting at position 3826 of SEQ ID NO: 1560076
ggaacagcuucugaaagua

SEQ ID NO: 1574560 - RNA, 19 nt, Artificial Sequence
  Description of Artificial Sequence: Synthetic oligonucleotide
  Antisense strand to SEQ ID NO: 1574559
uacuuucagaagcuguucc

SEQ ID NO: 1574561 - RNA, 19 nt, Artificial Sequence
  Description of Artificial Sequence: Synthetic oligonucleotide
  Sense strand starting at position 3886 of SEQ ID NO: 1560076
agaggaguggcauagguau

SEQ ID NO: 1574562 - RNA, 19 nt, Artificial Sequence
  Description of Artificial Sequence: Synthetic oligonucleotide
  Antisense strand to SEQ ID NO: 1574561
auaccuaugccacuccucu

SEQ ID NO: 1574563 - RNA, 19 nt, Artificial Sequence
  Description of Artificial Sequence: Synthetic oligonucleotide
  Sense strand starting at position 63 of SEQ ID NO: 1560077
agaagaaauccucguugaa

SEQ ID NO: 1574564 - RNA, 19 nt, Artificial Sequence
  Description of Artificial Sequence: Synthetic oligonucleotide
  Antisense strand to SEQ ID NO: 1574563
uucaacgaggauuucuucu

SEQ ID NO: 1574565 - RNA, 19 nt, Artificial Sequence
  Description of Artificial Sequence: Synthetic oligonucleotide
  Sense strand starting at position 66 of SEQ ID NO: 1560077
agaaauccucguugaagac

SEQ ID NO: 1574566 - RNA, 19 nt, Artificial Sequence
  Description of Artificial Sequence: Synthetic oligonucleotide
  Antisense strand to SEQ ID NO: 1574565
gucuucaacgaggauuucu

SEQ ID NO: 1574567 - RNA, 19 nt, Artificial Sequence
  Description of Artificial Sequence: Synthetic oligonucleotide
  Sense strand starting at position 90 of SEQ ID NO: 1560077
ggcggcuguucuucacgau

SEQ ID NO: 1574568 - RNA, 19 nt, Artificial Sequence
  Description of Artificial Sequence: Synthetic oligonucleotide
  Antisense strand to SEQ ID NO: 1574567
aucgugaagaacagccgcc

SEQ ID NO: 1574569 - RNA, 19 nt, Artificial Sequence
  Description of Artificial Sequence: Synthetic oligonucleotide
  Sense strand starting at position 93 of SEQ ID NO: 1560077
ggcuguucuucacgauggu

SEQ ID NO: 1574570 - RNA, 19 nt, Artificial Sequence
  Description of Artificial Sequence: Synthetic oligonucleotide
  Antisense strand to SEQ ID NO: 1574569
accaucgugaagaacagcc

SEQ ID NO: 1574571 - RNA, 19 nt, Artificial Sequence
  Description of Artificial Sequence: Synthetic oligonucleotide
  Sense strand starting at position 451 of SEQ ID NO: 1560077
cuggcuguccugggcgaaa

SEQ ID NO: 1574572 - RNA, 19 nt, Artificial Sequence
  Description of Artificial Sequence: Synthetic oligonucleotide
  Antisense strand to SEQ ID NO: 1574571
uuucgcccaggacagccag

SEQ ID NO: 1574573 - RNA, 19 nt, Artificial Sequence
  Description of Artificial Sequence: Synthetic oligonucleotide
  Sense strand starting at position 462 of SEQ ID NO: 1560077
gggcgaaaccuuugagcag

SEQ ID NO: 1574574 - RNA, 19 nt, Artificial Sequence
  Description of Artificial Sequence: Synthetic oligonucleotide
  Antisense strand to SEQ ID NO: 1574573
cugcucaaagguuucgccc

SEQ ID NO: 1574575 - RNA, 19 nt, Artificial Sequence
  Description of Artificial Sequence: Synthetic oligonucleotide
  Sense strand starting at position 1051 of SEQ ID NO: 1560077
gaucuugucgggcgucaac

SEQ ID NO: 1574576 - RNA, 19 nt, Artificial Sequence
  Description of Artificial Sequence: Synthetic oligonucleotide
  Antisense strand to SEQ ID NO: 1574575
guugacgcccgacaagauc

SEQ ID NO: 1574577 - RNA, 19 nt, Artificial Sequence
  Description of Artificial Sequence: Synthetic oligonucleotide
  Sense strand starting at position 1062 of SEQ ID NO: 1560077
gcgucaacacauugcugua

SEQ ID NO: 1574578 - RNA, 19 nt, Artificial Sequence
  Description of Artificial Sequence: Synthetic oligonucleotide
  Antisense strand to SEQ ID NO: 1574577
uacagcaauguguugacgc

SEQ ID NO: 1574579 - RNA, 19 nt, Artificial Sequence
  Description of Artificial Sequence: Synthetic oligonucleotide
  Sense strand starting at position 1859 of SEQ ID NO: 1560077
ccggaggucuguucgcaga

SEQ ID NO: 1574580 - RNA, 19 nt, Artificial Sequence
  Description of Artificial Sequence: Synthetic oligonucleotide
  Antisense strand to SEQ ID NO: 1574579
ucugcgaacagaccuccgg

SEQ ID NO: 1574581 - RNA, 19 nt, Artificial Sequence
  Description of Artificial Sequence: Synthetic oligonucleotide
  Sense strand starting at position 1861 of SEQ ID NO: 1560077
ggaggucuguucgcagaca

SEQ ID NO: 1574582 - RNA, 19 nt, Artificial Sequence
  Description of Artificial Sequence: Synthetic oligonucleotide
  Antisense strand to SEQ ID NO: 1574581
ugucugcgaacagaccucc

SEQ ID NO: 1574583 - RNA, 19 nt, Artificial Sequence
  Description of Artificial Sequence: Synthetic oligonucleotide
  Sense strand starting at position 2020 of SEQ ID NO: 1560077
cgccguauuccuccgagua

SEQ ID NO: 1574584 - RNA, 19 nt, Artificial Sequence
  Description of Artificial Sequence: Synthetic oligonucleotide
  Antisense strand to SEQ ID NO: 1574583
uacucggaggaauacggcg

SEQ ID NO: 1574585 - RNA, 19 nt, Artificial Sequence
  Description of Artificial Sequence: Synthetic oligonucleotide
  Sense strand starting at position 2021 of SEQ ID NO: 1560077
gccguauuccuccgaguac

SEQ ID NO: 1574586 - RNA, 19 nt, Artificial Sequence
  Description of Artificial Sequence: Synthetic oligonucleotide
  Antisense strand to SEQ ID NO: 1574585
guacucggaggaauacggc

SEQ ID NO: 1574587 - RNA, 19 nt, Artificial Sequence
  Description of Artificial Sequence: Synthetic oligonucleotide
  Sense strand starting at position 2302 of SEQ ID NO: 1560077
cgaggagcuuucccgacua

SEQ ID NO: 1574588 - RNA, 19 nt, Artificial Sequence
  Description of Artificial Sequence: Synthetic oligonucleotide
  Antisense strand to SEQ ID NO: 1574587
uagucgggaaagcuccucg

SEQ ID NO: 1574589 - RNA, 19 nt, Artificial Sequence
  Description of Artificial Sequence: Synthetic oligonucleotide
  Sense strand starting at position 2304 of SEQ ID NO: 1560077
aggagcuuucccgacuaac

SEQ ID NO: 1574590 - RNA, 19 nt, Artificial Sequence
  Description of Artificial Sequence: Synthetic oligonucleotide
  Antisense strand to SEQ ID NO: 1574589
guuagucgggaaagcuccu

SEQ ID NO: 1574591 - RNA, 19 nt, Artificial Sequence
  Description of Artificial Sequence: Synthetic oligonucleotide
  Sense strand starting at position 2316 of SEQ ID NO: 1560077
gacuaacgacgacgaauua

SEQ ID NO: 1574592 - RNA, 19 nt, Artificial Sequence
  Description of Artificial Sequence: Synthetic oligonucleotide
  Antisense strand to SEQ ID NO: 1574591
uaauucgucgucguuaguc

SEQ ID NO: 1574593 - RNA, 19 nt, Artificial Sequence
  Description of Artificial Sequence: Synthetic oligonucleotide
  Sense strand starting at position 2363 of SEQ ID NO: 1560077
ggguuuaugauggagcguu

SEQ ID NO: 1574594 - RNA, 19 nt, Artificial Sequence
  Description of Artificial Sequence: Synthetic oligonucleotide
  Antisense strand to SEQ ID NO: 1574593
aacgcuccaucauaaaccc

SEQ ID NO: 1574595 - RNA, 19 nt, Artificial Sequence
  Description of Artificial Sequence: Synthetic oligonucleotide
  Sense strand starting at position 2364 of SEQ ID NO: 1560077
gguuuaugauggagcguuu

SEQ ID NO: 1574596 - RNA, 19 nt, Artificial Sequence
  Description of Artificial Sequence: Synthetic oligonucleotide
  Antisense strand to SEQ ID NO: 1574595
aaacgcuccaucauaaacc

SEQ ID NO: 1574597 - RNA, 19 nt, Artificial Sequence
  Description of Artificial Sequence: Synthetic oligonucleotide
  Sense strand starting at position 2375 of SEQ ID NO: 1560077
gagcguuuccucccugcca

SEQ ID NO: 1574598 - RNA, 19 nt, Artificial Sequence
  Description of Artificial Sequence: Synthetic oligonucleotide
  Antisense strand to SEQ ID NO: 1574597
uggcagggaggaaacgcuc

SEQ ID NO: 1574599 - RNA, 19 nt, Artificial Sequence
  Description of Artificial Sequence: Synthetic oligonucleotide
  Sense strand starting at position 2520 of SEQ ID NO: 1560077
gacagcaggucuuacuaaa

SEQ ID NO: 1574600 - RNA, 19 nt, Artificial Sequence
  Description of Artificial Sequence: Synthetic oligonucleotide
  Antisense strand to SEQ ID NO: 1574599
uuuaguaagaccugcuguc

SEQ ID NO: 1574601 - RNA, 19 nt, Artificial Sequence
  Description of Artificial Sequence: Synthetic oligonucleotide
  Sense strand starting at position 2527 of SEQ ID NO: 1560077
ggucuuacuaaaugggcaa

SEQ ID NO: 1574602 - RNA, 19 nt, Artificial Sequence
  Description of Artificial Sequence: Synthetic oligonucleotide
  Antisense strand to SEQ ID NO: 1574601
uugcccauuuaguaagacc

SEQ ID NO: 1574603 - RNA, 19 nt, Artificial Sequence
  Description of Artificial Sequence: Synthetic oligonucleotide
  Sense strand starting at position 2806 of SEQ ID NO: 1560077
ggcacaugcgugugauuca

SEQ ID NO: 1574604 - RNA, 19 nt, Artificial Sequence
  Description of Artificial Sequence: Synthetic oligonucleotide
  Antisense strand to SEQ ID NO: 1574603
ugaaucacacgcaugugcc

SEQ ID NO: 1574605 - RNA, 19 nt, Artificial Sequence
  Description of Artificial Sequence: Synthetic oligonucleotide
  Sense strand starting at position 2811 of SEQ ID NO: 1560077
augcgugugauucacggau

SEQ ID NO: 1574606 - RNA, 19 nt, Artificial Sequence
  Description of Artificial Sequence: Synthetic oligonucleotide
  Antisense strand to SEQ ID NO: 1574605
auccgugaaucacacgcau

SEQ ID NO: 1574607 - RNA, 19 nt, Artificial Sequence
  Description of Artificial Sequence: Synthetic oligonucleotide
  Sense strand starting at position 2815 of SEQ ID NO: 1560077
gugugauucacggauggag

SEQ ID NO: 1574608 - RNA, 19 nt, Artificial Sequence
  Description of Artificial Sequence: Synthetic oligonucleotide
  Antisense strand to SEQ ID NO: 1574607
cuccauccgugaaucacac

SEQ ID NO: 1574609 - RNA, 19 nt, Artificial Sequence
  Description of Artificial Sequence: Synthetic oligonucleotide
  Sense strand starting at position 2817 of SEQ ID NO: 1560077
gugauucacggauggagaa

SEQ ID NO: 1574610 - RNA, 19 nt, Artificial Sequence
  Description of Artificial Sequence: Synthetic oligonucleotide
  Antisense strand to SEQ ID NO: 1574609
uucuccauccgugaaucac

SEQ ID NO: 1574611 - RNA, 19 nt, Artificial Sequence
  Description of Artificial Sequence: Synthetic oligonucleotide
  Sense strand starting at position 2876 of SEQ ID NO: 1560077
ggcaguuccugagaccaca

SEQ ID NO: 1574612 - RNA, 19 nt, Artificial Sequence
  Description of Artificial Sequence: Synthetic oligonucleotide
  Antisense strand to SEQ ID NO: 1574611
uguggucucaggaacugcc

SEQ ID NO: 1574613 - RNA, 19 nt, Artificial Sequence
  Description of Artificial Sequence: Synthetic oligonucleotide
  Sense strand starting at position 3108 of SEQ ID NO: 1560077
uggcgcuuuauugaauuau

SEQ ID NO: 1574614 - RNA, 19 nt, Artificial Sequence
  Description of Artificial Sequence: Synthetic oligonucleotide
  Antisense strand to SEQ ID NO: 1574613
auaauucaauaaagcgcca

SEQ ID NO: 1574615 - RNA, 19 nt, Artificial Sequence
  Description of Artificial Sequence: Synthetic oligonucleotide
  Sense strand starting at position 3118 of SEQ ID NO: 1560077
uugaauuauugauugucca

SEQ ID NO: 1574616 - RNA, 19 nt, Artificial Sequence
  Description of Artificial Sequence: Synthetic oligonucleotide
  Antisense strand to SEQ ID NO: 1574615
uggacaaucaauaauucaa

SEQ ID NO: 1574617 - RNA, 19 nt, Artificial Sequence
  Description of Artificial Sequence: Synthetic oligonucleotide
  Sense strand starting at position 3119 of SEQ ID NO: 1560077
ugaauuauugauuguccag

SEQ ID NO: 1574618 - RNA, 19 nt, Artificial Sequence
  Description of Artificial Sequence: Synthetic oligonucleotide
  Antisense strand to SEQ ID NO: 1574617
cuggacaaucaauaauuca

SEQ ID NO: 1574619 - RNA, 19 nt, Artificial Sequence
  Description of Artificial Sequence: Synthetic oligonucleotide
  Sense strand starting at position 3121 of SEQ ID NO: 1560077
aauuauugauuguccagga

SEQ ID NO: 1574620 - RNA, 19 nt, Artificial Sequence
  Description of Artificial Sequence: Synthetic oligonucleotide
  Antisense strand to SEQ ID NO: 1574619
uccuggacaaucaauaauu

SEQ ID NO: 1574621 - RNA, 19 nt, Artificial Sequence
  Description of Artificial Sequence: Synthetic oligonucleotide
  Sense strand starting at position 3125 of SEQ ID NO: 1560077
auugauuguccaggagccu

SEQ ID NO: 1574622 - RNA, 19 nt, Artificial Sequence
  Description of Artificial Sequence: Synthetic oligonucleotide
  Antisense strand to SEQ ID NO: 1574621
aggcuccuggacaaucaau

SEQ ID NO: 1574623 - RNA, 19 nt, Artificial Sequence
  Description of Artificial Sequence: Synthetic oligonucleotide
  Sense strand starting at position 3141 of SEQ ID NO: 1560077
ccuccugcauucugggaau

SEQ ID NO: 1574624 - RNA, 19 nt, Artificial Sequence
  Description of Artificial Sequence: Synthetic oligonucleotide
  Antisense strand to SEQ ID NO: 1574623
auucccagaaugcaggagg

SEQ ID NO: 1574625 - RNA, 19 nt, Artificial Sequence
  Description of Artificial Sequence: Synthetic oligonucleotide
  Sense strand starting at position 3143 of SEQ ID NO: 1560077
uccugcauucugggaaugu

SEQ ID NO: 1574626 - RNA, 19 nt, Artificial Sequence
  Description of Artificial Sequence: Synthetic oligonucleotide
  Antisense strand to SEQ ID NO: 1574625
acauucccagaaugcagga

SEQ ID NO: 1574627 - RNA, 19 nt, Artificial Sequence
  Description of Artificial Sequence: Synthetic oligonucleotide
  Sense strand starting at position 572 of SEQ ID NO: 1560078
acagucuucucacuggaca

SEQ ID NO: 1574628 - RNA, 19 nt, Artificial Sequence
  Description of Artificial Sequence: Synthetic oligonucleotide
  Antisense strand to SEQ ID NO: 1574627
uguccagugagaagacugu

SEQ ID NO: 1574629 - RNA, 19 nt, Artificial Sequence
  Description of Artificial Sequence: Synthetic oligonucleotide
  Sense strand starting at position 606 of SEQ ID NO: 1560078
cugggaagucguggacagu

SEQ ID NO: 1574630 - RNA, 19 nt, Artificial Sequence
  Description of Artificial Sequence: Synthetic oligonucleotide
  Antisense strand to SEQ ID NO: 1574629
acuguccacgacuucccag

SEQ ID NO: 1574631 - RNA, 19 nt, Artificial Sequence
  Description of Artificial Sequence: Synthetic oligonucleotide
  Sense strand starting at position 607 of SEQ ID NO: 1560078
ugggaagucguggacagua

SEQ ID NO: 1574632 - RNA, 19 nt, Artificial Sequence
  Description of Artificial Sequence: Synthetic oligonucleotide
  Antisense strand to SEQ ID NO: 1574631
uacuguccacgacuuccca

SEQ ID NO: 1574633 - RNA, 19 nt, Artificial Sequence
  Description of Artificial Sequence: Synthetic oligonucleotide
  Sense strand starting at position 623 of SEQ ID NO: 1560078
guaacagugacuggaacau

SEQ ID NO: 1574634 - RNA, 19 nt, Artificial Sequence
  Description of Artificial Sequence: Synthetic oligonucleotide
  Antisense strand to SEQ ID NO: 1574633
auguuccagucacuguuac

SEQ ID NO: 1574635 - RNA, 19 nt, Artificial Sequence
  Description of Artificial Sequence: Synthetic oligonucleotide
  Sense strand starting at position 748 of SEQ ID NO: 1560078
cuugucauuccacggaugu

SEQ ID NO: 1574636 - RNA, 19 nt, Artificial Sequence
  Description of Artificial Sequence: Synthetic oligonucleotide
  Antisense strand to SEQ ID NO: 1574635
acauccguggaaugacaag

SEQ ID NO: 1574637 - RNA, 19 nt, Artificial Sequence
  Description of Artificial Sequence: Synthetic oligonucleotide
  Sense strand starting at position 750 of SEQ ID NO: 1560078
ugucauuccacggauguga

SEQ ID NO: 1574638 - RNA, 19 nt, Artificial Sequence
  Description of Artificial Sequence: Synthetic oligonucleotide
  Antisense strand to SEQ ID NO: 1574637
ucacauccguggaaugaca

SEQ ID NO: 1574639 - RNA, 19 nt, Artificial Sequence
  Description of Artificial Sequence: Synthetic oligonucleotide
  Sense strand starting at position 752 of SEQ ID NO: 1560078
ucauuccacggaugugaga

SEQ ID NO: 1574640 - RNA, 19 nt, Artificial Sequence
  Description of Artificial Sequence: Synthetic oligonucleotide
  Antisense strand to SEQ ID NO: 1574639
ucucacauccguggaauga

SEQ ID NO: 1574641 - RNA, 19 nt, Artificial Sequence
  Description of Artificial Sequence: Synthetic oligonucleotide
  Sense strand starting at position 865 of SEQ ID NO: 1560078
ccauuaucuucucugggca

SEQ ID NO: 1574642 - RNA, 19 nt, Artificial Sequence
  Description of Artificial Sequence: Synthetic oligonucleotide
  Antisense strand to SEQ ID NO: 1574641
ugcccagagaagauaaugg

SEQ ID NO: 1574643 - RNA, 19 nt, Artificial Sequence
  Description of Artificial Sequence: Synthetic oligonucleotide
  Sense strand starting at position 1549 of SEQ ID NO: 1560078
ccacgauaccuggauucca

SEQ ID NO: 1574644 - RNA, 19 nt, Artificial Sequence
  Description of Artificial Sequence: Synthetic oligonucleotide
  Antisense strand to SEQ ID NO: 1574643
uggaauccagguaucgugg

SEQ ID NO: 1574645 - RNA, 19 nt, Artificial Sequence
  Description of Artificial Sequence: Synthetic oligonucleotide
  Sense strand starting at position 1802 of SEQ ID NO: 1560078
cccuguuuguggguagagu

SEQ ID NO: 1574646 - RNA, 19 nt, Artificial Sequence
  Description of Artificial Sequence: Synthetic oligonucleotide
  Antisense strand to SEQ ID NO: 1574645
acucuacccacaaacaggg

SEQ ID NO: 1574647 - RNA, 19 nt, Artificial Sequence
  Description of Artificial Sequence: Synthetic oligonucleotide
  Sense strand starting at position 1804 of SEQ ID NO: 1560078
cuguuuguggguagaguca

SEQ ID NO: 1574648 - RNA, 19 nt, Artificial Sequence
  Description of Artificial Sequence: Synthetic oligonucleotide
  Antisense strand to SEQ ID NO: 1574647
ugacucuacccacaaacag

SEQ ID NO: 1574649 - RNA, 19 nt, Artificial Sequence
  Description of Artificial Sequence: Synthetic oligonucleotide
  Sense strand starting at position 2323 of SEQ ID NO: 1560078
cguuuaucagucgaacacu

SEQ ID NO: 1574650 - RNA, 19 nt, Artificial Sequence
  Description of Artificial Sequence: Synthetic oligonucleotide
  Antisense strand to SEQ ID NO: 1574649
aguguucgacugauaaacg

SEQ ID NO: 1574651 - RNA, 19 nt, Artificial Sequence
  Description of Artificial Sequence: Synthetic oligonucleotide
  Sense strand starting at position 2332 of SEQ ID NO: 1560078
gucgaacacuuccuaggaa

SEQ ID NO: 1574652 - RNA, 19 nt, Artificial Sequence
  Description of Artificial Sequence: Synthetic oligonucleotide
  Antisense strand to SEQ ID NO: 1574651
uuccuaggaaguguucgac

SEQ ID NO: 1574653 - RNA, 19 nt, Artificial Sequence
  Description of Artificial Sequence: Synthetic oligonucleotide
  Sense strand starting at position 2584 of SEQ ID NO: 1560078
ucagaugggcuuugaggua

SEQ ID NO: 1574654 - RNA, 19 nt, Artificial Sequence
  Description of Artificial Sequence: Synthetic oligonucleotide
  Antisense strand to SEQ ID NO: 1574653
uaccucaaagcccaucuga

SEQ ID NO: 1574655 - RNA, 19 nt, Artificial Sequence
  Description of Artificial Sequence: Synthetic oligonucleotide
  Sense strand starting at position 2597 of SEQ ID NO: 1560078
gagguaugugcaggaguuc

SEQ ID NO: 1574656 - RNA, 19 nt, Artificial Sequence
  Description of Artificial Sequence: Synthetic oligonucleotide
  Antisense strand to SEQ ID NO: 1574655
gaacuccugcacauaccuc

SEQ ID NO: 1574657 - RNA, 19 nt, Artificial Sequence
  Description of Artificial Sequence: Synthetic oligonucleotide
  Sense strand starting at position 2617 of SEQ ID NO: 1560078
cuauccaagugaguuuauu

SEQ ID NO: 1574658 - RNA, 19 nt, Artificial Sequence
  Description of Artificial Sequence: Synthetic oligonucleotide
  Antisense strand to SEQ ID NO: 1574657
aauaaacucacuuggauag

SEQ ID NO: 1574659 - RNA, 19 nt, Artificial Sequence
  Description of Artificial Sequence: Synthetic oligonucleotide
  Sense strand starting at position 2667 of SEQ ID NO: 1560078
caggaugccugagugacuu

SEQ ID NO: 1574660 - RNA, 19 nt, Artificial Sequence
  Description of Artificial Sequence: Synthetic oligonucleotide
  Antisense strand to SEQ ID NO: 1574659
aagucacucaggcauccug

SEQ ID NO: 1574661 - RNA, 19 nt, Artificial Sequence
  Description of Artificial Sequence: Synthetic oligonucleotide
  Sense strand starting at position 2678 of SEQ ID NO: 1560078
agugacuuugguggugaaa

SEQ ID NO: 1574662 - RNA, 19 nt, Artificial Sequence
  Description of Artificial Sequence: Synthetic oligonucleotide
  Antisense strand to SEQ ID NO: 1574661
uuucaccaccaaagucacu

SEQ ID NO: 1574663 - RNA, 19 nt, Artificial Sequence
  Description of Artificial Sequence: Synthetic oligonucleotide
  Sense strand starting at position 2853 of SEQ ID NO: 1560078
gguacaaauguguauagca

SEQ ID NO: 1574664 - RNA, 19 nt, Artificial Sequence
  Description of Artificial Sequence: Synthetic oligonucleotide
  Antisense strand to SEQ ID NO: 1574663
ugcuauacacauuuguacc

SEQ ID NO: 1574665 - RNA, 19 nt, Artificial Sequence
  Description of Artificial Sequence: Synthetic oligonucleotide
  Sense strand starting at position 2861 of SEQ ID NO: 1560078
uguguauagcaguaaaggu

SEQ ID NO: 1574666 - RNA, 19 nt, Artificial Sequence
  Description of Artificial Sequence: Synthetic oligonucleotide
  Antisense strand to SEQ ID NO: 1574665
accuuuacugcuauacaca

SEQ ID NO: 1574667 - RNA, 19 nt, Artificial Sequence
  Description of Artificial Sequence: Synthetic oligonucleotide
  Sense strand starting at position 3016 of SEQ ID NO: 1560078
agugaucauccuggcucaa

SEQ ID NO: 1574668 - RNA, 19 nt, Artificial Sequence
  Description of Artificial Sequence: Synthetic oligonucleotide
  Antisense strand to SEQ ID NO: 1574667
uugagccaggaugaucacu

SEQ ID NO: 1574669 - RNA, 19 nt, Artificial Sequence
  Description of Artificial Sequence: Synthetic oligonucleotide
  Sense strand starting at position 3246 of SEQ ID NO: 1560078
guuaaaucuuggguuucgu

SEQ ID NO: 1574670 - RNA, 19 nt, Artificial Sequence
  Description of Artificial Sequence: Synthetic oligonucleotide
  Antisense strand to SEQ ID NO: 1574669
acgaaacccaagauuuaac

SEQ ID NO: 1574671 - RNA, 19 nt, Artificial Sequence
  Description of Artificial Sequence: Synthetic oligonucleotide
  Sense strand starting at position 3347 of SEQ ID NO: 1560078
acaggccucuuguuauauu

SEQ ID NO: 1574672 - RNA, 19 nt, Artificial Sequence
  Description of Artificial Sequence: Synthetic oligonucleotide
  Antisense strand to SEQ ID NO: 1574671
aauauaacaagaggccugu

SEQ ID NO: 1574673 - RNA, 19 nt, Artificial Sequence
  Description of Artificial Sequence: Synthetic oligonucleotide
  Sense strand starting at position 3528 of SEQ ID NO: 1560078
uccggaauggcugaaauua

SEQ ID NO: 1574674 - RNA, 19 nt, Artificial Sequence
  Description of Artificial Sequence: Synthetic oligonucleotide
  Antisense strand to SEQ ID NO: 1574673
uaauuucagccauuccgga

SEQ ID NO: 1574675 - RNA, 19 nt, Artificial Sequence
  Description of Artificial Sequence: Synthetic oligonucleotide
  Sense strand starting at position 3711 of SEQ ID NO: 1560078
ccucuucuugauggagaga

SEQ ID NO: 1574676 - RNA, 19 nt, Artificial Sequence
  Description of Artificial Sequence: Synthetic oligonucleotide
  Antisense strand to SEQ ID NO: 1574675
ucucuccaucaagaagagg

SEQ ID NO: 1574677 - RNA, 19 nt, Artificial Sequence
  Description of Artificial Sequence: Synthetic oligonucleotide
  Sense strand starting at position 3750 of SEQ ID NO: 1560078
ccaggcucucugcagugaa

SEQ ID NO: 1574678 - RNA, 19 nt, Artificial Sequence
  Description of Artificial Sequence: Synthetic oligonucleotide
  Antisense strand to SEQ ID NO: 1574677
uucacugcagagagccugg

SEQ ID NO: 1574679 - RNA, 19 nt, Artificial Sequence
  Description of Artificial Sequence: Synthetic oligonucleotide
  Sense strand starting at position 3753 of SEQ ID NO: 1560078
ggcucucugcagugaauaa

SEQ ID NO: 1574680 - RNA, 19 nt, Artificial Sequence
  Description of Artificial Sequence: Synthetic oligonucleotide
  Antisense strand to SEQ ID NO: 1574679
uuauucacugcagagagcc

SEQ ID NO: 1574681 - RNA, 19 nt, Artificial Sequence
  Description of Artificial Sequence: Synthetic oligonucleotide
  Sense strand starting at position 3763 of SEQ ID NO: 1560078
agugaauaagcuugaaccu

SEQ ID NO: 1574682 - RNA, 19 nt, Artificial Sequence
  Description of Artificial Sequence: Synthetic oligonucleotide
  Antisense strand to SEQ ID NO: 1574681
agguucaagcuuauucacu

SEQ ID NO: 1574683 - RNA, 19 nt, Artificial Sequence
  Description of Artificial Sequence: Synthetic oligonucleotide
  Sense strand starting at position 3772 of SEQ ID NO: 1560078
gcuugaaccugcguuauuu

SEQ ID NO: 1574684 - RNA, 19 nt, Artificial Sequence
  Description of Artificial Sequence: Synthetic oligonucleotide
  Antisense strand to SEQ ID NO: 1574683
aaauaacgcagguucaagc

SEQ ID NO: 1574685 - RNA, 19 nt, Artificial Sequence
  Description of Artificial Sequence: Synthetic oligonucleotide
  Sense strand starting at position 3796 of SEQ ID NO: 1560078
cucugaaacuagcugugau

SEQ ID NO: 1574686 - RNA, 19 nt, Artificial Sequence
  Description of Artificial Sequence: Synthetic oligonucleotide
  Antisense strand to SEQ ID NO: 1574685
aucacagcuaguuucagag

SEQ ID NO: 1574687 - RNA, 19 nt, Artificial Sequence
  Description of Artificial Sequence: Synthetic oligonucleotide
  Sense strand starting at position 3799 of SEQ ID NO: 1560078
ugaaacuagcugugaucuu

SEQ ID NO: 1574688 - RNA, 19 nt, Artificial Sequence
  Description of Artificial Sequence: Synthetic oligonucleotide
  Antisense strand to SEQ ID NO: 1574687
aagaucacagcuaguuuca

SEQ ID NO: 1574689 - RNA, 19 nt, Artificial Sequence
  Description of Artificial Sequence: Synthetic oligonucleotide
  Sense strand starting at position 3806 of SEQ ID NO: 1560078
agcugugaucuuuggguaa

SEQ ID NO: 1574690 - RNA, 19 nt, Artificial Sequence
  Description of Artificial Sequence: Synthetic oligonucleotide
  Antisense strand to SEQ ID NO: 1574689
uuacccaaagaucacagcu

SEQ ID NO: 1574691 - RNA, 19 nt, Artificial Sequence
  Description of Artificial Sequence: Synthetic oligonucleotide
  Sense strand starting at position 3810 of SEQ ID NO: 1560078
gugaucuuuggguaagcua

SEQ ID NO: 1574692 - RNA, 19 nt, Artificial Sequence
  Description of Artificial Sequence: Synthetic oligonucleotide
  Antisense strand to SEQ ID NO: 1574691
uagcuuacccaaagaucac

SEQ ID NO: 1574693 - RNA, 19 nt, Artificial Sequence
  Description of Artificial Sequence: Synthetic oligonucleotide
  Sense strand starting at position 3896 of SEQ ID NO: 1560078
ugucguugcaaugaaagga

SEQ ID NO: 1574694 - RNA, 19 nt, Artificial Sequence
  Description of Artificial Sequence: Synthetic oligonucleotide
  Antisense strand to SEQ ID NO: 1574693
uccuuucauugcaacgaca

SEQ ID NO: 1574695 - RNA, 19 nt, Artificial Sequence
  Description of Artificial Sequence: Synthetic oligonucleotide
  Sense strand starting at position 3900 of SEQ ID NO: 1560078
guugcaaugaaaggaaaua

SEQ ID NO: 1574696 - RNA, 19 nt, Artificial Sequence
  Description of Artificial Sequence: Synthetic oligonucleotide
  Antisense strand to SEQ ID NO: 1574695
uauuuccuuucauugcaac

SEQ ID NO: 1574697 - RNA, 19 nt, Artificial Sequence
  Description of Artificial Sequence: Synthetic oligonucleotide
  Sense strand starting at position 3911 of SEQ ID NO: 1560078
aggaaauauguugggucaa

SEQ ID NO: 1574698 - RNA, 19 nt, Artificial Sequence
  Description of Artificial Sequence: Synthetic oligonucleotide
  Antisense strand to SEQ ID NO: 1574697
uugacccaacauauuuccu

SEQ ID NO: 1574699 - RNA, 19 nt, Artificial Sequence
  Description of Artificial Sequence: Synthetic oligonucleotide
  Sense strand starting at position 3913 of SEQ ID NO: 1560078
gaaauauguugggucaauc

SEQ ID NO: 1574700 - RNA, 19 nt, Artificial Sequence
  Description of Artificial Sequence: Synthetic oligonucleotide
  Antisense strand to SEQ ID NO: 1574699
gauugacccaacauauuuc

SEQ ID NO: 1574701 - RNA, 19 nt, Artificial Sequence
  Description of Artificial Sequence: Synthetic oligonucleotide
  Sense strand starting at position 3931 of SEQ ID NO: 1560078
cucugaaugcacugguaau

SEQ ID NO: 1574702 - RNA, 19 nt, Artificial Sequence
  Description of Artificial Sequence: Synthetic oligonucleotide
  Antisense strand to SEQ ID NO: 1574701
auuaccagugcauucagag

SEQ ID NO: 1574703 - RNA, 19 nt, Artificial Sequence
  Description of Artificial Sequence: Synthetic oligonucleotide
  Sense strand starting at position 3942 of SEQ ID NO: 1560078
cugguaaucuugcuagaua

SEQ ID NO: 1574704 - RNA, 19 nt, Artificial Sequence
  Description of Artificial Sequence: Synthetic oligonucleotide
  Antisense strand to SEQ ID NO: 1574703
uaucuagcaagauuaccag

SEQ ID NO: 1574705 - RNA, 19 nt, Artificial Sequence
  Description of Artificial Sequence: Synthetic oligonucleotide
  Sense strand starting at position 3945 of SEQ ID NO: 1560078
guaaucuugcuagauauug

SEQ ID NO: 1574706 - RNA, 19 nt, Artificial Sequence
  Description of Artificial Sequence: Synthetic oligonucleotide
  Antisense strand to SEQ ID NO: 1574705
caauaucuagcaagauuac

SEQ ID NO: 1574707 - RNA, 19 nt, Artificial Sequence
  Description of Artificial Sequence: Synthetic oligonucleotide
  Sense strand starting at position 469 of SEQ ID NO: 1560079
cgcuuauaugcccagcuaa

SEQ ID NO: 1574708 - RNA, 19 nt, Artificial Sequence
  Description of Artificial Sequence: Synthetic oligonucleotide
  Antisense strand to SEQ ID NO: 1574707
uuagcugggcauauaagcg

SEQ ID NO: 1574709 - RNA, 19 nt, Artificial Sequence
  Description of Artificial Sequence: Synthetic oligonucleotide
  Sense strand starting at position 789 of SEQ ID NO: 1560079
ccguuuccucuuugacaca

SEQ ID NO: 1574710 - RNA, 19 nt, Artificial Sequence
  Description of Artificial Sequence: Synthetic oligonucleotide
  Antisense strand to SEQ ID NO: 1574709
ugugucaaagaggaaacgg

SEQ ID NO: 1574711 - RNA, 19 nt, Artificial Sequence
  Description of Artificial Sequence: Synthetic oligonucleotide
  Sense strand starting at position 815 of SEQ ID NO: 1560079
caaggcaaugccuguguua

SEQ ID NO: 1574712 - RNA, 19 nt, Artificial Sequence
  Description of Artificial Sequence: Synthetic oligonucleotide
  Antisense strand to SEQ ID NO: 1574711
uaacacaggcauugccuug

SEQ ID NO: 1574713 - RNA, 19 nt, Artificial Sequence
  Description of Artificial Sequence: Synthetic oligonucleotide
  Sense strand starting at position 817 of SEQ ID NO: 1560079
aggcaaugccuguguuaca

SEQ ID NO: 1574714 - RNA, 19 nt, Artificial Sequence
  Description of Artificial Sequence: Synthetic oligonucleotide
  Antisense strand to SEQ ID NO: 1574713
uguaacacaggcauugccu

SEQ ID NO: 1574715 - RNA, 19 nt, Artificial Sequence
  Description of Artificial Sequence: Synthetic oligonucleotide
  Sense strand starting at position 918 of SEQ ID NO: 1560079
gugcauuccuucugacacu

SEQ ID NO: 1574716 - RNA, 19 nt, Artificial Sequence
  Description of Artificial Sequence: Synthetic oligonucleotide
  Antisense strand to SEQ ID NO: 1574715
agugucagaaggaaugcac

SEQ ID NO: 1574717 - RNA, 19 nt, Artificial Sequence
  Description of Artificial Sequence: Synthetic oligonucleotide
  Sense strand starting at position 1022 of SEQ ID NO: 1560079
ccaucucugucaugcagaa

SEQ ID NO: 1574718 - RNA, 19 nt, Artificial Sequence
  Description of Artificial Sequence: Synthetic oligonucleotide
  Antisense strand to SEQ ID NO: 1574717
uucugcaugacagagaugg

SEQ ID NO: 1574719 - RNA, 19 nt, Artificial Sequence
  Description of Artificial Sequence: Synthetic oligonucleotide
  Sense strand starting at position 1034 of SEQ ID NO: 1560079
ugcagaacaucucaaacga

SEQ ID NO: 1574720 - RNA, 19 nt, Artificial Sequence
  Description of Artificial Sequence: Synthetic oligonucleotide
  Antisense strand to SEQ ID NO: 1574719
ucguuugagauguucugca

SEQ ID NO: 1574721 - RNA, 19 nt, Artificial Sequence
  Description of Artificial Sequence: Synthetic oligonucleotide
  Sense strand starting at position 1057 of SEQ ID NO: 1560079
gcauaauggccucaugcca

SEQ ID NO: 1574722 - RNA, 19 nt, Artificial Sequence
  Description of Artificial Sequence: Synthetic oligonucleotide
  Antisense strand to SEQ ID NO: 1574721
uggcaugaggccauuaugc

SEQ ID NO: 1574723 - RNA, 19 nt, Artificial Sequence
  Description of Artificial Sequence: Synthetic oligonucleotide
  Sense strand starting at position 1062 of SEQ ID NO: 1560079
auggccucaugccaguaau

SEQ ID NO: 1574724 - RNA, 19 nt, Artificial Sequence
  Description of Artificial Sequence: Synthetic oligonucleotide
  Antisense strand to SEQ ID NO: 1574723
auuacuggcaugaggccau

SEQ ID NO: 1574725 - RNA, 19 nt, Artificial Sequence
  Description of Artificial Sequence: Synthetic oligonucleotide
  Sense strand starting at position 1363 of SEQ ID NO: 1560079
gcaagagcaucugaguaac

SEQ ID NO: 1574726 - RNA, 19 nt, Artificial Sequence
  Description of Artificial Sequence: Synthetic oligonucleotide
  Antisense strand to SEQ ID NO: 1574725
guuacucagaugcucuugc

SEQ ID NO: 1574727 - RNA, 19 nt, Artificial Sequence
  Description of Artificial Sequence: Synthetic oligonucleotide
  Sense strand starting at position 1448 of SEQ ID NO: 1560079
gaaggccuguucuagauuu

SEQ ID NO: 1574728 - RNA, 19 nt, Artificial Sequence
  Description of Artificial Sequence: Synthetic oligonucleotide
  Antisense strand to SEQ ID NO: 1574727
aaaucuagaacaggccuuc

SEQ ID NO: 1574729 - RNA, 19 nt, Artificial Sequence
  Description of Artificial Sequence: Synthetic oligonucleotide
  Sense strand starting at position 1628 of SEQ ID NO: 1560079
guggaauucuuagucaccu

SEQ ID NO: 1574730 - RNA, 19 nt, Artificial Sequence
  Description of Artificial Sequence: Synthetic oligonucleotide
  Antisense strand to SEQ ID NO: 1574729
aggugacuaagaauuccac

SEQ ID NO: 1574731 - RNA, 19 nt, Artificial Sequence
  Description of Artificial Sequence: Synthetic oligonucleotide
  Sense strand starting at position 1629 of SEQ ID NO: 1560079
uggaauucuuagucaccuu

SEQ ID NO: 1574732 - RNA, 19 nt, Artificial Sequence
  Description of Artificial Sequence: Synthetic oligonucleotide
  Antisense strand to SEQ ID NO: 1574731
aaggugacuaagaauucca

SEQ ID NO: 1574733 - RNA, 19 nt, Artificial Sequence
  Description of Artificial Sequence: Synthetic oligonucleotide
  Sense strand starting at position 1847 of SEQ ID NO: 1560079
cagaguugacggcgagagu

SEQ ID NO: 1574734 - RNA, 19 nt, Artificial Sequence
  Description of Artificial Sequence: Synthetic oligonucleotide
  Antisense strand to SEQ ID NO: 1574733
acucucgccgucaacucug

SEQ ID NO: 1574735 - RNA, 19 nt, Artificial Sequence
  Description of Artificial Sequence: Synthetic oligonucleotide
  Sense strand starting at position 1848 of SEQ ID NO: 1560079
agaguugacggcgagaguu
